United States Patent Application Publication US 2025/0171800 A1 - sequence listing, part 6

SEQ ID NO: 114864 - DNA, 22 bp, synthetic construct
  misc_feature 1..22: note = chemically synthesized
  source 1..22: mol_type = other DNA
atctatactcttctttcttcct

SEQ ID NO: 114865 - DNA, 22 bp, synthetic construct
  misc_feature 1..22: note = chemically synthesized
  source 1..22: mol_type = other DNA
tctatactcttctttcttcctt

SEQ ID NO: 114866 - DNA, 22 bp, synthetic construct
  misc_feature 1..22: note = chemically synthesized
  source 1..22: mol_type = other DNA
tactcttctttcttcctttgga

SEQ ID NO: 114867 - DNA, 22 bp, synthetic construct
  misc_feature 1..22: note = chemically synthesized
  source 1..22: mol_type = other DNA
ttctttcttcctttggaaccta

SEQ ID NO: 114868 - DNA, 22 bp, synthetic construct
  misc_feature 1..22: note = chemically synthesized
  source 1..22: mol_type = other DNA
ctttcttcctttggaacctact

SEQ ID NO: 114869 - DNA, 22 bp, synthetic construct
  misc_feature 1..22: note = chemically synthesized
  source 1..22: mol_type = other DNA
tttcttcctttggaacctactc

SEQ ID NO: 114870 - DNA, 22 bp, synthetic construct
  misc_feature 1..22: note = chemically synthesized
  source 1..22: mol_type = other DNA
tcttcctttggaacctactcat

SEQ ID NO: 114871 - DNA, 22 bp, synthetic construct
  misc_feature 1..22: note = chemically synthesized
  source 1..22: mol_type = other DNA
cttcctttggaacctactcatt

SEQ ID NO: 114872 - DNA, 22 bp, synthetic construct
  misc_feature 1..22: note = chemically synthesized
  source 1..22: mol_type = other DNA
ttcctttggaacctactcattg

SEQ ID NO: 114873 - DNA, 22 bp, synthetic construct
  misc_feature 1..22: note = chemically synthesized
  source 1..22: mol_type = other DNA
cctttggaacctactcattggc

SEQ ID NO: 114874 - DNA, 22 bp, synthetic construct
  misc_feature 1..22: note = chemically synthesized
  source 1..22: mol_type = other DNA
ctttggaacctactcattggct

SEQ ID NO: 114875 - DNA, 22 bp, synthetic construct
  misc_feature 1..22: note = chemically synthesized
  source 1..22: mol_type = other DNA
tggaacctactcattggcttca

SEQ ID NO: 114876 - DNA, 22 bp, synthetic construct
  misc_feature 1..22: note = chemically synthesized
  source 1..22: mol_type = other DNA
ggaacctactcattggcttcac

SEQ ID NO: 114877 - DNA, 22 bp, synthetic construct
  misc_feature 1..22: note = chemically synthesized
  source 1..22: mol_type = other DNA
gaacctactcattggcttcaca

SEQ ID NO: 114878 - DNA, 22 bp, synthetic construct
  misc_feature 1..22: note = chemically synthesized
  source 1..22: mol_type = other DNA
ctcattggcttcacatttttgt

SEQ ID NO: 114879 - DNA, 22 bp, synthetic construct
  misc_feature 1..22: note = chemically synthesized
  source 1..22: mol_type = other DNA
attggcttcacatttttgttat

SEQ ID NO: 114880 - DNA, 22 bp, synthetic construct
  misc_feature 1..22: note = chemically synthesized
  source 1..22: mol_type = other DNA
gcttcacatttttgttattacc

SEQ ID NO: 114881 - DNA, 22 bp, synthetic construct
  misc_feature 1..22: note = chemically synthesized
  source 1..22: mol_type = other DNA
cacatttttgttattacctgct

SEQ ID NO: 114882 - DNA, 22 bp, synthetic construct
  misc_feature 1..22: note = chemically synthesized
  source 1..22: mol_type = other DNA
acatttttgttattacctgctg

SEQ ID NO: 114883 - DNA, 22 bp, synthetic construct
  misc_feature 1..22: note = chemically synthesized
  source 1..22: mol_type = other DNA
ttgttattacctgctggtgagt

SEQ ID NO: 114884 - DNA, 22 bp, synthetic construct
  misc_feature 1..22: note = chemically synthesized
  source 1..22: mol_type = other DNA
tgttattacctgctggtgagtc

SEQ ID NO: 114885 - DNA, 22 bp, synthetic construct
  misc_feature 1..22: note = chemically synthesized
  source 1..22: mol_type = other DNA
gttattacctgctggtgagtct

SEQ ID NO: 114886 - DNA, 22 bp, synthetic construct
  misc_feature 1..22: note = chemically synthesized
  source 1..22: mol_type = other DNA
ttattacctgctggtgagtctc

SEQ ID NO: 114887 - DNA, 22 bp, synthetic construct
  misc_feature 1..22: note = chemically synthesized
  source 1..22: mol_type = other DNA
ttacctgctggtgagtctcact

SEQ ID NO: 114888 - DNA, 22 bp, synthetic construct
  misc_feature 1..22: note = chemically synthesized
  source 1..22: mol_type = other DNA
cctgctggtgagtctcactact

SEQ ID NO: 114889 - DNA, 22 bp, synthetic construct
  misc_feature 1..22: note = chemically synthesized
  source 1..22: mol_type = other DNA
ctggtgagtctcactactgtct

SEQ ID NO: 114890 - DNA, 22 bp, synthetic construct
  misc_feature 1..22: note = chemically synthesized
  source 1..22: mol_type = other DNA
gtgagtctcactactgtcttgt

SEQ ID NO: 114891 - DNA, 22 bp, synthetic construct
  misc_feature 1..22: note = chemically synthesized
  source 1..22: mol_type = other DNA
actactgtcttgtgccggggtt

SEQ ID NO: 114892 - DNA, 22 bp, synthetic construct
  misc_feature 1..22: note = chemically synthesized
  source 1..22: mol_type = other DNA
ctgtcttgtgccggggtttcag

SEQ ID NO: 114893 - DNA, 22 bp, synthetic construct
  misc_feature 1..22: note = chemically synthesized
  source 1..22: mol_type = other DNA
tcttgtgccggggtttcaggag

SEQ ID NO: 114894 - DNA, 22 bp, synthetic construct
  misc_feature 1..22: note = chemically synthesized
  source 1..22: mol_type = other DNA
gtgccggggtttcaggagtggg

SEQ ID NO: 114895 - DNA, 22 bp, synthetic construct
  misc_feature 1..22: note = chemically synthesized
  source 1..22: mol_type = other DNA
tgccggggtttcaggagtgggt

SEQ ID NO: 114896 - DNA, 22 bp, synthetic construct
  misc_feature 1..22: note = chemically synthesized
  source 1..22: mol_type = other DNA
caggagtgggtaattaggggga

SEQ ID NO: 114897 - DNA, 22 bp, synthetic construct
  misc_feature 1..22: note = chemically synthesized
  source 1..22: mol_type = other DNA
aggagtgggtaattagggggac

SEQ ID NO: 114898 - DNA, 22 bp, synthetic construct
  misc_feature 1..22: note = chemically synthesized
  source 1..22: mol_type = other DNA
gggggacatgggagagaggagg

SEQ ID NO: 114899 - DNA, 22 bp, synthetic construct
  misc_feature 1..22: note = chemically synthesized
  source 1..22: mol_type = other DNA
agttacaattaaggcttttccc

SEQ ID NO: 114900 - DNA, 22 bp, synthetic construct
  misc_feature 1..22: note = chemically synthesized
  source 1..22: mol_type = other DNA
caattaaggcttttcccccaaa

SEQ ID NO: 114901 - DNA, 22 bp, synthetic construct
  misc_feature 1..22: note = chemically synthesized
  source 1..22: mol_type = other DNA
aggcttttcccccaaatgtttg

SEQ ID NO: 114902 - DNA, 22 bp, synthetic construct
  misc_feature 1..22: note = chemically synthesized
  source 1..22: mol_type = other DNA
ttcccccaaatgtttgaatgtc

SEQ ID NO: 114903 - DNA, 22 bp, synthetic construct
  misc_feature 1..22: note = chemically synthesized
  source 1..22: mol_type = other DNA
tcccccaaatgtttgaatgtcc

SEQ ID NO: 114904 - DNA, 22 bp, synthetic construct
  misc_feature 1..22: note = chemically synthesized
  source 1..22: mol_type = other DNA
cccccaaatgtttgaatgtcct

SEQ ID NO: 114905 - DNA, 22 bp, synthetic construct
  misc_feature 1..22: note = chemically synthesized
  source 1..22: mol_type = other DNA
ccccaaatgtttgaatgtcctt

SEQ ID NO: 114906 - DNA, 22 bp, synthetic construct
  misc_feature 1..22: note = chemically synthesized
  source 1..22: mol_type = other DNA
gaatgtccttagccaaatggat

SEQ ID NO: 114907 - DNA, 22 bp, synthetic construct
  misc_feature 1..22: note = chemically synthesized
  source 1..22: mol_type = other DNA
aatgtccttagccaaatggatt

SEQ ID NO: 114908 - DNA, 22 bp, synthetic construct
  misc_feature 1..22: note = chemically synthesized
  source 1..22: mol_type = other DNA
agccaaatggattccccacatt

SEQ ID NO: 114909 - DNA, 22 bp, synthetic construct
  misc_feature 1..22: note = chemically synthesized
  source 1..22: mol_type = other DNA
gccaaatggattccccacattc

SEQ ID NO: 114910 - DNA, 22 bp, synthetic construct
  misc_feature 1..22: note = chemically synthesized
  source 1..22: mol_type = other DNA
cccacattccctgcactaagcc

SEQ ID NO: 114911 - DNA, 22 bp, synthetic construct
  misc_feature 1..22: note = chemically synthesized
  source 1..22: mol_type = other DNA
cctgcactaagcctaatgggat

SEQ ID NO: 114912 - DNA, 22 bp, synthetic construct
  misc_feature 1..22: note = chemically synthesized
  source 1..22: mol_type = other DNA
cactaagcctaatgggattttt

SEQ ID NO: 114913 - DNA, 22 bp, synthetic construct
  misc_feature 1..22: note = chemically synthesized
  source 1..22: mol_type = other DNA
agcctaatgggatttttttttc

SEQ ID NO: 114914 - DNA, 22 bp, synthetic construct
  misc_feature 1..22: note = chemically synthesized
  source 1..22: mol_type = other DNA
atgggatttttttttctttgtt

SEQ ID NO: 114915 - DNA, 22 bp, synthetic construct
  misc_feature 1..22: note = chemically synthesized
  source 1..22: mol_type = other DNA
ttttttctttgttttcttttgt

SEQ ID NO: 114916 - DNA, 22 bp, synthetic construct
  misc_feature 1..22: note = chemically synthesized
  source 1..22: mol_type = other DNA
tttttctttgttttcttttgtt

SEQ ID NO: 114917 - DNA, 22 bp, synthetic construct
  misc_feature 1..22: note = chemically synthesized
  source 1..22: mol_type = other DNA
ttttctttgttttcttttgttg

SEQ ID NO: 114918 - DNA, 22 bp, synthetic construct
  misc_feature 1..22: note = chemically synthesized
  source 1..22: mol_type = other DNA
tttctttgttttcttttgttgt

SEQ ID NO: 114919 - DNA, 22 bp, synthetic construct
  misc_feature 1..22: note = chemically synthesized
  source 1..22: mol_type = other DNA
ttctttgttttcttttgttgtt

SEQ ID NO: 114920 - DNA, 22 bp, synthetic construct
  misc_feature 1..22: note = chemically synthesized
  source 1..22: mol_type = other DNA
tctttgttttcttttgttgttg

SEQ ID NO: 114921 - DNA, 22 bp, synthetic construct
  misc_feature 1..22: note = chemically synthesized
  source 1..22: mol_type = other DNA
ctttgttttcttttgttgttgt

SEQ ID NO: 114922 - DNA, 22 bp, synthetic construct
  misc_feature 1..22: note = chemically synthesized
  source 1..22: mol_type = other DNA
tttgttttcttttgttgttgtt

SEQ ID NO: 114923 - DNA, 22 bp, synthetic construct
  misc_feature 1..22: note = chemically synthesized
  source 1..22: mol_type = other DNA
tgttttcttttgttgttgtttc

SEQ ID NO: 114924 - DNA, 22 bp, synthetic construct
  misc_feature 1..22: note = chemically synthesized
  source 1..22: mol_type = other DNA
gttttcttttgttgttgtttct

SEQ ID NO: 114925 - DNA, 22 bp, synthetic construct
  misc_feature 1..22: note = chemically synthesized
  source 1..22: mol_type = other DNA
ttttcttttgttgttgtttctt

SEQ ID NO: 114926 - DNA, 22 bp, synthetic construct
  misc_feature 1..22: note = chemically synthesized
  source 1..22: mol_type = other DNA
tcttttgttgttgtttctttgt

SEQ ID NO: 114927 - DNA, 22 bp, synthetic construct
  misc_feature 1..22: note = chemically synthesized
  source 1..22: mol_type = other DNA
cttttgttgttgtttctttgtt

SEQ ID NO: 114928 - DNA, 22 bp, synthetic construct
  misc_feature 1..22: note = chemically synthesized
  source 1..22: mol_type = other DNA
ttttgttgttgtttctttgttt

SEQ ID NO: 114929 - DNA, 22 bp, synthetic construct
  misc_feature 1..22: note = chemically synthesized
  source 1..22: mol_type = other DNA
ttgttgttgtttctttgtttgt

SEQ ID NO: 114930 - DNA, 22 bp, synthetic construct
  misc_feature 1..22: note = chemically synthesized
  source 1..22: mol_type = other DNA
tgttgttgtttctttgtttgtt

SEQ ID NO: 114931 - DNA, 22 bp, synthetic construct
  misc_feature 1..22: note = chemically synthesized
  source 1..22: mol_type = other DNA
gttgttgtttctttgtttgttg

SEQ ID NO: 114932 - DNA, 22 bp, synthetic construct
  misc_feature 1..22: note = chemically synthesized
  source 1..22: mol_type = other DNA
ttgttgtttctttgtttgttgt

SEQ ID NO: 114933 - DNA, 22 bp, synthetic construct
  misc_feature 1..22: note = chemically synthesized
  source 1..22: mol_type = other DNA
ttgtttctttgtttgttgtttt

SEQ ID NO: 114934 - DNA, 22 bp, synthetic construct
  misc_feature 1..22: note = chemically synthesized
  source 1..22: mol_type = other DNA
tttctttgtttgttgtttttag

SEQ ID NO: 114935 - DNA, 22 bp, synthetic construct
  misc_feature 1..22: note = chemically synthesized
  source 1..22: mol_type = other DNA
ctttgtttgttgtttttagaaa

SEQ ID NO: 114936 - DNA, 22 bp, synthetic construct
  misc_feature 1..22: note = chemically synthesized
  source 1..22: mol_type = other DNA
tttgtttgttgtttttagaaat

SEQ ID NO: 114937 - DNA, 22 bp, synthetic construct
  misc_feature 1..22: note = chemically synthesized
  source 1..22: mol_type = other DNA
tgtttgttgtttttagaaatga

SEQ ID NO: 114938 - DNA, 22 bp, synthetic construct
  misc_feature 1..22: note = chemically synthesized
  source 1..22: mol_type = other DNA
gtttgttgtttttagaaatgag

SEQ ID NO: 114939 - DNA, 22 bp, synthetic construct
  misc_feature 1..22: note = chemically synthesized
  source 1..22: mol_type = other DNA
tttgttgtttttagaaatgagg

SEQ ID NO: 114940 - DNA, 22 bp, synthetic construct
  misc_feature 1..22: note = chemically synthesized
  source 1..22: mol_type = other DNA
gttgtttttagaaatgaggtct

SEQ ID NO: 114941 - DNA, 22 bp, synthetic construct
  misc_feature 1..22: note = chemically synthesized
  source 1..22: mol_type = other DNA
ttgtttttagaaatgaggtcta

SEQ ID NO: 114942 - DNA, 22 bp, synthetic construct
  misc_feature 1..22: note = chemically synthesized
  source 1..22: mol_type = other DNA
tttttagaaatgaggtctagct

SEQ ID NO: 114943 - DNA, 22 bp, synthetic construct
  misc_feature 1..22: note = chemically synthesized
  source 1..22: mol_type = other DNA
ttagaaatgaggtctagctctg

SEQ ID NO: 114944 - DNA, 22 bp, synthetic construct
  misc_feature 1..22: note = chemically synthesized
  source 1..22: mol_type = other DNA
tagaaatgaggtctagctctgt

SEQ ID NO: 114945 - DNA, 22 bp, synthetic construct
  misc_feature 1..22: note = chemically synthesized
  source 1..22: mol_type = other DNA
agaaatgaggtctagctctgtt

SEQ ID NO: 114946 - DNA, 22 bp, synthetic construct
  misc_feature 1..22: note = chemically synthesized
  source 1..22: mol_type = other DNA
gaaatgaggtctagctctgtta

SEQ ID NO: 114947 - DNA, 22 bp, synthetic construct
  misc_feature 1..22: note = chemically synthesized
  source 1..22: mol_type = other DNA
gctctgttacccaggctacagt

SEQ ID NO: 114948 - DNA, 22 bp, synthetic construct
  misc_feature 1..22: note = chemically synthesized
  source 1..22: mol_type = other DNA
tgttacccaggctacagtgcag

SEQ ID NO: 114949 - DNA, 22 bp, synthetic construct
  misc_feature 1..22: note = chemically synthesized
  source 1..22: mol_type = other DNA
ttacccaggctacagtgcagtg

SEQ ID NO: 114950 - DNA, 22 bp, synthetic construct
  misc_feature 1..22: note = chemically synthesized
  source 1..22: mol_type = other DNA
cccaggctacagtgcagtggtg

SEQ ID NO: 114951 - DNA, 22 bp, synthetic construct
  misc_feature 1..22: note = chemically synthesized
  source 1..22: mol_type = other DNA
cagtgcagtggtgtaatcatag

SEQ ID NO: 114952 - DNA, 22 bp, synthetic construct
  misc_feature 1..22: note = chemically synthesized
  source 1..22: mol_type = other DNA
actgtaaactcaaaccggattc

SEQ ID NO: 114953 - DNA, 22 bp, synthetic construct
  misc_feature 1..22: note = chemically synthesized
  source 1..22: mol_type = other DNA
taaactcaaaccggattcaagc

SEQ ID NO: 114954 - DNA, 22 bp, synthetic construct
  misc_feature 1..22: note = chemically synthesized
  source 1..22: mol_type = other DNA
aaaccggattcaagcaatcctc

SEQ ID NO: 114955 - DNA, 22 bp, synthetic construct
  misc_feature 1..22: note = chemically synthesized
  source 1..22: mol_type = other DNA
aagcaatcctcccaccttattc

SEQ ID NO: 114956 - DNA, 22 bp, synthetic construct
  misc_feature 1..22: note = chemically synthesized
  source 1..22: mol_type = other DNA
ccaccttattcttccaagttgc

SEQ ID NO: 114957 - DNA, 22 bp, synthetic construct
  misc_feature 1..22: note = chemically synthesized
  source 1..22: mol_type = other DNA
attcttccaagttgccaggatt

SEQ ID NO: 114958 - DNA, 22 bp, synthetic construct
  misc_feature 1..22: note = chemically synthesized
  source 1..22: mol_type = other DNA
ttcttccaagttgccaggatta

SEQ ID NO: 114959 - DNA, 22 bp, synthetic construct
  misc_feature 1..22: note = chemically synthesized
  source 1..22: mol_type = other DNA
ttccaagttgccaggattataa

SEQ ID NO: 114960 - DNA, 22 bp, synthetic construct
  misc_feature 1..22: note = chemically synthesized
  source 1..22: mol_type = other DNA
ccaagttgccaggattataagt

SEQ ID NO: 114961 - DNA, 22 bp, synthetic construct
  misc_feature 1..22: note = chemically synthesized
  source 1..22: mol_type = other DNA
caagttgccaggattataagtg

SEQ ID NO: 114962 - DNA, 22 bp, synthetic construct
  misc_feature 1..22: note = chemically synthesized
  source 1..22: mol_type = other DNA
ccaggattataagtgtgaacca

SEQ ID NO: 114963 - DNA, 22 bp, synthetic construct
  misc_feature 1..22: note = chemically synthesized
  source 1..22: mol_type = other DNA
taagtgtgaaccaccatataca

SEQ ID NO: 114964 - DNA, 22 bp, synthetic construct
  misc_feature 1..22: note = chemically synthesized
  source 1..22: mol_type = other DNA
ggccttagatttttcacttgga

SEQ ID NO: 114965 - DNA, 22 bp, synthetic construct
  misc_feature 1..22: note = chemically synthesized
  source 1..22: mol_type = other DNA
agatttttcacttggaaaatga

SEQ ID NO: 114966 - DNA, 22 bp, synthetic construct
  misc_feature 1..22: note = chemically synthesized
  source 1..22: mol_type = other DNA
gatttttcacttggaaaatgaa

SEQ ID NO: 114967 - DNA, 22 bp, synthetic construct
  misc_feature 1..22: note = chemically synthesized
  source 1..22: mol_type = other DNA
ttcacttggaaaatgaagtctt

SEQ ID NO: 114968 - DNA, 22 bp, synthetic construct
  misc_feature 1..22: note = chemically synthesized
  source 1..22: mol_type = other DNA
tcacttggaaaatgaagtctta

SEQ ID NO: 114969 - DNA, 22 bp, synthetic construct
  misc_feature 1..22: note = chemically synthesized
  source 1..22: mol_type = other DNA
cacttggaaaatgaagtcttag

SEQ ID NO: 114970 - DNA, 22 bp, synthetic construct
  misc_feature 1..22: note = chemically synthesized
  source 1..22: mol_type = other DNA
acttggaaaatgaagtcttaga

SEQ ID NO: 114971 - DNA, 22 bp, synthetic construct
  misc_feature 1..22: note = chemically synthesized
  source 1..22: mol_type = other DNA
ggaaaatgaagtcttagaaacc

SEQ ID NO: 114972 - DNA, 22 bp, synthetic construct
  misc_feature 1..22: note = chemically synthesized
  source 1..22: mol_type = other DNA
gaaaatgaagtcttagaaacca

SEQ ID NO: 114973 - DNA, 22 bp, synthetic construct
  misc_feature 1..22: note = chemically synthesized
  source 1..22: mol_type = other DNA
agaaaccagggttctcacagaa

SEQ ID NO: 114974 - DNA, 22 bp, synthetic construct
  misc_feature 1..22: note = chemically synthesized
  source 1..22: mol_type = other DNA
gaaaccagggttctcacagaat

SEQ ID NO: 114975 - DNA, 22 bp, synthetic construct
  misc_feature 1..22: note = chemically synthesized
  source 1..22: mol_type = other DNA
tcacagaatctcttctgatatt

SEQ ID NO: 114976 - DNA, 22 bp, synthetic construct
  misc_feature 1..22: note = chemically synthesized
  source 1..22: mol_type = other DNA
acagaatctcttctgatattct

SEQ ID NO: 114977 - DNA, 22 bp, synthetic construct
  misc_feature 1..22: note = chemically synthesized
  source 1..22: mol_type = other DNA
ttctgatattctcagagtctat

SEQ ID NO: 114978 - DNA, 22 bp, synthetic construct
  misc_feature 1..22: note = chemically synthesized
  source 1..22: mol_type = other DNA
ctgatattctcagagtctatgc

SEQ ID NO: 114979 - DNA, 22 bp, synthetic construct
  misc_feature 1..22: note = chemically synthesized
  source 1..22: mol_type = other DNA
tgatattctcagagtctatgca

SEQ ID NO: 114980 - DNA, 22 bp, synthetic construct
  misc_feature 1..22: note = chemically synthesized
  source 1..22: mol_type = other DNA
atattctcagagtctatgcaca

SEQ ID NO: 114981 - DNA, 22 bp, synthetic construct
  misc_feature 1..22: note = chemically synthesized
  source 1..22: mol_type = other DNA
tcagagtctatgcacagaacca

SEQ ID NO: 114982 - DNA, 22 bp, synthetic construct
  misc_feature 1..22: note = chemically synthesized
  source 1..22: mol_type = other DNA
agagtctatgcacagaaccaga

SEQ ID NO: 114983 - DNA, 22 bp, synthetic construct
  misc_feature 1..22: note = chemically synthesized
  source 1..22: mol_type = other DNA
tgcacagaaccagagccagaga

SEQ ID NO: 114984 - DNA, 22 bp, synthetic construct
  misc_feature 1..22: note = chemically synthesized
  source 1..22: mol_type = other DNA
ctcttgctggaaaagaggcgag

SEQ ID NO: 114985 - DNA, 22 bp, synthetic construct
  misc_feature 1..22: note = chemically synthesized
  source 1..22: mol_type = other DNA
tcttgctggaaaagaggcgagc

SEQ ID NO: 114986 - DNA, 22 bp, synthetic construct
  misc_feature 1..22: note = chemically synthesized
  source 1..22: mol_type = other DNA
ttgctggaaaagaggcgagctc

SEQ ID NO: 114987 - DNA, 22 bp, synthetic construct
  misc_feature 1..22: note = chemically synthesized
  source 1..22: mol_type = other DNA
gctggaaaagaggcgagctcat

SEQ ID NO: 114988 - DNA, 22 bp, synthetic construct
  misc_feature 1..22: note = chemically synthesized
  source 1..22: mol_type = other DNA
ctggaaaagaggcgagctcatc

SEQ ID NO: 114989 - DNA, 22 bp, synthetic construct
  misc_feature 1..22: note = chemically synthesized
  source 1..22: mol_type = other DNA
gaaaagaggcgagctcatctgc

SEQ ID NO: 114990 - DNA, 22 bp, synthetic construct
  misc_feature 1..22: note = chemically synthesized
  source 1..22: mol_type = other DNA
atctgcagtattctgttaggaa

SEQ ID NO: 114991 - DNA, 22 bp, synthetic construct
  misc_feature 1..22: note = chemically synthesized
  source 1..22: mol_type = other DNA
cagtattctgttaggaaggcca

SEQ ID NO: 114992 - DNA, 22 bp, synthetic construct
  misc_feature 1..22: note = chemically synthesized
  source 1..22: mol_type = other DNA
tgttaggaaggccaggaggcag

SEQ ID NO: 114993 - DNA, 22 bp, synthetic construct
  misc_feature 1..22: note = chemically synthesized
  source 1..22: mol_type = other DNA
ttaggaaggccaggaggcaggg

SEQ ID NO: 114994 - DNA, 22 bp, synthetic construct
  misc_feature 1..22: note = chemically synthesized
  source 1..22: mol_type = other DNA
ggaaggccaggaggcagggctg

SEQ ID NO: 114995 - DNA, 22 bp, synthetic construct
  misc_feature 1..22: note = chemically synthesized
  source 1..22: mol_type = other DNA
cctcactcccctgatgagtgcc

SEQ ID NO: 114996 - DNA, 22 bp, synthetic construct
  misc_feature 1..22: note = chemically synthesized
  source 1..22: mol_type = other DNA
actcccctgatgagtgcctgca

SEQ ID NO: 114997 - DNA, 22 bp, synthetic construct
  misc_feature 1..22: note = chemically synthesized
  source 1..22: mol_type = other DNA
ccctgatgagtgcctgcatggc

SEQ ID NO: 114998 - DNA, 22 bp, synthetic construct
  misc_feature 1..22: note = chemically synthesized
  source 1..22: mol_type = other DNA
atgagtgcctgcatggccaggc

SEQ ID NO: 114999 - DNA, 22 bp, synthetic construct
  misc_feature 1..22: note = chemically synthesized
  source 1..22: mol_type = other DNA
catggccaggccagcccctccc

SEQ ID NO: 115000 - DNA, 22 bp, synthetic construct
  misc_feature 1..22: note = chemically synthesized
  source 1..22: mol_type = other DNA
cctggatcatgtctagaagtca

SEQ ID NO: 115001 - DNA, 22 bp, synthetic construct
  misc_feature 1..22: note = chemically synthesized
  source 1..22: mol_type = other DNA
gatcatgtctagaagtcaggat

SEQ ID NO: 115002 - DNA, 22 bp, synthetic construct
  misc_feature 1..22: note = chemically synthesized
  source 1..22: mol_type = other DNA
gaagtcaggatggcagaagccc

SEQ ID NO: 115003 - DNA, 22 bp, synthetic construct
  misc_feature 1..22: note = chemically synthesized
  source 1..22: mol_type = other DNA
tggtctctatactctttcctgc

SEQ ID NO: 115004 - DNA, 22 bp, synthetic construct
  misc_feature 1..22: note = chemically synthesized
  source 1..22: mol_type = other DNA
gtctctatactctttcctgccg

SEQ ID NO: 115005 - DNA, 22 bp, synthetic construct
  misc_feature 1..22: note = chemically synthesized
  source 1..22: mol_type = other DNA
tatactctttcctgccgagcca

SEQ ID NO: 115006 - DNA, 22 bp, synthetic construct
  misc_feature 1..22: note = chemically synthesized
  source 1..22: mol_type = other DNA
tactctttcctgccgagccatc

SEQ ID NO: 115007 - DNA, 22 bp, synthetic construct
  misc_feature 1..22: note = chemically synthesized
  source 1..22: mol_type = other DNA
tttcctgccgagccatctggta

SEQ ID NO: 115008 - DNA, 22 bp, synthetic construct
  misc_feature 1..22: note = chemically synthesized
  source 1..22: mol_type = other DNA
tcctgccgagccatctggtata

SEQ ID NO: 115009 - DNA, 22 bp, synthetic construct
  misc_feature 1..22: note = chemically synthesized
  source 1..22: mol_type = other DNA
cctgccgagccatctggtatac

SEQ ID NO: 115010 - DNA, 22 bp, synthetic construct
  misc_feature 1..22: note = chemically synthesized
  source 1..22: mol_type = other DNA
ctgccgagccatctggtataca

SEQ ID NO: 115011 - DNA, 22 bp, synthetic construct
  misc_feature 1..22: note = chemically synthesized
  source 1..22: mol_type = other DNA
ccgagccatctggtatacacac

SEQ ID NO: 115012 - DNA, 22 bp, synthetic construct
  misc_feature 1..22: note = chemically synthesized
  source 1..22: mol_type = other DNA
gtatacacaccctctccttact

SEQ ID NO: 115013 - DNA, 22 bp, synthetic construct
  misc_feature 1..22: note = chemically synthesized
  source 1..22: mol_type = other DNA
tccttactctcatcagaaaaac

SEQ ID NO: 115014 - DNA, 22 bp, synthetic construct
  misc_feature 1..22: note = chemically synthesized
  source 1..22: mol_type = other DNA
cttactctcatcagaaaaacag

SEQ ID NO: 115015 - DNA, 22 bp, synthetic construct
  misc_feature 1..22: note = chemically synthesized
  source 1..22: mol_type = other DNA
actctcatcagaaaaacagtca

SEQ ID NO: 115016 - DNA, 22 bp, synthetic construct
  misc_feature 1..22: note = chemically synthesized
  source 1..22: mol_type = other DNA
ctctcatcagaaaaacagtcat

SEQ ID NO: 115017 - DNA, 22 bp, synthetic construct
  misc_feature 1..22: note = chemically synthesized
  source 1..22: mol_type = other DNA
tcatcagaaaaacagtcattca

SEQ ID NO: 115018 - DNA, 22 bp, synthetic construct
  misc_feature 1..22: note = chemically synthesized
  source 1..22: mol_type = other DNA
atcagaaaaacagtcattcact

SEQ ID NO: 115019 - DNA, 22 bp, synthetic construct
  misc_feature 1..22: note = chemically synthesized
  source 1..22: mol_type = other DNA
acttattcaacaaattattaaa

SEQ ID NO: 115020 - DNA, 22 bp, synthetic construct
  misc_feature 1..22: note = chemically synthesized
  source 1..22: mol_type = other DNA
attcaacaaattattaaatgca

SEQ ID NO: 115021 - DNA, 22 bp, synthetic construct
  misc_feature 1..22: note = chemically synthesized
  source 1..22: mol_type = other DNA
ttcaacaaattattaaatgcat

SEQ ID NO: 115022 - DNA, 22 bp, synthetic construct
  misc_feature 1..22: note = chemically synthesized
  source 1..22: mol_type = other DNA
aacaaattattaaatgcatttt

SEQ ID NO: 115023 - DNA, 22 bp, synthetic construct
  misc_feature 1..22: note = chemically synthesized
  source 1..22: mol_type = other DNA
ttaaatgcattttatatgctgg

SEQ ID NO: 115024 - DNA, 22 bp, synthetic construct
  misc_feature 1..22: note = chemically synthesized
  source 1..22: mol_type = other DNA
aatgcattttatatgctggtcc

SEQ ID NO: 115025 - DNA, 22 bp, synthetic construct
  misc_feature 1..22: note = chemically synthesized
  source 1..22: mol_type = other DNA
tatatgctggtccagttaacat

SEQ ID NO: 115026 - DNA, 22 bp, synthetic construct
  misc_feature 1..22: note = chemically synthesized
  source 1..22: mol_type = other DNA
atatgctggtccagttaacata

SEQ ID NO: 115027 - DNA, 22 bp, synthetic construct
  misc_feature 1..22: note = chemically synthesized
  source 1..22: mol_type = other DNA
tatgctggtccagttaacatag

SEQ ID NO: 115028 - DNA, 22 bp, synthetic construct
  misc_feature 1..22: note = chemically synthesized
  source 1..22: mol_type = other DNA
gtccagttaacatagaaaagac

SEQ ID NO: 115029 - DNA, 22 bp, synthetic construct
  misc_feature 1..22: note = chemically synthesized
  source 1..22: mol_type = other DNA
acatagaaaagaccccatcctc

SEQ ID NO: 115030 - DNA, 22 bp, synthetic construct
  misc_feature 1..22: note = chemically synthesized
  source 1..22: mol_type = other DNA
aatctgcttattttaatccaaa

SEQ ID NO: 115031 - DNA, 22 bp, synthetic construct
  misc_feature 1..22: note = chemically synthesized
  source 1..22: mol_type = other DNA
cttattttaatccaaacaacac

SEQ ID NO: 115032 - DNA, 22 bp, synthetic construct
  misc_feature 1..22: note = chemically synthesized
  source 1..22: mol_type = other DNA
attttaatccaaacaacacctt

SEQ ID NO: 115033 - DNA, 22 bp, synthetic construct
  misc_feature 1..22: note = chemically synthesized
  source 1..22: mol_type = other DNA
ttttaatccaaacaacaccttg

SEQ ID NO: 115034 - DNA, 22 bp, synthetic construct
  misc_feature 1..22: note = chemically synthesized
  source 1..22: mol_type = other DNA
taatccaaacaacaccttgtaa

SEQ ID NO: 115035 - DNA, 22 bp, synthetic construct
  misc_feature 1..22: note = chemically synthesized
  source 1..22: mol_type = other DNA
aatccaaacaacaccttgtaac

SEQ ID NO: 115036 - DNA, 22 bp, synthetic construct
  misc_feature 1..22: note = chemically synthesized
  source 1..22: mol_type = other DNA
atccaaacaacaccttgtaact

SEQ ID NO: 115037 - DNA, 22 bp, synthetic construct
  misc_feature 1..22: note = chemically synthesized
  source 1..22: mol_type = other DNA
gtaacttccccagtatccagga

SEQ ID NO: 115038 - DNA, 22 bp, synthetic construct
  misc_feature 1..22: note = chemically synthesized
  source 1..22: mol_type = other DNA
taacttccccagtatccaggat

SEQ ID NO: 115039 - DNA, 22 bp, synthetic construct
  misc_feature 1..22: note = chemically synthesized
  source 1..22: mol_type = other DNA
ccccagtatccaggatatggcc

SEQ ID NO: 115040 - DNA, 22 bp, synthetic construct
  misc_feature 1..22: note = chemically synthesized
  source 1..22: mol_type = other DNA
cccagtatccaggatatggcct

SEQ ID NO: 115041 - DNA, 22 bp, synthetic construct
  misc_feature 1..22: note = chemically synthesized
  source 1..22: mol_type = other DNA
cgccttccaaaatcctcctcta

SEQ ID NO: 115042 - DNA, 22 bp, synthetic construct
  misc_feature 1..22: note = chemically synthesized
  source 1..22: mol_type = other DNA
gccttccaaaatcctcctctat

SEQ ID NO: 115043 - DNA, 22 bp, synthetic construct
  misc_feature 1..22: note = chemically synthesized
  source 1..22: mol_type = other DNA
ccaaaatcctcctctatcctac

SEQ ID NO: 115044 - DNA, 22 bp, synthetic construct
  misc_feature 1..22: note = chemically synthesized
  source 1..22: mol_type = other DNA
caaaatcctcctctatcctact

SEQ ID NO: 115045 - DNA, 22 bp, synthetic construct
  misc_feature 1..22: note = chemically synthesized
  source 1..22: mol_type = other DNA
ctctatcctactaaaaacaggc

SEQ ID NO: 115046 - DNA, 22 bp, synthetic construct
  misc_feature 1..22: note = chemically synthesized
  source 1..22: mol_type = other DNA
tatcctactaaaaacaggcatg

SEQ ID NO: 115047 - DNA, 22 bp, synthetic construct
  misc_feature 1..22: note = chemically synthesized
  source 1..22: mol_type = other DNA
tcctactaaaaacaggcatgtt

SEQ ID NO: 115048 - DNA, 22 bp, synthetic construct
  misc_feature 1..22: note = chemically synthesized
  source 1..22: mol_type = other DNA
ctaaaaacaggcatgtttacag

SEQ ID NO: 115049 - DNA, 22 bp, synthetic construct
  misc_feature 1..22: note = chemically synthesized
  source 1..22: mol_type = other DNA
aaaacaggcatgtttacagatg

SEQ ID NO: 115050 - DNA, 22 bp, synthetic construct
  misc_feature 1..22: note = chemically synthesized
  source 1..22: mol_type = other DNA
acagatgagtttgaccactgtg

SEQ ID NO: 115051 - DNA, 22 bp, synthetic construct
  misc_feature 1..22: note = chemically synthesized
  source 1..22: mol_type = other DNA
cagatgagtttgaccactgtgg

SEQ ID NO: 115052 - DNA, 22 bp, synthetic construct
  misc_feature 1..22: note = chemically synthesized
  source 1..22: mol_type = other DNA
gaccactgtggaaatgttctct

SEQ ID NO: 115053 - DNA, 22 bp, synthetic construct
  misc_feature 1..22: note = chemically synthesized
  source 1..22: mol_type = other DNA
accactgtggaaatgttctcta

SEQ ID NO: 115054 - DNA, 22 bp, synthetic construct
  misc_feature 1..22: note = chemically synthesized
  source 1..22: mol_type = other DNA
tggaaatgttctctaggggttc

SEQ ID NO: 115055 - DNA, 22 bp, synthetic construct
  misc_feature 1..22: note = chemically synthesized
  source 1..22: mol_type = other DNA
tctaggggttcaaaaatgaata

SEQ ID NO: 115056 - DNA, 22 bp, synthetic construct
  misc_feature 1..22: note = chemically synthesized
  source 1..22: mol_type = other DNA
taggggttcaaaaatgaataat

SEQ ID NO: 115057 - DNA, 22 bp, synthetic construct
  misc_feature 1..22: note = chemically synthesized
  source 1..22: mol_type = other DNA
ggggttcaaaaatgaataatct

SEQ ID NO: 115058 - DNA, 22 bp, synthetic construct
  misc_feature 1..22: note = chemically synthesized
  source 1..22: mol_type = other DNA
aaaaatgaataatctggttcaa

SEQ ID NO: 115059 - DNA, 22 bp, synthetic construct
  misc_feature 1..22: note = chemically synthesized
  source 1..22: mol_type = other DNA
gttcaagtccttgtgtttaggt

SEQ ID NO: 115060 - DNA, 22 bp, synthetic construct
  misc_feature 1..22: note = chemically synthesized
  source 1..22: mol_type = other DNA
aagtccttgtgtttaggtgcag

SEQ ID NO: 115061 - DNA, 22 bp, synthetic construct
  misc_feature 1..22: note = chemically synthesized
  source 1..22: mol_type = other DNA
gtgtttaggtgcagcgtctttt

SEQ ID NO: 115062 - DNA, 22 bp, synthetic construct
  misc_feature 1..22: note = chemically synthesized
  source 1..22: mol_type = other DNA
tgtttaggtgcagcgtcttttg

SEQ ID NO: 115063 - DNA, 22 bp, synthetic construct
  misc_feature 1..22: note = chemically synthesized
  source 1..22: mol_type = other DNA
aggtgcagcgtcttttgcatat

SEQ ID NO: 115064 - DNA, 22 bp, synthetic construct
  misc_feature 1..22: note = chemically synthesized
  source 1..22: mol_type = other DNA
ggtgcagcgtcttttgcatatt

SEQ ID NO: 115065 - DNA, 22 bp, synthetic construct
  misc_feature 1..22: note = chemically synthesized
  source 1..22: mol_type = other DNA
ttgcatattctcctatttacaa

SEQ ID NO: 115066 - DNA, 22 bp, synthetic construct
  misc_feature 1..22: note = chemically synthesized
  source 1..22: mol_type = other DNA
tgcatattctcctatttacaag

SEQ ID NO: 115067 - DNA, 22 bp, synthetic construct
  misc_feature 1..22: note = chemically synthesized
  source 1..22: mol_type = other DNA
gcatattctcctatttacaaga

SEQ ID NO: 115068 - DNA, 22 bp, synthetic construct
  misc_feature 1..22: note = chemically synthesized
  source 1..22: mol_type = other DNA
catattctcctatttacaagaa

SEQ ID NO: 115069 - DNA, 22 bp, synthetic construct
  misc_feature 1..22: note = chemically synthesized
  source 1..22: mol_type = other DNA
tcctatttacaagaaacagtat

SEQ ID NO: 115070 - DNA, 22 bp, synthetic construct
  misc_feature 1..22: note = chemically synthesized
  source 1..22: mol_type = other DNA
ctatttacaagaaacagtatcc

SEQ ID NO: 115071 - DNA, 22 bp, synthetic construct
  misc_feature 1..22: note = chemically synthesized
  source 1..22: mol_type = other DNA
tttacaagaaacagtatcctcc

SEQ ID NO: 115072 - DNA, 22 bp, synthetic construct
  misc_feature 1..22: note = chemically synthesized
  source 1..22: mol_type = other DNA
acaagaaacagtatcctccacc

SEQ ID NO: 115073 - DNA, 22 bp, synthetic construct
  misc_feature 1..22: note = chemically synthesized
  source 1..22: mol_type = other DNA
caagaaacagtatcctccacca

SEQ ID NO: 115074 - DNA, 22 bp, synthetic construct
  misc_feature 1..22: note = chemically synthesized
  source 1..22: mol_type = other DNA
caccaatgtagttcattaaaaa

SEQ ID NO: 115075 - DNA, 22 bp, synthetic construct
  misc_feature 1..22: note = chemically synthesized
  source 1..22: mol_type = other DNA
attaaaaaataactaatattaa

SEQ ID NO: 115076 - DNA, 22 bp, synthetic construct
  misc_feature 1..22: note = chemically synthesized
  source 1..22: mol_type = other DNA
aaaaataactaatattaaattc

SEQ ID NO: 115077 - DNA, 22 bp, synthetic construct
  misc_feature 1..22: note = chemically synthesized
  source 1..22: mol_type = other DNA
atattaaattcaaacaaaagaa

SEQ ID NO: 115078 - DNA, 22 bp, synthetic construct
  misc_feature 1..22: note = chemically synthesized
  source 1..22: mol_type = other DNA
aattcaaacaaaagaatattta

SEQ ID NO: 115079 - DNA, 22 bp, synthetic construct
  misc_feature 1..22: note = chemically synthesized
  source 1..22: mol_type = other DNA
aaacaaaagaatatttagacac

SEQ ID NO: 115080 - DNA, 22 bp, synthetic construct
  misc_feature 1..22: note = chemically synthesized
  source 1..22: mol_type = other DNA
agacacaggtgaggtagagagc

SEQ ID NO: 115081 - DNA, 22 bp, synthetic construct
  misc_feature 1..22: note = chemically synthesized
  source 1..22: mol_type = other DNA
gacacaggtgaggtagagagcc

SEQ ID NO: 115082 - DNA, 22 bp, synthetic construct
  misc_feature 1..22: note = chemically synthesized
  source 1..22: mol_type = other DNA
ctcattgtatactgaaaatctc

SEQ ID NO: 115083 - DNA, 22 bp, synthetic construct
  misc_feature 1..22: note = chemically synthesized
  source 1..22: mol_type = other DNA
attgtatactgaaaatctcttt

SEQ ID NO: 115084 - DNA, 22 bp, synthetic construct
  misc_feature 1..22: note = chemically synthesized
  source 1..22: mol_type = other DNA
tatactgaaaatctcttttcag

SEQ ID NO: 115085 - DNA, 22 bp, synthetic construct
  misc_feature 1..22: note = chemically synthesized
  source 1..22: mol_type = other DNA
aaaatctcttttcaggaatttt

SEQ ID NO: 115086 - DNA, 22 bp, synthetic construct
  misc_feature 1..22: note = chemically synthesized
  source 1..22: mol_type = other DNA
ttttcaggaattttctcctgtg

SEQ ID NO: 115087 - DNA, 22 bp, synthetic construct
  misc_feature 1..22: note = chemically synthesized
  source 1..22: mol_type = other DNA
ttcaggaattttctcctgtgat

SEQ ID NO: 115088 - DNA, 22 bp, synthetic construct
  misc_feature 1..22: note = chemically synthesized
  source 1..22: mol_type = other DNA
tcaggaattttctcctgtgatc

SEQ ID NO: 115089 - DNA, 22 bp, synthetic construct
  misc_feature 1..22: note = chemically synthesized
  source 1..22: mol_type = other DNA
caggaattttctcctgtgatct

SEQ ID NO: 115090 - DNA, 22 bp, synthetic construct
  misc_feature 1..22: note = chemically synthesized
  source 1..22: mol_type = other DNA
aggaattttctcctgtgatcta

SEQ ID NO: 115091 - DNA, 22 bp, synthetic construct
  misc_feature 1..22: note = chemically synthesized
  source 1..22: mol_type = other DNA
tctcctgtgatctaagatgaat

SEQ ID NO: 115092 - DNA, 22 bp, synthetic construct
  misc_feature 1..22: note = chemically synthesized
  source 1..22: mol_type = other DNA
ctcctgtgatctaagatgaatc

SEQ ID NO: 115093 - DNA, 22 bp, synthetic construct
  misc_feature 1..22: note = chemically synthesized
  source 1..22: mol_type = other DNA
tcctgtgatctaagatgaatct

SEQ ID NO: 115094 - DNA, 22 bp, synthetic construct
  misc_feature 1..22: note = chemically synthesized
  source 1..22: mol_type = other DNA
ctgtgatctaagatgaatctac

SEQ ID NO: 115095 - DNA, 22 bp, synthetic construct
  misc_feature 1..22: note = chemically synthesized
  source 1..22: mol_type = other DNA
tgatctaagatgaatctactct

SEQ ID NO: 115096 - DNA, 22 bp, synthetic construct
  misc_feature 1..22: note = chemically synthesized
  source 1..22: mol_type = other DNA
agatgaatctactctgccttga

SEQ ID NO: 115097 - DNA, 22 bp, synthetic construct
  misc_feature 1..22: note = chemically synthesized
  source 1..22: mol_type = other DNA
ctctgccttgaatattttaatt

SEQ ID NO: 115098 - DNA, 22 bp, synthetic construct
  misc_feature 1..22: note = chemically synthesized
  source 1..22: mol_type = other DNA
tgccttgaatattttaattatg

SEQ ID NO: 115099 - DNA, 22 bp, synthetic construct
  misc_feature 1..22: note = chemically synthesized
  source 1..22: mol_type = other DNA
ccttgaatattttaattatgtt

SEQ ID NO: 115100 - DNA, 22 bp, synthetic construct
  misc_feature 1..22: note = chemically synthesized
  source 1..22: mol_type = other DNA
gaatattttaattatgttgtaa

SEQ ID NO: 115101 - DNA, 22 bp, synthetic construct
  misc_feature 1..22: note = chemically synthesized
  source 1..22: mol_type = other DNA
aatattttaattatgttgtaat

SEQ ID NO: 115102 - DNA, 22 bp, synthetic construct
  misc_feature 1..22: note = chemically synthesized
  source 1..22: mol_type = other DNA
taattatgttgtaattagatgt

SEQ ID NO: 115103 - DNA, 22 bp, synthetic construct
  misc_feature 1..22: note = chemically synthesized
  source 1..22: mol_type = other DNA
aattatgttgtaattagatgta

SEQ ID NO: 115104 - DNA, 22 bp, synthetic construct
  misc_feature 1..22: note = chemically synthesized
  source 1..22: mol_type = other DNA
attatgttgtaattagatgtaa

SEQ ID NO: 115105 - DNA, 22 bp, synthetic construct
  misc_feature 1..22: note = chemically synthesized
  source 1..22: mol_type = other DNA
tgttgtaattagatgtaactga

SEQ ID NO: 115106 - DNA, 22 bp, synthetic construct
  misc_feature 1..22: note = chemically synthesized
  source 1..22: mol_type = other DNA
taattagatgtaactgactgct

SEQ ID NO: 115107 - DNA, 22 bp, synthetic construct
  misc_feature 1..22: note = chemically synthesized
  source 1..22: mol_type = other DNA
gatgtaactgactgctctgagt

SEQ ID NO: 115108 - DNA, 22 bp, synthetic construct
  misc_feature 1..22: note = chemically synthesized
  source 1..22: mol_type = other DNA
actgctctgagtggactcctcc

SEQ ID NO: 115109 - DNA, 22 bp, synthetic construct
  misc_feature 1..22: note = chemically synthesized
  source 1..22: mol_type = other DNA
ctctgagtggactcctccattg

SEQ ID NO: 115110 - DNA, 22 bp, synthetic construct
  misc_feature 1..22: note = chemically synthesized
  source 1..22: mol_type = other DNA
tgagtggactcctccattgctt

SEQ ID NO: 115111 - DNA, 22 bp, synthetic construct
  misc_feature 1..22: note = chemically synthesized
  source 1..22: mol_type = other DNA
agtggactcctccattgcttag

SEQ ID NO: 115112 - DNA, 22 bp, synthetic construct
  misc_feature 1..22: note = chemically synthesized
  source 1..22: mol_type = other DNA
ctccattgcttagtagacatga

SEQ ID NO: 115113 - DNA, 22 bp, synthetic construct
  misc_feature 1..22: note = chemically synthesized
  source 1..22: mol_type = other DNA
cattgcttagtagacatgaaaa

SEQ ID NO: 115114 - DNA, 22 bp, synthetic construct
  misc_feature 1..22: note = chemically synthesized
  source 1..22: mol_type = other DNA
cttagtagacatgaaaaaatga

SEQ ID NO: 115115 - DNA, 22 bp, synthetic construct
  misc_feature 1..22: note = chemically synthesized
  source 1..22: mol_type = other DNA
agtagacatgaaaaaatgactg

SEQ ID NO: 115116 - DNA, 22 bp, synthetic construct
  misc_feature 1..22: note = chemically synthesized
  source 1..22: mol_type = other DNA
gtagacatgaaaaaatgactgt

SEQ ID NO: 115117 - DNA, 22 bp, synthetic construct
  misc_feature 1..22: note = chemically synthesized
  source 1..22: mol_type = other DNA
ttgctctcctatcatggataat

SEQ ID NO: 115118 - DNA, 22 bp, synthetic construct
  misc_feature 1..22: note = chemically synthesized
  source 1..22: mol_type = other DNA
ctctcctatcatggataattat

SEQ ID NO: 115119 - DNA, 22 bp, synthetic construct
  misc_feature 1..22: note = chemically synthesized
  source 1..22: mol_type = other DNA
tcctatcatggataattatctc

SEQ ID NO: 115120 - DNA, 22 bp, synthetic construct
  misc_feature 1..22: note = chemically synthesized
  source 1..22: mol_type = other DNA
ctatcatggataattatctctc

SEQ ID NO: 115121 - DNA, 22 bp, synthetic construct
  misc_feature 1..22: note = chemically synthesized
  source 1..22: mol_type = other DNA
tcatggataattatctctcttg

SEQ ID NO: 115122 - DNA, 22 bp, synthetic construct
  misc_feature 1..22: note = chemically synthesized
  source 1..22: mol_type = other DNA
tctctcttgctaggagaaatcc

SEQ ID NO: 115123 - DNA, 22 bp, synthetic construct
  misc_feature 1..22: note = chemically synthesized
  source 1..22: mol_type = other DNA
tcttgctaggagaaatccccta

SEQ ID NO: 115124 - DNA, 22 bp, synthetic construct
  misc_feature 1..22: note = chemically synthesized
  source 1..22: mol_type = other DNA
ttgctaggagaaatcccctaaa

SEQ ID NO: 115125 - DNA, 22 bp, synthetic construct
  misc_feature 1..22: note = chemically synthesized
  source 1..22: mol_type = other DNA
gctaggagaaatcccctaaagc

SEQ ID NO: 115126 - DNA, 22 bp, synthetic construct
  misc_feature 1..22: note = chemically synthesized
  source 1..22: mol_type = other DNA
ctaggagaaatcccctaaagct

SEQ ID NO: 115127 - DNA, 22 bp, synthetic construct
  misc_feature 1..22: note = chemically synthesized
  source 1..22: mol_type = other DNA
ggagaaatcccctaaagctttc

SEQ ID NO: 115128 - DNA, 22 bp, synthetic construct
  misc_feature 1..22: note = chemically synthesized
  source 1..22: mol_type = other DNA
aagctttcttcccaagaggaag

SEQ ID NO: 115129 - DNA, 22 bp, synthetic construct
  misc_feature 1..22: note = chemically synthesized
  source 1..22: mol_type = other DNA
tcttcccaagaggaagtatact

SEQ ID NO: 115130 - DNA, 22 bp, synthetic construct
  misc_feature 1..22: note = chemically synthesized
  source 1..22: mol_type = other DNA
cttcccaagaggaagtatactt

SEQ ID NO: 115131 - DNA, 22 bp, synthetic construct
  misc_feature 1..22: note = chemically synthesized
  source 1..22: mol_type = other DNA
ttcccaagaggaagtatacttt

SEQ ID NO: 115132 - DNA, 22 bp, synthetic construct
  misc_feature 1..22: note = chemically synthesized
  source 1..22: mol_type = other DNA
cccaagaggaagtatactttcc

SEQ ID NO: 115133 - DNA, 22 bp, synthetic construct
  misc_feature 1..22: note = chemically synthesized
  source 1..22: mol_type = other DNA
ccaagaggaagtatactttcca

SEQ ID NO: 115134 - DNA, 22 bp, synthetic construct
  misc_feature 1..22: note = chemically synthesized
  source 1..22: mol_type = other DNA
tccaagagaaataatcccagcc

SEQ ID NO: 115135 - DNA, 22 bp, synthetic construct
  misc_feature 1..22: note = chemically synthesized
  source 1..22: mol_type = other DNA
ccaagagaaataatcccagccc

SEQ ID NO: 115136 - DNA, 22 bp, synthetic construct
  misc_feature 1..22: note = chemically synthesized
  source 1..22: mol_type = other DNA
caagagaaataatcccagccct

SEQ ID NO: 115137 - DNA, 22 bp, synthetic construct
  misc_feature 1..22: note = chemically synthesized
  source 1..22: mol_type = other DNA
tcattgtctctgtatagacatc

SEQ ID NO: 115138 - DNA, 22 bp, synthetic construct
  misc_feature 1..22: note = chemically synthesized
  source 1..22: mol_type = other DNA
tctctgtatagacatcttgttt

SEQ ID NO: 115139 - DNA, 22 bp, synthetic construct
  misc_feature 1..22: note = chemically synthesized
  source 1..22: mol_type = other DNA
tgtatagacatcttgtttctac

SEQ ID NO: 115140 - DNA, 22 bp, synthetic construct
  misc_feature 1..22: note = chemically synthesized
  source 1..22: mol_type = other DNA
tatagacatcttgtttctacca

SEQ ID NO: 115141 - DNA, 22 bp, synthetic construct
  misc_feature 1..22: note = chemically synthesized
  source 1..22: mol_type = other DNA
gtttctaccagatccttctccc

SEQ ID NO: 115142 - DNA, 22 bp, synthetic construct
  misc_feature 1..22: note = chemically synthesized
  source 1..22: mol_type = other DNA
tttctaccagatccttctccct

SEQ ID NO: 115143 - DNA, 22 bp, synthetic construct
  misc_feature 1..22: note = chemically synthesized
  source 1..22: mol_type = other DNA
ctaccagatccttctccctgtc

SEQ ID NO: 115144 - DNA, 22 bp, synthetic construct
  misc_feature 1..22: note = chemically synthesized
  source 1..22: mol_type = other DNA
taccagatccttctccctgtcc

SEQ ID NO: 115145 - DNA, 22 bp, synthetic construct
  misc_feature 1..22: note = chemically synthesized
  source 1..22: mol_type = other DNA
ccagatccttctccctgtccat

SEQ ID NO: 115146 - DNA, 22 bp, synthetic construct
  misc_feature 1..22: note = chemically synthesized
  source 1..22: mol_type = other DNA
ctccctgtccatctcatcactc

SEQ ID NO: 115147 - DNA, 22 bp, synthetic construct
  misc_feature 1..22: note = chemically synthesized
  source 1..22: mol_type = other DNA
tccctgtccatctcatcactct

SEQ ID NO: 115148 - DNA, 22 bp, synthetic construct
  misc_feature 1..22: note = chemically synthesized
  source 1..22: mol_type = other DNA
cctgtccatctcatcactctga

SEQ ID NO: 115149 - DNA, 22 bp, synthetic construct
  misc_feature 1..22: note = chemically synthesized
  source 1..22: mol_type = other DNA
tccatctcatcactctgaagtt

SEQ ID NO: 115150 - DNA, 22 bp, synthetic construct
  misc_feature 1..22: note = chemically synthesized
  source 1..22: mol_type = other DNA
atcactctgaagttggtgaaca

SEQ ID NO: 115151 - DNA, 22 bp, synthetic construct
  misc_feature 1..22: note = chemically synthesized
  source 1..22: mol_type = other DNA
tgaagttggtgaacacagagct

SEQ ID NO: 115152 - DNA, 22 bp, synthetic construct
  misc_feature 1..22: note = chemically synthesized
  source 1..22: mol_type = other DNA
aagttggtgaacacagagctga

SEQ ID NO: 115153 - DNA, 22 bp, synthetic construct
  misc_feature 1..22: note = chemically synthesized
  source 1..22: mol_type = other DNA
gtgaacacagagctgacaacag

SEQ ID NO: 115154 - DNA, 22 bp, synthetic construct
  misc_feature 1..22: note = chemically synthesized
  source 1..22: mol_type = other DNA
acaacagaaccccaggcacaaa

SEQ ID NO: 115155 - DNA, 22 bp, synthetic construct
  misc_feature 1..22: note = chemically synthesized
  source 1..22: mol_type = other DNA
tatttattcacccatttagttt

SEQ ID NO: 115156 - DNA, 22 bp, synthetic construct
  misc_feature 1..22: note = chemically synthesized
  source 1..22: mol_type = other DNA
atttattcacccatttagtttt

SEQ ID NO: 115157 - DNA, 22 bp, synthetic construct
  misc_feature 1..22: note = chemically synthesized
  source 1..22: mol_type = other DNA
tttattcacccatttagttttt

SEQ ID NO: 115158 - DNA, 22 bp, synthetic construct
  misc_feature 1..22: note = chemically synthesized
  source 1..22: mol_type = other DNA
attcacccatttagtttttcat

SEQ ID NO: 115159 - DNA, 22 bp, synthetic construct
  misc_feature 1..22: note = chemically synthesized
  source 1..22: mol_type = other DNA
ttcacccatttagtttttcatg

SEQ ID NO: 115160 - DNA, 22 bp, synthetic construct
  misc_feature 1..22: note = chemically synthesized
  source 1..22: mol_type = other DNA
acccatttagtttttcatgcaa

SEQ ID NO: 115161 - DNA, 22 bp, synthetic construct
  misc_feature 1..22: note = chemically synthesized
  source 1..22: mol_type = other DNA
agtttttcatgcaaaaaaatat

SEQ ID NO: 115162 - DNA, 22 bp, synthetic construct
  misc_feature 1..22: note = chemically synthesized
  source 1..22: mol_type = other DNA
gtttttcatgcaaaaaaatata

SEQ ID NO: 115163 - DNA, 22 bp, synthetic construct
  misc_feature 1..22: note = chemically synthesized
  source 1..22: mol_type = other DNA
ttcatgcaaaaaaatatatata

SEQ ID NO: 115164 - DNA, 22 bp, synthetic construct
  misc_feature 1..22: note = chemically synthesized
  source 1..22: mol_type = other DNA
tcatgcaaaaaaatatatatat

SEQ ID NO: 115165 - DNA, 22 bp, synthetic construct
  misc_feature 1..22: note = chemically synthesized
  source 1..22: mol_type = other DNA
catgcaaaaaaatatatatata

SEQ ID NO: 115166 - DNA, 22 bp, synthetic construct
  misc_feature 1..22: note = chemically synthesized
  source 1..22: mol_type = other DNA
atgcaaaaaaatatatatatag

SEQ ID NO: 115167 - DNA, 22 bp, synthetic construct
  misc_feature 1..22: note = chemically synthesized
  source 1..22: mol_type = other DNA
ccacatcttagacactgtcagg

SEQ ID NO: 115168 - DNA, 22 bp, synthetic construct
  misc_feature 1..22: note = chemically synthesized
  source 1..22: mol_type = other DNA
agacactgtcaggctccagggg

SEQ ID NO: 115169 - DNA, 22 bp, synthetic construct
  misc_feature 1..22: note = chemically synthesized
  source 1..22: mol_type = other DNA
gacactgtcaggctccaggggc

SEQ ID NO: 115170 - DNA, 22 bp, synthetic construct
  misc_feature 1..22: note = chemically synthesized
  source 1..22: mol_type = other DNA
tcaggctccaggggcctttaga

SEQ ID NO: 115171 - DNA, 22 bp, synthetic construct
  misc_feature 1..22: note = chemically synthesized
  source 1..22: mol_type = other DNA
caggggcctttagagaattcca

SEQ ID NO: 115172 - DNA, 22 bp, synthetic construct
  misc_feature 1..22: note = chemically synthesized
  source 1..22: mol_type = other DNA
tagagaattccagtctaatcaa

SEQ ID NO: 115173 - DNA, 22 bp, synthetic construct
  misc_feature 1..22: note = chemically synthesized
  source 1..22: mol_type = other DNA
agagaattccagtctaatcaac

SEQ ID NO: 115174 - DNA, 22 bp, synthetic construct
  misc_feature 1..22: note = chemically synthesized
  source 1..22: mol_type = other DNA
gagaattccagtctaatcaact

SEQ ID NO: 115175 - DNA, 22 bp, synthetic construct
  misc_feature 1..22: note = chemically synthesized
  source 1..22: mol_type = other DNA
cagtctaatcaacttaaaaaat

SEQ ID NO: 115176 - DNA, 22 bp, synthetic construct
  misc_feature 1..22: note = chemically synthesized
  source 1..22: mol_type = other DNA
atcaacttaaaaaatgaattat

SEQ ID NO: 115177 - DNA, 22 bp, synthetic construct
  misc_feature 1..22: note = chemically synthesized
  source 1..22: mol_type = other DNA
aaaaaatgaattattaggttgg

SEQ ID NO: 115178 - DNA, 22 bp, synthetic construct
  misc_feature 1..22: note = chemically synthesized
  source 1..22: mol_type = other DNA
aaaaatgaattattaggttggt

SEQ ID NO: 115179 - DNA, 22 bp, synthetic construct
  misc_feature 1..22: note = chemically synthesized
  source 1..22: mol_type = other DNA
ttaggttggtgaaaaattaatg

SEQ ID NO: 115180 - DNA, 22 bp, synthetic construct
  misc_feature 1..22: note = chemically synthesized
  source 1..22: mol_type = other DNA
ggttggtgaaaaattaatggca

SEQ ID NO: 115181 - DNA, 22 bp, synthetic construct
  misc_feature 1..22: note = chemically synthesized
  source 1..22: mol_type = other DNA
gtgaaaaattaatggcagtttt

SEQ ID NO: 115182 - DNA, 22 bp, synthetic construct
  misc_feature 1..22: note = chemically synthesized
  source 1..22: mol_type = other DNA
atggcagtttttgccaatataa

SEQ ID NO: 115183 - DNA, 22 bp, synthetic construct
  misc_feature 1..22: note = chemically synthesized
  source 1..22: mol_type = other DNA
ttgccaatataaatttatgttc

SEQ ID NO: 115184 - DNA, 22 bp, synthetic construct
  misc_feature 1..22: note = chemically synthesized
  source 1..22: mol_type = other DNA
tgccaatataaatttatgttct

SEQ ID NO: 115185 - DNA, 22 bp, synthetic construct
  misc_feature 1..22: note = chemically synthesized
  source 1..22: mol_type = other DNA
gccaatataaatttatgttcta

SEQ ID NO: 115186 - DNA, 22 bp, synthetic construct
  misc_feature 1..22: note = chemically synthesized
  source 1..22: mol_type = other DNA
ccaatataaatttatgttctaa

SEQ ID NO: 115187 - DNA, 22 bp, synthetic construct
  misc_feature 1..22: note = chemically synthesized
  source 1..22: mol_type = other DNA
atgttctaaacatgtataataa

SEQ ID NO: 115188 - DNA, 22 bp, synthetic construct
  misc_feature 1..22: note = chemically synthesized
  source 1..22: mol_type = other DNA
tgttctaaacatgtataataaa

SEQ ID NO: 115189 - DNA, 22 bp, synthetic construct
  misc_feature 1..22: note = chemically synthesized
  source 1..22: mol_type = other DNA
taaacatgtataataaagaata

SEQ ID NO: 115190 - DNA, 22 bp, synthetic construct
  misc_feature 1..22: note = chemically synthesized
  source 1..22: mol_type = other DNA
aacatgtataataaagaatacg

SEQ ID NO: 115191 - DNA, 22 bp, synthetic construct
  misc_feature 1..22: note = chemically synthesized
  source 1..22: mol_type = other DNA
cctataatatatatgttgtaca

SEQ ID NO: 115192 - DNA, 22 bp, synthetic construct
  misc_feature 1..22: note = chemically synthesized
  source 1..22: mol_type = other DNA
taatatatatgttgtacaaagt

SEQ ID NO: 115193 - DNA, 22 bp, synthetic construct
  misc_feature 1..22: note = chemically synthesized
  source 1..22: mol_type = other DNA
tacaaagtatatatatgtgtac

SEQ ID NO: 115194 - DNA, 22 bp, synthetic construct
  misc_feature 1..22: note = chemically synthesized
  source 1..22: mol_type = other DNA
atatttttgtatatttgtttac

SEQ ID NO: 115195 - DNA, 22 bp, synthetic construct
  misc_feature 1..22: note = chemically synthesized
  source 1..22: mol_type = other DNA
ttgtatatttgtttacatatat

SEQ ID NO: 115196 - DNA, 22 bp, synthetic construct
  misc_feature 1..22: note = chemically synthesized
  source 1..22: mol_type = other DNA
tgtatatttgtttacatatata

SEQ ID NO: 115197 - DNA, 22 bp, synthetic construct
  misc_feature 1..22: note = chemically synthesized
  source 1..22: mol_type = other DNA
gtatatttgtttacatatataa

SEQ ID NO: 115198 - DNA, 22 bp, synthetic construct
  misc_feature 1..22: note = chemically synthesized
  source 1..22: mol_type = other DNA
tatatttgtttacatatataaa

SEQ ID NO: 115199 - DNA, 22 bp, synthetic construct
  misc_feature 1..22: note = chemically synthesized
  source 1..22: mol_type = other DNA
gtttacatatataaatatacag

SEQ ID NO: 115200 - DNA, 22 bp, synthetic construct
  misc_feature 1..22: note = chemically synthesized
  source 1..22: mol_type = other DNA
tttacatatataaatatacaga

SEQ ID NO: 115201 - DNA, 22 bp, synthetic construct
  misc_feature 1..22: note = chemically synthesized
  source 1..22: mol_type = other DNA
acatatataaatatacagacac

SEQ ID NO: 115202 - DNA, 22 bp, synthetic construct
  misc_feature 1..22: note = chemically synthesized
  source 1..22: mol_type = other DNA
catatataaatatacagacaca

SEQ ID NO: 115203 - DNA, 22 bp, synthetic construct
  misc_feature 1..22: note = chemically synthesized
  source 1..22: mol_type = other DNA
tacttatatataaaaaatctat

SEQ ID NO: 115204 - DNA, 22 bp, synthetic construct
  misc_feature 1..22: note = chemically synthesized
  source 1..22: mol_type = other DNA
atatataaaaaatctataaagt

SEQ ID NO: 115205 - DNA, 22 bp, synthetic construct
  misc_feature 1..22: note = chemically synthesized
  source 1..22: mol_type = other DNA
tatataaaaaatctataaagta

SEQ ID NO: 115206 - DNA, 22 bp, synthetic construct
  misc_feature 1..22: note = chemically synthesized
  source 1..22: mol_type = other DNA
taaagtatataaagaatatata

SEQ ID NO: 115207 - DNA, 22 bp, synthetic construct
  misc_feature 1..22: note = chemically synthesized
  source 1..22: mol_type = other DNA
aaatgtatattctataaagtat

SEQ ID NO: 115208 - DNA, 22 bp, synthetic construct
  misc_feature 1..22: note = chemically synthesized
  source 1..22: mol_type = other DNA
tataaagtatttatgagtaaat

SEQ ID NO: 115209 - DNA, 22 bp, synthetic construct
  misc_feature 1..22: note = chemically synthesized
  source 1..22: mol_type = other DNA
taaagtatttatgagtaaatct

SEQ ID NO: 115210 - DNA, 22 bp, synthetic construct
  misc_feature 1..22: note = chemically synthesized
  source 1..22: mol_type = other DNA
atgagtaaatctatacacttat

SEQ ID NO: 115211 - DNA, 22 bp, synthetic construct
  misc_feature 1..22: note = chemically synthesized
  source 1..22: mol_type = other DNA
tgagtaaatctatacacttata

SEQ ID NO: 115212 - DNA, 22 bp, synthetic construct
  misc_feature 1..22: note = chemically synthesized
  source 1..22: mol_type = other DNA
tacacttatatgttatttaaac

SEQ ID NO: 115213 - DNA, 22 bp, synthetic construct
  misc_feature 1..22: note = chemically synthesized
  source 1..22: mol_type = other DNA
atatgttatttaaacttataca

SEQ ID NO: 115214 - DNA, 22 bp, synthetic construct
  misc_feature 1..22: note = chemically synthesized
  source 1..22: mol_type = other DNA
tatgttatttaaacttatacat

SEQ ID NO: 115215 - DNA, 22 bp, synthetic construct
  misc_feature 1..22: note = chemically synthesized
  source 1..22: mol_type = other DNA
tttaaacttatacatatgtgta

SEQ ID NO: 115216 - DNA, 22 bp, synthetic construct
  misc_feature 1..22: note = chemically synthesized
  source 1..22: mol_type = other DNA
aaacttatacatatgtgtactt

SEQ ID NO: 115217 - DNA, 22 bp, synthetic construct
  misc_feature 1..22: note = chemically synthesized
  source 1..22: mol_type = other DNA
aacttatacatatgtgtactta

SEQ ID NO: 115218 - DNA, 22 bp, synthetic construct
  misc_feature 1..22: note = chemically synthesized
  source 1..22: mol_type = other DNA
atacatatgtgtacttatatgg

SEQ ID NO: 115219 - DNA, 22 bp, synthetic construct
  misc_feature 1..22: note = chemically synthesized
  source 1..22: mol_type = other DNA
tacatatgtgtacttatatgga

SEQ ID NO: 115220 - DNA, 22 bp, synthetic construct
  misc_feature 1..22: note = chemically synthesized
  source 1..22: mol_type = other DNA
atatggatgtataagtatgttc

SEQ ID NO: 115221 - DNA, 22 bp, synthetic construct
  misc_feature 1..22: note = chemically synthesized
  source 1..22: mol_type = other DNA
tatggatgtataagtatgttct

SEQ ID NO: 115222 - DNA, 22 bp, synthetic construct
  misc_feature 1..22: note = chemically synthesized
  source 1..22: mol_type = other DNA
tatatatatatcaataagtata

SEQ ID NO: 115223 - DNA, 22 bp, synthetic construct
  misc_feature 1..22: note = chemically synthesized
  source 1..22: mol_type = other DNA
tatatatatcaataagtatata

SEQ ID NO: 115224 - DNA, 22 bp, synthetic construct
  misc_feature 1..22: note = chemically synthesized
  source 1..22: mol_type = other DNA
acaccttaatagtacattacag

SEQ ID NO: 115225 - DNA, 22 bp, synthetic construct
  misc_feature 1..22: note = chemically synthesized
  source 1..22: mol_type = other DNA
caccttaatagtacattacagg

SEQ ID NO: 115226 - DNA, 22 bp, synthetic construct
  misc_feature 1..22: note = chemically synthesized
  source 1..22: mol_type = other DNA
aatagtacattacaggtactac

SEQ ID NO: 115227 - DNA, 22 bp, synthetic construct
  misc_feature 1..22: note = chemically synthesized
  source 1..22: mol_type = other DNA
atagtacattacaggtactacg

SEQ ID NO: 115228 - DNA, 22 bp, synthetic construct
  misc_feature 1..22: note = chemically synthesized
  source 1..22: mol_type = other DNA
caggtactacgtgagaacagag

SEQ ID NO: 115229 - DNA, 22 bp, synthetic construct
  misc_feature 1..22: note = chemically synthesized
  source 1..22: mol_type = other DNA
cgtgagaacagagaaagatgta

SEQ ID NO: 115230 - DNA, 22 bp, synthetic construct
  misc_feature 1..22: note = chemically synthesized
  source 1..22: mol_type = other DNA
atgctacagaaggaagtcagga

SEQ ID NO: 115231 - DNA, 22 bp, synthetic construct
  misc_feature 1..22: note = chemically synthesized
  source 1..22: mol_type = other DNA
cagaaggaagtcaggagagatt

SEQ ID NO: 115232 - DNA, 22 bp, synthetic construct
  misc_feature 1..22: note = chemically synthesized
  source 1..22: mol_type = other DNA
gacagaagaagtgatatttgta

SEQ ID NO: 115233 - DNA, 22 bp, synthetic construct
  misc_feature 1..22: note = chemically synthesized
  source 1..22: mol_type = other DNA
acagaagaagtgatatttgtac

SEQ ID NO: 115234 - DNA, 22 bp, synthetic construct
  misc_feature 1..22: note = chemically synthesized
  source 1..22: mol_type = other DNA
gtactaagtcttaaaggatccg

SEQ ID NO: 115235 - DNA, 22 bp, synthetic construct
  misc_feature 1..22: note = chemically synthesized
  source 1..22: mol_type = other DNA
tactaagtcttaaaggatccgc

SEQ ID NO: 115236 - DNA, 22 bp, synthetic construct
  misc_feature 1..22: note = chemically synthesized
  source 1..22: mol_type = other DNA
agtcttaaaggatccgcaagtg

SEQ ID NO: 115237 - DNA, 22 bp, synthetic construct
  misc_feature 1..22: note = chemically synthesized
  source 1..22: mol_type = other DNA
aaaggatccgcaagtgtttact

SEQ ID NO: 115238 - DNA, 22 bp, synthetic construct
  misc_feature 1..22: note = chemically synthesized
  source 1..22: mol_type = other DNA
aaggatccgcaagtgtttactg

SEQ ID NO: 115239 - DNA, 22 bp, synthetic construct
  misc_feature 1..22: note = chemically synthesized
  source 1..22: mol_type = other DNA
actggttggaaaaacaggggtg

SEQ ID NO: 115240 - DNA, 22 bp, synthetic construct
  misc_feature 1..22: note = chemically synthesized
  source 1..22: mol_type = other DNA
ctggttggaaaaacaggggtgg

SEQ ID NO: 115241 - DNA, 22 bp, synthetic construct
  misc_feature 1..22: note = chemically synthesized
  source 1..22: mol_type = other DNA
gttggaaaaacaggggtggttt

SEQ ID NO: 115242 - DNA, 22 bp, synthetic construct
  misc_feature 1..22: note = chemically synthesized
  source 1..22: mol_type = other DNA
gaaaaacaggggtggtttttgc

SEQ ID NO: 115243 - DNA, 22 bp, synthetic construct
  misc_feature 1..22: note = chemically synthesized
  source 1..22: mol_type = other DNA
ttgccaagaaagcaataaatat

SEQ ID NO: 115244 - DNA, 22 bp, synthetic construct
  misc_feature 1..22: note = chemically synthesized
  source 1..22: mol_type = other DNA
tgccaagaaagcaataaatata

SEQ ID NO: 115245 - DNA, 22 bp, synthetic construct
  misc_feature 1..22: note = chemically synthesized
  source 1..22: mol_type = other DNA
gccaagaaagcaataaatatag

SEQ ID NO: 115246 - DNA, 22 bp, synthetic construct
  misc_feature 1..22: note = chemically synthesized
  source 1..22: mol_type = other DNA
ccaagaaagcaataaatataga

SEQ ID NO: 115247 - DNA, 22 bp, synthetic construct
  misc_feature 1..22: note = chemically synthesized
  source 1..22: mol_type = other DNA
aagaaaaaaatgatatgggtgt

SEQ ID NO: 115248 - DNA, 22 bp, synthetic construct
  misc_feature 1..22: note = chemically synthesized
  source 1..22: mol_type = other DNA
actgggaaaagatgggtttgga

SEQ ID NO: 115249 - DNA, 22 bp, synthetic construct
  misc_feature 1..22: note = chemically synthesized
  source 1..22: mol_type = other DNA
ggaaaagatgggtttggaaagg

SEQ ID NO: 115250 - DNA, 22 bp, synthetic construct
  misc_feature 1..22: note = chemically synthesized
  source 1..22: mol_type = other DNA
ggaaaggtgccaaaacaagaag

SEQ ID NO: 115251 - DNA, 22 bp, synthetic construct
  misc_feature 1..22: note = chemically synthesized
  source 1..22: mol_type = other DNA
gaaaggtgccaaaacaagaagg

SEQ ID NO: 115252 - DNA, 22 bp, synthetic construct
  misc_feature 1..22: note = chemically synthesized
  source 1..22: mol_type = other DNA
aagatggtgttacagggtgttt

SEQ ID NO: 115253 - DNA, 22 bp, synthetic construct
  misc_feature 1..22: note = chemically synthesized
  source 1..22: mol_type = other DNA
cagggtgtttgaggctaccagg

SEQ ID NO: 115254 - DNA, 22 bp, synthetic construct
  misc_feature 1..22: note = chemically synthesized
  source 1..22: mol_type = other DNA
gaggctaccagggccatgcata

SEQ ID NO: 115255 - DNA, 22 bp, synthetic construct
  misc_feature 1..22: note = chemically synthesized
  source 1..22: mol_type = other DNA
aggctaccagggccatgcatag

SEQ ID NO: 115256 - DNA, 22 bp, synthetic construct
  misc_feature 1..22: note = chemically synthesized
  source 1..22: mol_type = other DNA
ccagggccatgcatagagagac

SEQ ID NO: 115257 - DNA, 22 bp, synthetic construct
  misc_feature 1..22: note = chemically synthesized
  source 1..22: mol_type = other DNA
atatcttatcctgattttcgct

SEQ ID NO: 115258 - DNA, 22 bp, synthetic construct
  misc_feature 1..22: note = chemically synthesized
  source 1..22: mol_type = other DNA
atcctgattttcgctcactacc

SEQ ID NO: 115259 - DNA, 22 bp, synthetic construct
  misc_feature 1..22: note = chemically synthesized
  source 1..22: mol_type = other DNA
tcctgattttcgctcactacca

SEQ ID NO: 115260 - DNA, 22 bp, synthetic construct
  misc_feature 1..22: note = chemically synthesized
  source 1..22: mol_type = other DNA
attttcgctcactaccaggcct

SEQ ID NO: 115261 - DNA, 22 bp, synthetic construct
  misc_feature 1..22: note = chemically synthesized
  source 1..22: mol_type = other DNA
tcgctcactaccaggccttggg

SEQ ID NO: 115262 - DNA, 22 bp, synthetic construct
  misc_feature 1..22: note = chemically synthesized
  source 1..22: mol_type = other DNA
cgctcactaccaggccttggga

SEQ ID NO: 115263 - DNA, 22 bp, synthetic construct
  misc_feature 1..22: note = chemically synthesized
  source 1..22: mol_type = other DNA
gctcactaccaggccttgggat

SEQ ID NO: 115264 - DNA, 22 bp, synthetic construct
  misc_feature 1..22: note = chemically synthesized
  source 1..22: mol_type = other DNA
actaccaggccttgggatgatt

SEQ ID NO: 115265 - DNA, 22 bp, synthetic construct
  misc_feature 1..22: note = chemically synthesized
  source 1..22: mol_type = other DNA
ccaggccttgggatgattgttt

SEQ ID NO: 115266 - DNA, 22 bp, synthetic construct
  misc_feature 1..22: note = chemically synthesized
  source 1..22: mol_type = other DNA
gggatgattgtttacctttttg

SEQ ID NO: 115267 - DNA, 22 bp, synthetic construct
  misc_feature 1..22: note = chemically synthesized
  source 1..22: mol_type = other DNA
ggatgattgtttacctttttgt

SEQ ID NO: 115268 - DNA, 22 bp, synthetic construct
  misc_feature 1..22: note = chemically synthesized
  source 1..22: mol_type = other DNA
tttacctttttgtagttttctc

SEQ ID NO: 115269 - DNA, 22 bp, synthetic construct
  misc_feature 1..22: note = chemically synthesized
  source 1..22: mol_type = other DNA
acctttttgtagttttctcctt

SEQ ID NO: 115270 - DNA, 22 bp, synthetic construct
  misc_feature 1..22: note = chemically synthesized
  source 1..22: mol_type = other DNA
cctttttgtagttttctccttg

SEQ ID NO: 115271 - DNA, 22 bp, synthetic construct
  misc_feature 1..22: note = chemically synthesized
  source 1..22: mol_type = other DNA
tttgtagttttctccttgtgaa

SEQ ID NO: 115272 - DNA, 22 bp, synthetic construct
  misc_feature 1..22: note = chemically synthesized
  source 1..22: mol_type = other DNA
ttgtagttttctccttgtgaag

SEQ ID NO: 115273 - DNA, 22 bp, synthetic construct
  misc_feature 1..22: note = chemically synthesized
  source 1..22: mol_type = other DNA
tgtagttttctccttgtgaagt

SEQ ID NO: 115274 - DNA, 22 bp, synthetic construct
  misc_feature 1..22: note = chemically synthesized
  source 1..22: mol_type = other DNA
gtagttttctccttgtgaagta

SEQ ID NO: 115275 - DNA, 22 bp, synthetic construct
  misc_feature 1..22: note = chemically synthesized
  source 1..22: mol_type = other DNA
tagttttctccttgtgaagtag

SEQ ID NO: 115276 - DNA, 22 bp, synthetic construct
  misc_feature 1..22: note = chemically synthesized
  source 1..22: mol_type = other DNA
tctccttgtgaagtagtaataa

SEQ ID NO: 115277 - DNA, 22 bp, synthetic construct
  misc_feature 1..22: note = chemically synthesized
  source 1..22: mol_type = other DNA
ctccttgtgaagtagtaataaa

SEQ ID NO: 115278 - DNA, 22 bp, synthetic construct
  misc_feature 1..22: note = chemically synthesized
  source 1..22: mol_type = other DNA
tccttgtgaagtagtaataaaa

SEQ ID NO: 115279 - DNA, 22 bp, synthetic construct
  misc_feature 1..22: note = chemically synthesized
  source 1..22: mol_type = other DNA
cttgtgaagtagtaataaaatg

SEQ ID NO: 115280 - DNA, 22 bp, synthetic construct
  misc_feature 1..22: note = chemically synthesized
  source 1..22: mol_type = other DNA
gtgaagtagtaataaaatgttt

SEQ ID NO: 115281 - DNA, 22 bp, synthetic construct
  misc_feature 1..22: note = chemically synthesized
  source 1..22: mol_type = other DNA
tgaagtagtaataaaatgtttc

SEQ ID NO: 115282 - DNA, 22 bp, synthetic construct
  misc_feature 1..22: note = chemically synthesized
  source 1..22: mol_type = other DNA
catagttacatgaaatattcat

SEQ ID NO: 115283 - DNA, 22 bp, synthetic construct
  misc_feature 1..22: note = chemically synthesized
  source 1..22: mol_type = other DNA
atagttacatgaaatattcatg

SEQ ID NO: 115284 - DNA, 22 bp, synthetic construct
  misc_feature 1..22: note = chemically synthesized
  source 1..22: mol_type = other DNA
catgaaatattcatgattatgt

SEQ ID NO: 115285 - DNA, 22 bp, synthetic construct
  misc_feature 1..22: note = chemically synthesized
  source 1..22: mol_type = other DNA
atgattatgtcaagcttttcac

SEQ ID NO: 115286 - DNA, 22 bp, synthetic construct
  misc_feature 1..22: note = chemically synthesized
  source 1..22: mol_type = other DNA
tgtcaagcttttcacagcatct

SEQ ID NO: 115287 - DNA, 22 bp, synthetic construct
  misc_feature 1..22: note = chemically synthesized
  source 1..22: mol_type = other DNA
ttcacagcatctaaatcatgta

SEQ ID NO: 115288 - DNA, 22 bp, synthetic construct
  misc_feature 1..22: note = chemically synthesized
  source 1..22: mol_type = other DNA
tcacagcatctaaatcatgtat

SEQ ID NO: 115289 - DNA, 22 bp, synthetic construct
  misc_feature 1..22: note = chemically synthesized
  source 1..22: mol_type = other DNA
cacagcatctaaatcatgtatg

SEQ ID NO: 115290 - DNA, 22 bp, synthetic construct
  misc_feature 1..22: note = chemically synthesized
  source 1..22: mol_type = other DNA
acagcatctaaatcatgtatgg

SEQ ID NO: 115291 - DNA, 22 bp, synthetic construct
  misc_feature 1..22: note = chemically synthesized
  source 1..22: mol_type = other DNA
aatcatgtatggcctcaataaa

SEQ ID NO: 115292 - DNA, 22 bp, synthetic construct
  misc_feature 1..22: note = chemically synthesized
  source 1..22: mol_type = other DNA
aataaattggactatcaccaca

SEQ ID NO: 115293 - DNA, 22 bp, synthetic construct
  misc_feature 1..22: note = chemically synthesized
  source 1..22: mol_type = other DNA
gactatcaccacagatctttta

SEQ ID NO: 115294 - DNA, 22 bp, synthetic construct
  misc_feature 1..22: note = chemically synthesized
  source 1..22: mol_type = other DNA
tcaccacagatcttttacaagt

SEQ ID NO: 115295 - DNA, 22 bp, synthetic construct
  misc_feature 1..22: note = chemically synthesized
  source 1..22: mol_type = other DNA
ttacaagtttgaactttattct

SEQ ID NO: 115296 - DNA, 22 bp, synthetic construct
  misc_feature 1..22: note = chemically synthesized
  source 1..22: mol_type = other DNA
tacaagtttgaactttattcta

SEQ ID NO: 115297 - DNA, 22 bp, synthetic construct
  misc_feature 1..22: note = chemically synthesized
  source 1..22: mol_type = other DNA
acaagtttgaactttattctaa

SEQ ID NO: 115298 - DNA, 22 bp, synthetic construct
  misc_feature 1..22: note = chemically synthesized
  source 1..22: mol_type = other DNA
caagtttgaactttattctaat

SEQ ID NO: 115299 - DNA, 22 bp, synthetic construct
  misc_feature 1..22: note = chemically synthesized
  source 1..22: mol_type = other DNA
gaactttattctaatgatagga

SEQ ID NO: 115300 - DNA, 22 bp, synthetic construct
  misc_feature 1..22: note = chemically synthesized
  source 1..22: mol_type = other DNA
aactttattctaatgataggag

SEQ ID NO: 115301 - DNA, 22 bp, synthetic construct
  misc_feature 1..22: note = chemically synthesized
  source 1..22: mol_type = other DNA
tattctaatgataggagctact

SEQ ID NO: 115302 - DNA, 22 bp, synthetic construct
  misc_feature 1..22: note = chemically synthesized
  source 1..22: mol_type = other DNA
attctaatgataggagctactg

SEQ ID NO: 115303 - DNA, 22 bp, synthetic construct
  misc_feature 1..22: note = chemically synthesized
  source 1..22: mol_type = other DNA
ttctaatgataggagctactga

SEQ ID NO: 115304 - DNA, 22 bp, synthetic construct
  misc_feature 1..22: note = chemically synthesized
  source 1..22: mol_type = other DNA
taatgataggagctactgaagt

SEQ ID NO: 115305 - DNA, 22 bp, synthetic construct
  misc_feature 1..22: note = chemically synthesized
  source 1..22: mol_type = other DNA
atgataggagctactgaagtac

SEQ ID NO: 115306 - DNA, 22 bp, synthetic construct
  misc_feature 1..22: note = chemically synthesized
  source 1..22: mol_type = other DNA
ctgaagtactgaaaacagtgca

SEQ ID NO: 115307 - DNA, 22 bp, synthetic construct
  misc_feature 1..22: note = chemically synthesized
  source 1..22: mol_type = other DNA
aagtactgaaaacagtgcagtg

SEQ ID NO: 115308 - DNA, 22 bp, synthetic construct
  misc_feature 1..22: note = chemically synthesized
  source 1..22: mol_type = other DNA
aaaacagtgcagtgattcatag

SEQ ID NO: 115309 - DNA, 22 bp, synthetic construct
  misc_feature 1..22: note = chemically synthesized
  source 1..22: mol_type = other DNA
atagagttagtactttctgcat

SEQ ID NO: 115310 - DNA, 22 bp, synthetic construct
  misc_feature 1..22: note = chemically synthesized
  source 1..22: mol_type = other DNA
gtactttctgcataatctcggt

SEQ ID NO: 115311 - DNA, 22 bp, synthetic construct
  misc_feature 1..22: note = chemically synthesized
  source 1..22: mol_type = other DNA
tctgcataatctcggtggctgc

SEQ ID NO: 115312 - DNA, 22 bp, synthetic construct
  misc_feature 1..22: note = chemically synthesized
  source 1..22: mol_type = other DNA
ctgcataatctcggtggctgca

SEQ ID NO: 115313 - DNA, 22 bp, synthetic construct
  misc_feature 1..22: note = chemically synthesized
  source 1..22: mol_type = other DNA
tgcataatctcggtggctgcag

SEQ ID NO: 115314 - DNA, 22 bp, synthetic construct
  misc_feature 1..22: note = chemically synthesized
  source 1..22: mol_type = other DNA
cataatctcggtggctgcagta

SEQ ID NO: 115315 - DNA, 22 bp, synthetic construct
  misc_feature 1..22: note = chemically synthesized
  source 1..22: mol_type = other DNA
ggtggctgcagtagaggatgga

SEQ ID NO: 115316 - DNA, 22 bp, synthetic construct
  misc_feature 1..22: note = chemically synthesized
  source 1..22: mol_type = other DNA
cagtagaggatggaccaaggga

SEQ ID NO: 115317 - DNA, 22 bp, synthetic construct
  misc_feature 1..22: note = chemically synthesized
  source 1..22: mol_type = other DNA
gctttgcatgttgaatgacagg

SEQ ID NO: 115318 - DNA, 22 bp, synthetic construct
  misc_feature 1..22: note = chemically synthesized
  source 1..22: mol_type = other DNA
tgcatgttgaatgacaggtcag

SEQ ID NO: 115319 - DNA, 22 bp, synthetic construct
  misc_feature 1..22: note = chemically synthesized
  source 1..22: mol_type = other DNA
gcatgttgaatgacaggtcagg

SEQ ID NO: 115320 - DNA, 22 bp, synthetic construct
  misc_feature 1..22: note = chemically synthesized
  source 1..22: mol_type = other DNA
catgttgaatgacaggtcaggc

SEQ ID NO: 115321 - DNA, 22 bp, synthetic construct
  misc_feature 1..22: note = chemically synthesized
  source 1..22: mol_type = other DNA
aatgacaggtcaggcaagcagg

SEQ ID NO: 115322 - DNA, 22 bp, synthetic construct
  misc_feature 1..22: note = chemically synthesized
  source 1..22: mol_type = other DNA
agaacaaggacattggctacag

SEQ ID NO: 115323 - DNA, 22 bp, synthetic construct
  misc_feature 1..22: note = chemically synthesized
  source 1..22: mol_type = other DNA
gctacagagatgaagatgaata

SEQ ID NO: 115324 - DNA, 22 bp, synthetic construct
  misc_feature 1..22: note = chemically synthesized
  source 1..22: mol_type = other DNA
cagagatgaagatgaatagatt

SEQ ID NO: 115325 - DNA, 22 bp, synthetic construct
  misc_feature 1..22: note = chemically synthesized
  source 1..22: mol_type = other DNA
cagggatagattaaaagaactt

SEQ ID NO: 115326 - DNA, 22 bp, synthetic construct
  misc_feature 1..22: note = chemically synthesized
  source 1..22: mol_type = other DNA
aaagaacttagttaaaaattag

SEQ ID NO: 115327 - DNA, 22 bp, synthetic construct
  misc_feature 1..22: note = chemically synthesized
  source 1..22: mol_type = other DNA
agttaaaaattagatacagaaa

SEQ ID NO: 115328 - DNA, 22 bp, synthetic construct
  misc_feature 1..22: note = chemically synthesized
  source 1..22: mol_type = other DNA
gttaaaaattagatacagaaag

SEQ ID NO: 115329 - DNA, 22 bp, synthetic construct
  misc_feature 1..22: note = chemically synthesized
  source 1..22: mol_type = other DNA
aaaattagatacagaaagaggg

SEQ ID NO: 115330 - DNA, 22 bp, synthetic construct
  misc_feature 1..22: note = chemically synthesized
  source 1..22: mol_type = other DNA
gatacagaaagagggagagggt

SEQ ID NO: 115331 - DNA, 22 bp, synthetic construct
  misc_feature 1..22: note = chemically synthesized
  source 1..22: mol_type = other DNA
agtagagcatcagctcaaaaat

SEQ ID NO: 115332 - DNA, 22 bp, synthetic construct
  misc_feature 1..22: note = chemically synthesized
  source 1..22: mol_type = other DNA
aaaaatgttgtcttgaatggca

SEQ ID NO: 115333 - DNA, 22 bp, synthetic construct
  misc_feature 1..22: note = chemically synthesized
  source 1..22: mol_type = other DNA
tcttgaatggcaggaaatggtg

SEQ ID NO: 115334 - DNA, 22 bp, synthetic construct
  misc_feature 1..22: note = chemically synthesized
  source 1..22: mol_type = other DNA
gaatggcaggaaatggtgaata

SEQ ID NO: 115335 - DNA, 22 bp, synthetic construct
  misc_feature 1..22: note = chemically synthesized
  source 1..22: mol_type = other DNA
aatggcaggaaatggtgaataa

SEQ ID NO: 115336 - DNA, 22 bp, synthetic construct
  misc_feature 1..22: note = chemically synthesized
  source 1..22: mol_type = other DNA
taaaaaatgcataaatatgaga

SEQ ID NO: 115337 - DNA, 22 bp, synthetic construct
  misc_feature 1..22: note = chemically synthesized
  source 1..22: mol_type = other DNA
ggctcaatattagacgtgttga

SEQ ID NO: 115338 - DNA, 22 bp, synthetic construct
  misc_feature 1..22: note = chemically synthesized
  source 1..22: mol_type = other DNA
aatattagacgtgttgagtttc

SEQ ID NO: 115339 - DNA, 22 bp, synthetic construct
  misc_feature 1..22: note = chemically synthesized
  source 1..22: mol_type = other DNA
gacgtgttgagtttcatcagta

SEQ ID NO: 115340 - DNA, 22 bp, synthetic construct
  misc_feature 1..22: note = chemically synthesized
  source 1..22: mol_type = other DNA
agtttcatcagtatccttttgg

SEQ ID NO: 115341 - DNA, 22 bp, synthetic construct
  misc_feature 1..22: note = chemically synthesized
  source 1..22: mol_type = other DNA
catcagtatccttttggaaaca

SEQ ID NO: 115342 - DNA, 22 bp, synthetic construct
  misc_feature 1..22: note = chemically synthesized
  source 1..22: mol_type = other DNA
atcagtatccttttggaaacac

SEQ ID NO: 115343 - DNA, 22 bp, synthetic construct
  misc_feature 1..22: note = chemically synthesized
  source 1..22: mol_type = other DNA
ttggaaacacctagtgagaagg

SEQ ID NO: 115344 - DNA, 22 bp, synthetic construct
  misc_feature 1..22: note = chemically synthesized
  source 1..22: mol_type = other DNA
tggaaacacctagtgagaaggc

SEQ ID NO: 115345 - DNA, 22 bp, synthetic construct
  misc_feature 1..22: note = chemically synthesized
  source 1..22: mol_type = other DNA
ggaaacacctagtgagaaggca

SEQ ID NO: 115346 - DNA, 22 bp, synthetic construct
  misc_feature 1..22: note = chemically synthesized
  source 1..22: mol_type = other DNA
gaaacacctagtgagaaggcag

SEQ ID NO: 115347 - DNA, 22 bp, synthetic construct
  misc_feature 1..22: note = chemically synthesized
  source 1..22: mol_type = other DNA
gtgagaaggcagaaactcaggc

SEQ ID NO: 115348 - DNA, 22 bp, synthetic construct
  misc_feature 1..22: note = chemically synthesized
  source 1..22: mol_type = other DNA
aggcctgatatgtaacggagtt

SEQ ID NO: 115349 - DNA, 22 bp, synthetic construct
  misc_feature 1..22: note = chemically synthesized
  source 1..22: mol_type = other DNA
atatgtaacggagttatctgga

SEQ ID NO: 115350 - DNA, 22 bp, synthetic construct
  misc_feature 1..22: note = chemically synthesized
  source 1..22: mol_type = other DNA
tctggactagagattaatgtct

SEQ ID NO: 115351 - DNA, 22 bp, synthetic construct
  misc_feature 1..22: note = chemically synthesized
  source 1..22: mol_type = other DNA
gactagagattaatgtctaaga

SEQ ID NO: 115352 - DNA, 22 bp, synthetic construct
  misc_feature 1..22: note = chemically synthesized
  source 1..22: mol_type = other DNA
gagattaatgtctaagagccac

SEQ ID NO: 115353 - DNA, 22 bp, synthetic construct
  misc_feature 1..22: note = chemically synthesized
  source 1..22: mol_type = other DNA
atgtctaagagccaccactgta

SEQ ID NO: 115354 - DNA, 22 bp, synthetic construct
  misc_feature 1..22: note = chemically synthesized
  source 1..22: mol_type = other DNA
agagccaccactgtataagtaa

SEQ ID NO: 115355 - DNA, 22 bp, synthetic construct
  misc_feature 1..22: note = chemically synthesized
  source 1..22: mol_type = other DNA
tataagtaataataataataga

SEQ ID NO: 115356 - DNA, 22 bp, synthetic construct
  misc_feature 1..22: note = chemically synthesized
  source 1..22: mol_type = other DNA
aggtgttcaaggacagtaaact

SEQ ID NO: 115357 - DNA, 22 bp, synthetic construct
  misc_feature 1..22: note = chemically synthesized
  source 1..22: mol_type = other DNA
aaggacagtaaactgaataaca

SEQ ID NO: 115358 - DNA, 22 bp, synthetic construct
  misc_feature 1..22: note = chemically synthesized
  source 1..22: mol_type = other DNA
aataacataaatatttgagcaa

SEQ ID NO: 115359 - DNA, 22 bp, synthetic construct
  misc_feature 1..22: note = chemically synthesized
  source 1..22: mol_type = other DNA
gagcaatggaaataagagagtg

SEQ ID NO: 115360 - DNA, 22 bp, synthetic construct
  misc_feature 1..22: note = chemically synthesized
  source 1..22: mol_type = other DNA
agcaatggaaataagagagtgc

SEQ ID NO: 115361 - DNA, 22 bp, synthetic construct
  misc_feature 1..22: note = chemically synthesized
  source 1..22: mol_type = other DNA
tcacaaaaatcagaagagaacc

SEQ ID NO: 115362 - DNA, 22 bp, synthetic construct
  misc_feature 1..22: note = chemically synthesized
  source 1..22: mol_type = other DNA
ggcattaagaatttctagagag

SEQ ID NO: 115363 - DNA, 22 bp, synthetic construct
  misc_feature 1..22: note = chemically synthesized
  source 1..22: mol_type = other DNA
gcattaagaatttctagagaga

SEQ ID NO: 115364 - DNA, 22 bp, synthetic construct
  misc_feature 1..22: note = chemically synthesized
  source 1..22: mol_type = other DNA
agaatttctagagagagctcta

SEQ ID NO: 115365 - DNA, 22 bp, synthetic construct
  misc_feature 1..22: note = chemically synthesized
  source 1..22: mol_type = other DNA
ctagagagagctctaaaaagga

SEQ ID NO: 115366 - DNA, 22 bp, synthetic construct
  misc_feature 1..22: note = chemically synthesized
  source 1..22: mol_type = other DNA
tagagagagctctaaaaaggaa

SEQ ID NO: 115367 - DNA, 22 bp, synthetic construct
  misc_feature 1..22: note = chemically synthesized
  source 1..22: mol_type = other DNA
gagagagctctaaaaaggaagg

SEQ ID NO: 115368 - DNA, 22 bp, synthetic construct
  misc_feature 1..22: note = chemically synthesized
  source 1..22: mol_type = other DNA
taaaaaggaaggcatggccaga

SEQ ID NO: 115369 - DNA, 22 bp, synthetic construct
  misc_feature 1..22: note = chemically synthesized
  source 1..22: mol_type = other DNA
aaaaggaaggcatggccagagc

SEQ ID NO: 115370 - DNA, 22 bp, synthetic construct
  misc_feature 1..22: note = chemically synthesized
  source 1..22: mol_type = other DNA
ttgcacaaaaaaatcaataaaa

SEQ ID NO: 115371 - DNA, 22 bp, synthetic construct
  misc_feature 1..22: note = chemically synthesized
  source 1..22: mol_type = other DNA
cacaaaaaaatcaataaaagca

SEQ ID NO: 115372 - DNA, 22 bp, synthetic construct
  misc_feature 1..22: note = chemically synthesized
  source 1..22: mol_type = other DNA
agactctccattgcatttggcc

SEQ ID NO: 115373 - DNA, 22 bp, synthetic construct
  misc_feature 1..22: note = chemically synthesized
  source 1..22: mol_type = other DNA
tccattgcatttggcccctaga

SEQ ID NO: 115374 - DNA, 22 bp, synthetic construct
  misc_feature 1..22: note = chemically synthesized
  source 1..22: mol_type = other DNA
cattgcatttggcccctagaag

SEQ ID NO: 115375 - DNA, 22 bp, synthetic construct
  misc_feature 1..22: note = chemically synthesized
  source 1..22: mol_type = other DNA
catttggcccctagaagtcact

SEQ ID NO: 115376 - DNA, 22 bp, synthetic construct
  misc_feature 1..22: note = chemically synthesized
  source 1..22: mol_type = other DNA
ggcccctagaagtcactggtga

SEQ ID NO: 115377 - DNA, 22 bp, synthetic construct
  misc_feature 1..22: note = chemically synthesized
  source 1..22: mol_type = other DNA
gcccctagaagtcactggtgaa

SEQ ID NO: 115378 - DNA, 22 bp, synthetic construct
  misc_feature 1..22: note = chemically synthesized
  source 1..22: mol_type = other DNA
gaagtcactggtgaatttaagg

SEQ ID NO: 115379 - DNA, 22 bp, synthetic construct
  misc_feature 1..22: note = chemically synthesized
  source 1..22: mol_type = other DNA
gtgaatttaaggagcattgctt

SEQ ID NO: 115380 - DNA, 22 bp, synthetic construct
  misc_feature 1..22: note = chemically synthesized
  source 1..22: mol_type = other DNA
aaggagcattgctttagctaag

SEQ ID NO: 115381 - DNA, 22 bp, synthetic construct
  misc_feature 1..22: note = chemically synthesized
  source 1..22: mol_type = other DNA
aggagcattgctttagctaagt

SEQ ID NO: 115382 - DNA, 22 bp, synthetic construct
  misc_feature 1..22: note = chemically synthesized
  source 1..22: mol_type = other DNA
ctttagctaagtgggttttaaa

SEQ ID NO: 115383 - DNA, 22 bp, synthetic construct
  misc_feature 1..22: note = chemically synthesized
  source 1..22: mol_type = other DNA
tagctaagtgggttttaaaaaa

SEQ ID NO: 115384 - DNA, 22 bp, synthetic construct
  misc_feature 1..22: note = chemically synthesized
  source 1..22: mol_type = other DNA
agctaagtgggttttaaaaaaa

SEQ ID NO: 115385 - DNA, 22 bp, synthetic construct
  misc_feature 1..22: note = chemically synthesized
  source 1..22: mol_type = other DNA
gctaagtgggttttaaaaaaaa

SEQ ID NO: 115386 - DNA, 22 bp, synthetic construct
  misc_feature 1..22: note = chemically synthesized
  source 1..22: mol_type = other DNA
agtgggttttaaaaaaaacatt

SEQ ID NO: 115387 - DNA, 22 bp, synthetic construct
  misc_feature 1..22: note = chemically synthesized
  source 1..22: mol_type = other DNA
taaaaaaaacattatagggtgg

SEQ ID NO: 115388 - DNA, 22 bp, synthetic construct
  misc_feature 1..22: note = chemically synthesized
  source 1..22: mol_type = other DNA
aaaaaaaacattatagggtggt

SEQ ID NO: 115389 - DNA, 22 bp, synthetic construct
  misc_feature 1..22: note = chemically synthesized
  source 1..22: mol_type = other DNA
aaaaaaacattatagggtggtt

SEQ ID NO: 115390 - DNA, 22 bp, synthetic construct
  misc_feature 1..22: note = chemically synthesized
  source 1..22: mol_type = other DNA
tagggtggttggttgagtagta

SEQ ID NO: 115391 - DNA, 22 bp, synthetic construct
  misc_feature 1..22: note = chemically synthesized
  source 1..22: mol_type = other DNA
gttgagtagtaaactgagaagt

SEQ ID NO: 115392 - DNA, 22 bp, synthetic construct
  misc_feature 1..22: note = chemically synthesized
  source 1..22: mol_type = other DNA
agtagtaaactgagaagtaaag

SEQ ID NO: 115393 - DNA, 22 bp, synthetic construct
  misc_feature 1..22: note = chemically synthesized
  source 1..22: mol_type = other DNA
agaagtaaagaaatggaaaaga

SEQ ID NO: 115394 - DNA, 22 bp, synthetic construct
  misc_feature 1..22: note = chemically synthesized
  source 1..22: mol_type = other DNA
ttttttaccccttgccaaagtg

SEQ ID NO: 115395 - DNA, 22 bp, synthetic construct
  misc_feature 1..22: note = chemically synthesized
  source 1..22: mol_type = other DNA
tttaccccttgccaaagtgatg

SEQ ID NO: 115396 - DNA, 22 bp, synthetic construct
  misc_feature 1..22: note = chemically synthesized
  source 1..22: mol_type = other DNA
ttaccccttgccaaagtgatgt

SEQ ID NO: 115397 - DNA, 22 bp, synthetic construct
  misc_feature 1..22: note = chemically synthesized
  source 1..22: mol_type = other DNA
taccccttgccaaagtgatgta

SEQ ID NO: 115398 - DNA, 22 bp, synthetic construct
  misc_feature 1..22: note = chemically synthesized
  source 1..22: mol_type = other DNA
accccttgccaaagtgatgtaa

SEQ ID NO: 115399 - DNA, 22 bp, synthetic construct
  misc_feature 1..22: note = chemically synthesized
  source 1..22: mol_type = other DNA
ccccttgccaaagtgatgtaag

SEQ ID NO: 115400 - DNA, 22 bp, synthetic construct
  misc_feature 1..22: note = chemically synthesized
  source 1..22: mol_type = other DNA
gccaaagtgatgtaagccttat

SEQ ID NO: 115401 - DNA, 22 bp, synthetic construct
  misc_feature 1..22: note = chemically synthesized
  source 1..22: mol_type = other DNA
ccaaagtgatgtaagccttata

SEQ ID NO: 115402 - DNA, 22 bp, synthetic construct
  misc_feature 1..22: note = chemically synthesized
  source 1..22: mol_type = other DNA
atatccatgcagcacctctgct

SEQ ID NO: 115403 - DNA, 22 bp, synthetic construct
  misc_feature 1..22: note = chemically synthesized
  source 1..22: mol_type = other DNA
tatccatgcagcacctctgctc

SEQ ID NO: 115404 - DNA, 22 bp, synthetic construct
  misc_feature 1..22: note = chemically synthesized
  source 1..22: mol_type = other DNA
tgctctcaactcgaagctcaca

SEQ ID NO: 115405 - DNA, 22 bp, synthetic construct
  misc_feature 1..22: note = chemically synthesized
  source 1..22: mol_type = other DNA
ctctcaactcgaagctcacaag

SEQ ID NO: 115406 - DNA, 22 bp, synthetic construct
  misc_feature 1..22: note = chemically synthesized
  source 1..22: mol_type = other DNA
tcaactcgaagctcacaagtat

SEQ ID NO: 115407 - DNA, 22 bp, synthetic construct
  misc_feature 1..22: note = chemically synthesized
  source 1..22: mol_type = other DNA
aactcgaagctcacaagtataa

SEQ ID NO: 115408 - DNA, 22 bp, synthetic construct
  misc_feature 1..22: note = chemically synthesized
  source 1..22: mol_type = other DNA
gaagctcacaagtataataaaa

SEQ ID NO: 115409 - DNA, 22 bp, synthetic construct
  misc_feature 1..22: note = chemically synthesized
  source 1..22: mol_type = other DNA
acaagtataataaaattcaaag

SEQ ID NO: 115410 - DNA, 22 bp, synthetic construct
  misc_feature 1..22: note = chemically synthesized
  source 1..22: mol_type = other DNA
aaagtagcttgcgtgacctgca

SEQ ID NO: 115411 - DNA, 22 bp, synthetic construct
  misc_feature 1..22: note = chemically synthesized
  source 1..22: mol_type = other DNA
gcgtgacctgcaagatcataca

SEQ ID NO: 115412 - DNA, 22 bp, synthetic construct
  misc_feature 1..22: note = chemically synthesized
  source 1..22: mol_type = other DNA
cgtgacctgcaagatcatacat

SEQ ID NO: 115413 - DNA, 22 bp, synthetic construct
  misc_feature 1..22: note = chemically synthesized
  source 1..22: mol_type = other DNA
caagatcatacatgacgtagca

SEQ ID NO: 115414 - DNA, 22 bp, synthetic construct
  misc_feature 1..22: note = chemically synthesized
  source 1..22: mol_type = other DNA
agctgctacttcaagtggattt

SEQ ID NO: 115415 - DNA, 22 bp, synthetic construct
  misc_feature 1..22: note = chemically synthesized
  source 1..22: mol_type = other DNA
gctgctacttcaagtggatttg

SEQ ID NO: 115416 - DNA, 22 bp, synthetic construct
  misc_feature 1..22: note = chemically synthesized
  source 1..22: mol_type = other DNA
ctacttcaagtggatttgccac

SEQ ID NO: 115417 - DNA, 22 bp, synthetic construct
  misc_feature 1..22: note = chemically synthesized
  source 1..22: mol_type = other DNA
cttcaagtggatttgccaccat

SEQ ID NO: 115418 - DNA, 22 bp, synthetic construct
  misc_feature 1..22: note = chemically synthesized
  source 1..22: mol_type = other DNA
caagtggatttgccaccattcc

SEQ ID NO: 115419 - DNA, 22 bp, synthetic construct
  misc_feature 1..22: note = chemically synthesized
  source 1..22: mol_type = other DNA
aagtggatttgccaccattccc

SEQ ID NO: 115420 - DNA, 22 bp, synthetic construct
  misc_feature 1..22: note = chemically synthesized
  source 1..22: mol_type = other DNA
gccaccattccccaccttgctt

SEQ ID NO: 115421 - DNA, 22 bp, synthetic construct
  misc_feature 1..22: note = chemically synthesized
  source 1..22: mol_type = other DNA
ccaccattccccaccttgcttc

SEQ ID NO: 115422 - DNA, 22 bp, synthetic construct
  misc_feature 1..22: note = chemically synthesized
  source 1..22: mol_type = other DNA
cccaccttgcttcctccattga

SEQ ID NO: 115423 - DNA, 22 bp, synthetic construct
  misc_feature 1..22: note = chemically synthesized
  source 1..22: mol_type = other DNA
gcttcctccattgaatatacat

SEQ ID NO: 115424 - DNA, 22 bp, synthetic construct
  misc_feature 1..22: note = chemically synthesized
  source 1..22: mol_type = other DNA
cttcctccattgaatatacatt

SEQ ID NO: 115425 - DNA, 22 bp, synthetic construct
  misc_feature 1..22: note = chemically synthesized
  source 1..22: mol_type = other DNA
cctccattgaatatacattggc

SEQ ID NO: 115426 - DNA, 22 bp, synthetic construct
  misc_feature 1..22: note = chemically synthesized
  source 1..22: mol_type = other DNA
ctccattgaatatacattggcc

SEQ ID NO: 115427 - DNA, 22 bp, synthetic construct
  misc_feature 1..22: note = chemically synthesized
  source 1..22: mol_type = other DNA
cattgaatatacattggccttc

SEQ ID NO: 115428 - DNA, 22 bp, synthetic construct
  misc_feature 1..22: note = chemically synthesized
  source 1..22: mol_type = other DNA
aatatacattggccttcttttg

SEQ ID NO: 115429 - DNA, 22 bp, synthetic construct
  misc_feature 1..22: note = chemically synthesized
  source 1..22: mol_type = other DNA
gccttcttttgtcttttaaact

SEQ ID NO: 115430 - DNA, 22 bp, synthetic construct
  misc_feature 1..22: note = chemically synthesized
  source 1..22: mol_type = other DNA
cttttgtcttttaaacttgtca

SEQ ID NO: 115431 - DNA, 22 bp, synthetic construct
  misc_feature 1..22: note = chemically synthesized
  source 1..22: mol_type = other DNA
ttttgtcttttaaacttgtcaa

SEQ ID NO: 115432 - DNA, 22 bp, synthetic construct
  misc_feature 1..22: note = chemically synthesized
  source 1..22: mol_type = other DNA
ttgtcttttaaacttgtcaagc

SEQ ID NO: 115433 - DNA, 22 bp, synthetic construct
  misc_feature 1..22: note = chemically synthesized
  source 1..22: mol_type = other DNA
tgtcttttaaacttgtcaagct

SEQ ID NO: 115434 - DNA, 22 bp, synthetic construct
  misc_feature 1..22: note = chemically synthesized
  source 1..22: mol_type = other DNA
gtcttttaaacttgtcaagctg

SEQ ID NO: 115435 - DNA, 22 bp, synthetic construct
  misc_feature 1..22: note = chemically synthesized
  source 1..22: mol_type = other DNA
tcttttaaacttgtcaagctgc

SEQ ID NO: 115436 - DNA, 22 bp, synthetic construct
  misc_feature 1..22: note = chemically synthesized
  source 1..22: mol_type = other DNA
ttaaacttgtcaagctgctctc

SEQ ID NO: 115437 - DNA, 22 bp, synthetic construct
  misc_feature 1..22: note = chemically synthesized
  source 1..22: mol_type = other DNA
taaacttgtcaagctgctctct

SEQ ID NO: 115438 - DNA, 22 bp, synthetic construct
  misc_feature 1..22: note = chemically synthesized
  source 1..22: mol_type = other DNA
aaacttgtcaagctgctctctg

SEQ ID NO: 115439 - DNA, 22 bp, synthetic construct
  misc_feature 1..22: note = chemically synthesized
  source 1..22: mol_type = other DNA
aacttgtcaagctgctctctgc

SEQ ID NO: 115440 - DNA, 22 bp, synthetic construct
  misc_feature 1..22: note = chemically synthesized
  source 1..22: mol_type = other DNA
gtcaagctgctctctgcttcag

SEQ ID NO: 115441 - DNA, 22 bp, synthetic construct
  misc_feature 1..22: note = chemically synthesized
  source 1..22: mol_type = other DNA
tcaagctgctctctgcttcagg

SEQ ID NO: 115442 - DNA, 22 bp, synthetic construct
  misc_feature 1..22: note = chemically synthesized
  source 1..22: mol_type = other DNA
ctctctgcttcaggaactttca

SEQ ID NO: 115443 - DNA, 22 bp, synthetic construct
  misc_feature 1..22: note = chemically synthesized
  source 1..22: mol_type = other DNA
tctgcttcaggaactttcactt

SEQ ID NO: 115444 - DNA, 22 bp, synthetic construct
  misc_feature 1..22: note = chemically synthesized
  source 1..22: mol_type = other DNA
tgcttcaggaactttcacttgt

SEQ ID NO: 115445 - DNA, 22 bp, synthetic construct
  misc_feature 1..22: note = chemically synthesized
  source 1..22: mol_type = other DNA
cttcaggaactttcacttgttc

SEQ ID NO: 115446 - DNA, 22 bp, synthetic construct
  misc_feature 1..22: note = chemically synthesized
  source 1..22: mol_type = other DNA
caggaactttcacttgttcttc

SEQ ID NO: 115447 - DNA, 22 bp, synthetic construct
  misc_feature 1..22: note = chemically synthesized
  source 1..22: mol_type = other DNA
aggaactttcacttgttcttcc

SEQ ID NO: 115448 - DNA, 22 bp, synthetic construct
  misc_feature 1..22: note = chemically synthesized
  source 1..22: mol_type = other DNA
tcacttgttcttcctccttcct

SEQ ID NO: 115449 - DNA, 22 bp, synthetic construct
  misc_feature 1..22: note = chemically synthesized
  source 1..22: mol_type = other DNA
cacttgttcttcctccttcctt

SEQ ID NO: 115450 - DNA, 22 bp, synthetic construct
  misc_feature 1..22: note = chemically synthesized
  source 1..22: mol_type = other DNA
acttgttcttcctccttccttg

SEQ ID NO: 115451 - DNA, 22 bp, synthetic construct
  misc_feature 1..22: note = chemically synthesized
  source 1..22: mol_type = other DNA
gttcttcctccttccttgaatg

SEQ ID NO: 115452 - DNA, 22 bp, synthetic construct
  misc_feature 1..22: note = chemically synthesized
  source 1..22: mol_type = other DNA
ttcttcctccttccttgaatgt

SEQ ID NO: 115453 - DNA, 22 bp, synthetic construct
  misc_feature 1..22: note = chemically synthesized
  source 1..22: mol_type = other DNA
ttcctccttccttgaatgtttt

SEQ ID NO: 115454 - DNA, 22 bp, synthetic construct
  misc_feature 1..22: note = chemically synthesized
  source 1..22: mol_type = other DNA
cctccttccttgaatgtttttc

SEQ ID NO: 115455 - DNA, 22 bp, synthetic construct
  misc_feature 1..22: note = chemically synthesized
  source 1..22: mol_type = other DNA
ctccttccttgaatgtttttcc

SEQ ID NO: 115456 - DNA, 22 bp, synthetic construct
  misc_feature 1..22: note = chemically synthesized
  source 1..22: mol_type = other DNA
cttccttgaatgtttttcccta

SEQ ID NO: 115457 - DNA, 22 bp, synthetic construct
  misc_feature 1..22: note = chemically synthesized
  source 1..22: mol_type = other DNA
ccttgaatgtttttccctaaga

SEQ ID NO: 115458 - DNA, 22 bp, synthetic construct
  misc_feature 1..22: note = chemically synthesized
  source 1..22: mol_type = other DNA
cttgaatgtttttccctaagat

SEQ ID NO: 115459 - DNA, 22 bp, synthetic construct
  misc_feature 1..22: note = chemically synthesized
  source 1..22: mol_type = other DNA
gaatgtttttccctaagatagc

SEQ ID NO: 115460 - DNA, 22 bp, synthetic construct
  misc_feature 1..22: note = chemically synthesized
  source 1..22: mol_type = other DNA
aatgtttttccctaagatagcc

SEQ ID NO: 115461 - DNA, 22 bp, synthetic construct
  misc_feature 1..22: note = chemically synthesized
  source 1..22: mol_type = other DNA
ttccctaagatagccacacact

SEQ ID NO: 115462 - DNA, 22 bp, synthetic construct
  misc_feature 1..22: note = chemically synthesized
  source 1..22: mol_type = other DNA
tccctaagatagccacacactt

SEQ ID NO: 115463 - DNA, 22 bp, synthetic construct
  misc_feature 1..22: note = chemically synthesized
  source 1..22: mol_type = other DNA
ccctaagatagccacacacttg

SEQ ID NO: 115464 - DNA, 22 bp, synthetic construct
  misc_feature 1..22: note = chemically synthesized
  source 1..22: mol_type = other DNA
cctaagatagccacacacttgc

SEQ ID NO: 115465 - DNA, 22 bp, synthetic construct
  misc_feature 1..22: note = chemically synthesized
  source 1..22: mol_type = other DNA
agatagccacacacttgccctc

SEQ ID NO: 115466 - DNA, 22 bp, synthetic construct
  misc_feature 1..22: note = chemically synthesized
  source 1..22: mol_type = other DNA
gccctctgattttgatttcttc

SEQ ID NO: 115467 - DNA, 22 bp, synthetic construct
  misc_feature 1..22: note = chemically synthesized
  source 1..22: mol_type = other DNA
ccctctgattttgatttcttct

SEQ ID NO: 115468 - DNA, 22 bp, synthetic construct
  misc_feature 1..22: note = chemically synthesized
  source 1..22: mol_type = other DNA
tgattttgatttcttctctaaa

SEQ ID NO: 115469 - DNA, 22 bp, synthetic construct
  misc_feature 1..22: note = chemically synthesized
  source 1..22: mol_type = other DNA
attttgatttcttctctaaaat

SEQ ID NO: 115470 - DNA, 22 bp, synthetic construct
  misc_feature 1..22: note = chemically synthesized
  source 1..22: mol_type = other DNA
tgatttcttctctaaaattacc

SEQ ID NO: 115471 - DNA, 22 bp, synthetic construct
  misc_feature 1..22: note = chemically synthesized
  source 1..22: mol_type = other DNA
gatttcttctctaaaattacct

SEQ ID NO: 115472 - DNA, 22 bp, synthetic construct
  misc_feature 1..22: note = chemically synthesized
  source 1..22: mol_type = other DNA
atttcttctctaaaattaccta

SEQ ID NO: 115473 - DNA, 22 bp, synthetic construct
  misc_feature 1..22: note = chemically synthesized
  source 1..22: mol_type = other DNA
cttctctaaaattacctactca

SEQ ID NO: 115474 - DNA, 22 bp, synthetic construct
  misc_feature 1..22: note = chemically synthesized
  source 1..22: mol_type = other DNA
ttctctaaaattacctactcag

SEQ ID NO: 115475 - DNA, 22 bp, synthetic construct
  misc_feature 1..22: note = chemically synthesized
  source 1..22: mol_type = other DNA
ctctaaaattacctactcagag

SEQ ID NO: 115476 - DNA, 22 bp, synthetic construct
  misc_feature 1..22: note = chemically synthesized
  source 1..22: mol_type = other DNA
tctaaaattacctactcagaga

SEQ ID NO: 115477 - DNA, 22 bp, synthetic construct
  misc_feature 1..22: note = chemically synthesized
  source 1..22: mol_type = other DNA
taaaattacctactcagagagg

SEQ ID NO: 115478 - DNA, 22 bp, synthetic construct
  misc_feature 1..22: note = chemically synthesized
  source 1..22: mol_type = other DNA
aaattacctactcagagaggtc

SEQ ID NO: 115479 - DNA, 22 bp, synthetic construct
  misc_feature 1..22: note = chemically synthesized
  source 1..22: mol_type = other DNA
cctactcagagaggtcttctct

SEQ ID NO: 115480 - DNA, 22 bp, synthetic construct
  misc_feature 1..22: note = chemically synthesized
  source 1..22: mol_type = other DNA
ctcagagaggtcttctctgact

SEQ ID NO: 115481 - DNA, 22 bp, synthetic construct
  misc_feature 1..22: note = chemically synthesized
  source 1..22: mol_type = other DNA
agagaggtcttctctgactacc

SEQ ID NO: 115482 - DNA, 22 bp, synthetic construct
  misc_feature 1..22: note = chemically synthesized
  source 1..22: mol_type = other DNA
ctctgactaccctatataaaat

SEQ ID NO: 115483 - DNA, 22 bp, synthetic construct
  misc_feature 1..22: note = chemically synthesized
  source 1..22: mol_type = other DNA
tctgactaccctatataaaatg

SEQ ID NO: 115484 - DNA, 22 bp, synthetic construct
  misc_feature 1..22: note = chemically synthesized
  source 1..22: mol_type = other DNA
tgactaccctatataaaatgca

SEQ ID NO: 115485 - DNA, 22 bp, synthetic construct
  misc_feature 1..22: note = chemically synthesized
  source 1..22: mol_type = other DNA
actaccctatataaaatgcatc

SEQ ID NO: 115486 - DNA, 22 bp, synthetic construct
  misc_feature 1..22: note = chemically synthesized
  source 1..22: mol_type = other DNA
ccctatataaaatgcatcactc

SEQ ID NO: 115487 - DNA, 22 bp, synthetic construct
  misc_feature 1..22: note = chemically synthesized
  source 1..22: mol_type = other DNA
tataaaatgcatcactcttacc

SEQ ID NO: 115488 - DNA, 22 bp, synthetic construct
  misc_feature 1..22: note = chemically synthesized
  source 1..22: mol_type = other DNA
ttaccttcctcctttgctccct

SEQ ID NO: 115489 - DNA, 22 bp, synthetic construct
  misc_feature 1..22: note = chemically synthesized
  source 1..22: mol_type = other DNA
accttcctcctttgctccctac

SEQ ID NO: 115490 - DNA, 22 bp, synthetic construct
  misc_feature 1..22: note = chemically synthesized
  source 1..22: mol_type = other DNA
ccttcctcctttgctccctact

SEQ ID NO: 115491 - DNA, 22 bp, synthetic construct
  misc_feature 1..22: note = chemically synthesized
  source 1..22: mol_type = other DNA
cctcctttgctccctacttctt

SEQ ID NO: 115492 - DNA, 22 bp, synthetic construct
  misc_feature 1..22: note = chemically synthesized
  source 1..22: mol_type = other DNA
ctcctttgctccctacttcttt

SEQ ID NO: 115493 - DNA, 22 bp, synthetic construct
  misc_feature 1..22: note = chemically synthesized
  source 1..22: mol_type = other DNA
ctttgctccctacttctttatt

SEQ ID NO: 115494 - DNA, 22 bp, synthetic construct
  misc_feature 1..22: note = chemically synthesized
  source 1..22: mol_type = other DNA
tgctccctacttctttattgca

SEQ ID NO: 115495 - DNA, 22 bp, synthetic construct
  misc_feature 1..22: note = chemically synthesized
  source 1..22: mol_type = other DNA
gctccctacttctttattgcat

SEQ ID NO: 115496 - DNA, 22 bp, synthetic construct
  misc_feature 1..22: note = chemically synthesized
  source 1..22: mol_type = other DNA
ctccctacttctttattgcatt

SEQ ID NO: 115497 - DNA, 22 bp, synthetic construct
  misc_feature 1..22: note = chemically synthesized
  source 1..22: mol_type = other DNA
cctacttctttattgcattaca

SEQ ID NO: 115498 - DNA, 22 bp, synthetic construct
  misc_feature 1..22: note = chemically synthesized
  source 1..22: mol_type = other DNA
cttctttattgcattacattac

SEQ ID NO: 115499 - DNA, 22 bp, synthetic construct
  misc_feature 1..22: note = chemically synthesized
  source 1..22: mol_type = other DNA
ctttattgcattacattacctt

SEQ ID NO: 115500 - DNA, 22 bp, synthetic construct
  misc_feature 1..22: note = chemically synthesized
  source 1..22: mol_type = other DNA
tttattgcattacattaccttg

SEQ ID NO: 115501 - DNA, 22 bp, synthetic construct
  misc_feature 1..22: note = chemically synthesized
  source 1..22: mol_type = other DNA
tattgcattacattaccttgca

SEQ ID NO: 115502 - DNA, 22 bp, synthetic construct
  misc_feature 1..22: note = chemically synthesized
  source 1..22: mol_type = other DNA
attgcattacattaccttgcat

SEQ ID NO: 115503 - DNA, 22 bp, synthetic construct
  misc_feature 1..22: note = chemically synthesized
  source 1..22: mol_type = other DNA
ttgcattacattaccttgcatt

SEQ ID NO: 115504 - DNA, 22 bp, synthetic construct
  misc_feature 1..22: note = chemically synthesized
  source 1..22: mol_type = other DNA
cattacattaccttgcattgca

SEQ ID NO: 115505 - DNA, 22 bp, synthetic construct
  misc_feature 1..22: note = chemically synthesized
  source 1..22: mol_type = other DNA
cattaccttgcattgcagtatg

SEQ ID NO: 115506 - DNA, 22 bp, synthetic construct
  misc_feature 1..22: note = chemically synthesized
  source 1..22: mol_type = other DNA
ccttgcattgcagtatgtatgt

SEQ ID NO: 115507 - DNA, 22 bp, synthetic construct
  misc_feature 1..22: note = chemically synthesized
  source 1..22: mol_type = other DNA
gcattgcagtatgtatgtatgt

SEQ ID NO: 115508 - DNA, 22 bp, synthetic construct
  misc_feature 1..22: note = chemically synthesized
  source 1..22: mol_type = other DNA
cattgcagtatgtatgtatgtg

SEQ ID NO: 115509 - DNA, 22 bp, synthetic construct
  misc_feature 1..22: note = chemically synthesized
  source 1..22: mol_type = other DNA
cagtatgtatgtatgtgtttat

SEQ ID NO: 115510 - DNA, 22 bp, synthetic construct
  misc_feature 1..22: note = chemically synthesized
  source 1..22: mol_type = other DNA
atttttgtctctgttctgtttc

SEQ ID NO: 115511 - DNA, 22 bp, synthetic construct
  misc_feature 1..22: note = chemically synthesized
  source 1..22: mol_type = other DNA
tttttgtctctgttctgtttct

SEQ ID NO: 115512 - DNA, 22 bp, synthetic construct
  misc_feature 1..22: note = chemically synthesized
  source 1..22: mol_type = other DNA
ttgtctctgttctgtttctgtt

SEQ ID NO: 115513 - DNA, 22 bp, synthetic construct
  misc_feature 1..22: note = chemically synthesized
  source 1..22: mol_type = other DNA
tgtctctgttctgtttctgttc

SEQ ID NO: 115514 - DNA, 22 bp, synthetic construct
  misc_feature 1..22: note = chemically synthesized
  source 1..22: mol_type = other DNA
gtctctgttctgtttctgttca

SEQ ID NO: 115515 - DNA, 22 bp, synthetic construct
  misc_feature 1..22: note = chemically synthesized
  source 1..22: mol_type = other DNA
tctctgttctgtttctgttcat

SEQ ID NO: 115516 - DNA, 22 bp, synthetic construct
  misc_feature 1..22: note = chemically synthesized
  source 1..22: mol_type = other DNA
tgttctgtttctgttcattgta

SEQ ID NO: 115517 - DNA, 22 bp, synthetic construct
  misc_feature 1..22: note = chemically synthesized
  source 1..22: mol_type = other DNA
ttctgtttctgttcattgtatt

SEQ ID NO: 115518 - DNA, 22 bp, synthetic construct
  misc_feature 1..22: note = chemically synthesized
  source 1..22: mol_type = other DNA
tgtttctgttcattgtattttc

SEQ ID NO: 115519 - DNA, 22 bp, synthetic construct
  misc_feature 1..22: note = chemically synthesized
  source 1..22: mol_type = other DNA
tttctgttcattgtattttcag

SEQ ID NO: 115520 - DNA, 22 bp, synthetic construct
  misc_feature 1..22: note = chemically synthesized
  source 1..22: mol_type = other DNA
ctgttcattgtattttcagtac

SEQ ID NO: 115521 - DNA, 22 bp, synthetic construct
  misc_feature 1..22: note = chemically synthesized
  source 1..22: mol_type = other DNA
tgttcattgtattttcagtacc

SEQ ID NO: 115522 - DNA, 22 bp, synthetic construct
  misc_feature 1..22: note = chemically synthesized
  source 1..22: mol_type = other DNA
ttcattgtattttcagtaccta

SEQ ID NO: 115523 - DNA, 22 bp, synthetic construct
  misc_feature 1..22: note = chemically synthesized
  source 1..22: mol_type = other DNA
attgtattttcagtacctaggt

SEQ ID NO: 115524 - DNA, 22 bp, synthetic construct
  misc_feature 1..22: note = chemically synthesized
  source 1..22: mol_type = other DNA
tattttcagtacctaggtgtaa

SEQ ID NO: 115525 - DNA, 22 bp, synthetic construct
  misc_feature 1..22: note = chemically synthesized
  source 1..22: mol_type = other DNA
tcagtacctaggtgtaaaagta

SEQ ID NO: 115526 - DNA, 22 bp, synthetic construct
  misc_feature 1..22: note = chemically synthesized
  source 1..22: mol_type = other DNA
cagtacctaggtgtaaaagtaa

SEQ ID NO: 115527 - DNA, 22 bp, synthetic construct
  misc_feature 1..22: note = chemically synthesized
  source 1..22: mol_type = other DNA
agtacctaggtgtaaaagtaat

SEQ ID NO: 115528 - DNA, 22 bp, synthetic construct
  misc_feature 1..22: note = chemically synthesized
  source 1..22: mol_type = other DNA
ggtgtaaaagtaattgcagttc

SEQ ID NO: 115529 - DNA, 22 bp, synthetic construct
  misc_feature 1..22: note = chemically synthesized
  source 1..22: mol_type = other DNA
cagttcttgccattgaaagtaa

SEQ ID NO: 115530 - DNA, 22 bp, synthetic construct
  misc_feature 1..22: note = chemically synthesized
  source 1..22: mol_type = other DNA
ttgccattgaaagtaatggtaa

SEQ ID NO: 115531 - DNA, 22 bp, synthetic construct
  misc_feature 1..22: note = chemically synthesized
  source 1..22: mol_type = other DNA
gccattgaaagtaatggtaaaa

SEQ ID NO: 115532 - DNA, 22 bp, synthetic construct
  misc_feature 1..22: note = chemically synthesized
  source 1..22: mol_type = other DNA
ccattgaaagtaatggtaaaaa

SEQ ID NO: 115533 - DNA, 22 bp, synthetic construct
  misc_feature 1..22: note = chemically synthesized
  source 1..22: mol_type = other DNA
aaagtaatggtaaaaaccacaa

SEQ ID NO: 115534 - DNA, 22 bp, synthetic construct
  misc_feature 1..22: note = chemically synthesized
  source 1..22: mol_type = other DNA
cttttgcaccaacctaatagaa

SEQ ID NO: 115535 - DNA, 22 bp, synthetic construct
  misc_feature 1..22: note = chemically synthesized
  source 1..22: mol_type = other DNA
ttgcaccaacctaatagaatta

SEQ ID NO: 115536 - DNA, 22 bp, synthetic construct
  misc_feature 1..22: note = chemically synthesized
  source 1..22: mol_type = other DNA
tgcaccaacctaatagaattat

SEQ ID NO: 115537 - DNA, 22 bp, synthetic construct
  misc_feature 1..22: note = chemically synthesized
  source 1..22: mol_type = other DNA
gcaccaacctaatagaattatg

SEQ ID NO: 115538 - DNA, 22 bp, synthetic construct
  misc_feature 1..22: note = chemically synthesized
  source 1..22: mol_type = other DNA
caccaacctaatagaattatgt

SEQ ID NO: 115539 - DNA, 22 bp, synthetic construct
  misc_feature 1..22: note = chemically synthesized
  source 1..22: mol_type = other DNA
atagaattatgtctgccatgta

SEQ ID NO: 115540 - DNA, 22 bp, synthetic construct
  misc_feature 1..22: note = chemically synthesized
  source 1..22: mol_type = other DNA
tgtctgccatgtaatacaattt

SEQ ID NO: 115541 - DNA, 22 bp, synthetic construct
  misc_feature 1..22: note = chemically synthesized
  source 1..22: mol_type = other DNA
ccatgtaatacaatttcaatat

SEQ ID NO: 115542 - DNA, 22 bp, synthetic construct
  misc_feature 1..22: note = chemically synthesized
  source 1..22: mol_type = other DNA
caatatgtatttattgaatcaa

SEQ ID NO: 115543 - DNA, 22 bp, synthetic construct
  misc_feature 1..22: note = chemically synthesized
  source 1..22: mol_type = other DNA
aatatgtatttattgaatcaat

SEQ ID NO: 115544 - DNA, 22 bp, synthetic construct
  misc_feature 1..22: note = chemically synthesized
  source 1..22: mol_type = other DNA
attgaatcaattaatgaataat

SEQ ID NO: 115545 - DNA, 22 bp, synthetic construct
  misc_feature 1..22: note = chemically synthesized
  source 1..22: mol_type = other DNA
ttgaatcaattaatgaataatt

SEQ ID NO: 115546 - DNA, 22 bp, synthetic construct
  misc_feature 1..22: note = chemically synthesized
  source 1..22: mol_type = other DNA
aatcaattaatgaataattatt

SEQ ID NO: 115547 - DNA, 22 bp, synthetic construct
  misc_feature 1..22: note = chemically synthesized
  source 1..22: mol_type = other DNA
atgaataattattgaaataatt

SEQ ID NO: 115548 - DNA, 22 bp, synthetic construct
  misc_feature 1..22: note = chemically synthesized
  source 1..22: mol_type = other DNA
ttgaaataattgaatattgaaa

SEQ ID NO: 115549 - DNA, 22 bp, synthetic construct
  misc_feature 1..22: note = chemically synthesized
  source 1..22: mol_type = other DNA
aaataattgaatattgaaataa

SEQ ID NO: 115550 - DNA, 22 bp, synthetic construct
  misc_feature 1..22: note = chemically synthesized
  source 1..22: mol_type = other DNA
aatattgaaataattattgaaa

SEQ ID NO: 115551 - DNA, 22 bp, synthetic construct
  misc_feature 1..22: note = chemically synthesized
  source 1..22: mol_type = other DNA
aaataattattgaaataagatt

SEQ ID NO: 115552 - DNA, 22 bp, synthetic construct
  misc_feature 1..22: note = chemically synthesized
  source 1..22: mol_type = other DNA
ttgaaataagattaatggtaat

SEQ ID NO: 115553 - DNA, 22 bp, synthetic construct
  misc_feature 1..22: note = chemically synthesized
  source 1..22: mol_type = other DNA
aaataagattaatggtaatgat

SEQ ID NO: 115554 - DNA, 22 bp, synthetic construct
  misc_feature 1..22: note = chemically synthesized
  source 1..22: mol_type = other DNA
atggtaatgatacatatttaat

SEQ ID NO: 115555 - DNA, 22 bp, synthetic construct
  misc_feature 1..22: note = chemically synthesized
  source 1..22: mol_type = other DNA
aataatttattcaaataatatt

SEQ ID NO: 115556 - DNA, 22 bp, synthetic construct
  misc_feature 1..22: note = chemically synthesized
  source 1..22: mol_type = other DNA
ataatttattcaaataatattt

SEQ ID NO: 115557 - DNA, 22 bp, synthetic construct
  misc_feature 1..22: note = chemically synthesized
  source 1..22: mol_type = other DNA
attcaaataatatttaaaggat

SEQ ID NO: 115558 - DNA, 22 bp, synthetic construct
  misc_feature 1..22: note = chemically synthesized
  source 1..22: mol_type = other DNA
ttcaaataatatttaaaggatt

SEQ ID NO: 115559 - DNA, 22 bp, synthetic construct
  misc_feature 1..22: note = chemically synthesized
  source 1..22: mol_type = other DNA
aaataatatttaaaggattcca

SEQ ID NO: 115560 - DNA, 22 bp, synthetic construct
  misc_feature 1..22: note = chemically synthesized
  source 1..22: mol_type = other DNA
aaaggattccaatgatatggtg

SEQ ID NO: 115561 - DNA, 22 bp, synthetic construct
  misc_feature 1..22: note = chemically synthesized
  source 1..22: mol_type = other DNA
aaggattccaatgatatggtgg

SEQ ID NO: 115562 - DNA, 22 bp, synthetic construct
  misc_feature 1..22: note = chemically synthesized
  source 1..22: mol_type = other DNA
caatgatatggtggctaaaaaa

SEQ ID NO: 115563 - DNA, 22 bp, synthetic construct
  misc_feature 1..22: note = chemically synthesized
  source 1..22: mol_type = other DNA
aaaaagtcaatccctagagcta

SEQ ID NO: 115564 - DNA, 22 bp, synthetic construct
  misc_feature 1..22: note = chemically synthesized
  source 1..22: mol_type = other DNA
gagctaatattaaaattaaaaa

SEQ ID NO: 115565 - DNA, 22 bp, synthetic construct
  misc_feature 1..22: note = chemically synthesized
  source 1..22: mol_type = other DNA
atattaaaattaaaaaagagac

SEQ ID NO: 115566 - DNA, 22 bp, synthetic construct
  misc_feature 1..22: note = chemically synthesized
  source 1..22: mol_type = other DNA
aaattaaaaaagagacagtcat

SEQ ID NO: 115567 - DNA, 22 bp, synthetic construct
  misc_feature 1..22: note = chemically synthesized
  source 1..22: mol_type = other DNA
aaaaagagacagtcatggttta

SEQ ID NO: 115568 - DNA, 22 bp, synthetic construct
  misc_feature 1..22: note = chemically synthesized
  source 1..22: mol_type = other DNA
atgtccacaaggaattcacatt

SEQ ID NO: 115569 - DNA, 22 bp, synthetic construct
  misc_feature 1..22: note = chemically synthesized
  source 1..22: mol_type = other DNA
tgtccacaaggaattcacatta

SEQ ID NO: 115570 - DNA, 22 bp, synthetic construct
  misc_feature 1..22: note = chemically synthesized
  source 1..22: mol_type = other DNA
acattatagaagcaatacagaa

SEQ ID NO: 115571 - DNA, 22 bp, synthetic construct
  misc_feature 1..22: note = chemically synthesized
  source 1..22: mol_type = other DNA
tagaagcaatacagaaattgac

SEQ ID NO: 115572 - DNA, 22 bp, synthetic construct
  misc_feature 1..22: note = chemically synthesized
  source 1..22: mol_type = other DNA
acaatgctgcagggaaaatatc

SEQ ID NO: 115573 - DNA, 22 bp, synthetic construct
  misc_feature 1..22: note = chemically synthesized
  source 1..22: mol_type = other DNA
cagggaaaatatcatggtaatt

SEQ ID NO: 115574 - DNA, 22 bp, synthetic construct
  misc_feature 1..22: note = chemically synthesized
  source 1..22: mol_type = other DNA
gtgcatagtgaactacaggaac

SEQ ID NO: 115575 - DNA, 22 bp, synthetic construct
  misc_feature 1..22: note = chemically synthesized
  source 1..22: mol_type = other DNA
caggaacacataggagagggta

SEQ ID NO: 115576 - DNA, 22 bp, synthetic construct
  misc_feature 1..22: note = chemically synthesized
  source 1..22: mol_type = other DNA
aaactaaacttggggaatttaa

SEQ ID NO: 115577 - DNA, 22 bp, synthetic construct
  misc_feature 1..22: note = chemically synthesized
  source 1..22: mol_type = other DNA
aacttggggaatttaagaaggc

SEQ ID NO: 115578 - DNA, 22 bp, synthetic construct
  misc_feature 1..22: note = chemically synthesized
  source 1..22: mol_type = other DNA
ggggaatttaagaaggccttct

SEQ ID NO: 115579 - DNA, 22 bp, synthetic construct
  misc_feature 1..22: note = chemically synthesized
  source 1..22: mol_type = other DNA
gggaatttaagaaggccttctg

SEQ ID NO: 115580 - DNA, 22 bp, synthetic construct
  misc_feature 1..22: note = chemically synthesized
  source 1..22: mol_type = other DNA
aagaaggccttctgaaggacat

SEQ ID NO: 115581 - DNA, 22 bp, synthetic construct
  misc_feature 1..22: note = chemically synthesized
  source 1..22: mol_type = other DNA
agaaggccttctgaaggacatc

SEQ ID NO: 115582 - DNA, 22 bp, synthetic construct
  misc_feature 1..22: note = chemically synthesized
  source 1..22: mol_type = other DNA
ctgaaggacatcatatctaagc

SEQ ID NO: 115583 - DNA, 22 bp, synthetic construct
  misc_feature 1..22: note = chemically synthesized
  source 1..22: mol_type = other DNA
tgaaggacatcatatctaagct

SEQ ID NO: 115584 - DNA, 22 bp, synthetic construct
  misc_feature 1..22: note = chemically synthesized
  source 1..22: mol_type = other DNA
aaggacatcatatctaagctaa

SEQ ID NO: 115585 - DNA, 22 bp, synthetic construct
  misc_feature 1..22: note = chemically synthesized
  source 1..22: mol_type = other DNA
agctaaggtgggttatattagt

SEQ ID NO: 115586 - DNA, 22 bp, synthetic construct
  misc_feature 1..22: note = chemically synthesized
  source 1..22: mol_type = other DNA
aggtgggttatattagtagaag

SEQ ID NO: 115587 - DNA, 22 bp, synthetic construct
  misc_feature 1..22: note = chemically synthesized
  source 1..22: mol_type = other DNA
tattagtagaagttaactagac

SEQ ID NO: 115588 - DNA, 22 bp, synthetic construct
  misc_feature 1..22: note = chemically synthesized
  source 1..22: mol_type = other DNA
gtagaagttaactagacaaaga

SEQ ID NO: 115589 - DNA, 22 bp, synthetic construct
  misc_feature 1..22: note = chemically synthesized
  source 1..22: mol_type = other DNA
actagacaaagattaagggaaa

SEQ ID NO: 115590 - DNA, 22 bp, synthetic construct
  misc_feature 1..22: note = chemically synthesized
  source 1..22: mol_type = other DNA
gacaaagattaagggaaagcta

SEQ ID NO: 115591 - DNA, 22 bp, synthetic construct
  misc_feature 1..22: note = chemically synthesized
  source 1..22: mol_type = other DNA
agggaaagctatttcaggaaaa

SEQ ID NO: 115592 - DNA, 22 bp, synthetic construct
  misc_feature 1..22: note = chemically synthesized
  source 1..22: mol_type = other DNA
tttcaggaaaaaatgtttttat

SEQ ID NO: 115593 - DNA, 22 bp, synthetic construct
  misc_feature 1..22: note = chemically synthesized
  source 1..22: mol_type = other DNA
caggaaaaaatgtttttattcc

SEQ ID NO: 115594 - DNA, 22 bp, synthetic construct
  misc_feature 1..22: note = chemically synthesized
  source 1..22: mol_type = other DNA
aggaaaaaatgtttttattcca

SEQ ID NO: 115595 - DNA, 22 bp, synthetic construct
  misc_feature 1..22: note = chemically synthesized
  source 1..22: mol_type = other DNA
ttattccaggaagaatgaaaat

SEQ ID NO: 115596 - DNA, 22 bp, synthetic construct
  misc_feature 1..22: note = chemically synthesized
  source 1..22: mol_type = other DNA
tattccaggaagaatgaaaata

SEQ ID NO: 115597 - DNA, 22 bp, synthetic construct
  misc_feature 1..22: note = chemically synthesized
  source 1..22: mol_type = other DNA
attccaggaagaatgaaaatac

SEQ ID NO: 115598 - DNA, 22 bp, synthetic construct
  misc_feature 1..22: note = chemically synthesized
  source 1..22: mol_type = other DNA
ttccaggaagaatgaaaataca

SEQ ID NO: 115599 - DNA, 22 bp, synthetic construct
  misc_feature 1..22: note = chemically synthesized
  source 1..22: mol_type = other DNA
caggaagaatgaaaatacaaat

SEQ ID NO: 115600 - DNA, 22 bp, synthetic construct
  misc_feature 1..22: note = chemically synthesized
  source 1..22: mol_type = other DNA
acctatgagcaagcatactaga

SEQ ID NO: 115601 - DNA, 22 bp, synthetic construct
  misc_feature 1..22: note = chemically synthesized
  source 1..22: mol_type = other DNA
cctatgagcaagcatactagat

SEQ ID NO: 115602 - DNA, 22 bp, synthetic construct
  misc_feature 1..22: note = chemically synthesized
  source 1..22: mol_type = other DNA
tgagcaagcatactagataaac

SEQ ID NO: 115603 - DNA, 22 bp, synthetic construct
  misc_feature 1..22: note = chemically synthesized
  source 1..22: mol_type = other DNA
gataaactggaagaattgttta

SEQ ID NO: 115604 - DNA, 22 bp, synthetic construct
  misc_feature 1..22: note = chemically synthesized
  source 1..22: mol_type = other DNA
gaagaattgtttagtgtcatta

SEQ ID NO: 115605 - DNA, 22 bp, synthetic construct
  misc_feature 1..22: note = chemically synthesized
  source 1..22: mol_type = other DNA
tttagtgtcattaacaccgtga

SEQ ID NO: 115606 - DNA, 22 bp, synthetic construct
  misc_feature 1..22: note = chemically synthesized
  source 1..22: mol_type = other DNA
agtgtcattaacaccgtgaata

SEQ ID NO: 115607 - DNA, 22 bp, synthetic construct
  misc_feature 1..22: note = chemically synthesized
  source 1..22: mol_type = other DNA
gtgtcattaacaccgtgaatat

SEQ ID NO: 115608 - DNA, 22 bp, synthetic construct
  misc_feature 1..22: note = chemically synthesized
  source 1..22: mol_type = other DNA
acaccgtgaatatacagaggaa

SEQ ID NO: 115609 - DNA, 22 bp, synthetic construct
  misc_feature 1..22: note = chemically synthesized
  source 1..22: mol_type = other DNA
ggatagataagaaaataggata

SEQ ID NO: 115610 - DNA, 22 bp, synthetic construct
  misc_feature 1..22: note = chemically synthesized
  source 1..22: mol_type = other DNA
gaatgtcattttaaaccttttt

SEQ ID NO: 115611 - DNA, 22 bp, synthetic construct
  misc_feature 1..22: note = chemically synthesized
  source 1..22: mol_type = other DNA
aatgtcattttaaacctttttt

SEQ ID NO: 115612 - DNA, 22 bp, synthetic construct
  misc_feature 1..22: note = chemically synthesized
  source 1..22: mol_type = other DNA
taaaccttttttacttcattaa

SEQ ID NO: 115613 - DNA, 22 bp, synthetic construct
  misc_feature 1..22: note = chemically synthesized
  source 1..22: mol_type = other DNA
aaaccttttttacttcattaaa

SEQ ID NO: 115614 - DNA, 22 bp, synthetic construct
  misc_feature 1..22: note = chemically synthesized
  source 1..22: mol_type = other DNA
aaccttttttacttcattaaaa

SEQ ID NO: 115615 - DNA, 22 bp, synthetic construct
  misc_feature 1..22: note = chemically synthesized
  source 1..22: mol_type = other DNA
ttttacttcattaaaaacttgt

SEQ ID NO: 115616 - DNA, 22 bp, synthetic construct
  misc_feature 1..22: note = chemically synthesized
  source 1..22: mol_type = other DNA
tttacttcattaaaaacttgtt

SEQ ID NO: 115617 - DNA, 22 bp, synthetic construct
  misc_feature 1..22: note = chemically synthesized
  source 1..22: mol_type = other DNA
ttacttcattaaaaacttgttt

SEQ ID NO: 115618 - DNA, 22 bp, synthetic construct
  misc_feature 1..22: note = chemically synthesized
  source 1..22: mol_type = other DNA
tacttcattaaaaacttgttta

SEQ ID NO: 115619 - DNA, 22 bp, synthetic construct
  misc_feature 1..22: note = chemically synthesized
  source 1..22: mol_type = other DNA
acttcattaaaaacttgtttat

SEQ ID NO: 115620 - DNA, 22 bp, synthetic construct
  misc_feature 1..22: note = chemically synthesized
  source 1..22: mol_type = other DNA
cttcattaaaaacttgtttatg

SEQ ID NO: 115621 - DNA, 22 bp, synthetic construct
  misc_feature 1..22: note = chemically synthesized
  source 1..22: mol_type = other DNA
cattaaaaacttgtttatgtat

SEQ ID NO: 115622 - DNA, 22 bp, synthetic construct
  misc_feature 1..22: note = chemically synthesized
  source 1..22: mol_type = other DNA
attaaaaacttgtttatgtata

SEQ ID NO: 115623 - DNA, 22 bp, synthetic construct
  misc_feature 1..22: note = chemically synthesized
  source 1..22: mol_type = other DNA
aaaacttgtttatgtatacgtc

SEQ ID NO: 115624 - DNA, 22 bp, synthetic construct
  misc_feature 1..22: note = chemically synthesized
  source 1..22: mol_type = other DNA
gtttatgtatacgtctctcttg

SEQ ID NO: 115625 - DNA, 22 bp, synthetic construct
  misc_feature 1..22: note = chemically synthesized
  source 1..22: mol_type = other DNA
tttatgtatacgtctctcttgc

SEQ ID NO: 115626 - DNA, 22 bp, synthetic construct
  misc_feature 1..22: note = chemically synthesized
  source 1..22: mol_type = other DNA
atgtatacgtctctcttgctat

SEQ ID NO: 115627 - DNA, 22 bp, synthetic construct
  misc_feature 1..22: note = chemically synthesized
  source 1..22: mol_type = other DNA
tgtatacgtctctcttgctata

SEQ ID NO: 115628 - DNA, 22 bp, synthetic construct
  misc_feature 1..22: note = chemically synthesized
  source 1..22: mol_type = other DNA
tcttgctatatagtagtcaact

SEQ ID NO: 115629 - DNA, 22 bp, synthetic construct
  misc_feature 1..22: note = chemically synthesized
  source 1..22: mol_type = other DNA
ttgctatatagtagtcaactga

SEQ ID NO: 115630 - DNA, 22 bp, synthetic construct
  misc_feature 1..22: note = chemically synthesized
  source 1..22: mol_type = other DNA
gctatatagtagtcaactgaat

SEQ ID NO: 115631 - DNA, 22 bp, synthetic construct
  misc_feature 1..22: note = chemically synthesized
  source 1..22: mol_type = other DNA
ctatatagtagtcaactgaata

SEQ ID NO: 115632 - DNA, 22 bp, synthetic construct
  misc_feature 1..22: note = chemically synthesized
  source 1..22: mol_type = other DNA
tatagtagtcaactgaatacag

SEQ ID NO: 115633 - DNA, 22 bp, synthetic construct
  misc_feature 1..22: note = chemically synthesized
  source 1..22: mol_type = other DNA
aatacagtagtacaaaagatga

SEQ ID NO: 115634 - DNA, 22 bp, synthetic construct
  misc_feature 1..22: note = chemically synthesized
  source 1..22: mol_type = other DNA
gaatagtcctgaaagagtgatc

SEQ ID NO: 115635 - DNA, 22 bp, synthetic construct
  misc_feature 1..22: note = chemically synthesized
  source 1..22: mol_type = other DNA
aaagagtgatctgaattagaat

SEQ ID NO: 115636 - DNA, 22 bp, synthetic construct
  misc_feature 1..22: note = chemically synthesized
  source 1..22: mol_type = other DNA
aattagaatagcatcaatgaag

SEQ ID NO: 115637 - DNA, 22 bp, synthetic construct
  misc_feature 1..22: note = chemically synthesized
  source 1..22: mol_type = other DNA
gaatagcatcaatgaaggtgac

SEQ ID NO: 115638 - DNA, 22 bp, synthetic construct
  misc_feature 1..22: note = chemically synthesized
  source 1..22: mol_type = other DNA
gaggtattcagtaaacagaaac

SEQ ID NO: 115639 - DNA, 22 bp, synthetic construct
  misc_feature 1..22: note = chemically synthesized
  source 1..22: mol_type = other DNA
aggtattcagtaaacagaaacc

SEQ ID NO: 115640 - DNA, 22 bp, synthetic construct
  misc_feature 1..22: note = chemically synthesized
  source 1..22: mol_type = other DNA
agtaaacagaaaccctaggact

SEQ ID NO: 115641 - DNA, 22 bp, synthetic construct
  misc_feature 1..22: note = chemically synthesized
  source 1..22: mol_type = other DNA
ggacttggtgattggttgatta

SEQ ID NO: 115642 - DNA, 22 bp, synthetic construct
  misc_feature 1..22: note = chemically synthesized
  source 1..22: mol_type = other DNA
ggtgattggttgattagatact

SEQ ID NO: 115643 - DNA, 22 bp, synthetic construct
  misc_feature 1..22: note = chemically synthesized
  source 1..22: mol_type = other DNA
gtgattggttgattagatacta

SEQ ID NO: 115644 - DNA, 22 bp, synthetic construct
  misc_feature 1..22: note = chemically synthesized
  source 1..22: mol_type = other DNA
gttgattagatactatggagag

SEQ ID NO: 115645 - DNA, 22 bp, synthetic construct
  misc_feature 1..22: note = chemically synthesized
  source 1..22: mol_type = other DNA
attagatactatggagagatgt

SEQ ID NO: 115646 - DNA, 22 bp, synthetic construct
  misc_feature 1..22: note = chemically synthesized
  source 1..22: mol_type = other DNA
gatactatggagagatgtgata

SEQ ID NO: 115647 - DNA, 22 bp, synthetic construct
  misc_feature 1..22: note = chemically synthesized
  source 1..22: mol_type = other DNA
tggagagatgtgatatggagaa

SEQ ID NO: 115648 - DNA, 22 bp, synthetic construct
  misc_feature 1..22: note = chemically synthesized
  source 1..22: mol_type = other DNA
acataaaacatgacatttgact

SEQ ID NO: 115649 - DNA, 22 bp, synthetic construct
  misc_feature 1..22: note = chemically synthesized
  source 1..22: mol_type = other DNA
gacttgagccactgagataatg

SEQ ID NO: 115650 - DNA, 22 bp, synthetic construct
  misc_feature 1..22: note = chemically synthesized
  source 1..22: mol_type = other DNA
acttgagccactgagataatga

SEQ ID NO: 115651 - DNA, 22 bp, synthetic construct
  misc_feature 1..22: note = chemically synthesized
  source 1..22: mol_type = other DNA
gagccactgagataatgaaaag

SEQ ID NO: 115652 - DNA, 22 bp, synthetic construct
  misc_feature 1..22: note = chemically synthesized
  source 1..22: mol_type = other DNA
agccactgagataatgaaaagt

SEQ ID NO: 115653 - DNA, 22 bp, synthetic construct
  misc_feature 1..22: note = chemically synthesized
  source 1..22: mol_type = other DNA
agataatgaaaagtacagatgt

SEQ ID NO: 115654 - DNA, 22 bp, synthetic construct
  misc_feature 1..22: note = chemically synthesized
  source 1..22: mol_type = other DNA
ctagagtctggaaatcaaaaga

SEQ ID NO: 115655 - DNA, 22 bp, synthetic construct
  misc_feature 1..22: note = chemically synthesized
  source 1..22: mol_type = other DNA
gagtctggaaatcaaaagagag

SEQ ID NO: 115656 - DNA, 22 bp, synthetic construct
  misc_feature 1..22: note = chemically synthesized
  source 1..22: mol_type = other DNA
gaaatcaaaagagagaaagaca

SEQ ID NO: 115657 - DNA, 22 bp, synthetic construct
  misc_feature 1..22: note = chemically synthesized
  source 1..22: mol_type = other DNA
tggaattatatatttgttattt

SEQ ID NO: 115658 - DNA, 22 bp, synthetic construct
  misc_feature 1..22: note = chemically synthesized
  source 1..22: mol_type = other DNA
gaattatatatttgttatttat

SEQ ID NO: 115659 - DNA, 22 bp, synthetic construct
  misc_feature 1..22: note = chemically synthesized
  source 1..22: mol_type = other DNA
tatatttgttatttatcaatat

SEQ ID NO: 115660 - DNA, 22 bp, synthetic construct
  misc_feature 1..22: note = chemically synthesized
  source 1..22: mol_type = other DNA
gttatttatcaatatatggatg

SEQ ID NO: 115661 - DNA, 22 bp, synthetic construct
  misc_feature 1..22: note = chemically synthesized
  source 1..22: mol_type = other DNA
ttatttatcaatatatggatgg

SEQ ID NO: 115662 - DNA, 22 bp, synthetic construct
  misc_feature 1..22: note = chemically synthesized
  source 1..22: mol_type = other DNA
tttatcaatatatggatggtaa

SEQ ID NO: 115663 - DNA, 22 bp, synthetic construct
  misc_feature 1..22: note = chemically synthesized
  source 1..22: mol_type = other DNA
atcaatatatggatggtaaatg

SEQ ID NO: 115664 - DNA, 22 bp, synthetic construct
  misc_feature 1..22: note = chemically synthesized
  source 1..22: mol_type = other DNA
tcaatatatggatggtaaatga

SEQ ID NO: 115665 - DNA, 22 bp, synthetic construct
  misc_feature 1..22: note = chemically synthesized
  source 1..22: mol_type = other DNA
agaagaaataatagaatatggc

SEQ ID NO: 115666 - DNA, 22 bp, synthetic construct
  misc_feature 1..22: note = chemically synthesized
  source 1..22: mol_type = other DNA
ccaaggatgggaagaactatac

SEQ ID NO: 115667 - DNA, 22 bp, synthetic construct
  misc_feature 1..22: note = chemically synthesized
  source 1..22: mol_type = other DNA
tacttaagggttgagcaataaa

SEQ ID NO: 115668 - DNA, 22 bp, synthetic construct
  misc_feature 1..22: note = chemically synthesized
  source 1..22: mol_type = other DNA
aagggttgagcaataaaggcac

SEQ ID NO: 115669 - DNA, 22 bp, synthetic construct
  misc_feature 1..22: note = chemically synthesized
  source 1..22: mol_type = other DNA
agggttgagcaataaaggcaca

SEQ ID NO: 115670 - DNA, 22 bp, synthetic construct
  misc_feature 1..22: note = chemically synthesized
  source 1..22: mol_type = other DNA
agcaataaaggcacaccagcaa

SEQ ID NO: 115671 - DNA, 22 bp, synthetic construct
  misc_feature 1..22: note = chemically synthesized
  source 1..22: mol_type = other DNA
aaataattgaaatacagaggaa

SEQ ID NO: 115672 - DNA, 22 bp, synthetic construct
  misc_feature 1..22: note = chemically synthesized
  source 1..22: mol_type = other DNA
aaatacagaggaaaactggtga

SEQ ID NO: 115673 - DNA, 22 bp, synthetic construct
  misc_feature 1..22: note = chemically synthesized
  source 1..22: mol_type = other DNA
gtgagggcgaggttatcaaaga

SEQ ID NO: 115674 - DNA, 22 bp, synthetic construct
  misc_feature 1..22: note = chemically synthesized
  source 1..22: mol_type = other DNA
tcaaagaaagttcaataaagta

SEQ ID NO: 115675 - DNA, 22 bp, synthetic construct
  misc_feature 1..22: note = chemically synthesized
  source 1..22: mol_type = other DNA
aataaagtagtgagattggcag

SEQ ID NO: 115676 - DNA, 22 bp, synthetic construct
  misc_feature 1..22: note = chemically synthesized
  source 1..22: mol_type = other DNA
gcagaattcataagggtggagt

SEQ ID NO: 115677 - DNA, 22 bp, synthetic construct
  misc_feature 1..22: note = chemically synthesized
  source 1..22: mol_type = other DNA
ataagggtggagtagataatac

SEQ ID NO: 115678 - DNA, 22 bp, synthetic construct
  misc_feature 1..22: note = chemically synthesized
  source 1..22: mol_type = other DNA
aaggtgatgatgaccatggtac

SEQ ID NO: 115679 - DNA, 22 bp, synthetic construct
  misc_feature 1..22: note = chemically synthesized
  source 1..22: mol_type = other DNA
cttgtgatgttgtgaatgttag

SEQ ID NO: 115680 - DNA, 22 bp, synthetic construct
  misc_feature 1..22: note = chemically synthesized
  source 1..22: mol_type = other DNA
gtgatgttgtgaatgttagtga

SEQ ID NO: 115681 - DNA, 22 bp, synthetic construct
  misc_feature 1..22: note = chemically synthesized
  source 1..22: mol_type = other DNA
tgatgttgtgaatgttagtgaa

SEQ ID NO: 115682 - DNA, 22 bp, synthetic construct
  misc_feature 1..22: note = chemically synthesized
  source 1..22: mol_type = other DNA
tgaatgttagtgaagctgaaga

SEQ ID NO: 115683 - DNA, 22 bp, synthetic construct
  misc_feature 1..22: note = chemically synthesized
  source 1..22: mol_type = other DNA
gtgaagctgaagaattaataac

SEQ ID NO: 115684 - DNA, 22 bp, synthetic construct
  misc_feature 1..22: note = chemically synthesized
  source 1..22: mol_type = other DNA
aagaattaataaccagaaatat

SEQ ID NO: 115685 - DNA, 22 bp, synthetic construct
  misc_feature 1..22: note = chemically synthesized
  source 1..22: mol_type = other DNA
ataaccagaaatatccatttat

SEQ ID NO: 115686 - DNA, 22 bp, synthetic construct
  misc_feature 1..22: note = chemically synthesized
  source 1..22: mol_type = other DNA
attttcagctcaatccccgagg

SEQ ID NO: 115687 - DNA, 22 bp, synthetic construct
  misc_feature 1..22: note = chemically synthesized
  source 1..22: mol_type = other DNA
ttttcagctcaatccccgagga

SEQ ID NO: 115688 - DNA, 22 bp, synthetic construct
  misc_feature 1..22: note = chemically synthesized
  source 1..22: mol_type = other DNA
tcagctcaatccccgaggaatg

SEQ ID NO: 115689 - DNA, 22 bp, synthetic construct
  misc_feature 1..22: note = chemically synthesized
  source 1..22: mol_type = other DNA
cagctcaatccccgaggaatgt

SEQ ID NO: 115690 - DNA, 22 bp, synthetic construct
  misc_feature 1..22: note = chemically synthesized
  source 1..22: mol_type = other DNA
agctcaatccccgaggaatgtc

SEQ ID NO: 115691 - DNA, 22 bp, synthetic construct
  misc_feature 1..22: note = chemically synthesized
  source 1..22: mol_type = other DNA
aatccccgaggaatgtcagtcc

SEQ ID NO: 115692 - DNA, 22 bp, synthetic construct
  misc_feature 1..22: note = chemically synthesized
  source 1..22: mol_type = other DNA
gctcagtcctcaattcatgctg

SEQ ID NO: 115693 - DNA, 22 bp, synthetic construct
  misc_feature 1..22: note = chemically synthesized
  source 1..22: mol_type = other DNA
agtcctcaattcatgctgctat

SEQ ID NO: 115694 - DNA, 22 bp, synthetic construct
  misc_feature 1..22: note = chemically synthesized
  source 1..22: mol_type = other DNA
aattcatgctgctatccaacat

SEQ ID NO: 115695 - DNA, 22 bp, synthetic construct
  misc_feature 1..22: note = chemically synthesized
  source 1..22: mol_type = other DNA
atgctgctatccaacattactc

SEQ ID NO: 115696 - DNA, 22 bp, synthetic construct
  misc_feature 1..22: note = chemically synthesized
  source 1..22: mol_type = other DNA
ctatccaacattactcagttta

SEQ ID NO: 115697 - DNA, 22 bp, synthetic construct
  misc_feature 1..22: note = chemically synthesized
  source 1..22: mol_type = other DNA
tccaacattactcagtttagcc

SEQ ID NO: 115698 - DNA, 22 bp, synthetic construct
  misc_feature 1..22: note = chemically synthesized
  source 1..22: mol_type = other DNA
ctcagtttagccccatattcta

SEQ ID NO: 115699 - DNA, 22 bp, synthetic construct
  misc_feature 1..22: note = chemically synthesized
  source 1..22: mol_type = other DNA
agtttagccccatattctatct

SEQ ID NO: 115700 - DNA, 22 bp, synthetic construct
  misc_feature 1..22: note = chemically synthesized
  source 1..22: mol_type = other DNA
agccccatattctatctcacca

SEQ ID NO: 115701 - DNA, 22 bp, synthetic construct
  misc_feature 1..22: note = chemically synthesized
  source 1..22: mol_type = other DNA
gccccatattctatctcaccag

SEQ ID NO: 115702 - DNA, 22 bp, synthetic construct
  misc_feature 1..22: note = chemically synthesized
  source 1..22: mol_type = other DNA
tatctcaccagctttcctggat

SEQ ID NO: 115703 - DNA, 22 bp, synthetic construct
  misc_feature 1..22: note = chemically synthesized
  source 1..22: mol_type = other DNA
tctcaccagctttcctggattg

SEQ ID NO: 115704 - DNA, 22 bp, synthetic construct
  misc_feature 1..22: note = chemically synthesized
  source 1..22: mol_type = other DNA
accagctttcctggattggaag

SEQ ID NO: 115705 - DNA, 22 bp, synthetic construct
  misc_feature 1..22: note = chemically synthesized
  source 1..22: mol_type = other DNA
tcctggattggaaggcatcaaa

SEQ ID NO: 115706 - DNA, 22 bp, synthetic construct
  misc_feature 1..22: note = chemically synthesized
  source 1..22: mol_type = other DNA
cctggattggaaggcatcaaac

SEQ ID NO: 115707 - DNA, 22 bp, synthetic construct
  misc_feature 1..22: note = chemically synthesized
  source 1..22: mol_type = other DNA
ctggattggaaggcatcaaaca

SEQ ID NO: 115708 - DNA, 22 bp, synthetic construct
  misc_feature 1..22: note = chemically synthesized
  source 1..22: mol_type = other DNA
gattggaaggcatcaaacactg

SEQ ID NO: 115709 - DNA, 22 bp, synthetic construct
  misc_feature 1..22: note = chemically synthesized
  source 1..22: mol_type = other DNA
gaaggcatcaaacactggattt

SEQ ID NO: 115710 - DNA, 22 bp, synthetic construct
  misc_feature 1..22: note = chemically synthesized
  source 1..22: mol_type = other DNA
gattttcatcccctttttcttt

SEQ ID NO: 115711 - DNA, 22 bp, synthetic construct
  misc_feature 1..22: note = chemically synthesized
  source 1..22: mol_type = other DNA
tcatcccctttttctttatgta

SEQ ID NO: 115712 - DNA, 22 bp, synthetic construct
  misc_feature 1..22: note = chemically synthesized
  source 1..22: mol_type = other DNA
catcccctttttctttatgtac

SEQ ID NO: 115713 - DNA, 22 bp, synthetic construct
  misc_feature 1..22: note = chemically synthesized
  source 1..22: mol_type = other DNA
atcccctttttctttatgtaca

SEQ ID NO: 115714 - DNA, 22 bp, synthetic construct
  misc_feature 1..22: note = chemically synthesized
  source 1..22: mol_type = other DNA
tttctttatgtacatggttgcc

SEQ ID NO: 115715 - DNA, 22 bp, synthetic construct
  misc_feature 1..22: note = chemically synthesized
  source 1..22: mol_type = other DNA
ttctttatgtacatggttgcca

SEQ ID NO: 115716 - DNA, 22 bp, synthetic construct
  misc_feature 1..22: note = chemically synthesized
  source 1..22: mol_type = other DNA
tctttatgtacatggttgccat

SEQ ID NO: 115717 - DNA, 22 bp, synthetic construct
  misc_feature 1..22: note = chemically synthesized
  source 1..22: mol_type = other DNA
ctttatgtacatggttgccatc

SEQ ID NO: 115718 - DNA, 22 bp, synthetic construct
  misc_feature 1..22: note = chemically synthesized
  source 1..22: mol_type = other DNA
tttatgtacatggttgccatct

SEQ ID NO: 115719 - DNA, 22 bp, synthetic construct
  misc_feature 1..22: note = chemically synthesized
  source 1..22: mol_type = other DNA
tatgtacatggttgccatctca

SEQ ID NO: 115720 - DNA, 22 bp, synthetic construct
  misc_feature 1..22: note = chemically synthesized
  source 1..22: mol_type = other DNA
atgtacatggttgccatctcag

SEQ ID NO: 115721 - DNA, 22 bp, synthetic construct
  misc_feature 1..22: note = chemically synthesized
  source 1..22: mol_type = other DNA
tgtacatggttgccatctcagg

SEQ ID NO: 115722 - DNA, 22 bp, synthetic construct
  misc_feature 1..22: note = chemically synthesized
  source 1..22: mol_type = other DNA
ccatctcaggcaattgtttcat

SEQ ID NO: 115723 - DNA, 22 bp, synthetic construct
  misc_feature 1..22: note = chemically synthesized
  source 1..22: mol_type = other DNA
aggcaattgtttcattctgatc

SEQ ID NO: 115724 - DNA, 22 bp, synthetic construct
  misc_feature 1..22: note = chemically synthesized
  source 1..22: mol_type = other DNA
tttcattctgatcattattaag

SEQ ID NO: 115725 - DNA, 22 bp, synthetic construct
  misc_feature 1..22: note = chemically synthesized
  source 1..22: mol_type = other DNA
cattctgatcattattaagacc

SEQ ID NO: 115726 - DNA, 22 bp, synthetic construct
  misc_feature 1..22: note = chemically synthesized
  source 1..22: mol_type = other DNA
attctgatcattattaagacca

SEQ ID NO: 115727 - DNA, 22 bp, synthetic construct
  misc_feature 1..22: note = chemically synthesized
  source 1..22: mol_type = other DNA
tgatcattattaagaccaaccc

SEQ ID NO: 115728 - DNA, 22 bp, synthetic construct
  misc_feature 1..22: note = chemically synthesized
  source 1..22: mol_type = other DNA
atcattattaagaccaaccctc

SEQ ID NO: 115729 - DNA, 22 bp, synthetic construct
  misc_feature 1..22: note = chemically synthesized
  source 1..22: mol_type = other DNA
ttaagaccaaccctcgtctgca

SEQ ID NO: 115730 - DNA, 22 bp, synthetic construct
  misc_feature 1..22: note = chemically synthesized
  source 1..22: mol_type = other DNA
agaccaaccctcgtctgcacac

SEQ ID NO: 115731 - DNA, 22 bp, synthetic construct
  misc_feature 1..22: note = chemically synthesized
  source 1..22: mol_type = other DNA
gtctgcacacacccatgtacta

SEQ ID NO: 115732 - DNA, 22 bp, synthetic construct
  misc_feature 1..22: note = chemically synthesized
  source 1..22: mol_type = other DNA
cacacacccatgtactatctac

SEQ ID NO: 115733 - DNA, 22 bp, synthetic construct
  misc_feature 1..22: note = chemically synthesized
  source 1..22: mol_type = other DNA
tctactatccttgctggccctc

SEQ ID NO: 115734 - DNA, 22 bp, synthetic construct
  misc_feature 1..22: note = chemically synthesized
  source 1..22: mol_type = other DNA
ctatccttgctggccctcactg

SEQ ID NO: 115735 - DNA, 22 bp, synthetic construct
  misc_feature 1..22: note = chemically synthesized
  source 1..22: mol_type = other DNA
tccttgctggccctcactgacc

SEQ ID NO: 115736 - DNA, 22 bp, synthetic construct
  misc_feature 1..22: note = chemically synthesized
  source 1..22: mol_type = other DNA
gctggccctcactgacctgggg

SEQ ID NO: 115737 - DNA, 22 bp, synthetic construct
  misc_feature 1..22: note = chemically synthesized
  source 1..22: mol_type = other DNA
ctggccctcactgacctggggc

SEQ ID NO: 115738 - DNA, 22 bp, synthetic construct
  misc_feature 1..22: note = chemically synthesized
  source 1..22: mol_type = other DNA
gccctcactgacctggggctgt

SEQ ID NO: 115739 - DNA, 22 bp, synthetic construct
  misc_feature 1..22: note = chemically synthesized
  source 1..22: mol_type = other DNA
actgacctggggctgtgtgtgt

SEQ ID NO: 115740 - DNA, 22 bp, synthetic construct
  misc_feature 1..22: note = chemically synthesized
  source 1..22: mol_type = other DNA
acctggggctgtgtgtgtccac

SEQ ID NO: 115741 - DNA, 22 bp, synthetic construct
  misc_feature 1..22: note = chemically synthesized
  source 1..22: mol_type = other DNA
gggctgtgtgtgtccacgttgc

SEQ ID NO: 115742 - DNA, 22 bp, synthetic construct
  misc_feature 1..22: note = chemically synthesized
  source 1..22: mol_type = other DNA
tgtgtgtccacgttgcccacca

SEQ ID NO: 115743 - DNA, 22 bp, synthetic construct
  misc_feature 1..22: note = chemically synthesized
  source 1..22: mol_type = other DNA
cccaccactatggggatcttct

SEQ ID NO: 115744 - DNA, 22 bp, synthetic construct
  misc_feature 1..22: note = chemically synthesized
  source 1..22: mol_type = other DNA
tggggatcttctggtttaactc

SEQ ID NO: 115745 - DNA, 22 bp, synthetic construct
  misc_feature 1..22: note = chemically synthesized
  source 1..22: mol_type = other DNA
ctggtttaactcccatagtatc

SEQ ID NO: 115746 - DNA, 22 bp, synthetic construct
  misc_feature 1..22: note = chemically synthesized
  source 1..22: mol_type = other DNA
tggtttaactcccatagtatct

SEQ ID NO: 115747 - DNA, 22 bp, synthetic construct
  misc_feature 1..22: note = chemically synthesized
  source 1..22: mol_type = other DNA
gtttaactcccatagtatctac

SEQ ID NO: 115748 - DNA, 22 bp, synthetic construct
  misc_feature 1..22: note = chemically synthesized
  source 1..22: mol_type = other DNA
aactcccatagtatctactttg

SEQ ID NO: 115749 - DNA, 22 bp, synthetic construct
  misc_feature 1..22: note = chemically synthesized
  source 1..22: mol_type = other DNA
actcccatagtatctactttgg

SEQ ID NO: 115750 - DNA, 22 bp, synthetic construct
  misc_feature 1..22: note = chemically synthesized
  source 1..22: mol_type = other DNA
ccatagtatctactttggagcg

SEQ ID NO: 115751 - DNA, 22 bp, synthetic construct
  misc_feature 1..22: note = chemically synthesized
  source 1..22: mol_type = other DNA
ctttggagcgtgtcaaatccag

SEQ ID NO: 115752 - DNA, 22 bp, synthetic construct
  misc_feature 1..22: note = chemically synthesized
  source 1..22: mol_type = other DNA
tggagcgtgtcaaatccagatg

SEQ ID NO: 115753 - DNA, 22 bp, synthetic construct
  misc_feature 1..22: note = chemically synthesized
  source 1..22: mol_type = other DNA
ggagcgtgtcaaatccagatgt

SEQ ID NO: 115754 - DNA, 22 bp, synthetic construct
  misc_feature 1..22: note = chemically synthesized
  source 1..22: mol_type = other DNA
gagcgtgtcaaatccagatgtt

SEQ ID NO: 115755 - DNA, 22 bp, synthetic construct
  misc_feature 1..22: note = chemically synthesized
  source 1..22: mol_type = other DNA
tgcatccactctttttccttca

SEQ ID NO: 115756 - DNA, 22 bp, synthetic construct
  misc_feature 1..22: note = chemically synthesized
  source 1..22: mol_type = other DNA
catccactctttttccttcatg

SEQ ID NO: 115757 - DNA, 22 bp, synthetic construct
  misc_feature 1..22: note = chemically synthesized
  source 1..22: mol_type = other DNA
tttttccttcatggagtcctca

SEQ ID NO: 115758 - DNA, 22 bp, synthetic construct
  misc_feature 1..22: note = chemically synthesized
  source 1..22: mol_type = other DNA
tttccttcatggagtcctcagt

SEQ ID NO: 115759 - DNA, 22 bp, synthetic construct
  misc_feature 1..22: note = chemically synthesized
  source 1..22: mol_type = other DNA
ttccttcatggagtcctcagtg

SEQ ID NO: 115760 - DNA, 22 bp, synthetic construct
  misc_feature 1..22: note = chemically synthesized
  source 1..22: mol_type = other DNA
tccttcatggagtcctcagtgc

SEQ ID NO: 115761 - DNA, 22 bp, synthetic construct
  misc_feature 1..22: note = chemically synthesized
  source 1..22: mol_type = other DNA
ccttcatggagtcctcagtgct

SEQ ID NO: 115762 - DNA, 22 bp, synthetic construct
  misc_feature 1..22: note = chemically synthesized
  source 1..22: mol_type = other DNA
cttcatggagtcctcagtgctc

SEQ ID NO: 115763 - DNA, 22 bp, synthetic construct
  misc_feature 1..22: note = chemically synthesized
  source 1..22: mol_type = other DNA
catggagtcctcagtgctcctc

SEQ ID NO: 115764 - DNA, 22 bp, synthetic construct
  misc_feature 1..22: note = chemically synthesized
  source 1..22: mol_type = other DNA
atggagtcctcagtgctcctca

SEQ ID NO: 115765 - DNA, 22 bp, synthetic construct
  misc_feature 1..22: note = chemically synthesized
  source 1..22: mol_type = other DNA
agtgctcctcatgatgtccttt

SEQ ID NO: 115766 - DNA, 22 bp, synthetic construct
  misc_feature 1..22: note = chemically synthesized
  source 1..22: mol_type = other DNA
ctcatgatgtcctttgaccgcc

SEQ ID NO: 115767 - DNA, 22 bp, synthetic construct
  misc_feature 1..22: note = chemically synthesized
  source 1..22: mol_type = other DNA
atgatgtcctttgaccgccttg

SEQ ID NO: 115768 - DNA, 22 bp, synthetic construct
  misc_feature 1..22: note = chemically synthesized
  source 1..22: mol_type = other DNA
tgaccgccttgtggccatctgc

SEQ ID NO: 115769 - DNA, 22 bp, synthetic construct
  misc_feature 1..22: note = chemically synthesized
  source 1..22: mol_type = other DNA
gaccgccttgtggccatctgcc

SEQ ID NO: 115770 - DNA, 22 bp, synthetic construct
  misc_feature 1..22: note = chemically synthesized
  source 1..22: mol_type = other DNA
accgccttgtggccatctgcca

SEQ ID NO: 115771 - DNA, 22 bp, synthetic construct
  misc_feature 1..22: note = chemically synthesized
  source 1..22: mol_type = other DNA
gtggccatctgccaccctctga

SEQ ID NO: 115772 - DNA, 22 bp, synthetic construct
  misc_feature 1..22: note = chemically synthesized
  source 1..22: mol_type = other DNA
tggccatctgccaccctctgag

SEQ ID NO: 115773 - DNA, 22 bp, synthetic construct
  misc_feature 1..22: note = chemically synthesized
  source 1..22: mol_type = other DNA
ccaccctctgaggtattcggtc

SEQ ID NO: 115774 - DNA, 22 bp, synthetic construct
  misc_feature 1..22: note = chemically synthesized
  source 1..22: mol_type = other DNA
tgaggtattcggtcattatcac

SEQ ID NO: 115775 - DNA, 22 bp, synthetic construct
  misc_feature 1..22: note = chemically synthesized
  source 1..22: mol_type = other DNA
aggtattcggtcattatcactg

SEQ ID NO: 115776 - DNA, 22 bp, synthetic construct
  misc_feature 1..22: note = chemically synthesized
  source 1..22: mol_type = other DNA
ggtcattatcactggccagcaa

SEQ ID NO: 115777 - DNA, 22 bp, synthetic construct
  misc_feature 1..22: note = chemically synthesized
  source 1..22: mol_type = other DNA
tcactggccagcaagtggtcag

SEQ ID NO: 115778 - DNA, 22 bp, synthetic construct
  misc_feature 1..22: note = chemically synthesized
  source 1..22: mol_type = other DNA
gccagcaagtggtcagagcagg

SEQ ID NO: 115779 - DNA, 22 bp, synthetic construct
  misc_feature 1..22: note = chemically synthesized
  source 1..22: mol_type = other DNA
attgtcatcttccggggacctg

SEQ ID NO: 115780 - DNA, 22 bp, synthetic construct
  misc_feature 1..22: note = chemically synthesized
  source 1..22: mol_type = other DNA
tcatcttccggggacctgtggc

SEQ ID NO: 115781 - DNA, 22 bp, synthetic construct
  misc_feature 1..22: note = chemically synthesized
  source 1..22: mol_type = other DNA
ccggggacctgtggccactatc

SEQ ID NO: 115782 - DNA, 22 bp, synthetic construct
  misc_feature 1..22: note = chemically synthesized
  source 1..22: mol_type = other DNA
cggggacctgtggccactatcc

SEQ ID NO: 115783 - DNA, 22 bp, synthetic construct
  misc_feature 1..22: note = chemically synthesized
  source 1..22: mol_type = other DNA
tggccactatccctattgtcct

SEQ ID NO: 115784 - DNA, 22 bp, synthetic construct
  misc_feature 1..22: note = chemically synthesized
  source 1..22: mol_type = other DNA
tccctattgtcctcctcctgaa

SEQ ID NO: 115785 - DNA, 22 bp, synthetic construct
  misc_feature 1..22: note = chemically synthesized
  source 1..22: mol_type = other DNA
ttgtcctcctcctgaaggcttt

SEQ ID NO: 115786 - DNA, 22 bp, synthetic construct
  misc_feature 1..22: note = chemically synthesized
  source 1..22: mol_type = other DNA
tcctcctcctgaaggcttttcc

SEQ ID NO: 115787 - DNA, 22 bp, synthetic construct
  misc_feature 1..22: note = chemically synthesized
  source 1..22: mol_type = other DNA
ctcctgaaggcttttccctact

SEQ ID NO: 115788 - DNA, 22 bp, synthetic construct
  misc_feature 1..22: note = chemically synthesized
  source 1..22: mol_type = other DNA
ctgaaggcttttccctactgtg

SEQ ID NO: 115789 - DNA, 22 bp, synthetic construct
  misc_feature 1..22: note = chemically synthesized
  source 1..22: mol_type = other DNA
aaggcttttccctactgtggat

SEQ ID NO: 115790 - DNA, 22 bp, synthetic construct
  misc_feature 1..22: note = chemically synthesized
  source 1..22: mol_type = other DNA
ttccctactgtggatctgtggt

SEQ ID NO: 115791 - DNA, 22 bp, synthetic construct
  misc_feature 1..22: note = chemically synthesized
  source 1..22: mol_type = other DNA
tccctactgtggatctgtggtc

SEQ ID NO: 115792 - DNA, 22 bp, synthetic construct
  misc_feature 1..22: note = chemically synthesized
  source 1..22: mol_type = other DNA
ccctactgtggatctgtggtcc

SEQ ID NO: 115793 - DNA, 22 bp, synthetic construct
  misc_feature 1..22: note = chemically synthesized
  source 1..22: mol_type = other DNA
cctactgtggatctgtggtcct

SEQ ID NO: 115794 - DNA, 22 bp, synthetic construct
  misc_feature 1..22: note = chemically synthesized
  source 1..22: mol_type = other DNA
ctgtggatctgtggtcctctcc

SEQ ID NO: 115795 - DNA, 22 bp, synthetic construct
  misc_feature 1..22: note = chemically synthesized
  source 1..22: mol_type = other DNA
tggatctgtggtcctctcccac

SEQ ID NO: 115796 - DNA, 22 bp, synthetic construct
  misc_feature 1..22: note = chemically synthesized
  source 1..22: mol_type = other DNA
tggtcctctcccactcattttg

SEQ ID NO: 115797 - DNA, 22 bp, synthetic construct
  misc_feature 1..22: note = chemically synthesized
  source 1..22: mol_type = other DNA
tcccactcattttgcctgcacc

SEQ ID NO: 115798 - DNA, 22 bp, synthetic construct
  misc_feature 1..22: note = chemically synthesized
  source 1..22: mol_type = other DNA
ccactcattttgcctgcaccag

SEQ ID NO: 115799 - DNA, 22 bp, synthetic construct
  misc_feature 1..22: note = chemically synthesized
  source 1..22: mol_type = other DNA
attttgcctgcaccaggaagtg

SEQ ID NO: 115800 - DNA, 22 bp, synthetic construct
  misc_feature 1..22: note = chemically synthesized
  source 1..22: mol_type = other DNA
tgcctgcaccaggaagtgatac

SEQ ID NO: 115801 - DNA, 22 bp, synthetic construct
  misc_feature 1..22: note = chemically synthesized
  source 1..22: mol_type = other DNA
gcctgcaccaggaagtgataca

SEQ ID NO: 115802 - DNA, 22 bp, synthetic construct
  misc_feature 1..22: note = chemically synthesized
  source 1..22: mol_type = other DNA
cctgcaccaggaagtgatacag

SEQ ID NO: 115803 - DNA, 22 bp, synthetic construct
  misc_feature 1..22: note = chemically synthesized
  source 1..22: mol_type = other DNA
caccaggaagtgatacagctgg

SEQ ID NO: 115804 - DNA, 22 bp, synthetic construct
  misc_feature 1..22: note = chemically synthesized
  source 1..22: mol_type = other DNA
gcctgcacagatatcaccttca

SEQ ID NO: 115805 - DNA, 22 bp, synthetic construct
  misc_feature 1..22: note = chemically synthesized
  source 1..22: mol_type = other DNA
cacagatatcaccttcaataat

SEQ ID NO: 115806 - DNA, 22 bp, synthetic construct
  misc_feature 1..22: note = chemically synthesized
  source 1..22: mol_type = other DNA
caataatctgtatggactgatg

SEQ ID NO: 115807 - DNA, 22 bp, synthetic construct
  misc_feature 1..22: note = chemically synthesized
  source 1..22: mol_type = other DNA
aataatctgtatggactgatgg

SEQ ID NO: 115808 - DNA, 22 bp, synthetic construct
  misc_feature 1..22: note = chemically synthesized
  source 1..22: mol_type = other DNA
tatggactgatggtggtagttt

SEQ ID NO: 115809 - DNA, 22 bp, synthetic construct
  misc_feature 1..22: note = chemically synthesized
  source 1..22: mol_type = other DNA
atggtggtagttttcactgtga

SEQ ID NO: 115810 - DNA, 22 bp, synthetic construct
  misc_feature 1..22: note = chemically synthesized
  source 1..22: mol_type = other DNA
tcactgtgatgctggacctggt

SEQ ID NO: 115811 - DNA, 22 bp, synthetic construct
  misc_feature 1..22: note = chemically synthesized
  source 1..22: mol_type = other DNA
cactgtgatgctggacctggtg

SEQ ID NO: 115812 - DNA, 22 bp, synthetic construct
  misc_feature 1..22: note = chemically synthesized
  source 1..22: mol_type = other DNA
actgtgatgctggacctggtgc

SEQ ID NO: 115813 - DNA, 22 bp, synthetic construct
  misc_feature 1..22: note = chemically synthesized
  source 1..22: mol_type = other DNA
tgatgctggacctggtgctcat

SEQ ID NO: 115814 - DNA, 22 bp, synthetic construct
  misc_feature 1..22: note = chemically synthesized
  source 1..22: mol_type = other DNA
gacctggtgctcatcgcactgt

SEQ ID NO: 115815 - DNA, 22 bp, synthetic construct
  misc_feature 1..22: note = chemically synthesized
  source 1..22: mol_type = other DNA
gtgctcatcgcactgtcctatg

SEQ ID NO: 115816 - DNA, 22 bp, synthetic construct
  misc_feature 1..22: note = chemically synthesized
  source 1..22: mol_type = other DNA
atcgcactgtcctatggactca

SEQ ID NO: 115817 - DNA, 22 bp, synthetic construct
  misc_feature 1..22: note = chemically synthesized
  source 1..22: mol_type = other DNA
tcctatggactcatcctgcaca

SEQ ID NO: 115818 - DNA, 22 bp, synthetic construct
  misc_feature 1..22: note = chemically synthesized
  source 1..22: mol_type = other DNA
tggactcatcctgcacacagta

SEQ ID NO: 115819 - DNA, 22 bp, synthetic construct
  misc_feature 1..22: note = chemically synthesized
  source 1..22: mol_type = other DNA
atcctgcacacagtagcaggcc

SEQ ID NO: 115820 - DNA, 22 bp, synthetic construct
  misc_feature 1..22: note = chemically synthesized
  source 1..22: mol_type = other DNA
cacacagtagcaggcctggcct

SEQ ID NO: 115821 - DNA, 22 bp, synthetic construct
  misc_feature 1..22: note = chemically synthesized
  source 1..22: mol_type = other DNA
gcctcccaagaggagcagcgcc

SEQ ID NO: 115822 - DNA, 22 bp, synthetic construct
  misc_feature 1..22: note = chemically synthesized
  source 1..22: mol_type = other DNA
ccaagaggagcagcgccgtgcc

SEQ ID NO: 115823 - DNA, 22 bp, synthetic construct
  misc_feature 1..22: note = chemically synthesized
  source 1..22: mol_type = other DNA
tcagacatgcaccgctcctctc

SEQ ID NO: 115824 - DNA, 22 bp, synthetic construct
  misc_feature 1..22: note = chemically synthesized
  source 1..22: mol_type = other DNA
cagacatgcaccgctcctctct

SEQ ID NO: 115825 - DNA, 22 bp, synthetic construct
  misc_feature 1..22: note = chemically synthesized
  source 1..22: mol_type = other DNA
agacatgcaccgctcctctctg

SEQ ID NO: 115826 - DNA, 22 bp, synthetic construct
  misc_feature 1..22: note = chemically synthesized
  source 1..22: mol_type = other DNA
ctctctgtgctgtgctagtatt

SEQ ID NO: 115827 - DNA, 22 bp, synthetic construct
  misc_feature 1..22: note = chemically synthesized
  source 1..22: mol_type = other DNA
tctgtgctgtgctagtattctt

SEQ ID NO: 115828 - DNA, 22 bp, synthetic construct
  misc_feature 1..22: note = chemically synthesized
  source 1..22: mol_type = other DNA
tgtgctgtgctagtattctttg

SEQ ID NO: 115829 - DNA, 22 bp, synthetic construct
  misc_feature 1..22: note = chemically synthesized
  source 1..22: mol_type = other DNA
tgctgtgctagtattctttgtg

SEQ ID NO: 115830 - DNA, 22 bp, synthetic construct
  misc_feature 1..22: note = chemically synthesized
  source 1..22: mol_type = other DNA
tgctagtattctttgtgcccat

SEQ ID NO: 115831 - DNA, 22 bp, synthetic construct
  misc_feature 1..22: note = chemically synthesized
  source 1..22: mol_type = other DNA
gtattctttgtgcccatgatgg

SEQ ID NO: 115832 - DNA, 22 bp, synthetic construct
  misc_feature 1..22: note = chemically synthesized
  source 1..22: mol_type = other DNA
tttgtgcccatgatggggctgt

SEQ ID NO: 115833 - DNA, 22 bp, synthetic construct
  misc_feature 1..22: note = chemically synthesized
  source 1..22: mol_type = other DNA
tgtgcccatgatggggctgtcc

SEQ ID NO: 115834 - DNA, 22 bp, synthetic construct
  misc_feature 1..22: note = chemically synthesized
  source 1..22: mol_type = other DNA
gtgcccatgatggggctgtccc

SEQ ID NO: 115835 - DNA, 22 bp, synthetic construct
  misc_feature 1..22: note = chemically synthesized
  source 1..22: mol_type = other DNA
tgcccatgatggggctgtccct

SEQ ID NO: 115836 - DNA, 22 bp, synthetic construct
  misc_feature 1..22: note = chemically synthesized
  source 1..22: mol_type = other DNA
tccctggtgcaccgttttggga

SEQ ID NO: 115837 - DNA, 22 bp, synthetic construct
  misc_feature 1..22: note = chemically synthesized
  source 1..22: mol_type = other DNA
gtgcaccgttttgggaagcatg

SEQ ID NO: 115838 - DNA, 22 bp, synthetic construct
  misc_feature 1..22: note = chemically synthesized
  source 1..22: mol_type = other DNA
tgggaagcatgccccacctgct

SEQ ID NO: 115839 - DNA, 22 bp, synthetic construct
  misc_feature 1..22: note = chemically synthesized
  source 1..22: mol_type = other DNA
gggaagcatgccccacctgcta

SEQ ID NO: 115840 - DNA, 22 bp, synthetic construct
  misc_feature 1..22: note = chemically synthesized
  source 1..22: mol_type = other DNA
ggaagcatgccccacctgctat

SEQ ID NO: 115841 - DNA, 22 bp, synthetic construct
  misc_feature 1..22: note = chemically synthesized
  source 1..22: mol_type = other DNA
ctattcatcttcttatggccaa

SEQ ID NO: 115842 - DNA, 22 bp, synthetic construct
  misc_feature 1..22: note = chemically synthesized
  source 1..22: mol_type = other DNA
ttcatcttcttatggccaatgt

SEQ ID NO: 115843 - DNA, 22 bp, synthetic construct
  misc_feature 1..22: note = chemically synthesized
  source 1..22: mol_type = other DNA
atcttcttatggccaatgtcta

SEQ ID NO: 115844 - DNA, 22 bp, synthetic construct
  misc_feature 1..22: note = chemically synthesized
  source 1..22: mol_type = other DNA
cttatggccaatgtctaccttt

SEQ ID NO: 115845 - DNA, 22 bp, synthetic construct
  misc_feature 1..22: note = chemically synthesized
  source 1..22: mol_type = other DNA
ttatggccaatgtctacctttt

SEQ ID NO: 115846 - DNA, 22 bp, synthetic construct
  misc_feature 1..22: note = chemically synthesized
  source 1..22: mol_type = other DNA
atggccaatgtctacctttttg

SEQ ID NO: 115847 - DNA, 22 bp, synthetic construct
  misc_feature 1..22: note = chemically synthesized
  source 1..22: mol_type = other DNA
tggccaatgtctacctttttgt

SEQ ID NO: 115848 - DNA, 22 bp, synthetic construct
  misc_feature 1..22: note = chemically synthesized
  source 1..22: mol_type = other DNA
cctttttgtgcctcccatgctt

SEQ ID NO: 115849 - DNA, 22 bp, synthetic construct
  misc_feature 1..22: note = chemically synthesized
  source 1..22: mol_type = other DNA
tttgtgcctcccatgcttaacc

SEQ ID NO: 115850 - DNA, 22 bp, synthetic construct
  misc_feature 1..22: note = chemically synthesized
  source 1..22: mol_type = other DNA
ttgtgcctcccatgcttaaccc

SEQ ID NO: 115851 - DNA, 22 bp, synthetic construct
  misc_feature 1..22: note = chemically synthesized
  source 1..22: mol_type = other DNA
tgtgcctcccatgcttaaccca

SEQ ID NO: 115852 - DNA, 22 bp, synthetic construct
  misc_feature 1..22: note = chemically synthesized
  source 1..22: mol_type = other DNA
gtgcctcccatgcttaacccaa

SEQ ID NO: 115853 - DNA, 22 bp, synthetic construct
  misc_feature 1..22: note = chemically synthesized
  source 1..22: mol_type = other DNA
tgcctcccatgcttaacccaat

SEQ ID NO: 115854 - DNA, 22 bp, synthetic construct
  misc_feature 1..22: note = chemically synthesized
  source 1..22: mol_type = other DNA
ccatgcttaacccaatcatata

SEQ ID NO: 115855 - DNA, 22 bp, synthetic construct
  misc_feature 1..22: note = chemically synthesized
  source 1..22: mol_type = other DNA
aacccaatcatatacagcatta

SEQ ID NO: 115856 - DNA, 22 bp, synthetic construct
  misc_feature 1..22: note = chemically synthesized
  source 1..22: mol_type = other DNA
acccaatcatatacagcattaa

SEQ ID NO: 115857 - DNA, 22 bp, synthetic construct
  misc_feature 1..22: note = chemically synthesized
  source 1..22: mol_type = other DNA
agaccaaggagatccaccgtgc

SEQ ID NO: 115858 - DNA, 22 bp, synthetic construct
  misc_feature 1..22: note = chemically synthesized
  source 1..22: mol_type = other DNA
tcaagttcctaggtcttaaaaa

SEQ ID NO: 115859 - DNA, 22 bp, synthetic construct
  misc_feature 1..22: note = chemically synthesized
  source 1..22: mol_type = other DNA
ctaggtcttaaaaaggccagta

SEQ ID NO: 115860 - DNA, 22 bp, synthetic construct
  misc_feature 1..22: note = chemically synthesized
  source 1..22: mol_type = other DNA
ggtcttaaaaaggccagtaaat

SEQ ID NO: 115861 - DNA, 22 bp, synthetic construct
  misc_feature 1..22: note = chemically synthesized
  source 1..22: mol_type = other DNA
aaaaaggccagtaaatgagtcc

SEQ ID NO: 115862 - DNA, 22 bp, synthetic construct
  misc_feature 1..22: note = chemically synthesized
  source 1..22: mol_type = other DNA
aaaaggccagtaaatgagtcct

SEQ ID NO: 115863 - DNA, 22 bp, synthetic construct
  misc_feature 1..22: note = chemically synthesized
  source 1..22: mol_type = other DNA
gggctaaaactccccctagagg

SEQ ID NO: 115864 - DNA, 22 bp, synthetic construct
  misc_feature 1..22: note = chemically synthesized
  source 1..22: mol_type = other DNA
aaactccccctagaggcctata

SEQ ID NO: 115865 - DNA, 22 bp, synthetic construct
  misc_feature 1..22: note = chemically synthesized
  source 1..22: mol_type = other DNA
cccctagaggcctataagaagg

SEQ ID NO: 115866 - DNA, 22 bp, synthetic construct
  misc_feature 1..22: note = chemically synthesized
  source 1..22: mol_type = other DNA
gaggcctataagaaggccccaa

SEQ ID NO: 115867 - DNA, 22 bp, synthetic construct
  misc_feature 1..22: note = chemically synthesized
  source 1..22: mol_type = other DNA
taagaaggccccaaattggact

SEQ ID NO: 115868 - DNA, 22 bp, synthetic construct
  misc_feature 1..22: note = chemically synthesized
  source 1..22: mol_type = other DNA
gactgaaaatttggagtattga

SEQ ID NO: 115869 - DNA, 22 bp, synthetic construct
  misc_feature 1..22: note = chemically synthesized
  source 1..22: mol_type = other DNA
aaaatttggagtattgagtata

SEQ ID NO: 115870 - DNA, 22 bp, synthetic construct
  misc_feature 1..22: note = chemically synthesized
  source 1..22: mol_type = other DNA
ggagtattgagtatatagcatg

SEQ ID NO: 115871 - DNA, 22 bp, synthetic construct
  misc_feature 1..22: note = chemically synthesized
  source 1..22: mol_type = other DNA
gagtattgagtatatagcatgc

SEQ ID NO: 115872 - DNA, 22 bp, synthetic construct
  misc_feature 1..22: note = chemically synthesized
  source 1..22: mol_type = other DNA
agtatatagcatgctcttaaag

SEQ ID NO: 115873 - DNA, 22 bp, synthetic construct
  misc_feature 1..22: note = chemically synthesized
  source 1..22: mol_type = other DNA
ttaaagattttttgcccctgtc

SEQ ID NO: 115874 - DNA, 22 bp, synthetic construct
  misc_feature 1..22: note = chemically synthesized
  source 1..22: mol_type = other DNA
aaagattttttgcccctgtcct

SEQ ID NO: 115875 - DNA, 22 bp, synthetic construct
  misc_feature 1..22: note = chemically synthesized
  source 1..22: mol_type = other DNA
aagattttttgcccctgtccta

SEQ ID NO: 115876 - DNA, 22 bp, synthetic construct
  misc_feature 1..22: note = chemically synthesized
  source 1..22: mol_type = other DNA
tttgcccctgtcctaaataaaa

SEQ ID NO: 115877 - DNA, 22 bp, synthetic construct
  misc_feature 1..22: note = chemically synthesized
  source 1..22: mol_type = other DNA
ttgcccctgtcctaaataaaat

SEQ ID NO: 115878 - DNA, 22 bp, synthetic construct
  misc_feature 1..22: note = chemically synthesized
  source 1..22: mol_type = other DNA
tgcccctgtcctaaataaaata

SEQ ID NO: 115879 - DNA, 22 bp, synthetic construct
  misc_feature 1..22: note = chemically synthesized
  source 1..22: mol_type = other DNA
gcccctgtcctaaataaaatat

SEQ ID NO: 115880 - DNA, 22 bp, synthetic construct
  misc_feature 1..22: note = chemically synthesized
  source 1..22: mol_type = other DNA
cccctgtcctaaataaaatatg

SEQ ID NO: 115881 - DNA, 22 bp, synthetic construct
  misc_feature 1..22: note = chemically synthesized
  source 1..22: mol_type = other DNA
tcctaaataaaatatgggcaaa

SEQ ID NO: 115882 - DNA, 22 bp, synthetic construct
  misc_feature 1..22: note = chemically synthesized
  source 1..22: mol_type = other DNA
aataaaatatgggcaaatttat

SEQ ID NO: 115883 - DNA, 22 bp, synthetic construct
  misc_feature 1..22: note = chemically synthesized
  source 1..22: mol_type = other DNA
atgtctggagttgtggctttaa

SEQ ID NO: 115884 - DNA, 22 bp, synthetic construct
  misc_feature 1..22: note = chemically synthesized
  source 1..22: mol_type = other DNA
tgtctggagttgtggctttaaa

SEQ ID NO: 115885 - DNA, 22 bp, synthetic construct
  misc_feature 1..22: note = chemically synthesized
  source 1..22: mol_type = other DNA
gagttgtggctttaaaaaactg

SEQ ID NO: 115886 - DNA, 22 bp, synthetic construct
  misc_feature 1..22: note = chemically synthesized
  source 1..22: mol_type = other DNA
tggctttaaaaaactgaacttc

SEQ ID NO: 115887 - DNA, 22 bp, synthetic construct
  misc_feature 1..22: note = chemically synthesized
  source 1..22: mol_type = other DNA
taaaaaactgaacttctcttgc

SEQ ID NO: 115888 - DNA, 22 bp, synthetic construct
  misc_feature 1..22: note = chemically synthesized
  source 1..22: mol_type = other DNA
aaaaaactgaacttctcttgct

SEQ ID NO: 115889 - DNA, 22 bp, synthetic construct
  misc_feature 1..22: note = chemically synthesized
  source 1..22: mol_type = other DNA
aaaaactgaacttctcttgctt

SEQ ID NO: 115890 - DNA, 22 bp, synthetic construct
  misc_feature 1..22: note = chemically synthesized
  source 1..22: mol_type = other DNA
aacttctcttgcttagatttta

SEQ ID NO: 115891 - DNA, 22 bp, synthetic construct
  misc_feature 1..22: note = chemically synthesized
  source 1..22: mol_type = other DNA
ctcttgcttagattttaatggc

SEQ ID NO: 115892 - DNA, 22 bp, synthetic construct
  misc_feature 1..22: note = chemically synthesized
  source 1..22: mol_type = other DNA
tcttgcttagattttaatggct

SEQ ID NO: 115893 - DNA, 22 bp, synthetic construct
  misc_feature 1..22: note = chemically synthesized
  source 1..22: mol_type = other DNA
ttgcttagattttaatggctcc

SEQ ID NO: 115894 - DNA, 22 bp, synthetic construct
  misc_feature 1..22: note = chemically synthesized
  source 1..22: mol_type = other DNA
gcttagattttaatggctcctc

SEQ ID NO: 115895 - DNA, 22 bp, synthetic construct
  misc_feature 1..22: note = chemically synthesized
  source 1..22: mol_type = other DNA
cttagattttaatggctcctcc

SEQ ID NO: 115896 - DNA, 22 bp, synthetic construct
  misc_feature 1..22: note = chemically synthesized
  source 1..22: mol_type = other DNA
agattttaatggctcctcctac

SEQ ID NO: 115897 - DNA, 22 bp, synthetic construct
  misc_feature 1..22: note = chemically synthesized
  source 1..22: mol_type = other DNA
gattttaatggctcctcctaca

SEQ ID NO: 115898 - DNA, 22 bp, synthetic construct
  misc_feature 1..22: note = chemically synthesized
  source 1..22: mol_type = other DNA
taatggctcctcctacagctga

SEQ ID NO: 115899 - DNA, 22 bp, synthetic construct
  misc_feature 1..22: note = chemically synthesized
  source 1..22: mol_type = other DNA
aatggctcctcctacagctgag

SEQ ID NO: 115900 - DNA, 22 bp, synthetic construct
  misc_feature 1..22: note = chemically synthesized
  source 1..22: mol_type = other DNA
atggctcctcctacagctgaga

SEQ ID NO: 115901 - DNA, 22 bp, synthetic construct
  misc_feature 1..22: note = chemically synthesized
  source 1..22: mol_type = other DNA
ctcctacagctgagaactggca

SEQ ID NO: 115902 - DNA, 22 bp, synthetic construct
  misc_feature 1..22: note = chemically synthesized
  source 1..22: mol_type = other DNA
ctacagctgagaactggcattt

SEQ ID NO: 115903 - DNA, 22 bp, synthetic construct
  misc_feature 1..22: note = chemically synthesized
  source 1..22: mol_type = other DNA
cagctgagaactggcatttttg

SEQ ID NO: 115904 - DNA, 22 bp, synthetic construct
  misc_feature 1..22: note = chemically synthesized
  source 1..22: mol_type = other DNA
agaactggcatttttggtagca

SEQ ID NO: 115905 - DNA, 22 bp, synthetic construct
  misc_feature 1..22: note = chemically synthesized
  source 1..22: mol_type = other DNA
gcatttttggtagcatcaaagc

SEQ ID NO: 115906 - DNA, 22 bp, synthetic construct
  misc_feature 1..22: note = chemically synthesized
  source 1..22: mol_type = other DNA
ttggtagcatcaaagctatcca

SEQ ID NO: 115907 - DNA, 22 bp, synthetic construct
  misc_feature 1..22: note = chemically synthesized
  source 1..22: mol_type = other DNA
tggtagcatcaaagctatccag

SEQ ID NO: 115908 - DNA, 22 bp, synthetic construct
  misc_feature 1..22: note = chemically synthesized
  source 1..22: mol_type = other DNA
ggtagcatcaaagctatccaga

SEQ ID NO: 115909 - DNA, 22 bp, synthetic construct
  misc_feature 1..22: note = chemically synthesized
  source 1..22: mol_type = other DNA
gtagcatcaaagctatccagaa

SEQ ID NO: 115910 - DNA, 22 bp, synthetic construct
  misc_feature 1..22: note = chemically synthesized
  source 1..22: mol_type = other DNA
tccagaaggcaactttattgaa

SEQ ID NO: 115911 - DNA, 22 bp, synthetic construct
  misc_feature 1..22: note = chemically synthesized
  source 1..22: mol_type = other DNA
tattgaaggtcatcatcaatgt

SEQ ID NO: 115912 - DNA, 22 bp, synthetic construct
  misc_feature 1..22: note = chemically synthesized
  source 1..22: mol_type = other DNA
attgaaggtcatcatcaatgta

SEQ ID NO: 115913 - DNA, 22 bp, synthetic construct
  misc_feature 1..22: note = chemically synthesized
  source 1..22: mol_type = other DNA
ttgaaggtcatcatcaatgtaa

SEQ ID NO: 115914 - DNA, 22 bp, synthetic construct
  misc_feature 1..22: note = chemically synthesized
  source 1..22: mol_type = other DNA
aaggtcatcatcaatgtaacta

SEQ ID NO: 115915 - DNA, 22 bp, synthetic construct
  misc_feature 1..22: note = chemically synthesized
  source 1..22: mol_type = other DNA
aaactaaaatgaaactaaataa

SEQ ID NO: 115916 - DNA, 22 bp, synthetic construct
  misc_feature 1..22: note = chemically synthesized
  source 1..22: mol_type = other DNA
aaatgaaactaaataaaaacta

SEQ ID NO: 115917 - DNA, 22 bp, synthetic construct
  misc_feature 1..22: note = chemically synthesized
  source 1..22: mol_type = other DNA
aataaaaactaaaaagaacaat

SEQ ID NO: 115918 - DNA, 22 bp, synthetic construct
  misc_feature 1..22: note = chemically synthesized
  source 1..22: mol_type = other DNA
aaaagaacaataaataccagag

SEQ ID NO: 115919 - DNA, 22 bp, synthetic construct
  misc_feature 1..22: note = chemically synthesized
  source 1..22: mol_type = other DNA
gcagagaccaggtaaatgccat

SEQ ID NO: 115920 - DNA, 22 bp, synthetic construct
  misc_feature 1..22: note = chemically synthesized
  source 1..22: mol_type = other DNA
gctctaactcacctccggaaat

SEQ ID NO: 115921 - DNA, 22 bp, synthetic construct
  misc_feature 1..22: note = chemically synthesized
  source 1..22: mol_type = other DNA
ctctaactcacctccggaaata

SEQ ID NO: 115922 - DNA, 22 bp, synthetic construct
  misc_feature 1..22: note = chemically synthesized
  source 1..22: mol_type = other DNA
taactcacctccggaaatacac

SEQ ID NO: 115923 - DNA, 22 bp, synthetic construct
  misc_feature 1..22: note = chemically synthesized
  source 1..22: mol_type = other DNA
actcacctccggaaatacacct

SEQ ID NO: 115924 - DNA, 22 bp, synthetic construct
  misc_feature 1..22: note = chemically synthesized
  source 1..22: mol_type = other DNA
acctccggaaatacacctcctt

SEQ ID NO: 115925 - DNA, 22 bp, synthetic construct
  misc_feature 1..22: note = chemically synthesized
  source 1..22: mol_type = other DNA
cggaaatacacctccttccatg

SEQ ID NO: 115926 - DNA, 22 bp, synthetic construct
  misc_feature 1..22: note = chemically synthesized
  source 1..22: mol_type = other DNA
cttccatggttccttgggactg

SEQ ID NO: 115927 - DNA, 22 bp, synthetic construct
  misc_feature 1..22: note = chemically synthesized
  source 1..22: mol_type = other DNA
ccatggttccttgggactgctt

SEQ ID NO: 115928 - DNA, 22 bp, synthetic construct
  misc_feature 1..22: note = chemically synthesized
  source 1..22: mol_type = other DNA
catggttccttgggactgcttc

SEQ ID NO: 115929 - DNA, 22 bp, synthetic construct
  misc_feature 1..22: note = chemically synthesized
  source 1..22: mol_type = other DNA
cttgggactgcttccatcttat

SEQ ID NO: 115930 - DNA, 22 bp, synthetic construct
  misc_feature 1..22: note = chemically synthesized
  source 1..22: mol_type = other DNA
gggactgcttccatcttatcta

SEQ ID NO: 115931 - DNA, 22 bp, synthetic construct
  misc_feature 1..22: note = chemically synthesized
  source 1..22: mol_type = other DNA
ggactgcttccatcttatctac

SEQ ID NO: 115932 - DNA, 22 bp, synthetic construct
  misc_feature 1..22: note = chemically synthesized
  source 1..22: mol_type = other DNA
cttccatcttatctacctggcc

SEQ ID NO: 115933 - DNA, 22 bp, synthetic construct
  misc_feature 1..22: note = chemically synthesized
  source 1..22: mol_type = other DNA
ccatcttatctacctggccaag

SEQ ID NO: 115934 - DNA, 22 bp, synthetic construct
  misc_feature 1..22: note = chemically synthesized
  source 1..22: mol_type = other DNA
catcttatctacctggccaagt

SEQ ID NO: 115935 - DNA, 22 bp, synthetic construct
  misc_feature 1..22: note = chemically synthesized
  source 1..22: mol_type = other DNA
atctacctggccaagtttcttc

SEQ ID NO: 115936 - DNA, 22 bp, synthetic construct
  misc_feature 1..22: note = chemically synthesized
  source 1..22: mol_type = other DNA
tctacctggccaagtttcttct

SEQ ID NO: 115937 - DNA, 22 bp, synthetic construct
  misc_feature 1..22: note = chemically synthesized
  source 1..22: mol_type = other DNA
cctggccaagtttcttctcatc

SEQ ID NO: 115938 - DNA, 22 bp, synthetic construct
  misc_feature 1..22: note = chemically synthesized
  source 1..22: mol_type = other DNA
gccaagtttcttctcatctttt

SEQ ID NO: 115939 - DNA, 22 bp, synthetic construct
  misc_feature 1..22: note = chemically synthesized
  source 1..22: mol_type = other DNA
cttctcatctttttctatcctg

SEQ ID NO: 115940 - DNA, 22 bp, synthetic construct
  misc_feature 1..22: note = chemically synthesized
  source 1..22: mol_type = other DNA
ttctcatctttttctatcctgg

SEQ ID NO: 115941 - DNA, 22 bp, synthetic construct
  misc_feature 1..22: note = chemically synthesized
  source 1..22: mol_type = other DNA
ctcatctttttctatcctggtc

SEQ ID NO: 115942 - DNA, 22 bp, synthetic construct
  misc_feature 1..22: note = chemically synthesized
  source 1..22: mol_type = other DNA
tcatctttttctatcctggtca

SEQ ID NO: 115943 - DNA, 22 bp, synthetic construct
  misc_feature 1..22: note = chemically synthesized
  source 1..22: mol_type = other DNA
atctttttctatcctggtcagc

SEQ ID NO: 115944 - DNA, 22 bp, synthetic construct
  misc_feature 1..22: note = chemically synthesized
  source 1..22: mol_type = other DNA
tttctatcctggtcagcagtaa

SEQ ID NO: 115945 - DNA, 22 bp, synthetic construct
  misc_feature 1..22: note = chemically synthesized
  source 1..22: mol_type = other DNA
ttctatcctggtcagcagtaac

SEQ ID NO: 115946 - DNA, 22 bp, synthetic construct
  misc_feature 1..22: note = chemically synthesized
  source 1..22: mol_type = other DNA
tctatcctggtcagcagtaact

SEQ ID NO: 115947 - DNA, 22 bp, synthetic construct
  misc_feature 1..22: note = chemically synthesized
  source 1..22: mol_type = other DNA
ctatcctggtcagcagtaactt

SEQ ID NO: 115948 - DNA, 22 bp, synthetic construct
  misc_feature 1..22: note = chemically synthesized
  source 1..22: mol_type = other DNA
tatcctggtcagcagtaacttt

SEQ ID NO: 115949 - DNA, 22 bp, synthetic construct
  misc_feature 1..22: note = chemically synthesized
  source 1..22: mol_type = other DNA
tcctggtcagcagtaactttca

SEQ ID NO: 115950 - DNA, 22 bp, synthetic construct
  misc_feature 1..22: note = chemically synthesized
  source 1..22: mol_type = other DNA
gtcagcagtaactttcagaccc

SEQ ID NO: 115951 - DNA, 22 bp, synthetic construct
  misc_feature 1..22: note = chemically synthesized
  source 1..22: mol_type = other DNA
tcagacccccaagtcacatcag

SEQ ID NO: 115952 - DNA, 22 bp, synthetic construct
  misc_feature 1..22: note = chemically synthesized
  source 1..22: mol_type = other DNA
cagacccccaagtcacatcaga

SEQ ID NO: 115953 - DNA, 22 bp, synthetic construct
  misc_feature 1..22: note = chemically synthesized
  source 1..22: mol_type = other DNA
agacccccaagtcacatcagaa

SEQ ID NO: 115954 - DNA, 22 bp, synthetic construct
  misc_feature 1..22: note = chemically synthesized
  source 1..22: mol_type = other DNA
agaactcctgcattcttcctca

SEQ ID NO: 115955 - DNA, 22 bp, synthetic construct
  misc_feature 1..22: note = chemically synthesized
  source 1..22: mol_type = other DNA
ctgcattcttcctcaacacctg

SEQ ID NO: 115956 - DNA, 22 bp, synthetic construct
  misc_feature 1..22: note = chemically synthesized
  source 1..22: mol_type = other DNA
cattcttcctcaacacctgttt

SEQ ID NO: 115957 - DNA, 22 bp, synthetic construct
  misc_feature 1..22: note = chemically synthesized
  source 1..22: mol_type = other DNA
ttcctcaacacctgtttcaagc

SEQ ID NO: 115958 - DNA, 22 bp, synthetic construct
  misc_feature 1..22: note = chemically synthesized
  source 1..22: mol_type = other DNA
cctcaacacctgtttcaagcaa

SEQ ID NO: 115959 - DNA, 22 bp, synthetic construct
  misc_feature 1..22: note = chemically synthesized
  source 1..22: mol_type = other DNA
ctcaacacctgtttcaagcaac

SEQ ID NO: 115960 - DNA, 22 bp, synthetic construct
  misc_feature 1..22: note = chemically synthesized
  source 1..22: mol_type = other DNA
aacacctgtttcaagcaacacc

SEQ ID NO: 115961 - DNA, 22 bp, synthetic construct
  misc_feature 1..22: note = chemically synthesized
  source 1..22: mol_type = other DNA
tttcaagcaacacccccccaaa

SEQ ID NO: 115962 - DNA, 22 bp, synthetic construct
  misc_feature 1..22: note = chemically synthesized
  source 1..22: mol_type = other DNA
caagcaacacccccccaaattt

SEQ ID NO: 115963 - DNA, 22 bp, synthetic construct
  misc_feature 1..22: note = chemically synthesized
  source 1..22: mol_type = other DNA
aagcaacacccccccaaatttc

SEQ ID NO: 115964 - DNA, 22 bp, synthetic construct
  misc_feature 1..22: note = chemically synthesized
  source 1..22: mol_type = other DNA
ctaaggttgtgctctctcctga

SEQ ID NO: 115965 - DNA, 22 bp, synthetic construct
  misc_feature 1..22: note = chemically synthesized
  source 1..22: mol_type = other DNA
taaggttgtgctctctcctgac

SEQ ID NO: 115966 - DNA, 22 bp, synthetic construct
  misc_feature 1..22: note = chemically synthesized
  source 1..22: mol_type = other DNA
aggttgtgctctctcctgacca

SEQ ID NO: 115967 - DNA, 22 bp, synthetic construct
  misc_feature 1..22: note = chemically synthesized
  source 1..22: mol_type = other DNA
tgctctctcctgaccatattcc

SEQ ID NO: 115968 - DNA, 22 bp, synthetic construct
  misc_feature 1..22: note = chemically synthesized
  source 1..22: mol_type = other DNA
tctcctgaccatattcctctag

SEQ ID NO: 115969 - DNA, 22 bp, synthetic construct
  misc_feature 1..22: note = chemically synthesized
  source 1..22: mol_type = other DNA
tcctgaccatattcctctagaa

SEQ ID NO: 115970 - DNA, 22 bp, synthetic construct
  misc_feature 1..22: note = chemically synthesized
  source 1..22: mol_type = other DNA
ctgaccatattcctctagaaga

SEQ ID NO: 115971 - DNA, 22 bp, synthetic construct
  misc_feature 1..22: note = chemically synthesized
  source 1..22: mol_type = other DNA
accatattcctctagaagaaga

SEQ ID NO: 115972 - DNA, 22 bp, synthetic construct
  misc_feature 1..22: note = chemically synthesized
  source 1..22: mol_type = other DNA
ctctagaagaagagactttgat

SEQ ID NO: 115973 - DNA, 22 bp, synthetic construct
  misc_feature 1..22: note = chemically synthesized
  source 1..22: mol_type = other DNA
tagaagaagagactttgatcct

SEQ ID NO: 115974 - DNA, 22 bp, synthetic construct
  misc_feature 1..22: note = chemically synthesized
  source 1..22: mol_type = other DNA
gaagaagagactttgatcctat

SEQ ID NO: 115975 - DNA, 22 bp, synthetic construct
  misc_feature 1..22: note = chemically synthesized
  source 1..22: mol_type = other DNA
tgatcctatccttgactcctct

SEQ ID NO: 115976 - DNA, 22 bp, synthetic construct
  misc_feature 1..22: note = chemically synthesized
  source 1..22: mol_type = other DNA
gatcctatccttgactcctctc

SEQ ID NO: 115977 - DNA, 22 bp, synthetic construct
  misc_feature 1..22: note = chemically synthesized
  source 1..22: mol_type = other DNA
atcctatccttgactcctctca

SEQ ID NO: 115978 - DNA, 22 bp, synthetic construct
  misc_feature 1..22: note = chemically synthesized
  source 1..22: mol_type = other DNA
tccttgactcctctcatctctg

SEQ ID NO: 115979 - DNA, 22 bp, synthetic construct
  misc_feature 1..22: note = chemically synthesized
  source 1..22: mol_type = other DNA
gactcctctcatctctgatttt

SEQ ID NO: 115980 - DNA, 22 bp, synthetic construct
  misc_feature 1..22: note = chemically synthesized
  source 1..22: mol_type = other DNA
actcctctcatctctgatttta

SEQ ID NO: 115981 - DNA, 22 bp, synthetic construct
  misc_feature 1..22: note = chemically synthesized
  source 1..22: mol_type = other DNA
ctctcatctctgattttacctt

SEQ ID NO: 115982 - DNA, 22 bp, synthetic construct
  misc_feature 1..22: note = chemically synthesized
  source 1..22: mol_type = other DNA
tcatctctgattttaccttaca

SEQ ID NO: 115983 - DNA, 22 bp, synthetic construct
  misc_feature 1..22: note = chemically synthesized
  source 1..22: mol_type = other DNA
atctctgattttaccttacaac

SEQ ID NO: 115984 - DNA, 22 bp, synthetic construct
  misc_feature 1..22: note = chemically synthesized
  source 1..22: mol_type = other DNA
tgattttaccttacaacctcaa

SEQ ID NO: 115985 - DNA, 22 bp, synthetic construct
  misc_feature 1..22: note = chemically synthesized
  source 1..22: mol_type = other DNA
attttaccttacaacctcaagt

SEQ ID NO: 115986 - DNA, 22 bp, synthetic construct
  misc_feature 1..22: note = chemically synthesized
  source 1..22: mol_type = other DNA
taccttacaacctcaagtctga

SEQ ID NO: 115987 - DNA, 22 bp, synthetic construct
  misc_feature 1..22: note = chemically synthesized
  source 1..22: mol_type = other DNA
accttacaacctcaagtctgac

SEQ ID NO: 115988 - DNA, 22 bp, synthetic construct
  misc_feature 1..22: note = chemically synthesized
  source 1..22: mol_type = other DNA
ccttacaacctcaagtctgaca

SEQ ID NO: 115989 - DNA, 22 bp, synthetic construct
  misc_feature 1..22: note = chemically synthesized
  source 1..22: mol_type = other DNA
acaacctcaagtctgacattaa

SEQ ID NO: 115990 - DNA, 22 bp, synthetic construct
  misc_feature 1..22: note = chemically synthesized
  source 1..22: mol_type = other DNA
caacctcaagtctgacattaag

SEQ ID NO: 115991 - DNA, 22 bp, synthetic construct
  misc_feature 1..22: note = chemically synthesized
  source 1..22: mol_type = other DNA
aagtctgacattaagctacagt

SEQ ID NO: 115992 - DNA, 22 bp, synthetic construct
  misc_feature 1..22: note = chemically synthesized
  source 1..22: mol_type = other DNA
acattaagctacagtcagtatt

SEQ ID NO: 115993 - DNA, 22 bp, synthetic construct
  misc_feature 1..22: note = chemically synthesized
  source 1..22: mol_type = other DNA
agctacagtcagtatttacttg

SEQ ID NO: 115994 - DNA, 22 bp, synthetic construct
  misc_feature 1..22: note = chemically synthesized
  source 1..22: mol_type = other DNA
cagtcagtatttacttgtaggt

SEQ ID NO: 115995 - DNA, 22 bp, synthetic construct
  misc_feature 1..22: note = chemically synthesized
  source 1..22: mol_type = other DNA
acttgtaggtgttttagttgtg

SEQ ID NO: 115996 - DNA, 22 bp, synthetic construct
  misc_feature 1..22: note = chemically synthesized
  source 1..22: mol_type = other DNA
cttgtaggtgttttagttgtgt

SEQ ID NO: 115997 - DNA, 22 bp, synthetic construct
  misc_feature 1..22: note = chemically synthesized
  source 1..22: mol_type = other DNA
gtaggtgttttagttgtgtgat

SEQ ID NO: 115998 - DNA, 22 bp, synthetic construct
  misc_feature 1..22: note = chemically synthesized
  source 1..22: mol_type = other DNA
taggtgttttagttgtgtgata

SEQ ID NO: 115999 - DNA, 22 bp, synthetic construct
  misc_feature 1..22: note = chemically synthesized
  source 1..22: mol_type = other DNA
tagttgtgtgatattgaacaat

SEQ ID NO: 116000 - DNA, 22 bp, synthetic construct
  misc_feature 1..22: note = chemically synthesized
  source 1..22: mol_type = other DNA
agttgtgtgatattgaacaatg

SEQ ID NO: 116001 - DNA, 22 bp, synthetic construct
  misc_feature 1..22: note = chemically synthesized
  source 1..22: mol_type = other DNA
gttgtgtgatattgaacaatga

SEQ ID NO: 116002 - DNA, 22 bp, synthetic construct
  misc_feature 1..22: note = chemically synthesized
  source 1..22: mol_type = other DNA
tgtgatattgaacaatgacatg

SEQ ID NO: 116003 - DNA, 22 bp, synthetic construct
  misc_feature 1..22: note = chemically synthesized
  source 1..22: mol_type = other DNA
aacaatgacatgtaacgtgaga

SEQ ID NO: 116004 - DNA, 22 bp, synthetic construct
  misc_feature 1..22: note = chemically synthesized
  source 1..22: mol_type = other DNA
cagccaaggaaactcacacaaa

SEQ ID NO: 116005 - DNA, 22 bp, synthetic construct
  misc_feature 1..22: note = chemically synthesized
  source 1..22: mol_type = other DNA
agccaaggaaactcacacaaac

SEQ ID NO: 116006 - DNA, 22 bp, synthetic construct
  misc_feature 1..22: note = chemically synthesized
  source 1..22: mol_type = other DNA
acacaaacatattgaagtcaca

SEQ ID NO: 116007 - DNA, 22 bp, synthetic construct
  misc_feature 1..22: note = chemically synthesized
  source 1..22: mol_type = other DNA
aagtcacaatcccattgctcag

SEQ ID NO: 116008 - DNA, 22 bp, synthetic construct
  misc_feature 1..22: note = chemically synthesized
  source 1..22: mol_type = other DNA
ctcaggaggaaataaactttac

SEQ ID NO: 116009 - DNA, 22 bp, synthetic construct
  misc_feature 1..22: note = chemically synthesized
  source 1..22: mol_type = other DNA
aggaggaaataaactttacatt

SEQ ID NO: 116010 - DNA, 22 bp, synthetic construct
  misc_feature 1..22: note = chemically synthesized
  source 1..22: mol_type = other DNA
tacattggctgatcagcctgtc

SEQ ID NO: 116011 - DNA, 22 bp, synthetic construct
  misc_feature 1..22: note = chemically synthesized
  source 1..22: mol_type = other DNA
acattggctgatcagcctgtcc

SEQ ID NO: 116012 - DNA, 22 bp, synthetic construct
  misc_feature 1..22: note = chemically synthesized
  source 1..22: mol_type = other DNA
cattggctgatcagcctgtccc

SEQ ID NO: 116013 - DNA, 22 bp, synthetic construct
  misc_feature 1..22: note = chemically synthesized
  source 1..22: mol_type = other DNA
gctgatcagcctgtccctacga

SEQ ID NO: 116014 - DNA, 22 bp, synthetic construct
  misc_feature 1..22: note = chemically synthesized
  source 1..22: mol_type = other DNA
atcagcctgtccctacgagtga

SEQ ID NO: 116015 - DNA, 22 bp, synthetic construct
  misc_feature 1..22: note = chemically synthesized
  source 1..22: mol_type = other DNA
tccctacgagtgactaaatgca

SEQ ID NO: 116016 - DNA, 22 bp, synthetic construct
  misc_feature 1..22: note = chemically synthesized
  source 1..22: mol_type = other DNA
cgagtgactaaatgcaatcctt

SEQ ID NO: 116017 - DNA, 22 bp, synthetic construct
  misc_feature 1..22: note = chemically synthesized
  source 1..22: mol_type = other DNA
aatgcaatccttgcaggggtct

SEQ ID NO: 116018 - DNA, 22 bp, synthetic construct
  misc_feature 1..22: note = chemically synthesized
  source 1..22: mol_type = other DNA
gcaggggtctcagctttgaaat

SEQ ID NO: 116019 - DNA, 22 bp, synthetic construct
  misc_feature 1..22: note = chemically synthesized
  source 1..22: mol_type = other DNA
caggggtctcagctttgaaatt

SEQ ID NO: 116020 - DNA, 22 bp, synthetic construct
  misc_feature 1..22: note = chemically synthesized
  source 1..22: mol_type = other DNA
agctttgaaattgcttcctcaa

SEQ ID NO: 116021 - DNA, 22 bp, synthetic construct
  misc_feature 1..22: note = chemically synthesized
  source 1..22: mol_type = other DNA
tgaaattgcttcctcaaggaca

SEQ ID NO: 116022 - DNA, 22 bp, synthetic construct
  misc_feature 1..22: note = chemically synthesized
  source 1..22: mol_type = other DNA
gaaattgcttcctcaaggacat

SEQ ID NO: 116023 - DNA, 22 bp, synthetic construct
  misc_feature 1..22: note = chemically synthesized
  source 1..22: mol_type = other DNA
aaattgcttcctcaaggacatt

SEQ ID NO: 116024 - DNA, 22 bp, synthetic construct
  misc_feature 1..22: note = chemically synthesized
  source 1..22: mol_type = other DNA
cttcctcaaggacattttcaca

SEQ ID NO: 116025 - DNA, 22 bp, synthetic construct
  misc_feature 1..22: note = chemically synthesized
  source 1..22: mol_type = other DNA
cctcaaggacattttcacagat

SEQ ID NO: 116026 - DNA, 22 bp, synthetic construct
  misc_feature 1..22: note = chemically synthesized
  source 1..22: mol_type = other DNA
ctcaaggacattttcacagata

SEQ ID NO: 116027 - DNA, 22 bp, synthetic construct
  misc_feature 1..22: note = chemically synthesized
  source 1..22: mol_type = other DNA
aaggacattttcacagatagct

SEQ ID NO: 116028 - DNA, 22 bp, synthetic construct
  misc_feature 1..22: note = chemically synthesized
  source 1..22: mol_type = other DNA
tcacagatagctcctccctttc

SEQ ID NO: 116029 - DNA, 22 bp, synthetic construct
  misc_feature 1..22: note = chemically synthesized
  source 1..22: mol_type = other DNA
cacagatagctcctccctttcc

SEQ ID NO: 116030 - DNA, 22 bp, synthetic construct
  misc_feature 1..22: note = chemically synthesized
  source 1..22: mol_type = other DNA
acagatagctcctccctttcca

SEQ ID NO: 116031 - DNA, 22 bp, synthetic construct
  misc_feature 1..22: note = chemically synthesized
  source 1..22: mol_type = other DNA
ctccctttccaatggtaaagca

SEQ ID NO: 116032 - DNA, 22 bp, synthetic construct
  misc_feature 1..22: note = chemically synthesized
  source 1..22: mol_type = other DNA
cctttccaatggtaaagcacca

SEQ ID NO: 116033 - DNA, 22 bp, synthetic construct
  misc_feature 1..22: note = chemically synthesized
  source 1..22: mol_type = other DNA
tccaatggtaaagcaccaaatg

SEQ ID NO: 116034 - DNA, 22 bp, synthetic construct
  misc_feature 1..22: note = chemically synthesized
  source 1..22: mol_type = other DNA
ccaatggtaaagcaccaaatgc

SEQ ID NO: 116035 - DNA, 22 bp, synthetic construct
  misc_feature 1..22: note = chemically synthesized
  source 1..22: mol_type = other DNA
caatggtaaagcaccaaatgct

SEQ ID NO: 116036 - DNA, 22 bp, synthetic construct
  misc_feature 1..22: note = chemically synthesized
  source 1..22: mol_type = other DNA
catcggtttccttccacagtgc

SEQ ID NO: 116037 - DNA, 22 bp, synthetic construct
  misc_feature 1..22: note = chemically synthesized
  source 1..22: mol_type = other DNA
ccttccacagtgccctgcattt

SEQ ID NO: 116038 - DNA, 22 bp, synthetic construct
  misc_feature 1..22: note = chemically synthesized
  source 1..22: mol_type = other DNA
cttccacagtgccctgcatttc

SEQ ID NO: 116039 - DNA, 22 bp, synthetic construct
  misc_feature 1..22: note = chemically synthesized
  source 1..22: mol_type = other DNA
ccacagtgccctgcatttcccg

SEQ ID NO: 116040 - DNA, 22 bp, synthetic construct
  misc_feature 1..22: note = chemically synthesized
  source 1..22: mol_type = other DNA
cacagtgccctgcatttcccgt

SEQ ID NO: 116041 - DNA, 22 bp, synthetic construct
  misc_feature 1..22: note = chemically synthesized
  source 1..22: mol_type = other DNA
catttcccgttgtaacatttgt

SEQ ID NO: 116042 - DNA, 22 bp, synthetic construct
  misc_feature 1..22: note = chemically synthesized
  source 1..22: mol_type = other DNA
cccgttgtaacatttgtcacac

SEQ ID NO: 116043 - DNA, 22 bp, synthetic construct
  misc_feature 1..22: note = chemically synthesized
  source 1..22: mol_type = other DNA
ccgttgtaacatttgtcacaca

SEQ ID NO: 116044 - DNA, 22 bp, synthetic construct
  misc_feature 1..22: note = chemically synthesized
  source 1..22: mol_type = other DNA
taacatttgtcacacagtaatg

SEQ ID NO: 116045 - DNA, 22 bp, synthetic construct
  misc_feature 1..22: note = chemically synthesized
  source 1..22: mol_type = other DNA
gtcacacagtaatgtcctgttt

SEQ ID NO: 116046 - DNA, 22 bp, synthetic construct
  misc_feature 1..22: note = chemically synthesized
  source 1..22: mol_type = other DNA
tcacacagtaatgtcctgttta

SEQ ID NO: 116047 - DNA, 22 bp, synthetic construct
  misc_feature 1..22: note = chemically synthesized
  source 1..22: mol_type = other DNA
tttatgaaggtgtgtgcatgtg

SEQ ID NO: 116048 - DNA, 22 bp, synthetic construct
  misc_feature 1..22: note = chemically synthesized
  source 1..22: mol_type = other DNA
atgaaggtgtgtgcatgtgtcc

SEQ ID NO: 116049 - DNA, 22 bp, synthetic construct
  misc_feature 1..22: note = chemically synthesized
  source 1..22: mol_type = other DNA
tgaaggtgtgtgcatgtgtcca

SEQ ID NO: 116050 - DNA, 22 bp, synthetic construct
  misc_feature 1..22: note = chemically synthesized
  source 1..22: mol_type = other DNA
gaatgactaaatcaagatccct

SEQ ID NO: 116051 - DNA, 22 bp, synthetic construct
  misc_feature 1..22: note = chemically synthesized
  source 1..22: mol_type = other DNA
aatcaagatccctggaggaatt

SEQ ID NO: 116052 - DNA, 22 bp, synthetic construct
  misc_feature 1..22: note = chemically synthesized
  source 1..22: mol_type = other DNA
gaggaattaggcatgtcttgct

SEQ ID NO: 116053 - DNA, 22 bp, synthetic construct
  misc_feature 1..22: note = chemically synthesized
  source 1..22: mol_type = other DNA
ggcatgtcttgctcgccagtaa

SEQ ID NO: 116054 - DNA, 22 bp, synthetic construct
  misc_feature 1..22: note = chemically synthesized
  source 1..22: mol_type = other DNA
gctcgccagtaaatgtatataa

SEQ ID NO: 116055 - DNA, 22 bp, synthetic construct
  misc_feature 1..22: note = chemically synthesized
  source 1..22: mol_type = other DNA
ctcgccagtaaatgtatataaa

SEQ ID NO: 116056 - DNA, 22 bp, synthetic construct
  misc_feature 1..22: note = chemically synthesized
  source 1..22: mol_type = other DNA
gccagtaaatgtatataaatac

SEQ ID NO: 116057 - DNA, 22 bp, synthetic construct
  misc_feature 1..22: note = chemically synthesized
  source 1..22: mol_type = other DNA
gcacatgccatatactcaataa

SEQ ID NO: 116058 - DNA, 22 bp, synthetic construct
  misc_feature 1..22: note = chemically synthesized
  source 1..22: mol_type = other DNA
aataaatattaaatgtatgcgt

SEQ ID NO: 116059 - DNA, 22 bp, synthetic construct
  misc_feature 1..22: note = chemically synthesized
  source 1..22: mol_type = other DNA
aatgtatgcgtggacatataga

SEQ ID NO: 116060 - DNA, 22 bp, synthetic construct
  misc_feature 1..22: note = chemically synthesized
  source 1..22: mol_type = other DNA
acagaagttctcttcttgtctc

SEQ ID NO: 116061 - DNA, 22 bp, synthetic construct
  misc_feature 1..22: note = chemically synthesized
  source 1..22: mol_type = other DNA
tcttcttgtctcgaggaactcc

SEQ ID NO: 116062 - DNA, 22 bp, synthetic construct
  misc_feature 1..22: note = chemically synthesized
  source 1..22: mol_type = other DNA
ttcttgtctcgaggaactcctc

SEQ ID NO: 116063 - DNA, 22 bp, synthetic construct
  misc_feature 1..22: note = chemically synthesized
  source 1..22: mol_type = other DNA
cttgtctcgaggaactcctcct

SEQ ID NO: 116064 - DNA, 22 bp, synthetic construct
  misc_feature 1..22: note = chemically synthesized
  source 1..22: mol_type = other DNA
ttgtctcgaggaactcctcctc

SEQ ID NO: 116065 - DNA, 22 bp, synthetic construct
  misc_feature 1..22: note = chemically synthesized
  source 1..22: mol_type = other DNA
gtctcgaggaactcctcctctt

SEQ ID NO: 116066 - DNA, 22 bp, synthetic construct
  misc_feature 1..22: note = chemically synthesized
  source 1..22: mol_type = other DNA
tctcgaggaactcctcctcttc

SEQ ID NO: 116067 - DNA, 22 bp, synthetic construct
  misc_feature 1..22: note = chemically synthesized
  source 1..22: mol_type = other DNA
gaggaactcctcctcttcacat

SEQ ID NO: 116068 - DNA, 22 bp, synthetic construct
  misc_feature 1..22: note = chemically synthesized
  source 1..22: mol_type = other DNA
ctcctcttcacattcagaagcc

SEQ ID NO: 116069 - DNA, 22 bp, synthetic construct
  misc_feature 1..22: note = chemically synthesized
  source 1..22: mol_type = other DNA
ctcttcacattcagaagcccaa

SEQ ID NO: 116070 - DNA, 22 bp, synthetic construct
  misc_feature 1..22: note = chemically synthesized
  source 1..22: mol_type = other DNA
ttcacattcagaagcccaagaa

SEQ ID NO: 116071 - DNA, 22 bp, synthetic construct
  misc_feature 1..22: note = chemically synthesized
  source 1..22: mol_type = other DNA
cacattcagaagcccaagaaga

SEQ ID NO: 116072 - DNA, 22 bp, synthetic construct
  misc_feature 1..22: note = chemically synthesized
  source 1..22: mol_type = other DNA
acattcagaagcccaagaagac

SEQ ID NO: 116073 - DNA, 22 bp, synthetic construct
  misc_feature 1..22: note = chemically synthesized
  source 1..22: mol_type = other DNA
agaagcccaagaagacaccttt

SEQ ID NO: 116074 - DNA, 22 bp, synthetic construct
  misc_feature 1..22: note = chemically synthesized
  source 1..22: mol_type = other DNA
tctgctggcatccatcaaggtg

SEQ ID NO: 116075 - DNA, 22 bp, synthetic construct
  misc_feature 1..22: note = chemically synthesized
  source 1..22: mol_type = other DNA
ctgctggcatccatcaaggtgg

SEQ ID NO: 116076 - DNA, 22 bp, synthetic construct
  misc_feature 1..22: note = chemically synthesized
  source 1..22: mol_type = other DNA
tgctggcatccatcaaggtggt

SEQ ID NO: 116077 - DNA, 22 bp, synthetic construct
  misc_feature 1..22: note = chemically synthesized
  source 1..22: mol_type = other DNA
ctggcatccatcaaggtggtat

SEQ ID NO: 116078 - DNA, 22 bp, synthetic construct
  misc_feature 1..22: note = chemically synthesized
  source 1..22: mol_type = other DNA
gcatccatcaaggtggtatatc

SEQ ID NO: 116079 - DNA, 22 bp, synthetic construct
  misc_feature 1..22: note = chemically synthesized
  source 1..22: mol_type = other DNA
cattgtcccagttctactttac

SEQ ID NO: 116080 - DNA, 22 bp, synthetic construct
  misc_feature 1..22: note = chemically synthesized
  source 1..22: mol_type = other DNA
attgtcccagttctactttact

SEQ ID NO: 116081 - DNA, 22 bp, synthetic construct
  misc_feature 1..22: note = chemically synthesized
  source 1..22: mol_type = other DNA
tcccagttctactttactcagg

SEQ ID NO: 116082 - DNA, 22 bp, synthetic construct
  misc_feature 1..22: note = chemically synthesized
  source 1..22: mol_type = other DNA
tactttactcaggccctctgga

SEQ ID NO: 116083 - DNA, 22 bp, synthetic construct
  misc_feature 1..22: note = chemically synthesized
  source 1..22: mol_type = other DNA
ctttactcaggccctctggatc

SEQ ID NO: 116084 - DNA, 22 bp, synthetic construct
  misc_feature 1..22: note = chemically synthesized
  source 1..22: mol_type = other DNA
tactcaggccctctggatcctc

SEQ ID NO: 116085 - DNA, 22 bp, synthetic construct
  misc_feature 1..22: note = chemically synthesized
  source 1..22: mol_type = other DNA
actcaggccctctggatcctcc

SEQ ID NO: 116086 - DNA, 22 bp, synthetic construct
  misc_feature 1..22: note = chemically synthesized
  source 1..22: mol_type = other DNA
ctcaggccctctggatcctccc

SEQ ID NO: 116087 - DNA, 22 bp, synthetic construct
  misc_feature 1..22: note = chemically synthesized
  source 1..22: mol_type = other DNA
aggccctctggatcctcccacc

SEQ ID NO: 116088 - DNA, 22 bp, synthetic construct
  misc_feature 1..22: note = chemically synthesized
  source 1..22: mol_type = other DNA
tggatcctcccacccattctcc

SEQ ID NO: 116089 - DNA, 22 bp, synthetic construct
  misc_feature 1..22: note = chemically synthesized
  source 1..22: mol_type = other DNA
gatcctcccacccattctccta

SEQ ID NO: 116090 - DNA, 22 bp, synthetic construct
  misc_feature 1..22: note = chemically synthesized
  source 1..22: mol_type = other DNA
ccacccattctcctacaggtta

SEQ ID NO: 116091 - DNA, 22 bp, synthetic construct
  misc_feature 1..22: note = chemically synthesized
  source 1..22: mol_type = other DNA
tcctacaggttaaaattaccat

SEQ ID NO: 116092 - DNA, 22 bp, synthetic construct
  misc_feature 1..22: note = chemically synthesized
  source 1..22: mol_type = other DNA
ctacaggttaaaattaccatga

SEQ ID NO: 116093 - DNA, 22 bp, synthetic construct
  misc_feature 1..22: note = chemically synthesized
  source 1..22: mol_type = other DNA
caggttaaaattaccatgaggc

SEQ ID NO: 116094 - DNA, 22 bp, synthetic construct
  misc_feature 1..22: note = chemically synthesized
  source 1..22: mol_type = other DNA
aaattaccatgaggccaggcac

SEQ ID NO: 116095 - DNA, 22 bp, synthetic construct
  misc_feature 1..22: note = chemically synthesized
  source 1..22: mol_type = other DNA
ccatgaggccaggcacggtggc

SEQ ID NO: 116096 - DNA, 22 bp, synthetic construct
  misc_feature 1..22: note = chemically synthesized
  source 1..22: mol_type = other DNA
atgctataatcccagcactttg

SEQ ID NO: 116097 - DNA, 22 bp, synthetic construct
  misc_feature 1..22: note = chemically synthesized
  source 1..22: mol_type = other DNA
tgctataatcccagcactttgg

SEQ ID NO: 116098 - DNA, 22 bp, synthetic construct
  misc_feature 1..22: note = chemically synthesized
  source 1..22: mol_type = other DNA
taatcccagcactttgggagac

SEQ ID NO: 116099 - DNA, 22 bp, synthetic construct
  misc_feature 1..22: note = chemically synthesized
  source 1..22: mol_type = other DNA
tgggagaccaaggtgggaggat

SEQ ID NO: 116100 - DNA, 22 bp, synthetic construct
  misc_feature 1..22: note = chemically synthesized
  source 1..22: mol_type = other DNA
gggagaccaaggtgggaggatt

SEQ ID NO: 116101 - DNA, 22 bp, synthetic construct
  misc_feature 1..22: note = chemically synthesized
  source 1..22: mol_type = other DNA
ggagaccaaggtgggaggattg

SEQ ID NO: 116102 - DNA, 22 bp, synthetic construct
  misc_feature 1..22: note = chemically synthesized
  source 1..22: mol_type = other DNA
ctgaaggccaggagtttgagac

SEQ ID NO: 116103 - DNA, 22 bp, synthetic construct
  misc_feature 1..22: note = chemically synthesized
  source 1..22: mol_type = other DNA
aaggccaggagtttgagaccaa

SEQ ID NO: 116104 - DNA, 22 bp, synthetic construct
  misc_feature 1..22: note = chemically synthesized
  source 1..22: mol_type = other DNA
gagaccaacttcaggcaagaag

SEQ ID NO: 116105 - DNA, 22 bp, synthetic construct
  misc_feature 1..22: note = chemically synthesized
  source 1..22: mol_type = other DNA
agaccaacttcaggcaagaaga

SEQ ID NO: 116106 - DNA, 22 bp, synthetic construct
  misc_feature 1..22: note = chemically synthesized
  source 1..22: mol_type = other DNA
caggcaagaagattacttgagt

SEQ ID NO: 116107 - DNA, 22 bp, synthetic construct
  misc_feature 1..22: note = chemically synthesized
  source 1..22: mol_type = other DNA
aggcaagaagattacttgagtc

SEQ ID NO: 116108 - DNA, 22 bp, synthetic construct
  misc_feature 1..22: note = chemically synthesized
  source 1..22: mol_type = other DNA
cttgagtccaggagtttgagac

SEQ ID NO: 116109 - DNA, 22 bp, synthetic construct
  misc_feature 1..22: note = chemically synthesized
  source 1..22: mol_type = other DNA
gagtccaggagtttgagaccag

SEQ ID NO: 116110 - DNA, 22 bp, synthetic construct
  misc_feature 1..22: note = chemically synthesized
  source 1..22: mol_type = other DNA
agtccaggagtttgagaccagc

SEQ ID NO: 116111 - DNA, 22 bp, synthetic construct
  misc_feature 1..22: note = chemically synthesized
  source 1..22: mol_type = other DNA
gagaccagcctgaacaatacag

SEQ ID NO: 116112 - DNA, 22 bp, synthetic construct
  misc_feature 1..22: note = chemically synthesized
  source 1..22: mol_type = other DNA
agaccagcctgaacaatacagc

SEQ ID NO: 116113 - DNA, 22 bp, synthetic construct
  misc_feature 1..22: note = chemically synthesized
  source 1..22: mol_type = other DNA
aacaatacagcaagaccctatc

SEQ ID NO: 116114 - DNA, 22 bp, synthetic construct
  misc_feature 1..22: note = chemically synthesized
  source 1..22: mol_type = other DNA
tctctacaaaaaaaattaaaat

SEQ ID NO: 116115 - DNA, 22 bp, synthetic construct
  misc_feature 1..22: note = chemically synthesized
  source 1..22: mol_type = other DNA
tacaaaaaaaattaaaattagc

SEQ ID NO: 116116 - DNA, 22 bp, synthetic construct
  misc_feature 1..22: note = chemically synthesized
  source 1..22: mol_type = other DNA
caaaaaaaattaaaattagcca

SEQ ID NO: 116117 - DNA, 22 bp, synthetic construct
  misc_feature 1..22: note = chemically synthesized
  source 1..22: mol_type = other DNA
aaattagccatgtgtggcggtg

SEQ ID NO: 116118 - DNA, 22 bp, synthetic construct
  misc_feature 1..22: note = chemically synthesized
  source 1..22: mol_type = other DNA
gccatgtgtggcggtgcacgtc

SEQ ID NO: 116119 - DNA, 22 bp, synthetic construct
  misc_feature 1..22: note = chemically synthesized
  source 1..22: mol_type = other DNA
tagtctcagctacctgggaggc

SEQ ID NO: 116120 - DNA, 22 bp, synthetic construct
  misc_feature 1..22: note = chemically synthesized
  source 1..22: mol_type = other DNA
agctacctgggaggctgaggtg

SEQ ID NO: 116121 - DNA, 22 bp, synthetic construct
  misc_feature 1..22: note = chemically synthesized
  source 1..22: mol_type = other DNA
cctgggaggctgaggtgggaag

SEQ ID NO: 116122 - DNA, 22 bp, synthetic construct
  misc_feature 1..22: note = chemically synthesized
  source 1..22: mol_type = other DNA
ggaggctgaggtgggaagaatg

SEQ ID NO: 116123 - DNA, 22 bp, synthetic construct
  misc_feature 1..22: note = chemically synthesized
  source 1..22: mol_type = other DNA
aggtgggaagaatgcttgagcc

SEQ ID NO: 116124 - DNA, 22 bp, synthetic construct
  misc_feature 1..22: note = chemically synthesized
  source 1..22: mol_type = other DNA
gagcccaggaggttgaggctgc

SEQ ID NO: 116125 - DNA, 22 bp, synthetic construct
  misc_feature 1..22: note = chemically synthesized
  source 1..22: mol_type = other DNA
agcccaggaggttgaggctgca

SEQ ID NO: 116126 - DNA, 22 bp, synthetic construct
  misc_feature 1..22: note = chemically synthesized
  source 1..22: mol_type = other DNA
aggctgcagtgagccataatca

SEQ ID NO: 116127 - DNA, 22 bp, synthetic construct
  misc_feature 1..22: note = chemically synthesized
  source 1..22: mol_type = other DNA
cagtgagccataatcacactac

SEQ ID NO: 116128 - DNA, 22 bp, synthetic construct
  misc_feature 1..22: note = chemically synthesized
  source 1..22: mol_type = other DNA
ctgcctgggtgaccaagtgaga

SEQ ID NO: 116129 - DNA, 22 bp, synthetic construct
  misc_feature 1..22: note = chemically synthesized
  source 1..22: mol_type = other DNA
cctgggtgaccaagtgagaccc

SEQ ID NO: 116130 - DNA, 22 bp, synthetic construct
  misc_feature 1..22: note = chemically synthesized
  source 1..22: mol_type = other DNA
ggtgaccaagtgagaccccgat

SEQ ID NO: 116131 - DNA, 22 bp, synthetic construct
  misc_feature 1..22: note = chemically synthesized
  source 1..22: mol_type = other DNA
aaaaataaaaaggaaaacaaac

SEQ ID NO: 116132 - DNA, 22 bp, synthetic construct
  misc_feature 1..22: note = chemically synthesized
  source 1..22: mol_type = other DNA
caaagcgaaatttaaaaaagaa

SEQ ID NO: 116133 - DNA, 22 bp, synthetic construct
  misc_feature 1..22: note = chemically synthesized
  source 1..22: mol_type = other DNA
aaaaaagaaccaaactctaaaa

SEQ ID NO: 116134 - DNA, 22 bp, synthetic construct
  misc_feature 1..22: note = chemically synthesized
  source 1..22: mol_type = other DNA
aaaaagaaccaaactctaaaaa

SEQ ID NO: 116135 - DNA, 22 bp, synthetic construct
  misc_feature 1..22: note = chemically synthesized
  source 1..22: mol_type = other DNA
taaaaatatgtatgtatgtttg

SEQ ID NO: 116136 - DNA, 22 bp, synthetic construct
  misc_feature 1..22: note = chemically synthesized
  source 1..22: mol_type = other DNA
aaaatatgtatgtatgtttgtg

SEQ ID NO: 116137 - DNA, 22 bp, synthetic construct
  misc_feature 1..22: note = chemically synthesized
  source 1..22: mol_type = other DNA
gtgcggtttcttgtgtatgttt

SEQ ID NO: 116138 - DNA, 22 bp, synthetic construct
  misc_feature 1..22: note = chemically synthesized
  source 1..22: mol_type = other DNA
tgcggtttcttgtgtatgtttg

SEQ ID NO: 116139 - DNA, 22 bp, synthetic construct
  misc_feature 1..22: note = chemically synthesized
  source 1..22: mol_type = other DNA
cttgtgtatgtttgtgtggtat

SEQ ID NO: 116140 - DNA, 22 bp, synthetic construct
  misc_feature 1..22: note = chemically synthesized
  source 1..22: mol_type = other DNA
ttgtgtatgtttgtgtggtatc

SEQ ID NO: 116141 - DNA, 22 bp, synthetic construct
  misc_feature 1..22: note = chemically synthesized
  source 1..22: mol_type = other DNA
gtgtatgtttgtgtggtatctc

SEQ ID NO: 116142 - DNA, 22 bp, synthetic construct
  misc_feature 1..22: note = chemically synthesized
  source 1..22: mol_type = other DNA
tgtatgtttgtgtggtatctca

SEQ ID NO: 116143 - DNA, 22 bp, synthetic construct
  misc_feature 1..22: note = chemically synthesized
  source 1..22: mol_type = other DNA
gtgtggtatctcatgtttgtat

SEQ ID NO: 116144 - DNA, 22 bp, synthetic construct
  misc_feature 1..22: note = chemically synthesized
  source 1..22: mol_type = other DNA
tgtggtatctcatgtttgtatg

SEQ ID NO: 116145 - DNA, 22 bp, synthetic construct
  misc_feature 1..22: note = chemically synthesized
  source 1..22: mol_type = other DNA
atgtttgtatgtgtgggtgtta

SEQ ID NO: 116146 - DNA, 22 bp, synthetic construct
  misc_feature 1..22: note = chemically synthesized
  source 1..22: mol_type = other DNA
gtatgtgtgggtgttatcagac

SEQ ID NO: 116147 - DNA, 22 bp, synthetic construct
  misc_feature 1..22: note = chemically synthesized
  source 1..22: mol_type = other DNA
tatgtgtgggtgttatcagact

SEQ ID NO: 116148 - DNA, 22 bp, synthetic construct
  misc_feature 1..22: note = chemically synthesized
  source 1..22: mol_type = other DNA
tcagactctcaggcttgggagc

SEQ ID NO: 116149 - DNA, 22 bp, synthetic construct
  misc_feature 1..22: note = chemically synthesized
  source 1..22: mol_type = other DNA
tcaggcttgggagcccctctgg

SEQ ID NO: 116150 - DNA, 22 bp, synthetic construct
  misc_feature 1..22: note = chemically synthesized
  source 1..22: mol_type = other DNA
aggcttgggagcccctctggaa

SEQ ID NO: 116151 - DNA, 22 bp, synthetic construct
  misc_feature 1..22: note = chemically synthesized
  source 1..22: mol_type = other DNA
gggagcccctctggaacccagc

SEQ ID NO: 116152 - DNA, 22 bp, synthetic construct
  misc_feature 1..22: note = chemically synthesized
  source 1..22: mol_type = other DNA
ggagcccctctggaacccagca

SEQ ID NO: 116153 - DNA, 22 bp, synthetic construct
  misc_feature 1..22: note = chemically synthesized
  source 1..22: mol_type = other DNA
tggaacccagcagtttctgcag

SEQ ID NO: 116154 - DNA, 22 bp, synthetic construct
  misc_feature 1..22: note = chemically synthesized
  source 1..22: mol_type = other DNA
gaacccagcagtttctgcagcc

SEQ ID NO: 116155 - DNA, 22 bp, synthetic construct
  misc_feature 1..22: note = chemically synthesized
  source 1..22: mol_type = other DNA
ctgcagccttacaggctggcac

SEQ ID NO: 116156 - DNA, 22 bp, synthetic construct
  misc_feature 1..22: note = chemically synthesized
  source 1..22: mol_type = other DNA
tgcagccttacaggctggcact

SEQ ID NO: 116157 - DNA, 22 bp, synthetic construct
  misc_feature 1..22: note = chemically synthesized
  source 1..22: mol_type = other DNA
cagccttacaggctggcactcc

SEQ ID NO: 116158 - DNA, 22 bp, synthetic construct
  misc_feature 1..22: note = chemically synthesized
  source 1..22: mol_type = other DNA
acaggctggcactccttaaaca

SEQ ID NO: 116159 - DNA, 22 bp, synthetic construct
  misc_feature 1..22: note = chemically synthesized
  source 1..22: mol_type = other DNA
caggctggcactccttaaacat

SEQ ID NO: 116160 - DNA, 22 bp, synthetic construct
  misc_feature 1..22: note = chemically synthesized
  source 1..22: mol_type = other DNA
gcactccttaaacataggttcc

SEQ ID NO: 116161 - DNA, 22 bp, synthetic construct
  misc_feature 1..22: note = chemically synthesized
  source 1..22: mol_type = other DNA
cttaaacataggttccattcta

SEQ ID NO: 116162 - DNA, 22 bp, synthetic construct
  misc_feature 1..22: note = chemically synthesized
  source 1..22: mol_type = other DNA
aaacataggttccattctaaac

SEQ ID NO: 116163 - DNA, 22 bp, synthetic construct
  misc_feature 1..22: note = chemically synthesized
  source 1..22: mol_type = other DNA
aacataggttccattctaaact

SEQ ID NO: 116164 - DNA, 22 bp, synthetic construct
  misc_feature 1..22: note = chemically synthesized
  source 1..22: mol_type = other DNA
cattctaaactttaatttacat

SEQ ID NO: 116165 - DNA, 22 bp, synthetic construct
  misc_feature 1..22: note = chemically synthesized
  source 1..22: mol_type = other DNA
taaactttaatttacatccaca

SEQ ID NO: 116166 - DNA, 22 bp, synthetic construct
  misc_feature 1..22: note = chemically synthesized
  source 1..22: mol_type = other DNA
aactttaatttacatccacata

SEQ ID NO: 116167 - DNA, 22 bp, synthetic construct
  misc_feature 1..22: note = chemically synthesized
  source 1..22: mol_type = other DNA
taatttacatccacatagtagg

SEQ ID NO: 116168 - DNA, 22 bp, synthetic construct
  misc_feature 1..22: note = chemically synthesized
  source 1..22: mol_type = other DNA
aatttacatccacatagtaggc

SEQ ID NO: 116169 - DNA, 22 bp, synthetic construct
  misc_feature 1..22: note = chemically synthesized
  source 1..22: mol_type = other DNA
atttacatccacatagtaggcc

SEQ ID NO: 116170 - DNA, 22 bp, synthetic construct
  misc_feature 1..22: note = chemically synthesized
  source 1..22: mol_type = other DNA
acatccacatagtaggccacat

SEQ ID NO: 116171 - DNA, 22 bp, synthetic construct
  misc_feature 1..22: note = chemically synthesized
  source 1..22: mol_type = other DNA
catccacatagtaggccacatt

SEQ ID NO: 116172 - DNA, 22 bp, synthetic construct
  misc_feature 1..22: note = chemically synthesized
  source 1..22: mol_type = other DNA
ctcaatagcagttccgagactt

SEQ ID NO: 116173 - DNA, 22 bp, synthetic construct
  misc_feature 1..22: note = chemically synthesized
  source 1..22: mol_type = other DNA
aatagcagttccgagacttaga

SEQ ID NO: 116174 - DNA, 22 bp, synthetic construct
  misc_feature 1..22: note = chemically synthesized
  source 1..22: mol_type = other DNA
cgagacttagaatattcttctc

SEQ ID NO: 116175 - DNA, 22 bp, synthetic construct
  misc_feature 1..22: note = chemically synthesized
  source 1..22: mol_type = other DNA
agaatattcttctccatgttga

SEQ ID NO: 116176 - DNA, 22 bp, synthetic construct
  misc_feature 1..22: note = chemically synthesized
  source 1..22: mol_type = other DNA
gaatattcttctccatgttgag

SEQ ID NO: 116177 - DNA, 22 bp, synthetic construct
  misc_feature 1..22: note = chemically synthesized
  source 1..22: mol_type = other DNA
ttctccatgttgagaggaaatt

SEQ ID NO: 116178 - DNA, 22 bp, synthetic construct
  misc_feature 1..22: note = chemically synthesized
  source 1..22: mol_type = other DNA
ctccatgttgagaggaaattcc

SEQ ID NO: 116179 - DNA, 22 bp, synthetic construct
  misc_feature 1..22: note = chemically synthesized
  source 1..22: mol_type = other DNA
tccatgttgagaggaaattcct

SEQ ID NO: 116180 - DNA, 22 bp, synthetic construct
  misc_feature 1..22: note = chemically synthesized
  source 1..22: mol_type = other DNA
catgttgagaggaaattcctat

SEQ ID NO: 116181 - DNA, 22 bp, synthetic construct
  misc_feature 1..22: note = chemically synthesized
  source 1..22: mol_type = other DNA
agaggaaattcctattctatag

SEQ ID NO: 116182 - DNA, 22 bp, synthetic construct
  misc_feature 1..22: note = chemically synthesized
  source 1..22: mol_type = other DNA
ctattctatagatctcatttgg

SEQ ID NO: 116183 - DNA, 22 bp, synthetic construct
  misc_feature 1..22: note = chemically synthesized
  source 1..22: mol_type = other DNA
ttctatagatctcatttggtag

SEQ ID NO: 116184 - DNA, 22 bp, synthetic construct
  misc_feature 1..22: note = chemically synthesized
  source 1..22: mol_type = other DNA
tatagatctcatttggtagaat

SEQ ID NO: 116185 - DNA, 22 bp, synthetic construct
  misc_feature 1..22: note = chemically synthesized
  source 1..22: mol_type = other DNA
tagatctcatttggtagaatgg

SEQ ID NO: 116186 - DNA, 22 bp, synthetic construct
  misc_feature 1..22: note = chemically synthesized
  source 1..22: mol_type = other DNA
atttggtagaatggggtacaaa

SEQ ID NO: 116187 - DNA, 22 bp, synthetic construct
  misc_feature 1..22: note = chemically synthesized
  source 1..22: mol_type = other DNA
ggtagaatggggtacaaaaaat

SEQ ID NO: 116188 - DNA, 22 bp, synthetic construct
  misc_feature 1..22: note = chemically synthesized
  source 1..22: mol_type = other DNA
gtagaatggggtacaaaaaatt

SEQ ID NO: 116189 - DNA, 22 bp, synthetic construct
  misc_feature 1..22: note = chemically synthesized
  source 1..22: mol_type = other DNA
aggatttggatttagattagca

SEQ ID NO: 116190 - DNA, 22 bp, synthetic construct
  misc_feature 1..22: note = chemically synthesized
  source 1..22: mol_type = other DNA
ggatttggatttagattagcac

SEQ ID NO: 116191 - DNA, 22 bp, synthetic construct
  misc_feature 1..22: note = chemically synthesized
  source 1..22: mol_type = other DNA
ggatttagattagcactgaagt

SEQ ID NO: 116192 - DNA, 22 bp, synthetic construct
  misc_feature 1..22: note = chemically synthesized
  source 1..22: mol_type = other DNA
gatttagattagcactgaagtc

SEQ ID NO: 116193 - DNA, 22 bp, synthetic construct
  misc_feature 1..22: note = chemically synthesized
  source 1..22: mol_type = other DNA
agattagcactgaagtcccatt

SEQ ID NO: 116194 - DNA, 22 bp, synthetic construct
  misc_feature 1..22: note = chemically synthesized
  source 1..22: mol_type = other DNA
gattagcactgaagtcccattt

SEQ ID NO: 116195 - DNA, 22 bp, synthetic construct
  misc_feature 1..22: note = chemically synthesized
  source 1..22: mol_type = other DNA
gcactgaagtcccattttgcct

SEQ ID NO: 116196 - DNA, 22 bp, synthetic construct
  misc_feature 1..22: note = chemically synthesized
  source 1..22: mol_type = other DNA
aagtcccattttgcctcttatt

SEQ ID NO: 116197 - DNA, 22 bp, synthetic construct
  misc_feature 1..22: note = chemically synthesized
  source 1..22: mol_type = other DNA
tgcctcttattaacaaatagac

SEQ ID NO: 116198 - DNA, 22 bp, synthetic construct
  misc_feature 1..22: note = chemically synthesized
  source 1..22: mol_type = other DNA
gcctcttattaacaaatagacc

SEQ ID NO: 116199 - DNA, 22 bp, synthetic construct
  misc_feature 1..22: note = chemically synthesized
  source 1..22: mol_type = other DNA
cctcttattaacaaatagacca

SEQ ID NO: 116200 - DNA, 22 bp, synthetic construct
  misc_feature 1..22: note = chemically synthesized
  source 1..22: mol_type = other DNA
ttattaacaaatagaccactga

SEQ ID NO: 116201 - DNA, 22 bp, synthetic construct
  misc_feature 1..22: note = chemically synthesized
  source 1..22: mol_type = other DNA
attaacaaatagaccactgaca

SEQ ID NO: 116202 - DNA, 22 bp, synthetic construct
  misc_feature 1..22: note = chemically synthesized
  source 1..22: mol_type = other DNA
ttaacaaatagaccactgacat

SEQ ID NO: 116203 - DNA, 22 bp, synthetic construct
  misc_feature 1..22: note = chemically synthesized
  source 1..22: mol_type = other DNA
acaaatagaccactgacatcta

SEQ ID NO: 116204 - DNA, 22 bp, synthetic construct
  misc_feature 1..22: note = chemically synthesized
  source 1..22: mol_type = other DNA
acatctaaatttcattttcaaa

SEQ ID NO: 116205 - DNA, 22 bp, synthetic construct
  misc_feature 1..22: note = chemically synthesized
  source 1..22: mol_type = other DNA
aatttcattttcaaattaggaa

SEQ ID NO: 116206 - DNA, 22 bp, synthetic construct
  misc_feature 1..22: note = chemically synthesized
  source 1..22: mol_type = other DNA
cattttcaaattaggaaatacg

SEQ ID NO: 116207 - DNA, 22 bp, synthetic construct
  misc_feature 1..22: note = chemically synthesized
  source 1..22: mol_type = other DNA
attttcaaattaggaaatacgt

SEQ ID NO: 116208 - DNA, 22 bp, synthetic construct
  misc_feature 1..22: note = chemically synthesized
  source 1..22: mol_type = other DNA
tcaaattaggaaatacgtacag

SEQ ID NO: 116209 - DNA, 22 bp, synthetic construct
  misc_feature 1..22: note = chemically synthesized
  source 1..22: mol_type = other DNA
caaattaggaaatacgtacagg

SEQ ID NO: 116210 - DNA, 22 bp, synthetic construct
  misc_feature 1..22: note = chemically synthesized
  source 1..22: mol_type = other DNA
aaattaggaaatacgtacaggt

SEQ ID NO: 116211 - DNA, 22 bp, synthetic construct
  misc_feature 1..22: note = chemically synthesized
  source 1..22: mol_type = other DNA
ggaaatacgtacaggtaataac

SEQ ID NO: 116212 - DNA, 22 bp, synthetic construct
  misc_feature 1..22: note = chemically synthesized
  source 1..22: mol_type = other DNA
gaaaacttctaccttactcaaa

SEQ ID NO: 116213 - DNA, 22 bp, synthetic construct
  misc_feature 1..22: note = chemically synthesized
  source 1..22: mol_type = other DNA
aaaacttctaccttactcaaat

SEQ ID NO: 116214 - DNA, 22 bp, synthetic construct
  misc_feature 1..22: note = chemically synthesized
  source 1..22: mol_type = other DNA
ctaccttactcaaatttaaaat

SEQ ID NO: 116215 - DNA, 22 bp, synthetic construct
  misc_feature 1..22: note = chemically synthesized
  source 1..22: mol_type = other DNA
taccttactcaaatttaaaatg

SEQ ID NO: 116216 - DNA, 22 bp, synthetic construct
  misc_feature 1..22: note = chemically synthesized
  source 1..22: mol_type = other DNA
ccttactcaaatttaaaatgca

SEQ ID NO: 116217 - DNA, 22 bp, synthetic construct
  misc_feature 1..22: note = chemically synthesized
  source 1..22: mol_type = other DNA
actcaaatttaaaatgcaaatt

SEQ ID NO: 116218 - DNA, 22 bp, synthetic construct
  misc_feature 1..22: note = chemically synthesized
  source 1..22: mol_type = other DNA
ctcaaatttaaaatgcaaatta

SEQ ID NO: 116219 - DNA, 22 bp, synthetic construct
  misc_feature 1..22: note = chemically synthesized
  source 1..22: mol_type = other DNA
aaatttaaaatgcaaattaaca

SEQ ID NO: 116220 - DNA, 22 bp, synthetic construct
  misc_feature 1..22: note = chemically synthesized
  source 1..22: mol_type = other DNA
aaaatgcaaattaacatatctt

SEQ ID NO: 116221 - DNA, 22 bp, synthetic construct
  misc_feature 1..22: note = chemically synthesized
  source 1..22: mol_type = other DNA
aaatgcaaattaacatatctta

SEQ ID NO: 116222 - DNA, 22 bp, synthetic construct
  misc_feature 1..22: note = chemically synthesized
  source 1..22: mol_type = other DNA
acatatcttaatttgttactaa

SEQ ID NO: 116223 - DNA, 22 bp, synthetic construct
  misc_feature 1..22: note = chemically synthesized
  source 1..22: mol_type = other DNA
aatttgttactaaacgaatatt

SEQ ID NO: 116224 - DNA, 22 bp, synthetic construct
  misc_feature 1..22: note = chemically synthesized
  source 1..22: mol_type = other DNA
atttgttactaaacgaatattg

SEQ ID NO: 116225 - DNA, 22 bp, synthetic construct
  misc_feature 1..22: note = chemically synthesized
  source 1..22: mol_type = other DNA
gttactaaacgaatattgaaga

SEQ ID NO: 116226 - DNA, 22 bp, synthetic construct
  misc_feature 1..22: note = chemically synthesized
  source 1..22: mol_type = other DNA
ttactaaacgaatattgaagaa

SEQ ID NO: 116227 - DNA, 22 bp, synthetic construct
  misc_feature 1..22: note = chemically synthesized
  source 1..22: mol_type = other DNA
ctaaacgaatattgaagaatag

SEQ ID NO: 116228 - DNA, 22 bp, synthetic construct
  misc_feature 1..22: note = chemically synthesized
  source 1..22: mol_type = other DNA
aacgaatattgaagaatagagt

SEQ ID NO: 116229 - DNA, 22 bp, synthetic construct
  misc_feature 1..22: note = chemically synthesized
  source 1..22: mol_type = other DNA
aagaatagagttaacaatcaat

SEQ ID NO: 116230 - DNA, 22 bp, synthetic construct
  misc_feature 1..22: note = chemically synthesized
  source 1..22: mol_type = other DNA
acaatcaatatctggctgggcg

SEQ ID NO: 116231 - DNA, 22 bp, synthetic construct
  misc_feature 1..22: note = chemically synthesized
  source 1..22: mol_type = other DNA
gctgggcgcggtggctcacgcc

SEQ ID NO: 116232 - DNA, 22 bp, synthetic construct
  misc_feature 1..22: note = chemically synthesized
  source 1..22: mol_type = other DNA
ggcgcggtggctcacgcctgta

SEQ ID NO: 116233 - DNA, 22 bp, synthetic construct
  misc_feature 1..22: note = chemically synthesized
  source 1..22: mol_type = other DNA
acgcctgtaatcccagcactct

SEQ ID NO: 116234 - DNA, 22 bp, synthetic construct
  misc_feature 1..22: note = chemically synthesized
  source 1..22: mol_type = other DNA
taatcccagcactctgggaggc

SEQ ID NO: 116235 - DNA, 22 bp, synthetic construct
  misc_feature 1..22: note = chemically synthesized
  source 1..22: mol_type = other DNA
tgggaggccgaggcgggtggat

SEQ ID NO: 116236 - DNA, 22 bp, synthetic construct
  misc_feature 1..22: note = chemically synthesized
  source 1..22: mol_type = other DNA
ggaggccgaggcgggtggatca

SEQ ID NO: 116237 - DNA, 22 bp, synthetic construct
  misc_feature 1..22: note = chemically synthesized
  source 1..22: mol_type = other DNA
gctaacacggtggaacccagtc

SEQ ID NO: 116238 - DNA, 22 bp, synthetic construct
  misc_feature 1..22: note = chemically synthesized
  source 1..22: mol_type = other DNA
acacggtggaacccagtctcta

SEQ ID NO: 116239 - DNA, 22 bp, synthetic construct
  misc_feature 1..22: note = chemically synthesized
  source 1..22: mol_type = other DNA
tactaaaaatacaaaaagttag

SEQ ID NO: 116240 - DNA, 22 bp, synthetic construct
  misc_feature 1..22: note = chemically synthesized
  source 1..22: mol_type = other DNA
ctaaaaatacaaaaagttagcc

SEQ ID NO: 116241 - DNA, 22 bp, synthetic construct
  misc_feature 1..22: note = chemically synthesized
  source 1..22: mol_type = other DNA
aaaatacaaaaagttagccggg

SEQ ID NO: 116242 - DNA, 22 bp, synthetic construct
  misc_feature 1..22: note = chemically synthesized
  source 1..22: mol_type = other DNA
gccgggcatggtggtgggcacc

SEQ ID NO: 116243 - DNA, 22 bp, synthetic construct
  misc_feature 1..22: note = chemically synthesized
  source 1..22: mol_type = other DNA
tagtcccagctactcaggaggc

SEQ ID NO: 116244 - DNA, 22 bp, synthetic construct
  misc_feature 1..22: note = chemically synthesized
  source 1..22: mol_type = other DNA
ctcaggaggctggggcagcaga

SEQ ID NO: 116245 - DNA, 22 bp, synthetic construct
  misc_feature 1..22: note = chemically synthesized
  source 1..22: mol_type = other DNA
aggaggctggggcagcagaatg

SEQ ID NO: 116246 - DNA, 22 bp, synthetic construct
  misc_feature 1..22: note = chemically synthesized
  source 1..22: mol_type = other DNA
gggcagcagaatggcgtgaacc

SEQ ID NO: 116247 - DNA, 22 bp, synthetic construct
  misc_feature 1..22: note = chemically synthesized
  source 1..22: mol_type = other DNA
gcagtgagccgagatcgtgcca

SEQ ID NO: 116248 - DNA, 22 bp, synthetic construct
  misc_feature 1..22: note = chemically synthesized
  source 1..22: mol_type = other DNA
cagtgagccgagatcgtgccac

SEQ ID NO: 116249 - DNA, 22 bp, synthetic construct
  misc_feature 1..22: note = chemically synthesized
  source 1..22: mol_type = other DNA
cactccagcctgggcaacagag

SEQ ID NO: 116250 - DNA, 22 bp, synthetic construct
  misc_feature 1..22: note = chemically synthesized
  source 1..22: mol_type = other DNA
cagcctgggcaacagagcaaga

SEQ ID NO: 116251 - DNA, 22 bp, synthetic construct
  misc_feature 1..22: note = chemically synthesized
  source 1..22: mol_type = other DNA
ggcaacagagcaagactccttc

SEQ ID NO: 116252 - DNA, 22 bp, synthetic construct
  misc_feature 1..22: note = chemically synthesized
  source 1..22: mol_type = other DNA
cttctcaaaaacaaaaaaaaag

SEQ ID NO: 116253 - DNA, 22 bp, synthetic construct
  misc_feature 1..22: note = chemically synthesized
  source 1..22: mol_type = other DNA
ctcaaaaacaaaaaaaaagaaa

SEQ ID NO: 116254 - DNA, 22 bp, synthetic construct
  misc_feature 1..22: note = chemically synthesized
  source 1..22: mol_type = other DNA
tcaaaaacaaaaaaaaagaaaa

SEQ ID NO: 116255 - DNA, 22 bp, synthetic construct
  misc_feature 1..22: note = chemically synthesized
  source 1..22: mol_type = other DNA
aaaaacaaaaaaaaagaaaaat

SEQ ID NO: 116256 - DNA, 22 bp, synthetic construct
  misc_feature 1..22: note = chemically synthesized
  source 1..22: mol_type = other DNA
tgctgttaagtatgtggtaaaa

SEQ ID NO: 116257 - DNA, 22 bp, synthetic construct
  misc_feature 1..22: note = chemically synthesized
  source 1..22: mol_type = other DNA
ttaagtatgtggtaaaagaggt

SEQ ID NO: 116258 - DNA, 22 bp, synthetic construct
  misc_feature 1..22: note = chemically synthesized
  source 1..22: mol_type = other DNA
agtatgtggtaaaagaggtatt

SEQ ID NO: 116259 - DNA, 22 bp, synthetic construct
  misc_feature 1..22: note = chemically synthesized
  source 1..22: mol_type = other DNA
tcacataccagaatgaaaacat

SEQ ID NO: 116260 - DNA, 22 bp, synthetic construct
  misc_feature 1..22: note = chemically synthesized
  source 1..22: mol_type = other DNA
cacataccagaatgaaaacata

SEQ ID NO: 116261 - DNA, 22 bp, synthetic construct
  misc_feature 1..22: note = chemically synthesized
  source 1..22: mol_type = other DNA
acataccagaatgaaaacataa

SEQ ID NO: 116262 - DNA, 22 bp, synthetic construct
  misc_feature 1..22: note = chemically synthesized
  source 1..22: mol_type = other DNA
aatttgccttttataaaaaaca

SEQ ID NO: 116263 - DNA, 22 bp, synthetic construct
  misc_feature 1..22: note = chemically synthesized
  source 1..22: mol_type = other DNA
atttgccttttataaaaaacaa

SEQ ID NO: 116264 - DNA, 22 bp, synthetic construct
  misc_feature 1..22: note = chemically synthesized
  source 1..22: mol_type = other DNA
gccttttataaaaaacaaaata

SEQ ID NO: 116265 - DNA, 22 bp, synthetic construct
  misc_feature 1..22: note = chemically synthesized
  source 1..22: mol_type = other DNA
ccttttataaaaaacaaaatac

SEQ ID NO: 116266 - DNA, 22 bp, synthetic construct
  misc_feature 1..22: note = chemically synthesized
  source 1..22: mol_type = other DNA
ttataaaaaacaaaatacatca

SEQ ID NO: 116267 - DNA, 22 bp, synthetic construct
  misc_feature 1..22: note = chemically synthesized
  source 1..22: mol_type = other DNA
tataaaaaacaaaatacatcaa

SEQ ID NO: 116268 - DNA, 22 bp, synthetic construct
  misc_feature 1..22: note = chemically synthesized
  source 1..22: mol_type = other DNA
ataaaaaacaaaatacatcaaa

SEQ ID NO: 116269 - DNA, 22 bp, synthetic construct
  misc_feature 1..22: note = chemically synthesized
  source 1..22: mol_type = other DNA
taaaaaacaaaatacatcaaaa

SEQ ID NO: 116270 - DNA, 22 bp, synthetic construct
  misc_feature 1..22: note = chemically synthesized
  source 1..22: mol_type = other DNA
gaaaatattcatgctctgtgtc

SEQ ID NO: 116271 - DNA, 22 bp, synthetic construct
  misc_feature 1..22: note = chemically synthesized
  source 1..22: mol_type = other DNA
aaaatattcatgctctgtgtct

SEQ ID NO: 116272 - DNA, 22 bp, synthetic construct
  misc_feature 1..22: note = chemically synthesized
  source 1..22: mol_type = other DNA
atgctctgtgtctcagaaatgc

SEQ ID NO: 116273 - DNA, 22 bp, synthetic construct
  misc_feature 1..22: note = chemically synthesized
  source 1..22: mol_type = other DNA
tgtgtctcagaaatgccacttc

SEQ ID NO: 116274 - DNA, 22 bp, synthetic construct
  misc_feature 1..22: note = chemically synthesized
  source 1..22: mol_type = other DNA
tgtctcagaaatgccacttcta

SEQ ID NO: 116275 - DNA, 22 bp, synthetic construct
  misc_feature 1..22: note = chemically synthesized
  source 1..22: mol_type = other DNA
agaaatgccacttctaaaaatc

SEQ ID NO: 116276 - DNA, 22 bp, synthetic construct
  misc_feature 1..22: note = chemically synthesized
  source 1..22: mol_type = other DNA
ctaaaaatctgtcctaaataaa

SEQ ID NO: 116277 - DNA, 22 bp, synthetic construct
  misc_feature 1..22: note = chemically synthesized
  source 1..22: mol_type = other DNA
taaaaatctgtcctaaataaat

SEQ ID NO: 116278 - DNA, 22 bp, synthetic construct
  misc_feature 1..22: note = chemically synthesized
  source 1..22: mol_type = other DNA
aaaatctgtcctaaataaatga

SEQ ID NO: 116279 - DNA, 22 bp, synthetic construct
  misc_feature 1..22: note = chemically synthesized
  source 1..22: mol_type = other DNA
tcctaaataaatgataaattaa

SEQ ID NO: 116280 - DNA, 22 bp, synthetic construct
  misc_feature 1..22: note = chemically synthesized
  source 1..22: mol_type = other DNA
aataaatgataaattaaaaatt

SEQ ID NO: 116281 - DNA, 22 bp, synthetic construct
  misc_feature 1..22: note = chemically synthesized
  source 1..22: mol_type = other DNA
aaaatttaggatgtaagctgtt

SEQ ID NO: 116282 - DNA, 22 bp, synthetic construct
  misc_feature 1..22: note = chemically synthesized
  source 1..22: mol_type = other DNA
aggatgtaagctgtttgtggca

SEQ ID NO: 116283 - DNA, 22 bp, synthetic construct
  misc_feature 1..22: note = chemically synthesized
  source 1..22: mol_type = other DNA
ggatgtaagctgtttgtggcaa

SEQ ID NO: 116284 - DNA, 22 bp, synthetic construct
  misc_feature 1..22: note = chemically synthesized
  source 1..22: mol_type = other DNA
tttgtggcaaaatttttttcct

SEQ ID NO: 116285 - DNA, 22 bp, synthetic construct
  misc_feature 1..22: note = chemically synthesized
  source 1..22: mol_type = other DNA
gtggcaaaatttttttcctgtt

SEQ ID NO: 116286 - DNA, 22 bp, synthetic construct
  misc_feature 1..22: note = chemically synthesized
  source 1..22: mol_type = other DNA
tggcaaaatttttttcctgttt

SEQ ID NO: 116287 - DNA, 22 bp, synthetic construct
  misc_feature 1..22: note = chemically synthesized
  source 1..22: mol_type = other DNA
ttttcctgtttgctcacagttc

SEQ ID NO: 116288 - DNA, 22 bp, synthetic construct
  misc_feature 1..22: note = chemically synthesized
  source 1..22: mol_type = other DNA
tttcctgtttgctcacagttct

SEQ ID NO: 116289 - DNA, 22 bp, synthetic construct
  misc_feature 1..22: note = chemically synthesized
  source 1..22: mol_type = other DNA
ttcctgtttgctcacagttcta

SEQ ID NO: 116290 - DNA, 22 bp, synthetic construct
  misc_feature 1..22: note = chemically synthesized
  source 1..22: mol_type = other DNA
tcctgtttgctcacagttctaa

SEQ ID NO: 116291 - DNA, 22 bp, synthetic construct
  misc_feature 1..22: note = chemically synthesized
  source 1..22: mol_type = other DNA
cctgtttgctcacagttctaaa

SEQ ID NO: 116292 - DNA, 22 bp, synthetic construct
  misc_feature 1..22: note = chemically synthesized
  source 1..22: mol_type = other DNA
ctgtttgctcacagttctaaat

SEQ ID NO: 116293 - DNA, 22 bp, synthetic construct
  misc_feature 1..22: note = chemically synthesized
  source 1..22: mol_type = other DNA
tttgctcacagttctaaatcca

SEQ ID NO: 116294 - DNA, 22 bp, synthetic construct
  misc_feature 1..22: note = chemically synthesized
  source 1..22: mol_type = other DNA
gctcacagttctaaatccatct

SEQ ID NO: 116295 - DNA, 22 bp, synthetic construct
  misc_feature 1..22: note = chemically synthesized
  source 1..22: mol_type = other DNA
ctcacagttctaaatccatctc

SEQ ID NO: 116296 - DNA, 22 bp, synthetic construct
  misc_feature 1..22: note = chemically synthesized
  source 1..22: mol_type = other DNA
acagttctaaatccatctccta

SEQ ID NO: 116297 - DNA, 22 bp, synthetic construct
  misc_feature 1..22: note = chemically synthesized
  source 1..22: mol_type = other DNA
taaatccatctcctaggtcagt

SEQ ID NO: 116298 - DNA, 22 bp, synthetic construct
  misc_feature 1..22: note = chemically synthesized
  source 1..22: mol_type = other DNA
aatccatctcctaggtcagtga

SEQ ID NO: 116299 - DNA, 22 bp, synthetic construct
  misc_feature 1..22: note = chemically synthesized
  source 1..22: mol_type = other DNA
ctaggtcagtgatcaataaata

SEQ ID NO: 116300 - DNA, 22 bp, synthetic construct
  misc_feature 1..22: note = chemically synthesized
  source 1..22: mol_type = other DNA
ggtcagtgatcaataaatatgt

SEQ ID NO: 116301 - DNA, 22 bp, synthetic construct
  misc_feature 1..22: note = chemically synthesized
  source 1..22: mol_type = other DNA
aactatttaataagtgaatatt

SEQ ID NO: 116302 - DNA, 22 bp, synthetic construct
  misc_feature 1..22: note = chemically synthesized
  source 1..22: mol_type = other DNA
tttaataagtgaatattataat

SEQ ID NO: 116303 - DNA, 22 bp, synthetic construct
  misc_feature 1..22: note = chemically synthesized
  source 1..22: mol_type = other DNA
aataagtgaatattataatttg

SEQ ID NO: 116304 - DNA, 22 bp, synthetic construct
  misc_feature 1..22: note = chemically synthesized
  source 1..22: mol_type = other DNA
ataagtgaatattataatttgt

SEQ ID NO: 116305 - DNA, 22 bp, synthetic construct
  misc_feature 1..22: note = chemically synthesized
  source 1..22: mol_type = other DNA
taatttgtgttattgttcataa

SEQ ID NO: 116306 - DNA, 22 bp, synthetic construct
  misc_feature 1..22: note = chemically synthesized
  source 1..22: mol_type = other DNA
gtgttattgttcataattttaa

SEQ ID NO: 116307 - DNA, 22 bp, synthetic construct
  misc_feature 1..22: note = chemically synthesized
  source 1..22: mol_type = other DNA
tgttattgttcataattttaag

SEQ ID NO: 116308 - DNA, 22 bp, synthetic construct
  misc_feature 1..22: note = chemically synthesized
  source 1..22: mol_type = other DNA
ttgttcataattttaagaatgt

SEQ ID NO: 116309 - DNA, 22 bp, synthetic construct
  misc_feature 1..22: note = chemically synthesized
  source 1..22: mol_type = other DNA
ttcataattttaagaatgtaag

SEQ ID NO: 116310 - DNA, 22 bp, synthetic construct
  misc_feature 1..22: note = chemically synthesized
  source 1..22: mol_type = other DNA
ataattttaagaatgtaagcat

SEQ ID NO: 116311 - DNA, 22 bp, synthetic construct
  misc_feature 1..22: note = chemically synthesized
  source 1..22: mol_type = other DNA
taagaatgtaagcatacaaaat

SEQ ID NO: 116312 - DNA, 22 bp, synthetic construct
  misc_feature 1..22: note = chemically synthesized
  source 1..22: mol_type = other DNA
aagaatgtaagcatacaaaatg

SEQ ID NO: 116313 - DNA, 22 bp, synthetic construct
  misc_feature 1..22: note = chemically synthesized
  source 1..22: mol_type = other DNA
agaatgtaagcatacaaaatgt

SEQ ID NO: 116314 - DNA, 22 bp, synthetic construct
  misc_feature 1..22: note = chemically synthesized
  source 1..22: mol_type = other DNA
gaataaaaatattacataaatc

SEQ ID NO: 116315 - DNA, 22 bp, synthetic construct
  misc_feature 1..22: note = chemically synthesized
  source 1..22: mol_type = other DNA
cataaatcaaagcatattcatt

SEQ ID NO: 116316 - DNA, 22 bp, synthetic construct
  misc_feature 1..22: note = chemically synthesized
  source 1..22: mol_type = other DNA
atttgatacactattattaaaa

SEQ ID NO: 116317 - DNA, 22 bp, synthetic construct
  misc_feature 1..22: note = chemically synthesized
  source 1..22: mol_type = other DNA
gatacactattattaaaatgac

SEQ ID NO: 116318 - DNA, 22 bp, synthetic construct
  misc_feature 1..22: note = chemically synthesized
  source 1..22: mol_type = other DNA
atacactattattaaaatgaca

SEQ ID NO: 116319 - DNA, 22 bp, synthetic construct
  misc_feature 1..22: note = chemically synthesized
  source 1..22: mol_type = other DNA
ttattaaaatgacatttaaatg

SEQ ID NO: 116320 - DNA, 22 bp, synthetic construct
  misc_feature 1..22: note = chemically synthesized
  source 1..22: mol_type = other DNA
ttaaaatgacatttaaatgctt

SEQ ID NO: 116321 - DNA, 22 bp, synthetic construct
  misc_feature 1..22: note = chemically synthesized
  source 1..22: mol_type = other DNA
aaatgacatttaaatgcttagg

SEQ ID NO: 116322 - DNA, 22 bp, synthetic construct
  misc_feature 1..22: note = chemically synthesized
  source 1..22: mol_type = other DNA
aaatgcttaggaaactgttggc

SEQ ID NO: 116323 - DNA, 22 bp, synthetic construct
  misc_feature 1..22: note = chemically synthesized
  source 1..22: mol_type = other DNA
aatgcttaggaaactgttggca

SEQ ID NO: 116324 - DNA, 22 bp, synthetic construct
  misc_feature 1..22: note = chemically synthesized
  source 1..22: mol_type = other DNA
aggaaactgttggcaaaatatt

SEQ ID NO: 116325 - DNA, 22 bp, synthetic construct
  misc_feature 1..22: note = chemically synthesized
  source 1..22: mol_type = other DNA
ggaaactgttggcaaaatatta

SEQ ID NO: 116326 - DNA, 22 bp, synthetic construct
  misc_feature 1..22: note = chemically synthesized
  source 1..22: mol_type = other DNA
ttggcaaaatattaaataaaaa

SEQ ID NO: 116327 - DNA, 22 bp, synthetic construct
  misc_feature 1..22: note = chemically synthesized
  source 1..22: mol_type = other DNA
gcaaaatattaaataaaaataa

SEQ ID NO: 116328 - DNA, 22 bp, synthetic construct
  misc_feature 1..22: note = chemically synthesized
  source 1..22: mol_type = other DNA
aataaaaataagcaaaattagg

SEQ ID NO: 116329 - DNA, 22 bp, synthetic construct
  misc_feature 1..22: note = chemically synthesized
  source 1..22: mol_type = other DNA
ggtacagaacaatcactatgta

SEQ ID NO: 116330 - DNA, 22 bp, synthetic construct
  misc_feature 1..22: note = chemically synthesized
  source 1..22: mol_type = other DNA
tgtaaaaggctataaatatttg

SEQ ID NO: 116331 - DNA, 22 bp, synthetic construct
  misc_feature 1..22: note = chemically synthesized
  source 1..22: mol_type = other DNA
taaatatttgtatcaaaagaaa

SEQ ID NO: 116332 - DNA, 22 bp, synthetic construct
  misc_feature 1..22: note = chemically synthesized
  source 1..22: mol_type = other DNA
gtatcaaaagaaaaacagctgt

SEQ ID NO: 116333 - DNA, 22 bp, synthetic construct
  misc_feature 1..22: note = chemically synthesized
  source 1..22: mol_type = other DNA
tatcaaaagaaaaacagctgtt

SEQ ID NO: 116334 - DNA, 22 bp, synthetic construct
  misc_feature 1..22: note = chemically synthesized
  source 1..22: mol_type = other DNA
ttatatataatcttattttcta

SEQ ID NO: 116335 - DNA, 22 bp, synthetic construct
  misc_feature 1..22: note = chemically synthesized
  source 1..22: mol_type = other DNA
tatataatcttattttctatat

SEQ ID NO: 116336 - DNA, 22 bp, synthetic construct
  misc_feature 1..22: note = chemically synthesized
  source 1..22: mol_type = other DNA
attttctatatagatttctcta

SEQ ID NO: 116337 - DNA, 22 bp, synthetic construct
  misc_feature 1..22: note = chemically synthesized
  source 1..22: mol_type = other DNA
ttttctatatagatttctctat

SEQ ID NO: 116338 - DNA, 22 bp, synthetic construct
  misc_feature 1..22: note = chemically synthesized
  source 1..22: mol_type = other DNA
tctatatagatttctctatctt

SEQ ID NO: 116339 - DNA, 22 bp, synthetic construct
  misc_feature 1..22: note = chemically synthesized
  source 1..22: mol_type = other DNA
ctatatagatttctctatcttt

SEQ ID NO: 116340 - DNA, 22 bp, synthetic construct
  misc_feature 1..22: note = chemically synthesized
  source 1..22: mol_type = other DNA
tatatagatttctctatctttg

SEQ ID NO: 116341 - DNA, 22 bp, synthetic construct
  misc_feature 1..22: note = chemically synthesized
  source 1..22: mol_type = other DNA
tatagatttctctatctttgcc

SEQ ID NO: 116342 - DNA, 22 bp, synthetic construct
  misc_feature 1..22: note = chemically synthesized
  source 1..22: mol_type = other DNA
ctctatctttgccgtatacaaa

SEQ ID NO: 116343 - DNA, 22 bp, synthetic construct
  misc_feature 1..22: note = chemically synthesized
  source 1..22: mol_type = other DNA
tctatctttgccgtatacaaat

SEQ ID NO: 116344 - DNA, 22 bp, synthetic construct
  misc_feature 1..22: note = chemically synthesized
  source 1..22: mol_type = other DNA
tatctttgccgtatacaaattt

SEQ ID NO: 116345 - DNA, 22 bp, synthetic construct
  misc_feature 1..22: note = chemically synthesized
  source 1..22: mol_type = other DNA
tctttgccgtatacaaattttc

SEQ ID NO: 116346 - DNA, 22 bp, synthetic construct
  misc_feature 1..22: note = chemically synthesized
  source 1..22: mol_type = other DNA
tgccgtatacaaattttctgaa

SEQ ID NO: 116347 - DNA, 22 bp, synthetic construct
  misc_feature 1..22: note = chemically synthesized
  source 1..22: mol_type = other DNA
gccgtatacaaattttctgaag

SEQ ID NO: 116348 - DNA, 22 bp, synthetic construct
  misc_feature 1..22: note = chemically synthesized
  source 1..22: mol_type = other DNA
ccgtatacaaattttctgaaga

SEQ ID NO: 116349 - DNA, 22 bp, synthetic construct
  misc_feature 1..22: note = chemically synthesized
  source 1..22: mol_type = other DNA
tctgaagaagacatttcggttt

SEQ ID NO: 116350 - DNA, 22 bp, synthetic construct
  misc_feature 1..22: note = chemically synthesized
  source 1..22: mol_type = other DNA
ctgaagaagacatttcggtttt

SEQ ID NO: 116351 - DNA, 22 bp, synthetic construct
  misc_feature 1..22: note = chemically synthesized
  source 1..22: mol_type = other DNA
tgaagaagacatttcggtttta

SEQ ID NO: 116352 - DNA, 22 bp, synthetic construct
  misc_feature 1..22: note = chemically synthesized
  source 1..22: mol_type = other DNA
aagaagacatttcggttttata

SEQ ID NO: 116353 - DNA, 22 bp, synthetic construct
  misc_feature 1..22: note = chemically synthesized
  source 1..22: mol_type = other DNA
cggttttataatctaaaaagag

SEQ ID NO: 116354 - DNA, 22 bp, synthetic construct
  misc_feature 1..22: note = chemically synthesized
  source 1..22: mol_type = other DNA
ggttttataatctaaaaagagc

SEQ ID NO: 116355 - DNA, 22 bp, synthetic construct
  misc_feature 1..22: note = chemically synthesized
  source 1..22: mol_type = other DNA
tataatctaaaaagagcatttt

SEQ ID NO: 116356 - DNA, 22 bp, synthetic construct
  misc_feature 1..22: note = chemically synthesized
  source 1..22: mol_type = other DNA
ataatctaaaaagagcatttta

SEQ ID NO: 116357 - DNA, 22 bp, synthetic construct
  misc_feature 1..22: note = chemically synthesized
  source 1..22: mol_type = other DNA
taatctaaaaagagcattttac

SEQ ID NO: 116358 - DNA, 22 bp, synthetic construct
  misc_feature 1..22: note = chemically synthesized
  source 1..22: mol_type = other DNA
aaaagagcattttacaatgact

SEQ ID NO: 116359 - DNA, 22 bp, synthetic construct
  misc_feature 1..22: note = chemically synthesized
  source 1..22: mol_type = other DNA
tacaatgactataaaaagttat

SEQ ID NO: 116360 - DNA, 22 bp, synthetic construct
  misc_feature 1..22: note = chemically synthesized
  source 1..22: mol_type = other DNA
acaatgactataaaaagttata

SEQ ID NO: 116361 - DNA, 22 bp, synthetic construct
  misc_feature 1..22: note = chemically synthesized
  source 1..22: mol_type = other DNA
caatgactataaaaagttatat

SEQ ID NO: 116362 - DNA, 22 bp, synthetic construct
  misc_feature 1..22: note = chemically synthesized
  source 1..22: mol_type = other DNA
taaaaagttatatacgattatg

SEQ ID NO: 116363 - DNA, 22 bp, synthetic construct
  misc_feature 1..22: note = chemically synthesized
  source 1..22: mol_type = other DNA
tatacgattatgctgaagatga

SEQ ID NO: 116364 - DNA, 22 bp, synthetic construct
  misc_feature 1..22: note = chemically synthesized
  source 1..22: mol_type = other DNA
tgctgaagatgacaatgaagat

SEQ ID NO: 116365 - DNA, 22 bp, synthetic construct
  misc_feature 1..22: note = chemically synthesized
  source 1..22: mol_type = other DNA
aagatgacaatgaagatgataa

SEQ ID NO: 116366 - DNA, 22 bp, synthetic construct
  misc_feature 1..22: note = chemically synthesized
  source 1..22: mol_type = other DNA
tgatcatgataaatgctaatgt

SEQ ID NO: 116367 - DNA, 22 bp, synthetic construct
  misc_feature 1..22: note = chemically synthesized
  source 1..22: mol_type = other DNA
atgtttattaagcatttaactc

SEQ ID NO: 116368 - DNA, 22 bp, synthetic construct
  misc_feature 1..22: note = chemically synthesized
  source 1..22: mol_type = other DNA
attaagcatttaactcacggta

SEQ ID NO: 116369 - DNA, 22 bp, synthetic construct
  misc_feature 1..22: note = chemically synthesized
  source 1..22: mol_type = other DNA
ttaagcatttaactcacggtag

SEQ ID NO: 116370 - DNA, 22 bp, synthetic construct
  misc_feature 1..22: note = chemically synthesized
  source 1..22: mol_type = other DNA
agcatttaactcacggtagaga

SEQ ID NO: 116371 - DNA, 22 bp, synthetic construct
  misc_feature 1..22: note = chemically synthesized
  source 1..22: mol_type = other DNA
aactcacggtagagagggctga

SEQ ID NO: 116372 - DNA, 22 bp, synthetic construct
  misc_feature 1..22: note = chemically synthesized
  source 1..22: mol_type = other DNA
actcacggtagagagggctgag

SEQ ID NO: 116373 - DNA, 22 bp, synthetic construct
  misc_feature 1..22: note = chemically synthesized
  source 1..22: mol_type = other DNA
acggtagagagggctgagtact

SEQ ID NO: 116374 - DNA, 22 bp, synthetic construct
  misc_feature 1..22: note = chemically synthesized
  source 1..22: mol_type = other DNA
agtactttttattttcattatt

SEQ ID NO: 116375 - DNA, 22 bp, synthetic construct
  misc_feature 1..22: note = chemically synthesized
  source 1..22: mol_type = other DNA
tttattttcattattttacatt

SEQ ID NO: 116376 - DNA, 22 bp, synthetic construct
  misc_feature 1..22: note = chemically synthesized
  source 1..22: mol_type = other DNA
ttattttcattattttacatta

SEQ ID NO: 116377 - DNA, 22 bp, synthetic construct
  misc_feature 1..22: note = chemically synthesized
  source 1..22: mol_type = other DNA
tattttcattattttacattat

SEQ ID NO: 116378 - DNA, 22 bp, synthetic construct
  misc_feature 1..22: note = chemically synthesized
  source 1..22: mol_type = other DNA
attttcattattttacattatt

SEQ ID NO: 116379 - DNA, 22 bp, synthetic construct
  misc_feature 1..22: note = chemically synthesized
  source 1..22: mol_type = other DNA
ttttcattattttacattattt

SEQ ID NO: 116380 - DNA, 22 bp, synthetic construct
  misc_feature 1..22: note = chemically synthesized
  source 1..22: mol_type = other DNA
tcattattttacattatttcat

SEQ ID NO: 116381 - DNA, 22 bp, synthetic construct
  misc_feature 1..22: note = chemically synthesized
  source 1..22: mol_type = other DNA
cattattttacattatttcatt

SEQ ID NO: 116382 - DNA, 22 bp, synthetic construct
  misc_feature 1..22: note = chemically synthesized
  source 1..22: mol_type = other DNA
attattttacattatttcattt

SEQ ID NO: 116383 - DNA, 22 bp, synthetic construct
  misc_feature 1..22: note = chemically synthesized
  source 1..22: mol_type = other DNA
ttttacattatttcatttaatt

SEQ ID NO: 116384 - DNA, 22 bp, synthetic construct
  misc_feature 1..22: note = chemically synthesized
  source 1..22: mol_type = other DNA
tacattatttcatttaattttc

SEQ ID NO: 116385 - DNA, 22 bp, synthetic construct
  misc_feature 1..22: note = chemically synthesized
  source 1..22: mol_type = other DNA
acattatttcatttaattttct

SEQ ID NO: 116386 - DNA, 22 bp, synthetic construct
  misc_feature 1..22: note = chemically synthesized
  source 1..22: mol_type = other DNA
cattatttcatttaattttctc

SEQ ID NO: 116387 - DNA, 22 bp, synthetic construct
  misc_feature 1..22: note = chemically synthesized
  source 1..22: mol_type = other DNA
tttcatttaattttctcaccaa

SEQ ID NO: 116388 - DNA, 22 bp, synthetic construct
  misc_feature 1..22: note = chemically synthesized
  source 1..22: mol_type = other DNA
catttaattttctcaccaaacc

SEQ ID NO: 116389 - DNA, 22 bp, synthetic construct
  misc_feature 1..22: note = chemically synthesized
  source 1..22: mol_type = other DNA
atttaattttctcaccaaacct

SEQ ID NO: 116390 - DNA, 22 bp, synthetic construct
  misc_feature 1..22: note = chemically synthesized
  source 1..22: mol_type = other DNA
aattttctcaccaaacctgtga

SEQ ID NO: 116391 - DNA, 22 bp, synthetic construct
  misc_feature 1..22: note = chemically synthesized
  source 1..22: mol_type = other DNA
attttctcaccaaacctgtgaa

SEQ ID NO: 116392 - DNA, 22 bp, synthetic construct
  misc_feature 1..22: note = chemically synthesized
  source 1..22: mol_type = other DNA
tctcaccaaacctgtgaagtag

SEQ ID NO: 116393 - DNA, 22 bp, synthetic construct
  misc_feature 1..22: note = chemically synthesized
  source 1..22: mol_type = other DNA
ctcaccaaacctgtgaagtagg

SEQ ID NO: 116394 - DNA, 22 bp, synthetic construct
  misc_feature 1..22: note = chemically synthesized
  source 1..22: mol_type = other DNA
tcaccaaacctgtgaagtaggg

SEQ ID NO: 116395 - DNA, 22 bp, synthetic construct
  misc_feature 1..22: note = chemically synthesized
  source 1..22: mol_type = other DNA
accaaacctgtgaagtagggag

SEQ ID NO: 116396 - DNA, 22 bp, synthetic construct
  misc_feature 1..22: note = chemically synthesized
  source 1..22: mol_type = other DNA
tgaagtagggaggtattattat

SEQ ID NO: 116397 - DNA, 22 bp, synthetic construct
  misc_feature 1..22: note = chemically synthesized
  source 1..22: mol_type = other DNA
ttattttcaatgttttaaaatt

SEQ ID NO: 116398 - DNA, 22 bp, synthetic construct
  misc_feature 1..22: note = chemically synthesized
  source 1..22: mol_type = other DNA
ttttcaatgttttaaaattagg

SEQ ID NO: 116399 - DNA, 22 bp, synthetic construct
  misc_feature 1..22: note = chemically synthesized
  source 1..22: mol_type = other DNA
tcaatgttttaaaattaggaaa

SEQ ID NO: 116400 - DNA, 22 bp, synthetic construct
  misc_feature 1..22: note = chemically synthesized
  source 1..22: mol_type = other DNA
caatgttttaaaattaggaaac

SEQ ID NO: 116401 - DNA, 22 bp, synthetic construct
  misc_feature 1..22: note = chemically synthesized
  source 1..22: mol_type = other DNA
aatgttttaaaattaggaaact

SEQ ID NO: 116402 - DNA, 22 bp, synthetic construct
  misc_feature 1..22: note = chemically synthesized
  source 1..22: mol_type = other DNA
taaaattaggaaactgaggctc

SEQ ID NO: 116403 - DNA, 22 bp, synthetic construct
  misc_feature 1..22: note = chemically synthesized
  source 1..22: mol_type = other DNA
aaaattaggaaactgaggctca

SEQ ID NO: 116404 - DNA, 22 bp, synthetic construct
  misc_feature 1..22: note = chemically synthesized
  source 1..22: mol_type = other DNA
aaattaggaaactgaggctcac

SEQ ID NO: 116405 - DNA, 22 bp, synthetic construct
  misc_feature 1..22: note = chemically synthesized
  source 1..22: mol_type = other DNA
ggaaactgaggctcacagagga

SEQ ID NO: 116406 - DNA, 22 bp, synthetic construct
  misc_feature 1..22: note = chemically synthesized
  source 1..22: mol_type = other DNA
aggctcacagaggaaagcaact

SEQ ID NO: 116407 - DNA, 22 bp, synthetic construct
  misc_feature 1..22: note = chemically synthesized
  source 1..22: mol_type = other DNA
acagaggaaagcaactttcctt

SEQ ID NO: 116408 - DNA, 22 bp, synthetic construct
  misc_feature 1..22: note = chemically synthesized
  source 1..22: mol_type = other DNA
tccttagttaaatcattaatgt

SEQ ID NO: 116409 - DNA, 22 bp, synthetic construct
  misc_feature 1..22: note = chemically synthesized
  source 1..22: mol_type = other DNA
ccttagttaaatcattaatgta

SEQ ID NO: 116410 - DNA, 22 bp, synthetic construct
  misc_feature 1..22: note = chemically synthesized
  source 1..22: mol_type = other DNA
cttagttaaatcattaatgtaa

SEQ ID NO: 116411 - DNA, 22 bp, synthetic construct
  misc_feature 1..22: note = chemically synthesized
  source 1..22: mol_type = other DNA
agttaaatcattaatgtaagtc

SEQ ID NO: 116412 - DNA, 22 bp, synthetic construct
  misc_feature 1..22: note = chemically synthesized
  source 1..22: mol_type = other DNA
gttaaatcattaatgtaagtca

SEQ ID NO: 116413 - DNA, 22 bp, synthetic construct
  misc_feature 1..22: note = chemically synthesized
  source 1..22: mol_type = other DNA
aatcattaatgtaagtcagaac

SEQ ID NO: 116414 - DNA, 22 bp, synthetic construct
  misc_feature 1..22: note = chemically synthesized
  source 1..22: mol_type = other DNA
atgtaagtcagaactgaaattc

SEQ ID NO: 116415 - DNA, 22 bp, synthetic construct
  misc_feature 1..22: note = chemically synthesized
  source 1..22: mol_type = other DNA
aaattcaatatcaagcgcatct

SEQ ID NO: 116416 - DNA, 22 bp, synthetic construct
  misc_feature 1..22: note = chemically synthesized
  source 1..22: mol_type = other DNA
aatatcaagcgcatctgatttt

SEQ ID NO: 116417 - DNA, 22 bp, synthetic construct
  misc_feature 1..22: note = chemically synthesized
  source 1..22: mol_type = other DNA
attttcttaaaccattatgctg

SEQ ID NO: 116418 - DNA, 22 bp, synthetic construct
  misc_feature 1..22: note = chemically synthesized
  source 1..22: mol_type = other DNA
tcttaaaccattatgctggact

SEQ ID NO: 116419 - DNA, 22 bp, synthetic construct
  misc_feature 1..22: note = chemically synthesized
  source 1..22: mol_type = other DNA
cttaaaccattatgctggactc

SEQ ID NO: 116420 - DNA, 22 bp, synthetic construct
  misc_feature 1..22: note = chemically synthesized
  source 1..22: mol_type = other DNA
ttaaaccattatgctggactcc

SEQ ID NO: 116421 - DNA, 22 bp, synthetic construct
  misc_feature 1..22: note = chemically synthesized
  source 1..22: mol_type = other DNA
aaaccattatgctggactcctc

SEQ ID NO: 116422 - DNA, 22 bp, synthetic construct
  misc_feature 1..22: note = chemically synthesized
  source 1..22: mol_type = other DNA
aaccattatgctggactcctct

SEQ ID NO: 116423 - DNA, 22 bp, synthetic construct
  misc_feature 1..22: note = chemically synthesized
  source 1..22: mol_type = other DNA
tgctggactcctctccaaacag

SEQ ID NO: 116424 - DNA, 22 bp, synthetic construct
  misc_feature 1..22: note = chemically synthesized
  source 1..22: mol_type = other DNA
gactcctctccaaacaggacca

SEQ ID NO: 116425 - DNA, 22 bp, synthetic construct
  misc_feature 1..22: note = chemically synthesized
  source 1..22: mol_type = other DNA
ctctccaaacaggaccactcgt

SEQ ID NO: 116426 - DNA, 22 bp, synthetic construct
  misc_feature 1..22: note = chemically synthesized
  source 1..22: mol_type = other DNA
tccaaacaggaccactcgtttc

SEQ ID NO: 116427 - DNA, 22 bp, synthetic construct
  misc_feature 1..22: note = chemically synthesized
  source 1..22: mol_type = other DNA
caaacaggaccactcgtttcag

SEQ ID NO: 116428 - DNA, 22 bp, synthetic construct
  misc_feature 1..22: note = chemically synthesized
  source 1..22: mol_type = other DNA
gtttcagggccatgttttccat

SEQ ID NO: 116429 - DNA, 22 bp, synthetic construct
  misc_feature 1..22: note = chemically synthesized
  source 1..22: mol_type = other DNA
cagggccatgttttccatgtta

SEQ ID NO: 116430 - DNA, 22 bp, synthetic construct
  misc_feature 1..22: note = chemically synthesized
  source 1..22: mol_type = other DNA
agggccatgttttccatgttat

SEQ ID NO: 116431 - DNA, 22 bp, synthetic construct
  misc_feature 1..22: note = chemically synthesized
  source 1..22: mol_type = other DNA
tccatgttatactgaaggaagt

SEQ ID NO: 116432 - DNA, 22 bp, synthetic construct
  misc_feature 1..22: note = chemically synthesized
  source 1..22: mol_type = other DNA
ccatgttatactgaaggaagtc

SEQ ID NO: 116433 - DNA, 22 bp, synthetic construct
  misc_feature 1..22: note = chemically synthesized
  source 1..22: mol_type = other DNA
catgttatactgaaggaagtcc

SEQ ID NO: 116434 - DNA, 22 bp, synthetic construct
  misc_feature 1..22: note = chemically synthesized
  source 1..22: mol_type = other DNA
tactgaaggaagtcccatcatt

SEQ ID NO: 116435 - DNA, 22 bp, synthetic construct
  misc_feature 1..22: note = chemically synthesized
  source 1..22: mol_type = other DNA
aaggaagtcccatcattggctt

SEQ ID NO: 116436 - DNA, 22 bp, synthetic construct
  misc_feature 1..22: note = chemically synthesized
  source 1..22: mol_type = other DNA
gcttctccctaactttttgttc

SEQ ID NO: 116437 - DNA, 22 bp, synthetic construct
  misc_feature 1..22: note = chemically synthesized
  source 1..22: mol_type = other DNA
ctccctaactttttgttccctt

SEQ ID NO: 116438 - DNA, 22 bp, synthetic construct
  misc_feature 1..22: note = chemically synthesized
  source 1..22: mol_type = other DNA
tccctaactttttgttcccttt

SEQ ID NO: 116439 - DNA, 22 bp, synthetic construct
  misc_feature 1..22: note = chemically synthesized
  source 1..22: mol_type = other DNA
cctaactttttgttccctttcc

SEQ ID NO: 116440 - DNA, 22 bp, synthetic construct
  misc_feature 1..22: note = chemically synthesized
  source 1..22: mol_type = other DNA
actttttgttccctttcctaga

SEQ ID NO: 116441 - DNA, 22 bp, synthetic construct
  misc_feature 1..22: note = chemically synthesized
  source 1..22: mol_type = other DNA
tttgttccctttcctagaatat

SEQ ID NO: 116442 - DNA, 22 bp, synthetic construct
  misc_feature 1..22: note = chemically synthesized
  source 1..22: mol_type = other DNA
ttgttccctttcctagaatatg

SEQ ID NO: 116443 - DNA, 22 bp, synthetic construct
  misc_feature 1..22: note = chemically synthesized
  source 1..22: mol_type = other DNA
tgttccctttcctagaatatgt

SEQ ID NO: 116444 - DNA, 22 bp, synthetic construct
  misc_feature 1..22: note = chemically synthesized
  source 1..22: mol_type = other DNA
gttccctttcctagaatatgtt

SEQ ID NO: 116445 - DNA, 22 bp, synthetic construct
  misc_feature 1..22: note = chemically synthesized
  source 1..22: mol_type = other DNA
ttccctttcctagaatatgtta

SEQ ID NO: 116446 - DNA, 22 bp, synthetic construct
  misc_feature 1..22: note = chemically synthesized
  source 1..22: mol_type = other DNA
cctttcctagaatatgttatct

SEQ ID NO: 116447 - DNA, 22 bp, synthetic construct
  misc_feature 1..22: note = chemically synthesized
  source 1..22: mol_type = other DNA
tcctagaatatgttatctattt

SEQ ID NO: 116448 - DNA, 22 bp, synthetic construct
  misc_feature 1..22: note = chemically synthesized
  source 1..22: mol_type = other DNA
cctagaatatgttatctatttt

SEQ ID NO: 116449 - DNA, 22 bp, synthetic construct
  misc_feature 1..22: note = chemically synthesized
  source 1..22: mol_type = other DNA
ctagaatatgttatctattttt

SEQ ID NO: 116450 - DNA, 22 bp, synthetic construct
  misc_feature 1..22: note = chemically synthesized
  source 1..22: mol_type = other DNA
gaatatgttatctatttttcca

SEQ ID NO: 116451 - DNA, 22 bp, synthetic construct
  misc_feature 1..22: note = chemically synthesized
  source 1..22: mol_type = other DNA
tctatttttccatttagtatca

SEQ ID NO: 116452 - DNA, 22 bp, synthetic construct
  misc_feature 1..22: note = chemically synthesized
  source 1..22: mol_type = other DNA
tttttccatttagtatcaggaa

SEQ ID NO: 116453 - DNA, 22 bp, synthetic construct
  misc_feature 1..22: note = chemically synthesized
  source 1..22: mol_type = other DNA
ttccatttagtatcaggaaaag

SEQ ID NO: 116454 - DNA, 22 bp, synthetic construct
  misc_feature 1..22: note = chemically synthesized
  source 1..22: mol_type = other DNA
tccatttagtatcaggaaaaga

SEQ ID NO: 116455 - DNA, 22 bp, synthetic construct
  misc_feature 1..22: note = chemically synthesized
  source 1..22: mol_type = other DNA
ccatttagtatcaggaaaagat

SEQ ID NO: 116456 - DNA, 22 bp, synthetic construct
  misc_feature 1..22: note = chemically synthesized
  source 1..22: mol_type = other DNA
catttagtatcaggaaaagata

SEQ ID NO: 116457 - DNA, 22 bp, synthetic construct
  misc_feature 1..22: note = chemically synthesized
  source 1..22: mol_type = other DNA
agtatcaggaaaagatagcaac

SEQ ID NO: 116458 - DNA, 22 bp, synthetic construct
  misc_feature 1..22: note = chemically synthesized
  source 1..22: mol_type = other DNA
gtatcaggaaaagatagcaaca

SEQ ID NO: 116459 - DNA, 22 bp, synthetic construct
  misc_feature 1..22: note = chemically synthesized
  source 1..22: mol_type = other DNA
ttgtattaaatactttttaata

SEQ ID NO: 116460 - DNA, 22 bp, synthetic construct
  misc_feature 1..22: note = chemically synthesized
  source 1..22: mol_type = other DNA
tattaaatactttttaatagac

SEQ ID NO: 116461 - DNA, 22 bp, synthetic construct
  misc_feature 1..22: note = chemically synthesized
  source 1..22: mol_type = other DNA
aatactttttaatagacttgat

SEQ ID NO: 116462 - DNA, 22 bp, synthetic construct
  misc_feature 1..22: note = chemically synthesized
  source 1..22: mol_type = other DNA
tttaatagacttgattttaaga

SEQ ID NO: 116463 - DNA, 22 bp, synthetic construct
  misc_feature 1..22: note = chemically synthesized
  source 1..22: mol_type = other DNA
ttaatagacttgattttaagag

SEQ ID NO: 116464 - DNA, 22 bp, synthetic construct
  misc_feature 1..22: note = chemically synthesized
  source 1..22: mol_type = other DNA
taatagacttgattttaagagt

SEQ ID NO: 116465 - DNA, 22 bp, synthetic construct
  misc_feature 1..22: note = chemically synthesized
  source 1..22: mol_type = other DNA
aatagacttgattttaagagtt

SEQ ID NO: 116466 - DNA, 22 bp, synthetic construct
  misc_feature 1..22: note = chemically synthesized
  source 1..22: mol_type = other DNA
atagacttgattttaagagtta

SEQ ID NO: 116467 - DNA, 22 bp, synthetic construct
  misc_feature 1..22: note = chemically synthesized
  source 1..22: mol_type = other DNA
gattttaagagttatagattca

SEQ ID NO: 116468 - DNA, 22 bp, synthetic construct
  misc_feature 1..22: note = chemically synthesized
  source 1..22: mol_type = other DNA
attttaagagttatagattcac

SEQ ID NO: 116469 - DNA, 22 bp, synthetic construct
  misc_feature 1..22: note = chemically synthesized
  source 1..22: mol_type = other DNA
taagagttatagattcacagaa

SEQ ID NO: 116470 - DNA, 22 bp, synthetic construct
  misc_feature 1..22: note = chemically synthesized
  source 1..22: mol_type = other DNA
aagagttatagattcacagaaa

SEQ ID NO: 116471 - DNA, 22 bp, synthetic construct
  misc_feature 1..22: note = chemically synthesized
  source 1..22: mol_type = other DNA
agagttatagattcacagaaaa

SEQ ID NO: 116472 - DNA, 22 bp, synthetic construct
  misc_feature 1..22: note = chemically synthesized
  source 1..22: mol_type = other DNA
tagattcacagaaaaactcagt

SEQ ID NO: 116473 - DNA, 22 bp, synthetic construct
  misc_feature 1..22: note = chemically synthesized
  source 1..22: mol_type = other DNA
acagaaaaactcagtagaaggt

SEQ ID NO: 116474 - DNA, 22 bp, synthetic construct
  misc_feature 1..22: note = chemically synthesized
  source 1..22: mol_type = other DNA
agtagaaggtactgagtacctt

SEQ ID NO: 116475 - DNA, 22 bp, synthetic construct
  misc_feature 1..22: note = chemically synthesized
  source 1..22: mol_type = other DNA
agtaccttctattttgcatatc

SEQ ID NO: 116476 - DNA, 22 bp, synthetic construct
  misc_feature 1..22: note = chemically synthesized
  source 1..22: mol_type = other DNA
ctattttgcatatcatggtttt

SEQ ID NO: 116477 - DNA, 22 bp, synthetic construct
  misc_feature 1..22: note = chemically synthesized
  source 1..22: mol_type = other DNA
tattttgcatatcatggttttt

SEQ ID NO: 116478 - DNA, 22 bp, synthetic construct
  misc_feature 1..22: note = chemically synthesized
  source 1..22: mol_type = other DNA
ttttgcatatcatggtttttta

SEQ ID NO: 116479 - DNA, 22 bp, synthetic construct
  misc_feature 1..22: note = chemically synthesized
  source 1..22: mol_type = other DNA
tgcatatcatggttttttaagc

SEQ ID NO: 116480 - DNA, 22 bp, synthetic construct
  misc_feature 1..22: note = chemically synthesized
  source 1..22: mol_type = other DNA
gcatatcatggttttttaagca

SEQ ID NO: 116481 - DNA, 22 bp, synthetic construct
  misc_feature 1..22: note = chemically synthesized
  source 1..22: mol_type = other DNA
catatcatggttttttaagcac

SEQ ID NO: 116482 - DNA, 22 bp, synthetic construct
  misc_feature 1..22: note = chemically synthesized
  source 1..22: mol_type = other DNA
tttaagcacatattataaccta

SEQ ID NO: 116483 - DNA, 22 bp, synthetic construct
  misc_feature 1..22: note = chemically synthesized
  source 1..22: mol_type = other DNA
ttaagcacatattataacctag

SEQ ID NO: 116484 - DNA, 22 bp, synthetic construct
  misc_feature 1..22: note = chemically synthesized
  source 1..22: mol_type = other DNA
taagcacatattataacctagg

SEQ ID NO: 116485 - DNA, 22 bp, synthetic construct
  misc_feature 1..22: note = chemically synthesized
  source 1..22: mol_type = other DNA
aagcacatattataacctaggt

SEQ ID NO: 116486 - DNA, 22 bp, synthetic construct
  misc_feature 1..22: note = chemically synthesized
  source 1..22: mol_type = other DNA
agcacatattataacctaggta

SEQ ID NO: 116487 - DNA, 22 bp, synthetic construct
  misc_feature 1..22: note = chemically synthesized
  source 1..22: mol_type = other DNA
taacctaggtattattctaagg

SEQ ID NO: 116488 - DNA, 22 bp, synthetic construct
  misc_feature 1..22: note = chemically synthesized
  source 1..22: mol_type = other DNA
ggtattattctaagggcataat

SEQ ID NO: 116489 - DNA, 22 bp, synthetic construct
  misc_feature 1..22: note = chemically synthesized
  source 1..22: mol_type = other DNA
ttctaagggcataatacactat

SEQ ID NO: 116490 - DNA, 22 bp, synthetic construct
  misc_feature 1..22: note = chemically synthesized
  source 1..22: mol_type = other DNA
taagggcataatacactataag

SEQ ID NO: 116491 - DNA, 22 bp, synthetic construct
  misc_feature 1..22: note = chemically synthesized
  source 1..22: mol_type = other DNA
agggcataatacactataagtc

SEQ ID NO: 116492 - DNA, 22 bp, synthetic construct
  misc_feature 1..22: note = chemically synthesized
  source 1..22: mol_type = other DNA
taagtcactttatcttgacaat

SEQ ID NO: 116493 - DNA, 22 bp, synthetic construct
  misc_feature 1..22: note = chemically synthesized
  source 1..22: mol_type = other DNA
tatcttgacaataaccttatga

SEQ ID NO: 116494 - DNA, 22 bp, synthetic construct
  misc_feature 1..22: note = chemically synthesized
  source 1..22: mol_type = other DNA
atcttgacaataaccttatgag

SEQ ID NO: 116495 - DNA, 22 bp, synthetic construct
  misc_feature 1..22: note = chemically synthesized
  source 1..22: mol_type = other DNA
tcttgacaataaccttatgaga

SEQ ID NO: 116496 - DNA, 22 bp, synthetic construct
  misc_feature 1..22: note = chemically synthesized
  source 1..22: mol_type = other DNA
gacaataaccttatgagatgga

SEQ ID NO: 116497 - DNA, 22 bp, synthetic construct
  misc_feature 1..22: note = chemically synthesized
  source 1..22: mol_type = other DNA
acaataaccttatgagatggat

SEQ ID NO: 116498 - DNA, 22 bp, synthetic construct
  misc_feature 1..22: note = chemically synthesized
  source 1..22: mol_type = other DNA
atgagatggatactactagatt

SEQ ID NO: 116499 - DNA, 22 bp, synthetic construct
  misc_feature 1..22: note = chemically synthesized
  source 1..22: mol_type = other DNA
tgagatggatactactagatta

SEQ ID NO: 116500 - DNA, 22 bp, synthetic construct
  misc_feature 1..22: note = chemically synthesized
  source 1..22: mol_type = other DNA
ctagattacccattttacagat

SEQ ID NO: 116501 - DNA, 22 bp, synthetic construct
  misc_feature 1..22: note = chemically synthesized
  source 1..22: mol_type = other DNA
gattacccattttacagataag

SEQ ID NO: 116502 - DNA, 22 bp, synthetic construct
  misc_feature 1..22: note = chemically synthesized
  source 1..22: mol_type = other DNA
cccattttacagataagtacac

SEQ ID NO: 116503 - DNA, 22 bp, synthetic construct
  misc_feature 1..22: note = chemically synthesized
  source 1..22: mol_type = other DNA
tacagataagtacactgaggct

SEQ ID NO: 116504 - DNA, 22 bp, synthetic construct
  misc_feature 1..22: note = chemically synthesized
  source 1..22: mol_type = other DNA
acagataagtacactgaggctc

SEQ ID NO: 116505 - DNA, 22 bp, synthetic construct
  misc_feature 1..22: note = chemically synthesized
  source 1..22: mol_type = other DNA
cagataagtacactgaggctca

SEQ ID NO: 116506 - DNA, 22 bp, synthetic construct
  misc_feature 1..22: note = chemically synthesized
  source 1..22: mol_type = other DNA
aggctcagagacaaaatatctt

SEQ ID NO: 116507 - DNA, 22 bp, synthetic construct
  misc_feature 1..22: note = chemically synthesized
  source 1..22: mol_type = other DNA
agagacaaaatatcttgcccaa

SEQ ID NO: 116508 - DNA, 22 bp, synthetic construct
  misc_feature 1..22: note = chemically synthesized
  source 1..22: mol_type = other DNA
gcccaatattataccaagtttg

SEQ ID NO: 116509 - DNA, 22 bp, synthetic construct
  misc_feature 1..22: note = chemically synthesized
  source 1..22: mol_type = other DNA
cccaatattataccaagtttga

SEQ ID NO: 116510 - DNA, 22 bp, synthetic construct
  misc_feature 1..22: note = chemically synthesized
  source 1..22: mol_type = other DNA
taccaagtttgacagttctgac

SEQ ID NO: 116511 - DNA, 22 bp, synthetic construct
  misc_feature 1..22: note = chemically synthesized
  source 1..22: mol_type = other DNA
gacagttctgactgtggtgctt

SEQ ID NO: 116512 - DNA, 22 bp, synthetic construct
  misc_feature 1..22: note = chemically synthesized
  source 1..22: mol_type = other DNA
acagttctgactgtggtgcttg

SEQ ID NO: 116513 - DNA, 22 bp, synthetic construct
  misc_feature 1..22: note = chemically synthesized
  source 1..22: mol_type = other DNA
tgactgtggtgcttgtagtttt

SEQ ID NO: 116514 - DNA, 22 bp, synthetic construct
  misc_feature 1..22: note = chemically synthesized
  source 1..22: mol_type = other DNA
actgtggtgcttgtagttttaa

SEQ ID NO: 116515 - DNA, 22 bp, synthetic construct
  misc_feature 1..22: note = chemically synthesized
  source 1..22: mol_type = other DNA
tggtgcttgtagttttaactat

SEQ ID NO: 116516 - DNA, 22 bp, synthetic construct
  misc_feature 1..22: note = chemically synthesized
  source 1..22: mol_type = other DNA
gtagttttaactatgctccact

SEQ ID NO: 116517 - DNA, 22 bp, synthetic construct
  misc_feature 1..22: note = chemically synthesized
  source 1..22: mol_type = other DNA
tagttttaactatgctccactg

SEQ ID NO: 116518 - DNA, 22 bp, synthetic construct
  misc_feature 1..22: note = chemically synthesized
  source 1..22: mol_type = other DNA
taactatgctccactgattcaa

SEQ ID NO: 116519 - DNA, 22 bp, synthetic construct
  misc_feature 1..22: note = chemically synthesized
  source 1..22: mol_type = other DNA
aactatgctccactgattcaac

SEQ ID NO: 116520 - DNA, 22 bp, synthetic construct
  misc_feature 1..22: note = chemically synthesized
  source 1..22: mol_type = other DNA
actatgctccactgattcaaca

SEQ ID NO: 116521 - DNA, 22 bp, synthetic construct
  misc_feature 1..22: note = chemically synthesized
  source 1..22: mol_type = other DNA
tgctccactgattcaacaacaa

SEQ ID NO: 116522 - DNA, 22 bp, synthetic construct
  misc_feature 1..22: note = chemically synthesized
  source 1..22: mol_type = other DNA
cactgattcaacaacaacaaca

SEQ ID NO: 116523 - DNA, 22 bp, synthetic construct
  misc_feature 1..22: note = chemically synthesized
  source 1..22: mol_type = other DNA
attcaacaacaacaacaaacca

SEQ ID NO: 116524 - DNA, 22 bp, synthetic construct
  misc_feature 1..22: note = chemically synthesized
  source 1..22: mol_type = other DNA
aacaacaacaacaaaccaaaaa

SEQ ID NO: 116525 - DNA, 22 bp, synthetic construct
  misc_feature 1..22: note = chemically synthesized
  source 1..22: mol_type = other DNA
tacatattcctgctaatgacag

SEQ ID NO: 116526 - DNA, 22 bp, synthetic construct
  misc_feature 1..22: note = chemically synthesized
  source 1..22: mol_type = other DNA
ctgctaatgacagtatctgctt

SEQ ID NO: 116527 - DNA, 22 bp, synthetic construct
  misc_feature 1..22: note = chemically synthesized
  source 1..22: mol_type = other DNA
ctaatgacagtatctgctttaa

SEQ ID NO: 116528 - DNA, 22 bp, synthetic construct
  misc_feature 1..22: note = chemically synthesized
  source 1..22: mol_type = other DNA
atgacagtatctgctttaaatc

SEQ ID NO: 116529 - DNA, 22 bp, synthetic construct
  misc_feature 1..22: note = chemically synthesized
  source 1..22: mol_type = other DNA
ctttaaatcatctggcccattc

SEQ ID NO: 116530 - DNA, 22 bp, synthetic construct
  misc_feature 1..22: note = chemically synthesized
  source 1..22: mol_type = other DNA
taaatcatctggcccattcctc

SEQ ID NO: 116531 - DNA, 22 bp, synthetic construct
  misc_feature 1..22: note = chemically synthesized
  source 1..22: mol_type = other DNA
aaatcatctggcccattcctca

SEQ ID NO: 116532 - DNA, 22 bp, synthetic construct
  misc_feature 1..22: note = chemically synthesized
  source 1..22: mol_type = other DNA
aatcatctggcccattcctcag

SEQ ID NO: 116533 - DNA, 22 bp, synthetic construct
  misc_feature 1..22: note = chemically synthesized
  source 1..22: mol_type = other DNA
gcccattcctcagcacaagcct

SEQ ID NO: 116534 - DNA, 22 bp, synthetic construct
  misc_feature 1..22: note = chemically synthesized
  source 1..22: mol_type = other DNA
ctcagcacaagcctatattcct

SEQ ID NO: 116535 - DNA, 22 bp, synthetic construct
  misc_feature 1..22: note = chemically synthesized
  source 1..22: mol_type = other DNA
agcacaagcctatattcctgca

SEQ ID NO: 116536 - DNA, 22 bp, synthetic construct
  misc_feature 1..22: note = chemically synthesized
  source 1..22: mol_type = other DNA
tattcctgcaggcaaaaatctt

SEQ ID NO: 116537 - DNA, 22 bp, synthetic construct
  misc_feature 1..22: note = chemically synthesized
  source 1..22: mol_type = other DNA
ctgcaggcaaaaatctttacaa

SEQ ID NO: 116538 - DNA, 22 bp, synthetic construct
  misc_feature 1..22: note = chemically synthesized
  source 1..22: mol_type = other DNA
caggcaaaaatctttacaacta

SEQ ID NO: 116539 - DNA, 22 bp, synthetic construct
  misc_feature 1..22: note = chemically synthesized
  source 1..22: mol_type = other DNA
tacaactatcccgttatttaat

SEQ ID NO: 116540 - DNA, 22 bp, synthetic construct
  misc_feature 1..22: note = chemically synthesized
  source 1..22: mol_type = other DNA
acaactatcccgttatttaata

SEQ ID NO: 116541 - DNA, 22 bp, synthetic construct
  misc_feature 1..22: note = chemically synthesized
  source 1..22: mol_type = other DNA
caactatcccgttatttaatat

SEQ ID NO: 116542 - DNA, 22 bp, synthetic construct
  misc_feature 1..22: note = chemically synthesized
  source 1..22: mol_type = other DNA
tcccgttatttaatatccacaa

SEQ ID NO: 116543 - DNA, 22 bp, synthetic construct
  misc_feature 1..22: note = chemically synthesized
  source 1..22: mol_type = other DNA
tttaatatccacaagcctctct

SEQ ID NO: 116544 - DNA, 22 bp, synthetic construct
  misc_feature 1..22: note = chemically synthesized
  source 1..22: mol_type = other DNA
aatatccacaagcctctctaag

SEQ ID NO: 116545 - DNA, 22 bp, synthetic construct
  misc_feature 1..22: note = chemically synthesized
  source 1..22: mol_type = other DNA
atatccacaagcctctctaagc

SEQ ID NO: 116546 - DNA, 22 bp, synthetic construct
  misc_feature 1..22: note = chemically synthesized
  source 1..22: mol_type = other DNA
tctaagcctttgaaattgatac

SEQ ID NO: 116547 - DNA, 22 bp, synthetic construct
  misc_feature 1..22: note = chemically synthesized
  source 1..22: mol_type = other DNA
taagcctttgaaattgatactg

SEQ ID NO: 116548 - DNA, 22 bp, synthetic construct
  misc_feature 1..22: note = chemically synthesized
  source 1..22: mol_type = other DNA
agcctttgaaattgatactgta

SEQ ID NO: 116549 - DNA, 22 bp, synthetic construct
  misc_feature 1..22: note = chemically synthesized
  source 1..22: mol_type = other DNA
tgaaattgatactgtatttgta

SEQ ID NO: 116550 - DNA, 22 bp, synthetic construct
  misc_feature 1..22: note = chemically synthesized
  source 1..22: mol_type = other DNA
gaaattgatactgtatttgtaa

SEQ ID NO: 116551 - DNA, 22 bp, synthetic construct
  misc_feature 1..22: note = chemically synthesized
  source 1..22: mol_type = other DNA
aaattgatactgtatttgtaaa

SEQ ID NO: 116552 - DNA, 22 bp, synthetic construct
  misc_feature 1..22: note = chemically synthesized
  source 1..22: mol_type = other DNA
atactgtatttgtaaaacacag

SEQ ID NO: 116553 - DNA, 22 bp, synthetic construct
  misc_feature 1..22: note = chemically synthesized
  source 1..22: mol_type = other DNA
tatttgtaaaacacagatggct

SEQ ID NO: 116554 - DNA, 22 bp, synthetic construct
  misc_feature 1..22: note = chemically synthesized
  source 1..22: mol_type = other DNA
gtaaaacacagatggctcatgt

SEQ ID NO: 116555 - DNA, 22 bp, synthetic construct
  misc_feature 1..22: note = chemically synthesized
  source 1..22: mol_type = other DNA
taaaacacagatggctcatgta

SEQ ID NO: 116556 - DNA, 22 bp, synthetic construct
  misc_feature 1..22: note = chemically synthesized
  source 1..22: mol_type = other DNA
atgtaattgaagttcacagaat

SEQ ID NO: 116557 - DNA, 22 bp, synthetic construct
  misc_feature 1..22: note = chemically synthesized
  source 1..22: mol_type = other DNA
aagttcacagaattttatgttt

SEQ ID NO: 116558 - DNA, 22 bp, synthetic construct
  misc_feature 1..22: note = chemically synthesized
  source 1..22: mol_type = other DNA
acagaattttatgttttgcttt

SEQ ID NO: 116559 - DNA, 22 bp, synthetic construct
  misc_feature 1..22: note = chemically synthesized
  source 1..22: mol_type = other DNA
tatgttttgctttgtgacaact

SEQ ID NO: 116560 - DNA, 22 bp, synthetic construct
  misc_feature 1..22: note = chemically synthesized
  source 1..22: mol_type = other DNA
atgttttgctttgtgacaactc

SEQ ID NO: 116561 - DNA, 22 bp, synthetic construct
  misc_feature 1..22: note = chemically synthesized
  source 1..22: mol_type = other DNA
tgttttgctttgtgacaactct

SEQ ID NO: 116562 - DNA, 22 bp, synthetic construct
  misc_feature 1..22: note = chemically synthesized
  source 1..22: mol_type = other DNA
tgctttgtgacaactctgagcc

SEQ ID NO: 116563 - DNA, 22 bp, synthetic construct
  misc_feature 1..22: note = chemically synthesized
  source 1..22: mol_type = other DNA
gctttgtgacaactctgagcct

SEQ ID NO: 116564 - DNA, 22 bp, synthetic construct
  misc_feature 1..22: note = chemically synthesized
  source 1..22: mol_type = other DNA
ctttgtgacaactctgagcctt

SEQ ID NO: 116565 - DNA, 22 bp, synthetic construct
  misc_feature 1..22: note = chemically synthesized
  source 1..22: mol_type = other DNA
tgtgacaactctgagcctttgt

SEQ ID NO: 116566 - DNA, 22 bp, synthetic construct
  misc_feature 1..22: note = chemically synthesized
  source 1..22: mol_type = other DNA
gtgacaactctgagcctttgta

SEQ ID NO: 116567 - DNA, 22 bp, synthetic construct
  misc_feature 1..22: note = chemically synthesized
  source 1..22: mol_type = other DNA
tgacaactctgagcctttgtac

SEQ ID NO: 116568 - DNA, 22 bp, synthetic construct
  misc_feature 1..22: note = chemically synthesized
  source 1..22: mol_type = other DNA
tgagcctttgtacatgttttcc

SEQ ID NO: 116569 - DNA, 22 bp, synthetic construct
  misc_feature 1..22: note = chemically synthesized
  source 1..22: mol_type = other DNA
agcctttgtacatgttttcccc

SEQ ID NO: 116570 - DNA, 22 bp, synthetic construct
  misc_feature 1..22: note = chemically synthesized
  source 1..22: mol_type = other DNA
tgtacatgttttcccctctatc

SEQ ID NO: 116571 - DNA, 22 bp, synthetic construct
  misc_feature 1..22: note = chemically synthesized
  source 1..22: mol_type = other DNA
gtacatgttttcccctctatct

SEQ ID NO: 116572 - DNA, 22 bp, synthetic construct
  misc_feature 1..22: note = chemically synthesized
  source 1..22: mol_type = other DNA
tacatgttttcccctctatcta

SEQ ID NO: 116573 - DNA, 22 bp, synthetic construct
  misc_feature 1..22: note = chemically synthesized
  source 1..22: mol_type = other DNA
tcccctctatctaaaatgttac

SEQ ID NO: 116574 - DNA, 22 bp, synthetic construct
  misc_feature 1..22: note = chemically synthesized
  source 1..22: mol_type = other DNA
cccctctatctaaaatgttacc

SEQ ID NO: 116575 - DNA, 22 bp, synthetic construct
  misc_feature 1..22: note = chemically synthesized
  source 1..22: mol_type = other DNA
ccctctatctaaaatgttacct

SEQ ID NO: 116576 - DNA, 22 bp, synthetic construct
  misc_feature 1..22: note = chemically synthesized
  source 1..22: mol_type = other DNA
tatctaaaatgttacctatttt

SEQ ID NO: 116577 - DNA, 22 bp, synthetic construct
  misc_feature 1..22: note = chemically synthesized
  source 1..22: mol_type = other DNA
tctaaaatgttacctattttga

SEQ ID NO: 116578 - DNA, 22 bp, synthetic construct
  misc_feature 1..22: note = chemically synthesized
  source 1..22: mol_type = other DNA
aaatgttacctattttgaatga

SEQ ID NO: 116579 - DNA, 22 bp, synthetic construct
  misc_feature 1..22: note = chemically synthesized
  source 1..22: mol_type = other DNA
cctattttgaatgatagtgcag

SEQ ID NO: 116580 - DNA, 22 bp, synthetic construct
  misc_feature 1..22: note = chemically synthesized
  source 1..22: mol_type = other DNA
ttttgaatgatagtgcagacat

SEQ ID NO: 116581 - DNA, 22 bp, synthetic construct
  misc_feature 1..22: note = chemically synthesized
  source 1..22: mol_type = other DNA
tgaatgatagtgcagacattag

SEQ ID NO: 116582 - DNA, 22 bp, synthetic construct
  misc_feature 1..22: note = chemically synthesized
  source 1..22: mol_type = other DNA
gaatgatagtgcagacattagt

SEQ ID NO: 116583 - DNA, 22 bp, synthetic construct
  misc_feature 1..22: note = chemically synthesized
  source 1..22: mol_type = other DNA
aatgatagtgcagacattagta

SEQ ID NO: 116584 - DNA, 22 bp, synthetic construct
  misc_feature 1..22: note = chemically synthesized
  source 1..22: mol_type = other DNA
gtaaggaaagcttgctaaatat

SEQ ID NO: 116585 - DNA, 22 bp, synthetic construct
  misc_feature 1..22: note = chemically synthesized
  source 1..22: mol_type = other DNA
gctaaatatttgtatcacctgg

SEQ ID NO: 116586 - DNA, 22 bp, synthetic construct
  misc_feature 1..22: note = chemically synthesized
  source 1..22: mol_type = other DNA
ctaaatatttgtatcacctggg

SEQ ID NO: 116587 - DNA, 22 bp, synthetic construct
  misc_feature 1..22: note = chemically synthesized
  source 1..22: mol_type = other DNA
aatatttgtatcacctgggaag

SEQ ID NO: 116588 - DNA, 22 bp, synthetic construct
  misc_feature 1..22: note = chemically synthesized
  source 1..22: mol_type = other DNA
gtatcacctgggaagcctgttt

SEQ ID NO: 116589 - DNA, 22 bp, synthetic construct
  misc_feature 1..22: note = chemically synthesized
  source 1..22: mol_type = other DNA
tatcacctgggaagcctgtttt

SEQ ID NO: 116590 - DNA, 22 bp, synthetic construct
  misc_feature 1..22: note = chemically synthesized
  source 1..22: mol_type = other DNA
ggaagcctgtttttgcttcatc

SEQ ID NO: 116591 - DNA, 22 bp, synthetic construct
  misc_feature 1..22: note = chemically synthesized
  source 1..22: mol_type = other DNA
tttttgcttcatcaggggacgt

SEQ ID NO: 116592 - DNA, 22 bp, synthetic construct
  misc_feature 1..22: note = chemically synthesized
  source 1..22: mol_type = other DNA
ttgcttcatcaggggacgttag

SEQ ID NO: 116593 - DNA, 22 bp, synthetic construct
  misc_feature 1..22: note = chemically synthesized
  source 1..22: mol_type = other DNA
tgcttcatcaggggacgttagt

SEQ ID NO: 116594 - DNA, 22 bp, synthetic construct
  misc_feature 1..22: note = chemically synthesized
  source 1..22: mol_type = other DNA
gcttcatcaggggacgttagtt

SEQ ID NO: 116595 - DNA, 22 bp, synthetic construct
  misc_feature 1..22: note = chemically synthesized
  source 1..22: mol_type = other DNA
cttcatcaggggacgttagttt

SEQ ID NO: 116596 - DNA, 22 bp, synthetic construct
  misc_feature 1..22: note = chemically synthesized
  source 1..22: mol_type = other DNA
catcaggggacgttagtttttt

SEQ ID NO: 116597 - DNA, 22 bp, synthetic construct
  misc_feature 1..22: note = chemically synthesized
  source 1..22: mol_type = other DNA
atcaggggacgttagttttttt

SEQ ID NO: 116598 - DNA, 22 bp, synthetic construct
  misc_feature 1..22: note = chemically synthesized
  source 1..22: mol_type = other DNA
gtttttttcacatcaacctcct

SEQ ID NO: 116599 - DNA, 22 bp, synthetic construct
  misc_feature 1..22: note = chemically synthesized
  source 1..22: mol_type = other DNA
ttttcacatcaacctcctgcag

SEQ ID NO: 116600 - DNA, 22 bp, synthetic construct
  misc_feature 1..22: note = chemically synthesized
  source 1..22: mol_type = other DNA
tttcacatcaacctcctgcaga

SEQ ID NO: 116601 - DNA, 22 bp, synthetic construct
  misc_feature 1..22: note = chemically synthesized
  source 1..22: mol_type = other DNA
ttcacatcaacctcctgcagaa

SEQ ID NO: 116602 - DNA, 22 bp, synthetic construct
  misc_feature 1..22: note = chemically synthesized
  source 1..22: mol_type = other DNA
tcacatcaacctcctgcagaag

SEQ ID NO: 116603 - DNA, 22 bp, synthetic construct
  misc_feature 1..22: note = chemically synthesized
  source 1..22: mol_type = other DNA
cacatcaacctcctgcagaaga

SEQ ID NO: 116604 - DNA, 22 bp, synthetic construct
  misc_feature 1..22: note = chemically synthesized
  source 1..22: mol_type = other DNA
acatcaacctcctgcagaagac

SEQ ID NO: 116605 - DNA, 22 bp, synthetic construct
  misc_feature 1..22: note = chemically synthesized
  source 1..22: mol_type = other DNA
ctgcagaagacaatgctttctg

SEQ ID NO: 116606 - DNA, 22 bp, synthetic construct
  misc_feature 1..22: note = chemically synthesized
  source 1..22: mol_type = other DNA
cagaagacaatgctttctgaaa

SEQ ID NO: 116607 - DNA, 22 bp, synthetic construct
  misc_feature 1..22: note = chemically synthesized
  source 1..22: mol_type = other DNA
tctgaaagacagagtttgtgtc

SEQ ID NO: 116608 - DNA, 22 bp, synthetic construct
  misc_feature 1..22: note = chemically synthesized
  source 1..22: mol_type = other DNA
ctgaaagacagagtttgtgtct

SEQ ID NO: 116609 - DNA, 22 bp, synthetic construct
  misc_feature 1..22: note = chemically synthesized
  source 1..22: mol_type = other DNA
tgaaagacagagtttgtgtctt

SEQ ID NO: 116610 - DNA, 22 bp, synthetic construct
  misc_feature 1..22: note = chemically synthesized
  source 1..22: mol_type = other DNA
aaagacagagtttgtgtcttat

SEQ ID NO: 116611 - DNA, 22 bp, synthetic construct
  misc_feature 1..22: note = chemically synthesized
  source 1..22: mol_type = other DNA
gtgtcttattaatgcttgcatt

SEQ ID NO: 116612 - DNA, 22 bp, synthetic construct
  misc_feature 1..22: note = chemically synthesized
  source 1..22: mol_type = other DNA
tgtcttattaatgcttgcattc

SEQ ID NO: 116613 - DNA, 22 bp, synthetic construct
  misc_feature 1..22: note = chemically synthesized
  source 1..22: mol_type = other DNA
attaatgcttgcattcaaatat

SEQ ID NO: 116614 - DNA, 22 bp, synthetic construct
  misc_feature 1..22: note = chemically synthesized
  source 1..22: mol_type = other DNA
ttaatgcttgcattcaaatatc

SEQ ID NO: 116615 - DNA, 22 bp, synthetic construct
  misc_feature 1..22: note = chemically synthesized
  source 1..22: mol_type = other DNA
atgcttgcattcaaatatctga

SEQ ID NO: 116616 - DNA, 22 bp, synthetic construct
  misc_feature 1..22: note = chemically synthesized
  source 1..22: mol_type = other DNA
gcattcaaatatctgacccaaa

SEQ ID NO: 116617 - DNA, 22 bp, synthetic construct
  misc_feature 1..22: note = chemically synthesized
  source 1..22: mol_type = other DNA
cattcaaatatctgacccaaag

SEQ ID NO: 116618 - DNA, 22 bp, synthetic construct
  misc_feature 1..22: note = chemically synthesized
  source 1..22: mol_type = other DNA
aaatatctgacccaaagcttgt

SEQ ID NO: 116619 - DNA, 22 bp, synthetic construct
  misc_feature 1..22: note = chemically synthesized
  source 1..22: mol_type = other DNA
acccaaagcttgtgatctttac

SEQ ID NO: 116620 - DNA, 22 bp, synthetic construct
  misc_feature 1..22: note = chemically synthesized
  source 1..22: mol_type = other DNA
gtgatctttacatacttgctca

SEQ ID NO: 116621 - DNA, 22 bp, synthetic construct
  misc_feature 1..22: note = chemically synthesized
  source 1..22: mol_type = other DNA
tgatctttacatacttgctcag

SEQ ID NO: 116622 - DNA, 22 bp, synthetic construct
  misc_feature 1..22: note = chemically synthesized
  source 1..22: mol_type = other DNA
tacatacttgctcagtgaatga

SEQ ID NO: 116623 - DNA, 22 bp, synthetic construct
  misc_feature 1..22: note = chemically synthesized
  source 1..22: mol_type = other DNA
acatacttgctcagtgaatgac

SEQ ID NO: 116624 - DNA, 22 bp, synthetic construct
  misc_feature 1..22: note = chemically synthesized
  source 1..22: mol_type = other DNA
catacttgctcagtgaatgaca

SEQ ID NO: 116625 - DNA, 22 bp, synthetic construct
  misc_feature 1..22: note = chemically synthesized
  source 1..22: mol_type = other DNA
gctcagtgaatgacagtgaata

SEQ ID NO: 116626 - DNA, 22 bp, synthetic construct
  misc_feature 1..22: note = chemically synthesized
  source 1..22: mol_type = other DNA
ctcagtgaatgacagtgaataa

SEQ ID NO: 116627 - DNA, 22 bp, synthetic construct
  misc_feature 1..22: note = chemically synthesized
  source 1..22: mol_type = other DNA
agtgaatgacagtgaataacta

SEQ ID NO: 116628 - DNA, 22 bp, synthetic construct
  misc_feature 1..22: note = chemically synthesized
  source 1..22: mol_type = other DNA
cctggttgtaaagactgtctca

SEQ ID NO: 116629 - DNA, 22 bp, synthetic construct
  misc_feature 1..22: note = chemically synthesized
  source 1..22: mol_type = other DNA
gttgtaaagactgtctcaaggg

SEQ ID NO: 116630 - DNA, 22 bp, synthetic construct
  misc_feature 1..22: note = chemically synthesized
  source 1..22: mol_type = other DNA
taaagactgtctcaaggggact

SEQ ID NO: 116631 - DNA, 22 bp, synthetic construct
  misc_feature 1..22: note = chemically synthesized
  source 1..22: mol_type = other DNA
tctcaaggggacttttgtctgg

SEQ ID NO: 116632 - DNA, 22 bp, synthetic construct
  misc_feature 1..22: note = chemically synthesized
  source 1..22: mol_type = other DNA
aaggggacttttgtctgggaaa

SEQ ID NO: 116633 - DNA, 22 bp, synthetic construct
  misc_feature 1..22: note = chemically synthesized
  source 1..22: mol_type = other DNA
ttgtctgggaaaagaaaagaaa

SEQ ID NO: 116634 - DNA, 22 bp, synthetic construct
  misc_feature 1..22: note = chemically synthesized
  source 1..22: mol_type = other DNA
tgtctgggaaaagaaaagaaag

SEQ ID NO: 116635 - DNA, 22 bp, synthetic construct
  misc_feature 1..22: note = chemically synthesized
  source 1..22: mol_type = other DNA
gtctgggaaaagaaaagaaaga

SEQ ID NO: 116636 - DNA, 22 bp, synthetic construct
  misc_feature 1..22: note = chemically synthesized
  source 1..22: mol_type = other DNA
tctgggaaaagaaaagaaagac

SEQ ID NO: 116637 - DNA, 22 bp, synthetic construct
  misc_feature 1..22: note = chemically synthesized
  source 1..22: mol_type = other DNA
ggaaaagaaaagaaagacaaaa

SEQ ID NO: 116638 - DNA, 22 bp, synthetic construct
  misc_feature 1..22: note = chemically synthesized
  source 1..22: mol_type = other DNA
agaagcacccaataaattttct

SEQ ID NO: 116639 - DNA, 22 bp, synthetic construct
  misc_feature 1..22: note = chemically synthesized
  source 1..22: mol_type = other DNA
tcttatgaagttggcagctggg

SEQ ID NO: 116640 - DNA, 22 bp, synthetic construct
  misc_feature 1..22: note = chemically synthesized
  source 1..22: mol_type = other DNA
cttatgaagttggcagctgggg

SEQ ID NO: 116641 - DNA, 22 bp, synthetic construct
  misc_feature 1..22: note = chemically synthesized
  source 1..22: mol_type = other DNA
ttatgaagttggcagctgggga

SEQ ID NO: 116642 - DNA, 22 bp, synthetic construct
  misc_feature 1..22: note = chemically synthesized
  source 1..22: mol_type = other DNA
atgaagttggcagctggggaga

SEQ ID NO: 116643 - DNA, 22 bp, synthetic construct
  misc_feature 1..22: note = chemically synthesized
  source 1..22: mol_type = other DNA
tgaagttggcagctggggagag

SEQ ID NO: 116644 - DNA, 22 bp, synthetic construct
  misc_feature 1..22: note = chemically synthesized
  source 1..22: mol_type = other DNA
gcagctggggagagaagacagt

SEQ ID NO: 116645 - DNA, 22 bp, synthetic construct
  misc_feature 1..22: note = chemically synthesized
  source 1..22: mol_type = other DNA
gggagagaagacagtcaaggat

SEQ ID NO: 116646 - DNA, 22 bp, synthetic construct
  misc_feature 1..22: note = chemically synthesized
  source 1..22: mol_type = other DNA
tggctcactgaaatacctccta

SEQ ID NO: 116647 - DNA, 22 bp, synthetic construct
  misc_feature 1..22: note = chemically synthesized
  source 1..22: mol_type = other DNA
gctcactgaaatacctcctaga

SEQ ID NO: 116648 - DNA, 22 bp, synthetic construct
  misc_feature 1..22: note = chemically synthesized
  source 1..22: mol_type = other DNA
actgaaatacctcctagaggta

SEQ ID NO: 116649 - DNA, 22 bp, synthetic construct
  misc_feature 1..22: note = chemically synthesized
  source 1..22: mol_type = other DNA
aaatacctcctagaggtactca

SEQ ID NO: 116650 - DNA, 22 bp, synthetic construct
  misc_feature 1..22: note = chemically synthesized
  source 1..22: mol_type = other DNA
ctagaggtactcatggttcact

SEQ ID NO: 116651 - DNA, 22 bp, synthetic construct
  misc_feature 1..22: note = chemically synthesized
  source 1..22: mol_type = other DNA
gaggtactcatggttcactaaa

SEQ ID NO: 116652 - DNA, 22 bp, synthetic construct
  misc_feature 1..22: note = chemically synthesized
  source 1..22: mol_type = other DNA
atggttcactaaatttccattt

SEQ ID NO: 116653 - DNA, 22 bp, synthetic construct
  misc_feature 1..22: note = chemically synthesized
  source 1..22: mol_type = other DNA
actaaatttccatttaagataa

SEQ ID NO: 116654 - DNA, 22 bp, synthetic construct
  misc_feature 1..22: note = chemically synthesized
  source 1..22: mol_type = other DNA
aatttccatttaagataactgg

SEQ ID NO: 116655 - DNA, 22 bp, synthetic construct
  misc_feature 1..22: note = chemically synthesized
  source 1..22: mol_type = other DNA
ccatttaagataactgggcatc

SEQ ID NO: 116656 - DNA, 22 bp, synthetic construct
  misc_feature 1..22: note = chemically synthesized
  source 1..22: mol_type = other DNA
catttaagataactgggcatct

SEQ ID NO: 116657 - DNA, 22 bp, synthetic construct
  misc_feature 1..22: note = chemically synthesized
  source 1..22: mol_type = other DNA
aagataactgggcatctcaaat

SEQ ID NO: 116658 - DNA, 22 bp, synthetic construct
  misc_feature 1..22: note = chemically synthesized
  source 1..22: mol_type = other DNA
agataactgggcatctcaaatg

SEQ ID NO: 116659 - DNA, 22 bp, synthetic construct
  misc_feature 1..22: note = chemically synthesized
  source 1..22: mol_type = other DNA
ggcatctcaaatgctttggtct

SEQ ID NO: 116660 - DNA, 22 bp, synthetic construct
  misc_feature 1..22: note = chemically synthesized
  source 1..22: mol_type = other DNA
aaatgctttggtctaggaggat

SEQ ID NO: 116661 - DNA, 22 bp, synthetic construct
  misc_feature 1..22: note = chemically synthesized
  source 1..22: mol_type = other DNA
tggtctaggaggatgctaatcc

SEQ ID NO: 116662 - DNA, 22 bp, synthetic construct
  misc_feature 1..22: note = chemically synthesized
  source 1..22: mol_type = other DNA
ggtctaggaggatgctaatccc

SEQ ID NO: 116663 - DNA, 22 bp, synthetic construct
  misc_feature 1..22: note = chemically synthesized
  source 1..22: mol_type = other DNA
gtctaggaggatgctaatccct

SEQ ID NO: 116664 - DNA, 22 bp, synthetic construct
  misc_feature 1..22: note = chemically synthesized
  source 1..22: mol_type = other DNA
ggaggatgctaatccctctttg

SEQ ID NO: 116665 - DNA, 22 bp, synthetic construct
  misc_feature 1..22: note = chemically synthesized
  source 1..22: mol_type = other DNA
atccctctttgacattcatcaa

SEQ ID NO: 116666 - DNA, 22 bp, synthetic construct
  misc_feature 1..22: note = chemically synthesized
  source 1..22: mol_type = other DNA
tttgacattcatcaagtctgcg

SEQ ID NO: 116667 - DNA, 22 bp, synthetic construct
  misc_feature 1..22: note = chemically synthesized
  source 1..22: mol_type = other DNA
tgacattcatcaagtctgcgtc

SEQ ID NO: 116668 - DNA, 22 bp, synthetic construct
  misc_feature 1..22: note = chemically synthesized
  source 1..22: mol_type = other DNA
gacattcatcaagtctgcgtcc

SEQ ID NO: 116669 - DNA, 22 bp, synthetic construct
  misc_feature 1..22: note = chemically synthesized
  source 1..22: mol_type = other DNA
acattcatcaagtctgcgtcca

SEQ ID NO: 116670 - DNA, 22 bp, synthetic construct
  misc_feature 1..22: note = chemically synthesized
  source 1..22: mol_type = other DNA
atcaagtctgcgtccatctagg

SEQ ID NO: 116671 - DNA, 22 bp, synthetic construct
  misc_feature 1..22: note = chemically synthesized
  source 1..22: mol_type = other DNA
cgtccatctagggagattcctt

SEQ ID NO: 116672 - DNA, 22 bp, synthetic construct
  misc_feature 1..22: note = chemically synthesized
  source 1..22: mol_type = other DNA
gggagattcctttgagggccaa

SEQ ID NO: 116673 - DNA, 22 bp, synthetic construct
  misc_feature 1..22: note = chemically synthesized
  source 1..22: mol_type = other DNA
ctttgagggccaaagacccaag

SEQ ID NO: 116674 - DNA, 22 bp, synthetic construct
  misc_feature 1..22: note = chemically synthesized
  source 1..22: mol_type = other DNA
tgagggccaaagacccaaggaa

SEQ ID NO: 116675 - DNA, 22 bp, synthetic construct
  misc_feature 1..22: note = chemically synthesized
  source 1..22: mol_type = other DNA
gagggccaaagacccaaggaag

SEQ ID NO: 116676 - DNA, 22 bp, synthetic construct
  misc_feature 1..22: note = chemically synthesized
  source 1..22: mol_type = other DNA
agggccaaagacccaaggaaga

SEQ ID NO: 116677 - DNA, 22 bp, synthetic construct
  misc_feature 1..22: note = chemically synthesized
  source 1..22: mol_type = other DNA
tataagtgccagtgcagcccac

SEQ ID NO: 116678 - DNA, 22 bp, synthetic construct
  misc_feature 1..22: note = chemically synthesized
  source 1..22: mol_type = other DNA
ataagtgccagtgcagcccacg

SEQ ID NO: 116679 - DNA, 22 bp, synthetic construct
  misc_feature 1..22: note = chemically synthesized
  source 1..22: mol_type = other DNA
taagtgccagtgcagcccacgt

SEQ ID NO: 116680 - DNA, 22 bp, synthetic construct
  misc_feature 1..22: note = chemically synthesized
  source 1..22: mol_type = other DNA
agtcaaatggaagatgctggca

SEQ ID NO: 116681 - DNA, 22 bp, synthetic construct
  misc_feature 1..22: note = chemically synthesized
  source 1..22: mol_type = other DNA
gcatggagtggaagggctgcat

SEQ ID NO: 116682 - DNA, 22 bp, synthetic construct
  misc_feature 1..22: note = chemically synthesized
  source 1..22: mol_type = other DNA
catgagaaagaagctacagaga

SEQ ID NO: 116683 - DNA, 22 bp, synthetic construct
  misc_feature 1..22: note = chemically synthesized
  source 1..22: mol_type = other DNA
cagagaagaaaggaccagtaag

SEQ ID NO: 116684 - DNA, 22 bp, synthetic construct
  misc_feature 1..22: note = chemically synthesized
  source 1..22: mol_type = other DNA
ctgaaggtcctttgttttgtgg

SEQ ID NO: 116685 - DNA, 22 bp, synthetic construct
  misc_feature 1..22: note = chemically synthesized
  source 1..22: mol_type = other DNA
aaggtcctttgttttgtggata

SEQ ID NO: 116686 - DNA, 22 bp, synthetic construct
  misc_feature 1..22: note = chemically synthesized
  source 1..22: mol_type = other DNA
tgttttgtggataaaggaagtc

SEQ ID NO: 116687 - DNA, 22 bp, synthetic construct
  misc_feature 1..22: note = chemically synthesized
  source 1..22: mol_type = other DNA
gttttgtggataaaggaagtca

SEQ ID NO: 116688 - DNA, 22 bp, synthetic construct
  misc_feature 1..22: note = chemically synthesized
  source 1..22: mol_type = other DNA
ttttgtggataaaggaagtcat

SEQ ID NO: 116689 - DNA, 22 bp, synthetic construct
  misc_feature 1..22: note = chemically synthesized
  source 1..22: mol_type = other DNA
tgtggataaaggaagtcattgg

SEQ ID NO: 116690 - DNA, 22 bp, synthetic construct
  misc_feature 1..22: note = chemically synthesized
  source 1..22: mol_type = other DNA
gtggataaaggaagtcattgga

SEQ ID NO: 116691 - DNA, 22 bp, synthetic construct
  misc_feature 1..22: note = chemically synthesized
  source 1..22: mol_type = other DNA
tggataaaggaagtcattggag

SEQ ID NO: 116692 - DNA, 22 bp, synthetic construct
  misc_feature 1..22: note = chemically synthesized
  source 1..22: mol_type = other DNA
gagtgacctctctaatatccct

SEQ ID NO: 116693 - DNA, 22 bp, synthetic construct
  misc_feature 1..22: note = chemically synthesized
  source 1..22: mol_type = other DNA
tctaatatcccttatctagcat

SEQ ID NO: 116694 - DNA, 22 bp, synthetic construct
  misc_feature 1..22: note = chemically synthesized
  source 1..22: mol_type = other DNA
taatatcccttatctagcatga

SEQ ID NO: 116695 - DNA, 22 bp, synthetic construct
  misc_feature 1..22: note = chemically synthesized
  source 1..22: mol_type = other DNA
atatcccttatctagcatgact

SEQ ID NO: 116696 - DNA, 22 bp, synthetic construct
  misc_feature 1..22: note = chemically synthesized
  source 1..22: mol_type = other DNA
atctagcatgactatatgcagg

SEQ ID NO: 116697 - DNA, 22 bp, synthetic construct
  misc_feature 1..22: note = chemically synthesized
  source 1..22: mol_type = other DNA
tctagcatgactatatgcaggg

SEQ ID NO: 116698 - DNA, 22 bp, synthetic construct
  misc_feature 1..22: note = chemically synthesized
  source 1..22: mol_type = other DNA
gcatgactatatgcagggttat

SEQ ID NO: 116699 - DNA, 22 bp, synthetic construct
  misc_feature 1..22: note = chemically synthesized
  source 1..22: mol_type = other DNA
tatgcagggttatggaataggg

SEQ ID NO: 116700 - DNA, 22 bp, synthetic construct
  misc_feature 1..22: note = chemically synthesized
  source 1..22: mol_type = other DNA
tggaatagggcagcttccagga

SEQ ID NO: 116701 - DNA, 22 bp, synthetic construct
  misc_feature 1..22: note = chemically synthesized
  source 1..22: mol_type = other DNA
ccaggaagatggccaatctgtt

SEQ ID NO: 116702 - DNA, 22 bp, synthetic construct
  misc_feature 1..22: note = chemically synthesized
  source 1..22: mol_type = other DNA
caggaagatggccaatctgttg

SEQ ID NO: 116703 - DNA, 22 bp, synthetic construct
  misc_feature 1..22: note = chemically synthesized
  source 1..22: mol_type = other DNA
ttgttagggctgctgttctatc

SEQ ID NO: 116704 - DNA, 22 bp, synthetic construct
  misc_feature 1..22: note = chemically synthesized
  source 1..22: mol_type = other DNA
ttagggctgctgttctatcata

SEQ ID NO: 116705 - DNA, 22 bp, synthetic construct
  misc_feature 1..22: note = chemically synthesized
  source 1..22: mol_type = other DNA
gggctgctgttctatcatatct

SEQ ID NO: 116706 - DNA, 22 bp, synthetic construct
  misc_feature 1..22: note = chemically synthesized
  source 1..22: mol_type = other DNA
ctgttctatcatatctcccgtg

SEQ ID NO: 116707 - DNA, 22 bp, synthetic construct
  misc_feature 1..22: note = chemically synthesized
  source 1..22: mol_type = other DNA
ttctatcatatctcccgtgatg

SEQ ID NO: 116708 - DNA, 22 bp, synthetic construct
  misc_feature 1..22: note = chemically synthesized
  source 1..22: mol_type = other DNA
tatcatatctcccgtgatgttt

SEQ ID NO: 116709 - DNA, 22 bp, synthetic construct
  misc_feature 1..22: note = chemically synthesized
  source 1..22: mol_type = other DNA
tcatatctcccgtgatgttttt

SEQ ID NO: 116710 - DNA, 22 bp, synthetic construct
  misc_feature 1..22: note = chemically synthesized
  source 1..22: mol_type = other DNA
ccgtgatgtttttgatggggaa

SEQ ID NO: 116711 - DNA, 22 bp, synthetic construct
  misc_feature 1..22: note = chemically synthesized
  source 1..22: mol_type = other DNA
ttgatggggaagacagatctgg

SEQ ID NO: 116712 - DNA, 22 bp, synthetic construct
  misc_feature 1..22: note = chemically synthesized
  source 1..22: mol_type = other DNA
tgatggggaagacagatctgga

SEQ ID NO: 116713 - DNA, 22 bp, synthetic construct
  misc_feature 1..22: note = chemically synthesized
  source 1..22: mol_type = other DNA
gatggggaagacagatctggac

SEQ ID NO: 116714 - DNA, 22 bp, synthetic construct
  misc_feature 1..22: note = chemically synthesized
  source 1..22: mol_type = other DNA
atggggaagacagatctggact

SEQ ID NO: 116715 - DNA, 22 bp, synthetic construct
  misc_feature 1..22: note = chemically synthesized
  source 1..22: mol_type = other DNA
gacttgttactgggctatgcct

SEQ ID NO: 116716 - DNA, 22 bp, synthetic construct
  misc_feature 1..22: note = chemically synthesized
  source 1..22: mol_type = other DNA
gttactgggctatgccttgtag

SEQ ID NO: 116717 - DNA, 22 bp, synthetic construct
  misc_feature 1..22: note = chemically synthesized
  source 1..22: mol_type = other DNA
ttactgggctatgccttgtaga

SEQ ID NO: 116718 - DNA, 22 bp, synthetic construct
  misc_feature 1..22: note = chemically synthesized
  source 1..22: mol_type = other DNA
ctgggctatgccttgtagagaa

SEQ ID NO: 116719 - DNA, 22 bp, synthetic construct
  misc_feature 1..22: note = chemically synthesized
  source 1..22: mol_type = other DNA
ggctatgccttgtagagaatga

SEQ ID NO: 116720 - DNA, 22 bp, synthetic construct
  misc_feature 1..22: note = chemically synthesized
  source 1..22: mol_type = other DNA
tgccttgtagagaatgatacag

SEQ ID NO: 116721 - DNA, 22 bp, synthetic construct
  misc_feature 1..22: note = chemically synthesized
  source 1..22: mol_type = other DNA
gtagagaatgatacagggttgt

SEQ ID NO: 116722 - DNA, 22 bp, synthetic construct
  misc_feature 1..22: note = chemically synthesized
  source 1..22: mol_type = other DNA
tagagaatgatacagggttgtg

SEQ ID NO: 116723 - DNA, 22 bp, synthetic construct
  misc_feature 1..22: note = chemically synthesized
  source 1..22: mol_type = other DNA
tggcaggcaaggaaacataatc

SEQ ID NO: 116724 - DNA, 22 bp, synthetic construct
  misc_feature 1..22: note = chemically synthesized
  source 1..22: mol_type = other DNA
agcaattgctccaattgatgaa

SEQ ID NO: 116725 - DNA, 22 bp, synthetic construct
  misc_feature 1..22: note = chemically synthesized
  source 1..22: mol_type = other DNA
ctccaattgatgaagcttctaa

SEQ ID NO: 116726 - DNA, 22 bp, synthetic construct
  misc_feature 1..22: note = chemically synthesized
  source 1..22: mol_type = other DNA
caattgatgaagcttctaacat

SEQ ID NO: 116727 - DNA, 22 bp, synthetic construct
  misc_feature 1..22: note = chemically synthesized
  source 1..22: mol_type = other DNA
atgaagcttctaacatttcaga

SEQ ID NO: 116728 - DNA, 22 bp, synthetic construct
  misc_feature 1..22: note = chemically synthesized
  source 1..22: mol_type = other DNA
ctaacatttcagagtgctttcc

SEQ ID NO: 116729 - DNA, 22 bp, synthetic construct
  misc_feature 1..22: note = chemically synthesized
  source 1..22: mol_type = other DNA
taacatttcagagtgctttcct

SEQ ID NO: 116730 - DNA, 22 bp, synthetic construct
  misc_feature 1..22: note = chemically synthesized
  source 1..22: mol_type = other DNA
acatttcagagtgctttcctcc

SEQ ID NO: 116731 - DNA, 22 bp, synthetic construct
  misc_feature 1..22: note = chemically synthesized
  source 1..22: mol_type = other DNA
cagagtgctttcctccacagcc

SEQ ID NO: 116732 - DNA, 22 bp, synthetic construct
  misc_feature 1..22: note = chemically synthesized
  source 1..22: mol_type = other DNA
agagtgctttcctccacagccc

SEQ ID NO: 116733 - DNA, 22 bp, synthetic construct
  misc_feature 1..22: note = chemically synthesized
  source 1..22: mol_type = other DNA
tcctccacagccccattaaacc

SEQ ID NO: 116734 - DNA, 22 bp, synthetic construct
  misc_feature 1..22: note = chemically synthesized
  source 1..22: mol_type = other DNA
cctccacagccccattaaacct

SEQ ID NO: 116735 - DNA, 22 bp, synthetic construct
  misc_feature 1..22: note = chemically synthesized
  source 1..22: mol_type = other DNA
ctccacagccccattaaaccta

SEQ ID NO: 116736 - DNA, 22 bp, synthetic construct
  misc_feature 1..22: note = chemically synthesized
  source 1..22: mol_type = other DNA
cacagccccattaaacctaatc

SEQ ID NO: 116737 - DNA, 22 bp, synthetic construct
  misc_feature 1..22: note = chemically synthesized
  source 1..22: mol_type = other DNA
aacctaatcatttctctcgaaa

SEQ ID NO: 116738 - DNA, 22 bp, synthetic construct
  misc_feature 1..22: note = chemically synthesized
  source 1..22: mol_type = other DNA
atcatttctctcgaaaagaggc

SEQ ID NO: 116739 - DNA, 22 bp, synthetic construct
  misc_feature 1..22: note = chemically synthesized
  source 1..22: mol_type = other DNA
ctctcgaaaagaggcagggccc

SEQ ID NO: 116740 - DNA, 22 bp, synthetic construct
  misc_feature 1..22: note = chemically synthesized
  source 1..22: mol_type = other DNA
tctcgaaaagaggcagggccca

SEQ ID NO: 116741 - DNA, 22 bp, synthetic construct
  misc_feature 1..22: note = chemically synthesized
  source 1..22: mol_type = other DNA
tcgaaaagaggcagggcccatg

SEQ ID NO: 116742 - DNA, 22 bp, synthetic construct
  misc_feature 1..22: note = chemically synthesized
  source 1..22: mol_type = other DNA
gaaaagaggcagggcccatgtg

SEQ ID NO: 116743 - DNA, 22 bp, synthetic construct
  misc_feature 1..22: note = chemically synthesized
  source 1..22: mol_type = other DNA
tcaacatagtaaaaaagctaag

SEQ ID NO: 116744 - DNA, 22 bp, synthetic construct
  misc_feature 1..22: note = chemically synthesized
  source 1..22: mol_type = other DNA
caacatagtaaaaaagctaagg

SEQ ID NO: 116745 - DNA, 22 bp, synthetic construct
  misc_feature 1..22: note = chemically synthesized
  source 1..22: mol_type = other DNA
aacatagtaaaaaagctaaggt

SEQ ID NO: 116746 - DNA, 22 bp, synthetic construct
  misc_feature 1..22: note = chemically synthesized
  source 1..22: mol_type = other DNA
aggtttagaaagattcagtaac

SEQ ID NO: 116747 - DNA, 22 bp, synthetic construct
  misc_feature 1..22: note = chemically synthesized
  source 1..22: mol_type = other DNA
agaaagattcagtaactttgcc

SEQ ID NO: 116748 - DNA, 22 bp, synthetic construct
  misc_feature 1..22: note = chemically synthesized
  source 1..22: mol_type = other DNA
gaaagattcagtaactttgcca

SEQ ID NO: 116749 - DNA, 22 bp, synthetic construct
  misc_feature 1..22: note = chemically synthesized
  source 1..22: mol_type = other DNA
agtaactttgccaaagccatat

SEQ ID NO: 116750 - DNA, 22 bp, synthetic construct
  misc_feature 1..22: note = chemically synthesized
  source 1..22: mol_type = other DNA
tgccaaagccatatggaaggat

SEQ ID NO: 116751 - DNA, 22 bp, synthetic construct
  misc_feature 1..22: note = chemically synthesized
  source 1..22: mol_type = other DNA
gccaaagccatatggaaggatt

SEQ ID NO: 116752 - DNA, 22 bp, synthetic construct
  misc_feature 1..22: note = chemically synthesized
  source 1..22: mol_type = other DNA
ccaaagccatatggaaggattg

SEQ ID NO: 116753 - DNA, 22 bp, synthetic construct
  misc_feature 1..22: note = chemically synthesized
  source 1..22: mol_type = other DNA
tccaaaaacctgtgcaagagct

SEQ ID NO: 116754 - DNA, 22 bp, synthetic construct
  misc_feature 1..22: note = chemically synthesized
  source 1..22: mol_type = other DNA
tgcaagagctcatggcttccca

SEQ ID NO: 116755 - DNA, 22 bp, synthetic construct
  misc_feature 1..22: note = chemically synthesized
  source 1..22: mol_type = other DNA
atggcttcccactccaaatacc

SEQ ID NO: 116756 - DNA, 22 bp, synthetic construct
  misc_feature 1..22: note = chemically synthesized
  source 1..22: mol_type = other DNA
cccactccaaataccttacgct

SEQ ID NO: 116757 - DNA, 22 bp, synthetic construct
  misc_feature 1..22: note = chemically synthesized
  source 1..22: mol_type = other DNA
ccactccaaataccttacgctt

SEQ ID NO: 116758 - DNA, 22 bp, synthetic construct
  misc_feature 1..22: note = chemically synthesized
  source 1..22: mol_type = other DNA
caaataccttacgcttcattgt

SEQ ID NO: 116759 - DNA, 22 bp, synthetic construct
  misc_feature 1..22: note = chemically synthesized
  source 1..22: mol_type = other DNA
acgcttcattgttgtcagatta

SEQ ID NO: 116760 - DNA, 22 bp, synthetic construct
  misc_feature 1..22: note = chemically synthesized
  source 1..22: mol_type = other DNA
cgcttcattgttgtcagattat

SEQ ID NO: 116761 - DNA, 22 bp, synthetic construct
  misc_feature 1..22: note = chemically synthesized
  source 1..22: mol_type = other DNA
cattgttgtcagattatttttc

SEQ ID NO: 116762 - DNA, 22 bp, synthetic construct
  misc_feature 1..22: note = chemically synthesized
  source 1..22: mol_type = other DNA
attgttgtcagattatttttca

SEQ ID NO: 116763 - DNA, 22 bp, synthetic construct
  misc_feature 1..22: note = chemically synthesized
  source 1..22: mol_type = other DNA
ttgtcagattatttttcaatct

SEQ ID NO: 116764 - DNA, 22 bp, synthetic construct
  misc_feature 1..22: note = chemically synthesized
  source 1..22: mol_type = other DNA
tcagattatttttcaatctttt

SEQ ID NO: 116765 - DNA, 22 bp, synthetic construct
  misc_feature 1..22: note = chemically synthesized
  source 1..22: mol_type = other DNA
tttttcaatcttttcttagagc

SEQ ID NO: 116766 - DNA, 22 bp, synthetic construct
  misc_feature 1..22: note = chemically synthesized
  source 1..22: mol_type = other DNA
ttcaatcttttcttagagctca

SEQ ID NO: 116767 - DNA, 22 bp, synthetic construct
  misc_feature 1..22: note = chemically synthesized
  source 1..22: mol_type = other DNA
tcaatcttttcttagagctcac

SEQ ID NO: 116768 - DNA, 22 bp, synthetic construct
  misc_feature 1..22: note = chemically synthesized
  source 1..22: mol_type = other DNA
caatcttttcttagagctcact

SEQ ID NO: 116769 - DNA, 22 bp, synthetic construct
  misc_feature 1..22: note = chemically synthesized
  source 1..22: mol_type = other DNA
aatcttttcttagagctcactg

SEQ ID NO: 116770 - DNA, 22 bp, synthetic construct
  misc_feature 1..22: note = chemically synthesized
  source 1..22: mol_type = other DNA
ttcttagagctcactgcaacat

SEQ ID NO: 116771 - DNA, 22 bp, synthetic construct
  misc_feature 1..22: note = chemically synthesized
  source 1..22: mol_type = other DNA
tcttagagctcactgcaacatt

SEQ ID NO: 116772 - DNA, 22 bp, synthetic construct
  misc_feature 1..22: note = chemically synthesized
  source 1..22: mol_type = other DNA
cttagagctcactgcaacattg

SEQ ID NO: 116773 - DNA, 22 bp, synthetic construct
  misc_feature 1..22: note = chemically synthesized
  source 1..22: mol_type = other DNA
ttagagctcactgcaacattgc

SEQ ID NO: 116774 - DNA, 22 bp, synthetic construct
  misc_feature 1..22: note = chemically synthesized
  source 1..22: mol_type = other DNA
agagctcactgcaacattgctc

SEQ ID NO: 116775 - DNA, 22 bp, synthetic construct
  misc_feature 1..22: note = chemically synthesized
  source 1..22: mol_type = other DNA
gagctcactgcaacattgctca

SEQ ID NO: 116776 - DNA, 22 bp, synthetic construct
  misc_feature 1..22: note = chemically synthesized
  source 1..22: mol_type = other DNA
actgcaacattgctcactggaa

SEQ ID NO: 116777 - DNA, 22 bp, synthetic construct
  misc_feature 1..22: note = chemically synthesized
  source 1..22: mol_type = other DNA
caacattgctcactggaatgct

SEQ ID NO: 116778 - DNA, 22 bp, synthetic construct
  misc_feature 1..22: note = chemically synthesized
  source 1..22: mol_type = other DNA
ctcactggaatgctggaaagta

SEQ ID NO: 116779 - DNA, 22 bp, synthetic construct
  misc_feature 1..22: note = chemically synthesized
  source 1..22: mol_type = other DNA
actggaatgctggaaagtacaa

SEQ ID NO: 116780 - DNA, 22 bp, synthetic construct
  misc_feature 1..22: note = chemically synthesized
  source 1..22: mol_type = other DNA
gaatgctggaaagtacaactaa

SEQ ID NO: 116781 - DNA, 22 bp, synthetic construct
  misc_feature 1..22: note = chemically synthesized
  source 1..22: mol_type = other DNA
gaaagtacaactaataaaatgt

SEQ ID NO: 116782 - DNA, 22 bp, synthetic construct
  misc_feature 1..22: note = chemically synthesized
  source 1..22: mol_type = other DNA
ataaaatgtgtctattgagtat

SEQ ID NO: 116783 - DNA, 22 bp, synthetic construct
  misc_feature 1..22: note = chemically synthesized
  source 1..22: mol_type = other DNA
ttgagtatttgcttctaactgt

SEQ ID NO: 116784 - DNA, 22 bp, synthetic construct
  misc_feature 1..22: note = chemically synthesized
  source 1..22: mol_type = other DNA
agtatttgcttctaactgtact

SEQ ID NO: 116785 - DNA, 22 bp, synthetic construct
  misc_feature 1..22: note = chemically synthesized
  source 1..22: mol_type = other DNA
gcttctaactgtactccattta

SEQ ID NO: 116786 - DNA, 22 bp, synthetic construct
  misc_feature 1..22: note = chemically synthesized
  source 1..22: mol_type = other DNA
cttctaactgtactccatttaa

SEQ ID NO: 116787 - DNA, 22 bp, synthetic construct
  misc_feature 1..22: note = chemically synthesized
  source 1..22: mol_type = other DNA
ctaactgtactccatttaaaat

SEQ ID NO: 116788 - DNA, 22 bp, synthetic construct
  misc_feature 1..22: note = chemically synthesized
  source 1..22: mol_type = other DNA
taactgtactccatttaaaatt

SEQ ID NO: 116789 - DNA, 22 bp, synthetic construct
  misc_feature 1..22: note = chemically synthesized
  source 1..22: mol_type = other DNA
actgtactccatttaaaattgc

SEQ ID NO: 116790 - DNA, 22 bp, synthetic construct
  misc_feature 1..22: note = chemically synthesized
  source 1..22: mol_type = other DNA
tactccatttaaaattgcatat

SEQ ID NO: 116791 - DNA, 22 bp, synthetic construct
  misc_feature 1..22: note = chemically synthesized
  source 1..22: mol_type = other DNA
catttaaaattgcatatgaatg

SEQ ID NO: 116792 - DNA, 22 bp, synthetic construct
  misc_feature 1..22: note = chemically synthesized
  source 1..22: mol_type = other DNA
aaaattgcatatgaatggctct

SEQ ID NO: 116793 - DNA, 22 bp, synthetic construct
  misc_feature 1..22: note = chemically synthesized
  source 1..22: mol_type = other DNA
aaattgcatatgaatggctctc

SEQ ID NO: 116794 - DNA, 22 bp, synthetic construct
  misc_feature 1..22: note = chemically synthesized
  source 1..22: mol_type = other DNA
catatgaatggctctctaatct

SEQ ID NO: 116795 - DNA, 22 bp, synthetic construct
  misc_feature 1..22: note = chemically synthesized
  source 1..22: mol_type = other DNA
tctaatctatggagtaggtaga

SEQ ID NO: 116796 - DNA, 22 bp, synthetic construct
  misc_feature 1..22: note = chemically synthesized
  source 1..22: mol_type = other DNA
taatctatggagtaggtagaat

SEQ ID NO: 116797 - DNA, 22 bp, synthetic construct
  misc_feature 1..22: note = chemically synthesized
  source 1..22: mol_type = other DNA
atctatggagtaggtagaattg

SEQ ID NO: 116798 - DNA, 22 bp, synthetic construct
  misc_feature 1..22: note = chemically synthesized
  source 1..22: mol_type = other DNA
tggagtaggtagaattgtctca

SEQ ID NO: 116799 - DNA, 22 bp, synthetic construct
  misc_feature 1..22: note = chemically synthesized
  source 1..22: mol_type = other DNA
tctcaatttttcagatgaagaa

SEQ ID NO: 116800 - DNA, 22 bp, synthetic construct
  misc_feature 1..22: note = chemically synthesized
  source 1..22: mol_type = other DNA
aatttttcagatgaagaaacta

SEQ ID NO: 116801 - DNA, 22 bp, synthetic construct
  misc_feature 1..22: note = chemically synthesized
  source 1..22: mol_type = other DNA
ttcagatgaagaaactaagatt

SEQ ID NO: 116802 - DNA, 22 bp, synthetic construct
  misc_feature 1..22: note = chemically synthesized
  source 1..22: mol_type = other DNA
tcagatgaagaaactaagatta

SEQ ID NO: 116803 - DNA, 22 bp, synthetic construct
  misc_feature 1..22: note = chemically synthesized
  source 1..22: mol_type = other DNA
cagatgaagaaactaagattaa

SEQ ID NO: 116804 - DNA, 22 bp, synthetic construct
  misc_feature 1..22: note = chemically synthesized
  source 1..22: mol_type = other DNA
agatgaagaaactaagattaat

SEQ ID NO: 116805 - DNA, 22 bp, synthetic construct
  misc_feature 1..22: note = chemically synthesized
  source 1..22: mol_type = other DNA
agattaatcagatactttgcac

SEQ ID NO: 116806 - DNA, 22 bp, synthetic construct
  misc_feature 1..22: note = chemically synthesized
  source 1..22: mol_type = other DNA
atcagatactttgcacaatcat

SEQ ID NO: 116807 - DNA, 22 bp, synthetic construct
  misc_feature 1..22: note = chemically synthesized
  source 1..22: mol_type = other DNA
tgcacaatcatagagtgaagag

SEQ ID NO: 116808 - DNA, 22 bp, synthetic construct
  misc_feature 1..22: note = chemically synthesized
  source 1..22: mol_type = other DNA
gcacaatcatagagtgaagagc

SEQ ID NO: 116809 - DNA, 22 bp, synthetic construct
  misc_feature 1..22: note = chemically synthesized
  source 1..22: mol_type = other DNA
cacaatcatagagtgaagagct

SEQ ID NO: 116810 - DNA, 22 bp, synthetic construct
  misc_feature 1..22: note = chemically synthesized
  source 1..22: mol_type = other DNA
ttgaagttatgattgtaataca

SEQ ID NO: 116811 - DNA, 22 bp, synthetic construct
  misc_feature 1..22: note = chemically synthesized
  source 1..22: mol_type = other DNA
aagttatgattgtaatacagat

SEQ ID NO: 116812 - DNA, 22 bp, synthetic construct
  misc_feature 1..22: note = chemically synthesized
  source 1..22: mol_type = other DNA
tgattgtaatacagatctggtc

SEQ ID NO: 116813 - DNA, 22 bp, synthetic construct
  misc_feature 1..22: note = chemically synthesized
  source 1..22: mol_type = other DNA
taatacagatctggtcccagag

SEQ ID NO: 116814 - DNA, 22 bp, synthetic construct
  misc_feature 1..22: note = chemically synthesized
  source 1..22: mol_type = other DNA
gtcccagagacactgctcttaa

SEQ ID NO: 116815 - DNA, 22 bp, synthetic construct
  misc_feature 1..22: note = chemically synthesized
  source 1..22: mol_type = other DNA
ctcttaaccacactgcactgcc

SEQ ID NO: 116816 - DNA, 22 bp, synthetic construct
  misc_feature 1..22: note = chemically synthesized
  source 1..22: mol_type = other DNA
ttaaccacactgcactgcctaa

SEQ ID NO: 116817 - DNA, 22 bp, synthetic construct
  misc_feature 1..22: note = chemically synthesized
  source 1..22: mol_type = other DNA
aaccacactgcactgcctaatg

SEQ ID NO: 116818 - DNA, 22 bp, synthetic construct
  misc_feature 1..22: note = chemically synthesized
  source 1..22: mol_type = other DNA
accacactgcactgcctaatga

SEQ ID NO: 116819 - DNA, 22 bp, synthetic construct
  misc_feature 1..22: note = chemically synthesized
  source 1..22: mol_type = other DNA
cactgcctaatgaaaatgtgcc

SEQ ID NO: 116820 - DNA, 22 bp, synthetic construct
  misc_feature 1..22: note = chemically synthesized
  source 1..22: mol_type = other DNA
cctaatgaaaatgtgcctaggc

SEQ ID NO: 116821 - DNA, 22 bp, synthetic construct
  misc_feature 1..22: note = chemically synthesized
  source 1..22: mol_type = other DNA
atgaaaatgtgcctaggctgca

SEQ ID NO: 116822 - DNA, 22 bp, synthetic construct
  misc_feature 1..22: note = chemically synthesized
  source 1..22: mol_type = other DNA
ggctgcaagacagggatgccct

SEQ ID NO: 116823 - DNA, 22 bp, synthetic construct
  misc_feature 1..22: note = chemically synthesized
  source 1..22: mol_type = other DNA
caagacagggatgccctctctc

SEQ ID NO: 116824 - DNA, 22 bp, synthetic construct
  misc_feature 1..22: note = chemically synthesized
  source 1..22: mol_type = other DNA
tctcaccactcctattcaacat

SEQ ID NO: 116825 - DNA, 22 bp, synthetic construct
  misc_feature 1..22: note = chemically synthesized
  source 1..22: mol_type = other DNA
tcaccactcctattcaacatag

SEQ ID NO: 116826 - DNA, 22 bp, synthetic construct
  misc_feature 1..22: note = chemically synthesized
  source 1..22: mol_type = other DNA
accactcctattcaacatagtg

SEQ ID NO: 116827 - DNA, 22 bp, synthetic construct
  misc_feature 1..22: note = chemically synthesized
  source 1..22: mol_type = other DNA
ctattcaacatagtgttggaag

SEQ ID NO: 116828 - DNA, 22 bp, synthetic construct
  misc_feature 1..22: note = chemically synthesized
  source 1..22: mol_type = other DNA
ttcaacatagtgttggaagttc

SEQ ID NO: 116829 - DNA, 22 bp, synthetic construct
  misc_feature 1..22: note = chemically synthesized
  source 1..22: mol_type = other DNA
aacatagtgttggaagttctgg

SEQ ID NO: 116830 - DNA, 22 bp, synthetic construct
  misc_feature 1..22: note = chemically synthesized
  source 1..22: mol_type = other DNA
gaagttctggcccgggcaatcg

SEQ ID NO: 116831 - DNA, 22 bp, synthetic construct
  misc_feature 1..22: note = chemically synthesized
  source 1..22: mol_type = other DNA
tggcccgggcaatcgggcagga

SEQ ID NO: 116832 - DNA, 22 bp, synthetic construct
  misc_feature 1..22: note = chemically synthesized
  source 1..22: mol_type = other DNA
gcccgggcaatcgggcaggaga

SEQ ID NO: 116833 - DNA, 22 bp, synthetic construct
  misc_feature 1..22: note = chemically synthesized
  source 1..22: mol_type = other DNA
aattatgtaaagagaaagtcaa

SEQ ID NO: 116834 - DNA, 22 bp, synthetic construct
  misc_feature 1..22: note = chemically synthesized
  source 1..22: mol_type = other DNA
tgtaaagagaaagtcaaattgt

SEQ ID NO: 116835 - DNA, 22 bp, synthetic construct
  misc_feature 1..22: note = chemically synthesized
  source 1..22: mol_type = other DNA
tccctgtttgcagatgacgtga

SEQ ID NO: 116836 - DNA, 22 bp, synthetic construct
  misc_feature 1..22: note = chemically synthesized
  source 1..22: mol_type = other DNA
tttgcagatgacgtgattgcat

SEQ ID NO: 116837 - DNA, 22 bp, synthetic construct
  misc_feature 1..22: note = chemically synthesized
  source 1..22: mol_type = other DNA
gcagatgacgtgattgcatatc

SEQ ID NO: 116838 - DNA, 22 bp, synthetic construct
  misc_feature 1..22: note = chemically synthesized
  source 1..22: mol_type = other DNA
cagatgacgtgattgcatatct

SEQ ID NO: 116839 - DNA, 22 bp, synthetic construct
  misc_feature 1..22: note = chemically synthesized
  source 1..22: mol_type = other DNA
catatctagaaaaccccattgt

SEQ ID NO: 116840 - DNA, 22 bp, synthetic construct
  misc_feature 1..22: note = chemically synthesized
  source 1..22: mol_type = other DNA
gaaaaccccattgtctcagccc

SEQ ID NO: 116841 - DNA, 22 bp, synthetic construct
  misc_feature 1..22: note = chemically synthesized
  source 1..22: mol_type = other DNA
tctcagcccaaaatccccttaa

SEQ ID NO: 116842 - DNA, 22 bp, synthetic construct
  misc_feature 1..22: note = chemically synthesized
  source 1..22: mol_type = other DNA
agcccaaaatccccttaagctg

SEQ ID NO: 116843 - DNA, 22 bp, synthetic construct
  misc_feature 1..22: note = chemically synthesized
  source 1..22: mol_type = other DNA
aagctgataagcaacttcagca

SEQ ID NO: 116844 - DNA, 22 bp, synthetic construct
  misc_feature 1..22: note = chemically synthesized
  source 1..22: mol_type = other DNA
agctgataagcaacttcagcaa

SEQ ID NO: 116845 - DNA, 22 bp, synthetic construct
  misc_feature 1..22: note = chemically synthesized
  source 1..22: mol_type = other DNA
ataagcaacttcagcaaagtct

SEQ ID NO: 116846 - DNA, 22 bp, synthetic construct
  misc_feature 1..22: note = chemically synthesized
  source 1..22: mol_type = other DNA
cagcaaagtctcaggatacaaa

SEQ ID NO: 116847 - DNA, 22 bp, synthetic construct
  misc_feature 1..22: note = chemically synthesized
  source 1..22: mol_type = other DNA
agcaaagtctcaggatacaaaa

SEQ ID NO: 116848 - DNA, 22 bp, synthetic construct
  misc_feature 1..22: note = chemically synthesized
  source 1..22: mol_type = other DNA
aggatacaaaatcaatgtgcaa

SEQ ID NO: 116849 - DNA, 22 bp, synthetic construct
  misc_feature 1..22: note = chemically synthesized
  source 1..22: mol_type = other DNA
ttatacaccaataacagacaaa

SEQ ID NO: 116850 - DNA, 22 bp, synthetic construct
  misc_feature 1..22: note = chemically synthesized
  source 1..22: mol_type = other DNA
atacaccaataacagacaaaca

SEQ ID NO: 116851 - DNA, 22 bp, synthetic construct
  misc_feature 1..22: note = chemically synthesized
  source 1..22: mol_type = other DNA
tacaccaataacagacaaacag

SEQ ID NO: 116852 - DNA, 22 bp, synthetic construct
  misc_feature 1..22: note = chemically synthesized
  source 1..22: mol_type = other DNA
ccattcacaattgcttcagaga

SEQ ID NO: 116853 - DNA, 22 bp, synthetic construct
  misc_feature 1..22: note = chemically synthesized
  source 1..22: mol_type = other DNA
acaattgcttcagagagaatat

SEQ ID NO: 116854 - DNA, 22 bp, synthetic construct
  misc_feature 1..22: note = chemically synthesized
  source 1..22: mol_type = other DNA
cttcagagagaatataatacct

SEQ ID NO: 116855 - DNA, 22 bp, synthetic construct
  misc_feature 1..22: note = chemically synthesized
  source 1..22: mol_type = other DNA
cagagagaatataatacctagg

SEQ ID NO: 116856 - DNA, 22 bp, synthetic construct
  misc_feature 1..22: note = chemically synthesized
  source 1..22: mol_type = other DNA
agagagaatataatacctagga

SEQ ID NO: 116857 - DNA, 22 bp, synthetic construct
  misc_feature 1..22: note = chemically synthesized
  source 1..22: mol_type = other DNA
ggaatccaacttacaagggatg

SEQ ID NO: 116858 - DNA, 22 bp, synthetic construct
  misc_feature 1..22: note = chemically synthesized
  source 1..22: mol_type = other DNA
acaagggatgtgaaggacctct

SEQ ID NO: 116859 - DNA, 22 bp, synthetic construct
  misc_feature 1..22: note = chemically synthesized
  source 1..22: mol_type = other DNA
caagggatgtgaaggacctctt

SEQ ID NO: 116860 - DNA, 22 bp, synthetic construct
  misc_feature 1..22: note = chemically synthesized
  source 1..22: mol_type = other DNA
ttcaaggagaactacaaaccac

SEQ ID NO: 116861 - DNA, 22 bp, synthetic construct
  misc_feature 1..22: note = chemically synthesized
  source 1..22: mol_type = other DNA
caaggagaactacaaaccactg

SEQ ID NO: 116862 - DNA, 22 bp, synthetic construct
  misc_feature 1..22: note = chemically synthesized
  source 1..22: mol_type = other DNA
aaggagaactacaaaccactgc

SEQ ID NO: 116863 - DNA, 22 bp, synthetic construct
  misc_feature 1..22: note = chemically synthesized
  source 1..22: mol_type = other DNA
caaaccactgctcaaggaaata

SEQ ID NO: 116864 - DNA, 22 bp, synthetic construct
  misc_feature 1..22: note = chemically synthesized
  source 1..22: mol_type = other DNA
ctcaaggaaataagatacaaac

SEQ ID NO: 116865 - DNA, 22 bp, synthetic construct
  misc_feature 1..22: note = chemically synthesized
  source 1..22: mol_type = other DNA
aaggaaataagatacaaacaaa

SEQ ID NO: 116866 - DNA, 22 bp, synthetic construct
  misc_feature 1..22: note = chemically synthesized
  source 1..22: mol_type = other DNA
catgctcatggataggaagaaa

SEQ ID NO: 116867 - DNA, 22 bp, synthetic construct
  misc_feature 1..22: note = chemically synthesized
  source 1..22: mol_type = other DNA
atggataggaagaaacaatatc

SEQ ID NO: 116868 - DNA, 22 bp, synthetic construct
  misc_feature 1..22: note = chemically synthesized
  source 1..22: mol_type = other DNA
cccaaggtaatttatagattca

SEQ ID NO: 116869 - DNA, 22 bp, synthetic construct
  misc_feature 1..22: note = chemically synthesized
  source 1..22: mol_type = other DNA
atagattcaatgccatccccat

SEQ ID NO: 116870 - DNA, 22 bp, synthetic construct
  misc_feature 1..22: note = chemically synthesized
  source 1..22: mol_type = other DNA
tagattcaatgccatccccatc

SEQ ID NO: 116871 - DNA, 22 bp, synthetic construct
  misc_feature 1..22: note = chemically synthesized
  source 1..22: mol_type = other DNA
aatgccatccccatcaagctac

SEQ ID NO: 116872 - DNA, 22 bp, synthetic construct
  misc_feature 1..22: note = chemically synthesized
  source 1..22: mol_type = other DNA
ccaatgactttcttcacagaat

SEQ ID NO: 116873 - DNA, 22 bp, synthetic construct
  misc_feature 1..22: note = chemically synthesized
  source 1..22: mol_type = other DNA
tcttcacagaattggaaaaaac

SEQ ID NO: 116874 - DNA, 22 bp, synthetic construct
  misc_feature 1..22: note = chemically synthesized
  source 1..22: mol_type = other DNA
cttcacagaattggaaaaaact

SEQ ID NO: 116875 - DNA, 22 bp, synthetic construct
  misc_feature 1..22: note = chemically synthesized
  source 1..22: mol_type = other DNA
ttcacagaattggaaaaaacta

SEQ ID NO: 116876 - DNA, 22 bp, synthetic construct
  misc_feature 1..22: note = chemically synthesized
  source 1..22: mol_type = other DNA
cacagaattggaaaaaactact

SEQ ID NO: 116877 - DNA, 22 bp, synthetic construct
  misc_feature 1..22: note = chemically synthesized
  source 1..22: mol_type = other DNA
acagaattggaaaaaactactt

SEQ ID NO: 116878 - DNA, 22 bp, synthetic construct
  misc_feature 1..22: note = chemically synthesized
  source 1..22: mol_type = other DNA
gaaaaaactactttaaagttca

SEQ ID NO: 116879 - DNA, 22 bp, synthetic construct
  misc_feature 1..22: note = chemically synthesized
  source 1..22: mol_type = other DNA
ctttaaagttcatatggaacca

SEQ ID NO: 116880 - DNA, 22 bp, synthetic construct
  misc_feature 1..22: note = chemically synthesized
  source 1..22: mol_type = other DNA
taaagttcatatggaaccaaaa

SEQ ID NO: 116881 - DNA, 22 bp, synthetic construct
  misc_feature 1..22: note = chemically synthesized
  source 1..22: mol_type = other DNA
aaagttcatatggaaccaaaaa

SEQ ID NO: 116882 - DNA, 22 bp, synthetic construct
  misc_feature 1..22: note = chemically synthesized
  source 1..22: mol_type = other DNA
aagttcatatggaaccaaaaaa

SEQ ID NO: 116883 - DNA, 22 bp, synthetic construct
  misc_feature 1..22: note = chemically synthesized
  source 1..22: mol_type = other DNA
atatggaaccaaaaaagagccc

SEQ ID NO: 116884 - DNA, 22 bp, synthetic construct
  misc_feature 1..22: note = chemically synthesized
  source 1..22: mol_type = other DNA
agccaaaagaacaaagctggag

SEQ ID NO: 116885 - DNA, 22 bp, synthetic construct
  misc_feature 1..22: note = chemically synthesized
  source 1..22: mol_type = other DNA
gaggcatcacactacctgattt

SEQ ID NO: 116886 - DNA, 22 bp, synthetic construct
  misc_feature 1..22: note = chemically synthesized
  source 1..22: mol_type = other DNA
cctgatttcaaactatactaca

SEQ ID NO: 116887 - DNA, 22 bp, synthetic construct
  misc_feature 1..22: note = chemically synthesized
  source 1..22: mol_type = other DNA
atttcaaactatactacaaggc

SEQ ID NO: 116888 - DNA, 22 bp, synthetic construct
  misc_feature 1..22: note = chemically synthesized
  source 1..22: mol_type = other DNA
caaactatactacaaggctaca

SEQ ID NO: 116889 - DNA, 22 bp, synthetic construct
  misc_feature 1..22: note = chemically synthesized
  source 1..22: mol_type = other DNA
aaactatactacaaggctacag

SEQ ID NO: 116890 - DNA, 22 bp, synthetic construct
  misc_feature 1..22: note = chemically synthesized
  source 1..22: mol_type = other DNA
tactacaaggctacagtaacca

SEQ ID NO: 116891 - DNA, 22 bp, synthetic construct
  misc_feature 1..22: note = chemically synthesized
  source 1..22: mol_type = other DNA
caaggctacagtaaccaaaaca

SEQ ID NO: 116892 - DNA, 22 bp, synthetic construct
  misc_feature 1..22: note = chemically synthesized
  source 1..22: mol_type = other DNA
cagtaaccaaaacagcatagta

SEQ ID NO: 116893 - DNA, 22 bp, synthetic construct
  misc_feature 1..22: note = chemically synthesized
  source 1..22: mol_type = other DNA
gtaccaaaacagagatatagac

SEQ ID NO: 116894 - DNA, 22 bp, synthetic construct
  misc_feature 1..22: note = chemically synthesized
  source 1..22: mol_type = other DNA
agaaataatgctgtctatctac

SEQ ID NO: 116895 - DNA, 22 bp, synthetic construct
  misc_feature 1..22: note = chemically synthesized
  source 1..22: mol_type = other DNA
tctatctacaactatctgatct

SEQ ID NO: 116896 - DNA, 22 bp, synthetic construct
  misc_feature 1..22: note = chemically synthesized
  source 1..22: mol_type = other DNA
tctacaactatctgatctttga

SEQ ID NO: 116897 - DNA, 22 bp, synthetic construct
  misc_feature 1..22: note = chemically synthesized
  source 1..22: mol_type = other DNA
caactatctgatctttgacaaa

SEQ ID NO: 116898 - DNA, 22 bp, synthetic construct
  misc_feature 1..22: note = chemically synthesized
  source 1..22: mol_type = other DNA
tctgatctttgacaaacctgag

SEQ ID NO: 116899 - DNA, 22 bp, synthetic construct
  misc_feature 1..22: note = chemically synthesized
  source 1..22: mol_type = other DNA
atctttgacaaacctgagaaaa

SEQ ID NO: 116900 - DNA, 22 bp, synthetic construct
  misc_feature 1..22: note = chemically synthesized
  source 1..22: mol_type = other DNA
tgacaaacctgagaaaaacaag

SEQ ID NO: 116901 - DNA, 22 bp, synthetic construct
  misc_feature 1..22: note = chemically synthesized
  source 1..22: mol_type = other DNA
gacaaacctgagaaaaacaaga

SEQ ID NO: 116902 - DNA, 22 bp, synthetic construct
  misc_feature 1..22: note = chemically synthesized
  source 1..22: mol_type = other DNA
acaaacctgagaaaaacaagaa

SEQ ID NO: 116903 - DNA, 22 bp, synthetic construct
  misc_feature 1..22: note = chemically synthesized
  source 1..22: mol_type = other DNA
agaaaaacaagaaatggggaaa

SEQ ID NO: 116904 - DNA, 22 bp, synthetic construct
  misc_feature 1..22: note = chemically synthesized
  source 1..22: mol_type = other DNA
cctgtttaataaatggtgctgg

SEQ ID NO: 116905 - DNA, 22 bp, synthetic construct
  misc_feature 1..22: note = chemically synthesized
  source 1..22: mol_type = other DNA
tttaataaatggtgctgggaaa

SEQ ID NO: 116906 - DNA, 22 bp, synthetic construct
  misc_feature 1..22: note = chemically synthesized
  source 1..22: mol_type = other DNA
aataaatggtgctgggaaaact

SEQ ID NO: 116907 - DNA, 22 bp, synthetic construct
  misc_feature 1..22: note = chemically synthesized
  source 1..22: mol_type = other DNA
ataaatggtgctgggaaaactg

SEQ ID NO: 116908 - DNA, 22 bp, synthetic construct
  misc_feature 1..22: note = chemically synthesized
  source 1..22: mol_type = other DNA
ggaaaactggctagccaaatgt

SEQ ID NO: 116909 - DNA, 22 bp, synthetic construct
  misc_feature 1..22: note = chemically synthesized
  source 1..22: mol_type = other DNA
gctagccaaatgtaggaagctg

SEQ ID NO: 116910 - DNA, 22 bp, synthetic construct
  misc_feature 1..22: note = chemically synthesized
  source 1..22: mol_type = other DNA
gccaaatgtaggaagctgaaac

SEQ ID NO: 116911 - DNA, 22 bp, synthetic construct
  misc_feature 1..22: note = chemically synthesized
  source 1..22: mol_type = other DNA
aaactggatcccttccttacac

SEQ ID NO: 116912 - DNA, 22 bp, synthetic construct
  misc_feature 1..22: note = chemically synthesized
  source 1..22: mol_type = other DNA
gatcccttccttacaccttata

SEQ ID NO: 116913 - DNA, 22 bp, synthetic construct
  misc_feature 1..22: note = chemically synthesized
  source 1..22: mol_type = other DNA
ccttacaccttatacaaaaatt

SEQ ID NO: 116914 - DNA, 22 bp, synthetic construct
  misc_feature 1..22: note = chemically synthesized
  source 1..22: mol_type = other DNA
cttacaccttatacaaaaatta

SEQ ID NO: 116915 - DNA, 22 bp, synthetic construct
  misc_feature 1..22: note = chemically synthesized
  source 1..22: mol_type = other DNA
acaccttatacaaaaattaact

SEQ ID NO: 116916 - DNA, 22 bp, synthetic construct
  misc_feature 1..22: note = chemically synthesized
  source 1..22: mol_type = other DNA
caccttatacaaaaattaactc

SEQ ID NO: 116917 - DNA, 22 bp, synthetic construct
  misc_feature 1..22: note = chemically synthesized
  source 1..22: mol_type = other DNA
atacaaaaattaactcaagatg

SEQ ID NO: 116918 - DNA, 22 bp, synthetic construct
  misc_feature 1..22: note = chemically synthesized
  source 1..22: mol_type = other DNA
tacaaaaattaactcaagatgg

SEQ ID NO: 116919 - DNA, 22 bp, synthetic construct
  misc_feature 1..22: note = chemically synthesized
  source 1..22: mol_type = other DNA
actcaagatggattaaagactt

SEQ ID NO: 116920 - DNA, 22 bp, synthetic construct
  misc_feature 1..22: note = chemically synthesized
  source 1..22: mol_type = other DNA
aagatggattaaagacttaaat

SEQ ID NO: 116921 - DNA, 22 bp, synthetic construct
  misc_feature 1..22: note = chemically synthesized
  source 1..22: mol_type = other DNA
aagacttaaatgttagacctaa

SEQ ID NO: 116922 - DNA, 22 bp, synthetic construct
  misc_feature 1..22: note = chemically synthesized
  source 1..22: mol_type = other DNA
aaatgttagacctaaaaccata

SEQ ID NO: 116923 - DNA, 22 bp, synthetic construct
  misc_feature 1..22: note = chemically synthesized
  source 1..22: mol_type = other DNA
aatgttagacctaaaaccataa

SEQ ID NO: 116924 - DNA, 22 bp, synthetic construct
  misc_feature 1..22: note = chemically synthesized
  source 1..22: mol_type = other DNA
gacctaaaaccataaaaactct

SEQ ID NO: 116925 - DNA, 22 bp, synthetic construct
  misc_feature 1..22: note = chemically synthesized
  source 1..22: mol_type = other DNA
aaaccataaaaactctagaaga

SEQ ID NO: 116926 - DNA, 22 bp, synthetic construct
  misc_feature 1..22: note = chemically synthesized
  source 1..22: mol_type = other DNA
tagaagaaaacctaagcaatac

SEQ ID NO: 116927 - DNA, 22 bp, synthetic construct
  misc_feature 1..22: note = chemically synthesized
  source 1..22: mol_type = other DNA
gaagaaaacctaagcaatacca

SEQ ID NO: 116928 - DNA, 22 bp, synthetic construct
  misc_feature 1..22: note = chemically synthesized
  source 1..22: mol_type = other DNA
agcaataccattcaggacatag

SEQ ID NO: 116929 - DNA, 22 bp, synthetic construct
  misc_feature 1..22: note = chemically synthesized
  source 1..22: mol_type = other DNA
aggacataggcatgggcatgga

SEQ ID NO: 116930 - DNA, 22 bp, synthetic construct
  misc_feature 1..22: note = chemically synthesized
  source 1..22: mol_type = other DNA
catgtctaaaacaccaaaagca

SEQ ID NO: 116931 - DNA, 22 bp, synthetic construct
  misc_feature 1..22: note = chemically synthesized
  source 1..22: mol_type = other DNA
atgtctaaaacaccaaaagcaa

SEQ ID NO: 116932 - DNA, 22 bp, synthetic construct
  misc_feature 1..22: note = chemically synthesized
  source 1..22: mol_type = other DNA
aaacaccaaaagcaatggcaac

SEQ ID NO: 116933 - DNA, 22 bp, synthetic construct
  misc_feature 1..22: note = chemically synthesized
  source 1..22: mol_type = other DNA
actaatgggatctaattaaact

SEQ ID NO: 116934 - DNA, 22 bp, synthetic construct
  misc_feature 1..22: note = chemically synthesized
  source 1..22: mol_type = other DNA
atgggatctaattaaactaaag

SEQ ID NO: 116935 - DNA, 22 bp, synthetic construct
  misc_feature 1..22: note = chemically synthesized
  source 1..22: mol_type = other DNA
attaaactaaagatcttctgca

SEQ ID NO: 116936 - DNA, 22 bp, synthetic construct
  misc_feature 1..22: note = chemically synthesized
  source 1..22: mol_type = other DNA
aactaaagatcttctgcacagc

SEQ ID NO: 116937 - DNA, 22 bp, synthetic construct
  misc_feature 1..22: note = chemically synthesized
  source 1..22: mol_type = other DNA
aagatcttctgcacagcaaaag

SEQ ID NO: 116938 - DNA, 22 bp, synthetic construct
  misc_feature 1..22: note = chemically synthesized
  source 1..22: mol_type = other DNA
ctgcacagcaaaagaaactacc

SEQ ID NO: 116939 - DNA, 22 bp, synthetic construct
  misc_feature 1..22: note = chemically synthesized
  source 1..22: mol_type = other DNA
tgcacagcaaaagaaactacca

SEQ ID NO: 116940 - DNA, 22 bp, synthetic construct
  misc_feature 1..22: note = chemically synthesized
  source 1..22: mol_type = other DNA
cacagcaaaagaaactaccatc

SEQ ID NO: 116941 - DNA, 22 bp, synthetic construct
  misc_feature 1..22: note = chemically synthesized
  source 1..22: mol_type = other DNA
ccatcagagtgaacaggcaacc

SEQ ID NO: 116942 - DNA, 22 bp, synthetic construct
  misc_feature 1..22: note = chemically synthesized
  source 1..22: mol_type = other DNA
cacaatgggagaaaatttttgc

SEQ ID NO: 116943 - DNA, 22 bp, synthetic construct
  misc_feature 1..22: note = chemically synthesized
  source 1..22: mol_type = other DNA
ttgcaatctactcatctgacaa

SEQ ID NO: 116944 - DNA, 22 bp, synthetic construct
  misc_feature 1..22: note = chemically synthesized
  source 1..22: mol_type = other DNA
tgcaatctactcatctgacaaa

SEQ ID NO: 116945 - DNA, 22 bp, synthetic construct
  misc_feature 1..22: note = chemically synthesized
  source 1..22: mol_type = other DNA
gcaatctactcatctgacaaag

SEQ ID NO: 116946 - DNA, 22 bp, synthetic construct
  misc_feature 1..22: note = chemically synthesized
  source 1..22: mol_type = other DNA
caatctactcatctgacaaagg

SEQ ID NO: 116947 - DNA, 22 bp, synthetic construct
  misc_feature 1..22: note = chemically synthesized
  source 1..22: mol_type = other DNA
ctcatctgacaaagggctaata

SEQ ID NO: 116948 - DNA, 22 bp, synthetic construct
  misc_feature 1..22: note = chemically synthesized
  source 1..22: mol_type = other DNA
atctgacaaagggctaatatcc

SEQ ID NO: 116949 - DNA, 22 bp, synthetic construct
  misc_feature 1..22: note = chemically synthesized
  source 1..22: mol_type = other DNA
acaaagggctaatatccagaat

SEQ ID NO: 116950 - DNA, 22 bp, synthetic construct
  misc_feature 1..22: note = chemically synthesized
  source 1..22: mol_type = other DNA
atatccagaatctacaatgaac

SEQ ID NO: 116951 - DNA, 22 bp, synthetic construct
  misc_feature 1..22: note = chemically synthesized
  source 1..22: mol_type = other DNA
caatgaactcaaacaaatttac

SEQ ID NO: 116952 - DNA, 22 bp, synthetic construct
  misc_feature 1..22: note = chemically synthesized
  source 1..22: mol_type = other DNA
aaacaaatttacaagagaaaaa

SEQ ID NO: 116953 - DNA, 22 bp, synthetic construct
  misc_feature 1..22: note = chemically synthesized
  source 1..22: mol_type = other DNA
acaagagaaaaaaaaccccatc

SEQ ID NO: 116954 - DNA, 22 bp, synthetic construct
  misc_feature 1..22: note = chemically synthesized
  source 1..22: mol_type = other DNA
caagagaaaaaaaaccccatca

SEQ ID NO: 116955 - DNA, 22 bp, synthetic construct
  misc_feature 1..22: note = chemically synthesized
  source 1..22: mol_type = other DNA
ctcaaaagaagacatttatgca

SEQ ID NO: 116956 - DNA, 22 bp, synthetic construct
  misc_feature 1..22: note = chemically synthesized
  source 1..22: mol_type = other DNA
tcaaaagaagacatttatgcag

SEQ ID NO: 116957 - DNA, 22 bp, synthetic construct
  misc_feature 1..22: note = chemically synthesized
  source 1..22: mol_type = other DNA
aaaagaagacatttatgcagcc

SEQ ID NO: 116958 - DNA, 22 bp, synthetic construct
  misc_feature 1..22: note = chemically synthesized
  source 1..22: mol_type = other DNA
atgcagccaaaagacacatgaa

SEQ ID NO: 116959 - DNA, 22 bp, synthetic construct
  misc_feature 1..22: note = chemically synthesized
  source 1..22: mol_type = other DNA
tgcagccaaaagacacatgaaa

SEQ ID NO: 116960 - DNA, 22 bp, synthetic construct
  misc_feature 1..22: note = chemically synthesized
  source 1..22: mol_type = other DNA
atcatcactggccatcagagaa

SEQ ID NO: 116961 - DNA, 22 bp, synthetic construct
  misc_feature 1..22: note = chemically synthesized
  source 1..22: mol_type = other DNA
gccatcagagaaatgcaaatca

SEQ ID NO: 116962 - DNA, 22 bp, synthetic construct
  misc_feature 1..22: note = chemically synthesized
  source 1..22: mol_type = other DNA
acaccagttagaatggcaatca

SEQ ID NO: 116963 - DNA, 22 bp, synthetic construct
  misc_feature 1..22: note = chemically synthesized
  source 1..22: mol_type = other DNA
gaatggcaatcattaaaaagtc

SEQ ID NO: 116964 - DNA, 22 bp, synthetic construct
  misc_feature 1..22: note = chemically synthesized
  source 1..22: mol_type = other DNA
aaaagtcaggaaacaacaggtg

SEQ ID NO: 116965 - DNA, 22 bp, synthetic construct
  misc_feature 1..22: note = chemically synthesized
  source 1..22: mol_type = other DNA
gagaggatgtggagaaatagga

SEQ ID NO: 116966 - DNA, 22 bp, synthetic construct
  misc_feature 1..22: note = chemically synthesized
  source 1..22: mol_type = other DNA
ttacactgttggtgggactgta

SEQ ID NO: 116967 - DNA, 22 bp, synthetic construct
  misc_feature 1..22: note = chemically synthesized
  source 1..22: mol_type = other DNA
tacactgttggtgggactgtaa

SEQ ID NO: 116968 - DNA, 22 bp, synthetic construct
  misc_feature 1..22: note = chemically synthesized
  source 1..22: mol_type = other DNA
acactgttggtgggactgtaaa

SEQ ID NO: 116969 - DNA, 22 bp, synthetic construct
  misc_feature 1..22: note = chemically synthesized
  source 1..22: mol_type = other DNA
cactgttggtgggactgtaaac

SEQ ID NO: 116970 - DNA, 22 bp, synthetic construct
  misc_feature 1..22: note = chemically synthesized
  source 1..22: mol_type = other DNA
ttggtgggactgtaaactagtt

SEQ ID NO: 116971 - DNA, 22 bp, synthetic construct
  misc_feature 1..22: note = chemically synthesized
  source 1..22: mol_type = other DNA
gtgggactgtaaactagttcaa

SEQ ID NO: 116972 - DNA, 22 bp, synthetic construct
  misc_feature 1..22: note = chemically synthesized
  source 1..22: mol_type = other DNA
taaactagttcaaacattgtgg

SEQ ID NO: 116973 - DNA, 22 bp, synthetic construct
  misc_feature 1..22: note = chemically synthesized
  source 1..22: mol_type = other DNA
gttcaaacattgtggaagtcag

SEQ ID NO: 116974 - DNA, 22 bp, synthetic construct
  misc_feature 1..22: note = chemically synthesized
  source 1..22: mol_type = other DNA
aaacattgtggaagtcagtgtg

SEQ ID NO: 116975 - DNA, 22 bp, synthetic construct
  misc_feature 1..22: note = chemically synthesized
  source 1..22: mol_type = other DNA
tggaagtcagtgtggtgattcc

SEQ ID NO: 116976 - DNA, 22 bp, synthetic construct
  misc_feature 1..22: note = chemically synthesized
  source 1..22: mol_type = other DNA
ctcagggatctagaactagaaa

SEQ ID NO: 116977 - DNA, 22 bp, synthetic construct
  misc_feature 1..22: note = chemically synthesized
  source 1..22: mol_type = other DNA
agggatctagaactagaaatac

SEQ ID NO: 116978 - DNA, 22 bp, synthetic construct
  misc_feature 1..22: note = chemically synthesized
  source 1..22: mol_type = other DNA
gaactagaaataccatttgacc

SEQ ID NO: 116979 - DNA, 22 bp, synthetic construct
  misc_feature 1..22: note = chemically synthesized
  source 1..22: mol_type = other DNA
gaaataccatttgacccagcca

SEQ ID NO: 116980 - DNA, 22 bp, synthetic construct
  misc_feature 1..22: note = chemically synthesized
  source 1..22: mol_type = other DNA
gacccagccatcccattactgg

SEQ ID NO: 116981 - DNA, 22 bp, synthetic construct
  misc_feature 1..22: note = chemically synthesized
  source 1..22: mol_type = other DNA
acccagccatcccattactggg

SEQ ID NO: 116982 - DNA, 22 bp, synthetic construct
  misc_feature 1..22: note = chemically synthesized
  source 1..22: mol_type = other DNA
ctgggtatacacccaaaggatt

SEQ ID NO: 116983 - DNA, 22 bp, synthetic construct
  misc_feature 1..22: note = chemically synthesized
  source 1..22: mol_type = other DNA
ggtatacacccaaaggattata

SEQ ID NO: 116984 - DNA, 22 bp, synthetic construct
  misc_feature 1..22: note = chemically synthesized
  source 1..22: mol_type = other DNA
taaatcatgctgctataaagac

SEQ ID NO: 116985 - DNA, 22 bp, synthetic construct
  misc_feature 1..22: note = chemically synthesized
  source 1..22: mol_type = other DNA
ctataaagacacatgcacacgt

SEQ ID NO: 116986 - DNA, 22 bp, synthetic construct
  misc_feature 1..22: note = chemically synthesized
  source 1..22: mol_type = other DNA
taaagacacatgcacacgtatg

SEQ ID NO: 116987 - DNA, 22 bp, synthetic construct
  misc_feature 1..22: note = chemically synthesized
  source 1..22: mol_type = other DNA
attgcggcactattcacaatag

SEQ ID NO: 116988 - DNA, 22 bp, synthetic construct
  misc_feature 1..22: note = chemically synthesized
  source 1..22: mol_type = other DNA
ttgcggcactattcacaatagc

SEQ ID NO: 116989 - DNA, 22 bp, synthetic construct
  misc_feature 1..22: note = chemically synthesized
  source 1..22: mol_type = other DNA
cggcactattcacaatagcaaa

SEQ ID NO: 116990 - DNA, 22 bp, synthetic construct
  misc_feature 1..22: note = chemically synthesized
  source 1..22: mol_type = other DNA
ttcacaatagcaaagacttgga

SEQ ID NO: 116991 - DNA, 22 bp, synthetic construct
  misc_feature 1..22: note = chemically synthesized
  source 1..22: mol_type = other DNA
acaatagcaaagacttggaacc

SEQ ID NO: 116992 - DNA, 22 bp, synthetic construct
  misc_feature 1..22: note = chemically synthesized
  source 1..22: mol_type = other DNA
ggaaccaacccaaatgtccaac

SEQ ID NO: 116993 - DNA, 22 bp, synthetic construct
  misc_feature 1..22: note = chemically synthesized
  source 1..22: mol_type = other DNA
gaaccaacccaaatgtccaaca

SEQ ID NO: 116994 - DNA, 22 bp, synthetic construct
  misc_feature 1..22: note = chemically synthesized
  source 1..22: mol_type = other DNA
gattaagaaaatgtggcacata

SEQ ID NO: 116995 - DNA, 22 bp, synthetic construct
  misc_feature 1..22: note = chemically synthesized
  source 1..22: mol_type = other DNA
agaaaatgtggcacatatacac

SEQ ID NO: 116996 - DNA, 22 bp, synthetic construct
  misc_feature 1..22: note = chemically synthesized
  source 1..22: mol_type = other DNA
tgcagccataaaaaatgatgag

SEQ ID NO: 116997 - DNA, 22 bp, synthetic construct
  misc_feature 1..22: note = chemically synthesized
  source 1..22: mol_type = other DNA
atgtcctttgtagggacatgga

SEQ ID NO: 116998 - DNA, 22 bp, synthetic construct
  misc_feature 1..22: note = chemically synthesized
  source 1..22: mol_type = other DNA
tgtagggacatggatgaagctg

SEQ ID NO: 116999 - DNA, 22 bp, synthetic construct
  misc_feature 1..22: note = chemically synthesized
  source 1..22: mol_type = other DNA
gtagggacatggatgaagctgg

SEQ ID NO: 117000 - DNA, 22 bp, synthetic construct
  misc_feature 1..22: note = chemically synthesized
  source 1..22: mol_type = other DNA
tagggacatggatgaagctgga

SEQ ID NO: 117001 - DNA, 22 bp, synthetic construct
  misc_feature 1..22: note = chemically synthesized
  source 1..22: mol_type = other DNA
gaaaccatcattctcagcaaac

SEQ ID NO: 117002 - DNA, 22 bp, synthetic construct
  misc_feature 1..22: note = chemically synthesized
  source 1..22: mol_type = other DNA
tcagcaaactatcacaaggaca

SEQ ID NO: 117003 - DNA, 22 bp, synthetic construct
  misc_feature 1..22: note = chemically synthesized
  source 1..22: mol_type = other DNA
agcaaactatcacaaggacaaa

SEQ ID NO: 117004 - DNA, 22 bp, synthetic construct
  misc_feature 1..22: note = chemically synthesized
  source 1..22: mol_type = other DNA
tcacaaggacaaaaagccaaac

SEQ ID NO: 117005 - DNA, 22 bp, synthetic construct
  misc_feature 1..22: note = chemically synthesized
  source 1..22: mol_type = other DNA
tcactcataggtgggaactgaa

SEQ ID NO: 117006 - DNA, 22 bp, synthetic construct
  misc_feature 1..22: note = chemically synthesized
  source 1..22: mol_type = other DNA
actcataggtgggaactgaaca

SEQ ID NO: 117007 - DNA, 22 bp, synthetic construct
  misc_feature 1..22: note = chemically synthesized
  source 1..22: mol_type = other DNA
ataggtgggaactgaacaatga

SEQ ID NO: 117008 - DNA, 22 bp, synthetic construct
  misc_feature 1..22: note = chemically synthesized
  source 1..22: mol_type = other DNA
aacaatgagaacacatggacac

SEQ ID NO: 117009 - DNA, 22 bp, synthetic construct
  misc_feature 1..22: note = chemically synthesized
  source 1..22: mol_type = other DNA
ttgtggggtgggaggagggggc

SEQ ID NO: 117010 - DNA, 22 bp, synthetic construct
  misc_feature 1..22: note = chemically synthesized
  source 1..22: mol_type = other DNA
tggggtgggaggagggggcagg

SEQ ID NO: 117011 - DNA, 22 bp, synthetic construct
  misc_feature 1..22: note = chemically synthesized
  source 1..22: mol_type = other DNA
ggagatatacctaatgttaaat

SEQ ID NO: 117012 - DNA, 22 bp, synthetic construct
  misc_feature 1..22: note = chemically synthesized
  source 1..22: mol_type = other DNA
atgttaaatggtgagttaatgg

SEQ ID NO: 117013 - DNA, 22 bp, synthetic construct
  misc_feature 1..22: note = chemically synthesized
  source 1..22: mol_type = other DNA
aatggtgagttaatgggtgcag

SEQ ID NO: 117014 - DNA, 22 bp, synthetic construct
  misc_feature 1..22: note = chemically synthesized
  source 1..22: mol_type = other DNA
atgggtgcagcacaccaacatg

SEQ ID NO: 117015 - DNA, 22 bp, synthetic construct
  misc_feature 1..22: note = chemically synthesized
  source 1..22: mol_type = other DNA
acctgcaccttgtgcacatgta

SEQ ID NO: 117016 - DNA, 22 bp, synthetic construct
  misc_feature 1..22: note = chemically synthesized
  source 1..22: mol_type = other DNA
caccttgtgcacatgtacccta

SEQ ID NO: 117017 - DNA, 22 bp, synthetic construct
  misc_feature 1..22: note = chemically synthesized
  source 1..22: mol_type = other DNA
gtgcacatgtaccctaaaactt

SEQ ID NO: 117018 - DNA, 22 bp, synthetic construct
  misc_feature 1..22: note = chemically synthesized
  source 1..22: mol_type = other DNA
tgcacatgtaccctaaaactta

SEQ ID NO: 117019 - DNA, 22 bp, synthetic construct
  misc_feature 1..22: note = chemically synthesized
  source 1..22: mol_type = other DNA
aaacttaaaagtataacaaaaa

SEQ ID NO: 117020 - DNA, 22 bp, synthetic construct
  misc_feature 1..22: note = chemically synthesized
  source 1..22: mol_type = other DNA
aaaagtataacaaaaaataagt

SEQ ID NO: 117021 - DNA, 22 bp, synthetic construct
  misc_feature 1..22: note = chemically synthesized
  source 1..22: mol_type = other DNA
aaagtataacaaaaaataagtt

SEQ ID NO: 117022 - DNA, 22 bp, synthetic construct
  misc_feature 1..22: note = chemically synthesized
  source 1..22: mol_type = other DNA
gaaaaaagaaatttacatatat

SEQ ID NO: 117023 - DNA, 22 bp, synthetic construct
  misc_feature 1..22: note = chemically synthesized
  source 1..22: mol_type = other DNA
acatatattagttatttaaata

SEQ ID NO: 117024 - DNA, 22 bp, synthetic construct
  misc_feature 1..22: note = chemically synthesized
  source 1..22: mol_type = other DNA
catatattagttatttaaatat

SEQ ID NO: 117025 - DNA, 22 bp, synthetic construct
  misc_feature 1..22: note = chemically synthesized
  source 1..22: mol_type = other DNA
gttatttaaatatgctggataa

SEQ ID NO: 117026 - DNA, 22 bp, synthetic construct
  misc_feature 1..22: note = chemically synthesized
  source 1..22: mol_type = other DNA
tttaaatatgctggataaatac

SEQ ID NO: 117027 - DNA, 22 bp, synthetic construct
  misc_feature 1..22: note = chemically synthesized
  source 1..22: mol_type = other DNA
aaatatgctggataaatactat

SEQ ID NO: 117028 - DNA, 22 bp, synthetic construct
  misc_feature 1..22: note = chemically synthesized
  source 1..22: mol_type = other DNA
aatatgctggataaatactatt

SEQ ID NO: 117029 - DNA, 22 bp, synthetic construct
  misc_feature 1..22: note = chemically synthesized
  source 1..22: mol_type = other DNA
gataaatactattacactcatt

SEQ ID NO: 117030 - DNA, 22 bp, synthetic construct
  misc_feature 1..22: note = chemically synthesized
  source 1..22: mol_type = other DNA
ttacactcatttcacaaagata

SEQ ID NO: 117031 - DNA, 22 bp, synthetic construct
  misc_feature 1..22: note = chemically synthesized
  source 1..22: mol_type = other DNA
cactcatttcacaaagatactg

SEQ ID NO: 117032 - DNA, 22 bp, synthetic construct
  misc_feature 1..22: note = chemically synthesized
  source 1..22: mol_type = other DNA
atttcacaaagatactgactct

SEQ ID NO: 117033 - DNA, 22 bp, synthetic construct
  misc_feature 1..22: note = chemically synthesized
  source 1..22: mol_type = other DNA
cacaaagatactgactctatat

SEQ ID NO: 117034 - DNA, 22 bp, synthetic construct
  misc_feature 1..22: note = chemically synthesized
  source 1..22: mol_type = other DNA
acaaagatactgactctatatc

SEQ ID NO: 117035 - DNA, 22 bp, synthetic construct
  misc_feature 1..22: note = chemically synthesized
  source 1..22: mol_type = other DNA
actctatatctttgcttgtttc

SEQ ID NO: 117036 - DNA, 22 bp, synthetic construct
  misc_feature 1..22: note = chemically synthesized
  source 1..22: mol_type = other DNA
tatatctttgcttgtttccctt

SEQ ID NO: 117037 - DNA, 22 bp, synthetic construct
  misc_feature 1..22: note = chemically synthesized
  source 1..22: mol_type = other DNA
tatctttgcttgtttcccttag

SEQ ID NO: 117038 - DNA, 22 bp, synthetic construct
  misc_feature 1..22: note = chemically synthesized
  source 1..22: mol_type = other DNA
tgcttgtttcccttaggttctc

SEQ ID NO: 117039 - DNA, 22 bp, synthetic construct
  misc_feature 1..22: note = chemically synthesized
  source 1..22: mol_type = other DNA
gcttgtttcccttaggttctct

SEQ ID NO: 117040 - DNA, 22 bp, synthetic construct
  misc_feature 1..22: note = chemically synthesized
  source 1..22: mol_type = other DNA
cttgtttcccttaggttctctg

SEQ ID NO: 117041 - DNA, 22 bp, synthetic construct
  misc_feature 1..22: note = chemically synthesized
  source 1..22: mol_type = other DNA
gtttcccttaggttctctggat

SEQ ID NO: 117042 - DNA, 22 bp, synthetic construct
  misc_feature 1..22: note = chemically synthesized
  source 1..22: mol_type = other DNA
tttcccttaggttctctggata

SEQ ID NO: 117043 - DNA, 22 bp, synthetic construct
  misc_feature 1..22: note = chemically synthesized
  source 1..22: mol_type = other DNA
cccttaggttctctggatattg

SEQ ID NO: 117044 - DNA, 22 bp, synthetic construct
  misc_feature 1..22: note = chemically synthesized
  source 1..22: mol_type = other DNA
ccttaggttctctggatattga

SEQ ID NO: 117045 - DNA, 22 bp, synthetic construct
  misc_feature 1..22: note = chemically synthesized
  source 1..22: mol_type = other DNA
aggttctctggatattgagaga

SEQ ID NO: 117046 - DNA, 22 bp, synthetic construct
  misc_feature 1..22: note = chemically synthesized
  source 1..22: mol_type = other DNA
ggttctctggatattgagagag

SEQ ID NO: 117047 - DNA, 22 bp, synthetic construct
  misc_feature 1..22: note = chemically synthesized
  source 1..22: mol_type = other DNA
tctggatattgagagaggctaa

SEQ ID NO: 117048 - DNA, 22 bp, synthetic construct
  misc_feature 1..22: note = chemically synthesized
  source 1..22: mol_type = other DNA
tggatattgagagaggctaatg

SEQ ID NO: 117049 - DNA, 22 bp, synthetic construct
  misc_feature 1..22: note = chemically synthesized
  source 1..22: mol_type = other DNA
gatattgagagaggctaatgta

SEQ ID NO: 117050 - DNA, 22 bp, synthetic construct
  misc_feature 1..22: note = chemically synthesized
  source 1..22: mol_type = other DNA
agagaggctaatgtaattacct

SEQ ID NO: 117051 - DNA, 22 bp, synthetic construct
  misc_feature 1..22: note = chemically synthesized
  source 1..22: mol_type = other DNA
atgtaattacctgggtaattgc

SEQ ID NO: 117052 - DNA, 22 bp, synthetic construct
  misc_feature 1..22: note = chemically synthesized
  source 1..22: mol_type = other DNA
cctgggtaattgctcctcaggg

SEQ ID NO: 117053 - DNA, 22 bp, synthetic construct
  misc_feature 1..22: note = chemically synthesized
  source 1..22: mol_type = other DNA
ggtaattgctcctcagggaacc

SEQ ID NO: 117054 - DNA, 22 bp, synthetic construct
  misc_feature 1..22: note = chemically synthesized
  source 1..22: mol_type = other DNA
ctcctcagggaacctaactttc

SEQ ID NO: 117055 - DNA, 22 bp, synthetic construct
  misc_feature 1..22: note = chemically synthesized
  source 1..22: mol_type = other DNA
ctcagggaacctaactttctcc

SEQ ID NO: 117056 - DNA, 22 bp, synthetic construct
  misc_feature 1..22: note = chemically synthesized
  source 1..22: mol_type = other DNA
agggaacctaactttctcccca

SEQ ID NO: 117057 - DNA, 22 bp, synthetic construct
  misc_feature 1..22: note = chemically synthesized
  source 1..22: mol_type = other DNA
actttctccccattactctact

SEQ ID NO: 117058 - DNA, 22 bp, synthetic construct
  misc_feature 1..22: note = chemically synthesized
  source 1..22: mol_type = other DNA
tctccccattactctactccta

SEQ ID NO: 117059 - DNA, 22 bp, synthetic construct
  misc_feature 1..22: note = chemically synthesized
  source 1..22: mol_type = other DNA
ctccccattactctactcctag

SEQ ID NO: 117060 - DNA, 22 bp, synthetic construct
  misc_feature 1..22: note = chemically synthesized
  source 1..22: mol_type = other DNA
tccccattactctactcctaga

SEQ ID NO: 117061 - DNA, 22 bp, synthetic construct
  misc_feature 1..22: note = chemically synthesized
  source 1..22: mol_type = other DNA
cccattactctactcctagaga

SEQ ID NO: 117062 - DNA, 22 bp, synthetic construct
  misc_feature 1..22: note = chemically synthesized
  source 1..22: mol_type = other DNA
ctctactcctagagactctgat

SEQ ID NO: 117063 - DNA, 22 bp, synthetic construct
  misc_feature 1..22: note = chemically synthesized
  source 1..22: mol_type = other DNA
tactcctagagactctgatcag

SEQ ID NO: 117064 - DNA, 22 bp, synthetic construct
  misc_feature 1..22: note = chemically synthesized
  source 1..22: mol_type = other DNA
ctcctagagactctgatcagct

SEQ ID NO: 117065 - DNA, 22 bp, synthetic construct
  misc_feature 1..22: note = chemically synthesized
  source 1..22: mol_type = other DNA
ctagagactctgatcagctttt

SEQ ID NO: 117066 - DNA, 22 bp, synthetic construct
  misc_feature 1..22: note = chemically synthesized
  source 1..22: mol_type = other DNA
gagactctgatcagctttttca

SEQ ID NO: 117067 - DNA, 22 bp, synthetic construct
  misc_feature 1..22: note = chemically synthesized
  source 1..22: mol_type = other DNA
tgatcagctttttcaaaaaatg

SEQ ID NO: 117068 - DNA, 22 bp, synthetic construct
  misc_feature 1..22: note = chemically synthesized
  source 1..22: mol_type = other DNA
atcagctttttcaaaaaatggg

SEQ ID NO: 117069 - DNA, 22 bp, synthetic construct
  misc_feature 1..22: note = chemically synthesized
  source 1..22: mol_type = other DNA
tttcaaaaaatgggcagcattc

SEQ ID NO: 117070 - DNA, 22 bp, synthetic construct
  misc_feature 1..22: note = chemically synthesized
  source 1..22: mol_type = other DNA
ttcaaaaaatgggcagcattcc

SEQ ID NO: 117071 - DNA, 22 bp, synthetic construct
  misc_feature 1..22: note = chemically synthesized
  source 1..22: mol_type = other DNA
tcaaaaaatgggcagcattcca

SEQ ID NO: 117072 - DNA, 22 bp, synthetic construct
  misc_feature 1..22: note = chemically synthesized
  source 1..22: mol_type = other DNA
caaaaaatgggcagcattccag

SEQ ID NO: 117073 - DNA, 22 bp, synthetic construct
  misc_feature 1..22: note = chemically synthesized
  source 1..22: mol_type = other DNA
aaaaaatgggcagcattccagc

SEQ ID NO: 117074 - DNA, 22 bp, synthetic construct
  misc_feature 1..22: note = chemically synthesized
  source 1..22: mol_type = other DNA
cagccccaggactaagaagata

SEQ ID NO: 117075 - DNA, 22 bp, synthetic construct
  misc_feature 1..22: note = chemically synthesized
  source 1..22: mol_type = other DNA
agaagatatgaatgccacagtg

SEQ ID NO: 117076 - DNA, 22 bp, synthetic construct
  misc_feature 1..22: note = chemically synthesized
  source 1..22: mol_type = other DNA
gctgaagtgagcttccccatcc

SEQ ID NO: 117077 - DNA, 22 bp, synthetic construct
  misc_feature 1..22: note = chemically synthesized
  source 1..22: mol_type = other DNA
ctgaagtgagcttccccatccc

SEQ ID NO: 117078 - DNA, 22 bp, synthetic construct
  misc_feature 1..22: note = chemically synthesized
  source 1..22: mol_type = other DNA
aagtgagcttccccatcccacc

SEQ ID NO: 117079 - DNA, 22 bp, synthetic construct
  misc_feature 1..22: note = chemically synthesized
  source 1..22: mol_type = other DNA
ccccatcccacctgaggctcag

SEQ ID NO: 117080 - DNA, 22 bp, synthetic construct
  misc_feature 1..22: note = chemically synthesized
  source 1..22: mol_type = other DNA
cccatcccacctgaggctcaga

SEQ ID NO: 117081 - DNA, 22 bp, synthetic construct
  misc_feature 1..22: note = chemically synthesized
  source 1..22: mol_type = other DNA
aggctcagaggccagtttcact

SEQ ID NO: 117082 - DNA, 22 bp, synthetic construct
  misc_feature 1..22: note = chemically synthesized
  source 1..22: mol_type = other DNA
agaggccagtttcacttgtggt

SEQ ID NO: 117083 - DNA, 22 bp, synthetic construct
  misc_feature 1..22: note = chemically synthesized
  source 1..22: mol_type = other DNA
cacttgtggtgagtgcacaagc

SEQ ID NO: 117084 - DNA, 22 bp, synthetic construct
  misc_feature 1..22: note = chemically synthesized
  source 1..22: mol_type = other DNA
acttgtggtgagtgcacaagcc

SEQ ID NO: 117085 - DNA, 22 bp, synthetic construct
  misc_feature 1..22: note = chemically synthesized
  source 1..22: mol_type = other DNA
gtggtgagtgcacaagcccatg

SEQ ID NO: 117086 - DNA, 22 bp, synthetic construct
  misc_feature 1..22: note = chemically synthesized
  source 1..22: mol_type = other DNA
tggtgagtgcacaagcccatga

SEQ ID NO: 117087 - DNA, 22 bp, synthetic construct
  misc_feature 1..22: note = chemically synthesized
  source 1..22: mol_type = other DNA
atatggcttggctctgtgtctc

SEQ ID NO: 117088 - DNA, 22 bp, synthetic construct
  misc_feature 1..22: note = chemically synthesized
  source 1..22: mol_type = other DNA
ggctctgtgtctccacccaaat

SEQ ID NO: 117089 - DNA, 22 bp, synthetic construct
  misc_feature 1..22: note = chemically synthesized
  source 1..22: mol_type = other DNA
gctctgtgtctccacccaaatt

SEQ ID NO: 117090 - DNA, 22 bp, synthetic construct
  misc_feature 1..22: note = chemically synthesized
  source 1..22: mol_type = other DNA
tgtgtctccacccaaatttcat

SEQ ID NO: 117091 - DNA, 22 bp, synthetic construct
  misc_feature 1..22: note = chemically synthesized
  source 1..22: mol_type = other DNA
tgtctccacccaaatttcatat

SEQ ID NO: 117092 - DNA, 22 bp, synthetic construct
  misc_feature 1..22: note = chemically synthesized
  source 1..22: mol_type = other DNA
cacccaaatttcatattgaatt

SEQ ID NO: 117093 - DNA, 22 bp, synthetic construct
  misc_feature 1..22: note = chemically synthesized
  source 1..22: mol_type = other DNA
catattgaattgtaatccccat

SEQ ID NO: 117094 - DNA, 22 bp, synthetic construct
  misc_feature 1..22: note = chemically synthesized
  source 1..22: mol_type = other DNA
atattgaattgtaatccccata

SEQ ID NO: 117095 - DNA, 22 bp, synthetic construct
  misc_feature 1..22: note = chemically synthesized
  source 1..22: mol_type = other DNA
aattgtaatccccataatccct

SEQ ID NO: 117096 - DNA, 22 bp, synthetic construct
  misc_feature 1..22: note = chemically synthesized
  source 1..22: mol_type = other DNA
taatccccataatccctatatg

SEQ ID NO: 117097 - DNA, 22 bp, synthetic construct
  misc_feature 1..22: note = chemically synthesized
  source 1..22: mol_type = other DNA
tatgtcgggggagggaccaggt

SEQ ID NO: 117098 - DNA, 22 bp, synthetic construct
  misc_feature 1..22: note = chemically synthesized
  source 1..22: mol_type = other DNA
ttggatcatgggagcagtttcc

SEQ ID NO: 117099 - DNA, 22 bp, synthetic construct
  misc_feature 1..22: note = chemically synthesized
  source 1..22: mol_type = other DNA
gatcatgggagcagtttccccc

SEQ ID NO: 117100 - DNA, 22 bp, synthetic construct
  misc_feature 1..22: note = chemically synthesized
  source 1..22: mol_type = other DNA
cccccatgcagttctcgtgata

SEQ ID NO: 117101 - DNA, 22 bp, synthetic construct
  misc_feature 1..22: note = chemically synthesized
  source 1..22: mol_type = other DNA
ccccatgcagttctcgtgatac

SEQ ID NO: 117102 - DNA, 22 bp, synthetic construct
  misc_feature 1..22: note = chemically synthesized
  source 1..22: mol_type = other DNA
tcgtgatactgagtgagttttc

SEQ ID NO: 117103 - DNA, 22 bp, synthetic construct
  misc_feature 1..22: note = chemically synthesized
  source 1..22: mol_type = other DNA
gtgatactgagtgagttttcat

SEQ ID NO: 117104 - DNA, 22 bp, synthetic construct
  misc_feature 1..22: note = chemically synthesized
  source 1..22: mol_type = other DNA
agtgagttttcatgagatctga

SEQ ID NO: 117105 - DNA, 22 bp, synthetic construct
  misc_feature 1..22: note = chemically synthesized
  source 1..22: mol_type = other DNA
tcatgagatctgatggttttat

SEQ ID NO: 117106 - DNA, 22 bp, synthetic construct
  misc_feature 1..22: note = chemically synthesized
  source 1..22: mol_type = other DNA
catgagatctgatggttttata

SEQ ID NO: 117107 - DNA, 22 bp, synthetic construct
  misc_feature 1..22: note = chemically synthesized
  source 1..22: mol_type = other DNA
atgagatctgatggttttataa

SEQ ID NO: 117108 - DNA, 22 bp, synthetic construct
  misc_feature 1..22: note = chemically synthesized
  source 1..22: mol_type = other DNA
atggttttataaggcagttttc

SEQ ID NO: 117109 - DNA, 22 bp, synthetic construct
  misc_feature 1..22: note = chemically synthesized
  source 1..22: mol_type = other DNA
tataaggcagttttccctcttc

SEQ ID NO: 117110 - DNA, 22 bp, synthetic construct
  misc_feature 1..22: note = chemically synthesized
  source 1..22: mol_type = other DNA
ataaggcagttttccctcttct

SEQ ID NO: 117111 - DNA, 22 bp, synthetic construct
  misc_feature 1..22: note = chemically synthesized
  source 1..22: mol_type = other DNA
taaggcagttttccctcttctt

SEQ ID NO: 117112 - DNA, 22 bp, synthetic construct
  misc_feature 1..22: note = chemically synthesized
  source 1..22: mol_type = other DNA
tccctcttcttgctcactctct

SEQ ID NO: 117113 - DNA, 22 bp, synthetic construct
  misc_feature 1..22: note = chemically synthesized
  source 1..22: mol_type = other DNA
ccctcttcttgctcactctctc

SEQ ID NO: 117114 - DNA, 22 bp, synthetic construct
  misc_feature 1..22: note = chemically synthesized
  source 1..22: mol_type = other DNA
cctcttcttgctcactctctct

SEQ ID NO: 117115 - DNA, 22 bp, synthetic construct
  misc_feature 1..22: note = chemically synthesized
  source 1..22: mol_type = other DNA
ttcttgctcactctctcttgcc

SEQ ID NO: 117116 - DNA, 22 bp, synthetic construct
  misc_feature 1..22: note = chemically synthesized
  source 1..22: mol_type = other DNA
cttgctcactctctcttgcctg

SEQ ID NO: 117117 - DNA, 22 bp, synthetic construct
  misc_feature 1..22: note = chemically synthesized
  source 1..22: mol_type = other DNA
ttgctcactctctcttgcctgc

SEQ ID NO: 117118 - DNA, 22 bp, synthetic construct
  misc_feature 1..22: note = chemically synthesized
  source 1..22: mol_type = other DNA
gctcactctctcttgcctgcca

SEQ ID NO: 117119 - DNA, 22 bp, synthetic construct
  misc_feature 1..22: note = chemically synthesized
  source 1..22: mol_type = other DNA
ctcactctctcttgcctgccac

SEQ ID NO: 117120 - DNA, 22 bp, synthetic construct
  misc_feature 1..22: note = chemically synthesized
  source 1..22: mol_type = other DNA
actctctcttgcctgccaccaa

SEQ ID NO: 117121 - DNA, 22 bp, synthetic construct
  misc_feature 1..22: note = chemically synthesized
  source 1..22: mol_type = other DNA
tctcttgcctgccaccaagtaa

SEQ ID NO: 117122 - DNA, 22 bp, synthetic construct
  misc_feature 1..22: note = chemically synthesized
  source 1..22: mol_type = other DNA
tcttgcctgccaccaagtaaga

SEQ ID NO: 117123 - DNA, 22 bp, synthetic construct
  misc_feature 1..22: note = chemically synthesized
  source 1..22: mol_type = other DNA
ttgcctgccaccaagtaagatg

SEQ ID NO: 117124 - DNA, 22 bp, synthetic construct
  misc_feature 1..22: note = chemically synthesized
  source 1..22: mol_type = other DNA
gcctgccaccaagtaagatgtg

SEQ ID NO: 117125 - DNA, 22 bp, synthetic construct
  misc_feature 1..22: note = chemically synthesized
  source 1..22: mol_type = other DNA
cctgccaccaagtaagatgtgc

SEQ ID NO: 117126 - DNA, 22 bp, synthetic construct
  misc_feature 1..22: note = chemically synthesized
  source 1..22: mol_type = other DNA
ccaccaagtaagatgtgcctgc

SEQ ID NO: 117127 - DNA, 22 bp, synthetic construct
  misc_feature 1..22: note = chemically synthesized
  source 1..22: mol_type = other DNA
cttctccttctgccataattgt

SEQ ID NO: 117128 - DNA, 22 bp, synthetic construct
  misc_feature 1..22: note = chemically synthesized
  source 1..22: mol_type = other DNA
ctccttctgccataattgtaag

SEQ ID NO: 117129 - DNA, 22 bp, synthetic construct
  misc_feature 1..22: note = chemically synthesized
  source 1..22: mol_type = other DNA
tccttctgccataattgtaagt

SEQ ID NO: 117130 - DNA, 22 bp, synthetic construct
  misc_feature 1..22: note = chemically synthesized
  source 1..22: mol_type = other DNA
cttctgccataattgtaagttt

SEQ ID NO: 117131 - DNA, 22 bp, synthetic construct
  misc_feature 1..22: note = chemically synthesized
  source 1..22: mol_type = other DNA
ctgccataattgtaagtttcct

SEQ ID NO: 117132 - DNA, 22 bp, synthetic construct
  misc_feature 1..22: note = chemically synthesized
  source 1..22: mol_type = other DNA
tgccataattgtaagtttcctg

SEQ ID NO: 117133 - DNA, 22 bp, synthetic construct
  misc_feature 1..22: note = chemically synthesized
  source 1..22: mol_type = other DNA
ccataattgtaagtttcctgag

SEQ ID NO: 117134 - DNA, 22 bp, synthetic construct
  misc_feature 1..22: note = chemically synthesized
  source 1..22: mol_type = other DNA
taagtttcctgaggcctcccca

SEQ ID NO: 117135 - DNA, 22 bp, synthetic construct
  misc_feature 1..22: note = chemically synthesized
  source 1..22: mol_type = other DNA
cctgaggcctccccagctatgt

SEQ ID NO: 117136 - DNA, 22 bp, synthetic construct
  misc_feature 1..22: note = chemically synthesized
  source 1..22: mol_type = other DNA
ctgaggcctccccagctatgtg

SEQ ID NO: 117137 - DNA, 22 bp, synthetic construct
  misc_feature 1..22: note = chemically synthesized
  source 1..22: mol_type = other DNA
aggcctccccagctatgtggaa

SEQ ID NO: 117138 - DNA, 22 bp, synthetic construct
  misc_feature 1..22: note = chemically synthesized
  source 1..22: mol_type = other DNA
cccagctatgtggaaatgtgag

SEQ ID NO: 117139 - DNA, 22 bp, synthetic construct
  misc_feature 1..22: note = chemically synthesized
  source 1..22: mol_type = other DNA
tgtggaaatgtgagtcaattaa

SEQ ID NO: 117140 - DNA, 22 bp, synthetic construct
  misc_feature 1..22: note = chemically synthesized
  source 1..22: mol_type = other DNA
aacctcctttgttaataaatta

SEQ ID NO: 117141 - DNA, 22 bp, synthetic construct
  misc_feature 1..22: note = chemically synthesized
  source 1..22: mol_type = other DNA
ctttgttaataaattacccagt

SEQ ID NO: 117142 - DNA, 22 bp, synthetic construct
  misc_feature 1..22: note = chemically synthesized
  source 1..22: mol_type = other DNA
tgttaataaattacccagtctc

SEQ ID NO: 117143 - DNA, 22 bp, synthetic construct
  misc_feature 1..22: note = chemically synthesized
  source 1..22: mol_type = other DNA
gttaataaattacccagtctca

SEQ ID NO: 117144 - DNA, 22 bp, synthetic construct
  misc_feature 1..22: note = chemically synthesized
  source 1..22: mol_type = other DNA
ttaataaattacccagtctcag

SEQ ID NO: 117145 - DNA, 22 bp, synthetic construct
  misc_feature 1..22: note = chemically synthesized
  source 1..22: mol_type = other DNA
ataaattacccagtctcaggta

SEQ ID NO: 117146 - DNA, 22 bp, synthetic construct
  misc_feature 1..22: note = chemically synthesized
  source 1..22: mol_type = other DNA
cccagtctcaggtagtatcttt

SEQ ID NO: 117147 - DNA, 22 bp, synthetic construct
  misc_feature 1..22: note = chemically synthesized
  source 1..22: mol_type = other DNA
aggtagtatctttagagcagtg

SEQ ID NO: 117148 - DNA, 22 bp, synthetic construct
  misc_feature 1..22: note = chemically synthesized
  source 1..22: mol_type = other DNA
tagagcagtgtgagaatgaact

SEQ ID NO: 117149 - DNA, 22 bp, synthetic construct
  misc_feature 1..22: note = chemically synthesized
  source 1..22: mol_type = other DNA
agagcagtgtgagaatgaacta

SEQ ID NO: 117150 - DNA, 22 bp, synthetic construct
  misc_feature 1..22: note = chemically synthesized
  source 1..22: mol_type = other DNA
gagcagtgtgagaatgaactaa

SEQ ID NO: 117151 - DNA, 22 bp, synthetic construct
  misc_feature 1..22: note = chemically synthesized
  source 1..22: mol_type = other DNA
atacaatccccaagccctgcct

SEQ ID NO: 117152 - DNA, 22 bp, synthetic construct
  misc_feature 1..22: note = chemically synthesized
  source 1..22: mol_type = other DNA
ccttctgaagcagcattcagga

SEQ ID NO: 117153 - DNA, 22 bp, synthetic construct
  misc_feature 1..22: note = chemically synthesized
  source 1..22: mol_type = other DNA
ctgaagcagcattcaggactcc

SEQ ID NO: 117154 - DNA, 22 bp, synthetic construct
  misc_feature 1..22: note = chemically synthesized
  source 1..22: mol_type = other DNA
tgaagcagcattcaggactccc

SEQ ID NO: 117155 - DNA, 22 bp, synthetic construct
  misc_feature 1..22: note = chemically synthesized
  source 1..22: mol_type = other DNA
aagcagcattcaggactcccaa

SEQ ID NO: 117156 - DNA, 22 bp, synthetic construct
  misc_feature 1..22: note = chemically synthesized
  source 1..22: mol_type = other DNA
aggactcccaaccccatgtcac

SEQ ID NO: 117157 - DNA, 22 bp, synthetic construct
  misc_feature 1..22: note = chemically synthesized
  source 1..22: mol_type = other DNA
ccaaccccatgtcacagtgtga

SEQ ID NO: 117158 - DNA, 22 bp, synthetic construct
  misc_feature 1..22: note = chemically synthesized
  source 1..22: mol_type = other DNA
agcatttttcctaagacagtag

SEQ ID NO: 117159 - DNA, 22 bp, synthetic construct
  misc_feature 1..22: note = chemically synthesized
  source 1..22: mol_type = other DNA
gcatttttcctaagacagtagt

SEQ ID NO: 117160 - DNA, 22 bp, synthetic construct
  misc_feature 1..22: note = chemically synthesized
  source 1..22: mol_type = other DNA
ttcctaagacagtagtcacctc

SEQ ID NO: 117161 - DNA, 22 bp, synthetic construct
  misc_feature 1..22: note = chemically synthesized
  source 1..22: mol_type = other DNA
tcctaagacagtagtcacctcc

SEQ ID NO: 117162 - DNA, 22 bp, synthetic construct
  misc_feature 1..22: note = chemically synthesized
  source 1..22: mol_type = other DNA
cctaagacagtagtcacctccc

SEQ ID NO: 117163 - DNA, 22 bp, synthetic construct
  misc_feature 1..22: note = chemically synthesized
  source 1..22: mol_type = other DNA
ctaagacagtagtcacctccct

SEQ ID NO: 117164 - DNA, 22 bp, synthetic construct
  misc_feature 1..22: note = chemically synthesized
  source 1..22: mol_type = other DNA
agacagtagtcacctccctagc

SEQ ID NO: 117165 - DNA, 22 bp, synthetic construct
  misc_feature 1..22: note = chemically synthesized
  source 1..22: mol_type = other DNA
cctagcttcttgaacctgtctg

SEQ ID NO: 117166 - DNA, 22 bp, synthetic construct
  misc_feature 1..22: note = chemically synthesized
  source 1..22: mol_type = other DNA
gcttcttgaacctgtctggcag

SEQ ID NO: 117167 - DNA, 22 bp, synthetic construct
  misc_feature 1..22: note = chemically synthesized
  source 1..22: mol_type = other DNA
cttgaacctgtctggcagaagg

SEQ ID NO: 117168 - DNA, 22 bp, synthetic construct
  misc_feature 1..22: note = chemically synthesized
  source 1..22: mol_type = other DNA
ttgaacctgtctggcagaagga

SEQ ID NO: 117169 - DNA, 22 bp, synthetic construct
  misc_feature 1..22: note = chemically synthesized
  source 1..22: mol_type = other DNA
gaacctgtctggcagaaggaga

SEQ ID NO: 117170 - DNA, 22 bp, synthetic construct
  misc_feature 1..22: note = chemically synthesized
  source 1..22: mol_type = other DNA
aacctgtctggcagaaggagag

SEQ ID NO: 117171 - DNA, 22 bp, synthetic construct
  misc_feature 1..22: note = chemically synthesized
  source 1..22: mol_type = other DNA
tctggcagaaggagaggaatca

SEQ ID NO: 117172 - DNA, 22 bp, synthetic construct
  misc_feature 1..22: note = chemically synthesized
  source 1..22: mol_type = other DNA
gcagaaggagaggaatcacatc

SEQ ID NO: 117173 - DNA, 22 bp, synthetic construct
  misc_feature 1..22: note = chemically synthesized
  source 1..22: mol_type = other DNA
aattggtggcagatggaaaaca

SEQ ID NO: 117174 - DNA, 22 bp, synthetic construct
  misc_feature 1..22: note = chemically synthesized
  source 1..22: mol_type = other DNA
gtggcagatggaaaacaaaaca

SEQ ID NO: 117175 - DNA, 22 bp, synthetic construct
  misc_feature 1..22: note = chemically synthesized
  source 1..22: mol_type = other DNA
ttgaaatagttttgccatcata

SEQ ID NO: 117176 - DNA, 22 bp, synthetic construct
  misc_feature 1..22: note = chemically synthesized
  source 1..22: mol_type = other DNA
gaaatagttttgccatcatatt

SEQ ID NO: 117177 - DNA, 22 bp, synthetic construct
  misc_feature 1..22: note = chemically synthesized
  source 1..22: mol_type = other DNA
aaatagttttgccatcatatta

SEQ ID NO: 117178 - DNA, 22 bp, synthetic construct
  misc_feature 1..22: note = chemically synthesized
  source 1..22: mol_type = other DNA
tgccatcatattatcttgggtt

SEQ ID NO: 117179 - DNA, 22 bp, synthetic construct
  misc_feature 1..22: note = chemically synthesized
  source 1..22: mol_type = other DNA
gccatcatattatcttgggtta

SEQ ID NO: 117180 - DNA, 22 bp, synthetic construct
  misc_feature 1..22: note = chemically synthesized
  source 1..22: mol_type = other DNA
ccatcatattatcttgggttac

SEQ ID NO: 117181 - DNA, 22 bp, synthetic construct
  misc_feature 1..22: note = chemically synthesized
  source 1..22: mol_type = other DNA
tcttgggttactcacaaaatgc

SEQ ID NO: 117182 - DNA, 22 bp, synthetic construct
  misc_feature 1..22: note = chemically synthesized
  source 1..22: mol_type = other DNA
gggttactcacaaaatgcttat

SEQ ID NO: 117183 - DNA, 22 bp, synthetic construct
  misc_feature 1..22: note = chemically synthesized
  source 1..22: mol_type = other DNA
ggttactcacaaaatgcttatg

SEQ ID NO: 117184 - DNA, 22 bp, synthetic construct
  misc_feature 1..22: note = chemically synthesized
  source 1..22: mol_type = other DNA
ctcacaaaatgcttatgtctgg

SEQ ID NO: 117185 - DNA, 22 bp, synthetic construct
  misc_feature 1..22: note = chemically synthesized
  source 1..22: mol_type = other DNA
acaaaatgcttatgtctggttt

SEQ ID NO: 117186 - DNA, 22 bp, synthetic construct
  misc_feature 1..22: note = chemically synthesized
  source 1..22: mol_type = other DNA
atgtctggtttatatgctcatc

SEQ ID NO: 117187 - DNA, 22 bp, synthetic construct
  misc_feature 1..22: note = chemically synthesized
  source 1..22: mol_type = other DNA
tgtctggtttatatgctcatct

SEQ ID NO: 117188 - DNA, 22 bp, synthetic construct
  misc_feature 1..22: note = chemically synthesized
  source 1..22: mol_type = other DNA
gtttatatgctcatctattaag

SEQ ID NO: 117189 - DNA, 22 bp, synthetic construct
  misc_feature 1..22: note = chemically synthesized
  source 1..22: mol_type = other DNA
atatgctcatctattaagtggg

SEQ ID NO: 117190 - DNA, 22 bp, synthetic construct
  misc_feature 1..22: note = chemically synthesized
  source 1..22: mol_type = other DNA
tatgctcatctattaagtggga

SEQ ID NO: 117191 - DNA, 22 bp, synthetic construct
  misc_feature 1..22: note = chemically synthesized
  source 1..22: mol_type = other DNA
atctattaagtgggaaattctt

SEQ ID NO: 117192 - DNA, 22 bp, synthetic construct
  misc_feature 1..22: note = chemically synthesized
  source 1..22: mol_type = other DNA
ttaagtgggaaattcttgtctc

SEQ ID NO: 117193 - DNA, 22 bp, synthetic construct
  misc_feature 1..22: note = chemically synthesized
  source 1..22: mol_type = other DNA
agtgggaaattcttgtctcctt

SEQ ID NO: 117194 - DNA, 22 bp, synthetic construct
  misc_feature 1..22: note = chemically synthesized
  source 1..22: mol_type = other DNA
ttgtctccttgtttacctcaca

SEQ ID NO: 117195 - DNA, 22 bp, synthetic construct
  misc_feature 1..22: note = chemically synthesized
  source 1..22: mol_type = other DNA
gtctccttgtttacctcacaga

SEQ ID NO: 117196 - DNA, 22 bp, synthetic construct
  misc_feature 1..22: note = chemically synthesized
  source 1..22: mol_type = other DNA
tctccttgtttacctcacagat

SEQ ID NO: 117197 - DNA, 22 bp, synthetic construct
  misc_feature 1..22: note = chemically synthesized
  source 1..22: mol_type = other DNA
cttgtttacctcacagatgtgg

SEQ ID NO: 117198 - DNA, 22 bp, synthetic construct
  misc_feature 1..22: note = chemically synthesized
  source 1..22: mol_type = other DNA
gtttacctcacagatgtggtct

SEQ ID NO: 117199 - DNA, 22 bp, synthetic construct
  misc_feature 1..22: note = chemically synthesized
  source 1..22: mol_type = other DNA
tttacctcacagatgtggtctg

SEQ ID NO: 117200 - DNA, 22 bp, synthetic construct
  misc_feature 1..22: note = chemically synthesized
  source 1..22: mol_type = other DNA
acctcacagatgtggtctgagt

SEQ ID NO: 117201 - DNA, 22 bp, synthetic construct
  misc_feature 1..22: note = chemically synthesized
  source 1..22: mol_type = other DNA
cctcacagatgtggtctgagta

SEQ ID NO: 117202 - DNA, 22 bp, synthetic construct
  misc_feature 1..22: note = chemically synthesized
  source 1..22: mol_type = other DNA
acagatgtggtctgagtatcag

SEQ ID NO: 117203 - DNA, 22 bp, synthetic construct
  misc_feature 1..22: note = chemically synthesized
  source 1..22: mol_type = other DNA
agtatcagtgagccaataacaa

SEQ ID NO: 117204 - DNA, 22 bp, synthetic construct
  misc_feature 1..22: note = chemically synthesized
  source 1..22: mol_type = other DNA
ttaataaaaagttggaaataag

SEQ ID NO: 117205 - DNA, 22 bp, synthetic construct
  misc_feature 1..22: note = chemically synthesized
  source 1..22: mol_type = other DNA
ataaaaagttggaaataagctg

SEQ ID NO: 117206 - DNA, 22 bp, synthetic construct
  misc_feature 1..22: note = chemically synthesized
  source 1..22: mol_type = other DNA
gaaataagctgactgtgattga

SEQ ID NO: 117207 - DNA, 22 bp, synthetic construct
  misc_feature 1..22: note = chemically synthesized
  source 1..22: mol_type = other DNA
actgtgattgactcctgagaat

SEQ ID NO: 117208 - DNA, 22 bp, synthetic construct
  misc_feature 1..22: note = chemically synthesized
  source 1..22: mol_type = other DNA
tgattgactcctgagaattcct

SEQ ID NO: 117209 - DNA, 22 bp, synthetic construct
  misc_feature 1..22: note = chemically synthesized
  source 1..22: mol_type = other DNA
actcctgagaattcctgaaaga

SEQ ID NO: 117210 - DNA, 22 bp, synthetic construct
  misc_feature 1..22: note = chemically synthesized
  source 1..22: mol_type = other DNA
ctgagaattcctgaaagagata

SEQ ID NO: 117211 - DNA, 22 bp, synthetic construct
  misc_feature 1..22: note = chemically synthesized
  source 1..22: mol_type = other DNA
agaattcctgaaagagatatag

SEQ ID NO: 117212 - DNA, 22 bp, synthetic construct
  misc_feature 1..22: note = chemically synthesized
  source 1..22: mol_type = other DNA
ctgaaagagatatagagtggag

SEQ ID NO: 117213 - DNA, 22 bp, synthetic construct
  misc_feature 1..22: note = chemically synthesized
  source 1..22: mol_type = other DNA
aaagagatatagagtggagaga

SEQ ID NO: 117214 - DNA, 22 bp, synthetic construct
  misc_feature 1..22: note = chemically synthesized
  source 1..22: mol_type = other DNA
acattcactggttgctaaaggc

SEQ ID NO: 117215 - DNA, 22 bp, synthetic construct
  misc_feature 1..22: note = chemically synthesized
  source 1..22: mol_type = other DNA
actggttgctaaaggctcacat

SEQ ID NO: 117216 - DNA, 22 bp, synthetic construct
  misc_feature 1..22: note = chemically synthesized
  source 1..22: mol_type = other DNA
gttgctaaaggctcacattaaa

SEQ ID NO: 117217 - DNA, 22 bp, synthetic construct
  misc_feature 1..22: note = chemically synthesized
  source 1..22: mol_type = other DNA
ctaaaggctcacattaaatatt

SEQ ID NO: 117218 - DNA, 22 bp, synthetic construct
  misc_feature 1..22: note = chemically synthesized
  source 1..22: mol_type = other DNA
aaggctcacattaaatatttag

SEQ ID NO: 117219 - DNA, 22 bp, synthetic construct
  misc_feature 1..22: note = chemically synthesized
  source 1..22: mol_type = other DNA
acattaaatatttagagccagt

SEQ ID NO: 117220 - DNA, 22 bp, synthetic construct
  misc_feature 1..22: note = chemically synthesized
  source 1..22: mol_type = other DNA
aatatttagagccagtccctga

SEQ ID NO: 117221 - DNA, 22 bp, synthetic construct
  misc_feature 1..22: note = chemically synthesized
  source 1..22: mol_type = other DNA
agagccagtccctgaggtaagt

SEQ ID NO: 117222 - DNA, 22 bp, synthetic construct
  misc_feature 1..22: note = chemically synthesized
  source 1..22: mol_type = other DNA
gagccagtccctgaggtaagta

SEQ ID NO: 117223 - DNA, 22 bp, synthetic construct
  misc_feature 1..22: note = chemically synthesized
  source 1..22: mol_type = other DNA
aggtaagtattaacatctttat

SEQ ID NO: 117224 - DNA, 22 bp, synthetic construct
  misc_feature 1..22: note = chemically synthesized
  source 1..22: mol_type = other DNA
acatctttatctttaaaaacaa

SEQ ID NO: 117225 - DNA, 22 bp, synthetic construct
  misc_feature 1..22: note = chemically synthesized
  source 1..22: mol_type = other DNA
tatctttaaaaacaaagatact

SEQ ID NO: 117226 - DNA, 22 bp, synthetic construct
  misc_feature 1..22: note = chemically synthesized
  source 1..22: mol_type = other DNA
atctttaaaaacaaagatacta

SEQ ID NO: 117227 - DNA, 22 bp, synthetic construct
  misc_feature 1..22: note = chemically synthesized
  source 1..22: mol_type = other DNA
tctttaaaaacaaagatactaa

SEQ ID NO: 117228 - DNA, 22 bp, synthetic construct
  misc_feature 1..22: note = chemically synthesized
  source 1..22: mol_type = other DNA
taaaaacaaagatactaatgtg

SEQ ID NO: 117229 - DNA, 22 bp, synthetic construct
  misc_feature 1..22: note = chemically synthesized
  source 1..22: mol_type = other DNA
aaaaacaaagatactaatgtgc

SEQ ID NO: 117230 - DNA, 22 bp, synthetic construct
  misc_feature 1..22: note = chemically synthesized
  source 1..22: mol_type = other DNA
aaaacaaagatactaatgtgca

SEQ ID NO: 117231 - DNA, 22 bp, synthetic construct
  misc_feature 1..22: note = chemically synthesized
  source 1..22: mol_type = other DNA
atgtgcacaaaggtaaagtacg

SEQ ID NO: 117232 - DNA, 22 bp, synthetic construct
  misc_feature 1..22: note = chemically synthesized
  source 1..22: mol_type = other DNA
taccgaacataagattcacctc

SEQ ID NO: 117233 - DNA, 22 bp, synthetic construct
  misc_feature 1..22: note = chemically synthesized
  source 1..22: mol_type = other DNA
acctccaattctgtccagctcc

SEQ ID NO: 117234 - DNA, 22 bp, synthetic construct
  misc_feature 1..22: note = chemically synthesized
  source 1..22: mol_type = other DNA
caattctgtccagctccagggg

SEQ ID NO: 117235 - DNA, 22 bp, synthetic construct
  misc_feature 1..22: note = chemically synthesized
  source 1..22: mol_type = other DNA
tgtccagctccaggggtacagt

SEQ ID NO: 117236 - DNA, 22 bp, synthetic construct
  misc_feature 1..22: note = chemically synthesized
  source 1..22: mol_type = other DNA
tccagctccaggggtacagtca

SEQ ID NO: 117237 - DNA, 22 bp, synthetic construct
  misc_feature 1..22: note = chemically synthesized
  source 1..22: mol_type = other DNA
caggggtacagtcatcactgtc

SEQ ID NO: 117238 - DNA, 22 bp, synthetic construct
  misc_feature 1..22: note = chemically synthesized
  source 1..22: mol_type = other DNA
tcccacattctactttttttct

SEQ ID NO: 117239 - DNA, 22 bp, synthetic construct
  misc_feature 1..22: note = chemically synthesized
  source 1..22: mol_type = other DNA
tactttttttctgatttgttgt

SEQ ID NO: 117240 - DNA, 22 bp, synthetic construct
  misc_feature 1..22: note = chemically synthesized
  source 1..22: mol_type = other DNA
ctttttttctgatttgttgtgt

SEQ ID NO: 117241 - DNA, 22 bp, synthetic construct
  misc_feature 1..22: note = chemically synthesized
  source 1..22: mol_type = other DNA
tttttctgatttgttgtgtcct

SEQ ID NO: 117242 - DNA, 22 bp, synthetic construct
  misc_feature 1..22: note = chemically synthesized
  source 1..22: mol_type = other DNA
ttttctgatttgttgtgtccta

SEQ ID NO: 117243 - DNA, 22 bp, synthetic construct
  misc_feature 1..22: note = chemically synthesized
  source 1..22: mol_type = other DNA
tttctgatttgttgtgtcctat

SEQ ID NO: 117244 - DNA, 22 bp, synthetic construct
  misc_feature 1..22: note = chemically synthesized
  source 1..22: mol_type = other DNA
ttctgatttgttgtgtcctatt

SEQ ID NO: 117245 - DNA, 22 bp, synthetic construct
  misc_feature 1..22: note = chemically synthesized
  source 1..22: mol_type = other DNA
tctgatttgttgtgtcctatta

SEQ ID NO: 117246 - DNA, 22 bp, synthetic construct
  misc_feature 1..22: note = chemically synthesized
  source 1..22: mol_type = other DNA
ctgatttgttgtgtcctattat

SEQ ID NO: 117247 - DNA, 22 bp, synthetic construct
  misc_feature 1..22: note = chemically synthesized
  source 1..22: mol_type = other DNA
tgatttgttgtgtcctattata

SEQ ID NO: 117248 - DNA, 22 bp, synthetic construct
  misc_feature 1..22: note = chemically synthesized
  source 1..22: mol_type = other DNA
atttgttgtgtcctattatact

SEQ ID NO: 117249 - DNA, 22 bp, synthetic construct
  misc_feature 1..22: note = chemically synthesized
  source 1..22: mol_type = other DNA
gttgtgtcctattatactgggc

SEQ ID NO: 117250 - DNA, 22 bp, synthetic construct
  misc_feature 1..22: note = chemically synthesized
  source 1..22: mol_type = other DNA
ttgtgtcctattatactgggct

SEQ ID NO: 117251 - DNA, 22 bp, synthetic construct
  misc_feature 1..22: note = chemically synthesized
  source 1..22: mol_type = other DNA
tgtcctattatactgggctata

SEQ ID NO: 117252 - DNA, 22 bp, synthetic construct
  misc_feature 1..22: note = chemically synthesized
  source 1..22: mol_type = other DNA
ttatactgggctatagactaca

SEQ ID NO: 117253 - DNA, 22 bp, synthetic construct
  misc_feature 1..22: note = chemically synthesized
  source 1..22: mol_type = other DNA
tactgggctatagactacatga

SEQ ID NO: 117254 - DNA, 22 bp, synthetic construct
  misc_feature 1..22: note = chemically synthesized
  source 1..22: mol_type = other DNA
ggctatagactacatgatccct

SEQ ID NO: 117255 - DNA, 22 bp, synthetic construct
  misc_feature 1..22: note = chemically synthesized
  source 1..22: mol_type = other DNA
tagactacatgatcccttttgt

SEQ ID NO: 117256 - DNA, 22 bp, synthetic construct
  misc_feature 1..22: note = chemically synthesized
  source 1..22: mol_type = other DNA
catgatcccttttgtaaccttt

SEQ ID NO: 117257 - DNA, 22 bp, synthetic construct
  misc_feature 1..22: note = chemically synthesized
  source 1..22: mol_type = other DNA
ttgtaacctttcaagctaaaat

SEQ ID NO: 117258 - DNA, 22 bp, synthetic construct
  misc_feature 1..22: note = chemically synthesized
  source 1..22: mol_type = other DNA
tgtaacctttcaagctaaaatg

SEQ ID NO: 117259 - DNA, 22 bp, synthetic construct
  misc_feature 1..22: note = chemically synthesized
  source 1..22: mol_type = other DNA
gtaacctttcaagctaaaatgc

SEQ ID NO: 117260 - DNA, 22 bp, synthetic construct
  misc_feature 1..22: note = chemically synthesized
  source 1..22: mol_type = other DNA
taacctttcaagctaaaatgct

SEQ ID NO: 117261 - DNA, 22 bp, synthetic construct
  misc_feature 1..22: note = chemically synthesized
  source 1..22: mol_type = other DNA
tcaagctaaaatgctcttgtca

SEQ ID NO: 117262 - DNA, 22 bp, synthetic construct
  misc_feature 1..22: note = chemically synthesized
  source 1..22: mol_type = other DNA
caagctaaaatgctcttgtcaa

SEQ ID NO: 117263 - DNA, 22 bp, synthetic construct
  misc_feature 1..22: note = chemically synthesized
  source 1..22: mol_type = other DNA
aagctaaaatgctcttgtcaaa

SEQ ID NO: 117264 - DNA, 22 bp, synthetic construct
  misc_feature 1..22: note = chemically synthesized
  source 1..22: mol_type = other DNA
aaatgctcttgtcaaacaaatc

SEQ ID NO: 117265 - DNA, 22 bp, synthetic construct
  misc_feature 1..22: note = chemically synthesized
  source 1..22: mol_type = other DNA
ttgtcaaacaaatcctaaactc

SEQ ID NO: 117266 - DNA, 22 bp, synthetic construct
  misc_feature 1..22: note = chemically synthesized
  source 1..22: mol_type = other DNA
gtcaaacaaatcctaaactcag

SEQ ID NO: 117267 - DNA, 22 bp, synthetic construct
  misc_feature 1..22: note = chemically synthesized
  source 1..22: mol_type = other DNA
tcaaacaaatcctaaactcagg

SEQ ID NO: 117268 - DNA, 22 bp, synthetic construct
  misc_feature 1..22: note = chemically synthesized
  source 1..22: mol_type = other DNA
aactcaggagaatgattgtgtt

SEQ ID NO: 117269 - DNA, 22 bp, synthetic construct
  misc_feature 1..22: note = chemically synthesized
  source 1..22: mol_type = other DNA
aggagaatgattgtgttttaag

SEQ ID NO: 117270 - DNA, 22 bp, synthetic construct
  misc_feature 1..22: note = chemically synthesized
  source 1..22: mol_type = other DNA
tgttttaagatctctttcaagg

SEQ ID NO: 117271 - DNA, 22 bp, synthetic construct
  misc_feature 1..22: note = chemically synthesized
  source 1..22: mol_type = other DNA
taagatctctttcaaggagatc

SEQ ID NO: 117272 - DNA, 22 bp, synthetic construct
  misc_feature 1..22: note = chemically synthesized
  source 1..22: mol_type = other DNA
aagatctctttcaaggagatct

SEQ ID NO: 117273 - DNA, 22 bp, synthetic construct
  misc_feature 1..22: note = chemically synthesized
  source 1..22: mol_type = other DNA
agatctctttcaaggagatctg

SEQ ID NO: 117274 - DNA, 22 bp, synthetic construct
  misc_feature 1..22: note = chemically synthesized
  source 1..22: mol_type = other DNA
tttcaaggagatctgaccctta

SEQ ID NO: 117275 - DNA, 22 bp, synthetic construct
  misc_feature 1..22: note = chemically synthesized
  source 1..22: mol_type = other DNA
tcaaggagatctgacccttatc

SEQ ID NO: 117276 - DNA, 22 bp, synthetic construct
  misc_feature 1..22: note = chemically synthesized
  source 1..22: mol_type = other DNA
caaggagatctgacccttatct

SEQ ID NO: 117277 - DNA, 22 bp, synthetic construct
  misc_feature 1..22: note = chemically synthesized
  source 1..22: mol_type = other DNA
aaggagatctgacccttatctg

SEQ ID NO: 117278 - DNA, 22 bp, synthetic construct
  misc_feature 1..22: note = chemically synthesized
  source 1..22: mol_type = other DNA
acccttatctggcggtagagac

SEQ ID NO: 117279 - DNA, 22 bp, synthetic construct
  misc_feature 1..22: note = chemically synthesized
  source 1..22: mol_type = other DNA
atctggcggtagagactctgga

SEQ ID NO: 117280 - DNA, 22 bp, synthetic construct
  misc_feature 1..22: note = chemically synthesized
  source 1..22: mol_type = other DNA
tctggcggtagagactctggag

SEQ ID NO: 117281 - DNA, 22 bp, synthetic construct
  misc_feature 1..22: note = chemically synthesized
  source 1..22: mol_type = other DNA
gcggtagagactctggagatgg

SEQ ID NO: 117282 - DNA, 22 bp, synthetic construct
  misc_feature 1..22: note = chemically synthesized
  source 1..22: mol_type = other DNA
tggagatggaaactgagaagga

SEQ ID NO: 117283 - DNA, 22 bp, synthetic construct
  misc_feature 1..22: note = chemically synthesized
  source 1..22: mol_type = other DNA
gagatggaaactgagaaggatg

SEQ ID NO: 117284 - DNA, 22 bp, synthetic construct
  misc_feature 1..22: note = chemically synthesized
  source 1..22: mol_type = other DNA
agaaggatgcaaaaaaaaaaaa

SEQ ID NO: 117285 - DNA, 22 bp, synthetic construct
  misc_feature 1..22: note = chemically synthesized
  source 1..22: mol_type = other DNA
tagtttcaagtatcagtcaaga

SEQ ID NO: 117286 - DNA, 22 bp, synthetic construct
  misc_feature 1..22: note = chemically synthesized
  source 1..22: mol_type = other DNA
gtttcaagtatcagtcaagatt

SEQ ID NO: 117287 - DNA, 22 bp, synthetic construct
  misc_feature 1..22: note = chemically synthesized
  source 1..22: mol_type = other DNA
caagtatcagtcaagatttgtt

SEQ ID NO: 117288 - DNA, 22 bp, synthetic construct
  misc_feature 1..22: note = chemically synthesized
  source 1..22: mol_type = other DNA
aagtatcagtcaagatttgttt

SEQ ID NO: 117289 - DNA, 22 bp, synthetic construct
  misc_feature 1..22: note = chemically synthesized
  source 1..22: mol_type = other DNA
gtttcttccaatatccggttat

SEQ ID NO: 117290 - DNA, 22 bp, synthetic construct
  misc_feature 1..22: note = chemically synthesized
  source 1..22: mol_type = other DNA
tttcttccaatatccggttatt

SEQ ID NO: 117291 - DNA, 22 bp, synthetic construct
  misc_feature 1..22: note = chemically synthesized
  source 1..22: mol_type = other DNA
cttccaatatccggttatttga

SEQ ID NO: 117292 - DNA, 22 bp, synthetic construct
  misc_feature 1..22: note = chemically synthesized
  source 1..22: mol_type = other DNA
ttccaatatccggttatttgag

SEQ ID NO: 117293 - DNA, 22 bp, synthetic construct
  misc_feature 1..22: note = chemically synthesized
  source 1..22: mol_type = other DNA
ccaatatccggttatttgaggt

SEQ ID NO: 117294 - DNA, 22 bp, synthetic construct
  misc_feature 1..22: note = chemically synthesized
  source 1..22: mol_type = other DNA
caatatccggttatttgaggtg

SEQ ID NO: 117295 - DNA, 22 bp, synthetic construct
  misc_feature 1..22: note = chemically synthesized
  source 1..22: mol_type = other DNA
tttgaggtgtggcaggcaagat

SEQ ID NO: 117296 - DNA, 22 bp, synthetic construct
  misc_feature 1..22: note = chemically synthesized
  source 1..22: mol_type = other DNA
gaggtgtggcaggcaagataca

SEQ ID NO: 117297 - DNA, 22 bp, synthetic construct
  misc_feature 1..22: note = chemically synthesized
  source 1..22: mol_type = other DNA
aggtgtggcaggcaagatacag

SEQ ID NO: 117298 - DNA, 22 bp, synthetic construct
  misc_feature 1..22: note = chemically synthesized
  source 1..22: mol_type = other DNA
agtaaggcagcacacgggaaga

SEQ ID NO: 117299 - DNA, 22 bp, synthetic construct
  misc_feature 1..22: note = chemically synthesized
  source 1..22: mol_type = other DNA
ctcaatccagaggcagatcaat

SEQ ID NO: 117300 - DNA, 22 bp, synthetic construct
  misc_feature 1..22: note = chemically synthesized
  source 1..22: mol_type = other DNA
aatccagaggcagatcaatatt

SEQ ID NO: 117301 - DNA, 22 bp, synthetic construct
  misc_feature 1..22: note = chemically synthesized
  source 1..22: mol_type = other DNA
atctgcctctggattgagcagc

SEQ ID NO: 117302 - DNA, 22 bp, synthetic construct
  misc_feature 1..22: note = chemically synthesized
  source 1..22: mol_type = other DNA
cctctggattgagcagctgttc

SEQ ID NO: 117303 - DNA, 22 bp, synthetic construct
  misc_feature 1..22: note = chemically synthesized
  source 1..22: mol_type = other DNA
tggattgagcagctgttcttcc

SEQ ID NO: 117304 - DNA, 22 bp, synthetic construct
  misc_feature 1..22: note = chemically synthesized
  source 1..22: mol_type = other DNA
gattgagcagctgttcttcccg

SEQ ID NO: 117305 - DNA, 22 bp, synthetic construct
  misc_feature 1..22: note = chemically synthesized
  source 1..22: mol_type = other DNA
agcagctgttcttcccgtgtgc

SEQ ID NO: 117306 - DNA, 22 bp, synthetic construct
  misc_feature 1..22: note = chemically synthesized
  source 1..22: mol_type = other DNA
ttcttcccgtgtgctgccttac

SEQ ID NO: 117307 - DNA, 22 bp, synthetic construct
  misc_feature 1..22: note = chemically synthesized
  source 1..22: mol_type = other DNA
ttcccgtgtgctgccttactga

SEQ ID NO: 117308 - DNA, 22 bp, synthetic construct
  misc_feature 1..22: note = chemically synthesized
  source 1..22: mol_type = other DNA
cccgtgtgctgccttactgaat

SEQ ID NO: 117309 - DNA, 22 bp, synthetic construct
  misc_feature 1..22: note = chemically synthesized
  source 1..22: mol_type = other DNA
ccgtgtgctgccttactgaatc

SEQ ID NO: 117310 - DNA, 22 bp, synthetic construct
  misc_feature 1..22: note = chemically synthesized
  source 1..22: mol_type = other DNA
ccttactgaatccttgatccca

SEQ ID NO: 117311 - DNA, 22 bp, synthetic construct
  misc_feature 1..22: note = chemically synthesized
  source 1..22: mol_type = other DNA
actgaatccttgatcccactgc

SEQ ID NO: 117312 - DNA, 22 bp, synthetic construct
  misc_feature 1..22: note = chemically synthesized
  source 1..22: mol_type = other DNA
ctgaatccttgatcccactgca

SEQ ID NO: 117313 - DNA, 22 bp, synthetic construct
  misc_feature 1..22: note = chemically synthesized
  source 1..22: mol_type = other DNA
aatccttgatcccactgcaccc

SEQ ID NO: 117314 - DNA, 22 bp, synthetic construct
  misc_feature 1..22: note = chemically synthesized
  source 1..22: mol_type = other DNA
gatcccactgcaccctgtatct

SEQ ID NO: 117315 - DNA, 22 bp, synthetic construct
  misc_feature 1..22: note = chemically synthesized
  source 1..22: mol_type = other DNA
atcccactgcaccctgtatctt

SEQ ID NO: 117316 - DNA, 22 bp, synthetic construct
  misc_feature 1..22: note = chemically synthesized
  source 1..22: mol_type = other DNA
caccctgtatcttgcctgccac

SEQ ID NO: 117317 - DNA, 22 bp, synthetic construct
  misc_feature 1..22: note = chemically synthesized
  source 1..22: mol_type = other DNA
tatcttgcctgccacacctcaa

SEQ ID NO: 117318 - DNA, 22 bp, synthetic construct
  misc_feature 1..22: note = chemically synthesized
  source 1..22: mol_type = other DNA
gcctgccacacctcaaataacc

SEQ ID NO: 117319 - DNA, 22 bp, synthetic construct
  misc_feature 1..22: note = chemically synthesized
  source 1..22: mol_type = other DNA
cctgccacacctcaaataaccg

SEQ ID NO: 117320 - DNA, 22 bp, synthetic construct
  misc_feature 1..22: note = chemically synthesized
  source 1..22: mol_type = other DNA
ccacacctcaaataaccggata

SEQ ID NO: 117321 - DNA, 22 bp, synthetic construct
  misc_feature 1..22: note = chemically synthesized
  source 1..22: mol_type = other DNA
aaataaccggatattggaagaa

SEQ ID NO: 117322 - DNA, 22 bp, synthetic construct
  misc_feature 1..22: note = chemically synthesized
  source 1..22: mol_type = other DNA
gaagaaacaaatcttgactgat

SEQ ID NO: 117323 - DNA, 22 bp, synthetic construct
  misc_feature 1..22: note = chemically synthesized
  source 1..22: mol_type = other DNA
gactgatacttgaaactagagt

SEQ ID NO: 117324 - DNA, 22 bp, synthetic construct
  misc_feature 1..22: note = chemically synthesized
  source 1..22: mol_type = other DNA
actgatacttgaaactagagtc

SEQ ID NO: 117325 - DNA, 22 bp, synthetic construct
  misc_feature 1..22: note = chemically synthesized
  source 1..22: mol_type = other DNA
atacttgaaactagagtctctc

SEQ ID NO: 117326 - DNA, 22 bp, synthetic construct
  misc_feature 1..22: note = chemically synthesized
  source 1..22: mol_type = other DNA
gaaactagagtctctcctcctc

SEQ ID NO: 117327 - DNA, 22 bp, synthetic construct
  misc_feature 1..22: note = chemically synthesized
  source 1..22: mol_type = other DNA
aaactagagtctctcctcctct

SEQ ID NO: 117328 - DNA, 22 bp, synthetic construct
  misc_feature 1..22: note = chemically synthesized
  source 1..22: mol_type = other DNA
gagtctctcctcctctgccttc

SEQ ID NO: 117329 - DNA, 22 bp, synthetic construct
  misc_feature 1..22: note = chemically synthesized
  source 1..22: mol_type = other DNA
tcctcctctgccttctctgcct

SEQ ID NO: 117330 - DNA, 22 bp, synthetic construct
  misc_feature 1..22: note = chemically synthesized
  source 1..22: mol_type = other DNA
ctcctctgccttctctgcctgt

SEQ ID NO: 117331 - DNA, 22 bp, synthetic construct
  misc_feature 1..22: note = chemically synthesized
  source 1..22: mol_type = other DNA
ctctgccttctctgcctgtctg

SEQ ID NO: 117332 - DNA, 22 bp, synthetic construct
  misc_feature 1..22: note = chemically synthesized
  source 1..22: mol_type = other DNA
tgccttctctgcctgtctgtgg

SEQ ID NO: 117333 - DNA, 22 bp, synthetic construct
  misc_feature 1..22: note = chemically synthesized
  source 1..22: mol_type = other DNA
ccttctctgcctgtctgtggtc

SEQ ID NO: 117334 - DNA, 22 bp, synthetic construct
  misc_feature 1..22: note = chemically synthesized
  source 1..22: mol_type = other DNA
ctctgcctgtctgtggtctctt

SEQ ID NO: 117335 - DNA, 22 bp, synthetic construct
  misc_feature 1..22: note = chemically synthesized
  source 1..22: mol_type = other DNA
tctgcctgtctgtggtctcttt

SEQ ID NO: 117336 - DNA, 22 bp, synthetic construct
  misc_feature 1..22: note = chemically synthesized
  source 1..22: mol_type = other DNA
tgcctgtctgtggtctcttttg

SEQ ID NO: 117337 - DNA, 22 bp, synthetic construct
  misc_feature 1..22: note = chemically synthesized
  source 1..22: mol_type = other DNA
cctgtctgtggtctcttttgtt

SEQ ID NO: 117338 - DNA, 22 bp, synthetic construct
  misc_feature 1..22: note = chemically synthesized
  source 1..22: mol_type = other DNA
tctgtggtctcttttgttttct

SEQ ID NO: 117339 - DNA, 22 bp, synthetic construct
  misc_feature 1..22: note = chemically synthesized
  source 1..22: mol_type = other DNA
tggtctcttttgttttcttcct

SEQ ID NO: 117340 - DNA, 22 bp, synthetic construct
  misc_feature 1..22: note = chemically synthesized
  source 1..22: mol_type = other DNA
ttttgttttcttcctttttttt

SEQ ID NO: 117341 - DNA, 22 bp, synthetic construct
  misc_feature 1..22: note = chemically synthesized
  source 1..22: mol_type = other DNA
ttgttttcttcctttttttttc

SEQ ID NO: 117342 - DNA, 22 bp, synthetic construct
  misc_feature 1..22: note = chemically synthesized
  source 1..22: mol_type = other DNA
tgttttcttcctttttttttct

SEQ ID NO: 117343 - DNA, 22 bp, synthetic construct
  misc_feature 1..22: note = chemically synthesized
  source 1..22: mol_type = other DNA
gttttcttcctttttttttctt

SEQ ID NO: 117344 - DNA, 22 bp, synthetic construct
  misc_feature 1..22: note = chemically synthesized
  source 1..22: mol_type = other DNA
ttttcttcctttttttttcttt

SEQ ID NO: 117345 - DNA, 22 bp, synthetic construct
  misc_feature 1..22: note = chemically synthesized
  source 1..22: mol_type = other DNA
tcttcctttttttttctttctt

SEQ ID NO: 117346 - DNA, 22 bp, synthetic construct
  misc_feature 1..22: note = chemically synthesized
  source 1..22: mol_type = other DNA
cttcctttttttttctttcttg

SEQ ID NO: 117347 - DNA, 22 bp, synthetic construct
  misc_feature 1..22: note = chemically synthesized
  source 1..22: mol_type = other DNA
ttcctttttttttctttcttgc

SEQ ID NO: 117348 - DNA, 22 bp, synthetic construct
  misc_feature 1..22: note = chemically synthesized
  source 1..22: mol_type = other DNA
cctttttttttctttcttgcat

SEQ ID NO: 117349 - DNA, 22 bp, synthetic construct
  misc_feature 1..22: note = chemically synthesized
  source 1..22: mol_type = other DNA
ctttttttttctttcttgcatt

SEQ ID NO: 117350 - DNA, 22 bp, synthetic construct
  misc_feature 1..22: note = chemically synthesized
  source 1..22: mol_type = other DNA
tttttttctttcttgcattttt

SEQ ID NO: 117351 - DNA, 22 bp, synthetic construct
  misc_feature 1..22: note = chemically synthesized
  source 1..22: mol_type = other DNA
ttttttctttcttgcatttttt

SEQ ID NO: 117352 - DNA, 22 bp, synthetic construct
  misc_feature 1..22: note = chemically synthesized
  source 1..22: mol_type = other DNA
tttttctttcttgcattttttt

SEQ ID NO: 117353 - DNA, 22 bp, synthetic construct
  misc_feature 1..22: note = chemically synthesized
  source 1..22: mol_type = other DNA
ttttctttcttgcatttttttt

SEQ ID NO: 117354 - DNA, 22 bp, synthetic construct
  misc_feature 1..22: note = chemically synthesized
  source 1..22: mol_type = other DNA
tttctttcttgcattttttttt

SEQ ID NO: 117355 - DNA, 22 bp, synthetic construct
  misc_feature 1..22: note = chemically synthesized
  source 1..22: mol_type = other DNA
ttctttcttgcatttttttttt

SEQ ID NO: 117356 - DNA, 22 bp, synthetic construct
  misc_feature 1..22: note = chemically synthesized
  source 1..22: mol_type = other DNA
tctttcttgcattttttttttt

SEQ ID NO: 117357 - DNA, 22 bp, synthetic construct
  misc_feature 1..22: note = chemically synthesized
  source 1..22: mol_type = other DNA
ctttcttgcatttttttttttt

SEQ ID NO: 117358 - DNA, 22 bp, synthetic construct
  misc_feature 1..22: note = chemically synthesized
  source 1..22: mol_type = other DNA
tttcttgcattttttttttttt

SEQ ID NO: 117359 - DNA, 22 bp, synthetic construct
  misc_feature 1..22: note = chemically synthesized
  source 1..22: mol_type = other DNA
tcttgcatttttttttttttgc

SEQ ID NO: 117360 - DNA, 22 bp, synthetic construct
  misc_feature 1..22: note = chemically synthesized
  source 1..22: mol_type = other DNA
cttgcatttttttttttttgca

SEQ ID NO: 117361 - DNA, 22 bp, synthetic construct
  misc_feature 1..22: note = chemically synthesized
  source 1..22: mol_type = other DNA
ttgcatttttttttttttgcat

SEQ ID NO: 117362 - DNA, 22 bp, synthetic construct
  misc_feature 1..22: note = chemically synthesized
  source 1..22: mol_type = other DNA
gcatttttttttttttgcatcc

SEQ ID NO: 117363 - DNA, 22 bp, synthetic construct
  misc_feature 1..22: note = chemically synthesized
  source 1..22: mol_type = other DNA
catttttttttttttgcatcct

SEQ ID NO: 117364 - DNA, 22 bp, synthetic construct
  misc_feature 1..22: note = chemically synthesized
  source 1..22: mol_type = other DNA
ttttttttttgcatccttctca

SEQ ID NO: 117365 - DNA, 22 bp, synthetic construct
  misc_feature 1..22: note = chemically synthesized
  source 1..22: mol_type = other DNA
tttttttttgcatccttctcag

SEQ ID NO: 117366 - DNA, 22 bp, synthetic construct
  misc_feature 1..22: note = chemically synthesized
  source 1..22: mol_type = other DNA
ttttttttgcatccttctcagt

SEQ ID NO: 117367 - DNA, 22 bp, synthetic construct
  misc_feature 1..22: note = chemically synthesized
  source 1..22: mol_type = other DNA
tttttttgcatccttctcagtt

SEQ ID NO: 117368 - DNA, 22 bp, synthetic construct
  misc_feature 1..22: note = chemically synthesized
  source 1..22: mol_type = other DNA
ttttttgcatccttctcagttt

SEQ ID NO: 117369 - DNA, 22 bp, synthetic construct
  misc_feature 1..22: note = chemically synthesized
  source 1..22: mol_type = other DNA
tttttgcatccttctcagtttc

SEQ ID NO: 117370 - DNA, 22 bp, synthetic construct
  misc_feature 1..22: note = chemically synthesized
  source 1..22: mol_type = other DNA
ttttgcatccttctcagtttcc

SEQ ID NO: 117371 - DNA, 22 bp, synthetic construct
  misc_feature 1..22: note = chemically synthesized
  source 1..22: mol_type = other DNA
tttgcatccttctcagtttcca

SEQ ID NO: 117372 - DNA, 22 bp, synthetic construct
  misc_feature 1..22: note = chemically synthesized
  source 1..22: mol_type = other DNA
ttgcatccttctcagtttccat

SEQ ID NO: 117373 - DNA, 22 bp, synthetic construct
  misc_feature 1..22: note = chemically synthesized
  source 1..22: mol_type = other DNA
tgcatccttctcagtttccatc

SEQ ID NO: 117374 - DNA, 22 bp, synthetic construct
  misc_feature 1..22: note = chemically synthesized
  source 1..22: mol_type = other DNA
gcatccttctcagtttccatct

SEQ ID NO: 117375 - DNA, 22 bp, synthetic construct
  misc_feature 1..22: note = chemically synthesized
  source 1..22: mol_type = other DNA
catccttctcagtttccatctc

SEQ ID NO: 117376 - DNA, 22 bp, synthetic construct
  misc_feature 1..22: note = chemically synthesized
  source 1..22: mol_type = other DNA
ctcagtttccatctccagagtc

SEQ ID NO: 117377 - DNA, 22 bp, synthetic construct
  misc_feature 1..22: note = chemically synthesized
  source 1..22: mol_type = other DNA
tcagtttccatctccagagtct

SEQ ID NO: 117378 - DNA, 22 bp, synthetic construct
  misc_feature 1..22: note = chemically synthesized
  source 1..22: mol_type = other DNA
agtttccatctccagagtctct

SEQ ID NO: 117379 - DNA, 22 bp, synthetic construct
  misc_feature 1..22: note = chemically synthesized
  source 1..22: mol_type = other DNA
ccatctccagagtctctaccgc

SEQ ID NO: 117380 - DNA, 22 bp, synthetic construct
  misc_feature 1..22: note = chemically synthesized
  source 1..22: mol_type = other DNA
catctccagagtctctaccgcc

SEQ ID NO: 117381 - DNA, 22 bp, synthetic construct
  misc_feature 1..22: note = chemically synthesized
  source 1..22: mol_type = other DNA
cagagtctctaccgccagataa

SEQ ID NO: 117382 - DNA, 22 bp, synthetic construct
  misc_feature 1..22: note = chemically synthesized
  source 1..22: mol_type = other DNA
taccgccagataagggtcagat

SEQ ID NO: 117383 - DNA, 22 bp, synthetic construct
  misc_feature 1..22: note = chemically synthesized
  source 1..22: mol_type = other DNA
ccgccagataagggtcagatct

SEQ ID NO: 117384 - DNA, 22 bp, synthetic construct
  misc_feature 1..22: note = chemically synthesized
  source 1..22: mol_type = other DNA
cttgaaagagatcttaaaacac

SEQ ID NO: 117385 - DNA, 22 bp, synthetic construct
  misc_feature 1..22: note = chemically synthesized
  source 1..22: mol_type = other DNA
gaaagagatcttaaaacacaat

SEQ ID NO: 117386 - DNA, 22 bp, synthetic construct
  misc_feature 1..22: note = chemically synthesized
  source 1..22: mol_type = other DNA
aaagagatcttaaaacacaatc

SEQ ID NO: 117387 - DNA, 22 bp, synthetic construct
  misc_feature 1..22: note = chemically synthesized
  source 1..22: mol_type = other DNA
aaaacacaatcattctcctgag

SEQ ID NO: 117388 - DNA, 22 bp, synthetic construct
  misc_feature 1..22: note = chemically synthesized
  source 1..22: mol_type = other DNA
aaacacaatcattctcctgagt

SEQ ID NO: 117389 - DNA, 22 bp, synthetic construct
  misc_feature 1..22: note = chemically synthesized
  source 1..22: mol_type = other DNA
tcctgagtttaggatttgtttg

SEQ ID NO: 117390 - DNA, 22 bp, synthetic construct
  misc_feature 1..22: note = chemically synthesized
  source 1..22: mol_type = other DNA
ctgagtttaggatttgtttgac

SEQ ID NO: 117391 - DNA, 22 bp, synthetic construct
  misc_feature 1..22: note = chemically synthesized
  source 1..22: mol_type = other DNA
agtttaggatttgtttgacaag

SEQ ID NO: 117392 - DNA, 22 bp, synthetic construct
  misc_feature 1..22: note = chemically synthesized
  source 1..22: mol_type = other DNA
aggatttgtttgacaagagcat

SEQ ID NO: 117393 - DNA, 22 bp, synthetic construct
  misc_feature 1..22: note = chemically synthesized
  source 1..22: mol_type = other DNA
ggatttgtttgacaagagcatt

SEQ ID NO: 117394 - DNA, 22 bp, synthetic construct
  misc_feature 1..22: note = chemically synthesized
  source 1..22: mol_type = other DNA
gtttgacaagagcattttagct

SEQ ID NO: 117395 - DNA, 22 bp, synthetic construct
  misc_feature 1..22: note = chemically synthesized
  source 1..22: mol_type = other DNA
tttgacaagagcattttagctt

SEQ ID NO: 117396 - DNA, 22 bp, synthetic construct
  misc_feature 1..22: note = chemically synthesized
  source 1..22: mol_type = other DNA
gacaagagcattttagcttgaa

SEQ ID NO: 117397 - DNA, 22 bp, synthetic construct
  misc_feature 1..22: note = chemically synthesized
  source 1..22: mol_type = other DNA
acaagagcattttagcttgaaa

SEQ ID NO: 117398 - DNA, 22 bp, synthetic construct
  misc_feature 1..22: note = chemically synthesized
  source 1..22: mol_type = other DNA
tagcttgaaaggttacaaaagg

SEQ ID NO: 117399 - DNA, 22 bp, synthetic construct
  misc_feature 1..22: note = chemically synthesized
  source 1..22: mol_type = other DNA
agcttgaaaggttacaaaaggg

SEQ ID NO: 117400 - DNA, 22 bp, synthetic construct
  misc_feature 1..22: note = chemically synthesized
  source 1..22: mol_type = other DNA
gcttgaaaggttacaaaaggga

SEQ ID NO: 117401 - DNA, 22 bp, synthetic construct
  misc_feature 1..22: note = chemically synthesized
  source 1..22: mol_type = other DNA
gaaaggttacaaaagggatcat

SEQ ID NO: 117402 - DNA, 22 bp, synthetic construct
  misc_feature 1..22: note = chemically synthesized
  source 1..22: mol_type = other DNA
aaaggttacaaaagggatcatg

SEQ ID NO: 117403 - DNA, 22 bp, synthetic construct
  misc_feature 1..22: note = chemically synthesized
  source 1..22: mol_type = other DNA
caaaagggatcatgtagtctat

SEQ ID NO: 117404 - DNA, 22 bp, synthetic construct
  misc_feature 1..22: note = chemically synthesized
  source 1..22: mol_type = other DNA
tagcccagtataataggacaca

SEQ ID NO: 117405 - DNA, 22 bp, synthetic construct
  misc_feature 1..22: note = chemically synthesized
  source 1..22: mol_type = other DNA
tacccctggagctggacagaat

SEQ ID NO: 117406 - DNA, 22 bp, synthetic construct
  misc_feature 1..22: note = chemically synthesized
  source 1..22: mol_type = other DNA
gagctggacagaattggaggtg

SEQ ID NO: 117407 - DNA, 22 bp, synthetic construct
  misc_feature 1..22: note = chemically synthesized
  source 1..22: mol_type = other DNA
gacagaattggaggtgaatctt

SEQ ID NO: 117408 - DNA, 22 bp, synthetic construct
  misc_feature 1..22: note = chemically synthesized
  source 1..22: mol_type = other DNA
gaggtgaatcttatgttcggta

SEQ ID NO: 117409 - DNA, 22 bp, synthetic construct
  misc_feature 1..22: note = chemically synthesized
  source 1..22: mol_type = other DNA
atgttcggtataactttacgta

SEQ ID NO: 117410 - DNA, 22 bp, synthetic construct
  misc_feature 1..22: note = chemically synthesized
  source 1..22: mol_type = other DNA
tgttcggtataactttacgtac

SEQ ID NO: 117411 - DNA, 22 bp, synthetic construct
  misc_feature 1..22: note = chemically synthesized
  source 1..22: mol_type = other DNA
ggtataactttacgtactttac

SEQ ID NO: 117412 - DNA, 22 bp, synthetic construct
  misc_feature 1..22: note = chemically synthesized
  source 1..22: mol_type = other DNA
tacgtactttacctttgtgcac

SEQ ID NO: 117413 - DNA, 22 bp, synthetic construct
  misc_feature 1..22: note = chemically synthesized
  source 1..22: mol_type = other DNA
acgtactttacctttgtgcaca

SEQ ID NO: 117414 - DNA, 22 bp, synthetic construct
  misc_feature 1..22: note = chemically synthesized
  source 1..22: mol_type = other DNA
cgtactttacctttgtgcacat

SEQ ID NO: 117415 - DNA, 22 bp, synthetic construct
  misc_feature 1..22: note = chemically synthesized
  source 1..22: mol_type = other DNA
tacctttgtgcacattagtatc

SEQ ID NO: 117416 - DNA, 22 bp, synthetic construct
  misc_feature 1..22: note = chemically synthesized
  source 1..22: mol_type = other DNA
acctttgtgcacattagtatct

SEQ ID NO: 117417 - DNA, 22 bp, synthetic construct
  misc_feature 1..22: note = chemically synthesized
  source 1..22: mol_type = other DNA
cctttgtgcacattagtatctt

SEQ ID NO: 117418 - DNA, 22 bp, synthetic construct
  misc_feature 1..22: note = chemically synthesized
  source 1..22: mol_type = other DNA
tgtgcacattagtatctttgtt

SEQ ID NO: 117419 - DNA, 22 bp, synthetic construct
  misc_feature 1..22: note = chemically synthesized
  source 1..22: mol_type = other DNA
gtgcacattagtatctttgttt

SEQ ID NO: 117420 - DNA, 22 bp, synthetic construct
  misc_feature 1..22: note = chemically synthesized
  source 1..22: mol_type = other DNA
tgcacattagtatctttgtttt

SEQ ID NO: 117421 - DNA, 22 bp, synthetic construct
  misc_feature 1..22: note = chemically synthesized
  source 1..22: mol_type = other DNA
gtatctttgtttttaaagataa

SEQ ID NO: 117422 - DNA, 22 bp, synthetic construct
  misc_feature 1..22: note = chemically synthesized
  source 1..22: mol_type = other DNA
tgtttttaaagataaagatgtt

SEQ ID NO: 117423 - DNA, 22 bp, synthetic construct
  misc_feature 1..22: note = chemically synthesized
  source 1..22: mol_type = other DNA
gtttttaaagataaagatgtta

SEQ ID NO: 117424 - DNA, 22 bp, synthetic construct
  misc_feature 1..22: note = chemically synthesized
  source 1..22: mol_type = other DNA
tttttaaagataaagatgttaa

SEQ ID NO: 117425 - DNA, 22 bp, synthetic construct
  misc_feature 1..22: note = chemically synthesized
  source 1..22: mol_type = other DNA
ttaaagataaagatgttaatac

SEQ ID NO: 117426 - DNA, 22 bp, synthetic construct
  misc_feature 1..22: note = chemically synthesized
  source 1..22: mol_type = other DNA
taaagataaagatgttaatact

SEQ ID NO: 117427 - DNA, 22 bp, synthetic construct
  misc_feature 1..22: note = chemically synthesized
  source 1..22: mol_type = other DNA
aaagataaagatgttaatactt

SEQ ID NO: 117428 - DNA, 22 bp, synthetic construct
  misc_feature 1..22: note = chemically synthesized
  source 1..22: mol_type = other DNA
aagataaagatgttaatactta

SEQ ID NO: 117429 - DNA, 22 bp, synthetic construct
  misc_feature 1..22: note = chemically synthesized
  source 1..22: mol_type = other DNA
atacttacctcagggactggct

SEQ ID NO: 117430 - DNA, 22 bp, synthetic construct
  misc_feature 1..22: note = chemically synthesized
  source 1..22: mol_type = other DNA
acctcagggactggctctaaat

SEQ ID NO: 117431 - DNA, 22 bp, synthetic construct
  misc_feature 1..22: note = chemically synthesized
  source 1..22: mol_type = other DNA
cctcagggactggctctaaata

SEQ ID NO: 117432 - DNA, 22 bp, synthetic construct
  misc_feature 1..22: note = chemically synthesized
  source 1..22: mol_type = other DNA
agggactggctctaaatattta

SEQ ID NO: 117433 - DNA, 22 bp, synthetic construct
  misc_feature 1..22: note = chemically synthesized
  source 1..22: mol_type = other DNA
gctctaaatatttaatgtgagc

SEQ ID NO: 117434 - DNA, 22 bp, synthetic construct
  misc_feature 1..22: note = chemically synthesized
  source 1..22: mol_type = other DNA
taaatatttaatgtgagccttt

SEQ ID NO: 117435 - DNA, 22 bp, synthetic construct
  misc_feature 1..22: note = chemically synthesized
  source 1..22: mol_type = other DNA
aatatttaatgtgagcctttag

SEQ ID NO: 117436 - DNA, 22 bp, synthetic construct
  misc_feature 1..22: note = chemically synthesized
  source 1..22: mol_type = other DNA
aatgtgagcctttagcaaccag

SEQ ID NO: 117437 - DNA, 22 bp, synthetic construct
  misc_feature 1..22: note = chemically synthesized
  source 1..22: mol_type = other DNA
atgtgagcctttagcaaccagt

SEQ ID NO: 117438 - DNA, 22 bp, synthetic construct
  misc_feature 1..22: note = chemically synthesized
  source 1..22: mol_type = other DNA
tagcaaccagtgaatgttaata

SEQ ID NO: 117439 - DNA, 22 bp, synthetic construct
  misc_feature 1..22: note = chemically synthesized
  source 1..22: mol_type = other DNA
agcaaccagtgaatgttaatat

SEQ ID NO: 117440 - DNA, 22 bp, synthetic construct
  misc_feature 1..22: note = chemically synthesized
  source 1..22: mol_type = other DNA
gcaaccagtgaatgttaatatt

SEQ ID NO: 117441 - DNA, 22 bp, synthetic construct
  misc_feature 1..22: note = chemically synthesized
  source 1..22: mol_type = other DNA
atattctctccactctatatct

SEQ ID NO: 117442 - DNA, 22 bp, synthetic construct
  misc_feature 1..22: note = chemically synthesized
  source 1..22: mol_type = other DNA
tctccactctatatctctttca

SEQ ID NO: 117443 - DNA, 22 bp, synthetic construct
  misc_feature 1..22: note = chemically synthesized
  source 1..22: mol_type = other DNA
tccactctatatctctttcagg

SEQ ID NO: 117444 - DNA, 22 bp, synthetic construct
  misc_feature 1..22: note = chemically synthesized
  source 1..22: mol_type = other DNA
cactctatatctctttcaggaa

SEQ ID NO: 117445 - DNA, 22 bp, synthetic construct
  misc_feature 1..22: note = chemically synthesized
  source 1..22: mol_type = other DNA
tatatctctttcaggaattctc

SEQ ID NO: 117446 - DNA, 22 bp, synthetic construct
  misc_feature 1..22: note = chemically synthesized
  source 1..22: mol_type = other DNA
tatctctttcaggaattctcag

SEQ ID NO: 117447 - DNA, 22 bp, synthetic construct
  misc_feature 1..22: note = chemically synthesized
  source 1..22: mol_type = other DNA
tttcaggaattctcaggagtca

SEQ ID NO: 117448 - DNA, 22 bp, synthetic construct
  misc_feature 1..22: note = chemically synthesized
  source 1..22: mol_type = other DNA
tcaggaattctcaggagtcaat

SEQ ID NO: 117449 - DNA, 22 bp, synthetic construct
  misc_feature 1..22: note = chemically synthesized
  source 1..22: mol_type = other DNA
caggaattctcaggagtcaatc

SEQ ID NO: 117450 - DNA, 22 bp, synthetic construct
  misc_feature 1..22: note = chemically synthesized
  source 1..22: mol_type = other DNA
aggaattctcaggagtcaatca

SEQ ID NO: 117451 - DNA, 22 bp, synthetic construct
  misc_feature 1..22: note = chemically synthesized
  source 1..22: mol_type = other DNA
tcaggagtcaatcacagtcagc

SEQ ID NO: 117452 - DNA, 22 bp, synthetic construct
  misc_feature 1..22: note = chemically synthesized
  source 1..22: mol_type = other DNA
aggagtcaatcacagtcagctt

SEQ ID NO: 117453 - DNA, 22 bp, synthetic construct
  misc_feature 1..22: note = chemically synthesized
  source 1..22: mol_type = other DNA
atttccaactttttattaataa

SEQ ID NO: 117454 - DNA, 22 bp, synthetic construct
  misc_feature 1..22: note = chemically synthesized
  source 1..22: mol_type = other DNA
tttccaactttttattaataat

SEQ ID NO: 117455 - DNA, 22 bp, synthetic construct
  misc_feature 1..22: note = chemically synthesized
  source 1..22: mol_type = other DNA
ccaactttttattaataattgt

SEQ ID NO: 117456 - DNA, 22 bp, synthetic construct
  misc_feature 1..22: note = chemically synthesized
  source 1..22: mol_type = other DNA
caactttttattaataattgtc

SEQ ID NO: 117457 - DNA, 22 bp, synthetic construct
  misc_feature 1..22: note = chemically synthesized
  source 1..22: mol_type = other DNA
tttattaataattgtctttcct

SEQ ID NO: 117458 - DNA, 22 bp, synthetic construct
  misc_feature 1..22: note = chemically synthesized
  source 1..22: mol_type = other DNA
ttattaataattgtctttcctt

SEQ ID NO: 117459 - DNA, 22 bp, synthetic construct
  misc_feature 1..22: note = chemically synthesized
  source 1..22: mol_type = other DNA
tattaataattgtctttccttg

SEQ ID NO: 117460 - DNA, 22 bp, synthetic construct
  misc_feature 1..22: note = chemically synthesized
  source 1..22: mol_type = other DNA
attaataattgtctttccttgt

SEQ ID NO: 117461 - DNA, 22 bp, synthetic construct
  misc_feature 1..22: note = chemically synthesized
  source 1..22: mol_type = other DNA
ttaataattgtctttccttgtt

SEQ ID NO: 117462 - DNA, 22 bp, synthetic construct
  misc_feature 1..22: note = chemically synthesized
  source 1..22: mol_type = other DNA
ataattgtctttccttgttatt

SEQ ID NO: 117463 - DNA, 22 bp, synthetic construct
  misc_feature 1..22: note = chemically synthesized
  source 1..22: mol_type = other DNA
tctttccttgttattggctcac

SEQ ID NO: 117464 - DNA, 22 bp, synthetic construct
  misc_feature 1..22: note = chemically synthesized
  source 1..22: mol_type = other DNA
tccttgttattggctcactgat

SEQ ID NO: 117465 - DNA, 22 bp, synthetic construct
  misc_feature 1..22: note = chemically synthesized
  source 1..22: mol_type = other DNA
ccttgttattggctcactgata

SEQ ID NO: 117466 - DNA, 22 bp, synthetic construct
  misc_feature 1..22: note = chemically synthesized
  source 1..22: mol_type = other DNA
cttgttattggctcactgatac

SEQ ID NO: 117467 - DNA, 22 bp, synthetic construct
  misc_feature 1..22: note = chemically synthesized
  source 1..22: mol_type = other DNA
gttattggctcactgatactca

SEQ ID NO: 117468 - DNA, 22 bp, synthetic construct
  misc_feature 1..22: note = chemically synthesized
  source 1..22: mol_type = other DNA
ttattggctcactgatactcag

SEQ ID NO: 117469 - DNA, 22 bp, synthetic construct
  misc_feature 1..22: note = chemically synthesized
  source 1..22: mol_type = other DNA
ttggctcactgatactcagacc

SEQ ID NO: 117470 - DNA, 22 bp, synthetic construct
  misc_feature 1..22: note = chemically synthesized
  source 1..22: mol_type = other DNA
gctcactgatactcagaccaca

SEQ ID NO: 117471 - DNA, 22 bp, synthetic construct
  misc_feature 1..22: note = chemically synthesized
  source 1..22: mol_type = other DNA
actgatactcagaccacatctg

SEQ ID NO: 117472 - DNA, 22 bp, synthetic construct
  misc_feature 1..22: note = chemically synthesized
  source 1..22: mol_type = other DNA
atactcagaccacatctgtgag

SEQ ID NO: 117473 - DNA, 22 bp, synthetic construct
  misc_feature 1..22: note = chemically synthesized
  source 1..22: mol_type = other DNA
agaccacatctgtgaggtaaac

SEQ ID NO: 117474 - DNA, 22 bp, synthetic construct
  misc_feature 1..22: note = chemically synthesized
  source 1..22: mol_type = other DNA
tgaggtaaacaaggagacaaga

SEQ ID NO: 117475 - DNA, 22 bp, synthetic construct
  misc_feature 1..22: note = chemically synthesized
  source 1..22: mol_type = other DNA
cccacttaatagatgagcatat

SEQ ID NO: 117476 - DNA, 22 bp, synthetic construct
  misc_feature 1..22: note = chemically synthesized
  source 1..22: mol_type = other DNA
ccacttaatagatgagcatata

SEQ ID NO: 117477 - DNA, 22 bp, synthetic construct
  misc_feature 1..22: note = chemically synthesized
  source 1..22: mol_type = other DNA
aatagatgagcatataaaccag

SEQ ID NO: 117478 - DNA, 22 bp, synthetic construct
  misc_feature 1..22: note = chemically synthesized
  source 1..22: mol_type = other DNA
atagatgagcatataaaccaga

SEQ ID NO: 117479 - DNA, 22 bp, synthetic construct
  misc_feature 1..22: note = chemically synthesized
  source 1..22: mol_type = other DNA
tgtgagtaacccaagataatat

SEQ ID NO: 117480 - DNA, 22 bp, synthetic construct
  misc_feature 1..22: note = chemically synthesized
  source 1..22: mol_type = other DNA
gtgagtaacccaagataatatg

SEQ ID NO: 117481 - DNA, 22 bp, synthetic construct
  misc_feature 1..22: note = chemically synthesized
  source 1..22: mol_type = other DNA
tgagtaacccaagataatatga

SEQ ID NO: 117482 - DNA, 22 bp, synthetic construct
  misc_feature 1..22: note = chemically synthesized
  source 1..22: mol_type = other DNA
tttcaagaattcatgatgtgct

SEQ ID NO: 117483 - DNA, 22 bp, synthetic construct
  misc_feature 1..22: note = chemically synthesized
  source 1..22: mol_type = other DNA
caagaattcatgatgtgctctg

SEQ ID NO: 117484 - DNA, 22 bp, synthetic construct
  misc_feature 1..22: note = chemically synthesized
  source 1..22: mol_type = other DNA
aagaattcatgatgtgctctgg

SEQ ID NO: 117485 - DNA, 22 bp, synthetic construct
  misc_feature 1..22: note = chemically synthesized
  source 1..22: mol_type = other DNA
atgatgtgctctggtgtttttg

SEQ ID NO: 117486 - DNA, 22 bp, synthetic construct
  misc_feature 1..22: note = chemically synthesized
  source 1..22: mol_type = other DNA
tggtgtttttgttttgttttcc

SEQ ID NO: 117487 - DNA, 22 bp, synthetic construct
  misc_feature 1..22: note = chemically synthesized
  source 1..22: mol_type = other DNA
gtgtttttgttttgttttccat

SEQ ID NO: 117488 - DNA, 22 bp, synthetic construct
  misc_feature 1..22: note = chemically synthesized
  source 1..22: mol_type = other DNA
ttgttttgttttccatctgcca

SEQ ID NO: 117489 - DNA, 22 bp, synthetic construct
  misc_feature 1..22: note = chemically synthesized
  source 1..22: mol_type = other DNA
tgttttgttttccatctgccac

SEQ ID NO: 117490 - DNA, 22 bp, synthetic construct
  misc_feature 1..22: note = chemically synthesized
  source 1..22: mol_type = other DNA
gttttgttttccatctgccacc

SEQ ID NO: 117491 - DNA, 22 bp, synthetic construct
  misc_feature 1..22: note = chemically synthesized
  source 1..22: mol_type = other DNA
ttttgttttccatctgccacca

SEQ ID NO: 117492 - DNA, 22 bp, synthetic construct
  misc_feature 1..22: note = chemically synthesized
  source 1..22: mol_type = other DNA
tgttttccatctgccaccaatt

SEQ ID NO: 117493 - DNA, 22 bp, synthetic construct
  misc_feature 1..22: note = chemically synthesized
  source 1..22: mol_type = other DNA
gttttccatctgccaccaattt

SEQ ID NO: 117494 - DNA, 22 bp, synthetic construct
  misc_feature 1..22: note = chemically synthesized
  source 1..22: mol_type = other DNA
ttttccatctgccaccaattta

SEQ ID NO: 117495 - DNA, 22 bp, synthetic construct
  misc_feature 1..22: note = chemically synthesized
  source 1..22: mol_type = other DNA
tccatctgccaccaatttagga

SEQ ID NO: 117496 - DNA, 22 bp, synthetic construct
  misc_feature 1..22: note = chemically synthesized
  source 1..22: mol_type = other DNA
ccatctgccaccaatttaggat

SEQ ID NO: 117497 - DNA, 22 bp, synthetic construct
  misc_feature 1..22: note = chemically synthesized
  source 1..22: mol_type = other DNA
catctgccaccaatttaggatg

SEQ ID NO: 117498 - DNA, 22 bp, synthetic construct
  misc_feature 1..22: note = chemically synthesized
  source 1..22: mol_type = other DNA
ccaccaatttaggatgtgattc

SEQ ID NO: 117499 - DNA, 22 bp, synthetic construct
  misc_feature 1..22: note = chemically synthesized
  source 1..22: mol_type = other DNA
aggatgtgattcctctccttct

SEQ ID NO: 117500 - DNA, 22 bp, synthetic construct
  misc_feature 1..22: note = chemically synthesized
  source 1..22: mol_type = other DNA
ggatgtgattcctctccttctg

SEQ ID NO: 117501 - DNA, 22 bp, synthetic construct
  misc_feature 1..22: note = chemically synthesized
  source 1..22: mol_type = other DNA
ctctccttctgccagacaggtt

SEQ ID NO: 117502 - DNA, 22 bp, synthetic construct
  misc_feature 1..22: note = chemically synthesized
  source 1..22: mol_type = other DNA
tccttctgccagacaggttcaa

SEQ ID NO: 117503 - DNA, 22 bp, synthetic construct
  misc_feature 1..22: note = chemically synthesized
  source 1..22: mol_type = other DNA
cttctgccagacaggttcaaga

SEQ ID NO: 117504 - DNA, 22 bp, synthetic construct
  misc_feature 1..22: note = chemically synthesized
  source 1..22: mol_type = other DNA
ctgccagacaggttcaagaagc

SEQ ID NO: 117505 - DNA, 22 bp, synthetic construct
  misc_feature 1..22: note = chemically synthesized
  source 1..22: mol_type = other DNA
tgccagacaggttcaagaagct

SEQ ID NO: 117506 - DNA, 22 bp, synthetic construct
  misc_feature 1..22: note = chemically synthesized
  source 1..22: mol_type = other DNA
ccagacaggttcaagaagctag

SEQ ID NO: 117507 - DNA, 22 bp, synthetic construct
  misc_feature 1..22: note = chemically synthesized
  source 1..22: mol_type = other DNA
aagaagctagggaggtgactac

SEQ ID NO: 117508 - DNA, 22 bp, synthetic construct
  misc_feature 1..22: note = chemically synthesized
  source 1..22: mol_type = other DNA
gggaggtgactactgtcttagg

SEQ ID NO: 117509 - DNA, 22 bp, synthetic construct
  misc_feature 1..22: note = chemically synthesized
  source 1..22: mol_type = other DNA
ctgtcttaggaaaaatgctaag

SEQ ID NO: 117510 - DNA, 22 bp, synthetic construct
  misc_feature 1..22: note = chemically synthesized
  source 1..22: mol_type = other DNA
tcttaggaaaaatgctaagggc

SEQ ID NO: 117511 - DNA, 22 bp, synthetic construct
  misc_feature 1..22: note = chemically synthesized
  source 1..22: mol_type = other DNA
aggaaaaatgctaagggcttca

SEQ ID NO: 117512 - DNA, 22 bp, synthetic construct
  misc_feature 1..22: note = chemically synthesized
  source 1..22: mol_type = other DNA
ggaaaaatgctaagggcttcac

SEQ ID NO: 117513 - DNA, 22 bp, synthetic construct
  misc_feature 1..22: note = chemically synthesized
  source 1..22: mol_type = other DNA
agggcttcacactgtgacatgg

SEQ ID NO: 117514 - DNA, 22 bp, synthetic construct
  misc_feature 1..22: note = chemically synthesized
  source 1..22: mol_type = other DNA
cacactgtgacatggggttggg

SEQ ID NO: 117515 - DNA, 22 bp, synthetic construct
  misc_feature 1..22: note = chemically synthesized
  source 1..22: mol_type = other DNA
acactgtgacatggggttggga

SEQ ID NO: 117516 - DNA, 22 bp, synthetic construct
  misc_feature 1..22: note = chemically synthesized
  source 1..22: mol_type = other DNA
tgacatggggttgggagtcctg

SEQ ID NO: 117517 - DNA, 22 bp, synthetic construct
  misc_feature 1..22: note = chemically synthesized
  source 1..22: mol_type = other DNA
ggagtcctgaatgctgcttcag

SEQ ID NO: 117518 - DNA, 22 bp, synthetic construct
  misc_feature 1..22: note = chemically synthesized
  source 1..22: mol_type = other DNA
aatgctgcttcagaaggcaggg

SEQ ID NO: 117519 - DNA, 22 bp, synthetic construct
  misc_feature 1..22: note = chemically synthesized
  source 1..22: mol_type = other DNA
cttcagaaggcagggcttgggg

SEQ ID NO: 117520 - DNA, 22 bp, synthetic construct
  misc_feature 1..22: note = chemically synthesized
  source 1..22: mol_type = other DNA
cagaaggcagggcttggggatt

SEQ ID NO: 117521 - DNA, 22 bp, synthetic construct
  misc_feature 1..22: note = chemically synthesized
  source 1..22: mol_type = other DNA
agaaggcagggcttggggattg

SEQ ID NO: 117522 - DNA, 22 bp, synthetic construct
  misc_feature 1..22: note = chemically synthesized
  source 1..22: mol_type = other DNA
ggggattgtattagttcattct

SEQ ID NO: 117523 - DNA, 22 bp, synthetic construct
  misc_feature 1..22: note = chemically synthesized
  source 1..22: mol_type = other DNA
gggattgtattagttcattctc

SEQ ID NO: 117524 - DNA, 22 bp, synthetic construct
  misc_feature 1..22: note = chemically synthesized
  source 1..22: mol_type = other DNA
tattagttcattctcacactgc

SEQ ID NO: 117525 - DNA, 22 bp, synthetic construct
  misc_feature 1..22: note = chemically synthesized
  source 1..22: mol_type = other DNA
gttcattctcacactgctctaa

SEQ ID NO: 117526 - DNA, 22 bp, synthetic construct
  misc_feature 1..22: note = chemically synthesized
  source 1..22: mol_type = other DNA
attctcacactgctctaaagat

SEQ ID NO: 117527 - DNA, 22 bp, synthetic construct
  misc_feature 1..22: note = chemically synthesized
  source 1..22: mol_type = other DNA
tcacactgctctaaagatacta

SEQ ID NO: 117528 - DNA, 22 bp, synthetic construct
  misc_feature 1..22: note = chemically synthesized
  source 1..22: mol_type = other DNA
acactgctctaaagatactacc

SEQ ID NO: 117529 - DNA, 22 bp, synthetic construct
  misc_feature 1..22: note = chemically synthesized
  source 1..22: mol_type = other DNA
ctctaaagatactacctgagac

SEQ ID NO: 117530 - DNA, 22 bp, synthetic construct
  misc_feature 1..22: note = chemically synthesized
  source 1..22: mol_type = other DNA
taaagatactacctgagactgg

SEQ ID NO: 117531 - DNA, 22 bp, synthetic construct
  misc_feature 1..22: note = chemically synthesized
  source 1..22: mol_type = other DNA
aagatactacctgagactgggt

SEQ ID NO: 117532 - DNA, 22 bp, synthetic construct
  misc_feature 1..22: note = chemically synthesized
  source 1..22: mol_type = other DNA
cctgagactgggtaatttatta

SEQ ID NO: 117533 - DNA, 22 bp, synthetic construct
  misc_feature 1..22: note = chemically synthesized
  source 1..22: mol_type = other DNA
agactgggtaatttattaacaa

SEQ ID NO: 117534 - DNA, 22 bp, synthetic construct
  misc_feature 1..22: note = chemically synthesized
  source 1..22: mol_type = other DNA
ggtaatttattaacaaaggagg

SEQ ID NO: 117535 - DNA, 22 bp, synthetic construct
  misc_feature 1..22: note = chemically synthesized
  source 1..22: mol_type = other DNA
attaacaaaggaggtttaattg

SEQ ID NO: 117536 - DNA, 22 bp, synthetic construct
  misc_feature 1..22: note = chemically synthesized
  source 1..22: mol_type = other DNA
ttaacaaaggaggtttaattga

SEQ ID NO: 117537 - DNA, 22 bp, synthetic construct
  misc_feature 1..22: note = chemically synthesized
  source 1..22: mol_type = other DNA
acaaaggaggtttaattgactc

SEQ ID NO: 117538 - DNA, 22 bp, synthetic construct
  misc_feature 1..22: note = chemically synthesized
  source 1..22: mol_type = other DNA
aattgactcacatttccacata

SEQ ID NO: 117539 - DNA, 22 bp, synthetic construct
  misc_feature 1..22: note = chemically synthesized
  source 1..22: mol_type = other DNA
attgactcacatttccacatag

SEQ ID NO: 117540 - DNA, 22 bp, synthetic construct
  misc_feature 1..22: note = chemically synthesized
  source 1..22: mol_type = other DNA
actcacatttccacatagctgg

SEQ ID NO: 117541 - DNA, 22 bp, synthetic construct
  misc_feature 1..22: note = chemically synthesized
  source 1..22: mol_type = other DNA
acatttccacatagctggggag

SEQ ID NO: 117542 - DNA, 22 bp, synthetic construct
  misc_feature 1..22: note = chemically synthesized
  source 1..22: mol_type = other DNA
ccacatagctggggaggcctca

SEQ ID NO: 117543 - DNA, 22 bp, synthetic construct
  misc_feature 1..22: note = chemically synthesized
  source 1..22: mol_type = other DNA
cacatagctggggaggcctcag

SEQ ID NO: 117544 - DNA, 22 bp, synthetic construct
  misc_feature 1..22: note = chemically synthesized
  source 1..22: mol_type = other DNA
gggaggcctcaggaaacttaca

SEQ ID NO: 117545 - DNA, 22 bp, synthetic construct
  misc_feature 1..22: note = chemically synthesized
  source 1..22: mol_type = other DNA
aggaaacttacaattatggcag

SEQ ID NO: 117546 - DNA, 22 bp, synthetic construct
  misc_feature 1..22: note = chemically synthesized
  source 1..22: mol_type = other DNA
acaattatggcagaaggagaag

SEQ ID NO: 117547 - DNA, 22 bp, synthetic construct
  misc_feature 1..22: note = chemically synthesized
  source 1..22: mol_type = other DNA
caattatggcagaaggagaagc

SEQ ID NO: 117548 - DNA, 22 bp, synthetic construct
  misc_feature 1..22: note = chemically synthesized
  source 1..22: mol_type = other DNA
tggcagaaggagaagcaggcac

SEQ ID NO: 117549 - DNA, 22 bp, synthetic construct
  misc_feature 1..22: note = chemically synthesized
  source 1..22: mol_type = other DNA
acttggtggcaggcaagagaga

SEQ ID NO: 117550 - DNA, 22 bp, synthetic construct
  misc_feature 1..22: note = chemically synthesized
  source 1..22: mol_type = other DNA
cttggtggcaggcaagagagag

SEQ ID NO: 117551 - DNA, 22 bp, synthetic construct
  misc_feature 1..22: note = chemically synthesized
  source 1..22: mol_type = other DNA
ggtggcaggcaagagagagtga

SEQ ID NO: 117552 - DNA, 22 bp, synthetic construct
  misc_feature 1..22: note = chemically synthesized
  source 1..22: mol_type = other DNA
gtggcaggcaagagagagtgag

SEQ ID NO: 117553 - DNA, 22 bp, synthetic construct
  misc_feature 1..22: note = chemically synthesized
  source 1..22: mol_type = other DNA
ccttataaaaccatcagatctc

SEQ ID NO: 117554 - DNA, 22 bp, synthetic construct
  misc_feature 1..22: note = chemically synthesized
  source 1..22: mol_type = other DNA
ataaaaccatcagatctcatga

SEQ ID NO: 117555 - DNA, 22 bp, synthetic construct
  misc_feature 1..22: note = chemically synthesized
  source 1..22: mol_type = other DNA
taaaaccatcagatctcatgaa

SEQ ID NO: 117556 - DNA, 22 bp, synthetic construct
  misc_feature 1..22: note = chemically synthesized
  source 1..22: mol_type = other DNA
atgaaaactcactcagtatcac

SEQ ID NO: 117557 - DNA, 22 bp, synthetic construct
  misc_feature 1..22: note = chemically synthesized
  source 1..22: mol_type = other DNA
actcagtatcacgagaactgca

SEQ ID NO: 117558 - DNA, 22 bp, synthetic construct
  misc_feature 1..22: note = chemically synthesized
  source 1..22: mol_type = other DNA
agtatcacgagaactgcatggg

SEQ ID NO: 117559 - DNA, 22 bp, synthetic construct
  misc_feature 1..22: note = chemically synthesized
  source 1..22: mol_type = other DNA
catgggggaaactgctcccatg

SEQ ID NO: 117560 - DNA, 22 bp, synthetic construct
  misc_feature 1..22: note = chemically synthesized
  source 1..22: mol_type = other DNA
ctcccatgatccaataatctcc

SEQ ID NO: 117561 - DNA, 22 bp, synthetic construct
  misc_feature 1..22: note = chemically synthesized
  source 1..22: mol_type = other DNA
ccatgatccaataatctcccac

SEQ ID NO: 117562 - DNA, 22 bp, synthetic construct
  misc_feature 1..22: note = chemically synthesized
  source 1..22: mol_type = other DNA
ccacctggtccctcccccgaca

SEQ ID NO: 117563 - DNA, 22 bp, synthetic construct
  misc_feature 1..22: note = chemically synthesized
  source 1..22: mol_type = other DNA
gtccctcccccgacatataggg

SEQ ID NO: 117564 - DNA, 22 bp, synthetic construct
  misc_feature 1..22: note = chemically synthesized
  source 1..22: mol_type = other DNA
ccccgacatatagggattatgg

SEQ ID NO: 117565 - DNA, 22 bp, synthetic construct
  misc_feature 1..22: note = chemically synthesized
  source 1..22: mol_type = other DNA
tggggattacaattcaatatga

SEQ ID NO: 117566 - DNA, 22 bp, synthetic construct
  misc_feature 1..22: note = chemically synthesized
  source 1..22: mol_type = other DNA
caattcaatatgaaatttgggt

SEQ ID NO: 117567 - DNA, 22 bp, synthetic construct
  misc_feature 1..22: note = chemically synthesized
  source 1..22: mol_type = other DNA
aatatgaaatttgggtggagac

SEQ ID NO: 117568 - DNA, 22 bp, synthetic construct
  misc_feature 1..22: note = chemically synthesized
  source 1..22: mol_type = other DNA
gggtggagacacagagccaagc

SEQ ID NO: 117569 - DNA, 22 bp, synthetic construct
  misc_feature 1..22: note = chemically synthesized
  source 1..22: mol_type = other DNA
ggtggagacacagagccaagcc

SEQ ID NO: 117570 - DNA, 22 bp, synthetic construct
  misc_feature 1..22: note = chemically synthesized
  source 1..22: mol_type = other DNA
gtgcactcaccacaagtgaaac

SEQ ID NO: 117571 - DNA, 22 bp, synthetic construct
  misc_feature 1..22: note = chemically synthesized
  source 1..22: mol_type = other DNA
tgcactcaccacaagtgaaact

SEQ ID NO: 117572 - DNA, 22 bp, synthetic construct
  misc_feature 1..22: note = chemically synthesized
  source 1..22: mol_type = other DNA
accacaagtgaaactggcctct

SEQ ID NO: 117573 - DNA, 22 bp, synthetic construct
  misc_feature 1..22: note = chemically synthesized
  source 1..22: mol_type = other DNA
gcctctgagcctcaggtgggat

SEQ ID NO: 117574 - DNA, 22 bp, synthetic construct
  misc_feature 1..22: note = chemically synthesized
  source 1..22: mol_type = other DNA
tgagcctcaggtgggatgggga

SEQ ID NO: 117575 - DNA, 22 bp, synthetic construct
  misc_feature 1..22: note = chemically synthesized
  source 1..22: mol_type = other DNA
agcctcaggtgggatggggaag

SEQ ID NO: 117576 - DNA, 22 bp, synthetic construct
  misc_feature 1..22: note = chemically synthesized
  source 1..22: mol_type = other DNA
aggtgggatggggaagctcact

SEQ ID NO: 117577 - DNA, 22 bp, synthetic construct
  misc_feature 1..22: note = chemically synthesized
  source 1..22: mol_type = other DNA
acttcagcaagtccctgccact

SEQ ID NO: 117578 - DNA, 22 bp, synthetic construct
  misc_feature 1..22: note = chemically synthesized
  source 1..22: mol_type = other DNA
cagcaagtccctgccactgtgg

SEQ ID NO: 117579 - DNA, 22 bp, synthetic construct
  misc_feature 1..22: note = chemically synthesized
  source 1..22: mol_type = other DNA
agcaagtccctgccactgtggc

SEQ ID NO: 117580 - DNA, 22 bp, synthetic construct
  misc_feature 1..22: note = chemically synthesized
  source 1..22: mol_type = other DNA
ccactgtggcattcatatcttc

SEQ ID NO: 117581 - DNA, 22 bp, synthetic construct
  misc_feature 1..22: note = chemically synthesized
  source 1..22: mol_type = other DNA
tggcattcatatcttcttagtc

SEQ ID NO: 117582 - DNA, 22 bp, synthetic construct
  misc_feature 1..22: note = chemically synthesized
  source 1..22: mol_type = other DNA
atatcttcttagtcctggggct

SEQ ID NO: 117583 - DNA, 22 bp, synthetic construct
  misc_feature 1..22: note = chemically synthesized
  source 1..22: mol_type = other DNA
cttagtcctggggctggaatgc

SEQ ID NO: 117584 - DNA, 22 bp, synthetic construct
  misc_feature 1..22: note = chemically synthesized
  source 1..22: mol_type = other DNA
ttagtcctggggctggaatgct

SEQ ID NO: 117585 - DNA, 22 bp, synthetic construct
  misc_feature 1..22: note = chemically synthesized
  source 1..22: mol_type = other DNA
agtcctggggctggaatgctgc

SEQ ID NO: 117586 - DNA, 22 bp, synthetic construct
  misc_feature 1..22: note = chemically synthesized
  source 1..22: mol_type = other DNA
gtcctggggctggaatgctgcc

SEQ ID NO: 117587 - DNA, 22 bp, synthetic construct
  misc_feature 1..22: note = chemically synthesized
  source 1..22: mol_type = other DNA
gggctggaatgctgcccatttt

SEQ ID NO: 117588 - DNA, 22 bp, synthetic construct
  misc_feature 1..22: note = chemically synthesized
  source 1..22: mol_type = other DNA
gaatgctgcccattttttgaaa

SEQ ID NO: 117589 - DNA, 22 bp, synthetic construct
  misc_feature 1..22: note = chemically synthesized
  source 1..22: mol_type = other DNA
cccattttttgaaaaagctgat

SEQ ID NO: 117590 - DNA, 22 bp, synthetic construct
  misc_feature 1..22: note = chemically synthesized
  source 1..22: mol_type = other DNA
tttgaaaaagctgatcagagtc

SEQ ID NO: 117591 - DNA, 22 bp, synthetic construct
  misc_feature 1..22: note = chemically synthesized
  source 1..22: mol_type = other DNA
ttgaaaaagctgatcagagtct

SEQ ID NO: 117592 - DNA, 22 bp, synthetic construct
  misc_feature 1..22: note = chemically synthesized
  source 1..22: mol_type = other DNA
tgaaaaagctgatcagagtctc

SEQ ID NO: 117593 - DNA, 22 bp, synthetic construct
  misc_feature 1..22: note = chemically synthesized
  source 1..22: mol_type = other DNA
gaaaaagctgatcagagtctct

SEQ ID NO: 117594 - DNA, 22 bp, synthetic construct
  misc_feature 1..22: note = chemically synthesized
  source 1..22: mol_type = other DNA
aaaaagctgatcagagtctcta

SEQ ID NO: 117595 - DNA, 22 bp, synthetic construct
  misc_feature 1..22: note = chemically synthesized
  source 1..22: mol_type = other DNA
atcagagtctctaggagtagag

SEQ ID NO: 117596 - DNA, 22 bp, synthetic construct
  misc_feature 1..22: note = chemically synthesized
  source 1..22: mol_type = other DNA
taggagtagagtaatggggaga

SEQ ID NO: 117597 - DNA, 22 bp, synthetic construct
  misc_feature 1..22: note = chemically synthesized
  source 1..22: mol_type = other DNA
ggagtagagtaatggggagaaa

SEQ ID NO: 117598 - DNA, 22 bp, synthetic construct
  misc_feature 1..22: note = chemically synthesized
  source 1..22: mol_type = other DNA
ggttccctgaggagcaattacc

SEQ ID NO: 117599 - DNA, 22 bp, synthetic construct
  misc_feature 1..22: note = chemically synthesized
  source 1..22: mol_type = other DNA
cctgaggagcaattacccaggt

SEQ ID NO: 117600 - DNA, 22 bp, synthetic construct
  misc_feature 1..22: note = chemically synthesized
  source 1..22: mol_type = other DNA
aggagcaattacccaggtaatt

SEQ ID NO: 117601 - DNA, 22 bp, synthetic construct
  misc_feature 1..22: note = chemically synthesized
  source 1..22: mol_type = other DNA
cccaggtaattacattagcctc

SEQ ID NO: 117602 - DNA, 22 bp, synthetic construct
  misc_feature 1..22: note = chemically synthesized
  source 1..22: mol_type = other DNA
cattagcctctctcaatatcca

SEQ ID NO: 117603 - DNA, 22 bp, synthetic construct
  misc_feature 1..22: note = chemically synthesized
  source 1..22: mol_type = other DNA
gcctctctcaatatccagagaa

SEQ ID NO: 117604 - DNA, 22 bp, synthetic construct
  misc_feature 1..22: note = chemically synthesized
  source 1..22: mol_type = other DNA
tctcaatatccagagaacctaa

SEQ ID NO: 117605 - DNA, 22 bp, synthetic construct
  misc_feature 1..22: note = chemically synthesized
  source 1..22: mol_type = other DNA
tcaatatccagagaacctaagg

SEQ ID NO: 117606 - DNA, 22 bp, synthetic construct
  misc_feature 1..22: note = chemically synthesized
  source 1..22: mol_type = other DNA
aatatccagagaacctaaggga

SEQ ID NO: 117607 - DNA, 22 bp, synthetic construct
  misc_feature 1..22: note = chemically synthesized
  source 1..22: mol_type = other DNA
agggaaacaagcaaagatatag

SEQ ID NO: 117608 - DNA, 22 bp, synthetic construct
  misc_feature 1..22: note = chemically synthesized
  source 1..22: mol_type = other DNA
tgtgaaatgagtgtaatagtat

SEQ ID NO: 117609 - DNA, 22 bp, synthetic construct
  misc_feature 1..22: note = chemically synthesized
  source 1..22: mol_type = other DNA
gtgaaatgagtgtaatagtatt

SEQ ID NO: 117610 - DNA, 22 bp, synthetic construct
  misc_feature 1..22: note = chemically synthesized
  source 1..22: mol_type = other DNA
tgaaatgagtgtaatagtattt

SEQ ID NO: 117611 - DNA, 22 bp, synthetic construct
  misc_feature 1..22: note = chemically synthesized
  source 1..22: mol_type = other DNA
atccagcatatttaaataacta

SEQ ID NO: 117612 - DNA, 22 bp, synthetic construct
  misc_feature 1..22: note = chemically synthesized
  source 1..22: mol_type = other DNA
tccagcatatttaaataactaa

SEQ ID NO: 117613 - DNA, 22 bp, synthetic construct
  misc_feature 1..22: note = chemically synthesized
  source 1..22: mol_type = other DNA
aaataactaatatatgtaaatt

SEQ ID NO: 117614 - DNA, 22 bp, synthetic construct
  misc_feature 1..22: note = chemically synthesized
  source 1..22: mol_type = other DNA
aataactaatatatgtaaattt

SEQ ID NO: 117615 - DNA, 22 bp, synthetic construct
  misc_feature 1..22: note = chemically synthesized
  source 1..22: mol_type = other DNA
atatatgtaaatttcttttttc

SEQ ID NO: 117616 - DNA, 22 bp, synthetic construct
  misc_feature 1..22: note = chemically synthesized
  source 1..22: mol_type = other DNA
cttttttctaacttattttttg

SEQ ID NO: 117617 - DNA, 22 bp, synthetic construct
  misc_feature 1..22: note = chemically synthesized
  source 1..22: mol_type = other DNA
ttttttctaacttattttttgt

SEQ ID NO: 117618 - DNA, 22 bp, synthetic construct
  misc_feature 1..22: note = chemically synthesized
  source 1..22: mol_type = other DNA
ttttctaacttattttttgtta

SEQ ID NO: 117619 - DNA, 22 bp, synthetic construct
  misc_feature 1..22: note = chemically synthesized
  source 1..22: mol_type = other DNA
tttctaacttattttttgttat

SEQ ID NO: 117620 - DNA, 22 bp, synthetic construct
  misc_feature 1..22: note = chemically synthesized
  source 1..22: mol_type = other DNA
ttctaacttattttttgttata

SEQ ID NO: 117621 - DNA, 22 bp, synthetic construct
  misc_feature 1..22: note = chemically synthesized
  source 1..22: mol_type = other DNA
tctaacttattttttgttatac

SEQ ID NO: 117622 - DNA, 22 bp, synthetic construct
  misc_feature 1..22: note = chemically synthesized
  source 1..22: mol_type = other DNA
ctaacttattttttgttatact

SEQ ID NO: 117623 - DNA, 22 bp, synthetic construct
  misc_feature 1..22: note = chemically synthesized
  source 1..22: mol_type = other DNA
taacttattttttgttatactt

SEQ ID NO: 117624 - DNA, 22 bp, synthetic construct
  misc_feature 1..22: note = chemically synthesized
  source 1..22: mol_type = other DNA
acttattttttgttatactttt

SEQ ID NO: 117625 - DNA, 22 bp, synthetic construct
  misc_feature 1..22: note = chemically synthesized
  source 1..22: mol_type = other DNA
attttttgttatacttttaagt

SEQ ID NO: 117626 - DNA, 22 bp, synthetic construct
  misc_feature 1..22: note = chemically synthesized
  source 1..22: mol_type = other DNA
ttttttgttatacttttaagtt

SEQ ID NO: 117627 - DNA, 22 bp, synthetic construct
  misc_feature 1..22: note = chemically synthesized
  source 1..22: mol_type = other DNA
tttgttatacttttaagtttta

SEQ ID NO: 117628 - DNA, 22 bp, synthetic construct
  misc_feature 1..22: note = chemically synthesized
  source 1..22: mol_type = other DNA
ttgttatacttttaagttttag

SEQ ID NO: 117629 - DNA, 22 bp, synthetic construct
  misc_feature 1..22: note = chemically synthesized
  source 1..22: mol_type = other DNA
tgttatacttttaagttttagg

SEQ ID NO: 117630 - DNA, 22 bp, synthetic construct
  misc_feature 1..22: note = chemically synthesized
  source 1..22: mol_type = other DNA
gttatacttttaagttttaggg

SEQ ID NO: 117631 - DNA, 22 bp, synthetic construct
  misc_feature 1..22: note = chemically synthesized
  source 1..22: mol_type = other DNA
ttatacttttaagttttagggt

SEQ ID NO: 117632 - DNA, 22 bp, synthetic construct
  misc_feature 1..22: note = chemically synthesized
  source 1..22: mol_type = other DNA
tacttttaagttttagggtaca

SEQ ID NO: 117633 - DNA, 22 bp, synthetic construct
  misc_feature 1..22: note = chemically synthesized
  source 1..22: mol_type = other DNA
ttaagttttagggtacatgtgc

SEQ ID NO: 117634 - DNA, 22 bp, synthetic construct
  misc_feature 1..22: note = chemically synthesized
  source 1..22: mol_type = other DNA
taagttttagggtacatgtgca

SEQ ID NO: 117635 - DNA, 22 bp, synthetic construct
  misc_feature 1..22: note = chemically synthesized
  source 1..22: mol_type = other DNA
aagttttagggtacatgtgcac

SEQ ID NO: 117636 - DNA, 22 bp, synthetic construct
  misc_feature 1..22: note = chemically synthesized
  source 1..22: mol_type = other DNA
agttttagggtacatgtgcaca

SEQ ID NO: 117637 - DNA, 22 bp, synthetic construct
  misc_feature 1..22: note = chemically synthesized
  source 1..22: mol_type = other DNA
tagggtacatgtgcacaaggtg

SEQ ID NO: 117638 - DNA, 22 bp, synthetic construct
  misc_feature 1..22: note = chemically synthesized
  source 1..22: mol_type = other DNA
agggtacatgtgcacaaggtgc

SEQ ID NO: 117639 - DNA, 22 bp, synthetic construct
  misc_feature 1..22: note = chemically synthesized
  source 1..22: mol_type = other DNA
gggtacatgtgcacaaggtgca

SEQ ID NO: 117640 - DNA, 22 bp, synthetic construct
  misc_feature 1..22: note = chemically synthesized
  source 1..22: mol_type = other DNA
gttacatatgtatacatgtgcc

SEQ ID NO: 117641 - DNA, 22 bp, synthetic construct
  misc_feature 1..22: note = chemically synthesized
  source 1..22: mol_type = other DNA
catatgtatacatgtgccatgt

SEQ ID NO: 117642 - DNA, 22 bp, synthetic construct
  misc_feature 1..22: note = chemically synthesized
  source 1..22: mol_type = other DNA
gtgtgctgcacccattaactca

SEQ ID NO: 117643 - DNA, 22 bp, synthetic construct
  misc_feature 1..22: note = chemically synthesized
  source 1..22: mol_type = other DNA
cacccattaactcaccatttaa

SEQ ID NO: 117644 - DNA, 22 bp, synthetic construct
  misc_feature 1..22: note = chemically synthesized
  source 1..22: mol_type = other DNA
actcaccatttaacattaggta

SEQ ID NO: 117645 - DNA, 22 bp, synthetic construct
  misc_feature 1..22: note = chemically synthesized
  source 1..22: mol_type = other DNA
accatttaacattaggtatatc

SEQ ID NO: 117646 - DNA, 22 bp, synthetic construct
  misc_feature 1..22: note = chemically synthesized
  source 1..22: mol_type = other DNA
aacattaggtatatctcctaat

SEQ ID NO: 117647 - DNA, 22 bp, synthetic construct
  misc_feature 1..22: note = chemically synthesized
  source 1..22: mol_type = other DNA
acattaggtatatctcctaatg

SEQ ID NO: 117648 - DNA, 22 bp, synthetic construct
  misc_feature 1..22: note = chemically synthesized
  source 1..22: mol_type = other DNA
ggtatatctcctaatgctatcc

SEQ ID NO: 117649 - DNA, 22 bp, synthetic construct
  misc_feature 1..22: note = chemically synthesized
  source 1..22: mol_type = other DNA
ctaatgctatccctgccccctc

SEQ ID NO: 117650 - DNA, 22 bp, synthetic construct
  misc_feature 1..22: note = chemically synthesized
  source 1..22: mol_type = other DNA
atgctatccctgccccctcctc

SEQ ID NO: 117651 - DNA, 22 bp, synthetic construct
  misc_feature 1..22: note = chemically synthesized
  source 1..22: mol_type = other DNA
tccctgccccctcctcccaccc

SEQ ID NO: 117652 - DNA, 22 bp, synthetic construct
  misc_feature 1..22: note = chemically synthesized
  source 1..22: mol_type = other DNA
ccccctcctcccaccccacaac

SEQ ID NO: 117653 - DNA, 22 bp, synthetic construct
  misc_feature 1..22: note = chemically synthesized
  source 1..22: mol_type = other DNA
ctcccaccccacaacaggcccc

SEQ ID NO: 117654 - DNA, 22 bp, synthetic construct
  misc_feature 1..22: note = chemically synthesized
  source 1..22: mol_type = other DNA
ccaccccacaacaggccccggt

SEQ ID NO: 117655 - DNA, 22 bp, synthetic construct
  misc_feature 1..22: note = chemically synthesized
  source 1..22: mol_type = other DNA
cccttcctgtgtccatgtgttc

SEQ ID NO: 117656 - DNA, 22 bp, synthetic construct
  misc_feature 1..22: note = chemically synthesized
  source 1..22: mol_type = other DNA
cctgtgtccatgtgttctcatt

SEQ ID NO: 117657 - DNA, 22 bp, synthetic construct
  misc_feature 1..22: note = chemically synthesized
  source 1..22: mol_type = other DNA
ctgtgtccatgtgttctcattg

SEQ ID NO: 117658 - DNA, 22 bp, synthetic construct
  misc_feature 1..22: note = chemically synthesized
  source 1..22: mol_type = other DNA
tgtccatgtgttctcattgttc

SEQ ID NO: 117659 - DNA, 22 bp, synthetic construct
  misc_feature 1..22: note = chemically synthesized
  source 1..22: mol_type = other DNA
tcattgttcagttcccacctat

SEQ ID NO: 117660 - DNA, 22 bp, synthetic construct
  misc_feature 1..22: note = chemically synthesized
  source 1..22: mol_type = other DNA
attgttcagttcccacctatga

SEQ ID NO: 117661 - DNA, 22 bp, synthetic construct
  misc_feature 1..22: note = chemically synthesized
  source 1..22: mol_type = other DNA
ttcagttcccacctatgagtga

SEQ ID NO: 117662 - DNA, 22 bp, synthetic construct
  misc_feature 1..22: note = chemically synthesized
  source 1..22: mol_type = other DNA
agttcccacctatgagtgagaa

SEQ ID NO: 117663 - DNA, 22 bp, synthetic construct
  misc_feature 1..22: note = chemically synthesized
  source 1..22: mol_type = other DNA
ccacctatgagtgagaacatgt

SEQ ID NO: 117664 - DNA, 22 bp, synthetic construct
  misc_feature 1..22: note = chemically synthesized
  source 1..22: mol_type = other DNA
tgagtgagaacatgtggtgttt

SEQ ID NO: 117665 - DNA, 22 bp, synthetic construct
  misc_feature 1..22: note = chemically synthesized
  source 1..22: mol_type = other DNA
ggctttttgtccttgtgatagt

SEQ ID NO: 117666 - DNA, 22 bp, synthetic construct
  misc_feature 1..22: note = chemically synthesized
  source 1..22: mol_type = other DNA
gctttttgtccttgtgatagtt

SEQ ID NO: 117667 - DNA, 22 bp, synthetic construct
  misc_feature 1..22: note = chemically synthesized
  source 1..22: mol_type = other DNA
tttgtccttgtgatagtttgct

SEQ ID NO: 117668 - DNA, 22 bp, synthetic construct
  misc_feature 1..22: note = chemically synthesized
  source 1..22: mol_type = other DNA
ttgtccttgtgatagtttgctg

SEQ ID NO: 117669 - DNA, 22 bp, synthetic construct
  misc_feature 1..22: note = chemically synthesized
  source 1..22: mol_type = other DNA
tgtccttgtgatagtttgctga

SEQ ID NO: 117670 - DNA, 22 bp, synthetic construct
  misc_feature 1..22: note = chemically synthesized
  source 1..22: mol_type = other DNA
gtccttgtgatagtttgctgag

SEQ ID NO: 117671 - DNA, 22 bp, synthetic construct
  misc_feature 1..22: note = chemically synthesized
  source 1..22: mol_type = other DNA
tccttgtgatagtttgctgaga

SEQ ID NO: 117672 - DNA, 22 bp, synthetic construct
  misc_feature 1..22: note = chemically synthesized
  source 1..22: mol_type = other DNA
gtgatagtttgctgagaatgat

SEQ ID NO: 117673 - DNA, 22 bp, synthetic construct
  misc_feature 1..22: note = chemically synthesized
  source 1..22: mol_type = other DNA
tgatagtttgctgagaatgatg

SEQ ID NO: 117674 - DNA, 22 bp, synthetic construct
  misc_feature 1..22: note = chemically synthesized
  source 1..22: mol_type = other DNA
gctgagaatgatggtttccagc

SEQ ID NO: 117675 - DNA, 22 bp, synthetic construct
  misc_feature 1..22: note = chemically synthesized
  source 1..22: mol_type = other DNA
ctgagaatgatggtttccagct

SEQ ID NO: 117676 - DNA, 22 bp, synthetic construct
  misc_feature 1..22: note = chemically synthesized
  source 1..22: mol_type = other DNA
agaatgatggtttccagcttca

SEQ ID NO: 117677 - DNA, 22 bp, synthetic construct
  misc_feature 1..22: note = chemically synthesized
  source 1..22: mol_type = other DNA
ccagcttcatccatgtccctac

SEQ ID NO: 117678 - DNA, 22 bp, synthetic construct
  misc_feature 1..22: note = chemically synthesized
  source 1..22: mol_type = other DNA
cagcttcatccatgtccctaca

SEQ ID NO: 117679 - DNA, 22 bp, synthetic construct
  misc_feature 1..22: note = chemically synthesized
  source 1..22: mol_type = other DNA
catccatgtccctacaaaggac

SEQ ID NO: 117680 - DNA, 22 bp, synthetic construct
  misc_feature 1..22: note = chemically synthesized
  source 1..22: mol_type = other DNA
atccatgtccctacaaaggaca

SEQ ID NO: 117681 - DNA, 22 bp, synthetic construct
  misc_feature 1..22: note = chemically synthesized
  source 1..22: mol_type = other DNA
caaaggacatgaactcatcatt

SEQ ID NO: 117682 - DNA, 22 bp, synthetic construct
  misc_feature 1..22: note = chemically synthesized
  source 1..22: mol_type = other DNA
atcattttttatggctgcatag

SEQ ID NO: 117683 - DNA, 22 bp, synthetic construct
  misc_feature 1..22: note = chemically synthesized
  source 1..22: mol_type = other DNA
tttatggctgcatagtattcca

SEQ ID NO: 117684 - DNA, 22 bp, synthetic construct
  misc_feature 1..22: note = chemically synthesized
  source 1..22: mol_type = other DNA
ttatggctgcatagtattccat

SEQ ID NO: 117685 - DNA, 22 bp, synthetic construct
  misc_feature 1..22: note = chemically synthesized
  source 1..22: mol_type = other DNA
tatggctgcatagtattccatg

SEQ ID NO: 117686 - DNA, 22 bp, synthetic construct
  misc_feature 1..22: note = chemically synthesized
  source 1..22: mol_type = other DNA
atggctgcatagtattccatgg

SEQ ID NO: 117687 - DNA, 22 bp, synthetic construct
  misc_feature 1..22: note = chemically synthesized
  source 1..22: mol_type = other DNA
tggctgcatagtattccatggt

SEQ ID NO: 117688 - DNA, 22 bp, synthetic construct
  misc_feature 1..22: note = chemically synthesized
  source 1..22: mol_type = other DNA
catagtattccatggtgtatat

SEQ ID NO: 117689 - DNA, 22 bp, synthetic construct
  misc_feature 1..22: note = chemically synthesized
  source 1..22: mol_type = other DNA
catggtgtatatgtgccacatt

SEQ ID NO: 117690 - DNA, 22 bp, synthetic construct
  misc_feature 1..22: note = chemically synthesized
  source 1..22: mol_type = other DNA
tcttaatccagtctatcattgt

SEQ ID NO: 117691 - DNA, 22 bp, synthetic construct
  misc_feature 1..22: note = chemically synthesized
  source 1..22: mol_type = other DNA
cttaatccagtctatcattgtt

SEQ ID NO: 117692 - DNA, 22 bp, synthetic construct
  misc_feature 1..22: note = chemically synthesized
  source 1..22: mol_type = other DNA
ttaatccagtctatcattgttg

SEQ ID NO: 117693 - DNA, 22 bp, synthetic construct
  misc_feature 1..22: note = chemically synthesized
  source 1..22: mol_type = other DNA
aatccagtctatcattgttgga

SEQ ID NO: 117694 - DNA, 22 bp, synthetic construct
  misc_feature 1..22: note = chemically synthesized
  source 1..22: mol_type = other DNA
atccagtctatcattgttggac

SEQ ID NO: 117695 - DNA, 22 bp, synthetic construct
  misc_feature 1..22: note = chemically synthesized
  source 1..22: mol_type = other DNA
tcattgttggacatttgggttg

SEQ ID NO: 117696 - DNA, 22 bp, synthetic construct
  misc_feature 1..22: note = chemically synthesized
  source 1..22: mol_type = other DNA
ttggacatttgggttggttcca

SEQ ID NO: 117697 - DNA, 22 bp, synthetic construct
  misc_feature 1..22: note = chemically synthesized
  source 1..22: mol_type = other DNA
gacatttgggttggttccaagt

SEQ ID NO: 117698 - DNA, 22 bp, synthetic construct
  misc_feature 1..22: note = chemically synthesized
  source 1..22: mol_type = other DNA
gggttggttccaagtctttgct

SEQ ID NO: 117699 - DNA, 22 bp, synthetic construct
  misc_feature 1..22: note = chemically synthesized
  source 1..22: mol_type = other DNA
ggttggttccaagtctttgcta

SEQ ID NO: 117700 - DNA, 22 bp, synthetic construct
  misc_feature 1..22: note = chemically synthesized
  source 1..22: mol_type = other DNA
gttccaagtctttgctattgtg

SEQ ID NO: 117701 - DNA, 22 bp, synthetic construct
  misc_feature 1..22: note = chemically synthesized
  source 1..22: mol_type = other DNA
caagtctttgctattgtgaata

SEQ ID NO: 117702 - DNA, 22 bp, synthetic construct
  misc_feature 1..22: note = chemically synthesized
  source 1..22: mol_type = other DNA
tgctattgtgaatagtgccgca

SEQ ID NO: 117703 - DNA, 22 bp, synthetic construct
  misc_feature 1..22: note = chemically synthesized
  source 1..22: mol_type = other DNA
gctattgtgaatagtgccgcaa

SEQ ID NO: 117704 - DNA, 22 bp, synthetic construct
  misc_feature 1..22: note = chemically synthesized
  source 1..22: mol_type = other DNA
ctattgtgaatagtgccgcaat

SEQ ID NO: 117705 - DNA, 22 bp, synthetic construct
  misc_feature 1..22: note = chemically synthesized
  source 1..22: mol_type = other DNA
ttgtgaatagtgccgcaataaa

SEQ ID NO: 117706 - DNA, 22 bp, synthetic construct
  misc_feature 1..22: note = chemically synthesized
  source 1..22: mol_type = other DNA
tgaatagtgccgcaataaacat

SEQ ID NO: 117707 - DNA, 22 bp, synthetic construct
  misc_feature 1..22: note = chemically synthesized
  source 1..22: mol_type = other DNA
tatagcagcatgatttataatc

SEQ ID NO: 117708 - DNA, 22 bp, synthetic construct
  misc_feature 1..22: note = chemically synthesized
  source 1..22: mol_type = other DNA
atagcagcatgatttataatcc

SEQ ID NO: 117709 - DNA, 22 bp, synthetic construct
  misc_feature 1..22: note = chemically synthesized
  source 1..22: mol_type = other DNA
tagcagcatgatttataatcct

SEQ ID NO: 117710 - DNA, 22 bp, synthetic construct
  misc_feature 1..22: note = chemically synthesized
  source 1..22: mol_type = other DNA
ataatcctttgggtgtataccc

SEQ ID NO: 117711 - DNA, 22 bp, synthetic construct
  misc_feature 1..22: note = chemically synthesized
  source 1..22: mol_type = other DNA
taatcctttgggtgtataccca

SEQ ID NO: 117712 - DNA, 22 bp, synthetic construct
  misc_feature 1..22: note = chemically synthesized
  source 1..22: mol_type = other DNA
tgggtgtatacccagtaatggg

SEQ ID NO: 117713 - DNA, 22 bp, synthetic construct
  misc_feature 1..22: note = chemically synthesized
  source 1..22: mol_type = other DNA
gggtgtatacccagtaatggga

SEQ ID NO: 117714 - DNA, 22 bp, synthetic construct
  misc_feature 1..22: note = chemically synthesized
  source 1..22: mol_type = other DNA
ggtgtatacccagtaatgggat

SEQ ID NO: 117715 - DNA, 22 bp, synthetic construct
  misc_feature 1..22: note = chemically synthesized
  source 1..22: mol_type = other DNA
ggtcaaatggtatttctagttc

SEQ ID NO: 117716 - DNA, 22 bp, synthetic construct
  misc_feature 1..22: note = chemically synthesized
  source 1..22: mol_type = other DNA
ctagttctagatccctgaggaa

SEQ ID NO: 117717 - DNA, 22 bp, synthetic construct
  misc_feature 1..22: note = chemically synthesized
  source 1..22: mol_type = other DNA
tagttctagatccctgaggaat

SEQ ID NO: 117718 - DNA, 22 bp, synthetic construct
  misc_feature 1..22: note = chemically synthesized
  source 1..22: mol_type = other DNA
gttctagatccctgaggaatca

SEQ ID NO: 117719 - DNA, 22 bp, synthetic construct
  misc_feature 1..22: note = chemically synthesized
  source 1..22: mol_type = other DNA
tagatccctgaggaatcaccac

SEQ ID NO: 117720 - DNA, 22 bp, synthetic construct
  misc_feature 1..22: note = chemically synthesized
  source 1..22: mol_type = other DNA
gatccctgaggaatcaccacac

SEQ ID NO: 117721 - DNA, 22 bp, synthetic construct
  misc_feature 1..22: note = chemically synthesized
  source 1..22: mol_type = other DNA
aggaatcaccacactgacttcc

SEQ ID NO: 117722 - DNA, 22 bp, synthetic construct
  misc_feature 1..22: note = chemically synthesized
  source 1..22: mol_type = other DNA
acttccacaatgtttgaactag

SEQ ID NO: 117723 - DNA, 22 bp, synthetic construct
  misc_feature 1..22: note = chemically synthesized
  source 1..22: mol_type = other DNA
ccacaatgtttgaactagttta

SEQ ID NO: 117724 - DNA, 22 bp, synthetic construct
  misc_feature 1..22: note = chemically synthesized
  source 1..22: mol_type = other DNA
cacaatgtttgaactagtttac

SEQ ID NO: 117725 - DNA, 22 bp, synthetic construct
  misc_feature 1..22: note = chemically synthesized
  source 1..22: mol_type = other DNA
gaactagtttacagtcccacca

SEQ ID NO: 117726 - DNA, 22 bp, synthetic construct
  misc_feature 1..22: note = chemically synthesized
  source 1..22: mol_type = other DNA
aactagtttacagtcccaccaa

SEQ ID NO: 117727 - DNA, 22 bp, synthetic construct
  misc_feature 1..22: note = chemically synthesized
  source 1..22: mol_type = other DNA
gtttacagtcccaccaacagtg

SEQ ID NO: 117728 - DNA, 22 bp, synthetic construct
  misc_feature 1..22: note = chemically synthesized
  source 1..22: mol_type = other DNA
acagtcccaccaacagtgtaaa

SEQ ID NO: 117729 - DNA, 22 bp, synthetic construct
  misc_feature 1..22: note = chemically synthesized
  source 1..22: mol_type = other DNA
cagtcccaccaacagtgtaaaa

SEQ ID NO: 117730 - DNA, 22 bp, synthetic construct
  misc_feature 1..22: note = chemically synthesized
  source 1..22: mol_type = other DNA
ctatttctccacatcctctcca

SEQ ID NO: 117731 - DNA, 22 bp, synthetic construct
  misc_feature 1..22: note = chemically synthesized
  source 1..22: mol_type = other DNA
tttctccacatcctctccagca

SEQ ID NO: 117732 - DNA, 22 bp, synthetic construct
  misc_feature 1..22: note = chemically synthesized
  source 1..22: mol_type = other DNA
ctccacatcctctccagcacct

SEQ ID NO: 117733 - DNA, 22 bp, synthetic construct
  misc_feature 1..22: note = chemically synthesized
  source 1..22: mol_type = other DNA
tccacatcctctccagcacctg

SEQ ID NO: 117734 - DNA, 22 bp, synthetic construct
  misc_feature 1..22: note = chemically synthesized
  source 1..22: mol_type = other DNA
cacatcctctccagcacctgtt

SEQ ID NO: 117735 - DNA, 22 bp, synthetic construct
  misc_feature 1..22: note = chemically synthesized
  source 1..22: mol_type = other DNA
tccagcacctgttgtttcctga

SEQ ID NO: 117736 - DNA, 22 bp, synthetic construct
  misc_feature 1..22: note = chemically synthesized
  source 1..22: mol_type = other DNA
cagcacctgttgtttcctgact

SEQ ID NO: 117737 - DNA, 22 bp, synthetic construct
  misc_feature 1..22: note = chemically synthesized
  source 1..22: mol_type = other DNA
ttgtttcctgactttttaatga

SEQ ID NO: 117738 - DNA, 22 bp, synthetic construct
  misc_feature 1..22: note = chemically synthesized
  source 1..22: mol_type = other DNA
tttcctgactttttaatgattg

SEQ ID NO: 117739 - DNA, 22 bp, synthetic construct
  misc_feature 1..22: note = chemically synthesized
  source 1..22: mol_type = other DNA
cctgactttttaatgattgcca

SEQ ID NO: 117740 - DNA, 22 bp, synthetic construct
  misc_feature 1..22: note = chemically synthesized
  source 1..22: mol_type = other DNA
ctgactttttaatgattgccat

SEQ ID NO: 117741 - DNA, 22 bp, synthetic construct
  misc_feature 1..22: note = chemically synthesized
  source 1..22: mol_type = other DNA
actttttaatgattgccattct

SEQ ID NO: 117742 - DNA, 22 bp, synthetic construct
  misc_feature 1..22: note = chemically synthesized
  source 1..22: mol_type = other DNA
tttaatgattgccattctaact

SEQ ID NO: 117743 - DNA, 22 bp, synthetic construct
  misc_feature 1..22: note = chemically synthesized
  source 1..22: mol_type = other DNA
ttaatgattgccattctaactg

SEQ ID NO: 117744 - DNA, 22 bp, synthetic construct
  misc_feature 1..22: note = chemically synthesized
  source 1..22: mol_type = other DNA
taatgattgccattctaactgg

SEQ ID NO: 117745 - DNA, 22 bp, synthetic construct
  misc_feature 1..22: note = chemically synthesized
  source 1..22: mol_type = other DNA
aatgattgccattctaactggt

SEQ ID NO: 117746 - DNA, 22 bp, synthetic construct
  misc_feature 1..22: note = chemically synthesized
  source 1..22: mol_type = other DNA
atgattgccattctaactggtg

SEQ ID NO: 117747 - DNA, 22 bp, synthetic construct
  misc_feature 1..22: note = chemically synthesized
  source 1..22: mol_type = other DNA
ccattctaactggtgtgagatg

SEQ ID NO: 117748 - DNA, 22 bp, synthetic construct
  misc_feature 1..22: note = chemically synthesized
  source 1..22: mol_type = other DNA
taactggtgtgagatggtatct

SEQ ID NO: 117749 - DNA, 22 bp, synthetic construct
  misc_feature 1..22: note = chemically synthesized
  source 1..22: mol_type = other DNA
actggtgtgagatggtatctca

SEQ ID NO: 117750 - DNA, 22 bp, synthetic construct
  misc_feature 1..22: note = chemically synthesized
  source 1..22: mol_type = other DNA
gtgtgagatggtatctcattgt

SEQ ID NO: 117751 - DNA, 22 bp, synthetic construct
  misc_feature 1..22: note = chemically synthesized
  source 1..22: mol_type = other DNA
attgtggttttgatttgcattt

SEQ ID NO: 117752 - DNA, 22 bp, synthetic construct
  misc_feature 1..22: note = chemically synthesized
  source 1..22: mol_type = other DNA
tggttttgatttgcatttctct

SEQ ID NO: 117753 - DNA, 22 bp, synthetic construct
  misc_feature 1..22: note = chemically synthesized
  source 1..22: mol_type = other DNA
tgatttgcatttctctgatggc

SEQ ID NO: 117754 - DNA, 22 bp, synthetic construct
  misc_feature 1..22: note = chemically synthesized
  source 1..22: mol_type = other DNA
gatttgcatttctctgatggcc

SEQ ID NO: 117755 - DNA, 22 bp, synthetic construct
  misc_feature 1..22: note = chemically synthesized
  source 1..22: mol_type = other DNA
atttgcatttctctgatggcca

SEQ ID NO: 117756 - DNA, 22 bp, synthetic construct
  misc_feature 1..22: note = chemically synthesized
  source 1..22: mol_type = other DNA
gcatttctctgatggccagtga

SEQ ID NO: 117757 - DNA, 22 bp, synthetic construct
  misc_feature 1..22: note = chemically synthesized
  source 1..22: mol_type = other DNA
catttctctgatggccagtgat

SEQ ID NO: 117758 - DNA, 22 bp, synthetic construct
  misc_feature 1..22: note = chemically synthesized
  source 1..22: mol_type = other DNA
ctctgatggccagtgatgatga

SEQ ID NO: 117759 - DNA, 22 bp, synthetic construct
  misc_feature 1..22: note = chemically synthesized
  source 1..22: mol_type = other DNA
tctgatggccagtgatgatgag

SEQ ID NO: 117760 - DNA, 22 bp, synthetic construct
  misc_feature 1..22: note = chemically synthesized
  source 1..22: mol_type = other DNA
tgatggccagtgatgatgagca

SEQ ID NO: 117761 - DNA, 22 bp, synthetic construct
  misc_feature 1..22: note = chemically synthesized
  source 1..22: mol_type = other DNA
atggccagtgatgatgagcatt

SEQ ID NO: 117762 - DNA, 22 bp, synthetic construct
  misc_feature 1..22: note = chemically synthesized
  source 1..22: mol_type = other DNA
tttcatgtgtcttttggctgca

SEQ ID NO: 117763 - DNA, 22 bp, synthetic construct
  misc_feature 1..22: note = chemically synthesized
  source 1..22: mol_type = other DNA
ttcatgtgtcttttggctgcat

SEQ ID NO: 117764 - DNA, 22 bp, synthetic construct
  misc_feature 1..22: note = chemically synthesized
  source 1..22: mol_type = other DNA
tcatgtgtcttttggctgcata

SEQ ID NO: 117765 - DNA, 22 bp, synthetic construct
  misc_feature 1..22: note = chemically synthesized
  source 1..22: mol_type = other DNA
catgtgtcttttggctgcataa

SEQ ID NO: 117766 - DNA, 22 bp, synthetic construct
  misc_feature 1..22: note = chemically synthesized
  source 1..22: mol_type = other DNA
atgtgtcttttggctgcataaa

SEQ ID NO: 117767 - DNA, 22 bp, synthetic construct
  misc_feature 1..22: note = chemically synthesized
  source 1..22: mol_type = other DNA
ttggctgcataaatgtcttctt

SEQ ID NO: 117768 - DNA, 22 bp, synthetic construct
  misc_feature 1..22: note = chemically synthesized
  source 1..22: mol_type = other DNA
tggctgcataaatgtcttcttt

SEQ ID NO: 117769 - DNA, 22 bp, synthetic construct
  misc_feature 1..22: note = chemically synthesized
  source 1..22: mol_type = other DNA
ggctgcataaatgtcttctttt

SEQ ID NO: 117770 - DNA, 22 bp, synthetic construct
  misc_feature 1..22: note = chemically synthesized
  source 1..22: mol_type = other DNA
gctgcataaatgtcttcttttg

SEQ ID NO: 117771 - DNA, 22 bp, synthetic construct
  misc_feature 1..22: note = chemically synthesized
  source 1..22: mol_type = other DNA
cataaatgtcttcttttgagaa

SEQ ID NO: 117772 - DNA, 22 bp, synthetic construct
  misc_feature 1..22: note = chemically synthesized
  source 1..22: mol_type = other DNA
cttttgagaagtgtctgttcat

SEQ ID NO: 117773 - DNA, 22 bp, synthetic construct
  misc_feature 1..22: note = chemically synthesized
  source 1..22: mol_type = other DNA
ttttgagaagtgtctgttcata

SEQ ID NO: 117774 - DNA, 22 bp, synthetic construct
  misc_feature 1..22: note = chemically synthesized
  source 1..22: mol_type = other DNA
ttgagaagtgtctgttcatatc

SEQ ID NO: 117775 - DNA, 22 bp, synthetic construct
  misc_feature 1..22: note = chemically synthesized
  source 1..22: mol_type = other DNA
tgagaagtgtctgttcatatcc

SEQ ID NO: 117776 - DNA, 22 bp, synthetic construct
  misc_feature 1..22: note = chemically synthesized
  source 1..22: mol_type = other DNA
gagaagtgtctgttcatatcct

SEQ ID NO: 117777 - DNA, 22 bp, synthetic construct
  misc_feature 1..22: note = chemically synthesized
  source 1..22: mol_type = other DNA
agaagtgtctgttcatatcctt

SEQ ID NO: 117778 - DNA, 22 bp, synthetic construct
  misc_feature 1..22: note = chemically synthesized
  source 1..22: mol_type = other DNA
ttcatatcctttgcccactttt

SEQ ID NO: 117779 - DNA, 22 bp, synthetic construct
  misc_feature 1..22: note = chemically synthesized
  source 1..22: mol_type = other DNA
atatcctttgcccactttttga

SEQ ID NO: 117780 - DNA, 22 bp, synthetic construct
  misc_feature 1..22: note = chemically synthesized
  source 1..22: mol_type = other DNA
tgcccactttttgatggggttt

SEQ ID NO: 117781 - DNA, 22 bp, synthetic construct
  misc_feature 1..22: note = chemically synthesized
  source 1..22: mol_type = other DNA
gcccactttttgatggggtttt

SEQ ID NO: 117782 - DNA, 22 bp, synthetic construct
  misc_feature 1..22: note = chemically synthesized
  source 1..22: mol_type = other DNA
cccactttttgatggggttttt

SEQ ID NO: 117783 - DNA, 22 bp, synthetic construct
  misc_feature 1..22: note = chemically synthesized
  source 1..22: mol_type = other DNA
tttgatggggttttttttctct

SEQ ID NO: 117784 - DNA, 22 bp, synthetic construct
  misc_feature 1..22: note = chemically synthesized
  source 1..22: mol_type = other DNA
ttgatggggttttttttctctt

SEQ ID NO: 117785 - DNA, 22 bp, synthetic construct
  misc_feature 1..22: note = chemically synthesized
  source 1..22: mol_type = other DNA
tgatggggttttttttctcttg

SEQ ID NO: 117786 - DNA, 22 bp, synthetic construct
  misc_feature 1..22: note = chemically synthesized
  source 1..22: mol_type = other DNA
gatggggttttttttctcttgt

SEQ ID NO: 117787 - DNA, 22 bp, synthetic construct
  misc_feature 1..22: note = chemically synthesized
  source 1..22: mol_type = other DNA
atggggttttttttctcttgta

SEQ ID NO: 117788 - DNA, 22 bp, synthetic construct
  misc_feature 1..22: note = chemically synthesized
  source 1..22: mol_type = other DNA
tttttctcttgtaaatttgttt

SEQ ID NO: 117789 - DNA, 22 bp, synthetic construct
  misc_feature 1..22: note = chemically synthesized
  source 1..22: mol_type = other DNA
ttttctcttgtaaatttgtttg

SEQ ID NO: 117790 - DNA, 22 bp, synthetic construct
  misc_feature 1..22: note = chemically synthesized
  source 1..22: mol_type = other DNA
tttctcttgtaaatttgtttga

SEQ ID NO: 117791 - DNA, 22 bp, synthetic construct
  misc_feature 1..22: note = chemically synthesized
  source 1..22: mol_type = other DNA
ttctcttgtaaatttgtttgag

SEQ ID NO: 117792 - DNA, 22 bp, synthetic construct
  misc_feature 1..22: note = chemically synthesized
  source 1..22: mol_type = other DNA
tctcttgtaaatttgtttgagt

SEQ ID NO: 117793 - DNA, 22 bp, synthetic construct
  misc_feature 1..22: note = chemically synthesized
  source 1..22: mol_type = other DNA
ctcttgtaaatttgtttgagtt

SEQ ID NO: 117794 - DNA, 22 bp, synthetic construct
  misc_feature 1..22: note = chemically synthesized
  source 1..22: mol_type = other DNA
tcttgtaaatttgtttgagttc

SEQ ID NO: 117795 - DNA, 22 bp, synthetic construct
  misc_feature 1..22: note = chemically synthesized
  source 1..22: mol_type = other DNA
ttgtaaatttgtttgagttcat

SEQ ID NO: 117796 - DNA, 22 bp, synthetic construct
  misc_feature 1..22: note = chemically synthesized
  source 1..22: mol_type = other DNA
gtaaatttgtttgagttcattg

SEQ ID NO: 117797 - DNA, 22 bp, synthetic construct
  misc_feature 1..22: note = chemically synthesized
  source 1..22: mol_type = other DNA
taaatttgtttgagttcattgt

SEQ ID NO: 117798 - DNA, 22 bp, synthetic construct
  misc_feature 1..22: note = chemically synthesized
  source 1..22: mol_type = other DNA
gtttgagttcattgtagattct

SEQ ID NO: 117799 - DNA, 22 bp, synthetic construct
  misc_feature 1..22: note = chemically synthesized
  source 1..22: mol_type = other DNA
tttgagttcattgtagattctg

SEQ ID NO: 117800 - DNA, 22 bp, synthetic construct
  misc_feature 1..22: note = chemically synthesized
  source 1..22: mol_type = other DNA
gagttcattgtagattctggat

SEQ ID NO: 117801 - DNA, 22 bp, synthetic construct
  misc_feature 1..22: note = chemically synthesized
  source 1..22: mol_type = other DNA
agttcattgtagattctggata

SEQ ID NO: 117802 - DNA, 22 bp, synthetic construct
  misc_feature 1..22: note = chemically synthesized
  source 1..22: mol_type = other DNA
attgtagattctggatattagc

SEQ ID NO: 117803 - DNA, 22 bp, synthetic construct
  misc_feature 1..22: note = chemically synthesized
  source 1..22: mol_type = other DNA
tagattctggatattagccctt

SEQ ID NO: 117804 - DNA, 22 bp, synthetic construct
  misc_feature 1..22: note = chemically synthesized
  source 1..22: mol_type = other DNA
tggatattagccctttgtcaga

SEQ ID NO: 117805 - DNA, 22 bp, synthetic construct
  misc_feature 1..22: note = chemically synthesized
  source 1..22: mol_type = other DNA
gatattagccctttgtcagatg

SEQ ID NO: 117806 - DNA, 22 bp, synthetic construct
  misc_feature 1..22: note = chemically synthesized
  source 1..22: mol_type = other DNA
gccctttgtcagatgagtagat

SEQ ID NO: 117807 - DNA, 22 bp, synthetic construct
  misc_feature 1..22: note = chemically synthesized
  source 1..22: mol_type = other DNA
tgtcagatgagtagattgcaaa

SEQ ID NO: 117808 - DNA, 22 bp, synthetic construct
  misc_feature 1..22: note = chemically synthesized
  source 1..22: mol_type = other DNA
gtcagatgagtagattgcaaaa

SEQ ID NO: 117809 - DNA, 22 bp, synthetic construct
  misc_feature 1..22: note = chemically synthesized
  source 1..22: mol_type = other DNA
tcagatgagtagattgcaaaaa

SEQ ID NO: 117810 - DNA, 22 bp, synthetic construct
  misc_feature 1..22: note = chemically synthesized
  source 1..22: mol_type = other DNA
caaaaattttctcccattgtgt

SEQ ID NO: 117811 - DNA, 22 bp, synthetic construct
  misc_feature 1..22: note = chemically synthesized
  source 1..22: mol_type = other DNA
tctcccattgtgtaggttgcct

SEQ ID NO: 117812 - DNA, 22 bp, synthetic construct
  misc_feature 1..22: note = chemically synthesized
  source 1..22: mol_type = other DNA
ctcccattgtgtaggttgcctg

SEQ ID NO: 117813 - DNA, 22 bp, synthetic construct
  misc_feature 1..22: note = chemically synthesized
  source 1..22: mol_type = other DNA
tcccattgtgtaggttgcctgt

SEQ ID NO: 117814 - DNA, 22 bp, synthetic construct
  misc_feature 1..22: note = chemically synthesized
  source 1..22: mol_type = other DNA
ccattgtgtaggttgcctgttc

SEQ ID NO: 117815 - DNA, 22 bp, synthetic construct
  misc_feature 1..22: note = chemically synthesized
  source 1..22: mol_type = other DNA
tgtaggttgcctgttcactctg

SEQ ID NO: 117816 - DNA, 22 bp, synthetic construct
  misc_feature 1..22: note = chemically synthesized
  source 1..22: mol_type = other DNA
cctgttcactctgatggtagtt

SEQ ID NO: 117817 - DNA, 22 bp, synthetic construct
  misc_feature 1..22: note = chemically synthesized
  source 1..22: mol_type = other DNA
ttcactctgatggtagtttctt

SEQ ID NO: 117818 - DNA, 22 bp, synthetic construct
  misc_feature 1..22: note = chemically synthesized
  source 1..22: mol_type = other DNA
actctgatggtagtttcttttg

SEQ ID NO: 117819 - DNA, 22 bp, synthetic construct
  misc_feature 1..22: note = chemically synthesized
  source 1..22: mol_type = other DNA
tgatggtagtttcttttgctgt

SEQ ID NO: 117820 - DNA, 22 bp, synthetic construct
  misc_feature 1..22: note = chemically synthesized
  source 1..22: mol_type = other DNA
atggtagtttcttttgctgtgc

SEQ ID NO: 117821 - DNA, 22 bp, synthetic construct
  misc_feature 1..22: note = chemically synthesized
  source 1..22: mol_type = other DNA
cttttgctgtgcagaagatctt

SEQ ID NO: 117822 - DNA, 22 bp, synthetic construct
  misc_feature 1..22: note = chemically synthesized
  source 1..22: mol_type = other DNA
ttttgctgtgcagaagatcttt

SEQ ID NO: 117823 - DNA, 22 bp, synthetic construct
  misc_feature 1..22: note = chemically synthesized
  source 1..22: mol_type = other DNA
ttgctgtgcagaagatctttag

SEQ ID NO: 117824 - DNA, 22 bp, synthetic construct
  misc_feature 1..22: note = chemically synthesized
  source 1..22: mol_type = other DNA
tgctgtgcagaagatctttagt

SEQ ID NO: 117825 - DNA, 22 bp, synthetic construct
  misc_feature 1..22: note = chemically synthesized
  source 1..22: mol_type = other DNA
gctgtgcagaagatctttagtt

SEQ ID NO: 117826 - DNA, 22 bp, synthetic construct
  misc_feature 1..22: note = chemically synthesized
  source 1..22: mol_type = other DNA
ctgtgcagaagatctttagttt

SEQ ID NO: 117827 - DNA, 22 bp, synthetic construct
  misc_feature 1..22: note = chemically synthesized
  source 1..22: mol_type = other DNA
tgcagaagatctttagtttaat

SEQ ID NO: 117828 - DNA, 22 bp, synthetic construct
  misc_feature 1..22: note = chemically synthesized
  source 1..22: mol_type = other DNA
tagtttaattagatcccattag

SEQ ID NO: 117829 - DNA, 22 bp, synthetic construct
  misc_feature 1..22: note = chemically synthesized
  source 1..22: mol_type = other DNA
agtttaattagatcccattagt

SEQ ID NO: 117830 - DNA, 22 bp, synthetic construct
  misc_feature 1..22: note = chemically synthesized
  source 1..22: mol_type = other DNA
gtttaattagatcccattagtg

SEQ ID NO: 117831 - DNA, 22 bp, synthetic construct
  misc_feature 1..22: note = chemically synthesized
  source 1..22: mol_type = other DNA
aattagatcccattagtgaatt

SEQ ID NO: 117832 - DNA, 22 bp, synthetic construct
  misc_feature 1..22: note = chemically synthesized
  source 1..22: mol_type = other DNA
attagatcccattagtgaattt

SEQ ID NO: 117833 - DNA, 22 bp, synthetic construct
  misc_feature 1..22: note = chemically synthesized
  source 1..22: mol_type = other DNA
gatcccattagtgaattttggc

SEQ ID NO: 117834 - DNA, 22 bp, synthetic construct
  misc_feature 1..22: note = chemically synthesized
  source 1..22: mol_type = other DNA
gtgaattttggcttttgttgcc

SEQ ID NO: 117835 - DNA, 22 bp, synthetic construct
  misc_feature 1..22: note = chemically synthesized
  source 1..22: mol_type = other DNA
tggcttttgttgccattgcttt

SEQ ID NO: 117836 - DNA, 22 bp, synthetic construct
  misc_feature 1..22: note = chemically synthesized
  source 1..22: mol_type = other DNA
ggcttttgttgccattgctttt

SEQ ID NO: 117837 - DNA, 22 bp, synthetic construct
  misc_feature 1..22: note = chemically synthesized
  source 1..22: mol_type = other DNA
gcttttgttgccattgcttttg

SEQ ID NO: 117838 - DNA, 22 bp, synthetic construct
  misc_feature 1..22: note = chemically synthesized
  source 1..22: mol_type = other DNA
ttgttgccattgcttttggtgt

SEQ ID NO: 117839 - DNA, 22 bp, synthetic construct
  misc_feature 1..22: note = chemically synthesized
  source 1..22: mol_type = other DNA
tgttgccattgcttttggtgtt

SEQ ID NO: 117840 - DNA, 22 bp, synthetic construct
  misc_feature 1..22: note = chemically synthesized
  source 1..22: mol_type = other DNA
gttgccattgcttttggtgttt

SEQ ID NO: 117841 - DNA, 22 bp, synthetic construct
  misc_feature 1..22: note = chemically synthesized
  source 1..22: mol_type = other DNA
ttgccattgcttttggtgtttt

SEQ ID NO: 117842 - DNA, 22 bp, synthetic construct
  misc_feature 1..22: note = chemically synthesized
  source 1..22: mol_type = other DNA
ccattgcttttggtgttttaga

SEQ ID NO: 117843 - DNA, 22 bp, synthetic construct
  misc_feature 1..22: note = chemically synthesized
  source 1..22: mol_type = other DNA
cttttggtgttttagacatgaa

SEQ ID NO: 117844 - DNA, 22 bp, synthetic construct
  misc_feature 1..22: note = chemically synthesized
  source 1..22: mol_type = other DNA
ttggtgttttagacatgaagtc

SEQ ID NO: 117845 - DNA, 22 bp, synthetic construct
  misc_feature 1..22: note = chemically synthesized
  source 1..22: mol_type = other DNA
tggtgttttagacatgaagtcc

SEQ ID NO: 117846 - DNA, 22 bp, synthetic construct
  misc_feature 1..22: note = chemically synthesized
  source 1..22: mol_type = other DNA
ggtgttttagacatgaagtcca

SEQ ID NO: 117847 - DNA, 22 bp, synthetic construct
  misc_feature 1..22: note = chemically synthesized
  source 1..22: mol_type = other DNA
gtgttttagacatgaagtccat

SEQ ID NO: 117848 - DNA, 22 bp, synthetic construct
  misc_feature 1..22: note = chemically synthesized
  source 1..22: mol_type = other DNA
tagacatgaagtccatgcccat

SEQ ID NO: 117849 - DNA, 22 bp, synthetic construct
  misc_feature 1..22: note = chemically synthesized
  source 1..22: mol_type = other DNA
agacatgaagtccatgcccatg

SEQ ID NO: 117850 - DNA, 22 bp, synthetic construct
  misc_feature 1..22: note = chemically synthesized
  source 1..22: mol_type = other DNA
gacatgaagtccatgcccatgc

SEQ ID NO: 117851 - DNA, 22 bp, synthetic construct
  misc_feature 1..22: note = chemically synthesized
  source 1..22: mol_type = other DNA
tgtcctgaatggtattgcttag

SEQ ID NO: 117852 - DNA, 22 bp, synthetic construct
  misc_feature 1..22: note = chemically synthesized
  source 1..22: mol_type = other DNA
aatggtattgcttaggttttct

SEQ ID NO: 117853 - DNA, 22 bp, synthetic construct
  misc_feature 1..22: note = chemically synthesized
  source 1..22: mol_type = other DNA
cttaggttttcttctagagttt

SEQ ID NO: 117854 - DNA, 22 bp, synthetic construct
  misc_feature 1..22: note = chemically synthesized
  source 1..22: mol_type = other DNA
aggttttcttctagagttttta

SEQ ID NO: 117855 - DNA, 22 bp, synthetic construct
  misc_feature 1..22: note = chemically synthesized
  source 1..22: mol_type = other DNA
ggttttcttctagagtttttat

SEQ ID NO: 117856 - DNA, 22 bp, synthetic construct
  misc_feature 1..22: note = chemically synthesized
  source 1..22: mol_type = other DNA
tcttctagagtttttatggttt

SEQ ID NO: 117857 - DNA, 22 bp, synthetic construct
  misc_feature 1..22: note = chemically synthesized
  source 1..22: mol_type = other DNA
cttctagagtttttatggtttt

SEQ ID NO: 117858 - DNA, 22 bp, synthetic construct
  misc_feature 1..22: note = chemically synthesized
  source 1..22: mol_type = other DNA
ttctagagtttttatggtttta

SEQ ID NO: 117859 - DNA, 22 bp, synthetic construct
  misc_feature 1..22: note = chemically synthesized
  source 1..22: mol_type = other DNA
ctagagtttttatggttttagg

SEQ ID NO: 117860 - DNA, 22 bp, synthetic construct
  misc_feature 1..22: note = chemically synthesized
  source 1..22: mol_type = other DNA
tagagtttttatggttttaggt

SEQ ID NO: 117861 - DNA, 22 bp, synthetic construct
  misc_feature 1..22: note = chemically synthesized
  source 1..22: mol_type = other DNA
gagtttttatggttttaggtct

SEQ ID NO: 117862 - DNA, 22 bp, synthetic construct
  misc_feature 1..22: note = chemically synthesized
  source 1..22: mol_type = other DNA
ttatggttttaggtctaacatt

SEQ ID NO: 117863 - DNA, 22 bp, synthetic construct
  misc_feature 1..22: note = chemically synthesized
  source 1..22: mol_type = other DNA
tatggttttaggtctaacattt

SEQ ID NO: 117864 - DNA, 22 bp, synthetic construct
  misc_feature 1..22: note = chemically synthesized
  source 1..22: mol_type = other DNA
atggttttaggtctaacattta

SEQ ID NO: 117865 - DNA, 22 bp, synthetic construct
  misc_feature 1..22: note = chemically synthesized
  source 1..22: mol_type = other DNA
tggttttaggtctaacatttaa

SEQ ID NO: 117866 - DNA, 22 bp, synthetic construct
  misc_feature 1..22: note = chemically synthesized
  source 1..22: mol_type = other DNA
taggtctaacatttaagtcttt

SEQ ID NO: 117867 - DNA, 22 bp, synthetic construct
  misc_feature 1..22: note = chemically synthesized
  source 1..22: mol_type = other DNA
aggtctaacatttaagtcttta

SEQ ID NO: 117868 - DNA, 22 bp, synthetic construct
  misc_feature 1..22: note = chemically synthesized
  source 1..22: mol_type = other DNA
ggtctaacatttaagtctttaa

SEQ ID NO: 117869 - DNA, 22 bp, synthetic construct
  misc_feature 1..22: note = chemically synthesized
  source 1..22: mol_type = other DNA
acatttaagtctttaatccatc

SEQ ID NO: 117870 - DNA, 22 bp, synthetic construct
  misc_feature 1..22: note = chemically synthesized
  source 1..22: mol_type = other DNA
aagtctttaatccatcttgagt

SEQ ID NO: 117871 - DNA, 22 bp, synthetic construct
  misc_feature 1..22: note = chemically synthesized
  source 1..22: mol_type = other DNA
agtctttaatccatcttgagtt

SEQ ID NO: 117872 - DNA, 22 bp, synthetic construct
  misc_feature 1..22: note = chemically synthesized
  source 1..22: mol_type = other DNA
taatccatcttgagttaatttt

SEQ ID NO: 117873 - DNA, 22 bp, synthetic construct
  misc_feature 1..22: note = chemically synthesized
  source 1..22: mol_type = other DNA
aatccatcttgagttaattttt

SEQ ID NO: 117874 - DNA, 22 bp, synthetic construct
  misc_feature 1..22: note = chemically synthesized
  source 1..22: mol_type = other DNA
atccatcttgagttaatttttg

SEQ ID NO: 117875 - DNA, 22 bp, synthetic construct
  misc_feature 1..22: note = chemically synthesized
  source 1..22: mol_type = other DNA
gagttaatttttgtataaggtg

SEQ ID NO: 117876 - DNA, 22 bp, synthetic construct
  misc_feature 1..22: note = chemically synthesized
  source 1..22: mol_type = other DNA
agttaatttttgtataaggtgt

SEQ ID NO: 117877 - DNA, 22 bp, synthetic construct
  misc_feature 1..22: note = chemically synthesized
  source 1..22: mol_type = other DNA
atttttgtataaggtgtaagga

SEQ ID NO: 117878 - DNA, 22 bp, synthetic construct
  misc_feature 1..22: note = chemically synthesized
  source 1..22: mol_type = other DNA
ttgtataaggtgtaaggaaggg

SEQ ID NO: 117879 - DNA, 22 bp, synthetic construct
  misc_feature 1..22: note = chemically synthesized
  source 1..22: mol_type = other DNA
tgtataaggtgtaaggaaggga

SEQ ID NO: 117880 - DNA, 22 bp, synthetic construct
  misc_feature 1..22: note = chemically synthesized
  source 1..22: mol_type = other DNA
gtataaggtgtaaggaagggat

SEQ ID NO: 117881 - DNA, 22 bp, synthetic construct
  misc_feature 1..22: note = chemically synthesized
  source 1..22: mol_type = other DNA
tataaggtgtaaggaagggatc

SEQ ID NO: 117882 - DNA, 22 bp, synthetic construct
  misc_feature 1..22: note = chemically synthesized
  source 1..22: mol_type = other DNA
cagcttcctacatttggctagc

SEQ ID NO: 117883 - DNA, 22 bp, synthetic construct
  misc_feature 1..22: note = chemically synthesized
  source 1..22: mol_type = other DNA
agcttcctacatttggctagcc

SEQ ID NO: 117884 - DNA, 22 bp, synthetic construct
  misc_feature 1..22: note = chemically synthesized
  source 1..22: mol_type = other DNA
cctacatttggctagccagttt

SEQ ID NO: 117885 - DNA, 22 bp, synthetic construct
  misc_feature 1..22: note = chemically synthesized
  source 1..22: mol_type = other DNA
ctacatttggctagccagtttt

SEQ ID NO: 117886 - DNA, 22 bp, synthetic construct
  misc_feature 1..22: note = chemically synthesized
  source 1..22: mol_type = other DNA
catttggctagccagttttccc

SEQ ID NO: 117887 - DNA, 22 bp, synthetic construct
  misc_feature 1..22: note = chemically synthesized
  source 1..22: mol_type = other DNA
ggctagccagttttcccagcac

SEQ ID NO: 117888 - DNA, 22 bp, synthetic construct
  misc_feature 1..22: note = chemically synthesized
  source 1..22: mol_type = other DNA
gctagccagttttcccagcacc

SEQ ID NO: 117889 - DNA, 22 bp, synthetic construct
  misc_feature 1..22: note = chemically synthesized
  source 1..22: mol_type = other DNA
gccagttttcccagcaccattt

SEQ ID NO: 117890 - DNA, 22 bp, synthetic construct
  misc_feature 1..22: note = chemically synthesized
  source 1..22: mol_type = other DNA
tcccagcaccatttattaaaca

SEQ ID NO: 117891 - DNA, 22 bp, synthetic construct
  misc_feature 1..22: note = chemically synthesized
  source 1..22: mol_type = other DNA
cccagcaccatttattaaacag

SEQ ID NO: 117892 - DNA, 22 bp, synthetic construct
  misc_feature 1..22: note = chemically synthesized
  source 1..22: mol_type = other DNA
ccagcaccatttattaaacagg

SEQ ID NO: 117893 - DNA, 22 bp, synthetic construct
  misc_feature 1..22: note = chemically synthesized
  source 1..22: mol_type = other DNA
attaaacagggaatcctttccc

SEQ ID NO: 117894 - DNA, 22 bp, synthetic construct
  misc_feature 1..22: note = chemically synthesized
  source 1..22: mol_type = other DNA
ttaaacagggaatcctttcccc

SEQ ID NO: 117895 - DNA, 22 bp, synthetic construct
  misc_feature 1..22: note = chemically synthesized
  source 1..22: mol_type = other DNA
aacagggaatcctttccccatt

SEQ ID NO: 117896 - DNA, 22 bp, synthetic construct
  misc_feature 1..22: note = chemically synthesized
  source 1..22: mol_type = other DNA
tccccatttcttgtttttctca

SEQ ID NO: 117897 - DNA, 22 bp, synthetic construct
  misc_feature 1..22: note = chemically synthesized
  source 1..22: mol_type = other DNA
ccccatttcttgtttttctcag

SEQ ID NO: 117898 - DNA, 22 bp, synthetic construct
  misc_feature 1..22: note = chemically synthesized
  source 1..22: mol_type = other DNA
cccatttcttgtttttctcagg

SEQ ID NO: 117899 - DNA, 22 bp, synthetic construct
  misc_feature 1..22: note = chemically synthesized
  source 1..22: mol_type = other DNA
cttgtttttctcaggtttgtca

SEQ ID NO: 117900 - DNA, 22 bp, synthetic construct
  misc_feature 1..22: note = chemically synthesized
  source 1..22: mol_type = other DNA
ttgtttttctcaggtttgtcaa

SEQ ID NO: 117901 - DNA, 22 bp, synthetic construct
  misc_feature 1..22: note = chemically synthesized
  source 1..22: mol_type = other DNA
gtttttctcaggtttgtcaaag

SEQ ID NO: 117902 - DNA, 22 bp, synthetic construct
  misc_feature 1..22: note = chemically synthesized
  source 1..22: mol_type = other DNA
tttttctcaggtttgtcaaaga

SEQ ID NO: 117903 - DNA, 22 bp, synthetic construct
  misc_feature 1..22: note = chemically synthesized
  source 1..22: mol_type = other DNA
ttctcaggtttgtcaaagatca

SEQ ID NO: 117904 - DNA, 22 bp, synthetic construct
  misc_feature 1..22: note = chemically synthesized
  source 1..22: mol_type = other DNA
tctcaggtttgtcaaagatcag

SEQ ID NO: 117905 - DNA, 22 bp, synthetic construct
  misc_feature 1..22: note = chemically synthesized
  source 1..22: mol_type = other DNA
ctcaggtttgtcaaagatcaga

SEQ ID NO: 117906 - DNA, 22 bp, synthetic construct
  misc_feature 1..22: note = chemically synthesized
  source 1..22: mol_type = other DNA
tcaggtttgtcaaagatcagat

SEQ ID NO: 117907 - DNA, 22 bp, synthetic construct
  misc_feature 1..22: note = chemically synthesized
  source 1..22: mol_type = other DNA
aggtttgtcaaagatcagatag

SEQ ID NO: 117908 - DNA, 22 bp, synthetic construct
  misc_feature 1..22: note = chemically synthesized
  source 1..22: mol_type = other DNA
gtcaaagatcagatagttgtag

SEQ ID NO: 117909 - DNA, 22 bp, synthetic construct
  misc_feature 1..22: note = chemically synthesized
  source 1..22: mol_type = other DNA
tcaaagatcagatagttgtaga

SEQ ID NO: 117910 - DNA, 22 bp, synthetic construct
  misc_feature 1..22: note = chemically synthesized
  source 1..22: mol_type = other DNA
tagatagacagcattatttctg

SEQ ID NO: 117911 - DNA, 22 bp, synthetic construct
  misc_feature 1..22: note = chemically synthesized
  source 1..22: mol_type = other DNA
tttctgagggctctgttttgtt

SEQ ID NO: 117912 - DNA, 22 bp, synthetic construct
  misc_feature 1..22: note = chemically synthesized
  source 1..22: mol_type = other DNA
ctgagggctctgttttgttcca

SEQ ID NO: 117913 - DNA, 22 bp, synthetic construct
  misc_feature 1..22: note = chemically synthesized
  source 1..22: mol_type = other DNA
tgagggctctgttttgttccat

SEQ ID NO: 117914 - DNA, 22 bp, synthetic construct
  misc_feature 1..22: note = chemically synthesized
  source 1..22: mol_type = other DNA
agggctctgttttgttccattg

SEQ ID NO: 117915 - DNA, 22 bp, synthetic construct
  misc_feature 1..22: note = chemically synthesized
  source 1..22: mol_type = other DNA
tgttttgttccattggtctata

SEQ ID NO: 117916 - DNA, 22 bp, synthetic construct
  misc_feature 1..22: note = chemically synthesized
  source 1..22: mol_type = other DNA
ttttgttccattggtctatatc

SEQ ID NO: 117917 - DNA, 22 bp, synthetic construct
  misc_feature 1..22: note = chemically synthesized
  source 1..22: mol_type = other DNA
tgttccattggtctatatctct

SEQ ID NO: 117918 - DNA, 22 bp, synthetic construct
  misc_feature 1..22: note = chemically synthesized
  source 1..22: mol_type = other DNA
gttccattggtctatatctctg

SEQ ID NO: 117919 - DNA, 22 bp, synthetic construct
  misc_feature 1..22: note = chemically synthesized
  source 1..22: mol_type = other DNA
ttccattggtctatatctctgt

SEQ ID NO: 117920 - DNA, 22 bp, synthetic construct
  misc_feature 1..22: note = chemically synthesized
  source 1..22: mol_type = other DNA
cattggtctatatctctgtttt

SEQ ID NO: 117921 - DNA, 22 bp, synthetic construct
  misc_feature 1..22: note = chemically synthesized
  source 1..22: mol_type = other DNA
gtctatatctctgttttggtac

SEQ ID NO: 117922 - DNA, 22 bp, synthetic construct
  misc_feature 1..22: note = chemically synthesized
  source 1..22: mol_type = other DNA
tatctctgttttggtaccagta

SEQ ID NO: 117923 - DNA, 22 bp, synthetic construct
  misc_feature 1..22: note = chemically synthesized
  source 1..22: mol_type = other DNA
tgttttggtaccagtactatgc

SEQ ID NO: 117924 - DNA, 22 bp, synthetic construct
  misc_feature 1..22: note = chemically synthesized
  source 1..22: mol_type = other DNA
ttttggtaccagtactatgctg

SEQ ID NO: 117925 - DNA, 22 bp, synthetic construct
  misc_feature 1..22: note = chemically synthesized
  source 1..22: mol_type = other DNA
tggtaccagtactatgctgttt

SEQ ID NO: 117926 - DNA, 22 bp, synthetic construct
  misc_feature 1..22: note = chemically synthesized
  source 1..22: mol_type = other DNA
ggtaccagtactatgctgtttt

SEQ ID NO: 117927 - DNA, 22 bp, synthetic construct
  misc_feature 1..22: note = chemically synthesized
  source 1..22: mol_type = other DNA
gtaccagtactatgctgttttg

SEQ ID NO: 117928 - DNA, 22 bp, synthetic construct
  misc_feature 1..22: note = chemically synthesized
  source 1..22: mol_type = other DNA
tgctgttttggttactgtagcc

SEQ ID NO: 117929 - DNA, 22 bp, synthetic construct
  misc_feature 1..22: note = chemically synthesized
  source 1..22: mol_type = other DNA
ttttggttactgtagccttgta

SEQ ID NO: 117930 - DNA, 22 bp, synthetic construct
  misc_feature 1..22: note = chemically synthesized
  source 1..22: mol_type = other DNA
tggttactgtagccttgtagta

SEQ ID NO: 117931 - DNA, 22 bp, synthetic construct
  misc_feature 1..22: note = chemically synthesized
  source 1..22: mol_type = other DNA
ggttactgtagccttgtagtat

SEQ ID NO: 117932 - DNA, 22 bp, synthetic construct
  misc_feature 1..22: note = chemically synthesized
  source 1..22: mol_type = other DNA
gttactgtagccttgtagtata

SEQ ID NO: 117933 - DNA, 22 bp, synthetic construct
  misc_feature 1..22: note = chemically synthesized
  source 1..22: mol_type = other DNA
ctgtagccttgtagtatagttt

SEQ ID NO: 117934 - DNA, 22 bp, synthetic construct
  misc_feature 1..22: note = chemically synthesized
  source 1..22: mol_type = other DNA
tagccttgtagtatagtttgaa

SEQ ID NO: 117935 - DNA, 22 bp, synthetic construct
  misc_feature 1..22: note = chemically synthesized
  source 1..22: mol_type = other DNA
gtagtatagtttgaaatcaggt

SEQ ID NO: 117936 - DNA, 22 bp, synthetic construct
  misc_feature 1..22: note = chemically synthesized
  source 1..22: mol_type = other DNA
tagtatagtttgaaatcaggta

SEQ ID NO: 117937 - DNA, 22 bp, synthetic construct
  misc_feature 1..22: note = chemically synthesized
  source 1..22: mol_type = other DNA
gaaatcaggtagtgtgatgcct

SEQ ID NO: 117938 - DNA, 22 bp, synthetic construct
  misc_feature 1..22: note = chemically synthesized
  source 1..22: mol_type = other DNA
aaatcaggtagtgtgatgcctc

SEQ ID NO: 117939 - DNA, 22 bp, synthetic construct
  misc_feature 1..22: note = chemically synthesized
  source 1..22: mol_type = other DNA
cagctttgttcttttggcttag

SEQ ID NO: 117940 - DNA, 22 bp, synthetic construct
  misc_feature 1..22: note = chemically synthesized
  source 1..22: mol_type = other DNA
tgttcttttggcttaggattga

SEQ ID NO: 117941 - DNA, 22 bp, synthetic construct
  misc_feature 1..22: note = chemically synthesized
  source 1..22: mol_type = other DNA
gttcttttggcttaggattgac

SEQ ID NO: 117942 - DNA, 22 bp, synthetic construct
  misc_feature 1..22: note = chemically synthesized
  source 1..22: mol_type = other DNA
ttcttttggcttaggattgact

SEQ ID NO: 117943 - DNA, 22 bp, synthetic construct
  misc_feature 1..22: note = chemically synthesized
  source 1..22: mol_type = other DNA
ttttggcttaggattgacttgg

SEQ ID NO: 117944 - DNA, 22 bp, synthetic construct
  misc_feature 1..22: note = chemically synthesized
  source 1..22: mol_type = other DNA
ttggcttaggattgacttggcg

SEQ ID NO: 117945 - DNA, 22 bp, synthetic construct
  misc_feature 1..22: note = chemically synthesized
  source 1..22: mol_type = other DNA
tggcttaggattgacttggcga

SEQ ID NO: 117946 - DNA, 22 bp, synthetic construct
  misc_feature 1..22: note = chemically synthesized
  source 1..22: mol_type = other DNA
ggcttaggattgacttggcgat

SEQ ID NO: 117947 - DNA, 22 bp, synthetic construct
  misc_feature 1..22: note = chemically synthesized
  source 1..22: mol_type = other DNA
gcttaggattgacttggcgatg

SEQ ID NO: 117948 - DNA, 22 bp, synthetic construct
  misc_feature 1..22: note = chemically synthesized
  source 1..22: mol_type = other DNA
aggattgacttggcgatgcggg

SEQ ID NO: 117949 - DNA, 22 bp, synthetic construct
  misc_feature 1..22: note = chemically synthesized
  source 1..22: mol_type = other DNA
ggattgacttggcgatgcgggc

SEQ ID NO: 117950 - DNA, 22 bp, synthetic construct
  misc_feature 1..22: note = chemically synthesized
  source 1..22: mol_type = other DNA
acttggcgatgcgggctctttt

SEQ ID NO: 117951 - DNA, 22 bp, synthetic construct
  misc_feature 1..22: note = chemically synthesized
  source 1..22: mol_type = other DNA
ggcgatgcgggctcttttttgg

SEQ ID NO: 117952 - DNA, 22 bp, synthetic construct
  misc_feature 1..22: note = chemically synthesized
  source 1..22: mol_type = other DNA
gcgatgcgggctcttttttggt

SEQ ID NO: 117953 - DNA, 22 bp, synthetic construct
  misc_feature 1..22: note = chemically synthesized
  source 1..22: mol_type = other DNA
ttttttggttccatatgaactt

SEQ ID NO: 117954 - DNA, 22 bp, synthetic construct
  misc_feature 1..22: note = chemically synthesized
  source 1..22: mol_type = other DNA
ttttggttccatatgaacttta

SEQ ID NO: 117955 - DNA, 22 bp, synthetic construct
  misc_feature 1..22: note = chemically synthesized
  source 1..22: mol_type = other DNA
tttggttccatatgaactttaa

SEQ ID NO: 117956 - DNA, 22 bp, synthetic construct
  misc_feature 1..22: note = chemically synthesized
  source 1..22: mol_type = other DNA
ttggttccatatgaactttaaa

SEQ ID NO: 117957 - DNA, 22 bp, synthetic construct
  misc_feature 1..22: note = chemically synthesized
  source 1..22: mol_type = other DNA
tggttccatatgaactttaaag

SEQ ID NO: 117958 - DNA, 22 bp, synthetic construct
  misc_feature 1..22: note = chemically synthesized
  source 1..22: mol_type = other DNA
ggttccatatgaactttaaagt

SEQ ID NO: 117959 - DNA, 22 bp, synthetic construct
  misc_feature 1..22: note = chemically synthesized
  source 1..22: mol_type = other DNA
gttccatatgaactttaaagta

SEQ ID NO: 117960 - DNA, 22 bp, synthetic construct
  misc_feature 1..22: note = chemically synthesized
  source 1..22: mol_type = other DNA
catatgaactttaaagtagttt

SEQ ID NO: 117961 - DNA, 22 bp, synthetic construct
  misc_feature 1..22: note = chemically synthesized
  source 1..22: mol_type = other DNA
taaagtagttttttccaattct

SEQ ID NO: 117962 - DNA, 22 bp, synthetic construct
  misc_feature 1..22: note = chemically synthesized
  source 1..22: mol_type = other DNA
aaagtagttttttccaattctg

SEQ ID NO: 117963 - DNA, 22 bp, synthetic construct
  misc_feature 1..22: note = chemically synthesized
  source 1..22: mol_type = other DNA
aagtagttttttccaattctgt

SEQ ID NO: 117964 - DNA, 22 bp, synthetic construct
  misc_feature 1..22: note = chemically synthesized
  source 1..22: mol_type = other DNA
tttccaattctgtgaagaaagt

SEQ ID NO: 117965 - DNA, 22 bp, synthetic construct
  misc_feature 1..22: note = chemically synthesized
  source 1..22: mol_type = other DNA
ttccaattctgtgaagaaagtc

SEQ ID NO: 117966 - DNA, 22 bp, synthetic construct
  misc_feature 1..22: note = chemically synthesized
  source 1..22: mol_type = other DNA
tccaattctgtgaagaaagtca

SEQ ID NO: 117967 - DNA, 22 bp, synthetic construct
  misc_feature 1..22: note = chemically synthesized
  source 1..22: mol_type = other DNA
ccaattctgtgaagaaagtcat

SEQ ID NO: 117968 - DNA, 22 bp, synthetic construct
  misc_feature 1..22: note = chemically synthesized
  source 1..22: mol_type = other DNA
caattctgtgaagaaagtcatt

SEQ ID NO: 117969 - DNA, 22 bp, synthetic construct
  misc_feature 1..22: note = chemically synthesized
  source 1..22: mol_type = other DNA
tgtgaagaaagtcattggtagc

SEQ ID NO: 117970 - DNA, 22 bp, synthetic construct
  misc_feature 1..22: note = chemically synthesized
  source 1..22: mol_type = other DNA
tgaagaaagtcattggtagctt

SEQ ID NO: 117971 - DNA, 22 bp, synthetic construct
  misc_feature 1..22: note = chemically synthesized
  source 1..22: mol_type = other DNA
gtagcttgatggggatggcatt

SEQ ID NO: 117972 - DNA, 22 bp, synthetic construct
  misc_feature 1..22: note = chemically synthesized
  source 1..22: mol_type = other DNA
gatggggatggcattgaatcta

SEQ ID NO: 117973 - DNA, 22 bp, synthetic construct
  misc_feature 1..22: note = chemically synthesized
  source 1..22: mol_type = other DNA
atggggatggcattgaatctat

SEQ ID NO: 117974 - DNA, 22 bp, synthetic construct
  misc_feature 1..22: note = chemically synthesized
  source 1..22: mol_type = other DNA
aatctataaattaccttgggca

SEQ ID NO: 117975 - DNA, 22 bp, synthetic construct
  misc_feature 1..22: note = chemically synthesized
  source 1..22: mol_type = other DNA
taaattaccttgggcagtatgg

SEQ ID NO: 117976 - DNA, 22 bp, synthetic construct
  misc_feature 1..22: note = chemically synthesized
  source 1..22: mol_type = other DNA
ccttgggcagtatggccatttt

SEQ ID NO: 117977 - DNA, 22 bp, synthetic construct
  misc_feature 1..22: note = chemically synthesized
  source 1..22: mol_type = other DNA
gggcagtatggccattttcacg

SEQ ID NO: 117978 - DNA, 22 bp, synthetic construct
  misc_feature 1..22: note = chemically synthesized
  source 1..22: mol_type = other DNA
ggcagtatggccattttcacga

SEQ ID NO: 117979 - DNA, 22 bp, synthetic construct
  misc_feature 1..22: note = chemically synthesized
  source 1..22: mol_type = other DNA
tcacgatattgtttcttcctat

SEQ ID NO: 117980 - DNA, 22 bp, synthetic construct
  misc_feature 1..22: note = chemically synthesized
  source 1..22: mol_type = other DNA
cacgatattgtttcttcctatc

SEQ ID NO: 117981 - DNA, 22 bp, synthetic construct
  misc_feature 1..22: note = chemically synthesized
  source 1..22: mol_type = other DNA
acgatattgtttcttcctatcc

SEQ ID NO: 117982 - DNA, 22 bp, synthetic construct
  misc_feature 1..22: note = chemically synthesized
  source 1..22: mol_type = other DNA
tttcttcctatccatgagcatg

SEQ ID NO: 117983 - DNA, 22 bp, synthetic construct
  misc_feature 1..22: note = chemically synthesized
  source 1..22: mol_type = other DNA
cttcctatccatgagcatggaa

SEQ ID NO: 117984 - DNA, 22 bp, synthetic construct
  misc_feature 1..22: note = chemically synthesized
  source 1..22: mol_type = other DNA
ttcctatccatgagcatggaat

SEQ ID NO: 117985 - DNA, 22 bp, synthetic construct
  misc_feature 1..22: note = chemically synthesized
  source 1..22: mol_type = other DNA
cctatccatgagcatggaatgt

SEQ ID NO: 117986 - DNA, 22 bp, synthetic construct
  misc_feature 1..22: note = chemically synthesized
  source 1..22: mol_type = other DNA
ctatccatgagcatggaatgtt

SEQ ID NO: 117987 - DNA, 22 bp, synthetic construct
  misc_feature 1..22: note = chemically synthesized
  source 1..22: mol_type = other DNA
tccatgagcatggaatgttctt

SEQ ID NO: 117988 - DNA, 22 bp, synthetic construct
  misc_feature 1..22: note = chemically synthesized
  source 1..22: mol_type = other DNA
ttccatttgtttgtatcttatt

SEQ ID NO: 117989 - DNA, 22 bp, synthetic construct
  misc_feature 1..22: note = chemically synthesized
  source 1..22: mol_type = other DNA
ccatttgtttgtatcttatttc

SEQ ID NO: 117990 - DNA, 22 bp, synthetic construct
  misc_feature 1..22: note = chemically synthesized
  source 1..22: mol_type = other DNA
catttgtttgtatcttatttcc

SEQ ID NO: 117991 - DNA, 22 bp, synthetic construct
  misc_feature 1..22: note = chemically synthesized
  source 1..22: mol_type = other DNA
gtttgtatcttatttccttgag

SEQ ID NO: 117992 - DNA, 22 bp, synthetic construct
  misc_feature 1..22: note = chemically synthesized
  source 1..22: mol_type = other DNA
tttgtatcttatttccttgagc

SEQ ID NO: 117993 - DNA, 22 bp, synthetic construct
  misc_feature 1..22: note = chemically synthesized
  source 1..22: mol_type = other DNA
gtatcttatttccttgagcagt

SEQ ID NO: 117994 - DNA, 22 bp, synthetic construct
  misc_feature 1..22: note = chemically synthesized
  source 1..22: mol_type = other DNA
tatcttatttccttgagcagtg

SEQ ID NO: 117995 - DNA, 22 bp, synthetic construct
  misc_feature 1..22: note = chemically synthesized
  source 1..22: mol_type = other DNA
atttccttgagcagtggtttgt

SEQ ID NO: 117996 - DNA, 22 bp, synthetic construct
  misc_feature 1..22: note = chemically synthesized
  source 1..22: mol_type = other DNA
tttccttgagcagtggtttgta

SEQ ID NO: 117997 - DNA, 22 bp, synthetic construct
  misc_feature 1..22: note = chemically synthesized
  source 1..22: mol_type = other DNA
ccttgagcagtggtttgtagtt

SEQ ID NO: 117998 - DNA, 22 bp, synthetic construct
  misc_feature 1..22: note = chemically synthesized
  source 1..22: mol_type = other DNA
cttgagcagtggtttgtagttc

SEQ ID NO: 117999 - DNA, 22 bp, synthetic construct
  misc_feature 1..22: note = chemically synthesized
  source 1..22: mol_type = other DNA
gagcagtggtttgtagttctcc

SEQ ID NO: 118000 - DNA, 22 bp, synthetic construct
  misc_feature 1..22: note = chemically synthesized
  source 1..22: mol_type = other DNA
agcagtggtttgtagttctcct

SEQ ID NO: 118001 - DNA, 22 bp, synthetic construct
  misc_feature 1..22: note = chemically synthesized
  source 1..22: mol_type = other DNA
gtagttctccttgaagaggtcc

SEQ ID NO: 118002 - DNA, 22 bp, synthetic construct
  misc_feature 1..22: note = chemically synthesized
  source 1..22: mol_type = other DNA
tagttctccttgaagaggtcct

SEQ ID NO: 118003 - DNA, 22 bp, synthetic construct
  misc_feature 1..22: note = chemically synthesized
  source 1..22: mol_type = other DNA
tccttgaagaggtccttcacat

SEQ ID NO: 118004 - DNA, 22 bp, synthetic construct
  misc_feature 1..22: note = chemically synthesized
  source 1..22: mol_type = other DNA
cttgaagaggtccttcacatcc

SEQ ID NO: 118005 - DNA, 22 bp, synthetic construct
  misc_feature 1..22: note = chemically synthesized
  source 1..22: mol_type = other DNA
gaagaggtccttcacatccctt

SEQ ID NO: 118006 - DNA, 22 bp, synthetic construct
  misc_feature 1..22: note = chemically synthesized
  source 1..22: mol_type = other DNA
aagaggtccttcacatcccttg

SEQ ID NO: 118007 - DNA, 22 bp, synthetic construct
  misc_feature 1..22: note = chemically synthesized
  source 1..22: mol_type = other DNA
cacatcccttgtaagttggatt

SEQ ID NO: 118008 - DNA, 22 bp, synthetic construct
  misc_feature 1..22: note = chemically synthesized
  source 1..22: mol_type = other DNA
acatcccttgtaagttggattc

SEQ ID NO: 118009 - DNA, 22 bp, synthetic construct
  misc_feature 1..22: note = chemically synthesized
  source 1..22: mol_type = other DNA
gtaagttggattcctaggtatt

SEQ ID NO: 118010 - DNA, 22 bp, synthetic construct
  misc_feature 1..22: note = chemically synthesized
  source 1..22: mol_type = other DNA
taagttggattcctaggtatta

SEQ ID NO: 118011 - DNA, 22 bp, synthetic construct
  misc_feature 1..22: note = chemically synthesized
  source 1..22: mol_type = other DNA
gattcctaggtattatattctc

SEQ ID NO: 118012 - DNA, 22 bp, synthetic construct
  misc_feature 1..22: note = chemically synthesized
  source 1..22: mol_type = other DNA
ctaggtattatattctctctga

SEQ ID NO: 118013 - DNA, 22 bp, synthetic construct
  misc_feature 1..22: note = chemically synthesized
  source 1..22: mol_type = other DNA
ggtattatattctctctgaagc

SEQ ID NO: 118014 - DNA, 22 bp, synthetic construct
  misc_feature 1..22: note = chemically synthesized
  source 1..22: mol_type = other DNA
tattctctctgaagcaattgtg

SEQ ID NO: 118015 - DNA, 22 bp, synthetic construct
  misc_feature 1..22: note = chemically synthesized
  source 1..22: mol_type = other DNA
tctctgaagcaattgtgaatgg

SEQ ID NO: 118016 - DNA, 22 bp, synthetic construct
  misc_feature 1..22: note = chemically synthesized
  source 1..22: mol_type = other DNA
tctgaagcaattgtgaatggga

SEQ ID NO: 118017 - DNA, 22 bp, synthetic construct
  misc_feature 1..22: note = chemically synthesized
  source 1..22: mol_type = other DNA
tgaagcaattgtgaatgggagt

SEQ ID NO: 118018 - DNA, 22 bp, synthetic construct
  misc_feature 1..22: note = chemically synthesized
  source 1..22: mol_type = other DNA
aagcaattgtgaatgggagttc

SEQ ID NO: 118019 - DNA, 22 bp, synthetic construct
  misc_feature 1..22: note = chemically synthesized
  source 1..22: mol_type = other DNA
tgaatgggagttcactcactgt

SEQ ID NO: 118020 - DNA, 22 bp, synthetic construct
  misc_feature 1..22: note = chemically synthesized
  source 1..22: mol_type = other DNA
actcactgtttgtctgttattg

SEQ ID NO: 118021 - DNA, 22 bp, synthetic construct
  misc_feature 1..22: note = chemically synthesized
  source 1..22: mol_type = other DNA
actgtttgtctgttattggtgt

SEQ ID NO: 118022 - DNA, 22 bp, synthetic construct
  misc_feature 1..22: note = chemically synthesized
  source 1..22: mol_type = other DNA
tttgtctgttattggtgtataa

SEQ ID NO: 118023 - DNA, 22 bp, synthetic construct
  misc_feature 1..22: note = chemically synthesized
  source 1..22: mol_type = other DNA
gtctgttattggtgtataagaa

SEQ ID NO: 118024 - DNA, 22 bp, synthetic construct
  misc_feature 1..22: note = chemically synthesized
  source 1..22: mol_type = other DNA
tctgttattggtgtataagaat

SEQ ID NO: 118025 - DNA, 22 bp, synthetic construct
  misc_feature 1..22: note = chemically synthesized
  source 1..22: mol_type = other DNA
ttattggtgtataagaatgctt

SEQ ID NO: 118026 - DNA, 22 bp, synthetic construct
  misc_feature 1..22: note = chemically synthesized
  source 1..22: mol_type = other DNA
ttggtgtataagaatgcttgtg

SEQ ID NO: 118027 - DNA, 22 bp, synthetic construct
  misc_feature 1..22: note = chemically synthesized
  source 1..22: mol_type = other DNA
gtgtataagaatgcttgtgatt

SEQ ID NO: 118028 - DNA, 22 bp, synthetic construct
  misc_feature 1..22: note = chemically synthesized
  source 1..22: mol_type = other DNA
gtgatttttgcacattgatttt

SEQ ID NO: 118029 - DNA, 22 bp, synthetic construct
  misc_feature 1..22: note = chemically synthesized
  source 1..22: mol_type = other DNA
tgatttttgcacattgattttg

SEQ ID NO: 118030 - DNA, 22 bp, synthetic construct
  misc_feature 1..22: note = chemically synthesized
  source 1..22: mol_type = other DNA
ttgcacattgattttgtatcct

SEQ ID NO: 118031 - DNA, 22 bp, synthetic construct
  misc_feature 1..22: note = chemically synthesized
  source 1..22: mol_type = other DNA
tgcacattgattttgtatcctg

SEQ ID NO: 118032 - DNA, 22 bp, synthetic construct
  misc_feature 1..22: note = chemically synthesized
  source 1..22: mol_type = other DNA
gcacattgattttgtatcctga

SEQ ID NO: 118033 - DNA, 22 bp, synthetic construct
  misc_feature 1..22: note = chemically synthesized
  source 1..22: mol_type = other DNA
cacattgattttgtatcctgag

SEQ ID NO: 118034 - DNA, 22 bp, synthetic construct
  misc_feature 1..22: note = chemically synthesized
  source 1..22: mol_type = other DNA
attttgtatcctgagactttgc

SEQ ID NO: 118035 - DNA, 22 bp, synthetic construct
  misc_feature 1..22: note = chemically synthesized
  source 1..22: mol_type = other DNA
tgtatcctgagactttgctgaa

SEQ ID NO: 118036 - DNA, 22 bp, synthetic construct
  misc_feature 1..22: note = chemically synthesized
  source 1..22: mol_type = other DNA
gtatcctgagactttgctgaag

SEQ ID NO: 118037 - DNA, 22 bp, synthetic construct
  misc_feature 1..22: note = chemically synthesized
  source 1..22: mol_type = other DNA
tatcctgagactttgctgaagt

SEQ ID NO: 118038 - DNA, 22 bp, synthetic construct
  misc_feature 1..22: note = chemically synthesized
  source 1..22: mol_type = other DNA
agactttgctgaagttgcttat

SEQ ID NO: 118039 - DNA, 22 bp, synthetic construct
  misc_feature 1..22: note = chemically synthesized
  source 1..22: mol_type = other DNA
tgctgaagttgcttatcagctt

SEQ ID NO: 118040 - DNA, 22 bp, synthetic construct
  misc_feature 1..22: note = chemically synthesized
  source 1..22: mol_type = other DNA
gctgaagttgcttatcagctta

SEQ ID NO: 118041 - DNA, 22 bp, synthetic construct
  misc_feature 1..22: note = chemically synthesized
  source 1..22: mol_type = other DNA
ctgaagttgcttatcagcttaa

SEQ ID NO: 118042 - DNA, 22 bp, synthetic construct
  misc_feature 1..22: note = chemically synthesized
  source 1..22: mol_type = other DNA
aagttgcttatcagcttaaggg

SEQ ID NO: 118043 - DNA, 22 bp, synthetic construct
  misc_feature 1..22: note = chemically synthesized
  source 1..22: mol_type = other DNA
cttatcagcttaaggggatttt

SEQ ID NO: 118044 - DNA, 22 bp, synthetic construct
  misc_feature 1..22: note = chemically synthesized
  source 1..22: mol_type = other DNA
atcagcttaaggggattttggg

SEQ ID NO: 118045 - DNA, 22 bp, synthetic construct
  misc_feature 1..22: note = chemically synthesized
  source 1..22: mol_type = other DNA
tcagcttaaggggattttgggc

SEQ ID NO: 118046 - DNA, 22 bp, synthetic construct
  misc_feature 1..22: note = chemically synthesized
  source 1..22: mol_type = other DNA
aaggggattttgggctgagaca

SEQ ID NO: 118047 - DNA, 22 bp, synthetic construct
  misc_feature 1..22: note = chemically synthesized
  source 1..22: mol_type = other DNA
aggggattttgggctgagacaa

SEQ ID NO: 118048 - DNA, 22 bp, synthetic construct
  misc_feature 1..22: note = chemically synthesized
  source 1..22: mol_type = other DNA
tgggctgagacaatggggtttt

SEQ ID NO: 118049 - DNA, 22 bp, synthetic construct
  misc_feature 1..22: note = chemically synthesized
  source 1..22: mol_type = other DNA
gggctgagacaatggggttttc

SEQ ID NO: 118050 - DNA, 22 bp, synthetic construct
  misc_feature 1..22: note = chemically synthesized
  source 1..22: mol_type = other DNA
ggctgagacaatggggttttct

SEQ ID NO: 118051 - DNA, 22 bp, synthetic construct
  misc_feature 1..22: note = chemically synthesized
  source 1..22: mol_type = other DNA
agacaatggggttttctagata

SEQ ID NO: 118052 - DNA, 22 bp, synthetic construct
  misc_feature 1..22: note = chemically synthesized
  source 1..22: mol_type = other DNA
tctagatatgcaatcacgtcat

SEQ ID NO: 118053 - DNA, 22 bp, synthetic construct
  misc_feature 1..22: note = chemically synthesized
  source 1..22: mol_type = other DNA
ctagatatgcaatcacgtcatc

SEQ ID NO: 118054 - DNA, 22 bp, synthetic construct
  misc_feature 1..22: note = chemically synthesized
  source 1..22: mol_type = other DNA
tagatatgcaatcacgtcatct

SEQ ID NO: 118055 - DNA, 22 bp, synthetic construct
  misc_feature 1..22: note = chemically synthesized
  source 1..22: mol_type = other DNA
gatatgcaatcacgtcatctgc

SEQ ID NO: 118056 - DNA, 22 bp, synthetic construct
  misc_feature 1..22: note = chemically synthesized
  source 1..22: mol_type = other DNA
caaacagggacaatttgacttt

SEQ ID NO: 118057 - DNA, 22 bp, synthetic construct
  misc_feature 1..22: note = chemically synthesized
  source 1..22: mol_type = other DNA
gactttctctttacataattga

SEQ ID NO: 118058 - DNA, 22 bp, synthetic construct
  misc_feature 1..22: note = chemically synthesized
  source 1..22: mol_type = other DNA
actttctctttacataattgaa

SEQ ID NO: 118059 - DNA, 22 bp, synthetic construct
  misc_feature 1..22: note = chemically synthesized
  source 1..22: mol_type = other DNA
tctctttacataattgaatgcc

SEQ ID NO: 118060 - DNA, 22 bp, synthetic construct
  misc_feature 1..22: note = chemically synthesized
  source 1..22: mol_type = other DNA
ctctttacataattgaatgcct

SEQ ID NO: 118061 - DNA, 22 bp, synthetic construct
  misc_feature 1..22: note = chemically synthesized
  source 1..22: mol_type = other DNA
tctttacataattgaatgcctt

SEQ ID NO: 118062 - DNA, 22 bp, synthetic construct
  misc_feature 1..22: note = chemically synthesized
  source 1..22: mol_type = other DNA
tttacataattgaatgcctttt

SEQ ID NO: 118063 - DNA, 22 bp, synthetic construct
  misc_feature 1..22: note = chemically synthesized
  source 1..22: mol_type = other DNA
tacataattgaatgccttttat

SEQ ID NO: 118064 - DNA, 22 bp, synthetic construct
  misc_feature 1..22: note = chemically synthesized
  source 1..22: mol_type = other DNA
acataattgaatgccttttatt

SEQ ID NO: 118065 - DNA, 22 bp, synthetic construct
  misc_feature 1..22: note = chemically synthesized
  source 1..22: mol_type = other DNA
cataattgaatgccttttattt

SEQ ID NO: 118066 - DNA, 22 bp, synthetic construct
  misc_feature 1..22: note = chemically synthesized
  source 1..22: mol_type = other DNA
aatgccttttatttccttctcc

SEQ ID NO: 118067 - DNA, 22 bp, synthetic construct
  misc_feature 1..22: note = chemically synthesized
  source 1..22: mol_type = other DNA
ttatttccttctcctgcccgat

SEQ ID NO: 118068 - DNA, 22 bp, synthetic construct
  misc_feature 1..22: note = chemically synthesized
  source 1..22: mol_type = other DNA
tatttccttctcctgcccgatt

SEQ ID NO: 118069 - DNA, 22 bp, synthetic construct
  misc_feature 1..22: note = chemically synthesized
  source 1..22: mol_type = other DNA
atttccttctcctgcccgattg

SEQ ID NO: 118070 - DNA, 22 bp, synthetic construct
  misc_feature 1..22: note = chemically synthesized
  source 1..22: mol_type = other DNA
tttccttctcctgcccgattgc

SEQ ID NO: 118071 - DNA, 22 bp, synthetic construct
  misc_feature 1..22: note = chemically synthesized
  source 1..22: mol_type = other DNA
ccttctcctgcccgattgcccg

SEQ ID NO: 118072 - DNA, 22 bp, synthetic construct
  misc_feature 1..22: note = chemically synthesized
  source 1..22: mol_type = other DNA
cttctcctgcccgattgcccgg

SEQ ID NO: 118073 - DNA, 22 bp, synthetic construct
  misc_feature 1..22: note = chemically synthesized
  source 1..22: mol_type = other DNA
ctcctgcccgattgcccgggcc

SEQ ID NO: 118074 - DNA, 22 bp, synthetic construct
  misc_feature 1..22: note = chemically synthesized
  source 1..22: mol_type = other DNA
tcctgcccgattgcccgggcca

SEQ ID NO: 118075 - DNA, 22 bp, synthetic construct
  misc_feature 1..22: note = chemically synthesized
  source 1..22: mol_type = other DNA
ctgcccgattgcccgggccaga

SEQ ID NO: 118076 - DNA, 22 bp, synthetic construct
  misc_feature 1..22: note = chemically synthesized
  source 1..22: mol_type = other DNA
cccgattgcccgggccagaact

SEQ ID NO: 118077 - DNA, 22 bp, synthetic construct
  misc_feature 1..22: note = chemically synthesized
  source 1..22: mol_type = other DNA
cccgggccagaacttccaacac

SEQ ID NO: 118078 - DNA, 22 bp, synthetic construct
  misc_feature 1..22: note = chemically synthesized
  source 1..22: mol_type = other DNA
ccaacactatgttgaataggag

SEQ ID NO: 118079 - DNA, 22 bp, synthetic construct
  misc_feature 1..22: note = chemically synthesized
  source 1..22: mol_type = other DNA
caacactatgttgaataggagt

SEQ ID NO: 118080 - DNA, 22 bp, synthetic construct
  misc_feature 1..22: note = chemically synthesized
  source 1..22: mol_type = other DNA
tgttgaataggagtggtgagag

SEQ ID NO: 118081 - DNA, 22 bp, synthetic construct
  misc_feature 1..22: note = chemically synthesized
  source 1..22: mol_type = other DNA
aataggagtggtgagagagggc

SEQ ID NO: 118082 - DNA, 22 bp, synthetic construct
  misc_feature 1..22: note = chemically synthesized
  source 1..22: mol_type = other DNA
tcttgcagcctaggcacatttt

SEQ ID NO: 118083 - DNA, 22 bp, synthetic construct
  misc_feature 1..22: note = chemically synthesized
  source 1..22: mol_type = other DNA
gcagcctaggcacattttcatt

SEQ ID NO: 118084 - DNA, 22 bp, synthetic construct
  misc_feature 1..22: note = chemically synthesized
  source 1..22: mol_type = other DNA
cagcctaggcacattttcatta

SEQ ID NO: 118085 - DNA, 22 bp, synthetic construct
  misc_feature 1..22: note = chemically synthesized
  source 1..22: mol_type = other DNA
ggcacattttcattaggcagtg

SEQ ID NO: 118086 - DNA, 22 bp, synthetic construct
  misc_feature 1..22: note = chemically synthesized
  source 1..22: mol_type = other DNA
tcattaggcagtgcagtgtggt

SEQ ID NO: 118087 - DNA, 22 bp, synthetic construct
  misc_feature 1..22: note = chemically synthesized
  source 1..22: mol_type = other DNA
cattaggcagtgcagtgtggtt

SEQ ID NO: 118088 - DNA, 22 bp, synthetic construct
  misc_feature 1..22: note = chemically synthesized
  source 1..22: mol_type = other DNA
attaggcagtgcagtgtggtta

SEQ ID NO: 118089 - DNA, 22 bp, synthetic construct
  misc_feature 1..22: note = chemically synthesized
  source 1..22: mol_type = other DNA
ggcagtgcagtgtggttaagag

SEQ ID NO: 118090 - DNA, 22 bp, synthetic construct
  misc_feature 1..22: note = chemically synthesized
  source 1..22: mol_type = other DNA
agagcagtgtctctgggaccag

SEQ ID NO: 118091 - DNA, 22 bp, synthetic construct
  misc_feature 1..22: note = chemically synthesized
  source 1..22: mol_type = other DNA
tgggaccagatctgtattacaa

SEQ ID NO: 118092 - DNA, 22 bp, synthetic construct
  misc_feature 1..22: note = chemically synthesized
  source 1..22: mol_type = other DNA
ggaccagatctgtattacaatc

SEQ ID NO: 118093 - DNA, 22 bp, synthetic construct
  misc_feature 1..22: note = chemically synthesized
  source 1..22: mol_type = other DNA
tattacaatcataacttcaata

SEQ ID NO: 118094 - DNA, 22 bp, synthetic construct
  misc_feature 1..22: note = chemically synthesized
  source 1..22: mol_type = other DNA
caatcataacttcaatagctct

SEQ ID NO: 118095 - DNA, 22 bp, synthetic construct
  misc_feature 1..22: note = chemically synthesized
  source 1..22: mol_type = other DNA
caatagctcttcactctatgat

SEQ ID NO: 118096 - DNA, 22 bp, synthetic construct
  misc_feature 1..22: note = chemically synthesized
  source 1..22: mol_type = other DNA
aatagctcttcactctatgatt

SEQ ID NO: 118097 - DNA, 22 bp, synthetic construct
  misc_feature 1..22: note = chemically synthesized
  source 1..22: mol_type = other DNA
ttcactctatgattgtgcaaag

SEQ ID NO: 118098 - DNA, 22 bp, synthetic construct
  misc_feature 1..22: note = chemically synthesized
  source 1..22: mol_type = other DNA
cactctatgattgtgcaaagta

SEQ ID NO: 118099 - DNA, 22 bp, synthetic construct
  misc_feature 1..22: note = chemically synthesized
  source 1..22: mol_type = other DNA
actctatgattgtgcaaagtat

SEQ ID NO: 118100 - DNA, 22 bp, synthetic construct
  misc_feature 1..22: note = chemically synthesized
  source 1..22: mol_type = other DNA
tatgattgtgcaaagtatctga

SEQ ID NO: 118101 - DNA, 22 bp, synthetic construct
  misc_feature 1..22: note = chemically synthesized
  source 1..22: mol_type = other DNA
tgattgtgcaaagtatctgatt

SEQ ID NO: 118102 - DNA, 22 bp, synthetic construct
  misc_feature 1..22: note = chemically synthesized
  source 1..22: mol_type = other DNA
tgcaaagtatctgattaatctt

SEQ ID NO: 118103 - DNA, 22 bp, synthetic construct
  misc_feature 1..22: note = chemically synthesized
  source 1..22: mol_type = other DNA
attaatcttagtttcttcatct

SEQ ID NO: 118104 - DNA, 22 bp, synthetic construct
  misc_feature 1..22: note = chemically synthesized
  source 1..22: mol_type = other DNA
atcttagtttcttcatctgaaa

SEQ ID NO: 118105 - DNA, 22 bp, synthetic construct
  misc_feature 1..22: note = chemically synthesized
  source 1..22: mol_type = other DNA
agtttcttcatctgaaaaattg

SEQ ID NO: 118106 - DNA, 22 bp, synthetic construct
  misc_feature 1..22: note = chemically synthesized
  source 1..22: mol_type = other DNA
gtttcttcatctgaaaaattga

SEQ ID NO: 118107 - DNA, 22 bp, synthetic construct
  misc_feature 1..22: note = chemically synthesized
  source 1..22: mol_type = other DNA
cttcatctgaaaaattgagaca

SEQ ID NO: 118108 - DNA, 22 bp, synthetic construct
  misc_feature 1..22: note = chemically synthesized
  source 1..22: mol_type = other DNA
ttcatctgaaaaattgagacaa

SEQ ID NO: 118109 - DNA, 22 bp, synthetic construct
  misc_feature 1..22: note = chemically synthesized
  source 1..22: mol_type = other DNA
catctgaaaaattgagacaatt

SEQ ID NO: 118110 - DNA, 22 bp, synthetic construct
  misc_feature 1..22: note = chemically synthesized
  source 1..22: mol_type = other DNA
atctgaaaaattgagacaattc

SEQ ID NO: 118111 - DNA, 22 bp, synthetic construct
  misc_feature 1..22: note = chemically synthesized
  source 1..22: mol_type = other DNA
aaaaattgagacaattctacct

SEQ ID NO: 118112 - DNA, 22 bp, synthetic construct
  misc_feature 1..22: note = chemically synthesized
  source 1..22: mol_type = other DNA
agacaattctacctactccata

SEQ ID NO: 118113 - DNA, 22 bp, synthetic construct
  misc_feature 1..22: note = chemically synthesized
  source 1..22: mol_type = other DNA
tacctactccatagattagaga

SEQ ID NO: 118114 - DNA, 22 bp, synthetic construct
  misc_feature 1..22: note = chemically synthesized
  source 1..22: mol_type = other DNA
cctactccatagattagagagc

SEQ ID NO: 118115 - DNA, 22 bp, synthetic construct
  misc_feature 1..22: note = chemically synthesized
  source 1..22: mol_type = other DNA
ctccatagattagagagccatt

SEQ ID NO: 118116 - DNA, 22 bp, synthetic construct
  misc_feature 1..22: note = chemically synthesized
  source 1..22: mol_type = other DNA
catagattagagagccattcat

SEQ ID NO: 118117 - DNA, 22 bp, synthetic construct
  misc_feature 1..22: note = chemically synthesized
  source 1..22: mol_type = other DNA
gagagccattcatatgcaattt

SEQ ID NO: 118118 - DNA, 22 bp, synthetic construct
  misc_feature 1..22: note = chemically synthesized
  source 1..22: mol_type = other DNA
atatgcaattttaaatggagta

SEQ ID NO: 118119 - DNA, 22 bp, synthetic construct
  misc_feature 1..22: note = chemically synthesized
  source 1..22: mol_type = other DNA
taaatggagtacagttagaagc

SEQ ID NO: 118120 - DNA, 22 bp, synthetic construct
  misc_feature 1..22: note = chemically synthesized
  source 1..22: mol_type = other DNA
aaatggagtacagttagaagca

SEQ ID NO: 118121 - DNA, 22 bp, synthetic construct
  misc_feature 1..22: note = chemically synthesized
  source 1..22: mol_type = other DNA
aatggagtacagttagaagcaa

SEQ ID NO: 118122 - DNA, 22 bp, synthetic construct
  misc_feature 1..22: note = chemically synthesized
  source 1..22: mol_type = other DNA
gaagcaaatactcaatagacac

SEQ ID NO: 118123 - DNA, 22 bp, synthetic construct
  misc_feature 1..22: note = chemically synthesized
  source 1..22: mol_type = other DNA
aatagacacattttattagttg

SEQ ID NO: 118124 - DNA, 22 bp, synthetic construct
  misc_feature 1..22: note = chemically synthesized
  source 1..22: mol_type = other DNA
tattagttgtactttccagcat

SEQ ID NO: 118125 - DNA, 22 bp, synthetic construct
  misc_feature 1..22: note = chemically synthesized
  source 1..22: mol_type = other DNA
attagttgtactttccagcatt

SEQ ID NO: 118126 - DNA, 22 bp, synthetic construct
  misc_feature 1..22: note = chemically synthesized
  source 1..22: mol_type = other DNA
ttagttgtactttccagcattc

SEQ ID NO: 118127 - DNA, 22 bp, synthetic construct
  misc_feature 1..22: note = chemically synthesized
  source 1..22: mol_type = other DNA
gttgtactttccagcattccag

SEQ ID NO: 118128 - DNA, 22 bp, synthetic construct
  misc_feature 1..22: note = chemically synthesized
  source 1..22: mol_type = other DNA
tactttccagcattccagtgag

SEQ ID NO: 118129 - DNA, 22 bp, synthetic construct
  misc_feature 1..22: note = chemically synthesized
  source 1..22: mol_type = other DNA
tccagcattccagtgagcaatg

SEQ ID NO: 118130 - DNA, 22 bp, synthetic construct
  misc_feature 1..22: note = chemically synthesized
  source 1..22: mol_type = other DNA
ccagcattccagtgagcaatgt

SEQ ID NO: 118131 - DNA, 22 bp, synthetic construct
  misc_feature 1..22: note = chemically synthesized
  source 1..22: mol_type = other DNA
cagcattccagtgagcaatgtt

SEQ ID NO: 118132 - DNA, 22 bp, synthetic construct
  misc_feature 1..22: note = chemically synthesized
  source 1..22: mol_type = other DNA
cagtgagcaatgttgcagtgag

SEQ ID NO: 118133 - DNA, 22 bp, synthetic construct
  misc_feature 1..22: note = chemically synthesized
  source 1..22: mol_type = other DNA
cagtgagctctaagaaaagatt

SEQ ID NO: 118134 - DNA, 22 bp, synthetic construct
  misc_feature 1..22: note = chemically synthesized
  source 1..22: mol_type = other DNA
taagaaaagattgaaaaataat

SEQ ID NO: 118135 - DNA, 22 bp, synthetic construct
  misc_feature 1..22: note = chemically synthesized
  source 1..22: mol_type = other DNA
agaaaagattgaaaaataatct

SEQ ID NO: 118136 - DNA, 22 bp, synthetic construct
  misc_feature 1..22: note = chemically synthesized
  source 1..22: mol_type = other DNA
aaaaataatctgacaacaatga

SEQ ID NO: 118137 - DNA, 22 bp, synthetic construct
  misc_feature 1..22: note = chemically synthesized
  source 1..22: mol_type = other DNA
acaacaatgaagcgtaaggtat

SEQ ID NO: 118138 - DNA, 22 bp, synthetic construct
  misc_feature 1..22: note = chemically synthesized
  source 1..22: mol_type = other DNA
ggagtgggaagccatgagctct

SEQ ID NO: 118139 - DNA, 22 bp, synthetic construct
  misc_feature 1..22: note = chemically synthesized
  source 1..22: mol_type = other DNA
gagtgggaagccatgagctctt

SEQ ID NO: 118140 - DNA, 22 bp, synthetic construct
  misc_feature 1..22: note = chemically synthesized
  source 1..22: mol_type = other DNA
ttgcacaggtttttggacaatc

SEQ ID NO: 118141 - DNA, 22 bp, synthetic construct
  misc_feature 1..22: note = chemically synthesized
  source 1..22: mol_type = other DNA
gcacaggtttttggacaatcct

SEQ ID NO: 118142 - DNA, 22 bp, synthetic construct
  misc_feature 1..22: note = chemically synthesized
  source 1..22: mol_type = other DNA
cacaggtttttggacaatcctt

SEQ ID NO: 118143 - DNA, 22 bp, synthetic construct
  misc_feature 1..22: note = chemically synthesized
  source 1..22: mol_type = other DNA
ttggacaatccttccatatggc

SEQ ID NO: 118144 - DNA, 22 bp, synthetic construct
  misc_feature 1..22: note = chemically synthesized
  source 1..22: mol_type = other DNA
tggacaatccttccatatggct

SEQ ID NO: 118145 - DNA, 22 bp, synthetic construct
  misc_feature 1..22: note = chemically synthesized
  source 1..22: mol_type = other DNA
ggacaatccttccatatggctt

SEQ ID NO: 118146 - DNA, 22 bp, synthetic construct
  misc_feature 1..22: note = chemically synthesized
  source 1..22: mol_type = other DNA
gacaatccttccatatggcttt

SEQ ID NO: 118147 - DNA, 22 bp, synthetic construct
  misc_feature 1..22: note = chemically synthesized
  source 1..22: mol_type = other DNA
ccatatggctttggcaaagtta

SEQ ID NO: 118148 - DNA, 22 bp, synthetic construct
  misc_feature 1..22: note = chemically synthesized
  source 1..22: mol_type = other DNA
catatggctttggcaaagttac

SEQ ID NO: 118149 - DNA, 22 bp, synthetic construct
  misc_feature 1..22: note = chemically synthesized
  source 1..22: mol_type = other DNA
tggcaaagttactgaatctttc

SEQ ID NO: 118150 - DNA, 22 bp, synthetic construct
  misc_feature 1..22: note = chemically synthesized
  source 1..22: mol_type = other DNA
ggcaaagttactgaatctttct

SEQ ID NO: 118151 - DNA, 22 bp, synthetic construct
  misc_feature 1..22: note = chemically synthesized
  source 1..22: mol_type = other DNA
gcaaagttactgaatctttcta

SEQ ID NO: 118152 - DNA, 22 bp, synthetic construct
  misc_feature 1..22: note = chemically synthesized
  source 1..22: mol_type = other DNA
ctgaatctttctaaaccttagc

SEQ ID NO: 118153 - DNA, 22 bp, synthetic construct
  misc_feature 1..22: note = chemically synthesized
  source 1..22: mol_type = other DNA
aatctttctaaaccttagcttt

SEQ ID NO: 118154 - DNA, 22 bp, synthetic construct
  misc_feature 1..22: note = chemically synthesized
  source 1..22: mol_type = other DNA
tctaaaccttagcttttttact

SEQ ID NO: 118155 - DNA, 22 bp, synthetic construct
  misc_feature 1..22: note = chemically synthesized
  source 1..22: mol_type = other DNA
ctaaaccttagcttttttacta

SEQ ID NO: 118156 - DNA, 22 bp, synthetic construct
  misc_feature 1..22: note = chemically synthesized
  source 1..22: mol_type = other DNA
taaaccttagcttttttactat

SEQ ID NO: 118157 - DNA, 22 bp, synthetic construct
  misc_feature 1..22: note = chemically synthesized
  source 1..22: mol_type = other DNA
aaccttagcttttttactatgt

SEQ ID NO: 118158 - DNA, 22 bp, synthetic construct
  misc_feature 1..22: note = chemically synthesized
  source 1..22: mol_type = other DNA
agcttttttactatgttgaaag

SEQ ID NO: 118159 - DNA, 22 bp, synthetic construct
  misc_feature 1..22: note = chemically synthesized
  source 1..22: mol_type = other DNA
gcttttttactatgttgaaaga

SEQ ID NO: 118160 - DNA, 22 bp, synthetic construct
  misc_feature 1..22: note = chemically synthesized
  source 1..22: mol_type = other DNA
ttttactatgttgaaagatttc

SEQ ID NO: 118161 - DNA, 22 bp, synthetic construct
  misc_feature 1..22: note = chemically synthesized
  source 1..22: mol_type = other DNA
tttactatgttgaaagatttcc

SEQ ID NO: 118162 - DNA, 22 bp, synthetic construct
  misc_feature 1..22: note = chemically synthesized
  source 1..22: mol_type = other DNA
ttactatgttgaaagatttcca

SEQ ID NO: 118163 - DNA, 22 bp, synthetic construct
  misc_feature 1..22: note = chemically synthesized
  source 1..22: mol_type = other DNA
tactatgttgaaagatttccac

SEQ ID NO: 118164 - DNA, 22 bp, synthetic construct
  misc_feature 1..22: note = chemically synthesized
  source 1..22: mol_type = other DNA
actatgttgaaagatttccaca

SEQ ID NO: 118165 - DNA, 22 bp, synthetic construct
  misc_feature 1..22: note = chemically synthesized
  source 1..22: mol_type = other DNA
ctatgttgaaagatttccacat

SEQ ID NO: 118166 - DNA, 22 bp, synthetic construct
  misc_feature 1..22: note = chemically synthesized
  source 1..22: mol_type = other DNA
tgttgaaagatttccacatggg

SEQ ID NO: 118167 - DNA, 22 bp, synthetic construct
  misc_feature 1..22: note = chemically synthesized
  source 1..22: mol_type = other DNA
aaagatttccacatgggccctg

SEQ ID NO: 118168 - DNA, 22 bp, synthetic construct
  misc_feature 1..22: note = chemically synthesized
  source 1..22: mol_type = other DNA
ccacatgggccctgcctctttt

SEQ ID NO: 118169 - DNA, 22 bp, synthetic construct
  misc_feature 1..22: note = chemically synthesized
  source 1..22: mol_type = other DNA
cacatgggccctgcctcttttc

SEQ ID NO: 118170 - DNA, 22 bp, synthetic construct
  misc_feature 1..22: note = chemically synthesized
  source 1..22: mol_type = other DNA
cctcttttcgagagaaatgatt

SEQ ID NO: 118171 - DNA, 22 bp, synthetic construct
  misc_feature 1..22: note = chemically synthesized
  source 1..22: mol_type = other DNA
ttttcgagagaaatgattaggt

SEQ ID NO: 118172 - DNA, 22 bp, synthetic construct
  misc_feature 1..22: note = chemically synthesized
  source 1..22: mol_type = other DNA
ttcgagagaaatgattaggttt

SEQ ID NO: 118173 - DNA, 22 bp, synthetic construct
  misc_feature 1..22: note = chemically synthesized
  source 1..22: mol_type = other DNA
tcgagagaaatgattaggttta

SEQ ID NO: 118174 - DNA, 22 bp, synthetic construct
  misc_feature 1..22: note = chemically synthesized
  source 1..22: mol_type = other DNA
cgagagaaatgattaggtttaa

SEQ ID NO: 118175 - DNA, 22 bp, synthetic construct
  misc_feature 1..22: note = chemically synthesized
  source 1..22: mol_type = other DNA
gagagaaatgattaggtttaat

SEQ ID NO: 118176 - DNA, 22 bp, synthetic construct
  misc_feature 1..22: note = chemically synthesized
  source 1..22: mol_type = other DNA
ggtttaatggggctgtggagga

SEQ ID NO: 118177 - DNA, 22 bp, synthetic construct
  misc_feature 1..22: note = chemically synthesized
  source 1..22: mol_type = other DNA
aatggggctgtggaggaaagca

SEQ ID NO: 118178 - DNA, 22 bp, synthetic construct
  misc_feature 1..22: note = chemically synthesized
  source 1..22: mol_type = other DNA
atggggctgtggaggaaagcac

SEQ ID NO: 118179 - DNA, 22 bp, synthetic construct
  misc_feature 1..22: note = chemically synthesized
  source 1..22: mol_type = other DNA
tggaggaaagcactctgaaatg

SEQ ID NO: 118180 - DNA, 22 bp, synthetic construct
  misc_feature 1..22: note = chemically synthesized
  source 1..22: mol_type = other DNA
tgaaatgttagaagcttcatca

SEQ ID NO: 118181 - DNA, 22 bp, synthetic construct
  misc_feature 1..22: note = chemically synthesized
  source 1..22: mol_type = other DNA
aaatgttagaagcttcatcaat

SEQ ID NO: 118182 - DNA, 22 bp, synthetic construct
  misc_feature 1..22: note = chemically synthesized
  source 1..22: mol_type = other DNA
gaagcttcatcaattggagcaa

SEQ ID NO: 118183 - DNA, 22 bp, synthetic construct
  misc_feature 1..22: note = chemically synthesized
  source 1..22: mol_type = other DNA
catcaattggagcaattgctga

SEQ ID NO: 118184 - DNA, 22 bp, synthetic construct
  misc_feature 1..22: note = chemically synthesized
  source 1..22: mol_type = other DNA
atcaattggagcaattgctgag

SEQ ID NO: 118185 - DNA, 22 bp, synthetic construct
  misc_feature 1..22: note = chemically synthesized
  source 1..22: mol_type = other DNA
gagcaattgctgagattatgtt

SEQ ID NO: 118186 - DNA, 22 bp, synthetic construct
  misc_feature 1..22: note = chemically synthesized
  source 1..22: mol_type = other DNA
ctgagattatgtttccttgcct

SEQ ID NO: 118187 - DNA, 22 bp, synthetic construct
  misc_feature 1..22: note = chemically synthesized
  source 1..22: mol_type = other DNA
agattatgtttccttgcctgcc

SEQ ID NO: 118188 - DNA, 22 bp, synthetic construct
  misc_feature 1..22: note = chemically synthesized
  source 1..22: mol_type = other DNA
tgtttccttgcctgccacaacc

SEQ ID NO: 118189 - DNA, 22 bp, synthetic construct
  misc_feature 1..22: note = chemically synthesized
  source 1..22: mol_type = other DNA
ccttgcctgccacaaccctgta

SEQ ID NO: 118190 - DNA, 22 bp, synthetic construct
  misc_feature 1..22: note = chemically synthesized
  source 1..22: mol_type = other DNA
cttgcctgccacaaccctgtat

SEQ ID NO: 118191 - DNA, 22 bp, synthetic construct
  misc_feature 1..22: note = chemically synthesized
  source 1..22: mol_type = other DNA
gcctgccacaaccctgtatcat

SEQ ID NO: 118192 - DNA, 22 bp, synthetic construct
  misc_feature 1..22: note = chemically synthesized
  source 1..22: mol_type = other DNA
cctgccacaaccctgtatcatt

SEQ ID NO: 118193 - DNA, 22 bp, synthetic construct
  misc_feature 1..22: note = chemically synthesized
  source 1..22: mol_type = other DNA
ccacaaccctgtatcattctct

SEQ ID NO: 118194 - DNA, 22 bp, synthetic construct
  misc_feature 1..22: note = chemically synthesized
  source 1..22: mol_type = other DNA
tatcattctctacaaggcatag

SEQ ID NO: 118195 - DNA, 22 bp, synthetic construct
  misc_feature 1..22: note = chemically synthesized
  source 1..22: mol_type = other DNA
tctacaaggcatagcccagtaa

SEQ ID NO: 118196 - DNA, 22 bp, synthetic construct
  misc_feature 1..22: note = chemically synthesized
  source 1..22: mol_type = other DNA
tacaaggcatagcccagtaaca

SEQ ID NO: 118197 - DNA, 22 bp, synthetic construct
  misc_feature 1..22: note = chemically synthesized
  source 1..22: mol_type = other DNA
caaggcatagcccagtaacaag

SEQ ID NO: 118198 - DNA, 22 bp, synthetic construct
  misc_feature 1..22: note = chemically synthesized
  source 1..22: mol_type = other DNA
tcttccccatcaaaaacatcac

SEQ ID NO: 118199 - DNA, 22 bp, synthetic construct
  misc_feature 1..22: note = chemically synthesized
  source 1..22: mol_type = other DNA
ccccatcaaaaacatcacggga

SEQ ID NO: 118200 - DNA, 22 bp, synthetic construct
  misc_feature 1..22: note = chemically synthesized
  source 1..22: mol_type = other DNA
cccatcaaaaacatcacgggag

SEQ ID NO: 118201 - DNA, 22 bp, synthetic construct
  misc_feature 1..22: note = chemically synthesized
  source 1..22: mol_type = other DNA
acaacagattggccatcttcct

SEQ ID NO: 118202 - DNA, 22 bp, synthetic construct
  misc_feature 1..22: note = chemically synthesized
  source 1..22: mol_type = other DNA
gccatcttcctggaagctgccc

SEQ ID NO: 118203 - DNA, 22 bp, synthetic construct
  misc_feature 1..22: note = chemically synthesized
  source 1..22: mol_type = other DNA
cctggaagctgccctattccat

SEQ ID NO: 118204 - DNA, 22 bp, synthetic construct
  misc_feature 1..22: note = chemically synthesized
  source 1..22: mol_type = other DNA
ctggaagctgccctattccata

SEQ ID NO: 118205 - DNA, 22 bp, synthetic construct
  misc_feature 1..22: note = chemically synthesized
  source 1..22: mol_type = other DNA
gaagctgccctattccataacc

SEQ ID NO: 118206 - DNA, 22 bp, synthetic construct
  misc_feature 1..22: note = chemically synthesized
  source 1..22: mol_type = other DNA
ccctattccataaccctgcata

SEQ ID NO: 118207 - DNA, 22 bp, synthetic construct
  misc_feature 1..22: note = chemically synthesized
  source 1..22: mol_type = other DNA
ttccataaccctgcatatagtc

SEQ ID NO: 118208 - DNA, 22 bp, synthetic construct
  misc_feature 1..22: note = chemically synthesized
  source 1..22: mol_type = other DNA
cataaccctgcatatagtcatg

SEQ ID NO: 118209 - DNA, 22 bp, synthetic construct
  misc_feature 1..22: note = chemically synthesized
  source 1..22: mol_type = other DNA
catatagtcatgctagataagg

SEQ ID NO: 118210 - DNA, 22 bp, synthetic construct
  misc_feature 1..22: note = chemically synthesized
  source 1..22: mol_type = other DNA
gataagggatattagagaggtc

SEQ ID NO: 118211 - DNA, 22 bp, synthetic construct
  misc_feature 1..22: note = chemically synthesized
  source 1..22: mol_type = other DNA
gagaggtcactccaatgacttc

SEQ ID NO: 118212 - DNA, 22 bp, synthetic construct
  misc_feature 1..22: note = chemically synthesized
  source 1..22: mol_type = other DNA
caatgacttcctttatccacaa

SEQ ID NO: 118213 - DNA, 22 bp, synthetic construct
  misc_feature 1..22: note = chemically synthesized
  source 1..22: mol_type = other DNA
cctttatccacaaaacaaagga

SEQ ID NO: 118214 - DNA, 22 bp, synthetic construct
  misc_feature 1..22: note = chemically synthesized
  source 1..22: mol_type = other DNA
ctttatccacaaaacaaaggac

SEQ ID NO: 118215 - DNA, 22 bp, synthetic construct
  misc_feature 1..22: note = chemically synthesized
  source 1..22: mol_type = other DNA
tatccacaaaacaaaggacctt

SEQ ID NO: 118216 - DNA, 22 bp, synthetic construct
  misc_feature 1..22: note = chemically synthesized
  source 1..22: mol_type = other DNA
atccacaaaacaaaggaccttc

SEQ ID NO: 118217 - DNA, 22 bp, synthetic construct
  misc_feature 1..22: note = chemically synthesized
  source 1..22: mol_type = other DNA
tccacaaaacaaaggaccttca

SEQ ID NO: 118218 - DNA, 22 bp, synthetic construct
  misc_feature 1..22: note = chemically synthesized
  source 1..22: mol_type = other DNA
cagcaacttactggtcctttct

SEQ ID NO: 118219 - DNA, 22 bp, synthetic construct
  misc_feature 1..22: note = chemically synthesized
  source 1..22: mol_type = other DNA
agcaacttactggtcctttctt

SEQ ID NO: 118220 - DNA, 22 bp, synthetic construct
  misc_feature 1..22: note = chemically synthesized
  source 1..22: mol_type = other DNA
actggtcctttcttctctgtag

SEQ ID NO: 118221 - DNA, 22 bp, synthetic construct
  misc_feature 1..22: note = chemically synthesized
  source 1..22: mol_type = other DNA
ctggtcctttcttctctgtagc

SEQ ID NO: 118222 - DNA, 22 bp, synthetic construct
  misc_feature 1..22: note = chemically synthesized
  source 1..22: mol_type = other DNA
gtcctttcttctctgtagcttc

SEQ ID NO: 118223 - DNA, 22 bp, synthetic construct
  misc_feature 1..22: note = chemically synthesized
  source 1..22: mol_type = other DNA
tcttctctgtagcttctttctc

SEQ ID NO: 118224 - DNA, 22 bp, synthetic construct
  misc_feature 1..22: note = chemically synthesized
  source 1..22: mol_type = other DNA
cttctctgtagcttctttctca

SEQ ID NO: 118225 - DNA, 22 bp, synthetic construct
  misc_feature 1..22: note = chemically synthesized
  source 1..22: mol_type = other DNA
ttctctgtagcttctttctcat

SEQ ID NO: 118226 - DNA, 22 bp, synthetic construct
  misc_feature 1..22: note = chemically synthesized
  source 1..22: mol_type = other DNA
ctctgtagcttctttctcatgc

SEQ ID NO: 118227 - DNA, 22 bp, synthetic construct
  misc_feature 1..22: note = chemically synthesized
  source 1..22: mol_type = other DNA
tctgtagcttctttctcatgca

SEQ ID NO: 118228 - DNA, 22 bp, synthetic construct
  misc_feature 1..22: note = chemically synthesized
  source 1..22: mol_type = other DNA
tgtagcttctttctcatgcagc

SEQ ID NO: 118229 - DNA, 22 bp, synthetic construct
  misc_feature 1..22: note = chemically synthesized
  source 1..22: mol_type = other DNA
tagcttctttctcatgcagccc

SEQ ID NO: 118230 - DNA, 22 bp, synthetic construct
  misc_feature 1..22: note = chemically synthesized
  source 1..22: mol_type = other DNA
ctttctcatgcagcccttccac

SEQ ID NO: 118231 - DNA, 22 bp, synthetic construct
  misc_feature 1..22: note = chemically synthesized
  source 1..22: mol_type = other DNA
tttctcatgcagcccttccact

SEQ ID NO: 118232 - DNA, 22 bp, synthetic construct
  misc_feature 1..22: note = chemically synthesized
  source 1..22: mol_type = other DNA
tctcatgcagcccttccactcc

SEQ ID NO: 118233 - DNA, 22 bp, synthetic construct
  misc_feature 1..22: note = chemically synthesized
  source 1..22: mol_type = other DNA
ctcatgcagcccttccactcca

SEQ ID NO: 118234 - DNA, 22 bp, synthetic construct
  misc_feature 1..22: note = chemically synthesized
  source 1..22: mol_type = other DNA
tcatgcagcccttccactccat

SEQ ID NO: 118235 - DNA, 22 bp, synthetic construct
  misc_feature 1..22: note = chemically synthesized
  source 1..22: mol_type = other DNA
atgcagcccttccactccatgc

SEQ ID NO: 118236 - DNA, 22 bp, synthetic construct
  misc_feature 1..22: note = chemically synthesized
  source 1..22: mol_type = other DNA
ccactccatgccagcatcttcc

SEQ ID NO: 118237 - DNA, 22 bp, synthetic construct
  misc_feature 1..22: note = chemically synthesized
  source 1..22: mol_type = other DNA
cactccatgccagcatcttcca

SEQ ID NO: 118238 - DNA, 22 bp, synthetic construct
  misc_feature 1..22: note = chemically synthesized
  source 1..22: mol_type = other DNA
catgccagcatcttccatttga

SEQ ID NO: 118239 - DNA, 22 bp, synthetic construct
  misc_feature 1..22: note = chemically synthesized
  source 1..22: mol_type = other DNA
ccatttgactcaggatgctgtt

SEQ ID NO: 118240 - DNA, 22 bp, synthetic construct
  misc_feature 1..22: note = chemically synthesized
  source 1..22: mol_type = other DNA
catttgactcaggatgctgttc

SEQ ID NO: 118241 - DNA, 22 bp, synthetic construct
  misc_feature 1..22: note = chemically synthesized
  source 1..22: mol_type = other DNA
gactcaggatgctgttctacgt

SEQ ID NO: 118242 - DNA, 22 bp, synthetic construct
  misc_feature 1..22: note = chemically synthesized
  source 1..22: mol_type = other DNA
actcaggatgctgttctacgtg

SEQ ID NO: 118243 - DNA, 22 bp, synthetic construct
  misc_feature 1..22: note = chemically synthesized
  source 1..22: mol_type = other DNA
aggatgctgttctacgtgggct

SEQ ID NO: 118244 - DNA, 22 bp, synthetic construct
  misc_feature 1..22: note = chemically synthesized
  source 1..22: mol_type = other DNA
ttctacgtgggctgcactggca

SEQ ID NO: 118245 - DNA, 22 bp, synthetic construct
  misc_feature 1..22: note = chemically synthesized
  source 1..22: mol_type = other DNA
tacgtgggctgcactggcactt

SEQ ID NO: 118246 - DNA, 22 bp, synthetic construct
  misc_feature 1..22: note = chemically synthesized
  source 1..22: mol_type = other DNA
cgtgggctgcactggcacttat

SEQ ID NO: 118247 - DNA, 22 bp, synthetic construct
  misc_feature 1..22: note = chemically synthesized
  source 1..22: mol_type = other DNA
cactggcacttataaagctgtc

SEQ ID NO: 118248 - DNA, 22 bp, synthetic construct
  misc_feature 1..22: note = chemically synthesized
  source 1..22: mol_type = other DNA
gcacttataaagctgtctctct

SEQ ID NO: 118249 - DNA, 22 bp, synthetic construct
  misc_feature 1..22: note = chemically synthesized
  source 1..22: mol_type = other DNA
ataaagctgtctctcttccttg

SEQ ID NO: 118250 - DNA, 22 bp, synthetic construct
  misc_feature 1..22: note = chemically synthesized
  source 1..22: mol_type = other DNA
taaagctgtctctcttccttgg

SEQ ID NO: 118251 - DNA, 22 bp, synthetic construct
  misc_feature 1..22: note = chemically synthesized
  source 1..22: mol_type = other DNA
tctctcttccttgggtctttgg

SEQ ID NO: 118252 - DNA, 22 bp, synthetic construct
  misc_feature 1..22: note = chemically synthesized
  source 1..22: mol_type = other DNA
tcttccttgggtctttggccct

SEQ ID NO: 118253 - DNA, 22 bp, synthetic construct
  misc_feature 1..22: note = chemically synthesized
  source 1..22: mol_type = other DNA
ttccttgggtctttggccctca

SEQ ID NO: 118254 - DNA, 22 bp, synthetic construct
  misc_feature 1..22: note = chemically synthesized
  source 1..22: mol_type = other DNA
ccttgggtctttggccctcaaa

SEQ ID NO: 118255 - DNA, 22 bp, synthetic construct
  misc_feature 1..22: note = chemically synthesized
  source 1..22: mol_type = other DNA
cttgggtctttggccctcaaag

SEQ ID NO: 118256 - DNA, 22 bp, synthetic construct
  misc_feature 1..22: note = chemically synthesized
  source 1..22: mol_type = other DNA
gggtctttggccctcaaaggaa

SEQ ID NO: 118257 - DNA, 22 bp, synthetic construct
  misc_feature 1..22: note = chemically synthesized
  source 1..22: mol_type = other DNA
ggtctttggccctcaaaggaat

SEQ ID NO: 118258 - DNA, 22 bp, synthetic construct
  misc_feature 1..22: note = chemically synthesized
  source 1..22: mol_type = other DNA
tggccctcaaaggaatctccct

SEQ ID NO: 118259 - DNA, 22 bp, synthetic construct
  misc_feature 1..22: note = chemically synthesized
  source 1..22: mol_type = other DNA
ggccctcaaaggaatctcccta

SEQ ID NO: 118260 - DNA, 22 bp, synthetic construct
  misc_feature 1..22: note = chemically synthesized
  source 1..22: mol_type = other DNA
gccctcaaaggaatctccctag

SEQ ID NO: 118261 - DNA, 22 bp, synthetic construct
  misc_feature 1..22: note = chemically synthesized
  source 1..22: mol_type = other DNA
aaaggaatctccctagatggac

SEQ ID NO: 118262 - DNA, 22 bp, synthetic construct
  misc_feature 1..22: note = chemically synthesized
  source 1..22: mol_type = other DNA
cctagatggacgcagacttgat

SEQ ID NO: 118263 - DNA, 22 bp, synthetic construct
  misc_feature 1..22: note = chemically synthesized
  source 1..22: mol_type = other DNA
gatggacgcagacttgatgaat

SEQ ID NO: 118264 - DNA, 22 bp, synthetic construct
  misc_feature 1..22: note = chemically synthesized
  source 1..22: mol_type = other DNA
gatgaatgtcaaagagggatta

SEQ ID NO: 118265 - DNA, 22 bp, synthetic construct
  misc_feature 1..22: note = chemically synthesized
  source 1..22: mol_type = other DNA
atgaatgtcaaagagggattag

SEQ ID NO: 118266 - DNA, 22 bp, synthetic construct
  misc_feature 1..22: note = chemically synthesized
  source 1..22: mol_type = other DNA
gcatcctcctagaccaaagcat

SEQ ID NO: 118267 - DNA, 22 bp, synthetic construct
  misc_feature 1..22: note = chemically synthesized
  source 1..22: mol_type = other DNA
ctagaccaaagcatttgagatg

SEQ ID NO: 118268 - DNA, 22 bp, synthetic construct
  misc_feature 1..22: note = chemically synthesized
  source 1..22: mol_type = other DNA
gaccaaagcatttgagatgccc

SEQ ID NO: 118269 - DNA, 22 bp, synthetic construct
  misc_feature 1..22: note = chemically synthesized
  source 1..22: mol_type = other DNA
gagatgcccagttatcttaaat

SEQ ID NO: 118270 - DNA, 22 bp, synthetic construct
  misc_feature 1..22: note = chemically synthesized
  source 1..22: mol_type = other DNA
agatgcccagttatcttaaatg

SEQ ID NO: 118271 - DNA, 22 bp, synthetic construct
  misc_feature 1..22: note = chemically synthesized
  source 1..22: mol_type = other DNA
tcttaaatggaaatttagtgaa

SEQ ID NO: 118272 - DNA, 22 bp, synthetic construct
  misc_feature 1..22: note = chemically synthesized
  source 1..22: mol_type = other DNA
aaatggaaatttagtgaaccat

SEQ ID NO: 118273 - DNA, 22 bp, synthetic construct
  misc_feature 1..22: note = chemically synthesized
  source 1..22: mol_type = other DNA
aatggaaatttagtgaaccatg

SEQ ID NO: 118274 - DNA, 22 bp, synthetic construct
  misc_feature 1..22: note = chemically synthesized
  source 1..22: mol_type = other DNA
agtgaaccatgagtacctctag

SEQ ID NO: 118275 - DNA, 22 bp, synthetic construct
  misc_feature 1..22: note = chemically synthesized
  source 1..22: mol_type = other DNA
gtgaaccatgagtacctctagg

SEQ ID NO: 118276 - DNA, 22 bp, synthetic construct
  misc_feature 1..22: note = chemically synthesized
  source 1..22: mol_type = other DNA
taggaggtatttcagtgagcca

SEQ ID NO: 118277 - DNA, 22 bp, synthetic construct
  misc_feature 1..22: note = chemically synthesized
  source 1..22: mol_type = other DNA
ggaggtatttcagtgagccaga

SEQ ID NO: 118278 - DNA, 22 bp, synthetic construct
  misc_feature 1..22: note = chemically synthesized
  source 1..22: mol_type = other DNA
cagtgagccagaggatccttga

SEQ ID NO: 118279 - DNA, 22 bp, synthetic construct
  misc_feature 1..22: note = chemically synthesized
  source 1..22: mol_type = other DNA
agtgagccagaggatccttgac

SEQ ID NO: 118280 - DNA, 22 bp, synthetic construct
  misc_feature 1..22: note = chemically synthesized
  source 1..22: mol_type = other DNA
gactgtcttctctccccagctg

SEQ ID NO: 118281 - DNA, 22 bp, synthetic construct
  misc_feature 1..22: note = chemically synthesized
  source 1..22: mol_type = other DNA
actgtcttctctccccagctgc

SEQ ID NO: 118282 - DNA, 22 bp, synthetic construct
  misc_feature 1..22: note = chemically synthesized
  source 1..22: mol_type = other DNA
tcttctctccccagctgccaac

SEQ ID NO: 118283 - DNA, 22 bp, synthetic construct
  misc_feature 1..22: note = chemically synthesized
  source 1..22: mol_type = other DNA
ctctccccagctgccaacttca

SEQ ID NO: 118284 - DNA, 22 bp, synthetic construct
  misc_feature 1..22: note = chemically synthesized
  source 1..22: mol_type = other DNA
tctccccagctgccaacttcat

SEQ ID NO: 118285 - DNA, 22 bp, synthetic construct
  misc_feature 1..22: note = chemically synthesized
  source 1..22: mol_type = other DNA
tccccagctgccaacttcataa

SEQ ID NO: 118286 - DNA, 22 bp, synthetic construct
  misc_feature 1..22: note = chemically synthesized
  source 1..22: mol_type = other DNA
cccagctgccaacttcataaga

SEQ ID NO: 118287 - DNA, 22 bp, synthetic construct
  misc_feature 1..22: note = chemically synthesized
  source 1..22: mol_type = other DNA
ccaacttcataagaaaatttat

SEQ ID NO: 118288 - DNA, 22 bp, synthetic construct
  misc_feature 1..22: note = chemically synthesized
  source 1..22: mol_type = other DNA
cataagaaaatttattgggtgc

SEQ ID NO: 118289 - DNA, 22 bp, synthetic construct
  misc_feature 1..22: note = chemically synthesized
  source 1..22: mol_type = other DNA
ataagaaaatttattgggtgct

SEQ ID NO: 118290 - DNA, 22 bp, synthetic construct
  misc_feature 1..22: note = chemically synthesized
  source 1..22: mol_type = other DNA
attgggtgcttctcaatcctct

SEQ ID NO: 118291 - DNA, 22 bp, synthetic construct
  misc_feature 1..22: note = chemically synthesized
  source 1..22: mol_type = other DNA
ttgggtgcttctcaatcctctt

SEQ ID NO: 118292 - DNA, 22 bp, synthetic construct
  misc_feature 1..22: note = chemically synthesized
  source 1..22: mol_type = other DNA
ggtgcttctcaatcctcttttt

SEQ ID NO: 118293 - DNA, 22 bp, synthetic construct
  misc_feature 1..22: note = chemically synthesized
  source 1..22: mol_type = other DNA
ctcaatcctcttttttgtcttt

SEQ ID NO: 118294 - DNA, 22 bp, synthetic construct
  misc_feature 1..22: note = chemically synthesized
  source 1..22: mol_type = other DNA
tcaatcctcttttttgtctttc

SEQ ID NO: 118295 - DNA, 22 bp, synthetic construct
  misc_feature 1..22: note = chemically synthesized
  source 1..22: mol_type = other DNA
aatcctcttttttgtctttctt

SEQ ID NO: 118296 - DNA, 22 bp, synthetic construct
  misc_feature 1..22: note = chemically synthesized
  source 1..22: mol_type = other DNA
ttttttgtctttcttttctttt

SEQ ID NO: 118297 - DNA, 22 bp, synthetic construct
  misc_feature 1..22: note = chemically synthesized
  source 1..22: mol_type = other DNA
ttttgtctttcttttcttttcc

SEQ ID NO: 118298 - DNA, 22 bp, synthetic construct
  misc_feature 1..22: note = chemically synthesized
  source 1..22: mol_type = other DNA
tttgtctttcttttcttttccc

SEQ ID NO: 118299 - DNA, 22 bp, synthetic construct
  misc_feature 1..22: note = chemically synthesized
  source 1..22: mol_type = other DNA
ttgtctttcttttcttttccca

SEQ ID NO: 118300 - DNA, 22 bp, synthetic construct
  misc_feature 1..22: note = chemically synthesized
  source 1..22: mol_type = other DNA
tgtctttcttttcttttcccag

SEQ ID NO: 118301 - DNA, 22 bp, synthetic construct
  misc_feature 1..22: note = chemically synthesized
  source 1..22: mol_type = other DNA
gtctttcttttcttttcccaga

SEQ ID NO: 118302 - DNA, 22 bp, synthetic construct
  misc_feature 1..22: note = chemically synthesized
  source 1..22: mol_type = other DNA
tctttcttttcttttcccagac

SEQ ID NO: 118303 - DNA, 22 bp, synthetic construct
  misc_feature 1..22: note = chemically synthesized
  source 1..22: mol_type = other DNA
tcttttcttttcccagacaaaa

SEQ ID NO: 118304 - DNA, 22 bp, synthetic construct
  misc_feature 1..22: note = chemically synthesized
  source 1..22: mol_type = other DNA
cttttcttttcccagacaaaag

SEQ ID NO: 118305 - DNA, 22 bp, synthetic construct
  misc_feature 1..22: note = chemically synthesized
  source 1..22: mol_type = other DNA
ttttcttttcccagacaaaagt

SEQ ID NO: 118306 - DNA, 22 bp, synthetic construct
  misc_feature 1..22: note = chemically synthesized
  source 1..22: mol_type = other DNA
ttcttttcccagacaaaagtcc

SEQ ID NO: 118307 - DNA, 22 bp, synthetic construct
  misc_feature 1..22: note = chemically synthesized
  source 1..22: mol_type = other DNA
tcttttcccagacaaaagtccc

SEQ ID NO: 118308 - DNA, 22 bp, synthetic construct
  misc_feature 1..22: note = chemically synthesized
  source 1..22: mol_type = other DNA
cttttcccagacaaaagtcccc

SEQ ID NO: 118309 - DNA, 22 bp, synthetic construct
  misc_feature 1..22: note = chemically synthesized
  source 1..22: mol_type = other DNA
ttttcccagacaaaagtcccct

SEQ ID NO: 118310 - DNA, 22 bp, synthetic construct
  misc_feature 1..22: note = chemically synthesized
  source 1..22: mol_type = other DNA
ttcccagacaaaagtccccttg

SEQ ID NO: 118311 - DNA, 22 bp, synthetic construct
  misc_feature 1..22: note = chemically synthesized
  source 1..22: mol_type = other DNA
tcccagacaaaagtccccttga

SEQ ID NO: 118312 - DNA, 22 bp, synthetic construct
  misc_feature 1..22: note = chemically synthesized
  source 1..22: mol_type = other DNA
cccagacaaaagtccccttgag

SEQ ID NO: 118313 - DNA, 22 bp, synthetic construct
  misc_feature 1..22: note = chemically synthesized
  source 1..22: mol_type = other DNA
ccagacaaaagtccccttgaga

SEQ ID NO: 118314 - DNA, 22 bp, synthetic construct
  misc_feature 1..22: note = chemically synthesized
  source 1..22: mol_type = other DNA
gagacagtctttacaaccaggt

SEQ ID NO: 118315 - DNA, 22 bp, synthetic construct
  misc_feature 1..22: note = chemically synthesized
  source 1..22: mol_type = other DNA
agacagtctttacaaccaggta

SEQ ID NO: 118316 - DNA, 22 bp, synthetic construct
  misc_feature 1..22: note = chemically synthesized
  source 1..22: mol_type = other DNA
tacaaccaggtagttattcact

SEQ ID NO: 118317 - DNA, 22 bp, synthetic construct
  misc_feature 1..22: note = chemically synthesized
  source 1..22: mol_type = other DNA
acaaccaggtagttattcactg

SEQ ID NO: 118318 - DNA, 22 bp, synthetic construct
  misc_feature 1..22: note = chemically synthesized
  source 1..22: mol_type = other DNA
caaccaggtagttattcactgt

SEQ ID NO: 118319 - DNA, 22 bp, synthetic construct
  misc_feature 1..22: note = chemically synthesized
  source 1..22: mol_type = other DNA
ttcactgtcattcactgagcaa

SEQ ID NO: 118320 - DNA, 22 bp, synthetic construct
  misc_feature 1..22: note = chemically synthesized
  source 1..22: mol_type = other DNA
actgtcattcactgagcaagta

SEQ ID NO: 118321 - DNA, 22 bp, synthetic construct
  misc_feature 1..22: note = chemically synthesized
  source 1..22: mol_type = other DNA
tcattcactgagcaagtatgta

SEQ ID NO: 118322 - DNA, 22 bp, synthetic construct
  misc_feature 1..22: note = chemically synthesized
  source 1..22: mol_type = other DNA
actgagcaagtatgtaaagatc

SEQ ID NO: 118323 - DNA, 22 bp, synthetic construct
  misc_feature 1..22: note = chemically synthesized
  source 1..22: mol_type = other DNA
agcaagtatgtaaagatcacaa

SEQ ID NO: 118324 - DNA, 22 bp, synthetic construct
  misc_feature 1..22: note = chemically synthesized
  source 1..22: mol_type = other DNA
tgggtcagatatttgaatgcaa

SEQ ID NO: 118325 - DNA, 22 bp, synthetic construct
  misc_feature 1..22: note = chemically synthesized
  source 1..22: mol_type = other DNA
gggtcagatatttgaatgcaag

SEQ ID NO: 118326 - DNA, 22 bp, synthetic construct
  misc_feature 1..22: note = chemically synthesized
  source 1..22: mol_type = other DNA
ggtcagatatttgaatgcaagc

SEQ ID NO: 118327 - DNA, 22 bp, synthetic construct
  misc_feature 1..22: note = chemically synthesized
  source 1..22: mol_type = other DNA
gaatgcaagcattaataagaca

SEQ ID NO: 118328 - DNA, 22 bp, synthetic construct
  misc_feature 1..22: note = chemically synthesized
  source 1..22: mol_type = other DNA
aatgcaagcattaataagacac

SEQ ID NO: 118329 - DNA, 22 bp, synthetic construct
  misc_feature 1..22: note = chemically synthesized
  source 1..22: mol_type = other DNA
ataagacacaaactctgtcttt

SEQ ID NO: 118330 - DNA, 22 bp, synthetic construct
  misc_feature 1..22: note = chemically synthesized
  source 1..22: mol_type = other DNA
tgtctttcagaaagcattgtct

SEQ ID NO: 118331 - DNA, 22 bp, synthetic construct
  misc_feature 1..22: note = chemically synthesized
  source 1..22: mol_type = other DNA
tctttcagaaagcattgtcttc

SEQ ID NO: 118332 - DNA, 22 bp, synthetic construct
  misc_feature 1..22: note = chemically synthesized
  source 1..22: mol_type = other DNA
tcagaaagcattgtcttctgca

SEQ ID NO: 118333 - DNA, 22 bp, synthetic construct
  misc_feature 1..22: note = chemically synthesized
  source 1..22: mol_type = other DNA
cagaaagcattgtcttctgcag

SEQ ID NO: 118334 - DNA, 22 bp, synthetic construct
  misc_feature 1..22: note = chemically synthesized
  source 1..22: mol_type = other DNA
agaaagcattgtcttctgcagg

SEQ ID NO: 118335 - DNA, 22 bp, synthetic construct
  misc_feature 1..22: note = chemically synthesized
  source 1..22: mol_type = other DNA
tcttctgcaggaggttgatgtg

SEQ ID NO: 118336 - DNA, 22 bp, synthetic construct
  misc_feature 1..22: note = chemically synthesized
  source 1..22: mol_type = other DNA
ctgcaggaggttgatgtgaaaa

SEQ ID NO: 118337 - DNA, 22 bp, synthetic construct
  misc_feature 1..22: note = chemically synthesized
  source 1..22: mol_type = other DNA
tgcaggaggttgatgtgaaaaa

SEQ ID NO: 118338 - DNA, 22 bp, synthetic construct
  misc_feature 1..22: note = chemically synthesized
  source 1..22: mol_type = other DNA
caggaggttgatgtgaaaaaaa

SEQ ID NO: 118339 - DNA, 22 bp, synthetic construct
  misc_feature 1..22: note = chemically synthesized
  source 1..22: mol_type = other DNA
atgtgaaaaaaactaacgtccc

SEQ ID NO: 118340 - DNA, 22 bp, synthetic construct
  misc_feature 1..22: note = chemically synthesized
  source 1..22: mol_type = other DNA
acgtcccctgatgaagcaaaaa

SEQ ID NO: 118341 - DNA, 22 bp, synthetic construct
  misc_feature 1..22: note = chemically synthesized
  source 1..22: mol_type = other DNA
atgaagcaaaaacaggcttccc

SEQ ID NO: 118342 - DNA, 22 bp, synthetic construct
  misc_feature 1..22: note = chemically synthesized
  source 1..22: mol_type = other DNA
cccaggtgatacaaatatttag

SEQ ID NO: 118343 - DNA, 22 bp, synthetic construct
  misc_feature 1..22: note = chemically synthesized
  source 1..22: mol_type = other DNA
ccaggtgatacaaatatttagc

SEQ ID NO: 118344 - DNA, 22 bp, synthetic construct
  misc_feature 1..22: note = chemically synthesized
  source 1..22: mol_type = other DNA
agcaagctttccttactaatgt

SEQ ID NO: 118345 - DNA, 22 bp, synthetic construct
  misc_feature 1..22: note = chemically synthesized
  source 1..22: mol_type = other DNA
gcaagctttccttactaatgtc

SEQ ID NO: 118346 - DNA, 22 bp, synthetic construct
  misc_feature 1..22: note = chemically synthesized
  source 1..22: mol_type = other DNA
tccttactaatgtctgcactat

SEQ ID NO: 118347 - DNA, 22 bp, synthetic construct
  misc_feature 1..22: note = chemically synthesized
  source 1..22: mol_type = other DNA
ccttactaatgtctgcactatc

SEQ ID NO: 118348 - DNA, 22 bp, synthetic construct
  misc_feature 1..22: note = chemically synthesized
  source 1..22: mol_type = other DNA
cttactaatgtctgcactatca

SEQ ID NO: 118349 - DNA, 22 bp, synthetic construct
  misc_feature 1..22: note = chemically synthesized
  source 1..22: mol_type = other DNA
actaatgtctgcactatcattc

SEQ ID NO: 118350 - DNA, 22 bp, synthetic construct
  misc_feature 1..22: note = chemically synthesized
  source 1..22: mol_type = other DNA
ctaatgtctgcactatcattca

SEQ ID NO: 118351 - DNA, 22 bp, synthetic construct
  misc_feature 1..22: note = chemically synthesized
  source 1..22: mol_type = other DNA
atgtctgcactatcattcaaaa

SEQ ID NO: 118352 - DNA, 22 bp, synthetic construct
  misc_feature 1..22: note = chemically synthesized
  source 1..22: mol_type = other DNA
cactatcattcaaaataggtaa

SEQ ID NO: 118353 - DNA, 22 bp, synthetic construct
  misc_feature 1..22: note = chemically synthesized
  source 1..22: mol_type = other DNA
tcattcaaaataggtaacattt

SEQ ID NO: 118354 - DNA, 22 bp, synthetic construct
  misc_feature 1..22: note = chemically synthesized
  source 1..22: mol_type = other DNA
aaaataggtaacattttagata

SEQ ID NO: 118355 - DNA, 22 bp, synthetic construct
  misc_feature 1..22: note = chemically synthesized
  source 1..22: mol_type = other DNA
tagatagaggggaaaacatgta

SEQ ID NO: 118356 - DNA, 22 bp, synthetic construct
  misc_feature 1..22: note = chemically synthesized
  source 1..22: mol_type = other DNA
agatagaggggaaaacatgtac

SEQ ID NO: 118357 - DNA, 22 bp, synthetic construct
  misc_feature 1..22: note = chemically synthesized
  source 1..22: mol_type = other DNA
gatagaggggaaaacatgtaca

SEQ ID NO: 118358 - DNA, 22 bp, synthetic construct
  misc_feature 1..22: note = chemically synthesized
  source 1..22: mol_type = other DNA
agagttgtcacaaagcaaaaca

SEQ ID NO: 118359 - DNA, 22 bp, synthetic construct
  misc_feature 1..22: note = chemically synthesized
  source 1..22: mol_type = other DNA
tcacaaagcaaaacataaaatt

SEQ ID NO: 118360 - DNA, 22 bp, synthetic construct
  misc_feature 1..22: note = chemically synthesized
  source 1..22: mol_type = other DNA
tgtgaacttcaattacatgagc

SEQ ID NO: 118361 - DNA, 22 bp, synthetic construct
  misc_feature 1..22: note = chemically synthesized
  source 1..22: mol_type = other DNA
tgaacttcaattacatgagcca

SEQ ID NO: 118362 - DNA, 22 bp, synthetic construct
  misc_feature 1..22: note = chemically synthesized
  source 1..22: mol_type = other DNA
caattacatgagccatctgtgt

SEQ ID NO: 118363 - DNA, 22 bp, synthetic construct
  misc_feature 1..22: note = chemically synthesized
  source 1..22: mol_type = other DNA
aattacatgagccatctgtgtt

SEQ ID NO: 118364 - DNA, 22 bp, synthetic construct
  misc_feature 1..22: note = chemically synthesized
  source 1..22: mol_type = other DNA
catgagccatctgtgttttaca

SEQ ID NO: 118365 - DNA, 22 bp, synthetic construct
  misc_feature 1..22: note = chemically synthesized
  source 1..22: mol_type = other DNA
tgttttacaaatacagtatcaa

SEQ ID NO: 118366 - DNA, 22 bp, synthetic construct
  misc_feature 1..22: note = chemically synthesized
  source 1..22: mol_type = other DNA
tacaaatacagtatcaatttca

SEQ ID NO: 118367 - DNA, 22 bp, synthetic construct
  misc_feature 1..22: note = chemically synthesized
  source 1..22: mol_type = other DNA
acaaatacagtatcaatttcaa

SEQ ID NO: 118368 - DNA, 22 bp, synthetic construct
  misc_feature 1..22: note = chemically synthesized
  source 1..22: mol_type = other DNA
caaatacagtatcaatttcaaa

SEQ ID NO: 118369 - DNA, 22 bp, synthetic construct
  misc_feature 1..22: note = chemically synthesized
  source 1..22: mol_type = other DNA
caaaggcttagagaggcttgtg

SEQ ID NO: 118370 - DNA, 22 bp, synthetic construct
  misc_feature 1..22: note = chemically synthesized
  source 1..22: mol_type = other DNA
aaaggcttagagaggcttgtgg

SEQ ID NO: 118371 - DNA, 22 bp, synthetic construct
  misc_feature 1..22: note = chemically synthesized
  source 1..22: mol_type = other DNA
agagaggcttgtggatattaaa

SEQ ID NO: 118372 - DNA, 22 bp, synthetic construct
  misc_feature 1..22: note = chemically synthesized
  source 1..22: mol_type = other DNA
gagaggcttgtggatattaaat

SEQ ID NO: 118373 - DNA, 22 bp, synthetic construct
  misc_feature 1..22: note = chemically synthesized
  source 1..22: mol_type = other DNA
gtggatattaaataacgggata

SEQ ID NO: 118374 - DNA, 22 bp, synthetic construct
  misc_feature 1..22: note = chemically synthesized
  source 1..22: mol_type = other DNA
tggatattaaataacgggatag

SEQ ID NO: 118375 - DNA, 22 bp, synthetic construct
  misc_feature 1..22: note = chemically synthesized
  source 1..22: mol_type = other DNA
aataacgggatagttgtaaaga

SEQ ID NO: 118376 - DNA, 22 bp, synthetic construct
  misc_feature 1..22: note = chemically synthesized
  source 1..22: mol_type = other DNA
taaagatttttgcctgcaggaa

SEQ ID NO: 118377 - DNA, 22 bp, synthetic construct
  misc_feature 1..22: note = chemically synthesized
  source 1..22: mol_type = other DNA
ttgcctgcaggaatataggctt

SEQ ID NO: 118378 - DNA, 22 bp, synthetic construct
  misc_feature 1..22: note = chemically synthesized
  source 1..22: mol_type = other DNA
tgcctgcaggaatataggcttg

SEQ ID NO: 118379 - DNA, 22 bp, synthetic construct
  misc_feature 1..22: note = chemically synthesized
  source 1..22: mol_type = other DNA
gcctgcaggaatataggcttgt

SEQ ID NO: 118380 - DNA, 22 bp, synthetic construct
  misc_feature 1..22: note = chemically synthesized
  source 1..22: mol_type = other DNA
cctgcaggaatataggcttgtg

SEQ ID NO: 118381 - DNA, 22 bp, synthetic construct
  misc_feature 1..22: note = chemically synthesized
  source 1..22: mol_type = other DNA
caggaatataggcttgtgctga

SEQ ID NO: 118382 - DNA, 22 bp, synthetic construct
  misc_feature 1..22: note = chemically synthesized
  source 1..22: mol_type = other DNA
gtgctgaggaatgggccagatg

SEQ ID NO: 118383 - DNA, 22 bp, synthetic construct
  misc_feature 1..22: note = chemically synthesized
  source 1..22: mol_type = other DNA
tgctgaggaatgggccagatga

SEQ ID NO: 118384 - DNA, 22 bp, synthetic construct
  misc_feature 1..22: note = chemically synthesized
  source 1..22: mol_type = other DNA
aggaatgggccagatgatttaa

SEQ ID NO: 118385 - DNA, 22 bp, synthetic construct
  misc_feature 1..22: note = chemically synthesized
  source 1..22: mol_type = other DNA
aaagcagatactgtcattagca

SEQ ID NO: 118386 - DNA, 22 bp, synthetic construct
  misc_feature 1..22: note = chemically synthesized
  source 1..22: mol_type = other DNA
aagcagatactgtcattagcag

SEQ ID NO: 118387 - DNA, 22 bp, synthetic construct
  misc_feature 1..22: note = chemically synthesized
  source 1..22: mol_type = other DNA
tcattagcaggaatatgtacag

SEQ ID NO: 118388 - DNA, 22 bp, synthetic construct
  misc_feature 1..22: note = chemically synthesized
  source 1..22: mol_type = other DNA
gcaggaatatgtacagctttgg

SEQ ID NO: 118389 - DNA, 22 bp, synthetic construct
  misc_feature 1..22: note = chemically synthesized
  source 1..22: mol_type = other DNA
tggctgattttatgtttttttt

SEQ ID NO: 118390 - DNA, 22 bp, synthetic construct
  misc_feature 1..22: note = chemically synthesized
  source 1..22: mol_type = other DNA
ggctgattttatgttttttttg

SEQ ID NO: 118391 - DNA, 22 bp, synthetic construct
  misc_feature 1..22: note = chemically synthesized
  source 1..22: mol_type = other DNA
gctgattttatgttttttttgg

SEQ ID NO: 118392 - DNA, 22 bp, synthetic construct
  misc_feature 1..22: note = chemically synthesized
  source 1..22: mol_type = other DNA
attttatgttttttttggtttg

SEQ ID NO: 118393 - DNA, 22 bp, synthetic construct
  misc_feature 1..22: note = chemically synthesized
  source 1..22: mol_type = other DNA
tatgttttttttggtttgttgt

SEQ ID NO: 118394 - DNA, 22 bp, synthetic construct
  misc_feature 1..22: note = chemically synthesized
  source 1..22: mol_type = other DNA
atgttttttttggtttgttgtt

SEQ ID NO: 118395 - DNA, 22 bp, synthetic construct
  misc_feature 1..22: note = chemically synthesized
  source 1..22: mol_type = other DNA
tgttttttttggtttgttgttg

SEQ ID NO: 118396 - DNA, 22 bp, synthetic construct
  misc_feature 1..22: note = chemically synthesized
  source 1..22: mol_type = other DNA
tttttggtttgttgttgttgtt

SEQ ID NO: 118397 - DNA, 22 bp, synthetic construct
  misc_feature 1..22: note = chemically synthesized
  source 1..22: mol_type = other DNA
ttttggtttgttgttgttgttg

SEQ ID NO: 118398 - DNA, 22 bp, synthetic construct
  misc_feature 1..22: note = chemically synthesized
  source 1..22: mol_type = other DNA
tttggtttgttgttgttgttga

SEQ ID NO: 118399 - DNA, 22 bp, synthetic construct
  misc_feature 1..22: note = chemically synthesized
  source 1..22: mol_type = other DNA
ttggtttgttgttgttgttgaa

SEQ ID NO: 118400 - DNA, 22 bp, synthetic construct
  misc_feature 1..22: note = chemically synthesized
  source 1..22: mol_type = other DNA
tggtttgttgttgttgttgaat

SEQ ID NO: 118401 - DNA, 22 bp, synthetic construct
  misc_feature 1..22: note = chemically synthesized
  source 1..22: mol_type = other DNA
ggtttgttgttgttgttgaatc

SEQ ID NO: 118402 - DNA, 22 bp, synthetic construct
  misc_feature 1..22: note = chemically synthesized
  source 1..22: mol_type = other DNA
gtttgttgttgttgttgaatca

SEQ ID NO: 118403 - DNA, 22 bp, synthetic construct
  misc_feature 1..22: note = chemically synthesized
  source 1..22: mol_type = other DNA
gttgttgttgttgaatcagtgg

SEQ ID NO: 118404 - DNA, 22 bp, synthetic construct
  misc_feature 1..22: note = chemically synthesized
  source 1..22: mol_type = other DNA
ttgttgttgttgaatcagtgga

SEQ ID NO: 118405 - DNA, 22 bp, synthetic construct
  misc_feature 1..22: note = chemically synthesized
  source 1..22: mol_type = other DNA
ttgttgttgaatcagtggagca

SEQ ID NO: 118406 - DNA, 22 bp, synthetic construct
  misc_feature 1..22: note = chemically synthesized
  source 1..22: mol_type = other DNA
ttgttgaatcagtggagcatag

SEQ ID NO: 118407 - DNA, 22 bp, synthetic construct
  misc_feature 1..22: note = chemically synthesized
  source 1..22: mol_type = other DNA
ttgaatcagtggagcatagtta

SEQ ID NO: 118408 - DNA, 22 bp, synthetic construct
  misc_feature 1..22: note = chemically synthesized
  source 1..22: mol_type = other DNA
aatcagtggagcatagttaaaa

SEQ ID NO: 118409 - DNA, 22 bp, synthetic construct
  misc_feature 1..22: note = chemically synthesized
  source 1..22: mol_type = other DNA
aaactacaagcaccacagtcag

SEQ ID NO: 118410 - DNA, 22 bp, synthetic construct
  misc_feature 1..22: note = chemically synthesized
  source 1..22: mol_type = other DNA
caagcaccacagtcagaactgt

SEQ ID NO: 118411 - DNA, 22 bp, synthetic construct
  misc_feature 1..22: note = chemically synthesized
  source 1..22: mol_type = other DNA
tcaaacttggtataatattggg

SEQ ID NO: 118412 - DNA, 22 bp, synthetic construct
  misc_feature 1..22: note = chemically synthesized
  source 1..22: mol_type = other DNA
ggtataatattgggcaagatat

SEQ ID NO: 118413 - DNA, 22 bp, synthetic construct
  misc_feature 1..22: note = chemically synthesized
  source 1..22: mol_type = other DNA
gtataatattgggcaagatatt

SEQ ID NO: 118414 - DNA, 22 bp, synthetic construct
  misc_feature 1..22: note = chemically synthesized
  source 1..22: mol_type = other DNA
ggcaagatattttgtctctgag

SEQ ID NO: 118415 - DNA, 22 bp, synthetic construct
  misc_feature 1..22: note = chemically synthesized
  source 1..22: mol_type = other DNA
tgtctctgagcctcagtgtact

SEQ ID NO: 118416 - DNA, 22 bp, synthetic construct
  misc_feature 1..22: note = chemically synthesized
  source 1..22: mol_type = other DNA
gtctctgagcctcagtgtactt

SEQ ID NO: 118417 - DNA, 22 bp, synthetic construct
  misc_feature 1..22: note = chemically synthesized
  source 1..22: mol_type = other DNA
tctctgagcctcagtgtactta

SEQ ID NO: 118418 - DNA, 22 bp, synthetic construct
  misc_feature 1..22: note = chemically synthesized
  source 1..22: mol_type = other DNA
tgagcctcagtgtacttatctg

SEQ ID NO: 118419 - DNA, 22 bp, synthetic construct
  misc_feature 1..22: note = chemically synthesized
  source 1..22: mol_type = other DNA
agcctcagtgtacttatctgta

SEQ ID NO: 118420 - DNA, 22 bp, synthetic construct
  misc_feature 1..22: note = chemically synthesized
  source 1..22: mol_type = other DNA
agtgtacttatctgtaaaatgg

SEQ ID NO: 118421 - DNA, 22 bp, synthetic construct
  misc_feature 1..22: note = chemically synthesized
  source 1..22: mol_type = other DNA
atctgtaaaatgggtaatctag

SEQ ID NO: 118422 - DNA, 22 bp, synthetic construct
  misc_feature 1..22: note = chemically synthesized
  source 1..22: mol_type = other DNA
tctgtaaaatgggtaatctagt

SEQ ID NO: 118423 - DNA, 22 bp, synthetic construct
  misc_feature 1..22: note = chemically synthesized
  source 1..22: mol_type = other DNA
taaaatgggtaatctagtagta

SEQ ID NO: 118424 - DNA, 22 bp, synthetic construct
  misc_feature 1..22: note = chemically synthesized
  source 1..22: mol_type = other DNA
gtagtatccatctcataaggtt

SEQ ID NO: 118425 - DNA, 22 bp, synthetic construct
  misc_feature 1..22: note = chemically synthesized
  source 1..22: mol_type = other DNA
ataaggttattgtcaagataaa

SEQ ID NO: 118426 - DNA, 22 bp, synthetic construct
  misc_feature 1..22: note = chemically synthesized
  source 1..22: mol_type = other DNA
ttgtcaagataaagtgacttat

SEQ ID NO: 118427 - DNA, 22 bp, synthetic construct
  misc_feature 1..22: note = chemically synthesized
  source 1..22: mol_type = other DNA
tcaagataaagtgacttatagt

SEQ ID NO: 118428 - DNA, 22 bp, synthetic construct
  misc_feature 1..22: note = chemically synthesized
  source 1..22: mol_type = other DNA
atagtgtattatgcccttagaa

SEQ ID NO: 118429 - DNA, 22 bp, synthetic construct
  misc_feature 1..22: note = chemically synthesized
  source 1..22: mol_type = other DNA
tagtgtattatgcccttagaat

SEQ ID NO: 118430 - DNA, 22 bp, synthetic construct
  misc_feature 1..22: note = chemically synthesized
  source 1..22: mol_type = other DNA
tgcccttagaataatacctagg

SEQ ID NO: 118431 - DNA, 22 bp, synthetic construct
  misc_feature 1..22: note = chemically synthesized
  source 1..22: mol_type = other DNA
agaataatacctaggttataat

SEQ ID NO: 118432 - DNA, 22 bp, synthetic construct
  misc_feature 1..22: note = chemically synthesized
  source 1..22: mol_type = other DNA
gaataatacctaggttataata

SEQ ID NO: 118433 - DNA, 22 bp, synthetic construct
  misc_feature 1..22: note = chemically synthesized
  source 1..22: mol_type = other DNA
ggttataatatgtgcttaaaaa

SEQ ID NO: 118434 - DNA, 22 bp, synthetic construct
  misc_feature 1..22: note = chemically synthesized
  source 1..22: mol_type = other DNA
taatatgtgcttaaaaaaccat

SEQ ID NO: 118435 - DNA, 22 bp, synthetic construct
  misc_feature 1..22: note = chemically synthesized
  source 1..22: mol_type = other DNA
aaaaaaccatgatatgcaaaat

SEQ ID NO: 118436 - DNA, 22 bp, synthetic construct
  misc_feature 1..22: note = chemically synthesized
  source 1..22: mol_type = other DNA
aaaaaccatgatatgcaaaata

SEQ ID NO: 118437 - DNA, 22 bp, synthetic construct
  misc_feature 1..22: note = chemically synthesized
  source 1..22: mol_type = other DNA
agtaccttctactgagtttttc

SEQ ID NO: 118438 - DNA, 22 bp, synthetic construct
  misc_feature 1..22: note = chemically synthesized
  source 1..22: mol_type = other DNA
ctactgagtttttctgtgaatc

SEQ ID NO: 118439 - DNA, 22 bp, synthetic construct
  misc_feature 1..22: note = chemically synthesized
  source 1..22: mol_type = other DNA
tactgagtttttctgtgaatct

SEQ ID NO: 118440 - DNA, 22 bp, synthetic construct
  misc_feature 1..22: note = chemically synthesized
  source 1..22: mol_type = other DNA
ctgagtttttctgtgaatctat

SEQ ID NO: 118441 - DNA, 22 bp, synthetic construct
  misc_feature 1..22: note = chemically synthesized
  source 1..22: mol_type = other DNA
agtttttctgtgaatctataac

SEQ ID NO: 118442 - DNA, 22 bp, synthetic construct
  misc_feature 1..22: note = chemically synthesized
  source 1..22: mol_type = other DNA
ttctgtgaatctataactctta

SEQ ID NO: 118443 - DNA, 22 bp, synthetic construct
  misc_feature 1..22: note = chemically synthesized
  source 1..22: mol_type = other DNA
tctgtgaatctataactcttaa

SEQ ID NO: 118444 - DNA, 22 bp, synthetic construct
  misc_feature 1..22: note = chemically synthesized
  source 1..22: mol_type = other DNA
ctgtgaatctataactcttaaa

SEQ ID NO: 118445 - DNA, 22 bp, synthetic construct
  misc_feature 1..22: note = chemically synthesized
  source 1..22: mol_type = other DNA
tgtgaatctataactcttaaaa

SEQ ID NO: 118446 - DNA, 22 bp, synthetic construct
  misc_feature 1..22: note = chemically synthesized
  source 1..22: mol_type = other DNA
tgaatctataactcttaaaatc

SEQ ID NO: 118447 - DNA, 22 bp, synthetic construct
  misc_feature 1..22: note = chemically synthesized
  source 1..22: mol_type = other DNA
taactcttaaaatcaagtctat

SEQ ID NO: 118448 - DNA, 22 bp, synthetic construct
  misc_feature 1..22: note = chemically synthesized
  source 1..22: mol_type = other DNA
ttaaaatcaagtctattaaaaa

SEQ ID NO: 118449 - DNA, 22 bp, synthetic construct
  misc_feature 1..22: note = chemically synthesized
  source 1..22: mol_type = other DNA
aaaatcaagtctattaaaaagt

SEQ ID NO: 118450 - DNA, 22 bp, synthetic construct
  misc_feature 1..22: note = chemically synthesized
  source 1..22: mol_type = other DNA
aaatcaagtctattaaaaagta

SEQ ID NO: 118451 - DNA, 22 bp, synthetic construct
  misc_feature 1..22: note = chemically synthesized
  source 1..22: mol_type = other DNA
ttaaaaagtatttaatacaata

SEQ ID NO: 118452 - DNA, 22 bp, synthetic construct
  misc_feature 1..22: note = chemically synthesized
  source 1..22: mol_type = other DNA
aaaagtatttaatacaataatt

SEQ ID NO: 118453 - DNA, 22 bp, synthetic construct
  misc_feature 1..22: note = chemically synthesized
  source 1..22: mol_type = other DNA
aatacaataattttatgttact

SEQ ID NO: 118454 - DNA, 22 bp, synthetic construct
  misc_feature 1..22: note = chemically synthesized
  source 1..22: mol_type = other DNA
atacaataattttatgttactg

SEQ ID NO: 118455 - DNA, 22 bp, synthetic construct
  misc_feature 1..22: note = chemically synthesized
  source 1..22: mol_type = other DNA
tatgttactgttttctgttgct

SEQ ID NO: 118456 - DNA, 22 bp, synthetic construct
  misc_feature 1..22: note = chemically synthesized
  source 1..22: mol_type = other DNA
atgttactgttttctgttgcta

SEQ ID NO: 118457 - DNA, 22 bp, synthetic construct
  misc_feature 1..22: note = chemically synthesized
  source 1..22: mol_type = other DNA
tgttactgttttctgttgctat

SEQ ID NO: 118458 - DNA, 22 bp, synthetic construct
  misc_feature 1..22: note = chemically synthesized
  source 1..22: mol_type = other DNA
ctgttttctgttgctatctttt

SEQ ID NO: 118459 - DNA, 22 bp, synthetic construct
  misc_feature 1..22: note = chemically synthesized
  source 1..22: mol_type = other DNA
ttttctgttgctatcttttcct

SEQ ID NO: 118460 - DNA, 22 bp, synthetic construct
  misc_feature 1..22: note = chemically synthesized
  source 1..22: mol_type = other DNA
tctgttgctatcttttcctgat

SEQ ID NO: 118461 - DNA, 22 bp, synthetic construct
  misc_feature 1..22: note = chemically synthesized
  source 1..22: mol_type = other DNA
ctgttgctatcttttcctgata

SEQ ID NO: 118462 - DNA, 22 bp, synthetic construct
  misc_feature 1..22: note = chemically synthesized
  source 1..22: mol_type = other DNA
tgttgctatcttttcctgatac

SEQ ID NO: 118463 - DNA, 22 bp, synthetic construct
  misc_feature 1..22: note = chemically synthesized
  source 1..22: mol_type = other DNA
ttgctatcttttcctgatacta

SEQ ID NO: 118464 - DNA, 22 bp, synthetic construct
  misc_feature 1..22: note = chemically synthesized
  source 1..22: mol_type = other DNA
ctatcttttcctgatactaaat

SEQ ID NO: 118465 - DNA, 22 bp, synthetic construct
  misc_feature 1..22: note = chemically synthesized
  source 1..22: mol_type = other DNA
tcttttcctgatactaaatgga

SEQ ID NO: 118466 - DNA, 22 bp, synthetic construct
  misc_feature 1..22: note = chemically synthesized
  source 1..22: mol_type = other DNA
ttcctgatactaaatggaaaaa

SEQ ID NO: 118467 - DNA, 22 bp, synthetic construct
  misc_feature 1..22: note = chemically synthesized
  source 1..22: mol_type = other DNA
tcctgatactaaatggaaaaat

SEQ ID NO: 118468 - DNA, 22 bp, synthetic construct
  misc_feature 1..22: note = chemically synthesized
  source 1..22: mol_type = other DNA
cctgatactaaatggaaaaata

SEQ ID NO: 118469 - DNA, 22 bp, synthetic construct
  misc_feature 1..22: note = chemically synthesized
  source 1..22: mol_type = other DNA
ctgatactaaatggaaaaatag

SEQ ID NO: 118470 - DNA, 22 bp, synthetic construct
  misc_feature 1..22: note = chemically synthesized
  source 1..22: mol_type = other DNA
atactaaatggaaaaatagata

SEQ ID NO: 118471 - DNA, 22 bp, synthetic construct
  misc_feature 1..22: note = chemically synthesized
  source 1..22: mol_type = other DNA
aatggaaaaatagataacatat

SEQ ID NO: 118472 - DNA, 22 bp, synthetic construct
  misc_feature 1..22: note = chemically synthesized
  source 1..22: mol_type = other DNA
taggaaagggaacaaaaagtta

SEQ ID NO: 118473 - DNA, 22 bp, synthetic construct
  misc_feature 1..22: note = chemically synthesized
  source 1..22: mol_type = other DNA
ggaaagggaacaaaaagttagg

SEQ ID NO: 118474 - DNA, 22 bp, synthetic construct
  misc_feature 1..22: note = chemically synthesized
  source 1..22: mol_type = other DNA
gggagaagccaatgatgggact

SEQ ID NO: 118475 - DNA, 22 bp, synthetic construct
  misc_feature 1..22: note = chemically synthesized
  source 1..22: mol_type = other DNA
ccttcagtataacatggaaaac

SEQ ID NO: 118476 - DNA, 22 bp, synthetic construct
  misc_feature 1..22: note = chemically synthesized
  source 1..22: mol_type = other DNA
cttcagtataacatggaaaaca

SEQ ID NO: 118477 - DNA, 22 bp, synthetic construct
  misc_feature 1..22: note = chemically synthesized
  source 1..22: mol_type = other DNA
cagtataacatggaaaacatgg

SEQ ID NO: 118478 - DNA, 22 bp, synthetic construct
  misc_feature 1..22: note = chemically synthesized
  source 1..22: mol_type = other DNA
agtataacatggaaaacatggc

SEQ ID NO: 118479 - DNA, 22 bp, synthetic construct
  misc_feature 1..22: note = chemically synthesized
  source 1..22: mol_type = other DNA
aaacgagtggtcctgtttggag

SEQ ID NO: 118480 - DNA, 22 bp, synthetic construct
  misc_feature 1..22: note = chemically synthesized
  source 1..22: mol_type = other DNA
tttggagaggagtccagcataa

SEQ ID NO: 118481 - DNA, 22 bp, synthetic construct
  misc_feature 1..22: note = chemically synthesized
  source 1..22: mol_type = other DNA
ggagaggagtccagcataatgg

SEQ ID NO: 118482 - DNA, 22 bp, synthetic construct
  misc_feature 1..22: note = chemically synthesized
  source 1..22: mol_type = other DNA
gagaggagtccagcataatggt

SEQ ID NO: 118483 - DNA, 22 bp, synthetic construct
  misc_feature 1..22: note = chemically synthesized
  source 1..22: mol_type = other DNA
aagaaaatcagatgcgcttgat

SEQ ID NO: 118484 - DNA, 22 bp, synthetic construct
  misc_feature 1..22: note = chemically synthesized
  source 1..22: mol_type = other DNA
agaaaatcagatgcgcttgata

SEQ ID NO: 118485 - DNA, 22 bp, synthetic construct
  misc_feature 1..22: note = chemically synthesized
  source 1..22: mol_type = other DNA
gatattgaatttcagttctgac

SEQ ID NO: 118486 - DNA, 22 bp, synthetic construct
  misc_feature 1..22: note = chemically synthesized
  source 1..22: mol_type = other DNA
atattgaatttcagttctgact

SEQ ID NO: 118487 - DNA, 22 bp, synthetic construct
  misc_feature 1..22: note = chemically synthesized
  source 1..22: mol_type = other DNA
aatttcagttctgacttacatt

SEQ ID NO: 118488 - DNA, 22 bp, synthetic construct
  misc_feature 1..22: note = chemically synthesized
  source 1..22: mol_type = other DNA
cagttctgacttacattaatga

SEQ ID NO: 118489 - DNA, 22 bp, synthetic construct
  misc_feature 1..22: note = chemically synthesized
  source 1..22: mol_type = other DNA
agttctgacttacattaatgat

SEQ ID NO: 118490 - DNA, 22 bp, synthetic construct
  misc_feature 1..22: note = chemically synthesized
  source 1..22: mol_type = other DNA
tgacttacattaatgatttaac

SEQ ID NO: 118491 - DNA, 22 bp, synthetic construct
  misc_feature 1..22: note = chemically synthesized
  source 1..22: mol_type = other DNA
acttacattaatgatttaacta

SEQ ID NO: 118492 - DNA, 22 bp, synthetic construct
  misc_feature 1..22: note = chemically synthesized
  source 1..22: mol_type = other DNA
acattaatgatttaactaagga

SEQ ID NO: 118493 - DNA, 22 bp, synthetic construct
  misc_feature 1..22: note = chemically synthesized
  source 1..22: mol_type = other DNA
cattaatgatttaactaaggaa

SEQ ID NO: 118494 - DNA, 22 bp, synthetic construct
  misc_feature 1..22: note = chemically synthesized
  source 1..22: mol_type = other DNA
atgatttaactaaggaaagttg

SEQ ID NO: 118495 - DNA, 22 bp, synthetic construct
  misc_feature 1..22: note = chemically synthesized
  source 1..22: mol_type = other DNA
aactaaggaaagttgctttcct

SEQ ID NO: 118496 - DNA, 22 bp, synthetic construct
  misc_feature 1..22: note = chemically synthesized
  source 1..22: mol_type = other DNA
actaaggaaagttgctttcctc

SEQ ID NO: 118497 - DNA, 22 bp, synthetic construct
  misc_feature 1..22: note = chemically synthesized
  source 1..22: mol_type = other DNA
aggaaagttgctttcctctgtg

SEQ ID NO: 118498 - DNA, 22 bp, synthetic construct
  misc_feature 1..22: note = chemically synthesized
  source 1..22: mol_type = other DNA
ctttcctctgtgagcctcagtt

SEQ ID NO: 118499 - DNA, 22 bp, synthetic construct
  misc_feature 1..22: note = chemically synthesized
  source 1..22: mol_type = other DNA
tcctctgtgagcctcagtttcc

SEQ ID NO: 118500 - DNA, 22 bp, synthetic construct
  misc_feature 1..22: note = chemically synthesized
  source 1..22: mol_type = other DNA
cctctgtgagcctcagtttcct

SEQ ID NO: 118501 - DNA, 22 bp, synthetic construct
  misc_feature 1..22: note = chemically synthesized
  source 1..22: mol_type = other DNA
ctctgtgagcctcagtttccta

SEQ ID NO: 118502 - DNA, 22 bp, synthetic construct
  misc_feature 1..22: note = chemically synthesized
  source 1..22: mol_type = other DNA
tgtgagcctcagtttcctaatt

SEQ ID NO: 118503 - DNA, 22 bp, synthetic construct
  misc_feature 1..22: note = chemically synthesized
  source 1..22: mol_type = other DNA
tgagcctcagtttcctaatttt

SEQ ID NO: 118504 - DNA, 22 bp, synthetic construct
  misc_feature 1..22: note = chemically synthesized
  source 1..22: mol_type = other DNA
agtttcctaattttaaaacatt

SEQ ID NO: 118505 - DNA, 22 bp, synthetic construct
  misc_feature 1..22: note = chemically synthesized
  source 1..22: mol_type = other DNA
cctaattttaaaacattgaaaa

SEQ ID NO: 118506 - DNA, 22 bp, synthetic construct
  misc_feature 1..22: note = chemically synthesized
  source 1..22: mol_type = other DNA
ctaattttaaaacattgaaaat

SEQ ID NO: 118507 - DNA, 22 bp, synthetic construct
  misc_feature 1..22: note = chemically synthesized
  source 1..22: mol_type = other DNA
attttaaaacattgaaaataat

SEQ ID NO: 118508 - DNA, 22 bp, synthetic construct
  misc_feature 1..22: note = chemically synthesized
  source 1..22: mol_type = other DNA
taaaacattgaaaataataata

SEQ ID NO: 118509 - DNA, 22 bp, synthetic construct
  misc_feature 1..22: note = chemically synthesized
  source 1..22: mol_type = other DNA
aaaacattgaaaataataatac

SEQ ID NO: 118510 - DNA, 22 bp, synthetic construct
  misc_feature 1..22: note = chemically synthesized
  source 1..22: mol_type = other DNA
aaacattgaaaataataatacc

SEQ ID NO: 118511 - DNA, 22 bp, synthetic construct
  misc_feature 1..22: note = chemically synthesized
  source 1..22: mol_type = other DNA
aaaataataatacctccctact

SEQ ID NO: 118512 - DNA, 22 bp, synthetic construct
  misc_feature 1..22: note = chemically synthesized
  source 1..22: mol_type = other DNA
cctacttcacaggtttggtgag

SEQ ID NO: 118513 - DNA, 22 bp, synthetic construct
  misc_feature 1..22: note = chemically synthesized
  source 1..22: mol_type = other DNA
cttcacaggtttggtgagaaaa

SEQ ID NO: 118514 - DNA, 22 bp, synthetic construct
  misc_feature 1..22: note = chemically synthesized
  source 1..22: mol_type = other DNA
cacaggtttggtgagaaaatta

SEQ ID NO: 118515 - DNA, 22 bp, synthetic construct
  misc_feature 1..22: note = chemically synthesized
  source 1..22: mol_type = other DNA
acaggtttggtgagaaaattaa

SEQ ID NO: 118516 - DNA, 22 bp, synthetic construct
  misc_feature 1..22: note = chemically synthesized
  source 1..22: mol_type = other DNA
ggtgagaaaattaaatgaaata

SEQ ID NO: 118517 - DNA, 22 bp, synthetic construct
  misc_feature 1..22: note = chemically synthesized
  source 1..22: mol_type = other DNA
gtgagaaaattaaatgaaataa

SEQ ID NO: 118518 - DNA, 22 bp, synthetic construct
  misc_feature 1..22: note = chemically synthesized
  source 1..22: mol_type = other DNA
aatgaaataatgtaaaataatg

SEQ ID NO: 118519 - DNA, 22 bp, synthetic construct
  misc_feature 1..22: note = chemically synthesized
  source 1..22: mol_type = other DNA
agccctctctaccgtgagttaa

SEQ ID NO: 118520 - DNA, 22 bp, synthetic construct
  misc_feature 1..22: note = chemically synthesized
  source 1..22: mol_type = other DNA
tctaccgtgagttaaatgctta

SEQ ID NO: 118521 - DNA, 22 bp, synthetic construct
  misc_feature 1..22: note = chemically synthesized
  source 1..22: mol_type = other DNA
taccgtgagttaaatgcttaat

SEQ ID NO: 118522 - DNA, 22 bp, synthetic construct
  misc_feature 1..22: note = chemically synthesized
  source 1..22: mol_type = other DNA
ccgtgagttaaatgcttaataa

SEQ ID NO: 118523 - DNA, 22 bp, synthetic construct
  misc_feature 1..22: note = chemically synthesized
  source 1..22: mol_type = other DNA
aatgcttaataaacattagcat

SEQ ID NO: 118524 - DNA, 22 bp, synthetic construct
  misc_feature 1..22: note = chemically synthesized
  source 1..22: mol_type = other DNA
aataaacattagcatttatcat

SEQ ID NO: 118525 - DNA, 22 bp, synthetic construct
  misc_feature 1..22: note = chemically synthesized
  source 1..22: mol_type = other DNA
ataaacattagcatttatcatg

SEQ ID NO: 118526 - DNA, 22 bp, synthetic construct
  misc_feature 1..22: note = chemically synthesized
  source 1..22: mol_type = other DNA
gcatttatcatgatcataatta

SEQ ID NO: 118527 - DNA, 22 bp, synthetic construct
  misc_feature 1..22: note = chemically synthesized
  source 1..22: mol_type = other DNA
atcatgatcataattatcatct

SEQ ID NO: 118528 - DNA, 22 bp, synthetic construct
  misc_feature 1..22: note = chemically synthesized
  source 1..22: mol_type = other DNA
tcatgatcataattatcatctt

SEQ ID NO: 118529 - DNA, 22 bp, synthetic construct
  misc_feature 1..22: note = chemically synthesized
  source 1..22: mol_type = other DNA
tcatcttcattgtcatcttcag

SEQ ID NO: 118530 - DNA, 22 bp, synthetic construct
  misc_feature 1..22: note = chemically synthesized
  source 1..22: mol_type = other DNA
cattgtcatcttcagcataatc

SEQ ID NO: 118531 - DNA, 22 bp, synthetic construct
  misc_feature 1..22: note = chemically synthesized
  source 1..22: mol_type = other DNA
attgtcatcttcagcataatcg

SEQ ID NO: 118532 - DNA, 22 bp, synthetic construct
  misc_feature 1..22: note = chemically synthesized
  source 1..22: mol_type = other DNA
tcatcttcagcataatcgtata

SEQ ID NO: 118533 - DNA, 22 bp, synthetic construct
  misc_feature 1..22: note = chemically synthesized
  source 1..22: mol_type = other DNA
cagcataatcgtatataacttt

SEQ ID NO: 118534 - DNA, 22 bp, synthetic construct
  misc_feature 1..22: note = chemically synthesized
  source 1..22: mol_type = other DNA
agcataatcgtatataactttt

SEQ ID NO: 118535 - DNA, 22 bp, synthetic construct
  misc_feature 1..22: note = chemically synthesized
  source 1..22: mol_type = other DNA
tttatagtcattgtaaaatgct

SEQ ID NO: 118536 - DNA, 22 bp, synthetic construct
  misc_feature 1..22: note = chemically synthesized
  source 1..22: mol_type = other DNA
ttatagtcattgtaaaatgctc

SEQ ID NO: 118537 - DNA, 22 bp, synthetic construct
  misc_feature 1..22: note = chemically synthesized
  source 1..22: mol_type = other DNA
tatagtcattgtaaaatgctct

SEQ ID NO: 118538 - DNA, 22 bp, synthetic construct
  misc_feature 1..22: note = chemically synthesized
  source 1..22: mol_type = other DNA
atagtcattgtaaaatgctctt

SEQ ID NO: 118539 - DNA, 22 bp, synthetic construct
  misc_feature 1..22: note = chemically synthesized
  source 1..22: mol_type = other DNA
tagtcattgtaaaatgctcttt

SEQ ID NO: 118540 - DNA, 22 bp, synthetic construct
  misc_feature 1..22: note = chemically synthesized
  source 1..22: mol_type = other DNA
taaaatgctctttttagattat

SEQ ID NO: 118541 - DNA, 22 bp, synthetic construct
  misc_feature 1..22: note = chemically synthesized
  source 1..22: mol_type = other DNA
tttttagattataaaaccgaaa

SEQ ID NO: 118542 - DNA, 22 bp, synthetic construct
  misc_feature 1..22: note = chemically synthesized
  source 1..22: mol_type = other DNA
tttagattataaaaccgaaatg

SEQ ID NO: 118543 - DNA, 22 bp, synthetic construct
  misc_feature 1..22: note = chemically synthesized
  source 1..22: mol_type = other DNA
ttagattataaaaccgaaatgt

SEQ ID NO: 118544 - DNA, 22 bp, synthetic construct
  misc_feature 1..22: note = chemically synthesized
  source 1..22: mol_type = other DNA
tagattataaaaccgaaatgtc

SEQ ID NO: 118545 - DNA, 22 bp, synthetic construct
  misc_feature 1..22: note = chemically synthesized
  source 1..22: mol_type = other DNA
agattataaaaccgaaatgtct

SEQ ID NO: 118546 - DNA, 22 bp, synthetic construct
  misc_feature 1..22: note = chemically synthesized
  source 1..22: mol_type = other DNA
gattataaaaccgaaatgtctt

SEQ ID NO: 118547 - DNA, 22 bp, synthetic construct
  misc_feature 1..22: note = chemically synthesized
  source 1..22: mol_type = other DNA
taaaaccgaaatgtcttcttca

SEQ ID NO: 118548 - DNA, 22 bp, synthetic construct
  misc_feature 1..22: note = chemically synthesized
  source 1..22: mol_type = other DNA
cttcagaaaatttgtatacggc

SEQ ID NO: 118549 - DNA, 22 bp, synthetic construct
  misc_feature 1..22: note = chemically synthesized
  source 1..22: mol_type = other DNA
ttcagaaaatttgtatacggca

SEQ ID NO: 118550 - DNA, 22 bp, synthetic construct
  misc_feature 1..22: note = chemically synthesized
  source 1..22: mol_type = other DNA
cagaaaatttgtatacggcaaa

SEQ ID NO: 118551 - DNA, 22 bp, synthetic construct
  misc_feature 1..22: note = chemically synthesized
  source 1..22: mol_type = other DNA
agaaaatttgtatacggcaaag

SEQ ID NO: 118552 - DNA, 22 bp, synthetic construct
  misc_feature 1..22: note = chemically synthesized
  source 1..22: mol_type = other DNA
gtatacggcaaagatagagaaa

SEQ ID NO: 118553 - DNA, 22 bp, synthetic construct
  misc_feature 1..22: note = chemically synthesized
  source 1..22: mol_type = other DNA
tatacggcaaagatagagaaat

SEQ ID NO: 118554 - DNA, 22 bp, synthetic construct
  misc_feature 1..22: note = chemically synthesized
  source 1..22: mol_type = other DNA
tatagaaaataagattatatat

SEQ ID NO: 118555 - DNA, 22 bp, synthetic construct
  misc_feature 1..22: note = chemically synthesized
  source 1..22: mol_type = other DNA
tatataacagctgtttttcttt

SEQ ID NO: 118556 - DNA, 22 bp, synthetic construct
  misc_feature 1..22: note = chemically synthesized
  source 1..22: mol_type = other DNA
tttttcttttgatacaaatatt

SEQ ID NO: 118557 - DNA, 22 bp, synthetic construct
  misc_feature 1..22: note = chemically synthesized
  source 1..22: mol_type = other DNA
ttcttttgatacaaatatttat

SEQ ID NO: 118558 - DNA, 22 bp, synthetic construct
  misc_feature 1..22: note = chemically synthesized
  source 1..22: mol_type = other DNA
tcttttgatacaaatatttata

SEQ ID NO: 118559 - DNA, 22 bp, synthetic construct
  misc_feature 1..22: note = chemically synthesized
  source 1..22: mol_type = other DNA
cttttgatacaaatatttatag

SEQ ID NO: 118560 - DNA, 22 bp, synthetic construct
  misc_feature 1..22: note = chemically synthesized
  source 1..22: mol_type = other DNA
ttttgatacaaatatttatagc

SEQ ID NO: 118561 - DNA, 22 bp, synthetic construct
  misc_feature 1..22: note = chemically synthesized
  source 1..22: mol_type = other DNA
ttgatacaaatatttatagcct

SEQ ID NO: 118562 - DNA, 22 bp, synthetic construct
  misc_feature 1..22: note = chemically synthesized
  source 1..22: mol_type = other DNA
tgatacaaatatttatagcctt

SEQ ID NO: 118563 - DNA, 22 bp, synthetic construct
  misc_feature 1..22: note = chemically synthesized
  source 1..22: mol_type = other DNA
gatacaaatatttatagccttt

SEQ ID NO: 118564 - DNA, 22 bp, synthetic construct
  misc_feature 1..22: note = chemically synthesized
  source 1..22: mol_type = other DNA
atacaaatatttatagcctttt

SEQ ID NO: 118565 - DNA, 22 bp, synthetic construct
  misc_feature 1..22: note = chemically synthesized
  source 1..22: mol_type = other DNA
atagccttttacatagtgattg

SEQ ID NO: 118566 - DNA, 22 bp, synthetic construct
  misc_feature 1..22: note = chemically synthesized
  source 1..22: mol_type = other DNA
tagccttttacatagtgattgt

SEQ ID NO: 118567 - DNA, 22 bp, synthetic construct
  misc_feature 1..22: note = chemically synthesized
  source 1..22: mol_type = other DNA
ttacatagtgattgttctgtac

SEQ ID NO: 118568 - DNA, 22 bp, synthetic construct
  misc_feature 1..22: note = chemically synthesized
  source 1..22: mol_type = other DNA
tacatagtgattgttctgtacc

SEQ ID NO: 118569 - DNA, 22 bp, synthetic construct
  misc_feature 1..22: note = chemically synthesized
  source 1..22: mol_type = other DNA
acatagtgattgttctgtacct

SEQ ID NO: 118570 - DNA, 22 bp, synthetic construct
  misc_feature 1..22: note = chemically synthesized
  source 1..22: mol_type = other DNA
catagtgattgttctgtaccta

SEQ ID NO: 118571 - DNA, 22 bp, synthetic construct
  misc_feature 1..22: note = chemically synthesized
  source 1..22: mol_type = other DNA
ttctgtacctaattttgcttat

SEQ ID NO: 118572 - DNA, 22 bp, synthetic construct
  misc_feature 1..22: note = chemically synthesized
  source 1..22: mol_type = other DNA
tgtacctaattttgcttatttt

SEQ ID NO: 118573 - DNA, 22 bp, synthetic construct
  misc_feature 1..22: note = chemically synthesized
  source 1..22: mol_type = other DNA
tacctaattttgcttattttta

SEQ ID NO: 118574 - DNA, 22 bp, synthetic construct
  misc_feature 1..22: note = chemically synthesized
  source 1..22: mol_type = other DNA
attttgcttatttttatttaat

SEQ ID NO: 118575 - DNA, 22 bp, synthetic construct
  misc_feature 1..22: note = chemically synthesized
  source 1..22: mol_type = other DNA
tgcttatttttatttaatattt

SEQ ID NO: 118576 - DNA, 22 bp, synthetic construct
  misc_feature 1..22: note = chemically synthesized
  source 1..22: mol_type = other DNA
gcttatttttatttaatatttt

SEQ ID NO: 118577 - DNA, 22 bp, synthetic construct
  misc_feature 1..22: note = chemically synthesized
  source 1..22: mol_type = other DNA
cttatttttatttaatattttg

SEQ ID NO: 118578 - DNA, 22 bp, synthetic construct
  misc_feature 1..22: note = chemically synthesized
  source 1..22: mol_type = other DNA
atttttatttaatattttgcca

SEQ ID NO: 118579 - DNA, 22 bp, synthetic construct
  misc_feature 1..22: note = chemically synthesized
  source 1..22: mol_type = other DNA
tttttatttaatattttgccaa

SEQ ID NO: 118580 - DNA, 22 bp, synthetic construct
  misc_feature 1..22: note = chemically synthesized
  source 1..22: mol_type = other DNA
ttatttaatattttgccaacag

SEQ ID NO: 118581 - DNA, 22 bp, synthetic construct
  misc_feature 1..22: note = chemically synthesized
  source 1..22: mol_type = other DNA
tatttaatattttgccaacagt

SEQ ID NO: 118582 - DNA, 22 bp, synthetic construct
  misc_feature 1..22: note = chemically synthesized
  source 1..22: mol_type = other DNA
atttaatattttgccaacagtt

SEQ ID NO: 118583 - DNA, 22 bp, synthetic construct
  misc_feature 1..22: note = chemically synthesized
  source 1..22: mol_type = other DNA
tttaatattttgccaacagttt

SEQ ID NO: 118584 - DNA, 22 bp, synthetic construct
  misc_feature 1..22: note = chemically synthesized
  source 1..22: mol_type = other DNA
aatattttgccaacagtttcct

SEQ ID NO: 118585 - DNA, 22 bp, synthetic construct
  misc_feature 1..22: note = chemically synthesized
  source 1..22: mol_type = other DNA
atattttgccaacagtttccta

SEQ ID NO: 118586 - DNA, 22 bp, synthetic construct
  misc_feature 1..22: note = chemically synthesized
  source 1..22: mol_type = other DNA
tgccaacagtttcctaagcatt

SEQ ID NO: 118587 - DNA, 22 bp, synthetic construct
  misc_feature 1..22: note = chemically synthesized
  source 1..22: mol_type = other DNA
gccaacagtttcctaagcattt

SEQ ID NO: 118588 - DNA, 22 bp, synthetic construct
  misc_feature 1..22: note = chemically synthesized
  source 1..22: mol_type = other DNA
ccaacagtttcctaagcattta

SEQ ID NO: 118589 - DNA, 22 bp, synthetic construct
  misc_feature 1..22: note = chemically synthesized
  source 1..22: mol_type = other DNA
cctaagcatttaaatgtcattt

SEQ ID NO: 118590 - DNA, 22 bp, synthetic construct
  misc_feature 1..22: note = chemically synthesized
  source 1..22: mol_type = other DNA
ctaagcatttaaatgtcatttt

SEQ ID NO: 118591 - DNA, 22 bp, synthetic construct
  misc_feature 1..22: note = chemically synthesized
  source 1..22: mol_type = other DNA
agcatttaaatgtcattttaat

SEQ ID NO: 118592 - DNA, 22 bp, synthetic construct
  misc_feature 1..22: note = chemically synthesized
  source 1..22: mol_type = other DNA
aaatgtcattttaataatagtg

SEQ ID NO: 118593 - DNA, 22 bp, synthetic construct
  misc_feature 1..22: note = chemically synthesized
  source 1..22: mol_type = other DNA
aatgtcattttaataatagtgt

SEQ ID NO: 118594 - DNA, 22 bp, synthetic construct
  misc_feature 1..22: note = chemically synthesized
  source 1..22: mol_type = other DNA
taataatagtgtatcaaatgaa

SEQ ID NO: 118595 - DNA, 22 bp, synthetic construct
  misc_feature 1..22: note = chemically synthesized
  source 1..22: mol_type = other DNA
aataatagtgtatcaaatgaat

SEQ ID NO: 118596 - DNA, 22 bp, synthetic construct
  misc_feature 1..22: note = chemically synthesized
  source 1..22: mol_type = other DNA
ataatagtgtatcaaatgaata

SEQ ID NO: 118597 - DNA, 22 bp, synthetic construct
  misc_feature 1..22: note = chemically synthesized
  source 1..22: mol_type = other DNA
tgatttatgtaatatttttatt

SEQ ID NO: 118598 - DNA, 22 bp, synthetic construct
  misc_feature 1..22: note = chemically synthesized
  source 1..22: mol_type = other DNA
gatttatgtaatatttttattc

SEQ ID NO: 118599 - DNA, 22 bp, synthetic construct
  misc_feature 1..22: note = chemically synthesized
  source 1..22: mol_type = other DNA
atttatgtaatatttttattct

SEQ ID NO: 118600 - DNA, 22 bp, synthetic construct
  misc_feature 1..22: note = chemically synthesized
  source 1..22: mol_type = other DNA
atgtaatatttttattctagac

SEQ ID NO: 118601 - DNA, 22 bp, synthetic construct
  misc_feature 1..22: note = chemically synthesized
  source 1..22: mol_type = other DNA
tgtaatatttttattctagaca

SEQ ID NO: 118602 - DNA, 22 bp, synthetic construct
  misc_feature 1..22: note = chemically synthesized
  source 1..22: mol_type = other DNA
ttattctagacattttgtatgc

SEQ ID NO: 118603 - DNA, 22 bp, synthetic construct
  misc_feature 1..22: note = chemically synthesized
  source 1..22: mol_type = other DNA
tattctagacattttgtatgct

SEQ ID NO: 118604 - DNA, 22 bp, synthetic construct
  misc_feature 1..22: note = chemically synthesized
  source 1..22: mol_type = other DNA
attctagacattttgtatgctt

SEQ ID NO: 118605 - DNA, 22 bp, synthetic construct
  misc_feature 1..22: note = chemically synthesized
  source 1..22: mol_type = other DNA
ttctagacattttgtatgctta

SEQ ID NO: 118606 - DNA, 22 bp, synthetic construct
  misc_feature 1..22: note = chemically synthesized
  source 1..22: mol_type = other DNA
tagacattttgtatgcttacat

SEQ ID NO: 118607 - DNA, 22 bp, synthetic construct
  misc_feature 1..22: note = chemically synthesized
  source 1..22: mol_type = other DNA
gacattttgtatgcttacattc

SEQ ID NO: 118608 - DNA, 22 bp, synthetic construct
  misc_feature 1..22: note = chemically synthesized
  source 1..22: mol_type = other DNA
tgtatgcttacattcttaaaat

SEQ ID NO: 118609 - DNA, 22 bp, synthetic construct
  misc_feature 1..22: note = chemically synthesized
  source 1..22: mol_type = other DNA
gtatgcttacattcttaaaatt

SEQ ID NO: 118610 - DNA, 22 bp, synthetic construct
  misc_feature 1..22: note = chemically synthesized
  source 1..22: mol_type = other DNA
tatgcttacattcttaaaatta

SEQ ID NO: 118611 - DNA, 22 bp, synthetic construct
  misc_feature 1..22: note = chemically synthesized
  source 1..22: mol_type = other DNA
acattcttaaaattatgaacaa

SEQ ID NO: 118612 - DNA, 22 bp, synthetic construct
  misc_feature 1..22: note = chemically synthesized
  source 1..22: mol_type = other DNA
cattcttaaaattatgaacaat

SEQ ID NO: 118613 - DNA, 22 bp, synthetic construct
  misc_feature 1..22: note = chemically synthesized
  source 1..22: mol_type = other DNA
ttaaaattatgaacaataacac

SEQ ID NO: 118614 - DNA, 22 bp, synthetic construct
  misc_feature 1..22: note = chemically synthesized
  source 1..22: mol_type = other DNA
aaaattatgaacaataacacaa

SEQ ID NO: 118615 - DNA, 22 bp, synthetic construct
  misc_feature 1..22: note = chemically synthesized
  source 1..22: mol_type = other DNA
aaattatgaacaataacacaaa

SEQ ID NO: 118616 - DNA, 22 bp, synthetic construct
  misc_feature 1..22: note = chemically synthesized
  source 1..22: mol_type = other DNA
tgaacaataacacaaattataa

SEQ ID NO: 118617 - DNA, 22 bp, synthetic construct
  misc_feature 1..22: note = chemically synthesized
  source 1..22: mol_type = other DNA
taatattcacttattaaatagt

SEQ ID NO: 118618 - DNA, 22 bp, synthetic construct
  misc_feature 1..22: note = chemically synthesized
  source 1..22: mol_type = other DNA
acttattaaatagttcaacaca

SEQ ID NO: 118619 - DNA, 22 bp, synthetic construct
  misc_feature 1..22: note = chemically synthesized
  source 1..22: mol_type = other DNA
attaaatagttcaacacatatt

SEQ ID NO: 118620 - DNA, 22 bp, synthetic construct
  misc_feature 1..22: note = chemically synthesized
  source 1..22: mol_type = other DNA
ttaaatagttcaacacatattt

SEQ ID NO: 118621 - DNA, 22 bp, synthetic construct
  misc_feature 1..22: note = chemically synthesized
  source 1..22: mol_type = other DNA
aatagttcaacacatatttatt

SEQ ID NO: 118622 - DNA, 22 bp, synthetic construct
  misc_feature 1..22: note = chemically synthesized
  source 1..22: mol_type = other DNA
aacacatatttattgatcactg

SEQ ID NO: 118623 - DNA, 22 bp, synthetic construct
  misc_feature 1..22: note = chemically synthesized
  source 1..22: mol_type = other DNA
attgatcactgacctaggagat

SEQ ID NO: 118624 - DNA, 22 bp, synthetic construct
  misc_feature 1..22: note = chemically synthesized
  source 1..22: mol_type = other DNA
ttgatcactgacctaggagatg

SEQ ID NO: 118625 - DNA, 22 bp, synthetic construct
  misc_feature 1..22: note = chemically synthesized
  source 1..22: mol_type = other DNA
atcactgacctaggagatggat

SEQ ID NO: 118626 - DNA, 22 bp, synthetic construct
  misc_feature 1..22: note = chemically synthesized
  source 1..22: mol_type = other DNA
acctaggagatggatttagaac

SEQ ID NO: 118627 - DNA, 22 bp, synthetic construct
  misc_feature 1..22: note = chemically synthesized
  source 1..22: mol_type = other DNA
ggagatggatttagaactgtga

SEQ ID NO: 118628 - DNA, 22 bp, synthetic construct
  misc_feature 1..22: note = chemically synthesized
  source 1..22: mol_type = other DNA
agaactgtgagcaaacaggaaa

SEQ ID NO: 118629 - DNA, 22 bp, synthetic construct
  misc_feature 1..22: note = chemically synthesized
  source 1..22: mol_type = other DNA
gaactgtgagcaaacaggaaaa

SEQ ID NO: 118630 - DNA, 22 bp, synthetic construct
  misc_feature 1..22: note = chemically synthesized
  source 1..22: mol_type = other DNA
tgagcaaacaggaaaaaaattt

SEQ ID NO: 118631 - DNA, 22 bp, synthetic construct
  misc_feature 1..22: note = chemically synthesized
  source 1..22: mol_type = other DNA
tgccacaaacagcttacatcct

SEQ ID NO: 118632 - DNA, 22 bp, synthetic construct
  misc_feature 1..22: note = chemically synthesized
  source 1..22: mol_type = other DNA
gccacaaacagcttacatccta

SEQ ID NO: 118633 - DNA, 22 bp, synthetic construct
  misc_feature 1..22: note = chemically synthesized
  source 1..22: mol_type = other DNA
ccacaaacagcttacatcctaa

SEQ ID NO: 118634 - DNA, 22 bp, synthetic construct
  misc_feature 1..22: note = chemically synthesized
  source 1..22: mol_type = other DNA
acatcctaaatttttaatttat

SEQ ID NO: 118635 - DNA, 22 bp, synthetic construct
  misc_feature 1..22: note = chemically synthesized
  source 1..22: mol_type = other DNA
catcctaaatttttaatttatc

SEQ ID NO: 118636 - DNA, 22 bp, synthetic construct
  misc_feature 1..22: note = chemically synthesized
  source 1..22: mol_type = other DNA
aatttttaatttatcatttatt

SEQ ID NO: 118637 - DNA, 22 bp, synthetic construct
  misc_feature 1..22: note = chemically synthesized
  source 1..22: mol_type = other DNA
ttaatttatcatttatttagga

SEQ ID NO: 118638 - DNA, 22 bp, synthetic construct
  misc_feature 1..22: note = chemically synthesized
  source 1..22: mol_type = other DNA
taatttatcatttatttaggac

SEQ ID NO: 118639 - DNA, 22 bp, synthetic construct
  misc_feature 1..22: note = chemically synthesized
  source 1..22: mol_type = other DNA
aatttatcatttatttaggaca

SEQ ID NO: 118640 - DNA, 22 bp, synthetic construct
  misc_feature 1..22: note = chemically synthesized
  source 1..22: mol_type = other DNA
atttatcatttatttaggacag

SEQ ID NO: 118641 - DNA, 22 bp, synthetic construct
  misc_feature 1..22: note = chemically synthesized
  source 1..22: mol_type = other DNA
atcatttatttaggacagattt

SEQ ID NO: 118642 - DNA, 22 bp, synthetic construct
  misc_feature 1..22: note = chemically synthesized
  source 1..22: mol_type = other DNA
tcatttatttaggacagatttt

SEQ ID NO: 118643 - DNA, 22 bp, synthetic construct
  misc_feature 1..22: note = chemically synthesized
  source 1..22: mol_type = other DNA
atttaggacagatttttagaag

SEQ ID NO: 118644 - DNA, 22 bp, synthetic construct
  misc_feature 1..22: note = chemically synthesized
  source 1..22: mol_type = other DNA
tttaggacagatttttagaagt

SEQ ID NO: 118645 - DNA, 22 bp, synthetic construct
  misc_feature 1..22: note = chemically synthesized
  source 1..22: mol_type = other DNA
aggacagatttttagaagtggc

SEQ ID NO: 118646 - DNA, 22 bp, synthetic construct
  misc_feature 1..22: note = chemically synthesized
  source 1..22: mol_type = other DNA
ggacagatttttagaagtggca

SEQ ID NO: 118647 - DNA, 22 bp, synthetic construct
  misc_feature 1..22: note = chemically synthesized
  source 1..22: mol_type = other DNA
ttagaagtggcatttctgagac

SEQ ID NO: 118648 - DNA, 22 bp, synthetic construct
  misc_feature 1..22: note = chemically synthesized
  source 1..22: mol_type = other DNA
tagaagtggcatttctgagaca

SEQ ID NO: 118649 - DNA, 22 bp, synthetic construct
  misc_feature 1..22: note = chemically synthesized
  source 1..22: mol_type = other DNA
agaagtggcatttctgagacac

SEQ ID NO: 118650 - DNA, 22 bp, synthetic construct
  misc_feature 1..22: note = chemically synthesized
  source 1..22: mol_type = other DNA
gaagtggcatttctgagacaca

SEQ ID NO: 118651 - DNA, 22 bp, synthetic construct
  misc_feature 1..22: note = chemically synthesized
  source 1..22: mol_type = other DNA
ctgagacacagagcatgaatat

SEQ ID NO: 118652 - DNA, 22 bp, synthetic construct
  misc_feature 1..22: note = chemically synthesized
  source 1..22: mol_type = other DNA
tgagacacagagcatgaatatt

SEQ ID NO: 118653 - DNA, 22 bp, synthetic construct
  misc_feature 1..22: note = chemically synthesized
  source 1..22: mol_type = other DNA
agacacagagcatgaatatttt

SEQ ID NO: 118654 - DNA, 22 bp, synthetic construct
  misc_feature 1..22: note = chemically synthesized
  source 1..22: mol_type = other DNA
tcaagtcttttgatgtattttg

SEQ ID NO: 118655 - DNA, 22 bp, synthetic construct
  misc_feature 1..22: note = chemically synthesized
  source 1..22: mol_type = other DNA
caagtcttttgatgtattttgt

SEQ ID NO: 118656 - DNA, 22 bp, synthetic construct
  misc_feature 1..22: note = chemically synthesized
  source 1..22: mol_type = other DNA
aagtcttttgatgtattttgtt

SEQ ID NO: 118657 - DNA, 22 bp, synthetic construct
  misc_feature 1..22: note = chemically synthesized
  source 1..22: mol_type = other DNA
ttgatgtattttgttttttata

SEQ ID NO: 118658 - DNA, 22 bp, synthetic construct
  misc_feature 1..22: note = chemically synthesized
  source 1..22: mol_type = other DNA
tgatgtattttgttttttataa

SEQ ID NO: 118659 - DNA, 22 bp, synthetic construct
  misc_feature 1..22: note = chemically synthesized
  source 1..22: mol_type = other DNA
gatgtattttgttttttataaa

SEQ ID NO: 118660 - DNA, 22 bp, synthetic construct
  misc_feature 1..22: note = chemically synthesized
  source 1..22: mol_type = other DNA
atgtattttgttttttataaaa

SEQ ID NO: 118661 - DNA, 22 bp, synthetic construct
  misc_feature 1..22: note = chemically synthesized
  source 1..22: mol_type = other DNA
tgttttttataaaaggcaaatt

SEQ ID NO: 118662 - DNA, 22 bp, synthetic construct
  misc_feature 1..22: note = chemically synthesized
  source 1..22: mol_type = other DNA
gttttttataaaaggcaaatta

SEQ ID NO: 118663 - DNA, 22 bp, synthetic construct
  misc_feature 1..22: note = chemically synthesized
  source 1..22: mol_type = other DNA
ttttttataaaaggcaaattaa

SEQ ID NO: 118664 - DNA, 22 bp, synthetic construct
  misc_feature 1..22: note = chemically synthesized
  source 1..22: mol_type = other DNA
tttataaaaggcaaattaaatt

SEQ ID NO: 118665 - DNA, 22 bp, synthetic construct
  misc_feature 1..22: note = chemically synthesized
  source 1..22: mol_type = other DNA
ttataaaaggcaaattaaatta

SEQ ID NO: 118666 - DNA, 22 bp, synthetic construct
  misc_feature 1..22: note = chemically synthesized
  source 1..22: mol_type = other DNA
tataaaaggcaaattaaattat

SEQ ID NO: 118667 - DNA, 22 bp, synthetic construct
  misc_feature 1..22: note = chemically synthesized
  source 1..22: mol_type = other DNA
ataaaaggcaaattaaattatg

SEQ ID NO: 118668 - DNA, 22 bp, synthetic construct
  misc_feature 1..22: note = chemically synthesized
  source 1..22: mol_type = other DNA
taaaaggcaaattaaattatgt

SEQ ID NO: 118669 - DNA, 22 bp, synthetic construct
  misc_feature 1..22: note = chemically synthesized
  source 1..22: mol_type = other DNA
aattatgttttcattctggtat

SEQ ID NO: 118670 - DNA, 22 bp, synthetic construct
  misc_feature 1..22: note = chemically synthesized
  source 1..22: mol_type = other DNA
tgttttcattctggtatgtgaa

SEQ ID NO: 118671 - DNA, 22 bp, synthetic construct
  misc_feature 1..22: note = chemically synthesized
  source 1..22: mol_type = other DNA
tcattctggtatgtgaaaatac

SEQ ID NO: 118672 - DNA, 22 bp, synthetic construct
  misc_feature 1..22: note = chemically synthesized
  source 1..22: mol_type = other DNA
cattctggtatgtgaaaatacc

SEQ ID NO: 118673 - DNA, 22 bp, synthetic construct
  misc_feature 1..22: note = chemically synthesized
  source 1..22: mol_type = other DNA
attctggtatgtgaaaatacct

SEQ ID NO: 118674 - DNA, 22 bp, synthetic construct
  misc_feature 1..22: note = chemically synthesized
  source 1..22: mol_type = other DNA
tggtatgtgaaaatacctcttt

SEQ ID NO: 118675 - DNA, 22 bp, synthetic construct
  misc_feature 1..22: note = chemically synthesized
  source 1..22: mol_type = other DNA
gtatgtgaaaatacctctttta

SEQ ID NO: 118676 - DNA, 22 bp, synthetic construct
  misc_feature 1..22: note = chemically synthesized
  source 1..22: mol_type = other DNA
ttttaccacatacttaacagca

SEQ ID NO: 118677 - DNA, 22 bp, synthetic construct
  misc_feature 1..22: note = chemically synthesized
  source 1..22: mol_type = other DNA
ttaccacatacttaacagcaca

SEQ ID NO: 118678 - DNA, 22 bp, synthetic construct
  misc_feature 1..22: note = chemically synthesized
  source 1..22: mol_type = other DNA
taccacatacttaacagcacag

SEQ ID NO: 118679 - DNA, 22 bp, synthetic construct
  misc_feature 1..22: note = chemically synthesized
  source 1..22: mol_type = other DNA
accacatacttaacagcacaga

SEQ ID NO: 118680 - DNA, 22 bp, synthetic construct
  misc_feature 1..22: note = chemically synthesized
  source 1..22: mol_type = other DNA
ccacatacttaacagcacagat

SEQ ID NO: 118681 - DNA, 22 bp, synthetic construct
  misc_feature 1..22: note = chemically synthesized
  source 1..22: mol_type = other DNA
aacagcacagatatttatttat

SEQ ID NO: 118682 - DNA, 22 bp, synthetic construct
  misc_feature 1..22: note = chemically synthesized
  source 1..22: mol_type = other DNA
acagcacagatatttatttatt

SEQ ID NO: 118683 - DNA, 22 bp, synthetic construct
  misc_feature 1..22: note = chemically synthesized
  source 1..22: mol_type = other DNA
atttatttttctttttttttgt

SEQ ID NO: 118684 - DNA, 22 bp, synthetic construct
  misc_feature 1..22: note = chemically synthesized
  source 1..22: mol_type = other DNA
tttatttttctttttttttgtt

SEQ ID NO: 118685 - DNA, 22 bp, synthetic construct
  misc_feature 1..22: note = chemically synthesized
  source 1..22: mol_type = other DNA
atttttctttttttttgttttt

SEQ ID NO: 118686 - DNA, 22 bp, synthetic construct
  misc_feature 1..22: note = chemically synthesized
  source 1..22: mol_type = other DNA
tttttctttttttttgtttttg

SEQ ID NO: 118687 - DNA, 22 bp, synthetic construct
  misc_feature 1..22: note = chemically synthesized
  source 1..22: mol_type = other DNA
ttctttttttttgtttttgaga

SEQ ID NO: 118688 - DNA, 22 bp, synthetic construct
  misc_feature 1..22: note = chemically synthesized
  source 1..22: mol_type = other DNA
tctttttttttgtttttgagaa

SEQ ID NO: 118689 - DNA, 22 bp, synthetic construct
  misc_feature 1..22: note = chemically synthesized
  source 1..22: mol_type = other DNA
ctttttttttgtttttgagaag

SEQ ID NO: 118690 - DNA, 22 bp, synthetic construct
  misc_feature 1..22: note = chemically synthesized
  source 1..22: mol_type = other DNA
tttttttttgtttttgagaagg

SEQ ID NO: 118691 - DNA, 22 bp, synthetic construct
  misc_feature 1..22: note = chemically synthesized
  source 1..22: mol_type = other DNA
tttttttgtttttgagaaggag

SEQ ID NO: 118692 - DNA, 22 bp, synthetic construct
  misc_feature 1..22: note = chemically synthesized
  source 1..22: mol_type = other DNA
ttttttgtttttgagaaggagt

SEQ ID NO: 118693 - DNA, 22 bp, synthetic construct
  misc_feature 1..22: note = chemically synthesized
  source 1..22: mol_type = other DNA
tttttgtttttgagaaggagtc

SEQ ID NO: 118694 - DNA, 22 bp, synthetic construct
  misc_feature 1..22: note = chemically synthesized
  source 1..22: mol_type = other DNA
ttttgtttttgagaaggagtct

SEQ ID NO: 118695 - DNA, 22 bp, synthetic construct
  misc_feature 1..22: note = chemically synthesized
  source 1..22: mol_type = other DNA
tttgtttttgagaaggagtctt

SEQ ID NO: 118696 - DNA, 22 bp, synthetic construct
  misc_feature 1..22: note = chemically synthesized
  source 1..22: mol_type = other DNA
ttgtttttgagaaggagtcttg

SEQ ID NO: 118697 - DNA, 22 bp, synthetic construct
  misc_feature 1..22: note = chemically synthesized
  source 1..22: mol_type = other DNA
tgtttttgagaaggagtcttgc

SEQ ID NO: 118698 - DNA, 22 bp, synthetic construct
  misc_feature 1..22: note = chemically synthesized
  source 1..22: mol_type = other DNA
gtttttgagaaggagtcttgct

SEQ ID NO: 118699 - DNA, 22 bp, synthetic construct
  misc_feature 1..22: note = chemically synthesized
  source 1..22: mol_type = other DNA
tttttgagaaggagtcttgctc

SEQ ID NO: 118700 - DNA, 22 bp, synthetic construct
  misc_feature 1..22: note = chemically synthesized
  source 1..22: mol_type = other DNA
ttgagaaggagtcttgctctgt

SEQ ID NO: 118701 - DNA, 22 bp, synthetic construct
  misc_feature 1..22: note = chemically synthesized
  source 1..22: mol_type = other DNA
tgagaaggagtcttgctctgtt

SEQ ID NO: 118702 - DNA, 22 bp, synthetic construct
  misc_feature 1..22: note = chemically synthesized
  source 1..22: mol_type = other DNA
gagaaggagtcttgctctgttg

SEQ ID NO: 118703 - DNA, 22 bp, synthetic construct
  misc_feature 1..22: note = chemically synthesized
  source 1..22: mol_type = other DNA
agaaggagtcttgctctgttgc

SEQ ID NO: 118704 - DNA, 22 bp, synthetic construct
  misc_feature 1..22: note = chemically synthesized
  source 1..22: mol_type = other DNA
gctctgttgcccaggctggagt

SEQ ID NO: 118705 - DNA, 22 bp, synthetic construct
  misc_feature 1..22: note = chemically synthesized
  source 1..22: mol_type = other DNA
ctctgttgcccaggctggagtg

SEQ ID NO: 118706 - DNA, 22 bp, synthetic construct
  misc_feature 1..22: note = chemically synthesized
  source 1..22: mol_type = other DNA
tgttgcccaggctggagtgcag

SEQ ID NO: 118707 - DNA, 22 bp, synthetic construct
  misc_feature 1..22: note = chemically synthesized
  source 1..22: mol_type = other DNA
ttgcccaggctggagtgcagtg

SEQ ID NO: 118708 - DNA, 22 bp, synthetic construct
  misc_feature 1..22: note = chemically synthesized
  source 1..22: mol_type = other DNA
cccaggctggagtgcagtggca

SEQ ID NO: 118709 - DNA, 22 bp, synthetic construct
  misc_feature 1..22: note = chemically synthesized
  source 1..22: mol_type = other DNA
gagtgcagtggcacgatctcgg

SEQ ID NO: 118710 - DNA, 22 bp, synthetic construct
  misc_feature 1..22: note = chemically synthesized
  source 1..22: mol_type = other DNA
ggctcactgcaagctccacctc

SEQ ID NO: 118711 - DNA, 22 bp, synthetic construct
  misc_feature 1..22: note = chemically synthesized
  source 1..22: mol_type = other DNA
actgcaagctccacctcctggg

SEQ ID NO: 118712 - DNA, 22 bp, synthetic construct
  misc_feature 1..22: note = chemically synthesized
  source 1..22: mol_type = other DNA
caagctccacctcctgggttca

SEQ ID NO: 118713 - DNA, 22 bp, synthetic construct
  misc_feature 1..22: note = chemically synthesized
  source 1..22: mol_type = other DNA
cacctcctgggttcacgccatt

SEQ ID NO: 118714 - DNA, 22 bp, synthetic construct
  misc_feature 1..22: note = chemically synthesized
  source 1..22: mol_type = other DNA
ctgggttcacgccattctgctg

SEQ ID NO: 118715 - DNA, 22 bp, synthetic construct
  misc_feature 1..22: note = chemically synthesized
  source 1..22: mol_type = other DNA
ggttcacgccattctgctgccc

SEQ ID NO: 118716 - DNA, 22 bp, synthetic construct
  misc_feature 1..22: note = chemically synthesized
  source 1..22: mol_type = other DNA
acgccattctgctgccccagcc

SEQ ID NO: 118717 - DNA, 22 bp, synthetic construct
  misc_feature 1..22: note = chemically synthesized
  source 1..22: mol_type = other DNA
tgctgccccagcctcctgagta

SEQ ID NO: 118718 - DNA, 22 bp, synthetic construct
  misc_feature 1..22: note = chemically synthesized
  source 1..22: mol_type = other DNA
ctgccccagcctcctgagtagc

SEQ ID NO: 118719 - DNA, 22 bp, synthetic construct
  misc_feature 1..22: note = chemically synthesized
  source 1..22: mol_type = other DNA
ccccagcctcctgagtagctgg

SEQ ID NO: 118720 - DNA, 22 bp, synthetic construct
  misc_feature 1..22: note = chemically synthesized
  source 1..22: mol_type = other DNA
ctgagtagctgggactacaggt

SEQ ID NO: 118721 - DNA, 22 bp, synthetic construct
  misc_feature 1..22: note = chemically synthesized
  source 1..22: mol_type = other DNA
agtagctgggactacaggtgcc

SEQ ID NO: 118722 - DNA, 22 bp, synthetic construct
  misc_feature 1..22: note = chemically synthesized
  source 1..22: mol_type = other DNA
ggactacaggtgcccaccacca

SEQ ID NO: 118723 - DNA, 22 bp, synthetic construct
  misc_feature 1..22: note = chemically synthesized
  source 1..22: mol_type = other DNA
caggtgcccaccaccatgcccg

SEQ ID NO: 118724 - DNA, 22 bp, synthetic construct
  misc_feature 1..22: note = chemically synthesized
  source 1..22: mol_type = other DNA
actttttgtatttttagtagag

SEQ ID NO: 118725 - DNA, 22 bp, synthetic construct
  misc_feature 1..22: note = chemically synthesized
  source 1..22: mol_type = other DNA
tttgtatttttagtagagactg

SEQ ID NO: 118726 - DNA, 22 bp, synthetic construct
  misc_feature 1..22: note = chemically synthesized
  source 1..22: mol_type = other DNA
ttgtatttttagtagagactgg

SEQ ID NO: 118727 - DNA, 22 bp, synthetic construct
  misc_feature 1..22: note = chemically synthesized
  source 1..22: mol_type = other DNA
tgtatttttagtagagactggg

SEQ ID NO: 118728 - DNA, 22 bp, synthetic construct
  misc_feature 1..22: note = chemically synthesized
  source 1..22: mol_type = other DNA
gtatttttagtagagactgggt

SEQ ID NO: 118729 - DNA, 22 bp, synthetic construct
  misc_feature 1..22: note = chemically synthesized
  source 1..22: mol_type = other DNA
tatttttagtagagactgggtt

SEQ ID NO: 118730 - DNA, 22 bp, synthetic construct
  misc_feature 1..22: note = chemically synthesized
  source 1..22: mol_type = other DNA
ttagtagagactgggttccacc

SEQ ID NO: 118731 - DNA, 22 bp, synthetic construct
  misc_feature 1..22: note = chemically synthesized
  source 1..22: mol_type = other DNA
tagtagagactgggttccaccg

SEQ ID NO: 118732 - DNA, 22 bp, synthetic construct
  misc_feature 1..22: note = chemically synthesized
  source 1..22: mol_type = other DNA
agtagagactgggttccaccgt

SEQ ID NO: 118733 - DNA, 22 bp, synthetic construct
  misc_feature 1..22: note = chemically synthesized
  source 1..22: mol_type = other DNA
gtagagactgggttccaccgtg

SEQ ID NO: 118734 - DNA, 22 bp, synthetic construct
  misc_feature 1..22: note = chemically synthesized
  source 1..22: mol_type = other DNA
ggttccaccgtgttagccagga

SEQ ID NO: 118735 - DNA, 22 bp, synthetic construct
  misc_feature 1..22: note = chemically synthesized
  source 1..22: mol_type = other DNA
caccgtgttagccaggatggtc

SEQ ID NO: 118736 - DNA, 22 bp, synthetic construct
  misc_feature 1..22: note = chemically synthesized
  source 1..22: mol_type = other DNA
gccaggatggtctcgatctcct

SEQ ID NO: 118737 - DNA, 22 bp, synthetic construct
  misc_feature 1..22: note = chemically synthesized
  source 1..22: mol_type = other DNA
gatctcctgacctcgtgatcca

SEQ ID NO: 118738 - DNA, 22 bp, synthetic construct
  misc_feature 1..22: note = chemically synthesized
  source 1..22: mol_type = other DNA
ctgacctcgtgatccacccgcc

SEQ ID NO: 118739 - DNA, 22 bp, synthetic construct
  misc_feature 1..22: note = chemically synthesized
  source 1..22: mol_type = other DNA
acctcgtgatccacccgcctcg

SEQ ID NO: 118740 - DNA, 22 bp, synthetic construct
  misc_feature 1..22: note = chemically synthesized
  source 1..22: mol_type = other DNA
gtgatccacccgcctcggcctc

SEQ ID NO: 118741 - DNA, 22 bp, synthetic construct
  misc_feature 1..22: note = chemically synthesized
  source 1..22: mol_type = other DNA
ggcctcccagagtgctgggatt

SEQ ID NO: 118742 - DNA, 22 bp, synthetic construct
  misc_feature 1..22: note = chemically synthesized
  source 1..22: mol_type = other DNA
ccagagtgctgggattacaggc

SEQ ID NO: 118743 - DNA, 22 bp, synthetic construct
  misc_feature 1..22: note = chemically synthesized
  source 1..22: mol_type = other DNA
ggattacaggcgtgagccaccg

SEQ ID NO: 118744 - DNA, 22 bp, synthetic construct
  misc_feature 1..22: note = chemically synthesized
  source 1..22: mol_type = other DNA
caggcgtgagccaccgcgccca

SEQ ID NO: 118745 - DNA, 22 bp, synthetic construct
  misc_feature 1..22: note = chemically synthesized
  source 1..22: mol_type = other DNA
attgttaactctattcttcaat

SEQ ID NO: 118746 - DNA, 22 bp, synthetic construct
  misc_feature 1..22: note = chemically synthesized
  source 1..22: mol_type = other DNA
ttaactctattcttcaatattc

SEQ ID NO: 118747 - DNA, 22 bp, synthetic construct
  misc_feature 1..22: note = chemically synthesized
  source 1..22: mol_type = other DNA
actctattcttcaatattcgtt

SEQ ID NO: 118748 - DNA, 22 bp, synthetic construct
  misc_feature 1..22: note = chemically synthesized
  source 1..22: mol_type = other DNA
tattcttcaatattcgtttagt

SEQ ID NO: 118749 - DNA, 22 bp, synthetic construct
  misc_feature 1..22: note = chemically synthesized
  source 1..22: mol_type = other DNA
ttcttcaatattcgtttagtaa

SEQ ID NO: 118750 - DNA, 22 bp, synthetic construct
  misc_feature 1..22: note = chemically synthesized
  source 1..22: mol_type = other DNA
ttcaatattcgtttagtaacaa

SEQ ID NO: 118751 - DNA, 22 bp, synthetic construct
  misc_feature 1..22: note = chemically synthesized
  source 1..22: mol_type = other DNA
caatattcgtttagtaacaaat

SEQ ID NO: 118752 - DNA, 22 bp, synthetic construct
  misc_feature 1..22: note = chemically synthesized
  source 1..22: mol_type = other DNA
aatattcgtttagtaacaaatt

SEQ ID NO: 118753 - DNA, 22 bp, synthetic construct
  misc_feature 1..22: note = chemically synthesized
  source 1..22: mol_type = other DNA
gtttagtaacaaattaagatat

SEQ ID NO: 118754 - DNA, 22 bp, synthetic construct
  misc_feature 1..22: note = chemically synthesized
  source 1..22: mol_type = other DNA
agtaacaaattaagatatgtta

SEQ ID NO: 118755 - DNA, 22 bp, synthetic construct
  misc_feature 1..22: note = chemically synthesized
  source 1..22: mol_type = other DNA
gtaacaaattaagatatgttaa

SEQ ID NO: 118756 - DNA, 22 bp, synthetic construct
  misc_feature 1..22: note = chemically synthesized
  source 1..22: mol_type = other DNA
agatatgttaatttgcatttta

SEQ ID NO: 118757 - DNA, 22 bp, synthetic construct
  misc_feature 1..22: note = chemically synthesized
  source 1..22: mol_type = other DNA
atttgcattttaaatttgagta

SEQ ID NO: 118758 - DNA, 22 bp, synthetic construct
  misc_feature 1..22: note = chemically synthesized
  source 1..22: mol_type = other DNA
gcattttaaatttgagtaaggt

SEQ ID NO: 118759 - DNA, 22 bp, synthetic construct
  misc_feature 1..22: note = chemically synthesized
  source 1..22: mol_type = other DNA
cattttaaatttgagtaaggta

SEQ ID NO: 118760 - DNA, 22 bp, synthetic construct
  misc_feature 1..22: note = chemically synthesized
  source 1..22: mol_type = other DNA
taaatttgagtaaggtagaagt

SEQ ID NO: 118761 - DNA, 22 bp, synthetic construct
  misc_feature 1..22: note = chemically synthesized
  source 1..22: mol_type = other DNA
aaatttgagtaaggtagaagtt

SEQ ID NO: 118762 - DNA, 22 bp, synthetic construct
  misc_feature 1..22: note = chemically synthesized
  source 1..22: mol_type = other DNA
aatttgagtaaggtagaagttt

SEQ ID NO: 118763 - DNA, 22 bp, synthetic construct
  misc_feature 1..22: note = chemically synthesized
  source 1..22: mol_type = other DNA
gagtaaggtagaagttttcaaa

SEQ ID NO: 118764 - DNA, 22 bp, synthetic construct
  misc_feature 1..22: note = chemically synthesized
  source 1..22: mol_type = other DNA
agtaaggtagaagttttcaaat

SEQ ID NO: 118765 - DNA, 22 bp, synthetic construct
  misc_feature 1..22: note = chemically synthesized
  source 1..22: mol_type = other DNA
tcaaatatgttattacctgtac

SEQ ID NO: 118766 - DNA, 22 bp, synthetic construct
  misc_feature 1..22: note = chemically synthesized
  source 1..22: mol_type = other DNA
caaatatgttattacctgtacg

SEQ ID NO: 118767 - DNA, 22 bp, synthetic construct
  misc_feature 1..22: note = chemically synthesized
  source 1..22: mol_type = other DNA
aaatatgttattacctgtacgt

SEQ ID NO: 118768 - DNA, 22 bp, synthetic construct
  misc_feature 1..22: note = chemically synthesized
  source 1..22: mol_type = other DNA
ttacctgtacgtatttcctaat

SEQ ID NO: 118769 - DNA, 22 bp, synthetic construct
  misc_feature 1..22: note = chemically synthesized
  source 1..22: mol_type = other DNA
cctgtacgtatttcctaatttg

SEQ ID NO: 118770 - DNA, 22 bp, synthetic construct
  misc_feature 1..22: note = chemically synthesized
  source 1..22: mol_type = other DNA
tacgtatttcctaatttgaaaa

SEQ ID NO: 118771 - DNA, 22 bp, synthetic construct
  misc_feature 1..22: note = chemically synthesized
  source 1..22: mol_type = other DNA
cctaatttgaaaatgaaattta

SEQ ID NO: 118772 - DNA, 22 bp, synthetic construct
  misc_feature 1..22: note = chemically synthesized
  source 1..22: mol_type = other DNA
ctaatttgaaaatgaaatttag

SEQ ID NO: 118773 - DNA, 22 bp, synthetic construct
  misc_feature 1..22: note = chemically synthesized
  source 1..22: mol_type = other DNA
atttgaaaatgaaatttagatg

SEQ ID NO: 118774 - DNA, 22 bp, synthetic construct
  misc_feature 1..22: note = chemically synthesized
  source 1..22: mol_type = other DNA
gaaaatgaaatttagatgtcag

SEQ ID NO: 118775 - DNA, 22 bp, synthetic construct
  misc_feature 1..22: note = chemically synthesized
  source 1..22: mol_type = other DNA
aaaatgaaatttagatgtcagt

SEQ ID NO: 118776 - DNA, 22 bp, synthetic construct
  misc_feature 1..22: note = chemically synthesized
  source 1..22: mol_type = other DNA
agatgtcagtggtctatttgtt

SEQ ID NO: 118777 - DNA, 22 bp, synthetic construct
  misc_feature 1..22: note = chemically synthesized
  source 1..22: mol_type = other DNA
gatgtcagtggtctatttgtta

SEQ ID NO: 118778 - DNA, 22 bp, synthetic construct
  misc_feature 1..22: note = chemically synthesized
  source 1..22: mol_type = other DNA
tttgttaataagaggcaaaatg

SEQ ID NO: 118779 - DNA, 22 bp, synthetic construct
  misc_feature 1..22: note = chemically synthesized
  source 1..22: mol_type = other DNA
gttaataagaggcaaaatggga

SEQ ID NO: 118780 - DNA, 22 bp, synthetic construct
  misc_feature 1..22: note = chemically synthesized
  source 1..22: mol_type = other DNA
ttaataagaggcaaaatgggac

SEQ ID NO: 118781 - DNA, 22 bp, synthetic construct
  misc_feature 1..22: note = chemically synthesized
  source 1..22: mol_type = other DNA
ataagaggcaaaatgggacttc

SEQ ID NO: 118782 - DNA, 22 bp, synthetic construct
  misc_feature 1..22: note = chemically synthesized
  source 1..22: mol_type = other DNA
cagtgctaatctaaatccaaat

SEQ ID NO: 118783 - DNA, 22 bp, synthetic construct
  misc_feature 1..22: note = chemically synthesized
  source 1..22: mol_type = other DNA
agtgctaatctaaatccaaatc

SEQ ID NO: 118784 - DNA, 22 bp, synthetic construct
  misc_feature 1..22: note = chemically synthesized
  source 1..22: mol_type = other DNA
atctaaatccaaatcctaaatt

SEQ ID NO: 118785 - DNA, 22 bp, synthetic construct
  misc_feature 1..22: note = chemically synthesized
  source 1..22: mol_type = other DNA
aatccaaatcctaaattttttg

SEQ ID NO: 118786 - DNA, 22 bp, synthetic construct
  misc_feature 1..22: note = chemically synthesized
  source 1..22: mol_type = other DNA
aattttttgtaccccattctac

SEQ ID NO: 118787 - DNA, 22 bp, synthetic construct
  misc_feature 1..22: note = chemically synthesized
  source 1..22: mol_type = other DNA
tttgtaccccattctaccaaat

SEQ ID NO: 118788 - DNA, 22 bp, synthetic construct
  misc_feature 1..22: note = chemically synthesized
  source 1..22: mol_type = other DNA
ttgtaccccattctaccaaatg

SEQ ID NO: 118789 - DNA, 22 bp, synthetic construct
  misc_feature 1..22: note = chemically synthesized
  source 1..22: mol_type = other DNA
tgtaccccattctaccaaatga

SEQ ID NO: 118790 - DNA, 22 bp, synthetic construct
  misc_feature 1..22: note = chemically synthesized
  source 1..22: mol_type = other DNA
gtaccccattctaccaaatgag

SEQ ID NO: 118791 - DNA, 22 bp, synthetic construct
  misc_feature 1..22: note = chemically synthesized
  source 1..22: mol_type = other DNA
taccccattctaccaaatgaga

SEQ ID NO: 118792 - DNA, 22 bp, synthetic construct
  misc_feature 1..22: note = chemically synthesized
  source 1..22: mol_type = other DNA
taccaaatgagatctatagaat

SEQ ID NO: 118793 - DNA, 22 bp, synthetic construct
  misc_feature 1..22: note = chemically synthesized
  source 1..22: mol_type = other DNA
ccaaatgagatctatagaatag

SEQ ID NO: 118794 - DNA, 22 bp, synthetic construct
  misc_feature 1..22: note = chemically synthesized
  source 1..22: mol_type = other DNA
tagaataggaatttcctctcaa

SEQ ID NO: 118795 - DNA, 22 bp, synthetic construct
  misc_feature 1..22: note = chemically synthesized
  source 1..22: mol_type = other DNA
cctctcaacatggagaagaata

SEQ ID NO: 118796 - DNA, 22 bp, synthetic construct
  misc_feature 1..22: note = chemically synthesized
  source 1..22: mol_type = other DNA
ctctcaacatggagaagaatat

SEQ ID NO: 118797 - DNA, 22 bp, synthetic construct
  misc_feature 1..22: note = chemically synthesized
  source 1..22: mol_type = other DNA
tcaacatggagaagaatattct

SEQ ID NO: 118798 - DNA, 22 bp, synthetic construct
  misc_feature 1..22: note = chemically synthesized
  source 1..22: mol_type = other DNA
aacatggagaagaatattctaa

SEQ ID NO: 118799 - DNA, 22 bp, synthetic construct
  misc_feature 1..22: note = chemically synthesized
  source 1..22: mol_type = other DNA
taagtctcggaactgctattga

SEQ ID NO: 118800 - DNA, 22 bp, synthetic construct
  misc_feature 1..22: note = chemically synthesized
  source 1..22: mol_type = other DNA
agtctcggaactgctattgagt

SEQ ID NO: 118801 - DNA, 22 bp, synthetic construct
  misc_feature 1..22: note = chemically synthesized
  source 1..22: mol_type = other DNA
ggaactgctattgagtaatgtg

SEQ ID NO: 118802 - DNA, 22 bp, synthetic construct
  misc_feature 1..22: note = chemically synthesized
  source 1..22: mol_type = other DNA
ctattgagtaatgtggcctact

SEQ ID NO: 118803 - DNA, 22 bp, synthetic construct
  misc_feature 1..22: note = chemically synthesized
  source 1..22: mol_type = other DNA
ttgagtaatgtggcctactatg

SEQ ID NO: 118804 - DNA, 22 bp, synthetic construct
  misc_feature 1..22: note = chemically synthesized
  source 1..22: mol_type = other DNA
agtaatgtggcctactatgtgg

SEQ ID NO: 118805 - DNA, 22 bp, synthetic construct
  misc_feature 1..22: note = chemically synthesized
  source 1..22: mol_type = other DNA
ctatgtggatgtaaattaaagt

SEQ ID NO: 118806 - DNA, 22 bp, synthetic construct
  misc_feature 1..22: note = chemically synthesized
  source 1..22: mol_type = other DNA
tgtggatgtaaattaaagttta

SEQ ID NO: 118807 - DNA, 22 bp, synthetic construct
  misc_feature 1..22: note = chemically synthesized
  source 1..22: mol_type = other DNA
aagtttagaatggaacctatgt

SEQ ID NO: 118808 - DNA, 22 bp, synthetic construct
  misc_feature 1..22: note = chemically synthesized
  source 1..22: mol_type = other DNA
agaatggaacctatgtttaagg

SEQ ID NO: 118809 - DNA, 22 bp, synthetic construct
  misc_feature 1..22: note = chemically synthesized
  source 1..22: mol_type = other DNA
gaatggaacctatgtttaagga

SEQ ID NO: 118810 - DNA, 22 bp, synthetic construct
  misc_feature 1..22: note = chemically synthesized
  source 1..22: mol_type = other DNA
tgtttaaggagtgccagcctgt

SEQ ID NO: 118811 - DNA, 22 bp, synthetic construct
  misc_feature 1..22: note = chemically synthesized
  source 1..22: mol_type = other DNA
aaggagtgccagcctgtaaggc

SEQ ID NO: 118812 - DNA, 22 bp, synthetic construct
  misc_feature 1..22: note = chemically synthesized
  source 1..22: mol_type = other DNA
aggagtgccagcctgtaaggct

SEQ ID NO: 118813 - DNA, 22 bp, synthetic construct
  misc_feature 1..22: note = chemically synthesized
  source 1..22: mol_type = other DNA
taaggctgcagaaactgctggg

SEQ ID NO: 118814 - DNA, 22 bp, synthetic construct
  misc_feature 1..22: note = chemically synthesized
  source 1..22: mol_type = other DNA
cagaaactgctgggttccagag

SEQ ID NO: 118815 - DNA, 22 bp, synthetic construct
  misc_feature 1..22: note = chemically synthesized
  source 1..22: mol_type = other DNA
ctgggttccagaggggctccca

SEQ ID NO: 118816 - DNA, 22 bp, synthetic construct
  misc_feature 1..22: note = chemically synthesized
  source 1..22: mol_type = other DNA
ggttccagaggggctcccaagc

SEQ ID NO: 118817 - DNA, 22 bp, synthetic construct
  misc_feature 1..22: note = chemically synthesized
  source 1..22: mol_type = other DNA
cagaggggctcccaagcctgag

SEQ ID NO: 118818 - DNA, 22 bp, synthetic construct
  misc_feature 1..22: note = chemically synthesized
  source 1..22: mol_type = other DNA
ccaagcctgagagtctgataac

SEQ ID NO: 118819 - DNA, 22 bp, synthetic construct
  misc_feature 1..22: note = chemically synthesized
  source 1..22: mol_type = other DNA
agagtctgataacacccacaca

SEQ ID NO: 118820 - DNA, 22 bp, synthetic construct
  misc_feature 1..22: note = chemically synthesized
  source 1..22: mol_type = other DNA
ataacacccacacatacaaaca

SEQ ID NO: 118821 - DNA, 22 bp, synthetic construct
  misc_feature 1..22: note = chemically synthesized
  source 1..22: mol_type = other DNA
ttagagtttggttcttttttaa

SEQ ID NO: 118822 - DNA, 22 bp, synthetic construct
  misc_feature 1..22: note = chemically synthesized
  source 1..22: mol_type = other DNA
tagagtttggttcttttttaaa

SEQ ID NO: 118823 - DNA, 22 bp, synthetic construct
  misc_feature 1..22: note = chemically synthesized
  source 1..22: mol_type = other DNA
agagtttggttcttttttaaat

SEQ ID NO: 118824 - DNA, 22 bp, synthetic construct
  misc_feature 1..22: note = chemically synthesized
  source 1..22: mol_type = other DNA
gagtttggttcttttttaaatt

SEQ ID NO: 118825 - DNA, 22 bp, synthetic construct
  misc_feature 1..22: note = chemically synthesized
  source 1..22: mol_type = other DNA
ggttcttttttaaatttcgctt

SEQ ID NO: 118826 - DNA, 22 bp, synthetic construct
  misc_feature 1..22: note = chemically synthesized
  source 1..22: mol_type = other DNA
gttcttttttaaatttcgcttt

SEQ ID NO: 118827 - DNA, 22 bp, synthetic construct
  misc_feature 1..22: note = chemically synthesized
  source 1..22: mol_type = other DNA
ttttttaaatttcgctttgtaa

SEQ ID NO: 118828 - DNA, 22 bp, synthetic construct
  misc_feature 1..22: note = chemically synthesized
  source 1..22: mol_type = other DNA
ttttaaatttcgctttgtaatt

SEQ ID NO: 118829 - DNA, 22 bp, synthetic construct
  misc_feature 1..22: note = chemically synthesized
  source 1..22: mol_type = other DNA
tttaaatttcgctttgtaattt

SEQ ID NO: 118830 - DNA, 22 bp, synthetic construct
  misc_feature 1..22: note = chemically synthesized
  source 1..22: mol_type = other DNA
ttaaatttcgctttgtaatttt

SEQ ID NO: 118831 - DNA, 22 bp, synthetic construct
  misc_feature 1..22: note = chemically synthesized
  source 1..22: mol_type = other DNA
taaatttcgctttgtaattttg

SEQ ID NO: 118832 - DNA, 22 bp, synthetic construct
  misc_feature 1..22: note = chemically synthesized
  source 1..22: mol_type = other DNA
aaatttcgctttgtaattttgt

SEQ ID NO: 118833 - DNA, 22 bp, synthetic construct
  misc_feature 1..22: note = chemically synthesized
  source 1..22: mol_type = other DNA
aatttcgctttgtaattttgtt

SEQ ID NO: 118834 - DNA, 22 bp, synthetic construct
  misc_feature 1..22: note = chemically synthesized
  source 1..22: mol_type = other DNA
cgctttgtaattttgtttgttt

SEQ ID NO: 118835 - DNA, 22 bp, synthetic construct
  misc_feature 1..22: note = chemically synthesized
  source 1..22: mol_type = other DNA
gctttgtaattttgtttgtttt

SEQ ID NO: 118836 - DNA, 22 bp, synthetic construct
  misc_feature 1..22: note = chemically synthesized
  source 1..22: mol_type = other DNA
tgtaattttgtttgttttcctt

SEQ ID NO: 118837 - DNA, 22 bp, synthetic construct
  misc_feature 1..22: note = chemically synthesized
  source 1..22: mol_type = other DNA
gtaattttgtttgttttccttt

SEQ ID NO: 118838 - DNA, 22 bp, synthetic construct
  misc_feature 1..22: note = chemically synthesized
  source 1..22: mol_type = other DNA
taattttgtttgttttcctttt

SEQ ID NO: 118839 - DNA, 22 bp, synthetic construct
  misc_feature 1..22: note = chemically synthesized
  source 1..22: mol_type = other DNA
tgtttgttttcctttttatttt

SEQ ID NO: 118840 - DNA, 22 bp, synthetic construct
  misc_feature 1..22: note = chemically synthesized
  source 1..22: mol_type = other DNA
gtttgttttcctttttattttt

SEQ ID NO: 118841 - DNA, 22 bp, synthetic construct
  misc_feature 1..22: note = chemically synthesized
  source 1..22: mol_type = other DNA
tttgttttcctttttatttttg

SEQ ID NO: 118842 - DNA, 22 bp, synthetic construct
  misc_feature 1..22: note = chemically synthesized
  source 1..22: mol_type = other DNA
gttttcctttttatttttgaat

SEQ ID NO: 118843 - DNA, 22 bp, synthetic construct
  misc_feature 1..22: note = chemically synthesized
  source 1..22: mol_type = other DNA
ttttcctttttatttttgaatc

SEQ ID NO: 118844 - DNA, 22 bp, synthetic construct
  misc_feature 1..22: note = chemically synthesized
  source 1..22: mol_type = other DNA
tcctttttatttttgaatcggg

SEQ ID NO: 118845 - DNA, 22 bp, synthetic construct
  misc_feature 1..22: note = chemically synthesized
  source 1..22: mol_type = other DNA
cctttttatttttgaatcgggg

SEQ ID NO: 118846 - DNA, 22 bp, synthetic construct
  misc_feature 1..22: note = chemically synthesized
  source 1..22: mol_type = other DNA
ctttttatttttgaatcggggt

SEQ ID NO: 118847 - DNA, 22 bp, synthetic construct
  misc_feature 1..22: note = chemically synthesized
  source 1..22: mol_type = other DNA
tttatttttgaatcggggtctc

SEQ ID NO: 118848 - DNA, 22 bp, synthetic construct
  misc_feature 1..22: note = chemically synthesized
  source 1..22: mol_type = other DNA
ttatttttgaatcggggtctca

SEQ ID NO: 118849 - DNA, 22 bp, synthetic construct
  misc_feature 1..22: note = chemically synthesized
  source 1..22: mol_type = other DNA
tatttttgaatcggggtctcac

SEQ ID NO: 118850 - DNA, 22 bp, synthetic construct
  misc_feature 1..22: note = chemically synthesized
  source 1..22: mol_type = other DNA
atttttgaatcggggtctcact

SEQ ID NO: 118851 - DNA, 22 bp, synthetic construct
  misc_feature 1..22: note = chemically synthesized
  source 1..22: mol_type = other DNA
tttttgaatcggggtctcactt

SEQ ID NO: 118852 - DNA, 22 bp, synthetic construct
  misc_feature 1..22: note = chemically synthesized
  source 1..22: mol_type = other DNA
ttgaatcggggtctcacttggt

SEQ ID NO: 118853 - DNA, 22 bp, synthetic construct
  misc_feature 1..22: note = chemically synthesized
  source 1..22: mol_type = other DNA
tgaatcggggtctcacttggtc

SEQ ID NO: 118854 - DNA, 22 bp, synthetic construct
  misc_feature 1..22: note = chemically synthesized
  source 1..22: mol_type = other DNA
gaatcggggtctcacttggtca

SEQ ID NO: 118855 - DNA, 22 bp, synthetic construct
  misc_feature 1..22: note = chemically synthesized
  source 1..22: mol_type = other DNA
aatcggggtctcacttggtcac

SEQ ID NO: 118856 - DNA, 22 bp, synthetic construct
  misc_feature 1..22: note = chemically synthesized
  source 1..22: mol_type = other DNA
acttggtcacccaggcagtagt

SEQ ID NO: 118857 - DNA, 22 bp, synthetic construct
  misc_feature 1..22: note = chemically synthesized
  source 1..22: mol_type = other DNA
ggtcacccaggcagtagtgtga

SEQ ID NO: 118858 - DNA, 22 bp, synthetic construct
  misc_feature 1..22: note = chemically synthesized
  source 1..22: mol_type = other DNA
gtcacccaggcagtagtgtgat

SEQ ID NO: 118859 - DNA, 22 bp, synthetic construct
  misc_feature 1..22: note = chemically synthesized
  source 1..22: mol_type = other DNA
tggctcactgcagcctcaacct

SEQ ID NO: 118860 - DNA, 22 bp, synthetic construct
  misc_feature 1..22: note = chemically synthesized
  source 1..22: mol_type = other DNA
actgcagcctcaacctcctggg

SEQ ID NO: 118861 - DNA, 22 bp, synthetic construct
  misc_feature 1..22: note = chemically synthesized
  source 1..22: mol_type = other DNA
cagcctcaacctcctgggctca

SEQ ID NO: 118862 - DNA, 22 bp, synthetic construct
  misc_feature 1..22: note = chemically synthesized
  source 1..22: mol_type = other DNA
aacctcctgggctcaagcattc

SEQ ID NO: 118863 - DNA, 22 bp, synthetic construct
  misc_feature 1..22: note = chemically synthesized
  source 1..22: mol_type = other DNA
ctgggctcaagcattcttccca

SEQ ID NO: 118864 - DNA, 22 bp, synthetic construct
  misc_feature 1..22: note = chemically synthesized
  source 1..22: mol_type = other DNA
ggctcaagcattcttcccacct

SEQ ID NO: 118865 - DNA, 22 bp, synthetic construct
  misc_feature 1..22: note = chemically synthesized
  source 1..22: mol_type = other DNA
aagcattcttcccacctcagcc

SEQ ID NO: 118866 - DNA, 22 bp, synthetic construct
  misc_feature 1..22: note = chemically synthesized
  source 1..22: mol_type = other DNA
ttcccacctcagcctcccaggt

SEQ ID NO: 118867 - DNA, 22 bp, synthetic construct
  misc_feature 1..22: note = chemically synthesized
  source 1..22: mol_type = other DNA
cccacctcagcctcccaggtag

SEQ ID NO: 118868 - DNA, 22 bp, synthetic construct
  misc_feature 1..22: note = chemically synthesized
  source 1..22: mol_type = other DNA
ccacctcagcctcccaggtagc

SEQ ID NO: 118869 - DNA, 22 bp, synthetic construct
  misc_feature 1..22: note = chemically synthesized
  source 1..22: mol_type = other DNA
agcctcccaggtagctgagact

SEQ ID NO: 118870 - DNA, 22 bp, synthetic construct
  misc_feature 1..22: note = chemically synthesized
  source 1..22: mol_type = other DNA
ccaggtagctgagactacagac

SEQ ID NO: 118871 - DNA, 22 bp, synthetic construct
  misc_feature 1..22: note = chemically synthesized
  source 1..22: mol_type = other DNA
agactacagacgtgcaccgcca

SEQ ID NO: 118872 - DNA, 22 bp, synthetic construct
  misc_feature 1..22: note = chemically synthesized
  source 1..22: mol_type = other DNA
cagacgtgcaccgccacacatg

SEQ ID NO: 118873 - DNA, 22 bp, synthetic construct
  misc_feature 1..22: note = chemically synthesized
  source 1..22: mol_type = other DNA
attttaattttttttgtagaga

SEQ ID NO: 118874 - DNA, 22 bp, synthetic construct
  misc_feature 1..22: note = chemically synthesized
  source 1..22: mol_type = other DNA
taattttttttgtagagatagg

SEQ ID NO: 118875 - DNA, 22 bp, synthetic construct
  misc_feature 1..22: note = chemically synthesized
  source 1..22: mol_type = other DNA
aattttttttgtagagataggg

SEQ ID NO: 118876 - DNA, 22 bp, synthetic construct
  misc_feature 1..22: note = chemically synthesized
  source 1..22: mol_type = other DNA
attttttttgtagagatagggt

SEQ ID NO: 118877 - DNA, 22 bp, synthetic construct
  misc_feature 1..22: note = chemically synthesized
  source 1..22: mol_type = other DNA
tttttgtagagatagggtcttg

SEQ ID NO: 118878 - DNA, 22 bp, synthetic construct
  misc_feature 1..22: note = chemically synthesized
  source 1..22: mol_type = other DNA
ttttgtagagatagggtcttgc

SEQ ID NO: 118879 - DNA, 22 bp, synthetic construct
  misc_feature 1..22: note = chemically synthesized
  source 1..22: mol_type = other DNA
tttgtagagatagggtcttgct

SEQ ID NO: 118880 - DNA, 22 bp, synthetic construct
  misc_feature 1..22: note = chemically synthesized
  source 1..22: mol_type = other DNA
ttgtagagatagggtcttgctg

SEQ ID NO: 118881 - DNA, 22 bp, synthetic construct
  misc_feature 1..22: note = chemically synthesized
  source 1..22: mol_type = other DNA
tgtagagatagggtcttgctgt

SEQ ID NO: 118882 - DNA, 22 bp, synthetic construct
  misc_feature 1..22: note = chemically synthesized
  source 1..22: mol_type = other DNA
gtagagatagggtcttgctgta

SEQ ID NO: 118883 - DNA, 22 bp, synthetic construct
  misc_feature 1..22: note = chemically synthesized
  source 1..22: mol_type = other DNA
tagagatagggtcttgctgtat

SEQ ID NO: 118884 - DNA, 22 bp, synthetic construct
  misc_feature 1..22: note = chemically synthesized
  source 1..22: mol_type = other DNA
gctgtattgttcaggctggtct

SEQ ID NO: 118885 - DNA, 22 bp, synthetic construct
  misc_feature 1..22: note = chemically synthesized
  source 1..22: mol_type = other DNA
ctgtattgttcaggctggtctc

SEQ ID NO: 118886 - DNA, 22 bp, synthetic construct
  misc_feature 1..22: note = chemically synthesized
  source 1..22: mol_type = other DNA
tattgttcaggctggtctcaaa

SEQ ID NO: 118887 - DNA, 22 bp, synthetic construct
  misc_feature 1..22: note = chemically synthesized
  source 1..22: mol_type = other DNA
ttcaggctggtctcaaactcct

SEQ ID NO: 118888 - DNA, 22 bp, synthetic construct
  misc_feature 1..22: note = chemically synthesized
  source 1..22: mol_type = other DNA
aggctggtctcaaactcctgga

SEQ ID NO: 118889 - DNA, 22 bp, synthetic construct
  misc_feature 1..22: note = chemically synthesized
  source 1..22: mol_type = other DNA
gtctcaaactcctggactcaag

SEQ ID NO: 118890 - DNA, 22 bp, synthetic construct
  misc_feature 1..22: note = chemically synthesized
  source 1..22: mol_type = other DNA
aaactcctggactcaagtaatc

SEQ ID NO: 118891 - DNA, 22 bp, synthetic construct
  misc_feature 1..22: note = chemically synthesized
  source 1..22: mol_type = other DNA
ctggactcaagtaatcttcttg

SEQ ID NO: 118892 - DNA, 22 bp, synthetic construct
  misc_feature 1..22: note = chemically synthesized
  source 1..22: mol_type = other DNA
gactcaagtaatcttcttgcct

SEQ ID NO: 118893 - DNA, 22 bp, synthetic construct
  misc_feature 1..22: note = chemically synthesized
  source 1..22: mol_type = other DNA
aagtaatcttcttgcctgaagt

SEQ ID NO: 118894 - DNA, 22 bp, synthetic construct
  misc_feature 1..22: note = chemically synthesized
  source 1..22: mol_type = other DNA
cttgcctgaagttggtctcaaa

SEQ ID NO: 118895 - DNA, 22 bp, synthetic construct
  misc_feature 1..22: note = chemically synthesized
  source 1..22: mol_type = other DNA
ttgcctgaagttggtctcaaac

SEQ ID NO: 118896 - DNA, 22 bp, synthetic construct
  misc_feature 1..22: note = chemically synthesized
  source 1..22: mol_type = other DNA
gcctgaagttggtctcaaactc

SEQ ID NO: 118897 - DNA, 22 bp, synthetic construct
  misc_feature 1..22: note = chemically synthesized
  source 1..22: mol_type = other DNA
cctgaagttggtctcaaactcc

SEQ ID NO: 118898 - DNA, 22 bp, synthetic construct
  misc_feature 1..22: note = chemically synthesized
  source 1..22: mol_type = other DNA
aagttggtctcaaactcctggc

SEQ ID NO: 118899 - DNA, 22 bp, synthetic construct
  misc_feature 1..22: note = chemically synthesized
  source 1..22: mol_type = other DNA
gtctcaaactcctggccttcag

SEQ ID NO: 118900 - DNA, 22 bp, synthetic construct
  misc_feature 1..22: note = chemically synthesized
  source 1..22: mol_type = other DNA
aaactcctggccttcagcaatc

SEQ ID NO: 118901 - DNA, 22 bp, synthetic construct
  misc_feature 1..22: note = chemically synthesized
  source 1..22: mol_type = other DNA
ctggccttcagcaatcctccca

SEQ ID NO: 118902 - DNA, 22 bp, synthetic construct
  misc_feature 1..22: note = chemically synthesized
  source 1..22: mol_type = other DNA
gccttcagcaatcctcccacct

SEQ ID NO: 118903 - DNA, 22 bp, synthetic construct
  misc_feature 1..22: note = chemically synthesized
  source 1..22: mol_type = other DNA
cagcaatcctcccaccttggtc

SEQ ID NO: 118904 - DNA, 22 bp, synthetic construct
  misc_feature 1..22: note = chemically synthesized
  source 1..22: mol_type = other DNA
agcaatcctcccaccttggtct

SEQ ID NO: 118905 - DNA, 22 bp, synthetic construct
  misc_feature 1..22: note = chemically synthesized
  source 1..22: mol_type = other DNA
ccaccttggtctcccaaagtgc

SEQ ID NO: 118906 - DNA, 22 bp, synthetic construct
  misc_feature 1..22: note = chemically synthesized
  source 1..22: mol_type = other DNA
ggtctcccaaagtgctgggatt

SEQ ID NO: 118907 - DNA, 22 bp, synthetic construct
  misc_feature 1..22: note = chemically synthesized
  source 1..22: mol_type = other DNA
gtctcccaaagtgctgggatta

SEQ ID NO: 118908 - DNA, 22 bp, synthetic construct
  misc_feature 1..22: note = chemically synthesized
  source 1..22: mol_type = other DNA
ccaaagtgctgggattatagca

SEQ ID NO: 118909 - DNA, 22 bp, synthetic construct
  misc_feature 1..22: note = chemically synthesized
  source 1..22: mol_type = other DNA
ggattatagcataagccaccgt

SEQ ID NO: 118910 - DNA, 22 bp, synthetic construct
  misc_feature 1..22: note = chemically synthesized
  source 1..22: mol_type = other DNA
tagcataagccaccgtgcctgg

SEQ ID NO: 118911 - DNA, 22 bp, synthetic construct
  misc_feature 1..22: note = chemically synthesized
  source 1..22: mol_type = other DNA
gcctcatggtaattttaacctg

SEQ ID NO: 118912 - DNA, 22 bp, synthetic construct
  misc_feature 1..22: note = chemically synthesized
  source 1..22: mol_type = other DNA
atggtaattttaacctgtagga

SEQ ID NO: 118913 - DNA, 22 bp, synthetic construct
  misc_feature 1..22: note = chemically synthesized
  source 1..22: mol_type = other DNA
taacctgtaggagaatgggtgg

SEQ ID NO: 118914 - DNA, 22 bp, synthetic construct
  misc_feature 1..22: note = chemically synthesized
  source 1..22: mol_type = other DNA
aacctgtaggagaatgggtggg

SEQ ID NO: 118915 - DNA, 22 bp, synthetic construct
  misc_feature 1..22: note = chemically synthesized
  source 1..22: mol_type = other DNA
acctgtaggagaatgggtggga

SEQ ID NO: 118916 - DNA, 22 bp, synthetic construct
  misc_feature 1..22: note = chemically synthesized
  source 1..22: mol_type = other DNA
taggagaatgggtgggaggatc

SEQ ID NO: 118917 - DNA, 22 bp, synthetic construct
  misc_feature 1..22: note = chemically synthesized
  source 1..22: mol_type = other DNA
agtaaagtagaactgggacaat

SEQ ID NO: 118918 - DNA, 22 bp, synthetic construct
  misc_feature 1..22: note = chemically synthesized
  source 1..22: mol_type = other DNA
ggacaatgaagatataccacct

SEQ ID NO: 118919 - DNA, 22 bp, synthetic construct
  misc_feature 1..22: note = chemically synthesized
  source 1..22: mol_type = other DNA
gatggatgccagcagaaaggtg

SEQ ID NO: 118920 - DNA, 22 bp, synthetic construct
  misc_feature 1..22: note = chemically synthesized
  source 1..22: mol_type = other DNA
atggatgccagcagaaaggtgt

SEQ ID NO: 118921 - DNA, 22 bp, synthetic construct
  misc_feature 1..22: note = chemically synthesized
  source 1..22: mol_type = other DNA
cttgggcttctgaatgtgaaga

SEQ ID NO: 118922 - DNA, 22 bp, synthetic construct
  misc_feature 1..22: note = chemically synthesized
  source 1..22: mol_type = other DNA
ttgggcttctgaatgtgaagag

SEQ ID NO: 118923 - DNA, 22 bp, synthetic construct
  misc_feature 1..22: note = chemically synthesized
  source 1..22: mol_type = other DNA
gggcttctgaatgtgaagagga

SEQ ID NO: 118924 - DNA, 22 bp, synthetic construct
  misc_feature 1..22: note = chemically synthesized
  source 1..22: mol_type = other DNA
ggcttctgaatgtgaagaggag

SEQ ID NO: 118925 - DNA, 22 bp, synthetic construct
  misc_feature 1..22: note = chemically synthesized
  source 1..22: mol_type = other DNA
ctgaatgtgaagaggaggagtt

SEQ ID NO: 118926 - DNA, 22 bp, synthetic construct
  misc_feature 1..22: note = chemically synthesized
  source 1..22: mol_type = other DNA
tgaatgtgaagaggaggagttc

SEQ ID NO: 118927 - DNA, 22 bp, synthetic construct
  misc_feature 1..22: note = chemically synthesized
  source 1..22: mol_type = other DNA
aatgtgaagaggaggagttcct

SEQ ID NO: 118928 - DNA, 22 bp, synthetic construct
  misc_feature 1..22: note = chemically synthesized
  source 1..22: mol_type = other DNA
ctcgagacaagaagagaacttc

SEQ ID NO: 118929 - DNA, 22 bp, synthetic construct
  misc_feature 1..22: note = chemically synthesized
  source 1..22: mol_type = other DNA
gagacaagaagagaacttctgt

SEQ ID NO: 118930 - DNA, 22 bp, synthetic construct
  misc_feature 1..22: note = chemically synthesized
  source 1..22: mol_type = other DNA
ctgttagctctggatccctctt

SEQ ID NO: 118931 - DNA, 22 bp, synthetic construct
  misc_feature 1..22: note = chemically synthesized
  source 1..22: mol_type = other DNA
tgttagctctggatccctcttt

SEQ ID NO: 118932 - DNA, 22 bp, synthetic construct
  misc_feature 1..22: note = chemically synthesized
  source 1..22: mol_type = other DNA
ttagctctggatccctctttat

SEQ ID NO: 118933 - DNA, 22 bp, synthetic construct
  misc_feature 1..22: note = chemically synthesized
  source 1..22: mol_type = other DNA
gctctggatccctctttatgta

SEQ ID NO: 118934 - DNA, 22 bp, synthetic construct
  misc_feature 1..22: note = chemically synthesized
  source 1..22: mol_type = other DNA
tggatccctctttatgtatcta

SEQ ID NO: 118935 - DNA, 22 bp, synthetic construct
  misc_feature 1..22: note = chemically synthesized
  source 1..22: mol_type = other DNA
gatccctctttatgtatctata

SEQ ID NO: 118936 - DNA, 22 bp, synthetic construct
  misc_feature 1..22: note = chemically synthesized
  source 1..22: mol_type = other DNA
tttatgtatctatatgtccacg

SEQ ID NO: 118937 - DNA, 22 bp, synthetic construct
  misc_feature 1..22: note = chemically synthesized
  source 1..22: mol_type = other DNA
tatgtatctatatgtccacgca

SEQ ID NO: 118938 - DNA, 22 bp, synthetic construct
  misc_feature 1..22: note = chemically synthesized
  source 1..22: mol_type = other DNA
atgtatctatatgtccacgcat

SEQ ID NO: 118939 - DNA, 22 bp, synthetic construct
  misc_feature 1..22: note = chemically synthesized
  source 1..22: mol_type = other DNA
tgtatctatatgtccacgcata

SEQ ID NO: 118940 - DNA, 22 bp, synthetic construct
  misc_feature 1..22: note = chemically synthesized
  source 1..22: mol_type = other DNA
tatgtccacgcatacatttaat

SEQ ID NO: 118941 - DNA, 22 bp, synthetic construct
  misc_feature 1..22: note = chemically synthesized
  source 1..22: mol_type = other DNA
aatatttattgagtatatggca

SEQ ID NO: 118942 - DNA, 22 bp, synthetic construct
  misc_feature 1..22: note = chemically synthesized
  source 1..22: mol_type = other DNA
atatttattgagtatatggcat

SEQ ID NO: 118943 - DNA, 22 bp, synthetic construct
  misc_feature 1..22: note = chemically synthesized
  source 1..22: mol_type = other DNA
attgagtatatggcatgtgcta

SEQ ID NO: 118944 - DNA, 22 bp, synthetic construct
  misc_feature 1..22: note = chemically synthesized
  source 1..22: mol_type = other DNA
ttgagtatatggcatgtgctag

SEQ ID NO: 118945 - DNA, 22 bp, synthetic construct
  misc_feature 1..22: note = chemically synthesized
  source 1..22: mol_type = other DNA
agtatatggcatgtgctaggca

SEQ ID NO: 118946 - DNA, 22 bp, synthetic construct
  misc_feature 1..22: note = chemically synthesized
  source 1..22: mol_type = other DNA
ggcattgtatttatatacattt

SEQ ID NO: 118947 - DNA, 22 bp, synthetic construct
  misc_feature 1..22: note = chemically synthesized
  source 1..22: mol_type = other DNA
tatttatatacatttactggcg

SEQ ID NO: 118948 - DNA, 22 bp, synthetic construct
  misc_feature 1..22: note = chemically synthesized
  source 1..22: mol_type = other DNA
atatacatttactggcgagcaa

SEQ ID NO: 118949 - DNA, 22 bp, synthetic construct
  misc_feature 1..22: note = chemically synthesized
  source 1..22: mol_type = other DNA
tatacatttactggcgagcaag

SEQ ID NO: 118950 - DNA, 22 bp, synthetic construct
  misc_feature 1..22: note = chemically synthesized
  source 1..22: mol_type = other DNA
actggcgagcaagacatgccta

SEQ ID NO: 118951 - DNA, 22 bp, synthetic construct
  misc_feature 1..22: note = chemically synthesized
  source 1..22: mol_type = other DNA
ctggcgagcaagacatgcctaa

SEQ ID NO: 118952 - DNA, 22 bp, synthetic construct
  misc_feature 1..22: note = chemically synthesized
  source 1..22: mol_type = other DNA
gcgagcaagacatgcctaattc

SEQ ID NO: 118953 - DNA, 22 bp, synthetic construct
  misc_feature 1..22: note = chemically synthesized
  source 1..22: mol_type = other DNA
attcctccagggatcttgattt

SEQ ID NO: 118954 - DNA, 22 bp, synthetic construct
  misc_feature 1..22: note = chemically synthesized
  source 1..22: mol_type = other DNA
ctccagggatcttgatttagtc

SEQ ID NO: 118955 - DNA, 22 bp, synthetic construct
  misc_feature 1..22: note = chemically synthesized
  source 1..22: mol_type = other DNA
cagggatcttgatttagtcatt

SEQ ID NO: 118956 - DNA, 22 bp, synthetic construct
  misc_feature 1..22: note = chemically synthesized
  source 1..22: mol_type = other DNA
gatttagtcattctaatggaca

SEQ ID NO: 118957 - DNA, 22 bp, synthetic construct
  misc_feature 1..22: note = chemically synthesized
  source 1..22: mol_type = other DNA
atttagtcattctaatggacac

SEQ ID NO: 118958 - DNA, 22 bp, synthetic construct
  misc_feature 1..22: note = chemically synthesized
  source 1..22: mol_type = other DNA
agtcattctaatggacacatgc

SEQ ID NO: 118959 - DNA, 22 bp, synthetic construct
  misc_feature 1..22: note = chemically synthesized
  source 1..22: mol_type = other DNA
gtcattctaatggacacatgca

SEQ ID NO: 118960 - DNA, 22 bp, synthetic construct
  misc_feature 1..22: note = chemically synthesized
  source 1..22: mol_type = other DNA
taatggacacatgcacacacct

SEQ ID NO: 118961 - DNA, 22 bp, synthetic construct
  misc_feature 1..22: note = chemically synthesized
  source 1..22: mol_type = other DNA
atggacacatgcacacaccttc

SEQ ID NO: 118962 - DNA, 22 bp, synthetic construct
  misc_feature 1..22: note = chemically synthesized
  source 1..22: mol_type = other DNA
cataaacaggacattactgtgt

SEQ ID NO: 118963 - DNA, 22 bp, synthetic construct
  misc_feature 1..22: note = chemically synthesized
  source 1..22: mol_type = other DNA
ataaacaggacattactgtgtg

SEQ ID NO: 118964 - DNA, 22 bp, synthetic construct
  misc_feature 1..22: note = chemically synthesized
  source 1..22: mol_type = other DNA
ctgtgtgacaaatgttacaacg

SEQ ID NO: 118965 - DNA, 22 bp, synthetic construct
  misc_feature 1..22: note = chemically synthesized
  source 1..22: mol_type = other DNA
tgtgacaaatgttacaacggga

SEQ ID NO: 118966 - DNA, 22 bp, synthetic construct
  misc_feature 1..22: note = chemically synthesized
  source 1..22: mol_type = other DNA
caacgggaaatgcagggcactg

SEQ ID NO: 118967 - DNA, 22 bp, synthetic construct
  misc_feature 1..22: note = chemically synthesized
  source 1..22: mol_type = other DNA
tggaaggaaaccgatggagcat

SEQ ID NO: 118968 - DNA, 22 bp, synthetic construct
  misc_feature 1..22: note = chemically synthesized
  source 1..22: mol_type = other DNA
ggtgctttaccattggaaaggg

SEQ ID NO: 118969 - DNA, 22 bp, synthetic construct
  misc_feature 1..22: note = chemically synthesized
  source 1..22: mol_type = other DNA
gtgctttaccattggaaaggga

SEQ ID NO: 118970 - DNA, 22 bp, synthetic construct
  misc_feature 1..22: note = chemically synthesized
  source 1..22: mol_type = other DNA
taccattggaaagggaggagct

SEQ ID NO: 118971 - DNA, 22 bp, synthetic construct
  misc_feature 1..22: note = chemically synthesized
  source 1..22: mol_type = other DNA
accattggaaagggaggagcta

SEQ ID NO: 118972 - DNA, 22 bp, synthetic construct
  misc_feature 1..22: note = chemically synthesized
  source 1..22: mol_type = other DNA
ccattggaaagggaggagctat

SEQ ID NO: 118973 - DNA, 22 bp, synthetic construct
  misc_feature 1..22: note = chemically synthesized
  source 1..22: mol_type = other DNA
gaaagggaggagctatctgtga

SEQ ID NO: 118974 - DNA, 22 bp, synthetic construct
  misc_feature 1..22: note = chemically synthesized
  source 1..22: mol_type = other DNA
tctgtgaaaatgtccttgagga

SEQ ID NO: 118975 - DNA, 22 bp, synthetic construct
  misc_feature 1..22: note = chemically synthesized
  source 1..22: mol_type = other DNA
tgaaaatgtccttgaggaagca

SEQ ID NO: 118976 - DNA, 22 bp, synthetic construct
  misc_feature 1..22: note = chemically synthesized
  source 1..22: mol_type = other DNA
gaggaagcaatttcaaagctga

SEQ ID NO: 118977 - DNA, 22 bp, synthetic construct
  misc_feature 1..22: note = chemically synthesized
  source 1..22: mol_type = other DNA
aggaagcaatttcaaagctgag

SEQ ID NO: 118978 - DNA, 22 bp, synthetic construct
  misc_feature 1..22: note = chemically synthesized
  source 1..22: mol_type = other DNA
caaagctgagacccctgcaagg

SEQ ID NO: 118979 - DNA, 22 bp, synthetic construct
  misc_feature 1..22: note = chemically synthesized
  source 1..22: mol_type = other DNA
aaagctgagacccctgcaagga

SEQ ID NO: 118980 - DNA, 22 bp, synthetic construct
  misc_feature 1..22: note = chemically synthesized
  source 1..22: mol_type = other DNA
agacccctgcaaggattgcatt

SEQ ID NO: 118981 - DNA, 22 bp, synthetic construct
  misc_feature 1..22: note = chemically synthesized
  source 1..22: mol_type = other DNA
caaggattgcatttagtcactc

SEQ ID NO: 118982 - DNA, 22 bp, synthetic construct
  misc_feature 1..22: note = chemically synthesized
  source 1..22: mol_type = other DNA
catttagtcactcgtagggaca

SEQ ID NO: 118983 - DNA, 22 bp, synthetic construct
  misc_feature 1..22: note = chemically synthesized
  source 1..22: mol_type = other DNA
agtcactcgtagggacaggctg

SEQ ID NO: 118984 - DNA, 22 bp, synthetic construct
  misc_feature 1..22: note = chemically synthesized
  source 1..22: mol_type = other DNA
gtcactcgtagggacaggctga

SEQ ID NO: 118985 - DNA, 22 bp, synthetic construct
  misc_feature 1..22: note = chemically synthesized
  source 1..22: mol_type = other DNA
gtagggacaggctgatcagcca

SEQ ID NO: 118986 - DNA, 22 bp, synthetic construct
  misc_feature 1..22: note = chemically synthesized
  source 1..22: mol_type = other DNA
atcagccaatgtaaagtttatt

SEQ ID NO: 118987 - DNA, 22 bp, synthetic construct
  misc_feature 1..22: note = chemically synthesized
  source 1..22: mol_type = other DNA
atttcctcctgagcaatgggat

SEQ ID NO: 118988 - DNA, 22 bp, synthetic construct
  misc_feature 1..22: note = chemically synthesized
  source 1..22: mol_type = other DNA
tttcctcctgagcaatgggatt

SEQ ID NO: 118989 - DNA, 22 bp, synthetic construct
  misc_feature 1..22: note = chemically synthesized
  source 1..22: mol_type = other DNA
cctcctgagcaatgggattgtg

SEQ ID NO: 118990 - DNA, 22 bp, synthetic construct
  misc_feature 1..22: note = chemically synthesized
  source 1..22: mol_type = other DNA
ctcctgagcaatgggattgtga

SEQ ID NO: 118991 - DNA, 22 bp, synthetic construct
  misc_feature 1..22: note = chemically synthesized
  source 1..22: mol_type = other DNA
ctgagcaatgggattgtgactt

SEQ ID NO: 118992 - DNA, 22 bp, synthetic construct
  misc_feature 1..22: note = chemically synthesized
  source 1..22: mol_type = other DNA
agcaatgggattgtgacttcaa

SEQ ID NO: 118993 - DNA, 22 bp, synthetic construct
  misc_feature 1..22: note = chemically synthesized
  source 1..22: mol_type = other DNA
tgacttcaatatgtttgtgtga

SEQ ID NO: 118994 - DNA, 22 bp, synthetic construct
  misc_feature 1..22: note = chemically synthesized
  source 1..22: mol_type = other DNA
caatatgtttgtgtgagtttcc

SEQ ID NO: 118995 - DNA, 22 bp, synthetic construct
  misc_feature 1..22: note = chemically synthesized
  source 1..22: mol_type = other DNA
aatatgtttgtgtgagtttcct

SEQ ID NO: 118996 - DNA, 22 bp, synthetic construct
  misc_feature 1..22: note = chemically synthesized
  source 1..22: mol_type = other DNA
gtgtgagtttccttggctgaag

SEQ ID NO: 118997 - DNA, 22 bp, synthetic construct
  misc_feature 1..22: note = chemically synthesized
  source 1..22: mol_type = other DNA
tgtgagtttccttggctgaagc

SEQ ID NO: 118998 - DNA, 22 bp, synthetic construct
  misc_feature 1..22: note = chemically synthesized
  source 1..22: mol_type = other DNA
ccttggctgaagctttctcacg

SEQ ID NO: 118999 - DNA, 22 bp, synthetic construct
  misc_feature 1..22: note = chemically synthesized
  source 1..22: mol_type = other DNA
cttggctgaagctttctcacgt

SEQ ID NO: 119000 - DNA, 22 bp, synthetic construct
  misc_feature 1..22: note = chemically synthesized
  source 1..22: mol_type = other DNA
ggctgaagctttctcacgttac

SEQ ID NO: 119001 - DNA, 22 bp, synthetic construct
  misc_feature 1..22: note = chemically synthesized
  source 1..22: mol_type = other DNA
gctgaagctttctcacgttaca

SEQ ID NO: 119002 - DNA, 22 bp, synthetic construct
  misc_feature 1..22: note = chemically synthesized
  source 1..22: mol_type = other DNA
aagctttctcacgttacatgtc

SEQ ID NO: 119003 - DNA, 22 bp, synthetic construct
  misc_feature 1..22: note = chemically synthesized
  source 1..22: mol_type = other DNA
tctcacgttacatgtcattgtt

SEQ ID NO: 119004 - DNA, 22 bp, synthetic construct
  misc_feature 1..22: note = chemically synthesized
  source 1..22: mol_type = other DNA
ctcacgttacatgtcattgttc

SEQ ID NO: 119005 - DNA, 22 bp, synthetic construct
  misc_feature 1..22: note = chemically synthesized
  source 1..22: mol_type = other DNA
tcacgttacatgtcattgttca

SEQ ID NO: 119006 - DNA, 22 bp, synthetic construct
  misc_feature 1..22: note = chemically synthesized
  source 1..22: mol_type = other DNA
acgttacatgtcattgttcaat

SEQ ID NO: 119007 - DNA, 22 bp, synthetic construct
  misc_feature 1..22: note = chemically synthesized
  source 1..22: mol_type = other DNA
catgtcattgttcaatatcaca

SEQ ID NO: 119008 - DNA, 22 bp, synthetic construct
  misc_feature 1..22: note = chemically synthesized
  source 1..22: mol_type = other DNA
ttcaatatcacacaactaaaac

SEQ ID NO: 119009 - DNA, 22 bp, synthetic construct
  misc_feature 1..22: note = chemically synthesized
  source 1..22: mol_type = other DNA
aatatcacacaactaaaacacc

SEQ ID NO: 119010 - DNA, 22 bp, synthetic construct
  misc_feature 1..22: note = chemically synthesized
  source 1..22: mol_type = other DNA
aaacacctacaagtaaatactg

SEQ ID NO: 119011 - DNA, 22 bp, synthetic construct
  misc_feature 1..22: note = chemically synthesized
  source 1..22: mol_type = other DNA
caagtaaatactgactgtagct

SEQ ID NO: 119012 - DNA, 22 bp, synthetic construct
  misc_feature 1..22: note = chemically synthesized
  source 1..22: mol_type = other DNA
actgtagcttaatgtcagactt

SEQ ID NO: 119013 - DNA, 22 bp, synthetic construct
  misc_feature 1..22: note = chemically synthesized
  source 1..22: mol_type = other DNA
tagcttaatgtcagacttgagg

SEQ ID NO: 119014 - DNA, 22 bp, synthetic construct
  misc_feature 1..22: note = chemically synthesized
  source 1..22: mol_type = other DNA
aatgtcagacttgaggttgtaa

SEQ ID NO: 119015 - DNA, 22 bp, synthetic construct
  misc_feature 1..22: note = chemically synthesized
  source 1..22: mol_type = other DNA
atgtcagacttgaggttgtaag

SEQ ID NO: 119016 - DNA, 22 bp, synthetic construct
  misc_feature 1..22: note = chemically synthesized
  source 1..22: mol_type = other DNA
gaggttgtaaggtaaaatcaga

SEQ ID NO: 119017 - DNA, 22 bp, synthetic construct
  misc_feature 1..22: note = chemically synthesized
  source 1..22: mol_type = other DNA
aggttgtaaggtaaaatcagag

SEQ ID NO: 119018 - DNA, 22 bp, synthetic construct
  misc_feature 1..22: note = chemically synthesized
  source 1..22: mol_type = other DNA
taaggtaaaatcagagatgaga

SEQ ID NO: 119019 - DNA, 22 bp, synthetic construct
  misc_feature 1..22: note = chemically synthesized
  source 1..22: mol_type = other DNA
ttcttctagaggaatatggtca

SEQ ID NO: 119020 - DNA, 22 bp, synthetic construct
  misc_feature 1..22: note = chemically synthesized
  source 1..22: mol_type = other DNA
cttctagaggaatatggtcagg

SEQ ID NO: 119021 - DNA, 22 bp, synthetic construct
  misc_feature 1..22: note = chemically synthesized
  source 1..22: mol_type = other DNA
ttctagaggaatatggtcagga

SEQ ID NO: 119022 - DNA, 22 bp, synthetic construct
  misc_feature 1..22: note = chemically synthesized
  source 1..22: mol_type = other DNA
ctagaggaatatggtcaggaga

SEQ ID NO: 119023 - DNA, 22 bp, synthetic construct
  misc_feature 1..22: note = chemically synthesized
  source 1..22: mol_type = other DNA
tagaggaatatggtcaggagag

SEQ ID NO: 119024 - DNA, 22 bp, synthetic construct
  misc_feature 1..22: note = chemically synthesized
  source 1..22: mol_type = other DNA
gaggaatatggtcaggagagag

SEQ ID NO: 119025 - DNA, 22 bp, synthetic construct
  misc_feature 1..22: note = chemically synthesized
  source 1..22: mol_type = other DNA
agaaatttgggggggtgttgct

SEQ ID NO: 119026 - DNA, 22 bp, synthetic construct
  misc_feature 1..22: note = chemically synthesized
  source 1..22: mol_type = other DNA
gaaatttgggggggtgttgctt

SEQ ID NO: 119027 - DNA, 22 bp, synthetic construct
  misc_feature 1..22: note = chemically synthesized
  source 1..22: mol_type = other DNA
gggggggtgttgcttgaaacag

SEQ ID NO: 119028 - DNA, 22 bp, synthetic construct
  misc_feature 1..22: note = chemically synthesized
  source 1..22: mol_type = other DNA
ggggggtgttgcttgaaacagg

SEQ ID NO: 119029 - DNA, 22 bp, synthetic construct
  misc_feature 1..22: note = chemically synthesized
  source 1..22: mol_type = other DNA
cttgaaacaggtgttgaggaag

SEQ ID NO: 119030 - DNA, 22 bp, synthetic construct
  misc_feature 1..22: note = chemically synthesized
  source 1..22: mol_type = other DNA
gaaacaggtgttgaggaagaat

SEQ ID NO: 119031 - DNA, 22 bp, synthetic construct
  misc_feature 1..22: note = chemically synthesized
  source 1..22: mol_type = other DNA
aaacaggtgttgaggaagaatg

SEQ ID NO: 119032 - DNA, 22 bp, synthetic construct
  misc_feature 1..22: note = chemically synthesized
  source 1..22: mol_type = other DNA
aggaagaatgcaggagttctga

SEQ ID NO: 119033 - DNA, 22 bp, synthetic construct
  misc_feature 1..22: note = chemically synthesized
  source 1..22: mol_type = other DNA
tgaggtttctgatgtgacttgg

SEQ ID NO: 119034 - DNA, 22 bp, synthetic construct
  misc_feature 1..22: note = chemically synthesized
  source 1..22: mol_type = other DNA
aggtttctgatgtgacttgggg

SEQ ID NO: 119035 - DNA, 22 bp, synthetic construct
  misc_feature 1..22: note = chemically synthesized
  source 1..22: mol_type = other DNA
ctgatgtgacttgggggtctga

SEQ ID NO: 119036 - DNA, 22 bp, synthetic construct
  misc_feature 1..22: note = chemically synthesized
  source 1..22: mol_type = other DNA
tgatgtgacttgggggtctgaa

SEQ ID NO: 119037 - DNA, 22 bp, synthetic construct
  misc_feature 1..22: note = chemically synthesized
  source 1..22: mol_type = other DNA
atgtgacttgggggtctgaaag

SEQ ID NO: 119038 - DNA, 22 bp, synthetic construct
  misc_feature 1..22: note = chemically synthesized
  source 1..22: mol_type = other DNA
gggggtctgaaagttactgctg

SEQ ID NO: 119039 - DNA, 22 bp, synthetic construct
  misc_feature 1..22: note = chemically synthesized
  source 1..22: mol_type = other DNA
ggggtctgaaagttactgctga

SEQ ID NO: 119040 - DNA, 22 bp, synthetic construct
  misc_feature 1..22: note = chemically synthesized
  source 1..22: mol_type = other DNA
aaagttactgctgaccaggata

SEQ ID NO: 119041 - DNA, 22 bp, synthetic construct
  misc_feature 1..22: note = chemically synthesized
  source 1..22: mol_type = other DNA
ctgctgaccaggatagaaaaag

SEQ ID NO: 119042 - DNA, 22 bp, synthetic construct
  misc_feature 1..22: note = chemically synthesized
  source 1..22: mol_type = other DNA
ctgaccaggatagaaaaagatg

SEQ ID NO: 119043 - DNA, 22 bp, synthetic construct
  misc_feature 1..22: note = chemically synthesized
  source 1..22: mol_type = other DNA
accaggatagaaaaagatgaga

SEQ ID NO: 119044 - DNA, 22 bp, synthetic construct
  misc_feature 1..22: note = chemically synthesized
  source 1..22: mol_type = other DNA
ggccaggtagataagatggaag

SEQ ID NO: 119045 - DNA, 22 bp, synthetic construct
  misc_feature 1..22: note = chemically synthesized
  source 1..22: mol_type = other DNA
gccaggtagataagatggaagc

SEQ ID NO: 119046 - DNA, 22 bp, synthetic construct
  misc_feature 1..22: note = chemically synthesized
  source 1..22: mol_type = other DNA
ccggaggtgagttagagcaaat

SEQ ID NO: 119047 - DNA, 22 bp, synthetic construct
  misc_feature 1..22: note = chemically synthesized
  source 1..22: mol_type = other DNA
cggaggtgagttagagcaaatg

SEQ ID NO: 119048 - DNA, 22 bp, synthetic construct
  misc_feature 1..22: note = chemically synthesized
  source 1..22: mol_type = other DNA
gagcaaatggcatttacctggt

SEQ ID NO: 119049 - DNA, 22 bp, synthetic construct
  misc_feature 1..22: note = chemically synthesized
  source 1..22: mol_type = other DNA
acctggtctctgccaggctctc

SEQ ID NO: 119050 - DNA, 22 bp, synthetic construct
  misc_feature 1..22: note = chemically synthesized
  source 1..22: mol_type = other DNA
cctggtctctgccaggctctcc

SEQ ID NO: 119051 - DNA, 22 bp, synthetic construct
  misc_feature 1..22: note = chemically synthesized
  source 1..22: mol_type = other DNA
gtctctgccaggctctcctctg

SEQ ID NO: 119052 - DNA, 22 bp, synthetic construct
  misc_feature 1..22: note = chemically synthesized
  source 1..22: mol_type = other DNA
tgccaggctctcctctgggtgc

SEQ ID NO: 119053 - DNA, 22 bp, synthetic construct
  misc_feature 1..22: note = chemically synthesized
  source 1..22: mol_type = other DNA
ccaggctctcctctgggtgctc

SEQ ID NO: 119054 - DNA, 22 bp, synthetic construct
  misc_feature 1..22: note = chemically synthesized
  source 1..22: mol_type = other DNA
tcctctgggtgctctggtattt

SEQ ID NO: 119055 - DNA, 22 bp, synthetic construct
  misc_feature 1..22: note = chemically synthesized
  source 1..22: mol_type = other DNA
ctctgggtgctctggtatttat

SEQ ID NO: 119056 - DNA, 22 bp, synthetic construct
  misc_feature 1..22: note = chemically synthesized
  source 1..22: mol_type = other DNA
tgggtgctctggtatttattgt

SEQ ID NO: 119057 - DNA, 22 bp, synthetic construct
  misc_feature 1..22: note = chemically synthesized
  source 1..22: mol_type = other DNA
ggtgctctggtatttattgttc

SEQ ID NO: 119058 - DNA, 22 bp, synthetic construct
  misc_feature 1..22: note = chemically synthesized
  source 1..22: mol_type = other DNA
tggtatttattgttctttttag

SEQ ID NO: 119059 - DNA, 22 bp, synthetic construct
  misc_feature 1..22: note = chemically synthesized
  source 1..22: mol_type = other DNA
gtatttattgttctttttagtt

SEQ ID NO: 119060 - DNA, 22 bp, synthetic construct
  misc_feature 1..22: note = chemically synthesized
  source 1..22: mol_type = other DNA
attgttctttttagtttttatt

SEQ ID NO: 119061 - DNA, 22 bp, synthetic construct
  misc_feature 1..22: note = chemically synthesized
  source 1..22: mol_type = other DNA
ttgttctttttagtttttattt

SEQ ID NO: 119062 - DNA, 22 bp, synthetic construct
  misc_feature 1..22: note = chemically synthesized
  source 1..22: mol_type = other DNA
ttctttttagtttttatttagt

SEQ ID NO: 119063 - DNA, 22 bp, synthetic construct
  misc_feature 1..22: note = chemically synthesized
  source 1..22: mol_type = other DNA
tttttagtttttatttagtttc

SEQ ID NO: 119064 - DNA, 22 bp, synthetic construct
  misc_feature 1..22: note = chemically synthesized
  source 1..22: mol_type = other DNA
tttagtttttatttagtttcat

SEQ ID NO: 119065 - DNA, 22 bp, synthetic construct
  misc_feature 1..22: note = chemically synthesized
  source 1..22: mol_type = other DNA
ttagtttttatttagtttcatt

SEQ ID NO: 119066 - DNA, 22 bp, synthetic construct
  misc_feature 1..22: note = chemically synthesized
  source 1..22: mol_type = other DNA
tagtttttatttagtttcattt

SEQ ID NO: 119067 - DNA, 22 bp, synthetic construct
  misc_feature 1..22: note = chemically synthesized
  source 1..22: mol_type = other DNA
agtttttatttagtttcatttt

SEQ ID NO: 119068 - DNA, 22 bp, synthetic construct
  misc_feature 1..22: note = chemically synthesized
  source 1..22: mol_type = other DNA
gtttttatttagtttcatttta

SEQ ID NO: 119069 - DNA, 22 bp, synthetic construct
  misc_feature 1..22: note = chemically synthesized
  source 1..22: mol_type = other DNA
ttatttagtttcattttagttt

SEQ ID NO: 119070 - DNA, 22 bp, synthetic construct
  misc_feature 1..22: note = chemically synthesized
  source 1..22: mol_type = other DNA
tatttagtttcattttagtttt

SEQ ID NO: 119071 - DNA, 22 bp, synthetic construct
  misc_feature 1..22: note = chemically synthesized
  source 1..22: mol_type = other DNA
atttagtttcattttagtttta

SEQ ID NO: 119072 - DNA, 22 bp, synthetic construct
  misc_feature 1..22: note = chemically synthesized
  source 1..22: mol_type = other DNA
tttagtttcattttagttttag

SEQ ID NO: 119073 - DNA, 22 bp, synthetic construct
  misc_feature 1..22: note = chemically synthesized
  source 1..22: mol_type = other DNA
agtttcattttagttttagtta

SEQ ID NO: 119074 - DNA, 22 bp, synthetic construct
  misc_feature 1..22: note = chemically synthesized
  source 1..22: mol_type = other DNA
gtttcattttagttttagttac

SEQ ID NO: 119075 - DNA, 22 bp, synthetic construct
  misc_feature 1..22: note = chemically synthesized
  source 1..22: mol_type = other DNA
cattttagttttagttacattg

SEQ ID NO: 119076 - DNA, 22 bp, synthetic construct
  misc_feature 1..22: note = chemically synthesized
  source 1..22: mol_type = other DNA
attttagttttagttacattga

SEQ ID NO: 119077 - DNA, 22 bp, synthetic construct
  misc_feature 1..22: note = chemically synthesized
  source 1..22: mol_type = other DNA
tagttttagttacattgatgat

SEQ ID NO: 119078 - DNA, 22 bp, synthetic construct
  misc_feature 1..22: note = chemically synthesized
  source 1..22: mol_type = other DNA
agttttagttacattgatgatg

SEQ ID NO: 119079 - DNA, 22 bp, synthetic construct
  misc_feature 1..22: note = chemically synthesized
  source 1..22: mol_type = other DNA
gttttagttacattgatgatga

SEQ ID NO: 119080 - DNA, 22 bp, synthetic construct
  misc_feature 1..22: note = chemically synthesized
  source 1..22: mol_type = other DNA
tagttacattgatgatgacctt

SEQ ID NO: 119081 - DNA, 22 bp, synthetic construct
  misc_feature 1..22: note = chemically synthesized
  source 1..22: mol_type = other DNA
agttacattgatgatgaccttc

SEQ ID NO: 119082 - DNA, 22 bp, synthetic construct
  misc_feature 1..22: note = chemically synthesized
  source 1..22: mol_type = other DNA
gttacattgatgatgaccttca

SEQ ID NO: 119083 - DNA, 22 bp, synthetic construct
  misc_feature 1..22: note = chemically synthesized
  source 1..22: mol_type = other DNA
cattgatgatgaccttcaataa

SEQ ID NO: 119084 - DNA, 22 bp, synthetic construct
  misc_feature 1..22: note = chemically synthesized
  source 1..22: mol_type = other DNA
atgatgaccttcaataaagttg

SEQ ID NO: 119085 - DNA, 22 bp, synthetic construct
  misc_feature 1..22: note = chemically synthesized
  source 1..22: mol_type = other DNA
caataaagttgccttctggata

SEQ ID NO: 119086 - DNA, 22 bp, synthetic construct
  misc_feature 1..22: note = chemically synthesized
  source 1..22: mol_type = other DNA
aataaagttgccttctggatag

SEQ ID NO: 119087 - DNA, 22 bp, synthetic construct
  misc_feature 1..22: note = chemically synthesized
  source 1..22: mol_type = other DNA
ccttctggatagctttgatgct

SEQ ID NO: 119088 - DNA, 22 bp, synthetic construct
  misc_feature 1..22: note = chemically synthesized
  source 1..22: mol_type = other DNA
ctggatagctttgatgctacca

SEQ ID NO: 119089 - DNA, 22 bp, synthetic construct
  misc_feature 1..22: note = chemically synthesized
  source 1..22: mol_type = other DNA
tggatagctttgatgctaccaa

SEQ ID NO: 119090 - DNA, 22 bp, synthetic construct
  misc_feature 1..22: note = chemically synthesized
  source 1..22: mol_type = other DNA
gatagctttgatgctaccaaaa

SEQ ID NO: 119091 - DNA, 22 bp, synthetic construct
  misc_feature 1..22: note = chemically synthesized
  source 1..22: mol_type = other DNA
tgatgctaccaaaaatgccagt

SEQ ID NO: 119092 - DNA, 22 bp, synthetic construct
  misc_feature 1..22: note = chemically synthesized
  source 1..22: mol_type = other DNA
gatgctaccaaaaatgccagtt

SEQ ID NO: 119093 - DNA, 22 bp, synthetic construct
  misc_feature 1..22: note = chemically synthesized
  source 1..22: mol_type = other DNA
atgctaccaaaaatgccagttc

SEQ ID NO: 119094 - DNA, 22 bp, synthetic construct
  misc_feature 1..22: note = chemically synthesized
  source 1..22: mol_type = other DNA
ccaaaaatgccagttctcagct

SEQ ID NO: 119095 - DNA, 22 bp, synthetic construct
  misc_feature 1..22: note = chemically synthesized
  source 1..22: mol_type = other DNA
tcagctgtaggaggagccatta

SEQ ID NO: 119096 - DNA, 22 bp, synthetic construct
  misc_feature 1..22: note = chemically synthesized
  source 1..22: mol_type = other DNA
agctgtaggaggagccattaaa

SEQ ID NO: 119097 - DNA, 22 bp, synthetic construct
  misc_feature 1..22: note = chemically synthesized
  source 1..22: mol_type = other DNA
taggaggagccattaaaatcta

SEQ ID NO: 119098 - DNA, 22 bp, synthetic construct
  misc_feature 1..22: note = chemically synthesized
  source 1..22: mol_type = other DNA
aaatctaagcaagagaagttca

SEQ ID NO: 119099 - DNA, 22 bp, synthetic construct
  misc_feature 1..22: note = chemically synthesized
  source 1..22: mol_type = other DNA
agcaagagaagttcagtttttt

SEQ ID NO: 119100 - DNA, 22 bp, synthetic construct
  misc_feature 1..22: note = chemically synthesized
  source 1..22: mol_type = other DNA
agttttttaaagccacaactcc

SEQ ID NO: 119101 - DNA, 22 bp, synthetic construct
  misc_feature 1..22: note = chemically synthesized
  source 1..22: mol_type = other DNA
tttaaagccacaactccagaca

SEQ ID NO: 119102 - DNA, 22 bp, synthetic construct
  misc_feature 1..22: note = chemically synthesized
  source 1..22: mol_type = other DNA
ttaaagccacaactccagacat

SEQ ID NO: 119103 - DNA, 22 bp, synthetic construct
  misc_feature 1..22: note = chemically synthesized
  source 1..22: mol_type = other DNA
taaagccacaactccagacata

SEQ ID NO: 119104 - DNA, 22 bp, synthetic construct
  misc_feature 1..22: note = chemically synthesized
  source 1..22: mol_type = other DNA
aaagccacaactccagacataa

SEQ ID NO: 119105 - DNA, 22 bp, synthetic construct
  misc_feature 1..22: note = chemically synthesized
  source 1..22: mol_type = other DNA
aagccacaactccagacataaa

SEQ ID NO: 119106 - DNA, 22 bp, synthetic construct
  misc_feature 1..22: note = chemically synthesized
  source 1..22: mol_type = other DNA
cagacataaatttgcccatatt

SEQ ID NO: 119107 - DNA, 22 bp, synthetic construct
  misc_feature 1..22: note = chemically synthesized
  source 1..22: mol_type = other DNA
gcccatattttatttaggacag

SEQ ID NO: 119108 - DNA, 22 bp, synthetic construct
  misc_feature 1..22: note = chemically synthesized
  source 1..22: mol_type = other DNA
cccatattttatttaggacagg

SEQ ID NO: 119109 - DNA, 22 bp, synthetic construct
  misc_feature 1..22: note = chemically synthesized
  source 1..22: mol_type = other DNA
tatttaggacaggggcaaaaaa

SEQ ID NO: 119110 - DNA, 22 bp, synthetic construct
  misc_feature 1..22: note = chemically synthesized
  source 1..22: mol_type = other DNA
atttaggacaggggcaaaaaat

SEQ ID NO: 119111 - DNA, 22 bp, synthetic construct
  misc_feature 1..22: note = chemically synthesized
  source 1..22: mol_type = other DNA
tttaggacaggggcaaaaaatc

SEQ ID NO: 119112 - DNA, 22 bp, synthetic construct
  misc_feature 1..22: note = chemically synthesized
  source 1..22: mol_type = other DNA
aggacaggggcaaaaaatcttt

SEQ ID NO: 119113 - DNA, 22 bp, synthetic construct
  misc_feature 1..22: note = chemically synthesized
  source 1..22: mol_type = other DNA
ggacaggggcaaaaaatcttta

SEQ ID NO: 119114 - DNA, 22 bp, synthetic construct
  misc_feature 1..22: note = chemically synthesized
  source 1..22: mol_type = other DNA
taagagcatgctatatactcaa

SEQ ID NO: 119115 - DNA, 22 bp, synthetic construct
  misc_feature 1..22: note = chemically synthesized
  source 1..22: mol_type = other DNA
aagagcatgctatatactcaat

SEQ ID NO: 119116 - DNA, 22 bp, synthetic construct
  misc_feature 1..22: note = chemically synthesized
  source 1..22: mol_type = other DNA
agagcatgctatatactcaata

SEQ ID NO: 119117 - DNA, 22 bp, synthetic construct
  misc_feature 1..22: note = chemically synthesized
  source 1..22: mol_type = other DNA
tatactcaatactccaaatttt

SEQ ID NO: 119118 - DNA, 22 bp, synthetic construct
  misc_feature 1..22: note = chemically synthesized
  source 1..22: mol_type = other DNA
aatactccaaattttcagtcca

SEQ ID NO: 119119 - DNA, 22 bp, synthetic construct
  misc_feature 1..22: note = chemically synthesized
  source 1..22: mol_type = other DNA
caaattttcagtccaatttggg

SEQ ID NO: 119120 - DNA, 22 bp, synthetic construct
  misc_feature 1..22: note = chemically synthesized
  source 1..22: mol_type = other DNA
tcagtccaatttggggccttct

SEQ ID NO: 119121 - DNA, 22 bp, synthetic construct
  misc_feature 1..22: note = chemically synthesized
  source 1..22: mol_type = other DNA
cagtccaatttggggccttctt

SEQ ID NO: 119122 - DNA, 22 bp, synthetic construct
  misc_feature 1..22: note = chemically synthesized
  source 1..22: mol_type = other DNA
agtccaatttggggccttctta

SEQ ID NO: 119123 - DNA, 22 bp, synthetic construct
  misc_feature 1..22: note = chemically synthesized
  source 1..22: mol_type = other DNA
ggggccttcttataggcctcta

SEQ ID NO: 119124 - DNA, 22 bp, synthetic construct
  misc_feature 1..22: note = chemically synthesized
  source 1..22: mol_type = other DNA
gggccttcttataggcctctag

SEQ ID NO: 119125 - DNA, 22 bp, synthetic construct
  misc_feature 1..22: note = chemically synthesized
  source 1..22: mol_type = other DNA
cttataggcctctagggggagt

SEQ ID NO: 119126 - DNA, 22 bp, synthetic construct
  misc_feature 1..22: note = chemically synthesized
  source 1..22: mol_type = other DNA
ttataggcctctagggggagtt

SEQ ID NO: 119127 - DNA, 22 bp, synthetic construct
  misc_feature 1..22: note = chemically synthesized
  source 1..22: mol_type = other DNA
ataggcctctagggggagtttt

SEQ ID NO: 119128 - DNA, 22 bp, synthetic construct
  misc_feature 1..22: note = chemically synthesized
  source 1..22: mol_type = other DNA
taggcctctagggggagtttta

SEQ ID NO: 119129 - DNA, 22 bp, synthetic construct
  misc_feature 1..22: note = chemically synthesized
  source 1..22: mol_type = other DNA
tagggggagttttagccccagg

SEQ ID NO: 119130 - DNA, 22 bp, synthetic construct
  misc_feature 1..22: note = chemically synthesized
  source 1..22: mol_type = other DNA
gggggagttttagccccaggac

SEQ ID NO: 119131 - DNA, 22 bp, synthetic construct
  misc_feature 1..22: note = chemically synthesized
  source 1..22: mol_type = other DNA
tagccccaggactcatttactg

SEQ ID NO: 119132 - DNA, 22 bp, synthetic construct
  misc_feature 1..22: note = chemically synthesized
  source 1..22: mol_type = other DNA
agccccaggactcatttactgg

SEQ ID NO: 119133 - DNA, 22 bp, synthetic construct
  misc_feature 1..22: note = chemically synthesized
  source 1..22: mol_type = other DNA
gccccaggactcatttactggc

SEQ ID NO: 119134 - DNA, 22 bp, synthetic construct
  misc_feature 1..22: note = chemically synthesized
  source 1..22: mol_type = other DNA
atttactggcctttttaagacc

SEQ ID NO: 119135 - DNA, 22 bp, synthetic construct
  misc_feature 1..22: note = chemically synthesized
  source 1..22: mol_type = other DNA
actggcctttttaagacctagg

SEQ ID NO: 119136 - DNA, 22 bp, synthetic construct
  misc_feature 1..22: note = chemically synthesized
  source 1..22: mol_type = other DNA
ctggcctttttaagacctagga

SEQ ID NO: 119137 - DNA, 22 bp, synthetic construct
  misc_feature 1..22: note = chemically synthesized
  source 1..22: mol_type = other DNA
gcctttttaagacctaggaact

SEQ ID NO: 119138 - DNA, 22 bp, synthetic construct
  misc_feature 1..22: note = chemically synthesized
  source 1..22: mol_type = other DNA
tttaagacctaggaacttgata

SEQ ID NO: 119139 - DNA, 22 bp, synthetic construct
  misc_feature 1..22: note = chemically synthesized
  source 1..22: mol_type = other DNA
ttaagacctaggaacttgataa

SEQ ID NO: 119140 - DNA, 22 bp, synthetic construct
  misc_feature 1..22: note = chemically synthesized
  source 1..22: mol_type = other DNA
taagacctaggaacttgataat

SEQ ID NO: 119141 - DNA, 22 bp, synthetic construct
  misc_feature 1..22: note = chemically synthesized
  source 1..22: mol_type = other DNA
aagacctaggaacttgataatg

SEQ ID NO: 119142 - DNA, 22 bp, synthetic construct
  misc_feature 1..22: note = chemically synthesized
  source 1..22: mol_type = other DNA
agacctaggaacttgataatgg

SEQ ID NO: 119143 - DNA, 22 bp, synthetic construct
  misc_feature 1..22: note = chemically synthesized
  source 1..22: mol_type = other DNA
ggaacttgataatggcacggtg

SEQ ID NO: 119144 - DNA, 22 bp, synthetic construct
  misc_feature 1..22: note = chemically synthesized
  source 1..22: mol_type = other DNA
gataatggcacggtggatctcc

SEQ ID NO: 119145 - DNA, 22 bp, synthetic construct
  misc_feature 1..22: note = chemically synthesized
  source 1..22: mol_type = other DNA
ataatggcacggtggatctcct

SEQ ID NO: 119146 - DNA, 22 bp, synthetic construct
  misc_feature 1..22: note = chemically synthesized
  source 1..22: mol_type = other DNA
cttggtcttaatgctgtatatg

SEQ ID NO: 119147 - DNA, 22 bp, synthetic construct
  misc_feature 1..22: note = chemically synthesized
  source 1..22: mol_type = other DNA
ggtcttaatgctgtatatgatt

SEQ ID NO: 119148 - DNA, 22 bp, synthetic construct
  misc_feature 1..22: note = chemically synthesized
  source 1..22: mol_type = other DNA
gtcttaatgctgtatatgattg

SEQ ID NO: 119149 - DNA, 22 bp, synthetic construct
  misc_feature 1..22: note = chemically synthesized
  source 1..22: mol_type = other DNA
aatgctgtatatgattgggtta

SEQ ID NO: 119150 - DNA, 22 bp, synthetic construct
  misc_feature 1..22: note = chemically synthesized
  source 1..22: mol_type = other DNA
atgctgtatatgattgggttaa

SEQ ID NO: 119151 - DNA, 22 bp, synthetic construct
  misc_feature 1..22: note = chemically synthesized
  source 1..22: mol_type = other DNA
tatatgattgggttaagcatgg

SEQ ID NO: 119152 - DNA, 22 bp, synthetic construct
  misc_feature 1..22: note = chemically synthesized
  source 1..22: mol_type = other DNA
ggttaagcatgggaggcacaaa

SEQ ID NO: 119153 - DNA, 22 bp, synthetic construct
  misc_feature 1..22: note = chemically synthesized
  source 1..22: mol_type = other DNA
agcatgggaggcacaaaaaggt

SEQ ID NO: 119154 - DNA, 22 bp, synthetic construct
  misc_feature 1..22: note = chemically synthesized
  source 1..22: mol_type = other DNA
gccataagaagatgaatagcag

SEQ ID NO: 119155 - DNA, 22 bp, synthetic construct
  misc_feature 1..22: note = chemically synthesized
  source 1..22: mol_type = other DNA
cccaaaacggtgcaccagggac

SEQ ID NO: 119156 - DNA, 22 bp, synthetic construct
  misc_feature 1..22: note = chemically synthesized
  source 1..22: mol_type = other DNA
ccaaaacggtgcaccagggaca

SEQ ID NO: 119157 - DNA, 22 bp, synthetic construct
  misc_feature 1..22: note = chemically synthesized
  source 1..22: mol_type = other DNA
gcacagcacagagaggagcggt

SEQ ID NO: 119158 - DNA, 22 bp, synthetic construct
  misc_feature 1..22: note = chemically synthesized
  source 1..22: mol_type = other DNA
aaaggcacggcgctgctcctct

SEQ ID NO: 119159 - DNA, 22 bp, synthetic construct
  misc_feature 1..22: note = chemically synthesized
  source 1..22: mol_type = other DNA
ctcctcttgggaggccaggcct

SEQ ID NO: 119160 - DNA, 22 bp, synthetic construct
  misc_feature 1..22: note = chemically synthesized
  source 1..22: mol_type = other DNA
ctcttgggaggccaggcctgct

SEQ ID NO: 119161 - DNA, 22 bp, synthetic construct
  misc_feature 1..22: note = chemically synthesized
  source 1..22: mol_type = other DNA
ttgggaggccaggcctgctact

SEQ ID NO: 119162 - DNA, 22 bp, synthetic construct
  misc_feature 1..22: note = chemically synthesized
  source 1..22: mol_type = other DNA
gggaggccaggcctgctactgt

SEQ ID NO: 119163 - DNA, 22 bp, synthetic construct
  misc_feature 1..22: note = chemically synthesized
  source 1..22: mol_type = other DNA
ggaggccaggcctgctactgtg

SEQ ID NO: 119164 - DNA, 22 bp, synthetic construct
  misc_feature 1..22: note = chemically synthesized
  source 1..22: mol_type = other DNA
ctactgtgtgcaggatgagtcc

SEQ ID NO: 119165 - DNA, 22 bp, synthetic construct
  misc_feature 1..22: note = chemically synthesized
  source 1..22: mol_type = other DNA
ctgtgtgcaggatgagtccata

SEQ ID NO: 119166 - DNA, 22 bp, synthetic construct
  misc_feature 1..22: note = chemically synthesized
  source 1..22: mol_type = other DNA
tgtgcaggatgagtccatagga

SEQ ID NO: 119167 - DNA, 22 bp, synthetic construct
  misc_feature 1..22: note = chemically synthesized
  source 1..22: mol_type = other DNA
ccaccatcagtccatacagatt

SEQ ID NO: 119168 - DNA, 22 bp, synthetic construct
  misc_feature 1..22: note = chemically synthesized
  source 1..22: mol_type = other DNA
ttgaaggtgatatctgtgcagg

SEQ ID NO: 119169 - DNA, 22 bp, synthetic construct
  misc_feature 1..22: note = chemically synthesized
  source 1..22: mol_type = other DNA
aaggtgatatctgtgcaggcca

SEQ ID NO: 119170 - DNA, 22 bp, synthetic construct
  misc_feature 1..22: note = chemically synthesized
  source 1..22: mol_type = other DNA
tgcaggccagctgtatcacttc

SEQ ID NO: 119171 - DNA, 22 bp, synthetic construct
  misc_feature 1..22: note = chemically synthesized
  source 1..22: mol_type = other DNA
tatcacttcctggtgcaggcaa

SEQ ID NO: 119172 - DNA, 22 bp, synthetic construct
  misc_feature 1..22: note = chemically synthesized
  source 1..22: mol_type = other DNA
cctggtgcaggcaaaatgagtg

SEQ ID NO: 119173 - DNA, 22 bp, synthetic construct
  misc_feature 1..22: note = chemically synthesized
  source 1..22: mol_type = other DNA
ctggtgcaggcaaaatgagtgg

SEQ ID NO: 119174 - DNA, 22 bp, synthetic construct
  misc_feature 1..22: note = chemically synthesized
  source 1..22: mol_type = other DNA
gtgcaggcaaaatgagtgggag

SEQ ID NO: 119175 - DNA, 22 bp, synthetic construct
  misc_feature 1..22: note = chemically synthesized
  source 1..22: mol_type = other DNA
caggaggaggacaatagggata

SEQ ID NO: 119176 - DNA, 22 bp, synthetic construct
  misc_feature 1..22: note = chemically synthesized
  source 1..22: mol_type = other DNA
aggaggaggacaatagggatag

SEQ ID NO: 119177 - DNA, 22 bp, synthetic construct
  misc_feature 1..22: note = chemically synthesized
  source 1..22: mol_type = other DNA
ggcctgctctgaccacttgctg

SEQ ID NO: 119178 - DNA, 22 bp, synthetic construct
  misc_feature 1..22: note = chemically synthesized
  source 1..22: mol_type = other DNA
ctctgaccacttgctggccagt

SEQ ID NO: 119179 - DNA, 22 bp, synthetic construct
  misc_feature 1..22: note = chemically synthesized
  source 1..22: mol_type = other DNA
tgaccacttgctggccagtgat

SEQ ID NO: 119180 - DNA, 22 bp, synthetic construct
  misc_feature 1..22: note = chemically synthesized
  source 1..22: mol_type = other DNA
accacttgctggccagtgataa

SEQ ID NO: 119181 - DNA, 22 bp, synthetic construct
  misc_feature 1..22: note = chemically synthesized
  source 1..22: mol_type = other DNA
gctggccagtgataatgaccga

SEQ ID NO: 119182 - DNA, 22 bp, synthetic construct
  misc_feature 1..22: note = chemically synthesized
  source 1..22: mol_type = other DNA
ctggccagtgataatgaccgaa

SEQ ID NO: 119183 - DNA, 22 bp, synthetic construct
  misc_feature 1..22: note = chemically synthesized
  source 1..22: mol_type = other DNA
gccagtgataatgaccgaatac

SEQ ID NO: 119184 - DNA, 22 bp, synthetic construct
  misc_feature 1..22: note = chemically synthesized
  source 1..22: mol_type = other DNA
agagggtggcagatggccacaa

SEQ ID NO: 119185 - DNA, 22 bp, synthetic construct
  misc_feature 1..22: note = chemically synthesized
  source 1..22: mol_type = other DNA
aggactccatgaaggaaaaaga

SEQ ID NO: 119186 - DNA, 22 bp, synthetic construct
  misc_feature 1..22: note = chemically synthesized
  source 1..22: mol_type = other DNA
catgaaggaaaaagagtggatg

SEQ ID NO: 119187 - DNA, 22 bp, synthetic construct
  misc_feature 1..22: note = chemically synthesized
  source 1..22: mol_type = other DNA
gatttgacacgctccaaagtag

SEQ ID NO: 119188 - DNA, 22 bp, synthetic construct
  misc_feature 1..22: note = chemically synthesized
  source 1..22: mol_type = other DNA
gacacgctccaaagtagatact

SEQ ID NO: 119189 - DNA, 22 bp, synthetic construct
  misc_feature 1..22: note = chemically synthesized
  source 1..22: mol_type = other DNA
acacgctccaaagtagatacta

SEQ ID NO: 119190 - DNA, 22 bp, synthetic construct
  misc_feature 1..22: note = chemically synthesized
  source 1..22: mol_type = other DNA
caaagtagatactatgggagtt

SEQ ID NO: 119191 - DNA, 22 bp, synthetic construct
  misc_feature 1..22: note = chemically synthesized
  source 1..22: mol_type = other DNA
tgggagttaaaccagaagatcc

SEQ ID NO: 119192 - DNA, 22 bp, synthetic construct
  misc_feature 1..22: note = chemically synthesized
  source 1..22: mol_type = other DNA
aaccagaagatccccatagtgg

SEQ ID NO: 119193 - DNA, 22 bp, synthetic construct
  misc_feature 1..22: note = chemically synthesized
  source 1..22: mol_type = other DNA
gtcttaataatgatcagaatga

SEQ ID NO: 119194 - DNA, 22 bp, synthetic construct
  misc_feature 1..22: note = chemically synthesized
  source 1..22: mol_type = other DNA
aataatgatcagaatgaaacaa

SEQ ID NO: 119195 - DNA, 22 bp, synthetic construct
  misc_feature 1..22: note = chemically synthesized
  source 1..22: mol_type = other DNA
ataatgatcagaatgaaacaat

SEQ ID NO: 119196 - DNA, 22 bp, synthetic construct
  misc_feature 1..22: note = chemically synthesized
  source 1..22: mol_type = other DNA
cctgagatggcaaccatgtaca

SEQ ID NO: 119197 - DNA, 22 bp, synthetic construct
  misc_feature 1..22: note = chemically synthesized
  source 1..22: mol_type = other DNA
agatggcaaccatgtacataaa

SEQ ID NO: 119198 - DNA, 22 bp, synthetic construct
  misc_feature 1..22: note = chemically synthesized
  source 1..22: mol_type = other DNA
gatgccttccaatccaggaaag

SEQ ID NO: 119199 - DNA, 22 bp, synthetic construct
  misc_feature 1..22: note = chemically synthesized
  source 1..22: mol_type = other DNA
atgccttccaatccaggaaagc

SEQ ID NO: 119200 - DNA, 22 bp, synthetic construct
  misc_feature 1..22: note = chemically synthesized
  source 1..22: mol_type = other DNA
ccaatccaggaaagctggtgag

SEQ ID NO: 119201 - DNA, 22 bp, synthetic construct
  misc_feature 1..22: note = chemically synthesized
  source 1..22: mol_type = other DNA
caatccaggaaagctggtgaga

SEQ ID NO: 119202 - DNA, 22 bp, synthetic construct
  misc_feature 1..22: note = chemically synthesized
  source 1..22: mol_type = other DNA
gtgagatagaatatggggctaa

SEQ ID NO: 119203 - DNA, 22 bp, synthetic construct
  misc_feature 1..22: note = chemically synthesized
  source 1..22: mol_type = other DNA
aactgagtaatgttggatagca

SEQ ID NO: 119204 - DNA, 22 bp, synthetic construct
  misc_feature 1..22: note = chemically synthesized
  source 1..22: mol_type = other DNA
agtaatgttggatagcagcatg

SEQ ID NO: 119205 - DNA, 22 bp, synthetic construct
  misc_feature 1..22: note = chemically synthesized
  source 1..22: mol_type = other DNA
gatagcagcatgaattgaggac

SEQ ID NO: 119206 - DNA, 22 bp, synthetic construct
  misc_feature 1..22: note = chemically synthesized
  source 1..22: mol_type = other DNA
aggactgagcgaatattggact

SEQ ID NO: 119207 - DNA, 22 bp, synthetic construct
  misc_feature 1..22: note = chemically synthesized
  source 1..22: mol_type = other DNA
agcgaatattggactgacattc

SEQ ID NO: 119208 - DNA, 22 bp, synthetic construct
  misc_feature 1..22: note = chemically synthesized
  source 1..22: mol_type = other DNA
gactgacattcctcggggattg

SEQ ID NO: 119209 - DNA, 22 bp, synthetic construct
  misc_feature 1..22: note = chemically synthesized
  source 1..22: mol_type = other DNA
acattcctcggggattgagctg

SEQ ID NO: 119210 - DNA, 22 bp, synthetic construct
  misc_feature 1..22: note = chemically synthesized
  source 1..22: mol_type = other DNA
ctcggggattgagctgaaaata

SEQ ID NO: 119211 - DNA, 22 bp, synthetic construct
  misc_feature 1..22: note = chemically synthesized
  source 1..22: mol_type = other DNA
ggggattgagctgaaaataaat

SEQ ID NO: 119212 - DNA, 22 bp, synthetic construct
  misc_feature 1..22: note = chemically synthesized
  source 1..22: mol_type = other DNA
agctgaaaataaatggatattt

SEQ ID NO: 119213 - DNA, 22 bp, synthetic construct
  misc_feature 1..22: note = chemically synthesized
  source 1..22: mol_type = other DNA
aaaataaatggatatttctggt

SEQ ID NO: 119214 - DNA, 22 bp, synthetic construct
  misc_feature 1..22: note = chemically synthesized
  source 1..22: mol_type = other DNA
ctggttattaattcttcagctt

SEQ ID NO: 119215 - DNA, 22 bp, synthetic construct
  misc_feature 1..22: note = chemically synthesized
  source 1..22: mol_type = other DNA
tggttattaattcttcagcttc

SEQ ID NO: 119216 - DNA, 22 bp, synthetic construct
  misc_feature 1..22: note = chemically synthesized
  source 1..22: mol_type = other DNA
gttattaattcttcagcttcac

SEQ ID NO: 119217 - DNA, 22 bp, synthetic construct
  misc_feature 1..22: note = chemically synthesized
  source 1..22: mol_type = other DNA
ttaattcttcagcttcactaac

SEQ ID NO: 119218 - DNA, 22 bp, synthetic construct
  misc_feature 1..22: note = chemically synthesized
  source 1..22: mol_type = other DNA
attcttcagcttcactaacatt

SEQ ID NO: 119219 - DNA, 22 bp, synthetic construct
  misc_feature 1..22: note = chemically synthesized
  source 1..22: mol_type = other DNA
ttcagcttcactaacattcaca

SEQ ID NO: 119220 - DNA, 22 bp, synthetic construct
  misc_feature 1..22: note = chemically synthesized
  source 1..22: mol_type = other DNA
cagcttcactaacattcacaac

SEQ ID NO: 119221 - DNA, 22 bp, synthetic construct
  misc_feature 1..22: note = chemically synthesized
  source 1..22: mol_type = other DNA
agcttcactaacattcacaaca

SEQ ID NO: 119222 - DNA, 22 bp, synthetic construct
  misc_feature 1..22: note = chemically synthesized
  source 1..22: mol_type = other DNA
cactaacattcacaacatcaca

SEQ ID NO: 119223 - DNA, 22 bp, synthetic construct
  misc_feature 1..22: note = chemically synthesized
  source 1..22: mol_type = other DNA
actaacattcacaacatcacaa

SEQ ID NO: 119224 - DNA, 22 bp, synthetic construct
  misc_feature 1..22: note = chemically synthesized
  source 1..22: mol_type = other DNA
acattcacaacatcacaagcag

SEQ ID NO: 119225 - DNA, 22 bp, synthetic construct
  misc_feature 1..22: note = chemically synthesized
  source 1..22: mol_type = other DNA
acaacatcacaagcagtaccat

SEQ ID NO: 119226 - DNA, 22 bp, synthetic construct
  misc_feature 1..22: note = chemically synthesized
  source 1..22: mol_type = other DNA
tagtattatctactccaccctt

SEQ ID NO: 119227 - DNA, 22 bp, synthetic construct
  misc_feature 1..22: note = chemically synthesized
  source 1..22: mol_type = other DNA
agtattatctactccaccctta

SEQ ID NO: 119228 - DNA, 22 bp, synthetic construct
  misc_feature 1..22: note = chemically synthesized
  source 1..22: mol_type = other DNA
gtattatctactccacccttat

SEQ ID NO: 119229 - DNA, 22 bp, synthetic construct
  misc_feature 1..22: note = chemically synthesized
  source 1..22: mol_type = other DNA
tctactccacccttatgaattc

SEQ ID NO: 119230 - DNA, 22 bp, synthetic construct
  misc_feature 1..22: note = chemically synthesized
  source 1..22: mol_type = other DNA
ctccacccttatgaattctgcc

SEQ ID NO: 119231 - DNA, 22 bp, synthetic construct
  misc_feature 1..22: note = chemically synthesized
  source 1..22: mol_type = other DNA
cacccttatgaattctgccaat

SEQ ID NO: 119232 - DNA, 22 bp, synthetic construct
  misc_feature 1..22: note = chemically synthesized
  source 1..22: mol_type = other DNA
atgaattctgccaatctcacta

SEQ ID NO: 119233 - DNA, 22 bp, synthetic construct
  misc_feature 1..22: note = chemically synthesized
  source 1..22: mol_type = other DNA
tgaattctgccaatctcactac

SEQ ID NO: 119234 - DNA, 22 bp, synthetic construct
  misc_feature 1..22: note = chemically synthesized
  source 1..22: mol_type = other DNA
tgccaatctcactactttattg

SEQ ID NO: 119235 - DNA, 22 bp, synthetic construct
  misc_feature 1..22: note = chemically synthesized
  source 1..22: mol_type = other DNA
ccaatctcactactttattgaa

SEQ ID NO: 119236 - DNA, 22 bp, synthetic construct
  misc_feature 1..22: note = chemically synthesized
  source 1..22: mol_type = other DNA
actactttattgaactttcttt

SEQ ID NO: 119237 - DNA, 22 bp, synthetic construct
  misc_feature 1..22: note = chemically synthesized
  source 1..22: mol_type = other DNA
ctttattgaactttctttgata

SEQ ID NO: 119238 - DNA, 22 bp, synthetic construct
  misc_feature 1..22: note = chemically synthesized
  source 1..22: mol_type = other DNA
tattgaactttctttgataacc

SEQ ID NO: 119239 - DNA, 22 bp, synthetic construct
  misc_feature 1..22: note = chemically synthesized
  source 1..22: mol_type = other DNA
attgaactttctttgataacct

SEQ ID NO: 119240 - DNA, 22 bp, synthetic construct
  misc_feature 1..22: note = chemically synthesized
  source 1..22: mol_type = other DNA
ttgaactttctttgataacctc

SEQ ID NO: 119241 - DNA, 22 bp, synthetic construct
  misc_feature 1..22: note = chemically synthesized
  source 1..22: mol_type = other DNA
aactttctttgataacctcgcc

SEQ ID NO: 119242 - DNA, 22 bp, synthetic construct
  misc_feature 1..22: note = chemically synthesized
  source 1..22: mol_type = other DNA
tctttgataacctcgccctcac

SEQ ID NO: 119243 - DNA, 22 bp, synthetic construct
  misc_feature 1..22: note = chemically synthesized
  source 1..22: mol_type = other DNA
ctttgataacctcgccctcacc

SEQ ID NO: 119244 - DNA, 22 bp, synthetic construct
  misc_feature 1..22: note = chemically synthesized
  source 1..22: mol_type = other DNA
tttgataacctcgccctcacca

SEQ ID NO: 119245 - DNA, 22 bp, synthetic construct
  misc_feature 1..22: note = chemically synthesized
  source 1..22: mol_type = other DNA
tgataacctcgccctcaccagt

SEQ ID NO: 119246 - DNA, 22 bp, synthetic construct
  misc_feature 1..22: note = chemically synthesized
  source 1..22: mol_type = other DNA
gataacctcgccctcaccagtt

SEQ ID NO: 119247 - DNA, 22 bp, synthetic construct
  misc_feature 1..22: note = chemically synthesized
  source 1..22: mol_type = other DNA
ataacctcgccctcaccagttt

SEQ ID NO: 119248 - DNA, 22 bp, synthetic construct
  misc_feature 1..22: note = chemically synthesized
  source 1..22: mol_type = other DNA
gccctcaccagttttcctctgt

SEQ ID NO: 119249 - DNA, 22 bp, synthetic construct
  misc_feature 1..22: note = chemically synthesized
  source 1..22: mol_type = other DNA
accagttttcctctgtatttca

SEQ ID NO: 119250 - DNA, 22 bp, synthetic construct
  misc_feature 1..22: note = chemically synthesized
  source 1..22: mol_type = other DNA
tcctctgtatttcaattatttc

SEQ ID NO: 119251 - DNA, 22 bp, synthetic construct
  misc_feature 1..22: note = chemically synthesized
  source 1..22: mol_type = other DNA
cctctgtatttcaattatttca

SEQ ID NO: 119252 - DNA, 22 bp, synthetic construct
  misc_feature 1..22: note = chemically synthesized
  source 1..22: mol_type = other DNA
ctctgtatttcaattatttcag

SEQ ID NO: 119253 - DNA, 22 bp, synthetic construct
  misc_feature 1..22: note = chemically synthesized
  source 1..22: mol_type = other DNA
tgtatttcaattatttcagttc

SEQ ID NO: 119254 - DNA, 22 bp, synthetic construct
  misc_feature 1..22: note = chemically synthesized
  source 1..22: mol_type = other DNA
tatttcaattatttcagttcct

SEQ ID NO: 119255 - DNA, 22 bp, synthetic construct
  misc_feature 1..22: note = chemically synthesized
  source 1..22: mol_type = other DNA
caattatttcagttcctctctg

SEQ ID NO: 119256 - DNA, 22 bp, synthetic construct
  misc_feature 1..22: note = chemically synthesized
  source 1..22: mol_type = other DNA
aattatttcagttcctctctgc

SEQ ID NO: 119257 - DNA, 22 bp, synthetic construct
  misc_feature 1..22: note = chemically synthesized
  source 1..22: mol_type = other DNA
tttcagttcctctctgcctctt

SEQ ID NO: 119258 - DNA, 22 bp, synthetic construct
  misc_feature 1..22: note = chemically synthesized
  source 1..22: mol_type = other DNA
cagttcctctctgcctctttgc

SEQ ID NO: 119259 - DNA, 22 bp, synthetic construct
  misc_feature 1..22: note = chemically synthesized
  source 1..22: mol_type = other DNA
agttcctctctgcctctttgct

SEQ ID NO: 119260 - DNA, 22 bp, synthetic construct
  misc_feature 1..22: note = chemically synthesized
  source 1..22: mol_type = other DNA
ctctctgcctctttgctggtgt

SEQ ID NO: 119261 - DNA, 22 bp, synthetic construct
  misc_feature 1..22: note = chemically synthesized
  source 1..22: mol_type = other DNA
tctgcctctttgctggtgtgcc

SEQ ID NO: 119262 - DNA, 22 bp, synthetic construct
  misc_feature 1..22: note = chemically synthesized
  source 1..22: mol_type = other DNA
tgcctctttgctggtgtgcctt

SEQ ID NO: 119263 - DNA, 22 bp, synthetic construct
  misc_feature 1..22: note = chemically synthesized
  source 1..22: mol_type = other DNA
cctctttgctggtgtgccttta

SEQ ID NO: 119264 - DNA, 22 bp, synthetic construct
  misc_feature 1..22: note = chemically synthesized
  source 1..22: mol_type = other DNA
tttgctggtgtgcctttattgc

SEQ ID NO: 119265 - DNA, 22 bp, synthetic construct
  misc_feature 1..22: note = chemically synthesized
  source 1..22: mol_type = other DNA
tgctggtgtgcctttattgctc

SEQ ID NO: 119266 - DNA, 22 bp, synthetic construct
  misc_feature 1..22: note = chemically synthesized
  source 1..22: mol_type = other DNA
gctggtgtgcctttattgctca

SEQ ID NO: 119267 - DNA, 22 bp, synthetic construct
  misc_feature 1..22: note = chemically synthesized
  source 1..22: mol_type = other DNA
ctggtgtgcctttattgctcaa

SEQ ID NO: 119268 - DNA, 22 bp, synthetic construct
  misc_feature 1..22: note = chemically synthesized
  source 1..22: mol_type = other DNA
gtgtgcctttattgctcaaccc

SEQ ID NO: 119269 - DNA, 22 bp, synthetic construct
  misc_feature 1..22: note = chemically synthesized
  source 1..22: mol_type = other DNA
tattgctcaacccttaagtata

SEQ ID NO: 119270 - DNA, 22 bp, synthetic construct
  misc_feature 1..22: note = chemically synthesized
  source 1..22: mol_type = other DNA
attgctcaacccttaagtatag

SEQ ID NO: 119271 - DNA, 22 bp, synthetic construct
  misc_feature 1..22: note = chemically synthesized
  source 1..22: mol_type = other DNA
ttgctcaacccttaagtatagt

SEQ ID NO: 119272 - DNA, 22 bp, synthetic construct
  misc_feature 1..22: note = chemically synthesized
  source 1..22: mol_type = other DNA
ctcaacccttaagtatagttct

SEQ ID NO: 119273 - DNA, 22 bp, synthetic construct
  misc_feature 1..22: note = chemically synthesized
  source 1..22: mol_type = other DNA
aacccttaagtatagttcttcc

SEQ ID NO: 119274 - DNA, 22 bp, synthetic construct
  misc_feature 1..22: note = chemically synthesized
  source 1..22: mol_type = other DNA
aagtatagttcttcccatcctt

SEQ ID NO: 119275 - DNA, 22 bp, synthetic construct
  misc_feature 1..22: note = chemically synthesized
  source 1..22: mol_type = other DNA
agtatagttcttcccatccttg

SEQ ID NO: 119276 - DNA, 22 bp, synthetic construct
  misc_feature 1..22: note = chemically synthesized
  source 1..22: mol_type = other DNA
ttcccatccttggcaatttcct

SEQ ID NO: 119277 - DNA, 22 bp, synthetic construct
  misc_feature 1..22: note = chemically synthesized
  source 1..22: mol_type = other DNA
cccatccttggcaatttcctgg

SEQ ID NO: 119278 - DNA, 22 bp, synthetic construct
  misc_feature 1..22: note = chemically synthesized
  source 1..22: mol_type = other DNA
ccatccttggcaatttcctggc

SEQ ID NO: 119279 - DNA, 22 bp, synthetic construct
  misc_feature 1..22: note = chemically synthesized
  source 1..22: mol_type = other DNA
ggcaatttcctggccatattct

SEQ ID NO: 119280 - DNA, 22 bp, synthetic construct
  misc_feature 1..22: note = chemically synthesized
  source 1..22: mol_type = other DNA
gcaatttcctggccatattcta

SEQ ID NO: 119281 - DNA, 22 bp, synthetic construct
  misc_feature 1..22: note = chemically synthesized
  source 1..22: mol_type = other DNA
cctggccatattctattatttc

SEQ ID NO: 119282 - DNA, 22 bp, synthetic construct
  misc_feature 1..22: note = chemically synthesized
  source 1..22: mol_type = other DNA
ctggccatattctattatttct

SEQ ID NO: 119283 - DNA, 22 bp, synthetic construct
  misc_feature 1..22: note = chemically synthesized
  source 1..22: mol_type = other DNA
gccatattctattatttcttct

SEQ ID NO: 119284 - DNA, 22 bp, synthetic construct
  misc_feature 1..22: note = chemically synthesized
  source 1..22: mol_type = other DNA
tattatttcttcttaatgtcat

SEQ ID NO: 119285 - DNA, 22 bp, synthetic construct
  misc_feature 1..22: note = chemically synthesized
  source 1..22: mol_type = other DNA
ttatttcttcttaatgtcatcc

SEQ ID NO: 119286 - DNA, 22 bp, synthetic construct
  misc_feature 1..22: note = chemically synthesized
  source 1..22: mol_type = other DNA
tttcttcttaatgtcatccact

SEQ ID NO: 119287 - DNA, 22 bp, synthetic construct
  misc_feature 1..22: note = chemically synthesized
  source 1..22: mol_type = other DNA
cttcttaatgtcatccactacc

SEQ ID NO: 119288 - DNA, 22 bp, synthetic construct
  misc_feature 1..22: note = chemically synthesized
  source 1..22: mol_type = other DNA
ttcttaatgtcatccactacca

SEQ ID NO: 119289 - DNA, 22 bp, synthetic construct
  misc_feature 1..22: note = chemically synthesized
  source 1..22: mol_type = other DNA
cttaatgtcatccactaccatg

SEQ ID NO: 119290 - DNA, 22 bp, synthetic construct
  misc_feature 1..22: note = chemically synthesized
  source 1..22: mol_type = other DNA
ttaatgtcatccactaccatga

SEQ ID NO: 119291 - DNA, 22 bp, synthetic construct
  misc_feature 1..22: note = chemically synthesized
  source 1..22: mol_type = other DNA
aatgtcatccactaccatgatt

SEQ ID NO: 119292 - DNA, 22 bp, synthetic construct
  misc_feature 1..22: note = chemically synthesized
  source 1..22: mol_type = other DNA
atgtcatccactaccatgattt

SEQ ID NO: 119293 - DNA, 22 bp, synthetic construct
  misc_feature 1..22: note = chemically synthesized
  source 1..22: mol_type = other DNA
ccatgatttcatttaccatcca

SEQ ID NO: 119294 - DNA, 22 bp, synthetic construct
  misc_feature 1..22: note = chemically synthesized
  source 1..22: mol_type = other DNA
catttaccatccatatattgat

SEQ ID NO: 119295 - DNA, 22 bp, synthetic construct
  misc_feature 1..22: note = chemically synthesized
  source 1..22: mol_type = other DNA
atttaccatccatatattgata

SEQ ID NO: 119296 - DNA, 22 bp, synthetic construct
  misc_feature 1..22: note = chemically synthesized
  source 1..22: mol_type = other DNA
accatccatatattgataaata

SEQ ID NO: 119297 - DNA, 22 bp, synthetic construct
  misc_feature 1..22: note = chemically synthesized
  source 1..22: mol_type = other DNA
ccatccatatattgataaataa

SEQ ID NO: 119298 - DNA, 22 bp, synthetic construct
  misc_feature 1..22: note = chemically synthesized
  source 1..22: mol_type = other DNA
ataaataacaaatatataattc

SEQ ID NO: 119299 - DNA, 22 bp, synthetic construct
  misc_feature 1..22: note = chemically synthesized
  source 1..22: mol_type = other DNA
cagaacttgtctttctctcttt

SEQ ID NO: 119300 - DNA, 22 bp, synthetic construct
  misc_feature 1..22: note = chemically synthesized
  source 1..22: mol_type = other DNA
gtctttctctcttttgatttcc

SEQ ID NO: 119301 - DNA, 22 bp, synthetic construct
  misc_feature 1..22: note = chemically synthesized
  source 1..22: mol_type = other DNA
tctttctctcttttgatttcca

SEQ ID NO: 119302 - DNA, 22 bp, synthetic construct
  misc_feature 1..22: note = chemically synthesized
  source 1..22: mol_type = other DNA
tctctcttttgatttccagact

SEQ ID NO: 119303 - DNA, 22 bp, synthetic construct
  misc_feature 1..22: note = chemically synthesized
  source 1..22: mol_type = other DNA
ctctcttttgatttccagactc

SEQ ID NO: 119304 - DNA, 22 bp, synthetic construct
  misc_feature 1..22: note = chemically synthesized
  source 1..22: mol_type = other DNA
tctcttttgatttccagactct

SEQ ID NO: 119305 - DNA, 22 bp, synthetic construct
  misc_feature 1..22: note = chemically synthesized
  source 1..22: mol_type = other DNA
tcttttgatttccagactctag

SEQ ID NO: 119306 - DNA, 22 bp, synthetic construct
  misc_feature 1..22: note = chemically synthesized
  source 1..22: mol_type = other DNA
ttttgatttccagactctagca

SEQ ID NO: 119307 - DNA, 22 bp, synthetic construct
  misc_feature 1..22: note = chemically synthesized
  source 1..22: mol_type = other DNA
ttgatttccagactctagcaac

SEQ ID NO: 119308 - DNA, 22 bp, synthetic construct
  misc_feature 1..22: note = chemically synthesized
  source 1..22: mol_type = other DNA
tgatttccagactctagcaaca

SEQ ID NO: 119309 - DNA, 22 bp, synthetic construct
  misc_feature 1..22: note = chemically synthesized
  source 1..22: mol_type = other DNA
gatttccagactctagcaacat

SEQ ID NO: 119310 - DNA, 22 bp, synthetic construct
  misc_feature 1..22: note = chemically synthesized
  source 1..22: mol_type = other DNA
atttccagactctagcaacatc

SEQ ID NO: 119311 - DNA, 22 bp, synthetic construct
  misc_feature 1..22: note = chemically synthesized
  source 1..22: mol_type = other DNA
ccagactctagcaacatctgta

SEQ ID NO: 119312 - DNA, 22 bp, synthetic construct
  misc_feature 1..22: note = chemically synthesized
  source 1..22: mol_type = other DNA
cagactctagcaacatctgtac

SEQ ID NO: 119313 - DNA, 22 bp, synthetic construct
  misc_feature 1..22: note = chemically synthesized
  source 1..22: mol_type = other DNA
tagcaacatctgtacttttcat

SEQ ID NO: 119314 - DNA, 22 bp, synthetic construct
  misc_feature 1..22: note = chemically synthesized
  source 1..22: mol_type = other DNA
gcaacatctgtacttttcatta

SEQ ID NO: 119315 - DNA, 22 bp, synthetic construct
  misc_feature 1..22: note = chemically synthesized
  source 1..22: mol_type = other DNA
tacttttcattatctcagtggc

SEQ ID NO: 119316 - DNA, 22 bp, synthetic construct
  misc_feature 1..22: note = chemically synthesized
  source 1..22: mol_type = other DNA
ttcattatctcagtggctcaag

SEQ ID NO: 119317 - DNA, 22 bp, synthetic construct
  misc_feature 1..22: note = chemically synthesized
  source 1..22: mol_type = other DNA
tcattatctcagtggctcaagt

SEQ ID NO: 119318 - DNA, 22 bp, synthetic construct
  misc_feature 1..22: note = chemically synthesized
  source 1..22: mol_type = other DNA
cattatctcagtggctcaagtc

SEQ ID NO: 119319 - DNA, 22 bp, synthetic construct
  misc_feature 1..22: note = chemically synthesized
  source 1..22: mol_type = other DNA
attatctcagtggctcaagtca

SEQ ID NO: 119320 - DNA, 22 bp, synthetic construct
  misc_feature 1..22: note = chemically synthesized
  source 1..22: mol_type = other DNA
tctcagtggctcaagtcaaatg

SEQ ID NO: 119321 - DNA, 22 bp, synthetic construct
  misc_feature 1..22: note = chemically synthesized
  source 1..22: mol_type = other DNA
agtggctcaagtcaaatgtcat

SEQ ID NO: 119322 - DNA, 22 bp, synthetic construct
  misc_feature 1..22: note = chemically synthesized
  source 1..22: mol_type = other DNA
aagtcaaatgtcatgttttatg

SEQ ID NO: 119323 - DNA, 22 bp, synthetic construct
  misc_feature 1..22: note = chemically synthesized
  source 1..22: mol_type = other DNA
tatgttagacttctccatatca

SEQ ID NO: 119324 - DNA, 22 bp, synthetic construct
  misc_feature 1..22: note = chemically synthesized
  source 1..22: mol_type = other DNA
atgttagacttctccatatcac

SEQ ID NO: 119325 - DNA, 22 bp, synthetic construct
  misc_feature 1..22: note = chemically synthesized
  source 1..22: mol_type = other DNA
tgttagacttctccatatcaca

SEQ ID NO: 119326 - DNA, 22 bp, synthetic construct
  misc_feature 1..22: note = chemically synthesized
  source 1..22: mol_type = other DNA
gacttctccatatcacatctct

SEQ ID NO: 119327 - DNA, 22 bp, synthetic construct
  misc_feature 1..22: note = chemically synthesized
  source 1..22: mol_type = other DNA
ctccatatcacatctctccata

SEQ ID NO: 119328 - DNA, 22 bp, synthetic construct
  misc_feature 1..22: note = chemically synthesized
  source 1..22: mol_type = other DNA
tccatatcacatctctccatag

SEQ ID NO: 119329 - DNA, 22 bp, synthetic construct
  misc_feature 1..22: note = chemically synthesized
  source 1..22: mol_type = other DNA
catatcacatctctccatagta

SEQ ID NO: 119330 - DNA, 22 bp, synthetic construct
  misc_feature 1..22: note = chemically synthesized
  source 1..22: mol_type = other DNA
tccatagtatctaatcaaccaa

SEQ ID NO: 119331 - DNA, 22 bp, synthetic construct
  misc_feature 1..22: note = chemically synthesized
  source 1..22: mol_type = other DNA
catagtatctaatcaaccaatc

SEQ ID NO: 119332 - DNA, 22 bp, synthetic construct
  misc_feature 1..22: note = chemically synthesized
  source 1..22: mol_type = other DNA
atcaaccaatcaccaagtccta

SEQ ID NO: 119333 - DNA, 22 bp, synthetic construct
  misc_feature 1..22: note = chemically synthesized
  source 1..22: mol_type = other DNA
gggtttctgtttactgaatacc

SEQ ID NO: 119334 - DNA, 22 bp, synthetic construct
  misc_feature 1..22: note = chemically synthesized
  source 1..22: mol_type = other DNA
ctgtttactgaatacctcaagt

SEQ ID NO: 119335 - DNA, 22 bp, synthetic construct
  misc_feature 1..22: note = chemically synthesized
  source 1..22: mol_type = other DNA
tgtttactgaatacctcaagtc

SEQ ID NO: 119336 - DNA, 22 bp, synthetic construct
  misc_feature 1..22: note = chemically synthesized
  source 1..22: mol_type = other DNA
tttactgaatacctcaagtctg

SEQ ID NO: 119337 - DNA, 22 bp, synthetic construct
  misc_feature 1..22: note = chemically synthesized
  source 1..22: mol_type = other DNA
actgaatacctcaagtctgttt

SEQ ID NO: 119338 - DNA, 22 bp, synthetic construct
  misc_feature 1..22: note = chemically synthesized
  source 1..22: mol_type = other DNA
ctgaatacctcaagtctgttta

SEQ ID NO: 119339 - DNA, 22 bp, synthetic construct
  misc_feature 1..22: note = chemically synthesized
  source 1..22: mol_type = other DNA
aatacctcaagtctgtttactc

SEQ ID NO: 119340 - DNA, 22 bp, synthetic construct
  misc_feature 1..22: note = chemically synthesized
  source 1..22: mol_type = other DNA
aagtctgtttactcaccgtcac

SEQ ID NO: 119341 - DNA, 22 bp, synthetic construct
  misc_feature 1..22: note = chemically synthesized
  source 1..22: mol_type = other DNA
tttactcaccgtcaccttcatt

SEQ ID NO: 119342 - DNA, 22 bp, synthetic construct
  misc_feature 1..22: note = chemically synthesized
  source 1..22: mol_type = other DNA
actcaccgtcaccttcattgat

SEQ ID NO: 119343 - DNA, 22 bp, synthetic construct
  misc_feature 1..22: note = chemically synthesized
  source 1..22: mol_type = other DNA
ctcaccgtcaccttcattgatg

SEQ ID NO: 119344 - DNA, 22 bp, synthetic construct
  misc_feature 1..22: note = chemically synthesized
  source 1..22: mol_type = other DNA
accgtcaccttcattgatgcta

SEQ ID NO: 119345 - DNA, 22 bp, synthetic construct
  misc_feature 1..22: note = chemically synthesized
  source 1..22: mol_type = other DNA
cattgatgctattctaattcag

SEQ ID NO: 119346 - DNA, 22 bp, synthetic construct
  misc_feature 1..22: note = chemically synthesized
  source 1..22: mol_type = other DNA
attgatgctattctaattcaga

SEQ ID NO: 119347 - DNA, 22 bp, synthetic construct
  misc_feature 1..22: note = chemically synthesized
  source 1..22: mol_type = other DNA
atgctattctaattcagatcac

SEQ ID NO: 119348 - DNA, 22 bp, synthetic construct
  misc_feature 1..22: note = chemically synthesized
  source 1..22: mol_type = other DNA
ttctaattcagatcactctttc

SEQ ID NO: 119349 - DNA, 22 bp, synthetic construct
  misc_feature 1..22: note = chemically synthesized
  source 1..22: mol_type = other DNA
taattcagatcactctttcagg

SEQ ID NO: 119350 - DNA, 22 bp, synthetic construct
  misc_feature 1..22: note = chemically synthesized
  source 1..22: mol_type = other DNA
attcagatcactctttcaggac

SEQ ID NO: 119351 - DNA, 22 bp, synthetic construct
  misc_feature 1..22: note = chemically synthesized
  source 1..22: mol_type = other DNA
agatcactctttcaggactatt

SEQ ID NO: 119352 - DNA, 22 bp, synthetic construct
  misc_feature 1..22: note = chemically synthesized
  source 1..22: mol_type = other DNA
tttcaggactattccagtgact

SEQ ID NO: 119353 - DNA, 22 bp, synthetic construct
  misc_feature 1..22: note = chemically synthesized
  source 1..22: mol_type = other DNA
tcaggactattccagtgactca

SEQ ID NO: 119354 - DNA, 22 bp, synthetic construct
  misc_feature 1..22: note = chemically synthesized
  source 1..22: mol_type = other DNA
caggactattccagtgactcat

SEQ ID NO: 119355 - DNA, 22 bp, synthetic construct
  misc_feature 1..22: note = chemically synthesized
  source 1..22: mol_type = other DNA
aggactattccagtgactcatc

SEQ ID NO: 119356 - DNA, 22 bp, synthetic construct
  misc_feature 1..22: note = chemically synthesized
  source 1..22: mol_type = other DNA
ttccagtgactcatcttttgta

SEQ ID NO: 119357 - DNA, 22 bp, synthetic construct
  misc_feature 1..22: note = chemically synthesized
  source 1..22: mol_type = other DNA
cagtgactcatcttttgtacta

SEQ ID NO: 119358 - DNA, 22 bp, synthetic construct
  misc_feature 1..22: note = chemically synthesized
  source 1..22: mol_type = other DNA
atcttttgtactactgtattca

SEQ ID NO: 119359 - DNA, 22 bp, synthetic construct
  misc_feature 1..22: note = chemically synthesized
  source 1..22: mol_type = other DNA
ttgtactactgtattcagttga

SEQ ID NO: 119360 - DNA, 22 bp, synthetic construct
  misc_feature 1..22: note = chemically synthesized
  source 1..22: mol_type = other DNA
tgtactactgtattcagttgac

SEQ ID NO: 119361 - DNA, 22 bp, synthetic construct
  misc_feature 1..22: note = chemically synthesized
  source 1..22: mol_type = other DNA
gtactactgtattcagttgact

SEQ ID NO: 119362 - DNA, 22 bp, synthetic construct
  misc_feature 1..22: note = chemically synthesized
  source 1..22: mol_type = other DNA
tactactgtattcagttgacta

SEQ ID NO: 119363 - DNA, 22 bp, synthetic construct
  misc_feature 1..22: note = chemically synthesized
  source 1..22: mol_type = other DNA
ctgtattcagttgactactata

SEQ ID NO: 119364 - DNA, 22 bp, synthetic construct
  misc_feature 1..22: note = chemically synthesized
  source 1..22: mol_type = other DNA
tattcagttgactactatatag

SEQ ID NO: 119365 - DNA, 22 bp, synthetic construct
  misc_feature 1..22: note = chemically synthesized
  source 1..22: mol_type = other DNA
agttgactactatatagcaaga

SEQ ID NO: 119366 - DNA, 22 bp, synthetic construct
  misc_feature 1..22: note = chemically synthesized
  source 1..22: mol_type = other DNA
actactatatagcaagagagac

SEQ ID NO: 119367 - DNA, 22 bp, synthetic construct
  misc_feature 1..22: note = chemically synthesized
  source 1..22: mol_type = other DNA
ctatatagcaagagagacgtat

SEQ ID NO: 119368 - DNA, 22 bp, synthetic construct
  misc_feature 1..22: note = chemically synthesized
  source 1..22: mol_type = other DNA
tatagcaagagagacgtataca

SEQ ID NO: 119369 - DNA, 22 bp, synthetic construct
  misc_feature 1..22: note = chemically synthesized
  source 1..22: mol_type = other DNA
ttaatgaagtaaaaaaggttta

SEQ ID NO: 119370 - DNA, 22 bp, synthetic construct
  misc_feature 1..22: note = chemically synthesized
  source 1..22: mol_type = other DNA
taatgaagtaaaaaaggtttaa

SEQ ID NO: 119371 - DNA, 22 bp, synthetic construct
  misc_feature 1..22: note = chemically synthesized
  source 1..22: mol_type = other DNA
aatgaagtaaaaaaggtttaaa

SEQ ID NO: 119372 - DNA, 22 bp, synthetic construct
  misc_feature 1..22: note = chemically synthesized
  source 1..22: mol_type = other DNA
atgaagtaaaaaaggtttaaaa

SEQ ID NO: 119373 - DNA, 22 bp, synthetic construct
  misc_feature 1..22: note = chemically synthesized
  source 1..22: mol_type = other DNA
aaaatgacattcaagaccctac

SEQ ID NO: 119374 - DNA, 22 bp, synthetic construct
  misc_feature 1..22: note = chemically synthesized
  source 1..22: mol_type = other DNA
aaatgacattcaagaccctacc

SEQ ID NO: 119375 - DNA, 22 bp, synthetic construct
  misc_feature 1..22: note = chemically synthesized
  source 1..22: mol_type = other DNA
aagaccctaccttattttctct

SEQ ID NO: 119376 - DNA, 22 bp, synthetic construct
  misc_feature 1..22: note = chemically synthesized
  source 1..22: mol_type = other DNA
ccttattttctctccgtgtata

SEQ ID NO: 119377 - DNA, 22 bp, synthetic construct
  misc_feature 1..22: note = chemically synthesized
  source 1..22: mol_type = other DNA
attttctctccgtgtatatcct

SEQ ID NO: 119378 - DNA, 22 bp, synthetic construct
  misc_feature 1..22: note = chemically synthesized
  source 1..22: mol_type = other DNA
ttttctctccgtgtatatccta

SEQ ID NO: 119379 - DNA, 22 bp, synthetic construct
  misc_feature 1..22: note = chemically synthesized
  source 1..22: mol_type = other DNA
tctctccgtgtatatcctattt

SEQ ID NO: 119380 - DNA, 22 bp, synthetic construct
  misc_feature 1..22: note = chemically synthesized
  source 1..22: mol_type = other DNA
ctctccgtgtatatcctatttt

SEQ ID NO: 119381 - DNA, 22 bp, synthetic construct
  misc_feature 1..22: note = chemically synthesized
  source 1..22: mol_type = other DNA
tctccgtgtatatcctattttc

SEQ ID NO: 119382 - DNA, 22 bp, synthetic construct
  misc_feature 1..22: note = chemically synthesized
  source 1..22: mol_type = other DNA
tccgtgtatatcctattttctt

SEQ ID NO: 119383 - DNA, 22 bp, synthetic construct
  misc_feature 1..22: note = chemically synthesized
  source 1..22: mol_type = other DNA
cgtgtatatcctattttcttat

SEQ ID NO: 119384 - DNA, 22 bp, synthetic construct
  misc_feature 1..22: note = chemically synthesized
  source 1..22: mol_type = other DNA
ttttcttatctatcctaatttc

SEQ ID NO: 119385 - DNA, 22 bp, synthetic construct
  misc_feature 1..22: note = chemically synthesized
  source 1..22: mol_type = other DNA
tcttatctatcctaatttcctc

SEQ ID NO: 119386 - DNA, 22 bp, synthetic construct
  misc_feature 1..22: note = chemically synthesized
  source 1..22: mol_type = other DNA
cttatctatcctaatttcctct

SEQ ID NO: 119387 - DNA, 22 bp, synthetic construct
  misc_feature 1..22: note = chemically synthesized
  source 1..22: mol_type = other DNA
ttatctatcctaatttcctctg

SEQ ID NO: 119388 - DNA, 22 bp, synthetic construct
  misc_feature 1..22: note = chemically synthesized
  source 1..22: mol_type = other DNA
atctatcctaatttcctctgta

SEQ ID NO: 119389 - DNA, 22 bp, synthetic construct
  misc_feature 1..22: note = chemically synthesized
  source 1..22: mol_type = other DNA
tctatcctaatttcctctgtat

SEQ ID NO: 119390 - DNA, 22 bp, synthetic construct
  misc_feature 1..22: note = chemically synthesized
  source 1..22: mol_type = other DNA
tcctaatttcctctgtatattc

SEQ ID NO: 119391 - DNA, 22 bp, synthetic construct
  misc_feature 1..22: note = chemically synthesized
  source 1..22: mol_type = other DNA
atttcctctgtatattcacggt

SEQ ID NO: 119392 - DNA, 22 bp, synthetic construct
  misc_feature 1..22: note = chemically synthesized
  source 1..22: mol_type = other DNA
cctctgtatattcacggtgtta

SEQ ID NO: 119393 - DNA, 22 bp, synthetic construct
  misc_feature 1..22: note = chemically synthesized
  source 1..22: mol_type = other DNA
ctctgtatattcacggtgttaa

SEQ ID NO: 119394 - DNA, 22 bp, synthetic construct
  misc_feature 1..22: note = chemically synthesized
  source 1..22: mol_type = other DNA
tgtatattcacggtgttaatga

SEQ ID NO: 119395 - DNA, 22 bp, synthetic construct
  misc_feature 1..22: note = chemically synthesized
  source 1..22: mol_type = other DNA
tatattcacggtgttaatgaca

SEQ ID NO: 119396 - DNA, 22 bp, synthetic construct
  misc_feature 1..22: note = chemically synthesized
  source 1..22: mol_type = other DNA
acggtgttaatgacactaaaca

SEQ ID NO: 119397 - DNA, 22 bp, synthetic construct
  misc_feature 1..22: note = chemically synthesized
  source 1..22: mol_type = other DNA
atgacactaaacaattcttcca

SEQ ID NO: 119398 - DNA, 22 bp, synthetic construct
  misc_feature 1..22: note = chemically synthesized
  source 1..22: mol_type = other DNA
aacaattcttccagtttatcta

SEQ ID NO: 119399 - DNA, 22 bp, synthetic construct
  misc_feature 1..22: note = chemically synthesized
  source 1..22: mol_type = other DNA
ttccagtttatctagtatgctt

SEQ ID NO: 119400 - DNA, 22 bp, synthetic construct
  misc_feature 1..22: note = chemically synthesized
  source 1..22: mol_type = other DNA
ccagtttatctagtatgcttgc

SEQ ID NO: 119401 - DNA, 22 bp, synthetic construct
  misc_feature 1..22: note = chemically synthesized
  source 1..22: mol_type = other DNA
cagtttatctagtatgcttgct

SEQ ID NO: 119402 - DNA, 22 bp, synthetic construct
  misc_feature 1..22: note = chemically synthesized
  source 1..22: mol_type = other DNA
atctagtatgcttgctcatagg

SEQ ID NO: 119403 - DNA, 22 bp, synthetic construct
  misc_feature 1..22: note = chemically synthesized
  source 1..22: mol_type = other DNA
tctagtatgcttgctcataggt

SEQ ID NO: 119404 - DNA, 22 bp, synthetic construct
  misc_feature 1..22: note = chemically synthesized
  source 1..22: mol_type = other DNA
gtatgcttgctcataggtaaac

SEQ ID NO: 119405 - DNA, 22 bp, synthetic construct
  misc_feature 1..22: note = chemically synthesized
  source 1..22: mol_type = other DNA
gctcataggtaaacatttgtat

SEQ ID NO: 119406 - DNA, 22 bp, synthetic construct
  misc_feature 1..22: note = chemically synthesized
  source 1..22: mol_type = other DNA
ctcataggtaaacatttgtatt

SEQ ID NO: 119407 - DNA, 22 bp, synthetic construct
  misc_feature 1..22: note = chemically synthesized
  source 1..22: mol_type = other DNA
ataggtaaacatttgtattttc

SEQ ID NO: 119408 - DNA, 22 bp, synthetic construct
  misc_feature 1..22: note = chemically synthesized
  source 1..22: mol_type = other DNA
gtattttcattcttcctggaat

SEQ ID NO: 119409 - DNA, 22 bp, synthetic construct
  misc_feature 1..22: note = chemically synthesized
  source 1..22: mol_type = other DNA
tattttcattcttcctggaata

SEQ ID NO: 119410 - DNA, 22 bp, synthetic construct
  misc_feature 1..22: note = chemically synthesized
  source 1..22: mol_type = other DNA
tcattcttcctggaataaaaac

SEQ ID NO: 119411 - DNA, 22 bp, synthetic construct
  misc_feature 1..22: note = chemically synthesized
  source 1..22: mol_type = other DNA
cattcttcctggaataaaaaca

SEQ ID NO: 119412 - DNA, 22 bp, synthetic construct
  misc_feature 1..22: note = chemically synthesized
  source 1..22: mol_type = other DNA
attcttcctggaataaaaacat

SEQ ID NO: 119413 - DNA, 22 bp, synthetic construct
  misc_feature 1..22: note = chemically synthesized
  source 1..22: mol_type = other DNA
ttcctggaataaaaacattttt

SEQ ID NO: 119414 - DNA, 22 bp, synthetic construct
  misc_feature 1..22: note = chemically synthesized
  source 1..22: mol_type = other DNA
cctggaataaaaacattttttc

SEQ ID NO: 119415 - DNA, 22 bp, synthetic construct
  misc_feature 1..22: note = chemically synthesized
  source 1..22: mol_type = other DNA
ctggaataaaaacattttttcc

SEQ ID NO: 119416 - DNA, 22 bp, synthetic construct
  misc_feature 1..22: note = chemically synthesized
  source 1..22: mol_type = other DNA
gaataaaaacattttttcctga

SEQ ID NO: 119417 - DNA, 22 bp, synthetic construct
  misc_feature 1..22: note = chemically synthesized
  source 1..22: mol_type = other DNA
tttcctgaaatagctttccctt

SEQ ID NO: 119418 - DNA, 22 bp, synthetic construct
  misc_feature 1..22: note = chemically synthesized
  source 1..22: mol_type = other DNA
ttcctgaaatagctttccctta

SEQ ID NO: 119419 - DNA, 22 bp, synthetic construct
  misc_feature 1..22: note = chemically synthesized
  source 1..22: mol_type = other DNA
tcctgaaatagctttcccttaa

SEQ ID NO: 119420 - DNA, 22 bp, synthetic construct
  misc_feature 1..22: note = chemically synthesized
  source 1..22: mol_type = other DNA
cctgaaatagctttcccttaat

SEQ ID NO: 119421 - DNA, 22 bp, synthetic construct
  misc_feature 1..22: note = chemically synthesized
  source 1..22: mol_type = other DNA
ctgaaatagctttcccttaatc

SEQ ID NO: 119422 - DNA, 22 bp, synthetic construct
  misc_feature 1..22: note = chemically synthesized
  source 1..22: mol_type = other DNA
aaatagctttcccttaatcttt

SEQ ID NO: 119423 - DNA, 22 bp, synthetic construct
  misc_feature 1..22: note = chemically synthesized
  source 1..22: mol_type = other DNA
tcccttaatctttgtctagtta

SEQ ID NO: 119424 - DNA, 22 bp, synthetic construct
  misc_feature 1..22: note = chemically synthesized
  source 1..22: mol_type = other DNA
cccttaatctttgtctagttaa

SEQ ID NO: 119425 - DNA, 22 bp, synthetic construct
  misc_feature 1..22: note = chemically synthesized
  source 1..22: mol_type = other DNA
ccttaatctttgtctagttaac

SEQ ID NO: 119426 - DNA, 22 bp, synthetic construct
  misc_feature 1..22: note = chemically synthesized
  source 1..22: mol_type = other DNA
aatctttgtctagttaacttct

SEQ ID NO: 119427 - DNA, 22 bp, synthetic construct
  misc_feature 1..22: note = chemically synthesized
  source 1..22: mol_type = other DNA
atctttgtctagttaacttcta

SEQ ID NO: 119428 - DNA, 22 bp, synthetic construct
  misc_feature 1..22: note = chemically synthesized
  source 1..22: mol_type = other DNA
tgtctagttaacttctactaat

SEQ ID NO: 119429 - DNA, 22 bp, synthetic construct
  misc_feature 1..22: note = chemically synthesized
  source 1..22: mol_type = other DNA
gtctagttaacttctactaata

SEQ ID NO: 119430 - DNA, 22 bp, synthetic construct
  misc_feature 1..22: note = chemically synthesized
  source 1..22: mol_type = other DNA
tctagttaacttctactaatat

SEQ ID NO: 119431 - DNA, 22 bp, synthetic construct
  misc_feature 1..22: note = chemically synthesized
  source 1..22: mol_type = other DNA
gttaacttctactaatataacc

SEQ ID NO: 119432 - DNA, 22 bp, synthetic construct
  misc_feature 1..22: note = chemically synthesized
  source 1..22: mol_type = other DNA
acttctactaatataacccacc

SEQ ID NO: 119433 - DNA, 22 bp, synthetic construct
  misc_feature 1..22: note = chemically synthesized
  source 1..22: mol_type = other DNA
ctactaatataacccaccttag

SEQ ID NO: 119434 - DNA, 22 bp, synthetic construct
  misc_feature 1..22: note = chemically synthesized
  source 1..22: mol_type = other DNA
tactaatataacccaccttagc

SEQ ID NO: 119435 - DNA, 22 bp, synthetic construct
  misc_feature 1..22: note = chemically synthesized
  source 1..22: mol_type = other DNA
ctaatataacccaccttagctt

SEQ ID NO: 119436 - DNA, 22 bp, synthetic construct
  misc_feature 1..22: note = chemically synthesized
  source 1..22: mol_type = other DNA
atataacccaccttagcttaga

SEQ ID NO: 119437 - DNA, 22 bp, synthetic construct
  misc_feature 1..22: note = chemically synthesized
  source 1..22: mol_type = other DNA
agcttagatatgatgtccttca

SEQ ID NO: 119438 - DNA, 22 bp, synthetic construct
  misc_feature 1..22: note = chemically synthesized
  source 1..22: mol_type = other DNA
gcttagatatgatgtccttcag

SEQ ID NO: 119439 - DNA, 22 bp, synthetic construct
  misc_feature 1..22: note = chemically synthesized
  source 1..22: mol_type = other DNA
agatatgatgtccttcagaagg

SEQ ID NO: 119440 - DNA, 22 bp, synthetic construct
  misc_feature 1..22: note = chemically synthesized
  source 1..22: mol_type = other DNA
gatatgatgtccttcagaaggc

SEQ ID NO: 119441 - DNA, 22 bp, synthetic construct
  misc_feature 1..22: note = chemically synthesized
  source 1..22: mol_type = other DNA
cagaaggccttcttaaattccc

SEQ ID NO: 119442 - DNA, 22 bp, synthetic construct
  misc_feature 1..22: note = chemically synthesized
  source 1..22: mol_type = other DNA
agaaggccttcttaaattcccc

SEQ ID NO: 119443 - DNA, 22 bp, synthetic construct
  misc_feature 1..22: note = chemically synthesized
  source 1..22: mol_type = other DNA
cttaaattccccaagtttagtt

SEQ ID NO: 119444 - DNA, 22 bp, synthetic construct
  misc_feature 1..22: note = chemically synthesized
  source 1..22: mol_type = other DNA
ttaaattccccaagtttagttt

SEQ ID NO: 119445 - DNA, 22 bp, synthetic construct
  misc_feature 1..22: note = chemically synthesized
  source 1..22: mol_type = other DNA
aaattccccaagtttagtttga

SEQ ID NO: 119446 - DNA, 22 bp, synthetic construct
  misc_feature 1..22: note = chemically synthesized
  source 1..22: mol_type = other DNA
aattccccaagtttagtttgaa

SEQ ID NO: 119447 - DNA, 22 bp, synthetic construct
  misc_feature 1..22: note = chemically synthesized
  source 1..22: mol_type = other DNA
cccaagtttagtttgaataccc

SEQ ID NO: 119448 - DNA, 22 bp, synthetic construct
  misc_feature 1..22: note = chemically synthesized
  source 1..22: mol_type = other DNA
agtttgaataccctctcctatg

SEQ ID NO: 119449 - DNA, 22 bp, synthetic construct
  misc_feature 1..22: note = chemically synthesized
  source 1..22: mol_type = other DNA
gtttgaataccctctcctatgt

SEQ ID NO: 119450 - DNA, 22 bp, synthetic construct
  misc_feature 1..22: note = chemically synthesized
  source 1..22: mol_type = other DNA
gaataccctctcctatgtgttc

SEQ ID NO: 119451 - DNA, 22 bp, synthetic construct
  misc_feature 1..22: note = chemically synthesized
  source 1..22: mol_type = other DNA
aataccctctcctatgtgttcc

SEQ ID NO: 119452 - DNA, 22 bp, synthetic construct
  misc_feature 1..22: note = chemically synthesized
  source 1..22: mol_type = other DNA
tcctatgtgttcctgtagttca

SEQ ID NO: 119453 - DNA, 22 bp, synthetic construct
  misc_feature 1..22: note = chemically synthesized
  source 1..22: mol_type = other DNA
ctatgtgttcctgtagttcact

SEQ ID NO: 119454 - DNA, 22 bp, synthetic construct
  misc_feature 1..22: note = chemically synthesized
  source 1..22: mol_type = other DNA
tgtgttcctgtagttcactatg

SEQ ID NO: 119455 - DNA, 22 bp, synthetic construct
  misc_feature 1..22: note = chemically synthesized
  source 1..22: mol_type = other DNA
ctgtagttcactatgcactaat

SEQ ID NO: 119456 - DNA, 22 bp, synthetic construct
  misc_feature 1..22: note = chemically synthesized
  source 1..22: mol_type = other DNA
tagttcactatgcactaattac

SEQ ID NO: 119457 - DNA, 22 bp, synthetic construct
  misc_feature 1..22: note = chemically synthesized
  source 1..22: mol_type = other DNA
actatgcactaattaccatgat

SEQ ID NO: 119458 - DNA, 22 bp, synthetic construct
  misc_feature 1..22: note = chemically synthesized
  source 1..22: mol_type = other DNA
tgcactaattaccatgatattt

SEQ ID NO: 119459 - DNA, 22 bp, synthetic construct
  misc_feature 1..22: note = chemically synthesized
  source 1..22: mol_type = other DNA
attaccatgatattttccctgc

SEQ ID NO: 119460 - DNA, 22 bp, synthetic construct
  misc_feature 1..22: note = chemically synthesized
  source 1..22: mol_type = other DNA
ccatgatattttccctgcagca

SEQ ID NO: 119461 - DNA, 22 bp, synthetic construct
  misc_feature 1..22: note = chemically synthesized
  source 1..22: mol_type = other DNA
tccctgcagcattgtcaatttc

SEQ ID NO: 119462 - DNA, 22 bp, synthetic construct
  misc_feature 1..22: note = chemically synthesized
  source 1..22: mol_type = other DNA
ccctgcagcattgtcaatttct

SEQ ID NO: 119463 - DNA, 22 bp, synthetic construct
  misc_feature 1..22: note = chemically synthesized
  source 1..22: mol_type = other DNA
cctgcagcattgtcaatttctg

SEQ ID NO: 119464 - DNA, 22 bp, synthetic construct
  misc_feature 1..22: note = chemically synthesized
  source 1..22: mol_type = other DNA
cagcattgtcaatttctgtatt

SEQ ID NO: 119465 - DNA, 22 bp, synthetic construct
  misc_feature 1..22: note = chemically synthesized
  source 1..22: mol_type = other DNA
tcaatttctgtattgcttctat

SEQ ID NO: 119466 - DNA, 22 bp, synthetic construct
  misc_feature 1..22: note = chemically synthesized
  source 1..22: mol_type = other DNA
ctgtattgcttctataatgtga

SEQ ID NO: 119467 - DNA, 22 bp, synthetic construct
  misc_feature 1..22: note = chemically synthesized
  source 1..22: mol_type = other DNA
tgtattgcttctataatgtgaa

SEQ ID NO: 119468 - DNA, 22 bp, synthetic construct
  misc_feature 1..22: note = chemically synthesized
  source 1..22: mol_type = other DNA
tattgcttctataatgtgaatt

SEQ ID NO: 119469 - DNA, 22 bp, synthetic construct
  misc_feature 1..22: note = chemically synthesized
  source 1..22: mol_type = other DNA
cttctataatgtgaattccttg

SEQ ID NO: 119470 - DNA, 22 bp, synthetic construct
  misc_feature 1..22: note = chemically synthesized
  source 1..22: mol_type = other DNA
ctataatgtgaattccttgtgg

SEQ ID NO: 119471 - DNA, 22 bp, synthetic construct
  misc_feature 1..22: note = chemically synthesized
  source 1..22: mol_type = other DNA
tataatgtgaattccttgtgga

SEQ ID NO: 119472 - DNA, 22 bp, synthetic construct
  misc_feature 1..22: note = chemically synthesized
  source 1..22: mol_type = other DNA
taatgtgaattccttgtggaca

SEQ ID NO: 119473 - DNA, 22 bp, synthetic construct
  misc_feature 1..22: note = chemically synthesized
  source 1..22: mol_type = other DNA
cttgtggacataaaccatgact

SEQ ID NO: 119474 - DNA, 22 bp, synthetic construct
  misc_feature 1..22: note = chemically synthesized
  source 1..22: mol_type = other DNA
gtggacataaaccatgactgtc

SEQ ID NO: 119475 - DNA, 22 bp, synthetic construct
  misc_feature 1..22: note = chemically synthesized
  source 1..22: mol_type = other DNA
tggacataaaccatgactgtct

SEQ ID NO: 119476 - DNA, 22 bp, synthetic construct
  misc_feature 1..22: note = chemically synthesized
  source 1..22: mol_type = other DNA
tctcttttttaattttaatatt

SEQ ID NO: 119477 - DNA, 22 bp, synthetic construct
  misc_feature 1..22: note = chemically synthesized
  source 1..22: mol_type = other DNA
ttttttaattttaatattagct

SEQ ID NO: 119478 - DNA, 22 bp, synthetic construct
  misc_feature 1..22: note = chemically synthesized
  source 1..22: mol_type = other DNA
ttttaattttaatattagctct

SEQ ID NO: 119479 - DNA, 22 bp, synthetic construct
  misc_feature 1..22: note = chemically synthesized
  source 1..22: mol_type = other DNA
tttaattttaatattagctcta

SEQ ID NO: 119480 - DNA, 22 bp, synthetic construct
  misc_feature 1..22: note = chemically synthesized
  source 1..22: mol_type = other DNA
ttaattttaatattagctctag

SEQ ID NO: 119481 - DNA, 22 bp, synthetic construct
  misc_feature 1..22: note = chemically synthesized
  source 1..22: mol_type = other DNA
taattttaatattagctctagg

SEQ ID NO: 119482 - DNA, 22 bp, synthetic construct
  misc_feature 1..22: note = chemically synthesized
  source 1..22: mol_type = other DNA
aattttaatattagctctaggg

SEQ ID NO: 119483 - DNA, 22 bp, synthetic construct
  misc_feature 1..22: note = chemically synthesized
  source 1..22: mol_type = other DNA
attttaatattagctctaggga

SEQ ID NO: 119484 - DNA, 22 bp, synthetic construct
  misc_feature 1..22: note = chemically synthesized
  source 1..22: mol_type = other DNA
taatattagctctagggattga

SEQ ID NO: 119485 - DNA, 22 bp, synthetic construct
  misc_feature 1..22: note = chemically synthesized
  source 1..22: mol_type = other DNA
aatattagctctagggattgac

SEQ ID NO: 119486 - DNA, 22 bp, synthetic construct
  misc_feature 1..22: note = chemically synthesized
  source 1..22: mol_type = other DNA
atattagctctagggattgact

SEQ ID NO: 119487 - DNA, 22 bp, synthetic construct
  misc_feature 1..22: note = chemically synthesized
  source 1..22: mol_type = other DNA
gctctagggattgactttttta

SEQ ID NO: 119488 - DNA, 22 bp, synthetic construct
  misc_feature 1..22: note = chemically synthesized
  source 1..22: mol_type = other DNA
tagggattgacttttttagcca

SEQ ID NO: 119489 - DNA, 22 bp, synthetic construct
  misc_feature 1..22: note = chemically synthesized
  source 1..22: mol_type = other DNA
gggattgacttttttagccacc

SEQ ID NO: 119490 - DNA, 22 bp, synthetic construct
  misc_feature 1..22: note = chemically synthesized
  source 1..22: mol_type = other DNA
acttttttagccaccatatcat

SEQ ID NO: 119491 - DNA, 22 bp, synthetic construct
  misc_feature 1..22: note = chemically synthesized
  source 1..22: mol_type = other DNA
ttttagccaccatatcattgga

SEQ ID NO: 119492 - DNA, 22 bp, synthetic construct
  misc_feature 1..22: note = chemically synthesized
  source 1..22: mol_type = other DNA
tttagccaccatatcattggaa

SEQ ID NO: 119493 - DNA, 22 bp, synthetic construct
  misc_feature 1..22: note = chemically synthesized
  source 1..22: mol_type = other DNA
ttagccaccatatcattggaat

SEQ ID NO: 119494 - DNA, 22 bp, synthetic construct
  misc_feature 1..22: note = chemically synthesized
  source 1..22: mol_type = other DNA
tagccaccatatcattggaatc

SEQ ID NO: 119495 - DNA, 22 bp, synthetic construct
  misc_feature 1..22: note = chemically synthesized
  source 1..22: mol_type = other DNA
agccaccatatcattggaatcc

SEQ ID NO: 119496 - DNA, 22 bp, synthetic construct
  misc_feature 1..22: note = chemically synthesized
  source 1..22: mol_type = other DNA
gccaccatatcattggaatcct

SEQ ID NO: 119497 - DNA, 22 bp, synthetic construct
  misc_feature 1..22: note = chemically synthesized
  source 1..22: mol_type = other DNA
gaatcctttaaatattatttga

SEQ ID NO: 119498 - DNA, 22 bp, synthetic construct
  misc_feature 1..22: note = chemically synthesized
  source 1..22: mol_type = other DNA
taaatattatttgaataaatta

SEQ ID NO: 119499 - DNA, 22 bp, synthetic construct
  misc_feature 1..22: note = chemically synthesized
  source 1..22: mol_type = other DNA
aaatattatttgaataaattat

SEQ ID NO: 119500 - DNA, 22 bp, synthetic construct
  misc_feature 1..22: note = chemically synthesized
  source 1..22: mol_type = other DNA
aatattatttgaataaattatt

SEQ ID NO: 119501 - DNA, 22 bp, synthetic construct
  misc_feature 1..22: note = chemically synthesized
  source 1..22: mol_type = other DNA
tttgaataaattattaaatatg

SEQ ID NO: 119502 - DNA, 22 bp, synthetic construct
  misc_feature 1..22: note = chemically synthesized
  source 1..22: mol_type = other DNA
gaataaattattaaatatgtat

SEQ ID NO: 119503 - DNA, 22 bp, synthetic construct
  misc_feature 1..22: note = chemically synthesized
  source 1..22: mol_type = other DNA
aataaattattaaatatgtatc

SEQ ID NO: 119504 - DNA, 22 bp, synthetic construct
  misc_feature 1..22: note = chemically synthesized
  source 1..22: mol_type = other DNA
ttaaatatgtatcattaccatt

SEQ ID NO: 119505 - DNA, 22 bp, synthetic construct
  misc_feature 1..22: note = chemically synthesized
  source 1..22: mol_type = other DNA
aatatgtatcattaccattaat

SEQ ID NO: 119506 - DNA, 22 bp, synthetic construct
  misc_feature 1..22: note = chemically synthesized
  source 1..22: mol_type = other DNA
ccattaatcttatttcaataat

SEQ ID NO: 119507 - DNA, 22 bp, synthetic construct
  misc_feature 1..22: note = chemically synthesized
  source 1..22: mol_type = other DNA
atcttatttcaataattatttc

SEQ ID NO: 119508 - DNA, 22 bp, synthetic construct
  misc_feature 1..22: note = chemically synthesized
  source 1..22: mol_type = other DNA
atttcaataattatttcaatat

SEQ ID NO: 119509 - DNA, 22 bp, synthetic construct
  misc_feature 1..22: note = chemically synthesized
  source 1..22: mol_type = other DNA
tttcaataattatttcaatatt

SEQ ID NO: 119510 - DNA, 22 bp, synthetic construct
  misc_feature 1..22: note = chemically synthesized
  source 1..22: mol_type = other DNA
caataattatttcaatattcaa

SEQ ID NO: 119511 - DNA, 22 bp, synthetic construct
  misc_feature 1..22: note = chemically synthesized
  source 1..22: mol_type = other DNA
aataattatttcaatattcaat

SEQ ID NO: 119512 - DNA, 22 bp, synthetic construct
  misc_feature 1..22: note = chemically synthesized
  source 1..22: mol_type = other DNA
tttcaatattcaattatttcaa

SEQ ID NO: 119513 - DNA, 22 bp, synthetic construct
  misc_feature 1..22: note = chemically synthesized
  source 1..22: mol_type = other DNA
caatattcaattatttcaataa

SEQ ID NO: 119514 - DNA, 22 bp, synthetic construct
  misc_feature 1..22: note = chemically synthesized
  source 1..22: mol_type = other DNA
aatattcaattatttcaataat

SEQ ID NO: 119515 - DNA, 22 bp, synthetic construct
  misc_feature 1..22: note = chemically synthesized
  source 1..22: mol_type = other DNA
aattatttcaataattattcat

SEQ ID NO: 119516 - DNA, 22 bp, synthetic construct
  misc_feature 1..22: note = chemically synthesized
  source 1..22: mol_type = other DNA
tttcaataattattcattaatt

SEQ ID NO: 119517 - DNA, 22 bp, synthetic construct
  misc_feature 1..22: note = chemically synthesized
  source 1..22: mol_type = other DNA
caataattattcattaattgat

SEQ ID NO: 119518 - DNA, 22 bp, synthetic construct
  misc_feature 1..22: note = chemically synthesized
  source 1..22: mol_type = other DNA
aataattattcattaattgatt

SEQ ID NO: 119519 - DNA, 22 bp, synthetic construct
  misc_feature 1..22: note = chemically synthesized
  source 1..22: mol_type = other DNA
ttcattaattgattcaataaat

SEQ ID NO: 119520 - DNA, 22 bp, synthetic construct
  misc_feature 1..22: note = chemically synthesized
  source 1..22: mol_type = other DNA
attaattgattcaataaataca

SEQ ID NO: 119521 - DNA, 22 bp, synthetic construct
  misc_feature 1..22: note = chemically synthesized
  source 1..22: mol_type = other DNA
attgattcaataaatacatatt

SEQ ID NO: 119522 - DNA, 22 bp, synthetic construct
  misc_feature 1..22: note = chemically synthesized
  source 1..22: mol_type = other DNA
attcaataaatacatattgaaa

SEQ ID NO: 119523 - DNA, 22 bp, synthetic construct
  misc_feature 1..22: note = chemically synthesized
  source 1..22: mol_type = other DNA
aataaatacatattgaaattgt

SEQ ID NO: 119524 - DNA, 22 bp, synthetic construct
  misc_feature 1..22: note = chemically synthesized
  source 1..22: mol_type = other DNA
aaattgtattacatggcagaca

SEQ ID NO: 119525 - DNA, 22 bp, synthetic construct
  misc_feature 1..22: note = chemically synthesized
  source 1..22: mol_type = other DNA
tattacatggcagacataattc

SEQ ID NO: 119526 - DNA, 22 bp, synthetic construct
  misc_feature 1..22: note = chemically synthesized
  source 1..22: mol_type = other DNA
catggcagacataattctatta

SEQ ID NO: 119527 - DNA, 22 bp, synthetic construct
  misc_feature 1..22: note = chemically synthesized
  source 1..22: mol_type = other DNA
tattaggttggtgcaaaagtaa

SEQ ID NO: 119528 - DNA, 22 bp, synthetic construct
  misc_feature 1..22: note = chemically synthesized
  source 1..22: mol_type = other DNA
ttaggttggtgcaaaagtaatt

SEQ ID NO: 119529 - DNA, 22 bp, synthetic construct
  misc_feature 1..22: note = chemically synthesized
  source 1..22: mol_type = other DNA
ggttggtgcaaaagtaattgtg

SEQ ID NO: 119530 - DNA, 22 bp, synthetic construct
  misc_feature 1..22: note = chemically synthesized
  source 1..22: mol_type = other DNA
gtgcaaaagtaattgtggtttt

SEQ ID NO: 119531 - DNA, 22 bp, synthetic construct
  misc_feature 1..22: note = chemically synthesized
  source 1..22: mol_type = other DNA
tggtttttaccattactttcaa

SEQ ID NO: 119532 - DNA, 22 bp, synthetic construct
  misc_feature 1..22: note = chemically synthesized
  source 1..22: mol_type = other DNA
ttaccattactttcaatggcaa

SEQ ID NO: 119533 - DNA, 22 bp, synthetic construct
  misc_feature 1..22: note = chemically synthesized
  source 1..22: mol_type = other DNA
taccattactttcaatggcaag

SEQ ID NO: 119534 - DNA, 22 bp, synthetic construct
  misc_feature 1..22: note = chemically synthesized
  source 1..22: mol_type = other DNA
accattactttcaatggcaaga

SEQ ID NO: 119535 - DNA, 22 bp, synthetic construct
  misc_feature 1..22: note = chemically synthesized
  source 1..22: mol_type = other DNA
ccattactttcaatggcaagaa

SEQ ID NO: 119536 - DNA, 22 bp, synthetic construct
  misc_feature 1..22: note = chemically synthesized
  source 1..22: mol_type = other DNA
ctttcaatggcaagaactgcaa

SEQ ID NO: 119537 - DNA, 22 bp, synthetic construct
  misc_feature 1..22: note = chemically synthesized
  source 1..22: mol_type = other DNA
tcaatggcaagaactgcaatta

SEQ ID NO: 119538 - DNA, 22 bp, synthetic construct
  misc_feature 1..22: note = chemically synthesized
  source 1..22: mol_type = other DNA
caatggcaagaactgcaattac

SEQ ID NO: 119539 - DNA, 22 bp, synthetic construct
  misc_feature 1..22: note = chemically synthesized
  source 1..22: mol_type = other DNA
aatggcaagaactgcaattact

SEQ ID NO: 119540 - DNA, 22 bp, synthetic construct
  misc_feature 1..22: note = chemically synthesized
  source 1..22: mol_type = other DNA
caattacttttacacctaggta

SEQ ID NO: 119541 - DNA, 22 bp, synthetic construct
  misc_feature 1..22: note = chemically synthesized
  source 1..22: mol_type = other DNA
cttttacacctaggtactgaaa

SEQ ID NO: 119542 - DNA, 22 bp, synthetic construct
  misc_feature 1..22: note = chemically synthesized
  source 1..22: mol_type = other DNA
ttacacctaggtactgaaaata

SEQ ID NO: 119543 - DNA, 22 bp, synthetic construct
  misc_feature 1..22: note = chemically synthesized
  source 1..22: mol_type = other DNA
tacacctaggtactgaaaatac

SEQ ID NO: 119544 - DNA, 22 bp, synthetic construct
  misc_feature 1..22: note = chemically synthesized
  source 1..22: mol_type = other DNA
acacctaggtactgaaaataca

SEQ ID NO: 119545 - DNA, 22 bp, synthetic construct
  misc_feature 1..22: note = chemically synthesized
  source 1..22: mol_type = other DNA
cacctaggtactgaaaatacaa

SEQ ID NO: 119546 - DNA, 22 bp, synthetic construct
  misc_feature 1..22: note = chemically synthesized
  source 1..22: mol_type = other DNA
ggtactgaaaatacaatgaaca

SEQ ID NO: 119547 - DNA, 22 bp, synthetic construct
  misc_feature 1..22: note = chemically synthesized
  source 1..22: mol_type = other DNA
aaaatacaatgaacagaaacag

SEQ ID NO: 119548 - DNA, 22 bp, synthetic construct
  misc_feature 1..22: note = chemically synthesized
  source 1..22: mol_type = other DNA
caatgcaaggtaatgtaatgca

SEQ ID NO: 119549 - DNA, 22 bp, synthetic construct
  misc_feature 1..22: note = chemically synthesized
  source 1..22: mol_type = other DNA
tatatagggtagtcagagaaga

SEQ ID NO: 119550 - DNA, 22 bp, synthetic construct
  misc_feature 1..22: note = chemically synthesized
  source 1..22: mol_type = other DNA
atatagggtagtcagagaagac

SEQ ID NO: 119551 - DNA, 22 bp, synthetic construct
  misc_feature 1..22: note = chemically synthesized
  source 1..22: mol_type = other DNA
tatagggtagtcagagaagacc

SEQ ID NO: 119552 - DNA, 22 bp, synthetic construct
  misc_feature 1..22: note = chemically synthesized
  source 1..22: mol_type = other DNA
tctgagtaggtaattttagaga

SEQ ID NO: 119553 - DNA, 22 bp, synthetic construct
  misc_feature 1..22: note = chemically synthesized
  source 1..22: mol_type = other DNA
tgagtaggtaattttagagaag

SEQ ID NO: 119554 - DNA, 22 bp, synthetic construct
  misc_feature 1..22: note = chemically synthesized
  source 1..22: mol_type = other DNA
agtaggtaattttagagaagaa

SEQ ID NO: 119555 - DNA, 22 bp, synthetic construct
  misc_feature 1..22: note = chemically synthesized
  source 1..22: mol_type = other DNA
tagagaagaaatcaaaatcaga

SEQ ID NO: 119556 - DNA, 22 bp, synthetic construct
  misc_feature 1..22: note = chemically synthesized
  source 1..22: mol_type = other DNA
agagaagaaatcaaaatcagag

SEQ ID NO: 119557 - DNA, 22 bp, synthetic construct
  misc_feature 1..22: note = chemically synthesized
  source 1..22: mol_type = other DNA
gagaagaaatcaaaatcagagg

SEQ ID NO: 119558 - DNA, 22 bp, synthetic construct
  misc_feature 1..22: note = chemically synthesized
  source 1..22: mol_type = other DNA
tcttagggaaaaacattcaagg

SEQ ID NO: 119559 - DNA, 22 bp, synthetic construct
  misc_feature 1..22: note = chemically synthesized
  source 1..22: mol_type = other DNA
agggaaaaacattcaaggaagg

SEQ ID NO: 119560 - DNA, 22 bp, synthetic construct
  misc_feature 1..22: note = chemically synthesized
  source 1..22: mol_type = other DNA
gggaaaaacattcaaggaagga

SEQ ID NO: 119561 - DNA, 22 bp, synthetic construct
  misc_feature 1..22: note = chemically synthesized
  source 1..22: mol_type = other DNA
aaggaaggaggaagaacaagtg

SEQ ID NO: 119562 - DNA, 22 bp, synthetic construct
  misc_feature 1..22: note = chemically synthesized
  source 1..22: mol_type = other DNA
ctgaagcagagagcagcttgac

SEQ ID NO: 119563 - DNA, 22 bp, synthetic construct
  misc_feature 1..22: note = chemically synthesized
  source 1..22: mol_type = other DNA
aagcagagagcagcttgacaag

SEQ ID NO: 119564 - DNA, 22 bp, synthetic construct
  misc_feature 1..22: note = chemically synthesized
  source 1..22: mol_type = other DNA
gacaagtttaaaagacaaaaga

SEQ ID NO: 119565 - DNA, 22 bp, synthetic construct
  misc_feature 1..22: note = chemically synthesized
  source 1..22: mol_type = other DNA
acaagtttaaaagacaaaagaa

SEQ ID NO: 119566 - DNA, 22 bp, synthetic construct
  misc_feature 1..22: note = chemically synthesized
  source 1..22: mol_type = other DNA
aaaagacaaaagaaggccaatg

SEQ ID NO: 119567 - DNA, 22 bp, synthetic construct
  misc_feature 1..22: note = chemically synthesized
  source 1..22: mol_type = other DNA
aaagacaaaagaaggccaatgt

SEQ ID NO: 119568 - DNA, 22 bp, synthetic construct
  misc_feature 1..22: note = chemically synthesized
  source 1..22: mol_type = other DNA
aatggaggaagcaaggtgggga

SEQ ID NO: 119569 - DNA, 22 bp, synthetic construct
  misc_feature 1..22: note = chemically synthesized
  source 1..22: mol_type = other DNA
gaagtagcagctaaatgctacg

SEQ ID NO: 119570 - DNA, 22 bp, synthetic construct
  misc_feature 1..22: note = chemically synthesized
  source 1..22: mol_type = other DNA
aagtagcagctaaatgctacgt

SEQ ID NO: 119571 - DNA, 22 bp, synthetic construct
  misc_feature 1..22: note = chemically synthesized
  source 1..22: mol_type = other DNA
aatgctacgtcatgtatgatct

SEQ ID NO: 119572 - DNA, 22 bp, synthetic construct
  misc_feature 1..22: note = chemically synthesized
  source 1..22: mol_type = other DNA
cgtcatgtatgatcttgcaggt

SEQ ID NO: 119573 - DNA, 22 bp, synthetic construct
  misc_feature 1..22: note = chemically synthesized
  source 1..22: mol_type = other DNA
gcaggtcacgcaagctactttg

SEQ ID NO: 119574 - DNA, 22 bp, synthetic construct
  misc_feature 1..22: note = chemically synthesized
  source 1..22: mol_type = other DNA
caggtcacgcaagctactttga

SEQ ID NO: 119575 - DNA, 22 bp, synthetic construct
  misc_feature 1..22: note = chemically synthesized
  source 1..22: mol_type = other DNA
ctttgaattttattatacttgt

SEQ ID NO: 119576 - DNA, 22 bp, synthetic construct
  misc_feature 1..22: note = chemically synthesized
  source 1..22: mol_type = other DNA
tgaattttattatacttgtgag

SEQ ID NO: 119577 - DNA, 22 bp, synthetic construct
  misc_feature 1..22: note = chemically synthesized
  source 1..22: mol_type = other DNA
gaattttattatacttgtgagc

SEQ ID NO: 119578 - DNA, 22 bp, synthetic construct
  misc_feature 1..22: note = chemically synthesized
  source 1..22: mol_type = other DNA
aattttattatacttgtgagct

SEQ ID NO: 119579 - DNA, 22 bp, synthetic construct
  misc_feature 1..22: note = chemically synthesized
  source 1..22: mol_type = other DNA
tattatacttgtgagcttcgag

SEQ ID NO: 119580 - DNA, 22 bp, synthetic construct
  misc_feature 1..22: note = chemically synthesized
  source 1..22: mol_type = other DNA
attatacttgtgagcttcgagt

SEQ ID NO: 119581 - DNA, 22 bp, synthetic construct
  misc_feature 1..22: note = chemically synthesized
  source 1..22: mol_type = other DNA
ttatacttgtgagcttcgagtt

SEQ ID NO: 119582 - DNA, 22 bp, synthetic construct
  misc_feature 1..22: note = chemically synthesized
  source 1..22: mol_type = other DNA
tacttgtgagcttcgagttgag

SEQ ID NO: 119583 - DNA, 22 bp, synthetic construct
  misc_feature 1..22: note = chemically synthesized
  source 1..22: mol_type = other DNA
gtgagcttcgagttgagagcag

SEQ ID NO: 119584 - DNA, 22 bp, synthetic construct
  misc_feature 1..22: note = chemically synthesized
  source 1..22: mol_type = other DNA
tgagcttcgagttgagagcaga

SEQ ID NO: 119585 - DNA, 22 bp, synthetic construct
  misc_feature 1..22: note = chemically synthesized
  source 1..22: mol_type = other DNA
cgagttgagagcagaggtgctg

SEQ ID NO: 119586 - DNA, 22 bp, synthetic construct
  misc_feature 1..22: note = chemically synthesized
  source 1..22: mol_type = other DNA
gagttgagagcagaggtgctgc

SEQ ID NO: 119587 - DNA, 22 bp, synthetic construct
  misc_feature 1..22: note = chemically synthesized
  source 1..22: mol_type = other DNA
agagcagaggtgctgcatggat

SEQ ID NO: 119588 - DNA, 22 bp, synthetic construct
  misc_feature 1..22: note = chemically synthesized
  source 1..22: mol_type = other DNA
catggatataaggcttacatca

SEQ ID NO: 119589 - DNA, 22 bp, synthetic construct
  misc_feature 1..22: note = chemically synthesized
  source 1..22: mol_type = other DNA
acatcactttggcaaggggtaa

SEQ ID NO: 119590 - DNA, 22 bp, synthetic construct
  misc_feature 1..22: note = chemically synthesized
  source 1..22: mol_type = other DNA
catcactttggcaaggggtaaa

SEQ ID NO: 119591 - DNA, 22 bp, synthetic construct
  misc_feature 1..22: note = chemically synthesized
  source 1..22: mol_type = other DNA
tggcaaggggtaaaaaatagtc

SEQ ID NO: 119592 - DNA, 22 bp, synthetic construct
  misc_feature 1..22: note = chemically synthesized
  source 1..22: mol_type = other DNA
ggcaaggggtaaaaaatagtcc

SEQ ID NO: 119593 - DNA, 22 bp, synthetic construct
  misc_feature 1..22: note = chemically synthesized
  source 1..22: mol_type = other DNA
gcaaggggtaaaaaatagtcca

SEQ ID NO: 119594 - DNA, 22 bp, synthetic construct
  misc_feature 1..22: note = chemically synthesized
  source 1..22: mol_type = other DNA
atcttttccatttctttacttc

SEQ ID NO: 119595 - DNA, 22 bp, synthetic construct
  misc_feature 1..22: note = chemically synthesized
  source 1..22: mol_type = other DNA
tcttttccatttctttacttct

SEQ ID NO: 119596 - DNA, 22 bp, synthetic construct
  misc_feature 1..22: note = chemically synthesized
  source 1..22: mol_type = other DNA
ttccatttctttacttctcagt

SEQ ID NO: 119597 - DNA, 22 bp, synthetic construct
  misc_feature 1..22: note = chemically synthesized
  source 1..22: mol_type = other DNA
tccatttctttacttctcagtt

SEQ ID NO: 119598 - DNA, 22 bp, synthetic construct
  misc_feature 1..22: note = chemically synthesized
  source 1..22: mol_type = other DNA
ccatttctttacttctcagttt

SEQ ID NO: 119599 - DNA, 22 bp, synthetic construct
  misc_feature 1..22: note = chemically synthesized
  source 1..22: mol_type = other DNA
catttctttacttctcagttta

SEQ ID NO: 119600 - DNA, 22 bp, synthetic construct
  misc_feature 1..22: note = chemically synthesized
  source 1..22: mol_type = other DNA
ctttacttctcagtttactact

SEQ ID NO: 119601 - DNA, 22 bp, synthetic construct
  misc_feature 1..22: note = chemically synthesized
  source 1..22: mol_type = other DNA
tttacttctcagtttactactc

SEQ ID NO: 119602 - DNA, 22 bp, synthetic construct
  misc_feature 1..22: note = chemically synthesized
  source 1..22: mol_type = other DNA
tacttctcagtttactactcaa

SEQ ID NO: 119603 - DNA, 22 bp, synthetic construct
  misc_feature 1..22: note = chemically synthesized
  source 1..22: mol_type = other DNA
acttctcagtttactactcaac

SEQ ID NO: 119604 - DNA, 22 bp, synthetic construct
  misc_feature 1..22: note = chemically synthesized
  source 1..22: mol_type = other DNA
cttctcagtttactactcaacc

SEQ ID NO: 119605 - DNA, 22 bp, synthetic construct
  misc_feature 1..22: note = chemically synthesized
  source 1..22: mol_type = other DNA
ctcagtttactactcaaccaac

SEQ ID NO: 119606 - DNA, 22 bp, synthetic construct
  misc_feature 1..22: note = chemically synthesized
  source 1..22: mol_type = other DNA
tcagtttactactcaaccaacc

SEQ ID NO: 119607 - DNA, 22 bp, synthetic construct
  misc_feature 1..22: note = chemically synthesized
  source 1..22: mol_type = other DNA
agtttactactcaaccaaccac

SEQ ID NO: 119608 - DNA, 22 bp, synthetic construct
  misc_feature 1..22: note = chemically synthesized
  source 1..22: mol_type = other DNA
actactcaaccaaccaccctat

SEQ ID NO: 119609 - DNA, 22 bp, synthetic construct
  misc_feature 1..22: note = chemically synthesized
  source 1..22: mol_type = other DNA
ctactcaaccaaccaccctata

SEQ ID NO: 119610 - DNA, 22 bp, synthetic construct
  misc_feature 1..22: note = chemically synthesized
  source 1..22: mol_type = other DNA
ctcaaccaaccaccctataatg

SEQ ID NO: 119611 - DNA, 22 bp, synthetic construct
  misc_feature 1..22: note = chemically synthesized
  source 1..22: mol_type = other DNA
aaccaaccaccctataatgttt

SEQ ID NO: 119612 - DNA, 22 bp, synthetic construct
  misc_feature 1..22: note = chemically synthesized
  source 1..22: mol_type = other DNA
taatgttttttttaaaacccac

SEQ ID NO: 119613 - DNA, 22 bp, synthetic construct
  misc_feature 1..22: note = chemically synthesized
  source 1..22: mol_type = other DNA
tttttaaaacccacttagctaa

SEQ ID NO: 119614 - DNA, 22 bp, synthetic construct
  misc_feature 1..22: note = chemically synthesized
  source 1..22: mol_type = other DNA
ttttaaaacccacttagctaaa

SEQ ID NO: 119615 - DNA, 22 bp, synthetic construct
  misc_feature 1..22: note = chemically synthesized
  source 1..22: mol_type = other DNA
tttaaaacccacttagctaaag

SEQ ID NO: 119616 - DNA, 22 bp, synthetic construct
  misc_feature 1..22: note = chemically synthesized
  source 1..22: mol_type = other DNA
ttaaaacccacttagctaaagc

SEQ ID NO: 119617 - DNA, 22 bp, synthetic construct
  misc_feature 1..22: note = chemically synthesized
  source 1..22: mol_type = other DNA
taaaacccacttagctaaagca

SEQ ID NO: 119618 - DNA, 22 bp, synthetic construct
  misc_feature 1..22: note = chemically synthesized
  source 1..22: mol_type = other DNA
aaaacccacttagctaaagcaa

SEQ ID NO: 119619 - DNA, 22 bp, synthetic construct
  misc_feature 1..22: note = chemically synthesized
  source 1..22: mol_type = other DNA
aaacccacttagctaaagcaat

SEQ ID NO: 119620 - DNA, 22 bp, synthetic construct
  misc_feature 1..22: note = chemically synthesized
  source 1..22: mol_type = other DNA
agctaaagcaatgctccttaaa

SEQ ID NO: 119621 - DNA, 22 bp, synthetic construct
  misc_feature 1..22: note = chemically synthesized
  source 1..22: mol_type = other DNA
gctaaagcaatgctccttaaat

SEQ ID NO: 119622 - DNA, 22 bp, synthetic construct
  misc_feature 1..22: note = chemically synthesized
  source 1..22: mol_type = other DNA
aagcaatgctccttaaattcac

SEQ ID NO: 119623 - DNA, 22 bp, synthetic construct
  misc_feature 1..22: note = chemically synthesized
  source 1..22: mol_type = other DNA
cttaaattcaccagtgacttct

SEQ ID NO: 119624 - DNA, 22 bp, synthetic construct
  misc_feature 1..22: note = chemically synthesized
  source 1..22: mol_type = other DNA
aaattcaccagtgacttctagg

SEQ ID NO: 119625 - DNA, 22 bp, synthetic construct
  misc_feature 1..22: note = chemically synthesized
  source 1..22: mol_type = other DNA
aattcaccagtgacttctaggg

SEQ ID NO: 119626 - DNA, 22 bp, synthetic construct
  misc_feature 1..22: note = chemically synthesized
  source 1..22: mol_type = other DNA
accagtgacttctaggggccaa

SEQ ID NO: 119627 - DNA, 22 bp, synthetic construct
  misc_feature 1..22: note = chemically synthesized
  source 1..22: mol_type = other DNA
ctaggggccaaatgcaatggag

SEQ ID NO: 119628 - DNA, 22 bp, synthetic construct
  misc_feature 1..22: note = chemically synthesized
  source 1..22: mol_type = other DNA
taggggccaaatgcaatggaga

SEQ ID NO: 119629 - DNA, 22 bp, synthetic construct
  misc_feature 1..22: note = chemically synthesized
  source 1..22: mol_type = other DNA
ggggccaaatgcaatggagagt

SEQ ID NO: 119630 - DNA, 22 bp, synthetic construct
  misc_feature 1..22: note = chemically synthesized
  source 1..22: mol_type = other DNA
aatcatacctgcttttattgat

SEQ ID NO: 119631 - DNA, 22 bp, synthetic construct
  misc_feature 1..22: note = chemically synthesized
  source 1..22: mol_type = other DNA
atcatacctgcttttattgatt

SEQ ID NO: 119632 - DNA, 22 bp, synthetic construct
  misc_feature 1..22: note = chemically synthesized
  source 1..22: mol_type = other DNA
cttttattgatttttttgtgca

SEQ ID NO: 119633 - DNA, 22 bp, synthetic construct
  misc_feature 1..22: note = chemically synthesized
  source 1..22: mol_type = other DNA
ttattgatttttttgtgcaata

SEQ ID NO: 119634 - DNA, 22 bp, synthetic construct
  misc_feature 1..22: note = chemically synthesized
  source 1..22: mol_type = other DNA
tattgatttttttgtgcaatag

SEQ ID NO: 119635 - DNA, 22 bp, synthetic construct
  misc_feature 1..22: note = chemically synthesized
  source 1..22: mol_type = other DNA
attgatttttttgtgcaatagt

SEQ ID NO: 119636 - DNA, 22 bp, synthetic construct
  misc_feature 1..22: note = chemically synthesized
  source 1..22: mol_type = other DNA
ttgatttttttgtgcaatagtt

SEQ ID NO: 119637 - DNA, 22 bp, synthetic construct
  misc_feature 1..22: note = chemically synthesized
  source 1..22: mol_type = other DNA
atttttttgtgcaatagttgtg

SEQ ID NO: 119638 - DNA, 22 bp, synthetic construct
  misc_feature 1..22: note = chemically synthesized
  source 1..22: mol_type = other DNA
ttttgtgcaatagttgtgtgct

SEQ ID NO: 119639 - DNA, 22 bp, synthetic construct
  misc_feature 1..22: note = chemically synthesized
  source 1..22: mol_type = other DNA
tttgtgcaatagttgtgtgctc

SEQ ID NO: 119640 - DNA, 22 bp, synthetic construct
  misc_feature 1..22: note = chemically synthesized
  source 1..22: mol_type = other DNA
ttgtgcaatagttgtgtgctct

SEQ ID NO: 119641 - DNA, 22 bp, synthetic construct
  misc_feature 1..22: note = chemically synthesized
  source 1..22: mol_type = other DNA
tgtgcaatagttgtgtgctctg

SEQ ID NO: 119642 - DNA, 22 bp, synthetic construct
  misc_feature 1..22: note = chemically synthesized
  source 1..22: mol_type = other DNA
gtgcaatagttgtgtgctctgg

SEQ ID NO: 119643 - DNA, 22 bp, synthetic construct
  misc_feature 1..22: note = chemically synthesized
  source 1..22: mol_type = other DNA
tgcaatagttgtgtgctctggc

SEQ ID NO: 119644 - DNA, 22 bp, synthetic construct
  misc_feature 1..22: note = chemically synthesized
  source 1..22: mol_type = other DNA
tgtgctctggccatgccttcct

SEQ ID NO: 119645 - DNA, 22 bp, synthetic construct
  misc_feature 1..22: note = chemically synthesized
  source 1..22: mol_type = other DNA
tggccatgccttcctttttaga

SEQ ID NO: 119646 - DNA, 22 bp, synthetic construct
  misc_feature 1..22: note = chemically synthesized
  source 1..22: mol_type = other DNA
gccatgccttcctttttagagc

SEQ ID NO: 119647 - DNA, 22 bp, synthetic construct
  misc_feature 1..22: note = chemically synthesized
  source 1..22: mol_type = other DNA
cctttttagagctctctctaga

SEQ ID NO: 119648 - DNA, 22 bp, synthetic construct
  misc_feature 1..22: note = chemically synthesized
  source 1..22: mol_type = other DNA
ctttttagagctctctctagaa

SEQ ID NO: 119649 - DNA, 22 bp, synthetic construct
  misc_feature 1..22: note = chemically synthesized
  source 1..22: mol_type = other DNA
tttagagctctctctagaaatt

SEQ ID NO: 119650 - DNA, 22 bp, synthetic construct
  misc_feature 1..22: note = chemically synthesized
  source 1..22: mol_type = other DNA
ttagagctctctctagaaattc

SEQ ID NO: 119651 - DNA, 22 bp, synthetic construct
  misc_feature 1..22: note = chemically synthesized
  source 1..22: mol_type = other DNA
tagagctctctctagaaattct

SEQ ID NO: 119652 - DNA, 22 bp, synthetic construct
  misc_feature 1..22: note = chemically synthesized
  source 1..22: mol_type = other DNA
agagctctctctagaaattctt

SEQ ID NO: 119653 - DNA, 22 bp, synthetic construct
  misc_feature 1..22: note = chemically synthesized
  source 1..22: mol_type = other DNA
gagctctctctagaaattctta

SEQ ID NO: 119654 - DNA, 22 bp, synthetic construct
  misc_feature 1..22: note = chemically synthesized
  source 1..22: mol_type = other DNA
tctctagaaattcttaatgcca

SEQ ID NO: 119655 - DNA, 22 bp, synthetic construct
  misc_feature 1..22: note = chemically synthesized
  source 1..22: mol_type = other DNA
tctagaaattcttaatgccaag

SEQ ID NO: 119656 - DNA, 22 bp, synthetic construct
  misc_feature 1..22: note = chemically synthesized
  source 1..22: mol_type = other DNA
tagaaattcttaatgccaagat

SEQ ID NO: 119657 - DNA, 22 bp, synthetic construct
  misc_feature 1..22: note = chemically synthesized
  source 1..22: mol_type = other DNA
gaaattcttaatgccaagatct

SEQ ID NO: 119658 - DNA, 22 bp, synthetic construct
  misc_feature 1..22: note = chemically synthesized
  source 1..22: mol_type = other DNA
ttaatgccaagatctgctggtt

SEQ ID NO: 119659 - DNA, 22 bp, synthetic construct
  misc_feature 1..22: note = chemically synthesized
  source 1..22: mol_type = other DNA
aatgccaagatctgctggttct

SEQ ID NO: 119660 - DNA, 22 bp, synthetic construct
  misc_feature 1..22: note = chemically synthesized
  source 1..22: mol_type = other DNA
atgccaagatctgctggttctc

SEQ ID NO: 119661 - DNA, 22 bp, synthetic construct
  misc_feature 1..22: note = chemically synthesized
  source 1..22: mol_type = other DNA
ctggttctcttctgatttttgt

SEQ ID NO: 119662 - DNA, 22 bp, synthetic construct
  misc_feature 1..22: note = chemically synthesized
  source 1..22: mol_type = other DNA
gttctcttctgatttttgtgat

SEQ ID NO: 119663 - DNA, 22 bp, synthetic construct
  misc_feature 1..22: note = chemically synthesized
  source 1..22: mol_type = other DNA
tcttctgatttttgtgatagct

SEQ ID NO: 119664 - DNA, 22 bp, synthetic construct
  misc_feature 1..22: note = chemically synthesized
  source 1..22: mol_type = other DNA
ttctgatttttgtgatagcttc

SEQ ID NO: 119665 - DNA, 22 bp, synthetic construct
  misc_feature 1..22: note = chemically synthesized
  source 1..22: mol_type = other DNA
ctgatttttgtgatagcttcta

SEQ ID NO: 119666 - DNA, 22 bp, synthetic construct
  misc_feature 1..22: note = chemically synthesized
  source 1..22: mol_type = other DNA
tgatttttgtgatagcttctat

SEQ ID NO: 119667 - DNA, 22 bp, synthetic construct
  misc_feature 1..22: note = chemically synthesized
  source 1..22: mol_type = other DNA
atttttgtgatagcttctatgc

SEQ ID NO: 119668 - DNA, 22 bp, synthetic construct
  misc_feature 1..22: note = chemically synthesized
  source 1..22: mol_type = other DNA
ttgtgatagcttctatgcactc

SEQ ID NO: 119669 - DNA, 22 bp, synthetic construct
  misc_feature 1..22: note = chemically synthesized
  source 1..22: mol_type = other DNA
tgtgatagcttctatgcactct

SEQ ID NO: 119670 - DNA, 22 bp, synthetic construct
  misc_feature 1..22: note = chemically synthesized
  source 1..22: mol_type = other DNA
gtgatagcttctatgcactctc

SEQ ID NO: 119671 - DNA, 22 bp, synthetic construct
  misc_feature 1..22: note = chemically synthesized
  source 1..22: mol_type = other DNA
tgatagcttctatgcactctct

SEQ ID NO: 119672 - DNA, 22 bp, synthetic construct
  misc_feature 1..22: note = chemically synthesized
  source 1..22: mol_type = other DNA
ctatgcactctcttatttccat

SEQ ID NO: 119673 - DNA, 22 bp, synthetic construct
  misc_feature 1..22: note = chemically synthesized
  source 1..22: mol_type = other DNA
tatgcactctcttatttccatt

SEQ ID NO: 119674 - DNA, 22 bp, synthetic construct
  misc_feature 1..22: note = chemically synthesized
  source 1..22: mol_type = other DNA
tgcactctcttatttccattgc

SEQ ID NO: 119675 - DNA, 22 bp, synthetic construct
  misc_feature 1..22: note = chemically synthesized
  source 1..22: mol_type = other DNA
tcttatttccattgctcaaata

SEQ ID NO: 119676 - DNA, 22 bp, synthetic construct
  misc_feature 1..22: note = chemically synthesized
  source 1..22: mol_type = other DNA
ttatttccattgctcaaatatt

SEQ ID NO: 119677 - DNA, 22 bp, synthetic construct
  misc_feature 1..22: note = chemically synthesized
  source 1..22: mol_type = other DNA
atttccattgctcaaatattta

SEQ ID NO: 119678 - DNA, 22 bp, synthetic construct
  misc_feature 1..22: note = chemically synthesized
  source 1..22: mol_type = other DNA
tttccattgctcaaatatttat

SEQ ID NO: 119679 - DNA, 22 bp, synthetic construct
  misc_feature 1..22: note = chemically synthesized
  source 1..22: mol_type = other DNA
ccattgctcaaatatttatgtt

SEQ ID NO: 119680 - DNA, 22 bp, synthetic construct
  misc_feature 1..22: note = chemically synthesized
  source 1..22: mol_type = other DNA
cattgctcaaatatttatgtta

SEQ ID NO: 119681 - DNA, 22 bp, synthetic construct
  misc_feature 1..22: note = chemically synthesized
  source 1..22: mol_type = other DNA
ctcaaatatttatgttattcag

SEQ ID NO: 119682 - DNA, 22 bp, synthetic construct
  misc_feature 1..22: note = chemically synthesized
  source 1..22: mol_type = other DNA
aaatatttatgttattcagttt

SEQ ID NO: 119683 - DNA, 22 bp, synthetic construct
  misc_feature 1..22: note = chemically synthesized
  source 1..22: mol_type = other DNA
atgttattcagtttactgtcct

SEQ ID NO: 119684 - DNA, 22 bp, synthetic construct
  misc_feature 1..22: note = chemically synthesized
  source 1..22: mol_type = other DNA
tgttattcagtttactgtcctt

SEQ ID NO: 119685 - DNA, 22 bp, synthetic construct
  misc_feature 1..22: note = chemically synthesized
  source 1..22: mol_type = other DNA
ttcagtttactgtccttgaaca

SEQ ID NO: 119686 - DNA, 22 bp, synthetic construct
  misc_feature 1..22: note = chemically synthesized
  source 1..22: mol_type = other DNA
agtttactgtccttgaacacct

SEQ ID NO: 119687 - DNA, 22 bp, synthetic construct
  misc_feature 1..22: note = chemically synthesized
  source 1..22: mol_type = other DNA
actgtccttgaacaccttaact

SEQ ID NO: 119688 - DNA, 22 bp, synthetic construct
  misc_feature 1..22: note = chemically synthesized
  source 1..22: mol_type = other DNA
ctgtccttgaacaccttaactt

SEQ ID NO: 119689 - DNA, 22 bp, synthetic construct
  misc_feature 1..22: note = chemically synthesized
  source 1..22: mol_type = other DNA
tccttgaacaccttaacttctc

SEQ ID NO: 119690 - DNA, 22 bp, synthetic construct
  misc_feature 1..22: note = chemically synthesized
  source 1..22: mol_type = other DNA
gaacaccttaacttctcattca

SEQ ID NO: 119691 - DNA, 22 bp, synthetic construct
  misc_feature 1..22: note = chemically synthesized
  source 1..22: mol_type = other DNA
aacaccttaacttctcattcat

SEQ ID NO: 119692 - DNA, 22 bp, synthetic construct
  misc_feature 1..22: note = chemically synthesized
  source 1..22: mol_type = other DNA
aacttctcattcattatattat

SEQ ID NO: 119693 - DNA, 22 bp, synthetic construct
  misc_feature 1..22: note = chemically synthesized
  source 1..22: mol_type = other DNA
acttctcattcattatattatc

SEQ ID NO: 119694 - DNA, 22 bp, synthetic construct
  misc_feature 1..22: note = chemically synthesized
  source 1..22: mol_type = other DNA
ctcattcattatattatctatt

SEQ ID NO: 119695 - DNA, 22 bp, synthetic construct
  misc_feature 1..22: note = chemically synthesized
  source 1..22: mol_type = other DNA
tcattcattatattatctatta

SEQ ID NO: 119696 - DNA, 22 bp, synthetic construct
  misc_feature 1..22: note = chemically synthesized
  source 1..22: mol_type = other DNA
attcattatattatctattatt

SEQ ID NO: 119697 - DNA, 22 bp, synthetic construct
  misc_feature 1..22: note = chemically synthesized
  source 1..22: mol_type = other DNA
attatattatctattattatta

SEQ ID NO: 119698 - DNA, 22 bp, synthetic construct
  misc_feature 1..22: note = chemically synthesized
  source 1..22: mol_type = other DNA
tattatctattattattattac

SEQ ID NO: 119699 - DNA, 22 bp, synthetic construct
  misc_feature 1..22: note = chemically synthesized
  source 1..22: mol_type = other DNA
tctattattattattacttata

SEQ ID NO: 119700 - DNA, 22 bp, synthetic construct
  misc_feature 1..22: note = chemically synthesized
  source 1..22: mol_type = other DNA
ttattattattacttatacagt

SEQ ID NO: 119701 - DNA, 22 bp, synthetic construct
  misc_feature 1..22: note = chemically synthesized
  source 1..22: mol_type = other DNA
ttattattacttatacagtggt

SEQ ID NO: 119702 - DNA, 22 bp, synthetic construct
  misc_feature 1..22: note = chemically synthesized
  source 1..22: mol_type = other DNA
ttattacttatacagtggtggc

SEQ ID NO: 119703 - DNA, 22 bp, synthetic construct
  misc_feature 1..22: note = chemically synthesized
  source 1..22: mol_type = other DNA
ttacttatacagtggtggctct

SEQ ID NO: 119704 - DNA, 22 bp, synthetic construct
  misc_feature 1..22: note = chemically synthesized
  source 1..22: mol_type = other DNA
cttatacagtggtggctcttag

SEQ ID NO: 119705 - DNA, 22 bp, synthetic construct
  misc_feature 1..22: note = chemically synthesized
  source 1..22: mol_type = other DNA
atacagtggtggctcttagaca

SEQ ID NO: 119706 - DNA, 22 bp, synthetic construct
  misc_feature 1..22: note = chemically synthesized
  source 1..22: mol_type = other DNA
tacagtggtggctcttagacat

SEQ ID NO: 119707 - DNA, 22 bp, synthetic construct
  misc_feature 1..22: note = chemically synthesized
  source 1..22: mol_type = other DNA
ttagacattaatctctagtcca

SEQ ID NO: 119708 - DNA, 22 bp, synthetic construct
  misc_feature 1..22: note = chemically synthesized
  source 1..22: mol_type = other DNA
agacattaatctctagtccaga

SEQ ID NO: 119709 - DNA, 22 bp, synthetic construct
  misc_feature 1..22: note = chemically synthesized
  source 1..22: mol_type = other DNA
gacattaatctctagtccagat

SEQ ID NO: 119710 - DNA, 22 bp, synthetic construct
  misc_feature 1..22: note = chemically synthesized
  source 1..22: mol_type = other DNA
atctctagtccagataactccg

SEQ ID NO: 119711 - DNA, 22 bp, synthetic construct
  misc_feature 1..22: note = chemically synthesized
  source 1..22: mol_type = other DNA
tagtccagataactccgttaca

SEQ ID NO: 119712 - DNA, 22 bp, synthetic construct
  misc_feature 1..22: note = chemically synthesized
  source 1..22: mol_type = other DNA
gtccagataactccgttacata

SEQ ID NO: 119713 - DNA, 22 bp, synthetic construct
  misc_feature 1..22: note = chemically synthesized
  source 1..22: mol_type = other DNA
cgttacatatcaggcctgagtt

SEQ ID NO: 119714 - DNA, 22 bp, synthetic construct
  misc_feature 1..22: note = chemically synthesized
  source 1..22: mol_type = other DNA
catatcaggcctgagtttctgc

SEQ ID NO: 119715 - DNA, 22 bp, synthetic construct
  misc_feature 1..22: note = chemically synthesized
  source 1..22: mol_type = other DNA
agtttctgccttctcactaggt

SEQ ID NO: 119716 - DNA, 22 bp, synthetic construct
  misc_feature 1..22: note = chemically synthesized
  source 1..22: mol_type = other DNA
ctgccttctcactaggtgtttc

SEQ ID NO: 119717 - DNA, 22 bp, synthetic construct
  misc_feature 1..22: note = chemically synthesized
  source 1..22: mol_type = other DNA
tgccttctcactaggtgtttcc

SEQ ID NO: 119718 - DNA, 22 bp, synthetic construct
  misc_feature 1..22: note = chemically synthesized
  source 1..22: mol_type = other DNA
ccttctcactaggtgtttccaa

SEQ ID NO: 119719 - DNA, 22 bp, synthetic construct
  misc_feature 1..22: note = chemically synthesized
  source 1..22: mol_type = other DNA
ctcactaggtgtttccaaaagg

SEQ ID NO: 119720 - DNA, 22 bp, synthetic construct
  misc_feature 1..22: note = chemically synthesized
  source 1..22: mol_type = other DNA
tcactaggtgtttccaaaagga

SEQ ID NO: 119721 - DNA, 22 bp, synthetic construct
  misc_feature 1..22: note = chemically synthesized
  source 1..22: mol_type = other DNA
actaggtgtttccaaaaggata

SEQ ID NO: 119722 - DNA, 22 bp, synthetic construct
  misc_feature 1..22: note = chemically synthesized
  source 1..22: mol_type = other DNA
ggtgtttccaaaaggatactga

SEQ ID NO: 119723 - DNA, 22 bp, synthetic construct
  misc_feature 1..22: note = chemically synthesized
  source 1..22: mol_type = other DNA
ccaaaaggatactgatgaaact

SEQ ID NO: 119724 - DNA, 22 bp, synthetic construct
  misc_feature 1..22: note = chemically synthesized
  source 1..22: mol_type = other DNA
caaaaggatactgatgaaactc

SEQ ID NO: 119725 - DNA, 22 bp, synthetic construct
  misc_feature 1..22: note = chemically synthesized
  source 1..22: mol_type = other DNA
atgaaactcaacacgtctaata

SEQ ID NO: 119726 - DNA, 22 bp, synthetic construct
  misc_feature 1..22: note = chemically synthesized
  source 1..22: mol_type = other DNA
aacacgtctaatattgagccca

SEQ ID NO: 119727 - DNA, 22 bp, synthetic construct
  misc_feature 1..22: note = chemically synthesized
  source 1..22: mol_type = other DNA
atattgagcccagcatccatct

SEQ ID NO: 119728 - DNA, 22 bp, synthetic construct
  misc_feature 1..22: note = chemically synthesized
  source 1..22: mol_type = other DNA
agcccagcatccatcttttcac

SEQ ID NO: 119729 - DNA, 22 bp, synthetic construct
  misc_feature 1..22: note = chemically synthesized
  source 1..22: mol_type = other DNA
ttcacacctgattcttctcata

SEQ ID NO: 119730 - DNA, 22 bp, synthetic construct
  misc_feature 1..22: note = chemically synthesized
  source 1..22: mol_type = other DNA
tcacacctgattcttctcatat

SEQ ID NO: 119731 - DNA, 22 bp, synthetic construct
  misc_feature 1..22: note = chemically synthesized
  source 1..22: mol_type = other DNA
cacacctgattcttctcatatt

SEQ ID NO: 119732 - DNA, 22 bp, synthetic construct
  misc_feature 1..22: note = chemically synthesized
  source 1..22: mol_type = other DNA
acacctgattcttctcatattt

SEQ ID NO: 119733 - DNA, 22 bp, synthetic construct
  misc_feature 1..22: note = chemically synthesized
  source 1..22: mol_type = other DNA
attcttctcatatttatgcatt

SEQ ID NO: 119734 - DNA, 22 bp, synthetic construct
  misc_feature 1..22: note = chemically synthesized
  source 1..22: mol_type = other DNA
ttctcatatttatgcatttttt

SEQ ID NO: 119735 - DNA, 22 bp, synthetic construct
  misc_feature 1..22: note = chemically synthesized
  source 1..22: mol_type = other DNA
ctcatatttatgcattttttat

SEQ ID NO: 119736 - DNA, 22 bp, synthetic construct
  misc_feature 1..22: note = chemically synthesized
  source 1..22: mol_type = other DNA
tcatatttatgcattttttata

SEQ ID NO: 119737 - DNA, 22 bp, synthetic construct
  misc_feature 1..22: note = chemically synthesized
  source 1..22: mol_type = other DNA
atatttatgcattttttataat

SEQ ID NO: 119738 - DNA, 22 bp, synthetic construct
  misc_feature 1..22: note = chemically synthesized
  source 1..22: mol_type = other DNA
atgcattttttataatattatt

SEQ ID NO: 119739 - DNA, 22 bp, synthetic construct
  misc_feature 1..22: note = chemically synthesized
  source 1..22: mol_type = other DNA
tgcattttttataatattattc

SEQ ID NO: 119740 - DNA, 22 bp, synthetic construct
  misc_feature 1..22: note = chemically synthesized
  source 1..22: mol_type = other DNA
tttataatattattcaccattt

SEQ ID NO: 119741 - DNA, 22 bp, synthetic construct
  misc_feature 1..22: note = chemically synthesized
  source 1..22: mol_type = other DNA
ttataatattattcaccatttc

SEQ ID NO: 119742 - DNA, 22 bp, synthetic construct
  misc_feature 1..22: note = chemically synthesized
  source 1..22: mol_type = other DNA
tataatattattcaccatttcc

SEQ ID NO: 119743 - DNA, 22 bp, synthetic construct
  misc_feature 1..22: note = chemically synthesized
  source 1..22: mol_type = other DNA
ataatattattcaccatttcct

SEQ ID NO: 119744 - DNA, 22 bp, synthetic construct
  misc_feature 1..22: note = chemically synthesized
  source 1..22: mol_type = other DNA
taatattattcaccatttcctg

SEQ ID NO: 119745 - DNA, 22 bp, synthetic construct
  misc_feature 1..22: note = chemically synthesized
  source 1..22: mol_type = other DNA
ttcaccatttcctgccattcaa

SEQ ID NO: 119746 - DNA, 22 bp, synthetic construct
  misc_feature 1..22: note = chemically synthesized
  source 1..22: mol_type = other DNA
accatttcctgccattcaagac

SEQ ID NO: 119747 - DNA, 22 bp, synthetic construct
  misc_feature 1..22: note = chemically synthesized
  source 1..22: mol_type = other DNA
cctgccattcaagacaacattt

SEQ ID NO: 119748 - DNA, 22 bp, synthetic construct
  misc_feature 1..22: note = chemically synthesized
  source 1..22: mol_type = other DNA
ctgccattcaagacaacatttt

SEQ ID NO: 119749 - DNA, 22 bp, synthetic construct
  misc_feature 1..22: note = chemically synthesized
  source 1..22: mol_type = other DNA
ccattcaagacaacatttttga

SEQ ID NO: 119750 - DNA, 22 bp, synthetic construct
  misc_feature 1..22: note = chemically synthesized
  source 1..22: mol_type = other DNA
aagacaacatttttgagctgat

SEQ ID NO: 119751 - DNA, 22 bp, synthetic construct
  misc_feature 1..22: note = chemically synthesized
  source 1..22: mol_type = other DNA
ttgagctgatgctctactcaac

SEQ ID NO: 119752 - DNA, 22 bp, synthetic construct
  misc_feature 1..22: note = chemically synthesized
  source 1..22: mol_type = other DNA
tgagctgatgctctactcaacc

SEQ ID NO: 119753 - DNA, 22 bp, synthetic construct
  misc_feature 1..22: note = chemically synthesized
  source 1..22: mol_type = other DNA
gagctgatgctctactcaaccc

SEQ ID NO: 119754 - DNA, 22 bp, synthetic construct
  misc_feature 1..22: note = chemically synthesized
  source 1..22: mol_type = other DNA
agctgatgctctactcaaccct

SEQ ID NO: 119755 - DNA, 22 bp, synthetic construct
  misc_feature 1..22: note = chemically synthesized
  source 1..22: mol_type = other DNA
atgctctactcaaccctctccc

SEQ ID NO: 119756 - DNA, 22 bp, synthetic construct
  misc_feature 1..22: note = chemically synthesized
  source 1..22: mol_type = other DNA
tactcaaccctctccctctttc

SEQ ID NO: 119757 - DNA, 22 bp, synthetic construct
  misc_feature 1..22: note = chemically synthesized
  source 1..22: mol_type = other DNA
ctcaaccctctccctctttctg

SEQ ID NO: 119758 - DNA, 22 bp, synthetic construct
  misc_feature 1..22: note = chemically synthesized
  source 1..22: mol_type = other DNA
aaccctctccctctttctgtat

SEQ ID NO: 119759 - DNA, 22 bp, synthetic construct
  misc_feature 1..22: note = chemically synthesized
  source 1..22: mol_type = other DNA
tccctctttctgtatctaattt

SEQ ID NO: 119760 - DNA, 22 bp, synthetic construct
  misc_feature 1..22: note = chemically synthesized
  source 1..22: mol_type = other DNA
cctctttctgtatctaattttt

SEQ ID NO: 119761 - DNA, 22 bp, synthetic construct
  misc_feature 1..22: note = chemically synthesized
  source 1..22: mol_type = other DNA
tttctgtatctaatttttaact

SEQ ID NO: 119762 - DNA, 22 bp, synthetic construct
  misc_feature 1..22: note = chemically synthesized
  source 1..22: mol_type = other DNA
tctgtatctaatttttaactaa

SEQ ID NO: 119763 - DNA, 22 bp, synthetic construct
  misc_feature 1..22: note = chemically synthesized
  source 1..22: mol_type = other DNA
ctgtatctaatttttaactaag

SEQ ID NO: 119764 - DNA, 22 bp, synthetic construct
  misc_feature 1..22: note = chemically synthesized
  source 1..22: mol_type = other DNA
tgtatctaatttttaactaagt

SEQ ID NO: 119765 - DNA, 22 bp, synthetic construct
  misc_feature 1..22: note = chemically synthesized
  source 1..22: mol_type = other DNA
tatctaatttttaactaagttc

SEQ ID NO: 119766 - DNA, 22 bp, synthetic construct
  misc_feature 1..22: note = chemically synthesized
  source 1..22: mol_type = other DNA
atttttaactaagttcttttaa

SEQ ID NO: 119767 - DNA, 22 bp, synthetic construct
  misc_feature 1..22: note = chemically synthesized
  source 1..22: mol_type = other DNA
ttaactaagttcttttaatcta

SEQ ID NO: 119768 - DNA, 22 bp, synthetic construct
  misc_feature 1..22: note = chemically synthesized
  source 1..22: mol_type = other DNA
taactaagttcttttaatctat

SEQ ID NO: 119769 - DNA, 22 bp, synthetic construct
  misc_feature 1..22: note = chemically synthesized
  source 1..22: mol_type = other DNA
aactaagttcttttaatctatc

SEQ ID NO: 119770 - DNA, 22 bp, synthetic construct
  misc_feature 1..22: note = chemically synthesized
  source 1..22: mol_type = other DNA
actaagttcttttaatctatcc

SEQ ID NO: 119771 - DNA, 22 bp, synthetic construct
  misc_feature 1..22: note = chemically synthesized
  source 1..22: mol_type = other DNA
agttcttttaatctatccctgt

SEQ ID NO: 119772 - DNA, 22 bp, synthetic construct
  misc_feature 1..22: note = chemically synthesized
  source 1..22: mol_type = other DNA
ttttaatctatccctgtaatct

SEQ ID NO: 119773 - DNA, 22 bp, synthetic construct
  misc_feature 1..22: note = chemically synthesized
  source 1..22: mol_type = other DNA
ttaatctatccctgtaatctat

SEQ ID NO: 119774 - DNA, 22 bp, synthetic construct
  misc_feature 1..22: note = chemically synthesized
  source 1..22: mol_type = other DNA
taatctatccctgtaatctatt

SEQ ID NO: 119775 - DNA, 22 bp, synthetic construct
  misc_feature 1..22: note = chemically synthesized
  source 1..22: mol_type = other DNA
aatctatccctgtaatctattc

SEQ ID NO: 119776 - DNA, 22 bp, synthetic construct
  misc_feature 1..22: note = chemically synthesized
  source 1..22: mol_type = other DNA
atctatccctgtaatctattca

SEQ ID NO: 119777 - DNA, 22 bp, synthetic construct
  misc_feature 1..22: note = chemically synthesized
  source 1..22: mol_type = other DNA
tccctgtaatctattcatcttc

SEQ ID NO: 119778 - DNA, 22 bp, synthetic construct
  misc_feature 1..22: note = chemically synthesized
  source 1..22: mol_type = other DNA
taatctattcatcttcatctct

SEQ ID NO: 119779 - DNA, 22 bp, synthetic construct
  misc_feature 1..22: note = chemically synthesized
  source 1..22: mol_type = other DNA
ttcatcttcatctctgtagcca

SEQ ID NO: 119780 - DNA, 22 bp, synthetic construct
  misc_feature 1..22: note = chemically synthesized
  source 1..22: mol_type = other DNA
atcttcatctctgtagccaatg

SEQ ID NO: 119781 - DNA, 22 bp, synthetic construct
  misc_feature 1..22: note = chemically synthesized
  source 1..22: mol_type = other DNA
catctctgtagccaatgtcctt

SEQ ID NO: 119782 - DNA, 22 bp, synthetic construct
  misc_feature 1..22: note = chemically synthesized
  source 1..22: mol_type = other DNA
atctctgtagccaatgtccttg

SEQ ID NO: 119783 - DNA, 22 bp, synthetic construct
  misc_feature 1..22: note = chemically synthesized
  source 1..22: mol_type = other DNA
tgtagccaatgtccttgttctt

SEQ ID NO: 119784 - DNA, 22 bp, synthetic construct
  misc_feature 1..22: note = chemically synthesized
  source 1..22: mol_type = other DNA
tagccaatgtccttgttcttag

SEQ ID NO: 119785 - DNA, 22 bp, synthetic construct
  misc_feature 1..22: note = chemically synthesized
  source 1..22: mol_type = other DNA
gttcttagcttttccacacctg

SEQ ID NO: 119786 - DNA, 22 bp, synthetic construct
  misc_feature 1..22: note = chemically synthesized
  source 1..22: mol_type = other DNA
ttcttagcttttccacacctgc

SEQ ID NO: 119787 - DNA, 22 bp, synthetic construct
  misc_feature 1..22: note = chemically synthesized
  source 1..22: mol_type = other DNA
ttagcttttccacacctgcttg

SEQ ID NO: 119788 - DNA, 22 bp, synthetic construct
  misc_feature 1..22: note = chemically synthesized
  source 1..22: mol_type = other DNA
agcttttccacacctgcttgcc

SEQ ID NO: 119789 - DNA, 22 bp, synthetic construct
  misc_feature 1..22: note = chemically synthesized
  source 1..22: mol_type = other DNA
gcttttccacacctgcttgcct

SEQ ID NO: 119790 - DNA, 22 bp, synthetic construct
  misc_feature 1..22: note = chemically synthesized
  source 1..22: mol_type = other DNA
ttccacacctgcttgcctgacc

SEQ ID NO: 119791 - DNA, 22 bp, synthetic construct
  misc_feature 1..22: note = chemically synthesized
  source 1..22: mol_type = other DNA
tccacacctgcttgcctgacct

SEQ ID NO: 119792 - DNA, 22 bp, synthetic construct
  misc_feature 1..22: note = chemically synthesized
  source 1..22: mol_type = other DNA
ccacacctgcttgcctgacctg

SEQ ID NO: 119793 - DNA, 22 bp, synthetic construct
  misc_feature 1..22: note = chemically synthesized
  source 1..22: mol_type = other DNA
cacacctgcttgcctgacctgt

SEQ ID NO: 119794 - DNA, 22 bp, synthetic construct
  misc_feature 1..22: note = chemically synthesized
  source 1..22: mol_type = other DNA
cttgcctgacctgtcattcaac

SEQ ID NO: 119795 - DNA, 22 bp, synthetic construct
  misc_feature 1..22: note = chemically synthesized
  source 1..22: mol_type = other DNA
gcctgacctgtcattcaacatg

SEQ ID NO: 119796 - DNA, 22 bp, synthetic construct
  misc_feature 1..22: note = chemically synthesized
  source 1..22: mol_type = other DNA
cctgacctgtcattcaacatgc

SEQ ID NO: 119797 - DNA, 22 bp, synthetic construct
  misc_feature 1..22: note = chemically synthesized
  source 1..22: mol_type = other DNA
acctgtcattcaacatgcaaag

SEQ ID NO: 119798 - DNA, 22 bp, synthetic construct
  misc_feature 1..22: note = chemically synthesized
  source 1..22: mol_type = other DNA
tcattcaacatgcaaagccagg

SEQ ID NO: 119799 - DNA, 22 bp, synthetic construct
  misc_feature 1..22: note = chemically synthesized
  source 1..22: mol_type = other DNA
aacatgcaaagccaggctcctc

SEQ ID NO: 119800 - DNA, 22 bp, synthetic construct
  misc_feature 1..22: note = chemically synthesized
  source 1..22: mol_type = other DNA
ctccttcccttggtccatcctc

SEQ ID NO: 119801 - DNA, 22 bp, synthetic construct
  misc_feature 1..22: note = chemically synthesized
  source 1..22: mol_type = other DNA
cttcccttggtccatcctctac

SEQ ID NO: 119802 - DNA, 22 bp, synthetic construct
  misc_feature 1..22: note = chemically synthesized
  source 1..22: mol_type = other DNA
cccttggtccatcctctactgc

SEQ ID NO: 119803 - DNA, 22 bp, synthetic construct
  misc_feature 1..22: note = chemically synthesized
  source 1..22: mol_type = other DNA
ccttggtccatcctctactgca

SEQ ID NO: 119804 - DNA, 22 bp, synthetic construct
  misc_feature 1..22: note = chemically synthesized
  source 1..22: mol_type = other DNA
ggtccatcctctactgcagcca

SEQ ID NO: 119805 - DNA, 22 bp, synthetic construct
  misc_feature 1..22: note = chemically synthesized
  source 1..22: mol_type = other DNA
gtccatcctctactgcagccac

SEQ ID NO: 119806 - DNA, 22 bp, synthetic construct
  misc_feature 1..22: note = chemically synthesized
  source 1..22: mol_type = other DNA
tactgcagccaccgagattatg

SEQ ID NO: 119807 - DNA, 22 bp, synthetic construct
  misc_feature 1..22: note = chemically synthesized
  source 1..22: mol_type = other DNA
ctgcagccaccgagattatgca

SEQ ID NO: 119808 - DNA, 22 bp, synthetic construct
  misc_feature 1..22: note = chemically synthesized
  source 1..22: mol_type = other DNA
cagccaccgagattatgcagaa

SEQ ID NO: 119809 - DNA, 22 bp, synthetic construct
  misc_feature 1..22: note = chemically synthesized
  source 1..22: mol_type = other DNA
tgcagaaagtactaactctatg

SEQ ID NO: 119810 - DNA, 22 bp, synthetic construct
  misc_feature 1..22: note = chemically synthesized
  source 1..22: mol_type = other DNA
actctatgaatcactgcactgt

SEQ ID NO: 119811 - DNA, 22 bp, synthetic construct
  misc_feature 1..22: note = chemically synthesized
  source 1..22: mol_type = other DNA
tatgaatcactgcactgttttc

SEQ ID NO: 119812 - DNA, 22 bp, synthetic construct
  misc_feature 1..22: note = chemically synthesized
  source 1..22: mol_type = other DNA
tgaatcactgcactgttttcag

SEQ ID NO: 119813 - DNA, 22 bp, synthetic construct
  misc_feature 1..22: note = chemically synthesized
  source 1..22: mol_type = other DNA
cactgttttcagtacttcagta

SEQ ID NO: 119814 - DNA, 22 bp, synthetic construct
  misc_feature 1..22: note = chemically synthesized
  source 1..22: mol_type = other DNA
ttttcagtacttcagtagctcc

SEQ ID NO: 119815 - DNA, 22 bp, synthetic construct
  misc_feature 1..22: note = chemically synthesized
  source 1..22: mol_type = other DNA
tcagtacttcagtagctcctat

SEQ ID NO: 119816 - DNA, 22 bp, synthetic construct
  misc_feature 1..22: note = chemically synthesized
  source 1..22: mol_type = other DNA
cagtacttcagtagctcctatc

SEQ ID NO: 119817 - DNA, 22 bp, synthetic construct
  misc_feature 1..22: note = chemically synthesized
  source 1..22: mol_type = other DNA
agtacttcagtagctcctatca

SEQ ID NO: 119818 - DNA, 22 bp, synthetic construct
  misc_feature 1..22: note = chemically synthesized
  source 1..22: mol_type = other DNA
cagtagctcctatcattagaat

SEQ ID NO: 119819 - DNA, 22 bp, synthetic construct
  misc_feature 1..22: note = chemically synthesized
  source 1..22: mol_type = other DNA
agtagctcctatcattagaata

SEQ ID NO: 119820 - DNA, 22 bp, synthetic construct
  misc_feature 1..22: note = chemically synthesized
  source 1..22: mol_type = other DNA
ctatcattagaataaagttcaa

SEQ ID NO: 119821 - DNA, 22 bp, synthetic construct
  misc_feature 1..22: note = chemically synthesized
  source 1..22: mol_type = other DNA
tcattagaataaagttcaaact

SEQ ID NO: 119822 - DNA, 22 bp, synthetic construct
  misc_feature 1..22: note = chemically synthesized
  source 1..22: mol_type = other DNA
gaataaagttcaaacttgtaaa

SEQ ID NO: 119823 - DNA, 22 bp, synthetic construct
  misc_feature 1..22: note = chemically synthesized
  source 1..22: mol_type = other DNA
aaacttgtaaaagatctgtggt

SEQ ID NO: 119824 - DNA, 22 bp, synthetic construct
  misc_feature 1..22: note = chemically synthesized
  source 1..22: mol_type = other DNA
gtaaaagatctgtggtgatagt

SEQ ID NO: 119825 - DNA, 22 bp, synthetic construct
  misc_feature 1..22: note = chemically synthesized
  source 1..22: mol_type = other DNA
taaaagatctgtggtgatagtc

SEQ ID NO: 119826 - DNA, 22 bp, synthetic construct
  misc_feature 1..22: note = chemically synthesized
  source 1..22: mol_type = other DNA
tggtgatagtccaatttattga

SEQ ID NO: 119827 - DNA, 22 bp, synthetic construct
  misc_feature 1..22: note = chemically synthesized
  source 1..22: mol_type = other DNA
attgaggccatacatgatttag

SEQ ID NO: 119828 - DNA, 22 bp, synthetic construct
  misc_feature 1..22: note = chemically synthesized
  source 1..22: mol_type = other DNA
ttgaggccatacatgatttaga

SEQ ID NO: 119829 - DNA, 22 bp, synthetic construct
  misc_feature 1..22: note = chemically synthesized
  source 1..22: mol_type = other DNA
aggccatacatgatttagatgc

SEQ ID NO: 119830 - DNA, 22 bp, synthetic construct
  misc_feature 1..22: note = chemically synthesized
  source 1..22: mol_type = other DNA
agatgctgtgaaaagcttgaca

SEQ ID NO: 119831 - DNA, 22 bp, synthetic construct
  misc_feature 1..22: note = chemically synthesized
  source 1..22: mol_type = other DNA
gatgctgtgaaaagcttgacat

SEQ ID NO: 119832 - DNA, 22 bp, synthetic construct
  misc_feature 1..22: note = chemically synthesized
  source 1..22: mol_type = other DNA
tgaaaagcttgacataatcatg

SEQ ID NO: 119833 - DNA, 22 bp, synthetic construct
  misc_feature 1..22: note = chemically synthesized
  source 1..22: mol_type = other DNA
gacataatcatgaatatttcat

SEQ ID NO: 119834 - DNA, 22 bp, synthetic construct
  misc_feature 1..22: note = chemically synthesized
  source 1..22: mol_type = other DNA
acataatcatgaatatttcatg

SEQ ID NO: 119835 - DNA, 22 bp, synthetic construct
  misc_feature 1..22: note = chemically synthesized
  source 1..22: mol_type = other DNA
catgtaactatgaaacatttta

SEQ ID NO: 119836 - DNA, 22 bp, synthetic construct
  misc_feature 1..22: note = chemically synthesized
  source 1..22: mol_type = other DNA
atgtaactatgaaacattttat

SEQ ID NO: 119837 - DNA, 22 bp, synthetic construct
  misc_feature 1..22: note = chemically synthesized
  source 1..22: mol_type = other DNA
tgaaacattttattactacttc

SEQ ID NO: 119838 - DNA, 22 bp, synthetic construct
  misc_feature 1..22: note = chemically synthesized
  source 1..22: mol_type = other DNA
tattactacttcacaaggagaa

SEQ ID NO: 119839 - DNA, 22 bp, synthetic construct
  misc_feature 1..22: note = chemically synthesized
  source 1..22: mol_type = other DNA
attactacttcacaaggagaaa

SEQ ID NO: 119840 - DNA, 22 bp, synthetic construct
  misc_feature 1..22: note = chemically synthesized
  source 1..22: mol_type = other DNA
ttactacttcacaaggagaaaa

SEQ ID NO: 119841 - DNA, 22 bp, synthetic construct
  misc_feature 1..22: note = chemically synthesized
  source 1..22: mol_type = other DNA
ctacttcacaaggagaaaacta

SEQ ID NO: 119842 - DNA, 22 bp, synthetic construct
  misc_feature 1..22: note = chemically synthesized
  source 1..22: mol_type = other DNA
cttcacaaggagaaaactacaa

SEQ ID NO: 119843 - DNA, 22 bp, synthetic construct
  misc_feature 1..22: note = chemically synthesized
  source 1..22: mol_type = other DNA
cacaaggagaaaactacaaaaa

SEQ ID NO: 119844 - DNA, 22 bp, synthetic construct
  misc_feature 1..22: note = chemically synthesized
  source 1..22: mol_type = other DNA
acaaggagaaaactacaaaaag

SEQ ID NO: 119845 - DNA, 22 bp, synthetic construct
  misc_feature 1..22: note = chemically synthesized
  source 1..22: mol_type = other DNA
caaaaaggtaaacaatcatccc

SEQ ID NO: 119846 - DNA, 22 bp, synthetic construct
  misc_feature 1..22: note = chemically synthesized
  source 1..22: mol_type = other DNA
gtagtgagcgaaaatcaggata

SEQ ID NO: 119847 - DNA, 22 bp, synthetic construct
  misc_feature 1..22: note = chemically synthesized
  source 1..22: mol_type = other DNA
tgtctctctatgcatggccctg

SEQ ID NO: 119848 - DNA, 22 bp, synthetic construct
  misc_feature 1..22: note = chemically synthesized
  source 1..22: mol_type = other DNA
gtctctctatgcatggccctgg

SEQ ID NO: 119849 - DNA, 22 bp, synthetic construct
  misc_feature 1..22: note = chemically synthesized
  source 1..22: mol_type = other DNA
tctctctatgcatggccctggt

SEQ ID NO: 119850 - DNA, 22 bp, synthetic construct
  misc_feature 1..22: note = chemically synthesized
  source 1..22: mol_type = other DNA
tctatgcatggccctggtagcc

SEQ ID NO: 119851 - DNA, 22 bp, synthetic construct
  misc_feature 1..22: note = chemically synthesized
  source 1..22: mol_type = other DNA
tatgcatggccctggtagcctc

SEQ ID NO: 119852 - DNA, 22 bp, synthetic construct
  misc_feature 1..22: note = chemically synthesized
  source 1..22: mol_type = other DNA
tgcatggccctggtagcctcaa

SEQ ID NO: 119853 - DNA, 22 bp, synthetic construct
  misc_feature 1..22: note = chemically synthesized
  source 1..22: mol_type = other DNA
gtagcctcaaacaccctgtaac

SEQ ID NO: 119854 - DNA, 22 bp, synthetic construct
  misc_feature 1..22: note = chemically synthesized
  source 1..22: mol_type = other DNA
aaacaccctgtaacaccatctt

SEQ ID NO: 119855 - DNA, 22 bp, synthetic construct
  misc_feature 1..22: note = chemically synthesized
  source 1..22: mol_type = other DNA
taacaccatctttagcccggtc

SEQ ID NO: 119856 - DNA, 22 bp, synthetic construct
  misc_feature 1..22: note = chemically synthesized
  source 1..22: mol_type = other DNA
tagcccggtccttcttgttttg

SEQ ID NO: 119857 - DNA, 22 bp, synthetic construct
  misc_feature 1..22: note = chemically synthesized
  source 1..22: mol_type = other DNA
agcccggtccttcttgttttgg

SEQ ID NO: 119858 - DNA, 22 bp, synthetic construct
  misc_feature 1..22: note = chemically synthesized
  source 1..22: mol_type = other DNA
gcccggtccttcttgttttggc

SEQ ID NO: 119859 - DNA, 22 bp, synthetic construct
  misc_feature 1..22: note = chemically synthesized
  source 1..22: mol_type = other DNA
cttgttttggcacctttccaaa

SEQ ID NO: 119860 - DNA, 22 bp, synthetic construct
  misc_feature 1..22: note = chemically synthesized
  source 1..22: mol_type = other DNA
ttgttttggcacctttccaaac

SEQ ID NO: 119861 - DNA, 22 bp, synthetic construct
  misc_feature 1..22: note = chemically synthesized
  source 1..22: mol_type = other DNA
gttttggcacctttccaaaccc

SEQ ID NO: 119862 - DNA, 22 bp, synthetic construct
  misc_feature 1..22: note = chemically synthesized
  source 1..22: mol_type = other DNA
ttttggcacctttccaaaccca

SEQ ID NO: 119863 - DNA, 22 bp, synthetic construct
  misc_feature 1..22: note = chemically synthesized
  source 1..22: mol_type = other DNA
tggcacctttccaaacccatct

SEQ ID NO: 119864 - DNA, 22 bp, synthetic construct
  misc_feature 1..22: note = chemically synthesized
  source 1..22: mol_type = other DNA
ggcacctttccaaacccatctt

SEQ ID NO: 119865 - DNA, 22 bp, synthetic construct
  misc_feature 1..22: note = chemically synthesized
  source 1..22: mol_type = other DNA
gcacctttccaaacccatcttt

SEQ ID NO: 119866 - DNA, 22 bp, synthetic construct
  misc_feature 1..22: note = chemically synthesized
  source 1..22: mol_type = other DNA
tccaaacccatcttttcccagt

SEQ ID NO: 119867 - DNA, 22 bp, synthetic construct
  misc_feature 1..22: note = chemically synthesized
  source 1..22: mol_type = other DNA
ccaaacccatcttttcccagtc

SEQ ID NO: 119868 - DNA, 22 bp, synthetic construct
  misc_feature 1..22: note = chemically synthesized
  source 1..22: mol_type = other DNA
caaacccatcttttcccagtca

SEQ ID NO: 119869 - DNA, 22 bp, synthetic construct
  misc_feature 1..22: note = chemically synthesized
  source 1..22: mol_type = other DNA
ttcccagtcaacacacccatat

SEQ ID NO: 119870 - DNA, 22 bp, synthetic construct
  misc_feature 1..22: note = chemically synthesized
  source 1..22: mol_type = other DNA
tcccagtcaacacacccatatc

SEQ ID NO: 119871 - DNA, 22 bp, synthetic construct
  misc_feature 1..22: note = chemically synthesized
  source 1..22: mol_type = other DNA
cccagtcaacacacccatatca

SEQ ID NO: 119872 - DNA, 22 bp, synthetic construct
  misc_feature 1..22: note = chemically synthesized
  source 1..22: mol_type = other DNA
ccagtcaacacacccatatcat

SEQ ID NO: 119873 - DNA, 22 bp, synthetic construct
  misc_feature 1..22: note = chemically synthesized
  source 1..22: mol_type = other DNA
ttttcttcaattccctacacat

SEQ ID NO: 119874 - DNA, 22 bp, synthetic construct
  misc_feature 1..22: note = chemically synthesized
  source 1..22: mol_type = other DNA
tttcttcaattccctacacata

SEQ ID NO: 119875 - DNA, 22 bp, synthetic construct
  misc_feature 1..22: note = chemically synthesized
  source 1..22: mol_type = other DNA
ttcttcaattccctacacatac

SEQ ID NO: 119876 - DNA, 22 bp, synthetic construct
  misc_feature 1..22: note = chemically synthesized
  source 1..22: mol_type = other DNA
tcttcaattccctacacatact

SEQ ID NO: 119877 - DNA, 22 bp, synthetic construct
  misc_feature 1..22: note = chemically synthesized
  source 1..22: mol_type = other DNA
cttcaattccctacacatactt

SEQ ID NO: 119878 - DNA, 22 bp, synthetic construct
  misc_feature 1..22: note = chemically synthesized
  source 1..22: mol_type = other DNA
ttcaattccctacacatacttt

SEQ ID NO: 119879 - DNA, 22 bp, synthetic construct
  misc_feature 1..22: note = chemically synthesized
  source 1..22: mol_type = other DNA
caattccctacacatacttttc

SEQ ID NO: 119880 - DNA, 22 bp, synthetic construct
  misc_feature 1..22: note = chemically synthesized
  source 1..22: mol_type = other DNA
aattccctacacatacttttct

SEQ ID NO: 119881 - DNA, 22 bp, synthetic construct
  misc_feature 1..22: note = chemically synthesized
  source 1..22: mol_type = other DNA
cctacacatacttttcttgttt

SEQ ID NO: 119882 - DNA, 22 bp, synthetic construct
  misc_feature 1..22: note = chemically synthesized
  source 1..22: mol_type = other DNA
cacatacttttcttgtttttat

SEQ ID NO: 119883 - DNA, 22 bp, synthetic construct
  misc_feature 1..22: note = chemically synthesized
  source 1..22: mol_type = other DNA
ttcttgtttttattcttctata

SEQ ID NO: 119884 - DNA, 22 bp, synthetic construct
  misc_feature 1..22: note = chemically synthesized
  source 1..22: mol_type = other DNA
tcttgtttttattcttctatat

SEQ ID NO: 119885 - DNA, 22 bp, synthetic construct
  misc_feature 1..22: note = chemically synthesized
  source 1..22: mol_type = other DNA
cttgtttttattcttctatatt

SEQ ID NO: 119886 - DNA, 22 bp, synthetic construct
  misc_feature 1..22: note = chemically synthesized
  source 1..22: mol_type = other DNA
ttgtttttattcttctatattt

SEQ ID NO: 119887 - DNA, 22 bp, synthetic construct
  misc_feature 1..22: note = chemically synthesized
  source 1..22: mol_type = other DNA
gtttttattcttctatatttat

SEQ ID NO: 119888 - DNA, 22 bp, synthetic construct
  misc_feature 1..22: note = chemically synthesized
  source 1..22: mol_type = other DNA
tttttattcttctatatttatt

SEQ ID NO: 119889 - DNA, 22 bp, synthetic construct
  misc_feature 1..22: note = chemically synthesized
  source 1..22: mol_type = other DNA
ttattcttctatatttattgct

SEQ ID NO: 119890 - DNA, 22 bp, synthetic construct
  misc_feature 1..22: note = chemically synthesized
  source 1..22: mol_type = other DNA
tattcttctatatttattgctt

SEQ ID NO: 119891 - DNA, 22 bp, synthetic construct
  misc_feature 1..22: note = chemically synthesized
  source 1..22: mol_type = other DNA
attcttctatatttattgcttt

SEQ ID NO: 119892 - DNA, 22 bp, synthetic construct
  misc_feature 1..22: note = chemically synthesized
  source 1..22: mol_type = other DNA
ttcttctatatttattgctttc

SEQ ID NO: 119893 - DNA, 22 bp, synthetic construct
  misc_feature 1..22: note = chemically synthesized
  source 1..22: mol_type = other DNA
ttctatatttattgctttcttg

SEQ ID NO: 119894 - DNA, 22 bp, synthetic construct
  misc_feature 1..22: note = chemically synthesized
  source 1..22: mol_type = other DNA
ctatatttattgctttcttggc

SEQ ID NO: 119895 - DNA, 22 bp, synthetic construct
  misc_feature 1..22: note = chemically synthesized
  source 1..22: mol_type = other DNA
tatatttattgctttcttggca

SEQ ID NO: 119896 - DNA, 22 bp, synthetic construct
  misc_feature 1..22: note = chemically synthesized
  source 1..22: mol_type = other DNA
tatttattgctttcttggcaaa

SEQ ID NO: 119897 - DNA, 22 bp, synthetic construct
  misc_feature 1..22: note = chemically synthesized
  source 1..22: mol_type = other DNA
attgctttcttggcaaaaacca

SEQ ID NO: 119898 - DNA, 22 bp, synthetic construct
  misc_feature 1..22: note = chemically synthesized
  source 1..22: mol_type = other DNA
ttgctttcttggcaaaaaccac

SEQ ID NO: 119899 - DNA, 22 bp, synthetic construct
  misc_feature 1..22: note = chemically synthesized
  source 1..22: mol_type = other DNA
ctttcttggcaaaaaccacccc

SEQ ID NO: 119900 - DNA, 22 bp, synthetic construct
  misc_feature 1..22: note = chemically synthesized
  source 1..22: mol_type = other DNA
tcttggcaaaaaccacccctgt

SEQ ID NO: 119901 - DNA, 22 bp, synthetic construct
  misc_feature 1..22: note = chemically synthesized
  source 1..22: mol_type = other DNA
cttggcaaaaaccacccctgtt

SEQ ID NO: 119902 - DNA, 22 bp, synthetic construct
  misc_feature 1..22: note = chemically synthesized
  source 1..22: mol_type = other DNA
ttggcaaaaaccacccctgttt

SEQ ID NO: 119903 - DNA, 22 bp, synthetic construct
  misc_feature 1..22: note = chemically synthesized
  source 1..22: mol_type = other DNA
ggcaaaaaccacccctgttttt

SEQ ID NO: 119904 - DNA, 22 bp, synthetic construct
  misc_feature 1..22: note = chemically synthesized
  source 1..22: mol_type = other DNA
gcaaaaaccacccctgtttttc

SEQ ID NO: 119905 - DNA, 22 bp, synthetic construct
  misc_feature 1..22: note = chemically synthesized
  source 1..22: mol_type = other DNA
tttttccaaccagtaaacactt

SEQ ID NO: 119906 - DNA, 22 bp, synthetic construct
  misc_feature 1..22: note = chemically synthesized
  source 1..22: mol_type = other DNA
ttccaaccagtaaacacttgcg

SEQ ID NO: 119907 - DNA, 22 bp, synthetic construct
  misc_feature 1..22: note = chemically synthesized
  source 1..22: mol_type = other DNA
tccaaccagtaaacacttgcgg

SEQ ID NO: 119908 - DNA, 22 bp, synthetic construct
  misc_feature 1..22: note = chemically synthesized
  source 1..22: mol_type = other DNA
ccaaccagtaaacacttgcgga

SEQ ID NO: 119909 - DNA, 22 bp, synthetic construct
  misc_feature 1..22: note = chemically synthesized
  source 1..22: mol_type = other DNA
caaccagtaaacacttgcggat

SEQ ID NO: 119910 - DNA, 22 bp, synthetic construct
  misc_feature 1..22: note = chemically synthesized
  source 1..22: mol_type = other DNA
gcggatcctttaagacttagta

SEQ ID NO: 119911 - DNA, 22 bp, synthetic construct
  misc_feature 1..22: note = chemically synthesized
  source 1..22: mol_type = other DNA
cggatcctttaagacttagtac

SEQ ID NO: 119912 - DNA, 22 bp, synthetic construct
  misc_feature 1..22: note = chemically synthesized
  source 1..22: mol_type = other DNA
taagacttagtacaaatatcac

SEQ ID NO: 119913 - DNA, 22 bp, synthetic construct
  misc_feature 1..22: note = chemically synthesized
  source 1..22: mol_type = other DNA
aagacttagtacaaatatcact

SEQ ID NO: 119914 - DNA, 22 bp, synthetic construct
  misc_feature 1..22: note = chemically synthesized
  source 1..22: mol_type = other DNA
agacttagtacaaatatcactt

SEQ ID NO: 119915 - DNA, 22 bp, synthetic construct
  misc_feature 1..22: note = chemically synthesized
  source 1..22: mol_type = other DNA
agtacaaatatcacttcttctg

SEQ ID NO: 119916 - DNA, 22 bp, synthetic construct
  misc_feature 1..22: note = chemically synthesized
  source 1..22: mol_type = other DNA
gtacaaatatcacttcttctgt

SEQ ID NO: 119917 - DNA, 22 bp, synthetic construct
  misc_feature 1..22: note = chemically synthesized
  source 1..22: mol_type = other DNA
cttctgtcaaatctctcctgac

SEQ ID NO: 119918 - DNA, 22 bp, synthetic construct
  misc_feature 1..22: note = chemically synthesized
  source 1..22: mol_type = other DNA
ttctgtcaaatctctcctgact

SEQ ID NO: 119919 - DNA, 22 bp, synthetic construct
  misc_feature 1..22: note = chemically synthesized
  source 1..22: mol_type = other DNA
ctgtcaaatctctcctgacttc

SEQ ID NO: 119920 - DNA, 22 bp, synthetic construct
  misc_feature 1..22: note = chemically synthesized
  source 1..22: mol_type = other DNA
tgtcaaatctctcctgacttcc

SEQ ID NO: 119921 - DNA, 22 bp, synthetic construct
  misc_feature 1..22: note = chemically synthesized
  source 1..22: mol_type = other DNA
tcaaatctctcctgacttcctt

SEQ ID NO: 119922 - DNA, 22 bp, synthetic construct
  misc_feature 1..22: note = chemically synthesized
  source 1..22: mol_type = other DNA
tcctgacttccttctgtagcat

SEQ ID NO: 119923 - DNA, 22 bp, synthetic construct
  misc_feature 1..22: note = chemically synthesized
  source 1..22: mol_type = other DNA
ctgacttccttctgtagcatta

SEQ ID NO: 119924 - DNA, 22 bp, synthetic construct
  misc_feature 1..22: note = chemically synthesized
  source 1..22: mol_type = other DNA
acttccttctgtagcattaggt

SEQ ID NO: 119925 - DNA, 22 bp, synthetic construct
  misc_feature 1..22: note = chemically synthesized
  source 1..22: mol_type = other DNA
ccttctgtagcattaggtacat

SEQ ID NO: 119926 - DNA, 22 bp, synthetic construct
  misc_feature 1..22: note = chemically synthesized
  source 1..22: mol_type = other DNA
cttctgtagcattaggtacatc

SEQ ID NO: 119927 - DNA, 22 bp, synthetic construct
  misc_feature 1..22: note = chemically synthesized
  source 1..22: mol_type = other DNA
ctgtagcattaggtacatcttt

SEQ ID NO: 119928 - DNA, 22 bp, synthetic construct
  misc_feature 1..22: note = chemically synthesized
  source 1..22: mol_type = other DNA
tgtagcattaggtacatctttc

SEQ ID NO: 119929 - DNA, 22 bp, synthetic construct
  misc_feature 1..22: note = chemically synthesized
  source 1..22: mol_type = other DNA
tagcattaggtacatctttctc

SEQ ID NO: 119930 - DNA, 22 bp, synthetic construct
  misc_feature 1..22: note = chemically synthesized
  source 1..22: mol_type = other DNA
ggtacatctttctctgttctca

SEQ ID NO: 119931 - DNA, 22 bp, synthetic construct
  misc_feature 1..22: note = chemically synthesized
  source 1..22: mol_type = other DNA
tctctgttctcacgtagtacct

SEQ ID NO: 119932 - DNA, 22 bp, synthetic construct
  misc_feature 1..22: note = chemically synthesized
  source 1..22: mol_type = other DNA
ctctgttctcacgtagtacctg

SEQ ID NO: 119933 - DNA, 22 bp, synthetic construct
  misc_feature 1..22: note = chemically synthesized
  source 1..22: mol_type = other DNA
tctgttctcacgtagtacctgt

SEQ ID NO: 119934 - DNA, 22 bp, synthetic construct
  misc_feature 1..22: note = chemically synthesized
  source 1..22: mol_type = other DNA
tgttctcacgtagtacctgtaa

SEQ ID NO: 119935 - DNA, 22 bp, synthetic construct
  misc_feature 1..22: note = chemically synthesized
  source 1..22: mol_type = other DNA
ttctcacgtagtacctgtaatg

SEQ ID NO: 119936 - DNA, 22 bp, synthetic construct
  misc_feature 1..22: note = chemically synthesized
  source 1..22: mol_type = other DNA
tcacgtagtacctgtaatgtac

SEQ ID NO: 119937 - DNA, 22 bp, synthetic construct
  misc_feature 1..22: note = chemically synthesized
  source 1..22: mol_type = other DNA
acgtagtacctgtaatgtacta

SEQ ID NO: 119938 - DNA, 22 bp, synthetic construct
  misc_feature 1..22: note = chemically synthesized
  source 1..22: mol_type = other DNA
taatgtactattaaggtgtaaa

SEQ ID NO: 119939 - DNA, 22 bp, synthetic construct
  misc_feature 1..22: note = chemically synthesized
  source 1..22: mol_type = other DNA
ttaaggtgtaaatacacacaca

SEQ ID NO: 119940 - DNA, 22 bp, synthetic construct
  misc_feature 1..22: note = chemically synthesized
  source 1..22: mol_type = other DNA
aggtgtaaatacacacacacat

SEQ ID NO: 119941 - DNA, 22 bp, synthetic construct
  misc_feature 1..22: note = chemically synthesized
  source 1..22: mol_type = other DNA
tttatatttttatatttatata

SEQ ID NO: 119942 - DNA, 22 bp, synthetic construct
  misc_feature 1..22: note = chemically synthesized
  source 1..22: mol_type = other DNA
tatatttttatatttatatata

SEQ ID NO: 119943 - DNA, 22 bp, synthetic construct
  misc_feature 1..22: note = chemically synthesized
  source 1..22: mol_type = other DNA
atatttttatatttatatatac

SEQ ID NO: 119944 - DNA, 22 bp, synthetic construct
  misc_feature 1..22: note = chemically synthesized
  source 1..22: mol_type = other DNA
tatttttatatttatatatact

SEQ ID NO: 119945 - DNA, 22 bp, synthetic construct
  misc_feature 1..22: note = chemically synthesized
  source 1..22: mol_type = other DNA
ttatatttatatatacttattg

SEQ ID NO: 119946 - DNA, 22 bp, synthetic construct
  misc_feature 1..22: note = chemically synthesized
  source 1..22: mol_type = other DNA
tatatttatatatacttattga

SEQ ID NO: 119947 - DNA, 22 bp, synthetic construct
  misc_feature 1..22: note = chemically synthesized
  source 1..22: mol_type = other DNA
atatttatatatacttattgat

SEQ ID NO: 119948 - DNA, 22 bp, synthetic construct
  misc_feature 1..22: note = chemically synthesized
  source 1..22: mol_type = other DNA
tatttatatatacttattgata

SEQ ID NO: 119949 - DNA, 22 bp, synthetic construct
  misc_feature 1..22: note = chemically synthesized
  source 1..22: mol_type = other DNA
atatatacttattgatatatat

SEQ ID NO: 119950 - DNA, 22 bp, synthetic construct
  misc_feature 1..22: note = chemically synthesized
  source 1..22: mol_type = other DNA
tatatacttattgatatatata

SEQ ID NO: 119951 - DNA, 22 bp, synthetic construct
  misc_feature 1..22: note = chemically synthesized
  source 1..22: mol_type = other DNA
attgatatatatatagaacata

SEQ ID NO: 119952 - DNA, 22 bp, synthetic construct
  misc_feature 1..22: note = chemically synthesized
  source 1..22: mol_type = other DNA
ttgatatatatatagaacatac

SEQ ID NO: 119953 - DNA, 22 bp, synthetic construct
  misc_feature 1..22: note = chemically synthesized
  source 1..22: mol_type = other DNA
atatatatatagaacatactta

SEQ ID NO: 119954 - DNA, 22 bp, synthetic construct
  misc_feature 1..22: note = chemically synthesized
  source 1..22: mol_type = other DNA
atacatccatataagtacacat

SEQ ID NO: 119955 - DNA, 22 bp, synthetic construct
  misc_feature 1..22: note = chemically synthesized
  source 1..22: mol_type = other DNA
tacatccatataagtacacata

SEQ ID NO: 119956 - DNA, 22 bp, synthetic construct
  misc_feature 1..22: note = chemically synthesized
  source 1..22: mol_type = other DNA
aaataacatataagtgtataga

SEQ ID NO: 119957 - DNA, 22 bp, synthetic construct
  misc_feature 1..22: note = chemically synthesized
  source 1..22: mol_type = other DNA
aataacatataagtgtatagat

SEQ ID NO: 119958 - DNA, 22 bp, synthetic construct
  misc_feature 1..22: note = chemically synthesized
  source 1..22: mol_type = other DNA
actcataaatactttatagaat

SEQ ID NO: 119959 - DNA, 22 bp, synthetic construct
  misc_feature 1..22: note = chemically synthesized
  source 1..22: mol_type = other DNA
ctcataaatactttatagaata

SEQ ID NO: 119960 - DNA, 22 bp, synthetic construct
  misc_feature 1..22: note = chemically synthesized
  source 1..22: mol_type = other DNA
ataaatactttatagaatatac

SEQ ID NO: 119961 - DNA, 22 bp, synthetic construct
  misc_feature 1..22: note = chemically synthesized
  source 1..22: mol_type = other DNA
tatagaatatacattttagtat

SEQ ID NO: 119962 - DNA, 22 bp, synthetic construct
  misc_feature 1..22: note = chemically synthesized
  source 1..22: mol_type = other DNA
atagaatatacattttagtata

SEQ ID NO: 119963 - DNA, 22 bp, synthetic construct
  misc_feature 1..22: note = chemically synthesized
  source 1..22: mol_type = other DNA
tagaatatacattttagtatat

SEQ ID NO: 119964 - DNA, 22 bp, synthetic construct
  misc_feature 1..22: note = chemically synthesized
  source 1..22: mol_type = other DNA
tagtatatacattatatattct

SEQ ID NO: 119965 - DNA, 22 bp, synthetic construct
  misc_feature 1..22: note = chemically synthesized
  source 1..22: mol_type = other DNA
agtatatacattatatattctt

SEQ ID NO: 119966 - DNA, 22 bp, synthetic construct
  misc_feature 1..22: note = chemically synthesized
  source 1..22: mol_type = other DNA
gtatatacattatatattcttt

SEQ ID NO: 119967 - DNA, 22 bp, synthetic construct
  misc_feature 1..22: note = chemically synthesized
  source 1..22: mol_type = other DNA
tatattctttatatactttata

SEQ ID NO: 119968 - DNA, 22 bp, synthetic construct
  misc_feature 1..22: note = chemically synthesized
  source 1..22: mol_type = other DNA
tttatatactttatagattttt

SEQ ID NO: 119969 - DNA, 22 bp, synthetic construct
  misc_feature 1..22: note = chemically synthesized
  source 1..22: mol_type = other DNA
tatatactttatagatttttta

SEQ ID NO: 119970 - DNA, 22 bp, synthetic construct
  misc_feature 1..22: note = chemically synthesized
  source 1..22: mol_type = other DNA
atatactttatagattttttat

SEQ ID NO: 119971 - DNA, 22 bp, synthetic construct
  misc_feature 1..22: note = chemically synthesized
  source 1..22: mol_type = other DNA
tatactttatagattttttata

SEQ ID NO: 119972 - DNA, 22 bp, synthetic construct
  misc_feature 1..22: note = chemically synthesized
  source 1..22: mol_type = other DNA
tatagattttttatatataagt

SEQ ID NO: 119973 - DNA, 22 bp, synthetic construct
  misc_feature 1..22: note = chemically synthesized
  source 1..22: mol_type = other DNA
atagattttttatatataagta

SEQ ID NO: 119974 - DNA, 22 bp, synthetic construct
  misc_feature 1..22: note = chemically synthesized
  source 1..22: mol_type = other DNA
tagattttttatatataagtat

SEQ ID NO: 119975 - DNA, 22 bp, synthetic construct
  misc_feature 1..22: note = chemically synthesized
  source 1..22: mol_type = other DNA
tttatatataagtatagggtat

SEQ ID NO: 119976 - DNA, 22 bp, synthetic construct
  misc_feature 1..22: note = chemically synthesized
  source 1..22: mol_type = other DNA
ttatatataagtatagggtata

SEQ ID NO: 119977 - DNA, 22 bp, synthetic construct
  misc_feature 1..22: note = chemically synthesized
  source 1..22: mol_type = other DNA
tatatataagtatagggtatac

SEQ ID NO: 119978 - DNA, 22 bp, synthetic construct
  misc_feature 1..22: note = chemically synthesized
  source 1..22: mol_type = other DNA
atatataagtatagggtataca

SEQ ID NO: 119979 - DNA, 22 bp, synthetic construct
  misc_feature 1..22: note = chemically synthesized
  source 1..22: mol_type = other DNA
tatataagtatagggtatacat

SEQ ID NO: 119980 - DNA, 22 bp, synthetic construct
  misc_feature 1..22: note = chemically synthesized
  source 1..22: mol_type = other DNA
tatatttatatatgtaaacaaa

SEQ ID NO: 119981 - DNA, 22 bp, synthetic construct
  misc_feature 1..22: note = chemically synthesized
  source 1..22: mol_type = other DNA
atatatgtaaacaaatatacaa

SEQ ID NO: 119982 - DNA, 22 bp, synthetic construct
  misc_feature 1..22: note = chemically synthesized
  source 1..22: mol_type = other DNA
tatatgtaaacaaatatacaaa

SEQ ID NO: 119983 - DNA, 22 bp, synthetic construct
  misc_feature 1..22: note = chemically synthesized
  source 1..22: mol_type = other DNA
gatatttgtacacatatatata

SEQ ID NO: 119984 - DNA, 22 bp, synthetic construct
  misc_feature 1..22: note = chemically synthesized
  source 1..22: mol_type = other DNA
gtacacatatatatactttgta

SEQ ID NO: 119985 - DNA, 22 bp, synthetic construct
  misc_feature 1..22: note = chemically synthesized
  source 1..22: mol_type = other DNA
tacacatatatatactttgtac

SEQ ID NO: 119986 - DNA, 22 bp, synthetic construct
  misc_feature 1..22: note = chemically synthesized
  source 1..22: mol_type = other DNA
tgtacaacatatatattatagg

SEQ ID NO: 119987 - DNA, 22 bp, synthetic construct
  misc_feature 1..22: note = chemically synthesized
  source 1..22: mol_type = other DNA
gtacaacatatatattataggt

SEQ ID NO: 119988 - DNA, 22 bp, synthetic construct
  misc_feature 1..22: note = chemically synthesized
  source 1..22: mol_type = other DNA
tacaacatatatattataggta

SEQ ID NO: 119989 - DNA, 22 bp, synthetic construct
  misc_feature 1..22: note = chemically synthesized
  source 1..22: mol_type = other DNA
taggtagtatttatacgtattc

SEQ ID NO: 119990 - DNA, 22 bp, synthetic construct
  misc_feature 1..22: note = chemically synthesized
  source 1..22: mol_type = other DNA
atacgtattctttattatacat

SEQ ID NO: 119991 - DNA, 22 bp, synthetic construct
  misc_feature 1..22: note = chemically synthesized
  source 1..22: mol_type = other DNA
tacgtattctttattatacatg

SEQ ID NO: 119992 - DNA, 22 bp, synthetic construct
  misc_feature 1..22: note = chemically synthesized
  source 1..22: mol_type = other DNA
tttattatacatgtttagaaca

SEQ ID NO: 119993 - DNA, 22 bp, synthetic construct
  misc_feature 1..22: note = chemically synthesized
  source 1..22: mol_type = other DNA
tattatacatgtttagaacata

SEQ ID NO: 119994 - DNA, 22 bp, synthetic construct
  misc_feature 1..22: note = chemically synthesized
  source 1..22: mol_type = other DNA
attatacatgtttagaacataa

SEQ ID NO: 119995 - DNA, 22 bp, synthetic construct
  misc_feature 1..22: note = chemically synthesized
  source 1..22: mol_type = other DNA
ttatacatgtttagaacataaa

SEQ ID NO: 119996 - DNA, 22 bp, synthetic construct
  misc_feature 1..22: note = chemically synthesized
  source 1..22: mol_type = other DNA
tacatgtttagaacataaattt

SEQ ID NO: 119997 - DNA, 22 bp, synthetic construct
  misc_feature 1..22: note = chemically synthesized
  source 1..22: mol_type = other DNA
agaacataaatttatattggca

SEQ ID NO: 119998 - DNA, 22 bp, synthetic construct
  misc_feature 1..22: note = chemically synthesized
  source 1..22: mol_type = other DNA
gaacataaatttatattggcaa

SEQ ID NO: 119999 - DNA, 22 bp, synthetic construct
  misc_feature 1..22: note = chemically synthesized
  source 1..22: mol_type = other DNA
atattggcaaaaactgccatta

SEQ ID NO: 120000 - DNA, 22 bp, synthetic construct
  misc_feature 1..22: note = chemically synthesized
  source 1..22: mol_type = other DNA
tattggcaaaaactgccattaa

SEQ ID NO: 120001 - DNA, 22 bp, synthetic construct
  misc_feature 1..22: note = chemically synthesized
  source 1..22: mol_type = other DNA
gcaaaaactgccattaattttt

SEQ ID NO: 120002 - DNA, 22 bp, synthetic construct
  misc_feature 1..22: note = chemically synthesized
  source 1..22: mol_type = other DNA
ccattaatttttcaccaaccta

SEQ ID NO: 120003 - DNA, 22 bp, synthetic construct
  misc_feature 1..22: note = chemically synthesized
  source 1..22: mol_type = other DNA
atttttcaccaacctaataatt

SEQ ID NO: 120004 - DNA, 22 bp, synthetic construct
  misc_feature 1..22: note = chemically synthesized
  source 1..22: mol_type = other DNA
ttcaccaacctaataattcatt

SEQ ID NO: 120005 - DNA, 22 bp, synthetic construct
  misc_feature 1..22: note = chemically synthesized
  source 1..22: mol_type = other DNA
tcaccaacctaataattcattt

SEQ ID NO: 120006 - DNA, 22 bp, synthetic construct
  misc_feature 1..22: note = chemically synthesized
  source 1..22: mol_type = other DNA
caccaacctaataattcatttt

SEQ ID NO: 120007 - DNA, 22 bp, synthetic construct
  misc_feature 1..22: note = chemically synthesized
  source 1..22: mol_type = other DNA
accaacctaataattcattttt

SEQ ID NO: 120008 - DNA, 22 bp, synthetic construct
  misc_feature 1..22: note = chemically synthesized
  source 1..22: mol_type = other DNA
ataattcattttttaagttgat

SEQ ID NO: 120009 - DNA, 22 bp, synthetic construct
  misc_feature 1..22: note = chemically synthesized
  source 1..22: mol_type = other DNA
attttttaagttgattagactg

SEQ ID NO: 120010 - DNA, 22 bp, synthetic construct
  misc_feature 1..22: note = chemically synthesized
  source 1..22: mol_type = other DNA
tttaagttgattagactggaat

SEQ ID NO: 120011 - DNA, 22 bp, synthetic construct
  misc_feature 1..22: note = chemically synthesized
  source 1..22: mol_type = other DNA
ttaagttgattagactggaatt

SEQ ID NO: 120012 - DNA, 22 bp, synthetic construct
  misc_feature 1..22: note = chemically synthesized
  source 1..22: mol_type = other DNA
taagttgattagactggaattc

SEQ ID NO: 120013 - DNA, 22 bp, synthetic construct
  misc_feature 1..22: note = chemically synthesized
  source 1..22: mol_type = other DNA
aagttgattagactggaattct

SEQ ID NO: 120014 - DNA, 22 bp, synthetic construct
  misc_feature 1..22: note = chemically synthesized
  source 1..22: mol_type = other DNA
agttgattagactggaattctc

SEQ ID NO: 120015 - DNA, 22 bp, synthetic construct
  misc_feature 1..22: note = chemically synthesized
  source 1..22: mol_type = other DNA
attagactggaattctctaaag

SEQ ID NO: 120016 - DNA, 22 bp, synthetic construct
  misc_feature 1..22: note = chemically synthesized
  source 1..22: mol_type = other DNA
gactggaattctctaaaggccc

SEQ ID NO: 120017 - DNA, 22 bp, synthetic construct
  misc_feature 1..22: note = chemically synthesized
  source 1..22: mol_type = other DNA
gaattctctaaaggcccctgga

SEQ ID NO: 120018 - DNA, 22 bp, synthetic construct
  misc_feature 1..22: note = chemically synthesized
  source 1..22: mol_type = other DNA
tctaaaggcccctggagcctga

SEQ ID NO: 120019 - DNA, 22 bp, synthetic construct
  misc_feature 1..22: note = chemically synthesized
  source 1..22: mol_type = other DNA
taaaggcccctggagcctgaca

SEQ ID NO: 120020 - DNA, 22 bp, synthetic construct
  misc_feature 1..22: note = chemically synthesized
  source 1..22: mol_type = other DNA
aaggcccctggagcctgacagt

SEQ ID NO: 120021 - DNA, 22 bp, synthetic construct
  misc_feature 1..22: note = chemically synthesized
  source 1..22: mol_type = other DNA
gagcctgacagtgtctaagatg

SEQ ID NO: 120022 - DNA, 22 bp, synthetic construct
  misc_feature 1..22: note = chemically synthesized
  source 1..22: mol_type = other DNA
acagtgtctaagatgtggtagg

SEQ ID NO: 120023 - DNA, 22 bp, synthetic construct
  misc_feature 1..22: note = chemically synthesized
  source 1..22: mol_type = other DNA
agatgtggtaggtaccactata

SEQ ID NO: 120024 - DNA, 22 bp, synthetic construct
  misc_feature 1..22: note = chemically synthesized
  source 1..22: mol_type = other DNA
tatatatatttttttgcatgaa

SEQ ID NO: 120025 - DNA, 22 bp, synthetic construct
  misc_feature 1..22: note = chemically synthesized
  source 1..22: mol_type = other DNA
ttttgcatgaaaaactaaatgg

SEQ ID NO: 120026 - DNA, 22 bp, synthetic construct
  misc_feature 1..22: note = chemically synthesized
  source 1..22: mol_type = other DNA
tttgcatgaaaaactaaatggg

SEQ ID NO: 120027 - DNA, 22 bp, synthetic construct
  misc_feature 1..22: note = chemically synthesized
  source 1..22: mol_type = other DNA
ttgcatgaaaaactaaatgggt

SEQ ID NO: 120028 - DNA, 22 bp, synthetic construct
  misc_feature 1..22: note = chemically synthesized
  source 1..22: mol_type = other DNA
tgcatgaaaaactaaatgggtg

SEQ ID NO: 120029 - DNA, 22 bp, synthetic construct
  misc_feature 1..22: note = chemically synthesized
  source 1..22: mol_type = other DNA
gcatgaaaaactaaatgggtga

SEQ ID NO: 120030 - DNA, 22 bp, synthetic construct
  misc_feature 1..22: note = chemically synthesized
  source 1..22: mol_type = other DNA
catgaaaaactaaatgggtgaa

SEQ ID NO: 120031 - DNA, 22 bp, synthetic construct
  misc_feature 1..22: note = chemically synthesized
  source 1..22: mol_type = other DNA
aatgggtgaataaataaagtac

SEQ ID NO: 120032 - DNA, 22 bp, synthetic construct
  misc_feature 1..22: note = chemically synthesized
  source 1..22: mol_type = other DNA
acctcttatcctgattctttgt

SEQ ID NO: 120033 - DNA, 22 bp, synthetic construct
  misc_feature 1..22: note = chemically synthesized
  source 1..22: mol_type = other DNA
ttatcctgattctttgtgcctg

SEQ ID NO: 120034 - DNA, 22 bp, synthetic construct
  misc_feature 1..22: note = chemically synthesized
  source 1..22: mol_type = other DNA
atcctgattctttgtgcctggg

SEQ ID NO: 120035 - DNA, 22 bp, synthetic construct
  misc_feature 1..22: note = chemically synthesized
  source 1..22: mol_type = other DNA
tcctgattctttgtgcctgggg

SEQ ID NO: 120036 - DNA, 22 bp, synthetic construct
  misc_feature 1..22: note = chemically synthesized
  source 1..22: mol_type = other DNA
attctttgtgcctggggttctg

SEQ ID NO: 120037 - DNA, 22 bp, synthetic construct
  misc_feature 1..22: note = chemically synthesized
  source 1..22: mol_type = other DNA
tttgtgcctggggttctgttgt

SEQ ID NO: 120038 - DNA, 22 bp, synthetic construct
  misc_feature 1..22: note = chemically synthesized
  source 1..22: mol_type = other DNA
tgtgcctggggttctgttgtca

SEQ ID NO: 120039 - DNA, 22 bp, synthetic construct
  misc_feature 1..22: note = chemically synthesized
  source 1..22: mol_type = other DNA
gtgcctggggttctgttgtcag

SEQ ID NO: 120040 - DNA, 22 bp, synthetic construct
  misc_feature 1..22: note = chemically synthesized
  source 1..22: mol_type = other DNA
tgcctggggttctgttgtcagc

SEQ ID NO: 120041 - DNA, 22 bp, synthetic construct
  misc_feature 1..22: note = chemically synthesized
  source 1..22: mol_type = other DNA
gggttctgttgtcagctctgtg

SEQ ID NO: 120042 - DNA, 22 bp, synthetic construct
  misc_feature 1..22: note = chemically synthesized
  source 1..22: mol_type = other DNA
tgttgtcagctctgtgttcacc

SEQ ID NO: 120043 - DNA, 22 bp, synthetic construct
  misc_feature 1..22: note = chemically synthesized
  source 1..22: mol_type = other DNA
ttgtcagctctgtgttcaccaa

SEQ ID NO: 120044 - DNA, 22 bp, synthetic construct
  misc_feature 1..22: note = chemically synthesized
  source 1..22: mol_type = other DNA
tcagctctgtgttcaccaactt

SEQ ID NO: 120045 - DNA, 22 bp, synthetic construct
  misc_feature 1..22: note = chemically synthesized
  source 1..22: mol_type = other DNA
tgtgttcaccaacttcagagtg

SEQ ID NO: 120046 - DNA, 22 bp, synthetic construct
  misc_feature 1..22: note = chemically synthesized
  source 1..22: mol_type = other DNA
tgttcaccaacttcagagtgat

SEQ ID NO: 120047 - DNA, 22 bp, synthetic construct
  misc_feature 1..22: note = chemically synthesized
  source 1..22: mol_type = other DNA
accaacttcagagtgatgagat

SEQ ID NO: 120048 - DNA, 22 bp, synthetic construct
  misc_feature 1..22: note = chemically synthesized
  source 1..22: mol_type = other DNA
cagagtgatgagatggacaggg

SEQ ID NO: 120049 - DNA, 22 bp, synthetic construct
  misc_feature 1..22: note = chemically synthesized
  source 1..22: mol_type = other DNA
agagtgatgagatggacaggga

SEQ ID NO: 120050 - DNA, 22 bp, synthetic construct
  misc_feature 1..22: note = chemically synthesized
  source 1..22: mol_type = other DNA
gtagaaacaagatgtctataca

SEQ ID NO: 120051 - DNA, 22 bp, synthetic construct
  misc_feature 1..22: note = chemically synthesized
  source 1..22: mol_type = other DNA
tacagagacaatgacagggctg

SEQ ID NO: 120052 - DNA, 22 bp, synthetic construct
  misc_feature 1..22: note = chemically synthesized
  source 1..22: mol_type = other DNA
ggattatttctcttggaaagta

SEQ ID NO: 120053 - DNA, 22 bp, synthetic construct
  misc_feature 1..22: note = chemically synthesized
  source 1..22: mol_type = other DNA
tttctcttggaaagtatacttc

SEQ ID NO: 120054 - DNA, 22 bp, synthetic construct
  misc_feature 1..22: note = chemically synthesized
  source 1..22: mol_type = other DNA
ctcttggaaagtatacttcctc

SEQ ID NO: 120055 - DNA, 22 bp, synthetic construct
  misc_feature 1..22: note = chemically synthesized
  source 1..22: mol_type = other DNA
tcttggaaagtatacttcctct

SEQ ID NO: 120056 - DNA, 22 bp, synthetic construct
  misc_feature 1..22: note = chemically synthesized
  source 1..22: mol_type = other DNA
ttggaaagtatacttcctcttg

SEQ ID NO: 120057 - DNA, 22 bp, synthetic construct
  misc_feature 1..22: note = chemically synthesized
  source 1..22: mol_type = other DNA
ggaaagtatacttcctcttggg

SEQ ID NO: 120058 - DNA, 22 bp, synthetic construct
  misc_feature 1..22: note = chemically synthesized
  source 1..22: mol_type = other DNA
gaaagtatacttcctcttggga

SEQ ID NO: 120059 - DNA, 22 bp, synthetic construct
  misc_feature 1..22: note = chemically synthesized
  source 1..22: mol_type = other DNA
cctcttgggaagaaagctttag

SEQ ID NO: 120060 - DNA, 22 bp, synthetic construct
  misc_feature 1..22: note = chemically synthesized
  source 1..22: mol_type = other DNA
ctcttgggaagaaagctttagg

SEQ ID NO: 120061 - DNA, 22 bp, synthetic construct
  misc_feature 1..22: note = chemically synthesized
  source 1..22: mol_type = other DNA
ttgggaagaaagctttagggga

SEQ ID NO: 120062 - DNA, 22 bp, synthetic construct
  misc_feature 1..22: note = chemically synthesized
  source 1..22: mol_type = other DNA
gggaagaaagctttaggggatt

SEQ ID NO: 120063 - DNA, 22 bp, synthetic construct
  misc_feature 1..22: note = chemically synthesized
  source 1..22: mol_type = other DNA
ggaagaaagctttaggggattt

SEQ ID NO: 120064 - DNA, 22 bp, synthetic construct
  misc_feature 1..22: note = chemically synthesized
  source 1..22: mol_type = other DNA
taggggatttctcctagcaaga

SEQ ID NO: 120065 - DNA, 22 bp, synthetic construct
  misc_feature 1..22: note = chemically synthesized
  source 1..22: mol_type = other DNA
aggggatttctcctagcaagag

SEQ ID NO: 120066 - DNA, 22 bp, synthetic construct
  misc_feature 1..22: note = chemically synthesized
  source 1..22: mol_type = other DNA
ggggatttctcctagcaagaga

SEQ ID NO: 120067 - DNA, 22 bp, synthetic construct
  misc_feature 1..22: note = chemically synthesized
  source 1..22: mol_type = other DNA
ctcctagcaagagagataatta

SEQ ID NO: 120068 - DNA, 22 bp, synthetic construct
  misc_feature 1..22: note = chemically synthesized
  source 1..22: mol_type = other DNA
tcctagcaagagagataattat

SEQ ID NO: 120069 - DNA, 22 bp, synthetic construct
  misc_feature 1..22: note = chemically synthesized
  source 1..22: mol_type = other DNA
ctagcaagagagataattatcc

SEQ ID NO: 120070 - DNA, 22 bp, synthetic construct
  misc_feature 1..22: note = chemically synthesized
  source 1..22: mol_type = other DNA
gcaagagagataattatccatg

SEQ ID NO: 120071 - DNA, 22 bp, synthetic construct
  misc_feature 1..22: note = chemically synthesized
  source 1..22: mol_type = other DNA
tccatgataggagagcaacagt

SEQ ID NO: 120072 - DNA, 22 bp, synthetic construct
  misc_feature 1..22: note = chemically synthesized
  source 1..22: mol_type = other DNA
tttcatgtctactaagcaatgg

SEQ ID NO: 120073 - DNA, 22 bp, synthetic construct
  misc_feature 1..22: note = chemically synthesized
  source 1..22: mol_type = other DNA
ttcatgtctactaagcaatgga

SEQ ID NO: 120074 - DNA, 22 bp, synthetic construct
  misc_feature 1..22: note = chemically synthesized
  source 1..22: mol_type = other DNA
tcatgtctactaagcaatggag

SEQ ID NO: 120075 - DNA, 22 bp, synthetic construct
  misc_feature 1..22: note = chemically synthesized
  source 1..22: mol_type = other DNA
catgtctactaagcaatggagg

SEQ ID NO: 120076 - DNA, 22 bp, synthetic construct
  misc_feature 1..22: note = chemically synthesized
  source 1..22: mol_type = other DNA
atgtctactaagcaatggagga

SEQ ID NO: 120077 - DNA, 22 bp, synthetic construct
  misc_feature 1..22: note = chemically synthesized
  source 1..22: mol_type = other DNA
ctaagcaatggaggagtccact

SEQ ID NO: 120078 - DNA, 22 bp, synthetic construct
  misc_feature 1..22: note = chemically synthesized
  source 1..22: mol_type = other DNA
agcaatggaggagtccactcag

SEQ ID NO: 120079 - DNA, 22 bp, synthetic construct
  misc_feature 1..22: note = chemically synthesized
  source 1..22: mol_type = other DNA
agagcagtcagttacatctaat

SEQ ID NO: 120080 - DNA, 22 bp, synthetic construct
  misc_feature 1..22: note = chemically synthesized
  source 1..22: mol_type = other DNA
catctaattacaacataattaa

SEQ ID NO: 120081 - DNA, 22 bp, synthetic construct
  misc_feature 1..22: note = chemically synthesized
  source 1..22: mol_type = other DNA
attacaacataattaaaatatt

SEQ ID NO: 120082 - DNA, 22 bp, synthetic construct
  misc_feature 1..22: note = chemically synthesized
  source 1..22: mol_type = other DNA
caacataattaaaatattcaag

SEQ ID NO: 120083 - DNA, 22 bp, synthetic construct
  misc_feature 1..22: note = chemically synthesized
  source 1..22: mol_type = other DNA
aaatattcaaggcagagtagat

SEQ ID NO: 120084 - DNA, 22 bp, synthetic construct
  misc_feature 1..22: note = chemically synthesized
  source 1..22: mol_type = other DNA
aaggcagagtagattcatctta

SEQ ID NO: 120085 - DNA, 22 bp, synthetic construct
  misc_feature 1..22: note = chemically synthesized
  source 1..22: mol_type = other DNA
atcttagatcacaggagaaaat

SEQ ID NO: 120086 - DNA, 22 bp, synthetic construct
  misc_feature 1..22: note = chemically synthesized
  source 1..22: mol_type = other DNA
agatcacaggagaaaattcctg

SEQ ID NO: 120087 - DNA, 22 bp, synthetic construct
  misc_feature 1..22: note = chemically synthesized
  source 1..22: mol_type = other DNA
gatcacaggagaaaattcctga

SEQ ID NO: 120088 - DNA, 22 bp, synthetic construct
  misc_feature 1..22: note = chemically synthesized
  source 1..22: mol_type = other DNA
ctgaaaagagattttcagtata

SEQ ID NO: 120089 - DNA, 22 bp, synthetic construct
  misc_feature 1..22: note = chemically synthesized
  source 1..22: mol_type = other DNA
aaaagagattttcagtatacaa

SEQ ID NO: 120090 - DNA, 22 bp, synthetic construct
  misc_feature 1..22: note = chemically synthesized
  source 1..22: mol_type = other DNA
tcagtatacaatgagtaattgg

SEQ ID NO: 120091 - DNA, 22 bp, synthetic construct
  misc_feature 1..22: note = chemically synthesized
  source 1..22: mol_type = other DNA
cagtatacaatgagtaattggc

SEQ ID NO: 120092 - DNA, 22 bp, synthetic construct
  misc_feature 1..22: note = chemically synthesized
  source 1..22: mol_type = other DNA
agtatacaatgagtaattggct

SEQ ID NO: 120093 - DNA, 22 bp, synthetic construct
  misc_feature 1..22: note = chemically synthesized
  source 1..22: mol_type = other DNA
gctctctacctcacctgtgtct

SEQ ID NO: 120094 - DNA, 22 bp, synthetic construct
  misc_feature 1..22: note = chemically synthesized
  source 1..22: mol_type = other DNA
tctacctcacctgtgtctaaat

SEQ ID NO: 120095 - DNA, 22 bp, synthetic construct
  misc_feature 1..22: note = chemically synthesized
  source 1..22: mol_type = other DNA
tacctcacctgtgtctaaatat

SEQ ID NO: 120096 - DNA, 22 bp, synthetic construct
  misc_feature 1..22: note = chemically synthesized
  source 1..22: mol_type = other DNA
cctcacctgtgtctaaatattc

SEQ ID NO: 120097 - DNA, 22 bp, synthetic construct
  misc_feature 1..22: note = chemically synthesized
  source 1..22: mol_type = other DNA
acctgtgtctaaatattctttt

SEQ ID NO: 120098 - DNA, 22 bp, synthetic construct
  misc_feature 1..22: note = chemically synthesized
  source 1..22: mol_type = other DNA
tgtctaaatattcttttgtttg

SEQ ID NO: 120099 - DNA, 22 bp, synthetic construct
  misc_feature 1..22: note = chemically synthesized
  source 1..22: mol_type = other DNA
aatattcttttgtttgaattta

SEQ ID NO: 120100 - DNA, 22 bp, synthetic construct
  misc_feature 1..22: note = chemically synthesized
  source 1..22: mol_type = other DNA
ttttgtttgaatttaatattag

SEQ ID NO: 120101 - DNA, 22 bp, synthetic construct
  misc_feature 1..22: note = chemically synthesized
  source 1..22: mol_type = other DNA
ttgtttgaatttaatattagtt

SEQ ID NO: 120102 - DNA, 22 bp, synthetic construct
  misc_feature 1..22: note = chemically synthesized
  source 1..22: mol_type = other DNA
tgtttgaatttaatattagtta

SEQ ID NO: 120103 - DNA, 22 bp, synthetic construct
  misc_feature 1..22: note = chemically synthesized
  source 1..22: mol_type = other DNA
gtttgaatttaatattagttat

SEQ ID NO: 120104 - DNA, 22 bp, synthetic construct
  misc_feature 1..22: note = chemically synthesized
  source 1..22: mol_type = other DNA
tttgaatttaatattagttatt

SEQ ID NO: 120105 - DNA, 22 bp, synthetic construct
  misc_feature 1..22: note = chemically synthesized
  source 1..22: mol_type = other DNA
gaatttaatattagttattttt

SEQ ID NO: 120106 - DNA, 22 bp, synthetic construct
  misc_feature 1..22: note = chemically synthesized
  source 1..22: mol_type = other DNA
aatttaatattagttatttttt

SEQ ID NO: 120107 - DNA, 22 bp, synthetic construct
  misc_feature 1..22: note = chemically synthesized
  source 1..22: mol_type = other DNA
aatattagttattttttaatga

SEQ ID NO: 120108 - DNA, 22 bp, synthetic construct
  misc_feature 1..22: note = chemically synthesized
  source 1..22: mol_type = other DNA
atattagttattttttaatgaa

SEQ ID NO: 120109 - DNA, 22 bp, synthetic construct
  misc_feature 1..22: note = chemically synthesized
  source 1..22: mol_type = other DNA
gttattttttaatgaactacat

SEQ ID NO: 120110 - DNA, 22 bp, synthetic construct
  misc_feature 1..22: note = chemically synthesized
  source 1..22: mol_type = other DNA
ttttttaatgaactacattggt

SEQ ID NO: 120111 - DNA, 22 bp, synthetic construct
  misc_feature 1..22: note = chemically synthesized
  source 1..22: mol_type = other DNA
tttaatgaactacattggtgga

SEQ ID NO: 120112 - DNA, 22 bp, synthetic construct
  misc_feature 1..22: note = chemically synthesized
  source 1..22: mol_type = other DNA
ttaatgaactacattggtggag

SEQ ID NO: 120113 - DNA, 22 bp, synthetic construct
  misc_feature 1..22: note = chemically synthesized
  source 1..22: mol_type = other DNA
taatgaactacattggtggagg

SEQ ID NO: 120114 - DNA, 22 bp, synthetic construct
  misc_feature 1..22: note = chemically synthesized
  source 1..22: mol_type = other DNA
aatgaactacattggtggagga

SEQ ID NO: 120115 - DNA, 22 bp, synthetic construct
  misc_feature 1..22: note = chemically synthesized
  source 1..22: mol_type = other DNA
atgaactacattggtggaggat

SEQ ID NO: 120116 - DNA, 22 bp, synthetic construct
  misc_feature 1..22: note = chemically synthesized
  source 1..22: mol_type = other DNA
cattggtggaggatactgtttc

SEQ ID NO: 120117 - DNA, 22 bp, synthetic construct
  misc_feature 1..22: note = chemically synthesized
  source 1..22: mol_type = other DNA
gtggaggatactgtttcttgta

SEQ ID NO: 120118 - DNA, 22 bp, synthetic construct
  misc_feature 1..22: note = chemically synthesized
  source 1..22: mol_type = other DNA
tttcttgtaaataggagaatat

SEQ ID NO: 120119 - DNA, 22 bp, synthetic construct
  misc_feature 1..22: note = chemically synthesized
  source 1..22: mol_type = other DNA
cttgtaaataggagaatatgca

SEQ ID NO: 120120 - DNA, 22 bp, synthetic construct
  misc_feature 1..22: note = chemically synthesized
  source 1..22: mol_type = other DNA
ttgtaaataggagaatatgcaa

SEQ ID NO: 120121 - DNA, 22 bp, synthetic construct
  misc_feature 1..22: note = chemically synthesized
  source 1..22: mol_type = other DNA
gtaaataggagaatatgcaaaa

SEQ ID NO: 120122 - DNA, 22 bp, synthetic construct
  misc_feature 1..22: note = chemically synthesized
  source 1..22: mol_type = other DNA
taaataggagaatatgcaaaag

SEQ ID NO: 120123 - DNA, 22 bp, synthetic construct
  misc_feature 1..22: note = chemically synthesized
  source 1..22: mol_type = other DNA
cacctaaacacaaggacttgaa

SEQ ID NO: 120124 - DNA, 22 bp, synthetic construct
  misc_feature 1..22: note = chemically synthesized
  source 1..22: mol_type = other DNA
aacacaaggacttgaaccagat

SEQ ID NO: 120125 - DNA, 22 bp, synthetic construct
  misc_feature 1..22: note = chemically synthesized
  source 1..22: mol_type = other DNA
gaaccagattattcatttttga

SEQ ID NO: 120126 - DNA, 22 bp, synthetic construct
  misc_feature 1..22: note = chemically synthesized
  source 1..22: mol_type = other DNA
aaccagattattcatttttgaa

SEQ ID NO: 120127 - DNA, 22 bp, synthetic construct
  misc_feature 1..22: note = chemically synthesized
  source 1..22: mol_type = other DNA
ttcatttttgaacccctagaga

SEQ ID NO: 120128 - DNA, 22 bp, synthetic construct
  misc_feature 1..22: note = chemically synthesized
  source 1..22: mol_type = other DNA
atttttgaacccctagagaaca

SEQ ID NO: 120129 - DNA, 22 bp, synthetic construct
  misc_feature 1..22: note = chemically synthesized
  source 1..22: mol_type = other DNA
ttgaacccctagagaacatttc

SEQ ID NO: 120130 - DNA, 22 bp, synthetic construct
  misc_feature 1..22: note = chemically synthesized
  source 1..22: mol_type = other DNA
tgaacccctagagaacatttcc

SEQ ID NO: 120131 - DNA, 22 bp, synthetic construct
  misc_feature 1..22: note = chemically synthesized
  source 1..22: mol_type = other DNA
gaacccctagagaacatttcca

SEQ ID NO: 120132 - DNA, 22 bp, synthetic construct
  misc_feature 1..22: note = chemically synthesized
  source 1..22: mol_type = other DNA
aacccctagagaacatttccac

SEQ ID NO: 120133 - DNA, 22 bp, synthetic construct
  misc_feature 1..22: note = chemically synthesized
  source 1..22: mol_type = other DNA
gagaacatttccacagtggtca

SEQ ID NO: 120134 - DNA, 22 bp, synthetic construct
  misc_feature 1..22: note = chemically synthesized
  source 1..22: mol_type = other DNA
ccacagtggtcaaactcatctg

SEQ ID NO: 120135 - DNA, 22 bp, synthetic construct
  misc_feature 1..22: note = chemically synthesized
  source 1..22: mol_type = other DNA
cacagtggtcaaactcatctgt

SEQ ID NO: 120136 - DNA, 22 bp, synthetic construct
  misc_feature 1..22: note = chemically synthesized
  source 1..22: mol_type = other DNA
atctgtaaacatgcctgttttt

SEQ ID NO: 120137 - DNA, 22 bp, synthetic construct
  misc_feature 1..22: note = chemically synthesized
  source 1..22: mol_type = other DNA
taaacatgcctgtttttagtag

SEQ ID NO: 120138 - DNA, 22 bp, synthetic construct
  misc_feature 1..22: note = chemically synthesized
  source 1..22: mol_type = other DNA
tttttagtaggatagaggagga

SEQ ID NO: 120139 - DNA, 22 bp, synthetic construct
  misc_feature 1..22: note = chemically synthesized
  source 1..22: mol_type = other DNA
ttagtaggatagaggaggattt

SEQ ID NO: 120140 - DNA, 22 bp, synthetic construct
  misc_feature 1..22: note = chemically synthesized
  source 1..22: mol_type = other DNA
tagtaggatagaggaggatttt

SEQ ID NO: 120141 - DNA, 22 bp, synthetic construct
  misc_feature 1..22: note = chemically synthesized
  source 1..22: mol_type = other DNA
agtaggatagaggaggattttg

SEQ ID NO: 120142 - DNA, 22 bp, synthetic construct
  misc_feature 1..22: note = chemically synthesized
  source 1..22: mol_type = other DNA
gtaggatagaggaggattttgg

SEQ ID NO: 120143 - DNA, 22 bp, synthetic construct
  misc_feature 1..22: note = chemically synthesized
  source 1..22: mol_type = other DNA
tggaaggcgaaggccatatcct

SEQ ID NO: 120144 - DNA, 22 bp, synthetic construct
  misc_feature 1..22: note = chemically synthesized
  source 1..22: mol_type = other DNA
ggaaggcgaaggccatatcctg

SEQ ID NO: 120145 - DNA, 22 bp, synthetic construct
  misc_feature 1..22: note = chemically synthesized
  source 1..22: mol_type = other DNA
gaaggcgaaggccatatcctgg

SEQ ID NO: 120146 - DNA, 22 bp, synthetic construct
  misc_feature 1..22: note = chemically synthesized
  source 1..22: mol_type = other DNA
gatactggggaagttacaaggt

SEQ ID NO: 120147 - DNA, 22 bp, synthetic construct
  misc_feature 1..22: note = chemically synthesized
  source 1..22: mol_type = other DNA
gggaagttacaaggtgttgttt

SEQ ID NO: 120148 - DNA, 22 bp, synthetic construct
  misc_feature 1..22: note = chemically synthesized
  source 1..22: mol_type = other DNA
caaggtgttgtttggattaaaa

SEQ ID NO: 120149 - DNA, 22 bp, synthetic construct
  misc_feature 1..22: note = chemically synthesized
  source 1..22: mol_type = other DNA
tttggattaaaataagcagatt

SEQ ID NO: 120150 - DNA, 22 bp, synthetic construct
  misc_feature 1..22: note = chemically synthesized
  source 1..22: mol_type = other DNA
ggattaaaataagcagattgag

SEQ ID NO: 120151 - DNA, 22 bp, synthetic construct
  misc_feature 1..22: note = chemically synthesized
  source 1..22: mol_type = other DNA
gattaaaataagcagattgagg

SEQ ID NO: 120152 - DNA, 22 bp, synthetic construct
  misc_feature 1..22: note = chemically synthesized
  source 1..22: mol_type = other DNA
aaataagcagattgaggatggg

SEQ ID NO: 120153 - DNA, 22 bp, synthetic construct
  misc_feature 1..22: note = chemically synthesized
  source 1..22: mol_type = other DNA
aggatggggtcttttctatgtt

SEQ ID NO: 120154 - DNA, 22 bp, synthetic construct
  misc_feature 1..22: note = chemically synthesized
  source 1..22: mol_type = other DNA
ttctatgttaactggaccagca

SEQ ID NO: 120155 - DNA, 22 bp, synthetic construct
  misc_feature 1..22: note = chemically synthesized
  source 1..22: mol_type = other DNA
tctatgttaactggaccagcat

SEQ ID NO: 120156 - DNA, 22 bp, synthetic construct
  misc_feature 1..22: note = chemically synthesized
  source 1..22: mol_type = other DNA
ctatgttaactggaccagcata

SEQ ID NO: 120157 - DNA, 22 bp, synthetic construct
  misc_feature 1..22: note = chemically synthesized
  source 1..22: mol_type = other DNA
tatgttaactggaccagcatat

SEQ ID NO: 120158 - DNA, 22 bp, synthetic construct
  misc_feature 1..22: note = chemically synthesized
  source 1..22: mol_type = other DNA
tgttaactggaccagcatataa

SEQ ID NO: 120159 - DNA, 22 bp, synthetic construct
  misc_feature 1..22: note = chemically synthesized
  source 1..22: mol_type = other DNA
actggaccagcatataaaatgc

SEQ ID NO: 120160 - DNA, 22 bp, synthetic construct
  misc_feature 1..22: note = chemically synthesized
  source 1..22: mol_type = other DNA
gaccagcatataaaatgcattt

SEQ ID NO: 120161 - DNA, 22 bp, synthetic construct
  misc_feature 1..22: note = chemically synthesized
  source 1..22: mol_type = other DNA
aataatttgttgaataagtgaa

SEQ ID NO: 120162 - DNA, 22 bp, synthetic construct
  misc_feature 1..22: note = chemically synthesized
  source 1..22: mol_type = other DNA
ataatttgttgaataagtgaat

SEQ ID NO: 120163 - DNA, 22 bp, synthetic construct
  misc_feature 1..22: note = chemically synthesized
  source 1..22: mol_type = other DNA
gttgaataagtgaatgactgtt

SEQ ID NO: 120164 - DNA, 22 bp, synthetic construct
  misc_feature 1..22: note = chemically synthesized
  source 1..22: mol_type = other DNA
ttgaataagtgaatgactgttt

SEQ ID NO: 120165 - DNA, 22 bp, synthetic construct
  misc_feature 1..22: note = chemically synthesized
  source 1..22: mol_type = other DNA
aataagtgaatgactgtttttc

SEQ ID NO: 120166 - DNA, 22 bp, synthetic construct
  misc_feature 1..22: note = chemically synthesized
  source 1..22: mol_type = other DNA
tttttctgatgagagtaaggag

SEQ ID NO: 120167 - DNA, 22 bp, synthetic construct
  misc_feature 1..22: note = chemically synthesized
  source 1..22: mol_type = other DNA
ttctgatgagagtaaggagagg

SEQ ID NO: 120168 - DNA, 22 bp, synthetic construct
  misc_feature 1..22: note = chemically synthesized
  source 1..22: mol_type = other DNA
tctgatgagagtaaggagaggg

SEQ ID NO: 120169 - DNA, 22 bp, synthetic construct
  misc_feature 1..22: note = chemically synthesized
  source 1..22: mol_type = other DNA
ctgatgagagtaaggagagggt

SEQ ID NO: 120170 - DNA, 22 bp, synthetic construct
  misc_feature 1..22: note = chemically synthesized
  source 1..22: mol_type = other DNA
tgatgagagtaaggagagggtg

SEQ ID NO: 120171 - DNA, 22 bp, synthetic construct
  misc_feature 1..22: note = chemically synthesized
  source 1..22: mol_type = other DNA
atgagagtaaggagagggtgtg

SEQ ID NO: 120172 - DNA, 22 bp, synthetic construct
  misc_feature 1..22: note = chemically synthesized
  source 1..22: mol_type = other DNA
ggcaggaaagagtatagagacc

SEQ ID NO: 120173 - DNA, 22 bp, synthetic construct
  misc_feature 1..22: note = chemically synthesized
  source 1..22: mol_type = other DNA
ctgccatcctgacttctagaca

SEQ ID NO: 120174 - DNA, 22 bp, synthetic construct
  misc_feature 1..22: note = chemically synthesized
  source 1..22: mol_type = other DNA
tgccatcctgacttctagacat

SEQ ID NO: 120175 - DNA, 22 bp, synthetic construct
  misc_feature 1..22: note = chemically synthesized
  source 1..22: mol_type = other DNA
ccatcctgacttctagacatga

SEQ ID NO: 120176 - DNA, 22 bp, synthetic construct
  misc_feature 1..22: note = chemically synthesized
  source 1..22: mol_type = other DNA
acttctagacatgatccaggga

SEQ ID NO: 120177 - DNA, 22 bp, synthetic construct
  misc_feature 1..22: note = chemically synthesized
  source 1..22: mol_type = other DNA
ctagacatgatccagggagggg

SEQ ID NO: 120178 - DNA, 22 bp, synthetic construct
  misc_feature 1..22: note = chemically synthesized
  source 1..22: mol_type = other DNA
tagacatgatccagggaggggc

SEQ ID NO: 120179 - DNA, 22 bp, synthetic construct
  misc_feature 1..22: note = chemically synthesized
  source 1..22: mol_type = other DNA
gacatgatccagggaggggctg

SEQ ID NO: 120180 - DNA, 22 bp, synthetic construct
  misc_feature 1..22: note = chemically synthesized
  source 1..22: mol_type = other DNA
gcctggccatgcaggcactcat

SEQ ID NO: 120181 - DNA, 22 bp, synthetic construct
  misc_feature 1..22: note = chemically synthesized
  source 1..22: mol_type = other DNA
gccatgcaggcactcatcaggg

SEQ ID NO: 120182 - DNA, 22 bp, synthetic construct
  misc_feature 1..22: note = chemically synthesized
  source 1..22: mol_type = other DNA
atcaggggagtgaggcagccct

SEQ ID NO: 120183 - DNA, 22 bp, synthetic construct
  misc_feature 1..22: note = chemically synthesized
  source 1..22: mol_type = other DNA
cctcctggccttcctaacagaa

SEQ ID NO: 120184 - DNA, 22 bp, synthetic construct
  misc_feature 1..22: note = chemically synthesized
  source 1..22: mol_type = other DNA
ctggccttcctaacagaatact

SEQ ID NO: 120185 - DNA, 22 bp, synthetic construct
  misc_feature 1..22: note = chemically synthesized
  source 1..22: mol_type = other DNA
gccttcctaacagaatactgca

SEQ ID NO: 120186 - DNA, 22 bp, synthetic construct
  misc_feature 1..22: note = chemically synthesized
  source 1..22: mol_type = other DNA
cctaacagaatactgcagatga

SEQ ID NO: 120187 - DNA, 22 bp, synthetic construct
  misc_feature 1..22: note = chemically synthesized
  source 1..22: mol_type = other DNA
ctaacagaatactgcagatgag

SEQ ID NO: 120188 - DNA, 22 bp, synthetic construct
  misc_feature 1..22: note = chemically synthesized
  source 1..22: mol_type = other DNA
acagaatactgcagatgagctc

SEQ ID NO: 120189 - DNA, 22 bp, synthetic construct
  misc_feature 1..22: note = chemically synthesized
  source 1..22: mol_type = other DNA
cagatgagctcgcctcttttcc

SEQ ID NO: 120190 - DNA, 22 bp, synthetic construct
  misc_feature 1..22: note = chemically synthesized
  source 1..22: mol_type = other DNA
gcctcttttccagcaagagaag

SEQ ID NO: 120191 - DNA, 22 bp, synthetic construct
  misc_feature 1..22: note = chemically synthesized
  source 1..22: mol_type = other DNA
ttttccagcaagagaaggtcct

SEQ ID NO: 120192 - DNA, 22 bp, synthetic construct
  misc_feature 1..22: note = chemically synthesized
  source 1..22: mol_type = other DNA
ttccagcaagagaaggtcctgt

SEQ ID NO: 120193 - DNA, 22 bp, synthetic construct
  misc_feature 1..22: note = chemically synthesized
  source 1..22: mol_type = other DNA
tccagcaagagaaggtcctgtt

SEQ ID NO: 120194 - DNA, 22 bp, synthetic construct
  misc_feature 1..22: note = chemically synthesized
  source 1..22: mol_type = other DNA
ccagcaagagaaggtcctgttt

SEQ ID NO: 120195 - DNA, 22 bp, synthetic construct
  misc_feature 1..22: note = chemically synthesized
  source 1..22: mol_type = other DNA
cagcaagagaaggtcctgtttt

SEQ ID NO: 120196 - DNA, 22 bp, synthetic construct
  misc_feature 1..22: note = chemically synthesized
  source 1..22: mol_type = other DNA
ttttctgttctttctctggctc

SEQ ID NO: 120197 - DNA, 22 bp, synthetic construct
  misc_feature 1..22: note = chemically synthesized
  source 1..22: mol_type = other DNA
tctgttctttctctggctctgg

SEQ ID NO: 120198 - DNA, 22 bp, synthetic construct
  misc_feature 1..22: note = chemically synthesized
  source 1..22: mol_type = other DNA
ctgttctttctctggctctggt

SEQ ID NO: 120199 - DNA, 22 bp, synthetic construct
  misc_feature 1..22: note = chemically synthesized
  source 1..22: mol_type = other DNA
tgttctttctctggctctggtt

SEQ ID NO: 120200 - DNA, 22 bp, synthetic construct
  misc_feature 1..22: note = chemically synthesized
  source 1..22: mol_type = other DNA
ttctttctctggctctggttct

SEQ ID NO: 120201 - DNA, 22 bp, synthetic construct
  misc_feature 1..22: note = chemically synthesized
  source 1..22: mol_type = other DNA
tttctctggctctggttctgtg

SEQ ID NO: 120202 - DNA, 22 bp, synthetic construct
  misc_feature 1..22: note = chemically synthesized
  source 1..22: mol_type = other DNA
tctctggctctggttctgtgca

SEQ ID NO: 120203 - DNA, 22 bp, synthetic construct
  misc_feature 1..22: note = chemically synthesized
  source 1..22: mol_type = other DNA
ctctggctctggttctgtgcat

SEQ ID NO: 120204 - DNA, 22 bp, synthetic construct
  misc_feature 1..22: note = chemically synthesized
  source 1..22: mol_type = other DNA
tctggctctggttctgtgcata

SEQ ID NO: 120205 - DNA, 22 bp, synthetic construct
  misc_feature 1..22: note = chemically synthesized
  source 1..22: mol_type = other DNA
tggctctggttctgtgcataga

SEQ ID NO: 120206 - DNA, 22 bp, synthetic construct
  misc_feature 1..22: note = chemically synthesized
  source 1..22: mol_type = other DNA
gctctggttctgtgcatagact

SEQ ID NO: 120207 - DNA, 22 bp, synthetic construct
  misc_feature 1..22: note = chemically synthesized
  source 1..22: mol_type = other DNA
tggttctgtgcatagactctga

SEQ ID NO: 120208 - DNA, 22 bp, synthetic construct
  misc_feature 1..22: note = chemically synthesized
  source 1..22: mol_type = other DNA
gttctgtgcatagactctgaga

SEQ ID NO: 120209 - DNA, 22 bp, synthetic construct
  misc_feature 1..22: note = chemically synthesized
  source 1..22: mol_type = other DNA
tgtgcatagactctgagaatat

SEQ ID NO: 120210 - DNA, 22 bp, synthetic construct
  misc_feature 1..22: note = chemically synthesized
  source 1..22: mol_type = other DNA
tgcatagactctgagaatatca

SEQ ID NO: 120211 - DNA, 22 bp, synthetic construct
  misc_feature 1..22: note = chemically synthesized
  source 1..22: mol_type = other DNA
tgagaatatcagaagagattct

SEQ ID NO: 120212 - DNA, 22 bp, synthetic construct
  misc_feature 1..22: note = chemically synthesized
  source 1..22: mol_type = other DNA
agaatatcagaagagattctgt

SEQ ID NO: 120213 - DNA, 22 bp, synthetic construct
  misc_feature 1..22: note = chemically synthesized
  source 1..22: mol_type = other DNA
tgtgagaaccctggtttctaag

SEQ ID NO: 120214 - DNA, 22 bp, synthetic construct
  misc_feature 1..22: note = chemically synthesized
  source 1..22: mol_type = other DNA
tgagaaccctggtttctaagac

SEQ ID NO: 120215 - DNA, 22 bp, synthetic construct
  misc_feature 1..22: note = chemically synthesized
  source 1..22: mol_type = other DNA
gtttctaagacttcattttcca

SEQ ID NO: 120216 - DNA, 22 bp, synthetic construct
  misc_feature 1..22: note = chemically synthesized
  source 1..22: mol_type = other DNA
ctaagacttcattttccaagtg

SEQ ID NO: 120217 - DNA, 22 bp, synthetic construct
  misc_feature 1..22: note = chemically synthesized
  source 1..22: mol_type = other DNA
taagacttcattttccaagtga

SEQ ID NO: 120218 - DNA, 22 bp, synthetic construct
  misc_feature 1..22: note = chemically synthesized
  source 1..22: mol_type = other DNA
agacttcattttccaagtgaaa

SEQ ID NO: 120219 - DNA, 22 bp, synthetic construct
  misc_feature 1..22: note = chemically synthesized
  source 1..22: mol_type = other DNA
cattttccaagtgaaaaatcta

SEQ ID NO: 120220 - DNA, 22 bp, synthetic construct
  misc_feature 1..22: note = chemically synthesized
  source 1..22: mol_type = other DNA
attttccaagtgaaaaatctaa

SEQ ID NO: 120221 - DNA, 22 bp, synthetic construct
  misc_feature 1..22: note = chemically synthesized
  source 1..22: mol_type = other DNA
tccaagtgaaaaatctaaggcc

SEQ ID NO: 120222 - DNA, 22 bp, synthetic construct
  misc_feature 1..22: note = chemically synthesized
  source 1..22: mol_type = other DNA
ccaagtgaaaaatctaaggccc

SEQ ID NO: 120223 - DNA, 22 bp, synthetic construct
  misc_feature 1..22: note = chemically synthesized
  source 1..22: mol_type = other DNA
caagtgaaaaatctaaggccca

SEQ ID NO: 120224 - DNA, 22 bp, synthetic construct
  misc_feature 1..22: note = chemically synthesized
  source 1..22: mol_type = other DNA
aggcccagactgctgtatatgg

SEQ ID NO: 120225 - DNA, 22 bp, synthetic construct
  misc_feature 1..22: note = chemically synthesized
  source 1..22: mol_type = other DNA
ctgtatatggtggttcacactt

SEQ ID NO: 120226 - DNA, 22 bp, synthetic construct
  misc_feature 1..22: note = chemically synthesized
  source 1..22: mol_type = other DNA
tatatggtggttcacacttata

SEQ ID NO: 120227 - DNA, 22 bp, synthetic construct
  misc_feature 1..22: note = chemically synthesized
  source 1..22: mol_type = other DNA
acacttataatcctggcaactt

SEQ ID NO: 120228 - DNA, 22 bp, synthetic construct
  misc_feature 1..22: note = chemically synthesized
  source 1..22: mol_type = other DNA
ataatcctggcaacttggaaga

SEQ ID NO: 120229 - DNA, 22 bp, synthetic construct
  misc_feature 1..22: note = chemically synthesized
  source 1..22: mol_type = other DNA
taatcctggcaacttggaagaa

SEQ ID NO: 120230 - DNA, 22 bp, synthetic construct
  misc_feature 1..22: note = chemically synthesized
  source 1..22: mol_type = other DNA
gcaacttggaagaataaggtgg

SEQ ID NO: 120231 - DNA, 22 bp, synthetic construct
  misc_feature 1..22: note = chemically synthesized
  source 1..22: mol_type = other DNA
ggaagaataaggtgggaggatt

SEQ ID NO: 120232 - DNA, 22 bp, synthetic construct
  misc_feature 1..22: note = chemically synthesized
  source 1..22: mol_type = other DNA
gaagaataaggtgggaggattg

SEQ ID NO: 120233 - DNA, 22 bp, synthetic construct
  misc_feature 1..22: note = chemically synthesized
  source 1..22: mol_type = other DNA
cttgaatccggtttgagtttac

SEQ ID NO: 120234 - DNA, 22 bp, synthetic construct
  misc_feature 1..22: note = chemically synthesized
  source 1..22: mol_type = other DNA
gaatccggtttgagtttacagt

SEQ ID NO: 120235 - DNA, 22 bp, synthetic construct
  misc_feature 1..22: note = chemically synthesized
  source 1..22: mol_type = other DNA
aatccggtttgagtttacagtg

SEQ ID NO: 120236 - DNA, 22 bp, synthetic construct
  misc_feature 1..22: note = chemically synthesized
  source 1..22: mol_type = other DNA
gagtttacagtgagctatgatt

SEQ ID NO: 120237 - DNA, 22 bp, synthetic construct
  misc_feature 1..22: note = chemically synthesized
  source 1..22: mol_type = other DNA
agtttacagtgagctatgatta

SEQ ID NO: 120238 - DNA, 22 bp, synthetic construct
  misc_feature 1..22: note = chemically synthesized
  source 1..22: mol_type = other DNA
acagtgagctatgattacacca

SEQ ID NO: 120239 - DNA, 22 bp, synthetic construct
  misc_feature 1..22: note = chemically synthesized
  source 1..22: mol_type = other DNA
cagtgagctatgattacaccac

SEQ ID NO: 120240 - DNA, 22 bp, synthetic construct
  misc_feature 1..22: note = chemically synthesized
  source 1..22: mol_type = other DNA
tgattacaccactgcactgtag

SEQ ID NO: 120241 - DNA, 22 bp, synthetic construct
  misc_feature 1..22: note = chemically synthesized
  source 1..22: mol_type = other DNA
caccactgcactgtagcctggg

SEQ ID NO: 120242 - DNA, 22 bp, synthetic construct
  misc_feature 1..22: note = chemically synthesized
  source 1..22: mol_type = other DNA
cactgtagcctgggtaacagag

SEQ ID NO: 120243 - DNA, 22 bp, synthetic construct
  misc_feature 1..22: note = chemically synthesized
  source 1..22: mol_type = other DNA
tagcctgggtaacagagctaga

SEQ ID NO: 120244 - DNA, 22 bp, synthetic construct
  misc_feature 1..22: note = chemically synthesized
  source 1..22: mol_type = other DNA
ggtaacagagctagacctcatt

SEQ ID NO: 120245 - DNA, 22 bp, synthetic construct
  misc_feature 1..22: note = chemically synthesized
  source 1..22: mol_type = other DNA
gacctcatttctaaaaacaaca

SEQ ID NO: 120246 - DNA, 22 bp, synthetic construct
  misc_feature 1..22: note = chemically synthesized
  source 1..22: mol_type = other DNA
atttctaaaaacaacaaacaaa

SEQ ID NO: 120247 - DNA, 22 bp, synthetic construct
  misc_feature 1..22: note = chemically synthesized
  source 1..22: mol_type = other DNA
ctaaaaacaacaaacaaagaaa

SEQ ID NO: 120248 - DNA, 22 bp, synthetic construct
  misc_feature 1..22: note = chemically synthesized
  source 1..22: mol_type = other DNA
taaaaacaacaaacaaagaaac

SEQ ID NO: 120249 - DNA, 22 bp, synthetic construct
  misc_feature 1..22: note = chemically synthesized
  source 1..22: mol_type = other DNA
aaaacaacaaacaaagaaacaa

SEQ ID NO: 120250 - DNA, 22 bp, synthetic construct
  misc_feature 1..22: note = chemically synthesized
  source 1..22: mol_type = other DNA
ggcttagtgcagggaatgtggg

SEQ ID NO: 120251 - DNA, 22 bp, synthetic construct
  misc_feature 1..22: note = chemically synthesized
  source 1..22: mol_type = other DNA
agtgcagggaatgtggggaatc

SEQ ID NO: 120252 - DNA, 22 bp, synthetic construct
  misc_feature 1..22: note = chemically synthesized
  source 1..22: mol_type = other DNA
gtgcagggaatgtggggaatcc

SEQ ID NO: 120253 - DNA, 22 bp, synthetic construct
  misc_feature 1..22: note = chemically synthesized
  source 1..22: mol_type = other DNA
ggctaaggacattcaaacattt

SEQ ID NO: 120254 - DNA, 22 bp, synthetic construct
  misc_feature 1..22: note = chemically synthesized
  source 1..22: mol_type = other DNA
gctaaggacattcaaacatttg

SEQ ID NO: 120255 - DNA, 22 bp, synthetic construct
  misc_feature 1..22: note = chemically synthesized
  source 1..22: mol_type = other DNA
aggacattcaaacatttggggg

SEQ ID NO: 120256 - DNA, 22 bp, synthetic construct
  misc_feature 1..22: note = chemically synthesized
  source 1..22: mol_type = other DNA
aaacatttgggggaaaagcctt

SEQ ID NO: 120257 - DNA, 22 bp, synthetic construct
  misc_feature 1..22: note = chemically synthesized
  source 1..22: mol_type = other DNA
gggggaaaagccttaattgtaa

SEQ ID NO: 120258 - DNA, 22 bp, synthetic construct
  misc_feature 1..22: note = chemically synthesized
  source 1..22: mol_type = other DNA
ggggaaaagccttaattgtaac

SEQ ID NO: 120259 - DNA, 22 bp, synthetic construct
  misc_feature 1..22: note = chemically synthesized
  source 1..22: mol_type = other DNA
aattgtaactgagaccatgtct

SEQ ID NO: 120260 - DNA, 22 bp, synthetic construct
  misc_feature 1..22: note = chemically synthesized
  source 1..22: mol_type = other DNA
attgtaactgagaccatgtctt

SEQ ID NO: 120261 - DNA, 22 bp, synthetic construct
  misc_feature 1..22: note = chemically synthesized
  source 1..22: mol_type = other DNA
taactgagaccatgtctttttg

SEQ ID NO: 120262 - DNA, 22 bp, synthetic construct
  misc_feature 1..22: note = chemically synthesized
  source 1..22: mol_type = other DNA
agaccatgtctttttgggctca

SEQ ID NO: 120263 - DNA, 22 bp, synthetic construct
  misc_feature 1..22: note = chemically synthesized
  source 1..22: mol_type = other DNA
tttgggctcactgcttttgtga

SEQ ID NO: 120264 - DNA, 22 bp, synthetic construct
  misc_feature 1..22: note = chemically synthesized
  source 1..22: mol_type = other DNA
ttgggctcactgcttttgtgat

SEQ ID NO: 120265 - DNA, 22 bp, synthetic construct
  misc_feature 1..22: note = chemically synthesized
  source 1..22: mol_type = other DNA
tgggctcactgcttttgtgata

SEQ ID NO: 120266 - DNA, 22 bp, synthetic construct
  misc_feature 1..22: note = chemically synthesized
  source 1..22: mol_type = other DNA
gggctcactgcttttgtgatac

SEQ ID NO: 120267 - DNA, 22 bp, synthetic construct
  misc_feature 1..22: note = chemically synthesized
  source 1..22: mol_type = other DNA
ggctcactgcttttgtgatacc

SEQ ID NO: 120268 - DNA, 22 bp, synthetic construct
  misc_feature 1..22: note = chemically synthesized
  source 1..22: mol_type = other DNA
actgcttttgtgatacctatgc

SEQ ID NO: 120269 - DNA, 22 bp, synthetic construct
  misc_feature 1..22: note = chemically synthesized
  source 1..22: mol_type = other DNA
cttttgtgatacctatgcattc

SEQ ID NO: 120270 - DNA, 22 bp, synthetic construct
  misc_feature 1..22: note = chemically synthesized
  source 1..22: mol_type = other DNA
ttgtgatacctatgcattccca

SEQ ID NO: 120271 - DNA, 22 bp, synthetic construct
  misc_feature 1..22: note = chemically synthesized
  source 1..22: mol_type = other DNA
tgtgatacctatgcattcccat

SEQ ID NO: 120272 - DNA, 22 bp, synthetic construct
  misc_feature 1..22: note = chemically synthesized
  source 1..22: mol_type = other DNA
gtgatacctatgcattcccatt

SEQ ID NO: 120273 - DNA, 22 bp, synthetic construct
  misc_feature 1..22: note = chemically synthesized
  source 1..22: mol_type = other DNA
tgatacctatgcattcccattt

SEQ ID NO: 120274 - DNA, 22 bp, synthetic construct
  misc_feature 1..22: note = chemically synthesized
  source 1..22: mol_type = other DNA
tgcattcccattttccctcatt

SEQ ID NO: 120275 - DNA, 22 bp, synthetic construct
  misc_feature 1..22: note = chemically synthesized
  source 1..22: mol_type = other DNA
ccattttccctcattttctccc

SEQ ID NO: 120276 - DNA, 22 bp, synthetic construct
  misc_feature 1..22: note = chemically synthesized
  source 1..22: mol_type = other DNA
tccctcattttctccctcctct

SEQ ID NO: 120277 - DNA, 22 bp, synthetic construct
  misc_feature 1..22: note = chemically synthesized
  source 1..22: mol_type = other DNA
ccctcattttctccctcctctc

SEQ ID NO: 120278 - DNA, 22 bp, synthetic construct
  misc_feature 1..22: note = chemically synthesized
  source 1..22: mol_type = other DNA
cctcattttctccctcctctct

SEQ ID NO: 120279 - DNA, 22 bp, synthetic construct
  misc_feature 1..22: note = chemically synthesized
  source 1..22: mol_type = other DNA
attttctccctcctctctccca

SEQ ID NO: 120280 - DNA, 22 bp, synthetic construct
  misc_feature 1..22: note = chemically synthesized
  source 1..22: mol_type = other DNA
tctccctcctctctcccatgtc

SEQ ID NO: 120281 - DNA, 22 bp, synthetic construct
  misc_feature 1..22: note = chemically synthesized
  source 1..22: mol_type = other DNA
ctccctcctctctcccatgtcc

SEQ ID NO: 120282 - DNA, 22 bp, synthetic construct
  misc_feature 1..22: note = chemically synthesized
  source 1..22: mol_type = other DNA
tccctcctctctcccatgtccc

SEQ ID NO: 120283 - DNA, 22 bp, synthetic construct
  misc_feature 1..22: note = chemically synthesized
  source 1..22: mol_type = other DNA
cctcctctctcccatgtccccc

SEQ ID NO: 120284 - DNA, 22 bp, synthetic construct
  misc_feature 1..22: note = chemically synthesized
  source 1..22: mol_type = other DNA
ctctctcccatgtccccctaat

SEQ ID NO: 120285 - DNA, 22 bp, synthetic construct
  misc_feature 1..22: note = chemically synthesized
  source 1..22: mol_type = other DNA
tctcccatgtccccctaattac

SEQ ID NO: 120286 - DNA, 22 bp, synthetic construct
  misc_feature 1..22: note = chemically synthesized
  source 1..22: mol_type = other DNA
tcccatgtccccctaattaccc

SEQ ID NO: 120287 - DNA, 22 bp, synthetic construct
  misc_feature 1..22: note = chemically synthesized
  source 1..22: mol_type = other DNA
ccatgtccccctaattacccac

SEQ ID NO: 120288 - DNA, 22 bp, synthetic construct
  misc_feature 1..22: note = chemically synthesized
  source 1..22: mol_type = other DNA
attacccactcctgaaaccccg

SEQ ID NO: 120289 - DNA, 22 bp, synthetic construct
  misc_feature 1..22: note = chemically synthesized
  source 1..22: mol_type = other DNA
cccactcctgaaaccccggcac

SEQ ID NO: 120290 - DNA, 22 bp, synthetic construct
  misc_feature 1..22: note = chemically synthesized
  source 1..22: mol_type = other DNA
ctgaaaccccggcacaagacag

SEQ ID NO: 120291 - DNA, 22 bp, synthetic construct
  misc_feature 1..22: note = chemically synthesized
  source 1..22: mol_type = other DNA
aaaccccggcacaagacagtag

SEQ ID NO: 120292 - DNA, 22 bp, synthetic construct
  misc_feature 1..22: note = chemically synthesized
  source 1..22: mol_type = other DNA
accagcaggtaataacaaaaat

SEQ ID NO: 120293 - DNA, 22 bp, synthetic construct
  misc_feature 1..22: note = chemically synthesized
  source 1..22: mol_type = other DNA
caaaggaagaaagaagagtata

SEQ ID NO: 120294 - DNA, 22 bp, synthetic construct
  misc_feature 1..22: note = chemically synthesized
  source 1..22: mol_type = other DNA
agaggcacaaggctgtggctgt

SEQ ID NO: 120295 - DNA, 22 bp, synthetic construct
  misc_feature 1..22: note = chemically synthesized
  source 1..22: mol_type = other DNA
tggctgtcacagaaggatttat

SEQ ID NO: 120296 - DNA, 22 bp, synthetic construct
  misc_feature 1..22: note = chemically synthesized
  source 1..22: mol_type = other DNA
tcacagaaggatttatcctcct

SEQ ID NO: 120297 - DNA, 22 bp, synthetic construct
  misc_feature 1..22: note = chemically synthesized
  source 1..22: mol_type = other DNA
atcctcctaaagaccatggctc

SEQ ID NO: 120298 - DNA, 22 bp, synthetic construct
  misc_feature 1..22: note = chemically synthesized
  source 1..22: mol_type = other DNA
tcctcctaaagaccatggctcc

SEQ ID NO: 120299 - DNA, 22 bp, synthetic construct
  misc_feature 1..22: note = chemically synthesized
  source 1..22: mol_type = other DNA
ctaaagaccatggctccagctg

SEQ ID NO: 120300 - DNA, 22 bp, synthetic construct
  misc_feature 1..22: note = chemically synthesized
  source 1..22: mol_type = other DNA
aagaccatggctccagctggga

SEQ ID NO: 120301 - DNA, 22 bp, synthetic construct
  misc_feature 1..22: note = chemically synthesized
  source 1..22: mol_type = other DNA
cagctgggagaacttaatggta

SEQ ID NO: 120302 - DNA, 22 bp, synthetic construct
  misc_feature 1..22: note = chemically synthesized
  source 1..22: mol_type = other DNA
ggagaacttaatggtaaacaaa

SEQ ID NO: 120303 - DNA, 22 bp, synthetic construct
  misc_feature 1..22: note = chemically synthesized
  source 1..22: mol_type = other DNA
aatggtaaacaaagggtcccca

SEQ ID NO: 120304 - DNA, 22 bp, synthetic construct
  misc_feature 1..22: note = chemically synthesized
  source 1..22: mol_type = other DNA
atggtaaacaaagggtccccag

SEQ ID NO: 120305 - DNA, 22 bp, synthetic construct
  misc_feature 1..22: note = chemically synthesized
  source 1..22: mol_type = other DNA
ggaatcctatgggcaggaaact

SEQ ID NO: 120306 - DNA, 22 bp, synthetic construct
  misc_feature 1..22: note = chemically synthesized
  source 1..22: mol_type = other DNA
tgggcaggaaactttctttatc

SEQ ID NO: 120307 - DNA, 22 bp, synthetic construct
  misc_feature 1..22: note = chemically synthesized
  source 1..22: mol_type = other DNA
tctttatctccacccctgtctc

SEQ ID NO: 120308 - DNA, 22 bp, synthetic construct
  misc_feature 1..22: note = chemically synthesized
  source 1..22: mol_type = other DNA
ctttatctccacccctgtctcc

SEQ ID NO: 120309 - DNA, 22 bp, synthetic construct
  misc_feature 1..22: note = chemically synthesized
  source 1..22: mol_type = other DNA
tttatctccacccctgtctcct

SEQ ID NO: 120310 - DNA, 22 bp, synthetic construct
  misc_feature 1..22: note = chemically synthesized
  source 1..22: mol_type = other DNA
tatctccacccctgtctcctga

SEQ ID NO: 120311 - DNA, 22 bp, synthetic construct
  misc_feature 1..22: note = chemically synthesized
  source 1..22: mol_type = other DNA
atctccacccctgtctcctgaa

SEQ ID NO: 120312 - DNA, 22 bp, synthetic construct
  misc_feature 1..22: note = chemically synthesized
  source 1..22: mol_type = other DNA
tctccacccctgtctcctgaag

SEQ ID NO: 120313 - DNA, 22 bp, synthetic construct
  misc_feature 1..22: note = chemically synthesized
  source 1..22: mol_type = other DNA
cacccctgtctcctgaagctga

SEQ ID NO: 120314 - DNA, 22 bp, synthetic construct
  misc_feature 1..22: note = chemically synthesized
  source 1..22: mol_type = other DNA
tctcctgaagctgaagagccct

SEQ ID NO: 120315 - DNA, 22 bp, synthetic construct
  misc_feature 1..22: note = chemically synthesized
  source 1..22: mol_type = other DNA
ctgaagctgaagagccctaact

SEQ ID NO: 120316 - DNA, 22 bp, synthetic construct
  misc_feature 1..22: note = chemically synthesized
  source 1..22: mol_type = other DNA
aagctgaagagccctaactttt

SEQ ID NO: 120317 - DNA, 22 bp, synthetic construct
  misc_feature 1..22: note = chemically synthesized
  source 1..22: mol_type = other DNA
aagagccctaactttttagcat

SEQ ID NO: 120318 - DNA, 22 bp, synthetic construct
  misc_feature 1..22: note = chemically synthesized
  source 1..22: mol_type = other DNA
actttttagcattcagtcccca

SEQ ID NO: 120319 - DNA, 22 bp, synthetic construct
  misc_feature 1..22: note = chemically synthesized
  source 1..22: mol_type = other DNA
tttagcattcagtccccaggtt

SEQ ID NO: 120320 - DNA, 22 bp, synthetic construct
  misc_feature 1..22: note = chemically synthesized
  source 1..22: mol_type = other DNA
ttagcattcagtccccaggttt

SEQ ID NO: 120321 - DNA, 22 bp, synthetic construct
  misc_feature 1..22: note = chemically synthesized
  source 1..22: mol_type = other DNA
tagcattcagtccccaggtttt

SEQ ID NO: 120322 - DNA, 22 bp, synthetic construct
  misc_feature 1..22: note = chemically synthesized
  source 1..22: mol_type = other DNA
agcattcagtccccaggttttg

SEQ ID NO: 120323 - DNA, 22 bp, synthetic construct
  misc_feature 1..22: note = chemically synthesized
  source 1..22: mol_type = other DNA
gcattcagtccccaggttttgg

SEQ ID NO: 120324 - DNA, 22 bp, synthetic construct
  misc_feature 1..22: note = chemically synthesized
  source 1..22: mol_type = other DNA
agtccccaggttttggctacac

SEQ ID NO: 120325 - DNA, 22 bp, synthetic construct
  misc_feature 1..22: note = chemically synthesized
  source 1..22: mol_type = other DNA
tggctacacagacatctgctgc

SEQ ID NO: 120326 - DNA, 22 bp, synthetic construct
  misc_feature 1..22: note = chemically synthesized
  source 1..22: mol_type = other DNA
ggctacacagacatctgctgca

SEQ ID NO: 120327 - DNA, 22 bp, synthetic construct
  misc_feature 1..22: note = chemically synthesized
  source 1..22: mol_type = other DNA
gctacacagacatctgctgcaa

SEQ ID NO: 120328 - DNA, 22 bp, synthetic construct
  misc_feature 1..22: note = chemically synthesized
  source 1..22: mol_type = other DNA
cacagacatctgctgcaacaaa

SEQ ID NO: 120329 - DNA, 22 bp, synthetic construct
  misc_feature 1..22: note = chemically synthesized
  source 1..22: mol_type = other DNA
ctgcaacaaaagtactactgcc

SEQ ID NO: 120330 - DNA, 22 bp, synthetic construct
  misc_feature 1..22: note = chemically synthesized
  source 1..22: mol_type = other DNA
caacaaaagtactactgcctta

SEQ ID NO: 120331 - DNA, 22 bp, synthetic construct
  misc_feature 1..22: note = chemically synthesized
  source 1..22: mol_type = other DNA
ctgccttatctgtttattttta

SEQ ID NO: 120332 - DNA, 22 bp, synthetic construct
  misc_feature 1..22: note = chemically synthesized
  source 1..22: mol_type = other DNA
ccttatctgtttatttttaatt

SEQ ID NO: 120333 - DNA, 22 bp, synthetic construct
  misc_feature 1..22: note = chemically synthesized
  source 1..22: mol_type = other DNA
atctgtttatttttaatttcat

SEQ ID NO: 120334 - DNA, 22 bp, synthetic construct
  misc_feature 1..22: note = chemically synthesized
  source 1..22: mol_type = other DNA
tctgtttatttttaatttcata

SEQ ID NO: 120335 - DNA, 22 bp, synthetic construct
  misc_feature 1..22: note = chemically synthesized
  source 1..22: mol_type = other DNA
tttatttttaatttcataaaga

SEQ ID NO: 120336 - DNA, 22 bp, synthetic construct
  misc_feature 1..22: note = chemically synthesized
  source 1..22: mol_type = other DNA
atttttaatttcataaagaagt

SEQ ID NO: 120337 - DNA, 22 bp, synthetic construct
  misc_feature 1..22: note = chemically synthesized
  source 1..22: mol_type = other DNA
tttttaatttcataaagaagtc

SEQ ID NO: 120338 - DNA, 22 bp, synthetic construct
  misc_feature 1..22: note = chemically synthesized
  source 1..22: mol_type = other DNA
ttaatttcataaagaagtcaat

SEQ ID NO: 120339 - DNA, 22 bp, synthetic construct
  misc_feature 1..22: note = chemically synthesized
  source 1..22: mol_type = other DNA
taatttcataaagaagtcaatt

SEQ ID NO: 120340 - DNA, 22 bp, synthetic construct
  misc_feature 1..22: note = chemically synthesized
  source 1..22: mol_type = other DNA
aatttcataaagaagtcaattc

SEQ ID NO: 120341 - DNA, 22 bp, synthetic construct
  misc_feature 1..22: note = chemically synthesized
  source 1..22: mol_type = other DNA
atttcataaagaagtcaattca

SEQ ID NO: 120342 - DNA, 22 bp, synthetic construct
  misc_feature 1..22: note = chemically synthesized
  source 1..22: mol_type = other DNA
cataaagaagtcaattcatatc

SEQ ID NO: 120343 - DNA, 22 bp, synthetic construct
  misc_feature 1..22: note = chemically synthesized
  source 1..22: mol_type = other DNA
ataaagaagtcaattcatatca

SEQ ID NO: 120344 - DNA, 22 bp, synthetic construct
  misc_feature 1..22: note = chemically synthesized
  source 1..22: mol_type = other DNA
atatcacttatcattttattta

SEQ ID NO: 120345 - DNA, 22 bp, synthetic construct
  misc_feature 1..22: note = chemically synthesized
  source 1..22: mol_type = other DNA
atcattttatttactgtcttct

SEQ ID NO: 120346 - DNA, 22 bp, synthetic construct
  misc_feature 1..22: note = chemically synthesized
  source 1..22: mol_type = other DNA
tcattttatttactgtcttctg

SEQ ID NO: 120347 - DNA, 22 bp, synthetic construct
  misc_feature 1..22: note = chemically synthesized
  source 1..22: mol_type = other DNA
tatttactgtcttctgttatcc

SEQ ID NO: 120348 - DNA, 22 bp, synthetic construct
  misc_feature 1..22: note = chemically synthesized
  source 1..22: mol_type = other DNA
atttactgtcttctgttatcca

SEQ ID NO: 120349 - DNA, 22 bp, synthetic construct
  misc_feature 1..22: note = chemically synthesized
  source 1..22: mol_type = other DNA
tttactgtcttctgttatccac

SEQ ID NO: 120350 - DNA, 22 bp, synthetic construct
  misc_feature 1..22: note = chemically synthesized
  source 1..22: mol_type = other DNA
actgtcttctgttatccactag

SEQ ID NO: 120351 - DNA, 22 bp, synthetic construct
  misc_feature 1..22: note = chemically synthesized
  source 1..22: mol_type = other DNA
ctgtcttctgttatccactagt

SEQ ID NO: 120352 - DNA, 22 bp, synthetic construct
  misc_feature 1..22: note = chemically synthesized
  source 1..22: mol_type = other DNA
tcttctgttatccactagtaat

SEQ ID NO: 120353 - DNA, 22 bp, synthetic construct
  misc_feature 1..22: note = chemically synthesized
  source 1..22: mol_type = other DNA
ctgttatccactagtaatggac

SEQ ID NO: 120354 - DNA, 22 bp, synthetic construct
  misc_feature 1..22: note = chemically synthesized
  source 1..22: mol_type = other DNA
tgttatccactagtaatggacc

SEQ ID NO: 120355 - DNA, 22 bp, synthetic construct
  misc_feature 1..22: note = chemically synthesized
  source 1..22: mol_type = other DNA
ttatccactagtaatggacccg

SEQ ID NO: 120356 - DNA, 22 bp, synthetic construct
  misc_feature 1..22: note = chemically synthesized
  source 1..22: mol_type = other DNA
tccactagtaatggacccgtcg

SEQ ID NO: 120357 - DNA, 22 bp, synthetic construct
  misc_feature 1..22: note = chemically synthesized
  source 1..22: mol_type = other DNA
gtaatggacccgtcgttttcca

SEQ ID NO: 120358 - DNA, 22 bp, synthetic construct
  misc_feature 1..22: note = chemically synthesized
  source 1..22: mol_type = other DNA
tccagagaggtcggatgtagta

SEQ ID NO: 120359 - DNA, 22 bp, synthetic construct
  misc_feature 1..22: note = chemically synthesized
  source 1..22: mol_type = other DNA
ccagagaggtcggatgtagtat

SEQ ID NO: 120360 - DNA, 22 bp, synthetic construct
  misc_feature 1..22: note = chemically synthesized
  source 1..22: mol_type = other DNA
cagagaggtcggatgtagtata

SEQ ID NO: 120361 - DNA, 22 bp, synthetic construct
  misc_feature 1..22: note = chemically synthesized
  source 1..22: mol_type = other DNA
tccatgtgatgttcacagtggc

SEQ ID NO: 120362 - DNA, 22 bp, synthetic construct
  misc_feature 1..22: note = chemically synthesized
  source 1..22: mol_type = other DNA
acagtggcttttaaattgcaca

SEQ ID NO: 120363 - DNA, 22 bp, synthetic construct
  misc_feature 1..22: note = chemically synthesized
  source 1..22: mol_type = other DNA
ttaaattgcacatctgccttga

SEQ ID NO: 120364 - DNA, 22 bp, synthetic construct
  misc_feature 1..22: note = chemically synthesized
  source 1..22: mol_type = other DNA
taaattgcacatctgccttgaa

SEQ ID NO: 120365 - DNA, 22 bp, synthetic construct
  misc_feature 1..22: note = chemically synthesized
  source 1..22: mol_type = other DNA
aaattgcacatctgccttgaag

SEQ ID NO: 120366 - DNA, 22 bp, synthetic construct
  misc_feature 1..22: note = chemically synthesized
  source 1..22: mol_type = other DNA
aattgcacatctgccttgaagc

SEQ ID NO: 120367 - DNA, 22 bp, synthetic construct
  misc_feature 1..22: note = chemically synthesized
  source 1..22: mol_type = other DNA
cacatctgccttgaagcaccac

SEQ ID NO: 120368 - DNA, 22 bp, synthetic construct
  misc_feature 1..22: note = chemically synthesized
  source 1..22: mol_type = other DNA
ccttgaagcaccacaatcacca

SEQ ID NO: 120369 - DNA, 22 bp, synthetic construct
  misc_feature 1..22: note = chemically synthesized
  source 1..22: mol_type = other DNA
gaagcaccacaatcaccactac

SEQ ID NO: 120370 - DNA, 22 bp, synthetic construct
  misc_feature 1..22: note = chemically synthesized
  source 1..22: mol_type = other DNA
aagcaccacaatcaccactact

SEQ ID NO: 120371 - DNA, 22 bp, synthetic construct
  misc_feature 1..22: note = chemically synthesized
  source 1..22: mol_type = other DNA
cttcaagattctctcactcctg

SEQ ID NO: 120372 - DNA, 22 bp, synthetic construct
  misc_feature 1..22: note = chemically synthesized
  source 1..22: mol_type = other DNA
caagattctctcactcctgcac

SEQ ID NO: 120373 - DNA, 22 bp, synthetic construct
  misc_feature 1..22: note = chemically synthesized
  source 1..22: mol_type = other DNA
aagattctctcactcctgcact

SEQ ID NO: 120374 - DNA, 22 bp, synthetic construct
  misc_feature 1..22: note = chemically synthesized
  source 1..22: mol_type = other DNA
tctcactcctgcactcattttc

SEQ ID NO: 120375 - DNA, 22 bp, synthetic construct
  misc_feature 1..22: note = chemically synthesized
  source 1..22: mol_type = other DNA
tcactcctgcactcattttcct

SEQ ID NO: 120376 - DNA, 22 bp, synthetic construct
  misc_feature 1..22: note = chemically synthesized
  source 1..22: mol_type = other DNA
actcctgcactcattttcctgt

SEQ ID NO: 120377 - DNA, 22 bp, synthetic construct
  misc_feature 1..22: note = chemically synthesized
  source 1..22: mol_type = other DNA
ctgcactcattttcctgtctat

SEQ ID NO: 120378 - DNA, 22 bp, synthetic construct
  misc_feature 1..22: note = chemically synthesized
  source 1..22: mol_type = other DNA
cactcattttcctgtctatttt

SEQ ID NO: 120379 - DNA, 22 bp, synthetic construct
  misc_feature 1..22: note = chemically synthesized
  source 1..22: mol_type = other DNA
attttcctgtctatttttatat

SEQ ID NO: 120380 - DNA, 22 bp, synthetic construct
  misc_feature 1..22: note = chemically synthesized
  source 1..22: mol_type = other DNA
tcctgtctatttttatatttcc

SEQ ID NO: 120381 - DNA, 22 bp, synthetic construct
  misc_feature 1..22: note = chemically synthesized
  source 1..22: mol_type = other DNA
cctgtctatttttatatttcca

SEQ ID NO: 120382 - DNA, 22 bp, synthetic construct
  misc_feature 1..22: note = chemically synthesized
  source 1..22: mol_type = other DNA
ctgtctatttttatatttccat

SEQ ID NO: 120383 - DNA, 22 bp, synthetic construct
  misc_feature 1..22: note = chemically synthesized
  source 1..22: mol_type = other DNA
tctatttttatatttccattta

SEQ ID NO: 120384 - DNA, 22 bp, synthetic construct
  misc_feature 1..22: note = chemically synthesized
  source 1..22: mol_type = other DNA
tttttatatttccatttactgc

SEQ ID NO: 120385 - DNA, 22 bp, synthetic construct
  misc_feature 1..22: note = chemically synthesized
  source 1..22: mol_type = other DNA
ttatatttccatttactgcaga

SEQ ID NO: 120386 - DNA, 22 bp, synthetic construct
  misc_feature 1..22: note = chemically synthesized
  source 1..22: mol_type = other DNA
tatatttccatttactgcagat

SEQ ID NO: 120387 - DNA, 22 bp, synthetic construct
  misc_feature 1..22: note = chemically synthesized
  source 1..22: mol_type = other DNA
atatttccatttactgcagata

SEQ ID NO: 120388 - DNA, 22 bp, synthetic construct
  misc_feature 1..22: note = chemically synthesized
  source 1..22: mol_type = other DNA
tatttccatttactgcagataa

SEQ ID NO: 120389 - DNA, 22 bp, synthetic construct
  misc_feature 1..22: note = chemically synthesized
  source 1..22: mol_type = other DNA
ccatttactgcagataattaaa

SEQ ID NO: 120390 - DNA, 22 bp, synthetic construct
  misc_feature 1..22: note = chemically synthesized
  source 1..22: mol_type = other DNA
catttactgcagataattaaat

SEQ ID NO: 120391 - DNA, 22 bp, synthetic construct
  misc_feature 1..22: note = chemically synthesized
  source 1..22: mol_type = other DNA
actgcagataattaaattgccc

SEQ ID NO: 120392 - DNA, 22 bp, synthetic construct
  misc_feature 1..22: note = chemically synthesized
  source 1..22: mol_type = other DNA
ctgcagataattaaattgccct

SEQ ID NO: 120393 - DNA, 22 bp, synthetic construct
  misc_feature 1..22: note = chemically synthesized
  source 1..22: mol_type = other DNA
cagataattaaattgccctcca

SEQ ID NO: 120394 - DNA, 22 bp, synthetic construct
  misc_feature 1..22: note = chemically synthesized
  source 1..22: mol_type = other DNA
aattgccctccatctctgccag

SEQ ID NO: 120395 - DNA, 22 bp, synthetic construct
  misc_feature 1..22: note = chemically synthesized
  source 1..22: mol_type = other DNA
ccctccatctctgccagcctct

SEQ ID NO: 120396 - DNA, 22 bp, synthetic construct
  misc_feature 1..22: note = chemically synthesized
  source 1..22: mol_type = other DNA
catctctgccagcctctatatc

SEQ ID NO: 120397 - DNA, 22 bp, synthetic construct
  misc_feature 1..22: note = chemically synthesized
  source 1..22: mol_type = other DNA
tgccagcctctatatctttgga

SEQ ID NO: 120398 - DNA, 22 bp, synthetic construct
  misc_feature 1..22: note = chemically synthesized
  source 1..22: mol_type = other DNA
ccagcctctatatctttggacc

SEQ ID NO: 120399 - DNA, 22 bp, synthetic construct
  misc_feature 1..22: note = chemically synthesized
  source 1..22: mol_type = other DNA
tatatctttggacctagaagtc

SEQ ID NO: 120400 - DNA, 22 bp, synthetic construct
  misc_feature 1..22: note = chemically synthesized
  source 1..22: mol_type = other DNA
tatctttggacctagaagtcaa

SEQ ID NO: 120401 - DNA, 22 bp, synthetic construct
  misc_feature 1..22: note = chemically synthesized
  source 1..22: mol_type = other DNA
tggacctagaagtcaatcttgc

SEQ ID NO: 120402 - DNA, 22 bp, synthetic construct
  misc_feature 1..22: note = chemically synthesized
  source 1..22: mol_type = other DNA
ggacctagaagtcaatcttgca

SEQ ID NO: 120403 - DNA, 22 bp, synthetic construct
  misc_feature 1..22: note = chemically synthesized
  source 1..22: mol_type = other DNA
gacctagaagtcaatcttgcat

SEQ ID NO: 120404 - DNA, 22 bp, synthetic construct
  misc_feature 1..22: note = chemically synthesized
  source 1..22: mol_type = other DNA
gaagtcaatcttgcatattcaa

SEQ ID NO: 120405 - DNA, 22 bp, synthetic construct
  misc_feature 1..22: note = chemically synthesized
  source 1..22: mol_type = other DNA
gcatattcaatcctaccccaaa

SEQ ID NO: 120406 - DNA, 22 bp, synthetic construct
  misc_feature 1..22: note = chemically synthesized
  source 1..22: mol_type = other DNA
catattcaatcctaccccaaac

SEQ ID NO: 120407 - DNA, 22 bp, synthetic construct
  misc_feature 1..22: note = chemically synthesized
  source 1..22: mol_type = other DNA
aatcctaccccaaacaaatgtc

SEQ ID NO: 120408 - DNA, 22 bp, synthetic construct
  misc_feature 1..22: note = chemically synthesized
  source 1..22: mol_type = other DNA
ccccaaacaaatgtccaggtca

SEQ ID NO: 120409 - DNA, 22 bp, synthetic construct
  misc_feature 1..22: note = chemically synthesized
  source 1..22: mol_type = other DNA
aggctttcccaaagctctctac

SEQ ID NO: 120410 - DNA, 22 bp, synthetic construct
  misc_feature 1..22: note = chemically synthesized
  source 1..22: mol_type = other DNA
tcccaaagctctctacttcatc

SEQ ID NO: 120411 - DNA, 22 bp, synthetic construct
  misc_feature 1..22: note = chemically synthesized
  source 1..22: mol_type = other DNA
cccaaagctctctacttcatct

SEQ ID NO: 120412 - DNA, 22 bp, synthetic construct
  misc_feature 1..22: note = chemically synthesized
  source 1..22: mol_type = other DNA
ccaaagctctctacttcatctt

SEQ ID NO: 120413 - DNA, 22 bp, synthetic construct
  misc_feature 1..22: note = chemically synthesized
  source 1..22: mol_type = other DNA
tctacttcatctttgaatgcac

SEQ ID NO: 120414 - DNA, 22 bp, synthetic construct
  misc_feature 1..22: note = chemically synthesized
  source 1..22: mol_type = other DNA
tacttcatctttgaatgcactg

SEQ ID NO: 120415 - DNA, 22 bp, synthetic construct
  misc_feature 1..22: note = chemically synthesized
  source 1..22: mol_type = other DNA
cttcatctttgaatgcactgga

SEQ ID NO: 120416 - DNA, 22 bp, synthetic construct
  misc_feature 1..22: note = chemically synthesized
  source 1..22: mol_type = other DNA
catctttgaatgcactggactt

SEQ ID NO: 120417 - DNA, 22 bp, synthetic construct
  misc_feature 1..22: note = chemically synthesized
  source 1..22: mol_type = other DNA
atctttgaatgcactggacttt

SEQ ID NO: 120418 - DNA, 22 bp, synthetic construct
  misc_feature 1..22: note = chemically synthesized
  source 1..22: mol_type = other DNA
tgaatgcactggactttccttc

SEQ ID NO: 120419 - DNA, 22 bp, synthetic construct
  misc_feature 1..22: note = chemically synthesized
  source 1..22: mol_type = other DNA
gaatgcactggactttccttca

SEQ ID NO: 120420 - DNA, 22 bp, synthetic construct
  misc_feature 1..22: note = chemically synthesized
  source 1..22: mol_type = other DNA
aatgcactggactttccttcaa

SEQ ID NO: 120421 - DNA, 22 bp, synthetic construct
  misc_feature 1..22: note = chemically synthesized
  source 1..22: mol_type = other DNA
gactttccttcaatgagcccta

SEQ ID NO: 120422 - DNA, 22 bp, synthetic construct
  misc_feature 1..22: note = chemically synthesized
  source 1..22: mol_type = other DNA
tccttcaatgagccctacaaca

SEQ ID NO: 120423 - DNA, 22 bp, synthetic construct
  misc_feature 1..22: note = chemically synthesized
  source 1..22: mol_type = other DNA
ccttcaatgagccctacaacaa

SEQ ID NO: 120424 - DNA, 22 bp, synthetic construct
  misc_feature 1..22: note = chemically synthesized
  source 1..22: mol_type = other DNA
cttcaatgagccctacaacaag

SEQ ID NO: 120425 - DNA, 22 bp, synthetic construct
  misc_feature 1..22: note = chemically synthesized
  source 1..22: mol_type = other DNA
caatgagccctacaacaagtag

SEQ ID NO: 120426 - DNA, 22 bp, synthetic construct
  misc_feature 1..22: note = chemically synthesized
  source 1..22: mol_type = other DNA
aatgagccctacaacaagtagc

SEQ ID NO: 120427 - DNA, 22 bp, synthetic construct
  misc_feature 1..22: note = chemically synthesized
  source 1..22: mol_type = other DNA
caacaagtagcctttacaaaac

SEQ ID NO: 120428 - DNA, 22 bp, synthetic construct
  misc_feature 1..22: note = chemically synthesized
  source 1..22: mol_type = other DNA
tacaaaacttttttccttcttt

SEQ ID NO: 120429 - DNA, 22 bp, synthetic construct
  misc_feature 1..22: note = chemically synthesized
  source 1..22: mol_type = other DNA
acaaaacttttttccttctttt

SEQ ID NO: 120430 - DNA, 22 bp, synthetic construct
  misc_feature 1..22: note = chemically synthesized
  source 1..22: mol_type = other DNA
caaaacttttttccttcttttc

SEQ ID NO: 120431 - DNA, 22 bp, synthetic construct
  misc_feature 1..22: note = chemically synthesized
  source 1..22: mol_type = other DNA
ttttccttcttttctggtagca

SEQ ID NO: 120432 - DNA, 22 bp, synthetic construct
  misc_feature 1..22: note = chemically synthesized
  source 1..22: mol_type = other DNA
tttccttcttttctggtagcaa

SEQ ID NO: 120433 - DNA, 22 bp, synthetic construct
  misc_feature 1..22: note = chemically synthesized
  source 1..22: mol_type = other DNA
ttccttcttttctggtagcaaa

SEQ ID NO: 120434 - DNA, 22 bp, synthetic construct
  misc_feature 1..22: note = chemically synthesized
  source 1..22: mol_type = other DNA
tccttcttttctggtagcaaat

SEQ ID NO: 120435 - DNA, 22 bp, synthetic construct
  misc_feature 1..22: note = chemically synthesized
  source 1..22: mol_type = other DNA
ccttcttttctggtagcaaatg

SEQ ID NO: 120436 - DNA, 22 bp, synthetic construct
  misc_feature 1..22: note = chemically synthesized
  source 1..22: mol_type = other DNA
cttcttttctggtagcaaatgc

SEQ ID NO: 120437 - DNA, 22 bp, synthetic construct
  misc_feature 1..22: note = chemically synthesized
  source 1..22: mol_type = other DNA
cttttctggtagcaaatgccat

SEQ ID NO: 120438 - DNA, 22 bp, synthetic construct
  misc_feature 1..22: note = chemically synthesized
  source 1..22: mol_type = other DNA
ttttctggtagcaaatgccatc

SEQ ID NO: 120439 - DNA, 22 bp, synthetic construct
  misc_feature 1..22: note = chemically synthesized
  source 1..22: mol_type = other DNA
ttctggtagcaaatgccatcaa

SEQ ID NO: 120440 - DNA, 22 bp, synthetic construct
  misc_feature 1..22: note = chemically synthesized
  source 1..22: mol_type = other DNA
tctggtagcaaatgccatcaac

SEQ ID NO: 120441 - DNA, 22 bp, synthetic construct
  misc_feature 1..22: note = chemically synthesized
  source 1..22: mol_type = other DNA
ctggtagcaaatgccatcaaca

SEQ ID NO: 120442 - DNA, 22 bp, synthetic construct
  misc_feature 1..22: note = chemically synthesized
  source 1..22: mol_type = other DNA
tggtagcaaatgccatcaacat

SEQ ID NO: 120443 - DNA, 22 bp, synthetic construct
  misc_feature 1..22: note = chemically synthesized
  source 1..22: mol_type = other DNA
gtagcaaatgccatcaacattt

SEQ ID NO: 120444 - DNA, 22 bp, synthetic construct
  misc_feature 1..22: note = chemically synthesized
  source 1..22: mol_type = other DNA
agaaaaaaaaaaatagtcttgt

SEQ ID NO: 120445 - DNA, 22 bp, synthetic construct
  misc_feature 1..22: note = chemically synthesized
  source 1..22: mol_type = other DNA
gaaaaaaaaaaatagtcttgta

SEQ ID NO: 120446 - DNA, 22 bp, synthetic construct
  misc_feature 1..22: note = chemically synthesized
  source 1..22: mol_type = other DNA
gtacttcttccccagactatgc

SEQ ID NO: 120447 - DNA, 22 bp, synthetic construct
  misc_feature 1..22: note = chemically synthesized
  source 1..22: mol_type = other DNA
tacttcttccccagactatgct

SEQ ID NO: 120448 - DNA, 22 bp, synthetic construct
  misc_feature 1..22: note = chemically synthesized
  source 1..22: mol_type = other DNA
cttccccagactatgctacaga

SEQ ID NO: 120449 - DNA, 22 bp, synthetic construct
  misc_feature 1..22: note = chemically synthesized
  source 1..22: mol_type = other DNA
ttccccagactatgctacagaa

SEQ ID NO: 120450 - DNA, 22 bp, synthetic construct
  misc_feature 1..22: note = chemically synthesized
  source 1..22: mol_type = other DNA
ccccagactatgctacagaacc

SEQ ID NO: 120451 - DNA, 22 bp, synthetic construct
  misc_feature 1..22: note = chemically synthesized
  source 1..22: mol_type = other DNA
cccagactatgctacagaacct

SEQ ID NO: 120452 - DNA, 22 bp, synthetic construct
  misc_feature 1..22: note = chemically synthesized
  source 1..22: mol_type = other DNA
tgctacagaacctgagttaatg

SEQ ID NO: 120453 - DNA, 22 bp, synthetic construct
  misc_feature 1..22: note = chemically synthesized
  source 1..22: mol_type = other DNA
cagaacctgagttaatgtgatc

SEQ ID NO: 120454 - DNA, 22 bp, synthetic construct
  misc_feature 1..22: note = chemically synthesized
  source 1..22: mol_type = other DNA
agttaatgtgatcaggtcatgt

SEQ ID NO: 120455 - DNA, 22 bp, synthetic construct
  misc_feature 1..22: note = chemically synthesized
  source 1..22: mol_type = other DNA
atgtgatcaggtcatgtgtaca

SEQ ID NO: 120456 - DNA, 22 bp, synthetic construct
  misc_feature 1..22: note = chemically synthesized
  source 1..22: mol_type = other DNA
ctcttttctttcaaaactcaca

SEQ ID NO: 120457 - DNA, 22 bp, synthetic construct
  misc_feature 1..22: note = chemically synthesized
  source 1..22: mol_type = other DNA
tcttttctttcaaaactcacac

SEQ ID NO: 120458 - DNA, 22 bp, synthetic construct
  misc_feature 1..22: note = chemically synthesized
  source 1..22: mol_type = other DNA
ttttctttcaaaactcacacac

SEQ ID NO: 120459 - DNA, 22 bp, synthetic construct
  misc_feature 1..22: note = chemically synthesized
  source 1..22: mol_type = other DNA
ttctttcaaaactcacacacaa

SEQ ID NO: 120460 - DNA, 22 bp, synthetic construct
  misc_feature 1..22: note = chemically synthesized
  source 1..22: mol_type = other DNA
tctttcaaaactcacacacaac

SEQ ID NO: 120461 - DNA, 22 bp, synthetic construct
  misc_feature 1..22: note = chemically synthesized
  source 1..22: mol_type = other DNA
ctttcaaaactcacacacaacc

SEQ ID NO: 120462 - DNA, 22 bp, synthetic construct
  misc_feature 1..22: note = chemically synthesized
  source 1..22: mol_type = other DNA
tttcaaaactcacacacaacct

SEQ ID NO: 120463 - DNA, 22 bp, synthetic construct
  misc_feature 1..22: note = chemically synthesized
  source 1..22: mol_type = other DNA
tcaaaactcacacacaacctct

SEQ ID NO: 120464 - DNA, 22 bp, synthetic construct
  misc_feature 1..22: note = chemically synthesized
  source 1..22: mol_type = other DNA
caaaactcacacacaacctctc

SEQ ID NO: 120465 - DNA, 22 bp, synthetic construct
  misc_feature 1..22: note = chemically synthesized
  source 1..22: mol_type = other DNA
aaaactcacacacaacctctcc

SEQ ID NO: 120466 - DNA, 22 bp, synthetic construct
  misc_feature 1..22: note = chemically synthesized
  source 1..22: mol_type = other DNA
acacacaacctctccaccacaa

SEQ ID NO: 120467 - DNA, 22 bp, synthetic construct
  misc_feature 1..22: note = chemically synthesized
  source 1..22: mol_type = other DNA
tccaccacaaacacacacacac

SEQ ID NO: 120468 - DNA, 22 bp, synthetic construct
  misc_feature 1..22: note = chemically synthesized
  source 1..22: mol_type = other DNA
caccacaaacacacacacactc

SEQ ID NO: 120469 - DNA, 22 bp, synthetic construct
  misc_feature 1..22: note = chemically synthesized
  source 1..22: mol_type = other DNA
ttggagactggcatgaagcaag

SEQ ID NO: 120470 - DNA, 22 bp, synthetic construct
  misc_feature 1..22: note = chemically synthesized
  source 1..22: mol_type = other DNA
ggagactggcatgaagcaaggt

SEQ ID NO: 120471 - DNA, 22 bp, synthetic construct
  misc_feature 1..22: note = chemically synthesized
  source 1..22: mol_type = other DNA
gagactggcatgaagcaaggta

SEQ ID NO: 120472 - DNA, 22 bp, synthetic construct
  misc_feature 1..22: note = chemically synthesized
  source 1..22: mol_type = other DNA
gcatgaagcaaggtattacatc

SEQ ID NO: 120473 - DNA, 22 bp, synthetic construct
  misc_feature 1..22: note = chemically synthesized
  source 1..22: mol_type = other DNA
catcctttaaatagggcatggt

SEQ ID NO: 120474 - DNA, 22 bp, synthetic construct
  misc_feature 1..22: note = chemically synthesized
  source 1..22: mol_type = other DNA
taaatagggcatggttgattag

SEQ ID NO: 120475 - DNA, 22 bp, synthetic construct
  misc_feature 1..22: note = chemically synthesized
  source 1..22: mol_type = other DNA
aaatagggcatggttgattaga

SEQ ID NO: 120476 - DNA, 22 bp, synthetic construct
  misc_feature 1..22: note = chemically synthesized
  source 1..22: mol_type = other DNA
aatagggcatggttgattagag

SEQ ID NO: 120477 - DNA, 22 bp, synthetic construct
  misc_feature 1..22: note = chemically synthesized
  source 1..22: mol_type = other DNA
attagagttgtgtggggatgag

SEQ ID NO: 120478 - DNA, 22 bp, synthetic construct
  misc_feature 1..22: note = chemically synthesized
  source 1..22: mol_type = other DNA
gagttgtgtggggatgagctcc

SEQ ID NO: 120479 - DNA, 22 bp, synthetic construct
  misc_feature 1..22: note = chemically synthesized
  source 1..22: mol_type = other DNA
tgtggggatgagctccaaaacg

SEQ ID NO: 120480 - DNA, 22 bp, synthetic construct
  misc_feature 1..22: note = chemically synthesized
  source 1..22: mol_type = other DNA
caaaacggggcatacagatcta

SEQ ID NO: 120481 - DNA, 22 bp, synthetic construct
  misc_feature 1..22: note = chemically synthesized
  source 1..22: mol_type = other DNA
aaaccaggacagagacccatga

SEQ ID NO: 120482 - DNA, 22 bp, synthetic construct
  misc_feature 1..22: note = chemically synthesized
  source 1..22: mol_type = other DNA
atgacatgccattgtgatcaga

SEQ ID NO: 120483 - DNA, 22 bp, synthetic construct
  misc_feature 1..22: note = chemically synthesized
  source 1..22: mol_type = other DNA
tgacatgccattgtgatcagac

SEQ ID NO: 120484 - DNA, 22 bp, synthetic construct
  misc_feature 1..22: note = chemically synthesized
  source 1..22: mol_type = other DNA
tgatcagaccacacccagacag

SEQ ID NO: 120485 - DNA, 22 bp, synthetic construct
  misc_feature 1..22: note = chemically synthesized
  source 1..22: mol_type = other DNA
acaccgggtaagtaactggttg

SEQ ID NO: 120486 - DNA, 22 bp, synthetic construct
  misc_feature 1..22: note = chemically synthesized
  source 1..22: mol_type = other DNA
caccgggtaagtaactggttgt

SEQ ID NO: 120487 - DNA, 22 bp, synthetic construct
  misc_feature 1..22: note = chemically synthesized
  source 1..22: mol_type = other DNA
gttgttagggccagagtgtagg

SEQ ID NO: 120488 - DNA, 22 bp, synthetic construct
  misc_feature 1..22: note = chemically synthesized
  source 1..22: mol_type = other DNA
ttagggccagagtgtaggagag

SEQ ID NO: 120489 - DNA, 22 bp, synthetic construct
  misc_feature 1..22: note = chemically synthesized
  source 1..22: mol_type = other DNA
gggccagagtgtaggagagtca

SEQ ID NO: 120490 - DNA, 22 bp, synthetic construct
  misc_feature 1..22: note = chemically synthesized
  source 1..22: mol_type = other DNA
attaaattgtagttatgaggaa

SEQ ID NO: 120491 - DNA, 22 bp, synthetic construct
  misc_feature 1..22: note = chemically synthesized
  source 1..22: mol_type = other DNA
ttaaattgtagttatgaggaag

SEQ ID NO: 120492 - DNA, 22 bp, synthetic construct
  misc_feature 1..22: note = chemically synthesized
  source 1..22: mol_type = other DNA
aattgtagttatgaggaaggtt

SEQ ID NO: 120493 - DNA, 22 bp, synthetic construct
  misc_feature 1..22: note = chemically synthesized
  source 1..22: mol_type = other DNA
tagttatgaggaaggttctggc

SEQ ID NO: 120494 - DNA, 22 bp, synthetic construct
  misc_feature 1..22: note = chemically synthesized
  source 1..22: mol_type = other DNA
tgaggaaggttctggcttcggt

SEQ ID NO: 120495 - DNA, 22 bp, synthetic construct
  misc_feature 1..22: note = chemically synthesized
  source 1..22: mol_type = other DNA
tggcttcggtacaataggaagg

SEQ ID NO: 120496 - DNA, 22 bp, synthetic construct
  misc_feature 1..22: note = chemically synthesized
  source 1..22: mol_type = other DNA
gcttcggtacaataggaaggag

SEQ ID NO: 120497 - DNA, 22 bp, synthetic construct
  misc_feature 1..22: note = chemically synthesized
  source 1..22: mol_type = other DNA
cggtacaataggaaggagctga

SEQ ID NO: 120498 - DNA, 22 bp, synthetic construct
  misc_feature 1..22: note = chemically synthesized
  source 1..22: mol_type = other DNA
ggtacaataggaaggagctgag

SEQ ID NO: 120499 - DNA, 22 bp, synthetic construct
  misc_feature 1..22: note = chemically synthesized
  source 1..22: mol_type = other DNA
agcatcttcatttaggcttgta

SEQ ID NO: 120500 - DNA, 22 bp, synthetic construct
  misc_feature 1..22: note = chemically synthesized
  source 1..22: mol_type = other DNA
catttaggcttgtaggagaggg

SEQ ID NO: 120501 - DNA, 22 bp, synthetic construct
  misc_feature 1..22: note = chemically synthesized
  source 1..22: mol_type = other DNA
atttaggcttgtaggagagggc

SEQ ID NO: 120502 - DNA, 22 bp, synthetic construct
  misc_feature 1..22: note = chemically synthesized
  source 1..22: mol_type = other DNA
aggcttgtaggagagggcacca

SEQ ID NO: 120503 - DNA, 22 bp, synthetic construct
  misc_feature 1..22: note = chemically synthesized
  source 1..22: mol_type = other DNA
ggcttgtaggagagggcaccac

SEQ ID NO: 120504 - DNA, 22 bp, synthetic construct
  misc_feature 1..22: note = chemically synthesized
  source 1..22: mol_type = other DNA
gtaggagagggcaccactacca

SEQ ID NO: 120505 - DNA, 22 bp, synthetic construct
  misc_feature 1..22: note = chemically synthesized
  source 1..22: mol_type = other DNA
taggagagggcaccactaccag

SEQ ID NO: 120506 - DNA, 22 bp, synthetic construct
  misc_feature 1..22: note = chemically synthesized
  source 1..22: mol_type = other DNA
ccagaaaaatttcagaaaatcc

SEQ ID NO: 120507 - DNA, 22 bp, synthetic construct
  misc_feature 1..22: note = chemically synthesized
  source 1..22: mol_type = other DNA
cagaaaatcctgcatttattaa

SEQ ID NO: 120508 - DNA, 22 bp, synthetic construct
  misc_feature 1..22: note = chemically synthesized
  source 1..22: mol_type = other DNA
agaaaatcctgcatttattaag

SEQ ID NO: 120509 - DNA, 22 bp, synthetic construct
  misc_feature 1..22: note = chemically synthesized
  source 1..22: mol_type = other DNA
catttattaagaacatgatttt

SEQ ID NO: 120510 - DNA, 22 bp, synthetic construct
  misc_feature 1..22: note = chemically synthesized
  source 1..22: mol_type = other DNA
attaagaacatgattttagcct

SEQ ID NO: 120511 - DNA, 22 bp, synthetic construct
  misc_feature 1..22: note = chemically synthesized
  source 1..22: mol_type = other DNA
ttaagaacatgattttagccta

SEQ ID NO: 120512 - DNA, 22 bp, synthetic construct
  misc_feature 1..22: note = chemically synthesized
  source 1..22: mol_type = other DNA
agaacatgattttagcctattt

SEQ ID NO: 120513 - DNA, 22 bp, synthetic construct
  misc_feature 1..22: note = chemically synthesized
  source 1..22: mol_type = other DNA
tagcctatttcactgggatcct

SEQ ID NO: 120514 - DNA, 22 bp, synthetic construct
  misc_feature 1..22: note = chemically synthesized
  source 1..22: mol_type = other DNA
agcctatttcactgggatccta

SEQ ID NO: 120515 - DNA, 22 bp, synthetic construct
  misc_feature 1..22: note = chemically synthesized
  source 1..22: mol_type = other DNA
gcctatttcactgggatcctag

SEQ ID NO: 120516 - DNA, 22 bp, synthetic construct
  misc_feature 1..22: note = chemically synthesized
  source 1..22: mol_type = other DNA
tttcactgggatcctagccaag

SEQ ID NO: 120517 - DNA, 22 bp, synthetic construct
  misc_feature 1..22: note = chemically synthesized
  source 1..22: mol_type = other DNA
cactgggatcctagccaaggac

SEQ ID NO: 120518 - DNA, 22 bp, synthetic construct
  misc_feature 1..22: note = chemically synthesized
  source 1..22: mol_type = other DNA
actgggatcctagccaaggaca

SEQ ID NO: 120519 - DNA, 22 bp, synthetic construct
  misc_feature 1..22: note = chemically synthesized
  source 1..22: mol_type = other DNA
ggatcctagccaaggacagtat

SEQ ID NO: 120520 - DNA, 22 bp, synthetic construct
  misc_feature 1..22: note = chemically synthesized
  source 1..22: mol_type = other DNA
gccaaggacagtataacagcaa

SEQ ID NO: 120521 - DNA, 22 bp, synthetic construct
  misc_feature 1..22: note = chemically synthesized
  source 1..22: mol_type = other DNA
ctattattaccagcaacagcaa

SEQ ID NO: 120522 - DNA, 22 bp, synthetic construct
  misc_feature 1..22: note = chemically synthesized
  source 1..22: mol_type = other DNA
ttattaccagcaacagcaaata

SEQ ID NO: 120523 - DNA, 22 bp, synthetic construct
  misc_feature 1..22: note = chemically synthesized
  source 1..22: mol_type = other DNA
ttaccagcaacagcaaatattg

SEQ ID NO: 120524 - DNA, 22 bp, synthetic construct
  misc_feature 1..22: note = chemically synthesized
  source 1..22: mol_type = other DNA
ccagcaacagcaaatattgcta

SEQ ID NO: 120525 - DNA, 22 bp, synthetic construct
  misc_feature 1..22: note = chemically synthesized
  source 1..22: mol_type = other DNA
ctattattcaggggcatctatc

SEQ ID NO: 120526 - DNA, 22 bp, synthetic construct
  misc_feature 1..22: note = chemically synthesized
  source 1..22: mol_type = other DNA
ttattcaggggcatctatcaca

SEQ ID NO: 120527 - DNA, 22 bp, synthetic construct
  misc_feature 1..22: note = chemically synthesized
  source 1..22: mol_type = other DNA
ttcaggggcatctatcacacat

SEQ ID NO: 120528 - DNA, 22 bp, synthetic construct
  misc_feature 1..22: note = chemically synthesized
  source 1..22: mol_type = other DNA
aggggcatctatcacacataag

SEQ ID NO: 120529 - DNA, 22 bp, synthetic construct
  misc_feature 1..22: note = chemically synthesized
  source 1..22: mol_type = other DNA
tcacacataagataggaaaaca

SEQ ID NO: 120530 - DNA, 22 bp, synthetic construct
  misc_feature 1..22: note = chemically synthesized
  source 1..22: mol_type = other DNA
tcttagcgcaatgtaagagatg

SEQ ID NO: 120531 - DNA, 22 bp, synthetic construct
  misc_feature 1..22: note = chemically synthesized
  source 1..22: mol_type = other DNA
agcgcaatgtaagagatggaca

SEQ ID NO: 120532 - DNA, 22 bp, synthetic construct
  misc_feature 1..22: note = chemically synthesized
  source 1..22: mol_type = other DNA
gcgcaatgtaagagatggacat

SEQ ID NO: 120533 - DNA, 22 bp, synthetic construct
  misc_feature 1..22: note = chemically synthesized
  source 1..22: mol_type = other DNA
tattaatatttgtgggtagcac

SEQ ID NO: 120534 - DNA, 22 bp, synthetic construct
  misc_feature 1..22: note = chemically synthesized
  source 1..22: mol_type = other DNA
atatttgtgggtagcacctggc

SEQ ID NO: 120535 - DNA, 22 bp, synthetic construct
  misc_feature 1..22: note = chemically synthesized
  source 1..22: mol_type = other DNA
gtgggtagcacctggcccacag

SEQ ID NO: 120536 - DNA, 22 bp, synthetic construct
  misc_feature 1..22: note = chemically synthesized
  source 1..22: mol_type = other DNA
tgggtagcacctggcccacagg

SEQ ID NO: 120537 - DNA, 22 bp, synthetic construct
  misc_feature 1..22: note = chemically synthesized
  source 1..22: mol_type = other DNA
gcccacaggtgagggccaggga

SEQ ID NO: 120538 - DNA, 22 bp, synthetic construct
  misc_feature 1..22: note = chemically synthesized
  source 1..22: mol_type = other DNA
agctatgaagactaattaagaa

SEQ ID NO: 120539 - DNA, 22 bp, synthetic construct
  misc_feature 1..22: note = chemically synthesized
  source 1..22: mol_type = other DNA
tgaagactaattaagaatcaac

SEQ ID NO: 120540 - DNA, 22 bp, synthetic construct
  misc_feature 1..22: note = chemically synthesized
  source 1..22: mol_type = other DNA
attaagaatcaaccacagatag

SEQ ID NO: 120541 - DNA, 22 bp, synthetic construct
  misc_feature 1..22: note = chemically synthesized
  source 1..22: mol_type = other DNA
agaatcaaccacagatagggct

SEQ ID NO: 120542 - DNA, 22 bp, synthetic construct
  misc_feature 1..22: note = chemically synthesized
  source 1..22: mol_type = other DNA
tatagaaaggtatttccaaaaa

SEQ ID NO: 120543 - DNA, 22 bp, synthetic construct
  misc_feature 1..22: note = chemically synthesized
  source 1..22: mol_type = other DNA
atagaaaggtatttccaaaaag

SEQ ID NO: 120544 - DNA, 22 bp, synthetic construct
  misc_feature 1..22: note = chemically synthesized
  source 1..22: mol_type = other DNA
tagaaaggtatttccaaaaagg

SEQ ID NO: 120545 - DNA, 22 bp, synthetic construct
  misc_feature 1..22: note = chemically synthesized
  source 1..22: mol_type = other DNA
ccaaaaaggaggggtagtgtaa

SEQ ID NO: 120546 - DNA, 22 bp, synthetic construct
  misc_feature 1..22: note = chemically synthesized
  source 1..22: mol_type = other DNA
caaaaaggaggggtagtgtaag

SEQ ID NO: 120547 - DNA, 22 bp, synthetic construct
  misc_feature 1..22: note = chemically synthesized
  source 1..22: mol_type = other DNA
tttatgtgttttgagaactata

SEQ ID NO: 120548 - DNA, 22 bp, synthetic construct
  misc_feature 1..22: note = chemically synthesized
  source 1..22: mol_type = other DNA
atgtgttttgagaactataaga

SEQ ID NO: 120549 - DNA, 22 bp, synthetic construct
  misc_feature 1..22: note = chemically synthesized
  source 1..22: mol_type = other DNA
tgtgttttgagaactataagat

SEQ ID NO: 120550 - DNA, 22 bp, synthetic construct
  misc_feature 1..22: note = chemically synthesized
  source 1..22: mol_type = other DNA
tgagaactataagattttccgg

SEQ ID NO: 120551 - DNA, 22 bp, synthetic construct
  misc_feature 1..22: note = chemically synthesized
  source 1..22: mol_type = other DNA
gagaactataagattttccggt

SEQ ID NO: 120552 - DNA, 22 bp, synthetic construct
  misc_feature 1..22: note = chemically synthesized
  source 1..22: mol_type = other DNA
agaactataagattttccggtg

SEQ ID NO: 120553 - DNA, 22 bp, synthetic construct
  misc_feature 1..22: note = chemically synthesized
  source 1..22: mol_type = other DNA
taagattttccggtgatcaaat

SEQ ID NO: 120554 - DNA, 22 bp, synthetic construct
  misc_feature 1..22: note = chemically synthesized
  source 1..22: mol_type = other DNA
tccggtgatcaaatataacatt

SEQ ID NO: 120555 - DNA, 22 bp, synthetic construct
  misc_feature 1..22: note = chemically synthesized
  source 1..22: mol_type = other DNA
ccggtgatcaaatataacattt

SEQ ID NO: 120556 - DNA, 22 bp, synthetic construct
  misc_feature 1..22: note = chemically synthesized
  source 1..22: mol_type = other DNA
cggtgatcaaatataacattta

SEQ ID NO: 120557 - DNA, 22 bp, synthetic construct
  misc_feature 1..22: note = chemically synthesized
  source 1..22: mol_type = other DNA
aagagagttaataccttggaat

SEQ ID NO: 120558 - DNA, 22 bp, synthetic construct
  misc_feature 1..22: note = chemically synthesized
  source 1..22: mol_type = other DNA
agagagttaataccttggaata

SEQ ID NO: 120559 - DNA, 22 bp, synthetic construct
  misc_feature 1..22: note = chemically synthesized
  source 1..22: mol_type = other DNA
ataccttggaataaaacagtag

SEQ ID NO: 120560 - DNA, 22 bp, synthetic construct
  misc_feature 1..22: note = chemically synthesized
  source 1..22: mol_type = other DNA
ggaataaaacagtagaggtagg

SEQ ID NO: 120561 - DNA, 22 bp, synthetic construct
  misc_feature 1..22: note = chemically synthesized
  source 1..22: mol_type = other DNA
gaataaaacagtagaggtaggc

SEQ ID NO: 120562 - DNA, 22 bp, synthetic construct
  misc_feature 1..22: note = chemically synthesized
  source 1..22: mol_type = other DNA
aatgagtttatatgacatgtca

SEQ ID NO: 120563 - DNA, 22 bp, synthetic construct
  misc_feature 1..22: note = chemically synthesized
  source 1..22: mol_type = other DNA
atatgacatgtcaaacatggta

SEQ ID NO: 120564 - DNA, 22 bp, synthetic construct
  misc_feature 1..22: note = chemically synthesized
  source 1..22: mol_type = other DNA
tatgacatgtcaaacatggtac

SEQ ID NO: 120565 - DNA, 22 bp, synthetic construct
  misc_feature 1..22: note = chemically synthesized
  source 1..22: mol_type = other DNA
tgatggttgggtttaaaaaggc

SEQ ID NO: 120566 - DNA, 22 bp, synthetic construct
  misc_feature 1..22: note = chemically synthesized
  source 1..22: mol_type = other DNA
gatggttgggtttaaaaaggca

SEQ ID NO: 120567 - DNA, 22 bp, synthetic construct
  misc_feature 1..22: note = chemically synthesized
  source 1..22: mol_type = other DNA
atggttgggtttaaaaaggcag

SEQ ID NO: 120568 - DNA, 22 bp, synthetic construct
  misc_feature 1..22: note = chemically synthesized
  source 1..22: mol_type = other DNA
ggtttaaaaaggcaggagataa

SEQ ID NO: 120569 - DNA, 22 bp, synthetic construct
  misc_feature 1..22: note = chemically synthesized
  source 1..22: mol_type = other DNA
aaaaaggcaggagataacaatc

SEQ ID NO: 120570 - DNA, 22 bp, synthetic construct
  misc_feature 1..22: note = chemically synthesized
  source 1..22: mol_type = other DNA
aaaaggcaggagataacaatca

SEQ ID NO: 120571 - DNA, 22 bp, synthetic construct
  misc_feature 1..22: note = chemically synthesized
  source 1..22: mol_type = other DNA
tccagagtacattgttaacaat

SEQ ID NO: 120572 - DNA, 22 bp, synthetic construct
  misc_feature 1..22: note = chemically synthesized
  source 1..22: mol_type = other DNA
ccagagtacattgttaacaata

SEQ ID NO: 120573 - DNA, 22 bp, synthetic construct
  misc_feature 1..22: note = chemically synthesized
  source 1..22: mol_type = other DNA
cagagtacattgttaacaatat

SEQ ID NO: 120574 - DNA, 22 bp, synthetic construct
  misc_feature 1..22: note = chemically synthesized
  source 1..22: mol_type = other DNA
ttaacaatatgcaggaaggatt

SEQ ID NO: 120575 - DNA, 22 bp, synthetic construct
  misc_feature 1..22: note = chemically synthesized
  source 1..22: mol_type = other DNA
acaatatgcaggaaggatttaa

SEQ ID NO: 120576 - DNA, 22 bp, synthetic construct
  misc_feature 1..22: note = chemically synthesized
  source 1..22: mol_type = other DNA
aaagtctgcactggaaacagat

SEQ ID NO: 120577 - DNA, 22 bp, synthetic construct
  misc_feature 1..22: note = chemically synthesized
  source 1..22: mol_type = other DNA
aagtctgcactggaaacagatg

SEQ ID NO: 120578 - DNA, 22 bp, synthetic construct
  misc_feature 1..22: note = chemically synthesized
  source 1..22: mol_type = other DNA
cactggaaacagatgttatttt

SEQ ID NO: 120579 - DNA, 22 bp, synthetic construct
  misc_feature 1..22: note = chemically synthesized
  source 1..22: mol_type = other DNA
gaaacagatgttattttggtgt

SEQ ID NO: 120580 - DNA, 22 bp, synthetic construct
  misc_feature 1..22: note = chemically synthesized
  source 1..22: mol_type = other DNA
ttttggtgtatggagctggatg

SEQ ID NO: 120581 - DNA, 22 bp, synthetic construct
  misc_feature 1..22: note = chemically synthesized
  source 1..22: mol_type = other DNA
tggtgtatggagctggatgcag

SEQ ID NO: 120582 - DNA, 22 bp, synthetic construct
  misc_feature 1..22: note = chemically synthesized
  source 1..22: mol_type = other DNA
ggtgtatggagctggatgcaga

SEQ ID NO: 120583 - DNA, 22 bp, synthetic construct
  misc_feature 1..22: note = chemically synthesized
  source 1..22: mol_type = other DNA
gtgtatggagctggatgcagat

SEQ ID NO: 120584 - DNA, 22 bp, synthetic construct
  misc_feature 1..22: note = chemically synthesized
  source 1..22: mol_type = other DNA
gatgcagatatgtaattgacag

SEQ ID NO: 120585 - DNA, 22 bp, synthetic construct
  misc_feature 1..22: note = chemically synthesized
  source 1..22: mol_type = other DNA
acagctttttacgtagataaac

SEQ ID NO: 120586 - DNA, 22 bp, synthetic construct
  misc_feature 1..22: note = chemically synthesized
  source 1..22: mol_type = other DNA
tttacgtagataaacaatactg

SEQ ID NO: 120587 - DNA, 22 bp, synthetic construct
  misc_feature 1..22: note = chemically synthesized
  source 1..22: mol_type = other DNA
ttacgtagataaacaatactgt

SEQ ID NO: 120588 - DNA, 22 bp, synthetic construct
  misc_feature 1..22: note = chemically synthesized
  source 1..22: mol_type = other DNA
tacgtagataaacaatactgtt

SEQ ID NO: 120589 - DNA, 22 bp, synthetic construct
  misc_feature 1..22: note = chemically synthesized
  source 1..22: mol_type = other DNA
acgtagataaacaatactgttt

SEQ ID NO: 120590 - DNA, 22 bp, synthetic construct
  misc_feature 1..22: note = chemically synthesized
  source 1..22: mol_type = other DNA
cgtagataaacaatactgttta

SEQ ID NO: 120591 - DNA, 22 bp, synthetic construct
  misc_feature 1..22: note = chemically synthesized
  source 1..22: mol_type = other DNA
tttagtggataacctaccattt

SEQ ID NO: 120592 - DNA, 22 bp, synthetic construct
  misc_feature 1..22: note = chemically synthesized
  source 1..22: mol_type = other DNA
agtggataacctaccatttaga

SEQ ID NO: 120593 - DNA, 22 bp, synthetic construct
  misc_feature 1..22: note = chemically synthesized
  source 1..22: mol_type = other DNA
gtggataacctaccatttagag

SEQ ID NO: 120594 - DNA, 22 bp, synthetic construct
  misc_feature 1..22: note = chemically synthesized
  source 1..22: mol_type = other DNA
ccatttagagatctctaatatt

SEQ ID NO: 120595 - DNA, 22 bp, synthetic construct
  misc_feature 1..22: note = chemically synthesized
  source 1..22: mol_type = other DNA
agagatctctaatatttgctta

SEQ ID NO: 120596 - DNA, 22 bp, synthetic construct
  misc_feature 1..22: note = chemically synthesized
  source 1..22: mol_type = other DNA
gagatctctaatatttgcttac

SEQ ID NO: 120597 - DNA, 22 bp, synthetic construct
  misc_feature 1..22: note = chemically synthesized
  source 1..22: mol_type = other DNA
taatatttgcttacttttttaa

SEQ ID NO: 120598 - DNA, 22 bp, synthetic construct
  misc_feature 1..22: note = chemically synthesized
  source 1..22: mol_type = other DNA
atatttgcttacttttttaaac

SEQ ID NO: 120599 - DNA, 22 bp, synthetic construct
  misc_feature 1..22: note = chemically synthesized
  source 1..22: mol_type = other DNA
gcttacttttttaaactaacat

SEQ ID NO: 120600 - DNA, 22 bp, synthetic construct
  misc_feature 1..22: note = chemically synthesized
  source 1..22: mol_type = other DNA
cttacttttttaaactaacatc

SEQ ID NO: 120601 - DNA, 22 bp, synthetic construct
  misc_feature 1..22: note = chemically synthesized
  source 1..22: mol_type = other DNA
acttttttaaactaacatctgt

SEQ ID NO: 120602 - DNA, 22 bp, synthetic construct
  misc_feature 1..22: note = chemically synthesized
  source 1..22: mol_type = other DNA
cttttttaaactaacatctgta

SEQ ID NO: 120603 - DNA, 22 bp, synthetic construct
  misc_feature 1..22: note = chemically synthesized
  source 1..22: mol_type = other DNA
ttttaaactaacatctgtataa

SEQ ID NO: 120604 - DNA, 22 bp, synthetic construct
  misc_feature 1..22: note = chemically synthesized
  source 1..22: mol_type = other DNA
tttaaactaacatctgtataat

SEQ ID NO: 120605 - DNA, 22 bp, synthetic construct
  misc_feature 1..22: note = chemically synthesized
  source 1..22: mol_type = other DNA
ttaaactaacatctgtataata

SEQ ID NO: 120606 - DNA, 22 bp, synthetic construct
  misc_feature 1..22: note = chemically synthesized
  source 1..22: mol_type = other DNA
taaactaacatctgtataatag

SEQ ID NO: 120607 - DNA, 22 bp, synthetic construct
  misc_feature 1..22: note = chemically synthesized
  source 1..22: mol_type = other DNA
aaactaacatctgtataatagc

SEQ ID NO: 120608 - DNA, 22 bp, synthetic construct
  misc_feature 1..22: note = chemically synthesized
  source 1..22: mol_type = other DNA
aactaacatctgtataatagct

SEQ ID NO: 120609 - DNA, 22 bp, synthetic construct
  misc_feature 1..22: note = chemically synthesized
  source 1..22: mol_type = other DNA
acatctgtataatagctttata

SEQ ID NO: 120610 - DNA, 22 bp, synthetic construct
  misc_feature 1..22: note = chemically synthesized
  source 1..22: mol_type = other DNA
tataatagctttatattctatt

SEQ ID NO: 120611 - DNA, 22 bp, synthetic construct
  misc_feature 1..22: note = chemically synthesized
  source 1..22: mol_type = other DNA
tatattctatttctctgaatta

SEQ ID NO: 120612 - DNA, 22 bp, synthetic construct
  misc_feature 1..22: note = chemically synthesized
  source 1..22: mol_type = other DNA
atattctatttctctgaattat

SEQ ID NO: 120613 - DNA, 22 bp, synthetic construct
  misc_feature 1..22: note = chemically synthesized
  source 1..22: mol_type = other DNA
tattctatttctctgaattata

SEQ ID NO: 120614 - DNA, 22 bp, synthetic construct
  misc_feature 1..22: note = chemically synthesized
  source 1..22: mol_type = other DNA
tatttctctgaattatataatt

SEQ ID NO: 120615 - DNA, 22 bp, synthetic construct
  misc_feature 1..22: note = chemically synthesized
  source 1..22: mol_type = other DNA
tttctctgaattatataattga

SEQ ID NO: 120616 - DNA, 22 bp, synthetic construct
  misc_feature 1..22: note = chemically synthesized
  source 1..22: mol_type = other DNA
ctctgaattatataattgaagg

SEQ ID NO: 120617 - DNA, 22 bp, synthetic construct
  misc_feature 1..22: note = chemically synthesized
  source 1..22: mol_type = other DNA
tctgaattatataattgaagga

SEQ ID NO: 120618 - DNA, 22 bp, synthetic construct
  misc_feature 1..22: note = chemically synthesized
  source 1..22: mol_type = other DNA
tgaattatataattgaaggacc

SEQ ID NO: 120619 - DNA, 22 bp, synthetic construct
  misc_feature 1..22: note = chemically synthesized
  source 1..22: mol_type = other DNA
aattatataattgaaggaccag

SEQ ID NO: 120620 - DNA, 22 bp, synthetic construct
  misc_feature 1..22: note = chemically synthesized
  source 1..22: mol_type = other DNA
tataattgaaggaccagtttcc

SEQ ID NO: 120621 - DNA, 22 bp, synthetic construct
  misc_feature 1..22: note = chemically synthesized
  source 1..22: mol_type = other DNA
aaggaccagtttccaagcaata

SEQ ID NO: 120622 - DNA, 22 bp, synthetic construct
  misc_feature 1..22: note = chemically synthesized
  source 1..22: mol_type = other DNA
ccaagcaatagatttatttgaa

SEQ ID NO: 120623 - DNA, 22 bp, synthetic construct
  misc_feature 1..22: note = chemically synthesized
  source 1..22: mol_type = other DNA
caagcaatagatttatttgaaa

SEQ ID NO: 120624 - DNA, 22 bp, synthetic construct
  misc_feature 1..22: note = chemically synthesized
  source 1..22: mol_type = other DNA
atttgaaaaccaaatgaaagaa

SEQ ID NO: 120625 - DNA, 22 bp, synthetic construct
  misc_feature 1..22: note = chemically synthesized
  source 1..22: mol_type = other DNA
tttgaaaaccaaatgaaagaac

SEQ ID NO: 120626 - DNA, 22 bp, synthetic construct
  misc_feature 1..22: note = chemically synthesized
  source 1..22: mol_type = other DNA
gaaaaccaaatgaaagaactca

SEQ ID NO: 120627 - DNA, 22 bp, synthetic construct
  misc_feature 1..22: note = chemically synthesized
  source 1..22: mol_type = other DNA
aaaaccaaatgaaagaactcag

SEQ ID NO: 120628 - DNA, 22 bp, synthetic construct
  misc_feature 1..22: note = chemically synthesized
  source 1..22: mol_type = other DNA
agcatttttgattctttattgc

SEQ ID NO: 120629 - DNA, 22 bp, synthetic construct
  misc_feature 1..22: note = chemically synthesized
  source 1..22: mol_type = other DNA
ttgattctttattgctctaaat

SEQ ID NO: 120630 - DNA, 22 bp, synthetic construct
  misc_feature 1..22: note = chemically synthesized
  source 1..22: mol_type = other DNA
tgattctttattgctctaaatg

SEQ ID NO: 120631 - DNA, 22 bp, synthetic construct
  misc_feature 1..22: note = chemically synthesized
  source 1..22: mol_type = other DNA
gattctttattgctctaaatga

SEQ ID NO: 120632 - DNA, 22 bp, synthetic construct
  misc_feature 1..22: note = chemically synthesized
  source 1..22: mol_type = other DNA
attctttattgctctaaatgac

SEQ ID NO: 120633 - DNA, 22 bp, synthetic construct
  misc_feature 1..22: note = chemically synthesized
  source 1..22: mol_type = other DNA
tttattgctctaaatgaccttt

SEQ ID NO: 120634 - DNA, 22 bp, synthetic construct
  misc_feature 1..22: note = chemically synthesized
  source 1..22: mol_type = other DNA
tattgctctaaatgacctttag

SEQ ID NO: 120635 - DNA, 22 bp, synthetic construct
  misc_feature 1..22: note = chemically synthesized
  source 1..22: mol_type = other DNA
attgctctaaatgacctttaga

SEQ ID NO: 120636 - DNA, 22 bp, synthetic construct
  misc_feature 1..22: note = chemically synthesized
  source 1..22: mol_type = other DNA
ttgctctaaatgacctttagat

SEQ ID NO: 120637 - DNA, 22 bp, synthetic construct
  misc_feature 1..22: note = chemically synthesized
  source 1..22: mol_type = other DNA
ctctaaatgacctttagatttg

SEQ ID NO: 120638 - DNA, 22 bp, synthetic construct
  misc_feature 1..22: note = chemically synthesized
  source 1..22: mol_type = other DNA
taaatgacctttagatttgttt

SEQ ID NO: 120639 - DNA, 22 bp, synthetic construct
  misc_feature 1..22: note = chemically synthesized
  source 1..22: mol_type = other DNA
aatgacctttagatttgtttta

SEQ ID NO: 120640 - DNA, 22 bp, synthetic construct
  misc_feature 1..22: note = chemically synthesized
  source 1..22: mol_type = other DNA
tagatttgttttatcatatcac

SEQ ID NO: 120641 - DNA, 22 bp, synthetic construct
  misc_feature 1..22: note = chemically synthesized
  source 1..22: mol_type = other DNA
agatttgttttatcatatcaca

SEQ ID NO: 120642 - DNA, 22 bp, synthetic construct
  misc_feature 1..22: note = chemically synthesized
  source 1..22: mol_type = other DNA
gatttgttttatcatatcacaa

SEQ ID NO: 120643 - DNA, 22 bp, synthetic construct
  misc_feature 1..22: note = chemically synthesized
  source 1..22: mol_type = other DNA
gttttatcatatcacaaaatag

SEQ ID NO: 120644 - DNA, 22 bp, synthetic construct
  misc_feature 1..22: note = chemically synthesized
  source 1..22: mol_type = other DNA
ttttatcatatcacaaaatagt

SEQ ID NO: 120645 - DNA, 22 bp, synthetic construct
  misc_feature 1..22: note = chemically synthesized
  source 1..22: mol_type = other DNA
tatcatatcacaaaatagtcct

SEQ ID NO: 120646 - DNA, 22 bp, synthetic construct
  misc_feature 1..22: note = chemically synthesized
  source 1..22: mol_type = other DNA
atcatatcacaaaatagtcctc

SEQ ID NO: 120647 - DNA, 22 bp, synthetic construct
  misc_feature 1..22: note = chemically synthesized
  source 1..22: mol_type = other DNA
tcatatcacaaaatagtcctct

SEQ ID NO: 120648 - DNA, 22 bp, synthetic construct
  misc_feature 1..22: note = chemically synthesized
  source 1..22: mol_type = other DNA
tttgaagtgtgactgaaattac

SEQ ID NO: 120649 - DNA, 22 bp, synthetic construct
  misc_feature 1..22: note = chemically synthesized
  source 1..22: mol_type = other DNA
tgaagtgtgactgaaattacat

SEQ ID NO: 120650 - DNA, 22 bp, synthetic construct
  misc_feature 1..22: note = chemically synthesized
  source 1..22: mol_type = other DNA
gaagtgtgactgaaattacatt

SEQ ID NO: 120651 - DNA, 22 bp, synthetic construct
  misc_feature 1..22: note = chemically synthesized
  source 1..22: mol_type = other DNA
aagtgtgactgaaattacatta

SEQ ID NO: 120652 - DNA, 22 bp, synthetic construct
  misc_feature 1..22: note = chemically synthesized
  source 1..22: mol_type = other DNA
aaattacattaaacattctcat

SEQ ID NO: 120653 - DNA, 22 bp, synthetic construct
  misc_feature 1..22: note = chemically synthesized
  source 1..22: mol_type = other DNA
cattaaacattctcatcaattt

SEQ ID NO: 120654 - DNA, 22 bp, synthetic construct
  misc_feature 1..22: note = chemically synthesized
  source 1..22: mol_type = other DNA
aacattctcatcaattttcatt

SEQ ID NO: 120655 - DNA, 22 bp, synthetic construct
  misc_feature 1..22: note = chemically synthesized
  source 1..22: mol_type = other DNA
tcatcaattttcattgacgtgc

SEQ ID NO: 120656 - DNA, 22 bp, synthetic construct
  misc_feature 1..22: note = chemically synthesized
  source 1..22: mol_type = other DNA
atcaattttcattgacgtgcat

SEQ ID NO: 120657 - DNA, 22 bp, synthetic construct
  misc_feature 1..22: note = chemically synthesized
  source 1..22: mol_type = other DNA
tcattgacgtgcattaagtgcg

SEQ ID NO: 120658 - DNA, 22 bp, synthetic construct
  misc_feature 1..22: note = chemically synthesized
  source 1..22: mol_type = other DNA
cattgacgtgcattaagtgcgt

SEQ ID NO: 120659 - DNA, 22 bp, synthetic construct
  misc_feature 1..22: note = chemically synthesized
  source 1..22: mol_type = other DNA
attgacgtgcattaagtgcgtc

SEQ ID NO: 120660 - DNA, 22 bp, synthetic construct
  misc_feature 1..22: note = chemically synthesized
  source 1..22: mol_type = other DNA
acgtgcattaagtgcgtcctgt

SEQ ID NO: 120661 - DNA, 22 bp, synthetic construct
  misc_feature 1..22: note = chemically synthesized
  source 1..22: mol_type = other DNA
agtgcgtcctgtgagaaactct

SEQ ID NO: 120662 - DNA, 22 bp, synthetic construct
  misc_feature 1..22: note = chemically synthesized
  source 1..22: mol_type = other DNA
tgagaaactctgatcaagaact

SEQ ID NO: 120663 - DNA, 22 bp, synthetic construct
  misc_feature 1..22: note = chemically synthesized
  source 1..22: mol_type = other DNA
tgatcaagaacttgaagataga

SEQ ID NO: 120664 - DNA, 22 bp, synthetic construct
  misc_feature 1..22: note = chemically synthesized
  source 1..22: mol_type = other DNA
atcaagaacttgaagatagaca

SEQ ID NO: 120665 - DNA, 22 bp, synthetic construct
  misc_feature 1..22: note = chemically synthesized
  source 1..22: mol_type = other DNA
gaagatagacagattaacatgt

SEQ ID NO: 120666 - DNA, 22 bp, synthetic construct
  misc_feature 1..22: note = chemically synthesized
  source 1..22: mol_type = other DNA
aagatagacagattaacatgtc

SEQ ID NO: 120667 - DNA, 22 bp, synthetic construct
  misc_feature 1..22: note = chemically synthesized
  source 1..22: mol_type = other DNA
acatgtcatggtcttgccttta

SEQ ID NO: 120668 - DNA, 22 bp, synthetic construct
  misc_feature 1..22: note = chemically synthesized
  source 1..22: mol_type = other DNA
gcctttatgaagctcacattga

SEQ ID NO: 120669 - DNA, 22 bp, synthetic construct
  misc_feature 1..22: note = chemically synthesized
  source 1..22: mol_type = other DNA
cctttatgaagctcacattgag

SEQ ID NO: 120670 - DNA, 22 bp, synthetic construct
  misc_feature 1..22: note = chemically synthesized
  source 1..22: mol_type = other DNA
tatgaagctcacattgagtaaa

SEQ ID NO: 120671 - DNA, 22 bp, synthetic construct
  misc_feature 1..22: note = chemically synthesized
  source 1..22: mol_type = other DNA
atgaagctcacattgagtaaag

SEQ ID NO: 120672 - DNA, 22 bp, synthetic construct
  misc_feature 1..22: note = chemically synthesized
  source 1..22: mol_type = other DNA
tgaagctcacattgagtaaaga

SEQ ID NO: 120673 - DNA, 22 bp, synthetic construct
  misc_feature 1..22: note = chemically synthesized
  source 1..22: mol_type = other DNA
acattgagtaaagatgttagat

SEQ ID NO: 120674 - DNA, 22 bp, synthetic construct
  misc_feature 1..22: note = chemically synthesized
  source 1..22: mol_type = other DNA
agtaaagatgttagattgttca

SEQ ID NO: 120675 - DNA, 22 bp, synthetic construct
  misc_feature 1..22: note = chemically synthesized
  source 1..22: mol_type = other DNA
gattgttcaacgaagtttccaa

SEQ ID NO: 120676 - DNA, 22 bp, synthetic construct
  misc_feature 1..22: note = chemically synthesized
  source 1..22: mol_type = other DNA
ttcaacgaagtttccaaaatag

SEQ ID NO: 120677 - DNA, 22 bp, synthetic construct
  misc_feature 1..22: note = chemically synthesized
  source 1..22: mol_type = other DNA
aacgaagtttccaaaatagggt

SEQ ID NO: 120678 - DNA, 22 bp, synthetic construct
  misc_feature 1..22: note = chemically synthesized
  source 1..22: mol_type = other DNA
ccaaaatagggtcactagccca

SEQ ID NO: 120679 - DNA, 22 bp, synthetic construct
  misc_feature 1..22: note = chemically synthesized
  source 1..22: mol_type = other DNA
caaaatagggtcactagcccag

SEQ ID NO: 120680 - DNA, 22 bp, synthetic construct
  misc_feature 1..22: note = chemically synthesized
  source 1..22: mol_type = other DNA
gcccaggctaggaaggcagagg

SEQ ID NO: 120681 - DNA, 22 bp, synthetic construct
  misc_feature 1..22: note = chemically synthesized
  source 1..22: mol_type = other DNA
ggaaggcagaggtagtttctga

SEQ ID NO: 120682 - DNA, 22 bp, synthetic construct
  misc_feature 1..22: note = chemically synthesized
  source 1..22: mol_type = other DNA
ctgaagcctggaggccaagagg

SEQ ID NO: 120683 - DNA, 22 bp, synthetic construct
  misc_feature 1..22: note = chemically synthesized
  source 1..22: mol_type = other DNA
tgaagcctggaggccaagagga

SEQ ID NO: 120684 - DNA, 22 bp, synthetic construct
  misc_feature 1..22: note = chemically synthesized
  source 1..22: mol_type = other DNA
aagcctggaggccaagaggagg

SEQ ID NO: 120685 - DNA, 22 bp, synthetic construct
  misc_feature 1..22: note = chemically synthesized
  source 1..22: mol_type = other DNA
gaggccaagaggaggatgatgg

SEQ ID NO: 120686 - DNA, 22 bp, synthetic construct
  misc_feature 1..22: note = chemically synthesized
  source 1..22: mol_type = other DNA
ggacctatctctatcactgtgg

SEQ ID NO: 120687 - DNA, 22 bp, synthetic construct
  misc_feature 1..22: note = chemically synthesized
  source 1..22: mol_type = other DNA
tctctatcactgtgggtaatca

SEQ ID NO: 120688 - DNA, 22 bp, synthetic construct
  misc_feature 1..22: note = chemically synthesized
  source 1..22: mol_type = other DNA
tatcactgtgggtaatcatgcg

SEQ ID NO: 120689 - DNA, 22 bp, synthetic construct
  misc_feature 1..22: note = chemically synthesized
  source 1..22: mol_type = other DNA
tcactgtgggtaatcatgcgaa

SEQ ID NO: 120690 - DNA, 22 bp, synthetic construct
  misc_feature 1..22: note = chemically synthesized
  source 1..22: mol_type = other DNA
tgggtaatcatgcgaatattag

SEQ ID NO: 120691 - DNA, 22 bp, synthetic construct
  misc_feature 1..22: note = chemically synthesized
  source 1..22: mol_type = other DNA
ggtgaagtgaatgtgggtgcat

SEQ ID NO: 120692 - DNA, 22 bp, synthetic construct
  misc_feature 1..22: note = chemically synthesized
  source 1..22: mol_type = other DNA
gggaaggtgaagtatcaacaca

SEQ ID NO: 120693 - DNA, 22 bp, synthetic construct
  misc_feature 1..22: note = chemically synthesized
  source 1..22: mol_type = other DNA
gtgtgaggcattcaggccttaa

SEQ ID NO: 120694 - DNA, 22 bp, synthetic construct
  misc_feature 1..22: note = chemically synthesized
  source 1..22: mol_type = other DNA
aggccttaacctttaaggtatt

SEQ ID NO: 120695 - DNA, 22 bp, synthetic construct
  misc_feature 1..22: note = chemically synthesized
  source 1..22: mol_type = other DNA
aacctttaaggtattagaattc

SEQ ID NO: 120696 - DNA, 22 bp, synthetic construct
  misc_feature 1..22: note = chemically synthesized
  source 1..22: mol_type = other DNA
acctttaaggtattagaattca

SEQ ID NO: 120697 - DNA, 22 bp, synthetic construct
  misc_feature 1..22: note = chemically synthesized
  source 1..22: mol_type = other DNA
taaggtattagaattcattatt

SEQ ID NO: 120698 - DNA, 22 bp, synthetic construct
  misc_feature 1..22: note = chemically synthesized
  source 1..22: mol_type = other DNA
aaggtattagaattcattatta

SEQ ID NO: 120699 - DNA, 22 bp, synthetic construct
  misc_feature 1..22: note = chemically synthesized
  source 1..22: mol_type = other DNA
aggtattagaattcattattaa

SEQ ID NO: 120700 - DNA, 22 bp, synthetic construct
  misc_feature 1..22: note = chemically synthesized
  source 1..22: mol_type = other DNA
gaattcattattaaagaatcta

SEQ ID NO: 120701 - DNA, 22 bp, synthetic construct
  misc_feature 1..22: note = chemically synthesized
  source 1..22: mol_type = other DNA
attattaaagaatctaaatcca

SEQ ID NO: 120702 - DNA, 22 bp, synthetic construct
  misc_feature 1..22: note = chemically synthesized
  source 1..22: mol_type = other DNA
ttaaagaatctaaatccattac

SEQ ID NO: 120703 - DNA, 22 bp, synthetic construct
  misc_feature 1..22: note = chemically synthesized
  source 1..22: mol_type = other DNA
aagaatctaaatccattactaa

SEQ ID NO: 120704 - DNA, 22 bp, synthetic construct
  misc_feature 1..22: note = chemically synthesized
  source 1..22: mol_type = other DNA
aatccattactaaaagtgaaaa

SEQ ID NO: 120705 - DNA, 22 bp, synthetic construct
  misc_feature 1..22: note = chemically synthesized
  source 1..22: mol_type = other DNA
ctaaaagtgaaaagtgtcactg

SEQ ID NO: 120706 - DNA, 22 bp, synthetic construct
  misc_feature 1..22: note = chemically synthesized
  source 1..22: mol_type = other DNA
aaagtgaaaagtgtcactgtaa

SEQ ID NO: 120707 - DNA, 22 bp, synthetic construct
  misc_feature 1..22: note = chemically synthesized
  source 1..22: mol_type = other DNA
taacagtgtacctatttgttaa

SEQ ID NO: 120708 - DNA, 22 bp, synthetic construct
  misc_feature 1..22: note = chemically synthesized
  source 1..22: mol_type = other DNA
tttgttaatgtgcaaatggttt

SEQ ID NO: 120709 - DNA, 22 bp, synthetic construct
  misc_feature 1..22: note = chemically synthesized
  source 1..22: mol_type = other DNA
gttaatgtgcaaatggttttca

SEQ ID NO: 120710 - DNA, 22 bp, synthetic construct
  misc_feature 1..22: note = chemically synthesized
  source 1..22: mol_type = other DNA
ttaatgtgcaaatggttttcat

SEQ ID NO: 120711 - DNA, 22 bp, synthetic construct
  misc_feature 1..22: note = chemically synthesized
  source 1..22: mol_type = other DNA
atgtgcaaatggttttcattgc

SEQ ID NO: 120712 - DNA, 22 bp, synthetic construct
  misc_feature 1..22: note = chemically synthesized
  source 1..22: mol_type = other DNA
tcattgcatgtaatattgtttg

SEQ ID NO: 120713 - DNA, 22 bp, synthetic construct
  misc_feature 1..22: note = chemically synthesized
  source 1..22: mol_type = other DNA
cattgcatgtaatattgtttgt

SEQ ID NO: 120714 - DNA, 22 bp, synthetic construct
  misc_feature 1..22: note = chemically synthesized
  source 1..22: mol_type = other DNA
attgcatgtaatattgtttgtg

SEQ ID NO: 120715 - DNA, 22 bp, synthetic construct
  misc_feature 1..22: note = chemically synthesized
  source 1..22: mol_type = other DNA
catgtaatattgtttgtgtgtg

SEQ ID NO: 120716 - DNA, 22 bp, synthetic construct
  misc_feature 1..22: note = chemically synthesized
  source 1..22: mol_type = other DNA
tttgtgtgtgtgtgagagagag

SEQ ID NO: 120717 - DNA, 22 bp, synthetic construct
  misc_feature 1..22: note = chemically synthesized
  source 1..22: mol_type = other DNA
gtgtgtgtgtgagagagagaga

SEQ ID NO: 120718 - DNA, 22 bp, synthetic construct
  misc_feature 1..22: note = chemically synthesized
  source 1..22: mol_type = other DNA
tgtgtgtgtgagagagagagag

SEQ ID NO: 120719 - DNA, 22 bp, synthetic construct
  misc_feature 1..22: note = chemically synthesized
  source 1..22: mol_type = other DNA
gctttcaaggggccagtataag

SEQ ID NO: 120720 - DNA, 22 bp, synthetic construct
  misc_feature 1..22: note = chemically synthesized
  source 1..22: mol_type = other DNA
tcaaggggccagtataagtttt

SEQ ID NO: 120721 - DNA, 22 bp, synthetic construct
  misc_feature 1..22: note = chemically synthesized
  source 1..22: mol_type = other DNA
caaggggccagtataagtttta

SEQ ID NO: 120722 - DNA, 22 bp, synthetic construct
  misc_feature 1..22: note = chemically synthesized
  source 1..22: mol_type = other DNA
aaggggccagtataagttttat

SEQ ID NO: 120723 - DNA, 22 bp, synthetic construct
  misc_feature 1..22: note = chemically synthesized
  source 1..22: mol_type = other DNA
tatttaaggaacctctatccag

SEQ ID NO: 120724 - DNA, 22 bp, synthetic construct
  misc_feature 1..22: note = chemically synthesized
  source 1..22: mol_type = other DNA
atttaaggaacctctatccaga

SEQ ID NO: 120725 - DNA, 22 bp, synthetic construct
  misc_feature 1..22: note = chemically synthesized
  source 1..22: mol_type = other DNA
tttaaggaacctctatccagaa

SEQ ID NO: 120726 - DNA, 22 bp, synthetic construct
  misc_feature 1..22: note = chemically synthesized
  source 1..22: mol_type = other DNA
aaggaacctctatccagaattg

SEQ ID NO: 120727 - DNA, 22 bp, synthetic construct
  misc_feature 1..22: note = chemically synthesized
  source 1..22: mol_type = other DNA
aggaacctctatccagaattga

SEQ ID NO: 120728 - DNA, 22 bp, synthetic construct
  misc_feature 1..22: note = chemically synthesized
  source 1..22: mol_type = other DNA
tatccagaattgatacctagcc

SEQ ID NO: 120729 - DNA, 22 bp, synthetic construct
  misc_feature 1..22: note = chemically synthesized
  source 1..22: mol_type = other DNA
tccagaattgatacctagccag

SEQ ID NO: 120730 - DNA, 22 bp, synthetic construct
  misc_feature 1..22: note = chemically synthesized
  source 1..22: mol_type = other DNA
atacctagccagcccactgagc

SEQ ID NO: 120731 - DNA, 22 bp, synthetic construct
  misc_feature 1..22: note = chemically synthesized
  source 1..22: mol_type = other DNA
gccagcccactgagccaggctt

SEQ ID NO: 120732 - DNA, 22 bp, synthetic construct
  misc_feature 1..22: note = chemically synthesized
  source 1..22: mol_type = other DNA
agccaggcttggtgaagtagga

SEQ ID NO: 120733 - DNA, 22 bp, synthetic construct
  misc_feature 1..22: note = chemically synthesized
  source 1..22: mol_type = other DNA
ggtgaagtaggagattccttca

SEQ ID NO: 120734 - DNA, 22 bp, synthetic construct
  misc_feature 1..22: note = chemically synthesized
  source 1..22: mol_type = other DNA
gtgaagtaggagattccttcag

SEQ ID NO: 120735 - DNA, 22 bp, synthetic construct
  misc_feature 1..22: note = chemically synthesized
  source 1..22: mol_type = other DNA
cttcaggagaactgaatcccca

SEQ ID NO: 120736 - DNA, 22 bp, synthetic construct
  misc_feature 1..22: note = chemically synthesized
  source 1..22: mol_type = other DNA
caggagaactgaatccccaagg

SEQ ID NO: 120737 - DNA, 22 bp, synthetic construct
  misc_feature 1..22: note = chemically synthesized
  source 1..22: mol_type = other DNA
aggagaactgaatccccaaggt

SEQ ID NO: 120738 - DNA, 22 bp, synthetic construct
  misc_feature 1..22: note = chemically synthesized
  source 1..22: mol_type = other DNA
aatccccaaggtctgtacacat

SEQ ID NO: 120739 - DNA, 22 bp, synthetic construct
  misc_feature 1..22: note = chemically synthesized
  source 1..22: mol_type = other DNA
tacacatgctgtggttttccaa

SEQ ID NO: 120740 - DNA, 22 bp, synthetic construct
  misc_feature 1..22: note = chemically synthesized
  source 1..22: mol_type = other DNA
tggttttccaatgtagccacca

SEQ ID NO: 120741 - DNA, 22 bp, synthetic construct
  misc_feature 1..22: note = chemically synthesized
  source 1..22: mol_type = other DNA
tccaatgtagccaccaggggga

SEQ ID NO: 120742 - DNA, 22 bp, synthetic construct
  misc_feature 1..22: note = chemically synthesized
  source 1..22: mol_type = other DNA
ccaatgtagccaccagggggag

SEQ ID NO: 120743 - DNA, 22 bp, synthetic construct
  misc_feature 1..22: note = chemically synthesized
  source 1..22: mol_type = other DNA
caatgtagccaccagggggagc

SEQ ID NO: 120744 - DNA, 22 bp, synthetic construct
  misc_feature 1..22: note = chemically synthesized
  source 1..22: mol_type = other DNA
agcccaaggataggcttaaatt

SEQ ID NO: 120745 - DNA, 22 bp, synthetic construct
  misc_feature 1..22: note = chemically synthesized
  source 1..22: mol_type = other DNA
aaattctgaccagcaccaaggc

SEQ ID NO: 120746 - DNA, 22 bp, synthetic construct
  misc_feature 1..22: note = chemically synthesized
  source 1..22: mol_type = other DNA
aattctgaccagcaccaaggcc

SEQ ID NO: 120747 - DNA, 22 bp, synthetic construct
  misc_feature 1..22: note = chemically synthesized
  source 1..22: mol_type = other DNA
tgaccagcaccaaggccctact

SEQ ID NO: 120748 - DNA, 22 bp, synthetic construct
  misc_feature 1..22: note = chemically synthesized
  source 1..22: mol_type = other DNA
accagcaccaaggccctactat

SEQ ID NO: 120749 - DNA, 22 bp, synthetic construct
  misc_feature 1..22: note = chemically synthesized
  source 1..22: mol_type = other DNA
ctatccccagggcacaagaaaa

SEQ ID NO: 120750 - DNA, 22 bp, synthetic construct
  misc_feature 1..22: note = chemically synthesized
  source 1..22: mol_type = other DNA
tccccagggcacaagaaaatgt

SEQ ID NO: 120751 - DNA, 22 bp, synthetic construct
  misc_feature 1..22: note = chemically synthesized
  source 1..22: mol_type = other DNA
ttcttccagcaccaccttcccg

SEQ ID NO: 120752 - DNA, 22 bp, synthetic construct
  misc_feature 1..22: note = chemically synthesized
  source 1..22: mol_type = other DNA
tcttccagcaccaccttcccgt

SEQ ID NO: 120753 - DNA, 22 bp, synthetic construct
  misc_feature 1..22: note = chemically synthesized
  source 1..22: mol_type = other DNA
cttccagcaccaccttcccgtg

SEQ ID NO: 120754 - DNA, 22 bp, synthetic construct
  misc_feature 1..22: note = chemically synthesized
  source 1..22: mol_type = other DNA
ttccagcaccaccttcccgtgt

SEQ ID NO: 120755 - DNA, 22 bp, synthetic construct
  misc_feature 1..22: note = chemically synthesized
  source 1..22: mol_type = other DNA
ccagcaccaccttcccgtgtcc

SEQ ID NO: 120756 - DNA, 22 bp, synthetic construct
  misc_feature 1..22: note = chemically synthesized
  source 1..22: mol_type = other DNA
cagcaccaccttcccgtgtcct

SEQ ID NO: 120757 - DNA, 22 bp, synthetic construct
  misc_feature 1..22: note = chemically synthesized
  source 1..22: mol_type = other DNA
cccgtgtcctcaatacccacta

SEQ ID NO: 120758 - DNA, 22 bp, synthetic construct
  misc_feature 1..22: note = chemically synthesized
  source 1..22: mol_type = other DNA
ccgtgtcctcaatacccactac

SEQ ID NO: 120759 - DNA, 22 bp, synthetic construct
  misc_feature 1..22: note = chemically synthesized
  source 1..22: mol_type = other DNA
aatacccactacacagctgaaa

SEQ ID NO: 120760 - DNA, 22 bp, synthetic construct
  misc_feature 1..22: note = chemically synthesized
  source 1..22: mol_type = other DNA
cacagctgaaagctgccaacca

SEQ ID NO: 120761 - DNA, 22 bp, synthetic construct
  misc_feature 1..22: note = chemically synthesized
  source 1..22: mol_type = other DNA
aaagctgccaaccagttcattc

SEQ ID NO: 120762 - DNA, 22 bp, synthetic construct
  misc_feature 1..22: note = chemically synthesized
  source 1..22: mol_type = other DNA
ccaaccagttcattcttccttt

SEQ ID NO: 120763 - DNA, 22 bp, synthetic construct
  misc_feature 1..22: note = chemically synthesized
  source 1..22: mol_type = other DNA
attcttcctttgaggatgatct

SEQ ID NO: 120764 - DNA, 22 bp, synthetic construct
  misc_feature 1..22: note = chemically synthesized
  source 1..22: mol_type = other DNA
ttcctttgaggatgatcttcct

SEQ ID NO: 120765 - DNA, 22 bp, synthetic construct
  misc_feature 1..22: note = chemically synthesized
  source 1..22: mol_type = other DNA
cctttgaggatgatcttcctct

SEQ ID NO: 120766 - DNA, 22 bp, synthetic construct
  misc_feature 1..22: note = chemically synthesized
  source 1..22: mol_type = other DNA
ctttgaggatgatcttcctctc

SEQ ID NO: 120767 - DNA, 22 bp, synthetic construct
  misc_feature 1..22: note = chemically synthesized
  source 1..22: mol_type = other DNA
tgaggatgatcttcctctctct

SEQ ID NO: 120768 - DNA, 22 bp, synthetic construct
  misc_feature 1..22: note = chemically synthesized
  source 1..22: mol_type = other DNA
gaggatgatcttcctctctctc

SEQ ID NO: 120769 - DNA, 22 bp, synthetic construct
  misc_feature 1..22: note = chemically synthesized
  source 1..22: mol_type = other DNA
aggatgatcttcctctctctca

SEQ ID NO: 120770 - DNA, 22 bp, synthetic construct
  misc_feature 1..22: note = chemically synthesized
  source 1..22: mol_type = other DNA
cctctctctcatgcacaaaata

SEQ ID NO: 120771 - DNA, 22 bp, synthetic construct
  misc_feature 1..22: note = chemically synthesized
  source 1..22: mol_type = other DNA
ctctctctcatgcacaaaatag

SEQ ID NO: 120772 - DNA, 22 bp, synthetic construct
  misc_feature 1..22: note = chemically synthesized
  source 1..22: mol_type = other DNA
tctctcatgcacaaaatagaca

SEQ ID NO: 120773 - DNA, 22 bp, synthetic construct
  misc_feature 1..22: note = chemically synthesized
  source 1..22: mol_type = other DNA
tctcatgcacaaaatagacata

SEQ ID NO: 120774 - DNA, 22 bp, synthetic construct
  misc_feature 1..22: note = chemically synthesized
  source 1..22: mol_type = other DNA
tcatgcacaaaatagacatatc

SEQ ID NO: 120775 - DNA, 22 bp, synthetic construct
  misc_feature 1..22: note = chemically synthesized
  source 1..22: mol_type = other DNA
atgcacaaaatagacatatcta

SEQ ID NO: 120776 - DNA, 22 bp, synthetic construct
  misc_feature 1..22: note = chemically synthesized
  source 1..22: mol_type = other DNA
catcttacaaacacataaaaac

SEQ ID NO: 120777 - DNA, 22 bp, synthetic construct
  misc_feature 1..22: note = chemically synthesized
  source 1..22: mol_type = other DNA
acaaacacataaaaactaaaat

SEQ ID NO: 120778 - DNA, 22 bp, synthetic construct
  misc_feature 1..22: note = chemically synthesized
  source 1..22: mol_type = other DNA
caaacacataaaaactaaaatt

SEQ ID NO: 120779 - DNA, 22 bp, synthetic construct
  misc_feature 1..22: note = chemically synthesized
  source 1..22: mol_type = other DNA
aaattgatggagagagataggt

SEQ ID NO: 120780 - DNA, 22 bp, synthetic construct
  misc_feature 1..22: note = chemically synthesized
  source 1..22: mol_type = other DNA
atggagagagataggttttctt

SEQ ID NO: 120781 - DNA, 22 bp, synthetic construct
  misc_feature 1..22: note = chemically synthesized
  source 1..22: mol_type = other DNA
tcttagctttttcagattttta

SEQ ID NO: 120782 - DNA, 22 bp, synthetic construct
  misc_feature 1..22: note = chemically synthesized
  source 1..22: mol_type = other DNA
cttagctttttcagatttttac

SEQ ID NO: 120783 - DNA, 22 bp, synthetic construct
  misc_feature 1..22: note = chemically synthesized
  source 1..22: mol_type = other DNA
ttagctttttcagatttttaca

SEQ ID NO: 120784 - DNA, 22 bp, synthetic construct
  misc_feature 1..22: note = chemically synthesized
  source 1..22: mol_type = other DNA
agctttttcagatttttacaga

SEQ ID NO: 120785 - DNA, 22 bp, synthetic construct
  misc_feature 1..22: note = chemically synthesized
  source 1..22: mol_type = other DNA
gctttttcagatttttacagat

SEQ ID NO: 120786 - DNA, 22 bp, synthetic construct
  misc_feature 1..22: note = chemically synthesized
  source 1..22: mol_type = other DNA
tttcagatttttacagatggta

SEQ ID NO: 120787 - DNA, 22 bp, synthetic construct
  misc_feature 1..22: note = chemically synthesized
  source 1..22: mol_type = other DNA
ttcagatttttacagatggtaa

SEQ ID NO: 120788 - DNA, 22 bp, synthetic construct
  misc_feature 1..22: note = chemically synthesized
  source 1..22: mol_type = other DNA
tcagatttttacagatggtaat

SEQ ID NO: 120789 - DNA, 22 bp, synthetic construct
  misc_feature 1..22: note = chemically synthesized
  source 1..22: mol_type = other DNA
cagatttttacagatggtaatc

SEQ ID NO: 120790 - DNA, 22 bp, synthetic construct
  misc_feature 1..22: note = chemically synthesized
  source 1..22: mol_type = other DNA
agatttttacagatggtaatct

SEQ ID NO: 120791 - DNA, 22 bp, synthetic construct
  misc_feature 1..22: note = chemically synthesized
  source 1..22: mol_type = other DNA
ttacagatggtaatctcacaca

SEQ ID NO: 120792 - DNA, 22 bp, synthetic construct
  misc_feature 1..22: note = chemically synthesized
  source 1..22: mol_type = other DNA
tacagatggtaatctcacacaa

SEQ ID NO: 120793 - DNA, 22 bp, synthetic construct
  misc_feature 1..22: note = chemically synthesized
  source 1..22: mol_type = other DNA
acagatggtaatctcacacaaa

SEQ ID NO: 120794 - DNA, 22 bp, synthetic construct
  misc_feature 1..22: note = chemically synthesized
  source 1..22: mol_type = other DNA
cagatggtaatctcacacaaat

SEQ ID NO: 120795 - DNA, 22 bp, synthetic construct
  misc_feature 1..22: note = chemically synthesized
  source 1..22: mol_type = other DNA
acacaaatctatgtgtgtggcc

SEQ ID NO: 120796 - DNA, 22 bp, synthetic construct
  misc_feature 1..22: note = chemically synthesized
  source 1..22: mol_type = other DNA
tgtgtgtggcctttagtcttaa

SEQ ID NO: 120797 - DNA, 22 bp, synthetic construct
  misc_feature 1..22: note = chemically synthesized
  source 1..22: mol_type = other DNA
tagtcttaatcatattgaccaa

SEQ ID NO: 120798 - DNA, 22 bp, synthetic construct
  misc_feature 1..22: note = chemically synthesized
  source 1..22: mol_type = other DNA
agtcttaatcatattgaccaag

SEQ ID NO: 120799 - DNA, 22 bp, synthetic construct
  misc_feature 1..22: note = chemically synthesized
  source 1..22: mol_type = other DNA
gtcttaatcatattgaccaagc

SEQ ID NO: 120800 - DNA, 22 bp, synthetic construct
  misc_feature 1..22: note = chemically synthesized
  source 1..22: mol_type = other DNA
aatcatattgaccaagccttaa

SEQ ID NO: 120801 - DNA, 22 bp, synthetic construct
  misc_feature 1..22: note = chemically synthesized
  source 1..22: mol_type = other DNA
atcatattgaccaagccttaaa

SEQ ID NO: 120802 - DNA, 22 bp, synthetic construct
  misc_feature 1..22: note = chemically synthesized
  source 1..22: mol_type = other DNA
accaagccttaaatccccactc

SEQ ID NO: 120803 - DNA, 22 bp, synthetic construct
  misc_feature 1..22: note = chemically synthesized
  source 1..22: mol_type = other DNA
aaatccccactctgaccagaaa

SEQ ID NO: 120804 - DNA, 22 bp, synthetic construct
  misc_feature 1..22: note = chemically synthesized
  source 1..22: mol_type = other DNA
aatccccactctgaccagaaac

SEQ ID NO: 120805 - DNA, 22 bp, synthetic construct
  misc_feature 1..22: note = chemically synthesized
  source 1..22: mol_type = other DNA
tgaccagaaacagacctaaata

SEQ ID NO: 120806 - DNA, 22 bp, synthetic construct
  misc_feature 1..22: note = chemically synthesized
  source 1..22: mol_type = other DNA
accagaaacagacctaaataaa

SEQ ID NO: 120807 - DNA, 22 bp, synthetic construct
  misc_feature 1..22: note = chemically synthesized
  source 1..22: mol_type = other DNA
aataaaatccttactcacaggg

SEQ ID NO: 120808 - DNA, 22 bp, synthetic construct
  misc_feature 1..22: note = chemically synthesized
  source 1..22: mol_type = other DNA
actcacagggttctcaatgtct

SEQ ID NO: 120809 - DNA, 22 bp, synthetic construct
  misc_feature 1..22: note = chemically synthesized
  source 1..22: mol_type = other DNA
ctcacagggttctcaatgtctc

SEQ ID NO: 120810 - DNA, 22 bp, synthetic construct
  misc_feature 1..22: note = chemically synthesized
  source 1..22: mol_type = other DNA
acagggttctcaatgtctccag

SEQ ID NO: 120811 - DNA, 22 bp, synthetic construct
  misc_feature 1..22: note = chemically synthesized
  source 1..22: mol_type = other DNA
tcaatgtctccagactcacaac

SEQ ID NO: 120812 - DNA, 22 bp, synthetic construct
  misc_feature 1..22: note = chemically synthesized
  source 1..22: mol_type = other DNA
aatgtctccagactcacaacag

SEQ ID NO: 120813 - DNA, 22 bp, synthetic construct
  misc_feature 1..22: note = chemically synthesized
  source 1..22: mol_type = other DNA
cagactcacaacagactctttt

SEQ ID NO: 120814 - DNA, 22 bp, synthetic construct
  misc_feature 1..22: note = chemically synthesized
  source 1..22: mol_type = other DNA
acaacagactctttttaggtgt

SEQ ID NO: 120815 - DNA, 22 bp, synthetic construct
  misc_feature 1..22: note = chemically synthesized
  source 1..22: mol_type = other DNA
tttttaggtgtctctgtcacag

SEQ ID NO: 120816 - DNA, 22 bp, synthetic construct
  misc_feature 1..22: note = chemically synthesized
  source 1..22: mol_type = other DNA
tttaggtgtctctgtcacagaa

SEQ ID NO: 120817 - DNA, 22 bp, synthetic construct
  misc_feature 1..22: note = chemically synthesized
  source 1..22: mol_type = other DNA
ttaggtgtctctgtcacagaaa

SEQ ID NO: 120818 - DNA, 22 bp, synthetic construct
  misc_feature 1..22: note = chemically synthesized
  source 1..22: mol_type = other DNA
taggtgtctctgtcacagaaaa

SEQ ID NO: 120819 - DNA, 22 bp, synthetic construct
  misc_feature 1..22: note = chemically synthesized
  source 1..22: mol_type = other DNA
aggtgtctctgtcacagaaaat

SEQ ID NO: 120820 - DNA, 22 bp, synthetic construct
  misc_feature 1..22: note = chemically synthesized
  source 1..22: mol_type = other DNA
ggtgtctctgtcacagaaaatg

SEQ ID NO: 120821 - DNA, 22 bp, synthetic construct
  misc_feature 1..22: note = chemically synthesized
  source 1..22: mol_type = other DNA
tgtcacagaaaatggccacaag

SEQ ID NO: 120822 - DNA, 22 bp, synthetic construct
  misc_feature 1..22: note = chemically synthesized
  source 1..22: mol_type = other DNA
tcacagaaaatggccacaaggt

SEQ ID NO: 120823 - DNA, 22 bp, synthetic construct
  misc_feature 1..22: note = chemically synthesized
  source 1..22: mol_type = other DNA
actctcaggcctgttagaacaa

SEQ ID NO: 120824 - DNA, 22 bp, synthetic construct
  misc_feature 1..22: note = chemically synthesized
  source 1..22: mol_type = other DNA
tcaggcctgttagaacaagtcc

SEQ ID NO: 120825 - DNA, 22 bp, synthetic construct
  misc_feature 1..22: note = chemically synthesized
  source 1..22: mol_type = other DNA
aggcctgttagaacaagtcctt

SEQ ID NO: 120826 - DNA, 22 bp, synthetic construct
  misc_feature 1..22: note = chemically synthesized
  source 1..22: mol_type = other DNA
ttagaacaagtccttcccagaa

SEQ ID NO: 120827 - DNA, 22 bp, synthetic construct
  misc_feature 1..22: note = chemically synthesized
  source 1..22: mol_type = other DNA
gaacaagtccttcccagaagaa

SEQ ID NO: 120828 - DNA, 22 bp, synthetic construct
  misc_feature 1..22: note = chemically synthesized
  source 1..22: mol_type = other DNA
cccagaagaactccattttgtg

SEQ ID NO: 120829 - DNA, 22 bp, synthetic construct
  misc_feature 1..22: note = chemically synthesized
  source 1..22: mol_type = other DNA
ccagaagaactccattttgtgg

SEQ ID NO: 120830 - DNA, 22 bp, synthetic construct
  misc_feature 1..22: note = chemically synthesized
  source 1..22: mol_type = other DNA
cattttgtggtgtgagatcgat

SEQ ID NO: 120831 - DNA, 22 bp, synthetic construct
  misc_feature 1..22: note = chemically synthesized
  source 1..22: mol_type = other DNA
tgtggtgtgagatcgatgcggg

SEQ ID NO: 120832 - DNA, 22 bp, synthetic construct
  misc_feature 1..22: note = chemically synthesized
  source 1..22: mol_type = other DNA
gtggtgtgagatcgatgcgggt

SEQ ID NO: 120833 - DNA, 22 bp, synthetic construct
  misc_feature 1..22: note = chemically synthesized
  source 1..22: mol_type = other DNA
tggtgtgagatcgatgcgggtc

SEQ ID NO: 120834 - DNA, 22 bp, synthetic construct
  misc_feature 1..22: note = chemically synthesized
  source 1..22: mol_type = other DNA
tcagactggagagacccacaga

SEQ ID NO: 120835 - DNA, 22 bp, synthetic construct
  misc_feature 1..22: note = chemically synthesized
  source 1..22: mol_type = other DNA
cagactggagagacccacagaa

SEQ ID NO: 120836 - DNA, 22 bp, synthetic construct
  misc_feature 1..22: note = chemically synthesized
  source 1..22: mol_type = other DNA
agactggagagacccacagaag

SEQ ID NO: 120837 - DNA, 22 bp, synthetic construct
  misc_feature 1..22: note = chemically synthesized
  source 1..22: mol_type = other DNA
gagagacccacagaagttagga

SEQ ID NO: 120838 - DNA, 22 bp, synthetic construct
  misc_feature 1..22: note = chemically synthesized
  source 1..22: mol_type = other DNA
ggattgccaaaagggtcttctg

SEQ ID NO: 120839 - DNA, 22 bp, synthetic construct
  misc_feature 1..22: note = chemically synthesized
  source 1..22: mol_type = other DNA
ccaaaagggtcttctggactgg

SEQ ID NO: 120840 - DNA, 22 bp, synthetic construct
  misc_feature 1..22: note = chemically synthesized
  source 1..22: mol_type = other DNA
ctggactggtccacagccccta

SEQ ID NO: 120841 - DNA, 22 bp, synthetic construct
  misc_feature 1..22: note = chemically synthesized
  source 1..22: mol_type = other DNA
tggactggtccacagcccctaa

SEQ ID NO: 120842 - DNA, 22 bp, synthetic construct
  misc_feature 1..22: note = chemically synthesized
  source 1..22: mol_type = other DNA
gactggtccacagcccctaaga

SEQ ID NO: 120843 - DNA, 22 bp, synthetic construct
  misc_feature 1..22: note = chemically synthesized
  source 1..22: mol_type = other DNA
gtccacagcccctaagaaattt

SEQ ID NO: 120844 - DNA, 22 bp, synthetic construct
  misc_feature 1..22: note = chemically synthesized
  source 1..22: mol_type = other DNA
agaaattttcatgttgcaattc

SEQ ID NO: 120845 - DNA, 22 bp, synthetic construct
  misc_feature 1..22: note = chemically synthesized
  source 1..22: mol_type = other DNA
tcatgttgcaattcattttgtc

SEQ ID NO: 120846 - DNA, 22 bp, synthetic construct
  misc_feature 1..22: note = chemically synthesized
  source 1..22: mol_type = other DNA
catgttgcaattcattttgtcc

SEQ ID NO: 120847 - DNA, 22 bp, synthetic construct
  misc_feature 1..22: note = chemically synthesized
  source 1..22: mol_type = other DNA
atgttgcaattcattttgtcca

SEQ ID NO: 120848 - DNA, 22 bp, synthetic construct
  misc_feature 1..22: note = chemically synthesized
  source 1..22: mol_type = other DNA
caattcattttgtccatccccc

SEQ ID NO: 120849 - DNA, 22 bp, synthetic construct
  misc_feature 1..22: note = chemically synthesized
  source 1..22: mol_type = other DNA
attttgtccatccccctgcctc

SEQ ID NO: 120850 - DNA, 22 bp, synthetic construct
  misc_feature 1..22: note = chemically synthesized
  source 1..22: mol_type = other DNA
tgtccatccccctgcctccctg

SEQ ID NO: 120851 - DNA, 22 bp, synthetic construct
  misc_feature 1..22: note = chemically synthesized
  source 1..22: mol_type = other DNA
gtccatccccctgcctccctgg

SEQ ID NO: 120852 - DNA, 22 bp, synthetic construct
  misc_feature 1..22: note = chemically synthesized
  source 1..22: mol_type = other DNA
tccatccccctgcctccctgga

SEQ ID NO: 120853 - DNA, 22 bp, synthetic construct
  misc_feature 1..22: note = chemically synthesized
  source 1..22: mol_type = other DNA
cctccctggacacctgcatctg

SEQ ID NO: 120854 - DNA, 22 bp, synthetic construct
  misc_feature 1..22: note = chemically synthesized
  source 1..22: mol_type = other DNA
cctggacacctgcatctgtgtg

SEQ ID NO: 120855 - DNA, 22 bp, synthetic construct
  misc_feature 1..22: note = chemically synthesized
  source 1..22: mol_type = other DNA
gacacctgcatctgtgtgtgca

SEQ ID NO: 120856 - DNA, 22 bp, synthetic construct
  misc_feature 1..22: note = chemically synthesized
  source 1..22: mol_type = other DNA
catctgtgtgtgcacagagagt

SEQ ID NO: 120857 - DNA, 22 bp, synthetic construct
  misc_feature 1..22: note = chemically synthesized
  source 1..22: mol_type = other DNA
tgtgtgcacagagagtctggaa

SEQ ID NO: 120858 - DNA, 22 bp, synthetic construct
  misc_feature 1..22: note = chemically synthesized
  source 1..22: mol_type = other DNA
gaaggtttacagagaagtctcc

SEQ ID NO: 120859 - DNA, 22 bp, synthetic construct
  misc_feature 1..22: note = chemically synthesized
  source 1..22: mol_type = other DNA
acagagaagtctccacatcttc

SEQ ID NO: 120860 - DNA, 22 bp, synthetic construct
  misc_feature 1..22: note = chemically synthesized
  source 1..22: mol_type = other DNA
cagagaagtctccacatcttcc

SEQ ID NO: 120861 - DNA, 22 bp, synthetic construct
  misc_feature 1..22: note = chemically synthesized
  source 1..22: mol_type = other DNA
cacatcttcccacagcaactct

SEQ ID NO: 120862 - DNA, 22 bp, synthetic construct
  misc_feature 1..22: note = chemically synthesized
  source 1..22: mol_type = other DNA
cccacagcaactctttcagaaa

SEQ ID NO: 120863 - DNA, 22 bp, synthetic construct
  misc_feature 1..22: note = chemically synthesized
  source 1..22: mol_type = other DNA
ccacagcaactctttcagaaac

SEQ ID NO: 120864 - DNA, 22 bp, synthetic construct
  misc_feature 1..22: note = chemically synthesized
  source 1..22: mol_type = other DNA
tttcagaaacgccttctttcgt

SEQ ID NO: 120865 - DNA, 22 bp, synthetic construct
  misc_feature 1..22: note = chemically synthesized
  source 1..22: mol_type = other DNA
tcagaaacgccttctttcgtaa

SEQ ID NO: 120866 - DNA, 22 bp, synthetic construct
  misc_feature 1..22: note = chemically synthesized
  source 1..22: mol_type = other DNA
cagaaacgccttctttcgtaac

SEQ ID NO: 120867 - DNA, 22 bp, synthetic construct
  misc_feature 1..22: note = chemically synthesized
  source 1..22: mol_type = other DNA
agaaacgccttctttcgtaaca

SEQ ID NO: 120868 - DNA, 22 bp, synthetic construct
  misc_feature 1..22: note = chemically synthesized
  source 1..22: mol_type = other DNA
ctttcgtaacatcctacctctc

SEQ ID NO: 120869 - DNA, 22 bp, synthetic construct
  misc_feature 1..22: note = chemically synthesized
  source 1..22: mol_type = other DNA
tttcgtaacatcctacctctct

SEQ ID NO: 120870 - DNA, 22 bp, synthetic construct
  misc_feature 1..22: note = chemically synthesized
  source 1..22: mol_type = other DNA
tcgtaacatcctacctctcttc

SEQ ID NO: 120871 - DNA, 22 bp, synthetic construct
  misc_feature 1..22: note = chemically synthesized
  source 1..22: mol_type = other DNA
cgtaacatcctacctctcttca

SEQ ID NO: 120872 - DNA, 22 bp, synthetic construct
  misc_feature 1..22: note = chemically synthesized
  source 1..22: mol_type = other DNA
gtaacatcctacctctcttcag

SEQ ID NO: 120873 - DNA, 22 bp, synthetic construct
  misc_feature 1..22: note = chemically synthesized
  source 1..22: mol_type = other DNA
cctctcttcagtcattatgaaa

SEQ ID NO: 120874 - DNA, 22 bp, synthetic construct
  misc_feature 1..22: note = chemically synthesized
  source 1..22: mol_type = other DNA
tcttcagtcattatgaaaggga

SEQ ID NO: 120875 - DNA, 22 bp, synthetic construct
  misc_feature 1..22: note = chemically synthesized
  source 1..22: mol_type = other DNA
ttcagtcattatgaaagggaac

SEQ ID NO: 120876 - DNA, 22 bp, synthetic construct
  misc_feature 1..22: note = chemically synthesized
  source 1..22: mol_type = other DNA
cagtcattatgaaagggaaccg

SEQ ID NO: 120877 - DNA, 22 bp, synthetic construct
  misc_feature 1..22: note = chemically synthesized
  source 1..22: mol_type = other DNA
agtcattatgaaagggaaccga

SEQ ID NO: 120878 - DNA, 22 bp, synthetic construct
  misc_feature 1..22: note = chemically synthesized
  source 1..22: mol_type = other DNA
tgaaagggaaccgattttcatt

SEQ ID NO: 120879 - DNA, 22 bp, synthetic construct
  misc_feature 1..22: note = chemically synthesized
  source 1..22: mol_type = other DNA
tcattttcattgtgaaaacttt

SEQ ID NO: 120880 - DNA, 22 bp, synthetic construct
  misc_feature 1..22: note = chemically synthesized
  source 1..22: mol_type = other DNA
cattttcattgtgaaaactttt

SEQ ID NO: 120881 - DNA, 22 bp, synthetic construct
  misc_feature 1..22: note = chemically synthesized
  source 1..22: mol_type = other DNA
attttcattgtgaaaacttttc

SEQ ID NO: 120882 - DNA, 22 bp, synthetic construct
  misc_feature 1..22: note = chemically synthesized
  source 1..22: mol_type = other DNA
tcattgtgaaaacttttcagag

SEQ ID NO: 120883 - DNA, 22 bp, synthetic construct
  misc_feature 1..22: note = chemically synthesized
  source 1..22: mol_type = other DNA
cattgtgaaaacttttcagaga

SEQ ID NO: 120884 - DNA, 22 bp, synthetic construct
  misc_feature 1..22: note = chemically synthesized
  source 1..22: mol_type = other DNA
attgtgaaaacttttcagagag

SEQ ID NO: 120885 - DNA, 22 bp, synthetic construct
  misc_feature 1..22: note = chemically synthesized
  source 1..22: mol_type = other DNA
tgaaaacttttcagagagaccc

SEQ ID NO: 120886 - DNA, 22 bp, synthetic construct
  misc_feature 1..22: note = chemically synthesized
  source 1..22: mol_type = other DNA
ttcagagagaccccttttggga

SEQ ID NO: 120887 - DNA, 22 bp, synthetic construct
  misc_feature 1..22: note = chemically synthesized
  source 1..22: mol_type = other DNA
tcagagagaccccttttgggaa

SEQ ID NO: 120888 - DNA, 22 bp, synthetic construct
  misc_feature 1..22: note = chemically synthesized
  source 1..22: mol_type = other DNA
cagagagaccccttttgggaaa

SEQ ID NO: 120889 - DNA, 22 bp, synthetic construct
  misc_feature 1..22: note = chemically synthesized
  source 1..22: mol_type = other DNA
agagagaccccttttgggaaac

SEQ ID NO: 120890 - DNA, 22 bp, synthetic construct
  misc_feature 1..22: note = chemically synthesized
  source 1..22: mol_type = other DNA
ttgggaaaccatctcttctccc

SEQ ID NO: 120891 - DNA, 22 bp, synthetic construct
  misc_feature 1..22: note = chemically synthesized
  source 1..22: mol_type = other DNA
tgggaaaccatctcttctcccc

SEQ ID NO: 120892 - DNA, 22 bp, synthetic construct
  misc_feature 1..22: note = chemically synthesized
  source 1..22: mol_type = other DNA
gggaaaccatctcttctcccca

SEQ ID NO: 120893 - DNA, 22 bp, synthetic construct
  misc_feature 1..22: note = chemically synthesized
  source 1..22: mol_type = other DNA
ggaaaccatctcttctccccac

SEQ ID NO: 120894 - DNA, 22 bp, synthetic construct
  misc_feature 1..22: note = chemically synthesized
  source 1..22: mol_type = other DNA
ttctccccactccaagttgggc

SEQ ID NO: 120895 - DNA, 22 bp, synthetic construct
  misc_feature 1..22: note = chemically synthesized
  source 1..22: mol_type = other DNA
ctccccactccaagttgggcta

SEQ ID NO: 120896 - DNA, 22 bp, synthetic construct
  misc_feature 1..22: note = chemically synthesized
  source 1..22: mol_type = other DNA
tccccactccaagttgggctaa

SEQ ID NO: 120897 - DNA, 22 bp, synthetic construct
  misc_feature 1..22: note = chemically synthesized
  source 1..22: mol_type = other DNA
cccactccaagttgggctaaag

SEQ ID NO: 120898 - DNA, 22 bp, synthetic construct
  misc_feature 1..22: note = chemically synthesized
  source 1..22: mol_type = other DNA
caagttgggctaaagttttagt

SEQ ID NO: 120899 - DNA, 22 bp, synthetic construct
  misc_feature 1..22: note = chemically synthesized
  source 1..22: mol_type = other DNA
ggctaaagttttagtgtatttt

SEQ ID NO: 120900 - DNA, 22 bp, synthetic construct
  misc_feature 1..22: note = chemically synthesized
  source 1..22: mol_type = other DNA
aagttttagtgtattttgcata

SEQ ID NO: 120901 - DNA, 22 bp, synthetic construct
  misc_feature 1..22: note = chemically synthesized
  source 1..22: mol_type = other DNA
tagtgtattttgcatattttga

SEQ ID NO: 120902 - DNA, 22 bp, synthetic construct
  misc_feature 1..22: note = chemically synthesized
  source 1..22: mol_type = other DNA
agtgtattttgcatattttgat

SEQ ID NO: 120903 - DNA, 22 bp, synthetic construct
  misc_feature 1..22: note = chemically synthesized
  source 1..22: mol_type = other DNA
gtgtattttgcatattttgatt

SEQ ID NO: 120904 - DNA, 22 bp, synthetic construct
  misc_feature 1..22: note = chemically synthesized
  source 1..22: mol_type = other DNA
tgcatattttgatttgctataa

SEQ ID NO: 120905 - DNA, 22 bp, synthetic construct
  misc_feature 1..22: note = chemically synthesized
  source 1..22: mol_type = other DNA
gcatattttgatttgctataac

SEQ ID NO: 120906 - DNA, 22 bp, synthetic construct
  misc_feature 1..22: note = chemically synthesized
  source 1..22: mol_type = other DNA
catattttgatttgctataaca

SEQ ID NO: 120907 - DNA, 22 bp, synthetic construct
  misc_feature 1..22: note = chemically synthesized
  source 1..22: mol_type = other DNA
tgatttgctataacagagtacc

SEQ ID NO: 120908 - DNA, 22 bp, synthetic construct
  misc_feature 1..22: note = chemically synthesized
  source 1..22: mol_type = other DNA
gatttgctataacagagtacct

SEQ ID NO: 120909 - DNA, 22 bp, synthetic construct
  misc_feature 1..22: note = chemically synthesized
  source 1..22: mol_type = other DNA
atttgctataacagagtacctg

SEQ ID NO: 120910 - DNA, 22 bp, synthetic construct
  misc_feature 1..22: note = chemically synthesized
  source 1..22: mol_type = other DNA
gctataacagagtacctgagtc

SEQ ID NO: 120911 - DNA, 22 bp, synthetic construct
  misc_feature 1..22: note = chemically synthesized
  source 1..22: mol_type = other DNA
ctataacagagtacctgagtct

SEQ ID NO: 120912 - DNA, 22 bp, synthetic construct
  misc_feature 1..22: note = chemically synthesized
  source 1..22: mol_type = other DNA
taacagagtacctgagtctggg

SEQ ID NO: 120913 - DNA, 22 bp, synthetic construct
  misc_feature 1..22: note = chemically synthesized
  source 1..22: mol_type = other DNA
agtctgggtagcttattttttt

SEQ ID NO: 120914 - DNA, 22 bp, synthetic construct
  misc_feature 1..22: note = chemically synthesized
  source 1..22: mol_type = other DNA
ggtagcttatttttttttttta

SEQ ID NO: 120915 - DNA, 22 bp, synthetic construct
  misc_feature 1..22: note = chemically synthesized
  source 1..22: mol_type = other DNA
attttttttttttaaagttttg

SEQ ID NO: 120916 - DNA, 22 bp, synthetic construct
  misc_feature 1..22: note = chemically synthesized
  source 1..22: mol_type = other DNA
ttttttttttttaaagttttgt

SEQ ID NO: 120917 - DNA, 22 bp, synthetic construct
  misc_feature 1..22: note = chemically synthesized
  source 1..22: mol_type = other DNA
tttttttttaaagttttgtttg

SEQ ID NO: 120918 - DNA, 22 bp, synthetic construct
  misc_feature 1..22: note = chemically synthesized
  source 1..22: mol_type = other DNA
ttttttttaaagttttgtttgg

SEQ ID NO: 120919 - DNA, 22 bp, synthetic construct
  misc_feature 1..22: note = chemically synthesized
  source 1..22: mol_type = other DNA
tttttttaaagttttgtttggt

SEQ ID NO: 120920 - DNA, 22 bp, synthetic construct
  misc_feature 1..22: note = chemically synthesized
  source 1..22: mol_type = other DNA
ttttttaaagttttgtttggtt

SEQ ID NO: 120921 - DNA, 22 bp, synthetic construct
  misc_feature 1..22: note = chemically synthesized
  source 1..22: mol_type = other DNA
tttttaaagttttgtttggttc

SEQ ID NO: 120922 - DNA, 22 bp, synthetic construct
  misc_feature 1..22: note = chemically synthesized
  source 1..22: mol_type = other DNA
ttttaaagttttgtttggttca

SEQ ID NO: 120923 - DNA, 22 bp, synthetic construct
  misc_feature 1..22: note = chemically synthesized
  source 1..22: mol_type = other DNA
tttaaagttttgtttggttcat

SEQ ID NO: 120924 - DNA, 22 bp, synthetic construct
  misc_feature 1..22: note = chemically synthesized
  source 1..22: mol_type = other DNA
ttaaagttttgtttggttcatg

SEQ ID NO: 120925 - DNA, 22 bp, synthetic construct
  misc_feature 1..22: note = chemically synthesized
  source 1..22: mol_type = other DNA
taaagttttgtttggttcatga

SEQ ID NO: 120926 - DNA, 22 bp, synthetic construct
  misc_feature 1..22: note = chemically synthesized
  source 1..22: mol_type = other DNA
aaagttttgtttggttcatgat

SEQ ID NO: 120927 - DNA, 22 bp, synthetic construct
  misc_feature 1..22: note = chemically synthesized
  source 1..22: mol_type = other DNA
aagttttgtttggttcatgatt

SEQ ID NO: 120928 - DNA, 22 bp, synthetic construct
  misc_feature 1..22: note = chemically synthesized
  source 1..22: mol_type = other DNA
tgtttggttcatgattctggtg

SEQ ID NO: 120929 - DNA, 22 bp, synthetic construct
  misc_feature 1..22: note = chemically synthesized
  source 1..22: mol_type = other DNA
gtttggttcatgattctggtga

SEQ ID NO: 120930 - DNA, 22 bp, synthetic construct
  misc_feature 1..22: note = chemically synthesized
  source 1..22: mol_type = other DNA
tttggttcatgattctggtgac

SEQ ID NO: 120931 - DNA, 22 bp, synthetic construct
  misc_feature 1..22: note = chemically synthesized
  source 1..22: mol_type = other DNA
ggttcatgattctggtgactta

SEQ ID NO: 120932 - DNA, 22 bp, synthetic construct
  misc_feature 1..22: note = chemically synthesized
  source 1..22: mol_type = other DNA
gttcatgattctggtgacttaa

SEQ ID NO: 120933 - DNA, 22 bp, synthetic construct
  misc_feature 1..22: note = chemically synthesized
  source 1..22: mol_type = other DNA
atgattctggtgacttaaaagt

SEQ ID NO: 120934 - DNA, 22 bp, synthetic construct
  misc_feature 1..22: note = chemically synthesized
  source 1..22: mol_type = other DNA
tggtgacttaaaagtccaagat

SEQ ID NO: 120935 - DNA, 22 bp, synthetic construct
  misc_feature 1..22: note = chemically synthesized
  source 1..22: mol_type = other DNA
gtgacttaaaagtccaagatcg

SEQ ID NO: 120936 - DNA, 22 bp, synthetic construct
  misc_feature 1..22: note = chemically synthesized
  source 1..22: mol_type = other DNA
aaaagtccaagatcgggcggtt

SEQ ID NO: 120937 - DNA, 22 bp, synthetic construct
  misc_feature 1..22: note = chemically synthesized
  source 1..22: mol_type = other DNA
aaagtccaagatcgggcggttg

SEQ ID NO: 120938 - DNA, 22 bp, synthetic construct
  misc_feature 1..22: note = chemically synthesized
  source 1..22: mol_type = other DNA
catctgataaaggtctcatgct

SEQ ID NO: 120939 - DNA, 22 bp, synthetic construct
  misc_feature 1..22: note = chemically synthesized
  source 1..22: mol_type = other DNA
ataaaggtctcatgctggttcc

SEQ ID NO: 120940 - DNA, 22 bp, synthetic construct
  misc_feature 1..22: note = chemically synthesized
  source 1..22: mol_type = other DNA
atgctggttccaaacatggcag

SEQ ID NO: 120941 - DNA, 22 bp, synthetic construct
  misc_feature 1..22: note = chemically synthesized
  source 1..22: mol_type = other DNA
gttccaaacatggcagaaagca

SEQ ID NO: 120942 - DNA, 22 bp, synthetic construct
  misc_feature 1..22: note = chemically synthesized
  source 1..22: mol_type = other DNA
caaacatggcagaaagcagaca

SEQ ID NO: 120943 - DNA, 22 bp, synthetic construct
  misc_feature 1..22: note = chemically synthesized
  source 1..22: mol_type = other DNA
atgggaaagtatcaagctgtcc

SEQ ID NO: 120944 - DNA, 22 bp, synthetic construct
  misc_feature 1..22: note = chemically synthesized
  source 1..22: mol_type = other DNA
tccaccatatgtgaaattagaa

SEQ ID NO: 120945 - DNA, 22 bp, synthetic construct
  misc_feature 1..22: note = chemically synthesized
  source 1..22: mol_type = other DNA
gaattctaaaaggaaacaaaaa

SEQ ID NO: 120946 - DNA, 22 bp, synthetic construct
  misc_feature 1..22: note = chemically synthesized
  source 1..22: mol_type = other DNA
taaaaggaaacaaaaaatggat

SEQ ID NO: 120947 - DNA, 22 bp, synthetic construct
  misc_feature 1..22: note = chemically synthesized
  source 1..22: mol_type = other DNA
aaaggaaacaaaaaatggatta

SEQ ID NO: 120948 - DNA, 22 bp, synthetic construct
  misc_feature 1..22: note = chemically synthesized
  source 1..22: mol_type = other DNA
aacgttttttgaggaattattg

SEQ ID NO: 120949 - DNA, 22 bp, synthetic construct
  misc_feature 1..22: note = chemically synthesized
  source 1..22: mol_type = other DNA
tttgaggaattattgactgaat

SEQ ID NO: 120950 - DNA, 22 bp, synthetic construct
  misc_feature 1..22: note = chemically synthesized
  source 1..22: mol_type = other DNA
ttgaggaattattgactgaatg

SEQ ID NO: 120951 - DNA, 22 bp, synthetic construct
  misc_feature 1..22: note = chemically synthesized
  source 1..22: mol_type = other DNA
tgaggaattattgactgaatgt

SEQ ID NO: 120952 - DNA, 22 bp, synthetic construct
  misc_feature 1..22: note = chemically synthesized
  source 1..22: mol_type = other DNA
gaggaattattgactgaatgtt

SEQ ID NO: 120953 - DNA, 22 bp, synthetic construct
  misc_feature 1..22: note = chemically synthesized
  source 1..22: mol_type = other DNA
aggaattattgactgaatgttt

SEQ ID NO: 120954 - DNA, 22 bp, synthetic construct
  misc_feature 1..22: note = chemically synthesized
  source 1..22: mol_type = other DNA
ttgactgaatgtttcaacatct

SEQ ID NO: 120955 - DNA, 22 bp, synthetic construct
  misc_feature 1..22: note = chemically synthesized
  source 1..22: mol_type = other DNA
actgaatgtttcaacatctgga

SEQ ID NO: 120956 - DNA, 22 bp, synthetic construct
  misc_feature 1..22: note = chemically synthesized
  source 1..22: mol_type = other DNA
aatgtttcaacatctggacata

SEQ ID NO: 120957 - DNA, 22 bp, synthetic construct
  misc_feature 1..22: note = chemically synthesized
  source 1..22: mol_type = other DNA
caacatctggacataaaatcta

SEQ ID NO: 120958 - DNA, 22 bp, synthetic construct
  misc_feature 1..22: note = chemically synthesized
  source 1..22: mol_type = other DNA
aacatctggacataaaatctat

SEQ ID NO: 120959 - DNA, 22 bp, synthetic construct
  misc_feature 1..22: note = chemically synthesized
  source 1..22: mol_type = other DNA
gacataaaatctattaattcat

SEQ ID NO: 120960 - DNA, 22 bp, synthetic construct
  misc_feature 1..22: note = chemically synthesized
  source 1..22: mol_type = other DNA
ttaattcatatctttagctaac

SEQ ID NO: 120961 - DNA, 22 bp, synthetic construct
  misc_feature 1..22: note = chemically synthesized
  source 1..22: mol_type = other DNA
attcatatctttagctaacctt

SEQ ID NO: 120962 - DNA, 22 bp, synthetic construct
  misc_feature 1..22: note = chemically synthesized
  source 1..22: mol_type = other DNA
atatctttagctaaccttgagc

SEQ ID NO: 120963 - DNA, 22 bp, synthetic construct
  misc_feature 1..22: note = chemically synthesized
  source 1..22: mol_type = other DNA
tagctaaccttgagcaatgtca

SEQ ID NO: 120964 - DNA, 22 bp, synthetic construct
  misc_feature 1..22: note = chemically synthesized
  source 1..22: mol_type = other DNA
agctaaccttgagcaatgtcaa

SEQ ID NO: 120965 - DNA, 22 bp, synthetic construct
  misc_feature 1..22: note = chemically synthesized
  source 1..22: mol_type = other DNA
gctaaccttgagcaatgtcaat

SEQ ID NO: 120966 - DNA, 22 bp, synthetic construct
  misc_feature 1..22: note = chemically synthesized
  source 1..22: mol_type = other DNA
accttgagcaatgtcaattaaa

SEQ ID NO: 120967 - DNA, 22 bp, synthetic construct
  misc_feature 1..22: note = chemically synthesized
  source 1..22: mol_type = other DNA
gagcaatgtcaattaaaaaata

SEQ ID NO: 120968 - DNA, 22 bp, synthetic construct
  misc_feature 1..22: note = chemically synthesized
  source 1..22: mol_type = other DNA
agcaatgtcaattaaaaaataa

SEQ ID NO: 120969 - DNA, 22 bp, synthetic construct
  misc_feature 1..22: note = chemically synthesized
  source 1..22: mol_type = other DNA
aaaaataaaacacaactaaatg

SEQ ID NO: 120970 - DNA, 22 bp, synthetic construct
  misc_feature 1..22: note = chemically synthesized
  source 1..22: mol_type = other DNA
aatgcatatcttacaaatggca

SEQ ID NO: 120971 - DNA, 22 bp, synthetic construct
  misc_feature 1..22: note = chemically synthesized
  source 1..22: mol_type = other DNA
acaaatggcataaacaacaaat

SEQ ID NO: 120972 - DNA, 22 bp, synthetic construct
  misc_feature 1..22: note = chemically synthesized
  source 1..22: mol_type = other DNA
caaatggcataaacaacaaatg

SEQ ID NO: 120973 - DNA, 22 bp, synthetic construct
  misc_feature 1..22: note = chemically synthesized
  source 1..22: mol_type = other DNA
aaaagcagacatagaaaaagac

SEQ ID NO: 120974 - DNA, 22 bp, synthetic construct
  misc_feature 1..22: note = chemically synthesized
  source 1..22: mol_type = other DNA
aaagcagacatagaaaaagaca

SEQ ID NO: 120975 - DNA, 22 bp, synthetic construct
  misc_feature 1..22: note = chemically synthesized
  source 1..22: mol_type = other DNA
catacaagaaaattattagagg

SEQ ID NO: 120976 - DNA, 22 bp, synthetic construct
  misc_feature 1..22: note = chemically synthesized
  source 1..22: mol_type = other DNA
ttagaggaaacaacggaaacct

SEQ ID NO: 120977 - DNA, 22 bp, synthetic construct
  misc_feature 1..22: note = chemically synthesized
  source 1..22: mol_type = other DNA
gaggaaacaacggaaacctgaa

SEQ ID NO: 120978 - DNA, 22 bp, synthetic construct
  misc_feature 1..22: note = chemically synthesized
  source 1..22: mol_type = other DNA
aaaaaataaactggaactttat

SEQ ID NO: 120979 - DNA, 22 bp, synthetic construct
  misc_feature 1..22: note = chemically synthesized
  source 1..22: mol_type = other DNA
gaactttattttttattttttt

SEQ ID NO: 120980 - DNA, 22 bp, synthetic construct
  misc_feature 1..22: note = chemically synthesized
  source 1..22: mol_type = other DNA
tattttttatttttttatttat

SEQ ID NO: 120981 - DNA, 22 bp, synthetic construct
  misc_feature 1..22: note = chemically synthesized
  source 1..22: mol_type = other DNA
attttttatttttttatttatt

SEQ ID NO: 120982 - DNA, 22 bp, synthetic construct
  misc_feature 1..22: note = chemically synthesized
  source 1..22: mol_type = other DNA
ttttttatttttttatttattt

SEQ ID NO: 120983 - DNA, 22 bp, synthetic construct
  misc_feature 1..22: note = chemically synthesized
  source 1..22: mol_type = other DNA
tttatttttttatttattttat

SEQ ID NO: 120984 - DNA, 22 bp, synthetic construct
  misc_feature 1..22: note = chemically synthesized
  source 1..22: mol_type = other DNA
ttatttttttatttattttatt

SEQ ID NO: 120985 - DNA, 22 bp, synthetic construct
  misc_feature 1..22: note = chemically synthesized
  source 1..22: mol_type = other DNA
tatttttttatttattttattt

SEQ ID NO: 120986 - DNA, 22 bp, synthetic construct
  misc_feature 1..22: note = chemically synthesized
  source 1..22: mol_type = other DNA
atttttttatttattttattta

SEQ ID NO: 120987 - DNA, 22 bp, synthetic construct
  misc_feature 1..22: note = chemically synthesized
  source 1..22: mol_type = other DNA
tttttttatttattttatttat

SEQ ID NO: 120988 - DNA, 22 bp, synthetic construct
  misc_feature 1..22: note = chemically synthesized
  source 1..22: mol_type = other DNA
ttttatttattttatttattat

SEQ ID NO: 120989 - DNA, 22 bp, synthetic construct
  misc_feature 1..22: note = chemically synthesized
  source 1..22: mol_type = other DNA
tttatttattttatttattatt

SEQ ID NO: 120990 - DNA, 22 bp, synthetic construct
  misc_feature 1..22: note = chemically synthesized
  source 1..22: mol_type = other DNA
ttatttattttatttattatta

SEQ ID NO: 120991 - DNA, 22 bp, synthetic construct
  misc_feature 1..22: note = chemically synthesized
  source 1..22: mol_type = other DNA
tatttattttatttattattat

SEQ ID NO: 120992 - DNA, 22 bp, synthetic construct
  misc_feature 1..22: note = chemically synthesized
  source 1..22: mol_type = other DNA
atttattttatttattattatt

SEQ ID NO: 120993 - DNA, 22 bp, synthetic construct
  misc_feature 1..22: note = chemically synthesized
  source 1..22: mol_type = other DNA
tttattttatttattattatta

SEQ ID NO: 120994 - DNA, 22 bp, synthetic construct
  misc_feature 1..22: note = chemically synthesized
  source 1..22: mol_type = other DNA
attttatttattattattatta

SEQ ID NO: 120995 - DNA, 22 bp, synthetic construct
  misc_feature 1..22: note = chemically synthesized
  source 1..22: mol_type = other DNA
ttttatttattattattattat

SEQ ID NO: 120996 - DNA, 22 bp, synthetic construct
  misc_feature 1..22: note = chemically synthesized
  source 1..22: mol_type = other DNA
tatttattattattattatact

SEQ ID NO: 120997 - DNA, 22 bp, synthetic construct
  misc_feature 1..22: note = chemically synthesized
  source 1..22: mol_type = other DNA
atttattattattattatactt

SEQ ID NO: 120998 - DNA, 22 bp, synthetic construct
  misc_feature 1..22: note = chemically synthesized
  source 1..22: mol_type = other DNA
tttattattattattatacttt

SEQ ID NO: 120999 - DNA, 22 bp, synthetic construct
  misc_feature 1..22: note = chemically synthesized
  source 1..22: mol_type = other DNA
attattattattatactttaag

SEQ ID NO: 121000 - DNA, 22 bp, synthetic construct
  misc_feature 1..22: note = chemically synthesized
  source 1..22: mol_type = other DNA
ttattattattatactttaaga

SEQ ID NO: 121001 - DNA, 22 bp, synthetic construct
  misc_feature 1..22: note = chemically synthesized
  source 1..22: mol_type = other DNA
ttattattatactttaagattt

SEQ ID NO: 121002 - DNA, 22 bp, synthetic construct
  misc_feature 1..22: note = chemically synthesized
  source 1..22: mol_type = other DNA
ttattatactttaagatttagg

SEQ ID NO: 121003 - DNA, 22 bp, synthetic construct
  misc_feature 1..22: note = chemically synthesized
  source 1..22: mol_type = other DNA
ttatactttaagatttagggta

SEQ ID NO: 121004 - DNA, 22 bp, synthetic construct
  misc_feature 1..22: note = chemically synthesized
  source 1..22: mol_type = other DNA
tactttaagatttagggtacat

SEQ ID NO: 121005 - DNA, 22 bp, synthetic construct
  misc_feature 1..22: note = chemically synthesized
  source 1..22: mol_type = other DNA
taagatttagggtacatgtgca

SEQ ID NO: 121006 - DNA, 22 bp, synthetic construct
  misc_feature 1..22: note = chemically synthesized
  source 1..22: mol_type = other DNA
aagatttagggtacatgtgcat

SEQ ID NO: 121007 - DNA, 22 bp, synthetic construct
  misc_feature 1..22: note = chemically synthesized
  source 1..22: mol_type = other DNA
agatttagggtacatgtgcata

SEQ ID NO: 121008 - DNA, 22 bp, synthetic construct
  misc_feature 1..22: note = chemically synthesized
  source 1..22: mol_type = other DNA
agggtacatgtgcataatgtgc

SEQ ID NO: 121009 - DNA, 22 bp, synthetic construct
  misc_feature 1..22: note = chemically synthesized
  source 1..22: mol_type = other DNA
gggtacatgtgcataatgtgcc

SEQ ID NO: 121010 - DNA, 22 bp, synthetic construct
  misc_feature 1..22: note = chemically synthesized
  source 1..22: mol_type = other DNA
gttacatatgtatacatgtgcc

SEQ ID NO: 121011 - DNA, 22 bp, synthetic construct
  misc_feature 1..22: note = chemically synthesized
  source 1..22: mol_type = other DNA
catatgtatacatgtgccatgt

SEQ ID NO: 121012 - DNA, 22 bp, synthetic construct
  misc_feature 1..22: note = chemically synthesized
  source 1..22: mol_type = other DNA
gtgtgctgcacccattaactcg

SEQ ID NO: 121013 - DNA, 22 bp, synthetic construct
  misc_feature 1..22: note = chemically synthesized
  source 1..22: mol_type = other DNA
cacccattaactcgtaatttag

SEQ ID NO: 121014 - DNA, 22 bp, synthetic construct
  misc_feature 1..22: note = chemically synthesized
  source 1..22: mol_type = other DNA
actcgtaatttagcattaggta

SEQ ID NO: 121015 - DNA, 22 bp, synthetic construct
  misc_feature 1..22: note = chemically synthesized
  source 1..22: mol_type = other DNA
gtaatttagcattaggtatatc

SEQ ID NO: 121016 - DNA, 22 bp, synthetic construct
  misc_feature 1..22: note = chemically synthesized
  source 1..22: mol_type = other DNA
agcattaggtatatctcctaat

SEQ ID NO: 121017 - DNA, 22 bp, synthetic construct
  misc_feature 1..22: note = chemically synthesized
  source 1..22: mol_type = other DNA
gcattaggtatatctcctaatg

SEQ ID NO: 121018 - DNA, 22 bp, synthetic construct
  misc_feature 1..22: note = chemically synthesized
  source 1..22: mol_type = other DNA
ggtatatctcctaatgccatcc

SEQ ID NO: 121019 - DNA, 22 bp, synthetic construct
  misc_feature 1..22: note = chemically synthesized
  source 1..22: mol_type = other DNA
ctaatgccatccctccctgcac

SEQ ID NO: 121020 - DNA, 22 bp, synthetic construct
  misc_feature 1..22: note = chemically synthesized
  source 1..22: mol_type = other DNA
atgccatccctccctgcacccc

SEQ ID NO: 121021 - DNA, 22 bp, synthetic construct
  misc_feature 1..22: note = chemically synthesized
  source 1..22: mol_type = other DNA
cctgcacccccaccccacaaca

SEQ ID NO: 121022 - DNA, 22 bp, synthetic construct
  misc_feature 1..22: note = chemically synthesized
  source 1..22: mol_type = other DNA
cacccccaccccacaacagtcc

SEQ ID NO: 121023 - DNA, 22 bp, synthetic construct
  misc_feature 1..22: note = chemically synthesized
  source 1..22: mol_type = other DNA
cccttcctgtgtccatgtgttc

SEQ ID NO: 121024 - DNA, 22 bp, synthetic construct
  misc_feature 1..22: note = chemically synthesized
  source 1..22: mol_type = other DNA
cctgtgtccatgtgttctcatt

SEQ ID NO: 121025 - DNA, 22 bp, synthetic construct
  misc_feature 1..22: note = chemically synthesized
  source 1..22: mol_type = other DNA
ctgtgtccatgtgttctcattg

SEQ ID NO: 121026 - DNA, 22 bp, synthetic construct
  misc_feature 1..22: note = chemically synthesized
  source 1..22: mol_type = other DNA
tgtccatgtgttctcattgttc

SEQ ID NO: 121027 - DNA, 22 bp, synthetic construct
  misc_feature 1..22: note = chemically synthesized
  source 1..22: mol_type = other DNA
tcattgttcagttcccatctat

SEQ ID NO: 121028 - DNA, 22 bp, synthetic construct
  misc_feature 1..22: note = chemically synthesized
  source 1..22: mol_type = other DNA
attgttcagttcccatctatga

SEQ ID NO: 121029 - DNA, 22 bp, synthetic construct
  misc_feature 1..22: note = chemically synthesized
  source 1..22: mol_type = other DNA
ttcagttcccatctatgagtga

SEQ ID NO: 121030 - DNA, 22 bp, synthetic construct
  misc_feature 1..22: note = chemically synthesized
  source 1..22: mol_type = other DNA
agttcccatctatgagtgagaa

SEQ ID NO: 121031 - DNA, 22 bp, synthetic construct
  misc_feature 1..22: note = chemically synthesized
  source 1..22: mol_type = other DNA
ccatctatgagtgagaatatgt

SEQ ID NO: 121032 - DNA, 22 bp, synthetic construct
  misc_feature 1..22: note = chemically synthesized
  source 1..22: mol_type = other DNA
tgagtgagaatatgtggtgttt

SEQ ID NO: 121033 - DNA, 22 bp, synthetic construct
  misc_feature 1..22: note = chemically synthesized
  source 1..22: mol_type = other DNA
ggttttttgtccttgcgatagt

SEQ ID NO: 121034 - DNA, 22 bp, synthetic construct
  misc_feature 1..22: note = chemically synthesized
  source 1..22: mol_type = other DNA
gttttttgtccttgcgatagtt

SEQ ID NO: 121035 - DNA, 22 bp, synthetic construct
  misc_feature 1..22: note = chemically synthesized
  source 1..22: mol_type = other DNA
tttgtccttgcgatagtttact

SEQ ID NO: 121036 - DNA, 22 bp, synthetic construct
  misc_feature 1..22: note = chemically synthesized
  source 1..22: mol_type = other DNA
ttgtccttgcgatagtttactg

SEQ ID NO: 121037 - DNA, 22 bp, synthetic construct
  misc_feature 1..22: note = chemically synthesized
  source 1..22: mol_type = other DNA
tgtccttgcgatagtttactga

SEQ ID NO: 121038 - DNA, 22 bp, synthetic construct
  misc_feature 1..22: note = chemically synthesized
  source 1..22: mol_type = other DNA
gtccttgcgatagtttactgag

SEQ ID NO: 121039 - DNA, 22 bp, synthetic construct
  misc_feature 1..22: note = chemically synthesized
  source 1..22: mol_type = other DNA
tccttgcgatagtttactgaga

SEQ ID NO: 121040 - DNA, 22 bp, synthetic construct
  misc_feature 1..22: note = chemically synthesized
  source 1..22: mol_type = other DNA
gcgatagtttactgagaatgat

SEQ ID NO: 121041 - DNA, 22 bp, synthetic construct
  misc_feature 1..22: note = chemically synthesized
  source 1..22: mol_type = other DNA
cgatagtttactgagaatgatg

SEQ ID NO: 121042 - DNA, 22 bp, synthetic construct
  misc_feature 1..22: note = chemically synthesized
  source 1..22: mol_type = other DNA
actgagaatgatgatttccaat

SEQ ID NO: 121043 - DNA, 22 bp, synthetic construct
  misc_feature 1..22: note = chemically synthesized
  source 1..22: mol_type = other DNA
ctgagaatgatgatttccaatt

SEQ ID NO: 121044 - DNA, 22 bp, synthetic construct
  misc_feature 1..22: note = chemically synthesized
  source 1..22: mol_type = other DNA
agaatgatgatttccaatttca

SEQ ID NO: 121045 - DNA, 22 bp, synthetic construct
  misc_feature 1..22: note = chemically synthesized
  source 1..22: mol_type = other DNA
ccaatttcatccatgtccctac

SEQ ID NO: 121046 - DNA, 22 bp, synthetic construct
  misc_feature 1..22: note = chemically synthesized
  source 1..22: mol_type = other DNA
caatttcatccatgtccctaca

SEQ ID NO: 121047 - DNA, 22 bp, synthetic construct
  misc_feature 1..22: note = chemically synthesized
  source 1..22: mol_type = other DNA
catccatgtccctacaaaggac

SEQ ID NO: 121048 - DNA, 22 bp, synthetic construct
  misc_feature 1..22: note = chemically synthesized
  source 1..22: mol_type = other DNA
atccatgtccctacaaaggaca

SEQ ID NO: 121049 - DNA, 22 bp, synthetic construct
  misc_feature 1..22: note = chemically synthesized
  source 1..22: mol_type = other DNA
caaaggacatgaactcatcatt

SEQ ID NO: 121050 - DNA, 22 bp, synthetic construct
  misc_feature 1..22: note = chemically synthesized
  source 1..22: mol_type = other DNA
atcatttttatggctgcatagt

SEQ ID NO: 121051 - DNA, 22 bp, synthetic construct
  misc_feature 1..22: note = chemically synthesized
  source 1..22: mol_type = other DNA
ttatggctgcatagtattccat

SEQ ID NO: 121052 - DNA, 22 bp, synthetic construct
  misc_feature 1..22: note = chemically synthesized
  source 1..22: mol_type = other DNA
tatggctgcatagtattccatg

SEQ ID NO: 121053 - DNA, 22 bp, synthetic construct
  misc_feature 1..22: note = chemically synthesized
  source 1..22: mol_type = other DNA
atggctgcatagtattccatgg

SEQ ID NO: 121054 - DNA, 22 bp, synthetic construct
  misc_feature 1..22: note = chemically synthesized
  source 1..22: mol_type = other DNA
tggctgcatagtattccatggt

SEQ ID NO: 121055 - DNA, 22 bp, synthetic construct
  misc_feature 1..22: note = chemically synthesized
  source 1..22: mol_type = other DNA
catagtattccatggtgtatat

SEQ ID NO: 121056 - DNA, 22 bp, synthetic construct
  misc_feature 1..22: note = chemically synthesized
  source 1..22: mol_type = other DNA
catggtgtatatgtgccacatt

SEQ ID NO: 121057 - DNA, 22 bp, synthetic construct
  misc_feature 1..22: note = chemically synthesized
  source 1..22: mol_type = other DNA
tcttaatccagtctatcattgt

SEQ ID NO: 121058 - DNA, 22 bp, synthetic construct
  misc_feature 1..22: note = chemically synthesized
  source 1..22: mol_type = other DNA
cttaatccagtctatcattgtt

SEQ ID NO: 121059 - DNA, 22 bp, synthetic construct
  misc_feature 1..22: note = chemically synthesized
  source 1..22: mol_type = other DNA
ttaatccagtctatcattgttg

SEQ ID NO: 121060 - DNA, 22 bp, synthetic construct
  misc_feature 1..22: note = chemically synthesized
  source 1..22: mol_type = other DNA
aatccagtctatcattgttgga

SEQ ID NO: 121061 - DNA, 22 bp, synthetic construct
  misc_feature 1..22: note = chemically synthesized
  source 1..22: mol_type = other DNA
atccagtctatcattgttggac

SEQ ID NO: 121062 - DNA, 22 bp, synthetic construct
  misc_feature 1..22: note = chemically synthesized
  source 1..22: mol_type = other DNA
tcattgttggacatttgggttg

SEQ ID NO: 121063 - DNA, 22 bp, synthetic construct
  misc_feature 1..22: note = chemically synthesized
  source 1..22: mol_type = other DNA
ttggacatttgggttggttcca

SEQ ID NO: 121064 - DNA, 22 bp, synthetic construct
  misc_feature 1..22: note = chemically synthesized
  source 1..22: mol_type = other DNA
gacatttgggttggttccaagt

SEQ ID NO: 121065 - DNA, 22 bp, synthetic construct
  misc_feature 1..22: note = chemically synthesized
  source 1..22: mol_type = other DNA
gggttggttccaagtctttgct

SEQ ID NO: 121066 - DNA, 22 bp, synthetic construct
  misc_feature 1..22: note = chemically synthesized
  source 1..22: mol_type = other DNA
ggttggttccaagtctttgcta

SEQ ID NO: 121067 - DNA, 22 bp, synthetic construct
  misc_feature 1..22: note = chemically synthesized
  source 1..22: mol_type = other DNA
gttccaagtctttgctattgtg

SEQ ID NO: 121068 - DNA, 22 bp, synthetic construct
  misc_feature 1..22: note = chemically synthesized
  source 1..22: mol_type = other DNA
caagtctttgctattgtgaata

SEQ ID NO: 121069 - DNA, 22 bp, synthetic construct
  misc_feature 1..22: note = chemically synthesized
  source 1..22: mol_type = other DNA
tgctattgtgaatagtaccgca

SEQ ID NO: 121070 - DNA, 22 bp, synthetic construct
  misc_feature 1..22: note = chemically synthesized
  source 1..22: mol_type = other DNA
gctattgtgaatagtaccgcaa

SEQ ID NO: 121071 - DNA, 22 bp, synthetic construct
  misc_feature 1..22: note = chemically synthesized
  source 1..22: mol_type = other DNA
ctattgtgaatagtaccgcaat

SEQ ID NO: 121072 - DNA, 22 bp, synthetic construct
  misc_feature 1..22: note = chemically synthesized
  source 1..22: mol_type = other DNA
ttgtgaatagtaccgcaataaa

SEQ ID NO: 121073 - DNA, 22 bp, synthetic construct
  misc_feature 1..22: note = chemically synthesized
  source 1..22: mol_type = other DNA
tgaatagtaccgcaataaacat

SEQ ID NO: 121074 - DNA, 22 bp, synthetic construct
  misc_feature 1..22: note = chemically synthesized
  source 1..22: mol_type = other DNA
tatagcagcatgatttatattc

SEQ ID NO: 121075 - DNA, 22 bp, synthetic construct
  misc_feature 1..22: note = chemically synthesized
  source 1..22: mol_type = other DNA
atagcagcatgatttatattcc

SEQ ID NO: 121076 - DNA, 22 bp, synthetic construct
  misc_feature 1..22: note = chemically synthesized
  source 1..22: mol_type = other DNA
tagcagcatgatttatattcct

SEQ ID NO: 121077 - DNA, 22 bp, synthetic construct
  misc_feature 1..22: note = chemically synthesized
  source 1..22: mol_type = other DNA
atattcctttgggtatataccc

SEQ ID NO: 121078 - DNA, 22 bp, synthetic construct
  misc_feature 1..22: note = chemically synthesized
  source 1..22: mol_type = other DNA
tattcctttgggtatataccca

SEQ ID NO: 121079 - DNA, 22 bp, synthetic construct
  misc_feature 1..22: note = chemically synthesized
  source 1..22: mol_type = other DNA
ctttgggtatatacccagtaat

SEQ ID NO: 121080 - DNA, 22 bp, synthetic construct
  misc_feature 1..22: note = chemically synthesized
  source 1..22: mol_type = other DNA
tgggtatatacccagtaatggg

SEQ ID NO: 121081 - DNA, 22 bp, synthetic construct
  misc_feature 1..22: note = chemically synthesized
  source 1..22: mol_type = other DNA
gggtatatacccagtaatggga

SEQ ID NO: 121082 - DNA, 22 bp, synthetic construct
  misc_feature 1..22: note = chemically synthesized
  source 1..22: mol_type = other DNA
ggtatatacccagtaatgggat

SEQ ID NO: 121083 - DNA, 22 bp, synthetic construct
  misc_feature 1..22: note = chemically synthesized
  source 1..22: mol_type = other DNA
ggtcaaatggtatttctagttc

SEQ ID NO: 121084 - DNA, 22 bp, synthetic construct
  misc_feature 1..22: note = chemically synthesized
  source 1..22: mol_type = other DNA
ctagttctagatccctgaggaa

SEQ ID NO: 121085 - DNA, 22 bp, synthetic construct
  misc_feature 1..22: note = chemically synthesized
  source 1..22: mol_type = other DNA
tagttctagatccctgaggaat

SEQ ID NO: 121086 - DNA, 22 bp, synthetic construct
  misc_feature 1..22: note = chemically synthesized
  source 1..22: mol_type = other DNA
gttctagatccctgaggaatcg

SEQ ID NO: 121087 - DNA, 22 bp, synthetic construct
  misc_feature 1..22: note = chemically synthesized
  source 1..22: mol_type = other DNA
tagatccctgaggaatcgccac

SEQ ID NO: 121088 - DNA, 22 bp, synthetic construct
  misc_feature 1..22: note = chemically synthesized
  source 1..22: mol_type = other DNA
gatccctgaggaatcgccacac

SEQ ID NO: 121089 - DNA, 22 bp, synthetic construct
  misc_feature 1..22: note = chemically synthesized
  source 1..22: mol_type = other DNA
aggaatcgccacactgacttcc

SEQ ID NO: 121090 - DNA, 22 bp, synthetic construct
  misc_feature 1..22: note = chemically synthesized
  source 1..22: mol_type = other DNA
acttccacaatggttgaactag

SEQ ID NO: 121091 - DNA, 22 bp, synthetic construct
  misc_feature 1..22: note = chemically synthesized
  source 1..22: mol_type = other DNA
ccacaatggttgaactagttta

SEQ ID NO: 121092 - DNA, 22 bp, synthetic construct
  misc_feature 1..22: note = chemically synthesized
  source 1..22: mol_type = other DNA
cacaatggttgaactagtttac

SEQ ID NO: 121093 - DNA, 22 bp, synthetic construct
  misc_feature 1..22: note = chemically synthesized
  source 1..22: mol_type = other DNA
aactagtttacagtcccaccaa

SEQ ID NO: 121094 - DNA, 22 bp, synthetic construct
  misc_feature 1..22: note = chemically synthesized
  source 1..22: mol_type = other DNA
gtttacagtcccaccaagagtg

SEQ ID NO: 121095 - DNA, 22 bp, synthetic construct
  misc_feature 1..22: note = chemically synthesized
  source 1..22: mol_type = other DNA
acagtcccaccaagagtgtaaa

SEQ ID NO: 121096 - DNA, 22 bp, synthetic construct
  misc_feature 1..22: note = chemically synthesized
  source 1..22: mol_type = other DNA
cagtcccaccaagagtgtaaaa

SEQ ID NO: 121097 - DNA, 22 bp, synthetic construct
  misc_feature 1..22: note = chemically synthesized
  source 1..22: mol_type = other DNA
ctatttctccacatcctctcca

SEQ ID NO: 121098 - DNA, 22 bp, synthetic construct
  misc_feature 1..22: note = chemically synthesized
  source 1..22: mol_type = other DNA
tttctccacatcctctccagca

SEQ ID NO: 121099 - DNA, 22 bp, synthetic construct
  misc_feature 1..22: note = chemically synthesized
  source 1..22: mol_type = other DNA
ctccacatcctctccagcacct

SEQ ID NO: 121100 - DNA, 22 bp, synthetic construct
  misc_feature 1..22: note = chemically synthesized
  source 1..22: mol_type = other DNA
tccacatcctctccagcacctg

SEQ ID NO: 121101 - DNA, 22 bp, synthetic construct
  misc_feature 1..22: note = chemically synthesized
  source 1..22: mol_type = other DNA
cacatcctctccagcacctgtt

SEQ ID NO: 121102 - DNA, 22 bp, synthetic construct
  misc_feature 1..22: note = chemically synthesized
  source 1..22: mol_type = other DNA
tccagcacctgttgtttcctga

SEQ ID NO: 121103 - DNA, 22 bp, synthetic construct
  misc_feature 1..22: note = chemically synthesized
  source 1..22: mol_type = other DNA
cagcacctgttgtttcctgact

SEQ ID NO: 121104 - DNA, 22 bp, synthetic construct
  misc_feature 1..22: note = chemically synthesized
  source 1..22: mol_type = other DNA
ttgtttcctgactttttaatga

SEQ ID NO: 121105 - DNA, 22 bp, synthetic construct
  misc_feature 1..22: note = chemically synthesized
  source 1..22: mol_type = other DNA
tttcctgactttttaatgattg

SEQ ID NO: 121106 - DNA, 22 bp, synthetic construct
  misc_feature 1..22: note = chemically synthesized
  source 1..22: mol_type = other DNA
cctgactttttaatgattgcca

SEQ ID NO: 121107 - DNA, 22 bp, synthetic construct
  misc_feature 1..22: note = chemically synthesized
  source 1..22: mol_type = other DNA
ctgactttttaatgattgccat

SEQ ID NO: 121108 - DNA, 22 bp, synthetic construct
  misc_feature 1..22: note = chemically synthesized
  source 1..22: mol_type = other DNA
actttttaatgattgccattct

SEQ ID NO: 121109 - DNA, 22 bp, synthetic construct
  misc_feature 1..22: note = chemically synthesized
  source 1..22: mol_type = other DNA
tttaatgattgccattctaact

SEQ ID NO: 121110 - DNA, 22 bp, synthetic construct
  misc_feature 1..22: note = chemically synthesized
  source 1..22: mol_type = other DNA
ttaatgattgccattctaactg

SEQ ID NO: 121111 - DNA, 22 bp, synthetic construct
  misc_feature 1..22: note = chemically synthesized
  source 1..22: mol_type = other DNA
taatgattgccattctaactgg

SEQ ID NO: 121112 - DNA, 22 bp, synthetic construct
  misc_feature 1..22: note = chemically synthesized
  source 1..22: mol_type = other DNA
aatgattgccattctaactggt

SEQ ID NO: 121113 - DNA, 22 bp, synthetic construct
  misc_feature 1..22: note = chemically synthesized
  source 1..22: mol_type = other DNA
atgattgccattctaactggta

SEQ ID NO: 121114 - DNA, 22 bp, synthetic construct
  misc_feature 1..22: note = chemically synthesized
  source 1..22: mol_type = other DNA
ccattctaactggtatgagatg

SEQ ID NO: 121115 - DNA, 22 bp, synthetic construct
  misc_feature 1..22: note = chemically synthesized
  source 1..22: mol_type = other DNA
taactggtatgagatggtatct

SEQ ID NO: 121116 - DNA, 22 bp, synthetic construct
  misc_feature 1..22: note = chemically synthesized
  source 1..22: mol_type = other DNA
actggtatgagatggtatctca

SEQ ID NO: 121117 - DNA, 22 bp, synthetic construct
  misc_feature 1..22: note = chemically synthesized
  source 1..22: mol_type = other DNA
gtatgagatggtatctcattgt

SEQ ID NO: 121118 - DNA, 22 bp, synthetic construct
  misc_feature 1..22: note = chemically synthesized
  source 1..22: mol_type = other DNA
attgtggttttgatttgcattt

SEQ ID NO: 121119 - DNA, 22 bp, synthetic construct
  misc_feature 1..22: note = chemically synthesized
  source 1..22: mol_type = other DNA
tggttttgatttgcatttctct

SEQ ID NO: 121120 - DNA, 22 bp, synthetic construct
  misc_feature 1..22: note = chemically synthesized
  source 1..22: mol_type = other DNA
tgatttgcatttctctgatggc

SEQ ID NO: 121121 - DNA, 22 bp, synthetic construct
  misc_feature 1..22: note = chemically synthesized
  source 1..22: mol_type = other DNA
gatttgcatttctctgatggcc

SEQ ID NO: 121122 - DNA, 22 bp, synthetic construct
  misc_feature 1..22: note = chemically synthesized
  source 1..22: mol_type = other DNA
atttgcatttctctgatggcca

SEQ ID NO: 121123 - DNA, 22 bp, synthetic construct
  misc_feature 1..22: note = chemically synthesized
  source 1..22: mol_type = other DNA
gcatttctctgatggccagtga

SEQ ID NO: 121124 - DNA, 22 bp, synthetic construct
  misc_feature 1..22: note = chemically synthesized
  source 1..22: mol_type = other DNA
catttctctgatggccagtgat

SEQ ID NO: 121125 - DNA, 22 bp, synthetic construct
  misc_feature 1..22: note = chemically synthesized
  source 1..22: mol_type = other DNA
ctctgatggccagtgatgatga

SEQ ID NO: 121126 - DNA, 22 bp, synthetic construct
  misc_feature 1..22: note = chemically synthesized
  source 1..22: mol_type = other DNA
tctgatggccagtgatgatgag

SEQ ID NO: 121127 - DNA, 22 bp, synthetic construct
  misc_feature 1..22: note = chemically synthesized
  source 1..22: mol_type = other DNA
tgatggccagtgatgatgagca

SEQ ID NO: 121128 - DNA, 22 bp, synthetic construct
  misc_feature 1..22: note = chemically synthesized
  source 1..22: mol_type = other DNA
atggccagtgatgatgagcatt

SEQ ID NO: 121129 - DNA, 22 bp, synthetic construct
  misc_feature 1..22: note = chemically synthesized
  source 1..22: mol_type = other DNA
tttcatgtgtcttttggttgca

SEQ ID NO: 121130 - DNA, 22 bp, synthetic construct
  misc_feature 1..22: note = chemically synthesized
  source 1..22: mol_type = other DNA
ttcatgtgtcttttggttgcat

SEQ ID NO: 121131 - DNA, 22 bp, synthetic construct
  misc_feature 1..22: note = chemically synthesized
  source 1..22: mol_type = other DNA
tcatgtgtcttttggttgcata

SEQ ID NO: 121132 - DNA, 22 bp, synthetic construct
  misc_feature 1..22: note = chemically synthesized
  source 1..22: mol_type = other DNA
catgtgtcttttggttgcataa

SEQ ID NO: 121133 - DNA, 22 bp, synthetic construct
  misc_feature 1..22: note = chemically synthesized
  source 1..22: mol_type = other DNA
atgtgtcttttggttgcataaa

SEQ ID NO: 121134 - DNA, 22 bp, synthetic construct
  misc_feature 1..22: note = chemically synthesized
  source 1..22: mol_type = other DNA
ttggttgcataaatgttttctt

SEQ ID NO: 121135 - DNA, 22 bp, synthetic construct
  misc_feature 1..22: note = chemically synthesized
  source 1..22: mol_type = other DNA
tggttgcataaatgttttcttt

SEQ ID NO: 121136 - DNA, 22 bp, synthetic construct
  misc_feature 1..22: note = chemically synthesized
  source 1..22: mol_type = other DNA
ggttgcataaatgttttctttt

SEQ ID NO: 121137 - DNA, 22 bp, synthetic construct
  misc_feature 1..22: note = chemically synthesized
  source 1..22: mol_type = other DNA
gttgcataaatgttttcttttg

SEQ ID NO: 121138 - DNA, 22 bp, synthetic construct
  misc_feature 1..22: note = chemically synthesized
  source 1..22: mol_type = other DNA
cataaatgttttcttttgagaa

SEQ ID NO: 121139 - DNA, 22 bp, synthetic construct
  misc_feature 1..22: note = chemically synthesized
  source 1..22: mol_type = other DNA
tcttttgagaagtgtctgttca

SEQ ID NO: 121140 - DNA, 22 bp, synthetic construct
  misc_feature 1..22: note = chemically synthesized
  source 1..22: mol_type = other DNA
cttttgagaagtgtctgttcat

SEQ ID NO: 121141 - DNA, 22 bp, synthetic construct
  misc_feature 1..22: note = chemically synthesized
  source 1..22: mol_type = other DNA
ttttgagaagtgtctgttcata

SEQ ID NO: 121142 - DNA, 22 bp, synthetic construct
  misc_feature 1..22: note = chemically synthesized
  source 1..22: mol_type = other DNA
ttgagaagtgtctgttcatatc

SEQ ID NO: 121143 - DNA, 22 bp, synthetic construct
  misc_feature 1..22: note = chemically synthesized
  source 1..22: mol_type = other DNA
tgagaagtgtctgttcatatcc

SEQ ID NO: 121144 - DNA, 22 bp, synthetic construct
  misc_feature 1..22: note = chemically synthesized
  source 1..22: mol_type = other DNA
gagaagtgtctgttcatatcct

SEQ ID NO: 121145 - DNA, 22 bp, synthetic construct
  misc_feature 1..22: note = chemically synthesized
  source 1..22: mol_type = other DNA
agaagtgtctgttcatatcctt

SEQ ID NO: 121146 - DNA, 22 bp, synthetic construct
  misc_feature 1..22: note = chemically synthesized
  source 1..22: mol_type = other DNA
ttcatatcctttgcccacttgt

SEQ ID NO: 121147 - DNA, 22 bp, synthetic construct
  misc_feature 1..22: note = chemically synthesized
  source 1..22: mol_type = other DNA
atatcctttgcccacttgttga

SEQ ID NO: 121148 - DNA, 22 bp, synthetic construct
  misc_feature 1..22: note = chemically synthesized
  source 1..22: mol_type = other DNA
tgcccacttgttgatggggctg

SEQ ID NO: 121149 - DNA, 22 bp, synthetic construct
  misc_feature 1..22: note = chemically synthesized
  source 1..22: mol_type = other DNA
gcccacttgttgatggggctgt

SEQ ID NO: 121150 - DNA, 22 bp, synthetic construct
  misc_feature 1..22: note = chemically synthesized
  source 1..22: mol_type = other DNA
cccacttgttgatggggctgtt

SEQ ID NO: 121151 - DNA, 22 bp, synthetic construct
  misc_feature 1..22: note = chemically synthesized
  source 1..22: mol_type = other DNA
gttgatggggctgtttgttttt

SEQ ID NO: 121152 - DNA, 22 bp, synthetic construct
  misc_feature 1..22: note = chemically synthesized
  source 1..22: mol_type = other DNA
ttgatggggctgtttgtttttt

SEQ ID NO: 121153 - DNA, 22 bp, synthetic construct
  misc_feature 1..22: note = chemically synthesized
  source 1..22: mol_type = other DNA
atggggctgtttgtttttttct

SEQ ID NO: 121154 - DNA, 22 bp, synthetic construct
  misc_feature 1..22: note = chemically synthesized
  source 1..22: mol_type = other DNA
tttgtttttttcttgtaaattt

SEQ ID NO: 121155 - DNA, 22 bp, synthetic construct
  misc_feature 1..22: note = chemically synthesized
  source 1..22: mol_type = other DNA
gtttttttcttgtaaatttgtt

SEQ ID NO: 121156 - DNA, 22 bp, synthetic construct
  misc_feature 1..22: note = chemically synthesized
  source 1..22: mol_type = other DNA
tttttttcttgtaaatttgttt

SEQ ID NO: 121157 - DNA, 22 bp, synthetic construct
  misc_feature 1..22: note = chemically synthesized
  source 1..22: mol_type = other DNA
ttttcttgtaaatttgtttgag

SEQ ID NO: 121158 - DNA, 22 bp, synthetic construct
  misc_feature 1..22: note = chemically synthesized
  source 1..22: mol_type = other DNA
tttcttgtaaatttgtttgagt

SEQ ID NO: 121159 - DNA, 22 bp, synthetic construct
  misc_feature 1..22: note = chemically synthesized
  source 1..22: mol_type = other DNA
ttcttgtaaatttgtttgagtt

SEQ ID NO: 121160 - DNA, 22 bp, synthetic construct
  misc_feature 1..22: note = chemically synthesized
  source 1..22: mol_type = other DNA
tcttgtaaatttgtttgagttc

SEQ ID NO: 121161 - DNA, 22 bp, synthetic construct
  misc_feature 1..22: note = chemically synthesized
  source 1..22: mol_type = other DNA
cttgtaaatttgtttgagttca

SEQ ID NO: 121162 - DNA, 22 bp, synthetic construct
  misc_feature 1..22: note = chemically synthesized
  source 1..22: mol_type = other DNA
ttgtaaatttgtttgagttcat

SEQ ID NO: 121163 - DNA, 22 bp, synthetic construct
  misc_feature 1..22: note = chemically synthesized
  source 1..22: mol_type = other DNA
gtaaatttgtttgagttcatta

SEQ ID NO: 121164 - DNA, 22 bp, synthetic construct
  misc_feature 1..22: note = chemically synthesized
  source 1..22: mol_type = other DNA
taaatttgtttgagttcattat

SEQ ID NO: 121165 - DNA, 22 bp, synthetic construct
  misc_feature 1..22: note = chemically synthesized
  source 1..22: mol_type = other DNA
gtttgagttcattatagattct

SEQ ID NO: 121166 - DNA, 22 bp, synthetic construct
  misc_feature 1..22: note = chemically synthesized
  source 1..22: mol_type = other DNA
tttgagttcattatagattctg

SEQ ID NO: 121167 - DNA, 22 bp, synthetic construct
  misc_feature 1..22: note = chemically synthesized
  source 1..22: mol_type = other DNA
gagttcattatagattctggat

SEQ ID NO: 121168 - DNA, 22 bp, synthetic construct
  misc_feature 1..22: note = chemically synthesized
  source 1..22: mol_type = other DNA
agttcattatagattctggata

SEQ ID NO: 121169 - DNA, 22 bp, synthetic construct
  misc_feature 1..22: note = chemically synthesized
  source 1..22: mol_type = other DNA
attatagattctggatattagc

SEQ ID NO: 121170 - DNA, 22 bp, synthetic construct
  misc_feature 1..22: note = chemically synthesized
  source 1..22: mol_type = other DNA
tagattctggatattagccctt

SEQ ID NO: 121171 - DNA, 22 bp, synthetic construct
  misc_feature 1..22: note = chemically synthesized
  source 1..22: mol_type = other DNA
tggatattagccctttgtcaga

SEQ ID NO: 121172 - DNA, 22 bp, synthetic construct
  misc_feature 1..22: note = chemically synthesized
  source 1..22: mol_type = other DNA
gatattagccctttgtcagatg

SEQ ID NO: 121173 - DNA, 22 bp, synthetic construct
  misc_feature 1..22: note = chemically synthesized
  source 1..22: mol_type = other DNA
gccctttgtcagatgagtaggt

SEQ ID NO: 121174 - DNA, 22 bp, synthetic construct
  misc_feature 1..22: note = chemically synthesized
  source 1..22: mol_type = other DNA
tgtcagatgagtaggttgtgaa

SEQ ID NO: 121175 - DNA, 22 bp, synthetic construct
  misc_feature 1..22: note = chemically synthesized
  source 1..22: mol_type = other DNA
gtcagatgagtaggttgtgaaa

SEQ ID NO: 121176 - DNA, 22 bp, synthetic construct
  misc_feature 1..22: note = chemically synthesized
  source 1..22: mol_type = other DNA
tcagatgagtaggttgtgaaaa

SEQ ID NO: 121177 - DNA, 22 bp, synthetic construct
  misc_feature 1..22: note = chemically synthesized
  source 1..22: mol_type = other DNA
tgaaaattttctcccattgtgt

SEQ ID NO: 121178 - DNA, 22 bp, synthetic construct
  misc_feature 1..22: note = chemically synthesized
  source 1..22: mol_type = other DNA
tctcccattgtgtaggttgcct

SEQ ID NO: 121179 - DNA, 22 bp, synthetic construct
  misc_feature 1..22: note = chemically synthesized
  source 1..22: mol_type = other DNA
ctcccattgtgtaggttgcctg

SEQ ID NO: 121180 - DNA, 22 bp, synthetic construct
  misc_feature 1..22: note = chemically synthesized
  source 1..22: mol_type = other DNA
tcccattgtgtaggttgcctgt

SEQ ID NO: 121181 - DNA, 22 bp, synthetic construct
  misc_feature 1..22: note = chemically synthesized
  source 1..22: mol_type = other DNA
ccattgtgtaggttgcctgttc

SEQ ID NO: 121182 - DNA, 22 bp, synthetic construct
  misc_feature 1..22: note = chemically synthesized
  source 1..22: mol_type = other DNA
tgtaggttgcctgttcactctg

SEQ ID NO: 121183 - DNA, 22 bp, synthetic construct
  misc_feature 1..22: note = chemically synthesized
  source 1..22: mol_type = other DNA
cctgttcactctgatggtagtt

SEQ ID NO: 121184 - DNA, 22 bp, synthetic construct
  misc_feature 1..22: note = chemically synthesized
  source 1..22: mol_type = other DNA
ttcactctgatggtagtttctt

SEQ ID NO: 121185 - DNA, 22 bp, synthetic construct
  misc_feature 1..22: note = chemically synthesized
  source 1..22: mol_type = other DNA
actctgatggtagtttctttag

SEQ ID NO: 121186 - DNA, 22 bp, synthetic construct
  misc_feature 1..22: note = chemically synthesized
  source 1..22: mol_type = other DNA
tgatggtagtttctttagctgt

SEQ ID NO: 121187 - DNA, 22 bp, synthetic construct
  misc_feature 1..22: note = chemically synthesized
  source 1..22: mol_type = other DNA
atggtagtttctttagctgtgc

SEQ ID NO: 121188 - DNA, 22 bp, synthetic construct
  misc_feature 1..22: note = chemically synthesized
  source 1..22: mol_type = other DNA
ctttagctgtgcagaagctctt

SEQ ID NO: 121189 - DNA, 22 bp, synthetic construct
  misc_feature 1..22: note = chemically synthesized
  source 1..22: mol_type = other DNA
tttagctgtgcagaagctcttt

SEQ ID NO: 121190 - DNA, 22 bp, synthetic construct
  misc_feature 1..22: note = chemically synthesized
  source 1..22: mol_type = other DNA
tagctgtgcagaagctctttag

SEQ ID NO: 121191 - DNA, 22 bp, synthetic construct
  misc_feature 1..22: note = chemically synthesized
  source 1..22: mol_type = other DNA
agctgtgcagaagctctttagt

SEQ ID NO: 121192 - DNA, 22 bp, synthetic construct
  misc_feature 1..22: note = chemically synthesized
  source 1..22: mol_type = other DNA
gctgtgcagaagctctttagtt

SEQ ID NO: 121193 - DNA, 22 bp, synthetic construct
  misc_feature 1..22: note = chemically synthesized
  source 1..22: mol_type = other DNA
tgcagaagctctttagtttcat

SEQ ID NO: 121194 - DNA, 22 bp, synthetic construct
  misc_feature 1..22: note = chemically synthesized
  source 1..22: mol_type = other DNA
tttagtttcattagatcccatt

SEQ ID NO: 121195 - DNA, 22 bp, synthetic construct
  misc_feature 1..22: note = chemically synthesized
  source 1..22: mol_type = other DNA
tagtttcattagatcccattag

SEQ ID NO: 121196 - DNA, 22 bp, synthetic construct
  misc_feature 1..22: note = chemically synthesized
  source 1..22: mol_type = other DNA
agtttcattagatcccattagt

SEQ ID NO: 121197 - DNA, 22 bp, synthetic construct
  misc_feature 1..22: note = chemically synthesized
  source 1..22: mol_type = other DNA
gtttcattagatcccattagtg

SEQ ID NO: 121198 - DNA, 22 bp, synthetic construct
  misc_feature 1..22: note = chemically synthesized
  source 1..22: mol_type = other DNA
cattagatcccattagtgaatt

SEQ ID NO: 121199 - DNA, 22 bp, synthetic construct
  misc_feature 1..22: note = chemically synthesized
  source 1..22: mol_type = other DNA
attagatcccattagtgaattt

SEQ ID NO: 121200 - DNA, 22 bp, synthetic construct
  misc_feature 1..22: note = chemically synthesized
  source 1..22: mol_type = other DNA
gatcccattagtgaattttggc

SEQ ID NO: 121201 - DNA, 22 bp, synthetic construct
  misc_feature 1..22: note = chemically synthesized
  source 1..22: mol_type = other DNA
gtgaattttggcttttgttgcc

SEQ ID NO: 121202 - DNA, 22 bp, synthetic construct
  misc_feature 1..22: note = chemically synthesized
  source 1..22: mol_type = other DNA
tggcttttgttgccatcgcttt

SEQ ID NO: 121203 - DNA, 22 bp, synthetic construct
  misc_feature 1..22: note = chemically synthesized
  source 1..22: mol_type = other DNA
ggcttttgttgccatcgctttt

SEQ ID NO: 121204 - DNA, 22 bp, synthetic construct
  misc_feature 1..22: note = chemically synthesized
  source 1..22: mol_type = other DNA
gcttttgttgccatcgcttttg

SEQ ID NO: 121205 - DNA, 22 bp, synthetic construct
  misc_feature 1..22: note = chemically synthesized
  source 1..22: mol_type = other DNA
ttgttgccatcgcttttggtgt

SEQ ID NO: 121206 - DNA, 22 bp, synthetic construct
  misc_feature 1..22: note = chemically synthesized
  source 1..22: mol_type = other DNA
tgttgccatcgcttttggtgtt

SEQ ID NO: 121207 - DNA, 22 bp, synthetic construct
  misc_feature 1..22: note = chemically synthesized
  source 1..22: mol_type = other DNA
gttgccatcgcttttggtgttt

SEQ ID NO: 121208 - DNA, 22 bp, synthetic construct
  misc_feature 1..22: note = chemically synthesized
  source 1..22: mol_type = other DNA
ttgccatcgcttttggtgtttt

SEQ ID NO: 121209 - DNA, 22 bp, synthetic construct
  misc_feature 1..22: note = chemically synthesized
  source 1..22: mol_type = other DNA
ccatcgcttttggtgttttaga

SEQ ID NO: 121210 - DNA, 22 bp, synthetic construct
  misc_feature 1..22: note = chemically synthesized
  source 1..22: mol_type = other DNA
ttggtgttttagacatgaagtc

SEQ ID NO: 121211 - DNA, 22 bp, synthetic construct
  misc_feature 1..22: note = chemically synthesized
  source 1..22: mol_type = other DNA
tggtgttttagacatgaagtcc

SEQ ID NO: 121212 - DNA, 22 bp, synthetic construct
  misc_feature 1..22: note = chemically synthesized
  source 1..22: mol_type = other DNA
ggtgttttagacatgaagtcct

SEQ ID NO: 121213 - DNA, 22 bp, synthetic construct
  misc_feature 1..22: note = chemically synthesized
  source 1..22: mol_type = other DNA
gtgttttagacatgaagtcctt

SEQ ID NO: 121214 - DNA, 22 bp, synthetic construct
  misc_feature 1..22: note = chemically synthesized
  source 1..22: mol_type = other DNA
tagacatgaagtccttgcccat

SEQ ID NO: 121215 - DNA, 22 bp, synthetic construct
  misc_feature 1..22: note = chemically synthesized
  source 1..22: mol_type = other DNA
agacatgaagtccttgcccatg

SEQ ID NO: 121216 - DNA, 22 bp, synthetic construct
  misc_feature 1..22: note = chemically synthesized
  source 1..22: mol_type = other DNA
gacatgaagtccttgcccatgc

SEQ ID NO: 121217 - DNA, 22 bp, synthetic construct
  misc_feature 1..22: note = chemically synthesized
  source 1..22: mol_type = other DNA
gcccatgcctatgtcctgaatg

SEQ ID NO: 121218 - DNA, 22 bp, synthetic construct
  misc_feature 1..22: note = chemically synthesized
  source 1..22: mol_type = other DNA
cccatgcctatgtcctgaatgg

SEQ ID NO: 121219 - DNA, 22 bp, synthetic construct
  misc_feature 1..22: note = chemically synthesized
  source 1..22: mol_type = other DNA
tgtcctgaatggtaatgcctgc

SEQ ID NO: 121220 - DNA, 22 bp, synthetic construct
  misc_feature 1..22: note = chemically synthesized
  source 1..22: mol_type = other DNA
aatggtaatgcctgcgttttct

SEQ ID NO: 121221 - DNA, 22 bp, synthetic construct
  misc_feature 1..22: note = chemically synthesized
  source 1..22: mol_type = other DNA
cgttttcttctagggtttttat

SEQ ID NO: 121222 - DNA, 22 bp, synthetic construct
  misc_feature 1..22: note = chemically synthesized
  source 1..22: mol_type = other DNA
tcttctagggtttttatggttt

SEQ ID NO: 121223 - DNA, 22 bp, synthetic construct
  misc_feature 1..22: note = chemically synthesized
  source 1..22: mol_type = other DNA
cttctagggtttttatggtttt

SEQ ID NO: 121224 - DNA, 22 bp, synthetic construct
  misc_feature 1..22: note = chemically synthesized
  source 1..22: mol_type = other DNA
ttctagggtttttatggtttta

SEQ ID NO: 121225 - DNA, 22 bp, synthetic construct
  misc_feature 1..22: note = chemically synthesized
  source 1..22: mol_type = other DNA
ctagggtttttatggttttagg

SEQ ID NO: 121226 - DNA, 22 bp, synthetic construct
  misc_feature 1..22: note = chemically synthesized
  source 1..22: mol_type = other DNA
tagggtttttatggttttaggt

SEQ ID NO: 121227 - DNA, 22 bp, synthetic construct
  misc_feature 1..22: note = chemically synthesized
  source 1..22: mol_type = other DNA
gggtttttatggttttaggtct

SEQ ID NO: 121228 - DNA, 22 bp, synthetic construct
  misc_feature 1..22: note = chemically synthesized
  source 1..22: mol_type = other DNA
ttatggttttaggtctaatgtt

SEQ ID NO: 121229 - DNA, 22 bp, synthetic construct
  misc_feature 1..22: note = chemically synthesized
  source 1..22: mol_type = other DNA
tatggttttaggtctaatgttt

SEQ ID NO: 121230 - DNA, 22 bp, synthetic construct
  misc_feature 1..22: note = chemically synthesized
  source 1..22: mol_type = other DNA
atggttttaggtctaatgttta

SEQ ID NO: 121231 - DNA, 22 bp, synthetic construct
  misc_feature 1..22: note = chemically synthesized
  source 1..22: mol_type = other DNA
tggttttaggtctaatgtttaa

SEQ ID NO: 121232 - DNA, 22 bp, synthetic construct
  misc_feature 1..22: note = chemically synthesized
  source 1..22: mol_type = other DNA
taggtctaatgtttaagtcttt

SEQ ID NO: 121233 - DNA, 22 bp, synthetic construct
  misc_feature 1..22: note = chemically synthesized
  source 1..22: mol_type = other DNA
aggtctaatgtttaagtcttta

SEQ ID NO: 121234 - DNA, 22 bp, synthetic construct
  misc_feature 1..22: note = chemically synthesized
  source 1..22: mol_type = other DNA
ggtctaatgtttaagtctttaa

SEQ ID NO: 121235 - DNA, 22 bp, synthetic construct
  misc_feature 1..22: note = chemically synthesized
  source 1..22: mol_type = other DNA
atgtttaagtctttaatccatc

SEQ ID NO: 121236 - DNA, 22 bp, synthetic construct
  misc_feature 1..22: note = chemically synthesized
  source 1..22: mol_type = other DNA
aagtctttaatccatcttgaat

SEQ ID NO: 121237 - DNA, 22 bp, synthetic construct
  misc_feature 1..22: note = chemically synthesized
  source 1..22: mol_type = other DNA
agtctttaatccatcttgaatt

SEQ ID NO: 121238 - DNA, 22 bp, synthetic construct
  misc_feature 1..22: note = chemically synthesized
  source 1..22: mol_type = other DNA
taatccatcttgaattaatttt

SEQ ID NO: 121239 - DNA, 22 bp, synthetic construct
  misc_feature 1..22: note = chemically synthesized
  source 1..22: mol_type = other DNA
aatccatcttgaattaattttt

SEQ ID NO: 121240 - DNA, 22 bp, synthetic construct
  misc_feature 1..22: note = chemically synthesized
  source 1..22: mol_type = other DNA
atccatcttgaattaatttttg

SEQ ID NO: 121241 - DNA, 22 bp, synthetic construct
  misc_feature 1..22: note = chemically synthesized
  source 1..22: mol_type = other DNA
gaattaatttttgtataaggtg

SEQ ID NO: 121242 - DNA, 22 bp, synthetic construct
  misc_feature 1..22: note = chemically synthesized
  source 1..22: mol_type = other DNA
aattaatttttgtataaggtgt

SEQ ID NO: 121243 - DNA, 22 bp, synthetic construct
  misc_feature 1..22: note = chemically synthesized
  source 1..22: mol_type = other DNA
atttttgtataaggtgtaagga

SEQ ID NO: 121244 - DNA, 22 bp, synthetic construct
  misc_feature 1..22: note = chemically synthesized
  source 1..22: mol_type = other DNA
ttgtataaggtgtaaggaaggg

SEQ ID NO: 121245 - DNA, 22 bp, synthetic construct
  misc_feature 1..22: note = chemically synthesized
  source 1..22: mol_type = other DNA
tgtataaggtgtaaggaaggga

SEQ ID NO: 121246 - DNA, 22 bp, synthetic construct
  misc_feature 1..22: note = chemically synthesized
  source 1..22: mol_type = other DNA
gtataaggtgtaaggaagggat

SEQ ID NO: 121247 - DNA, 22 bp, synthetic construct
  misc_feature 1..22: note = chemically synthesized
  source 1..22: mol_type = other DNA
tataaggtgtaaggaagggatc

SEQ ID NO: 121248 - DNA, 22 bp, synthetic construct
  misc_feature 1..22: note = chemically synthesized
  source 1..22: mol_type = other DNA
cagcattctacatatggctagc

SEQ ID NO: 121249 - DNA, 22 bp, synthetic construct
  misc_feature 1..22: note = chemically synthesized
  source 1..22: mol_type = other DNA
agcattctacatatggctagcc

SEQ ID NO: 121250 - DNA, 22 bp, synthetic construct
  misc_feature 1..22: note = chemically synthesized
  source 1..22: mol_type = other DNA
tacatatggctagccagttctc

SEQ ID NO: 121251 - DNA, 22 bp, synthetic construct
  misc_feature 1..22: note = chemically synthesized
  source 1..22: mol_type = other DNA
catatggctagccagttctccc

SEQ ID NO: 121252 - DNA, 22 bp, synthetic construct
  misc_feature 1..22: note = chemically synthesized
  source 1..22: mol_type = other DNA
gccagttctcccagcaccattt

SEQ ID NO: 121253 - DNA, 22 bp, synthetic construct
  misc_feature 1..22: note = chemically synthesized
  source 1..22: mol_type = other DNA
tcccagcaccatttattaaata

SEQ ID NO: 121254 - DNA, 22 bp, synthetic construct
  misc_feature 1..22: note = chemically synthesized
  source 1..22: mol_type = other DNA
ccagcaccatttattaaatagg

SEQ ID NO: 121255 - DNA, 22 bp, synthetic construct
  misc_feature 1..22: note = chemically synthesized
  source 1..22: mol_type = other DNA
attaaatagggaatcctttccc

SEQ ID NO: 121256 - DNA, 22 bp, synthetic construct
  misc_feature 1..22: note = chemically synthesized
  source 1..22: mol_type = other DNA
ttaaatagggaatcctttcccc

SEQ ID NO: 121257 - DNA, 22 bp, synthetic construct
  misc_feature 1..22: note = chemically synthesized
  source 1..22: mol_type = other DNA
aatagggaatcctttccccatt

SEQ ID NO: 121258 - DNA, 22 bp, synthetic construct
  misc_feature 1..22: note = chemically synthesized
  source 1..22: mol_type = other DNA
tccccatttcttgtttttctca

SEQ ID NO: 121259 - DNA, 22 bp, synthetic construct
  misc_feature 1..22: note = chemically synthesized
  source 1..22: mol_type = other DNA
ccccatttcttgtttttctcag

SEQ ID NO: 121260 - DNA, 22 bp, synthetic construct
  misc_feature 1..22: note = chemically synthesized
  source 1..22: mol_type = other DNA
cccatttcttgtttttctcagg

SEQ ID NO: 121261 - DNA, 22 bp, synthetic construct
  misc_feature 1..22: note = chemically synthesized
  source 1..22: mol_type = other DNA
cttgtttttctcaggtttttca

SEQ ID NO: 121262 - DNA, 22 bp, synthetic construct
  misc_feature 1..22: note = chemically synthesized
  source 1..22: mol_type = other DNA
ttgtttttctcaggtttttcaa

SEQ ID NO: 121263 - DNA, 22 bp, synthetic construct
  misc_feature 1..22: note = chemically synthesized
  source 1..22: mol_type = other DNA
gtttttctcaggtttttcaaag

SEQ ID NO: 121264 - DNA, 22 bp, synthetic construct
  misc_feature 1..22: note = chemically synthesized
  source 1..22: mol_type = other DNA
tttttctcaggtttttcaaaga

SEQ ID NO: 121265 - DNA, 22 bp, synthetic construct
  misc_feature 1..22: note = chemically synthesized
  source 1..22: mol_type = other DNA
ttctcaggtttttcaaagatca

SEQ ID NO: 121266 - DNA, 22 bp, synthetic construct
  misc_feature 1..22: note = chemically synthesized
  source 1..22: mol_type = other DNA
tctcaggtttttcaaagatcag

SEQ ID NO: 121267 - DNA, 22 bp, synthetic construct
  misc_feature 1..22: note = chemically synthesized
  source 1..22: mol_type = other DNA
ctcaggtttttcaaagatcaga

SEQ ID NO: 121268 - DNA, 22 bp, synthetic construct
  misc_feature 1..22: note = chemically synthesized
  source 1..22: mol_type = other DNA
tcaggtttttcaaagatcagat

SEQ ID NO: 121269 - DNA, 22 bp, synthetic construct
  misc_feature 1..22: note = chemically synthesized
  source 1..22: mol_type = other DNA
aggtttttcaaagatcagatag

SEQ ID NO: 121270 - DNA, 22 bp, synthetic construct
  misc_feature 1..22: note = chemically synthesized
  source 1..22: mol_type = other DNA
ttcaaagatcagatagttgtag

SEQ ID NO: 121271 - DNA, 22 bp, synthetic construct
  misc_feature 1..22: note = chemically synthesized
  source 1..22: mol_type = other DNA
tcaaagatcagatagttgtaga

SEQ ID NO: 121272 - DNA, 22 bp, synthetic construct
  misc_feature 1..22: note = chemically synthesized
  source 1..22: mol_type = other DNA
caaagatcagatagttgtagat

SEQ ID NO: 121273 - DNA, 22 bp, synthetic construct
  misc_feature 1..22: note = chemically synthesized
  source 1..22: mol_type = other DNA
aaagatcagatagttgtagata

SEQ ID NO: 121274 - DNA, 22 bp, synthetic construct
  misc_feature 1..22: note = chemically synthesized
  source 1..22: mol_type = other DNA
tagatatgcgtcgttatttctg

SEQ ID NO: 121275 - DNA, 22 bp, synthetic construct
  misc_feature 1..22: note = chemically synthesized
  source 1..22: mol_type = other DNA
tttctgagggctctgttctgtt

SEQ ID NO: 121276 - DNA, 22 bp, synthetic construct
  misc_feature 1..22: note = chemically synthesized
  source 1..22: mol_type = other DNA
ctgagggctctgttctgttcca

SEQ ID NO: 121277 - DNA, 22 bp, synthetic construct
  misc_feature 1..22: note = chemically synthesized
  source 1..22: mol_type = other DNA
tgagggctctgttctgttccat

SEQ ID NO: 121278 - DNA, 22 bp, synthetic construct
  misc_feature 1..22: note = chemically synthesized
  source 1..22: mol_type = other DNA
agggctctgttctgttccattg

SEQ ID NO: 121279 - DNA, 22 bp, synthetic construct
  misc_feature 1..22: note = chemically synthesized
  source 1..22: mol_type = other DNA
tgttctgttccattgatctata

SEQ ID NO: 121280 - DNA, 22 bp, synthetic construct
  misc_feature 1..22: note = chemically synthesized
  source 1..22: mol_type = other DNA
ttctgttccattgatctatatc

SEQ ID NO: 121281 - DNA, 22 bp, synthetic construct
  misc_feature 1..22: note = chemically synthesized
  source 1..22: mol_type = other DNA
tgttccattgatctatatctgt

SEQ ID NO: 121282 - DNA, 22 bp, synthetic construct
  misc_feature 1..22: note = chemically synthesized
  source 1..22: mol_type = other DNA
ttccattgatctatatctgtgt

SEQ ID NO: 121283 - DNA, 22 bp, synthetic construct
  misc_feature 1..22: note = chemically synthesized
  source 1..22: mol_type = other DNA
cattgatctatatctgtgtttt

SEQ ID NO: 121284 - DNA, 22 bp, synthetic construct
  misc_feature 1..22: note = chemically synthesized
  source 1..22: mol_type = other DNA
atctatatctgtgttttggtac

SEQ ID NO: 121285 - DNA, 22 bp, synthetic construct
  misc_feature 1..22: note = chemically synthesized
  source 1..22: mol_type = other DNA
tatctgtgttttggtaccagta

SEQ ID NO: 121286 - DNA, 22 bp, synthetic construct
  misc_feature 1..22: note = chemically synthesized
  source 1..22: mol_type = other DNA
tgttttggtaccagtaacatgc

SEQ ID NO: 121287 - DNA, 22 bp, synthetic construct
  misc_feature 1..22: note = chemically synthesized
  source 1..22: mol_type = other DNA
tggtaccagtaacatgctgttt

SEQ ID NO: 121288 - DNA, 22 bp, synthetic construct
  misc_feature 1..22: note = chemically synthesized
  source 1..22: mol_type = other DNA
ggtaccagtaacatgctgtttt

SEQ ID NO: 121289 - DNA, 22 bp, synthetic construct
  misc_feature 1..22: note = chemically synthesized
  source 1..22: mol_type = other DNA
gtaccagtaacatgctgttttg

SEQ ID NO: 121290 - DNA, 22 bp, synthetic construct
  misc_feature 1..22: note = chemically synthesized
  source 1..22: mol_type = other DNA
ttttggttactgtagccttgta

SEQ ID NO: 121291 - DNA, 22 bp, synthetic construct
  misc_feature 1..22: note = chemically synthesized
  source 1..22: mol_type = other DNA
tggttactgtagccttgtagta

SEQ ID NO: 121292 - DNA, 22 bp, synthetic construct
  misc_feature 1..22: note = chemically synthesized
  source 1..22: mol_type = other DNA
ggttactgtagccttgtagtat

SEQ ID NO: 121293 - DNA, 22 bp, synthetic construct
  misc_feature 1..22: note = chemically synthesized
  source 1..22: mol_type = other DNA
gttactgtagccttgtagtata

SEQ ID NO: 121294 - DNA, 22 bp, synthetic construct
  misc_feature 1..22: note = chemically synthesized
  source 1..22: mol_type = other DNA
ctgtagccttgtagtatagttt

SEQ ID NO: 121295 - DNA, 22 bp, synthetic construct
  misc_feature 1..22: note = chemically synthesized
  source 1..22: mol_type = other DNA
tagccttgtagtatagtttgaa

SEQ ID NO: 121296 - DNA, 22 bp, synthetic construct
  misc_feature 1..22: note = chemically synthesized
  source 1..22: mol_type = other DNA
gtagtatagtttgaagtgaggt

SEQ ID NO: 121297 - DNA, 22 bp, synthetic construct
  misc_feature 1..22: note = chemically synthesized
  source 1..22: mol_type = other DNA
tagtatagtttgaagtgaggta

SEQ ID NO: 121298 - DNA, 22 bp, synthetic construct
  misc_feature 1..22: note = chemically synthesized
  source 1..22: mol_type = other DNA
gaagtgaggtagcctgatgcct

SEQ ID NO: 121299 - DNA, 22 bp, synthetic construct
  misc_feature 1..22: note = chemically synthesized
  source 1..22: mol_type = other DNA
aagtgaggtagcctgatgcctc

SEQ ID NO: 121300 - DNA, 22 bp, synthetic construct
  misc_feature 1..22: note = chemically synthesized
  source 1..22: mol_type = other DNA
atgcctccagctttgttctttt

SEQ ID NO: 121301 - DNA, 22 bp, synthetic construct
  misc_feature 1..22: note = chemically synthesized
  source 1..22: mol_type = other DNA
cagctttgttcttttggcttag

SEQ ID NO: 121302 - DNA, 22 bp, synthetic construct
  misc_feature 1..22: note = chemically synthesized
  source 1..22: mol_type = other DNA
tgttcttttggcttaggattga

SEQ ID NO: 121303 - DNA, 22 bp, synthetic construct
  misc_feature 1..22: note = chemically synthesized
  source 1..22: mol_type = other DNA
gttcttttggcttaggattgac

SEQ ID NO: 121304 - DNA, 22 bp, synthetic construct
  misc_feature 1..22: note = chemically synthesized
  source 1..22: mol_type = other DNA
ttcttttggcttaggattgact

SEQ ID NO: 121305 - DNA, 22 bp, synthetic construct
  misc_feature 1..22: note = chemically synthesized
  source 1..22: mol_type = other DNA
ttttggcttaggattgacttgg

SEQ ID NO: 121306 - DNA, 22 bp, synthetic construct
  misc_feature 1..22: note = chemically synthesized
  source 1..22: mol_type = other DNA
ttggcttaggattgacttggca

SEQ ID NO: 121307 - DNA, 22 bp, synthetic construct
  misc_feature 1..22: note = chemically synthesized
  source 1..22: mol_type = other DNA
tggcttaggattgacttggcaa

SEQ ID NO: 121308 - DNA, 22 bp, synthetic construct
  misc_feature 1..22: note = chemically synthesized
  source 1..22: mol_type = other DNA
ggcttaggattgacttggcaat

SEQ ID NO: 121309 - DNA, 22 bp, synthetic construct
  misc_feature 1..22: note = chemically synthesized
  source 1..22: mol_type = other DNA
gcttaggattgacttggcaatg

SEQ ID NO: 121310 - DNA, 22 bp, synthetic construct
  misc_feature 1..22: note = chemically synthesized
  source 1..22: mol_type = other DNA
aggattgacttggcaatgcagg

SEQ ID NO: 121311 - DNA, 22 bp, synthetic construct
  misc_feature 1..22: note = chemically synthesized
  source 1..22: mol_type = other DNA
ggattgacttggcaatgcaggc

SEQ ID NO: 121312 - DNA, 22 bp, synthetic construct
  misc_feature 1..22: note = chemically synthesized
  source 1..22: mol_type = other DNA
acttggcaatgcaggctctttt

SEQ ID NO: 121313 - DNA, 22 bp, synthetic construct
  misc_feature 1..22: note = chemically synthesized
  source 1..22: mol_type = other DNA
ggcaatgcaggctcttttttgg

SEQ ID NO: 121314 - DNA, 22 bp, synthetic construct
  misc_feature 1..22: note = chemically synthesized
  source 1..22: mol_type = other DNA
gcaatgcaggctcttttttggt

SEQ ID NO: 121315 - DNA, 22 bp, synthetic construct
  misc_feature 1..22: note = chemically synthesized
  source 1..22: mol_type = other DNA
ttttttggttccatatgaactt

SEQ ID NO: 121316 - DNA, 22 bp, synthetic construct
  misc_feature 1..22: note = chemically synthesized
  source 1..22: mol_type = other DNA
ttttggttccatatgaacttta

SEQ ID NO: 121317 - DNA, 22 bp, synthetic construct
  misc_feature 1..22: note = chemically synthesized
  source 1..22: mol_type = other DNA
tttggttccatatgaactttaa

SEQ ID NO: 121318 - DNA, 22 bp, synthetic construct
  misc_feature 1..22: note = chemically synthesized
  source 1..22: mol_type = other DNA
ttggttccatatgaactttaaa

SEQ ID NO: 121319 - DNA, 22 bp, synthetic construct
  misc_feature 1..22: note = chemically synthesized
  source 1..22: mol_type = other DNA
tggttccatatgaactttaaag

SEQ ID NO: 121320 - DNA, 22 bp, synthetic construct
  misc_feature 1..22: note = chemically synthesized
  source 1..22: mol_type = other DNA
ggttccatatgaactttaaagt

SEQ ID NO: 121321 - DNA, 22 bp, synthetic construct
  misc_feature 1..22: note = chemically synthesized
  source 1..22: mol_type = other DNA
gttccatatgaactttaaagtc

SEQ ID NO: 121322 - DNA, 22 bp, synthetic construct
  misc_feature 1..22: note = chemically synthesized
  source 1..22: mol_type = other DNA
catatgaactttaaagtcgttt

SEQ ID NO: 121323 - DNA, 22 bp, synthetic construct
  misc_feature 1..22: note = chemically synthesized
  source 1..22: mol_type = other DNA
taaagtcgtttttccaattctg

SEQ ID NO: 121324 - DNA, 22 bp, synthetic construct
  misc_feature 1..22: note = chemically synthesized
  source 1..22: mol_type = other DNA
aaagtcgtttttccaattctgt

SEQ ID NO: 121325 - DNA, 22 bp, synthetic construct
  misc_feature 1..22: note = chemically synthesized
  source 1..22: mol_type = other DNA
aagtcgtttttccaattctgtg

SEQ ID NO: 121326 - DNA, 22 bp, synthetic construct
  misc_feature 1..22: note = chemically synthesized
  source 1..22: mol_type = other DNA
ttccaattctgtgaagaaaatc

SEQ ID NO: 121327 - DNA, 22 bp, synthetic construct
  misc_feature 1..22: note = chemically synthesized
  source 1..22: mol_type = other DNA
tccaattctgtgaagaaaatca

SEQ ID NO: 121328 - DNA, 22 bp, synthetic construct
  misc_feature 1..22: note = chemically synthesized
  source 1..22: mol_type = other DNA
ccaattctgtgaagaaaatcat

SEQ ID NO: 121329 - DNA, 22 bp, synthetic construct
  misc_feature 1..22: note = chemically synthesized
  source 1..22: mol_type = other DNA
caattctgtgaagaaaatcatt

SEQ ID NO: 121330 - DNA, 22 bp, synthetic construct
  misc_feature 1..22: note = chemically synthesized
  source 1..22: mol_type = other DNA
tgtgaagaaaatcattggtagc

SEQ ID NO: 121331 - DNA, 22 bp, synthetic construct
  misc_feature 1..22: note = chemically synthesized
  source 1..22: mol_type = other DNA
tgaagaaaatcattggtagctt

SEQ ID NO: 121332 - DNA, 22 bp, synthetic construct
  misc_feature 1..22: note = chemically synthesized
  source 1..22: mol_type = other DNA
gtagcttgatggggatggcatt

SEQ ID NO: 121333 - DNA, 22 bp, synthetic construct
  misc_feature 1..22: note = chemically synthesized
  source 1..22: mol_type = other DNA
gatggggatggcattgaatcta

SEQ ID NO: 121334 - DNA, 22 bp, synthetic construct
  misc_feature 1..22: note = chemically synthesized
  source 1..22: mol_type = other DNA
atggggatggcattgaatctat

SEQ ID NO: 121335 - DNA, 22 bp, synthetic construct
  misc_feature 1..22: note = chemically synthesized
  source 1..22: mol_type = other DNA
aatctataaattaccttgggca

SEQ ID NO: 121336 - DNA, 22 bp, synthetic construct
  misc_feature 1..22: note = chemically synthesized
  source 1..22: mol_type = other DNA
taaattaccttgggcattatgg

SEQ ID NO: 121337 - DNA, 22 bp, synthetic construct
  misc_feature 1..22: note = chemically synthesized
  source 1..22: mol_type = other DNA
ccttgggcattatggccatttt

SEQ ID NO: 121338 - DNA, 22 bp, synthetic construct
  misc_feature 1..22: note = chemically synthesized
  source 1..22: mol_type = other DNA
gggcattatggccattttgatg

SEQ ID NO: 121339 - DNA, 22 bp, synthetic construct
  misc_feature 1..22: note = chemically synthesized
  source 1..22: mol_type = other DNA
ggcattatggccattttgatga

SEQ ID NO: 121340 - DNA, 22 bp, synthetic construct
  misc_feature 1..22: note = chemically synthesized
  source 1..22: mol_type = other DNA
tggccattttgatgatattgat

SEQ ID NO: 121341 - DNA, 22 bp, synthetic construct
  misc_feature 1..22: note = chemically synthesized
  source 1..22: mol_type = other DNA
tgatgatattgattcttcctac

SEQ ID NO: 121342 - DNA, 22 bp, synthetic construct
  misc_feature 1..22: note = chemically synthesized
  source 1..22: mol_type = other DNA
gatgatattgattcttcctacc

SEQ ID NO: 121343 - DNA, 22 bp, synthetic construct
  misc_feature 1..22: note = chemically synthesized
  source 1..22: mol_type = other DNA
atgatattgattcttcctaccc

SEQ ID NO: 121344 - DNA, 22 bp, synthetic construct
  misc_feature 1..22: note = chemically synthesized
  source 1..22: mol_type = other DNA
attcttcctacccataagcatg

SEQ ID NO: 121345 - DNA, 22 bp, synthetic construct
  misc_feature 1..22: note = chemically synthesized
  source 1..22: mol_type = other DNA
ttcctacccataagcatggaat

SEQ ID NO: 121346 - DNA, 22 bp, synthetic construct
  misc_feature 1..22: note = chemically synthesized
  source 1..22: mol_type = other DNA
cctacccataagcatggaatgt

SEQ ID NO: 121347 - DNA, 22 bp, synthetic construct
  misc_feature 1..22: note = chemically synthesized
  source 1..22: mol_type = other DNA
ctacccataagcatggaatgtt

SEQ ID NO: 121348 - DNA, 22 bp, synthetic construct
  misc_feature 1..22: note = chemically synthesized
  source 1..22: mol_type = other DNA
cccataagcatggaatgttctt

SEQ ID NO: 121349 - DNA, 22 bp, synthetic construct
  misc_feature 1..22: note = chemically synthesized
  source 1..22: mol_type = other DNA
ttccatttgtttgtatcttctt

SEQ ID NO: 121350 - DNA, 22 bp, synthetic construct
  misc_feature 1..22: note = chemically synthesized
  source 1..22: mol_type = other DNA
ccatttgtttgtatcttctttt

SEQ ID NO: 121351 - DNA, 22 bp, synthetic construct
  misc_feature 1..22: note = chemically synthesized
  source 1..22: mol_type = other DNA
catttgtttgtatcttctttta

SEQ ID NO: 121352 - DNA, 22 bp, synthetic construct
  misc_feature 1..22: note = chemically synthesized
  source 1..22: mol_type = other DNA
gtttgtatcttcttttatttca

SEQ ID NO: 121353 - DNA, 22 bp, synthetic construct
  misc_feature 1..22: note = chemically synthesized
  source 1..22: mol_type = other DNA
tttgtatcttcttttatttcat

SEQ ID NO: 121354 - DNA, 22 bp, synthetic construct
  misc_feature 1..22: note = chemically synthesized
  source 1..22: mol_type = other DNA
gtatcttcttttatttcattga

SEQ ID NO: 121355 - DNA, 22 bp, synthetic construct
  misc_feature 1..22: note = chemically synthesized
  source 1..22: mol_type = other DNA
tatcttcttttatttcattgag

SEQ ID NO: 121356 - DNA, 22 bp, synthetic construct
  misc_feature 1..22: note = chemically synthesized
  source 1..22: mol_type = other DNA
cttttatttcattgagcagtgg

SEQ ID NO: 121357 - DNA, 22 bp, synthetic construct
  misc_feature 1..22: note = chemically synthesized
  source 1..22: mol_type = other DNA
ttttatttcattgagcagtggt

SEQ ID NO: 121358 - DNA, 22 bp, synthetic construct
  misc_feature 1..22: note = chemically synthesized
  source 1..22: mol_type = other DNA
ttatttcattgagcagtggttt

SEQ ID NO: 121359 - DNA, 22 bp, synthetic construct
  misc_feature 1..22: note = chemically synthesized
  source 1..22: mol_type = other DNA
tatttcattgagcagtggtttg

SEQ ID NO: 121360 - DNA, 22 bp, synthetic construct
  misc_feature 1..22: note = chemically synthesized
  source 1..22: mol_type = other DNA
atttcattgagcagtggtttgt

SEQ ID NO: 121361 - DNA, 22 bp, synthetic construct
  misc_feature 1..22: note = chemically synthesized
  source 1..22: mol_type = other DNA
tttcattgagcagtggtttgta

SEQ ID NO: 121362 - DNA, 22 bp, synthetic construct
  misc_feature 1..22: note = chemically synthesized
  source 1..22: mol_type = other DNA
cattgagcagtggtttgtagtt

SEQ ID NO: 121363 - DNA, 22 bp, synthetic construct
  misc_feature 1..22: note = chemically synthesized
  source 1..22: mol_type = other DNA
attgagcagtggtttgtagttc

SEQ ID NO: 121364 - DNA, 22 bp, synthetic construct
  misc_feature 1..22: note = chemically synthesized
  source 1..22: mol_type = other DNA
agcagtggtttgtagttctcct

SEQ ID NO: 121365 - DNA, 22 bp, synthetic construct
  misc_feature 1..22: note = chemically synthesized
  source 1..22: mol_type = other DNA
gtagttctccttgaagaggtcc

SEQ ID NO: 121366 - DNA, 22 bp, synthetic construct
  misc_feature 1..22: note = chemically synthesized
  source 1..22: mol_type = other DNA
tagttctccttgaagaggtcct

SEQ ID NO: 121367 - DNA, 22 bp, synthetic construct
  misc_feature 1..22: note = chemically synthesized
  source 1..22: mol_type = other DNA
tccttgaagaggtccttcacat

SEQ ID NO: 121368 - DNA, 22 bp, synthetic construct
  misc_feature 1..22: note = chemically synthesized
  source 1..22: mol_type = other DNA
cttgaagaggtccttcacatcc

SEQ ID NO: 121369 - DNA, 22 bp, synthetic construct
  misc_feature 1..22: note = chemically synthesized
  source 1..22: mol_type = other DNA
gaagaggtccttcacatccctt

SEQ ID NO: 121370 - DNA, 22 bp, synthetic construct
  misc_feature 1..22: note = chemically synthesized
  source 1..22: mol_type = other DNA
aagaggtccttcacatcccttg

SEQ ID NO: 121371 - DNA, 22 bp, synthetic construct
  misc_feature 1..22: note = chemically synthesized
  source 1..22: mol_type = other DNA
cacatcccttgtaagttggatt

SEQ ID NO: 121372 - DNA, 22 bp, synthetic construct
  misc_feature 1..22: note = chemically synthesized
  source 1..22: mol_type = other DNA
acatcccttgtaagttggattc

SEQ ID NO: 121373 - DNA, 22 bp, synthetic construct
  misc_feature 1..22: note = chemically synthesized
  source 1..22: mol_type = other DNA
gtaagttggattcctaggtatt

SEQ ID NO: 121374 - DNA, 22 bp, synthetic construct
  misc_feature 1..22: note = chemically synthesized
  source 1..22: mol_type = other DNA
taagttggattcctaggtattt

SEQ ID NO: 121375 - DNA, 22 bp, synthetic construct
  misc_feature 1..22: note = chemically synthesized
  source 1..22: mol_type = other DNA
gattcctaggtattttattctc

SEQ ID NO: 121376 - DNA, 22 bp, synthetic construct
  misc_feature 1..22: note = chemically synthesized
  source 1..22: mol_type = other DNA
ctaggtattttattctctttga

SEQ ID NO: 121377 - DNA, 22 bp, synthetic construct
  misc_feature 1..22: note = chemically synthesized
  source 1..22: mol_type = other DNA
ggtattttattctctttgaagc

SEQ ID NO: 121378 - DNA, 22 bp, synthetic construct
  misc_feature 1..22: note = chemically synthesized
  source 1..22: mol_type = other DNA
tattctctttgaagcaattgtg

SEQ ID NO: 121379 - DNA, 22 bp, synthetic construct
  misc_feature 1..22: note = chemically synthesized
  source 1..22: mol_type = other DNA
attctctttgaagcaattgtga

SEQ ID NO: 121380 - DNA, 22 bp, synthetic construct
  misc_feature 1..22: note = chemically synthesized
  source 1..22: mol_type = other DNA
ttctctttgaagcaattgtgaa

SEQ ID NO: 121381 - DNA, 22 bp, synthetic construct
  misc_feature 1..22: note = chemically synthesized
  source 1..22: mol_type = other DNA
tctttgaagcaattgtgaatgg

SEQ ID NO: 121382 - DNA, 22 bp, synthetic construct
  misc_feature 1..22: note = chemically synthesized
  source 1..22: mol_type = other DNA
tttgaagcaattgtgaatggga

SEQ ID NO: 121383 - DNA, 22 bp, synthetic construct
  misc_feature 1..22: note = chemically synthesized
  source 1..22: mol_type = other DNA
tgaagcaattgtgaatgggagt

SEQ ID NO: 121384 - DNA, 22 bp, synthetic construct
  misc_feature 1..22: note = chemically synthesized
  source 1..22: mol_type = other DNA
gaagcaattgtgaatgggagtt

SEQ ID NO: 121385 - DNA, 22 bp, synthetic construct
  misc_feature 1..22: note = chemically synthesized
  source 1..22: mol_type = other DNA
aagcaattgtgaatgggagttc

SEQ ID NO: 121386 - DNA, 22 bp, synthetic construct
  misc_feature 1..22: note = chemically synthesized
  source 1..22: mol_type = other DNA
tgaatgggagttccctcatgat

SEQ ID NO: 121387 - DNA, 22 bp, synthetic construct
  misc_feature 1..22: note = chemically synthesized
  source 1..22: mol_type = other DNA
cctcatgatttggctctctgtt

SEQ ID NO: 121388 - DNA, 22 bp, synthetic construct
  misc_feature 1..22: note = chemically synthesized
  source 1..22: mol_type = other DNA
atgatttggctctctgtttgtc

SEQ ID NO: 121389 - DNA, 22 bp, synthetic construct
  misc_feature 1..22: note = chemically synthesized
  source 1..22: mol_type = other DNA
ggctctctgtttgtctgttatt

SEQ ID NO: 121390 - DNA, 22 bp, synthetic construct
  misc_feature 1..22: note = chemically synthesized
  source 1..22: mol_type = other DNA
gctctctgtttgtctgttattg

SEQ ID NO: 121391 - DNA, 22 bp, synthetic construct
  misc_feature 1..22: note = chemically synthesized
  source 1..22: mol_type = other DNA
tctgtttgtctgttattggtgt

SEQ ID NO: 121392 - DNA, 22 bp, synthetic construct
  misc_feature 1..22: note = chemically synthesized
  source 1..22: mol_type = other DNA
tgtttgtctgttattggtgtat

SEQ ID NO: 121393 - DNA, 22 bp, synthetic construct
  misc_feature 1..22: note = chemically synthesized
  source 1..22: mol_type = other DNA
tttgtctgttattggtgtataa

SEQ ID NO: 121394 - DNA, 22 bp, synthetic construct
  misc_feature 1..22: note = chemically synthesized
  source 1..22: mol_type = other DNA
gtctgttattggtgtataagaa

SEQ ID NO: 121395 - DNA, 22 bp, synthetic construct
  misc_feature 1..22: note = chemically synthesized
  source 1..22: mol_type = other DNA
tctgttattggtgtataagaat

SEQ ID NO: 121396 - DNA, 22 bp, synthetic construct
  misc_feature 1..22: note = chemically synthesized
  source 1..22: mol_type = other DNA
ttattggtgtataagaatgctt

SEQ ID NO: 121397 - DNA, 22 bp, synthetic construct
  misc_feature 1..22: note = chemically synthesized
  source 1..22: mol_type = other DNA
ttggtgtataagaatgcttgtg

SEQ ID NO: 121398 - DNA, 22 bp, synthetic construct
  misc_feature 1..22: note = chemically synthesized
  source 1..22: mol_type = other DNA
gtgtataagaatgcttgtgatt

SEQ ID NO: 121399 - DNA, 22 bp, synthetic construct
  misc_feature 1..22: note = chemically synthesized
  source 1..22: mol_type = other DNA
gtgatttttgcacattggtttt

SEQ ID NO: 121400 - DNA, 22 bp, synthetic construct
  misc_feature 1..22: note = chemically synthesized
  source 1..22: mol_type = other DNA
tgatttttgcacattggttttg

SEQ ID NO: 121401 - DNA, 22 bp, synthetic construct
  misc_feature 1..22: note = chemically synthesized
  source 1..22: mol_type = other DNA
ttgcacattggttttgtatcct

SEQ ID NO: 121402 - DNA, 22 bp, synthetic construct
  misc_feature 1..22: note = chemically synthesized
  source 1..22: mol_type = other DNA
tgcacattggttttgtatcctg

SEQ ID NO: 121403 - DNA, 22 bp, synthetic construct
  misc_feature 1..22: note = chemically synthesized
  source 1..22: mol_type = other DNA
gcacattggttttgtatcctga

SEQ ID NO: 121404 - DNA, 22 bp, synthetic construct
  misc_feature 1..22: note = chemically synthesized
  source 1..22: mol_type = other DNA
cacattggttttgtatcctgag

SEQ ID NO: 121405 - DNA, 22 bp, synthetic construct
  misc_feature 1..22: note = chemically synthesized
  source 1..22: mol_type = other DNA
gttttgtatcctgaggctttgc

SEQ ID NO: 121406 - DNA, 22 bp, synthetic construct
  misc_feature 1..22: note = chemically synthesized
  source 1..22: mol_type = other DNA
tgtatcctgaggctttgctgaa

SEQ ID NO: 121407 - DNA, 22 bp, synthetic construct
  misc_feature 1..22: note = chemically synthesized
  source 1..22: mol_type = other DNA
gtatcctgaggctttgctgaag

SEQ ID NO: 121408 - DNA, 22 bp, synthetic construct
  misc_feature 1..22: note = chemically synthesized
  source 1..22: mol_type = other DNA
tatcctgaggctttgctgaagt

SEQ ID NO: 121409 - DNA, 22 bp, synthetic construct
  misc_feature 1..22: note = chemically synthesized
  source 1..22: mol_type = other DNA
aggctttgctgaagttgcttat

SEQ ID NO: 121410 - DNA, 22 bp, synthetic construct
  misc_feature 1..22: note = chemically synthesized
  source 1..22: mol_type = other DNA
tgctgaagttgcttatcagctt

SEQ ID NO: 121411 - DNA, 22 bp, synthetic construct
  misc_feature 1..22: note = chemically synthesized
  source 1..22: mol_type = other DNA
gctgaagttgcttatcagctta

SEQ ID NO: 121412 - DNA, 22 bp, synthetic construct
  misc_feature 1..22: note = chemically synthesized
  source 1..22: mol_type = other DNA
ctgaagttgcttatcagcttaa

SEQ ID NO: 121413 - DNA, 22 bp, synthetic construct
  misc_feature 1..22: note = chemically synthesized
  source 1..22: mol_type = other DNA
aagttgcttatcagcttaagga

SEQ ID NO: 121414 - DNA, 22 bp, synthetic construct
  misc_feature 1..22: note = chemically synthesized
  source 1..22: mol_type = other DNA
cttatcagcttaaggagatttt

SEQ ID NO: 121415 - DNA, 22 bp, synthetic construct
  misc_feature 1..22: note = chemically synthesized
  source 1..22: mol_type = other DNA
atcagcttaaggagattttggg

SEQ ID NO: 121416 - DNA, 22 bp, synthetic construct
  misc_feature 1..22: note = chemically synthesized
  source 1..22: mol_type = other DNA
tcagcttaaggagattttgggc

SEQ ID NO: 121417 - DNA, 22 bp, synthetic construct
  misc_feature 1..22: note = chemically synthesized
  source 1..22: mol_type = other DNA
aaggagattttgggctgagaca

SEQ ID NO: 121418 - DNA, 22 bp, synthetic construct
  misc_feature 1..22: note = chemically synthesized
  source 1..22: mol_type = other DNA
aggagattttgggctgagacaa

SEQ ID NO: 121419 - DNA, 22 bp, synthetic construct
  misc_feature 1..22: note = chemically synthesized
  source 1..22: mol_type = other DNA
tgggctgagacaagggggtttt

SEQ ID NO: 121420 - DNA, 22 bp, synthetic construct
  misc_feature 1..22: note = chemically synthesized
  source 1..22: mol_type = other DNA
gggctgagacaagggggttttc

SEQ ID NO: 121421 - DNA, 22 bp, synthetic construct
  misc_feature 1..22: note = chemically synthesized
  source 1..22: mol_type = other DNA
ggctgagacaagggggttttct

SEQ ID NO: 121422 - DNA, 22 bp, synthetic construct
  misc_feature 1..22: note = chemically synthesized
  source 1..22: mol_type = other DNA
agacaagggggttttctagata

SEQ ID NO: 121423 - DNA, 22 bp, synthetic construct
  misc_feature 1..22: note = chemically synthesized
  source 1..22: mol_type = other DNA
tctagatatacaatcatgtcgt

SEQ ID NO: 121424 - DNA, 22 bp, synthetic construct
  misc_feature 1..22: note = chemically synthesized
  source 1..22: mol_type = other DNA
ctagatatacaatcatgtcgtc

SEQ ID NO: 121425 - DNA, 22 bp, synthetic construct
  misc_feature 1..22: note = chemically synthesized
  source 1..22: mol_type = other DNA
tagatatacaatcatgtcgtct

SEQ ID NO: 121426 - DNA, 22 bp, synthetic construct
  misc_feature 1..22: note = chemically synthesized
  source 1..22: mol_type = other DNA
gatatacaatcatgtcgtctgc

SEQ ID NO: 121427 - DNA, 22 bp, synthetic construct
  misc_feature 1..22: note = chemically synthesized
  source 1..22: mol_type = other DNA
caaacagggacaatttgacttc

SEQ ID NO: 121428 - DNA, 22 bp, synthetic construct
  misc_feature 1..22: note = chemically synthesized
  source 1..22: mol_type = other DNA
gacttcctcttttcttaattga

SEQ ID NO: 121429 - DNA, 22 bp, synthetic construct
  misc_feature 1..22: note = chemically synthesized
  source 1..22: mol_type = other DNA
acttcctcttttcttaattgaa

SEQ ID NO: 121430 - DNA, 22 bp, synthetic construct
  misc_feature 1..22: note = chemically synthesized
  source 1..22: mol_type = other DNA
cctcttttcttaattgaatacc

SEQ ID NO: 121431 - DNA, 22 bp, synthetic construct
  misc_feature 1..22: note = chemically synthesized
  source 1..22: mol_type = other DNA
ctcttttcttaattgaataccc

SEQ ID NO: 121432 - DNA, 22 bp, synthetic construct
  misc_feature 1..22: note = chemically synthesized
  source 1..22: mol_type = other DNA
ttttcttaattgaatacccttt

SEQ ID NO: 121433 - DNA, 22 bp, synthetic construct
  misc_feature 1..22: note = chemically synthesized
  source 1..22: mol_type = other DNA
ttcttaattgaatacccttttt

SEQ ID NO: 121434 - DNA, 22 bp, synthetic construct
  misc_feature 1..22: note = chemically synthesized
  source 1..22: mol_type = other DNA
tcttaattgaataccctttttt

SEQ ID NO: 121435 - DNA, 22 bp, synthetic construct
  misc_feature 1..22: note = chemically synthesized
  source 1..22: mol_type = other DNA
cttaattgaatacccttttttc

SEQ ID NO: 121436 - DNA, 22 bp, synthetic construct
  misc_feature 1..22: note = chemically synthesized
  source 1..22: mol_type = other DNA
ttaattgaatacccttttttcc

SEQ ID NO: 121437 - DNA, 22 bp, synthetic construct
  misc_feature 1..22: note = chemically synthesized
  source 1..22: mol_type = other DNA
aattgaatacccttttttcctg

SEQ ID NO: 121438 - DNA, 22 bp, synthetic construct
  misc_feature 1..22: note = chemically synthesized
  source 1..22: mol_type = other DNA
attgaatacccttttttcctgt

SEQ ID NO: 121439 - DNA, 22 bp, synthetic construct
  misc_feature 1..22: note = chemically synthesized
  source 1..22: mol_type = other DNA
aatacccttttttcctgtcttc

SEQ ID NO: 121440 - DNA, 22 bp, synthetic construct
  misc_feature 1..22: note = chemically synthesized
  source 1..22: mol_type = other DNA
ttttcctgtcttctgcctaatt

SEQ ID NO: 121441 - DNA, 22 bp, synthetic construct
  misc_feature 1..22: note = chemically synthesized
  source 1..22: mol_type = other DNA
tttcctgtcttctgcctaattg

SEQ ID NO: 121442 - DNA, 22 bp, synthetic construct
  misc_feature 1..22: note = chemically synthesized
  source 1..22: mol_type = other DNA
ttcctgtcttctgcctaattgc

SEQ ID NO: 121443 - DNA, 22 bp, synthetic construct
  misc_feature 1..22: note = chemically synthesized
  source 1..22: mol_type = other DNA
tcctgtcttctgcctaattgcc

SEQ ID NO: 121444 - DNA, 22 bp, synthetic construct
  misc_feature 1..22: note = chemically synthesized
  source 1..22: mol_type = other DNA
cctgtcttctgcctaattgccc

SEQ ID NO: 121445 - DNA, 22 bp, synthetic construct
  misc_feature 1..22: note = chemically synthesized
  source 1..22: mol_type = other DNA
ctgtcttctgcctaattgccct

SEQ ID NO: 121446 - DNA, 22 bp, synthetic construct
  misc_feature 1..22: note = chemically synthesized
  source 1..22: mol_type = other DNA
tcttctgcctaattgccctggc

SEQ ID NO: 121447 - DNA, 22 bp, synthetic construct
  misc_feature 1..22: note = chemically synthesized
  source 1..22: mol_type = other DNA
ctgcctaattgccctggccaga

SEQ ID NO: 121448 - DNA, 22 bp, synthetic construct
  misc_feature 1..22: note = chemically synthesized
  source 1..22: mol_type = other DNA
tgcctaattgccctggccagaa

SEQ ID NO: 121449 - DNA, 22 bp, synthetic construct
  misc_feature 1..22: note = chemically synthesized
  source 1..22: mol_type = other DNA
cctaattgccctggccagaact

SEQ ID NO: 121450 - DNA, 22 bp, synthetic construct
  misc_feature 1..22: note = chemically synthesized
  source 1..22: mol_type = other DNA
attgccctggccagaacttcca

SEQ ID NO: 121451 - DNA, 22 bp, synthetic construct
  misc_feature 1..22: note = chemically synthesized
  source 1..22: mol_type = other DNA
ccctggccagaacttccaacac

SEQ ID NO: 121452 - DNA, 22 bp, synthetic construct
  misc_feature 1..22: note = chemically synthesized
  source 1..22: mol_type = other DNA
gccagaacttccaacactatgt

SEQ ID NO: 121453 - DNA, 22 bp, synthetic construct
  misc_feature 1..22: note = chemically synthesized
  source 1..22: mol_type = other DNA
ccaacactatgttgaataggag

SEQ ID NO: 121454 - DNA, 22 bp, synthetic construct
  misc_feature 1..22: note = chemically synthesized
  source 1..22: mol_type = other DNA
caacactatgttgaataggagt

SEQ ID NO: 121455 - DNA, 22 bp, synthetic construct
  misc_feature 1..22: note = chemically synthesized
  source 1..22: mol_type = other DNA
tgttgaataggagtagtgagag

SEQ ID NO: 121456 - DNA, 22 bp, synthetic construct
  misc_feature 1..22: note = chemically synthesized
  source 1..22: mol_type = other DNA
aataggagtagtgagagagggc

SEQ ID NO: 121457 - DNA, 22 bp, synthetic construct
  misc_feature 1..22: note = chemically synthesized
  source 1..22: mol_type = other DNA
tcttgtgccagtttacaaaggg

SEQ ID NO: 121458 - DNA, 22 bp, synthetic construct
  misc_feature 1..22: note = chemically synthesized
  source 1..22: mol_type = other DNA
gtgccagtttacaaagggaatg

SEQ ID NO: 121459 - DNA, 22 bp, synthetic construct
  misc_feature 1..22: note = chemically synthesized
  source 1..22: mol_type = other DNA
tgccagtttacaaagggaatgc

SEQ ID NO: 121460 - DNA, 22 bp, synthetic construct
  misc_feature 1..22: note = chemically synthesized
  source 1..22: mol_type = other DNA
acaaagggaatgcttccagttt

SEQ ID NO: 121461 - DNA, 22 bp, synthetic construct
  misc_feature 1..22: note = chemically synthesized
  source 1..22: mol_type = other DNA
caaagggaatgcttccagtttt

SEQ ID NO: 121462 - DNA, 22 bp, synthetic construct
  misc_feature 1..22: note = chemically synthesized
  source 1..22: mol_type = other DNA
ccagtttttgcccattcagtat

SEQ ID NO: 121463 - DNA, 22 bp, synthetic construct
  misc_feature 1..22: note = chemically synthesized
  source 1..22: mol_type = other DNA
cagtttttgcccattcagtatg

SEQ ID NO: 121464 - DNA, 22 bp, synthetic construct
  misc_feature 1..22: note = chemically synthesized
  source 1..22: mol_type = other DNA
ttgcccattcagtatgatattg

SEQ ID NO: 121465 - DNA, 22 bp, synthetic construct
  misc_feature 1..22: note = chemically synthesized
  source 1..22: mol_type = other DNA
tgcccattcagtatgatattgg

SEQ ID NO: 121466 - DNA, 22 bp, synthetic construct
  misc_feature 1..22: note = chemically synthesized
  source 1..22: mol_type = other DNA
gcccattcagtatgatattggc

SEQ ID NO: 121467 - DNA, 22 bp, synthetic construct
  misc_feature 1..22: note = chemically synthesized
  source 1..22: mol_type = other DNA
cccattcagtatgatattggct

SEQ ID NO: 121468 - DNA, 22 bp, synthetic construct
  misc_feature 1..22: note = chemically synthesized
  source 1..22: mol_type = other DNA
agtatgatattggctgtgggtt

SEQ ID NO: 121469 - DNA, 22 bp, synthetic construct
  misc_feature 1..22: note = chemically synthesized
  source 1..22: mol_type = other DNA
gctgtgggtttgtcatagatag

SEQ ID NO: 121470 - DNA, 22 bp, synthetic construct
  misc_feature 1..22: note = chemically synthesized
  source 1..22: mol_type = other DNA
tgggtttgtcatagatagctct

SEQ ID NO: 121471 - DNA, 22 bp, synthetic construct
  misc_feature 1..22: note = chemically synthesized
  source 1..22: mol_type = other DNA
gtcatagatagctcttattatt

SEQ ID NO: 121472 - DNA, 22 bp, synthetic construct
  misc_feature 1..22: note = chemically synthesized
  source 1..22: mol_type = other DNA
tcatagatagctcttattattt

SEQ ID NO: 121473 - DNA, 22 bp, synthetic construct
  misc_feature 1..22: note = chemically synthesized
  source 1..22: mol_type = other DNA
ttattattttgagatatgtccc

SEQ ID NO: 121474 - DNA, 22 bp, synthetic construct
  misc_feature 1..22: note = chemically synthesized
  source 1..22: mol_type = other DNA
attattttgagatatgtcccat

SEQ ID NO: 121475 - DNA, 22 bp, synthetic construct
  misc_feature 1..22: note = chemically synthesized
  source 1..22: mol_type = other DNA
ttattttgagatatgtcccatc

SEQ ID NO: 121476 - DNA, 22 bp, synthetic construct
  misc_feature 1..22: note = chemically synthesized
  source 1..22: mol_type = other DNA
ttttgagatatgtcccatcaat

SEQ ID NO: 121477 - DNA, 22 bp, synthetic construct
  misc_feature 1..22: note = chemically synthesized
  source 1..22: mol_type = other DNA
tgagatatgtcccatcaatacc

SEQ ID NO: 121478 - DNA, 22 bp, synthetic construct
  misc_feature 1..22: note = chemically synthesized
  source 1..22: mol_type = other DNA
gagatatgtcccatcaatacct

SEQ ID NO: 121479 - DNA, 22 bp, synthetic construct
  misc_feature 1..22: note = chemically synthesized
  source 1..22: mol_type = other DNA
agatatgtcccatcaataccta

SEQ ID NO: 121480 - DNA, 22 bp, synthetic construct
  misc_feature 1..22: note = chemically synthesized
  source 1..22: mol_type = other DNA
atttattgaaagtttttagcat

SEQ ID NO: 121481 - DNA, 22 bp, synthetic construct
  misc_feature 1..22: note = chemically synthesized
  source 1..22: mol_type = other DNA
attgaaagtttttagcatgaag

SEQ ID NO: 121482 - DNA, 22 bp, synthetic construct
  misc_feature 1..22: note = chemically synthesized
  source 1..22: mol_type = other DNA
ttgaaagtttttagcatgaagg

SEQ ID NO: 121483 - DNA, 22 bp, synthetic construct
  misc_feature 1..22: note = chemically synthesized
  source 1..22: mol_type = other DNA
aaagtttttagcatgaagggtt

SEQ ID NO: 121484 - DNA, 22 bp, synthetic construct
  misc_feature 1..22: note = chemically synthesized
  source 1..22: mol_type = other DNA
ttagcatgaagggttgttgaat

SEQ ID NO: 121485 - DNA, 22 bp, synthetic construct
  misc_feature 1..22: note = chemically synthesized
  source 1..22: mol_type = other DNA
tagcatgaagggttgttgaatt

SEQ ID NO: 121486 - DNA, 22 bp, synthetic construct
  misc_feature 1..22: note = chemically synthesized
  source 1..22: mol_type = other DNA
agcatgaagggttgttgaattt

SEQ ID NO: 121487 - DNA, 22 bp, synthetic construct
  misc_feature 1..22: note = chemically synthesized
  source 1..22: mol_type = other DNA
gcatgaagggttgttgaatttt

SEQ ID NO: 121488 - DNA, 22 bp, synthetic construct
  misc_feature 1..22: note = chemically synthesized
  source 1..22: mol_type = other DNA
ttgaattttgtcaaaggccttt

SEQ ID NO: 121489 - DNA, 22 bp, synthetic construct
  misc_feature 1..22: note = chemically synthesized
  source 1..22: mol_type = other DNA
aattttgtcaaaggccttttct

SEQ ID NO: 121490 - DNA, 22 bp, synthetic construct
  misc_feature 1..22: note = chemically synthesized
  source 1..22: mol_type = other DNA
tgtcaaaggccttttctgcatc

SEQ ID NO: 121491 - DNA, 22 bp, synthetic construct
  misc_feature 1..22: note = chemically synthesized
  source 1..22: mol_type = other DNA
gtcaaaggccttttctgcatct

SEQ ID NO: 121492 - DNA, 22 bp, synthetic construct
  misc_feature 1..22: note = chemically synthesized
  source 1..22: mol_type = other DNA
tcaaaggccttttctgcatcta

SEQ ID NO: 121493 - DNA, 22 bp, synthetic construct
  misc_feature 1..22: note = chemically synthesized
  source 1..22: mol_type = other DNA
ttctgcatctattgagataatc

SEQ ID NO: 121494 - DNA, 22 bp, synthetic construct
  misc_feature 1..22: note = chemically synthesized
  source 1..22: mol_type = other DNA
tctgcatctattgagataatca

SEQ ID NO: 121495 - DNA, 22 bp, synthetic construct
  misc_feature 1..22: note = chemically synthesized
  source 1..22: mol_type = other DNA
ctgcatctattgagataatcat

SEQ ID NO: 121496 - DNA, 22 bp, synthetic construct
  misc_feature 1..22: note = chemically synthesized
  source 1..22: mol_type = other DNA
tgcatctattgagataatcatg

SEQ ID NO: 121497 - DNA, 22 bp, synthetic construct
  misc_feature 1..22: note = chemically synthesized
  source 1..22: mol_type = other DNA
catctattgagataatcatgtg

SEQ ID NO: 121498 - DNA, 22 bp, synthetic construct
  misc_feature 1..22: note = chemically synthesized
  source 1..22: mol_type = other DNA
ttgagataatcatgtggttttt

SEQ ID NO: 121499 - DNA, 22 bp, synthetic construct
  misc_feature 1..22: note = chemically synthesized
  source 1..22: mol_type = other DNA
agataatcatgtggtttttgtc

SEQ ID NO: 121500 - DNA, 22 bp, synthetic construct
  misc_feature 1..22: note = chemically synthesized
  source 1..22: mol_type = other DNA
ttgtctttggttctgtttatat

SEQ ID NO: 121501 - DNA, 22 bp, synthetic construct
  misc_feature 1..22: note = chemically synthesized
  source 1..22: mol_type = other DNA
tgtctttggttctgtttatatg

SEQ ID NO: 121502 - DNA, 22 bp, synthetic construct
  misc_feature 1..22: note = chemically synthesized
  source 1..22: mol_type = other DNA
gtctttggttctgtttatatgc

SEQ ID NO: 121503 - DNA, 22 bp, synthetic construct
  misc_feature 1..22: note = chemically synthesized
  source 1..22: mol_type = other DNA
tctttggttctgtttatatgct

SEQ ID NO: 121504 - DNA, 22 bp, synthetic construct
  misc_feature 1..22: note = chemically synthesized
  source 1..22: mol_type = other DNA
tggttctgtttatatgctggat

SEQ ID NO: 121505 - DNA, 22 bp, synthetic construct
  misc_feature 1..22: note = chemically synthesized
  source 1..22: mol_type = other DNA
ggttctgtttatatgctggatt

SEQ ID NO: 121506 - DNA, 22 bp, synthetic construct
  misc_feature 1..22: note = chemically synthesized
  source 1..22: mol_type = other DNA
gttctgtttatatgctggatta

SEQ ID NO: 121507 - DNA, 22 bp, synthetic construct
  misc_feature 1..22: note = chemically synthesized
  source 1..22: mol_type = other DNA
tgtttatatgctggattacatt

SEQ ID NO: 121508 - DNA, 22 bp, synthetic construct
  misc_feature 1..22: note = chemically synthesized
  source 1..22: mol_type = other DNA
tttatatgctggattacattta

SEQ ID NO: 121509 - DNA, 22 bp, synthetic construct
  misc_feature 1..22: note = chemically synthesized
  source 1..22: mol_type = other DNA
atatgctggattacatttattg

SEQ ID NO: 121510 - DNA, 22 bp, synthetic construct
  misc_feature 1..22: note = chemically synthesized
  source 1..22: mol_type = other DNA
tatgctggattacatttattga

SEQ ID NO: 121511 - DNA, 22 bp, synthetic construct
  misc_feature 1..22: note = chemically synthesized
  source 1..22: mol_type = other DNA
gattacatttattgatttgcat

SEQ ID NO: 121512 - DNA, 22 bp, synthetic construct
  misc_feature 1..22: note = chemically synthesized
  source 1..22: mol_type = other DNA
catttattgatttgcatatatt

SEQ ID NO: 121513 - DNA, 22 bp, synthetic construct
  misc_feature 1..22: note = chemically synthesized
  source 1..22: mol_type = other DNA
attgatttgcatatattgaacc

SEQ ID NO: 121514 - DNA, 22 bp, synthetic construct
  misc_feature 1..22: note = chemically synthesized
  source 1..22: mol_type = other DNA
ttgatttgcatatattgaacca

SEQ ID NO: 121515 - DNA, 22 bp, synthetic construct
  misc_feature 1..22: note = chemically synthesized
  source 1..22: mol_type = other DNA
atttgcatatattgaaccagcc

SEQ ID NO: 121516 - DNA, 22 bp, synthetic construct
  misc_feature 1..22: note = chemically synthesized
  source 1..22: mol_type = other DNA
gcatatattgaaccagccttgc

SEQ ID NO: 121517 - DNA, 22 bp, synthetic construct
  misc_feature 1..22: note = chemically synthesized
  source 1..22: mol_type = other DNA
catatattgaaccagccttgca

SEQ ID NO: 121518 - DNA, 22 bp, synthetic construct
  misc_feature 1..22: note = chemically synthesized
  source 1..22: mol_type = other DNA
aaccagccttgcatcccaggga

SEQ ID NO: 121519 - DNA, 22 bp, synthetic construct
  misc_feature 1..22: note = chemically synthesized
  source 1..22: mol_type = other DNA
gcatcccagggatgaagtccac

SEQ ID NO: 121520 - DNA, 22 bp, synthetic construct
  misc_feature 1..22: note = chemically synthesized
  source 1..22: mol_type = other DNA
catcccagggatgaagtccact

SEQ ID NO: 121521 - DNA, 22 bp, synthetic construct
  misc_feature 1..22: note = chemically synthesized
  source 1..22: mol_type = other DNA
gatcatcgtggataagcttttt

SEQ ID NO: 121522 - DNA, 22 bp, synthetic construct
  misc_feature 1..22: note = chemically synthesized
  source 1..22: mol_type = other DNA
atcatcgtggataagctttttg

SEQ ID NO: 121523 - DNA, 22 bp, synthetic construct
  misc_feature 1..22: note = chemically synthesized
  source 1..22: mol_type = other DNA
tttgatgtgctgctggattcgg

SEQ ID NO: 121524 - DNA, 22 bp, synthetic construct
  misc_feature 1..22: note = chemically synthesized
  source 1..22: mol_type = other DNA
ttgatgtgctgctggattcggt

SEQ ID NO: 121525 - DNA, 22 bp, synthetic construct
  misc_feature 1..22: note = chemically synthesized
  source 1..22: mol_type = other DNA
tgatgtgctgctggattcggtt

SEQ ID NO: 121526 - DNA, 22 bp, synthetic construct
  misc_feature 1..22: note = chemically synthesized
  source 1..22: mol_type = other DNA
gatgtgctgctggattcggttt

SEQ ID NO: 121527 - DNA, 22 bp, synthetic construct
  misc_feature 1..22: note = chemically synthesized
  source 1..22: mol_type = other DNA
atgtgctgctggattcggtttg

SEQ ID NO: 121528 - DNA, 22 bp, synthetic construct
  misc_feature 1..22: note = chemically synthesized
  source 1..22: mol_type = other DNA
ctggattcggtttgccagtatt

SEQ ID NO: 121529 - DNA, 22 bp, synthetic construct
  misc_feature 1..22: note = chemically synthesized
  source 1..22: mol_type = other DNA
gattcggtttgccagtatttta

SEQ ID NO: 121530 - DNA, 22 bp, synthetic construct
  misc_feature 1..22: note = chemically synthesized
  source 1..22: mol_type = other DNA
ggtttgccagtattttattgag

SEQ ID NO: 121531 - DNA, 22 bp, synthetic construct
  misc_feature 1..22: note = chemically synthesized
  source 1..22: mol_type = other DNA
gccagtattttattgaggattt

SEQ ID NO: 121532 - DNA, 22 bp, synthetic construct
  misc_feature 1..22: note = chemically synthesized
  source 1..22: mol_type = other DNA
ccagtattttattgaggatttt

SEQ ID NO: 121533 - DNA, 22 bp, synthetic construct
  misc_feature 1..22: note = chemically synthesized
  source 1..22: mol_type = other DNA
tattgaggatttttgcatcgat

SEQ ID NO: 121534 - DNA, 22 bp, synthetic construct
  misc_feature 1..22: note = chemically synthesized
  source 1..22: mol_type = other DNA
attgaggatttttgcatcgatg

SEQ ID NO: 121535 - DNA, 22 bp, synthetic construct
  misc_feature 1..22: note = chemically synthesized
  source 1..22: mol_type = other DNA
ttgaggatttttgcatcgatgt

SEQ ID NO: 121536 - DNA, 22 bp, synthetic construct
  misc_feature 1..22: note = chemically synthesized
  source 1..22: mol_type = other DNA
aggatttttgcatcgatgttca

SEQ ID NO: 121537 - DNA, 22 bp, synthetic construct
  misc_feature 1..22: note = chemically synthesized
  source 1..22: mol_type = other DNA
ttgcatcgatgttcatcaggga

SEQ ID NO: 121538 - DNA, 22 bp, synthetic construct
  misc_feature 1..22: note = chemically synthesized
  source 1..22: mol_type = other DNA
tgcatcgatgttcatcagggat

SEQ ID NO: 121539 - DNA, 22 bp, synthetic construct
  misc_feature 1..22: note = chemically synthesized
  source 1..22: mol_type = other DNA
gcatcgatgttcatcagggata

SEQ ID NO: 121540 - DNA, 22 bp, synthetic construct
  misc_feature 1..22: note = chemically synthesized
  source 1..22: mol_type = other DNA
catcgatgttcatcagggatat

SEQ ID NO: 121541 - DNA, 22 bp, synthetic construct
  misc_feature 1..22: note = chemically synthesized
  source 1..22: mol_type = other DNA
atcagggatattcatctaaaat

SEQ ID NO: 121542 - DNA, 22 bp, synthetic construct
  misc_feature 1..22: note = chemically synthesized
  source 1..22: mol_type = other DNA
atctaaaattctcttttttggt

SEQ ID NO: 121543 - DNA, 22 bp, synthetic construct
  misc_feature 1..22: note = chemically synthesized
  source 1..22: mol_type = other DNA
aaattctcttttttggttgtgt

SEQ ID NO: 121544 - DNA, 22 bp, synthetic construct
  misc_feature 1..22: note = chemically synthesized
  source 1..22: mol_type = other DNA
tcttttttggttgtgtctcttt

SEQ ID NO: 121545 - DNA, 22 bp, synthetic construct
  misc_feature 1..22: note = chemically synthesized
  source 1..22: mol_type = other DNA
ttttttggttgtgtctctttct

SEQ ID NO: 121546 - DNA, 22 bp, synthetic construct
  misc_feature 1..22: note = chemically synthesized
  source 1..22: mol_type = other DNA
ttttggttgtgtctctttctgg

SEQ ID NO: 121547 - DNA, 22 bp, synthetic construct
  misc_feature 1..22: note = chemically synthesized
  source 1..22: mol_type = other DNA
tttggttgtgtctctttctggc

SEQ ID NO: 121548 - DNA, 22 bp, synthetic construct
  misc_feature 1..22: note = chemically synthesized
  source 1..22: mol_type = other DNA
ttggttgtgtctctttctggct

SEQ ID NO: 121549 - DNA, 22 bp, synthetic construct
  misc_feature 1..22: note = chemically synthesized
  source 1..22: mol_type = other DNA
tggttgtgtctctttctggctt

SEQ ID NO: 121550 - DNA, 22 bp, synthetic construct
  misc_feature 1..22: note = chemically synthesized
  source 1..22: mol_type = other DNA
ggttgtgtctctttctggcttt

SEQ ID NO: 121551 - DNA, 22 bp, synthetic construct
  misc_feature 1..22: note = chemically synthesized
  source 1..22: mol_type = other DNA
gttgtgtctctttctggctttg

SEQ ID NO: 121552 - DNA, 22 bp, synthetic construct
  misc_feature 1..22: note = chemically synthesized
  source 1..22: mol_type = other DNA
tgtctctttctggctttggtat

SEQ ID NO: 121553 - DNA, 22 bp, synthetic construct
  misc_feature 1..22: note = chemically synthesized
  source 1..22: mol_type = other DNA
tttctggctttggtattaggat

SEQ ID NO: 121554 - DNA, 22 bp, synthetic construct
  misc_feature 1..22: note = chemically synthesized
  source 1..22: mol_type = other DNA
tctggctttggtattaggatga

SEQ ID NO: 121555 - DNA, 22 bp, synthetic construct
  misc_feature 1..22: note = chemically synthesized
  source 1..22: mol_type = other DNA
ctggctttggtattaggatgat

SEQ ID NO: 121556 - DNA, 22 bp, synthetic construct
  misc_feature 1..22: note = chemically synthesized
  source 1..22: mol_type = other DNA
tggctttggtattaggatgatg

SEQ ID NO: 121557 - DNA, 22 bp, synthetic construct
  misc_feature 1..22: note = chemically synthesized
  source 1..22: mol_type = other DNA
gctttggtattaggatgatgct

SEQ ID NO: 121558 - DNA, 22 bp, synthetic construct
  misc_feature 1..22: note = chemically synthesized
  source 1..22: mol_type = other DNA
tggtattaggatgatgctggcc

SEQ ID NO: 121559 - DNA, 22 bp, synthetic construct
  misc_feature 1..22: note = chemically synthesized
  source 1..22: mol_type = other DNA
ggtattaggatgatgctggcct

SEQ ID NO: 121560 - DNA, 22 bp, synthetic construct
  misc_feature 1..22: note = chemically synthesized
  source 1..22: mol_type = other DNA
gtattaggatgatgctggcctc

SEQ ID NO: 121561 - DNA, 22 bp, synthetic construct
  misc_feature 1..22: note = chemically synthesized
  source 1..22: mol_type = other DNA
ggatgatgctggcctcataaaa

SEQ ID NO: 121562 - DNA, 22 bp, synthetic construct
  misc_feature 1..22: note = chemically synthesized
  source 1..22: mol_type = other DNA
gcctcataaaatgagttaggga

SEQ ID NO: 121563 - DNA, 22 bp, synthetic construct
  misc_feature 1..22: note = chemically synthesized
  source 1..22: mol_type = other DNA
ataaaatgagttagggaggatt

SEQ ID NO: 121564 - DNA, 22 bp, synthetic construct
  misc_feature 1..22: note = chemically synthesized
  source 1..22: mol_type = other DNA
gggaggattccttctttttctg

SEQ ID NO: 121565 - DNA, 22 bp, synthetic construct
  misc_feature 1..22: note = chemically synthesized
  source 1..22: mol_type = other DNA
cttctttttctgttgattggaa

SEQ ID NO: 121566 - DNA, 22 bp, synthetic construct
  misc_feature 1..22: note = chemically synthesized
  source 1..22: mol_type = other DNA
ctttttctgttgattggaatag

SEQ ID NO: 121567 - DNA, 22 bp, synthetic construct
  misc_feature 1..22: note = chemically synthesized
  source 1..22: mol_type = other DNA
tttttctgttgattggaatagt

SEQ ID NO: 121568 - DNA, 22 bp, synthetic construct
  misc_feature 1..22: note = chemically synthesized
  source 1..22: mol_type = other DNA
tttctgttgattggaatagttt

SEQ ID NO: 121569 - DNA, 22 bp, synthetic construct
  misc_feature 1..22: note = chemically synthesized
  source 1..22: mol_type = other DNA
ttctgttgattggaatagtttc

SEQ ID NO: 121570 - DNA, 22 bp, synthetic construct
  misc_feature 1..22: note = chemically synthesized
  source 1..22: mol_type = other DNA
tctgttgattggaatagtttca

SEQ ID NO: 121571 - DNA, 22 bp, synthetic construct
  misc_feature 1..22: note = chemically synthesized
  source 1..22: mol_type = other DNA
ctgttgattggaatagtttcag

SEQ ID NO: 121572 - DNA, 22 bp, synthetic construct
  misc_feature 1..22: note = chemically synthesized
  source 1..22: mol_type = other DNA
tgttgattggaatagtttcaga

SEQ ID NO: 121573 - DNA, 22 bp, synthetic construct
  misc_feature 1..22: note = chemically synthesized
  source 1..22: mol_type = other DNA
ttgattggaatagtttcagaag

SEQ ID NO: 121574 - DNA, 22 bp, synthetic construct
  misc_feature 1..22: note = chemically synthesized
  source 1..22: mol_type = other DNA
attggaatagtttcagaaggaa

SEQ ID NO: 121575 - DNA, 22 bp, synthetic construct
  misc_feature 1..22: note = chemically synthesized
  source 1..22: mol_type = other DNA
gaatagtttcagaaggaatggt

SEQ ID NO: 121576 - DNA, 22 bp, synthetic construct
  misc_feature 1..22: note = chemically synthesized
  source 1..22: mol_type = other DNA
cagaaggaatggtaccaattcc

SEQ ID NO: 121577 - DNA, 22 bp, synthetic construct
  misc_feature 1..22: note = chemically synthesized
  source 1..22: mol_type = other DNA
agaaggaatggtaccaattcct

SEQ ID NO: 121578 - DNA, 22 bp, synthetic construct
  misc_feature 1..22: note = chemically synthesized
  source 1..22: mol_type = other DNA
ctccttgtacctctgttagaat

SEQ ID NO: 121579 - DNA, 22 bp, synthetic construct
  misc_feature 1..22: note = chemically synthesized
  source 1..22: mol_type = other DNA
cttgtacctctgttagaatttg

SEQ ID NO: 121580 - DNA, 22 bp, synthetic construct
  misc_feature 1..22: note = chemically synthesized
  source 1..22: mol_type = other DNA
gtacctctgttagaatttggct

SEQ ID NO: 121581 - DNA, 22 bp, synthetic construct
  misc_feature 1..22: note = chemically synthesized
  source 1..22: mol_type = other DNA
tacctctgttagaatttggctg

SEQ ID NO: 121582 - DNA, 22 bp, synthetic construct
  misc_feature 1..22: note = chemically synthesized
  source 1..22: mol_type = other DNA
tgttagaatttggctgtgaatc

SEQ ID NO: 121583 - DNA, 22 bp, synthetic construct
  misc_feature 1..22: note = chemically synthesized
  source 1..22: mol_type = other DNA
ttagaatttggctgtgaatcca

SEQ ID NO: 121584 - DNA, 22 bp, synthetic construct
  misc_feature 1..22: note = chemically synthesized
  source 1..22: mol_type = other DNA
gaatttggctgtgaatccatct

SEQ ID NO: 121585 - DNA, 22 bp, synthetic construct
  misc_feature 1..22: note = chemically synthesized
  source 1..22: mol_type = other DNA
ggctgtgaatccatctggtcct

SEQ ID NO: 121586 - DNA, 22 bp, synthetic construct
  misc_feature 1..22: note = chemically synthesized
  source 1..22: mol_type = other DNA
gctgtgaatccatctggtcctg

SEQ ID NO: 121587 - DNA, 22 bp, synthetic construct
  misc_feature 1..22: note = chemically synthesized
  source 1..22: mol_type = other DNA
tgaatccatctggtcctggact

SEQ ID NO: 121588 - DNA, 22 bp, synthetic construct
  misc_feature 1..22: note = chemically synthesized
  source 1..22: mol_type = other DNA
gtcctggactctttttggttgg

SEQ ID NO: 121589 - DNA, 22 bp, synthetic construct
  misc_feature 1..22: note = chemically synthesized
  source 1..22: mol_type = other DNA
gactctttttggttggtaagct

SEQ ID NO: 121590 - DNA, 22 bp, synthetic construct
  misc_feature 1..22: note = chemically synthesized
  source 1..22: mol_type = other DNA
tttttggttggtaagctattga

SEQ ID NO: 121591 - DNA, 22 bp, synthetic construct
  misc_feature 1..22: note = chemically synthesized
  source 1..22: mol_type = other DNA
tttggttggtaagctattgatt

SEQ ID NO: 121592 - DNA, 22 bp, synthetic construct
  misc_feature 1..22: note = chemically synthesized
  source 1..22: mol_type = other DNA
ttggttggtaagctattgatta

SEQ ID NO: 121593 - DNA, 22 bp, synthetic construct
  misc_feature 1..22: note = chemically synthesized
  source 1..22: mol_type = other DNA
tggttggtaagctattgattat

SEQ ID NO: 121594 - DNA, 22 bp, synthetic construct
  misc_feature 1..22: note = chemically synthesized
  source 1..22: mol_type = other DNA
ggttggtaagctattgattatt

SEQ ID NO: 121595 - DNA, 22 bp, synthetic construct
  misc_feature 1..22: note = chemically synthesized
  source 1..22: mol_type = other DNA
gttggtaagctattgattattg

SEQ ID NO: 121596 - DNA, 22 bp, synthetic construct
  misc_feature 1..22: note = chemically synthesized
  source 1..22: mol_type = other DNA
gtaagctattgattattgccac

SEQ ID NO: 121597 - DNA, 22 bp, synthetic construct
  misc_feature 1..22: note = chemically synthesized
  source 1..22: mol_type = other DNA
ttgattattgccacaatttcag

SEQ ID NO: 121598 - DNA, 22 bp, synthetic construct
  misc_feature 1..22: note = chemically synthesized
  source 1..22: mol_type = other DNA
attattgccacaatttcagatc

SEQ ID NO: 121599 - DNA, 22 bp, synthetic construct
  misc_feature 1..22: note = chemically synthesized
  source 1..22: mol_type = other DNA
ttgccacaatttcagatcctgt

SEQ ID NO: 121600 - DNA, 22 bp, synthetic construct
  misc_feature 1..22: note = chemically synthesized
  source 1..22: mol_type = other DNA
ccacaatttcagatcctgttat

SEQ ID NO: 121601 - DNA, 22 bp, synthetic construct
  misc_feature 1..22: note = chemically synthesized
  source 1..22: mol_type = other DNA
cagatcctgttattggtctatt

SEQ ID NO: 121602 - DNA, 22 bp, synthetic construct
  misc_feature 1..22: note = chemically synthesized
  source 1..22: mol_type = other DNA
agatcctgttattggtctattc

SEQ ID NO: 121603 - DNA, 22 bp, synthetic construct
  misc_feature 1..22: note = chemically synthesized
  source 1..22: mol_type = other DNA
ttattggtctattcagagattc

SEQ ID NO: 121604 - DNA, 22 bp, synthetic construct
  misc_feature 1..22: note = chemically synthesized
  source 1..22: mol_type = other DNA
ttggtctattcagagattcaac

SEQ ID NO: 121605 - DNA, 22 bp, synthetic construct
  misc_feature 1..22: note = chemically synthesized
  source 1..22: mol_type = other DNA
gtctattcagagattcaacttc

SEQ ID NO: 121606 - DNA, 22 bp, synthetic construct
  misc_feature 1..22: note = chemically synthesized
  source 1..22: mol_type = other DNA
ttcagagattcaacttcttcct

SEQ ID NO: 121607 - DNA, 22 bp, synthetic construct
  misc_feature 1..22: note = chemically synthesized
  source 1..22: mol_type = other DNA
agagattcaacttcttcctggt

SEQ ID NO: 121608 - DNA, 22 bp, synthetic construct
  misc_feature 1..22: note = chemically synthesized
  source 1..22: mol_type = other DNA
aacttcttcctggtttagtctt

SEQ ID NO: 121609 - DNA, 22 bp, synthetic construct
  misc_feature 1..22: note = chemically synthesized
  source 1..22: mol_type = other DNA
cttcctggtttagtcttgggat

SEQ ID NO: 121610 - DNA, 22 bp, synthetic construct
  misc_feature 1..22: note = chemically synthesized
  source 1..22: mol_type = other DNA
ttcctggtttagtcttgggata

SEQ ID NO: 121611 - DNA, 22 bp, synthetic construct
  misc_feature 1..22: note = chemically synthesized
  source 1..22: mol_type = other DNA
cctggtttagtcttgggatagt

SEQ ID NO: 121612 - DNA, 22 bp, synthetic construct
  misc_feature 1..22: note = chemically synthesized
  source 1..22: mol_type = other DNA
ctggtttagtcttgggatagtg

SEQ ID NO: 121613 - DNA, 22 bp, synthetic construct
  misc_feature 1..22: note = chemically synthesized
  source 1..22: mol_type = other DNA
gtttagtcttgggatagtgtat

SEQ ID NO: 121614 - DNA, 22 bp, synthetic construct
  misc_feature 1..22: note = chemically synthesized
  source 1..22: mol_type = other DNA
agtcttgggatagtgtatgtgt

SEQ ID NO: 121615 - DNA, 22 bp, synthetic construct
  misc_feature 1..22: note = chemically synthesized
  source 1..22: mol_type = other DNA
gtcttgggatagtgtatgtgtc

SEQ ID NO: 121616 - DNA, 22 bp, synthetic construct
  misc_feature 1..22: note = chemically synthesized
  source 1..22: mol_type = other DNA
gggatagtgtatgtgtccagga

SEQ ID NO: 121617 - DNA, 22 bp, synthetic construct
  misc_feature 1..22: note = chemically synthesized
  source 1..22: mol_type = other DNA
ggatagtgtatgtgtccaggaa

SEQ ID NO: 121618 - DNA, 22 bp, synthetic construct
  misc_feature 1..22: note = chemically synthesized
  source 1..22: mol_type = other DNA
atccatttcttctagattttct

SEQ ID NO: 121619 - DNA, 22 bp, synthetic construct
  misc_feature 1..22: note = chemically synthesized
  source 1..22: mol_type = other DNA
tccatttcttctagattttcta

SEQ ID NO: 121620 - DNA, 22 bp, synthetic construct
  misc_feature 1..22: note = chemically synthesized
  source 1..22: mol_type = other DNA
cttctagattttctagtttatt

SEQ ID NO: 121621 - DNA, 22 bp, synthetic construct
  misc_feature 1..22: note = chemically synthesized
  source 1..22: mol_type = other DNA
ttctagattttctagtttattt

SEQ ID NO: 121622 - DNA, 22 bp, synthetic construct
  misc_feature 1..22: note = chemically synthesized
  source 1..22: mol_type = other DNA
ctagattttctagtttatttgc

SEQ ID NO: 121623 - DNA, 22 bp, synthetic construct
  misc_feature 1..22: note = chemically synthesized
  source 1..22: mol_type = other DNA
tagattttctagtttatttgcg

SEQ ID NO: 121624 - DNA, 22 bp, synthetic construct
  misc_feature 1..22: note = chemically synthesized
  source 1..22: mol_type = other DNA
gattttctagtttatttgcgta

SEQ ID NO: 121625 - DNA, 22 bp, synthetic construct
  misc_feature 1..22: note = chemically synthesized
  source 1..22: mol_type = other DNA
tctagtttatttgcgtagaggt

SEQ ID NO: 121626 - DNA, 22 bp, synthetic construct
  misc_feature 1..22: note = chemically synthesized
  source 1..22: mol_type = other DNA
ctagtttatttgcgtagaggtg

SEQ ID NO: 121627 - DNA, 22 bp, synthetic construct
  misc_feature 1..22: note = chemically synthesized
  source 1..22: mol_type = other DNA
tagtttatttgcgtagaggtgt

SEQ ID NO: 121628 - DNA, 22 bp, synthetic construct
  misc_feature 1..22: note = chemically synthesized
  source 1..22: mol_type = other DNA
gtttatttgcgtagaggtgttt

SEQ ID NO: 121629 - DNA, 22 bp, synthetic construct
  misc_feature 1..22: note = chemically synthesized
  source 1..22: mol_type = other DNA
atttgcgtagaggtgtttgtag

SEQ ID NO: 121630 - DNA, 22 bp, synthetic construct
  misc_feature 1..22: note = chemically synthesized
  source 1..22: mol_type = other DNA
tttgcgtagaggtgtttgtagt

SEQ ID NO: 121631 - DNA, 22 bp, synthetic construct
  misc_feature 1..22: note = chemically synthesized
  source 1..22: mol_type = other DNA
gcgtagaggtgtttgtagtatt

SEQ ID NO: 121632 - DNA, 22 bp, synthetic construct
  misc_feature 1..22: note = chemically synthesized
  source 1..22: mol_type = other DNA
cgtagaggtgtttgtagtattc

SEQ ID NO: 121633 - DNA, 22 bp, synthetic construct
  misc_feature 1..22: note = chemically synthesized
  source 1..22: mol_type = other DNA
gtagtattctctgatggcagtt

SEQ ID NO: 121634 - DNA, 22 bp, synthetic construct
  misc_feature 1..22: note = chemically synthesized
  source 1..22: mol_type = other DNA
tagtattctctgatggcagttt

SEQ ID NO: 121635 - DNA, 22 bp, synthetic construct
  misc_feature 1..22: note = chemically synthesized
  source 1..22: mol_type = other DNA
tctgatggcagtttgtatttct

SEQ ID NO: 121636 - DNA, 22 bp, synthetic construct
  misc_feature 1..22: note = chemically synthesized
  source 1..22: mol_type = other DNA
tgatggcagtttgtatttctgt

SEQ ID NO: 121637 - DNA, 22 bp, synthetic construct
  misc_feature 1..22: note = chemically synthesized
  source 1..22: mol_type = other DNA
atggcagtttgtatttctgtgg

SEQ ID NO: 121638 - DNA, 22 bp, synthetic construct
  misc_feature 1..22: note = chemically synthesized
  source 1..22: mol_type = other DNA
gtatttctgtgggatcggtggt

SEQ ID NO: 121639 - DNA, 22 bp, synthetic construct
  misc_feature 1..22: note = chemically synthesized
  source 1..22: mol_type = other DNA
tatttctgtgggatcggtggtg

SEQ ID NO: 121640 - DNA, 22 bp, synthetic construct
  misc_feature 1..22: note = chemically synthesized
  source 1..22: mol_type = other DNA
ctgtgggatcggtggtgatatc

SEQ ID NO: 121641 - DNA, 22 bp, synthetic construct
  misc_feature 1..22: note = chemically synthesized
  source 1..22: mol_type = other DNA
tgtgggatcggtggtgatatcc

SEQ ID NO: 121642 - DNA, 22 bp, synthetic construct
  misc_feature 1..22: note = chemically synthesized
  source 1..22: mol_type = other DNA
tgggatcggtggtgatatcccc

SEQ ID NO: 121643 - DNA, 22 bp, synthetic construct
  misc_feature 1..22: note = chemically synthesized
  source 1..22: mol_type = other DNA
tatcatttttttattgtgtcta

SEQ ID NO: 121644 - DNA, 22 bp, synthetic construct
  misc_feature 1..22: note = chemically synthesized
  source 1..22: mol_type = other DNA
atcatttttttattgtgtctat

SEQ ID NO: 121645 - DNA, 22 bp, synthetic construct
  misc_feature 1..22: note = chemically synthesized
  source 1..22: mol_type = other DNA
tcatttttttattgtgtctatt

SEQ ID NO: 121646 - DNA, 22 bp, synthetic construct
  misc_feature 1..22: note = chemically synthesized
  source 1..22: mol_type = other DNA
ttttattgtgtctatttgattc

SEQ ID NO: 121647 - DNA, 22 bp, synthetic construct
  misc_feature 1..22: note = chemically synthesized
  source 1..22: mol_type = other DNA
tttattgtgtctatttgattct

SEQ ID NO: 121648 - DNA, 22 bp, synthetic construct
  misc_feature 1..22: note = chemically synthesized
  source 1..22: mol_type = other DNA
ttattgtgtctatttgattctt

SEQ ID NO: 121649 - DNA, 22 bp, synthetic construct
  misc_feature 1..22: note = chemically synthesized
  source 1..22: mol_type = other DNA
tattgtgtctatttgattcttc

SEQ ID NO: 121650 - DNA, 22 bp, synthetic construct
  misc_feature 1..22: note = chemically synthesized
  source 1..22: mol_type = other DNA
attgtgtctatttgattcttct

SEQ ID NO: 121651 - DNA, 22 bp, synthetic construct
  misc_feature 1..22: note = chemically synthesized
  source 1..22: mol_type = other DNA
ttgtgtctatttgattcttctc

SEQ ID NO: 121652 - DNA, 22 bp, synthetic construct
  misc_feature 1..22: note = chemically synthesized
  source 1..22: mol_type = other DNA
tgtctatttgattcttctctct

SEQ ID NO: 121653 - DNA, 22 bp, synthetic construct
  misc_feature 1..22: note = chemically synthesized
  source 1..22: mol_type = other DNA
tttgattcttctctcttttctt

SEQ ID NO: 121654 - DNA, 22 bp, synthetic construct
  misc_feature 1..22: note = chemically synthesized
  source 1..22: mol_type = other DNA
gattcttctctcttttcttatt

SEQ ID NO: 121655 - DNA, 22 bp, synthetic construct
  misc_feature 1..22: note = chemically synthesized
  source 1..22: mol_type = other DNA
attcttctctcttttcttatta

SEQ ID NO: 121656 - DNA, 22 bp, synthetic construct
  misc_feature 1..22: note = chemically synthesized
  source 1..22: mol_type = other DNA
ttctctcttttcttattagtct

SEQ ID NO: 121657 - DNA, 22 bp, synthetic construct
  misc_feature 1..22: note = chemically synthesized
  source 1..22: mol_type = other DNA
ctctcttttcttattagtcttg

SEQ ID NO: 121658 - DNA, 22 bp, synthetic construct
  misc_feature 1..22: note = chemically synthesized
  source 1..22: mol_type = other DNA
tctcttttcttattagtcttgc

SEQ ID NO: 121659 - DNA, 22 bp, synthetic construct
  misc_feature 1..22: note = chemically synthesized
  source 1..22: mol_type = other DNA
tcttttcttattagtcttgcta

SEQ ID NO: 121660 - DNA, 22 bp, synthetic construct
  misc_feature 1..22: note = chemically synthesized
  source 1..22: mol_type = other DNA
ttttcttattagtcttgctagc

SEQ ID NO: 121661 - DNA, 22 bp, synthetic construct
  misc_feature 1..22: note = chemically synthesized
  source 1..22: mol_type = other DNA
ttcttattagtcttgctagcgg

SEQ ID NO: 121662 - DNA, 22 bp, synthetic construct
  misc_feature 1..22: note = chemically synthesized
  source 1..22: mol_type = other DNA
tcttattagtcttgctagcggt

SEQ ID NO: 121663 - DNA, 22 bp, synthetic construct
  misc_feature 1..22: note = chemically synthesized
  source 1..22: mol_type = other DNA
cttattagtcttgctagcggtc

SEQ ID NO: 121664 - DNA, 22 bp, synthetic construct
  misc_feature 1..22: note = chemically synthesized
  source 1..22: mol_type = other DNA
ttattagtcttgctagcggtct

SEQ ID NO: 121665 - DNA, 22 bp, synthetic construct
  misc_feature 1..22: note = chemically synthesized
  source 1..22: mol_type = other DNA
attagtcttgctagcggtctat

SEQ ID NO: 121666 - DNA, 22 bp, synthetic construct
  misc_feature 1..22: note = chemically synthesized
  source 1..22: mol_type = other DNA
ttagtcttgctagcggtctatc

SEQ ID NO: 121667 - DNA, 22 bp, synthetic construct
  misc_feature 1..22: note = chemically synthesized
  source 1..22: mol_type = other DNA
gtcttgctagcggtctatcagt

SEQ ID NO: 121668 - DNA, 22 bp, synthetic construct
  misc_feature 1..22: note = chemically synthesized
  source 1..22: mol_type = other DNA
gctagcggtctatcagttttgt

SEQ ID NO: 121669 - DNA, 22 bp, synthetic construct
  misc_feature 1..22: note = chemically synthesized
  source 1..22: mol_type = other DNA
ctagcggtctatcagttttgtt

SEQ ID NO: 121670 - DNA, 22 bp, synthetic construct
  misc_feature 1..22: note = chemically synthesized
  source 1..22: mol_type = other DNA
gcggtctatcagttttgttgat

SEQ ID NO: 121671 - DNA, 22 bp, synthetic construct
  misc_feature 1..22: note = chemically synthesized
  source 1..22: mol_type = other DNA
tcagttttgttgatcctttcaa

SEQ ID NO: 121672 - DNA, 22 bp, synthetic construct
  misc_feature 1..22: note = chemically synthesized
  source 1..22: mol_type = other DNA
tgttgatcctttcaaaaaacca

SEQ ID NO: 121673 - DNA, 22 bp, synthetic construct
  misc_feature 1..22: note = chemically synthesized
  source 1..22: mol_type = other DNA
gttgatcctttcaaaaaaccag

SEQ ID NO: 121674 - DNA, 22 bp, synthetic construct
  misc_feature 1..22: note = chemically synthesized
  source 1..22: mol_type = other DNA
ttgatcctttcaaaaaaccagc

SEQ ID NO: 121675 - DNA, 22 bp, synthetic construct
  misc_feature 1..22: note = chemically synthesized
  source 1..22: mol_type = other DNA
atcctttcaaaaaaccagctcc

SEQ ID NO: 121676 - DNA, 22 bp, synthetic construct
  misc_feature 1..22: note = chemically synthesized
  source 1..22: mol_type = other DNA
tcaaaaaaccagctcccagatt

SEQ ID NO: 121677 - DNA, 22 bp, synthetic construct
  misc_feature 1..22: note = chemically synthesized
  source 1..22: mol_type = other DNA
caaaaaaccagctcccagattc

SEQ ID NO: 121678 - DNA, 22 bp, synthetic construct
  misc_feature 1..22: note = chemically synthesized
  source 1..22: mol_type = other DNA
aaaaaaccagctcccagattca

SEQ ID NO: 121679 - DNA, 22 bp, synthetic construct
  misc_feature 1..22: note = chemically synthesized
  source 1..22: mol_type = other DNA
ccagattcattaattttttgaa

SEQ ID NO: 121680 - DNA, 22 bp, synthetic construct
  misc_feature 1..22: note = chemically synthesized
  source 1..22: mol_type = other DNA
attaattttttgaagggttttt

SEQ ID NO: 121681 - DNA, 22 bp, synthetic construct
  misc_feature 1..22: note = chemically synthesized
  source 1..22: mol_type = other DNA
attttttgaagggttttttgtg

SEQ ID NO: 121682 - DNA, 22 bp, synthetic construct
  misc_feature 1..22: note = chemically synthesized
  source 1..22: mol_type = other DNA
tttgaagggttttttgtgtctc

SEQ ID NO: 121683 - DNA, 22 bp, synthetic construct
  misc_feature 1..22: note = chemically synthesized
  source 1..22: mol_type = other DNA
ttgaagggttttttgtgtctct

SEQ ID NO: 121684 - DNA, 22 bp, synthetic construct
  misc_feature 1..22: note = chemically synthesized
  source 1..22: mol_type = other DNA
tgaagggttttttgtgtctctg

SEQ ID NO: 121685 - DNA, 22 bp, synthetic construct
  misc_feature 1..22: note = chemically synthesized
  source 1..22: mol_type = other DNA
gaagggttttttgtgtctctgt

SEQ ID NO: 121686 - DNA, 22 bp, synthetic construct
  misc_feature 1..22: note = chemically synthesized
  source 1..22: mol_type = other DNA
aagggttttttgtgtctctgtt

SEQ ID NO: 121687 - DNA, 22 bp, synthetic construct
  misc_feature 1..22: note = chemically synthesized
  source 1..22: mol_type = other DNA
tttgtgtctctgtttccttcag

SEQ ID NO: 121688 - DNA, 22 bp, synthetic construct
  misc_feature 1..22: note = chemically synthesized
  source 1..22: mol_type = other DNA
ttgtgtctctgtttccttcagt

SEQ ID NO: 121689 - DNA, 22 bp, synthetic construct
  misc_feature 1..22: note = chemically synthesized
  source 1..22: mol_type = other DNA
tgtgtctctgtttccttcagtt

SEQ ID NO: 121690 - DNA, 22 bp, synthetic construct
  misc_feature 1..22: note = chemically synthesized
  source 1..22: mol_type = other DNA
gtgtctctgtttccttcagttc

SEQ ID NO: 121691 - DNA, 22 bp, synthetic construct
  misc_feature 1..22: note = chemically synthesized
  source 1..22: mol_type = other DNA
tgtctctgtttccttcagttct

SEQ ID NO: 121692 - DNA, 22 bp, synthetic construct
  misc_feature 1..22: note = chemically synthesized
  source 1..22: mol_type = other DNA
tgtttccttcagttctgctctg

SEQ ID NO: 121693 - DNA, 22 bp, synthetic construct
  misc_feature 1..22: note = chemically synthesized
  source 1..22: mol_type = other DNA
tttccttcagttctgctctgat

SEQ ID NO: 121694 - DNA, 22 bp, synthetic construct
  misc_feature 1..22: note = chemically synthesized
  source 1..22: mol_type = other DNA
ccttcagttctgctctgatttt

SEQ ID NO: 121695 - DNA, 22 bp, synthetic construct
  misc_feature 1..22: note = chemically synthesized
  source 1..22: mol_type = other DNA
cttcagttctgctctgatttta

SEQ ID NO: 121696 - DNA, 22 bp, synthetic construct
  misc_feature 1..22: note = chemically synthesized
  source 1..22: mol_type = other DNA
cagttctgctctgattttagtt

SEQ ID NO: 121697 - DNA, 22 bp, synthetic construct
  misc_feature 1..22: note = chemically synthesized
  source 1..22: mol_type = other DNA
agttctgctctgattttagtta

SEQ ID NO: 121698 - DNA, 22 bp, synthetic construct
  misc_feature 1..22: note = chemically synthesized
  source 1..22: mol_type = other DNA
tgctctgattttagttatttct

SEQ ID NO: 121699 - DNA, 22 bp, synthetic construct
  misc_feature 1..22: note = chemically synthesized
  source 1..22: mol_type = other DNA
ctctgattttagttatttcttg

SEQ ID NO: 121700 - DNA, 22 bp, synthetic construct
  misc_feature 1..22: note = chemically synthesized
  source 1..22: mol_type = other DNA
tgattttagttatttcttgact

SEQ ID NO: 121701 - DNA, 22 bp, synthetic construct
  misc_feature 1..22: note = chemically synthesized
  source 1..22: mol_type = other DNA
attttagttatttcttgacttc

SEQ ID NO: 121702 - DNA, 22 bp, synthetic construct
  misc_feature 1..22: note = chemically synthesized
  source 1..22: mol_type = other DNA
tagttatttcttgacttctgct

SEQ ID NO: 121703 - DNA, 22 bp, synthetic construct
  misc_feature 1..22: note = chemically synthesized
  source 1..22: mol_type = other DNA
agttatttcttgacttctgcta

SEQ ID NO: 121704 - DNA, 22 bp, synthetic construct
  misc_feature 1..22: note = chemically synthesized
  source 1..22: mol_type = other DNA
gttatttcttgacttctgctag

SEQ ID NO: 121705 - DNA, 22 bp, synthetic construct
  misc_feature 1..22: note = chemically synthesized
  source 1..22: mol_type = other DNA
tttcttgacttctgctagcttt

SEQ ID NO: 121706 - DNA, 22 bp, synthetic construct
  misc_feature 1..22: note = chemically synthesized
  source 1..22: mol_type = other DNA
cttgacttctgctagcttttga

SEQ ID NO: 121707 - DNA, 22 bp, synthetic construct
  misc_feature 1..22: note = chemically synthesized
  source 1..22: mol_type = other DNA
ttgacttctgctagcttttgaa

SEQ ID NO: 121708 - DNA, 22 bp, synthetic construct
  misc_feature 1..22: note = chemically synthesized
  source 1..22: mol_type = other DNA
gacttctgctagcttttgaatg

SEQ ID NO: 121709 - DNA, 22 bp, synthetic construct
  misc_feature 1..22: note = chemically synthesized
  source 1..22: mol_type = other DNA
acttctgctagcttttgaatgt

SEQ ID NO: 121710 - DNA, 22 bp, synthetic construct
  misc_feature 1..22: note = chemically synthesized
  source 1..22: mol_type = other DNA
ctgctagcttttgaatgtgttt

SEQ ID NO: 121711 - DNA, 22 bp, synthetic construct
  misc_feature 1..22: note = chemically synthesized
  source 1..22: mol_type = other DNA
tgctagcttttgaatgtgtttg

SEQ ID NO: 121712 - DNA, 22 bp, synthetic construct
  misc_feature 1..22: note = chemically synthesized
  source 1..22: mol_type = other DNA
ctagcttttgaatgtgtttgct

SEQ ID NO: 121713 - DNA, 22 bp, synthetic construct
  misc_feature 1..22: note = chemically synthesized
  source 1..22: mol_type = other DNA
gcttttgaatgtgtttgctctt

SEQ ID NO: 121714 - DNA, 22 bp, synthetic construct
  misc_feature 1..22: note = chemically synthesized
  source 1..22: mol_type = other DNA
ttgaatgtgtttgctcttgctt

SEQ ID NO: 121715 - DNA, 22 bp, synthetic construct
  misc_feature 1..22: note = chemically synthesized
  source 1..22: mol_type = other DNA
tgaatgtgtttgctcttgctta

SEQ ID NO: 121716 - DNA, 22 bp, synthetic construct
  misc_feature 1..22: note = chemically synthesized
  source 1..22: mol_type = other DNA
gaatgtgtttgctcttgcttat

SEQ ID NO: 121717 - DNA, 22 bp, synthetic construct
  misc_feature 1..22: note = chemically synthesized
  source 1..22: mol_type = other DNA
aatgtgtttgctcttgcttatc

SEQ ID NO: 121718 - DNA, 22 bp, synthetic construct
  misc_feature 1..22: note = chemically synthesized
  source 1..22: mol_type = other DNA
gctcttgcttatctagttcttt

SEQ ID NO: 121719 - DNA, 22 bp, synthetic construct
  misc_feature 1..22: note = chemically synthesized
  source 1..22: mol_type = other DNA
ctcttgcttatctagttctttt

SEQ ID NO: 121720 - DNA, 22 bp, synthetic construct
  misc_feature 1..22: note = chemically synthesized
  source 1..22: mol_type = other DNA
ttgcttatctagttcttttaat

SEQ ID NO: 121721 - DNA, 22 bp, synthetic construct
  misc_feature 1..22: note = chemically synthesized
  source 1..22: mol_type = other DNA
gcttatctagttcttttaattg

SEQ ID NO: 121722 - DNA, 22 bp, synthetic construct
  misc_feature 1..22: note = chemically synthesized
  source 1..22: mol_type = other DNA
cttatctagttcttttaattgt

SEQ ID NO: 121723 - DNA, 22 bp, synthetic construct
  misc_feature 1..22: note = chemically synthesized
  source 1..22: mol_type = other DNA
atctagttcttttaattgtgat

SEQ ID NO: 121724 - DNA, 22 bp, synthetic construct
  misc_feature 1..22: note = chemically synthesized
  source 1..22: mol_type = other DNA
tctagttcttttaattgtgatg

SEQ ID NO: 121725 - DNA, 22 bp, synthetic construct
  misc_feature 1..22: note = chemically synthesized
  source 1..22: mol_type = other DNA
gttcttttaattgtgatgttag

SEQ ID NO: 121726 - DNA, 22 bp, synthetic construct
  misc_feature 1..22: note = chemically synthesized
  source 1..22: mol_type = other DNA
ttttaattgtgatgttagggtg

SEQ ID NO: 121727 - DNA, 22 bp, synthetic construct
  misc_feature 1..22: note = chemically synthesized
  source 1..22: mol_type = other DNA
ttaattgtgatgttagggtgtc

SEQ ID NO: 121728 - DNA, 22 bp, synthetic construct
  misc_feature 1..22: note = chemically synthesized
  source 1..22: mol_type = other DNA
taattgtgatgttagggtgtca

SEQ ID NO: 121729 - DNA, 22 bp, synthetic construct
  misc_feature 1..22: note = chemically synthesized
  source 1..22: mol_type = other DNA
aattgtgatgttagggtgtcaa

SEQ ID NO: 121730 - DNA, 22 bp, synthetic construct
  misc_feature 1..22: note = chemically synthesized
  source 1..22: mol_type = other DNA
attgtgatgttagggtgtcaat

SEQ ID NO: 121731 - DNA, 22 bp, synthetic construct
  misc_feature 1..22: note = chemically synthesized
  source 1..22: mol_type = other DNA
tgatgttagggtgtcaattttg

SEQ ID NO: 121732 - DNA, 22 bp, synthetic construct
  misc_feature 1..22: note = chemically synthesized
  source 1..22: mol_type = other DNA
gggtgtcaattttggatctttc

SEQ ID NO: 121733 - DNA, 22 bp, synthetic construct
  misc_feature 1..22: note = chemically synthesized
  source 1..22: mol_type = other DNA
tggatctttcttgctttctctt

SEQ ID NO: 121734 - DNA, 22 bp, synthetic construct
  misc_feature 1..22: note = chemically synthesized
  source 1..22: mol_type = other DNA
ggatctttcttgctttctcttg

SEQ ID NO: 121735 - DNA, 22 bp, synthetic construct
  misc_feature 1..22: note = chemically synthesized
  source 1..22: mol_type = other DNA
gatctttcttgctttctcttgt

SEQ ID NO: 121736 - DNA, 22 bp, synthetic construct
  misc_feature 1..22: note = chemically synthesized
  source 1..22: mol_type = other DNA
tcttgctttctcttgtgggcgt

SEQ ID NO: 121737 - DNA, 22 bp, synthetic construct
  misc_feature 1..22: note = chemically synthesized
  source 1..22: mol_type = other DNA
cttgctttctcttgtgggcgtt

SEQ ID NO: 121738 - DNA, 22 bp, synthetic construct
  misc_feature 1..22: note = chemically synthesized
  source 1..22: mol_type = other DNA
ttgctttctcttgtgggcgttt

SEQ ID NO: 121739 - DNA, 22 bp, synthetic construct
  misc_feature 1..22: note = chemically synthesized
  source 1..22: mol_type = other DNA
gctttctcttgtgggcgtttag

SEQ ID NO: 121740 - DNA, 22 bp, synthetic construct
  misc_feature 1..22: note = chemically synthesized
  source 1..22: mol_type = other DNA
ctttctcttgtgggcgtttagt

SEQ ID NO: 121741 - DNA, 22 bp, synthetic construct
  misc_feature 1..22: note = chemically synthesized
  source 1..22: mol_type = other DNA
tctcttgtgggcgtttagtgct

SEQ ID NO: 121742 - DNA, 22 bp, synthetic construct
  misc_feature 1..22: note = chemically synthesized
  source 1..22: mol_type = other DNA
ctcttgtgggcgtttagtgcta

SEQ ID NO: 121743 - DNA, 22 bp, synthetic construct
  misc_feature 1..22: note = chemically synthesized
  source 1..22: mol_type = other DNA
tcttgtgggcgtttagtgctat

SEQ ID NO: 121744 - DNA, 22 bp, synthetic construct
  misc_feature 1..22: note = chemically synthesized
  source 1..22: mol_type = other DNA
ttgtgggcgtttagtgctataa

SEQ ID NO: 121745 - DNA, 22 bp, synthetic construct
  misc_feature 1..22: note = chemically synthesized
  source 1..22: mol_type = other DNA
gtgggcgtttagtgctataaat

SEQ ID NO: 121746 - DNA, 22 bp, synthetic construct
  misc_feature 1..22: note = chemically synthesized
  source 1..22: mol_type = other DNA
tgggcgtttagtgctataaatt

SEQ ID NO: 121747 - DNA, 22 bp, synthetic construct
  misc_feature 1..22: note = chemically synthesized
  source 1..22: mol_type = other DNA
agtgctataaatttccccctac

SEQ ID NO: 121748 - DNA, 22 bp, synthetic construct
  misc_feature 1..22: note = chemically synthesized
  source 1..22: mol_type = other DNA
gtgctataaatttccccctaca

SEQ ID NO: 121749 - DNA, 22 bp, synthetic construct
  misc_feature 1..22: note = chemically synthesized
  source 1..22: mol_type = other DNA
taaatttccccctacacactga

SEQ ID NO: 121750 - DNA, 22 bp, synthetic construct
  misc_feature 1..22: note = chemically synthesized
  source 1..22: mol_type = other DNA
ccccctacacactgattcgaat

SEQ ID NO: 121751 - DNA, 22 bp, synthetic construct
  misc_feature 1..22: note = chemically synthesized
  source 1..22: mol_type = other DNA
cccctacacactgattcgaatg

SEQ ID NO: 121752 - DNA, 22 bp, synthetic construct
  misc_feature 1..22: note = chemically synthesized
  source 1..22: mol_type = other DNA
cacactgattcgaatgtgtccc

SEQ ID NO: 121753 - DNA, 22 bp, synthetic construct
  misc_feature 1..22: note = chemically synthesized
  source 1..22: mol_type = other DNA
attcgaatgtgtcccagagatt

SEQ ID NO: 121754 - DNA, 22 bp, synthetic construct
  misc_feature 1..22: note = chemically synthesized
  source 1..22: mol_type = other DNA
gaatgtgtcccagagattctgg

SEQ ID NO: 121755 - DNA, 22 bp, synthetic construct
  misc_feature 1..22: note = chemically synthesized
  source 1..22: mol_type = other DNA
tggtatgttgtgtctttgttct

SEQ ID NO: 121756 - DNA, 22 bp, synthetic construct
  misc_feature 1..22: note = chemically synthesized
  source 1..22: mol_type = other DNA
gtatgttgtgtctttgttctca

SEQ ID NO: 121757 - DNA, 22 bp, synthetic construct
  misc_feature 1..22: note = chemically synthesized
  source 1..22: mol_type = other DNA
tgtctttgttctcattggtttc

SEQ ID NO: 121758 - DNA, 22 bp, synthetic construct
  misc_feature 1..22: note = chemically synthesized
  source 1..22: mol_type = other DNA
tgttctcattggtttcaaagaa

SEQ ID NO: 121759 - DNA, 22 bp, synthetic construct
  misc_feature 1..22: note = chemically synthesized
  source 1..22: mol_type = other DNA
gttctcattggtttcaaagaac

SEQ ID NO: 121760 - DNA, 22 bp, synthetic construct
  misc_feature 1..22: note = chemically synthesized
  source 1..22: mol_type = other DNA
ttctcattggtttcaaagaaca

SEQ ID NO: 121761 - DNA, 22 bp, synthetic construct
  misc_feature 1..22: note = chemically synthesized
  source 1..22: mol_type = other DNA
tcattggtttcaaagaacatct

SEQ ID NO: 121762 - DNA, 22 bp, synthetic construct
  misc_feature 1..22: note = chemically synthesized
  source 1..22: mol_type = other DNA
attggtttcaaagaacatcttt

SEQ ID NO: 121763 - DNA, 22 bp, synthetic construct
  misc_feature 1..22: note = chemically synthesized
  source 1..22: mol_type = other DNA
gtttcaaagaacatctttattt

SEQ ID NO: 121764 - DNA, 22 bp, synthetic construct
  misc_feature 1..22: note = chemically synthesized
  source 1..22: mol_type = other DNA
caaagaacatctttatttctgc

SEQ ID NO: 121765 - DNA, 22 bp, synthetic construct
  misc_feature 1..22: note = chemically synthesized
  source 1..22: mol_type = other DNA
aaagaacatctttatttctgcc

SEQ ID NO: 121766 - DNA, 22 bp, synthetic construct
  misc_feature 1..22: note = chemically synthesized
  source 1..22: mol_type = other DNA
tatttctgccttcatttcgtta

SEQ ID NO: 121767 - DNA, 22 bp, synthetic construct
  misc_feature 1..22: note = chemically synthesized
  source 1..22: mol_type = other DNA
atttctgccttcatttcgttat

SEQ ID NO: 121768 - DNA, 22 bp, synthetic construct
  misc_feature 1..22: note = chemically synthesized
  source 1..22: mol_type = other DNA
tttctgccttcatttcgttatg

SEQ ID NO: 121769 - DNA, 22 bp, synthetic construct
  misc_feature 1..22: note = chemically synthesized
  source 1..22: mol_type = other DNA
ctgccttcatttcgttatgtac

SEQ ID NO: 121770 - DNA, 22 bp, synthetic construct
  misc_feature 1..22: note = chemically synthesized
  source 1..22: mol_type = other DNA
tgccttcatttcgttatgtacc

SEQ ID NO: 121771 - DNA, 22 bp, synthetic construct
  misc_feature 1..22: note = chemically synthesized
  source 1..22: mol_type = other DNA
ccttcatttcgttatgtaccca

SEQ ID NO: 121772 - DNA, 22 bp, synthetic construct
  misc_feature 1..22: note = chemically synthesized
  source 1..22: mol_type = other DNA
catttcgttatgtacccagtag

SEQ ID NO: 121773 - DNA, 22 bp, synthetic construct
  misc_feature 1..22: note = chemically synthesized
  source 1..22: mol_type = other DNA
atttcgttatgtacccagtagt

SEQ ID NO: 121774 - DNA, 22 bp, synthetic construct
  misc_feature 1..22: note = chemically synthesized
  source 1..22: mol_type = other DNA
cgttatgtacccagtagtcatt

SEQ ID NO: 121775 - DNA, 22 bp, synthetic construct
  misc_feature 1..22: note = chemically synthesized
  source 1..22: mol_type = other DNA
gttatgtacccagtagtcattc

SEQ ID NO: 121776 - DNA, 22 bp, synthetic construct
  misc_feature 1..22: note = chemically synthesized
  source 1..22: mol_type = other DNA
tgtacccagtagtcattcagga

SEQ ID NO: 121777 - DNA, 22 bp, synthetic construct
  misc_feature 1..22: note = chemically synthesized
  source 1..22: mol_type = other DNA
aggagcaggttgttcagtttcc

SEQ ID NO: 121778 - DNA, 22 bp, synthetic construct
  misc_feature 1..22: note = chemically synthesized
  source 1..22: mol_type = other DNA
ttcagtttccatgtagttgagt

SEQ ID NO: 121779 - DNA, 22 bp, synthetic construct
  misc_feature 1..22: note = chemically synthesized
  source 1..22: mol_type = other DNA
agtttccatgtagttgagtggt

SEQ ID NO: 121780 - DNA, 22 bp, synthetic construct
  misc_feature 1..22: note = chemically synthesized
  source 1..22: mol_type = other DNA
ccatgtagttgagtggttttga

SEQ ID NO: 121781 - DNA, 22 bp, synthetic construct
  misc_feature 1..22: note = chemically synthesized
  source 1..22: mol_type = other DNA
catgtagttgagtggttttgag

SEQ ID NO: 121782 - DNA, 22 bp, synthetic construct
  misc_feature 1..22: note = chemically synthesized
  source 1..22: mol_type = other DNA
agtggttttgagtgagtttctt

SEQ ID NO: 121783 - DNA, 22 bp, synthetic construct
  misc_feature 1..22: note = chemically synthesized
  source 1..22: mol_type = other DNA
tgagtgagtttcttaatcctga

SEQ ID NO: 121784 - DNA, 22 bp, synthetic construct
  misc_feature 1..22: note = chemically synthesized
  source 1..22: mol_type = other DNA
gagtgagtttcttaatcctgag

SEQ ID NO: 121785 - DNA, 22 bp, synthetic construct
  misc_feature 1..22: note = chemically synthesized
  source 1..22: mol_type = other DNA
agtgagtttcttaatcctgagt

SEQ ID NO: 121786 - DNA, 22 bp, synthetic construct
  misc_feature 1..22: note = chemically synthesized
  source 1..22: mol_type = other DNA
cttaatcctgagttctagtttg

SEQ ID NO: 121787 - DNA, 22 bp, synthetic construct
  misc_feature 1..22: note = chemically synthesized
  source 1..22: mol_type = other DNA
ttaatcctgagttctagtttga

SEQ ID NO: 121788 - DNA, 22 bp, synthetic construct
  misc_feature 1..22: note = chemically synthesized
  source 1..22: mol_type = other DNA
aatcctgagttctagtttgatt

SEQ ID NO: 121789 - DNA, 22 bp, synthetic construct
  misc_feature 1..22: note = chemically synthesized
  source 1..22: mol_type = other DNA
atcctgagttctagtttgattg

SEQ ID NO: 121790 - DNA, 22 bp, synthetic construct
  misc_feature 1..22: note = chemically synthesized
  source 1..22: mol_type = other DNA
agttctagtttgattgcactgt

SEQ ID NO: 121791 - DNA, 22 bp, synthetic construct
  misc_feature 1..22: note = chemically synthesized
  source 1..22: mol_type = other DNA
tagtttgattgcactgtggtct

SEQ ID NO: 121792 - DNA, 22 bp, synthetic construct
  misc_feature 1..22: note = chemically synthesized
  source 1..22: mol_type = other DNA
gtttgattgcactgtggtctga

SEQ ID NO: 121793 - DNA, 22 bp, synthetic construct
  misc_feature 1..22: note = chemically synthesized
  source 1..22: mol_type = other DNA
gattgcactgtggtctgagaga

SEQ ID NO: 121794 - DNA, 22 bp, synthetic construct
  misc_feature 1..22: note = chemically synthesized
  source 1..22: mol_type = other DNA
attgcactgtggtctgagagac

SEQ ID NO: 121795 - DNA, 22 bp, synthetic construct
  misc_feature 1..22: note = chemically synthesized
  source 1..22: mol_type = other DNA
cactgtggtctgagagacagtt

SEQ ID NO: 121796 - DNA, 22 bp, synthetic construct
  misc_feature 1..22: note = chemically synthesized
  source 1..22: mol_type = other DNA
tggtctgagagacagtttgtta

SEQ ID NO: 121797 - DNA, 22 bp, synthetic construct
  misc_feature 1..22: note = chemically synthesized
  source 1..22: mol_type = other DNA
agagacagtttgttataatttc

SEQ ID NO: 121798 - DNA, 22 bp, synthetic construct
  misc_feature 1..22: note = chemically synthesized
  source 1..22: mol_type = other DNA
gttataatttctgttcttttat

SEQ ID NO: 121799 - DNA, 22 bp, synthetic construct
  misc_feature 1..22: note = chemically synthesized
  source 1..22: mol_type = other DNA
ttataatttctgttcttttata

SEQ ID NO: 121800 - DNA, 22 bp, synthetic construct
  misc_feature 1..22: note = chemically synthesized
  source 1..22: mol_type = other DNA
taatttctgttcttttatattt

SEQ ID NO: 121801 - DNA, 22 bp, synthetic construct
  misc_feature 1..22: note = chemically synthesized
  source 1..22: mol_type = other DNA
ctgttcttttatatttgctgag

SEQ ID NO: 121802 - DNA, 22 bp, synthetic construct
  misc_feature 1..22: note = chemically synthesized
  source 1..22: mol_type = other DNA
tgttcttttatatttgctgagg

SEQ ID NO: 121803 - DNA, 22 bp, synthetic construct
  misc_feature 1..22: note = chemically synthesized
  source 1..22: mol_type = other DNA
ttcttttatatttgctgaggag

SEQ ID NO: 121804 - DNA, 22 bp, synthetic construct
  misc_feature 1..22: note = chemically synthesized
  source 1..22: mol_type = other DNA
ttttatatttgctgaggagagc

SEQ ID NO: 121805 - DNA, 22 bp, synthetic construct
  misc_feature 1..22: note = chemically synthesized
  source 1..22: mol_type = other DNA
ttatatttgctgaggagagctt

SEQ ID NO: 121806 - DNA, 22 bp, synthetic construct
  misc_feature 1..22: note = chemically synthesized
  source 1..22: mol_type = other DNA
tatatttgctgaggagagcttt

SEQ ID NO: 121807 - DNA, 22 bp, synthetic construct
  misc_feature 1..22: note = chemically synthesized
  source 1..22: mol_type = other DNA
atatttgctgaggagagcttta

SEQ ID NO: 121808 - DNA, 22 bp, synthetic construct
  misc_feature 1..22: note = chemically synthesized
  source 1..22: mol_type = other DNA
tatttgctgaggagagctttac

SEQ ID NO: 121809 - DNA, 22 bp, synthetic construct
  misc_feature 1..22: note = chemically synthesized
  source 1..22: mol_type = other DNA
gctgaggagagctttacttcca

SEQ ID NO: 121810 - DNA, 22 bp, synthetic construct
  misc_feature 1..22: note = chemically synthesized
  source 1..22: mol_type = other DNA
ctgaggagagctttacttccaa

SEQ ID NO: 121811 - DNA, 22 bp, synthetic construct
  misc_feature 1..22: note = chemically synthesized
  source 1..22: mol_type = other DNA
aggagagctttacttccaagta

SEQ ID NO: 121812 - DNA, 22 bp, synthetic construct
  misc_feature 1..22: note = chemically synthesized
  source 1..22: mol_type = other DNA
tacttccaagtatgtggtcaat

SEQ ID NO: 121813 - DNA, 22 bp, synthetic construct
  misc_feature 1..22: note = chemically synthesized
  source 1..22: mol_type = other DNA
acttccaagtatgtggtcaatt

SEQ ID NO: 121814 - DNA, 22 bp, synthetic construct
  misc_feature 1..22: note = chemically synthesized
  source 1..22: mol_type = other DNA
cttccaagtatgtggtcaattt

SEQ ID NO: 121815 - DNA, 22 bp, synthetic construct
  misc_feature 1..22: note = chemically synthesized
  source 1..22: mol_type = other DNA
ccaagtatgtggtcaattttgg

SEQ ID NO: 121816 - DNA, 22 bp, synthetic construct
  misc_feature 1..22: note = chemically synthesized
  source 1..22: mol_type = other DNA
caagtatgtggtcaattttgga

SEQ ID NO: 121817 - DNA, 22 bp, synthetic construct
  misc_feature 1..22: note = chemically synthesized
  source 1..22: mol_type = other DNA
tggaataggtgttgtgtggtgc

SEQ ID NO: 121818 - DNA, 22 bp, synthetic construct
  misc_feature 1..22: note = chemically synthesized
  source 1..22: mol_type = other DNA
ggaataggtgttgtgtggtgct

SEQ ID NO: 121819 - DNA, 22 bp, synthetic construct
  misc_feature 1..22: note = chemically synthesized
  source 1..22: mol_type = other DNA
gaataggtgttgtgtggtgctg

SEQ ID NO: 121820 - DNA, 22 bp, synthetic construct
  misc_feature 1..22: note = chemically synthesized
  source 1..22: mol_type = other DNA
tgtggtgctgaaaaaaaatgta

SEQ ID NO: 121821 - DNA, 22 bp, synthetic construct
  misc_feature 1..22: note = chemically synthesized
  source 1..22: mol_type = other DNA
aaaaaaaatgtatattctgttg

SEQ ID NO: 121822 - DNA, 22 bp, synthetic construct
  misc_feature 1..22: note = chemically synthesized
  source 1..22: mol_type = other DNA
tgttgatttggggtggagagtt

SEQ ID NO: 121823 - DNA, 22 bp, synthetic construct
  misc_feature 1..22: note = chemically synthesized
  source 1..22: mol_type = other DNA
ttgatttggggtggagagttct

SEQ ID NO: 121824 - DNA, 22 bp, synthetic construct
  misc_feature 1..22: note = chemically synthesized
  source 1..22: mol_type = other DNA
atttggggtggagagttctgta

SEQ ID NO: 121825 - DNA, 22 bp, synthetic construct
  misc_feature 1..22: note = chemically synthesized
  source 1..22: mol_type = other DNA
ggggtggagagttctgtagatg

SEQ ID NO: 121826 - DNA, 22 bp, synthetic construct
  misc_feature 1..22: note = chemically synthesized
  source 1..22: mol_type = other DNA
gggtggagagttctgtagatgt

SEQ ID NO: 121827 - DNA, 22 bp, synthetic construct
  misc_feature 1..22: note = chemically synthesized
  source 1..22: mol_type = other DNA
tgtagatgtctattaggtctgc

SEQ ID NO: 121828 - DNA, 22 bp, synthetic construct
  misc_feature 1..22: note = chemically synthesized
  source 1..22: mol_type = other DNA
tagatgtctattaggtctgctt

SEQ ID NO: 121829 - DNA, 22 bp, synthetic construct
  misc_feature 1..22: note = chemically synthesized
  source 1..22: mol_type = other DNA
ttaggtctgcttggtgcagagc

SEQ ID NO: 121830 - DNA, 22 bp, synthetic construct
  misc_feature 1..22: note = chemically synthesized
  source 1..22: mol_type = other DNA
ggtctgcttggtgcagagctgt

SEQ ID NO: 121831 - DNA, 22 bp, synthetic construct
  misc_feature 1..22: note = chemically synthesized
  source 1..22: mol_type = other DNA
cttggtgcagagctgtgttcaa

SEQ ID NO: 121832 - DNA, 22 bp, synthetic construct
  misc_feature 1..22: note = chemically synthesized
  source 1..22: mol_type = other DNA
ggtgcagagctgtgttcaattc

SEQ ID NO: 121833 - DNA, 22 bp, synthetic construct
  misc_feature 1..22: note = chemically synthesized
  source 1..22: mol_type = other DNA
gtgcagagctgtgttcaattcc

SEQ ID NO: 121834 - DNA, 22 bp, synthetic construct
  misc_feature 1..22: note = chemically synthesized
  source 1..22: mol_type = other DNA
tgttcaattcctggatatcctt

SEQ ID NO: 121835 - DNA, 22 bp, synthetic construct
  misc_feature 1..22: note = chemically synthesized
  source 1..22: mol_type = other DNA
aattcctggatatccttgttaa

SEQ ID NO: 121836 - DNA, 22 bp, synthetic construct
  misc_feature 1..22: note = chemically synthesized
  source 1..22: mol_type = other DNA
ctggatatccttgttaactttc

SEQ ID NO: 121837 - DNA, 22 bp, synthetic construct
  misc_feature 1..22: note = chemically synthesized
  source 1..22: mol_type = other DNA
gatatccttgttaactttctgt

SEQ ID NO: 121838 - DNA, 22 bp, synthetic construct
  misc_feature 1..22: note = chemically synthesized
  source 1..22: mol_type = other DNA
gttaactttctgtctcgttgat

SEQ ID NO: 121839 - DNA, 22 bp, synthetic construct
  misc_feature 1..22: note = chemically synthesized
  source 1..22: mol_type = other DNA
ttaactttctgtctcgttgatc

SEQ ID NO: 121840 - DNA, 22 bp, synthetic construct
  misc_feature 1..22: note = chemically synthesized
  source 1..22: mol_type = other DNA
actttctgtctcgttgatctgt

SEQ ID NO: 121841 - DNA, 22 bp, synthetic construct
  misc_feature 1..22: note = chemically synthesized
  source 1..22: mol_type = other DNA
tctgtctcgttgatctgtctaa

SEQ ID NO: 121842 - DNA, 22 bp, synthetic construct
  misc_feature 1..22: note = chemically synthesized
  source 1..22: mol_type = other DNA
ctgtctcgttgatctgtctaat

SEQ ID NO: 121843 - DNA, 22 bp, synthetic construct
  misc_feature 1..22: note = chemically synthesized
  source 1..22: mol_type = other DNA
tgtctcgttgatctgtctaatg

SEQ ID NO: 121844 - DNA, 22 bp, synthetic construct
  misc_feature 1..22: note = chemically synthesized
  source 1..22: mol_type = other DNA
tctcgttgatctgtctaatgtt

SEQ ID NO: 121845 - DNA, 22 bp, synthetic construct
  misc_feature 1..22: note = chemically synthesized
  source 1..22: mol_type = other DNA
gttgatctgtctaatgttgaca

SEQ ID NO: 121846 - DNA, 22 bp, synthetic construct
  misc_feature 1..22: note = chemically synthesized
  source 1..22: mol_type = other DNA
atctgtctaatgttgacagtgg

SEQ ID NO: 121847 - DNA, 22 bp, synthetic construct
  misc_feature 1..22: note = chemically synthesized
  source 1..22: mol_type = other DNA
tctaatgttgacagtggggtat

SEQ ID NO: 121848 - DNA, 22 bp, synthetic construct
  misc_feature 1..22: note = chemically synthesized
  source 1..22: mol_type = other DNA
atgttgacagtggggtattaaa

SEQ ID NO: 121849 - DNA, 22 bp, synthetic construct
  misc_feature 1..22: note = chemically synthesized
  source 1..22: mol_type = other DNA
acagtggggtattaaagtctcc

SEQ ID NO: 121850 - DNA, 22 bp, synthetic construct
  misc_feature 1..22: note = chemically synthesized
  source 1..22: mol_type = other DNA
aagtctcccattattaaagtgt

SEQ ID NO: 121851 - DNA, 22 bp, synthetic construct
  misc_feature 1..22: note = chemically synthesized
  source 1..22: mol_type = other DNA
ccattattaaagtgtgggagtc

SEQ ID NO: 121852 - DNA, 22 bp, synthetic construct
  misc_feature 1..22: note = chemically synthesized
  source 1..22: mol_type = other DNA
ttaaagtgtgggagtctaagtc

SEQ ID NO: 121853 - DNA, 22 bp, synthetic construct
  misc_feature 1..22: note = chemically synthesized
  source 1..22: mol_type = other DNA
aagtgtgggagtctaagtctct

SEQ ID NO: 121854 - DNA, 22 bp, synthetic construct
  misc_feature 1..22: note = chemically synthesized
  source 1..22: mol_type = other DNA
agtctctttgtaggtctctaag

SEQ ID NO: 121855 - DNA, 22 bp, synthetic construct
  misc_feature 1..22: note = chemically synthesized
  source 1..22: mol_type = other DNA
tttgtaggtctctaaggacttg

SEQ ID NO: 121856 - DNA, 22 bp, synthetic construct
  misc_feature 1..22: note = chemically synthesized
  source 1..22: mol_type = other DNA
tgtaggtctctaaggacttgct

SEQ ID NO: 121857 - DNA, 22 bp, synthetic construct
  misc_feature 1..22: note = chemically synthesized
  source 1..22: mol_type = other DNA
gtaggtctctaaggacttgctt

SEQ ID NO: 121858 - DNA, 22 bp, synthetic construct
  misc_feature 1..22: note = chemically synthesized
  source 1..22: mol_type = other DNA
taggtctctaaggacttgcttt

SEQ ID NO: 121859 - DNA, 22 bp, synthetic construct
  misc_feature 1..22: note = chemically synthesized
  source 1..22: mol_type = other DNA
taaggacttgctttatgaatct

SEQ ID NO: 121860 - DNA, 22 bp, synthetic construct
  misc_feature 1..22: note = chemically synthesized
  source 1..22: mol_type = other DNA
aggacttgctttatgaatctgg

SEQ ID NO: 121861 - DNA, 22 bp, synthetic construct
  misc_feature 1..22: note = chemically synthesized
  source 1..22: mol_type = other DNA
gctttatgaatctgggtgctcc

SEQ ID NO: 121862 - DNA, 22 bp, synthetic construct
  misc_feature 1..22: note = chemically synthesized
  source 1..22: mol_type = other DNA
ctttatgaatctgggtgctcct

SEQ ID NO: 121863 - DNA, 22 bp, synthetic construct
  misc_feature 1..22: note = chemically synthesized
  source 1..22: mol_type = other DNA
tatgaatctgggtgctcctgta

SEQ ID NO: 121864 - DNA, 22 bp, synthetic construct
  misc_feature 1..22: note = chemically synthesized
  source 1..22: mol_type = other DNA
atgaatctgggtgctcctgtat

SEQ ID NO: 121865 - DNA, 22 bp, synthetic construct
  misc_feature 1..22: note = chemically synthesized
  source 1..22: mol_type = other DNA
tgaatctgggtgctcctgtatt

SEQ ID NO: 121866 - DNA, 22 bp, synthetic construct
  misc_feature 1..22: note = chemically synthesized
  source 1..22: mol_type = other DNA
ggtgctcctgtattgggtgcat

SEQ ID NO: 121867 - DNA, 22 bp, synthetic construct
  misc_feature 1..22: note = chemically synthesized
  source 1..22: mol_type = other DNA
ctgtattgggtgcatatatatt

SEQ ID NO: 121868 - DNA, 22 bp, synthetic construct
  misc_feature 1..22: note = chemically synthesized
  source 1..22: mol_type = other DNA
tattgggtgcatatatatttag

SEQ ID NO: 121869 - DNA, 22 bp, synthetic construct
  misc_feature 1..22: note = chemically synthesized
  source 1..22: mol_type = other DNA
ggtgcatatatatttaggatag

SEQ ID NO: 121870 - DNA, 22 bp, synthetic construct
  misc_feature 1..22: note = chemically synthesized
  source 1..22: mol_type = other DNA
aggatagttagctcttcttgtt

SEQ ID NO: 121871 - DNA, 22 bp, synthetic construct
  misc_feature 1..22: note = chemically synthesized
  source 1..22: mol_type = other DNA
ggatagttagctcttcttgttg

SEQ ID NO: 121872 - DNA, 22 bp, synthetic construct
  misc_feature 1..22: note = chemically synthesized
  source 1..22: mol_type = other DNA
gctcttcttgttgaattgatcc

SEQ ID NO: 121873 - DNA, 22 bp, synthetic construct
  misc_feature 1..22: note = chemically synthesized
  source 1..22: mol_type = other DNA
ttcttgttgaattgatcccttt

SEQ ID NO: 121874 - DNA, 22 bp, synthetic construct
  misc_feature 1..22: note = chemically synthesized
  source 1..22: mol_type = other DNA
cttgttgaattgatccctttac

SEQ ID NO: 121875 - DNA, 22 bp, synthetic construct
  misc_feature 1..22: note = chemically synthesized
  source 1..22: mol_type = other DNA
ttgttgaattgatccctttacc

SEQ ID NO: 121876 - DNA, 22 bp, synthetic construct
  misc_feature 1..22: note = chemically synthesized
  source 1..22: mol_type = other DNA
gttgaattgatccctttaccat

SEQ ID NO: 121877 - DNA, 22 bp, synthetic construct
  misc_feature 1..22: note = chemically synthesized
  source 1..22: mol_type = other DNA
ttgaattgatccctttaccatt

SEQ ID NO: 121878 - DNA, 22 bp, synthetic construct
  misc_feature 1..22: note = chemically synthesized
  source 1..22: mol_type = other DNA
aattgatccctttaccattatg

SEQ ID NO: 121879 - DNA, 22 bp, synthetic construct
  misc_feature 1..22: note = chemically synthesized
  source 1..22: mol_type = other DNA
atccctttaccattatgtaatg

SEQ ID NO: 121880 - DNA, 22 bp, synthetic construct
  misc_feature 1..22: note = chemically synthesized
  source 1..22: mol_type = other DNA
taccattatgtaatggccttct

SEQ ID NO: 121881 - DNA, 22 bp, synthetic construct
  misc_feature 1..22: note = chemically synthesized
  source 1..22: mol_type = other DNA
accattatgtaatggccttctt

SEQ ID NO: 121882 - DNA, 22 bp, synthetic construct
  misc_feature 1..22: note = chemically synthesized
  source 1..22: mol_type = other DNA
ccattatgtaatggccttcttt

SEQ ID NO: 121883 - DNA, 22 bp, synthetic construct
  misc_feature 1..22: note = chemically synthesized
  source 1..22: mol_type = other DNA
tgtaatggccttctttgtctct

SEQ ID NO: 121884 - DNA, 22 bp, synthetic construct
  misc_feature 1..22: note = chemically synthesized
  source 1..22: mol_type = other DNA
ctttgtctcttttgatctttgt

SEQ ID NO: 121885 - DNA, 22 bp, synthetic construct
  misc_feature 1..22: note = chemically synthesized
  source 1..22: mol_type = other DNA
tttgtctcttttgatctttgtt

SEQ ID NO: 121886 - DNA, 22 bp, synthetic construct
  misc_feature 1..22: note = chemically synthesized
  source 1..22: mol_type = other DNA
tgtctcttttgatctttgttgg

SEQ ID NO: 121887 - DNA, 22 bp, synthetic construct
  misc_feature 1..22: note = chemically synthesized
  source 1..22: mol_type = other DNA
gtctcttttgatctttgttggt

SEQ ID NO: 121888 - DNA, 22 bp, synthetic construct
  misc_feature 1..22: note = chemically synthesized
  source 1..22: mol_type = other DNA
tctcttttgatctttgttggtt

SEQ ID NO: 121889 - DNA, 22 bp, synthetic construct
  misc_feature 1..22: note = chemically synthesized
  source 1..22: mol_type = other DNA
ttttgatctttgttggtttaaa

SEQ ID NO: 121890 - DNA, 22 bp, synthetic construct
  misc_feature 1..22: note = chemically synthesized
  source 1..22: mol_type = other DNA
ttgatctttgttggtttaaagc

SEQ ID NO: 121891 - DNA, 22 bp, synthetic construct
  misc_feature 1..22: note = chemically synthesized
  source 1..22: mol_type = other DNA
tgatctttgttggtttaaagcc

SEQ ID NO: 121892 - DNA, 22 bp, synthetic construct
  misc_feature 1..22: note = chemically synthesized
  source 1..22: mol_type = other DNA
gatctttgttggtttaaagcct

SEQ ID NO: 121893 - DNA, 22 bp, synthetic construct
  misc_feature 1..22: note = chemically synthesized
  source 1..22: mol_type = other DNA
atctttgttggtttaaagcctg

SEQ ID NO: 121894 - DNA, 22 bp, synthetic construct
  misc_feature 1..22: note = chemically synthesized
  source 1..22: mol_type = other DNA
tgttggtttaaagcctgtttta

SEQ ID NO: 121895 - DNA, 22 bp, synthetic construct
  misc_feature 1..22: note = chemically synthesized
  source 1..22: mol_type = other DNA
gttggtttaaagcctgttttat

SEQ ID NO: 121896 - DNA, 22 bp, synthetic construct
  misc_feature 1..22: note = chemically synthesized
  source 1..22: mol_type = other DNA
ttggtttaaagcctgttttatc

SEQ ID NO: 121897 - DNA, 22 bp, synthetic construct
  misc_feature 1..22: note = chemically synthesized
  source 1..22: mol_type = other DNA
gtttaaagcctgttttatcaga

SEQ ID NO: 121898 - DNA, 22 bp, synthetic construct
  misc_feature 1..22: note = chemically synthesized
  source 1..22: mol_type = other DNA
aaagcctgttttatcagagact

SEQ ID NO: 121899 - DNA, 22 bp, synthetic construct
  misc_feature 1..22: note = chemically synthesized
  source 1..22: mol_type = other DNA
aagcctgttttatcagagacta

SEQ ID NO: 121900 - DNA, 22 bp, synthetic construct
  misc_feature 1..22: note = chemically synthesized
  source 1..22: mol_type = other DNA
ttttatcagagactaggattgc

SEQ ID NO: 121901 - DNA, 22 bp, synthetic construct
  misc_feature 1..22: note = chemically synthesized
  source 1..22: mol_type = other DNA
tatcagagactaggattgcaac

SEQ ID NO: 121902 - DNA, 22 bp, synthetic construct
  misc_feature 1..22: note = chemically synthesized
  source 1..22: mol_type = other DNA
atcagagactaggattgcaacc

SEQ ID NO: 121903 - DNA, 22 bp, synthetic construct
  misc_feature 1..22: note = chemically synthesized
  source 1..22: mol_type = other DNA
tcagagactaggattgcaaccc

SEQ ID NO: 121904 - DNA, 22 bp, synthetic construct
  misc_feature 1..22: note = chemically synthesized
  source 1..22: mol_type = other DNA
ggattgcaacccctgccttttt

SEQ ID NO: 121905 - DNA, 22 bp, synthetic construct
  misc_feature 1..22: note = chemically synthesized
  source 1..22: mol_type = other DNA
caacccctgcctttttttgttt

SEQ ID NO: 121906 - DNA, 22 bp, synthetic construct
  misc_feature 1..22: note = chemically synthesized
  source 1..22: mol_type = other DNA
cctttttttgttttccatttgc

SEQ ID NO: 121907 - DNA, 22 bp, synthetic construct
  misc_feature 1..22: note = chemically synthesized
  source 1..22: mol_type = other DNA
tttttgttttccatttgcttgg

SEQ ID NO: 121908 - DNA, 22 bp, synthetic construct
  misc_feature 1..22: note = chemically synthesized
  source 1..22: mol_type = other DNA
ttttgttttccatttgcttggt

SEQ ID NO: 121909 - DNA, 22 bp, synthetic construct
  misc_feature 1..22: note = chemically synthesized
  source 1..22: mol_type = other DNA
tttgttttccatttgcttggta

SEQ ID NO: 121910 - DNA, 22 bp, synthetic construct
  misc_feature 1..22: note = chemically synthesized
  source 1..22: mol_type = other DNA
ttgttttccatttgcttggtag

SEQ ID NO: 121911 - DNA, 22 bp, synthetic construct
  misc_feature 1..22: note = chemically synthesized
  source 1..22: mol_type = other DNA
tgttttccatttgcttggtaga

SEQ ID NO: 121912 - DNA, 22 bp, synthetic construct
  misc_feature 1..22: note = chemically synthesized
  source 1..22: mol_type = other DNA
gttttccatttgcttggtagat

SEQ ID NO: 121913 - DNA, 22 bp, synthetic construct
  misc_feature 1..22: note = chemically synthesized
  source 1..22: mol_type = other DNA
ttttccatttgcttggtagatc

SEQ ID NO: 121914 - DNA, 22 bp, synthetic construct
  misc_feature 1..22: note = chemically synthesized
  source 1..22: mol_type = other DNA
tccatttgcttggtagatcttc

SEQ ID NO: 121915 - DNA, 22 bp, synthetic construct
  misc_feature 1..22: note = chemically synthesized
  source 1..22: mol_type = other DNA
ccatttgcttggtagatcttcc

SEQ ID NO: 121916 - DNA, 22 bp, synthetic construct
  misc_feature 1..22: note = chemically synthesized
  source 1..22: mol_type = other DNA
catttgcttggtagatcttcct

SEQ ID NO: 121917 - DNA, 22 bp, synthetic construct
  misc_feature 1..22: note = chemically synthesized
  source 1..22: mol_type = other DNA
gcttggtagatcttcctccatc

SEQ ID NO: 121918 - DNA, 22 bp, synthetic construct
  misc_feature 1..22: note = chemically synthesized
  source 1..22: mol_type = other DNA
cttggtagatcttcctccatcc

SEQ ID NO: 121919 - DNA, 22 bp, synthetic construct
  misc_feature 1..22: note = chemically synthesized
  source 1..22: mol_type = other DNA
ggtagatcttcctccatccttt

SEQ ID NO: 121920 - DNA, 22 bp, synthetic construct
  misc_feature 1..22: note = chemically synthesized
  source 1..22: mol_type = other DNA
gtagatcttcctccatcctttt

SEQ ID NO: 121921 - DNA, 22 bp, synthetic construct
  misc_feature 1..22: note = chemically synthesized
  source 1..22: mol_type = other DNA
cctccatccttttattttgagc

SEQ ID NO: 121922 - DNA, 22 bp, synthetic construct
  misc_feature 1..22: note = chemically synthesized
  source 1..22: mol_type = other DNA
ctccatccttttattttgagcc

SEQ ID NO: 121923 - DNA, 22 bp, synthetic construct
  misc_feature 1..22: note = chemically synthesized
  source 1..22: mol_type = other DNA
catccttttattttgagcctat

SEQ ID NO: 121924 - DNA, 22 bp, synthetic construct
  misc_feature 1..22: note = chemically synthesized
  source 1..22: mol_type = other DNA
ttattttgagcctatgtgtgtg

SEQ ID NO: 121925 - DNA, 22 bp, synthetic construct
  misc_feature 1..22: note = chemically synthesized
  source 1..22: mol_type = other DNA
tattttgagcctatgtgtgtgt

SEQ ID NO: 121926 - DNA, 22 bp, synthetic construct
  misc_feature 1..22: note = chemically synthesized
  source 1..22: mol_type = other DNA
attttgagcctatgtgtgtgtg

SEQ ID NO: 121927 - DNA, 22 bp, synthetic construct
  misc_feature 1..22: note = chemically synthesized
  source 1..22: mol_type = other DNA
ttttgagcctatgtgtgtgtgt

SEQ ID NO: 121928 - DNA, 22 bp, synthetic construct
  misc_feature 1..22: note = chemically synthesized
  source 1..22: mol_type = other DNA
tgagcctatgtgtgtgtgtgca

SEQ ID NO: 121929 - DNA, 22 bp, synthetic construct
  misc_feature 1..22: note = chemically synthesized
  source 1..22: mol_type = other DNA
gagcctatgtgtgtgtgtgcac

SEQ ID NO: 121930 - DNA, 22 bp, synthetic construct
  misc_feature 1..22: note = chemically synthesized
  source 1..22: mol_type = other DNA
agcctatgtgtgtgtgtgcaca

SEQ ID NO: 121931 - DNA, 22 bp, synthetic construct
  misc_feature 1..22: note = chemically synthesized
  source 1..22: mol_type = other DNA
tgtgtgtgtgtgcacatgagat

SEQ ID NO: 121932 - DNA, 22 bp, synthetic construct
  misc_feature 1..22: note = chemically synthesized
  source 1..22: mol_type = other DNA
cctgaatacactctttatccaa

SEQ ID NO: 121933 - DNA, 22 bp, synthetic construct
  misc_feature 1..22: note = chemically synthesized
  source 1..22: mol_type = other DNA
ctgaatacactctttatccaat

SEQ ID NO: 121934 - DNA, 22 bp, synthetic construct
  misc_feature 1..22: note = chemically synthesized
  source 1..22: mol_type = other DNA
aatacactctttatccaatttg

SEQ ID NO: 121935 - DNA, 22 bp, synthetic construct
  misc_feature 1..22: note = chemically synthesized
  source 1..22: mol_type = other DNA
tttatccaatttgccagtctgt

SEQ ID NO: 121936 - DNA, 22 bp, synthetic construct
  misc_feature 1..22: note = chemically synthesized
  source 1..22: mol_type = other DNA
tatccaatttgccagtctgtgt

SEQ ID NO: 121937 - DNA, 22 bp, synthetic construct
  misc_feature 1..22: note = chemically synthesized
  source 1..22: mol_type = other DNA
atccaatttgccagtctgtgtc

SEQ ID NO: 121938 - DNA, 22 bp, synthetic construct
  misc_feature 1..22: note = chemically synthesized
  source 1..22: mol_type = other DNA
tccaatttgccagtctgtgtct

SEQ ID NO: 121939 - DNA, 22 bp, synthetic construct
  misc_feature 1..22: note = chemically synthesized
  source 1..22: mol_type = other DNA
gccagtctgtgtctttcaattg

SEQ ID NO: 121940 - DNA, 22 bp, synthetic construct
  misc_feature 1..22: note = chemically synthesized
  source 1..22: mol_type = other DNA
ccagtctgtgtctttcaattgg

SEQ ID NO: 121941 - DNA, 22 bp, synthetic construct
  misc_feature 1..22: note = chemically synthesized
  source 1..22: mol_type = other DNA
tgtctttcaattggagcactta

SEQ ID NO: 121942 - DNA, 22 bp, synthetic construct
  misc_feature 1..22: note = chemically synthesized
  source 1..22: mol_type = other DNA
tcaattggagcacttagtccat

SEQ ID NO: 121943 - DNA, 22 bp, synthetic construct
  misc_feature 1..22: note = chemically synthesized
  source 1..22: mol_type = other DNA
caattggagcacttagtccatt

SEQ ID NO: 121944 - DNA, 22 bp, synthetic construct
  misc_feature 1..22: note = chemically synthesized
  source 1..22: mol_type = other DNA
aattggagcacttagtccattt

SEQ ID NO: 121945 - DNA, 22 bp, synthetic construct
  misc_feature 1..22: note = chemically synthesized
  source 1..22: mol_type = other DNA
gagcacttagtccatttacatt

SEQ ID NO: 121946 - DNA, 22 bp, synthetic construct
  misc_feature 1..22: note = chemically synthesized
  source 1..22: mol_type = other DNA
agtccatttacatttaaagtta

SEQ ID NO: 121947 - DNA, 22 bp, synthetic construct
  misc_feature 1..22: note = chemically synthesized
  source 1..22: mol_type = other DNA
gtccatttacatttaaagttaa

SEQ ID NO: 121948 - DNA, 22 bp, synthetic construct
  misc_feature 1..22: note = chemically synthesized
  source 1..22: mol_type = other DNA
acatttaaagttaatattgtat

SEQ ID NO: 121949 - DNA, 22 bp, synthetic construct
  misc_feature 1..22: note = chemically synthesized
  source 1..22: mol_type = other DNA
catttaaagttaatattgtatg

SEQ ID NO: 121950 - DNA, 22 bp, synthetic construct
  misc_feature 1..22: note = chemically synthesized
  source 1..22: mol_type = other DNA
aaagttaatattgtatgtgtga

SEQ ID NO: 121951 - DNA, 22 bp, synthetic construct
  misc_feature 1..22: note = chemically synthesized
  source 1..22: mol_type = other DNA
aagttaatattgtatgtgtgaa

SEQ ID NO: 121952 - DNA, 22 bp, synthetic construct
  misc_feature 1..22: note = chemically synthesized
  source 1..22: mol_type = other DNA
atattgtatgtgtgaatttgat

SEQ ID NO: 121953 - DNA, 22 bp, synthetic construct
  misc_feature 1..22: note = chemically synthesized
  source 1..22: mol_type = other DNA
tatgtgtgaatttgatcctgtc

SEQ ID NO: 121954 - DNA, 22 bp, synthetic construct
  misc_feature 1..22: note = chemically synthesized
  source 1..22: mol_type = other DNA
gatcctgtcattatgatagctg

SEQ ID NO: 121955 - DNA, 22 bp, synthetic construct
  misc_feature 1..22: note = chemically synthesized
  source 1..22: mol_type = other DNA
atcctgtcattatgatagctgg

SEQ ID NO: 121956 - DNA, 22 bp, synthetic construct
  misc_feature 1..22: note = chemically synthesized
  source 1..22: mol_type = other DNA
tcattatgatagctggttattt

SEQ ID NO: 121957 - DNA, 22 bp, synthetic construct
  misc_feature 1..22: note = chemically synthesized
  source 1..22: mol_type = other DNA
tgatagctggttattttgctcg

SEQ ID NO: 121958 - DNA, 22 bp, synthetic construct
  misc_feature 1..22: note = chemically synthesized
  source 1..22: mol_type = other DNA
gttattttgctcgttagttgat

SEQ ID NO: 121959 - DNA, 22 bp, synthetic construct
  misc_feature 1..22: note = chemically synthesized
  source 1..22: mol_type = other DNA
ttttgctcgttagttgatgcag

SEQ ID NO: 121960 - DNA, 22 bp, synthetic construct
  misc_feature 1..22: note = chemically synthesized
  source 1..22: mol_type = other DNA
tgctcgttagttgatgcagttt

SEQ ID NO: 121961 - DNA, 22 bp, synthetic construct
  misc_feature 1..22: note = chemically synthesized
  source 1..22: mol_type = other DNA
gctcgttagttgatgcagtttc

SEQ ID NO: 121962 - DNA, 22 bp, synthetic construct
  misc_feature 1..22: note = chemically synthesized
  source 1..22: mol_type = other DNA
ctcgttagttgatgcagtttct

SEQ ID NO: 121963 - DNA, 22 bp, synthetic construct
  misc_feature 1..22: note = chemically synthesized
  source 1..22: mol_type = other DNA
gttagttgatgcagtttcttcc

SEQ ID NO: 121964 - DNA, 22 bp, synthetic construct
  misc_feature 1..22: note = chemically synthesized
  source 1..22: mol_type = other DNA
gttgatgcagtttcttcctagt

SEQ ID NO: 121965 - DNA, 22 bp, synthetic construct
  misc_feature 1..22: note = chemically synthesized
  source 1..22: mol_type = other DNA
atgcagtttcttcctagtcttg

SEQ ID NO: 121966 - DNA, 22 bp, synthetic construct
  misc_feature 1..22: note = chemically synthesized
  source 1..22: mol_type = other DNA
cttcctagtcttgatggtcttc

SEQ ID NO: 121967 - DNA, 22 bp, synthetic construct
  misc_feature 1..22: note = chemically synthesized
  source 1..22: mol_type = other DNA
ttcctagtcttgatggtcttca

SEQ ID NO: 121968 - DNA, 22 bp, synthetic construct
  misc_feature 1..22: note = chemically synthesized
  source 1..22: mol_type = other DNA
cctagtcttgatggtcttcaca

SEQ ID NO: 121969 - DNA, 22 bp, synthetic construct
  misc_feature 1..22: note = chemically synthesized
  source 1..22: mol_type = other DNA
ctagtcttgatggtcttcacat

SEQ ID NO: 121970 - DNA, 22 bp, synthetic construct
  misc_feature 1..22: note = chemically synthesized
  source 1..22: mol_type = other DNA
gtcttgatggtcttcacatttt

SEQ ID NO: 121971 - DNA, 22 bp, synthetic construct
  misc_feature 1..22: note = chemically synthesized
  source 1..22: mol_type = other DNA
gatggtcttcacattttggcct

SEQ ID NO: 121972 - DNA, 22 bp, synthetic construct
  misc_feature 1..22: note = chemically synthesized
  source 1..22: mol_type = other DNA
atggtcttcacattttggcctg

SEQ ID NO: 121973 - DNA, 22 bp, synthetic construct
  misc_feature 1..22: note = chemically synthesized
  source 1..22: mol_type = other DNA
cacattttggcctgattttgca

SEQ ID NO: 121974 - DNA, 22 bp, synthetic construct
  misc_feature 1..22: note = chemically synthesized
  source 1..22: mol_type = other DNA
acattttggcctgattttgcag

SEQ ID NO: 121975 - DNA, 22 bp, synthetic construct
  misc_feature 1..22: note = chemically synthesized
  source 1..22: mol_type = other DNA
tggcctgattttgcagtggctg

SEQ ID NO: 121976 - DNA, 22 bp, synthetic construct
  misc_feature 1..22: note = chemically synthesized
  source 1..22: mol_type = other DNA
ggcctgattttgcagtggctgg

SEQ ID NO: 121977 - DNA, 22 bp, synthetic construct
  misc_feature 1..22: note = chemically synthesized
  source 1..22: mol_type = other DNA
gcctgattttgcagtggctggt

SEQ ID NO: 121978 - DNA, 22 bp, synthetic construct
  misc_feature 1..22: note = chemically synthesized
  source 1..22: mol_type = other DNA
attttgcagtggctggtaccgg

SEQ ID NO: 121979 - DNA, 22 bp, synthetic construct
  misc_feature 1..22: note = chemically synthesized
  source 1..22: mol_type = other DNA
tgcagtggctggtaccggttgt

SEQ ID NO: 121980 - DNA, 22 bp, synthetic construct
  misc_feature 1..22: note = chemically synthesized
  source 1..22: mol_type = other DNA
gcagtggctggtaccggttgtg

SEQ ID NO: 121981 - DNA, 22 bp, synthetic construct
  misc_feature 1..22: note = chemically synthesized
  source 1..22: mol_type = other DNA
cagtggctggtaccggttgtgc

SEQ ID NO: 121982 - DNA, 22 bp, synthetic construct
  misc_feature 1..22: note = chemically synthesized
  source 1..22: mol_type = other DNA
gtaccggttgtgcctttccatg

SEQ ID NO: 121983 - DNA, 22 bp, synthetic construct
  misc_feature 1..22: note = chemically synthesized
  source 1..22: mol_type = other DNA
tgcctttccatgtttagtgctt

SEQ ID NO: 121984 - DNA, 22 bp, synthetic construct
  misc_feature 1..22: note = chemically synthesized
  source 1..22: mol_type = other DNA
tccatgtttagtgcttccttca

SEQ ID NO: 121985 - DNA, 22 bp, synthetic construct
  misc_feature 1..22: note = chemically synthesized
  source 1..22: mol_type = other DNA
ccatgtttagtgcttccttcag

SEQ ID NO: 121986 - DNA, 22 bp, synthetic construct
  misc_feature 1..22: note = chemically synthesized
  source 1..22: mol_type = other DNA
catgtttagtgcttccttcagg

SEQ ID NO: 121987 - DNA, 22 bp, synthetic construct
  misc_feature 1..22: note = chemically synthesized
  source 1..22: mol_type = other DNA
agtgcttccttcaggagctctt

SEQ ID NO: 121988 - DNA, 22 bp, synthetic construct
  misc_feature 1..22: note = chemically synthesized
  source 1..22: mol_type = other DNA
gtgcttccttcaggagctcttt

SEQ ID NO: 121989 - DNA, 22 bp, synthetic construct
  misc_feature 1..22: note = chemically synthesized
  source 1..22: mol_type = other DNA
ccttcaggagctcttttaggtc

SEQ ID NO: 121990 - DNA, 22 bp, synthetic construct
  misc_feature 1..22: note = chemically synthesized
  source 1..22: mol_type = other DNA
cttcaggagctcttttaggtca

SEQ ID NO: 121991 - DNA, 22 bp, synthetic construct
  misc_feature 1..22: note = chemically synthesized
  source 1..22: mol_type = other DNA
caggagctcttttaggtcaggc

SEQ ID NO: 121992 - DNA, 22 bp, synthetic construct
  misc_feature 1..22: note = chemically synthesized
  source 1..22: mol_type = other DNA
aggagctcttttaggtcaggcc

SEQ ID NO: 121993 - DNA, 22 bp, synthetic construct
  misc_feature 1..22: note = chemically synthesized
  source 1..22: mol_type = other DNA
ttttaggtcaggcctggtgatg

SEQ ID NO: 121994 - DNA, 22 bp, synthetic construct
  misc_feature 1..22: note = chemically synthesized
  source 1..22: mol_type = other DNA
ttaggtcaggcctggtgatgac

SEQ ID NO: 121995 - DNA, 22 bp, synthetic construct
  misc_feature 1..22: note = chemically synthesized
  source 1..22: mol_type = other DNA
taggtcaggcctggtgatgaca

SEQ ID NO: 121996 - DNA, 22 bp, synthetic construct
  misc_feature 1..22: note = chemically synthesized
  source 1..22: mol_type = other DNA
aggtcaggcctggtgatgacaa

SEQ ID NO: 121997 - DNA, 22 bp, synthetic construct
  misc_feature 1..22: note = chemically synthesized
  source 1..22: mol_type = other DNA
ggtcaggcctggtgatgacaaa

SEQ ID NO: 121998 - DNA, 22 bp, synthetic construct
  misc_feature 1..22: note = chemically synthesized
  source 1..22: mol_type = other DNA
gtgatgacaaaatctctcagca

SEQ ID NO: 121999 - DNA, 22 bp, synthetic construct
  misc_feature 1..22: note = chemically synthesized
  source 1..22: mol_type = other DNA
tcagcatttgcttgtctgtaaa

SEQ ID NO: 122000 - DNA, 22 bp, synthetic construct
  misc_feature 1..22: note = chemically synthesized
  source 1..22: mol_type = other DNA
agcatttgcttgtctgtaaagt

SEQ ID NO: 122001 - DNA, 22 bp, synthetic construct
  misc_feature 1..22: note = chemically synthesized
  source 1..22: mol_type = other DNA
gcttgtctgtaaagtattttat

SEQ ID NO: 122002 - DNA, 22 bp, synthetic construct
  misc_feature 1..22: note = chemically synthesized
  source 1..22: mol_type = other DNA
cttgtctgtaaagtattttatt

SEQ ID NO: 122003 - DNA, 22 bp, synthetic construct
  misc_feature 1..22: note = chemically synthesized
  source 1..22: mol_type = other DNA
gtctgtaaagtattttatttct

SEQ ID NO: 122004 - DNA, 22 bp, synthetic construct
  misc_feature 1..22: note = chemically synthesized
  source 1..22: mol_type = other DNA
tctgtaaagtattttatttctc

SEQ ID NO: 122005 - DNA, 22 bp, synthetic construct
  misc_feature 1..22: note = chemically synthesized
  source 1..22: mol_type = other DNA
taaagtattttatttctccttc

SEQ ID NO: 122006 - DNA, 22 bp, synthetic construct
  misc_feature 1..22: note = chemically synthesized
  source 1..22: mol_type = other DNA
tatttctccttcacttatgaag

SEQ ID NO: 122007 - DNA, 22 bp, synthetic construct
  misc_feature 1..22: note = chemically synthesized
  source 1..22: mol_type = other DNA
atttctccttcacttatgaagc

SEQ ID NO: 122008 - DNA, 22 bp, synthetic construct
  misc_feature 1..22: note = chemically synthesized
  source 1..22: mol_type = other DNA
tttctccttcacttatgaagct

SEQ ID NO: 122009 - DNA, 22 bp, synthetic construct
  misc_feature 1..22: note = chemically synthesized
  source 1..22: mol_type = other DNA
ctccttcacttatgaagcttag

SEQ ID NO: 122010 - DNA, 22 bp, synthetic construct
  misc_feature 1..22: note = chemically synthesized
  source 1..22: mol_type = other DNA
tccttcacttatgaagcttagt

SEQ ID NO: 122011 - DNA, 22 bp, synthetic construct
  misc_feature 1..22: note = chemically synthesized
  source 1..22: mol_type = other DNA
cttcacttatgaagcttagttt

SEQ ID NO: 122012 - DNA, 22 bp, synthetic construct
  misc_feature 1..22: note = chemically synthesized
  source 1..22: mol_type = other DNA
cacttatgaagcttagtttggc

SEQ ID NO: 122013 - DNA, 22 bp, synthetic construct
  misc_feature 1..22: note = chemically synthesized
  source 1..22: mol_type = other DNA
acttatgaagcttagtttggct

SEQ ID NO: 122014 - DNA, 22 bp, synthetic construct
  misc_feature 1..22: note = chemically synthesized
  source 1..22: mol_type = other DNA
atgaagcttagtttggctggat

SEQ ID NO: 122015 - DNA, 22 bp, synthetic construct
  misc_feature 1..22: note = chemically synthesized
  source 1..22: mol_type = other DNA
tgaagcttagtttggctggata

SEQ ID NO: 122016 - DNA, 22 bp, synthetic construct
  misc_feature 1..22: note = chemically synthesized
  source 1..22: mol_type = other DNA
agtttggctggatattaaattc

SEQ ID NO: 122017 - DNA, 22 bp, synthetic construct
  misc_feature 1..22: note = chemically synthesized
  source 1..22: mol_type = other DNA
gtttggctggatattaaattct

SEQ ID NO: 122018 - DNA, 22 bp, synthetic construct
  misc_feature 1..22: note = chemically synthesized
  source 1..22: mol_type = other DNA
ggctggatattaaattctgtgt

SEQ ID NO: 122019 - DNA, 22 bp, synthetic construct
  misc_feature 1..22: note = chemically synthesized
  source 1..22: mol_type = other DNA
gctggatattaaattctgtgtt

SEQ ID NO: 122020 - DNA, 22 bp, synthetic construct
  misc_feature 1..22: note = chemically synthesized
  source 1..22: mol_type = other DNA
gatattaaattctgtgttgaaa

SEQ ID NO: 122021 - DNA, 22 bp, synthetic construct
  misc_feature 1..22: note = chemically synthesized
  source 1..22: mol_type = other DNA
aattctgtgttgaaaattcttt

SEQ ID NO: 122022 - DNA, 22 bp, synthetic construct
  misc_feature 1..22: note = chemically synthesized
  source 1..22: mol_type = other DNA
tgtgttgaaaattctttccttt

SEQ ID NO: 122023 - DNA, 22 bp, synthetic construct
  misc_feature 1..22: note = chemically synthesized
  source 1..22: mol_type = other DNA
tgttgaaaattctttcctttaa

SEQ ID NO: 122024 - DNA, 22 bp, synthetic construct
  misc_feature 1..22: note = chemically synthesized
  source 1..22: mol_type = other DNA
aaaattctttcctttaaggatg

SEQ ID NO: 122025 - DNA, 22 bp, synthetic construct
  misc_feature 1..22: note = chemically synthesized
  source 1..22: mol_type = other DNA
tttcctttaaggatgttgaata

SEQ ID NO: 122026 - DNA, 22 bp, synthetic construct
  misc_feature 1..22: note = chemically synthesized
  source 1..22: mol_type = other DNA
tcctttaaggatgttgaatatt

SEQ ID NO: 122027 - DNA, 22 bp, synthetic construct
  misc_feature 1..22: note = chemically synthesized
  source 1..22: mol_type = other DNA
cctttaaggatgttgaatattg

SEQ ID NO: 122028 - DNA, 22 bp, synthetic construct
  misc_feature 1..22: note = chemically synthesized
  source 1..22: mol_type = other DNA
ctttaaggatgttgaatattgg

SEQ ID NO: 122029 - DNA, 22 bp, synthetic construct
  misc_feature 1..22: note = chemically synthesized
  source 1..22: mol_type = other DNA
taaggatgttgaatattggccc

SEQ ID NO: 122030 - DNA, 22 bp, synthetic construct
  misc_feature 1..22: note = chemically synthesized
  source 1..22: mol_type = other DNA
aaggatgttgaatattggcccc

SEQ ID NO: 122031 - DNA, 22 bp, synthetic construct
  misc_feature 1..22: note = chemically synthesized
  source 1..22: mol_type = other DNA
aggatgttgaatattggccccc

SEQ ID NO: 122032 - DNA, 22 bp, synthetic construct
  misc_feature 1..22: note = chemically synthesized
  source 1..22: mol_type = other DNA
aatattggcccccactctcttc

SEQ ID NO: 122033 - DNA, 22 bp, synthetic construct
  misc_feature 1..22: note = chemically synthesized
  source 1..22: mol_type = other DNA
gcccccactctcttctggcttg

SEQ ID NO: 122034 - DNA, 22 bp, synthetic construct
  misc_feature 1..22: note = chemically synthesized
  source 1..22: mol_type = other DNA
tcttctggcttgtagagtttct

SEQ ID NO: 122035 - DNA, 22 bp, synthetic construct
  misc_feature 1..22: note = chemically synthesized
  source 1..22: mol_type = other DNA
ttctggcttgtagagtttctgc

SEQ ID NO: 122036 - DNA, 22 bp, synthetic construct
  misc_feature 1..22: note = chemically synthesized
  source 1..22: mol_type = other DNA
ctggcttgtagagtttctgcca

SEQ ID NO: 122037 - DNA, 22 bp, synthetic construct
  misc_feature 1..22: note = chemically synthesized
  source 1..22: mol_type = other DNA
tggcttgtagagtttctgccaa

SEQ ID NO: 122038 - DNA, 22 bp, synthetic construct
  misc_feature 1..22: note = chemically synthesized
  source 1..22: mol_type = other DNA
gcttgtagagtttctgccaaga

SEQ ID NO: 122039 - DNA, 22 bp, synthetic construct
  misc_feature 1..22: note = chemically synthesized
  source 1..22: mol_type = other DNA
gtagagtttctgccaagagagc

SEQ ID NO: 122040 - DNA, 22 bp, synthetic construct
  misc_feature 1..22: note = chemically synthesized
  source 1..22: mol_type = other DNA
tagagtttctgccaagagagct

SEQ ID NO: 122041 - DNA, 22 bp, synthetic construct
  misc_feature 1..22: note = chemically synthesized
  source 1..22: mol_type = other DNA
ctgccaagagagctgctgttag

SEQ ID NO: 122042 - DNA, 22 bp, synthetic construct
  misc_feature 1..22: note = chemically synthesized
  source 1..22: mol_type = other DNA
tgccaagagagctgctgttagt

SEQ ID NO: 122043 - DNA, 22 bp, synthetic construct
  misc_feature 1..22: note = chemically synthesized
  source 1..22: mol_type = other DNA
ccaagagagctgctgttagtct

SEQ ID NO: 122044 - DNA, 22 bp, synthetic construct
  misc_feature 1..22: note = chemically synthesized
  source 1..22: mol_type = other DNA
ctgttagtctgatgggcttccc

SEQ ID NO: 122045 - DNA, 22 bp, synthetic construct
  misc_feature 1..22: note = chemically synthesized
  source 1..22: mol_type = other DNA
ttagtctgatgggcttcccttt

SEQ ID NO: 122046 - DNA, 22 bp, synthetic construct
  misc_feature 1..22: note = chemically synthesized
  source 1..22: mol_type = other DNA
gtctgatgggcttccctttgtg

SEQ ID NO: 122047 - DNA, 22 bp, synthetic construct
  misc_feature 1..22: note = chemically synthesized
  source 1..22: mol_type = other DNA
atgggcttccctttgtgggtaa

SEQ ID NO: 122048 - DNA, 22 bp, synthetic construct
  misc_feature 1..22: note = chemically synthesized
  source 1..22: mol_type = other DNA
ccctttgtgggtaacccgacct

SEQ ID NO: 122049 - DNA, 22 bp, synthetic construct
  misc_feature 1..22: note = chemically synthesized
  source 1..22: mol_type = other DNA
cctttgtgggtaacccgacctt

SEQ ID NO: 122050 - DNA, 22 bp, synthetic construct
  misc_feature 1..22: note = chemically synthesized
  source 1..22: mol_type = other DNA
tgtgggtaacccgacctttctc

SEQ ID NO: 122051 - DNA, 22 bp, synthetic construct
  misc_feature 1..22: note = chemically synthesized
  source 1..22: mol_type = other DNA
gtgggtaacccgacctttctct

SEQ ID NO: 122052 - DNA, 22 bp, synthetic construct
  misc_feature 1..22: note = chemically synthesized
  source 1..22: mol_type = other DNA
tgggtaacccgacctttctctc

SEQ ID NO: 122053 - DNA, 22 bp, synthetic construct
  misc_feature 1..22: note = chemically synthesized
  source 1..22: mol_type = other DNA
tctctctggctgcccttaacat

SEQ ID NO: 122054 - DNA, 22 bp, synthetic construct
  misc_feature 1..22: note = chemically synthesized
  source 1..22: mol_type = other DNA
ctctctggctgcccttaacatt

SEQ ID NO: 122055 - DNA, 22 bp, synthetic construct
  misc_feature 1..22: note = chemically synthesized
  source 1..22: mol_type = other DNA
tctctggctgcccttaacattt

SEQ ID NO: 122056 - DNA, 22 bp, synthetic construct
  misc_feature 1..22: note = chemically synthesized
  source 1..22: mol_type = other DNA
tctggctgcccttaacattttt

SEQ ID NO: 122057 - DNA, 22 bp, synthetic construct
  misc_feature 1..22: note = chemically synthesized
  source 1..22: mol_type = other DNA
tggctgcccttaacattttttc

SEQ ID NO: 122058 - DNA, 22 bp, synthetic construct
  misc_feature 1..22: note = chemically synthesized
  source 1..22: mol_type = other DNA
gctgcccttaacattttttcct

SEQ ID NO: 122059 - DNA, 22 bp, synthetic construct
  misc_feature 1..22: note = chemically synthesized
  source 1..22: mol_type = other DNA
cccttaacattttttccttcat

SEQ ID NO: 122060 - DNA, 22 bp, synthetic construct
  misc_feature 1..22: note = chemically synthesized
  source 1..22: mol_type = other DNA
aacattttttccttcatttcaa

SEQ ID NO: 122061 - DNA, 22 bp, synthetic construct
  misc_feature 1..22: note = chemically synthesized
  source 1..22: mol_type = other DNA
acattttttccttcatttcaac

SEQ ID NO: 122062 - DNA, 22 bp, synthetic construct
  misc_feature 1..22: note = chemically synthesized
  source 1..22: mol_type = other DNA
tttccttcatttcaactttggt

SEQ ID NO: 122063 - DNA, 22 bp, synthetic construct
  misc_feature 1..22: note = chemically synthesized
  source 1..22: mol_type = other DNA
ttccttcatttcaactttggtg

SEQ ID NO: 122064 - DNA, 22 bp, synthetic construct
  misc_feature 1..22: note = chemically synthesized
  source 1..22: mol_type = other DNA
tccttcatttcaactttggtga

SEQ ID NO: 122065 - DNA, 22 bp, synthetic construct
  misc_feature 1..22: note = chemically synthesized
  source 1..22: mol_type = other DNA
ccttcatttcaactttggtgaa

SEQ ID NO: 122066 - DNA, 22 bp, synthetic construct
  misc_feature 1..22: note = chemically synthesized
  source 1..22: mol_type = other DNA
cttcatttcaactttggtgaat

SEQ ID NO: 122067 - DNA, 22 bp, synthetic construct
  misc_feature 1..22: note = chemically synthesized
  source 1..22: mol_type = other DNA
catttcaactttggtgaatctg

SEQ ID NO: 122068 - DNA, 22 bp, synthetic construct
  misc_feature 1..22: note = chemically synthesized
  source 1..22: mol_type = other DNA
atttcaactttggtgaatctga

SEQ ID NO: 122069 - DNA, 22 bp, synthetic construct
  misc_feature 1..22: note = chemically synthesized
  source 1..22: mol_type = other DNA
caactttggtgaatctgacaat

SEQ ID NO: 122070 - DNA, 22 bp, synthetic construct
  misc_feature 1..22: note = chemically synthesized
  source 1..22: mol_type = other DNA
aactttggtgaatctgacaatt

SEQ ID NO: 122071 - DNA, 22 bp, synthetic construct
  misc_feature 1..22: note = chemically synthesized
  source 1..22: mol_type = other DNA
tggtgaatctgacaattatgtg

SEQ ID NO: 122072 - DNA, 22 bp, synthetic construct
  misc_feature 1..22: note = chemically synthesized
  source 1..22: mol_type = other DNA
ggtgaatctgacaattatgtgt

SEQ ID NO: 122073 - DNA, 22 bp, synthetic construct
  misc_feature 1..22: note = chemically synthesized
  source 1..22: mol_type = other DNA
gtgaatctgacaattatgtgtc

SEQ ID NO: 122074 - DNA, 22 bp, synthetic construct
  misc_feature 1..22: note = chemically synthesized
  source 1..22: mol_type = other DNA
acaattatgtgtcttggagttg

SEQ ID NO: 122075 - DNA, 22 bp, synthetic construct
  misc_feature 1..22: note = chemically synthesized
  source 1..22: mol_type = other DNA
tgtgtcttggagttgctcttct

SEQ ID NO: 122076 - DNA, 22 bp, synthetic construct
  misc_feature 1..22: note = chemically synthesized
  source 1..22: mol_type = other DNA
ggagttgctcttctcgaggagt

SEQ ID NO: 122077 - DNA, 22 bp, synthetic construct
  misc_feature 1..22: note = chemically synthesized
  source 1..22: mol_type = other DNA
gagttgctcttctcgaggagta

SEQ ID NO: 122078 - DNA, 22 bp, synthetic construct
  misc_feature 1..22: note = chemically synthesized
  source 1..22: mol_type = other DNA
ctcttctcgaggagtatgtttg

SEQ ID NO: 122079 - DNA, 22 bp, synthetic construct
  misc_feature 1..22: note = chemically synthesized
  source 1..22: mol_type = other DNA
ttctcgaggagtatgtttgtgg

SEQ ID NO: 122080 - DNA, 22 bp, synthetic construct
  misc_feature 1..22: note = chemically synthesized
  source 1..22: mol_type = other DNA
ctcgaggagtatgtttgtggcg

SEQ ID NO: 122081 - DNA, 22 bp, synthetic construct
  misc_feature 1..22: note = chemically synthesized
  source 1..22: mol_type = other DNA
tcgaggagtatgtttgtggcgt

SEQ ID NO: 122082 - DNA, 22 bp, synthetic construct
  misc_feature 1..22: note = chemically synthesized
  source 1..22: mol_type = other DNA
gaggagtatgtttgtggcgttc

SEQ ID NO: 122083 - DNA, 22 bp, synthetic construct
  misc_feature 1..22: note = chemically synthesized
  source 1..22: mol_type = other DNA
gtggcgttctctgtatttcctg

SEQ ID NO: 122084 - DNA, 22 bp, synthetic construct
  misc_feature 1..22: note = chemically synthesized
  source 1..22: mol_type = other DNA
tggcgttctctgtatttcctga

SEQ ID NO: 122085 - DNA, 22 bp, synthetic construct
  misc_feature 1..22: note = chemically synthesized
  source 1..22: mol_type = other DNA
tctgtatttcctgaatctgaat

SEQ ID NO: 122086 - DNA, 22 bp, synthetic construct
  misc_feature 1..22: note = chemically synthesized
  source 1..22: mol_type = other DNA
tgtatttcctgaatctgaatgt

SEQ ID NO: 122087 - DNA, 22 bp, synthetic construct
  misc_feature 1..22: note = chemically synthesized
  source 1..22: mol_type = other DNA
tatttcctgaatctgaatgttg

SEQ ID NO: 122088 - DNA, 22 bp, synthetic construct
  misc_feature 1..22: note = chemically synthesized
  source 1..22: mol_type = other DNA
cctgaatctgaatgttggcctg

SEQ ID NO: 122089 - DNA, 22 bp, synthetic construct
  misc_feature 1..22: note = chemically synthesized
  source 1..22: mol_type = other DNA
ctgaatctgaatgttggcctgc

SEQ ID NO: 122090 - DNA, 22 bp, synthetic construct
  misc_feature 1..22: note = chemically synthesized
  source 1..22: mol_type = other DNA
aatctgaatgttggcctgcctt

SEQ ID NO: 122091 - DNA, 22 bp, synthetic construct
  misc_feature 1..22: note = chemically synthesized
  source 1..22: mol_type = other DNA
aatgttggcctgccttgctaga

SEQ ID NO: 122092 - DNA, 22 bp, synthetic construct
  misc_feature 1..22: note = chemically synthesized
  source 1..22: mol_type = other DNA
gcctgccttgctagattgggga

SEQ ID NO: 122093 - DNA, 22 bp, synthetic construct
  misc_feature 1..22: note = chemically synthesized
  source 1..22: mol_type = other DNA
ccttgctagattggggaagttc

SEQ ID NO: 122094 - DNA, 22 bp, synthetic construct
  misc_feature 1..22: note = chemically synthesized
  source 1..22: mol_type = other DNA
gctagattggggaagttctcct

SEQ ID NO: 122095 - DNA, 22 bp, synthetic construct
  misc_feature 1..22: note = chemically synthesized
  source 1..22: mol_type = other DNA
ctagattggggaagttctcctg

SEQ ID NO: 122096 - DNA, 22 bp, synthetic construct
  misc_feature 1..22: note = chemically synthesized
  source 1..22: mol_type = other DNA
gattggggaagttctcctggat

SEQ ID NO: 122097 - DNA, 22 bp, synthetic construct
  misc_feature 1..22: note = chemically synthesized
  source 1..22: mol_type = other DNA
gggaagttctcctggataatat

SEQ ID NO: 122098 - DNA, 22 bp, synthetic construct
  misc_feature 1..22: note = chemically synthesized
  source 1..22: mol_type = other DNA
tcctggataatatcctgcagag

SEQ ID NO: 122099 - DNA, 22 bp, synthetic construct
  misc_feature 1..22: note = chemically synthesized
  source 1..22: mol_type = other DNA
ctggataatatcctgcagagtg

SEQ ID NO: 122100 - DNA, 22 bp, synthetic construct
  misc_feature 1..22: note = chemically synthesized
  source 1..22: mol_type = other DNA
gataatatcctgcagagtgttt

SEQ ID NO: 122101 - DNA, 22 bp, synthetic construct
  misc_feature 1..22: note = chemically synthesized
  source 1..22: mol_type = other DNA
cagagtgttttccaacttggtt

SEQ ID NO: 122102 - DNA, 22 bp, synthetic construct
  misc_feature 1..22: note = chemically synthesized
  source 1..22: mol_type = other DNA
tccaacttggttcgattctccc

SEQ ID NO: 122103 - DNA, 22 bp, synthetic construct
  misc_feature 1..22: note = chemically synthesized
  source 1..22: mol_type = other DNA
ccaacttggttcgattctcccc

SEQ ID NO: 122104 - DNA, 22 bp, synthetic construct
  misc_feature 1..22: note = chemically synthesized
  source 1..22: mol_type = other DNA
caacttggttcgattctccccg

SEQ ID NO: 122105 - DNA, 22 bp, synthetic construct
  misc_feature 1..22: note = chemically synthesized
  source 1..22: mol_type = other DNA
ggttcgattctccccgtcactt

SEQ ID NO: 122106 - DNA, 22 bp, synthetic construct
  misc_feature 1..22: note = chemically synthesized
  source 1..22: mol_type = other DNA
gttcgattctccccgtcacttt

SEQ ID NO: 122107 - DNA, 22 bp, synthetic construct
  misc_feature 1..22: note = chemically synthesized
  source 1..22: mol_type = other DNA
gattctccccgtcactttcagg

SEQ ID NO: 122108 - DNA, 22 bp, synthetic construct
  misc_feature 1..22: note = chemically synthesized
  source 1..22: mol_type = other DNA
tccccgtcactttcaggtacac

SEQ ID NO: 122109 - DNA, 22 bp, synthetic construct
  misc_feature 1..22: note = chemically synthesized
  source 1..22: mol_type = other DNA
cccgtcactttcaggtacacca

SEQ ID NO: 122110 - DNA, 22 bp, synthetic construct
  misc_feature 1..22: note = chemically synthesized
  source 1..22: mol_type = other DNA
tcaggtacaccaatcagaccta

SEQ ID NO: 122111 - DNA, 22 bp, synthetic construct
  misc_feature 1..22: note = chemically synthesized
  source 1..22: mol_type = other DNA
caggtacaccaatcagacctag

SEQ ID NO: 122112 - DNA, 22 bp, synthetic construct
  misc_feature 1..22: note = chemically synthesized
  source 1..22: mol_type = other DNA
aggtacaccaatcagacctaga

SEQ ID NO: 122113 - DNA, 22 bp, synthetic construct
  misc_feature 1..22: note = chemically synthesized
  source 1..22: mol_type = other DNA
gatttgatcttttcacatagtc

SEQ ID NO: 122114 - DNA, 22 bp, synthetic construct
  misc_feature 1..22: note = chemically synthesized
  source 1..22: mol_type = other DNA
gatcttttcacatagtcccata

SEQ ID NO: 122115 - DNA, 22 bp, synthetic construct
  misc_feature 1..22: note = chemically synthesized
  source 1..22: mol_type = other DNA
atcttttcacatagtcccatat

SEQ ID NO: 122116 - DNA, 22 bp, synthetic construct
  misc_feature 1..22: note = chemically synthesized
  source 1..22: mol_type = other DNA
ttcacatagtcccatatttctt

SEQ ID NO: 122117 - DNA, 22 bp, synthetic construct
  misc_feature 1..22: note = chemically synthesized
  source 1..22: mol_type = other DNA
tcacatagtcccatatttcttg

SEQ ID NO: 122118 - DNA, 22 bp, synthetic construct
  misc_feature 1..22: note = chemically synthesized
  source 1..22: mol_type = other DNA
cacatagtcccatatttcttgg

SEQ ID NO: 122119 - DNA, 22 bp, synthetic construct
  misc_feature 1..22: note = chemically synthesized
  source 1..22: mol_type = other DNA
acatagtcccatatttcttgga

SEQ ID NO: 122120 - DNA, 22 bp, synthetic construct
  misc_feature 1..22: note = chemically synthesized
  source 1..22: mol_type = other DNA
cttggaggctttgttcatttct

SEQ ID NO: 122121 - DNA, 22 bp, synthetic construct
  misc_feature 1..22: note = chemically synthesized
  source 1..22: mol_type = other DNA
ttggaggctttgttcatttctt

SEQ ID NO: 122122 - DNA, 22 bp, synthetic construct
  misc_feature 1..22: note = chemically synthesized
  source 1..22: mol_type = other DNA
ggaggctttgttcatttctttt

SEQ ID NO: 122123 - DNA, 22 bp, synthetic construct
  misc_feature 1..22: note = chemically synthesized
  source 1..22: mol_type = other DNA
gaggctttgttcatttcttttt

SEQ ID NO: 122124 - DNA, 22 bp, synthetic construct
  misc_feature 1..22: note = chemically synthesized
  source 1..22: mol_type = other DNA
tgttcatttctttttattcttt

SEQ ID NO: 122125 - DNA, 22 bp, synthetic construct
  misc_feature 1..22: note = chemically synthesized
  source 1..22: mol_type = other DNA
gttcatttctttttattctttt

SEQ ID NO: 122126 - DNA, 22 bp, synthetic construct
  misc_feature 1..22: note = chemically synthesized
  source 1..22: mol_type = other DNA
ttcatttctttttattcttttt

SEQ ID NO: 122127 - DNA, 22 bp, synthetic construct
  misc_feature 1..22: note = chemically synthesized
  source 1..22: mol_type = other DNA
atttctttttattcttttttct

SEQ ID NO: 122128 - DNA, 22 bp, synthetic construct
  misc_feature 1..22: note = chemically synthesized
  source 1..22: mol_type = other DNA
ctttttattcttttttctctaa

SEQ ID NO: 122129 - DNA, 22 bp, synthetic construct
  misc_feature 1..22: note = chemically synthesized
  source 1..22: mol_type = other DNA
tttttattcttttttctctaaa

SEQ ID NO: 122130 - DNA, 22 bp, synthetic construct
  misc_feature 1..22: note = chemically synthesized
  source 1..22: mol_type = other DNA
tttattcttttttctctaaact

SEQ ID NO: 122131 - DNA, 22 bp, synthetic construct
  misc_feature 1..22: note = chemically synthesized
  source 1..22: mol_type = other DNA
ttattcttttttctctaaactt

SEQ ID NO: 122132 - DNA, 22 bp, synthetic construct
  misc_feature 1..22: note = chemically synthesized
  source 1..22: mol_type = other DNA
tattcttttttctctaaacttc

SEQ ID NO: 122133 - DNA, 22 bp, synthetic construct
  misc_feature 1..22: note = chemically synthesized
  source 1..22: mol_type = other DNA
attcttttttctctaaacttcc

SEQ ID NO: 122134 - DNA, 22 bp, synthetic construct
  misc_feature 1..22: note = chemically synthesized
  source 1..22: mol_type = other DNA
ttcttttttctctaaacttccc

SEQ ID NO: 122135 - DNA, 22 bp, synthetic construct
  misc_feature 1..22: note = chemically synthesized
  source 1..22: mol_type = other DNA
ttttttctctaaacttcccttc

SEQ ID NO: 122136 - DNA, 22 bp, synthetic construct
  misc_feature 1..22: note = chemically synthesized
  source 1..22: mol_type = other DNA
ttttctctaaacttcccttctc

SEQ ID NO: 122137 - DNA, 22 bp, synthetic construct
  misc_feature 1..22: note = chemically synthesized
  source 1..22: mol_type = other DNA
tttctctaaacttcccttctcg

SEQ ID NO: 122138 - DNA, 22 bp, synthetic construct
  misc_feature 1..22: note = chemically synthesized
  source 1..22: mol_type = other DNA
ttctctaaacttcccttctcgc

SEQ ID NO: 122139 - DNA, 22 bp, synthetic construct
  misc_feature 1..22: note = chemically synthesized
  source 1..22: mol_type = other DNA
tctctaaacttcccttctcgct

SEQ ID NO: 122140 - DNA, 22 bp, synthetic construct
  misc_feature 1..22: note = chemically synthesized
  source 1..22: mol_type = other DNA
ctctaaacttcccttctcgctt

SEQ ID NO: 122141 - DNA, 22 bp, synthetic construct
  misc_feature 1..22: note = chemically synthesized
  source 1..22: mol_type = other DNA
tctaaacttcccttctcgcttc

SEQ ID NO: 122142 - DNA, 22 bp, synthetic construct
  misc_feature 1..22: note = chemically synthesized
  source 1..22: mol_type = other DNA
taaacttcccttctcgcttcat

SEQ ID NO: 122143 - DNA, 22 bp, synthetic construct
  misc_feature 1..22: note = chemically synthesized
  source 1..22: mol_type = other DNA
aacttcccttctcgcttcattt

SEQ ID NO: 122144 - DNA, 22 bp, synthetic construct
  misc_feature 1..22: note = chemically synthesized
  source 1..22: mol_type = other DNA
cccttctcgcttcatttcattt

SEQ ID NO: 122145 - DNA, 22 bp, synthetic construct
  misc_feature 1..22: note = chemically synthesized
  source 1..22: mol_type = other DNA
ccttctcgcttcatttcattta

SEQ ID NO: 122146 - DNA, 22 bp, synthetic construct
  misc_feature 1..22: note = chemically synthesized
  source 1..22: mol_type = other DNA
ctcgcttcatttcatttatttc

SEQ ID NO: 122147 - DNA, 22 bp, synthetic construct
  misc_feature 1..22: note = chemically synthesized
  source 1..22: mol_type = other DNA
tcgcttcatttcatttatttca

SEQ ID NO: 122148 - DNA, 22 bp, synthetic construct
  misc_feature 1..22: note = chemically synthesized
  source 1..22: mol_type = other DNA
gcttcatttcatttatttcatc

SEQ ID NO: 122149 - DNA, 22 bp, synthetic construct
  misc_feature 1..22: note = chemically synthesized
  source 1..22: mol_type = other DNA
catttcatttatttcatcttcc

SEQ ID NO: 122150 - DNA, 22 bp, synthetic construct
  misc_feature 1..22: note = chemically synthesized
  source 1..22: mol_type = other DNA
atttcatttatttcatcttcca

SEQ ID NO: 122151 - DNA, 22 bp, synthetic construct
  misc_feature 1..22: note = chemically synthesized
  source 1..22: mol_type = other DNA
catttatttcatcttccatcac

SEQ ID NO: 122152 - DNA, 22 bp, synthetic construct
  misc_feature 1..22: note = chemically synthesized
  source 1..22: mol_type = other DNA
atttatttcatcttccatcact

SEQ ID NO: 122153 - DNA, 22 bp, synthetic construct
  misc_feature 1..22: note = chemically synthesized
  source 1..22: mol_type = other DNA
atttcatcttccatcactgata

SEQ ID NO: 122154 - DNA, 22 bp, synthetic construct
  misc_feature 1..22: note = chemically synthesized
  source 1..22: mol_type = other DNA
tttcatcttccatcactgatac

SEQ ID NO: 122155 - DNA, 22 bp, synthetic construct
  misc_feature 1..22: note = chemically synthesized
  source 1..22: mol_type = other DNA
catcttccatcactgataccct

SEQ ID NO: 122156 - DNA, 22 bp, synthetic construct
  misc_feature 1..22: note = chemically synthesized
  source 1..22: mol_type = other DNA
atcttccatcactgataccctt

SEQ ID NO: 122157 - DNA, 22 bp, synthetic construct
  misc_feature 1..22: note = chemically synthesized
  source 1..22: mol_type = other DNA
ccatcactgataccctttcttc

SEQ ID NO: 122158 - DNA, 22 bp, synthetic construct
  misc_feature 1..22: note = chemically synthesized
  source 1..22: mol_type = other DNA
catcactgataccctttcttcc

SEQ ID NO: 122159 - DNA, 22 bp, synthetic construct
  misc_feature 1..22: note = chemically synthesized
  source 1..22: mol_type = other DNA
ataccctttcttccagttgatc

SEQ ID NO: 122160 - DNA, 22 bp, synthetic construct
  misc_feature 1..22: note = chemically synthesized
  source 1..22: mol_type = other DNA
tcttccagttgatcgcatcagc

SEQ ID NO: 122161 - DNA, 22 bp, synthetic construct
  misc_feature 1..22: note = chemically synthesized
  source 1..22: mol_type = other DNA
cttccagttgatcgcatcagct

SEQ ID NO: 122162 - DNA, 22 bp, synthetic construct
  misc_feature 1..22: note = chemically synthesized
  source 1..22: mol_type = other DNA
ttccagttgatcgcatcagctc

SEQ ID NO: 122163 - DNA, 22 bp, synthetic construct
  misc_feature 1..22: note = chemically synthesized
  source 1..22: mol_type = other DNA
ccagttgatcgcatcagctcct

SEQ ID NO: 122164 - DNA, 22 bp, synthetic construct
  misc_feature 1..22: note = chemically synthesized
  source 1..22: mol_type = other DNA
cagttgatcgcatcagctcctg

SEQ ID NO: 122165 - DNA, 22 bp, synthetic construct
  misc_feature 1..22: note = chemically synthesized
  source 1..22: mol_type = other DNA
atcgcatcagctcctgaggctt

SEQ ID NO: 122166 - DNA, 22 bp, synthetic construct
  misc_feature 1..22: note = chemically synthesized
  source 1..22: mol_type = other DNA
ctgaggcttctccattcttcac

SEQ ID NO: 122167 - DNA, 22 bp, synthetic construct
  misc_feature 1..22: note = chemically synthesized
  source 1..22: mol_type = other DNA
aggcttctccattcttcacgtc

SEQ ID NO: 122168 - DNA, 22 bp, synthetic construct
  misc_feature 1..22: note = chemically synthesized
  source 1..22: mol_type = other DNA
ctccattcttcacgtcattctc

SEQ ID NO: 122169 - DNA, 22 bp, synthetic construct
  misc_feature 1..22: note = chemically synthesized
  source 1..22: mol_type = other DNA
tccattcttcacgtcattctcg

SEQ ID NO: 122170 - DNA, 22 bp, synthetic construct
  misc_feature 1..22: note = chemically synthesized
  source 1..22: mol_type = other DNA
cattcttcacgtcattctcgag

SEQ ID NO: 122171 - DNA, 22 bp, synthetic construct
  misc_feature 1..22: note = chemically synthesized
  source 1..22: mol_type = other DNA
ttcacgtcattctcgagccttg

SEQ ID NO: 122172 - DNA, 22 bp, synthetic construct
  misc_feature 1..22: note = chemically synthesized
  source 1..22: mol_type = other DNA
cacgtcattctcgagccttggc

SEQ ID NO: 122173 - DNA, 22 bp, synthetic construct
  misc_feature 1..22: note = chemically synthesized
  source 1..22: mol_type = other DNA
acgtcattctcgagccttggct

SEQ ID NO: 122174 - DNA, 22 bp, synthetic construct
  misc_feature 1..22: note = chemically synthesized
  source 1..22: mol_type = other DNA
tcgagccttggctttcagctcc

SEQ ID NO: 122175 - DNA, 22 bp, synthetic construct
  misc_feature 1..22: note = chemically synthesized
  source 1..22: mol_type = other DNA
gagccttggctttcagctccat

SEQ ID NO: 122176 - DNA, 22 bp, synthetic construct
  misc_feature 1..22: note = chemically synthesized
  source 1..22: mol_type = other DNA
ggctttcagctccatcagctcc

SEQ ID NO: 122177 - DNA, 22 bp, synthetic construct
  misc_feature 1..22: note = chemically synthesized
  source 1..22: mol_type = other DNA
gctttcagctccatcagctcct

SEQ ID NO: 122178 - DNA, 22 bp, synthetic construct
  misc_feature 1..22: note = chemically synthesized
  source 1..22: mol_type = other DNA
tcagctccatcagctcctttaa

SEQ ID NO: 122179 - DNA, 22 bp, synthetic construct
  misc_feature 1..22: note = chemically synthesized
  source 1..22: mol_type = other DNA
cagctccatcagctcctttaag

SEQ ID NO: 122180 - DNA, 22 bp, synthetic construct
  misc_feature 1..22: note = chemically synthesized
  source 1..22: mol_type = other DNA
agctccatcagctcctttaagc

SEQ ID NO: 122181 - DNA, 22 bp, synthetic construct
  misc_feature 1..22: note = chemically synthesized
  source 1..22: mol_type = other DNA
catcagctcctttaagcacttc

SEQ ID NO: 122182 - DNA, 22 bp, synthetic construct
  misc_feature 1..22: note = chemically synthesized
  source 1..22: mol_type = other DNA
ctttaagcacttctctgtattg

SEQ ID NO: 122183 - DNA, 22 bp, synthetic construct
  misc_feature 1..22: note = chemically synthesized
  source 1..22: mol_type = other DNA
taagcacttctctgtattggtt

SEQ ID NO: 122184 - DNA, 22 bp, synthetic construct
  misc_feature 1..22: note = chemically synthesized
  source 1..22: mol_type = other DNA
aagcacttctctgtattggtta

SEQ ID NO: 122185 - DNA, 22 bp, synthetic construct
  misc_feature 1..22: note = chemically synthesized
  source 1..22: mol_type = other DNA
agcacttctctgtattggttat

SEQ ID NO: 122186 - DNA, 22 bp, synthetic construct
  misc_feature 1..22: note = chemically synthesized
  source 1..22: mol_type = other DNA
ctctgtattggttattctagtt

SEQ ID NO: 122187 - DNA, 22 bp, synthetic construct
  misc_feature 1..22: note = chemically synthesized
  source 1..22: mol_type = other DNA
tctgtattggttattctagtta

SEQ ID NO: 122188 - DNA, 22 bp, synthetic construct
  misc_feature 1..22: note = chemically synthesized
  source 1..22: mol_type = other DNA
tgtattggttattctagttata

SEQ ID NO: 122189 - DNA, 22 bp, synthetic construct
  misc_feature 1..22: note = chemically synthesized
  source 1..22: mol_type = other DNA
tattggttattctagttataca

SEQ ID NO: 122190 - DNA, 22 bp, synthetic construct
  misc_feature 1..22: note = chemically synthesized
  source 1..22: mol_type = other DNA
gttattctagttatacattcat

SEQ ID NO: 122191 - DNA, 22 bp, synthetic construct
  misc_feature 1..22: note = chemically synthesized
  source 1..22: mol_type = other DNA
ttctagttatacattcatctaa

SEQ ID NO: 122192 - DNA, 22 bp, synthetic construct
  misc_feature 1..22: note = chemically synthesized
  source 1..22: mol_type = other DNA
tagttatacattcatctaaatt

SEQ ID NO: 122193 - DNA, 22 bp, synthetic construct
  misc_feature 1..22: note = chemically synthesized
  source 1..22: mol_type = other DNA
gttatacattcatctaaatttt

SEQ ID NO: 122194 - DNA, 22 bp, synthetic construct
  misc_feature 1..22: note = chemically synthesized
  source 1..22: mol_type = other DNA
tacattcatctaaatttttttt

SEQ ID NO: 122195 - DNA, 22 bp, synthetic construct
  misc_feature 1..22: note = chemically synthesized
  source 1..22: mol_type = other DNA
atctaaattttttttcaaagtt

SEQ ID NO: 122196 - DNA, 22 bp, synthetic construct
  misc_feature 1..22: note = chemically synthesized
  source 1..22: mol_type = other DNA
aattttttttcaaagtttttat

SEQ ID NO: 122197 - DNA, 22 bp, synthetic construct
  misc_feature 1..22: note = chemically synthesized
  source 1..22: mol_type = other DNA
tttttcaaagtttttatcttct

SEQ ID NO: 122198 - DNA, 22 bp, synthetic construct
  misc_feature 1..22: note = chemically synthesized
  source 1..22: mol_type = other DNA
ttttcaaagtttttatcttctt

SEQ ID NO: 122199 - DNA, 22 bp, synthetic construct
  misc_feature 1..22: note = chemically synthesized
  source 1..22: mol_type = other DNA
tttcaaagtttttatcttcttt

SEQ ID NO: 122200 - DNA, 22 bp, synthetic construct
  misc_feature 1..22: note = chemically synthesized
  source 1..22: mol_type = other DNA
ttcaaagtttttatcttctttg

SEQ ID NO: 122201 - DNA, 22 bp, synthetic construct
  misc_feature 1..22: note = chemically synthesized
  source 1..22: mol_type = other DNA
tcaaagtttttatcttctttgc

SEQ ID NO: 122202 - DNA, 22 bp, synthetic construct
  misc_feature 1..22: note = chemically synthesized
  source 1..22: mol_type = other DNA
caaagtttttatcttctttgcc

SEQ ID NO: 122203 - DNA, 22 bp, synthetic construct
  misc_feature 1..22: note = chemically synthesized
  source 1..22: mol_type = other DNA
aaagtttttatcttctttgcct

SEQ ID NO: 122204 - DNA, 22 bp, synthetic construct
  misc_feature 1..22: note = chemically synthesized
  source 1..22: mol_type = other DNA
ttatcttctttgcctttggttt

SEQ ID NO: 122205 - DNA, 22 bp, synthetic construct
  misc_feature 1..22: note = chemically synthesized
  source 1..22: mol_type = other DNA
tatcttctttgcctttggtttg

SEQ ID NO: 122206 - DNA, 22 bp, synthetic construct
  misc_feature 1..22: note = chemically synthesized
  source 1..22: mol_type = other DNA
atcttctttgcctttggtttga

SEQ ID NO: 122207 - DNA, 22 bp, synthetic construct
  misc_feature 1..22: note = chemically synthesized
  source 1..22: mol_type = other DNA
tcttctttgcctttggtttgaa

SEQ ID NO: 122208 - DNA, 22 bp, synthetic construct
  misc_feature 1..22: note = chemically synthesized
  source 1..22: mol_type = other DNA
ctttgcctttggtttgaatttc

SEQ ID NO: 122209 - DNA, 22 bp, synthetic construct
  misc_feature 1..22: note = chemically synthesized
  source 1..22: mol_type = other DNA
tttgcctttggtttgaatttcc

SEQ ID NO: 122210 - DNA, 22 bp, synthetic construct
  misc_feature 1..22: note = chemically synthesized
  source 1..22: mol_type = other DNA
tgcctttggtttgaatttcctc

SEQ ID NO: 122211 - DNA, 22 bp, synthetic construct
  misc_feature 1..22: note = chemically synthesized
  source 1..22: mol_type = other DNA
gcctttggtttgaatttcctcc

SEQ ID NO: 122212 - DNA, 22 bp, synthetic construct
  misc_feature 1..22: note = chemically synthesized
  source 1..22: mol_type = other DNA
cctttggtttgaatttcctcct

SEQ ID NO: 122213 - DNA, 22 bp, synthetic construct
  misc_feature 1..22: note = chemically synthesized
  source 1..22: mol_type = other DNA
tggtttgaatttcctcctgtag

SEQ ID NO: 122214 - DNA, 22 bp, synthetic construct
  misc_feature 1..22: note = chemically synthesized
  source 1..22: mol_type = other DNA
ggtttgaatttcctcctgtagc

SEQ ID NO: 122215 - DNA, 22 bp, synthetic construct
  misc_feature 1..22: note = chemically synthesized
  source 1..22: mol_type = other DNA
gtttgaatttcctcctgtagct

SEQ ID NO: 122216 - DNA, 22 bp, synthetic construct
  misc_feature 1..22: note = chemically synthesized
  source 1..22: mol_type = other DNA
gaatttcctcctgtagctcgga

SEQ ID NO: 122217 - DNA, 22 bp, synthetic construct
  misc_feature 1..22: note = chemically synthesized
  source 1..22: mol_type = other DNA
aatttcctcctgtagctcggag

SEQ ID NO: 122218 - DNA, 22 bp, synthetic construct
  misc_feature 1..22: note = chemically synthesized
  source 1..22: mol_type = other DNA
cctcctgtagctcggagtagtt

SEQ ID NO: 122219 - DNA, 22 bp, synthetic construct
  misc_feature 1..22: note = chemically synthesized
  source 1..22: mol_type = other DNA
ctcctgtagctcggagtagttt

SEQ ID NO: 122220 - DNA, 22 bp, synthetic construct
  misc_feature 1..22: note = chemically synthesized
  source 1..22: mol_type = other DNA
ctgtagctcggagtagtttcat

SEQ ID NO: 122221 - DNA, 22 bp, synthetic construct
  misc_feature 1..22: note = chemically synthesized
  source 1..22: mol_type = other DNA
tagctcggagtagtttcatcgt

SEQ ID NO: 122222 - DNA, 22 bp, synthetic construct
  misc_feature 1..22: note = chemically synthesized
  source 1..22: mol_type = other DNA
ggagtagtttcatcgtctgaag

SEQ ID NO: 122223 - DNA, 22 bp, synthetic construct
  misc_feature 1..22: note = chemically synthesized
  source 1..22: mol_type = other DNA
catcgtctgaagtcttcttctc

SEQ ID NO: 122224 - DNA, 22 bp, synthetic construct
  misc_feature 1..22: note = chemically synthesized
  source 1..22: mol_type = other DNA
atcgtctgaagtcttcttctct

SEQ ID NO: 122225 - DNA, 22 bp, synthetic construct
  misc_feature 1..22: note = chemically synthesized
  source 1..22: mol_type = other DNA
aagtcttcttctctcagctcgt

SEQ ID NO: 122226 - DNA, 22 bp, synthetic construct
  misc_feature 1..22: note = chemically synthesized
  source 1..22: mol_type = other DNA
cttctctcagctcgtcaaagtc

SEQ ID NO: 122227 - DNA, 22 bp, synthetic construct
  misc_feature 1..22: note = chemically synthesized
  source 1..22: mol_type = other DNA
ttctctcagctcgtcaaagtca

SEQ ID NO: 122228 - DNA, 22 bp, synthetic construct
  misc_feature 1..22: note = chemically synthesized
  source 1..22: mol_type = other DNA
ctctcagctcgtcaaagtcatt

SEQ ID NO: 122229 - DNA, 22 bp, synthetic construct
  misc_feature 1..22: note = chemically synthesized
  source 1..22: mol_type = other DNA
tctcagctcgtcaaagtcattc

SEQ ID NO: 122230 - DNA, 22 bp, synthetic construct
  misc_feature 1..22: note = chemically synthesized
  source 1..22: mol_type = other DNA
tcagctcgtcaaagtcattctc

SEQ ID NO: 122231 - DNA, 22 bp, synthetic construct
  misc_feature 1..22: note = chemically synthesized
  source 1..22: mol_type = other DNA
agctcgtcaaagtcattctcca

SEQ ID NO: 122232 - DNA, 22 bp, synthetic construct
  misc_feature 1..22: note = chemically synthesized
  source 1..22: mol_type = other DNA
gtcaaagtcattctccatccag

SEQ ID NO: 122233 - DNA, 22 bp, synthetic construct
  misc_feature 1..22: note = chemically synthesized
  source 1..22: mol_type = other DNA
tccatccagctttgttccgttg

SEQ ID NO: 122234 - DNA, 22 bp, synthetic construct
  misc_feature 1..22: note = chemically synthesized
  source 1..22: mol_type = other DNA
catccagctttgttccgttgct

SEQ ID NO: 122235 - DNA, 22 bp, synthetic construct
  misc_feature 1..22: note = chemically synthesized
  source 1..22: mol_type = other DNA
tgttccgttgctggtgaggaac

SEQ ID NO: 122236 - DNA, 22 bp, synthetic construct
  misc_feature 1..22: note = chemically synthesized
  source 1..22: mol_type = other DNA
gttccgttgctggtgaggaact

SEQ ID NO: 122237 - DNA, 22 bp, synthetic construct
  misc_feature 1..22: note = chemically synthesized
  source 1..22: mol_type = other DNA
ttccgttgctggtgaggaactg

SEQ ID NO: 122238 - DNA, 22 bp, synthetic construct
  misc_feature 1..22: note = chemically synthesized
  source 1..22: mol_type = other DNA
cgttgctggtgaggaactgctt

SEQ ID NO: 122239 - DNA, 22 bp, synthetic construct
  misc_feature 1..22: note = chemically synthesized
  source 1..22: mol_type = other DNA
ctggtgaggaactgctttcctt

SEQ ID NO: 122240 - DNA, 22 bp, synthetic construct
  misc_feature 1..22: note = chemically synthesized
  source 1..22: mol_type = other DNA
gtgaggaactgctttcctttgg

SEQ ID NO: 122241 - DNA, 22 bp, synthetic construct
  misc_feature 1..22: note = chemically synthesized
  source 1..22: mol_type = other DNA
ctttcctttggaggaggaaagg

SEQ ID NO: 122242 - DNA, 22 bp, synthetic construct
  misc_feature 1..22: note = chemically synthesized
  source 1..22: mol_type = other DNA
tcctttggaggaggaaaggtgc

SEQ ID NO: 122243 - DNA, 22 bp, synthetic construct
  misc_feature 1..22: note = chemically synthesized
  source 1..22: mol_type = other DNA
cctttggaggaggaaaggtgct

SEQ ID NO: 122244 - DNA, 22 bp, synthetic construct
  misc_feature 1..22: note = chemically synthesized
  source 1..22: mol_type = other DNA
ctttggaggaggaaaggtgctc

SEQ ID NO: 122245 - DNA, 22 bp, synthetic construct
  misc_feature 1..22: note = chemically synthesized
  source 1..22: mol_type = other DNA
tggaggaggaaaggtgctctgc

SEQ ID NO: 122246 - DNA, 22 bp, synthetic construct
  misc_feature 1..22: note = chemically synthesized
  source 1..22: mol_type = other DNA
ggaggaggaaaggtgctctgct

SEQ ID NO: 122247 - DNA, 22 bp, synthetic construct
  misc_feature 1..22: note = chemically synthesized
  source 1..22: mol_type = other DNA
gaggaggaaaggtgctctgctt

SEQ ID NO: 122248 - DNA, 22 bp, synthetic construct
  misc_feature 1..22: note = chemically synthesized
  source 1..22: mol_type = other DNA
tgctttttagagtttccagttt

SEQ ID NO: 122249 - DNA, 22 bp, synthetic construct
  misc_feature 1..22: note = chemically synthesized
  source 1..22: mol_type = other DNA
ctttttagagtttccagttttt

SEQ ID NO: 122250 - DNA, 22 bp, synthetic construct
  misc_feature 1..22: note = chemically synthesized
  source 1..22: mol_type = other DNA
tttagagtttccagtttttctg

SEQ ID NO: 122251 - DNA, 22 bp, synthetic construct
  misc_feature 1..22: note = chemically synthesized
  source 1..22: mol_type = other DNA
ttagagtttccagtttttctgc

SEQ ID NO: 122252 - DNA, 22 bp, synthetic construct
  misc_feature 1..22: note = chemically synthesized
  source 1..22: mol_type = other DNA
tagagtttccagtttttctgct

SEQ ID NO: 122253 - DNA, 22 bp, synthetic construct
  misc_feature 1..22: note = chemically synthesized
  source 1..22: mol_type = other DNA
agagtttccagtttttctgctc

SEQ ID NO: 122254 - DNA, 22 bp, synthetic construct
  misc_feature 1..22: note = chemically synthesized
  source 1..22: mol_type = other DNA
gagtttccagtttttctgctct

SEQ ID NO: 122255 - DNA, 22 bp, synthetic construct
  misc_feature 1..22: note = chemically synthesized
  source 1..22: mol_type = other DNA
ccagtttttctgctctgttttt

SEQ ID NO: 122256 - DNA, 22 bp, synthetic construct
  misc_feature 1..22: note = chemically synthesized
  source 1..22: mol_type = other DNA
cagtttttctgctctgtttttt

SEQ ID NO: 122257 - DNA, 22 bp, synthetic construct
  misc_feature 1..22: note = chemically synthesized
  source 1..22: mol_type = other DNA
ttctgctctgttttttccccaa

SEQ ID NO: 122258 - DNA, 22 bp, synthetic construct
  misc_feature 1..22: note = chemically synthesized
  source 1..22: mol_type = other DNA
tctgctctgttttttccccaac

SEQ ID NO: 122259 - DNA, 22 bp, synthetic construct
  misc_feature 1..22: note = chemically synthesized
  source 1..22: mol_type = other DNA
ctgctctgttttttccccaact

SEQ ID NO: 122260 - DNA, 22 bp, synthetic construct
  misc_feature 1..22: note = chemically synthesized
  source 1..22: mol_type = other DNA
tgctctgttttttccccaactt

SEQ ID NO: 122261 - DNA, 22 bp, synthetic construct
  misc_feature 1..22: note = chemically synthesized
  source 1..22: mol_type = other DNA
ctctgttttttccccaactttg

SEQ ID NO: 122262 - DNA, 22 bp, synthetic construct
  misc_feature 1..22: note = chemically synthesized
  source 1..22: mol_type = other DNA
tgttttttccccaactttgtgg

SEQ ID NO: 122263 - DNA, 22 bp, synthetic construct
  misc_feature 1..22: note = chemically synthesized
  source 1..22: mol_type = other DNA
ttttttccccaactttgtggtt

SEQ ID NO: 122264 - DNA, 22 bp, synthetic construct
  misc_feature 1..22: note = chemically synthesized
  source 1..22: mol_type = other DNA
tttccccaactttgtggttgta

SEQ ID NO: 122265 - DNA, 22 bp, synthetic construct
  misc_feature 1..22: note = chemically synthesized
  source 1..22: mol_type = other DNA
ttccccaactttgtggttgtat

SEQ ID NO: 122266 - DNA, 22 bp, synthetic construct
  misc_feature 1..22: note = chemically synthesized
  source 1..22: mol_type = other DNA
tccccaactttgtggttgtatc

SEQ ID NO: 122267 - DNA, 22 bp, synthetic construct
  misc_feature 1..22: note = chemically synthesized
  source 1..22: mol_type = other DNA
ccccaactttgtggttgtatct

SEQ ID NO: 122268 - DNA, 22 bp, synthetic construct
  misc_feature 1..22: note = chemically synthesized
  source 1..22: mol_type = other DNA
cccaactttgtggttgtatcta

SEQ ID NO: 122269 - DNA, 22 bp, synthetic construct
  misc_feature 1..22: note = chemically synthesized
  source 1..22: mol_type = other DNA
tgtggttgtatctacttttggt

SEQ ID NO: 122270 - DNA, 22 bp, synthetic construct
  misc_feature 1..22: note = chemically synthesized
  source 1..22: mol_type = other DNA
gtggttgtatctacttttggtc

SEQ ID NO: 122271 - DNA, 22 bp, synthetic construct
  misc_feature 1..22: note = chemically synthesized
  source 1..22: mol_type = other DNA
tggttgtatctacttttggtct

SEQ ID NO: 122272 - DNA, 22 bp, synthetic construct
  misc_feature 1..22: note = chemically synthesized
  source 1..22: mol_type = other DNA
tatctacttttggtctttgatg

SEQ ID NO: 122273 - DNA, 22 bp, synthetic construct
  misc_feature 1..22: note = chemically synthesized
  source 1..22: mol_type = other DNA
cttttggtctttgatgatagtg

SEQ ID NO: 122274 - DNA, 22 bp, synthetic construct
  misc_feature 1..22: note = chemically synthesized
  source 1..22: mol_type = other DNA
ttggtctttgatgatagtgatg

SEQ ID NO: 122275 - DNA, 22 bp, synthetic construct
  misc_feature 1..22: note = chemically synthesized
  source 1..22: mol_type = other DNA
tggtctttgatgatagtgatgt

SEQ ID NO: 122276 - DNA, 22 bp, synthetic construct
  misc_feature 1..22: note = chemically synthesized
  source 1..22: mol_type = other DNA
ggtctttgatgatagtgatgta

SEQ ID NO: 122277 - DNA, 22 bp, synthetic construct
  misc_feature 1..22: note = chemically synthesized
  source 1..22: mol_type = other DNA
gtctttgatgatagtgatgtac

SEQ ID NO: 122278 - DNA, 22 bp, synthetic construct
  misc_feature 1..22: note = chemically synthesized
  source 1..22: mol_type = other DNA
tgatgatagtgatgtaccgatg

SEQ ID NO: 122279 - DNA, 22 bp, synthetic construct
  misc_feature 1..22: note = chemically synthesized
  source 1..22: mol_type = other DNA
gatgatagtgatgtaccgatgg

SEQ ID NO: 122280 - DNA, 22 bp, synthetic construct
  misc_feature 1..22: note = chemically synthesized
  source 1..22: mol_type = other DNA
atgatagtgatgtaccgatggg

SEQ ID NO: 122281 - DNA, 22 bp, synthetic construct
  misc_feature 1..22: note = chemically synthesized
  source 1..22: mol_type = other DNA
ttggtgtggatgtcctttctgt

SEQ ID NO: 122282 - DNA, 22 bp, synthetic construct
  misc_feature 1..22: note = chemically synthesized
  source 1..22: mol_type = other DNA
tggtgtggatgtcctttctgtt

SEQ ID NO: 122283 - DNA, 22 bp, synthetic construct
  misc_feature 1..22: note = chemically synthesized
  source 1..22: mol_type = other DNA
ggtgtggatgtcctttctgttt

SEQ ID NO: 122284 - DNA, 22 bp, synthetic construct
  misc_feature 1..22: note = chemically synthesized
  source 1..22: mol_type = other DNA
gtgtggatgtcctttctgtttg

SEQ ID NO: 122285 - DNA, 22 bp, synthetic construct
  misc_feature 1..22: note = chemically synthesized
  source 1..22: mol_type = other DNA
tctgtttgttagttttccttct

SEQ ID NO: 122286 - DNA, 22 bp, synthetic construct
  misc_feature 1..22: note = chemically synthesized
  source 1..22: mol_type = other DNA
ctgtttgttagttttccttcta

SEQ ID NO: 122287 - DNA, 22 bp, synthetic construct
  misc_feature 1..22: note = chemically synthesized
  source 1..22: mol_type = other DNA
tgtttgttagttttccttctaa

SEQ ID NO: 122288 - DNA, 22 bp, synthetic construct
  misc_feature 1..22: note = chemically synthesized
  source 1..22: mol_type = other DNA
tttgttagttttccttctaaca

SEQ ID NO: 122289 - DNA, 22 bp, synthetic construct
  misc_feature 1..22: note = chemically synthesized
  source 1..22: mol_type = other DNA
gttagttttccttctaacagac

SEQ ID NO: 122290 - DNA, 22 bp, synthetic construct
  misc_feature 1..22: note = chemically synthesized
  source 1..22: mol_type = other DNA
ttagttttccttctaacagaca

SEQ ID NO: 122291 - DNA, 22 bp, synthetic construct
  misc_feature 1..22: note = chemically synthesized
  source 1..22: mol_type = other DNA
gttttccttctaacagacagga

SEQ ID NO: 122292 - DNA, 22 bp, synthetic construct
  misc_feature 1..22: note = chemically synthesized
  source 1..22: mol_type = other DNA
tccttctaacagacaggaccct

SEQ ID NO: 122293 - DNA, 22 bp, synthetic construct
  misc_feature 1..22: note = chemically synthesized
  source 1..22: mol_type = other DNA
ccttctaacagacaggaccctc

SEQ ID NO: 122294 - DNA, 22 bp, synthetic construct
  misc_feature 1..22: note = chemically synthesized
  source 1..22: mol_type = other DNA
cttctaacagacaggaccctca

SEQ ID NO: 122295 - DNA, 22 bp, synthetic construct
  misc_feature 1..22: note = chemically synthesized
  source 1..22: mol_type = other DNA
ctaacagacaggaccctcagct

SEQ ID NO: 122296 - DNA, 22 bp, synthetic construct
  misc_feature 1..22: note = chemically synthesized
  source 1..22: mol_type = other DNA
taacagacaggaccctcagctg

SEQ ID NO: 122297 - DNA, 22 bp, synthetic construct
  misc_feature 1..22: note = chemically synthesized
  source 1..22: mol_type = other DNA
acagacaggaccctcagctgca

SEQ ID NO: 122298 - DNA, 22 bp, synthetic construct
  misc_feature 1..22: note = chemically synthesized
  source 1..22: mol_type = other DNA
agctgcaggtctgttggagttt

SEQ ID NO: 122299 - DNA, 22 bp, synthetic construct
  misc_feature 1..22: note = chemically synthesized
  source 1..22: mol_type = other DNA
caggtctgttggagtttgctag

SEQ ID NO: 122300 - DNA, 22 bp, synthetic construct
  misc_feature 1..22: note = chemically synthesized
  source 1..22: mol_type = other DNA
ttggagtttgctagaggtccac

SEQ ID NO: 122301 - DNA, 22 bp, synthetic construct
  misc_feature 1..22: note = chemically synthesized
  source 1..22: mol_type = other DNA
gagtttgctagaggtccactcc

SEQ ID NO: 122302 - DNA, 22 bp, synthetic construct
  misc_feature 1..22: note = chemically synthesized
  source 1..22: mol_type = other DNA
gctagaggtccactccagaccc

SEQ ID NO: 122303 - DNA, 22 bp, synthetic construct
  misc_feature 1..22: note = chemically synthesized
  source 1..22: mol_type = other DNA
ctagaggtccactccagaccct

SEQ ID NO: 122304 - DNA, 22 bp, synthetic construct
  misc_feature 1..22: note = chemically synthesized
  source 1..22: mol_type = other DNA
gaggtccactccagaccctgtt

SEQ ID NO: 122305 - DNA, 22 bp, synthetic construct
  misc_feature 1..22: note = chemically synthesized
  source 1..22: mol_type = other DNA
cagaccctgtttgcctgggtat

SEQ ID NO: 122306 - DNA, 22 bp, synthetic construct
  misc_feature 1..22: note = chemically synthesized
  source 1..22: mol_type = other DNA
tttgcctgggtatcagcagcgg

SEQ ID NO: 122307 - DNA, 22 bp, synthetic construct
  misc_feature 1..22: note = chemically synthesized
  source 1..22: mol_type = other DNA
gcctgggtatcagcagcggtgt

SEQ ID NO: 122308 - DNA, 22 bp, synthetic construct
  misc_feature 1..22: note = chemically synthesized
  source 1..22: mol_type = other DNA
cctgggtatcagcagcggtgtc

SEQ ID NO: 122309 - DNA, 22 bp, synthetic construct
  misc_feature 1..22: note = chemically synthesized
  source 1..22: mol_type = other DNA
ggtatcagcagcggtgtctgca

SEQ ID NO: 122310 - DNA, 22 bp, synthetic construct
  misc_feature 1..22: note = chemically synthesized
  source 1..22: mol_type = other DNA
cagaaccgcagattttcgtgat

SEQ ID NO: 122311 - DNA, 22 bp, synthetic construct
  misc_feature 1..22: note = chemically synthesized
  source 1..22: mol_type = other DNA
tcgtgatccgcgaatgctgctg

SEQ ID NO: 122312 - DNA, 22 bp, synthetic construct
  misc_feature 1..22: note = chemically synthesized
  source 1..22: mol_type = other DNA
cgtgatccgcgaatgctgctgt

SEQ ID NO: 122313 - DNA, 22 bp, synthetic construct
  misc_feature 1..22: note = chemically synthesized
  source 1..22: mol_type = other DNA
gtgatccgcgaatgctgctgtc

SEQ ID NO: 122314 - DNA, 22 bp, synthetic construct
  misc_feature 1..22: note = chemically synthesized
  source 1..22: mol_type = other DNA
ctgtctgatcgttcctctggaa

SEQ ID NO: 122315 - DNA, 22 bp, synthetic construct
  misc_feature 1..22: note = chemically synthesized
  source 1..22: mol_type = other DNA
tctgatcgttcctctggaagtt

SEQ ID NO: 122316 - DNA, 22 bp, synthetic construct
  misc_feature 1..22: note = chemically synthesized
  source 1..22: mol_type = other DNA
atcgttcctctggaagttttgt

SEQ ID NO: 122317 - DNA, 22 bp, synthetic construct
  misc_feature 1..22: note = chemically synthesized
  source 1..22: mol_type = other DNA
ctctggaagttttgtctcagag

SEQ ID NO: 122318 - DNA, 22 bp, synthetic construct
  misc_feature 1..22: note = chemically synthesized
  source 1..22: mol_type = other DNA
tggaagttttgtctcagaggag

SEQ ID NO: 122319 - DNA, 22 bp, synthetic construct
  misc_feature 1..22: note = chemically synthesized
  source 1..22: mol_type = other DNA
gaagttttgtctcagaggagta

SEQ ID NO: 122320 - DNA, 22 bp, synthetic construct
  misc_feature 1..22: note = chemically synthesized
  source 1..22: mol_type = other DNA
tgtctcagaggagtacctggcc

SEQ ID NO: 122321 - DNA, 22 bp, synthetic construct
  misc_feature 1..22: note = chemically synthesized
  source 1..22: mol_type = other DNA
gtctcagaggagtacctggccg

SEQ ID NO: 122322 - DNA, 22 bp, synthetic construct
  misc_feature 1..22: note = chemically synthesized
  source 1..22: mol_type = other DNA
tctcagaggagtacctggccgt

SEQ ID NO: 122323 - DNA, 22 bp, synthetic construct
  misc_feature 1..22: note = chemically synthesized
  source 1..22: mol_type = other DNA
agaggagtacctggccgtgtga

SEQ ID NO: 122324 - DNA, 22 bp, synthetic construct
  misc_feature 1..22: note = chemically synthesized
  source 1..22: mol_type = other DNA
gccgtgtgaggtgtcagtctgc

SEQ ID NO: 122325 - DNA, 22 bp, synthetic construct
  misc_feature 1..22: note = chemically synthesized
  source 1..22: mol_type = other DNA
cccttacttgggggtgcctccc

SEQ ID NO: 122326 - DNA, 22 bp, synthetic construct
  misc_feature 1..22: note = chemically synthesized
  source 1..22: mol_type = other DNA
acttgggggtgcctcccagtta

SEQ ID NO: 122327 - DNA, 22 bp, synthetic construct
  misc_feature 1..22: note = chemically synthesized
  source 1..22: mol_type = other DNA
cttgggggtgcctcccagttag

SEQ ID NO: 122328 - DNA, 22 bp, synthetic construct
  misc_feature 1..22: note = chemically synthesized
  source 1..22: mol_type = other DNA
gggggtgcctcccagttaggct

SEQ ID NO: 122329 - DNA, 22 bp, synthetic construct
  misc_feature 1..22: note = chemically synthesized
  source 1..22: mol_type = other DNA
ggggtgcctcccagttaggctg

SEQ ID NO: 122330 - DNA, 22 bp, synthetic construct
  misc_feature 1..22: note = chemically synthesized
  source 1..22: mol_type = other DNA
ccagttaggctgctcgggggtc

SEQ ID NO: 122331 - DNA, 22 bp, synthetic construct
  misc_feature 1..22: note = chemically synthesized
  source 1..22: mol_type = other DNA
ggctgctcgggggtcaggggtc

SEQ ID NO: 122332 - DNA, 22 bp, synthetic construct
  misc_feature 1..22: note = chemically synthesized
  source 1..22: mol_type = other DNA
ctcgggggtcaggggtcaggga

SEQ ID NO: 122333 - DNA, 22 bp, synthetic construct
  misc_feature 1..22: note = chemically synthesized
  source 1..22: mol_type = other DNA
gggggtcaggggtcagggaccc

SEQ ID NO: 122334 - DNA, 22 bp, synthetic construct
  misc_feature 1..22: note = chemically synthesized
  source 1..22: mol_type = other DNA
gaggaggcagtctgcccgttct

SEQ ID NO: 122335 - DNA, 22 bp, synthetic construct
  misc_feature 1..22: note = chemically synthesized
  source 1..22: mol_type = other DNA
aggaggcagtctgcccgttctc

SEQ ID NO: 122336 - DNA, 22 bp, synthetic construct
  misc_feature 1..22: note = chemically synthesized
  source 1..22: mol_type = other DNA
cccgttctcagatctccagctg

SEQ ID NO: 122337 - DNA, 22 bp, synthetic construct
  misc_feature 1..22: note = chemically synthesized
  source 1..22: mol_type = other DNA
tcagatctccagctgtgtgctg

SEQ ID NO: 122338 - DNA, 22 bp, synthetic construct
  misc_feature 1..22: note = chemically synthesized
  source 1..22: mol_type = other DNA
agatctccagctgtgtgctggg

SEQ ID NO: 122339 - DNA, 22 bp, synthetic construct
  misc_feature 1..22: note = chemically synthesized
  source 1..22: mol_type = other DNA
cagctgtgtgctgggagaacca

SEQ ID NO: 122340 - DNA, 22 bp, synthetic construct
  misc_feature 1..22: note = chemically synthesized
  source 1..22: mol_type = other DNA
tgtgctgggagaaccactgctc

SEQ ID NO: 122341 - DNA, 22 bp, synthetic construct
  misc_feature 1..22: note = chemically synthesized
  source 1..22: mol_type = other DNA
ggagaaccactgctctcctcaa

SEQ ID NO: 122342 - DNA, 22 bp, synthetic construct
  misc_feature 1..22: note = chemically synthesized
  source 1..22: mol_type = other DNA
ctctcctcaaagctgtcagaca

SEQ ID NO: 122343 - DNA, 22 bp, synthetic construct
  misc_feature 1..22: note = chemically synthesized
  source 1..22: mol_type = other DNA
tcctcaaagctgtcagacaggg

SEQ ID NO: 122344 - DNA, 22 bp, synthetic construct
  misc_feature 1..22: note = chemically synthesized
  source 1..22: mol_type = other DNA
ctcaaagctgtcagacagggac

SEQ ID NO: 122345 - DNA, 22 bp, synthetic construct
  misc_feature 1..22: note = chemically synthesized
  source 1..22: mol_type = other DNA
aaagctgtcagacagggacatt

SEQ ID NO: 122346 - DNA, 22 bp, synthetic construct
  misc_feature 1..22: note = chemically synthesized
  source 1..22: mol_type = other DNA
tcagacagggacatttaagtct

SEQ ID NO: 122347 - DNA, 22 bp, synthetic construct
  misc_feature 1..22: note = chemically synthesized
  source 1..22: mol_type = other DNA
aagtctgcagaggttactgctg

SEQ ID NO: 122348 - DNA, 22 bp, synthetic construct
  misc_feature 1..22: note = chemically synthesized
  source 1..22: mol_type = other DNA
agtctgcagaggttactgctgt

SEQ ID NO: 122349 - DNA, 22 bp, synthetic construct
  misc_feature 1..22: note = chemically synthesized
  source 1..22: mol_type = other DNA
cagaggttactgctgtcttttt

SEQ ID NO: 122350 - DNA, 22 bp, synthetic construct
  misc_feature 1..22: note = chemically synthesized
  source 1..22: mol_type = other DNA
ctgctgtctttttgtttgtctg

SEQ ID NO: 122351 - DNA, 22 bp, synthetic construct
  misc_feature 1..22: note = chemically synthesized
  source 1..22: mol_type = other DNA
ctgtctttttgtttgtctgtgc

SEQ ID NO: 122352 - DNA, 22 bp, synthetic construct
  misc_feature 1..22: note = chemically synthesized
  source 1..22: mol_type = other DNA
tctttttgtttgtctgtgccct

SEQ ID NO: 122353 - DNA, 22 bp, synthetic construct
  misc_feature 1..22: note = chemically synthesized
  source 1..22: mol_type = other DNA
tttgtttgtctgtgccctgccc

SEQ ID NO: 122354 - DNA, 22 bp, synthetic construct
  misc_feature 1..22: note = chemically synthesized
  source 1..22: mol_type = other DNA
ttgtttgtctgtgccctgcccc

SEQ ID NO: 122355 - DNA, 22 bp, synthetic construct
  misc_feature 1..22: note = chemically synthesized
  source 1..22: mol_type = other DNA
tgtttgtctgtgccctgccccc

SEQ ID NO: 122356 - DNA, 22 bp, synthetic construct
  misc_feature 1..22: note = chemically synthesized
  source 1..22: mol_type = other DNA
gtttgtctgtgccctgccccca

SEQ ID NO: 122357 - DNA, 22 bp, synthetic construct
  misc_feature 1..22: note = chemically synthesized
  source 1..22: mol_type = other DNA
tttgtctgtgccctgcccccaa

SEQ ID NO: 122358 - DNA, 22 bp, synthetic construct
  misc_feature 1..22: note = chemically synthesized
  source 1..22: mol_type = other DNA
gtctgtgccctgcccccaaagg

SEQ ID NO: 122359 - DNA, 22 bp, synthetic construct
  misc_feature 1..22: note = chemically synthesized
  source 1..22: mol_type = other DNA
tctgtgccctgcccccaaaggt

SEQ ID NO: 122360 - DNA, 22 bp, synthetic construct
  misc_feature 1..22: note = chemically synthesized
  source 1..22: mol_type = other DNA
tgccctgcccccaaaggtggag

SEQ ID NO: 122361 - DNA, 22 bp, synthetic construct
  misc_feature 1..22: note = chemically synthesized
  source 1..22: mol_type = other DNA
cccccaaaggtggagcctacag

SEQ ID NO: 122362 - DNA, 22 bp, synthetic construct
  misc_feature 1..22: note = chemically synthesized
  source 1..22: mol_type = other DNA
cagaggcaggcaggcctccttg

SEQ ID NO: 122363 - DNA, 22 bp, synthetic construct
  misc_feature 1..22: note = chemically synthesized
  source 1..22: mol_type = other DNA
cttgagctgtggtggggtccac

SEQ ID NO: 122364 - DNA, 22 bp, synthetic construct
  misc_feature 1..22: note = chemically synthesized
  source 1..22: mol_type = other DNA
gagctgtggtggggtccaccca

SEQ ID NO: 122365 - DNA, 22 bp, synthetic construct
  misc_feature 1..22: note = chemically synthesized
  source 1..22: mol_type = other DNA
agctgtggtggggtccacccag

SEQ ID NO: 122366 - DNA, 22 bp, synthetic construct
  misc_feature 1..22: note = chemically synthesized
  source 1..22: mol_type = other DNA
tggtggggtccacccagtttga

SEQ ID NO: 122367 - DNA, 22 bp, synthetic construct
  misc_feature 1..22: note = chemically synthesized
  source 1..22: mol_type = other DNA
gagcttcctggctgctttgttt

SEQ ID NO: 122368 - DNA, 22 bp, synthetic construct
  misc_feature 1..22: note = chemically synthesized
  source 1..22: mol_type = other DNA
agcttcctggctgctttgttta

SEQ ID NO: 122369 - DNA, 22 bp, synthetic construct
  misc_feature 1..22: note = chemically synthesized
  source 1..22: mol_type = other DNA
cctggctgctttgtttacctaa

SEQ ID NO: 122370 - DNA, 22 bp, synthetic construct
  misc_feature 1..22: note = chemically synthesized
  source 1..22: mol_type = other DNA
ctggctgctttgtttacctaag

SEQ ID NO: 122371 - DNA, 22 bp, synthetic construct
  misc_feature 1..22: note = chemically synthesized
  source 1..22: mol_type = other DNA
gctgctttgtttacctaagcaa

SEQ ID NO: 122372 - DNA, 22 bp, synthetic construct
  misc_feature 1..22: note = chemically synthesized
  source 1..22: mol_type = other DNA
ctttgtttacctaagcaagcct

SEQ ID NO: 122373 - DNA, 22 bp, synthetic construct
  misc_feature 1..22: note = chemically synthesized
  source 1..22: mol_type = other DNA
tgtttacctaagcaagcctggg

SEQ ID NO: 122374 - DNA, 22 bp, synthetic construct
  misc_feature 1..22: note = chemically synthesized
  source 1..22: mol_type = other DNA
gtttacctaagcaagcctgggc

SEQ ID NO: 122375 - DNA, 22 bp, synthetic construct
  misc_feature 1..22: note = chemically synthesized
  source 1..22: mol_type = other DNA
tttacctaagcaagcctgggca

SEQ ID NO: 122376 - DNA, 22 bp, synthetic construct
  misc_feature 1..22: note = chemically synthesized
  source 1..22: mol_type = other DNA
acctaagcaagcctgggcaatg

SEQ ID NO: 122377 - DNA, 22 bp, synthetic construct
  misc_feature 1..22: note = chemically synthesized
  source 1..22: mol_type = other DNA
cctaagcaagcctgggcaatgg

SEQ ID NO: 122378 - DNA, 22 bp, synthetic construct
  misc_feature 1..22: note = chemically synthesized
  source 1..22: mol_type = other DNA
agcaagcctgggcaatggcggc

SEQ ID NO: 122379 - DNA, 22 bp, synthetic construct
  misc_feature 1..22: note = chemically synthesized
  source 1..22: mol_type = other DNA
ggcaatggcggctgcccctccc

SEQ ID NO: 122380 - DNA, 22 bp, synthetic construct
  misc_feature 1..22: note = chemically synthesized
  source 1..22: mol_type = other DNA
cccctcccccagcctcgctgcc

SEQ ID NO: 122381 - DNA, 22 bp, synthetic construct
  misc_feature 1..22: note = chemically synthesized
  source 1..22: mol_type = other DNA
ccccagcctcgctgccaccttg

SEQ ID NO: 122382 - DNA, 22 bp, synthetic construct
  misc_feature 1..22: note = chemically synthesized
  source 1..22: mol_type = other DNA
gctgccaccttgcagtttgatc

SEQ ID NO: 122383 - DNA, 22 bp, synthetic construct
  misc_feature 1..22: note = chemically synthesized
  source 1..22: mol_type = other DNA
ccaccttgcagtttgatctcag

SEQ ID NO: 122384 - DNA, 22 bp, synthetic construct
  misc_feature 1..22: note = chemically synthesized
  source 1..22: mol_type = other DNA
gcagtttgatctcagactgctg

SEQ ID NO: 122385 - DNA, 22 bp, synthetic construct
  misc_feature 1..22: note = chemically synthesized
  source 1..22: mol_type = other DNA
cagtttgatctcagactgctgt

SEQ ID NO: 122386 - DNA, 22 bp, synthetic construct
  misc_feature 1..22: note = chemically synthesized
  source 1..22: mol_type = other DNA
gatctcagactgctgtgctagc

SEQ ID NO: 122387 - DNA, 22 bp, synthetic construct
  misc_feature 1..22: note = chemically synthesized
  source 1..22: mol_type = other DNA
atctcagactgctgtgctagca

SEQ ID NO: 122388 - DNA, 22 bp, synthetic construct
  misc_feature 1..22: note = chemically synthesized
  source 1..22: mol_type = other DNA
agactgctgtgctagcaatcag

SEQ ID NO: 122389 - DNA, 22 bp, synthetic construct
  misc_feature 1..22: note = chemically synthesized
  source 1..22: mol_type = other DNA
ctgtgctagcaatcagggagac

SEQ ID NO: 122390 - DNA, 22 bp, synthetic construct
  misc_feature 1..22: note = chemically synthesized
  source 1..22: mol_type = other DNA
tgctagcaatcagggagactcc

SEQ ID NO: 122391 - DNA, 22 bp, synthetic construct
  misc_feature 1..22: note = chemically synthesized
  source 1..22: mol_type = other DNA
gcaatcagggagactccgtggg

SEQ ID NO: 122392 - DNA, 22 bp, synthetic construct
  misc_feature 1..22: note = chemically synthesized
  source 1..22: mol_type = other DNA
cgtgggcgtaggaccctcggag

SEQ ID NO: 122393 - DNA, 22 bp, synthetic construct
  misc_feature 1..22: note = chemically synthesized
  source 1..22: mol_type = other DNA
ggagccatgtgcaggatataat

SEQ ID NO: 122394 - DNA, 22 bp, synthetic construct
  misc_feature 1..22: note = chemically synthesized
  source 1..22: mol_type = other DNA
ctggtgcgccatttcctaagcc

SEQ ID NO: 122395 - DNA, 22 bp, synthetic construct
  misc_feature 1..22: note = chemically synthesized
  source 1..22: mol_type = other DNA
gtgcgccatttcctaagcctgt

SEQ ID NO: 122396 - DNA, 22 bp, synthetic construct
  misc_feature 1..22: note = chemically synthesized
  source 1..22: mol_type = other DNA
cctaagcctgtcagaaaagcac

SEQ ID NO: 122397 - DNA, 22 bp, synthetic construct
  misc_feature 1..22: note = chemically synthesized
  source 1..22: mol_type = other DNA
ctaagcctgtcagaaaagcaca

SEQ ID NO: 122398 - DNA, 22 bp, synthetic construct
  misc_feature 1..22: note = chemically synthesized
  source 1..22: mol_type = other DNA
agcctgtcagaaaagcacagta

SEQ ID NO: 122399 - DNA, 22 bp, synthetic construct
  misc_feature 1..22: note = chemically synthesized
  source 1..22: mol_type = other DNA
tcagaaaagcacagtattcggg

SEQ ID NO: 122400 - DNA, 22 bp, synthetic construct
  misc_feature 1..22: note = chemically synthesized
  source 1..22: mol_type = other DNA
gggtgggagtggcccaattttc

SEQ ID NO: 122401 - DNA, 22 bp, synthetic construct
  misc_feature 1..22: note = chemically synthesized
  source 1..22: mol_type = other DNA
tccaggtgccgtatgtcacccc

SEQ ID NO: 122402 - DNA, 22 bp, synthetic construct
  misc_feature 1..22: note = chemically synthesized
  source 1..22: mol_type = other DNA
ccaggtgccgtatgtcacccct

SEQ ID NO: 122403 - DNA, 22 bp, synthetic construct
  misc_feature 1..22: note = chemically synthesized
  source 1..22: mol_type = other DNA
caggtgccgtatgtcacccctt

SEQ ID NO: 122404 - DNA, 22 bp, synthetic construct
  misc_feature 1..22: note = chemically synthesized
  source 1..22: mol_type = other DNA
tccttgaccaggaaagggaact

SEQ ID NO: 122405 - DNA, 22 bp, synthetic construct
  misc_feature 1..22: note = chemically synthesized
  source 1..22: mol_type = other DNA
ccttgaccaggaaagggaactc

SEQ ID NO: 122406 - DNA, 22 bp, synthetic construct
  misc_feature 1..22: note = chemically synthesized
  source 1..22: mol_type = other DNA
cttgaccaggaaagggaactcc

SEQ ID NO: 122407 - DNA, 22 bp, synthetic construct
  misc_feature 1..22: note = chemically synthesized
  source 1..22: mol_type = other DNA
gaccaggaaagggaactccatg

SEQ ID NO: 122408 - DNA, 22 bp, synthetic construct
  misc_feature 1..22: note = chemically synthesized
  source 1..22: mol_type = other DNA
accaggaaagggaactccatga

SEQ ID NO: 122409 - DNA, 22 bp, synthetic construct
  misc_feature 1..22: note = chemically synthesized
  source 1..22: mol_type = other DNA
catgaccccttgtgcttcccaa

SEQ ID NO: 122410 - DNA, 22 bp, synthetic construct
  misc_feature 1..22: note = chemically synthesized
  source 1..22: mol_type = other DNA
gtgcttcccaagtgaggcaatg

SEQ ID NO: 122411 - DNA, 22 bp, synthetic construct
  misc_feature 1..22: note = chemically synthesized
  source 1..22: mol_type = other DNA
tgcttcccaagtgaggcaatgc

SEQ ID NO: 122412 - DNA, 22 bp, synthetic construct
  misc_feature 1..22: note = chemically synthesized
  source 1..22: mol_type = other DNA
cccaagtgaggcaatgcctcac

SEQ ID NO: 122413 - DNA, 22 bp, synthetic construct
  misc_feature 1..22: note = chemically synthesized
  source 1..22: mol_type = other DNA
ccaagtgaggcaatgcctcacc

SEQ ID NO: 122414 - DNA, 22 bp, synthetic construct
  misc_feature 1..22: note = chemically synthesized
  source 1..22: mol_type = other DNA
accctgcttcggctggtgcatg

SEQ ID NO: 122415 - DNA, 22 bp, synthetic construct
  misc_feature 1..22: note = chemically synthesized
  source 1..22: mol_type = other DNA
cttcggctggtgcatggtgtgc

SEQ ID NO: 122416 - DNA, 22 bp, synthetic construct
  misc_feature 1..22: note = chemically synthesized
  source 1..22: mol_type = other DNA
cggctggtgcatggtgtgctgc

SEQ ID NO: 122417 - DNA, 22 bp, synthetic construct
  misc_feature 1..22: note = chemically synthesized
  source 1..22: mol_type = other DNA
ggctggtgcatggtgtgctgca

SEQ ID NO: 122418 - DNA, 22 bp, synthetic construct
  misc_feature 1..22: note = chemically synthesized
  source 1..22: mol_type = other DNA
gtgcatggtgtgctgcacccac

SEQ ID NO: 122419 - DNA, 22 bp, synthetic construct
  misc_feature 1..22: note = chemically synthesized
  source 1..22: mol_type = other DNA
cacccactgacctgtgcccact

SEQ ID NO: 122420 - DNA, 22 bp, synthetic construct
  misc_feature 1..22: note = chemically synthesized
  source 1..22: mol_type = other DNA
acctgtgcccactgtctggcac

SEQ ID NO: 122421 - DNA, 22 bp, synthetic construct
  misc_feature 1..22: note = chemically synthesized
  source 1..22: mol_type = other DNA
tgcccactgtctggcactccct

SEQ ID NO: 122422 - DNA, 22 bp, synthetic construct
  misc_feature 1..22: note = chemically synthesized
  source 1..22: mol_type = other DNA
tctggcactccctagcgagatg

SEQ ID NO: 122423 - DNA, 22 bp, synthetic construct
  misc_feature 1..22: note = chemically synthesized
  source 1..22: mol_type = other DNA
gcactccctagcgagatgaacc

SEQ ID NO: 122424 - DNA, 22 bp, synthetic construct
  misc_feature 1..22: note = chemically synthesized
  source 1..22: mol_type = other DNA
cctagcgagatgaaccccatac

SEQ ID NO: 122425 - DNA, 22 bp, synthetic construct
  misc_feature 1..22: note = chemically synthesized
  source 1..22: mol_type = other DNA
gcgagatgaaccccatacctca

SEQ ID NO: 122426 - DNA, 22 bp, synthetic construct
  misc_feature 1..22: note = chemically synthesized
  source 1..22: mol_type = other DNA
agatggaaatgcagaaatcacc

SEQ ID NO: 122427 - DNA, 22 bp, synthetic construct
  misc_feature 1..22: note = chemically synthesized
  source 1..22: mol_type = other DNA
ctgtgttgttcacgctgggagc

SEQ ID NO: 122428 - DNA, 22 bp, synthetic construct
  misc_feature 1..22: note = chemically synthesized
  source 1..22: mol_type = other DNA
tgtgttgttcacgctgggagct

SEQ ID NO: 122429 - DNA, 22 bp, synthetic construct
  misc_feature 1..22: note = chemically synthesized
  source 1..22: mol_type = other DNA
tgttgttcacgctgggagctgt

SEQ ID NO: 122430 - DNA, 22 bp, synthetic construct
  misc_feature 1..22: note = chemically synthesized
  source 1..22: mol_type = other DNA
ttcacgctgggagctgtagacc

SEQ ID NO: 122431 - DNA, 22 bp, synthetic construct
  misc_feature 1..22: note = chemically synthesized
  source 1..22: mol_type = other DNA
acgctgggagctgtagaccaga

SEQ ID NO: 122432 - DNA, 22 bp, synthetic construct
  misc_feature 1..22: note = chemically synthesized
  source 1..22: mol_type = other DNA
ggagctgtagaccagagctgtt

SEQ ID NO: 122433 - DNA, 22 bp, synthetic construct
  misc_feature 1..22: note = chemically synthesized
  source 1..22: mol_type = other DNA
tagaccagagctgttcctattt

SEQ ID NO: 122434 - DNA, 22 bp, synthetic construct
  misc_feature 1..22: note = chemically synthesized
  source 1..22: mol_type = other DNA
ttcctatttggccatcttggct

SEQ ID NO: 122435 - DNA, 22 bp, synthetic construct
  misc_feature 1..22: note = chemically synthesized
  source 1..22: mol_type = other DNA
ctatttggccatcttggctcaa

SEQ ID NO: 122436 - DNA, 22 bp, synthetic construct
  misc_feature 1..22: note = chemically synthesized
  source 1..22: mol_type = other DNA
tttggccatcttggctcaaaaa

SEQ ID NO: 122437 - DNA, 22 bp, synthetic construct
  misc_feature 1..22: note = chemically synthesized
  source 1..22: mol_type = other DNA
ggccatcttggctcaaaaactg

SEQ ID NO: 122438 - DNA, 22 bp, synthetic construct
  misc_feature 1..22: note = chemically synthesized
  source 1..22: mol_type = other DNA
gccatcttggctcaaaaactgg

SEQ ID NO: 122439 - DNA, 22 bp, synthetic construct
  misc_feature 1..22: note = chemically synthesized
  source 1..22: mol_type = other DNA
ggctcaaaaactggaactttat

SEQ ID NO: 122440 - DNA, 22 bp, synthetic construct
  misc_feature 1..22: note = chemically synthesized
  source 1..22: mol_type = other DNA
gctcaaaaactggaactttatt

SEQ ID NO: 122441 - DNA, 22 bp, synthetic construct
  misc_feature 1..22: note = chemically synthesized
  source 1..22: mol_type = other DNA
aaaaactggaactttatttgtg

SEQ ID NO: 122442 - DNA, 22 bp, synthetic construct
  misc_feature 1..22: note = chemically synthesized
  source 1..22: mol_type = other DNA
gaactttatttgtgaaagaaaa

SEQ ID NO: 122443 - DNA, 22 bp, synthetic construct
  misc_feature 1..22: note = chemically synthesized
  source 1..22: mol_type = other DNA
tatttgtgaaagaaaaaatcga

SEQ ID NO: 122444 - DNA, 22 bp, synthetic construct
  misc_feature 1..22: note = chemically synthesized
  source 1..22: mol_type = other DNA
atttgtgaaagaaaaaatcgat

SEQ ID NO: 122445 - DNA, 22 bp, synthetic construct
  misc_feature 1..22: note = chemically synthesized
  source 1..22: mol_type = other DNA
tttgtgaaagaaaaaatcgatc

SEQ ID NO: 122446 - DNA, 22 bp, synthetic construct
  misc_feature 1..22: note = chemically synthesized
  source 1..22: mol_type = other DNA
gtgaaagaaaaaatcgatcaat

SEQ ID NO: 122447 - DNA, 22 bp, synthetic construct
  misc_feature 1..22: note = chemically synthesized
  source 1..22: mol_type = other DNA
tgaaagaaaaaatcgatcaata

SEQ ID NO: 122448 - DNA, 22 bp, synthetic construct
  misc_feature 1..22: note = chemically synthesized
  source 1..22: mol_type = other DNA
ccagtgaaaattttcttcaaat

SEQ ID NO: 122449 - DNA, 22 bp, synthetic construct
  misc_feature 1..22: note = chemically synthesized
  source 1..22: mol_type = other DNA
cagtgaaaattttcttcaaatc

SEQ ID NO: 122450 - DNA, 22 bp, synthetic construct
  misc_feature 1..22: note = chemically synthesized
  source 1..22: mol_type = other DNA
tcttcaaatcaagacaatatct

SEQ ID NO: 122451 - DNA, 22 bp, synthetic construct
  misc_feature 1..22: note = chemically synthesized
  source 1..22: mol_type = other DNA
cttcaaatcaagacaatatcta

SEQ ID NO: 122452 - DNA, 22 bp, synthetic construct
  misc_feature 1..22: note = chemically synthesized
  source 1..22: mol_type = other DNA
ttcaaatcaagacaatatctaa

SEQ ID NO: 122453 - DNA, 22 bp, synthetic construct
  misc_feature 1..22: note = chemically synthesized
  source 1..22: mol_type = other DNA
caaatcaagacaatatctaaaa

SEQ ID NO: 122454 - DNA, 22 bp, synthetic construct
  misc_feature 1..22: note = chemically synthesized
  source 1..22: mol_type = other DNA
aaatcaagacaatatctaaaaa

SEQ ID NO: 122455 - DNA, 22 bp, synthetic construct
  misc_feature 1..22: note = chemically synthesized
  source 1..22: mol_type = other DNA
aaaaattgccgagactgatatc

SEQ ID NO: 122456 - DNA, 22 bp, synthetic construct
  misc_feature 1..22: note = chemically synthesized
  source 1..22: mol_type = other DNA
ccgagactgatatcaagcagct

SEQ ID NO: 122457 - DNA, 22 bp, synthetic construct
  misc_feature 1..22: note = chemically synthesized
  source 1..22: mol_type = other DNA
atatcaagcagctatctctata

SEQ ID NO: 122458 - DNA, 22 bp, synthetic construct
  misc_feature 1..22: note = chemically synthesized
  source 1..22: mol_type = other DNA
tctctatacatgttcttccagg

SEQ ID NO: 122459 - DNA, 22 bp, synthetic construct
  misc_feature 1..22: note = chemically synthesized
  source 1..22: mol_type = other DNA
tatacatgttcttccaggagtt

SEQ ID NO: 122460 - DNA, 22 bp, synthetic construct
  misc_feature 1..22: note = chemically synthesized
  source 1..22: mol_type = other DNA
tacatgttcttccaggagtttt

SEQ ID NO: 122461 - DNA, 22 bp, synthetic construct
  misc_feature 1..22: note = chemically synthesized
  source 1..22: mol_type = other DNA
ttccaggagttttgtgatttca

SEQ ID NO: 122462 - DNA, 22 bp, synthetic construct
  misc_feature 1..22: note = chemically synthesized
  source 1..22: mol_type = other DNA
ccaggagttttgtgatttcagg

SEQ ID NO: 122463 - DNA, 22 bp, synthetic construct
  misc_feature 1..22: note = chemically synthesized
  source 1..22: mol_type = other DNA
caggagttttgtgatttcaggt

SEQ ID NO: 122464 - DNA, 22 bp, synthetic construct
  misc_feature 1..22: note = chemically synthesized
  source 1..22: mol_type = other DNA
tgtgatttcaggtcttacattt

SEQ ID NO: 122465 - DNA, 22 bp, synthetic construct
  misc_feature 1..22: note = chemically synthesized
  source 1..22: mol_type = other DNA
gtgatttcaggtcttacattta

SEQ ID NO: 122466 - DNA, 22 bp, synthetic construct
  misc_feature 1..22: note = chemically synthesized
  source 1..22: mol_type = other DNA
tgatttcaggtcttacatttat

SEQ ID NO: 122467 - DNA, 22 bp, synthetic construct
  misc_feature 1..22: note = chemically synthesized
  source 1..22: mol_type = other DNA
caggtcttacatttatgtcttt

SEQ ID NO: 122468 - DNA, 22 bp, synthetic construct
  misc_feature 1..22: note = chemically synthesized
  source 1..22: mol_type = other DNA
aggtcttacatttatgtcttta

SEQ ID NO: 122469 - DNA, 22 bp, synthetic construct
  misc_feature 1..22: note = chemically synthesized
  source 1..22: mol_type = other DNA
acatttatgtctttaatctatt

SEQ ID NO: 122470 - DNA, 22 bp, synthetic construct
  misc_feature 1..22: note = chemically synthesized
  source 1..22: mol_type = other DNA
catttatgtctttaatctattt

SEQ ID NO: 122471 - DNA, 22 bp, synthetic construct
  misc_feature 1..22: note = chemically synthesized
  source 1..22: mol_type = other DNA
atgtctttaatctattttgagt

SEQ ID NO: 122472 - DNA, 22 bp, synthetic construct
  misc_feature 1..22: note = chemically synthesized
  source 1..22: mol_type = other DNA
tgtctttaatctattttgagtt

SEQ ID NO: 122473 - DNA, 22 bp, synthetic construct
  misc_feature 1..22: note = chemically synthesized
  source 1..22: mol_type = other DNA
taatctattttgagttgactta

SEQ ID NO: 122474 - DNA, 22 bp, synthetic construct
  misc_feature 1..22: note = chemically synthesized
  source 1..22: mol_type = other DNA
aatctattttgagttgacttat

SEQ ID NO: 122475 - DNA, 22 bp, synthetic construct
  misc_feature 1..22: note = chemically synthesized
  source 1..22: mol_type = other DNA
atctattttgagttgacttatg

SEQ ID NO: 122476 - DNA, 22 bp, synthetic construct
  misc_feature 1..22: note = chemically synthesized
  source 1..22: mol_type = other DNA
ttttgagttgacttatggctta

SEQ ID NO: 122477 - DNA, 22 bp, synthetic construct
  misc_feature 1..22: note = chemically synthesized
  source 1..22: mol_type = other DNA
tgagttgacttatggcttaagg

SEQ ID NO: 122478 - DNA, 22 bp, synthetic construct
  misc_feature 1..22: note = chemically synthesized
  source 1..22: mol_type = other DNA
gagttgacttatggcttaaggt

SEQ ID NO: 122479 - DNA, 22 bp, synthetic construct
  misc_feature 1..22: note = chemically synthesized
  source 1..22: mol_type = other DNA
agttgacttatggcttaaggta

SEQ ID NO: 122480 - DNA, 22 bp, synthetic construct
  misc_feature 1..22: note = chemically synthesized
  source 1..22: mol_type = other DNA
acttatggcttaaggtaaaggt

SEQ ID NO: 122481 - DNA, 22 bp, synthetic construct
  misc_feature 1..22: note = chemically synthesized
  source 1..22: mol_type = other DNA
atggcttaaggtaaaggtccaa

SEQ ID NO: 122482 - DNA, 22 bp, synthetic construct
  misc_feature 1..22: note = chemically synthesized
  source 1..22: mol_type = other DNA
tggcttaaggtaaaggtccaat

SEQ ID NO: 122483 - DNA, 22 bp, synthetic construct
  misc_feature 1..22: note = chemically synthesized
  source 1..22: mol_type = other DNA
aaggtaaaggtccaattttatt

SEQ ID NO: 122484 - DNA, 22 bp, synthetic construct
  misc_feature 1..22: note = chemically synthesized
  source 1..22: mol_type = other DNA
aggtaaaggtccaattttattc

SEQ ID NO: 122485 - DNA, 22 bp, synthetic construct
  misc_feature 1..22: note = chemically synthesized
  source 1..22: mol_type = other DNA
tattcttttgcatttggatatc

SEQ ID NO: 122486 - DNA, 22 bp, synthetic construct
  misc_feature 1..22: note = chemically synthesized
  source 1..22: mol_type = other DNA
attcttttgcatttggatatcc

SEQ ID NO: 122487 - DNA, 22 bp, synthetic construct
  misc_feature 1..22: note = chemically synthesized
  source 1..22: mol_type = other DNA
ttcttttgcatttggatatcca

SEQ ID NO: 122488 - DNA, 22 bp, synthetic construct
  misc_feature 1..22: note = chemically synthesized
  source 1..22: mol_type = other DNA
ttttgcatttggatatccagtt

SEQ ID NO: 122489 - DNA, 22 bp, synthetic construct
  misc_feature 1..22: note = chemically synthesized
  source 1..22: mol_type = other DNA
ttgcatttggatatccagtttt

SEQ ID NO: 122490 - DNA, 22 bp, synthetic construct
  misc_feature 1..22: note = chemically synthesized
  source 1..22: mol_type = other DNA
tgcatttggatatccagttttc

SEQ ID NO: 122491 - DNA, 22 bp, synthetic construct
  misc_feature 1..22: note = chemically synthesized
  source 1..22: mol_type = other DNA
gcatttggatatccagttttcc

SEQ ID NO: 122492 - DNA, 22 bp, synthetic construct
  misc_feature 1..22: note = chemically synthesized
  source 1..22: mol_type = other DNA
catttggatatccagttttccc

SEQ ID NO: 122493 - DNA, 22 bp, synthetic construct
  misc_feature 1..22: note = chemically synthesized
  source 1..22: mol_type = other DNA
ggatatccagttttcccaacac

SEQ ID NO: 122494 - DNA, 22 bp, synthetic construct
  misc_feature 1..22: note = chemically synthesized
  source 1..22: mol_type = other DNA
gatatccagttttcccaacact

SEQ ID NO: 122495 - DNA, 22 bp, synthetic construct
  misc_feature 1..22: note = chemically synthesized
  source 1..22: mol_type = other DNA
tcccaacactatttgttgagga

SEQ ID NO: 122496 - DNA, 22 bp, synthetic construct
  misc_feature 1..22: note = chemically synthesized
  source 1..22: mol_type = other DNA
cccaacactatttgttgaggag

SEQ ID NO: 122497 - DNA, 22 bp, synthetic construct
  misc_feature 1..22: note = chemically synthesized
  source 1..22: mol_type = other DNA
ccaacactatttgttgaggaga

SEQ ID NO: 122498 - DNA, 22 bp, synthetic construct
  misc_feature 1..22: note = chemically synthesized
  source 1..22: mol_type = other DNA
tttgttgaggagactatccttc

SEQ ID NO: 122499 - DNA, 22 bp, synthetic construct
  misc_feature 1..22: note = chemically synthesized
  source 1..22: mol_type = other DNA
gttgaggagactatccttcccc

SEQ ID NO: 122500 - DNA, 22 bp, synthetic construct
  misc_feature 1..22: note = chemically synthesized
  source 1..22: mol_type = other DNA
ttgaggagactatccttcccct

SEQ ID NO: 122501 - DNA, 22 bp, synthetic construct
  misc_feature 1..22: note = chemically synthesized
  source 1..22: mol_type = other DNA
aggagactatccttcccctatt

SEQ ID NO: 122502 - DNA, 22 bp, synthetic construct
  misc_feature 1..22: note = chemically synthesized
  source 1..22: mol_type = other DNA
tccttcccctattgtgttggtg

SEQ ID NO: 122503 - DNA, 22 bp, synthetic construct
  misc_feature 1..22: note = chemically synthesized
  source 1..22: mol_type = other DNA
cccctattgtgttggtggcctt

SEQ ID NO: 122504 - DNA, 22 bp, synthetic construct
  misc_feature 1..22: note = chemically synthesized
  source 1..22: mol_type = other DNA
ccctattgtgttggtggccttg

SEQ ID NO: 122505 - DNA, 22 bp, synthetic construct
  misc_feature 1..22: note = chemically synthesized
  source 1..22: mol_type = other DNA
ttgtgttggtggccttgttgag

SEQ ID NO: 122506 - DNA, 22 bp, synthetic construct
  misc_feature 1..22: note = chemically synthesized
  source 1..22: mol_type = other DNA
tgttggtggccttgttgagaat

SEQ ID NO: 122507 - DNA, 22 bp, synthetic construct
  misc_feature 1..22: note = chemically synthesized
  source 1..22: mol_type = other DNA
gtggccttgttgagaattactg

SEQ ID NO: 122508 - DNA, 22 bp, synthetic construct
  misc_feature 1..22: note = chemically synthesized
  source 1..22: mol_type = other DNA
gttgagaattactggactgtat

SEQ ID NO: 122509 - DNA, 22 bp, synthetic construct
  misc_feature 1..22: note = chemically synthesized
  source 1..22: mol_type = other DNA
ttgagaattactggactgtata

SEQ ID NO: 122510 - DNA, 22 bp, synthetic construct
  misc_feature 1..22: note = chemically synthesized
  source 1..22: mol_type = other DNA
agaattactggactgtatatac

SEQ ID NO: 122511 - DNA, 22 bp, synthetic construct
  misc_feature 1..22: note = chemically synthesized
  source 1..22: mol_type = other DNA
ctggactgtatatacgtaaatt

SEQ ID NO: 122512 - DNA, 22 bp, synthetic construct
  misc_feature 1..22: note = chemically synthesized
  source 1..22: mol_type = other DNA
gactgtatatacgtaaatttat

SEQ ID NO: 122513 - DNA, 22 bp, synthetic construct
  misc_feature 1..22: note = chemically synthesized
  source 1..22: mol_type = other DNA
tatatacgtaaatttatttctg

SEQ ID NO: 122514 - DNA, 22 bp, synthetic construct
  misc_feature 1..22: note = chemically synthesized
  source 1..22: mol_type = other DNA
atttctgggctctttattctgt

SEQ ID NO: 122515 - DNA, 22 bp, synthetic construct
  misc_feature 1..22: note = chemically synthesized
  source 1..22: mol_type = other DNA
tttctgggctctttattctgtt

SEQ ID NO: 122516 - DNA, 22 bp, synthetic construct
  misc_feature 1..22: note = chemically synthesized
  source 1..22: mol_type = other DNA
ctgggctctttattctgttcaa

SEQ ID NO: 122517 - DNA, 22 bp, synthetic construct
  misc_feature 1..22: note = chemically synthesized
  source 1..22: mol_type = other DNA
tgggctctttattctgttcaat

SEQ ID NO: 122518 - DNA, 22 bp, synthetic construct
  misc_feature 1..22: note = chemically synthesized
  source 1..22: mol_type = other DNA
ggctctttattctgttcaattt

SEQ ID NO: 122519 - DNA, 22 bp, synthetic construct
  misc_feature 1..22: note = chemically synthesized
  source 1..22: mol_type = other DNA
tttattctgttcaatttggtct

SEQ ID NO: 122520 - DNA, 22 bp, synthetic construct
  misc_feature 1..22: note = chemically synthesized
  source 1..22: mol_type = other DNA
tattctgttcaatttggtctat

SEQ ID NO: 122521 - DNA, 22 bp, synthetic construct
  misc_feature 1..22: note = chemically synthesized
  source 1..22: mol_type = other DNA
attctgttcaatttggtctatg

SEQ ID NO: 122522 - DNA, 22 bp, synthetic construct
  misc_feature 1..22: note = chemically synthesized
  source 1..22: mol_type = other DNA
ttctgttcaatttggtctatgt

SEQ ID NO: 122523 - DNA, 22 bp, synthetic construct
  misc_feature 1..22: note = chemically synthesized
  source 1..22: mol_type = other DNA
tgttcaatttggtctatgtgtc

SEQ ID NO: 122524 - DNA, 22 bp, synthetic construct
  misc_feature 1..22: note = chemically synthesized
  source 1..22: mol_type = other DNA
ttcaatttggtctatgtgtcta

SEQ ID NO: 122525 - DNA, 22 bp, synthetic construct
  misc_feature 1..22: note = chemically synthesized
  source 1..22: mol_type = other DNA
aatttggtctatgtgtctattt

SEQ ID NO: 122526 - DNA, 22 bp, synthetic construct
  misc_feature 1..22: note = chemically synthesized
  source 1..22: mol_type = other DNA
ggtctatgtgtctatttatgtg

SEQ ID NO: 122527 - DNA, 22 bp, synthetic construct
  misc_feature 1..22: note = chemically synthesized
  source 1..22: mol_type = other DNA
gtctatgtgtctatttatgtga

SEQ ID NO: 122528 - DNA, 22 bp, synthetic construct
  misc_feature 1..22: note = chemically synthesized
  source 1..22: mol_type = other DNA
tgtgtctatttatgtgatagta

SEQ ID NO: 122529 - DNA, 22 bp, synthetic construct
  misc_feature 1..22: note = chemically synthesized
  source 1..22: mol_type = other DNA
tttatgtgatagtaccatactt

SEQ ID NO: 122530 - DNA, 22 bp, synthetic construct
  misc_feature 1..22: note = chemically synthesized
  source 1..22: mol_type = other DNA
atgtgatagtaccatacttttt

SEQ ID NO: 122531 - DNA, 22 bp, synthetic construct
  misc_feature 1..22: note = chemically synthesized
  source 1..22: mol_type = other DNA
tgtgatagtaccatactttttt

SEQ ID NO: 122532 - DNA, 22 bp, synthetic construct
  misc_feature 1..22: note = chemically synthesized
  source 1..22: mol_type = other DNA
ttttggttactatagctttgta

SEQ ID NO: 122533 - DNA, 22 bp, synthetic construct
  misc_feature 1..22: note = chemically synthesized
  source 1..22: mol_type = other DNA
tttggttactatagctttgtaa

SEQ ID NO: 122534 - DNA, 22 bp, synthetic construct
  misc_feature 1..22: note = chemically synthesized
  source 1..22: mol_type = other DNA
ttggttactatagctttgtaat

SEQ ID NO: 122535 - DNA, 22 bp, synthetic construct
  misc_feature 1..22: note = chemically synthesized
  source 1..22: mol_type = other DNA
tggttactatagctttgtaata

SEQ ID NO: 122536 - DNA, 22 bp, synthetic construct
  misc_feature 1..22: note = chemically synthesized
  source 1..22: mol_type = other DNA
ggttactatagctttgtaatat

SEQ ID NO: 122537 - DNA, 22 bp, synthetic construct
  misc_feature 1..22: note = chemically synthesized
  source 1..22: mol_type = other DNA
gttactatagctttgtaatata

SEQ ID NO: 122538 - DNA, 22 bp, synthetic construct
  misc_feature 1..22: note = chemically synthesized
  source 1..22: mol_type = other DNA
ctatagctttgtaatataattt

SEQ ID NO: 122539 - DNA, 22 bp, synthetic construct
  misc_feature 1..22: note = chemically synthesized
  source 1..22: mol_type = other DNA
tagctttgtaatataatttgaa

SEQ ID NO: 122540 - DNA, 22 bp, synthetic construct
  misc_feature 1..22: note = chemically synthesized
  source 1..22: mol_type = other DNA
tgtaatataatttgaaatcaga

SEQ ID NO: 122541 - DNA, 22 bp, synthetic construct
  misc_feature 1..22: note = chemically synthesized
  source 1..22: mol_type = other DNA
gtaatataatttgaaatcagaa

SEQ ID NO: 122542 - DNA, 22 bp, synthetic construct
  misc_feature 1..22: note = chemically synthesized
  source 1..22: mol_type = other DNA
taatataatttgaaatcagaac

SEQ ID NO: 122543 - DNA, 22 bp, synthetic construct
  misc_feature 1..22: note = chemically synthesized
  source 1..22: mol_type = other DNA
gaaatcagaacgtgtgctgcca

SEQ ID NO: 122544 - DNA, 22 bp, synthetic construct
  misc_feature 1..22: note = chemically synthesized
  source 1..22: mol_type = other DNA
aaatcagaacgtgtgctgccat

SEQ ID NO: 122545 - DNA, 22 bp, synthetic construct
  misc_feature 1..22: note = chemically synthesized
  source 1..22: mol_type = other DNA
ccatcaagttggtttttctttc

SEQ ID NO: 122546 - DNA, 22 bp, synthetic construct
  misc_feature 1..22: note = chemically synthesized
  source 1..22: mol_type = other DNA
gtttttctttctcaagattgtt

SEQ ID NO: 122547 - DNA, 22 bp, synthetic construct
  misc_feature 1..22: note = chemically synthesized
  source 1..22: mol_type = other DNA
ttctttctcaagattgttttgg

SEQ ID NO: 122548 - DNA, 22 bp, synthetic construct
  misc_feature 1..22: note = chemically synthesized
  source 1..22: mol_type = other DNA
tctttctcaagattgttttggc

SEQ ID NO: 122549 - DNA, 22 bp, synthetic construct
  misc_feature 1..22: note = chemically synthesized
  source 1..22: mol_type = other DNA
ctttctcaagattgttttggcc

SEQ ID NO: 122550 - DNA, 22 bp, synthetic construct
  misc_feature 1..22: note = chemically synthesized
  source 1..22: mol_type = other DNA
tttctcaagattgttttggcca

SEQ ID NO: 122551 - DNA, 22 bp, synthetic construct
  misc_feature 1..22: note = chemically synthesized
  source 1..22: mol_type = other DNA
tctcaagattgttttggccatt

SEQ ID NO: 122552 - DNA, 22 bp, synthetic construct
  misc_feature 1..22: note = chemically synthesized
  source 1..22: mol_type = other DNA
ctcaagattgttttggccattt

SEQ ID NO: 122553 - DNA, 22 bp, synthetic construct
  misc_feature 1..22: note = chemically synthesized
  source 1..22: mol_type = other DNA
tcaagattgttttggccatttg

SEQ ID NO: 122554 - DNA, 22 bp, synthetic construct
  misc_feature 1..22: note = chemically synthesized
  source 1..22: mol_type = other DNA
aagattgttttggccatttggg

SEQ ID NO: 122555 - DNA, 22 bp, synthetic construct
  misc_feature 1..22: note = chemically synthesized
  source 1..22: mol_type = other DNA
ttttggccatttgggggtgttc

SEQ ID NO: 122556 - DNA, 22 bp, synthetic construct
  misc_feature 1..22: note = chemically synthesized
  source 1..22: mol_type = other DNA
tggccatttgggggtgttctgt

SEQ ID NO: 122557 - DNA, 22 bp, synthetic construct
  misc_feature 1..22: note = chemically synthesized
  source 1..22: mol_type = other DNA
ggccatttgggggtgttctgtg

SEQ ID NO: 122558 - DNA, 22 bp, synthetic construct
  misc_feature 1..22: note = chemically synthesized
  source 1..22: mol_type = other DNA
gccatttgggggtgttctgtgg

SEQ ID NO: 122559 - DNA, 22 bp, synthetic construct
  misc_feature 1..22: note = chemically synthesized
  source 1..22: mol_type = other DNA
gggggtgttctgtggtttcata

SEQ ID NO: 122560 - DNA, 22 bp, synthetic construct
  misc_feature 1..22: note = chemically synthesized
  source 1..22: mol_type = other DNA
ggggtgttctgtggtttcatac

SEQ ID NO: 122561 - DNA, 22 bp, synthetic construct
  misc_feature 1..22: note = chemically synthesized
  source 1..22: mol_type = other DNA
tgtggtttcatacaaattttca

SEQ ID NO: 122562 - DNA, 22 bp, synthetic construct
  misc_feature 1..22: note = chemically synthesized
  source 1..22: mol_type = other DNA
tggtttcatacaaattttcaaa

SEQ ID NO: 122563 - DNA, 22 bp, synthetic construct
  misc_feature 1..22: note = chemically synthesized
  source 1..22: mol_type = other DNA
catacaaattttcaaattgttt

SEQ ID NO: 122564 - DNA, 22 bp, synthetic construct
  misc_feature 1..22: note = chemically synthesized
  source 1..22: mol_type = other DNA
atacaaattttcaaattgtttt

SEQ ID NO: 122565 - DNA, 22 bp, synthetic construct
  misc_feature 1..22: note = chemically synthesized
  source 1..22: mol_type = other DNA
tcaaattgttttctgtaaaatg

SEQ ID NO: 122566 - DNA, 22 bp, synthetic construct
  misc_feature 1..22: note = chemically synthesized
  source 1..22: mol_type = other DNA
caaattgttttctgtaaaatgt

SEQ ID NO: 122567 - DNA, 22 bp, synthetic construct
  misc_feature 1..22: note = chemically synthesized
  source 1..22: mol_type = other DNA
aaattgttttctgtaaaatgtg

SEQ ID NO: 122568 - DNA, 22 bp, synthetic construct
  misc_feature 1..22: note = chemically synthesized
  source 1..22: mol_type = other DNA
ttttctgtaaaatgtgccagag

SEQ ID NO: 122569 - DNA, 22 bp, synthetic construct
  misc_feature 1..22: note = chemically synthesized
  source 1..22: mol_type = other DNA
tctgtaaaatgtgccagagctc

SEQ ID NO: 122570 - DNA, 22 bp, synthetic construct
  misc_feature 1..22: note = chemically synthesized
  source 1..22: mol_type = other DNA
ctgtaaaatgtgccagagctca

SEQ ID NO: 122571 - DNA, 22 bp, synthetic construct
  misc_feature 1..22: note = chemically synthesized
  source 1..22: mol_type = other DNA
tgtaaaatgtgccagagctcag

SEQ ID NO: 122572 - DNA, 22 bp, synthetic construct
  misc_feature 1..22: note = chemically synthesized
  source 1..22: mol_type = other DNA
taaaatgtgccagagctcaggt

SEQ ID NO: 122573 - DNA, 22 bp, synthetic construct
  misc_feature 1..22: note = chemically synthesized
  source 1..22: mol_type = other DNA
aggtaacaaaagcaaaaataaa

SEQ ID NO: 122574 - DNA, 22 bp, synthetic construct
  misc_feature 1..22: note = chemically synthesized
  source 1..22: mol_type = other DNA
aatattttctgcacagcaaaga

SEQ ID NO: 122575 - DNA, 22 bp, synthetic construct
  misc_feature 1..22: note = chemically synthesized
  source 1..22: mol_type = other DNA
tctgcacagcaaagaaaacaat

SEQ ID NO: 122576 - DNA, 22 bp, synthetic construct
  misc_feature 1..22: note = chemically synthesized
  source 1..22: mol_type = other DNA
ctgcacagcaaagaaaacaatc

SEQ ID NO: 122577 - DNA, 22 bp, synthetic construct
  misc_feature 1..22: note = chemically synthesized
  source 1..22: mol_type = other DNA
tgcacagcaaagaaaacaatca

SEQ ID NO: 122578 - DNA, 22 bp, synthetic construct
  misc_feature 1..22: note = chemically synthesized
  source 1..22: mol_type = other DNA
cacagcaaagaaaacaatcatc

SEQ ID NO: 122579 - DNA, 22 bp, synthetic construct
  misc_feature 1..22: note = chemically synthesized
  source 1..22: mol_type = other DNA
gggagaaaatatttacagatca

SEQ ID NO: 122580 - DNA, 22 bp, synthetic construct
  misc_feature 1..22: note = chemically synthesized
  source 1..22: mol_type = other DNA
ggagaaaatatttacagatcat

SEQ ID NO: 122581 - DNA, 22 bp, synthetic construct
  misc_feature 1..22: note = chemically synthesized
  source 1..22: mol_type = other DNA
acagatcatatatctgatacaa

SEQ ID NO: 122582 - DNA, 22 bp, synthetic construct
  misc_feature 1..22: note = chemically synthesized
  source 1..22: mol_type = other DNA
cagatcatatatctgatacaag

SEQ ID NO: 122583 - DNA, 22 bp, synthetic construct
  misc_feature 1..22: note = chemically synthesized
  source 1..22: mol_type = other DNA
atacaagtctaatacccaaaat

SEQ ID NO: 122584 - DNA, 22 bp, synthetic construct
  misc_feature 1..22: note = chemically synthesized
  source 1..22: mol_type = other DNA
atacccaaaatatataaggaac

SEQ ID NO: 122585 - DNA, 22 bp, synthetic construct
  misc_feature 1..22: note = chemically synthesized
  source 1..22: mol_type = other DNA
aatcaactaaatatgaaaaaat

SEQ ID NO: 122586 - DNA, 22 bp, synthetic construct
  misc_feature 1..22: note = chemically synthesized
  source 1..22: mol_type = other DNA
aatatgaaaaaatataatagta

SEQ ID NO: 122587 - DNA, 22 bp, synthetic construct
  misc_feature 1..22: note = chemically synthesized
  source 1..22: mol_type = other DNA
agtaaaaatgggcaaaggatct

SEQ ID NO: 122588 - DNA, 22 bp, synthetic construct
  misc_feature 1..22: note = chemically synthesized
  source 1..22: mol_type = other DNA
aatatacatttctctgaagaca

SEQ ID NO: 122589 - DNA, 22 bp, synthetic construct
  misc_feature 1..22: note = chemically synthesized
  source 1..22: mol_type = other DNA
ctctgaagacatgcaaatggtc

SEQ ID NO: 122590 - DNA, 22 bp, synthetic construct
  misc_feature 1..22: note = chemically synthesized
  source 1..22: mol_type = other DNA
tctgaagacatgcaaatggtca

SEQ ID NO: 122591 - DNA, 22 bp, synthetic construct
  misc_feature 1..22: note = chemically synthesized
  source 1..22: mol_type = other DNA
tgaagacatgcaaatggtcagc

SEQ ID NO: 122592 - DNA, 22 bp, synthetic construct
  misc_feature 1..22: note = chemically synthesized
  source 1..22: mol_type = other DNA
aagacatgcaaatggtcagcag

SEQ ID NO: 122593 - DNA, 22 bp, synthetic construct
  misc_feature 1..22: note = chemically synthesized
  source 1..22: mol_type = other DNA
catcaccaatcatcaggaaaat

SEQ ID NO: 122594 - DNA, 22 bp, synthetic construct
  misc_feature 1..22: note = chemically synthesized
  source 1..22: mol_type = other DNA
acacctgttgagatggctatta

SEQ ID NO: 122595 - DNA, 22 bp, synthetic construct
  misc_feature 1..22: note = chemically synthesized
  source 1..22: mol_type = other DNA
ttgagatggctattatcaaaaa

SEQ ID NO: 122596 - DNA, 22 bp, synthetic construct
  misc_feature 1..22: note = chemically synthesized
  source 1..22: mol_type = other DNA
agatggctattatcaaaaaaga

SEQ ID NO: 122597 - DNA, 22 bp, synthetic construct
  misc_feature 1..22: note = chemically synthesized
  source 1..22: mol_type = other DNA
ttatcaaaaaagacaagagata

SEQ ID NO: 122598 - DNA, 22 bp, synthetic construct
  misc_feature 1..22: note = chemically synthesized
  source 1..22: mol_type = other DNA
tcaaaaaagacaagagataggg

SEQ ID NO: 122599 - DNA, 22 bp, synthetic construct
  misc_feature 1..22: note = chemically synthesized
  source 1..22: mol_type = other DNA
gagaggctgtggagaaaggaga

SEQ ID NO: 122600 - DNA, 22 bp, synthetic construct
  misc_feature 1..22: note = chemically synthesized
  source 1..22: mol_type = other DNA
tggagaaaggagaactcttgtg

SEQ ID NO: 122601 - DNA, 22 bp, synthetic construct
  misc_feature 1..22: note = chemically synthesized
  source 1..22: mol_type = other DNA
ttgtgcatagctggtgggaatg

SEQ ID NO: 122602 - DNA, 22 bp, synthetic construct
  misc_feature 1..22: note = chemically synthesized
  source 1..22: mol_type = other DNA
gtgcatagctggtgggaatgta

SEQ ID NO: 122603 - DNA, 22 bp, synthetic construct
  misc_feature 1..22: note = chemically synthesized
  source 1..22: mol_type = other DNA
tgcatagctggtgggaatgtaa

SEQ ID NO: 122604 - DNA, 22 bp, synthetic construct
  misc_feature 1..22: note = chemically synthesized
  source 1..22: mol_type = other DNA
gtgggaatgtaagttaacatag

SEQ ID NO: 122605 - DNA, 22 bp, synthetic construct
  misc_feature 1..22: note = chemically synthesized
  source 1..22: mol_type = other DNA
acatagccattatagaaaacgt

SEQ ID NO: 122606 - DNA, 22 bp, synthetic construct
  misc_feature 1..22: note = chemically synthesized
  source 1..22: mol_type = other DNA
tagaaaacgtatggaagtttct

SEQ ID NO: 122607 - DNA, 22 bp, synthetic construct
  misc_feature 1..22: note = chemically synthesized
  source 1..22: mol_type = other DNA
ctcaaacaactaaaaatagagt

SEQ ID NO: 122608 - DNA, 22 bp, synthetic construct
  misc_feature 1..22: note = chemically synthesized
  source 1..22: mol_type = other DNA
tcaaacaactaaaaatagagtt

SEQ ID NO: 122609 - DNA, 22 bp, synthetic construct
  misc_feature 1..22: note = chemically synthesized
  source 1..22: mol_type = other DNA
aaacaactaaaaatagagttat

SEQ ID NO: 122610 - DNA, 22 bp, synthetic construct
  misc_feature 1..22: note = chemically synthesized
  source 1..22: mol_type = other DNA
aaaatagagttattgtatgatg

SEQ ID NO: 122611 - DNA, 22 bp, synthetic construct
  misc_feature 1..22: note = chemically synthesized
  source 1..22: mol_type = other DNA
ttgtatgatgaagaaatttctc

SEQ ID NO: 122612 - DNA, 22 bp, synthetic construct
  misc_feature 1..22: note = chemically synthesized
  source 1..22: mol_type = other DNA
tatgatgaagaaatttctctgc

SEQ ID NO: 122613 - DNA, 22 bp, synthetic construct
  misc_feature 1..22: note = chemically synthesized
  source 1..22: mol_type = other DNA
ctctgctgtatatgtatccaaa

SEQ ID NO: 122614 - DNA, 22 bp, synthetic construct
  misc_feature 1..22: note = chemically synthesized
  source 1..22: mol_type = other DNA
tctgctgtatatgtatccaaaa

SEQ ID NO: 122615 - DNA, 22 bp, synthetic construct
  misc_feature 1..22: note = chemically synthesized
  source 1..22: mol_type = other DNA
tgctgtatatgtatccaaaata

SEQ ID NO: 122616 - DNA, 22 bp, synthetic construct
  misc_feature 1..22: note = chemically synthesized
  source 1..22: mol_type = other DNA
ctgtatatgtatccaaaataaa

SEQ ID NO: 122617 - DNA, 22 bp, synthetic construct
  misc_feature 1..22: note = chemically synthesized
  source 1..22: mol_type = other DNA
tatatgtatccaaaataaataa

SEQ ID NO: 122618 - DNA, 22 bp, synthetic construct
  misc_feature 1..22: note = chemically synthesized
  source 1..22: mol_type = other DNA
tctagagctatctgcactctca

SEQ ID NO: 122619 - DNA, 22 bp, synthetic construct
  misc_feature 1..22: note = chemically synthesized
  source 1..22: mol_type = other DNA
ctagagctatctgcactctcat

SEQ ID NO: 122620 - DNA, 22 bp, synthetic construct
  misc_feature 1..22: note = chemically synthesized
  source 1..22: mol_type = other DNA
tagagctatctgcactctcatg

SEQ ID NO: 122621 - DNA, 22 bp, synthetic construct
  misc_feature 1..22: note = chemically synthesized
  source 1..22: mol_type = other DNA
gagctatctgcactctcatgtt

SEQ ID NO: 122622 - DNA, 22 bp, synthetic construct
  misc_feature 1..22: note = chemically synthesized
  source 1..22: mol_type = other DNA
tctgcactctcatgttaattgc

SEQ ID NO: 122623 - DNA, 22 bp, synthetic construct
  misc_feature 1..22: note = chemically synthesized
  source 1..22: mol_type = other DNA
cactctcatgttaattgcagca

SEQ ID NO: 122624 - DNA, 22 bp, synthetic construct
  misc_feature 1..22: note = chemically synthesized
  source 1..22: mol_type = other DNA
tcatgttaattgcagcattatt

SEQ ID NO: 122625 - DNA, 22 bp, synthetic construct
  misc_feature 1..22: note = chemically synthesized
  source 1..22: mol_type = other DNA
atgttaattgcagcattattca

SEQ ID NO: 122626 - DNA, 22 bp, synthetic construct
  misc_feature 1..22: note = chemically synthesized
  source 1..22: mol_type = other DNA
attgcagcattattcacaatag

SEQ ID NO: 122627 - DNA, 22 bp, synthetic construct
  misc_feature 1..22: note = chemically synthesized
  source 1..22: mol_type = other DNA
cagcattattcacaatagccaa

SEQ ID NO: 122628 - DNA, 22 bp, synthetic construct
  misc_feature 1..22: note = chemically synthesized
  source 1..22: mol_type = other DNA
ttcacaatagccaagacatgga

SEQ ID NO: 122629 - DNA, 22 bp, synthetic construct
  misc_feature 1..22: note = chemically synthesized
  source 1..22: mol_type = other DNA
acaatagccaagacatggaaac

SEQ ID NO: 122630 - DNA, 22 bp, synthetic construct
  misc_feature 1..22: note = chemically synthesized
  source 1..22: mol_type = other DNA
agtggtatctatatatagatga

SEQ ID NO: 122631 - DNA, 22 bp, synthetic construct
  misc_feature 1..22: note = chemically synthesized
  source 1..22: mol_type = other DNA
tatatagatgaacagataaaga

SEQ ID NO: 122632 - DNA, 22 bp, synthetic construct
  misc_feature 1..22: note = chemically synthesized
  source 1..22: mol_type = other DNA
tgacaggtctgtatatgatatt

SEQ ID NO: 122633 - DNA, 22 bp, synthetic construct
  misc_feature 1..22: note = chemically synthesized
  source 1..22: mol_type = other DNA
tatatgatattgtgatatatgt

SEQ ID NO: 122634 - DNA, 22 bp, synthetic construct
  misc_feature 1..22: note = chemically synthesized
  source 1..22: mol_type = other DNA
tgatatatgtcatatgtatgta

SEQ ID NO: 122635 - DNA, 22 bp, synthetic construct
  misc_feature 1..22: note = chemically synthesized
  source 1..22: mol_type = other DNA
ttcagccttaaaaaaggagatg

SEQ ID NO: 122636 - DNA, 22 bp, synthetic construct
  misc_feature 1..22: note = chemically synthesized
  source 1..22: mol_type = other DNA
agccttaaaaaaggagatgggg

SEQ ID NO: 122637 - DNA, 22 bp, synthetic construct
  misc_feature 1..22: note = chemically synthesized
  source 1..22: mol_type = other DNA
aaaaaaggagatggggggaatg

SEQ ID NO: 122638 - DNA, 22 bp, synthetic construct
  misc_feature 1..22: note = chemically synthesized
  source 1..22: mol_type = other DNA
aaaaaggagatggggggaatgt

SEQ ID NO: 122639 - DNA, 22 bp, synthetic construct
  misc_feature 1..22: note = chemically synthesized
  source 1..22: mol_type = other DNA
gagtacattttgctaagtgaaa

SEQ ID NO: 122640 - DNA, 22 bp, synthetic construct
  misc_feature 1..22: note = chemically synthesized
  source 1..22: mol_type = other DNA
tgctaagtgaaataaaccagac

SEQ ID NO: 122641 - DNA, 22 bp, synthetic construct
  misc_feature 1..22: note = chemically synthesized
  source 1..22: mol_type = other DNA
gctaagtgaaataaaccagaca

SEQ ID NO: 122642 - DNA, 22 bp, synthetic construct
  misc_feature 1..22: note = chemically synthesized
  source 1..22: mol_type = other DNA
ctaagtgaaataaaccagacac

SEQ ID NO: 122643 - DNA, 22 bp, synthetic construct
  misc_feature 1..22: note = chemically synthesized
  source 1..22: mol_type = other DNA
agtgaaataaaccagacacaga

SEQ ID NO: 122644 - DNA, 22 bp, synthetic construct
  misc_feature 1..22: note = chemically synthesized
  source 1..22: mol_type = other DNA
cttatatgtggaatctcaaaag

SEQ ID NO: 122645 - DNA, 22 bp, synthetic construct
  misc_feature 1..22: note = chemically synthesized
  source 1..22: mol_type = other DNA
atatgtggaatctcaaaagaaa

SEQ ID NO: 122646 - DNA, 22 bp, synthetic construct
  misc_feature 1..22: note = chemically synthesized
  source 1..22: mol_type = other DNA
tatgtggaatctcaaaagaaaa

SEQ ID NO: 122647 - DNA, 22 bp, synthetic construct
  misc_feature 1..22: note = chemically synthesized
  source 1..22: mol_type = other DNA
aaaagaaaaataaggtcaaatg

SEQ ID NO: 122648 - DNA, 22 bp, synthetic construct
  misc_feature 1..22: note = chemically synthesized
  source 1..22: mol_type = other DNA
taaacttgcagctgtataggat

SEQ ID NO: 122649 - DNA, 22 bp, synthetic construct
  misc_feature 1..22: note = chemically synthesized
  source 1..22: mol_type = other DNA
gcagctgtataggataaataag

SEQ ID NO: 122650 - DNA, 22 bp, synthetic construct
  misc_feature 1..22: note = chemically synthesized
  source 1..22: mol_type = other DNA
cagctgtataggataaataagt

SEQ ID NO: 122651 - DNA, 22 bp, synthetic construct
  misc_feature 1..22: note = chemically synthesized
  source 1..22: mol_type = other DNA
tataggataaataagtttagag

SEQ ID NO: 122652 - DNA, 22 bp, synthetic construct
  misc_feature 1..22: note = chemically synthesized
  source 1..22: mol_type = other DNA
agagatctagtgtatggcatga

SEQ ID NO: 122653 - DNA, 22 bp, synthetic construct
  misc_feature 1..22: note = chemically synthesized
  source 1..22: mol_type = other DNA
gagatctagtgtatggcatgaa

SEQ ID NO: 122654 - DNA, 22 bp, synthetic construct
  misc_feature 1..22: note = chemically synthesized
  source 1..22: mol_type = other DNA
gtgtatggcatgaagacttaat

SEQ ID NO: 122655 - DNA, 22 bp, synthetic construct
  misc_feature 1..22: note = chemically synthesized
  source 1..22: mol_type = other DNA
aatactgtactgtaaactaaac

SEQ ID NO: 122656 - DNA, 22 bp, synthetic construct
  misc_feature 1..22: note = chemically synthesized
  source 1..22: mol_type = other DNA
atactgtactgtaaactaaaca

SEQ ID NO: 122657 - DNA, 22 bp, synthetic construct
  misc_feature 1..22: note = chemically synthesized
  source 1..22: mol_type = other DNA
tactgtaaactaaacatttgtt

SEQ ID NO: 122658 - DNA, 22 bp, synthetic construct
  misc_feature 1..22: note = chemically synthesized
  source 1..22: mol_type = other DNA
taaactaaacatttgttatgac

SEQ ID NO: 122659 - DNA, 22 bp, synthetic construct
  misc_feature 1..22: note = chemically synthesized
  source 1..22: mol_type = other DNA
aacatttgttatgacagtagat

SEQ ID NO: 122660 - DNA, 22 bp, synthetic construct
  misc_feature 1..22: note = chemically synthesized
  source 1..22: mol_type = other DNA
gttatgacagtagatgttagat

SEQ ID NO: 122661 - DNA, 22 bp, synthetic construct
  misc_feature 1..22: note = chemically synthesized
  source 1..22: mol_type = other DNA
ttatgacagtagatgttagatg

SEQ ID NO: 122662 - DNA, 22 bp, synthetic construct
  misc_feature 1..22: note = chemically synthesized
  source 1..22: mol_type = other DNA
tgacagtagatgttagatgccc

SEQ ID NO: 122663 - DNA, 22 bp, synthetic construct
  misc_feature 1..22: note = chemically synthesized
  source 1..22: mol_type = other DNA
gatgcccttacacaaagaaaaa

SEQ ID NO: 122664 - DNA, 22 bp, synthetic construct
  misc_feature 1..22: note = chemically synthesized
  source 1..22: mol_type = other DNA
acacaaagaaaaagcaaaaggt

SEQ ID NO: 122665 - DNA, 22 bp, synthetic construct
  misc_feature 1..22: note = chemically synthesized
  source 1..22: mol_type = other DNA
cacaaagaaaaagcaaaaggta

SEQ ID NO: 122666 - DNA, 22 bp, synthetic construct
  misc_feature 1..22: note = chemically synthesized
  source 1..22: mol_type = other DNA
tggaaggtgttgtattgatgga

SEQ ID NO: 122667 - DNA, 22 bp, synthetic construct
  misc_feature 1..22: note = chemically synthesized
  source 1..22: mol_type = other DNA
tattgatggataggttaatttg

SEQ ID NO: 122668 - DNA, 22 bp, synthetic construct
  misc_feature 1..22: note = chemically synthesized
  source 1..22: mol_type = other DNA
atggataggttaatttgcttga

SEQ ID NO: 122669 - DNA, 22 bp, synthetic construct
  misc_feature 1..22: note = chemically synthesized
  source 1..22: mol_type = other DNA
atttgcttgattgaagtaatca

SEQ ID NO: 122670 - DNA, 22 bp, synthetic construct
  misc_feature 1..22: note = chemically synthesized
  source 1..22: mol_type = other DNA
gcttgattgaagtaatcatctc

SEQ ID NO: 122671 - DNA, 22 bp, synthetic construct
  misc_feature 1..22: note = chemically synthesized
  source 1..22: mol_type = other DNA
cttgattgaagtaatcatctca

SEQ ID NO: 122672 - DNA, 22 bp, synthetic construct
  misc_feature 1..22: note = chemically synthesized
  source 1..22: mol_type = other DNA
gattgaagtaatcatctcacta

SEQ ID NO: 122673 - DNA, 22 bp, synthetic construct
  misc_feature 1..22: note = chemically synthesized
  source 1..22: mol_type = other DNA
attgaagtaatcatctcactat

SEQ ID NO: 122674 - DNA, 22 bp, synthetic construct
  misc_feature 1..22: note = chemically synthesized
  source 1..22: mol_type = other DNA
aagtaatcatctcactatgtac

SEQ ID NO: 122675 - DNA, 22 bp, synthetic construct
  misc_feature 1..22: note = chemically synthesized
  source 1..22: mol_type = other DNA
actatgtacacatatatcctat

SEQ ID NO: 122676 - DNA, 22 bp, synthetic construct
  misc_feature 1..22: note = chemically synthesized
  source 1..22: mol_type = other DNA
tgtacacatatatcctatattt

SEQ ID NO: 122677 - DNA, 22 bp, synthetic construct
  misc_feature 1..22: note = chemically synthesized
  source 1..22: mol_type = other DNA
tattttttgaacaagcttactt

SEQ ID NO: 122678 - DNA, 22 bp, synthetic construct
  misc_feature 1..22: note = chemically synthesized
  source 1..22: mol_type = other DNA
tttgaacaagcttacttgtttc

SEQ ID NO: 122679 - DNA, 22 bp, synthetic construct
  misc_feature 1..22: note = chemically synthesized
  source 1..22: mol_type = other DNA
ttgaacaagcttacttgtttca

SEQ ID NO: 122680 - DNA, 22 bp, synthetic construct
  misc_feature 1..22: note = chemically synthesized
  source 1..22: mol_type = other DNA
tgaacaagcttacttgtttcag

SEQ ID NO: 122681 - DNA, 22 bp, synthetic construct
  misc_feature 1..22: note = chemically synthesized
  source 1..22: mol_type = other DNA
gaacaagcttacttgtttcaga

SEQ ID NO: 122682 - DNA, 22 bp, synthetic construct
  misc_feature 1..22: note = chemically synthesized
  source 1..22: mol_type = other DNA
aacaagcttacttgtttcagat

SEQ ID NO: 122683 - DNA, 22 bp, synthetic construct
  misc_feature 1..22: note = chemically synthesized
  source 1..22: mol_type = other DNA
acttgtttcagataaaatattt

SEQ ID NO: 122684 - DNA, 22 bp, synthetic construct
  misc_feature 1..22: note = chemically synthesized
  source 1..22: mol_type = other DNA
cttgtttcagataaaatatttt

SEQ ID NO: 122685 - DNA, 22 bp, synthetic construct
  misc_feature 1..22: note = chemically synthesized
  source 1..22: mol_type = other DNA
gtttcagataaaatattttaaa

SEQ ID NO: 122686 - DNA, 22 bp, synthetic construct
  misc_feature 1..22: note = chemically synthesized
  source 1..22: mol_type = other DNA
tttcagataaaatattttaaaa

SEQ ID NO: 122687 - DNA, 22 bp, synthetic construct
  misc_feature 1..22: note = chemically synthesized
  source 1..22: mol_type = other DNA
cagataaaatattttaaaagct

SEQ ID NO: 122688 - DNA, 22 bp, synthetic construct
  misc_feature 1..22: note = chemically synthesized
  source 1..22: mol_type = other DNA
agataaaatattttaaaagctt

SEQ ID NO: 122689 - DNA, 22 bp, synthetic construct
  misc_feature 1..22: note = chemically synthesized
  source 1..22: mol_type = other DNA
taaaagcttttatctgaagcaa

SEQ ID NO: 122690 - DNA, 22 bp, synthetic construct
  misc_feature 1..22: note = chemically synthesized
  source 1..22: mol_type = other DNA
aaaagcttttatctgaagcaag

SEQ ID NO: 122691 - DNA, 22 bp, synthetic construct
  misc_feature 1..22: note = chemically synthesized
  source 1..22: mol_type = other DNA
aaagcttttatctgaagcaagt

SEQ ID NO: 122692 - DNA, 22 bp, synthetic construct
  misc_feature 1..22: note = chemically synthesized
  source 1..22: mol_type = other DNA
ttatctgaagcaagtcaaattt

SEQ ID NO: 122693 - DNA, 22 bp, synthetic construct
  misc_feature 1..22: note = chemically synthesized
  source 1..22: mol_type = other DNA
tatctgaagcaagtcaaatttc

SEQ ID NO: 122694 - DNA, 22 bp, synthetic construct
  misc_feature 1..22: note = chemically synthesized
  source 1..22: mol_type = other DNA
atctgaagcaagtcaaatttct

SEQ ID NO: 122695 - DNA, 22 bp, synthetic construct
  misc_feature 1..22: note = chemically synthesized
  source 1..22: mol_type = other DNA
tctgaagcaagtcaaatttctg

SEQ ID NO: 122696 - DNA, 22 bp, synthetic construct
  misc_feature 1..22: note = chemically synthesized
  source 1..22: mol_type = other DNA
aagcaagtcaaatttctgtttc

SEQ ID NO: 122697 - DNA, 22 bp, synthetic construct
  misc_feature 1..22: note = chemically synthesized
  source 1..22: mol_type = other DNA
ctgtttcctaattgtttagggt

SEQ ID NO: 122698 - DNA, 22 bp, synthetic construct
  misc_feature 1..22: note = chemically synthesized
  source 1..22: mol_type = other DNA
tgtttcctaattgtttagggtc

SEQ ID NO: 122699 - DNA, 22 bp, synthetic construct
  misc_feature 1..22: note = chemically synthesized
  source 1..22: mol_type = other DNA
tttcctaattgtttagggtcct

SEQ ID NO: 122700 - DNA, 22 bp, synthetic construct
  misc_feature 1..22: note = chemically synthesized
  source 1..22: mol_type = other DNA
cctaattgtttagggtccttca

SEQ ID NO: 122701 - DNA, 22 bp, synthetic construct
  misc_feature 1..22: note = chemically synthesized
  source 1..22: mol_type = other DNA
ctaattgtttagggtccttcat

SEQ ID NO: 122702 - DNA, 22 bp, synthetic construct
  misc_feature 1..22: note = chemically synthesized
  source 1..22: mol_type = other DNA
attgtttagggtccttcatgtt

SEQ ID NO: 122703 - DNA, 22 bp, synthetic construct
  misc_feature 1..22: note = chemically synthesized
  source 1..22: mol_type = other DNA
tttagggtccttcatgttattt

SEQ ID NO: 122704 - DNA, 22 bp, synthetic construct
  misc_feature 1..22: note = chemically synthesized
  source 1..22: mol_type = other DNA
agggtccttcatgttatttcca

SEQ ID NO: 122705 - DNA, 22 bp, synthetic construct
  misc_feature 1..22: note = chemically synthesized
  source 1..22: mol_type = other DNA
gggtccttcatgttatttccac

SEQ ID NO: 122706 - DNA, 22 bp, synthetic construct
  misc_feature 1..22: note = chemically synthesized
  source 1..22: mol_type = other DNA
catgttatttccactcttaaaa

SEQ ID NO: 122707 - DNA, 22 bp, synthetic construct
  misc_feature 1..22: note = chemically synthesized
  source 1..22: mol_type = other DNA
atgttatttccactcttaaaac

SEQ ID NO: 122708 - DNA, 22 bp, synthetic construct
  misc_feature 1..22: note = chemically synthesized
  source 1..22: mol_type = other DNA
tttccactcttaaaacttatgt

SEQ ID NO: 122709 - DNA, 22 bp, synthetic construct
  misc_feature 1..22: note = chemically synthesized
  source 1..22: mol_type = other DNA
ccactcttaaaacttatgtaac

SEQ ID NO: 122710 - DNA, 22 bp, synthetic construct
  misc_feature 1..22: note = chemically synthesized
  source 1..22: mol_type = other DNA
cactcttaaaacttatgtaacc

SEQ ID NO: 122711 - DNA, 22 bp, synthetic construct
  misc_feature 1..22: note = chemically synthesized
  source 1..22: mol_type = other DNA
ttaaaacttatgtaaccctttg

SEQ ID NO: 122712 - DNA, 22 bp, synthetic construct
  misc_feature 1..22: note = chemically synthesized
  source 1..22: mol_type = other DNA
aaaacttatgtaaccctttgga

SEQ ID NO: 122713 - DNA, 22 bp, synthetic construct
  misc_feature 1..22: note = chemically synthesized
  source 1..22: mol_type = other DNA
aaacttatgtaaccctttggat

SEQ ID NO: 122714 - DNA, 22 bp, synthetic construct
  misc_feature 1..22: note = chemically synthesized
  source 1..22: mol_type = other DNA
atgtaaccctttggatataatg

SEQ ID NO: 122715 - DNA, 22 bp, synthetic construct
  misc_feature 1..22: note = chemically synthesized
  source 1..22: mol_type = other DNA
tgtaaccctttggatataatga

SEQ ID NO: 122716 - DNA, 22 bp, synthetic construct
  misc_feature 1..22: note = chemically synthesized
  source 1..22: mol_type = other DNA
tggatataatgagatatatgtt

SEQ ID NO: 122717 - DNA, 22 bp, synthetic construct
  misc_feature 1..22: note = chemically synthesized
  source 1..22: mol_type = other DNA
ggatataatgagatatatgttt

SEQ ID NO: 122718 - DNA, 22 bp, synthetic construct
  misc_feature 1..22: note = chemically synthesized
  source 1..22: mol_type = other DNA
gatataatgagatatatgtttt

SEQ ID NO: 122719 - DNA, 22 bp, synthetic construct
  misc_feature 1..22: note = chemically synthesized
  source 1..22: mol_type = other DNA
ttctctatttttaatatcagta

SEQ ID NO: 122720 - DNA, 22 bp, synthetic construct
  misc_feature 1..22: note = chemically synthesized
  source 1..22: mol_type = other DNA
tctctatttttaatatcagtac

SEQ ID NO: 122721 - DNA, 22 bp, synthetic construct
  misc_feature 1..22: note = chemically synthesized
  source 1..22: mol_type = other DNA
ctctatttttaatatcagtact

SEQ ID NO: 122722 - DNA, 22 bp, synthetic construct
  misc_feature 1..22: note = chemically synthesized
  source 1..22: mol_type = other DNA
tctatttttaatatcagtactc

SEQ ID NO: 122723 - DNA, 22 bp, synthetic construct
  misc_feature 1..22: note = chemically synthesized
  source 1..22: mol_type = other DNA
tatttttaatatcagtactctt

SEQ ID NO: 122724 - DNA, 22 bp, synthetic construct
  misc_feature 1..22: note = chemically synthesized
  source 1..22: mol_type = other DNA
tttttaatatcagtactcttta

SEQ ID NO: 122725 - DNA, 22 bp, synthetic construct
  misc_feature 1..22: note = chemically synthesized
  source 1..22: mol_type = other DNA
ttaatatcagtactctttagat

SEQ ID NO: 122726 - DNA, 22 bp, synthetic construct
  misc_feature 1..22: note = chemically synthesized
  source 1..22: mol_type = other DNA
taatatcagtactctttagata

SEQ ID NO: 122727 - DNA, 22 bp, synthetic construct
  misc_feature 1..22: note = chemically synthesized
  source 1..22: mol_type = other DNA
aatatcagtactctttagatac

SEQ ID NO: 122728 - DNA, 22 bp, synthetic construct
  misc_feature 1..22: note = chemically synthesized
  source 1..22: mol_type = other DNA
atatcagtactctttagataca

SEQ ID NO: 122729 - DNA, 22 bp, synthetic construct
  misc_feature 1..22: note = chemically synthesized
  source 1..22: mol_type = other DNA
tttagatacagctatcactgtc

SEQ ID NO: 122730 - DNA, 22 bp, synthetic construct
  misc_feature 1..22: note = chemically synthesized
  source 1..22: mol_type = other DNA
tagatacagctatcactgtctc

SEQ ID NO: 122731 - DNA, 22 bp, synthetic construct
  misc_feature 1..22: note = chemically synthesized
  source 1..22: mol_type = other DNA
agatacagctatcactgtctct

SEQ ID NO: 122732 - DNA, 22 bp, synthetic construct
  misc_feature 1..22: note = chemically synthesized
  source 1..22: mol_type = other DNA
gatacagctatcactgtctctc

SEQ ID NO: 122733 - DNA, 22 bp, synthetic construct
  misc_feature 1..22: note = chemically synthesized
  source 1..22: mol_type = other DNA
tcactgtctctcagggtacctc

SEQ ID NO: 122734 - DNA, 22 bp, synthetic construct
  misc_feature 1..22: note = chemically synthesized
  source 1..22: mol_type = other DNA
tctctcagggtacctctgcctc

SEQ ID NO: 122735 - DNA, 22 bp, synthetic construct
  misc_feature 1..22: note = chemically synthesized
  source 1..22: mol_type = other DNA
tcagggtacctctgcctctggt

SEQ ID NO: 122736 - DNA, 22 bp, synthetic construct
  misc_feature 1..22: note = chemically synthesized
  source 1..22: mol_type = other DNA
agggtacctctgcctctggtca

SEQ ID NO: 122737 - DNA, 22 bp, synthetic construct
  misc_feature 1..22: note = chemically synthesized
  source 1..22: mol_type = other DNA
tgcctctggtcattttgttcat

SEQ ID NO: 122738 - DNA, 22 bp, synthetic construct
  misc_feature 1..22: note = chemically synthesized
  source 1..22: mol_type = other DNA
cctctggtcattttgttcattc

SEQ ID NO: 122739 - DNA, 22 bp, synthetic construct
  misc_feature 1..22: note = chemically synthesized
  source 1..22: mol_type = other DNA
tggtcattttgttcattcttta

SEQ ID NO: 122740 - DNA, 22 bp, synthetic construct
  misc_feature 1..22: note = chemically synthesized
  source 1..22: mol_type = other DNA
gtcattttgttcattctttatg

SEQ ID NO: 122741 - DNA, 22 bp, synthetic construct
  misc_feature 1..22: note = chemically synthesized
  source 1..22: mol_type = other DNA
tgttcattctttatgttgaaat

SEQ ID NO: 122742 - DNA, 22 bp, synthetic construct
  misc_feature 1..22: note = chemically synthesized
  source 1..22: mol_type = other DNA
gttcattctttatgttgaaatt

SEQ ID NO: 122743 - DNA, 22 bp, synthetic construct
  misc_feature 1..22: note = chemically synthesized
  source 1..22: mol_type = other DNA
ttcattctttatgttgaaattt

SEQ ID NO: 122744 - DNA, 22 bp, synthetic construct
  misc_feature 1..22: note = chemically synthesized
  source 1..22: mol_type = other DNA
attctttatgttgaaattttat

SEQ ID NO: 122745 - DNA, 22 bp, synthetic construct
  misc_feature 1..22: note = chemically synthesized
  source 1..22: mol_type = other DNA
tttatgttgaaattttatatct

SEQ ID NO: 122746 - DNA, 22 bp, synthetic construct
  misc_feature 1..22: note = chemically synthesized
  source 1..22: mol_type = other DNA
tatgttgaaattttatatctcc

SEQ ID NO: 122747 - DNA, 22 bp, synthetic construct
  misc_feature 1..22: note = chemically synthesized
  source 1..22: mol_type = other DNA
atgttgaaattttatatctccg

SEQ ID NO: 122748 - DNA, 22 bp, synthetic construct
  misc_feature 1..22: note = chemically synthesized
  source 1..22: mol_type = other DNA
tgttgaaattttatatctccgg

SEQ ID NO: 122749 - DNA, 22 bp, synthetic construct
  misc_feature 1..22: note = chemically synthesized
  source 1..22: mol_type = other DNA
aaattttatatctccggcctac

SEQ ID NO: 122750 - DNA, 22 bp, synthetic construct
  misc_feature 1..22: note = chemically synthesized
  source 1..22: mol_type = other DNA
tatatctccggcctacaactca

SEQ ID NO: 122751 - DNA, 22 bp, synthetic construct
  misc_feature 1..22: note = chemically synthesized
  source 1..22: mol_type = other DNA
atatctccggcctacaactcag

SEQ ID NO: 122752 - DNA, 22 bp, synthetic construct
  misc_feature 1..22: note = chemically synthesized
  source 1..22: mol_type = other DNA
tatctccggcctacaactcagg

SEQ ID NO: 122753 - DNA, 22 bp, synthetic construct
  misc_feature 1..22: note = chemically synthesized
  source 1..22: mol_type = other DNA
cggcctacaactcagggtttta

SEQ ID NO: 122754 - DNA, 22 bp, synthetic construct
  misc_feature 1..22: note = chemically synthesized
  source 1..22: mol_type = other DNA
caactcagggttttacagtttc

SEQ ID NO: 122755 - DNA, 22 bp, synthetic construct
  misc_feature 1..22: note = chemically synthesized
  source 1..22: mol_type = other DNA
agggttttacagtttcatcaat

SEQ ID NO: 122756 - DNA, 22 bp, synthetic construct
  misc_feature 1..22: note = chemically synthesized
  source 1..22: mol_type = other DNA
tacagtttcatcaatgtctcta

SEQ ID NO: 122757 - DNA, 22 bp, synthetic construct
  misc_feature 1..22: note = chemically synthesized
  source 1..22: mol_type = other DNA
acagtttcatcaatgtctctat

SEQ ID NO: 122758 - DNA, 22 bp, synthetic construct
  misc_feature 1..22: note = chemically synthesized
  source 1..22: mol_type = other DNA
cagtttcatcaatgtctctatt

SEQ ID NO: 122759 - DNA, 22 bp, synthetic construct
  misc_feature 1..22: note = chemically synthesized
  source 1..22: mol_type = other DNA
catcaatgtctctattaaatgt

SEQ ID NO: 122760 - DNA, 22 bp, synthetic construct
  misc_feature 1..22: note = chemically synthesized
  source 1..22: mol_type = other DNA
atcaatgtctctattaaatgtt

SEQ ID NO: 122761 - DNA, 22 bp, synthetic construct
  misc_feature 1..22: note = chemically synthesized
  source 1..22: mol_type = other DNA
tattaaatgtttatgagccaca

SEQ ID NO: 122762 - DNA, 22 bp, synthetic construct
  misc_feature 1..22: note = chemically synthesized
  source 1..22: mol_type = other DNA
ttaaatgtttatgagccacaga

SEQ ID NO: 122763 - DNA, 22 bp, synthetic construct
  misc_feature 1..22: note = chemically synthesized
  source 1..22: mol_type = other DNA
aatgtttatgagccacagagaa

SEQ ID NO: 122764 - DNA, 22 bp, synthetic construct
  misc_feature 1..22: note = chemically synthesized
  source 1..22: mol_type = other DNA
atgagccacagagaatgagaat

SEQ ID NO: 122765 - DNA, 22 bp, synthetic construct
  misc_feature 1..22: note = chemically synthesized
  source 1..22: mol_type = other DNA
tgagccacagagaatgagaatt

SEQ ID NO: 122766 - DNA, 22 bp, synthetic construct
  misc_feature 1..22: note = chemically synthesized
  source 1..22: mol_type = other DNA
tatgttcaatttttttgaactt

SEQ ID NO: 122767 - DNA, 22 bp, synthetic construct
  misc_feature 1..22: note = chemically synthesized
  source 1..22: mol_type = other DNA
aatttttttgaacttctgtgtt

SEQ ID NO: 122768 - DNA, 22 bp, synthetic construct
  misc_feature 1..22: note = chemically synthesized
  source 1..22: mol_type = other DNA
ttttgaacttctgtgtttgagt

SEQ ID NO: 122769 - DNA, 22 bp, synthetic construct
  misc_feature 1..22: note = chemically synthesized
  source 1..22: mol_type = other DNA
tttgaacttctgtgtttgagtt

SEQ ID NO: 122770 - DNA, 22 bp, synthetic construct
  misc_feature 1..22: note = chemically synthesized
  source 1..22: mol_type = other DNA
ttgaacttctgtgtttgagttt

SEQ ID NO: 122771 - DNA, 22 bp, synthetic construct
  misc_feature 1..22: note = chemically synthesized
  source 1..22: mol_type = other DNA
tgaacttctgtgtttgagtttt

SEQ ID NO: 122772 - DNA, 22 bp, synthetic construct
  misc_feature 1..22: note = chemically synthesized
  source 1..22: mol_type = other DNA
gaacttctgtgtttgagtttta

SEQ ID NO: 122773 - DNA, 22 bp, synthetic construct
  misc_feature 1..22: note = chemically synthesized
  source 1..22: mol_type = other DNA
aacttctgtgtttgagttttaa

SEQ ID NO: 122774 - DNA, 22 bp, synthetic construct
  misc_feature 1..22: note = chemically synthesized
  source 1..22: mol_type = other DNA
ctgtgtttgagttttaaaaaaa

SEQ ID NO: 122775 - DNA, 22 bp, synthetic construct
  misc_feature 1..22: note = chemically synthesized
  source 1..22: mol_type = other DNA
tgtgtttgagttttaaaaaaat

SEQ ID NO: 122776 - DNA, 22 bp, synthetic construct
  misc_feature 1..22: note = chemically synthesized
  source 1..22: mol_type = other DNA
tgtttgagttttaaaaaaatta

SEQ ID NO: 122777 - DNA, 22 bp, synthetic construct
  misc_feature 1..22: note = chemically synthesized
  source 1..22: mol_type = other DNA
gagttttaaaaaaattaaccta

SEQ ID NO: 122778 - DNA, 22 bp, synthetic construct
  misc_feature 1..22: note = chemically synthesized
  source 1..22: mol_type = other DNA
agttttaaaaaaattaacctaa

SEQ ID NO: 122779 - DNA, 22 bp, synthetic construct
  misc_feature 1..22: note = chemically synthesized
  source 1..22: mol_type = other DNA
taaaaaaattaacctaatgtga

SEQ ID NO: 122780 - DNA, 22 bp, synthetic construct
  misc_feature 1..22: note = chemically synthesized
  source 1..22: mol_type = other DNA
aaaaaaattaacctaatgtgaa

SEQ ID NO: 122781 - DNA, 22 bp, synthetic construct
  misc_feature 1..22: note = chemically synthesized
  source 1..22: mol_type = other DNA
aaaaaattaacctaatgtgaaa

SEQ ID NO: 122782 - DNA, 22 bp, synthetic construct
  misc_feature 1..22: note = chemically synthesized
  source 1..22: mol_type = other DNA
acctaatgtgaaagaccctaga

SEQ ID NO: 122783 - DNA, 22 bp, synthetic construct
  misc_feature 1..22: note = chemically synthesized
  source 1..22: mol_type = other DNA
atgtgaaagaccctagatccgg

SEQ ID NO: 122784 - DNA, 22 bp, synthetic construct
  misc_feature 1..22: note = chemically synthesized
  source 1..22: mol_type = other DNA
gatccggggaaaggtgctgtgt

SEQ ID NO: 122785 - DNA, 22 bp, synthetic construct
  misc_feature 1..22: note = chemically synthesized
  source 1..22: mol_type = other DNA
tgtggcttagagtataaacatc

SEQ ID NO: 122786 - DNA, 22 bp, synthetic construct
  misc_feature 1..22: note = chemically synthesized
  source 1..22: mol_type = other DNA
agagtataaacatcagaatgtg

SEQ ID NO: 122787 - DNA, 22 bp, synthetic construct
  misc_feature 1..22: note = chemically synthesized
  source 1..22: mol_type = other DNA
gagtataaacatcagaatgtgc

SEQ ID NO: 122788 - DNA, 22 bp, synthetic construct
  misc_feature 1..22: note = chemically synthesized
  source 1..22: mol_type = other DNA
tggactttctagaatatttcag

SEQ ID NO: 122789 - DNA, 22 bp, synthetic construct
  misc_feature 1..22: note = chemically synthesized
  source 1..22: mol_type = other DNA
tctagaatatttcagtgccctt

SEQ ID NO: 122790 - DNA, 22 bp, synthetic construct
  misc_feature 1..22: note = chemically synthesized
  source 1..22: mol_type = other DNA
ctagaatatttcagtgcccttg

SEQ ID NO: 122791 - DNA, 22 bp, synthetic construct
  misc_feature 1..22: note = chemically synthesized
  source 1..22: mol_type = other DNA
tagaatatttcagtgcccttgt

SEQ ID NO: 122792 - DNA, 22 bp, synthetic construct
  misc_feature 1..22: note = chemically synthesized
  source 1..22: mol_type = other DNA
gaatatttcagtgcccttgtat

SEQ ID NO: 122793 - DNA, 22 bp, synthetic construct
  misc_feature 1..22: note = chemically synthesized
  source 1..22: mol_type = other DNA
cagtgcccttgtatatcctcag

SEQ ID NO: 122794 - DNA, 22 bp, synthetic construct
  misc_feature 1..22: note = chemically synthesized
  source 1..22: mol_type = other DNA
agtgcccttgtatatcctcaga

SEQ ID NO: 122795 - DNA, 22 bp, synthetic construct
  misc_feature 1..22: note = chemically synthesized
  source 1..22: mol_type = other DNA
gtatatcctcagaatgtgtgga

SEQ ID NO: 122796 - DNA, 22 bp, synthetic construct
  misc_feature 1..22: note = chemically synthesized
  source 1..22: mol_type = other DNA
tatatcctcagaatgtgtggag

SEQ ID NO: 122797 - DNA, 22 bp, synthetic construct
  misc_feature 1..22: note = chemically synthesized
  source 1..22: mol_type = other DNA
agaatgtgtggagagtaattcc

SEQ ID NO: 122798 - DNA, 22 bp, synthetic construct
  misc_feature 1..22: note = chemically synthesized
  source 1..22: mol_type = other DNA
caaaacaaagcccttacttcaa

SEQ ID NO: 122799 - DNA, 22 bp, synthetic construct
  misc_feature 1..22: note = chemically synthesized
  source 1..22: mol_type = other DNA
acttcaatatccatggtggtcc

SEQ ID NO: 122800 - DNA, 22 bp, synthetic construct
  misc_feature 1..22: note = chemically synthesized
  source 1..22: mol_type = other DNA
cttcaatatccatggtggtcca

SEQ ID NO: 122801 - DNA, 22 bp, synthetic construct
  misc_feature 1..22: note = chemically synthesized
  source 1..22: mol_type = other DNA
caatatccatggtggtccatag

SEQ ID NO: 122802 - DNA, 22 bp, synthetic construct
  misc_feature 1..22: note = chemically synthesized
  source 1..22: mol_type = other DNA
aatatccatggtggtccatagc

SEQ ID NO: 122803 - DNA, 22 bp, synthetic construct
  misc_feature 1..22: note = chemically synthesized
  source 1..22: mol_type = other DNA
gggctagcagaaggaagggttc

SEQ ID NO: 122804 - DNA, 22 bp, synthetic construct
  misc_feature 1..22: note = chemically synthesized
  source 1..22: mol_type = other DNA
gcagaaggaagggttcaaaatc

SEQ ID NO: 122805 - DNA, 22 bp, synthetic construct
  misc_feature 1..22: note = chemically synthesized
  source 1..22: mol_type = other DNA
aaaatcactatttttatcactc

SEQ ID NO: 122806 - DNA, 22 bp, synthetic construct
  misc_feature 1..22: note = chemically synthesized
  source 1..22: mol_type = other DNA
tttttatcactcaaattatctg

SEQ ID NO: 122807 - DNA, 22 bp, synthetic construct
  misc_feature 1..22: note = chemically synthesized
  source 1..22: mol_type = other DNA
ttatcactcaaattatctgctc

SEQ ID NO: 122808 - DNA, 22 bp, synthetic construct
  misc_feature 1..22: note = chemically synthesized
  source 1..22: mol_type = other DNA
tatcactcaaattatctgctct

SEQ ID NO: 122809 - DNA, 22 bp, synthetic construct
  misc_feature 1..22: note = chemically synthesized
  source 1..22: mol_type = other DNA
atcactcaaattatctgctctt

SEQ ID NO: 122810 - DNA, 22 bp, synthetic construct
  misc_feature 1..22: note = chemically synthesized
  source 1..22: mol_type = other DNA
tcactcaaattatctgctcttg

SEQ ID NO: 122811 - DNA, 22 bp, synthetic construct
  misc_feature 1..22: note = chemically synthesized
  source 1..22: mol_type = other DNA
aaattatctgctcttggaaaaa

SEQ ID NO: 122812 - DNA, 22 bp, synthetic construct
  misc_feature 1..22: note = chemically synthesized
  source 1..22: mol_type = other DNA
tctgctcttggaaaaaccagtc

SEQ ID NO: 122813 - DNA, 22 bp, synthetic construct
  misc_feature 1..22: note = chemically synthesized
  source 1..22: mol_type = other DNA
ctcttggaaaaaccagtccctt

SEQ ID NO: 122814 - DNA, 22 bp, synthetic construct
  misc_feature 1..22: note = chemically synthesized
  source 1..22: mol_type = other DNA
ttggaaaaaccagtccctttgg

SEQ ID NO: 122815 - DNA, 22 bp, synthetic construct
  misc_feature 1..22: note = chemically synthesized
  source 1..22: mol_type = other DNA
ggaaaaaccagtccctttgggt

SEQ ID NO: 122816 - DNA, 22 bp, synthetic construct
  misc_feature 1..22: note = chemically synthesized
  source 1..22: mol_type = other DNA
gaaaaaccagtccctttgggta

SEQ ID NO: 122817 - DNA, 22 bp, synthetic construct
  misc_feature 1..22: note = chemically synthesized
  source 1..22: mol_type = other DNA
tgggtagccccaatcatgtgta

SEQ ID NO: 122818 - DNA, 22 bp, synthetic construct
  misc_feature 1..22: note = chemically synthesized
  source 1..22: mol_type = other DNA
gggtagccccaatcatgtgtaa

SEQ ID NO: 122819 - DNA, 22 bp, synthetic construct
  misc_feature 1..22: note = chemically synthesized
  source 1..22: mol_type = other DNA
ggtagccccaatcatgtgtaag

SEQ ID NO: 122820 - DNA, 22 bp, synthetic construct
  misc_feature 1..22: note = chemically synthesized
  source 1..22: mol_type = other DNA
tttcctgaagtatgatcatatg

SEQ ID NO: 122821 - DNA, 22 bp, synthetic construct
  misc_feature 1..22: note = chemically synthesized
  source 1..22: mol_type = other DNA
ttcctgaagtatgatcatatgg

SEQ ID NO: 122822 - DNA, 22 bp, synthetic construct
  misc_feature 1..22: note = chemically synthesized
  source 1..22: mol_type = other DNA
tcctgaagtatgatcatatggt

SEQ ID NO: 122823 - DNA, 22 bp, synthetic construct
  misc_feature 1..22: note = chemically synthesized
  source 1..22: mol_type = other DNA
cctgaagtatgatcatatggtt

SEQ ID NO: 122824 - DNA, 22 bp, synthetic construct
  misc_feature 1..22: note = chemically synthesized
  source 1..22: mol_type = other DNA
ctgaagtatgatcatatggttc

SEQ ID NO: 122825 - DNA, 22 bp, synthetic construct
  misc_feature 1..22: note = chemically synthesized
  source 1..22: mol_type = other DNA
aagtatgatcatatggttctct

SEQ ID NO: 122826 - DNA, 22 bp, synthetic construct
  misc_feature 1..22: note = chemically synthesized
  source 1..22: mol_type = other DNA
tcttccttctgtctgctcattg

SEQ ID NO: 122827 - DNA, 22 bp, synthetic construct
  misc_feature 1..22: note = chemically synthesized
  source 1..22: mol_type = other DNA
ttccttctgtctgctcattgaa

SEQ ID NO: 122828 - DNA, 22 bp, synthetic construct
  misc_feature 1..22: note = chemically synthesized
  source 1..22: mol_type = other DNA
ccttctgtctgctcattgaacc

SEQ ID NO: 122829 - DNA, 22 bp, synthetic construct
  misc_feature 1..22: note = chemically synthesized
  source 1..22: mol_type = other DNA
cttctgtctgctcattgaacca

SEQ ID NO: 122830 - DNA, 22 bp, synthetic construct
  misc_feature 1..22: note = chemically synthesized
  source 1..22: mol_type = other DNA
ctgtctgctcattgaaccagag

SEQ ID NO: 122831 - DNA, 22 bp, synthetic construct
  misc_feature 1..22: note = chemically synthesized
  source 1..22: mol_type = other DNA
tgtctgctcattgaaccagagc

SEQ ID NO: 122832 - DNA, 22 bp, synthetic construct
  misc_feature 1..22: note = chemically synthesized
  source 1..22: mol_type = other DNA
tctgctcattgaaccagagctc

SEQ ID NO: 122833 - DNA, 22 bp, synthetic construct
  misc_feature 1..22: note = chemically synthesized
  source 1..22: mol_type = other DNA
ctcattgaaccagagctccagg

SEQ ID NO: 122834 - DNA, 22 bp, synthetic construct
  misc_feature 1..22: note = chemically synthesized
  source 1..22: mol_type = other DNA
attgaaccagagctccaggacc

SEQ ID NO: 122835 - DNA, 22 bp, synthetic construct
  misc_feature 1..22: note = chemically synthesized
  source 1..22: mol_type = other DNA
aaccagagctccaggaccaata

SEQ ID NO: 122836 - DNA, 22 bp, synthetic construct
  misc_feature 1..22: note = chemically synthesized
  source 1..22: mol_type = other DNA
caggaccaataccactatggca

SEQ ID NO: 122837 - DNA, 22 bp, synthetic construct
  misc_feature 1..22: note = chemically synthesized
  source 1..22: mol_type = other DNA
tggcaatacttcttttgcctct

SEQ ID NO: 122838 - DNA, 22 bp, synthetic construct
  misc_feature 1..22: note = chemically synthesized
  source 1..22: mol_type = other DNA
cttttgcctctacaactctcag

SEQ ID NO: 122839 - DNA, 22 bp, synthetic construct
  misc_feature 1..22: note = chemically synthesized
  source 1..22: mol_type = other DNA
ttttgcctctacaactctcagg

SEQ ID NO: 122840 - DNA, 22 bp, synthetic construct
  misc_feature 1..22: note = chemically synthesized
  source 1..22: mol_type = other DNA
ttgcctctacaactctcaggtc

SEQ ID NO: 122841 - DNA, 22 bp, synthetic construct
  misc_feature 1..22: note = chemically synthesized
  source 1..22: mol_type = other DNA
tgcctctacaactctcaggtca

SEQ ID NO: 122842 - DNA, 22 bp, synthetic construct
  misc_feature 1..22: note = chemically synthesized
  source 1..22: mol_type = other DNA
gcctctacaactctcaggtcac

SEQ ID NO: 122843 - DNA, 22 bp, synthetic construct
  misc_feature 1..22: note = chemically synthesized
  source 1..22: mol_type = other DNA
cctctacaactctcaggtcaca

SEQ ID NO: 122844 - DNA, 22 bp, synthetic construct
  misc_feature 1..22: note = chemically synthesized
  source 1..22: mol_type = other DNA
tacaactctcaggtcacagctg

SEQ ID NO: 122845 - DNA, 22 bp, synthetic construct
  misc_feature 1..22: note = chemically synthesized
  source 1..22: mol_type = other DNA
caactctcaggtcacagctgaa

SEQ ID NO: 122846 - DNA, 22 bp, synthetic construct
  misc_feature 1..22: note = chemically synthesized
  source 1..22: mol_type = other DNA
tcaggtcacagctgaaatatta

SEQ ID NO: 122847 - DNA, 22 bp, synthetic construct
  misc_feature 1..22: note = chemically synthesized
  source 1..22: mol_type = other DNA
aggtcacagctgaaatattacc

SEQ ID NO: 122848 - DNA, 22 bp, synthetic construct
  misc_feature 1..22: note = chemically synthesized
  source 1..22: mol_type = other DNA
aaatattacctcctctcagaac

SEQ ID NO: 122849 - DNA, 22 bp, synthetic construct
  misc_feature 1..22: note = chemically synthesized
  source 1..22: mol_type = other DNA
cctcctctcagaacccgcattt

SEQ ID NO: 122850 - DNA, 22 bp, synthetic construct
  misc_feature 1..22: note = chemically synthesized
  source 1..22: mol_type = other DNA
ctctcagaacccgcatttgtca

SEQ ID NO: 122851 - DNA, 22 bp, synthetic construct
  misc_feature 1..22: note = chemically synthesized
  source 1..22: mol_type = other DNA
tcagaacccgcatttgtcacac

SEQ ID NO: 122852 - DNA, 22 bp, synthetic construct
  misc_feature 1..22: note = chemically synthesized
  source 1..22: mol_type = other DNA
agaacccgcatttgtcacacta

SEQ ID NO: 122853 - DNA, 22 bp, synthetic construct
  misc_feature 1..22: note = chemically synthesized
  source 1..22: mol_type = other DNA
gtcacactagcttacataaatt

SEQ ID NO: 122854 - DNA, 22 bp, synthetic construct
  misc_feature 1..22: note = chemically synthesized
  source 1..22: mol_type = other DNA
tcacactagcttacataaattt

SEQ ID NO: 122855 - DNA, 22 bp, synthetic construct
  misc_feature 1..22: note = chemically synthesized
  source 1..22: mol_type = other DNA
gcttacataaattttgttattc

SEQ ID NO: 122856 - DNA, 22 bp, synthetic construct
  misc_feature 1..22: note = chemically synthesized
  source 1..22: mol_type = other DNA
acataaattttgttattctcta

SEQ ID NO: 122857 - DNA, 22 bp, synthetic construct
  misc_feature 1..22: note = chemically synthesized
  source 1..22: mol_type = other DNA
cataaattttgttattctctat

SEQ ID NO: 122858 - DNA, 22 bp, synthetic construct
  misc_feature 1..22: note = chemically synthesized
  source 1..22: mol_type = other DNA
tgttattctctattgcatcaaa

SEQ ID NO: 122859 - DNA, 22 bp, synthetic construct
  misc_feature 1..22: note = chemically synthesized
  source 1..22: mol_type = other DNA
gttattctctattgcatcaaat

SEQ ID NO: 122860 - DNA, 22 bp, synthetic construct
  misc_feature 1..22: note = chemically synthesized
  source 1..22: mol_type = other DNA
ttattctctattgcatcaaatt

SEQ ID NO: 122861 - DNA, 22 bp, synthetic construct
  misc_feature 1..22: note = chemically synthesized
  source 1..22: mol_type = other DNA
ttctctattgcatcaaattttt

SEQ ID NO: 122862 - DNA, 22 bp, synthetic construct
  misc_feature 1..22: note = chemically synthesized
  source 1..22: mol_type = other DNA
tctattgcatcaaattttttct

SEQ ID NO: 122863 - DNA, 22 bp, synthetic construct
  misc_feature 1..22: note = chemically synthesized
  source 1..22: mol_type = other DNA
tattgcatcaaattttttcttt

SEQ ID NO: 122864 - DNA, 22 bp, synthetic construct
  misc_feature 1..22: note = chemically synthesized
  source 1..22: mol_type = other DNA
ttgcatcaaattttttctttct

SEQ ID NO: 122865 - DNA, 22 bp, synthetic construct
  misc_feature 1..22: note = chemically synthesized
  source 1..22: mol_type = other DNA
catcaaattttttctttctttc

SEQ ID NO: 122866 - DNA, 22 bp, synthetic construct
  misc_feature 1..22: note = chemically synthesized
  source 1..22: mol_type = other DNA
tttctttctttcatagcagcta

SEQ ID NO: 122867 - DNA, 22 bp, synthetic construct
  misc_feature 1..22: note = chemically synthesized
  source 1..22: mol_type = other DNA
ttctttctttcatagcagctat

SEQ ID NO: 122868 - DNA, 22 bp, synthetic construct
  misc_feature 1..22: note = chemically synthesized
  source 1..22: mol_type = other DNA
tctttctttcatagcagctata

SEQ ID NO: 122869 - DNA, 22 bp, synthetic construct
  misc_feature 1..22: note = chemically synthesized
  source 1..22: mol_type = other DNA
ctttctttcatagcagctatat

SEQ ID NO: 122870 - DNA, 22 bp, synthetic construct
  misc_feature 1..22: note = chemically synthesized
  source 1..22: mol_type = other DNA
tttctttcatagcagctatatg

SEQ ID NO: 122871 - DNA, 22 bp, synthetic construct
  misc_feature 1..22: note = chemically synthesized
  source 1..22: mol_type = other DNA
tctttcatagcagctatatgag

SEQ ID NO: 122872 - DNA, 22 bp, synthetic construct
  misc_feature 1..22: note = chemically synthesized
  source 1..22: mol_type = other DNA
ctttcatagcagctatatgagg

SEQ ID NO: 122873 - DNA, 22 bp, synthetic construct
  misc_feature 1..22: note = chemically synthesized
  source 1..22: mol_type = other DNA
tttcatagcagctatatgaggt

SEQ ID NO: 122874 - DNA, 22 bp, synthetic construct
  misc_feature 1..22: note = chemically synthesized
  source 1..22: mol_type = other DNA
tcatagcagctatatgaggttg

SEQ ID NO: 122875 - DNA, 22 bp, synthetic construct
  misc_feature 1..22: note = chemically synthesized
  source 1..22: mol_type = other DNA
catagcagctatatgaggttgt

SEQ ID NO: 122876 - DNA, 22 bp, synthetic construct
  misc_feature 1..22: note = chemically synthesized
  source 1..22: mol_type = other DNA
atagcagctatatgaggttgta

SEQ ID NO: 122877 - DNA, 22 bp, synthetic construct
  misc_feature 1..22: note = chemically synthesized
  source 1..22: mol_type = other DNA
tatgaggttgtaattatttttg

SEQ ID NO: 122878 - DNA, 22 bp, synthetic construct
  misc_feature 1..22: note = chemically synthesized
  source 1..22: mol_type = other DNA
taattatttttgtcactttttt

SEQ ID NO: 122879 - DNA, 22 bp, synthetic construct
  misc_feature 1..22: note = chemically synthesized
  source 1..22: mol_type = other DNA
tttttgtcacttttttattatt

SEQ ID NO: 122880 - DNA, 22 bp, synthetic construct
  misc_feature 1..22: note = chemically synthesized
  source 1..22: mol_type = other DNA
ttgtcacttttttattatttcc

SEQ ID NO: 122881 - DNA, 22 bp, synthetic construct
  misc_feature 1..22: note = chemically synthesized
  source 1..22: mol_type = other DNA
tgtcacttttttattatttcct

SEQ ID NO: 122882 - DNA, 22 bp, synthetic construct
  misc_feature 1..22: note = chemically synthesized
  source 1..22: mol_type = other DNA
gtcacttttttattatttcctt

SEQ ID NO: 122883 - DNA, 22 bp, synthetic construct
  misc_feature 1..22: note = chemically synthesized
  source 1..22: mol_type = other DNA
tcacttttttattatttccttt

SEQ ID NO: 122884 - DNA, 22 bp, synthetic construct
  misc_feature 1..22: note = chemically synthesized
  source 1..22: mol_type = other DNA
ttttattatttcctttccgtta

SEQ ID NO: 122885 - DNA, 22 bp, synthetic construct
  misc_feature 1..22: note = chemically synthesized
  source 1..22: mol_type = other DNA
tttattatttcctttccgttaa

SEQ ID NO: 122886 - DNA, 22 bp, synthetic construct
  misc_feature 1..22: note = chemically synthesized
  source 1..22: mol_type = other DNA
ttattatttcctttccgttaaa

SEQ ID NO: 122887 - DNA, 22 bp, synthetic construct
  misc_feature 1..22: note = chemically synthesized
  source 1..22: mol_type = other DNA
tattatttcctttccgttaaaa

SEQ ID NO: 122888 - DNA, 22 bp, synthetic construct
  misc_feature 1..22: note = chemically synthesized
  source 1..22: mol_type = other DNA
attatttcctttccgttaaaat

SEQ ID NO: 122889 - DNA, 22 bp, synthetic construct
  misc_feature 1..22: note = chemically synthesized
  source 1..22: mol_type = other DNA
ttatttcctttccgttaaaata

SEQ ID NO: 122890 - DNA, 22 bp, synthetic construct
  misc_feature 1..22: note = chemically synthesized
  source 1..22: mol_type = other DNA
tttcctttccgttaaaatacaa

SEQ ID NO: 122891 - DNA, 22 bp, synthetic construct
  misc_feature 1..22: note = chemically synthesized
  source 1..22: mol_type = other DNA
cctttccgttaaaatacaagct

SEQ ID NO: 122892 - DNA, 22 bp, synthetic construct
  misc_feature 1..22: note = chemically synthesized
  source 1..22: mol_type = other DNA
ctttccgttaaaatacaagctt

SEQ ID NO: 122893 - DNA, 22 bp, synthetic construct
  misc_feature 1..22: note = chemically synthesized
  source 1..22: mol_type = other DNA
tccgttaaaatacaagcttcat

SEQ ID NO: 122894 - DNA, 22 bp, synthetic construct
  misc_feature 1..22: note = chemically synthesized
  source 1..22: mol_type = other DNA
ccgttaaaatacaagcttcata

SEQ ID NO: 122895 - DNA, 22 bp, synthetic construct
  misc_feature 1..22: note = chemically synthesized
  source 1..22: mol_type = other DNA
cgttaaaatacaagcttcatag

SEQ ID NO: 122896 - DNA, 22 bp, synthetic construct
  misc_feature 1..22: note = chemically synthesized
  source 1..22: mol_type = other DNA
aaatacaagcttcataggaaca

SEQ ID NO: 122897 - DNA, 22 bp, synthetic construct
  misc_feature 1..22: note = chemically synthesized
  source 1..22: mol_type = other DNA
cataggaacagagaatatatgc

SEQ ID NO: 122898 - DNA, 22 bp, synthetic construct
  misc_feature 1..22: note = chemically synthesized
  source 1..22: mol_type = other DNA
ataggaacagagaatatatgca

SEQ ID NO: 122899 - DNA, 22 bp, synthetic construct
  misc_feature 1..22: note = chemically synthesized
  source 1..22: mol_type = other DNA
ttgtacccagtagttgctaaaa

SEQ ID NO: 122900 - DNA, 22 bp, synthetic construct
  misc_feature 1..22: note = chemically synthesized
  source 1..22: mol_type = other DNA
tgtacccagtagttgctaaaat

SEQ ID NO: 122901 - DNA, 22 bp, synthetic construct
  misc_feature 1..22: note = chemically synthesized
  source 1..22: mol_type = other DNA
gtacccagtagttgctaaaata

SEQ ID NO: 122902 - DNA, 22 bp, synthetic construct
  misc_feature 1..22: note = chemically synthesized
  source 1..22: mol_type = other DNA
tacccagtagttgctaaaatag

SEQ ID NO: 122903 - DNA, 22 bp, synthetic construct
  misc_feature 1..22: note = chemically synthesized
  source 1..22: mol_type = other DNA
ctaaaatagagaagcctctcat

SEQ ID NO: 122904 - DNA, 22 bp, synthetic construct
  misc_feature 1..22: note = chemically synthesized
  source 1..22: mol_type = other DNA
aaatagagaagcctctcattag

SEQ ID NO: 122905 - DNA, 22 bp, synthetic construct
  misc_feature 1..22: note = chemically synthesized
  source 1..22: mol_type = other DNA
tcattagataaacaaacaacta

SEQ ID NO: 122906 - DNA, 22 bp, synthetic construct
  misc_feature 1..22: note = chemically synthesized
  source 1..22: mol_type = other DNA
attagataaacaaacaactaaa

SEQ ID NO: 122907 - DNA, 22 bp, synthetic construct
  misc_feature 1..22: note = chemically synthesized
  source 1..22: mol_type = other DNA
gataaacaaacaactaaacaat

SEQ ID NO: 122908 - DNA, 22 bp, synthetic construct
  misc_feature 1..22: note = chemically synthesized
  source 1..22: mol_type = other DNA
aacaatgaccgcttgttaaata

SEQ ID NO: 122909 - DNA, 22 bp, synthetic construct
  misc_feature 1..22: note = chemically synthesized
  source 1..22: mol_type = other DNA
gttaaataaatgtatttagtta

SEQ ID NO: 122910 - DNA, 22 bp, synthetic construct
  misc_feature 1..22: note = chemically synthesized
  source 1..22: mol_type = other DNA
ttaaataaatgtatttagttat

SEQ ID NO: 122911 - DNA, 22 bp, synthetic construct
  misc_feature 1..22: note = chemically synthesized
  source 1..22: mol_type = other DNA
aataaatgtatttagttattct

SEQ ID NO: 122912 - DNA, 22 bp, synthetic construct
  misc_feature 1..22: note = chemically synthesized
  source 1..22: mol_type = other DNA
agttattctattattcatttct

SEQ ID NO: 122913 - DNA, 22 bp, synthetic construct
  misc_feature 1..22: note = chemically synthesized
  source 1..22: mol_type = other DNA
gttattctattattcatttcta

SEQ ID NO: 122914 - DNA, 22 bp, synthetic construct
  misc_feature 1..22: note = chemically synthesized
  source 1..22: mol_type = other DNA
ttctattattcatttctaaaca

SEQ ID NO: 122915 - DNA, 22 bp, synthetic construct
  misc_feature 1..22: note = chemically synthesized
  source 1..22: mol_type = other DNA
tattattcatttctaaacacag

SEQ ID NO: 122916 - DNA, 22 bp, synthetic construct
  misc_feature 1..22: note = chemically synthesized
  source 1..22: mol_type = other DNA
ttattcatttctaaacacagaa

SEQ ID NO: 122917 - DNA, 22 bp, synthetic construct
  misc_feature 1..22: note = chemically synthesized
  source 1..22: mol_type = other DNA
ttcatttctaaacacagaaaga

SEQ ID NO: 122918 - DNA, 22 bp, synthetic construct
  misc_feature 1..22: note = chemically synthesized
  source 1..22: mol_type = other DNA
atttctaaacacagaaagagtg

SEQ ID NO: 122919 - DNA, 22 bp, synthetic construct
  misc_feature 1..22: note = chemically synthesized
  source 1..22: mol_type = other DNA
ctaaacacagaaagagtgagaa

SEQ ID NO: 122920 - DNA, 22 bp, synthetic construct
  misc_feature 1..22: note = chemically synthesized
  source 1..22: mol_type = other DNA
taaacacagaaagagtgagaaa

SEQ ID NO: 122921 - DNA, 22 bp, synthetic construct
  misc_feature 1..22: note = chemically synthesized
  source 1..22: mol_type = other DNA
aacacagaaagagtgagaaagg

SEQ ID NO: 122922 - DNA, 22 bp, synthetic construct
  misc_feature 1..22: note = chemically synthesized
  source 1..22: mol_type = other DNA
tctggcattaaattattgccct

SEQ ID NO: 122923 - DNA, 22 bp, synthetic construct
  misc_feature 1..22: note = chemically synthesized
  source 1..22: mol_type = other DNA
ctggcattaaattattgccctc

SEQ ID NO: 122924 - DNA, 22 bp, synthetic construct
  misc_feature 1..22: note = chemically synthesized
  source 1..22: mol_type = other DNA
tggcattaaattattgccctca

SEQ ID NO: 122925 - DNA, 22 bp, synthetic construct
  misc_feature 1..22: note = chemically synthesized
  source 1..22: mol_type = other DNA
gcattaaattattgccctcaaa

SEQ ID NO: 122926 - DNA, 22 bp, synthetic construct
  misc_feature 1..22: note = chemically synthesized
  source 1..22: mol_type = other DNA
aattattgccctcaaattggac

SEQ ID NO: 122927 - DNA, 22 bp, synthetic construct
  misc_feature 1..22: note = chemically synthesized
  source 1..22: mol_type = other DNA
ttgccctcaaattggacagaga

SEQ ID NO: 122928 - DNA, 22 bp, synthetic construct
  misc_feature 1..22: note = chemically synthesized
  source 1..22: mol_type = other DNA
ccctcaaattggacagagacat

SEQ ID NO: 122929 - DNA, 22 bp, synthetic construct
  misc_feature 1..22: note = chemically synthesized
  source 1..22: mol_type = other DNA
aaattggacagagacataccaa

SEQ ID NO: 122930 - DNA, 22 bp, synthetic construct
  misc_feature 1..22: note = chemically synthesized
  source 1..22: mol_type = other DNA
gacagagacataccaacaaatg

SEQ ID NO: 122931 - DNA, 22 bp, synthetic construct
  misc_feature 1..22: note = chemically synthesized
  source 1..22: mol_type = other DNA
tgaagatttgaatttaattttc

SEQ ID NO: 122932 - DNA, 22 bp, synthetic construct
  misc_feature 1..22: note = chemically synthesized
  source 1..22: mol_type = other DNA
aagatttgaatttaattttccc

SEQ ID NO: 122933 - DNA, 22 bp, synthetic construct
  misc_feature 1..22: note = chemically synthesized
  source 1..22: mol_type = other DNA
gaatttaattttccctgtaaat

SEQ ID NO: 122934 - DNA, 22 bp, synthetic construct
  misc_feature 1..22: note = chemically synthesized
  source 1..22: mol_type = other DNA
aatttaattttccctgtaaatt

SEQ ID NO: 122935 - DNA, 22 bp, synthetic construct
  misc_feature 1..22: note = chemically synthesized
  source 1..22: mol_type = other DNA
aattttccctgtaaattgctct

SEQ ID NO: 122936 - DNA, 22 bp, synthetic construct
  misc_feature 1..22: note = chemically synthesized
  source 1..22: mol_type = other DNA
attttccctgtaaattgctctg

SEQ ID NO: 122937 - DNA, 22 bp, synthetic construct
  misc_feature 1..22: note = chemically synthesized
  source 1..22: mol_type = other DNA
tccctgtaaattgctctgacct

SEQ ID NO: 122938 - DNA, 22 bp, synthetic construct
  misc_feature 1..22: note = chemically synthesized
  source 1..22: mol_type = other DNA
ccctgtaaattgctctgacctg

SEQ ID NO: 122939 - DNA, 22 bp, synthetic construct
  misc_feature 1..22: note = chemically synthesized
  source 1..22: mol_type = other DNA
cctgtaaattgctctgacctga

SEQ ID NO: 122940 - DNA, 22 bp, synthetic construct
  misc_feature 1..22: note = chemically synthesized
  source 1..22: mol_type = other DNA
taaattgctctgacctgacaac

SEQ ID NO: 122941 - DNA, 22 bp, synthetic construct
  misc_feature 1..22: note = chemically synthesized
  source 1..22: mol_type = other DNA
ctctgacctgacaacccagcta

SEQ ID NO: 122942 - DNA, 22 bp, synthetic construct
  misc_feature 1..22: note = chemically synthesized
  source 1..22: mol_type = other DNA
tgacctgacaacccagctattt

SEQ ID NO: 122943 - DNA, 22 bp, synthetic construct
  misc_feature 1..22: note = chemically synthesized
  source 1..22: mol_type = other DNA
acctgacaacccagctatttta

SEQ ID NO: 122944 - DNA, 22 bp, synthetic construct
  misc_feature 1..22: note = chemically synthesized
  source 1..22: mol_type = other DNA
acaacccagctattttagttta

SEQ ID NO: 122945 - DNA, 22 bp, synthetic construct
  misc_feature 1..22: note = chemically synthesized
  source 1..22: mol_type = other DNA
ttttagtttagtctttgcagat

SEQ ID NO: 122946 - DNA, 22 bp, synthetic construct
  misc_feature 1..22: note = chemically synthesized
  source 1..22: mol_type = other DNA
tagtttagtctttgcagatgat

SEQ ID NO: 122947 - DNA, 22 bp, synthetic construct
  misc_feature 1..22: note = chemically synthesized
  source 1..22: mol_type = other DNA
agtttagtctttgcagatgata

SEQ ID NO: 122948 - DNA, 22 bp, synthetic construct
  misc_feature 1..22: note = chemically synthesized
  source 1..22: mol_type = other DNA
gtttagtctttgcagatgatat

SEQ ID NO: 122949 - DNA, 22 bp, synthetic construct
  misc_feature 1..22: note = chemically synthesized
  source 1..22: mol_type = other DNA
agtctttgcagatgatatacat

SEQ ID NO: 122950 - DNA, 22 bp, synthetic construct
  misc_feature 1..22: note = chemically synthesized
  source 1..22: mol_type = other DNA
gtctttgcagatgatatacata

SEQ ID NO: 122951 - DNA, 22 bp, synthetic construct
  misc_feature 1..22: note = chemically synthesized
  source 1..22: mol_type = other DNA
tgcagatgatatacataaaatg

SEQ ID NO: 122952 - DNA, 22 bp, synthetic construct
  misc_feature 1..22: note = chemically synthesized
  source 1..22: mol_type = other DNA
gcagatgatatacataaaatgc

SEQ ID NO: 122953 - DNA, 22 bp, synthetic construct
  misc_feature 1..22: note = chemically synthesized
  source 1..22: mol_type = other DNA
cagatgatatacataaaatgcc

SEQ ID NO: 122954 - DNA, 22 bp, synthetic construct
  misc_feature 1..22: note = chemically synthesized
  source 1..22: mol_type = other DNA
tctcactttgctgtagcatttc

SEQ ID NO: 122955 - DNA, 22 bp, synthetic construct
  misc_feature 1..22: note = chemically synthesized
  source 1..22: mol_type = other DNA
actttgctgtagcatttccaat

SEQ ID NO: 122956 - DNA, 22 bp, synthetic construct
  misc_feature 1..22: note = chemically synthesized
  source 1..22: mol_type = other DNA
tgctgtagcatttccaatcctg

SEQ ID NO: 122957 - DNA, 22 bp, synthetic construct
  misc_feature 1..22: note = chemically synthesized
  source 1..22: mol_type = other DNA
gctgtagcatttccaatcctgg

SEQ ID NO: 122958 - DNA, 22 bp, synthetic construct
  misc_feature 1..22: note = chemically synthesized
  source 1..22: mol_type = other DNA
ctgtagcatttccaatcctgga

SEQ ID NO: 122959 - DNA, 22 bp, synthetic construct
  misc_feature 1..22: note = chemically synthesized
  source 1..22: mol_type = other DNA
tagcatttccaatcctggacag

SEQ ID NO: 122960 - DNA, 22 bp, synthetic construct
  misc_feature 1..22: note = chemically synthesized
  source 1..22: mol_type = other DNA
ccaatcctggacagtcagcata

SEQ ID NO: 122961 - DNA, 22 bp, synthetic construct
  misc_feature 1..22: note = chemically synthesized
  source 1..22: mol_type = other DNA
caatcctggacagtcagcataa

SEQ ID NO: 122962 - DNA, 22 bp, synthetic construct
  misc_feature 1..22: note = chemically synthesized
  source 1..22: mol_type = other DNA
gacagtcagcataaaagatact

SEQ ID NO: 122963 - DNA, 22 bp, synthetic construct
  misc_feature 1..22: note = chemically synthesized
  source 1..22: mol_type = other DNA
tcgtcacttatttaatatttca

SEQ ID NO: 122964 - DNA, 22 bp, synthetic construct
  misc_feature 1..22: note = chemically synthesized
  source 1..22: mol_type = other DNA
atttaatatttcatagcattaa

SEQ ID NO: 122965 - DNA, 22 bp, synthetic construct
  misc_feature 1..22: note = chemically synthesized
  source 1..22: mol_type = other DNA
tttaatatttcatagcattaaa

SEQ ID NO: 122966 - DNA, 22 bp, synthetic construct
  misc_feature 1..22: note = chemically synthesized
  source 1..22: mol_type = other DNA
aatatttcatagcattaaacat

SEQ ID NO: 122967 - DNA, 22 bp, synthetic construct
  misc_feature 1..22: note = chemically synthesized
  source 1..22: mol_type = other DNA
atatttcatagcattaaacatt

SEQ ID NO: 122968 - DNA, 22 bp, synthetic construct
  misc_feature 1..22: note = chemically synthesized
  source 1..22: mol_type = other DNA
catagcattaaacattcaaacc

SEQ ID NO: 122969 - DNA, 22 bp, synthetic construct
  misc_feature 1..22: note = chemically synthesized
  source 1..22: mol_type = other DNA
atagcattaaacattcaaacct

SEQ ID NO: 122970 - DNA, 22 bp, synthetic construct
  misc_feature 1..22: note = chemically synthesized
  source 1..22: mol_type = other DNA
aacattcaaaccttcaacttta

SEQ ID NO: 122971 - DNA, 22 bp, synthetic construct
  misc_feature 1..22: note = chemically synthesized
  source 1..22: mol_type = other DNA
aaaccttcaactttaggattta

SEQ ID NO: 122972 - DNA, 22 bp, synthetic construct
  misc_feature 1..22: note = chemically synthesized
  source 1..22: mol_type = other DNA
caactttaggatttactataaa

SEQ ID NO: 122973 - DNA, 22 bp, synthetic construct
  misc_feature 1..22: note = chemically synthesized
  source 1..22: mol_type = other DNA
aactttaggatttactataaaa

SEQ ID NO: 122974 - DNA, 22 bp, synthetic construct
  misc_feature 1..22: note = chemically synthesized
  source 1..22: mol_type = other DNA
taggatttactataaaagactg

SEQ ID NO: 122975 - DNA, 22 bp, synthetic construct
  misc_feature 1..22: note = chemically synthesized
  source 1..22: mol_type = other DNA
aggatttactataaaagactgt

SEQ ID NO: 122976 - DNA, 22 bp, synthetic construct
  misc_feature 1..22: note = chemically synthesized
  source 1..22: mol_type = other DNA
ggatttactataaaagactgtg

SEQ ID NO: 122977 - DNA, 22 bp, synthetic construct
  misc_feature 1..22: note = chemically synthesized
  source 1..22: mol_type = other DNA
actataaaagactgtgactgtt

SEQ ID NO: 122978 - DNA, 22 bp, synthetic construct
  misc_feature 1..22: note = chemically synthesized
  source 1..22: mol_type = other DNA
ctataaaagactgtgactgtta

SEQ ID NO: 122979 - DNA, 22 bp, synthetic construct
  misc_feature 1..22: note = chemically synthesized
  source 1..22: mol_type = other DNA
taaaagactgtgactgttaatg

SEQ ID NO: 122980 - DNA, 22 bp, synthetic construct
  misc_feature 1..22: note = chemically synthesized
  source 1..22: mol_type = other DNA
tgactgttaatgataataataa

SEQ ID NO: 122981 - DNA, 22 bp, synthetic construct
  misc_feature 1..22: note = chemically synthesized
  source 1..22: mol_type = other DNA
ttaatgataataataaatacat

SEQ ID NO: 122982 - DNA, 22 bp, synthetic construct
  misc_feature 1..22: note = chemically synthesized
  source 1..22: mol_type = other DNA
atgataataataaatacattga

SEQ ID NO: 122983 - DNA, 22 bp, synthetic construct
  misc_feature 1..22: note = chemically synthesized
  source 1..22: mol_type = other DNA
atgattatgagcattattttta

SEQ ID NO: 122984 - DNA, 22 bp, synthetic construct
  misc_feature 1..22: note = chemically synthesized
  source 1..22: mol_type = other DNA
tgagcattatttttaaattaca

SEQ ID NO: 122985 - DNA, 22 bp, synthetic construct
  misc_feature 1..22: note = chemically synthesized
  source 1..22: mol_type = other DNA
tttttaaattacaacttggtag

SEQ ID NO: 122986 - DNA, 22 bp, synthetic construct
  misc_feature 1..22: note = chemically synthesized
  source 1..22: mol_type = other DNA
ttaaattacaacttggtagcct

SEQ ID NO: 122987 - DNA, 22 bp, synthetic construct
  misc_feature 1..22: note = chemically synthesized
  source 1..22: mol_type = other DNA
taaattacaacttggtagcctc

SEQ ID NO: 122988 - DNA, 22 bp, synthetic construct
  misc_feature 1..22: note = chemically synthesized
  source 1..22: mol_type = other DNA
aaattacaacttggtagcctct

SEQ ID NO: 122989 - DNA, 22 bp, synthetic construct
  misc_feature 1..22: note = chemically synthesized
  source 1..22: mol_type = other DNA
aattacaacttggtagcctcta

SEQ ID NO: 122990 - DNA, 22 bp, synthetic construct
  misc_feature 1..22: note = chemically synthesized
  source 1..22: mol_type = other DNA
caacttggtagcctctagcatt

SEQ ID NO: 122991 - DNA, 22 bp, synthetic construct
  misc_feature 1..22: note = chemically synthesized
  source 1..22: mol_type = other DNA
ggtagcctctagcatttatata

SEQ ID NO: 122992 - DNA, 22 bp, synthetic construct
  misc_feature 1..22: note = chemically synthesized
  source 1..22: mol_type = other DNA
gtagcctctagcatttatatac

SEQ ID NO: 122993 - DNA, 22 bp, synthetic construct
  misc_feature 1..22: note = chemically synthesized
  source 1..22: mol_type = other DNA
tagcatttatatacctgtattt

SEQ ID NO: 122994 - DNA, 22 bp, synthetic construct
  misc_feature 1..22: note = chemically synthesized
  source 1..22: mol_type = other DNA
gcatttatatacctgtattttc

SEQ ID NO: 122995 - DNA, 22 bp, synthetic construct
  misc_feature 1..22: note = chemically synthesized
  source 1..22: mol_type = other DNA
atatacctgtattttctatatg

SEQ ID NO: 122996 - DNA, 22 bp, synthetic construct
  misc_feature 1..22: note = chemically synthesized
  source 1..22: mol_type = other DNA
tatacctgtattttctatatgc

SEQ ID NO: 122997 - DNA, 22 bp, synthetic construct
  misc_feature 1..22: note = chemically synthesized
  source 1..22: mol_type = other DNA
tattttctatatgcatttctat

SEQ ID NO: 122998 - DNA, 22 bp, synthetic construct
  misc_feature 1..22: note = chemically synthesized
  source 1..22: mol_type = other DNA
tctatatgcatttctatagaag

SEQ ID NO: 122999 - DNA, 22 bp, synthetic construct
  misc_feature 1..22: note = chemically synthesized
  source 1..22: mol_type = other DNA
ctatatgcatttctatagaagc

SEQ ID NO: 123000 - DNA, 22 bp, synthetic construct
  misc_feature 1..22: note = chemically synthesized
  source 1..22: mol_type = other DNA
tatatgcatttctatagaagca

SEQ ID NO: 123001 - DNA, 22 bp, synthetic construct
  misc_feature 1..22: note = chemically synthesized
  source 1..22: mol_type = other DNA
tatgcatttctatagaagcagc

SEQ ID NO: 123002 - DNA, 22 bp, synthetic construct
  misc_feature 1..22: note = chemically synthesized
  source 1..22: mol_type = other DNA
ctatagaagcagcttgcacatg

SEQ ID NO: 123003 - DNA, 22 bp, synthetic construct
  misc_feature 1..22: note = chemically synthesized
  source 1..22: mol_type = other DNA
tatagaagcagcttgcacatgc

SEQ ID NO: 123004 - DNA, 22 bp, synthetic construct
  misc_feature 1..22: note = chemically synthesized
  source 1..22: mol_type = other DNA
tagaagcagcttgcacatgctg

SEQ ID NO: 123005 - DNA, 22 bp, synthetic construct
  misc_feature 1..22: note = chemically synthesized
  source 1..22: mol_type = other DNA
gcacatgctgtacaaaccataa

SEQ ID NO: 123006 - DNA, 22 bp, synthetic construct
  misc_feature 1..22: note = chemically synthesized
  source 1..22: mol_type = other DNA
cacatgctgtacaaaccataag

SEQ ID NO: 123007 - DNA, 22 bp, synthetic construct
  misc_feature 1..22: note = chemically synthesized
  source 1..22: mol_type = other DNA
tacaaaccataagatggcagga

SEQ ID NO: 123008 - DNA, 22 bp, synthetic construct
  misc_feature 1..22: note = chemically synthesized
  source 1..22: mol_type = other DNA
gtggaacactgactctcctggg

SEQ ID NO: 123009 - DNA, 22 bp, synthetic construct
  misc_feature 1..22: note = chemically synthesized
  source 1..22: mol_type = other DNA
tggaacactgactctcctgggg

SEQ ID NO: 123010 - DNA, 22 bp, synthetic construct
  misc_feature 1..22: note = chemically synthesized
  source 1..22: mol_type = other DNA
actctcctggggccatgcagag

SEQ ID NO: 123011 - DNA, 22 bp, synthetic construct
  misc_feature 1..22: note = chemically synthesized
  source 1..22: mol_type = other DNA
tcctggggccatgcagagggag

SEQ ID NO: 123012 - DNA, 22 bp, synthetic construct
  misc_feature 1..22: note = chemically synthesized
  source 1..22: mol_type = other DNA
ctggggccatgcagagggaggt

SEQ ID NO: 123013 - DNA, 22 bp, synthetic construct
  misc_feature 1..22: note = chemically synthesized
  source 1..22: mol_type = other DNA
gggccatgcagagggaggtttg

SEQ ID NO: 123014 - DNA, 22 bp, synthetic construct
  misc_feature 1..22: note = chemically synthesized
  source 1..22: mol_type = other DNA
gaagatcttgttgatacagatt

SEQ ID NO: 123015 - DNA, 22 bp, synthetic construct
  misc_feature 1..22: note = chemically synthesized
  source 1..22: mol_type = other DNA
aagatcttgttgatacagattg

SEQ ID NO: 123016 - DNA, 22 bp, synthetic construct
  misc_feature 1..22: note = chemically synthesized
  source 1..22: mol_type = other DNA
gttgatacagattgacacagaa

SEQ ID NO: 123017 - DNA, 22 bp, synthetic construct
  misc_feature 1..22: note = chemically synthesized
  source 1..22: mol_type = other DNA
ttgatacagattgacacagaat

SEQ ID NO: 123018 - DNA, 22 bp, synthetic construct
  misc_feature 1..22: note = chemically synthesized
  source 1..22: mol_type = other DNA
atacagattgacacagaatacc

SEQ ID NO: 123019 - DNA, 22 bp, synthetic construct
  misc_feature 1..22: note = chemically synthesized
  source 1..22: mol_type = other DNA
acacagaataccaaagcctctt

SEQ ID NO: 123020 - DNA, 22 bp, synthetic construct
  misc_feature 1..22: note = chemically synthesized
  source 1..22: mol_type = other DNA
tttccccactgcctttccttga

SEQ ID NO: 123021 - DNA, 22 bp, synthetic construct
  misc_feature 1..22: note = chemically synthesized
  source 1..22: mol_type = other DNA
tccccactgcctttccttgagt

SEQ ID NO: 123022 - DNA, 22 bp, synthetic construct
  misc_feature 1..22: note = chemically synthesized
  source 1..22: mol_type = other DNA
ccccactgcctttccttgagta

SEQ ID NO: 123023 - DNA, 22 bp, synthetic construct
  misc_feature 1..22: note = chemically synthesized
  source 1..22: mol_type = other DNA
cccactgcctttccttgagtaa

SEQ ID NO: 123024 - DNA, 22 bp, synthetic construct
  misc_feature 1..22: note = chemically synthesized
  source 1..22: mol_type = other DNA
cctttccttgagtaaaaatcct

SEQ ID NO: 123025 - DNA, 22 bp, synthetic construct
  misc_feature 1..22: note = chemically synthesized
  source 1..22: mol_type = other DNA
tccttgagtaaaaatcctgaga

SEQ ID NO: 123026 - DNA, 22 bp, synthetic construct
  misc_feature 1..22: note = chemically synthesized
  source 1..22: mol_type = other DNA
ccttgagtaaaaatcctgagaa

SEQ ID NO: 123027 - DNA, 22 bp, synthetic construct
  misc_feature 1..22: note = chemically synthesized
  source 1..22: mol_type = other DNA
cttgagtaaaaatcctgagaaa

SEQ ID NO: 123028 - DNA, 22 bp, synthetic construct
  misc_feature 1..22: note = chemically synthesized
  source 1..22: mol_type = other DNA
gagtaaaaatcctgagaaaatg

SEQ ID NO: 123029 - DNA, 22 bp, synthetic construct
  misc_feature 1..22: note = chemically synthesized
  source 1..22: mol_type = other DNA
agtaaaaatcctgagaaaatgt

SEQ ID NO: 123030 - DNA, 22 bp, synthetic construct
  misc_feature 1..22: note = chemically synthesized
  source 1..22: mol_type = other DNA
agaaaatgtcttccctttcttt

SEQ ID NO: 123031 - DNA, 22 bp, synthetic construct
  misc_feature 1..22: note = chemically synthesized
  source 1..22: mol_type = other DNA
ccctttctttctatgttgatag

SEQ ID NO: 123032 - DNA, 22 bp, synthetic construct
  misc_feature 1..22: note = chemically synthesized
  source 1..22: mol_type = other DNA
cctttctttctatgttgatagc

SEQ ID NO: 123033 - DNA, 22 bp, synthetic construct
  misc_feature 1..22: note = chemically synthesized
  source 1..22: mol_type = other DNA
tctttctatgttgatagcaaaa

SEQ ID NO: 123034 - DNA, 22 bp, synthetic construct
  misc_feature 1..22: note = chemically synthesized
  source 1..22: mol_type = other DNA
ctttctatgttgatagcaaaac

SEQ ID NO: 123035 - DNA, 22 bp, synthetic construct
  misc_feature 1..22: note = chemically synthesized
  source 1..22: mol_type = other DNA
tttctatgttgatagcaaaacc

SEQ ID NO: 123036 - DNA, 22 bp, synthetic construct
  misc_feature 1..22: note = chemically synthesized
  source 1..22: mol_type = other DNA
tctatgttgatagcaaaaccaa

SEQ ID NO: 123037 - DNA, 22 bp, synthetic construct
  misc_feature 1..22: note = chemically synthesized
  source 1..22: mol_type = other DNA
ctatgttgatagcaaaaccaat

SEQ ID NO: 123038 - DNA, 22 bp, synthetic construct
  misc_feature 1..22: note = chemically synthesized
  source 1..22: mol_type = other DNA
tatgttgatagcaaaaccaatg

SEQ ID NO: 123039 - DNA, 22 bp, synthetic construct
  misc_feature 1..22: note = chemically synthesized
  source 1..22: mol_type = other DNA
tgttgatagcaaaaccaatgag

SEQ ID NO: 123040 - DNA, 22 bp, synthetic construct
  misc_feature 1..22: note = chemically synthesized
  source 1..22: mol_type = other DNA
atagcaaaaccaatgaggtcat

SEQ ID NO: 123041 - DNA, 22 bp, synthetic construct
  misc_feature 1..22: note = chemically synthesized
  source 1..22: mol_type = other DNA
ttaacaactgttgacttatttt

SEQ ID NO: 123042 - DNA, 22 bp, synthetic construct
  misc_feature 1..22: note = chemically synthesized
  source 1..22: mol_type = other DNA
taacaactgttgacttattttg

SEQ ID NO: 123043 - DNA, 22 bp, synthetic construct
  misc_feature 1..22: note = chemically synthesized
  source 1..22: mol_type = other DNA
aacaactgttgacttattttgg

SEQ ID NO: 123044 - DNA, 22 bp, synthetic construct
  misc_feature 1..22: note = chemically synthesized
  source 1..22: mol_type = other DNA
acaactgttgacttattttgga

SEQ ID NO: 123045 - DNA, 22 bp, synthetic construct
  misc_feature 1..22: note = chemically synthesized
  source 1..22: mol_type = other DNA
ttgacttattttggattttagt

SEQ ID NO: 123046 - DNA, 22 bp, synthetic construct
  misc_feature 1..22: note = chemically synthesized
  source 1..22: mol_type = other DNA
acttattttggattttagtcta

SEQ ID NO: 123047 - DNA, 22 bp, synthetic construct
  misc_feature 1..22: note = chemically synthesized
  source 1..22: mol_type = other DNA
attttggattttagtctacatt

SEQ ID NO: 123048 - DNA, 22 bp, synthetic construct
  misc_feature 1..22: note = chemically synthesized
  source 1..22: mol_type = other DNA
ttttggattttagtctacattc

SEQ ID NO: 123049 - DNA, 22 bp, synthetic construct
  misc_feature 1..22: note = chemically synthesized
  source 1..22: mol_type = other DNA
tggattttagtctacattcact

SEQ ID NO: 123050 - DNA, 22 bp, synthetic construct
  misc_feature 1..22: note = chemically synthesized
  source 1..22: mol_type = other DNA
ggattttagtctacattcactg

SEQ ID NO: 123051 - DNA, 22 bp, synthetic construct
  misc_feature 1..22: note = chemically synthesized
  source 1..22: mol_type = other DNA
gattttagtctacattcactgt

SEQ ID NO: 123052 - DNA, 22 bp, synthetic construct
  misc_feature 1..22: note = chemically synthesized
  source 1..22: mol_type = other DNA
tagtctacattcactgtaacac

SEQ ID NO: 123053 - DNA, 22 bp, synthetic construct
  misc_feature 1..22: note = chemically synthesized
  source 1..22: mol_type = other DNA
agtctacattcactgtaacaca

SEQ ID NO: 123054 - DNA, 22 bp, synthetic construct
  misc_feature 1..22: note = chemically synthesized
  source 1..22: mol_type = other DNA
gtctacattcactgtaacacaa

SEQ ID NO: 123055 - DNA, 22 bp, synthetic construct
  misc_feature 1..22: note = chemically synthesized
  source 1..22: mol_type = other DNA
cattcactgtaacacaaaaatg

SEQ ID NO: 123056 - DNA, 22 bp, synthetic construct
  misc_feature 1..22: note = chemically synthesized
  source 1..22: mol_type = other DNA
actgtaacacaaaaatgcagac

SEQ ID NO: 123057 - DNA, 22 bp, synthetic construct
  misc_feature 1..22: note = chemically synthesized
  source 1..22: mol_type = other DNA
taacacaaaaatgcagacaagc

SEQ ID NO: 123058 - DNA, 22 bp, synthetic construct
  misc_feature 1..22: note = chemically synthesized
  source 1..22: mol_type = other DNA
attttagtgtggcatcatggaa

SEQ ID NO: 123059 - DNA, 22 bp, synthetic construct
  misc_feature 1..22: note = chemically synthesized
  source 1..22: mol_type = other DNA
tagtgtggcatcatggaaataa

SEQ ID NO: 123060 - DNA, 22 bp, synthetic construct
  misc_feature 1..22: note = chemically synthesized
  source 1..22: mol_type = other DNA
agtgtggcatcatggaaataac

SEQ ID NO: 123061 - DNA, 22 bp, synthetic construct
  misc_feature 1..22: note = chemically synthesized
  source 1..22: mol_type = other DNA
gtgtggcatcatggaaataaca

SEQ ID NO: 123062 - DNA, 22 bp, synthetic construct
  misc_feature 1..22: note = chemically synthesized
  source 1..22: mol_type = other DNA
cacatagcccttgctaccagcc

SEQ ID NO: 123063 - DNA, 22 bp, synthetic construct
  misc_feature 1..22: note = chemically synthesized
  source 1..22: mol_type = other DNA
gctaccagccaataggactatt

SEQ ID NO: 123064 - DNA, 22 bp, synthetic construct
  misc_feature 1..22: note = chemically synthesized
  source 1..22: mol_type = other DNA
ctaccagccaataggactattt

SEQ ID NO: 123065 - DNA, 22 bp, synthetic construct
  misc_feature 1..22: note = chemically synthesized
  source 1..22: mol_type = other DNA
ccagccaataggactatttatt

SEQ ID NO: 123066 - DNA, 22 bp, synthetic construct
  misc_feature 1..22: note = chemically synthesized
  source 1..22: mol_type = other DNA
tttatttgagtatgttcatata

SEQ ID NO: 123067 - DNA, 22 bp, synthetic construct
  misc_feature 1..22: note = chemically synthesized
  source 1..22: mol_type = other DNA
atttgagtatgttcatatatgt

SEQ ID NO: 123068 - DNA, 22 bp, synthetic construct
  misc_feature 1..22: note = chemically synthesized
  source 1..22: mol_type = other DNA
tttgagtatgttcatatatgta

SEQ ID NO: 123069 - DNA, 22 bp, synthetic construct
  misc_feature 1..22: note = chemically synthesized
  source 1..22: mol_type = other DNA
gagtatgttcatatatgtatat

SEQ ID NO: 123070 - DNA, 22 bp, synthetic construct
  misc_feature 1..22: note = chemically synthesized
  source 1..22: mol_type = other DNA
agtatgttcatatatgtatata

SEQ ID NO: 123071 - DNA, 22 bp, synthetic construct
  misc_feature 1..22: note = chemically synthesized
  source 1..22: mol_type = other DNA
atatatgtatatataaatgtgt

SEQ ID NO: 123072 - DNA, 22 bp, synthetic construct
  misc_feature 1..22: note = chemically synthesized
  source 1..22: mol_type = other DNA
cagagaaatgtatggcagatta

SEQ ID NO: 123073 - DNA, 22 bp, synthetic construct
  misc_feature 1..22: note = chemically synthesized
  source 1..22: mol_type = other DNA
taaagggaaattatctccaggg

SEQ ID NO: 123074 - DNA, 22 bp, synthetic construct
  misc_feature 1..22: note = chemically synthesized
  source 1..22: mol_type = other DNA
tctccagggaggatagaaaggt

SEQ ID NO: 123075 - DNA, 22 bp, synthetic construct
  misc_feature 1..22: note = chemically synthesized
  source 1..22: mol_type = other DNA
cagggaggatagaaaggtaagg

SEQ ID NO: 123076 - DNA, 22 bp, synthetic construct
  misc_feature 1..22: note = chemically synthesized
  source 1..22: mol_type = other DNA
tactttatatttaatatacatg

SEQ ID NO: 123077 - DNA, 22 bp, synthetic construct
  misc_feature 1..22: note = chemically synthesized
  source 1..22: mol_type = other DNA
actttatatttaatatacatgg

SEQ ID NO: 123078 - DNA, 22 bp, synthetic construct
  misc_feature 1..22: note = chemically synthesized
  source 1..22: mol_type = other DNA
ctttatatttaatatacatgga

SEQ ID NO: 123079 - DNA, 22 bp, synthetic construct
  misc_feature 1..22: note = chemically synthesized
  source 1..22: mol_type = other DNA
tatatttaatatacatggagta

SEQ ID NO: 123080 - DNA, 22 bp, synthetic construct
  misc_feature 1..22: note = chemically synthesized
  source 1..22: mol_type = other DNA
atatttaatatacatggagtat

SEQ ID NO: 123081 - DNA, 22 bp, synthetic construct
  misc_feature 1..22: note = chemically synthesized
  source 1..22: mol_type = other DNA
tatttaatatacatggagtata

SEQ ID NO: 123082 - DNA, 22 bp, synthetic construct
  misc_feature 1..22: note = chemically synthesized
  source 1..22: mol_type = other DNA
aatatacatggagtatatataa

SEQ ID NO: 123083 - DNA, 22 bp, synthetic construct
  misc_feature 1..22: note = chemically synthesized
  source 1..22: mol_type = other DNA
atatacatggagtatatataat

SEQ ID NO: 123084 - DNA, 22 bp, synthetic construct
  misc_feature 1..22: note = chemically synthesized
  source 1..22: mol_type = other DNA
tttaaattatatcatagacata

SEQ ID NO: 123085 - DNA, 22 bp, synthetic construct
  misc_feature 1..22: note = chemically synthesized
  source 1..22: mol_type = other DNA
ttaaattatatcatagacatat

SEQ ID NO: 123086 - DNA, 22 bp, synthetic construct
  misc_feature 1..22: note = chemically synthesized
  source 1..22: mol_type = other DNA
taaattatatcatagacatatt

SEQ ID NO: 123087 - DNA, 22 bp, synthetic construct
  misc_feature 1..22: note = chemically synthesized
  source 1..22: mol_type = other DNA
aaattatatcatagacatattt

SEQ ID NO: 123088 - DNA, 22 bp, synthetic construct
  misc_feature 1..22: note = chemically synthesized
  source 1..22: mol_type = other DNA
aattatatcatagacatattta

SEQ ID NO: 123089 - DNA, 22 bp, synthetic construct
  misc_feature 1..22: note = chemically synthesized
  source 1..22: mol_type = other DNA
tatcatagacatatttaggata

SEQ ID NO: 123090 - DNA, 22 bp, synthetic construct
  misc_feature 1..22: note = chemically synthesized
  source 1..22: mol_type = other DNA
aggatagtgaatggaaaatttt

SEQ ID NO: 123091 - DNA, 22 bp, synthetic construct
  misc_feature 1..22: note = chemically synthesized
  source 1..22: mol_type = other DNA
ggatagtgaatggaaaatttta

SEQ ID NO: 123092 - DNA, 22 bp, synthetic construct
  misc_feature 1..22: note = chemically synthesized
  source 1..22: mol_type = other DNA
taaaaatacaactacttactag

SEQ ID NO: 123093 - DNA, 22 bp, synthetic construct
  misc_feature 1..22: note = chemically synthesized
  source 1..22: mol_type = other DNA
aaaaatacaactacttactagt

SEQ ID NO: 123094 - DNA, 22 bp, synthetic construct
  misc_feature 1..22: note = chemically synthesized
  source 1..22: mol_type = other DNA
aaaatacaactacttactagtt

SEQ ID NO: 123095 - DNA, 22 bp, synthetic construct
  misc_feature 1..22: note = chemically synthesized
  source 1..22: mol_type = other DNA
cttactagttgtatactttttt

SEQ ID NO: 123096 - DNA, 22 bp, synthetic construct
  misc_feature 1..22: note = chemically synthesized
  source 1..22: mol_type = other DNA
actagttgtatacttttttaaa

SEQ ID NO: 123097 - DNA, 22 bp, synthetic construct
  misc_feature 1..22: note = chemically synthesized
  source 1..22: mol_type = other DNA
ctagttgtatacttttttaaat

SEQ ID NO: 123098 - DNA, 22 bp, synthetic construct
  misc_feature 1..22: note = chemically synthesized
  source 1..22: mol_type = other DNA
gttgtatacttttttaaatgtc

SEQ ID NO: 123099 - DNA, 22 bp, synthetic construct
  misc_feature 1..22: note = chemically synthesized
  source 1..22: mol_type = other DNA
tatacttttttaaatgtctcaa

SEQ ID NO: 123100 - DNA, 22 bp, synthetic construct
  misc_feature 1..22: note = chemically synthesized
  source 1..22: mol_type = other DNA
ttttaaatgtctcaaattatca

SEQ ID NO: 123101 - DNA, 22 bp, synthetic construct
  misc_feature 1..22: note = chemically synthesized
  source 1..22: mol_type = other DNA
tttaaatgtctcaaattatcag

SEQ ID NO: 123102 - DNA, 22 bp, synthetic construct
  misc_feature 1..22: note = chemically synthesized
  source 1..22: mol_type = other DNA
ttaaatgtctcaaattatcaga

SEQ ID NO: 123103 - DNA, 22 bp, synthetic construct
  misc_feature 1..22: note = chemically synthesized
  source 1..22: mol_type = other DNA
taaatgtctcaaattatcagat

SEQ ID NO: 123104 - DNA, 22 bp, synthetic construct
  misc_feature 1..22: note = chemically synthesized
  source 1..22: mol_type = other DNA
aaatgtctcaaattatcagatt

SEQ ID NO: 123105 - DNA, 22 bp, synthetic construct
  misc_feature 1..22: note = chemically synthesized
  source 1..22: mol_type = other DNA
aatgtctcaaattatcagattt

SEQ ID NO: 123106 - DNA, 22 bp, synthetic construct
  misc_feature 1..22: note = chemically synthesized
  source 1..22: mol_type = other DNA
aaattatcagattttatttttt

SEQ ID NO: 123107 - DNA, 22 bp, synthetic construct
  misc_feature 1..22: note = chemically synthesized
  source 1..22: mol_type = other DNA
tcagattttattttttatccag

SEQ ID NO: 123108 - DNA, 22 bp, synthetic construct
  misc_feature 1..22: note = chemically synthesized
  source 1..22: mol_type = other DNA
tattttttatccagaaaaaata

SEQ ID NO: 123109 - DNA, 22 bp, synthetic construct
  misc_feature 1..22: note = chemically synthesized
  source 1..22: mol_type = other DNA
attttttatccagaaaaaatat

SEQ ID NO: 123110 - DNA, 22 bp, synthetic construct
  misc_feature 1..22: note = chemically synthesized
  source 1..22: mol_type = other DNA
ttttttatccagaaaaaatata

SEQ ID NO: 123111 - DNA, 22 bp, synthetic construct
  misc_feature 1..22: note = chemically synthesized
  source 1..22: mol_type = other DNA
tttatccagaaaaaatatataa

SEQ ID NO: 123112 - DNA, 22 bp, synthetic construct
  misc_feature 1..22: note = chemically synthesized
  source 1..22: mol_type = other DNA
ttatccagaaaaaatatataaa

SEQ ID NO: 123113 - DNA, 22 bp, synthetic construct
  misc_feature 1..22: note = chemically synthesized
  source 1..22: mol_type = other DNA
tatccagaaaaaatatataaaa

SEQ ID NO: 123114 - DNA, 22 bp, synthetic construct
  misc_feature 1..22: note = chemically synthesized
  source 1..22: mol_type = other DNA
atccagaaaaaatatataaaaa

SEQ ID NO: 123115 - DNA, 22 bp, synthetic construct
  misc_feature 1..22: note = chemically synthesized
  source 1..22: mol_type = other DNA
tccagaaaaaatatataaaaag

SEQ ID NO: 123116 - DNA, 22 bp, synthetic construct
  misc_feature 1..22: note = chemically synthesized
  source 1..22: mol_type = other DNA
tttcatagagttttactgaggt

SEQ ID NO: 123117 - DNA, 22 bp, synthetic construct
  misc_feature 1..22: note = chemically synthesized
  source 1..22: mol_type = other DNA
catagagttttactgaggtata

SEQ ID NO: 123118 - DNA, 22 bp, synthetic construct
  misc_feature 1..22: note = chemically synthesized
  source 1..22: mol_type = other DNA
atagagttttactgaggtataa

SEQ ID NO: 123119 - DNA, 22 bp, synthetic construct
  misc_feature 1..22: note = chemically synthesized
  source 1..22: mol_type = other DNA
tactgaggtataatagatgtaa

SEQ ID NO: 123120 - DNA, 22 bp, synthetic construct
  misc_feature 1..22: note = chemically synthesized
  source 1..22: mol_type = other DNA
actgaggtataatagatgtaat

SEQ ID NO: 123121 - DNA, 22 bp, synthetic construct
  misc_feature 1..22: note = chemically synthesized
  source 1..22: mol_type = other DNA
ctgaggtataatagatgtaatt

SEQ ID NO: 123122 - DNA, 22 bp, synthetic construct
  misc_feature 1..22: note = chemically synthesized
  source 1..22: mol_type = other DNA
aggtataatagatgtaattctc

SEQ ID NO: 123123 - DNA, 22 bp, synthetic construct
  misc_feature 1..22: note = chemically synthesized
  source 1..22: mol_type = other DNA
tcctaaaagtgttatattttgc

SEQ ID NO: 123124 - DNA, 22 bp, synthetic construct
  misc_feature 1..22: note = chemically synthesized
  source 1..22: mol_type = other DNA
ctaaaagtgttatattttgcaa

SEQ ID NO: 123125 - DNA, 22 bp, synthetic construct
  misc_feature 1..22: note = chemically synthesized
  source 1..22: mol_type = other DNA
aaagtgttatattttgcaaata

SEQ ID NO: 123126 - DNA, 22 bp, synthetic construct
  misc_feature 1..22: note = chemically synthesized
  source 1..22: mol_type = other DNA
tattttgcaaatagtggctgct

SEQ ID NO: 123127 - DNA, 22 bp, synthetic construct
  misc_feature 1..22: note = chemically synthesized
  source 1..22: mol_type = other DNA
tgcaaatagtggctgctaaaat

SEQ ID NO: 123128 - DNA, 22 bp, synthetic construct
  misc_feature 1..22: note = chemically synthesized
  source 1..22: mol_type = other DNA
gcaaatagtggctgctaaaata

SEQ ID NO: 123129 - DNA, 22 bp, synthetic construct
  misc_feature 1..22: note = chemically synthesized
  source 1..22: mol_type = other DNA
caaatagtggctgctaaaatat

SEQ ID NO: 123130 - DNA, 22 bp, synthetic construct
  misc_feature 1..22: note = chemically synthesized
  source 1..22: mol_type = other DNA
ctaaaatattattgttaatagt

SEQ ID NO: 123131 - DNA, 22 bp, synthetic construct
  misc_feature 1..22: note = chemically synthesized
  source 1..22: mol_type = other DNA
aaatattattgttaatagtatt

SEQ ID NO: 123132 - DNA, 22 bp, synthetic construct
  misc_feature 1..22: note = chemically synthesized
  source 1..22: mol_type = other DNA
ttgttaatagtattccactaac

SEQ ID NO: 123133 - DNA, 22 bp, synthetic construct
  misc_feature 1..22: note = chemically synthesized
  source 1..22: mol_type = other DNA
ttaatagtattccactaactag

SEQ ID NO: 123134 - DNA, 22 bp, synthetic construct
  misc_feature 1..22: note = chemically synthesized
  source 1..22: mol_type = other DNA
atagtattccactaactagtaa

SEQ ID NO: 123135 - DNA, 22 bp, synthetic construct
  misc_feature 1..22: note = chemically synthesized
  source 1..22: mol_type = other DNA
cactaactagtaataataactt

SEQ ID NO: 123136 - DNA, 22 bp, synthetic construct
  misc_feature 1..22: note = chemically synthesized
  source 1..22: mol_type = other DNA
actagtaataataactttaatt

SEQ ID NO: 123137 - DNA, 22 bp, synthetic construct
  misc_feature 1..22: note = chemically synthesized
  source 1..22: mol_type = other DNA
gtaataataactttaattaata

SEQ ID NO: 123138 - DNA, 22 bp, synthetic construct
  misc_feature 1..22: note = chemically synthesized
  source 1..22: mol_type = other DNA
taattaatatttgttaagccgt

SEQ ID NO: 123139 - DNA, 22 bp, synthetic construct
  misc_feature 1..22: note = chemically synthesized
  source 1..22: mol_type = other DNA
aattaatatttgttaagccgtg

SEQ ID NO: 123140 - DNA, 22 bp, synthetic construct
  misc_feature 1..22: note = chemically synthesized
  source 1..22: mol_type = other DNA
attaatatttgttaagccgtga

SEQ ID NO: 123141 - DNA, 22 bp, synthetic construct
  misc_feature 1..22: note = chemically synthesized
  source 1..22: mol_type = other DNA
atatttgttaagccgtgacttt

SEQ ID NO: 123142 - DNA, 22 bp, synthetic construct
  misc_feature 1..22: note = chemically synthesized
  source 1..22: mol_type = other DNA
gttaagccgtgactttgtttct

SEQ ID NO: 123143 - DNA, 22 bp, synthetic construct
  misc_feature 1..22: note = chemically synthesized
  source 1..22: mol_type = other DNA
ttaagccgtgactttgtttcta

SEQ ID NO: 123144 - DNA, 22 bp, synthetic construct
  misc_feature 1..22: note = chemically synthesized
  source 1..22: mol_type = other DNA
agccgtgactttgtttctacta

SEQ ID NO: 123145 - DNA, 22 bp, synthetic construct
  misc_feature 1..22: note = chemically synthesized
  source 1..22: mol_type = other DNA
tgtttctactaccccacacaca

SEQ ID NO: 123146 - DNA, 22 bp, synthetic construct
  misc_feature 1..22: note = chemically synthesized
  source 1..22: mol_type = other DNA
gtttctactaccccacacacat

SEQ ID NO: 123147 - DNA, 22 bp, synthetic construct
  misc_feature 1..22: note = chemically synthesized
  source 1..22: mol_type = other DNA
tttctactaccccacacacatg

SEQ ID NO: 123148 - DNA, 22 bp, synthetic construct
  misc_feature 1..22: note = chemically synthesized
  source 1..22: mol_type = other DNA
ctactaccccacacacatgggc

SEQ ID NO: 123149 - DNA, 22 bp, synthetic construct
  misc_feature 1..22: note = chemically synthesized
  source 1..22: mol_type = other DNA
tactaccccacacacatgggca

SEQ ID NO: 123150 - DNA, 22 bp, synthetic construct
  misc_feature 1..22: note = chemically synthesized
  source 1..22: mol_type = other DNA
ctaccccacacacatgggcata

SEQ ID NO: 123151 - DNA, 22 bp, synthetic construct
  misc_feature 1..22: note = chemically synthesized
  source 1..22: mol_type = other DNA
ccccacacacatgggcatacat

SEQ ID NO: 123152 - DNA, 22 bp, synthetic construct
  misc_feature 1..22: note = chemically synthesized
  source 1..22: mol_type = other DNA
cttctatcatgttggcctcatt

SEQ ID NO: 123153 - DNA, 22 bp, synthetic construct
  misc_feature 1..22: note = chemically synthesized
  source 1..22: mol_type = other DNA
ttctatcatgttggcctcattc

SEQ ID NO: 123154 - DNA, 22 bp, synthetic construct
  misc_feature 1..22: note = chemically synthesized
  source 1..22: mol_type = other DNA
ctatcatgttggcctcattcag

SEQ ID NO: 123155 - DNA, 22 bp, synthetic construct
  misc_feature 1..22: note = chemically synthesized
  source 1..22: mol_type = other DNA
tatcatgttggcctcattcagt

SEQ ID NO: 123156 - DNA, 22 bp, synthetic construct
  misc_feature 1..22: note = chemically synthesized
  source 1..22: mol_type = other DNA
tcatgttggcctcattcagtac

SEQ ID NO: 123157 - DNA, 22 bp, synthetic construct
  misc_feature 1..22: note = chemically synthesized
  source 1..22: mol_type = other DNA
gcctcattcagtacagtactag

SEQ ID NO: 123158 - DNA, 22 bp, synthetic construct
  misc_feature 1..22: note = chemically synthesized
  source 1..22: mol_type = other DNA
attcagtacagtactagaaaat

SEQ ID NO: 123159 - DNA, 22 bp, synthetic construct
  misc_feature 1..22: note = chemically synthesized
  source 1..22: mol_type = other DNA
agtacagtactagaaaatcagt

SEQ ID NO: 123160 - DNA, 22 bp, synthetic construct
  misc_feature 1..22: note = chemically synthesized
  source 1..22: mol_type = other DNA
gaaaatcagtagggactcaggt

SEQ ID NO: 123161 - DNA, 22 bp, synthetic construct
  misc_feature 1..22: note = chemically synthesized
  source 1..22: mol_type = other DNA
aggttatatgtgtgaatggatg

SEQ ID NO: 123162 - DNA, 22 bp, synthetic construct
  misc_feature 1..22: note = chemically synthesized
  source 1..22: mol_type = other DNA
tatgtgtgaatggatgaataaa

SEQ ID NO: 123163 - DNA, 22 bp, synthetic construct
  misc_feature 1..22: note = chemically synthesized
  source 1..22: mol_type = other DNA
tttttaaagacttcatcctttc

SEQ ID NO: 123164 - DNA, 22 bp, synthetic construct
  misc_feature 1..22: note = chemically synthesized
  source 1..22: mol_type = other DNA
ttaaagacttcatcctttctgt

SEQ ID NO: 123165 - DNA, 22 bp, synthetic construct
  misc_feature 1..22: note = chemically synthesized
  source 1..22: mol_type = other DNA
taaagacttcatcctttctgta

SEQ ID NO: 123166 - DNA, 22 bp, synthetic construct
  misc_feature 1..22: note = chemically synthesized
  source 1..22: mol_type = other DNA
aaagacttcatcctttctgtat

SEQ ID NO: 123167 - DNA, 22 bp, synthetic construct
  misc_feature 1..22: note = chemically synthesized
  source 1..22: mol_type = other DNA
aagacttcatcctttctgtatg

SEQ ID NO: 123168 - DNA, 22 bp, synthetic construct
  misc_feature 1..22: note = chemically synthesized
  source 1..22: mol_type = other DNA
catcctttctgtatgtctaacc

SEQ ID NO: 123169 - DNA, 22 bp, synthetic construct
  misc_feature 1..22: note = chemically synthesized
  source 1..22: mol_type = other DNA
atcctttctgtatgtctaacct

SEQ ID NO: 123170 - DNA, 22 bp, synthetic construct
  misc_feature 1..22: note = chemically synthesized
  source 1..22: mol_type = other DNA
tctgtatgtctaaccttagatt

SEQ ID NO: 123171 - DNA, 22 bp, synthetic construct
  misc_feature 1..22: note = chemically synthesized
  source 1..22: mol_type = other DNA
ctgtatgtctaaccttagattc

SEQ ID NO: 123172 - DNA, 22 bp, synthetic construct
  misc_feature 1..22: note = chemically synthesized
  source 1..22: mol_type = other DNA
tgtatgtctaaccttagattct

SEQ ID NO: 123173 - DNA, 22 bp, synthetic construct
  misc_feature 1..22: note = chemically synthesized
  source 1..22: mol_type = other DNA
tatgtctaaccttagattctag

SEQ ID NO: 123174 - DNA, 22 bp, synthetic construct
  misc_feature 1..22: note = chemically synthesized
  source 1..22: mol_type = other DNA
accttagattctagtcatggcc

SEQ ID NO: 123175 - DNA, 22 bp, synthetic construct
  misc_feature 1..22: note = chemically synthesized
  source 1..22: mol_type = other DNA
agattctagtcatggccatatg

SEQ ID NO: 123176 - DNA, 22 bp, synthetic construct
  misc_feature 1..22: note = chemically synthesized
  source 1..22: mol_type = other DNA
gattctagtcatggccatatgt

SEQ ID NO: 123177 - DNA, 22 bp, synthetic construct
  misc_feature 1..22: note = chemically synthesized
  source 1..22: mol_type = other DNA
tagtcatggccatatgtctcta

SEQ ID NO: 123178 - DNA, 22 bp, synthetic construct
  misc_feature 1..22: note = chemically synthesized
  source 1..22: mol_type = other DNA
gtcatggccatatgtctctagg

SEQ ID NO: 123179 - DNA, 22 bp, synthetic construct
  misc_feature 1..22: note = chemically synthesized
  source 1..22: mol_type = other DNA
taggtggcccaaccaccctatc

SEQ ID NO: 123180 - DNA, 22 bp, synthetic construct
  misc_feature 1..22: note = chemically synthesized
  source 1..22: mol_type = other DNA
ggtggcccaaccaccctatcac

SEQ ID NO: 123181 - DNA, 22 bp, synthetic construct
  misc_feature 1..22: note = chemically synthesized
  source 1..22: mol_type = other DNA
tcacagattctgcttcaaaggc

SEQ ID NO: 123182 - DNA, 22 bp, synthetic construct
  misc_feature 1..22: note = chemically synthesized
  source 1..22: mol_type = other DNA
tgcttcaaaggcactcatcttg

SEQ ID NO: 123183 - DNA, 22 bp, synthetic construct
  misc_feature 1..22: note = chemically synthesized
  source 1..22: mol_type = other DNA
cttcaaaggcactcatcttggt

SEQ ID NO: 123184 - DNA, 22 bp, synthetic construct
  misc_feature 1..22: note = chemically synthesized
  source 1..22: mol_type = other DNA
caaaggcactcatcttggtgaa

SEQ ID NO: 123185 - DNA, 22 bp, synthetic construct
  misc_feature 1..22: note = chemically synthesized
  source 1..22: mol_type = other DNA
aaaggcactcatcttggtgaat

SEQ ID NO: 123186 - DNA, 22 bp, synthetic construct
  misc_feature 1..22: note = chemically synthesized
  source 1..22: mol_type = other DNA
atcttggtgaatgaatatctag

SEQ ID NO: 123187 - DNA, 22 bp, synthetic construct
  misc_feature 1..22: note = chemically synthesized
  source 1..22: mol_type = other DNA
ggtgaatgaatatctagtccca

SEQ ID NO: 123188 - DNA, 22 bp, synthetic construct
  misc_feature 1..22: note = chemically synthesized
  source 1..22: mol_type = other DNA
gtgaatgaatatctagtcccag

SEQ ID NO: 123189 - DNA, 22 bp, synthetic construct
  misc_feature 1..22: note = chemically synthesized
  source 1..22: mol_type = other DNA
gtcccagaaggaggctaaaaac

SEQ ID NO: 123190 - DNA, 22 bp, synthetic construct
  misc_feature 1..22: note = chemically synthesized
  source 1..22: mol_type = other DNA
aaaactatcttgtccacatcta

SEQ ID NO: 123191 - DNA, 22 bp, synthetic construct
  misc_feature 1..22: note = chemically synthesized
  source 1..22: mol_type = other DNA
tcttgtccacatctagttggct

SEQ ID NO: 123192 - DNA, 22 bp, synthetic construct
  misc_feature 1..22: note = chemically synthesized
  source 1..22: mol_type = other DNA
gtccacatctagttggctgaca

SEQ ID NO: 123193 - DNA, 22 bp, synthetic construct
  misc_feature 1..22: note = chemically synthesized
  source 1..22: mol_type = other DNA
tccacatctagttggctgacac

SEQ ID NO: 123194 - DNA, 22 bp, synthetic construct
  misc_feature 1..22: note = chemically synthesized
  source 1..22: mol_type = other DNA
gttggctgacacacaatttagg

SEQ ID NO: 123195 - DNA, 22 bp, synthetic construct
  misc_feature 1..22: note = chemically synthesized
  source 1..22: mol_type = other DNA
gctgacacacaatttaggcttc

SEQ ID NO: 123196 - DNA, 22 bp, synthetic construct
  misc_feature 1..22: note = chemically synthesized
  source 1..22: mol_type = other DNA
acacacaatttaggcttcttgg

SEQ ID NO: 123197 - DNA, 22 bp, synthetic construct
  misc_feature 1..22: note = chemically synthesized
  source 1..22: mol_type = other DNA
aggcttcttgggtgtaatcaga

SEQ ID NO: 123198 - DNA, 22 bp, synthetic construct
  misc_feature 1..22: note = chemically synthesized
  source 1..22: mol_type = other DNA
ggcttcttgggtgtaatcagat

SEQ ID NO: 123199 - DNA, 22 bp, synthetic construct
  misc_feature 1..22: note = chemically synthesized
  source 1..22: mol_type = other DNA
cttgggtgtaatcagatctgta

SEQ ID NO: 123200 - DNA, 22 bp, synthetic construct
  misc_feature 1..22: note = chemically synthesized
  source 1..22: mol_type = other DNA
ttgggtgtaatcagatctgtaa

SEQ ID NO: 123201 - DNA, 22 bp, synthetic construct
  misc_feature 1..22: note = chemically synthesized
  source 1..22: mol_type = other DNA
gggtgtaatcagatctgtaagc

SEQ ID NO: 123202 - DNA, 22 bp, synthetic construct
  misc_feature 1..22: note = chemically synthesized
  source 1..22: mol_type = other DNA
ggtgtaatcagatctgtaagca

SEQ ID NO: 123203 - DNA, 22 bp, synthetic construct
  misc_feature 1..22: note = chemically synthesized
  source 1..22: mol_type = other DNA
taagcatgatccggaaagaaaa

SEQ ID NO: 123204 - DNA, 22 bp, synthetic construct
  misc_feature 1..22: note = chemically synthesized
  source 1..22: mol_type = other DNA
ctgaacagaggcttccaacatc

SEQ ID NO: 123205 - DNA, 22 bp, synthetic construct
  misc_feature 1..22: note = chemically synthesized
  source 1..22: mol_type = other DNA
aacagaggcttccaacatcctc

SEQ ID NO: 123206 - DNA, 22 bp, synthetic construct
  misc_feature 1..22: note = chemically synthesized
  source 1..22: mol_type = other DNA
ccaacatcctcagaaggaaacc

SEQ ID NO: 123207 - DNA, 22 bp, synthetic construct
  misc_feature 1..22: note = chemically synthesized
  source 1..22: mol_type = other DNA
caacatcctcagaaggaaacct

SEQ ID NO: 123208 - DNA, 22 bp, synthetic construct
  misc_feature 1..22: note = chemically synthesized
  source 1..22: mol_type = other DNA
agaaggaaacctctcttaatcc

SEQ ID NO: 123209 - DNA, 22 bp, synthetic construct
  misc_feature 1..22: note = chemically synthesized
  source 1..22: mol_type = other DNA
tcttaatccacataagaatggt

SEQ ID NO: 123210 - DNA, 22 bp, synthetic construct
  misc_feature 1..22: note = chemically synthesized
  source 1..22: mol_type = other DNA
ttaatccacataagaatggtgt

SEQ ID NO: 123211 - DNA, 22 bp, synthetic construct
  misc_feature 1..22: note = chemically synthesized
  source 1..22: mol_type = other DNA
aatccacataagaatggtgtaa

SEQ ID NO: 123212 - DNA, 22 bp, synthetic construct
  misc_feature 1..22: note = chemically synthesized
  source 1..22: mol_type = other DNA
atccacataagaatggtgtaaa

SEQ ID NO: 123213 - DNA, 22 bp, synthetic construct
  misc_feature 1..22: note = chemically synthesized
  source 1..22: mol_type = other DNA
caacatcttgctcctaagaaca

SEQ ID NO: 123214 - DNA, 22 bp, synthetic construct
  misc_feature 1..22: note = chemically synthesized
  source 1..22: mol_type = other DNA
gctcctaagaacactttgccct

SEQ ID NO: 123215 - DNA, 22 bp, synthetic construct
  misc_feature 1..22: note = chemically synthesized
  source 1..22: mol_type = other DNA
ctcctaagaacactttgccctg

SEQ ID NO: 123216 - DNA, 22 bp, synthetic construct
  misc_feature 1..22: note = chemically synthesized
  source 1..22: mol_type = other DNA
ctaagaacactttgccctgggg

SEQ ID NO: 123217 - DNA, 22 bp, synthetic construct
  misc_feature 1..22: note = chemically synthesized
  source 1..22: mol_type = other DNA
agaacactttgccctgggggaa

SEQ ID NO: 123218 - DNA, 22 bp, synthetic construct
  misc_feature 1..22: note = chemically synthesized
  source 1..22: mol_type = other DNA
tgccctgggggaaaaaaagaaa

SEQ ID NO: 123219 - DNA, 22 bp, synthetic construct
  misc_feature 1..22: note = chemically synthesized
  source 1..22: mol_type = other DNA
gccctgggggaaaaaaagaaaa

SEQ ID NO: 123220 - DNA, 22 bp, synthetic construct
  misc_feature 1..22: note = chemically synthesized
  source 1..22: mol_type = other DNA
ccctgggggaaaaaaagaaaag

SEQ ID NO: 123221 - DNA, 22 bp, synthetic construct
  misc_feature 1..22: note = chemically synthesized
  source 1..22: mol_type = other DNA
ggggaaaaaaagaaaagccatc

SEQ ID NO: 123222 - DNA, 22 bp, synthetic construct
  misc_feature 1..22: note = chemically synthesized
  source 1..22: mol_type = other DNA
tcagaaggcctatgctgaggtt

SEQ ID NO: 123223 - DNA, 22 bp, synthetic construct
  misc_feature 1..22: note = chemically synthesized
  source 1..22: mol_type = other DNA
cagaaggcctatgctgaggttt

SEQ ID NO: 123224 - DNA, 22 bp, synthetic construct
  misc_feature 1..22: note = chemically synthesized
  source 1..22: mol_type = other DNA
agaaggcctatgctgaggtttt

SEQ ID NO: 123225 - DNA, 22 bp, synthetic construct
  misc_feature 1..22: note = chemically synthesized
  source 1..22: mol_type = other DNA
tgctgaggttttgcttccttca

SEQ ID NO: 123226 - DNA, 22 bp, synthetic construct
  misc_feature 1..22: note = chemically synthesized
  source 1..22: mol_type = other DNA
aggttttgcttccttcagtttt

SEQ ID NO: 123227 - DNA, 22 bp, synthetic construct
  misc_feature 1..22: note = chemically synthesized
  source 1..22: mol_type = other DNA
tgcttccttcagttttaaagca

SEQ ID NO: 123228 - DNA, 22 bp, synthetic construct
  misc_feature 1..22: note = chemically synthesized
  source 1..22: mol_type = other DNA
gcttccttcagttttaaagcat

SEQ ID NO: 123229 - DNA, 22 bp, synthetic construct
  misc_feature 1..22: note = chemically synthesized
  source 1..22: mol_type = other DNA
cttccttcagttttaaagcata

SEQ ID NO: 123230 - DNA, 22 bp, synthetic construct
  misc_feature 1..22: note = chemically synthesized
  source 1..22: mol_type = other DNA
ccttcagttttaaagcataata

SEQ ID NO: 123231 - DNA, 22 bp, synthetic construct
  misc_feature 1..22: note = chemically synthesized
  source 1..22: mol_type = other DNA
cttcagttttaaagcataatat

SEQ ID NO: 123232 - DNA, 22 bp, synthetic construct
  misc_feature 1..22: note = chemically synthesized
  source 1..22: mol_type = other DNA
cagttttaaagcataatatttt

SEQ ID NO: 123233 - DNA, 22 bp, synthetic construct
  misc_feature 1..22: note = chemically synthesized
  source 1..22: mol_type = other DNA
agttttaaagcataatattttg

SEQ ID NO: 123234 - DNA, 22 bp, synthetic construct
  misc_feature 1..22: note = chemically synthesized
  source 1..22: mol_type = other DNA
taaagcataatattttgagtaa

SEQ ID NO: 123235 - DNA, 22 bp, synthetic construct
  misc_feature 1..22: note = chemically synthesized
  source 1..22: mol_type = other DNA
aaagcataatattttgagtaac

SEQ ID NO: 123236 - DNA, 22 bp, synthetic construct
  misc_feature 1..22: note = chemically synthesized
  source 1..22: mol_type = other DNA
aagcataatattttgagtaact

SEQ ID NO: 123237 - DNA, 22 bp, synthetic construct
  misc_feature 1..22: note = chemically synthesized
  source 1..22: mol_type = other DNA
tgagtaactcaatgtttagaaa

SEQ ID NO: 123238 - DNA, 22 bp, synthetic construct
  misc_feature 1..22: note = chemically synthesized
  source 1..22: mol_type = other DNA
gagtaactcaatgtttagaaac

SEQ ID NO: 123239 - DNA, 22 bp, synthetic construct
  misc_feature 1..22: note = chemically synthesized
  source 1..22: mol_type = other DNA
agtaactcaatgtttagaaacc

SEQ ID NO: 123240 - DNA, 22 bp, synthetic construct
  misc_feature 1..22: note = chemically synthesized
  source 1..22: mol_type = other DNA
aatgtttagaaacctcaaattt

SEQ ID NO: 123241 - DNA, 22 bp, synthetic construct
  misc_feature 1..22: note = chemically synthesized
  source 1..22: mol_type = other DNA
agaaacctcaaattttgctctt

SEQ ID NO: 123242 - DNA, 22 bp, synthetic construct
  misc_feature 1..22: note = chemically synthesized
  source 1..22: mol_type = other DNA
gaaacctcaaattttgctcttg

SEQ ID NO: 123243 - DNA, 22 bp, synthetic construct
  misc_feature 1..22: note = chemically synthesized
  source 1..22: mol_type = other DNA
aaattttgctcttgacagataa

SEQ ID NO: 123244 - DNA, 22 bp, synthetic construct
  misc_feature 1..22: note = chemically synthesized
  source 1..22: mol_type = other DNA
tgctcttgacagataaaactga

SEQ ID NO: 123245 - DNA, 22 bp, synthetic construct
  misc_feature 1..22: note = chemically synthesized
  source 1..22: mol_type = other DNA
gctcttgacagataaaactgaa

SEQ ID NO: 123246 - DNA, 22 bp, synthetic construct
  misc_feature 1..22: note = chemically synthesized
  source 1..22: mol_type = other DNA
ctcttgacagataaaactgaaa

SEQ ID NO: 123247 - DNA, 22 bp, synthetic construct
  misc_feature 1..22: note = chemically synthesized
  source 1..22: mol_type = other DNA
ttgacagataaaactgaaacct

SEQ ID NO: 123248 - DNA, 22 bp, synthetic construct
  misc_feature 1..22: note = chemically synthesized
  source 1..22: mol_type = other DNA
gacagataaaactgaaacctct

SEQ ID NO: 123249 - DNA, 22 bp, synthetic construct
  misc_feature 1..22: note = chemically synthesized
  source 1..22: mol_type = other DNA
acagataaaactgaaacctcta

SEQ ID NO: 123250 - DNA, 22 bp, synthetic construct
  misc_feature 1..22: note = chemically synthesized
  source 1..22: mol_type = other DNA
aaacctctactatgctctgctt

SEQ ID NO: 123251 - DNA, 22 bp, synthetic construct
  misc_feature 1..22: note = chemically synthesized
  source 1..22: mol_type = other DNA
tactatgctctgctttctcaca

SEQ ID NO: 123252 - DNA, 22 bp, synthetic construct
  misc_feature 1..22: note = chemically synthesized
  source 1..22: mol_type = other DNA
ctatgctctgctttctcacagg

SEQ ID NO: 123253 - DNA, 22 bp, synthetic construct
  misc_feature 1..22: note = chemically synthesized
  source 1..22: mol_type = other DNA
tgctctgctttctcacaggatg

SEQ ID NO: 123254 - DNA, 22 bp, synthetic construct
  misc_feature 1..22: note = chemically synthesized
  source 1..22: mol_type = other DNA
tgctttctcacaggatgcatgt

SEQ ID NO: 123255 - DNA, 22 bp, synthetic construct
  misc_feature 1..22: note = chemically synthesized
  source 1..22: mol_type = other DNA
ctttctcacaggatgcatgtga

SEQ ID NO: 123256 - DNA, 22 bp, synthetic construct
  misc_feature 1..22: note = chemically synthesized
  source 1..22: mol_type = other DNA
tctcacaggatgcatgtgagaa

SEQ ID NO: 123257 - DNA, 22 bp, synthetic construct
  misc_feature 1..22: note = chemically synthesized
  source 1..22: mol_type = other DNA
ctcacaggatgcatgtgagaat

SEQ ID NO: 123258 - DNA, 22 bp, synthetic construct
  misc_feature 1..22: note = chemically synthesized
  source 1..22: mol_type = other DNA
tcacaggatgcatgtgagaata

SEQ ID NO: 123259 - DNA, 22 bp, synthetic construct
  misc_feature 1..22: note = chemically synthesized
  source 1..22: mol_type = other DNA
acaggatgcatgtgagaataaa

SEQ ID NO: 123260 - DNA, 22 bp, synthetic construct
  misc_feature 1..22: note = chemically synthesized
  source 1..22: mol_type = other DNA
tatgttagaatatcttgtgtaa

SEQ ID NO: 123261 - DNA, 22 bp, synthetic construct
  misc_feature 1..22: note = chemically synthesized
  source 1..22: mol_type = other DNA
atgttagaatatcttgtgtaac

SEQ ID NO: 123262 - DNA, 22 bp, synthetic construct
  misc_feature 1..22: note = chemically synthesized
  source 1..22: mol_type = other DNA
tgttagaatatcttgtgtaact

SEQ ID NO: 123263 - DNA, 22 bp, synthetic construct
  misc_feature 1..22: note = chemically synthesized
  source 1..22: mol_type = other DNA
gaatatcttgtgtaacttcaag

SEQ ID NO: 123264 - DNA, 22 bp, synthetic construct
  misc_feature 1..22: note = chemically synthesized
  source 1..22: mol_type = other DNA
gtgtaacttcaagtattacgat

SEQ ID NO: 123265 - DNA, 22 bp, synthetic construct
  misc_feature 1..22: note = chemically synthesized
  source 1..22: mol_type = other DNA
tgtaacttcaagtattacgatt

SEQ ID NO: 123266 - DNA, 22 bp, synthetic construct
  misc_feature 1..22: note = chemically synthesized
  source 1..22: mol_type = other DNA
caagtattacgattgtgagaga

SEQ ID NO: 123267 - DNA, 22 bp, synthetic construct
  misc_feature 1..22: note = chemically synthesized
  source 1..22: mol_type = other DNA
aagtattacgattgtgagagag

SEQ ID NO: 123268 - DNA, 22 bp, synthetic construct
  misc_feature 1..22: note = chemically synthesized
  source 1..22: mol_type = other DNA
cgattgtgagagagctttttaa

SEQ ID NO: 123269 - DNA, 22 bp, synthetic construct
  misc_feature 1..22: note = chemically synthesized
  source 1..22: mol_type = other DNA
tgagagagctttttaaaggttt

SEQ ID NO: 123270 - DNA, 22 bp, synthetic construct
  misc_feature 1..22: note = chemically synthesized
  source 1..22: mol_type = other DNA
tttaaaggtttttattttcttt

SEQ ID NO: 123271 - DNA, 22 bp, synthetic construct
  misc_feature 1..22: note = chemically synthesized
  source 1..22: mol_type = other DNA
ttaaaggtttttattttctttg

SEQ ID NO: 123272 - DNA, 22 bp, synthetic construct
  misc_feature 1..22: note = chemically synthesized
  source 1..22: mol_type = other DNA
taaaggtttttattttctttgt

SEQ ID NO: 123273 - DNA, 22 bp, synthetic construct
  misc_feature 1..22: note = chemically synthesized
  source 1..22: mol_type = other DNA
aaaggtttttattttctttgtc

SEQ ID NO: 123274 - DNA, 22 bp, synthetic construct
  misc_feature 1..22: note = chemically synthesized
  source 1..22: mol_type = other DNA
aaggtttttattttctttgtca

SEQ ID NO: 123275 - DNA, 22 bp, synthetic construct
  misc_feature 1..22: note = chemically synthesized
  source 1..22: mol_type = other DNA
ttattttctttgtcagagctag

SEQ ID NO: 123276 - DNA, 22 bp, synthetic construct
  misc_feature 1..22: note = chemically synthesized
  source 1..22: mol_type = other DNA
tattttctttgtcagagctaga

SEQ ID NO: 123277 - DNA, 22 bp, synthetic construct
  misc_feature 1..22: note = chemically synthesized
  source 1..22: mol_type = other DNA
attttctttgtcagagctagac

SEQ ID NO: 123278 - DNA, 22 bp, synthetic construct
  misc_feature 1..22: note = chemically synthesized
  source 1..22: mol_type = other DNA
ttttctttgtcagagctagaca

SEQ ID NO: 123279 - DNA, 22 bp, synthetic construct
  misc_feature 1..22: note = chemically synthesized
  source 1..22: mol_type = other DNA
tctttgtcagagctagacagag

SEQ ID NO: 123280 - DNA, 22 bp, synthetic construct
  misc_feature 1..22: note = chemically synthesized
  source 1..22: mol_type = other DNA
ctttgtcagagctagacagagt

SEQ ID NO: 123281 - DNA, 22 bp, synthetic construct
  misc_feature 1..22: note = chemically synthesized
  source 1..22: mol_type = other DNA
tttgtcagagctagacagagta

SEQ ID NO: 123282 - DNA, 22 bp, synthetic construct
  misc_feature 1..22: note = chemically synthesized
  source 1..22: mol_type = other DNA
tgtcagagctagacagagtatc

SEQ ID NO: 123283 - DNA, 22 bp, synthetic construct
  misc_feature 1..22: note = chemically synthesized
  source 1..22: mol_type = other DNA
gtcagagctagacagagtatct

SEQ ID NO: 123284 - DNA, 22 bp, synthetic construct
  misc_feature 1..22: note = chemically synthesized
  source 1..22: mol_type = other DNA
tcagagctagacagagtatctt

SEQ ID NO: 123285 - DNA, 22 bp, synthetic construct
  misc_feature 1..22: note = chemically synthesized
  source 1..22: mol_type = other DNA
gacagagtatcttctcagccca

SEQ ID NO: 123286 - DNA, 22 bp, synthetic construct
  misc_feature 1..22: note = chemically synthesized
  source 1..22: mol_type = other DNA
ctcagcccaaaggtcaaattgt

SEQ ID NO: 123287 - DNA, 22 bp, synthetic construct
  misc_feature 1..22: note = chemically synthesized
  source 1..22: mol_type = other DNA
tcagcccaaaggtcaaattgtc

SEQ ID NO: 123288 - DNA, 22 bp, synthetic construct
  misc_feature 1..22: note = chemically synthesized
  source 1..22: mol_type = other DNA
agcccaaaggtcaaattgtctc

SEQ ID NO: 123289 - DNA, 22 bp, synthetic construct
  misc_feature 1..22: note = chemically synthesized
  source 1..22: mol_type = other DNA
tctcattttcacaaaattttca

SEQ ID NO: 123290 - DNA, 22 bp, synthetic construct
  misc_feature 1..22: note = chemically synthesized
  source 1..22: mol_type = other DNA
attttcacaaaattttcaatga

SEQ ID NO: 123291 - DNA, 22 bp, synthetic construct
  misc_feature 1..22: note = chemically synthesized
  source 1..22: mol_type = other DNA
tcacaaaattttcaatgatgat

SEQ ID NO: 123292 - DNA, 22 bp, synthetic construct
  misc_feature 1..22: note = chemically synthesized
  source 1..22: mol_type = other DNA
cacaaaattttcaatgatgatt

SEQ ID NO: 123293 - DNA, 22 bp, synthetic construct
  misc_feature 1..22: note = chemically synthesized
  source 1..22: mol_type = other DNA
acaaaattttcaatgatgatta

SEQ ID NO: 123294 - DNA, 22 bp, synthetic construct
  misc_feature 1..22: note = chemically synthesized
  source 1..22: mol_type = other DNA
tcaatgatgattatagtaataa

SEQ ID NO: 123295 - DNA, 22 bp, synthetic construct
  misc_feature 1..22: note = chemically synthesized
  source 1..22: mol_type = other DNA
caatgatgattatagtaataat

SEQ ID NO: 123296 - DNA, 22 bp, synthetic construct
  misc_feature 1..22: note = chemically synthesized
  source 1..22: mol_type = other DNA
aatgatgattatagtaataata

SEQ ID NO: 123297 - DNA, 22 bp, synthetic construct
  misc_feature 1..22: note = chemically synthesized
  source 1..22: mol_type = other DNA
tagtaataatagcaatgatttc

SEQ ID NO: 123298 - DNA, 22 bp, synthetic construct
  misc_feature 1..22: note = chemically synthesized
  source 1..22: mol_type = other DNA
ctataatacttacaatggacca

SEQ ID NO: 123299 - DNA, 22 bp, synthetic construct
  misc_feature 1..22: note = chemically synthesized
  source 1..22: mol_type = other DNA
tataatacttacaatggaccag

SEQ ID NO: 123300 - DNA, 22 bp, synthetic construct
  misc_feature 1..22: note = chemically synthesized
  source 1..22: mol_type = other DNA
taatacttacaatggaccaggc

SEQ ID NO: 123301 - DNA, 22 bp, synthetic construct
  misc_feature 1..22: note = chemically synthesized
  source 1..22: mol_type = other DNA
acaatggaccaggcactattga

SEQ ID NO: 123302 - DNA, 22 bp, synthetic construct
  misc_feature 1..22: note = chemically synthesized
  source 1..22: mol_type = other DNA
caatggaccaggcactattgaa

SEQ ID NO: 123303 - DNA, 22 bp, synthetic construct
  misc_feature 1..22: note = chemically synthesized
  source 1..22: mol_type = other DNA
ttgaacacgttagacatattaa

SEQ ID NO: 123304 - DNA, 22 bp, synthetic construct
  misc_feature 1..22: note = chemically synthesized
  source 1..22: mol_type = other DNA
aacacgttagacatattaatgt

SEQ ID NO: 123305 - DNA, 22 bp, synthetic construct
  misc_feature 1..22: note = chemically synthesized
  source 1..22: mol_type = other DNA
gacatattaatgtatttaatca

SEQ ID NO: 123306 - DNA, 22 bp, synthetic construct
  misc_feature 1..22: note = chemically synthesized
  source 1..22: mol_type = other DNA
atgtatttaatcattaaaataa

SEQ ID NO: 123307 - DNA, 22 bp, synthetic construct
  misc_feature 1..22: note = chemically synthesized
  source 1..22: mol_type = other DNA
aatcattaaaataattcaacca

SEQ ID NO: 123308 - DNA, 22 bp, synthetic construct
  misc_feature 1..22: note = chemically synthesized
  source 1..22: mol_type = other DNA
atcattaaaataattcaaccat

SEQ ID NO: 123309 - DNA, 22 bp, synthetic construct
  misc_feature 1..22: note = chemically synthesized
  source 1..22: mol_type = other DNA
aaataattcaaccatgtgggta

SEQ ID NO: 123310 - DNA, 22 bp, synthetic construct
  misc_feature 1..22: note = chemically synthesized
  source 1..22: mol_type = other DNA
aaccatgtgggtactattggta

SEQ ID NO: 123311 - DNA, 22 bp, synthetic construct
  misc_feature 1..22: note = chemically synthesized
  source 1..22: mol_type = other DNA
ttggtatccccacttaaagatg

SEQ ID NO: 123312 - DNA, 22 bp, synthetic construct
  misc_feature 1..22: note = chemically synthesized
  source 1..22: mol_type = other DNA
gtatccccacttaaagatgagt

SEQ ID NO: 123313 - DNA, 22 bp, synthetic construct
  misc_feature 1..22: note = chemically synthesized
  source 1..22: mol_type = other DNA
aaagatgagtggaccaaaacac

SEQ ID NO: 123314 - DNA, 22 bp, synthetic construct
  misc_feature 1..22: note = chemically synthesized
  source 1..22: mol_type = other DNA
aagatgagtggaccaaaacaca

SEQ ID NO: 123315 - DNA, 22 bp, synthetic construct
  misc_feature 1..22: note = chemically synthesized
  source 1..22: mol_type = other DNA
ctttgctatagggtacgcagcc

SEQ ID NO: 123316 - DNA, 22 bp, synthetic construct
  misc_feature 1..22: note = chemically synthesized
  source 1..22: mol_type = other DNA
tgctatagggtacgcagccaat

SEQ ID NO: 123317 - DNA, 22 bp, synthetic construct
  misc_feature 1..22: note = chemically synthesized
  source 1..22: mol_type = other DNA
gctatagggtacgcagccaata

SEQ ID NO: 123318 - DNA, 22 bp, synthetic construct
  misc_feature 1..22: note = chemically synthesized
  source 1..22: mol_type = other DNA
ctatagggtacgcagccaataa

SEQ ID NO: 123319 - DNA, 22 bp, synthetic construct
  misc_feature 1..22: note = chemically synthesized
  source 1..22: mol_type = other DNA
tagggtacgcagccaataagtg

SEQ ID NO: 123320 - DNA, 22 bp, synthetic construct
  misc_feature 1..22: note = chemically synthesized
  source 1..22: mol_type = other DNA
taaaccaaactgtttaattccc

SEQ ID NO: 123321 - DNA, 22 bp, synthetic construct
  misc_feature 1..22: note = chemically synthesized
  source 1..22: mol_type = other DNA
tttaattcccaaaactactgca

SEQ ID NO: 123322 - DNA, 22 bp, synthetic construct
  misc_feature 1..22: note = chemically synthesized
  source 1..22: mol_type = other DNA
aattcccaaaactactgcataa

SEQ ID NO: 123323 - DNA, 22 bp, synthetic construct
  misc_feature 1..22: note = chemically synthesized
  source 1..22: mol_type = other DNA
attcccaaaactactgcataag

SEQ ID NO: 123324 - DNA, 22 bp, synthetic construct
  misc_feature 1..22: note = chemically synthesized
  source 1..22: mol_type = other DNA
ccaaaactactgcataagactg

SEQ ID NO: 123325 - DNA, 22 bp, synthetic construct
  misc_feature 1..22: note = chemically synthesized
  source 1..22: mol_type = other DNA
ctgcataagactgtatgaagaa

SEQ ID NO: 123326 - DNA, 22 bp, synthetic construct
  misc_feature 1..22: note = chemically synthesized
  source 1..22: mol_type = other DNA
cataagactgtatgaagaagca

SEQ ID NO: 123327 - DNA, 22 bp, synthetic construct
  misc_feature 1..22: note = chemically synthesized
  source 1..22: mol_type = other DNA
tatgaagaagcatgaaacaata

SEQ ID NO: 123328 - DNA, 22 bp, synthetic construct
  misc_feature 1..22: note = chemically synthesized
  source 1..22: mol_type = other DNA
caagaagcctacagaacactta

SEQ ID NO: 123329 - DNA, 22 bp, synthetic construct
  misc_feature 1..22: note = chemically synthesized
  source 1..22: mol_type = other DNA
aagaagcctacagaacacttaa

SEQ ID NO: 123330 - DNA, 22 bp, synthetic construct
  misc_feature 1..22: note = chemically synthesized
  source 1..22: mol_type = other DNA
cagaacacttaacaggattttt

SEQ ID NO: 123331 - DNA, 22 bp, synthetic construct
  misc_feature 1..22: note = chemically synthesized
  source 1..22: mol_type = other DNA
aacaggatttttcatgctggtt

SEQ ID NO: 123332 - DNA, 22 bp, synthetic construct
  misc_feature 1..22: note = chemically synthesized
  source 1..22: mol_type = other DNA
acaggatttttcatgctggttc

SEQ ID NO: 123333 - DNA, 22 bp, synthetic construct
  misc_feature 1..22: note = chemically synthesized
  source 1..22: mol_type = other DNA
ttcatgctggttcatagttaag

SEQ ID NO: 123334 - DNA, 22 bp, synthetic construct
  misc_feature 1..22: note = chemically synthesized
  source 1..22: mol_type = other DNA
tcatgctggttcatagttaagt

SEQ ID NO: 123335 - DNA, 22 bp, synthetic construct
  misc_feature 1..22: note = chemically synthesized
  source 1..22: mol_type = other DNA
catgctggttcatagttaagtt

SEQ ID NO: 123336 - DNA, 22 bp, synthetic construct
  misc_feature 1..22: note = chemically synthesized
  source 1..22: mol_type = other DNA
atgctggttcatagttaagtta

SEQ ID NO: 123337 - DNA, 22 bp, synthetic construct
  misc_feature 1..22: note = chemically synthesized
  source 1..22: mol_type = other DNA
gttcatagttaagttattggtt

SEQ ID NO: 123338 - DNA, 22 bp, synthetic construct
  misc_feature 1..22: note = chemically synthesized
  source 1..22: mol_type = other DNA
atagttaagttattggttgaag

SEQ ID NO: 123339 - DNA, 22 bp, synthetic construct
  misc_feature 1..22: note = chemically synthesized
  source 1..22: mol_type = other DNA
agttattggttgaagatgcaac

SEQ ID NO: 123340 - DNA, 22 bp, synthetic construct
  misc_feature 1..22: note = chemically synthesized
  source 1..22: mol_type = other DNA
ttggttgaagatgcaacaaatc

SEQ ID NO: 123341 - DNA, 22 bp, synthetic construct
  misc_feature 1..22: note = chemically synthesized
  source 1..22: mol_type = other DNA
gttgaagatgcaacaaatctga

SEQ ID NO: 123342 - DNA, 22 bp, synthetic construct
  misc_feature 1..22: note = chemically synthesized
  source 1..22: mol_type = other DNA
aagatgcaacaaatctgaatgg

SEQ ID NO: 123343 - DNA, 22 bp, synthetic construct
  misc_feature 1..22: note = chemically synthesized
  source 1..22: mol_type = other DNA
aatggcagaggaaaaaacaaag

SEQ ID NO: 123344 - DNA, 22 bp, synthetic construct
  misc_feature 1..22: note = chemically synthesized
  source 1..22: mol_type = other DNA
tgagtgagcctgggtctccata

SEQ ID NO: 123345 - DNA, 22 bp, synthetic construct
  misc_feature 1..22: note = chemically synthesized
  source 1..22: mol_type = other DNA
agtgagcctgggtctccatagg

SEQ ID NO: 123346 - DNA, 22 bp, synthetic construct
  misc_feature 1..22: note = chemically synthesized
  source 1..22: mol_type = other DNA
ggtctccataggagcaaagaac

SEQ ID NO: 123347 - DNA, 22 bp, synthetic construct
  misc_feature 1..22: note = chemically synthesized
  source 1..22: mol_type = other DNA
cataggagcaaagaaccaagtg

SEQ ID NO: 123348 - DNA, 22 bp, synthetic construct
  misc_feature 1..22: note = chemically synthesized
  source 1..22: mol_type = other DNA
gggttagttgtggggtgtaaga

SEQ ID NO: 123349 - DNA, 22 bp, synthetic construct
  misc_feature 1..22: note = chemically synthesized
  source 1..22: mol_type = other DNA
ggttagttgtggggtgtaagat

SEQ ID NO: 123350 - DNA, 22 bp, synthetic construct
  misc_feature 1..22: note = chemically synthesized
  source 1..22: mol_type = other DNA
gttgtggggtgtaagatataat

SEQ ID NO: 123351 - DNA, 22 bp, synthetic construct
  misc_feature 1..22: note = chemically synthesized
  source 1..22: mol_type = other DNA
tggggtgtaagatataattaga

SEQ ID NO: 123352 - DNA, 22 bp, synthetic construct
  misc_feature 1..22: note = chemically synthesized
  source 1..22: mol_type = other DNA
gaagagaagtagctctactctg

SEQ ID NO: 123353 - DNA, 22 bp, synthetic construct
  misc_feature 1..22: note = chemically synthesized
  source 1..22: mol_type = other DNA
tactctggtagaagtgaaactt

SEQ ID NO: 123354 - DNA, 22 bp, synthetic construct
  misc_feature 1..22: note = chemically synthesized
  source 1..22: mol_type = other DNA
ctctggtagaagtgaaactttg

SEQ ID NO: 123355 - DNA, 22 bp, synthetic construct
  misc_feature 1..22: note = chemically synthesized
  source 1..22: mol_type = other DNA
tggtagaagtgaaactttgaag

SEQ ID NO: 123356 - DNA, 22 bp, synthetic construct
  misc_feature 1..22: note = chemically synthesized
  source 1..22: mol_type = other DNA
gtagaagtgaaactttgaagaa

SEQ ID NO: 123357 - DNA, 22 bp, synthetic construct
  misc_feature 1..22: note = chemically synthesized
  source 1..22: mol_type = other DNA
tgaagaatgtctgattcctcac

SEQ ID NO: 123358 - DNA, 22 bp, synthetic construct
  misc_feature 1..22: note = chemically synthesized
  source 1..22: mol_type = other DNA
gaagaatgtctgattcctcaca

SEQ ID NO: 123359 - DNA, 22 bp, synthetic construct
  misc_feature 1..22: note = chemically synthesized
  source 1..22: mol_type = other DNA
aagaatgtctgattcctcacaa

SEQ ID NO: 123360 - DNA, 22 bp, synthetic construct
  misc_feature 1..22: note = chemically synthesized
  source 1..22: mol_type = other DNA
attcctcacaaactgctgagta

SEQ ID NO: 123361 - DNA, 22 bp, synthetic construct
  misc_feature 1..22: note = chemically synthesized
  source 1..22: mol_type = other DNA
ctcacaaactgctgagtaagga

SEQ ID NO: 123362 - DNA, 22 bp, synthetic construct
  misc_feature 1..22: note = chemically synthesized
  source 1..22: mol_type = other DNA
acaaactgctgagtaaggatag

SEQ ID NO: 123363 - DNA, 22 bp, synthetic construct
  misc_feature 1..22: note = chemically synthesized
  source 1..22: mol_type = other DNA
ctgagtaaggataggaaaatgc

SEQ ID NO: 123364 - DNA, 22 bp, synthetic construct
  misc_feature 1..22: note = chemically synthesized
  source 1..22: mol_type = other DNA
agtaaggataggaaaatgcata

SEQ ID NO: 123365 - DNA, 22 bp, synthetic construct
  misc_feature 1..22: note = chemically synthesized
  source 1..22: mol_type = other DNA
ggtcaagatttaagcatgagga

SEQ ID NO: 123366 - DNA, 22 bp, synthetic construct
  misc_feature 1..22: note = chemically synthesized
  source 1..22: mol_type = other DNA
gtcaagatttaagcatgaggac

SEQ ID NO: 123367 - DNA, 22 bp, synthetic construct
  misc_feature 1..22: note = chemically synthesized
  source 1..22: mol_type = other DNA
aagcatgaggacataaaaatag

SEQ ID NO: 123368 - DNA, 22 bp, synthetic construct
  misc_feature 1..22: note = chemically synthesized
  source 1..22: mol_type = other DNA
agcatgaggacataaaaataga

SEQ ID NO: 123369 - DNA, 22 bp, synthetic construct
  misc_feature 1..22: note = chemically synthesized
  source 1..22: mol_type = other DNA
ttgaatgcatatattgtgcaag

SEQ ID NO: 123370 - DNA, 22 bp, synthetic construct
  misc_feature 1..22: note = chemically synthesized
  source 1..22: mol_type = other DNA
tgaatgcatatattgtgcaagt

SEQ ID NO: 123371 - DNA, 22 bp, synthetic construct
  misc_feature 1..22: note = chemically synthesized
  source 1..22: mol_type = other DNA
gaatgcatatattgtgcaagtg

SEQ ID NO: 123372 - DNA, 22 bp, synthetic construct
  misc_feature 1..22: note = chemically synthesized
  source 1..22: mol_type = other DNA
aatgcatatattgtgcaagtgc

SEQ ID NO: 123373 - DNA, 22 bp, synthetic construct
  misc_feature 1..22: note = chemically synthesized
  source 1..22: mol_type = other DNA
tgcaagtgcctctattctgggt

SEQ ID NO: 123374 - DNA, 22 bp, synthetic construct
  misc_feature 1..22: note = chemically synthesized
  source 1..22: mol_type = other DNA
tattctgggtgctagcatacca

SEQ ID NO: 123375 - DNA, 22 bp, synthetic construct
  misc_feature 1..22: note = chemically synthesized
  source 1..22: mol_type = other DNA
ttctgggtgctagcataccaga

SEQ ID NO: 123376 - DNA, 22 bp, synthetic construct
  misc_feature 1..22: note = chemically synthesized
  source 1..22: mol_type = other DNA
tgggtgctagcataccagaaac

SEQ ID NO: 123377 - DNA, 22 bp, synthetic construct
  misc_feature 1..22: note = chemically synthesized
  source 1..22: mol_type = other DNA
ggtgctagcataccagaaacaa

SEQ ID NO: 123378 - DNA, 22 bp, synthetic construct
  misc_feature 1..22: note = chemically synthesized
  source 1..22: mol_type = other DNA
gcataccagaaacaacattttt

SEQ ID NO: 123379 - DNA, 22 bp, synthetic construct
  misc_feature 1..22: note = chemically synthesized
  source 1..22: mol_type = other DNA
ttgttccttttgtcagaggcat

SEQ ID NO: 123380 - DNA, 22 bp, synthetic construct
  misc_feature 1..22: note = chemically synthesized
  source 1..22: mol_type = other DNA
tgttccttttgtcagaggcatt

SEQ ID NO: 123381 - DNA, 22 bp, synthetic construct
  misc_feature 1..22: note = chemically synthesized
  source 1..22: mol_type = other DNA
gttccttttgtcagaggcattt

SEQ ID NO: 123382 - DNA, 22 bp, synthetic construct
  misc_feature 1..22: note = chemically synthesized
  source 1..22: mol_type = other DNA
ttccttttgtcagaggcatttg

SEQ ID NO: 123383 - DNA, 22 bp, synthetic construct
  misc_feature 1..22: note = chemically synthesized
  source 1..22: mol_type = other DNA
cttttgtcagaggcatttgaac

SEQ ID NO: 123384 - DNA, 22 bp, synthetic construct
  misc_feature 1..22: note = chemically synthesized
  source 1..22: mol_type = other DNA
ttgtcagaggcatttgaaccag

SEQ ID NO: 123385 - DNA, 22 bp, synthetic construct
  misc_feature 1..22: note = chemically synthesized
  source 1..22: mol_type = other DNA
tgtcagaggcatttgaaccaga

SEQ ID NO: 123386 - DNA, 22 bp, synthetic construct
  misc_feature 1..22: note = chemically synthesized
  source 1..22: mol_type = other DNA
gtcagaggcatttgaaccagag

SEQ ID NO: 123387 - DNA, 22 bp, synthetic construct
  misc_feature 1..22: note = chemically synthesized
  source 1..22: mol_type = other DNA
tcagaggcatttgaaccagagc

SEQ ID NO: 123388 - DNA, 22 bp, synthetic construct
  misc_feature 1..22: note = chemically synthesized
  source 1..22: mol_type = other DNA
gaaccagagcaactccatctta

SEQ ID NO: 123389 - DNA, 22 bp, synthetic construct
  misc_feature 1..22: note = chemically synthesized
  source 1..22: mol_type = other DNA
aaccagagcaactccatcttaa

SEQ ID NO: 123390 - DNA, 22 bp, synthetic construct
  misc_feature 1..22: note = chemically synthesized
  source 1..22: mol_type = other DNA
catcttaaataggagctgggta

SEQ ID NO: 123391 - DNA, 22 bp, synthetic construct
  misc_feature 1..22: note = chemically synthesized
  source 1..22: mol_type = other DNA
aaataggagctgggtacaataa

SEQ ID NO: 123392 - DNA, 22 bp, synthetic construct
  misc_feature 1..22: note = chemically synthesized
  source 1..22: mol_type = other DNA
aataggagctgggtacaataag

SEQ ID NO: 123393 - DNA, 22 bp, synthetic construct
  misc_feature 1..22: note = chemically synthesized
  source 1..22: mol_type = other DNA
ggtacaataaggctgagaccta

SEQ ID NO: 123394 - DNA, 22 bp, synthetic construct
  misc_feature 1..22: note = chemically synthesized
  source 1..22: mol_type = other DNA
agacctactgggctgtattccc

SEQ ID NO: 123395 - DNA, 22 bp, synthetic construct
  misc_feature 1..22: note = chemically synthesized
  source 1..22: mol_type = other DNA
ctgggctgtattcccagaaagt

SEQ ID NO: 123396 - DNA, 22 bp, synthetic construct
  misc_feature 1..22: note = chemically synthesized
  source 1..22: mol_type = other DNA
ggctgtattcccagaaagttag

SEQ ID NO: 123397 - DNA, 22 bp, synthetic construct
  misc_feature 1..22: note = chemically synthesized
  source 1..22: mol_type = other DNA
tattcccagaaagttaggcatt

SEQ ID NO: 123398 - DNA, 22 bp, synthetic construct
  misc_feature 1..22: note = chemically synthesized
  source 1..22: mol_type = other DNA
ccagaaagttaggcattctcag

SEQ ID NO: 123399 - DNA, 22 bp, synthetic construct
  misc_feature 1..22: note = chemically synthesized
  source 1..22: mol_type = other DNA
ggcattctcagtcacaggatga

SEQ ID NO: 123400 - DNA, 22 bp, synthetic construct
  misc_feature 1..22: note = chemically synthesized
  source 1..22: mol_type = other DNA
tcagtcacaggatgagataaga

SEQ ID NO: 123401 - DNA, 22 bp, synthetic construct
  misc_feature 1..22: note = chemically synthesized
  source 1..22: mol_type = other DNA
agtcacaggatgagataagagg

SEQ ID NO: 123402 - DNA, 22 bp, synthetic construct
  misc_feature 1..22: note = chemically synthesized
  source 1..22: mol_type = other DNA
gcacaagatacaggtcataaag

SEQ ID NO: 123403 - DNA, 22 bp, synthetic construct
  misc_feature 1..22: note = chemically synthesized
  source 1..22: mol_type = other DNA
gctgaaaaaacagtttgcagta

SEQ ID NO: 123404 - DNA, 22 bp, synthetic construct
  misc_feature 1..22: note = chemically synthesized
  source 1..22: mol_type = other DNA
ctgaaaaaacagtttgcagtaa

SEQ ID NO: 123405 - DNA, 22 bp, synthetic construct
  misc_feature 1..22: note = chemically synthesized
  source 1..22: mol_type = other DNA
aaaaaacagtttgcagtaaaga

SEQ ID NO: 123406 - DNA, 22 bp, synthetic construct
  misc_feature 1..22: note = chemically synthesized
  source 1..22: mol_type = other DNA
gcagtaaagaagctggctgaaa

SEQ ID NO: 123407 - DNA, 22 bp, synthetic construct
  misc_feature 1..22: note = chemically synthesized
  source 1..22: mol_type = other DNA
cagtaaagaagctggctgaaac

SEQ ID NO: 123408 - DNA, 22 bp, synthetic construct
  misc_feature 1..22: note = chemically synthesized
  source 1..22: mol_type = other DNA
gctgaaacccaccaaaccaaga

SEQ ID NO: 123409 - DNA, 22 bp, synthetic construct
  misc_feature 1..22: note = chemically synthesized
  source 1..22: mol_type = other DNA
aaacccaccaaaccaagattgt

SEQ ID NO: 123410 - DNA, 22 bp, synthetic construct
  misc_feature 1..22: note = chemically synthesized
  source 1..22: mol_type = other DNA
tgatgagagtgacctctggtag

SEQ ID NO: 123411 - DNA, 22 bp, synthetic construct
  misc_feature 1..22: note = chemically synthesized
  source 1..22: mol_type = other DNA
tggtagtcctcactgctactct

SEQ ID NO: 123412 - DNA, 22 bp, synthetic construct
  misc_feature 1..22: note = chemically synthesized
  source 1..22: mol_type = other DNA
gtagtcctcactgctactctcc

SEQ ID NO: 123413 - DNA, 22 bp, synthetic construct
  misc_feature 1..22: note = chemically synthesized
  source 1..22: mol_type = other DNA
actgctactctcccaccagcac

SEQ ID NO: 123414 - DNA, 22 bp, synthetic construct
  misc_feature 1..22: note = chemically synthesized
  source 1..22: mol_type = other DNA
ctactctcccaccagcactatg

SEQ ID NO: 123415 - DNA, 22 bp, synthetic construct
  misc_feature 1..22: note = chemically synthesized
  source 1..22: mol_type = other DNA
ctctcccaccagcactatgact

SEQ ID NO: 123416 - DNA, 22 bp, synthetic construct
  misc_feature 1..22: note = chemically synthesized
  source 1..22: mol_type = other DNA
tcccaccagcactatgactgtt

SEQ ID NO: 123417 - DNA, 22 bp, synthetic construct
  misc_feature 1..22: note = chemically synthesized
  source 1..22: mol_type = other DNA
ccaccagcactatgactgttta

SEQ ID NO: 123418 - DNA, 22 bp, synthetic construct
  misc_feature 1..22: note = chemically synthesized
  source 1..22: mol_type = other DNA
tgactgtttagaaatgccatgg

SEQ ID NO: 123419 - DNA, 22 bp, synthetic construct
  misc_feature 1..22: note = chemically synthesized
  source 1..22: mol_type = other DNA
tttagaaatgccatggcaacat

SEQ ID NO: 123420 - DNA, 22 bp, synthetic construct
  misc_feature 1..22: note = chemically synthesized
  source 1..22: mol_type = other DNA
agaaatgccatggcaacatcag

SEQ ID NO: 123421 - DNA, 22 bp, synthetic construct
  misc_feature 1..22: note = chemically synthesized
  source 1..22: mol_type = other DNA
gaaatgccatggcaacatcagg

SEQ ID NO: 123422 - DNA, 22 bp, synthetic construct
  misc_feature 1..22: note = chemically synthesized
  source 1..22: mol_type = other DNA
cgctaagcggtctgaaaagggg

SEQ ID NO: 123423 - DNA, 22 bp, synthetic construct
  misc_feature 1..22: note = chemically synthesized
  source 1..22: mol_type = other DNA
agcggtctgaaaaggggaggca

SEQ ID NO: 123424 - DNA, 22 bp, synthetic construct
  misc_feature 1..22: note = chemically synthesized
  source 1..22: mol_type = other DNA
aaaaggggaggcatgaataatc

SEQ ID NO: 123425 - DNA, 22 bp, synthetic construct
  misc_feature 1..22: note = chemically synthesized
  source 1..22: mol_type = other DNA
gtttagcatatcatcaataaat

SEQ ID NO: 123426 - DNA, 22 bp, synthetic construct
  misc_feature 1..22: note = chemically synthesized
  source 1..22: mol_type = other DNA
tttagcatatcatcaataaata

SEQ ID NO: 123427 - DNA, 22 bp, synthetic construct
  misc_feature 1..22: note = chemically synthesized
  source 1..22: mol_type = other DNA
agcatatcatcaataaataacc

SEQ ID NO: 123428 - DNA, 22 bp, synthetic construct
  misc_feature 1..22: note = chemically synthesized
  source 1..22: mol_type = other DNA
gcatatcatcaataaataacca

SEQ ID NO: 123429 - DNA, 22 bp, synthetic construct
  misc_feature 1..22: note = chemically synthesized
  source 1..22: mol_type = other DNA
aggactgttctgcctatagggt

SEQ ID NO: 123430 - DNA, 22 bp, synthetic construct
  misc_feature 1..22: note = chemically synthesized
  source 1..22: mol_type = other DNA
ttctgcctatagggtagccatt

SEQ ID NO: 123431 - DNA, 22 bp, synthetic construct
  misc_feature 1..22: note = chemically synthesized
  source 1..22: mol_type = other DNA
tgcctatagggtagccattatt

SEQ ID NO: 123432 - DNA, 22 bp, synthetic construct
  misc_feature 1..22: note = chemically synthesized
  source 1..22: mol_type = other DNA
cctatagggtagccattatttt

SEQ ID NO: 123433 - DNA, 22 bp, synthetic construct
  misc_feature 1..22: note = chemically synthesized
  source 1..22: mol_type = other DNA
tagggtagccattattttactc

SEQ ID NO: 123434 - DNA, 22 bp, synthetic construct
  misc_feature 1..22: note = chemically synthesized
  source 1..22: mol_type = other DNA
ttttactcctttactttcttaa

SEQ ID NO: 123435 - DNA, 22 bp, synthetic construct
  misc_feature 1..22: note = chemically synthesized
  source 1..22: mol_type = other DNA
tactcctttactttcttaatta

SEQ ID NO: 123436 - DNA, 22 bp, synthetic construct
  misc_feature 1..22: note = chemically synthesized
  source 1..22: mol_type = other DNA
actcctttactttcttaattaa

SEQ ID NO: 123437 - DNA, 22 bp, synthetic construct
  misc_feature 1..22: note = chemically synthesized
  source 1..22: mol_type = other DNA
ctcctttactttcttaattaac

SEQ ID NO: 123438 - DNA, 22 bp, synthetic construct
  misc_feature 1..22: note = chemically synthesized
  source 1..22: mol_type = other DNA
ctttactttcttaattaacttg

SEQ ID NO: 123439 - DNA, 22 bp, synthetic construct
  misc_feature 1..22: note = chemically synthesized
  source 1..22: mol_type = other DNA
tactttcttaattaacttgctt

SEQ ID NO: 123440 - DNA, 22 bp, synthetic construct
  misc_feature 1..22: note = chemically synthesized
  source 1..22: mol_type = other DNA
actttcttaattaacttgcttt

SEQ ID NO: 123441 - DNA, 22 bp, synthetic construct
  misc_feature 1..22: note = chemically synthesized
  source 1..22: mol_type = other DNA
ctttcttaattaacttgctttc

SEQ ID NO: 123442 - DNA, 22 bp, synthetic construct
  misc_feature 1..22: note = chemically synthesized
  source 1..22: mol_type = other DNA
tcttaattaacttgctttcact

SEQ ID NO: 123443 - DNA, 22 bp, synthetic construct
  misc_feature 1..22: note = chemically synthesized
  source 1..22: mol_type = other DNA
cttaattaacttgctttcactt

SEQ ID NO: 123444 - DNA, 22 bp, synthetic construct
  misc_feature 1..22: note = chemically synthesized
  source 1..22: mol_type = other DNA
ttaattaacttgctttcacttt

SEQ ID NO: 123445 - DNA, 22 bp, synthetic construct
  misc_feature 1..22: note = chemically synthesized
  source 1..22: mol_type = other DNA
aattaacttgctttcacttttc

SEQ ID NO: 123446 - DNA, 22 bp, synthetic construct
  misc_feature 1..22: note = chemically synthesized
  source 1..22: mol_type = other DNA
attaacttgctttcacttttct

SEQ ID NO: 123447 - DNA, 22 bp, synthetic construct
  misc_feature 1..22: note = chemically synthesized
  source 1..22: mol_type = other DNA
acttgctttcacttttctgtat

SEQ ID NO: 123448 - DNA, 22 bp, synthetic construct
  misc_feature 1..22: note = chemically synthesized
  source 1..22: mol_type = other DNA
gctttcacttttctgtatggat

SEQ ID NO: 123449 - DNA, 22 bp, synthetic construct
  misc_feature 1..22: note = chemically synthesized
  source 1..22: mol_type = other DNA
ctttcacttttctgtatggatt

SEQ ID NO: 123450 - DNA, 22 bp, synthetic construct
  misc_feature 1..22: note = chemically synthesized
  source 1..22: mol_type = other DNA
tcacttttctgtatggatttgc

SEQ ID NO: 123451 - DNA, 22 bp, synthetic construct
  misc_feature 1..22: note = chemically synthesized
  source 1..22: mol_type = other DNA
cacttttctgtatggatttgcc

SEQ ID NO: 123452 - DNA, 22 bp, synthetic construct
  misc_feature 1..22: note = chemically synthesized
  source 1..22: mol_type = other DNA
acttttctgtatggatttgccc

SEQ ID NO: 123453 - DNA, 22 bp, synthetic construct
  misc_feature 1..22: note = chemically synthesized
  source 1..22: mol_type = other DNA
ttctgtatggatttgccccaaa

SEQ ID NO: 123454 - DNA, 22 bp, synthetic construct
  misc_feature 1..22: note = chemically synthesized
  source 1..22: mol_type = other DNA
tctgtatggatttgccccaaat

SEQ ID NO: 123455 - DNA, 22 bp, synthetic construct
  misc_feature 1..22: note = chemically synthesized
  source 1..22: mol_type = other DNA
ctgtatggatttgccccaaatt

SEQ ID NO: 123456 - DNA, 22 bp, synthetic construct
  misc_feature 1..22: note = chemically synthesized
  source 1..22: mol_type = other DNA
tgtatggatttgccccaaattc

SEQ ID NO: 123457 - DNA, 22 bp, synthetic construct
  misc_feature 1..22: note = chemically synthesized
  source 1..22: mol_type = other DNA
tatggatttgccccaaattctt

SEQ ID NO: 123458 - DNA, 22 bp, synthetic construct
  misc_feature 1..22: note = chemically synthesized
  source 1..22: mol_type = other DNA
gccccaaattctttcttgggca

SEQ ID NO: 123459 - DNA, 22 bp, synthetic construct
  misc_feature 1..22: note = chemically synthesized
  source 1..22: mol_type = other DNA
ccccaaattctttcttgggcac

SEQ ID NO: 123460 - DNA, 22 bp, synthetic construct
  misc_feature 1..22: note = chemically synthesized
  source 1..22: mol_type = other DNA
tttcttgggcacgaaatccaag

SEQ ID NO: 123461 - DNA, 22 bp, synthetic construct
  misc_feature 1..22: note = chemically synthesized
  source 1..22: mol_type = other DNA
tcttgggcacgaaatccaagaa

SEQ ID NO: 123462 - DNA, 22 bp, synthetic construct
  misc_feature 1..22: note = chemically synthesized
  source 1..22: mol_type = other DNA
cttgggcacgaaatccaagaac

SEQ ID NO: 123463 - DNA, 22 bp, synthetic construct
  misc_feature 1..22: note = chemically synthesized
  source 1..22: mol_type = other DNA
ttgggcacgaaatccaagaacc

SEQ ID NO: 123464 - DNA, 22 bp, synthetic construct
  misc_feature 1..22: note = chemically synthesized
  source 1..22: mol_type = other DNA
gggcacgaaatccaagaaccct

SEQ ID NO: 123465 - DNA, 22 bp, synthetic construct
  misc_feature 1..22: note = chemically synthesized
  source 1..22: mol_type = other DNA
ggcacgaaatccaagaaccctc

SEQ ID NO: 123466 - DNA, 22 bp, synthetic construct
  misc_feature 1..22: note = chemically synthesized
  source 1..22: mol_type = other DNA
tcttagggtctggattgtgact

SEQ ID NO: 123467 - DNA, 22 bp, synthetic construct
  misc_feature 1..22: note = chemically synthesized
  source 1..22: mol_type = other DNA
ttagggtctggattgtgactcc

SEQ ID NO: 123468 - DNA, 22 bp, synthetic construct
  misc_feature 1..22: note = chemically synthesized
  source 1..22: mol_type = other DNA
agggtctggattgtgactcctt

SEQ ID NO: 123469 - DNA, 22 bp, synthetic construct
  misc_feature 1..22: note = chemically synthesized
  source 1..22: mol_type = other DNA
gggtctggattgtgactccttt

SEQ ID NO: 123470 - DNA, 22 bp, synthetic construct
  misc_feature 1..22: note = chemically synthesized
  source 1..22: mol_type = other DNA
gattgtgactcctttctggcaa

SEQ ID NO: 123471 - DNA, 22 bp, synthetic construct
  misc_feature 1..22: note = chemically synthesized
  source 1..22: mol_type = other DNA
tgactcctttctggcaatgctt

SEQ ID NO: 123472 - DNA, 22 bp, synthetic construct
  misc_feature 1..22: note = chemically synthesized
  source 1..22: mol_type = other DNA
ctttctggcaatgcttttaact

SEQ ID NO: 123473 - DNA, 22 bp, synthetic construct
  misc_feature 1..22: note = chemically synthesized
  source 1..22: mol_type = other DNA
tctggcaatgcttttaacttca

SEQ ID NO: 123474 - DNA, 22 bp, synthetic construct
  misc_feature 1..22: note = chemically synthesized
  source 1..22: mol_type = other DNA
ctggcaatgcttttaacttcaa

SEQ ID NO: 123475 - DNA, 22 bp, synthetic construct
  misc_feature 1..22: note = chemically synthesized
  source 1..22: mol_type = other DNA
tggcaatgcttttaacttcaaa

SEQ ID NO: 123476 - DNA, 22 bp, synthetic construct
  misc_feature 1..22: note = chemically synthesized
  source 1..22: mol_type = other DNA
gcaatgcttttaacttcaaaaa

SEQ ID NO: 123477 - DNA, 22 bp, synthetic construct
  misc_feature 1..22: note = chemically synthesized
  source 1..22: mol_type = other DNA
ttaacttcaaaaatctcctttc

SEQ ID NO: 123478 - DNA, 22 bp, synthetic construct
  misc_feature 1..22: note = chemically synthesized
  source 1..22: mol_type = other DNA
taacttcaaaaatctcctttca

SEQ ID NO: 123479 - DNA, 22 bp, synthetic construct
  misc_feature 1..22: note = chemically synthesized
  source 1..22: mol_type = other DNA
aacttcaaaaatctcctttcaa

SEQ ID NO: 123480 - DNA, 22 bp, synthetic construct
  misc_feature 1..22: note = chemically synthesized
  source 1..22: mol_type = other DNA
acttcaaaaatctcctttcaaa

SEQ ID NO: 123481 - DNA, 22 bp, synthetic construct
  misc_feature 1..22: note = chemically synthesized
  source 1..22: mol_type = other DNA
caaaaatctcctttcaaaatga

SEQ ID NO: 123482 - DNA, 22 bp, synthetic construct
  misc_feature 1..22: note = chemically synthesized
  source 1..22: mol_type = other DNA
aaaaatctcctttcaaaatgat

SEQ ID NO: 123483 - DNA, 22 bp, synthetic construct
  misc_feature 1..22: note = chemically synthesized
  source 1..22: mol_type = other DNA
ctttcaaaatgattttattcca

SEQ ID NO: 123484 - DNA, 22 bp, synthetic construct
  misc_feature 1..22: note = chemically synthesized
  source 1..22: mol_type = other DNA
tcaaaatgattttattccagtt

SEQ ID NO: 123485 - DNA, 22 bp, synthetic construct
  misc_feature 1..22: note = chemically synthesized
  source 1..22: mol_type = other DNA
caaaatgattttattccagttc

SEQ ID NO: 123486 - DNA, 22 bp, synthetic construct
  misc_feature 1..22: note = chemically synthesized
  source 1..22: mol_type = other DNA
aaaatgattttattccagttca

SEQ ID NO: 123487 - DNA, 22 bp, synthetic construct
  misc_feature 1..22: note = chemically synthesized
  source 1..22: mol_type = other DNA
tattccagttcacaatgaaata

SEQ ID NO: 123488 - DNA, 22 bp, synthetic construct
  misc_feature 1..22: note = chemically synthesized
  source 1..22: mol_type = other DNA
attccagttcacaatgaaataa

SEQ ID NO: 123489 - DNA, 22 bp, synthetic construct
  misc_feature 1..22: note = chemically synthesized
  source 1..22: mol_type = other DNA
ttccagttcacaatgaaataac

SEQ ID NO: 123490 - DNA, 22 bp, synthetic construct
  misc_feature 1..22: note = chemically synthesized
  source 1..22: mol_type = other DNA
cagttcacaatgaaataactaa

SEQ ID NO: 123491 - DNA, 22 bp, synthetic construct
  misc_feature 1..22: note = chemically synthesized
  source 1..22: mol_type = other DNA
acaatgaaataactaaaactct

SEQ ID NO: 123492 - DNA, 22 bp, synthetic construct
  misc_feature 1..22: note = chemically synthesized
  source 1..22: mol_type = other DNA
aaactctgtgtcactaagtggc

SEQ ID NO: 123493 - DNA, 22 bp, synthetic construct
  misc_feature 1..22: note = chemically synthesized
  source 1..22: mol_type = other DNA
tgtgtcactaagtggctttgca

SEQ ID NO: 123494 - DNA, 22 bp, synthetic construct
  misc_feature 1..22: note = chemically synthesized
  source 1..22: mol_type = other DNA
tgtcactaagtggctttgcaag

SEQ ID NO: 123495 - DNA, 22 bp, synthetic construct
  misc_feature 1..22: note = chemically synthesized
  source 1..22: mol_type = other DNA
agtggctttgcaaggtggcatg

SEQ ID NO: 123496 - DNA, 22 bp, synthetic construct
  misc_feature 1..22: note = chemically synthesized
  source 1..22: mol_type = other DNA
tgcaaggtggcatgtgtatgtg

SEQ ID NO: 123497 - DNA, 22 bp, synthetic construct
  misc_feature 1..22: note = chemically synthesized
  source 1..22: mol_type = other DNA
gcaaggtggcatgtgtatgtgt

SEQ ID NO: 123498 - DNA, 22 bp, synthetic construct
  misc_feature 1..22: note = chemically synthesized
  source 1..22: mol_type = other DNA
caaggtggcatgtgtatgtgtg

SEQ ID NO: 123499 - DNA, 22 bp, synthetic construct
  misc_feature 1..22: note = chemically synthesized
  source 1..22: mol_type = other DNA
ctcttccttcagaaccacattc

SEQ ID NO: 123500 - DNA, 22 bp, synthetic construct
  misc_feature 1..22: note = chemically synthesized
  source 1..22: mol_type = other DNA
tcttccttcagaaccacattcc

SEQ ID NO: 123501 - DNA, 22 bp, synthetic construct
  misc_feature 1..22: note = chemically synthesized
  source 1..22: mol_type = other DNA
ttccttcagaaccacattcctg

SEQ ID NO: 123502 - DNA, 22 bp, synthetic construct
  misc_feature 1..22: note = chemically synthesized
  source 1..22: mol_type = other DNA
ccttcagaaccacattcctgag

SEQ ID NO: 123503 - DNA, 22 bp, synthetic construct
  misc_feature 1..22: note = chemically synthesized
  source 1..22: mol_type = other DNA
cttcagaaccacattcctgaga

SEQ ID NO: 123504 - DNA, 22 bp, synthetic construct
  misc_feature 1..22: note = chemically synthesized
  source 1..22: mol_type = other DNA
cagaaccacattcctgagactt

SEQ ID NO: 123505 - DNA, 22 bp, synthetic construct
  misc_feature 1..22: note = chemically synthesized
  source 1..22: mol_type = other DNA
agaaccacattcctgagacttg

SEQ ID NO: 123506 - DNA, 22 bp, synthetic construct
  misc_feature 1..22: note = chemically synthesized
  source 1..22: mol_type = other DNA
ctgagacttgagagaatgtctt

SEQ ID NO: 123507 - DNA, 22 bp, synthetic construct
  misc_feature 1..22: note = chemically synthesized
  source 1..22: mol_type = other DNA
agacttgagagaatgtctttgg

SEQ ID NO: 123508 - DNA, 22 bp, synthetic construct
  misc_feature 1..22: note = chemically synthesized
  source 1..22: mol_type = other DNA
gagagaatgtctttggtctctg

SEQ ID NO: 123509 - DNA, 22 bp, synthetic construct
  misc_feature 1..22: note = chemically synthesized
  source 1..22: mol_type = other DNA
agagaatgtctttggtctctgc

SEQ ID NO: 123510 - DNA, 22 bp, synthetic construct
  misc_feature 1..22: note = chemically synthesized
  source 1..22: mol_type = other DNA
tggtctctgctgctagagaatt

SEQ ID NO: 123511 - DNA, 22 bp, synthetic construct
  misc_feature 1..22: note = chemically synthesized
  source 1..22: mol_type = other DNA
ggtctctgctgctagagaattt

SEQ ID NO: 123512 - DNA, 22 bp, synthetic construct
  misc_feature 1..22: note = chemically synthesized
  source 1..22: mol_type = other DNA
gtctctgctgctagagaatttt

SEQ ID NO: 123513 - DNA, 22 bp, synthetic construct
  misc_feature 1..22: note = chemically synthesized
  source 1..22: mol_type = other DNA
tgctgctagagaattttatcct

SEQ ID NO: 123514 - DNA, 22 bp, synthetic construct
  misc_feature 1..22: note = chemically synthesized
  source 1..22: mol_type = other DNA
ctgctagagaattttatcctgg

SEQ ID NO: 123515 - DNA, 22 bp, synthetic construct
  misc_feature 1..22: note = chemically synthesized
  source 1..22: mol_type = other DNA
ctagagaattttatcctggttc

SEQ ID NO: 123516 - DNA, 22 bp, synthetic construct
  misc_feature 1..22: note = chemically synthesized
  source 1..22: mol_type = other DNA
gagaattttatcctggttcatg

SEQ ID NO: 123517 - DNA, 22 bp, synthetic construct
  misc_feature 1..22: note = chemically synthesized
  source 1..22: mol_type = other DNA
tatcctggttcatggactgcag

SEQ ID NO: 123518 - DNA, 22 bp, synthetic construct
  misc_feature 1..22: note = chemically synthesized
  source 1..22: mol_type = other DNA
atcctggttcatggactgcagc

SEQ ID NO: 123519 - DNA, 22 bp, synthetic construct
  misc_feature 1..22: note = chemically synthesized
  source 1..22: mol_type = other DNA
tcctggttcatggactgcagcg

SEQ ID NO: 123520 - DNA, 22 bp, synthetic construct
  misc_feature 1..22: note = chemically synthesized
  source 1..22: mol_type = other DNA
gttcatggactgcagcgggagg

SEQ ID NO: 123521 - DNA, 22 bp, synthetic construct
  misc_feature 1..22: note = chemically synthesized
  source 1..22: mol_type = other DNA
atggactgcagcgggaggtgga

SEQ ID NO: 123522 - DNA, 22 bp, synthetic construct
  misc_feature 1..22: note = chemically synthesized
  source 1..22: mol_type = other DNA
cagcgggaggtggaagcatttt

SEQ ID NO: 123523 - DNA, 22 bp, synthetic construct
  misc_feature 1..22: note = chemically synthesized
  source 1..22: mol_type = other DNA
tcaaactttgggaggggaatgt

SEQ ID NO: 123524 - DNA, 22 bp, synthetic construct
  misc_feature 1..22: note = chemically synthesized
  source 1..22: mol_type = other DNA
caaactttgggaggggaatgtt

SEQ ID NO: 123525 - DNA, 22 bp, synthetic construct
  misc_feature 1..22: note = chemically synthesized
  source 1..22: mol_type = other DNA
aaactttgggaggggaatgtta

SEQ ID NO: 123526 - DNA, 22 bp, synthetic construct
  misc_feature 1..22: note = chemically synthesized
  source 1..22: mol_type = other DNA
tgggaggggaatgttaggagac

SEQ ID NO: 123527 - DNA, 22 bp, synthetic construct
  misc_feature 1..22: note = chemically synthesized
  source 1..22: mol_type = other DNA
gggaggggaatgttaggagacc

SEQ ID NO: 123528 - DNA, 22 bp, synthetic construct
  misc_feature 1..22: note = chemically synthesized
  source 1..22: mol_type = other DNA
ggaggggaatgttaggagacca

SEQ ID NO: 123529 - DNA, 22 bp, synthetic construct
  misc_feature 1..22: note = chemically synthesized
  source 1..22: mol_type = other DNA
ggagaccattaggcatgtgctc

SEQ ID NO: 123530 - DNA, 22 bp, synthetic construct
  misc_feature 1..22: note = chemically synthesized
  source 1..22: mol_type = other DNA
ggcatgtgctcaagagatgaca

SEQ ID NO: 123531 - DNA, 22 bp, synthetic construct
  misc_feature 1..22: note = chemically synthesized
  source 1..22: mol_type = other DNA
aagagatgacaccaagtccagg

SEQ ID NO: 123532 - DNA, 22 bp, synthetic construct
  misc_feature 1..22: note = chemically synthesized
  source 1..22: mol_type = other DNA
aaactttgtgcctgttgtctca

SEQ ID NO: 123533 - DNA, 22 bp, synthetic construct
  misc_feature 1..22: note = chemically synthesized
  source 1..22: mol_type = other DNA
tgtgcctgttgtctcatgaatc

SEQ ID NO: 123534 - DNA, 22 bp, synthetic construct
  misc_feature 1..22: note = chemically synthesized
  source 1..22: mol_type = other DNA
gtgcctgttgtctcatgaatca

SEQ ID NO: 123535 - DNA, 22 bp, synthetic construct
  misc_feature 1..22: note = chemically synthesized
  source 1..22: mol_type = other DNA
tgcctgttgtctcatgaatcag

SEQ ID NO: 123536 - DNA, 22 bp, synthetic construct
  misc_feature 1..22: note = chemically synthesized
  source 1..22: mol_type = other DNA
ttgtctcatgaatcagatagca

SEQ ID NO: 123537 - DNA, 22 bp, synthetic construct
  misc_feature 1..22: note = chemically synthesized
  source 1..22: mol_type = other DNA
tctcatgaatcagatagcaccc

SEQ ID NO: 123538 - DNA, 22 bp, synthetic construct
  misc_feature 1..22: note = chemically synthesized
  source 1..22: mol_type = other DNA
atgaatcagatagcacccctgc

SEQ ID NO: 123539 - DNA, 22 bp, synthetic construct
  misc_feature 1..22: note = chemically synthesized
  source 1..22: mol_type = other DNA
cctaaaccttcccagtcctgca

SEQ ID NO: 123540 - DNA, 22 bp, synthetic construct
  misc_feature 1..22: note = chemically synthesized
  source 1..22: mol_type = other DNA
aaccttcccagtcctgcattgc

SEQ ID NO: 123541 - DNA, 22 bp, synthetic construct
  misc_feature 1..22: note = chemically synthesized
  source 1..22: mol_type = other DNA
cccagtcctgcattgcacagag

SEQ ID NO: 123542 - DNA, 22 bp, synthetic construct
  misc_feature 1..22: note = chemically synthesized
  source 1..22: mol_type = other DNA
ccagtcctgcattgcacagaga

SEQ ID NO: 123543 - DNA, 22 bp, synthetic construct
  misc_feature 1..22: note = chemically synthesized
  source 1..22: mol_type = other DNA
cattgcacagagacccgtgctt

SEQ ID NO: 123544 - DNA, 22 bp, synthetic construct
  misc_feature 1..22: note = chemically synthesized
  source 1..22: mol_type = other DNA
cacagagacccgtgcttgggat

SEQ ID NO: 123545 - DNA, 22 bp, synthetic construct
  misc_feature 1..22: note = chemically synthesized
  source 1..22: mol_type = other DNA
gggattggaattagtcatcaat

SEQ ID NO: 123546 - DNA, 22 bp, synthetic construct
  misc_feature 1..22: note = chemically synthesized
  source 1..22: mol_type = other DNA
ggattggaattagtcatcaata

SEQ ID NO: 123547 - DNA, 22 bp, synthetic construct
  misc_feature 1..22: note = chemically synthesized
  source 1..22: mol_type = other DNA
gaattagtcatcaatacaaact

SEQ ID NO: 123548 - DNA, 22 bp, synthetic construct
  misc_feature 1..22: note = chemically synthesized
  source 1..22: mol_type = other DNA
gtcatcaatacaaacttatttt

SEQ ID NO: 123549 - DNA, 22 bp, synthetic construct
  misc_feature 1..22: note = chemically synthesized
  source 1..22: mol_type = other DNA
attttcccaaattttaattttt

SEQ ID NO: 123550 - DNA, 22 bp, synthetic construct
  misc_feature 1..22: note = chemically synthesized
  source 1..22: mol_type = other DNA
ttttcccaaattttaattttta

SEQ ID NO: 123551 - DNA, 22 bp, synthetic construct
  misc_feature 1..22: note = chemically synthesized
  source 1..22: mol_type = other DNA
tcccaaattttaatttttattc

SEQ ID NO: 123552 - DNA, 22 bp, synthetic construct
  misc_feature 1..22: note = chemically synthesized
  source 1..22: mol_type = other DNA
cccaaattttaatttttattct

SEQ ID NO: 123553 - DNA, 22 bp, synthetic construct
  misc_feature 1..22: note = chemically synthesized
  source 1..22: mol_type = other DNA
ccaaattttaatttttattcta

SEQ ID NO: 123554 - DNA, 22 bp, synthetic construct
  misc_feature 1..22: note = chemically synthesized
  source 1..22: mol_type = other DNA
taatttttattctaaagacttt

SEQ ID NO: 123555 - DNA, 22 bp, synthetic construct
  misc_feature 1..22: note = chemically synthesized
  source 1..22: mol_type = other DNA
aatttttattctaaagactttg

SEQ ID NO: 123556 - DNA, 22 bp, synthetic construct
  misc_feature 1..22: note = chemically synthesized
  source 1..22: mol_type = other DNA
atttttattctaaagactttga

SEQ ID NO: 123557 - DNA, 22 bp, synthetic construct
  misc_feature 1..22: note = chemically synthesized
  source 1..22: mol_type = other DNA
ttattctaaagactttgaatct

SEQ ID NO: 123558 - DNA, 22 bp, synthetic construct
  misc_feature 1..22: note = chemically synthesized
  source 1..22: mol_type = other DNA
tattctaaagactttgaatctc

SEQ ID NO: 123559 - DNA, 22 bp, synthetic construct
  misc_feature 1..22: note = chemically synthesized
  source 1..22: mol_type = other DNA
attctaaagactttgaatctca

SEQ ID NO: 123560 - DNA, 22 bp, synthetic construct
  misc_feature 1..22: note = chemically synthesized
  source 1..22: mol_type = other DNA
ttctaaagactttgaatctcaa

SEQ ID NO: 123561 - DNA, 22 bp, synthetic construct
  misc_feature 1..22: note = chemically synthesized
  source 1..22: mol_type = other DNA
taaagactttgaatctcaagtg

SEQ ID NO: 123562 - DNA, 22 bp, synthetic construct
  misc_feature 1..22: note = chemically synthesized
  source 1..22: mol_type = other DNA
aagactttgaatctcaagtgaa

SEQ ID NO: 123563 - DNA, 22 bp, synthetic construct
  misc_feature 1..22: note = chemically synthesized
  source 1..22: mol_type = other DNA
tgaatctcaagtgaataccctg

SEQ ID NO: 123564 - DNA, 22 bp, synthetic construct
  misc_feature 1..22: note = chemically synthesized
  source 1..22: mol_type = other DNA
gaatctcaagtgaataccctga

SEQ ID NO: 123565 - DNA, 22 bp, synthetic construct
  misc_feature 1..22: note = chemically synthesized
  source 1..22: mol_type = other DNA
aatctcaagtgaataccctgat

SEQ ID NO: 123566 - DNA, 22 bp, synthetic construct
  misc_feature 1..22: note = chemically synthesized
  source 1..22: mol_type = other DNA
aagtgaataccctgatttcctt

SEQ ID NO: 123567 - DNA, 22 bp, synthetic construct
  misc_feature 1..22: note = chemically synthesized
  source 1..22: mol_type = other DNA
atttccttccttccttctttcc

SEQ ID NO: 123568 - DNA, 22 bp, synthetic construct
  misc_feature 1..22: note = chemically synthesized
  source 1..22: mol_type = other DNA
ccttccttccttctttcctttc

SEQ ID NO: 123569 - DNA, 22 bp, synthetic construct
  misc_feature 1..22: note = chemically synthesized
  source 1..22: mol_type = other DNA
cttccttccttctttcctttcc

SEQ ID NO: 123570 - DNA, 22 bp, synthetic construct
  misc_feature 1..22: note = chemically synthesized
  source 1..22: mol_type = other DNA
ccttccttctttcctttccttt

SEQ ID NO: 123571 - DNA, 22 bp, synthetic construct
  misc_feature 1..22: note = chemically synthesized
  source 1..22: mol_type = other DNA
cttccttctttcctttcctttc

SEQ ID NO: 123572 - DNA, 22 bp, synthetic construct
  misc_feature 1..22: note = chemically synthesized
  source 1..22: mol_type = other DNA
ccttctttcctttcctttcctc

SEQ ID NO: 123573 - DNA, 22 bp, synthetic construct
  misc_feature 1..22: note = chemically synthesized
  source 1..22: mol_type = other DNA
cttctttcctttcctttcctcc

SEQ ID NO: 123574 - DNA, 22 bp, synthetic construct
  misc_feature 1..22: note = chemically synthesized
  source 1..22: mol_type = other DNA
ctttcctttcctttcctcctcc

SEQ ID NO: 123575 - DNA, 22 bp, synthetic construct
  misc_feature 1..22: note = chemically synthesized
  source 1..22: mol_type = other DNA
tttcctttcctttcctcctcct

SEQ ID NO: 123576 - DNA, 22 bp, synthetic construct
  misc_feature 1..22: note = chemically synthesized
  source 1..22: mol_type = other DNA
tcctttcctttcctcctcctct

SEQ ID NO: 123577 - DNA, 22 bp, synthetic construct
  misc_feature 1..22: note = chemically synthesized
  source 1..22: mol_type = other DNA
cctttcctttcctcctcctcta

SEQ ID NO: 123578 - DNA, 22 bp, synthetic construct
  misc_feature 1..22: note = chemically synthesized
  source 1..22: mol_type = other DNA
ctttcctttcctcctcctctac

SEQ ID NO: 123579 - DNA, 22 bp, synthetic construct
  misc_feature 1..22: note = chemically synthesized
  source 1..22: mol_type = other DNA
tcctttcctcctcctctacttt

SEQ ID NO: 123580 - DNA, 22 bp, synthetic construct
  misc_feature 1..22: note = chemically synthesized
  source 1..22: mol_type = other DNA
cctttcctcctcctctactttt

SEQ ID NO: 123581 - DNA, 22 bp, synthetic construct
  misc_feature 1..22: note = chemically synthesized
  source 1..22: mol_type = other DNA
ctttcctcctcctctacttttt

SEQ ID NO: 123582 - DNA, 22 bp, synthetic construct
  misc_feature 1..22: note = chemically synthesized
  source 1..22: mol_type = other DNA
tcctcctcctctactttttctt

SEQ ID NO: 123583 - DNA, 22 bp, synthetic construct
  misc_feature 1..22: note = chemically synthesized
  source 1..22: mol_type = other DNA
cctcctcctctactttttcttc

SEQ ID NO: 123584 - DNA, 22 bp, synthetic construct
  misc_feature 1..22: note = chemically synthesized
  source 1..22: mol_type = other DNA
ctcctcctctactttttcttct

SEQ ID NO: 123585 - DNA, 22 bp, synthetic construct
  misc_feature 1..22: note = chemically synthesized
  source 1..22: mol_type = other DNA
ctcctctactttttcttctcct

SEQ ID NO: 123586 - DNA, 22 bp, synthetic construct
  misc_feature 1..22: note = chemically synthesized
  source 1..22: mol_type = other DNA
ctctactttttcttctccttct

SEQ ID NO: 123587 - DNA, 22 bp, synthetic construct
  misc_feature 1..22: note = chemically synthesized
  source 1..22: mol_type = other DNA
tactttttcttctccttctcct

SEQ ID NO: 123588 - DNA, 22 bp, synthetic construct
  misc_feature 1..22: note = chemically synthesized
  source 1..22: mol_type = other DNA
ctttttcttctccttctccttc

SEQ ID NO: 123589 - DNA, 22 bp, synthetic construct
  misc_feature 1..22: note = chemically synthesized
  source 1..22: mol_type = other DNA
tttcttctccttctccttcttc

SEQ ID NO: 123590 - DNA, 22 bp, synthetic construct
  misc_feature 1..22: note = chemically synthesized
  source 1..22: mol_type = other DNA
ttcttctccttctccttcttct

SEQ ID NO: 123591 - DNA, 22 bp, synthetic construct
  misc_feature 1..22: note = chemically synthesized
  source 1..22: mol_type = other DNA
tcttctccttctccttcttctt

SEQ ID NO: 123592 - DNA, 22 bp, synthetic construct
  misc_feature 1..22: note = chemically synthesized
  source 1..22: mol_type = other DNA
cttctccttctccttcttcttc

SEQ ID NO: 123593 - DNA, 22 bp, synthetic construct
  misc_feature 1..22: note = chemically synthesized
  source 1..22: mol_type = other DNA
ttctccttctccttcttcttct

SEQ ID NO: 123594 - DNA, 22 bp, synthetic construct
  misc_feature 1..22: note = chemically synthesized
  source 1..22: mol_type = other DNA
ctccttctccttcttcttcttc

SEQ ID NO: 123595 - DNA, 22 bp, synthetic construct
  misc_feature 1..22: note = chemically synthesized
  source 1..22: mol_type = other DNA
tccttctccttcttcttcttct

SEQ ID NO: 123596 - DNA, 22 bp, synthetic construct
  misc_feature 1..22: note = chemically synthesized
  source 1..22: mol_type = other DNA
cttctccttcttcttcttcttc

SEQ ID NO: 123597 - DNA, 22 bp, synthetic construct
  misc_feature 1..22: note = chemically synthesized
  source 1..22: mol_type = other DNA
ctccttcttcttcttcttctct

SEQ ID NO: 123598 - DNA, 22 bp, synthetic construct
  misc_feature 1..22: note = chemically synthesized
  source 1..22: mol_type = other DNA
tccttcttcttcttcttctctt

SEQ ID NO: 123599 - DNA, 22 bp, synthetic construct
  misc_feature 1..22: note = chemically synthesized
  source 1..22: mol_type = other DNA
cttcttcttcttcttctcttcc

SEQ ID NO: 123600 - DNA, 22 bp, synthetic construct
  misc_feature 1..22: note = chemically synthesized
  source 1..22: mol_type = other DNA
cttcttcttcttctcttccttc

SEQ ID NO: 123601 - DNA, 22 bp, synthetic construct
  misc_feature 1..22: note = chemically synthesized
  source 1..22: mol_type = other DNA
ttcttcttcttctcttccttcc

SEQ ID NO: 123602 - DNA, 22 bp, synthetic construct
  misc_feature 1..22: note = chemically synthesized
  source 1..22: mol_type = other DNA
cttcttcttctcttccttcctt

SEQ ID NO: 123603 - DNA, 22 bp, synthetic construct
  misc_feature 1..22: note = chemically synthesized
  source 1..22: mol_type = other DNA
ttcttcttctcttccttccttt

SEQ ID NO: 123604 - DNA, 22 bp, synthetic construct
  misc_feature 1..22: note = chemically synthesized
  source 1..22: mol_type = other DNA
cttcttctcttccttcctttcc

SEQ ID NO: 123605 - DNA, 22 bp, synthetic construct
  misc_feature 1..22: note = chemically synthesized
  source 1..22: mol_type = other DNA
ttcttctcttccttcctttcct

SEQ ID NO: 123606 - DNA, 22 bp, synthetic construct
  misc_feature 1..22: note = chemically synthesized
  source 1..22: mol_type = other DNA
cttctcttccttcctttccttc

SEQ ID NO: 123607 - DNA, 22 bp, synthetic construct
  misc_feature 1..22: note = chemically synthesized
  source 1..22: mol_type = other DNA
ttctcttccttcctttccttcc

SEQ ID NO: 123608 - DNA, 22 bp, synthetic construct
  misc_feature 1..22: note = chemically synthesized
  source 1..22: mol_type = other DNA
ctcttccttcctttccttccct

SEQ ID NO: 123609 - DNA, 22 bp, synthetic construct
  misc_feature 1..22: note = chemically synthesized
  source 1..22: mol_type = other DNA
tcttccttcctttccttccctt

SEQ ID NO: 123610 - DNA, 22 bp, synthetic construct
  misc_feature 1..22: note = chemically synthesized
  source 1..22: mol_type = other DNA
ttccttcctttccttcccttcc

SEQ ID NO: 123611 - DNA, 22 bp, synthetic construct
  misc_feature 1..22: note = chemically synthesized
  source 1..22: mol_type = other DNA
ccttcctttccttcccttcctt

SEQ ID NO: 123612 - DNA, 22 bp, synthetic construct
  misc_feature 1..22: note = chemically synthesized
  source 1..22: mol_type = other DNA
cttcctttccttcccttccttc

SEQ ID NO: 123613 - DNA, 22 bp, synthetic construct
  misc_feature 1..22: note = chemically synthesized
  source 1..22: mol_type = other DNA
cctttccttcccttccttcctc

SEQ ID NO: 123614 - DNA, 22 bp, synthetic construct
  misc_feature 1..22: note = chemically synthesized
  source 1..22: mol_type = other DNA
ctttccttcccttccttcctcc

SEQ ID NO: 123615 - DNA, 22 bp, synthetic construct
  misc_feature 1..22: note = chemically synthesized
  source 1..22: mol_type = other DNA
tccttcccttccttcctccctc

SEQ ID NO: 123616 - DNA, 22 bp, synthetic construct
  misc_feature 1..22: note = chemically synthesized
  source 1..22: mol_type = other DNA
ccttcccttccttcctccctcc

SEQ ID NO: 123617 - DNA, 22 bp, synthetic construct
  misc_feature 1..22: note = chemically synthesized
  source 1..22: mol_type = other DNA
cttcccttccttcctccctccc

SEQ ID NO: 123618 - DNA, 22 bp, synthetic construct
  misc_feature 1..22: note = chemically synthesized
  source 1..22: mol_type = other DNA
cccttccttcctccctccctac

SEQ ID NO: 123619 - DNA, 22 bp, synthetic construct
  misc_feature 1..22: note = chemically synthesized
  source 1..22: mol_type = other DNA
ccttccttcctccctccctacc

SEQ ID NO: 123620 - DNA, 22 bp, synthetic construct
  misc_feature 1..22: note = chemically synthesized
  source 1..22: mol_type = other DNA
ccttcctccctccctacctctc

SEQ ID NO: 123621 - DNA, 22 bp, synthetic construct
  misc_feature 1..22: note = chemically synthesized
  source 1..22: mol_type = other DNA
cttcctccctccctacctctct

SEQ ID NO: 123622 - DNA, 22 bp, synthetic construct
  misc_feature 1..22: note = chemically synthesized
  source 1..22: mol_type = other DNA
cctccctccctacctctctctc

SEQ ID NO: 123623 - DNA, 22 bp, synthetic construct
  misc_feature 1..22: note = chemically synthesized
  source 1..22: mol_type = other DNA
ctccctccctacctctctctct

SEQ ID NO: 123624 - DNA, 22 bp, synthetic construct
  misc_feature 1..22: note = chemically synthesized
  source 1..22: mol_type = other DNA
cctccctacctctctctctttc

SEQ ID NO: 123625 - DNA, 22 bp, synthetic construct
  misc_feature 1..22: note = chemically synthesized
  source 1..22: mol_type = other DNA
cctacctctctctctttctcta

SEQ ID NO: 123626 - DNA, 22 bp, synthetic construct
  misc_feature 1..22: note = chemically synthesized
  source 1..22: mol_type = other DNA
cctctctctctttctctatttc

SEQ ID NO: 123627 - DNA, 22 bp, synthetic construct
  misc_feature 1..22: note = chemically synthesized
  source 1..22: mol_type = other DNA
tctctctttctctatttctttc

SEQ ID NO: 123628 - DNA, 22 bp, synthetic construct
  misc_feature 1..22: note = chemically synthesized
  source 1..22: mol_type = other DNA
tctctttctctatttctttctc

SEQ ID NO: 123629 - DNA, 22 bp, synthetic construct
  misc_feature 1..22: note = chemically synthesized
  source 1..22: mol_type = other DNA
tctttctctatttctttctcat

SEQ ID NO: 123630 - DNA, 22 bp, synthetic construct
  misc_feature 1..22: note = chemically synthesized
  source 1..22: mol_type = other DNA
tttctctatttctttctcatct

SEQ ID NO: 123631 - DNA, 22 bp, synthetic construct
  misc_feature 1..22: note = chemically synthesized
  source 1..22: mol_type = other DNA
tctctatttctttctcatcttg

SEQ ID NO: 123632 - DNA, 22 bp, synthetic construct
  misc_feature 1..22: note = chemically synthesized
  source 1..22: mol_type = other DNA
ctctatttctttctcatcttgc

SEQ ID NO: 123633 - DNA, 22 bp, synthetic construct
  misc_feature 1..22: note = chemically synthesized
  source 1..22: mol_type = other DNA
tctatttctttctcatcttgct

SEQ ID NO: 123634 - DNA, 22 bp, synthetic construct
  misc_feature 1..22: note = chemically synthesized
  source 1..22: mol_type = other DNA
tatttctttctcatcttgcttt

SEQ ID NO: 123635 - DNA, 22 bp, synthetic construct
  misc_feature 1..22: note = chemically synthesized
  source 1..22: mol_type = other DNA
tttctttctcatcttgcttttg

SEQ ID NO: 123636 - DNA, 22 bp, synthetic construct
  misc_feature 1..22: note = chemically synthesized
  source 1..22: mol_type = other DNA
ctttctcatcttgcttttgcct

SEQ ID NO: 123637 - DNA, 22 bp, synthetic construct
  misc_feature 1..22: note = chemically synthesized
  source 1..22: mol_type = other DNA
tttctcatcttgcttttgcctt

SEQ ID NO: 123638 - DNA, 22 bp, synthetic construct
  misc_feature 1..22: note = chemically synthesized
  source 1..22: mol_type = other DNA
tctcatcttgcttttgccttcc

SEQ ID NO: 123639 - DNA, 22 bp, synthetic construct
  misc_feature 1..22: note = chemically synthesized
  source 1..22: mol_type = other DNA
ctcatcttgcttttgccttcca

SEQ ID NO: 123640 - DNA, 22 bp, synthetic construct
  misc_feature 1..22: note = chemically synthesized
  source 1..22: mol_type = other DNA
tcatcttgcttttgccttccag

SEQ ID NO: 123641 - DNA, 22 bp, synthetic construct
  misc_feature 1..22: note = chemically synthesized
  source 1..22: mol_type = other DNA
atcttgcttttgccttccaggc

SEQ ID NO: 123642 - DNA, 22 bp, synthetic construct
  misc_feature 1..22: note = chemically synthesized
  source 1..22: mol_type = other DNA
gcttttgccttccaggctgctg

SEQ ID NO: 123643 - DNA, 22 bp, synthetic construct
  misc_feature 1..22: note = chemically synthesized
  source 1..22: mol_type = other DNA
cttttgccttccaggctgctgg

SEQ ID NO: 123644 - DNA, 22 bp, synthetic construct
  misc_feature 1..22: note = chemically synthesized
  source 1..22: mol_type = other DNA
ttgccttccaggctgctggagt

SEQ ID NO: 123645 - DNA, 22 bp, synthetic construct
  misc_feature 1..22: note = chemically synthesized
  source 1..22: mol_type = other DNA
tgccttccaggctgctggagtg

SEQ ID NO: 123646 - DNA, 22 bp, synthetic construct
  misc_feature 1..22: note = chemically synthesized
  source 1..22: mol_type = other DNA
gccttccaggctgctggagtgc

SEQ ID NO: 123647 - DNA, 22 bp, synthetic construct
  misc_feature 1..22: note = chemically synthesized
  source 1..22: mol_type = other DNA
ccttccaggctgctggagtgca

SEQ ID NO: 123648 - DNA, 22 bp, synthetic construct
  misc_feature 1..22: note = chemically synthesized
  source 1..22: mol_type = other DNA
ccaggctgctggagtgcaatgg

SEQ ID NO: 123649 - DNA, 22 bp, synthetic construct
  misc_feature 1..22: note = chemically synthesized
  source 1..22: mol_type = other DNA
caggctgctggagtgcaatggc

SEQ ID NO: 123650 - DNA, 22 bp, synthetic construct
  misc_feature 1..22: note = chemically synthesized
  source 1..22: mol_type = other DNA
ctggagtgcaatggcgcgatct

SEQ ID NO: 123651 - DNA, 22 bp, synthetic construct
  misc_feature 1..22: note = chemically synthesized
  source 1..22: mol_type = other DNA
gagtgcaatggcgcgatctcgg

SEQ ID NO: 123652 - DNA, 22 bp, synthetic construct
  misc_feature 1..22: note = chemically synthesized
  source 1..22: mol_type = other DNA
ggctcactgcaacctccgcctc

SEQ ID NO: 123653 - DNA, 22 bp, synthetic construct
  misc_feature 1..22: note = chemically synthesized
  source 1..22: mol_type = other DNA
actgcaacctccgcctcccagg

SEQ ID NO: 123654 - DNA, 22 bp, synthetic construct
  misc_feature 1..22: note = chemically synthesized
  source 1..22: mol_type = other DNA
caacctccgcctcccaggttca

SEQ ID NO: 123655 - DNA, 22 bp, synthetic construct
  misc_feature 1..22: note = chemically synthesized
  source 1..22: mol_type = other DNA
cgcctcccaggttcaagcgatt

SEQ ID NO: 123656 - DNA, 22 bp, synthetic construct
  misc_feature 1..22: note = chemically synthesized
  source 1..22: mol_type = other DNA
ccaggttcaagcgattctccta

SEQ ID NO: 123657 - DNA, 22 bp, synthetic construct
  misc_feature 1..22: note = chemically synthesized
  source 1..22: mol_type = other DNA
aagcgattctcctacctcagcc

SEQ ID NO: 123658 - DNA, 22 bp, synthetic construct
  misc_feature 1..22: note = chemically synthesized
  source 1..22: mol_type = other DNA
tcctacctcagcctcctgtgta

SEQ ID NO: 123659 - DNA, 22 bp, synthetic construct
  misc_feature 1..22: note = chemically synthesized
  source 1..22: mol_type = other DNA
ctacctcagcctcctgtgtagc

SEQ ID NO: 123660 - DNA, 22 bp, synthetic construct
  misc_feature 1..22: note = chemically synthesized
  source 1..22: mol_type = other DNA
cctcagcctcctgtgtagctgc

SEQ ID NO: 123661 - DNA, 22 bp, synthetic construct
  misc_feature 1..22: note = chemically synthesized
  source 1..22: mol_type = other DNA
agcctcctgtgtagctgcaatt

SEQ ID NO: 123662 - DNA, 22 bp, synthetic construct
  misc_feature 1..22: note = chemically synthesized
  source 1..22: mol_type = other DNA
ctgtgtagctgcaattacaggc

SEQ ID NO: 123663 - DNA, 22 bp, synthetic construct
  misc_feature 1..22: note = chemically synthesized
  source 1..22: mol_type = other DNA
tgtagctgcaattacaggcatc

SEQ ID NO: 123664 - DNA, 22 bp, synthetic construct
  misc_feature 1..22: note = chemically synthesized
  source 1..22: mol_type = other DNA
caattacaggcatctgccacca

SEQ ID NO: 123665 - DNA, 22 bp, synthetic construct
  misc_feature 1..22: note = chemically synthesized
  source 1..22: mol_type = other DNA
caggcatctgccaccaggccct

SEQ ID NO: 123666 - DNA, 22 bp, synthetic construct
  misc_feature 1..22: note = chemically synthesized
  source 1..22: mol_type = other DNA
ccaccaggccctgctaattttt

SEQ ID NO: 123667 - DNA, 22 bp, synthetic construct
  misc_feature 1..22: note = chemically synthesized
  source 1..22: mol_type = other DNA
ctaatttttttgtatttttatt

SEQ ID NO: 123668 - DNA, 22 bp, synthetic construct
  misc_feature 1..22: note = chemically synthesized
  source 1..22: mol_type = other DNA
atttttttgtatttttattaga

SEQ ID NO: 123669 - DNA, 22 bp, synthetic construct
  misc_feature 1..22: note = chemically synthesized
  source 1..22: mol_type = other DNA
ttttgtatttttattagagaca

SEQ ID NO: 123670 - DNA, 22 bp, synthetic construct
  misc_feature 1..22: note = chemically synthesized
  source 1..22: mol_type = other DNA
tttgtatttttattagagacag

SEQ ID NO: 123671 - DNA, 22 bp, synthetic construct
  misc_feature 1..22: note = chemically synthesized
  source 1..22: mol_type = other DNA
ttgtatttttattagagacagg

SEQ ID NO: 123672 - DNA, 22 bp, synthetic construct
  misc_feature 1..22: note = chemically synthesized
  source 1..22: mol_type = other DNA
tgtatttttattagagacaggg

SEQ ID NO: 123673 - DNA, 22 bp, synthetic construct
  misc_feature 1..22: note = chemically synthesized
  source 1..22: mol_type = other DNA
gtatttttattagagacagggt

SEQ ID NO: 123674 - DNA, 22 bp, synthetic construct
  misc_feature 1..22: note = chemically synthesized
  source 1..22: mol_type = other DNA
tatttttattagagacagggtt

SEQ ID NO: 123675 - DNA, 22 bp, synthetic construct
  misc_feature 1..22: note = chemically synthesized
  source 1..22: mol_type = other DNA
ttattagagacagggtttcacc

SEQ ID NO: 123676 - DNA, 22 bp, synthetic construct
  misc_feature 1..22: note = chemically synthesized
  source 1..22: mol_type = other DNA
tattagagacagggtttcacca

SEQ ID NO: 123677 - DNA, 22 bp, synthetic construct
  misc_feature 1..22: note = chemically synthesized
  source 1..22: mol_type = other DNA
attagagacagggtttcaccat

SEQ ID NO: 123678 - DNA, 22 bp, synthetic construct
  misc_feature 1..22: note = chemically synthesized
  source 1..22: mol_type = other DNA
ttagagacagggtttcaccatg

SEQ ID NO: 123679 - DNA, 22 bp, synthetic construct
  misc_feature 1..22: note = chemically synthesized
  source 1..22: mol_type = other DNA
gagacagggtttcaccatgttg

SEQ ID NO: 123680 - DNA, 22 bp, synthetic construct
  misc_feature 1..22: note = chemically synthesized
  source 1..22: mol_type = other DNA
caccatgttggtcaggctggtc

SEQ ID NO: 123681 - DNA, 22 bp, synthetic construct
  misc_feature 1..22: note = chemically synthesized
  source 1..22: mol_type = other DNA
accatgttggtcaggctggtct

SEQ ID NO: 123682 - DNA, 22 bp, synthetic construct
  misc_feature 1..22: note = chemically synthesized
  source 1..22: mol_type = other DNA
gtcaggctggtctcgaactctt

SEQ ID NO: 123683 - DNA, 22 bp, synthetic construct
  misc_feature 1..22: note = chemically synthesized
  source 1..22: mol_type = other DNA
gtctcgaactcttgccctcagg

SEQ ID NO: 123684 - DNA, 22 bp, synthetic construct
  misc_feature 1..22: note = chemically synthesized
  source 1..22: mol_type = other DNA
gaactcttgccctcaggtgatc

SEQ ID NO: 123685 - DNA, 22 bp, synthetic construct
  misc_feature 1..22: note = chemically synthesized
  source 1..22: mol_type = other DNA
ttgccctcaggtgatcctcctg

SEQ ID NO: 123686 - DNA, 22 bp, synthetic construct
  misc_feature 1..22: note = chemically synthesized
  source 1..22: mol_type = other DNA
gccctcaggtgatcctcctgcc

SEQ ID NO: 123687 - DNA, 22 bp, synthetic construct
  misc_feature 1..22: note = chemically synthesized
  source 1..22: mol_type = other DNA
ccctcaggtgatcctcctgcct

SEQ ID NO: 123688 - DNA, 22 bp, synthetic construct
  misc_feature 1..22: note = chemically synthesized
  source 1..22: mol_type = other DNA
aggtgatcctcctgcctcagcc

SEQ ID NO: 123689 - DNA, 22 bp, synthetic construct
  misc_feature 1..22: note = chemically synthesized
  source 1..22: mol_type = other DNA
ctgcctcagccacccaaagtgc

SEQ ID NO: 123690 - DNA, 22 bp, synthetic construct
  misc_feature 1..22: note = chemically synthesized
  source 1..22: mol_type = other DNA
cctcagccacccaaagtgctgg

SEQ ID NO: 123691 - DNA, 22 bp, synthetic construct
  misc_feature 1..22: note = chemically synthesized
  source 1..22: mol_type = other DNA
agccacccaaagtgctgggatt

SEQ ID NO: 123692 - DNA, 22 bp, synthetic construct
  misc_feature 1..22: note = chemically synthesized
  source 1..22: mol_type = other DNA
ggattacaggcatgagtctgta

SEQ ID NO: 123693 - DNA, 22 bp, synthetic construct
  misc_feature 1..22: note = chemically synthesized
  source 1..22: mol_type = other DNA
caggcatgagtctgtaatgtag

SEQ ID NO: 123694 - DNA, 22 bp, synthetic construct
  misc_feature 1..22: note = chemically synthesized
  source 1..22: mol_type = other DNA
taatgtagccttttctttaaca

SEQ ID NO: 123695 - DNA, 22 bp, synthetic construct
  misc_feature 1..22: note = chemically synthesized
  source 1..22: mol_type = other DNA
ttctttaacaggctacccacag

SEQ ID NO: 123696 - DNA, 22 bp, synthetic construct
  misc_feature 1..22: note = chemically synthesized
  source 1..22: mol_type = other DNA
tctttaacaggctacccacaga

SEQ ID NO: 123697 - DNA, 22 bp, synthetic construct
  misc_feature 1..22: note = chemically synthesized
  source 1..22: mol_type = other DNA
ctttaacaggctacccacagag

SEQ ID NO: 123698 - DNA, 22 bp, synthetic construct
  misc_feature 1..22: note = chemically synthesized
  source 1..22: mol_type = other DNA
tttaacaggctacccacagagg

SEQ ID NO: 123699 - DNA, 22 bp, synthetic construct
  misc_feature 1..22: note = chemically synthesized
  source 1..22: mol_type = other DNA
taacaggctacccacagaggaa

SEQ ID NO: 123700 - DNA, 22 bp, synthetic construct
  misc_feature 1..22: note = chemically synthesized
  source 1..22: mol_type = other DNA
aacaggctacccacagaggaac

SEQ ID NO: 123701 - DNA, 22 bp, synthetic construct
  misc_feature 1..22: note = chemically synthesized
  source 1..22: mol_type = other DNA
acaggctacccacagaggaacc

SEQ ID NO: 123702 - DNA, 22 bp, synthetic construct
  misc_feature 1..22: note = chemically synthesized
  source 1..22: mol_type = other DNA
cccacagaggaaccttcccttg

SEQ ID NO: 123703 - DNA, 22 bp, synthetic construct
  misc_feature 1..22: note = chemically synthesized
  source 1..22: mol_type = other DNA
cccttgagctccttttcagatt

SEQ ID NO: 123704 - DNA, 22 bp, synthetic construct
  misc_feature 1..22: note = chemically synthesized
  source 1..22: mol_type = other DNA
ccttgagctccttttcagattc

SEQ ID NO: 123705 - DNA, 22 bp, synthetic construct
  misc_feature 1..22: note = chemically synthesized
  source 1..22: mol_type = other DNA
gagctccttttcagattcttcc

SEQ ID NO: 123706 - DNA, 22 bp, synthetic construct
  misc_feature 1..22: note = chemically synthesized
  source 1..22: mol_type = other DNA
agctccttttcagattcttcct

SEQ ID NO: 123707 - DNA, 22 bp, synthetic construct
  misc_feature 1..22: note = chemically synthesized
  source 1..22: mol_type = other DNA
cttttcagattcttccttctgt

SEQ ID NO: 123708 - DNA, 22 bp, synthetic construct
  misc_feature 1..22: note = chemically synthesized
  source 1..22: mol_type = other DNA
ttcagattcttccttctgtttc

SEQ ID NO: 123709 - DNA, 22 bp, synthetic construct
  misc_feature 1..22: note = chemically synthesized
  source 1..22: mol_type = other DNA
tcagattcttccttctgtttct

SEQ ID NO: 123710 - DNA, 22 bp, synthetic construct
  misc_feature 1..22: note = chemically synthesized
  source 1..22: mol_type = other DNA
cagattcttccttctgtttctc

SEQ ID NO: 123711 - DNA, 22 bp, synthetic construct
  misc_feature 1..22: note = chemically synthesized
  source 1..22: mol_type = other DNA
agattcttccttctgtttctct

SEQ ID NO: 123712 - DNA, 22 bp, synthetic construct
  misc_feature 1..22: note = chemically synthesized
  source 1..22: mol_type = other DNA
ttccttctgtttctctggccct

SEQ ID NO: 123713 - DNA, 22 bp, synthetic construct
  misc_feature 1..22: note = chemically synthesized
  source 1..22: mol_type = other DNA
ccttctgtttctctggcccttt

SEQ ID NO: 123714 - DNA, 22 bp, synthetic construct
  misc_feature 1..22: note = chemically synthesized
  source 1..22: mol_type = other DNA
cttctgtttctctggccctttc

SEQ ID NO: 123715 - DNA, 22 bp, synthetic construct
  misc_feature 1..22: note = chemically synthesized
  source 1..22: mol_type = other DNA
ctgtttctctggccctttctcc

SEQ ID NO: 123716 - DNA, 22 bp, synthetic construct
  misc_feature 1..22: note = chemically synthesized
  source 1..22: mol_type = other DNA
tgtttctctggccctttctcct

SEQ ID NO: 123717 - DNA, 22 bp, synthetic construct
  misc_feature 1..22: note = chemically synthesized
  source 1..22: mol_type = other DNA
tttctctggccctttctccttt

SEQ ID NO: 123718 - DNA, 22 bp, synthetic construct
  misc_feature 1..22: note = chemically synthesized
  source 1..22: mol_type = other DNA
ctctggccctttctcctttgtc

SEQ ID NO: 123719 - DNA, 22 bp, synthetic construct
  misc_feature 1..22: note = chemically synthesized
  source 1..22: mol_type = other DNA
tctggccctttctcctttgtct

SEQ ID NO: 123720 - DNA, 22 bp, synthetic construct
  misc_feature 1..22: note = chemically synthesized
  source 1..22: mol_type = other DNA
tggccctttctcctttgtcttc

SEQ ID NO: 123721 - DNA, 22 bp, synthetic construct
  misc_feature 1..22: note = chemically synthesized
  source 1..22: mol_type = other DNA
gccctttctcctttgtcttcta

SEQ ID NO: 123722 - DNA, 22 bp, synthetic construct
  misc_feature 1..22: note = chemically synthesized
  source 1..22: mol_type = other DNA
tctcctttgtcttctatacttt

SEQ ID NO: 123723 - DNA, 22 bp, synthetic construct
  misc_feature 1..22: note = chemically synthesized
  source 1..22: mol_type = other DNA
ctcctttgtcttctatactttc

SEQ ID NO: 123724 - DNA, 22 bp, synthetic construct
  misc_feature 1..22: note = chemically synthesized
  source 1..22: mol_type = other DNA
tcctttgtcttctatactttcc

SEQ ID NO: 123725 - DNA, 22 bp, synthetic construct
  misc_feature 1..22: note = chemically synthesized
  source 1..22: mol_type = other DNA
ctttgtcttctatactttccta

SEQ ID NO: 123726 - DNA, 22 bp, synthetic construct
  misc_feature 1..22: note = chemically synthesized
  source 1..22: mol_type = other DNA
tgtcttctatactttcctactg

SEQ ID NO: 123727 - DNA, 22 bp, synthetic construct
  misc_feature 1..22: note = chemically synthesized
  source 1..22: mol_type = other DNA
gtcttctatactttcctactga

SEQ ID NO: 123728 - DNA, 22 bp, synthetic construct
  misc_feature 1..22: note = chemically synthesized
  source 1..22: mol_type = other DNA
tcttctatactttcctactgat

SEQ ID NO: 123729 - DNA, 22 bp, synthetic construct
  misc_feature 1..22: note = chemically synthesized
  source 1..22: mol_type = other DNA
ctatactttcctactgattttc

SEQ ID NO: 123730 - DNA, 22 bp, synthetic construct
  misc_feature 1..22: note = chemically synthesized
  source 1..22: mol_type = other DNA
tatactttcctactgattttcc

SEQ ID NO: 123731 - DNA, 22 bp, synthetic construct
  misc_feature 1..22: note = chemically synthesized
  source 1..22: mol_type = other DNA
tactttcctactgattttcctt

SEQ ID NO: 123732 - DNA, 22 bp, synthetic construct
  misc_feature 1..22: note = chemically synthesized
  source 1..22: mol_type = other DNA
tcctactgattttccttcctgt

SEQ ID NO: 123733 - DNA, 22 bp, synthetic construct
  misc_feature 1..22: note = chemically synthesized
  source 1..22: mol_type = other DNA
cctactgattttccttcctgtt

SEQ ID NO: 123734 - DNA, 22 bp, synthetic construct
  misc_feature 1..22: note = chemically synthesized
  source 1..22: mol_type = other DNA
ctactgattttccttcctgttt

SEQ ID NO: 123735 - DNA, 22 bp, synthetic construct
  misc_feature 1..22: note = chemically synthesized
  source 1..22: mol_type = other DNA
ctgattttccttcctgtttccc

SEQ ID NO: 123736 - DNA, 22 bp, synthetic construct
  misc_feature 1..22: note = chemically synthesized
  source 1..22: mol_type = other DNA
attttccttcctgtttccctca

SEQ ID NO: 123737 - DNA, 22 bp, synthetic construct
  misc_feature 1..22: note = chemically synthesized
  source 1..22: mol_type = other DNA
tccttcctgtttccctcatcct

SEQ ID NO: 123738 - DNA, 22 bp, synthetic construct
  misc_feature 1..22: note = chemically synthesized
  source 1..22: mol_type = other DNA
ccttcctgtttccctcatcctt

SEQ ID NO: 123739 - DNA, 22 bp, synthetic construct
  misc_feature 1..22: note = chemically synthesized
  source 1..22: mol_type = other DNA
cttcctgtttccctcatcctta

SEQ ID NO: 123740 - DNA, 22 bp, synthetic construct
  misc_feature 1..22: note = chemically synthesized
  source 1..22: mol_type = other DNA
cctgtttccctcatccttaact

SEQ ID NO: 123741 - DNA, 22 bp, synthetic construct
  misc_feature 1..22: note = chemically synthesized
  source 1..22: mol_type = other DNA
ctgtttccctcatccttaactt

SEQ ID NO: 123742 - DNA, 22 bp, synthetic construct
  misc_feature 1..22: note = chemically synthesized
  source 1..22: mol_type = other DNA
tttccctcatccttaacttcct

SEQ ID NO: 123743 - DNA, 22 bp, synthetic construct
  misc_feature 1..22: note = chemically synthesized
  source 1..22: mol_type = other DNA
ccctcatccttaacttcctact

SEQ ID NO: 123744 - DNA, 22 bp, synthetic construct
  misc_feature 1..22: note = chemically synthesized
  source 1..22: mol_type = other DNA
cctcatccttaacttcctactt

SEQ ID NO: 123745 - DNA, 22 bp, synthetic construct
  misc_feature 1..22: note = chemically synthesized
  source 1..22: mol_type = other DNA
atccttaacttcctacttaagg

SEQ ID NO: 123746 - DNA, 22 bp, synthetic construct
  misc_feature 1..22: note = chemically synthesized
  source 1..22: mol_type = other DNA
aacttcctacttaaggcttgct

SEQ ID NO: 123747 - DNA, 22 bp, synthetic construct
  misc_feature 1..22: note = chemically synthesized
  source 1..22: mol_type = other DNA
acttcctacttaaggcttgctc

SEQ ID NO: 123748 - DNA, 22 bp, synthetic construct
  misc_feature 1..22: note = chemically synthesized
  source 1..22: mol_type = other DNA
cctacttaaggcttgctctatc

SEQ ID NO: 123749 - DNA, 22 bp, synthetic construct
  misc_feature 1..22: note = chemically synthesized
  source 1..22: mol_type = other DNA
ctacttaaggcttgctctatcc

SEQ ID NO: 123750 - DNA, 22 bp, synthetic construct
  misc_feature 1..22: note = chemically synthesized
  source 1..22: mol_type = other DNA
cttaaggcttgctctatcctct

SEQ ID NO: 123751 - DNA, 22 bp, synthetic construct
  misc_feature 1..22: note = chemically synthesized
  source 1..22: mol_type = other DNA
aaggcttgctctatcctcttca

SEQ ID NO: 123752 - DNA, 22 bp, synthetic construct
  misc_feature 1..22: note = chemically synthesized
  source 1..22: mol_type = other DNA
aggcttgctctatcctcttcac

SEQ ID NO: 123753 - DNA, 22 bp, synthetic construct
  misc_feature 1..22: note = chemically synthesized
  source 1..22: mol_type = other DNA
gctctatcctcttcacatactg

SEQ ID NO: 123754 - DNA, 22 bp, synthetic construct
  misc_feature 1..22: note = chemically synthesized
  source 1..22: mol_type = other DNA
ctctatcctcttcacatactgt

SEQ ID NO: 123755 - DNA, 22 bp, synthetic construct
  misc_feature 1..22: note = chemically synthesized
  source 1..22: mol_type = other DNA
tatcctcttcacatactgtttc

SEQ ID NO: 123756 - DNA, 22 bp, synthetic construct
  misc_feature 1..22: note = chemically synthesized
  source 1..22: mol_type = other DNA
tcctcttcacatactgtttctt

SEQ ID NO: 123757 - DNA, 22 bp, synthetic construct
  misc_feature 1..22: note = chemically synthesized
  source 1..22: mol_type = other DNA
ttcacatactgtttcttatttt

SEQ ID NO: 123758 - DNA, 22 bp, synthetic construct
  misc_feature 1..22: note = chemically synthesized
  source 1..22: mol_type = other DNA
cacatactgtttcttattttgc

SEQ ID NO: 123759 - DNA, 22 bp, synthetic construct
  misc_feature 1..22: note = chemically synthesized
  source 1..22: mol_type = other DNA
acatactgtttcttattttgcc

SEQ ID NO: 123760 - DNA, 22 bp, synthetic construct
  misc_feature 1..22: note = chemically synthesized
  source 1..22: mol_type = other DNA
tttcttattttgcccactgggt

SEQ ID NO: 123761 - DNA, 22 bp, synthetic construct
  misc_feature 1..22: note = chemically synthesized
  source 1..22: mol_type = other DNA
cttattttgcccactgggttca

SEQ ID NO: 123762 - DNA, 22 bp, synthetic construct
  misc_feature 1..22: note = chemically synthesized
  source 1..22: mol_type = other DNA
ttattttgcccactgggttcac

SEQ ID NO: 123763 - DNA, 22 bp, synthetic construct
  misc_feature 1..22: note = chemically synthesized
  source 1..22: mol_type = other DNA
attttgcccactgggttcacct

SEQ ID NO: 123764 - DNA, 22 bp, synthetic construct
  misc_feature 1..22: note = chemically synthesized
  source 1..22: mol_type = other DNA
ttttgcccactgggttcacctc

SEQ ID NO: 123765 - DNA, 22 bp, synthetic construct
  misc_feature 1..22: note = chemically synthesized
  source 1..22: mol_type = other DNA
tgcccactgggttcacctctaa

SEQ ID NO: 123766 - DNA, 22 bp, synthetic construct
  misc_feature 1..22: note = chemically synthesized
  source 1..22: mol_type = other DNA
gcccactgggttcacctctaag

SEQ ID NO: 123767 - DNA, 22 bp, synthetic construct
  misc_feature 1..22: note = chemically synthesized
  source 1..22: mol_type = other DNA
cccactgggttcacctctaagt

SEQ ID NO: 123768 - DNA, 22 bp, synthetic construct
  misc_feature 1..22: note = chemically synthesized
  source 1..22: mol_type = other DNA
ggttcacctctaagtcacacac

SEQ ID NO: 123769 - DNA, 22 bp, synthetic construct
  misc_feature 1..22: note = chemically synthesized
  source 1..22: mol_type = other DNA
acctctaagtcacacacaactg

SEQ ID NO: 123770 - DNA, 22 bp, synthetic construct
  misc_feature 1..22: note = chemically synthesized
  source 1..22: mol_type = other DNA
taagtcacacacaactggacaa

SEQ ID NO: 123771 - DNA, 22 bp, synthetic construct
  misc_feature 1..22: note = chemically synthesized
  source 1..22: mol_type = other DNA
agtcacacacaactggacaagt

SEQ ID NO: 123772 - DNA, 22 bp, synthetic construct
  misc_feature 1..22: note = chemically synthesized
  source 1..22: mol_type = other DNA
gacaagtaagcatacccctcag

SEQ ID NO: 123773 - DNA, 22 bp, synthetic construct
  misc_feature 1..22: note = chemically synthesized
  source 1..22: mol_type = other DNA
agcaactcttccattaacagcc

SEQ ID NO: 123774 - DNA, 22 bp, synthetic construct
  misc_feature 1..22: note = chemically synthesized
  source 1..22: mol_type = other DNA
ttccattaacagcccccaaaca

SEQ ID NO: 123775 - DNA, 22 bp, synthetic construct
  misc_feature 1..22: note = chemically synthesized
  source 1..22: mol_type = other DNA
ccattaacagcccccaaacatg

SEQ ID NO: 123776 - DNA, 22 bp, synthetic construct
  misc_feature 1..22: note = chemically synthesized
  source 1..22: mol_type = other DNA
cattaacagcccccaaacatgc

SEQ ID NO: 123777 - DNA, 22 bp, synthetic construct
  misc_feature 1..22: note = chemically synthesized
  source 1..22: mol_type = other DNA
acagcccccaaacatgctgatt

SEQ ID NO: 123778 - DNA, 22 bp, synthetic construct
  misc_feature 1..22: note = chemically synthesized
  source 1..22: mol_type = other DNA
attacctggctgctccataggg

SEQ ID NO: 123779 - DNA, 22 bp, synthetic construct
  misc_feature 1..22: note = chemically synthesized
  source 1..22: mol_type = other DNA
cctggctgctccatagggtggt

SEQ ID NO: 123780 - DNA, 22 bp, synthetic construct
  misc_feature 1..22: note = chemically synthesized
  source 1..22: mol_type = other DNA
gctgctccatagggtggttggt

SEQ ID NO: 123781 - DNA, 22 bp, synthetic construct
  misc_feature 1..22: note = chemically synthesized
  source 1..22: mol_type = other DNA
ctccatagggtggttggttggt

SEQ ID NO: 123782 - DNA, 22 bp, synthetic construct
  misc_feature 1..22: note = chemically synthesized
  source 1..22: mol_type = other DNA
catagggtggttggttggtctt

SEQ ID NO: 123783 - DNA, 22 bp, synthetic construct
  misc_feature 1..22: note = chemically synthesized
  source 1..22: mol_type = other DNA
gttggtcttaagtctcccacta

SEQ ID NO: 123784 - DNA, 22 bp, synthetic construct
  misc_feature 1..22: note = chemically synthesized
  source 1..22: mol_type = other DNA
gtcttaagtctcccactagcca

SEQ ID NO: 123785 - DNA, 22 bp, synthetic construct
  misc_feature 1..22: note = chemically synthesized
  source 1..22: mol_type = other DNA
aagtctcccactagccagcacc

SEQ ID NO: 123786 - DNA, 22 bp, synthetic construct
  misc_feature 1..22: note = chemically synthesized
  source 1..22: mol_type = other DNA
agtctcccactagccagcacct

SEQ ID NO: 123787 - DNA, 22 bp, synthetic construct
  misc_feature 1..22: note = chemically synthesized
  source 1..22: mol_type = other DNA
ccactagccagcacctagcagt

SEQ ID NO: 123788 - DNA, 22 bp, synthetic construct
  misc_feature 1..22: note = chemically synthesized
  source 1..22: mol_type = other DNA
gccagcacctagcagttcttca

SEQ ID NO: 123789 - DNA, 22 bp, synthetic construct
  misc_feature 1..22: note = chemically synthesized
  source 1..22: mol_type = other DNA
gcagttcttcagtttgtgtggt

SEQ ID NO: 123790 - DNA, 22 bp, synthetic construct
  misc_feature 1..22: note = chemically synthesized
  source 1..22: mol_type = other DNA
ttcagtttgtgtggttctcagt

SEQ ID NO: 123791 - DNA, 22 bp, synthetic construct
  misc_feature 1..22: note = chemically synthesized
  source 1..22: mol_type = other DNA
cagtttgtgtggttctcagtgc

SEQ ID NO: 123792 - DNA, 22 bp, synthetic construct
  misc_feature 1..22: note = chemically synthesized
  source 1..22: mol_type = other DNA
agtttgtgtggttctcagtgct

SEQ ID NO: 123793 - DNA, 22 bp, synthetic construct
  misc_feature 1..22: note = chemically synthesized
  source 1..22: mol_type = other DNA
gtgtggttctcagtgctggtga

SEQ ID NO: 123794 - DNA, 22 bp, synthetic construct
  misc_feature 1..22: note = chemically synthesized
  source 1..22: mol_type = other DNA
tgtggttctcagtgctggtgat

SEQ ID NO: 123795 - DNA, 22 bp, synthetic construct
  misc_feature 1..22: note = chemically synthesized
  source 1..22: mol_type = other DNA
tcagtgctggtgatcatgctga

SEQ ID NO: 123796 - DNA, 22 bp, synthetic construct
  misc_feature 1..22: note = chemically synthesized
  source 1..22: mol_type = other DNA
agtgctggtgatcatgctgagc

SEQ ID NO: 123797 - DNA, 22 bp, synthetic construct
  misc_feature 1..22: note = chemically synthesized
  source 1..22: mol_type = other DNA
gtgatcatgctgagcctgcccc

SEQ ID NO: 123798 - DNA, 22 bp, synthetic construct
  misc_feature 1..22: note = chemically synthesized
  source 1..22: mol_type = other DNA
agcctgcccccttcatgcctct

SEQ ID NO: 123799 - DNA, 22 bp, synthetic construct
  misc_feature 1..22: note = chemically synthesized
  source 1..22: mol_type = other DNA
cccccttcatgcctctctggtc

SEQ ID NO: 123800 - DNA, 22 bp, synthetic construct
  misc_feature 1..22: note = chemically synthesized
  source 1..22: mol_type = other DNA
catgcctctctggtcagtcaga

SEQ ID NO: 123801 - DNA, 22 bp, synthetic construct
  misc_feature 1..22: note = chemically synthesized
  source 1..22: mol_type = other DNA
atgcctctctggtcagtcagac

SEQ ID NO: 123802 - DNA, 22 bp, synthetic construct
  misc_feature 1..22: note = chemically synthesized
  source 1..22: mol_type = other DNA
tctggtcagtcagacccttcag

SEQ ID NO: 123803 - DNA, 22 bp, synthetic construct
  misc_feature 1..22: note = chemically synthesized
  source 1..22: mol_type = other DNA
tggtcagtcagacccttcagaa

SEQ ID NO: 123804 - DNA, 22 bp, synthetic construct
  misc_feature 1..22: note = chemically synthesized
  source 1..22: mol_type = other DNA
gtcagtcagacccttcagaacc

SEQ ID NO: 123805 - DNA, 22 bp, synthetic construct
  misc_feature 1..22: note = chemically synthesized
  source 1..22: mol_type = other DNA
cagaacccaagaggtaagcaga

SEQ ID NO: 123806 - DNA, 22 bp, synthetic construct
  misc_feature 1..22: note = chemically synthesized
  source 1..22: mol_type = other DNA
agaacccaagaggtaagcagag

SEQ ID NO: 123807 - DNA, 22 bp, synthetic construct
  misc_feature 1..22: note = chemically synthesized
  source 1..22: mol_type = other DNA
ctctaagaatggttagcaactt

SEQ ID NO: 123808 - DNA, 22 bp, synthetic construct
  misc_feature 1..22: note = chemically synthesized
  source 1..22: mol_type = other DNA
taagaatggttagcaacttaaa

SEQ ID NO: 123809 - DNA, 22 bp, synthetic construct
  misc_feature 1..22: note = chemically synthesized
  source 1..22: mol_type = other DNA
agaatggttagcaacttaaact

SEQ ID NO: 123810 - DNA, 22 bp, synthetic construct
  misc_feature 1..22: note = chemically synthesized
  source 1..22: mol_type = other DNA
gcaacttaaacttcatcctgtc

SEQ ID NO: 123811 - DNA, 22 bp, synthetic construct
  misc_feature 1..22: note = chemically synthesized
  source 1..22: mol_type = other DNA
aaacttcatcctgtcatcaagc

SEQ ID NO: 123812 - DNA, 22 bp, synthetic construct
  misc_feature 1..22: note = chemically synthesized
  source 1..22: mol_type = other DNA
aacttcatcctgtcatcaagcc

SEQ ID NO: 123813 - DNA, 22 bp, synthetic construct
  misc_feature 1..22: note = chemically synthesized
  source 1..22: mol_type = other DNA
catcctgtcatcaagccagcac

SEQ ID NO: 123814 - DNA, 22 bp, synthetic construct
  misc_feature 1..22: note = chemically synthesized
  source 1..22: mol_type = other DNA
atcctgtcatcaagccagcaca

SEQ ID NO: 123815 - DNA, 22 bp, synthetic construct
  misc_feature 1..22: note = chemically synthesized
  source 1..22: mol_type = other DNA
tcatcaagccagcacatactaa

SEQ ID NO: 123816 - DNA, 22 bp, synthetic construct
  misc_feature 1..22: note = chemically synthesized
  source 1..22: mol_type = other DNA
agcatctataatgtgctagaca

SEQ ID NO: 123817 - DNA, 22 bp, synthetic construct
  misc_feature 1..22: note = chemically synthesized
  source 1..22: mol_type = other DNA
taatgtgctagacaatgtgggt

SEQ ID NO: 123818 - DNA, 22 bp, synthetic construct
  misc_feature 1..22: note = chemically synthesized
  source 1..22: mol_type = other DNA
gacaatgtgggtaatggaggtg

SEQ ID NO: 123819 - DNA, 22 bp, synthetic construct
  misc_feature 1..22: note = chemically synthesized
  source 1..22: mol_type = other DNA
gattataatatctgccctcaaa

SEQ ID NO: 123820 - DNA, 22 bp, synthetic construct
  misc_feature 1..22: note = chemically synthesized
  source 1..22: mol_type = other DNA
taatatctgccctcaaaagctt

SEQ ID NO: 123821 - DNA, 22 bp, synthetic construct
  misc_feature 1..22: note = chemically synthesized
  source 1..22: mol_type = other DNA
ccctcaaaagcttatatctatt

SEQ ID NO: 123822 - DNA, 22 bp, synthetic construct
  misc_feature 1..22: note = chemically synthesized
  source 1..22: mol_type = other DNA
aaaagcttatatctatttttta

SEQ ID NO: 123823 - DNA, 22 bp, synthetic construct
  misc_feature 1..22: note = chemically synthesized
  source 1..22: mol_type = other DNA
atatctattttttaaataatta

SEQ ID NO: 123824 - DNA, 22 bp, synthetic construct
  misc_feature 1..22: note = chemically synthesized
  source 1..22: mol_type = other DNA
tatctattttttaaataattac

SEQ ID NO: 123825 - DNA, 22 bp, synthetic construct
  misc_feature 1..22: note = chemically synthesized
  source 1..22: mol_type = other DNA
ttttttaaataattacaggaca

SEQ ID NO: 123826 - DNA, 22 bp, synthetic construct
  misc_feature 1..22: note = chemically synthesized
  source 1..22: mol_type = other DNA
tttaaataattacaggacaatt

SEQ ID NO: 123827 - DNA, 22 bp, synthetic construct
  misc_feature 1..22: note = chemically synthesized
  source 1..22: mol_type = other DNA
ttaaataattacaggacaattt

SEQ ID NO: 123828 - DNA, 22 bp, synthetic construct
  misc_feature 1..22: note = chemically synthesized
  source 1..22: mol_type = other DNA
taaataattacaggacaattta

SEQ ID NO: 123829 - DNA, 22 bp, synthetic construct
  misc_feature 1..22: note = chemically synthesized
  source 1..22: mol_type = other DNA
aaataattacaggacaatttaa

SEQ ID NO: 123830 - DNA, 22 bp, synthetic construct
  misc_feature 1..22: note = chemically synthesized
  source 1..22: mol_type = other DNA
aataattacaggacaatttaaa

SEQ ID NO: 123831 - DNA, 22 bp, synthetic construct
  misc_feature 1..22: note = chemically synthesized
  source 1..22: mol_type = other DNA
caggacaatttaaatgtatcag

SEQ ID NO: 123832 - DNA, 22 bp, synthetic construct
  misc_feature 1..22: note = chemically synthesized
  source 1..22: mol_type = other DNA
aaatgtatcagtttgggttgaa

SEQ ID NO: 123833 - DNA, 22 bp, synthetic construct
  misc_feature 1..22: note = chemically synthesized
  source 1..22: mol_type = other DNA
aatgtatcagtttgggttgaat

SEQ ID NO: 123834 - DNA, 22 bp, synthetic construct
  misc_feature 1..22: note = chemically synthesized
  source 1..22: mol_type = other DNA
gggttgaataaaatcagggatg

SEQ ID NO: 123835 - DNA, 22 bp, synthetic construct
  misc_feature 1..22: note = chemically synthesized
  source 1..22: mol_type = other DNA
ggttgaataaaatcagggatgt

SEQ ID NO: 123836 - DNA, 22 bp, synthetic construct
  misc_feature 1..22: note = chemically synthesized
  source 1..22: mol_type = other DNA
aataaaatcagggatgtttctc

SEQ ID NO: 123837 - DNA, 22 bp, synthetic construct
  misc_feature 1..22: note = chemically synthesized
  source 1..22: mol_type = other DNA
ctcattagggcctcaacacatt

SEQ ID NO: 123838 - DNA, 22 bp, synthetic construct
  misc_feature 1..22: note = chemically synthesized
  source 1..22: mol_type = other DNA
tcattagggcctcaacacattt

SEQ ID NO: 123839 - DNA, 22 bp, synthetic construct
  misc_feature 1..22: note = chemically synthesized
  source 1..22: mol_type = other DNA
attagggcctcaacacatttgg

SEQ ID NO: 123840 - DNA, 22 bp, synthetic construct
  misc_feature 1..22: note = chemically synthesized
  source 1..22: mol_type = other DNA
gggcctcaacacatttggaggt

SEQ ID NO: 123841 - DNA, 22 bp, synthetic construct
  misc_feature 1..22: note = chemically synthesized
  source 1..22: mol_type = other DNA
aacacatttggaggtgtgttaa

SEQ ID NO: 123842 - DNA, 22 bp, synthetic construct
  misc_feature 1..22: note = chemically synthesized
  source 1..22: mol_type = other DNA
ggaggtgtgttaagacagtagt

SEQ ID NO: 123843 - DNA, 22 bp, synthetic construct
  misc_feature 1..22: note = chemically synthesized
  source 1..22: mol_type = other DNA
gaggtgtgttaagacagtagtc

SEQ ID NO: 123844 - DNA, 22 bp, synthetic construct
  misc_feature 1..22: note = chemically synthesized
  source 1..22: mol_type = other DNA
agacagtagtcagattcacacc

SEQ ID NO: 123845 - DNA, 22 bp, synthetic construct
  misc_feature 1..22: note = chemically synthesized
  source 1..22: mol_type = other DNA
acaccaagagccctgtcatggc

SEQ ID NO: 123846 - DNA, 22 bp, synthetic construct
  misc_feature 1..22: note = chemically synthesized
  source 1..22: mol_type = other DNA
tcatggcaaaccgatgtcatgt

SEQ ID NO: 123847 - DNA, 22 bp, synthetic construct
  misc_feature 1..22: note = chemically synthesized
  source 1..22: mol_type = other DNA
gataatgtttttgtgtatcaat

SEQ ID NO: 123848 - DNA, 22 bp, synthetic construct
  misc_feature 1..22: note = chemically synthesized
  source 1..22: mol_type = other DNA
ttgtgtatcaatatgctttgtg

SEQ ID NO: 123849 - DNA, 22 bp, synthetic construct
  misc_feature 1..22: note = chemically synthesized
  source 1..22: mol_type = other DNA
tgtgtatcaatatgctttgtga

SEQ ID NO: 123850 - DNA, 22 bp, synthetic construct
  misc_feature 1..22: note = chemically synthesized
  source 1..22: mol_type = other DNA
gtgtatcaatatgctttgtgaa

SEQ ID NO: 123851 - DNA, 22 bp, synthetic construct
  misc_feature 1..22: note = chemically synthesized
  source 1..22: mol_type = other DNA
tgtatcaatatgctttgtgaaa

SEQ ID NO: 123852 - DNA, 22 bp, synthetic construct
  misc_feature 1..22: note = chemically synthesized
  source 1..22: mol_type = other DNA
tgtgaaaaaacttcgaggtagt

SEQ ID NO: 123853 - DNA, 22 bp, synthetic construct
  misc_feature 1..22: note = chemically synthesized
  source 1..22: mol_type = other DNA
gtgaaaaaacttcgaggtagta

SEQ ID NO: 123854 - DNA, 22 bp, synthetic construct
  misc_feature 1..22: note = chemically synthesized
  source 1..22: mol_type = other DNA
tgaaaaaacttcgaggtagtac

SEQ ID NO: 123855 - DNA, 22 bp, synthetic construct
  misc_feature 1..22: note = chemically synthesized
  source 1..22: mol_type = other DNA
cgaggtagtacagccatatcct

SEQ ID NO: 123856 - DNA, 22 bp, synthetic construct
  misc_feature 1..22: note = chemically synthesized
  source 1..22: mol_type = other DNA
gaggtagtacagccatatccta

SEQ ID NO: 123857 - DNA, 22 bp, synthetic construct
  misc_feature 1..22: note = chemically synthesized
  source 1..22: mol_type = other DNA
tcctgtgcatagacaggaaaat

SEQ ID NO: 123858 - DNA, 22 bp, synthetic construct
  misc_feature 1..22: note = chemically synthesized
  source 1..22: mol_type = other DNA
tgcatagacaggaaaatggttg

SEQ ID NO: 123859 - DNA, 22 bp, synthetic construct
  misc_feature 1..22: note = chemically synthesized
  source 1..22: mol_type = other DNA
ctgactggcagaccagaattgg

SEQ ID NO: 123860 - DNA, 22 bp, synthetic construct
  misc_feature 1..22: note = chemically synthesized
  source 1..22: mol_type = other DNA
actggcagaccagaattgggtt

SEQ ID NO: 123861 - DNA, 22 bp, synthetic construct
  misc_feature 1..22: note = chemically synthesized
  source 1..22: mol_type = other DNA
gcagaccagaattgggttacct

SEQ ID NO: 123862 - DNA, 22 bp, synthetic construct
  misc_feature 1..22: note = chemically synthesized
  source 1..22: mol_type = other DNA
ggttaccttttcatctaaatgc

SEQ ID NO: 123863 - DNA, 22 bp, synthetic construct
  misc_feature 1..22: note = chemically synthesized
  source 1..22: mol_type = other DNA
ccttttcatctaaatgcatctc

SEQ ID NO: 123864 - DNA, 22 bp, synthetic construct
  misc_feature 1..22: note = chemically synthesized
  source 1..22: mol_type = other DNA
ttcatctaaatgcatctctcca

SEQ ID NO: 123865 - DNA, 22 bp, synthetic construct
  misc_feature 1..22: note = chemically synthesized
  source 1..22: mol_type = other DNA
tcatctaaatgcatctctccac

SEQ ID NO: 123866 - DNA, 22 bp, synthetic construct
  misc_feature 1..22: note = chemically synthesized
  source 1..22: mol_type = other DNA
catctaaatgcatctctccaca

SEQ ID NO: 123867 - DNA, 22 bp, synthetic construct
  misc_feature 1..22: note = chemically synthesized
  source 1..22: mol_type = other DNA
atctaaatgcatctctccacag

SEQ ID NO: 123868 - DNA, 22 bp, synthetic construct
  misc_feature 1..22: note = chemically synthesized
  source 1..22: mol_type = other DNA
aatgcatctctccacagcgatt

SEQ ID NO: 123869 - DNA, 22 bp, synthetic construct
  misc_feature 1..22: note = chemically synthesized
  source 1..22: mol_type = other DNA
tccacagcgatttctacagtat

SEQ ID NO: 123870 - DNA, 22 bp, synthetic construct
  misc_feature 1..22: note = chemically synthesized
  source 1..22: mol_type = other DNA
cacagcgatttctacagtatgc

SEQ ID NO: 123871 - DNA, 22 bp, synthetic construct
  misc_feature 1..22: note = chemically synthesized
  source 1..22: mol_type = other DNA
ctacagtatgcttgatcttgtc

SEQ ID NO: 123872 - DNA, 22 bp, synthetic construct
  misc_feature 1..22: note = chemically synthesized
  source 1..22: mol_type = other DNA
tacagtatgcttgatcttgtct

SEQ ID NO: 123873 - DNA, 22 bp, synthetic construct
  misc_feature 1..22: note = chemically synthesized
  source 1..22: mol_type = other DNA
cagtatgcttgatcttgtctct

SEQ ID NO: 123874 - DNA, 22 bp, synthetic construct
  misc_feature 1..22: note = chemically synthesized
  source 1..22: mol_type = other DNA
gatcttgtctctcatcccatat

SEQ ID NO: 123875 - DNA, 22 bp, synthetic construct
  misc_feature 1..22: note = chemically synthesized
  source 1..22: mol_type = other DNA
atcttgtctctcatcccatatt

SEQ ID NO: 123876 - DNA, 22 bp, synthetic construct
  misc_feature 1..22: note = chemically synthesized
  source 1..22: mol_type = other DNA
gtctctcatcccatatttggtt

SEQ ID NO: 123877 - DNA, 22 bp, synthetic construct
  misc_feature 1..22: note = chemically synthesized
  source 1..22: mol_type = other DNA
tctctcatcccatatttggtta

SEQ ID NO: 123878 - DNA, 22 bp, synthetic construct
  misc_feature 1..22: note = chemically synthesized
  source 1..22: mol_type = other DNA
tcatcccatatttggttacttg

SEQ ID NO: 123879 - DNA, 22 bp, synthetic construct
  misc_feature 1..22: note = chemically synthesized
  source 1..22: mol_type = other DNA
atcccatatttggttacttgtt

SEQ ID NO: 123880 - DNA, 22 bp, synthetic construct
  misc_feature 1..22: note = chemically synthesized
  source 1..22: mol_type = other DNA
ggttacttgttgccatgccggg

SEQ ID NO: 123881 - DNA, 22 bp, synthetic construct
  misc_feature 1..22: note = chemically synthesized
  source 1..22: mol_type = other DNA
gttacttgttgccatgccggga

SEQ ID NO: 123882 - DNA, 22 bp, synthetic construct
  misc_feature 1..22: note = chemically synthesized
  source 1..22: mol_type = other DNA
cttgttgccatgccgggaccag

SEQ ID NO: 123883 - DNA, 22 bp, synthetic construct
  misc_feature 1..22: note = chemically synthesized
  source 1..22: mol_type = other DNA
gttgccatgccgggaccagcca

SEQ ID NO: 123884 - DNA, 22 bp, synthetic construct
  misc_feature 1..22: note = chemically synthesized
  source 1..22: mol_type = other DNA
ttgccatgccgggaccagccat

SEQ ID NO: 123885 - DNA, 22 bp, synthetic construct
  misc_feature 1..22: note = chemically synthesized
  source 1..22: mol_type = other DNA
ccatgccgggaccagccatgca

SEQ ID NO: 123886 - DNA, 22 bp, synthetic construct
  misc_feature 1..22: note = chemically synthesized
  source 1..22: mol_type = other DNA
gtttgcctttggcatcagtgta

SEQ ID NO: 123887 - DNA, 22 bp, synthetic construct
  misc_feature 1..22: note = chemically synthesized
  source 1..22: mol_type = other DNA
gcctttggcatcagtgtatgct

SEQ ID NO: 123888 - DNA, 22 bp, synthetic construct
  misc_feature 1..22: note = chemically synthesized
  source 1..22: mol_type = other DNA
cctttggcatcagtgtatgctc

SEQ ID NO: 123889 - DNA, 22 bp, synthetic construct
  misc_feature 1..22: note = chemically synthesized
  source 1..22: mol_type = other DNA
tggcatcagtgtatgctctata

SEQ ID NO: 123890 - DNA, 22 bp, synthetic construct
  misc_feature 1..22: note = chemically synthesized
  source 1..22: mol_type = other DNA
ggcatcagtgtatgctctatac

SEQ ID NO: 123891 - DNA, 22 bp, synthetic construct
  misc_feature 1..22: note = chemically synthesized
  source 1..22: mol_type = other DNA
gcatcagtgtatgctctatacc

SEQ ID NO: 123892 - DNA, 22 bp, synthetic construct
  misc_feature 1..22: note = chemically synthesized
  source 1..22: mol_type = other DNA
tatacccatgttttccacagct

SEQ ID NO: 123893 - DNA, 22 bp, synthetic construct
  misc_feature 1..22: note = chemically synthesized
  source 1..22: mol_type = other DNA
tacccatgttttccacagctgg

SEQ ID NO: 123894 - DNA, 22 bp, synthetic construct
  misc_feature 1..22: note = chemically synthesized
  source 1..22: mol_type = other DNA
tccacagctggcaaacaccagt

SEQ ID NO: 123895 - DNA, 22 bp, synthetic construct
  misc_feature 1..22: note = chemically synthesized
  source 1..22: mol_type = other DNA
ccacagctggcaaacaccagtg

SEQ ID NO: 123896 - DNA, 22 bp, synthetic construct
  misc_feature 1..22: note = chemically synthesized
  source 1..22: mol_type = other DNA
cacagctggcaaacaccagtgg

SEQ ID NO: 123897 - DNA, 22 bp, synthetic construct
  misc_feature 1..22: note = chemically synthesized
  source 1..22: mol_type = other DNA
gcaaacaccagtggtattctaa

SEQ ID NO: 123898 - DNA, 22 bp, synthetic construct
  misc_feature 1..22: note = chemically synthesized
  source 1..22: mol_type = other DNA
taataacactgttctcaccacc

SEQ ID NO: 123899 - DNA, 22 bp, synthetic construct
  misc_feature 1..22: note = chemically synthesized
  source 1..22: mol_type = other DNA
ataacactgttctcaccaccag

SEQ ID NO: 123900 - DNA, 22 bp, synthetic construct
  misc_feature 1..22: note = chemically synthesized
  source 1..22: mol_type = other DNA
ttctcaccaccagcccttctgg

SEQ ID NO: 123901 - DNA, 22 bp, synthetic construct
  misc_feature 1..22: note = chemically synthesized
  source 1..22: mol_type = other DNA
tcaccaccagcccttctggttc

SEQ ID NO: 123902 - DNA, 22 bp, synthetic construct
  misc_feature 1..22: note = chemically synthesized
  source 1..22: mol_type = other DNA
accaccagcccttctggttcac

SEQ ID NO: 123903 - DNA, 22 bp, synthetic construct
  misc_feature 1..22: note = chemically synthesized
  source 1..22: mol_type = other DNA
ctggttcactagatgtttccat

SEQ ID NO: 123904 - DNA, 22 bp, synthetic construct
  misc_feature 1..22: note = chemically synthesized
  source 1..22: mol_type = other DNA
tggttcactagatgtttccatg

SEQ ID NO: 123905 - DNA, 22 bp, synthetic construct
  misc_feature 1..22: note = chemically synthesized
  source 1..22: mol_type = other DNA
gttcactagatgtttccatgga

SEQ ID NO: 123906 - DNA, 22 bp, synthetic construct
  misc_feature 1..22: note = chemically synthesized
  source 1..22: mol_type = other DNA
actagatgtttccatggagtcc

SEQ ID NO: 123907 - DNA, 22 bp, synthetic construct
  misc_feature 1..22: note = chemically synthesized
  source 1..22: mol_type = other DNA
gatgtttccatggagtcctgat

SEQ ID NO: 123908 - DNA, 22 bp, synthetic construct
  misc_feature 1..22: note = chemically synthesized
  source 1..22: mol_type = other DNA
ccatggagtcctgatataatag

SEQ ID NO: 123909 - DNA, 22 bp, synthetic construct
  misc_feature 1..22: note = chemically synthesized
  source 1..22: mol_type = other DNA
catggagtcctgatataataga

SEQ ID NO: 123910 - DNA, 22 bp, synthetic construct
  misc_feature 1..22: note = chemically synthesized
  source 1..22: mol_type = other DNA
atataatagacaacttatttta

SEQ ID NO: 123911 - DNA, 22 bp, synthetic construct
  misc_feature 1..22: note = chemically synthesized
  source 1..22: mol_type = other DNA
attttaaacacagttgccagcc

SEQ ID NO: 123912 - DNA, 22 bp, synthetic construct
  misc_feature 1..22: note = chemically synthesized
  source 1..22: mol_type = other DNA
ttttaaacacagttgccagccc

SEQ ID NO: 123913 - DNA, 22 bp, synthetic construct
  misc_feature 1..22: note = chemically synthesized
  source 1..22: mol_type = other DNA
taaacacagttgccagccctac

SEQ ID NO: 123914 - DNA, 22 bp, synthetic construct
  misc_feature 1..22: note = chemically synthesized
  source 1..22: mol_type = other DNA
aaacacagttgccagccctaca

SEQ ID NO: 123915 - DNA, 22 bp, synthetic construct
  misc_feature 1..22: note = chemically synthesized
  source 1..22: mol_type = other DNA
aacacagttgccagccctacac

SEQ ID NO: 123916 - DNA, 22 bp, synthetic construct
  misc_feature 1..22: note = chemically synthesized
  source 1..22: mol_type = other DNA
ccagccctacactctaaatgtc

SEQ ID NO: 123917 - DNA, 22 bp, synthetic construct
  misc_feature 1..22: note = chemically synthesized
  source 1..22: mol_type = other DNA
cactctaaatgtctacagaact

SEQ ID NO: 123918 - DNA, 22 bp, synthetic construct
  misc_feature 1..22: note = chemically synthesized
  source 1..22: mol_type = other DNA
taaatgtctacagaactcacca

SEQ ID NO: 123919 - DNA, 22 bp, synthetic construct
  misc_feature 1..22: note = chemically synthesized
  source 1..22: mol_type = other DNA
aatgtctacagaactcaccaga

SEQ ID NO: 123920 - DNA, 22 bp, synthetic construct
  misc_feature 1..22: note = chemically synthesized
  source 1..22: mol_type = other DNA
cagaactcaccagacaaagaag

SEQ ID NO: 123921 - DNA, 22 bp, synthetic construct
  misc_feature 1..22: note = chemically synthesized
  source 1..22: mol_type = other DNA
accagacaaagaagaaaagtta

SEQ ID NO: 123922 - DNA, 22 bp, synthetic construct
  misc_feature 1..22: note = chemically synthesized
  source 1..22: mol_type = other DNA
tttagcagttgtgataagctac

SEQ ID NO: 123923 - DNA, 22 bp, synthetic construct
  misc_feature 1..22: note = chemically synthesized
  source 1..22: mol_type = other DNA
agcagttgtgataagctaccac

SEQ ID NO: 123924 - DNA, 22 bp, synthetic construct
  misc_feature 1..22: note = chemically synthesized
  source 1..22: mol_type = other DNA
gcagttgtgataagctaccact

SEQ ID NO: 123925 - DNA, 22 bp, synthetic construct
  misc_feature 1..22: note = chemically synthesized
  source 1..22: mol_type = other DNA
tgataagctaccacttgaattc

SEQ ID NO: 123926 - DNA, 22 bp, synthetic construct
  misc_feature 1..22: note = chemically synthesized
  source 1..22: mol_type = other DNA
ccacttgaattcaaggttatta

SEQ ID NO: 123927 - DNA, 22 bp, synthetic construct
  misc_feature 1..22: note = chemically synthesized
  source 1..22: mol_type = other DNA
gaattcaaggttattacaagca

SEQ ID NO: 123928 - DNA, 22 bp, synthetic construct
  misc_feature 1..22: note = chemically synthesized
  source 1..22: mol_type = other DNA
aattcaaggttattacaagcat

SEQ ID NO: 123929 - DNA, 22 bp, synthetic construct
  misc_feature 1..22: note = chemically synthesized
  source 1..22: mol_type = other DNA
aaggttattacaagcatgatta

SEQ ID NO: 123930 - DNA, 22 bp, synthetic construct
  misc_feature 1..22: note = chemically synthesized
  source 1..22: mol_type = other DNA
ttacaagcatgattattgacac

SEQ ID NO: 123931 - DNA, 22 bp, synthetic construct
  misc_feature 1..22: note = chemically synthesized
  source 1..22: mol_type = other DNA
caagcatgattattgacacatt

SEQ ID NO: 123932 - DNA, 22 bp, synthetic construct
  misc_feature 1..22: note = chemically synthesized
  source 1..22: mol_type = other DNA
ttgacacatttggttttattga

SEQ ID NO: 123933 - DNA, 22 bp, synthetic construct
  misc_feature 1..22: note = chemically synthesized
  source 1..22: mol_type = other DNA
acacatttggttttattgagtg

SEQ ID NO: 123934 - DNA, 22 bp, synthetic construct
  misc_feature 1..22: note = chemically synthesized
  source 1..22: mol_type = other DNA
ggttttattgagtgtcccttat

SEQ ID NO: 123935 - DNA, 22 bp, synthetic construct
  misc_feature 1..22: note = chemically synthesized
  source 1..22: mol_type = other DNA
gttttattgagtgtcccttatt

SEQ ID NO: 123936 - DNA, 22 bp, synthetic construct
  misc_feature 1..22: note = chemically synthesized
  source 1..22: mol_type = other DNA
tattgagtgtcccttatttgcc

SEQ ID NO: 123937 - DNA, 22 bp, synthetic construct
  misc_feature 1..22: note = chemically synthesized
  source 1..22: mol_type = other DNA
attgagtgtcccttatttgccc

SEQ ID NO: 123938 - DNA, 22 bp, synthetic construct
  misc_feature 1..22: note = chemically synthesized
  source 1..22: mol_type = other DNA
ttgagtgtcccttatttgccca

SEQ ID NO: 123939 - DNA, 22 bp, synthetic construct
  misc_feature 1..22: note = chemically synthesized
  source 1..22: mol_type = other DNA
agtgtcccttatttgcccaaga

SEQ ID NO: 123940 - DNA, 22 bp, synthetic construct
  misc_feature 1..22: note = chemically synthesized
  source 1..22: mol_type = other DNA
atttgcccaagattcattgctg

SEQ ID NO: 123941 - DNA, 22 bp, synthetic construct
  misc_feature 1..22: note = chemically synthesized
  source 1..22: mol_type = other DNA
tttgcccaagattcattgctgt

SEQ ID NO: 123942 - DNA, 22 bp, synthetic construct
  misc_feature 1..22: note = chemically synthesized
  source 1..22: mol_type = other DNA
gcccaagattcattgctgtgac

SEQ ID NO: 123943 - DNA, 22 bp, synthetic construct
  misc_feature 1..22: note = chemically synthesized
  source 1..22: mol_type = other DNA
cccaagattcattgctgtgaca

SEQ ID NO: 123944 - DNA, 22 bp, synthetic construct
  misc_feature 1..22: note = chemically synthesized
  source 1..22: mol_type = other DNA
attgctgtgacaagaatgacaa

SEQ ID NO: 123945 - DNA, 22 bp, synthetic construct
  misc_feature 1..22: note = chemically synthesized
  source 1..22: mol_type = other DNA
ctgtgacaagaatgacaagaag

SEQ ID NO: 123946 - DNA, 22 bp, synthetic construct
  misc_feature 1..22: note = chemically synthesized
  source 1..22: mol_type = other DNA
tgacaagaatgacaagaagaag

SEQ ID NO: 123947 - DNA, 22 bp, synthetic construct
  misc_feature 1..22: note = chemically synthesized
  source 1..22: mol_type = other DNA
cttgagaaatccccttgtagcc

SEQ ID NO: 123948 - DNA, 22 bp, synthetic construct
  misc_feature 1..22: note = chemically synthesized
  source 1..22: mol_type = other DNA
gagaaatccccttgtagccttc

SEQ ID NO: 123949 - DNA, 22 bp, synthetic construct
  misc_feature 1..22: note = chemically synthesized
  source 1..22: mol_type = other DNA
agaaatccccttgtagccttct

SEQ ID NO: 123950 - DNA, 22 bp, synthetic construct
  misc_feature 1..22: note = chemically synthesized
  source 1..22: mol_type = other DNA
gtagccttctgttacttcattt

SEQ ID NO: 123951 - DNA, 22 bp, synthetic construct
  misc_feature 1..22: note = chemically synthesized
  source 1..22: mol_type = other DNA
tagccttctgttacttcatttt

SEQ ID NO: 123952 - DNA, 22 bp, synthetic construct
  misc_feature 1..22: note = chemically synthesized
  source 1..22: mol_type = other DNA
ctgttacttcatttttttccct

SEQ ID NO: 123953 - DNA, 22 bp, synthetic construct
  misc_feature 1..22: note = chemically synthesized
  source 1..22: mol_type = other DNA
tgttacttcatttttttccctc

SEQ ID NO: 123954 - DNA, 22 bp, synthetic construct
  misc_feature 1..22: note = chemically synthesized
  source 1..22: mol_type = other DNA
ttacttcatttttttccctctc

SEQ ID NO: 123955 - DNA, 22 bp, synthetic construct
  misc_feature 1..22: note = chemically synthesized
  source 1..22: mol_type = other DNA
cttcatttttttccctctctct

SEQ ID NO: 123956 - DNA, 22 bp, synthetic construct
  misc_feature 1..22: note = chemically synthesized
  source 1..22: mol_type = other DNA
catttttttccctctctctctg

SEQ ID NO: 123957 - DNA, 22 bp, synthetic construct
  misc_feature 1..22: note = chemically synthesized
  source 1..22: mol_type = other DNA
atttttttccctctctctctgc

SEQ ID NO: 123958 - DNA, 22 bp, synthetic construct
  misc_feature 1..22: note = chemically synthesized
  source 1..22: mol_type = other DNA
ttttccctctctctctgcttct

SEQ ID NO: 123959 - DNA, 22 bp, synthetic construct
  misc_feature 1..22: note = chemically synthesized
  source 1..22: mol_type = other DNA
tttccctctctctctgcttctc

SEQ ID NO: 123960 - DNA, 22 bp, synthetic construct
  misc_feature 1..22: note = chemically synthesized
  source 1..22: mol_type = other DNA
ttccctctctctctgcttctcc

SEQ ID NO: 123961 - DNA, 22 bp, synthetic construct
  misc_feature 1..22: note = chemically synthesized
  source 1..22: mol_type = other DNA
tccctctctctctgcttctcct

SEQ ID NO: 123962 - DNA, 22 bp, synthetic construct
  misc_feature 1..22: note = chemically synthesized
  source 1..22: mol_type = other DNA
ccctctctctctgcttctcctt

SEQ ID NO: 123963 - DNA, 22 bp, synthetic construct
  misc_feature 1..22: note = chemically synthesized
  source 1..22: mol_type = other DNA
cctctctctctgcttctccttg

SEQ ID NO: 123964 - DNA, 22 bp, synthetic construct
  misc_feature 1..22: note = chemically synthesized
  source 1..22: mol_type = other DNA
tctctctgcttctccttgtgta

SEQ ID NO: 123965 - DNA, 22 bp, synthetic construct
  misc_feature 1..22: note = chemically synthesized
  source 1..22: mol_type = other DNA
tctctgcttctccttgtgtatc

SEQ ID NO: 123966 - DNA, 22 bp, synthetic construct
  misc_feature 1..22: note = chemically synthesized
  source 1..22: mol_type = other DNA
tctgcttctccttgtgtatcca

SEQ ID NO: 123967 - DNA, 22 bp, synthetic construct
  misc_feature 1..22: note = chemically synthesized
  source 1..22: mol_type = other DNA
tgcttctccttgtgtatccacc

SEQ ID NO: 123968 - DNA, 22 bp, synthetic construct
  misc_feature 1..22: note = chemically synthesized
  source 1..22: mol_type = other DNA
cttctccttgtgtatccaccat

SEQ ID NO: 123969 - DNA, 22 bp, synthetic construct
  misc_feature 1..22: note = chemically synthesized
  source 1..22: mol_type = other DNA
ctccttgtgtatccaccataga

SEQ ID NO: 123970 - DNA, 22 bp, synthetic construct
  misc_feature 1..22: note = chemically synthesized
  source 1..22: mol_type = other DNA
tccttgtgtatccaccatagaa

SEQ ID NO: 123971 - DNA, 22 bp, synthetic construct
  misc_feature 1..22: note = chemically synthesized
  source 1..22: mol_type = other DNA
cttgtgtatccaccatagaagc

SEQ ID NO: 123972 - DNA, 22 bp, synthetic construct
  misc_feature 1..22: note = chemically synthesized
  source 1..22: mol_type = other DNA
gtgtatccaccatagaagctac

SEQ ID NO: 123973 - DNA, 22 bp, synthetic construct
  misc_feature 1..22: note = chemically synthesized
  source 1..22: mol_type = other DNA
tgtatccaccatagaagctaca

SEQ ID NO: 123974 - DNA, 22 bp, synthetic construct
  misc_feature 1..22: note = chemically synthesized
  source 1..22: mol_type = other DNA
caatgattaaaaattatttact

SEQ ID NO: 123975 - DNA, 22 bp, synthetic construct
  misc_feature 1..22: note = chemically synthesized
  source 1..22: mol_type = other DNA
aaaattatttactaaaatcatt

SEQ ID NO: 123976 - DNA, 22 bp, synthetic construct
  misc_feature 1..22: note = chemically synthesized
  source 1..22: mol_type = other DNA
tttactaaaatcatttaataaa

SEQ ID NO: 123977 - DNA, 22 bp, synthetic construct
  misc_feature 1..22: note = chemically synthesized
  source 1..22: mol_type = other DNA
actaaaatcatttaataaaact

SEQ ID NO: 123978 - DNA, 22 bp, synthetic construct
  misc_feature 1..22: note = chemically synthesized
  source 1..22: mol_type = other DNA
ctaaaatcatttaataaaacta

SEQ ID NO: 123979 - DNA, 22 bp, synthetic construct
  misc_feature 1..22: note = chemically synthesized
  source 1..22: mol_type = other DNA
aaatcatttaataaaactatat

SEQ ID NO: 123980 - DNA, 22 bp, synthetic construct
  misc_feature 1..22: note = chemically synthesized
  source 1..22: mol_type = other DNA
aataaaactatattaaatggaa

SEQ ID NO: 123981 - DNA, 22 bp, synthetic construct
  misc_feature 1..22: note = chemically synthesized
  source 1..22: mol_type = other DNA
ataaaactatattaaatggaaa

SEQ ID NO: 123982 - DNA, 22 bp, synthetic construct
  misc_feature 1..22: note = chemically synthesized
  source 1..22: mol_type = other DNA
tattaaatggaaattcaccaat

SEQ ID NO: 123983 - DNA, 22 bp, synthetic construct
  misc_feature 1..22: note = chemically synthesized
  source 1..22: mol_type = other DNA
aatggaaattcaccaatagaaa

SEQ ID NO: 123984 - DNA, 22 bp, synthetic construct
  misc_feature 1..22: note = chemically synthesized
  source 1..22: mol_type = other DNA
accaatagaaacttaggaaagg

SEQ ID NO: 123985 - DNA, 22 bp, synthetic construct
  misc_feature 1..22: note = chemically synthesized
  source 1..22: mol_type = other DNA
aggaaaggtaacaaagtcctgt

SEQ ID NO: 123986 - DNA, 22 bp, synthetic construct
  misc_feature 1..22: note = chemically synthesized
  source 1..22: mol_type = other DNA
ggaaaggtaacaaagtcctgtg

SEQ ID NO: 123987 - DNA, 22 bp, synthetic construct
  misc_feature 1..22: note = chemically synthesized
  source 1..22: mol_type = other DNA
tgaggttggcttcagcatatcc

SEQ ID NO: 123988 - DNA, 22 bp, synthetic construct
  misc_feature 1..22: note = chemically synthesized
  source 1..22: mol_type = other DNA
gcttcagcatatccagaacaca

SEQ ID NO: 123989 - DNA, 22 bp, synthetic construct
  misc_feature 1..22: note = chemically synthesized
  source 1..22: mol_type = other DNA
cagcatatccagaacacatgct

SEQ ID NO: 123990 - DNA, 22 bp, synthetic construct
  misc_feature 1..22: note = chemically synthesized
  source 1..22: mol_type = other DNA
agcatatccagaacacatgctc

SEQ ID NO: 123991 - DNA, 22 bp, synthetic construct
  misc_feature 1..22: note = chemically synthesized
  source 1..22: mol_type = other DNA
aggaaggaagagggtgggggga

SEQ ID NO: 123992 - DNA, 22 bp, synthetic construct
  misc_feature 1..22: note = chemically synthesized
  source 1..22: mol_type = other DNA
taaacaagggactttgatcatt

SEQ ID NO: 123993 - DNA, 22 bp, synthetic construct
  misc_feature 1..22: note = chemically synthesized
  source 1..22: mol_type = other DNA
tgatcattcactttgaagagtc

SEQ ID NO: 123994 - DNA, 22 bp, synthetic construct
  misc_feature 1..22: note = chemically synthesized
  source 1..22: mol_type = other DNA
gatcattcactttgaagagtct

SEQ ID NO: 123995 - DNA, 22 bp, synthetic construct
  misc_feature 1..22: note = chemically synthesized
  source 1..22: mol_type = other DNA
atcattcactttgaagagtctt

SEQ ID NO: 123996 - DNA, 22 bp, synthetic construct
  misc_feature 1..22: note = chemically synthesized
  source 1..22: mol_type = other DNA
actttgaagagtcttctgtcat

SEQ ID NO: 123997 - DNA, 22 bp, synthetic construct
  misc_feature 1..22: note = chemically synthesized
  source 1..22: mol_type = other DNA
tgaagagtcttctgtcatatgc

SEQ ID NO: 123998 - DNA, 22 bp, synthetic construct
  misc_feature 1..22: note = chemically synthesized
  source 1..22: mol_type = other DNA
gaagagtcttctgtcatatgct

SEQ ID NO: 123999 - DNA, 22 bp, synthetic construct
  misc_feature 1..22: note = chemically synthesized
  source 1..22: mol_type = other DNA
aagagtcttctgtcatatgctg

SEQ ID NO: 124000 - DNA, 22 bp, synthetic construct
  misc_feature 1..22: note = chemically synthesized
  source 1..22: mol_type = other DNA
ctgtcatatgctggatgggcaa

SEQ ID NO: 124001 - DNA, 22 bp, synthetic construct
  misc_feature 1..22: note = chemically synthesized
  source 1..22: mol_type = other DNA
tgtcatatgctggatgggcaaa

SEQ ID NO: 124002 - DNA, 22 bp, synthetic construct
  misc_feature 1..22: note = chemically synthesized
  source 1..22: mol_type = other DNA
tcatatgctggatgggcaaaca

SEQ ID NO: 124003 - DNA, 22 bp, synthetic construct
  misc_feature 1..22: note = chemically synthesized
  source 1..22: mol_type = other DNA
gatgggcaaacagcttagaggg

SEQ ID NO: 124004 - DNA, 22 bp, synthetic construct
  misc_feature 1..22: note = chemically synthesized
  source 1..22: mol_type = other DNA
agagggctgccttagagtgcac

SEQ ID NO: 124005 - DNA, 22 bp, synthetic construct
  misc_feature 1..22: note = chemically synthesized
  source 1..22: mol_type = other DNA
gagggctgccttagagtgcaca

SEQ ID NO: 124006 - DNA, 22 bp, synthetic construct
  misc_feature 1..22: note = chemically synthesized
  source 1..22: mol_type = other DNA
ccttagagtgcacaaaatcaga

SEQ ID NO: 124007 - DNA, 22 bp, synthetic construct
  misc_feature 1..22: note = chemically synthesized
  source 1..22: mol_type = other DNA
agagtgcacaaaatcagagata

SEQ ID NO: 124008 - DNA, 22 bp, synthetic construct
  misc_feature 1..22: note = chemically synthesized
  source 1..22: mol_type = other DNA
gagtgcacaaaatcagagatat

SEQ ID NO: 124009 - DNA, 22 bp, synthetic construct
  misc_feature 1..22: note = chemically synthesized
  source 1..22: mol_type = other DNA
agagatgcacatgaggatggag

SEQ ID NO: 124010 - DNA, 22 bp, synthetic construct
  misc_feature 1..22: note = chemically synthesized
  source 1..22: mol_type = other DNA
tcacgcttagtttattttttca

SEQ ID NO: 124011 - DNA, 22 bp, synthetic construct
  misc_feature 1..22: note = chemically synthesized
  source 1..22: mol_type = other DNA
acgcttagtttattttttcatt

SEQ ID NO: 124012 - DNA, 22 bp, synthetic construct
  misc_feature 1..22: note = chemically synthesized
  source 1..22: mol_type = other DNA
agtttattttttcatttaatac

SEQ ID NO: 124013 - DNA, 22 bp, synthetic construct
  misc_feature 1..22: note = chemically synthesized
  source 1..22: mol_type = other DNA
gtttattttttcatttaataca

SEQ ID NO: 124014 - DNA, 22 bp, synthetic construct
  misc_feature 1..22: note = chemically synthesized
  source 1..22: mol_type = other DNA
attttttcatttaatacagaat

SEQ ID NO: 124015 - DNA, 22 bp, synthetic construct
  misc_feature 1..22: note = chemically synthesized
  source 1..22: mol_type = other DNA
ttttttcatttaatacagaata

SEQ ID NO: 124016 - DNA, 22 bp, synthetic construct
  misc_feature 1..22: note = chemically synthesized
  source 1..22: mol_type = other DNA
tttcatttaatacagaatattt

SEQ ID NO: 124017 - DNA, 22 bp, synthetic construct
  misc_feature 1..22: note = chemically synthesized
  source 1..22: mol_type = other DNA
ttcatttaatacagaatatttt

SEQ ID NO: 124018 - DNA, 22 bp, synthetic construct
  misc_feature 1..22: note = chemically synthesized
  source 1..22: mol_type = other DNA
tcatttaatacagaatattttt

SEQ ID NO: 124019 - DNA, 22 bp, synthetic construct
  misc_feature 1..22: note = chemically synthesized
  source 1..22: mol_type = other DNA
catttaatacagaatatttttt

SEQ ID NO: 124020 - DNA, 22 bp, synthetic construct
  misc_feature 1..22: note = chemically synthesized
  source 1..22: mol_type = other DNA
atttaatacagaatatttttta

SEQ ID NO: 124021 - DNA, 22 bp, synthetic construct
  misc_feature 1..22: note = chemically synthesized
  source 1..22: mol_type = other DNA
aatacagaatattttttaagct

SEQ ID NO: 124022 - DNA, 22 bp, synthetic construct
  misc_feature 1..22: note = chemically synthesized
  source 1..22: mol_type = other DNA
atacagaatattttttaagctc

SEQ ID NO: 124023 - DNA, 22 bp, synthetic construct
  misc_feature 1..22: note = chemically synthesized
  source 1..22: mol_type = other DNA
tttaagctcctactctcttcaa

SEQ ID NO: 124024 - DNA, 22 bp, synthetic construct
  misc_feature 1..22: note = chemically synthesized
  source 1..22: mol_type = other DNA
ttaagctcctactctcttcaaa

SEQ ID NO: 124025 - DNA, 22 bp, synthetic construct
  misc_feature 1..22: note = chemically synthesized
  source 1..22: mol_type = other DNA
taagctcctactctcttcaaag

SEQ ID NO: 124026 - DNA, 22 bp, synthetic construct
  misc_feature 1..22: note = chemically synthesized
  source 1..22: mol_type = other DNA
aagctcctactctcttcaaagc

SEQ ID NO: 124027 - DNA, 22 bp, synthetic construct
  misc_feature 1..22: note = chemically synthesized
  source 1..22: mol_type = other DNA
agctcctactctcttcaaagca

SEQ ID NO: 124028 - DNA, 22 bp, synthetic construct
  misc_feature 1..22: note = chemically synthesized
  source 1..22: mol_type = other DNA
ctactctcttcaaagcactgtg

SEQ ID NO: 124029 - DNA, 22 bp, synthetic construct
  misc_feature 1..22: note = chemically synthesized
  source 1..22: mol_type = other DNA
ctctcttcaaagcactgtgctt

SEQ ID NO: 124030 - DNA, 22 bp, synthetic construct
  misc_feature 1..22: note = chemically synthesized
  source 1..22: mol_type = other DNA
tcttcaaagcactgtgcttaaa

SEQ ID NO: 124031 - DNA, 22 bp, synthetic construct
  misc_feature 1..22: note = chemically synthesized
  source 1..22: mol_type = other DNA
ttcaaagcactgtgcttaaagc

SEQ ID NO: 124032 - DNA, 22 bp, synthetic construct
  misc_feature 1..22: note = chemically synthesized
  source 1..22: mol_type = other DNA
caaagcactgtgcttaaagctg

SEQ ID NO: 124033 - DNA, 22 bp, synthetic construct
  misc_feature 1..22: note = chemically synthesized
  source 1..22: mol_type = other DNA
aaagcactgtgcttaaagctgg

SEQ ID NO: 124034 - DNA, 22 bp, synthetic construct
  misc_feature 1..22: note = chemically synthesized
  source 1..22: mol_type = other DNA
tgcttaaagctggcatgtagtt

SEQ ID NO: 124035 - DNA, 22 bp, synthetic construct
  misc_feature 1..22: note = chemically synthesized
  source 1..22: mol_type = other DNA
aaagctggcatgtagttgaatt

SEQ ID NO: 124036 - DNA, 22 bp, synthetic construct
  misc_feature 1..22: note = chemically synthesized
  source 1..22: mol_type = other DNA
aagctggcatgtagttgaattt

SEQ ID NO: 124037 - DNA, 22 bp, synthetic construct
  misc_feature 1..22: note = chemically synthesized
  source 1..22: mol_type = other DNA
gcatgtagttgaatttatagtc

SEQ ID NO: 124038 - DNA, 22 bp, synthetic construct
  misc_feature 1..22: note = chemically synthesized
  source 1..22: mol_type = other DNA
aatttatagtccagcaaggaga

SEQ ID NO: 124039 - DNA, 22 bp, synthetic construct
  misc_feature 1..22: note = chemically synthesized
  source 1..22: mol_type = other DNA
atagtccagcaaggagactgac

SEQ ID NO: 124040 - DNA, 22 bp, synthetic construct
  misc_feature 1..22: note = chemically synthesized
  source 1..22: mol_type = other DNA
tagtccagcaaggagactgacc

SEQ ID NO: 124041 - DNA, 22 bp, synthetic construct
  misc_feature 1..22: note = chemically synthesized
  source 1..22: mol_type = other DNA
accattgagaattacaaatatg

SEQ ID NO: 124042 - DNA, 22 bp, synthetic construct
  misc_feature 1..22: note = chemically synthesized
  source 1..22: mol_type = other DNA
agaattacaaatatggcaggaa

SEQ ID NO: 124043 - DNA, 22 bp, synthetic construct
  misc_feature 1..22: note = chemically synthesized
  source 1..22: mol_type = other DNA
caaatatggcaggaatttctaa

SEQ ID NO: 124044 - DNA, 22 bp, synthetic construct
  misc_feature 1..22: note = chemically synthesized
  source 1..22: mol_type = other DNA
ctaaacagaaagatgtgcagct

SEQ ID NO: 124045 - DNA, 22 bp, synthetic construct
  misc_feature 1..22: note = chemically synthesized
  source 1..22: mol_type = other DNA
taaacagaaagatgtgcagctc

SEQ ID NO: 124046 - DNA, 22 bp, synthetic construct
  misc_feature 1..22: note = chemically synthesized
  source 1..22: mol_type = other DNA
aacagaaagatgtgcagctctc

SEQ ID NO: 124047 - DNA, 22 bp, synthetic construct
  misc_feature 1..22: note = chemically synthesized
  source 1..22: mol_type = other DNA
tcatatcctgtcacagaaatga

SEQ ID NO: 124048 - DNA, 22 bp, synthetic construct
  misc_feature 1..22: note = chemically synthesized
  source 1..22: mol_type = other DNA
atatcctgtcacagaaatgaca

SEQ ID NO: 124049 - DNA, 22 bp, synthetic construct
  misc_feature 1..22: note = chemically synthesized
  source 1..22: mol_type = other DNA
tcacagaaatgacacatcacat

SEQ ID NO: 124050 - DNA, 22 bp, synthetic construct
  misc_feature 1..22: note = chemically synthesized
  source 1..22: mol_type = other DNA
ctaaactgcatcatagccttac

SEQ ID NO: 124051 - DNA, 22 bp, synthetic construct
  misc_feature 1..22: note = chemically synthesized
  source 1..22: mol_type = other DNA
aactgcatcatagccttaccat

SEQ ID NO: 124052 - DNA, 22 bp, synthetic construct
  misc_feature 1..22: note = chemically synthesized
  source 1..22: mol_type = other DNA
catcatagccttaccatgacct

SEQ ID NO: 124053 - DNA, 22 bp, synthetic construct
  misc_feature 1..22: note = chemically synthesized
  source 1..22: mol_type = other DNA
accatgacctcctgtttctgca

SEQ ID NO: 124054 - DNA, 22 bp, synthetic construct
  misc_feature 1..22: note = chemically synthesized
  source 1..22: mol_type = other DNA
ccatgacctcctgtttctgcat

SEQ ID NO: 124055 - DNA, 22 bp, synthetic construct
  misc_feature 1..22: note = chemically synthesized
  source 1..22: mol_type = other DNA
ctgtttctgcatttggcttgcc

SEQ ID NO: 124056 - DNA, 22 bp, synthetic construct
  misc_feature 1..22: note = chemically synthesized
  source 1..22: mol_type = other DNA
tttctgcatttggcttgcctcc

SEQ ID NO: 124057 - DNA, 22 bp, synthetic construct
  misc_feature 1..22: note = chemically synthesized
  source 1..22: mol_type = other DNA
ctgcatttggcttgcctccata

SEQ ID NO: 124058 - DNA, 22 bp, synthetic construct
  misc_feature 1..22: note = chemically synthesized
  source 1..22: mol_type = other DNA
tgcatttggcttgcctccatat

SEQ ID NO: 124059 - DNA, 22 bp, synthetic construct
  misc_feature 1..22: note = chemically synthesized
  source 1..22: mol_type = other DNA
catttggcttgcctccatatca

SEQ ID NO: 124060 - DNA, 22 bp, synthetic construct
  misc_feature 1..22: note = chemically synthesized
  source 1..22: mol_type = other DNA
ggcttgcctccatatcacccca

SEQ ID NO: 124061 - DNA, 22 bp, synthetic construct
  misc_feature 1..22: note = chemically synthesized
  source 1..22: mol_type = other DNA
gcttgcctccatatcaccccaa

SEQ ID NO: 124062 - DNA, 22 bp, synthetic construct
  misc_feature 1..22: note = chemically synthesized
  source 1..22: mol_type = other DNA
gcctccatatcaccccaaattc

SEQ ID NO: 124063 - DNA, 22 bp, synthetic construct
  misc_feature 1..22: note = chemically synthesized
  source 1..22: mol_type = other DNA
cctccatatcaccccaaattcc

SEQ ID NO: 124064 - DNA, 22 bp, synthetic construct
  misc_feature 1..22: note = chemically synthesized
  source 1..22: mol_type = other DNA
catatcaccccaaattccaatg

SEQ ID NO: 124065 - DNA, 22 bp, synthetic construct
  misc_feature 1..22: note = chemically synthesized
  source 1..22: mol_type = other DNA
caatggttttgtgaagtcaaga

SEQ ID NO: 124066 - DNA, 22 bp, synthetic construct
  misc_feature 1..22: note = chemically synthesized
  source 1..22: mol_type = other DNA
tgtgaagtcaagattggtggtc

SEQ ID NO: 124067 - DNA, 22 bp, synthetic construct
  misc_feature 1..22: note = chemically synthesized
  source 1..22: mol_type = other DNA
gtgaagtcaagattggtggtca

SEQ ID NO: 124068 - DNA, 22 bp, synthetic construct
  misc_feature 1..22: note = chemically synthesized
  source 1..22: mol_type = other DNA
tgaagtcaagattggtggtcaa

SEQ ID NO: 124069 - DNA, 22 bp, synthetic construct
  misc_feature 1..22: note = chemically synthesized
  source 1..22: mol_type = other DNA
gtggtcaaggtcgagggaaagt

SEQ ID NO: 124070 - DNA, 22 bp, synthetic construct
  misc_feature 1..22: note = chemically synthesized
  source 1..22: mol_type = other DNA
atctaactatgtcaaactttgt

SEQ ID NO: 124071 - DNA, 22 bp, synthetic construct
  misc_feature 1..22: note = chemically synthesized
  source 1..22: mol_type = other DNA
actatgtcaaactttgtcatag

SEQ ID NO: 124072 - DNA, 22 bp, synthetic construct
  misc_feature 1..22: note = chemically synthesized
  source 1..22: mol_type = other DNA
tgtcaaactttgtcatagctag

SEQ ID NO: 124073 - DNA, 22 bp, synthetic construct
  misc_feature 1..22: note = chemically synthesized
  source 1..22: mol_type = other DNA
tgtcatagctagatgagctttt

SEQ ID NO: 124074 - DNA, 22 bp, synthetic construct
  misc_feature 1..22: note = chemically synthesized
  source 1..22: mol_type = other DNA
gtcatagctagatgagcttttt

SEQ ID NO: 124075 - DNA, 22 bp, synthetic construct
  misc_feature 1..22: note = chemically synthesized
  source 1..22: mol_type = other DNA
tcatagctagatgagctttttg

SEQ ID NO: 124076 - DNA, 22 bp, synthetic construct
  misc_feature 1..22: note = chemically synthesized
  source 1..22: mol_type = other DNA
gatgagctttttgaacttaaag

SEQ ID NO: 124077 - DNA, 22 bp, synthetic construct
  misc_feature 1..22: note = chemically synthesized
  source 1..22: mol_type = other DNA
tttgaacttaaagtttgtcaaa

SEQ ID NO: 124078 - DNA, 22 bp, synthetic construct
  misc_feature 1..22: note = chemically synthesized
  source 1..22: mol_type = other DNA
ttgaacttaaagtttgtcaaaa

SEQ ID NO: 124079 - DNA, 22 bp, synthetic construct
  misc_feature 1..22: note = chemically synthesized
  source 1..22: mol_type = other DNA
tgaacttaaagtttgtcaaaat

SEQ ID NO: 124080 - DNA, 22 bp, synthetic construct
  misc_feature 1..22: note = chemically synthesized
  source 1..22: mol_type = other DNA
gaacttaaagtttgtcaaaatt

SEQ ID NO: 124081 - DNA, 22 bp, synthetic construct
  misc_feature 1..22: note = chemically synthesized
  source 1..22: mol_type = other DNA
aacttaaagtttgtcaaaattt

SEQ ID NO: 124082 - DNA, 22 bp, synthetic construct
  misc_feature 1..22: note = chemically synthesized
  source 1..22: mol_type = other DNA
aaagtttgtcaaaatttaggaa

SEQ ID NO: 124083 - DNA, 22 bp, synthetic construct
  misc_feature 1..22: note = chemically synthesized
  source 1..22: mol_type = other DNA
aagtttgtcaaaatttaggaaa

SEQ ID NO: 124084 - DNA, 22 bp, synthetic construct
  misc_feature 1..22: note = chemically synthesized
  source 1..22: mol_type = other DNA
gtcaaaatttaggaaaatattt

SEQ ID NO: 124085 - DNA, 22 bp, synthetic construct
  misc_feature 1..22: note = chemically synthesized
  source 1..22: mol_type = other DNA
tcaaaatttaggaaaatatttt

SEQ ID NO: 124086 - DNA, 22 bp, synthetic construct
  misc_feature 1..22: note = chemically synthesized
  source 1..22: mol_type = other DNA
aggaaaatattttgcccttagg

SEQ ID NO: 124087 - DNA, 22 bp, synthetic construct
  misc_feature 1..22: note = chemically synthesized
  source 1..22: mol_type = other DNA
ggaaaatattttgcccttaggt

SEQ ID NO: 124088 - DNA, 22 bp, synthetic construct
  misc_feature 1..22: note = chemically synthesized
  source 1..22: mol_type = other DNA
tgcccttaggtggtcgcttgtt

SEQ ID NO: 124089 - DNA, 22 bp, synthetic construct
  misc_feature 1..22: note = chemically synthesized
  source 1..22: mol_type = other DNA
gcccttaggtggtcgcttgttg

SEQ ID NO: 124090 - DNA, 22 bp, synthetic construct
  misc_feature 1..22: note = chemically synthesized
  source 1..22: mol_type = other DNA
cccttaggtggtcgcttgttga

SEQ ID NO: 124091 - DNA, 22 bp, synthetic construct
  misc_feature 1..22: note = chemically synthesized
  source 1..22: mol_type = other DNA
aggtggtcgcttgttgaaccct

SEQ ID NO: 124092 - DNA, 22 bp, synthetic construct
  misc_feature 1..22: note = chemically synthesized
  source 1..22: mol_type = other DNA
ggtggtcgcttgttgaaccctg

SEQ ID NO: 124093 - DNA, 22 bp, synthetic construct
  misc_feature 1..22: note = chemically synthesized
  source 1..22: mol_type = other DNA
gttgaaccctgaaaattttact

SEQ ID NO: 124094 - DNA, 22 bp, synthetic construct
  misc_feature 1..22: note = chemically synthesized
  source 1..22: mol_type = other DNA
ttgaaccctgaaaattttactc

SEQ ID NO: 124095 - DNA, 22 bp, synthetic construct
  misc_feature 1..22: note = chemically synthesized
  source 1..22: mol_type = other DNA
aaccctgaaaattttactcttt

SEQ ID NO: 124096 - DNA, 22 bp, synthetic construct
  misc_feature 1..22: note = chemically synthesized
  source 1..22: mol_type = other DNA
aaaattttactctttctttagt

SEQ ID NO: 124097 - DNA, 22 bp, synthetic construct
  misc_feature 1..22: note = chemically synthesized
  source 1..22: mol_type = other DNA
tactctttctttagtgttgaga

SEQ ID NO: 124098 - DNA, 22 bp, synthetic construct
  misc_feature 1..22: note = chemically synthesized
  source 1..22: mol_type = other DNA
actctttctttagtgttgagat

SEQ ID NO: 124099 - DNA, 22 bp, synthetic construct
  misc_feature 1..22: note = chemically synthesized
  source 1..22: mol_type = other DNA
ctctttctttagtgttgagata

SEQ ID NO: 124100 - DNA, 22 bp, synthetic construct
  misc_feature 1..22: note = chemically synthesized
  source 1..22: mol_type = other DNA
tttctttagtgttgagatacct

SEQ ID NO: 124101 - DNA, 22 bp, synthetic construct
  misc_feature 1..22: note = chemically synthesized
  source 1..22: mol_type = other DNA
tctttagtgttgagatacctct

SEQ ID NO: 124102 - DNA, 22 bp, synthetic construct
  misc_feature 1..22: note = chemically synthesized
  source 1..22: mol_type = other DNA
ctttagtgttgagatacctctt

SEQ ID NO: 124103 - DNA, 22 bp, synthetic construct
  misc_feature 1..22: note = chemically synthesized
  source 1..22: mol_type = other DNA
tttagtgttgagatacctcttc

SEQ ID NO: 124104 - DNA, 22 bp, synthetic construct
  misc_feature 1..22: note = chemically synthesized
  source 1..22: mol_type = other DNA
tagtgttgagatacctcttcct

SEQ ID NO: 124105 - DNA, 22 bp, synthetic construct
  misc_feature 1..22: note = chemically synthesized
  source 1..22: mol_type = other DNA
agtgttgagatacctcttcctt

SEQ ID NO: 124106 - DNA, 22 bp, synthetic construct
  misc_feature 1..22: note = chemically synthesized
  source 1..22: mol_type = other DNA
gtgttgagatacctcttccttt

SEQ ID NO: 124107 - DNA, 22 bp, synthetic construct
  misc_feature 1..22: note = chemically synthesized
  source 1..22: mol_type = other DNA
agatacctcttcctttattgaa

SEQ ID NO: 124108 - DNA, 22 bp, synthetic construct
  misc_feature 1..22: note = chemically synthesized
  source 1..22: mol_type = other DNA
ttcctttattgaatctataatc

SEQ ID NO: 124109 - DNA, 22 bp, synthetic construct
  misc_feature 1..22: note = chemically synthesized
  source 1..22: mol_type = other DNA
cctttattgaatctataatcga

SEQ ID NO: 124110 - DNA, 22 bp, synthetic construct
  misc_feature 1..22: note = chemically synthesized
  source 1..22: mol_type = other DNA
ctttattgaatctataatcgac

SEQ ID NO: 124111 - DNA, 22 bp, synthetic construct
  misc_feature 1..22: note = chemically synthesized
  source 1..22: mol_type = other DNA
tattgaatctataatcgacctt

SEQ ID NO: 124112 - DNA, 22 bp, synthetic construct
  misc_feature 1..22: note = chemically synthesized
  source 1..22: mol_type = other DNA
attgaatctataatcgacctta

SEQ ID NO: 124113 - DNA, 22 bp, synthetic construct
  misc_feature 1..22: note = chemically synthesized
  source 1..22: mol_type = other DNA
ttgaatctataatcgaccttat

SEQ ID NO: 124114 - DNA, 22 bp, synthetic construct
  misc_feature 1..22: note = chemically synthesized
  source 1..22: mol_type = other DNA
aatctataatcgaccttattgc

SEQ ID NO: 124115 - DNA, 22 bp, synthetic construct
  misc_feature 1..22: note = chemically synthesized
  source 1..22: mol_type = other DNA
taatcgaccttattgcaaccat

SEQ ID NO: 124116 - DNA, 22 bp, synthetic construct
  misc_feature 1..22: note = chemically synthesized
  source 1..22: mol_type = other DNA
attgcaaccatggagaatgaga

SEQ ID NO: 124117 - DNA, 22 bp, synthetic construct
  misc_feature 1..22: note = chemically synthesized
  source 1..22: mol_type = other DNA
ttgcaaccatggagaatgagat

SEQ ID NO: 124118 - DNA, 22 bp, synthetic construct
  misc_feature 1..22: note = chemically synthesized
  source 1..22: mol_type = other DNA
caaccatggagaatgagatagt

SEQ ID NO: 124119 - DNA, 22 bp, synthetic construct
  misc_feature 1..22: note = chemically synthesized
  source 1..22: mol_type = other DNA
gctcagaggtccacatcacata

SEQ ID NO: 124120 - DNA, 22 bp, synthetic construct
  misc_feature 1..22: note = chemically synthesized
  source 1..22: mol_type = other DNA
agaggtccacatcacataatat

SEQ ID NO: 124121 - DNA, 22 bp, synthetic construct
  misc_feature 1..22: note = chemically synthesized
  source 1..22: mol_type = other DNA
tcactacactgttgtgaagccc

SEQ ID NO: 124122 - DNA, 22 bp, synthetic construct
  misc_feature 1..22: note = chemically synthesized
  source 1..22: mol_type = other DNA
cactgttgtgaagccctgttct

SEQ ID NO: 124123 - DNA, 22 bp, synthetic construct
  misc_feature 1..22: note = chemically synthesized
  source 1..22: mol_type = other DNA
ttgtgaagccctgttctccagc

SEQ ID NO: 124124 - DNA, 22 bp, synthetic construct
  misc_feature 1..22: note = chemically synthesized
  source 1..22: mol_type = other DNA
tgaagccctgttctccagccca

SEQ ID NO: 124125 - DNA, 22 bp, synthetic construct
  misc_feature 1..22: note = chemically synthesized
  source 1..22: mol_type = other DNA
ttctccagcccaggcattcttc

SEQ ID NO: 124126 - DNA, 22 bp, synthetic construct
  misc_feature 1..22: note = chemically synthesized
  source 1..22: mol_type = other DNA
tccagcccaggcattcttccat

SEQ ID NO: 124127 - DNA, 22 bp, synthetic construct
  misc_feature 1..22: note = chemically synthesized
  source 1..22: mol_type = other DNA
cagcccaggcattcttccattc

SEQ ID NO: 124128 - DNA, 22 bp, synthetic construct
  misc_feature 1..22: note = chemically synthesized
  source 1..22: mol_type = other DNA
ttccattcctaacacaagcttc

SEQ ID NO: 124129 - DNA, 22 bp, synthetic construct
  misc_feature 1..22: note = chemically synthesized
  source 1..22: mol_type = other DNA
ccattcctaacacaagcttctc

SEQ ID NO: 124130 - DNA, 22 bp, synthetic construct
  misc_feature 1..22: note = chemically synthesized
  source 1..22: mol_type = other DNA
cattcctaacacaagcttctcc

SEQ ID NO: 124131 - DNA, 22 bp, synthetic construct
  misc_feature 1..22: note = chemically synthesized
  source 1..22: mol_type = other DNA
ctaacacaagcttctcctcctt

SEQ ID NO: 124132 - DNA, 22 bp, synthetic construct
  misc_feature 1..22: note = chemically synthesized
  source 1..22: mol_type = other DNA
acacaagcttctcctcctttac

SEQ ID NO: 124133 - DNA, 22 bp, synthetic construct
  misc_feature 1..22: note = chemically synthesized
  source 1..22: mol_type = other DNA
ctcctcctttacagaaatgggt

SEQ ID NO: 124134 - DNA, 22 bp, synthetic construct
  misc_feature 1..22: note = chemically synthesized
  source 1..22: mol_type = other DNA
tcctcctttacagaaatgggtc

SEQ ID NO: 124135 - DNA, 22 bp, synthetic construct
  misc_feature 1..22: note = chemically synthesized
  source 1..22: mol_type = other DNA
ctcctttacagaaatgggtctg

SEQ ID NO: 124136 - DNA, 22 bp, synthetic construct
  misc_feature 1..22: note = chemically synthesized
  source 1..22: mol_type = other DNA
ctttacagaaatgggtctgagt

SEQ ID NO: 124137 - DNA, 22 bp, synthetic construct
  misc_feature 1..22: note = chemically synthesized
  source 1..22: mol_type = other DNA
tacagaaatgggtctgagttgc

SEQ ID NO: 124138 - DNA, 22 bp, synthetic construct
  misc_feature 1..22: note = chemically synthesized
  source 1..22: mol_type = other DNA
acagaaatgggtctgagttgcc

SEQ ID NO: 124139 - DNA, 22 bp, synthetic construct
  misc_feature 1..22: note = chemically synthesized
  source 1..22: mol_type = other DNA
cagaaatgggtctgagttgcct

SEQ ID NO: 124140 - DNA, 22 bp, synthetic construct
  misc_feature 1..22: note = chemically synthesized
  source 1..22: mol_type = other DNA
agttgcctatttttatacctgc

SEQ ID NO: 124141 - DNA, 22 bp, synthetic construct
  misc_feature 1..22: note = chemically synthesized
  source 1..22: mol_type = other DNA
cctatttttatacctgccatgt

SEQ ID NO: 124142 - DNA, 22 bp, synthetic construct
  misc_feature 1..22: note = chemically synthesized
  source 1..22: mol_type = other DNA
tttttatacctgccatgtcatg

SEQ ID NO: 124143 - DNA, 22 bp, synthetic construct
  misc_feature 1..22: note = chemically synthesized
  source 1..22: mol_type = other DNA
ttatacctgccatgtcatgctg

SEQ ID NO: 124144 - DNA, 22 bp, synthetic construct
  misc_feature 1..22: note = chemically synthesized
  source 1..22: mol_type = other DNA
tatacctgccatgtcatgctga

SEQ ID NO: 124145 - DNA, 22 bp, synthetic construct
  misc_feature 1..22: note = chemically synthesized
  source 1..22: mol_type = other DNA
atacctgccatgtcatgctgag

SEQ ID NO: 124146 - DNA, 22 bp, synthetic construct
  misc_feature 1..22: note = chemically synthesized
  source 1..22: mol_type = other DNA
tacctgccatgtcatgctgagt

SEQ ID NO: 124147 - DNA, 22 bp, synthetic construct
  misc_feature 1..22: note = chemically synthesized
  source 1..22: mol_type = other DNA
ccatgtcatgctgagtgggggc

SEQ ID NO: 124148 - DNA, 22 bp, synthetic construct
  misc_feature 1..22: note = chemically synthesized
  source 1..22: mol_type = other DNA
agtgggggctggggtttgcaaa

SEQ ID NO: 124149 - DNA, 22 bp, synthetic construct
  misc_feature 1..22: note = chemically synthesized
  source 1..22: mol_type = other DNA
gggtttgcaaagagagaagaca

SEQ ID NO: 124150 - DNA, 22 bp, synthetic construct
  misc_feature 1..22: note = chemically synthesized
  source 1..22: mol_type = other DNA
gcaaagagagaagacagctagg

SEQ ID NO: 124151 - DNA, 22 bp, synthetic construct
  misc_feature 1..22: note = chemically synthesized
  source 1..22: mol_type = other DNA
caaagagagaagacagctaggg

SEQ ID NO: 124152 - DNA, 22 bp, synthetic construct
  misc_feature 1..22: note = chemically synthesized
  source 1..22: mol_type = other DNA
gggaacataattgctatggtaa

SEQ ID NO: 124153 - DNA, 22 bp, synthetic construct
  misc_feature 1..22: note = chemically synthesized
  source 1..22: mol_type = other DNA
ctatggtaattgctttctattg

SEQ ID NO: 124154 - DNA, 22 bp, synthetic construct
  misc_feature 1..22: note = chemically synthesized
  source 1..22: mol_type = other DNA
tggtaattgctttctattgtac

SEQ ID NO: 124155 - DNA, 22 bp, synthetic construct
  misc_feature 1..22: note = chemically synthesized
  source 1..22: mol_type = other DNA
ctttctattgtacactaaatat

SEQ ID NO: 124156 - DNA, 22 bp, synthetic construct
  misc_feature 1..22: note = chemically synthesized
  source 1..22: mol_type = other DNA
tctattgtacactaaatatagt

SEQ ID NO: 124157 - DNA, 22 bp, synthetic construct
  misc_feature 1..22: note = chemically synthesized
  source 1..22: mol_type = other DNA
ctattgtacactaaatatagtc

SEQ ID NO: 124158 - DNA, 22 bp, synthetic construct
  misc_feature 1..22: note = chemically synthesized
  source 1..22: mol_type = other DNA
tattgtacactaaatatagtct

SEQ ID NO: 124159 - DNA, 22 bp, synthetic construct
  misc_feature 1..22: note = chemically synthesized
  source 1..22: mol_type = other DNA
ttgtacactaaatatagtctgg

SEQ ID NO: 124160 - DNA, 22 bp, synthetic construct
  misc_feature 1..22: note = chemically synthesized
  source 1..22: mol_type = other DNA
tacactaaatatagtctggatg

SEQ ID NO: 124161 - DNA, 22 bp, synthetic construct
  misc_feature 1..22: note = chemically synthesized
  source 1..22: mol_type = other DNA
aatatagtctggatgtattgca

SEQ ID NO: 124162 - DNA, 22 bp, synthetic construct
  misc_feature 1..22: note = chemically synthesized
  source 1..22: mol_type = other DNA
gatgtattgcatatggtcccta

SEQ ID NO: 124163 - DNA, 22 bp, synthetic construct
  misc_feature 1..22: note = chemically synthesized
  source 1..22: mol_type = other DNA
catatggtccctagtttttaat

SEQ ID NO: 124164 - DNA, 22 bp, synthetic construct
  misc_feature 1..22: note = chemically synthesized
  source 1..22: mol_type = other DNA
gtttttaatagaatcctcatga

SEQ ID NO: 124165 - DNA, 22 bp, synthetic construct
  misc_feature 1..22: note = chemically synthesized
  source 1..22: mol_type = other DNA
ttaatagaatcctcatgaaaat

SEQ ID NO: 124166 - DNA, 22 bp, synthetic construct
  misc_feature 1..22: note = chemically synthesized
  source 1..22: mol_type = other DNA
taatagaatcctcatgaaaatg

SEQ ID NO: 124167 - DNA, 22 bp, synthetic construct
  misc_feature 1..22: note = chemically synthesized
  source 1..22: mol_type = other DNA
aatagaatcctcatgaaaatgc

SEQ ID NO: 124168 - DNA, 22 bp, synthetic construct
  misc_feature 1..22: note = chemically synthesized
  source 1..22: mol_type = other DNA
atagaatcctcatgaaaatgct

SEQ ID NO: 124169 - DNA, 22 bp, synthetic construct
  misc_feature 1..22: note = chemically synthesized
  source 1..22: mol_type = other DNA
atgaaaatgctactttcccgct

SEQ ID NO: 124170 - DNA, 22 bp, synthetic construct
  misc_feature 1..22: note = chemically synthesized
  source 1..22: mol_type = other DNA
ctttcccgctttccaataacag

SEQ ID NO: 124171 - DNA, 22 bp, synthetic construct
  misc_feature 1..22: note = chemically synthesized
  source 1..22: mol_type = other DNA
tcccgctttccaataacagaat

SEQ ID NO: 124172 - DNA, 22 bp, synthetic construct
  misc_feature 1..22: note = chemically synthesized
  source 1..22: mol_type = other DNA
cccgctttccaataacagaatg

SEQ ID NO: 124173 - DNA, 22 bp, synthetic construct
  misc_feature 1..22: note = chemically synthesized
  source 1..22: mol_type = other DNA
ccgctttccaataacagaatga

SEQ ID NO: 124174 - DNA, 22 bp, synthetic construct
  misc_feature 1..22: note = chemically synthesized
  source 1..22: mol_type = other DNA
tccaataacagaatgatggaaa

SEQ ID NO: 124175 - DNA, 22 bp, synthetic construct
  misc_feature 1..22: note = chemically synthesized
  source 1..22: mol_type = other DNA
ccaataacagaatgatggaaag

SEQ ID NO: 124176 - DNA, 22 bp, synthetic construct
  misc_feature 1..22: note = chemically synthesized
  source 1..22: mol_type = other DNA
caataacagaatgatggaaaga

SEQ ID NO: 124177 - DNA, 22 bp, synthetic construct
  misc_feature 1..22: note = chemically synthesized
  source 1..22: mol_type = other DNA
cacaagtccaaacacaagcaaa

SEQ ID NO: 124178 - DNA, 22 bp, synthetic construct
  misc_feature 1..22: note = chemically synthesized
  source 1..22: mol_type = other DNA
acaagtccaaacacaagcaaat

SEQ ID NO: 124179 - DNA, 22 bp, synthetic construct
  misc_feature 1..22: note = chemically synthesized
  source 1..22: mol_type = other DNA
ttctttttctgtgtcacataag

SEQ ID NO: 124180 - DNA, 22 bp, synthetic construct
  misc_feature 1..22: note = chemically synthesized
  source 1..22: mol_type = other DNA
tttttctgtgtcacataagatt

SEQ ID NO: 124181 - DNA, 22 bp, synthetic construct
  misc_feature 1..22: note = chemically synthesized
  source 1..22: mol_type = other DNA
tttctgtgtcacataagattcc

SEQ ID NO: 124182 - DNA, 22 bp, synthetic construct
  misc_feature 1..22: note = chemically synthesized
  source 1..22: mol_type = other DNA
ttctgtgtcacataagattcca

SEQ ID NO: 124183 - DNA, 22 bp, synthetic construct
  misc_feature 1..22: note = chemically synthesized
  source 1..22: mol_type = other DNA
tctgtgtcacataagattccag

SEQ ID NO: 124184 - DNA, 22 bp, synthetic construct
  misc_feature 1..22: note = chemically synthesized
  source 1..22: mol_type = other DNA
ctgtgtcacataagattccaga

SEQ ID NO: 124185 - DNA, 22 bp, synthetic construct
  misc_feature 1..22: note = chemically synthesized
  source 1..22: mol_type = other DNA
tgtgtcacataagattccagac

SEQ ID NO: 124186 - DNA, 22 bp, synthetic construct
  misc_feature 1..22: note = chemically synthesized
  source 1..22: mol_type = other DNA
tgtcacataagattccagacaa

SEQ ID NO: 124187 - DNA, 22 bp, synthetic construct
  misc_feature 1..22: note = chemically synthesized
  source 1..22: mol_type = other DNA
cagacaatataatcttagtagt

SEQ ID NO: 124188 - DNA, 22 bp, synthetic construct
  misc_feature 1..22: note = chemically synthesized
  source 1..22: mol_type = other DNA
agtagtatctatgagaaaaatc

SEQ ID NO: 124189 - DNA, 22 bp, synthetic construct
  misc_feature 1..22: note = chemically synthesized
  source 1..22: mol_type = other DNA
gtagtatctatgagaaaaatct

SEQ ID NO: 124190 - DNA, 22 bp, synthetic construct
  misc_feature 1..22: note = chemically synthesized
  source 1..22: mol_type = other DNA
tgagaaaaatctacctcaatat

SEQ ID NO: 124191 - DNA, 22 bp, synthetic construct
  misc_feature 1..22: note = chemically synthesized
  source 1..22: mol_type = other DNA
cctcaatatatcttctttctgc

SEQ ID NO: 124192 - DNA, 22 bp, synthetic construct
  misc_feature 1..22: note = chemically synthesized
  source 1..22: mol_type = other DNA
aatatatcttctttctgcattc

SEQ ID NO: 124193 - DNA, 22 bp, synthetic construct
  misc_feature 1..22: note = chemically synthesized
  source 1..22: mol_type = other DNA
ctttctgcattcacactcaaaa

SEQ ID NO: 124194 - DNA, 22 bp, synthetic construct
  misc_feature 1..22: note = chemically synthesized
  source 1..22: mol_type = other DNA
tttctgcattcacactcaaaaa

SEQ ID NO: 124195 - DNA, 22 bp, synthetic construct
  misc_feature 1..22: note = chemically synthesized
  source 1..22: mol_type = other DNA
tctgcattcacactcaaaaact

SEQ ID NO: 124196 - DNA, 22 bp, synthetic construct
  misc_feature 1..22: note = chemically synthesized
  source 1..22: mol_type = other DNA
ctgcattcacactcaaaaactt

SEQ ID NO: 124197 - DNA, 22 bp, synthetic construct
  misc_feature 1..22: note = chemically synthesized
  source 1..22: mol_type = other DNA
tgcattcacactcaaaaacttg

SEQ ID NO: 124198 - DNA, 22 bp, synthetic construct
  misc_feature 1..22: note = chemically synthesized
  source 1..22: mol_type = other DNA
cattcacactcaaaaacttggt

SEQ ID NO: 124199 - DNA, 22 bp, synthetic construct
  misc_feature 1..22: note = chemically synthesized
  source 1..22: mol_type = other DNA
acactcaaaaacttggtatctg

SEQ ID NO: 124200 - DNA, 22 bp, synthetic construct
  misc_feature 1..22: note = chemically synthesized
  source 1..22: mol_type = other DNA
aaaaacttggtatctgtgcttg

SEQ ID NO: 124201 - DNA, 22 bp, synthetic construct
  misc_feature 1..22: note = chemically synthesized
  source 1..22: mol_type = other DNA
ggtatctgtgcttggtttaata

SEQ ID NO: 124202 - DNA, 22 bp, synthetic construct
  misc_feature 1..22: note = chemically synthesized
  source 1..22: mol_type = other DNA
gtatctgtgcttggtttaataa

SEQ ID NO: 124203 - DNA, 22 bp, synthetic construct
  misc_feature 1..22: note = chemically synthesized
  source 1..22: mol_type = other DNA
tgcttggtttaataaaagtagt

SEQ ID NO: 124204 - DNA, 22 bp, synthetic construct
  misc_feature 1..22: note = chemically synthesized
  source 1..22: mol_type = other DNA
ggtttaataaaagtagtgagtg

SEQ ID NO: 124205 - DNA, 22 bp, synthetic construct
  misc_feature 1..22: note = chemically synthesized
  source 1..22: mol_type = other DNA
gtttaataaaagtagtgagtgt

SEQ ID NO: 124206 - DNA, 22 bp, synthetic construct
  misc_feature 1..22: note = chemically synthesized
  source 1..22: mol_type = other DNA
aataaaagtagtgagtgtacct

SEQ ID NO: 124207 - DNA, 22 bp, synthetic construct
  misc_feature 1..22: note = chemically synthesized
  source 1..22: mol_type = other DNA
ataaaagtagtgagtgtacctc

SEQ ID NO: 124208 - DNA, 22 bp, synthetic construct
  misc_feature 1..22: note = chemically synthesized
  source 1..22: mol_type = other DNA
atggagctgagtggtggtgatg

SEQ ID NO: 124209 - DNA, 22 bp, synthetic construct
  misc_feature 1..22: note = chemically synthesized
  source 1..22: mol_type = other DNA
agtggtggtgatgtgtgtttat

SEQ ID NO: 124210 - DNA, 22 bp, synthetic construct
  misc_feature 1..22: note = chemically synthesized
  source 1..22: mol_type = other DNA
atgattgtgtgtgtggcgcttt

SEQ ID NO: 124211 - DNA, 22 bp, synthetic construct
  misc_feature 1..22: note = chemically synthesized
  source 1..22: mol_type = other DNA
tgattgtgtgtgtggcgctttt

SEQ ID NO: 124212 - DNA, 22 bp, synthetic construct
  misc_feature 1..22: note = chemically synthesized
  source 1..22: mol_type = other DNA
tgtgtgtggcgcttttgtgtga

SEQ ID NO: 124213 - DNA, 22 bp, synthetic construct
  misc_feature 1..22: note = chemically synthesized
  source 1..22: mol_type = other DNA
ttgtgtgagagagagagtgtgt

SEQ ID NO: 124214 - DNA, 22 bp, synthetic construct
  misc_feature 1..22: note = chemically synthesized
  source 1..22: mol_type = other DNA
tgtgtgagagagagagtgtgtg

SEQ ID NO: 124215 - DNA, 22 bp, synthetic construct
  misc_feature 1..22: note = chemically synthesized
  source 1..22: mol_type = other DNA
gtgtgagagagagagtgtgtgt

SEQ ID NO: 124216 - DNA, 22 bp, synthetic construct
  misc_feature 1..22: note = chemically synthesized
  source 1..22: mol_type = other DNA
tgtgagagagagagtgtgtgtg

SEQ ID NO: 124217 - DNA, 22 bp, synthetic construct
  misc_feature 1..22: note = chemically synthesized
  source 1..22: mol_type = other DNA
agggcttaaaggaacaattaat

SEQ ID NO: 124218 - DNA, 22 bp, synthetic construct
  misc_feature 1..22: note = chemically synthesized
  source 1..22: mol_type = other DNA
aaaggaacaattaattggtgat

SEQ ID NO: 124219 - DNA, 22 bp, synthetic construct
  misc_feature 1..22: note = chemically synthesized
  source 1..22: mol_type = other DNA
aaggaacaattaattggtgatt

SEQ ID NO: 124220 - DNA, 22 bp, synthetic construct
  misc_feature 1..22: note = chemically synthesized
  source 1..22: mol_type = other DNA
attggtgattaggatcatgtac

SEQ ID NO: 124221 - DNA, 22 bp, synthetic construct
  misc_feature 1..22: note = chemically synthesized
  source 1..22: mol_type = other DNA
gtgattaggatcatgtactcaa

SEQ ID NO: 124222 - DNA, 22 bp, synthetic construct
  misc_feature 1..22: note = chemically synthesized
  source 1..22: mol_type = other DNA
ggatcatgtactcaacaccata

SEQ ID NO: 124223 - DNA, 22 bp, synthetic construct
  misc_feature 1..22: note = chemically synthesized
  source 1..22: mol_type = other DNA
aacaccatagcttgaagtaaaa

SEQ ID NO: 124224 - DNA, 22 bp, synthetic construct
  misc_feature 1..22: note = chemically synthesized
  source 1..22: mol_type = other DNA
gaagtaaaaaaaaacaaaaacc

SEQ ID NO: 124225 - DNA, 22 bp, synthetic construct
  misc_feature 1..22: note = chemically synthesized
  source 1..22: mol_type = other DNA
aagtaaaaaaaaacaaaaacca

SEQ ID NO: 124226 - DNA, 22 bp, synthetic construct
  misc_feature 1..22: note = chemically synthesized
  source 1..22: mol_type = other DNA
taattccaatactgctgcatca

SEQ ID NO: 124227 - DNA, 22 bp, synthetic construct
  misc_feature 1..22: note = chemically synthesized
  source 1..22: mol_type = other DNA
caatactgctgcatcatgactt

SEQ ID NO: 124228 - DNA, 22 bp, synthetic construct
  misc_feature 1..22: note = chemically synthesized
  source 1..22: mol_type = other DNA
ctgcatcatgacttgaaaaacg

SEQ ID NO: 124229 - DNA, 22 bp, synthetic construct
  misc_feature 1..22: note = chemically synthesized
  source 1..22: mol_type = other DNA
catcatgacttgaaaaacgatg

SEQ ID NO: 124230 - DNA, 22 bp, synthetic construct
  misc_feature 1..22: note = chemically synthesized
  source 1..22: mol_type = other DNA
gaaaaacgatgtctgtccactc

SEQ ID NO: 124231 - DNA, 22 bp, synthetic construct
  misc_feature 1..22: note = chemically synthesized
  source 1..22: mol_type = other DNA
aaaaacgatgtctgtccactca

SEQ ID NO: 124232 - DNA, 22 bp, synthetic construct
  misc_feature 1..22: note = chemically synthesized
  source 1..22: mol_type = other DNA
tccactcaccggtgtgtgtgtg

SEQ ID NO: 124233 - DNA, 22 bp, synthetic construct
  misc_feature 1..22: note = chemically synthesized
  source 1..22: mol_type = other DNA
accggtgtgtgtgtgtgtgtgt

SEQ ID NO: 124234 - DNA, 22 bp, synthetic construct
  misc_feature 1..22: note = chemically synthesized
  source 1..22: mol_type = other DNA
ggttcgttgtggggaaacactt

SEQ ID NO: 124235 - DNA, 22 bp, synthetic construct
  misc_feature 1..22: note = chemically synthesized
  source 1..22: mol_type = other DNA
gttgtggggaaacacttgagat

SEQ ID NO: 124236 - DNA, 22 bp, synthetic construct
  misc_feature 1..22: note = chemically synthesized
  source 1..22: mol_type = other DNA
tggggaaacacttgagatcctg

SEQ ID NO: 124237 - DNA, 22 bp, synthetic construct
  misc_feature 1..22: note = chemically synthesized
  source 1..22: mol_type = other DNA
gagatcctgtattgatgaaaaa

SEQ ID NO: 124238 - DNA, 22 bp, synthetic construct
  misc_feature 1..22: note = chemically synthesized
  source 1..22: mol_type = other DNA
agatcctgtattgatgaaaaat

SEQ ID NO: 124239 - DNA, 22 bp, synthetic construct
  misc_feature 1..22: note = chemically synthesized
  source 1..22: mol_type = other DNA
tattgatgaaaaatgatttctc

SEQ ID NO: 124240 - DNA, 22 bp, synthetic construct
  misc_feature 1..22: note = chemically synthesized
  source 1..22: mol_type = other DNA
atgaaaaatgatttctccagac

SEQ ID NO: 124241 - DNA, 22 bp, synthetic construct
  misc_feature 1..22: note = chemically synthesized
  source 1..22: mol_type = other DNA
ctccagactaatcattctgttc

SEQ ID NO: 124242 - DNA, 22 bp, synthetic construct
  misc_feature 1..22: note = chemically synthesized
  source 1..22: mol_type = other DNA
tccagactaatcattctgttcg

SEQ ID NO: 124243 - DNA, 22 bp, synthetic construct
  misc_feature 1..22: note = chemically synthesized
  source 1..22: mol_type = other DNA
cagactaatcattctgttcgta

SEQ ID NO: 124244 - DNA, 22 bp, synthetic construct
  misc_feature 1..22: note = chemically synthesized
  source 1..22: mol_type = other DNA
atcattctgttcgtaaaacttt

SEQ ID NO: 124245 - DNA, 22 bp, synthetic construct
  misc_feature 1..22: note = chemically synthesized
  source 1..22: mol_type = other DNA
tgttcgtaaaactttgagtttt

SEQ ID NO: 124246 - DNA, 22 bp, synthetic construct
  misc_feature 1..22: note = chemically synthesized
  source 1..22: mol_type = other DNA
ttcgtaaaactttgagttttga

SEQ ID NO: 124247 - DNA, 22 bp, synthetic construct
  misc_feature 1..22: note = chemically synthesized
  source 1..22: mol_type = other DNA
gtaaaactttgagttttgaaga

SEQ ID NO: 124248 - DNA, 22 bp, synthetic construct
  misc_feature 1..22: note = chemically synthesized
  source 1..22: mol_type = other DNA
tgagttttgaagacactcaggg

SEQ ID NO: 124249 - DNA, 22 bp, synthetic construct
  misc_feature 1..22: note = chemically synthesized
  source 1..22: mol_type = other DNA
gagttttgaagacactcagggt

SEQ ID NO: 124250 - DNA, 22 bp, synthetic construct
  misc_feature 1..22: note = chemically synthesized
  source 1..22: mol_type = other DNA
agttttgaagacactcagggtc

SEQ ID NO: 124251 - DNA, 22 bp, synthetic construct
  misc_feature 1..22: note = chemically synthesized
  source 1..22: mol_type = other DNA
tgaagacactcagggtctcttt

SEQ ID NO: 124252 - DNA, 22 bp, synthetic construct
  misc_feature 1..22: note = chemically synthesized
  source 1..22: mol_type = other DNA
gaagacactcagggtctctttc

SEQ ID NO: 124253 - DNA, 22 bp, synthetic construct
  misc_feature 1..22: note = chemically synthesized
  source 1..22: mol_type = other DNA
aagacactcagggtctctttct

SEQ ID NO: 124254 - DNA, 22 bp, synthetic construct
  misc_feature 1..22: note = chemically synthesized
  source 1..22: mol_type = other DNA
agggtctctttcttcccttaag

SEQ ID NO: 124255 - DNA, 22 bp, synthetic construct
  misc_feature 1..22: note = chemically synthesized
  source 1..22: mol_type = other DNA
tttcttcccttaagctttctct

SEQ ID NO: 124256 - DNA, 22 bp, synthetic construct
  misc_feature 1..22: note = chemically synthesized
  source 1..22: mol_type = other DNA
tcttcccttaagctttctctca

SEQ ID NO: 124257 - DNA, 22 bp, synthetic construct
  misc_feature 1..22: note = chemically synthesized
  source 1..22: mol_type = other DNA
cttcccttaagctttctctcat

SEQ ID NO: 124258 - DNA, 22 bp, synthetic construct
  misc_feature 1..22: note = chemically synthesized
  source 1..22: mol_type = other DNA
ttcccttaagctttctctcatg

SEQ ID NO: 124259 - DNA, 22 bp, synthetic construct
  misc_feature 1..22: note = chemically synthesized
  source 1..22: mol_type = other DNA
cccttaagctttctctcatgga

SEQ ID NO: 124260 - DNA, 22 bp, synthetic construct
  misc_feature 1..22: note = chemically synthesized
  source 1..22: mol_type = other DNA
ccttaagctttctctcatggag

SEQ ID NO: 124261 - DNA, 22 bp, synthetic construct
  misc_feature 1..22: note = chemically synthesized
  source 1..22: mol_type = other DNA
aagctttctctcatggaggaat

SEQ ID NO: 124262 - DNA, 22 bp, synthetic construct
  misc_feature 1..22: note = chemically synthesized
  source 1..22: mol_type = other DNA
agctttctctcatggaggaatg

SEQ ID NO: 124263 - DNA, 22 bp, synthetic construct
  misc_feature 1..22: note = chemically synthesized
  source 1..22: mol_type = other DNA
tctctcatggaggaatgccact

SEQ ID NO: 124264 - DNA, 22 bp, synthetic construct
  misc_feature 1..22: note = chemically synthesized
  source 1..22: mol_type = other DNA
ctctcatggaggaatgccactc

SEQ ID NO: 124265 - DNA, 22 bp, synthetic construct
  misc_feature 1..22: note = chemically synthesized
  source 1..22: mol_type = other DNA
tctcatggaggaatgccactca

SEQ ID NO: 124266 - DNA, 22 bp, synthetic construct
  misc_feature 1..22: note = chemically synthesized
  source 1..22: mol_type = other DNA
tcatggaggaatgccactcaga

SEQ ID NO: 124267 - DNA, 22 bp, synthetic construct
  misc_feature 1..22: note = chemically synthesized
  source 1..22: mol_type = other DNA
atggaggaatgccactcagaca

SEQ ID NO: 124268 - DNA, 22 bp, synthetic construct
  misc_feature 1..22: note = chemically synthesized
  source 1..22: mol_type = other DNA
agacatctacttagcacatttt

SEQ ID NO: 124269 - DNA, 22 bp, synthetic construct
  misc_feature 1..22: note = chemically synthesized
  source 1..22: mol_type = other DNA
cttagcacattttacaacactt

SEQ ID NO: 124270 - DNA, 22 bp, synthetic construct
  misc_feature 1..22: note = chemically synthesized
  source 1..22: mol_type = other DNA
agcacattttacaacacttgca

SEQ ID NO: 124271 - DNA, 22 bp, synthetic construct
  misc_feature 1..22: note = chemically synthesized
  source 1..22: mol_type = other DNA
gcacattttacaacacttgcat

SEQ ID NO: 124272 - DNA, 22 bp, synthetic construct
  misc_feature 1..22: note = chemically synthesized
  source 1..22: mol_type = other DNA
tacaacacttgcatttccttgg

SEQ ID NO: 124273 - DNA, 22 bp, synthetic construct
  misc_feature 1..22: note = chemically synthesized
  source 1..22: mol_type = other DNA
acaacacttgcatttccttggg

SEQ ID NO: 124274 - DNA, 22 bp, synthetic construct
  misc_feature 1..22: note = chemically synthesized
  source 1..22: mol_type = other DNA
caacacttgcatttccttgggc

SEQ ID NO: 124275 - DNA, 22 bp, synthetic construct
  misc_feature 1..22: note = chemically synthesized
  source 1..22: mol_type = other DNA
gcatttccttgggctccttttc

SEQ ID NO: 124276 - DNA, 22 bp, synthetic construct
  misc_feature 1..22: note = chemically synthesized
  source 1..22: mol_type = other DNA
catttccttgggctccttttcc

SEQ ID NO: 124277 - DNA, 22 bp, synthetic construct
  misc_feature 1..22: note = chemically synthesized
  source 1..22: mol_type = other DNA
ccttgggctccttttccttgtt

SEQ ID NO: 124278 - DNA, 22 bp, synthetic construct
  misc_feature 1..22: note = chemically synthesized
  source 1..22: mol_type = other DNA
cttgggctccttttccttgttt

SEQ ID NO: 124279 - DNA, 22 bp, synthetic construct
  misc_feature 1..22: note = chemically synthesized
  source 1..22: mol_type = other DNA
gggctccttttccttgttttca

SEQ ID NO: 124280 - DNA, 22 bp, synthetic construct
  misc_feature 1..22: note = chemically synthesized
  source 1..22: mol_type = other DNA
ggctccttttccttgttttcaa

SEQ ID NO: 124281 - DNA, 22 bp, synthetic construct
  misc_feature 1..22: note = chemically synthesized
  source 1..22: mol_type = other DNA
cttttccttgttttcaaccttc

SEQ ID NO: 124282 - DNA, 22 bp, synthetic construct
  misc_feature 1..22: note = chemically synthesized
  source 1..22: mol_type = other DNA
ttccttgttttcaaccttcatg

SEQ ID NO: 124283 - DNA, 22 bp, synthetic construct
  misc_feature 1..22: note = chemically synthesized
  source 1..22: mol_type = other DNA
tccttgttttcaaccttcatgc

SEQ ID NO: 124284 - DNA, 22 bp, synthetic construct
  misc_feature 1..22: note = chemically synthesized
  source 1..22: mol_type = other DNA
ccttgttttcaaccttcatgcc

SEQ ID NO: 124285 - DNA, 22 bp, synthetic construct
  misc_feature 1..22: note = chemically synthesized
  source 1..22: mol_type = other DNA
cttgttttcaaccttcatgccc

SEQ ID NO: 124286 - DNA, 22 bp, synthetic construct
  misc_feature 1..22: note = chemically synthesized
  source 1..22: mol_type = other DNA
gttttcaaccttcatgccccaa

SEQ ID NO: 124287 - DNA, 22 bp, synthetic construct
  misc_feature 1..22: note = chemically synthesized
  source 1..22: mol_type = other DNA
ttttcaaccttcatgccccaat

SEQ ID NO: 124288 - DNA, 22 bp, synthetic construct
  misc_feature 1..22: note = chemically synthesized
  source 1..22: mol_type = other DNA
tcaaccttcatgccccaatccc

SEQ ID NO: 124289 - DNA, 22 bp, synthetic construct
  misc_feature 1..22: note = chemically synthesized
  source 1..22: mol_type = other DNA
caaccttcatgccccaatccct

SEQ ID NO: 124290 - DNA, 22 bp, synthetic construct
  misc_feature 1..22: note = chemically synthesized
  source 1..22: mol_type = other DNA
aaccttcatgccccaatccctg

SEQ ID NO: 124291 - DNA, 22 bp, synthetic construct
  misc_feature 1..22: note = chemically synthesized
  source 1..22: mol_type = other DNA
catgccccaatccctgcctaac

SEQ ID NO: 124292 - DNA, 22 bp, synthetic construct
  misc_feature 1..22: note = chemically synthesized
  source 1..22: mol_type = other DNA
atgccccaatccctgcctaact

SEQ ID NO: 124293 - DNA, 22 bp, synthetic construct
  misc_feature 1..22: note = chemically synthesized
  source 1..22: mol_type = other DNA
cctaacttctattatttctttt

SEQ ID NO: 124294 - DNA, 22 bp, synthetic construct
  misc_feature 1..22: note = chemically synthesized
  source 1..22: mol_type = other DNA
acttctattatttctttttttt

SEQ ID NO: 124295 - DNA, 22 bp, synthetic construct
  misc_feature 1..22: note = chemically synthesized
  source 1..22: mol_type = other DNA
ctattatttctttttttttttt

SEQ ID NO: 124296 - DNA, 22 bp, synthetic construct
  misc_feature 1..22: note = chemically synthesized
  source 1..22: mol_type = other DNA
tattatttctttttttttttta

SEQ ID NO: 124297 - DNA, 22 bp, synthetic construct
  misc_feature 1..22: note = chemically synthesized
  source 1..22: mol_type = other DNA
ttatttcttttttttttttaat

SEQ ID NO: 124298 - DNA, 22 bp, synthetic construct
  misc_feature 1..22: note = chemically synthesized
  source 1..22: mol_type = other DNA
tttcttttttttttttaatgcc

SEQ ID NO: 124299 - DNA, 22 bp, synthetic construct
  misc_feature 1..22: note = chemically synthesized
  source 1..22: mol_type = other DNA
cttttttttttttaatgccata

SEQ ID NO: 124300 - DNA, 22 bp, synthetic construct
  misc_feature 1..22: note = chemically synthesized
  source 1..22: mol_type = other DNA
ttttttttttttaatgccatac

SEQ ID NO: 124301 - DNA, 22 bp, synthetic construct
  misc_feature 1..22: note = chemically synthesized
  source 1..22: mol_type = other DNA
ttttttttttaatgccatacat

SEQ ID NO: 124302 - DNA, 22 bp, synthetic construct
  misc_feature 1..22: note = chemically synthesized
  source 1..22: mol_type = other DNA
tttttttttaatgccatacatc

SEQ ID NO: 124303 - DNA, 22 bp, synthetic construct
  misc_feature 1..22: note = chemically synthesized
  source 1..22: mol_type = other DNA
ttttttttaatgccatacatct

SEQ ID NO: 124304 - DNA, 22 bp, synthetic construct
  misc_feature 1..22: note = chemically synthesized
  source 1..22: mol_type = other DNA
tttttttaatgccatacatctg

SEQ ID NO: 124305 - DNA, 22 bp, synthetic construct
  misc_feature 1..22: note = chemically synthesized
  source 1..22: mol_type = other DNA
ttttttaatgccatacatctgc

SEQ ID NO: 124306 - DNA, 22 bp, synthetic construct
  misc_feature 1..22: note = chemically synthesized
  source 1..22: mol_type = other DNA
tttttaatgccatacatctgca

SEQ ID NO: 124307 - DNA, 22 bp, synthetic construct
  misc_feature 1..22: note = chemically synthesized
  source 1..22: mol_type = other DNA
ttttaatgccatacatctgcat

SEQ ID NO: 124308 - DNA, 22 bp, synthetic construct
  misc_feature 1..22: note = chemically synthesized
  source 1..22: mol_type = other DNA
tttaatgccatacatctgcatt

SEQ ID NO: 124309 - DNA, 22 bp, synthetic construct
  misc_feature 1..22: note = chemically synthesized
  source 1..22: mol_type = other DNA
ttaatgccatacatctgcattt

SEQ ID NO: 124310 - DNA, 22 bp, synthetic construct
  misc_feature 1..22: note = chemically synthesized
  source 1..22: mol_type = other DNA
taatgccatacatctgcattta

SEQ ID NO: 124311 - DNA, 22 bp, synthetic construct
  misc_feature 1..22: note = chemically synthesized
  source 1..22: mol_type = other DNA
aatgccatacatctgcatttat

SEQ ID NO: 124312 - DNA, 22 bp, synthetic construct
  misc_feature 1..22: note = chemically synthesized
  source 1..22: mol_type = other DNA
atgccatacatctgcatttatt

SEQ ID NO: 124313 - DNA, 22 bp, synthetic construct
  misc_feature 1..22: note = chemically synthesized
  source 1..22: mol_type = other DNA
catttattataagcaacaggcg

SEQ ID NO: 124314 - DNA, 22 bp, synthetic construct
  misc_feature 1..22: note = chemically synthesized
  source 1..22: mol_type = other DNA
attataagcaacaggcgggaca

SEQ ID NO: 124315 - DNA, 22 bp, synthetic construct
  misc_feature 1..22: note = chemically synthesized
  source 1..22: mol_type = other DNA
ttataagcaacaggcgggacac

SEQ ID NO: 124316 - DNA, 22 bp, synthetic construct
  misc_feature 1..22: note = chemically synthesized
  source 1..22: mol_type = other DNA
taagcaacaggcgggacacttc

SEQ ID NO: 124317 - DNA, 22 bp, synthetic construct
  misc_feature 1..22: note = chemically synthesized
  source 1..22: mol_type = other DNA
ccagcaatagaaagaaaactta

SEQ ID NO: 124318 - DNA, 22 bp, synthetic construct
  misc_feature 1..22: note = chemically synthesized
  source 1..22: mol_type = other DNA
cagcaatagaaagaaaacttaa

SEQ ID NO: 124319 - DNA, 22 bp, synthetic construct
  misc_feature 1..22: note = chemically synthesized
  source 1..22: mol_type = other DNA
aatttacaaaagcagggattca

SEQ ID NO: 124320 - DNA, 22 bp, synthetic construct
  misc_feature 1..22: note = chemically synthesized
  source 1..22: mol_type = other DNA
atttacaaaagcagggattcag

SEQ ID NO: 124321 - DNA, 22 bp, synthetic construct
  misc_feature 1..22: note = chemically synthesized
  source 1..22: mol_type = other DNA
acaaaagcagggattcagtgaa

SEQ ID NO: 124322 - DNA, 22 bp, synthetic construct
  misc_feature 1..22: note = chemically synthesized
  source 1..22: mol_type = other DNA
caaaagcagggattcagtgaag

SEQ ID NO: 124323 - DNA, 22 bp, synthetic construct
  misc_feature 1..22: note = chemically synthesized
  source 1..22: mol_type = other DNA
agtgaagccacctggttgttac

SEQ ID NO: 124324 - DNA, 22 bp, synthetic construct
  misc_feature 1..22: note = chemically synthesized
  source 1..22: mol_type = other DNA
gttgttactcttgggcactcac

SEQ ID NO: 124325 - DNA, 22 bp, synthetic construct
  misc_feature 1..22: note = chemically synthesized
  source 1..22: mol_type = other DNA
ttactcttgggcactcacatgt

SEQ ID NO: 124326 - DNA, 22 bp, synthetic construct
  misc_feature 1..22: note = chemically synthesized
  source 1..22: mol_type = other DNA
ctcttgggcactcacatgtaga

SEQ ID NO: 124327 - DNA, 22 bp, synthetic construct
  misc_feature 1..22: note = chemically synthesized
  source 1..22: mol_type = other DNA
ttgggcactcacatgtagatgc

SEQ ID NO: 124328 - DNA, 22 bp, synthetic construct
  misc_feature 1..22: note = chemically synthesized
  source 1..22: mol_type = other DNA
gggcactcacatgtagatgcca

SEQ ID NO: 124329 - DNA, 22 bp, synthetic construct
  misc_feature 1..22: note = chemically synthesized
  source 1..22: mol_type = other DNA
ggcactcacatgtagatgccaa

SEQ ID NO: 124330 - DNA, 22 bp, synthetic construct
  misc_feature 1..22: note = chemically synthesized
  source 1..22: mol_type = other DNA
acatgtagatgccaacccagag

SEQ ID NO: 124331 - DNA, 22 bp, synthetic construct
  misc_feature 1..22: note = chemically synthesized
  source 1..22: mol_type = other DNA
caaagcccatgaagagtgaggc

SEQ ID NO: 124332 - DNA, 22 bp, synthetic construct
  misc_feature 1..22: note = chemically synthesized
  source 1..22: mol_type = other DNA
aaagcccatgaagagtgaggcc

SEQ ID NO: 124333 - DNA, 22 bp, synthetic construct
  misc_feature 1..22: note = chemically synthesized
  source 1..22: mol_type = other DNA
tttatagatatcacaagtgtac

SEQ ID NO: 124334 - DNA, 22 bp, synthetic construct
  misc_feature 1..22: note = chemically synthesized
  source 1..22: mol_type = other DNA
tatagatatcacaagtgtactt

SEQ ID NO: 124335 - DNA, 22 bp, synthetic construct
  misc_feature 1..22: note = chemically synthesized
  source 1..22: mol_type = other DNA
atagatatcacaagtgtacttg

SEQ ID NO: 124336 - DNA, 22 bp, synthetic construct
  misc_feature 1..22: note = chemically synthesized
  source 1..22: mol_type = other DNA
tagatatcacaagtgtacttgg

SEQ ID NO: 124337 - DNA, 22 bp, synthetic construct
  misc_feature 1..22: note = chemically synthesized
  source 1..22: mol_type = other DNA
ggtagaggtgacctcgtaaaca

SEQ ID NO: 124338 - DNA, 22 bp, synthetic construct
  misc_feature 1..22: note = chemically synthesized
  source 1..22: mol_type = other DNA
gtagaggtgacctcgtaaacaa

SEQ ID NO: 124339 - DNA, 22 bp, synthetic construct
  misc_feature 1..22: note = chemically synthesized
  source 1..22: mol_type = other DNA
gtaaacaaagaaccaggtggtg

SEQ ID NO: 124340 - DNA, 22 bp, synthetic construct
  misc_feature 1..22: note = chemically synthesized
  source 1..22: mol_type = other DNA
tacaatcagatgggggaagaca

SEQ ID NO: 124341 - DNA, 22 bp, synthetic construct
  misc_feature 1..22: note = chemically synthesized
  source 1..22: mol_type = other DNA
caatcagatgggggaagacagc

SEQ ID NO: 124342 - DNA, 22 bp, synthetic construct
  misc_feature 1..22: note = chemically synthesized
  source 1..22: mol_type = other DNA
ggttgaccgggctgttgtatct

SEQ ID NO: 124343 - DNA, 22 bp, synthetic construct
  misc_feature 1..22: note = chemically synthesized
  source 1..22: mol_type = other DNA
accgggctgttgtatctgctca

SEQ ID NO: 124344 - DNA, 22 bp, synthetic construct
  misc_feature 1..22: note = chemically synthesized
  source 1..22: mol_type = other DNA
ttgtatctgctcatggccttga

SEQ ID NO: 124345 - DNA, 22 bp, synthetic construct
  misc_feature 1..22: note = chemically synthesized
  source 1..22: mol_type = other DNA
tatctgctcatggccttgagct

SEQ ID NO: 124346 - DNA, 22 bp, synthetic construct
  misc_feature 1..22: note = chemically synthesized
  source 1..22: mol_type = other DNA
ctcatggccttgagctccattt

SEQ ID NO: 124347 - DNA, 22 bp, synthetic construct
  misc_feature 1..22: note = chemically synthesized
  source 1..22: mol_type = other DNA
atggccttgagctccattttgc

SEQ ID NO: 124348 - DNA, 22 bp, synthetic construct
  misc_feature 1..22: note = chemically synthesized
  source 1..22: mol_type = other DNA
gagctccattttgccccagcag

SEQ ID NO: 124349 - DNA, 22 bp, synthetic construct
  misc_feature 1..22: note = chemically synthesized
  source 1..22: mol_type = other DNA
agctccattttgccccagcagg

SEQ ID NO: 124350 - DNA, 22 bp, synthetic construct
  misc_feature 1..22: note = chemically synthesized
  source 1..22: mol_type = other DNA
cattttgccccagcaggctaag

SEQ ID NO: 124351 - DNA, 22 bp, synthetic construct
  misc_feature 1..22: note = chemically synthesized
  source 1..22: mol_type = other DNA
tgccccagcaggctaagccacc

SEQ ID NO: 124352 - DNA, 22 bp, synthetic construct
  misc_feature 1..22: note = chemically synthesized
  source 1..22: mol_type = other DNA
gccccagcaggctaagccacca

SEQ ID NO: 124353 - DNA, 22 bp, synthetic construct
  misc_feature 1..22: note = chemically synthesized
  source 1..22: mol_type = other DNA
ccccagcaggctaagccaccac

SEQ ID NO: 124354 - DNA, 22 bp, synthetic construct
  misc_feature 1..22: note = chemically synthesized
  source 1..22: mol_type = other DNA
agccaccactctgccaccagaa

SEQ ID NO: 124355 - DNA, 22 bp, synthetic construct
  misc_feature 1..22: note = chemically synthesized
  source 1..22: mol_type = other DNA
tgccaccagaagacttctgtta

SEQ ID NO: 124356 - DNA, 22 bp, synthetic construct
  misc_feature 1..22: note = chemically synthesized
  source 1..22: mol_type = other DNA
ccaccagaagacttctgttatt

SEQ ID NO: 124357 - DNA, 22 bp, synthetic construct
  misc_feature 1..22: note = chemically synthesized
  source 1..22: mol_type = other DNA
ctgttatttcttatcttttgct

SEQ ID NO: 124358 - DNA, 22 bp, synthetic construct
  misc_feature 1..22: note = chemically synthesized
  source 1..22: mol_type = other DNA
tgttatttcttatcttttgctt

SEQ ID NO: 124359 - DNA, 22 bp, synthetic construct
  misc_feature 1..22: note = chemically synthesized
  source 1..22: mol_type = other DNA
ttatttcttatcttttgctttc

SEQ ID NO: 124360 - DNA, 22 bp, synthetic construct
  misc_feature 1..22: note = chemically synthesized
  source 1..22: mol_type = other DNA
tttcttatcttttgctttcctg

SEQ ID NO: 124361 - DNA, 22 bp, synthetic construct
  misc_feature 1..22: note = chemically synthesized
  source 1..22: mol_type = other DNA
cttatcttttgctttcctgact

SEQ ID NO: 124362 - DNA, 22 bp, synthetic construct
  misc_feature 1..22: note = chemically synthesized
  source 1..22: mol_type = other DNA
ttatcttttgctttcctgactt

SEQ ID NO: 124363 - DNA, 22 bp, synthetic construct
  misc_feature 1..22: note = chemically synthesized
  source 1..22: mol_type = other DNA
atcttttgctttcctgacttca

SEQ ID NO: 124364 - DNA, 22 bp, synthetic construct
  misc_feature 1..22: note = chemically synthesized
  source 1..22: mol_type = other DNA
tcttttgctttcctgacttcat

SEQ ID NO: 124365 - DNA, 22 bp, synthetic construct
  misc_feature 1..22: note = chemically synthesized
  source 1..22: mol_type = other DNA
ttgctttcctgacttcatctct

SEQ ID NO: 124366 - DNA, 22 bp, synthetic construct
  misc_feature 1..22: note = chemically synthesized
  source 1..22: mol_type = other DNA
tgctttcctgacttcatctctg

SEQ ID NO: 124367 - DNA, 22 bp, synthetic construct
  misc_feature 1..22: note = chemically synthesized
  source 1..22: mol_type = other DNA
gctttcctgacttcatctctgc

SEQ ID NO: 124368 - DNA, 22 bp, synthetic construct
  misc_feature 1..22: note = chemically synthesized
  source 1..22: mol_type = other DNA
ctttcctgacttcatctctgct

SEQ ID NO: 124369 - DNA, 22 bp, synthetic construct
  misc_feature 1..22: note = chemically synthesized
  source 1..22: mol_type = other DNA
tcctgacttcatctctgctctc

SEQ ID NO: 124370 - DNA, 22 bp, synthetic construct
  misc_feature 1..22: note = chemically synthesized
  source 1..22: mol_type = other DNA
cctgacttcatctctgctctct

SEQ ID NO: 124371 - DNA, 22 bp, synthetic construct
  misc_feature 1..22: note = chemically synthesized
  source 1..22: mol_type = other DNA
ctgacttcatctctgctctctg

SEQ ID NO: 124372 - DNA, 22 bp, synthetic construct
  misc_feature 1..22: note = chemically synthesized
  source 1..22: mol_type = other DNA
acttcatctctgctctctgact

SEQ ID NO: 124373 - DNA, 22 bp, synthetic construct
  misc_feature 1..22: note = chemically synthesized
  source 1..22: mol_type = other DNA
catctctgctctctgactaggt

SEQ ID NO: 124374 - DNA, 22 bp, synthetic construct
  misc_feature 1..22: note = chemically synthesized
  source 1..22: mol_type = other DNA
atctctgctctctgactaggta

SEQ ID NO: 124375 - DNA, 22 bp, synthetic construct
  misc_feature 1..22: note = chemically synthesized
  source 1..22: mol_type = other DNA
tgctctctgactaggtaattat

SEQ ID NO: 124376 - DNA, 22 bp, synthetic construct
  misc_feature 1..22: note = chemically synthesized
  source 1..22: mol_type = other DNA
ctctctgactaggtaattatat

SEQ ID NO: 124377 - DNA, 22 bp, synthetic construct
  misc_feature 1..22: note = chemically synthesized
  source 1..22: mol_type = other DNA
tctgactaggtaattatatcta

SEQ ID NO: 124378 - DNA, 22 bp, synthetic construct
  misc_feature 1..22: note = chemically synthesized
  source 1..22: mol_type = other DNA
tgactaggtaattatatctaac

SEQ ID NO: 124379 - DNA, 22 bp, synthetic construct
  misc_feature 1..22: note = chemically synthesized
  source 1..22: mol_type = other DNA
actaggtaattatatctaacaa

SEQ ID NO: 124380 - DNA, 22 bp, synthetic construct
  misc_feature 1..22: note = chemically synthesized
  source 1..22: mol_type = other DNA
ggtaattatatctaacaatgtt

SEQ ID NO: 124381 - DNA, 22 bp, synthetic construct
  misc_feature 1..22: note = chemically synthesized
  source 1..22: mol_type = other DNA
tatctaacaatgttatctattc

SEQ ID NO: 124382 - DNA, 22 bp, synthetic construct
  misc_feature 1..22: note = chemically synthesized
  source 1..22: mol_type = other DNA
acaatgttatctattctgattc

SEQ ID NO: 124383 - DNA, 22 bp, synthetic construct
  misc_feature 1..22: note = chemically synthesized
  source 1..22: mol_type = other DNA
tctattctgattcatagtatcc

SEQ ID NO: 124384 - DNA, 22 bp, synthetic construct
  misc_feature 1..22: note = chemically synthesized
  source 1..22: mol_type = other DNA
ttctgattcatagtatccagta

SEQ ID NO: 124385 - DNA, 22 bp, synthetic construct
  misc_feature 1..22: note = chemically synthesized
  source 1..22: mol_type = other DNA
tgattcatagtatccagtagac

SEQ ID NO: 124386 - DNA, 22 bp, synthetic construct
  misc_feature 1..22: note = chemically synthesized
  source 1..22: mol_type = other DNA
attcatagtatccagtagacct

SEQ ID NO: 124387 - DNA, 22 bp, synthetic construct
  misc_feature 1..22: note = chemically synthesized
  source 1..22: mol_type = other DNA
atagtatccagtagacctgatt

SEQ ID NO: 124388 - DNA, 22 bp, synthetic construct
  misc_feature 1..22: note = chemically synthesized
  source 1..22: mol_type = other DNA
atttaatcatcacattctcatt

SEQ ID NO: 124389 - DNA, 22 bp, synthetic construct
  misc_feature 1..22: note = chemically synthesized
  source 1..22: mol_type = other DNA
aatcatcacattctcattataa

SEQ ID NO: 124390 - DNA, 22 bp, synthetic construct
  misc_feature 1..22: note = chemically synthesized
  source 1..22: mol_type = other DNA
atcatcacattctcattataag

SEQ ID NO: 124391 - DNA, 22 bp, synthetic construct
  misc_feature 1..22: note = chemically synthesized
  source 1..22: mol_type = other DNA
tcattataaggctcaacaacta

SEQ ID NO: 124392 - DNA, 22 bp, synthetic construct
  misc_feature 1..22: note = chemically synthesized
  source 1..22: mol_type = other DNA
attataaggctcaacaactaat

SEQ ID NO: 124393 - DNA, 22 bp, synthetic construct
  misc_feature 1..22: note = chemically synthesized
  source 1..22: mol_type = other DNA
taaggctcaacaactaatgttc

SEQ ID NO: 124394 - DNA, 22 bp, synthetic construct
  misc_feature 1..22: note = chemically synthesized
  source 1..22: mol_type = other DNA
aacaactaatgttcacaatttt

SEQ ID NO: 124395 - DNA, 22 bp, synthetic construct
  misc_feature 1..22: note = chemically synthesized
  source 1..22: mol_type = other DNA
atgttcacaattttccaaagcc

SEQ ID NO: 124396 - DNA, 22 bp, synthetic construct
  misc_feature 1..22: note = chemically synthesized
  source 1..22: mol_type = other DNA
acaattttccaaagccatagac

SEQ ID NO: 124397 - DNA, 22 bp, synthetic construct
  misc_feature 1..22: note = chemically synthesized
  source 1..22: mol_type = other DNA
tccaaagccatagactgatcat

SEQ ID NO: 124398 - DNA, 22 bp, synthetic construct
  misc_feature 1..22: note = chemically synthesized
  source 1..22: mol_type = other DNA
ccaaagccatagactgatcatc

SEQ ID NO: 124399 - DNA, 22 bp, synthetic construct
  misc_feature 1..22: note = chemically synthesized
  source 1..22: mol_type = other DNA
caaagccatagactgatcatct

SEQ ID NO: 124400 - DNA, 22 bp, synthetic construct
  misc_feature 1..22: note = chemically synthesized
  source 1..22: mol_type = other DNA
atcatctgatctacaaatacac

SEQ ID NO: 124401 - DNA, 22 bp, synthetic construct
  misc_feature 1..22: note = chemically synthesized
  source 1..22: mol_type = other DNA
atctacaaatacactaaattcc

SEQ ID NO: 124402 - DNA, 22 bp, synthetic construct
  misc_feature 1..22: note = chemically synthesized
  source 1..22: mol_type = other DNA
caaatacactaaattcctgacc

SEQ ID NO: 124403 - DNA, 22 bp, synthetic construct
  misc_feature 1..22: note = chemically synthesized
  source 1..22: mol_type = other DNA
aattcctgaccatcttcgtagt

SEQ ID NO: 124404 - DNA, 22 bp, synthetic construct
  misc_feature 1..22: note = chemically synthesized
  source 1..22: mol_type = other DNA
ctgaccatcttcgtagttgatt

SEQ ID NO: 124405 - DNA, 22 bp, synthetic construct
  misc_feature 1..22: note = chemically synthesized
  source 1..22: mol_type = other DNA
accatcttcgtagttgattatg

SEQ ID NO: 124406 - DNA, 22 bp, synthetic construct
  misc_feature 1..22: note = chemically synthesized
  source 1..22: mol_type = other DNA
cgtagttgattatggctctgaa

SEQ ID NO: 124407 - DNA, 22 bp, synthetic construct
  misc_feature 1..22: note = chemically synthesized
  source 1..22: mol_type = other DNA
gtagttgattatggctctgaat

SEQ ID NO: 124408 - DNA, 22 bp, synthetic construct
  misc_feature 1..22: note = chemically synthesized
  source 1..22: mol_type = other DNA
attatggctctgaatggctttt

SEQ ID NO: 124409 - DNA, 22 bp, synthetic construct
  misc_feature 1..22: note = chemically synthesized
  source 1..22: mol_type = other DNA
tggctctgaatggctttttgcc

SEQ ID NO: 124410 - DNA, 22 bp, synthetic construct
  misc_feature 1..22: note = chemically synthesized
  source 1..22: mol_type = other DNA
tgaatggctttttgcccaaagc

SEQ ID NO: 124411 - DNA, 22 bp, synthetic construct
  misc_feature 1..22: note = chemically synthesized
  source 1..22: mol_type = other DNA
aatggctttttgcccaaagcat

SEQ ID NO: 124412 - DNA, 22 bp, synthetic construct
  misc_feature 1..22: note = chemically synthesized
  source 1..22: mol_type = other DNA
tttgcccaaagcatccagcacc

SEQ ID NO: 124413 - DNA, 22 bp, synthetic construct
  misc_feature 1..22: note = chemically synthesized
  source 1..22: mol_type = other DNA
ttgcccaaagcatccagcacca

SEQ ID NO: 124414 - DNA, 22 bp, synthetic construct
  misc_feature 1..22: note = chemically synthesized
  source 1..22: mol_type = other DNA
tgcccaaagcatccagcaccat

SEQ ID NO: 124415 - DNA, 22 bp, synthetic construct
  misc_feature 1..22: note = chemically synthesized
  source 1..22: mol_type = other DNA
gcccaaagcatccagcaccatt

SEQ ID NO: 124416 - DNA, 22 bp, synthetic construct
  misc_feature 1..22: note = chemically synthesized
  source 1..22: mol_type = other DNA
cccaaagcatccagcaccattt

SEQ ID NO: 124417 - DNA, 22 bp, synthetic construct
  misc_feature 1..22: note = chemically synthesized
  source 1..22: mol_type = other DNA
tcatctgggtagtttcccctgc

SEQ ID NO: 124418 - DNA, 22 bp, synthetic construct
  misc_feature 1..22: note = chemically synthesized
  source 1..22: mol_type = other DNA
catctgggtagtttcccctgct

SEQ ID NO: 124419 - DNA, 22 bp, synthetic construct
  misc_feature 1..22: note = chemically synthesized
  source 1..22: mol_type = other DNA
atctgggtagtttcccctgctg

SEQ ID NO: 124420 - DNA, 22 bp, synthetic construct
  misc_feature 1..22: note = chemically synthesized
  source 1..22: mol_type = other DNA
ggtagtttcccctgctggtaaa

SEQ ID NO: 124421 - DNA, 22 bp, synthetic construct
  misc_feature 1..22: note = chemically synthesized
  source 1..22: mol_type = other DNA
cccctgctggtaaaaatagtaa

SEQ ID NO: 124422 - DNA, 22 bp, synthetic construct
  misc_feature 1..22: note = chemically synthesized
  source 1..22: mol_type = other DNA
ccctgctggtaaaaatagtaaa

SEQ ID NO: 124423 - DNA, 22 bp, synthetic construct
  misc_feature 1..22: note = chemically synthesized
  source 1..22: mol_type = other DNA
ctggtaaaaatagtaaacactt

SEQ ID NO: 124424 - DNA, 22 bp, synthetic construct
  misc_feature 1..22: note = chemically synthesized
  source 1..22: mol_type = other DNA
gtaaaaatagtaaacacttttc

SEQ ID NO: 124425 - DNA, 22 bp, synthetic construct
  misc_feature 1..22: note = chemically synthesized
  source 1..22: mol_type = other DNA
ttccttatctactcccatcccc

SEQ ID NO: 124426 - DNA, 22 bp, synthetic construct
  misc_feature 1..22: note = chemically synthesized
  source 1..22: mol_type = other DNA
tccttatctactcccatccccc

SEQ ID NO: 124427 - DNA, 22 bp, synthetic construct
  misc_feature 1..22: note = chemically synthesized
  source 1..22: mol_type = other DNA
ccttatctactcccatcccccg

SEQ ID NO: 124428 - DNA, 22 bp, synthetic construct
  misc_feature 1..22: note = chemically synthesized
  source 1..22: mol_type = other DNA
cttatctactcccatcccccga

SEQ ID NO: 124429 - DNA, 22 bp, synthetic construct
  misc_feature 1..22: note = chemically synthesized
  source 1..22: mol_type = other DNA
atctactcccatcccccgacag

SEQ ID NO: 124430 - DNA, 22 bp, synthetic construct
  misc_feature 1..22: note = chemically synthesized
  source 1..22: mol_type = other DNA
tctactcccatcccccgacaga

SEQ ID NO: 124431 - DNA, 22 bp, synthetic construct
  misc_feature 1..22: note = chemically synthesized
  source 1..22: mol_type = other DNA
ctcccatcccccgacagaaaca

SEQ ID NO: 124432 - DNA, 22 bp, synthetic construct
  misc_feature 1..22: note = chemically synthesized
  source 1..22: mol_type = other DNA
ccatcccccgacagaaacacgg

SEQ ID NO: 124433 - DNA, 22 bp, synthetic construct
  misc_feature 1..22: note = chemically synthesized
  source 1..22: mol_type = other DNA
tcactctctatctgggtgtggt

SEQ ID NO: 124434 - DNA, 22 bp, synthetic construct
  misc_feature 1..22: note = chemically synthesized
  source 1..22: mol_type = other DNA
tctatctgggtgtggttgagat

SEQ ID NO: 124435 - DNA, 22 bp, synthetic construct
  misc_feature 1..22: note = chemically synthesized
  source 1..22: mol_type = other DNA
tatctgggtgtggttgagatct

SEQ ID NO: 124436 - DNA, 22 bp, synthetic construct
  misc_feature 1..22: note = chemically synthesized
  source 1..22: mol_type = other DNA
tctgggtgtggttgagatcttc

SEQ ID NO: 124437 - DNA, 22 bp, synthetic construct
  misc_feature 1..22: note = chemically synthesized
  source 1..22: mol_type = other DNA
ggtgtggttgagatcttcaaaa

SEQ ID NO: 124438 - DNA, 22 bp, synthetic construct
  misc_feature 1..22: note = chemically synthesized
  source 1..22: mol_type = other DNA
agatcttcaaaatctgcagtgc

SEQ ID NO: 124439 - DNA, 22 bp, synthetic construct
  misc_feature 1..22: note = chemically synthesized
  source 1..22: mol_type = other DNA
caaaatctgcagtgctgatagc

SEQ ID NO: 124440 - DNA, 22 bp, synthetic construct
  misc_feature 1..22: note = chemically synthesized
  source 1..22: mol_type = other DNA
aaaatctgcagtgctgatagct

SEQ ID NO: 124441 - DNA, 22 bp, synthetic construct
  misc_feature 1..22: note = chemically synthesized
  source 1..22: mol_type = other DNA
cagtgctgatagctcagcatgg

SEQ ID NO: 124442 - DNA, 22 bp, synthetic construct
  misc_feature 1..22: note = chemically synthesized
  source 1..22: mol_type = other DNA
atagctcagcatggaatgaagt

SEQ ID NO: 124443 - DNA, 22 bp, synthetic construct
  misc_feature 1..22: note = chemically synthesized
  source 1..22: mol_type = other DNA
agcatggaatgaagtgaaccaa

SEQ ID NO: 124444 - DNA, 22 bp, synthetic construct
  misc_feature 1..22: note = chemically synthesized
  source 1..22: mol_type = other DNA
tctctgactttggtttataagg

SEQ ID NO: 124445 - DNA, 22 bp, synthetic construct
  misc_feature 1..22: note = chemically synthesized
  source 1..22: mol_type = other DNA
tctgactttggtttataaggat

SEQ ID NO: 124446 - DNA, 22 bp, synthetic construct
  misc_feature 1..22: note = chemically synthesized
  source 1..22: mol_type = other DNA
tgactttggtttataaggattt

SEQ ID NO: 124447 - DNA, 22 bp, synthetic construct
  misc_feature 1..22: note = chemically synthesized
  source 1..22: mol_type = other DNA
actttggtttataaggatttgc

SEQ ID NO: 124448 - DNA, 22 bp, synthetic construct
  misc_feature 1..22: note = chemically synthesized
  source 1..22: mol_type = other DNA
tggtttataaggatttgcatac

SEQ ID NO: 124449 - DNA, 22 bp, synthetic construct
  misc_feature 1..22: note = chemically synthesized
  source 1..22: mol_type = other DNA
ggtttataaggatttgcataca

SEQ ID NO: 124450 - DNA, 22 bp, synthetic construct
  misc_feature 1..22: note = chemically synthesized
  source 1..22: mol_type = other DNA
gtttataaggatttgcatacat

SEQ ID NO: 124451 - DNA, 22 bp, synthetic construct
  misc_feature 1..22: note = chemically synthesized
  source 1..22: mol_type = other DNA
ataaggatttgcatacattttc

SEQ ID NO: 124452 - DNA, 22 bp, synthetic construct
  misc_feature 1..22: note = chemically synthesized
  source 1..22: mol_type = other DNA
taaggatttgcatacattttct

SEQ ID NO: 124453 - DNA, 22 bp, synthetic construct
  misc_feature 1..22: note = chemically synthesized
  source 1..22: mol_type = other DNA
gcatacattttctgatggatac

SEQ ID NO: 124454 - DNA, 22 bp, synthetic construct
  misc_feature 1..22: note = chemically synthesized
  source 1..22: mol_type = other DNA
catacattttctgatggatact

SEQ ID NO: 124455 - DNA, 22 bp, synthetic construct
  misc_feature 1..22: note = chemically synthesized
  source 1..22: mol_type = other DNA
tctgatggatactaggctcatt

SEQ ID NO: 124456 - DNA, 22 bp, synthetic construct
  misc_feature 1..22: note = chemically synthesized
  source 1..22: mol_type = other DNA
ctgatggatactaggctcattt

SEQ ID NO: 124457 - DNA, 22 bp, synthetic construct
  misc_feature 1..22: note = chemically synthesized
  source 1..22: mol_type = other DNA
tgatggatactaggctcatttc

SEQ ID NO: 124458 - DNA, 22 bp, synthetic construct
  misc_feature 1..22: note = chemically synthesized
  source 1..22: mol_type = other DNA
atggatactaggctcatttctg

SEQ ID NO: 124459 - DNA, 22 bp, synthetic construct
  misc_feature 1..22: note = chemically synthesized
  source 1..22: mol_type = other DNA
ggctcatttctgggaatatgca

SEQ ID NO: 124460 - DNA, 22 bp, synthetic construct
  misc_feature 1..22: note = chemically synthesized
  source 1..22: mol_type = other DNA
atttctgggaatatgcagcaat

SEQ ID NO: 124461 - DNA, 22 bp, synthetic construct
  misc_feature 1..22: note = chemically synthesized
  source 1..22: mol_type = other DNA
ctgggaatatgcagcaatttaa

SEQ ID NO: 124462 - DNA, 22 bp, synthetic construct
  misc_feature 1..22: note = chemically synthesized
  source 1..22: mol_type = other DNA
tgggaatatgcagcaatttaaa

SEQ ID NO: 124463 - DNA, 22 bp, synthetic construct
  misc_feature 1..22: note = chemically synthesized
  source 1..22: mol_type = other DNA
ggaatatgcagcaatttaaagc

SEQ ID NO: 124464 - DNA, 22 bp, synthetic construct
  misc_feature 1..22: note = chemically synthesized
  source 1..22: mol_type = other DNA
aaagcattgtgcctcatgtcaa

SEQ ID NO: 124465 - DNA, 22 bp, synthetic construct
  misc_feature 1..22: note = chemically synthesized
  source 1..22: mol_type = other DNA
aagcattgtgcctcatgtcaaa

SEQ ID NO: 124466 - DNA, 22 bp, synthetic construct
  misc_feature 1..22: note = chemically synthesized
  source 1..22: mol_type = other DNA
tgcctcatgtcaaagtttgctt

SEQ ID NO: 124467 - DNA, 22 bp, synthetic construct
  misc_feature 1..22: note = chemically synthesized
  source 1..22: mol_type = other DNA
atgtcaaagtttgctttactca

SEQ ID NO: 124468 - DNA, 22 bp, synthetic construct
  misc_feature 1..22: note = chemically synthesized
  source 1..22: mol_type = other DNA
gctttactcaatctgacactaa

SEQ ID NO: 124469 - DNA, 22 bp, synthetic construct
  misc_feature 1..22: note = chemically synthesized
  source 1..22: mol_type = other DNA
ctttactcaatctgacactaat

SEQ ID NO: 124470 - DNA, 22 bp, synthetic construct
  misc_feature 1..22: note = chemically synthesized
  source 1..22: mol_type = other DNA
tactcaatctgacactaatcta

SEQ ID NO: 124471 - DNA, 22 bp, synthetic construct
  misc_feature 1..22: note = chemically synthesized
  source 1..22: mol_type = other DNA
actcaatctgacactaatctat

SEQ ID NO: 124472 - DNA, 22 bp, synthetic construct
  misc_feature 1..22: note = chemically synthesized
  source 1..22: mol_type = other DNA
ctcaatctgacactaatctatt

SEQ ID NO: 124473 - DNA, 22 bp, synthetic construct
  misc_feature 1..22: note = chemically synthesized
  source 1..22: mol_type = other DNA
aatctgacactaatctatttgg

SEQ ID NO: 124474 - DNA, 22 bp, synthetic construct
  misc_feature 1..22: note = chemically synthesized
  source 1..22: mol_type = other DNA
acactaatctatttggtaagtt

SEQ ID NO: 124475 - DNA, 22 bp, synthetic construct
  misc_feature 1..22: note = chemically synthesized
  source 1..22: mol_type = other DNA
atctatttggtaagtttttctt

SEQ ID NO: 124476 - DNA, 22 bp, synthetic construct
  misc_feature 1..22: note = chemically synthesized
  source 1..22: mol_type = other DNA
tttggtaagtttttctttctgt

SEQ ID NO: 124477 - DNA, 22 bp, synthetic construct
  misc_feature 1..22: note = chemically synthesized
  source 1..22: mol_type = other DNA
ggtaagtttttctttctgttag

SEQ ID NO: 124478 - DNA, 22 bp, synthetic construct
  misc_feature 1..22: note = chemically synthesized
  source 1..22: mol_type = other DNA
gtaagtttttctttctgttagt

SEQ ID NO: 124479 - DNA, 22 bp, synthetic construct
  misc_feature 1..22: note = chemically synthesized
  source 1..22: mol_type = other DNA
ttctttctgttagtctataccc

SEQ ID NO: 124480 - DNA, 22 bp, synthetic construct
  misc_feature 1..22: note = chemically synthesized
  source 1..22: mol_type = other DNA
tctttctgttagtctataccct

SEQ ID NO: 124481 - DNA, 22 bp, synthetic construct
  misc_feature 1..22: note = chemically synthesized
  source 1..22: mol_type = other DNA
ctttctgttagtctataccctt

SEQ ID NO: 124482 - DNA, 22 bp, synthetic construct
  misc_feature 1..22: note = chemically synthesized
  source 1..22: mol_type = other DNA
tttctgttagtctatacccttg

SEQ ID NO: 124483 - DNA, 22 bp, synthetic construct
  misc_feature 1..22: note = chemically synthesized
  source 1..22: mol_type = other DNA
tctgttagtctatacccttgtc

SEQ ID NO: 124484 - DNA, 22 bp, synthetic construct
  misc_feature 1..22: note = chemically synthesized
  source 1..22: mol_type = other DNA
ctgttagtctatacccttgtca

SEQ ID NO: 124485 - DNA, 22 bp, synthetic construct
  misc_feature 1..22: note = chemically synthesized
  source 1..22: mol_type = other DNA
tgttagtctatacccttgtcat

SEQ ID NO: 124486 - DNA, 22 bp, synthetic construct
  misc_feature 1..22: note = chemically synthesized
  source 1..22: mol_type = other DNA
ttagtctatacccttgtcatta

SEQ ID NO: 124487 - DNA, 22 bp, synthetic construct
  misc_feature 1..22: note = chemically synthesized
  source 1..22: mol_type = other DNA
gtctatacccttgtcattacag

SEQ ID NO: 124488 - DNA, 22 bp, synthetic construct
  misc_feature 1..22: note = chemically synthesized
  source 1..22: mol_type = other DNA
tacccttgtcattacagtgtcc

SEQ ID NO: 124489 - DNA, 22 bp, synthetic construct
  misc_feature 1..22: note = chemically synthesized
  source 1..22: mol_type = other DNA
gtcattacagtgtcccctatcc

SEQ ID NO: 124490 - DNA, 22 bp, synthetic construct
  misc_feature 1..22: note = chemically synthesized
  source 1..22: mol_type = other DNA
tcattacagtgtcccctatcct

SEQ ID NO: 124491 - DNA, 22 bp, synthetic construct
  misc_feature 1..22: note = chemically synthesized
  source 1..22: mol_type = other DNA
cagtgtcccctatcctcactct

SEQ ID NO: 124492 - DNA, 22 bp, synthetic construct
  misc_feature 1..22: note = chemically synthesized
  source 1..22: mol_type = other DNA
tcctcactctaacttcatcttt

SEQ ID NO: 124493 - DNA, 22 bp, synthetic construct
  misc_feature 1..22: note = chemically synthesized
  source 1..22: mol_type = other DNA
actctaacttcatcttttttgg

SEQ ID NO: 124494 - DNA, 22 bp, synthetic construct
  misc_feature 1..22: note = chemically synthesized
  source 1..22: mol_type = other DNA
taacttcatcttttttgggagt

SEQ ID NO: 124495 - DNA, 22 bp, synthetic construct
  misc_feature 1..22: note = chemically synthesized
  source 1..22: mol_type = other DNA
acttcatcttttttgggagtaa

SEQ ID NO: 124496 - DNA, 22 bp, synthetic construct
  misc_feature 1..22: note = chemically synthesized
  source 1..22: mol_type = other DNA
catcttttttgggagtaagtac

SEQ ID NO: 124497 - DNA, 22 bp, synthetic construct
  misc_feature 1..22: note = chemically synthesized
  source 1..22: mol_type = other DNA
atcttttttgggagtaagtact

SEQ ID NO: 124498 - DNA, 22 bp, synthetic construct
  misc_feature 1..22: note = chemically synthesized
  source 1..22: mol_type = other DNA
ttttgggagtaagtacttggta

SEQ ID NO: 124499 - DNA, 22 bp, synthetic construct
  misc_feature 1..22: note = chemically synthesized
  source 1..22: mol_type = other DNA
tttgggagtaagtacttggtag

SEQ ID NO: 124500 - DNA, 22 bp, synthetic construct
  misc_feature 1..22: note = chemically synthesized
  source 1..22: mol_type = other DNA
ttgggagtaagtacttggtaga

SEQ ID NO: 124501 - DNA, 22 bp, synthetic construct
  misc_feature 1..22: note = chemically synthesized
  source 1..22: mol_type = other DNA
tgggagtaagtacttggtagaa

SEQ ID NO: 124502 - DNA, 22 bp, synthetic construct
  misc_feature 1..22: note = chemically synthesized
  source 1..22: mol_type = other DNA
gggagtaagtacttggtagaac

SEQ ID NO: 124503 - DNA, 22 bp, synthetic construct
  misc_feature 1..22: note = chemically synthesized
  source 1..22: mol_type = other DNA
ggagtaagtacttggtagaaca

SEQ ID NO: 124504 - DNA, 22 bp, synthetic construct
  misc_feature 1..22: note = chemically synthesized
  source 1..22: mol_type = other DNA
ggtagaacacatagaggcaaag

SEQ ID NO: 124505 - DNA, 22 bp, synthetic construct
  misc_feature 1..22: note = chemically synthesized
  source 1..22: mol_type = other DNA
gtagaacacatagaggcaaaga

SEQ ID NO: 124506 - DNA, 22 bp, synthetic construct
  misc_feature 1..22: note = chemically synthesized
  source 1..22: mol_type = other DNA
gtttatgcagcccgaagagagc

SEQ ID NO: 124507 - DNA, 22 bp, synthetic construct
  misc_feature 1..22: note = chemically synthesized
  source 1..22: mol_type = other DNA
atgcagcccgaagagagcaaca

SEQ ID NO: 124508 - DNA, 22 bp, synthetic construct
  misc_feature 1..22: note = chemically synthesized
  source 1..22: mol_type = other DNA
tgcagcccgaagagagcaacaa

SEQ ID NO: 124509 - DNA, 22 bp, synthetic construct
  misc_feature 1..22: note = chemically synthesized
  source 1..22: mol_type = other DNA
gaactacaccagagatatcatt

SEQ ID NO: 124510 - DNA, 22 bp, synthetic construct
  misc_feature 1..22: note = chemically synthesized
  source 1..22: mol_type = other DNA
caccagagatatcattctgtat

SEQ ID NO: 124511 - DNA, 22 bp, synthetic construct
  misc_feature 1..22: note = chemically synthesized
  source 1..22: mol_type = other DNA
tgtattcccgtggattttcaac

SEQ ID NO: 124512 - DNA, 22 bp, synthetic construct
  misc_feature 1..22: note = chemically synthesized
  source 1..22: mol_type = other DNA
tattcccgtggattttcaactt

SEQ ID NO: 124513 - DNA, 22 bp, synthetic construct
  misc_feature 1..22: note = chemically synthesized
  source 1..22: mol_type = other DNA
ccgtggattttcaacttgattt

SEQ ID NO: 124514 - DNA, 22 bp, synthetic construct
  misc_feature 1..22: note = chemically synthesized
  source 1..22: mol_type = other DNA
tcaacttgattttttcctaact

SEQ ID NO: 124515 - DNA, 22 bp, synthetic construct
  misc_feature 1..22: note = chemically synthesized
  source 1..22: mol_type = other DNA
caacttgattttttcctaacta

SEQ ID NO: 124516 - DNA, 22 bp, synthetic construct
  misc_feature 1..22: note = chemically synthesized
  source 1..22: mol_type = other DNA
aacttgattttttcctaactag

SEQ ID NO: 124517 - DNA, 22 bp, synthetic construct
  misc_feature 1..22: note = chemically synthesized
  source 1..22: mol_type = other DNA
gattttttcctaactagatcac

SEQ ID NO: 124518 - DNA, 22 bp, synthetic construct
  misc_feature 1..22: note = chemically synthesized
  source 1..22: mol_type = other DNA
attttttcctaactagatcact

SEQ ID NO: 124519 - DNA, 22 bp, synthetic construct
  misc_feature 1..22: note = chemically synthesized
  source 1..22: mol_type = other DNA
tttcctaactagatcactctgc

SEQ ID NO: 124520 - DNA, 22 bp, synthetic construct
  misc_feature 1..22: note = chemically synthesized
  source 1..22: mol_type = other DNA
ttcctaactagatcactctgct

SEQ ID NO: 124521 - DNA, 22 bp, synthetic construct
  misc_feature 1..22: note = chemically synthesized
  source 1..22: mol_type = other DNA
tcctaactagatcactctgcta

SEQ ID NO: 124522 - DNA, 22 bp, synthetic construct
  misc_feature 1..22: note = chemically synthesized
  source 1..22: mol_type = other DNA
cctaactagatcactctgctag

SEQ ID NO: 124523 - DNA, 22 bp, synthetic construct
  misc_feature 1..22: note = chemically synthesized
  source 1..22: mol_type = other DNA
ctaactagatcactctgctagg

SEQ ID NO: 124524 - DNA, 22 bp, synthetic construct
  misc_feature 1..22: note = chemically synthesized
  source 1..22: mol_type = other DNA
actagatcactctgctagggaa

SEQ ID NO: 124525 - DNA, 22 bp, synthetic construct
  misc_feature 1..22: note = chemically synthesized
  source 1..22: mol_type = other DNA
gatcactctgctagggaatgaa

SEQ ID NO: 124526 - DNA, 22 bp, synthetic construct
  misc_feature 1..22: note = chemically synthesized
  source 1..22: mol_type = other DNA
tgctagggaatgaaaaaggaga

SEQ ID NO: 124527 - DNA, 22 bp, synthetic construct
  misc_feature 1..22: note = chemically synthesized
  source 1..22: mol_type = other DNA
ctagggaatgaaaaaggagatc

SEQ ID NO: 124528 - DNA, 22 bp, synthetic construct
  misc_feature 1..22: note = chemically synthesized
  source 1..22: mol_type = other DNA
gggaatgaaaaaggagatctag

SEQ ID NO: 124529 - DNA, 22 bp, synthetic construct
  misc_feature 1..22: note = chemically synthesized
  source 1..22: mol_type = other DNA
ggattttccctcttctaggaat

SEQ ID NO: 124530 - DNA, 22 bp, synthetic construct
  misc_feature 1..22: note = chemically synthesized
  source 1..22: mol_type = other DNA
tccctcttctaggaatttgcaa

SEQ ID NO: 124531 - DNA, 22 bp, synthetic construct
  misc_feature 1..22: note = chemically synthesized
  source 1..22: mol_type = other DNA
ccctcttctaggaatttgcaaa

SEQ ID NO: 124532 - DNA, 22 bp, synthetic construct
  misc_feature 1..22: note = chemically synthesized
  source 1..22: mol_type = other DNA
cctcttctaggaatttgcaaaa

SEQ ID NO: 124533 - DNA, 22 bp, synthetic construct
  misc_feature 1..22: note = chemically synthesized
  source 1..22: mol_type = other DNA
ttctaggaatttgcaaaagaga

SEQ ID NO: 124534 - DNA, 22 bp, synthetic construct
  misc_feature 1..22: note = chemically synthesized
  source 1..22: mol_type = other DNA
ctaggaatttgcaaaagagatt

SEQ ID NO: 124535 - DNA, 22 bp, synthetic construct
  misc_feature 1..22: note = chemically synthesized
  source 1..22: mol_type = other DNA
taggaatttgcaaaagagatta

SEQ ID NO: 124536 - DNA, 22 bp, synthetic construct
  misc_feature 1..22: note = chemically synthesized
  source 1..22: mol_type = other DNA
ggaatttgcaaaagagattatt

SEQ ID NO: 124537 - DNA, 22 bp, synthetic construct
  misc_feature 1..22: note = chemically synthesized
  source 1..22: mol_type = other DNA
gcaaaagagattattcagaagc

SEQ ID NO: 124538 - DNA, 22 bp, synthetic construct
  misc_feature 1..22: note = chemically synthesized
  source 1..22: mol_type = other DNA
caaaagagattattcagaagcc

SEQ ID NO: 124539 - DNA, 22 bp, synthetic construct
  misc_feature 1..22: note = chemically synthesized
  source 1..22: mol_type = other DNA
ttcagaagccaagttctaaaga

SEQ ID NO: 124540 - DNA, 22 bp, synthetic construct
  misc_feature 1..22: note = chemically synthesized
  source 1..22: mol_type = other DNA
agaagccaagttctaaagattt

SEQ ID NO: 124541 - DNA, 22 bp, synthetic construct
  misc_feature 1..22: note = chemically synthesized
  source 1..22: mol_type = other DNA
taaagattttagggagtctttg

SEQ ID NO: 124542 - DNA, 22 bp, synthetic construct
  misc_feature 1..22: note = chemically synthesized
  source 1..22: mol_type = other DNA
aagattttagggagtctttggg

SEQ ID NO: 124543 - DNA, 22 bp, synthetic construct
  misc_feature 1..22: note = chemically synthesized
  source 1..22: mol_type = other DNA
tagggagtctttgggatgatag

SEQ ID NO: 124544 - DNA, 22 bp, synthetic construct
  misc_feature 1..22: note = chemically synthesized
  source 1..22: mol_type = other DNA
agggagtctttgggatgataga

SEQ ID NO: 124545 - DNA, 22 bp, synthetic construct
  misc_feature 1..22: note = chemically synthesized
  source 1..22: mol_type = other DNA
gggagtctttgggatgatagat

SEQ ID NO: 124546 - DNA, 22 bp, synthetic construct
  misc_feature 1..22: note = chemically synthesized
  source 1..22: mol_type = other DNA
tgggatgatagattcttatacc

SEQ ID NO: 124547 - DNA, 22 bp, synthetic construct
  misc_feature 1..22: note = chemically synthesized
  source 1..22: mol_type = other DNA
gggatgatagattcttataccc

SEQ ID NO: 124548 - DNA, 22 bp, synthetic construct
  misc_feature 1..22: note = chemically synthesized
  source 1..22: mol_type = other DNA
ggatgatagattcttatacccc

SEQ ID NO: 124549 - DNA, 22 bp, synthetic construct
  misc_feature 1..22: note = chemically synthesized
  source 1..22: mol_type = other DNA
ttataccccatcacatcttgac

SEQ ID NO: 124550 - DNA, 22 bp, synthetic construct
  misc_feature 1..22: note = chemically synthesized
  source 1..22: mol_type = other DNA
ataccccatcacatcttgactg

SEQ ID NO: 124551 - DNA, 22 bp, synthetic construct
  misc_feature 1..22: note = chemically synthesized
  source 1..22: mol_type = other DNA
taccccatcacatcttgactga

SEQ ID NO: 124552 - DNA, 22 bp, synthetic construct
  misc_feature 1..22: note = chemically synthesized
  source 1..22: mol_type = other DNA
gactgatacattactgcatttc

SEQ ID NO: 124553 - DNA, 22 bp, synthetic construct
  misc_feature 1..22: note = chemically synthesized
  source 1..22: mol_type = other DNA
actgatacattactgcatttcc

SEQ ID NO: 124554 - DNA, 22 bp, synthetic construct
  misc_feature 1..22: note = chemically synthesized
  source 1..22: mol_type = other DNA
atacattactgcatttccctct

SEQ ID NO: 124555 - DNA, 22 bp, synthetic construct
  misc_feature 1..22: note = chemically synthesized
  source 1..22: mol_type = other DNA
ctgcatttccctctctgcaatc

SEQ ID NO: 124556 - DNA, 22 bp, synthetic construct
  misc_feature 1..22: note = chemically synthesized
  source 1..22: mol_type = other DNA
catttccctctctgcaatctct

SEQ ID NO: 124557 - DNA, 22 bp, synthetic construct
  misc_feature 1..22: note = chemically synthesized
  source 1..22: mol_type = other DNA
ccctctctgcaatctctgataa

SEQ ID NO: 124558 - DNA, 22 bp, synthetic construct
  misc_feature 1..22: note = chemically synthesized
  source 1..22: mol_type = other DNA
cctctctgcaatctctgataag

SEQ ID NO: 124559 - DNA, 22 bp, synthetic construct
  misc_feature 1..22: note = chemically synthesized
  source 1..22: mol_type = other DNA
tctgcaatctctgataagccaa

SEQ ID NO: 124560 - DNA, 22 bp, synthetic construct
  misc_feature 1..22: note = chemically synthesized
  source 1..22: mol_type = other DNA
tgcaatctctgataagccaacc

SEQ ID NO: 124561 - DNA, 22 bp, synthetic construct
  misc_feature 1..22: note = chemically synthesized
  source 1..22: mol_type = other DNA
caatctctgataagccaaccgt

SEQ ID NO: 124562 - DNA, 22 bp, synthetic construct
  misc_feature 1..22: note = chemically synthesized
  source 1..22: mol_type = other DNA
tgataagccaaccgtctactgc

SEQ ID NO: 124563 - DNA, 22 bp, synthetic construct
  misc_feature 1..22: note = chemically synthesized
  source 1..22: mol_type = other DNA
ataagccaaccgtctactgctc

SEQ ID NO: 124564 - DNA, 22 bp, synthetic construct
  misc_feature 1..22: note = chemically synthesized
  source 1..22: mol_type = other DNA
ctgctcattcctatgcggagcc

SEQ ID NO: 124565 - DNA, 22 bp, synthetic construct
  misc_feature 1..22: note = chemically synthesized
  source 1..22: mol_type = other DNA
ctcattcctatgcggagcctct

SEQ ID NO: 124566 - DNA, 22 bp, synthetic construct
  misc_feature 1..22: note = chemically synthesized
  source 1..22: mol_type = other DNA
attcctatgcggagcctctagg

SEQ ID NO: 124567 - DNA, 22 bp, synthetic construct
  misc_feature 1..22: note = chemically synthesized
  source 1..22: mol_type = other DNA
ctatgcggagcctctaggccaa

SEQ ID NO: 124568 - DNA, 22 bp, synthetic construct
  misc_feature 1..22: note = chemically synthesized
  source 1..22: mol_type = other DNA
tgcggagcctctaggccaagac

SEQ ID NO: 124569 - DNA, 22 bp, synthetic construct
  misc_feature 1..22: note = chemically synthesized
  source 1..22: mol_type = other DNA
taggccaagacacactggagtt

SEQ ID NO: 124570 - DNA, 22 bp, synthetic construct
  misc_feature 1..22: note = chemically synthesized
  source 1..22: mol_type = other DNA
ggccaagacacactggagttct

SEQ ID NO: 124571 - DNA, 22 bp, synthetic construct
  misc_feature 1..22: note = chemically synthesized
  source 1..22: mol_type = other DNA
gagttctttaccgacctgttca

SEQ ID NO: 124572 - DNA, 22 bp, synthetic construct
  misc_feature 1..22: note = chemically synthesized
  source 1..22: mol_type = other DNA
tttaccgacctgttcataagtc

SEQ ID NO: 124573 - DNA, 22 bp, synthetic construct
  misc_feature 1..22: note = chemically synthesized
  source 1..22: mol_type = other DNA
taccgacctgttcataagtctg

SEQ ID NO: 124574 - DNA, 22 bp, synthetic construct
  misc_feature 1..22: note = chemically synthesized
  source 1..22: mol_type = other DNA
accgacctgttcataagtctgt

SEQ ID NO: 124575 - DNA, 22 bp, synthetic construct
  misc_feature 1..22: note = chemically synthesized
  source 1..22: mol_type = other DNA
ccgacctgttcataagtctgtt

SEQ ID NO: 124576 - DNA, 22 bp, synthetic construct
  misc_feature 1..22: note = chemically synthesized
  source 1..22: mol_type = other DNA
ttcataagtctgttcattgttg

SEQ ID NO: 124577 - DNA, 22 bp, synthetic construct
  misc_feature 1..22: note = chemically synthesized
  source 1..22: mol_type = other DNA
ataagtctgttcattgttgcca

SEQ ID NO: 124578 - DNA, 22 bp, synthetic construct
  misc_feature 1..22: note = chemically synthesized
  source 1..22: mol_type = other DNA
ttcattgttgccacagatgtga

SEQ ID NO: 124579 - DNA, 22 bp, synthetic construct
  misc_feature 1..22: note = chemically synthesized
  source 1..22: mol_type = other DNA
attgttgccacagatgtgacta

SEQ ID NO: 124580 - DNA, 22 bp, synthetic construct
  misc_feature 1..22: note = chemically synthesized
  source 1..22: mol_type = other DNA
ttgccacagatgtgactatgaa

SEQ ID NO: 124581 - DNA, 22 bp, synthetic construct
  misc_feature 1..22: note = chemically synthesized
  source 1..22: mol_type = other DNA
ccacagatgtgactatgaaccc

SEQ ID NO: 124582 - DNA, 22 bp, synthetic construct
  misc_feature 1..22: note = chemically synthesized
  source 1..22: mol_type = other DNA
tgaacccctaagcctggtcaag

SEQ ID NO: 124583 - DNA, 22 bp, synthetic construct
  misc_feature 1..22: note = chemically synthesized
  source 1..22: mol_type = other DNA
agcctggtcaagatattggatc

SEQ ID NO: 124584 - DNA, 22 bp, synthetic construct
  misc_feature 1..22: note = chemically synthesized
  source 1..22: mol_type = other DNA
gtcaagatattggatccaacac

SEQ ID NO: 124585 - DNA, 22 bp, synthetic construct
  misc_feature 1..22: note = chemically synthesized
  source 1..22: mol_type = other DNA
gatccaacaccaactttttaga

SEQ ID NO: 124586 - DNA, 22 bp, synthetic construct
  misc_feature 1..22: note = chemically synthesized
  source 1..22: mol_type = other DNA
tttagactatactcagaagcca

SEQ ID NO: 124587 - DNA, 22 bp, synthetic construct
  misc_feature 1..22: note = chemically synthesized
  source 1..22: mol_type = other DNA
ttagactatactcagaagccaa

SEQ ID NO: 124588 - DNA, 22 bp, synthetic construct
  misc_feature 1..22: note = chemically synthesized
  source 1..22: mol_type = other DNA
tagactatactcagaagccaag

SEQ ID NO: 124589 - DNA, 22 bp, synthetic construct
  misc_feature 1..22: note = chemically synthesized
  source 1..22: mol_type = other DNA
agactatactcagaagccaagc

SEQ ID NO: 124590 - DNA, 22 bp, synthetic construct
  misc_feature 1..22: note = chemically synthesized
  source 1..22: mol_type = other DNA
gactatactcagaagccaagct

SEQ ID NO: 124591 - DNA, 22 bp, synthetic construct
  misc_feature 1..22: note = chemically synthesized
  source 1..22: mol_type = other DNA
tactcagaagccaagctgcaaa

SEQ ID NO: 124592 - DNA, 22 bp, synthetic construct
  misc_feature 1..22: note = chemically synthesized
  source 1..22: mol_type = other DNA
agaagccaagctgcaaagaaaa

SEQ ID NO: 124593 - DNA, 22 bp, synthetic construct
  misc_feature 1..22: note = chemically synthesized
  source 1..22: mol_type = other DNA
caaagaaaattagtttcagaaa

SEQ ID NO: 124594 - DNA, 22 bp, synthetic construct
  misc_feature 1..22: note = chemically synthesized
  source 1..22: mol_type = other DNA
gtttcagaaactcctccctacg

SEQ ID NO: 124595 - DNA, 22 bp, synthetic construct
  misc_feature 1..22: note = chemically synthesized
  source 1..22: mol_type = other DNA
cagaaactcctccctacggccc

SEQ ID NO: 124596 - DNA, 22 bp, synthetic construct
  misc_feature 1..22: note = chemically synthesized
  source 1..22: mol_type = other DNA
agaaactcctccctacggccca

SEQ ID NO: 124597 - DNA, 22 bp, synthetic construct
  misc_feature 1..22: note = chemically synthesized
  source 1..22: mol_type = other DNA
ctccctacggcccactcctctc

SEQ ID NO: 124598 - DNA, 22 bp, synthetic construct
  misc_feature 1..22: note = chemically synthesized
  source 1..22: mol_type = other DNA
cctacggcccactcctctctcc

SEQ ID NO: 124599 - DNA, 22 bp, synthetic construct
  misc_feature 1..22: note = chemically synthesized
  source 1..22: mol_type = other DNA
cggcccactcctctctcctccc

SEQ ID NO: 124600 - DNA, 22 bp, synthetic construct
  misc_feature 1..22: note = chemically synthesized
  source 1..22: mol_type = other DNA
ctctctcctccctccttcttta

SEQ ID NO: 124601 - DNA, 22 bp, synthetic construct
  misc_feature 1..22: note = chemically synthesized
  source 1..22: mol_type = other DNA
tctcctccctccttctttattc

SEQ ID NO: 124602 - DNA, 22 bp, synthetic construct
  misc_feature 1..22: note = chemically synthesized
  source 1..22: mol_type = other DNA
tcctccctccttctttattctc

SEQ ID NO: 124603 - DNA, 22 bp, synthetic construct
  misc_feature 1..22: note = chemically synthesized
  source 1..22: mol_type = other DNA
ctccctccttctttattctccc

SEQ ID NO: 124604 - DNA, 22 bp, synthetic construct
  misc_feature 1..22: note = chemically synthesized
  source 1..22: mol_type = other DNA
cctccttctttattctcccagc

SEQ ID NO: 124605 - DNA, 22 bp, synthetic construct
  misc_feature 1..22: note = chemically synthesized
  source 1..22: mol_type = other DNA
cttctttattctcccagcctga

SEQ ID NO: 124606 - DNA, 22 bp, synthetic construct
  misc_feature 1..22: note = chemically synthesized
  source 1..22: mol_type = other DNA
ctttattctcccagcctgaggg

SEQ ID NO: 124607 - DNA, 22 bp, synthetic construct
  misc_feature 1..22: note = chemically synthesized
  source 1..22: mol_type = other DNA
tttattctcccagcctgaggga

SEQ ID NO: 124608 - DNA, 22 bp, synthetic construct
  misc_feature 1..22: note = chemically synthesized
  source 1..22: mol_type = other DNA
tattctcccagcctgagggatt

SEQ ID NO: 124609 - DNA, 22 bp, synthetic construct
  misc_feature 1..22: note = chemically synthesized
  source 1..22: mol_type = other DNA
attctcccagcctgagggattt

SEQ ID NO: 124610 - DNA, 22 bp, synthetic construct
  misc_feature 1..22: note = chemically synthesized
  source 1..22: mol_type = other DNA
ttctcccagcctgagggattta

SEQ ID NO: 124611 - DNA, 22 bp, synthetic construct
  misc_feature 1..22: note = chemically synthesized
  source 1..22: mol_type = other DNA
tcccagcctgagggatttagaa

SEQ ID NO: 124612 - DNA, 22 bp, synthetic construct
  misc_feature 1..22: note = chemically synthesized
  source 1..22: mol_type = other DNA
ccagcctgagggatttagaact

SEQ ID NO: 124613 - DNA, 22 bp, synthetic construct
  misc_feature 1..22: note = chemically synthesized
  source 1..22: mol_type = other DNA
agggatttagaactttggaaca

SEQ ID NO: 124614 - DNA, 22 bp, synthetic construct
  misc_feature 1..22: note = chemically synthesized
  source 1..22: mol_type = other DNA
agaactttggaacaggagtcgc

SEQ ID NO: 124615 - DNA, 22 bp, synthetic construct
  misc_feature 1..22: note = chemically synthesized
  source 1..22: mol_type = other DNA
gaactttggaacaggagtcgct

SEQ ID NO: 124616 - DNA, 22 bp, synthetic construct
  misc_feature 1..22: note = chemically synthesized
  source 1..22: mol_type = other DNA
tggaacaggagtcgctaaggtt

SEQ ID NO: 124617 - DNA, 22 bp, synthetic construct
  misc_feature 1..22: note = chemically synthesized
  source 1..22: mol_type = other DNA
ggaacaggagtcgctaaggttt

SEQ ID NO: 124618 - DNA, 22 bp, synthetic construct
  misc_feature 1..22: note = chemically synthesized
  source 1..22: mol_type = other DNA
gaacaggagtcgctaaggtttc

SEQ ID NO: 124619 - DNA, 22 bp, synthetic construct
  misc_feature 1..22: note = chemically synthesized
  source 1..22: mol_type = other DNA
aggtttcttcctgcatctaggt

SEQ ID NO: 124620 - DNA, 22 bp, synthetic construct
  misc_feature 1..22: note = chemically synthesized
  source 1..22: mol_type = other DNA
cttcctgcatctaggttaggga

SEQ ID NO: 124621 - DNA, 22 bp, synthetic construct
  misc_feature 1..22: note = chemically synthesized
  source 1..22: mol_type = other DNA
ttcctgcatctaggttagggaa

SEQ ID NO: 124622 - DNA, 22 bp, synthetic construct
  misc_feature 1..22: note = chemically synthesized
  source 1..22: mol_type = other DNA
cctgcatctaggttagggaatt

SEQ ID NO: 124623 - DNA, 22 bp, synthetic construct
  misc_feature 1..22: note = chemically synthesized
  source 1..22: mol_type = other DNA
ctgcatctaggttagggaatta

SEQ ID NO: 124624 - DNA, 22 bp, synthetic construct
  misc_feature 1..22: note = chemically synthesized
  source 1..22: mol_type = other DNA
catctaggttagggaattagcc

SEQ ID NO: 124625 - DNA, 22 bp, synthetic construct
  misc_feature 1..22: note = chemically synthesized
  source 1..22: mol_type = other DNA
ggttagggaattagccacatct

SEQ ID NO: 124626 - DNA, 22 bp, synthetic construct
  misc_feature 1..22: note = chemically synthesized
  source 1..22: mol_type = other DNA
gggaattagccacatctccaga

SEQ ID NO: 124627 - DNA, 22 bp, synthetic construct
  misc_feature 1..22: note = chemically synthesized
  source 1..22: mol_type = other DNA
gccacatctccagaaataagat

SEQ ID NO: 124628 - DNA, 22 bp, synthetic construct
  misc_feature 1..22: note = chemically synthesized
  source 1..22: mol_type = other DNA
cagaaataagatttattttaag

SEQ ID NO: 124629 - DNA, 22 bp, synthetic construct
  misc_feature 1..22: note = chemically synthesized
  source 1..22: mol_type = other DNA
attttaagcatcacataggggt

SEQ ID NO: 124630 - DNA, 22 bp, synthetic construct
  misc_feature 1..22: note = chemically synthesized
  source 1..22: mol_type = other DNA
ttttaagcatcacataggggta

SEQ ID NO: 124631 - DNA, 22 bp, synthetic construct
  misc_feature 1..22: note = chemically synthesized
  source 1..22: mol_type = other DNA
taagcatcacataggggtagaa

SEQ ID NO: 124632 - DNA, 22 bp, synthetic construct
  misc_feature 1..22: note = chemically synthesized
  source 1..22: mol_type = other DNA
aagcatcacataggggtagaaa

SEQ ID NO: 124633 - DNA, 22 bp, synthetic construct
  misc_feature 1..22: note = chemically synthesized
  source 1..22: mol_type = other DNA
agcatcacataggggtagaaaa

SEQ ID NO: 124634 - DNA, 22 bp, synthetic construct
  misc_feature 1..22: note = chemically synthesized
  source 1..22: mol_type = other DNA
tttgcagcagatttctttcttt

SEQ ID NO: 124635 - DNA, 22 bp, synthetic construct
  misc_feature 1..22: note = chemically synthesized
  source 1..22: mol_type = other DNA
ttgcagcagatttctttctttc

SEQ ID NO: 124636 - DNA, 22 bp, synthetic construct
  misc_feature 1..22: note = chemically synthesized
  source 1..22: mol_type = other DNA
tgcagcagatttctttctttct

SEQ ID NO: 124637 - DNA, 22 bp, synthetic construct
  misc_feature 1..22: note = chemically synthesized
  source 1..22: mol_type = other DNA
gcagcagatttctttctttctt

SEQ ID NO: 124638 - DNA, 22 bp, synthetic construct
  misc_feature 1..22: note = chemically synthesized
  source 1..22: mol_type = other DNA
cagcagatttctttctttcttt

SEQ ID NO: 124639 - DNA, 22 bp, synthetic construct
  misc_feature 1..22: note = chemically synthesized
  source 1..22: mol_type = other DNA
ctttctttctttcttttattat

SEQ ID NO: 124640 - DNA, 22 bp, synthetic construct
  misc_feature 1..22: note = chemically synthesized
  source 1..22: mol_type = other DNA
tttctttctttcttttattatt

SEQ ID NO: 124641 - DNA, 22 bp, synthetic construct
  misc_feature 1..22: note = chemically synthesized
  source 1..22: mol_type = other DNA
tctttctttcttttattattat

SEQ ID NO: 124642 - DNA, 22 bp, synthetic construct
  misc_feature 1..22: note = chemically synthesized
  source 1..22: mol_type = other DNA
ctttctttcttttattattata

SEQ ID NO: 124643 - DNA, 22 bp, synthetic construct
  misc_feature 1..22: note = chemically synthesized
  source 1..22: mol_type = other DNA
tttctttcttttattattatac

SEQ ID NO: 124644 - DNA, 22 bp, synthetic construct
  misc_feature 1..22: note = chemically synthesized
  source 1..22: mol_type = other DNA
tctttcttttattattatactt

SEQ ID NO: 124645 - DNA, 22 bp, synthetic construct
  misc_feature 1..22: note = chemically synthesized
  source 1..22: mol_type = other DNA
ctttcttttattattatacttt

SEQ ID NO: 124646 - DNA, 22 bp, synthetic construct
  misc_feature 1..22: note = chemically synthesized
  source 1..22: mol_type = other DNA
tttcttttattattatacttta

SEQ ID NO: 124647 - DNA, 22 bp, synthetic construct
  misc_feature 1..22: note = chemically synthesized
  source 1..22: mol_type = other DNA
tcttttattattatactttaag

SEQ ID NO: 124648 - DNA, 22 bp, synthetic construct
  misc_feature 1..22: note = chemically synthesized
  source 1..22: mol_type = other DNA
cttttattattatactttaagt

SEQ ID NO: 124649 - DNA, 22 bp, synthetic construct
  misc_feature 1..22: note = chemically synthesized
  source 1..22: mol_type = other DNA
ttttattattatactttaagtt

SEQ ID NO: 124650 - DNA, 22 bp, synthetic construct
  misc_feature 1..22: note = chemically synthesized
  source 1..22: mol_type = other DNA
ttattattatactttaagtttt

SEQ ID NO: 124651 - DNA, 22 bp, synthetic construct
  misc_feature 1..22: note = chemically synthesized
  source 1..22: mol_type = other DNA
tattattatactttaagtttta

SEQ ID NO: 124652 - DNA, 22 bp, synthetic construct
  misc_feature 1..22: note = chemically synthesized
  source 1..22: mol_type = other DNA
attattatactttaagttttag

SEQ ID NO: 124653 - DNA, 22 bp, synthetic construct
  misc_feature 1..22: note = chemically synthesized
  source 1..22: mol_type = other DNA
ttattatactttaagttttagg

SEQ ID NO: 124654 - DNA, 22 bp, synthetic construct
  misc_feature 1..22: note = chemically synthesized
  source 1..22: mol_type = other DNA
ttatactttaagttttagggta

SEQ ID NO: 124655 - DNA, 22 bp, synthetic construct
  misc_feature 1..22: note = chemically synthesized
  source 1..22: mol_type = other DNA
tactttaagttttagggtacat

SEQ ID NO: 124656 - DNA, 22 bp, synthetic construct
  misc_feature 1..22: note = chemically synthesized
  source 1..22: mol_type = other DNA
taagttttagggtacatttgca

SEQ ID NO: 124657 - DNA, 22 bp, synthetic construct
  misc_feature 1..22: note = chemically synthesized
  source 1..22: mol_type = other DNA
aagttttagggtacatttgcac

SEQ ID NO: 124658 - DNA, 22 bp, synthetic construct
  misc_feature 1..22: note = chemically synthesized
  source 1..22: mol_type = other DNA
agttttagggtacatttgcaca

SEQ ID NO: 124659 - DNA, 22 bp, synthetic construct
  misc_feature 1..22: note = chemically synthesized
  source 1..22: mol_type = other DNA
tagggtacatttgcacaacgtg

SEQ ID NO: 124660 - DNA, 22 bp, synthetic construct
  misc_feature 1..22: note = chemically synthesized
  source 1..22: mol_type = other DNA
agggtacatttgcacaacgtgc

SEQ ID NO: 124661 - DNA, 22 bp, synthetic construct
  misc_feature 1..22: note = chemically synthesized
  source 1..22: mol_type = other DNA
gggtacatttgcacaacgtgca

SEQ ID NO: 124662 - DNA, 22 bp, synthetic construct
  misc_feature 1..22: note = chemically synthesized
  source 1..22: mol_type = other DNA
gcacaacgtgcaggtttgttac

SEQ ID NO: 124663 - DNA, 22 bp, synthetic construct
  misc_feature 1..22: note = chemically synthesized
  source 1..22: mol_type = other DNA
cacaacgtgcaggtttgttaca

SEQ ID NO: 124664 - DNA, 22 bp, synthetic construct
  misc_feature 1..22: note = chemically synthesized
  source 1..22: mol_type = other DNA
gttacatatgtatacatgtgcc

SEQ ID NO: 124665 - DNA, 22 bp, synthetic construct
  misc_feature 1..22: note = chemically synthesized
  source 1..22: mol_type = other DNA
ttacatatgtatacatgtgcca

SEQ ID NO: 124666 - DNA, 22 bp, synthetic construct
  misc_feature 1..22: note = chemically synthesized
  source 1..22: mol_type = other DNA
catatgtatacatgtgccatgt

SEQ ID NO: 124667 - DNA, 22 bp, synthetic construct
  misc_feature 1..22: note = chemically synthesized
  source 1..22: mol_type = other DNA
gtgtgctgcacccattaactcg

SEQ ID NO: 124668 - DNA, 22 bp, synthetic construct
  misc_feature 1..22: note = chemically synthesized
  source 1..22: mol_type = other DNA
cacccattaactcgtcacttag

SEQ ID NO: 124669 - DNA, 22 bp, synthetic construct
  misc_feature 1..22: note = chemically synthesized
  source 1..22: mol_type = other DNA
actcgtcacttagcattaggta

SEQ ID NO: 124670 - DNA, 22 bp, synthetic construct
  misc_feature 1..22: note = chemically synthesized
  source 1..22: mol_type = other DNA
gtcacttagcattaggtatatc

SEQ ID NO: 124671 - DNA, 22 bp, synthetic construct
  misc_feature 1..22: note = chemically synthesized
  source 1..22: mol_type = other DNA
agcattaggtatatctcctaat

SEQ ID NO: 124672 - DNA, 22 bp, synthetic construct
  misc_feature 1..22: note = chemically synthesized
  source 1..22: mol_type = other DNA
gcattaggtatatctcctaatg

SEQ ID NO: 124673 - DNA, 22 bp, synthetic construct
  misc_feature 1..22: note = chemically synthesized
  source 1..22: mol_type = other DNA
ggtatatctcctaatgctatcc

SEQ ID NO: 124674 - DNA, 22 bp, synthetic construct
  misc_feature 1..22: note = chemically synthesized
  source 1..22: mol_type = other DNA
ctaatgctatccctccccccga

SEQ ID NO: 124675 - DNA, 22 bp, synthetic construct
  misc_feature 1..22: note = chemically synthesized
  source 1..22: mol_type = other DNA
atgctatccctccccccgaccc

SEQ ID NO: 124676 - DNA, 22 bp, synthetic construct
  misc_feature 1..22: note = chemically synthesized
  source 1..22: mol_type = other DNA
tccctccccccgacccccaccc

SEQ ID NO: 124677 - DNA, 22 bp, synthetic construct
  misc_feature 1..22: note = chemically synthesized
  source 1..22: mol_type = other DNA
cccccgacccccaccccactgc

SEQ ID NO: 124678 - DNA, 22 bp, synthetic construct
  misc_feature 1..22: note = chemically synthesized
  source 1..22: mol_type = other DNA
caggccctggtgtgtgatgttc

SEQ ID NO: 124679 - DNA, 22 bp, synthetic construct
  misc_feature 1..22: note = chemically synthesized
  source 1..22: mol_type = other DNA
gtgtgtgatgttccccttcctg

SEQ ID NO: 124680 - DNA, 22 bp, synthetic construct
  misc_feature 1..22: note = chemically synthesized
  source 1..22: mol_type = other DNA
cccttcctgtgtccatgtgttc

SEQ ID NO: 124681 - DNA, 22 bp, synthetic construct
  misc_feature 1..22: note = chemically synthesized
  source 1..22: mol_type = other DNA
cctgtgtccatgtgttctcatt

SEQ ID NO: 124682 - DNA, 22 bp, synthetic construct
  misc_feature 1..22: note = chemically synthesized
  source 1..22: mol_type = other DNA
ctgtgtccatgtgttctcattg

SEQ ID NO: 124683 - DNA, 22 bp, synthetic construct
  misc_feature 1..22: note = chemically synthesized
  source 1..22: mol_type = other DNA
tgtccatgtgttctcattgttc

SEQ ID NO: 124684 - DNA, 22 bp, synthetic construct
  misc_feature 1..22: note = chemically synthesized
  source 1..22: mol_type = other DNA
tcattgttcaattcccacctat

SEQ ID NO: 124685 - DNA, 22 bp, synthetic construct
  misc_feature 1..22: note = chemically synthesized
  source 1..22: mol_type = other DNA
attgttcaattcccacctatga

SEQ ID NO: 124686 - DNA, 22 bp, synthetic construct
  misc_feature 1..22: note = chemically synthesized
  source 1..22: mol_type = other DNA
ttcaattcccacctatgagtga

SEQ ID NO: 124687 - DNA, 22 bp, synthetic construct
  misc_feature 1..22: note = chemically synthesized
  source 1..22: mol_type = other DNA
aattcccacctatgagtgagaa

SEQ ID NO: 124688 - DNA, 22 bp, synthetic construct
  misc_feature 1..22: note = chemically synthesized
  source 1..22: mol_type = other DNA
ccacctatgagtgagaacatgc

SEQ ID NO: 124689 - DNA, 22 bp, synthetic construct
  misc_feature 1..22: note = chemically synthesized
  source 1..22: mol_type = other DNA
tgagtgagaacatgcagtgttt

SEQ ID NO: 124690 - DNA, 22 bp, synthetic construct
  misc_feature 1..22: note = chemically synthesized
  source 1..22: mol_type = other DNA
ggtttttgtccttgcgatagtt

SEQ ID NO: 124691 - DNA, 22 bp, synthetic construct
  misc_feature 1..22: note = chemically synthesized
  source 1..22: mol_type = other DNA
gtttttgtccttgcgatagttt

SEQ ID NO: 124692 - DNA, 22 bp, synthetic construct
  misc_feature 1..22: note = chemically synthesized
  source 1..22: mol_type = other DNA
ttgtccttgcgatagtttgctg

SEQ ID NO: 124693 - DNA, 22 bp, synthetic construct
  misc_feature 1..22: note = chemically synthesized
  source 1..22: mol_type = other DNA
tgtccttgcgatagtttgctga

SEQ ID NO: 124694 - DNA, 22 bp, synthetic construct
  misc_feature 1..22: note = chemically synthesized
  source 1..22: mol_type = other DNA
gtccttgcgatagtttgctgag

SEQ ID NO: 124695 - DNA, 22 bp, synthetic construct
  misc_feature 1..22: note = chemically synthesized
  source 1..22: mol_type = other DNA
tccttgcgatagtttgctgaga

SEQ ID NO: 124696 - DNA, 22 bp, synthetic construct
  misc_feature 1..22: note = chemically synthesized
  source 1..22: mol_type = other DNA
gcgatagtttgctgagaatgat

SEQ ID NO: 124697 - DNA, 22 bp, synthetic construct
  misc_feature 1..22: note = chemically synthesized
  source 1..22: mol_type = other DNA
cgatagtttgctgagaatgatg

SEQ ID NO: 124698 - DNA, 22 bp, synthetic construct
  misc_feature 1..22: note = chemically synthesized
  source 1..22: mol_type = other DNA
gctgagaatgatggtttccagc

SEQ ID NO: 124699 - DNA, 22 bp, synthetic construct
  misc_feature 1..22: note = chemically synthesized
  source 1..22: mol_type = other DNA
ctgagaatgatggtttccagct

SEQ ID NO: 124700 - DNA, 22 bp, synthetic construct
  misc_feature 1..22: note = chemically synthesized
  source 1..22: mol_type = other DNA
agaatgatggtttccagcttca

SEQ ID NO: 124701 - DNA, 22 bp, synthetic construct
  misc_feature 1..22: note = chemically synthesized
  source 1..22: mol_type = other DNA
ccagcttcatccatgtccctac

SEQ ID NO: 124702 - DNA, 22 bp, synthetic construct
  misc_feature 1..22: note = chemically synthesized
  source 1..22: mol_type = other DNA
cagcttcatccatgtccctaca

SEQ ID NO: 124703 - DNA, 22 bp, synthetic construct
  misc_feature 1..22: note = chemically synthesized
  source 1..22: mol_type = other DNA
catccatgtccctacaaaggac

SEQ ID NO: 124704 - DNA, 22 bp, synthetic construct
  misc_feature 1..22: note = chemically synthesized
  source 1..22: mol_type = other DNA
atccatgtccctacaaaggaca

SEQ ID NO: 124705 - DNA, 22 bp, synthetic construct
  misc_feature 1..22: note = chemically synthesized
  source 1..22: mol_type = other DNA
caaaggacatgaactcttcatt

SEQ ID NO: 124706 - DNA, 22 bp, synthetic construct
  misc_feature 1..22: note = chemically synthesized
  source 1..22: mol_type = other DNA
ttcattttttatggctgcatag

SEQ ID NO: 124707 - DNA, 22 bp, synthetic construct
  misc_feature 1..22: note = chemically synthesized
  source 1..22: mol_type = other DNA
cattttttatggctgcatagta

SEQ ID NO: 124708 - DNA, 22 bp, synthetic construct
  misc_feature 1..22: note = chemically synthesized
  source 1..22: mol_type = other DNA
attttttatggctgcatagtat

SEQ ID NO: 124709 - DNA, 22 bp, synthetic construct
  misc_feature 1..22: note = chemically synthesized
  source 1..22: mol_type = other DNA
tttatggctgcatagtattcca

SEQ ID NO: 124710 - DNA, 22 bp, synthetic construct
  misc_feature 1..22: note = chemically synthesized
  source 1..22: mol_type = other DNA
ttatggctgcatagtattccat

SEQ ID NO: 124711 - DNA, 22 bp, synthetic construct
  misc_feature 1..22: note = chemically synthesized
  source 1..22: mol_type = other DNA
tatggctgcatagtattccatg

SEQ ID NO: 124712 - DNA, 22 bp, synthetic construct
  misc_feature 1..22: note = chemically synthesized
  source 1..22: mol_type = other DNA
atggctgcatagtattccatgg

SEQ ID NO: 124713 - DNA, 22 bp, synthetic construct
  misc_feature 1..22: note = chemically synthesized
  source 1..22: mol_type = other DNA
tggctgcatagtattccatggt

SEQ ID NO: 124714 - DNA, 22 bp, synthetic construct
  misc_feature 1..22: note = chemically synthesized
  source 1..22: mol_type = other DNA
catagtattccatggtgtatat

SEQ ID NO: 124715 - DNA, 22 bp, synthetic construct
  misc_feature 1..22: note = chemically synthesized
  source 1..22: mol_type = other DNA
catggtgtatatgtgccacgtt

SEQ ID NO: 124716 - DNA, 22 bp, synthetic construct
  misc_feature 1..22: note = chemically synthesized
  source 1..22: mol_type = other DNA
tcttaatccagtctatcattgt

SEQ ID NO: 124717 - DNA, 22 bp, synthetic construct
  misc_feature 1..22: note = chemically synthesized
  source 1..22: mol_type = other DNA
cttaatccagtctatcattgtt

SEQ ID NO: 124718 - DNA, 22 bp, synthetic construct
  misc_feature 1..22: note = chemically synthesized
  source 1..22: mol_type = other DNA
ttaatccagtctatcattgttg

SEQ ID NO: 124719 - DNA, 22 bp, synthetic construct
  misc_feature 1..22: note = chemically synthesized
  source 1..22: mol_type = other DNA
aatccagtctatcattgttgga

SEQ ID NO: 124720 - DNA, 22 bp, synthetic construct
  misc_feature 1..22: note = chemically synthesized
  source 1..22: mol_type = other DNA
atccagtctatcattgttggac

SEQ ID NO: 124721 - DNA, 22 bp, synthetic construct
  misc_feature 1..22: note = chemically synthesized
  source 1..22: mol_type = other DNA
tcattgttggacatttgggttg

SEQ ID NO: 124722 - DNA, 22 bp, synthetic construct
  misc_feature 1..22: note = chemically synthesized
  source 1..22: mol_type = other DNA
ttggacatttgggttggttcca

SEQ ID NO: 124723 - DNA, 22 bp, synthetic construct
  misc_feature 1..22: note = chemically synthesized
  source 1..22: mol_type = other DNA
gacatttgggttggttccaagt

SEQ ID NO: 124724 - DNA, 22 bp, synthetic construct
  misc_feature 1..22: note = chemically synthesized
  source 1..22: mol_type = other DNA
gggttggttccaagtctttgct

SEQ ID NO: 124725 - DNA, 22 bp, synthetic construct
  misc_feature 1..22: note = chemically synthesized
  source 1..22: mol_type = other DNA
ggttggttccaagtctttgcta

SEQ ID NO: 124726 - DNA, 22 bp, synthetic construct
  misc_feature 1..22: note = chemically synthesized
  source 1..22: mol_type = other DNA
gttccaagtctttgctattgtg

SEQ ID NO: 124727 - DNA, 22 bp, synthetic construct
  misc_feature 1..22: note = chemically synthesized
  source 1..22: mol_type = other DNA
caagtctttgctattgtgaata

SEQ ID NO: 124728 - DNA, 22 bp, synthetic construct
  misc_feature 1..22: note = chemically synthesized
  source 1..22: mol_type = other DNA
tgctattgtgaatagtgccaca

SEQ ID NO: 124729 - DNA, 22 bp, synthetic construct
  misc_feature 1..22: note = chemically synthesized
  source 1..22: mol_type = other DNA
gctattgtgaatagtgccacaa

SEQ ID NO: 124730 - DNA, 22 bp, synthetic construct
  misc_feature 1..22: note = chemically synthesized
  source 1..22: mol_type = other DNA
ctattgtgaatagtgccacaat

SEQ ID NO: 124731 - DNA, 22 bp, synthetic construct
  misc_feature 1..22: note = chemically synthesized
  source 1..22: mol_type = other DNA
ttgtgaatagtgccacaataaa

SEQ ID NO: 124732 - DNA, 22 bp, synthetic construct
  misc_feature 1..22: note = chemically synthesized
  source 1..22: mol_type = other DNA
tgaatagtgccacaataaacat

SEQ ID NO: 124733 - DNA, 22 bp, synthetic construct
  misc_feature 1..22: note = chemically synthesized
  source 1..22: mol_type = other DNA
tatagcagcatgatttataatc

SEQ ID NO: 124734 - DNA, 22 bp, synthetic construct
  misc_feature 1..22: note = chemically synthesized
  source 1..22: mol_type = other DNA
atagcagcatgatttataatcc

SEQ ID NO: 124735 - DNA, 22 bp, synthetic construct
  misc_feature 1..22: note = chemically synthesized
  source 1..22: mol_type = other DNA
tagcagcatgatttataatcct

SEQ ID NO: 124736 - DNA, 22 bp, synthetic construct
  misc_feature 1..22: note = chemically synthesized
  source 1..22: mol_type = other DNA
ataatcctttgagtatgtaccc

SEQ ID NO: 124737 - DNA, 22 bp, synthetic construct
  misc_feature 1..22: note = chemically synthesized
  source 1..22: mol_type = other DNA
taatcctttgagtatgtaccca

SEQ ID NO: 124738 - DNA, 22 bp, synthetic construct
  misc_feature 1..22: note = chemically synthesized
  source 1..22: mol_type = other DNA
tgagtatgtacccagtaatggg

SEQ ID NO: 124739 - DNA, 22 bp, synthetic construct
  misc_feature 1..22: note = chemically synthesized
  source 1..22: mol_type = other DNA
gagtatgtacccagtaatggga

SEQ ID NO: 124740 - DNA, 22 bp, synthetic construct
  misc_feature 1..22: note = chemically synthesized
  source 1..22: mol_type = other DNA
agtatgtacccagtaatgggat

SEQ ID NO: 124741 - DNA, 22 bp, synthetic construct
  misc_feature 1..22: note = chemically synthesized
  source 1..22: mol_type = other DNA
ggtcaaatggtatttctagttc

SEQ ID NO: 124742 - DNA, 22 bp, synthetic construct
  misc_feature 1..22: note = chemically synthesized
  source 1..22: mol_type = other DNA
ctagttctagatccctgaggaa

SEQ ID NO: 124743 - DNA, 22 bp, synthetic construct
  misc_feature 1..22: note = chemically synthesized
  source 1..22: mol_type = other DNA
tagttctagatccctgaggaat

SEQ ID NO: 124744 - DNA, 22 bp, synthetic construct
  misc_feature 1..22: note = chemically synthesized
  source 1..22: mol_type = other DNA
gttctagatccctgaggaatcg

SEQ ID NO: 124745 - DNA, 22 bp, synthetic construct
  misc_feature 1..22: note = chemically synthesized
  source 1..22: mol_type = other DNA
tagatccctgaggaatcgccac

SEQ ID NO: 124746 - DNA, 22 bp, synthetic construct
  misc_feature 1..22: note = chemically synthesized
  source 1..22: mol_type = other DNA
gatccctgaggaatcgccacac

SEQ ID NO: 124747 - DNA, 22 bp, synthetic construct
  misc_feature 1..22: note = chemically synthesized
  source 1..22: mol_type = other DNA
aggaatcgccacactgacttcc

SEQ ID NO: 124748 - DNA, 22 bp, synthetic construct
  misc_feature 1..22: note = chemically synthesized
  source 1..22: mol_type = other DNA
acttccacaatggttgaactag

SEQ ID NO: 124749 - DNA, 22 bp, synthetic construct
  misc_feature 1..22: note = chemically synthesized
  source 1..22: mol_type = other DNA
ccacaatggttgaactagttta

SEQ ID NO: 124750 - DNA, 22 bp, synthetic construct
  misc_feature 1..22: note = chemically synthesized
  source 1..22: mol_type = other DNA
cacaatggttgaactagtttac

SEQ ID NO: 124751 - DNA, 22 bp, synthetic construct
  misc_feature 1..22: note = chemically synthesized
  source 1..22: mol_type = other DNA
aactagtttacagtctcaccaa

SEQ ID NO: 124752 - DNA, 22 bp, synthetic construct
  misc_feature 1..22: note = chemically synthesized
  source 1..22: mol_type = other DNA
gtttacagtctcaccaacagtg

SEQ ID NO: 124753 - DNA, 22 bp, synthetic construct
  misc_feature 1..22: note = chemically synthesized
  source 1..22: mol_type = other DNA
acagtctcaccaacagtgtaaa

SEQ ID NO: 124754 - DNA, 22 bp, synthetic construct
  misc_feature 1..22: note = chemically synthesized
  source 1..22: mol_type = other DNA
cagtctcaccaacagtgtaaaa

SEQ ID NO: 124755 - DNA, 22 bp, synthetic construct
  misc_feature 1..22: note = chemically synthesized
  source 1..22: mol_type = other DNA
accaacagtgtaaaagtgttcc

SEQ ID NO: 124756 - DNA, 22 bp, synthetic construct
  misc_feature 1..22: note = chemically synthesized
  source 1..22: mol_type = other DNA
ctacttcttcacatcctctcca

SEQ ID NO: 124757 - DNA, 22 bp, synthetic construct
  misc_feature 1..22: note = chemically synthesized
  source 1..22: mol_type = other DNA
cttcttcacatcctctccagca

SEQ ID NO: 124758 - DNA, 22 bp, synthetic construct
  misc_feature 1..22: note = chemically synthesized
  source 1..22: mol_type = other DNA
cttcacatcctctccagcacct

SEQ ID NO: 124759 - DNA, 22 bp, synthetic construct
  misc_feature 1..22: note = chemically synthesized
  source 1..22: mol_type = other DNA
ttcacatcctctccagcacctg

SEQ ID NO: 124760 - DNA, 22 bp, synthetic construct
  misc_feature 1..22: note = chemically synthesized
  source 1..22: mol_type = other DNA
cacatcctctccagcacctgtt

SEQ ID NO: 124761 - DNA, 22 bp, synthetic construct
  misc_feature 1..22: note = chemically synthesized
  source 1..22: mol_type = other DNA
acatcctctccagcacctgttg

SEQ ID NO: 124762 - DNA, 22 bp, synthetic construct
  misc_feature 1..22: note = chemically synthesized
  source 1..22: mol_type = other DNA
tccagcacctgttgtttcctga

SEQ ID NO: 124763 - DNA, 22 bp, synthetic construct
  misc_feature 1..22: note = chemically synthesized
  source 1..22: mol_type = other DNA
cagcacctgttgtttcctgact

SEQ ID NO: 124764 - DNA, 22 bp, synthetic construct
  misc_feature 1..22: note = chemically synthesized
  source 1..22: mol_type = other DNA
ttgtttcctgactttttaatga

SEQ ID NO: 124765 - DNA, 22 bp, synthetic construct
  misc_feature 1..22: note = chemically synthesized
  source 1..22: mol_type = other DNA
tttcctgactttttaatgatcg

SEQ ID NO: 124766 - DNA, 22 bp, synthetic construct
  misc_feature 1..22: note = chemically synthesized
  source 1..22: mol_type = other DNA
cctgactttttaatgatcgcca

SEQ ID NO: 124767 - DNA, 22 bp, synthetic construct
  misc_feature 1..22: note = chemically synthesized
  source 1..22: mol_type = other DNA
ctgactttttaatgatcgccat

SEQ ID NO: 124768 - DNA, 22 bp, synthetic construct
  misc_feature 1..22: note = chemically synthesized
  source 1..22: mol_type = other DNA
actttttaatgatcgccattct

SEQ ID NO: 124769 - DNA, 22 bp, synthetic construct
  misc_feature 1..22: note = chemically synthesized
  source 1..22: mol_type = other DNA
tttaatgatcgccattctaact

SEQ ID NO: 124770 - DNA, 22 bp, synthetic construct
  misc_feature 1..22: note = chemically synthesized
  source 1..22: mol_type = other DNA
ttaatgatcgccattctaactg

SEQ ID NO: 124771 - DNA, 22 bp, synthetic construct
  misc_feature 1..22: note = chemically synthesized
  source 1..22: mol_type = other DNA
taatgatcgccattctaactgg

SEQ ID NO: 124772 - DNA, 22 bp, synthetic construct
  misc_feature 1..22: note = chemically synthesized
  source 1..22: mol_type = other DNA
aatgatcgccattctaactggt

SEQ ID NO: 124773 - DNA, 22 bp, synthetic construct
  misc_feature 1..22: note = chemically synthesized
  source 1..22: mol_type = other DNA
atgatcgccattctaactggtg

SEQ ID NO: 124774 - DNA, 22 bp, synthetic construct
  misc_feature 1..22: note = chemically synthesized
  source 1..22: mol_type = other DNA
taactggtgtgagatggtatct

SEQ ID NO: 124775 - DNA, 22 bp, synthetic construct
  misc_feature 1..22: note = chemically synthesized
  source 1..22: mol_type = other DNA
actggtgtgagatggtatctca

SEQ ID NO: 124776 - DNA, 22 bp, synthetic construct
  misc_feature 1..22: note = chemically synthesized
  source 1..22: mol_type = other DNA
gtgtgagatggtatctcactgt

SEQ ID NO: 124777 - DNA, 22 bp, synthetic construct
  misc_feature 1..22: note = chemically synthesized
  source 1..22: mol_type = other DNA
actgtggttttgatttgtattt

SEQ ID NO: 124778 - DNA, 22 bp, synthetic construct
  misc_feature 1..22: note = chemically synthesized
  source 1..22: mol_type = other DNA
tggttttgatttgtatttctct

SEQ ID NO: 124779 - DNA, 22 bp, synthetic construct
  misc_feature 1..22: note = chemically synthesized
  source 1..22: mol_type = other DNA
tgatttgtatttctctgatggc

SEQ ID NO: 124780 - DNA, 22 bp, synthetic construct
  misc_feature 1..22: note = chemically synthesized
  source 1..22: mol_type = other DNA
gatttgtatttctctgatggcc

SEQ ID NO: 124781 - DNA, 22 bp, synthetic construct
  misc_feature 1..22: note = chemically synthesized
  source 1..22: mol_type = other DNA
atttgtatttctctgatggcca

SEQ ID NO: 124782 - DNA, 22 bp, synthetic construct
  misc_feature 1..22: note = chemically synthesized
  source 1..22: mol_type = other DNA
gtatttctctgatggccagtga

SEQ ID NO: 124783 - DNA, 22 bp, synthetic construct
  misc_feature 1..22: note = chemically synthesized
  source 1..22: mol_type = other DNA
tatttctctgatggccagtgat

SEQ ID NO: 124784 - DNA, 22 bp, synthetic construct
  misc_feature 1..22: note = chemically synthesized
  source 1..22: mol_type = other DNA
ctctgatggccagtgatgatga

SEQ ID NO: 124785 - DNA, 22 bp, synthetic construct
  misc_feature 1..22: note = chemically synthesized
  source 1..22: mol_type = other DNA
tctgatggccagtgatgatgag

SEQ ID NO: 124786 - DNA, 22 bp, synthetic construct
  misc_feature 1..22: note = chemically synthesized
  source 1..22: mol_type = other DNA
tgatggccagtgatgatgagca

SEQ ID NO: 124787 - DNA, 22 bp, synthetic construct
  misc_feature 1..22: note = chemically synthesized
  source 1..22: mol_type = other DNA
atggccagtgatgatgagcatt

SEQ ID NO: 124788 - DNA, 22 bp, synthetic construct
  misc_feature 1..22: note = chemically synthesized
  source 1..22: mol_type = other DNA
tttcatgtgtctgttgactgca

SEQ ID NO: 124789 - DNA, 22 bp, synthetic construct
  misc_feature 1..22: note = chemically synthesized
  source 1..22: mol_type = other DNA
ttcatgtgtctgttgactgcat

SEQ ID NO: 124790 - DNA, 22 bp, synthetic construct
  misc_feature 1..22: note = chemically synthesized
  source 1..22: mol_type = other DNA
tcatgtgtctgttgactgcata

SEQ ID NO: 124791 - DNA, 22 bp, synthetic construct
  misc_feature 1..22: note = chemically synthesized
  source 1..22: mol_type = other DNA
catgtgtctgttgactgcataa

SEQ ID NO: 124792 - DNA, 22 bp, synthetic construct
  misc_feature 1..22: note = chemically synthesized
  source 1..22: mol_type = other DNA
atgtgtctgttgactgcataaa

SEQ ID NO: 124793 - DNA, 22 bp, synthetic construct
  misc_feature 1..22: note = chemically synthesized
  source 1..22: mol_type = other DNA
ttgactgcataaatgtcttctt

SEQ ID NO: 124794 - DNA, 22 bp, synthetic construct
  misc_feature 1..22: note = chemically synthesized
  source 1..22: mol_type = other DNA
actgcataaatgtcttcttttg

SEQ ID NO: 124795 - DNA, 22 bp, synthetic construct
  misc_feature 1..22: note = chemically synthesized
  source 1..22: mol_type = other DNA
cataaatgtcttcttttgagaa

SEQ ID NO: 124796 - DNA, 22 bp, synthetic construct
  misc_feature 1..22: note = chemically synthesized
  source 1..22: mol_type = other DNA
cttttgagaagtgtctgttcat

SEQ ID NO: 124797 - DNA, 22 bp, synthetic construct
  misc_feature 1..22: note = chemically synthesized
  source 1..22: mol_type = other DNA
ttttgagaagtgtctgttcata

SEQ ID NO: 124798 - DNA, 22 bp, synthetic construct
  misc_feature 1..22: note = chemically synthesized
  source 1..22: mol_type = other DNA
ttgagaagtgtctgttcatatc

SEQ ID NO: 124799 - DNA, 22 bp, synthetic construct
  misc_feature 1..22: note = chemically synthesized
  source 1..22: mol_type = other DNA
tgagaagtgtctgttcatatcc

SEQ ID NO: 124800 - DNA, 22 bp, synthetic construct
  misc_feature 1..22: note = chemically synthesized
  source 1..22: mol_type = other DNA
gagaagtgtctgttcatatcct

SEQ ID NO: 124801 - DNA, 22 bp, synthetic construct
  misc_feature 1..22: note = chemically synthesized
  source 1..22: mol_type = other DNA
agaagtgtctgttcatatcctt

SEQ ID NO: 124802 - DNA, 22 bp, synthetic construct
  misc_feature 1..22: note = chemically synthesized
  source 1..22: mol_type = other DNA
ttcatatcctttgcccactttt

SEQ ID NO: 124803 - DNA, 22 bp, synthetic construct
  misc_feature 1..22: note = chemically synthesized
  source 1..22: mol_type = other DNA
atatcctttgcccactttttga

SEQ ID NO: 124804 - DNA, 22 bp, synthetic construct
  misc_feature 1..22: note = chemically synthesized
  source 1..22: mol_type = other DNA
tgcccactttttgatggggttg

SEQ ID NO: 124805 - DNA, 22 bp, synthetic construct
  misc_feature 1..22: note = chemically synthesized
  source 1..22: mol_type = other DNA
gcccactttttgatggggttgt

SEQ ID NO: 124806 - DNA, 22 bp, synthetic construct
  misc_feature 1..22: note = chemically synthesized
  source 1..22: mol_type = other DNA
cccactttttgatggggttgtt

SEQ ID NO: 124807 - DNA, 22 bp, synthetic construct
  misc_feature 1..22: note = chemically synthesized
  source 1..22: mol_type = other DNA
tttgatggggttgtttttttct

SEQ ID NO: 124808 - DNA, 22 bp, synthetic construct
  misc_feature 1..22: note = chemically synthesized
  source 1..22: mol_type = other DNA
ttgatggggttgtttttttctt

SEQ ID NO: 124809 - DNA, 22 bp, synthetic construct
  misc_feature 1..22: note = chemically synthesized
  source 1..22: mol_type = other DNA
tgatggggttgtttttttcttg

SEQ ID NO: 124810 - DNA, 22 bp, synthetic construct
  misc_feature 1..22: note = chemically synthesized
  source 1..22: mol_type = other DNA
gatggggttgtttttttcttgt

SEQ ID NO: 124811 - DNA, 22 bp, synthetic construct
  misc_feature 1..22: note = chemically synthesized
  source 1..22: mol_type = other DNA
atggggttgtttttttcttgta

SEQ ID NO: 124812 - DNA, 22 bp, synthetic construct
  misc_feature 1..22: note = chemically synthesized
  source 1..22: mol_type = other DNA
tttttttcttgtaaatttgttt

SEQ ID NO: 124813 - DNA, 22 bp, synthetic construct
  misc_feature 1..22: note = chemically synthesized
  source 1..22: mol_type = other DNA
ttttcttgtaaatttgtttgag

SEQ ID NO: 124814 - DNA, 22 bp, synthetic construct
  misc_feature 1..22: note = chemically synthesized
  source 1..22: mol_type = other DNA
tttcttgtaaatttgtttgagt

SEQ ID NO: 124815 - DNA, 22 bp, synthetic construct
  misc_feature 1..22: note = chemically synthesized
  source 1..22: mol_type = other DNA
ttcttgtaaatttgtttgagtt

SEQ ID NO: 124816 - DNA, 22 bp, synthetic construct
  misc_feature 1..22: note = chemically synthesized
  source 1..22: mol_type = other DNA
tcttgtaaatttgtttgagttc

SEQ ID NO: 124817 - DNA, 22 bp, synthetic construct
  misc_feature 1..22: note = chemically synthesized
  source 1..22: mol_type = other DNA
cttgtaaatttgtttgagttca

SEQ ID NO: 124818 - DNA, 22 bp, synthetic construct
  misc_feature 1..22: note = chemically synthesized
  source 1..22: mol_type = other DNA
ttgtaaatttgtttgagttcat

SEQ ID NO: 124819 - DNA, 22 bp, synthetic construct
  misc_feature 1..22: note = chemically synthesized
  source 1..22: mol_type = other DNA
gtaaatttgtttgagttcatca

SEQ ID NO: 124820 - DNA, 22 bp, synthetic construct
  misc_feature 1..22: note = chemically synthesized
  source 1..22: mol_type = other DNA
taaatttgtttgagttcatcat

SEQ ID NO: 124821 - DNA, 22 bp, synthetic construct
  misc_feature 1..22: note = chemically synthesized
  source 1..22: mol_type = other DNA
gtttgagttcatcatagattct

SEQ ID NO: 124822 - DNA, 22 bp, synthetic construct
  misc_feature 1..22: note = chemically synthesized
  source 1..22: mol_type = other DNA
tttgagttcatcatagattctg

SEQ ID NO: 124823 - DNA, 22 bp, synthetic construct
  misc_feature 1..22: note = chemically synthesized
  source 1..22: mol_type = other DNA
gagttcatcatagattctggat

SEQ ID NO: 124824 - DNA, 22 bp, synthetic construct
  misc_feature 1..22: note = chemically synthesized
  source 1..22: mol_type = other DNA
agttcatcatagattctggata

SEQ ID NO: 124825 - DNA, 22 bp, synthetic construct
  misc_feature 1..22: note = chemically synthesized
  source 1..22: mol_type = other DNA
atcatagattctggatattagc

SEQ ID NO: 124826 - DNA, 22 bp, synthetic construct
  misc_feature 1..22: note = chemically synthesized
  source 1..22: mol_type = other DNA
tggatattagccctttgtcgga

SEQ ID NO: 124827 - DNA, 22 bp, synthetic construct
  misc_feature 1..22: note = chemically synthesized
  source 1..22: mol_type = other DNA
gatattagccctttgtcggatg

SEQ ID NO: 124828 - DNA, 22 bp, synthetic construct
  misc_feature 1..22: note = chemically synthesized
  source 1..22: mol_type = other DNA
gccctttgtcggatgagtagat

SEQ ID NO: 124829 - DNA, 22 bp, synthetic construct
  misc_feature 1..22: note = chemically synthesized
  source 1..22: mol_type = other DNA
tgtcggatgagtagattgcaaa

SEQ ID NO: 124830 - DNA, 22 bp, synthetic construct
  misc_feature 1..22: note = chemically synthesized
  source 1..22: mol_type = other DNA
gtcggatgagtagattgcaaaa

SEQ ID NO: 124831 - DNA, 22 bp, synthetic construct
  misc_feature 1..22: note = chemically synthesized
  source 1..22: mol_type = other DNA
tcggatgagtagattgcaaaaa

SEQ ID NO: 124832 - DNA, 22 bp, synthetic construct
  misc_feature 1..22: note = chemically synthesized
  source 1..22: mol_type = other DNA
caaaaattttctcccattctgt

SEQ ID NO: 124833 - DNA, 22 bp, synthetic construct
  misc_feature 1..22: note = chemically synthesized
  source 1..22: mol_type = other DNA
tctcccattctgtatgttgcct

SEQ ID NO: 124834 - DNA, 22 bp, synthetic construct
  misc_feature 1..22: note = chemically synthesized
  source 1..22: mol_type = other DNA
ctcccattctgtatgttgcctg

SEQ ID NO: 124835 - DNA, 22 bp, synthetic construct
  misc_feature 1..22: note = chemically synthesized
  source 1..22: mol_type = other DNA
tcccattctgtatgttgcctgt

SEQ ID NO: 124836 - DNA, 22 bp, synthetic construct
  misc_feature 1..22: note = chemically synthesized
  source 1..22: mol_type = other DNA
ccattctgtatgttgcctgttc

SEQ ID NO: 124837 - DNA, 22 bp, synthetic construct
  misc_feature 1..22: note = chemically synthesized
  source 1..22: mol_type = other DNA
tgtatgttgcctgttcactctg

SEQ ID NO: 124838 - DNA, 22 bp, synthetic construct
  misc_feature 1..22: note = chemically synthesized
  source 1..22: mol_type = other DNA
tatgttgcctgttcactctgat

SEQ ID NO: 124839 - DNA, 22 bp, synthetic construct
  misc_feature 1..22: note = chemically synthesized
  source 1..22: mol_type = other DNA
cctgttcactctgatggtagtt

SEQ ID NO: 124840 - DNA, 22 bp, synthetic construct
  misc_feature 1..22: note = chemically synthesized
  source 1..22: mol_type = other DNA
ttcactctgatggtagtttctt

SEQ ID NO: 124841 - DNA, 22 bp, synthetic construct
  misc_feature 1..22: note = chemically synthesized
  source 1..22: mol_type = other DNA
actctgatggtagtttcttttg

SEQ ID NO: 124842 - DNA, 22 bp, synthetic construct
  misc_feature 1..22: note = chemically synthesized
  source 1..22: mol_type = other DNA
tgatggtagtttcttttgctgt

SEQ ID NO: 124843 - DNA, 22 bp, synthetic construct
  misc_feature 1..22: note = chemically synthesized
  source 1..22: mol_type = other DNA
atggtagtttcttttgctgtgc

SEQ ID NO: 124844 - DNA, 22 bp, synthetic construct
  misc_feature 1..22: note = chemically synthesized
  source 1..22: mol_type = other DNA
cttttgctgtgcagaagctctt

SEQ ID NO: 124845 - DNA, 22 bp, synthetic construct
  misc_feature 1..22: note = chemically synthesized
  source 1..22: mol_type = other DNA
ttttgctgtgcagaagctcttt

SEQ ID NO: 124846 - DNA, 22 bp, synthetic construct
  misc_feature 1..22: note = chemically synthesized
  source 1..22: mol_type = other DNA
ttgctgtgcagaagctctttag

SEQ ID NO: 124847 - DNA, 22 bp, synthetic construct
  misc_feature 1..22: note = chemically synthesized
  source 1..22: mol_type = other DNA
tgctgtgcagaagctctttagt

SEQ ID NO: 124848 - DNA, 22 bp, synthetic construct
  misc_feature 1..22: note = chemically synthesized
  source 1..22: mol_type = other DNA
gctgtgcagaagctctttagtt

SEQ ID NO: 124849 - DNA, 22 bp, synthetic construct
  misc_feature 1..22: note = chemically synthesized
  source 1..22: mol_type = other DNA
ctgtgcagaagctctttagttt

SEQ ID NO: 124850 - DNA, 22 bp, synthetic construct
  misc_feature 1..22: note = chemically synthesized
  source 1..22: mol_type = other DNA
tgcagaagctctttagtttaat

SEQ ID NO: 124851 - DNA, 22 bp, synthetic construct
  misc_feature 1..22: note = chemically synthesized
  source 1..22: mol_type = other DNA
tttagtttaattagatcccatt

SEQ ID NO: 124852 - DNA, 22 bp, synthetic construct
  misc_feature 1..22: note = chemically synthesized
  source 1..22: mol_type = other DNA
tagtttaattagatcccatttg

SEQ ID NO: 124853 - DNA, 22 bp, synthetic construct
  misc_feature 1..22: note = chemically synthesized
  source 1..22: mol_type = other DNA
agtttaattagatcccatttgt

SEQ ID NO: 124854 - DNA, 22 bp, synthetic construct
  misc_feature 1..22: note = chemically synthesized
  source 1..22: mol_type = other DNA
gtttaattagatcccatttgtc

SEQ ID NO: 124855 - DNA, 22 bp, synthetic construct
  misc_feature 1..22: note = chemically synthesized
  source 1..22: mol_type = other DNA
aattagatcccatttgtccatt

SEQ ID NO: 124856 - DNA, 22 bp, synthetic construct
  misc_feature 1..22: note = chemically synthesized
  source 1..22: mol_type = other DNA
attagatcccatttgtccattt

SEQ ID NO: 124857 - DNA, 22 bp, synthetic construct
  misc_feature 1..22: note = chemically synthesized
  source 1..22: mol_type = other DNA
gatcccatttgtccattttggc

SEQ ID NO: 124858 - DNA, 22 bp, synthetic construct
  misc_feature 1..22: note = chemically synthesized
  source 1..22: mol_type = other DNA
gtccattttggcttttgttgcc

SEQ ID NO: 124859 - DNA, 22 bp, synthetic construct
  misc_feature 1..22: note = chemically synthesized
  source 1..22: mol_type = other DNA
tccattttggcttttgttgcca

SEQ ID NO: 124860 - DNA, 22 bp, synthetic construct
  misc_feature 1..22: note = chemically synthesized
  source 1..22: mol_type = other DNA
tggcttttgttgccattgcttt

SEQ ID NO: 124861 - DNA, 22 bp, synthetic construct
  misc_feature 1..22: note = chemically synthesized
  source 1..22: mol_type = other DNA
ggcttttgttgccattgctttt

SEQ ID NO: 124862 - DNA, 22 bp, synthetic construct
  misc_feature 1..22: note = chemically synthesized
  source 1..22: mol_type = other DNA
gcttttgttgccattgcttttg

SEQ ID NO: 124863 - DNA, 22 bp, synthetic construct
  misc_feature 1..22: note = chemically synthesized
  source 1..22: mol_type = other DNA
ttgttgccattgcttttggtgt

SEQ ID NO: 124864 - DNA, 22 bp, synthetic construct
  misc_feature 1..22: note = chemically synthesized
  source 1..22: mol_type = other DNA
tgttgccattgcttttggtgtt

SEQ ID NO: 124865 - DNA, 22 bp, synthetic construct
  misc_feature 1..22: note = chemically synthesized
  source 1..22: mol_type = other DNA
gttgccattgcttttggtgttt

SEQ ID NO: 124866 - DNA, 22 bp, synthetic construct
  misc_feature 1..22: note = chemically synthesized
  source 1..22: mol_type = other DNA
ttgccattgcttttggtgtttt

SEQ ID NO: 124867 - DNA, 22 bp, synthetic construct
  misc_feature 1..22: note = chemically synthesized
  source 1..22: mol_type = other DNA
ccattgcttttggtgttttaga

SEQ ID NO: 124868 - DNA, 22 bp, synthetic construct
  misc_feature 1..22: note = chemically synthesized
  source 1..22: mol_type = other DNA
cttttggtgttttagacatgaa

SEQ ID NO: 124869 - DNA, 22 bp, synthetic construct
  misc_feature 1..22: note = chemically synthesized
  source 1..22: mol_type = other DNA
ttggtgttttagacatgaagtc

SEQ ID NO: 124870 - DNA, 22 bp, synthetic construct
  misc_feature 1..22: note = chemically synthesized
  source 1..22: mol_type = other DNA
tggtgttttagacatgaagtcc

SEQ ID NO: 124871 - DNA, 22 bp, synthetic construct
  misc_feature 1..22: note = chemically synthesized
  source 1..22: mol_type = other DNA
ggtgttttagacatgaagtcct

SEQ ID NO: 124872 - DNA, 22 bp, synthetic construct
  misc_feature 1..22: note = chemically synthesized
  source 1..22: mol_type = other DNA
gtgttttagacatgaagtcctt

SEQ ID NO: 124873 - DNA, 22 bp, synthetic construct
  misc_feature 1..22: note = chemically synthesized
  source 1..22: mol_type = other DNA
tagacatgaagtccttgcccat

SEQ ID NO: 124874 - DNA, 22 bp, synthetic construct
  misc_feature 1..22: note = chemically synthesized
  source 1..22: mol_type = other DNA
agacatgaagtccttgcccatg

SEQ ID NO: 124875 - DNA, 22 bp, synthetic construct
  misc_feature 1..22: note = chemically synthesized
  source 1..22: mol_type = other DNA
gacatgaagtccttgcccatgc

SEQ ID NO: 124876 - DNA, 22 bp, synthetic construct
  misc_feature 1..22: note = chemically synthesized
  source 1..22: mol_type = other DNA
gcccatgcctatgtcctgaatg

SEQ ID NO: 124877 - DNA, 22 bp, synthetic construct
  misc_feature 1..22: note = chemically synthesized
  source 1..22: mol_type = other DNA
cccatgcctatgtcctgaatgg

SEQ ID NO: 124878 - DNA, 22 bp, synthetic construct
  misc_feature 1..22: note = chemically synthesized
  source 1..22: mol_type = other DNA
tgtcctgaatggtattgcctag

SEQ ID NO: 124879 - DNA, 22 bp, synthetic construct
  misc_feature 1..22: note = chemically synthesized
  source 1..22: mol_type = other DNA
aatggtattgcctaggttttct

SEQ ID NO: 124880 - DNA, 22 bp, synthetic construct
  misc_feature 1..22: note = chemically synthesized
  source 1..22: mol_type = other DNA
cctaggttttcttccagagttt

SEQ ID NO: 124881 - DNA, 22 bp, synthetic construct
  misc_feature 1..22: note = chemically synthesized
  source 1..22: mol_type = other DNA
ggttttcttccagagtttttat

SEQ ID NO: 124882 - DNA, 22 bp, synthetic construct
  misc_feature 1..22: note = chemically synthesized
  source 1..22: mol_type = other DNA
tcttccagagtttttatggttt

SEQ ID NO: 124883 - DNA, 22 bp, synthetic construct
  misc_feature 1..22: note = chemically synthesized
  source 1..22: mol_type = other DNA
cttccagagtttttatggtttt

SEQ ID NO: 124884 - DNA, 22 bp, synthetic construct
  misc_feature 1..22: note = chemically synthesized
  source 1..22: mol_type = other DNA
ttccagagtttttatggttttc

SEQ ID NO: 124885 - DNA, 22 bp, synthetic construct
  misc_feature 1..22: note = chemically synthesized
  source 1..22: mol_type = other DNA
ccagagtttttatggttttcag

SEQ ID NO: 124886 - DNA, 22 bp, synthetic construct
  misc_feature 1..22: note = chemically synthesized
  source 1..22: mol_type = other DNA
cagagtttttatggttttcagt

SEQ ID NO: 124887 - DNA, 22 bp, synthetic construct
  misc_feature 1..22: note = chemically synthesized
  source 1..22: mol_type = other DNA
ttatggttttcagtctaacatt

SEQ ID NO: 124888 - DNA, 22 bp, synthetic construct
  misc_feature 1..22: note = chemically synthesized
  source 1..22: mol_type = other DNA
tatggttttcagtctaacattt

SEQ ID NO: 124889 - DNA, 22 bp, synthetic construct
  misc_feature 1..22: note = chemically synthesized
  source 1..22: mol_type = other DNA
atggttttcagtctaacattta

SEQ ID NO: 124890 - DNA, 22 bp, synthetic construct
  misc_feature 1..22: note = chemically synthesized
  source 1..22: mol_type = other DNA
tggttttcagtctaacatttaa

SEQ ID NO: 124891 - DNA, 22 bp, synthetic construct
  misc_feature 1..22: note = chemically synthesized
  source 1..22: mol_type = other DNA
tcagtctaacatttaagtctgt

SEQ ID NO: 124892 - DNA, 22 bp, synthetic construct
  misc_feature 1..22: note = chemically synthesized
  source 1..22: mol_type = other DNA
cagtctaacatttaagtctgta

SEQ ID NO: 124893 - DNA, 22 bp, synthetic construct
  misc_feature 1..22: note = chemically synthesized
  source 1..22: mol_type = other DNA
agtctaacatttaagtctgtaa

SEQ ID NO: 124894 - DNA, 22 bp, synthetic construct
  misc_feature 1..22: note = chemically synthesized
  source 1..22: mol_type = other DNA
acatttaagtctgtaatccatc

SEQ ID NO: 124895 - DNA, 22 bp, synthetic construct
  misc_feature 1..22: note = chemically synthesized
  source 1..22: mol_type = other DNA
aagtctgtaatccatcttgaat

SEQ ID NO: 124896 - DNA, 22 bp, synthetic construct
  misc_feature 1..22: note = chemically synthesized
  source 1..22: mol_type = other DNA
agtctgtaatccatcttgaatt

SEQ ID NO: 124897 - DNA, 22 bp, synthetic construct
  misc_feature 1..22: note = chemically synthesized
  source 1..22: mol_type = other DNA
taatccatcttgaattaatttt

SEQ ID NO: 124898 - DNA, 22 bp, synthetic construct
  misc_feature 1..22: note = chemically synthesized
  source 1..22: mol_type = other DNA
gaattaatttttgtataaggtg

SEQ ID NO: 124899 - DNA, 22 bp, synthetic construct
  misc_feature 1..22: note = chemically synthesized
  source 1..22: mol_type = other DNA
aattaatttttgtataaggtgt

SEQ ID NO: 124900 - DNA, 22 bp, synthetic construct
  misc_feature 1..22: note = chemically synthesized
  source 1..22: mol_type = other DNA
atttttgtataaggtgtaagaa

SEQ ID NO: 124901 - DNA, 22 bp, synthetic construct
  misc_feature 1..22: note = chemically synthesized
  source 1..22: mol_type = other DNA
ttgtataaggtgtaagaaaggg

SEQ ID NO: 124902 - DNA, 22 bp, synthetic construct
  misc_feature 1..22: note = chemically synthesized
  source 1..22: mol_type = other DNA
tgtataaggtgtaagaaaggga

SEQ ID NO: 124903 - DNA, 22 bp, synthetic construct
  misc_feature 1..22: note = chemically synthesized
  source 1..22: mol_type = other DNA
gtataaggtgtaagaaagggat

SEQ ID NO: 124904 - DNA, 22 bp, synthetic construct
  misc_feature 1..22: note = chemically synthesized
  source 1..22: mol_type = other DNA
tataaggtgtaagaaagggatc

SEQ ID NO: 124905 - DNA, 22 bp, synthetic construct
  misc_feature 1..22: note = chemically synthesized
  source 1..22: mol_type = other DNA
cagctttctgcgtatggttagc

SEQ ID NO: 124906 - DNA, 22 bp, synthetic construct
  misc_feature 1..22: note = chemically synthesized
  source 1..22: mol_type = other DNA
agctttctgcgtatggttagcc

SEQ ID NO: 124907 - DNA, 22 bp, synthetic construct
  misc_feature 1..22: note = chemically synthesized
  source 1..22: mol_type = other DNA
tctgcgtatggttagccagttt

SEQ ID NO: 124908 - DNA, 22 bp, synthetic construct
  misc_feature 1..22: note = chemically synthesized
  source 1..22: mol_type = other DNA
ctgcgtatggttagccagtttt

SEQ ID NO: 124909 - DNA, 22 bp, synthetic construct
  misc_feature 1..22: note = chemically synthesized
  source 1..22: mol_type = other DNA
tgcgtatggttagccagttttc

SEQ ID NO: 124910 - DNA, 22 bp, synthetic construct
  misc_feature 1..22: note = chemically synthesized
  source 1..22: mol_type = other DNA
cgtatggttagccagttttccc

SEQ ID NO: 124911 - DNA, 22 bp, synthetic construct
  misc_feature 1..22: note = chemically synthesized
  source 1..22: mol_type = other DNA
gccagttttcccagcaccattt

SEQ ID NO: 124912 - DNA, 22 bp, synthetic construct
  misc_feature 1..22: note = chemically synthesized
  source 1..22: mol_type = other DNA
tcccagcaccatttattaaata

SEQ ID NO: 124913 - DNA, 22 bp, synthetic construct
  misc_feature 1..22: note = chemically synthesized
  source 1..22: mol_type = other DNA
cccagcaccatttattaaatag

SEQ ID NO: 124914 - DNA, 22 bp, synthetic construct
  misc_feature 1..22: note = chemically synthesized
  source 1..22: mol_type = other DNA
ccagcaccatttattaaatagg

SEQ ID NO: 124915 - DNA, 22 bp, synthetic construct
  misc_feature 1..22: note = chemically synthesized
  source 1..22: mol_type = other DNA
attaaatagggaatcctttccc

SEQ ID NO: 124916 - DNA, 22 bp, synthetic construct
  misc_feature 1..22: note = chemically synthesized
  source 1..22: mol_type = other DNA
ttaaatagggaatcctttcccc

SEQ ID NO: 124917 - DNA, 22 bp, synthetic construct
  misc_feature 1..22: note = chemically synthesized
  source 1..22: mol_type = other DNA
aatagggaatcctttccccatt

SEQ ID NO: 124918 - DNA, 22 bp, synthetic construct
  misc_feature 1..22: note = chemically synthesized
  source 1..22: mol_type = other DNA
tccccatttgttttttttgtca

SEQ ID NO: 124919 - DNA, 22 bp, synthetic construct
  misc_feature 1..22: note = chemically synthesized
  source 1..22: mol_type = other DNA
ccccatttgttttttttgtcag

SEQ ID NO: 124920 - DNA, 22 bp, synthetic construct
  misc_feature 1..22: note = chemically synthesized
  source 1..22: mol_type = other DNA
cccatttgttttttttgtcagg

SEQ ID NO: 124921 - DNA, 22 bp, synthetic construct
  misc_feature 1..22: note = chemically synthesized
  source 1..22: mol_type = other DNA
gttttttttgtcaggtttgtca

SEQ ID NO: 124922 - DNA, 22 bp, synthetic construct
  misc_feature 1..22: note = chemically synthesized
  source 1..22: mol_type = other DNA
ttttttttgtcaggtttgtcaa

SEQ ID NO: 124923 - DNA, 22 bp, synthetic construct
  misc_feature 1..22: note = chemically synthesized
  source 1..22: mol_type = other DNA
tttttgtcaggtttgtcaaaga

SEQ ID NO: 124924 - DNA, 22 bp, synthetic construct
  misc_feature 1..22: note = chemically synthesized
  source 1..22: mol_type = other DNA
ttttgtcaggtttgtcaaagat

SEQ ID NO: 124925 - DNA, 22 bp, synthetic construct
  misc_feature 1..22: note = chemically synthesized
  source 1..22: mol_type = other DNA
tttgtcaggtttgtcaaagatc

SEQ ID NO: 124926 - DNA, 22 bp, synthetic construct
  misc_feature 1..22: note = chemically synthesized
  source 1..22: mol_type = other DNA
ttgtcaggtttgtcaaagatca

SEQ ID NO: 124927 - DNA, 22 bp, synthetic construct
  misc_feature 1..22: note = chemically synthesized
  source 1..22: mol_type = other DNA
tgtcaggtttgtcaaagatcag

SEQ ID NO: 124928 - DNA, 22 bp, synthetic construct
  misc_feature 1..22: note = chemically synthesized
  source 1..22: mol_type = other DNA
gtcaggtttgtcaaagatcaga

SEQ ID NO: 124929 - DNA, 22 bp, synthetic construct
  misc_feature 1..22: note = chemically synthesized
  source 1..22: mol_type = other DNA
tcaggtttgtcaaagatcagat

SEQ ID NO: 124930 - DNA, 22 bp, synthetic construct
  misc_feature 1..22: note = chemically synthesized
  source 1..22: mol_type = other DNA
gtcaaagatcagatggttgtag

SEQ ID NO: 124931 - DNA, 22 bp, synthetic construct
  misc_feature 1..22: note = chemically synthesized
  source 1..22: mol_type = other DNA
tcaaagatcagatggttgtaga

SEQ ID NO: 124932 - DNA, 22 bp, synthetic construct
  misc_feature 1..22: note = chemically synthesized
  source 1..22: mol_type = other DNA
tagacatgcggcattatttctg

SEQ ID NO: 124933 - DNA, 22 bp, synthetic construct
  misc_feature 1..22: note = chemically synthesized
  source 1..22: mol_type = other DNA
tttctgaggcctctgttctgtt

SEQ ID NO: 124934 - DNA, 22 bp, synthetic construct
  misc_feature 1..22: note = chemically synthesized
  source 1..22: mol_type = other DNA
ctgaggcctctgttctgttcca

SEQ ID NO: 124935 - DNA, 22 bp, synthetic construct
  misc_feature 1..22: note = chemically synthesized
  source 1..22: mol_type = other DNA
tgaggcctctgttctgttccat

SEQ ID NO: 124936 - DNA, 22 bp, synthetic construct
  misc_feature 1..22: note = chemically synthesized
  source 1..22: mol_type = other DNA
aggcctctgttctgttccattg

SEQ ID NO: 124937 - DNA, 22 bp, synthetic construct
  misc_feature 1..22: note = chemically synthesized
  source 1..22: mol_type = other DNA
tgttctgttccattggtctata

SEQ ID NO: 124938 - DNA, 22 bp, synthetic construct
  misc_feature 1..22: note = chemically synthesized
  source 1..22: mol_type = other DNA
ttctgttccattggtctatatc

SEQ ID NO: 124939 - DNA, 22 bp, synthetic construct
  misc_feature 1..22: note = chemically synthesized
  source 1..22: mol_type = other DNA
tgttccattggtctatatctct

SEQ ID NO: 124940 - DNA, 22 bp, synthetic construct
  misc_feature 1..22: note = chemically synthesized
  source 1..22: mol_type = other DNA
ttccattggtctatatctctgt

SEQ ID NO: 124941 - DNA, 22 bp, synthetic construct
  misc_feature 1..22: note = chemically synthesized
  source 1..22: mol_type = other DNA
cattggtctatatctctgtttt

SEQ ID NO: 124942 - DNA, 22 bp, synthetic construct
  misc_feature 1..22: note = chemically synthesized
  source 1..22: mol_type = other DNA
gtctatatctctgttttggtac

SEQ ID NO: 124943 - DNA, 22 bp, synthetic construct
  misc_feature 1..22: note = chemically synthesized
  source 1..22: mol_type = other DNA
tatctctgttttggtaccagta

SEQ ID NO: 124944 - DNA, 22 bp, synthetic construct
  misc_feature 1..22: note = chemically synthesized
  source 1..22: mol_type = other DNA
tgttttggtaccagtaccatgc

SEQ ID NO: 124945 - DNA, 22 bp, synthetic construct
  misc_feature 1..22: note = chemically synthesized
  source 1..22: mol_type = other DNA
ttttggtaccagtaccatgctg

SEQ ID NO: 124946 - DNA, 22 bp, synthetic construct
  misc_feature 1..22: note = chemically synthesized
  source 1..22: mol_type = other DNA
tggtaccagtaccatgctgttt

SEQ ID NO: 124947 - DNA, 22 bp, synthetic construct
  misc_feature 1..22: note = chemically synthesized
  source 1..22: mol_type = other DNA
ggtaccagtaccatgctgtttt

SEQ ID NO: 124948 - DNA, 22 bp, synthetic construct
  misc_feature 1..22: note = chemically synthesized
  source 1..22: mol_type = other DNA
gtaccagtaccatgctgttttg

SEQ ID NO: 124949 - DNA, 22 bp, synthetic construct
  misc_feature 1..22: note = chemically synthesized
  source 1..22: mol_type = other DNA
ttttggttactgtagccttgta

SEQ ID NO: 124950 - DNA, 22 bp, synthetic construct
  misc_feature 1..22: note = chemically synthesized
  source 1..22: mol_type = other DNA
tggttactgtagccttgtagta

SEQ ID NO: 124951 - DNA, 22 bp, synthetic construct
  misc_feature 1..22: note = chemically synthesized
  source 1..22: mol_type = other DNA
ggttactgtagccttgtagtat

SEQ ID NO: 124952 - DNA, 22 bp, synthetic construct
  misc_feature 1..22: note = chemically synthesized
  source 1..22: mol_type = other DNA
gttactgtagccttgtagtata

SEQ ID NO: 124953 - DNA, 22 bp, synthetic construct
  misc_feature 1..22: note = chemically synthesized
  source 1..22: mol_type = other DNA
ctgtagccttgtagtatagttt

SEQ ID NO: 124954 - DNA, 22 bp, synthetic construct
  misc_feature 1..22: note = chemically synthesized
  source 1..22: mol_type = other DNA
tagccttgtagtatagtttgaa

SEQ ID NO: 124955 - DNA, 22 bp, synthetic construct
  misc_feature 1..22: note = chemically synthesized
  source 1..22: mol_type = other DNA
gtagtatagtttgaagtcaggt

SEQ ID NO: 124956 - DNA, 22 bp, synthetic construct
  misc_feature 1..22: note = chemically synthesized
  source 1..22: mol_type = other DNA
tagtatagtttgaagtcaggta

SEQ ID NO: 124957 - DNA, 22 bp, synthetic construct
  misc_feature 1..22: note = chemically synthesized
  source 1..22: mol_type = other DNA
gaagtcaggtagcgtgatgcct

SEQ ID NO: 124958 - DNA, 22 bp, synthetic construct
  misc_feature 1..22: note = chemically synthesized
  source 1..22: mol_type = other DNA
aagtcaggtagcgtgatgcctc

SEQ ID NO: 124959 - DNA, 22 bp, synthetic construct
  misc_feature 1..22: note = chemically synthesized
  source 1..22: mol_type = other DNA
cagctttgttcttttggcttag

SEQ ID NO: 124960 - DNA, 22 bp, synthetic construct
  misc_feature 1..22: note = chemically synthesized
  source 1..22: mol_type = other DNA
tgttcttttggcttaggattgg

SEQ ID NO: 124961 - DNA, 22 bp, synthetic construct
  misc_feature 1..22: note = chemically synthesized
  source 1..22: mol_type = other DNA
gttcttttggcttaggattggc

SEQ ID NO: 124962 - DNA, 22 bp, synthetic construct
  misc_feature 1..22: note = chemically synthesized
  source 1..22: mol_type = other DNA
ttcttttggcttaggattggca

SEQ ID NO: 124963 - DNA, 22 bp, synthetic construct
  misc_feature 1..22: note = chemically synthesized
  source 1..22: mol_type = other DNA
ttttggcttaggattggcatgt

SEQ ID NO: 124964 - DNA, 22 bp, synthetic construct
  misc_feature 1..22: note = chemically synthesized
  source 1..22: mol_type = other DNA
ttggcttaggattggcatgtca

SEQ ID NO: 124965 - DNA, 22 bp, synthetic construct
  misc_feature 1..22: note = chemically synthesized
  source 1..22: mol_type = other DNA
tggcttaggattggcatgtcaa

SEQ ID NO: 124966 - DNA, 22 bp, synthetic construct
  misc_feature 1..22: note = chemically synthesized
  source 1..22: mol_type = other DNA
ggcttaggattggcatgtcaat

SEQ ID NO: 124967 - DNA, 22 bp, synthetic construct
  misc_feature 1..22: note = chemically synthesized
  source 1..22: mol_type = other DNA
gcttaggattggcatgtcaatg

SEQ ID NO: 124968 - DNA, 22 bp, synthetic construct
  misc_feature 1..22: note = chemically synthesized
  source 1..22: mol_type = other DNA
aggattggcatgtcaatgtggg

SEQ ID NO: 124969 - DNA, 22 bp, synthetic construct
  misc_feature 1..22: note = chemically synthesized
  source 1..22: mol_type = other DNA
ggattggcatgtcaatgtgggc

SEQ ID NO: 124970 - DNA, 22 bp, synthetic construct
  misc_feature 1..22: note = chemically synthesized
  source 1..22: mol_type = other DNA
gcatgtcaatgtgggctctttt

SEQ ID NO: 124971 - DNA, 22 bp, synthetic construct
  misc_feature 1..22: note = chemically synthesized
  source 1..22: mol_type = other DNA
ttttttggttccatatgaactt

SEQ ID NO: 124972 - DNA, 22 bp, synthetic construct
  misc_feature 1..22: note = chemically synthesized
  source 1..22: mol_type = other DNA
ttttggttccatatgaacttta

SEQ ID NO: 124973 - DNA, 22 bp, synthetic construct
  misc_feature 1..22: note = chemically synthesized
  source 1..22: mol_type = other DNA
tttggttccatatgaactttaa

SEQ ID NO: 124974 - DNA, 22 bp, synthetic construct
  misc_feature 1..22: note = chemically synthesized
  source 1..22: mol_type = other DNA
ttggttccatatgaactttaaa

SEQ ID NO: 124975 - DNA, 22 bp, synthetic construct
  misc_feature 1..22: note = chemically synthesized
  source 1..22: mol_type = other DNA
tggttccatatgaactttaaag

SEQ ID NO: 124976 - DNA, 22 bp, synthetic construct
  misc_feature 1..22: note = chemically synthesized
  source 1..22: mol_type = other DNA
ggttccatatgaactttaaagt

SEQ ID NO: 124977 - DNA, 22 bp, synthetic construct
  misc_feature 1..22: note = chemically synthesized
  source 1..22: mol_type = other DNA
gttccatatgaactttaaagta

SEQ ID NO: 124978 - DNA, 22 bp, synthetic construct
  misc_feature 1..22: note = chemically synthesized
  source 1..22: mol_type = other DNA
catatgaactttaaagtagttt

SEQ ID NO: 124979 - DNA, 22 bp, synthetic construct
  misc_feature 1..22: note = chemically synthesized
  source 1..22: mol_type = other DNA
taaagtagttttttccaattct

SEQ ID NO: 124980 - DNA, 22 bp, synthetic construct
  misc_feature 1..22: note = chemically synthesized
  source 1..22: mol_type = other DNA
aaagtagttttttccaattctg

SEQ ID NO: 124981 - DNA, 22 bp, synthetic construct
  misc_feature 1..22: note = chemically synthesized
  source 1..22: mol_type = other DNA
aagtagttttttccaattctgt

SEQ ID NO: 124982 - DNA, 22 bp, synthetic construct
  misc_feature 1..22: note = chemically synthesized
  source 1..22: mol_type = other DNA
tttccaattctgtgaagaaagt

SEQ ID NO: 124983 - DNA, 22 bp, synthetic construct
  misc_feature 1..22: note = chemically synthesized
  source 1..22: mol_type = other DNA
ttccaattctgtgaagaaagtc

SEQ ID NO: 124984 - DNA, 22 bp, synthetic construct
  misc_feature 1..22: note = chemically synthesized
  source 1..22: mol_type = other DNA
tccaattctgtgaagaaagtca

SEQ ID NO: 124985 - DNA, 22 bp, synthetic construct
  misc_feature 1..22: note = chemically synthesized
  source 1..22: mol_type = other DNA
ccaattctgtgaagaaagtcat

SEQ ID NO: 124986 - DNA, 22 bp, synthetic construct
  misc_feature 1..22: note = chemically synthesized
  source 1..22: mol_type = other DNA
caattctgtgaagaaagtcatt

SEQ ID NO: 124987 - DNA, 22 bp, synthetic construct
  misc_feature 1..22: note = chemically synthesized
  source 1..22: mol_type = other DNA
tgtgaagaaagtcattggtagc

SEQ ID NO: 124988 - DNA, 22 bp, synthetic construct
  misc_feature 1..22: note = chemically synthesized
  source 1..22: mol_type = other DNA
tgaagaaagtcattggtagctt

SEQ ID NO: 124989 - DNA, 22 bp, synthetic construct
  misc_feature 1..22: note = chemically synthesized
  source 1..22: mol_type = other DNA
gtagcttgatggggatggcatt

SEQ ID NO: 124990 - DNA, 22 bp, synthetic construct
  misc_feature 1..22: note = chemically synthesized
  source 1..22: mol_type = other DNA
gatggggatggcattgaatcta

SEQ ID NO: 124991 - DNA, 22 bp, synthetic construct
  misc_feature 1..22: note = chemically synthesized
  source 1..22: mol_type = other DNA
atggggatggcattgaatctat

SEQ ID NO: 124992 - DNA, 22 bp, synthetic construct
  misc_feature 1..22: note = chemically synthesized
  source 1..22: mol_type = other DNA
aatctataaattaccttgggct

SEQ ID NO: 124993 - DNA, 22 bp, synthetic construct
  misc_feature 1..22: note = chemically synthesized
  source 1..22: mol_type = other DNA
taaattaccttgggctgtatgg

SEQ ID NO: 124994 - DNA, 22 bp, synthetic construct
  misc_feature 1..22: note = chemically synthesized
  source 1..22: mol_type = other DNA
ccttgggctgtatggccatttt

SEQ ID NO: 124995 - DNA, 22 bp, synthetic construct
  misc_feature 1..22: note = chemically synthesized
  source 1..22: mol_type = other DNA
gggctgtatggccattttcatg

SEQ ID NO: 124996 - DNA, 22 bp, synthetic construct
  misc_feature 1..22: note = chemically synthesized
  source 1..22: mol_type = other DNA
ggctgtatggccattttcatga

SEQ ID NO: 124997 - DNA, 22 bp, synthetic construct
  misc_feature 1..22: note = chemically synthesized
  source 1..22: mol_type = other DNA
tatggccattttcatgatattg

SEQ ID NO: 124998 - DNA, 22 bp, synthetic construct
  misc_feature 1..22: note = chemically synthesized
  source 1..22: mol_type = other DNA
tcatgatattgattcttcctac

SEQ ID NO: 124999 - DNA, 22 bp, synthetic construct
  misc_feature 1..22: note = chemically synthesized
  source 1..22: mol_type = other DNA
catgatattgattcttcctacc

SEQ ID NO: 125000 - DNA, 22 bp, synthetic construct
  misc_feature 1..22: note = chemically synthesized
  source 1..22: mol_type = other DNA
atgatattgattcttcctaccc

SEQ ID NO: 125001 - DNA, 22 bp, synthetic construct
  misc_feature 1..22: note = chemically synthesized
  source 1..22: mol_type = other DNA
attcttcctacccatgagcatg

SEQ ID NO: 125002 - DNA, 22 bp, synthetic construct
  misc_feature 1..22: note = chemically synthesized
  source 1..22: mol_type = other DNA
ttcctacccatgagcatggaat

SEQ ID NO: 125003 - DNA, 22 bp, synthetic construct
  misc_feature 1..22: note = chemically synthesized
  source 1..22: mol_type = other DNA
cctacccatgagcatggaatgt

SEQ ID NO: 125004 - DNA, 22 bp, synthetic construct
  misc_feature 1..22: note = chemically synthesized
  source 1..22: mol_type = other DNA
ctacccatgagcatggaatgtt

SEQ ID NO: 125005 - DNA, 22 bp, synthetic construct
  misc_feature 1..22: note = chemically synthesized
  source 1..22: mol_type = other DNA
cccatgagcatggaatgttctt

SEQ ID NO: 125006 - DNA, 22 bp, synthetic construct
  misc_feature 1..22: note = chemically synthesized
  source 1..22: mol_type = other DNA
ttccatttgtttgtatcttctt

SEQ ID NO: 125007 - DNA, 22 bp, synthetic construct
  misc_feature 1..22: note = chemically synthesized
  source 1..22: mol_type = other DNA
ccatttgtttgtatcttctttt

SEQ ID NO: 125008 - DNA, 22 bp, synthetic construct
  misc_feature 1..22: note = chemically synthesized
  source 1..22: mol_type = other DNA
catttgtttgtatcttctttta

SEQ ID NO: 125009 - DNA, 22 bp, synthetic construct
  misc_feature 1..22: note = chemically synthesized
  source 1..22: mol_type = other DNA
gtttgtatcttcttttatttca

SEQ ID NO: 125010 - DNA, 22 bp, synthetic construct
  misc_feature 1..22: note = chemically synthesized
  source 1..22: mol_type = other DNA
tttgtatcttcttttatttcat

SEQ ID NO: 125011 - DNA, 22 bp, synthetic construct
  misc_feature 1..22: note = chemically synthesized
  source 1..22: mol_type = other DNA
gtatcttcttttatttcattca

SEQ ID NO: 125012 - DNA, 22 bp, synthetic construct
  misc_feature 1..22: note = chemically synthesized
  source 1..22: mol_type = other DNA
tatcttcttttatttcattcag

SEQ ID NO: 125013 - DNA, 22 bp, synthetic construct
  misc_feature 1..22: note = chemically synthesized
  source 1..22: mol_type = other DNA
cttttatttcattcagcagtgg

SEQ ID NO: 125014 - DNA, 22 bp, synthetic construct
  misc_feature 1..22: note = chemically synthesized
  source 1..22: mol_type = other DNA
ttttatttcattcagcagtggt

SEQ ID NO: 125015 - DNA, 22 bp, synthetic construct
  misc_feature 1..22: note = chemically synthesized
  source 1..22: mol_type = other DNA
ttatttcattcagcagtggttt

SEQ ID NO: 125016 - DNA, 22 bp, synthetic construct
  misc_feature 1..22: note = chemically synthesized
  source 1..22: mol_type = other DNA
tatttcattcagcagtggtttg

SEQ ID NO: 125017 - DNA, 22 bp, synthetic construct
  misc_feature 1..22: note = chemically synthesized
  source 1..22: mol_type = other DNA
atttcattcagcagtggtttgt

SEQ ID NO: 125018 - DNA, 22 bp, synthetic construct
  misc_feature 1..22: note = chemically synthesized
  source 1..22: mol_type = other DNA
tttcattcagcagtggtttgta

SEQ ID NO: 125019 - DNA, 22 bp, synthetic construct
  misc_feature 1..22: note = chemically synthesized
  source 1..22: mol_type = other DNA
cattcagcagtggtttgtagtt

SEQ ID NO: 125020 - DNA, 22 bp, synthetic construct
  misc_feature 1..22: note = chemically synthesized
  source 1..22: mol_type = other DNA
attcagcagtggtttgtagttc

SEQ ID NO: 125021 - DNA, 22 bp, synthetic construct
  misc_feature 1..22: note = chemically synthesized
  source 1..22: mol_type = other DNA
agcagtggtttgtagttctcct

SEQ ID NO: 125022 - DNA, 22 bp, synthetic construct
  misc_feature 1..22: note = chemically synthesized
  source 1..22: mol_type = other DNA
gtagttctccttgaagaggtcc

SEQ ID NO: 125023 - DNA, 22 bp, synthetic construct
  misc_feature 1..22: note = chemically synthesized
  source 1..22: mol_type = other DNA
tagttctccttgaagaggtcct

SEQ ID NO: 125024 - DNA, 22 bp, synthetic construct
  misc_feature 1..22: note = chemically synthesized
  source 1..22: mol_type = other DNA
tccttgaagaggtccttcacct

SEQ ID NO: 125025 - DNA, 22 bp, synthetic construct
  misc_feature 1..22: note = chemically synthesized
  source 1..22: mol_type = other DNA
cttgaagaggtccttcacctct

SEQ ID NO: 125026 - DNA, 22 bp, synthetic construct
  misc_feature 1..22: note = chemically synthesized
  source 1..22: mol_type = other DNA
gaagaggtccttcacctctctt

SEQ ID NO: 125027 - DNA, 22 bp, synthetic construct
  misc_feature 1..22: note = chemically synthesized
  source 1..22: mol_type = other DNA
aagaggtccttcacctctcttg

SEQ ID NO: 125028 - DNA, 22 bp, synthetic construct
  misc_feature 1..22: note = chemically synthesized
  source 1..22: mol_type = other DNA
cacctctcttgtaagttggatt

SEQ ID NO: 125029 - DNA, 22 bp, synthetic construct
  misc_feature 1..22: note = chemically synthesized
  source 1..22: mol_type = other DNA
acctctcttgtaagttggattc

SEQ ID NO: 125030 - DNA, 22 bp, synthetic construct
  misc_feature 1..22: note = chemically synthesized
  source 1..22: mol_type = other DNA
tcttgtaagttggattcctagg

SEQ ID NO: 125031 - DNA, 22 bp, synthetic construct
  misc_feature 1..22: note = chemically synthesized
  source 1..22: mol_type = other DNA
ttgtaagttggattcctaggta

SEQ ID NO: 125032 - DNA, 22 bp, synthetic construct
  misc_feature 1..22: note = chemically synthesized
  source 1..22: mol_type = other DNA
gtaagttggattcctaggtatt

SEQ ID NO: 125033 - DNA, 22 bp, synthetic construct
  misc_feature 1..22: note = chemically synthesized
  source 1..22: mol_type = other DNA
taagttggattcctaggtattt

SEQ ID NO: 125034 - DNA, 22 bp, synthetic construct
  misc_feature 1..22: note = chemically synthesized
  source 1..22: mol_type = other DNA
gattcctaggtattttattctc

SEQ ID NO: 125035 - DNA, 22 bp, synthetic construct
  misc_feature 1..22: note = chemically synthesized
  source 1..22: mol_type = other DNA
ctaggtattttattctctttga

SEQ ID NO: 125036 - DNA, 22 bp, synthetic construct
  misc_feature 1..22: note = chemically synthesized
  source 1..22: mol_type = other DNA
ggtattttattctctttgaagc

SEQ ID NO: 125037 - DNA, 22 bp, synthetic construct
  misc_feature 1..22: note = chemically synthesized
  source 1..22: mol_type = other DNA
tattctctttgaagcaattgtg

SEQ ID NO: 125038 - DNA, 22 bp, synthetic construct
  misc_feature 1..22: note = chemically synthesized
  source 1..22: mol_type = other DNA
attctctttgaagcaattgtga

SEQ ID NO: 125039 - DNA, 22 bp, synthetic construct
  misc_feature 1..22: note = chemically synthesized
  source 1..22: mol_type = other DNA
ttctctttgaagcaattgtgaa

SEQ ID NO: 125040 - DNA, 22 bp, synthetic construct
  misc_feature 1..22: note = chemically synthesized
  source 1..22: mol_type = other DNA
tctttgaagcaattgtgaatgg

SEQ ID NO: 125041 - DNA, 22 bp, synthetic construct
  misc_feature 1..22: note = chemically synthesized
  source 1..22: mol_type = other DNA
tttgaagcaattgtgaatggga

SEQ ID NO: 125042 - DNA, 22 bp, synthetic construct
  misc_feature 1..22: note = chemically synthesized
  source 1..22: mol_type = other DNA
tgaagcaattgtgaatgggagt

SEQ ID NO: 125043 - DNA, 22 bp, synthetic construct
  misc_feature 1..22: note = chemically synthesized
  source 1..22: mol_type = other DNA
gaagcaattgtgaatgggagtt

SEQ ID NO: 125044 - DNA, 22 bp, synthetic construct
  misc_feature 1..22: note = chemically synthesized
  source 1..22: mol_type = other DNA
aagcaattgtgaatgggagttc

SEQ ID NO: 125045 - DNA, 22 bp, synthetic construct
  misc_feature 1..22: note = chemically synthesized
  source 1..22: mol_type = other DNA
tgaatgggagttccctcatgat

SEQ ID NO: 125046 - DNA, 22 bp, synthetic construct
  misc_feature 1..22: note = chemically synthesized
  source 1..22: mol_type = other DNA
cctcatgatttggctctctgtt

SEQ ID NO: 125047 - DNA, 22 bp, synthetic construct
  misc_feature 1..22: note = chemically synthesized
  source 1..22: mol_type = other DNA
atgatttggctctctgtttgtc

SEQ ID NO: 125048 - DNA, 22 bp, synthetic construct
  misc_feature 1..22: note = chemically synthesized
  source 1..22: mol_type = other DNA
ggctctctgtttgtctgttatt

SEQ ID NO: 125049 - DNA, 22 bp, synthetic construct
  misc_feature 1..22: note = chemically synthesized
  source 1..22: mol_type = other DNA
gctctctgtttgtctgttattg

SEQ ID NO: 125050 - DNA, 22 bp, synthetic construct
  misc_feature 1..22: note = chemically synthesized
  source 1..22: mol_type = other DNA
tctgtttgtctgttattggtgt

SEQ ID NO: 125051 - DNA, 22 bp, synthetic construct
  misc_feature 1..22: note = chemically synthesized
  source 1..22: mol_type = other DNA
tgtttgtctgttattggtgtat

SEQ ID NO: 125052 - DNA, 22 bp, synthetic construct
  misc_feature 1..22: note = chemically synthesized
  source 1..22: mol_type = other DNA
tttgtctgttattggtgtataa

SEQ ID NO: 125053 - DNA, 22 bp, synthetic construct
  misc_feature 1..22: note = chemically synthesized
  source 1..22: mol_type = other DNA
gtctgttattggtgtataagaa

SEQ ID NO: 125054 - DNA, 22 bp, synthetic construct
  misc_feature 1..22: note = chemically synthesized
  source 1..22: mol_type = other DNA
tctgttattggtgtataagaat

SEQ ID NO: 125055 - DNA, 22 bp, synthetic construct
  misc_feature 1..22: note = chemically synthesized
  source 1..22: mol_type = other DNA
ttattggtgtataagaatgctt

SEQ ID NO: 125056 - DNA, 22 bp, synthetic construct
  misc_feature 1..22: note = chemically synthesized
  source 1..22: mol_type = other DNA
ttggtgtataagaatgcttgtg

SEQ ID NO: 125057 - DNA, 22 bp, synthetic construct
  misc_feature 1..22: note = chemically synthesized
  source 1..22: mol_type = other DNA
gtgtataagaatgcttgtgatt

SEQ ID NO: 125058 - DNA, 22 bp, synthetic construct
  misc_feature 1..22: note = chemically synthesized
  source 1..22: mol_type = other DNA
gtgatttttgcacattgatttt

SEQ ID NO: 125059 - DNA, 22 bp, synthetic construct
  misc_feature 1..22: note = chemically synthesized
  source 1..22: mol_type = other DNA
tgatttttgcacattgattttg

SEQ ID NO: 125060 - DNA, 22 bp, synthetic construct
  misc_feature 1..22: note = chemically synthesized
  source 1..22: mol_type = other DNA
ttgcacattgattttgtatcct

SEQ ID NO: 125061 - DNA, 22 bp, synthetic construct
  misc_feature 1..22: note = chemically synthesized
  source 1..22: mol_type = other DNA
tgcacattgattttgtatcctg

SEQ ID NO: 125062 - DNA, 22 bp, synthetic construct
  misc_feature 1..22: note = chemically synthesized
  source 1..22: mol_type = other DNA
gcacattgattttgtatcctga

SEQ ID NO: 125063 - DNA, 22 bp, synthetic construct
  misc_feature 1..22: note = chemically synthesized
  source 1..22: mol_type = other DNA
cacattgattttgtatcctgag

SEQ ID NO: 125064 - DNA, 22 bp, synthetic construct
  misc_feature 1..22: note = chemically synthesized
  source 1..22: mol_type = other DNA
attttgtatcctgagactttgc

SEQ ID NO: 125065 - DNA, 22 bp, synthetic construct
  misc_feature 1..22: note = chemically synthesized
  source 1..22: mol_type = other DNA
tgtatcctgagactttgctgaa

SEQ ID NO: 125066 - DNA, 22 bp, synthetic construct
  misc_feature 1..22: note = chemically synthesized
  source 1..22: mol_type = other DNA
gtatcctgagactttgctgaag

SEQ ID NO: 125067 - DNA, 22 bp, synthetic construct
  misc_feature 1..22: note = chemically synthesized
  source 1..22: mol_type = other DNA
tatcctgagactttgctgaagt

SEQ ID NO: 125068 - DNA, 22 bp, synthetic construct
  misc_feature 1..22: note = chemically synthesized
  source 1..22: mol_type = other DNA
agactttgctgaagttgcctat

SEQ ID NO: 125069 - DNA, 22 bp, synthetic construct
  misc_feature 1..22: note = chemically synthesized
  source 1..22: mol_type = other DNA
tgctgaagttgcctatcagttt

SEQ ID NO: 125070 - DNA, 22 bp, synthetic construct
  misc_feature 1..22: note = chemically synthesized
  source 1..22: mol_type = other DNA
gctgaagttgcctatcagttta

SEQ ID NO: 125071 - DNA, 22 bp, synthetic construct
  misc_feature 1..22: note = chemically synthesized
  source 1..22: mol_type = other DNA
ctgaagttgcctatcagtttaa

SEQ ID NO: 125072 - DNA, 22 bp, synthetic construct
  misc_feature 1..22: note = chemically synthesized
  source 1..22: mol_type = other DNA
aagttgcctatcagtttaagga

SEQ ID NO: 125073 - DNA, 22 bp, synthetic construct
  misc_feature 1..22: note = chemically synthesized
  source 1..22: mol_type = other DNA
cctatcagtttaaggacatttt

SEQ ID NO: 125074 - DNA, 22 bp, synthetic construct
  misc_feature 1..22: note = chemically synthesized
  source 1..22: mol_type = other DNA
tcagtttaaggacattttgggc

SEQ ID NO: 125075 - DNA, 22 bp, synthetic construct
  misc_feature 1..22: note = chemically synthesized
  source 1..22: mol_type = other DNA
aaggacattttgggctgagaca

SEQ ID NO: 125076 - DNA, 22 bp, synthetic construct
  misc_feature 1..22: note = chemically synthesized
  source 1..22: mol_type = other DNA
aggacattttgggctgagacag

SEQ ID NO: 125077 - DNA, 22 bp, synthetic construct
  misc_feature 1..22: note = chemically synthesized
  source 1..22: mol_type = other DNA
tgggctgagacagtggggtttt

SEQ ID NO: 125078 - DNA, 22 bp, synthetic construct
  misc_feature 1..22: note = chemically synthesized
  source 1..22: mol_type = other DNA
gggctgagacagtggggttttc

SEQ ID NO: 125079 - DNA, 22 bp, synthetic construct
  misc_feature 1..22: note = chemically synthesized
  source 1..22: mol_type = other DNA
ggctgagacagtggggttttct

SEQ ID NO: 125080 - DNA, 22 bp, synthetic construct
  misc_feature 1..22: note = chemically synthesized
  source 1..22: mol_type = other DNA
agacagtggggttttctagata

SEQ ID NO: 125081 - DNA, 22 bp, synthetic construct
  misc_feature 1..22: note = chemically synthesized
  source 1..22: mol_type = other DNA
tctagatatacaatcgtgtcat

SEQ ID NO: 125082 - DNA, 22 bp, synthetic construct
  misc_feature 1..22: note = chemically synthesized
  source 1..22: mol_type = other DNA
ctagatatacaatcgtgtcatc

SEQ ID NO: 125083 - DNA, 22 bp, synthetic construct
  misc_feature 1..22: note = chemically synthesized
  source 1..22: mol_type = other DNA
tagatatacaatcgtgtcatct

SEQ ID NO: 125084 - DNA, 22 bp, synthetic construct
  misc_feature 1..22: note = chemically synthesized
  source 1..22: mol_type = other DNA
gatatacaatcgtgtcatctgc

SEQ ID NO: 125085 - DNA, 22 bp, synthetic construct
  misc_feature 1..22: note = chemically synthesized
  source 1..22: mol_type = other DNA
caaacagggacaatttgacttc

SEQ ID NO: 125086 - DNA, 22 bp, synthetic construct
  misc_feature 1..22: note = chemically synthesized
  source 1..22: mol_type = other DNA
gacttcctcttttcctaattga

SEQ ID NO: 125087 - DNA, 22 bp, synthetic construct
  misc_feature 1..22: note = chemically synthesized
  source 1..22: mol_type = other DNA
acttcctcttttcctaattgaa

SEQ ID NO: 125088 - DNA, 22 bp, synthetic construct
  misc_feature 1..22: note = chemically synthesized
  source 1..22: mol_type = other DNA
cctcttttcctaattgaatacc

SEQ ID NO: 125089 - DNA, 22 bp, synthetic construct
  misc_feature 1..22: note = chemically synthesized
  source 1..22: mol_type = other DNA
ctcttttcctaattgaatacct

SEQ ID NO: 125090 - DNA, 22 bp, synthetic construct
  misc_feature 1..22: note = chemically synthesized
  source 1..22: mol_type = other DNA
ttttcctaattgaatacctttt

SEQ ID NO: 125091 - DNA, 22 bp, synthetic construct
  misc_feature 1..22: note = chemically synthesized
  source 1..22: mol_type = other DNA
ttcctaattgaatacctttttt

SEQ ID NO: 125092 - DNA, 22 bp, synthetic construct
  misc_feature 1..22: note = chemically synthesized
  source 1..22: mol_type = other DNA
tcctaattgaataccttttttt

SEQ ID NO: 125093 - DNA, 22 bp, synthetic construct
  misc_feature 1..22: note = chemically synthesized
  source 1..22: mol_type = other DNA
cctaattgaatacctttttttc

SEQ ID NO: 125094 - DNA, 22 bp, synthetic construct
  misc_feature 1..22: note = chemically synthesized
  source 1..22: mol_type = other DNA
ctaattgaatacctttttttcc

SEQ ID NO: 125095 - DNA, 22 bp, synthetic construct
  misc_feature 1..22: note = chemically synthesized
  source 1..22: mol_type = other DNA
attgaatacctttttttccttc

SEQ ID NO: 125096 - DNA, 22 bp, synthetic construct
  misc_feature 1..22: note = chemically synthesized
  source 1..22: mol_type = other DNA
aatacctttttttccttctcct

SEQ ID NO: 125097 - DNA, 22 bp, synthetic construct
  misc_feature 1..22: note = chemically synthesized
  source 1..22: mol_type = other DNA
tttttccttctcctgcctaatt

SEQ ID NO: 125098 - DNA, 22 bp, synthetic construct
  misc_feature 1..22: note = chemically synthesized
  source 1..22: mol_type = other DNA
ttttccttctcctgcctaattg

SEQ ID NO: 125099 - DNA, 22 bp, synthetic construct
  misc_feature 1..22: note = chemically synthesized
  source 1..22: mol_type = other DNA
tttccttctcctgcctaattgc

SEQ ID NO: 125100 - DNA, 22 bp, synthetic construct
  misc_feature 1..22: note = chemically synthesized
  source 1..22: mol_type = other DNA
ttccttctcctgcctaattgcc

SEQ ID NO: 125101 - DNA, 22 bp, synthetic construct
  misc_feature 1..22: note = chemically synthesized
  source 1..22: mol_type = other DNA
tccttctcctgcctaattgccc

SEQ ID NO: 125102 - DNA, 22 bp, synthetic construct
  misc_feature 1..22: note = chemically synthesized
  source 1..22: mol_type = other DNA
ccttctcctgcctaattgccct

SEQ ID NO: 125103 - DNA, 22 bp, synthetic construct
  misc_feature 1..22: note = chemically synthesized
  source 1..22: mol_type = other DNA
cttctcctgcctaattgccctg

SEQ ID NO: 125104 - DNA, 22 bp, synthetic construct
  misc_feature 1..22: note = chemically synthesized
  source 1..22: mol_type = other DNA
ctcctgcctaattgccctggcc

SEQ ID NO: 125105 - DNA, 22 bp, synthetic construct
  misc_feature 1..22: note = chemically synthesized
  source 1..22: mol_type = other DNA
tcctgcctaattgccctggcca

SEQ ID NO: 125106 - DNA, 22 bp, synthetic construct
  misc_feature 1..22: note = chemically synthesized
  source 1..22: mol_type = other DNA
ctgcctaattgccctggccaga

SEQ ID NO: 125107 - DNA, 22 bp, synthetic construct
  misc_feature 1..22: note = chemically synthesized
  source 1..22: mol_type = other DNA
cctaattgccctggccagaaat

SEQ ID NO: 125108 - DNA, 22 bp, synthetic construct
  misc_feature 1..22: note = chemically synthesized
  source 1..22: mol_type = other DNA
attgccctggccagaaattcca

SEQ ID NO: 125109 - DNA, 22 bp, synthetic construct
  misc_feature 1..22: note = chemically synthesized
  source 1..22: mol_type = other DNA
ccctggccagaaattccaacac

SEQ ID NO: 125110 - DNA, 22 bp, synthetic construct
  misc_feature 1..22: note = chemically synthesized
  source 1..22: mol_type = other DNA
gccagaaattccaacactatgt

SEQ ID NO: 125111 - DNA, 22 bp, synthetic construct
  misc_feature 1..22: note = chemically synthesized
  source 1..22: mol_type = other DNA
caacactatgttgaataggagt

SEQ ID NO: 125112 - DNA, 22 bp, synthetic construct
  misc_feature 1..22: note = chemically synthesized
  source 1..22: mol_type = other DNA
tgttgaataggagtagtgagag

SEQ ID NO: 125113 - DNA, 22 bp, synthetic construct
  misc_feature 1..22: note = chemically synthesized
  source 1..22: mol_type = other DNA
aataggagtagtgagagagggc

SEQ ID NO: 125114 - DNA, 22 bp, synthetic construct
  misc_feature 1..22: note = chemically synthesized
  source 1..22: mol_type = other DNA
tcttgtgccagttttcaaaggg

SEQ ID NO: 125115 - DNA, 22 bp, synthetic construct
  misc_feature 1..22: note = chemically synthesized
  source 1..22: mol_type = other DNA
gtgccagttttcaaagggaatg

SEQ ID NO: 125116 - DNA, 22 bp, synthetic construct
  misc_feature 1..22: note = chemically synthesized
  source 1..22: mol_type = other DNA
tgccagttttcaaagggaatgc

SEQ ID NO: 125117 - DNA, 22 bp, synthetic construct
  misc_feature 1..22: note = chemically synthesized
  source 1..22: mol_type = other DNA
tcaaagggaatgcttccagttt

SEQ ID NO: 125118 - DNA, 22 bp, synthetic construct
  misc_feature 1..22: note = chemically synthesized
  source 1..22: mol_type = other DNA
caaagggaatgcttccagtttt

SEQ ID NO: 125119 - DNA, 22 bp, synthetic construct
  misc_feature 1..22: note = chemically synthesized
  source 1..22: mol_type = other DNA
aaagggaatgcttccagttttt

SEQ ID NO: 125120 - DNA, 22 bp, synthetic construct
  misc_feature 1..22: note = chemically synthesized
  source 1..22: mol_type = other DNA
ccagtttttgtccattcagtat

SEQ ID NO: 125121 - DNA, 22 bp, synthetic construct
  misc_feature 1..22: note = chemically synthesized
  source 1..22: mol_type = other DNA
cagtttttgtccattcagtatg

SEQ ID NO: 125122 - DNA, 22 bp, synthetic construct
  misc_feature 1..22: note = chemically synthesized
  source 1..22: mol_type = other DNA
ttgtccattcagtatgatattg

SEQ ID NO: 125123 - DNA, 22 bp, synthetic construct
  misc_feature 1..22: note = chemically synthesized
  source 1..22: mol_type = other DNA
tgtccattcagtatgatattgg

SEQ ID NO: 125124 - DNA, 22 bp, synthetic construct
  misc_feature 1..22: note = chemically synthesized
  source 1..22: mol_type = other DNA
gtccattcagtatgatattggc

SEQ ID NO: 125125 - DNA, 22 bp, synthetic construct
  misc_feature 1..22: note = chemically synthesized
  source 1..22: mol_type = other DNA
tccattcagtatgatattggct

SEQ ID NO: 125126 - DNA, 22 bp, synthetic construct
  misc_feature 1..22: note = chemically synthesized
  source 1..22: mol_type = other DNA
agtatgatattggctgtgggtt

SEQ ID NO: 125127 - DNA, 22 bp, synthetic construct
  misc_feature 1..22: note = chemically synthesized
  source 1..22: mol_type = other DNA
gctgtgggtttgtcatagatgg

SEQ ID NO: 125128 - DNA, 22 bp, synthetic construct
  misc_feature 1..22: note = chemically synthesized
  source 1..22: mol_type = other DNA
tgggtttgtcatagatggctct

SEQ ID NO: 125129 - DNA, 22 bp, synthetic construct
  misc_feature 1..22: note = chemically synthesized
  source 1..22: mol_type = other DNA
gtcatagatggctcttattatt

SEQ ID NO: 125130 - DNA, 22 bp, synthetic construct
  misc_feature 1..22: note = chemically synthesized
  source 1..22: mol_type = other DNA
tcatagatggctcttattattt

SEQ ID NO: 125131 - DNA, 22 bp, synthetic construct
  misc_feature 1..22: note = chemically synthesized
  source 1..22: mol_type = other DNA
ttattattttgagatacgtccc

SEQ ID NO: 125132 - DNA, 22 bp, synthetic construct
  misc_feature 1..22: note = chemically synthesized
  source 1..22: mol_type = other DNA
attattttgagatacgtcccat

SEQ ID NO: 125133 - DNA, 22 bp, synthetic construct
  misc_feature 1..22: note = chemically synthesized
  source 1..22: mol_type = other DNA
ttattttgagatacgtcccatc

SEQ ID NO: 125134 - DNA, 22 bp, synthetic construct
  misc_feature 1..22: note = chemically synthesized
  source 1..22: mol_type = other DNA
ttttgagatacgtcccatcaat

SEQ ID NO: 125135 - DNA, 22 bp, synthetic construct
  misc_feature 1..22: note = chemically synthesized
  source 1..22: mol_type = other DNA
tgagatacgtcccatcaatacc

SEQ ID NO: 125136 - DNA, 22 bp, synthetic construct
  misc_feature 1..22: note = chemically synthesized
  source 1..22: mol_type = other DNA
gagatacgtcccatcaatacct

SEQ ID NO: 125137 - DNA, 22 bp, synthetic construct
  misc_feature 1..22: note = chemically synthesized
  source 1..22: mol_type = other DNA
agatacgtcccatcaataccta

SEQ ID NO: 125138 - DNA, 22 bp, synthetic construct
  misc_feature 1..22: note = chemically synthesized
  source 1..22: mol_type = other DNA
atttattgagagtttttagcat

SEQ ID NO: 125139 - DNA, 22 bp, synthetic construct
  misc_feature 1..22: note = chemically synthesized
  source 1..22: mol_type = other DNA
attgagagtttttagcatgaag

SEQ ID NO: 125140 - DNA, 22 bp, synthetic construct
  misc_feature 1..22: note = chemically synthesized
  source 1..22: mol_type = other DNA
ttgagagtttttagcatgaagg

SEQ ID NO: 125141 - DNA, 22 bp, synthetic construct
  misc_feature 1..22: note = chemically synthesized
  source 1..22: mol_type = other DNA
agagtttttagcatgaagggtt

SEQ ID NO: 125142 - DNA, 22 bp, synthetic construct
  misc_feature 1..22: note = chemically synthesized
  source 1..22: mol_type = other DNA
ttagcatgaagggttgttgaat

SEQ ID NO: 125143 - DNA, 22 bp, synthetic construct
  misc_feature 1..22: note = chemically synthesized
  source 1..22: mol_type = other DNA
tagcatgaagggttgttgaatt

SEQ ID NO: 125144 - DNA, 22 bp, synthetic construct
  misc_feature 1..22: note = chemically synthesized
  source 1..22: mol_type = other DNA
agcatgaagggttgttgaattt

SEQ ID NO: 125145 - DNA, 22 bp, synthetic construct
  misc_feature 1..22: note = chemically synthesized
  source 1..22: mol_type = other DNA
gcatgaagggttgttgaatttt

SEQ ID NO: 125146 - DNA, 22 bp, synthetic construct
  misc_feature 1..22: note = chemically synthesized
  source 1..22: mol_type = other DNA
ttgaattttgtcaaaggccttt

SEQ ID NO: 125147 - DNA, 22 bp, synthetic construct
  misc_feature 1..22: note = chemically synthesized
  source 1..22: mol_type = other DNA
aattttgtcaaaggccttttct

SEQ ID NO: 125148 - DNA, 22 bp, synthetic construct
  misc_feature 1..22: note = chemically synthesized
  source 1..22: mol_type = other DNA
tgtcaaaggccttttctgcatc

SEQ ID NO: 125149 - DNA, 22 bp, synthetic construct
  misc_feature 1..22: note = chemically synthesized
  source 1..22: mol_type = other DNA
gtcaaaggccttttctgcatct

SEQ ID NO: 125150 - DNA, 22 bp, synthetic construct
  misc_feature 1..22: note = chemically synthesized
  source 1..22: mol_type = other DNA
tcaaaggccttttctgcatcta

SEQ ID NO: 125151 - DNA, 22 bp, synthetic construct
  misc_feature 1..22: note = chemically synthesized
  source 1..22: mol_type = other DNA
ttctgcatctattgagataatc

SEQ ID NO: 125152 - DNA, 22 bp, synthetic construct
  misc_feature 1..22: note = chemically synthesized
  source 1..22: mol_type = other DNA
tctgcatctattgagataatca

SEQ ID NO: 125153 - DNA, 22 bp, synthetic construct
  misc_feature 1..22: note = chemically synthesized
  source 1..22: mol_type = other DNA
ctgcatctattgagataatcat

SEQ ID NO: 125154 - DNA, 22 bp, synthetic construct
  misc_feature 1..22: note = chemically synthesized
  source 1..22: mol_type = other DNA
tgcatctattgagataatcatg

SEQ ID NO: 125155 - DNA, 22 bp, synthetic construct
  misc_feature 1..22: note = chemically synthesized
  source 1..22: mol_type = other DNA
catctattgagataatcatgtg

SEQ ID NO: 125156 - DNA, 22 bp, synthetic construct
  misc_feature 1..22: note = chemically synthesized
  source 1..22: mol_type = other DNA
ttgagataatcatgtggttttt

SEQ ID NO: 125157 - DNA, 22 bp, synthetic construct
  misc_feature 1..22: note = chemically synthesized
  source 1..22: mol_type = other DNA
agataatcatgtggtttttgtc

SEQ ID NO: 125158 - DNA, 22 bp, synthetic construct
  misc_feature 1..22: note = chemically synthesized
  source 1..22: mol_type = other DNA
ttgtctttggttctgtttatat

SEQ ID NO: 125159 - DNA, 22 bp, synthetic construct
  misc_feature 1..22: note = chemically synthesized
  source 1..22: mol_type = other DNA
tgtctttggttctgtttatatg

SEQ ID NO: 125160 - DNA, 22 bp, synthetic construct
  misc_feature 1..22: note = chemically synthesized
  source 1..22: mol_type = other DNA
gtctttggttctgtttatatgc

SEQ ID NO: 125161 - DNA, 22 bp, synthetic construct
  misc_feature 1..22: note = chemically synthesized
  source 1..22: mol_type = other DNA
tctttggttctgtttatatgct

SEQ ID NO: 125162 - DNA, 22 bp, synthetic construct
  misc_feature 1..22: note = chemically synthesized
  source 1..22: mol_type = other DNA
tggttctgtttatatgctggat

SEQ ID NO: 125163 - DNA, 22 bp, synthetic construct
  misc_feature 1..22: note = chemically synthesized
  source 1..22: mol_type = other DNA
ggttctgtttatatgctggatt

SEQ ID NO: 125164 - DNA, 22 bp, synthetic construct
  misc_feature 1..22: note = chemically synthesized
  source 1..22: mol_type = other DNA
gttctgtttatatgctggatta

SEQ ID NO: 125165 - DNA, 22 bp, synthetic construct
  misc_feature 1..22: note = chemically synthesized
  source 1..22: mol_type = other DNA
tgtttatatgctggattacatt

SEQ ID NO: 125166 - DNA, 22 bp, synthetic construct
  misc_feature 1..22: note = chemically synthesized
  source 1..22: mol_type = other DNA
tttatatgctggattacattta

SEQ ID NO: 125167 - DNA, 22 bp, synthetic construct
  misc_feature 1..22: note = chemically synthesized
  source 1..22: mol_type = other DNA
atatgctggattacatttattg

SEQ ID NO: 125168 - DNA, 22 bp, synthetic construct
  misc_feature 1..22: note = chemically synthesized
  source 1..22: mol_type = other DNA
tatgctggattacatttattga

SEQ ID NO: 125169 - DNA, 22 bp, synthetic construct
  misc_feature 1..22: note = chemically synthesized
  source 1..22: mol_type = other DNA
gattacatttattgatttgcat

SEQ ID NO: 125170 - DNA, 22 bp, synthetic construct
  misc_feature 1..22: note = chemically synthesized
  source 1..22: mol_type = other DNA
catttattgatttgcatatgtt

SEQ ID NO: 125171 - DNA, 22 bp, synthetic construct
  misc_feature 1..22: note = chemically synthesized
  source 1..22: mol_type = other DNA
attgatttgcatatgttgaacc

SEQ ID NO: 125172 - DNA, 22 bp, synthetic construct
  misc_feature 1..22: note = chemically synthesized
  source 1..22: mol_type = other DNA
ttgatttgcatatgttgaacca

SEQ ID NO: 125173 - DNA, 22 bp, synthetic construct
  misc_feature 1..22: note = chemically synthesized
  source 1..22: mol_type = other DNA
atttgcatatgttgaaccagcc

SEQ ID NO: 125174 - DNA, 22 bp, synthetic construct
  misc_feature 1..22: note = chemically synthesized
  source 1..22: mol_type = other DNA
gcatatgttgaaccagccttgc

SEQ ID NO: 125175 - DNA, 22 bp, synthetic construct
  misc_feature 1..22: note = chemically synthesized
  source 1..22: mol_type = other DNA
catatgttgaaccagccttgca

SEQ ID NO: 125176 - DNA, 22 bp, synthetic construct
  misc_feature 1..22: note = chemically synthesized
  source 1..22: mol_type = other DNA
aaccagccttgcatcccaggga

SEQ ID NO: 125177 - DNA, 22 bp, synthetic construct
  misc_feature 1..22: note = chemically synthesized
  source 1..22: mol_type = other DNA
gcatcccagggatgaagcccac

SEQ ID NO: 125178 - DNA, 22 bp, synthetic construct
  misc_feature 1..22: note = chemically synthesized
  source 1..22: mol_type = other DNA
catcccagggatgaagcccact

SEQ ID NO: 125179 - DNA, 22 bp, synthetic construct
  misc_feature 1..22: note = chemically synthesized
  source 1..22: mol_type = other DNA
gatcatggtggataagcttttg

SEQ ID NO: 125180 - DNA, 22 bp, synthetic construct
  misc_feature 1..22: note = chemically synthesized
  source 1..22: mol_type = other DNA
atcatggtggataagcttttgg

SEQ ID NO: 125181 - DNA, 22 bp, synthetic construct
  misc_feature 1..22: note = chemically synthesized
  source 1..22: mol_type = other DNA
ttggatgtgctgctggatttgc

SEQ ID NO: 125182 - DNA, 22 bp, synthetic construct
  misc_feature 1..22: note = chemically synthesized
  source 1..22: mol_type = other DNA
tggatgtgctgctggatttgct

SEQ ID NO: 125183 - DNA, 22 bp, synthetic construct
  misc_feature 1..22: note = chemically synthesized
  source 1..22: mol_type = other DNA
ggatgtgctgctggatttgctt

SEQ ID NO: 125184 - DNA, 22 bp, synthetic construct
  misc_feature 1..22: note = chemically synthesized
  source 1..22: mol_type = other DNA
gatgtgctgctggatttgcttt

SEQ ID NO: 125185 - DNA, 22 bp, synthetic construct
  misc_feature 1..22: note = chemically synthesized
  source 1..22: mol_type = other DNA
ctggatttgctttgccagtatt

SEQ ID NO: 125186 - DNA, 22 bp, synthetic construct
  misc_feature 1..22: note = chemically synthesized
  source 1..22: mol_type = other DNA
gatttgctttgccagtatttta

SEQ ID NO: 125187 - DNA, 22 bp, synthetic construct
  misc_feature 1..22: note = chemically synthesized
  source 1..22: mol_type = other DNA
gctttgccagtattttattgag

SEQ ID NO: 125188 - DNA, 22 bp, synthetic construct
  misc_feature 1..22: note = chemically synthesized
  source 1..22: mol_type = other DNA
ctttgccagtattttattgagg

SEQ ID NO: 125189 - DNA, 22 bp, synthetic construct
  misc_feature 1..22: note = chemically synthesized
  source 1..22: mol_type = other DNA
tgccagtattttattgaggttt

SEQ ID NO: 125190 - DNA, 22 bp, synthetic construct
  misc_feature 1..22: note = chemically synthesized
  source 1..22: mol_type = other DNA
gccagtattttattgaggtttt

SEQ ID NO: 125191 - DNA, 22 bp, synthetic construct
  misc_feature 1..22: note = chemically synthesized
  source 1..22: mol_type = other DNA
ccagtattttattgaggttttt

SEQ ID NO: 125192 - DNA, 22 bp, synthetic construct
  misc_feature 1..22: note = chemically synthesized
  source 1..22: mol_type = other DNA
tattgaggttttttgcatcgat

SEQ ID NO: 125193 - DNA, 22 bp, synthetic construct
  misc_feature 1..22: note = chemically synthesized
  source 1..22: mol_type = other DNA
attgaggttttttgcatcgatg

SEQ ID NO: 125194 - DNA, 22 bp, synthetic construct
  misc_feature 1..22: note = chemically synthesized
  source 1..22: mol_type = other DNA
ttgaggttttttgcatcgatgt

SEQ ID NO: 125195 - DNA, 22 bp, synthetic construct
  misc_feature 1..22: note = chemically synthesized
  source 1..22: mol_type = other DNA
aggttttttgcatcgatgtcca

SEQ ID NO: 125196 - DNA, 22 bp, synthetic construct
  misc_feature 1..22: note = chemically synthesized
  source 1..22: mol_type = other DNA
tttgcatcgatgtccatcaggg

SEQ ID NO: 125197 - DNA, 22 bp, synthetic construct
  misc_feature 1..22: note = chemically synthesized
  source 1..22: mol_type = other DNA
ttgcatcgatgtccatcaggga

SEQ ID NO: 125198 - DNA, 22 bp, synthetic construct
  misc_feature 1..22: note = chemically synthesized
  source 1..22: mol_type = other DNA
tgcatcgatgtccatcagggat

SEQ ID NO: 125199 - DNA, 22 bp, synthetic construct
  misc_feature 1..22: note = chemically synthesized
  source 1..22: mol_type = other DNA
gcatcgatgtccatcagggata

SEQ ID NO: 125200 - DNA, 22 bp, synthetic construct
  misc_feature 1..22: note = chemically synthesized
  source 1..22: mol_type = other DNA
catcgatgtccatcagggatat

SEQ ID NO: 125201 - DNA, 22 bp, synthetic construct
  misc_feature 1..22: note = chemically synthesized
  source 1..22: mol_type = other DNA
gtctaaaattctctttttttgt

SEQ ID NO: 125202 - DNA, 22 bp, synthetic construct
  misc_feature 1..22: note = chemically synthesized
  source 1..22: mol_type = other DNA
aaattctctttttttgttgtgt

SEQ ID NO: 125203 - DNA, 22 bp, synthetic construct
  misc_feature 1..22: note = chemically synthesized
  source 1..22: mol_type = other DNA
tctttttttgttgtgtctctgc

SEQ ID NO: 125204 - DNA, 22 bp, synthetic construct
  misc_feature 1..22: note = chemically synthesized
  source 1..22: mol_type = other DNA
tttttttgttgtgtctctgccc

SEQ ID NO: 125205 - DNA, 22 bp, synthetic construct
  misc_feature 1..22: note = chemically synthesized
  source 1..22: mol_type = other DNA
tttttgttgtgtctctgcccgg

SEQ ID NO: 125206 - DNA, 22 bp, synthetic construct
  misc_feature 1..22: note = chemically synthesized
  source 1..22: mol_type = other DNA
ttttgttgtgtctctgcccggc

SEQ ID NO: 125207 - DNA, 22 bp, synthetic construct
  misc_feature 1..22: note = chemically synthesized
  source 1..22: mol_type = other DNA
tttgttgtgtctctgcccggct

SEQ ID NO: 125208 - DNA, 22 bp, synthetic construct
  misc_feature 1..22: note = chemically synthesized
  source 1..22: mol_type = other DNA
ttgttgtgtctctgcccggctt

SEQ ID NO: 125209 - DNA, 22 bp, synthetic construct
  misc_feature 1..22: note = chemically synthesized
  source 1..22: mol_type = other DNA
tgttgtgtctctgcccggcttt

SEQ ID NO: 125210 - DNA, 22 bp, synthetic construct
  misc_feature 1..22: note = chemically synthesized
  source 1..22: mol_type = other DNA
gttgtgtctctgcccggctttg

SEQ ID NO: 125211 - DNA, 22 bp, synthetic construct
  misc_feature 1..22: note = chemically synthesized
  source 1..22: mol_type = other DNA
ttgtgtctctgcccggctttgg

SEQ ID NO: 125212 - DNA, 22 bp, synthetic construct
  misc_feature 1..22: note = chemically synthesized
  source 1..22: mol_type = other DNA
tgtctctgcccggctttggtat

SEQ ID NO: 125213 - DNA, 22 bp, synthetic construct
  misc_feature 1..22: note = chemically synthesized
  source 1..22: mol_type = other DNA
tgcccggctttggtatcaggat

SEQ ID NO: 125214 - DNA, 22 bp, synthetic construct
  misc_feature 1..22: note = chemically synthesized
  source 1..22: mol_type = other DNA
cccggctttggtatcaggatga

SEQ ID NO: 125215 - DNA, 22 bp, synthetic construct
  misc_feature 1..22: note = chemically synthesized
  source 1..22: mol_type = other DNA
tggtatcaggatgatgctggcc

SEQ ID NO: 125216 - DNA, 22 bp, synthetic construct
  misc_feature 1..22: note = chemically synthesized
  source 1..22: mol_type = other DNA
ggtatcaggatgatgctggcct

SEQ ID NO: 125217 - DNA, 22 bp, synthetic construct
  misc_feature 1..22: note = chemically synthesized
  source 1..22: mol_type = other DNA
gtatcaggatgatgctggcctc

SEQ ID NO: 125218 - DNA, 22 bp, synthetic construct
  misc_feature 1..22: note = chemically synthesized
  source 1..22: mol_type = other DNA
gcctcataaaatgagttaggga

SEQ ID NO: 125219 - DNA, 22 bp, synthetic construct
  misc_feature 1..22: note = chemically synthesized
  source 1..22: mol_type = other DNA
ataaaatgagttagggaggatt

SEQ ID NO: 125220 - DNA, 22 bp, synthetic construct
  misc_feature 1..22: note = chemically synthesized
  source 1..22: mol_type = other DNA
gggaggattccctcttttacta

SEQ ID NO: 125221 - DNA, 22 bp, synthetic construct
  misc_feature 1..22: note = chemically synthesized
  source 1..22: mol_type = other DNA
cctcttttactattgattcgaa

SEQ ID NO: 125222 - DNA, 22 bp, synthetic construct
  misc_feature 1..22: note = chemically synthesized
  source 1..22: mol_type = other DNA
ttttactattgattcgaatagt

SEQ ID NO: 125223 - DNA, 22 bp, synthetic construct
  misc_feature 1..22: note = chemically synthesized
  source 1..22: mol_type = other DNA
ttactattgattcgaatagttt

SEQ ID NO: 125224 - DNA, 22 bp, synthetic construct
  misc_feature 1..22: note = chemically synthesized
  source 1..22: mol_type = other DNA
tactattgattcgaatagtttc

SEQ ID NO: 125225 - DNA, 22 bp, synthetic construct
  misc_feature 1..22: note = chemically synthesized
  source 1..22: mol_type = other DNA
actattgattcgaatagtttca

SEQ ID NO: 125226 - DNA, 22 bp, synthetic construct
  misc_feature 1..22: note = chemically synthesized
  source 1..22: mol_type = other DNA
ctattgattcgaatagtttcag

SEQ ID NO: 125227 - DNA, 22 bp, synthetic construct
  misc_feature 1..22: note = chemically synthesized
  source 1..22: mol_type = other DNA
ttgattcgaatagtttcagagg

SEQ ID NO: 125228 - DNA, 22 bp, synthetic construct
  misc_feature 1..22: note = chemically synthesized
  source 1..22: mol_type = other DNA
attcgaatagtttcagagggaa

SEQ ID NO: 125229 - DNA, 22 bp, synthetic construct
  misc_feature 1..22: note = chemically synthesized
  source 1..22: mol_type = other DNA
gaatagtttcagagggaatggt

SEQ ID NO: 125230 - DNA, 22 bp, synthetic construct
  misc_feature 1..22: note = chemically synthesized
  source 1..22: mol_type = other DNA
cagagggaatggtaccagctcc

SEQ ID NO: 125231 - DNA, 22 bp, synthetic construct
  misc_feature 1..22: note = chemically synthesized
  source 1..22: mol_type = other DNA
agagggaatggtaccagctcct

SEQ ID NO: 125232 - DNA, 22 bp, synthetic construct
  misc_feature 1..22: note = chemically synthesized
  source 1..22: mol_type = other DNA
ctccttgtacctctggtagaat

SEQ ID NO: 125233 - DNA, 22 bp, synthetic construct
  misc_feature 1..22: note = chemically synthesized
  source 1..22: mol_type = other DNA
cttgtacctctggtagaatttg

SEQ ID NO: 125234 - DNA, 22 bp, synthetic construct
  misc_feature 1..22: note = chemically synthesized
  source 1..22: mol_type = other DNA
gtacctctggtagaatttggct

SEQ ID NO: 125235 - DNA, 22 bp, synthetic construct
  misc_feature 1..22: note = chemically synthesized
  source 1..22: mol_type = other DNA
tacctctggtagaatttggctg

SEQ ID NO: 125236 - DNA, 22 bp, synthetic construct
  misc_feature 1..22: note = chemically synthesized
  source 1..22: mol_type = other DNA
tggtagaatttggctgtgactc

SEQ ID NO: 125237 - DNA, 22 bp, synthetic construct
  misc_feature 1..22: note = chemically synthesized
  source 1..22: mol_type = other DNA
gtagaatttggctgtgactcca

SEQ ID NO: 125238 - DNA, 22 bp, synthetic construct
  misc_feature 1..22: note = chemically synthesized
  source 1..22: mol_type = other DNA
ggctgtgactccatctggtcct

SEQ ID NO: 125239 - DNA, 22 bp, synthetic construct
  misc_feature 1..22: note = chemically synthesized
  source 1..22: mol_type = other DNA
gctgtgactccatctggtcctg

SEQ ID NO: 125240 - DNA, 22 bp, synthetic construct
  misc_feature 1..22: note = chemically synthesized
  source 1..22: mol_type = other DNA
tgactccatctggtcctggact

SEQ ID NO: 125241 - DNA, 22 bp, synthetic construct
  misc_feature 1..22: note = chemically synthesized
  source 1..22: mol_type = other DNA
catctggtcctggactgttttt

SEQ ID NO: 125242 - DNA, 22 bp, synthetic construct
  misc_feature 1..22: note = chemically synthesized
  source 1..22: mol_type = other DNA
gtcctggactgtttttggttgg

SEQ ID NO: 125243 - DNA, 22 bp, synthetic construct
  misc_feature 1..22: note = chemically synthesized
  source 1..22: mol_type = other DNA
gactgtttttggttggtaagct

SEQ ID NO: 125244 - DNA, 22 bp, synthetic construct
  misc_feature 1..22: note = chemically synthesized
  source 1..22: mol_type = other DNA
tttttggttggtaagctattaa

SEQ ID NO: 125245 - DNA, 22 bp, synthetic construct
  misc_feature 1..22: note = chemically synthesized
  source 1..22: mol_type = other DNA
ttggttggtaagctattaatta

SEQ ID NO: 125246 - DNA, 22 bp, synthetic construct
  misc_feature 1..22: note = chemically synthesized
  source 1..22: mol_type = other DNA
tggttggtaagctattaattat

SEQ ID NO: 125247 - DNA, 22 bp, synthetic construct
  misc_feature 1..22: note = chemically synthesized
  source 1..22: mol_type = other DNA
ggttggtaagctattaattatt

SEQ ID NO: 125248 - DNA, 22 bp, synthetic construct
  misc_feature 1..22: note = chemically synthesized
  source 1..22: mol_type = other DNA
gttggtaagctattaattattg

SEQ ID NO: 125249 - DNA, 22 bp, synthetic construct
  misc_feature 1..22: note = chemically synthesized
  source 1..22: mol_type = other DNA
gtaagctattaattattgcctc

SEQ ID NO: 125250 - DNA, 22 bp, synthetic construct
  misc_feature 1..22: note = chemically synthesized
  source 1..22: mol_type = other DNA
ttaattattgcctcaatttcag

SEQ ID NO: 125251 - DNA, 22 bp, synthetic construct
  misc_feature 1..22: note = chemically synthesized
  source 1..22: mol_type = other DNA
attattgcctcaatttcagatc

SEQ ID NO: 125252 - DNA, 22 bp, synthetic construct
  misc_feature 1..22: note = chemically synthesized
  source 1..22: mol_type = other DNA
ttgcctcaatttcagatcctgt

SEQ ID NO: 125253 - DNA, 22 bp, synthetic construct
  misc_feature 1..22: note = chemically synthesized
  source 1..22: mol_type = other DNA
cctcaatttcagatcctgttat

SEQ ID NO: 125254 - DNA, 22 bp, synthetic construct
  misc_feature 1..22: note = chemically synthesized
  source 1..22: mol_type = other DNA
aatttcagatcctgttattggt

SEQ ID NO: 125255 - DNA, 22 bp, synthetic construct
  misc_feature 1..22: note = chemically synthesized
  source 1..22: mol_type = other DNA
cagatcctgttattggtctatt

SEQ ID NO: 125256 - DNA, 22 bp, synthetic construct
  misc_feature 1..22: note = chemically synthesized
  source 1..22: mol_type = other DNA
agatcctgttattggtctattc

SEQ ID NO: 125257 - DNA, 22 bp, synthetic construct
  misc_feature 1..22: note = chemically synthesized
  source 1..22: mol_type = other DNA
ttattggtctattcagagattc

SEQ ID NO: 125258 - DNA, 22 bp, synthetic construct
  misc_feature 1..22: note = chemically synthesized
  source 1..22: mol_type = other DNA
ttggtctattcagagattcaac

SEQ ID NO: 125259 - DNA, 22 bp, synthetic construct
  misc_feature 1..22: note = chemically synthesized
  source 1..22: mol_type = other DNA
gtctattcagagattcaacttc

SEQ ID NO: 125260 - DNA, 22 bp, synthetic construct
  misc_feature 1..22: note = chemically synthesized
  source 1..22: mol_type = other DNA
ttcagagattcaacttcttcct

SEQ ID NO: 125261 - DNA, 22 bp, synthetic construct
  misc_feature 1..22: note = chemically synthesized
  source 1..22: mol_type = other DNA
agagattcaacttcttcctggt

SEQ ID NO: 125262 - DNA, 22 bp, synthetic construct
  misc_feature 1..22: note = chemically synthesized
  source 1..22: mol_type = other DNA
aacttcttcctggtttagtctt

SEQ ID NO: 125263 - DNA, 22 bp, synthetic construct
  misc_feature 1..22: note = chemically synthesized
  source 1..22: mol_type = other DNA
cttcctggtttagtcttgggag

SEQ ID NO: 125264 - DNA, 22 bp, synthetic construct
  misc_feature 1..22: note = chemically synthesized
  source 1..22: mol_type = other DNA
ttcctggtttagtcttgggagg

SEQ ID NO: 125265 - DNA, 22 bp, synthetic construct
  misc_feature 1..22: note = chemically synthesized
  source 1..22: mol_type = other DNA
cctggtttagtcttgggagggt

SEQ ID NO: 125266 - DNA, 22 bp, synthetic construct
  misc_feature 1..22: note = chemically synthesized
  source 1..22: mol_type = other DNA
ctggtttagtcttgggagggtg

SEQ ID NO: 125267 - DNA, 22 bp, synthetic construct
  misc_feature 1..22: note = chemically synthesized
  source 1..22: mol_type = other DNA
gtttagtcttgggagggtgtat

SEQ ID NO: 125268 - DNA, 22 bp, synthetic construct
  misc_feature 1..22: note = chemically synthesized
  source 1..22: mol_type = other DNA
agtcttgggagggtgtatgtgt

SEQ ID NO: 125269 - DNA, 22 bp, synthetic construct
  misc_feature 1..22: note = chemically synthesized
  source 1..22: mol_type = other DNA
gtcttgggagggtgtatgtgtc

SEQ ID NO: 125270 - DNA, 22 bp, synthetic construct
  misc_feature 1..22: note = chemically synthesized
  source 1..22: mol_type = other DNA
gggagggtgtatgtgtcaagga

SEQ ID NO: 125271 - DNA, 22 bp, synthetic construct
  misc_feature 1..22: note = chemically synthesized
  source 1..22: mol_type = other DNA
ggagggtgtatgtgtcaaggaa

SEQ ID NO: 125272 - DNA, 22 bp, synthetic construct
  misc_feature 1..22: note = chemically synthesized
  source 1..22: mol_type = other DNA
atccatttcttctagattttct

SEQ ID NO: 125273 - DNA, 22 bp, synthetic construct
  misc_feature 1..22: note = chemically synthesized
  source 1..22: mol_type = other DNA
tccatttcttctagattttcta

SEQ ID NO: 125274 - DNA, 22 bp, synthetic construct
  misc_feature 1..22: note = chemically synthesized
  source 1..22: mol_type = other DNA
cttctagattttctagtttatt

SEQ ID NO: 125275 - DNA, 22 bp, synthetic construct
  misc_feature 1..22: note = chemically synthesized
  source 1..22: mol_type = other DNA
ttctagattttctagtttattt

SEQ ID NO: 125276 - DNA, 22 bp, synthetic construct
  misc_feature 1..22: note = chemically synthesized
  source 1..22: mol_type = other DNA
ctagattttctagtttatttgt

SEQ ID NO: 125277 - DNA, 22 bp, synthetic construct
  misc_feature 1..22: note = chemically synthesized
  source 1..22: mol_type = other DNA
tagattttctagtttatttgtg

SEQ ID NO: 125278 - DNA, 22 bp, synthetic construct
  misc_feature 1..22: note = chemically synthesized
  source 1..22: mol_type = other DNA
gattttctagtttatttgtgta

SEQ ID NO: 125279 - DNA, 22 bp, synthetic construct
  misc_feature 1..22: note = chemically synthesized
  source 1..22: mol_type = other DNA
tctagtttatttgtgtagaggt

SEQ ID NO: 125280 - DNA, 22 bp, synthetic construct
  misc_feature 1..22: note = chemically synthesized
  source 1..22: mol_type = other DNA
ctagtttatttgtgtagaggtg

SEQ ID NO: 125281 - DNA, 22 bp, synthetic construct
  misc_feature 1..22: note = chemically synthesized
  source 1..22: mol_type = other DNA
tagtttatttgtgtagaggtgt

SEQ ID NO: 125282 - DNA, 22 bp, synthetic construct
  misc_feature 1..22: note = chemically synthesized
  source 1..22: mol_type = other DNA
gtttatttgtgtagaggtgttt

SEQ ID NO: 125283 - DNA, 22 bp, synthetic construct
  misc_feature 1..22: note = chemically synthesized
  source 1..22: mol_type = other DNA
atttgtgtagaggtgtttatag

SEQ ID NO: 125284 - DNA, 22 bp, synthetic construct
  misc_feature 1..22: note = chemically synthesized
  source 1..22: mol_type = other DNA
tttgtgtagaggtgtttatagt

SEQ ID NO: 125285 - DNA, 22 bp, synthetic construct
  misc_feature 1..22: note = chemically synthesized
  source 1..22: mol_type = other DNA
gtgtagaggtgtttatagtatt

SEQ ID NO: 125286 - DNA, 22 bp, synthetic construct
  misc_feature 1..22: note = chemically synthesized
  source 1..22: mol_type = other DNA
tgtagaggtgtttatagtattc

SEQ ID NO: 125287 - DNA, 22 bp, synthetic construct
  misc_feature 1..22: note = chemically synthesized
  source 1..22: mol_type = other DNA
atagtattctctgatggtggtt

SEQ ID NO: 125288 - DNA, 22 bp, synthetic construct
  misc_feature 1..22: note = chemically synthesized
  source 1..22: mol_type = other DNA
tagtattctctgatggtggttt

SEQ ID NO: 125289 - DNA, 22 bp, synthetic construct
  misc_feature 1..22: note = chemically synthesized
  source 1..22: mol_type = other DNA
tctgatggtggtttgtatttct

SEQ ID NO: 125290 - DNA, 22 bp, synthetic construct
  misc_feature 1..22: note = chemically synthesized
  source 1..22: mol_type = other DNA
tgatggtggtttgtatttctgt

SEQ ID NO: 125291 - DNA, 22 bp, synthetic construct
  misc_feature 1..22: note = chemically synthesized
  source 1..22: mol_type = other DNA
atggtggtttgtatttctgtgg

SEQ ID NO: 125292 - DNA, 22 bp, synthetic construct
  misc_feature 1..22: note = chemically synthesized
  source 1..22: mol_type = other DNA
gtatttctgtgggatcggtggt

SEQ ID NO: 125293 - DNA, 22 bp, synthetic construct
  misc_feature 1..22: note = chemically synthesized
  source 1..22: mol_type = other DNA
tatttctgtgggatcggtggtg

SEQ ID NO: 125294 - DNA, 22 bp, synthetic construct
  misc_feature 1..22: note = chemically synthesized
  source 1..22: mol_type = other DNA
ctgtgggatcggtggtgatata

SEQ ID NO: 125295 - DNA, 22 bp, synthetic construct
  misc_feature 1..22: note = chemically synthesized
  source 1..22: mol_type = other DNA
tgtgggatcggtggtgatatac

SEQ ID NO: 125296 - DNA, 22 bp, synthetic construct
  misc_feature 1..22: note = chemically synthesized
  source 1..22: mol_type = other DNA
tgggatcggtggtgatataccc

SEQ ID NO: 125297 - DNA, 22 bp, synthetic construct
  misc_feature 1..22: note = chemically synthesized
  source 1..22: mol_type = other DNA
tatcattttttattgcatctat

SEQ ID NO: 125298 - DNA, 22 bp, synthetic construct
  misc_feature 1..22: note = chemically synthesized
  source 1..22: mol_type = other DNA
atcattttttattgcatctatt

SEQ ID NO: 125299 - DNA, 22 bp, synthetic construct
  misc_feature 1..22: note = chemically synthesized
  source 1..22: mol_type = other DNA
tcattttttattgcatctattt

SEQ ID NO: 125300 - DNA, 22 bp, synthetic construct
  misc_feature 1..22: note = chemically synthesized
  source 1..22: mol_type = other DNA
tttattgcatctatttgattct

SEQ ID NO: 125301 - DNA, 22 bp, synthetic construct
  misc_feature 1..22: note = chemically synthesized
  source 1..22: mol_type = other DNA
ttattgcatctatttgattctt

SEQ ID NO: 125302 - DNA, 22 bp, synthetic construct
  misc_feature 1..22: note = chemically synthesized
  source 1..22: mol_type = other DNA
tattgcatctatttgattcttc

SEQ ID NO: 125303 - DNA, 22 bp, synthetic construct
  misc_feature 1..22: note = chemically synthesized
  source 1..22: mol_type = other DNA
attgcatctatttgattcttct

SEQ ID NO: 125304 - DNA, 22 bp, synthetic construct
  misc_feature 1..22: note = chemically synthesized
  source 1..22: mol_type = other DNA
ttgcatctatttgattcttctc

SEQ ID NO: 125305 - DNA, 22 bp, synthetic construct
  misc_feature 1..22: note = chemically synthesized
  source 1..22: mol_type = other DNA
catctatttgattcttctctct

SEQ ID NO: 125306 - DNA, 22 bp, synthetic construct
  misc_feature 1..22: note = chemically synthesized
  source 1..22: mol_type = other DNA
tttgattcttctctcttttctt

SEQ ID NO: 125307 - DNA, 22 bp, synthetic construct
  misc_feature 1..22: note = chemically synthesized
  source 1..22: mol_type = other DNA
gattcttctctcttttcttctt

SEQ ID NO: 125308 - DNA, 22 bp, synthetic construct
  misc_feature 1..22: note = chemically synthesized
  source 1..22: mol_type = other DNA
attcttctctcttttcttcttt

SEQ ID NO: 125309 - DNA, 22 bp, synthetic construct
  misc_feature 1..22: note = chemically synthesized
  source 1..22: mol_type = other DNA
ttctctcttttcttctttatta

SEQ ID NO: 125310 - DNA, 22 bp, synthetic construct
  misc_feature 1..22: note = chemically synthesized
  source 1..22: mol_type = other DNA
ctctcttttcttctttattagt

SEQ ID NO: 125311 - DNA, 22 bp, synthetic construct
  misc_feature 1..22: note = chemically synthesized
  source 1..22: mol_type = other DNA
tctcttttcttctttattagtc

SEQ ID NO: 125312 - DNA, 22 bp, synthetic construct
  misc_feature 1..22: note = chemically synthesized
  source 1..22: mol_type = other DNA
tcttttcttctttattagtctt

SEQ ID NO: 125313 - DNA, 22 bp, synthetic construct
  misc_feature 1..22: note = chemically synthesized
  source 1..22: mol_type = other DNA
ttttcttctttattagtcttgc

SEQ ID NO: 125314 - DNA, 22 bp, synthetic construct
  misc_feature 1..22: note = chemically synthesized
  source 1..22: mol_type = other DNA
ttcttctttattagtcttgcta

SEQ ID NO: 125315 - DNA, 22 bp, synthetic construct
  misc_feature 1..22: note = chemically synthesized
  source 1..22: mol_type = other DNA
tcttctttattagtcttgctag

SEQ ID NO: 125316 - DNA, 22 bp, synthetic construct
  misc_feature 1..22: note = chemically synthesized
  source 1..22: mol_type = other DNA
cttctttattagtcttgctagc

SEQ ID NO: 125317 - DNA, 22 bp, synthetic construct
  misc_feature 1..22: note = chemically synthesized
  source 1..22: mol_type = other DNA
ttctttattagtcttgctagca

SEQ ID NO: 125318 - DNA, 22 bp, synthetic construct
  misc_feature 1..22: note = chemically synthesized
  source 1..22: mol_type = other DNA
ctttattagtcttgctagcagt

SEQ ID NO: 125319 - DNA, 22 bp, synthetic construct
  misc_feature 1..22: note = chemically synthesized
  source 1..22: mol_type = other DNA
tttattagtcttgctagcagtc

SEQ ID NO: 125320 - DNA, 22 bp, synthetic construct
  misc_feature 1..22: note = chemically synthesized
  source 1..22: mol_type = other DNA
tattagtcttgctagcagtcta

SEQ ID NO: 125321 - DNA, 22 bp, synthetic construct
  misc_feature 1..22: note = chemically synthesized
  source 1..22: mol_type = other DNA
attagtcttgctagcagtctat

SEQ ID NO: 125322 - DNA, 22 bp, synthetic construct
  misc_feature 1..22: note = chemically synthesized
  source 1..22: mol_type = other DNA
ttagtcttgctagcagtctatc

SEQ ID NO: 125323 - DNA, 22 bp, synthetic construct
  misc_feature 1..22: note = chemically synthesized
  source 1..22: mol_type = other DNA
gtcttgctagcagtctatcaat

SEQ ID NO: 125324 - DNA, 22 bp, synthetic construct
  misc_feature 1..22: note = chemically synthesized
  source 1..22: mol_type = other DNA
gctagcagtctatcaattttgt

SEQ ID NO: 125325 - DNA, 22 bp, synthetic construct
  misc_feature 1..22: note = chemically synthesized
  source 1..22: mol_type = other DNA
ctagcagtctatcaattttgtt

SEQ ID NO: 125326 - DNA, 22 bp, synthetic construct
  misc_feature 1..22: note = chemically synthesized
  source 1..22: mol_type = other DNA
gcagtctatcaattttgttgat

SEQ ID NO: 125327 - DNA, 22 bp, synthetic construct
  misc_feature 1..22: note = chemically synthesized
  source 1..22: mol_type = other DNA
tcaattttgttgatctttttga

SEQ ID NO: 125328 - DNA, 22 bp, synthetic construct
  misc_feature 1..22: note = chemically synthesized
  source 1..22: mol_type = other DNA
tgttgatctttttgaaaaacca

SEQ ID NO: 125329 - DNA, 22 bp, synthetic construct
  misc_feature 1..22: note = chemically synthesized
  source 1..22: mol_type = other DNA
gttgatctttttgaaaaaccag

SEQ ID NO: 125330 - DNA, 22 bp, synthetic construct
  misc_feature 1..22: note = chemically synthesized
  source 1..22: mol_type = other DNA
ttgatctttttgaaaaaccagc

SEQ ID NO: 125331 - DNA, 22 bp, synthetic construct
  misc_feature 1..22: note = chemically synthesized
  source 1..22: mol_type = other DNA
atctttttgaaaaaccagcttc

SEQ ID NO: 125332 - DNA, 22 bp, synthetic construct
  misc_feature 1..22: note = chemically synthesized
  source 1..22: mol_type = other DNA
tttgaaaaaccagcttctggat

SEQ ID NO: 125333 - DNA, 22 bp, synthetic construct
  misc_feature 1..22: note = chemically synthesized
  source 1..22: mol_type = other DNA
ttgaaaaaccagcttctggatt

SEQ ID NO: 125334 - DNA, 22 bp, synthetic construct
  misc_feature 1..22: note = chemically synthesized
  source 1..22: mol_type = other DNA
tgaaaaaccagcttctggattc

SEQ ID NO: 125335 - DNA, 22 bp, synthetic construct
  misc_feature 1..22: note = chemically synthesized
  source 1..22: mol_type = other DNA
gaaaaaccagcttctggattca

SEQ ID NO: 125336 - DNA, 22 bp, synthetic construct
  misc_feature 1..22: note = chemically synthesized
  source 1..22: mol_type = other DNA
aaaaaccagcttctggattcat

SEQ ID NO: 125337 - DNA, 22 bp, synthetic construct
  misc_feature 1..22: note = chemically synthesized
  source 1..22: mol_type = other DNA
ctggattcattgattttttgaa

SEQ ID NO: 125338 - DNA, 22 bp, synthetic construct
  misc_feature 1..22: note = chemically synthesized
  source 1..22: mol_type = other DNA
tggattcattgattttttgaag

SEQ ID NO: 125339 - DNA, 22 bp, synthetic construct
  misc_feature 1..22: note = chemically synthesized
  source 1..22: mol_type = other DNA
gattcattgattttttgaaggg

SEQ ID NO: 125340 - DNA, 22 bp, synthetic construct
  misc_feature 1..22: note = chemically synthesized
  source 1..22: mol_type = other DNA
attgattttttgaagggttttt

SEQ ID NO: 125341 - DNA, 22 bp, synthetic construct
  misc_feature 1..22: note = chemically synthesized
  source 1..22: mol_type = other DNA
attttttgaagggtttttttgt

SEQ ID NO: 125342 - DNA, 22 bp, synthetic construct
  misc_feature 1..22: note = chemically synthesized
  source 1..22: mol_type = other DNA
tttgaagggtttttttgtgtct

SEQ ID NO: 125343 - DNA, 22 bp, synthetic construct
  misc_feature 1..22: note = chemically synthesized
  source 1..22: mol_type = other DNA
ttgaagggtttttttgtgtctc

SEQ ID NO: 125344 - DNA, 22 bp, synthetic construct
  misc_feature 1..22: note = chemically synthesized
  source 1..22: mol_type = other DNA
tgaagggtttttttgtgtctct

SEQ ID NO: 125345 - DNA, 22 bp, synthetic construct
  misc_feature 1..22: note = chemically synthesized
  source 1..22: mol_type = other DNA
gaagggtttttttgtgtctcta

SEQ ID NO: 125346 - DNA, 22 bp, synthetic construct
  misc_feature 1..22: note = chemically synthesized
  source 1..22: mol_type = other DNA
aagggtttttttgtgtctctat

SEQ ID NO: 125347 - DNA, 22 bp, synthetic construct
  misc_feature 1..22: note = chemically synthesized
  source 1..22: mol_type = other DNA
ttttgtgtctctatttccttca

SEQ ID NO: 125348 - DNA, 22 bp, synthetic construct
  misc_feature 1..22: note = chemically synthesized
  source 1..22: mol_type = other DNA
tttgtgtctctatttccttcag

SEQ ID NO: 125349 - DNA, 22 bp, synthetic construct
  misc_feature 1..22: note = chemically synthesized
  source 1..22: mol_type = other DNA
ttgtgtctctatttccttcagt

SEQ ID NO: 125350 - DNA, 22 bp, synthetic construct
  misc_feature 1..22: note = chemically synthesized
  source 1..22: mol_type = other DNA
tgtgtctctatttccttcagtt

SEQ ID NO: 125351 - DNA, 22 bp, synthetic construct
  misc_feature 1..22: note = chemically synthesized
  source 1..22: mol_type = other DNA
gtgtctctatttccttcagttc

SEQ ID NO: 125352 - DNA, 22 bp, synthetic construct
  misc_feature 1..22: note = chemically synthesized
  source 1..22: mol_type = other DNA
tgtctctatttccttcagttct

SEQ ID NO: 125353 - DNA, 22 bp, synthetic construct
  misc_feature 1..22: note = chemically synthesized
  source 1..22: mol_type = other DNA
tatttccttcagttctgctctg

SEQ ID NO: 125354 - DNA, 22 bp, synthetic construct
  misc_feature 1..22: note = chemically synthesized
  source 1..22: mol_type = other DNA
tttccttcagttctgctctgat

SEQ ID NO: 125355 - DNA, 22 bp, synthetic construct
  misc_feature 1..22: note = chemically synthesized
  source 1..22: mol_type = other DNA
ccttcagttctgctctgatttt

SEQ ID NO: 125356 - DNA, 22 bp, synthetic construct
  misc_feature 1..22: note = chemically synthesized
  source 1..22: mol_type = other DNA
cttcagttctgctctgatttta

SEQ ID NO: 125357 - DNA, 22 bp, synthetic construct
  misc_feature 1..22: note = chemically synthesized
  source 1..22: mol_type = other DNA
cagttctgctctgattttagtt

SEQ ID NO: 125358 - DNA, 22 bp, synthetic construct
  misc_feature 1..22: note = chemically synthesized
  source 1..22: mol_type = other DNA
agttctgctctgattttagtta

SEQ ID NO: 125359 - DNA, 22 bp, synthetic construct
  misc_feature 1..22: note = chemically synthesized
  source 1..22: mol_type = other DNA
tgctctgattttagttatttct

SEQ ID NO: 125360 - DNA, 22 bp, synthetic construct
  misc_feature 1..22: note = chemically synthesized
  source 1..22: mol_type = other DNA
ctctgattttagttatttcttg

SEQ ID NO: 125361 - DNA, 22 bp, synthetic construct
  misc_feature 1..22: note = chemically synthesized
  source 1..22: mol_type = other DNA
tgattttagttatttcttgcct

SEQ ID NO: 125362 - DNA, 22 bp, synthetic construct
  misc_feature 1..22: note = chemically synthesized
  source 1..22: mol_type = other DNA
attttagttatttcttgccttc

SEQ ID NO: 125363 - DNA, 22 bp, synthetic construct
  misc_feature 1..22: note = chemically synthesized
  source 1..22: mol_type = other DNA
tagttatttcttgccttctgct

SEQ ID NO: 125364 - DNA, 22 bp, synthetic construct
  misc_feature 1..22: note = chemically synthesized
  source 1..22: mol_type = other DNA
agttatttcttgccttctgcta

SEQ ID NO: 125365 - DNA, 22 bp, synthetic construct
  misc_feature 1..22: note = chemically synthesized
  source 1..22: mol_type = other DNA
gttatttcttgccttctgctag

SEQ ID NO: 125366 - DNA, 22 bp, synthetic construct
  misc_feature 1..22: note = chemically synthesized
  source 1..22: mol_type = other DNA
tttcttgccttctgctagcatt

SEQ ID NO: 125367 - DNA, 22 bp, synthetic construct
  misc_feature 1..22: note = chemically synthesized
  source 1..22: mol_type = other DNA
cttgccttctgctagcatttga

SEQ ID NO: 125368 - DNA, 22 bp, synthetic construct
  misc_feature 1..22: note = chemically synthesized
  source 1..22: mol_type = other DNA
ttgccttctgctagcatttgaa

SEQ ID NO: 125369 - DNA, 22 bp, synthetic construct
  misc_feature 1..22: note = chemically synthesized
  source 1..22: mol_type = other DNA
gccttctgctagcatttgaatg

SEQ ID NO: 125370 - DNA, 22 bp, synthetic construct
  misc_feature 1..22: note = chemically synthesized
  source 1..22: mol_type = other DNA
ccttctgctagcatttgaatgt

SEQ ID NO: 125371 - DNA, 22 bp, synthetic construct
  misc_feature 1..22: note = chemically synthesized
  source 1..22: mol_type = other DNA
ctgctagcatttgaatgtgttt

SEQ ID NO: 125372 - DNA, 22 bp, synthetic construct
  misc_feature 1..22: note = chemically synthesized
  source 1..22: mol_type = other DNA
tgctagcatttgaatgtgtttg

SEQ ID NO: 125373 - DNA, 22 bp, synthetic construct
  misc_feature 1..22: note = chemically synthesized
  source 1..22: mol_type = other DNA
ctagcatttgaatgtgtttgct

SEQ ID NO: 125374 - DNA, 22 bp, synthetic construct
  misc_feature 1..22: note = chemically synthesized
  source 1..22: mol_type = other DNA
gcatttgaatgtgtttgctctt

SEQ ID NO: 125375 - DNA, 22 bp, synthetic construct
  misc_feature 1..22: note = chemically synthesized
  source 1..22: mol_type = other DNA
gaatgtgtttgctcttgcttct

SEQ ID NO: 125376 - DNA, 22 bp, synthetic construct
  misc_feature 1..22: note = chemically synthesized
  source 1..22: mol_type = other DNA
aatgtgtttgctcttgcttctc

SEQ ID NO: 125377 - DNA, 22 bp, synthetic construct
  misc_feature 1..22: note = chemically synthesized
  source 1..22: mol_type = other DNA
gctcttgcttctctagttcttt

SEQ ID NO: 125378 - DNA, 22 bp, synthetic construct
  misc_feature 1..22: note = chemically synthesized
  source 1..22: mol_type = other DNA
ctcttgcttctctagttctttt

SEQ ID NO: 125379 - DNA, 22 bp, synthetic construct
  misc_feature 1..22: note = chemically synthesized
  source 1..22: mol_type = other DNA
ttgcttctctagttcttttaat

SEQ ID NO: 125380 - DNA, 22 bp, synthetic construct
  misc_feature 1..22: note = chemically synthesized
  source 1..22: mol_type = other DNA
gcttctctagttcttttaattg

SEQ ID NO: 125381 - DNA, 22 bp, synthetic construct
  misc_feature 1..22: note = chemically synthesized
  source 1..22: mol_type = other DNA
cttctctagttcttttaattgt

SEQ ID NO: 125382 - DNA, 22 bp, synthetic construct
  misc_feature 1..22: note = chemically synthesized
  source 1..22: mol_type = other DNA
ctctagttcttttaattgtgat

SEQ ID NO: 125383 - DNA, 22 bp, synthetic construct
  misc_feature 1..22: note = chemically synthesized
  source 1..22: mol_type = other DNA
tctagttcttttaattgtgatg

SEQ ID NO: 125384 - DNA, 22 bp, synthetic construct
  misc_feature 1..22: note = chemically synthesized
  source 1..22: mol_type = other DNA
tagttcttttaattgtgatgtt

SEQ ID NO: 125385 - DNA, 22 bp, synthetic construct
  misc_feature 1..22: note = chemically synthesized
  source 1..22: mol_type = other DNA
gttcttttaattgtgatgttag

SEQ ID NO: 125386 - DNA, 22 bp, synthetic construct
  misc_feature 1..22: note = chemically synthesized
  source 1..22: mol_type = other DNA
ttttaattgtgatgttagggtg

SEQ ID NO: 125387 - DNA, 22 bp, synthetic construct
  misc_feature 1..22: note = chemically synthesized
  source 1..22: mol_type = other DNA
ttaattgtgatgttagggtgtc

SEQ ID NO: 125388 - DNA, 22 bp, synthetic construct
  misc_feature 1..22: note = chemically synthesized
  source 1..22: mol_type = other DNA
taattgtgatgttagggtgtca

SEQ ID NO: 125389 - DNA, 22 bp, synthetic construct
  misc_feature 1..22: note = chemically synthesized
  source 1..22: mol_type = other DNA
aattgtgatgttagggtgtcaa

SEQ ID NO: 125390 - DNA, 22 bp, synthetic construct
  misc_feature 1..22: note = chemically synthesized
  source 1..22: mol_type = other DNA
attgtgatgttagggtgtcaat

SEQ ID NO: 125391 - DNA, 22 bp, synthetic construct
  misc_feature 1..22: note = chemically synthesized
  source 1..22: mol_type = other DNA
tgatgttagggtgtcaatttta

SEQ ID NO: 125392 - DNA, 22 bp, synthetic construct
  misc_feature 1..22: note = chemically synthesized
  source 1..22: mol_type = other DNA
gggtgtcaattttagatctttc

SEQ ID NO: 125393 - DNA, 22 bp, synthetic construct
  misc_feature 1..22: note = chemically synthesized
  source 1..22: mol_type = other DNA
tagatctttcctgctttctctt

SEQ ID NO: 125394 - DNA, 22 bp, synthetic construct
  misc_feature 1..22: note = chemically synthesized
  source 1..22: mol_type = other DNA
agatctttcctgctttctcttc

SEQ ID NO: 125395 - DNA, 22 bp, synthetic construct
  misc_feature 1..22: note = chemically synthesized
  source 1..22: mol_type = other DNA
gatctttcctgctttctcttct

SEQ ID NO: 125396 - DNA, 22 bp, synthetic construct
  misc_feature 1..22: note = chemically synthesized
  source 1..22: mol_type = other DNA
tcctgctttctcttctgggcgt

SEQ ID NO: 125397 - DNA, 22 bp, synthetic construct
  misc_feature 1..22: note = chemically synthesized
  source 1..22: mol_type = other DNA
cctgctttctcttctgggcgtt

SEQ ID NO: 125398 - DNA, 22 bp, synthetic construct
  misc_feature 1..22: note = chemically synthesized
  source 1..22: mol_type = other DNA
ctgctttctcttctgggcgttt

SEQ ID NO: 125399 - DNA, 22 bp, synthetic construct
  misc_feature 1..22: note = chemically synthesized
  source 1..22: mol_type = other DNA
ctttctcttctgggcgtttagt

SEQ ID NO: 125400 - DNA, 22 bp, synthetic construct
  misc_feature 1..22: note = chemically synthesized
  source 1..22: mol_type = other DNA
tctcttctgggcgtttagtgct

SEQ ID NO: 125401 - DNA, 22 bp, synthetic construct
  misc_feature 1..22: note = chemically synthesized
  source 1..22: mol_type = other DNA
ctcttctgggcgtttagtgcta

SEQ ID NO: 125402 - DNA, 22 bp, synthetic construct
  misc_feature 1..22: note = chemically synthesized
  source 1..22: mol_type = other DNA
tcttctgggcgtttagtgctat

SEQ ID NO: 125403 - DNA, 22 bp, synthetic construct
  misc_feature 1..22: note = chemically synthesized
  source 1..22: mol_type = other DNA
ttctgggcgtttagtgctataa

SEQ ID NO: 125404 - DNA, 22 bp, synthetic construct
  misc_feature 1..22: note = chemically synthesized
  source 1..22: mol_type = other DNA
ctgggcgtttagtgctataaat

SEQ ID NO: 125405 - DNA, 22 bp, synthetic construct
  misc_feature 1..22: note = chemically synthesized
  source 1..22: mol_type = other DNA
tgggcgtttagtgctataaatt

SEQ ID NO: 125406 - DNA, 22 bp, synthetic construct
  misc_feature 1..22: note = chemically synthesized
  source 1..22: mol_type = other DNA
ggcgtttagtgctataaatttc

SEQ ID NO: 125407 - DNA, 22 bp, synthetic construct
  misc_feature 1..22: note = chemically synthesized
  source 1..22: mol_type = other DNA
agtgctataaatttccctctac

SEQ ID NO: 125408 - DNA, 22 bp, synthetic construct
  misc_feature 1..22: note = chemically synthesized
  source 1..22: mol_type = other DNA
gtgctataaatttccctctaca

SEQ ID NO: 125409 - DNA, 22 bp, synthetic construct
  misc_feature 1..22: note = chemically synthesized
  source 1..22: mol_type = other DNA
taaatttccctctacacactgc

SEQ ID NO: 125410 - DNA, 22 bp, synthetic construct
  misc_feature 1..22: note = chemically synthesized
  source 1..22: mol_type = other DNA
ccctctacacactgctttgaat

SEQ ID NO: 125411 - DNA, 22 bp, synthetic construct
  misc_feature 1..22: note = chemically synthesized
  source 1..22: mol_type = other DNA
cctctacacactgctttgaatg

SEQ ID NO: 125412 - DNA, 22 bp, synthetic construct
  misc_feature 1..22: note = chemically synthesized
  source 1..22: mol_type = other DNA
tacacactgctttgaatgtgtc

SEQ ID NO: 125413 - DNA, 22 bp, synthetic construct
  misc_feature 1..22: note = chemically synthesized
  source 1..22: mol_type = other DNA
cacactgctttgaatgtgtccc

SEQ ID NO: 125414 - DNA, 22 bp, synthetic construct
  misc_feature 1..22: note = chemically synthesized
  source 1..22: mol_type = other DNA
ctttgaatgtgtcccagagatt

SEQ ID NO: 125415 - DNA, 22 bp, synthetic construct
  misc_feature 1..22: note = chemically synthesized
  source 1..22: mol_type = other DNA
tgaatgtgtcccagagattctg

SEQ ID NO: 125416 - DNA, 22 bp, synthetic construct
  misc_feature 1..22: note = chemically synthesized
  source 1..22: mol_type = other DNA
gaatgtgtcccagagattctgg

SEQ ID NO: 125417 - DNA, 22 bp, synthetic construct
  misc_feature 1..22: note = chemically synthesized
  source 1..22: mol_type = other DNA
aatgtgtcccagagattctggt

SEQ ID NO: 125418 - DNA, 22 bp, synthetic construct
  misc_feature 1..22: note = chemically synthesized
  source 1..22: mol_type = other DNA
tggtatgttgtgtctttgttct

SEQ ID NO: 125419 - DNA, 22 bp, synthetic construct
  misc_feature 1..22: note = chemically synthesized
  source 1..22: mol_type = other DNA
gtatgttgtgtctttgttctct

SEQ ID NO: 125420 - DNA, 22 bp, synthetic construct
  misc_feature 1..22: note = chemically synthesized
  source 1..22: mol_type = other DNA
tgtctttgttctctttggttcc

SEQ ID NO: 125421 - DNA, 22 bp, synthetic construct
  misc_feature 1..22: note = chemically synthesized
  source 1..22: mol_type = other DNA
tgttctctttggttccaaagaa

SEQ ID NO: 125422 - DNA, 22 bp, synthetic construct
  misc_feature 1..22: note = chemically synthesized
  source 1..22: mol_type = other DNA
gttctctttggttccaaagaac

SEQ ID NO: 125423 - DNA, 22 bp, synthetic construct
  misc_feature 1..22: note = chemically synthesized
  source 1..22: mol_type = other DNA
ttctctttggttccaaagaaca

SEQ ID NO: 125424 - DNA, 22 bp, synthetic construct
  misc_feature 1..22: note = chemically synthesized
  source 1..22: mol_type = other DNA
tctttggttccaaagaacattt

SEQ ID NO: 125425 - DNA, 22 bp, synthetic construct
  misc_feature 1..22: note = chemically synthesized
  source 1..22: mol_type = other DNA
tttggttccaaagaacattttt

SEQ ID NO: 125426 - DNA, 22 bp, synthetic construct
  misc_feature 1..22: note = chemically synthesized
  source 1..22: mol_type = other DNA
tggttccaaagaacatttttat

SEQ ID NO: 125427 - DNA, 22 bp, synthetic construct
  misc_feature 1..22: note = chemically synthesized
  source 1..22: mol_type = other DNA
ggttccaaagaacatttttatt

SEQ ID NO: 125428 - DNA, 22 bp, synthetic construct
  misc_feature 1..22: note = chemically synthesized
  source 1..22: mol_type = other DNA
gttccaaagaacatttttattt

SEQ ID NO: 125429 - DNA, 22 bp, synthetic construct
  misc_feature 1..22: note = chemically synthesized
  source 1..22: mol_type = other DNA
caaagaacatttttatttctgc

SEQ ID NO: 125430 - DNA, 22 bp, synthetic construct
  misc_feature 1..22: note = chemically synthesized
  source 1..22: mol_type = other DNA
ttatttctgccttcattttgtt

SEQ ID NO: 125431 - DNA, 22 bp, synthetic construct
  misc_feature 1..22: note = chemically synthesized
  source 1..22: mol_type = other DNA
tatttctgccttcattttgtta

SEQ ID NO: 125432 - DNA, 22 bp, synthetic construct
  misc_feature 1..22: note = chemically synthesized
  source 1..22: mol_type = other DNA
atttctgccttcattttgttat

SEQ ID NO: 125433 - DNA, 22 bp, synthetic construct
  misc_feature 1..22: note = chemically synthesized
  source 1..22: mol_type = other DNA
tttctgccttcattttgttatg

SEQ ID NO: 125434 - DNA, 22 bp, synthetic construct
  misc_feature 1..22: note = chemically synthesized
  source 1..22: mol_type = other DNA
ctgccttcattttgttatgaac

SEQ ID NO: 125435 - DNA, 22 bp, synthetic construct
  misc_feature 1..22: note = chemically synthesized
  source 1..22: mol_type = other DNA
tgccttcattttgttatgaacc

SEQ ID NO: 125436 - DNA, 22 bp, synthetic construct
  misc_feature 1..22: note = chemically synthesized
  source 1..22: mol_type = other DNA
ccttcattttgttatgaaccca

SEQ ID NO: 125437 - DNA, 22 bp, synthetic construct
  misc_feature 1..22: note = chemically synthesized
  source 1..22: mol_type = other DNA
cattttgttatgaacccagtag

SEQ ID NO: 125438 - DNA, 22 bp, synthetic construct
  misc_feature 1..22: note = chemically synthesized
  source 1..22: mol_type = other DNA
attttgttatgaacccagtagt

SEQ ID NO: 125439 - DNA, 22 bp, synthetic construct
  misc_feature 1..22: note = chemically synthesized
  source 1..22: mol_type = other DNA
tgttatgaacccagtagtcatt

SEQ ID NO: 125440 - DNA, 22 bp, synthetic construct
  misc_feature 1..22: note = chemically synthesized
  source 1..22: mol_type = other DNA
gttatgaacccagtagtcattc

SEQ ID NO: 125441 - DNA, 22 bp, synthetic construct
  misc_feature 1..22: note = chemically synthesized
  source 1..22: mol_type = other DNA
ttatgaacccagtagtcattca

SEQ ID NO: 125442 - DNA, 22 bp, synthetic construct
  misc_feature 1..22: note = chemically synthesized
  source 1..22: mol_type = other DNA
tgaacccagtagtcattcagga

SEQ ID NO: 125443 - DNA, 22 bp, synthetic construct
  misc_feature 1..22: note = chemically synthesized
  source 1..22: mol_type = other DNA
aggagcaatttgttcggtttcc

SEQ ID NO: 125444 - DNA, 22 bp, synthetic construct
  misc_feature 1..22: note = chemically synthesized
  source 1..22: mol_type = other DNA
gttcggtttccatgtagttgag

SEQ ID NO: 125445 - DNA, 22 bp, synthetic construct
  misc_feature 1..22: note = chemically synthesized
  source 1..22: mol_type = other DNA
ttcggtttccatgtagttgagc

SEQ ID NO: 125446 - DNA, 22 bp, synthetic construct
  misc_feature 1..22: note = chemically synthesized
  source 1..22: mol_type = other DNA
ggtttccatgtagttgagcggt

SEQ ID NO: 125447 - DNA, 22 bp, synthetic construct
  misc_feature 1..22: note = chemically synthesized
  source 1..22: mol_type = other DNA
ccatgtagttgagcggttttga

SEQ ID NO: 125448 - DNA, 22 bp, synthetic construct
  misc_feature 1..22: note = chemically synthesized
  source 1..22: mol_type = other DNA
catgtagttgagcggttttgag

SEQ ID NO: 125449 - DNA, 22 bp, synthetic construct
  misc_feature 1..22: note = chemically synthesized
  source 1..22: mol_type = other DNA
agcggttttgagtgagtttctt

SEQ ID NO: 125450 - DNA, 22 bp, synthetic construct
  misc_feature 1..22: note = chemically synthesized
  source 1..22: mol_type = other DNA
tgagtgagtttcttaatcctga

SEQ ID NO: 125451 - DNA, 22 bp, synthetic construct
  misc_feature 1..22: note = chemically synthesized
  source 1..22: mol_type = other DNA
gagtgagtttcttaatcctgag

SEQ ID NO: 125452 - DNA, 22 bp, synthetic construct
  misc_feature 1..22: note = chemically synthesized
  source 1..22: mol_type = other DNA
agtgagtttcttaatcctgagt

SEQ ID NO: 125453 - DNA, 22 bp, synthetic construct
  misc_feature 1..22: note = chemically synthesized
  source 1..22: mol_type = other DNA
cttaatcctgagttctagtttg

SEQ ID NO: 125454 - DNA, 22 bp, synthetic construct
  misc_feature 1..22: note = chemically synthesized
  source 1..22: mol_type = other DNA
ttaatcctgagttctagtttga

SEQ ID NO: 125455 - DNA, 22 bp, synthetic construct
  misc_feature 1..22: note = chemically synthesized
  source 1..22: mol_type = other DNA
aatcctgagttctagtttgatt

SEQ ID NO: 125456 - DNA, 22 bp, synthetic construct
  misc_feature 1..22: note = chemically synthesized
  source 1..22: mol_type = other DNA
atcctgagttctagtttgattg

SEQ ID NO: 125457 - DNA, 22 bp, synthetic construct
  misc_feature 1..22: note = chemically synthesized
  source 1..22: mol_type = other DNA
agttctagtttgattgcactgt

SEQ ID NO: 125458 - DNA, 22 bp, synthetic construct
  misc_feature 1..22: note = chemically synthesized
  source 1..22: mol_type = other DNA
tagtttgattgcactgtggtct

SEQ ID NO: 125459 - DNA, 22 bp, synthetic construct
  misc_feature 1..22: note = chemically synthesized
  source 1..22: mol_type = other DNA
gtttgattgcactgtggtctga

SEQ ID NO: 125460 - DNA, 22 bp, synthetic construct
  misc_feature 1..22: note = chemically synthesized
  source 1..22: mol_type = other DNA
gattgcactgtggtctgagaga

SEQ ID NO: 125461 - DNA, 22 bp, synthetic construct
  misc_feature 1..22: note = chemically synthesized
  source 1..22: mol_type = other DNA
attgcactgtggtctgagagac

SEQ ID NO: 125462 - DNA, 22 bp, synthetic construct
  misc_feature 1..22: note = chemically synthesized
  source 1..22: mol_type = other DNA
cactgtggtctgagagacagtt

SEQ ID NO: 125463 - DNA, 22 bp, synthetic construct
  misc_feature 1..22: note = chemically synthesized
  source 1..22: mol_type = other DNA
tggtctgagagacagtttgtta

SEQ ID NO: 125464 - DNA, 22 bp, synthetic construct
  misc_feature 1..22: note = chemically synthesized
  source 1..22: mol_type = other DNA
agagacagtttgttataatttc

SEQ ID NO: 125465 - DNA, 22 bp, synthetic construct
  misc_feature 1..22: note = chemically synthesized
  source 1..22: mol_type = other DNA
gttataatttctgttcttttac

SEQ ID NO: 125466 - DNA, 22 bp, synthetic construct
  misc_feature 1..22: note = chemically synthesized
  source 1..22: mol_type = other DNA
ttataatttctgttcttttaca

SEQ ID NO: 125467 - DNA, 22 bp, synthetic construct
  misc_feature 1..22: note = chemically synthesized
  source 1..22: mol_type = other DNA
taatttctgttcttttacattt

SEQ ID NO: 125468 - DNA, 22 bp, synthetic construct
  misc_feature 1..22: note = chemically synthesized
  source 1..22: mol_type = other DNA
ctgttcttttacatttgctgag

SEQ ID NO: 125469 - DNA, 22 bp, synthetic construct
  misc_feature 1..22: note = chemically synthesized
  source 1..22: mol_type = other DNA
tgttcttttacatttgctgagg

SEQ ID NO: 125470 - DNA, 22 bp, synthetic construct
  misc_feature 1..22: note = chemically synthesized
  source 1..22: mol_type = other DNA
ttcttttacatttgctgaggag

SEQ ID NO: 125471 - DNA, 22 bp, synthetic construct
  misc_feature 1..22: note = chemically synthesized
  source 1..22: mol_type = other DNA
ttttacatttgctgaggagtgc

SEQ ID NO: 125472 - DNA, 22 bp, synthetic construct
  misc_feature 1..22: note = chemically synthesized
  source 1..22: mol_type = other DNA
ttacatttgctgaggagtgctt

SEQ ID NO: 125473 - DNA, 22 bp, synthetic construct
  misc_feature 1..22: note = chemically synthesized
  source 1..22: mol_type = other DNA
tacatttgctgaggagtgcttt

SEQ ID NO: 125474 - DNA, 22 bp, synthetic construct
  misc_feature 1..22: note = chemically synthesized
  source 1..22: mol_type = other DNA
acatttgctgaggagtgcttta

SEQ ID NO: 125475 - DNA, 22 bp, synthetic construct
  misc_feature 1..22: note = chemically synthesized
  source 1..22: mol_type = other DNA
catttgctgaggagtgctttac

SEQ ID NO: 125476 - DNA, 22 bp, synthetic construct
  misc_feature 1..22: note = chemically synthesized
  source 1..22: mol_type = other DNA
gctgaggagtgctttacttcca

SEQ ID NO: 125477 - DNA, 22 bp, synthetic construct
  misc_feature 1..22: note = chemically synthesized
  source 1..22: mol_type = other DNA
ctgaggagtgctttacttccaa

SEQ ID NO: 125478 - DNA, 22 bp, synthetic construct
  misc_feature 1..22: note = chemically synthesized
  source 1..22: mol_type = other DNA
aggagtgctttacttccaacta

SEQ ID NO: 125479 - DNA, 22 bp, synthetic construct
  misc_feature 1..22: note = chemically synthesized
  source 1..22: mol_type = other DNA
tacttccaactatgtggtcaat

SEQ ID NO: 125480 - DNA, 22 bp, synthetic construct
  misc_feature 1..22: note = chemically synthesized
  source 1..22: mol_type = other DNA
acttccaactatgtggtcaatt

SEQ ID NO: 125481 - DNA, 22 bp, synthetic construct
  misc_feature 1..22: note = chemically synthesized
  source 1..22: mol_type = other DNA
cttccaactatgtggtcaattt

SEQ ID NO: 125482 - DNA, 22 bp, synthetic construct
  misc_feature 1..22: note = chemically synthesized
  source 1..22: mol_type = other DNA
ccaactatgtggtcaattttgg

SEQ ID NO: 125483 - DNA, 22 bp, synthetic construct
  misc_feature 1..22: note = chemically synthesized
  source 1..22: mol_type = other DNA
caactatgtggtcaattttgga

SEQ ID NO: 125484 - DNA, 22 bp, synthetic construct
  misc_feature 1..22: note = chemically synthesized
  source 1..22: mol_type = other DNA
tgtggtcaattttggaataggt

SEQ ID NO: 125485 - DNA, 22 bp, synthetic construct
  misc_feature 1..22: note = chemically synthesized
  source 1..22: mol_type = other DNA
tggaataggtgtggtgtggtgc

SEQ ID NO: 125486 - DNA, 22 bp, synthetic construct
  misc_feature 1..22: note = chemically synthesized
  source 1..22: mol_type = other DNA
ggaataggtgtggtgtggtgct

SEQ ID NO: 125487 - DNA, 22 bp, synthetic construct
  misc_feature 1..22: note = chemically synthesized
  source 1..22: mol_type = other DNA
gaataggtgtggtgtggtgctg

SEQ ID NO: 125488 - DNA, 22 bp, synthetic construct
  misc_feature 1..22: note = chemically synthesized
  source 1..22: mol_type = other DNA
aaaagaatgtatattctgttga

SEQ ID NO: 125489 - DNA, 22 bp, synthetic construct
  misc_feature 1..22: note = chemically synthesized
  source 1..22: mol_type = other DNA
tgttgatttggggtggagagtt

SEQ ID NO: 125490 - DNA, 22 bp, synthetic construct
  misc_feature 1..22: note = chemically synthesized
  source 1..22: mol_type = other DNA
ttgatttggggtggagagttct

SEQ ID NO: 125491 - DNA, 22 bp, synthetic construct
  misc_feature 1..22: note = chemically synthesized
  source 1..22: mol_type = other DNA
atttggggtggagagttctgta

SEQ ID NO: 125492 - DNA, 22 bp, synthetic construct
  misc_feature 1..22: note = chemically synthesized
  source 1..22: mol_type = other DNA
ggggtggagagttctgtagatg

SEQ ID NO: 125493 - DNA, 22 bp, synthetic construct
  misc_feature 1..22: note = chemically synthesized
  source 1..22: mol_type = other DNA
gggtggagagttctgtagatgt

SEQ ID NO: 125494 - DNA, 22 bp, synthetic construct
  misc_feature 1..22: note = chemically synthesized
  source 1..22: mol_type = other DNA
tgtagatgtctattaggtccgc

SEQ ID NO: 125495 - DNA, 22 bp, synthetic construct
  misc_feature 1..22: note = chemically synthesized
  source 1..22: mol_type = other DNA
tagatgtctattaggtccgctt

SEQ ID NO: 125496 - DNA, 22 bp, synthetic construct
  misc_feature 1..22: note = chemically synthesized
  source 1..22: mol_type = other DNA
ttaggtccgcttggtgcagagc

SEQ ID NO: 125497 - DNA, 22 bp, synthetic construct
  misc_feature 1..22: note = chemically synthesized
  source 1..22: mol_type = other DNA
ggtccgcttggtgcagagctga

SEQ ID NO: 125498 - DNA, 22 bp, synthetic construct
  misc_feature 1..22: note = chemically synthesized
  source 1..22: mol_type = other DNA
ggtgcagagctgagttcaattc

SEQ ID NO: 125499 - DNA, 22 bp, synthetic construct
  misc_feature 1..22: note = chemically synthesized
  source 1..22: mol_type = other DNA
gtgcagagctgagttcaattcc

SEQ ID NO: 125500 - DNA, 22 bp, synthetic construct
  misc_feature 1..22: note = chemically synthesized
  source 1..22: mol_type = other DNA
agttcaattcctggatatcctt

SEQ ID NO: 125501 - DNA, 22 bp, synthetic construct
  misc_feature 1..22: note = chemically synthesized
  source 1..22: mol_type = other DNA
aattcctggatatccttgttaa

SEQ ID NO: 125502 - DNA, 22 bp, synthetic construct
  misc_feature 1..22: note = chemically synthesized
  source 1..22: mol_type = other DNA
ctggatatccttgttaactttc

SEQ ID NO: 125503 - DNA, 22 bp, synthetic construct
  misc_feature 1..22: note = chemically synthesized
  source 1..22: mol_type = other DNA
gatatccttgttaactttctgt

SEQ ID NO: 125504 - DNA, 22 bp, synthetic construct
  misc_feature 1..22: note = chemically synthesized
  source 1..22: mol_type = other DNA
gttaactttctgtctcgttgat

SEQ ID NO: 125505 - DNA, 22 bp, synthetic construct
  misc_feature 1..22: note = chemically synthesized
  source 1..22: mol_type = other DNA
ttaactttctgtctcgttgatc

SEQ ID NO: 125506 - DNA, 22 bp, synthetic construct
  misc_feature 1..22: note = chemically synthesized
  source 1..22: mol_type = other DNA
actttctgtctcgttgatctgt

SEQ ID NO: 125507 - DNA, 22 bp, synthetic construct
  misc_feature 1..22: note = chemically synthesized
  source 1..22: mol_type = other DNA
tctgtctcgttgatctgtctaa

SEQ ID NO: 125508 - DNA, 22 bp, synthetic construct
  misc_feature 1..22: note = chemically synthesized
  source 1..22: mol_type = other DNA
ctgtctcgttgatctgtctaat

SEQ ID NO: 125509 - DNA, 22 bp, synthetic construct
  misc_feature 1..22: note = chemically synthesized
  source 1..22: mol_type = other DNA
tgtctcgttgatctgtctaatg

SEQ ID NO: 125510 - DNA, 22 bp, synthetic construct
  misc_feature 1..22: note = chemically synthesized
  source 1..22: mol_type = other DNA
tctcgttgatctgtctaatgtt

SEQ ID NO: 125511 - DNA, 22 bp, synthetic construct
  misc_feature 1..22: note = chemically synthesized
  source 1..22: mol_type = other DNA
gttgatctgtctaatgttgatc

SEQ ID NO: 125512 - DNA, 22 bp, synthetic construct
  misc_feature 1..22: note = chemically synthesized
  source 1..22: mol_type = other DNA
atctgtctaatgttgatctgtc

SEQ ID NO: 125513 - DNA, 22 bp, synthetic construct
  misc_feature 1..22: note = chemically synthesized
  source 1..22: mol_type = other DNA
tctaatgttgatctgtctaatg

SEQ ID NO: 125514 - DNA, 22 bp, synthetic construct
  misc_feature 1..22: note = chemically synthesized
  source 1..22: mol_type = other DNA
atgttgatctgtctaatgttga

SEQ ID NO: 125515 - DNA, 22 bp, synthetic construct
  misc_feature 1..22: note = chemically synthesized
  source 1..22: mol_type = other DNA
atctgtctaatgttgacagtgg

SEQ ID NO: 125516 - DNA, 22 bp, synthetic construct
  misc_feature 1..22: note = chemically synthesized
  source 1..22: mol_type = other DNA
tctaatgttgacagtggggtgt

SEQ ID NO: 125517 - DNA, 22 bp, synthetic construct
  misc_feature 1..22: note = chemically synthesized
  source 1..22: mol_type = other DNA
atgttgacagtggggtgttaaa

SEQ ID NO: 125518 - DNA, 22 bp, synthetic construct
  misc_feature 1..22: note = chemically synthesized
  source 1..22: mol_type = other DNA
acagtggggtgttaaagtctcc

SEQ ID NO: 125519 - DNA, 22 bp, synthetic construct
  misc_feature 1..22: note = chemically synthesized
  source 1..22: mol_type = other DNA
aagtctcccattgttattgtgt

SEQ ID NO: 125520 - DNA, 22 bp, synthetic construct
  misc_feature 1..22: note = chemically synthesized
  source 1..22: mol_type = other DNA
ccattgttattgtgtgagagtc

SEQ ID NO: 125521 - DNA, 22 bp, synthetic construct
  misc_feature 1..22: note = chemically synthesized
  source 1..22: mol_type = other DNA
ttattgtgtgagagtctaagtc

SEQ ID NO: 125522 - DNA, 22 bp, synthetic construct
  misc_feature 1..22: note = chemically synthesized
  source 1..22: mol_type = other DNA
ttgtgtgagagtctaagtctct

SEQ ID NO: 125523 - DNA, 22 bp, synthetic construct
  misc_feature 1..22: note = chemically synthesized
  source 1..22: mol_type = other DNA
tgtgagagtctaagtctctttg

SEQ ID NO: 125524 - DNA, 22 bp, synthetic construct
  misc_feature 1..22: note = chemically synthesized
  source 1..22: mol_type = other DNA
agtctctttgtaggtctctaag

SEQ ID NO: 125525 - DNA, 22 bp, synthetic construct
  misc_feature 1..22: note = chemically synthesized
  source 1..22: mol_type = other DNA
tttgtaggtctctaaggacttg

SEQ ID NO: 125526 - DNA, 22 bp, synthetic construct
  misc_feature 1..22: note = chemically synthesized
  source 1..22: mol_type = other DNA
tgtaggtctctaaggacttgct

SEQ ID NO: 125527 - DNA, 22 bp, synthetic construct
  misc_feature 1..22: note = chemically synthesized
  source 1..22: mol_type = other DNA
gtaggtctctaaggacttgctt

SEQ ID NO: 125528 - DNA, 22 bp, synthetic construct
  misc_feature 1..22: note = chemically synthesized
  source 1..22: mol_type = other DNA
taggtctctaaggacttgcttt

SEQ ID NO: 125529 - DNA, 22 bp, synthetic construct
  misc_feature 1..22: note = chemically synthesized
  source 1..22: mol_type = other DNA
taaggacttgctttatgaacct

SEQ ID NO: 125530 - DNA, 22 bp, synthetic construct
  misc_feature 1..22: note = chemically synthesized
  source 1..22: mol_type = other DNA
aggacttgctttatgaacctgg

SEQ ID NO: 125531 - DNA, 22 bp, synthetic construct
  misc_feature 1..22: note = chemically synthesized
  source 1..22: mol_type = other DNA
gctttatgaacctgggtgttcc

SEQ ID NO: 125532 - DNA, 22 bp, synthetic construct
  misc_feature 1..22: note = chemically synthesized
  source 1..22: mol_type = other DNA
ctttatgaacctgggtgttcct

SEQ ID NO: 125533 - DNA, 22 bp, synthetic construct
  misc_feature 1..22: note = chemically synthesized
  source 1..22: mol_type = other DNA
tatgaacctgggtgttcctgta

SEQ ID NO: 125534 - DNA, 22 bp, synthetic construct
  misc_feature 1..22: note = chemically synthesized
  source 1..22: mol_type = other DNA
atgaacctgggtgttcctgtat

SEQ ID NO: 125535 - DNA, 22 bp, synthetic construct
  misc_feature 1..22: note = chemically synthesized
  source 1..22: mol_type = other DNA
tgaacctgggtgttcctgtatt

SEQ ID NO: 125536 - DNA, 22 bp, synthetic construct
  misc_feature 1..22: note = chemically synthesized
  source 1..22: mol_type = other DNA
ggtgttcctgtattgggtgcat

SEQ ID NO: 125537 - DNA, 22 bp, synthetic construct
  misc_feature 1..22: note = chemically synthesized
  source 1..22: mol_type = other DNA
ctgtattgggtgcatatatgtt

SEQ ID NO: 125538 - DNA, 22 bp, synthetic construct
  misc_feature 1..22: note = chemically synthesized
  source 1..22: mol_type = other DNA
tattgggtgcatatatgtttag

SEQ ID NO: 125539 - DNA, 22 bp, synthetic construct
  misc_feature 1..22: note = chemically synthesized
  source 1..22: mol_type = other DNA
ggtgcatatatgtttaggatag

SEQ ID NO: 125540 - DNA, 22 bp, synthetic construct
  misc_feature 1..22: note = chemically synthesized
  source 1..22: mol_type = other DNA
aggatagttagctcttcttgtt

SEQ ID NO: 125541 - DNA, 22 bp, synthetic construct
  misc_feature 1..22: note = chemically synthesized
  source 1..22: mol_type = other DNA
ggatagttagctcttcttgttg

SEQ ID NO: 125542 - DNA, 22 bp, synthetic construct
  misc_feature 1..22: note = chemically synthesized
  source 1..22: mol_type = other DNA
gctcttcttgttgaattgatcc

SEQ ID NO: 125543 - DNA, 22 bp, synthetic construct
  misc_feature 1..22: note = chemically synthesized
  source 1..22: mol_type = other DNA
ttcttgttgaattgatcccttt

SEQ ID NO: 125544 - DNA, 22 bp, synthetic construct
  misc_feature 1..22: note = chemically synthesized
  source 1..22: mol_type = other DNA
cttgttgaattgatccctttac

SEQ ID NO: 125545 - DNA, 22 bp, synthetic construct
  misc_feature 1..22: note = chemically synthesized
  source 1..22: mol_type = other DNA
ttgttgaattgatccctttacc

SEQ ID NO: 125546 - DNA, 22 bp, synthetic construct
  misc_feature 1..22: note = chemically synthesized
  source 1..22: mol_type = other DNA
gttgaattgatccctttaccat

SEQ ID NO: 125547 - DNA, 22 bp, synthetic construct
  misc_feature 1..22: note = chemically synthesized
  source 1..22: mol_type = other DNA
ttgaattgatccctttaccatt

SEQ ID NO: 125548 - DNA, 22 bp, synthetic construct
  misc_feature 1..22: note = chemically synthesized
  source 1..22: mol_type = other DNA
aattgatccctttaccattatg

SEQ ID NO: 125549 - DNA, 22 bp, synthetic construct
  misc_feature 1..22: note = chemically synthesized
  source 1..22: mol_type = other DNA
atccctttaccattatgtaatg

SEQ ID NO: 125550 - DNA, 22 bp, synthetic construct
  misc_feature 1..22: note = chemically synthesized
  source 1..22: mol_type = other DNA
taccattatgtaatggccttct

SEQ ID NO: 125551 - DNA, 22 bp, synthetic construct
  misc_feature 1..22: note = chemically synthesized
  source 1..22: mol_type = other DNA
accattatgtaatggccttctt

SEQ ID NO: 125552 - DNA, 22 bp, synthetic construct
  misc_feature 1..22: note = chemically synthesized
  source 1..22: mol_type = other DNA
ccattatgtaatggccttcttt

SEQ ID NO: 125553 - DNA, 22 bp, synthetic construct
  misc_feature 1..22: note = chemically synthesized
  source 1..22: mol_type = other DNA
tgtaatggccttctttgtctct

SEQ ID NO: 125554 - DNA, 22 bp, synthetic construct
  misc_feature 1..22: note = chemically synthesized
  source 1..22: mol_type = other DNA
ctttgtctcttttgatctttgt

SEQ ID NO: 125555 - DNA, 22 bp, synthetic construct
  misc_feature 1..22: note = chemically synthesized
  source 1..22: mol_type = other DNA
tttgtctcttttgatctttgtt

SEQ ID NO: 125556 - DNA, 22 bp, synthetic construct
  misc_feature 1..22: note = chemically synthesized
  source 1..22: mol_type = other DNA
tgtctcttttgatctttgttgg

SEQ ID NO: 125557 - DNA, 22 bp, synthetic construct
  misc_feature 1..22: note = chemically synthesized
  source 1..22: mol_type = other DNA
gtctcttttgatctttgttggt

SEQ ID NO: 125558 - DNA, 22 bp, synthetic construct
  misc_feature 1..22: note = chemically synthesized
  source 1..22: mol_type = other DNA
tctcttttgatctttgttggtt

SEQ ID NO: 125559 - DNA, 22 bp, synthetic construct
  misc_feature 1..22: note = chemically synthesized
  source 1..22: mol_type = other DNA
ttttgatctttgttggtttaaa

SEQ ID NO: 125560 - DNA, 22 bp, synthetic construct
  misc_feature 1..22: note = chemically synthesized
  source 1..22: mol_type = other DNA
ttgatctttgttggtttaaagc

SEQ ID NO: 125561 - DNA, 22 bp, synthetic construct
  misc_feature 1..22: note = chemically synthesized
  source 1..22: mol_type = other DNA
tgatctttgttggtttaaagcc

SEQ ID NO: 125562 - DNA, 22 bp, synthetic construct
  misc_feature 1..22: note = chemically synthesized
  source 1..22: mol_type = other DNA
gatctttgttggtttaaagcct

SEQ ID NO: 125563 - DNA, 22 bp, synthetic construct
  misc_feature 1..22: note = chemically synthesized
  source 1..22: mol_type = other DNA
atctttgttggtttaaagcctg

SEQ ID NO: 125564 - DNA, 22 bp, synthetic construct
  misc_feature 1..22: note = chemically synthesized
  source 1..22: mol_type = other DNA
tgttggtttaaagcctgtttta

SEQ ID NO: 125565 - DNA, 22 bp, synthetic construct
  misc_feature 1..22: note = chemically synthesized
  source 1..22: mol_type = other DNA
gttggtttaaagcctgttttat

SEQ ID NO: 125566 - DNA, 22 bp, synthetic construct
  misc_feature 1..22: note = chemically synthesized
  source 1..22: mol_type = other DNA
ttggtttaaagcctgttttatc

SEQ ID NO: 125567 - DNA, 22 bp, synthetic construct
  misc_feature 1..22: note = chemically synthesized
  source 1..22: mol_type = other DNA
gtttaaagcctgttttatcaga

SEQ ID NO: 125568 - DNA, 22 bp, synthetic construct
  misc_feature 1..22: note = chemically synthesized
  source 1..22: mol_type = other DNA
aaagcctgttttatcagagatg

SEQ ID NO: 125569 - DNA, 22 bp, synthetic construct
  misc_feature 1..22: note = chemically synthesized
  source 1..22: mol_type = other DNA
aagcctgttttatcagagatga

SEQ ID NO: 125570 - DNA, 22 bp, synthetic construct
  misc_feature 1..22: note = chemically synthesized
  source 1..22: mol_type = other DNA
ttttatcagagatgaggattgc

SEQ ID NO: 125571 - DNA, 22 bp, synthetic construct
  misc_feature 1..22: note = chemically synthesized
  source 1..22: mol_type = other DNA
tatcagagatgaggattgcaac

SEQ ID NO: 125572 - DNA, 22 bp, synthetic construct
  misc_feature 1..22: note = chemically synthesized
  source 1..22: mol_type = other DNA
atcagagatgaggattgcaacc

SEQ ID NO: 125573 - DNA, 22 bp, synthetic construct
  misc_feature 1..22: note = chemically synthesized
  source 1..22: mol_type = other DNA
tcagagatgaggattgcaaccc

SEQ ID NO: 125574 - DNA, 22 bp, synthetic construct
  misc_feature 1..22: note = chemically synthesized
  source 1..22: mol_type = other DNA
caacccctgcctttttttgttt

SEQ ID NO: 125575 - DNA, 22 bp, synthetic construct
  misc_feature 1..22: note = chemically synthesized
  source 1..22: mol_type = other DNA
cctttttttgttttccattttc

SEQ ID NO: 125576 - DNA, 22 bp, synthetic construct
  misc_feature 1..22: note = chemically synthesized
  source 1..22: mol_type = other DNA
tttttgttttccattttcttgg

SEQ ID NO: 125577 - DNA, 22 bp, synthetic construct
  misc_feature 1..22: note = chemically synthesized
  source 1..22: mol_type = other DNA
ttttgttttccattttcttggt

SEQ ID NO: 125578 - DNA, 22 bp, synthetic construct
  misc_feature 1..22: note = chemically synthesized
  source 1..22: mol_type = other DNA
tttgttttccattttcttggta

SEQ ID NO: 125579 - DNA, 22 bp, synthetic construct
  misc_feature 1..22: note = chemically synthesized
  source 1..22: mol_type = other DNA
ttgttttccattttcttggtag

SEQ ID NO: 125580 - DNA, 22 bp, synthetic construct
  misc_feature 1..22: note = chemically synthesized
  source 1..22: mol_type = other DNA
tgttttccattttcttggtaga

SEQ ID NO: 125581 - DNA, 22 bp, synthetic construct
  misc_feature 1..22: note = chemically synthesized
  source 1..22: mol_type = other DNA
gttttccattttcttggtagat

SEQ ID NO: 125582 - DNA, 22 bp, synthetic construct
  misc_feature 1..22: note = chemically synthesized
  source 1..22: mol_type = other DNA
ttttccattttcttggtagatc

SEQ ID NO: 125583 - DNA, 22 bp, synthetic construct
  misc_feature 1..22: note = chemically synthesized
  source 1..22: mol_type = other DNA
tccattttcttggtagatcttc

SEQ ID NO: 125584 - DNA, 22 bp, synthetic construct
  misc_feature 1..22: note = chemically synthesized
  source 1..22: mol_type = other DNA
ccattttcttggtagatcttcc

SEQ ID NO: 125585 - DNA, 22 bp, synthetic construct
  misc_feature 1..22: note = chemically synthesized
  source 1..22: mol_type = other DNA
cattttcttggtagatcttcct

SEQ ID NO: 125586 - DNA, 22 bp, synthetic construct
  misc_feature 1..22: note = chemically synthesized
  source 1..22: mol_type = other DNA
tcttggtagatcttcctccatc

SEQ ID NO: 125587 - DNA, 22 bp, synthetic construct
  misc_feature 1..22: note = chemically synthesized
  source 1..22: mol_type = other DNA
cttggtagatcttcctccatcc

SEQ ID NO: 125588 - DNA, 22 bp, synthetic construct
  misc_feature 1..22: note = chemically synthesized
  source 1..22: mol_type = other DNA
ttggtagatcttcctccatccc

SEQ ID NO: 125589 - DNA, 22 bp, synthetic construct
  misc_feature 1..22: note = chemically synthesized
  source 1..22: mol_type = other DNA
ggtagatcttcctccatccctt

SEQ ID NO: 125590 - DNA, 22 bp, synthetic construct
  misc_feature 1..22: note = chemically synthesized
  source 1..22: mol_type = other DNA
gtagatcttcctccatcccttt

SEQ ID NO: 125591 - DNA, 22 bp, synthetic construct
  misc_feature 1..22: note = chemically synthesized
  source 1..22: mol_type = other DNA
cctccatccctttattttgagc

SEQ ID NO: 125592 - DNA, 22 bp, synthetic construct
  misc_feature 1..22: note = chemically synthesized
  source 1..22: mol_type = other DNA
ctccatccctttattttgagcc

SEQ ID NO: 125593 - DNA, 22 bp, synthetic construct
  misc_feature 1..22: note = chemically synthesized
  source 1..22: mol_type = other DNA
catccctttattttgagcctat

SEQ ID NO: 125594 - DNA, 22 bp, synthetic construct
  misc_feature 1..22: note = chemically synthesized
  source 1..22: mol_type = other DNA
tattttgagcctatgtgtgtgt

SEQ ID NO: 125595 - DNA, 22 bp, synthetic construct
  misc_feature 1..22: note = chemically synthesized
  source 1..22: mol_type = other DNA
attttgagcctatgtgtgtgtg

SEQ ID NO: 125596 - DNA, 22 bp, synthetic construct
  misc_feature 1..22: note = chemically synthesized
  source 1..22: mol_type = other DNA
ttttgagcctatgtgtgtgtgt

SEQ ID NO: 125597 - DNA, 22 bp, synthetic construct
  misc_feature 1..22: note = chemically synthesized
  source 1..22: mol_type = other DNA
tgagcctatgtgtgtgtgtgca

SEQ ID NO: 125598 - DNA, 22 bp, synthetic construct
  misc_feature 1..22: note = chemically synthesized
  source 1..22: mol_type = other DNA
gagcctatgtgtgtgtgtgcac

SEQ ID NO: 125599 - DNA, 22 bp, synthetic construct
  misc_feature 1..22: note = chemically synthesized
  source 1..22: mol_type = other DNA
agcctatgtgtgtgtgtgcaca

SEQ ID NO: 125600 - DNA, 22 bp, synthetic construct
  misc_feature 1..22: note = chemically synthesized
  source 1..22: mol_type = other DNA
tgtgtgtgtgtgcacatgagat

SEQ ID NO: 125601 - DNA, 22 bp, synthetic construct
  misc_feature 1..22: note = chemically synthesized
  source 1..22: mol_type = other DNA
cctgaatacagcacactgatgg

SEQ ID NO: 125602 - DNA, 22 bp, synthetic construct
  misc_feature 1..22: note = chemically synthesized
  source 1..22: mol_type = other DNA
ctgaatacagcacactgatggg

SEQ ID NO: 125603 - DNA, 22 bp, synthetic construct
  misc_feature 1..22: note = chemically synthesized
  source 1..22: mol_type = other DNA
aatacagcacactgatgggtct

SEQ ID NO: 125604 - DNA, 22 bp, synthetic construct
  misc_feature 1..22: note = chemically synthesized
  source 1..22: mol_type = other DNA
atgggtcttgactctttatcta

SEQ ID NO: 125605 - DNA, 22 bp, synthetic construct
  misc_feature 1..22: note = chemically synthesized
  source 1..22: mol_type = other DNA
gactctttatctaatttgcccg

SEQ ID NO: 125606 - DNA, 22 bp, synthetic construct
  misc_feature 1..22: note = chemically synthesized
  source 1..22: mol_type = other DNA
actctttatctaatttgcccgt

SEQ ID NO: 125607 - DNA, 22 bp, synthetic construct
  misc_feature 1..22: note = chemically synthesized
  source 1..22: mol_type = other DNA
tttatctaatttgcccgtctgt

SEQ ID NO: 125608 - DNA, 22 bp, synthetic construct
  misc_feature 1..22: note = chemically synthesized
  source 1..22: mol_type = other DNA
tatctaatttgcccgtctgtgt

SEQ ID NO: 125609 - DNA, 22 bp, synthetic construct
  misc_feature 1..22: note = chemically synthesized
  source 1..22: mol_type = other DNA
atctaatttgcccgtctgtgtc

SEQ ID NO: 125610 - DNA, 22 bp, synthetic construct
  misc_feature 1..22: note = chemically synthesized
  source 1..22: mol_type = other DNA
tctaatttgcccgtctgtgtct

SEQ ID NO: 125611 - DNA, 22 bp, synthetic construct
  misc_feature 1..22: note = chemically synthesized
  source 1..22: mol_type = other DNA
atttgcccgtctgtgtcttttt

SEQ ID NO: 125612 - DNA, 22 bp, synthetic construct
  misc_feature 1..22: note = chemically synthesized
  source 1..22: mol_type = other DNA
gcccgtctgtgtctttttactg

SEQ ID NO: 125613 - DNA, 22 bp, synthetic construct
  misc_feature 1..22: note = chemically synthesized
  source 1..22: mol_type = other DNA
cccgtctgtgtctttttactgg

SEQ ID NO: 125614 - DNA, 22 bp, synthetic construct
  misc_feature 1..22: note = chemically synthesized
  source 1..22: mol_type = other DNA
tgtctttttactggagcattta

SEQ ID NO: 125615 - DNA, 22 bp, synthetic construct
  misc_feature 1..22: note = chemically synthesized
  source 1..22: mol_type = other DNA
tttactggagcatttagcccat

SEQ ID NO: 125616 - DNA, 22 bp, synthetic construct
  misc_feature 1..22: note = chemically synthesized
  source 1..22: mol_type = other DNA
ttactggagcatttagcccatt

SEQ ID NO: 125617 - DNA, 22 bp, synthetic construct
  misc_feature 1..22: note = chemically synthesized
  source 1..22: mol_type = other DNA
tactggagcatttagcccattt

SEQ ID NO: 125618 - DNA, 22 bp, synthetic construct
  misc_feature 1..22: note = chemically synthesized
  source 1..22: mol_type = other DNA
actggagcatttagcccattta

SEQ ID NO: 125619 - DNA, 22 bp, synthetic construct
  misc_feature 1..22: note = chemically synthesized
  source 1..22: mol_type = other DNA
ctggagcatttagcccatttac

SEQ ID NO: 125620 - DNA, 22 bp, synthetic construct
  misc_feature 1..22: note = chemically synthesized
  source 1..22: mol_type = other DNA
gagcatttagcccatttacatt

SEQ ID NO: 125621 - DNA, 22 bp, synthetic construct
  misc_feature 1..22: note = chemically synthesized
  source 1..22: mol_type = other DNA
agcccatttacattaaggttaa

SEQ ID NO: 125622 - DNA, 22 bp, synthetic construct
  misc_feature 1..22: note = chemically synthesized
  source 1..22: mol_type = other DNA
gcccatttacattaaggttaat

SEQ ID NO: 125623 - DNA, 22 bp, synthetic construct
  misc_feature 1..22: note = chemically synthesized
  source 1..22: mol_type = other DNA
acattaaggttaatattgttat

SEQ ID NO: 125624 - DNA, 22 bp, synthetic construct
  misc_feature 1..22: note = chemically synthesized
  source 1..22: mol_type = other DNA
cattaaggttaatattgttatg

SEQ ID NO: 125625 - DNA, 22 bp, synthetic construct
  misc_feature 1..22: note = chemically synthesized
  source 1..22: mol_type = other DNA
aggttaatattgttatgtgtga

SEQ ID NO: 125626 - DNA, 22 bp, synthetic construct
  misc_feature 1..22: note = chemically synthesized
  source 1..22: mol_type = other DNA
atattgttatgtgtgaatttga

SEQ ID NO: 125627 - DNA, 22 bp, synthetic construct
  misc_feature 1..22: note = chemically synthesized
  source 1..22: mol_type = other DNA
ttatgtgtgaatttgatcctgt

SEQ ID NO: 125628 - DNA, 22 bp, synthetic construct
  misc_feature 1..22: note = chemically synthesized
  source 1..22: mol_type = other DNA
tgtgtgaatttgatcctgtcat

SEQ ID NO: 125629 - DNA, 22 bp, synthetic construct
  misc_feature 1..22: note = chemically synthesized
  source 1..22: mol_type = other DNA
gatcctgtcattatgatgttag

SEQ ID NO: 125630 - DNA, 22 bp, synthetic construct
  misc_feature 1..22: note = chemically synthesized
  source 1..22: mol_type = other DNA
atcctgtcattatgatgttagc

SEQ ID NO: 125631 - DNA, 22 bp, synthetic construct
  misc_feature 1..22: note = chemically synthesized
  source 1..22: mol_type = other DNA
tcattatgatgttagctggtta

SEQ ID NO: 125632 - DNA, 22 bp, synthetic construct
  misc_feature 1..22: note = chemically synthesized
  source 1..22: mol_type = other DNA
tgatgttagctggttattttgc

SEQ ID NO: 125633 - DNA, 22 bp, synthetic construct
  misc_feature 1..22: note = chemically synthesized
  source 1..22: mol_type = other DNA
gctggttattttgctcattagt

SEQ ID NO: 125634 - DNA, 22 bp, synthetic construct
  misc_feature 1..22: note = chemically synthesized
  source 1..22: mol_type = other DNA
gttattttgctcattagttgat

SEQ ID NO: 125635 - DNA, 22 bp, synthetic construct
  misc_feature 1..22: note = chemically synthesized
  source 1..22: mol_type = other DNA
ttttgctcattagttgatgcag

SEQ ID NO: 125636 - DNA, 22 bp, synthetic construct
  misc_feature 1..22: note = chemically synthesized
  source 1..22: mol_type = other DNA
tgctcattagttgatgcagttt

SEQ ID NO: 125637 - DNA, 22 bp, synthetic construct
  misc_feature 1..22: note = chemically synthesized
  source 1..22: mol_type = other DNA
gctcattagttgatgcagtttc

SEQ ID NO: 125638 - DNA, 22 bp, synthetic construct
  misc_feature 1..22: note = chemically synthesized
  source 1..22: mol_type = other DNA
ctcattagttgatgcagtttct

SEQ ID NO: 125639 - DNA, 22 bp, synthetic construct
  misc_feature 1..22: note = chemically synthesized
  source 1..22: mol_type = other DNA
attagttgatgcagtttcttcc

SEQ ID NO: 125640 - DNA, 22 bp, synthetic construct
  misc_feature 1..22: note = chemically synthesized
  source 1..22: mol_type = other DNA
gttgatgcagtttcttcctagc

SEQ ID NO: 125641 - DNA, 22 bp, synthetic construct
  misc_feature 1..22: note = chemically synthesized
  source 1..22: mol_type = other DNA
atgcagtttcttcctagcctca

SEQ ID NO: 125642 - DNA, 22 bp, synthetic construct
  misc_feature 1..22: note = chemically synthesized
  source 1..22: mol_type = other DNA
cttcctagcctcaatggtcttt

SEQ ID NO: 125643 - DNA, 22 bp, synthetic construct
  misc_feature 1..22: note = chemically synthesized
  source 1..22: mol_type = other DNA
ttcctagcctcaatggtcttta

SEQ ID NO: 125644 - DNA, 22 bp, synthetic construct
  misc_feature 1..22: note = chemically synthesized
  source 1..22: mol_type = other DNA
cctagcctcaatggtctttaca

SEQ ID NO: 125645 - DNA, 22 bp, synthetic construct
  misc_feature 1..22: note = chemically synthesized
  source 1..22: mol_type = other DNA
ctagcctcaatggtctttacaa

SEQ ID NO: 125646 - DNA, 22 bp, synthetic construct
  misc_feature 1..22: note = chemically synthesized
  source 1..22: mol_type = other DNA
gcctcaatggtctttacaattt

SEQ ID NO: 125647 - DNA, 22 bp, synthetic construct
  misc_feature 1..22: note = chemically synthesized
  source 1..22: mol_type = other DNA
aatggtctttacaatttggcat

SEQ ID NO: 125648 - DNA, 22 bp, synthetic construct
  misc_feature 1..22: note = chemically synthesized
  source 1..22: mol_type = other DNA
tacaatttggcatgtttttgca

SEQ ID NO: 125649 - DNA, 22 bp, synthetic construct
  misc_feature 1..22: note = chemically synthesized
  source 1..22: mol_type = other DNA
acaatttggcatgtttttgcag

SEQ ID NO: 125650 - DNA, 22 bp, synthetic construct
  misc_feature 1..22: note = chemically synthesized
  source 1..22: mol_type = other DNA
caatttggcatgtttttgcagt

SEQ ID NO: 125651 - DNA, 22 bp, synthetic construct
  misc_feature 1..22: note = chemically synthesized
  source 1..22: mol_type = other DNA
ggcatgtttttgcagtggctgg

SEQ ID NO: 125652 - DNA, 22 bp, synthetic construct
  misc_feature 1..22: note = chemically synthesized
  source 1..22: mol_type = other DNA
gcatgtttttgcagtggctggt

SEQ ID NO: 125653 - DNA, 22 bp, synthetic construct
  misc_feature 1..22: note = chemically synthesized
  source 1..22: mol_type = other DNA
ttgcagtggctggtaccggttg

SEQ ID NO: 125654 - DNA, 22 bp, synthetic construct
  misc_feature 1..22: note = chemically synthesized
  source 1..22: mol_type = other DNA
tgcagtggctggtaccggttgt

SEQ ID NO: 125655 - DNA, 22 bp, synthetic construct
  misc_feature 1..22: note = chemically synthesized
  source 1..22: mol_type = other DNA
gcagtggctggtaccggttgtg

SEQ ID NO: 125656 - DNA, 22 bp, synthetic construct
  misc_feature 1..22: note = chemically synthesized
  source 1..22: mol_type = other DNA
cagtggctggtaccggttgtgc

SEQ ID NO: 125657 - DNA, 22 bp, synthetic construct
  misc_feature 1..22: note = chemically synthesized
  source 1..22: mol_type = other DNA
gtaccggttgtgcctttccata

SEQ ID NO: 125658 - DNA, 22 bp, synthetic construct
  misc_feature 1..22: note = chemically synthesized
  source 1..22: mol_type = other DNA
tgcctttccatatttagtgctt

SEQ ID NO: 125659 - DNA, 22 bp, synthetic construct
  misc_feature 1..22: note = chemically synthesized
  source 1..22: mol_type = other DNA
tccatatttagtgcttccttca

SEQ ID NO: 125660 - DNA, 22 bp, synthetic construct
  misc_feature 1..22: note = chemically synthesized
  source 1..22: mol_type = other DNA
ccatatttagtgcttccttcag

SEQ ID NO: 125661 - DNA, 22 bp, synthetic construct
  misc_feature 1..22: note = chemically synthesized
  source 1..22: mol_type = other DNA
catatttagtgcttccttcagg

SEQ ID NO: 125662 - DNA, 22 bp, synthetic construct
  misc_feature 1..22: note = chemically synthesized
  source 1..22: mol_type = other DNA
agtgcttccttcaggagctctt

SEQ ID NO: 125663 - DNA, 22 bp, synthetic construct
  misc_feature 1..22: note = chemically synthesized
  source 1..22: mol_type = other DNA
gtgcttccttcaggagctcttt

SEQ ID NO: 125664 - DNA, 22 bp, synthetic construct
  misc_feature 1..22: note = chemically synthesized
  source 1..22: mol_type = other DNA
ccttcaggagctcttttaggtc

SEQ ID NO: 125665 - DNA, 22 bp, synthetic construct
  misc_feature 1..22: note = chemically synthesized
  source 1..22: mol_type = other DNA
cttcaggagctcttttaggtca

SEQ ID NO: 125666 - DNA, 22 bp, synthetic construct
  misc_feature 1..22: note = chemically synthesized
  source 1..22: mol_type = other DNA
caggagctcttttaggtcaggc

SEQ ID NO: 125667 - DNA, 22 bp, synthetic construct
  misc_feature 1..22: note = chemically synthesized
  source 1..22: mol_type = other DNA
aggagctcttttaggtcaggcc

SEQ ID NO: 125668 - DNA, 22 bp, synthetic construct
  misc_feature 1..22: note = chemically synthesized
  source 1..22: mol_type = other DNA
ttttaggtcaggcctggtgatg

SEQ ID NO: 125669 - DNA, 22 bp, synthetic construct
  misc_feature 1..22: note = chemically synthesized
  source 1..22: mol_type = other DNA
ttaggtcaggcctggtgatgac

SEQ ID NO: 125670 - DNA, 22 bp, synthetic construct
  misc_feature 1..22: note = chemically synthesized
  source 1..22: mol_type = other DNA
taggtcaggcctggtgatgaca

SEQ ID NO: 125671 - DNA, 22 bp, synthetic construct
  misc_feature 1..22: note = chemically synthesized
  source 1..22: mol_type = other DNA
aggtcaggcctggtgatgacaa

SEQ ID NO: 125672 - DNA, 22 bp, synthetic construct
  misc_feature 1..22: note = chemically synthesized
  source 1..22: mol_type = other DNA
ggtcaggcctggtgatgacaaa

SEQ ID NO: 125673 - DNA, 22 bp, synthetic construct
  misc_feature 1..22: note = chemically synthesized
  source 1..22: mol_type = other DNA
gtgatgacaaaatctctcagca

SEQ ID NO: 125674 - DNA, 22 bp, synthetic construct
  misc_feature 1..22: note = chemically synthesized
  source 1..22: mol_type = other DNA
tcagcatttgcttgtctgtaaa

SEQ ID NO: 125675 - DNA, 22 bp, synthetic construct
  misc_feature 1..22: note = chemically synthesized
  source 1..22: mol_type = other DNA
agcatttgcttgtctgtaaagt

SEQ ID NO: 125676 - DNA, 22 bp, synthetic construct
  misc_feature 1..22: note = chemically synthesized
  source 1..22: mol_type = other DNA
gcttgtctgtaaagtattttat

SEQ ID NO: 125677 - DNA, 22 bp, synthetic construct
  misc_feature 1..22: note = chemically synthesized
  source 1..22: mol_type = other DNA
cttgtctgtaaagtattttatt

SEQ ID NO: 125678 - DNA, 22 bp, synthetic construct
  misc_feature 1..22: note = chemically synthesized
  source 1..22: mol_type = other DNA
gtctgtaaagtattttatttct

SEQ ID NO: 125679 - DNA, 22 bp, synthetic construct
  misc_feature 1..22: note = chemically synthesized
  source 1..22: mol_type = other DNA
tctgtaaagtattttatttctc

SEQ ID NO: 125680 - DNA, 22 bp, synthetic construct
  misc_feature 1..22: note = chemically synthesized
  source 1..22: mol_type = other DNA
taaagtattttatttctccttc

SEQ ID NO: 125681 - DNA, 22 bp, synthetic construct
  misc_feature 1..22: note = chemically synthesized
  source 1..22: mol_type = other DNA
tatttctccttcacttatgaag

SEQ ID NO: 125682 - DNA, 22 bp, synthetic construct
  misc_feature 1..22: note = chemically synthesized
  source 1..22: mol_type = other DNA
atttctccttcacttatgaagc

SEQ ID NO: 125683 - DNA, 22 bp, synthetic construct
  misc_feature 1..22: note = chemically synthesized
  source 1..22: mol_type = other DNA
tttctccttcacttatgaagct

SEQ ID NO: 125684 - DNA, 22 bp, synthetic construct
  misc_feature 1..22: note = chemically synthesized
  source 1..22: mol_type = other DNA
ctccttcacttatgaagcttag

SEQ ID NO: 125685 - DNA, 22 bp, synthetic construct
  misc_feature 1..22: note = chemically synthesized
  source 1..22: mol_type = other DNA
tccttcacttatgaagcttagt

SEQ ID NO: 125686 - DNA, 22 bp, synthetic construct
  misc_feature 1..22: note = chemically synthesized
  source 1..22: mol_type = other DNA
cttcacttatgaagcttagttt

SEQ ID NO: 125687 - DNA, 22 bp, synthetic construct
  misc_feature 1..22: note = chemically synthesized
  source 1..22: mol_type = other DNA
cacttatgaagcttagtttggc

SEQ ID NO: 125688 - DNA, 22 bp, synthetic construct
  misc_feature 1..22: note = chemically synthesized
  source 1..22: mol_type = other DNA
acttatgaagcttagtttggct

SEQ ID NO: 125689 - DNA, 22 bp, synthetic construct
  misc_feature 1..22: note = chemically synthesized
  source 1..22: mol_type = other DNA
atgaagcttagtttggctggat

SEQ ID NO: 125690 - DNA, 22 bp, synthetic construct
  misc_feature 1..22: note = chemically synthesized
  source 1..22: mol_type = other DNA
tgaagcttagtttggctggata

SEQ ID NO: 125691 - DNA, 22 bp, synthetic construct
  misc_feature 1..22: note = chemically synthesized
  source 1..22: mol_type = other DNA
agtttggctggatatgaaattc

SEQ ID NO: 125692 - DNA, 22 bp, synthetic construct
  misc_feature 1..22: note = chemically synthesized
  source 1..22: mol_type = other DNA
gtttggctggatatgaaattct

SEQ ID NO: 125693 - DNA, 22 bp, synthetic construct
  misc_feature 1..22: note = chemically synthesized
  source 1..22: mol_type = other DNA
ggctggatatgaaattctgtgt

SEQ ID NO: 125694 - DNA, 22 bp, synthetic construct
  misc_feature 1..22: note = chemically synthesized
  source 1..22: mol_type = other DNA
gctggatatgaaattctgtgtt

SEQ ID NO: 125695 - DNA, 22 bp, synthetic construct
  misc_feature 1..22: note = chemically synthesized
  source 1..22: mol_type = other DNA
gatatgaaattctgtgttgaaa

SEQ ID NO: 125696 - DNA, 22 bp, synthetic construct
  misc_feature 1..22: note = chemically synthesized
  source 1..22: mol_type = other DNA
tgtgttgaaaattctttccttt

SEQ ID NO: 125697 - DNA, 22 bp, synthetic construct
  misc_feature 1..22: note = chemically synthesized
  source 1..22: mol_type = other DNA
tgttgaaaattctttcctttaa

SEQ ID NO: 125698 - DNA, 22 bp, synthetic construct
  misc_feature 1..22: note = chemically synthesized
  source 1..22: mol_type = other DNA
aaaattctttcctttaaggatg

SEQ ID NO: 125699 - DNA, 22 bp, synthetic construct
  misc_feature 1..22: note = chemically synthesized
  source 1..22: mol_type = other DNA
tttcctttaaggatgttgaata

SEQ ID NO: 125700 - DNA, 22 bp, synthetic construct
  misc_feature 1..22: note = chemically synthesized
  source 1..22: mol_type = other DNA
tcctttaaggatgttgaatatt

SEQ ID NO: 125701 - DNA, 22 bp, synthetic construct
  misc_feature 1..22: note = chemically synthesized
  source 1..22: mol_type = other DNA
cctttaaggatgttgaatattg

SEQ ID NO: 125702 - DNA, 22 bp, synthetic construct
  misc_feature 1..22: note = chemically synthesized
  source 1..22: mol_type = other DNA
ctttaaggatgttgaatattgg

SEQ ID NO: 125703 - DNA, 22 bp, synthetic construct
  misc_feature 1..22: note = chemically synthesized
  source 1..22: mol_type = other DNA
taaggatgttgaatattggccc

SEQ ID NO: 125704 - DNA, 22 bp, synthetic construct
  misc_feature 1..22: note = chemically synthesized
  source 1..22: mol_type = other DNA
aaggatgttgaatattggcccc

SEQ ID NO: 125705 - DNA, 22 bp, synthetic construct
  misc_feature 1..22: note = chemically synthesized
  source 1..22: mol_type = other DNA
aggatgttgaatattggccccc

SEQ ID NO: 125706 - DNA, 22 bp, synthetic construct
  misc_feature 1..22: note = chemically synthesized
  source 1..22: mol_type = other DNA
aatattggcccccactctcttc

SEQ ID NO: 125707 - DNA, 22 bp, synthetic construct
  misc_feature 1..22: note = chemically synthesized
  source 1..22: mol_type = other DNA
gcccccactctcttctggcttg

SEQ ID NO: 125708 - DNA, 22 bp, synthetic construct
  misc_feature 1..22: note = chemically synthesized
  source 1..22: mol_type = other DNA
tcttctggcttgtagagtttct

SEQ ID NO: 125709 - DNA, 22 bp, synthetic construct
  misc_feature 1..22: note = chemically synthesized
  source 1..22: mol_type = other DNA
ttctggcttgtagagtttctgc

SEQ ID NO: 125710 - DNA, 22 bp, synthetic construct
  misc_feature 1..22: note = chemically synthesized
  source 1..22: mol_type = other DNA
ctggcttgtagagtttctgctg

SEQ ID NO: 125711 - DNA, 22 bp, synthetic construct
  misc_feature 1..22: note = chemically synthesized
  source 1..22: mol_type = other DNA
tggcttgtagagtttctgctga

SEQ ID NO: 125712 - DNA, 22 bp, synthetic construct
  misc_feature 1..22: note = chemically synthesized
  source 1..22: mol_type = other DNA
gcttgtagagtttctgctgaga

SEQ ID NO: 125713 - DNA, 22 bp, synthetic construct
  misc_feature 1..22: note = chemically synthesized
  source 1..22: mol_type = other DNA
gtagagtttctgctgagagatc

SEQ ID NO: 125714 - DNA, 22 bp, synthetic construct
  misc_feature 1..22: note = chemically synthesized
  source 1..22: mol_type = other DNA
tagagtttctgctgagagatct

SEQ ID NO: 125715 - DNA, 22 bp, synthetic construct
  misc_feature 1..22: note = chemically synthesized
  source 1..22: mol_type = other DNA
ctgctgagagatctgctgttat

SEQ ID NO: 125716 - DNA, 22 bp, synthetic construct
  misc_feature 1..22: note = chemically synthesized
  source 1..22: mol_type = other DNA
tgctgagagatctgctgttatt

SEQ ID NO: 125717 - DNA, 22 bp, synthetic construct
  misc_feature 1..22: note = chemically synthesized
  source 1..22: mol_type = other DNA
ctgagagatctgctgttattct

SEQ ID NO: 125718 - DNA, 22 bp, synthetic construct
  misc_feature 1..22: note = chemically synthesized
  source 1..22: mol_type = other DNA
agagatctgctgttattctgat

SEQ ID NO: 125719 - DNA, 22 bp, synthetic construct
  misc_feature 1..22: note = chemically synthesized
  source 1..22: mol_type = other DNA
ctgttattctgatgggcttccc

SEQ ID NO: 125720 - DNA, 22 bp, synthetic construct
  misc_feature 1..22: note = chemically synthesized
  source 1..22: mol_type = other DNA
ttattctgatgggcttcccttt

SEQ ID NO: 125721 - DNA, 22 bp, synthetic construct
  misc_feature 1..22: note = chemically synthesized
  source 1..22: mol_type = other DNA
ttctgatgggcttccctttgtg

SEQ ID NO: 125722 - DNA, 22 bp, synthetic construct
  misc_feature 1..22: note = chemically synthesized
  source 1..22: mol_type = other DNA
tgatgggcttccctttgtgggt

SEQ ID NO: 125723 - DNA, 22 bp, synthetic construct
  misc_feature 1..22: note = chemically synthesized
  source 1..22: mol_type = other DNA
atgggcttccctttgtgggtaa

SEQ ID NO: 125724 - DNA, 22 bp, synthetic construct
  misc_feature 1..22: note = chemically synthesized
  source 1..22: mol_type = other DNA
ccctttgtgggtaacccgacct

SEQ ID NO: 125725 - DNA, 22 bp, synthetic construct
  misc_feature 1..22: note = chemically synthesized
  source 1..22: mol_type = other DNA
cctttgtgggtaacccgacctt

SEQ ID NO: 125726 - DNA, 22 bp, synthetic construct
  misc_feature 1..22: note = chemically synthesized
  source 1..22: mol_type = other DNA
tgtgggtaacccgacctttctc

SEQ ID NO: 125727 - DNA, 22 bp, synthetic construct
  misc_feature 1..22: note = chemically synthesized
  source 1..22: mol_type = other DNA
gtgggtaacccgacctttctct

SEQ ID NO: 125728 - DNA, 22 bp, synthetic construct
  misc_feature 1..22: note = chemically synthesized
  source 1..22: mol_type = other DNA
tgggtaacccgacctttctctc

SEQ ID NO: 125729 - DNA, 22 bp, synthetic construct
  misc_feature 1..22: note = chemically synthesized
  source 1..22: mol_type = other DNA
tctctctggctacccttaacat

SEQ ID NO: 125730 - DNA, 22 bp, synthetic construct
  misc_feature 1..22: note = chemically synthesized
  source 1..22: mol_type = other DNA
ctctctggctacccttaacatt

SEQ ID NO: 125731 - DNA, 22 bp, synthetic construct
  misc_feature 1..22: note = chemically synthesized
  source 1..22: mol_type = other DNA
tctctggctacccttaacattt

SEQ ID NO: 125732 - DNA, 22 bp, synthetic construct
  misc_feature 1..22: note = chemically synthesized
  source 1..22: mol_type = other DNA
tctggctacccttaacattttt

SEQ ID NO: 125733 - DNA, 22 bp, synthetic construct
  misc_feature 1..22: note = chemically synthesized
  source 1..22: mol_type = other DNA
tggctacccttaacatttttcc

SEQ ID NO: 125734 - DNA, 22 bp, synthetic construct
  misc_feature 1..22: note = chemically synthesized
  source 1..22: mol_type = other DNA
gctacccttaacatttttccct

SEQ ID NO: 125735 - DNA, 22 bp, synthetic construct
  misc_feature 1..22: note = chemically synthesized
  source 1..22: mol_type = other DNA
cccttaacatttttcccttcat

SEQ ID NO: 125736 - DNA, 22 bp, synthetic construct
  misc_feature 1..22: note = chemically synthesized
  source 1..22: mol_type = other DNA
aacatttttcccttcatttcaa

SEQ ID NO: 125737 - DNA, 22 bp, synthetic construct
  misc_feature 1..22: note = chemically synthesized
  source 1..22: mol_type = other DNA
acatttttcccttcatttcaac

SEQ ID NO: 125738 - DNA, 22 bp, synthetic construct
  misc_feature 1..22: note = chemically synthesized
  source 1..22: mol_type = other DNA
ttcccttcatttcaactttggt

SEQ ID NO: 125739 - DNA, 22 bp, synthetic construct
  misc_feature 1..22: note = chemically synthesized
  source 1..22: mol_type = other DNA
tcccttcatttcaactttggtg

SEQ ID NO: 125740 - DNA, 22 bp, synthetic construct
  misc_feature 1..22: note = chemically synthesized
  source 1..22: mol_type = other DNA
cccttcatttcaactttggtga

SEQ ID NO: 125741 - DNA, 22 bp, synthetic construct
  misc_feature 1..22: note = chemically synthesized
  source 1..22: mol_type = other DNA
ccttcatttcaactttggtgaa

SEQ ID NO: 125742 - DNA, 22 bp, synthetic construct
  misc_feature 1..22: note = chemically synthesized
  source 1..22: mol_type = other DNA
catttcaactttggtgaatctg

SEQ ID NO: 125743 - DNA, 22 bp, synthetic construct
  misc_feature 1..22: note = chemically synthesized
  source 1..22: mol_type = other DNA
atttcaactttggtgaatctga

SEQ ID NO: 125744 - DNA, 22 bp, synthetic construct
  misc_feature 1..22: note = chemically synthesized
  source 1..22: mol_type = other DNA
caactttggtgaatctgacaat

SEQ ID NO: 125745 - DNA, 22 bp, synthetic construct
  misc_feature 1..22: note = chemically synthesized
  source 1..22: mol_type = other DNA
aactttggtgaatctgacaatt

SEQ ID NO: 125746 - DNA, 22 bp, synthetic construct
  misc_feature 1..22: note = chemically synthesized
  source 1..22: mol_type = other DNA
tggtgaatctgacaattatgtg

SEQ ID NO: 125747 - DNA, 22 bp, synthetic construct
  misc_feature 1..22: note = chemically synthesized
  source 1..22: mol_type = other DNA
ggtgaatctgacaattatgtgc

SEQ ID NO: 125748 - DNA, 22 bp, synthetic construct
  misc_feature 1..22: note = chemically synthesized
  source 1..22: mol_type = other DNA
gtgaatctgacaattatgtgcc

SEQ ID NO: 125749 - DNA, 22 bp, synthetic construct
  misc_feature 1..22: note = chemically synthesized
  source 1..22: mol_type = other DNA
acaattatgtgccttgtagttg

SEQ ID NO: 125750 - DNA, 22 bp, synthetic construct
  misc_feature 1..22: note = chemically synthesized
  source 1..22: mol_type = other DNA
tgtgccttgtagttgctcttct

SEQ ID NO: 125751 - DNA, 22 bp, synthetic construct
  misc_feature 1..22: note = chemically synthesized
  source 1..22: mol_type = other DNA
gtagttgctcttctcaaggagt

SEQ ID NO: 125752 - DNA, 22 bp, synthetic construct
  misc_feature 1..22: note = chemically synthesized
  source 1..22: mol_type = other DNA
tagttgctcttctcaaggagta

SEQ ID NO: 125753 - DNA, 22 bp, synthetic construct
  misc_feature 1..22: note = chemically synthesized
  source 1..22: mol_type = other DNA
ctcttctcaaggagtatctttg

SEQ ID NO: 125754 - DNA, 22 bp, synthetic construct
  misc_feature 1..22: note = chemically synthesized
  source 1..22: mol_type = other DNA
ttctcaaggagtatctttgtgg

SEQ ID NO: 125755 - DNA, 22 bp, synthetic construct
  misc_feature 1..22: note = chemically synthesized
  source 1..22: mol_type = other DNA
ctcaaggagtatctttgtggcg

SEQ ID NO: 125756 - DNA, 22 bp, synthetic construct
  misc_feature 1..22: note = chemically synthesized
  source 1..22: mol_type = other DNA
tcaaggagtatctttgtggcgt

SEQ ID NO: 125757 - DNA, 22 bp, synthetic construct
  misc_feature 1..22: note = chemically synthesized
  source 1..22: mol_type = other DNA
aaggagtatctttgtggcgttc

SEQ ID NO: 125758 - DNA, 22 bp, synthetic construct
  misc_feature 1..22: note = chemically synthesized
  source 1..22: mol_type = other DNA
tgtggcgttctctgtatttcct

SEQ ID NO: 125759 - DNA, 22 bp, synthetic construct
  misc_feature 1..22: note = chemically synthesized
  source 1..22: mol_type = other DNA
gtggcgttctctgtatttcctg

SEQ ID NO: 125760 - DNA, 22 bp, synthetic construct
  misc_feature 1..22: note = chemically synthesized
  source 1..22: mol_type = other DNA
tggcgttctctgtatttcctga

SEQ ID NO: 125761 - DNA, 22 bp, synthetic construct
  misc_feature 1..22: note = chemically synthesized
  source 1..22: mol_type = other DNA
tctgtatttcctgaatttgaat

SEQ ID NO: 125762 - DNA, 22 bp, synthetic construct
  misc_feature 1..22: note = chemically synthesized
  source 1..22: mol_type = other DNA
tgtatttcctgaatttgaatgt

SEQ ID NO: 125763 - DNA, 22 bp, synthetic construct
  misc_feature 1..22: note = chemically synthesized
  source 1..22: mol_type = other DNA
tatttcctgaatttgaatgttg

SEQ ID NO: 125764 - DNA, 22 bp, synthetic construct
  misc_feature 1..22: note = chemically synthesized
  source 1..22: mol_type = other DNA
cctgaatttgaatgttgacctg

SEQ ID NO: 125765 - DNA, 22 bp, synthetic construct
  misc_feature 1..22: note = chemically synthesized
  source 1..22: mol_type = other DNA
ctgaatttgaatgttgacctgc

SEQ ID NO: 125766 - DNA, 22 bp, synthetic construct
  misc_feature 1..22: note = chemically synthesized
  source 1..22: mol_type = other DNA
aatttgaatgttgacctgcctt

SEQ ID NO: 125767 - DNA, 22 bp, synthetic construct
  misc_feature 1..22: note = chemically synthesized
  source 1..22: mol_type = other DNA
gaatgttgacctgccttgctag

SEQ ID NO: 125768 - DNA, 22 bp, synthetic construct
  misc_feature 1..22: note = chemically synthesized
  source 1..22: mol_type = other DNA
aatgttgacctgccttgctaga

SEQ ID NO: 125769 - DNA, 22 bp, synthetic construct
  misc_feature 1..22: note = chemically synthesized
  source 1..22: mol_type = other DNA
acctgccttgctagattgggga

SEQ ID NO: 125770 - DNA, 22 bp, synthetic construct
  misc_feature 1..22: note = chemically synthesized
  source 1..22: mol_type = other DNA
ccttgctagattggggaagttc

SEQ ID NO: 125771 - DNA, 22 bp, synthetic construct
  misc_feature 1..22: note = chemically synthesized
  source 1..22: mol_type = other DNA
gctagattggggaagttctcct

SEQ ID NO: 125772 - DNA, 22 bp, synthetic construct
  misc_feature 1..22: note = chemically synthesized
  source 1..22: mol_type = other DNA
ctagattggggaagttctcctg

SEQ ID NO: 125773 - DNA, 22 bp, synthetic construct
  misc_feature 1..22: note = chemically synthesized
  source 1..22: mol_type = other DNA
gattggggaagttctcctggat

SEQ ID NO: 125774 - DNA, 22 bp, synthetic construct
  misc_feature 1..22: note = chemically synthesized
  source 1..22: mol_type = other DNA
gggaagttctcctggataatat

SEQ ID NO: 125775 - DNA, 22 bp, synthetic construct
  misc_feature 1..22: note = chemically synthesized
  source 1..22: mol_type = other DNA
tcctggataatatcctgcagag

SEQ ID NO: 125776 - DNA, 22 bp, synthetic construct
  misc_feature 1..22: note = chemically synthesized
  source 1..22: mol_type = other DNA
ctggataatatcctgcagagtg

SEQ ID NO: 125777 - DNA, 22 bp, synthetic construct
  misc_feature 1..22: note = chemically synthesized
  source 1..22: mol_type = other DNA
gataatatcctgcagagtgttt

SEQ ID NO: 125778 - DNA, 22 bp, synthetic construct
  misc_feature 1..22: note = chemically synthesized
  source 1..22: mol_type = other DNA
cagagtgttttccaacttggtt

SEQ ID NO: 125779 - DNA, 22 bp, synthetic construct
  misc_feature 1..22: note = chemically synthesized
  source 1..22: mol_type = other DNA
tccaacttggttccattctgcc

SEQ ID NO: 125780 - DNA, 22 bp, synthetic construct
  misc_feature 1..22: note = chemically synthesized
  source 1..22: mol_type = other DNA
ccaacttggttccattctgccc

SEQ ID NO: 125781 - DNA, 22 bp, synthetic construct
  misc_feature 1..22: note = chemically synthesized
  source 1..22: mol_type = other DNA
caacttggttccattctgcccg

SEQ ID NO: 125782 - DNA, 22 bp, synthetic construct
  misc_feature 1..22: note = chemically synthesized
  source 1..22: mol_type = other DNA
ggttccattctgcccgtcactt

SEQ ID NO: 125783 - DNA, 22 bp, synthetic construct
  misc_feature 1..22: note = chemically synthesized
  source 1..22: mol_type = other DNA
gttccattctgcccgtcacttt

SEQ ID NO: 125784 - DNA, 22 bp, synthetic construct
  misc_feature 1..22: note = chemically synthesized
  source 1..22: mol_type = other DNA
cattctgcccgtcactttcagg

SEQ ID NO: 125785 - DNA, 22 bp, synthetic construct
  misc_feature 1..22: note = chemically synthesized
  source 1..22: mol_type = other DNA
tgcccgtcactttcaggtacac

SEQ ID NO: 125786 - DNA, 22 bp, synthetic construct
  misc_feature 1..22: note = chemically synthesized
  source 1..22: mol_type = other DNA
cccgtcactttcaggtacacca

SEQ ID NO: 125787 - DNA, 22 bp, synthetic construct
  misc_feature 1..22: note = chemically synthesized
  source 1..22: mol_type = other DNA
tcaggtacaccaatcagatata

SEQ ID NO: 125788 - DNA, 22 bp, synthetic construct
  misc_feature 1..22: note = chemically synthesized
  source 1..22: mol_type = other DNA
caggtacaccaatcagatatag

SEQ ID NO: 125789 - DNA, 22 bp, synthetic construct
  misc_feature 1..22: note = chemically synthesized
  source 1..22: mol_type = other DNA
aggtacaccaatcagatataga

SEQ ID NO: 125790 - DNA, 22 bp, synthetic construct
  misc_feature 1..22: note = chemically synthesized
  source 1..22: mol_type = other DNA
ggtcttttcacatagtcccata

SEQ ID NO: 125791 - DNA, 22 bp, synthetic construct
  misc_feature 1..22: note = chemically synthesized
  source 1..22: mol_type = other DNA
gtcttttcacatagtcccatat

SEQ ID NO: 125792 - DNA, 22 bp, synthetic construct
  misc_feature 1..22: note = chemically synthesized
  source 1..22: mol_type = other DNA
ttcacatagtcccatatttctt

SEQ ID NO: 125793 - DNA, 22 bp, synthetic construct
  misc_feature 1..22: note = chemically synthesized
  source 1..22: mol_type = other DNA
tcacatagtcccatatttcttg

SEQ ID NO: 125794 - DNA, 22 bp, synthetic construct
  misc_feature 1..22: note = chemically synthesized
  source 1..22: mol_type = other DNA
cacatagtcccatatttcttgg

SEQ ID NO: 125795 - DNA, 22 bp, synthetic construct
  misc_feature 1..22: note = chemically synthesized
  source 1..22: mol_type = other DNA
acatagtcccatatttcttgga

SEQ ID NO: 125796 - DNA, 22 bp, synthetic construct
  misc_feature 1..22: note = chemically synthesized
  source 1..22: mol_type = other DNA
cttggaggctttgttcatttct

SEQ ID NO: 125797 - DNA, 22 bp, synthetic construct
  misc_feature 1..22: note = chemically synthesized
  source 1..22: mol_type = other DNA
ttggaggctttgttcatttctt

SEQ ID NO: 125798 - DNA, 22 bp, synthetic construct
  misc_feature 1..22: note = chemically synthesized
  source 1..22: mol_type = other DNA
ggaggctttgttcatttctttt

SEQ ID NO: 125799 - DNA, 22 bp, synthetic construct
  misc_feature 1..22: note = chemically synthesized
  source 1..22: mol_type = other DNA
gaggctttgttcatttcttttt

SEQ ID NO: 125800 - DNA, 22 bp, synthetic construct
  misc_feature 1..22: note = chemically synthesized
  source 1..22: mol_type = other DNA
tgttcatttctttttattcttt

SEQ ID NO: 125801 - DNA, 22 bp, synthetic construct
  misc_feature 1..22: note = chemically synthesized
  source 1..22: mol_type = other DNA
gttcatttctttttattctttt

SEQ ID NO: 125802 - DNA, 22 bp, synthetic construct
  misc_feature 1..22: note = chemically synthesized
  source 1..22: mol_type = other DNA
ttcatttctttttattcttttt

SEQ ID NO: 125803 - DNA, 22 bp, synthetic construct
  misc_feature 1..22: note = chemically synthesized
  source 1..22: mol_type = other DNA
atttctttttattcttttttct

SEQ ID NO: 125804 - DNA, 22 bp, synthetic construct
  misc_feature 1..22: note = chemically synthesized
  source 1..22: mol_type = other DNA
ctttttattcttttttctctaa

SEQ ID NO: 125805 - DNA, 22 bp, synthetic construct
  misc_feature 1..22: note = chemically synthesized
  source 1..22: mol_type = other DNA
tttttattcttttttctctaaa

SEQ ID NO: 125806 - DNA, 22 bp, synthetic construct
  misc_feature 1..22: note = chemically synthesized
  source 1..22: mol_type = other DNA
tttattcttttttctctaaact

SEQ ID NO: 125807 - DNA, 22 bp, synthetic construct
  misc_feature 1..22: note = chemically synthesized
  source 1..22: mol_type = other DNA
ttattcttttttctctaaactt

SEQ ID NO: 125808 - DNA, 22 bp, synthetic construct
  misc_feature 1..22: note = chemically synthesized
  source 1..22: mol_type = other DNA
tattcttttttctctaaacttc

SEQ ID NO: 125809 - DNA, 22 bp, synthetic construct
  misc_feature 1..22: note = chemically synthesized
  source 1..22: mol_type = other DNA
attcttttttctctaaacttct

SEQ ID NO: 125810 - DNA, 22 bp, synthetic construct
  misc_feature 1..22: note = chemically synthesized
  source 1..22: mol_type = other DNA
ttcttttttctctaaacttctc

SEQ ID NO: 125811 - DNA, 22 bp, synthetic construct
  misc_feature 1..22: note = chemically synthesized
  source 1..22: mol_type = other DNA
ttttttctctaaacttctcttc

SEQ ID NO: 125812 - DNA, 22 bp, synthetic construct
  misc_feature 1..22: note = chemically synthesized
  source 1..22: mol_type = other DNA
ttttctctaaacttctcttctt

SEQ ID NO: 125813 - DNA, 22 bp, synthetic construct
  misc_feature 1..22: note = chemically synthesized
  source 1..22: mol_type = other DNA
tttctctaaacttctcttcttg

SEQ ID NO: 125814 - DNA, 22 bp, synthetic construct
  misc_feature 1..22: note = chemically synthesized
  source 1..22: mol_type = other DNA
ttctctaaacttctcttcttgc

SEQ ID NO: 125815 - DNA, 22 bp, synthetic construct
  misc_feature 1..22: note = chemically synthesized
  source 1..22: mol_type = other DNA
tctctaaacttctcttcttgct

SEQ ID NO: 125816 - DNA, 22 bp, synthetic construct
  misc_feature 1..22: note = chemically synthesized
  source 1..22: mol_type = other DNA
ctctaaacttctcttcttgctt

SEQ ID NO: 125817 - DNA, 22 bp, synthetic construct
  misc_feature 1..22: note = chemically synthesized
  source 1..22: mol_type = other DNA
tctaaacttctcttcttgcttc

SEQ ID NO: 125818 - DNA, 22 bp, synthetic construct
  misc_feature 1..22: note = chemically synthesized
  source 1..22: mol_type = other DNA
taaacttctcttcttgcttcat

SEQ ID NO: 125819 - DNA, 22 bp, synthetic construct
  misc_feature 1..22: note = chemically synthesized
  source 1..22: mol_type = other DNA
aacttctcttcttgcttcattt

SEQ ID NO: 125820 - DNA, 22 bp, synthetic construct
  misc_feature 1..22: note = chemically synthesized
  source 1..22: mol_type = other DNA
ctcttcttgcttcatttcattc

SEQ ID NO: 125821 - DNA, 22 bp, synthetic construct
  misc_feature 1..22: note = chemically synthesized
  source 1..22: mol_type = other DNA
tcttcttgcttcatttcattca

SEQ ID NO: 125822 - DNA, 22 bp, synthetic construct
  misc_feature 1..22: note = chemically synthesized
  source 1..22: mol_type = other DNA
ttcttgcttcatttcattcatt

SEQ ID NO: 125823 - DNA, 22 bp, synthetic construct
  misc_feature 1..22: note = chemically synthesized
  source 1..22: mol_type = other DNA
cttgcttcatttcattcatttg

SEQ ID NO: 125824 - DNA, 22 bp, synthetic construct
  misc_feature 1..22: note = chemically synthesized
  source 1..22: mol_type = other DNA
ttgcttcatttcattcatttga

SEQ ID NO: 125825 - DNA, 22 bp, synthetic construct
  misc_feature 1..22: note = chemically synthesized
  source 1..22: mol_type = other DNA
gcttcatttcattcatttgatc

SEQ ID NO: 125826 - DNA, 22 bp, synthetic construct
  misc_feature 1..22: note = chemically synthesized
  source 1..22: mol_type = other DNA
cttcatttcattcatttgatct

SEQ ID NO: 125827 - DNA, 22 bp, synthetic construct
  misc_feature 1..22: note = chemically synthesized
  source 1..22: mol_type = other DNA
catttcattcatttgatcttcc

SEQ ID NO: 125828 - DNA, 22 bp, synthetic construct
  misc_feature 1..22: note = chemically synthesized
  source 1..22: mol_type = other DNA
atttcattcatttgatcttcca

SEQ ID NO: 125829 - DNA, 22 bp, synthetic construct
  misc_feature 1..22: note = chemically synthesized
  source 1..22: mol_type = other DNA
cattcatttgatcttccatcac

SEQ ID NO: 125830 - DNA, 22 bp, synthetic construct
  misc_feature 1..22: note = chemically synthesized
  source 1..22: mol_type = other DNA
attcatttgatcttccatcact

SEQ ID NO: 125831 - DNA, 22 bp, synthetic construct
  misc_feature 1..22: note = chemically synthesized
  source 1..22: mol_type = other DNA
atttgatcttccatcactgata

SEQ ID NO: 125832 - DNA, 22 bp, synthetic construct
  misc_feature 1..22: note = chemically synthesized
  source 1..22: mol_type = other DNA
gatcttccatcactgataccct

SEQ ID NO: 125833 - DNA, 22 bp, synthetic construct
  misc_feature 1..22: note = chemically synthesized
  source 1..22: mol_type = other DNA
atcttccatcactgataccctt

SEQ ID NO: 125834 - DNA, 22 bp, synthetic construct
  misc_feature 1..22: note = chemically synthesized
  source 1..22: mol_type = other DNA
ccatcactgataccctttcttc

SEQ ID NO: 125835 - DNA, 22 bp, synthetic construct
  misc_feature 1..22: note = chemically synthesized
  source 1..22: mol_type = other DNA
catcactgataccctttcttcc

SEQ ID NO: 125836 - DNA, 22 bp, synthetic construct
  misc_feature 1..22: note = chemically synthesized
  source 1..22: mol_type = other DNA
ataccctttcttccagttgatc

SEQ ID NO: 125837 - DNA, 22 bp, synthetic construct
  misc_feature 1..22: note = chemically synthesized
  source 1..22: mol_type = other DNA
tcttccagttgatcgaatcagc

SEQ ID NO: 125838 - DNA, 22 bp, synthetic construct
  misc_feature 1..22: note = chemically synthesized
  source 1..22: mol_type = other DNA
cttccagttgatcgaatcagct

SEQ ID NO: 125839 - DNA, 22 bp, synthetic construct
  misc_feature 1..22: note = chemically synthesized
  source 1..22: mol_type = other DNA
ttccagttgatcgaatcagcta

SEQ ID NO: 125840 - DNA, 22 bp, synthetic construct
  misc_feature 1..22: note = chemically synthesized
  source 1..22: mol_type = other DNA
ccagttgatcgaatcagctact

SEQ ID NO: 125841 - DNA, 22 bp, synthetic construct
  misc_feature 1..22: note = chemically synthesized
  source 1..22: mol_type = other DNA
cagttgatcgaatcagctactg

SEQ ID NO: 125842 - DNA, 22 bp, synthetic construct
  misc_feature 1..22: note = chemically synthesized
  source 1..22: mol_type = other DNA
atcgaatcagctactgagtctt

SEQ ID NO: 125843 - DNA, 22 bp, synthetic construct
  misc_feature 1..22: note = chemically synthesized
  source 1..22: mol_type = other DNA
ctgagtcttgtgcattcatcat

SEQ ID NO: 125844 - DNA, 22 bp, synthetic construct
  misc_feature 1..22: note = chemically synthesized
  source 1..22: mol_type = other DNA
agtcttgtgcattcatcatgta

SEQ ID NO: 125845 - DNA, 22 bp, synthetic construct
  misc_feature 1..22: note = chemically synthesized
  source 1..22: mol_type = other DNA
gtgcattcatcatgtagttctc

SEQ ID NO: 125846 - DNA, 22 bp, synthetic construct
  misc_feature 1..22: note = chemically synthesized
  source 1..22: mol_type = other DNA
tgcattcatcatgtagttctca

SEQ ID NO: 125847 - DNA, 22 bp, synthetic construct
  misc_feature 1..22: note = chemically synthesized
  source 1..22: mol_type = other DNA
atcatgtagttctcatgccttg

SEQ ID NO: 125848 - DNA, 22 bp, synthetic construct
  misc_feature 1..22: note = chemically synthesized
  source 1..22: mol_type = other DNA
tcatgccttggttttcagctcc

SEQ ID NO: 125849 - DNA, 22 bp, synthetic construct
  misc_feature 1..22: note = chemically synthesized
  source 1..22: mol_type = other DNA
atgccttggttttcagctccat

SEQ ID NO: 125850 - DNA, 22 bp, synthetic construct
  misc_feature 1..22: note = chemically synthesized
  source 1..22: mol_type = other DNA
ggttttcagctccatcaggtcc

SEQ ID NO: 125851 - DNA, 22 bp, synthetic construct
  misc_feature 1..22: note = chemically synthesized
  source 1..22: mol_type = other DNA
gttttcagctccatcaggtcct

SEQ ID NO: 125852 - DNA, 22 bp, synthetic construct
  misc_feature 1..22: note = chemically synthesized
  source 1..22: mol_type = other DNA
tcagctccatcaggtcctttaa

SEQ ID NO: 125853 - DNA, 22 bp, synthetic construct
  misc_feature 1..22: note = chemically synthesized
  source 1..22: mol_type = other DNA
cagctccatcaggtcctttaag

SEQ ID NO: 125854 - DNA, 22 bp, synthetic construct
  misc_feature 1..22: note = chemically synthesized
  source 1..22: mol_type = other DNA
agctccatcaggtcctttaagg

SEQ ID NO: 125855 - DNA, 22 bp, synthetic construct
  misc_feature 1..22: note = chemically synthesized
  source 1..22: mol_type = other DNA
catcaggtcctttaaggacttc

SEQ ID NO: 125856 - DNA, 22 bp, synthetic construct
  misc_feature 1..22: note = chemically synthesized
  source 1..22: mol_type = other DNA
taaggacttctctgtattggtt

SEQ ID NO: 125857 - DNA, 22 bp, synthetic construct
  misc_feature 1..22: note = chemically synthesized
  source 1..22: mol_type = other DNA
aaggacttctctgtattggtta

SEQ ID NO: 125858 - DNA, 22 bp, synthetic construct
  misc_feature 1..22: note = chemically synthesized
  source 1..22: mol_type = other DNA
aggacttctctgtattggttat

SEQ ID NO: 125859 - DNA, 22 bp, synthetic construct
  misc_feature 1..22: note = chemically synthesized
  source 1..22: mol_type = other DNA
ctctgtattggttattctagtt

SEQ ID NO: 125860 - DNA, 22 bp, synthetic construct
  misc_feature 1..22: note = chemically synthesized
  source 1..22: mol_type = other DNA
tctgtattggttattctagtta

SEQ ID NO: 125861 - DNA, 22 bp, synthetic construct
  misc_feature 1..22: note = chemically synthesized
  source 1..22: mol_type = other DNA
tgtattggttattctagttagc

SEQ ID NO: 125862 - DNA, 22 bp, synthetic construct
  misc_feature 1..22: note = chemically synthesized
  source 1..22: mol_type = other DNA
tattggttattctagttagcca

SEQ ID NO: 125863 - DNA, 22 bp, synthetic construct
  misc_feature 1..22: note = chemically synthesized
  source 1..22: mol_type = other DNA
gttattctagttagccattagt

SEQ ID NO: 125864 - DNA, 22 bp, synthetic construct
  misc_feature 1..22: note = chemically synthesized
  source 1..22: mol_type = other DNA
ttctagttagccattagtctaa

SEQ ID NO: 125865 - DNA, 22 bp, synthetic construct
  misc_feature 1..22: note = chemically synthesized
  source 1..22: mol_type = other DNA
tagttagccattagtctaattt

SEQ ID NO: 125866 - DNA, 22 bp, synthetic construct
  misc_feature 1..22: note = chemically synthesized
  source 1..22: mol_type = other DNA
gttagccattagtctaatttat

SEQ ID NO: 125867 - DNA, 22 bp, synthetic construct
  misc_feature 1..22: note = chemically synthesized
  source 1..22: mol_type = other DNA
gccattagtctaatttattttc

SEQ ID NO: 125868 - DNA, 22 bp, synthetic construct
  misc_feature 1..22: note = chemically synthesized
  source 1..22: mol_type = other DNA
gtctaatttattttcaaggttt

SEQ ID NO: 125869 - DNA, 22 bp, synthetic construct
  misc_feature 1..22: note = chemically synthesized
  source 1..22: mol_type = other DNA
atttattttcaaggtttttaac

SEQ ID NO: 125870 - DNA, 22 bp, synthetic construct
  misc_feature 1..22: note = chemically synthesized
  source 1..22: mol_type = other DNA
attttcaaggtttttaactttt

SEQ ID NO: 125871 - DNA, 22 bp, synthetic construct
  misc_feature 1..22: note = chemically synthesized
  source 1..22: mol_type = other DNA
ttttcaaggtttttaacttttt

SEQ ID NO: 125872 - DNA, 22 bp, synthetic construct
  misc_feature 1..22: note = chemically synthesized
  source 1..22: mol_type = other DNA
tcaaggtttttaacttttttgc

SEQ ID NO: 125873 - DNA, 22 bp, synthetic construct
  misc_feature 1..22: note = chemically synthesized
  source 1..22: mol_type = other DNA
caaggtttttaacttttttgcc

SEQ ID NO: 125874 - DNA, 22 bp, synthetic construct
  misc_feature 1..22: note = chemically synthesized
  source 1..22: mol_type = other DNA
aaggtttttaacttttttgcca

SEQ ID NO: 125875 - DNA, 22 bp, synthetic construct
  misc_feature 1..22: note = chemically synthesized
  source 1..22: mol_type = other DNA
ttaacttttttgccatgggttc

SEQ ID NO: 125876 - DNA, 22 bp, synthetic construct
  misc_feature 1..22: note = chemically synthesized
  source 1..22: mol_type = other DNA
taacttttttgccatgggttcg

SEQ ID NO: 125877 - DNA, 22 bp, synthetic construct
  misc_feature 1..22: note = chemically synthesized
  source 1..22: mol_type = other DNA
aacttttttgccatgggttcga

SEQ ID NO: 125878 - DNA, 22 bp, synthetic construct
  misc_feature 1..22: note = chemically synthesized
  source 1..22: mol_type = other DNA
acttttttgccatgggttcgag

SEQ ID NO: 125879 - DNA, 22 bp, synthetic construct
  misc_feature 1..22: note = chemically synthesized
  source 1..22: mol_type = other DNA
ttttgccatgggttcgagcttc

SEQ ID NO: 125880 - DNA, 22 bp, synthetic construct
  misc_feature 1..22: note = chemically synthesized
  source 1..22: mol_type = other DNA
tttgccatgggttcgagcttcc

SEQ ID NO: 125881 - DNA, 22 bp, synthetic construct
  misc_feature 1..22: note = chemically synthesized
  source 1..22: mol_type = other DNA
ttgccatgggttcgagcttcct

SEQ ID NO: 125882 - DNA, 22 bp, synthetic construct
  misc_feature 1..22: note = chemically synthesized
  source 1..22: mol_type = other DNA
tgccatgggttcgagcttcctc

SEQ ID NO: 125883 - DNA, 22 bp, synthetic construct
  misc_feature 1..22: note = chemically synthesized
  source 1..22: mol_type = other DNA
gccatgggttcgagcttcctcc

SEQ ID NO: 125884 - DNA, 22 bp, synthetic construct
  misc_feature 1..22: note = chemically synthesized
  source 1..22: mol_type = other DNA
ccatgggttcgagcttcctcct

SEQ ID NO: 125885 - DNA, 22 bp, synthetic construct
  misc_feature 1..22: note = chemically synthesized
  source 1..22: mol_type = other DNA
gagcttcctcctttagctcgga

SEQ ID NO: 125886 - DNA, 22 bp, synthetic construct
  misc_feature 1..22: note = chemically synthesized
  source 1..22: mol_type = other DNA
cctcctttagctcggagtagtt

SEQ ID NO: 125887 - DNA, 22 bp, synthetic construct
  misc_feature 1..22: note = chemically synthesized
  source 1..22: mol_type = other DNA
ctcctttagctcggagtagttt

SEQ ID NO: 125888 - DNA, 22 bp, synthetic construct
  misc_feature 1..22: note = chemically synthesized
  source 1..22: mol_type = other DNA
ctttagctcggagtagtttgat

SEQ ID NO: 125889 - DNA, 22 bp, synthetic construct
  misc_feature 1..22: note = chemically synthesized
  source 1..22: mol_type = other DNA
tagctcggagtagtttgatcgt

SEQ ID NO: 125890 - DNA, 22 bp, synthetic construct
  misc_feature 1..22: note = chemically synthesized
  source 1..22: mol_type = other DNA
agctcggagtagtttgatcgtc

SEQ ID NO: 125891 - DNA, 22 bp, synthetic construct
  misc_feature 1..22: note = chemically synthesized
  source 1..22: mol_type = other DNA
gctcggagtagtttgatcgtct

SEQ ID NO: 125892 - DNA, 22 bp, synthetic construct
  misc_feature 1..22: note = chemically synthesized
  source 1..22: mol_type = other DNA
ggagtagtttgatcgtctgaag

SEQ ID NO: 125893 - DNA, 22 bp, synthetic construct
  misc_feature 1..22: note = chemically synthesized
  source 1..22: mol_type = other DNA
gatcgtctgaagccttcttctc

SEQ ID NO: 125894 - DNA, 22 bp, synthetic construct
  misc_feature 1..22: note = chemically synthesized
  source 1..22: mol_type = other DNA
atcgtctgaagccttcttctct

SEQ ID NO: 125895 - DNA, 22 bp, synthetic construct
  misc_feature 1..22: note = chemically synthesized
  source 1..22: mol_type = other DNA
aagccttcttctctcaacttgt

SEQ ID NO: 125896 - DNA, 22 bp, synthetic construct
  misc_feature 1..22: note = chemically synthesized
  source 1..22: mol_type = other DNA
cttctctcaacttgtcaaagtc

SEQ ID NO: 125897 - DNA, 22 bp, synthetic construct
  misc_feature 1..22: note = chemically synthesized
  source 1..22: mol_type = other DNA
ttctctcaacttgtcaaagtca

SEQ ID NO: 125898 - DNA, 22 bp, synthetic construct
  misc_feature 1..22: note = chemically synthesized
  source 1..22: mol_type = other DNA
ctctcaacttgtcaaagtcatt

SEQ ID NO: 125899 - DNA, 22 bp, synthetic construct
  misc_feature 1..22: note = chemically synthesized
  source 1..22: mol_type = other DNA
tctcaacttgtcaaagtcattc

SEQ ID NO: 125900 - DNA, 22 bp, synthetic construct
  misc_feature 1..22: note = chemically synthesized
  source 1..22: mol_type = other DNA
tcaacttgtcaaagtcattctc

SEQ ID NO: 125901 - DNA, 22 bp, synthetic construct
  misc_feature 1..22: note = chemically synthesized
  source 1..22: mol_type = other DNA
aacttgtcaaagtcattctctg

SEQ ID NO: 125902 - DNA, 22 bp, synthetic construct
  misc_feature 1..22: note = chemically synthesized
  source 1..22: mol_type = other DNA
gtcaaagtcattctctgtccag

SEQ ID NO: 125903 - DNA, 22 bp, synthetic construct
  misc_feature 1..22: note = chemically synthesized
  source 1..22: mol_type = other DNA
tcaaagtcattctctgtccagc

SEQ ID NO: 125904 - DNA, 22 bp, synthetic construct
  misc_feature 1..22: note = chemically synthesized
  source 1..22: mol_type = other DNA
tctgtccagctttgtaccgttg

SEQ ID NO: 125905 - DNA, 22 bp, synthetic construct
  misc_feature 1..22: note = chemically synthesized
  source 1..22: mol_type = other DNA
tgtccagctttgtaccgttgct

SEQ ID NO: 125906 - DNA, 22 bp, synthetic construct
  misc_feature 1..22: note = chemically synthesized
  source 1..22: mol_type = other DNA
tccagctttgtaccgttgctgg

SEQ ID NO: 125907 - DNA, 22 bp, synthetic construct
  misc_feature 1..22: note = chemically synthesized
  source 1..22: mol_type = other DNA
tgtaccgttgctggtgaggagc

SEQ ID NO: 125908 - DNA, 22 bp, synthetic construct
  misc_feature 1..22: note = chemically synthesized
  source 1..22: mol_type = other DNA
gtaccgttgctggtgaggagct

SEQ ID NO: 125909 - DNA, 22 bp, synthetic construct
  misc_feature 1..22: note = chemically synthesized
  source 1..22: mol_type = other DNA
taccgttgctggtgaggagctg

SEQ ID NO: 125910 - DNA, 22 bp, synthetic construct
  misc_feature 1..22: note = chemically synthesized
  source 1..22: mol_type = other DNA
ctggtgaggagctgcattcctt

SEQ ID NO: 125911 - DNA, 22 bp, synthetic construct
  misc_feature 1..22: note = chemically synthesized
  source 1..22: mol_type = other DNA
gtgaggagctgcattcctttgg

SEQ ID NO: 125912 - DNA, 22 bp, synthetic construct
  misc_feature 1..22: note = chemically synthesized
  source 1..22: mol_type = other DNA
cattcctttggaggaggagagg

SEQ ID NO: 125913 - DNA, 22 bp, synthetic construct
  misc_feature 1..22: note = chemically synthesized
  source 1..22: mol_type = other DNA
ctttggaggaggagaggcactc

SEQ ID NO: 125914 - DNA, 22 bp, synthetic construct
  misc_feature 1..22: note = chemically synthesized
  source 1..22: mol_type = other DNA
tggaggaggagaggcactctga

SEQ ID NO: 125915 - DNA, 22 bp, synthetic construct
  misc_feature 1..22: note = chemically synthesized
  source 1..22: mol_type = other DNA
ggaggaggagaggcactctgat

SEQ ID NO: 125916 - DNA, 22 bp, synthetic construct
  misc_feature 1..22: note = chemically synthesized
  source 1..22: mol_type = other DNA
gaggaggagaggcactctgatt

SEQ ID NO: 125917 - DNA, 22 bp, synthetic construct
  misc_feature 1..22: note = chemically synthesized
  source 1..22: mol_type = other DNA
tgatttttagagtttccagttt

SEQ ID NO: 125918 - DNA, 22 bp, synthetic construct
  misc_feature 1..22: note = chemically synthesized
  source 1..22: mol_type = other DNA
atttttagagtttccagttttt

SEQ ID NO: 125919 - DNA, 22 bp, synthetic construct
  misc_feature 1..22: note = chemically synthesized
  source 1..22: mol_type = other DNA
ttagagtttccagtttttctgc

SEQ ID NO: 125920 - DNA, 22 bp, synthetic construct
  misc_feature 1..22: note = chemically synthesized
  source 1..22: mol_type = other DNA
tagagtttccagtttttctgct

SEQ ID NO: 125921 - DNA, 22 bp, synthetic construct
  misc_feature 1..22: note = chemically synthesized
  source 1..22: mol_type = other DNA
agagtttccagtttttctgctc

SEQ ID NO: 125922 - DNA, 22 bp, synthetic construct
  misc_feature 1..22: note = chemically synthesized
  source 1..22: mol_type = other DNA
gagtttccagtttttctgctct

SEQ ID NO: 125923 - DNA, 22 bp, synthetic construct
  misc_feature 1..22: note = chemically synthesized
  source 1..22: mol_type = other DNA
ccagtttttctgctctgttttt

SEQ ID NO: 125924 - DNA, 22 bp, synthetic construct
  misc_feature 1..22: note = chemically synthesized
  source 1..22: mol_type = other DNA
cagtttttctgctctgtttttc

SEQ ID NO: 125925 - DNA, 22 bp, synthetic construct
  misc_feature 1..22: note = chemically synthesized
  source 1..22: mol_type = other DNA
ttctgctctgtttttccccatc

SEQ ID NO: 125926 - DNA, 22 bp, synthetic construct
  misc_feature 1..22: note = chemically synthesized
  source 1..22: mol_type = other DNA
tctgctctgtttttccccatct

SEQ ID NO: 125927 - DNA, 22 bp, synthetic construct
  misc_feature 1..22: note = chemically synthesized
  source 1..22: mol_type = other DNA
ctgctctgtttttccccatctt

SEQ ID NO: 125928 - DNA, 22 bp, synthetic construct
  misc_feature 1..22: note = chemically synthesized
  source 1..22: mol_type = other DNA
tgctctgtttttccccatcttt

SEQ ID NO: 125929 - DNA, 22 bp, synthetic construct
  misc_feature 1..22: note = chemically synthesized
  source 1..22: mol_type = other DNA
ctctgtttttccccatctttgt

SEQ ID NO: 125930 - DNA, 22 bp, synthetic construct
  misc_feature 1..22: note = chemically synthesized
  source 1..22: mol_type = other DNA
tgtttttccccatctttgtggt

SEQ ID NO: 125931 - DNA, 22 bp, synthetic construct
  misc_feature 1..22: note = chemically synthesized
  source 1..22: mol_type = other DNA
tttttccccatctttgtggttt

SEQ ID NO: 125932 - DNA, 22 bp, synthetic construct
  misc_feature 1..22: note = chemically synthesized
  source 1..22: mol_type = other DNA
ttccccatctttgtggttttat

SEQ ID NO: 125933 - DNA, 22 bp, synthetic construct
  misc_feature 1..22: note = chemically synthesized
  source 1..22: mol_type = other DNA
tccccatctttgtggttttatc

SEQ ID NO: 125934 - DNA, 22 bp, synthetic construct
  misc_feature 1..22: note = chemically synthesized
  source 1..22: mol_type = other DNA
ccccatctttgtggttttatct

SEQ ID NO: 125935 - DNA, 22 bp, synthetic construct
  misc_feature 1..22: note = chemically synthesized
  source 1..22: mol_type = other DNA
cccatctttgtggttttatcta

SEQ ID NO: 125936 - DNA, 22 bp, synthetic construct
  misc_feature 1..22: note = chemically synthesized
  source 1..22: mol_type = other DNA
tgtggttttatctacctttggt

SEQ ID NO: 125937 - DNA, 22 bp, synthetic construct
  misc_feature 1..22: note = chemically synthesized
  source 1..22: mol_type = other DNA
gtggttttatctacctttggtc

SEQ ID NO: 125938 - DNA, 22 bp, synthetic construct
  misc_feature 1..22: note = chemically synthesized
  source 1..22: mol_type = other DNA
tggttttatctacctttggtct

SEQ ID NO: 125939 - DNA, 22 bp, synthetic construct
  misc_feature 1..22: note = chemically synthesized
  source 1..22: mol_type = other DNA
tatctacctttggtctttgatg

SEQ ID NO: 125940 - DNA, 22 bp, synthetic construct
  misc_feature 1..22: note = chemically synthesized
  source 1..22: mol_type = other DNA
atctacctttggtctttgatga

SEQ ID NO: 125941 - DNA, 22 bp, synthetic construct
  misc_feature 1..22: note = chemically synthesized
  source 1..22: mol_type = other DNA
tctacctttggtctttgatgat

SEQ ID NO: 125942 - DNA, 22 bp, synthetic construct
  misc_feature 1..22: note = chemically synthesized
  source 1..22: mol_type = other DNA
cctttggtctttgatgatggtg

SEQ ID NO: 125943 - DNA, 22 bp, synthetic construct
  misc_feature 1..22: note = chemically synthesized
  source 1..22: mol_type = other DNA
tggtctttgatgatggtgacgt

SEQ ID NO: 125944 - DNA, 22 bp, synthetic construct
  misc_feature 1..22: note = chemically synthesized
  source 1..22: mol_type = other DNA
ggtctttgatgatggtgacgta

SEQ ID NO: 125945 - DNA, 22 bp, synthetic construct
  misc_feature 1..22: note = chemically synthesized
  source 1..22: mol_type = other DNA
gtctttgatgatggtgacgtac

SEQ ID NO: 125946 - DNA, 22 bp, synthetic construct
  misc_feature 1..22: note = chemically synthesized
  source 1..22: mol_type = other DNA
tgatgatggtgacgtacagatg

SEQ ID NO: 125947 - DNA, 22 bp, synthetic construct
  misc_feature 1..22: note = chemically synthesized
  source 1..22: mol_type = other DNA
gatgatggtgacgtacagatgg

SEQ ID NO: 125948 - DNA, 22 bp, synthetic construct
  misc_feature 1..22: note = chemically synthesized
  source 1..22: mol_type = other DNA
atgatggtgacgtacagatggg

SEQ ID NO: 125949 - DNA, 22 bp, synthetic construct
  misc_feature 1..22: note = chemically synthesized
  source 1..22: mol_type = other DNA
ttggtgtggatgtcctttctgt

SEQ ID NO: 125950 - DNA, 22 bp, synthetic construct
  misc_feature 1..22: note = chemically synthesized
  source 1..22: mol_type = other DNA
tggtgtggatgtcctttctgtt

SEQ ID NO: 125951 - DNA, 22 bp, synthetic construct
  misc_feature 1..22: note = chemically synthesized
  source 1..22: mol_type = other DNA
ggtgtggatgtcctttctgttt

SEQ ID NO: 125952 - DNA, 22 bp, synthetic construct
  misc_feature 1..22: note = chemically synthesized
  source 1..22: mol_type = other DNA
gtgtggatgtcctttctgtttg

SEQ ID NO: 125953 - DNA, 22 bp, synthetic construct
  misc_feature 1..22: note = chemically synthesized
  source 1..22: mol_type = other DNA
tctgtttgttagttttccttct

SEQ ID NO: 125954 - DNA, 22 bp, synthetic construct
  misc_feature 1..22: note = chemically synthesized
  source 1..22: mol_type = other DNA
ctgtttgttagttttccttcta

SEQ ID NO: 125955 - DNA, 22 bp, synthetic construct
  misc_feature 1..22: note = chemically synthesized
  source 1..22: mol_type = other DNA
tgtttgttagttttccttctaa

SEQ ID NO: 125956 - DNA, 22 bp, synthetic construct
  misc_feature 1..22: note = chemically synthesized
  source 1..22: mol_type = other DNA
tttgttagttttccttctaaca

SEQ ID NO: 125957 - DNA, 22 bp, synthetic construct
  misc_feature 1..22: note = chemically synthesized
  source 1..22: mol_type = other DNA
gttagttttccttctaacagga

SEQ ID NO: 125958 - DNA, 22 bp, synthetic construct
  misc_feature 1..22: note = chemically synthesized
  source 1..22: mol_type = other DNA
ttagttttccttctaacaggac

SEQ ID NO: 125959 - DNA, 22 bp, synthetic construct
  misc_feature 1..22: note = chemically synthesized
  source 1..22: mol_type = other DNA
gttttccttctaacaggaccct

SEQ ID NO: 125960 - DNA, 22 bp, synthetic construct
  misc_feature 1..22: note = chemically synthesized
  source 1..22: mol_type = other DNA
tccttctaacaggaccctcagc

SEQ ID NO: 125961 - DNA, 22 bp, synthetic construct
  misc_feature 1..22: note = chemically synthesized
  source 1..22: mol_type = other DNA
ccttctaacaggaccctcagct

SEQ ID NO: 125962 - DNA, 22 bp, synthetic construct
  misc_feature 1..22: note = chemically synthesized
  source 1..22: mol_type = other DNA
cttctaacaggaccctcagctt

SEQ ID NO: 125963 - DNA, 22 bp, synthetic construct
  misc_feature 1..22: note = chemically synthesized
  source 1..22: mol_type = other DNA
ctaacaggaccctcagcttgca

SEQ ID NO: 125964 - DNA, 22 bp, synthetic construct
  misc_feature 1..22: note = chemically synthesized
  source 1..22: mol_type = other DNA
taacaggaccctcagcttgcag

SEQ ID NO: 125965 - DNA, 22 bp, synthetic construct
  misc_feature 1..22: note = chemically synthesized
  source 1..22: mol_type = other DNA
acaggaccctcagcttgcagca

SEQ ID NO: 125966 - DNA, 22 bp, synthetic construct
  misc_feature 1..22: note = chemically synthesized
  source 1..22: mol_type = other DNA
agcttgcagcagatttttaaaa

SEQ ID NO: 125967 - DNA, 22 bp, synthetic construct
  misc_feature 1..22: note = chemically synthesized
  source 1..22: mol_type = other DNA
gcagcagatttttaaaagaact

SEQ ID NO: 125968 - DNA, 22 bp, synthetic construct
  misc_feature 1..22: note = chemically synthesized
  source 1..22: mol_type = other DNA
cagcagatttttaaaagaactt

SEQ ID NO: 125969 - DNA, 22 bp, synthetic construct
  misc_feature 1..22: note = chemically synthesized
  source 1..22: mol_type = other DNA
ttaaaagaacttccaggacctt

SEQ ID NO: 125970 - DNA, 22 bp, synthetic construct
  misc_feature 1..22: note = chemically synthesized
  source 1..22: mol_type = other DNA
taaaagaacttccaggaccttg

SEQ ID NO: 125971 - DNA, 22 bp, synthetic construct
  misc_feature 1..22: note = chemically synthesized
  source 1..22: mol_type = other DNA
aaaagaacttccaggaccttgt

SEQ ID NO: 125972 - DNA, 22 bp, synthetic construct
  misc_feature 1..22: note = chemically synthesized
  source 1..22: mol_type = other DNA
aaagaacttccaggaccttgtc

SEQ ID NO: 125973 - DNA, 22 bp, synthetic construct
  misc_feature 1..22: note = chemically synthesized
  source 1..22: mol_type = other DNA
ccaggaccttgtctgtatattg

SEQ ID NO: 125974 - DNA, 22 bp, synthetic construct
  misc_feature 1..22: note = chemically synthesized
  source 1..22: mol_type = other DNA
caggaccttgtctgtatattga

SEQ ID NO: 125975 - DNA, 22 bp, synthetic construct
  misc_feature 1..22: note = chemically synthesized
  source 1..22: mol_type = other DNA
gtctgtatattgacgcctatgt

SEQ ID NO: 125976 - DNA, 22 bp, synthetic construct
  misc_feature 1..22: note = chemically synthesized
  source 1..22: mol_type = other DNA
tctgtatattgacgcctatgtc

SEQ ID NO: 125977 - DNA, 22 bp, synthetic construct
  misc_feature 1..22: note = chemically synthesized
  source 1..22: mol_type = other DNA
tatattgacgcctatgtcacta

SEQ ID NO: 125978 - DNA, 22 bp, synthetic construct
  misc_feature 1..22: note = chemically synthesized
  source 1..22: mol_type = other DNA
acgcctatgtcactacaggaat

SEQ ID NO: 125979 - DNA, 22 bp, synthetic construct
  misc_feature 1..22: note = chemically synthesized
  source 1..22: mol_type = other DNA
tgtcactacaggaatcagagca

SEQ ID NO: 125980 - DNA, 22 bp, synthetic construct
  misc_feature 1..22: note = chemically synthesized
  source 1..22: mol_type = other DNA
caggaatcagagcagggcatta

SEQ ID NO: 125981 - DNA, 22 bp, synthetic construct
  misc_feature 1..22: note = chemically synthesized
  source 1..22: mol_type = other DNA
cattgatcctttaagaaaattt

SEQ ID NO: 125982 - DNA, 22 bp, synthetic construct
  misc_feature 1..22: note = chemically synthesized
  source 1..22: mol_type = other DNA
atcctttaagaaaattttgcta

SEQ ID NO: 125983 - DNA, 22 bp, synthetic construct
  misc_feature 1..22: note = chemically synthesized
  source 1..22: mol_type = other DNA
taagaaaattttgctaccctat

SEQ ID NO: 125984 - DNA, 22 bp, synthetic construct
  misc_feature 1..22: note = chemically synthesized
  source 1..22: mol_type = other DNA
aagaaaattttgctaccctata

SEQ ID NO: 125985 - DNA, 22 bp, synthetic construct
  misc_feature 1..22: note = chemically synthesized
  source 1..22: mol_type = other DNA
agaaaattttgctaccctatac

SEQ ID NO: 125986 - DNA, 22 bp, synthetic construct
  misc_feature 1..22: note = chemically synthesized
  source 1..22: mol_type = other DNA
tgctaccctataccccttgacc

SEQ ID NO: 125987 - DNA, 22 bp, synthetic construct
  misc_feature 1..22: note = chemically synthesized
  source 1..22: mol_type = other DNA
gctaccctataccccttgaccc

SEQ ID NO: 125988 - DNA, 22 bp, synthetic construct
  misc_feature 1..22: note = chemically synthesized
  source 1..22: mol_type = other DNA
ctaccctataccccttgaccct

SEQ ID NO: 125989 - DNA, 22 bp, synthetic construct
  misc_feature 1..22: note = chemically synthesized
  source 1..22: mol_type = other DNA
ccctataccccttgaccctact

SEQ ID NO: 125990 - DNA, 22 bp, synthetic construct
  misc_feature 1..22: note = chemically synthesized
  source 1..22: mol_type = other DNA
taccccttgaccctactctttt

SEQ ID NO: 125991 - DNA, 22 bp, synthetic construct
  misc_feature 1..22: note = chemically synthesized
  source 1..22: mol_type = other DNA
gaccctactctttttttttttt

SEQ ID NO: 125992 - DNA, 22 bp, synthetic construct
  misc_feature 1..22: note = chemically synthesized
  source 1..22: mol_type = other DNA
accctactcttttttttttttt

SEQ ID NO: 125993 - DNA, 22 bp, synthetic construct
  misc_feature 1..22: note = chemically synthesized
  source 1..22: mol_type = other DNA
ctcttttttttttttttaattt

SEQ ID NO: 125994 - DNA, 22 bp, synthetic construct
  misc_feature 1..22: note = chemically synthesized
  source 1..22: mol_type = other DNA
ttttttttttttttaattttta

SEQ ID NO: 125995 - DNA, 22 bp, synthetic construct
  misc_feature 1..22: note = chemically synthesized
  source 1..22: mol_type = other DNA
ttttttttttttaatttttaaa

SEQ ID NO: 125996 - DNA, 22 bp, synthetic construct
  misc_feature 1..22: note = chemically synthesized
  source 1..22: mol_type = other DNA
tttttttttttaatttttaaag

SEQ ID NO: 125997 - DNA, 22 bp, synthetic construct
  misc_feature 1..22: note = chemically synthesized
  source 1..22: mol_type = other DNA
ttttttttttaatttttaaagg

SEQ ID NO: 125998 - DNA, 22 bp, synthetic construct
  misc_feature 1..22: note = chemically synthesized
  source 1..22: mol_type = other DNA
tttttttttaatttttaaaggt

SEQ ID NO: 125999 - DNA, 22 bp, synthetic construct
  misc_feature 1..22: note = chemically synthesized
  source 1..22: mol_type = other DNA
ttttttttaatttttaaaggta

SEQ ID NO: 126000 - DNA, 22 bp, synthetic construct
  misc_feature 1..22: note = chemically synthesized
  source 1..22: mol_type = other DNA
tttttttaatttttaaaggtaa

SEQ ID NO: 126001 - DNA, 22 bp, synthetic construct
  misc_feature 1..22: note = chemically synthesized
  source 1..22: mol_type = other DNA
ttttttaatttttaaaggtaat

SEQ ID NO: 126002 - DNA, 22 bp, synthetic construct
  misc_feature 1..22: note = chemically synthesized
  source 1..22: mol_type = other DNA
tttttaatttttaaaggtaatt

SEQ ID NO: 126003 - DNA, 22 bp, synthetic construct
  misc_feature 1..22: note = chemically synthesized
  source 1..22: mol_type = other DNA
ttttaatttttaaaggtaattg

SEQ ID NO: 126004 - DNA, 22 bp, synthetic construct
  misc_feature 1..22: note = chemically synthesized
  source 1..22: mol_type = other DNA
tttaatttttaaaggtaattgt

SEQ ID NO: 126005 - DNA, 22 bp, synthetic construct
  misc_feature 1..22: note = chemically synthesized
  source 1..22: mol_type = other DNA
ttaatttttaaaggtaattgtt

SEQ ID NO: 126006 - DNA, 22 bp, synthetic construct
  misc_feature 1..22: note = chemically synthesized
  source 1..22: mol_type = other DNA
taatttttaaaggtaattgtta

SEQ ID NO: 126007 - DNA, 22 bp, synthetic construct
  misc_feature 1..22: note = chemically synthesized
  source 1..22: mol_type = other DNA
aatttttaaaggtaattgttag

SEQ ID NO: 126008 - DNA, 22 bp, synthetic construct
  misc_feature 1..22: note = chemically synthesized
  source 1..22: mol_type = other DNA
atttttaaaggtaattgttaga

SEQ ID NO: 126009 - DNA, 22 bp, synthetic construct
  misc_feature 1..22: note = chemically synthesized
  source 1..22: mol_type = other DNA
ttaaaggtaattgttagaaatt

SEQ ID NO: 126010 - DNA, 22 bp, synthetic construct
  misc_feature 1..22: note = chemically synthesized
  source 1..22: mol_type = other DNA
taaaggtaattgttagaaattt

SEQ ID NO: 126011 - DNA, 22 bp, synthetic construct
  misc_feature 1..22: note = chemically synthesized
  source 1..22: mol_type = other DNA
aaaggtaattgttagaaatttc

SEQ ID NO: 126012 - DNA, 22 bp, synthetic construct
  misc_feature 1..22: note = chemically synthesized
  source 1..22: mol_type = other DNA
aaggtaattgttagaaatttcc

SEQ ID NO: 126013 - DNA, 22 bp, synthetic construct
  misc_feature 1..22: note = chemically synthesized
  source 1..22: mol_type = other DNA
ttagaaatttcccaaggtttat

SEQ ID NO: 126014 - DNA, 22 bp, synthetic construct
  misc_feature 1..22: note = chemically synthesized
  source 1..22: mol_type = other DNA
gaaatttcccaaggtttatttg

SEQ ID NO: 126015 - DNA, 22 bp, synthetic construct
  misc_feature 1..22: note = chemically synthesized
  source 1..22: mol_type = other DNA
cccaaggtttatttgaaatgac

SEQ ID NO: 126016 - DNA, 22 bp, synthetic construct
  misc_feature 1..22: note = chemically synthesized
  source 1..22: mol_type = other DNA
ccaaggtttatttgaaatgaca

SEQ ID NO: 126017 - DNA, 22 bp, synthetic construct
  misc_feature 1..22: note = chemically synthesized
  source 1..22: mol_type = other DNA
atttgaaatgacacaccactga

SEQ ID NO: 126018 - DNA, 22 bp, synthetic construct
  misc_feature 1..22: note = chemically synthesized
  source 1..22: mol_type = other DNA
tttgaaatgacacaccactgaa

SEQ ID NO: 126019 - DNA, 22 bp, synthetic construct
  misc_feature 1..22: note = chemically synthesized
  source 1..22: mol_type = other DNA
gaaatgacacaccactgaaaac

SEQ ID NO: 126020 - DNA, 22 bp, synthetic construct
  misc_feature 1..22: note = chemically synthesized
  source 1..22: mol_type = other DNA
aaatgacacaccactgaaaaca

SEQ ID NO: 126021 - DNA, 22 bp, synthetic construct
  misc_feature 1..22: note = chemically synthesized
  source 1..22: mol_type = other DNA
aaaacataacttttacagatga

SEQ ID NO: 126022 - DNA, 22 bp, synthetic construct
  misc_feature 1..22: note = chemically synthesized
  source 1..22: mol_type = other DNA
ttacagatgatttgtggataca

SEQ ID NO: 126023 - DNA, 22 bp, synthetic construct
  misc_feature 1..22: note = chemically synthesized
  source 1..22: mol_type = other DNA
tacagatgatttgtggatacag

SEQ ID NO: 126024 - DNA, 22 bp, synthetic construct
  misc_feature 1..22: note = chemically synthesized
  source 1..22: mol_type = other DNA
acagatgatttgtggatacagt

SEQ ID NO: 126025 - DNA, 22 bp, synthetic construct
  misc_feature 1..22: note = chemically synthesized
  source 1..22: mol_type = other DNA
cagatgatttgtggatacagta

SEQ ID NO: 126026 - DNA, 22 bp, synthetic construct
  misc_feature 1..22: note = chemically synthesized
  source 1..22: mol_type = other DNA
gtggatacagtacacatcacct

SEQ ID NO: 126027 - DNA, 22 bp, synthetic construct
  misc_feature 1..22: note = chemically synthesized
  source 1..22: mol_type = other DNA
tggatacagtacacatcaccta

SEQ ID NO: 126028 - DNA, 22 bp, synthetic construct
  misc_feature 1..22: note = chemically synthesized
  source 1..22: mol_type = other DNA
tcttactttaggacagtctgtg

SEQ ID NO: 126029 - DNA, 22 bp, synthetic construct
  misc_feature 1..22: note = chemically synthesized
  source 1..22: mol_type = other DNA
actttaggacagtctgtgaaga

SEQ ID NO: 126030 - DNA, 22 bp, synthetic construct
  misc_feature 1..22: note = chemically synthesized
  source 1..22: mol_type = other DNA
ctttaggacagtctgtgaagat

SEQ ID NO: 126031 - DNA, 22 bp, synthetic construct
  misc_feature 1..22: note = chemically synthesized
  source 1..22: mol_type = other DNA
taggacagtctgtgaagatgat

SEQ ID NO: 126032 - DNA, 22 bp, synthetic construct
  misc_feature 1..22: note = chemically synthesized
  source 1..22: mol_type = other DNA
aggacagtctgtgaagatgata

SEQ ID NO: 126033 - DNA, 22 bp, synthetic construct
  misc_feature 1..22: note = chemically synthesized
  source 1..22: mol_type = other DNA
ggacagtctgtgaagatgatat

SEQ ID NO: 126034 - DNA, 22 bp, synthetic construct
  misc_feature 1..22: note = chemically synthesized
  source 1..22: mol_type = other DNA
tgaagatgatatttttcctgct

SEQ ID NO: 126035 - DNA, 22 bp, synthetic construct
  misc_feature 1..22: note = chemically synthesized
  source 1..22: mol_type = other DNA
ttcctgctgcagttcctttgtc

SEQ ID NO: 126036 - DNA, 22 bp, synthetic construct
  misc_feature 1..22: note = chemically synthesized
  source 1..22: mol_type = other DNA
tcctgctgcagttcctttgtca

SEQ ID NO: 126037 - DNA, 22 bp, synthetic construct
  misc_feature 1..22: note = chemically synthesized
  source 1..22: mol_type = other DNA
cctgctgcagttcctttgtcaa

SEQ ID NO: 126038 - DNA, 22 bp, synthetic construct
  misc_feature 1..22: note = chemically synthesized
  source 1..22: mol_type = other DNA
ctgctgcagttcctttgtcaag

SEQ ID NO: 126039 - DNA, 22 bp, synthetic construct
  misc_feature 1..22: note = chemically synthesized
  source 1..22: mol_type = other DNA
ctgcagttcctttgtcaagtga

SEQ ID NO: 126040 - DNA, 22 bp, synthetic construct
  misc_feature 1..22: note = chemically synthesized
  source 1..22: mol_type = other DNA
cagttcctttgtcaagtgactt

SEQ ID NO: 126041 - DNA, 22 bp, synthetic construct
  misc_feature 1..22: note = chemically synthesized
  source 1..22: mol_type = other DNA
ctttgtcaagtgactttagaca

SEQ ID NO: 126042 - DNA, 22 bp, synthetic construct
  misc_feature 1..22: note = chemically synthesized
  source 1..22: mol_type = other DNA
tgtcaagtgactttagacagat

SEQ ID NO: 126043 - DNA, 22 bp, synthetic construct
  misc_feature 1..22: note = chemically synthesized
  source 1..22: mol_type = other DNA
gtcaagtgactttagacagata

SEQ ID NO: 126044 - DNA, 22 bp, synthetic construct
  misc_feature 1..22: note = chemically synthesized
  source 1..22: mol_type = other DNA
tcaagtgactttagacagatac

SEQ ID NO: 126045 - DNA, 22 bp, synthetic construct
  misc_feature 1..22: note = chemically synthesized
  source 1..22: mol_type = other DNA
tagacagatacaggactgcaag

SEQ ID NO: 126046 - DNA, 22 bp, synthetic construct
  misc_feature 1..22: note = chemically synthesized
  source 1..22: mol_type = other DNA
agacagatacaggactgcaaga

SEQ ID NO: 126047 - DNA, 22 bp, synthetic construct
  misc_feature 1..22: note = chemically synthesized
  source 1..22: mol_type = other DNA
gacagatacaggactgcaagag

SEQ ID NO: 126048 - DNA, 22 bp, synthetic construct
  misc_feature 1..22: note = chemically synthesized
  source 1..22: mol_type = other DNA
caagagtgactcaggtcatgct

SEQ ID NO: 126049 - DNA, 22 bp, synthetic construct
  misc_feature 1..22: note = chemically synthesized
  source 1..22: mol_type = other DNA
aggtcatgctggcataggagaa

SEQ ID NO: 126050 - DNA, 22 bp, synthetic construct
  misc_feature 1..22: note = chemically synthesized
  source 1..22: mol_type = other DNA
gcataggagaagcaggtgctag

SEQ ID NO: 126051 - DNA, 22 bp, synthetic construct
  misc_feature 1..22: note = chemically synthesized
  source 1..22: mol_type = other DNA
gtgtttcacttgaactagttgt

SEQ ID NO: 126052 - DNA, 22 bp, synthetic construct
  misc_feature 1..22: note = chemically synthesized
  source 1..22: mol_type = other DNA
cacttgaactagttgttgggct

SEQ ID NO: 126053 - DNA, 22 bp, synthetic construct
  misc_feature 1..22: note = chemically synthesized
  source 1..22: mol_type = other DNA
acttgaactagttgttgggctg

SEQ ID NO: 126054 - DNA, 22 bp, synthetic construct
  misc_feature 1..22: note = chemically synthesized
  source 1..22: mol_type = other DNA
gaactagttgttgggctggggt

SEQ ID NO: 126055 - DNA, 22 bp, synthetic construct
  misc_feature 1..22: note = chemically synthesized
  source 1..22: mol_type = other DNA
aactagttgttgggctggggtg

SEQ ID NO: 126056 - DNA, 22 bp, synthetic construct
  misc_feature 1..22: note = chemically synthesized
  source 1..22: mol_type = other DNA
gttgttgggctggggtggaatg

SEQ ID NO: 126057 - DNA, 22 bp, synthetic construct
  misc_feature 1..22: note = chemically synthesized
  source 1..22: mol_type = other DNA
ttgggctggggtggaatgaaag

SEQ ID NO: 126058 - DNA, 22 bp, synthetic construct
  misc_feature 1..22: note = chemically synthesized
  source 1..22: mol_type = other DNA
ggctggggtggaatgaaagctc

SEQ ID NO: 126059 - DNA, 22 bp, synthetic construct
  misc_feature 1..22: note = chemically synthesized
  source 1..22: mol_type = other DNA
gggtggaatgaaagctccctag

SEQ ID NO: 126060 - DNA, 22 bp, synthetic construct
  misc_feature 1..22: note = chemically synthesized
  source 1..22: mol_type = other DNA
cctaggccatgaggacatcttt

SEQ ID NO: 126061 - DNA, 22 bp, synthetic construct
  misc_feature 1..22: note = chemically synthesized
  source 1..22: mol_type = other DNA
ggccatgaggacatctttgcaa

SEQ ID NO: 126062 - DNA, 22 bp, synthetic construct
  misc_feature 1..22: note = chemically synthesized
  source 1..22: mol_type = other DNA
tgcaatgtggagaggacccaaa

SEQ ID NO: 126063 - DNA, 22 bp, synthetic construct
  misc_feature 1..22: note = chemically synthesized
  source 1..22: mol_type = other DNA
gcaatgtggagaggacccaaat

SEQ ID NO: 126064 - DNA, 22 bp, synthetic construct
  misc_feature 1..22: note = chemically synthesized
  source 1..22: mol_type = other DNA
caatgtggagaggacccaaatc

SEQ ID NO: 126065 - DNA, 22 bp, synthetic construct
  misc_feature 1..22: note = chemically synthesized
  source 1..22: mol_type = other DNA
ctctttgaatgttgaaggcctt

SEQ ID NO: 126066 - DNA, 22 bp, synthetic construct
  misc_feature 1..22: note = chemically synthesized
  source 1..22: mol_type = other DNA
tttgaatgttgaaggccttgtc

SEQ ID NO: 126067 - DNA, 22 bp, synthetic construct
  misc_feature 1..22: note = chemically synthesized
  source 1..22: mol_type = other DNA
tgaatgttgaaggccttgtcag

SEQ ID NO: 126068 - DNA, 22 bp, synthetic construct
  misc_feature 1..22: note = chemically synthesized
  source 1..22: mol_type = other DNA
gaatgttgaaggccttgtcagc

SEQ ID NO: 126069 - DNA, 22 bp, synthetic construct
  misc_feature 1..22: note = chemically synthesized
  source 1..22: mol_type = other DNA
aatgttgaaggccttgtcagca

SEQ ID NO: 126070 - DNA, 22 bp, synthetic construct
  misc_feature 1..22: note = chemically synthesized
  source 1..22: mol_type = other DNA
aaggccttgtcagcatactggt

SEQ ID NO: 126071 - DNA, 22 bp, synthetic construct
  misc_feature 1..22: note = chemically synthesized
  source 1..22: mol_type = other DNA
gtcagcatactggtcacccagt

SEQ ID NO: 126072 - DNA, 22 bp, synthetic construct
  misc_feature 1..22: note = chemically synthesized
  source 1..22: mol_type = other DNA
tcagcatactggtcacccagtt

SEQ ID NO: 126073 - DNA, 22 bp, synthetic construct
  misc_feature 1..22: note = chemically synthesized
  source 1..22: mol_type = other DNA
gtcacccagtttcatcatcact

SEQ ID NO: 126074 - DNA, 22 bp, synthetic construct
  misc_feature 1..22: note = chemically synthesized
  source 1..22: mol_type = other DNA
catcatcacttcatactgtttg

SEQ ID NO: 126075 - DNA, 22 bp, synthetic construct
  misc_feature 1..22: note = chemically synthesized
  source 1..22: mol_type = other DNA
atcatcacttcatactgtttgt

SEQ ID NO: 126076 - DNA, 22 bp, synthetic construct
  misc_feature 1..22: note = chemically synthesized
  source 1..22: mol_type = other DNA
catactgtttgtaccaaagcac

SEQ ID NO: 126077 - DNA, 22 bp, synthetic construct
  misc_feature 1..22: note = chemically synthesized
  source 1..22: mol_type = other DNA
atactgtttgtaccaaagcacc

SEQ ID NO: 126078 - DNA, 22 bp, synthetic construct
  misc_feature 1..22: note = chemically synthesized
  source 1..22: mol_type = other DNA
tttgtaccaaagcaccacagtt

SEQ ID NO: 126079 - DNA, 22 bp, synthetic construct
  misc_feature 1..22: note = chemically synthesized
  source 1..22: mol_type = other DNA
gtaccaaagcaccacagtttcc

SEQ ID NO: 126080 - DNA, 22 bp, synthetic construct
  misc_feature 1..22: note = chemically synthesized
  source 1..22: mol_type = other DNA
taccaaagcaccacagtttcct

SEQ ID NO: 126081 - DNA, 22 bp, synthetic construct
  misc_feature 1..22: note = chemically synthesized
  source 1..22: mol_type = other DNA
ccttatgaaacttagcttcaag

SEQ ID NO: 126082 - DNA, 22 bp, synthetic construct
  misc_feature 1..22: note = chemically synthesized
  source 1..22: mol_type = other DNA
cttatgaaacttagcttcaagg

SEQ ID NO: 126083 - DNA, 22 bp, synthetic construct
  misc_feature 1..22: note = chemically synthesized
  source 1..22: mol_type = other DNA
atgaaacttagcttcaaggctg

SEQ ID NO: 126084 - DNA, 22 bp, synthetic construct
  misc_feature 1..22: note = chemically synthesized
  source 1..22: mol_type = other DNA
tgaaacttagcttcaaggctgg

SEQ ID NO: 126085 - DNA, 22 bp, synthetic construct
  misc_feature 1..22: note = chemically synthesized
  source 1..22: mol_type = other DNA
agcttcaaggctggagatgttt

SEQ ID NO: 126086 - DNA, 22 bp, synthetic construct
  misc_feature 1..22: note = chemically synthesized
  source 1..22: mol_type = other DNA
gcttcaaggctggagatgtttt

SEQ ID NO: 126087 - DNA, 22 bp, synthetic construct
  misc_feature 1..22: note = chemically synthesized
  source 1..22: mol_type = other DNA
caaggctggagatgtttttgaa

SEQ ID NO: 126088 - DNA, 22 bp, synthetic construct
  misc_feature 1..22: note = chemically synthesized
  source 1..22: mol_type = other DNA
aaggctggagatgtttttgaaa

SEQ ID NO: 126089 - DNA, 22 bp, synthetic construct
  misc_feature 1..22: note = chemically synthesized
  source 1..22: mol_type = other DNA
gagatgtttttgaaagtattaa

SEQ ID NO: 126090 - DNA, 22 bp, synthetic construct
  misc_feature 1..22: note = chemically synthesized
  source 1..22: mol_type = other DNA
ttgaaagtattaatataaaatc

SEQ ID NO: 126091 - DNA, 22 bp, synthetic construct
  misc_feature 1..22: note = chemically synthesized
  source 1..22: mol_type = other DNA
tgaaagtattaatataaaatcc

SEQ ID NO: 126092 - DNA, 22 bp, synthetic construct
  misc_feature 1..22: note = chemically synthesized
  source 1..22: mol_type = other DNA
gaaagtattaatataaaatcca

SEQ ID NO: 126093 - DNA, 22 bp, synthetic construct
  misc_feature 1..22: note = chemically synthesized
  source 1..22: mol_type = other DNA
aaagtattaatataaaatccaa

SEQ ID NO: 126094 - DNA, 22 bp, synthetic construct
  misc_feature 1..22: note = chemically synthesized
  source 1..22: mol_type = other DNA
atataaaatccaattcgtcttg

SEQ ID NO: 126095 - DNA, 22 bp, synthetic construct
  misc_feature 1..22: note = chemically synthesized
  source 1..22: mol_type = other DNA
gtcttgactataataatggtaa

SEQ ID NO: 126096 - DNA, 22 bp, synthetic construct
  misc_feature 1..22: note = chemically synthesized
  source 1..22: mol_type = other DNA
gactataataatggtaactttt

SEQ ID NO: 126097 - DNA, 22 bp, synthetic construct
  misc_feature 1..22: note = chemically synthesized
  source 1..22: mol_type = other DNA
actataataatggtaacttttc

SEQ ID NO: 126098 - DNA, 22 bp, synthetic construct
  misc_feature 1..22: note = chemically synthesized
  source 1..22: mol_type = other DNA
taataatggtaacttttcttgt

SEQ ID NO: 126099 - DNA, 22 bp, synthetic construct
  misc_feature 1..22: note = chemically synthesized
  source 1..22: mol_type = other DNA
ttcttgtaagtcaccattaaac

SEQ ID NO: 126100 - DNA, 22 bp, synthetic construct
  misc_feature 1..22: note = chemically synthesized
  source 1..22: mol_type = other DNA
tcttgtaagtcaccattaaact

SEQ ID NO: 126101 - DNA, 22 bp, synthetic construct
  misc_feature 1..22: note = chemically synthesized
  source 1..22: mol_type = other DNA
cttgtaagtcaccattaaactc

SEQ ID NO: 126102 - DNA, 22 bp, synthetic construct
  misc_feature 1..22: note = chemically synthesized
  source 1..22: mol_type = other DNA
ttgtaagtcaccattaaactct

SEQ ID NO: 126103 - DNA, 22 bp, synthetic construct
  misc_feature 1..22: note = chemically synthesized
  source 1..22: mol_type = other DNA
gtaagtcaccattaaactcttc

SEQ ID NO: 126104 - DNA, 22 bp, synthetic construct
  misc_feature 1..22: note = chemically synthesized
  source 1..22: mol_type = other DNA
taagtcaccattaaactcttca

SEQ ID NO: 126105 - DNA, 22 bp, synthetic construct
  misc_feature 1..22: note = chemically synthesized
  source 1..22: mol_type = other DNA
aactcttcaaactttctctatg

SEQ ID NO: 126106 - DNA, 22 bp, synthetic construct
  misc_feature 1..22: note = chemically synthesized
  source 1..22: mol_type = other DNA
ttcaaactttctctatgctttc

SEQ ID NO: 126107 - DNA, 22 bp, synthetic construct
  misc_feature 1..22: note = chemically synthesized
  source 1..22: mol_type = other DNA
caaactttctctatgctttctg

SEQ ID NO: 126108 - DNA, 22 bp, synthetic construct
  misc_feature 1..22: note = chemically synthesized
  source 1..22: mol_type = other DNA
aaactttctctatgctttctga

SEQ ID NO: 126109 - DNA, 22 bp, synthetic construct
  misc_feature 1..22: note = chemically synthesized
  source 1..22: mol_type = other DNA
tctctatgctttctgaaattct

SEQ ID NO: 126110 - DNA, 22 bp, synthetic construct
  misc_feature 1..22: note = chemically synthesized
  source 1..22: mol_type = other DNA
ctctatgctttctgaaattcta

SEQ ID NO: 126111 - DNA, 22 bp, synthetic construct
  misc_feature 1..22: note = chemically synthesized
  source 1..22: mol_type = other DNA
tctatgctttctgaaattctac

SEQ ID NO: 126112 - DNA, 22 bp, synthetic construct
  misc_feature 1..22: note = chemically synthesized
  source 1..22: mol_type = other DNA
tatgctttctgaaattctactt

SEQ ID NO: 126113 - DNA, 22 bp, synthetic construct
  misc_feature 1..22: note = chemically synthesized
  source 1..22: mol_type = other DNA
tgctttctgaaattctacttct

SEQ ID NO: 126114 - DNA, 22 bp, synthetic construct
  misc_feature 1..22: note = chemically synthesized
  source 1..22: mol_type = other DNA
tctgaaattctacttctgcctt

SEQ ID NO: 126115 - DNA, 22 bp, synthetic construct
  misc_feature 1..22: note = chemically synthesized
  source 1..22: mol_type = other DNA
ctgaaattctacttctgcctta

SEQ ID NO: 126116 - DNA, 22 bp, synthetic construct
  misc_feature 1..22: note = chemically synthesized
  source 1..22: mol_type = other DNA
tgaaattctacttctgccttag

SEQ ID NO: 126117 - DNA, 22 bp, synthetic construct
  misc_feature 1..22: note = chemically synthesized
  source 1..22: mol_type = other DNA
aaattctacttctgccttagac

SEQ ID NO: 126118 - DNA, 22 bp, synthetic construct
  misc_feature 1..22: note = chemically synthesized
  source 1..22: mol_type = other DNA
tacttctgccttagacagaggc

SEQ ID NO: 126119 - DNA, 22 bp, synthetic construct
  misc_feature 1..22: note = chemically synthesized
  source 1..22: mol_type = other DNA
cttctgccttagacagaggctc

SEQ ID NO: 126120 - DNA, 22 bp, synthetic construct
  misc_feature 1..22: note = chemically synthesized
  source 1..22: mol_type = other DNA
ctgccttagacagaggctccta

SEQ ID NO: 126121 - DNA, 22 bp, synthetic construct
  misc_feature 1..22: note = chemically synthesized
  source 1..22: mol_type = other DNA
tgccttagacagaggctcctat

SEQ ID NO: 126122 - DNA, 22 bp, synthetic construct
  misc_feature 1..22: note = chemically synthesized
  source 1..22: mol_type = other DNA
ccttagacagaggctcctatcc

SEQ ID NO: 126123 - DNA, 22 bp, synthetic construct
  misc_feature 1..22: note = chemically synthesized
  source 1..22: mol_type = other DNA
agacagaggctcctatccttcc

SEQ ID NO: 126124 - DNA, 22 bp, synthetic construct
  misc_feature 1..22: note = chemically synthesized
  source 1..22: mol_type = other DNA
gacagaggctcctatccttcct

SEQ ID NO: 126125 - DNA, 22 bp, synthetic construct
  misc_feature 1..22: note = chemically synthesized
  source 1..22: mol_type = other DNA
ctatccttcctcctgaagctct

SEQ ID NO: 126126 - DNA, 22 bp, synthetic construct
  misc_feature 1..22: note = chemically synthesized
  source 1..22: mol_type = other DNA
tccttcctcctgaagctctgtt

SEQ ID NO: 126127 - DNA, 22 bp, synthetic construct
  misc_feature 1..22: note = chemically synthesized
  source 1..22: mol_type = other DNA
cctcctgaagctctgttgagcc

SEQ ID NO: 126128 - DNA, 22 bp, synthetic construct
  misc_feature 1..22: note = chemically synthesized
  source 1..22: mol_type = other DNA
ctcctgaagctctgttgagccc

SEQ ID NO: 126129 - DNA, 22 bp, synthetic construct
  misc_feature 1..22: note = chemically synthesized
  source 1..22: mol_type = other DNA
ctgaagctctgttgagcccgat

SEQ ID NO: 126130 - DNA, 22 bp, synthetic construct
  misc_feature 1..22: note = chemically synthesized
  source 1..22: mol_type = other DNA
aagctctgttgagcccgatgga

SEQ ID NO: 126131 - DNA, 22 bp, synthetic construct
  misc_feature 1..22: note = chemically synthesized
  source 1..22: mol_type = other DNA
tgttgagcccgatggaggtggg

SEQ ID NO: 126132 - DNA, 22 bp, synthetic construct
  misc_feature 1..22: note = chemically synthesized
  source 1..22: mol_type = other DNA
ttgagcccgatggaggtgggca

SEQ ID NO: 126133 - DNA, 22 bp, synthetic construct
  misc_feature 1..22: note = chemically synthesized
  source 1..22: mol_type = other DNA
agcccgatggaggtgggcaggc

SEQ ID NO: 126134 - DNA, 22 bp, synthetic construct
  misc_feature 1..22: note = chemically synthesized
  source 1..22: mol_type = other DNA
tcatagtccgtaagcttcctgc

SEQ ID NO: 126135 - DNA, 22 bp, synthetic construct
  misc_feature 1..22: note = chemically synthesized
  source 1..22: mol_type = other DNA
cctgctgcacttggtgatgtga

SEQ ID NO: 126136 - DNA, 22 bp, synthetic construct
  misc_feature 1..22: note = chemically synthesized
  source 1..22: mol_type = other DNA
ctgctgcacttggtgatgtgat

SEQ ID NO: 126137 - DNA, 22 bp, synthetic construct
  misc_feature 1..22: note = chemically synthesized
  source 1..22: mol_type = other DNA
ctgcacttggtgatgtgattct

SEQ ID NO: 126138 - DNA, 22 bp, synthetic construct
  misc_feature 1..22: note = chemically synthesized
  source 1..22: mol_type = other DNA
cacttggtgatgtgattcttca

SEQ ID NO: 126139 - DNA, 22 bp, synthetic construct
  misc_feature 1..22: note = chemically synthesized
  source 1..22: mol_type = other DNA
ggtgatgtgattcttcaagtca

SEQ ID NO: 126140 - DNA, 22 bp, synthetic construct
  misc_feature 1..22: note = chemically synthesized
  source 1..22: mol_type = other DNA
gtgatgtgattcttcaagtcag

SEQ ID NO: 126141 - DNA, 22 bp, synthetic construct
  misc_feature 1..22: note = chemically synthesized
  source 1..22: mol_type = other DNA
ttcaagtcaggaaattggtcca

SEQ ID NO: 126142 - DNA, 22 bp, synthetic construct
  misc_feature 1..22: note = chemically synthesized
  source 1..22: mol_type = other DNA
caagtcaggaaattggtccagg

SEQ ID NO: 126143 - DNA, 22 bp, synthetic construct
  misc_feature 1..22: note = chemically synthesized
  source 1..22: mol_type = other DNA
aagtcaggaaattggtccaggt

SEQ ID NO: 126144 - DNA, 22 bp, synthetic construct
  misc_feature 1..22: note = chemically synthesized
  source 1..22: mol_type = other DNA
gtccaggtagttttccagtgtt

SEQ ID NO: 126145 - DNA, 22 bp, synthetic construct
  misc_feature 1..22: note = chemically synthesized
  source 1..22: mol_type = other DNA
tccagtgttagcaaggatgcat

SEQ ID NO: 126146 - DNA, 22 bp, synthetic construct
  misc_feature 1..22: note = chemically synthesized
  source 1..22: mol_type = other DNA
ccagtgttagcaaggatgcatc

SEQ ID NO: 126147 - DNA, 22 bp, synthetic construct
  misc_feature 1..22: note = chemically synthesized
  source 1..22: mol_type = other DNA
cagtgttagcaaggatgcatcc

SEQ ID NO: 126148 - DNA, 22 bp, synthetic construct
  misc_feature 1..22: note = chemically synthesized
  source 1..22: mol_type = other DNA
gcaaggatgcatccatgagttt

SEQ ID NO: 126149 - DNA, 22 bp, synthetic construct
  misc_feature 1..22: note = chemically synthesized
  source 1..22: mol_type = other DNA
tttgtggatatcctcccagagc

SEQ ID NO: 126150 - DNA, 22 bp, synthetic construct
  misc_feature 1..22: note = chemically synthesized
  source 1..22: mol_type = other DNA
ttgtggatatcctcccagagca

SEQ ID NO: 126151 - DNA, 22 bp, synthetic construct
  misc_feature 1..22: note = chemically synthesized
  source 1..22: mol_type = other DNA
tgtggatatcctcccagagcac

SEQ ID NO: 126152 - DNA, 22 bp, synthetic construct
  misc_feature 1..22: note = chemically synthesized
  source 1..22: mol_type = other DNA
gtggatatcctcccagagcaca

SEQ ID NO: 126153 - DNA, 22 bp, synthetic construct
  misc_feature 1..22: note = chemically synthesized
  source 1..22: mol_type = other DNA
tggatatcctcccagagcacat

SEQ ID NO: 126154 - DNA, 22 bp, synthetic construct
  misc_feature 1..22: note = chemically synthesized
  source 1..22: mol_type = other DNA
ccagagcacatcacctttctca

SEQ ID NO: 126155 - DNA, 22 bp, synthetic construct
  misc_feature 1..22: note = chemically synthesized
  source 1..22: mol_type = other DNA
tctcaccaaccattttcacacc

SEQ ID NO: 126156 - DNA, 22 bp, synthetic construct
  misc_feature 1..22: note = chemically synthesized
  source 1..22: mol_type = other DNA
ctcaccaaccattttcacacct

SEQ ID NO: 126157 - DNA, 22 bp, synthetic construct
  misc_feature 1..22: note = chemically synthesized
  source 1..22: mol_type = other DNA
tcaccaaccattttcacacctt

SEQ ID NO: 126158 - DNA, 22 bp, synthetic construct
  misc_feature 1..22: note = chemically synthesized
  source 1..22: mol_type = other DNA
accaaccattttcacaccttcc

SEQ ID NO: 126159 - DNA, 22 bp, synthetic construct
  misc_feature 1..22: note = chemically synthesized
  source 1..22: mol_type = other DNA
tcacaccttcctgcccagacca

SEQ ID NO: 126160 - DNA, 22 bp, synthetic construct
  misc_feature 1..22: note = chemically synthesized
  source 1..22: mol_type = other DNA
cacaccttcctgcccagaccaa

SEQ ID NO: 126161 - DNA, 22 bp, synthetic construct
  misc_feature 1..22: note = chemically synthesized
  source 1..22: mol_type = other DNA
acaccttcctgcccagaccaat

SEQ ID NO: 126162 - DNA, 22 bp, synthetic construct
  misc_feature 1..22: note = chemically synthesized
  source 1..22: mol_type = other DNA
cctgcccagaccaatccagcgc

SEQ ID NO: 126163 - DNA, 22 bp, synthetic construct
  misc_feature 1..22: note = chemically synthesized
  source 1..22: mol_type = other DNA
ctgcccagaccaatccagcgca

SEQ ID NO: 126164 - DNA, 22 bp, synthetic construct
  misc_feature 1..22: note = chemically synthesized
  source 1..22: mol_type = other DNA
cccagaccaatccagcgcacag

SEQ ID NO: 126165 - DNA, 22 bp, synthetic construct
  misc_feature 1..22: note = chemically synthesized
  source 1..22: mol_type = other DNA
cacacagtgactcagcttcgtc

SEQ ID NO: 126166 - DNA, 22 bp, synthetic construct
  misc_feature 1..22: note = chemically synthesized
  source 1..22: mol_type = other DNA
acacagtgactcagcttcgtca

SEQ ID NO: 126167 - DNA, 22 bp, synthetic construct
  misc_feature 1..22: note = chemically synthesized
  source 1..22: mol_type = other DNA
agcttcgtcaaggtctcttgaa

SEQ ID NO: 126168 - DNA, 22 bp, synthetic construct
  misc_feature 1..22: note = chemically synthesized
  source 1..22: mol_type = other DNA
cgtcaaggtctcttgaatgcct

SEQ ID NO: 126169 - DNA, 22 bp, synthetic construct
  misc_feature 1..22: note = chemically synthesized
  source 1..22: mol_type = other DNA
gtcaaggtctcttgaatgcctt

SEQ ID NO: 126170 - DNA, 22 bp, synthetic construct
  misc_feature 1..22: note = chemically synthesized
  source 1..22: mol_type = other DNA
ttgaatgcctttgattgcttct

SEQ ID NO: 126171 - DNA, 22 bp, synthetic construct
  misc_feature 1..22: note = chemically synthesized
  source 1..22: mol_type = other DNA
gaatgcctttgattgcttctaa

SEQ ID NO: 126172 - DNA, 22 bp, synthetic construct
  misc_feature 1..22: note = chemically synthesized
  source 1..22: mol_type = other DNA
aatgcctttgattgcttctaaa

SEQ ID NO: 126173 - DNA, 22 bp, synthetic construct
  misc_feature 1..22: note = chemically synthesized
  source 1..22: mol_type = other DNA
tgattgcttctaaacatcctca

SEQ ID NO: 126174 - DNA, 22 bp, synthetic construct
  misc_feature 1..22: note = chemically synthesized
  source 1..22: mol_type = other DNA
gattgcttctaaacatcctcag

SEQ ID NO: 126175 - DNA, 22 bp, synthetic construct
  misc_feature 1..22: note = chemically synthesized
  source 1..22: mol_type = other DNA
attgcttctaaacatcctcaga

SEQ ID NO: 126176 - DNA, 22 bp, synthetic construct
  misc_feature 1..22: note = chemically synthesized
  source 1..22: mol_type = other DNA
cttctaaacatcctcagagttc

SEQ ID NO: 126177 - DNA, 22 bp, synthetic construct
  misc_feature 1..22: note = chemically synthesized
  source 1..22: mol_type = other DNA
ctaaacatcctcagagttctct

SEQ ID NO: 126178 - DNA, 22 bp, synthetic construct
  misc_feature 1..22: note = chemically synthesized
  source 1..22: mol_type = other DNA
taaacatcctcagagttctctc

SEQ ID NO: 126179 - DNA, 22 bp, synthetic construct
  misc_feature 1..22: note = chemically synthesized
  source 1..22: mol_type = other DNA
aacatcctcagagttctctcag

SEQ ID NO: 126180 - DNA, 22 bp, synthetic construct
  misc_feature 1..22: note = chemically synthesized
  source 1..22: mol_type = other DNA
agagttctctcaggtctggtac

SEQ ID NO: 126181 - DNA, 22 bp, synthetic construct
  misc_feature 1..22: note = chemically synthesized
  source 1..22: mol_type = other DNA
tctcaggtctggtaccctctgc

SEQ ID NO: 126182 - DNA, 22 bp, synthetic construct
  misc_feature 1..22: note = chemically synthesized
  source 1..22: mol_type = other DNA
tcaggtctggtaccctctgctt

SEQ ID NO: 126183 - DNA, 22 bp, synthetic construct
  misc_feature 1..22: note = chemically synthesized
  source 1..22: mol_type = other DNA
aggtctggtaccctctgcttct

SEQ ID NO: 126184 - DNA, 22 bp, synthetic construct
  misc_feature 1..22: note = chemically synthesized
  source 1..22: mol_type = other DNA
gtaccctctgcttcttgtggct

SEQ ID NO: 126185 - DNA, 22 bp, synthetic construct
  misc_feature 1..22: note = chemically synthesized
  source 1..22: mol_type = other DNA
tgcttcttgtggcttgaagttc

SEQ ID NO: 126186 - DNA, 22 bp, synthetic construct
  misc_feature 1..22: note = chemically synthesized
  source 1..22: mol_type = other DNA
cttcttgtggcttgaagttctg

SEQ ID NO: 126187 - DNA, 22 bp, synthetic construct
  misc_feature 1..22: note = chemically synthesized
  source 1..22: mol_type = other DNA
cttgtggcttgaagttctggac

SEQ ID NO: 126188 - DNA, 22 bp, synthetic construct
  misc_feature 1..22: note = chemically synthesized
  source 1..22: mol_type = other DNA
ttgtggcttgaagttctggaca

SEQ ID NO: 126189 - DNA, 22 bp, synthetic construct
  misc_feature 1..22: note = chemically synthesized
  source 1..22: mol_type = other DNA
gtggcttgaagttctggacata

SEQ ID NO: 126190 - DNA, 22 bp, synthetic construct
  misc_feature 1..22: note = chemically synthesized
  source 1..22: mol_type = other DNA
tggcttgaagttctggacatat

SEQ ID NO: 126191 - DNA, 22 bp, synthetic construct
  misc_feature 1..22: note = chemically synthesized
  source 1..22: mol_type = other DNA
gaagttctggacatattcttca

SEQ ID NO: 126192 - DNA, 22 bp, synthetic construct
  misc_feature 1..22: note = chemically synthesized
  source 1..22: mol_type = other DNA
aagttctggacatattcttcaa

SEQ ID NO: 126193 - DNA, 22 bp, synthetic construct
  misc_feature 1..22: note = chemically synthesized
  source 1..22: mol_type = other DNA
tggacatattcttcaaactgtt

SEQ ID NO: 126194 - DNA, 22 bp, synthetic construct
  misc_feature 1..22: note = chemically synthesized
  source 1..22: mol_type = other DNA
gacatattcttcaaactgtttg

SEQ ID NO: 126195 - DNA, 22 bp, synthetic construct
  misc_feature 1..22: note = chemically synthesized
  source 1..22: mol_type = other DNA
ttcaaactgtttgtcttttgtc

SEQ ID NO: 126196 - DNA, 22 bp, synthetic construct
  misc_feature 1..22: note = chemically synthesized
  source 1..22: mol_type = other DNA
caaactgtttgtcttttgtctc

SEQ ID NO: 126197 - DNA, 22 bp, synthetic construct
  misc_feature 1..22: note = chemically synthesized
  source 1..22: mol_type = other DNA
aaactgtttgtcttttgtctca

SEQ ID NO: 126198 - DNA, 22 bp, synthetic construct
  misc_feature 1..22: note = chemically synthesized
  source 1..22: mol_type = other DNA
tttgtcttttgtctcagcagct

SEQ ID NO: 126199 - DNA, 22 bp, synthetic construct
  misc_feature 1..22: note = chemically synthesized
  source 1..22: mol_type = other DNA
gtcttttgtctcagcagctttc

SEQ ID NO: 126200 - DNA, 22 bp, synthetic construct
  misc_feature 1..22: note = chemically synthesized
  source 1..22: mol_type = other DNA
tcttttgtctcagcagctttcc

SEQ ID NO: 126201 - DNA, 22 bp, synthetic construct
  misc_feature 1..22: note = chemically synthesized
  source 1..22: mol_type = other DNA
ttgtctcagcagctttccctgg

SEQ ID NO: 126202 - DNA, 22 bp, synthetic construct
  misc_feature 1..22: note = chemically synthesized
  source 1..22: mol_type = other DNA
tgtctcagcagctttccctggc

SEQ ID NO: 126203 - DNA, 22 bp, synthetic construct
  misc_feature 1..22: note = chemically synthesized
  source 1..22: mol_type = other DNA
gtctcagcagctttccctggct

SEQ ID NO: 126204 - DNA, 22 bp, synthetic construct
  misc_feature 1..22: note = chemically synthesized
  source 1..22: mol_type = other DNA
tctcagcagctttccctggctt

SEQ ID NO: 126205 - DNA, 22 bp, synthetic construct
  misc_feature 1..22: note = chemically synthesized
  source 1..22: mol_type = other DNA
agcagctttccctggcttctgg

SEQ ID NO: 126206 - DNA, 22 bp, synthetic construct
  misc_feature 1..22: note = chemically synthesized
  source 1..22: mol_type = other DNA
tccctggcttctggaggacgtt

SEQ ID NO: 126207 - DNA, 22 bp, synthetic construct
  misc_feature 1..22: note = chemically synthesized
  source 1..22: mol_type = other DNA
ccctggcttctggaggacgttt

SEQ ID NO: 126208 - DNA, 22 bp, synthetic construct
  misc_feature 1..22: note = chemically synthesized
  source 1..22: mol_type = other DNA
cctggcttctggaggacgtttt

SEQ ID NO: 126209 - DNA, 22 bp, synthetic construct
  misc_feature 1..22: note = chemically synthesized
  source 1..22: mol_type = other DNA
gcttctggaggacgttttcctg

SEQ ID NO: 126210 - DNA, 22 bp, synthetic construct
  misc_feature 1..22: note = chemically synthesized
  source 1..22: mol_type = other DNA
ctggaggacgttttcctgtgag

SEQ ID NO: 126211 - DNA, 22 bp, synthetic construct
  misc_feature 1..22: note = chemically synthesized
  source 1..22: mol_type = other DNA
tggaggacgttttcctgtgagt

SEQ ID NO: 126212 - DNA, 22 bp, synthetic construct
  misc_feature 1..22: note = chemically synthesized
  source 1..22: mol_type = other DNA
gaggacgttttcctgtgagtgg

SEQ ID NO: 126213 - DNA, 22 bp, synthetic construct
  misc_feature 1..22: note = chemically synthesized
  source 1..22: mol_type = other DNA
tcctgtgagtggctgagtctct

SEQ ID NO: 126214 - DNA, 22 bp, synthetic construct
  misc_feature 1..22: note = chemically synthesized
  source 1..22: mol_type = other DNA
cctgtgagtggctgagtctctt

SEQ ID NO: 126215 - DNA, 22 bp, synthetic construct
  misc_feature 1..22: note = chemically synthesized
  source 1..22: mol_type = other DNA
ctgtgagtggctgagtctcttc

SEQ ID NO: 126216 - DNA, 22 bp, synthetic construct
  misc_feature 1..22: note = chemically synthesized
  source 1..22: mol_type = other DNA
tgagtggctgagtctcttccag

SEQ ID NO: 126217 - DNA, 22 bp, synthetic construct
  misc_feature 1..22: note = chemically synthesized
  source 1..22: mol_type = other DNA
agtctcttccaggcattcttgg

SEQ ID NO: 126218 - DNA, 22 bp, synthetic construct
  misc_feature 1..22: note = chemically synthesized
  source 1..22: mol_type = other DNA
ttccaggcattcttggcaaaga

SEQ ID NO: 126219 - DNA, 22 bp, synthetic construct
  misc_feature 1..22: note = chemically synthesized
  source 1..22: mol_type = other DNA
ccaggcattcttggcaaagatg

SEQ ID NO: 126220 - DNA, 22 bp, synthetic construct
  misc_feature 1..22: note = chemically synthesized
  source 1..22: mol_type = other DNA
caggcattcttggcaaagatgc

SEQ ID NO: 126221 - DNA, 22 bp, synthetic construct
  misc_feature 1..22: note = chemically synthesized
  source 1..22: mol_type = other DNA
ttggcaaagatgccctcttgat

SEQ ID NO: 126222 - DNA, 22 bp, synthetic construct
  misc_feature 1..22: note = chemically synthesized
  source 1..22: mol_type = other DNA
ggcaaagatgccctcttgatgt

SEQ ID NO: 126223 - DNA, 22 bp, synthetic construct
  misc_feature 1..22: note = chemically synthesized
  source 1..22: mol_type = other DNA
gcaaagatgccctcttgatgtt

SEQ ID NO: 126224 - DNA, 22 bp, synthetic construct
  misc_feature 1..22: note = chemically synthesized
  source 1..22: mol_type = other DNA
ttgatgttggccagggctgcag

SEQ ID NO: 126225 - DNA, 22 bp, synthetic construct
  misc_feature 1..22: note = chemically synthesized
  source 1..22: mol_type = other DNA
gatgttggccagggctgcaggt

SEQ ID NO: 126226 - DNA, 22 bp, synthetic construct
  misc_feature 1..22: note = chemically synthesized
  source 1..22: mol_type = other DNA
atgttggccagggctgcaggtc

SEQ ID NO: 126227 - DNA, 22 bp, synthetic construct
  misc_feature 1..22: note = chemically synthesized
  source 1..22: mol_type = other DNA
gccagggctgcaggtccaggac

SEQ ID NO: 126228 - DNA, 22 bp, synthetic construct
  misc_feature 1..22: note = chemically synthesized
  source 1..22: mol_type = other DNA
caggtccaggacctgggaggag

SEQ ID NO: 126229 - DNA, 22 bp, synthetic construct
  misc_feature 1..22: note = chemically synthesized
  source 1..22: mol_type = other DNA
ggaggagctgagcgctcagtgt

SEQ ID NO: 126230 - DNA, 22 bp, synthetic construct
  misc_feature 1..22: note = chemically synthesized
  source 1..22: mol_type = other DNA
agcgctcagtgtggctggtggc

SEQ ID NO: 126231 - DNA, 22 bp, synthetic construct
  misc_feature 1..22: note = chemically synthesized
  source 1..22: mol_type = other DNA
agtgtggctggtggcgtggagg

SEQ ID NO: 126232 - DNA, 22 bp, synthetic construct
  misc_feature 1..22: note = chemically synthesized
  source 1..22: mol_type = other DNA
gtggcgtggaggggcgggagga

SEQ ID NO: 126233 - DNA, 22 bp, synthetic construct
  misc_feature 1..22: note = chemically synthesized
  source 1..22: mol_type = other DNA
cgaccctactgttgatatgttg

SEQ ID NO: 126234 - DNA, 22 bp, synthetic construct
  misc_feature 1..22: note = chemically synthesized
  source 1..22: mol_type = other DNA
gaccctactgttgatatgttgt

SEQ ID NO: 126235 - DNA, 22 bp, synthetic construct
  misc_feature 1..22: note = chemically synthesized
  source 1..22: mol_type = other DNA
ctgttgatatgttgttcaggga

SEQ ID NO: 126236 - DNA, 22 bp, synthetic construct
  misc_feature 1..22: note = chemically synthesized
  source 1..22: mol_type = other DNA
ttgatatgttgttcagggacca

SEQ ID NO: 126237 - DNA, 22 bp, synthetic construct
  misc_feature 1..22: note = chemically synthesized
  source 1..22: mol_type = other DNA
atatgttgttcagggaccatcg

SEQ ID NO: 126238 - DNA, 22 bp, synthetic construct
  misc_feature 1..22: note = chemically synthesized
  source 1..22: mol_type = other DNA
ttcagggaccatcgggagccca

SEQ ID NO: 126239 - DNA, 22 bp, synthetic construct
  misc_feature 1..22: note = chemically synthesized
  source 1..22: mol_type = other DNA
agggaccatcgggagcccagag

SEQ ID NO: 126240 - DNA, 22 bp, synthetic construct
  misc_feature 1..22: note = chemically synthesized
  source 1..22: mol_type = other DNA
tgctctgtttcacgggactcca

SEQ ID NO: 126241 - DNA, 22 bp, synthetic construct
  misc_feature 1..22: note = chemically synthesized
  source 1..22: mol_type = other DNA
ctctgtttcacgggactccaca

SEQ ID NO: 126242 - DNA, 22 bp, synthetic construct
  misc_feature 1..22: note = chemically synthesized
  source 1..22: mol_type = other DNA
tgtttcacgggactccacaaag

SEQ ID NO: 126243 - DNA, 22 bp, synthetic construct
  misc_feature 1..22: note = chemically synthesized
  source 1..22: mol_type = other DNA
tttcacgggactccacaaagag

SEQ ID NO: 126244 - DNA, 22 bp, synthetic construct
  misc_feature 1..22: note = chemically synthesized
  source 1..22: mol_type = other DNA
cacgggactccacaaagagaac

SEQ ID NO: 126245 - DNA, 22 bp, synthetic construct
  misc_feature 1..22: note = chemically synthesized
  source 1..22: mol_type = other DNA
acgggactccacaaagagaact

SEQ ID NO: 126246 - DNA, 22 bp, synthetic construct
  misc_feature 1..22: note = chemically synthesized
  source 1..22: mol_type = other DNA
cacaaagagaactgcaagtccc

SEQ ID NO: 126247 - DNA, 22 bp, synthetic construct
  misc_feature 1..22: note = chemically synthesized
  source 1..22: mol_type = other DNA
caagtcccagtctttcacctct

SEQ ID NO: 126248 - DNA, 22 bp, synthetic construct
  misc_feature 1..22: note = chemically synthesized
  source 1..22: mol_type = other DNA
tcacctctcttggactttttat

SEQ ID NO: 126249 - DNA, 22 bp, synthetic construct
  misc_feature 1..22: note = chemically synthesized
  source 1..22: mol_type = other DNA
cacctctcttggactttttatc

SEQ ID NO: 126250 - DNA, 22 bp, synthetic construct
  misc_feature 1..22: note = chemically synthesized
  source 1..22: mol_type = other DNA
acctctcttggactttttatct

SEQ ID NO: 126251 - DNA, 22 bp, synthetic construct
  misc_feature 1..22: note = chemically synthesized
  source 1..22: mol_type = other DNA
tcttggactttttatcttgtct

SEQ ID NO: 126252 - DNA, 22 bp, synthetic construct
  misc_feature 1..22: note = chemically synthesized
  source 1..22: mol_type = other DNA
ttggactttttatcttgtctct

SEQ ID NO: 126253 - DNA, 22 bp, synthetic construct
  misc_feature 1..22: note = chemically synthesized
  source 1..22: mol_type = other DNA
ggactttttatcttgtctcttc

SEQ ID NO: 126254 - DNA, 22 bp, synthetic construct
  misc_feature 1..22: note = chemically synthesized
  source 1..22: mol_type = other DNA
gactttttatcttgtctcttca

SEQ ID NO: 126255 - DNA, 22 bp, synthetic construct
  misc_feature 1..22: note = chemically synthesized
  source 1..22: mol_type = other DNA
tttatcttgtctcttcatcaca

SEQ ID NO: 126256 - DNA, 22 bp, synthetic construct
  misc_feature 1..22: note = chemically synthesized
  source 1..22: mol_type = other DNA
ttatcttgtctcttcatcacat

SEQ ID NO: 126257 - DNA, 22 bp, synthetic construct
  misc_feature 1..22: note = chemically synthesized
  source 1..22: mol_type = other DNA
tatcttgtctcttcatcacatc

SEQ ID NO: 126258 - DNA, 22 bp, synthetic construct
  misc_feature 1..22: note = chemically synthesized
  source 1..22: mol_type = other DNA
atcttgtctcttcatcacatct

SEQ ID NO: 126259 - DNA, 22 bp, synthetic construct
  misc_feature 1..22: note = chemically synthesized
  source 1..22: mol_type = other DNA
tcttgtctcttcatcacatctc

SEQ ID NO: 126260 - DNA, 22 bp, synthetic construct
  misc_feature 1..22: note = chemically synthesized
  source 1..22: mol_type = other DNA
gtctcttcatcacatctcttca

SEQ ID NO: 126261 - DNA, 22 bp, synthetic construct
  misc_feature 1..22: note = chemically synthesized
  source 1..22: mol_type = other DNA
tctcttcatcacatctcttcag

SEQ ID NO: 126262 - DNA, 22 bp, synthetic construct
  misc_feature 1..22: note = chemically synthesized
  source 1..22: mol_type = other DNA
ttcatcacatctcttcagtata

SEQ ID NO: 126263 - DNA, 22 bp, synthetic construct
  misc_feature 1..22: note = chemically synthesized
  source 1..22: mol_type = other DNA
catcacatctcttcagtataag

SEQ ID NO: 126264 - DNA, 22 bp, synthetic construct
  misc_feature 1..22: note = chemically synthesized
  source 1..22: mol_type = other DNA
atcacatctcttcagtataagg

SEQ ID NO: 126265 - DNA, 22 bp, synthetic construct
  misc_feature 1..22: note = chemically synthesized
  source 1..22: mol_type = other DNA
ttcagtataaggaagaacagaa

SEQ ID NO: 126266 - DNA, 22 bp, synthetic construct
  misc_feature 1..22: note = chemically synthesized
  source 1..22: mol_type = other DNA
cagtataaggaagaacagaaag

SEQ ID NO: 126267 - DNA, 22 bp, synthetic construct
  misc_feature 1..22: note = chemically synthesized
  source 1..22: mol_type = other DNA
agtataaggaagaacagaaagg

SEQ ID NO: 126268 - DNA, 22 bp, synthetic construct
  misc_feature 1..22: note = chemically synthesized
  source 1..22: mol_type = other DNA
agggttgtcagtcaaatgtgtc

SEQ ID NO: 126269 - DNA, 22 bp, synthetic construct
  misc_feature 1..22: note = chemically synthesized
  source 1..22: mol_type = other DNA
tcagtcaaatgtgtccatttac

SEQ ID NO: 126270 - DNA, 22 bp, synthetic construct
  misc_feature 1..22: note = chemically synthesized
  source 1..22: mol_type = other DNA
acagaatttataaaatgtattg

SEQ ID NO: 126271 - DNA, 22 bp, synthetic construct
  misc_feature 1..22: note = chemically synthesized
  source 1..22: mol_type = other DNA
cagaatttataaaatgtattgt

SEQ ID NO: 126272 - DNA, 22 bp, synthetic construct
  misc_feature 1..22: note = chemically synthesized
  source 1..22: mol_type = other DNA
ataaaatgtattgttatcctag

SEQ ID NO: 126273 - DNA, 22 bp, synthetic construct
  misc_feature 1..22: note = chemically synthesized
  source 1..22: mol_type = other DNA
taaaatgtattgttatcctagt

SEQ ID NO: 126274 - DNA, 22 bp, synthetic construct
  misc_feature 1..22: note = chemically synthesized
  source 1..22: mol_type = other DNA
ttatcctagttatctttatact

SEQ ID NO: 126275 - DNA, 22 bp, synthetic construct
  misc_feature 1..22: note = chemically synthesized
  source 1..22: mol_type = other DNA
tcctagttatctttatactagc

SEQ ID NO: 126276 - DNA, 22 bp, synthetic construct
  misc_feature 1..22: note = chemically synthesized
  source 1..22: mol_type = other DNA
gttatctttatactagcctgct

SEQ ID NO: 126277 - DNA, 22 bp, synthetic construct
  misc_feature 1..22: note = chemically synthesized
  source 1..22: mol_type = other DNA
tctttatactagcctgctatgg

SEQ ID NO: 126278 - DNA, 22 bp, synthetic construct
  misc_feature 1..22: note = chemically synthesized
  source 1..22: mol_type = other DNA
tatactagcctgctatggcagg

SEQ ID NO: 126279 - DNA, 22 bp, synthetic construct
  misc_feature 1..22: note = chemically synthesized
  source 1..22: mol_type = other DNA
atactagcctgctatggcaggt

SEQ ID NO: 126280 - DNA, 22 bp, synthetic construct
  misc_feature 1..22: note = chemically synthesized
  source 1..22: mol_type = other DNA
tactagcctgctatggcaggtt

SEQ ID NO: 126281 - DNA, 22 bp, synthetic construct
  misc_feature 1..22: note = chemically synthesized
  source 1..22: mol_type = other DNA
gcctgctatggcaggtttcagg

SEQ ID NO: 126282 - DNA, 22 bp, synthetic construct
  misc_feature 1..22: note = chemically synthesized
  source 1..22: mol_type = other DNA
ctatggcaggtttcaggatcac

SEQ ID NO: 126283 - DNA, 22 bp, synthetic construct
  misc_feature 1..22: note = chemically synthesized
  source 1..22: mol_type = other DNA
tggcaggtttcaggatcactgg

SEQ ID NO: 126284 - DNA, 22 bp, synthetic construct
  misc_feature 1..22: note = chemically synthesized
  source 1..22: mol_type = other DNA
caggatcactggacctagaggg

SEQ ID NO: 126285 - DNA, 22 bp, synthetic construct
  misc_feature 1..22: note = chemically synthesized
  source 1..22: mol_type = other DNA
aggatcactggacctagagggt

SEQ ID NO: 126286 - DNA, 22 bp, synthetic construct
  misc_feature 1..22: note = chemically synthesized
  source 1..22: mol_type = other DNA
gacctagagggtgagtcaagaa

SEQ ID NO: 126287 - DNA, 22 bp, synthetic construct
  misc_feature 1..22: note = chemically synthesized
  source 1..22: mol_type = other DNA
gagggtgagtcaagaaagattt

SEQ ID NO: 126288 - DNA, 22 bp, synthetic construct
  misc_feature 1..22: note = chemically synthesized
  source 1..22: mol_type = other DNA
tctttgatgtggcttagatccc

SEQ ID NO: 126289 - DNA, 22 bp, synthetic construct
  misc_feature 1..22: note = chemically synthesized
  source 1..22: mol_type = other DNA
ctttgatgtggcttagatcccc

SEQ ID NO: 126290 - DNA, 22 bp, synthetic construct
  misc_feature 1..22: note = chemically synthesized
  source 1..22: mol_type = other DNA
tttgatgtggcttagatccccc

SEQ ID NO: 126291 - DNA, 22 bp, synthetic construct
  misc_feature 1..22: note = chemically synthesized
  source 1..22: mol_type = other DNA
tgatgtggcttagatccccctg

SEQ ID NO: 126292 - DNA, 22 bp, synthetic construct
  misc_feature 1..22: note = chemically synthesized
  source 1..22: mol_type = other DNA
gatgtggcttagatccccctga

SEQ ID NO: 126293 - DNA, 22 bp, synthetic construct
  misc_feature 1..22: note = chemically synthesized
  source 1..22: mol_type = other DNA
atgtggcttagatccccctgaa

SEQ ID NO: 126294 - DNA, 22 bp, synthetic construct
  misc_feature 1..22: note = chemically synthesized
  source 1..22: mol_type = other DNA
agatccccctgaattcattccc

SEQ ID NO: 126295 - DNA, 22 bp, synthetic construct
  misc_feature 1..22: note = chemically synthesized
  source 1..22: mol_type = other DNA
gatccccctgaattcattccca

SEQ ID NO: 126296 - DNA, 22 bp, synthetic construct
  misc_feature 1..22: note = chemically synthesized
  source 1..22: mol_type = other DNA
aattcattcccaaaagcccaag

SEQ ID NO: 126297 - DNA, 22 bp, synthetic construct
  misc_feature 1..22: note = chemically synthesized
  source 1..22: mol_type = other DNA
attcccaaaagcccaagggaag

SEQ ID NO: 126298 - DNA, 22 bp, synthetic construct
  misc_feature 1..22: note = chemically synthesized
  source 1..22: mol_type = other DNA
ccaaaagcccaagggaagaaag

SEQ ID NO: 126299 - DNA, 22 bp, synthetic construct
  misc_feature 1..22: note = chemically synthesized
  source 1..22: mol_type = other DNA
agtatacattgcccatatcttg

SEQ ID NO: 126300 - DNA, 22 bp, synthetic construct
  misc_feature 1..22: note = chemically synthesized
  source 1..22: mol_type = other DNA
cccatatcttggaagacaatac

SEQ ID NO: 126301 - DNA, 22 bp, synthetic construct
  misc_feature 1..22: note = chemically synthesized
  source 1..22: mol_type = other DNA
ggaagacaatacagagagcagt

SEQ ID NO: 126302 - DNA, 22 bp, synthetic construct
  misc_feature 1..22: note = chemically synthesized
  source 1..22: mol_type = other DNA
gaagacaatacagagagcagta

SEQ ID NO: 126303 - DNA, 22 bp, synthetic construct
  misc_feature 1..22: note = chemically synthesized
  source 1..22: mol_type = other DNA
gcagacacacagaaagacatgg

SEQ ID NO: 126304 - DNA, 22 bp, synthetic construct
  misc_feature 1..22: note = chemically synthesized
  source 1..22: mol_type = other DNA
taaattttatttattcatttta

SEQ ID NO: 126305 - DNA, 22 bp, synthetic construct
  misc_feature 1..22: note = chemically synthesized
  source 1..22: mol_type = other DNA
aaattttatttattcattttaa

SEQ ID NO: 126306 - DNA, 22 bp, synthetic construct
  misc_feature 1..22: note = chemically synthesized
  source 1..22: mol_type = other DNA
aattttatttattcattttaat

SEQ ID NO: 126307 - DNA, 22 bp, synthetic construct
  misc_feature 1..22: note = chemically synthesized
  source 1..22: mol_type = other DNA
tatttattcattttaatgaaaa

SEQ ID NO: 126308 - DNA, 22 bp, synthetic construct
  misc_feature 1..22: note = chemically synthesized
  source 1..22: mol_type = other DNA
atttattcattttaatgaaaaa

SEQ ID NO: 126309 - DNA, 22 bp, synthetic construct
  misc_feature 1..22: note = chemically synthesized
  source 1..22: mol_type = other DNA
tttattcattttaatgaaaaat

SEQ ID NO: 126310 - DNA, 22 bp, synthetic construct
  misc_feature 1..22: note = chemically synthesized
  source 1..22: mol_type = other DNA
attcattttaatgaaaaattat

SEQ ID NO: 126311 - DNA, 22 bp, synthetic construct
  misc_feature 1..22: note = chemically synthesized
  source 1..22: mol_type = other DNA
ttcattttaatgaaaaattata

SEQ ID NO: 126312 - DNA, 22 bp, synthetic construct
  misc_feature 1..22: note = chemically synthesized
  source 1..22: mol_type = other DNA
attttaatgaaaaattatattt

SEQ ID NO: 126313 - DNA, 22 bp, synthetic construct
  misc_feature 1..22: note = chemically synthesized
  source 1..22: mol_type = other DNA
taatgaaaaattatattttgtt

SEQ ID NO: 126314 - DNA, 22 bp, synthetic construct
  misc_feature 1..22: note = chemically synthesized
  source 1..22: mol_type = other DNA
aatgaaaaattatattttgtta

SEQ ID NO: 126315 - DNA, 22 bp, synthetic construct
  misc_feature 1..22: note = chemically synthesized
  source 1..22: mol_type = other DNA
atgaaaaattatattttgttaa

SEQ ID NO: 126316 - DNA, 22 bp, synthetic construct
  misc_feature 1..22: note = chemically synthesized
  source 1..22: mol_type = other DNA
tattttgttaaaaatggtctat

SEQ ID NO: 126317 - DNA, 22 bp, synthetic construct
  misc_feature 1..22: note = chemically synthesized
  source 1..22: mol_type = other DNA
tgttaaaaatggtctatgtgag

SEQ ID NO: 126318 - DNA, 22 bp, synthetic construct
  misc_feature 1..22: note = chemically synthesized
  source 1..22: mol_type = other DNA
gttaaaaatggtctatgtgaga

SEQ ID NO: 126319 - DNA, 22 bp, synthetic construct
  misc_feature 1..22: note = chemically synthesized
  source 1..22: mol_type = other DNA
ttaaaaatggtctatgtgagaa

SEQ ID NO: 126320 - DNA, 22 bp, synthetic construct
  misc_feature 1..22: note = chemically synthesized
  source 1..22: mol_type = other DNA
aaaatggtctatgtgagaagtt

SEQ ID NO: 126321 - DNA, 22 bp, synthetic construct
  misc_feature 1..22: note = chemically synthesized
  source 1..22: mol_type = other DNA
tgtgagaagttctgtaatacag

SEQ ID NO: 126322 - DNA, 22 bp, synthetic construct
  misc_feature 1..22: note = chemically synthesized
  source 1..22: mol_type = other DNA
tgtaatacagtagggaataaga

SEQ ID NO: 126323 - DNA, 22 bp, synthetic construct
  misc_feature 1..22: note = chemically synthesized
  source 1..22: mol_type = other DNA
taatacagtagggaataagaac

SEQ ID NO: 126324 - DNA, 22 bp, synthetic construct
  misc_feature 1..22: note = chemically synthesized
  source 1..22: mol_type = other DNA
tgttatatttaccatcctcgag

SEQ ID NO: 126325 - DNA, 22 bp, synthetic construct
  misc_feature 1..22: note = chemically synthesized
  source 1..22: mol_type = other DNA
tatttaccatcctcgagcacac

SEQ ID NO: 126326 - DNA, 22 bp, synthetic construct
  misc_feature 1..22: note = chemically synthesized
  source 1..22: mol_type = other DNA
accatcctcgagcacacagtca

SEQ ID NO: 126327 - DNA, 22 bp, synthetic construct
  misc_feature 1..22: note = chemically synthesized
  source 1..22: mol_type = other DNA
ccatcctcgagcacacagtcaa

SEQ ID NO: 126328 - DNA, 22 bp, synthetic construct
  misc_feature 1..22: note = chemically synthesized
  source 1..22: mol_type = other DNA
gagcacacagtcaagaagctac

SEQ ID NO: 126329 - DNA, 22 bp, synthetic construct
  misc_feature 1..22: note = chemically synthesized
  source 1..22: mol_type = other DNA
caaaagagaaaggcaaatttca

SEQ ID NO: 126330 - DNA, 22 bp, synthetic construct
  misc_feature 1..22: note = chemically synthesized
  source 1..22: mol_type = other DNA
cacacacagccaagttgagtaa

SEQ ID NO: 126331 - DNA, 22 bp, synthetic construct
  misc_feature 1..22: note = chemically synthesized
  source 1..22: mol_type = other DNA
acacacagccaagttgagtaaa

SEQ ID NO: 126332 - DNA, 22 bp, synthetic construct
  misc_feature 1..22: note = chemically synthesized
  source 1..22: mol_type = other DNA
agtaaaacaaacaaaatctttt

SEQ ID NO: 126333 - DNA, 22 bp, synthetic construct
  misc_feature 1..22: note = chemically synthesized
  source 1..22: mol_type = other DNA
ttggtctaatcagataaagatc

SEQ ID NO: 126334 - DNA, 22 bp, synthetic construct
  misc_feature 1..22: note = chemically synthesized
  source 1..22: mol_type = other DNA
tggtctaatcagataaagatca

SEQ ID NO: 126335 - DNA, 22 bp, synthetic construct
  misc_feature 1..22: note = chemically synthesized
  source 1..22: mol_type = other DNA
ggtctaatcagataaagatcat

SEQ ID NO: 126336 - DNA, 22 bp, synthetic construct
  misc_feature 1..22: note = chemically synthesized
  source 1..22: mol_type = other DNA
gtctaatcagataaagatcatt

SEQ ID NO: 126337 - DNA, 22 bp, synthetic construct
  misc_feature 1..22: note = chemically synthesized
  source 1..22: mol_type = other DNA
atcagataaagatcatttacta

SEQ ID NO: 126338 - DNA, 22 bp, synthetic construct
  misc_feature 1..22: note = chemically synthesized
  source 1..22: mol_type = other DNA
actagcctggaaactattgtga

SEQ ID NO: 126339 - DNA, 22 bp, synthetic construct
  misc_feature 1..22: note = chemically synthesized
  source 1..22: mol_type = other DNA
ctagcctggaaactattgtgaa

SEQ ID NO: 126340 - DNA, 22 bp, synthetic construct
  misc_feature 1..22: note = chemically synthesized
  source 1..22: mol_type = other DNA
gcctggaaactattgtgaaggt

SEQ ID NO: 126341 - DNA, 22 bp, synthetic construct
  misc_feature 1..22: note = chemically synthesized
  source 1..22: mol_type = other DNA
gaaactattgtgaaggtattat

SEQ ID NO: 126342 - DNA, 22 bp, synthetic construct
  misc_feature 1..22: note = chemically synthesized
  source 1..22: mol_type = other DNA
ttgtgaaggtattattttattt

SEQ ID NO: 126343 - DNA, 22 bp, synthetic construct
  misc_feature 1..22: note = chemically synthesized
  source 1..22: mol_type = other DNA
tgaaggtattattttatttttg

SEQ ID NO: 126344 - DNA, 22 bp, synthetic construct
  misc_feature 1..22: note = chemically synthesized
  source 1..22: mol_type = other DNA
ttttatttttgttttctctgtg

SEQ ID NO: 126345 - DNA, 22 bp, synthetic construct
  misc_feature 1..22: note = chemically synthesized
  source 1..22: mol_type = other DNA
tatttttgttttctctgtgtta

SEQ ID NO: 126346 - DNA, 22 bp, synthetic construct
  misc_feature 1..22: note = chemically synthesized
  source 1..22: mol_type = other DNA
atttttgttttctctgtgttat

SEQ ID NO: 126347 - DNA, 22 bp, synthetic construct
  misc_feature 1..22: note = chemically synthesized
  source 1..22: mol_type = other DNA
tttttgttttctctgtgttatt

SEQ ID NO: 126348 - DNA, 22 bp, synthetic construct
  misc_feature 1..22: note = chemically synthesized
  source 1..22: mol_type = other DNA
ttgttttctctgtgttatttat

SEQ ID NO: 126349 - DNA, 22 bp, synthetic construct
  misc_feature 1..22: note = chemically synthesized
  source 1..22: mol_type = other DNA
tgttttctctgtgttatttata

SEQ ID NO: 126350 - DNA, 22 bp, synthetic construct
  misc_feature 1..22: note = chemically synthesized
  source 1..22: mol_type = other DNA
gttttctctgtgttatttatac

SEQ ID NO: 126351 - DNA, 22 bp, synthetic construct
  misc_feature 1..22: note = chemically synthesized
  source 1..22: mol_type = other DNA
ttttctctgtgttatttataca

SEQ ID NO: 126352 - DNA, 22 bp, synthetic construct
  misc_feature 1..22: note = chemically synthesized
  source 1..22: mol_type = other DNA
tctctgtgttatttatacatcc

SEQ ID NO: 126353 - DNA, 22 bp, synthetic construct
  misc_feature 1..22: note = chemically synthesized
  source 1..22: mol_type = other DNA
ctctgtgttatttatacatccc

SEQ ID NO: 126354 - DNA, 22 bp, synthetic construct
  misc_feature 1..22: note = chemically synthesized
  source 1..22: mol_type = other DNA
tctgtgttatttatacatccca

SEQ ID NO: 126355 - DNA, 22 bp, synthetic construct
  misc_feature 1..22: note = chemically synthesized
  source 1..22: mol_type = other DNA
tgtgttatttatacatcccaag

SEQ ID NO: 126356 - DNA, 22 bp, synthetic construct
  misc_feature 1..22: note = chemically synthesized
  source 1..22: mol_type = other DNA
tgttatttatacatcccaagaa

SEQ ID NO: 126357 - DNA, 22 bp, synthetic construct
  misc_feature 1..22: note = chemically synthesized
  source 1..22: mol_type = other DNA
tttatacatcccaagaatccta

SEQ ID NO: 126358 - DNA, 22 bp, synthetic construct
  misc_feature 1..22: note = chemically synthesized
  source 1..22: mol_type = other DNA
atacatcccaagaatcctaaaa

SEQ ID NO: 126359 - DNA, 22 bp, synthetic construct
  misc_feature 1..22: note = chemically synthesized
  source 1..22: mol_type = other DNA
tacatcccaagaatcctaaaaa

SEQ ID NO: 126360 - DNA, 22 bp, synthetic construct
  misc_feature 1..22: note = chemically synthesized
  source 1..22: mol_type = other DNA
aaaaatccccacctttctgtga

SEQ ID NO: 126361 - DNA, 22 bp, synthetic construct
  misc_feature 1..22: note = chemically synthesized
  source 1..22: mol_type = other DNA
tctgtgatgaagagtaggtggg

SEQ ID NO: 126362 - DNA, 22 bp, synthetic construct
  misc_feature 1..22: note = chemically synthesized
  source 1..22: mol_type = other DNA
ctgtgatgaagagtaggtgggc

SEQ ID NO: 126363 - DNA, 22 bp, synthetic construct
  misc_feature 1..22: note = chemically synthesized
  source 1..22: mol_type = other DNA
tgtgatgaagagtaggtgggca

SEQ ID NO: 126364 - DNA, 22 bp, synthetic construct
  misc_feature 1..22: note = chemically synthesized
  source 1..22: mol_type = other DNA
tgatgaagagtaggtgggcagc

SEQ ID NO: 126365 - DNA, 22 bp, synthetic construct
  misc_feature 1..22: note = chemically synthesized
  source 1..22: mol_type = other DNA
agtgtcagtatgacagaggcca

SEQ ID NO: 126366 - DNA, 22 bp, synthetic construct
  misc_feature 1..22: note = chemically synthesized
  source 1..22: mol_type = other DNA
actggtcactgggtggcccctt

SEQ ID NO: 126367 - DNA, 22 bp, synthetic construct
  misc_feature 1..22: note = chemically synthesized
  source 1..22: mol_type = other DNA
gtcactgggtggccccttgtgt

SEQ ID NO: 126368 - DNA, 22 bp, synthetic construct
  misc_feature 1..22: note = chemically synthesized
  source 1..22: mol_type = other DNA
ggtggccccttgtgtagtccaa

SEQ ID NO: 126369 - DNA, 22 bp, synthetic construct
  misc_feature 1..22: note = chemically synthesized
  source 1..22: mol_type = other DNA
gtgtagtccaagcacatcatac

SEQ ID NO: 126370 - DNA, 22 bp, synthetic construct
  misc_feature 1..22: note = chemically synthesized
  source 1..22: mol_type = other DNA
tgtagtccaagcacatcatacc

SEQ ID NO: 126371 - DNA, 22 bp, synthetic construct
  misc_feature 1..22: note = chemically synthesized
  source 1..22: mol_type = other DNA
tattttggtcaaaagaatatct

SEQ ID NO: 126372 - DNA, 22 bp, synthetic construct
  misc_feature 1..22: note = chemically synthesized
  source 1..22: mol_type = other DNA
tggtcaaaagaatatctttctt

SEQ ID NO: 126373 - DNA, 22 bp, synthetic construct
  misc_feature 1..22: note = chemically synthesized
  source 1..22: mol_type = other DNA
ggtcaaaagaatatctttcttt

SEQ ID NO: 126374 - DNA, 22 bp, synthetic construct
  misc_feature 1..22: note = chemically synthesized
  source 1..22: mol_type = other DNA
gtcaaaagaatatctttctttt

SEQ ID NO: 126375 - DNA, 22 bp, synthetic construct
  misc_feature 1..22: note = chemically synthesized
  source 1..22: mol_type = other DNA
tcttttaaaattaatttaaaac

SEQ ID NO: 126376 - DNA, 22 bp, synthetic construct
  misc_feature 1..22: note = chemically synthesized
  source 1..22: mol_type = other DNA
cttttaaaattaatttaaaact

SEQ ID NO: 126377 - DNA, 22 bp, synthetic construct
  misc_feature 1..22: note = chemically synthesized
  source 1..22: mol_type = other DNA
ttttaaaattaatttaaaactt

SEQ ID NO: 126378 - DNA, 22 bp, synthetic construct
  misc_feature 1..22: note = chemically synthesized
  source 1..22: mol_type = other DNA
ttaaaattaatttaaaacttat

SEQ ID NO: 126379 - DNA, 22 bp, synthetic construct
  misc_feature 1..22: note = chemically synthesized
  source 1..22: mol_type = other DNA
taaaattaatttaaaacttatc

SEQ ID NO: 126380 - DNA, 22 bp, synthetic construct
  misc_feature 1..22: note = chemically synthesized
  source 1..22: mol_type = other DNA
aaaattaatttaaaacttatca

SEQ ID NO: 126381 - DNA, 22 bp, synthetic construct
  misc_feature 1..22: note = chemically synthesized
  source 1..22: mol_type = other DNA
aaattaatttaaaacttatcat

SEQ ID NO: 126382 - DNA, 22 bp, synthetic construct
  misc_feature 1..22: note = chemically synthesized
  source 1..22: mol_type = other DNA
atttaaaacttatcatttgagt

SEQ ID NO: 126383 - DNA, 22 bp, synthetic construct
  misc_feature 1..22: note = chemically synthesized
  source 1..22: mol_type = other DNA
aaaacttatcatttgagtcatg

SEQ ID NO: 126384 - DNA, 22 bp, synthetic construct
  misc_feature 1..22: note = chemically synthesized
  source 1..22: mol_type = other DNA
aaacttatcatttgagtcatgg

SEQ ID NO: 126385 - DNA, 22 bp, synthetic construct
  misc_feature 1..22: note = chemically synthesized
  source 1..22: mol_type = other DNA
atcatttgagtcatggatactg

SEQ ID NO: 126386 - DNA, 22 bp, synthetic construct
  misc_feature 1..22: note = chemically synthesized
  source 1..22: mol_type = other DNA
tcatttgagtcatggatactgg

SEQ ID NO: 126387 - DNA, 22 bp, synthetic construct
  misc_feature 1..22: note = chemically synthesized
  source 1..22: mol_type = other DNA
gagtcatggatactggctcttc

SEQ ID NO: 126388 - DNA, 22 bp, synthetic construct
  misc_feature 1..22: note = chemically synthesized
  source 1..22: mol_type = other DNA
agtcatggatactggctcttca

SEQ ID NO: 126389 - DNA, 22 bp, synthetic construct
  misc_feature 1..22: note = chemically synthesized
  source 1..22: mol_type = other DNA
gctcttcacctggccataggac

SEQ ID NO: 126390 - DNA, 22 bp, synthetic construct
  misc_feature 1..22: note = chemically synthesized
  source 1..22: mol_type = other DNA
ttcacctggccataggaccaca

SEQ ID NO: 126391 - DNA, 22 bp, synthetic construct
  misc_feature 1..22: note = chemically synthesized
  source 1..22: mol_type = other DNA
cacctggccataggaccacaaa

SEQ ID NO: 126392 - DNA, 22 bp, synthetic construct
  misc_feature 1..22: note = chemically synthesized
  source 1..22: mol_type = other DNA
acctggccataggaccacaaac

SEQ ID NO: 126393 - DNA, 22 bp, synthetic construct
  misc_feature 1..22: note = chemically synthesized
  source 1..22: mol_type = other DNA
gccataggaccacaaaccccct

SEQ ID NO: 126394 - DNA, 22 bp, synthetic construct
  misc_feature 1..22: note = chemically synthesized
  source 1..22: mol_type = other DNA
ttctcatgcctagactctgaaa

SEQ ID NO: 126395 - DNA, 22 bp, synthetic construct
  misc_feature 1..22: note = chemically synthesized
  source 1..22: mol_type = other DNA
ctcatgcctagactctgaaaag

SEQ ID NO: 126396 - DNA, 22 bp, synthetic construct
  misc_feature 1..22: note = chemically synthesized
  source 1..22: mol_type = other DNA
tcatgcctagactctgaaaaga

SEQ ID NO: 126397 - DNA, 22 bp, synthetic construct
  misc_feature 1..22: note = chemically synthesized
  source 1..22: mol_type = other DNA
atgcctagactctgaaaagaat

SEQ ID NO: 126398 - DNA, 22 bp, synthetic construct
  misc_feature 1..22: note = chemically synthesized
  source 1..22: mol_type = other DNA
gactctgaaaagaatcaaaagt

SEQ ID NO: 126399 - DNA, 22 bp, synthetic construct
  misc_feature 1..22: note = chemically synthesized
  source 1..22: mol_type = other DNA
tgaaaagaatcaaaagtatttg

SEQ ID NO: 126400 - DNA, 22 bp, synthetic construct
  misc_feature 1..22: note = chemically synthesized
  source 1..22: mol_type = other DNA
aaaagaatcaaaagtatttgga

SEQ ID NO: 126401 - DNA, 22 bp, synthetic construct
  misc_feature 1..22: note = chemically synthesized
  source 1..22: mol_type = other DNA
ggagccagaaaaggccatttta

SEQ ID NO: 126402 - DNA, 22 bp, synthetic construct
  misc_feature 1..22: note = chemically synthesized
  source 1..22: mol_type = other DNA
gagccagaaaaggccattttat

SEQ ID NO: 126403 - DNA, 22 bp, synthetic construct
  misc_feature 1..22: note = chemically synthesized
  source 1..22: mol_type = other DNA
tatcttctagttatgagcattg

SEQ ID NO: 126404 - DNA, 22 bp, synthetic construct
  misc_feature 1..22: note = chemically synthesized
  source 1..22: mol_type = other DNA
atcttctagttatgagcattgc

SEQ ID NO: 126405 - DNA, 22 bp, synthetic construct
  misc_feature 1..22: note = chemically synthesized
  source 1..22: mol_type = other DNA
tcttctagttatgagcattgcc

SEQ ID NO: 126406 - DNA, 22 bp, synthetic construct
  misc_feature 1..22: note = chemically synthesized
  source 1..22: mol_type = other DNA
ctagttatgagcattgcctcca

SEQ ID NO: 126407 - DNA, 22 bp, synthetic construct
  misc_feature 1..22: note = chemically synthesized
  source 1..22: mol_type = other DNA
tagttatgagcattgcctccat

SEQ ID NO: 126408 - DNA, 22 bp, synthetic construct
  misc_feature 1..22: note = chemically synthesized
  source 1..22: mol_type = other DNA
gttatgagcattgcctccatcc

SEQ ID NO: 126409 - DNA, 22 bp, synthetic construct
  misc_feature 1..22: note = chemically synthesized
  source 1..22: mol_type = other DNA
tgagcattgcctccatcctctc

SEQ ID NO: 126410 - DNA, 22 bp, synthetic construct
  misc_feature 1..22: note = chemically synthesized
  source 1..22: mol_type = other DNA
cctccatcctctcccttcctcc

SEQ ID NO: 126411 - DNA, 22 bp, synthetic construct
  misc_feature 1..22: note = chemically synthesized
  source 1..22: mol_type = other DNA
catcctctcccttcctccccac

SEQ ID NO: 126412 - DNA, 22 bp, synthetic construct
  misc_feature 1..22: note = chemically synthesized
  source 1..22: mol_type = other DNA
tcccttcctccccactctccac

SEQ ID NO: 126413 - DNA, 22 bp, synthetic construct
  misc_feature 1..22: note = chemically synthesized
  source 1..22: mol_type = other DNA
ccttcctccccactctccacat

SEQ ID NO: 126414 - DNA, 22 bp, synthetic construct
  misc_feature 1..22: note = chemically synthesized
  source 1..22: mol_type = other DNA
cctccccactctccacatatga

SEQ ID NO: 126415 - DNA, 22 bp, synthetic construct
  misc_feature 1..22: note = chemically synthesized
  source 1..22: mol_type = other DNA
ctccccactctccacatatgac

SEQ ID NO: 126416 - DNA, 22 bp, synthetic construct
  misc_feature 1..22: note = chemically synthesized
  source 1..22: mol_type = other DNA
cccactctccacatatgaccaa

SEQ ID NO: 126417 - DNA, 22 bp, synthetic construct
  misc_feature 1..22: note = chemically synthesized
  source 1..22: mol_type = other DNA
tccacatatgaccaactgtttg

SEQ ID NO: 126418 - DNA, 22 bp, synthetic construct
  misc_feature 1..22: note = chemically synthesized
  source 1..22: mol_type = other DNA
cacatatgaccaactgtttgtt

SEQ ID NO: 126419 - DNA, 22 bp, synthetic construct
  misc_feature 1..22: note = chemically synthesized
  source 1..22: mol_type = other DNA
tttgtttttcaactctgctatt

SEQ ID NO: 126420 - DNA, 22 bp, synthetic construct
  misc_feature 1..22: note = chemically synthesized
  source 1..22: mol_type = other DNA
gtttttcaactctgctattttg

SEQ ID NO: 126421 - DNA, 22 bp, synthetic construct
  misc_feature 1..22: note = chemically synthesized
  source 1..22: mol_type = other DNA
tttttcaactctgctattttgc

SEQ ID NO: 126422 - DNA, 22 bp, synthetic construct
  misc_feature 1..22: note = chemically synthesized
  source 1..22: mol_type = other DNA
ttcaactctgctattttgcaca

SEQ ID NO: 126423 - DNA, 22 bp, synthetic construct
  misc_feature 1..22: note = chemically synthesized
  source 1..22: mol_type = other DNA
tcaactctgctattttgcacat

SEQ ID NO: 126424 - DNA, 22 bp, synthetic construct
  misc_feature 1..22: note = chemically synthesized
  source 1..22: mol_type = other DNA
caactctgctattttgcacatg

SEQ ID NO: 126425 - DNA, 22 bp, synthetic construct
  misc_feature 1..22: note = chemically synthesized
  source 1..22: mol_type = other DNA
aactctgctattttgcacatgc

SEQ ID NO: 126426 - DNA, 22 bp, synthetic construct
  misc_feature 1..22: note = chemically synthesized
  source 1..22: mol_type = other DNA
tgctattttgcacatgccagac

SEQ ID NO: 126427 - DNA, 22 bp, synthetic construct
  misc_feature 1..22: note = chemically synthesized
  source 1..22: mol_type = other DNA
ctattttgcacatgccagacac

SEQ ID NO: 126428 - DNA, 22 bp, synthetic construct
  misc_feature 1..22: note = chemically synthesized
  source 1..22: mol_type = other DNA
ttttgcacatgccagacacccc

SEQ ID NO: 126429 - DNA, 22 bp, synthetic construct
  misc_feature 1..22: note = chemically synthesized
  source 1..22: mol_type = other DNA
tgcacatgccagacacccctat

SEQ ID NO: 126430 - DNA, 22 bp, synthetic construct
  misc_feature 1..22: note = chemically synthesized
  source 1..22: mol_type = other DNA
gcacatgccagacacccctatc

SEQ ID NO: 126431 - DNA, 22 bp, synthetic construct
  misc_feature 1..22: note = chemically synthesized
  source 1..22: mol_type = other DNA
cacatgccagacacccctatct

SEQ ID NO: 126432 - DNA, 22 bp, synthetic construct
  misc_feature 1..22: note = chemically synthesized
  source 1..22: mol_type = other DNA
tctagtcttatctctgatgttc

SEQ ID NO: 126433 - DNA, 22 bp, synthetic construct
  misc_feature 1..22: note = chemically synthesized
  source 1..22: mol_type = other DNA
gtcttatctctgatgttcccct

SEQ ID NO: 126434 - DNA, 22 bp, synthetic construct
  misc_feature 1..22: note = chemically synthesized
  source 1..22: mol_type = other DNA
atctctgatgttcccctaaacc

SEQ ID NO: 126435 - DNA, 22 bp, synthetic construct
  misc_feature 1..22: note = chemically synthesized
  source 1..22: mol_type = other DNA
tctctgatgttcccctaaacca

SEQ ID NO: 126436 - DNA, 22 bp, synthetic construct
  misc_feature 1..22: note = chemically synthesized
  source 1..22: mol_type = other DNA
tgatgttcccctaaaccagacc

SEQ ID NO: 126437 - DNA, 22 bp, synthetic construct
  misc_feature 1..22: note = chemically synthesized
  source 1..22: mol_type = other DNA
atgttcccctaaaccagacctc

SEQ ID NO: 126438 - DNA, 22 bp, synthetic construct
  misc_feature 1..22: note = chemically synthesized
  source 1..22: mol_type = other DNA
ccctaaaccagacctctcatac

SEQ ID NO: 126439 - DNA, 22 bp, synthetic construct
  misc_feature 1..22: note = chemically synthesized
  source 1..22: mol_type = other DNA
aaccagacctctcataccactt

SEQ ID NO: 126440 - DNA, 22 bp, synthetic construct
  misc_feature 1..22: note = chemically synthesized
  source 1..22: mol_type = other DNA
tcataccactttatgaaaatgc

SEQ ID NO: 126441 - DNA, 22 bp, synthetic construct
  misc_feature 1..22: note = chemically synthesized
  source 1..22: mol_type = other DNA
ataccactttatgaaaatgcat

SEQ ID NO: 126442 - DNA, 22 bp, synthetic construct
  misc_feature 1..22: note = chemically synthesized
  source 1..22: mol_type = other DNA
tatgaaaatgcatctctctgtt

SEQ ID NO: 126443 - DNA, 22 bp, synthetic construct
  misc_feature 1..22: note = chemically synthesized
  source 1..22: mol_type = other DNA
atgaaaatgcatctctctgttc

SEQ ID NO: 126444 - DNA, 22 bp, synthetic construct
  misc_feature 1..22: note = chemically synthesized
  source 1..22: mol_type = other DNA
tgaaaatgcatctctctgttca

SEQ ID NO: 126445 - DNA, 22 bp, synthetic construct
  misc_feature 1..22: note = chemically synthesized
  source 1..22: mol_type = other DNA
tctgttcagtagtaactggaat

SEQ ID NO: 126446 - DNA, 22 bp, synthetic construct
  misc_feature 1..22: note = chemically synthesized
  source 1..22: mol_type = other DNA
tgttcagtagtaactggaatta

SEQ ID NO: 126447 - DNA, 22 bp, synthetic construct
  misc_feature 1..22: note = chemically synthesized
  source 1..22: mol_type = other DNA
ttcagtagtaactggaattaac

SEQ ID NO: 126448 - DNA, 22 bp, synthetic construct
  misc_feature 1..22: note = chemically synthesized
  source 1..22: mol_type = other DNA
agtagtaactggaattaactat

SEQ ID NO: 126449 - DNA, 22 bp, synthetic construct
  misc_feature 1..22: note = chemically synthesized
  source 1..22: mol_type = other DNA
gaattaactatcaagacaatgg

SEQ ID NO: 126450 - DNA, 22 bp, synthetic construct
  misc_feature 1..22: note = chemically synthesized
  source 1..22: mol_type = other DNA
actatcaagacaatggtcatct

SEQ ID NO: 126451 - DNA, 22 bp, synthetic construct
  misc_feature 1..22: note = chemically synthesized
  source 1..22: mol_type = other DNA
tcaagacaatggtcatctgaat

SEQ ID NO: 126452 - DNA, 22 bp, synthetic construct
  misc_feature 1..22: note = chemically synthesized
  source 1..22: mol_type = other DNA
aattagaaattatatctctgtt

SEQ ID NO: 126453 - DNA, 22 bp, synthetic construct
  misc_feature 1..22: note = chemically synthesized
  source 1..22: mol_type = other DNA
gaaattatatctctgttttcaa

SEQ ID NO: 126454 - DNA, 22 bp, synthetic construct
  misc_feature 1..22: note = chemically synthesized
  source 1..22: mol_type = other DNA
tatctctgttttcaaattatta

SEQ ID NO: 126455 - DNA, 22 bp, synthetic construct
  misc_feature 1..22: note = chemically synthesized
  source 1..22: mol_type = other DNA
tgttttcaaattattatcaata

SEQ ID NO: 126456 - DNA, 22 bp, synthetic construct
  misc_feature 1..22: note = chemically synthesized
  source 1..22: mol_type = other DNA
ttttcaaattattatcaatatt

SEQ ID NO: 126457 - DNA, 22 bp, synthetic construct
  misc_feature 1..22: note = chemically synthesized
  source 1..22: mol_type = other DNA
tcaaattattatcaatattatt

SEQ ID NO: 126458 - DNA, 22 bp, synthetic construct
  misc_feature 1..22: note = chemically synthesized
  source 1..22: mol_type = other DNA
caaattattatcaatattattt

SEQ ID NO: 126459 - DNA, 22 bp, synthetic construct
  misc_feature 1..22: note = chemically synthesized
  source 1..22: mol_type = other DNA
aaattattatcaatattatttg

SEQ ID NO: 126460 - DNA, 22 bp, synthetic construct
  misc_feature 1..22: note = chemically synthesized
  source 1..22: mol_type = other DNA
ttatcaatattatttgataaat

SEQ ID NO: 126461 - DNA, 22 bp, synthetic construct
  misc_feature 1..22: note = chemically synthesized
  source 1..22: mol_type = other DNA
tcaatattatttgataaatgtt

SEQ ID NO: 126462 - DNA, 22 bp, synthetic construct
  misc_feature 1..22: note = chemically synthesized
  source 1..22: mol_type = other DNA
tttgataaatgttaaccaaagt

SEQ ID NO: 126463 - DNA, 22 bp, synthetic construct
  misc_feature 1..22: note = chemically synthesized
  source 1..22: mol_type = other DNA
gataaatgttaaccaaagtttt

SEQ ID NO: 126464 - DNA, 22 bp, synthetic construct
  misc_feature 1..22: note = chemically synthesized
  source 1..22: mol_type = other DNA
ataaatgttaaccaaagtttta

SEQ ID NO: 126465 - DNA, 22 bp, synthetic construct
  misc_feature 1..22: note = chemically synthesized
  source 1..22: mol_type = other DNA
accaaagttttaactgaacaca

SEQ ID NO: 126466 - DNA, 22 bp, synthetic construct
  misc_feature 1..22: note = chemically synthesized
  source 1..22: mol_type = other DNA
taactgaacacatttctcatag

SEQ ID NO: 126467 - DNA, 22 bp, synthetic construct
  misc_feature 1..22: note = chemically synthesized
  source 1..22: mol_type = other DNA
aactgaacacatttctcataga

SEQ ID NO: 126468 - DNA, 22 bp, synthetic construct
  misc_feature 1..22: note = chemically synthesized
  source 1..22: mol_type = other DNA
actgaacacatttctcatagag

SEQ ID NO: 126469 - DNA, 22 bp, synthetic construct
  misc_feature 1..22: note = chemically synthesized
  source 1..22: mol_type = other DNA
aacacatttctcatagagatac

SEQ ID NO: 126470 - DNA, 22 bp, synthetic construct
  misc_feature 1..22: note = chemically synthesized
  source 1..22: mol_type = other DNA
ctcatagagatactttccctag

SEQ ID NO: 126471 - DNA, 22 bp, synthetic construct
  misc_feature 1..22: note = chemically synthesized
  source 1..22: mol_type = other DNA
tcatagagatactttccctaga

SEQ ID NO: 126472 - DNA, 22 bp, synthetic construct
  misc_feature 1..22: note = chemically synthesized
  source 1..22: mol_type = other DNA
atagagatactttccctagact

SEQ ID NO: 126473 - DNA, 22 bp, synthetic construct
  misc_feature 1..22: note = chemically synthesized
  source 1..22: mol_type = other DNA
tccctagactcatcattttgaa

SEQ ID NO: 126474 - DNA, 22 bp, synthetic construct
  misc_feature 1..22: note = chemically synthesized
  source 1..22: mol_type = other DNA
ccctagactcatcattttgaat

SEQ ID NO: 126475 - DNA, 22 bp, synthetic construct
  misc_feature 1..22: note = chemically synthesized
  source 1..22: mol_type = other DNA
cctagactcatcattttgaatt

SEQ ID NO: 126476 - DNA, 22 bp, synthetic construct
  misc_feature 1..22: note = chemically synthesized
  source 1..22: mol_type = other DNA
gactcatcattttgaattgagg

SEQ ID NO: 126477 - DNA, 22 bp, synthetic construct
  misc_feature 1..22: note = chemically synthesized
  source 1..22: mol_type = other DNA
atcattttgaattgagggaaat

SEQ ID NO: 126478 - DNA, 22 bp, synthetic construct
  misc_feature 1..22: note = chemically synthesized
  source 1..22: mol_type = other DNA
tgaattgagggaaatggtttac

SEQ ID NO: 126479 - DNA, 22 bp, synthetic construct
  misc_feature 1..22: note = chemically synthesized
  source 1..22: mol_type = other DNA
gaattgagggaaatggtttacc

SEQ ID NO: 126480 - DNA, 22 bp, synthetic construct
  misc_feature 1..22: note = chemically synthesized
  source 1..22: mol_type = other DNA
aattgagggaaatggtttaccc

SEQ ID NO: 126481 - DNA, 22 bp, synthetic construct
  misc_feature 1..22: note = chemically synthesized
  source 1..22: mol_type = other DNA
agggaaatggtttaccctcatt

SEQ ID NO: 126482 - DNA, 22 bp, synthetic construct
  misc_feature 1..22: note = chemically synthesized
  source 1..22: mol_type = other DNA
accctcattgaagaaagtaatt

SEQ ID NO: 126483 - DNA, 22 bp, synthetic construct
  misc_feature 1..22: note = chemically synthesized
  source 1..22: mol_type = other DNA
ccctcattgaagaaagtaattg

SEQ ID NO: 126484 - DNA, 22 bp, synthetic construct
  misc_feature 1..22: note = chemically synthesized
  source 1..22: mol_type = other DNA
attgaagaaagtaattgaggga

SEQ ID NO: 126485 - DNA, 22 bp, synthetic construct
  misc_feature 1..22: note = chemically synthesized
  source 1..22: mol_type = other DNA
aagaaagtaattgagggaaatg

SEQ ID NO: 126486 - DNA, 22 bp, synthetic construct
  misc_feature 1..22: note = chemically synthesized
  source 1..22: mol_type = other DNA
agggaaatggcttactctcatt

SEQ ID NO: 126487 - DNA, 22 bp, synthetic construct
  misc_feature 1..22: note = chemically synthesized
  source 1..22: mol_type = other DNA
actctcattgaagaaagtctca

SEQ ID NO: 126488 - DNA, 22 bp, synthetic construct
  misc_feature 1..22: note = chemically synthesized
  source 1..22: mol_type = other DNA
ctctcattgaagaaagtctcat

SEQ ID NO: 126489 - DNA, 22 bp, synthetic construct
  misc_feature 1..22: note = chemically synthesized
  source 1..22: mol_type = other DNA
tcattgaagaaagtctcatttc

SEQ ID NO: 126490 - DNA, 22 bp, synthetic construct
  misc_feature 1..22: note = chemically synthesized
  source 1..22: mol_type = other DNA
attgaagaaagtctcatttctt

SEQ ID NO: 126491 - DNA, 22 bp, synthetic construct
  misc_feature 1..22: note = chemically synthesized
  source 1..22: mol_type = other DNA
aagaaagtctcatttcttcacg

SEQ ID NO: 126492 - DNA, 22 bp, synthetic construct
  misc_feature 1..22: note = chemically synthesized
  source 1..22: mol_type = other DNA
atttcttcacgtgcaattttct

SEQ ID NO: 126493 - DNA, 22 bp, synthetic construct
  misc_feature 1..22: note = chemically synthesized
  source 1..22: mol_type = other DNA
cttcacgtgcaattttctagaa

SEQ ID NO: 126494 - DNA, 22 bp, synthetic construct
  misc_feature 1..22: note = chemically synthesized
  source 1..22: mol_type = other DNA
ttcacgtgcaattttctagaaa

SEQ ID NO: 126495 - DNA, 22 bp, synthetic construct
  misc_feature 1..22: note = chemically synthesized
  source 1..22: mol_type = other DNA
cacgtgcaattttctagaaaca

SEQ ID NO: 126496 - DNA, 22 bp, synthetic construct
  misc_feature 1..22: note = chemically synthesized
  source 1..22: mol_type = other DNA
acgtgcaattttctagaaacag

SEQ ID NO: 126497 - DNA, 22 bp, synthetic construct
  misc_feature 1..22: note = chemically synthesized
  source 1..22: mol_type = other DNA
tctagaaacagcagccagctcc

SEQ ID NO: 126498 - DNA, 22 bp, synthetic construct
  misc_feature 1..22: note = chemically synthesized
  source 1..22: mol_type = other DNA
ctagaaacagcagccagctcca

SEQ ID NO: 126499 - DNA, 22 bp, synthetic construct
  misc_feature 1..22: note = chemically synthesized
  source 1..22: mol_type = other DNA
tagaaacagcagccagctccat

SEQ ID NO: 126500 - DNA, 22 bp, synthetic construct
  misc_feature 1..22: note = chemically synthesized
  source 1..22: mol_type = other DNA
gaaacagcagccagctccatat

SEQ ID NO: 126501 - DNA, 22 bp, synthetic construct
  misc_feature 1..22: note = chemically synthesized
  source 1..22: mol_type = other DNA
catatatgcaagagaactggat

SEQ ID NO: 126502 - DNA, 22 bp, synthetic construct
  misc_feature 1..22: note = chemically synthesized
  source 1..22: mol_type = other DNA
gatgtatgtctgaagccaaaaa

SEQ ID NO: 126503 - DNA, 22 bp, synthetic construct
  misc_feature 1..22: note = chemically synthesized
  source 1..22: mol_type = other DNA
aagccaaaaatgccttattcct

SEQ ID NO: 126504 - DNA, 22 bp, synthetic construct
  misc_feature 1..22: note = chemically synthesized
  source 1..22: mol_type = other DNA
attcctatgtataacaggacta

SEQ ID NO: 126505 - DNA, 22 bp, synthetic construct
  misc_feature 1..22: note = chemically synthesized
  source 1..22: mol_type = other DNA
ttcctatgtataacaggactaa

SEQ ID NO: 126506 - DNA, 22 bp, synthetic construct
  misc_feature 1..22: note = chemically synthesized
  source 1..22: mol_type = other DNA
ctatgtataacaggactaatat

SEQ ID NO: 126507 - DNA, 22 bp, synthetic construct
  misc_feature 1..22: note = chemically synthesized
  source 1..22: mol_type = other DNA
tgtataacaggactaatatatg

SEQ ID NO: 126508 - DNA, 22 bp, synthetic construct
  misc_feature 1..22: note = chemically synthesized
  source 1..22: mol_type = other DNA
atatatgcaagccatatggaga

SEQ ID NO: 126509 - DNA, 22 bp, synthetic construct
  misc_feature 1..22: note = chemically synthesized
  source 1..22: mol_type = other DNA
actgaaatgccggtgacccaaa

SEQ ID NO: 126510 - DNA, 22 bp, synthetic construct
  misc_feature 1..22: note = chemically synthesized
  source 1..22: mol_type = other DNA
aaatgccggtgacccaaatcat

SEQ ID NO: 126511 - DNA, 22 bp, synthetic construct
  misc_feature 1..22: note = chemically synthesized
  source 1..22: mol_type = other DNA
tatatataattggttcatatat

SEQ ID NO: 126512 - DNA, 22 bp, synthetic construct
  misc_feature 1..22: note = chemically synthesized
  source 1..22: mol_type = other DNA
gttcatatatatatattattta

SEQ ID NO: 126513 - DNA, 22 bp, synthetic construct
  misc_feature 1..22: note = chemically synthesized
  source 1..22: mol_type = other DNA
atatatatatattatttatata

SEQ ID NO: 126514 - DNA, 22 bp, synthetic construct
  misc_feature 1..22: note = chemically synthesized
  source 1..22: mol_type = other DNA
tttatataatatatataaacac

SEQ ID NO: 126515 - DNA, 22 bp, synthetic construct
  misc_feature 1..22: note = chemically synthesized
  source 1..22: mol_type = other DNA
atataatatatataaacacaca

SEQ ID NO: 126516 - DNA, 22 bp, synthetic construct
  misc_feature 1..22: note = chemically synthesized
  source 1..22: mol_type = other DNA
tataatatatataaacacacac

SEQ ID NO: 126517 - DNA, 22 bp, synthetic construct
  misc_feature 1..22: note = chemically synthesized
  source 1..22: mol_type = other DNA
ttatatattaagtatatataat

SEQ ID NO: 126518 - DNA, 22 bp, synthetic construct
  misc_feature 1..22: note = chemically synthesized
  source 1..22: mol_type = other DNA
tatattaagtatatataatagt

SEQ ID NO: 126519 - DNA, 22 bp, synthetic construct
  misc_feature 1..22: note = chemically synthesized
  source 1..22: mol_type = other DNA
agtatatataatagtgtgtatt

SEQ ID NO: 126520 - DNA, 22 bp, synthetic construct
  misc_feature 1..22: note = chemically synthesized
  source 1..22: mol_type = other DNA
tatatattaaatatatataata

SEQ ID NO: 126521 - DNA, 22 bp, synthetic construct
  misc_feature 1..22: note = chemically synthesized
  source 1..22: mol_type = other DNA
aatatatataatagtgtatggg

SEQ ID NO: 126522 - DNA, 22 bp, synthetic construct
  misc_feature 1..22: note = chemically synthesized
  source 1..22: mol_type = other DNA
tgtgtgtatatgtatgtgtgta

SEQ ID NO: 126523 - DNA, 22 bp, synthetic construct
  misc_feature 1..22: note = chemically synthesized
  source 1..22: mol_type = other DNA
atcaaacaatgtgagttaaatt

SEQ ID NO: 126524 - DNA, 22 bp, synthetic construct
  misc_feature 1..22: note = chemically synthesized
  source 1..22: mol_type = other DNA
aattacctgagaaaacaatatc

SEQ ID NO: 126525 - DNA, 22 bp, synthetic construct
  misc_feature 1..22: note = chemically synthesized
  source 1..22: mol_type = other DNA
cctgagaaaacaatatcagttg

SEQ ID NO: 126526 - DNA, 22 bp, synthetic construct
  misc_feature 1..22: note = chemically synthesized
  source 1..22: mol_type = other DNA
agaaaacaatatcagttgagca

SEQ ID NO: 126527 - DNA, 22 bp, synthetic construct
  misc_feature 1..22: note = chemically synthesized
  source 1..22: mol_type = other DNA
agcactgagatatgtacttagt

SEQ ID NO: 126528 - DNA, 22 bp, synthetic construct
  misc_feature 1..22: note = chemically synthesized
  source 1..22: mol_type = other DNA
agatatgtacttagtgttgtac

SEQ ID NO: 126529 - DNA, 22 bp, synthetic construct
  misc_feature 1..22: note = chemically synthesized
  source 1..22: mol_type = other DNA
agtgttgtacatatatcttata

SEQ ID NO: 126530 - DNA, 22 bp, synthetic construct
  misc_feature 1..22: note = chemically synthesized
  source 1..22: mol_type = other DNA
gtgttgtacatatatcttatac

SEQ ID NO: 126531 - DNA, 22 bp, synthetic construct
  misc_feature 1..22: note = chemically synthesized
  source 1..22: mol_type = other DNA
tacatatatcttatacaaatca

SEQ ID NO: 126532 - DNA, 22 bp, synthetic construct
  misc_feature 1..22: note = chemically synthesized
  source 1..22: mol_type = other DNA
atacaaatcagcaatagacagg

SEQ ID NO: 126533 - DNA, 22 bp, synthetic construct
  misc_feature 1..22: note = chemically synthesized
  source 1..22: mol_type = other DNA
tacaaatcagcaatagacaggc

SEQ ID NO: 126534 - DNA, 22 bp, synthetic construct
  misc_feature 1..22: note = chemically synthesized
  source 1..22: mol_type = other DNA
taagtagcagagggattgactg

SEQ ID NO: 126535 - DNA, 22 bp, synthetic construct
  misc_feature 1..22: note = chemically synthesized
  source 1..22: mol_type = other DNA
agtagcagagggattgactgat

SEQ ID NO: 126536 - DNA, 22 bp, synthetic construct
  misc_feature 1..22: note = chemically synthesized
  source 1..22: mol_type = other DNA
actgatttccactgaaatgctc

SEQ ID NO: 126537 - DNA, 22 bp, synthetic construct
  misc_feature 1..22: note = chemically synthesized
  source 1..22: mol_type = other DNA
atttccactgaaatgctcaggg

SEQ ID NO: 126538 - DNA, 22 bp, synthetic construct
  misc_feature 1..22: note = chemically synthesized
  source 1..22: mol_type = other DNA
ccactgaaatgctcagggattg

SEQ ID NO: 126539 - DNA, 22 bp, synthetic construct
  misc_feature 1..22: note = chemically synthesized
  source 1..22: mol_type = other DNA
cactgaaatgctcagggattga

SEQ ID NO: 126540 - DNA, 22 bp, synthetic construct
  misc_feature 1..22: note = chemically synthesized
  source 1..22: mol_type = other DNA
aaatgctcagggattgattagt

SEQ ID NO: 126541 - DNA, 22 bp, synthetic construct
  misc_feature 1..22: note = chemically synthesized
  source 1..22: mol_type = other DNA
agggattgattagttctcattg

SEQ ID NO: 126542 - DNA, 22 bp, synthetic construct
  misc_feature 1..22: note = chemically synthesized
  source 1..22: mol_type = other DNA
attagttctcattgaaatgact

SEQ ID NO: 126543 - DNA, 22 bp, synthetic construct
  misc_feature 1..22: note = chemically synthesized
  source 1..22: mol_type = other DNA
gttctcattgaaatgactttcc

SEQ ID NO: 126544 - DNA, 22 bp, synthetic construct
  misc_feature 1..22: note = chemically synthesized
  source 1..22: mol_type = other DNA
tcattgaaatgactttccctag

SEQ ID NO: 126545 - DNA, 22 bp, synthetic construct
  misc_feature 1..22: note = chemically synthesized
  source 1..22: mol_type = other DNA
attgaaatgactttccctagtt

SEQ ID NO: 126546 - DNA, 22 bp, synthetic construct
  misc_feature 1..22: note = chemically synthesized
  source 1..22: mol_type = other DNA
aaatgactttccctagttactt

SEQ ID NO: 126547 - DNA, 22 bp, synthetic construct
  misc_feature 1..22: note = chemically synthesized
  source 1..22: mol_type = other DNA
tccctagttacttatgctggca

SEQ ID NO: 126548 - DNA, 22 bp, synthetic construct
  misc_feature 1..22: note = chemically synthesized
  source 1..22: mol_type = other DNA
ccctagttacttatgctggcaa

SEQ ID NO: 126549 - DNA, 22 bp, synthetic construct
  misc_feature 1..22: note = chemically synthesized
  source 1..22: mol_type = other DNA
cctagttacttatgctggcaac

SEQ ID NO: 126550 - DNA, 22 bp, synthetic construct
  misc_feature 1..22: note = chemically synthesized
  source 1..22: mol_type = other DNA
gttacttatgctggcaacattg

SEQ ID NO: 126551 - DNA, 22 bp, synthetic construct
  misc_feature 1..22: note = chemically synthesized
  source 1..22: mol_type = other DNA
cttatgctggcaacattgtcat

SEQ ID NO: 126552 - DNA, 22 bp, synthetic construct
  misc_feature 1..22: note = chemically synthesized
  source 1..22: mol_type = other DNA
atgctggcaacattgtcatcct

SEQ ID NO: 126553 - DNA, 22 bp, synthetic construct
  misc_feature 1..22: note = chemically synthesized
  source 1..22: mol_type = other DNA
tgctggcaacattgtcatcctg

SEQ ID NO: 126554 - DNA, 22 bp, synthetic construct
  misc_feature 1..22: note = chemically synthesized
  source 1..22: mol_type = other DNA
gcaacattgtcatcctgtccag

SEQ ID NO: 126555 - DNA, 22 bp, synthetic construct
  misc_feature 1..22: note = chemically synthesized
  source 1..22: mol_type = other DNA
tcatcctgtccaggtcccctga

SEQ ID NO: 126556 - DNA, 22 bp, synthetic construct
  misc_feature 1..22: note = chemically synthesized
  source 1..22: mol_type = other DNA
tccaggtcccctgaattattcc

SEQ ID NO: 126557 - DNA, 22 bp, synthetic construct
  misc_feature 1..22: note = chemically synthesized
  source 1..22: mol_type = other DNA
aattattcctcagagaccagtg

SEQ ID NO: 126558 - DNA, 22 bp, synthetic construct
  misc_feature 1..22: note = chemically synthesized
  source 1..22: mol_type = other DNA
ttcctcagagaccagtgaaaca

SEQ ID NO: 126559 - DNA, 22 bp, synthetic construct
  misc_feature 1..22: note = chemically synthesized
  source 1..22: mol_type = other DNA
ctcagagaccagtgaaacaatg

SEQ ID NO: 126560 - DNA, 22 bp, synthetic construct
  misc_feature 1..22: note = chemically synthesized
  source 1..22: mol_type = other DNA
agagaccagtgaaacaatgtca

SEQ ID NO: 126561 - DNA, 22 bp, synthetic construct
  misc_feature 1..22: note = chemically synthesized
  source 1..22: mol_type = other DNA
tagagtgaggcagagagaataa

SEQ ID NO: 126562 - DNA, 22 bp, synthetic construct
  misc_feature 1..22: note = chemically synthesized
  source 1..22: mol_type = other DNA
gagtgaggcagagagaataaac

SEQ ID NO: 126563 - DNA, 22 bp, synthetic construct
  misc_feature 1..22: note = chemically synthesized
  source 1..22: mol_type = other DNA
tgaatctgcttagttttaatgc

SEQ ID NO: 126564 - DNA, 22 bp, synthetic construct
  misc_feature 1..22: note = chemically synthesized
  source 1..22: mol_type = other DNA
aatctgcttagttttaatgcta

SEQ ID NO: 126565 - DNA, 22 bp, synthetic construct
  misc_feature 1..22: note = chemically synthesized
  source 1..22: mol_type = other DNA
cttagttttaatgctatagata

SEQ ID NO: 126566 - DNA, 22 bp, synthetic construct
  misc_feature 1..22: note = chemically synthesized
  source 1..22: mol_type = other DNA
agttttaatgctatagataaat

SEQ ID NO: 126567 - DNA, 22 bp, synthetic construct
  misc_feature 1..22: note = chemically synthesized
  source 1..22: mol_type = other DNA
gttttaatgctatagataaatg

SEQ ID NO: 126568 - DNA, 22 bp, synthetic construct
  misc_feature 1..22: note = chemically synthesized
  source 1..22: mol_type = other DNA
taatgctatagataaatgggtt

SEQ ID NO: 126569 - DNA, 22 bp, synthetic construct
  misc_feature 1..22: note = chemically synthesized
  source 1..22: mol_type = other DNA
aatgctatagataaatgggttc

SEQ ID NO: 126570 - DNA, 22 bp, synthetic construct
  misc_feature 1..22: note = chemically synthesized
  source 1..22: mol_type = other DNA
atgctatagataaatgggttca

SEQ ID NO: 126571 - DNA, 22 bp, synthetic construct
  misc_feature 1..22: note = chemically synthesized
  source 1..22: mol_type = other DNA
tagataaatgggttcataaaag

SEQ ID NO: 126572 - DNA, 22 bp, synthetic construct
  misc_feature 1..22: note = chemically synthesized
  source 1..22: mol_type = other DNA
ataaaaggtgggaaaaggaagt

SEQ ID NO: 126573 - DNA, 22 bp, synthetic construct
  misc_feature 1..22: note = chemically synthesized
  source 1..22: mol_type = other DNA
attgtgatgtgaacgacatgag

SEQ ID NO: 126574 - DNA, 22 bp, synthetic construct
  misc_feature 1..22: note = chemically synthesized
  source 1..22: mol_type = other DNA
tgatgtgaacgacatgaggaac

SEQ ID NO: 126575 - DNA, 22 bp, synthetic construct
  misc_feature 1..22: note = chemically synthesized
  source 1..22: mol_type = other DNA
tccaaacctatgaataaatgtc

SEQ ID NO: 126576 - DNA, 22 bp, synthetic construct
  misc_feature 1..22: note = chemically synthesized
  source 1..22: mol_type = other DNA
ccaaacctatgaataaatgtca

SEQ ID NO: 126577 - DNA, 22 bp, synthetic construct
  misc_feature 1..22: note = chemically synthesized
  source 1..22: mol_type = other DNA
caaacctatgaataaatgtcag

SEQ ID NO: 126578 - DNA, 22 bp, synthetic construct
  misc_feature 1..22: note = chemically synthesized
  source 1..22: mol_type = other DNA
tgaataaatgtcagacaaacta

SEQ ID NO: 126579 - DNA, 22 bp, synthetic construct
  misc_feature 1..22: note = chemically synthesized
  source 1..22: mol_type = other DNA
cagtgacatagaagaccaggat

SEQ ID NO: 126580 - DNA, 22 bp, synthetic construct
  misc_feature 1..22: note = chemically synthesized
  source 1..22: mol_type = other DNA
agggccttggccctttctcctc

SEQ ID NO: 126581 - DNA, 22 bp, synthetic construct
  misc_feature 1..22: note = chemically synthesized
  source 1..22: mol_type = other DNA
ggccctttctcctccagaacca

SEQ ID NO: 126582 - DNA, 22 bp, synthetic construct
  misc_feature 1..22: note = chemically synthesized
  source 1..22: mol_type = other DNA
gccctttctcctccagaaccaa

SEQ ID NO: 126583 - DNA, 22 bp, synthetic construct
  misc_feature 1..22: note = chemically synthesized
  source 1..22: mol_type = other DNA
tctcctccagaaccaatgccca

SEQ ID NO: 126584 - DNA, 22 bp, synthetic construct
  misc_feature 1..22: note = chemically synthesized
  source 1..22: mol_type = other DNA
ctcctccagaaccaatgcccat

SEQ ID NO: 126585 - DNA, 22 bp, synthetic construct
  misc_feature 1..22: note = chemically synthesized
  source 1..22: mol_type = other DNA
tcctccagaaccaatgcccatg

SEQ ID NO: 126586 - DNA, 22 bp, synthetic construct
  misc_feature 1..22: note = chemically synthesized
  source 1..22: mol_type = other DNA
ctccagaaccaatgcccatgac

SEQ ID NO: 126587 - DNA, 22 bp, synthetic construct
  misc_feature 1..22: note = chemically synthesized
  source 1..22: mol_type = other DNA
cagaaccaatgcccatgacagt

SEQ ID NO: 126588 - DNA, 22 bp, synthetic construct
  misc_feature 1..22: note = chemically synthesized
  source 1..22: mol_type = other DNA
gagaatcaaaatgtaggagaaa

SEQ ID NO: 126589 - DNA, 22 bp, synthetic construct
  misc_feature 1..22: note = chemically synthesized
  source 1..22: mol_type = other DNA
agaatcaaaatgtaggagaaaa

SEQ ID NO: 126590 - DNA, 22 bp, synthetic construct
  misc_feature 1..22: note = chemically synthesized
  source 1..22: mol_type = other DNA
caaataaaactacaactggata

SEQ ID NO: 126591 - DNA, 22 bp, synthetic construct
  misc_feature 1..22: note = chemically synthesized
  source 1..22: mol_type = other DNA
caactggatagagacggttgaa

SEQ ID NO: 126592 - DNA, 22 bp, synthetic construct
  misc_feature 1..22: note = chemically synthesized
  source 1..22: mol_type = other DNA
gatagagacggttgaaggtgat

SEQ ID NO: 126593 - DNA, 22 bp, synthetic construct
  misc_feature 1..22: note = chemically synthesized
  source 1..22: mol_type = other DNA
aaggtgatgtcagcacaggcta

SEQ ID NO: 126594 - DNA, 22 bp, synthetic construct
  misc_feature 1..22: note = chemically synthesized
  source 1..22: mol_type = other DNA
gcttgatgacatcttggtgtag

SEQ ID NO: 126595 - DNA, 22 bp, synthetic construct
  misc_feature 1..22: note = chemically synthesized
  source 1..22: mol_type = other DNA
gatgacatcttggtgtagacag

SEQ ID NO: 126596 - DNA, 22 bp, synthetic construct
  misc_feature 1..22: note = chemically synthesized
  source 1..22: mol_type = other DNA
atgacatcttggtgtagacaga

SEQ ID NO: 126597 - DNA, 22 bp, synthetic construct
  misc_feature 1..22: note = chemically synthesized
  source 1..22: mol_type = other DNA
ggtgtagacagaaagcatggga

SEQ ID NO: 126598 - DNA, 22 bp, synthetic construct
  misc_feature 1..22: note = chemically synthesized
  source 1..22: mol_type = other DNA
gtgtagacagaaagcatgggag

SEQ ID NO: 126599 - DNA, 22 bp, synthetic construct
  misc_feature 1..22: note = chemically synthesized
  source 1..22: mol_type = other DNA
ttggcataatggacagaccagc

SEQ ID NO: 126600 - DNA, 22 bp, synthetic construct
  misc_feature 1..22: note = chemically synthesized
  source 1..22: mol_type = other DNA
gcataatggacagaccagccct

SEQ ID NO: 126601 - DNA, 22 bp, synthetic construct
  misc_feature 1..22: note = chemically synthesized
  source 1..22: mol_type = other DNA
gtcaatacccgcacaccaatct

SEQ ID NO: 126602 - DNA, 22 bp, synthetic construct
  misc_feature 1..22: note = chemically synthesized
  source 1..22: mol_type = other DNA
tcaatacccgcacaccaatctt

SEQ ID NO: 126603 - DNA, 22 bp, synthetic construct
  misc_feature 1..22: note = chemically synthesized
  source 1..22: mol_type = other DNA
cattacctgggtgttggtcagg

SEQ ID NO: 126604 - DNA, 22 bp, synthetic construct
  misc_feature 1..22: note = chemically synthesized
  source 1..22: mol_type = other DNA
attacctgggtgttggtcagga

SEQ ID NO: 126605 - DNA, 22 bp, synthetic construct
  misc_feature 1..22: note = chemically synthesized
  source 1..22: mol_type = other DNA
cctgggtgttggtcaggataga

SEQ ID NO: 126606 - DNA, 22 bp, synthetic construct
  misc_feature 1..22: note = chemically synthesized
  source 1..22: mol_type = other DNA
ggtgttggtcaggatagaggta

SEQ ID NO: 126607 - DNA, 22 bp, synthetic construct
  misc_feature 1..22: note = chemically synthesized
  source 1..22: mol_type = other DNA
gtcaggatagaggtatatctta

SEQ ID NO: 126608 - DNA, 22 bp, synthetic construct
  misc_feature 1..22: note = chemically synthesized
  source 1..22: mol_type = other DNA
aaggggctgcggatggtaatga

SEQ ID NO: 126609 - DNA, 22 bp, synthetic construct
  misc_feature 1..22: note = chemically synthesized
  source 1..22: mol_type = other DNA
aggggctgcggatggtaatgaa

SEQ ID NO: 126610 - DNA, 22 bp, synthetic construct
  misc_feature 1..22: note = chemically synthesized
  source 1..22: mol_type = other DNA
cggatggtaatgaaacagtcat

SEQ ID NO: 126611 - DNA, 22 bp, synthetic construct
  misc_feature 1..22: note = chemically synthesized
  source 1..22: mol_type = other DNA
actccatgacagaaagagtatg

SEQ ID NO: 126612 - DNA, 22 bp, synthetic construct
  misc_feature 1..22: note = chemically synthesized
  source 1..22: mol_type = other DNA
catgacagaaagagtatggata

SEQ ID NO: 126613 - DNA, 22 bp, synthetic construct
  misc_feature 1..22: note = chemically synthesized
  source 1..22: mol_type = other DNA
agagaagcaggctccatggcca

SEQ ID NO: 126614 - DNA, 22 bp, synthetic construct
  misc_feature 1..22: note = chemically synthesized
  source 1..22: mol_type = other DNA
catggccaatctccctgtgatc

SEQ ID NO: 126615 - DNA, 22 bp, synthetic construct
  misc_feature 1..22: note = chemically synthesized
  source 1..22: mol_type = other DNA
cctgtgatctaaccacagaaca

SEQ ID NO: 126616 - DNA, 22 bp, synthetic construct
  misc_feature 1..22: note = chemically synthesized
  source 1..22: mol_type = other DNA
tgatctaaccacagaacaccta

SEQ ID NO: 126617 - DNA, 22 bp, synthetic construct
  misc_feature 1..22: note = chemically synthesized
  source 1..22: mol_type = other DNA
accacagaacacctagcactgt

SEQ ID NO: 126618 - DNA, 22 bp, synthetic construct
  misc_feature 1..22: note = chemically synthesized
  source 1..22: mol_type = other DNA
gcactgtgggcattgtggtcaa

SEQ ID NO: 126619 - DNA, 22 bp, synthetic construct
  misc_feature 1..22: note = chemically synthesized
  source 1..22: mol_type = other DNA
tgggcattgtggtcaatgtcac

SEQ ID NO: 126620 - DNA, 22 bp, synthetic construct
  misc_feature 1..22: note = chemically synthesized
  source 1..22: mol_type = other DNA
tggtcaatgtcactccgaggtc

SEQ ID NO: 126621 - DNA, 22 bp, synthetic construct
  misc_feature 1..22: note = chemically synthesized
  source 1..22: mol_type = other DNA
cgaggtctgtagctgccaacat

SEQ ID NO: 126622 - DNA, 22 bp, synthetic construct
  misc_feature 1..22: note = chemically synthesized
  source 1..22: mol_type = other DNA
tagctgccaacatagctaagaa

SEQ ID NO: 126623 - DNA, 22 bp, synthetic construct
  misc_feature 1..22: note = chemically synthesized
  source 1..22: mol_type = other DNA
ccaacatagctaagaaatagta

SEQ ID NO: 126624 - DNA, 22 bp, synthetic construct
  misc_feature 1..22: note = chemically synthesized
  source 1..22: mol_type = other DNA
agaaatagtacatgggctcatg

SEQ ID NO: 126625 - DNA, 22 bp, synthetic construct
  misc_feature 1..22: note = chemically synthesized
  source 1..22: mol_type = other DNA
atggaggttatgatcattcctg

SEQ ID NO: 126626 - DNA, 22 bp, synthetic construct
  misc_feature 1..22: note = chemically synthesized
  source 1..22: mol_type = other DNA
tgatcattcctgatgagaaaga

SEQ ID NO: 126627 - DNA, 22 bp, synthetic construct
  misc_feature 1..22: note = chemically synthesized
  source 1..22: mol_type = other DNA
ctgatgagaaagagaagagtgc

SEQ ID NO: 126628 - DNA, 22 bp, synthetic construct
  misc_feature 1..22: note = chemically synthesized
  source 1..22: mol_type = other DNA
atgagaaagagaagagtgccat

SEQ ID NO: 126629 - DNA, 22 bp, synthetic construct
  misc_feature 1..22: note = chemically synthesized
  source 1..22: mol_type = other DNA
ccaagaagtatggagatgtagg

SEQ ID NO: 126630 - DNA, 22 bp, synthetic construct
  misc_feature 1..22: note = chemically synthesized
  source 1..22: mol_type = other DNA
ccaataatgggatgaatatcca

SEQ ID NO: 126631 - DNA, 22 bp, synthetic construct
  misc_feature 1..22: note = chemically synthesized
  source 1..22: mol_type = other DNA
ctccatgcctgggaagccagta

SEQ ID NO: 126632 - DNA, 22 bp, synthetic construct
  misc_feature 1..22: note = chemically synthesized
  source 1..22: mol_type = other DNA
tccatgcctgggaagccagtaa

SEQ ID NO: 126633 - DNA, 22 bp, synthetic construct
  misc_feature 1..22: note = chemically synthesized
  source 1..22: mol_type = other DNA
catgcctgggaagccagtaagc

SEQ ID NO: 126634 - DNA, 22 bp, synthetic construct
  misc_feature 1..22: note = chemically synthesized
  source 1..22: mol_type = other DNA
ggaagccagtaagctggaaggt

SEQ ID NO: 126635 - DNA, 22 bp, synthetic construct
  misc_feature 1..22: note = chemically synthesized
  source 1..22: mol_type = other DNA
gaaggtggaagcagacttattg

SEQ ID NO: 126636 - DNA, 22 bp, synthetic construct
  misc_feature 1..22: note = chemically synthesized
  source 1..22: mol_type = other DNA
attgagccccattgccagcttt

SEQ ID NO: 126637 - DNA, 22 bp, synthetic construct
  misc_feature 1..22: note = chemically synthesized
  source 1..22: mol_type = other DNA
ttgagccccattgccagctttg

SEQ ID NO: 126638 - DNA, 22 bp, synthetic construct
  misc_feature 1..22: note = chemically synthesized
  source 1..22: mol_type = other DNA
agccccattgccagctttgcaa

SEQ ID NO: 126639 - DNA, 22 bp, synthetic construct
  misc_feature 1..22: note = chemically synthesized
  source 1..22: mol_type = other DNA
ccagctttgcaaagaggcaaat

SEQ ID NO: 126640 - DNA, 22 bp, synthetic construct
  misc_feature 1..22: note = chemically synthesized
  source 1..22: mol_type = other DNA
tgcaaagaggcaaatatttact

SEQ ID NO: 126641 - DNA, 22 bp, synthetic construct
  misc_feature 1..22: note = chemically synthesized
  source 1..22: mol_type = other DNA
gcaaagaggcaaatatttactc

SEQ ID NO: 126642 - DNA, 22 bp, synthetic construct
  misc_feature 1..22: note = chemically synthesized
  source 1..22: mol_type = other DNA
caaagaggcaaatatttactcc

SEQ ID NO: 126643 - DNA, 22 bp, synthetic construct
  misc_feature 1..22: note = chemically synthesized
  source 1..22: mol_type = other DNA
actccaggtaaagcaatagtaa

SEQ ID NO: 126644 - DNA, 22 bp, synthetic construct
  misc_feature 1..22: note = chemically synthesized
  source 1..22: mol_type = other DNA
ctccaggtaaagcaatagtaat

SEQ ID NO: 126645 - DNA, 22 bp, synthetic construct
  misc_feature 1..22: note = chemically synthesized
  source 1..22: mol_type = other DNA
caggtaaagcaatagtaatcag

SEQ ID NO: 126646 - DNA, 22 bp, synthetic construct
  misc_feature 1..22: note = chemically synthesized
  source 1..22: mol_type = other DNA
tataaaagttgctccttgagaa

SEQ ID NO: 126647 - DNA, 22 bp, synthetic construct
  misc_feature 1..22: note = chemically synthesized
  source 1..22: mol_type = other DNA
ctccttgagaattctacctgtt

SEQ ID NO: 126648 - DNA, 22 bp, synthetic construct
  misc_feature 1..22: note = chemically synthesized
  source 1..22: mol_type = other DNA
cttgagaattctacctgttcat

SEQ ID NO: 126649 - DNA, 22 bp, synthetic construct
  misc_feature 1..22: note = chemically synthesized
  source 1..22: mol_type = other DNA
gagaattctacctgttcataag

SEQ ID NO: 126650 - DNA, 22 bp, synthetic construct
  misc_feature 1..22: note = chemically synthesized
  source 1..22: mol_type = other DNA
agaattctacctgttcataaga

SEQ ID NO: 126651 - DNA, 22 bp, synthetic construct
  misc_feature 1..22: note = chemically synthesized
  source 1..22: mol_type = other DNA
tacctgttcataagatgttcac

SEQ ID NO: 126652 - DNA, 22 bp, synthetic construct
  misc_feature 1..22: note = chemically synthesized
  source 1..22: mol_type = other DNA
cctgttcataagatgttcacca

SEQ ID NO: 126653 - DNA, 22 bp, synthetic construct
  misc_feature 1..22: note = chemically synthesized
  source 1..22: mol_type = other DNA
ttcataagatgttcaccagtcc

SEQ ID NO: 126654 - DNA, 22 bp, synthetic construct
  misc_feature 1..22: note = chemically synthesized
  source 1..22: mol_type = other DNA
ataagatgttcaccagtcctga

SEQ ID NO: 126655 - DNA, 22 bp, synthetic construct
  misc_feature 1..22: note = chemically synthesized
  source 1..22: mol_type = other DNA
accagtcctgactttcagtgac

SEQ ID NO: 126656 - DNA, 22 bp, synthetic construct
  misc_feature 1..22: note = chemically synthesized
  source 1..22: mol_type = other DNA
actttcagtgacagcaaggatg

SEQ ID NO: 126657 - DNA, 22 bp, synthetic construct
  misc_feature 1..22: note = chemically synthesized
  source 1..22: mol_type = other DNA
tcagtgacagcaaggatgataa

SEQ ID NO: 126658 - DNA, 22 bp, synthetic construct
  misc_feature 1..22: note = chemically synthesized
  source 1..22: mol_type = other DNA
cagtgacagcaaggatgataat

SEQ ID NO: 126659 - DNA, 22 bp, synthetic construct
  misc_feature 1..22: note = chemically synthesized
  source 1..22: mol_type = other DNA
agtgacagcaaggatgataatt

SEQ ID NO: 126660 - DNA, 22 bp, synthetic construct
  misc_feature 1..22: note = chemically synthesized
  source 1..22: mol_type = other DNA
agtcattcctgggagatcctag

SEQ ID NO: 126661 - DNA, 22 bp, synthetic construct
  misc_feature 1..22: note = chemically synthesized
  source 1..22: mol_type = other DNA
gtcattcctgggagatcctagg

SEQ ID NO: 126662 - DNA, 22 bp, synthetic construct
  misc_feature 1..22: note = chemically synthesized
  source 1..22: mol_type = other DNA
ctgggagatcctaggtatggga

SEQ ID NO: 126663 - DNA, 22 bp, synthetic construct
  misc_feature 1..22: note = chemically synthesized
  source 1..22: mol_type = other DNA
ggagatcctaggtatgggaaaa

SEQ ID NO: 126664 - DNA, 22 bp, synthetic construct
  misc_feature 1..22: note = chemically synthesized
  source 1..22: mol_type = other DNA
ggtatgggaaaatagaatgtat

SEQ ID NO: 126665 - DNA, 22 bp, synthetic construct
  misc_feature 1..22: note = chemically synthesized
  source 1..22: mol_type = other DNA
tttagggtttactctatgtaag

SEQ ID NO: 126666 - DNA, 22 bp, synthetic construct
  misc_feature 1..22: note = chemically synthesized
  source 1..22: mol_type = other DNA
agggtttactctatgtaagatt

SEQ ID NO: 126667 - DNA, 22 bp, synthetic construct
  misc_feature 1..22: note = chemically synthesized
  source 1..22: mol_type = other DNA
gggtttactctatgtaagatta

SEQ ID NO: 126668 - DNA, 22 bp, synthetic construct
  misc_feature 1..22: note = chemically synthesized
  source 1..22: mol_type = other DNA
actctatgtaagattattggat

SEQ ID NO: 126669 - DNA, 22 bp, synthetic construct
  misc_feature 1..22: note = chemically synthesized
  source 1..22: mol_type = other DNA
ctctatgtaagattattggata

SEQ ID NO: 126670 - DNA, 22 bp, synthetic construct
  misc_feature 1..22: note = chemically synthesized
  source 1..22: mol_type = other DNA
tatgtaagattattggatacta

SEQ ID NO: 126671 - DNA, 22 bp, synthetic construct
  misc_feature 1..22: note = chemically synthesized
  source 1..22: mol_type = other DNA
tgtaagattattggatactacg

SEQ ID NO: 126672 - DNA, 22 bp, synthetic construct
  misc_feature 1..22: note = chemically synthesized
  source 1..22: mol_type = other DNA
ttggatactacgttggggatac

SEQ ID NO: 126673 - DNA, 22 bp, synthetic construct
  misc_feature 1..22: note = chemically synthesized
  source 1..22: mol_type = other DNA
gatactacgttggggatacagc

SEQ ID NO: 126674 - DNA, 22 bp, synthetic construct
  misc_feature 1..22: note = chemically synthesized
  source 1..22: mol_type = other DNA
cgttggggatacagctattcat

SEQ ID NO: 126675 - DNA, 22 bp, synthetic construct
  misc_feature 1..22: note = chemically synthesized
  source 1..22: mol_type = other DNA
gggatacagctattcatgcaga

SEQ ID NO: 126676 - DNA, 22 bp, synthetic construct
  misc_feature 1..22: note = chemically synthesized
  source 1..22: mol_type = other DNA
ttcatgcagaataaacattgtt

SEQ ID NO: 126677 - DNA, 22 bp, synthetic construct
  misc_feature 1..22: note = chemically synthesized
  source 1..22: mol_type = other DNA
atgcagaataaacattgttgaa

SEQ ID NO: 126678 - DNA, 22 bp, synthetic construct
  misc_feature 1..22: note = chemically synthesized
  source 1..22: mol_type = other DNA
ttgaattcattgtaaatcatat

SEQ ID NO: 126679 - DNA, 22 bp, synthetic construct
  misc_feature 1..22: note = chemically synthesized
  source 1..22: mol_type = other DNA
aattcattgtaaatcatataac

SEQ ID NO: 126680 - DNA, 22 bp, synthetic construct
  misc_feature 1..22: note = chemically synthesized
  source 1..22: mol_type = other DNA
attgtaaatcatataacccaga

SEQ ID NO: 126681 - DNA, 22 bp, synthetic construct
  misc_feature 1..22: note = chemically synthesized
  source 1..22: mol_type = other DNA
taaatcatataacccagaaaat

SEQ ID NO: 126682 - DNA, 22 bp, synthetic construct
  misc_feature 1..22: note = chemically synthesized
  source 1..22: mol_type = other DNA
tatttgaatagtgctgtaatgg

SEQ ID NO: 126683 - DNA, 22 bp, synthetic construct
  misc_feature 1..22: note = chemically synthesized
  source 1..22: mol_type = other DNA
gaatagtgctgtaatggcctga

SEQ ID NO: 126684 - DNA, 22 bp, synthetic construct
  misc_feature 1..22: note = chemically synthesized
  source 1..22: mol_type = other DNA
aatagtgctgtaatggcctgaa

SEQ ID NO: 126685 - DNA, 22 bp, synthetic construct
  misc_feature 1..22: note = chemically synthesized
  source 1..22: mol_type = other DNA
taatggcctgaaacttataggt

SEQ ID NO: 126686 - DNA, 22 bp, synthetic construct
  misc_feature 1..22: note = chemically synthesized
  source 1..22: mol_type = other DNA
aaacttataggtcacttttcat

SEQ ID NO: 126687 - DNA, 22 bp, synthetic construct
  misc_feature 1..22: note = chemically synthesized
  source 1..22: mol_type = other DNA
ataggtcacttttcatggtgct

SEQ ID NO: 126688 - DNA, 22 bp, synthetic construct
  misc_feature 1..22: note = chemically synthesized
  source 1..22: mol_type = other DNA
taggtcacttttcatggtgctc

SEQ ID NO: 126689 - DNA, 22 bp, synthetic construct
  misc_feature 1..22: note = chemically synthesized
  source 1..22: mol_type = other DNA
ttcatggtgctcttcatcctga

SEQ ID NO: 126690 - DNA, 22 bp, synthetic construct
  misc_feature 1..22: note = chemically synthesized
  source 1..22: mol_type = other DNA
tcatggtgctcttcatcctgac

SEQ ID NO: 126691 - DNA, 22 bp, synthetic construct
  misc_feature 1..22: note = chemically synthesized
  source 1..22: mol_type = other DNA
catggtgctcttcatcctgact

SEQ ID NO: 126692 - DNA, 22 bp, synthetic construct
  misc_feature 1..22: note = chemically synthesized
  source 1..22: mol_type = other DNA
atggtgctcttcatcctgactg

SEQ ID NO: 126693 - DNA, 22 bp, synthetic construct
  misc_feature 1..22: note = chemically synthesized
  source 1..22: mol_type = other DNA
ttcatcctgactggtggtatta

SEQ ID NO: 126694 - DNA, 22 bp, synthetic construct
  misc_feature 1..22: note = chemically synthesized
  source 1..22: mol_type = other DNA
catcctgactggtggtattata

SEQ ID NO: 126695 - DNA, 22 bp, synthetic construct
  misc_feature 1..22: note = chemically synthesized
  source 1..22: mol_type = other DNA
atcctgactggtggtattatag

SEQ ID NO: 126696 - DNA, 22 bp, synthetic construct
  misc_feature 1..22: note = chemically synthesized
  source 1..22: mol_type = other DNA
actggtggtattatagggtgga

SEQ ID NO: 126697 - DNA, 22 bp, synthetic construct
  misc_feature 1..22: note = chemically synthesized
  source 1..22: mol_type = other DNA
gtggtattatagggtggatgta

SEQ ID NO: 126698 - DNA, 22 bp, synthetic construct
  misc_feature 1..22: note = chemically synthesized
  source 1..22: mol_type = other DNA
tagggtggatgtaaaggtttcc

SEQ ID NO: 126699 - DNA, 22 bp, synthetic construct
  misc_feature 1..22: note = chemically synthesized
  source 1..22: mol_type = other DNA
cccaggctatgtgagacctaaa

SEQ ID NO: 126700 - DNA, 22 bp, synthetic construct
  misc_feature 1..22: note = chemically synthesized
  source 1..22: mol_type = other DNA
ccaggctatgtgagacctaaaa

SEQ ID NO: 126701 - DNA, 22 bp, synthetic construct
  misc_feature 1..22: note = chemically synthesized
  source 1..22: mol_type = other DNA
tgtgagacctaaaagatcagta

SEQ ID NO: 126702 - DNA, 22 bp, synthetic construct
  misc_feature 1..22: note = chemically synthesized
  source 1..22: mol_type = other DNA
aaagatcagtagaaaaatggtt

SEQ ID NO: 126703 - DNA, 22 bp, synthetic construct
  misc_feature 1..22: note = chemically synthesized
  source 1..22: mol_type = other DNA
taagcactattggaaaagcaga

SEQ ID NO: 126704 - DNA, 22 bp, synthetic construct
  misc_feature 1..22: note = chemically synthesized
  source 1..22: mol_type = other DNA
agcactattggaaaagcagata

SEQ ID NO: 126705 - DNA, 22 bp, synthetic construct
  misc_feature 1..22: note = chemically synthesized
  source 1..22: mol_type = other DNA
ttggaaaagcagatataaagat

SEQ ID NO: 126706 - DNA, 22 bp, synthetic construct
  misc_feature 1..22: note = chemically synthesized
  source 1..22: mol_type = other DNA
gaaaagcagatataaagattat

SEQ ID NO: 126707 - DNA, 22 bp, synthetic construct
  misc_feature 1..22: note = chemically synthesized
  source 1..22: mol_type = other DNA
tatggaaaaacaaatacacaag

SEQ ID NO: 126708 - DNA, 22 bp, synthetic construct
  misc_feature 1..22: note = chemically synthesized
  source 1..22: mol_type = other DNA
cagagattgacttttcttcaat

SEQ ID NO: 126709 - DNA, 22 bp, synthetic construct
  misc_feature 1..22: note = chemically synthesized
  source 1..22: mol_type = other DNA
agagattgacttttcttcaata

SEQ ID NO: 126710 - DNA, 22 bp, synthetic construct
  misc_feature 1..22: note = chemically synthesized
  source 1..22: mol_type = other DNA
acttttcttcaatattcctgga

SEQ ID NO: 126711 - DNA, 22 bp, synthetic construct
  misc_feature 1..22: note = chemically synthesized
  source 1..22: mol_type = other DNA
ttcttcaatattcctggaggga

SEQ ID NO: 126712 - DNA, 22 bp, synthetic construct
  misc_feature 1..22: note = chemically synthesized
  source 1..22: mol_type = other DNA
tcttcaatattcctggagggaa

SEQ ID NO: 126713 - DNA, 22 bp, synthetic construct
  misc_feature 1..22: note = chemically synthesized
  source 1..22: mol_type = other DNA
cttcaatattcctggagggaaa

SEQ ID NO: 126714 - DNA, 22 bp, synthetic construct
  misc_feature 1..22: note = chemically synthesized
  source 1..22: mol_type = other DNA
ttcaatattcctggagggaaaa

SEQ ID NO: 126715 - DNA, 22 bp, synthetic construct
  misc_feature 1..22: note = chemically synthesized
  source 1..22: mol_type = other DNA
caatattcctggagggaaaatt

SEQ ID NO: 126716 - DNA, 22 bp, synthetic construct
  misc_feature 1..22: note = chemically synthesized
  source 1..22: mol_type = other DNA
aatattcctggagggaaaattc

SEQ ID NO: 126717 - DNA, 22 bp, synthetic construct
  misc_feature 1..22: note = chemically synthesized
  source 1..22: mol_type = other DNA
ctggagggaaaattcaattgat

SEQ ID NO: 126718 - DNA, 22 bp, synthetic construct
  misc_feature 1..22: note = chemically synthesized
  source 1..22: mol_type = other DNA
gagggaaaattcaattgatgaa

SEQ ID NO: 126719 - DNA, 22 bp, synthetic construct
  misc_feature 1..22: note = chemically synthesized
  source 1..22: mol_type = other DNA
aattgatgaagctccagagact

SEQ ID NO: 126720 - DNA, 22 bp, synthetic construct
  misc_feature 1..22: note = chemically synthesized
  source 1..22: mol_type = other DNA
atgaagctccagagacttttgg

SEQ ID NO: 126721 - DNA, 22 bp, synthetic construct
  misc_feature 1..22: note = chemically synthesized
  source 1..22: mol_type = other DNA
cagagacttttgggtagttaga

SEQ ID NO: 126722 - DNA, 22 bp, synthetic construct
  misc_feature 1..22: note = chemically synthesized
  source 1..22: mol_type = other DNA
ttgggtagttagaaaatgacgt

SEQ ID NO: 126723 - DNA, 22 bp, synthetic construct
  misc_feature 1..22: note = chemically synthesized
  source 1..22: mol_type = other DNA
tgggtagttagaaaatgacgta

SEQ ID NO: 126724 - DNA, 22 bp, synthetic construct
  misc_feature 1..22: note = chemically synthesized
  source 1..22: mol_type = other DNA
gggtagttagaaaatgacgtaa

SEQ ID NO: 126725 - DNA, 22 bp, synthetic construct
  misc_feature 1..22: note = chemically synthesized
  source 1..22: mol_type = other DNA
ggtagttagaaaatgacgtaag

SEQ ID NO: 126726 - DNA, 22 bp, synthetic construct
  misc_feature 1..22: note = chemically synthesized
  source 1..22: mol_type = other DNA
gaaaatgacgtaagagtgactt

SEQ ID NO: 126727 - DNA, 22 bp, synthetic construct
  misc_feature 1..22: note = chemically synthesized
  source 1..22: mol_type = other DNA
acctgtgtgtgtttccaaagca

SEQ ID NO: 126728 - DNA, 22 bp, synthetic construct
  misc_feature 1..22: note = chemically synthesized
  source 1..22: mol_type = other DNA
cctgtgtgtgtttccaaagcac

SEQ ID NO: 126729 - DNA, 22 bp, synthetic construct
  misc_feature 1..22: note = chemically synthesized
  source 1..22: mol_type = other DNA
tgtgtgtttccaaagcacatag

SEQ ID NO: 126730 - DNA, 22 bp, synthetic construct
  misc_feature 1..22: note = chemically synthesized
  source 1..22: mol_type = other DNA
ccaaagcacatagaactctaag

SEQ ID NO: 126731 - DNA, 22 bp, synthetic construct
  misc_feature 1..22: note = chemically synthesized
  source 1..22: mol_type = other DNA
caaagcacatagaactctaagt

SEQ ID NO: 126732 - DNA, 22 bp, synthetic construct
  misc_feature 1..22: note = chemically synthesized
  source 1..22: mol_type = other DNA
taagttgcccagctttataacc

SEQ ID NO: 126733 - DNA, 22 bp, synthetic construct
  misc_feature 1..22: note = chemically synthesized
  source 1..22: mol_type = other DNA
agttgcccagctttataaccct

SEQ ID NO: 126734 - DNA, 22 bp, synthetic construct
  misc_feature 1..22: note = chemically synthesized
  source 1..22: mol_type = other DNA
cccagctttataaccctagtta

SEQ ID NO: 126735 - DNA, 22 bp, synthetic construct
  misc_feature 1..22: note = chemically synthesized
  source 1..22: mol_type = other DNA
tataaccctagttattgataca

SEQ ID NO: 126736 - DNA, 22 bp, synthetic construct
  misc_feature 1..22: note = chemically synthesized
  source 1..22: mol_type = other DNA
ataaccctagttattgatacac

SEQ ID NO: 126737 - DNA, 22 bp, synthetic construct
  misc_feature 1..22: note = chemically synthesized
  source 1..22: mol_type = other DNA
taaccctagttattgatacact

SEQ ID NO: 126738 - DNA, 22 bp, synthetic construct
  misc_feature 1..22: note = chemically synthesized
  source 1..22: mol_type = other DNA
gttattgatacactgcttcaaa

SEQ ID NO: 126739 - DNA, 22 bp, synthetic construct
  misc_feature 1..22: note = chemically synthesized
  source 1..22: mol_type = other DNA
ttgatacactgcttcaaagaat

SEQ ID NO: 126740 - DNA, 22 bp, synthetic construct
  misc_feature 1..22: note = chemically synthesized
  source 1..22: mol_type = other DNA
atacactgcttcaaagaattca

SEQ ID NO: 126741 - DNA, 22 bp, synthetic construct
  misc_feature 1..22: note = chemically synthesized
  source 1..22: mol_type = other DNA
cttcaaagaattcaaattttca

SEQ ID NO: 126742 - DNA, 22 bp, synthetic construct
  misc_feature 1..22: note = chemically synthesized
  source 1..22: mol_type = other DNA
caaagaattcaaattttcataa

SEQ ID NO: 126743 - DNA, 22 bp, synthetic construct
  misc_feature 1..22: note = chemically synthesized
  source 1..22: mol_type = other DNA
aaagaattcaaattttcataat

SEQ ID NO: 126744 - DNA, 22 bp, synthetic construct
  misc_feature 1..22: note = chemically synthesized
  source 1..22: mol_type = other DNA
aaattttcataatataaattga

SEQ ID NO: 126745 - DNA, 22 bp, synthetic construct
  misc_feature 1..22: note = chemically synthesized
  source 1..22: mol_type = other DNA
tcataatataaattgaagaata

SEQ ID NO: 126746 - DNA, 22 bp, synthetic construct
  misc_feature 1..22: note = chemically synthesized
  source 1..22: mol_type = other DNA
cataatataaattgaagaataa

SEQ ID NO: 126747 - DNA, 22 bp, synthetic construct
  misc_feature 1..22: note = chemically synthesized
  source 1..22: mol_type = other DNA
ataatataaattgaagaataaa

SEQ ID NO: 126748 - DNA, 22 bp, synthetic construct
  misc_feature 1..22: note = chemically synthesized
  source 1..22: mol_type = other DNA
aagaataaacagtaaaatgtgg

SEQ ID NO: 126749 - DNA, 22 bp, synthetic construct
  misc_feature 1..22: note = chemically synthesized
  source 1..22: mol_type = other DNA
gatgataagcttttgaaggcac

SEQ ID NO: 126750 - DNA, 22 bp, synthetic construct
  misc_feature 1..22: note = chemically synthesized
  source 1..22: mol_type = other DNA
atgataagcttttgaaggcact

SEQ ID NO: 126751 - DNA, 22 bp, synthetic construct
  misc_feature 1..22: note = chemically synthesized
  source 1..22: mol_type = other DNA
ttgaaggcactaattgataata

SEQ ID NO: 126752 - DNA, 22 bp, synthetic construct
  misc_feature 1..22: note = chemically synthesized
  source 1..22: mol_type = other DNA
tgaaggcactaattgataatag

SEQ ID NO: 126753 - DNA, 22 bp, synthetic construct
  misc_feature 1..22: note = chemically synthesized
  source 1..22: mol_type = other DNA
gaaggcactaattgataatagc

SEQ ID NO: 126754 - DNA, 22 bp, synthetic construct
  misc_feature 1..22: note = chemically synthesized
  source 1..22: mol_type = other DNA
aaggcactaattgataatagca

SEQ ID NO: 126755 - DNA, 22 bp, synthetic construct
  misc_feature 1..22: note = chemically synthesized
  source 1..22: mol_type = other DNA
attgataatagcaccaaactac

SEQ ID NO: 126756 - DNA, 22 bp, synthetic construct
  misc_feature 1..22: note = chemically synthesized
  source 1..22: mol_type = other DNA
ataatagcaccaaactactgtt

SEQ ID NO: 126757 - DNA, 22 bp, synthetic construct
  misc_feature 1..22: note = chemically synthesized
  source 1..22: mol_type = other DNA
ctgttgcatatcacctacttgg

SEQ ID NO: 126758 - DNA, 22 bp, synthetic construct
  misc_feature 1..22: note = chemically synthesized
  source 1..22: mol_type = other DNA
ttgcatatcacctacttggtga

SEQ ID NO: 126759 - DNA, 22 bp, synthetic construct
  misc_feature 1..22: note = chemically synthesized
  source 1..22: mol_type = other DNA
catatcacctacttggtgatgc

SEQ ID NO: 126760 - DNA, 22 bp, synthetic construct
  misc_feature 1..22: note = chemically synthesized
  source 1..22: mol_type = other DNA
cttggtgatgcaaaaataaaaa

SEQ ID NO: 126761 - DNA, 22 bp, synthetic construct
  misc_feature 1..22: note = chemically synthesized
  source 1..22: mol_type = other DNA
ggtgatgcaaaaataaaaattg

SEQ ID NO: 126762 - DNA, 22 bp, synthetic construct
  misc_feature 1..22: note = chemically synthesized
  source 1..22: mol_type = other DNA
gtgatgcaaaaataaaaattgg

SEQ ID NO: 126763 - DNA, 22 bp, synthetic construct
  misc_feature 1..22: note = chemically synthesized
  source 1..22: mol_type = other DNA
gtaatttaggcaagatcaagga

SEQ ID NO: 126764 - DNA, 22 bp, synthetic construct
  misc_feature 1..22: note = chemically synthesized
  source 1..22: mol_type = other DNA
aggcaagatcaaggagaatttt

SEQ ID NO: 126765 - DNA, 22 bp, synthetic construct
  misc_feature 1..22: note = chemically synthesized
  source 1..22: mol_type = other DNA
ggcaagatcaaggagaattttt

SEQ ID NO: 126766 - DNA, 22 bp, synthetic construct
  misc_feature 1..22: note = chemically synthesized
  source 1..22: mol_type = other DNA
tttttttaaaactatggaatct

SEQ ID NO: 126767 - DNA, 22 bp, synthetic construct
  misc_feature 1..22: note = chemically synthesized
  source 1..22: mol_type = other DNA
ttttttaaaactatggaatctg

SEQ ID NO: 126768 - DNA, 22 bp, synthetic construct
  misc_feature 1..22: note = chemically synthesized
  source 1..22: mol_type = other DNA
tttttaaaactatggaatctga

SEQ ID NO: 126769 - DNA, 22 bp, synthetic construct
  misc_feature 1..22: note = chemically synthesized
  source 1..22: mol_type = other DNA
ttttaaaactatggaatctgat

SEQ ID NO: 126770 - DNA, 22 bp, synthetic construct
  misc_feature 1..22: note = chemically synthesized
  source 1..22: mol_type = other DNA
tttaaaactatggaatctgatg

SEQ ID NO: 126771 - DNA, 22 bp, synthetic construct
  misc_feature 1..22: note = chemically synthesized
  source 1..22: mol_type = other DNA
ttaaaactatggaatctgatgg

SEQ ID NO: 126772 - DNA, 22 bp, synthetic construct
  misc_feature 1..22: note = chemically synthesized
  source 1..22: mol_type = other DNA
taaaactatggaatctgatggg

SEQ ID NO: 126773 - DNA, 22 bp, synthetic construct
  misc_feature 1..22: note = chemically synthesized
  source 1..22: mol_type = other DNA
aaaactatggaatctgatggga

SEQ ID NO: 126774 - DNA, 22 bp, synthetic construct
  misc_feature 1..22: note = chemically synthesized
  source 1..22: mol_type = other DNA
aaactatggaatctgatgggat

SEQ ID NO: 126775 - DNA, 22 bp, synthetic construct
  misc_feature 1..22: note = chemically synthesized
  source 1..22: mol_type = other DNA
tggaatctgatgggatttgaca

SEQ ID NO: 126776 - DNA, 22 bp, synthetic construct
  misc_feature 1..22: note = chemically synthesized
  source 1..22: mol_type = other DNA
atgggatttgacaaaagtgaga

SEQ ID NO: 126777 - DNA, 22 bp, synthetic construct
  misc_feature 1..22: note = chemically synthesized
  source 1..22: mol_type = other DNA
gacaaaagtgagaaggctctgt

SEQ ID NO: 126778 - DNA, 22 bp, synthetic construct
  misc_feature 1..22: note = chemically synthesized
  source 1..22: mol_type = other DNA
acaaaagtgagaaggctctgtg

SEQ ID NO: 126779 - DNA, 22 bp, synthetic construct
  misc_feature 1..22: note = chemically synthesized
  source 1..22: mol_type = other DNA
tgtgactcattagaattctaag

SEQ ID NO: 126780 - DNA, 22 bp, synthetic construct
  misc_feature 1..22: note = chemically synthesized
  source 1..22: mol_type = other DNA
tgactcattagaattctaagat

SEQ ID NO: 126781 - DNA, 22 bp, synthetic construct
  misc_feature 1..22: note = chemically synthesized
  source 1..22: mol_type = other DNA
attagaattctaagatttcagc

SEQ ID NO: 126782 - DNA, 22 bp, synthetic construct
  misc_feature 1..22: note = chemically synthesized
  source 1..22: mol_type = other DNA
gaattctaagatttcagctggt

SEQ ID NO: 126783 - DNA, 22 bp, synthetic construct
  misc_feature 1..22: note = chemically synthesized
  source 1..22: mol_type = other DNA
taagatttcagctggtgcaggc

SEQ ID NO: 126784 - DNA, 22 bp, synthetic construct
  misc_feature 1..22: note = chemically synthesized
  source 1..22: mol_type = other DNA
agatttcagctggtgcaggcag

SEQ ID NO: 126785 - DNA, 22 bp, synthetic construct
  misc_feature 1..22: note = chemically synthesized
  source 1..22: mol_type = other DNA
cagctggtgcaggcagccaacc

SEQ ID NO: 126786 - DNA, 22 bp, synthetic construct
  misc_feature 1..22: note = chemically synthesized
  source 1..22: mol_type = other DNA
agctggtgcaggcagccaacct

SEQ ID NO: 126787 - DNA, 22 bp, synthetic construct
  misc_feature 1..22: note = chemically synthesized
  source 1..22: mol_type = other DNA
gtgcaggcagccaacctctgag

SEQ ID NO: 126788 - DNA, 22 bp, synthetic construct
  misc_feature 1..22: note = chemically synthesized
  source 1..22: mol_type = other DNA
tgagaatacataaattgtgtgt

SEQ ID NO: 126789 - DNA, 22 bp, synthetic construct
  misc_feature 1..22: note = chemically synthesized
  source 1..22: mol_type = other DNA
agaatacataaattgtgtgttg

SEQ ID NO: 126790 - DNA, 22 bp, synthetic construct
  misc_feature 1..22: note = chemically synthesized
  source 1..22: mol_type = other DNA
tgtgttggtggcatgagccaga

SEQ ID NO: 126791 - DNA, 22 bp, synthetic construct
  misc_feature 1..22: note = chemically synthesized
  source 1..22: mol_type = other DNA
gtggcatgagccagagaaaata

SEQ ID NO: 126792 - DNA, 22 bp, synthetic construct
  misc_feature 1..22: note = chemically synthesized
  source 1..22: mol_type = other DNA
ctcttatggttggtttggacta

SEQ ID NO: 126793 - DNA, 22 bp, synthetic construct
  misc_feature 1..22: note = chemically synthesized
  source 1..22: mol_type = other DNA
tcttatggttggtttggactat

SEQ ID NO: 126794 - DNA, 22 bp, synthetic construct
  misc_feature 1..22: note = chemically synthesized
  source 1..22: mol_type = other DNA
ttatggttggtttggactatac

SEQ ID NO: 126795 - DNA, 22 bp, synthetic construct
  misc_feature 1..22: note = chemically synthesized
  source 1..22: mol_type = other DNA
atggttggtttggactatacat

SEQ ID NO: 126796 - DNA, 22 bp, synthetic construct
  misc_feature 1..22: note = chemically synthesized
  source 1..22: mol_type = other DNA
tggttggtttggactatacatc

SEQ ID NO: 126797 - DNA, 22 bp, synthetic construct
  misc_feature 1..22: note = chemically synthesized
  source 1..22: mol_type = other DNA
gtttggactatacatctcatat

SEQ ID NO: 126798 - DNA, 22 bp, synthetic construct
  misc_feature 1..22: note = chemically synthesized
  source 1..22: mol_type = other DNA
ggactatacatctcatatacta

SEQ ID NO: 126799 - DNA, 22 bp, synthetic construct
  misc_feature 1..22: note = chemically synthesized
  source 1..22: mol_type = other DNA
gactatacatctcatatactat

SEQ ID NO: 126800 - DNA, 22 bp, synthetic construct
  misc_feature 1..22: note = chemically synthesized
  source 1..22: mol_type = other DNA
tacatctcatatactattgaaa

SEQ ID NO: 126801 - DNA, 22 bp, synthetic construct
  misc_feature 1..22: note = chemically synthesized
  source 1..22: mol_type = other DNA
atatactattgaaagagcatat

SEQ ID NO: 126802 - DNA, 22 bp, synthetic construct
  misc_feature 1..22: note = chemically synthesized
  source 1..22: mol_type = other DNA
ttgaaagagcatattgatgtaa

SEQ ID NO: 126803 - DNA, 22 bp, synthetic construct
  misc_feature 1..22: note = chemically synthesized
  source 1..22: mol_type = other DNA
aaagagcatattgatgtaaatt

SEQ ID NO: 126804 - DNA, 22 bp, synthetic construct
  misc_feature 1..22: note = chemically synthesized
  source 1..22: mol_type = other DNA
atgtaaatttatgcacgattta

SEQ ID NO: 126805 - DNA, 22 bp, synthetic construct
  misc_feature 1..22: note = chemically synthesized
  source 1..22: mol_type = other DNA
atgcacgatttacaagacctct

SEQ ID NO: 126806 - DNA, 22 bp, synthetic construct
  misc_feature 1..22: note = chemically synthesized
  source 1..22: mol_type = other DNA
tgcacgatttacaagacctctt

SEQ ID NO: 126807 - DNA, 22 bp, synthetic construct
  misc_feature 1..22: note = chemically synthesized
  source 1..22: mol_type = other DNA
acaagacctctttctgtccatg

SEQ ID NO: 126808 - DNA, 22 bp, synthetic construct
  misc_feature 1..22: note = chemically synthesized
  source 1..22: mol_type = other DNA
caagacctctttctgtccatga

SEQ ID NO: 126809 - DNA, 22 bp, synthetic construct
  misc_feature 1..22: note = chemically synthesized
  source 1..22: mol_type = other DNA
tttctgtccatgaaaagaatgc

SEQ ID NO: 126810 - DNA, 22 bp, synthetic construct
  misc_feature 1..22: note = chemically synthesized
  source 1..22: mol_type = other DNA
tctgtccatgaaaagaatgcat

SEQ ID NO: 126811 - DNA, 22 bp, synthetic construct
  misc_feature 1..22: note = chemically synthesized
  source 1..22: mol_type = other DNA
ctgtccatgaaaagaatgcatc

SEQ ID NO: 126812 - DNA, 22 bp, synthetic construct
  misc_feature 1..22: note = chemically synthesized
  source 1..22: mol_type = other DNA
tgtccatgaaaagaatgcatcc

SEQ ID NO: 126813 - DNA, 22 bp, synthetic construct
  misc_feature 1..22: note = chemically synthesized
  source 1..22: mol_type = other DNA
tccatgaaaagaatgcatccaa

SEQ ID NO: 126814 - DNA, 22 bp, synthetic construct
  misc_feature 1..22: note = chemically synthesized
  source 1..22: mol_type = other DNA
ctggactttcattttcagaaga

SEQ ID NO: 126815 - DNA, 22 bp, synthetic construct
  misc_feature 1..22: note = chemically synthesized
  source 1..22: mol_type = other DNA
gactttcattttcagaagaatt

SEQ ID NO: 126816 - DNA, 22 bp, synthetic construct
  misc_feature 1..22: note = chemically synthesized
  source 1..22: mol_type = other DNA
tcattttcagaagaatttgttg

SEQ ID NO: 126817 - DNA, 22 bp, synthetic construct
  misc_feature 1..22: note = chemically synthesized
  source 1..22: mol_type = other DNA
cattttcagaagaatttgttga

SEQ ID NO: 126818 - DNA, 22 bp, synthetic construct
  misc_feature 1..22: note = chemically synthesized
  source 1..22: mol_type = other DNA
attttcagaagaatttgttgaa

SEQ ID NO: 126819 - DNA, 22 bp, synthetic construct
  misc_feature 1..22: note = chemically synthesized
  source 1..22: mol_type = other DNA
tcagaagaatttgttgaagttt

SEQ ID NO: 126820 - DNA, 22 bp, synthetic construct
  misc_feature 1..22: note = chemically synthesized
  source 1..22: mol_type = other DNA
cagaagaatttgttgaagtttc

SEQ ID NO: 126821 - DNA, 22 bp, synthetic construct
  misc_feature 1..22: note = chemically synthesized
  source 1..22: mol_type = other DNA
agaagaatttgttgaagtttca

SEQ ID NO: 126822 - DNA, 22 bp, synthetic construct
  misc_feature 1..22: note = chemically synthesized
  source 1..22: mol_type = other DNA
gttgaagtttcagctctgctct

SEQ ID NO: 126823 - DNA, 22 bp, synthetic construct
  misc_feature 1..22: note = chemically synthesized
  source 1..22: mol_type = other DNA
ttgaagtttcagctctgctctt

SEQ ID NO: 126824 - DNA, 22 bp, synthetic construct
  misc_feature 1..22: note = chemically synthesized
  source 1..22: mol_type = other DNA
aagtttcagctctgctctttct

SEQ ID NO: 126825 - DNA, 22 bp, synthetic construct
  misc_feature 1..22: note = chemically synthesized
  source 1..22: mol_type = other DNA
cagctctgctctttctaacaat

SEQ ID NO: 126826 - DNA, 22 bp, synthetic construct
  misc_feature 1..22: note = chemically synthesized
  source 1..22: mol_type = other DNA
agctctgctctttctaacaata

SEQ ID NO: 126827 - DNA, 22 bp, synthetic construct
  misc_feature 1..22: note = chemically synthesized
  source 1..22: mol_type = other DNA
tgctctttctaacaataatgat

SEQ ID NO: 126828 - DNA, 22 bp, synthetic construct
  misc_feature 1..22: note = chemically synthesized
  source 1..22: mol_type = other DNA
ctctttctaacaataatgatct

SEQ ID NO: 126829 - DNA, 22 bp, synthetic construct
  misc_feature 1..22: note = chemically synthesized
  source 1..22: mol_type = other DNA
tttctaacaataatgatcttgg

SEQ ID NO: 126830 - DNA, 22 bp, synthetic construct
  misc_feature 1..22: note = chemically synthesized
  source 1..22: mol_type = other DNA
tctaacaataatgatcttggga

SEQ ID NO: 126831 - DNA, 22 bp, synthetic construct
  misc_feature 1..22: note = chemically synthesized
  source 1..22: mol_type = other DNA
ctaacaataatgatcttgggaa

SEQ ID NO: 126832 - DNA, 22 bp, synthetic construct
  misc_feature 1..22: note = chemically synthesized
  source 1..22: mol_type = other DNA
taacaataatgatcttgggaaa

SEQ ID NO: 126833 - DNA, 22 bp, synthetic construct
  misc_feature 1..22: note = chemically synthesized
  source 1..22: mol_type = other DNA
acaataatgatcttgggaaagt

SEQ ID NO: 126834 - DNA, 22 bp, synthetic construct
  misc_feature 1..22: note = chemically synthesized
  source 1..22: mol_type = other DNA
gggaaagtaatttaatcttgag

SEQ ID NO: 126835 - DNA, 22 bp, synthetic construct
  misc_feature 1..22: note = chemically synthesized
  source 1..22: mol_type = other DNA
ggaaagtaatttaatcttgaga

SEQ ID NO: 126836 - DNA, 22 bp, synthetic construct
  misc_feature 1..22: note = chemically synthesized
  source 1..22: mol_type = other DNA
aatcttgagatttggttacata

SEQ ID NO: 126837 - DNA, 22 bp, synthetic construct
  misc_feature 1..22: note = chemically synthesized
  source 1..22: mol_type = other DNA
atcttgagatttggttacataa

SEQ ID NO: 126838 - DNA, 22 bp, synthetic construct
  misc_feature 1..22: note = chemically synthesized
  source 1..22: mol_type = other DNA
gagatttggttacataacctgt

SEQ ID NO: 126839 - DNA, 22 bp, synthetic construct
  misc_feature 1..22: note = chemically synthesized
  source 1..22: mol_type = other DNA
agatttggttacataacctgta

SEQ ID NO: 126840 - DNA, 22 bp, synthetic construct
  misc_feature 1..22: note = chemically synthesized
  source 1..22: mol_type = other DNA
ggttacataacctgtaaagact

SEQ ID NO: 126841 - DNA, 22 bp, synthetic construct
  misc_feature 1..22: note = chemically synthesized
  source 1..22: mol_type = other DNA
gttacataacctgtaaagacta

SEQ ID NO: 126842 - DNA, 22 bp, synthetic construct
  misc_feature 1..22: note = chemically synthesized
  source 1..22: mol_type = other DNA
cataacctgtaaagactactag

SEQ ID NO: 126843 - DNA, 22 bp, synthetic construct
  misc_feature 1..22: note = chemically synthesized
  source 1..22: mol_type = other DNA
taaagactactagtgatttctg

SEQ ID NO: 126844 - DNA, 22 bp, synthetic construct
  misc_feature 1..22: note = chemically synthesized
  source 1..22: mol_type = other DNA
ctagtgatttctgtcttctcag

SEQ ID NO: 126845 - DNA, 22 bp, synthetic construct
  misc_feature 1..22: note = chemically synthesized
  source 1..22: mol_type = other DNA
gtgatttctgtcttctcagtca

SEQ ID NO: 126846 - DNA, 22 bp, synthetic construct
  misc_feature 1..22: note = chemically synthesized
  source 1..22: mol_type = other DNA
ctgtcttctcagtcattctctt

SEQ ID NO: 126847 - DNA, 22 bp, synthetic construct
  misc_feature 1..22: note = chemically synthesized
  source 1..22: mol_type = other DNA
tgtcttctcagtcattctcttg

SEQ ID NO: 126848 - DNA, 22 bp, synthetic construct
  misc_feature 1..22: note = chemically synthesized
  source 1..22: mol_type = other DNA
tcttctcagtcattctcttgac

SEQ ID NO: 126849 - DNA, 22 bp, synthetic construct
  misc_feature 1..22: note = chemically synthesized
  source 1..22: mol_type = other DNA
ctcagtcattctcttgacacaa

SEQ ID NO: 126850 - DNA, 22 bp, synthetic construct
  misc_feature 1..22: note = chemically synthesized
  source 1..22: mol_type = other DNA
tcagtcattctcttgacacaaa

SEQ ID NO: 126851 - DNA, 22 bp, synthetic construct
  misc_feature 1..22: note = chemically synthesized
  source 1..22: mol_type = other DNA
agtcattctcttgacacaaagt

SEQ ID NO: 126852 - DNA, 22 bp, synthetic construct
  misc_feature 1..22: note = chemically synthesized
  source 1..22: mol_type = other DNA
tcttgacacaaagtaaggggaa

SEQ ID NO: 126853 - DNA, 22 bp, synthetic construct
  misc_feature 1..22: note = chemically synthesized
  source 1..22: mol_type = other DNA
ttgacacaaagtaaggggaaat

SEQ ID NO: 126854 - DNA, 22 bp, synthetic construct
  misc_feature 1..22: note = chemically synthesized
  source 1..22: mol_type = other DNA
gacacaaagtaaggggaaatgt

SEQ ID NO: 126855 - DNA, 22 bp, synthetic construct
  misc_feature 1..22: note = chemically synthesized
  source 1..22: mol_type = other DNA
acacaaagtaaggggaaatgtt

SEQ ID NO: 126856 - DNA, 22 bp, synthetic construct
  misc_feature 1..22: note = chemically synthesized
  source 1..22: mol_type = other DNA
tgtaaagagtggataatttttt

SEQ ID NO: 126857 - DNA, 22 bp, synthetic construct
  misc_feature 1..22: note = chemically synthesized
  source 1..22: mol_type = other DNA
gtaaagagtggataattttttt

SEQ ID NO: 126858 - DNA, 22 bp, synthetic construct
  misc_feature 1..22: note = chemically synthesized
  source 1..22: mol_type = other DNA
taaagagtggataattttttta

SEQ ID NO: 126859 - DNA, 22 bp, synthetic construct
  misc_feature 1..22: note = chemically synthesized
  source 1..22: mol_type = other DNA
ttttatttttgtgtttttgtta

SEQ ID NO: 126860 - DNA, 22 bp, synthetic construct
  misc_feature 1..22: note = chemically synthesized
  source 1..22: mol_type = other DNA
tttatttttgtgtttttgttat

SEQ ID NO: 126861 - DNA, 22 bp, synthetic construct
  misc_feature 1..22: note = chemically synthesized
  source 1..22: mol_type = other DNA
ttatttttgtgtttttgttatt

SEQ ID NO: 126862 - DNA, 22 bp, synthetic construct
  misc_feature 1..22: note = chemically synthesized
  source 1..22: mol_type = other DNA
tatttttgtgtttttgttattg

SEQ ID NO: 126863 - DNA, 22 bp, synthetic construct
  misc_feature 1..22: note = chemically synthesized
  source 1..22: mol_type = other DNA
atttttgtgtttttgttattgt

SEQ ID NO: 126864 - DNA, 22 bp, synthetic construct
  misc_feature 1..22: note = chemically synthesized
  source 1..22: mol_type = other DNA
tttttgtgtttttgttattgtt

SEQ ID NO: 126865 - DNA, 22 bp, synthetic construct
  misc_feature 1..22: note = chemically synthesized
  source 1..22: mol_type = other DNA
ttgtgtttttgttattgtttca

SEQ ID NO: 126866 - DNA, 22 bp, synthetic construct
  misc_feature 1..22: note = chemically synthesized
  source 1..22: mol_type = other DNA
tgtgtttttgttattgtttcag

SEQ ID NO: 126867 - DNA, 22 bp, synthetic construct
  misc_feature 1..22: note = chemically synthesized
  source 1..22: mol_type = other DNA
gtgtttttgttattgtttcaga

SEQ ID NO: 126868 - DNA, 22 bp, synthetic construct
  misc_feature 1..22: note = chemically synthesized
  source 1..22: mol_type = other DNA
tgtttttgttattgtttcagag

SEQ ID NO: 126869 - DNA, 22 bp, synthetic construct
  misc_feature 1..22: note = chemically synthesized
  source 1..22: mol_type = other DNA
ttgttattgtttcagagaagta

SEQ ID NO: 126870 - DNA, 22 bp, synthetic construct
  misc_feature 1..22: note = chemically synthesized
  source 1..22: mol_type = other DNA
tgttattgtttcagagaagtac

SEQ ID NO: 126871 - DNA, 22 bp, synthetic construct
  misc_feature 1..22: note = chemically synthesized
  source 1..22: mol_type = other DNA
gttattgtttcagagaagtacc

SEQ ID NO: 126872 - DNA, 22 bp, synthetic construct
  misc_feature 1..22: note = chemically synthesized
  source 1..22: mol_type = other DNA
ttattgtttcagagaagtacct

SEQ ID NO: 126873 - DNA, 22 bp, synthetic construct
  misc_feature 1..22: note = chemically synthesized
  source 1..22: mol_type = other DNA
ttgtttcagagaagtacctcct

SEQ ID NO: 126874 - DNA, 22 bp, synthetic construct
  misc_feature 1..22: note = chemically synthesized
  source 1..22: mol_type = other DNA
tttcagagaagtacctcctttc

SEQ ID NO: 126875 - DNA, 22 bp, synthetic construct
  misc_feature 1..22: note = chemically synthesized
  source 1..22: mol_type = other DNA
cagagaagtacctcctttctct

SEQ ID NO: 126876 - DNA, 22 bp, synthetic construct
  misc_feature 1..22: note = chemically synthesized
  source 1..22: mol_type = other DNA
agagaagtacctcctttctctt

SEQ ID NO: 126877 - DNA, 22 bp, synthetic construct
  misc_feature 1..22: note = chemically synthesized
  source 1..22: mol_type = other DNA
ctttctctttctctagtgagta

SEQ ID NO: 126878 - DNA, 22 bp, synthetic construct
  misc_feature 1..22: note = chemically synthesized
  source 1..22: mol_type = other DNA
tctctttctctagtgagtacat

SEQ ID NO: 126879 - DNA, 22 bp, synthetic construct
  misc_feature 1..22: note = chemically synthesized
  source 1..22: mol_type = other DNA
ctctttctctagtgagtacatg

SEQ ID NO: 126880 - DNA, 22 bp, synthetic construct
  misc_feature 1..22: note = chemically synthesized
  source 1..22: mol_type = other DNA
tctttctctagtgagtacatgt

SEQ ID NO: 126881 - DNA, 22 bp, synthetic construct
  misc_feature 1..22: note = chemically synthesized
  source 1..22: mol_type = other DNA
tttctctagtgagtacatgtca

SEQ ID NO: 126882 - DNA, 22 bp, synthetic construct
  misc_feature 1..22: note = chemically synthesized
  source 1..22: mol_type = other DNA
tctctagtgagtacatgtcagg

SEQ ID NO: 126883 - DNA, 22 bp, synthetic construct
  misc_feature 1..22: note = chemically synthesized
  source 1..22: mol_type = other DNA
ctctagtgagtacatgtcagga

SEQ ID NO: 126884 - DNA, 22 bp, synthetic construct
  misc_feature 1..22: note = chemically synthesized
  source 1..22: mol_type = other DNA
tctagtgagtacatgtcaggat

SEQ ID NO: 126885 - DNA, 22 bp, synthetic construct
  misc_feature 1..22: note = chemically synthesized
  source 1..22: mol_type = other DNA
tagtgagtacatgtcaggatta

SEQ ID NO: 126886 - DNA, 22 bp, synthetic construct
  misc_feature 1..22: note = chemically synthesized
  source 1..22: mol_type = other DNA
gtgagtacatgtcaggattatt

SEQ ID NO: 126887 - DNA, 22 bp, synthetic construct
  misc_feature 1..22: note = chemically synthesized
  source 1..22: mol_type = other DNA
ttcacccagaggtgtgtcaaat

SEQ ID NO: 126888 - DNA, 22 bp, synthetic construct
  misc_feature 1..22: note = chemically synthesized
  source 1..22: mol_type = other DNA
acccagaggtgtgtcaaatgat

SEQ ID NO: 126889 - DNA, 22 bp, synthetic construct
  misc_feature 1..22: note = chemically synthesized
  source 1..22: mol_type = other DNA
cctttttttctgtggaagcctt

SEQ ID NO: 126890 - DNA, 22 bp, synthetic construct
  misc_feature 1..22: note = chemically synthesized
  source 1..22: mol_type = other DNA
ctttttttctgtggaagccttg

SEQ ID NO: 126891 - DNA, 22 bp, synthetic construct
  misc_feature 1..22: note = chemically synthesized
  source 1..22: mol_type = other DNA
tttttctgtggaagccttggga

SEQ ID NO: 126892 - DNA, 22 bp, synthetic construct
  misc_feature 1..22: note = chemically synthesized
  source 1..22: mol_type = other DNA
ttttctgtggaagccttgggaa

SEQ ID NO: 126893 - DNA, 22 bp, synthetic construct
  misc_feature 1..22: note = chemically synthesized
  source 1..22: mol_type = other DNA
tttctgtggaagccttgggaac

SEQ ID NO: 126894 - DNA, 22 bp, synthetic construct
  misc_feature 1..22: note = chemically synthesized
  source 1..22: mol_type = other DNA
ttctgtggaagccttgggaaca

SEQ ID NO: 126895 - DNA, 22 bp, synthetic construct
  misc_feature 1..22: note = chemically synthesized
  source 1..22: mol_type = other DNA
tctgtggaagccttgggaacag

SEQ ID NO: 126896 - DNA, 22 bp, synthetic construct
  misc_feature 1..22: note = chemically synthesized
  source 1..22: mol_type = other DNA
ctgtggaagccttgggaacaga

SEQ ID NO: 126897 - DNA, 22 bp, synthetic construct
  misc_feature 1..22: note = chemically synthesized
  source 1..22: mol_type = other DNA
tgtggaagccttgggaacagat

SEQ ID NO: 126898 - DNA, 22 bp, synthetic construct
  misc_feature 1..22: note = chemically synthesized
  source 1..22: mol_type = other DNA
tggaagccttgggaacagatat

SEQ ID NO: 126899 - DNA, 22 bp, synthetic construct
  misc_feature 1..22: note = chemically synthesized
  source 1..22: mol_type = other DNA
gggaacagatataagatgatga

SEQ ID NO: 126900 - DNA, 22 bp, synthetic construct
  misc_feature 1..22: note = chemically synthesized
  source 1..22: mol_type = other DNA
ggaacagatataagatgatgat

SEQ ID NO: 126901 - DNA, 22 bp, synthetic construct
  misc_feature 1..22: note = chemically synthesized
  source 1..22: mol_type = other DNA
ttaggagcctgtgtttgacttt

SEQ ID NO: 126902 - DNA, 22 bp, synthetic construct
  misc_feature 1..22: note = chemically synthesized
  source 1..22: mol_type = other DNA
taggagcctgtgtttgacttta

SEQ ID NO: 126903 - DNA, 22 bp, synthetic construct
  misc_feature 1..22: note = chemically synthesized
  source 1..22: mol_type = other DNA
aggagcctgtgtttgactttaa

SEQ ID NO: 126904 - DNA, 22 bp, synthetic construct
  misc_feature 1..22: note = chemically synthesized
  source 1..22: mol_type = other DNA
ggagcctgtgtttgactttaaa

SEQ ID NO: 126905 - DNA, 22 bp, synthetic construct
  misc_feature 1..22: note = chemically synthesized
  source 1..22: mol_type = other DNA
tgtttgactttaaataaagata

SEQ ID NO: 126906 - DNA, 22 bp, synthetic construct
  misc_feature 1..22: note = chemically synthesized
  source 1..22: mol_type = other DNA
gactttaaataaagatattaaa

SEQ ID NO: 126907 - DNA, 22 bp, synthetic construct
  misc_feature 1..22: note = chemically synthesized
  source 1..22: mol_type = other DNA
actttaaataaagatattaaac

SEQ ID NO: 126908 - DNA, 22 bp, synthetic construct
  misc_feature 1..22: note = chemically synthesized
  source 1..22: mol_type = other DNA
taaataaagatattaaactata

SEQ ID NO: 126909 - DNA, 22 bp, synthetic construct
  misc_feature 1..22: note = chemically synthesized
  source 1..22: mol_type = other DNA
aaataaagatattaaactatag

SEQ ID NO: 126910 - DNA, 22 bp, synthetic construct
  misc_feature 1..22: note = chemically synthesized
  source 1..22: mol_type = other DNA
aataaagatattaaactatagt

SEQ ID NO: 126911 - DNA, 22 bp, synthetic construct
  misc_feature 1..22: note = chemically synthesized
  source 1..22: mol_type = other DNA
aactatagtttctctaatcagc

SEQ ID NO: 126912 - DNA, 22 bp, synthetic construct
  misc_feature 1..22: note = chemically synthesized
  source 1..22: mol_type = other DNA
tagtttctctaatcagcagata

SEQ ID NO: 126913 - DNA, 22 bp, synthetic construct
  misc_feature 1..22: note = chemically synthesized
  source 1..22: mol_type = other DNA
ctctaatcagcagataaaatgt

SEQ ID NO: 126914 - DNA, 22 bp, synthetic construct
  misc_feature 1..22: note = chemically synthesized
  source 1..22: mol_type = other DNA
tctaatcagcagataaaatgtg

SEQ ID NO: 126915 - DNA, 22 bp, synthetic construct
  misc_feature 1..22: note = chemically synthesized
  source 1..22: mol_type = other DNA
taatcagcagataaaatgtgat

SEQ ID NO: 126916 - DNA, 22 bp, synthetic construct
  misc_feature 1..22: note = chemically synthesized
  source 1..22: mol_type = other DNA
atcagcagataaaatgtgatat

SEQ ID NO: 126917 - DNA, 22 bp, synthetic construct
  misc_feature 1..22: note = chemically synthesized
  source 1..22: mol_type = other DNA
ggtgggaaagggaaaggagaaa

SEQ ID NO: 126918 - DNA, 22 bp, synthetic construct
  misc_feature 1..22: note = chemically synthesized
  source 1..22: mol_type = other DNA
atgagccaatgtgggaacttct

SEQ ID NO: 126919 - DNA, 22 bp, synthetic construct
  misc_feature 1..22: note = chemically synthesized
  source 1..22: mol_type = other DNA
ctgacatagctaaaagtaacgt

SEQ ID NO: 126920 - DNA, 22 bp, synthetic construct
  misc_feature 1..22: note = chemically synthesized
  source 1..22: mol_type = other DNA
tgacatagctaaaagtaacgtt

SEQ ID NO: 126921 - DNA, 22 bp, synthetic construct
  misc_feature 1..22: note = chemically synthesized
  source 1..22: mol_type = other DNA
acatagctaaaagtaacgttga

SEQ ID NO: 126922 - DNA, 22 bp, synthetic construct
  misc_feature 1..22: note = chemically synthesized
  source 1..22: mol_type = other DNA
aaagtaacgttgagcctggggc

SEQ ID NO: 126923 - DNA, 22 bp, synthetic construct
  misc_feature 1..22: note = chemically synthesized
  source 1..22: mol_type = other DNA
agcctggggcattgggactgag

SEQ ID NO: 126924 - DNA, 22 bp, synthetic construct
  misc_feature 1..22: note = chemically synthesized
  source 1..22: mol_type = other DNA
gggcattgggactgagggaagt

SEQ ID NO: 126925 - DNA, 22 bp, synthetic construct
  misc_feature 1..22: note = chemically synthesized
  source 1..22: mol_type = other DNA
ggactgagggaagtagagggga

SEQ ID NO: 126926 - DNA, 22 bp, synthetic construct
  misc_feature 1..22: note = chemically synthesized
  source 1..22: mol_type = other DNA
agggaagtagaggggaaagcaa

SEQ ID NO: 126927 - DNA, 22 bp, synthetic construct
  misc_feature 1..22: note = chemically synthesized
  source 1..22: mol_type = other DNA
tgtcctcaaaaagtgagaaaag

SEQ ID NO: 126928 - DNA, 22 bp, synthetic construct
  misc_feature 1..22: note = chemically synthesized
  source 1..22: mol_type = other DNA
tcctcaaaaagtgagaaaagga

SEQ ID NO: 126929 - DNA, 22 bp, synthetic construct
  misc_feature 1..22: note = chemically synthesized
  source 1..22: mol_type = other DNA
aaaaagtgagaaaaggaggtat

SEQ ID NO: 126930 - DNA, 22 bp, synthetic construct
  misc_feature 1..22: note = chemically synthesized
  source 1..22: mol_type = other DNA
ttgctcaatctgcctgccagtg

SEQ ID NO: 126931 - DNA, 22 bp, synthetic construct
  misc_feature 1..22: note = chemically synthesized
  source 1..22: mol_type = other DNA
ctcaatctgcctgccagtgaga

SEQ ID NO: 126932 - DNA, 22 bp, synthetic construct
  misc_feature 1..22: note = chemically synthesized
  source 1..22: mol_type = other DNA
aatctgcctgccagtgagaggt

SEQ ID NO: 126933 - DNA, 22 bp, synthetic construct
  misc_feature 1..22: note = chemically synthesized
  source 1..22: mol_type = other DNA
cctgccagtgagaggttcagac

SEQ ID NO: 126934 - DNA, 22 bp, synthetic construct
  misc_feature 1..22: note = chemically synthesized
  source 1..22: mol_type = other DNA
ccagtgagaggttcagacaata

SEQ ID NO: 126935 - DNA, 22 bp, synthetic construct
  misc_feature 1..22: note = chemically synthesized
  source 1..22: mol_type = other DNA
agacaatactcagcttatgcag

SEQ ID NO: 126936 - DNA, 22 bp, synthetic construct
  misc_feature 1..22: note = chemically synthesized
  source 1..22: mol_type = other DNA
agcttatgcaggattaaagaag

SEQ ID NO: 126937 - DNA, 22 bp, synthetic construct
  misc_feature 1..22: note = chemically synthesized
  source 1..22: mol_type = other DNA
atgcaggattaaagaagcagta

SEQ ID NO: 126938 - DNA, 22 bp, synthetic construct
  misc_feature 1..22: note = chemically synthesized
  source 1..22: mol_type = other DNA
tgcaggattaaagaagcagtat

SEQ ID NO: 126939 - DNA, 22 bp, synthetic construct
  misc_feature 1..22: note = chemically synthesized
  source 1..22: mol_type = other DNA
aagaagcagtatggcaaataaa

SEQ ID NO: 126940 - DNA, 22 bp, synthetic construct
  misc_feature 1..22: note = chemically synthesized
  source 1..22: mol_type = other DNA
tacataggtatataacttattg

SEQ ID NO: 126941 - DNA, 22 bp, synthetic construct
  misc_feature 1..22: note = chemically synthesized
  source 1..22: mol_type = other DNA
attgttttattataggtattca

SEQ ID NO: 126942 - DNA, 22 bp, synthetic construct
  misc_feature 1..22: note = chemically synthesized
  source 1..22: mol_type = other DNA
ttgttttattataggtattcat

SEQ ID NO: 126943 - DNA, 22 bp, synthetic construct
  misc_feature 1..22: note = chemically synthesized
  source 1..22: mol_type = other DNA
ttttattataggtattcattgt

SEQ ID NO: 126944 - DNA, 22 bp, synthetic construct
  misc_feature 1..22: note = chemically synthesized
  source 1..22: mol_type = other DNA
tattataggtattcattgttaa

SEQ ID NO: 126945 - DNA, 22 bp, synthetic construct
  misc_feature 1..22: note = chemically synthesized
  source 1..22: mol_type = other DNA
attataggtattcattgttaaa

SEQ ID NO: 126946 - DNA, 22 bp, synthetic construct
  misc_feature 1..22: note = chemically synthesized
  source 1..22: mol_type = other DNA
ttataggtattcattgttaaat

SEQ ID NO: 126947 - DNA, 22 bp, synthetic construct
  misc_feature 1..22: note = chemically synthesized
  source 1..22: mol_type = other DNA
taggtattcattgttaaatgat

SEQ ID NO: 126948 - DNA, 22 bp, synthetic construct
  misc_feature 1..22: note = chemically synthesized
  source 1..22: mol_type = other DNA
attgttaaatgattaccataat

SEQ ID NO: 126949 - DNA, 22 bp, synthetic construct
  misc_feature 1..22: note = chemically synthesized
  source 1..22: mol_type = other DNA
ttaaatgattaccataatcaaa

SEQ ID NO: 126950 - DNA, 22 bp, synthetic construct
  misc_feature 1..22: note = chemically synthesized
  source 1..22: mol_type = other DNA
aatgattaccataatcaaacta

SEQ ID NO: 126951 - DNA, 22 bp, synthetic construct
  misc_feature 1..22: note = chemically synthesized
  source 1..22: mol_type = other DNA
ccataatcaaactaattaatat

SEQ ID NO: 126952 - DNA, 22 bp, synthetic construct
  misc_feature 1..22: note = chemically synthesized
  source 1..22: mol_type = other DNA
attaatatatctatcacctcac

SEQ ID NO: 126953 - DNA, 22 bp, synthetic construct
  misc_feature 1..22: note = chemically synthesized
  source 1..22: mol_type = other DNA
atatatctatcacctcacataa

SEQ ID NO: 126954 - DNA, 22 bp, synthetic construct
  misc_feature 1..22: note = chemically synthesized
  source 1..22: mol_type = other DNA
tcacctcacataataactttaa

SEQ ID NO: 126955 - DNA, 22 bp, synthetic construct
  misc_feature 1..22: note = chemically synthesized
  source 1..22: mol_type = other DNA
acataataactttaattttttt

SEQ ID NO: 126956 - DNA, 22 bp, synthetic construct
  misc_feature 1..22: note = chemically synthesized
  source 1..22: mol_type = other DNA
taatttttttggtagtaaaaat

SEQ ID NO: 126957 - DNA, 22 bp, synthetic construct
  misc_feature 1..22: note = chemically synthesized
  source 1..22: mol_type = other DNA
aatttttttggtagtaaaaata

SEQ ID NO: 126958 - DNA, 22 bp, synthetic construct
  misc_feature 1..22: note = chemically synthesized
  source 1..22: mol_type = other DNA
atttttttggtagtaaaaatat

SEQ ID NO: 126959 - DNA, 22 bp, synthetic construct
  misc_feature 1..22: note = chemically synthesized
  source 1..22: mol_type = other DNA
ttttggtagtaaaaatatgtga

SEQ ID NO: 126960 - DNA, 22 bp, synthetic construct
  misc_feature 1..22: note = chemically synthesized
  source 1..22: mol_type = other DNA
tttggtagtaaaaatatgtgag

SEQ ID NO: 126961 - DNA, 22 bp, synthetic construct
  misc_feature 1..22: note = chemically synthesized
  source 1..22: mol_type = other DNA
ttggtagtaaaaatatgtgagg

SEQ ID NO: 126962 - DNA, 22 bp, synthetic construct
  misc_feature 1..22: note = chemically synthesized
  source 1..22: mol_type = other DNA
tggtagtaaaaatatgtgaggt

SEQ ID NO: 126963 - DNA, 22 bp, synthetic construct
  misc_feature 1..22: note = chemically synthesized
  source 1..22: mol_type = other DNA
ggtagtaaaaatatgtgaggtc

SEQ ID NO: 126964 - DNA, 22 bp, synthetic construct
  misc_feature 1..22: note = chemically synthesized
  source 1..22: mol_type = other DNA
gtagtaaaaatatgtgaggtct

SEQ ID NO: 126965 - DNA, 22 bp, synthetic construct
  misc_feature 1..22: note = chemically synthesized
  source 1..22: mol_type = other DNA
ctttcttagcaaattttaaata

SEQ ID NO: 126966 - DNA, 22 bp, synthetic construct
  misc_feature 1..22: note = chemically synthesized
  source 1..22: mol_type = other DNA
tcttagcaaattttaaatatac

SEQ ID NO: 126967 - DNA, 22 bp, synthetic construct
  misc_feature 1..22: note = chemically synthesized
  source 1..22: mol_type = other DNA
cttagcaaattttaaatatacc

SEQ ID NO: 126968 - DNA, 22 bp, synthetic construct
  misc_feature 1..22: note = chemically synthesized
  source 1..22: mol_type = other DNA
ttagcaaattttaaatatacct

SEQ ID NO: 126969 - DNA, 22 bp, synthetic construct
  misc_feature 1..22: note = chemically synthesized
  source 1..22: mol_type = other DNA
agcaaattttaaatatacctaa

SEQ ID NO: 126970 - DNA, 22 bp, synthetic construct
  misc_feature 1..22: note = chemically synthesized
  source 1..22: mol_type = other DNA
gcaaattttaaatatacctaaa

SEQ ID NO: 126971 - DNA, 22 bp, synthetic construct
  misc_feature 1..22: note = chemically synthesized
  source 1..22: mol_type = other DNA
taaatatacctaaataaagctg

SEQ ID NO: 126972 - DNA, 22 bp, synthetic construct
  misc_feature 1..22: note = chemically synthesized
  source 1..22: mol_type = other DNA
aaatatacctaaataaagctgg

SEQ ID NO: 126973 - DNA, 22 bp, synthetic construct
  misc_feature 1..22: note = chemically synthesized
  source 1..22: mol_type = other DNA
aatatacctaaataaagctggg

SEQ ID NO: 126974 - DNA, 22 bp, synthetic construct
  misc_feature 1..22: note = chemically synthesized
  source 1..22: mol_type = other DNA
aataaagctgggagggaaaaga

SEQ ID NO: 126975 - DNA, 22 bp, synthetic construct
  misc_feature 1..22: note = chemically synthesized
  source 1..22: mol_type = other DNA
ggagggaaaagataatacagaa

SEQ ID NO: 126976 - DNA, 22 bp, synthetic construct
  misc_feature 1..22: note = chemically synthesized
  source 1..22: mol_type = other DNA
atctagttaattgtgttatatt

SEQ ID NO: 126977 - DNA, 22 bp, synthetic construct
  misc_feature 1..22: note = chemically synthesized
  source 1..22: mol_type = other DNA
gttaattgtgttatattactac

SEQ ID NO: 126978 - DNA, 22 bp, synthetic construct
  misc_feature 1..22: note = chemically synthesized
  source 1..22: mol_type = other DNA
attgtgttatattactactaaa

SEQ ID NO: 126979 - DNA, 22 bp, synthetic construct
  misc_feature 1..22: note = chemically synthesized
  source 1..22: mol_type = other DNA
tgttatattactactaaataaa

SEQ ID NO: 126980 - DNA, 22 bp, synthetic construct
  misc_feature 1..22: note = chemically synthesized
  source 1..22: mol_type = other DNA
tattactactaaataaacatat

SEQ ID NO: 126981 - DNA, 22 bp, synthetic construct
  misc_feature 1..22: note = chemically synthesized
  source 1..22: mol_type = other DNA
ctactaaataaacatataattg

SEQ ID NO: 126982 - DNA, 22 bp, synthetic construct
  misc_feature 1..22: note = chemically synthesized
  source 1..22: mol_type = other DNA
ctaaataaacatataattgata

SEQ ID NO: 126983 - DNA, 22 bp, synthetic construct
  misc_feature 1..22: note = chemically synthesized
  source 1..22: mol_type = other DNA
aataaacatataattgataaat

SEQ ID NO: 126984 - DNA, 22 bp, synthetic construct
  misc_feature 1..22: note = chemically synthesized
  source 1..22: mol_type = other DNA
ataaattaaaaaaaaacaggag

SEQ ID NO: 126985 - DNA, 22 bp, synthetic construct
  misc_feature 1..22: note = chemically synthesized
  source 1..22: mol_type = other DNA
aaaaaaaacaggagtaggaata

SEQ ID NO: 126986 - DNA, 22 bp, synthetic construct
  misc_feature 1..22: note = chemically synthesized
  source 1..22: mol_type = other DNA
agaaacaaatgtatggaacaaa

SEQ ID NO: 126987 - DNA, 22 bp, synthetic construct
  misc_feature 1..22: note = chemically synthesized
  source 1..22: mol_type = other DNA
ttgaatttctaccgtgtgtcaa

SEQ ID NO: 126988 - DNA, 22 bp, synthetic construct
  misc_feature 1..22: note = chemically synthesized
  source 1..22: mol_type = other DNA
aatttctaccgtgtgtcaagta

SEQ ID NO: 126989 - DNA, 22 bp, synthetic construct
  misc_feature 1..22: note = chemically synthesized
  source 1..22: mol_type = other DNA
ctaccgtgtgtcaagtattgga

SEQ ID NO: 126990 - DNA, 22 bp, synthetic construct
  misc_feature 1..22: note = chemically synthesized
  source 1..22: mol_type = other DNA
taccgtgtgtcaagtattggac

SEQ ID NO: 126991 - DNA, 22 bp, synthetic construct
  misc_feature 1..22: note = chemically synthesized
  source 1..22: mol_type = other DNA
ccgtgtgtcaagtattggactg

SEQ ID NO: 126992 - DNA, 22 bp, synthetic construct
  misc_feature 1..22: note = chemically synthesized
  source 1..22: mol_type = other DNA
gactggggcattatatacacct

SEQ ID NO: 126993 - DNA, 22 bp, synthetic construct
  misc_feature 1..22: note = chemically synthesized
  source 1..22: mol_type = other DNA
gggcattatatacacctcattt

SEQ ID NO: 126994 - DNA, 22 bp, synthetic construct
  misc_feature 1..22: note = chemically synthesized
  source 1..22: mol_type = other DNA
tatacacctcattttttgggaa

SEQ ID NO: 126995 - DNA, 22 bp, synthetic construct
  misc_feature 1..22: note = chemically synthesized
  source 1..22: mol_type = other DNA
attttttgggaagaatccttaa

SEQ ID NO: 126996 - DNA, 22 bp, synthetic construct
  misc_feature 1..22: note = chemically synthesized
  source 1..22: mol_type = other DNA
tttgggaagaatccttaaaata

SEQ ID NO: 126997 - DNA, 22 bp, synthetic construct
  misc_feature 1..22: note = chemically synthesized
  source 1..22: mol_type = other DNA
ttgggaagaatccttaaaatag

SEQ ID NO: 126998 - DNA, 22 bp, synthetic construct
  misc_feature 1..22: note = chemically synthesized
  source 1..22: mol_type = other DNA
tgggaagaatccttaaaatagc

SEQ ID NO: 126999 - DNA, 22 bp, synthetic construct
  misc_feature 1..22: note = chemically synthesized
  source 1..22: mol_type = other DNA
gggaagaatccttaaaatagct

SEQ ID NO: 127000 - DNA, 22 bp, synthetic construct
  misc_feature 1..22: note = chemically synthesized
  source 1..22: mol_type = other DNA
ggaagaatccttaaaatagctg

SEQ ID NO: 127001 - DNA, 22 bp, synthetic construct
  misc_feature 1..22: note = chemically synthesized
  source 1..22: mol_type = other DNA
aaaatagctgtttgtcttgtct

SEQ ID NO: 127002 - DNA, 22 bp, synthetic construct
  misc_feature 1..22: note = chemically synthesized
  source 1..22: mol_type = other DNA
aaatagctgtttgtcttgtctg

SEQ ID NO: 127003 - DNA, 22 bp, synthetic construct
  misc_feature 1..22: note = chemically synthesized
  source 1..22: mol_type = other DNA
tttgtcttgtctgttttcatat

SEQ ID NO: 127004 - DNA, 22 bp, synthetic construct
  misc_feature 1..22: note = chemically synthesized
  source 1..22: mol_type = other DNA
gtcttgtctgttttcatattga

SEQ ID NO: 127005 - DNA, 22 bp, synthetic construct
  misc_feature 1..22: note = chemically synthesized
  source 1..22: mol_type = other DNA
tcttgtctgttttcatattgaa

SEQ ID NO: 127006 - DNA, 22 bp, synthetic construct
  misc_feature 1..22: note = chemically synthesized
  source 1..22: mol_type = other DNA
gtctgttttcatattgaaaact

SEQ ID NO: 127007 - DNA, 22 bp, synthetic construct
  misc_feature 1..22: note = chemically synthesized
  source 1..22: mol_type = other DNA
tctgttttcatattgaaaactg

SEQ ID NO: 127008 - DNA, 22 bp, synthetic construct
  misc_feature 1..22: note = chemically synthesized
  source 1..22: mol_type = other DNA
ttttcatattgaaaactgagtg

SEQ ID NO: 127009 - DNA, 22 bp, synthetic construct
  misc_feature 1..22: note = chemically synthesized
  source 1..22: mol_type = other DNA
tcatattgaaaactgagtgctt

SEQ ID NO: 127010 - DNA, 22 bp, synthetic construct
  misc_feature 1..22: note = chemically synthesized
  source 1..22: mol_type = other DNA
catattgaaaactgagtgcttt

SEQ ID NO: 127011 - DNA, 22 bp, synthetic construct
  misc_feature 1..22: note = chemically synthesized
  source 1..22: mol_type = other DNA
atattgaaaactgagtgctttc

SEQ ID NO: 127012 - DNA, 22 bp, synthetic construct
  misc_feature 1..22: note = chemically synthesized
  source 1..22: mol_type = other DNA
aaaactgagtgctttcacttga

SEQ ID NO: 127013 - DNA, 22 bp, synthetic construct
  misc_feature 1..22: note = chemically synthesized
  source 1..22: mol_type = other DNA
agtgctttcacttgattcactc

SEQ ID NO: 127014 - DNA, 22 bp, synthetic construct
  misc_feature 1..22: note = chemically synthesized
  source 1..22: mol_type = other DNA
tcacttgattcactcagttgct

SEQ ID NO: 127015 - DNA, 22 bp, synthetic construct
  misc_feature 1..22: note = chemically synthesized
  source 1..22: mol_type = other DNA
cacttgattcactcagttgctt

SEQ ID NO: 127016 - DNA, 22 bp, synthetic construct
  misc_feature 1..22: note = chemically synthesized
  source 1..22: mol_type = other DNA
acttgattcactcagttgcttt

SEQ ID NO: 127017 - DNA, 22 bp, synthetic construct
  misc_feature 1..22: note = chemically synthesized
  source 1..22: mol_type = other DNA
gattcactcagttgcttttgtg

SEQ ID NO: 127018 - DNA, 22 bp, synthetic construct
  misc_feature 1..22: note = chemically synthesized
  source 1..22: mol_type = other DNA
attcactcagttgcttttgtgg

SEQ ID NO: 127019 - DNA, 22 bp, synthetic construct
  misc_feature 1..22: note = chemically synthesized
  source 1..22: mol_type = other DNA
actcagttgcttttgtggtata

SEQ ID NO: 127020 - DNA, 22 bp, synthetic construct
  misc_feature 1..22: note = chemically synthesized
  source 1..22: mol_type = other DNA
agttgcttttgtggtatatgag

SEQ ID NO: 127021 - DNA, 22 bp, synthetic construct
  misc_feature 1..22: note = chemically synthesized
  source 1..22: mol_type = other DNA
cttttgtggtatatgagatgat

SEQ ID NO: 127022 - DNA, 22 bp, synthetic construct
  misc_feature 1..22: note = chemically synthesized
  source 1..22: mol_type = other DNA
ttgtggtatatgagatgatctg

SEQ ID NO: 127023 - DNA, 22 bp, synthetic construct
  misc_feature 1..22: note = chemically synthesized
  source 1..22: mol_type = other DNA
tgtggtatatgagatgatctgt

SEQ ID NO: 127024 - DNA, 22 bp, synthetic construct
  misc_feature 1..22: note = chemically synthesized
  source 1..22: mol_type = other DNA
gtggtatatgagatgatctgtg

SEQ ID NO: 127025 - DNA, 22 bp, synthetic construct
  misc_feature 1..22: note = chemically synthesized
  source 1..22: mol_type = other DNA
tggtatatgagatgatctgtga

SEQ ID NO: 127026 - DNA, 22 bp, synthetic construct
  misc_feature 1..22: note = chemically synthesized
  source 1..22: mol_type = other DNA
tgagtttcagaggggataaaaa

SEQ ID NO: 127027 - DNA, 22 bp, synthetic construct
  misc_feature 1..22: note = chemically synthesized
  source 1..22: mol_type = other DNA
cagaggggataaaaatctaaaa

SEQ ID NO: 127028 - DNA, 22 bp, synthetic construct
  misc_feature 1..22: note = chemically synthesized
  source 1..22: mol_type = other DNA
agaggggataaaaatctaaaac

SEQ ID NO: 127029 - DNA, 22 bp, synthetic construct
  misc_feature 1..22: note = chemically synthesized
  source 1..22: mol_type = other DNA
aaacctttgcctcatccctgca

SEQ ID NO: 127030 - DNA, 22 bp, synthetic construct
  misc_feature 1..22: note = chemically synthesized
  source 1..22: mol_type = other DNA
tgcctcatccctgcagccattc

SEQ ID NO: 127031 - DNA, 22 bp, synthetic construct
  misc_feature 1..22: note = chemically synthesized
  source 1..22: mol_type = other DNA
gcctcatccctgcagccattca

SEQ ID NO: 127032 - DNA, 22 bp, synthetic construct
  misc_feature 1..22: note = chemically synthesized
  source 1..22: mol_type = other DNA
cctcatccctgcagccattcac

SEQ ID NO: 127033 - DNA, 22 bp, synthetic construct
  misc_feature 1..22: note = chemically synthesized
  source 1..22: mol_type = other DNA
atccctgcagccattcaccctc

SEQ ID NO: 127034 - DNA, 22 bp, synthetic construct
  misc_feature 1..22: note = chemically synthesized
  source 1..22: mol_type = other DNA
cagccattcaccctcttccagg

SEQ ID NO: 127035 - DNA, 22 bp, synthetic construct
  misc_feature 1..22: note = chemically synthesized
  source 1..22: mol_type = other DNA
accctcttccagggtctctgtc

SEQ ID NO: 127036 - DNA, 22 bp, synthetic construct
  misc_feature 1..22: note = chemically synthesized
  source 1..22: mol_type = other DNA
ttccagggtctctgtcatagaa

SEQ ID NO: 127037 - DNA, 22 bp, synthetic construct
  misc_feature 1..22: note = chemically synthesized
  source 1..22: mol_type = other DNA
ccagggtctctgtcatagaata

SEQ ID NO: 127038 - DNA, 22 bp, synthetic construct
  misc_feature 1..22: note = chemically synthesized
  source 1..22: mol_type = other DNA
cagggtctctgtcatagaatag

SEQ ID NO: 127039 - DNA, 22 bp, synthetic construct
  misc_feature 1..22: note = chemically synthesized
  source 1..22: mol_type = other DNA
tgtcatagaatagacttgagtt

SEQ ID NO: 127040 - DNA, 22 bp, synthetic construct
  misc_feature 1..22: note = chemically synthesized
  source 1..22: mol_type = other DNA
tcatagaatagacttgagtttt

SEQ ID NO: 127041 - DNA, 22 bp, synthetic construct
  misc_feature 1..22: note = chemically synthesized
  source 1..22: mol_type = other DNA
gagtttttattaatgagaaact

SEQ ID NO: 127042 - DNA, 22 bp, synthetic construct
  misc_feature 1..22: note = chemically synthesized
  source 1..22: mol_type = other DNA
agtttttattaatgagaaacta

SEQ ID NO: 127043 - DNA, 22 bp, synthetic construct
  misc_feature 1..22: note = chemically synthesized
  source 1..22: mol_type = other DNA
ttattaatgagaaactaattct

SEQ ID NO: 127044 - DNA, 22 bp, synthetic construct
  misc_feature 1..22: note = chemically synthesized
  source 1..22: mol_type = other DNA
tattaatgagaaactaattctc

SEQ ID NO: 127045 - DNA, 22 bp, synthetic construct
  misc_feature 1..22: note = chemically synthesized
  source 1..22: mol_type = other DNA
attaatgagaaactaattctca

SEQ ID NO: 127046 - DNA, 22 bp, synthetic construct
  misc_feature 1..22: note = chemically synthesized
  source 1..22: mol_type = other DNA
ttaatgagaaactaattctcaa

SEQ ID NO: 127047 - DNA, 22 bp, synthetic construct
  misc_feature 1..22: note = chemically synthesized
  source 1..22: mol_type = other DNA
atgagaaactaattctcaaagt

SEQ ID NO: 127048 - DNA, 22 bp, synthetic construct
  misc_feature 1..22: note = chemically synthesized
  source 1..22: mol_type = other DNA
attctcaaagtctcaaactctg

SEQ ID NO: 127049 - DNA, 22 bp, synthetic construct
  misc_feature 1..22: note = chemically synthesized
  source 1..22: mol_type = other DNA
tcaaagtctcaaactctgccgc

SEQ ID NO: 127050 - DNA, 22 bp, synthetic construct
  misc_feature 1..22: note = chemically synthesized
  source 1..22: mol_type = other DNA
aaagtctcaaactctgccgcat

SEQ ID NO: 127051 - DNA, 22 bp, synthetic construct
  misc_feature 1..22: note = chemically synthesized
  source 1..22: mol_type = other DNA
aaactctgccgcataaactgat

SEQ ID NO: 127052 - DNA, 22 bp, synthetic construct
  misc_feature 1..22: note = chemically synthesized
  source 1..22: mol_type = other DNA
tgccgcataaactgatggctct

SEQ ID NO: 127053 - DNA, 22 bp, synthetic construct
  misc_feature 1..22: note = chemically synthesized
  source 1..22: mol_type = other DNA
ccgcataaactgatggctctat

SEQ ID NO: 127054 - DNA, 22 bp, synthetic construct
  misc_feature 1..22: note = chemically synthesized
  source 1..22: mol_type = other DNA
atggctctatgcagacacctca

SEQ ID NO: 127055 - DNA, 22 bp, synthetic construct
  misc_feature 1..22: note = chemically synthesized
  source 1..22: mol_type = other DNA
tatgcagacacctcagcaggag

SEQ ID NO: 127056 - DNA, 22 bp, synthetic construct
  misc_feature 1..22: note = chemically synthesized
  source 1..22: mol_type = other DNA
tgcagacacctcagcaggagcc

SEQ ID NO: 127057 - DNA, 22 bp, synthetic construct
  misc_feature 1..22: note = chemically synthesized
  source 1..22: mol_type = other DNA
agcaggagcccattcagatgtt

SEQ ID NO: 127058 - DNA, 22 bp, synthetic construct
  misc_feature 1..22: note = chemically synthesized
  source 1..22: mol_type = other DNA
agatgttaactttcatatattc

SEQ ID NO: 127059 - DNA, 22 bp, synthetic construct
  misc_feature 1..22: note = chemically synthesized
  source 1..22: mol_type = other DNA
actttcatatattctctcacct

SEQ ID NO: 127060 - DNA, 22 bp, synthetic construct
  misc_feature 1..22: note = chemically synthesized
  source 1..22: mol_type = other DNA
tcatatattctctcaccttccc

SEQ ID NO: 127061 - DNA, 22 bp, synthetic construct
  misc_feature 1..22: note = chemically synthesized
  source 1..22: mol_type = other DNA
catatattctctcaccttccct

SEQ ID NO: 127062 - DNA, 22 bp, synthetic construct
  misc_feature 1..22: note = chemically synthesized
  source 1..22: mol_type = other DNA
atatattctctcaccttccctt

SEQ ID NO: 127063 - DNA, 22 bp, synthetic construct
  misc_feature 1..22: note = chemically synthesized
  source 1..22: mol_type = other DNA
tctcaccttccctttggctttt

SEQ ID NO: 127064 - DNA, 22 bp, synthetic construct
  misc_feature 1..22: note = chemically synthesized
  source 1..22: mol_type = other DNA
tcaccttccctttggctttttt

SEQ ID NO: 127065 - DNA, 22 bp, synthetic construct
  misc_feature 1..22: note = chemically synthesized
  source 1..22: mol_type = other DNA
accttccctttggcttttttcc

SEQ ID NO: 127066 - DNA, 22 bp, synthetic construct
  misc_feature 1..22: note = chemically synthesized
  source 1..22: mol_type = other DNA
ccctttggcttttttccttcac

SEQ ID NO: 127067 - DNA, 22 bp, synthetic construct
  misc_feature 1..22: note = chemically synthesized
  source 1..22: mol_type = other DNA
cctttggcttttttccttcact

SEQ ID NO: 127068 - DNA, 22 bp, synthetic construct
  misc_feature 1..22: note = chemically synthesized
  source 1..22: mol_type = other DNA
tggcttttttccttcacttttc

SEQ ID NO: 127069 - DNA, 22 bp, synthetic construct
  misc_feature 1..22: note = chemically synthesized
  source 1..22: mol_type = other DNA
ggcttttttccttcacttttcc

SEQ ID NO: 127070 - DNA, 22 bp, synthetic construct
  misc_feature 1..22: note = chemically synthesized
  source 1..22: mol_type = other DNA
gcttttttccttcacttttcct

SEQ ID NO: 127071 - DNA, 22 bp, synthetic construct
  misc_feature 1..22: note = chemically synthesized
  source 1..22: mol_type = other DNA
ttttccttcacttttcctgaca

SEQ ID NO: 127072 - DNA, 22 bp, synthetic construct
  misc_feature 1..22: note = chemically synthesized
  source 1..22: mol_type = other DNA
tttccttcacttttcctgacac

SEQ ID NO: 127073 - DNA, 22 bp, synthetic construct
  misc_feature 1..22: note = chemically synthesized
  source 1..22: mol_type = other DNA
ttccttcacttttcctgacact

SEQ ID NO: 127074 - DNA, 22 bp, synthetic construct
  misc_feature 1..22: note = chemically synthesized
  source 1..22: mol_type = other DNA
tccttcacttttcctgacactc

SEQ ID NO: 127075 - DNA, 22 bp, synthetic construct
  misc_feature 1..22: note = chemically synthesized
  source 1..22: mol_type = other DNA
ccttcacttttcctgacactct

SEQ ID NO: 127076 - DNA, 22 bp, synthetic construct
  misc_feature 1..22: note = chemically synthesized
  source 1..22: mol_type = other DNA
cttcacttttcctgacactctt

SEQ ID NO: 127077 - DNA, 22 bp, synthetic construct
  misc_feature 1..22: note = chemically synthesized
  source 1..22: mol_type = other DNA
cacttttcctgacactcttttc

SEQ ID NO: 127078 - DNA, 22 bp, synthetic construct
  misc_feature 1..22: note = chemically synthesized
  source 1..22: mol_type = other DNA
acttttcctgacactcttttct

SEQ ID NO: 127079 - DNA, 22 bp, synthetic construct
  misc_feature 1..22: note = chemically synthesized
  source 1..22: mol_type = other DNA
ttcctgacactcttttctgtct

SEQ ID NO: 127080 - DNA, 22 bp, synthetic construct
  misc_feature 1..22: note = chemically synthesized
  source 1..22: mol_type = other DNA
tcctgacactcttttctgtctc

SEQ ID NO: 127081 - DNA, 22 bp, synthetic construct
  misc_feature 1..22: note = chemically synthesized
  source 1..22: mol_type = other DNA
cctgacactcttttctgtctca

SEQ ID NO: 127082 - DNA, 22 bp, synthetic construct
  misc_feature 1..22: note = chemically synthesized
  source 1..22: mol_type = other DNA
ctgacactcttttctgtctcaa

SEQ ID NO: 127083 - DNA, 22 bp, synthetic construct
  misc_feature 1..22: note = chemically synthesized
  source 1..22: mol_type = other DNA
acactcttttctgtctcaagca

SEQ ID NO: 127084 - DNA, 22 bp, synthetic construct
  misc_feature 1..22: note = chemically synthesized
  source 1..22: mol_type = other DNA
ttttctgtctcaagcacttagt

SEQ ID NO: 127085 - DNA, 22 bp, synthetic construct
  misc_feature 1..22: note = chemically synthesized
  source 1..22: mol_type = other DNA
ttctgtctcaagcacttagtat

SEQ ID NO: 127086 - DNA, 22 bp, synthetic construct
  misc_feature 1..22: note = chemically synthesized
  source 1..22: mol_type = other DNA
tctgtctcaagcacttagtatc

SEQ ID NO: 127087 - DNA, 22 bp, synthetic construct
  misc_feature 1..22: note = chemically synthesized
  source 1..22: mol_type = other DNA
ctgtctcaagcacttagtatct

SEQ ID NO: 127088 - DNA, 22 bp, synthetic construct
  misc_feature 1..22: note = chemically synthesized
  source 1..22: mol_type = other DNA
tgtctcaagcacttagtatctc

SEQ ID NO: 127089 - DNA, 22 bp, synthetic construct
  misc_feature 1..22: note = chemically synthesized
  source 1..22: mol_type = other DNA
tctcaagcacttagtatctcca

SEQ ID NO: 127090 - DNA, 22 bp, synthetic construct
  misc_feature 1..22: note = chemically synthesized
  source 1..22: mol_type = other DNA
aagcacttagtatctccatcct

SEQ ID NO: 127091 - DNA, 22 bp, synthetic construct
  misc_feature 1..22: note = chemically synthesized
  source 1..22: mol_type = other DNA
agtatctccatcctttttttac

SEQ ID NO: 127092 - DNA, 22 bp, synthetic construct
  misc_feature 1..22: note = chemically synthesized
  source 1..22: mol_type = other DNA
gtatctccatcctttttttacc

SEQ ID NO: 127093 - DNA, 22 bp, synthetic construct
  misc_feature 1..22: note = chemically synthesized
  source 1..22: mol_type = other DNA
catcctttttttacccccttac

SEQ ID NO: 127094 - DNA, 22 bp, synthetic construct
  misc_feature 1..22: note = chemically synthesized
  source 1..22: mol_type = other DNA
tttttacccccttacctttggc

SEQ ID NO: 127095 - DNA, 22 bp, synthetic construct
  misc_feature 1..22: note = chemically synthesized
  source 1..22: mol_type = other DNA
ttttacccccttacctttggct

SEQ ID NO: 127096 - DNA, 22 bp, synthetic construct
  misc_feature 1..22: note = chemically synthesized
  source 1..22: mol_type = other DNA
tttacccccttacctttggcta

SEQ ID NO: 127097 - DNA, 22 bp, synthetic construct
  misc_feature 1..22: note = chemically synthesized
  source 1..22: mol_type = other DNA
ttacccccttacctttggctat

SEQ ID NO: 127098 - DNA, 22 bp, synthetic construct
  misc_feature 1..22: note = chemically synthesized
  source 1..22: mol_type = other DNA
tacccccttacctttggctatt

SEQ ID NO: 127099 - DNA, 22 bp, synthetic construct
  misc_feature 1..22: note = chemically synthesized
  source 1..22: mol_type = other DNA
acccccttacctttggctatta

SEQ ID NO: 127100 - DNA, 22 bp, synthetic construct
  misc_feature 1..22: note = chemically synthesized
  source 1..22: mol_type = other DNA
cccccttacctttggctattat

SEQ ID NO: 127101 - DNA, 22 bp, synthetic construct
  misc_feature 1..22: note = chemically synthesized
  source 1..22: mol_type = other DNA
acctttggctattatcctttct

SEQ ID NO: 127102 - DNA, 22 bp, synthetic construct
  misc_feature 1..22: note = chemically synthesized
  source 1..22: mol_type = other DNA
cctttggctattatcctttctg

SEQ ID NO: 127103 - DNA, 22 bp, synthetic construct
  misc_feature 1..22: note = chemically synthesized
  source 1..22: mol_type = other DNA
tggctattatcctttctgtgat

SEQ ID NO: 127104 - DNA, 22 bp, synthetic construct
  misc_feature 1..22: note = chemically synthesized
  source 1..22: mol_type = other DNA
ggctattatcctttctgtgatg

SEQ ID NO: 127105 - DNA, 22 bp, synthetic construct
  misc_feature 1..22: note = chemically synthesized
  source 1..22: mol_type = other DNA
gctattatcctttctgtgatgg

SEQ ID NO: 127106 - DNA, 22 bp, synthetic construct
  misc_feature 1..22: note = chemically synthesized
  source 1..22: mol_type = other DNA
ttatcctttctgtgatggttaa

SEQ ID NO: 127107 - DNA, 22 bp, synthetic construct
  misc_feature 1..22: note = chemically synthesized
  source 1..22: mol_type = other DNA
tcctttctgtgatggttaatat

SEQ ID NO: 127108 - DNA, 22 bp, synthetic construct
  misc_feature 1..22: note = chemically synthesized
  source 1..22: mol_type = other DNA
tctgtgatggttaatattgagt

SEQ ID NO: 127109 - DNA, 22 bp, synthetic construct
  misc_feature 1..22: note = chemically synthesized
  source 1..22: mol_type = other DNA
ctgtgatggttaatattgagtg

SEQ ID NO: 127110 - DNA, 22 bp, synthetic construct
  misc_feature 1..22: note = chemically synthesized
  source 1..22: mol_type = other DNA
tgtgatggttaatattgagtgc

SEQ ID NO: 127111 - DNA, 22 bp, synthetic construct
  misc_feature 1..22: note = chemically synthesized
  source 1..22: mol_type = other DNA
tgatggttaatattgagtgcaa

SEQ ID NO: 127112 - DNA, 22 bp, synthetic construct
  misc_feature 1..22: note = chemically synthesized
  source 1..22: mol_type = other DNA
atattgagtgcaaacttgattg

SEQ ID NO: 127113 - DNA, 22 bp, synthetic construct
  misc_feature 1..22: note = chemically synthesized
  source 1..22: mol_type = other DNA
agtgcaaacttgattggattga

SEQ ID NO: 127114 - DNA, 22 bp, synthetic construct
  misc_feature 1..22: note = chemically synthesized
  source 1..22: mol_type = other DNA
gattggattgaaggatgcaaag

SEQ ID NO: 127115 - DNA, 22 bp, synthetic construct
  misc_feature 1..22: note = chemically synthesized
  source 1..22: mol_type = other DNA
attggattgaaggatgcaaagt

SEQ ID NO: 127116 - DNA, 22 bp, synthetic construct
  misc_feature 1..22: note = chemically synthesized
  source 1..22: mol_type = other DNA
gattgaaggatgcaaagtattg

SEQ ID NO: 127117 - DNA, 22 bp, synthetic construct
  misc_feature 1..22: note = chemically synthesized
  source 1..22: mol_type = other DNA
aaggatgcaaagtattgttcct

SEQ ID NO: 127118 - DNA, 22 bp, synthetic construct
  misc_feature 1..22: note = chemically synthesized
  source 1..22: mol_type = other DNA
ttcctgggtgtgctgtaagggt

SEQ ID NO: 127119 - DNA, 22 bp, synthetic construct
  misc_feature 1..22: note = chemically synthesized
  source 1..22: mol_type = other DNA
ctgggtgtgctgtaagggtgtt

SEQ ID NO: 127120 - DNA, 22 bp, synthetic construct
  misc_feature 1..22: note = chemically synthesized
  source 1..22: mol_type = other DNA
ggtgtgctgtaagggtgttgcc

SEQ ID NO: 127121 - DNA, 22 bp, synthetic construct
  misc_feature 1..22: note = chemically synthesized
  source 1..22: mol_type = other DNA
taagggtgttgccaaaggagat

SEQ ID NO: 127122 - DNA, 22 bp, synthetic construct
  misc_feature 1..22: note = chemically synthesized
  source 1..22: mol_type = other DNA
ccaaaggagattaacatttgag

SEQ ID NO: 127123 - DNA, 22 bp, synthetic construct
  misc_feature 1..22: note = chemically synthesized
  source 1..22: mol_type = other DNA
acatttgagtcagtagactggg

SEQ ID NO: 127124 - DNA, 22 bp, synthetic construct
  misc_feature 1..22: note = chemically synthesized
  source 1..22: mol_type = other DNA
gagtcagtagactgggagaggc

SEQ ID NO: 127125 - DNA, 22 bp, synthetic construct
  misc_feature 1..22: note = chemically synthesized
  source 1..22: mol_type = other DNA
agtcagtagactgggagaggca

SEQ ID NO: 127126 - DNA, 22 bp, synthetic construct
  misc_feature 1..22: note = chemically synthesized
  source 1..22: mol_type = other DNA
ggagaggcagacccacccaccc

SEQ ID NO: 127127 - DNA, 22 bp, synthetic construct
  misc_feature 1..22: note = chemically synthesized
  source 1..22: mol_type = other DNA
cgtctgggtgggtactatctaa

SEQ ID NO: 127128 - DNA, 22 bp, synthetic construct
  misc_feature 1..22: note = chemically synthesized
  source 1..22: mol_type = other DNA
ggtgggtactatctaatcagct

SEQ ID NO: 127129 - DNA, 22 bp, synthetic construct
  misc_feature 1..22: note = chemically synthesized
  source 1..22: mol_type = other DNA
tctaatcagctgccagggcggc

SEQ ID NO: 127130 - DNA, 22 bp, synthetic construct
  misc_feature 1..22: note = chemically synthesized
  source 1..22: mol_type = other DNA
atcagctgccagggcggctaga

SEQ ID NO: 127131 - DNA, 22 bp, synthetic construct
  misc_feature 1..22: note = chemically synthesized
  source 1..22: mol_type = other DNA
ccagggcggctagaagaaagca

SEQ ID NO: 127132 - DNA, 22 bp, synthetic construct
  misc_feature 1..22: note = chemically synthesized
  source 1..22: mol_type = other DNA
gaagaaagcaggcaaaagaaga

SEQ ID NO: 127133 - DNA, 22 bp, synthetic construct
  misc_feature 1..22: note = chemically synthesized
  source 1..22: mol_type = other DNA
ttacacaatataaacctttcca

SEQ ID NO: 127134 - DNA, 22 bp, synthetic construct
  misc_feature 1..22: note = chemically synthesized
  source 1..22: mol_type = other DNA
cacaatataaacctttccaggt

SEQ ID NO: 127135 - DNA, 22 bp, synthetic construct
  misc_feature 1..22: note = chemically synthesized
  source 1..22: mol_type = other DNA
tccaggtgctaaagtcacacag

SEQ ID NO: 127136 - DNA, 22 bp, synthetic construct
  misc_feature 1..22: note = chemically synthesized
  source 1..22: mol_type = other DNA
ccaggtgctaaagtcacacagg

SEQ ID NO: 127137 - DNA, 22 bp, synthetic construct
  misc_feature 1..22: note = chemically synthesized
  source 1..22: mol_type = other DNA
caggtgctaaagtcacacaggc

SEQ ID NO: 127138 - DNA, 22 bp, synthetic construct
  misc_feature 1..22: note = chemically synthesized
  source 1..22: mol_type = other DNA
aagtcacacaggctatgtgaat

SEQ ID NO: 127139 - DNA, 22 bp, synthetic construct
  misc_feature 1..22: note = chemically synthesized
  source 1..22: mol_type = other DNA
tgtgaatctgtacccctgatcc

SEQ ID NO: 127140 - DNA, 22 bp, synthetic construct
  misc_feature 1..22: note = chemically synthesized
  source 1..22: mol_type = other DNA
tacccctgatccagaggcacac

SEQ ID NO: 127141 - DNA, 22 bp, synthetic construct
  misc_feature 1..22: note = chemically synthesized
  source 1..22: mol_type = other DNA
atccagaggcacacataaccca

SEQ ID NO: 127142 - DNA, 22 bp, synthetic construct
  misc_feature 1..22: note = chemically synthesized
  source 1..22: mol_type = other DNA
cgtccaagcttaattttgaatt

SEQ ID NO: 127143 - DNA, 22 bp, synthetic construct
  misc_feature 1..22: note = chemically synthesized
  source 1..22: mol_type = other DNA
aattttgaattggtttattagt

SEQ ID NO: 127144 - DNA, 22 bp, synthetic construct
  misc_feature 1..22: note = chemically synthesized
  source 1..22: mol_type = other DNA
attttgaattggtttattagtc

SEQ ID NO: 127145 - DNA, 22 bp, synthetic construct
  misc_feature 1..22: note = chemically synthesized
  source 1..22: mol_type = other DNA
tgaattggtttattagtcatat

SEQ ID NO: 127146 - DNA, 22 bp, synthetic construct
  misc_feature 1..22: note = chemically synthesized
  source 1..22: mol_type = other DNA
gaattggtttattagtcatatg

SEQ ID NO: 127147 - DNA, 22 bp, synthetic construct
  misc_feature 1..22: note = chemically synthesized
  source 1..22: mol_type = other DNA
aattggtttattagtcatatgg

SEQ ID NO: 127148 - DNA, 22 bp, synthetic construct
  misc_feature 1..22: note = chemically synthesized
  source 1..22: mol_type = other DNA
gtttattagtcatatggtcaga

SEQ ID NO: 127149 - DNA, 22 bp, synthetic construct
  misc_feature 1..22: note = chemically synthesized
  source 1..22: mol_type = other DNA
attagtcatatggtcagatagt

SEQ ID NO: 127150 - DNA, 22 bp, synthetic construct
  misc_feature 1..22: note = chemically synthesized
  source 1..22: mol_type = other DNA
ttagtcatatggtcagatagtg

SEQ ID NO: 127151 - DNA, 22 bp, synthetic construct
  misc_feature 1..22: note = chemically synthesized
  source 1..22: mol_type = other DNA
gtcatatggtcagatagtgact

SEQ ID NO: 127152 - DNA, 22 bp, synthetic construct
  misc_feature 1..22: note = chemically synthesized
  source 1..22: mol_type = other DNA
tttttctagaaagtatttgaac

SEQ ID NO: 127153 - DNA, 22 bp, synthetic construct
  misc_feature 1..22: note = chemically synthesized
  source 1..22: mol_type = other DNA
ttttctagaaagtatttgaacc

SEQ ID NO: 127154 - DNA, 22 bp, synthetic construct
  misc_feature 1..22: note = chemically synthesized
  source 1..22: mol_type = other DNA
tttctagaaagtatttgaacct

SEQ ID NO: 127155 - DNA, 22 bp, synthetic construct
  misc_feature 1..22: note = chemically synthesized
  source 1..22: mol_type = other DNA
ttctagaaagtatttgaacctc

SEQ ID NO: 127156 - DNA, 22 bp, synthetic construct
  misc_feature 1..22: note = chemically synthesized
  source 1..22: mol_type = other DNA
tctagaaagtatttgaacctct

SEQ ID NO: 127157 - DNA, 22 bp, synthetic construct
  misc_feature 1..22: note = chemically synthesized
  source 1..22: mol_type = other DNA
ctagaaagtatttgaacctctg

SEQ ID NO: 127158 - DNA, 22 bp, synthetic construct
  misc_feature 1..22: note = chemically synthesized
  source 1..22: mol_type = other DNA
tagaaagtatttgaacctctga

SEQ ID NO: 127159 - DNA, 22 bp, synthetic construct
  misc_feature 1..22: note = chemically synthesized
  source 1..22: mol_type = other DNA
gaaagtatttgaacctctgatg

SEQ ID NO: 127160 - DNA, 22 bp, synthetic construct
  misc_feature 1..22: note = chemically synthesized
  source 1..22: mol_type = other DNA
gaacctctgatgattacagagg

SEQ ID NO: 127161 - DNA, 22 bp, synthetic construct
  misc_feature 1..22: note = chemically synthesized
  source 1..22: mol_type = other DNA
aacctctgatgattacagaggt

SEQ ID NO: 127162 - DNA, 22 bp, synthetic construct
  misc_feature 1..22: note = chemically synthesized
  source 1..22: mol_type = other DNA
tgatgattacagaggtatacct

SEQ ID NO: 127163 - DNA, 22 bp, synthetic construct
  misc_feature 1..22: note = chemically synthesized
  source 1..22: mol_type = other DNA
atgattacagaggtatacctcc

SEQ ID NO: 127164 - DNA, 22 bp, synthetic construct
  misc_feature 1..22: note = chemically synthesized
  source 1..22: mol_type = other DNA
cagaggtatacctcctcaagaa

SEQ ID NO: 127165 - DNA, 22 bp, synthetic construct
  misc_feature 1..22: note = chemically synthesized
  source 1..22: mol_type = other DNA
ctcaagaatttggaagagttga

SEQ ID NO: 127166 - DNA, 22 bp, synthetic construct
  misc_feature 1..22: note = chemically synthesized
  source 1..22: mol_type = other DNA
aagaatttggaagagttgattc

SEQ ID NO: 127167 - DNA, 22 bp, synthetic construct
  misc_feature 1..22: note = chemically synthesized
  source 1..22: mol_type = other DNA
ggaagagttgattctatatttg

SEQ ID NO: 127168 - DNA, 22 bp, synthetic construct
  misc_feature 1..22: note = chemically synthesized
  source 1..22: mol_type = other DNA
gaagagttgattctatatttgg

SEQ ID NO: 127169 - DNA, 22 bp, synthetic construct
  misc_feature 1..22: note = chemically synthesized
  source 1..22: mol_type = other DNA
attctatatttggcacttatct

SEQ ID NO: 127170 - DNA, 22 bp, synthetic construct
  misc_feature 1..22: note = chemically synthesized
  source 1..22: mol_type = other DNA
tatatttggcacttatctggac

SEQ ID NO: 127171 - DNA, 22 bp, synthetic construct
  misc_feature 1..22: note = chemically synthesized
  source 1..22: mol_type = other DNA
tatttggcacttatctggactt

SEQ ID NO: 127172 - DNA, 22 bp, synthetic construct
  misc_feature 1..22: note = chemically synthesized
  source 1..22: mol_type = other DNA
ggcacttatctggacttctaag

SEQ ID NO: 127173 - DNA, 22 bp, synthetic construct
  misc_feature 1..22: note = chemically synthesized
  source 1..22: mol_type = other DNA
gcacttatctggacttctaagg

SEQ ID NO: 127174 - DNA, 22 bp, synthetic construct
  misc_feature 1..22: note = chemically synthesized
  source 1..22: mol_type = other DNA
atctggacttctaaggtaaaag

SEQ ID NO: 127175 - DNA, 22 bp, synthetic construct
  misc_feature 1..22: note = chemically synthesized
  source 1..22: mol_type = other DNA
tctggacttctaaggtaaaaga

SEQ ID NO: 127176 - DNA, 22 bp, synthetic construct
  misc_feature 1..22: note = chemically synthesized
  source 1..22: mol_type = other DNA
gacttctaaggtaaaagacatg

SEQ ID NO: 127177 - DNA, 22 bp, synthetic construct
  misc_feature 1..22: note = chemically synthesized
  source 1..22: mol_type = other DNA
ctaaggtaaaagacatggggtt

SEQ ID NO: 127178 - DNA, 22 bp, synthetic construct
  misc_feature 1..22: note = chemically synthesized
  source 1..22: mol_type = other DNA
taaggtaaaagacatggggttg

SEQ ID NO: 127179 - DNA, 22 bp, synthetic construct
  misc_feature 1..22: note = chemically synthesized
  source 1..22: mol_type = other DNA
aggtaaaagacatggggttggg

SEQ ID NO: 127180 - DNA, 22 bp, synthetic construct
  misc_feature 1..22: note = chemically synthesized
  source 1..22: mol_type = other DNA
ggggcagggggactctcagggt

SEQ ID NO: 127181 - DNA, 22 bp, synthetic construct
  misc_feature 1..22: note = chemically synthesized
  source 1..22: mol_type = other DNA
tcagggttagaatggaagccag

SEQ ID NO: 127182 - DNA, 22 bp, synthetic construct
  misc_feature 1..22: note = chemically synthesized
  source 1..22: mol_type = other DNA
agggttagaatggaagccagag

SEQ ID NO: 127183 - DNA, 22 bp, synthetic construct
  misc_feature 1..22: note = chemically synthesized
  source 1..22: mol_type = other DNA
gaatggaagccagagagattaa

SEQ ID NO: 127184 - DNA, 22 bp, synthetic construct
  misc_feature 1..22: note = chemically synthesized
  source 1..22: mol_type = other DNA
aagaatcagtcaggtggagaga

SEQ ID NO: 127185 - DNA, 22 bp, synthetic construct
  misc_feature 1..22: note = chemically synthesized
  source 1..22: mol_type = other DNA
ctacaaccccataattcatgcc

SEQ ID NO: 127186 - DNA, 22 bp, synthetic construct
  misc_feature 1..22: note = chemically synthesized
  source 1..22: mol_type = other DNA
caaccccataattcatgcctga

SEQ ID NO: 127187 - DNA, 22 bp, synthetic construct
  misc_feature 1..22: note = chemically synthesized
  source 1..22: mol_type = other DNA
atgcctgagtcaacacccatgc

SEQ ID NO: 127188 - DNA, 22 bp, synthetic construct
  misc_feature 1..22: note = chemically synthesized
  source 1..22: mol_type = other DNA
agtcaacacccatgctctggtt

SEQ ID NO: 127189 - DNA, 22 bp, synthetic construct
  misc_feature 1..22: note = chemically synthesized
  source 1..22: mol_type = other DNA
tggtttgttcgtagaattgttt

SEQ ID NO: 127190 - DNA, 22 bp, synthetic construct
  misc_feature 1..22: note = chemically synthesized
  source 1..22: mol_type = other DNA
gtttgttcgtagaattgtttgc

SEQ ID NO: 127191 - DNA, 22 bp, synthetic construct
  misc_feature 1..22: note = chemically synthesized
  source 1..22: mol_type = other DNA
gttcgtagaattgtttgcctta

SEQ ID NO: 127192 - DNA, 22 bp, synthetic construct
  misc_feature 1..22: note = chemically synthesized
  source 1..22: mol_type = other DNA
ttcgtagaattgtttgccttat

SEQ ID NO: 127193 - DNA, 22 bp, synthetic construct
  misc_feature 1..22: note = chemically synthesized
  source 1..22: mol_type = other DNA
gtagaattgtttgccttatgtg

SEQ ID NO: 127194 - DNA, 22 bp, synthetic construct
  misc_feature 1..22: note = chemically synthesized
  source 1..22: mol_type = other DNA
tttgccttatgtgttccagaat

SEQ ID NO: 127195 - DNA, 22 bp, synthetic construct
  misc_feature 1..22: note = chemically synthesized
  source 1..22: mol_type = other DNA
gccttatgtgttccagaatcta

SEQ ID NO: 127196 - DNA, 22 bp, synthetic construct
  misc_feature 1..22: note = chemically synthesized
  source 1..22: mol_type = other DNA
ccttatgtgttccagaatctat

SEQ ID NO: 127197 - DNA, 22 bp, synthetic construct
  misc_feature 1..22: note = chemically synthesized
  source 1..22: mol_type = other DNA
atgtgttccagaatctatcctt

SEQ ID NO: 127198 - DNA, 22 bp, synthetic construct
  misc_feature 1..22: note = chemically synthesized
  source 1..22: mol_type = other DNA
tgtgttccagaatctatccttc

SEQ ID NO: 127199 - DNA, 22 bp, synthetic construct
  misc_feature 1..22: note = chemically synthesized
  source 1..22: mol_type = other DNA
cagaatctatccttcacttttt

SEQ ID NO: 127200 - DNA, 22 bp, synthetic construct
  misc_feature 1..22: note = chemically synthesized
  source 1..22: mol_type = other DNA
tccttcacttttttatatttga

SEQ ID NO: 127201 - DNA, 22 bp, synthetic construct
  misc_feature 1..22: note = chemically synthesized
  source 1..22: mol_type = other DNA
cacttttttatatttgaagagg

SEQ ID NO: 127202 - DNA, 22 bp, synthetic construct
  misc_feature 1..22: note = chemically synthesized
  source 1..22: mol_type = other DNA
acttttttatatttgaagaggt

SEQ ID NO: 127203 - DNA, 22 bp, synthetic construct
  misc_feature 1..22: note = chemically synthesized
  source 1..22: mol_type = other DNA
ttttatatttgaagaggtaact

SEQ ID NO: 127204 - DNA, 22 bp, synthetic construct
  misc_feature 1..22: note = chemically synthesized
  source 1..22: mol_type = other DNA
tttatatttgaagaggtaactc

SEQ ID NO: 127205 - DNA, 22 bp, synthetic construct
  misc_feature 1..22: note = chemically synthesized
  source 1..22: mol_type = other DNA
ttatatttgaagaggtaactct

SEQ ID NO: 127206 - DNA, 22 bp, synthetic construct
  misc_feature 1..22: note = chemically synthesized
  source 1..22: mol_type = other DNA
tatatttgaagaggtaactctc

SEQ ID NO: 127207 - DNA, 22 bp, synthetic construct
  misc_feature 1..22: note = chemically synthesized
  source 1..22: mol_type = other DNA
atatttgaagaggtaactctca

SEQ ID NO: 127208 - DNA, 22 bp, synthetic construct
  misc_feature 1..22: note = chemically synthesized
  source 1..22: mol_type = other DNA
tatttgaagaggtaactctcaa

SEQ ID NO: 127209 - DNA, 22 bp, synthetic construct
  misc_feature 1..22: note = chemically synthesized
  source 1..22: mol_type = other DNA
gaagaggtaactctcaaagaaa

SEQ ID NO: 127210 - DNA, 22 bp, synthetic construct
  misc_feature 1..22: note = chemically synthesized
  source 1..22: mol_type = other DNA
aagaggtaactctcaaagaaac

SEQ ID NO: 127211 - DNA, 22 bp, synthetic construct
  misc_feature 1..22: note = chemically synthesized
  source 1..22: mol_type = other DNA
tcaaagaaaccaagttttagag

SEQ ID NO: 127212 - DNA, 22 bp, synthetic construct
  misc_feature 1..22: note = chemically synthesized
  source 1..22: mol_type = other DNA
aaagaaaccaagttttagagat

SEQ ID NO: 127213 - DNA, 22 bp, synthetic construct
  misc_feature 1..22: note = chemically synthesized
  source 1..22: mol_type = other DNA
tagagatgtcagggagtcttta

SEQ ID NO: 127214 - DNA, 22 bp, synthetic construct
  misc_feature 1..22: note = chemically synthesized
  source 1..22: mol_type = other DNA
agagatgtcagggagtctttag

SEQ ID NO: 127215 - DNA, 22 bp, synthetic construct
  misc_feature 1..22: note = chemically synthesized
  source 1..22: mol_type = other DNA
gagatgtcagggagtctttagg

SEQ ID NO: 127216 - DNA, 22 bp, synthetic construct
  misc_feature 1..22: note = chemically synthesized
  source 1..22: mol_type = other DNA
taggacccatgcctactacata

SEQ ID NO: 127217 - DNA, 22 bp, synthetic construct
  misc_feature 1..22: note = chemically synthesized
  source 1..22: mol_type = other DNA
aggacccatgcctactacatat

SEQ ID NO: 127218 - DNA, 22 bp, synthetic construct
  misc_feature 1..22: note = chemically synthesized
  source 1..22: mol_type = other DNA
ggacccatgcctactacatata

SEQ ID NO: 127219 - DNA, 22 bp, synthetic construct
  misc_feature 1..22: note = chemically synthesized
  source 1..22: mol_type = other DNA
ctacatatatctactcttagca

SEQ ID NO: 127220 - DNA, 22 bp, synthetic construct
  misc_feature 1..22: note = chemically synthesized
  source 1..22: mol_type = other DNA
catatatctactcttagcagac

SEQ ID NO: 127221 - DNA, 22 bp, synthetic construct
  misc_feature 1..22: note = chemically synthesized
  source 1..22: mol_type = other DNA
ctcttagcagacaacactatta

SEQ ID NO: 127222 - DNA, 22 bp, synthetic construct
  misc_feature 1..22: note = chemically synthesized
  source 1..22: mol_type = other DNA
ttagcagacaacactattactt

SEQ ID NO: 127223 - DNA, 22 bp, synthetic construct
  misc_feature 1..22: note = chemically synthesized
  source 1..22: mol_type = other DNA
agcagacaacactattactttt

SEQ ID NO: 127224 - DNA, 22 bp, synthetic construct
  misc_feature 1..22: note = chemically synthesized
  source 1..22: mol_type = other DNA
gcagacaacactattacttttc

SEQ ID NO: 127225 - DNA, 22 bp, synthetic construct
  misc_feature 1..22: note = chemically synthesized
  source 1..22: mol_type = other DNA
ttacttttctcttgctaagaaa

SEQ ID NO: 127226 - DNA, 22 bp, synthetic construct
  misc_feature 1..22: note = chemically synthesized
  source 1..22: mol_type = other DNA
cttttctcttgctaagaaatca

SEQ ID NO: 127227 - DNA, 22 bp, synthetic construct
  misc_feature 1..22: note = chemically synthesized
  source 1..22: mol_type = other DNA
ttctcttgctaagaaatcagct

SEQ ID NO: 127228 - DNA, 22 bp, synthetic construct
  misc_feature 1..22: note = chemically synthesized
  source 1..22: mol_type = other DNA
tctcttgctaagaaatcagctt

SEQ ID NO: 127229 - DNA, 22 bp, synthetic construct
  misc_feature 1..22: note = chemically synthesized
  source 1..22: mol_type = other DNA
ctcttgctaagaaatcagcttc

SEQ ID NO: 127230 - DNA, 22 bp, synthetic construct
  misc_feature 1..22: note = chemically synthesized
  source 1..22: mol_type = other DNA
tcttgctaagaaatcagcttcg

SEQ ID NO: 127231 - DNA, 22 bp, synthetic construct
  misc_feature 1..22: note = chemically synthesized
  source 1..22: mol_type = other DNA
ttgctaagaaatcagcttcgat

SEQ ID NO: 127232 - DNA, 22 bp, synthetic construct
  misc_feature 1..22: note = chemically synthesized
  source 1..22: mol_type = other DNA
gctaagaaatcagcttcgatct

SEQ ID NO: 127233 - DNA, 22 bp, synthetic construct
  misc_feature 1..22: note = chemically synthesized
  source 1..22: mol_type = other DNA
ctaagaaatcagcttcgatctc

SEQ ID NO: 127234 - DNA, 22 bp, synthetic construct
  misc_feature 1..22: note = chemically synthesized
  source 1..22: mol_type = other DNA
agaaatcagcttcgatctctct

SEQ ID NO: 127235 - DNA, 22 bp, synthetic construct
  misc_feature 1..22: note = chemically synthesized
  source 1..22: mol_type = other DNA
cgatctctctgttttttttttg

SEQ ID NO: 127236 - DNA, 22 bp, synthetic construct
  misc_feature 1..22: note = chemically synthesized
  source 1..22: mol_type = other DNA
gatctctctgttttttttttgc

SEQ ID NO: 127237 - DNA, 22 bp, synthetic construct
  misc_feature 1..22: note = chemically synthesized
  source 1..22: mol_type = other DNA
tctgttttttttttgccttggt

SEQ ID NO: 127238 - DNA, 22 bp, synthetic construct
  misc_feature 1..22: note = chemically synthesized
  source 1..22: mol_type = other DNA
tgttttttttttgccttggttc

SEQ ID NO: 127239 - DNA, 22 bp, synthetic construct
  misc_feature 1..22: note = chemically synthesized
  source 1..22: mol_type = other DNA
ttttttttttgccttggttcct

SEQ ID NO: 127240 - DNA, 22 bp, synthetic construct
  misc_feature 1..22: note = chemically synthesized
  source 1..22: mol_type = other DNA
tttttttgccttggttcctgca

SEQ ID NO: 127241 - DNA, 22 bp, synthetic construct
  misc_feature 1..22: note = chemically synthesized
  source 1..22: mol_type = other DNA
ttttttgccttggttcctgcaa

SEQ ID NO: 127242 - DNA, 22 bp, synthetic construct
  misc_feature 1..22: note = chemically synthesized
  source 1..22: mol_type = other DNA
tttttgccttggttcctgcaat

SEQ ID NO: 127243 - DNA, 22 bp, synthetic construct
  misc_feature 1..22: note = chemically synthesized
  source 1..22: mol_type = other DNA
ttttgccttggttcctgcaatg

SEQ ID NO: 127244 - DNA, 22 bp, synthetic construct
  misc_feature 1..22: note = chemically synthesized
  source 1..22: mol_type = other DNA
tttgccttggttcctgcaatga

SEQ ID NO: 127245 - DNA, 22 bp, synthetic construct
  misc_feature 1..22: note = chemically synthesized
  source 1..22: mol_type = other DNA
ttgccttggttcctgcaatgag

SEQ ID NO: 127246 - DNA, 22 bp, synthetic construct
  misc_feature 1..22: note = chemically synthesized
  source 1..22: mol_type = other DNA
tgccttggttcctgcaatgaga

SEQ ID NO: 127247 - DNA, 22 bp, synthetic construct
  misc_feature 1..22: note = chemically synthesized
  source 1..22: mol_type = other DNA
gccttggttcctgcaatgagat

SEQ ID NO: 127248 - DNA, 22 bp, synthetic construct
  misc_feature 1..22: note = chemically synthesized
  source 1..22: mol_type = other DNA
ccttggttcctgcaatgagatc

SEQ ID NO: 127249 - DNA, 22 bp, synthetic construct
  misc_feature 1..22: note = chemically synthesized
  source 1..22: mol_type = other DNA
ggttcctgcaatgagatcttac

SEQ ID NO: 127250 - DNA, 22 bp, synthetic construct
  misc_feature 1..22: note = chemically synthesized
  source 1..22: mol_type = other DNA
gttcctgcaatgagatcttaca

SEQ ID NO: 127251 - DNA, 22 bp, synthetic construct
  misc_feature 1..22: note = chemically synthesized
  source 1..22: mol_type = other DNA
ctgcaatgagatcttacagagg

SEQ ID NO: 127252 - DNA, 22 bp, synthetic construct
  misc_feature 1..22: note = chemically synthesized
  source 1..22: mol_type = other DNA
caatgagatcttacagaggaga

SEQ ID NO: 127253 - DNA, 22 bp, synthetic construct
  misc_feature 1..22: note = chemically synthesized
  source 1..22: mol_type = other DNA
acagaggagattcattaaatac

SEQ ID NO: 127254 - DNA, 22 bp, synthetic construct
  misc_feature 1..22: note = chemically synthesized
  source 1..22: mol_type = other DNA
cagaggagattcattaaatacc

SEQ ID NO: 127255 - DNA, 22 bp, synthetic construct
  misc_feature 1..22: note = chemically synthesized
  source 1..22: mol_type = other DNA
attaaataccctcactgacctg

SEQ ID NO: 127256 - DNA, 22 bp, synthetic construct
  misc_feature 1..22: note = chemically synthesized
  source 1..22: mol_type = other DNA
aataccctcactgacctgaaac

SEQ ID NO: 127257 - DNA, 22 bp, synthetic construct
  misc_feature 1..22: note = chemically synthesized
  source 1..22: mol_type = other DNA
actgacctgaaactttgttccc

SEQ ID NO: 127258 - DNA, 22 bp, synthetic construct
  misc_feature 1..22: note = chemically synthesized
  source 1..22: mol_type = other DNA
acctgaaactttgttcccttcc

SEQ ID NO: 127259 - DNA, 22 bp, synthetic construct
  misc_feature 1..22: note = chemically synthesized
  source 1..22: mol_type = other DNA
aaactttgttcccttccattct

SEQ ID NO: 127260 - DNA, 22 bp, synthetic construct
  misc_feature 1..22: note = chemically synthesized
  source 1..22: mol_type = other DNA
tgttcccttccattcttcagtt

SEQ ID NO: 127261 - DNA, 22 bp, synthetic construct
  misc_feature 1..22: note = chemically synthesized
  source 1..22: mol_type = other DNA
gttcccttccattcttcagttc

SEQ ID NO: 127262 - DNA, 22 bp, synthetic construct
  misc_feature 1..22: note = chemically synthesized
  source 1..22: mol_type = other DNA
ttcccttccattcttcagttcc

SEQ ID NO: 127263 - DNA, 22 bp, synthetic construct
  misc_feature 1..22: note = chemically synthesized
  source 1..22: mol_type = other DNA
ccttccattcttcagttccata

SEQ ID NO: 127264 - DNA, 22 bp, synthetic construct
  misc_feature 1..22: note = chemically synthesized
  source 1..22: mol_type = other DNA
ccattcttcagttccatagtca

SEQ ID NO: 127265 - DNA, 22 bp, synthetic construct
  misc_feature 1..22: note = chemically synthesized
  source 1..22: mol_type = other DNA
cattcttcagttccatagtcat

SEQ ID NO: 127266 - DNA, 22 bp, synthetic construct
  misc_feature 1..22: note = chemically synthesized
  source 1..22: mol_type = other DNA
ttcagttccatagtcatgtatc

SEQ ID NO: 127267 - DNA, 22 bp, synthetic construct
  misc_feature 1..22: note = chemically synthesized
  source 1..22: mol_type = other DNA
cagttccatagtcatgtatctc

SEQ ID NO: 127268 - DNA, 22 bp, synthetic construct
  misc_feature 1..22: note = chemically synthesized
  source 1..22: mol_type = other DNA
agttccatagtcatgtatctca

SEQ ID NO: 127269 - DNA, 22 bp, synthetic construct
  misc_feature 1..22: note = chemically synthesized
  source 1..22: mol_type = other DNA
catagtcatgtatctcacatct

SEQ ID NO: 127270 - DNA, 22 bp, synthetic construct
  misc_feature 1..22: note = chemically synthesized
  source 1..22: mol_type = other DNA
acatctttagccgtatgaaaga

SEQ ID NO: 127271 - DNA, 22 bp, synthetic construct
  misc_feature 1..22: note = chemically synthesized
  source 1..22: mol_type = other DNA
tagccgtatgaaagatttgggc

SEQ ID NO: 127272 - DNA, 22 bp, synthetic construct
  misc_feature 1..22: note = chemically synthesized
  source 1..22: mol_type = other DNA
agccgtatgaaagatttgggca

SEQ ID NO: 127273 - DNA, 22 bp, synthetic construct
  misc_feature 1..22: note = chemically synthesized
  source 1..22: mol_type = other DNA
gccgtatgaaagatttgggcat

SEQ ID NO: 127274 - DNA, 22 bp, synthetic construct
  misc_feature 1..22: note = chemically synthesized
  source 1..22: mol_type = other DNA
gggcatcatcttttcagaatct

SEQ ID NO: 127275 - DNA, 22 bp, synthetic construct
  misc_feature 1..22: note = chemically synthesized
  source 1..22: mol_type = other DNA
ggcatcatcttttcagaatctg

SEQ ID NO: 127276 - DNA, 22 bp, synthetic construct
  misc_feature 1..22: note = chemically synthesized
  source 1..22: mol_type = other DNA
ttcagaatctgcacatgagcct

SEQ ID NO: 127277 - DNA, 22 bp, synthetic construct
  misc_feature 1..22: note = chemically synthesized
  source 1..22: mol_type = other DNA
tcagaatctgcacatgagcctg

SEQ ID NO: 127278 - DNA, 22 bp, synthetic construct
  misc_feature 1..22: note = chemically synthesized
  source 1..22: mol_type = other DNA
cagaatctgcacatgagcctgg

SEQ ID NO: 127279 - DNA, 22 bp, synthetic construct
  misc_feature 1..22: note = chemically synthesized
  source 1..22: mol_type = other DNA
agaatctgcacatgagcctggc

SEQ ID NO: 127280 - DNA, 22 bp, synthetic construct
  misc_feature 1..22: note = chemically synthesized
  source 1..22: mol_type = other DNA
cacatgagcctggctggtagga

SEQ ID NO: 127281 - DNA, 22 bp, synthetic construct
  misc_feature 1..22: note = chemically synthesized
  source 1..22: mol_type = other DNA
gctggtaggaacatttatttta

SEQ ID NO: 127282 - DNA, 22 bp, synthetic construct
  misc_feature 1..22: note = chemically synthesized
  source 1..22: mol_type = other DNA
gtaggaacatttattttagaag

SEQ ID NO: 127283 - DNA, 22 bp, synthetic construct
  misc_feature 1..22: note = chemically synthesized
  source 1..22: mol_type = other DNA
attttagaagctcctccccaga

SEQ ID NO: 127284 - DNA, 22 bp, synthetic construct
  misc_feature 1..22: note = chemically synthesized
  source 1..22: mol_type = other DNA
ttttagaagctcctccccagag

SEQ ID NO: 127285 - DNA, 22 bp, synthetic construct
  misc_feature 1..22: note = chemically synthesized
  source 1..22: mol_type = other DNA
tagaagctcctccccagagacc

SEQ ID NO: 127286 - DNA, 22 bp, synthetic construct
  misc_feature 1..22: note = chemically synthesized
  source 1..22: mol_type = other DNA
agaagctcctccccagagacca

SEQ ID NO: 127287 - DNA, 22 bp, synthetic construct
  misc_feature 1..22: note = chemically synthesized
  source 1..22: mol_type = other DNA
gaagctcctccccagagaccat

SEQ ID NO: 127288 - DNA, 22 bp, synthetic construct
  misc_feature 1..22: note = chemically synthesized
  source 1..22: mol_type = other DNA
ctccccagagaccattcctgat

SEQ ID NO: 127289 - DNA, 22 bp, synthetic construct
  misc_feature 1..22: note = chemically synthesized
  source 1..22: mol_type = other DNA
cccagagaccattcctgattta

SEQ ID NO: 127290 - DNA, 22 bp, synthetic construct
  misc_feature 1..22: note = chemically synthesized
  source 1..22: mol_type = other DNA
ctgatttagataattattgttc

SEQ ID NO: 127291 - DNA, 22 bp, synthetic construct
  misc_feature 1..22: note = chemically synthesized
  source 1..22: mol_type = other DNA
atttagataattattgttcttc

SEQ ID NO: 127292 - DNA, 22 bp, synthetic construct
  misc_feature 1..22: note = chemically synthesized
  source 1..22: mol_type = other DNA
agataattattgttcttccctc

SEQ ID NO: 127293 - DNA, 22 bp, synthetic construct
  misc_feature 1..22: note = chemically synthesized
  source 1..22: mol_type = other DNA
gataattattgttcttccctcc

SEQ ID NO: 127294 - DNA, 22 bp, synthetic construct
  misc_feature 1..22: note = chemically synthesized
  source 1..22: mol_type = other DNA
ttgttcttccctccctccctct

SEQ ID NO: 127295 - DNA, 22 bp, synthetic construct
  misc_feature 1..22: note = chemically synthesized
  source 1..22: mol_type = other DNA
ttcttccctccctccctcttct

SEQ ID NO: 127296 - DNA, 22 bp, synthetic construct
  misc_feature 1..22: note = chemically synthesized
  source 1..22: mol_type = other DNA
ttccctccctccctcttctgct

SEQ ID NO: 127297 - DNA, 22 bp, synthetic construct
  misc_feature 1..22: note = chemically synthesized
  source 1..22: mol_type = other DNA
ccctccctccctcttctgctcc

SEQ ID NO: 127298 - DNA, 22 bp, synthetic construct
  misc_feature 1..22: note = chemically synthesized
  source 1..22: mol_type = other DNA
cctccctccctcttctgctccc

SEQ ID NO: 127299 - DNA, 22 bp, synthetic construct
  misc_feature 1..22: note = chemically synthesized
  source 1..22: mol_type = other DNA
cctccctcttctgctccctcct

SEQ ID NO: 127300 - DNA, 22 bp, synthetic construct
  misc_feature 1..22: note = chemically synthesized
  source 1..22: mol_type = other DNA
cctcttctgctccctcctctct

SEQ ID NO: 127301 - DNA, 22 bp, synthetic construct
  misc_feature 1..22: note = chemically synthesized
  source 1..22: mol_type = other DNA
ttctgctccctcctctcttccc

SEQ ID NO: 127302 - DNA, 22 bp, synthetic construct
  misc_feature 1..22: note = chemically synthesized
  source 1..22: mol_type = other DNA
ctgctccctcctctcttccctc

SEQ ID NO: 127303 - DNA, 22 bp, synthetic construct
  misc_feature 1..22: note = chemically synthesized
  source 1..22: mol_type = other DNA
tgctccctcctctcttccctct

SEQ ID NO: 127304 - DNA, 22 bp, synthetic construct
  misc_feature 1..22: note = chemically synthesized
  source 1..22: mol_type = other DNA
ctccctcctctcttccctctct

SEQ ID NO: 127305 - DNA, 22 bp, synthetic construct
  misc_feature 1..22: note = chemically synthesized
  source 1..22: mol_type = other DNA
cctcctctcttccctctctccc

SEQ ID NO: 127306 - DNA, 22 bp, synthetic construct
  misc_feature 1..22: note = chemically synthesized
  source 1..22: mol_type = other DNA
ctctcttccctctctccctacc

SEQ ID NO: 127307 - DNA, 22 bp, synthetic construct
  misc_feature 1..22: note = chemically synthesized
  source 1..22: mol_type = other DNA
tcttccctctctccctacctcc

SEQ ID NO: 127308 - DNA, 22 bp, synthetic construct
  misc_feature 1..22: note = chemically synthesized
  source 1..22: mol_type = other DNA
ttccctctctccctacctcctt

SEQ ID NO: 127309 - DNA, 22 bp, synthetic construct
  misc_feature 1..22: note = chemically synthesized
  source 1..22: mol_type = other DNA
ccctctctccctacctccttcc

SEQ ID NO: 127310 - DNA, 22 bp, synthetic construct
  misc_feature 1..22: note = chemically synthesized
  source 1..22: mol_type = other DNA
cctctctccctacctccttcct

SEQ ID NO: 127311 - DNA, 22 bp, synthetic construct
  misc_feature 1..22: note = chemically synthesized
  source 1..22: mol_type = other DNA
tctccctacctccttccttcca

SEQ ID NO: 127312 - DNA, 22 bp, synthetic construct
  misc_feature 1..22: note = chemically synthesized
  source 1..22: mol_type = other DNA
tccctacctccttccttccatc

SEQ ID NO: 127313 - DNA, 22 bp, synthetic construct
  misc_feature 1..22: note = chemically synthesized
  source 1..22: mol_type = other DNA
cctacctccttccttccatctt

SEQ ID NO: 127314 - DNA, 22 bp, synthetic construct
  misc_feature 1..22: note = chemically synthesized
  source 1..22: mol_type = other DNA
cctccttccttccatctttttc

SEQ ID NO: 127315 - DNA, 22 bp, synthetic construct
  misc_feature 1..22: note = chemically synthesized
  source 1..22: mol_type = other DNA
cttccttccatctttttctcta

SEQ ID NO: 127316 - DNA, 22 bp, synthetic construct
  misc_feature 1..22: note = chemically synthesized
  source 1..22: mol_type = other DNA
ccttccatctttttctctatta

SEQ ID NO: 127317 - DNA, 22 bp, synthetic construct
  misc_feature 1..22: note = chemically synthesized
  source 1..22: mol_type = other DNA
cttccatctttttctctattat

SEQ ID NO: 127318 - DNA, 22 bp, synthetic construct
  misc_feature 1..22: note = chemically synthesized
  source 1..22: mol_type = other DNA
ccatctttttctctattatttg

SEQ ID NO: 127319 - DNA, 22 bp, synthetic construct
  misc_feature 1..22: note = chemically synthesized
  source 1..22: mol_type = other DNA
catctttttctctattatttgt

SEQ ID NO: 127320 - DNA, 22 bp, synthetic construct
  misc_feature 1..22: note = chemically synthesized
  source 1..22: mol_type = other DNA
tttctctattatttgtgccctc

SEQ ID NO: 127321 - DNA, 22 bp, synthetic construct
  misc_feature 1..22: note = chemically synthesized
  source 1..22: mol_type = other DNA
ttctctattatttgtgccctca

SEQ ID NO: 127322 - DNA, 22 bp, synthetic construct
  misc_feature 1..22: note = chemically synthesized
  source 1..22: mol_type = other DNA
tctctattatttgtgccctcag

SEQ ID NO: 127323 - DNA, 22 bp, synthetic construct
  misc_feature 1..22: note = chemically synthesized
  source 1..22: mol_type = other DNA
ctctattatttgtgccctcagc

SEQ ID NO: 127324 - DNA, 22 bp, synthetic construct
  misc_feature 1..22: note = chemically synthesized
  source 1..22: mol_type = other DNA
tctattatttgtgccctcagcc

SEQ ID NO: 127325 - DNA, 22 bp, synthetic construct
  misc_feature 1..22: note = chemically synthesized
  source 1..22: mol_type = other DNA
tattatttgtgccctcagcctt

SEQ ID NO: 127326 - DNA, 22 bp, synthetic construct
  misc_feature 1..22: note = chemically synthesized
  source 1..22: mol_type = other DNA
ttatttgtgccctcagccttgt

SEQ ID NO: 127327 - DNA, 22 bp, synthetic construct
  misc_feature 1..22: note = chemically synthesized
  source 1..22: mol_type = other DNA
tttgtgccctcagccttgtggg

SEQ ID NO: 127328 - DNA, 22 bp, synthetic construct
  misc_feature 1..22: note = chemically synthesized
  source 1..22: mol_type = other DNA
gtgccctcagccttgtgggtat

SEQ ID NO: 127329 - DNA, 22 bp, synthetic construct
  misc_feature 1..22: note = chemically synthesized
  source 1..22: mol_type = other DNA
tgccctcagccttgtgggtatt

SEQ ID NO: 127330 - DNA, 22 bp, synthetic construct
  misc_feature 1..22: note = chemically synthesized
  source 1..22: mol_type = other DNA
agccttgtgggtattgggcttt

SEQ ID NO: 127331 - DNA, 22 bp, synthetic construct
  misc_feature 1..22: note = chemically synthesized
  source 1..22: mol_type = other DNA
gtgggtattgggctttgaacag

SEQ ID NO: 127332 - DNA, 22 bp, synthetic construct
  misc_feature 1..22: note = chemically synthesized
  source 1..22: mol_type = other DNA
tgggtattgggctttgaacagc

SEQ ID NO: 127333 - DNA, 22 bp, synthetic construct
  misc_feature 1..22: note = chemically synthesized
  source 1..22: mol_type = other DNA
ggctttgaacagcacaactcaa

SEQ ID NO: 127334 - DNA, 22 bp, synthetic construct
  misc_feature 1..22: note = chemically synthesized
  source 1..22: mol_type = other DNA
tgaacagcacaactcaagatct

SEQ ID NO: 127335 - DNA, 22 bp, synthetic construct
  misc_feature 1..22: note = chemically synthesized
  source 1..22: mol_type = other DNA
gaacagcacaactcaagatctc

SEQ ID NO: 127336 - DNA, 22 bp, synthetic construct
  misc_feature 1..22: note = chemically synthesized
  source 1..22: mol_type = other DNA
aacagcacaactcaagatctct

SEQ ID NO: 127337 - DNA, 22 bp, synthetic construct
  misc_feature 1..22: note = chemically synthesized
  source 1..22: mol_type = other DNA
aagatctctgtctctgtcctgg

SEQ ID NO: 127338 - DNA, 22 bp, synthetic construct
  misc_feature 1..22: note = chemically synthesized
  source 1..22: mol_type = other DNA
tgtctctgtcctggcttttact

SEQ ID NO: 127339 - DNA, 22 bp, synthetic construct
  misc_feature 1..22: note = chemically synthesized
  source 1..22: mol_type = other DNA
tctctgtcctggcttttactgg

SEQ ID NO: 127340 - DNA, 22 bp, synthetic construct
  misc_feature 1..22: note = chemically synthesized
  source 1..22: mol_type = other DNA
tgtcctggcttttactggaggt

SEQ ID NO: 127341 - DNA, 22 bp, synthetic construct
  misc_feature 1..22: note = chemically synthesized
  source 1..22: mol_type = other DNA
tcctggcttttactggaggttt

SEQ ID NO: 127342 - DNA, 22 bp, synthetic construct
  misc_feature 1..22: note = chemically synthesized
  source 1..22: mol_type = other DNA
gcttttactggaggttttcctc

SEQ ID NO: 127343 - DNA, 22 bp, synthetic construct
  misc_feature 1..22: note = chemically synthesized
  source 1..22: mol_type = other DNA
ttactggaggttttcctctgtt

SEQ ID NO: 127344 - DNA, 22 bp, synthetic construct
  misc_feature 1..22: note = chemically synthesized
  source 1..22: mol_type = other DNA
tactggaggttttcctctgttg

SEQ ID NO: 127345 - DNA, 22 bp, synthetic construct
  misc_feature 1..22: note = chemically synthesized
  source 1..22: mol_type = other DNA
actggaggttttcctctgttgg

SEQ ID NO: 127346 - DNA, 22 bp, synthetic construct
  misc_feature 1..22: note = chemically synthesized
  source 1..22: mol_type = other DNA
ctggaggttttcctctgttgga

SEQ ID NO: 127347 - DNA, 22 bp, synthetic construct
  misc_feature 1..22: note = chemically synthesized
  source 1..22: mol_type = other DNA
gaggttttcctctgttggaggt

SEQ ID NO: 127348 - DNA, 22 bp, synthetic construct
  misc_feature 1..22: note = chemically synthesized
  source 1..22: mol_type = other DNA
tcctctgttggaggttgaatat

SEQ ID NO: 127349 - DNA, 22 bp, synthetic construct
  misc_feature 1..22: note = chemically synthesized
  source 1..22: mol_type = other DNA
cctctgttggaggttgaatatt

SEQ ID NO: 127350 - DNA, 22 bp, synthetic construct
  misc_feature 1..22: note = chemically synthesized
  source 1..22: mol_type = other DNA
ctctgttggaggttgaatattt

SEQ ID NO: 127351 - DNA, 22 bp, synthetic construct
  misc_feature 1..22: note = chemically synthesized
  source 1..22: mol_type = other DNA
tgttggaggttgaatattttgt

SEQ ID NO: 127352 - DNA, 22 bp, synthetic construct
  misc_feature 1..22: note = chemically synthesized
  source 1..22: mol_type = other DNA
ttggaggttgaatattttgtct

SEQ ID NO: 127353 - DNA, 22 bp, synthetic construct
  misc_feature 1..22: note = chemically synthesized
  source 1..22: mol_type = other DNA
gaggttgaatattttgtctaca

SEQ ID NO: 127354 - DNA, 22 bp, synthetic construct
  misc_feature 1..22: note = chemically synthesized
  source 1..22: mol_type = other DNA
aatattttgtctacattgtggc

SEQ ID NO: 127355 - DNA, 22 bp, synthetic construct
  misc_feature 1..22: note = chemically synthesized
  source 1..22: mol_type = other DNA
tgtctacattgtggctttggct

SEQ ID NO: 127356 - DNA, 22 bp, synthetic construct
  misc_feature 1..22: note = chemically synthesized
  source 1..22: mol_type = other DNA
gtctacattgtggctttggctc

SEQ ID NO: 127357 - DNA, 22 bp, synthetic construct
  misc_feature 1..22: note = chemically synthesized
  source 1..22: mol_type = other DNA
tctacattgtggctttggctct

SEQ ID NO: 127358 - DNA, 22 bp, synthetic construct
  misc_feature 1..22: note = chemically synthesized
  source 1..22: mol_type = other DNA
cattgtggctttggctcttgct

SEQ ID NO: 127359 - DNA, 22 bp, synthetic construct
  misc_feature 1..22: note = chemically synthesized
  source 1..22: mol_type = other DNA
tggctttggctcttgctgtgct

SEQ ID NO: 127360 - DNA, 22 bp, synthetic construct
  misc_feature 1..22: note = chemically synthesized
  source 1..22: mol_type = other DNA
tggctcttgctgtgctactttg

SEQ ID NO: 127361 - DNA, 22 bp, synthetic construct
  misc_feature 1..22: note = chemically synthesized
  source 1..22: mol_type = other DNA
ggctcttgctgtgctactttgg

SEQ ID NO: 127362 - DNA, 22 bp, synthetic construct
  misc_feature 1..22: note = chemically synthesized
  source 1..22: mol_type = other DNA
gctcttgctgtgctactttgga

SEQ ID NO: 127363 - DNA, 22 bp, synthetic construct
  misc_feature 1..22: note = chemically synthesized
  source 1..22: mol_type = other DNA
ttgctgtgctactttggaatta

SEQ ID NO: 127364 - DNA, 22 bp, synthetic construct
  misc_feature 1..22: note = chemically synthesized
  source 1..22: mol_type = other DNA
gctgtgctactttggaattatt

SEQ ID NO: 127365 - DNA, 22 bp, synthetic construct
  misc_feature 1..22: note = chemically synthesized
  source 1..22: mol_type = other DNA
ctgtgctactttggaattattt

SEQ ID NO: 127366 - DNA, 22 bp, synthetic construct
  misc_feature 1..22: note = chemically synthesized
  source 1..22: mol_type = other DNA
tgctactttggaattattttat

SEQ ID NO: 127367 - DNA, 22 bp, synthetic construct
  misc_feature 1..22: note = chemically synthesized
  source 1..22: mol_type = other DNA
ctttggaattattttatctcat

SEQ ID NO: 127368 - DNA, 22 bp, synthetic construct
  misc_feature 1..22: note = chemically synthesized
  source 1..22: mol_type = other DNA
tggaattattttatctcattgc

SEQ ID NO: 127369 - DNA, 22 bp, synthetic construct
  misc_feature 1..22: note = chemically synthesized
  source 1..22: mol_type = other DNA
ggaattattttatctcattgca

SEQ ID NO: 127370 - DNA, 22 bp, synthetic construct
  misc_feature 1..22: note = chemically synthesized
  source 1..22: mol_type = other DNA
gaattattttatctcattgcat

SEQ ID NO: 127371 - DNA, 22 bp, synthetic construct
  misc_feature 1..22: note = chemically synthesized
  source 1..22: mol_type = other DNA
ttttatctcattgcatttcata

SEQ ID NO: 127372 - DNA, 22 bp, synthetic construct
  misc_feature 1..22: note = chemically synthesized
  source 1..22: mol_type = other DNA
tatctcattgcatttcatagtc

SEQ ID NO: 127373 - DNA, 22 bp, synthetic construct
  misc_feature 1..22: note = chemically synthesized
  source 1..22: mol_type = other DNA
atctcattgcatttcatagtcc

SEQ ID NO: 127374 - DNA, 22 bp, synthetic construct
  misc_feature 1..22: note = chemically synthesized
  source 1..22: mol_type = other DNA
tctcattgcatttcatagtcct

SEQ ID NO: 127375 - DNA, 22 bp, synthetic construct
  misc_feature 1..22: note = chemically synthesized
  source 1..22: mol_type = other DNA
attgcatttcatagtccttact

SEQ ID NO: 127376 - DNA, 22 bp, synthetic construct
  misc_feature 1..22: note = chemically synthesized
  source 1..22: mol_type = other DNA
catttcatagtccttactgtaa

SEQ ID NO: 127377 - DNA, 22 bp, synthetic construct
  misc_feature 1..22: note = chemically synthesized
  source 1..22: mol_type = other DNA
catagtccttactgtaaaacgc

SEQ ID NO: 127378 - DNA, 22 bp, synthetic construct
  misc_feature 1..22: note = chemically synthesized
  source 1..22: mol_type = other DNA
atagtccttactgtaaaacgca

SEQ ID NO: 127379 - DNA, 22 bp, synthetic construct
  misc_feature 1..22: note = chemically synthesized
  source 1..22: mol_type = other DNA
actgtaaaacgcatataataat

SEQ ID NO: 127380 - DNA, 22 bp, synthetic construct
  misc_feature 1..22: note = chemically synthesized
  source 1..22: mol_type = other DNA
ctgtaaaacgcatataataatt

SEQ ID NO: 127381 - DNA, 22 bp, synthetic construct
  misc_feature 1..22: note = chemically synthesized
  source 1..22: mol_type = other DNA
taaaacgcatataataattgcc

SEQ ID NO: 127382 - DNA, 22 bp, synthetic construct
  misc_feature 1..22: note = chemically synthesized
  source 1..22: mol_type = other DNA
ccatcacaaagtgatgtggtgt

SEQ ID NO: 127383 - DNA, 22 bp, synthetic construct
  misc_feature 1..22: note = chemically synthesized
  source 1..22: mol_type = other DNA
ggctgaagcaccatgtgatgag

SEQ ID NO: 127384 - DNA, 22 bp, synthetic construct
  misc_feature 1..22: note = chemically synthesized
  source 1..22: mol_type = other DNA
gctgaagcaccatgtgatgagt

SEQ ID NO: 127385 - DNA, 22 bp, synthetic construct
  misc_feature 1..22: note = chemically synthesized
  source 1..22: mol_type = other DNA
aagcaccatgtgatgagtatgc

SEQ ID NO: 127386 - DNA, 22 bp, synthetic construct
  misc_feature 1..22: note = chemically synthesized
  source 1..22: mol_type = other DNA
ctgcatcccctggaaaagagaa

SEQ ID NO: 127387 - DNA, 22 bp, synthetic construct
  misc_feature 1..22: note = chemically synthesized
  source 1..22: mol_type = other DNA
catcccctggaaaagagaaaac

SEQ ID NO: 127388 - DNA, 22 bp, synthetic construct
  misc_feature 1..22: note = chemically synthesized
  source 1..22: mol_type = other DNA
gaaaagagaaaacttctggtag

SEQ ID NO: 127389 - DNA, 22 bp, synthetic construct
  misc_feature 1..22: note = chemically synthesized
  source 1..22: mol_type = other DNA
ctggtaggctaaactcaagaag

SEQ ID NO: 127390 - DNA, 22 bp, synthetic construct
  misc_feature 1..22: note = chemically synthesized
  source 1..22: mol_type = other DNA
tggtaggctaaactcaagaagg

SEQ ID NO: 127391 - DNA, 22 bp, synthetic construct
  misc_feature 1..22: note = chemically synthesized
  source 1..22: mol_type = other DNA
gtaggctaaactcaagaaggga

SEQ ID NO: 127392 - DNA, 22 bp, synthetic construct
  misc_feature 1..22: note = chemically synthesized
  source 1..22: mol_type = other DNA
aactcaagaagggaatagttag

SEQ ID NO: 127393 - DNA, 22 bp, synthetic construct
  misc_feature 1..22: note = chemically synthesized
  source 1..22: mol_type = other DNA
aagaagggaatagttagtgata

SEQ ID NO: 127394 - DNA, 22 bp, synthetic construct
  misc_feature 1..22: note = chemically synthesized
  source 1..22: mol_type = other DNA
gtgataactgcagaatgtgcgt

SEQ ID NO: 127395 - DNA, 22 bp, synthetic construct
  misc_feature 1..22: note = chemically synthesized
  source 1..22: mol_type = other DNA
cagaatgtgcgttcacgttggg

SEQ ID NO: 127396 - DNA, 22 bp, synthetic construct
  misc_feature 1..22: note = chemically synthesized
  source 1..22: mol_type = other DNA
acgttgggtactagagaaggct

SEQ ID NO: 127397 - DNA, 22 bp, synthetic construct
  misc_feature 1..22: note = chemically synthesized
  source 1..22: mol_type = other DNA
ggtactagagaaggctgcctga

SEQ ID NO: 127398 - DNA, 22 bp, synthetic construct
  misc_feature 1..22: note = chemically synthesized
  source 1..22: mol_type = other DNA
gagaaggctgcctgaattttat

SEQ ID NO: 127399 - DNA, 22 bp, synthetic construct
  misc_feature 1..22: note = chemically synthesized
  source 1..22: mol_type = other DNA
cctgaattttattatattgact

SEQ ID NO: 127400 - DNA, 22 bp, synthetic construct
  misc_feature 1..22: note = chemically synthesized
  source 1..22: mol_type = other DNA
aattttattatattgactctag

SEQ ID NO: 127401 - DNA, 22 bp, synthetic construct
  misc_feature 1..22: note = chemically synthesized
  source 1..22: mol_type = other DNA
tattatattgactctagtctat

SEQ ID NO: 127402 - DNA, 22 bp, synthetic construct
  misc_feature 1..22: note = chemically synthesized
  source 1..22: mol_type = other DNA
attatattgactctagtctatc

SEQ ID NO: 127403 - DNA, 22 bp, synthetic construct
  misc_feature 1..22: note = chemically synthesized
  source 1..22: mol_type = other DNA
ttatattgactctagtctatct

SEQ ID NO: 127404 - DNA, 22 bp, synthetic construct
  misc_feature 1..22: note = chemically synthesized
  source 1..22: mol_type = other DNA
tattgactctagtctatctagc

SEQ ID NO: 127405 - DNA, 22 bp, synthetic construct
  misc_feature 1..22: note = chemically synthesized
  source 1..22: mol_type = other DNA
actctagtctatctagctctct

SEQ ID NO: 127406 - DNA, 22 bp, synthetic construct
  misc_feature 1..22: note = chemically synthesized
  source 1..22: mol_type = other DNA
tagtctatctagctctctgctt

SEQ ID NO: 127407 - DNA, 22 bp, synthetic construct
  misc_feature 1..22: note = chemically synthesized
  source 1..22: mol_type = other DNA
gtctatctagctctctgctttc

SEQ ID NO: 127408 - DNA, 22 bp, synthetic construct
  misc_feature 1..22: note = chemically synthesized
  source 1..22: mol_type = other DNA
tctagctctctgctttcaagct

SEQ ID NO: 127409 - DNA, 22 bp, synthetic construct
  misc_feature 1..22: note = chemically synthesized
  source 1..22: mol_type = other DNA
gctctctgctttcaagctttct

SEQ ID NO: 127410 - DNA, 22 bp, synthetic construct
  misc_feature 1..22: note = chemically synthesized
  source 1..22: mol_type = other DNA
tctgctttcaagctttctctga

SEQ ID NO: 127411 - DNA, 22 bp, synthetic construct
  misc_feature 1..22: note = chemically synthesized
  source 1..22: mol_type = other DNA
tgctttcaagctttctctgatc

SEQ ID NO: 127412 - DNA, 22 bp, synthetic construct
  misc_feature 1..22: note = chemically synthesized
  source 1..22: mol_type = other DNA
ctttcaagctttctctgatcta

SEQ ID NO: 127413 - DNA, 22 bp, synthetic construct
  misc_feature 1..22: note = chemically synthesized
  source 1..22: mol_type = other DNA
tcaagctttctctgatctaaac

SEQ ID NO: 127414 - DNA, 22 bp, synthetic construct
  misc_feature 1..22: note = chemically synthesized
  source 1..22: mol_type = other DNA
caagctttctctgatctaaacc

SEQ ID NO: 127415 - DNA, 22 bp, synthetic construct
  misc_feature 1..22: note = chemically synthesized
  source 1..22: mol_type = other DNA
aagctttctctgatctaaacca

SEQ ID NO: 127416 - DNA, 22 bp, synthetic construct
  misc_feature 1..22: note = chemically synthesized
  source 1..22: mol_type = other DNA
tctctgatctaaaccaagcagg

SEQ ID NO: 127417 - DNA, 22 bp, synthetic construct
  misc_feature 1..22: note = chemically synthesized
  source 1..22: mol_type = other DNA
ctctgatctaaaccaagcagga

SEQ ID NO: 127418 - DNA, 22 bp, synthetic construct
  misc_feature 1..22: note = chemically synthesized
  source 1..22: mol_type = other DNA
tctgatctaaaccaagcaggaa

SEQ ID NO: 127419 - DNA, 22 bp, synthetic construct
  misc_feature 1..22: note = chemically synthesized
  source 1..22: mol_type = other DNA
tgatctaaaccaagcaggaaat

SEQ ID NO: 127420 - DNA, 22 bp, synthetic construct
  misc_feature 1..22: note = chemically synthesized
  source 1..22: mol_type = other DNA
atctaaaccaagcaggaaatat

SEQ ID NO: 127421 - DNA, 22 bp, synthetic construct
  misc_feature 1..22: note = chemically synthesized
  source 1..22: mol_type = other DNA
aaccaagcaggaaatatagtag

SEQ ID NO: 127422 - DNA, 22 bp, synthetic construct
  misc_feature 1..22: note = chemically synthesized
  source 1..22: mol_type = other DNA
aggttacataggccaagaagat

SEQ ID NO: 127423 - DNA, 22 bp, synthetic construct
  misc_feature 1..22: note = chemically synthesized
  source 1..22: mol_type = other DNA
cataggccaagaagatatatag

SEQ ID NO: 127424 - DNA, 22 bp, synthetic construct
  misc_feature 1..22: note = chemically synthesized
  source 1..22: mol_type = other DNA
tctcttgagataaactgggaaa

SEQ ID NO: 127425 - DNA, 22 bp, synthetic construct
  misc_feature 1..22: note = chemically synthesized
  source 1..22: mol_type = other DNA
ctcttgagataaactgggaaag

SEQ ID NO: 127426 - DNA, 22 bp, synthetic construct
  misc_feature 1..22: note = chemically synthesized
  source 1..22: mol_type = other DNA
tcttgagataaactgggaaaga

SEQ ID NO: 127427 - DNA, 22 bp, synthetic construct
  misc_feature 1..22: note = chemically synthesized
  source 1..22: mol_type = other DNA
ttgagataaactgggaaagatt

SEQ ID NO: 127428 - DNA, 22 bp, synthetic construct
  misc_feature 1..22: note = chemically synthesized
  source 1..22: mol_type = other DNA
gagataaactgggaaagatttg

SEQ ID NO: 127429 - DNA, 22 bp, synthetic construct
  misc_feature 1..22: note = chemically synthesized
  source 1..22: mol_type = other DNA
agataaactgggaaagatttga

SEQ ID NO: 127430 - DNA, 22 bp, synthetic construct
  misc_feature 1..22: note = chemically synthesized
  source 1..22: mol_type = other DNA
ggaaagatttgactgttgaagt

SEQ ID NO: 127431 - DNA, 22 bp, synthetic construct
  misc_feature 1..22: note = chemically synthesized
  source 1..22: mol_type = other DNA
gactgttgaagtaaatgtaggg

SEQ ID NO: 127432 - DNA, 22 bp, synthetic construct
  misc_feature 1..22: note = chemically synthesized
  source 1..22: mol_type = other DNA
actgttgaagtaaatgtaggga

SEQ ID NO: 127433 - DNA, 22 bp, synthetic construct
  misc_feature 1..22: note = chemically synthesized
  source 1..22: mol_type = other DNA
ttgaagtaaatgtagggaataa

SEQ ID NO: 127434 - DNA, 22 bp, synthetic construct
  misc_feature 1..22: note = chemically synthesized
  source 1..22: mol_type = other DNA
aagtaaatgtagggaataaatt

SEQ ID NO: 127435 - DNA, 22 bp, synthetic construct
  misc_feature 1..22: note = chemically synthesized
  source 1..22: mol_type = other DNA
cctcccagaggtgataccagag

SEQ ID NO: 127436 - DNA, 22 bp, synthetic construct
  misc_feature 1..22: note = chemically synthesized
  source 1..22: mol_type = other DNA
ccagaggtgataccagagtctg

SEQ ID NO: 127437 - DNA, 22 bp, synthetic construct
  misc_feature 1..22: note = chemically synthesized
  source 1..22: mol_type = other DNA
ctggggctatgaagacaggctg

SEQ ID NO: 127438 - DNA, 22 bp, synthetic construct
  misc_feature 1..22: note = chemically synthesized
  source 1..22: mol_type = other DNA
gggctatgaagacaggctgtct

SEQ ID NO: 127439 - DNA, 22 bp, synthetic construct
  misc_feature 1..22: note = chemically synthesized
  source 1..22: mol_type = other DNA
tgaagacaggctgtctgattcc

SEQ ID NO: 127440 - DNA, 22 bp, synthetic construct
  misc_feature 1..22: note = chemically synthesized
  source 1..22: mol_type = other DNA
tctgattccccacacataaagg

SEQ ID NO: 127441 - DNA, 22 bp, synthetic construct
  misc_feature 1..22: note = chemically synthesized
  source 1..22: mol_type = other DNA
attccccacacataaaggtcct

SEQ ID NO: 127442 - DNA, 22 bp, synthetic construct
  misc_feature 1..22: note = chemically synthesized
  source 1..22: mol_type = other DNA
cccacacataaaggtcctacca

SEQ ID NO: 127443 - DNA, 22 bp, synthetic construct
  misc_feature 1..22: note = chemically synthesized
  source 1..22: mol_type = other DNA
ccagtggcttgattcagccagt

SEQ ID NO: 127444 - DNA, 22 bp, synthetic construct
  misc_feature 1..22: note = chemically synthesized
  source 1..22: mol_type = other DNA
gattcagccagtaacttatttg

SEQ ID NO: 127445 - DNA, 22 bp, synthetic construct
  misc_feature 1..22: note = chemically synthesized
  source 1..22: mol_type = other DNA
attcagccagtaacttatttga

SEQ ID NO: 127446 - DNA, 22 bp, synthetic construct
  misc_feature 1..22: note = chemically synthesized
  source 1..22: mol_type = other DNA
agccagtaacttatttgaaaaa

SEQ ID NO: 127447 - DNA, 22 bp, synthetic construct
  misc_feature 1..22: note = chemically synthesized
  source 1..22: mol_type = other DNA
atttgaaaaaagaaagattatt

SEQ ID NO: 127448 - DNA, 22 bp, synthetic construct
  misc_feature 1..22: note = chemically synthesized
  source 1..22: mol_type = other DNA
tttgaaaaaagaaagattattt

SEQ ID NO: 127449 - DNA, 22 bp, synthetic construct
  misc_feature 1..22: note = chemically synthesized
  source 1..22: mol_type = other DNA
gaaaaaagaaagattatttaaa

SEQ ID NO: 127450 - DNA, 22 bp, synthetic construct
  misc_feature 1..22: note = chemically synthesized
  source 1..22: mol_type = other DNA
aaaaaagaaagattatttaaaa

SEQ ID NO: 127451 - DNA, 22 bp, synthetic construct
  misc_feature 1..22: note = chemically synthesized
  source 1..22: mol_type = other DNA
tttaaaagcttggggggactaa

SEQ ID NO: 127452 - DNA, 22 bp, synthetic construct
  misc_feature 1..22: note = chemically synthesized
  source 1..22: mol_type = other DNA
aaaagcttggggggactaatta

SEQ ID NO: 127453 - DNA, 22 bp, synthetic construct
  misc_feature 1..22: note = chemically synthesized
  source 1..22: mol_type = other DNA
aaagcttggggggactaattaa

SEQ ID NO: 127454 - DNA, 22 bp, synthetic construct
  misc_feature 1..22: note = chemically synthesized
  source 1..22: mol_type = other DNA
ggggggactaattaagtgttcc

SEQ ID NO: 127455 - DNA, 22 bp, synthetic construct
  misc_feature 1..22: note = chemically synthesized
  source 1..22: mol_type = other DNA
gggggactaattaagtgttcca

SEQ ID NO: 127456 - DNA, 22 bp, synthetic construct
  misc_feature 1..22: note = chemically synthesized
  source 1..22: mol_type = other DNA
attaagtgttccagctccctct

SEQ ID NO: 127457 - DNA, 22 bp, synthetic construct
  misc_feature 1..22: note = chemically synthesized
  source 1..22: mol_type = other DNA
agtgttccagctccctctaagg

SEQ ID NO: 127458 - DNA, 22 bp, synthetic construct
  misc_feature 1..22: note = chemically synthesized
  source 1..22: mol_type = other DNA
cagctccctctaaggaggagtt

SEQ ID NO: 127459 - DNA, 22 bp, synthetic construct
  misc_feature 1..22: note = chemically synthesized
  source 1..22: mol_type = other DNA
cctctaaggaggagttaataca

SEQ ID NO: 127460 - DNA, 22 bp, synthetic construct
  misc_feature 1..22: note = chemically synthesized
  source 1..22: mol_type = other DNA
taaggaggagttaatacagagt

SEQ ID NO: 127461 - DNA, 22 bp, synthetic construct
  misc_feature 1..22: note = chemically synthesized
  source 1..22: mol_type = other DNA
aggaggagttaatacagagtaa

SEQ ID NO: 127462 - DNA, 22 bp, synthetic construct
  misc_feature 1..22: note = chemically synthesized
  source 1..22: mol_type = other DNA
atacagagtaaatatttcttaa

SEQ ID NO: 127463 - DNA, 22 bp, synthetic construct
  misc_feature 1..22: note = chemically synthesized
  source 1..22: mol_type = other DNA
cttaagatccaagttggctata

SEQ ID NO: 127464 - DNA, 22 bp, synthetic construct
  misc_feature 1..22: note = chemically synthesized
  source 1..22: mol_type = other DNA
ttaagatccaagttggctataa

SEQ ID NO: 127465 - DNA, 22 bp, synthetic construct
  misc_feature 1..22: note = chemically synthesized
  source 1..22: mol_type = other DNA
aagatccaagttggctataaaa

SEQ ID NO: 127466 - DNA, 22 bp, synthetic construct
  misc_feature 1..22: note = chemically synthesized
  source 1..22: mol_type = other DNA
agatccaagttggctataaaag

SEQ ID NO: 127467 - DNA, 22 bp, synthetic construct
  misc_feature 1..22: note = chemically synthesized
  source 1..22: mol_type = other DNA
gctataaaagggagacatctgg

SEQ ID NO: 127468 - DNA, 22 bp, synthetic construct
  misc_feature 1..22: note = chemically synthesized
  source 1..22: mol_type = other DNA
taaaagggagacatctgggaag

SEQ ID NO: 127469 - DNA, 22 bp, synthetic construct
  misc_feature 1..22: note = chemically synthesized
  source 1..22: mol_type = other DNA
ggaaggtgctatctttattaat

SEQ ID NO: 127470 - DNA, 22 bp, synthetic construct
  misc_feature 1..22: note = chemically synthesized
  source 1..22: mol_type = other DNA
tctttattaataaccacagtga

SEQ ID NO: 127471 - DNA, 22 bp, synthetic construct
  misc_feature 1..22: note = chemically synthesized
  source 1..22: mol_type = other DNA
tattaataaccacagtgactgc

SEQ ID NO: 127472 - DNA, 22 bp, synthetic construct
  misc_feature 1..22: note = chemically synthesized
  source 1..22: mol_type = other DNA
attaataaccacagtgactgct

SEQ ID NO: 127473 - DNA, 22 bp, synthetic construct
  misc_feature 1..22: note = chemically synthesized
  source 1..22: mol_type = other DNA
ttaataaccacagtgactgctt

SEQ ID NO: 127474 - DNA, 22 bp, synthetic construct
  misc_feature 1..22: note = chemically synthesized
  source 1..22: mol_type = other DNA
ataaccacagtgactgcttctc

SEQ ID NO: 127475 - DNA, 22 bp, synthetic construct
  misc_feature 1..22: note = chemically synthesized
  source 1..22: mol_type = other DNA
cttctcttcacagatgttgaga

SEQ ID NO: 127476 - DNA, 22 bp, synthetic construct
  misc_feature 1..22: note = chemically synthesized
  source 1..22: mol_type = other DNA
ctcttcacagatgttgagaagg

SEQ ID NO: 127477 - DNA, 22 bp, synthetic construct
  misc_feature 1..22: note = chemically synthesized
  source 1..22: mol_type = other DNA
tcttcacagatgttgagaagga

SEQ ID NO: 127478 - DNA, 22 bp, synthetic construct
  misc_feature 1..22: note = chemically synthesized
  source 1..22: mol_type = other DNA
ttcacagatgttgagaaggaac

SEQ ID NO: 127479 - DNA, 22 bp, synthetic construct
  misc_feature 1..22: note = chemically synthesized
  source 1..22: mol_type = other DNA
cacagatgttgagaaggaacaa

SEQ ID NO: 127480 - DNA, 22 bp, synthetic construct
  misc_feature 1..22: note = chemically synthesized
  source 1..22: mol_type = other DNA
acagatgttgagaaggaacaac

SEQ ID NO: 127481 - DNA, 22 bp, synthetic construct
  misc_feature 1..22: note = chemically synthesized
  source 1..22: mol_type = other DNA
agaaggaacaacatgatctaag

SEQ ID NO: 127482 - DNA, 22 bp, synthetic construct
  misc_feature 1..22: note = chemically synthesized
  source 1..22: mol_type = other DNA
agtctttaggtaagacacaaga

SEQ ID NO: 127483 - DNA, 22 bp, synthetic construct
  misc_feature 1..22: note = chemically synthesized
  source 1..22: mol_type = other DNA
taggtaagacacaagaaccctg

SEQ ID NO: 127484 - DNA, 22 bp, synthetic construct
  misc_feature 1..22: note = chemically synthesized
  source 1..22: mol_type = other DNA
aggtaagacacaagaaccctgc

SEQ ID NO: 127485 - DNA, 22 bp, synthetic construct
  misc_feature 1..22: note = chemically synthesized
  source 1..22: mol_type = other DNA
ggtaagacacaagaaccctgct

SEQ ID NO: 127486 - DNA, 22 bp, synthetic construct
  misc_feature 1..22: note = chemically synthesized
  source 1..22: mol_type = other DNA
ctcttcctcaccatcaaacaag

SEQ ID NO: 127487 - DNA, 22 bp, synthetic construct
  misc_feature 1..22: note = chemically synthesized
  source 1..22: mol_type = other DNA
ttcctcaccatcaaacaagtta

SEQ ID NO: 127488 - DNA, 22 bp, synthetic construct
  misc_feature 1..22: note = chemically synthesized
  source 1..22: mol_type = other DNA
cctcaccatcaaacaagttatg

SEQ ID NO: 127489 - DNA, 22 bp, synthetic construct
  misc_feature 1..22: note = chemically synthesized
  source 1..22: mol_type = other DNA
ctcaccatcaaacaagttatgg

SEQ ID NO: 127490 - DNA, 22 bp, synthetic construct
  misc_feature 1..22: note = chemically synthesized
  source 1..22: mol_type = other DNA
accatcaaacaagttatggtac

SEQ ID NO: 127491 - DNA, 22 bp, synthetic construct
  misc_feature 1..22: note = chemically synthesized
  source 1..22: mol_type = other DNA
tggtacctgggagtatggtgaa

SEQ ID NO: 127492 - DNA, 22 bp, synthetic construct
  misc_feature 1..22: note = chemically synthesized
  source 1..22: mol_type = other DNA
ggagtatggtgaaatactccta

SEQ ID NO: 127493 - DNA, 22 bp, synthetic construct
  misc_feature 1..22: note = chemically synthesized
  source 1..22: mol_type = other DNA
ctagatatataaagagtgtact

SEQ ID NO: 127494 - DNA, 22 bp, synthetic construct
  misc_feature 1..22: note = chemically synthesized
  source 1..22: mol_type = other DNA
gatatataaagagtgtactagg

SEQ ID NO: 127495 - DNA, 22 bp, synthetic construct
  misc_feature 1..22: note = chemically synthesized
  source 1..22: mol_type = other DNA
ggagactcctctataagctctc

SEQ ID NO: 127496 - DNA, 22 bp, synthetic construct
  misc_feature 1..22: note = chemically synthesized
  source 1..22: mol_type = other DNA
ctctataagctctccagagaaa

SEQ ID NO: 127497 - DNA, 22 bp, synthetic construct
  misc_feature 1..22: note = chemically synthesized
  source 1..22: mol_type = other DNA
tataagctctccagagaaagat

SEQ ID NO: 127498 - DNA, 22 bp, synthetic construct
  misc_feature 1..22: note = chemically synthesized
  source 1..22: mol_type = other DNA
taagctctccagagaaagatac

SEQ ID NO: 127499 - DNA, 22 bp, synthetic construct
  misc_feature 1..22: note = chemically synthesized
  source 1..22: mol_type = other DNA
tccagagaaagatacggagaag

SEQ ID NO: 127500 - DNA, 22 bp, synthetic construct
  misc_feature 1..22: note = chemically synthesized
  source 1..22: mol_type = other DNA
cagagaaagatacggagaagaa

SEQ ID NO: 127501 - DNA, 22 bp, synthetic construct
  misc_feature 1..22: note = chemically synthesized
  source 1..22: mol_type = other DNA
aatagtccacagctttggatgt

SEQ ID NO: 127502 - DNA, 22 bp, synthetic construct
  misc_feature 1..22: note = chemically synthesized
  source 1..22: mol_type = other DNA
tggatgtgtgcacagatttcag

SEQ ID NO: 127503 - DNA, 22 bp, synthetic construct
  misc_feature 1..22: note = chemically synthesized
  source 1..22: mol_type = other DNA
ggatgtgtgcacagatttcagt

SEQ ID NO: 127504 - DNA, 22 bp, synthetic construct
  misc_feature 1..22: note = chemically synthesized
  source 1..22: mol_type = other DNA
gatgtgtgcacagatttcagtc

SEQ ID NO: 127505 - DNA, 22 bp, synthetic construct
  misc_feature 1..22: note = chemically synthesized
  source 1..22: mol_type = other DNA
cagtctgaagttgatagaactt

SEQ ID NO: 127506 - DNA, 22 bp, synthetic construct
  misc_feature 1..22: note = chemically synthesized
  source 1..22: mol_type = other DNA
agtctgaagttgatagaacttc

SEQ ID NO: 127507 - DNA, 22 bp, synthetic construct
  misc_feature 1..22: note = chemically synthesized
  source 1..22: mol_type = other DNA
aagttgatagaacttcaaaagc

SEQ ID NO: 127508 - DNA, 22 bp, synthetic construct
  misc_feature 1..22: note = chemically synthesized
  source 1..22: mol_type = other DNA
atagaacttcaaaagcaattcc

SEQ ID NO: 127509 - DNA, 22 bp, synthetic construct
  misc_feature 1..22: note = chemically synthesized
  source 1..22: mol_type = other DNA
caaaagcaattccaagtgctac

SEQ ID NO: 127510 - DNA, 22 bp, synthetic construct
  misc_feature 1..22: note = chemically synthesized
  source 1..22: mol_type = other DNA
aaaagcaattccaagtgctacc

SEQ ID NO: 127511 - DNA, 22 bp, synthetic construct
  misc_feature 1..22: note = chemically synthesized
  source 1..22: mol_type = other DNA
caagtgctaccaaccaactacc

SEQ ID NO: 127512 - DNA, 22 bp, synthetic construct
  misc_feature 1..22: note = chemically synthesized
  source 1..22: mol_type = other DNA
ccaaccaactacctaagacctt

SEQ ID NO: 127513 - DNA, 22 bp, synthetic construct
  misc_feature 1..22: note = chemically synthesized
  source 1..22: mol_type = other DNA
cctaagaccttctgtactcagt

SEQ ID NO: 127514 - DNA, 22 bp, synthetic construct
  misc_feature 1..22: note = chemically synthesized
  source 1..22: mol_type = other DNA
agaccttctgtactcagtgatg

SEQ ID NO: 127515 - DNA, 22 bp, synthetic construct
  misc_feature 1..22: note = chemically synthesized
  source 1..22: mol_type = other DNA
ctgtactcagtgatgtgaatat

SEQ ID NO: 127516 - DNA, 22 bp, synthetic construct
  misc_feature 1..22: note = chemically synthesized
  source 1..22: mol_type = other DNA
tgtactcagtgatgtgaatatg

SEQ ID NO: 127517 - DNA, 22 bp, synthetic construct
  misc_feature 1..22: note = chemically synthesized
  source 1..22: mol_type = other DNA
tactcagtgatgtgaatatgat

SEQ ID NO: 127518 - DNA, 22 bp, synthetic construct
  misc_feature 1..22: note = chemically synthesized
  source 1..22: mol_type = other DNA
agtgatgtgaatatgattgacc

SEQ ID NO: 127519 - DNA, 22 bp, synthetic construct
  misc_feature 1..22: note = chemically synthesized
  source 1..22: mol_type = other DNA
accctctcatatgtcttctttc

SEQ ID NO: 127520 - DNA, 22 bp, synthetic construct
  misc_feature 1..22: note = chemically synthesized
  source 1..22: mol_type = other DNA
tcatatgtcttctttcctttct

SEQ ID NO: 127521 - DNA, 22 bp, synthetic construct
  misc_feature 1..22: note = chemically synthesized
  source 1..22: mol_type = other DNA
atatgtcttctttcctttctaa

SEQ ID NO: 127522 - DNA, 22 bp, synthetic construct
  misc_feature 1..22: note = chemically synthesized
  source 1..22: mol_type = other DNA
ctttcctttctaaaagatgaac

SEQ ID NO: 127523 - DNA, 22 bp, synthetic construct
  misc_feature 1..22: note = chemically synthesized
  source 1..22: mol_type = other DNA
tttcctttctaaaagatgaaca

SEQ ID NO: 127524 - DNA, 22 bp, synthetic construct
  misc_feature 1..22: note = chemically synthesized
  source 1..22: mol_type = other DNA
tcctttctaaaagatgaacagg

SEQ ID NO: 127525 - DNA, 22 bp, synthetic construct
  misc_feature 1..22: note = chemically synthesized
  source 1..22: mol_type = other DNA
cctttctaaaagatgaacagga

SEQ ID NO: 127526 - DNA, 22 bp, synthetic construct
  misc_feature 1..22: note = chemically synthesized
  source 1..22: mol_type = other DNA
ctttctaaaagatgaacaggaa

SEQ ID NO: 127527 - DNA, 22 bp, synthetic construct
  misc_feature 1..22: note = chemically synthesized
  source 1..22: mol_type = other DNA
tctaaaagatgaacaggaaggc

SEQ ID NO: 127528 - DNA, 22 bp, synthetic construct
  misc_feature 1..22: note = chemically synthesized
  source 1..22: mol_type = other DNA
ctaaaagatgaacaggaaggca

SEQ ID NO: 127529 - DNA, 22 bp, synthetic construct
  misc_feature 1..22: note = chemically synthesized
  source 1..22: mol_type = other DNA
taaaagatgaacaggaaggcac

SEQ ID NO: 127530 - DNA, 22 bp, synthetic construct
  misc_feature 1..22: note = chemically synthesized
  source 1..22: mol_type = other DNA
aaagatgaacaggaaggcacct

SEQ ID NO: 127531 - DNA, 22 bp, synthetic construct
  misc_feature 1..22: note = chemically synthesized
  source 1..22: mol_type = other DNA
ttattctactacattttacttt

SEQ ID NO: 127532 - DNA, 22 bp, synthetic construct
  misc_feature 1..22: note = chemically synthesized
  source 1..22: mol_type = other DNA
attctactacattttacttttt

SEQ ID NO: 127533 - DNA, 22 bp, synthetic construct
  misc_feature 1..22: note = chemically synthesized
  source 1..22: mol_type = other DNA
ttctactacattttacttttta

SEQ ID NO: 127534 - DNA, 22 bp, synthetic construct
  misc_feature 1..22: note = chemically synthesized
  source 1..22: mol_type = other DNA
tactacattttactttttaaac

SEQ ID NO: 127535 - DNA, 22 bp, synthetic construct
  misc_feature 1..22: note = chemically synthesized
  source 1..22: mol_type = other DNA
ctacattttactttttaaacaa

SEQ ID NO: 127536 - DNA, 22 bp, synthetic construct
  misc_feature 1..22: note = chemically synthesized
  source 1..22: mol_type = other DNA
cattttactttttaaacaaagc

SEQ ID NO: 127537 - DNA, 22 bp, synthetic construct
  misc_feature 1..22: note = chemically synthesized
  source 1..22: mol_type = other DNA
tactttttaaacaaagcagaga

SEQ ID NO: 127538 - DNA, 22 bp, synthetic construct
  misc_feature 1..22: note = chemically synthesized
  source 1..22: mol_type = other DNA
actttttaaacaaagcagagaa

SEQ ID NO: 127539 - DNA, 22 bp, synthetic construct
  misc_feature 1..22: note = chemically synthesized
  source 1..22: mol_type = other DNA
ctttttaaacaaagcagagaaa

SEQ ID NO: 127540 - DNA, 22 bp, synthetic construct
  misc_feature 1..22: note = chemically synthesized
  source 1..22: mol_type = other DNA
tttaaacaaagcagagaaaaat

SEQ ID NO: 127541 - DNA, 22 bp, synthetic construct
  misc_feature 1..22: note = chemically synthesized
  source 1..22: mol_type = other DNA
ttaaacaaagcagagaaaaatt

SEQ ID NO: 127542 - DNA, 22 bp, synthetic construct
  misc_feature 1..22: note = chemically synthesized
  source 1..22: mol_type = other DNA
taaacaaagcagagaaaaatta

SEQ ID NO: 127543 - DNA, 22 bp, synthetic construct
  misc_feature 1..22: note = chemically synthesized
  source 1..22: mol_type = other DNA
aaacaaagcagagaaaaattat

SEQ ID NO: 127544 - DNA, 22 bp, synthetic construct
  misc_feature 1..22: note = chemically synthesized
  source 1..22: mol_type = other DNA
aacaaagcagagaaaaattatg

SEQ ID NO: 127545 - DNA, 22 bp, synthetic construct
  misc_feature 1..22: note = chemically synthesized
  source 1..22: mol_type = other DNA
tggctgtaaatgttagaagttt

SEQ ID NO: 127546 - DNA, 22 bp, synthetic construct
  misc_feature 1..22: note = chemically synthesized
  source 1..22: mol_type = other DNA
taaatgttagaagtttatctga

SEQ ID NO: 127547 - DNA, 22 bp, synthetic construct
  misc_feature 1..22: note = chemically synthesized
  source 1..22: mol_type = other DNA
gaagtttatctgattttctagg

SEQ ID NO: 127548 - DNA, 22 bp, synthetic construct
  misc_feature 1..22: note = chemically synthesized
  source 1..22: mol_type = other DNA
atctgattttctaggtgttcca

SEQ ID NO: 127549 - DNA, 22 bp, synthetic construct
  misc_feature 1..22: note = chemically synthesized
  source 1..22: mol_type = other DNA
tctgattttctaggtgttccat

SEQ ID NO: 127550 - DNA, 22 bp, synthetic construct
  misc_feature 1..22: note = chemically synthesized
  source 1..22: mol_type = other DNA
attttctaggtgttccattata

SEQ ID NO: 127551 - DNA, 22 bp, synthetic construct
  misc_feature 1..22: note = chemically synthesized
  source 1..22: mol_type = other DNA
tctaggtgttccattatagaat

SEQ ID NO: 127552 - DNA, 22 bp, synthetic construct
  misc_feature 1..22: note = chemically synthesized
  source 1..22: mol_type = other DNA
ctaggtgttccattatagaatc

SEQ ID NO: 127553 - DNA, 22 bp, synthetic construct
  misc_feature 1..22: note = chemically synthesized
  source 1..22: mol_type = other DNA
taggtgttccattatagaatct

SEQ ID NO: 127554 - DNA, 22 bp, synthetic construct
  misc_feature 1..22: note = chemically synthesized
  source 1..22: mol_type = other DNA
ggtgttccattatagaatcttc

SEQ ID NO: 127555 - DNA, 22 bp, synthetic construct
  misc_feature 1..22: note = chemically synthesized
  source 1..22: mol_type = other DNA
cattatagaatcttcttgcttc

SEQ ID NO: 127556 - DNA, 22 bp, synthetic construct
  misc_feature 1..22: note = chemically synthesized
  source 1..22: mol_type = other DNA
tagaatcttcttgcttctatcc

SEQ ID NO: 127557 - DNA, 22 bp, synthetic construct
  misc_feature 1..22: note = chemically synthesized
  source 1..22: mol_type = other DNA
cttgcttctatcctcagtcttt

SEQ ID NO: 127558 - DNA, 22 bp, synthetic construct
  misc_feature 1..22: note = chemically synthesized
  source 1..22: mol_type = other DNA
ttgcttctatcctcagtcttta

SEQ ID NO: 127559 - DNA, 22 bp, synthetic construct
  misc_feature 1..22: note = chemically synthesized
  source 1..22: mol_type = other DNA
gcttctatcctcagtctttatg

SEQ ID NO: 127560 - DNA, 22 bp, synthetic construct
  misc_feature 1..22: note = chemically synthesized
  source 1..22: mol_type = other DNA
cttctatcctcagtctttatga

SEQ ID NO: 127561 - DNA, 22 bp, synthetic construct
  misc_feature 1..22: note = chemically synthesized
  source 1..22: mol_type = other DNA
ctatcctcagtctttatgatct

SEQ ID NO: 127562 - DNA, 22 bp, synthetic construct
  misc_feature 1..22: note = chemically synthesized
  source 1..22: mol_type = other DNA
tatcctcagtctttatgatctc

SEQ ID NO: 127563 - DNA, 22 bp, synthetic construct
  misc_feature 1..22: note = chemically synthesized
  source 1..22: mol_type = other DNA
tcctcagtctttatgatctctt

SEQ ID NO: 127564 - DNA, 22 bp, synthetic construct
  misc_feature 1..22: note = chemically synthesized
  source 1..22: mol_type = other DNA
agtctttatgatctctttcctt

SEQ ID NO: 127565 - DNA, 22 bp, synthetic construct
  misc_feature 1..22: note = chemically synthesized
  source 1..22: mol_type = other DNA
tatgatctctttccttccctat

SEQ ID NO: 127566 - DNA, 22 bp, synthetic construct
  misc_feature 1..22: note = chemically synthesized
  source 1..22: mol_type = other DNA
atgatctctttccttccctata

SEQ ID NO: 127567 - DNA, 22 bp, synthetic construct
  misc_feature 1..22: note = chemically synthesized
  source 1..22: mol_type = other DNA
tgatctctttccttccctatat

SEQ ID NO: 127568 - DNA, 22 bp, synthetic construct
  misc_feature 1..22: note = chemically synthesized
  source 1..22: mol_type = other DNA
tttccttccctatatttttttt

SEQ ID NO: 127569 - DNA, 22 bp, synthetic construct
  misc_feature 1..22: note = chemically synthesized
  source 1..22: mol_type = other DNA
tccttccctatattttttttcc

SEQ ID NO: 127570 - DNA, 22 bp, synthetic construct
  misc_feature 1..22: note = chemically synthesized
  source 1..22: mol_type = other DNA
ccttccctatattttttttcct

SEQ ID NO: 127571 - DNA, 22 bp, synthetic construct
  misc_feature 1..22: note = chemically synthesized
  source 1..22: mol_type = other DNA
cttccctatattttttttcctc

SEQ ID NO: 127572 - DNA, 22 bp, synthetic construct
  misc_feature 1..22: note = chemically synthesized
  source 1..22: mol_type = other DNA
ccctatattttttttcctcagc

SEQ ID NO: 127573 - DNA, 22 bp, synthetic construct
  misc_feature 1..22: note = chemically synthesized
  source 1..22: mol_type = other DNA
cctatattttttttcctcagct

SEQ ID NO: 127574 - DNA, 22 bp, synthetic construct
  misc_feature 1..22: note = chemically synthesized
  source 1..22: mol_type = other DNA
tattttttttcctcagctttta

SEQ ID NO: 127575 - DNA, 22 bp, synthetic construct
  misc_feature 1..22: note = chemically synthesized
  source 1..22: mol_type = other DNA
tttttcctcagcttttatctct

SEQ ID NO: 127576 - DNA, 22 bp, synthetic construct
  misc_feature 1..22: note = chemically synthesized
  source 1..22: mol_type = other DNA
ttttcctcagcttttatctctt

SEQ ID NO: 127577 - DNA, 22 bp, synthetic construct
  misc_feature 1..22: note = chemically synthesized
  source 1..22: mol_type = other DNA
tttcctcagcttttatctcttc

SEQ ID NO: 127578 - DNA, 22 bp, synthetic construct
  misc_feature 1..22: note = chemically synthesized
  source 1..22: mol_type = other DNA
ttcctcagcttttatctcttct

SEQ ID NO: 127579 - DNA, 22 bp, synthetic construct
  misc_feature 1..22: note = chemically synthesized
  source 1..22: mol_type = other DNA
tcctcagcttttatctcttctc

SEQ ID NO: 127580 - DNA, 22 bp, synthetic construct
  misc_feature 1..22: note = chemically synthesized
  source 1..22: mol_type = other DNA
cctcagcttttatctcttctct

SEQ ID NO: 127581 - DNA, 22 bp, synthetic construct
  misc_feature 1..22: note = chemically synthesized
  source 1..22: mol_type = other DNA
ctcagcttttatctcttctctc

SEQ ID NO: 127582 - DNA, 22 bp, synthetic construct
  misc_feature 1..22: note = chemically synthesized
  source 1..22: mol_type = other DNA
agcttttatctcttctctcatt

SEQ ID NO: 127583 - DNA, 22 bp, synthetic construct
  misc_feature 1..22: note = chemically synthesized
  source 1..22: mol_type = other DNA
ttatctcttctctcattgtctt

SEQ ID NO: 127584 - DNA, 22 bp, synthetic construct
  misc_feature 1..22: note = chemically synthesized
  source 1..22: mol_type = other DNA
tatctcttctctcattgtcttt

SEQ ID NO: 127585 - DNA, 22 bp, synthetic construct
  misc_feature 1..22: note = chemically synthesized
  source 1..22: mol_type = other DNA
atctcttctctcattgtctttc

SEQ ID NO: 127586 - DNA, 22 bp, synthetic construct
  misc_feature 1..22: note = chemically synthesized
  source 1..22: mol_type = other DNA
tctcttctctcattgtctttct

SEQ ID NO: 127587 - DNA, 22 bp, synthetic construct
  misc_feature 1..22: note = chemically synthesized
  source 1..22: mol_type = other DNA
ttctctcattgtctttcttctc

SEQ ID NO: 127588 - DNA, 22 bp, synthetic construct
  misc_feature 1..22: note = chemically synthesized
  source 1..22: mol_type = other DNA
ctctcattgtctttcttctcag

SEQ ID NO: 127589 - DNA, 22 bp, synthetic construct
  misc_feature 1..22: note = chemically synthesized
  source 1..22: mol_type = other DNA
tctcattgtctttcttctcaga

SEQ ID NO: 127590 - DNA, 22 bp, synthetic construct
  misc_feature 1..22: note = chemically synthesized
  source 1..22: mol_type = other DNA
tcattgtctttcttctcagaaa

SEQ ID NO: 127591 - DNA, 22 bp, synthetic construct
  misc_feature 1..22: note = chemically synthesized
  source 1..22: mol_type = other DNA
attgtctttcttctcagaaacc

SEQ ID NO: 127592 - DNA, 22 bp, synthetic construct
  misc_feature 1..22: note = chemically synthesized
  source 1..22: mol_type = other DNA
tctttcttctcagaaaccaaga

SEQ ID NO: 127593 - DNA, 22 bp, synthetic construct
  misc_feature 1..22: note = chemically synthesized
  source 1..22: mol_type = other DNA
tcttctcagaaaccaagagcca

SEQ ID NO: 127594 - DNA, 22 bp, synthetic construct
  misc_feature 1..22: note = chemically synthesized
  source 1..22: mol_type = other DNA
cttctcagaaaccaagagccac

SEQ ID NO: 127595 - DNA, 22 bp, synthetic construct
  misc_feature 1..22: note = chemically synthesized
  source 1..22: mol_type = other DNA
ttctcagaaaccaagagccacg

SEQ ID NO: 127596 - DNA, 22 bp, synthetic construct
  misc_feature 1..22: note = chemically synthesized
  source 1..22: mol_type = other DNA
ctcagaaaccaagagccacgac

SEQ ID NO: 127597 - DNA, 22 bp, synthetic construct
  misc_feature 1..22: note = chemically synthesized
  source 1..22: mol_type = other DNA
tcagaaaccaagagccacgact

SEQ ID NO: 127598 - DNA, 22 bp, synthetic construct
  misc_feature 1..22: note = chemically synthesized
  source 1..22: mol_type = other DNA
agaaaccaagagccacgactag

SEQ ID NO: 127599 - DNA, 22 bp, synthetic construct
  misc_feature 1..22: note = chemically synthesized
  source 1..22: mol_type = other DNA
gctgaggacacaagaattttca

SEQ ID NO: 127600 - DNA, 22 bp, synthetic construct
  misc_feature 1..22: note = chemically synthesized
  source 1..22: mol_type = other DNA
aggacacaagaattttcacaaa

SEQ ID NO: 127601 - DNA, 22 bp, synthetic construct
  misc_feature 1..22: note = chemically synthesized
  source 1..22: mol_type = other DNA
tcacaaaacaaagtagagtgat

SEQ ID NO: 127602 - DNA, 22 bp, synthetic construct
  misc_feature 1..22: note = chemically synthesized
  source 1..22: mol_type = other DNA
cacaaaacaaagtagagtgatt

SEQ ID NO: 127603 - DNA, 22 bp, synthetic construct
  misc_feature 1..22: note = chemically synthesized
  source 1..22: mol_type = other DNA
acaaaacaaagtagagtgattc

SEQ ID NO: 127604 - DNA, 22 bp, synthetic construct
  misc_feature 1..22: note = chemically synthesized
  source 1..22: mol_type = other DNA
catagatcactattatagctgc

SEQ ID NO: 127605 - DNA, 22 bp, synthetic construct
  misc_feature 1..22: note = chemically synthesized
  source 1..22: mol_type = other DNA
ttatagctgcattaccaggtat

SEQ ID NO: 127606 - DNA, 22 bp, synthetic construct
  misc_feature 1..22: note = chemically synthesized
  source 1..22: mol_type = other DNA
tagctgcattaccaggtatgtc

SEQ ID NO: 127607 - DNA, 22 bp, synthetic construct
  misc_feature 1..22: note = chemically synthesized
  source 1..22: mol_type = other DNA
cattaccaggtatgtctgcatg

SEQ ID NO: 127608 - DNA, 22 bp, synthetic construct
  misc_feature 1..22: note = chemically synthesized
  source 1..22: mol_type = other DNA
ccaggtatgtctgcatggaatt

SEQ ID NO: 127609 - DNA, 22 bp, synthetic construct
  misc_feature 1..22: note = chemically synthesized
  source 1..22: mol_type = other DNA
catggaattcttgggaatggag

SEQ ID NO: 127610 - DNA, 22 bp, synthetic construct
  misc_feature 1..22: note = chemically synthesized
  source 1..22: mol_type = other DNA
ttgggaatggagaaggaggaaa

SEQ ID NO: 127611 - DNA, 22 bp, synthetic construct
  misc_feature 1..22: note = chemically synthesized
  source 1..22: mol_type = other DNA
gggaatggagaaggaggaaact

SEQ ID NO: 127612 - DNA, 22 bp, synthetic construct
  misc_feature 1..22: note = chemically synthesized
  source 1..22: mol_type = other DNA
ggaatggagaaggaggaaactt

SEQ ID NO: 127613 - DNA, 22 bp, synthetic construct
  misc_feature 1..22: note = chemically synthesized
  source 1..22: mol_type = other DNA
taagttgcaggttattattggc

SEQ ID NO: 127614 - DNA, 22 bp, synthetic construct
  misc_feature 1..22: note = chemically synthesized
  source 1..22: mol_type = other DNA
aagttgcaggttattattggca

SEQ ID NO: 127615 - DNA, 22 bp, synthetic construct
  misc_feature 1..22: note = chemically synthesized
  source 1..22: mol_type = other DNA
agttgcaggttattattggcaa

SEQ ID NO: 127616 - DNA, 22 bp, synthetic construct
  misc_feature 1..22: note = chemically synthesized
  source 1..22: mol_type = other DNA
caggttattattggcaaaatac

SEQ ID NO: 127617 - DNA, 22 bp, synthetic construct
  misc_feature 1..22: note = chemically synthesized
  source 1..22: mol_type = other DNA
ttattggcaaaatacaatcatt

SEQ ID NO: 127618 - DNA, 22 bp, synthetic construct
  misc_feature 1..22: note = chemically synthesized
  source 1..22: mol_type = other DNA
ttggcaaaatacaatcattgcc

SEQ ID NO: 127619 - DNA, 22 bp, synthetic construct
  misc_feature 1..22: note = chemically synthesized
  source 1..22: mol_type = other DNA
gcaaaatacaatcattgcctta

SEQ ID NO: 127620 - DNA, 22 bp, synthetic construct
  misc_feature 1..22: note = chemically synthesized
  source 1..22: mol_type = other DNA
ccttacagtttggttagctttc

SEQ ID NO: 127621 - DNA, 22 bp, synthetic construct
  misc_feature 1..22: note = chemically synthesized
  source 1..22: mol_type = other DNA
acagtttggttagctttccctg

SEQ ID NO: 127622 - DNA, 22 bp, synthetic construct
  misc_feature 1..22: note = chemically synthesized
  source 1..22: mol_type = other DNA
cagtttggttagctttccctgt

SEQ ID NO: 127623 - DNA, 22 bp, synthetic construct
  misc_feature 1..22: note = chemically synthesized
  source 1..22: mol_type = other DNA
ggttagctttccctgtagtgat

SEQ ID NO: 127624 - DNA, 22 bp, synthetic construct
  misc_feature 1..22: note = chemically synthesized
  source 1..22: mol_type = other DNA
gttagctttccctgtagtgatt

SEQ ID NO: 127625 - DNA, 22 bp, synthetic construct
  misc_feature 1..22: note = chemically synthesized
  source 1..22: mol_type = other DNA
gctttccctgtagtgattcatc

SEQ ID NO: 127626 - DNA, 22 bp, synthetic construct
  misc_feature 1..22: note = chemically synthesized
  source 1..22: mol_type = other DNA
tccctgtagtgattcatcactt

SEQ ID NO: 127627 - DNA, 22 bp, synthetic construct
  misc_feature 1..22: note = chemically synthesized
  source 1..22: mol_type = other DNA
ccctgtagtgattcatcacttg

SEQ ID NO: 127628 - DNA, 22 bp, synthetic construct
  misc_feature 1..22: note = chemically synthesized
  source 1..22: mol_type = other DNA
cctgtagtgattcatcacttgt

SEQ ID NO: 127629 - DNA, 22 bp, synthetic construct
  misc_feature 1..22: note = chemically synthesized
  source 1..22: mol_type = other DNA
tagtgattcatcacttgtgctg

SEQ ID NO: 127630 - DNA, 22 bp, synthetic construct
  misc_feature 1..22: note = chemically synthesized
  source 1..22: mol_type = other DNA
atcacttgtgctgcatattctc

SEQ ID NO: 127631 - DNA, 22 bp, synthetic construct
  misc_feature 1..22: note = chemically synthesized
  source 1..22: mol_type = other DNA
gtgctgcatattctctgataag

SEQ ID NO: 127632 - DNA, 22 bp, synthetic construct
  misc_feature 1..22: note = chemically synthesized
  source 1..22: mol_type = other DNA
tgctgcatattctctgataaga

SEQ ID NO: 127633 - DNA, 22 bp, synthetic construct
  misc_feature 1..22: note = chemically synthesized
  source 1..22: mol_type = other DNA
catattctctgataagaaggaa

SEQ ID NO: 127634 - DNA, 22 bp, synthetic construct
  misc_feature 1..22: note = chemically synthesized
  source 1..22: mol_type = other DNA
tctgataagaaggaatttttca

SEQ ID NO: 127635 - DNA, 22 bp, synthetic construct
  misc_feature 1..22: note = chemically synthesized
  source 1..22: mol_type = other DNA
tgataagaaggaatttttcaca

SEQ ID NO: 127636 - DNA, 22 bp, synthetic construct
  misc_feature 1..22: note = chemically synthesized
  source 1..22: mol_type = other DNA
ataagaaggaatttttcacaaa

SEQ ID NO: 127637 - DNA, 22 bp, synthetic construct
  misc_feature 1..22: note = chemically synthesized
  source 1..22: mol_type = other DNA
ttcacaaagttgagatacagtg

SEQ ID NO: 127638 - DNA, 22 bp, synthetic construct
  misc_feature 1..22: note = chemically synthesized
  source 1..22: mol_type = other DNA
tcacaaagttgagatacagtga

SEQ ID NO: 127639 - DNA, 22 bp, synthetic construct
  misc_feature 1..22: note = chemically synthesized
  source 1..22: mol_type = other DNA
cacaaagttgagatacagtgaa

SEQ ID NO: 127640 - DNA, 22 bp, synthetic construct
  misc_feature 1..22: note = chemically synthesized
  source 1..22: mol_type = other DNA
acaaagttgagatacagtgaaa

SEQ ID NO: 127641 - DNA, 22 bp, synthetic construct
  misc_feature 1..22: note = chemically synthesized
  source 1..22: mol_type = other DNA
agatacagtgaaagattaggtt

SEQ ID NO: 127642 - DNA, 22 bp, synthetic construct
  misc_feature 1..22: note = chemically synthesized
  source 1..22: mol_type = other DNA
ggttaaaggagattattgctga

SEQ ID NO: 127643 - DNA, 22 bp, synthetic construct
  misc_feature 1..22: note = chemically synthesized
  source 1..22: mol_type = other DNA
aaggagattattgctgaaacgt

SEQ ID NO: 127644 - DNA, 22 bp, synthetic construct
  misc_feature 1..22: note = chemically synthesized
  source 1..22: mol_type = other DNA
ttgctgaaacgtcagagaagta

SEQ ID NO: 127645 - DNA, 22 bp, synthetic construct
  misc_feature 1..22: note = chemically synthesized
  source 1..22: mol_type = other DNA
ctgaaacgtcagagaagtaaga

SEQ ID NO: 127646 - DNA, 22 bp, synthetic construct
  misc_feature 1..22: note = chemically synthesized
  source 1..22: mol_type = other DNA
aaacgtcagagaagtaagagtg

SEQ ID NO: 127647 - DNA, 22 bp, synthetic construct
  misc_feature 1..22: note = chemically synthesized
  source 1..22: mol_type = other DNA
acagagaaatgaagtacataga

SEQ ID NO: 127648 - DNA, 22 bp, synthetic construct
  misc_feature 1..22: note = chemically synthesized
  source 1..22: mol_type = other DNA
agctggattatctttgcgtcta

SEQ ID NO: 127649 - DNA, 22 bp, synthetic construct
  misc_feature 1..22: note = chemically synthesized
  source 1..22: mol_type = other DNA
gattatctttgcgtctagtaac

SEQ ID NO: 127650 - DNA, 22 bp, synthetic construct
  misc_feature 1..22: note = chemically synthesized
  source 1..22: mol_type = other DNA
tctttgcgtctagtaactgaag

SEQ ID NO: 127651 - DNA, 22 bp, synthetic construct
  misc_feature 1..22: note = chemically synthesized
  source 1..22: mol_type = other DNA
tgcgtctagtaactgaagaata

SEQ ID NO: 127652 - DNA, 22 bp, synthetic construct
  misc_feature 1..22: note = chemically synthesized
  source 1..22: mol_type = other DNA
gcgtctagtaactgaagaatat

SEQ ID NO: 127653 - DNA, 22 bp, synthetic construct
  misc_feature 1..22: note = chemically synthesized
  source 1..22: mol_type = other DNA
cgtctagtaactgaagaatata

SEQ ID NO: 127654 - DNA, 22 bp, synthetic construct
  misc_feature 1..22: note = chemically synthesized
  source 1..22: mol_type = other DNA
gtaactgaagaatatacatcac

SEQ ID NO: 127655 - DNA, 22 bp, synthetic construct
  misc_feature 1..22: note = chemically synthesized
  source 1..22: mol_type = other DNA
aagaatatacatcactcattgt

SEQ ID NO: 127656 - DNA, 22 bp, synthetic construct
  misc_feature 1..22: note = chemically synthesized
  source 1..22: mol_type = other DNA
attgtatgttcagtaggcactg

SEQ ID NO: 127657 - DNA, 22 bp, synthetic construct
  misc_feature 1..22: note = chemically synthesized
  source 1..22: mol_type = other DNA
tatgttcagtaggcactgaatt

SEQ ID NO: 127658 - DNA, 22 bp, synthetic construct
  misc_feature 1..22: note = chemically synthesized
  source 1..22: mol_type = other DNA
agtaggcactgaattctggttt

SEQ ID NO: 127659 - DNA, 22 bp, synthetic construct
  misc_feature 1..22: note = chemically synthesized
  source 1..22: mol_type = other DNA
aattctggtttatgtctctcag

SEQ ID NO: 127660 - DNA, 22 bp, synthetic construct
  misc_feature 1..22: note = chemically synthesized
  source 1..22: mol_type = other DNA
tggtttatgtctctcagtccta

SEQ ID NO: 127661 - DNA, 22 bp, synthetic construct
  misc_feature 1..22: note = chemically synthesized
  source 1..22: mol_type = other DNA
gtttatgtctctcagtcctagg

SEQ ID NO: 127662 - DNA, 22 bp, synthetic construct
  misc_feature 1..22: note = chemically synthesized
  source 1..22: mol_type = other DNA
atgtctctcagtcctaggacag

SEQ ID NO: 127663 - DNA, 22 bp, synthetic construct
  misc_feature 1..22: note = chemically synthesized
  source 1..22: mol_type = other DNA
tgtctctcagtcctaggacaga

SEQ ID NO: 127664 - DNA, 22 bp, synthetic construct
  misc_feature 1..22: note = chemically synthesized
  source 1..22: mol_type = other DNA
tcagtcctaggacagaatatgg

SEQ ID NO: 127665 - DNA, 22 bp, synthetic construct
  misc_feature 1..22: note = chemically synthesized
  source 1..22: mol_type = other DNA
agtcctaggacagaatatggat

SEQ ID NO: 127666 - DNA, 22 bp, synthetic construct
  misc_feature 1..22: note = chemically synthesized
  source 1..22: mol_type = other DNA
ggacagaatatggatgctgaaa

SEQ ID NO: 127667 - DNA, 22 bp, synthetic construct
  misc_feature 1..22: note = chemically synthesized
  source 1..22: mol_type = other DNA
aaaaatgattctttcaaagtgc

SEQ ID NO: 127668 - DNA, 22 bp, synthetic construct
  misc_feature 1..22: note = chemically synthesized
  source 1..22: mol_type = other DNA
tttcaaagtgctgagttgttgc

SEQ ID NO: 127669 - DNA, 22 bp, synthetic construct
  misc_feature 1..22: note = chemically synthesized
  source 1..22: mol_type = other DNA
tcaaagtgctgagttgttgcct

SEQ ID NO: 127670 - DNA, 22 bp, synthetic construct
  misc_feature 1..22: note = chemically synthesized
  source 1..22: mol_type = other DNA
caaagtgctgagttgttgcctc

SEQ ID NO: 127671 - DNA, 22 bp, synthetic construct
  misc_feature 1..22: note = chemically synthesized
  source 1..22: mol_type = other DNA
aaagtgctgagttgttgcctca

SEQ ID NO: 127672 - DNA, 22 bp, synthetic construct
  misc_feature 1..22: note = chemically synthesized
  source 1..22: mol_type = other DNA
agttgttgcctcacgcccagtt

SEQ ID NO: 127673 - DNA, 22 bp, synthetic construct
  misc_feature 1..22: note = chemically synthesized
  source 1..22: mol_type = other DNA
ttgcctcacgcccagttgtctg

SEQ ID NO: 127674 - DNA, 22 bp, synthetic construct
  misc_feature 1..22: note = chemically synthesized
  source 1..22: mol_type = other DNA
cctcacgcccagttgtctggca

SEQ ID NO: 127675 - DNA, 22 bp, synthetic construct
  misc_feature 1..22: note = chemically synthesized
  source 1..22: mol_type = other DNA
acgcccagttgtctggcatctc

SEQ ID NO: 127676 - DNA, 22 bp, synthetic construct
  misc_feature 1..22: note = chemically synthesized
  source 1..22: mol_type = other DNA
tctggcatctcttcactgaaac

SEQ ID NO: 127677 - DNA, 22 bp, synthetic construct
  misc_feature 1..22: note = chemically synthesized
  source 1..22: mol_type = other DNA
gcatctcttcactgaaactatt

SEQ ID NO: 127678 - DNA, 22 bp, synthetic construct
  misc_feature 1..22: note = chemically synthesized
  source 1..22: mol_type = other DNA
ttcactgaaactattacagtta

SEQ ID NO: 127679 - DNA, 22 bp, synthetic construct
  misc_feature 1..22: note = chemically synthesized
  source 1..22: mol_type = other DNA
cactgaaactattacagttaga

SEQ ID NO: 127680 - DNA, 22 bp, synthetic construct
  misc_feature 1..22: note = chemically synthesized
  source 1..22: mol_type = other DNA
actgaaactattacagttagat

SEQ ID NO: 127681 - DNA, 22 bp, synthetic construct
  misc_feature 1..22: note = chemically synthesized
  source 1..22: mol_type = other DNA
aaactattacagttagatctca

SEQ ID NO: 127682 - DNA, 22 bp, synthetic construct
  misc_feature 1..22: note = chemically synthesized
  source 1..22: mol_type = other DNA
ttacagttagatctcatctcta

SEQ ID NO: 127683 - DNA, 22 bp, synthetic construct
  misc_feature 1..22: note = chemically synthesized
  source 1..22: mol_type = other DNA
cagttagatctcatctctatgg

SEQ ID NO: 127684 - DNA, 22 bp, synthetic construct
  misc_feature 1..22: note = chemically synthesized
  source 1..22: mol_type = other DNA
gatctcatctctatgggtggaa

SEQ ID NO: 127685 - DNA, 22 bp, synthetic construct
  misc_feature 1..22: note = chemically synthesized
  source 1..22: mol_type = other DNA
atctctatgggtggaaggtaag

SEQ ID NO: 127686 - DNA, 22 bp, synthetic construct
  misc_feature 1..22: note = chemically synthesized
  source 1..22: mol_type = other DNA
tatgggtggaaggtaagaggat

SEQ ID NO: 127687 - DNA, 22 bp, synthetic construct
  misc_feature 1..22: note = chemically synthesized
  source 1..22: mol_type = other DNA
tgggtggaaggtaagaggatcg

SEQ ID NO: 127688 - DNA, 22 bp, synthetic construct
  misc_feature 1..22: note = chemically synthesized
  source 1..22: mol_type = other DNA
cctttggtggcatctttagggt

SEQ ID NO: 127689 - DNA, 22 bp, synthetic construct
  misc_feature 1..22: note = chemically synthesized
  source 1..22: mol_type = other DNA
ctttggtggcatctttagggta

SEQ ID NO: 127690 - DNA, 22 bp, synthetic construct
  misc_feature 1..22: note = chemically synthesized
  source 1..22: mol_type = other DNA
tggtggcatctttagggtagtg

SEQ ID NO: 127691 - DNA, 22 bp, synthetic construct
  misc_feature 1..22: note = chemically synthesized
  source 1..22: mol_type = other DNA
ggtggcatctttagggtagtgc

SEQ ID NO: 127692 - DNA, 22 bp, synthetic construct
  misc_feature 1..22: note = chemically synthesized
  source 1..22: mol_type = other DNA
gtggcatctttagggtagtgcc

SEQ ID NO: 127693 - DNA, 22 bp, synthetic construct
  misc_feature 1..22: note = chemically synthesized
  source 1..22: mol_type = other DNA
tagggtagtgccttacactgac

SEQ ID NO: 127694 - DNA, 22 bp, synthetic construct
  misc_feature 1..22: note = chemically synthesized
  source 1..22: mol_type = other DNA
agggtagtgccttacactgaca

SEQ ID NO: 127695 - DNA, 22 bp, synthetic construct
  misc_feature 1..22: note = chemically synthesized
  source 1..22: mol_type = other DNA
gggtagtgccttacactgacaa

SEQ ID NO: 127696 - DNA, 22 bp, synthetic construct
  misc_feature 1..22: note = chemically synthesized
  source 1..22: mol_type = other DNA
acactgacaaagtaactctgaa

SEQ ID NO: 127697 - DNA, 22 bp, synthetic construct
  misc_feature 1..22: note = chemically synthesized
  source 1..22: mol_type = other DNA
cactgacaaagtaactctgaag

SEQ ID NO: 127698 - DNA, 22 bp, synthetic construct
  misc_feature 1..22: note = chemically synthesized
  source 1..22: mol_type = other DNA
acaaagtaactctgaaggggta

SEQ ID NO: 127699 - DNA, 22 bp, synthetic construct
  misc_feature 1..22: note = chemically synthesized
  source 1..22: mol_type = other DNA
tgaaggggtatatttggatacg

SEQ ID NO: 127700 - DNA, 22 bp, synthetic construct
  misc_feature 1..22: note = chemically synthesized
  source 1..22: mol_type = other DNA
aaggggtatatttggatacgac

SEQ ID NO: 127701 - DNA, 22 bp, synthetic construct
  misc_feature 1..22: note = chemically synthesized
  source 1..22: mol_type = other DNA
ggatacgaccatctttttaact

SEQ ID NO: 127702 - DNA, 22 bp, synthetic construct
  misc_feature 1..22: note = chemically synthesized
  source 1..22: mol_type = other DNA
gatacgaccatctttttaactt

SEQ ID NO: 127703 - DNA, 22 bp, synthetic construct
  misc_feature 1..22: note = chemically synthesized
  source 1..22: mol_type = other DNA
tttaacttaggataaaaacaac

SEQ ID NO: 127704 - DNA, 22 bp, synthetic construct
  misc_feature 1..22: note = chemically synthesized
  source 1..22: mol_type = other DNA
ttaacttaggataaaaacaact

SEQ ID NO: 127705 - DNA, 22 bp, synthetic construct
  misc_feature 1..22: note = chemically synthesized
  source 1..22: mol_type = other DNA
taacttaggataaaaacaactt

SEQ ID NO: 127706 - DNA, 22 bp, synthetic construct
  misc_feature 1..22: note = chemically synthesized
  source 1..22: mol_type = other DNA
aacttaggataaaaacaacttc

SEQ ID NO: 127707 - DNA, 22 bp, synthetic construct
  misc_feature 1..22: note = chemically synthesized
  source 1..22: mol_type = other DNA
acttaggataaaaacaacttca

SEQ ID NO: 127708 - DNA, 22 bp, synthetic construct
  misc_feature 1..22: note = chemically synthesized
  source 1..22: mol_type = other DNA
aggataaaaacaacttcaagaa

SEQ ID NO: 127709 - DNA, 22 bp, synthetic construct
  misc_feature 1..22: note = chemically synthesized
  source 1..22: mol_type = other DNA
ggataaaaacaacttcaagaag

SEQ ID NO: 127710 - DNA, 22 bp, synthetic construct
  misc_feature 1..22: note = chemically synthesized
  source 1..22: mol_type = other DNA
caagaagttgttctggcatgtg

SEQ ID NO: 127711 - DNA, 22 bp, synthetic construct
  misc_feature 1..22: note = chemically synthesized
  source 1..22: mol_type = other DNA
aagaagttgttctggcatgtga

SEQ ID NO: 127712 - DNA, 22 bp, synthetic construct
  misc_feature 1..22: note = chemically synthesized
  source 1..22: mol_type = other DNA
ttctggcatgtgacaagaaaaa

SEQ ID NO: 127713 - DNA, 22 bp, synthetic construct
  misc_feature 1..22: note = chemically synthesized
  source 1..22: mol_type = other DNA
tggcatgtgacaagaaaaaaaa

SEQ ID NO: 127714 - DNA, 22 bp, synthetic construct
  misc_feature 1..22: note = chemically synthesized
  source 1..22: mol_type = other DNA
gcatgtgacaagaaaaaaaagc

SEQ ID NO: 127715 - DNA, 22 bp, synthetic construct
  misc_feature 1..22: note = chemically synthesized
  source 1..22: mol_type = other DNA
gctctaattcagctatatttac

SEQ ID NO: 127716 - DNA, 22 bp, synthetic construct
  misc_feature 1..22: note = chemically synthesized
  source 1..22: mol_type = other DNA
ctctaattcagctatatttact

SEQ ID NO: 127717 - DNA, 22 bp, synthetic construct
  misc_feature 1..22: note = chemically synthesized
  source 1..22: mol_type = other DNA
taattcagctatatttactaat

SEQ ID NO: 127718 - DNA, 22 bp, synthetic construct
  misc_feature 1..22: note = chemically synthesized
  source 1..22: mol_type = other DNA
attcagctatatttactaatga

SEQ ID NO: 127719 - DNA, 22 bp, synthetic construct
  misc_feature 1..22: note = chemically synthesized
  source 1..22: mol_type = other DNA
agctatatttactaatgactct

SEQ ID NO: 127720 - DNA, 22 bp, synthetic construct
  misc_feature 1..22: note = chemically synthesized
  source 1..22: mol_type = other DNA
tatttactaatgactcttgatt

SEQ ID NO: 127721 - DNA, 22 bp, synthetic construct
  misc_feature 1..22: note = chemically synthesized
  source 1..22: mol_type = other DNA
actaatgactcttgatttcctc

SEQ ID NO: 127722 - DNA, 22 bp, synthetic construct
  misc_feature 1..22: note = chemically synthesized
  source 1..22: mol_type = other DNA
ctaatgactcttgatttcctca

SEQ ID NO: 127723 - DNA, 22 bp, synthetic construct
  misc_feature 1..22: note = chemically synthesized
  source 1..22: mol_type = other DNA
atgactcttgatttcctcacaa

SEQ ID NO: 127724 - DNA, 22 bp, synthetic construct
  misc_feature 1..22: note = chemically synthesized
  source 1..22: mol_type = other DNA
ttgatttcctcacaagtgaata

SEQ ID NO: 127725 - DNA, 22 bp, synthetic construct
  misc_feature 1..22: note = chemically synthesized
  source 1..22: mol_type = other DNA
gatttcctcacaagtgaatatg

SEQ ID NO: 127726 - DNA, 22 bp, synthetic construct
  misc_feature 1..22: note = chemically synthesized
  source 1..22: mol_type = other DNA
atttcctcacaagtgaatatgt

SEQ ID NO: 127727 - DNA, 22 bp, synthetic construct
  misc_feature 1..22: note = chemically synthesized
  source 1..22: mol_type = other DNA
cctcacaagtgaatatgtatcc

SEQ ID NO: 127728 - DNA, 22 bp, synthetic construct
  misc_feature 1..22: note = chemically synthesized
  source 1..22: mol_type = other DNA
ctcacaagtgaatatgtatccc

SEQ ID NO: 127729 - DNA, 22 bp, synthetic construct
  misc_feature 1..22: note = chemically synthesized
  source 1..22: mol_type = other DNA
acaagtgaatatgtatccccct

SEQ ID NO: 127730 - DNA, 22 bp, synthetic construct
  misc_feature 1..22: note = chemically synthesized
  source 1..22: mol_type = other DNA
agacttccattttgagtaaatg

SEQ ID NO: 127731 - DNA, 22 bp, synthetic construct
  misc_feature 1..22: note = chemically synthesized
  source 1..22: mol_type = other DNA
ccattttgagtaaatggcttca

SEQ ID NO: 127732 - DNA, 22 bp, synthetic construct
  misc_feature 1..22: note = chemically synthesized
  source 1..22: mol_type = other DNA
cattttgagtaaatggcttcac

SEQ ID NO: 127733 - DNA, 22 bp, synthetic construct
  misc_feature 1..22: note = chemically synthesized
  source 1..22: mol_type = other DNA
tgagtaaatggcttcaccattc

SEQ ID NO: 127734 - DNA, 22 bp, synthetic construct
  misc_feature 1..22: note = chemically synthesized
  source 1..22: mol_type = other DNA
gagtaaatggcttcaccattct

SEQ ID NO: 127735 - DNA, 22 bp, synthetic construct
  misc_feature 1..22: note = chemically synthesized
  source 1..22: mol_type = other DNA
agtaaatggcttcaccattctt

SEQ ID NO: 127736 - DNA, 22 bp, synthetic construct
  misc_feature 1..22: note = chemically synthesized
  source 1..22: mol_type = other DNA
caccattctttcatttgttcaa

SEQ ID NO: 127737 - DNA, 22 bp, synthetic construct
  misc_feature 1..22: note = chemically synthesized
  source 1..22: mol_type = other DNA
accattctttcatttgttcaaa

SEQ ID NO: 127738 - DNA, 22 bp, synthetic construct
  misc_feature 1..22: note = chemically synthesized
  source 1..22: mol_type = other DNA
tttcatttgttcaaacagaaat

SEQ ID NO: 127739 - DNA, 22 bp, synthetic construct
  misc_feature 1..22: note = chemically synthesized
  source 1..22: mol_type = other DNA
tcatttgttcaaacagaaatct

SEQ ID NO: 127740 - DNA, 22 bp, synthetic construct
  misc_feature 1..22: note = chemically synthesized
  source 1..22: mol_type = other DNA
catttgttcaaacagaaatcta

SEQ ID NO: 127741 - DNA, 22 bp, synthetic construct
  misc_feature 1..22: note = chemically synthesized
  source 1..22: mol_type = other DNA
atttgttcaaacagaaatctag

SEQ ID NO: 127742 - DNA, 22 bp, synthetic construct
  misc_feature 1..22: note = chemically synthesized
  source 1..22: mol_type = other DNA
gttcaaacagaaatctagggga

SEQ ID NO: 127743 - DNA, 22 bp, synthetic construct
  misc_feature 1..22: note = chemically synthesized
  source 1..22: mol_type = other DNA
ttcaaacagaaatctaggggaa

SEQ ID NO: 127744 - DNA, 22 bp, synthetic construct
  misc_feature 1..22: note = chemically synthesized
  source 1..22: mol_type = other DNA
aaacagaaatctaggggaaacc

SEQ ID NO: 127745 - DNA, 22 bp, synthetic construct
  misc_feature 1..22: note = chemically synthesized
  source 1..22: mol_type = other DNA
ggggaaacctcatttgattttt

SEQ ID NO: 127746 - DNA, 22 bp, synthetic construct
  misc_feature 1..22: note = chemically synthesized
  source 1..22: mol_type = other DNA
atttgatttttccctcactccc

SEQ ID NO: 127747 - DNA, 22 bp, synthetic construct
  misc_feature 1..22: note = chemically synthesized
  source 1..22: mol_type = other DNA
gatttttccctcactcccattt

SEQ ID NO: 127748 - DNA, 22 bp, synthetic construct
  misc_feature 1..22: note = chemically synthesized
  source 1..22: mol_type = other DNA
atttttccctcactcccatttt

SEQ ID NO: 127749 - DNA, 22 bp, synthetic construct
  misc_feature 1..22: note = chemically synthesized
  source 1..22: mol_type = other DNA
ttccctcactcccatttttaat

SEQ ID NO: 127750 - DNA, 22 bp, synthetic construct
  misc_feature 1..22: note = chemically synthesized
  source 1..22: mol_type = other DNA
tccctcactcccatttttaata

SEQ ID NO: 127751 - DNA, 22 bp, synthetic construct
  misc_feature 1..22: note = chemically synthesized
  source 1..22: mol_type = other DNA
ccctcactcccatttttaatat

SEQ ID NO: 127752 - DNA, 22 bp, synthetic construct
  misc_feature 1..22: note = chemically synthesized
  source 1..22: mol_type = other DNA
cctcactcccatttttaatata

SEQ ID NO: 127753 - DNA, 22 bp, synthetic construct
  misc_feature 1..22: note = chemically synthesized
  source 1..22: mol_type = other DNA
actcccatttttaatatatcag

SEQ ID NO: 127754 - DNA, 22 bp, synthetic construct
  misc_feature 1..22: note = chemically synthesized
  source 1..22: mol_type = other DNA
ccatttttaatatatcagcaaa

SEQ ID NO: 127755 - DNA, 22 bp, synthetic construct
  misc_feature 1..22: note = chemically synthesized
  source 1..22: mol_type = other DNA
ttaatatatcagcaaatcttgg

SEQ ID NO: 127756 - DNA, 22 bp, synthetic construct
  misc_feature 1..22: note = chemically synthesized
  source 1..22: mol_type = other DNA
taatatatcagcaaatcttggc

SEQ ID NO: 127757 - DNA, 22 bp, synthetic construct
  misc_feature 1..22: note = chemically synthesized
  source 1..22: mol_type = other DNA
aatatatcagcaaatcttggca

SEQ ID NO: 127758 - DNA, 22 bp, synthetic construct
  misc_feature 1..22: note = chemically synthesized
  source 1..22: mol_type = other DNA
atatatcagcaaatcttggcac

SEQ ID NO: 127759 - DNA, 22 bp, synthetic construct
  misc_feature 1..22: note = chemically synthesized
  source 1..22: mol_type = other DNA
ggcactacttcaaaaatgcatc

SEQ ID NO: 127760 - DNA, 22 bp, synthetic construct
  misc_feature 1..22: note = chemically synthesized
  source 1..22: mol_type = other DNA
gcactacttcaaaaatgcatct

SEQ ID NO: 127761 - DNA, 22 bp, synthetic construct
  misc_feature 1..22: note = chemically synthesized
  source 1..22: mol_type = other DNA
cttcaaaaatgcatctgtctct

SEQ ID NO: 127762 - DNA, 22 bp, synthetic construct
  misc_feature 1..22: note = chemically synthesized
  source 1..22: mol_type = other DNA
caaaaatgcatctgtctctgtt

SEQ ID NO: 127763 - DNA, 22 bp, synthetic construct
  misc_feature 1..22: note = chemically synthesized
  source 1..22: mol_type = other DNA
aaaaatgcatctgtctctgttt

SEQ ID NO: 127764 - DNA, 22 bp, synthetic construct
  misc_feature 1..22: note = chemically synthesized
  source 1..22: mol_type = other DNA
tctctgtttaagtttttctatt

SEQ ID NO: 127765 - DNA, 22 bp, synthetic construct
  misc_feature 1..22: note = chemically synthesized
  source 1..22: mol_type = other DNA
tgtttaagtttttctatttttc

SEQ ID NO: 127766 - DNA, 22 bp, synthetic construct
  misc_feature 1..22: note = chemically synthesized
  source 1..22: mol_type = other DNA
tttaagtttttctatttttctc

SEQ ID NO: 127767 - DNA, 22 bp, synthetic construct
  misc_feature 1..22: note = chemically synthesized
  source 1..22: mol_type = other DNA
aagtttttctatttttctcttt

SEQ ID NO: 127768 - DNA, 22 bp, synthetic construct
  misc_feature 1..22: note = chemically synthesized
  source 1..22: mol_type = other DNA
agtttttctatttttctctttt

SEQ ID NO: 127769 - DNA, 22 bp, synthetic construct
  misc_feature 1..22: note = chemically synthesized
  source 1..22: mol_type = other DNA
ttctatttttctctttttttca

SEQ ID NO: 127770 - DNA, 22 bp, synthetic construct
  misc_feature 1..22: note = chemically synthesized
  source 1..22: mol_type = other DNA
tctatttttctctttttttcat

SEQ ID NO: 127771 - DNA, 22 bp, synthetic construct
  misc_feature 1..22: note = chemically synthesized
  source 1..22: mol_type = other DNA
ctatttttctctttttttcatt

SEQ ID NO: 127772 - DNA, 22 bp, synthetic construct
  misc_feature 1..22: note = chemically synthesized
  source 1..22: mol_type = other DNA
tatttttctctttttttcattt

SEQ ID NO: 127773 - DNA, 22 bp, synthetic construct
  misc_feature 1..22: note = chemically synthesized
  source 1..22: mol_type = other DNA
tttttctctttttttcatttcc

SEQ ID NO: 127774 - DNA, 22 bp, synthetic construct
  misc_feature 1..22: note = chemically synthesized
  source 1..22: mol_type = other DNA
ttctctttttttcatttcccct

SEQ ID NO: 127775 - DNA, 22 bp, synthetic construct
  misc_feature 1..22: note = chemically synthesized
  source 1..22: mol_type = other DNA
tctctttttttcatttcccctg

SEQ ID NO: 127776 - DNA, 22 bp, synthetic construct
  misc_feature 1..22: note = chemically synthesized
  source 1..22: mol_type = other DNA
ctctttttttcatttcccctgc

SEQ ID NO: 127777 - DNA, 22 bp, synthetic construct
  misc_feature 1..22: note = chemically synthesized
  source 1..22: mol_type = other DNA
tctttttttcatttcccctgct

SEQ ID NO: 127778 - DNA, 22 bp, synthetic construct
  misc_feature 1..22: note = chemically synthesized
  source 1..22: mol_type = other DNA
tttttttcatttcccctgcttc

SEQ ID NO: 127779 - DNA, 22 bp, synthetic construct
  misc_feature 1..22: note = chemically synthesized
  source 1..22: mol_type = other DNA
tttttcatttcccctgcttctc

SEQ ID NO: 127780 - DNA, 22 bp, synthetic construct
  misc_feature 1..22: note = chemically synthesized
  source 1..22: mol_type = other DNA
ttttcatttcccctgcttctct

SEQ ID NO: 127781 - DNA, 22 bp, synthetic construct
  misc_feature 1..22: note = chemically synthesized
  source 1..22: mol_type = other DNA
tttcatttcccctgcttctctc

SEQ ID NO: 127782 - DNA, 22 bp, synthetic construct
  misc_feature 1..22: note = chemically synthesized
  source 1..22: mol_type = other DNA
ttcatttcccctgcttctctcc

SEQ ID NO: 127783 - DNA, 22 bp, synthetic construct
  misc_feature 1..22: note = chemically synthesized
  source 1..22: mol_type = other DNA
tcatttcccctgcttctctcct

SEQ ID NO: 127784 - DNA, 22 bp, synthetic construct
  misc_feature 1..22: note = chemically synthesized
  source 1..22: mol_type = other DNA
catttcccctgcttctctccta

SEQ ID NO: 127785 - DNA, 22 bp, synthetic construct
  misc_feature 1..22: note = chemically synthesized
  source 1..22: mol_type = other DNA
atttcccctgcttctctcctag

SEQ ID NO: 127786 - DNA, 22 bp, synthetic construct
  misc_feature 1..22: note = chemically synthesized
  source 1..22: mol_type = other DNA
cccctgcttctctcctagtcaa

SEQ ID NO: 127787 - DNA, 22 bp, synthetic construct
  misc_feature 1..22: note = chemically synthesized
  source 1..22: mol_type = other DNA
ccctgcttctctcctagtcaag

SEQ ID NO: 127788 - DNA, 22 bp, synthetic construct
  misc_feature 1..22: note = chemically synthesized
  source 1..22: mol_type = other DNA
cttctctcctagtcaaggtcac

SEQ ID NO: 127789 - DNA, 22 bp, synthetic construct
  misc_feature 1..22: note = chemically synthesized
  source 1..22: mol_type = other DNA
ctctcctagtcaaggtcaccat

SEQ ID NO: 127790 - DNA, 22 bp, synthetic construct
  misc_feature 1..22: note = chemically synthesized
  source 1..22: mol_type = other DNA
tctcctagtcaaggtcaccatg

SEQ ID NO: 127791 - DNA, 22 bp, synthetic construct
  misc_feature 1..22: note = chemically synthesized
  source 1..22: mol_type = other DNA
tcctagtcaaggtcaccatgac

SEQ ID NO: 127792 - DNA, 22 bp, synthetic construct
  misc_feature 1..22: note = chemically synthesized
  source 1..22: mol_type = other DNA
ctagtcaaggtcaccatgactc

SEQ ID NO: 127793 - DNA, 22 bp, synthetic construct
  misc_feature 1..22: note = chemically synthesized
  source 1..22: mol_type = other DNA
gtcaaggtcaccatgactcttc

SEQ ID NO: 127794 - DNA, 22 bp, synthetic construct
  misc_feature 1..22: note = chemically synthesized
  source 1..22: mol_type = other DNA
ttcatatggatttttaaaatag

SEQ ID NO: 127795 - DNA, 22 bp, synthetic construct
  misc_feature 1..22: note = chemically synthesized
  source 1..22: mol_type = other DNA
catatggatttttaaaatagct

SEQ ID NO: 127796 - DNA, 22 bp, synthetic construct
  misc_feature 1..22: note = chemically synthesized
  source 1..22: mol_type = other DNA
atatggatttttaaaatagctt

SEQ ID NO: 127797 - DNA, 22 bp, synthetic construct
  misc_feature 1..22: note = chemically synthesized
  source 1..22: mol_type = other DNA
ttaaaatagctttctaactcat

SEQ ID NO: 127798 - DNA, 22 bp, synthetic construct
  misc_feature 1..22: note = chemically synthesized
  source 1..22: mol_type = other DNA
taaaatagctttctaactcatc

SEQ ID NO: 127799 - DNA, 22 bp, synthetic construct
  misc_feature 1..22: note = chemically synthesized
  source 1..22: mol_type = other DNA
aaaatagctttctaactcatct

SEQ ID NO: 127800 - DNA, 22 bp, synthetic construct
  misc_feature 1..22: note = chemically synthesized
  source 1..22: mol_type = other DNA
aaatagctttctaactcatctc

SEQ ID NO: 127801 - DNA, 22 bp, synthetic construct
  misc_feature 1..22: note = chemically synthesized
  source 1..22: mol_type = other DNA
tctaactcatctcttttcttgt

SEQ ID NO: 127802 - DNA, 22 bp, synthetic construct
  misc_feature 1..22: note = chemically synthesized
  source 1..22: mol_type = other DNA
ctaactcatctcttttcttgtc

SEQ ID NO: 127803 - DNA, 22 bp, synthetic construct
  misc_feature 1..22: note = chemically synthesized
  source 1..22: mol_type = other DNA
taactcatctcttttcttgtct

SEQ ID NO: 127804 - DNA, 22 bp, synthetic construct
  misc_feature 1..22: note = chemically synthesized
  source 1..22: mol_type = other DNA
actcatctcttttcttgtctct

SEQ ID NO: 127805 - DNA, 22 bp, synthetic construct
  misc_feature 1..22: note = chemically synthesized
  source 1..22: mol_type = other DNA
atctcttttcttgtctcttgct

SEQ ID NO: 127806 - DNA, 22 bp, synthetic construct
  misc_feature 1..22: note = chemically synthesized
  source 1..22: mol_type = other DNA
ttttcttgtctcttgcttagtc

SEQ ID NO: 127807 - DNA, 22 bp, synthetic construct
  misc_feature 1..22: note = chemically synthesized
  source 1..22: mol_type = other DNA
ttcttgtctcttgcttagtctt

SEQ ID NO: 127808 - DNA, 22 bp, synthetic construct
  misc_feature 1..22: note = chemically synthesized
  source 1..22: mol_type = other DNA
tcttgtctcttgcttagtcttc

SEQ ID NO: 127809 - DNA, 22 bp, synthetic construct
  misc_feature 1..22: note = chemically synthesized
  source 1..22: mol_type = other DNA
cttgtctcttgcttagtcttct

SEQ ID NO: 127810 - DNA, 22 bp, synthetic construct
  misc_feature 1..22: note = chemically synthesized
  source 1..22: mol_type = other DNA
ttgtctcttgcttagtcttctt

SEQ ID NO: 127811 - DNA, 22 bp, synthetic construct
  misc_feature 1..22: note = chemically synthesized
  source 1..22: mol_type = other DNA
gtctcttgcttagtcttcttca

SEQ ID NO: 127812 - DNA, 22 bp, synthetic construct
  misc_feature 1..22: note = chemically synthesized
  source 1..22: mol_type = other DNA
tctcttgcttagtcttcttcac

SEQ ID NO: 127813 - DNA, 22 bp, synthetic construct
  misc_feature 1..22: note = chemically synthesized
  source 1..22: mol_type = other DNA
ttgcttagtcttcttcacatag

SEQ ID NO: 127814 - DNA, 22 bp, synthetic construct
  misc_feature 1..22: note = chemically synthesized
  source 1..22: mol_type = other DNA
gcttagtcttcttcacatagca

SEQ ID NO: 127815 - DNA, 22 bp, synthetic construct
  misc_feature 1..22: note = chemically synthesized
  source 1..22: mol_type = other DNA
cttagtcttcttcacatagcag

SEQ ID NO: 127816 - DNA, 22 bp, synthetic construct
  misc_feature 1..22: note = chemically synthesized
  source 1..22: mol_type = other DNA
agtcttcttcacatagcagtct

SEQ ID NO: 127817 - DNA, 22 bp, synthetic construct
  misc_feature 1..22: note = chemically synthesized
  source 1..22: mol_type = other DNA
gtcttcttcacatagcagtcta

SEQ ID NO: 127818 - DNA, 22 bp, synthetic construct
  misc_feature 1..22: note = chemically synthesized
  source 1..22: mol_type = other DNA
cttcacatagcagtctaagtga

SEQ ID NO: 127819 - DNA, 22 bp, synthetic construct
  misc_feature 1..22: note = chemically synthesized
  source 1..22: mol_type = other DNA
ttcacatagcagtctaagtgag

SEQ ID NO: 127820 - DNA, 22 bp, synthetic construct
  misc_feature 1..22: note = chemically synthesized
  source 1..22: mol_type = other DNA
cacatagcagtctaagtgagta

SEQ ID NO: 127821 - DNA, 22 bp, synthetic construct
  misc_feature 1..22: note = chemically synthesized
  source 1..22: mol_type = other DNA
acatagcagtctaagtgagtaa

SEQ ID NO: 127822 - DNA, 22 bp, synthetic construct
  misc_feature 1..22: note = chemically synthesized
  source 1..22: mol_type = other DNA
agtgagtaatttaaaaatacaa

SEQ ID NO: 127823 - DNA, 22 bp, synthetic construct
  misc_feature 1..22: note = chemically synthesized
  source 1..22: mol_type = other DNA
aaaaatacaaatcagaatatat

SEQ ID NO: 127824 - DNA, 22 bp, synthetic construct
  misc_feature 1..22: note = chemically synthesized
  source 1..22: mol_type = other DNA
aaaatacaaatcagaatatatc

SEQ ID NO: 127825 - DNA, 22 bp, synthetic construct
  misc_feature 1..22: note = chemically synthesized
  source 1..22: mol_type = other DNA
ttttccattgtgattttcaaag

SEQ ID NO: 127826 - DNA, 22 bp, synthetic construct
  misc_feature 1..22: note = chemically synthesized
  source 1..22: mol_type = other DNA
tccattgtgattttcaaagtgt

SEQ ID NO: 127827 - DNA, 22 bp, synthetic construct
  misc_feature 1..22: note = chemically synthesized
  source 1..22: mol_type = other DNA
ccattgtgattttcaaagtgtc

SEQ ID NO: 127828 - DNA, 22 bp, synthetic construct
  misc_feature 1..22: note = chemically synthesized
  source 1..22: mol_type = other DNA
cattgtgattttcaaagtgtcc

SEQ ID NO: 127829 - DNA, 22 bp, synthetic construct
  misc_feature 1..22: note = chemically synthesized
  source 1..22: mol_type = other DNA
tgattttcaaagtgtcctaatg

SEQ ID NO: 127830 - DNA, 22 bp, synthetic construct
  misc_feature 1..22: note = chemically synthesized
  source 1..22: mol_type = other DNA
tcaaagtgtcctaatgtcttta

SEQ ID NO: 127831 - DNA, 22 bp, synthetic construct
  misc_feature 1..22: note = chemically synthesized
  source 1..22: mol_type = other DNA
caaagtgtcctaatgtctttac

SEQ ID NO: 127832 - DNA, 22 bp, synthetic construct
  misc_feature 1..22: note = chemically synthesized
  source 1..22: mol_type = other DNA
aaagtgtcctaatgtctttact

SEQ ID NO: 127833 - DNA, 22 bp, synthetic construct
  misc_feature 1..22: note = chemically synthesized
  source 1..22: mol_type = other DNA
atgtctttactacatttatagt

SEQ ID NO: 127834 - DNA, 22 bp, synthetic construct
  misc_feature 1..22: note = chemically synthesized
  source 1..22: mol_type = other DNA
tactacatttatagtaagaaga

SEQ ID NO: 127835 - DNA, 22 bp, synthetic construct
  misc_feature 1..22: note = chemically synthesized
  source 1..22: mol_type = other DNA
actacatttatagtaagaagaa

SEQ ID NO: 127836 - DNA, 22 bp, synthetic construct
  misc_feature 1..22: note = chemically synthesized
  source 1..22: mol_type = other DNA
ctacatttatagtaagaagaaa

SEQ ID NO: 127837 - DNA, 22 bp, synthetic construct
  misc_feature 1..22: note = chemically synthesized
  source 1..22: mol_type = other DNA
catttatagtaagaagaaaaca

SEQ ID NO: 127838 - DNA, 22 bp, synthetic construct
  misc_feature 1..22: note = chemically synthesized
  source 1..22: mol_type = other DNA
atagtaagaagaaaacaaaaca

SEQ ID NO: 127839 - DNA, 22 bp, synthetic construct
  misc_feature 1..22: note = chemically synthesized
  source 1..22: mol_type = other DNA
tagtaagaagaaaacaaaacaa

SEQ ID NO: 127840 - DNA, 22 bp, synthetic construct
  misc_feature 1..22: note = chemically synthesized
  source 1..22: mol_type = other DNA
cgtggtggtctgtaaggcccta

SEQ ID NO: 127841 - DNA, 22 bp, synthetic construct
  misc_feature 1..22: note = chemically synthesized
  source 1..22: mol_type = other DNA
taaggccctatgacacttgatt

SEQ ID NO: 127842 - DNA, 22 bp, synthetic construct
  misc_feature 1..22: note = chemically synthesized
  source 1..22: mol_type = other DNA
tgacacttgattactacctgct

SEQ ID NO: 127843 - DNA, 22 bp, synthetic construct
  misc_feature 1..22: note = chemically synthesized
  source 1..22: mol_type = other DNA
gattactacctgcttctttgac

SEQ ID NO: 127844 - DNA, 22 bp, synthetic construct
  misc_feature 1..22: note = chemically synthesized
  source 1..22: mol_type = other DNA
attactacctgcttctttgaca

SEQ ID NO: 127845 - DNA, 22 bp, synthetic construct
  misc_feature 1..22: note = chemically synthesized
  source 1..22: mol_type = other DNA
ctacctgcttctttgacatcat

SEQ ID NO: 127846 - DNA, 22 bp, synthetic construct
  misc_feature 1..22: note = chemically synthesized
  source 1..22: mol_type = other DNA
cctgcttctttgacatcatcta

SEQ ID NO: 127847 - DNA, 22 bp, synthetic construct
  misc_feature 1..22: note = chemically synthesized
  source 1..22: mol_type = other DNA
cttctttgacatcatctattgt

SEQ ID NO: 127848 - DNA, 22 bp, synthetic construct
  misc_feature 1..22: note = chemically synthesized
  source 1..22: mol_type = other DNA
ctttgacatcatctattgtccc

SEQ ID NO: 127849 - DNA, 22 bp, synthetic construct
  misc_feature 1..22: note = chemically synthesized
  source 1..22: mol_type = other DNA
tttgacatcatctattgtccct

SEQ ID NO: 127850 - DNA, 22 bp, synthetic construct
  misc_feature 1..22: note = chemically synthesized
  source 1..22: mol_type = other DNA
tgacatcatctattgtccctct

SEQ ID NO: 127851 - DNA, 22 bp, synthetic construct
  misc_feature 1..22: note = chemically synthesized
  source 1..22: mol_type = other DNA
gacatcatctattgtccctctc

SEQ ID NO: 127852 - DNA, 22 bp, synthetic construct
  misc_feature 1..22: note = chemically synthesized
  source 1..22: mol_type = other DNA
acatcatctattgtccctctcc

SEQ ID NO: 127853 - DNA, 22 bp, synthetic construct
  misc_feature 1..22: note = chemically synthesized
  source 1..22: mol_type = other DNA
ttgtccctctcctgttttctta

SEQ ID NO: 127854 - DNA, 22 bp, synthetic construct
  misc_feature 1..22: note = chemically synthesized
  source 1..22: mol_type = other DNA
tccctctcctgttttcttatca

SEQ ID NO: 127855 - DNA, 22 bp, synthetic construct
  misc_feature 1..22: note = chemically synthesized
  source 1..22: mol_type = other DNA
tcctgttttcttatcaaatgcc

SEQ ID NO: 127856 - DNA, 22 bp, synthetic construct
  misc_feature 1..22: note = chemically synthesized
  source 1..22: mol_type = other DNA
ctgttttcttatcaaatgccag

SEQ ID NO: 127857 - DNA, 22 bp, synthetic construct
  misc_feature 1..22: note = chemically synthesized
  source 1..22: mol_type = other DNA
ttttcttatcaaatgccagtca

SEQ ID NO: 127858 - DNA, 22 bp, synthetic construct
  misc_feature 1..22: note = chemically synthesized
  source 1..22: mol_type = other DNA
tcttatcaaatgccagtcatgc

SEQ ID NO: 127859 - DNA, 22 bp, synthetic construct
  misc_feature 1..22: note = chemically synthesized
  source 1..22: mol_type = other DNA
cttatcaaatgccagtcatgct

SEQ ID NO: 127860 - DNA, 22 bp, synthetic construct
  misc_feature 1..22: note = chemically synthesized
  source 1..22: mol_type = other DNA
ttatcaaatgccagtcatgctg

SEQ ID NO: 127861 - DNA, 22 bp, synthetic construct
  misc_feature 1..22: note = chemically synthesized
  source 1..22: mol_type = other DNA
atcaaatgccagtcatgctgat

SEQ ID NO: 127862 - DNA, 22 bp, synthetic construct
  misc_feature 1..22: note = chemically synthesized
  source 1..22: mol_type = other DNA
tcaaatgccagtcatgctgatt

SEQ ID NO: 127863 - DNA, 22 bp, synthetic construct
  misc_feature 1..22: note = chemically synthesized
  source 1..22: mol_type = other DNA
attttccctctggaacagtttt

SEQ ID NO: 127864 - DNA, 22 bp, synthetic construct
  misc_feature 1..22: note = chemically synthesized
  source 1..22: mol_type = other DNA
tccctctggaacagttttcctc

SEQ ID NO: 127865 - DNA, 22 bp, synthetic construct
  misc_feature 1..22: note = chemically synthesized
  source 1..22: mol_type = other DNA
ccctctggaacagttttcctct

SEQ ID NO: 127866 - DNA, 22 bp, synthetic construct
  misc_feature 1..22: note = chemically synthesized
  source 1..22: mol_type = other DNA
cctctggaacagttttcctcta

SEQ ID NO: 127867 - DNA, 22 bp, synthetic construct
  misc_feature 1..22: note = chemically synthesized
  source 1..22: mol_type = other DNA
tggaacagttttcctctaggtc

SEQ ID NO: 127868 - DNA, 22 bp, synthetic construct
  misc_feature 1..22: note = chemically synthesized
  source 1..22: mol_type = other DNA
gaacagttttcctctaggtctg

SEQ ID NO: 127869 - DNA, 22 bp, synthetic construct
  misc_feature 1..22: note = chemically synthesized
  source 1..22: mol_type = other DNA
tcctctaggtctgtatacggtc

SEQ ID NO: 127870 - DNA, 22 bp, synthetic construct
  misc_feature 1..22: note = chemically synthesized
  source 1..22: mol_type = other DNA
cctctaggtctgtatacggtca

SEQ ID NO: 127871 - DNA, 22 bp, synthetic construct
  misc_feature 1..22: note = chemically synthesized
  source 1..22: mol_type = other DNA
ctctaggtctgtatacggtcag

SEQ ID NO: 127872 - DNA, 22 bp, synthetic construct
  misc_feature 1..22: note = chemically synthesized
  source 1..22: mol_type = other DNA
taggtctgtatacggtcaggtt

SEQ ID NO: 127873 - DNA, 22 bp, synthetic construct
  misc_feature 1..22: note = chemically synthesized
  source 1..22: mol_type = other DNA
ggtctgtatacggtcaggtttt

SEQ ID NO: 127874 - DNA, 22 bp, synthetic construct
  misc_feature 1..22: note = chemically synthesized
  source 1..22: mol_type = other DNA
tatacggtcaggttttcttttg

SEQ ID NO: 127875 - DNA, 22 bp, synthetic construct
  misc_feature 1..22: note = chemically synthesized
  source 1..22: mol_type = other DNA
tcttttgtattgaggtctcagt

SEQ ID NO: 127876 - DNA, 22 bp, synthetic construct
  misc_feature 1..22: note = chemically synthesized
  source 1..22: mol_type = other DNA
cttttgtattgaggtctcagtt

SEQ ID NO: 127877 - DNA, 22 bp, synthetic construct
  misc_feature 1..22: note = chemically synthesized
  source 1..22: mol_type = other DNA
ttttgtattgaggtctcagttc

SEQ ID NO: 127878 - DNA, 22 bp, synthetic construct
  misc_feature 1..22: note = chemically synthesized
  source 1..22: mol_type = other DNA
ttgtattgaggtctcagttcaa

SEQ ID NO: 127879 - DNA, 22 bp, synthetic construct
  misc_feature 1..22: note = chemically synthesized
  source 1..22: mol_type = other DNA
tgtattgaggtctcagttcaaa

SEQ ID NO: 127880 - DNA, 22 bp, synthetic construct
  misc_feature 1..22: note = chemically synthesized
  source 1..22: mol_type = other DNA
gtattgaggtctcagttcaaat

SEQ ID NO: 127881 - DNA, 22 bp, synthetic construct
  misc_feature 1..22: note = chemically synthesized
  source 1..22: mol_type = other DNA
tattgaggtctcagttcaaatg

SEQ ID NO: 127882 - DNA, 22 bp, synthetic construct
  misc_feature 1..22: note = chemically synthesized
  source 1..22: mol_type = other DNA
aggtctcagttcaaatgggacc

SEQ ID NO: 127883 - DNA, 22 bp, synthetic construct
  misc_feature 1..22: note = chemically synthesized
  source 1..22: mol_type = other DNA
agttcaaatgggacctcctcat

SEQ ID NO: 127884 - DNA, 22 bp, synthetic construct
  misc_feature 1..22: note = chemically synthesized
  source 1..22: mol_type = other DNA
aaatgggacctcctcataggtg

SEQ ID NO: 127885 - DNA, 22 bp, synthetic construct
  misc_feature 1..22: note = chemically synthesized
  source 1..22: mol_type = other DNA
ctcataggtgcagttctaggcc

SEQ ID NO: 127886 - DNA, 22 bp, synthetic construct
  misc_feature 1..22: note = chemically synthesized
  source 1..22: mol_type = other DNA
ataggtgcagttctaggcccct

SEQ ID NO: 127887 - DNA, 22 bp, synthetic construct
  misc_feature 1..22: note = chemically synthesized
  source 1..22: mol_type = other DNA
taggcccctcaaactgctatac

SEQ ID NO: 127888 - DNA, 22 bp, synthetic construct
  misc_feature 1..22: note = chemically synthesized
  source 1..22: mol_type = other DNA
ggcccctcaaactgctatacta

SEQ ID NO: 127889 - DNA, 22 bp, synthetic construct
  misc_feature 1..22: note = chemically synthesized
  source 1..22: mol_type = other DNA
aaactgctatactatcttgtat

SEQ ID NO: 127890 - DNA, 22 bp, synthetic construct
  misc_feature 1..22: note = chemically synthesized
  source 1..22: mol_type = other DNA
ctatactatcttgtatacaata

SEQ ID NO: 127891 - DNA, 22 bp, synthetic construct
  misc_feature 1..22: note = chemically synthesized
  source 1..22: mol_type = other DNA
tactatcttgtatacaatacca

SEQ ID NO: 127892 - DNA, 22 bp, synthetic construct
  misc_feature 1..22: note = chemically synthesized
  source 1..22: mol_type = other DNA
tcttgtatacaataccatccaa

SEQ ID NO: 127893 - DNA, 22 bp, synthetic construct
  misc_feature 1..22: note = chemically synthesized
  source 1..22: mol_type = other DNA
gtatacaataccatccaattaa

SEQ ID NO: 127894 - DNA, 22 bp, synthetic construct
  misc_feature 1..22: note = chemically synthesized
  source 1..22: mol_type = other DNA
tatacaataccatccaattaat

SEQ ID NO: 127895 - DNA, 22 bp, synthetic construct
  misc_feature 1..22: note = chemically synthesized
  source 1..22: mol_type = other DNA
atctacatcaagtagtactgtt

SEQ ID NO: 127896 - DNA, 22 bp, synthetic construct
  misc_feature 1..22: note = chemically synthesized
  source 1..22: mol_type = other DNA
catcaagtagtactgttttatg

SEQ ID NO: 127897 - DNA, 22 bp, synthetic construct
  misc_feature 1..22: note = chemically synthesized
  source 1..22: mol_type = other DNA
ttttatgttaaacttgcattta

SEQ ID NO: 127898 - DNA, 22 bp, synthetic construct
  misc_feature 1..22: note = chemically synthesized
  source 1..22: mol_type = other DNA
tatgttaaacttgcatttatat

SEQ ID NO: 127899 - DNA, 22 bp, synthetic construct
  misc_feature 1..22: note = chemically synthesized
  source 1..22: mol_type = other DNA
atgttaaacttgcatttatatt

SEQ ID NO: 127900 - DNA, 22 bp, synthetic construct
  misc_feature 1..22: note = chemically synthesized
  source 1..22: mol_type = other DNA
tgttaaacttgcatttatattt

SEQ ID NO: 127901 - DNA, 22 bp, synthetic construct
  misc_feature 1..22: note = chemically synthesized
  source 1..22: mol_type = other DNA
aacttgcatttatatttgttta

SEQ ID NO: 127902 - DNA, 22 bp, synthetic construct
  misc_feature 1..22: note = chemically synthesized
  source 1..22: mol_type = other DNA
gcatttatatttgtttaaaatt

SEQ ID NO: 127903 - DNA, 22 bp, synthetic construct
  misc_feature 1..22: note = chemically synthesized
  source 1..22: mol_type = other DNA
catttatatttgtttaaaattg

SEQ ID NO: 127904 - DNA, 22 bp, synthetic construct
  misc_feature 1..22: note = chemically synthesized
  source 1..22: mol_type = other DNA
atatttgtttaaaattgtctta

SEQ ID NO: 127905 - DNA, 22 bp, synthetic construct
  misc_feature 1..22: note = chemically synthesized
  source 1..22: mol_type = other DNA
tatttgtttaaaattgtcttat

SEQ ID NO: 127906 - DNA, 22 bp, synthetic construct
  misc_feature 1..22: note = chemically synthesized
  source 1..22: mol_type = other DNA
gtttaaaattgtcttatttatt

SEQ ID NO: 127907 - DNA, 22 bp, synthetic construct
  misc_feature 1..22: note = chemically synthesized
  source 1..22: mol_type = other DNA
tttaaaattgtcttatttattt

SEQ ID NO: 127908 - DNA, 22 bp, synthetic construct
  misc_feature 1..22: note = chemically synthesized
  source 1..22: mol_type = other DNA
aaaattgtcttatttatttttc

SEQ ID NO: 127909 - DNA, 22 bp, synthetic construct
  misc_feature 1..22: note = chemically synthesized
  source 1..22: mol_type = other DNA
aaattgtcttatttatttttca

SEQ ID NO: 127910 - DNA, 22 bp, synthetic construct
  misc_feature 1..22: note = chemically synthesized
  source 1..22: mol_type = other DNA
tcttatttatttttcaacttaa

SEQ ID NO: 127911 - DNA, 22 bp, synthetic construct
  misc_feature 1..22: note = chemically synthesized
  source 1..22: mol_type = other DNA
atttatttttcaacttaattta

SEQ ID NO: 127912 - DNA, 22 bp, synthetic construct
  misc_feature 1..22: note = chemically synthesized
  source 1..22: mol_type = other DNA
tttatttttcaacttaatttat

SEQ ID NO: 127913 - DNA, 22 bp, synthetic construct
  misc_feature 1..22: note = chemically synthesized
  source 1..22: mol_type = other DNA
atttttcaacttaatttatggt

SEQ ID NO: 127914 - DNA, 22 bp, synthetic construct
  misc_feature 1..22: note = chemically synthesized
  source 1..22: mol_type = other DNA
tttttcaacttaatttatggtt

SEQ ID NO: 127915 - DNA, 22 bp, synthetic construct
  misc_feature 1..22: note = chemically synthesized
  source 1..22: mol_type = other DNA
ttcaacttaatttatggtttat

SEQ ID NO: 127916 - DNA, 22 bp, synthetic construct
  misc_feature 1..22: note = chemically synthesized
  source 1..22: mol_type = other DNA
tcaacttaatttatggtttata

SEQ ID NO: 127917 - DNA, 22 bp, synthetic construct
  misc_feature 1..22: note = chemically synthesized
  source 1..22: mol_type = other DNA
caacttaatttatggtttataa

SEQ ID NO: 127918 - DNA, 22 bp, synthetic construct
  misc_feature 1..22: note = chemically synthesized
  source 1..22: mol_type = other DNA
aacttaatttatggtttataag

SEQ ID NO: 127919 - DNA, 22 bp, synthetic construct
  misc_feature 1..22: note = chemically synthesized
  source 1..22: mol_type = other DNA
aatttatggtttataagattag

SEQ ID NO: 127920 - DNA, 22 bp, synthetic construct
  misc_feature 1..22: note = chemically synthesized
  source 1..22: mol_type = other DNA
atttatggtttataagattagg

SEQ ID NO: 127921 - DNA, 22 bp, synthetic construct
  misc_feature 1..22: note = chemically synthesized
  source 1..22: mol_type = other DNA
atggtttataagattagggact

SEQ ID NO: 127922 - DNA, 22 bp, synthetic construct
  misc_feature 1..22: note = chemically synthesized
  source 1..22: mol_type = other DNA
tggtttataagattagggactt

SEQ ID NO: 127923 - DNA, 22 bp, synthetic construct
  misc_feature 1..22: note = chemically synthesized
  source 1..22: mol_type = other DNA
ataagattagggactttgtctt

SEQ ID NO: 127924 - DNA, 22 bp, synthetic construct
  misc_feature 1..22: note = chemically synthesized
  source 1..22: mol_type = other DNA
taagattagggactttgtctta

SEQ ID NO: 127925 - DNA, 22 bp, synthetic construct
  misc_feature 1..22: note = chemically synthesized
  source 1..22: mol_type = other DNA
gggactttgtcttattaccatt

SEQ ID NO: 127926 - DNA, 22 bp, synthetic construct
  misc_feature 1..22: note = chemically synthesized
  source 1..22: mol_type = other DNA
tgtcttattaccatttaattcc

SEQ ID NO: 127927 - DNA, 22 bp, synthetic construct
  misc_feature 1..22: note = chemically synthesized
  source 1..22: mol_type = other DNA
gtcttattaccatttaattcca

SEQ ID NO: 127928 - DNA, 22 bp, synthetic construct
  misc_feature 1..22: note = chemically synthesized
  source 1..22: mol_type = other DNA
tcttattaccatttaattccag

SEQ ID NO: 127929 - DNA, 22 bp, synthetic construct
  misc_feature 1..22: note = chemically synthesized
  source 1..22: mol_type = other DNA
attaccatttaattccagagag

SEQ ID NO: 127930 - DNA, 22 bp, synthetic construct
  misc_feature 1..22: note = chemically synthesized
  source 1..22: mol_type = other DNA
ttaccatttaattccagagagc

SEQ ID NO: 127931 - DNA, 22 bp, synthetic construct
  misc_feature 1..22: note = chemically synthesized
  source 1..22: mol_type = other DNA
ccatttaattccagagagcttt

SEQ ID NO: 127932 - DNA, 22 bp, synthetic construct
  misc_feature 1..22: note = chemically synthesized
  source 1..22: mol_type = other DNA
aattccagagagctttaaatat

SEQ ID NO: 127933 - DNA, 22 bp, synthetic construct
  misc_feature 1..22: note = chemically synthesized
  source 1..22: mol_type = other DNA
attccagagagctttaaatatc

SEQ ID NO: 127934 - DNA, 22 bp, synthetic construct
  misc_feature 1..22: note = chemically synthesized
  source 1..22: mol_type = other DNA
cagagagctttaaatatcatgg

SEQ ID NO: 127935 - DNA, 22 bp, synthetic construct
  misc_feature 1..22: note = chemically synthesized
  source 1..22: mol_type = other DNA
taaatatcatggctgtcacatg

SEQ ID NO: 127936 - DNA, 22 bp, synthetic construct
  misc_feature 1..22: note = chemically synthesized
  source 1..22: mol_type = other DNA
aaatatcatggctgtcacatga

SEQ ID NO: 127937 - DNA, 22 bp, synthetic construct
  misc_feature 1..22: note = chemically synthesized
  source 1..22: mol_type = other DNA
aatatcatggctgtcacatgat

SEQ ID NO: 127938 - DNA, 22 bp, synthetic construct
  misc_feature 1..22: note = chemically synthesized
  source 1..22: mol_type = other DNA
tcacatgatgcgtgttcacaaa

SEQ ID NO: 127939 - DNA, 22 bp, synthetic construct
  misc_feature 1..22: note = chemically synthesized
  source 1..22: mol_type = other DNA
acaaatattaggtgaactaaga

SEQ ID NO: 127940 - DNA, 22 bp, synthetic construct
  misc_feature 1..22: note = chemically synthesized
  source 1..22: mol_type = other DNA
ggtgaactaagaaatgtttatc

SEQ ID NO: 127941 - DNA, 22 bp, synthetic construct
  misc_feature 1..22: note = chemically synthesized
  source 1..22: mol_type = other DNA
agaaatgtttatcagtcacatg

SEQ ID NO: 127942 - DNA, 22 bp, synthetic construct
  misc_feature 1..22: note = chemically synthesized
  source 1..22: mol_type = other DNA
atcagtcacatgttagatactt

SEQ ID NO: 127943 - DNA, 22 bp, synthetic construct
  misc_feature 1..22: note = chemically synthesized
  source 1..22: mol_type = other DNA
tcagtcacatgttagatacttt

SEQ ID NO: 127944 - DNA, 22 bp, synthetic construct
  misc_feature 1..22: note = chemically synthesized
  source 1..22: mol_type = other DNA
gatactttgcaaggtgttgagc

SEQ ID NO: 127945 - DNA, 22 bp, synthetic construct
  misc_feature 1..22: note = chemically synthesized
  source 1..22: mol_type = other DNA
tgcaaggtgttgagcaaagcaa

SEQ ID NO: 127946 - DNA, 22 bp, synthetic construct
  misc_feature 1..22: note = chemically synthesized
  source 1..22: mol_type = other DNA
gcaaggtgttgagcaaagcaaa

SEQ ID NO: 127947 - DNA, 22 bp, synthetic construct
  misc_feature 1..22: note = chemically synthesized
  source 1..22: mol_type = other DNA
caaggtgttgagcaaagcaaat

SEQ ID NO: 127948 - DNA, 22 bp, synthetic construct
  misc_feature 1..22: note = chemically synthesized
  source 1..22: mol_type = other DNA
agcaaagcaaataaacaccatg

SEQ ID NO: 127949 - DNA, 22 bp, synthetic construct
  misc_feature 1..22: note = chemically synthesized
  source 1..22: mol_type = other DNA
tatgcaagaagcccctagtcta

SEQ ID NO: 127950 - DNA, 22 bp, synthetic construct
  misc_feature 1..22: note = chemically synthesized
  source 1..22: mol_type = other DNA
gtctagtggcagaaggaatatt

SEQ ID NO: 127951 - DNA, 22 bp, synthetic construct
  misc_feature 1..22: note = chemically synthesized
  source 1..22: mol_type = other DNA
gtggcagaaggaatattaaaac

SEQ ID NO: 127952 - DNA, 22 bp, synthetic construct
  misc_feature 1..22: note = chemically synthesized
  source 1..22: mol_type = other DNA
aaaccttctcaaaggactaatc

SEQ ID NO: 127953 - DNA, 22 bp, synthetic construct
  misc_feature 1..22: note = chemically synthesized
  source 1..22: mol_type = other DNA
ctcaaaggactaatctcttctc

SEQ ID NO: 127954 - DNA, 22 bp, synthetic construct
  misc_feature 1..22: note = chemically synthesized
  source 1..22: mol_type = other DNA
tcaaaggactaatctcttctct

SEQ ID NO: 127955 - DNA, 22 bp, synthetic construct
  misc_feature 1..22: note = chemically synthesized
  source 1..22: mol_type = other DNA
aaaggactaatctcttctcttc

SEQ ID NO: 127956 - DNA, 22 bp, synthetic construct
  misc_feature 1..22: note = chemically synthesized
  source 1..22: mol_type = other DNA
atctcttctcttcagtaaaaga

SEQ ID NO: 127957 - DNA, 22 bp, synthetic construct
  misc_feature 1..22: note = chemically synthesized
  source 1..22: mol_type = other DNA
ttctcttcagtaaaagacagca

SEQ ID NO: 127958 - DNA, 22 bp, synthetic construct
  misc_feature 1..22: note = chemically synthesized
  source 1..22: mol_type = other DNA
ctcttcagtaaaagacagcacc

SEQ ID NO: 127959 - DNA, 22 bp, synthetic construct
  misc_feature 1..22: note = chemically synthesized
  source 1..22: mol_type = other DNA
tcttcagtaaaagacagcacca

SEQ ID NO: 127960 - DNA, 22 bp, synthetic construct
  misc_feature 1..22: note = chemically synthesized
  source 1..22: mol_type = other DNA
ttcagtaaaagacagcaccacg

SEQ ID NO: 127961 - DNA, 22 bp, synthetic construct
  misc_feature 1..22: note = chemically synthesized
  source 1..22: mol_type = other DNA
cagtaaaagacagcaccacgtt

SEQ ID NO: 127962 - DNA, 22 bp, synthetic construct
  misc_feature 1..22: note = chemically synthesized
  source 1..22: mol_type = other DNA
agtaaaagacagcaccacgttt

SEQ ID NO: 127963 - DNA, 22 bp, synthetic construct
  misc_feature 1..22: note = chemically synthesized
  source 1..22: mol_type = other DNA
aagcagggaaatagctctcact

SEQ ID NO: 127964 - DNA, 22 bp, synthetic construct
  misc_feature 1..22: note = chemically synthesized
  source 1..22: mol_type = other DNA
agcagggaaatagctctcactc

SEQ ID NO: 127965 - DNA, 22 bp, synthetic construct
  misc_feature 1..22: note = chemically synthesized
  source 1..22: mol_type = other DNA
tcactcagtattggggagaaca

SEQ ID NO: 127966 - DNA, 22 bp, synthetic construct
  misc_feature 1..22: note = chemically synthesized
  source 1..22: mol_type = other DNA
actcagtattggggagaacaga

SEQ ID NO: 127967 - DNA, 22 bp, synthetic construct
  misc_feature 1..22: note = chemically synthesized
  source 1..22: mol_type = other DNA
agtattggggagaacagattca

SEQ ID NO: 127968 - DNA, 22 bp, synthetic construct
  misc_feature 1..22: note = chemically synthesized
  source 1..22: mol_type = other DNA
gggagaacagattcagaagcct

SEQ ID NO: 127969 - DNA, 22 bp, synthetic construct
  misc_feature 1..22: note = chemically synthesized
  source 1..22: mol_type = other DNA
agaagcctatggctggggataa

SEQ ID NO: 127970 - DNA, 22 bp, synthetic construct
  misc_feature 1..22: note = chemically synthesized
  source 1..22: mol_type = other DNA
tggctggggataaagggaagga

SEQ ID NO: 127971 - DNA, 22 bp, synthetic construct
  misc_feature 1..22: note = chemically synthesized
  source 1..22: mol_type = other DNA
gggataaagggaaggaaaccag

SEQ ID NO: 127972 - DNA, 22 bp, synthetic construct
  misc_feature 1..22: note = chemically synthesized
  source 1..22: mol_type = other DNA
aaatataaatggagaacttgaa

SEQ ID NO: 127973 - DNA, 22 bp, synthetic construct
  misc_feature 1..22: note = chemically synthesized
  source 1..22: mol_type = other DNA
aatataaatggagaacttgaaa

SEQ ID NO: 127974 - DNA, 22 bp, synthetic construct
  misc_feature 1..22: note = chemically synthesized
  source 1..22: mol_type = other DNA
gaaatgagagaggtcagattct

SEQ ID NO: 127975 - DNA, 22 bp, synthetic construct
  misc_feature 1..22: note = chemically synthesized
  source 1..22: mol_type = other DNA
aaatgagagaggtcagattcta

SEQ ID NO: 127976 - DNA, 22 bp, synthetic construct
  misc_feature 1..22: note = chemically synthesized
  source 1..22: mol_type = other DNA
tagggaattacttcagtaggcc

SEQ ID NO: 127977 - DNA, 22 bp, synthetic construct
  misc_feature 1..22: note = chemically synthesized
  source 1..22: mol_type = other DNA
gggaattacttcagtaggccta

SEQ ID NO: 127978 - DNA, 22 bp, synthetic construct
  misc_feature 1..22: note = chemically synthesized
  source 1..22: mol_type = other DNA
cttcagtaggcctatagaaaaa

SEQ ID NO: 127979 - DNA, 22 bp, synthetic construct
  misc_feature 1..22: note = chemically synthesized
  source 1..22: mol_type = other DNA
cagtaggcctatagaaaaataa

SEQ ID NO: 127980 - DNA, 22 bp, synthetic construct
  misc_feature 1..22: note = chemically synthesized
  source 1..22: mol_type = other DNA
agtaggcctatagaaaaataat

SEQ ID NO: 127981 - DNA, 22 bp, synthetic construct
  misc_feature 1..22: note = chemically synthesized
  source 1..22: mol_type = other DNA
tagaaaaataatttaaaaagaa

SEQ ID NO: 127982 - DNA, 22 bp, synthetic construct
  misc_feature 1..22: note = chemically synthesized
  source 1..22: mol_type = other DNA
aaaaagaaaaagacactacttg

SEQ ID NO: 127983 - DNA, 22 bp, synthetic construct
  misc_feature 1..22: note = chemically synthesized
  source 1..22: mol_type = other DNA
aaaagaaaaagacactacttgt

SEQ ID NO: 127984 - DNA, 22 bp, synthetic construct
  misc_feature 1..22: note = chemically synthesized
  source 1..22: mol_type = other DNA
cttgtaaataagaaacagtaag

SEQ ID NO: 127985 - DNA, 22 bp, synthetic construct
  misc_feature 1..22: note = chemically synthesized
  source 1..22: mol_type = other DNA
gtaaataagaaacagtaagatg

SEQ ID NO: 127986 - DNA, 22 bp, synthetic construct
  misc_feature 1..22: note = chemically synthesized
  source 1..22: mol_type = other DNA
taaataagaaacagtaagatgt

SEQ ID NO: 127987 - DNA, 22 bp, synthetic construct
  misc_feature 1..22: note = chemically synthesized
  source 1..22: mol_type = other DNA
aaactgaaggagatacactatt

SEQ ID NO: 127988 - DNA, 22 bp, synthetic construct
  misc_feature 1..22: note = chemically synthesized
  source 1..22: mol_type = other DNA
aactgaaggagatacactatta

SEQ ID NO: 127989 - DNA, 22 bp, synthetic construct
  misc_feature 1..22: note = chemically synthesized
  source 1..22: mol_type = other DNA
aaggagatacactattataagt

SEQ ID NO: 127990 - DNA, 22 bp, synthetic construct
  misc_feature 1..22: note = chemically synthesized
  source 1..22: mol_type = other DNA
ttataagtgatgtctttggctg

SEQ ID NO: 127991 - DNA, 22 bp, synthetic construct
  misc_feature 1..22: note = chemically synthesized
  source 1..22: mol_type = other DNA
taagtgatgtctttggctggcc

SEQ ID NO: 127992 - DNA, 22 bp, synthetic construct
  misc_feature 1..22: note = chemically synthesized
  source 1..22: mol_type = other DNA
tggctggcctaatcatttattc

SEQ ID NO: 127993 - DNA, 22 bp, synthetic construct
  misc_feature 1..22: note = chemically synthesized
  source 1..22: mol_type = other DNA
ggctggcctaatcatttattcc

SEQ ID NO: 127994 - DNA, 22 bp, synthetic construct
  misc_feature 1..22: note = chemically synthesized
  source 1..22: mol_type = other DNA
gctggcctaatcatttattcca

SEQ ID NO: 127995 - DNA, 22 bp, synthetic construct
  misc_feature 1..22: note = chemically synthesized
  source 1..22: mol_type = other DNA
gcctaatcatttattccagccc

SEQ ID NO: 127996 - DNA, 22 bp, synthetic construct
  misc_feature 1..22: note = chemically synthesized
  source 1..22: mol_type = other DNA
atcatttattccagccccaaag

SEQ ID NO: 127997 - DNA, 22 bp, synthetic construct
  misc_feature 1..22: note = chemically synthesized
  source 1..22: mol_type = other DNA
attccagccccaaagtctaact

SEQ ID NO: 127998 - DNA, 22 bp, synthetic construct
  misc_feature 1..22: note = chemically synthesized
  source 1..22: mol_type = other DNA
ttccagccccaaagtctaactt

SEQ ID NO: 127999 - DNA, 22 bp, synthetic construct
  misc_feature 1..22: note = chemically synthesized
  source 1..22: mol_type = other DNA
cagccccaaagtctaacttata

SEQ ID NO: 128000 - DNA, 22 bp, synthetic construct
  misc_feature 1..22: note = chemically synthesized
  source 1..22: mol_type = other DNA
acttataattagactgagctat

SEQ ID NO: 128001 - DNA, 22 bp, synthetic construct
  misc_feature 1..22: note = chemically synthesized
  source 1..22: mol_type = other DNA
ataattagactgagctattgtc

SEQ ID NO: 128002 - DNA, 22 bp, synthetic construct
  misc_feature 1..22: note = chemically synthesized
  source 1..22: mol_type = other DNA
taattagactgagctattgtca

SEQ ID NO: 128003 - DNA, 22 bp, synthetic construct
  misc_feature 1..22: note = chemically synthesized
  source 1..22: mol_type = other DNA
gactgagctattgtcacaagta

SEQ ID NO: 128004 - DNA, 22 bp, synthetic construct
  misc_feature 1..22: note = chemically synthesized
  source 1..22: mol_type = other DNA
agctattgtcacaagtagtgag

SEQ ID NO: 128005 - DNA, 22 bp, synthetic construct
  misc_feature 1..22: note = chemically synthesized
  source 1..22: mol_type = other DNA
ttgtcacaagtagtgagtagta

SEQ ID NO: 128006 - DNA, 22 bp, synthetic construct
  misc_feature 1..22: note = chemically synthesized
  source 1..22: mol_type = other DNA
tcacaagtagtgagtagtactg

SEQ ID NO: 128007 - DNA, 22 bp, synthetic construct
  misc_feature 1..22: note = chemically synthesized
  source 1..22: mol_type = other DNA
aaggattctacaagagggtaat

SEQ ID NO: 128008 - DNA, 22 bp, synthetic construct
  misc_feature 1..22: note = chemically synthesized
  source 1..22: mol_type = other DNA
tacaagagggtaattcacacta

SEQ ID NO: 128009 - DNA, 22 bp, synthetic construct
  misc_feature 1..22: note = chemically synthesized
  source 1..22: mol_type = other DNA
caagagggtaattcacactaat

SEQ ID NO: 128010 - DNA, 22 bp, synthetic construct
  misc_feature 1..22: note = chemically synthesized
  source 1..22: mol_type = other DNA
acactaatcgtgaatgtctgtt

SEQ ID NO: 128011 - DNA, 22 bp, synthetic construct
  misc_feature 1..22: note = chemically synthesized
  source 1..22: mol_type = other DNA
atcgtgaatgtctgttccccat

SEQ ID NO: 128012 - DNA, 22 bp, synthetic construct
  misc_feature 1..22: note = chemically synthesized
  source 1..22: mol_type = other DNA
ttccccatcactagtccatgaa

SEQ ID NO: 128013 - DNA, 22 bp, synthetic construct
  misc_feature 1..22: note = chemically synthesized
  source 1..22: mol_type = other DNA
cccatcactagtccatgaaatc

SEQ ID NO: 128014 - DNA, 22 bp, synthetic construct
  misc_feature 1..22: note = chemically synthesized
  source 1..22: mol_type = other DNA
gtccatgaaatctggaggccaa

SEQ ID NO: 128015 - DNA, 22 bp, synthetic construct
  misc_feature 1..22: note = chemically synthesized
  source 1..22: mol_type = other DNA
gaggccaagtgtctctttctca

SEQ ID NO: 128016 - DNA, 22 bp, synthetic construct
  misc_feature 1..22: note = chemically synthesized
  source 1..22: mol_type = other DNA
tttctcaatctgactgctcctt

SEQ ID NO: 128017 - DNA, 22 bp, synthetic construct
  misc_feature 1..22: note = chemically synthesized
  source 1..22: mol_type = other DNA
tctcaatctgactgctccttag

SEQ ID NO: 128018 - DNA, 22 bp, synthetic construct
  misc_feature 1..22: note = chemically synthesized
  source 1..22: mol_type = other DNA
ctcaatctgactgctccttagc

SEQ ID NO: 128019 - DNA, 22 bp, synthetic construct
  misc_feature 1..22: note = chemically synthesized
  source 1..22: mol_type = other DNA
tcaatctgactgctccttagct

SEQ ID NO: 128020 - DNA, 22 bp, synthetic construct
  misc_feature 1..22: note = chemically synthesized
  source 1..22: mol_type = other DNA
aatctgactgctccttagctac

SEQ ID NO: 128021 - DNA, 22 bp, synthetic construct
  misc_feature 1..22: note = chemically synthesized
  source 1..22: mol_type = other DNA
actgctccttagctacagtggt

SEQ ID NO: 128022 - DNA, 22 bp, synthetic construct
  misc_feature 1..22: note = chemically synthesized
  source 1..22: mol_type = other DNA
ctccttagctacagtggtagtg

SEQ ID NO: 128023 - DNA, 22 bp, synthetic construct
  misc_feature 1..22: note = chemically synthesized
  source 1..22: mol_type = other DNA
cttagctacagtggtagtggca

SEQ ID NO: 128024 - DNA, 22 bp, synthetic construct
  misc_feature 1..22: note = chemically synthesized
  source 1..22: mol_type = other DNA
agctacagtggtagtggcagag

SEQ ID NO: 128025 - DNA, 22 bp, synthetic construct
  misc_feature 1..22: note = chemically synthesized
  source 1..22: mol_type = other DNA
gctacagtggtagtggcagagt

SEQ ID NO: 128026 - DNA, 22 bp, synthetic construct
  misc_feature 1..22: note = chemically synthesized
  source 1..22: mol_type = other DNA
cagtggtagtggcagagtttct

SEQ ID NO: 128027 - DNA, 22 bp, synthetic construct
  misc_feature 1..22: note = chemically synthesized
  source 1..22: mol_type = other DNA
ctcttcccacacttttctttct

SEQ ID NO: 128028 - DNA, 22 bp, synthetic construct
  misc_feature 1..22: note = chemically synthesized
  source 1..22: mol_type = other DNA
tcttcccacacttttctttctt

SEQ ID NO: 128029 - DNA, 22 bp, synthetic construct
  misc_feature 1..22: note = chemically synthesized
  source 1..22: mol_type = other DNA
ttcccacacttttctttcttag

SEQ ID NO: 128030 - DNA, 22 bp, synthetic construct
  misc_feature 1..22: note = chemically synthesized
  source 1..22: mol_type = other DNA
cccacacttttctttcttaggc

SEQ ID NO: 128031 - DNA, 22 bp, synthetic construct
  misc_feature 1..22: note = chemically synthesized
  source 1..22: mol_type = other DNA
ccacacttttctttcttaggct

SEQ ID NO: 128032 - DNA, 22 bp, synthetic construct
  misc_feature 1..22: note = chemically synthesized
  source 1..22: mol_type = other DNA
ttctttcttaggctgttgagac

SEQ ID NO: 128033 - DNA, 22 bp, synthetic construct
  misc_feature 1..22: note = chemically synthesized
  source 1..22: mol_type = other DNA
tctttcttaggctgttgagact

SEQ ID NO: 128034 - DNA, 22 bp, synthetic construct
  misc_feature 1..22: note = chemically synthesized
  source 1..22: mol_type = other DNA
ctttcttaggctgttgagactt

SEQ ID NO: 128035 - DNA, 22 bp, synthetic construct
  misc_feature 1..22: note = chemically synthesized
  source 1..22: mol_type = other DNA
tttcttaggctgttgagacttt

SEQ ID NO: 128036 - DNA, 22 bp, synthetic construct
  misc_feature 1..22: note = chemically synthesized
  source 1..22: mol_type = other DNA
tcttaggctgttgagactttag

SEQ ID NO: 128037 - DNA, 22 bp, synthetic construct
  misc_feature 1..22: note = chemically synthesized
  source 1..22: mol_type = other DNA
cttaggctgttgagactttagc

SEQ ID NO: 128038 - DNA, 22 bp, synthetic construct
  misc_feature 1..22: note = chemically synthesized
  source 1..22: mol_type = other DNA
ttaggctgttgagactttagct

SEQ ID NO: 128039 - DNA, 22 bp, synthetic construct
  misc_feature 1..22: note = chemically synthesized
  source 1..22: mol_type = other DNA
aggctgttgagactttagctga

SEQ ID NO: 128040 - DNA, 22 bp, synthetic construct
  misc_feature 1..22: note = chemically synthesized
  source 1..22: mol_type = other DNA
ggctgttgagactttagctgat

SEQ ID NO: 128041 - DNA, 22 bp, synthetic construct
  misc_feature 1..22: note = chemically synthesized
  source 1..22: mol_type = other DNA
ttgagactttagctgataattc

SEQ ID NO: 128042 - DNA, 22 bp, synthetic construct
  misc_feature 1..22: note = chemically synthesized
  source 1..22: mol_type = other DNA
agactttagctgataattcagg

SEQ ID NO: 128043 - DNA, 22 bp, synthetic construct
  misc_feature 1..22: note = chemically synthesized
  source 1..22: mol_type = other DNA
tagctgataattcaggtaagtc

SEQ ID NO: 128044 - DNA, 22 bp, synthetic construct
  misc_feature 1..22: note = chemically synthesized
  source 1..22: mol_type = other DNA
agctgataattcaggtaagtct

SEQ ID NO: 128045 - DNA, 22 bp, synthetic construct
  misc_feature 1..22: note = chemically synthesized
  source 1..22: mol_type = other DNA
gctgataattcaggtaagtctt

SEQ ID NO: 128046 - DNA, 22 bp, synthetic construct
  misc_feature 1..22: note = chemically synthesized
  source 1..22: mol_type = other DNA
ataattcaggtaagtctttaca

SEQ ID NO: 128047 - DNA, 22 bp, synthetic construct
  misc_feature 1..22: note = chemically synthesized
  source 1..22: mol_type = other DNA
aggtaagtctttacatgcagga

SEQ ID NO: 128048 - DNA, 22 bp, synthetic construct
  misc_feature 1..22: note = chemically synthesized
  source 1..22: mol_type = other DNA
tacatgcaggaaaatgtggatt

SEQ ID NO: 128049 - DNA, 22 bp, synthetic construct
  misc_feature 1..22: note = chemically synthesized
  source 1..22: mol_type = other DNA
acatgcaggaaaatgtggatta

SEQ ID NO: 128050 - DNA, 22 bp, synthetic construct
  misc_feature 1..22: note = chemically synthesized
  source 1..22: mol_type = other DNA
catgcaggaaaatgtggattag

SEQ ID NO: 128051 - DNA, 22 bp, synthetic construct
  misc_feature 1..22: note = chemically synthesized
  source 1..22: mol_type = other DNA
gggatcactactgtgaaggcaa

SEQ ID NO: 128052 - DNA, 22 bp, synthetic construct
  misc_feature 1..22: note = chemically synthesized
  source 1..22: mol_type = other DNA
ctgtgaaggcaattacaggttt

SEQ ID NO: 128053 - DNA, 22 bp, synthetic construct
  misc_feature 1..22: note = chemically synthesized
  source 1..22: mol_type = other DNA
tgaaggcaattacaggtttagg

SEQ ID NO: 128054 - DNA, 22 bp, synthetic construct
  misc_feature 1..22: note = chemically synthesized
  source 1..22: mol_type = other DNA
caggtttaggtggtagaccaga

SEQ ID NO: 128055 - DNA, 22 bp, synthetic construct
  misc_feature 1..22: note = chemically synthesized
  source 1..22: mol_type = other DNA
aggtggtagaccagaaaaaaat

SEQ ID NO: 128056 - DNA, 22 bp, synthetic construct
  misc_feature 1..22: note = chemically synthesized
  source 1..22: mol_type = other DNA
ggtggtagaccagaaaaaaatt

SEQ ID NO: 128057 - DNA, 22 bp, synthetic construct
  misc_feature 1..22: note = chemically synthesized
  source 1..22: mol_type = other DNA
gtgttagctttctggaaatccc

SEQ ID NO: 128058 - DNA, 22 bp, synthetic construct
  misc_feature 1..22: note = chemically synthesized
  source 1..22: mol_type = other DNA
gctttctggaaatccccttgaa

SEQ ID NO: 128059 - DNA, 22 bp, synthetic construct
  misc_feature 1..22: note = chemically synthesized
  source 1..22: mol_type = other DNA
tctggaaatccccttgaatgcc

SEQ ID NO: 128060 - DNA, 22 bp, synthetic construct
  misc_feature 1..22: note = chemically synthesized
  source 1..22: mol_type = other DNA
ctggaaatccccttgaatgccc

SEQ ID NO: 128061 - DNA, 22 bp, synthetic construct
  misc_feature 1..22: note = chemically synthesized
  source 1..22: mol_type = other DNA
tggaaatccccttgaatgcccc

SEQ ID NO: 128062 - DNA, 22 bp, synthetic construct
  misc_feature 1..22: note = chemically synthesized
  source 1..22: mol_type = other DNA
gaaatccccttgaatgccccat

SEQ ID NO: 128063 - DNA, 22 bp, synthetic construct
  misc_feature 1..22: note = chemically synthesized
  source 1..22: mol_type = other DNA
gaatgccccatagaatacgaat

SEQ ID NO: 128064 - DNA, 22 bp, synthetic construct
  misc_feature 1..22: note = chemically synthesized
  source 1..22: mol_type = other DNA
aatgccccatagaatacgaatt

SEQ ID NO: 128065 - DNA, 22 bp, synthetic construct
  misc_feature 1..22: note = chemically synthesized
  source 1..22: mol_type = other DNA
tttaaaatctgcatagttaagg

SEQ ID NO: 128066 - DNA, 22 bp, synthetic construct
  misc_feature 1..22: note = chemically synthesized
  source 1..22: mol_type = other DNA
taaaatctgcatagttaagggt

SEQ ID NO: 128067 - DNA, 22 bp, synthetic construct
  misc_feature 1..22: note = chemically synthesized
  source 1..22: mol_type = other DNA
aaaatctgcatagttaagggta

SEQ ID NO: 128068 - DNA, 22 bp, synthetic construct
  misc_feature 1..22: note = chemically synthesized
  source 1..22: mol_type = other DNA
aaatctgcatagttaagggtaa

SEQ ID NO: 128069 - DNA, 22 bp, synthetic construct
  misc_feature 1..22: note = chemically synthesized
  source 1..22: mol_type = other DNA
catagttaagggtaacagttta

SEQ ID NO: 128070 - DNA, 22 bp, synthetic construct
  misc_feature 1..22: note = chemically synthesized
  source 1..22: mol_type = other DNA
agggtaacagtttagaagttgt

SEQ ID NO: 128071 - DNA, 22 bp, synthetic construct
  misc_feature 1..22: note = chemically synthesized
  source 1..22: mol_type = other DNA
agaagttgtagtttacataatt

SEQ ID NO: 128072 - DNA, 22 bp, synthetic construct
  misc_feature 1..22: note = chemically synthesized
  source 1..22: mol_type = other DNA
gaagttgtagtttacataattt

SEQ ID NO: 128073 - DNA, 22 bp, synthetic construct
  misc_feature 1..22: note = chemically synthesized
  source 1..22: mol_type = other DNA
tagtttacataattttttttct

SEQ ID NO: 128074 - DNA, 22 bp, synthetic construct
  misc_feature 1..22: note = chemically synthesized
  source 1..22: mol_type = other DNA
acataattttttttctgaagag

SEQ ID NO: 128075 - DNA, 22 bp, synthetic construct
  misc_feature 1..22: note = chemically synthesized
  source 1..22: mol_type = other DNA
cataattttttttctgaagaga

SEQ ID NO: 128076 - DNA, 22 bp, synthetic construct
  misc_feature 1..22: note = chemically synthesized
  source 1..22: mol_type = other DNA
tttttctgaagagaatgcttaa

SEQ ID NO: 128077 - DNA, 22 bp, synthetic construct
  misc_feature 1..22: note = chemically synthesized
  source 1..22: mol_type = other DNA
ttttctgaagagaatgcttaaa

SEQ ID NO: 128078 - DNA, 22 bp, synthetic construct
  misc_feature 1..22: note = chemically synthesized
  source 1..22: mol_type = other DNA
tttctgaagagaatgcttaaat

SEQ ID NO: 128079 - DNA, 22 bp, synthetic construct
  misc_feature 1..22: note = chemically synthesized
  source 1..22: mol_type = other DNA
ttctgaagagaatgcttaaatg

SEQ ID NO: 128080 - DNA, 22 bp, synthetic construct
  misc_feature 1..22: note = chemically synthesized
  source 1..22: mol_type = other DNA
tctgaagagaatgcttaaatgc

SEQ ID NO: 128081 - DNA, 22 bp, synthetic construct
  misc_feature 1..22: note = chemically synthesized
  source 1..22: mol_type = other DNA
ctgaagagaatgcttaaatgca

SEQ ID NO: 128082 - DNA, 22 bp, synthetic construct
  misc_feature 1..22: note = chemically synthesized
  source 1..22: mol_type = other DNA
tgaagagaatgcttaaatgcat

SEQ ID NO: 128083 - DNA, 22 bp, synthetic construct
  misc_feature 1..22: note = chemically synthesized
  source 1..22: mol_type = other DNA
aagagaatgcttaaatgcatat

SEQ ID NO: 128084 - DNA, 22 bp, synthetic construct
  misc_feature 1..22: note = chemically synthesized
  source 1..22: mol_type = other DNA
aaatgcatataaacagttgaaa

SEQ ID NO: 128085 - DNA, 22 bp, synthetic construct
  misc_feature 1..22: note = chemically synthesized
  source 1..22: mol_type = other DNA
aatgcatataaacagttgaaac

SEQ ID NO: 128086 - DNA, 22 bp, synthetic construct
  misc_feature 1..22: note = chemically synthesized
  source 1..22: mol_type = other DNA
aaactccaagaatttgattacg

SEQ ID NO: 128087 - DNA, 22 bp, synthetic construct
  misc_feature 1..22: note = chemically synthesized
  source 1..22: mol_type = other DNA
caagaatttgattacgtaggta

SEQ ID NO: 128088 - DNA, 22 bp, synthetic construct
  misc_feature 1..22: note = chemically synthesized
  source 1..22: mol_type = other DNA
gattacgtaggtaggagataga

SEQ ID NO: 128089 - DNA, 22 bp, synthetic construct
  misc_feature 1..22: note = chemically synthesized
  source 1..22: mol_type = other DNA
attacgtaggtaggagatagat

SEQ ID NO: 128090 - DNA, 22 bp, synthetic construct
  misc_feature 1..22: note = chemically synthesized
  source 1..22: mol_type = other DNA
cgtaggtaggagatagatcctg

SEQ ID NO: 128091 - DNA, 22 bp, synthetic construct
  misc_feature 1..22: note = chemically synthesized
  source 1..22: mol_type = other DNA
gaatgtgcagttaagaatacaa

SEQ ID NO: 128092 - DNA, 22 bp, synthetic construct
  misc_feature 1..22: note = chemically synthesized
  source 1..22: mol_type = other DNA
agaatacaaatagtatgagtaa

SEQ ID NO: 128093 - DNA, 22 bp, synthetic construct
  misc_feature 1..22: note = chemically synthesized
  source 1..22: mol_type = other DNA
agaatgtattttgagaaacaat

SEQ ID NO: 128094 - DNA, 22 bp, synthetic construct
  misc_feature 1..22: note = chemically synthesized
  source 1..22: mol_type = other DNA
tgagaaacaatcacttatattg

SEQ ID NO: 128095 - DNA, 22 bp, synthetic construct
  misc_feature 1..22: note = chemically synthesized
  source 1..22: mol_type = other DNA
gagaaacaatcacttatattga

SEQ ID NO: 128096 - DNA, 22 bp, synthetic construct
  misc_feature 1..22: note = chemically synthesized
  source 1..22: mol_type = other DNA
agaaacaatcacttatattgat

SEQ ID NO: 128097 - DNA, 22 bp, synthetic construct
  misc_feature 1..22: note = chemically synthesized
  source 1..22: mol_type = other DNA
atattgatgtcattattatctt

SEQ ID NO: 128098 - DNA, 22 bp, synthetic construct
  misc_feature 1..22: note = chemically synthesized
  source 1..22: mol_type = other DNA
tattgatgtcattattatcttt

SEQ ID NO: 128099 - DNA, 22 bp, synthetic construct
  misc_feature 1..22: note = chemically synthesized
  source 1..22: mol_type = other DNA
atgtcattattatctttaggaa

SEQ ID NO: 128100 - DNA, 22 bp, synthetic construct
  misc_feature 1..22: note = chemically synthesized
  source 1..22: mol_type = other DNA
ttatctttaggaaaaaattctg

SEQ ID NO: 128101 - DNA, 22 bp, synthetic construct
  misc_feature 1..22: note = chemically synthesized
  source 1..22: mol_type = other DNA
tctttaggaaaaaattctgaga

SEQ ID NO: 128102 - DNA, 22 bp, synthetic construct
  misc_feature 1..22: note = chemically synthesized
  source 1..22: mol_type = other DNA
taggaaaaaattctgagaatga

SEQ ID NO: 128103 - DNA, 22 bp, synthetic construct
  misc_feature 1..22: note = chemically synthesized
  source 1..22: mol_type = other DNA
aggaaaaaattctgagaatgat

SEQ ID NO: 128104 - DNA, 22 bp, synthetic construct
  misc_feature 1..22: note = chemically synthesized
  source 1..22: mol_type = other DNA
ggaaaaaattctgagaatgata

SEQ ID NO: 128105 - DNA, 22 bp, synthetic construct
  misc_feature 1..22: note = chemically synthesized
  source 1..22: mol_type = other DNA
tgagaatgatatagtcgaagtg

SEQ ID NO: 128106 - DNA, 22 bp, synthetic construct
  misc_feature 1..22: note = chemically synthesized
  source 1..22: mol_type = other DNA
agaatgatatagtcgaagtgat

SEQ ID NO: 128107 - DNA, 22 bp, synthetic construct
  misc_feature 1..22: note = chemically synthesized
  source 1..22: mol_type = other DNA
gaaggtagaactgtgcactgtg

SEQ ID NO: 128108 - DNA, 22 bp, synthetic construct
  misc_feature 1..22: note = chemically synthesized
  source 1..22: mol_type = other DNA
aaggtagaactgtgcactgtgg

SEQ ID NO: 128109 - DNA, 22 bp, synthetic construct
  misc_feature 1..22: note = chemically synthesized
  source 1..22: mol_type = other DNA
tgcactgtggtaataacagaaa

SEQ ID NO: 128110 - DNA, 22 bp, synthetic construct
  misc_feature 1..22: note = chemically synthesized
  source 1..22: mol_type = other DNA
tggtaataacagaaacagaaag

SEQ ID NO: 128111 - DNA, 22 bp, synthetic construct
  misc_feature 1..22: note = chemically synthesized
  source 1..22: mol_type = other DNA
cttctatataaacccaggatgt

SEQ ID NO: 128112 - DNA, 22 bp, synthetic construct
  misc_feature 1..22: note = chemically synthesized
  source 1..22: mol_type = other DNA
ttctatataaacccaggatgtc

SEQ ID NO: 128113 - DNA, 22 bp, synthetic construct
  misc_feature 1..22: note = chemically synthesized
  source 1..22: mol_type = other DNA
ctatataaacccaggatgtcgt

SEQ ID NO: 128114 - DNA, 22 bp, synthetic construct
  misc_feature 1..22: note = chemically synthesized
  source 1..22: mol_type = other DNA
tatataaacccaggatgtcgtc

SEQ ID NO: 128115 - DNA, 22 bp, synthetic construct
  misc_feature 1..22: note = chemically synthesized
  source 1..22: mol_type = other DNA
tataaacccaggatgtcgtcca

SEQ ID NO: 128116 - DNA, 22 bp, synthetic construct
  misc_feature 1..22: note = chemically synthesized
  source 1..22: mol_type = other DNA
ccatcccttcctattgactggt

SEQ ID NO: 128117 - DNA, 22 bp, synthetic construct
  misc_feature 1..22: note = chemically synthesized
  source 1..22: mol_type = other DNA
cctattgactggttttccaggc

SEQ ID NO: 128118 - DNA, 22 bp, synthetic construct
  misc_feature 1..22: note = chemically synthesized
  source 1..22: mol_type = other DNA
ctattgactggttttccaggct

SEQ ID NO: 128119 - DNA, 22 bp, synthetic construct
  misc_feature 1..22: note = chemically synthesized
  source 1..22: mol_type = other DNA
ttgactggttttccaggcttgg

SEQ ID NO: 128120 - DNA, 22 bp, synthetic construct
  misc_feature 1..22: note = chemically synthesized
  source 1..22: mol_type = other DNA
actggttttccaggcttggagg

SEQ ID NO: 128121 - DNA, 22 bp, synthetic construct
  misc_feature 1..22: note = chemically synthesized
  source 1..22: mol_type = other DNA
gttttccaggcttggaggaagc

SEQ ID NO: 128122 - DNA, 22 bp, synthetic construct
  misc_feature 1..22: note = chemically synthesized
  source 1..22: mol_type = other DNA
tccaggcttggaggaagctcat

SEQ ID NO: 128123 - DNA, 22 bp, synthetic construct
  misc_feature 1..22: note = chemically synthesized
  source 1..22: mol_type = other DNA
ccaggcttggaggaagctcatc

SEQ ID NO: 128124 - DNA, 22 bp, synthetic construct
  misc_feature 1..22: note = chemically synthesized
  source 1..22: mol_type = other DNA
caggcttggaggaagctcatca

SEQ ID NO: 128125 - DNA, 22 bp, synthetic construct
  misc_feature 1..22: note = chemically synthesized
  source 1..22: mol_type = other DNA
ggaggaagctcatcactggatt

SEQ ID NO: 128126 - DNA, 22 bp, synthetic construct
  misc_feature 1..22: note = chemically synthesized
  source 1..22: mol_type = other DNA
gaggaagctcatcactggattt

SEQ ID NO: 128127 - DNA, 22 bp, synthetic construct
  misc_feature 1..22: note = chemically synthesized
  source 1..22: mol_type = other DNA
atcactggatttccgtattttt

SEQ ID NO: 128128 - DNA, 22 bp, synthetic construct
  misc_feature 1..22: note = chemically synthesized
  source 1..22: mol_type = other DNA
gatttccgtatttttcttgttc

SEQ ID NO: 128129 - DNA, 22 bp, synthetic construct
  misc_feature 1..22: note = chemically synthesized
  source 1..22: mol_type = other DNA
ccgtatttttcttgttcatgta

SEQ ID NO: 128130 - DNA, 22 bp, synthetic construct
  misc_feature 1..22: note = chemically synthesized
  source 1..22: mol_type = other DNA
cgtatttttcttgttcatgtat

SEQ ID NO: 128131 - DNA, 22 bp, synthetic construct
  misc_feature 1..22: note = chemically synthesized
  source 1..22: mol_type = other DNA
ttcttgttcatgtatatatcca

SEQ ID NO: 128132 - DNA, 22 bp, synthetic construct
  misc_feature 1..22: note = chemically synthesized
  source 1..22: mol_type = other DNA
tcttgttcatgtatatatccat

SEQ ID NO: 128133 - DNA, 22 bp, synthetic construct
  misc_feature 1..22: note = chemically synthesized
  source 1..22: mol_type = other DNA
cttgttcatgtatatatccatc

SEQ ID NO: 128134 - DNA, 22 bp, synthetic construct
  misc_feature 1..22: note = chemically synthesized
  source 1..22: mol_type = other DNA
ttgttcatgtatatatccatcc

SEQ ID NO: 128135 - DNA, 22 bp, synthetic construct
  misc_feature 1..22: note = chemically synthesized
  source 1..22: mol_type = other DNA
gttcatgtatatatccatcctt

SEQ ID NO: 128136 - DNA, 22 bp, synthetic construct
  misc_feature 1..22: note = chemically synthesized
  source 1..22: mol_type = other DNA
ttcatgtatatatccatccttt

SEQ ID NO: 128137 - DNA, 22 bp, synthetic construct
  misc_feature 1..22: note = chemically synthesized
  source 1..22: mol_type = other DNA
atgtatatatccatcctttttg

SEQ ID NO: 128138 - DNA, 22 bp, synthetic construct
  misc_feature 1..22: note = chemically synthesized
  source 1..22: mol_type = other DNA
tttggcaatggcaccctccttc

SEQ ID NO: 128139 - DNA, 22 bp, synthetic construct
  misc_feature 1..22: note = chemically synthesized
  source 1..22: mol_type = other DNA
ttggcaatggcaccctccttct

SEQ ID NO: 128140 - DNA, 22 bp, synthetic construct
  misc_feature 1..22: note = chemically synthesized
  source 1..22: mol_type = other DNA
tggcaatggcaccctccttctt

SEQ ID NO: 128141 - DNA, 22 bp, synthetic construct
  misc_feature 1..22: note = chemically synthesized
  source 1..22: mol_type = other DNA
ggcaatggcaccctccttcttc

SEQ ID NO: 128142 - DNA, 22 bp, synthetic construct
  misc_feature 1..22: note = chemically synthesized
  source 1..22: mol_type = other DNA
gcaatggcaccctccttcttct

SEQ ID NO: 128143 - DNA, 22 bp, synthetic construct
  misc_feature 1..22: note = chemically synthesized
  source 1..22: mol_type = other DNA
cttcttctcattaaggaagatc

SEQ ID NO: 128144 - DNA, 22 bp, synthetic construct
  misc_feature 1..22: note = chemically synthesized
  source 1..22: mol_type = other DNA
cttctcattaaggaagatcaca

SEQ ID NO: 128145 - DNA, 22 bp, synthetic construct
  misc_feature 1..22: note = chemically synthesized
  source 1..22: mol_type = other DNA
ttctcattaaggaagatcacaa

SEQ ID NO: 128146 - DNA, 22 bp, synthetic construct
  misc_feature 1..22: note = chemically synthesized
  source 1..22: mol_type = other DNA
ctcattaaggaagatcacaatc

SEQ ID NO: 128147 - DNA, 22 bp, synthetic construct
  misc_feature 1..22: note = chemically synthesized
  source 1..22: mol_type = other DNA
tcattaaggaagatcacaatct

SEQ ID NO: 128148 - DNA, 22 bp, synthetic construct
  misc_feature 1..22: note = chemically synthesized
  source 1..22: mol_type = other DNA
attaaggaagatcacaatcttc

SEQ ID NO: 128149 - DNA, 22 bp, synthetic construct
  misc_feature 1..22: note = chemically synthesized
  source 1..22: mol_type = other DNA
aggaagatcacaatcttcatga

SEQ ID NO: 128150 - DNA, 22 bp, synthetic construct
  misc_feature 1..22: note = chemically synthesized
  source 1..22: mol_type = other DNA
catgagcccatgtacttctttc

SEQ ID NO: 128151 - DNA, 22 bp, synthetic construct
  misc_feature 1..22: note = chemically synthesized
  source 1..22: mol_type = other DNA
atgagcccatgtacttctttct

SEQ ID NO: 128152 - DNA, 22 bp, synthetic construct
  misc_feature 1..22: note = chemically synthesized
  source 1..22: mol_type = other DNA
ctttctggccatgctggctgcc

SEQ ID NO: 128153 - DNA, 22 bp, synthetic construct
  misc_feature 1..22: note = chemically synthesized
  source 1..22: mol_type = other DNA
tttctggccatgctggctgcca

SEQ ID NO: 128154 - DNA, 22 bp, synthetic construct
  misc_feature 1..22: note = chemically synthesized
  source 1..22: mol_type = other DNA
tctggccatgctggctgccaca

SEQ ID NO: 128155 - DNA, 22 bp, synthetic construct
  misc_feature 1..22: note = chemically synthesized
  source 1..22: mol_type = other DNA
ctggccatgctggctgccacag

SEQ ID NO: 128156 - DNA, 22 bp, synthetic construct
  misc_feature 1..22: note = chemically synthesized
  source 1..22: mol_type = other DNA
tggccatgctggctgccacaga

SEQ ID NO: 128157 - DNA, 22 bp, synthetic construct
  misc_feature 1..22: note = chemically synthesized
  source 1..22: mol_type = other DNA
gccatgctggctgccacagacc

SEQ ID NO: 128158 - DNA, 22 bp, synthetic construct
  misc_feature 1..22: note = chemically synthesized
  source 1..22: mol_type = other DNA
gctgccacagacctggggctgg

SEQ ID NO: 128159 - DNA, 22 bp, synthetic construct
  misc_feature 1..22: note = chemically synthesized
  source 1..22: mol_type = other DNA
ccacagacctggggctggccct

SEQ ID NO: 128160 - DNA, 22 bp, synthetic construct
  misc_feature 1..22: note = chemically synthesized
  source 1..22: mol_type = other DNA
gggctggccctgaccacaatgc

SEQ ID NO: 128161 - DNA, 22 bp, synthetic construct
  misc_feature 1..22: note = chemically synthesized
  source 1..22: mol_type = other DNA
gccctgaccacaatgcccacgg

SEQ ID NO: 128162 - DNA, 22 bp, synthetic construct
  misc_feature 1..22: note = chemically synthesized
  source 1..22: mol_type = other DNA
accacaatgcccacggtgctgg

SEQ ID NO: 128163 - DNA, 22 bp, synthetic construct
  misc_feature 1..22: note = chemically synthesized
  source 1..22: mol_type = other DNA
ggagtcctctggctggatcaca

SEQ ID NO: 128164 - DNA, 22 bp, synthetic construct
  misc_feature 1..22: note = chemically synthesized
  source 1..22: mol_type = other DNA
tggctggatcacagggagattg

SEQ ID NO: 128165 - DNA, 22 bp, synthetic construct
  misc_feature 1..22: note = chemically synthesized
  source 1..22: mol_type = other DNA
gctggatcacagggagattgga

SEQ ID NO: 128166 - DNA, 22 bp, synthetic construct
  misc_feature 1..22: note = chemically synthesized
  source 1..22: mol_type = other DNA
gatcacagggagattggaagtg

SEQ ID NO: 128167 - DNA, 22 bp, synthetic construct
  misc_feature 1..22: note = chemically synthesized
  source 1..22: mol_type = other DNA
gaagtgcggcctgcttttccca

SEQ ID NO: 128168 - DNA, 22 bp, synthetic construct
  misc_feature 1..22: note = chemically synthesized
  source 1..22: mol_type = other DNA
cttttcccaggcctactttata

SEQ ID NO: 128169 - DNA, 22 bp, synthetic construct
  misc_feature 1..22: note = chemically synthesized
  source 1..22: mol_type = other DNA
ttcccaggcctactttatacac

SEQ ID NO: 128170 - DNA, 22 bp, synthetic construct
  misc_feature 1..22: note = chemically synthesized
  source 1..22: mol_type = other DNA
tcccaggcctactttatacact

SEQ ID NO: 128171 - DNA, 22 bp, synthetic construct
  misc_feature 1..22: note = chemically synthesized
  source 1..22: mol_type = other DNA
cccaggcctactttatacactc

SEQ ID NO: 128172 - DNA, 22 bp, synthetic construct
  misc_feature 1..22: note = chemically synthesized
  source 1..22: mol_type = other DNA
ccaggcctactttatacactca

SEQ ID NO: 128173 - DNA, 22 bp, synthetic construct
  misc_feature 1..22: note = chemically synthesized
  source 1..22: mol_type = other DNA
ctttatacactcactttccttt

SEQ ID NO: 128174 - DNA, 22 bp, synthetic construct
  misc_feature 1..22: note = chemically synthesized
  source 1..22: mol_type = other DNA
tatacactcactttcctttctc

SEQ ID NO: 128175 - DNA, 22 bp, synthetic construct
  misc_feature 1..22: note = chemically synthesized
  source 1..22: mol_type = other DNA
atacactcactttcctttctcg

SEQ ID NO: 128176 - DNA, 22 bp, synthetic construct
  misc_feature 1..22: note = chemically synthesized
  source 1..22: mol_type = other DNA
tacactcactttcctttctcga

SEQ ID NO: 128177 - DNA, 22 bp, synthetic construct
  misc_feature 1..22: note = chemically synthesized
  source 1..22: mol_type = other DNA
actttcctttctcgagtctggc

SEQ ID NO: 128178 - DNA, 22 bp, synthetic construct
  misc_feature 1..22: note = chemically synthesized
  source 1..22: mol_type = other DNA
tcctttctcgagtctggcattc

SEQ ID NO: 128179 - DNA, 22 bp, synthetic construct
  misc_feature 1..22: note = chemically synthesized
  source 1..22: mol_type = other DNA
cctttctcgagtctggcattct

SEQ ID NO: 128180 - DNA, 22 bp, synthetic construct
  misc_feature 1..22: note = chemically synthesized
  source 1..22: mol_type = other DNA
ctttctcgagtctggcattctg

SEQ ID NO: 128181 - DNA, 22 bp, synthetic construct
  misc_feature 1..22: note = chemically synthesized
  source 1..22: mol_type = other DNA
tctcgagtctggcattctgctt

SEQ ID NO: 128182 - DNA, 22 bp, synthetic construct
  misc_feature 1..22: note = chemically synthesized
  source 1..22: mol_type = other DNA
ctcgagtctggcattctgcttg

SEQ ID NO: 128183 - DNA, 22 bp, synthetic construct
  misc_feature 1..22: note = chemically synthesized
  source 1..22: mol_type = other DNA
tcgagtctggcattctgcttgc

SEQ ID NO: 128184 - DNA, 22 bp, synthetic construct
  misc_feature 1..22: note = chemically synthesized
  source 1..22: mol_type = other DNA
gagtctggcattctgcttgcca

SEQ ID NO: 128185 - DNA, 22 bp, synthetic construct
  misc_feature 1..22: note = chemically synthesized
  source 1..22: mol_type = other DNA
gcattctgcttgccatggccta

SEQ ID NO: 128186 - DNA, 22 bp, synthetic construct
  misc_feature 1..22: note = chemically synthesized
  source 1..22: mol_type = other DNA
tgcttgccatggcctatgaccg

SEQ ID NO: 128187 - DNA, 22 bp, synthetic construct
  misc_feature 1..22: note = chemically synthesized
  source 1..22: mol_type = other DNA
cttgccatggcctatgaccgtt

SEQ ID NO: 128188 - DNA, 22 bp, synthetic construct
  misc_feature 1..22: note = chemically synthesized
  source 1..22: mol_type = other DNA
gccatggcctatgaccgtttta

SEQ ID NO: 128189 - DNA, 22 bp, synthetic construct
  misc_feature 1..22: note = chemically synthesized
  source 1..22: mol_type = other DNA
ccatggcctatgaccgttttat

SEQ ID NO: 128190 - DNA, 22 bp, synthetic construct
  misc_feature 1..22: note = chemically synthesized
  source 1..22: mol_type = other DNA
tgaccgttttattgccatctgc

SEQ ID NO: 128191 - DNA, 22 bp, synthetic construct
  misc_feature 1..22: note = chemically synthesized
  source 1..22: mol_type = other DNA
tattgccatctgcaaccctctt

SEQ ID NO: 128192 - DNA, 22 bp, synthetic construct
  misc_feature 1..22: note = chemically synthesized
  source 1..22: mol_type = other DNA
attgccatctgcaaccctctta

SEQ ID NO: 128193 - DNA, 22 bp, synthetic construct
  misc_feature 1..22: note = chemically synthesized
  source 1..22: mol_type = other DNA
ttgccatctgcaaccctcttag

SEQ ID NO: 128194 - DNA, 22 bp, synthetic construct
  misc_feature 1..22: note = chemically synthesized
  source 1..22: mol_type = other DNA
ccatctgcaaccctcttagata

SEQ ID NO: 128195 - DNA, 22 bp, synthetic construct
  misc_feature 1..22: note = chemically synthesized
  source 1..22: mol_type = other DNA
caaccctcttagatatacctct

SEQ ID NO: 128196 - DNA, 22 bp, synthetic construct
  misc_feature 1..22: note = chemically synthesized
  source 1..22: mol_type = other DNA
ttagatatacctctgtacttac

SEQ ID NO: 128197 - DNA, 22 bp, synthetic construct
  misc_feature 1..22: note = chemically synthesized
  source 1..22: mol_type = other DNA
agatatacctctgtacttacta

SEQ ID NO: 128198 - DNA, 22 bp, synthetic construct
  misc_feature 1..22: note = chemically synthesized
  source 1..22: mol_type = other DNA
gatatacctctgtacttactaa

SEQ ID NO: 128199 - DNA, 22 bp, synthetic construct
  misc_feature 1..22: note = chemically synthesized
  source 1..22: mol_type = other DNA
tgtacttactaatactcgagta

SEQ ID NO: 128200 - DNA, 22 bp, synthetic construct
  misc_feature 1..22: note = chemically synthesized
  source 1..22: mol_type = other DNA
tacttactaatactcgagtagt

SEQ ID NO: 128201 - DNA, 22 bp, synthetic construct
  misc_feature 1..22: note = chemically synthesized
  source 1..22: mol_type = other DNA
actaatactcgagtagtgaaga

SEQ ID NO: 128202 - DNA, 22 bp, synthetic construct
  misc_feature 1..22: note = chemically synthesized
  source 1..22: mol_type = other DNA
ctaatactcgagtagtgaagat

SEQ ID NO: 128203 - DNA, 22 bp, synthetic construct
  misc_feature 1..22: note = chemically synthesized
  source 1..22: mol_type = other DNA
atactcgagtagtgaagattgg

SEQ ID NO: 128204 - DNA, 22 bp, synthetic construct
  misc_feature 1..22: note = chemically synthesized
  source 1..22: mol_type = other DNA
gagtagtgaagattgggctggg

SEQ ID NO: 128205 - DNA, 22 bp, synthetic construct
  misc_feature 1..22: note = chemically synthesized
  source 1..22: mol_type = other DNA
ggctgggagttctgatgagggg

SEQ ID NO: 128206 - DNA, 22 bp, synthetic construct
  misc_feature 1..22: note = chemically synthesized
  source 1..22: mol_type = other DNA
ggagttctgatgaggggatttg

SEQ ID NO: 128207 - DNA, 22 bp, synthetic construct
  misc_feature 1..22: note = chemically synthesized
  source 1..22: mol_type = other DNA
tgatgaggggatttgtatccgt

SEQ ID NO: 128208 - DNA, 22 bp, synthetic construct
  misc_feature 1..22: note = chemically synthesized
  source 1..22: mol_type = other DNA
atgaggggatttgtatccgttg

SEQ ID NO: 128209 - DNA, 22 bp, synthetic construct
  misc_feature 1..22: note = chemically synthesized
  source 1..22: mol_type = other DNA
gtatccgttgttcccccaatca

SEQ ID NO: 128210 - DNA, 22 bp, synthetic construct
  misc_feature 1..22: note = chemically synthesized
  source 1..22: mol_type = other DNA
tatccgttgttcccccaatcag

SEQ ID NO: 128211 - DNA, 22 bp, synthetic construct
  misc_feature 1..22: note = chemically synthesized
  source 1..22: mol_type = other DNA
ttcccccaatcaggcccctcta

SEQ ID NO: 128212 - DNA, 22 bp, synthetic construct
  misc_feature 1..22: note = chemically synthesized
  source 1..22: mol_type = other DNA
ccccaatcaggcccctctattt

SEQ ID NO: 128213 - DNA, 22 bp, synthetic construct
  misc_feature 1..22: note = chemically synthesized
  source 1..22: mol_type = other DNA
tatttttttctgtattgtcact

SEQ ID NO: 128214 - DNA, 22 bp, synthetic construct
  misc_feature 1..22: note = chemically synthesized
  source 1..22: mol_type = other DNA
tttttttctgtattgtcactcc

SEQ ID NO: 128215 - DNA, 22 bp, synthetic construct
  misc_feature 1..22: note = chemically synthesized
  source 1..22: mol_type = other DNA
ttttctgtattgtcactcccat

SEQ ID NO: 128216 - DNA, 22 bp, synthetic construct
  misc_feature 1..22: note = chemically synthesized
  source 1..22: mol_type = other DNA
tttctgtattgtcactcccatg

SEQ ID NO: 128217 - DNA, 22 bp, synthetic construct
  misc_feature 1..22: note = chemically synthesized
  source 1..22: mol_type = other DNA
ttctgtattgtcactcccatgt

SEQ ID NO: 128218 - DNA, 22 bp, synthetic construct
  misc_feature 1..22: note = chemically synthesized
  source 1..22: mol_type = other DNA
tctgtattgtcactcccatgtt

SEQ ID NO: 128219 - DNA, 22 bp, synthetic construct
  misc_feature 1..22: note = chemically synthesized
  source 1..22: mol_type = other DNA
ctgtattgtcactcccatgttc

SEQ ID NO: 128220 - DNA, 22 bp, synthetic construct
  misc_feature 1..22: note = chemically synthesized
  source 1..22: mol_type = other DNA
tgtattgtcactcccatgttct

SEQ ID NO: 128221 - DNA, 22 bp, synthetic construct
  misc_feature 1..22: note = chemically synthesized
  source 1..22: mol_type = other DNA
tattgtcactcccatgttcttt

SEQ ID NO: 128222 - DNA, 22 bp, synthetic construct
  misc_feature 1..22: note = chemically synthesized
  source 1..22: mol_type = other DNA
tcactcccatgttctttcacat

SEQ ID NO: 128223 - DNA, 22 bp, synthetic construct
  misc_feature 1..22: note = chemically synthesized
  source 1..22: mol_type = other DNA
ccatgttctttcacatgcattc

SEQ ID NO: 128224 - DNA, 22 bp, synthetic construct
  misc_feature 1..22: note = chemically synthesized
  source 1..22: mol_type = other DNA
tttcacatgcattctgccttca

SEQ ID NO: 128225 - DNA, 22 bp, synthetic construct
  misc_feature 1..22: note = chemically synthesized
  source 1..22: mol_type = other DNA
tcacatgcattctgccttcacc

SEQ ID NO: 128226 - DNA, 22 bp, synthetic construct
  misc_feature 1..22: note = chemically synthesized
  source 1..22: mol_type = other DNA
cacatgcattctgccttcacca

SEQ ID NO: 128227 - DNA, 22 bp, synthetic construct
  misc_feature 1..22: note = chemically synthesized
  source 1..22: mol_type = other DNA
acatgcattctgccttcaccag

SEQ ID NO: 128228 - DNA, 22 bp, synthetic construct
  misc_feature 1..22: note = chemically synthesized
  source 1..22: mol_type = other DNA
tgccttcaccaggatgtcatta

SEQ ID NO: 128229 - DNA, 22 bp, synthetic construct
  misc_feature 1..22: note = chemically synthesized
  source 1..22: mol_type = other DNA
ccttcaccaggatgtcattaaa

SEQ ID NO: 128230 - DNA, 22 bp, synthetic construct
  misc_feature 1..22: note = chemically synthesized
  source 1..22: mol_type = other DNA
caccaggatgtcattaaactcg

SEQ ID NO: 128231 - DNA, 22 bp, synthetic construct
  misc_feature 1..22: note = chemically synthesized
  source 1..22: mol_type = other DNA
accaggatgtcattaaactcgc

SEQ ID NO: 128232 - DNA, 22 bp, synthetic construct
  misc_feature 1..22: note = chemically synthesized
  source 1..22: mol_type = other DNA
aactcgcctgtgctgataccac

SEQ ID NO: 128233 - DNA, 22 bp, synthetic construct
  misc_feature 1..22: note = chemically synthesized
  source 1..22: mol_type = other DNA
gcctgtgctgataccaccttca

SEQ ID NO: 128234 - DNA, 22 bp, synthetic construct
  misc_feature 1..22: note = chemically synthesized
  source 1..22: mol_type = other DNA
tgctgataccaccttcaaccga

SEQ ID NO: 128235 - DNA, 22 bp, synthetic construct
  misc_feature 1..22: note = chemically synthesized
  source 1..22: mol_type = other DNA
ataccaccttcaaccgactgta

SEQ ID NO: 128236 - DNA, 22 bp, synthetic construct
  misc_feature 1..22: note = chemically synthesized
  source 1..22: mol_type = other DNA
caaccgactgtacccagctgtg

SEQ ID NO: 128237 - DNA, 22 bp, synthetic construct
  misc_feature 1..22: note = chemically synthesized
  source 1..22: mol_type = other DNA
aaccgactgtacccagctgtgc

SEQ ID NO: 128238 - DNA, 22 bp, synthetic construct
  misc_feature 1..22: note = chemically synthesized
  source 1..22: mol_type = other DNA
tacccagctgtgcttgtagtct

SEQ ID NO: 128239 - DNA, 22 bp, synthetic construct
  misc_feature 1..22: note = chemically synthesized
  source 1..22: mol_type = other DNA
tgcttgtagtctttatatttgt

SEQ ID NO: 128240 - DNA, 22 bp, synthetic construct
  misc_feature 1..22: note = chemically synthesized
  source 1..22: mol_type = other DNA
gtagtctttatatttgtgctgg

SEQ ID NO: 128241 - DNA, 22 bp, synthetic construct
  misc_feature 1..22: note = chemically synthesized
  source 1..22: mol_type = other DNA
tagtctttatatttgtgctgga

SEQ ID NO: 128242 - DNA, 22 bp, synthetic construct
  misc_feature 1..22: note = chemically synthesized
  source 1..22: mol_type = other DNA
tatatttgtgctggattatctg

SEQ ID NO: 128243 - DNA, 22 bp, synthetic construct
  misc_feature 1..22: note = chemically synthesized
  source 1..22: mol_type = other DNA
atatttgtgctggattatctga

SEQ ID NO: 128244 - DNA, 22 bp, synthetic construct
  misc_feature 1..22: note = chemically synthesized
  source 1..22: mol_type = other DNA
tatttgtgctggattatctgat

SEQ ID NO: 128245 - DNA, 22 bp, synthetic construct
  misc_feature 1..22: note = chemically synthesized
  source 1..22: mol_type = other DNA
gtgctggattatctgattatct

SEQ ID NO: 128246 - DNA, 22 bp, synthetic construct
  misc_feature 1..22: note = chemically synthesized
  source 1..22: mol_type = other DNA
tgctggattatctgattatctt

SEQ ID NO: 128247 - DNA, 22 bp, synthetic construct
  misc_feature 1..22: note = chemically synthesized
  source 1..22: mol_type = other DNA
gattatctgattatcttcatct

SEQ ID NO: 128248 - DNA, 22 bp, synthetic construct
  misc_feature 1..22: note = chemically synthesized
  source 1..22: mol_type = other DNA
tctgattatcttcatctcctat

SEQ ID NO: 128249 - DNA, 22 bp, synthetic construct
  misc_feature 1..22: note = chemically synthesized
  source 1..22: mol_type = other DNA
attatcttcatctcctatgtgt

SEQ ID NO: 128250 - DNA, 22 bp, synthetic construct
  misc_feature 1..22: note = chemically synthesized
  source 1..22: mol_type = other DNA
tcttcatctcctatgtgttgat

SEQ ID NO: 128251 - DNA, 22 bp, synthetic construct
  misc_feature 1..22: note = chemically synthesized
  source 1..22: mol_type = other DNA
catctcctatgtgttgatactc

SEQ ID NO: 128252 - DNA, 22 bp, synthetic construct
  misc_feature 1..22: note = chemically synthesized
  source 1..22: mol_type = other DNA
atctcctatgtgttgatactca

SEQ ID NO: 128253 - DNA, 22 bp, synthetic construct
  misc_feature 1..22: note = chemically synthesized
  source 1..22: mol_type = other DNA
ctatgtgttgatactcaagact

SEQ ID NO: 128254 - DNA, 22 bp, synthetic construct
  misc_feature 1..22: note = chemically synthesized
  source 1..22: mol_type = other DNA
tgtgttgatactcaagactgtc

SEQ ID NO: 128255 - DNA, 22 bp, synthetic construct
  misc_feature 1..22: note = chemically synthesized
  source 1..22: mol_type = other DNA
atactcaagactgtcctgagca

SEQ ID NO: 128256 - DNA, 22 bp, synthetic construct
  misc_feature 1..22: note = chemically synthesized
  source 1..22: mol_type = other DNA
aagactgtcctgagcattgcct

SEQ ID NO: 128257 - DNA, 22 bp, synthetic construct
  misc_feature 1..22: note = chemically synthesized
  source 1..22: mol_type = other DNA
tcctgagcattgcctccagaga

SEQ ID NO: 128258 - DNA, 22 bp, synthetic construct
  misc_feature 1..22: note = chemically synthesized
  source 1..22: mol_type = other DNA
agcattgcctccagagaggaga

SEQ ID NO: 128259 - DNA, 22 bp, synthetic construct
  misc_feature 1..22: note = chemically synthesized
  source 1..22: mol_type = other DNA
cctccagagaggagagggccaa

SEQ ID NO: 128260 - DNA, 22 bp, synthetic construct
  misc_feature 1..22: note = chemically synthesized
  source 1..22: mol_type = other DNA
cagagaggagagggccaaggct

SEQ ID NO: 128261 - DNA, 22 bp, synthetic construct
  misc_feature 1..22: note = chemically synthesized
  source 1..22: mol_type = other DNA
tcattacctgtgtctcccatat

SEQ ID NO: 128262 - DNA, 22 bp, synthetic construct
  misc_feature 1..22: note = chemically synthesized
  source 1..22: mol_type = other DNA
attacctgtgtctcccatatct

SEQ ID NO: 128263 - DNA, 22 bp, synthetic construct
  misc_feature 1..22: note = chemically synthesized
  source 1..22: mol_type = other DNA
cctgtgtctcccatatctgctg

SEQ ID NO: 128264 - DNA, 22 bp, synthetic construct
  misc_feature 1..22: note = chemically synthesized
  source 1..22: mol_type = other DNA
tgtctcccatatctgctgtgtc

SEQ ID NO: 128265 - DNA, 22 bp, synthetic construct
  misc_feature 1..22: note = chemically synthesized
  source 1..22: mol_type = other DNA
ccatatctgctgtgtcctggtt

SEQ ID NO: 128266 - DNA, 22 bp, synthetic construct
  misc_feature 1..22: note = chemically synthesized
  source 1..22: mol_type = other DNA
ctgtgtcctggttttttatgtc

SEQ ID NO: 128267 - DNA, 22 bp, synthetic construct
  misc_feature 1..22: note = chemically synthesized
  source 1..22: mol_type = other DNA
tgtcctggttttttatgtcaca

SEQ ID NO: 128268 - DNA, 22 bp, synthetic construct
  misc_feature 1..22: note = chemically synthesized
  source 1..22: mol_type = other DNA
gttttttatgtcacagtgattg

SEQ ID NO: 128269 - DNA, 22 bp, synthetic construct
  misc_feature 1..22: note = chemically synthesized
  source 1..22: mol_type = other DNA
tttatgtcacagtgattggatt

SEQ ID NO: 128270 - DNA, 22 bp, synthetic construct
  misc_feature 1..22: note = chemically synthesized
  source 1..22: mol_type = other DNA
ttatgtcacagtgattggattg

SEQ ID NO: 128271 - DNA, 22 bp, synthetic construct
  misc_feature 1..22: note = chemically synthesized
  source 1..22: mol_type = other DNA
tatgtcacagtgattggattgt

SEQ ID NO: 128272 - DNA, 22 bp, synthetic construct
  misc_feature 1..22: note = chemically synthesized
  source 1..22: mol_type = other DNA
atgtcacagtgattggattgtc

SEQ ID NO: 128273 - DNA, 22 bp, synthetic construct
  misc_feature 1..22: note = chemically synthesized
  source 1..22: mol_type = other DNA
tgtcacagtgattggattgtct

SEQ ID NO: 128274 - DNA, 22 bp, synthetic construct
  misc_feature 1..22: note = chemically synthesized
  source 1..22: mol_type = other DNA
gattgtctctgattcatcgttt

SEQ ID NO: 128275 - DNA, 22 bp, synthetic construct
  misc_feature 1..22: note = chemically synthesized
  source 1..22: mol_type = other DNA
tctctgattcatcgttttggaa

SEQ ID NO: 128276 - DNA, 22 bp, synthetic construct
  misc_feature 1..22: note = chemically synthesized
  source 1..22: mol_type = other DNA
tgattcatcgttttggaaagca

SEQ ID NO: 128277 - DNA, 22 bp, synthetic construct
  misc_feature 1..22: note = chemically synthesized
  source 1..22: mol_type = other DNA
attcatcgttttggaaagcagg

SEQ ID NO: 128278 - DNA, 22 bp, synthetic construct
  misc_feature 1..22: note = chemically synthesized
  source 1..22: mol_type = other DNA
atcgttttggaaagcaggttcc

SEQ ID NO: 128279 - DNA, 22 bp, synthetic construct
  misc_feature 1..22: note = chemically synthesized
  source 1..22: mol_type = other DNA
tggaaagcaggttccacatatt

SEQ ID NO: 128280 - DNA, 22 bp, synthetic construct
  misc_feature 1..22: note = chemically synthesized
  source 1..22: mol_type = other DNA
ggaaagcaggttccacatattg

SEQ ID NO: 128281 - DNA, 22 bp, synthetic construct
  misc_feature 1..22: note = chemically synthesized
  source 1..22: mol_type = other DNA
gaaagcaggttccacatattgt

SEQ ID NO: 128282 - DNA, 22 bp, synthetic construct
  misc_feature 1..22: note = chemically synthesized
  source 1..22: mol_type = other DNA
cacatattgttcacctcattat

SEQ ID NO: 128283 - DNA, 22 bp, synthetic construct
  misc_feature 1..22: note = chemically synthesized
  source 1..22: mol_type = other DNA
ttcacctcattatgagctatgc

SEQ ID NO: 128284 - DNA, 22 bp, synthetic construct
  misc_feature 1..22: note = chemically synthesized
  source 1..22: mol_type = other DNA
acctcattatgagctatgccta

SEQ ID NO: 128285 - DNA, 22 bp, synthetic construct
  misc_feature 1..22: note = chemically synthesized
  source 1..22: mol_type = other DNA
attatgagctatgcctattttc

SEQ ID NO: 128286 - DNA, 22 bp, synthetic construct
  misc_feature 1..22: note = chemically synthesized
  source 1..22: mol_type = other DNA
tgagctatgcctattttctgtt

SEQ ID NO: 128287 - DNA, 22 bp, synthetic construct
  misc_feature 1..22: note = chemically synthesized
  source 1..22: mol_type = other DNA
tgcctattttctgttccctcca

SEQ ID NO: 128288 - DNA, 22 bp, synthetic construct
  misc_feature 1..22: note = chemically synthesized
  source 1..22: mol_type = other DNA
ttttctgttccctccactaatg

SEQ ID NO: 128289 - DNA, 22 bp, synthetic construct
  misc_feature 1..22: note = chemically synthesized
  source 1..22: mol_type = other DNA
tctgttccctccactaatgaat

SEQ ID NO: 128290 - DNA, 22 bp, synthetic construct
  misc_feature 1..22: note = chemically synthesized
  source 1..22: mol_type = other DNA
ctgttccctccactaatgaatc

SEQ ID NO: 128291 - DNA, 22 bp, synthetic construct
  misc_feature 1..22: note = chemically synthesized
  source 1..22: mol_type = other DNA
tgttccctccactaatgaatcc

SEQ ID NO: 128292 - DNA, 22 bp, synthetic construct
  misc_feature 1..22: note = chemically synthesized
  source 1..22: mol_type = other DNA
ttccctccactaatgaatccta

SEQ ID NO: 128293 - DNA, 22 bp, synthetic construct
  misc_feature 1..22: note = chemically synthesized
  source 1..22: mol_type = other DNA
cctccactaatgaatcctataa

SEQ ID NO: 128294 - DNA, 22 bp, synthetic construct
  misc_feature 1..22: note = chemically synthesized
  source 1..22: mol_type = other DNA
cactaatgaatcctataacata

SEQ ID NO: 128295 - DNA, 22 bp, synthetic construct
  misc_feature 1..22: note = chemically synthesized
  source 1..22: mol_type = other DNA
atgaatcctataacatatagtg

SEQ ID NO: 128296 - DNA, 22 bp, synthetic construct
  misc_feature 1..22: note = chemically synthesized
  source 1..22: mol_type = other DNA
taacatatagtgtcaagaccaa

SEQ ID NO: 128297 - DNA, 22 bp, synthetic construct
  misc_feature 1..22: note = chemically synthesized
  source 1..22: mol_type = other DNA
agaatgccattcttcacctttt

SEQ ID NO: 128298 - DNA, 22 bp, synthetic construct
  misc_feature 1..22: note = chemically synthesized
  source 1..22: mol_type = other DNA
ttcacctttttactacccatag

SEQ ID NO: 128299 - DNA, 22 bp, synthetic construct
  misc_feature 1..22: note = chemically synthesized
  source 1..22: mol_type = other DNA
cacctttttactacccatagaa

SEQ ID NO: 128300 - DNA, 22 bp, synthetic construct
  misc_feature 1..22: note = chemically synthesized
  source 1..22: mol_type = other DNA
acctttttactacccatagaat

SEQ ID NO: 128301 - DNA, 22 bp, synthetic construct
  misc_feature 1..22: note = chemically synthesized
  source 1..22: mol_type = other DNA
tttactacccatagaattggaa

SEQ ID NO: 128302 - DNA, 22 bp, synthetic construct
  misc_feature 1..22: note = chemically synthesized
  source 1..22: mol_type = other DNA
ttactacccatagaattggaac

SEQ ID NO: 128303 - DNA, 22 bp, synthetic construct
  misc_feature 1..22: note = chemically synthesized
  source 1..22: mol_type = other DNA
tactacccatagaattggaacc

SEQ ID NO: 128304 - DNA, 22 bp, synthetic construct
  misc_feature 1..22: note = chemically synthesized
  source 1..22: mol_type = other DNA
actacccatagaattggaacct

SEQ ID NO: 128305 - DNA, 22 bp, synthetic construct
  misc_feature 1..22: note = chemically synthesized
  source 1..22: mol_type = other DNA
ctacccatagaattggaacctg

SEQ ID NO: 128306 - DNA, 22 bp, synthetic construct
  misc_feature 1..22: note = chemically synthesized
  source 1..22: mol_type = other DNA
cccatagaattggaacctgatc

SEQ ID NO: 128307 - DNA, 22 bp, synthetic construct
  misc_feature 1..22: note = chemically synthesized
  source 1..22: mol_type = other DNA
gaacctgatctccaatcatcac

SEQ ID NO: 128308 - DNA, 22 bp, synthetic construct
  misc_feature 1..22: note = chemically synthesized
  source 1..22: mol_type = other DNA
atctccaatcatcacagtcact

SEQ ID NO: 128309 - DNA, 22 bp, synthetic construct
  misc_feature 1..22: note = chemically synthesized
  source 1..22: mol_type = other DNA
caatcatcacagtcactctcac

SEQ ID NO: 128310 - DNA, 22 bp, synthetic construct
  misc_feature 1..22: note = chemically synthesized
  source 1..22: mol_type = other DNA
tcacagaatgtaaaaactctaa

SEQ ID NO: 128311 - DNA, 22 bp, synthetic construct
  misc_feature 1..22: note = chemically synthesized
  source 1..22: mol_type = other DNA
acagaatgtaaaaactctaata

SEQ ID NO: 128312 - DNA, 22 bp, synthetic construct
  misc_feature 1..22: note = chemically synthesized
  source 1..22: mol_type = other DNA
taatatttagcaggagagcaaa

SEQ ID NO: 128313 - DNA, 22 bp, synthetic construct
  misc_feature 1..22: note = chemically synthesized
  source 1..22: mol_type = other DNA
atatttagcaggagagcaaaga

SEQ ID NO: 128314 - DNA, 22 bp, synthetic construct
  misc_feature 1..22: note = chemically synthesized
  source 1..22: mol_type = other DNA
agcaggagagcaaagaagtctc

SEQ ID NO: 128315 - DNA, 22 bp, synthetic construct
  misc_feature 1..22: note = chemically synthesized
  source 1..22: mol_type = other DNA
gcaggagagcaaagaagtctca

SEQ ID NO: 128316 - DNA, 22 bp, synthetic construct
  misc_feature 1..22: note = chemically synthesized
  source 1..22: mol_type = other DNA
atatctagcatgcatgctcata

SEQ ID NO: 128317 - DNA, 22 bp, synthetic construct
  misc_feature 1..22: note = chemically synthesized
  source 1..22: mol_type = other DNA
gcatgcatgctcatatgacttg

SEQ ID NO: 128318 - DNA, 22 bp, synthetic construct
  misc_feature 1..22: note = chemically synthesized
  source 1..22: mol_type = other DNA
atatgacttggtaaaataggtg

SEQ ID NO: 128319 - DNA, 22 bp, synthetic construct
  misc_feature 1..22: note = chemically synthesized
  source 1..22: mol_type = other DNA
ggtaaaataggtgttaaaatac

SEQ ID NO: 128320 - DNA, 22 bp, synthetic construct
  misc_feature 1..22: note = chemically synthesized
  source 1..22: mol_type = other DNA
gtaaaataggtgttaaaataca

SEQ ID NO: 128321 - DNA, 22 bp, synthetic construct
  misc_feature 1..22: note = chemically synthesized
  source 1..22: mol_type = other DNA
aaatacagcttcaagtttccct

SEQ ID NO: 128322 - DNA, 22 bp, synthetic construct
  misc_feature 1..22: note = chemically synthesized
  source 1..22: mol_type = other DNA
caagtttccctaaggtatctct

SEQ ID NO: 128323 - DNA, 22 bp, synthetic construct
  misc_feature 1..22: note = chemically synthesized
  source 1..22: mol_type = other DNA
aagtttccctaaggtatctctt

SEQ ID NO: 128324 - DNA, 22 bp, synthetic construct
  misc_feature 1..22: note = chemically synthesized
  source 1..22: mol_type = other DNA
ccctaaggtatctctttaagcc

SEQ ID NO: 128325 - DNA, 22 bp, synthetic construct
  misc_feature 1..22: note = chemically synthesized
  source 1..22: mol_type = other DNA
cctaaggtatctctttaagccc

SEQ ID NO: 128326 - DNA, 22 bp, synthetic construct
  misc_feature 1..22: note = chemically synthesized
  source 1..22: mol_type = other DNA
aggtatctctttaagcccaact

SEQ ID NO: 128327 - DNA, 22 bp, synthetic construct
  misc_feature 1..22: note = chemically synthesized
  source 1..22: mol_type = other DNA
tttaagcccaactctttagcta

SEQ ID NO: 128328 - DNA, 22 bp, synthetic construct
  misc_feature 1..22: note = chemically synthesized
  source 1..22: mol_type = other DNA
taagcccaactctttagctaaa

SEQ ID NO: 128329 - DNA, 22 bp, synthetic construct
  misc_feature 1..22: note = chemically synthesized
  source 1..22: mol_type = other DNA
aagcccaactctttagctaaat

SEQ ID NO: 128330 - DNA, 22 bp, synthetic construct
  misc_feature 1..22: note = chemically synthesized
  source 1..22: mol_type = other DNA
agcccaactctttagctaaatg

SEQ ID NO: 128331 - DNA, 22 bp, synthetic construct
  misc_feature 1..22: note = chemically synthesized
  source 1..22: mol_type = other DNA
tttagctaaatgtagtttgtac

SEQ ID NO: 128332 - DNA, 22 bp, synthetic construct
  misc_feature 1..22: note = chemically synthesized
  source 1..22: mol_type = other DNA
tagctaaatgtagtttgtacaa

SEQ ID NO: 128333 - DNA, 22 bp, synthetic construct
  misc_feature 1..22: note = chemically synthesized
  source 1..22: mol_type = other DNA
agctaaatgtagtttgtacaaa

SEQ ID NO: 128334 - DNA, 22 bp, synthetic construct
  misc_feature 1..22: note = chemically synthesized
  source 1..22: mol_type = other DNA
gctaaatgtagtttgtacaaat

SEQ ID NO: 128335 - DNA, 22 bp, synthetic construct
  misc_feature 1..22: note = chemically synthesized
  source 1..22: mol_type = other DNA
aatgtagtttgtacaaattttt

SEQ ID NO: 128336 - DNA, 22 bp, synthetic construct
  misc_feature 1..22: note = chemically synthesized
  source 1..22: mol_type = other DNA
gtacaaatttttgttgcattcc

SEQ ID NO: 128337 - DNA, 22 bp, synthetic construct
  misc_feature 1..22: note = chemically synthesized
  source 1..22: mol_type = other DNA
tacaaatttttgttgcattcct

SEQ ID NO: 128338 - DNA, 22 bp, synthetic construct
  misc_feature 1..22: note = chemically synthesized
  source 1..22: mol_type = other DNA
ttgttgcattcctgtaaacgga

SEQ ID NO: 128339 - DNA, 22 bp, synthetic construct
  misc_feature 1..22: note = chemically synthesized
  source 1..22: mol_type = other DNA
tgttgcattcctgtaaacggaa

SEQ ID NO: 128340 - DNA, 22 bp, synthetic construct
  misc_feature 1..22: note = chemically synthesized
  source 1..22: mol_type = other DNA
gttgcattcctgtaaacggaat

SEQ ID NO: 128341 - DNA, 22 bp, synthetic construct
  misc_feature 1..22: note = chemically synthesized
  source 1..22: mol_type = other DNA
ttgcattcctgtaaacggaata

SEQ ID NO: 128342 - DNA, 22 bp, synthetic construct
  misc_feature 1..22: note = chemically synthesized
  source 1..22: mol_type = other DNA
cattcctgtaaacggaatattt

SEQ ID NO: 128343 - DNA, 22 bp, synthetic construct
  misc_feature 1..22: note = chemically synthesized
  source 1..22: mol_type = other DNA
ctgtaaacggaatatttctcta

SEQ ID NO: 128344 - DNA, 22 bp, synthetic construct
  misc_feature 1..22: note = chemically synthesized
  source 1..22: mol_type = other DNA
taaacggaatatttctctaagc

SEQ ID NO: 128345 - DNA, 22 bp, synthetic construct
  misc_feature 1..22: note = chemically synthesized
  source 1..22: mol_type = other DNA
ctctaagctttccactaaatta

SEQ ID NO: 128346 - DNA, 22 bp, synthetic construct
  misc_feature 1..22: note = chemically synthesized
  source 1..22: mol_type = other DNA
tctaagctttccactaaattat

SEQ ID NO: 128347 - DNA, 22 bp, synthetic construct
  misc_feature 1..22: note = chemically synthesized
  source 1..22: mol_type = other DNA
taagctttccactaaattattg

SEQ ID NO: 128348 - DNA, 22 bp, synthetic construct
  misc_feature 1..22: note = chemically synthesized
  source 1..22: mol_type = other DNA
agctttccactaaattattgtg

SEQ ID NO: 128349 - DNA, 22 bp, synthetic construct
  misc_feature 1..22: note = chemically synthesized
  source 1..22: mol_type = other DNA
tccactaaattattgtgataac

SEQ ID NO: 128350 - DNA, 22 bp, synthetic construct
  misc_feature 1..22: note = chemically synthesized
  source 1..22: mol_type = other DNA
ccactaaattattgtgataaca

SEQ ID NO: 128351 - DNA, 22 bp, synthetic construct
  misc_feature 1..22: note = chemically synthesized
  source 1..22: mol_type = other DNA
cactaaattattgtgataacaa

SEQ ID NO: 128352 - DNA, 22 bp, synthetic construct
  misc_feature 1..22: note = chemically synthesized
  source 1..22: mol_type = other DNA
aattattgtgataacaatacct

SEQ ID NO: 128353 - DNA, 22 bp, synthetic construct
  misc_feature 1..22: note = chemically synthesized
  source 1..22: mol_type = other DNA
ttgtgataacaataccttaggc

SEQ ID NO: 128354 - DNA, 22 bp, synthetic construct
  misc_feature 1..22: note = chemically synthesized
  source 1..22: mol_type = other DNA
tgataacaataccttaggcatc

SEQ ID NO: 128355 - DNA, 22 bp, synthetic construct
  misc_feature 1..22: note = chemically synthesized
  source 1..22: mol_type = other DNA
aggcatctattggtatgtctat

SEQ ID NO: 128356 - DNA, 22 bp, synthetic construct
  misc_feature 1..22: note = chemically synthesized
  source 1..22: mol_type = other DNA
ggcatctattggtatgtctata

SEQ ID NO: 128357 - DNA, 22 bp, synthetic construct
  misc_feature 1..22: note = chemically synthesized
  source 1..22: mol_type = other DNA
ttggtatgtctataatgtaact

SEQ ID NO: 128358 - DNA, 22 bp, synthetic construct
  misc_feature 1..22: note = chemically synthesized
  source 1..22: mol_type = other DNA
gtatgtctataatgtaactaac

SEQ ID NO: 128359 - DNA, 22 bp, synthetic construct
  misc_feature 1..22: note = chemically synthesized
  source 1..22: mol_type = other DNA
taatgtaactaacatatgttta

SEQ ID NO: 128360 - DNA, 22 bp, synthetic construct
  misc_feature 1..22: note = chemically synthesized
  source 1..22: mol_type = other DNA
acatatgtttatttcatggtat

SEQ ID NO: 128361 - DNA, 22 bp, synthetic construct
  misc_feature 1..22: note = chemically synthesized
  source 1..22: mol_type = other DNA
atttcatggtataaagttagca

SEQ ID NO: 128362 - DNA, 22 bp, synthetic construct
  misc_feature 1..22: note = chemically synthesized
  source 1..22: mol_type = other DNA
tttcatggtataaagttagcag

SEQ ID NO: 128363 - DNA, 22 bp, synthetic construct
  misc_feature 1..22: note = chemically synthesized
  source 1..22: mol_type = other DNA
catggtataaagttagcagata

SEQ ID NO: 128364 - DNA, 22 bp, synthetic construct
  misc_feature 1..22: note = chemically synthesized
  source 1..22: mol_type = other DNA
atggtataaagttagcagatag

SEQ ID NO: 128365 - DNA, 22 bp, synthetic construct
  misc_feature 1..22: note = chemically synthesized
  source 1..22: mol_type = other DNA
gcagataggaacagaatcataa

SEQ ID NO: 128366 - DNA, 22 bp, synthetic construct
  misc_feature 1..22: note = chemically synthesized
  source 1..22: mol_type = other DNA
ttagttggttcgagtgaaatgg

SEQ ID NO: 128367 - DNA, 22 bp, synthetic construct
  misc_feature 1..22: note = chemically synthesized
  source 1..22: mol_type = other DNA
gttggttcgagtgaaatggaat

SEQ ID NO: 128368 - DNA, 22 bp, synthetic construct
  misc_feature 1..22: note = chemically synthesized
  source 1..22: mol_type = other DNA
gttcgagtgaaatggaatagag

SEQ ID NO: 128369 - DNA, 22 bp, synthetic construct
  misc_feature 1..22: note = chemically synthesized
  source 1..22: mol_type = other DNA
gagtgaaatggaatagagtttg

SEQ ID NO: 128370 - DNA, 22 bp, synthetic construct
  misc_feature 1..22: note = chemically synthesized
  source 1..22: mol_type = other DNA
ggtttactatgtcaaatctaat

SEQ ID NO: 128371 - DNA, 22 bp, synthetic construct
  misc_feature 1..22: note = chemically synthesized
  source 1..22: mol_type = other DNA
gtttactatgtcaaatctaatt

SEQ ID NO: 128372 - DNA, 22 bp, synthetic construct
  misc_feature 1..22: note = chemically synthesized
  source 1..22: mol_type = other DNA
actatgtcaaatctaatttcca

SEQ ID NO: 128373 - DNA, 22 bp, synthetic construct
  misc_feature 1..22: note = chemically synthesized
  source 1..22: mol_type = other DNA
ctatgtcaaatctaatttccaa

SEQ ID NO: 128374 - DNA, 22 bp, synthetic construct
  misc_feature 1..22: note = chemically synthesized
  source 1..22: mol_type = other DNA
tgtcaaatctaatttccaactc

SEQ ID NO: 128375 - DNA, 22 bp, synthetic construct
  misc_feature 1..22: note = chemically synthesized
  source 1..22: mol_type = other DNA
atttccaactcttatgaatttc

SEQ ID NO: 128376 - DNA, 22 bp, synthetic construct
  misc_feature 1..22: note = chemically synthesized
  source 1..22: mol_type = other DNA
ccaactcttatgaatttctctg

SEQ ID NO: 128377 - DNA, 22 bp, synthetic construct
  misc_feature 1..22: note = chemically synthesized
  source 1..22: mol_type = other DNA
caactcttatgaatttctctgc

SEQ ID NO: 128378 - DNA, 22 bp, synthetic construct
  misc_feature 1..22: note = chemically synthesized
  source 1..22: mol_type = other DNA
ttatgaatttctctgcaggtgt

SEQ ID NO: 128379 - DNA, 22 bp, synthetic construct
  misc_feature 1..22: note = chemically synthesized
  source 1..22: mol_type = other DNA
atgaatttctctgcaggtgtcc

SEQ ID NO: 128380 - DNA, 22 bp, synthetic construct
  misc_feature 1..22: note = chemically synthesized
  source 1..22: mol_type = other DNA
tgaatttctctgcaggtgtcca

SEQ ID NO: 128381 - DNA, 22 bp, synthetic construct
  misc_feature 1..22: note = chemically synthesized
  source 1..22: mol_type = other DNA
ctctgcaggtgtccatacaaac

SEQ ID NO: 128382 - DNA, 22 bp, synthetic construct
  misc_feature 1..22: note = chemically synthesized
  source 1..22: mol_type = other DNA
tctgcaggtgtccatacaaaca

SEQ ID NO: 128383 - DNA, 22 bp, synthetic construct
  misc_feature 1..22: note = chemically synthesized
  source 1..22: mol_type = other DNA
tgcaggtgtccatacaaacaat

SEQ ID NO: 128384 - DNA, 22 bp, synthetic construct
  misc_feature 1..22: note = chemically synthesized
  source 1..22: mol_type = other DNA
caggtgtccatacaaacaatgg

SEQ ID NO: 128385 - DNA, 22 bp, synthetic construct
  misc_feature 1..22: note = chemically synthesized
  source 1..22: mol_type = other DNA
taaatttggtcactgaagtcca

SEQ ID NO: 128386 - DNA, 22 bp, synthetic construct
  misc_feature 1..22: note = chemically synthesized
  source 1..22: mol_type = other DNA
ggtcactgaagtccaggaattt

SEQ ID NO: 128387 - DNA, 22 bp, synthetic construct
  misc_feature 1..22: note = chemically synthesized
  source 1..22: mol_type = other DNA
gtcactgaagtccaggaatttt

SEQ ID NO: 128388 - DNA, 22 bp, synthetic construct
  misc_feature 1..22: note = chemically synthesized
  source 1..22: mol_type = other DNA
aagtccaggaattttcctgcaa

SEQ ID NO: 128389 - DNA, 22 bp, synthetic construct
  misc_feature 1..22: note = chemically synthesized
  source 1..22: mol_type = other DNA
tcctgcaaaaaagaatataatc

SEQ ID NO: 128390 - DNA, 22 bp, synthetic construct
  misc_feature 1..22: note = chemically synthesized
  source 1..22: mol_type = other DNA
cctgcaaaaaagaatataatct

SEQ ID NO: 128391 - DNA, 22 bp, synthetic construct
  misc_feature 1..22: note = chemically synthesized
  source 1..22: mol_type = other DNA
ctgcaaaaaagaatataatctt

SEQ ID NO: 128392 - DNA, 22 bp, synthetic construct
  misc_feature 1..22: note = chemically synthesized
  source 1..22: mol_type = other DNA
caaaaaagaatataatcttctt

SEQ ID NO: 128393 - DNA, 22 bp, synthetic construct
  misc_feature 1..22: note = chemically synthesized
  source 1..22: mol_type = other DNA
ctttgatcagtgacctaattac

SEQ ID NO: 128394 - DNA, 22 bp, synthetic construct
  misc_feature 1..22: note = chemically synthesized
  source 1..22: mol_type = other DNA
tttgatcagtgacctaattact

SEQ ID NO: 128395 - DNA, 22 bp, synthetic construct
  misc_feature 1..22: note = chemically synthesized
  source 1..22: mol_type = other DNA
tgatcagtgacctaattactta

SEQ ID NO: 128396 - DNA, 22 bp, synthetic construct
  misc_feature 1..22: note = chemically synthesized
  source 1..22: mol_type = other DNA
gatcagtgacctaattacttat

SEQ ID NO: 128397 - DNA, 22 bp, synthetic construct
  misc_feature 1..22: note = chemically synthesized
  source 1..22: mol_type = other DNA
atcagtgacctaattacttatc

SEQ ID NO: 128398 - DNA, 22 bp, synthetic construct
  misc_feature 1..22: note = chemically synthesized
  source 1..22: mol_type = other DNA
attacttatcatctcaacagtc

SEQ ID NO: 128399 - DNA, 22 bp, synthetic construct
  misc_feature 1..22: note = chemically synthesized
  source 1..22: mol_type = other DNA
cttatcatctcaacagtctagt

SEQ ID NO: 128400 - DNA, 22 bp, synthetic construct
  misc_feature 1..22: note = chemically synthesized
  source 1..22: mol_type = other DNA
atcatctcaacagtctagttgg

SEQ ID NO: 128401 - DNA, 22 bp, synthetic construct
  misc_feature 1..22: note = chemically synthesized
  source 1..22: mol_type = other DNA
tcatctcaacagtctagttggt

SEQ ID NO: 128402 - DNA, 22 bp, synthetic construct
  misc_feature 1..22: note = chemically synthesized
  source 1..22: mol_type = other DNA
aacagtctagttggttcctcct

SEQ ID NO: 128403 - DNA, 22 bp, synthetic construct
  misc_feature 1..22: note = chemically synthesized
  source 1..22: mol_type = other DNA
gttggttcctcctccctccatc

SEQ ID NO: 128404 - DNA, 22 bp, synthetic construct
  misc_feature 1..22: note = chemically synthesized
  source 1..22: mol_type = other DNA
gttcctcctccctccatcaaat

SEQ ID NO: 128405 - DNA, 22 bp, synthetic construct
  misc_feature 1..22: note = chemically synthesized
  source 1..22: mol_type = other DNA
ctcctccctccatcaaattata

SEQ ID NO: 128406 - DNA, 22 bp, synthetic construct
  misc_feature 1..22: note = chemically synthesized
  source 1..22: mol_type = other DNA
ctccctccatcaaattataatg

SEQ ID NO: 128407 - DNA, 22 bp, synthetic construct
  misc_feature 1..22: note = chemically synthesized
  source 1..22: mol_type = other DNA
cctccatcaaattataatgaat

SEQ ID NO: 128408 - DNA, 22 bp, synthetic construct
  misc_feature 1..22: note = chemically synthesized
  source 1..22: mol_type = other DNA
catcaaattataatgaatttgt

SEQ ID NO: 128409 - DNA, 22 bp, synthetic construct
  misc_feature 1..22: note = chemically synthesized
  source 1..22: mol_type = other DNA
taatgaatttgtctcaaaaacc

SEQ ID NO: 128410 - DNA, 22 bp, synthetic construct
  misc_feature 1..22: note = chemically synthesized
  source 1..22: mol_type = other DNA
gtctcaaaaaccataaactcat

SEQ ID NO: 128411 - DNA, 22 bp, synthetic construct
  misc_feature 1..22: note = chemically synthesized
  source 1..22: mol_type = other DNA
tctcaaaaaccataaactcata

SEQ ID NO: 128412 - DNA, 22 bp, synthetic construct
  misc_feature 1..22: note = chemically synthesized
  source 1..22: mol_type = other DNA
aaaaaccataaactcatattta

SEQ ID NO: 128413 - DNA, 22 bp, synthetic construct
  misc_feature 1..22: note = chemically synthesized
  source 1..22: mol_type = other DNA
atatttattccccaaggcagta

SEQ ID NO: 128414 - DNA, 22 bp, synthetic construct
  misc_feature 1..22: note = chemically synthesized
  source 1..22: mol_type = other DNA
attccccaaggcagtaccttct

SEQ ID NO: 128415 - DNA, 22 bp, synthetic construct
  misc_feature 1..22: note = chemically synthesized
  source 1..22: mol_type = other DNA
ttccccaaggcagtaccttctg

SEQ ID NO: 128416 - DNA, 22 bp, synthetic construct
  misc_feature 1..22: note = chemically synthesized
  source 1..22: mol_type = other DNA
cccaaggcagtaccttctgaca

SEQ ID NO: 128417 - DNA, 22 bp, synthetic construct
  misc_feature 1..22: note = chemically synthesized
  source 1..22: mol_type = other DNA
ctgacaaacttgtaacaaaaaa

SEQ ID NO: 128418 - DNA, 22 bp, synthetic construct
  misc_feature 1..22: note = chemically synthesized
  source 1..22: mol_type = other DNA
tgacaaacttgtaacaaaaaaa

SEQ ID NO: 128419 - DNA, 22 bp, synthetic construct
  misc_feature 1..22: note = chemically synthesized
  source 1..22: mol_type = other DNA
acaaacttgtaacaaaaaaatg

SEQ ID NO: 128420 - DNA, 22 bp, synthetic construct
  misc_feature 1..22: note = chemically synthesized
  source 1..22: mol_type = other DNA
gtaacaaaaaaatgtgagaaga

SEQ ID NO: 128421 - DNA, 22 bp, synthetic construct
  misc_feature 1..22: note = chemically synthesized
  source 1..22: mol_type = other DNA
taacaaaaaaatgtgagaagag

SEQ ID NO: 128422 - DNA, 22 bp, synthetic construct
  misc_feature 1..22: note = chemically synthesized
  source 1..22: mol_type = other DNA
cttctatcttgctctcattctt

SEQ ID NO: 128423 - DNA, 22 bp, synthetic construct
  misc_feature 1..22: note = chemically synthesized
  source 1..22: mol_type = other DNA
ctatcttgctctcattcttatt

SEQ ID NO: 128424 - DNA, 22 bp, synthetic construct
  misc_feature 1..22: note = chemically synthesized
  source 1..22: mol_type = other DNA
tatcttgctctcattcttattc

SEQ ID NO: 128425 - DNA, 22 bp, synthetic construct
  misc_feature 1..22: note = chemically synthesized
  source 1..22: mol_type = other DNA
tcttgctctcattcttattcta

SEQ ID NO: 128426 - DNA, 22 bp, synthetic construct
  misc_feature 1..22: note = chemically synthesized
  source 1..22: mol_type = other DNA
gctctcattcttattctactac

SEQ ID NO: 128427 - DNA, 22 bp, synthetic construct
  misc_feature 1..22: note = chemically synthesized
  source 1..22: mol_type = other DNA
ctctcattcttattctactacc

SEQ ID NO: 128428 - DNA, 22 bp, synthetic construct
  misc_feature 1..22: note = chemically synthesized
  source 1..22: mol_type = other DNA
tcattcttattctactacccta

SEQ ID NO: 128429 - DNA, 22 bp, synthetic construct
  misc_feature 1..22: note = chemically synthesized
  source 1..22: mol_type = other DNA
attcttattctactaccctagt

SEQ ID NO: 128430 - DNA, 22 bp, synthetic construct
  misc_feature 1..22: note = chemically synthesized
  source 1..22: mol_type = other DNA
ttattctactaccctagttgct

SEQ ID NO: 128431 - DNA, 22 bp, synthetic construct
  misc_feature 1..22: note = chemically synthesized
  source 1..22: mol_type = other DNA
attctactaccctagttgctag

SEQ ID NO: 128432 - DNA, 22 bp, synthetic construct
  misc_feature 1..22: note = chemically synthesized
  source 1..22: mol_type = other DNA
ttctactaccctagttgctagc

SEQ ID NO: 128433 - DNA, 22 bp, synthetic construct
  misc_feature 1..22: note = chemically synthesized
  source 1..22: mol_type = other DNA
tactaccctagttgctagctcc

SEQ ID NO: 128434 - DNA, 22 bp, synthetic construct
  misc_feature 1..22: note = chemically synthesized
  source 1..22: mol_type = other DNA
ctaccctagttgctagctccaa

SEQ ID NO: 128435 - DNA, 22 bp, synthetic construct
  misc_feature 1..22: note = chemically synthesized
  source 1..22: mol_type = other DNA
ccctagttgctagctccaatgt

SEQ ID NO: 128436 - DNA, 22 bp, synthetic construct
  misc_feature 1..22: note = chemically synthesized
  source 1..22: mol_type = other DNA
gttgctagctccaatgttgagg

SEQ ID NO: 128437 - DNA, 22 bp, synthetic construct
  misc_feature 1..22: note = chemically synthesized
  source 1..22: mol_type = other DNA
ctagctccaatgttgaggccat

SEQ ID NO: 128438 - DNA, 22 bp, synthetic construct
  misc_feature 1..22: note = chemically synthesized
  source 1..22: mol_type = other DNA
gctccaatgttgaggccatcct

SEQ ID NO: 128439 - DNA, 22 bp, synthetic construct
  misc_feature 1..22: note = chemically synthesized
  source 1..22: mol_type = other DNA
caatgttgaggccatcctcaga

SEQ ID NO: 128440 - DNA, 22 bp, synthetic construct
  misc_feature 1..22: note = chemically synthesized
  source 1..22: mol_type = other DNA
aggccatcctcagatatctacg

SEQ ID NO: 128441 - DNA, 22 bp, synthetic construct
  misc_feature 1..22: note = chemically synthesized
  source 1..22: mol_type = other DNA
agatatctacgctggctgacta

SEQ ID NO: 128442 - DNA, 22 bp, synthetic construct
  misc_feature 1..22: note = chemically synthesized
  source 1..22: mol_type = other DNA
cgctggctgactagtccaaatt

SEQ ID NO: 128443 - DNA, 22 bp, synthetic construct
  misc_feature 1..22: note = chemically synthesized
  source 1..22: mol_type = other DNA
gctgactagtccaaattagtgg

SEQ ID NO: 128444 - DNA, 22 bp, synthetic construct
  misc_feature 1..22: note = chemically synthesized
  source 1..22: mol_type = other DNA
actagtccaaattagtggaaga

SEQ ID NO: 128445 - DNA, 22 bp, synthetic construct
  misc_feature 1..22: note = chemically synthesized
  source 1..22: mol_type = other DNA
gtccaaattagtggaagagaca

SEQ ID NO: 128446 - DNA, 22 bp, synthetic construct
  misc_feature 1..22: note = chemically synthesized
  source 1..22: mol_type = other DNA
gtggaagagacagttccttcac

SEQ ID NO: 128447 - DNA, 22 bp, synthetic construct
  misc_feature 1..22: note = chemically synthesized
  source 1..22: mol_type = other DNA
cttcaccctccttttgctatga

SEQ ID NO: 128448 - DNA, 22 bp, synthetic construct
  misc_feature 1..22: note = chemically synthesized
  source 1..22: mol_type = other DNA
caccctccttttgctatgaaaa

SEQ ID NO: 128449 - DNA, 22 bp, synthetic construct
  misc_feature 1..22: note = chemically synthesized
  source 1..22: mol_type = other DNA
accctccttttgctatgaaaaa

SEQ ID NO: 128450 - DNA, 22 bp, synthetic construct
  misc_feature 1..22: note = chemically synthesized
  source 1..22: mol_type = other DNA
cttttgctatgaaaaaggtctg

SEQ ID NO: 128451 - DNA, 22 bp, synthetic construct
  misc_feature 1..22: note = chemically synthesized
  source 1..22: mol_type = other DNA
ttgctatgaaaaaggtctgaag

SEQ ID NO: 128452 - DNA, 22 bp, synthetic construct
  misc_feature 1..22: note = chemically synthesized
  source 1..22: mol_type = other DNA
tgctatgaaaaaggtctgaagg

SEQ ID NO: 128453 - DNA, 22 bp, synthetic construct
  misc_feature 1..22: note = chemically synthesized
  source 1..22: mol_type = other DNA
gctatgaaaaaggtctgaagga

SEQ ID NO: 128454 - DNA, 22 bp, synthetic construct
  misc_feature 1..22: note = chemically synthesized
  source 1..22: mol_type = other DNA
ctatgaaaaaggtctgaaggaa

SEQ ID NO: 128455 - DNA, 22 bp, synthetic construct
  misc_feature 1..22: note = chemically synthesized
  source 1..22: mol_type = other DNA
tgaaaaaggtctgaaggaacaa

SEQ ID NO: 128456 - DNA, 22 bp, synthetic construct
  misc_feature 1..22: note = chemically synthesized
  source 1..22: mol_type = other DNA
aaggaacaaaaaaaaataggtt

SEQ ID NO: 128457 - DNA, 22 bp, synthetic construct
  misc_feature 1..22: note = chemically synthesized
  source 1..22: mol_type = other DNA
ctgcatttttttgaagaatgat

SEQ ID NO: 128458 - DNA, 22 bp, synthetic construct
  misc_feature 1..22: note = chemically synthesized
  source 1..22: mol_type = other DNA
tgcatttttttgaagaatgatt

SEQ ID NO: 128459 - DNA, 22 bp, synthetic construct
  misc_feature 1..22: note = chemically synthesized
  source 1..22: mol_type = other DNA
catttttttgaagaatgattgc

SEQ ID NO: 128460 - DNA, 22 bp, synthetic construct
  misc_feature 1..22: note = chemically synthesized
  source 1..22: mol_type = other DNA
ttttgaagaatgattgctttct

SEQ ID NO: 128461 - DNA, 22 bp, synthetic construct
  misc_feature 1..22: note = chemically synthesized
  source 1..22: mol_type = other DNA
tttgaagaatgattgctttctg

SEQ ID NO: 128462 - DNA, 22 bp, synthetic construct
  misc_feature 1..22: note = chemically synthesized
  source 1..22: mol_type = other DNA
ttgaagaatgattgctttctgt

SEQ ID NO: 128463 - DNA, 22 bp, synthetic construct
  misc_feature 1..22: note = chemically synthesized
  source 1..22: mol_type = other DNA
tgaagaatgattgctttctgta

SEQ ID NO: 128464 - DNA, 22 bp, synthetic construct
  misc_feature 1..22: note = chemically synthesized
  source 1..22: mol_type = other DNA
gaagaatgattgctttctgtac

SEQ ID NO: 128465 - DNA, 22 bp, synthetic construct
  misc_feature 1..22: note = chemically synthesized
  source 1..22: mol_type = other DNA
aagaatgattgctttctgtaca

SEQ ID NO: 128466 - DNA, 22 bp, synthetic construct
  misc_feature 1..22: note = chemically synthesized
  source 1..22: mol_type = other DNA
ctttctgtacatacattctgat

SEQ ID NO: 128467 - DNA, 22 bp, synthetic construct
  misc_feature 1..22: note = chemically synthesized
  source 1..22: mol_type = other DNA
tctgtacatacattctgattcc

SEQ ID NO: 128468 - DNA, 22 bp, synthetic construct
  misc_feature 1..22: note = chemically synthesized
  source 1..22: mol_type = other DNA
ctgtacatacattctgattcca

SEQ ID NO: 128469 - DNA, 22 bp, synthetic construct
  misc_feature 1..22: note = chemically synthesized
  source 1..22: mol_type = other DNA
tgtacatacattctgattccat

SEQ ID NO: 128470 - DNA, 22 bp, synthetic construct
  misc_feature 1..22: note = chemically synthesized
  source 1..22: mol_type = other DNA
tacatacattctgattccatgt

SEQ ID NO: 128471 - DNA, 22 bp, synthetic construct
  misc_feature 1..22: note = chemically synthesized
  source 1..22: mol_type = other DNA
tgattccatgtaataagtgtaa

SEQ ID NO: 128472 - DNA, 22 bp, synthetic construct
  misc_feature 1..22: note = chemically synthesized
  source 1..22: mol_type = other DNA
attccatgtaataagtgtaaat

SEQ ID NO: 128473 - DNA, 22 bp, synthetic construct
  misc_feature 1..22: note = chemically synthesized
  source 1..22: mol_type = other DNA
catgtaataagtgtaaatttcc

SEQ ID NO: 128474 - DNA, 22 bp, synthetic construct
  misc_feature 1..22: note = chemically synthesized
  source 1..22: mol_type = other DNA
cccaaagaatacaacaatgtca

SEQ ID NO: 128475 - DNA, 22 bp, synthetic construct
  misc_feature 1..22: note = chemically synthesized
  source 1..22: mol_type = other DNA
ccaaagaatacaacaatgtcat

SEQ ID NO: 128476 - DNA, 22 bp, synthetic construct
  misc_feature 1..22: note = chemically synthesized
  source 1..22: mol_type = other DNA
tcatttgattaaaattgtctga

SEQ ID NO: 128477 - DNA, 22 bp, synthetic construct
  misc_feature 1..22: note = chemically synthesized
  source 1..22: mol_type = other DNA
atttgattaaaattgtctgatg

SEQ ID NO: 128478 - DNA, 22 bp, synthetic construct
  misc_feature 1..22: note = chemically synthesized
  source 1..22: mol_type = other DNA
gattaaaattgtctgatgagtt

SEQ ID NO: 128479 - DNA, 22 bp, synthetic construct
  misc_feature 1..22: note = chemically synthesized
  source 1..22: mol_type = other DNA
attaaaattgtctgatgagtta

SEQ ID NO: 128480 - DNA, 22 bp, synthetic construct
  misc_feature 1..22: note = chemically synthesized
  source 1..22: mol_type = other DNA
aaattgtctgatgagttaggaa

SEQ ID NO: 128481 - DNA, 22 bp, synthetic construct
  misc_feature 1..22: note = chemically synthesized
  source 1..22: mol_type = other DNA
tctgatgagttaggaagggacc

SEQ ID NO: 128482 - DNA, 22 bp, synthetic construct
  misc_feature 1..22: note = chemically synthesized
  source 1..22: mol_type = other DNA
atgagttaggaagggacccata

SEQ ID NO: 128483 - DNA, 22 bp, synthetic construct
  misc_feature 1..22: note = chemically synthesized
  source 1..22: mol_type = other DNA
ggaagggacccataactcaatt

SEQ ID NO: 128484 - DNA, 22 bp, synthetic construct
  misc_feature 1..22: note = chemically synthesized
  source 1..22: mol_type = other DNA
aatttaaaatatcctaaaaaga

SEQ ID NO: 128485 - DNA, 22 bp, synthetic construct
  misc_feature 1..22: note = chemically synthesized
  source 1..22: mol_type = other DNA
aaaatatcctaaaaagagggag

SEQ ID NO: 128486 - DNA, 22 bp, synthetic construct
  misc_feature 1..22: note = chemically synthesized
  source 1..22: mol_type = other DNA
aaatatcctaaaaagagggagg

SEQ ID NO: 128487 - DNA, 22 bp, synthetic construct
  misc_feature 1..22: note = chemically synthesized
  source 1..22: mol_type = other DNA
aaaagagggaggttatgtctta

SEQ ID NO: 128488 - DNA, 22 bp, synthetic construct
  misc_feature 1..22: note = chemically synthesized
  source 1..22: mol_type = other DNA
tgtcttaattatactttaatca

SEQ ID NO: 128489 - DNA, 22 bp, synthetic construct
  misc_feature 1..22: note = chemically synthesized
  source 1..22: mol_type = other DNA
aattatactttaatcagagcaa

SEQ ID NO: 128490 - DNA, 22 bp, synthetic construct
  misc_feature 1..22: note = chemically synthesized
  source 1..22: mol_type = other DNA
attatactttaatcagagcaaa

SEQ ID NO: 128491 - DNA, 22 bp, synthetic construct
  misc_feature 1..22: note = chemically synthesized
  source 1..22: mol_type = other DNA
tactttaatcagagcaaaaata

SEQ ID NO: 128492 - DNA, 22 bp, synthetic construct
  misc_feature 1..22: note = chemically synthesized
  source 1..22: mol_type = other DNA
taatcagagcaaaaataatact

SEQ ID NO: 128493 - DNA, 22 bp, synthetic construct
  misc_feature 1..22: note = chemically synthesized
  source 1..22: mol_type = other DNA
aatcagagcaaaaataatactt

SEQ ID NO: 128494 - DNA, 22 bp, synthetic construct
  misc_feature 1..22: note = chemically synthesized
  source 1..22: mol_type = other DNA
atcagagcaaaaataatacttc

SEQ ID NO: 128495 - DNA, 22 bp, synthetic construct
  misc_feature 1..22: note = chemically synthesized
  source 1..22: mol_type = other DNA
cagtgagacaagagaggggact

SEQ ID NO: 128496 - DNA, 22 bp, synthetic construct
  misc_feature 1..22: note = chemically synthesized
  source 1..22: mol_type = other DNA
agtgagacaagagaggggacta

SEQ ID NO: 128497 - DNA, 22 bp, synthetic construct
  misc_feature 1..22: note = chemically synthesized
  source 1..22: mol_type = other DNA
tatagaagatattgtttatgtc

SEQ ID NO: 128498 - DNA, 22 bp, synthetic construct
  misc_feature 1..22: note = chemically synthesized
  source 1..22: mol_type = other DNA
tttatgtctttggtgttttacc

SEQ ID NO: 128499 - DNA, 22 bp, synthetic construct
  misc_feature 1..22: note = chemically synthesized
  source 1..22: mol_type = other DNA
atgtctttggtgttttaccccg

SEQ ID NO: 128500 - DNA, 22 bp, synthetic construct
  misc_feature 1..22: note = chemically synthesized
  source 1..22: mol_type = other DNA
tgtctttggtgttttaccccga

SEQ ID NO: 128501 - DNA, 22 bp, synthetic construct
  misc_feature 1..22: note = chemically synthesized
  source 1..22: mol_type = other DNA
tggtgttttaccccgatcattt

SEQ ID NO: 128502 - DNA, 22 bp, synthetic construct
  misc_feature 1..22: note = chemically synthesized
  source 1..22: mol_type = other DNA
ggtgttttaccccgatcatttt

SEQ ID NO: 128503 - DNA, 22 bp, synthetic construct
  misc_feature 1..22: note = chemically synthesized
  source 1..22: mol_type = other DNA
gtgttttaccccgatcatttta

SEQ ID NO: 128504 - DNA, 22 bp, synthetic construct
  misc_feature 1..22: note = chemically synthesized
  source 1..22: mol_type = other DNA
taccccgatcattttacagaat

SEQ ID NO: 128505 - DNA, 22 bp, synthetic construct
  misc_feature 1..22: note = chemically synthesized
  source 1..22: mol_type = other DNA
accccgatcattttacagaatt

SEQ ID NO: 128506 - DNA, 22 bp, synthetic construct
  misc_feature 1..22: note = chemically synthesized
  source 1..22: mol_type = other DNA
ccccgatcattttacagaattg

SEQ ID NO: 128507 - DNA, 22 bp, synthetic construct
  misc_feature 1..22: note = chemically synthesized
  source 1..22: mol_type = other DNA
tacagaattgtgcacctgtgaa

SEQ ID NO: 128508 - DNA, 22 bp, synthetic construct
  misc_feature 1..22: note = chemically synthesized
  source 1..22: mol_type = other DNA
acagaattgtgcacctgtgaat

SEQ ID NO: 128509 - DNA, 22 bp, synthetic construct
  misc_feature 1..22: note = chemically synthesized
  source 1..22: mol_type = other DNA
cagaattgtgcacctgtgaatg

SEQ ID NO: 128510 - DNA, 22 bp, synthetic construct
  misc_feature 1..22: note = chemically synthesized
  source 1..22: mol_type = other DNA
tgcacctgtgaatgttggctgc

SEQ ID NO: 128511 - DNA, 22 bp, synthetic construct
  misc_feature 1..22: note = chemically synthesized
  source 1..22: mol_type = other DNA
tgaatgttggctgctcattgtt

SEQ ID NO: 128512 - DNA, 22 bp, synthetic construct
  misc_feature 1..22: note = chemically synthesized
  source 1..22: mol_type = other DNA
gctgctcattgttcatgtttct

SEQ ID NO: 128513 - DNA, 22 bp, synthetic construct
  misc_feature 1..22: note = chemically synthesized
  source 1..22: mol_type = other DNA
ctcattgttcatgtttctgctt

SEQ ID NO: 128514 - DNA, 22 bp, synthetic construct
  misc_feature 1..22: note = chemically synthesized
  source 1..22: mol_type = other DNA
attgttcatgtttctgctttct

SEQ ID NO: 128515 - DNA, 22 bp, synthetic construct
  misc_feature 1..22: note = chemically synthesized
  source 1..22: mol_type = other DNA
ttcatgtttctgctttctgcag

SEQ ID NO: 128516 - DNA, 22 bp, synthetic construct
  misc_feature 1..22: note = chemically synthesized
  source 1..22: mol_type = other DNA
atgtttctgctttctgcaggtt

SEQ ID NO: 128517 - DNA, 22 bp, synthetic construct
  misc_feature 1..22: note = chemically synthesized
  source 1..22: mol_type = other DNA
ctgctttctgcaggttgttgtt

SEQ ID NO: 128518 - DNA, 22 bp, synthetic construct
  misc_feature 1..22: note = chemically synthesized
  source 1..22: mol_type = other DNA
tgctttctgcaggttgttgttc

SEQ ID NO: 128519 - DNA, 22 bp, synthetic construct
  misc_feature 1..22: note = chemically synthesized
  source 1..22: mol_type = other DNA
ctttctgcaggttgttgttctc

SEQ ID NO: 128520 - DNA, 22 bp, synthetic construct
  misc_feature 1..22: note = chemically synthesized
  source 1..22: mol_type = other DNA
tctgcaggttgttgttctcaac

SEQ ID NO: 128521 - DNA, 22 bp, synthetic construct
  misc_feature 1..22: note = chemically synthesized
  source 1..22: mol_type = other DNA
ctgcaggttgttgttctcaact

SEQ ID NO: 128522 - DNA, 22 bp, synthetic construct
  misc_feature 1..22: note = chemically synthesized
  source 1..22: mol_type = other DNA
tgcaggttgttgttctcaactc

SEQ ID NO: 128523 - DNA, 22 bp, synthetic construct
  misc_feature 1..22: note = chemically synthesized
  source 1..22: mol_type = other DNA
caggttgttgttctcaactcag

SEQ ID NO: 128524 - DNA, 22 bp, synthetic construct
  misc_feature 1..22: note = chemically synthesized
  source 1..22: mol_type = other DNA
ttgttctcaactcagcaggaaa

SEQ ID NO: 128525 - DNA, 22 bp, synthetic construct
  misc_feature 1..22: note = chemically synthesized
  source 1..22: mol_type = other DNA
ttctcaactcagcaggaaatgt

SEQ ID NO: 128526 - DNA, 22 bp, synthetic construct
  misc_feature 1..22: note = chemically synthesized
  source 1..22: mol_type = other DNA
tcaactcagcaggaaatgtctt

SEQ ID NO: 128527 - DNA, 22 bp, synthetic construct
  misc_feature 1..22: note = chemically synthesized
  source 1..22: mol_type = other DNA
aactcagcaggaaatgtcttat

SEQ ID NO: 128528 - DNA, 22 bp, synthetic construct
  misc_feature 1..22: note = chemically synthesized
  source 1..22: mol_type = other DNA
agcaggaaatgtcttatgaaga

SEQ ID NO: 128529 - DNA, 22 bp, synthetic construct
  misc_feature 1..22: note = chemically synthesized
  source 1..22: mol_type = other DNA
atgaagaaaatggcccctgctc

SEQ ID NO: 128530 - DNA, 22 bp, synthetic construct
  misc_feature 1..22: note = chemically synthesized
  source 1..22: mol_type = other DNA
tgaagaaaatggcccctgctcc

SEQ ID NO: 128531 - DNA, 22 bp, synthetic construct
  misc_feature 1..22: note = chemically synthesized
  source 1..22: mol_type = other DNA
ctccttaggtagcaggccatag

SEQ ID NO: 128532 - DNA, 22 bp, synthetic construct
  misc_feature 1..22: note = chemically synthesized
  source 1..22: mol_type = other DNA
cttaggtagcaggccataggca

SEQ ID NO: 128533 - DNA, 22 bp, synthetic construct
  misc_feature 1..22: note = chemically synthesized
  source 1..22: mol_type = other DNA
aggtagcaggccataggcaaat

SEQ ID NO: 128534 - DNA, 22 bp, synthetic construct
  misc_feature 1..22: note = chemically synthesized
  source 1..22: mol_type = other DNA
ggtagcaggccataggcaaata

SEQ ID NO: 128535 - DNA, 22 bp, synthetic construct
  misc_feature 1..22: note = chemically synthesized
  source 1..22: mol_type = other DNA
accctcttgccttctgaagcta

SEQ ID NO: 128536 - DNA, 22 bp, synthetic construct
  misc_feature 1..22: note = chemically synthesized
  source 1..22: mol_type = other DNA
ttgccttctgaagctaagctcc

SEQ ID NO: 128537 - DNA, 22 bp, synthetic construct
  misc_feature 1..22: note = chemically synthesized
  source 1..22: mol_type = other DNA
gccttctgaagctaagctccag

SEQ ID NO: 128538 - DNA, 22 bp, synthetic construct
  misc_feature 1..22: note = chemically synthesized
  source 1..22: mol_type = other DNA
ccttctgaagctaagctccagc

SEQ ID NO: 128539 - DNA, 22 bp, synthetic construct
  misc_feature 1..22: note = chemically synthesized
  source 1..22: mol_type = other DNA
ctgaagctaagctccagcttca

SEQ ID NO: 128540 - DNA, 22 bp, synthetic construct
  misc_feature 1..22: note = chemically synthesized
  source 1..22: mol_type = other DNA
tgaagctaagctccagcttcag

SEQ ID NO: 128541 - DNA, 22 bp, synthetic construct
  misc_feature 1..22: note = chemically synthesized
  source 1..22: mol_type = other DNA
aagctaagctccagcttcagta

SEQ ID NO: 128542 - DNA, 22 bp, synthetic construct
  misc_feature 1..22: note = chemically synthesized
  source 1..22: mol_type = other DNA
agctccagcttcagtatgcact

SEQ ID NO: 128543 - DNA, 22 bp, synthetic construct
  misc_feature 1..22: note = chemically synthesized
  source 1..22: mol_type = other DNA
cagcttcagtatgcacttgctt

SEQ ID NO: 128544 - DNA, 22 bp, synthetic construct
  misc_feature 1..22: note = chemically synthesized
  source 1..22: mol_type = other DNA
cagtatgcacttgcttacctcc

SEQ ID NO: 128545 - DNA, 22 bp, synthetic construct
  misc_feature 1..22: note = chemically synthesized
  source 1..22: mol_type = other DNA
agtatgcacttgcttacctcct

SEQ ID NO: 128546 - DNA, 22 bp, synthetic construct
  misc_feature 1..22: note = chemically synthesized
  source 1..22: mol_type = other DNA
gcttacctccttcccctgtcca

SEQ ID NO: 128547 - DNA, 22 bp, synthetic construct
  misc_feature 1..22: note = chemically synthesized
  source 1..22: mol_type = other DNA
cttacctccttcccctgtccac

SEQ ID NO: 128548 - DNA, 22 bp, synthetic construct
  misc_feature 1..22: note = chemically synthesized
  source 1..22: mol_type = other DNA
acctccttcccctgtccacact

SEQ ID NO: 128549 - DNA, 22 bp, synthetic construct
  misc_feature 1..22: note = chemically synthesized
  source 1..22: mol_type = other DNA
cctccttcccctgtccacactg

SEQ ID NO: 128550 - DNA, 22 bp, synthetic construct
  misc_feature 1..22: note = chemically synthesized
  source 1..22: mol_type = other DNA
cttcccctgtccacactgcttt

SEQ ID NO: 128551 - DNA, 22 bp, synthetic construct
  misc_feature 1..22: note = chemically synthesized
  source 1..22: mol_type = other DNA
cccctgtccacactgcttttac

SEQ ID NO: 128552 - DNA, 22 bp, synthetic construct
  misc_feature 1..22: note = chemically synthesized
  source 1..22: mol_type = other DNA
ccctgtccacactgcttttact

SEQ ID NO: 128553 - DNA, 22 bp, synthetic construct
  misc_feature 1..22: note = chemically synthesized
  source 1..22: mol_type = other DNA
tccacactgcttttacttgctc

SEQ ID NO: 128554 - DNA, 22 bp, synthetic construct
  misc_feature 1..22: note = chemically synthesized
  source 1..22: mol_type = other DNA
cttttacttgctccctgtctcc

SEQ ID NO: 128555 - DNA, 22 bp, synthetic construct
  misc_feature 1..22: note = chemically synthesized
  source 1..22: mol_type = other DNA
ttacttgctccctgtctcctga

SEQ ID NO: 128556 - DNA, 22 bp, synthetic construct
  misc_feature 1..22: note = chemically synthesized
  source 1..22: mol_type = other DNA
tacttgctccctgtctcctgag

SEQ ID NO: 128557 - DNA, 22 bp, synthetic construct
  misc_feature 1..22: note = chemically synthesized
  source 1..22: mol_type = other DNA
acttgctccctgtctcctgaga

SEQ ID NO: 128558 - DNA, 22 bp, synthetic construct
  misc_feature 1..22: note = chemically synthesized
  source 1..22: mol_type = other DNA
cttgctccctgtctcctgagag

SEQ ID NO: 128559 - DNA, 22 bp, synthetic construct
  misc_feature 1..22: note = chemically synthesized
  source 1..22: mol_type = other DNA
gctccctgtctcctgagagcat

SEQ ID NO: 128560 - DNA, 22 bp, synthetic construct
  misc_feature 1..22: note = chemically synthesized
  source 1..22: mol_type = other DNA
ctccctgtctcctgagagcatt

SEQ ID NO: 128561 - DNA, 22 bp, synthetic construct
  misc_feature 1..22: note = chemically synthesized
  source 1..22: mol_type = other DNA
cctgtctcctgagagcattcat

SEQ ID NO: 128562 - DNA, 22 bp, synthetic construct
  misc_feature 1..22: note = chemically synthesized
  source 1..22: mol_type = other DNA
tctcctgagagcattcattaat

SEQ ID NO: 128563 - DNA, 22 bp, synthetic construct
  misc_feature 1..22: note = chemically synthesized
  source 1..22: mol_type = other DNA
ctgagagcattcattaataaat

SEQ ID NO: 128564 - DNA, 22 bp, synthetic construct
  misc_feature 1..22: note = chemically synthesized
  source 1..22: mol_type = other DNA
agagcattcattaataaattgc

SEQ ID NO: 128565 - DNA, 22 bp, synthetic construct
  misc_feature 1..22: note = chemically synthesized
  source 1..22: mol_type = other DNA
attaataaattgcacacatttg

SEQ ID NO: 128566 - DNA, 22 bp, synthetic construct
  misc_feature 1..22: note = chemically synthesized
  source 1..22: mol_type = other DNA
ataaattgcacacatttgaatc

SEQ ID NO: 128567 - DNA, 22 bp, synthetic construct
  misc_feature 1..22: note = chemically synthesized
  source 1..22: mol_type = other DNA
cacacatttgaatccctatctc

SEQ ID NO: 128568 - DNA, 22 bp, synthetic construct
  misc_feature 1..22: note = chemically synthesized
  source 1..22: mol_type = other DNA
gaatccctatctcaggtattgc

SEQ ID NO: 128569 - DNA, 22 bp, synthetic construct
  misc_feature 1..22: note = chemically synthesized
  source 1..22: mol_type = other DNA
aatccctatctcaggtattgct

SEQ ID NO: 128570 - DNA, 22 bp, synthetic construct
  misc_feature 1..22: note = chemically synthesized
  source 1..22: mol_type = other DNA
tctcaggtattgctcatagaga

SEQ ID NO: 128571 - DNA, 22 bp, synthetic construct
  misc_feature 1..22: note = chemically synthesized
  source 1..22: mol_type = other DNA
aggtattgctcatagagagtcc

SEQ ID NO: 128572 - DNA, 22 bp, synthetic construct
  misc_feature 1..22: note = chemically synthesized
  source 1..22: mol_type = other DNA
ctcatagagagtccaacttaag

SEQ ID NO: 128573 - DNA, 22 bp, synthetic construct
  misc_feature 1..22: note = chemically synthesized
  source 1..22: mol_type = other DNA
atagagagtccaacttaagaaa

SEQ ID NO: 128574 - DNA, 22 bp, synthetic construct
  misc_feature 1..22: note = chemically synthesized
  source 1..22: mol_type = other DNA
aagaaaaactgcaatccttatt

SEQ ID NO: 128575 - DNA, 22 bp, synthetic construct
  misc_feature 1..22: note = chemically synthesized
  source 1..22: mol_type = other DNA
agaaaaactgcaatccttattt

SEQ ID NO: 128576 - DNA, 22 bp, synthetic construct
  misc_feature 1..22: note = chemically synthesized
  source 1..22: mol_type = other DNA
caatccttatttatattctgtt

SEQ ID NO: 128577 - DNA, 22 bp, synthetic construct
  misc_feature 1..22: note = chemically synthesized
  source 1..22: mol_type = other DNA
atttatattctgtttcattaag

SEQ ID NO: 128578 - DNA, 22 bp, synthetic construct
  misc_feature 1..22: note = chemically synthesized
  source 1..22: mol_type = other DNA
tttatattctgtttcattaaga

SEQ ID NO: 128579 - DNA, 22 bp, synthetic construct
  misc_feature 1..22: note = chemically synthesized
  source 1..22: mol_type = other DNA
atattctgtttcattaagagat

SEQ ID NO: 128580 - DNA, 22 bp, synthetic construct
  misc_feature 1..22: note = chemically synthesized
  source 1..22: mol_type = other DNA
tattctgtttcattaagagatg

SEQ ID NO: 128581 - DNA, 22 bp, synthetic construct
  misc_feature 1..22: note = chemically synthesized
  source 1..22: mol_type = other DNA
tgtttcattaagagatgtaatt

SEQ ID NO: 128582 - DNA, 22 bp, synthetic construct
  misc_feature 1..22: note = chemically synthesized
  source 1..22: mol_type = other DNA
tttcattaagagatgtaattgt

SEQ ID NO: 128583 - DNA, 22 bp, synthetic construct
  misc_feature 1..22: note = chemically synthesized
  source 1..22: mol_type = other DNA
cattaagagatgtaattgtgaa

SEQ ID NO: 128584 - DNA, 22 bp, synthetic construct
  misc_feature 1..22: note = chemically synthesized
  source 1..22: mol_type = other DNA
attaagagatgtaattgtgaaa

SEQ ID NO: 128585 - DNA, 22 bp, synthetic construct
  misc_feature 1..22: note = chemically synthesized
  source 1..22: mol_type = other DNA
agagatgtaattgtgaaagaac

SEQ ID NO: 128586 - DNA, 22 bp, synthetic construct
  misc_feature 1..22: note = chemically synthesized
  source 1..22: mol_type = other DNA
tgaaagaactgaacatataaaa

SEQ ID NO: 128587 - DNA, 22 bp, synthetic construct
  misc_feature 1..22: note = chemically synthesized
  source 1..22: mol_type = other DNA
aacatataaaaaaatcagcttt

SEQ ID NO: 128588 - DNA, 22 bp, synthetic construct
  misc_feature 1..22: note = chemically synthesized
  source 1..22: mol_type = other DNA
tatcatgttttttatccttgtc

SEQ ID NO: 128589 - DNA, 22 bp, synthetic construct
  misc_feature 1..22: note = chemically synthesized
  source 1..22: mol_type = other DNA
atcatgttttttatccttgtca

SEQ ID NO: 128590 - DNA, 22 bp, synthetic construct
  misc_feature 1..22: note = chemically synthesized
  source 1..22: mol_type = other DNA
tcatgttttttatccttgtcac

SEQ ID NO: 128591 - DNA, 22 bp, synthetic construct
  misc_feature 1..22: note = chemically synthesized
  source 1..22: mol_type = other DNA
tttatccttgtcacgccatgtc

SEQ ID NO: 128592 - DNA, 22 bp, synthetic construct
  misc_feature 1..22: note = chemically synthesized
  source 1..22: mol_type = other DNA
ttatccttgtcacgccatgtca

SEQ ID NO: 128593 - DNA, 22 bp, synthetic construct
  misc_feature 1..22: note = chemically synthesized
  source 1..22: mol_type = other DNA
tatccttgtcacgccatgtcac

SEQ ID NO: 128594 - DNA, 22 bp, synthetic construct
  misc_feature 1..22: note = chemically synthesized
  source 1..22: mol_type = other DNA
atccttgtcacgccatgtcacc

SEQ ID NO: 128595 - DNA, 22 bp, synthetic construct
  misc_feature 1..22: note = chemically synthesized
  source 1..22: mol_type = other DNA
tccttgtcacgccatgtcacct

SEQ ID NO: 128596 - DNA, 22 bp, synthetic construct
  misc_feature 1..22: note = chemically synthesized
  source 1..22: mol_type = other DNA
gtcacgccatgtcacctgagca

SEQ ID NO: 128597 - DNA, 22 bp, synthetic construct
  misc_feature 1..22: note = chemically synthesized
  source 1..22: mol_type = other DNA
tcacgccatgtcacctgagcaa

SEQ ID NO: 128598 - DNA, 22 bp, synthetic construct
  misc_feature 1..22: note = chemically synthesized
  source 1..22: mol_type = other DNA
agcaacacagtctgaatactaa

SEQ ID NO: 128599 - DNA, 22 bp, synthetic construct
  misc_feature 1..22: note = chemically synthesized
  source 1..22: mol_type = other DNA
aatactaaattgtgagtgtgag

SEQ ID NO: 128600 - DNA, 22 bp, synthetic construct
  misc_feature 1..22: note = chemically synthesized
  source 1..22: mol_type = other DNA
aattgtgagtgtgagtgcatat

SEQ ID NO: 128601 - DNA, 22 bp, synthetic construct
  misc_feature 1..22: note = chemically synthesized
  source 1..22: mol_type = other DNA
tgagtgtgagtgcatatatgtg

SEQ ID NO: 128602 - DNA, 22 bp, synthetic construct
  misc_feature 1..22: note = chemically synthesized
  source 1..22: mol_type = other DNA
ttgtcctgttttcaatcattca

SEQ ID NO: 128603 - DNA, 22 bp, synthetic construct
  misc_feature 1..22: note = chemically synthesized
  source 1..22: mol_type = other DNA
tgtcctgttttcaatcattcat

SEQ ID NO: 128604 - DNA, 22 bp, synthetic construct
  misc_feature 1..22: note = chemically synthesized
  source 1..22: mol_type = other DNA
gtcctgttttcaatcattcata

SEQ ID NO: 128605 - DNA, 22 bp, synthetic construct
  misc_feature 1..22: note = chemically synthesized
  source 1..22: mol_type = other DNA
tcctgttttcaatcattcataa

SEQ ID NO: 128606 - DNA, 22 bp, synthetic construct
  misc_feature 1..22: note = chemically synthesized
  source 1..22: mol_type = other DNA
ttttcaatcattcataaaacca

SEQ ID NO: 128607 - DNA, 22 bp, synthetic construct
  misc_feature 1..22: note = chemically synthesized
  source 1..22: mol_type = other DNA
tcaatcattcataaaaccaaac

SEQ ID NO: 128608 - DNA, 22 bp, synthetic construct
  misc_feature 1..22: note = chemically synthesized
  source 1..22: mol_type = other DNA
caatcattcataaaaccaaaca

SEQ ID NO: 128609 - DNA, 22 bp, synthetic construct
  misc_feature 1..22: note = chemically synthesized
  source 1..22: mol_type = other DNA
aatcattcataaaaccaaacat

SEQ ID NO: 128610 - DNA, 22 bp, synthetic construct
  misc_feature 1..22: note = chemically synthesized
  source 1..22: mol_type = other DNA
ataaaaccaaacatgtgtccct

SEQ ID NO: 128611 - DNA, 22 bp, synthetic construct
  misc_feature 1..22: note = chemically synthesized
  source 1..22: mol_type = other DNA
aattatgctctactacatccac

SEQ ID NO: 128612 - DNA, 22 bp, synthetic construct
  misc_feature 1..22: note = chemically synthesized
  source 1..22: mol_type = other DNA
attatgctctactacatccaca

SEQ ID NO: 128613 - DNA, 22 bp, synthetic construct
  misc_feature 1..22: note = chemically synthesized
  source 1..22: mol_type = other DNA
tgctctactacatccacaactt

SEQ ID NO: 128614 - DNA, 22 bp, synthetic construct
  misc_feature 1..22: note = chemically synthesized
  source 1..22: mol_type = other DNA
tactacatccacaacttatttt

SEQ ID NO: 128615 - DNA, 22 bp, synthetic construct
  misc_feature 1..22: note = chemically synthesized
  source 1..22: mol_type = other DNA
ctacatccacaacttattttat

SEQ ID NO: 128616 - DNA, 22 bp, synthetic construct
  misc_feature 1..22: note = chemically synthesized
  source 1..22: mol_type = other DNA
catccacaacttattttattca

SEQ ID NO: 128617 - DNA, 22 bp, synthetic construct
  misc_feature 1..22: note = chemically synthesized
  source 1..22: mol_type = other DNA
attttattcataaaaatattgt

SEQ ID NO: 128618 - DNA, 22 bp, synthetic construct
  misc_feature 1..22: note = chemically synthesized
  source 1..22: mol_type = other DNA
ttttattcataaaaatattgtg

SEQ ID NO: 128619 - DNA, 22 bp, synthetic construct
  misc_feature 1..22: note = chemically synthesized
  source 1..22: mol_type = other DNA
tattcataaaaatattgtgggg

SEQ ID NO: 128620 - DNA, 22 bp, synthetic construct
  misc_feature 1..22: note = chemically synthesized
  source 1..22: mol_type = other DNA
attcataaaaatattgtggggt

SEQ ID NO: 128621 - DNA, 22 bp, synthetic construct
  misc_feature 1..22: note = chemically synthesized
  source 1..22: mol_type = other DNA
ttcataaaaatattgtggggta

SEQ ID NO: 128622 - DNA, 22 bp, synthetic construct
  misc_feature 1..22: note = chemically synthesized
  source 1..22: mol_type = other DNA
ataaaaatattgtggggtagat

SEQ ID NO: 128623 - DNA, 22 bp, synthetic construct
  misc_feature 1..22: note = chemically synthesized
  source 1..22: mol_type = other DNA
tggggtagatattatcactgtt

SEQ ID NO: 128624 - DNA, 22 bp, synthetic construct
  misc_feature 1..22: note = chemically synthesized
  source 1..22: mol_type = other DNA
tcactgttttcttgatggggaa

SEQ ID NO: 128625 - DNA, 22 bp, synthetic construct
  misc_feature 1..22: note = chemically synthesized
  source 1..22: mol_type = other DNA
ttttcttgatggggaaatttaa

SEQ ID NO: 128626 - DNA, 22 bp, synthetic construct
  misc_feature 1..22: note = chemically synthesized
  source 1..22: mol_type = other DNA
tcttgatggggaaatttaatat

SEQ ID NO: 128627 - DNA, 22 bp, synthetic construct
  misc_feature 1..22: note = chemically synthesized
  source 1..22: mol_type = other DNA
cttgatggggaaatttaatata

SEQ ID NO: 128628 - DNA, 22 bp, synthetic construct
  misc_feature 1..22: note = chemically synthesized
  source 1..22: mol_type = other DNA
ttgatggggaaatttaatataa

SEQ ID NO: 128629 - DNA, 22 bp, synthetic construct
  misc_feature 1..22: note = chemically synthesized
  source 1..22: mol_type = other DNA
gatggggaaatttaatataaaa

SEQ ID NO: 128630 - DNA, 22 bp, synthetic construct
  misc_feature 1..22: note = chemically synthesized
  source 1..22: mol_type = other DNA
atggggaaatttaatataaaaa

SEQ ID NO: 128631 - DNA, 22 bp, synthetic construct
  misc_feature 1..22: note = chemically synthesized
  source 1..22: mol_type = other DNA
aatataaaaaagttaaatattc

SEQ ID NO: 128632 - DNA, 22 bp, synthetic construct
  misc_feature 1..22: note = chemically synthesized
  source 1..22: mol_type = other DNA
atataaaaaagttaaatattcc

SEQ ID NO: 128633 - DNA, 22 bp, synthetic construct
  misc_feature 1..22: note = chemically synthesized
  source 1..22: mol_type = other DNA
aatattccctccaagggcataa

SEQ ID NO: 128634 - DNA, 22 bp, synthetic construct
  misc_feature 1..22: note = chemically synthesized
  source 1..22: mol_type = other DNA
cctccaagggcataacattttt

SEQ ID NO: 128635 - DNA, 22 bp, synthetic construct
  misc_feature 1..22: note = chemically synthesized
  source 1..22: mol_type = other DNA
caagggcataacatttttaatt

SEQ ID NO: 128636 - DNA, 22 bp, synthetic construct
  misc_feature 1..22: note = chemically synthesized
  source 1..22: mol_type = other DNA
ttaattggtatagtcatgattc

SEQ ID NO: 128637 - DNA, 22 bp, synthetic construct
  misc_feature 1..22: note = chemically synthesized
  source 1..22: mol_type = other DNA
taattggtatagtcatgattca

SEQ ID NO: 128638 - DNA, 22 bp, synthetic construct
  misc_feature 1..22: note = chemically synthesized
  source 1..22: mol_type = other DNA
aattggtatagtcatgattcaa

SEQ ID NO: 128639 - DNA, 22 bp, synthetic construct
  misc_feature 1..22: note = chemically synthesized
  source 1..22: mol_type = other DNA
attggtatagtcatgattcaaa

SEQ ID NO: 128640 - DNA, 22 bp, synthetic construct
  misc_feature 1..22: note = chemically synthesized
  source 1..22: mol_type = other DNA
gtatagtcatgattcaaattta

SEQ ID NO: 128641 - DNA, 22 bp, synthetic construct
  misc_feature 1..22: note = chemically synthesized
  source 1..22: mol_type = other DNA
aaatttatatcttctaactata

SEQ ID NO: 128642 - DNA, 22 bp, synthetic construct
  misc_feature 1..22: note = chemically synthesized
  source 1..22: mol_type = other DNA
atatcttctaactataaggcca

SEQ ID NO: 128643 - DNA, 22 bp, synthetic construct
  misc_feature 1..22: note = chemically synthesized
  source 1..22: mol_type = other DNA
tatcttctaactataaggccag

SEQ ID NO: 128644 - DNA, 22 bp, synthetic construct
  misc_feature 1..22: note = chemically synthesized
  source 1..22: mol_type = other DNA
ctaactataaggccagtgtgaa

SEQ ID NO: 128645 - DNA, 22 bp, synthetic construct
  misc_feature 1..22: note = chemically synthesized
  source 1..22: mol_type = other DNA
taactataaggccagtgtgaat

SEQ ID NO: 128646 - DNA, 22 bp, synthetic construct
  misc_feature 1..22: note = chemically synthesized
  source 1..22: mol_type = other DNA
actataaggccagtgtgaatgg

SEQ ID NO: 128647 - DNA, 22 bp, synthetic construct
  misc_feature 1..22: note = chemically synthesized
  source 1..22: mol_type = other DNA
taaggccagtgtgaatggtact

SEQ ID NO: 128648 - DNA, 22 bp, synthetic construct
  misc_feature 1..22: note = chemically synthesized
  source 1..22: mol_type = other DNA
cactacagtagactatccttag

SEQ ID NO: 128649 - DNA, 22 bp, synthetic construct
  misc_feature 1..22: note = chemically synthesized
  source 1..22: mol_type = other DNA
cagtagactatccttagtggct

SEQ ID NO: 128650 - DNA, 22 bp, synthetic construct
  misc_feature 1..22: note = chemically synthesized
  source 1..22: mol_type = other DNA
tccttagtggcttctacttttt

SEQ ID NO: 128651 - DNA, 22 bp, synthetic construct
  misc_feature 1..22: note = chemically synthesized
  source 1..22: mol_type = other DNA
agtggcttctactttttgcctt

SEQ ID NO: 128652 - DNA, 22 bp, synthetic construct
  misc_feature 1..22: note = chemically synthesized
  source 1..22: mol_type = other DNA
gtggcttctactttttgccttg

SEQ ID NO: 128653 - DNA, 22 bp, synthetic construct
  misc_feature 1..22: note = chemically synthesized
  source 1..22: mol_type = other DNA
ctactttttgccttgtattccg

SEQ ID NO: 128654 - DNA, 22 bp, synthetic construct
  misc_feature 1..22: note = chemically synthesized
  source 1..22: mol_type = other DNA
tactttttgccttgtattccgt

SEQ ID NO: 128655 - DNA, 22 bp, synthetic construct
  misc_feature 1..22: note = chemically synthesized
  source 1..22: mol_type = other DNA
ctttttgccttgtattccgtca

SEQ ID NO: 128656 - DNA, 22 bp, synthetic construct
  misc_feature 1..22: note = chemically synthesized
  source 1..22: mol_type = other DNA
tttgccttgtattccgtcatgc

SEQ ID NO: 128657 - DNA, 22 bp, synthetic construct
  misc_feature 1..22: note = chemically synthesized
  source 1..22: mol_type = other DNA
ttgccttgtattccgtcatgct

SEQ ID NO: 128658 - DNA, 22 bp, synthetic construct
  misc_feature 1..22: note = chemically synthesized
  source 1..22: mol_type = other DNA
tgccttgtattccgtcatgctt

SEQ ID NO: 128659 - DNA, 22 bp, synthetic construct
  misc_feature 1..22: note = chemically synthesized
  source 1..22: mol_type = other DNA
gccttgtattccgtcatgcttg

SEQ ID NO: 128660 - DNA, 22 bp, synthetic construct
  misc_feature 1..22: note = chemically synthesized
  source 1..22: mol_type = other DNA
ccttgtattccgtcatgcttgt

SEQ ID NO: 128661 - DNA, 22 bp, synthetic construct
  misc_feature 1..22: note = chemically synthesized
  source 1..22: mol_type = other DNA
gtattccgtcatgcttgtagta

SEQ ID NO: 128662 - DNA, 22 bp, synthetic construct
  misc_feature 1..22: note = chemically synthesized
  source 1..22: mol_type = other DNA
tattccgtcatgcttgtagtac

SEQ ID NO: 128663 - DNA, 22 bp, synthetic construct
  misc_feature 1..22: note = chemically synthesized
  source 1..22: mol_type = other DNA
cgtcatgcttgtagtacctact

SEQ ID NO: 128664 - DNA, 22 bp, synthetic construct
  misc_feature 1..22: note = chemically synthesized
  source 1..22: mol_type = other DNA
gtagtacctactttctttttct

SEQ ID NO: 128665 - DNA, 22 bp, synthetic construct
  misc_feature 1..22: note = chemically synthesized
  source 1..22: mol_type = other DNA
tagtacctactttctttttctg

SEQ ID NO: 128666 - DNA, 22 bp, synthetic construct
  misc_feature 1..22: note = chemically synthesized
  source 1..22: mol_type = other DNA
ctttctttttctgaaaatttct

SEQ ID NO: 128667 - DNA, 22 bp, synthetic construct
  misc_feature 1..22: note = chemically synthesized
  source 1..22: mol_type = other DNA
tctttttctgaaaatttctcct

SEQ ID NO: 128668 - DNA, 22 bp, synthetic construct
  misc_feature 1..22: note = chemically synthesized
  source 1..22: mol_type = other DNA
ctttttctgaaaatttctcctc

SEQ ID NO: 128669 - DNA, 22 bp, synthetic construct
  misc_feature 1..22: note = chemically synthesized
  source 1..22: mol_type = other DNA
tttttctgaaaatttctcctcc

SEQ ID NO: 128670 - DNA, 22 bp, synthetic construct
  misc_feature 1..22: note = chemically synthesized
  source 1..22: mol_type = other DNA
tttctgaaaatttctcctcctt

SEQ ID NO: 128671 - DNA, 22 bp, synthetic construct
  misc_feature 1..22: note = chemically synthesized
  source 1..22: mol_type = other DNA
ttctgaaaatttctcctccttc

SEQ ID NO: 128672 - DNA, 22 bp, synthetic construct
  misc_feature 1..22: note = chemically synthesized
  source 1..22: mol_type = other DNA
tctgaaaatttctcctccttct

SEQ ID NO: 128673 - DNA, 22 bp, synthetic construct
  misc_feature 1..22: note = chemically synthesized
  source 1..22: mol_type = other DNA
ctgaaaatttctcctccttcta

SEQ ID NO: 128674 - DNA, 22 bp, synthetic construct
  misc_feature 1..22: note = chemically synthesized
  source 1..22: mol_type = other DNA
tgaaaatttctcctccttctac

SEQ ID NO: 128675 - DNA, 22 bp, synthetic construct
  misc_feature 1..22: note = chemically synthesized
  source 1..22: mol_type = other DNA
aaaatttctcctccttctactc

SEQ ID NO: 128676 - DNA, 22 bp, synthetic construct
  misc_feature 1..22: note = chemically synthesized
  source 1..22: mol_type = other DNA
ctcctccttctactccaaaaat

SEQ ID NO: 128677 - DNA, 22 bp, synthetic construct
  misc_feature 1..22: note = chemically synthesized
  source 1..22: mol_type = other DNA
tcctccttctactccaaaaata

SEQ ID NO: 128678 - DNA, 22 bp, synthetic construct
  misc_feature 1..22: note = chemically synthesized
  source 1..22: mol_type = other DNA
ctccttctactccaaaaatatt

SEQ ID NO: 128679 - DNA, 22 bp, synthetic construct
  misc_feature 1..22: note = chemically synthesized
  source 1..22: mol_type = other DNA
cttctactccaaaaatattgtt

SEQ ID NO: 128680 - DNA, 22 bp, synthetic construct
  misc_feature 1..22: note = chemically synthesized
  source 1..22: mol_type = other DNA
ctactccaaaaatattgttccc

SEQ ID NO: 128681 - DNA, 22 bp, synthetic construct
  misc_feature 1..22: note = chemically synthesized
  source 1..22: mol_type = other DNA
tactccaaaaatattgttccct

SEQ ID NO: 128682 - DNA, 22 bp, synthetic construct
  misc_feature 1..22: note = chemically synthesized
  source 1..22: mol_type = other DNA
ctccaaaaatattgttccctat

SEQ ID NO: 128683 - DNA, 22 bp, synthetic construct
  misc_feature 1..22: note = chemically synthesized
  source 1..22: mol_type = other DNA
caaaaatattgttccctatgaa

SEQ ID NO: 128684 - DNA, 22 bp, synthetic construct
  misc_feature 1..22: note = chemically synthesized
  source 1..22: mol_type = other DNA
ttccctatgaaaactgatattt

SEQ ID NO: 128685 - DNA, 22 bp, synthetic construct
  misc_feature 1..22: note = chemically synthesized
  source 1..22: mol_type = other DNA
cctatgaaaactgatattttgc

SEQ ID NO: 128686 - DNA, 22 bp, synthetic construct
  misc_feature 1..22: note = chemically synthesized
  source 1..22: mol_type = other DNA
tgaaaactgatattttgcattg

SEQ ID NO: 128687 - DNA, 22 bp, synthetic construct
  misc_feature 1..22: note = chemically synthesized
  source 1..22: mol_type = other DNA
atattttgcattgtatctccaa

SEQ ID NO: 128688 - DNA, 22 bp, synthetic construct
  misc_feature 1..22: note = chemically synthesized
  source 1..22: mol_type = other DNA
tgcattgtatctccaaactcct

SEQ ID NO: 128689 - DNA, 22 bp, synthetic construct
  misc_feature 1..22: note = chemically synthesized
  source 1..22: mol_type = other DNA
gcattgtatctccaaactccta

SEQ ID NO: 128690 - DNA, 22 bp, synthetic construct
  misc_feature 1..22: note = chemically synthesized
  source 1..22: mol_type = other DNA
cattgtatctccaaactcctaa

SEQ ID NO: 128691 - DNA, 22 bp, synthetic construct
  misc_feature 1..22: note = chemically synthesized
  source 1..22: mol_type = other DNA
tatctccaaactcctaaccgca

SEQ ID NO: 128692 - DNA, 22 bp, synthetic construct
  misc_feature 1..22: note = chemically synthesized
  source 1..22: mol_type = other DNA
caaactcctaaccgcagtagaa

SEQ ID NO: 128693 - DNA, 22 bp, synthetic construct
  misc_feature 1..22: note = chemically synthesized
  source 1..22: mol_type = other DNA
ctaaccgcagtagaagaacttt

SEQ ID NO: 128694 - DNA, 22 bp, synthetic construct
  misc_feature 1..22: note = chemically synthesized
  source 1..22: mol_type = other DNA
accgcagtagaagaactttttt

SEQ ID NO: 128695 - DNA, 22 bp, synthetic construct
  misc_feature 1..22: note = chemically synthesized
  source 1..22: mol_type = other DNA
ttttaaaaagaatttttcaata

SEQ ID NO: 128696 - DNA, 22 bp, synthetic construct
  misc_feature 1..22: note = chemically synthesized
  source 1..22: mol_type = other DNA
tttaaaaagaatttttcaatat

SEQ ID NO: 128697 - DNA, 22 bp, synthetic construct
  misc_feature 1..22: note = chemically synthesized
  source 1..22: mol_type = other DNA
ttaaaaagaatttttcaatatg

SEQ ID NO: 128698 - DNA, 22 bp, synthetic construct
  misc_feature 1..22: note = chemically synthesized
  source 1..22: mol_type = other DNA
taaaaagaatttttcaatatga

SEQ ID NO: 128699 - DNA, 22 bp, synthetic construct
  misc_feature 1..22: note = chemically synthesized
  source 1..22: mol_type = other DNA
aaaaagaatttttcaatatgac

SEQ ID NO: 128700 - DNA, 22 bp, synthetic construct
  misc_feature 1..22: note = chemically synthesized
  source 1..22: mol_type = other DNA
aaaagaatttttcaatatgaca

SEQ ID NO: 128701 - DNA, 22 bp, synthetic construct
  misc_feature 1..22: note = chemically synthesized
  source 1..22: mol_type = other DNA
ttcaatatgacattgcaaaaaa

SEQ ID NO: 128702 - DNA, 22 bp, synthetic construct
  misc_feature 1..22: note = chemically synthesized
  source 1..22: mol_type = other DNA
tcaatatgacattgcaaaaaaa

SEQ ID NO: 128703 - DNA, 22 bp, synthetic construct
  misc_feature 1..22: note = chemically synthesized
  source 1..22: mol_type = other DNA
caatatgacattgcaaaaaaaa

SEQ ID NO: 128704 - DNA, 22 bp, synthetic construct
  misc_feature 1..22: note = chemically synthesized
  source 1..22: mol_type = other DNA
aatatgacattgcaaaaaaaaa

SEQ ID NO: 128705 - DNA, 22 bp, synthetic construct
  misc_feature 1..22: note = chemically synthesized
  source 1..22: mol_type = other DNA
caaaaaaaaaaagagtaatgct

SEQ ID NO: 128706 - DNA, 22 bp, synthetic construct
  misc_feature 1..22: note = chemically synthesized
  source 1..22: mol_type = other DNA
ttgttgtagaattactaaaatg

SEQ ID NO: 128707 - DNA, 22 bp, synthetic construct
  misc_feature 1..22: note = chemically synthesized
  source 1..22: mol_type = other DNA
tgttgtagaattactaaaatgc

SEQ ID NO: 128708 - DNA, 22 bp, synthetic construct
  misc_feature 1..22: note = chemically synthesized
  source 1..22: mol_type = other DNA
gttgtagaattactaaaatgca

SEQ ID NO: 128709 - DNA, 22 bp, synthetic construct
  misc_feature 1..22: note = chemically synthesized
  source 1..22: mol_type = other DNA
ttgtagaattactaaaatgcaa

SEQ ID NO: 128710 - DNA, 22 bp, synthetic construct
  misc_feature 1..22: note = chemically synthesized
  source 1..22: mol_type = other DNA
tagaattactaaaatgcaatgc

SEQ ID NO: 128711 - DNA, 22 bp, synthetic construct
  misc_feature 1..22: note = chemically synthesized
  source 1..22: mol_type = other DNA
ctaaaatgcaatgcttagaatt

SEQ ID NO: 128712 - DNA, 22 bp, synthetic construct
  misc_feature 1..22: note = chemically synthesized
  source 1..22: mol_type = other DNA
aaatgcaatgcttagaattgtt

SEQ ID NO: 128713 - DNA, 22 bp, synthetic construct
  misc_feature 1..22: note = chemically synthesized
  source 1..22: mol_type = other DNA
agaattgttaatgacaatgttt

SEQ ID NO: 128714 - DNA, 22 bp, synthetic construct
  misc_feature 1..22: note = chemically synthesized
  source 1..22: mol_type = other DNA
gaattgttaatgacaatgtttt

SEQ ID NO: 128715 - DNA, 22 bp, synthetic construct
  misc_feature 1..22: note = chemically synthesized
  source 1..22: mol_type = other DNA
ttaatgacaatgtttttcatca

SEQ ID NO: 128716 - DNA, 22 bp, synthetic construct
  misc_feature 1..22: note = chemically synthesized
  source 1..22: mol_type = other DNA
atgacaatgtttttcatcaggc

SEQ ID NO: 128717 - DNA, 22 bp, synthetic construct
  misc_feature 1..22: note = chemically synthesized
  source 1..22: mol_type = other DNA
ttcatcaggcaagtgacttcaa

SEQ ID NO: 128718 - DNA, 22 bp, synthetic construct
  misc_feature 1..22: note = chemically synthesized
  source 1..22: mol_type = other DNA
tcatcaggcaagtgacttcaaa

SEQ ID NO: 128719 - DNA, 22 bp, synthetic construct
  misc_feature 1..22: note = chemically synthesized
  source 1..22: mol_type = other DNA
catcaggcaagtgacttcaaac

SEQ ID NO: 128720 - DNA, 22 bp, synthetic construct
  misc_feature 1..22: note = chemically synthesized
  source 1..22: mol_type = other DNA
atcaggcaagtgacttcaaact

SEQ ID NO: 128721 - DNA, 22 bp, synthetic construct
  misc_feature 1..22: note = chemically synthesized
  source 1..22: mol_type = other DNA
caaactataataaatatttaga

SEQ ID NO: 128722 - DNA, 22 bp, synthetic construct
  misc_feature 1..22: note = chemically synthesized
  source 1..22: mol_type = other DNA
aaactataataaatatttagag

SEQ ID NO: 128723 - DNA, 22 bp, synthetic construct
  misc_feature 1..22: note = chemically synthesized
  source 1..22: mol_type = other DNA
taataaatatttagagtaaatt

SEQ ID NO: 128724 - DNA, 22 bp, synthetic construct
  misc_feature 1..22: note = chemically synthesized
  source 1..22: mol_type = other DNA
agagtaaattatagataaagaa

SEQ ID NO: 128725 - DNA, 22 bp, synthetic construct
  misc_feature 1..22: note = chemically synthesized
  source 1..22: mol_type = other DNA
gagtaaattatagataaagaaa

SEQ ID NO: 128726 - DNA, 22 bp, synthetic construct
  misc_feature 1..22: note = chemically synthesized
  source 1..22: mol_type = other DNA
tagataaagaaatgataataaa

SEQ ID NO: 128727 - DNA, 22 bp, synthetic construct
  misc_feature 1..22: note = chemically synthesized
  source 1..22: mol_type = other DNA
caaatctctgattccatgtttt

SEQ ID NO: 128728 - DNA, 22 bp, synthetic construct
  misc_feature 1..22: note = chemically synthesized
  source 1..22: mol_type = other DNA
aaatctctgattccatgttttc

SEQ ID NO: 128729 - DNA, 22 bp, synthetic construct
  misc_feature 1..22: note = chemically synthesized
  source 1..22: mol_type = other DNA
tgattccatgttttcctgagac

SEQ ID NO: 128730 - DNA, 22 bp, synthetic construct
  misc_feature 1..22: note = chemically synthesized
  source 1..22: mol_type = other DNA
attccatgttttcctgagactc

SEQ ID NO: 128731 - DNA, 22 bp, synthetic construct
  misc_feature 1..22: note = chemically synthesized
  source 1..22: mol_type = other DNA
catgttttcctgagactcagtg

SEQ ID NO: 128732 - DNA, 22 bp, synthetic construct
  misc_feature 1..22: note = chemically synthesized
  source 1..22: mol_type = other DNA
tcctgagactcagtgacaagga

SEQ ID NO: 128733 - DNA, 22 bp, synthetic construct
  misc_feature 1..22: note = chemically synthesized
  source 1..22: mol_type = other DNA
cctgagactcagtgacaaggag

SEQ ID NO: 128734 - DNA, 22 bp, synthetic construct
  misc_feature 1..22: note = chemically synthesized
  source 1..22: mol_type = other DNA
ctgagactcagtgacaaggagg

SEQ ID NO: 128735 - DNA, 22 bp, synthetic construct
  misc_feature 1..22: note = chemically synthesized
  source 1..22: mol_type = other DNA
agactcagtgacaaggaggaca

SEQ ID NO: 128736 - DNA, 22 bp, synthetic construct
  misc_feature 1..22: note = chemically synthesized
  source 1..22: mol_type = other DNA
agtgacaaggaggacagtttga

SEQ ID NO: 128737 - DNA, 22 bp, synthetic construct
  misc_feature 1..22: note = chemically synthesized
  source 1..22: mol_type = other DNA
gaatcttttttttgattccaca

SEQ ID NO: 128738 - DNA, 22 bp, synthetic construct
  misc_feature 1..22: note = chemically synthesized
  source 1..22: mol_type = other DNA
aatcttttttttgattccacag

SEQ ID NO: 128739 - DNA, 22 bp, synthetic construct
  misc_feature 1..22: note = chemically synthesized
  source 1..22: mol_type = other DNA
ttttttgattccacagcctaat

SEQ ID NO: 128740 - DNA, 22 bp, synthetic construct
  misc_feature 1..22: note = chemically synthesized
  source 1..22: mol_type = other DNA
tttttgattccacagcctaata

SEQ ID NO: 128741 - DNA, 22 bp, synthetic construct
  misc_feature 1..22: note = chemically synthesized
  source 1..22: mol_type = other DNA
ttttgattccacagcctaataa

SEQ ID NO: 128742 - DNA, 22 bp, synthetic construct
  misc_feature 1..22: note = chemically synthesized
  source 1..22: mol_type = other DNA
tttgattccacagcctaataaa

SEQ ID NO: 128743 - DNA, 22 bp, synthetic construct
  misc_feature 1..22: note = chemically synthesized
  source 1..22: mol_type = other DNA
ttgattccacagcctaataaac

SEQ ID NO: 128744 - DNA, 22 bp, synthetic construct
  misc_feature 1..22: note = chemically synthesized
  source 1..22: mol_type = other DNA
tgattccacagcctaataaact

SEQ ID NO: 128745 - DNA, 22 bp, synthetic construct
  misc_feature 1..22: note = chemically synthesized
  source 1..22: mol_type = other DNA
gattccacagcctaataaactc

SEQ ID NO: 128746 - DNA, 22 bp, synthetic construct
  misc_feature 1..22: note = chemically synthesized
  source 1..22: mol_type = other DNA
attccacagcctaataaactcc

SEQ ID NO: 128747 - DNA, 22 bp, synthetic construct
  misc_feature 1..22: note = chemically synthesized
  source 1..22: mol_type = other DNA
cacagcctaataaactcctctt

SEQ ID NO: 128748 - DNA, 22 bp, synthetic construct
  misc_feature 1..22: note = chemically synthesized
  source 1..22: mol_type = other DNA
ataaactcctcttcttgtaatt

SEQ ID NO: 128749 - DNA, 22 bp, synthetic construct
  misc_feature 1..22: note = chemically synthesized
  source 1..22: mol_type = other DNA
ctcttcttgtaatttgttttgt

SEQ ID NO: 128750 - DNA, 22 bp, synthetic construct
  misc_feature 1..22: note = chemically synthesized
  source 1..22: mol_type = other DNA
ttcttgtaatttgttttgttca

SEQ ID NO: 128751 - DNA, 22 bp, synthetic construct
  misc_feature 1..22: note = chemically synthesized
  source 1..22: mol_type = other DNA
cttgtaatttgttttgttcagc

SEQ ID NO: 128752 - DNA, 22 bp, synthetic construct
  misc_feature 1..22: note = chemically synthesized
  source 1..22: mol_type = other DNA
ttgtaatttgttttgttcagcc

SEQ ID NO: 128753 - DNA, 22 bp, synthetic construct
  misc_feature 1..22: note = chemically synthesized
  source 1..22: mol_type = other DNA
gtaatttgttttgttcagccta

SEQ ID NO: 128754 - DNA, 22 bp, synthetic construct
  misc_feature 1..22: note = chemically synthesized
  source 1..22: mol_type = other DNA
taatttgttttgttcagcctag

SEQ ID NO: 128755 - DNA, 22 bp, synthetic construct
  misc_feature 1..22: note = chemically synthesized
  source 1..22: mol_type = other DNA
gttttgttcagcctagtttcag

SEQ ID NO: 128756 - DNA, 22 bp, synthetic construct
  misc_feature 1..22: note = chemically synthesized
  source 1..22: mol_type = other DNA
ttttgttcagcctagtttcagt

SEQ ID NO: 128757 - DNA, 22 bp, synthetic construct
  misc_feature 1..22: note = chemically synthesized
  source 1..22: mol_type = other DNA
tgttcagcctagtttcagttga

SEQ ID NO: 128758 - DNA, 22 bp, synthetic construct
  misc_feature 1..22: note = chemically synthesized
  source 1..22: mol_type = other DNA
gttcagcctagtttcagttgag

SEQ ID NO: 128759 - DNA, 22 bp, synthetic construct
  misc_feature 1..22: note = chemically synthesized
  source 1..22: mol_type = other DNA
ttcagcctagtttcagttgagt

SEQ ID NO: 128760 - DNA, 22 bp, synthetic construct
  misc_feature 1..22: note = chemically synthesized
  source 1..22: mol_type = other DNA
agcctagtttcagttgagtttc

SEQ ID NO: 128761 - DNA, 22 bp, synthetic construct
  misc_feature 1..22: note = chemically synthesized
  source 1..22: mol_type = other DNA
gtttcagttgagtttcacttat

SEQ ID NO: 128762 - DNA, 22 bp, synthetic construct
  misc_feature 1..22: note = chemically synthesized
  source 1..22: mol_type = other DNA
cagttgagtttcacttataacc

SEQ ID NO: 128763 - DNA, 22 bp, synthetic construct
  misc_feature 1..22: note = chemically synthesized
  source 1..22: mol_type = other DNA
agttgagtttcacttataacca

SEQ ID NO: 128764 - DNA, 22 bp, synthetic construct
  misc_feature 1..22: note = chemically synthesized
  source 1..22: mol_type = other DNA
agtttcacttataaccaaaggc

SEQ ID NO: 128765 - DNA, 22 bp, synthetic construct
  misc_feature 1..22: note = chemically synthesized
  source 1..22: mol_type = other DNA
cacttataaccaaaggctatta

SEQ ID NO: 128766 - DNA, 22 bp, synthetic construct
  misc_feature 1..22: note = chemically synthesized
  source 1..22: mol_type = other DNA
acttataaccaaaggctattaa

SEQ ID NO: 128767 - DNA, 22 bp, synthetic construct
  misc_feature 1..22: note = chemically synthesized
  source 1..22: mol_type = other DNA
ataaccaaaggctattaataat

SEQ ID NO: 128768 - DNA, 22 bp, synthetic construct
  misc_feature 1..22: note = chemically synthesized
  source 1..22: mol_type = other DNA
taaccaaaggctattaataatt

SEQ ID NO: 128769 - DNA, 22 bp, synthetic construct
  misc_feature 1..22: note = chemically synthesized
  source 1..22: mol_type = other DNA
ttaataattatatcatctcagt

SEQ ID NO: 128770 - DNA, 22 bp, synthetic construct
  misc_feature 1..22: note = chemically synthesized
  source 1..22: mol_type = other DNA
ataattatatcatctcagttat

SEQ ID NO: 128771 - DNA, 22 bp, synthetic construct
  misc_feature 1..22: note = chemically synthesized
  source 1..22: mol_type = other DNA
tatcatctcagttatagatatg

SEQ ID NO: 128772 - DNA, 22 bp, synthetic construct
  misc_feature 1..22: note = chemically synthesized
  source 1..22: mol_type = other DNA
agttatagatatgtgaatcttc

SEQ ID NO: 128773 - DNA, 22 bp, synthetic construct
  misc_feature 1..22: note = chemically synthesized
  source 1..22: mol_type = other DNA
tagatatgtgaatcttctctaa

SEQ ID NO: 128774 - DNA, 22 bp, synthetic construct
  misc_feature 1..22: note = chemically synthesized
  source 1..22: mol_type = other DNA
ctctaactaatatttaaaactg

SEQ ID NO: 128775 - DNA, 22 bp, synthetic construct
  misc_feature 1..22: note = chemically synthesized
  source 1..22: mol_type = other DNA
tctaactaatatttaaaactgg

SEQ ID NO: 128776 - DNA, 22 bp, synthetic construct
  misc_feature 1..22: note = chemically synthesized
  source 1..22: mol_type = other DNA
taactaatatttaaaactggaa

SEQ ID NO: 128777 - DNA, 22 bp, synthetic construct
  misc_feature 1..22: note = chemically synthesized
  source 1..22: mol_type = other DNA
actaatatttaaaactggaaaa

SEQ ID NO: 128778 - DNA, 22 bp, synthetic construct
  misc_feature 1..22: note = chemically synthesized
  source 1..22: mol_type = other DNA
atatttaaaactggaaaatact

SEQ ID NO: 128779 - DNA, 22 bp, synthetic construct
  misc_feature 1..22: note = chemically synthesized
  source 1..22: mol_type = other DNA
aaaactggaaaatactgttagg

SEQ ID NO: 128780 - DNA, 22 bp, synthetic construct
  misc_feature 1..22: note = chemically synthesized
  source 1..22: mol_type = other DNA
aaactggaaaatactgttaggt

SEQ ID NO: 128781 - DNA, 22 bp, synthetic construct
  misc_feature 1..22: note = chemically synthesized
  source 1..22: mol_type = other DNA
gaaaatactgttaggtagaaga

SEQ ID NO: 128782 - DNA, 22 bp, synthetic construct
  misc_feature 1..22: note = chemically synthesized
  source 1..22: mol_type = other DNA
ttaggtagaagagctgcctctt

SEQ ID NO: 128783 - DNA, 22 bp, synthetic construct
  misc_feature 1..22: note = chemically synthesized
  source 1..22: mol_type = other DNA
ggtagaagagctgcctcttttt

SEQ ID NO: 128784 - DNA, 22 bp, synthetic construct
  misc_feature 1..22: note = chemically synthesized
  source 1..22: mol_type = other DNA
cctctttttctaaaatacagga

SEQ ID NO: 128785 - DNA, 22 bp, synthetic construct
  misc_feature 1..22: note = chemically synthesized
  source 1..22: mol_type = other DNA
tttttctaaaatacaggaaatg

SEQ ID NO: 128786 - DNA, 22 bp, synthetic construct
  misc_feature 1..22: note = chemically synthesized
  source 1..22: mol_type = other DNA
tttctaaaatacaggaaatgga

SEQ ID NO: 128787 - DNA, 22 bp, synthetic construct
  misc_feature 1..22: note = chemically synthesized
  source 1..22: mol_type = other DNA
ttctaaaatacaggaaatggaa

SEQ ID NO: 128788 - DNA, 22 bp, synthetic construct
  misc_feature 1..22: note = chemically synthesized
  source 1..22: mol_type = other DNA
tctaaaatacaggaaatggaac

SEQ ID NO: 128789 - DNA, 22 bp, synthetic construct
  misc_feature 1..22: note = chemically synthesized
  source 1..22: mol_type = other DNA
ctaaaatacaggaaatggaacc

SEQ ID NO: 128790 - DNA, 22 bp, synthetic construct
  misc_feature 1..22: note = chemically synthesized
  source 1..22: mol_type = other DNA
taaaatacaggaaatggaacct

SEQ ID NO: 128791 - DNA, 22 bp, synthetic construct
  misc_feature 1..22: note = chemically synthesized
  source 1..22: mol_type = other DNA
aaatacaggaaatggaacctaa

SEQ ID NO: 128792 - DNA, 22 bp, synthetic construct
  misc_feature 1..22: note = chemically synthesized
  source 1..22: mol_type = other DNA
aaaatggcaggaaagttgacca

SEQ ID NO: 128793 - DNA, 22 bp, synthetic construct
  misc_feature 1..22: note = chemically synthesized
  source 1..22: mol_type = other DNA
accatttggtgaatgatttatg

SEQ ID NO: 128794 - DNA, 22 bp, synthetic construct
  misc_feature 1..22: note = chemically synthesized
  source 1..22: mol_type = other DNA
ggtgaatgatttatgaagttat

SEQ ID NO: 128795 - DNA, 22 bp, synthetic construct
  misc_feature 1..22: note = chemically synthesized
  source 1..22: mol_type = other DNA
gtgaatgatttatgaagttatt

SEQ ID NO: 128796 - DNA, 22 bp, synthetic construct
  misc_feature 1..22: note = chemically synthesized
  source 1..22: mol_type = other DNA
atgaagttatttcccttgttta

SEQ ID NO: 128797 - DNA, 22 bp, synthetic construct
  misc_feature 1..22: note = chemically synthesized
  source 1..22: mol_type = other DNA
tgaagttatttcccttgtttaa

SEQ ID NO: 128798 - DNA, 22 bp, synthetic construct
  misc_feature 1..22: note = chemically synthesized
  source 1..22: mol_type = other DNA
tttcccttgtttaagaagttca

SEQ ID NO: 128799 - DNA, 22 bp, synthetic construct
  misc_feature 1..22: note = chemically synthesized
  source 1..22: mol_type = other DNA
cccttgtttaagaagttcattt

SEQ ID NO: 128800 - DNA, 22 bp, synthetic construct
  misc_feature 1..22: note = chemically synthesized
  source 1..22: mol_type = other DNA
ccttgtttaagaagttcatttc

SEQ ID NO: 128801 - DNA, 22 bp, synthetic construct
  misc_feature 1..22: note = chemically synthesized
  source 1..22: mol_type = other DNA
gtttaagaagttcatttctgac

SEQ ID NO: 128802 - DNA, 22 bp, synthetic construct
  misc_feature 1..22: note = chemically synthesized
  source 1..22: mol_type = other DNA
tttaagaagttcatttctgact

SEQ ID NO: 128803 - DNA, 22 bp, synthetic construct
  misc_feature 1..22: note = chemically synthesized
  source 1..22: mol_type = other DNA
aagaagttcatttctgacttga

SEQ ID NO: 128804 - DNA, 22 bp, synthetic construct
  misc_feature 1..22: note = chemically synthesized
  source 1..22: mol_type = other DNA
agaagttcatttctgacttgaa

SEQ ID NO: 128805 - DNA, 22 bp, synthetic construct
  misc_feature 1..22: note = chemically synthesized
  source 1..22: mol_type = other DNA
atttctgacttgaaagtaagtg

SEQ ID NO: 128806 - DNA, 22 bp, synthetic construct
  misc_feature 1..22: note = chemically synthesized
  source 1..22: mol_type = other DNA
ctgacttgaaagtaagtgtgaa

SEQ ID NO: 128807 - DNA, 22 bp, synthetic construct
  misc_feature 1..22: note = chemically synthesized
  source 1..22: mol_type = other DNA
tgacttgaaagtaagtgtgaaa

SEQ ID NO: 128808 - DNA, 22 bp, synthetic construct
  misc_feature 1..22: note = chemically synthesized
  source 1..22: mol_type = other DNA
acttgaaagtaagtgtgaaact

SEQ ID NO: 128809 - DNA, 22 bp, synthetic construct
  misc_feature 1..22: note = chemically synthesized
  source 1..22: mol_type = other DNA
gaaagtaagtgtgaaactaaat

SEQ ID NO: 128810 - DNA, 22 bp, synthetic construct
  misc_feature 1..22: note = chemically synthesized
  source 1..22: mol_type = other DNA
aaagtaagtgtgaaactaaatt

SEQ ID NO: 128811 - DNA, 22 bp, synthetic construct
  misc_feature 1..22: note = chemically synthesized
  source 1..22: mol_type = other DNA
aattcactgagaagatgctgta

SEQ ID NO: 128812 - DNA, 22 bp, synthetic construct
  misc_feature 1..22: note = chemically synthesized
  source 1..22: mol_type = other DNA
actgagaagatgctgtaggatg

SEQ ID NO: 128813 - DNA, 22 bp, synthetic construct
  misc_feature 1..22: note = chemically synthesized
  source 1..22: mol_type = other DNA
agaagatgctgtaggatgaata

SEQ ID NO: 128814 - DNA, 22 bp, synthetic construct
  misc_feature 1..22: note = chemically synthesized
  source 1..22: mol_type = other DNA
taggatgaatacagacacagga

SEQ ID NO: 128815 - DNA, 22 bp, synthetic construct
  misc_feature 1..22: note = chemically synthesized
  source 1..22: mol_type = other DNA
aataattatctcaaacttagtt

SEQ ID NO: 128816 - DNA, 22 bp, synthetic construct
  misc_feature 1..22: note = chemically synthesized
  source 1..22: mol_type = other DNA
tctcaaacttagttatacagaa

SEQ ID NO: 128817 - DNA, 22 bp, synthetic construct
  misc_feature 1..22: note = chemically synthesized
  source 1..22: mol_type = other DNA
aaacttagttatacagaaggct

SEQ ID NO: 128818 - DNA, 22 bp, synthetic construct
  misc_feature 1..22: note = chemically synthesized
  source 1..22: mol_type = other DNA
agttatacagaaggctacatgg

SEQ ID NO: 128819 - DNA, 22 bp, synthetic construct
  misc_feature 1..22: note = chemically synthesized
  source 1..22: mol_type = other DNA
gttatacagaaggctacatggt

SEQ ID NO: 128820 - DNA, 22 bp, synthetic construct
  misc_feature 1..22: note = chemically synthesized
  source 1..22: mol_type = other DNA
tacagaaggctacatggtggaa

SEQ ID NO: 128821 - DNA, 22 bp, synthetic construct
  misc_feature 1..22: note = chemically synthesized
  source 1..22: mol_type = other DNA
catggtggaaatccactcagac

SEQ ID NO: 128822 - DNA, 22 bp, synthetic construct
  misc_feature 1..22: note = chemically synthesized
  source 1..22: mol_type = other DNA
agacatgtttttctattcaaaa

SEQ ID NO: 128823 - DNA, 22 bp, synthetic construct
  misc_feature 1..22: note = chemically synthesized
  source 1..22: mol_type = other DNA
ttctattcaaaacccattgtaa

SEQ ID NO: 128824 - DNA, 22 bp, synthetic construct
  misc_feature 1..22: note = chemically synthesized
  source 1..22: mol_type = other DNA
tctattcaaaacccattgtaac

SEQ ID NO: 128825 - DNA, 22 bp, synthetic construct
  misc_feature 1..22: note = chemically synthesized
  source 1..22: mol_type = other DNA
ctattcaaaacccattgtaaca

SEQ ID NO: 128826 - DNA, 22 bp, synthetic construct
  misc_feature 1..22: note = chemically synthesized
  source 1..22: mol_type = other DNA
tattcaaaacccattgtaacaa

SEQ ID NO: 128827 - DNA, 22 bp, synthetic construct
  misc_feature 1..22: note = chemically synthesized
  source 1..22: mol_type = other DNA
ttcaaaacccattgtaacaatc

SEQ ID NO: 128828 - DNA, 22 bp, synthetic construct
  misc_feature 1..22: note = chemically synthesized
  source 1..22: mol_type = other DNA
aaaacccattgtaacaatcaac

SEQ ID NO: 128829 - DNA, 22 bp, synthetic construct
  misc_feature 1..22: note = chemically synthesized
  source 1..22: mol_type = other DNA
taacaatcaacataaacacagt

SEQ ID NO: 128830 - DNA, 22 bp, synthetic construct
  misc_feature 1..22: note = chemically synthesized
  source 1..22: mol_type = other DNA
gtattatcataaaatttagaac

SEQ ID NO: 128831 - DNA, 22 bp, synthetic construct
  misc_feature 1..22: note = chemically synthesized
  source 1..22: mol_type = other DNA
tcataaaatttagaactttctg

SEQ ID NO: 128832 - DNA, 22 bp, synthetic construct
  misc_feature 1..22: note = chemically synthesized
  source 1..22: mol_type = other DNA
agaactttctgtgatctcctac

SEQ ID NO: 128833 - DNA, 22 bp, synthetic construct
  misc_feature 1..22: note = chemically synthesized
  source 1..22: mol_type = other DNA
gaactttctgtgatctcctaca

SEQ ID NO: 128834 - DNA, 22 bp, synthetic construct
  misc_feature 1..22: note = chemically synthesized
  source 1..22: mol_type = other DNA
tctgtgatctcctacaagtctt

SEQ ID NO: 128835 - DNA, 22 bp, synthetic construct
  misc_feature 1..22: note = chemically synthesized
  source 1..22: mol_type = other DNA
ctgtgatctcctacaagtcttc

SEQ ID NO: 128836 - DNA, 22 bp, synthetic construct
  misc_feature 1..22: note = chemically synthesized
  source 1..22: mol_type = other DNA
tgtgatctcctacaagtcttcc

SEQ ID NO: 128837 - DNA, 22 bp, synthetic construct
  misc_feature 1..22: note = chemically synthesized
  source 1..22: mol_type = other DNA
tgatctcctacaagtcttcctg

SEQ ID NO: 128838 - DNA, 22 bp, synthetic construct
  misc_feature 1..22: note = chemically synthesized
  source 1..22: mol_type = other DNA
ctacaagtcttcctgtggtaaa

SEQ ID NO: 128839 - DNA, 22 bp, synthetic construct
  misc_feature 1..22: note = chemically synthesized
  source 1..22: mol_type = other DNA
caagtcttcctgtggtaaaatg

SEQ ID NO: 128840 - DNA, 22 bp, synthetic construct
  misc_feature 1..22: note = chemically synthesized
  source 1..22: mol_type = other DNA
cctgtggtaaaatgctatgtac

SEQ ID NO: 128841 - DNA, 22 bp, synthetic construct
  misc_feature 1..22: note = chemically synthesized
  source 1..22: mol_type = other DNA
ctgtggtaaaatgctatgtact

SEQ ID NO: 128842 - DNA, 22 bp, synthetic construct
  misc_feature 1..22: note = chemically synthesized
  source 1..22: mol_type = other DNA
tggtaaaatgctatgtactatt

SEQ ID NO: 128843 - DNA, 22 bp, synthetic construct
  misc_feature 1..22: note = chemically synthesized
  source 1..22: mol_type = other DNA
tgtactattagaagccttagca

SEQ ID NO: 128844 - DNA, 22 bp, synthetic construct
  misc_feature 1..22: note = chemically synthesized
  source 1..22: mol_type = other DNA
ttagaagccttagcaaattaat

SEQ ID NO: 128845 - DNA, 22 bp, synthetic construct
  misc_feature 1..22: note = chemically synthesized
  source 1..22: mol_type = other DNA
gaagccttagcaaattaataca

SEQ ID NO: 128846 - DNA, 22 bp, synthetic construct
  misc_feature 1..22: note = chemically synthesized
  source 1..22: mol_type = other DNA
agcaaattaatacaggaacaga

SEQ ID NO: 128847 - DNA, 22 bp, synthetic construct
  misc_feature 1..22: note = chemically synthesized
  source 1..22: mol_type = other DNA
gcaaattaatacaggaacagaa

SEQ ID NO: 128848 - DNA, 22 bp, synthetic construct
  misc_feature 1..22: note = chemically synthesized
  source 1..22: mol_type = other DNA
atacaggaacagaaaaccaaat

SEQ ID NO: 128849 - DNA, 22 bp, synthetic construct
  misc_feature 1..22: note = chemically synthesized
  source 1..22: mol_type = other DNA
tcacttatgagtgggagctaaa

SEQ ID NO: 128850 - DNA, 22 bp, synthetic construct
  misc_feature 1..22: note = chemically synthesized
  source 1..22: mol_type = other DNA
acttatgagtgggagctaaatg

SEQ ID NO: 128851 - DNA, 22 bp, synthetic construct
  misc_feature 1..22: note = chemically synthesized
  source 1..22: mol_type = other DNA
atgagtgggagctaaatgatga

SEQ ID NO: 128852 - DNA, 22 bp, synthetic construct
  misc_feature 1..22: note = chemically synthesized
  source 1..22: mol_type = other DNA
tgagtgggagctaaatgatgag

SEQ ID NO: 128853 - DNA, 22 bp, synthetic construct
  misc_feature 1..22: note = chemically synthesized
  source 1..22: mol_type = other DNA
aatgatgagaacacatggacac

SEQ ID NO: 128854 - DNA, 22 bp, synthetic construct
  misc_feature 1..22: note = chemically synthesized
  source 1..22: mol_type = other DNA
gggcctattggaggatggaggg

SEQ ID NO: 128855 - DNA, 22 bp, synthetic construct
  misc_feature 1..22: note = chemically synthesized
  source 1..22: mol_type = other DNA
ttggaggatggagggtgaaagg

SEQ ID NO: 128856 - DNA, 22 bp, synthetic construct
  misc_feature 1..22: note = chemically synthesized
  source 1..22: mol_type = other DNA
gaggatggagggtgaaaggagg

SEQ ID NO: 128857 - DNA, 22 bp, synthetic construct
  misc_feature 1..22: note = chemically synthesized
  source 1..22: mol_type = other DNA
ggcttaatacctgagtgagtga

SEQ ID NO: 128858 - DNA, 22 bp, synthetic construct
  misc_feature 1..22: note = chemically synthesized
  source 1..22: mol_type = other DNA
aatacctgagtgagtgatgaca

SEQ ID NO: 128859 - DNA, 22 bp, synthetic construct
  misc_feature 1..22: note = chemically synthesized
  source 1..22: mol_type = other DNA
atacctgagtgagtgatgacat

SEQ ID NO: 128860 - DNA, 22 bp, synthetic construct
  misc_feature 1..22: note = chemically synthesized
  source 1..22: mol_type = other DNA
agtgagtgatgacataatctgt

SEQ ID NO: 128861 - DNA, 22 bp, synthetic construct
  misc_feature 1..22: note = chemically synthesized
  source 1..22: mol_type = other DNA
tacaacaaaccctcgtgacaca

SEQ ID NO: 128862 - DNA, 22 bp, synthetic construct
  misc_feature 1..22: note = chemically synthesized
  source 1..22: mol_type = other DNA
gtgacacaagtttaaatatgta

SEQ ID NO: 128863 - DNA, 22 bp, synthetic construct
  misc_feature 1..22: note = chemically synthesized
  source 1..22: mol_type = other DNA
aaatatgtaacagacctgctct

SEQ ID NO: 128864 - DNA, 22 bp, synthetic construct
  misc_feature 1..22: note = chemically synthesized
  source 1..22: mol_type = other DNA
aatatgtaacagacctgctctt

SEQ ID NO: 128865 - DNA, 22 bp, synthetic construct
  misc_feature 1..22: note = chemically synthesized
  source 1..22: mol_type = other DNA
ctcttgtactcctgaacctaaa

SEQ ID NO: 128866 - DNA, 22 bp, synthetic construct
  misc_feature 1..22: note = chemically synthesized
  source 1..22: mol_type = other DNA
ttgtactcctgaacctaaaata

SEQ ID NO: 128867 - DNA, 22 bp, synthetic construct
  misc_feature 1..22: note = chemically synthesized
  source 1..22: mol_type = other DNA
gtactcctgaacctaaaataaa

SEQ ID NO: 128868 - DNA, 22 bp, synthetic construct
  misc_feature 1..22: note = chemically synthesized
  source 1..22: mol_type = other DNA
tactcctgaacctaaaataaaa

SEQ ID NO: 128869 - DNA, 22 bp, synthetic construct
  misc_feature 1..22: note = chemically synthesized
  source 1..22: mol_type = other DNA
ctgaacctaaaataaaagttag

SEQ ID NO: 128870 - DNA, 22 bp, synthetic construct
  misc_feature 1..22: note = chemically synthesized
  source 1..22: mol_type = other DNA
aacctaaaataaaagttagtta

SEQ ID NO: 128871 - DNA, 22 bp, synthetic construct
  misc_feature 1..22: note = chemically synthesized
  source 1..22: mol_type = other DNA
aaataaaagttagttaggaaaa

SEQ ID NO: 128872 - DNA, 22 bp, synthetic construct
  misc_feature 1..22: note = chemically synthesized
  source 1..22: mol_type = other DNA
gttaggaaaagaagcctattta

SEQ ID NO: 128873 - DNA, 22 bp, synthetic construct
  misc_feature 1..22: note = chemically synthesized
  source 1..22: mol_type = other DNA
ggaaaagaagcctatttataac

SEQ ID NO: 128874 - DNA, 22 bp, synthetic construct
  misc_feature 1..22: note = chemically synthesized
  source 1..22: mol_type = other DNA
tttataacactatctcctagga

SEQ ID NO: 128875 - DNA, 22 bp, synthetic construct
  misc_feature 1..22: note = chemically synthesized
  source 1..22: mol_type = other DNA
ataacactatctcctaggaaac

SEQ ID NO: 128876 - DNA, 22 bp, synthetic construct
  misc_feature 1..22: note = chemically synthesized
  source 1..22: mol_type = other DNA
taacactatctcctaggaaaca

SEQ ID NO: 128877 - DNA, 22 bp, synthetic construct
  misc_feature 1..22: note = chemically synthesized
  source 1..22: mol_type = other DNA
tctcctaggaaacactgcacat

SEQ ID NO: 128878 - DNA, 22 bp, synthetic construct
  misc_feature 1..22: note = chemically synthesized
  source 1..22: mol_type = other DNA
ctaggaaacactgcacatgaat

SEQ ID NO: 128879 - DNA, 22 bp, synthetic construct
  misc_feature 1..22: note = chemically synthesized
  source 1..22: mol_type = other DNA
ggaaacactgcacatgaatttg

SEQ ID NO: 128880 - DNA, 22 bp, synthetic construct
  misc_feature 1..22: note = chemically synthesized
  source 1..22: mol_type = other DNA
cacatgaatttgtattcataag

SEQ ID NO: 128881 - DNA, 22 bp, synthetic construct
  misc_feature 1..22: note = chemically synthesized
  source 1..22: mol_type = other DNA
gtattcataagaagagtagaat

SEQ ID NO: 128882 - DNA, 22 bp, synthetic construct
  misc_feature 1..22: note = chemically synthesized
  source 1..22: mol_type = other DNA
tattcataagaagagtagaatt

SEQ ID NO: 128883 - DNA, 22 bp, synthetic construct
  misc_feature 1..22: note = chemically synthesized
  source 1..22: mol_type = other DNA
ataagaagagtagaattcagag

SEQ ID NO: 128884 - DNA, 22 bp, synthetic construct
  misc_feature 1..22: note = chemically synthesized
  source 1..22: mol_type = other DNA
agagtggtccagtggactaaca

SEQ ID NO: 128885 - DNA, 22 bp, synthetic construct
  misc_feature 1..22: note = chemically synthesized
  source 1..22: mol_type = other DNA
acaaactggtgaaccaccttct

SEQ ID NO: 128886 - DNA, 22 bp, synthetic construct
  misc_feature 1..22: note = chemically synthesized
  source 1..22: mol_type = other DNA
gtgaaccaccttcttacagcag

SEQ ID NO: 128887 - DNA, 22 bp, synthetic construct
  misc_feature 1..22: note = chemically synthesized
  source 1..22: mol_type = other DNA
cttacagcaggtgaagcctgta

SEQ ID NO: 128888 - DNA, 22 bp, synthetic construct
  misc_feature 1..22: note = chemically synthesized
  source 1..22: mol_type = other DNA
ttacagcaggtgaagcctgtaa

SEQ ID NO: 128889 - DNA, 22 bp, synthetic construct
  misc_feature 1..22: note = chemically synthesized
  source 1..22: mol_type = other DNA
acagcaggtgaagcctgtaatt

SEQ ID NO: 128890 - DNA, 22 bp, synthetic construct
  misc_feature 1..22: note = chemically synthesized
  source 1..22: mol_type = other DNA
cagcaggtgaagcctgtaattc

SEQ ID NO: 128891 - DNA, 22 bp, synthetic construct
  misc_feature 1..22: note = chemically synthesized
  source 1..22: mol_type = other DNA
taattcagcttttcatcattca

SEQ ID NO: 128892 - DNA, 22 bp, synthetic construct
  misc_feature 1..22: note = chemically synthesized
  source 1..22: mol_type = other DNA
agcttttcatcattcaagactg

SEQ ID NO: 128893 - DNA, 22 bp, synthetic construct
  misc_feature 1..22: note = chemically synthesized
  source 1..22: mol_type = other DNA
ttcatcattcaagactgaaaga

SEQ ID NO: 128894 - DNA, 22 bp, synthetic construct
  misc_feature 1..22: note = chemically synthesized
  source 1..22: mol_type = other DNA
tcatcattcaagactgaaagaa

SEQ ID NO: 128895 - DNA, 22 bp, synthetic construct
  misc_feature 1..22: note = chemically synthesized
  source 1..22: mol_type = other DNA
catcattcaagactgaaagaag

SEQ ID NO: 128896 - DNA, 22 bp, synthetic construct
  misc_feature 1..22: note = chemically synthesized
  source 1..22: mol_type = other DNA
atcattcaagactgaaagaaga

SEQ ID NO: 128897 - DNA, 22 bp, synthetic construct
  misc_feature 1..22: note = chemically synthesized
  source 1..22: mol_type = other DNA
aagactgaaagaagaatataac

SEQ ID NO: 128898 - DNA, 22 bp, synthetic construct
  misc_feature 1..22: note = chemically synthesized
  source 1..22: mol_type = other DNA
aaagaagaatataacttatata

SEQ ID NO: 128899 - DNA, 22 bp, synthetic construct
  misc_feature 1..22: note = chemically synthesized
  source 1..22: mol_type = other DNA
atatagagaaggacctcatgag

SEQ ID NO: 128900 - DNA, 22 bp, synthetic construct
  misc_feature 1..22: note = chemically synthesized
  source 1..22: mol_type = other DNA
tatagagaaggacctcatgagg

SEQ ID NO: 128901 - DNA, 22 bp, synthetic construct
  misc_feature 1..22: note = chemically synthesized
  source 1..22: mol_type = other DNA
atgaggaataaatttcatggtg

SEQ ID NO: 128902 - DNA, 22 bp, synthetic construct
  misc_feature 1..22: note = chemically synthesized
  source 1..22: mol_type = other DNA
catggtgcctattaagataaat

SEQ ID NO: 128903 - DNA, 22 bp, synthetic construct
  misc_feature 1..22: note = chemically synthesized
  source 1..22: mol_type = other DNA
atggtgcctattaagataaata

SEQ ID NO: 128904 - DNA, 22 bp, synthetic construct
  misc_feature 1..22: note = chemically synthesized
  source 1..22: mol_type = other DNA
ttaagataaataagtaccatgt

SEQ ID NO: 128905 - DNA, 22 bp, synthetic construct
  misc_feature 1..22: note = chemically synthesized
  source 1..22: mol_type = other DNA
agataaataagtaccatgtagt

SEQ ID NO: 128906 - DNA, 22 bp, synthetic construct
  misc_feature 1..22: note = chemically synthesized
  source 1..22: mol_type = other DNA
tgggaaatctaaggtgtaaaag

SEQ ID NO: 128907 - DNA, 22 bp, synthetic construct
  misc_feature 1..22: note = chemically synthesized
  source 1..22: mol_type = other DNA
aggtgtaaaagaatatacatta

SEQ ID NO: 128908 - DNA, 22 bp, synthetic construct
  misc_feature 1..22: note = chemically synthesized
  source 1..22: mol_type = other DNA
aaaaaagcccttgccaaatacc

SEQ ID NO: 128909 - DNA, 22 bp, synthetic construct
  misc_feature 1..22: note = chemically synthesized
  source 1..22: mol_type = other DNA
gccaaataccatcctttctttt

SEQ ID NO: 128910 - DNA, 22 bp, synthetic construct
  misc_feature 1..22: note = chemically synthesized
  source 1..22: mol_type = other DNA
ccaaataccatcctttcttttt

SEQ ID NO: 128911 - DNA, 22 bp, synthetic construct
  misc_feature 1..22: note = chemically synthesized
  source 1..22: mol_type = other DNA
tctttttcaaataataatatac

SEQ ID NO: 128912 - DNA, 22 bp, synthetic construct
  misc_feature 1..22: note = chemically synthesized
  source 1..22: mol_type = other DNA
ctttttcaaataataatatact

SEQ ID NO: 128913 - DNA, 22 bp, synthetic construct
  misc_feature 1..22: note = chemically synthesized
  source 1..22: mol_type = other DNA
tttttcaaataataatatactt

SEQ ID NO: 128914 - DNA, 22 bp, synthetic construct
  misc_feature 1..22: note = chemically synthesized
  source 1..22: mol_type = other DNA
tttcaaataataatatacttgt

SEQ ID NO: 128915 - DNA, 22 bp, synthetic construct
  misc_feature 1..22: note = chemically synthesized
  source 1..22: mol_type = other DNA
ttcaaataataatatacttgtg

SEQ ID NO: 128916 - DNA, 22 bp, synthetic construct
  misc_feature 1..22: note = chemically synthesized
  source 1..22: mol_type = other DNA
tcaaataataatatacttgtgt

SEQ ID NO: 128917 - DNA, 22 bp, synthetic construct
  misc_feature 1..22: note = chemically synthesized
  source 1..22: mol_type = other DNA
caaataataatatacttgtgta

SEQ ID NO: 128918 - DNA, 22 bp, synthetic construct
  misc_feature 1..22: note = chemically synthesized
  source 1..22: mol_type = other DNA
aaataataatatacttgtgtag

SEQ ID NO: 128919 - DNA, 22 bp, synthetic construct
  misc_feature 1..22: note = chemically synthesized
  source 1..22: mol_type = other DNA
gtgtagtatgggcttgaaggga

SEQ ID NO: 128920 - DNA, 22 bp, synthetic construct
  misc_feature 1..22: note = chemically synthesized
  source 1..22: mol_type = other DNA
tgtagtatgggcttgaagggat

SEQ ID NO: 128921 - DNA, 22 bp, synthetic construct
  misc_feature 1..22: note = chemically synthesized
  source 1..22: mol_type = other DNA
gaagggataacataccataaga

SEQ ID NO: 128922 - DNA, 22 bp, synthetic construct
  misc_feature 1..22: note = chemically synthesized
  source 1..22: mol_type = other DNA
aagggataacataccataagaa

SEQ ID NO: 128923 - DNA, 22 bp, synthetic construct
  misc_feature 1..22: note = chemically synthesized
  source 1..22: mol_type = other DNA
aatttgagtcaggaaatgaaag

SEQ ID NO: 128924 - DNA, 22 bp, synthetic construct
  misc_feature 1..22: note = chemically synthesized
  source 1..22: mol_type = other DNA
atttgagtcaggaaatgaaagg

SEQ ID NO: 128925 - DNA, 22 bp, synthetic construct
  misc_feature 1..22: note = chemically synthesized
  source 1..22: mol_type = other DNA
gagtcaggaaatgaaaggctaa

SEQ ID NO: 128926 - DNA, 22 bp, synthetic construct
  misc_feature 1..22: note = chemically synthesized
  source 1..22: mol_type = other DNA
agtcaggaaatgaaaggctaag

SEQ ID NO: 128927 - DNA, 22 bp, synthetic construct
  misc_feature 1..22: note = chemically synthesized
  source 1..22: mol_type = other DNA
agtgtgcatttctgtagactaa

SEQ ID NO: 128928 - DNA, 22 bp, synthetic construct
  misc_feature 1..22: note = chemically synthesized
  source 1..22: mol_type = other DNA
ctgtagactaagccaatcttag

SEQ ID NO: 128929 - DNA, 22 bp, synthetic construct
  misc_feature 1..22: note = chemically synthesized
  source 1..22: mol_type = other DNA
tgtagactaagccaatcttaga

SEQ ID NO: 128930 - DNA, 22 bp, synthetic construct
  misc_feature 1..22: note = chemically synthesized
  source 1..22: mol_type = other DNA
tagactaagccaatcttagaaa

SEQ ID NO: 128931 - DNA, 22 bp, synthetic construct
  misc_feature 1..22: note = chemically synthesized
  source 1..22: mol_type = other DNA
agccaatcttagaaatgattaa

SEQ ID NO: 128932 - DNA, 22 bp, synthetic construct
  misc_feature 1..22: note = chemically synthesized
  source 1..22: mol_type = other DNA
agaaatgattaagaagacgtgg

SEQ ID NO: 128933 - DNA, 22 bp, synthetic construct
  misc_feature 1..22: note = chemically synthesized
  source 1..22: mol_type = other DNA
gaaatgattaagaagacgtgga

SEQ ID NO: 128934 - DNA, 22 bp, synthetic construct
  misc_feature 1..22: note = chemically synthesized
  source 1..22: mol_type = other DNA
agaagacgtggaagaatcttag

SEQ ID NO: 128935 - DNA, 22 bp, synthetic construct
  misc_feature 1..22: note = chemically synthesized
  source 1..22: mol_type = other DNA
agagacacactgaaaaaatatg

SEQ ID NO: 128936 - DNA, 22 bp, synthetic construct
  misc_feature 1..22: note = chemically synthesized
  source 1..22: mol_type = other DNA
gagacacactgaaaaaatatgt

SEQ ID NO: 128937 - DNA, 22 bp, synthetic construct
  misc_feature 1..22: note = chemically synthesized
  source 1..22: mol_type = other DNA
aaaaaatatgtatggtctaatg

SEQ ID NO: 128938 - DNA, 22 bp, synthetic construct
  misc_feature 1..22: note = chemically synthesized
  source 1..22: mol_type = other DNA
atgagtttacagatcacttttc

SEQ ID NO: 128939 - DNA, 22 bp, synthetic construct
  misc_feature 1..22: note = chemically synthesized
  source 1..22: mol_type = other DNA
acagatcacttttcctcccata

SEQ ID NO: 128940 - DNA, 22 bp, synthetic construct
  misc_feature 1..22: note = chemically synthesized
  source 1..22: mol_type = other DNA
cagatcacttttcctcccatat

SEQ ID NO: 128941 - DNA, 22 bp, synthetic construct
  misc_feature 1..22: note = chemically synthesized
  source 1..22: mol_type = other DNA
ttcctcccatataaaatgaatt

SEQ ID NO: 128942 - DNA, 22 bp, synthetic construct
  misc_feature 1..22: note = chemically synthesized
  source 1..22: mol_type = other DNA
tcctcccatataaaatgaattt

SEQ ID NO: 128943 - DNA, 22 bp, synthetic construct
  misc_feature 1..22: note = chemically synthesized
  source 1..22: mol_type = other DNA
cctcccatataaaatgaattta

SEQ ID NO: 128944 - DNA, 22 bp, synthetic construct
  misc_feature 1..22: note = chemically synthesized
  source 1..22: mol_type = other DNA
ctcccatataaaatgaatttat

SEQ ID NO: 128945 - DNA, 22 bp, synthetic construct
  misc_feature 1..22: note = chemically synthesized
  source 1..22: mol_type = other DNA
ccatataaaatgaatttatact

SEQ ID NO: 128946 - DNA, 22 bp, synthetic construct
  misc_feature 1..22: note = chemically synthesized
  source 1..22: mol_type = other DNA
atactagataaggggaagatga

SEQ ID NO: 128947 - DNA, 22 bp, synthetic construct
  misc_feature 1..22: note = chemically synthesized
  source 1..22: mol_type = other DNA
tactagataaggggaagatgaa

SEQ ID NO: 128948 - DNA, 22 bp, synthetic construct
  misc_feature 1..22: note = chemically synthesized
  source 1..22: mol_type = other DNA
gataaggggaagatgaacttta

SEQ ID NO: 128949 - DNA, 22 bp, synthetic construct
  misc_feature 1..22: note = chemically synthesized
  source 1..22: mol_type = other DNA
tattcctctcattaacaaataa

SEQ ID NO: 128950 - DNA, 22 bp, synthetic construct
  misc_feature 1..22: note = chemically synthesized
  source 1..22: mol_type = other DNA
attcctctcattaacaaataat

SEQ ID NO: 128951 - DNA, 22 bp, synthetic construct
  misc_feature 1..22: note = chemically synthesized
  source 1..22: mol_type = other DNA
ttcctctcattaacaaataatt

SEQ ID NO: 128952 - DNA, 22 bp, synthetic construct
  misc_feature 1..22: note = chemically synthesized
  source 1..22: mol_type = other DNA
ctctcattaacaaataattgct

SEQ ID NO: 128953 - DNA, 22 bp, synthetic construct
  misc_feature 1..22: note = chemically synthesized
  source 1..22: mol_type = other DNA
tcattaacaaataattgctggg

SEQ ID NO: 128954 - DNA, 22 bp, synthetic construct
  misc_feature 1..22: note = chemically synthesized
  source 1..22: mol_type = other DNA
attaacaaataattgctgggtt

SEQ ID NO: 128955 - DNA, 22 bp, synthetic construct
  misc_feature 1..22: note = chemically synthesized
  source 1..22: mol_type = other DNA
acaaataattgctgggttcctt

SEQ ID NO: 128956 - DNA, 22 bp, synthetic construct
  misc_feature 1..22: note = chemically synthesized
  source 1..22: mol_type = other DNA
ctgggttccttcaccagagatg

SEQ ID NO: 128957 - DNA, 22 bp, synthetic construct
  misc_feature 1..22: note = chemically synthesized
  source 1..22: mol_type = other DNA
ggttccttcaccagagatgcag

SEQ ID NO: 128958 - DNA, 22 bp, synthetic construct
  misc_feature 1..22: note = chemically synthesized
  source 1..22: mol_type = other DNA
cttcaccagagatgcagatttt

SEQ ID NO: 128959 - DNA, 22 bp, synthetic construct
  misc_feature 1..22: note = chemically synthesized
  source 1..22: mol_type = other DNA
caccagagatgcagatttttat

SEQ ID NO: 128960 - DNA, 22 bp, synthetic construct
  misc_feature 1..22: note = chemically synthesized
  source 1..22: mol_type = other DNA
accagagatgcagatttttata

SEQ ID NO: 128961 - DNA, 22 bp, synthetic construct
  misc_feature 1..22: note = chemically synthesized
  source 1..22: mol_type = other DNA
ttatagggtaaatgaaaggtga

SEQ ID NO: 128962 - DNA, 22 bp, synthetic construct
  misc_feature 1..22: note = chemically synthesized
  source 1..22: mol_type = other DNA
tatagggtaaatgaaaggtgat

SEQ ID NO: 128963 - DNA, 22 bp, synthetic construct
  misc_feature 1..22: note = chemically synthesized
  source 1..22: mol_type = other DNA
atagggtaaatgaaaggtgata

SEQ ID NO: 128964 - DNA, 22 bp, synthetic construct
  misc_feature 1..22: note = chemically synthesized
  source 1..22: mol_type = other DNA
tagggtaaatgaaaggtgatat

SEQ ID NO: 128965 - DNA, 22 bp, synthetic construct
  misc_feature 1..22: note = chemically synthesized
  source 1..22: mol_type = other DNA
aaagatacttactagattatat

SEQ ID NO: 128966 - DNA, 22 bp, synthetic construct
  misc_feature 1..22: note = chemically synthesized
  source 1..22: mol_type = other DNA
aagatacttactagattatatg

SEQ ID NO: 128967 - DNA, 22 bp, synthetic construct
  misc_feature 1..22: note = chemically synthesized
  source 1..22: mol_type = other DNA
actagattatatgagtattaaa

SEQ ID NO: 128968 - DNA, 22 bp, synthetic construct
  misc_feature 1..22: note = chemically synthesized
  source 1..22: mol_type = other DNA
ctagattatatgagtattaaat

SEQ ID NO: 128969 - DNA, 22 bp, synthetic construct
  misc_feature 1..22: note = chemically synthesized
  source 1..22: mol_type = other DNA
gattatatgagtattaaattgg

SEQ ID NO: 128970 - DNA, 22 bp, synthetic construct
  misc_feature 1..22: note = chemically synthesized
  source 1..22: mol_type = other DNA
tatgagtattaaattgggcagc

SEQ ID NO: 128971 - DNA, 22 bp, synthetic construct
  misc_feature 1..22: note = chemically synthesized
  source 1..22: mol_type = other DNA
aattgggcagcaaggatgatta

SEQ ID NO: 128972 - DNA, 22 bp, synthetic construct
  misc_feature 1..22: note = chemically synthesized
  source 1..22: mol_type = other DNA
ggcagcaaggatgattagaaat

SEQ ID NO: 128973 - DNA, 22 bp, synthetic construct
  misc_feature 1..22: note = chemically synthesized
  source 1..22: mol_type = other DNA
gaaatgattaaggacccagagg

SEQ ID NO: 128974 - DNA, 22 bp, synthetic construct
  misc_feature 1..22: note = chemically synthesized
  source 1..22: mol_type = other DNA
aggacccagaggtctccatgtc

SEQ ID NO: 128975 - DNA, 22 bp, synthetic construct
  misc_feature 1..22: note = chemically synthesized
  source 1..22: mol_type = other DNA
catgtccaattaaagaatgtaa

SEQ ID NO: 128976 - DNA, 22 bp, synthetic construct
  misc_feature 1..22: note = chemically synthesized
  source 1..22: mol_type = other DNA
aagaatgtaaatctgtttttga

SEQ ID NO: 128977 - DNA, 22 bp, synthetic construct
  misc_feature 1..22: note = chemically synthesized
  source 1..22: mol_type = other DNA
tttttgattttatagcctaaat

SEQ ID NO: 128978 - DNA, 22 bp, synthetic construct
  misc_feature 1..22: note = chemically synthesized
  source 1..22: mol_type = other DNA
ttgattttatagcctaaatcct

SEQ ID NO: 128979 - DNA, 22 bp, synthetic construct
  misc_feature 1..22: note = chemically synthesized
  source 1..22: mol_type = other DNA
tgattttatagcctaaatcctt

SEQ ID NO: 128980 - DNA, 22 bp, synthetic construct
  misc_feature 1..22: note = chemically synthesized
  source 1..22: mol_type = other DNA
gattttatagcctaaatcctta

SEQ ID NO: 128981 - DNA, 22 bp, synthetic construct
  misc_feature 1..22: note = chemically synthesized
  source 1..22: mol_type = other DNA
attttatagcctaaatccttag

SEQ ID NO: 128982 - DNA, 22 bp, synthetic construct
  misc_feature 1..22: note = chemically synthesized
  source 1..22: mol_type = other DNA
tatagcctaaatccttagacac

SEQ ID NO: 128983 - DNA, 22 bp, synthetic construct
  misc_feature 1..22: note = chemically synthesized
  source 1..22: mol_type = other DNA
atagcctaaatccttagacaca

SEQ ID NO: 128984 - DNA, 22 bp, synthetic construct
  misc_feature 1..22: note = chemically synthesized
  source 1..22: mol_type = other DNA
tagcctaaatccttagacacag

SEQ ID NO: 128985 - DNA, 22 bp, synthetic construct
  misc_feature 1..22: note = chemically synthesized
  source 1..22: mol_type = other DNA
aatccttagacacagtcattgt

SEQ ID NO: 128986 - DNA, 22 bp, synthetic construct
  misc_feature 1..22: note = chemically synthesized
  source 1..22: mol_type = other DNA
agacacagtcattgttattaat

SEQ ID NO: 128987 - DNA, 22 bp, synthetic construct
  misc_feature 1..22: note = chemically synthesized
  source 1..22: mol_type = other DNA
gacacagtcattgttattaata

SEQ ID NO: 128988 - DNA, 22 bp, synthetic construct
  misc_feature 1..22: note = chemically synthesized
  source 1..22: mol_type = other DNA
ttattaataaactcatagacaa

SEQ ID NO: 128989 - DNA, 22 bp, synthetic construct
  misc_feature 1..22: note = chemically synthesized
  source 1..22: mol_type = other DNA
ttaataaactcatagacaaaat

SEQ ID NO: 128990 - DNA, 22 bp, synthetic construct
  misc_feature 1..22: note = chemically synthesized
  source 1..22: mol_type = other DNA
ataaactcatagacaaaattta

SEQ ID NO: 128991 - DNA, 22 bp, synthetic construct
  misc_feature 1..22: note = chemically synthesized
  source 1..22: mol_type = other DNA
atagacaaaatttattttatgg

SEQ ID NO: 128992 - DNA, 22 bp, synthetic construct
  misc_feature 1..22: note = chemically synthesized
  source 1..22: mol_type = other DNA
attttatgggaaatttaggagt

SEQ ID NO: 128993 - DNA, 22 bp, synthetic construct
  misc_feature 1..22: note = chemically synthesized
  source 1..22: mol_type = other DNA
ttttatgggaaatttaggagtt

SEQ ID NO: 128994 - DNA, 22 bp, synthetic construct
  misc_feature 1..22: note = chemically synthesized
  source 1..22: mol_type = other DNA
tatgggaaatttaggagtttat

SEQ ID NO: 128995 - DNA, 22 bp, synthetic construct
  misc_feature 1..22: note = chemically synthesized
  source 1..22: mol_type = other DNA
atgggaaatttaggagtttatg

SEQ ID NO: 128996 - DNA, 22 bp, synthetic construct
  misc_feature 1..22: note = chemically synthesized
  source 1..22: mol_type = other DNA
tgggaaatttaggagtttatgt

SEQ ID NO: 128997 - DNA, 22 bp, synthetic construct
  misc_feature 1..22: note = chemically synthesized
  source 1..22: mol_type = other DNA
aggagtttatgtccctagattt

SEQ ID NO: 128998 - DNA, 22 bp, synthetic construct
  misc_feature 1..22: note = chemically synthesized
  source 1..22: mol_type = other DNA
ggagtttatgtccctagatttc

SEQ ID NO: 128999 - DNA, 22 bp, synthetic construct
  misc_feature 1..22: note = chemically synthesized
  source 1..22: mol_type = other DNA
atgtccctagatttcaagtaca

SEQ ID NO: 129000 - DNA, 22 bp, synthetic construct
  misc_feature 1..22: note = chemically synthesized
  source 1..22: mol_type = other DNA
tgtccctagatttcaagtacat

SEQ ID NO: 129001 - DNA, 22 bp, synthetic construct
  misc_feature 1..22: note = chemically synthesized
  source 1..22: mol_type = other DNA
gatttcaagtacatgccaccaa

SEQ ID NO: 129002 - DNA, 22 bp, synthetic construct
  misc_feature 1..22: note = chemically synthesized
  source 1..22: mol_type = other DNA
caagtacatgccaccaaactga

SEQ ID NO: 129003 - DNA, 22 bp, synthetic construct
  misc_feature 1..22: note = chemically synthesized
  source 1..22: mol_type = other DNA
aagtacatgccaccaaactgac

SEQ ID NO: 129004 - DNA, 22 bp, synthetic construct
  misc_feature 1..22: note = chemically synthesized
  source 1..22: mol_type = other DNA
acagatgacagtgattagtcac

SEQ ID NO: 129005 - DNA, 22 bp, synthetic construct
  misc_feature 1..22: note = chemically synthesized
  source 1..22: mol_type = other DNA
gtcacaaagtgcctcaaaaata

SEQ ID NO: 129006 - DNA, 22 bp, synthetic construct
  misc_feature 1..22: note = chemically synthesized
  source 1..22: mol_type = other DNA
aaaaatagatggccctatgtta

SEQ ID NO: 129007 - DNA, 22 bp, synthetic construct
  misc_feature 1..22: note = chemically synthesized
  source 1..22: mol_type = other DNA
tgttagtcatggttctccagaa

SEQ ID NO: 129008 - DNA, 22 bp, synthetic construct
  misc_feature 1..22: note = chemically synthesized
  source 1..22: mol_type = other DNA
gtcatggttctccagaaaaata

SEQ ID NO: 129009 - DNA, 22 bp, synthetic construct
  misc_feature 1..22: note = chemically synthesized
  source 1..22: mol_type = other DNA
tccagaaaaatagaatcaacag

SEQ ID NO: 129010 - DNA, 22 bp, synthetic construct
  misc_feature 1..22: note = chemically synthesized
  source 1..22: mol_type = other DNA
cagaaaaatagaatcaacagga

SEQ ID NO: 129011 - DNA, 22 bp, synthetic construct
  misc_feature 1..22: note = chemically synthesized
  source 1..22: mol_type = other DNA
acccaacttcaaattatactac

SEQ ID NO: 129012 - DNA, 22 bp, synthetic construct
  misc_feature 1..22: note = chemically synthesized
  source 1..22: mol_type = other DNA
cccaacttcaaattatactaca

SEQ ID NO: 129013 - DNA, 22 bp, synthetic construct
  misc_feature 1..22: note = chemically synthesized
  source 1..22: mol_type = other DNA
caaattatactacaaggtgaca

SEQ ID NO: 129014 - DNA, 22 bp, synthetic construct
  misc_feature 1..22: note = chemically synthesized
  source 1..22: mol_type = other DNA
aaattatactacaaggtgacag

SEQ ID NO: 129015 - DNA, 22 bp, synthetic construct
  misc_feature 1..22: note = chemically synthesized
  source 1..22: mol_type = other DNA
tactacaaggtgacagtaacta

SEQ ID NO: 129016 - DNA, 22 bp, synthetic construct
  misc_feature 1..22: note = chemically synthesized
  source 1..22: mol_type = other DNA
caaggtgacagtaactaactga

SEQ ID NO: 129017 - DNA, 22 bp, synthetic construct
  misc_feature 1..22: note = chemically synthesized
  source 1..22: mol_type = other DNA
actgaaacagcatggtactgat

SEQ ID NO: 129018 - DNA, 22 bp, synthetic construct
  misc_feature 1..22: note = chemically synthesized
  source 1..22: mol_type = other DNA
aaacagcatggtactgatacca

SEQ ID NO: 129019 - DNA, 22 bp, synthetic construct
  misc_feature 1..22: note = chemically synthesized
  source 1..22: mol_type = other DNA
ataccaaacagacacactgact

SEQ ID NO: 129020 - DNA, 22 bp, synthetic construct
  misc_feature 1..22: note = chemically synthesized
  source 1..22: mol_type = other DNA
actaatggaacagaatggagaa

SEQ ID NO: 129021 - DNA, 22 bp, synthetic construct
  misc_feature 1..22: note = chemically synthesized
  source 1..22: mol_type = other DNA
atggaacagaatggagaactca

SEQ ID NO: 129022 - DNA, 22 bp, synthetic construct
  misc_feature 1..22: note = chemically synthesized
  source 1..22: mol_type = other DNA
agaagtaagaccgcgcatctga

SEQ ID NO: 129023 - DNA, 22 bp, synthetic construct
  misc_feature 1..22: note = chemically synthesized
  source 1..22: mol_type = other DNA
aaacaatctgatcttcaacaaa

SEQ ID NO: 129024 - DNA, 22 bp, synthetic construct
  misc_feature 1..22: note = chemically synthesized
  source 1..22: mol_type = other DNA
atcttcaacaaacctggtaaaa

SEQ ID NO: 129025 - DNA, 22 bp, synthetic construct
  misc_feature 1..22: note = chemically synthesized
  source 1..22: mol_type = other DNA
caacaaacctggtaaaaacaag

SEQ ID NO: 129026 - DNA, 22 bp, synthetic construct
  misc_feature 1..22: note = chemically synthesized
  source 1..22: mol_type = other DNA
aacaaacctggtaaaaacaagt

SEQ ID NO: 129027 - DNA, 22 bp, synthetic construct
  misc_feature 1..22: note = chemically synthesized
  source 1..22: mol_type = other DNA
gtaaaaacaagtaatggggaag

SEQ ID NO: 129028 - DNA, 22 bp, synthetic construct
  misc_feature 1..22: note = chemically synthesized
  source 1..22: mol_type = other DNA
cctattttataaattgtgctgg

SEQ ID NO: 129029 - DNA, 22 bp, synthetic construct
  misc_feature 1..22: note = chemically synthesized
  source 1..22: mol_type = other DNA
ttttataaattgtgctgggaga

SEQ ID NO: 129030 - DNA, 22 bp, synthetic construct
  misc_feature 1..22: note = chemically synthesized
  source 1..22: mol_type = other DNA
tataaattgtgctgggagaact

SEQ ID NO: 129031 - DNA, 22 bp, synthetic construct
  misc_feature 1..22: note = chemically synthesized
  source 1..22: mol_type = other DNA
ataaattgtgctgggagaactg

SEQ ID NO: 129032 - DNA, 22 bp, synthetic construct
  misc_feature 1..22: note = chemically synthesized
  source 1..22: mol_type = other DNA
taaattgtgctgggagaactgg

SEQ ID NO: 129033 - DNA, 22 bp, synthetic construct
  misc_feature 1..22: note = chemically synthesized
  source 1..22: mol_type = other DNA
tgctgggagaactggctagcca

SEQ ID NO: 129034 - DNA, 22 bp, synthetic construct
  misc_feature 1..22: note = chemically synthesized
  source 1..22: mol_type = other DNA
ggagaactggctagccatatgc

SEQ ID NO: 129035 - DNA, 22 bp, synthetic construct
  misc_feature 1..22: note = chemically synthesized
  source 1..22: mol_type = other DNA
gctagccatatgcagaaaattg

SEQ ID NO: 129036 - DNA, 22 bp, synthetic construct
  misc_feature 1..22: note = chemically synthesized
  source 1..22: mol_type = other DNA
gccatatgcagaaaattgaaac

SEQ ID NO: 129037 - DNA, 22 bp, synthetic construct
  misc_feature 1..22: note = chemically synthesized
  source 1..22: mol_type = other DNA
aaactggaccccttccttacat

SEQ ID NO: 129038 - DNA, 22 bp, synthetic construct
  misc_feature 1..22: note = chemically synthesized
  source 1..22: mol_type = other DNA
gaccccttccttacatcttata

SEQ ID NO: 129039 - DNA, 22 bp, synthetic construct
  misc_feature 1..22: note = chemically synthesized
  source 1..22: mol_type = other DNA
ccttacatcttatacataaatt

SEQ ID NO: 129040 - DNA, 22 bp, synthetic construct
  misc_feature 1..22: note = chemically synthesized
  source 1..22: mol_type = other DNA
cttacatcttatacataaatta

SEQ ID NO: 129041 - DNA, 22 bp, synthetic construct
  misc_feature 1..22: note = chemically synthesized
  source 1..22: mol_type = other DNA
acatcttatacataaattaact

SEQ ID NO: 129042 - DNA, 22 bp, synthetic construct
  misc_feature 1..22: note = chemically synthesized
  source 1..22: mol_type = other DNA
catcttatacataaattaactc

SEQ ID NO: 129043 - DNA, 22 bp, synthetic construct
  misc_feature 1..22: note = chemically synthesized
  source 1..22: mol_type = other DNA
atacataaattaactcaagatg

SEQ ID NO: 129044 - DNA, 22 bp, synthetic construct
  misc_feature 1..22: note = chemically synthesized
  source 1..22: mol_type = other DNA
tacataaattaactcaagatgc

SEQ ID NO: 129045 - DNA, 22 bp, synthetic construct
  misc_feature 1..22: note = chemically synthesized
  source 1..22: mol_type = other DNA
actcaagatgcattaaagactt

SEQ ID NO: 129046 - DNA, 22 bp, synthetic construct
  misc_feature 1..22: note = chemically synthesized
  source 1..22: mol_type = other DNA
aagatgcattaaagacttaagt

SEQ ID NO: 129047 - DNA, 22 bp, synthetic construct
  misc_feature 1..22: note = chemically synthesized
  source 1..22: mol_type = other DNA
aagacttaagtgtaaaacccaa

SEQ ID NO: 129048 - DNA, 22 bp, synthetic construct
  misc_feature 1..22: note = chemically synthesized
  source 1..22: mol_type = other DNA
aagtgtaaaacccaaaactata

SEQ ID NO: 129049 - DNA, 22 bp, synthetic construct
  misc_feature 1..22: note = chemically synthesized
  source 1..22: mol_type = other DNA
agtgtaaaacccaaaactataa

SEQ ID NO: 129050 - DNA, 22 bp, synthetic construct
  misc_feature 1..22: note = chemically synthesized
  source 1..22: mol_type = other DNA
taaaaactttagaagaaaacct

SEQ ID NO: 129051 - DNA, 22 bp, synthetic construct
  misc_feature 1..22: note = chemically synthesized
  source 1..22: mol_type = other DNA
tagaagaaaacctaggcaatac

SEQ ID NO: 129052 - DNA, 22 bp, synthetic construct
  misc_feature 1..22: note = chemically synthesized
  source 1..22: mol_type = other DNA
agaagaaaacctaggcaatacc

SEQ ID NO: 129053 - DNA, 22 bp, synthetic construct
  misc_feature 1..22: note = chemically synthesized
  source 1..22: mol_type = other DNA
gaagaaaacctaggcaatacca

SEQ ID NO: 129054 - DNA, 22 bp, synthetic construct
  misc_feature 1..22: note = chemically synthesized
  source 1..22: mol_type = other DNA
ggcaataccattccggacatag

SEQ ID NO: 129055 - DNA, 22 bp, synthetic construct
  misc_feature 1..22: note = chemically synthesized
  source 1..22: mol_type = other DNA
cggacatagacacaggcaaaga

SEQ ID NO: 129056 - DNA, 22 bp, synthetic construct
  misc_feature 1..22: note = chemically synthesized
  source 1..22: mol_type = other DNA
catgatgaaaatgtcaaaaaca

SEQ ID NO: 129057 - DNA, 22 bp, synthetic construct
  misc_feature 1..22: note = chemically synthesized
  source 1..22: mol_type = other DNA
atgatgaaaatgtcaaaaacaa

SEQ ID NO: 129058 - DNA, 22 bp, synthetic construct
  misc_feature 1..22: note = chemically synthesized
  source 1..22: mol_type = other DNA
caacaaaagcaaacactgtcaa

SEQ ID NO: 129059 - DNA, 22 bp, synthetic construct
  misc_feature 1..22: note = chemically synthesized
  source 1..22: mol_type = other DNA
tcaaatgagatctaattaaact

SEQ ID NO: 129060 - DNA, 22 bp, synthetic construct
  misc_feature 1..22: note = chemically synthesized
  source 1..22: mol_type = other DNA
attaaactaaagagatcgggca

SEQ ID NO: 129061 - DNA, 22 bp, synthetic construct
  misc_feature 1..22: note = chemically synthesized
  source 1..22: mol_type = other DNA
aactaaagagatcgggcatggt

SEQ ID NO: 129062 - DNA, 22 bp, synthetic construct
  misc_feature 1..22: note = chemically synthesized
  source 1..22: mol_type = other DNA
aagagatcgggcatggtggctc

SEQ ID NO: 129063 - DNA, 22 bp, synthetic construct
  misc_feature 1..22: note = chemically synthesized
  source 1..22: mol_type = other DNA
acgcctgtaatcccagcacttt

SEQ ID NO: 129064 - DNA, 22 bp, synthetic construct
  misc_feature 1..22: note = chemically synthesized
  source 1..22: mol_type = other DNA
taatcccagcactttgggaggc

SEQ ID NO: 129065 - DNA, 22 bp, synthetic construct
  misc_feature 1..22: note = chemically synthesized
  source 1..22: mol_type = other DNA
tgggaggccaaggtgggtggat

SEQ ID NO: 129066 - DNA, 22 bp, synthetic construct
  misc_feature 1..22: note = chemically synthesized
  source 1..22: mol_type = other DNA
gggaggccaaggtgggtggatc

SEQ ID NO: 129067 - DNA, 22 bp, synthetic construct
  misc_feature 1..22: note = chemically synthesized
  source 1..22: mol_type = other DNA
ggaggccaaggtgggtggatca

SEQ ID NO: 129068 - DNA, 22 bp, synthetic construct
  misc_feature 1..22: note = chemically synthesized
  source 1..22: mol_type = other DNA
gaggtggggagtataagagcag

SEQ ID NO: 129069 - DNA, 22 bp, synthetic construct
  misc_feature 1..22: note = chemically synthesized
  source 1..22: mol_type = other DNA
aggtggggagtataagagcagc

SEQ ID NO: 129070 - DNA, 22 bp, synthetic construct
  misc_feature 1..22: note = chemically synthesized
  source 1..22: mol_type = other DNA
gccaacatggtgaaactccatc

SEQ ID NO: 129071 - DNA, 22 bp, synthetic construct
  misc_feature 1..22: note = chemically synthesized
  source 1..22: mol_type = other DNA
catctctactaaaaatacaaaa

SEQ ID NO: 129072 - DNA, 22 bp, synthetic construct
  misc_feature 1..22: note = chemically synthesized
  source 1..22: mol_type = other DNA
tactaaaaatacaaaaaatgtg

SEQ ID NO: 129073 - DNA, 22 bp, synthetic construct
  misc_feature 1..22: note = chemically synthesized
  source 1..22: mol_type = other DNA
ctaaaaatacaaaaaatgtgct

SEQ ID NO: 129074 - DNA, 22 bp, synthetic construct
  misc_feature 1..22: note = chemically synthesized
  source 1..22: mol_type = other DNA
aaaatacaaaaaatgtgctggg

SEQ ID NO: 129075 - DNA, 22 bp, synthetic construct
  misc_feature 1..22: note = chemically synthesized
  source 1..22: mol_type = other DNA
ggtatggtggtgcgtacctgta

SEQ ID NO: 129076 - DNA, 22 bp, synthetic construct
  misc_feature 1..22: note = chemically synthesized
  source 1..22: mol_type = other DNA
taatctcagctactcaggaggc

SEQ ID NO: 129077 - DNA, 22 bp, synthetic construct
  misc_feature 1..22: note = chemically synthesized
  source 1..22: mol_type = other DNA
agctactcaggaggctgaggca

SEQ ID NO: 129078 - DNA, 22 bp, synthetic construct
  misc_feature 1..22: note = chemically synthesized
  source 1..22: mol_type = other DNA
ctcaggaggctgaggcaggaga

SEQ ID NO: 129079 - DNA, 22 bp, synthetic construct
  misc_feature 1..22: note = chemically synthesized
  source 1..22: mol_type = other DNA
aggaggctgaggcaggagaatt

SEQ ID NO: 129080 - DNA, 22 bp, synthetic construct
  misc_feature 1..22: note = chemically synthesized
  source 1..22: mol_type = other DNA
aggcaggagaattgcttgaacc

SEQ ID NO: 129081 - DNA, 22 bp, synthetic construct
  misc_feature 1..22: note = chemically synthesized
  source 1..22: mol_type = other DNA
cttgaacccaggaggcagaggt

SEQ ID NO: 129082 - DNA, 22 bp, synthetic construct
  misc_feature 1..22: note = chemically synthesized
  source 1..22: mol_type = other DNA
gaacccaggaggcagaggttgc

SEQ ID NO: 129083 - DNA, 22 bp, synthetic construct
  misc_feature 1..22: note = chemically synthesized
  source 1..22: mol_type = other DNA
aacccaggaggcagaggttgca

SEQ ID NO: 129084 - DNA, 22 bp, synthetic construct
  misc_feature 1..22: note = chemically synthesized
  source 1..22: mol_type = other DNA
cagtgagctgagatcgcaccac

SEQ ID NO: 129085 - DNA, 22 bp, synthetic construct
  misc_feature 1..22: note = chemically synthesized
  source 1..22: mol_type = other DNA
agatcgcaccactgcactctag

SEQ ID NO: 129086 - DNA, 22 bp, synthetic construct
  misc_feature 1..22: note = chemically synthesized
  source 1..22: mol_type = other DNA
cactctagcatgggtgaaagag

SEQ ID NO: 129087 - DNA, 22 bp, synthetic construct
  misc_feature 1..22: note = chemically synthesized
  source 1..22: mol_type = other DNA
tagcatgggtgaaagagtgaga

SEQ ID NO: 129088 - DNA, 22 bp, synthetic construct
  misc_feature 1..22: note = chemically synthesized
  source 1..22: mol_type = other DNA
gcatgggtgaaagagtgagact

SEQ ID NO: 129089 - DNA, 22 bp, synthetic construct
  misc_feature 1..22: note = chemically synthesized
  source 1..22: mol_type = other DNA
catctcaaaataaagaaaaata

SEQ ID NO: 129090 - DNA, 22 bp, synthetic construct
  misc_feature 1..22: note = chemically synthesized
  source 1..22: mol_type = other DNA
atctcaaaataaagaaaaatac

SEQ ID NO: 129091 - DNA, 22 bp, synthetic construct
  misc_feature 1..22: note = chemically synthesized
  source 1..22: mol_type = other DNA
aaaataaagaaaaatacaatta

SEQ ID NO: 129092 - DNA, 22 bp, synthetic construct
  misc_feature 1..22: note = chemically synthesized
  source 1..22: mol_type = other DNA
aatacagagcttctaaacagca

SEQ ID NO: 129093 - DNA, 22 bp, synthetic construct
  misc_feature 1..22: note = chemically synthesized
  source 1..22: mol_type = other DNA
ctaaacagcaaaataaactatc

SEQ ID NO: 129094 - DNA, 22 bp, synthetic construct
  misc_feature 1..22: note = chemically synthesized
  source 1..22: mol_type = other DNA
taaacagcaaaataaactatca

SEQ ID NO: 129095 - DNA, 22 bp, synthetic construct
  misc_feature 1..22: note = chemically synthesized
  source 1..22: mol_type = other DNA
aacagcaaaataaactatcatc

SEQ ID NO: 129096 - DNA, 22 bp, synthetic construct
  misc_feature 1..22: note = chemically synthesized
  source 1..22: mol_type = other DNA
tcatcagagcgaacaggcaacc

SEQ ID NO: 129097 - DNA, 22 bp, synthetic construct
  misc_feature 1..22: note = chemically synthesized
  source 1..22: mol_type = other DNA
cagaatgggagaaaatttctgc

SEQ ID NO: 129098 - DNA, 22 bp, synthetic construct
  misc_feature 1..22: note = chemically synthesized
  source 1..22: mol_type = other DNA
ctgcaatctacccatctgacaa

SEQ ID NO: 129099 - DNA, 22 bp, synthetic construct
  misc_feature 1..22: note = chemically synthesized
  source 1..22: mol_type = other DNA
tgcaatctacccatctgacaaa

SEQ ID NO: 129100 - DNA, 22 bp, synthetic construct
  misc_feature 1..22: note = chemically synthesized
  source 1..22: mol_type = other DNA
caatctacccatctgacaaagg

SEQ ID NO: 129101 - DNA, 22 bp, synthetic construct
  misc_feature 1..22: note = chemically synthesized
  source 1..22: mol_type = other DNA
cccatctgacaaaggtctaata

SEQ ID NO: 129102 - DNA, 22 bp, synthetic construct
  misc_feature 1..22: note = chemically synthesized
  source 1..22: mol_type = other DNA
acaaaggtctaatatccagaat

SEQ ID NO: 129103 - DNA, 22 bp, synthetic construct
  misc_feature 1..22: note = chemically synthesized
  source 1..22: mol_type = other DNA
atatccagaatctatgaggaac

SEQ ID NO: 129104 - DNA, 22 bp, synthetic construct
  misc_feature 1..22: note = chemically synthesized
  source 1..22: mol_type = other DNA
tgaggaacttagacatatttac

SEQ ID NO: 129105 - DNA, 22 bp, synthetic construct
  misc_feature 1..22: note = chemically synthesized
  source 1..22: mol_type = other DNA
agacatatttacaaaagaaaca

SEQ ID NO: 129106 - DNA, 22 bp, synthetic construct
  misc_feature 1..22: note = chemically synthesized
  source 1..22: mol_type = other DNA
gacatatttacaaaagaaacac

SEQ ID NO: 129107 - DNA, 22 bp, synthetic construct
  misc_feature 1..22: note = chemically synthesized
  source 1..22: mol_type = other DNA
acaaaagaaacacacaaacaac

SEQ ID NO: 129108 - DNA, 22 bp, synthetic construct
  misc_feature 1..22: note = chemically synthesized
  source 1..22: mol_type = other DNA
caaaagaaacacacaaacaacc

SEQ ID NO: 129109 - DNA, 22 bp, synthetic construct
  misc_feature 1..22: note = chemically synthesized
  source 1..22: mol_type = other DNA
aaaagtgggcaaaggacatgaa

SEQ ID NO: 129110 - DNA, 22 bp, synthetic construct
  misc_feature 1..22: note = chemically synthesized
  source 1..22: mol_type = other DNA
ctcaaaagaagacatttatgtg

SEQ ID NO: 129111 - DNA, 22 bp, synthetic construct
  misc_feature 1..22: note = chemically synthesized
  source 1..22: mol_type = other DNA
tcaaaagaagacatttatgtgg

SEQ ID NO: 129112 - DNA, 22 bp, synthetic construct
  misc_feature 1..22: note = chemically synthesized
  source 1..22: mol_type = other DNA
aaaagaagacatttatgtggct

SEQ ID NO: 129113 - DNA, 22 bp, synthetic construct
  misc_feature 1..22: note = chemically synthesized
  source 1..22: mol_type = other DNA
atgtggctaagaaacatacgaa

SEQ ID NO: 129114 - DNA, 22 bp, synthetic construct
  misc_feature 1..22: note = chemically synthesized
  source 1..22: mol_type = other DNA
tgtggctaagaaacatacgaaa

SEQ ID NO: 129115 - DNA, 22 bp, synthetic construct
  misc_feature 1..22: note = chemically synthesized
  source 1..22: mol_type = other DNA
agaaacatacgaaaaaagtctc

SEQ ID NO: 129116 - DNA, 22 bp, synthetic construct
  misc_feature 1..22: note = chemically synthesized
  source 1..22: mol_type = other DNA
aatgtcactgatcattagagaa

SEQ ID NO: 129117 - DNA, 22 bp, synthetic construct
  misc_feature 1..22: note = chemically synthesized
  source 1..22: mol_type = other DNA
atcattagagaaatgcaaatca

SEQ ID NO: 129118 - DNA, 22 bp, synthetic construct
  misc_feature 1..22: note = chemically synthesized
  source 1..22: mol_type = other DNA
gagaaatgcaaatcaaaaccac

SEQ ID NO: 129119 - DNA, 22 bp, synthetic construct
  misc_feature 1..22: note = chemically synthesized
  source 1..22: mol_type = other DNA
acaccagtcagaatggtggttt

SEQ ID NO: 129120 - DNA, 22 bp, synthetic construct
  misc_feature 1..22: note = chemically synthesized
  source 1..22: mol_type = other DNA
ttaaagtcaagaaacaacagat

SEQ ID NO: 129121 - DNA, 22 bp, synthetic construct
  misc_feature 1..22: note = chemically synthesized
  source 1..22: mol_type = other DNA
taaagtcaagaaacaacagatg

SEQ ID NO: 129122 - DNA, 22 bp, synthetic construct
  misc_feature 1..22: note = chemically synthesized
  source 1..22: mol_type = other DNA
aaagtcaagaaacaacagatgc

SEQ ID NO: 129123 - DNA, 22 bp, synthetic construct
  misc_feature 1..22: note = chemically synthesized
  source 1..22: mol_type = other DNA
aagtcaagaaacaacagatgct

SEQ ID NO: 129124 - DNA, 22 bp, synthetic construct
  misc_feature 1..22: note = chemically synthesized
  source 1..22: mol_type = other DNA
gcaaggttgcagagaaatagga

SEQ ID NO: 129125 - DNA, 22 bp, synthetic construct
  misc_feature 1..22: note = chemically synthesized
  source 1..22: mol_type = other DNA
cagagaaataggaacactttta

SEQ ID NO: 129126 - DNA, 22 bp, synthetic construct
  misc_feature 1..22: note = chemically synthesized
  source 1..22: mol_type = other DNA
ttacactgttggtgggactgta

SEQ ID NO: 129127 - DNA, 22 bp, synthetic construct
  misc_feature 1..22: note = chemically synthesized
  source 1..22: mol_type = other DNA
tacactgttggtgggactgtaa

SEQ ID NO: 129128 - DNA, 22 bp, synthetic construct
  misc_feature 1..22: note = chemically synthesized
  source 1..22: mol_type = other DNA
acactgttggtgggactgtaaa

SEQ ID NO: 129129 - DNA, 22 bp, synthetic construct
  misc_feature 1..22: note = chemically synthesized
  source 1..22: mol_type = other DNA
cactgttggtgggactgtaaac

SEQ ID NO: 129130 - DNA, 22 bp, synthetic construct
  misc_feature 1..22: note = chemically synthesized
  source 1..22: mol_type = other DNA
ttggtgggactgtaaactaatt

SEQ ID NO: 129131 - DNA, 22 bp, synthetic construct
  misc_feature 1..22: note = chemically synthesized
  source 1..22: mol_type = other DNA
gtgggactgtaaactaattcaa

SEQ ID NO: 129132 - DNA, 22 bp, synthetic construct
  misc_feature 1..22: note = chemically synthesized
  source 1..22: mol_type = other DNA
taaactaattcaaccattgtgg

SEQ ID NO: 129133 - DNA, 22 bp, synthetic construct
  misc_feature 1..22: note = chemically synthesized
  source 1..22: mol_type = other DNA
attcaaccattgtggaagacag

SEQ ID NO: 129134 - DNA, 22 bp, synthetic construct
  misc_feature 1..22: note = chemically synthesized
  source 1..22: mol_type = other DNA
aaccattgtggaagacagtgtg

SEQ ID NO: 129135 - DNA, 22 bp, synthetic construct
  misc_feature 1..22: note = chemically synthesized
  source 1..22: mol_type = other DNA
tggaagacagtgtggcaattcc

SEQ ID NO: 129136 - DNA, 22 bp, synthetic construct
  misc_feature 1..22: note = chemically synthesized
  source 1..22: mol_type = other DNA
ctcaaagatttagaaccagaaa

SEQ ID NO: 129137 - DNA, 22 bp, synthetic construct
  misc_feature 1..22: note = chemically synthesized
  source 1..22: mol_type = other DNA
aaagatttagaaccagaaatac

SEQ ID NO: 129138 - DNA, 22 bp, synthetic construct
  misc_feature 1..22: note = chemically synthesized
  source 1..22: mol_type = other DNA
agaaccagaaataccatttgac

SEQ ID NO: 129139 - DNA, 22 bp, synthetic construct
  misc_feature 1..22: note = chemically synthesized
  source 1..22: mol_type = other DNA
gaaccagaaataccatttgacc

SEQ ID NO: 129140 - DNA, 22 bp, synthetic construct
  misc_feature 1..22: note = chemically synthesized
  source 1..22: mol_type = other DNA
gacctcacaatcccattactgg

SEQ ID NO: 129141 - DNA, 22 bp, synthetic construct
  misc_feature 1..22: note = chemically synthesized
  source 1..22: mol_type = other DNA
acctcacaatcccattactggg

SEQ ID NO: 129142 - DNA, 22 bp, synthetic construct
  misc_feature 1..22: note = chemically synthesized
  source 1..22: mol_type = other DNA
acaatcccattactgggtatat

SEQ ID NO: 129143 - DNA, 22 bp, synthetic construct
  misc_feature 1..22: note = chemically synthesized
  source 1..22: mol_type = other DNA
ctgggtatatacctaaaggagt

SEQ ID NO: 129144 - DNA, 22 bp, synthetic construct
  misc_feature 1..22: note = chemically synthesized
  source 1..22: mol_type = other DNA
ggtatatacctaaaggagtata

SEQ ID NO: 129145 - DNA, 22 bp, synthetic construct
  misc_feature 1..22: note = chemically synthesized
  source 1..22: mol_type = other DNA
aaggagtataaatcattctatt

SEQ ID NO: 129146 - DNA, 22 bp, synthetic construct
  misc_feature 1..22: note = chemically synthesized
  source 1..22: mol_type = other DNA
tattactaagatacatgcacat

SEQ ID NO: 129147 - DNA, 22 bp, synthetic construct
  misc_feature 1..22: note = chemically synthesized
  source 1..22: mol_type = other DNA
ttactaagatacatgcacatgt

SEQ ID NO: 129148 - DNA, 22 bp, synthetic construct
  misc_feature 1..22: note = chemically synthesized
  source 1..22: mol_type = other DNA
ctaagatacatgcacatgtatg

SEQ ID NO: 129149 - DNA, 22 bp, synthetic construct
  misc_feature 1..22: note = chemically synthesized
  source 1..22: mol_type = other DNA
agatacatgcacatgtatgttc

SEQ ID NO: 129150 - DNA, 22 bp, synthetic construct
  misc_feature 1..22: note = chemically synthesized
  source 1..22: mol_type = other DNA
attgtagcactattcacaatag

SEQ ID NO: 129151 - DNA, 22 bp, synthetic construct
  misc_feature 1..22: note = chemically synthesized
  source 1..22: mol_type = other DNA
tagcactattcacaatagcaaa

SEQ ID NO: 129152 - DNA, 22 bp, synthetic construct
  misc_feature 1..22: note = chemically synthesized
  source 1..22: mol_type = other DNA
ttcacaatagcaaagacataga

SEQ ID NO: 129153 - DNA, 22 bp, synthetic construct
  misc_feature 1..22: note = chemically synthesized
  source 1..22: mol_type = other DNA
acaatagcaaagacatagaatc

SEQ ID NO: 129154 - DNA, 22 bp, synthetic construct
  misc_feature 1..22: note = chemically synthesized
  source 1..22: mol_type = other DNA
aaaaaatgtggtacatataaac

SEQ ID NO: 129155 - DNA, 22 bp, synthetic construct
  misc_feature 1..22: note = chemically synthesized
  source 1..22: mol_type = other DNA
aaaaatgtggtacatataaacc

SEQ ID NO: 129156 - DNA, 22 bp, synthetic construct
  misc_feature 1..22: note = chemically synthesized
  source 1..22: mol_type = other DNA
tctaaccataaaaagggatgag

SEQ ID NO: 129157 - DNA, 22 bp, synthetic construct
  misc_feature 1..22: note = chemically synthesized
  source 1..22: mol_type = other DNA
accataaaaagggatgagatca

SEQ ID NO: 129158 - DNA, 22 bp, synthetic construct
  misc_feature 1..22: note = chemically synthesized
  source 1..22: mol_type = other DNA
tgctgggacatggatggagccg

SEQ ID NO: 129159 - DNA, 22 bp, synthetic construct
  misc_feature 1..22: note = chemically synthesized
  source 1..22: mol_type = other DNA
gctgggacatggatggagccga

SEQ ID NO: 129160 - DNA, 22 bp, synthetic construct
  misc_feature 1..22: note = chemically synthesized
  source 1..22: mol_type = other DNA
ctgggacatggatggagccgaa

SEQ ID NO: 129161 - DNA, 22 bp, synthetic construct
  misc_feature 1..22: note = chemically synthesized
  source 1..22: mol_type = other DNA
ggacatggatggagccgaaagc

SEQ ID NO: 129162 - DNA, 22 bp, synthetic construct
  misc_feature 1..22: note = chemically synthesized
  source 1..22: mol_type = other DNA
tcttcagtaaactaatgcagga

SEQ ID NO: 129163 - DNA, 22 bp, synthetic construct
  misc_feature 1..22: note = chemically synthesized
  source 1..22: mol_type = other DNA
cagtaaactaatgcaggaacag

SEQ ID NO: 129164 - DNA, 22 bp, synthetic construct
  misc_feature 1..22: note = chemically synthesized
  source 1..22: mol_type = other DNA
agtaaactaatgcaggaacaga

SEQ ID NO: 129165 - DNA, 22 bp, synthetic construct
  misc_feature 1..22: note = chemically synthesized
  source 1..22: mol_type = other DNA
atgcaggaacagaaaaccaaac

SEQ ID NO: 129166 - DNA, 22 bp, synthetic construct
  misc_feature 1..22: note = chemically synthesized
  source 1..22: mol_type = other DNA
tcacttagaagtgggagctgaa

SEQ ID NO: 129167 - DNA, 22 bp, synthetic construct
  misc_feature 1..22: note = chemically synthesized
  source 1..22: mol_type = other DNA
acttagaagtgggagctgaaca

SEQ ID NO: 129168 - DNA, 22 bp, synthetic construct
  misc_feature 1..22: note = chemically synthesized
  source 1..22: mol_type = other DNA
agaagtgggagctgaacaatga

SEQ ID NO: 129169 - DNA, 22 bp, synthetic construct
  misc_feature 1..22: note = chemically synthesized
  source 1..22: mol_type = other DNA
gaagtgggagctgaacaatgag

SEQ ID NO: 129170 - DNA, 22 bp, synthetic construct
  misc_feature 1..22: note = chemically synthesized
  source 1..22: mol_type = other DNA
aacaatgagaatgagaacacat

SEQ ID NO: 129171 - DNA, 22 bp, synthetic construct
  misc_feature 1..22: note = chemically synthesized
  source 1..22: mol_type = other DNA
gagcctgtcagggcatggggtg

SEQ ID NO: 129172 - DNA, 22 bp, synthetic construct
  misc_feature 1..22: note = chemically synthesized
  source 1..22: mol_type = other DNA
tcagggcatggggtgtggtgaa

SEQ ID NO: 129173 - DNA, 22 bp, synthetic construct
  misc_feature 1..22: note = chemically synthesized
  source 1..22: mol_type = other DNA
gaaaaaatagctaatgcatgct

SEQ ID NO: 129174 - DNA, 22 bp, synthetic construct
  misc_feature 1..22: note = chemically synthesized
  source 1..22: mol_type = other DNA
atgcatgctgggcttaacacct

SEQ ID NO: 129175 - DNA, 22 bp, synthetic construct
  misc_feature 1..22: note = chemically synthesized
  source 1..22: mol_type = other DNA
ggcttaacacctaggtgatggg

SEQ ID NO: 129176 - DNA, 22 bp, synthetic construct
  misc_feature 1..22: note = chemically synthesized
  source 1..22: mol_type = other DNA
aacacctaggtgatgggttgat

SEQ ID NO: 129177 - DNA, 22 bp, synthetic construct
  misc_feature 1..22: note = chemically synthesized
  source 1..22: mol_type = other DNA
acacctaggtgatgggttgata

SEQ ID NO: 129178 - DNA, 22 bp, synthetic construct
  misc_feature 1..22: note = chemically synthesized
  source 1..22: mol_type = other DNA
ggtgatgggttgataggtacag

SEQ ID NO: 129179 - DNA, 22 bp, synthetic construct
  misc_feature 1..22: note = chemically synthesized
  source 1..22: mol_type = other DNA
ataggtacagcaaaccaccatt

SEQ ID NO: 129180 - DNA, 22 bp, synthetic construct
  misc_feature 1..22: note = chemically synthesized
  source 1..22: mol_type = other DNA
cacacatttacgtatgtaataa

SEQ ID NO: 129181 - DNA, 22 bp, synthetic construct
  misc_feature 1..22: note = chemically synthesized
  source 1..22: mol_type = other DNA
acgtatgtaataaacctgcaca

SEQ ID NO: 129182 - DNA, 22 bp, synthetic construct
  misc_feature 1..22: note = chemically synthesized
  source 1..22: mol_type = other DNA
cgtatgtaataaacctgcacat

SEQ ID NO: 129183 - DNA, 22 bp, synthetic construct
  misc_feature 1..22: note = chemically synthesized
  source 1..22: mol_type = other DNA
cacatcctgcacatgtacctca

SEQ ID NO: 129184 - DNA, 22 bp, synthetic construct
  misc_feature 1..22: note = chemically synthesized
  source 1..22: mol_type = other DNA
cacatgtacctcagaacttaaa

SEQ ID NO: 129185 - DNA, 22 bp, synthetic construct
  misc_feature 1..22: note = chemically synthesized
  source 1..22: mol_type = other DNA
agaacttaaaaattaaaaaaat

SEQ ID NO: 129186 - DNA, 22 bp, synthetic construct
  misc_feature 1..22: note = chemically synthesized
  source 1..22: mol_type = other DNA
aaaaattaaaaaaattgaatgt

SEQ ID NO: 129187 - DNA, 22 bp, synthetic construct
  misc_feature 1..22: note = chemically synthesized
  source 1..22: mol_type = other DNA
aaaattaaaaaaattgaatgta

SEQ ID NO: 129188 - DNA, 22 bp, synthetic construct
  misc_feature 1..22: note = chemically synthesized
  source 1..22: mol_type = other DNA
aaaaaattgaatgtacataaaa

SEQ ID NO: 129189 - DNA, 22 bp, synthetic construct
  misc_feature 1..22: note = chemically synthesized
  source 1..22: mol_type = other DNA
aatgtacataaaaatatggaaa

SEQ ID NO: 129190 - DNA, 22 bp, synthetic construct
  misc_feature 1..22: note = chemically synthesized
  source 1..22: mol_type = other DNA
ataaatgtaattcactgcatta

SEQ ID NO: 129191 - DNA, 22 bp, synthetic construct
  misc_feature 1..22: note = chemically synthesized
  source 1..22: mol_type = other DNA
actgcattaaaaaaaaataatg

SEQ ID NO: 129192 - DNA, 22 bp, synthetic construct
  misc_feature 1..22: note = chemically synthesized
  source 1..22: mol_type = other DNA
cattaaaaaaaaataatggcaa

SEQ ID NO: 129193 - DNA, 22 bp, synthetic construct
  misc_feature 1..22: note = chemically synthesized
  source 1..22: mol_type = other DNA
aaaaaaaataatggcaaaaact

SEQ ID NO: 129194 - DNA, 22 bp, synthetic construct
  misc_feature 1..22: note = chemically synthesized
  source 1..22: mol_type = other DNA
caattactgttgcaccaaccta

SEQ ID NO: 129195 - DNA, 22 bp, synthetic construct
  misc_feature 1..22: note = chemically synthesized
  source 1..22: mol_type = other DNA
ctgttgcaccaacctaatataa

SEQ ID NO: 129196 - DNA, 22 bp, synthetic construct
  misc_feature 1..22: note = chemically synthesized
  source 1..22: mol_type = other DNA
ttgcaccaacctaatataagga

SEQ ID NO: 129197 - DNA, 22 bp, synthetic construct
  misc_feature 1..22: note = chemically synthesized
  source 1..22: mol_type = other DNA
caccaacctaatataaggaaat

SEQ ID NO: 129198 - DNA, 22 bp, synthetic construct
  misc_feature 1..22: note = chemically synthesized
  source 1..22: mol_type = other DNA
atataaggaaatagcagatgtg

SEQ ID NO: 129199 - DNA, 22 bp, synthetic construct
  misc_feature 1..22: note = chemically synthesized
  source 1..22: mol_type = other DNA
tggaggaaggcaagtcccaaga

SEQ ID NO: 129200 - DNA, 22 bp, synthetic construct
  misc_feature 1..22: note = chemically synthesized
  source 1..22: mol_type = other DNA
aaaactcaagagagcctggtag

SEQ ID NO: 129201 - DNA, 22 bp, synthetic construct
  misc_feature 1..22: note = chemically synthesized
  source 1..22: mol_type = other DNA
aagagagcctggtagtttagtc

SEQ ID NO: 129202 - DNA, 22 bp, synthetic construct
  misc_feature 1..22: note = chemically synthesized
  source 1..22: mol_type = other DNA
gtagtttagtcccagtccaagt

SEQ ID NO: 129203 - DNA, 22 bp, synthetic construct
  misc_feature 1..22: note = chemically synthesized
  source 1..22: mol_type = other DNA
agtcccagtccaagtctgaagg

SEQ ID NO: 129204 - DNA, 22 bp, synthetic construct
  misc_feature 1..22: note = chemically synthesized
  source 1..22: mol_type = other DNA
gtcccagtccaagtctgaaggc

SEQ ID NO: 129205 - DNA, 22 bp, synthetic construct
  misc_feature 1..22: note = chemically synthesized
  source 1..22: mol_type = other DNA
aaggcctgggaaacaggaggat

SEQ ID NO: 129206 - DNA, 22 bp, synthetic construct
  misc_feature 1..22: note = chemically synthesized
  source 1..22: mol_type = other DNA
ggaaacaggaggattgatggtg

SEQ ID NO: 129207 - DNA, 22 bp, synthetic construct
  misc_feature 1..22: note = chemically synthesized
  source 1..22: mol_type = other DNA
atggtgtacttgcaacccaaaa

SEQ ID NO: 129208 - DNA, 22 bp, synthetic construct
  misc_feature 1..22: note = chemically synthesized
  source 1..22: mol_type = other DNA
gcaacccaaaagccatcaggct

SEQ ID NO: 129209 - DNA, 22 bp, synthetic construct
  misc_feature 1..22: note = chemically synthesized
  source 1..22: mol_type = other DNA
caacccaaaagccatcaggctt

SEQ ID NO: 129210 - DNA, 22 bp, synthetic construct
  misc_feature 1..22: note = chemically synthesized
  source 1..22: mol_type = other DNA
cagacccaggaagttttgatgt

SEQ ID NO: 129211 - DNA, 22 bp, synthetic construct
  misc_feature 1..22: note = chemically synthesized
  source 1..22: mol_type = other DNA
agacccaggaagttttgatgtt

SEQ ID NO: 129212 - DNA, 22 bp, synthetic construct
  misc_feature 1..22: note = chemically synthesized
  source 1..22: mol_type = other DNA
tgatgtttcagttcaatctaaa

SEQ ID NO: 129213 - DNA, 22 bp, synthetic construct
  misc_feature 1..22: note = chemically synthesized
  source 1..22: mol_type = other DNA
gatgtttcagttcaatctaaag

SEQ ID NO: 129214 - DNA, 22 bp, synthetic construct
  misc_feature 1..22: note = chemically synthesized
  source 1..22: mol_type = other DNA
atgtttcagttcaatctaaagg

SEQ ID NO: 129215 - DNA, 22 bp, synthetic construct
  misc_feature 1..22: note = chemically synthesized
  source 1..22: mol_type = other DNA
cagttcaatctaaaggcagaaa

SEQ ID NO: 129216 - DNA, 22 bp, synthetic construct
  misc_feature 1..22: note = chemically synthesized
  source 1..22: mol_type = other DNA
agttcaatctaaaggcagaaaa

SEQ ID NO: 129217 - DNA, 22 bp, synthetic construct
  misc_feature 1..22: note = chemically synthesized
  source 1..22: mol_type = other DNA
aatctaaaggcagaaaaaaagg

SEQ ID NO: 129218 - DNA, 22 bp, synthetic construct
  misc_feature 1..22: note = chemically synthesized
  source 1..22: mol_type = other DNA
aaggcagaaaaaaaggtctaga

SEQ ID NO: 129219 - DNA, 22 bp, synthetic construct
  misc_feature 1..22: note = chemically synthesized
  source 1..22: mol_type = other DNA
gattccagtttgaaggccatca

SEQ ID NO: 129220 - DNA, 22 bp, synthetic construct
  misc_feature 1..22: note = chemically synthesized
  source 1..22: mol_type = other DNA
cagtttgaaggccatcaataag

SEQ ID NO: 129221 - DNA, 22 bp, synthetic construct
  misc_feature 1..22: note = chemically synthesized
  source 1..22: mol_type = other DNA
gaaggccatcaataaggaataa

SEQ ID NO: 129222 - DNA, 22 bp, synthetic construct
  misc_feature 1..22: note = chemically synthesized
  source 1..22: mol_type = other DNA
aaggccatcaataaggaataat

SEQ ID NO: 129223 - DNA, 22 bp, synthetic construct
  misc_feature 1..22: note = chemically synthesized
  source 1..22: mol_type = other DNA
tctctgatttggggaagggtca

SEQ ID NO: 129224 - DNA, 22 bp, synthetic construct
  misc_feature 1..22: note = chemically synthesized
  source 1..22: mol_type = other DNA
tctgatttggggaagggtcaga

SEQ ID NO: 129225 - DNA, 22 bp, synthetic construct
  misc_feature 1..22: note = chemically synthesized
  source 1..22: mol_type = other DNA
tgatttggggaagggtcagact

SEQ ID NO: 129226 - DNA, 22 bp, synthetic construct
  misc_feature 1..22: note = chemically synthesized
  source 1..22: mol_type = other DNA
atttggggaagggtcagacttt

SEQ ID NO: 129227 - DNA, 22 bp, synthetic construct
  misc_feature 1..22: note = chemically synthesized
  source 1..22: mol_type = other DNA
ggggaagggtcagactttttgt

SEQ ID NO: 129228 - DNA, 22 bp, synthetic construct
  misc_feature 1..22: note = chemically synthesized
  source 1..22: mol_type = other DNA
gggaagggtcagactttttgtt

SEQ ID NO: 129229 - DNA, 22 bp, synthetic construct
  misc_feature 1..22: note = chemically synthesized
  source 1..22: mol_type = other DNA
tttgttctattcaggttttcaa

SEQ ID NO: 129230 - DNA, 22 bp, synthetic construct
  misc_feature 1..22: note = chemically synthesized
  source 1..22: mol_type = other DNA
ttgttctattcaggttttcaac

SEQ ID NO: 129231 - DNA, 22 bp, synthetic construct
  misc_feature 1..22: note = chemically synthesized
  source 1..22: mol_type = other DNA
tgttctattcaggttttcaact

SEQ ID NO: 129232 - DNA, 22 bp, synthetic construct
  misc_feature 1..22: note = chemically synthesized
  source 1..22: mol_type = other DNA
gttctattcaggttttcaactg

SEQ ID NO: 129233 - DNA, 22 bp, synthetic construct
  misc_feature 1..22: note = chemically synthesized
  source 1..22: mol_type = other DNA
ttctattcaggttttcaactga

SEQ ID NO: 129234 - DNA, 22 bp, synthetic construct
  misc_feature 1..22: note = chemically synthesized
  source 1..22: mol_type = other DNA
tattcaggttttcaactgattg

SEQ ID NO: 129235 - DNA, 22 bp, synthetic construct
  misc_feature 1..22: note = chemically synthesized
  source 1..22: mol_type = other DNA
ttcaggttttcaactgattgga

SEQ ID NO: 129236 - DNA, 22 bp, synthetic construct
  misc_feature 1..22: note = chemically synthesized
  source 1..22: mol_type = other DNA
aggttttcaactgattggagga

SEQ ID NO: 129237 - DNA, 22 bp, synthetic construct
  misc_feature 1..22: note = chemically synthesized
  source 1..22: mol_type = other DNA
tcaactgattggaggaagccgc

SEQ ID NO: 129238 - DNA, 22 bp, synthetic construct
  misc_feature 1..22: note = chemically synthesized
  source 1..22: mol_type = other DNA
caactgattggaggaagccgcc

SEQ ID NO: 129239 - DNA, 22 bp, synthetic construct
  misc_feature 1..22: note = chemically synthesized
  source 1..22: mol_type = other DNA
aactgattggaggaagccgcct

SEQ ID NO: 129240 - DNA, 22 bp, synthetic construct
  misc_feature 1..22: note = chemically synthesized
  source 1..22: mol_type = other DNA
attggaggaagccgcctgcaat

SEQ ID NO: 129241 - DNA, 22 bp, synthetic construct
  misc_feature 1..22: note = chemically synthesized
  source 1..22: mol_type = other DNA
gaggaagccgcctgcaatagga

SEQ ID NO: 129242 - DNA, 22 bp, synthetic construct
  misc_feature 1..22: note = chemically synthesized
  source 1..22: mol_type = other DNA
caataggaaggaccatctgctc

SEQ ID NO: 129243 - DNA, 22 bp, synthetic construct
  misc_feature 1..22: note = chemically synthesized
  source 1..22: mol_type = other DNA
ctctacttggtctaccgattta

SEQ ID NO: 129244 - DNA, 22 bp, synthetic construct
  misc_feature 1..22: note = chemically synthesized
  source 1..22: mol_type = other DNA
tacttggtctaccgatttaaat

SEQ ID NO: 129245 - DNA, 22 bp, synthetic construct
  misc_feature 1..22: note = chemically synthesized
  source 1..22: mol_type = other DNA
cttggtctaccgatttaaatgt

SEQ ID NO: 129246 - DNA, 22 bp, synthetic construct
  misc_feature 1..22: note = chemically synthesized
  source 1..22: mol_type = other DNA
ggtctaccgatttaaatgttaa

SEQ ID NO: 129247 - DNA, 22 bp, synthetic construct
  misc_feature 1..22: note = chemically synthesized
  source 1..22: mol_type = other DNA
gtctaccgatttaaatgttaat

SEQ ID NO: 129248 - DNA, 22 bp, synthetic construct
  misc_feature 1..22: note = chemically synthesized
  source 1..22: mol_type = other DNA
ccgatttaaatgttaatcttgc

SEQ ID NO: 129249 - DNA, 22 bp, synthetic construct
  misc_feature 1..22: note = chemically synthesized
  source 1..22: mol_type = other DNA
aaatgttaatcttgcctaaaaa

SEQ ID NO: 129250 - DNA, 22 bp, synthetic construct
  misc_feature 1..22: note = chemically synthesized
  source 1..22: mol_type = other DNA
aatgttaatcttgcctaaaaac

SEQ ID NO: 129251 - DNA, 22 bp, synthetic construct
  misc_feature 1..22: note = chemically synthesized
  source 1..22: mol_type = other DNA
atcttgcctaaaaacaccctca

SEQ ID NO: 129252 - DNA, 22 bp, synthetic construct
  misc_feature 1..22: note = chemically synthesized
  source 1..22: mol_type = other DNA
gcctaaaaacaccctcacaaaa

SEQ ID NO: 129253 - DNA, 22 bp, synthetic construct
  misc_feature 1..22: note = chemically synthesized
  source 1..22: mol_type = other DNA
cctaaaaacaccctcacaaaaa

SEQ ID NO: 129254 - DNA, 22 bp, synthetic construct
  misc_feature 1..22: note = chemically synthesized
  source 1..22: mol_type = other DNA
aaaacaccctcacaaaaacatc

SEQ ID NO: 129255 - DNA, 22 bp, synthetic construct
  misc_feature 1..22: note = chemically synthesized
  source 1..22: mol_type = other DNA
acaaaaacatctagaataatgt

SEQ ID NO: 129256 - DNA, 22 bp, synthetic construct
  misc_feature 1..22: note = chemically synthesized
  source 1..22: mol_type = other DNA
gaataatgtttgacaaatattt

SEQ ID NO: 129257 - DNA, 22 bp, synthetic construct
  misc_feature 1..22: note = chemically synthesized
  source 1..22: mol_type = other DNA
gacaaatatttgggcaccccat

SEQ ID NO: 129258 - DNA, 22 bp, synthetic construct
  misc_feature 1..22: note = chemically synthesized
  source 1..22: mol_type = other DNA
acaaatatttgggcaccccatg

SEQ ID NO: 129259 - DNA, 22 bp, synthetic construct
  misc_feature 1..22: note = chemically synthesized
  source 1..22: mol_type = other DNA
gggcaccccatggcccagtcaa

SEQ ID NO: 129260 - DNA, 22 bp, synthetic construct
  misc_feature 1..22: note = chemically synthesized
  source 1..22: mol_type = other DNA
ggcaccccatggcccagtcaaa

SEQ ID NO: 129261 - DNA, 22 bp, synthetic construct
  misc_feature 1..22: note = chemically synthesized
  source 1..22: mol_type = other DNA
gcatataaaattaaccatcaga

SEQ ID NO: 129262 - DNA, 22 bp, synthetic construct
  misc_feature 1..22: note = chemically synthesized
  source 1..22: mol_type = other DNA
accatcagagcctgtagaggat

SEQ ID NO: 129263 - DNA, 22 bp, synthetic construct
  misc_feature 1..22: note = chemically synthesized
  source 1..22: mol_type = other DNA
tagaggatgagttaaaggatgg

SEQ ID NO: 129264 - DNA, 22 bp, synthetic construct
  misc_feature 1..22: note = chemically synthesized
  source 1..22: mol_type = other DNA
aaggatggaatcttcggagata

SEQ ID NO: 129265 - DNA, 22 bp, synthetic construct
  misc_feature 1..22: note = chemically synthesized
  source 1..22: mol_type = other DNA
cggagataattgtggaatccag

SEQ ID NO: 129266 - DNA, 22 bp, synthetic construct
  misc_feature 1..22: note = chemically synthesized
  source 1..22: mol_type = other DNA
ggagataattgtggaatccaga

SEQ ID NO: 129267 - DNA, 22 bp, synthetic construct
  misc_feature 1..22: note = chemically synthesized
  source 1..22: mol_type = other DNA
tggaatccagaaggctgacaga

SEQ ID NO: 129268 - DNA, 22 bp, synthetic construct
  misc_feature 1..22: note = chemically synthesized
  source 1..22: mol_type = other DNA
acagataatagaatcaaactac

SEQ ID NO: 129269 - DNA, 22 bp, synthetic construct
  misc_feature 1..22: note = chemically synthesized
  source 1..22: mol_type = other DNA
cacagaaaaaaaaaaaaaagaa

SEQ ID NO: 129270 - DNA, 22 bp, synthetic construct
  misc_feature 1..22: note = chemically synthesized
  source 1..22: mol_type = other DNA
gtattgtcagcacagacttact

SEQ ID NO: 129271 - DNA, 22 bp, synthetic construct
  misc_feature 1..22: note = chemically synthesized
  source 1..22: mol_type = other DNA
tcagcacagacttactcaacaa

SEQ ID NO: 129272 - DNA, 22 bp, synthetic construct
  misc_feature 1..22: note = chemically synthesized
  source 1..22: mol_type = other DNA
actcaacaaacagcaaaaatcc

SEQ ID NO: 129273 - DNA, 22 bp, synthetic construct
  misc_feature 1..22: note = chemically synthesized
  source 1..22: mol_type = other DNA
ctcaacaaacagcaaaaatcct

SEQ ID NO: 129274 - DNA, 22 bp, synthetic construct
  misc_feature 1..22: note = chemically synthesized
  source 1..22: mol_type = other DNA
aacaaacagcaaaaatcctagg

SEQ ID NO: 129275 - DNA, 22 bp, synthetic construct
  misc_feature 1..22: note = chemically synthesized
  source 1..22: mol_type = other DNA
ggatagagaccttcctgaatcg

SEQ ID NO: 129276 - DNA, 22 bp, synthetic construct
  misc_feature 1..22: note = chemically synthesized
  source 1..22: mol_type = other DNA
cctgaatcgttagcgatataag

SEQ ID NO: 129277 - DNA, 22 bp, synthetic construct
  misc_feature 1..22: note = chemically synthesized
  source 1..22: mol_type = other DNA
ctgaatcgttagcgatataagc

SEQ ID NO: 129278 - DNA, 22 bp, synthetic construct
  misc_feature 1..22: note = chemically synthesized
  source 1..22: mol_type = other DNA
aatcgttagcgatataagctta

SEQ ID NO: 129279 - DNA, 22 bp, synthetic construct
  misc_feature 1..22: note = chemically synthesized
  source 1..22: mol_type = other DNA
gcgatataagcttattatactt

SEQ ID NO: 129280 - DNA, 22 bp, synthetic construct
  misc_feature 1..22: note = chemically synthesized
  source 1..22: mol_type = other DNA
attatacttgaatgttgccttc

SEQ ID NO: 129281 - DNA, 22 bp, synthetic construct
  misc_feature 1..22: note = chemically synthesized
  source 1..22: mol_type = other DNA
ttatacttgaatgttgccttcc

SEQ ID NO: 129282 - DNA, 22 bp, synthetic construct
  misc_feature 1..22: note = chemically synthesized
  source 1..22: mol_type = other DNA
tacttgaatgttgccttcctat

SEQ ID NO: 129283 - DNA, 22 bp, synthetic construct
  misc_feature 1..22: note = chemically synthesized
  source 1..22: mol_type = other DNA
gaatgttgccttcctatatgcc

SEQ ID NO: 129284 - DNA, 22 bp, synthetic construct
  misc_feature 1..22: note = chemically synthesized
  source 1..22: mol_type = other DNA
aatgttgccttcctatatgcca

SEQ ID NO: 129285 - DNA, 22 bp, synthetic construct
  misc_feature 1..22: note = chemically synthesized
  source 1..22: mol_type = other DNA
ccttcctatatgccatatgtaa

SEQ ID NO: 129286 - DNA, 22 bp, synthetic construct
  misc_feature 1..22: note = chemically synthesized
  source 1..22: mol_type = other DNA
cctatatgccatatgtaatata

SEQ ID NO: 129287 - DNA, 22 bp, synthetic construct
  misc_feature 1..22: note = chemically synthesized
  source 1..22: mol_type = other DNA
ctatatgccatatgtaatataa

SEQ ID NO: 129288 - DNA, 22 bp, synthetic construct
  misc_feature 1..22: note = chemically synthesized
  source 1..22: mol_type = other DNA
tatgccatatgtaatataaggc

SEQ ID NO: 129289 - DNA, 22 bp, synthetic construct
  misc_feature 1..22: note = chemically synthesized
  source 1..22: mol_type = other DNA
gatatagactgtgatgccagag

SEQ ID NO: 129290 - DNA, 22 bp, synthetic construct
  misc_feature 1..22: note = chemically synthesized
  source 1..22: mol_type = other DNA
tgatgccagagctcagaccaag

SEQ ID NO: 129291 - DNA, 22 bp, synthetic construct
  misc_feature 1..22: note = chemically synthesized
  source 1..22: mol_type = other DNA
agaccaagagccaaggaatagg

SEQ ID NO: 129292 - DNA, 22 bp, synthetic construct
  misc_feature 1..22: note = chemically synthesized
  source 1..22: mol_type = other DNA
tcattttaaaaagttaggtaat

SEQ ID NO: 129293 - DNA, 22 bp, synthetic construct
  misc_feature 1..22: note = chemically synthesized
  source 1..22: mol_type = other DNA
cattttaaaaagttaggtaatt

SEQ ID NO: 129294 - DNA, 22 bp, synthetic construct
  misc_feature 1..22: note = chemically synthesized
  source 1..22: mol_type = other DNA
attttaaaaagttaggtaattt

SEQ ID NO: 129295 - DNA, 22 bp, synthetic construct
  misc_feature 1..22: note = chemically synthesized
  source 1..22: mol_type = other DNA
taaaaagttaggtaatttctaa

SEQ ID NO: 129296 - DNA, 22 bp, synthetic construct
  misc_feature 1..22: note = chemically synthesized
  source 1..22: mol_type = other DNA
aaaaagttaggtaatttctaat

SEQ ID NO: 129297 - DNA, 22 bp, synthetic construct
  misc_feature 1..22: note = chemically synthesized
  source 1..22: mol_type = other DNA
aaaagttaggtaatttctaata

SEQ ID NO: 129298 - DNA, 22 bp, synthetic construct
  misc_feature 1..22: note = chemically synthesized
  source 1..22: mol_type = other DNA
ggtaatttctaataatgtggct

SEQ ID NO: 129299 - DNA, 22 bp, synthetic construct
  misc_feature 1..22: note = chemically synthesized
  source 1..22: mol_type = other DNA
ctaataatgtggctgcctgagt

SEQ ID NO: 129300 - DNA, 22 bp, synthetic construct
  misc_feature 1..22: note = chemically synthesized
  source 1..22: mol_type = other DNA
taataatgtggctgcctgagta

SEQ ID NO: 129301 - DNA, 22 bp, synthetic construct
  misc_feature 1..22: note = chemically synthesized
  source 1..22: mol_type = other DNA
ataatgtggctgcctgagtatt

SEQ ID NO: 129302 - DNA, 22 bp, synthetic construct
  misc_feature 1..22: note = chemically synthesized
  source 1..22: mol_type = other DNA
cctgagtattttcagcacagat

SEQ ID NO: 129303 - DNA, 22 bp, synthetic construct
  misc_feature 1..22: note = chemically synthesized
  source 1..22: mol_type = other DNA
agtattttcagcacagatattc

SEQ ID NO: 129304 - DNA, 22 bp, synthetic construct
  misc_feature 1..22: note = chemically synthesized
  source 1..22: mol_type = other DNA
tcagcacagatattctaataaa

SEQ ID NO: 129305 - DNA, 22 bp, synthetic construct
  misc_feature 1..22: note = chemically synthesized
  source 1..22: mol_type = other DNA
cagcacagatattctaataaat

SEQ ID NO: 129306 - DNA, 22 bp, synthetic construct
  misc_feature 1..22: note = chemically synthesized
  source 1..22: mol_type = other DNA
agcacagatattctaataaata

SEQ ID NO: 129307 - DNA, 22 bp, synthetic construct
  misc_feature 1..22: note = chemically synthesized
  source 1..22: mol_type = other DNA
taataaatattgtgttatgtga

SEQ ID NO: 129308 - DNA, 22 bp, synthetic construct
  misc_feature 1..22: note = chemically synthesized
  source 1..22: mol_type = other DNA
ataaatattgtgttatgtgatt

SEQ ID NO: 129309 - DNA, 22 bp, synthetic construct
  misc_feature 1..22: note = chemically synthesized
  source 1..22: mol_type = other DNA
tgttatgtgatttagaaagaga

SEQ ID NO: 129310 - DNA, 22 bp, synthetic construct
  misc_feature 1..22: note = chemically synthesized
  source 1..22: mol_type = other DNA
tgtgatttagaaagagacaggc

SEQ ID NO: 129311 - DNA, 22 bp, synthetic construct
  misc_feature 1..22: note = chemically synthesized
  source 1..22: mol_type = other DNA
agaaagagacaggcactcagcg

SEQ ID NO: 129312 - DNA, 22 bp, synthetic construct
  misc_feature 1..22: note = chemically synthesized
  source 1..22: mol_type = other DNA
gaaagagacaggcactcagcgg

SEQ ID NO: 129313 - DNA, 22 bp, synthetic construct
  misc_feature 1..22: note = chemically synthesized
  source 1..22: mol_type = other DNA
agcggatgacccttgtcaggaa

SEQ ID NO: 129314 - DNA, 22 bp, synthetic construct
  misc_feature 1..22: note = chemically synthesized
  source 1..22: mol_type = other DNA
gtcaggaaacactgcatcaaag

SEQ ID NO: 129315 - DNA, 22 bp, synthetic construct
  misc_feature 1..22: note = chemically synthesized
  source 1..22: mol_type = other DNA
tcaggaaacactgcatcaaaga

SEQ ID NO: 129316 - DNA, 22 bp, synthetic construct
  misc_feature 1..22: note = chemically synthesized
  source 1..22: mol_type = other DNA
catcaaagaaggcttttattac

SEQ ID NO: 129317 - DNA, 22 bp, synthetic construct
  misc_feature 1..22: note = chemically synthesized
  source 1..22: mol_type = other DNA
ttattacaggagatggaggtcc

SEQ ID NO: 129318 - DNA, 22 bp, synthetic construct
  misc_feature 1..22: note = chemically synthesized
  source 1..22: mol_type = other DNA
tattacaggagatggaggtcct

SEQ ID NO: 129319 - DNA, 22 bp, synthetic construct
  misc_feature 1..22: note = chemically synthesized
  source 1..22: mol_type = other DNA
attacaggagatggaggtcctt

SEQ ID NO: 129320 - DNA, 22 bp, synthetic construct
  misc_feature 1..22: note = chemically synthesized
  source 1..22: mol_type = other DNA
ttacaggagatggaggtccttc

SEQ ID NO: 129321 - DNA, 22 bp, synthetic construct
  misc_feature 1..22: note = chemically synthesized
  source 1..22: mol_type = other DNA
caggagatggaggtccttccca

SEQ ID NO: 129322 - DNA, 22 bp, synthetic construct
  misc_feature 1..22: note = chemically synthesized
  source 1..22: mol_type = other DNA
cccaatctgagattatgctgct

SEQ ID NO: 129323 - DNA, 22 bp, synthetic construct
  misc_feature 1..22: note = chemically synthesized
  source 1..22: mol_type = other DNA
ccaatctgagattatgctgctg

SEQ ID NO: 129324 - DNA, 22 bp, synthetic construct
  misc_feature 1..22: note = chemically synthesized
  source 1..22: mol_type = other DNA
agattatgctgctgtgacatga

SEQ ID NO: 129325 - DNA, 22 bp, synthetic construct
  misc_feature 1..22: note = chemically synthesized
  source 1..22: mol_type = other DNA
tgctgctgtgacatgatacttt

SEQ ID NO: 129326 - DNA, 22 bp, synthetic construct
  misc_feature 1..22: note = chemically synthesized
  source 1..22: mol_type = other DNA
ctgtgacatgatactttacttc

SEQ ID NO: 129327 - DNA, 22 bp, synthetic construct
  misc_feature 1..22: note = chemically synthesized
  source 1..22: mol_type = other DNA
tgacatgatactttacttcaca

SEQ ID NO: 129328 - DNA, 22 bp, synthetic construct
  misc_feature 1..22: note = chemically synthesized
  source 1..22: mol_type = other DNA
tacttcacaggcaatacagcag

SEQ ID NO: 129329 - DNA, 22 bp, synthetic construct
  misc_feature 1..22: note = chemically synthesized
  source 1..22: mol_type = other DNA
acttcacaggcaatacagcagg

SEQ ID NO: 129330 - DNA, 22 bp, synthetic construct
  misc_feature 1..22: note = chemically synthesized
  source 1..22: mol_type = other DNA
cttcacaggcaatacagcagga

SEQ ID NO: 129331 - DNA, 22 bp, synthetic construct
  misc_feature 1..22: note = chemically synthesized
  source 1..22: mol_type = other DNA
cacaggcaatacagcaggaaat

SEQ ID NO: 129332 - DNA, 22 bp, synthetic construct
  misc_feature 1..22: note = chemically synthesized
  source 1..22: mol_type = other DNA
acaggcaatacagcaggaaata

SEQ ID NO: 129333 - DNA, 22 bp, synthetic construct
  misc_feature 1..22: note = chemically synthesized
  source 1..22: mol_type = other DNA
agaaaatacatgaatgagagac

SEQ ID NO: 129334 - DNA, 22 bp, synthetic construct
  misc_feature 1..22: note = chemically synthesized
  source 1..22: mol_type = other DNA
gaaaatacatgaatgagagaca

SEQ ID NO: 129335 - DNA, 22 bp, synthetic construct
  misc_feature 1..22: note = chemically synthesized
  source 1..22: mol_type = other DNA
tttaaggaaatagaagatattt

SEQ ID NO: 129336 - DNA, 22 bp, synthetic construct
  misc_feature 1..22: note = chemically synthesized
  source 1..22: mol_type = other DNA
aaggaaatagaagatattttgg

SEQ ID NO: 129337 - DNA, 22 bp, synthetic construct
  misc_feature 1..22: note = chemically synthesized
  source 1..22: mol_type = other DNA
aggaaatagaagatattttggg

SEQ ID NO: 129338 - DNA, 22 bp, synthetic construct
  misc_feature 1..22: note = chemically synthesized
  source 1..22: mol_type = other DNA
tgggtgccctgcctacttcctc

SEQ ID NO: 129339 - DNA, 22 bp, synthetic construct
  misc_feature 1..22: note = chemically synthesized
  source 1..22: mol_type = other DNA
gggtgccctgcctacttcctcc

SEQ ID NO: 129340 - DNA, 22 bp, synthetic construct
  misc_feature 1..22: note = chemically synthesized
  source 1..22: mol_type = other DNA
ggtgccctgcctacttcctccc

SEQ ID NO: 129341 - DNA, 22 bp, synthetic construct
  misc_feature 1..22: note = chemically synthesized
  source 1..22: mol_type = other DNA
cctacttcctcccagtgcccct

SEQ ID NO: 129342 - DNA, 22 bp, synthetic construct
  misc_feature 1..22: note = chemically synthesized
  source 1..22: mol_type = other DNA
cttcctcccagtgcccctaagc

SEQ ID NO: 129343 - DNA, 22 bp, synthetic construct
  misc_feature 1..22: note = chemically synthesized
  source 1..22: mol_type = other DNA
cctcccagtgcccctaagcttg

SEQ ID NO: 129344 - DNA, 22 bp, synthetic construct
  misc_feature 1..22: note = chemically synthesized
  source 1..22: mol_type = other DNA
ctcccagtgcccctaagcttgg

SEQ ID NO: 129345 - DNA, 22 bp, synthetic construct
  misc_feature 1..22: note = chemically synthesized
  source 1..22: mol_type = other DNA
ccagtgcccctaagcttggtga

SEQ ID NO: 129346 - DNA, 22 bp, synthetic construct
  misc_feature 1..22: note = chemically synthesized
  source 1..22: mol_type = other DNA
agcttggtgactttgagtgttg

SEQ ID NO: 129347 - DNA, 22 bp, synthetic construct
  misc_feature 1..22: note = chemically synthesized
  source 1..22: mol_type = other DNA
ggtgactttgagtgttggctga

SEQ ID NO: 129348 - DNA, 22 bp, synthetic construct
  misc_feature 1..22: note = chemically synthesized
  source 1..22: mol_type = other DNA
gtgactttgagtgttggctgat

SEQ ID NO: 129349 - DNA, 22 bp, synthetic construct
  misc_feature 1..22: note = chemically synthesized
  source 1..22: mol_type = other DNA
tgagtgttggctgataatagtt

SEQ ID NO: 129350 - DNA, 22 bp, synthetic construct
  misc_feature 1..22: note = chemically synthesized
  source 1..22: mol_type = other DNA
gagtgttggctgataatagttg

SEQ ID NO: 129351 - DNA, 22 bp, synthetic construct
  misc_feature 1..22: note = chemically synthesized
  source 1..22: mol_type = other DNA
agtgttggctgataatagttgt

SEQ ID NO: 129352 - DNA, 22 bp, synthetic construct
  misc_feature 1..22: note = chemically synthesized
  source 1..22: mol_type = other DNA
gctgataatagttgttcccatt

SEQ ID NO: 129353 - DNA, 22 bp, synthetic construct
  misc_feature 1..22: note = chemically synthesized
  source 1..22: mol_type = other DNA
ataatagttgttcccattctct

SEQ ID NO: 129354 - DNA, 22 bp, synthetic construct
  misc_feature 1..22: note = chemically synthesized
  source 1..22: mol_type = other DNA
ttcccattctctggaggcttat

SEQ ID NO: 129355 - DNA, 22 bp, synthetic construct
  misc_feature 1..22: note = chemically synthesized
  source 1..22: mol_type = other DNA
ccattctctggaggcttatcct

SEQ ID NO: 129356 - DNA, 22 bp, synthetic construct
  misc_feature 1..22: note = chemically synthesized
  source 1..22: mol_type = other DNA
tctggaggcttatcctccacca

SEQ ID NO: 129357 - DNA, 22 bp, synthetic construct
  misc_feature 1..22: note = chemically synthesized
  source 1..22: mol_type = other DNA
tggaggcttatcctccaccaac

SEQ ID NO: 129358 - DNA, 22 bp, synthetic construct
  misc_feature 1..22: note = chemically synthesized
  source 1..22: mol_type = other DNA
gaggcttatcctccaccaacag

SEQ ID NO: 129359 - DNA, 22 bp, synthetic construct
  misc_feature 1..22: note = chemically synthesized
  source 1..22: mol_type = other DNA
atcctccaccaacagtgtcact

SEQ ID NO: 129360 - DNA, 22 bp, synthetic construct
  misc_feature 1..22: note = chemically synthesized
  source 1..22: mol_type = other DNA
tcctccaccaacagtgtcactt

SEQ ID NO: 129361 - DNA, 22 bp, synthetic construct
  misc_feature 1..22: note = chemically synthesized
  source 1..22: mol_type = other DNA
caccaacagtgtcacttcacat

SEQ ID NO: 129362 - DNA, 22 bp, synthetic construct
  misc_feature 1..22: note = chemically synthesized
  source 1..22: mol_type = other DNA
cacatgagattttatcccaact

SEQ ID NO: 129363 - DNA, 22 bp, synthetic construct
  misc_feature 1..22: note = chemically synthesized
  source 1..22: mol_type = other DNA
acatgagattttatcccaactc

SEQ ID NO: 129364 - DNA, 22 bp, synthetic construct
  misc_feature 1..22: note = chemically synthesized
  source 1..22: mol_type = other DNA
tatcccaactctggggcagtct

SEQ ID NO: 129365 - DNA, 22 bp, synthetic construct
  misc_feature 1..22: note = chemically synthesized
  source 1..22: mol_type = other DNA
atcccaactctggggcagtctg

SEQ ID NO: 129366 - DNA, 22 bp, synthetic construct
  misc_feature 1..22: note = chemically synthesized
  source 1..22: mol_type = other DNA
tcccaactctggggcagtctgc

SEQ ID NO: 129367 - DNA, 22 bp, synthetic construct
  misc_feature 1..22: note = chemically synthesized
  source 1..22: mol_type = other DNA
tggggcagtctgcaggaaatta

SEQ ID NO: 129368 - DNA, 22 bp, synthetic construct
  misc_feature 1..22: note = chemically synthesized
  source 1..22: mol_type = other DNA
gggcagtctgcaggaaattact

SEQ ID NO: 129369 - DNA, 22 bp, synthetic construct
  misc_feature 1..22: note = chemically synthesized
  source 1..22: mol_type = other DNA
caggaaattactttatatctgt

SEQ ID NO: 129370 - DNA, 22 bp, synthetic construct
  misc_feature 1..22: note = chemically synthesized
  source 1..22: mol_type = other DNA
ctttatatctgttctaagataa

SEQ ID NO: 129371 - DNA, 22 bp, synthetic construct
  misc_feature 1..22: note = chemically synthesized
  source 1..22: mol_type = other DNA
tatatctgttctaagataagtg

SEQ ID NO: 129372 - DNA, 22 bp, synthetic construct
  misc_feature 1..22: note = chemically synthesized
  source 1..22: mol_type = other DNA
atatctgttctaagataagtga

SEQ ID NO: 129373 - DNA, 22 bp, synthetic construct
  misc_feature 1..22: note = chemically synthesized
  source 1..22: mol_type = other DNA
tatctgttctaagataagtgat

SEQ ID NO: 129374 - DNA, 22 bp, synthetic construct
  misc_feature 1..22: note = chemically synthesized
  source 1..22: mol_type = other DNA
ttctaagataagtgatgtttcc

SEQ ID NO: 129375 - DNA, 22 bp, synthetic construct
  misc_feature 1..22: note = chemically synthesized
  source 1..22: mol_type = other DNA
taagataagtgatgtttccagg

SEQ ID NO: 129376 - DNA, 22 bp, synthetic construct
  misc_feature 1..22: note = chemically synthesized
  source 1..22: mol_type = other DNA
agataagtgatgtttccaggaa

SEQ ID NO: 129377 - DNA, 22 bp, synthetic construct
  misc_feature 1..22: note = chemically synthesized
  source 1..22: mol_type = other DNA
ccaggaatagagtcatatttat

SEQ ID NO: 129378 - DNA, 22 bp, synthetic construct
  misc_feature 1..22: note = chemically synthesized
  source 1..22: mol_type = other DNA
caggaatagagtcatatttatg

SEQ ID NO: 129379 - DNA, 22 bp, synthetic construct
  misc_feature 1..22: note = chemically synthesized
  source 1..22: mol_type = other DNA
atggggcagaagattcgtgtac

SEQ ID NO: 129380 - DNA, 22 bp, synthetic construct
  misc_feature 1..22: note = chemically synthesized
  source 1..22: mol_type = other DNA
tggggcagaagattcgtgtact

SEQ ID NO: 129381 - DNA, 22 bp, synthetic construct
  misc_feature 1..22: note = chemically synthesized
  source 1..22: mol_type = other DNA
gtgtactgccagtgagagggtc

SEQ ID NO: 129382 - DNA, 22 bp, synthetic construct
  misc_feature 1..22: note = chemically synthesized
  source 1..22: mol_type = other DNA
ccagtgagagggtcaatatacc

SEQ ID NO: 129383 - DNA, 22 bp, synthetic construct
  misc_feature 1..22: note = chemically synthesized
  source 1..22: mol_type = other DNA
ctaatgaaatgggagggcagcc

SEQ ID NO: 129384 - DNA, 22 bp, synthetic construct
  misc_feature 1..22: note = chemically synthesized
  source 1..22: mol_type = other DNA
atgaaatgggagggcagcctga

SEQ ID NO: 129385 - DNA, 22 bp, synthetic construct
  misc_feature 1..22: note = chemically synthesized
  source 1..22: mol_type = other DNA
aaattaaatcagttatctcagg

SEQ ID NO: 129386 - DNA, 22 bp, synthetic construct
  misc_feature 1..22: note = chemically synthesized
  source 1..22: mol_type = other DNA
aatcagttatctcagggtctta

SEQ ID NO: 129387 - DNA, 22 bp, synthetic construct
  misc_feature 1..22: note = chemically synthesized
  source 1..22: mol_type = other DNA
tctcagggtcttactacctcac

SEQ ID NO: 129388 - DNA, 22 bp, synthetic construct
  misc_feature 1..22: note = chemically synthesized
  source 1..22: mol_type = other DNA
agggtcttactacctcacctca

SEQ ID NO: 129389 - DNA, 22 bp, synthetic construct
  misc_feature 1..22: note = chemically synthesized
  source 1..22: mol_type = other DNA
actacctcacctcattttaagt

SEQ ID NO: 129390 - DNA, 22 bp, synthetic construct
  misc_feature 1..22: note = chemically synthesized
  source 1..22: mol_type = other DNA
ctacctcacctcattttaagtt

SEQ ID NO: 129391 - DNA, 22 bp, synthetic construct
  misc_feature 1..22: note = chemically synthesized
  source 1..22: mol_type = other DNA
cctcacctcattttaagttcaa

SEQ ID NO: 129392 - DNA, 22 bp, synthetic construct
  misc_feature 1..22: note = chemically synthesized
  source 1..22: mol_type = other DNA
acctcattttaagttcaaagca

SEQ ID NO: 129393 - DNA, 22 bp, synthetic construct
  misc_feature 1..22: note = chemically synthesized
  source 1..22: mol_type = other DNA
attttaagttcaaagcatggct

SEQ ID NO: 129394 - DNA, 22 bp, synthetic construct
  misc_feature 1..22: note = chemically synthesized
  source 1..22: mol_type = other DNA
taagttcaaagcatggctcccc

SEQ ID NO: 129395 - DNA, 22 bp, synthetic construct
  misc_feature 1..22: note = chemically synthesized
  source 1..22: mol_type = other DNA
aagttcaaagcatggctcccct

SEQ ID NO: 129396 - DNA, 22 bp, synthetic construct
  misc_feature 1..22: note = chemically synthesized
  source 1..22: mol_type = other DNA
agttcaaagcatggctccccta

SEQ ID NO: 129397 - DNA, 22 bp, synthetic construct
  misc_feature 1..22: note = chemically synthesized
  source 1..22: mol_type = other DNA
aaagcatggctcccctaaatca

SEQ ID NO: 129398 - DNA, 22 bp, synthetic construct
  misc_feature 1..22: note = chemically synthesized
  source 1..22: mol_type = other DNA
ccctaaatcaatccagacctaa

SEQ ID NO: 129399 - DNA, 22 bp, synthetic construct
  misc_feature 1..22: note = chemically synthesized
  source 1..22: mol_type = other DNA
aatcaatccagacctaaatttt

SEQ ID NO: 129400 - DNA, 22 bp, synthetic construct
  misc_feature 1..22: note = chemically synthesized
  source 1..22: mol_type = other DNA
aattttaacttagtacaaagag

SEQ ID NO: 129401 - DNA, 22 bp, synthetic construct
  misc_feature 1..22: note = chemically synthesized
  source 1..22: mol_type = other DNA
taacttagtacaaagaggacac

SEQ ID NO: 129402 - DNA, 22 bp, synthetic construct
  misc_feature 1..22: note = chemically synthesized
  source 1..22: mol_type = other DNA
aacttagtacaaagaggacaca

SEQ ID NO: 129403 - DNA, 22 bp, synthetic construct
  misc_feature 1..22: note = chemically synthesized
  source 1..22: mol_type = other DNA
acttagtacaaagaggacacac

SEQ ID NO: 129404 - DNA, 22 bp, synthetic construct
  misc_feature 1..22: note = chemically synthesized
  source 1..22: mol_type = other DNA
agtacaaagaggacacacaaat

SEQ ID NO: 129405 - DNA, 22 bp, synthetic construct
  misc_feature 1..22: note = chemically synthesized
  source 1..22: mol_type = other DNA
gtacaaagaggacacacaaatt

SEQ ID NO: 129406 - DNA, 22 bp, synthetic construct
  misc_feature 1..22: note = chemically synthesized
  source 1..22: mol_type = other DNA
tcagacttaagccatttccaga

SEQ ID NO: 129407 - DNA, 22 bp, synthetic construct
  misc_feature 1..22: note = chemically synthesized
  source 1..22: mol_type = other DNA
cagacttaagccatttccagag

SEQ ID NO: 129408 - DNA, 22 bp, synthetic construct
  misc_feature 1..22: note = chemically synthesized
  source 1..22: mol_type = other DNA
agacttaagccatttccagaga

SEQ ID NO: 129409 - DNA, 22 bp, synthetic construct
  misc_feature 1..22: note = chemically synthesized
  source 1..22: mol_type = other DNA
aagccatttccagagactgact

SEQ ID NO: 129410 - DNA, 22 bp, synthetic construct
  misc_feature 1..22: note = chemically synthesized
  source 1..22: mol_type = other DNA
agccatttccagagactgactt

SEQ ID NO: 129411 - DNA, 22 bp, synthetic construct
  misc_feature 1..22: note = chemically synthesized
  source 1..22: mol_type = other DNA
ccagagactgacttttaatcat

SEQ ID NO: 129412 - DNA, 22 bp, synthetic construct
  misc_feature 1..22: note = chemically synthesized
  source 1..22: mol_type = other DNA
cagagactgacttttaatcatg

SEQ ID NO: 129413 - DNA, 22 bp, synthetic construct
  misc_feature 1..22: note = chemically synthesized
  source 1..22: mol_type = other DNA
acttttaatcatgatttcctac

SEQ ID NO: 129414 - DNA, 22 bp, synthetic construct
  misc_feature 1..22: note = chemically synthesized
  source 1..22: mol_type = other DNA
ttaatcatgatttcctactact

SEQ ID NO: 129415 - DNA, 22 bp, synthetic construct
  misc_feature 1..22: note = chemically synthesized
  source 1..22: mol_type = other DNA
taatcatgatttcctactacta

SEQ ID NO: 129416 - DNA, 22 bp, synthetic construct
  misc_feature 1..22: note = chemically synthesized
  source 1..22: mol_type = other DNA
aatcatgatttcctactactat

SEQ ID NO: 129417 - DNA, 22 bp, synthetic construct
  misc_feature 1..22: note = chemically synthesized
  source 1..22: mol_type = other DNA
atcatgatttcctactactatt

SEQ ID NO: 129418 - DNA, 22 bp, synthetic construct
  misc_feature 1..22: note = chemically synthesized
  source 1..22: mol_type = other DNA
cctactactattctgcttacat

SEQ ID NO: 129419 - DNA, 22 bp, synthetic construct
  misc_feature 1..22: note = chemically synthesized
  source 1..22: mol_type = other DNA
ctactactattctgcttacatt

SEQ ID NO: 129420 - DNA, 22 bp, synthetic construct
  misc_feature 1..22: note = chemically synthesized
  source 1..22: mol_type = other DNA
ctactattctgcttacatttag

SEQ ID NO: 129421 - DNA, 22 bp, synthetic construct
  misc_feature 1..22: note = chemically synthesized
  source 1..22: mol_type = other DNA
ctattctgcttacatttaggaa

SEQ ID NO: 129422 - DNA, 22 bp, synthetic construct
  misc_feature 1..22: note = chemically synthesized
  source 1..22: mol_type = other DNA
ttctgcttacatttaggaagac

SEQ ID NO: 129423 - DNA, 22 bp, synthetic construct
  misc_feature 1..22: note = chemically synthesized
  source 1..22: mol_type = other DNA
tgcttacatttaggaagaccta

SEQ ID NO: 129424 - DNA, 22 bp, synthetic construct
  misc_feature 1..22: note = chemically synthesized
  source 1..22: mol_type = other DNA
cttacatttaggaagacctatg

SEQ ID NO: 129425 - DNA, 22 bp, synthetic construct
  misc_feature 1..22: note = chemically synthesized
  source 1..22: mol_type = other DNA
acatttaggaagacctatgagc

SEQ ID NO: 129426 - DNA, 22 bp, synthetic construct
  misc_feature 1..22: note = chemically synthesized
  source 1..22: mol_type = other DNA
catttaggaagacctatgagca

SEQ ID NO: 129427 - DNA, 22 bp, synthetic construct
  misc_feature 1..22: note = chemically synthesized
  source 1..22: mol_type = other DNA
aggaagacctatgagcagaatg

SEQ ID NO: 129428 - DNA, 22 bp, synthetic construct
  misc_feature 1..22: note = chemically synthesized
  source 1..22: mol_type = other DNA
ggaagacctatgagcagaatgc

SEQ ID NO: 129429 - DNA, 22 bp, synthetic construct
  misc_feature 1..22: note = chemically synthesized
  source 1..22: mol_type = other DNA
tgagcagaatgcagttcaggag

SEQ ID NO: 129430 - DNA, 22 bp, synthetic construct
  misc_feature 1..22: note = chemically synthesized
  source 1..22: mol_type = other DNA
aggaggaacttaactgatgtga

SEQ ID NO: 129431 - DNA, 22 bp, synthetic construct
  misc_feature 1..22: note = chemically synthesized
  source 1..22: mol_type = other DNA
aactgatgtgaaatgtcaggca

SEQ ID NO: 129432 - DNA, 22 bp, synthetic construct
  misc_feature 1..22: note = chemically synthesized
  source 1..22: mol_type = other DNA
actgatgtgaaatgtcaggcac

SEQ ID NO: 129433 - DNA, 22 bp, synthetic construct
  misc_feature 1..22: note = chemically synthesized
  source 1..22: mol_type = other DNA
atgtgaaatgtcaggcaccaaa

SEQ ID NO: 129434 - DNA, 22 bp, synthetic construct
  misc_feature 1..22: note = chemically synthesized
  source 1..22: mol_type = other DNA
atggttcaccacattgcaccca

SEQ ID NO: 129435 - DNA, 22 bp, synthetic construct
  misc_feature 1..22: note = chemically synthesized
  source 1..22: mol_type = other DNA
accacattgcacccatactcat

SEQ ID NO: 129436 - DNA, 22 bp, synthetic construct
  misc_feature 1..22: note = chemically synthesized
  source 1..22: mol_type = other DNA
cacccatactcattttaaaatc

SEQ ID NO: 129437 - DNA, 22 bp, synthetic construct
  misc_feature 1..22: note = chemically synthesized
  source 1..22: mol_type = other DNA
attttaaaatctcatagttggg

SEQ ID NO: 129438 - DNA, 22 bp, synthetic construct
  misc_feature 1..22: note = chemically synthesized
  source 1..22: mol_type = other DNA
taaaatctcatagttgggctaa

SEQ ID NO: 129439 - DNA, 22 bp, synthetic construct
  misc_feature 1..22: note = chemically synthesized
  source 1..22: mol_type = other DNA
aaaatctcatagttgggctaag

SEQ ID NO: 129440 - DNA, 22 bp, synthetic construct
  misc_feature 1..22: note = chemically synthesized
  source 1..22: mol_type = other DNA
aaatctcatagttgggctaagt

SEQ ID NO: 129441 - DNA, 22 bp, synthetic construct
  misc_feature 1..22: note = chemically synthesized
  source 1..22: mol_type = other DNA
atagttgggctaagttccagga

SEQ ID NO: 129442 - DNA, 22 bp, synthetic construct
  misc_feature 1..22: note = chemically synthesized
  source 1..22: mol_type = other DNA
ggctaagttccaggataaattt

SEQ ID NO: 129443 - DNA, 22 bp, synthetic construct
  misc_feature 1..22: note = chemically synthesized
  source 1..22: mol_type = other DNA
agttccaggataaatttaggat

SEQ ID NO: 129444 - DNA, 22 bp, synthetic construct
  misc_feature 1..22: note = chemically synthesized
  source 1..22: mol_type = other DNA
caggataaatttaggatttaag

SEQ ID NO: 129445 - DNA, 22 bp, synthetic construct
  misc_feature 1..22: note = chemically synthesized
  source 1..22: mol_type = other DNA
aggatttaagactgatgagaca

SEQ ID NO: 129446 - DNA, 22 bp, synthetic construct
  misc_feature 1..22: note = chemically synthesized
  source 1..22: mol_type = other DNA
ggatttaagactgatgagacaa

SEQ ID NO: 129447 - DNA, 22 bp, synthetic construct
  misc_feature 1..22: note = chemically synthesized
  source 1..22: mol_type = other DNA
aagactgatgagacaatagaaa

SEQ ID NO: 129448 - DNA, 22 bp, synthetic construct
  misc_feature 1..22: note = chemically synthesized
  source 1..22: mol_type = other DNA
agactgatgagacaatagaaat

SEQ ID NO: 129449 - DNA, 22 bp, synthetic construct
  misc_feature 1..22: note = chemically synthesized
  source 1..22: mol_type = other DNA
atgagacaatagaaattctcag

SEQ ID NO: 129450 - DNA, 22 bp, synthetic construct
  misc_feature 1..22: note = chemically synthesized
  source 1..22: mol_type = other DNA
tcagatccttatttctctgaca

SEQ ID NO: 129451 - DNA, 22 bp, synthetic construct
  misc_feature 1..22: note = chemically synthesized
  source 1..22: mol_type = other DNA
agatccttatttctctgacaga

SEQ ID NO: 129452 - DNA, 22 bp, synthetic construct
  misc_feature 1..22: note = chemically synthesized
  source 1..22: mol_type = other DNA
atttctctgacagactatgaga

SEQ ID NO: 129453 - DNA, 22 bp, synthetic construct
  misc_feature 1..22: note = chemically synthesized
  source 1..22: mol_type = other DNA
tttctctgacagactatgagat

SEQ ID NO: 129454 - DNA, 22 bp, synthetic construct
  misc_feature 1..22: note = chemically synthesized
  source 1..22: mol_type = other DNA
ctctgacagactatgagatgat

SEQ ID NO: 129455 - DNA, 22 bp, synthetic construct
  misc_feature 1..22: note = chemically synthesized
  source 1..22: mol_type = other DNA
tctgacagactatgagatgatt

SEQ ID NO: 129456 - DNA, 22 bp, synthetic construct
  misc_feature 1..22: note = chemically synthesized
  source 1..22: mol_type = other DNA
tgacagactatgagatgattgt

SEQ ID NO: 129457 - DNA, 22 bp, synthetic construct
  misc_feature 1..22: note = chemically synthesized
  source 1..22: mol_type = other DNA
acagactatgagatgattgtat

SEQ ID NO: 129458 - DNA, 22 bp, synthetic construct
  misc_feature 1..22: note = chemically synthesized
  source 1..22: mol_type = other DNA
tgagatgattgtattcaagtac

SEQ ID NO: 129459 - DNA, 22 bp, synthetic construct
  misc_feature 1..22: note = chemically synthesized
  source 1..22: mol_type = other DNA
tattcaagtacaaattgtcaga

SEQ ID NO: 129460 - DNA, 22 bp, synthetic construct
  misc_feature 1..22: note = chemically synthesized
  source 1..22: mol_type = other DNA
aagtacaaattgtcagacaaag

SEQ ID NO: 129461 - DNA, 22 bp, synthetic construct
  misc_feature 1..22: note = chemically synthesized
  source 1..22: mol_type = other DNA
tcagacaaagccagggattaaa

SEQ ID NO: 129462 - DNA, 22 bp, synthetic construct
  misc_feature 1..22: note = chemically synthesized
  source 1..22: mol_type = other DNA
aagaatacctccaccatgtccc

SEQ ID NO: 129463 - DNA, 22 bp, synthetic construct
  misc_feature 1..22: note = chemically synthesized
  source 1..22: mol_type = other DNA
caccatgtcccctttttaacat

SEQ ID NO: 129464 - DNA, 22 bp, synthetic construct
  misc_feature 1..22: note = chemically synthesized
  source 1..22: mol_type = other DNA
tttaacattactacaggacact

SEQ ID NO: 129465 - DNA, 22 bp, synthetic construct
  misc_feature 1..22: note = chemically synthesized
  source 1..22: mol_type = other DNA
ttaacattactacaggacactt

SEQ ID NO: 129466 - DNA, 22 bp, synthetic construct
  misc_feature 1..22: note = chemically synthesized
  source 1..22: mol_type = other DNA
taacattactacaggacactta

SEQ ID NO: 129467 - DNA, 22 bp, synthetic construct
  misc_feature 1..22: note = chemically synthesized
  source 1..22: mol_type = other DNA
aacattactacaggacacttaa

SEQ ID NO: 129468 - DNA, 22 bp, synthetic construct
  misc_feature 1..22: note = chemically synthesized
  source 1..22: mol_type = other DNA
acattactacaggacacttaaa

SEQ ID NO: 129469 - DNA, 22 bp, synthetic construct
  misc_feature 1..22: note = chemically synthesized
  source 1..22: mol_type = other DNA
ctacaggacacttaaataaaat

SEQ ID NO: 129470 - DNA, 22 bp, synthetic construct
  misc_feature 1..22: note = chemically synthesized
  source 1..22: mol_type = other DNA
caggacacttaaataaaatttt

SEQ ID NO: 129471 - DNA, 22 bp, synthetic construct
  misc_feature 1..22: note = chemically synthesized
  source 1..22: mol_type = other DNA
aaataaaattttttaaacttga

SEQ ID NO: 129472 - DNA, 22 bp, synthetic construct
  misc_feature 1..22: note = chemically synthesized
  source 1..22: mol_type = other DNA
aataaaattttttaaacttgat

SEQ ID NO: 129473 - DNA, 22 bp, synthetic construct
  misc_feature 1..22: note = chemically synthesized
  source 1..22: mol_type = other DNA
tttaaacttgatttatattgct

SEQ ID NO: 129474 - DNA, 22 bp, synthetic construct
  misc_feature 1..22: note = chemically synthesized
  source 1..22: mol_type = other DNA
ttaaacttgatttatattgctc

SEQ ID NO: 129475 - DNA, 22 bp, synthetic construct
  misc_feature 1..22: note = chemically synthesized
  source 1..22: mol_type = other DNA
taaacttgatttatattgctcc

SEQ ID NO: 129476 - DNA, 22 bp, synthetic construct
  misc_feature 1..22: note = chemically synthesized
  source 1..22: mol_type = other DNA
aaacttgatttatattgctcca

SEQ ID NO: 129477 - DNA, 22 bp, synthetic construct
  misc_feature 1..22: note = chemically synthesized
  source 1..22: mol_type = other DNA
aacttgatttatattgctccag

SEQ ID NO: 129478 - DNA, 22 bp, synthetic construct
  misc_feature 1..22: note = chemically synthesized
  source 1..22: mol_type = other DNA
gatttatattgctccagaagca

SEQ ID NO: 129479 - DNA, 22 bp, synthetic construct
  misc_feature 1..22: note = chemically synthesized
  source 1..22: mol_type = other DNA
atttatattgctccagaagcag

SEQ ID NO: 129480 - DNA, 22 bp, synthetic construct
  misc_feature 1..22: note = chemically synthesized
  source 1..22: mol_type = other DNA
atattgctccagaagcagtaac

SEQ ID NO: 129481 - DNA, 22 bp, synthetic construct
  misc_feature 1..22: note = chemically synthesized
  source 1..22: mol_type = other DNA
tattgctccagaagcagtaact

SEQ ID NO: 129482 - DNA, 22 bp, synthetic construct
  misc_feature 1..22: note = chemically synthesized
  source 1..22: mol_type = other DNA
ctccagaagcagtaactctgat

SEQ ID NO: 129483 - DNA, 22 bp, synthetic construct
  misc_feature 1..22: note = chemically synthesized
  source 1..22: mol_type = other DNA
cagaagcagtaactctgattct

SEQ ID NO: 129484 - DNA, 22 bp, synthetic construct
  misc_feature 1..22: note = chemically synthesized
  source 1..22: mol_type = other DNA
tgattcttgggcaagacttacc

SEQ ID NO: 129485 - DNA, 22 bp, synthetic construct
  misc_feature 1..22: note = chemically synthesized
  source 1..22: mol_type = other DNA
attcttgggcaagacttaccaa

SEQ ID NO: 129486 - DNA, 22 bp, synthetic construct
  misc_feature 1..22: note = chemically synthesized
  source 1..22: mol_type = other DNA
ttgggcaagacttaccaagaga

SEQ ID NO: 129487 - DNA, 22 bp, synthetic construct
  misc_feature 1..22: note = chemically synthesized
  source 1..22: mol_type = other DNA
gggcaagacttaccaagagaca

SEQ ID NO: 129488 - DNA, 22 bp, synthetic construct
  misc_feature 1..22: note = chemically synthesized
  source 1..22: mol_type = other DNA
ggcaagacttaccaagagacag

SEQ ID NO: 129489 - DNA, 22 bp, synthetic construct
  misc_feature 1..22: note = chemically synthesized
  source 1..22: mol_type = other DNA
accaagagacagaaaacaagct

SEQ ID NO: 129490 - DNA, 22 bp, synthetic construct
  misc_feature 1..22: note = chemically synthesized
  source 1..22: mol_type = other DNA
ccaagagacagaaaacaagctt

SEQ ID NO: 129491 - DNA, 22 bp, synthetic construct
  misc_feature 1..22: note = chemically synthesized
  source 1..22: mol_type = other DNA
actgtttgaaagaacttatcag

SEQ ID NO: 129492 - DNA, 22 bp, synthetic construct
  misc_feature 1..22: note = chemically synthesized
  source 1..22: mol_type = other DNA
ctgtttgaaagaacttatcagc

SEQ ID NO: 129493 - DNA, 22 bp, synthetic construct
  misc_feature 1..22: note = chemically synthesized
  source 1..22: mol_type = other DNA
tttgaaagaacttatcagcagc

SEQ ID NO: 129494 - DNA, 22 bp, synthetic construct
  misc_feature 1..22: note = chemically synthesized
  source 1..22: mol_type = other DNA
gaaagaacttatcagcagcact

SEQ ID NO: 129495 - DNA, 22 bp, synthetic construct
  misc_feature 1..22: note = chemically synthesized
  source 1..22: mol_type = other DNA
aaagaacttatcagcagcactc

SEQ ID NO: 129496 - DNA, 22 bp, synthetic construct
  misc_feature 1..22: note = chemically synthesized
  source 1..22: mol_type = other DNA
atcagcagcactcatttgtgag

SEQ ID NO: 129497 - DNA, 22 bp, synthetic construct
  misc_feature 1..22: note = chemically synthesized
  source 1..22: mol_type = other DNA
tcagcagcactcatttgtgagt

SEQ ID NO: 129498 - DNA, 22 bp, synthetic construct
  misc_feature 1..22: note = chemically synthesized
  source 1..22: mol_type = other DNA
atttgtgagtatatataacaaa

SEQ ID NO: 129499 - DNA, 22 bp, synthetic construct
  misc_feature 1..22: note = chemically synthesized
  source 1..22: mol_type = other DNA
gtgagtatatataacaaacaat

SEQ ID NO: 129500 - DNA, 22 bp, synthetic construct
  misc_feature 1..22: note = chemically synthesized
  source 1..22: mol_type = other DNA
tgagtatatataacaaacaatc

SEQ ID NO: 129501 - DNA, 22 bp, synthetic construct
  misc_feature 1..22: note = chemically synthesized
  source 1..22: mol_type = other DNA
atttgaaaccaagaaaagatta

SEQ ID NO: 129502 - DNA, 22 bp, synthetic construct
  misc_feature 1..22: note = chemically synthesized
  source 1..22: mol_type = other DNA
tttgaaaccaagaaaagattaa

SEQ ID NO: 129503 - DNA, 22 bp, synthetic construct
  misc_feature 1..22: note = chemically synthesized
  source 1..22: mol_type = other DNA
gaaaccaagaaaagattaagtg

SEQ ID NO: 129504 - DNA, 22 bp, synthetic construct
  misc_feature 1..22: note = chemically synthesized
  source 1..22: mol_type = other DNA
aaaccaagaaaagattaagtgt

SEQ ID NO: 129505 - DNA, 22 bp, synthetic construct
  misc_feature 1..22: note = chemically synthesized
  source 1..22: mol_type = other DNA
agtgtgagggattattaagctt

SEQ ID NO: 129506 - DNA, 22 bp, synthetic construct
  misc_feature 1..22: note = chemically synthesized
  source 1..22: mol_type = other DNA
ttaagctttgtctaagttgagt

SEQ ID NO: 129507 - DNA, 22 bp, synthetic construct
  misc_feature 1..22: note = chemically synthesized
  source 1..22: mol_type = other DNA
agctttgtctaagttgagtgag

SEQ ID NO: 129508 - DNA, 22 bp, synthetic construct
  misc_feature 1..22: note = chemically synthesized
  source 1..22: mol_type = other DNA
tgtctaagttgagtgagcttat

SEQ ID NO: 129509 - DNA, 22 bp, synthetic construct
  misc_feature 1..22: note = chemically synthesized
  source 1..22: mol_type = other DNA
gtctaagttgagtgagcttatt

SEQ ID NO: 129510 - DNA, 22 bp, synthetic construct
  misc_feature 1..22: note = chemically synthesized
  source 1..22: mol_type = other DNA
tctaagttgagtgagcttattg

SEQ ID NO: 129511 - DNA, 22 bp, synthetic construct
  misc_feature 1..22: note = chemically synthesized
  source 1..22: mol_type = other DNA
agttgagtgagcttattggcta

SEQ ID NO: 129512 - DNA, 22 bp, synthetic construct
  misc_feature 1..22: note = chemically synthesized
  source 1..22: mol_type = other DNA
agtgagcttattggctacaggg

SEQ ID NO: 129513 - DNA, 22 bp, synthetic construct
  misc_feature 1..22: note = chemically synthesized
  source 1..22: mol_type = other DNA
attggctacagggttaaggaat

SEQ ID NO: 129514 - DNA, 22 bp, synthetic construct
  misc_feature 1..22: note = chemically synthesized
  source 1..22: mol_type = other DNA
ttggctacagggttaaggaata

SEQ ID NO: 129515 - DNA, 22 bp, synthetic construct
  misc_feature 1..22: note = chemically synthesized
  source 1..22: mol_type = other DNA
gctacagggttaaggaataaca

SEQ ID NO: 129516 - DNA, 22 bp, synthetic construct
  misc_feature 1..22: note = chemically synthesized
  source 1..22: mol_type = other DNA
cagggttaaggaataacaaaag

SEQ ID NO: 129517 - DNA, 22 bp, synthetic construct
  misc_feature 1..22: note = chemically synthesized
  source 1..22: mol_type = other DNA
aggaataacaaaagtaggcttc

SEQ ID NO: 129518 - DNA, 22 bp, synthetic construct
  misc_feature 1..22: note = chemically synthesized
  source 1..22: mol_type = other DNA
cacggtatcttctttttgaggt

SEQ ID NO: 129519 - DNA, 22 bp, synthetic construct
  misc_feature 1..22: note = chemically synthesized
  source 1..22: mol_type = other DNA
acggtatcttctttttgaggtg

SEQ ID NO: 129520 - DNA, 22 bp, synthetic construct
  misc_feature 1..22: note = chemically synthesized
  source 1..22: mol_type = other DNA
ctttttgaggtggggaatcata

SEQ ID NO: 129521 - DNA, 22 bp, synthetic construct
  misc_feature 1..22: note = chemically synthesized
  source 1..22: mol_type = other DNA
tttttgaggtggggaatcatac

SEQ ID NO: 129522 - DNA, 22 bp, synthetic construct
  misc_feature 1..22: note = chemically synthesized
  source 1..22: mol_type = other DNA
tttgaggtggggaatcatacaa

SEQ ID NO: 129523 - DNA, 22 bp, synthetic construct
  misc_feature 1..22: note = chemically synthesized
  source 1..22: mol_type = other DNA
ttgaggtggggaatcatacaag

SEQ ID NO: 129524 - DNA, 22 bp, synthetic construct
  misc_feature 1..22: note = chemically synthesized
  source 1..22: mol_type = other DNA
tgaggtggggaatcatacaagg

SEQ ID NO: 129525 - DNA, 22 bp, synthetic construct
  misc_feature 1..22: note = chemically synthesized
  source 1..22: mol_type = other DNA
gaggtggggaatcatacaaggc

SEQ ID NO: 129526 - DNA, 22 bp, synthetic construct
  misc_feature 1..22: note = chemically synthesized
  source 1..22: mol_type = other DNA
aggtggggaatcatacaaggca

SEQ ID NO: 129527 - DNA, 22 bp, synthetic construct
  misc_feature 1..22: note = chemically synthesized
  source 1..22: mol_type = other DNA
gatagcatgacttccatgtgct

SEQ ID NO: 129528 - DNA, 22 bp, synthetic construct
  misc_feature 1..22: note = chemically synthesized
  source 1..22: mol_type = other DNA
ccatgtgctggatgaagctaca

SEQ ID NO: 129529 - DNA, 22 bp, synthetic construct
  misc_feature 1..22: note = chemically synthesized
  source 1..22: mol_type = other DNA
catgtgctggatgaagctacaa

SEQ ID NO: 129530 - DNA, 22 bp, synthetic construct
  misc_feature 1..22: note = chemically synthesized
  source 1..22: mol_type = other DNA
gatgaagctacaattctgtttt

SEQ ID NO: 129531 - DNA, 22 bp, synthetic construct
  misc_feature 1..22: note = chemically synthesized
  source 1..22: mol_type = other DNA
caattctgttttctttttgcaa

SEQ ID NO: 129532 - DNA, 22 bp, synthetic construct
  misc_feature 1..22: note = chemically synthesized
  source 1..22: mol_type = other DNA
tgttttctttttgcaaagaaaa

SEQ ID NO: 129533 - DNA, 22 bp, synthetic construct
  misc_feature 1..22: note = chemically synthesized
  source 1..22: mol_type = other DNA
ttttctttttgcaaagaaaata

SEQ ID NO: 129534 - DNA, 22 bp, synthetic construct
  misc_feature 1..22: note = chemically synthesized
  source 1..22: mol_type = other DNA
tctttttgcaaagaaaatatgg

SEQ ID NO: 129535 - DNA, 22 bp, synthetic construct
  misc_feature 1..22: note = chemically synthesized
  source 1..22: mol_type = other DNA
ctttttgcaaagaaaatatggg

SEQ ID NO: 129536 - DNA, 22 bp, synthetic construct
  misc_feature 1..22: note = chemically synthesized
  source 1..22: mol_type = other DNA
tttttgcaaagaaaatatgggg

SEQ ID NO: 129537 - DNA, 22 bp, synthetic construct
  misc_feature 1..22: note = chemically synthesized
  source 1..22: mol_type = other DNA
tttgcaaagaaaatatggggct

SEQ ID NO: 129538 - DNA, 22 bp, synthetic construct
  misc_feature 1..22: note = chemically synthesized
  source 1..22: mol_type = other DNA
ttgcaaagaaaatatggggctt

SEQ ID NO: 129539 - DNA, 22 bp, synthetic construct
  misc_feature 1..22: note = chemically synthesized
  source 1..22: mol_type = other DNA
tgcaaagaaaatatggggcttt

SEQ ID NO: 129540 - DNA, 22 bp, synthetic construct
  misc_feature 1..22: note = chemically synthesized
  source 1..22: mol_type = other DNA
gcaaagaaaatatggggcttta

SEQ ID NO: 129541 - DNA, 22 bp, synthetic construct
  misc_feature 1..22: note = chemically synthesized
  source 1..22: mol_type = other DNA
caaagaaaatatggggctttaa

SEQ ID NO: 129542 - DNA, 22 bp, synthetic construct
  misc_feature 1..22: note = chemically synthesized
  source 1..22: mol_type = other DNA
taagaacacagttctggagccc

SEQ ID NO: 129543 - DNA, 22 bp, synthetic construct
  misc_feature 1..22: note = chemically synthesized
  source 1..22: mol_type = other DNA
aagaacacagttctggagccca

SEQ ID NO: 129544 - DNA, 22 bp, synthetic construct
  misc_feature 1..22: note = chemically synthesized
  source 1..22: mol_type = other DNA
agaacacagttctggagcccac

SEQ ID NO: 129545 - DNA, 22 bp, synthetic construct
  misc_feature 1..22: note = chemically synthesized
  source 1..22: mol_type = other DNA
tggagcccacttccttctccaa

SEQ ID NO: 129546 - DNA, 22 bp, synthetic construct
  misc_feature 1..22: note = chemically synthesized
  source 1..22: mol_type = other DNA
gagcccacttccttctccaaag

SEQ ID NO: 129547 - DNA, 22 bp, synthetic construct
  misc_feature 1..22: note = chemically synthesized
  source 1..22: mol_type = other DNA
ccttctccaaaggaggcttgaa

SEQ ID NO: 129548 - DNA, 22 bp, synthetic construct
  misc_feature 1..22: note = chemically synthesized
  source 1..22: mol_type = other DNA
cttctccaaaggaggcttgaaa

SEQ ID NO: 129549 - DNA, 22 bp, synthetic construct
  misc_feature 1..22: note = chemically synthesized
  source 1..22: mol_type = other DNA
ctccaaaggaggcttgaaaaaa

SEQ ID NO: 129550 - DNA, 22 bp, synthetic construct
  misc_feature 1..22: note = chemically synthesized
  source 1..22: mol_type = other DNA
tccaaaggaggcttgaaaaaaa

SEQ ID NO: 129551 - DNA, 22 bp, synthetic construct
  misc_feature 1..22: note = chemically synthesized
  source 1..22: mol_type = other DNA
caaaggaggcttgaaaaaaaat

SEQ ID NO: 129552 - DNA, 22 bp, synthetic construct
  misc_feature 1..22: note = chemically synthesized
  source 1..22: mol_type = other DNA
gaaaaaaaatatcccagtagcc

SEQ ID NO: 129553 - DNA, 22 bp, synthetic construct
  misc_feature 1..22: note = chemically synthesized
  source 1..22: mol_type = other DNA
aaaaaaaatatcccagtagcct

SEQ ID NO: 129554 - DNA, 22 bp, synthetic construct
  misc_feature 1..22: note = chemically synthesized
  source 1..22: mol_type = other DNA
attatccagcatcaagacagat

SEQ ID NO: 129555 - DNA, 22 bp, synthetic construct
  misc_feature 1..22: note = chemically synthesized
  source 1..22: mol_type = other DNA
tccagcatcaagacagatactg

SEQ ID NO: 129556 - DNA, 22 bp, synthetic construct
  misc_feature 1..22: note = chemically synthesized
  source 1..22: mol_type = other DNA
gggaacaattttgaatacaaat

SEQ ID NO: 129557 - DNA, 22 bp, synthetic construct
  misc_feature 1..22: note = chemically synthesized
  source 1..22: mol_type = other DNA
tgaatacaaataacctcacaaa

SEQ ID NO: 129558 - DNA, 22 bp, synthetic construct
  misc_feature 1..22: note = chemically synthesized
  source 1..22: mol_type = other DNA
gaatacaaataacctcacaaat

SEQ ID NO: 129559 - DNA, 22 bp, synthetic construct
  misc_feature 1..22: note = chemically synthesized
  source 1..22: mol_type = other DNA
aatacaaataacctcacaaatt

SEQ ID NO: 129560 - DNA, 22 bp, synthetic construct
  misc_feature 1..22: note = chemically synthesized
  source 1..22: mol_type = other DNA
acaaattaaccctgttagcagt

SEQ ID NO: 129561 - DNA, 22 bp, synthetic construct
  misc_feature 1..22: note = chemically synthesized
  source 1..22: mol_type = other DNA
accctgttagcagtcttcagag

SEQ ID NO: 129562 - DNA, 22 bp, synthetic construct
  misc_feature 1..22: note = chemically synthesized
  source 1..22: mol_type = other DNA
ttagcagtcttcagagatacca

SEQ ID NO: 129563 - DNA, 22 bp, synthetic construct
  misc_feature 1..22: note = chemically synthesized
  source 1..22: mol_type = other DNA
gcagtcttcagagataccattt

SEQ ID NO: 129564 - DNA, 22 bp, synthetic construct
  misc_feature 1..22: note = chemically synthesized
  source 1..22: mol_type = other DNA
cagagataccatttaaaccaat

SEQ ID NO: 129565 - DNA, 22 bp, synthetic construct
  misc_feature 1..22: note = chemically synthesized
  source 1..22: mol_type = other DNA
agagataccatttaaaccaatt

SEQ ID NO: 129566 - DNA, 22 bp, synthetic construct
  misc_feature 1..22: note = chemically synthesized
  source 1..22: mol_type = other DNA
aaaccaatttctacaccaggac

SEQ ID NO: 129567 - DNA, 22 bp, synthetic construct
  misc_feature 1..22: note = chemically synthesized
  source 1..22: mol_type = other DNA
aaccaatttctacaccaggact

SEQ ID NO: 129568 - DNA, 22 bp, synthetic construct
  misc_feature 1..22: note = chemically synthesized
  source 1..22: mol_type = other DNA
ctacaccaggactcagcaatta

SEQ ID NO: 129569 - DNA, 22 bp, synthetic construct
  misc_feature 1..22: note = chemically synthesized
  source 1..22: mol_type = other DNA
tacaccaggactcagcaattac

SEQ ID NO: 129570 - DNA, 22 bp, synthetic construct
  misc_feature 1..22: note = chemically synthesized
  source 1..22: mol_type = other DNA
caccaggactcagcaattacct

SEQ ID NO: 129571 - DNA, 22 bp, synthetic construct
  misc_feature 1..22: note = chemically synthesized
  source 1..22: mol_type = other DNA
agcaattacctctccccttaat

SEQ ID NO: 129572 - DNA, 22 bp, synthetic construct
  misc_feature 1..22: note = chemically synthesized
  source 1..22: mol_type = other DNA
cctctccccttaatttctgata

SEQ ID NO: 129573 - DNA, 22 bp, synthetic construct
  misc_feature 1..22: note = chemically synthesized
  source 1..22: mol_type = other DNA
tccccttaatttctgatacccc

SEQ ID NO: 129574 - DNA, 22 bp, synthetic construct
  misc_feature 1..22: note = chemically synthesized
  source 1..22: mol_type = other DNA
cccttaatttctgataccccag

SEQ ID NO: 129575 - DNA, 22 bp, synthetic construct
  misc_feature 1..22: note = chemically synthesized
  source 1..22: mol_type = other DNA
aatttctgataccccaggtcag

SEQ ID NO: 129576 - DNA, 22 bp, synthetic construct
  misc_feature 1..22: note = chemically synthesized
  source 1..22: mol_type = other DNA
atttctgataccccaggtcagg

SEQ ID NO: 129577 - DNA, 22 bp, synthetic construct
  misc_feature 1..22: note = chemically synthesized
  source 1..22: mol_type = other DNA
ctgataccccaggtcaggctct

SEQ ID NO: 129578 - DNA, 22 bp, synthetic construct
  misc_feature 1..22: note = chemically synthesized
  source 1..22: mol_type = other DNA
tgataccccaggtcaggctcta

SEQ ID NO: 129579 - DNA, 22 bp, synthetic construct
  misc_feature 1..22: note = chemically synthesized
  source 1..22: mol_type = other DNA
ataccccaggtcaggctctagt

SEQ ID NO: 129580 - DNA, 22 bp, synthetic construct
  misc_feature 1..22: note = chemically synthesized
  source 1..22: mol_type = other DNA
tagtgactatgggagaatggaa

SEQ ID NO: 129581 - DNA, 22 bp, synthetic construct
  misc_feature 1..22: note = chemically synthesized
  source 1..22: mol_type = other DNA
gtgactatgggagaatggaatg

SEQ ID NO: 129582 - DNA, 22 bp, synthetic construct
  misc_feature 1..22: note = chemically synthesized
  source 1..22: mol_type = other DNA
tgggagaatggaatgaaggtaa

SEQ ID NO: 129583 - DNA, 22 bp, synthetic construct
  misc_feature 1..22: note = chemically synthesized
  source 1..22: mol_type = other DNA
agaggaaaataaagactaatct

SEQ ID NO: 129584 - DNA, 22 bp, synthetic construct
  misc_feature 1..22: note = chemically synthesized
  source 1..22: mol_type = other DNA
atcttcttggattctcttccac

SEQ ID NO: 129585 - DNA, 22 bp, synthetic construct
  misc_feature 1..22: note = chemically synthesized
  source 1..22: mol_type = other DNA
cttggattctcttccaccacat

SEQ ID NO: 129586 - DNA, 22 bp, synthetic construct
  misc_feature 1..22: note = chemically synthesized
  source 1..22: mol_type = other DNA
ttggattctcttccaccacata

SEQ ID NO: 129587 - DNA, 22 bp, synthetic construct
  misc_feature 1..22: note = chemically synthesized
  source 1..22: mol_type = other DNA
ggattctcttccaccacatagt

SEQ ID NO: 129588 - DNA, 22 bp, synthetic construct
  misc_feature 1..22: note = chemically synthesized
  source 1..22: mol_type = other DNA
gattctcttccaccacatagtt

SEQ ID NO: 129589 - DNA, 22 bp, synthetic construct
  misc_feature 1..22: note = chemically synthesized
  source 1..22: mol_type = other DNA
tcttccaccacatagttgttgc

SEQ ID NO: 129590 - DNA, 22 bp, synthetic construct
  misc_feature 1..22: note = chemically synthesized
  source 1..22: mol_type = other DNA
ttccaccacatagttgttgcaa

SEQ ID NO: 129591 - DNA, 22 bp, synthetic construct
  misc_feature 1..22: note = chemically synthesized
  source 1..22: mol_type = other DNA
ccaccacatagttgttgcaaga

SEQ ID NO: 129592 - DNA, 22 bp, synthetic construct
  misc_feature 1..22: note = chemically synthesized
  source 1..22: mol_type = other DNA
caccacatagttgttgcaagag

SEQ ID NO: 129593 - DNA, 22 bp, synthetic construct
  misc_feature 1..22: note = chemically synthesized
  source 1..22: mol_type = other DNA
ttgcaagagggtaaatagagaa

SEQ ID NO: 129594 - DNA, 22 bp, synthetic construct
  misc_feature 1..22: note = chemically synthesized
  source 1..22: mol_type = other DNA
caagagggtaaatagagaaaag

SEQ ID NO: 129595 - DNA, 22 bp, synthetic construct
  misc_feature 1..22: note = chemically synthesized
  source 1..22: mol_type = other DNA
tatctacagattctgccgggtg

SEQ ID NO: 129596 - DNA, 22 bp, synthetic construct
  misc_feature 1..22: note = chemically synthesized
  source 1..22: mol_type = other DNA
cagattctgccgggtgtatcaa

SEQ ID NO: 129597 - DNA, 22 bp, synthetic construct
  misc_feature 1..22: note = chemically synthesized
  source 1..22: mol_type = other DNA
tgccgggtgtatcaacctccaa

SEQ ID NO: 129598 - DNA, 22 bp, synthetic construct
  misc_feature 1..22: note = chemically synthesized
  source 1..22: mol_type = other DNA
ccgggtgtatcaacctccaaca

SEQ ID NO: 129599 - DNA, 22 bp, synthetic construct
  misc_feature 1..22: note = chemically synthesized
  source 1..22: mol_type = other DNA
caacataaaagttcaacttcct

SEQ ID NO: 129600 - DNA, 22 bp, synthetic construct
  misc_feature 1..22: note = chemically synthesized
  source 1..22: mol_type = other DNA
aacttcctagcaaatgttaact

SEQ ID NO: 129601 - DNA, 22 bp, synthetic construct
  misc_feature 1..22: note = chemically synthesized
  source 1..22: mol_type = other DNA
cctagcaaatgttaactctgaa

SEQ ID NO: 129602 - DNA, 22 bp, synthetic construct
  misc_feature 1..22: note = chemically synthesized
  source 1..22: mol_type = other DNA
ctagcaaatgttaactctgaaa

SEQ ID NO: 129603 - DNA, 22 bp, synthetic construct
  misc_feature 1..22: note = chemically synthesized
  source 1..22: mol_type = other DNA
gcaaatgttaactctgaaataa

SEQ ID NO: 129604 - DNA, 22 bp, synthetic construct
  misc_feature 1..22: note = chemically synthesized
  source 1..22: mol_type = other DNA
actctgaaataaaaacagtagt

SEQ ID NO: 129605 - DNA, 22 bp, synthetic construct
  misc_feature 1..22: note = chemically synthesized
  source 1..22: mol_type = other DNA
tgaaataaaaacagtagtttta

SEQ ID NO: 129606 - DNA, 22 bp, synthetic construct
  misc_feature 1..22: note = chemically synthesized
  source 1..22: mol_type = other DNA
aaataaaaacagtagttttatg

SEQ ID NO: 129607 - DNA, 22 bp, synthetic construct
  misc_feature 1..22: note = chemically synthesized
  source 1..22: mol_type = other DNA
tatgtgatgggtgcttacatga

SEQ ID NO: 129608 - DNA, 22 bp, synthetic construct
  misc_feature 1..22: note = chemically synthesized
  source 1..22: mol_type = other DNA
atgtgatgggtgcttacatgaa

SEQ ID NO: 129609 - DNA, 22 bp, synthetic construct
  misc_feature 1..22: note = chemically synthesized
  source 1..22: mol_type = other DNA
tgtgatgggtgcttacatgaat

SEQ ID NO: 129610 - DNA, 22 bp, synthetic construct
  misc_feature 1..22: note = chemically synthesized
  source 1..22: mol_type = other DNA
acatgaataattaagagttctg

SEQ ID NO: 129611 - DNA, 22 bp, synthetic construct
  misc_feature 1..22: note = chemically synthesized
  source 1..22: mol_type = other DNA
catgaataattaagagttctga

SEQ ID NO: 129612 - DNA, 22 bp, synthetic construct
  misc_feature 1..22: note = chemically synthesized
  source 1..22: mol_type = other DNA
agagttctgagttgatatctag

SEQ ID NO: 129613 - DNA, 22 bp, synthetic construct
  misc_feature 1..22: note = chemically synthesized
  source 1..22: mol_type = other DNA
tgagttgatatctagaagttct

SEQ ID NO: 129614 - DNA, 22 bp, synthetic construct
  misc_feature 1..22: note = chemically synthesized
  source 1..22: mol_type = other DNA
agttgatatctagaagttcttg

SEQ ID NO: 129615 - DNA, 22 bp, synthetic construct
  misc_feature 1..22: note = chemically synthesized
  source 1..22: mol_type = other DNA
atatctagaagttcttgttagc

SEQ ID NO: 129616 - DNA, 22 bp, synthetic construct
  misc_feature 1..22: note = chemically synthesized
  source 1..22: mol_type = other DNA
gaagttcttgttagctcagcgc

SEQ ID NO: 129617 - DNA, 22 bp, synthetic construct
  misc_feature 1..22: note = chemically synthesized
  source 1..22: mol_type = other DNA
ttgttagctcagcgctattaag

SEQ ID NO: 129618 - DNA, 22 bp, synthetic construct
  misc_feature 1..22: note = chemically synthesized
  source 1..22: mol_type = other DNA
gttagctcagcgctattaagaa

SEQ ID NO: 129619 - DNA, 22 bp, synthetic construct
  misc_feature 1..22: note = chemically synthesized
  source 1..22: mol_type = other DNA
ttagctcagcgctattaagaac

SEQ ID NO: 129620 - DNA, 22 bp, synthetic construct
  misc_feature 1..22: note = chemically synthesized
  source 1..22: mol_type = other DNA
gctcagcgctattaagaacact

SEQ ID NO: 129621 - DNA, 22 bp, synthetic construct
  misc_feature 1..22: note = chemically synthesized
  source 1..22: mol_type = other DNA
agcgctattaagaacacttttc

SEQ ID NO: 129622 - DNA, 22 bp, synthetic construct
  misc_feature 1..22: note = chemically synthesized
  source 1..22: mol_type = other DNA
ttaagaacacttttcctacaat

SEQ ID NO: 129623 - DNA, 22 bp, synthetic construct
  misc_feature 1..22: note = chemically synthesized
  source 1..22: mol_type = other DNA
agaacacttttcctacaataga

SEQ ID NO: 129624 - DNA, 22 bp, synthetic construct
  misc_feature 1..22: note = chemically synthesized
  source 1..22: mol_type = other DNA
ttcctacaatagaaattttctt

SEQ ID NO: 129625 - DNA, 22 bp, synthetic construct
  misc_feature 1..22: note = chemically synthesized
  source 1..22: mol_type = other DNA
tcctacaatagaaattttcttt

SEQ ID NO: 129626 - DNA, 22 bp, synthetic construct
  misc_feature 1..22: note = chemically synthesized
  source 1..22: mol_type = other DNA
cctacaatagaaattttctttg

SEQ ID NO: 129627 - DNA, 22 bp, synthetic construct
  misc_feature 1..22: note = chemically synthesized
  source 1..22: mol_type = other DNA
ctacaatagaaattttctttgg

SEQ ID NO: 129628 - DNA, 22 bp, synthetic construct
  misc_feature 1..22: note = chemically synthesized
  source 1..22: mol_type = other DNA
caatagaaattttctttggaag

SEQ ID NO: 129629 - DNA, 22 bp, synthetic construct
  misc_feature 1..22: note = chemically synthesized
  source 1..22: mol_type = other DNA
tctttggaagaggcaggagagg

SEQ ID NO: 129630 - DNA, 22 bp, synthetic construct
  misc_feature 1..22: note = chemically synthesized
  source 1..22: mol_type = other DNA
ctttggaagaggcaggagagga

SEQ ID NO: 129631 - DNA, 22 bp, synthetic construct
  misc_feature 1..22: note = chemically synthesized
  source 1..22: mol_type = other DNA
tttggaagaggcaggagaggaa

SEQ ID NO: 129632 - DNA, 22 bp, synthetic construct
  misc_feature 1..22: note = chemically synthesized
  source 1..22: mol_type = other DNA
tggaagaggcaggagaggaaag

SEQ ID NO: 129633 - DNA, 22 bp, synthetic construct
  misc_feature 1..22: note = chemically synthesized
  source 1..22: mol_type = other DNA
ggaagaggcaggagaggaaaga

SEQ ID NO: 129634 - DNA, 22 bp, synthetic construct
  misc_feature 1..22: note = chemically synthesized
  source 1..22: mol_type = other DNA
gaagaggcaggagaggaaagag

SEQ ID NO: 129635 - DNA, 22 bp, synthetic construct
  misc_feature 1..22: note = chemically synthesized
  source 1..22: mol_type = other DNA
actctgggagtgaatgtgcagg

SEQ ID NO: 129636 - DNA, 22 bp, synthetic construct
  misc_feature 1..22: note = chemically synthesized
  source 1..22: mol_type = other DNA
tgggagtgaatgtgcagggtgg

SEQ ID NO: 129637 - DNA, 22 bp, synthetic construct
  misc_feature 1..22: note = chemically synthesized
  source 1..22: mol_type = other DNA
ggagtgaatgtgcagggtgggg

SEQ ID NO: 129638 - DNA, 22 bp, synthetic construct
  misc_feature 1..22: note = chemically synthesized
  source 1..22: mol_type = other DNA
taggtctctatactacctctcc

SEQ ID NO: 129639 - DNA, 22 bp, synthetic construct
  misc_feature 1..22: note = chemically synthesized
  source 1..22: mol_type = other DNA
tatactacctctcctcctcctc

SEQ ID NO: 129640 - DNA, 22 bp, synthetic construct
  misc_feature 1..22: note = chemically synthesized
  source 1..22: mol_type = other DNA
tactacctctcctcctcctctt

SEQ ID NO: 129641 - DNA, 22 bp, synthetic construct
  misc_feature 1..22: note = chemically synthesized
  source 1..22: mol_type = other DNA
cctctcctcctcctcttgatgc

SEQ ID NO: 129642 - DNA, 22 bp, synthetic construct
  misc_feature 1..22: note = chemically synthesized
  source 1..22: mol_type = other DNA
tcctcctcctcttgatgcagtt

SEQ ID NO: 129643 - DNA, 22 bp, synthetic construct
  misc_feature 1..22: note = chemically synthesized
  source 1..22: mol_type = other DNA
ctcctcctcttgatgcagttct

SEQ ID NO: 129644 - DNA, 22 bp, synthetic construct
  misc_feature 1..22: note = chemically synthesized
  source 1..22: mol_type = other DNA
ctcctcttgatgcagttctcta

SEQ ID NO: 129645 - DNA, 22 bp, synthetic construct
  misc_feature 1..22: note = chemically synthesized
  source 1..22: mol_type = other DNA
ctcttgatgcagttctctaggc

SEQ ID NO: 129646 - DNA, 22 bp, synthetic construct
  misc_feature 1..22: note = chemically synthesized
  source 1..22: mol_type = other DNA
ttgatgcagttctctaggctca

SEQ ID NO: 129647 - DNA, 22 bp, synthetic construct
  misc_feature 1..22: note = chemically synthesized
  source 1..22: mol_type = other DNA
gatgcagttctctaggctcagt

SEQ ID NO: 129648 - DNA, 22 bp, synthetic construct
  misc_feature 1..22: note = chemically synthesized
  source 1..22: mol_type = other DNA
atgcagttctctaggctcagtt

SEQ ID NO: 129649 - DNA, 22 bp, synthetic construct
  misc_feature 1..22: note = chemically synthesized
  source 1..22: mol_type = other DNA
tctaggctcagttttctctatc

SEQ ID NO: 129650 - DNA, 22 bp, synthetic construct
  misc_feature 1..22: note = chemically synthesized
  source 1..22: mol_type = other DNA
taggctcagttttctctatctt

SEQ ID NO: 129651 - DNA, 22 bp, synthetic construct
  misc_feature 1..22: note = chemically synthesized
  source 1..22: mol_type = other DNA
ggctcagttttctctatcttac

SEQ ID NO: 129652 - DNA, 22 bp, synthetic construct
  misc_feature 1..22: note = chemically synthesized
  source 1..22: mol_type = other DNA
agttttctctatcttacatcca

SEQ ID NO: 129653 - DNA, 22 bp, synthetic construct
  misc_feature 1..22: note = chemically synthesized
  source 1..22: mol_type = other DNA
tctctatcttacatccacctat

SEQ ID NO: 129654 - DNA, 22 bp, synthetic construct
  misc_feature 1..22: note = chemically synthesized
  source 1..22: mol_type = other DNA
ctctatcttacatccacctatg

SEQ ID NO: 129655 - DNA, 22 bp, synthetic construct
  misc_feature 1..22: note = chemically synthesized
  source 1..22: mol_type = other DNA
tctatcttacatccacctatgt

SEQ ID NO: 129656 - DNA, 22 bp, synthetic construct
  misc_feature 1..22: note = chemically synthesized
  source 1..22: mol_type = other DNA
tatcttacatccacctatgttc

SEQ ID NO: 129657 - DNA, 22 bp, synthetic construct
  misc_feature 1..22: note = chemically synthesized
  source 1..22: mol_type = other DNA
tcttacatccacctatgttccc

SEQ ID NO: 129658 - DNA, 22 bp, synthetic construct
  misc_feature 1..22: note = chemically synthesized
  source 1..22: mol_type = other DNA
acatccacctatgttccctttc

SEQ ID NO: 129659 - DNA, 22 bp, synthetic construct
  misc_feature 1..22: note = chemically synthesized
  source 1..22: mol_type = other DNA
catccacctatgttccctttct

SEQ ID NO: 129660 - DNA, 22 bp, synthetic construct
  misc_feature 1..22: note = chemically synthesized
  source 1..22: mol_type = other DNA
tgttccctttctgccttcttcc

SEQ ID NO: 129661 - DNA, 22 bp, synthetic construct
  misc_feature 1..22: note = chemically synthesized
  source 1..22: mol_type = other DNA
cctttctgccttcttcctcctc

SEQ ID NO: 129662 - DNA, 22 bp, synthetic construct
  misc_feature 1..22: note = chemically synthesized
  source 1..22: mol_type = other DNA
tctgccttcttcctcctctact

SEQ ID NO: 129663 - DNA, 22 bp, synthetic construct
  misc_feature 1..22: note = chemically synthesized
  source 1..22: mol_type = other DNA
ctgccttcttcctcctctactt

SEQ ID NO: 129664 - DNA, 22 bp, synthetic construct
  misc_feature 1..22: note = chemically synthesized
  source 1..22: mol_type = other DNA
tgccttcttcctcctctacttt

SEQ ID NO: 129665 - DNA, 22 bp, synthetic construct
  misc_feature 1..22: note = chemically synthesized
  source 1..22: mol_type = other DNA
ccttcttcctcctctactttgt

SEQ ID NO: 129666 - DNA, 22 bp, synthetic construct
  misc_feature 1..22: note = chemically synthesized
  source 1..22: mol_type = other DNA
cttcctcctctactttgtagct

SEQ ID NO: 129667 - DNA, 22 bp, synthetic construct
  misc_feature 1..22: note = chemically synthesized
  source 1..22: mol_type = other DNA
ttcctcctctactttgtagctc

SEQ ID NO: 129668 - DNA, 22 bp, synthetic construct
  misc_feature 1..22: note = chemically synthesized
  source 1..22: mol_type = other DNA
cctcctctactttgtagctccc

SEQ ID NO: 129669 - DNA, 22 bp, synthetic construct
  misc_feature 1..22: note = chemically synthesized
  source 1..22: mol_type = other DNA
ctcctctactttgtagctccca

SEQ ID NO: 129670 - DNA, 22 bp, synthetic construct
  misc_feature 1..22: note = chemically synthesized
  source 1..22: mol_type = other DNA
ctctactttgtagctcccacat

SEQ ID NO: 129671 - DNA, 22 bp, synthetic construct
  misc_feature 1..22: note = chemically synthesized
  source 1..22: mol_type = other DNA
tactttgtagctcccacatttt

SEQ ID NO: 129672 - DNA, 22 bp, synthetic construct
  misc_feature 1..22: note = chemically synthesized
  source 1..22: mol_type = other DNA
ctttgtagctcccacattttca

SEQ ID NO: 129673 - DNA, 22 bp, synthetic construct
  misc_feature 1..22: note = chemically synthesized
  source 1..22: mol_type = other DNA
tgtagctcccacattttcagct

SEQ ID NO: 129674 - DNA, 22 bp, synthetic construct
  misc_feature 1..22: note = chemically synthesized
  source 1..22: mol_type = other DNA
gtagctcccacattttcagctt

SEQ ID NO: 129675 - DNA, 22 bp, synthetic construct
  misc_feature 1..22: note = chemically synthesized
  source 1..22: mol_type = other DNA
tagctcccacattttcagctta

SEQ ID NO: 129676 - DNA, 22 bp, synthetic construct
  misc_feature 1..22: note = chemically synthesized
  source 1..22: mol_type = other DNA
ccacattttcagcttatatatt

SEQ ID NO: 129677 - DNA, 22 bp, synthetic construct
  misc_feature 1..22: note = chemically synthesized
  source 1..22: mol_type = other DNA
tcagcttatatattagccaatt

SEQ ID NO: 129678 - DNA, 22 bp, synthetic construct
  misc_feature 1..22: note = chemically synthesized
  source 1..22: mol_type = other DNA
cagcttatatattagccaatta

SEQ ID NO: 129679 - DNA, 22 bp, synthetic construct
  misc_feature 1..22: note = chemically synthesized
  source 1..22: mol_type = other DNA
agcttatatattagccaattag

SEQ ID NO: 129680 - DNA, 22 bp, synthetic construct
  misc_feature 1..22: note = chemically synthesized
  source 1..22: mol_type = other DNA
atatattagccaattagtatat

SEQ ID NO: 129681 - DNA, 22 bp, synthetic construct
  misc_feature 1..22: note = chemically synthesized
  source 1..22: mol_type = other DNA
tatattagccaattagtatatt

SEQ ID NO: 129682 - DNA, 22 bp, synthetic construct
  misc_feature 1..22: note = chemically synthesized
  source 1..22: mol_type = other DNA
gccaattagtatattagtaata

SEQ ID NO: 129683 - DNA, 22 bp, synthetic construct
  misc_feature 1..22: note = chemically synthesized
  source 1..22: mol_type = other DNA
gtatattagtaatattttgaag

SEQ ID NO: 129684 - DNA, 22 bp, synthetic construct
  misc_feature 1..22: note = chemically synthesized
  source 1..22: mol_type = other DNA
gtaatattttgaagtcactgtt

SEQ ID NO: 129685 - DNA, 22 bp, synthetic construct
  misc_feature 1..22: note = chemically synthesized
  source 1..22: mol_type = other DNA
tgaagtcactgttcttacctaa

SEQ ID NO: 129686 - DNA, 22 bp, synthetic construct
  misc_feature 1..22: note = chemically synthesized
  source 1..22: mol_type = other DNA
gaagtcactgttcttacctaag

SEQ ID NO: 129687 - DNA, 22 bp, synthetic construct
  misc_feature 1..22: note = chemically synthesized
  source 1..22: mol_type = other DNA
aagtcactgttcttacctaagt

SEQ ID NO: 129688 - DNA, 22 bp, synthetic construct
  misc_feature 1..22: note = chemically synthesized
  source 1..22: mol_type = other DNA
ttcttacctaagtcagtttaac

SEQ ID NO: 129689 - DNA, 22 bp, synthetic construct
  misc_feature 1..22: note = chemically synthesized
  source 1..22: mol_type = other DNA
ttacctaagtcagtttaacaat

SEQ ID NO: 129690 - DNA, 22 bp, synthetic construct
  misc_feature 1..22: note = chemically synthesized
  source 1..22: mol_type = other DNA
acctaagtcagtttaacaatca

SEQ ID NO: 129691 - DNA, 22 bp, synthetic construct
  misc_feature 1..22: note = chemically synthesized
  source 1..22: mol_type = other DNA
cctaagtcagtttaacaatcag

SEQ ID NO: 129692 - DNA, 22 bp, synthetic construct
  misc_feature 1..22: note = chemically synthesized
  source 1..22: mol_type = other DNA
agtcagtttaacaatcagcata

SEQ ID NO: 129693 - DNA, 22 bp, synthetic construct
  misc_feature 1..22: note = chemically synthesized
  source 1..22: mol_type = other DNA
aacaatcagcataccagtcagt

SEQ ID NO: 129694 - DNA, 22 bp, synthetic construct
  misc_feature 1..22: note = chemically synthesized
  source 1..22: mol_type = other DNA
acaatcagcataccagtcagtt

SEQ ID NO: 129695 - DNA, 22 bp, synthetic construct
  misc_feature 1..22: note = chemically synthesized
  source 1..22: mol_type = other DNA
gtgatcaatgtgttaatcataa

SEQ ID NO: 129696 - DNA, 22 bp, synthetic construct
  misc_feature 1..22: note = chemically synthesized
  source 1..22: mol_type = other DNA
atcataaagtaattaaaatttt

SEQ ID NO: 129697 - DNA, 22 bp, synthetic construct
  misc_feature 1..22: note = chemically synthesized
  source 1..22: mol_type = other DNA
aaattttataaataaccttaca

SEQ ID NO: 129698 - DNA, 22 bp, synthetic construct
  misc_feature 1..22: note = chemically synthesized
  source 1..22: mol_type = other DNA
tataaataaccttacaatcaat

SEQ ID NO: 129699 - DNA, 22 bp, synthetic construct
  misc_feature 1..22: note = chemically synthesized
  source 1..22: mol_type = other DNA
ataaataaccttacaatcaata

SEQ ID NO: 129700 - DNA, 22 bp, synthetic construct
  misc_feature 1..22: note = chemically synthesized
  source 1..22: mol_type = other DNA
taaataaccttacaatcaatat

SEQ ID NO: 129701 - DNA, 22 bp, synthetic construct
  misc_feature 1..22: note = chemically synthesized
  source 1..22: mol_type = other DNA
acaatcaatatgtcaaactctg

SEQ ID NO: 129702 - DNA, 22 bp, synthetic construct
  misc_feature 1..22: note = chemically synthesized
  source 1..22: mol_type = other DNA
caatcaatatgtcaaactctgt

SEQ ID NO: 129703 - DNA, 22 bp, synthetic construct
  misc_feature 1..22: note = chemically synthesized
  source 1..22: mol_type = other DNA
tgtcattgcttccagggccatt

SEQ ID NO: 129704 - DNA, 22 bp, synthetic construct
  misc_feature 1..22: note = chemically synthesized
  source 1..22: mol_type = other DNA
tcattgcttccagggccattgg

SEQ ID NO: 129705 - DNA, 22 bp, synthetic construct
  misc_feature 1..22: note = chemically synthesized
  source 1..22: mol_type = other DNA
cttccagggccattggtgtgtt

SEQ ID NO: 129706 - DNA, 22 bp, synthetic construct
  misc_feature 1..22: note = chemically synthesized
  source 1..22: mol_type = other DNA
ccagggccattggtgtgttaat

SEQ ID NO: 129707 - DNA, 22 bp, synthetic construct
  misc_feature 1..22: note = chemically synthesized
  source 1..22: mol_type = other DNA
cagggccattggtgtgttaata

SEQ ID NO: 129708 - DNA, 22 bp, synthetic construct
  misc_feature 1..22: note = chemically synthesized
  source 1..22: mol_type = other DNA
gtgtgttaatacaacacttagt

SEQ ID NO: 129709 - DNA, 22 bp, synthetic construct
  misc_feature 1..22: note = chemically synthesized
  source 1..22: mol_type = other DNA
atacaacacttagtaaagtaag

SEQ ID NO: 129710 - DNA, 22 bp, synthetic construct
  misc_feature 1..22: note = chemically synthesized
  source 1..22: mol_type = other DNA
agtaaagtaagcaatgttagtg

SEQ ID NO: 129711 - DNA, 22 bp, synthetic construct
  misc_feature 1..22: note = chemically synthesized
  source 1..22: mol_type = other DNA
gtaaagtaagcaatgttagtgt

SEQ ID NO: 129712 - DNA, 22 bp, synthetic construct
  misc_feature 1..22: note = chemically synthesized
  source 1..22: mol_type = other DNA
gtgttggagtgggagtagaacc

SEQ ID NO: 129713 - DNA, 22 bp, synthetic construct
  misc_feature 1..22: note = chemically synthesized
  source 1..22: mol_type = other DNA
gagtgggagtagaaccgtgttt

SEQ ID NO: 129714 - DNA, 22 bp, synthetic construct
  misc_feature 1..22: note = chemically synthesized
  source 1..22: mol_type = other DNA
tttactacaatgagttagagcc

SEQ ID NO: 129715 - DNA, 22 bp, synthetic construct
  misc_feature 1..22: note = chemically synthesized
  source 1..22: mol_type = other DNA
ttactacaatgagttagagcca

SEQ ID NO: 129716 - DNA, 22 bp, synthetic construct
  misc_feature 1..22: note = chemically synthesized
  source 1..22: mol_type = other DNA
tactacaatgagttagagccac

SEQ ID NO: 129717 - DNA, 22 bp, synthetic construct
  misc_feature 1..22: note = chemically synthesized
  source 1..22: mol_type = other DNA
actacaatgagttagagccact

SEQ ID NO: 129718 - DNA, 22 bp, synthetic construct
  misc_feature 1..22: note = chemically synthesized
  source 1..22: mol_type = other DNA
ctacaatgagttagagccacta

SEQ ID NO: 129719 - DNA, 22 bp, synthetic construct
  misc_feature 1..22: note = chemically synthesized
  source 1..22: mol_type = other DNA
caatgagttagagccactaggt

SEQ ID NO: 129720 - DNA, 22 bp, synthetic construct
  misc_feature 1..22: note = chemically synthesized
  source 1..22: mol_type = other DNA
gagccactaggtctgagagact

SEQ ID NO: 129721 - DNA, 22 bp, synthetic construct
  misc_feature 1..22: note = chemically synthesized
  source 1..22: mol_type = other DNA
ggtctgagagactagtaaaaga

SEQ ID NO: 129722 - DNA, 22 bp, synthetic construct
  misc_feature 1..22: note = chemically synthesized
  source 1..22: mol_type = other DNA
agagactagtaaaagaatgtaa

SEQ ID NO: 129723 - DNA, 22 bp, synthetic construct
  misc_feature 1..22: note = chemically synthesized
  source 1..22: mol_type = other DNA
gtaaaagaatgtaaacagtaaa

SEQ ID NO: 129724 - DNA, 22 bp, synthetic construct
  misc_feature 1..22: note = chemically synthesized
  source 1..22: mol_type = other DNA
tgtgctaagttttatgctaaag

SEQ ID NO: 129725 - DNA, 22 bp, synthetic construct
  misc_feature 1..22: note = chemically synthesized
  source 1..22: mol_type = other DNA
gtgctaagttttatgctaaagt

SEQ ID NO: 129726 - DNA, 22 bp, synthetic construct
  misc_feature 1..22: note = chemically synthesized
  source 1..22: mol_type = other DNA
tgctaagttttatgctaaagtc

SEQ ID NO: 129727 - DNA, 22 bp, synthetic construct
  misc_feature 1..22: note = chemically synthesized
  source 1..22: mol_type = other DNA
agttttatgctaaagtctgggt

SEQ ID NO: 129728 - DNA, 22 bp, synthetic construct
  misc_feature 1..22: note = chemically synthesized
  source 1..22: mol_type = other DNA
tatgctaaagtctgggtgatgc

SEQ ID NO: 129729 - DNA, 22 bp, synthetic construct
  misc_feature 1..22: note = chemically synthesized
  source 1..22: mol_type = other DNA
atgctaaagtctgggtgatgca

SEQ ID NO: 129730 - DNA, 22 bp, synthetic construct
  misc_feature 1..22: note = chemically synthesized
  source 1..22: mol_type = other DNA
tgctaaagtctgggtgatgcaa

SEQ ID NO: 129731 - DNA, 22 bp, synthetic construct
  misc_feature 1..22: note = chemically synthesized
  source 1..22: mol_type = other DNA
aagtctgggtgatgcaaaagag

SEQ ID NO: 129732 - DNA, 22 bp, synthetic construct
  misc_feature 1..22: note = chemically synthesized
  source 1..22: mol_type = other DNA
ggtgatgcaaaagagacatctg

SEQ ID NO: 129733 - DNA, 22 bp, synthetic construct
  misc_feature 1..22: note = chemically synthesized
  source 1..22: mol_type = other DNA
gggtttagttagagagggcaaa

SEQ ID NO: 129734 - DNA, 22 bp, synthetic construct
  misc_feature 1..22: note = chemically synthesized
  source 1..22: mol_type = other DNA
agttagagagggcaaaataaga

SEQ ID NO: 129735 - DNA, 22 bp, synthetic construct
  misc_feature 1..22: note = chemically synthesized
  source 1..22: mol_type = other DNA
gttagagagggcaaaataagag

SEQ ID NO: 129736 - DNA, 22 bp, synthetic construct
  misc_feature 1..22: note = chemically synthesized
  source 1..22: mol_type = other DNA
gagagggcaaaataagagacaa

SEQ ID NO: 129737 - DNA, 22 bp, synthetic construct
  misc_feature 1..22: note = chemically synthesized
  source 1..22: mol_type = other DNA
caccctatgtacctgagcagat

SEQ ID NO: 129738 - DNA, 22 bp, synthetic construct
  misc_feature 1..22: note = chemically synthesized
  source 1..22: mol_type = other DNA
tgtacctgagcagatggtgcag

SEQ ID NO: 129739 - DNA, 22 bp, synthetic construct
  misc_feature 1..22: note = chemically synthesized
  source 1..22: mol_type = other DNA
agcagatggtgcagaaatgatc

SEQ ID NO: 129740 - DNA, 22 bp, synthetic construct
  misc_feature 1..22: note = chemically synthesized
  source 1..22: mol_type = other DNA
cccagccaagcccagcctaaat

SEQ ID NO: 129741 - DNA, 22 bp, synthetic construct
  misc_feature 1..22: note = chemically synthesized
  source 1..22: mol_type = other DNA
aataagttgaaccatgcattag

SEQ ID NO: 129742 - DNA, 22 bp, synthetic construct
  misc_feature 1..22: note = chemically synthesized
  source 1..22: mol_type = other DNA
aaccatgcattagagtgaaaaa

SEQ ID NO: 129743 - DNA, 22 bp, synthetic construct
  misc_feature 1..22: note = chemically synthesized
  source 1..22: mol_type = other DNA
gagtgaaaaataaatgtttaat

SEQ ID NO: 129744 - DNA, 22 bp, synthetic construct
  misc_feature 1..22: note = chemically synthesized
  source 1..22: mol_type = other DNA
aatgttgtcagccactgatgct

SEQ ID NO: 129745 - DNA, 22 bp, synthetic construct
  misc_feature 1..22: note = chemically synthesized
  source 1..22: mol_type = other DNA
atgttgtcagccactgatgcta

SEQ ID NO: 129746 - DNA, 22 bp, synthetic construct
  misc_feature 1..22: note = chemically synthesized
  source 1..22: mol_type = other DNA
tcagccactgatgctatacagg

SEQ ID NO: 129747 - DNA, 22 bp, synthetic construct
  misc_feature 1..22: note = chemically synthesized
  source 1..22: mol_type = other DNA
atgctatacagggctttgtgat

SEQ ID NO: 129748 - DNA, 22 bp, synthetic construct
  misc_feature 1..22: note = chemically synthesized
  source 1..22: mol_type = other DNA
tacagggctttgtgatgtgaca

SEQ ID NO: 129749 - DNA, 22 bp, synthetic construct
  misc_feature 1..22: note = chemically synthesized
  source 1..22: mol_type = other DNA
tgtgatgtgacaattctgtgat

SEQ ID NO: 129750 - DNA, 22 bp, synthetic construct
  misc_feature 1..22: note = chemically synthesized
  source 1..22: mol_type = other DNA
gtgatgtgacaattctgtgata

SEQ ID NO: 129751 - DNA, 22 bp, synthetic construct
  misc_feature 1..22: note = chemically synthesized
  source 1..22: mol_type = other DNA
tgatgtgacaattctgtgataa

SEQ ID NO: 129752 - DNA, 22 bp, synthetic construct
  misc_feature 1..22: note = chemically synthesized
  source 1..22: mol_type = other DNA
tgtgataatagataaatgatac

SEQ ID NO: 129753 - DNA, 22 bp, synthetic construct
  misc_feature 1..22: note = chemically synthesized
  source 1..22: mol_type = other DNA
tgataatagataaatgatacaa

SEQ ID NO: 129754 - DNA, 22 bp, synthetic construct
  misc_feature 1..22: note = chemically synthesized
  source 1..22: mol_type = other DNA
acataaaccctgtaaatattag

SEQ ID NO: 129755 - DNA, 22 bp, synthetic construct
  misc_feature 1..22: note = chemically synthesized
  source 1..22: mol_type = other DNA
cataaaccctgtaaatattagt

SEQ ID NO: 129756 - DNA, 22 bp, synthetic construct
  misc_feature 1..22: note = chemically synthesized
  source 1..22: mol_type = other DNA
taaatattagtttattatagaa

SEQ ID NO: 129757 - DNA, 22 bp, synthetic construct
  misc_feature 1..22: note = chemically synthesized
  source 1..22: mol_type = other DNA
gtttattatagaactctataaa

SEQ ID NO: 129758 - DNA, 22 bp, synthetic construct
  misc_feature 1..22: note = chemically synthesized
  source 1..22: mol_type = other DNA
attatagaactctataaactct

SEQ ID NO: 129759 - DNA, 22 bp, synthetic construct
  misc_feature 1..22: note = chemically synthesized
  source 1..22: mol_type = other DNA
ttatagaactctataaactctt

SEQ ID NO: 129760 - DNA, 22 bp, synthetic construct
  misc_feature 1..22: note = chemically synthesized
  source 1..22: mol_type = other DNA
tagaactctataaactcttaat

SEQ ID NO: 129761 - DNA, 22 bp, synthetic construct
  misc_feature 1..22: note = chemically synthesized
  source 1..22: mol_type = other DNA
tataaactcttaataaaatatg

SEQ ID NO: 129762 - DNA, 22 bp, synthetic construct
  misc_feature 1..22: note = chemically synthesized
  source 1..22: mol_type = other DNA
taaactcttaataaaatatgga

SEQ ID NO: 129763 - DNA, 22 bp, synthetic construct
  misc_feature 1..22: note = chemically synthesized
  source 1..22: mol_type = other DNA
ttaataaaatatggataatagt

SEQ ID NO: 129764 - DNA, 22 bp, synthetic construct
  misc_feature 1..22: note = chemically synthesized
  source 1..22: mol_type = other DNA
aataaaatatggataatagtaa

SEQ ID NO: 129765 - DNA, 22 bp, synthetic construct
  misc_feature 1..22: note = chemically synthesized
  source 1..22: mol_type = other DNA
ataaaatatggataatagtaat

SEQ ID NO: 129766 - DNA, 22 bp, synthetic construct
  misc_feature 1..22: note = chemically synthesized
  source 1..22: mol_type = other DNA
tgcattagttttctattgttat

SEQ ID NO: 129767 - DNA, 22 bp, synthetic construct
  misc_feature 1..22: note = chemically synthesized
  source 1..22: mol_type = other DNA
gcattagttttctattgttata

SEQ ID NO: 129768 - DNA, 22 bp, synthetic construct
  misc_feature 1..22: note = chemically synthesized
  source 1..22: mol_type = other DNA
cattagttttctattgttatac

SEQ ID NO: 129769 - DNA, 22 bp, synthetic construct
  misc_feature 1..22: note = chemically synthesized
  source 1..22: mol_type = other DNA
gttttctattgttatacataaa

SEQ ID NO: 129770 - DNA, 22 bp, synthetic construct
  misc_feature 1..22: note = chemically synthesized
  source 1..22: mol_type = other DNA
tctattgttatacataaattac

SEQ ID NO: 129771 - DNA, 22 bp, synthetic construct
  misc_feature 1..22: note = chemically synthesized
  source 1..22: mol_type = other DNA
ctattgttatacataaattact

SEQ ID NO: 129772 - DNA, 22 bp, synthetic construct
  misc_feature 1..22: note = chemically synthesized
  source 1..22: mol_type = other DNA
tattgttatacataaattactg

SEQ ID NO: 129773 - DNA, 22 bp, synthetic construct
  misc_feature 1..22: note = chemically synthesized
  source 1..22: mol_type = other DNA
ttgttatacataaattactgca

SEQ ID NO: 129774 - DNA, 22 bp, synthetic construct
  misc_feature 1..22: note = chemically synthesized
  source 1..22: mol_type = other DNA
ttatacataaattactgcaact

SEQ ID NO: 129775 - DNA, 22 bp, synthetic construct
  misc_feature 1..22: note = chemically synthesized
  source 1..22: mol_type = other DNA
tacataaattactgcaacttga

SEQ ID NO: 129776 - DNA, 22 bp, synthetic construct
  misc_feature 1..22: note = chemically synthesized
  source 1..22: mol_type = other DNA
ctgcaacttgagctgcttcaaa

SEQ ID NO: 129777 - DNA, 22 bp, synthetic construct
  misc_feature 1..22: note = chemically synthesized
  source 1..22: mol_type = other DNA
caacttgagctgcttcaaacat

SEQ ID NO: 129778 - DNA, 22 bp, synthetic construct
  misc_feature 1..22: note = chemically synthesized
  source 1..22: mol_type = other DNA
gagctgcttcaaacattattag

SEQ ID NO: 129779 - DNA, 22 bp, synthetic construct
  misc_feature 1..22: note = chemically synthesized
  source 1..22: mol_type = other DNA
agctgcttcaaacattattagt

SEQ ID NO: 129780 - DNA, 22 bp, synthetic construct
  misc_feature 1..22: note = chemically synthesized
  source 1..22: mol_type = other DNA
cttcaaacattattagtttatt

SEQ ID NO: 129781 - DNA, 22 bp, synthetic construct
  misc_feature 1..22: note = chemically synthesized
  source 1..22: mol_type = other DNA
caaacattattagtttattata

SEQ ID NO: 129782 - DNA, 22 bp, synthetic construct
  misc_feature 1..22: note = chemically synthesized
  source 1..22: mol_type = other DNA
aaacattattagtttattatat

SEQ ID NO: 129783 - DNA, 22 bp, synthetic construct
  misc_feature 1..22: note = chemically synthesized
  source 1..22: mol_type = other DNA
ttagtttattatatcacatttc

SEQ ID NO: 129784 - DNA, 22 bp, synthetic construct
  misc_feature 1..22: note = chemically synthesized
  source 1..22: mol_type = other DNA
gtttattatatcacatttctat

SEQ ID NO: 129785 - DNA, 22 bp, synthetic construct
  misc_feature 1..22: note = chemically synthesized
  source 1..22: mol_type = other DNA
attatatcacatttctataggt

SEQ ID NO: 129786 - DNA, 22 bp, synthetic construct
  misc_feature 1..22: note = chemically synthesized
  source 1..22: mol_type = other DNA
ttatatcacatttctataggtc

SEQ ID NO: 129787 - DNA, 22 bp, synthetic construct
  misc_feature 1..22: note = chemically synthesized
  source 1..22: mol_type = other DNA
tatcacatttctataggtctgc

SEQ ID NO: 129788 - DNA, 22 bp, synthetic construct
  misc_feature 1..22: note = chemically synthesized
  source 1..22: mol_type = other DNA
ctataggtctgcactctcatag

SEQ ID NO: 129789 - DNA, 22 bp, synthetic construct
  misc_feature 1..22: note = chemically synthesized
  source 1..22: mol_type = other DNA
tataggtctgcactctcatagg

SEQ ID NO: 129790 - DNA, 22 bp, synthetic construct
  misc_feature 1..22: note = chemically synthesized
  source 1..22: mol_type = other DNA
taggtctgcactctcataggct

SEQ ID NO: 129791 - DNA, 22 bp, synthetic construct
  misc_feature 1..22: note = chemically synthesized
  source 1..22: mol_type = other DNA
cactctcataggcttaactgag

SEQ ID NO: 129792 - DNA, 22 bp, synthetic construct
  misc_feature 1..22: note = chemically synthesized
  source 1..22: mol_type = other DNA
tcataggcttaactgagttctc

SEQ ID NO: 129793 - DNA, 22 bp, synthetic construct
  misc_feature 1..22: note = chemically synthesized
  source 1..22: mol_type = other DNA
ataggcttaactgagttctctg

SEQ ID NO: 129794 - DNA, 22 bp, synthetic construct
  misc_feature 1..22: note = chemically synthesized
  source 1..22: mol_type = other DNA
aactgagttctctgcttagggt

SEQ ID NO: 129795 - DNA, 22 bp, synthetic construct
  misc_feature 1..22: note = chemically synthesized
  source 1..22: mol_type = other DNA
actgagttctctgcttagggta

SEQ ID NO: 129796 - DNA, 22 bp, synthetic construct
  misc_feature 1..22: note = chemically synthesized
  source 1..22: mol_type = other DNA
agttctctgcttagggtatcat

SEQ ID NO: 129797 - DNA, 22 bp, synthetic construct
  misc_feature 1..22: note = chemically synthesized
  source 1..22: mol_type = other DNA
tctgcttagggtatcataaggt

SEQ ID NO: 129798 - DNA, 22 bp, synthetic construct
  misc_feature 1..22: note = chemically synthesized
  source 1..22: mol_type = other DNA
tgcttagggtatcataaggtca

SEQ ID NO: 129799 - DNA, 22 bp, synthetic construct
  misc_feature 1..22: note = chemically synthesized
  source 1..22: mol_type = other DNA
cttagggtatcataaggtcaaa

SEQ ID NO: 129800 - DNA, 22 bp, synthetic construct
  misc_feature 1..22: note = chemically synthesized
  source 1..22: mol_type = other DNA
agggtatcataaggtcaaattc

SEQ ID NO: 129801 - DNA, 22 bp, synthetic construct
  misc_feature 1..22: note = chemically synthesized
  source 1..22: mol_type = other DNA
gggtatcataaggtcaaattca

SEQ ID NO: 129802 - DNA, 22 bp, synthetic construct
  misc_feature 1..22: note = chemically synthesized
  source 1..22: mol_type = other DNA
aaaatatcgggagggctgggct

SEQ ID NO: 129803 - DNA, 22 bp, synthetic construct
  misc_feature 1..22: note = chemically synthesized
  source 1..22: mol_type = other DNA
ggctcttatccaaaggctctgg

SEQ ID NO: 129804 - DNA, 22 bp, synthetic construct
  misc_feature 1..22: note = chemically synthesized
  source 1..22: mol_type = other DNA
ttatccaaaggctctggggaag

SEQ ID NO: 129805 - DNA, 22 bp, synthetic construct
  misc_feature 1..22: note = chemically synthesized
  source 1..22: mol_type = other DNA
atccaaaggctctggggaagaa

SEQ ID NO: 129806 - DNA, 22 bp, synthetic construct
  misc_feature 1..22: note = chemically synthesized
  source 1..22: mol_type = other DNA
tccaaaggctctggggaagaat

SEQ ID NO: 129807 - DNA, 22 bp, synthetic construct
  misc_feature 1..22: note = chemically synthesized
  source 1..22: mol_type = other DNA
tggggaagaattcgcttccacg

SEQ ID NO: 129808 - DNA, 22 bp, synthetic construct
  misc_feature 1..22: note = chemically synthesized
  source 1..22: mol_type = other DNA
gggaagaattcgcttccacgtt

SEQ ID NO: 129809 - DNA, 22 bp, synthetic construct
  misc_feature 1..22: note = chemically synthesized
  source 1..22: mol_type = other DNA
gcttccacgttcattcagattg

SEQ ID NO: 129810 - DNA, 22 bp, synthetic construct
  misc_feature 1..22: note = chemically synthesized
  source 1..22: mol_type = other DNA
ccacgttcattcagattgtagt

SEQ ID NO: 129811 - DNA, 22 bp, synthetic construct
  misc_feature 1..22: note = chemically synthesized
  source 1..22: mol_type = other DNA
cacgttcattcagattgtagtc

SEQ ID NO: 129812 - DNA, 22 bp, synthetic construct
  misc_feature 1..22: note = chemically synthesized
  source 1..22: mol_type = other DNA
attcagattgtagtcagagctc

SEQ ID NO: 129813 - DNA, 22 bp, synthetic construct
  misc_feature 1..22: note = chemically synthesized
  source 1..22: mol_type = other DNA
agattgtagtcagagctcagtt

SEQ ID NO: 129814 - DNA, 22 bp, synthetic construct
  misc_feature 1..22: note = chemically synthesized
  source 1..22: mol_type = other DNA
tagtcagagctcagtttctttt

SEQ ID NO: 129815 - DNA, 22 bp, synthetic construct
  misc_feature 1..22: note = chemically synthesized
  source 1..22: mol_type = other DNA
agtttctttttttttctttttt

SEQ ID NO: 129816 - DNA, 22 bp, synthetic construct
  misc_feature 1..22: note = chemically synthesized
  source 1..22: mol_type = other DNA
ctttttttttcttttttttttt

SEQ ID NO: 129817 - DNA, 22 bp, synthetic construct
  misc_feature 1..22: note = chemically synthesized
  source 1..22: mol_type = other DNA
tttttttttctttttttttttt

SEQ ID NO: 129818 - DNA, 22 bp, synthetic construct
  misc_feature 1..22: note = chemically synthesized
  source 1..22: mol_type = other DNA
tttttttctttttttttttttt

SEQ ID NO: 129819 - DNA, 22 bp, synthetic construct
  misc_feature 1..22: note = chemically synthesized
  source 1..22: mol_type = other DNA
ttttttcttttttttttttttt

SEQ ID NO: 129820 - DNA, 22 bp, synthetic construct
  misc_feature 1..22: note = chemically synthesized
  source 1..22: mol_type = other DNA
tttttctttttttttttttttt

SEQ ID NO: 129821 - DNA, 22 bp, synthetic construct
  misc_feature 1..22: note = chemically synthesized
  source 1..22: mol_type = other DNA
ttttcttttttttttttttttt

SEQ ID NO: 129822 - DNA, 22 bp, synthetic construct
  misc_feature 1..22: note = chemically synthesized
  source 1..22: mol_type = other DNA
tttctttttttttttttttttt

SEQ ID NO: 129823 - DNA, 22 bp, synthetic construct
  misc_feature 1..22: note = chemically synthesized
  source 1..22: mol_type = other DNA
ttcttttttttttttttttttt

SEQ ID NO: 129824 - DNA, 22 bp, synthetic construct
  misc_feature 1..22: note = chemically synthesized
  source 1..22: mol_type = other DNA
tctttttttttttttttttttt

SEQ ID NO: 129825 - DNA, 22 bp, synthetic construct
  misc_feature 1..22: note = chemically synthesized
  source 1..22: mol_type = other DNA
cttttttttttttttttttttg

SEQ ID NO: 129826 - DNA, 22 bp, synthetic construct
  misc_feature 1..22: note = chemically synthesized
  source 1..22: mol_type = other DNA
ttttttttttttttttttttga

SEQ ID NO: 129827 - DNA, 22 bp, synthetic construct
  misc_feature 1..22: note = chemically synthesized
  source 1..22: mol_type = other DNA
ttttttttttttttttttgaga

SEQ ID NO: 129828 - DNA, 22 bp, synthetic construct
  misc_feature 1..22: note = chemically synthesized
  source 1..22: mol_type = other DNA
tttttttttttttttttgagat

SEQ ID NO: 129829 - DNA, 22 bp, synthetic construct
  misc_feature 1..22: note = chemically synthesized
  source 1..22: mol_type = other DNA
ttttttttttttttttgagatg

SEQ ID NO: 129830 - DNA, 22 bp, synthetic construct
  misc_feature 1..22: note = chemically synthesized
  source 1..22: mol_type = other DNA
tttttttttttttttgagatgg

SEQ ID NO: 129831 - DNA, 22 bp, synthetic construct
  misc_feature 1..22: note = chemically synthesized
  source 1..22: mol_type = other DNA
ttttttttttttttgagatgga

SEQ ID NO: 129832 - DNA, 22 bp, synthetic construct
  misc_feature 1..22: note = chemically synthesized
  source 1..22: mol_type = other DNA
tttttttttttttgagatggag

SEQ ID NO: 129833 - DNA, 22 bp, synthetic construct
  misc_feature 1..22: note = chemically synthesized
  source 1..22: mol_type = other DNA
ttttttttttttgagatggagt

SEQ ID NO: 129834 - DNA, 22 bp, synthetic construct
  misc_feature 1..22: note = chemically synthesized
  source 1..22: mol_type = other DNA
tttttttttttgagatggagtc

SEQ ID NO: 129835 - DNA, 22 bp, synthetic construct
  misc_feature 1..22: note = chemically synthesized
  source 1..22: mol_type = other DNA
ttttttttttgagatggagtct

SEQ ID NO: 129836 - DNA, 22 bp, synthetic construct
  misc_feature 1..22: note = chemically synthesized
  source 1..22: mol_type = other DNA
tttttttttgagatggagtctc

SEQ ID NO: 129837 - DNA, 22 bp, synthetic construct
  misc_feature 1..22: note = chemically synthesized
  source 1..22: mol_type = other DNA
ttttttttgagatggagtctcg

SEQ ID NO: 129838 - DNA, 22 bp, synthetic construct
  misc_feature 1..22: note = chemically synthesized
  source 1..22: mol_type = other DNA
tttttttgagatggagtctcgc

SEQ ID NO: 129839 - DNA, 22 bp, synthetic construct
  misc_feature 1..22: note = chemically synthesized
  source 1..22: mol_type = other DNA
ttttttgagatggagtctcgct

SEQ ID NO: 129840 - DNA, 22 bp, synthetic construct
  misc_feature 1..22: note = chemically synthesized
  source 1..22: mol_type = other DNA
tttttgagatggagtctcgctc

SEQ ID NO: 129841 - DNA, 22 bp, synthetic construct
  misc_feature 1..22: note = chemically synthesized
  source 1..22: mol_type = other DNA
ttttgagatggagtctcgctct

SEQ ID NO: 129842 - DNA, 22 bp, synthetic construct
  misc_feature 1..22: note = chemically synthesized
  source 1..22: mol_type = other DNA
tttgagatggagtctcgctctg

SEQ ID NO: 129843 - DNA, 22 bp, synthetic construct
  misc_feature 1..22: note = chemically synthesized
  source 1..22: mol_type = other DNA
ttgagatggagtctcgctctgt

SEQ ID NO: 129844 - DNA, 22 bp, synthetic construct
  misc_feature 1..22: note = chemically synthesized
  source 1..22: mol_type = other DNA
tgagatggagtctcgctctgtc

SEQ ID NO: 129845 - DNA, 22 bp, synthetic construct
  misc_feature 1..22: note = chemically synthesized
  source 1..22: mol_type = other DNA
gagatggagtctcgctctgtca

SEQ ID NO: 129846 - DNA, 22 bp, synthetic construct
  misc_feature 1..22: note = chemically synthesized
  source 1..22: mol_type = other DNA
agatggagtctcgctctgtcac

SEQ ID NO: 129847 - DNA, 22 bp, synthetic construct
  misc_feature 1..22: note = chemically synthesized
  source 1..22: mol_type = other DNA
gctctgtcacccagcctggagt

SEQ ID NO: 129848 - DNA, 22 bp, synthetic construct
  misc_feature 1..22: note = chemically synthesized
  source 1..22: mol_type = other DNA
tgtcacccagcctggagtgcag

SEQ ID NO: 129849 - DNA, 22 bp, synthetic construct
  misc_feature 1..22: note = chemically synthesized
  source 1..22: mol_type = other DNA
tcacccagcctggagtgcagtg

SEQ ID NO: 129850 - DNA, 22 bp, synthetic construct
  misc_feature 1..22: note = chemically synthesized
  source 1..22: mol_type = other DNA
gagtgcagtggcacaatctctt

SEQ ID NO: 129851 - DNA, 22 bp, synthetic construct
  misc_feature 1..22: note = chemically synthesized
  source 1..22: mol_type = other DNA
ttgctccctgcaacctgtgcct

SEQ ID NO: 129852 - DNA, 22 bp, synthetic construct
  misc_feature 1..22: note = chemically synthesized
  source 1..22: mol_type = other DNA
gctccctgcaacctgtgcctcc

SEQ ID NO: 129853 - DNA, 22 bp, synthetic construct
  misc_feature 1..22: note = chemically synthesized
  source 1..22: mol_type = other DNA
ctccctgcaacctgtgcctccc

SEQ ID NO: 129854 - DNA, 22 bp, synthetic construct
  misc_feature 1..22: note = chemically synthesized
  source 1..22: mol_type = other DNA
cctgcaacctgtgcctcccggg

SEQ ID NO: 129855 - DNA, 22 bp, synthetic construct
  misc_feature 1..22: note = chemically synthesized
  source 1..22: mol_type = other DNA
caacctgtgcctcccgggttca

SEQ ID NO: 129856 - DNA, 22 bp, synthetic construct
  misc_feature 1..22: note = chemically synthesized
  source 1..22: mol_type = other DNA
tgcctcccgggttcaagcaatt

SEQ ID NO: 129857 - DNA, 22 bp, synthetic construct
  misc_feature 1..22: note = chemically synthesized
  source 1..22: mol_type = other DNA
ccgggttcaagcaattctcctg

SEQ ID NO: 129858 - DNA, 22 bp, synthetic construct
  misc_feature 1..22: note = chemically synthesized
  source 1..22: mol_type = other DNA
aagcaattctcctgcctcagtt

SEQ ID NO: 129859 - DNA, 22 bp, synthetic construct
  misc_feature 1..22: note = chemically synthesized
  source 1..22: mol_type = other DNA
tcctgcctcagtttcccaagta

SEQ ID NO: 129860 - DNA, 22 bp, synthetic construct
  misc_feature 1..22: note = chemically synthesized
  source 1..22: mol_type = other DNA
ctgcctcagtttcccaagtagc

SEQ ID NO: 129861 - DNA, 22 bp, synthetic construct
  misc_feature 1..22: note = chemically synthesized
  source 1..22: mol_type = other DNA
cctcagtttcccaagtagctgg

SEQ ID NO: 129862 - DNA, 22 bp, synthetic construct
  misc_feature 1..22: note = chemically synthesized
  source 1..22: mol_type = other DNA
agtttcccaagtagctggaact

SEQ ID NO: 129863 - DNA, 22 bp, synthetic construct
  misc_feature 1..22: note = chemically synthesized
  source 1..22: mol_type = other DNA
cccaagtagctggaactacagg

SEQ ID NO: 129864 - DNA, 22 bp, synthetic construct
  misc_feature 1..22: note = chemically synthesized
  source 1..22: mol_type = other DNA
ccaagtagctggaactacaggc

SEQ ID NO: 129865 - DNA, 22 bp, synthetic construct
  misc_feature 1..22: note = chemically synthesized
  source 1..22: mol_type = other DNA
gaactacaggcaactgcaacca

SEQ ID NO: 129866 - DNA, 22 bp, synthetic construct
  misc_feature 1..22: note = chemically synthesized
  source 1..22: mol_type = other DNA
caggcaactgcaaccacacctg

SEQ ID NO: 129867 - DNA, 22 bp, synthetic construct
  misc_feature 1..22: note = chemically synthesized
  source 1..22: mol_type = other DNA
caaccacacctggctaattttt

SEQ ID NO: 129868 - DNA, 22 bp, synthetic construct
  misc_feature 1..22: note = chemically synthesized
  source 1..22: mol_type = other DNA
gctaatttttatattttttggt

SEQ ID NO: 129869 - DNA, 22 bp, synthetic construct
  misc_feature 1..22: note = chemically synthesized
  source 1..22: mol_type = other DNA
atttttatattttttggtaggg

SEQ ID NO: 129870 - DNA, 22 bp, synthetic construct
  misc_feature 1..22: note = chemically synthesized
  source 1..22: mol_type = other DNA
ttatattttttggtagggatgg

SEQ ID NO: 129871 - DNA, 22 bp, synthetic construct
  misc_feature 1..22: note = chemically synthesized
  source 1..22: mol_type = other DNA
tatattttttggtagggatgga

SEQ ID NO: 129872 - DNA, 22 bp, synthetic construct
  misc_feature 1..22: note = chemically synthesized
  source 1..22: mol_type = other DNA
atattttttggtagggatggaa

SEQ ID NO: 129873 - DNA, 22 bp, synthetic construct
  misc_feature 1..22: note = chemically synthesized
  source 1..22: mol_type = other DNA
tattttttggtagggatggaat

SEQ ID NO: 129874 - DNA, 22 bp, synthetic construct
  misc_feature 1..22: note = chemically synthesized
  source 1..22: mol_type = other DNA
tttggtagggatggaatttcac

SEQ ID NO: 129875 - DNA, 22 bp, synthetic construct
  misc_feature 1..22: note = chemically synthesized
  source 1..22: mol_type = other DNA
ttggtagggatggaatttcacc

SEQ ID NO: 129876 - DNA, 22 bp, synthetic construct
  misc_feature 1..22: note = chemically synthesized
  source 1..22: mol_type = other DNA
tggtagggatggaatttcacca

SEQ ID NO: 129877 - DNA, 22 bp, synthetic construct
  misc_feature 1..22: note = chemically synthesized
  source 1..22: mol_type = other DNA
ggtagggatggaatttcaccat

SEQ ID NO: 129878 - DNA, 22 bp, synthetic construct
  misc_feature 1..22: note = chemically synthesized
  source 1..22: mol_type = other DNA
gtagggatggaatttcaccatg

SEQ ID NO: 129879 - DNA, 22 bp, synthetic construct
  misc_feature 1..22: note = chemically synthesized
  source 1..22: mol_type = other DNA
caccatgttggccaggctggtc

SEQ ID NO: 129880 - DNA, 22 bp, synthetic construct
  misc_feature 1..22: note = chemically synthesized
  source 1..22: mol_type = other DNA
accatgttggccaggctggtct

SEQ ID NO: 129881 - DNA, 22 bp, synthetic construct
  misc_feature 1..22: note = chemically synthesized
  source 1..22: mol_type = other DNA
gccaggctggtctggaactcct

SEQ ID NO: 129882 - DNA, 22 bp, synthetic construct
  misc_feature 1..22: note = chemically synthesized
  source 1..22: mol_type = other DNA
gtctggaactcctgacctcagg

SEQ ID NO: 129883 - DNA, 22 bp, synthetic construct
  misc_feature 1..22: note = chemically synthesized
  source 1..22: mol_type = other DNA
gaactcctgacctcaggtgatc

SEQ ID NO: 129884 - DNA, 22 bp, synthetic construct
  misc_feature 1..22: note = chemically synthesized
  source 1..22: mol_type = other DNA
ctgacctcaggtgatccgcccg

SEQ ID NO: 129885 - DNA, 22 bp, synthetic construct
  misc_feature 1..22: note = chemically synthesized
  source 1..22: mol_type = other DNA
acctcaggtgatccgcccgcct

SEQ ID NO: 129886 - DNA, 22 bp, synthetic construct
  misc_feature 1..22: note = chemically synthesized
  source 1..22: mol_type = other DNA
aggtgatccgcccgccttggcc

SEQ ID NO: 129887 - DNA, 22 bp, synthetic construct
  misc_feature 1..22: note = chemically synthesized
  source 1..22: mol_type = other DNA
ggcctcccaaagtgctgggatt

SEQ ID NO: 129888 - DNA, 22 bp, synthetic construct
  misc_feature 1..22: note = chemically synthesized
  source 1..22: mol_type = other DNA
gcctcccaaagtgctgggatta

SEQ ID NO: 129889 - DNA, 22 bp, synthetic construct
  misc_feature 1..22: note = chemically synthesized
  source 1..22: mol_type = other DNA
ccaaagtgctgggattacaggc

SEQ ID NO: 129890 - DNA, 22 bp, synthetic construct
  misc_feature 1..22: note = chemically synthesized
  source 1..22: mol_type = other DNA
ggattacaggcttgaatgagcc

SEQ ID NO: 129891 - DNA, 22 bp, synthetic construct
  misc_feature 1..22: note = chemically synthesized
  source 1..22: mol_type = other DNA
caggcttgaatgagccattgca

SEQ ID NO: 129892 - DNA, 22 bp, synthetic construct
  misc_feature 1..22: note = chemically synthesized
  source 1..22: mol_type = other DNA
gaatgagccattgcacccggct

SEQ ID NO: 129893 - DNA, 22 bp, synthetic construct
  misc_feature 1..22: note = chemically synthesized
  source 1..22: mol_type = other DNA
aatgagccattgcacccggctg

SEQ ID NO: 129894 - DNA, 22 bp, synthetic construct
  misc_feature 1..22: note = chemically synthesized
  source 1..22: mol_type = other DNA
cacccggctgtcagagttcagt

SEQ ID NO: 129895 - DNA, 22 bp, synthetic construct
  misc_feature 1..22: note = chemically synthesized
  source 1..22: mol_type = other DNA
tcagagttcagtttcctactgc

SEQ ID NO: 129896 - DNA, 22 bp, synthetic construct
  misc_feature 1..22: note = chemically synthesized
  source 1..22: mol_type = other DNA
agtttcctactgctgaactctg

SEQ ID NO: 129897 - DNA, 22 bp, synthetic construct
  misc_feature 1..22: note = chemically synthesized
  source 1..22: mol_type = other DNA
cctactgctgaactctgaagtc

SEQ ID NO: 129898 - DNA, 22 bp, synthetic construct
  misc_feature 1..22: note = chemically synthesized
  source 1..22: mol_type = other DNA
ctactgctgaactctgaagtcc

SEQ ID NO: 129899 - DNA, 22 bp, synthetic construct
  misc_feature 1..22: note = chemically synthesized
  source 1..22: mol_type = other DNA
ctgctgaactctgaagtccctg

SEQ ID NO: 129900 - DNA, 22 bp, synthetic construct
  misc_feature 1..22: note = chemically synthesized
  source 1..22: mol_type = other DNA
ctgaactctgaagtccctgttt

SEQ ID NO: 129901 - DNA, 22 bp, synthetic construct
  misc_feature 1..22: note = chemically synthesized
  source 1..22: mol_type = other DNA
aactctgaagtccctgtttgtt

SEQ ID NO: 129902 - DNA, 22 bp, synthetic construct
  misc_feature 1..22: note = chemically synthesized
  source 1..22: mol_type = other DNA
tgaagtccctgtttgtttttgt

SEQ ID NO: 129903 - DNA, 22 bp, synthetic construct
  misc_feature 1..22: note = chemically synthesized
  source 1..22: mol_type = other DNA
aagtccctgtttgtttttgttt

SEQ ID NO: 129904 - DNA, 22 bp, synthetic construct
  misc_feature 1..22: note = chemically synthesized
  source 1..22: mol_type = other DNA
tttgtttttgtttttgtttttt

SEQ ID NO: 129905 - DNA, 22 bp, synthetic construct
  misc_feature 1..22: note = chemically synthesized
  source 1..22: mol_type = other DNA
gtttttgtttttgttttttgtt

SEQ ID NO: 129906 - DNA, 22 bp, synthetic construct
  misc_feature 1..22: note = chemically synthesized
  source 1..22: mol_type = other DNA
tttttgtttttgttttttgttt

SEQ ID NO: 129907 - DNA, 22 bp, synthetic construct
  misc_feature 1..22: note = chemically synthesized
  source 1..22: mol_type = other DNA
ttgtttttgttttttgtttgtt

SEQ ID NO: 129908 - DNA, 22 bp, synthetic construct
  misc_feature 1..22: note = chemically synthesized
  source 1..22: mol_type = other DNA
tgtttttgttttttgtttgttt

SEQ ID NO: 129909 - DNA, 22 bp, synthetic construct
  misc_feature 1..22: note = chemically synthesized
  source 1..22: mol_type = other DNA
gtttttgttttttgtttgtttg

SEQ ID NO: 129910 - DNA, 22 bp, synthetic construct
  misc_feature 1..22: note = chemically synthesized
  source 1..22: mol_type = other DNA
tttttgttttttgtttgtttgt

SEQ ID NO: 129911 - DNA, 22 bp, synthetic construct
  misc_feature 1..22: note = chemically synthesized
  source 1..22: mol_type = other DNA
ttgttttttgtttgtttgtttg

SEQ ID NO: 129912 - DNA, 22 bp, synthetic construct
  misc_feature 1..22: note = chemically synthesized
  source 1..22: mol_type = other DNA
tgttttttgtttgtttgtttgc

SEQ ID NO: 129913 - DNA, 22 bp, synthetic construct
  misc_feature 1..22: note = chemically synthesized
  source 1..22: mol_type = other DNA
gttttttgtttgtttgtttgca

SEQ ID NO: 129914 - DNA, 22 bp, synthetic construct
  misc_feature 1..22: note = chemically synthesized
  source 1..22: mol_type = other DNA
ttttttgtttgtttgtttgcag

SEQ ID NO: 129915 - DNA, 22 bp, synthetic construct
  misc_feature 1..22: note = chemically synthesized
  source 1..22: mol_type = other DNA
tttgtttgtttgtttgcaggct

SEQ ID NO: 129916 - DNA, 22 bp, synthetic construct
  misc_feature 1..22: note = chemically synthesized
  source 1..22: mol_type = other DNA
ttgtttgtttgtttgcaggctg

SEQ ID NO: 129917 - DNA, 22 bp, synthetic construct
  misc_feature 1..22: note = chemically synthesized
  source 1..22: mol_type = other DNA
tgtttgtttgtttgcaggctgt

SEQ ID NO: 129918 - DNA, 22 bp, synthetic construct
  misc_feature 1..22: note = chemically synthesized
  source 1..22: mol_type = other DNA
gtttgtttgtttgcaggctgtt

SEQ ID NO: 129919 - DNA, 22 bp, synthetic construct
  misc_feature 1..22: note = chemically synthesized
  source 1..22: mol_type = other DNA
tttgtttgtttgcaggctgtta

SEQ ID NO: 129920 - DNA, 22 bp, synthetic construct
  misc_feature 1..22: note = chemically synthesized
  source 1..22: mol_type = other DNA
gtttgtttgcaggctgttagct

SEQ ID NO: 129921 - DNA, 22 bp, synthetic construct
  misc_feature 1..22: note = chemically synthesized
  source 1..22: mol_type = other DNA
tttgtttgcaggctgttagcta

SEQ ID NO: 129922 - DNA, 22 bp, synthetic construct
  misc_feature 1..22: note = chemically synthesized
  source 1..22: mol_type = other DNA
gtttgcaggctgttagctagga

SEQ ID NO: 129923 - DNA, 22 bp, synthetic construct
  misc_feature 1..22: note = chemically synthesized
  source 1..22: mol_type = other DNA
tttgcaggctgttagctaggat

SEQ ID NO: 129924 - DNA, 22 bp, synthetic construct
  misc_feature 1..22: note = chemically synthesized
  source 1..22: mol_type = other DNA
gcaggctgttagctaggatgcc

SEQ ID NO: 129925 - DNA, 22 bp, synthetic construct
  misc_feature 1..22: note = chemically synthesized
  source 1..22: mol_type = other DNA
caggctgttagctaggatgccc

SEQ ID NO: 129926 - DNA, 22 bp, synthetic construct
  misc_feature 1..22: note = chemically synthesized
  source 1..22: mol_type = other DNA
ttagctaggatgcccgttctgt

SEQ ID NO: 129927 - DNA, 22 bp, synthetic construct
  misc_feature 1..22: note = chemically synthesized
  source 1..22: mol_type = other DNA
gctaggatgcccgttctgtacc

SEQ ID NO: 129928 - DNA, 22 bp, synthetic construct
  misc_feature 1..22: note = chemically synthesized
  source 1..22: mol_type = other DNA
ggatgcccgttctgtacctagg

SEQ ID NO: 129929 - DNA, 22 bp, synthetic construct
  misc_feature 1..22: note = chemically synthesized
  source 1..22: mol_type = other DNA
tgtacctaggggcttcttgcat

SEQ ID NO: 129930 - DNA, 22 bp, synthetic construct
  misc_feature 1..22: note = chemically synthesized
  source 1..22: mol_type = other DNA
tacctaggggcttcttgcattc

SEQ ID NO: 129931 - DNA, 22 bp, synthetic construct
  misc_feature 1..22: note = chemically synthesized
  source 1..22: mol_type = other DNA
ggggcttcttgcattccttctt

SEQ ID NO: 129932 - DNA, 22 bp, synthetic construct
  misc_feature 1..22: note = chemically synthesized
  source 1..22: mol_type = other DNA
cttgcattccttcttttgtgac

SEQ ID NO: 129933 - DNA, 22 bp, synthetic construct
  misc_feature 1..22: note = chemically synthesized
  source 1..22: mol_type = other DNA
ttgcattccttcttttgtgacc

SEQ ID NO: 129934 - DNA, 22 bp, synthetic construct
  misc_feature 1..22: note = chemically synthesized
  source 1..22: mol_type = other DNA
gcattccttcttttgtgacctc

SEQ ID NO: 129935 - DNA, 22 bp, synthetic construct
  misc_feature 1..22: note = chemically synthesized
  source 1..22: mol_type = other DNA
cattccttcttttgtgacctcc

SEQ ID NO: 129936 - DNA, 22 bp, synthetic construct
  misc_feature 1..22: note = chemically synthesized
  source 1..22: mol_type = other DNA
cttcttttgtgacctccttata

SEQ ID NO: 129937 - DNA, 22 bp, synthetic construct
  misc_feature 1..22: note = chemically synthesized
  source 1..22: mol_type = other DNA
cttttgtgacctccttatattt

SEQ ID NO: 129938 - DNA, 22 bp, synthetic construct
  misc_feature 1..22: note = chemically synthesized
  source 1..22: mol_type = other DNA
ttttgtgacctccttatatttc

SEQ ID NO: 129939 - DNA, 22 bp, synthetic construct
  misc_feature 1..22: note = chemically synthesized
  source 1..22: mol_type = other DNA
ttgtgacctccttatatttcaa

SEQ ID NO: 129940 - DNA, 22 bp, synthetic construct
  misc_feature 1..22: note = chemically synthesized
  source 1..22: mol_type = other DNA
tgtgacctccttatatttcaaa

SEQ ID NO: 129941 - DNA, 22 bp, synthetic construct
  misc_feature 1..22: note = chemically synthesized
  source 1..22: mol_type = other DNA
gtgacctccttatatttcaaac

SEQ ID NO: 129942 - DNA, 22 bp, synthetic construct
  misc_feature 1..22: note = chemically synthesized
  source 1..22: mol_type = other DNA
tgacctccttatatttcaaacc

SEQ ID NO: 129943 - DNA, 22 bp, synthetic construct
  misc_feature 1..22: note = chemically synthesized
  source 1..22: mol_type = other DNA
cttatatttcaaaccagcaact

SEQ ID NO: 129944 - DNA, 22 bp, synthetic construct
  misc_feature 1..22: note = chemically synthesized
  source 1..22: mol_type = other DNA
atatttcaaaccagcaactgac

SEQ ID NO: 129945 - DNA, 22 bp, synthetic construct
  misc_feature 1..22: note = chemically synthesized
  source 1..22: mol_type = other DNA
tatttcaaaccagcaactgacc

SEQ ID NO: 129946 - DNA, 22 bp, synthetic construct
  misc_feature 1..22: note = chemically synthesized
  source 1..22: mol_type = other DNA
caaaccagcaactgacccatga

SEQ ID NO: 129947 - DNA, 22 bp, synthetic construct
  misc_feature 1..22: note = chemically synthesized
  source 1..22: mol_type = other DNA
aaaccagcaactgacccatgaa

SEQ ID NO: 129948 - DNA, 22 bp, synthetic construct
  misc_feature 1..22: note = chemically synthesized
  source 1..22: mol_type = other DNA
acccatgaacctttctcaaatt

SEQ ID NO: 129949 - DNA, 22 bp, synthetic construct
  misc_feature 1..22: note = chemically synthesized
  source 1..22: mol_type = other DNA
tctcaaattttgaatatgtctg

SEQ ID NO: 129950 - DNA, 22 bp, synthetic construct
  misc_feature 1..22: note = chemically synthesized
  source 1..22: mol_type = other DNA
ctcaaattttgaatatgtctgg

SEQ ID NO: 129951 - DNA, 22 bp, synthetic construct
  misc_feature 1..22: note = chemically synthesized
  source 1..22: mol_type = other DNA
tcaaattttgaatatgtctggc

SEQ ID NO: 129952 - DNA, 22 bp, synthetic construct
  misc_feature 1..22: note = chemically synthesized
  source 1..22: mol_type = other DNA
aaattttgaatatgtctggctt

SEQ ID NO: 129953 - DNA, 22 bp, synthetic construct
  misc_feature 1..22: note = chemically synthesized
  source 1..22: mol_type = other DNA
tgaatatgtctggcttcctatt

SEQ ID NO: 129954 - DNA, 22 bp, synthetic construct
  misc_feature 1..22: note = chemically synthesized
  source 1..22: mol_type = other DNA
gaatatgtctggcttcctattc

SEQ ID NO: 129955 - DNA, 22 bp, synthetic construct
  misc_feature 1..22: note = chemically synthesized
  source 1..22: mol_type = other DNA
aatatgtctggcttcctattct

SEQ ID NO: 129956 - DNA, 22 bp, synthetic construct
  misc_feature 1..22: note = chemically synthesized
  source 1..22: mol_type = other DNA
gcttcctattctcctactactt

SEQ ID NO: 129957 - DNA, 22 bp, synthetic construct
  misc_feature 1..22: note = chemically synthesized
  source 1..22: mol_type = other DNA
cctattctcctactacttggtg

SEQ ID NO: 129958 - DNA, 22 bp, synthetic construct
  misc_feature 1..22: note = chemically synthesized
  source 1..22: mol_type = other DNA
ctattctcctactacttggtga

SEQ ID NO: 129959 - DNA, 22 bp, synthetic construct
  misc_feature 1..22: note = chemically synthesized
  source 1..22: mol_type = other DNA
ttctcctactacttggtgaaaa

SEQ ID NO: 129960 - DNA, 22 bp, synthetic construct
  misc_feature 1..22: note = chemically synthesized
  source 1..22: mol_type = other DNA
tcctactacttggtgaaaactc

SEQ ID NO: 129961 - DNA, 22 bp, synthetic construct
  misc_feature 1..22: note = chemically synthesized
  source 1..22: mol_type = other DNA
ctactacttggtgaaaactctg

SEQ ID NO: 129962 - DNA, 22 bp, synthetic construct
  misc_feature 1..22: note = chemically synthesized
  source 1..22: mol_type = other DNA
ctacttggtgaaaactctgctt

SEQ ID NO: 129963 - DNA, 22 bp, synthetic construct
  misc_feature 1..22: note = chemically synthesized
  source 1..22: mol_type = other DNA
cttggtgaaaactctgctttta

SEQ ID NO: 129964 - DNA, 22 bp, synthetic construct
  misc_feature 1..22: note = chemically synthesized
  source 1..22: mol_type = other DNA
ggtgaaaactctgcttttaggg

SEQ ID NO: 129965 - DNA, 22 bp, synthetic construct
  misc_feature 1..22: note = chemically synthesized
  source 1..22: mol_type = other DNA
gtgaaaactctgcttttagggg

SEQ ID NO: 129966 - DNA, 22 bp, synthetic construct
  misc_feature 1..22: note = chemically synthesized
  source 1..22: mol_type = other DNA
tgcttttaggggctcatggaat

SEQ ID NO: 129967 - DNA, 22 bp, synthetic construct
  misc_feature 1..22: note = chemically synthesized
  source 1..22: mol_type = other DNA
cttttaggggctcatggaatta

SEQ ID NO: 129968 - DNA, 22 bp, synthetic construct
  misc_feature 1..22: note = chemically synthesized
  source 1..22: mol_type = other DNA
ttaggggctcatggaattagac

SEQ ID NO: 129969 - DNA, 22 bp, synthetic construct
  misc_feature 1..22: note = chemically synthesized
  source 1..22: mol_type = other DNA
taggggctcatggaattagact

SEQ ID NO: 129970 - DNA, 22 bp, synthetic construct
  misc_feature 1..22: note = chemically synthesized
  source 1..22: mol_type = other DNA
aggggctcatggaattagacta

SEQ ID NO: 129971 - DNA, 22 bp, synthetic construct
  misc_feature 1..22: note = chemically synthesized
  source 1..22: mol_type = other DNA
ggggctcatggaattagactag

SEQ ID NO: 129972 - DNA, 22 bp, synthetic construct
  misc_feature 1..22: note = chemically synthesized
  source 1..22: mol_type = other DNA
atggaattagactaggttcccc

SEQ ID NO: 129973 - DNA, 22 bp, synthetic construct
  misc_feature 1..22: note = chemically synthesized
  source 1..22: mol_type = other DNA
gactaggttcccctgagtaatt

SEQ ID NO: 129974 - DNA, 22 bp, synthetic construct
  misc_feature 1..22: note = chemically synthesized
  source 1..22: mol_type = other DNA
ggttcccctgagtaatttcctt

SEQ ID NO: 129975 - DNA, 22 bp, synthetic construct
  misc_feature 1..22: note = chemically synthesized
  source 1..22: mol_type = other DNA
ccctgagtaatttccttttcaa

SEQ ID NO: 129976 - DNA, 22 bp, synthetic construct
  misc_feature 1..22: note = chemically synthesized
  source 1..22: mol_type = other DNA
agtaatttccttttcaattaac

SEQ ID NO: 129977 - DNA, 22 bp, synthetic construct
  misc_feature 1..22: note = chemically synthesized
  source 1..22: mol_type = other DNA
ccttttcaattaactcaaagtc

SEQ ID NO: 129978 - DNA, 22 bp, synthetic construct
  misc_feature 1..22: note = chemically synthesized
  source 1..22: mol_type = other DNA
cttttcaattaactcaaagtca

SEQ ID NO: 129979 - DNA, 22 bp, synthetic construct
  misc_feature 1..22: note = chemically synthesized
  source 1..22: mol_type = other DNA
ttcaattaactcaaagtcaata

SEQ ID NO: 129980 - DNA, 22 bp, synthetic construct
  misc_feature 1..22: note = chemically synthesized
  source 1..22: mol_type = other DNA
tcaattaactcaaagtcaatag

SEQ ID NO: 129981 - DNA, 22 bp, synthetic construct
  misc_feature 1..22: note = chemically synthesized
  source 1..22: mol_type = other DNA
caattaactcaaagtcaataga

SEQ ID NO: 129982 - DNA, 22 bp, synthetic construct
  misc_feature 1..22: note = chemically synthesized
  source 1..22: mol_type = other DNA
aattaactcaaagtcaatagat

SEQ ID NO: 129983 - DNA, 22 bp, synthetic construct
  misc_feature 1..22: note = chemically synthesized
  source 1..22: mol_type = other DNA
actcaaagtcaatagatcagca

SEQ ID NO: 129984 - DNA, 22 bp, synthetic construct
  misc_feature 1..22: note = chemically synthesized
  source 1..22: mol_type = other DNA
aaagtcaatagatcagcaactt

SEQ ID NO: 129985 - DNA, 22 bp, synthetic construct
  misc_feature 1..22: note = chemically synthesized
  source 1..22: mol_type = other DNA
taattacatctgtataacccca

SEQ ID NO: 129986 - DNA, 22 bp, synthetic construct
  misc_feature 1..22: note = chemically synthesized
  source 1..22: mol_type = other DNA
aattacatctgtataaccccaa

SEQ ID NO: 129987 - DNA, 22 bp, synthetic construct
  misc_feature 1..22: note = chemically synthesized
  source 1..22: mol_type = other DNA
attacatctgtataaccccaag

SEQ ID NO: 129988 - DNA, 22 bp, synthetic construct
  misc_feature 1..22: note = chemically synthesized
  source 1..22: mol_type = other DNA
catctgtataaccccaagcatg

SEQ ID NO: 129989 - DNA, 22 bp, synthetic construct
  misc_feature 1..22: note = chemically synthesized
  source 1..22: mol_type = other DNA
tataaccccaagcatgatattg

SEQ ID NO: 129990 - DNA, 22 bp, synthetic construct
  misc_feature 1..22: note = chemically synthesized
  source 1..22: mol_type = other DNA
tatcatattcacagtcctagaa

SEQ ID NO: 129991 - DNA, 22 bp, synthetic construct
  misc_feature 1..22: note = chemically synthesized
  source 1..22: mol_type = other DNA
acagtcctagaaattaggatag

SEQ ID NO: 129992 - DNA, 22 bp, synthetic construct
  misc_feature 1..22: note = chemically synthesized
  source 1..22: mol_type = other DNA
gaaattaggataggaaatcttg

SEQ ID NO: 129993 - DNA, 22 bp, synthetic construct
  misc_feature 1..22: note = chemically synthesized
  source 1..22: mol_type = other DNA
ggataggaaatcttgtggtaga

SEQ ID NO: 129994 - DNA, 22 bp, synthetic construct
  misc_feature 1..22: note = chemically synthesized
  source 1..22: mol_type = other DNA
gtggtagaaaggtttttaaaat

SEQ ID NO: 129995 - DNA, 22 bp, synthetic construct
  misc_feature 1..22: note = chemically synthesized
  source 1..22: mol_type = other DNA
tggtagaaaggtttttaaaatt

SEQ ID NO: 129996 - DNA, 22 bp, synthetic construct
  misc_feature 1..22: note = chemically synthesized
  source 1..22: mol_type = other DNA
ttaaaattatgcctatcacacc

SEQ ID NO: 129997 - DNA, 22 bp, synthetic construct
  misc_feature 1..22: note = chemically synthesized
  source 1..22: mol_type = other DNA
taaaattatgcctatcacacca

SEQ ID NO: 129998 - DNA, 22 bp, synthetic construct
  misc_feature 1..22: note = chemically synthesized
  source 1..22: mol_type = other DNA
aaaattatgcctatcacaccat

SEQ ID NO: 129999 - DNA, 22 bp, synthetic construct
  misc_feature 1..22: note = chemically synthesized
  source 1..22: mol_type = other DNA
aaattatgcctatcacaccatt

SEQ ID NO: 130000 - DNA, 22 bp, synthetic construct
  misc_feature 1..22: note = chemically synthesized
  source 1..22: mol_type = other DNA
tgcctatcacaccatttaaaaa

SEQ ID NO: 130001 - DNA, 22 bp, synthetic construct
  misc_feature 1..22: note = chemically synthesized
  source 1..22: mol_type = other DNA
tcacaccatttaaaaaatagct

SEQ ID NO: 130002 - DNA, 22 bp, synthetic construct
  misc_feature 1..22: note = chemically synthesized
  source 1..22: mol_type = other DNA
aaaaaatagctagtgagagagg

SEQ ID NO: 130003 - DNA, 22 bp, synthetic construct
  misc_feature 1..22: note = chemically synthesized
  source 1..22: mol_type = other DNA
aaaaatagctagtgagagagga

SEQ ID NO: 130004 - DNA, 22 bp, synthetic construct
  misc_feature 1..22: note = chemically synthesized
  source 1..22: mol_type = other DNA
gtgagagaggagactttctttt

SEQ ID NO: 130005 - DNA, 22 bp, synthetic construct
  misc_feature 1..22: note = chemically synthesized
  source 1..22: mol_type = other DNA
tcttttccaatatatgtgttag

SEQ ID NO: 130006 - DNA, 22 bp, synthetic construct
  misc_feature 1..22: note = chemically synthesized
  source 1..22: mol_type = other DNA
cttttccaatatatgtgttagt

SEQ ID NO: 130007 - DNA, 22 bp, synthetic construct
  misc_feature 1..22: note = chemically synthesized
  source 1..22: mol_type = other DNA
ttttccaatatatgtgttagtt

SEQ ID NO: 130008 - DNA, 22 bp, synthetic construct
  misc_feature 1..22: note = chemically synthesized
  source 1..22: mol_type = other DNA
ttccaatatatgtgttagtttt

SEQ ID NO: 130009 - DNA, 22 bp, synthetic construct
  misc_feature 1..22: note = chemically synthesized
  source 1..22: mol_type = other DNA
tccaatatatgtgttagtttta

SEQ ID NO: 130010 - DNA, 22 bp, synthetic construct
  misc_feature 1..22: note = chemically synthesized
  source 1..22: mol_type = other DNA
ccaatatatgtgttagttttaa

SEQ ID NO: 130011 - DNA, 22 bp, synthetic construct
  misc_feature 1..22: note = chemically synthesized
  source 1..22: mol_type = other DNA
caatatatgtgttagttttaaa

SEQ ID NO: 130012 - DNA, 22 bp, synthetic construct
  misc_feature 1..22: note = chemically synthesized
  source 1..22: mol_type = other DNA
gttttaaagtatgtgtgaaata

SEQ ID NO: 130013 - DNA, 22 bp, synthetic construct
  misc_feature 1..22: note = chemically synthesized
  source 1..22: mol_type = other DNA
taaagtatgtgtgaaataattt

SEQ ID NO: 130014 - DNA, 22 bp, synthetic construct
  misc_feature 1..22: note = chemically synthesized
  source 1..22: mol_type = other DNA
aaagtatgtgtgaaataatttt

SEQ ID NO: 130015 - DNA, 22 bp, synthetic construct
  misc_feature 1..22: note = chemically synthesized
  source 1..22: mol_type = other DNA
aagtatgtgtgaaataattttt

SEQ ID NO: 130016 - DNA, 22 bp, synthetic construct
  misc_feature 1..22: note = chemically synthesized
  source 1..22: mol_type = other DNA
ttattcttaacatttttttgat

SEQ ID NO: 130017 - DNA, 22 bp, synthetic construct
  misc_feature 1..22: note = chemically synthesized
  source 1..22: mol_type = other DNA
tattcttaacatttttttgatg

SEQ ID NO: 130018 - DNA, 22 bp, synthetic construct
  misc_feature 1..22: note = chemically synthesized
  source 1..22: mol_type = other DNA
attcttaacatttttttgatga

SEQ ID NO: 130019 - DNA, 22 bp, synthetic construct
  misc_feature 1..22: note = chemically synthesized
  source 1..22: mol_type = other DNA
ttcttaacatttttttgatgaa

SEQ ID NO: 130020 - DNA, 22 bp, synthetic construct
  misc_feature 1..22: note = chemically synthesized
  source 1..22: mol_type = other DNA
ttaacatttttttgatgaagca

SEQ ID NO: 130021 - DNA, 22 bp, synthetic construct
  misc_feature 1..22: note = chemically synthesized
  source 1..22: mol_type = other DNA
aacatttttttgatgaagcaca

SEQ ID NO: 130022 - DNA, 22 bp, synthetic construct
  misc_feature 1..22: note = chemically synthesized
  source 1..22: mol_type = other DNA
acatttttttgatgaagcacaa

SEQ ID NO: 130023 - DNA, 22 bp, synthetic construct
  misc_feature 1..22: note = chemically synthesized
  source 1..22: mol_type = other DNA
ttttgatgaagcacaatgtctg

SEQ ID NO: 130024 - DNA, 22 bp, synthetic construct
  misc_feature 1..22: note = chemically synthesized
  source 1..22: mol_type = other DNA
tttgatgaagcacaatgtctga

SEQ ID NO: 130025 - DNA, 22 bp, synthetic construct
  misc_feature 1..22: note = chemically synthesized
  source 1..22: mol_type = other DNA
ttgatgaagcacaatgtctgaa

SEQ ID NO: 130026 - DNA, 22 bp, synthetic construct
  misc_feature 1..22: note = chemically synthesized
  source 1..22: mol_type = other DNA
tgatgaagcacaatgtctgaaa

SEQ ID NO: 130027 - DNA, 22 bp, synthetic construct
  misc_feature 1..22: note = chemically synthesized
  source 1..22: mol_type = other DNA
gatgaagcacaatgtctgaaag

SEQ ID NO: 130028 - DNA, 22 bp, synthetic construct
  misc_feature 1..22: note = chemically synthesized
  source 1..22: mol_type = other DNA
atgaagcacaatgtctgaaagg

SEQ ID NO: 130029 - DNA, 22 bp, synthetic construct
  misc_feature 1..22: note = chemically synthesized
  source 1..22: mol_type = other DNA
aaagggtggtagaaagcagctg

SEQ ID NO: 130030 - DNA, 22 bp, synthetic construct
  misc_feature 1..22: note = chemically synthesized
  source 1..22: mol_type = other DNA
gagtcgaaactgaggatgaagt

SEQ ID NO: 130031 - DNA, 22 bp, synthetic construct
  misc_feature 1..22: note = chemically synthesized
  source 1..22: mol_type = other DNA
aggatgaagtcgtatagtctag

SEQ ID NO: 130032 - DNA, 22 bp, synthetic construct
  misc_feature 1..22: note = chemically synthesized
  source 1..22: mol_type = other DNA
gagctgtgctgtccaaaacagt

SEQ ID NO: 130033 - DNA, 22 bp, synthetic construct
  misc_feature 1..22: note = chemically synthesized
  source 1..22: mol_type = other DNA
tgctgtccaaaacagtagcatc

SEQ ID NO: 130034 - DNA, 22 bp, synthetic construct
  misc_feature 1..22: note = chemically synthesized
  source 1..22: mol_type = other DNA
tccaaaacagtagcatctggtt

SEQ ID NO: 130035 - DNA, 22 bp, synthetic construct
  misc_feature 1..22: note = chemically synthesized
  source 1..22: mol_type = other DNA
gttagcttgagtcagaattttc

SEQ ID NO: 130036 - DNA, 22 bp, synthetic construct
  misc_feature 1..22: note = chemically synthesized
  source 1..22: mol_type = other DNA
gcttgagtcagaattttctgta

SEQ ID NO: 130037 - DNA, 22 bp, synthetic construct
  misc_feature 1..22: note = chemically synthesized
  source 1..22: mol_type = other DNA
gagtcagaattttctgtaagtg

SEQ ID NO: 130038 - DNA, 22 bp, synthetic construct
  misc_feature 1..22: note = chemically synthesized
  source 1..22: mol_type = other DNA
agtcagaattttctgtaagtgt

SEQ ID NO: 130039 - DNA, 22 bp, synthetic construct
  misc_feature 1..22: note = chemically synthesized
  source 1..22: mol_type = other DNA
tctgtaagtgtaaacactcgat

SEQ ID NO: 130040 - DNA, 22 bp, synthetic construct
  misc_feature 1..22: note = chemically synthesized
  source 1..22: mol_type = other DNA
ctgtaagtgtaaacactcgatt

SEQ ID NO: 130041 - DNA, 22 bp, synthetic construct
  misc_feature 1..22: note = chemically synthesized
  source 1..22: mol_type = other DNA
tgtaagtgtaaacactcgattt

SEQ ID NO: 130042 - DNA, 22 bp, synthetic construct
  misc_feature 1..22: note = chemically synthesized
  source 1..22: mol_type = other DNA
taagtgtaaacactcgattttg

SEQ ID NO: 130043 - DNA, 22 bp, synthetic construct
  misc_feature 1..22: note = chemically synthesized
  source 1..22: mol_type = other DNA
gattttgaagaatttgtaccaa

SEQ ID NO: 130044 - DNA, 22 bp, synthetic construct
  misc_feature 1..22: note = chemically synthesized
  source 1..22: mol_type = other DNA
tgaagaatttgtaccaaaaaaa

SEQ ID NO: 130045 - DNA, 22 bp, synthetic construct
  misc_feature 1..22: note = chemically synthesized
  source 1..22: mol_type = other DNA
gaagaatttgtaccaaaaaaaa

SEQ ID NO: 130046 - DNA, 22 bp, synthetic construct
  misc_feature 1..22: note = chemically synthesized
  source 1..22: mol_type = other DNA
aagaatttgtaccaaaaaaaaa

SEQ ID NO: 130047 - DNA, 22 bp, synthetic construct
  misc_feature 1..22: note = chemically synthesized
  source 1..22: mol_type = other DNA
gtaccaaaaaaaaatcgtggga

SEQ ID NO: 130048 - DNA, 22 bp, synthetic construct
  misc_feature 1..22: note = chemically synthesized
  source 1..22: mol_type = other DNA
taccaaaaaaaaatcgtgggaa

SEQ ID NO: 130049 - DNA, 22 bp, synthetic construct
  misc_feature 1..22: note = chemically synthesized
  source 1..22: mol_type = other DNA
tctcatatatgatttttatgct

SEQ ID NO: 130050 - DNA, 22 bp, synthetic construct
  misc_feature 1..22: note = chemically synthesized
  source 1..22: mol_type = other DNA
atatatgatttttatgctgatt

SEQ ID NO: 130051 - DNA, 22 bp, synthetic construct
  misc_feature 1..22: note = chemically synthesized
  source 1..22: mol_type = other DNA
ttatgctgattatctattaaaa

SEQ ID NO: 130052 - DNA, 22 bp, synthetic construct
  misc_feature 1..22: note = chemically synthesized
  source 1..22: mol_type = other DNA
tatgctgattatctattaaaat

SEQ ID NO: 130053 - DNA, 22 bp, synthetic construct
  misc_feature 1..22: note = chemically synthesized
  source 1..22: mol_type = other DNA
atgctgattatctattaaaatg

SEQ ID NO: 130054 - DNA, 22 bp, synthetic construct
  misc_feature 1..22: note = chemically synthesized
  source 1..22: mol_type = other DNA
tgctgattatctattaaaatga

SEQ ID NO: 130055 - DNA, 22 bp, synthetic construct
  misc_feature 1..22: note = chemically synthesized
  source 1..22: mol_type = other DNA
attatctattaaaatgataata

SEQ ID NO: 130056 - DNA, 22 bp, synthetic construct
  misc_feature 1..22: note = chemically synthesized
  source 1..22: mol_type = other DNA
tctattaaaatgataatatttt

SEQ ID NO: 130057 - DNA, 22 bp, synthetic construct
  misc_feature 1..22: note = chemically synthesized
  source 1..22: mol_type = other DNA
ttaaaatgataatatttttgat

SEQ ID NO: 130058 - DNA, 22 bp, synthetic construct
  misc_feature 1..22: note = chemically synthesized
  source 1..22: mol_type = other DNA
aaatgataatatttttgatata

SEQ ID NO: 130059 - DNA, 22 bp, synthetic construct
  misc_feature 1..22: note = chemically synthesized
  source 1..22: mol_type = other DNA
ttgatatagtagcttaaataag

SEQ ID NO: 130060 - DNA, 22 bp, synthetic construct
  misc_feature 1..22: note = chemically synthesized
  source 1..22: mol_type = other DNA
tgatatagtagcttaaataaga

SEQ ID NO: 130061 - DNA, 22 bp, synthetic construct
  misc_feature 1..22: note = chemically synthesized
  source 1..22: mol_type = other DNA
gatatagtagcttaaataagac

SEQ ID NO: 130062 - DNA, 22 bp, synthetic construct
  misc_feature 1..22: note = chemically synthesized
  source 1..22: mol_type = other DNA
atatagtagcttaaataagaca

SEQ ID NO: 130063 - DNA, 22 bp, synthetic construct
  misc_feature 1..22: note = chemically synthesized
  source 1..22: mol_type = other DNA
aaataagacatactaatattaa

SEQ ID NO: 130064 - DNA, 22 bp, synthetic construct
  misc_feature 1..22: note = chemically synthesized
  source 1..22: mol_type = other DNA
aataagacatactaatattaat

SEQ ID NO: 130065 - DNA, 22 bp, synthetic construct
  misc_feature 1..22: note = chemically synthesized
  source 1..22: mol_type = other DNA
atattaattttaccacttttct

SEQ ID NO: 130066 - DNA, 22 bp, synthetic construct
  misc_feature 1..22: note = chemically synthesized
  source 1..22: mol_type = other DNA
attttaccacttttctttttac

SEQ ID NO: 130067 - DNA, 22 bp, synthetic construct
  misc_feature 1..22: note = chemically synthesized
  source 1..22: mol_type = other DNA
taccacttttctttttactcct

SEQ ID NO: 130068 - DNA, 22 bp, synthetic construct
  misc_feature 1..22: note = chemically synthesized
  source 1..22: mol_type = other DNA
accacttttctttttactcctt

SEQ ID NO: 130069 - DNA, 22 bp, synthetic construct
  misc_feature 1..22: note = chemically synthesized
  source 1..22: mol_type = other DNA
ccacttttctttttactccttt

SEQ ID NO: 130070 - DNA, 22 bp, synthetic construct
  misc_feature 1..22: note = chemically synthesized
  source 1..22: mol_type = other DNA
ttctttttactccttttaatgt

SEQ ID NO: 130071 - DNA, 22 bp, synthetic construct
  misc_feature 1..22: note = chemically synthesized
  source 1..22: mol_type = other DNA
tctttttactccttttaatgtg

SEQ ID NO: 130072 - DNA, 22 bp, synthetic construct
  misc_feature 1..22: note = chemically synthesized
  source 1..22: mol_type = other DNA
ctttttactccttttaatgtga

SEQ ID NO: 130073 - DNA, 22 bp, synthetic construct
  misc_feature 1..22: note = chemically synthesized
  source 1..22: mol_type = other DNA
tttttactccttttaatgtgac

SEQ ID NO: 130074 - DNA, 22 bp, synthetic construct
  misc_feature 1..22: note = chemically synthesized
  source 1..22: mol_type = other DNA
tttactccttttaatgtgacta

SEQ ID NO: 130075 - DNA, 22 bp, synthetic construct
  misc_feature 1..22: note = chemically synthesized
  source 1..22: mol_type = other DNA
ttactccttttaatgtgactac

SEQ ID NO: 130076 - DNA, 22 bp, synthetic construct
  misc_feature 1..22: note = chemically synthesized
  source 1..22: mol_type = other DNA
tactccttttaatgtgactacc

SEQ ID NO: 130077 - DNA, 22 bp, synthetic construct
  misc_feature 1..22: note = chemically synthesized
  source 1..22: mol_type = other DNA
actccttttaatgtgactacca

SEQ ID NO: 130078 - DNA, 22 bp, synthetic construct
  misc_feature 1..22: note = chemically synthesized
  source 1..22: mol_type = other DNA
ctccttttaatgtgactaccag

SEQ ID NO: 130079 - DNA, 22 bp, synthetic construct
  misc_feature 1..22: note = chemically synthesized
  source 1..22: mol_type = other DNA
cttttaatgtgactaccagaac

SEQ ID NO: 130080 - DNA, 22 bp, synthetic construct
  misc_feature 1..22: note = chemically synthesized
  source 1..22: mol_type = other DNA
ttaatgtgactaccagaacatt

SEQ ID NO: 130081 - DNA, 22 bp, synthetic construct
  misc_feature 1..22: note = chemically synthesized
  source 1..22: mol_type = other DNA
taatgtgactaccagaacattt

SEQ ID NO: 130082 - DNA, 22 bp, synthetic construct
  misc_feature 1..22: note = chemically synthesized
  source 1..22: mol_type = other DNA
aatgtgactaccagaacattta

SEQ ID NO: 130083 - DNA, 22 bp, synthetic construct
  misc_feature 1..22: note = chemically synthesized
  source 1..22: mol_type = other DNA
atgtgactaccagaacatttaa

SEQ ID NO: 130084 - DNA, 22 bp, synthetic construct
  misc_feature 1..22: note = chemically synthesized
  source 1..22: mol_type = other DNA
ccagaacatttaacatcacata

SEQ ID NO: 130085 - DNA, 22 bp, synthetic construct
  misc_feature 1..22: note = chemically synthesized
  source 1..22: mol_type = other DNA
aacatcacatatttagctctaa

SEQ ID NO: 130086 - DNA, 22 bp, synthetic construct
  misc_feature 1..22: note = chemically synthesized
  source 1..22: mol_type = other DNA
acatcacatatttagctctaat

SEQ ID NO: 130087 - DNA, 22 bp, synthetic construct
  misc_feature 1..22: note = chemically synthesized
  source 1..22: mol_type = other DNA
agctctaattatatttccacca

SEQ ID NO: 130088 - DNA, 22 bp, synthetic construct
  misc_feature 1..22: note = chemically synthesized
  source 1..22: mol_type = other DNA
gctctaattatatttccaccac

SEQ ID NO: 130089 - DNA, 22 bp, synthetic construct
  misc_feature 1..22: note = chemically synthesized
  source 1..22: mol_type = other DNA
taattatatttccaccacatag

SEQ ID NO: 130090 - DNA, 22 bp, synthetic construct
  misc_feature 1..22: note = chemically synthesized
  source 1..22: mol_type = other DNA
attatatttccaccacatagtg

SEQ ID NO: 130091 - DNA, 22 bp, synthetic construct
  misc_feature 1..22: note = chemically synthesized
  source 1..22: mol_type = other DNA
tatttccaccacatagtgctgg

SEQ ID NO: 130092 - DNA, 22 bp, synthetic construct
  misc_feature 1..22: note = chemically synthesized
  source 1..22: mol_type = other DNA
ccaccacatagtgctggtctag

SEQ ID NO: 130093 - DNA, 22 bp, synthetic construct
  misc_feature 1..22: note = chemically synthesized
  source 1..22: mol_type = other DNA
caccacatagtgctggtctaga

SEQ ID NO: 130094 - DNA, 22 bp, synthetic construct
  misc_feature 1..22: note = chemically synthesized
  source 1..22: mol_type = other DNA
gtctagagagctgttttgtttg

SEQ ID NO: 130095 - DNA, 22 bp, synthetic construct
  misc_feature 1..22: note = chemically synthesized
  source 1..22: mol_type = other DNA
gagagctgttttgtttgtttgt

SEQ ID NO: 130096 - DNA, 22 bp, synthetic construct
  misc_feature 1..22: note = chemically synthesized
  source 1..22: mol_type = other DNA
ttttgtttgtttgtttctcctc

SEQ ID NO: 130097 - DNA, 22 bp, synthetic construct
  misc_feature 1..22: note = chemically synthesized
  source 1..22: mol_type = other DNA
tgtttgtttgtttctcctcagg

SEQ ID NO: 130098 - DNA, 22 bp, synthetic construct
  misc_feature 1..22: note = chemically synthesized
  source 1..22: mol_type = other DNA
gtttgtttgtttctcctcaggt

SEQ ID NO: 130099 - DNA, 22 bp, synthetic construct
  misc_feature 1..22: note = chemically synthesized
  source 1..22: mol_type = other DNA
tttgtttgtttctcctcaggta

SEQ ID NO: 130100 - DNA, 22 bp, synthetic construct
  misc_feature 1..22: note = chemically synthesized
  source 1..22: mol_type = other DNA
gtttgtttctcctcaggtatcc

SEQ ID NO: 130101 - DNA, 22 bp, synthetic construct
  misc_feature 1..22: note = chemically synthesized
  source 1..22: mol_type = other DNA
tttgtttctcctcaggtatcca

SEQ ID NO: 130102 - DNA, 22 bp, synthetic construct
  misc_feature 1..22: note = chemically synthesized
  source 1..22: mol_type = other DNA
gtttctcctcaggtatccacca

SEQ ID NO: 130103 - DNA, 22 bp, synthetic construct
  misc_feature 1..22: note = chemically synthesized
  source 1..22: mol_type = other DNA
tttctcctcaggtatccaccat

SEQ ID NO: 130104 - DNA, 22 bp, synthetic construct
  misc_feature 1..22: note = chemically synthesized
  source 1..22: mol_type = other DNA
ctcctcaggtatccaccatgtc

SEQ ID NO: 130105 - DNA, 22 bp, synthetic construct
  misc_feature 1..22: note = chemically synthesized
  source 1..22: mol_type = other DNA
tcctcaggtatccaccatgtca

SEQ ID NO: 130106 - DNA, 22 bp, synthetic construct
  misc_feature 1..22: note = chemically synthesized
  source 1..22: mol_type = other DNA
ctcaggtatccaccatgtcacc

SEQ ID NO: 130107 - DNA, 22 bp, synthetic construct
  misc_feature 1..22: note = chemically synthesized
  source 1..22: mol_type = other DNA
aggtatccaccatgtcacccac

SEQ ID NO: 130108 - DNA, 22 bp, synthetic construct
  misc_feature 1..22: note = chemically synthesized
  source 1..22: mol_type = other DNA
ctgctgccccttttctcctcac

SEQ ID NO: 130109 - DNA, 22 bp, synthetic construct
  misc_feature 1..22: note = chemically synthesized
  source 1..22: mol_type = other DNA
ctgccccttttctcctcactgg

SEQ ID NO: 130110 - DNA, 22 bp, synthetic construct
  misc_feature 1..22: note = chemically synthesized
  source 1..22: mol_type = other DNA
ccccttttctcctcactggctt

SEQ ID NO: 130111 - DNA, 22 bp, synthetic construct
  misc_feature 1..22: note = chemically synthesized
  source 1..22: mol_type = other DNA
ttctcctcactggctttccagg

SEQ ID NO: 130112 - DNA, 22 bp, synthetic construct
  misc_feature 1..22: note = chemically synthesized
  source 1..22: mol_type = other DNA
tctcctcactggctttccaggt

SEQ ID NO: 130113 - DNA, 22 bp, synthetic construct
  misc_feature 1..22: note = chemically synthesized
  source 1..22: mol_type = other DNA
ctcctcactggctttccaggtc

SEQ ID NO: 130114 - DNA, 22 bp, synthetic construct
  misc_feature 1..22: note = chemically synthesized
  source 1..22: mol_type = other DNA
tcctcactggctttccaggtct

SEQ ID NO: 130115 - DNA, 22 bp, synthetic construct
  misc_feature 1..22: note = chemically synthesized
  source 1..22: mol_type = other DNA
ctcactggctttccaggtctgg

SEQ ID NO: 130116 - DNA, 22 bp, synthetic construct
  misc_feature 1..22: note = chemically synthesized
  source 1..22: mol_type = other DNA
actggctttccaggtctggaga

SEQ ID NO: 130117 - DNA, 22 bp, synthetic construct
  misc_feature 1..22: note = chemically synthesized
  source 1..22: mol_type = other DNA
gctttccaggtctggagagatt

SEQ ID NO: 130118 - DNA, 22 bp, synthetic construct
  misc_feature 1..22: note = chemically synthesized
  source 1..22: mol_type = other DNA
tccaggtctggagagatttcat

SEQ ID NO: 130119 - DNA, 22 bp, synthetic construct
  misc_feature 1..22: note = chemically synthesized
  source 1..22: mol_type = other DNA
ccaggtctggagagatttcatc

SEQ ID NO: 130120 - DNA, 22 bp, synthetic construct
  misc_feature 1..22: note = chemically synthesized
  source 1..22: mol_type = other DNA
caggtctggagagatttcatcc

SEQ ID NO: 130121 - DNA, 22 bp, synthetic construct
  misc_feature 1..22: note = chemically synthesized
  source 1..22: mol_type = other DNA
gagagatttcatccttggagtt

SEQ ID NO: 130122 - DNA, 22 bp, synthetic construct
  misc_feature 1..22: note = chemically synthesized
  source 1..22: mol_type = other DNA
catccttggagttctatctcct

SEQ ID NO: 130123 - DNA, 22 bp, synthetic construct
  misc_feature 1..22: note = chemically synthesized
  source 1..22: mol_type = other DNA
atccttggagttctatctcctt

SEQ ID NO: 130124 - DNA, 22 bp, synthetic construct
  misc_feature 1..22: note = chemically synthesized
  source 1..22: mol_type = other DNA
ggagttctatctccttctttat

SEQ ID NO: 130125 - DNA, 22 bp, synthetic construct
  misc_feature 1..22: note = chemically synthesized
  source 1..22: mol_type = other DNA
gagttctatctccttctttatc

SEQ ID NO: 130126 - DNA, 22 bp, synthetic construct
  misc_feature 1..22: note = chemically synthesized
  source 1..22: mol_type = other DNA
tatctccttctttatcatctat

SEQ ID NO: 130127 - DNA, 22 bp, synthetic construct
  misc_feature 1..22: note = chemically synthesized
  source 1..22: mol_type = other DNA
tctccttctttatcatctatgt

SEQ ID NO: 130128 - DNA, 22 bp, synthetic construct
  misc_feature 1..22: note = chemically synthesized
  source 1..22: mol_type = other DNA
cttctttatcatctatgtctct

SEQ ID NO: 130129 - DNA, 22 bp, synthetic construct
  misc_feature 1..22: note = chemically synthesized
  source 1..22: mol_type = other DNA
ctttatcatctatgtctctaca

SEQ ID NO: 130130 - DNA, 22 bp, synthetic construct
  misc_feature 1..22: note = chemically synthesized
  source 1..22: mol_type = other DNA
tttatcatctatgtctctacag

SEQ ID NO: 130131 - DNA, 22 bp, synthetic construct
  misc_feature 1..22: note = chemically synthesized
  source 1..22: mol_type = other DNA
tatcatctatgtctctacagtc

SEQ ID NO: 130132 - DNA, 22 bp, synthetic construct
  misc_feature 1..22: note = chemically synthesized
  source 1..22: mol_type = other DNA
atcatctatgtctctacagtcc

SEQ ID NO: 130133 - DNA, 22 bp, synthetic construct
  misc_feature 1..22: note = chemically synthesized
  source 1..22: mol_type = other DNA
tcatctatgtctctacagtcct

SEQ ID NO: 130134 - DNA, 22 bp, synthetic construct
  misc_feature 1..22: note = chemically synthesized
  source 1..22: mol_type = other DNA
tgtctctacagtccttggcaat

SEQ ID NO: 130135 - DNA, 22 bp, synthetic construct
  misc_feature 1..22: note = chemically synthesized
  source 1..22: mol_type = other DNA
tacagtccttggcaatggcagc

SEQ ID NO: 130136 - DNA, 22 bp, synthetic construct
  misc_feature 1..22: note = chemically synthesized
  source 1..22: mol_type = other DNA
cagtccttggcaatggcagcct

SEQ ID NO: 130137 - DNA, 22 bp, synthetic construct
  misc_feature 1..22: note = chemically synthesized
  source 1..22: mol_type = other DNA
ggcaatggcagcctcctcctct

SEQ ID NO: 130138 - DNA, 22 bp, synthetic construct
  misc_feature 1..22: note = chemically synthesized
  source 1..22: mol_type = other DNA
gcaatggcagcctcctcctctt

SEQ ID NO: 130139 - DNA, 22 bp, synthetic construct
  misc_feature 1..22: note = chemically synthesized
  source 1..22: mol_type = other DNA
ctcctctttatcagagaagact

SEQ ID NO: 130140 - DNA, 22 bp, synthetic construct
  misc_feature 1..22: note = chemically synthesized
  source 1..22: mol_type = other DNA
ctctttatcagagaagactgca

SEQ ID NO: 130141 - DNA, 22 bp, synthetic construct
  misc_feature 1..22: note = chemically synthesized
  source 1..22: mol_type = other DNA
tttatcagagaagactgcactc

SEQ ID NO: 130142 - DNA, 22 bp, synthetic construct
  misc_feature 1..22: note = chemically synthesized
  source 1..22: mol_type = other DNA
tatcagagaagactgcactctt

SEQ ID NO: 130143 - DNA, 22 bp, synthetic construct
  misc_feature 1..22: note = chemically synthesized
  source 1..22: mol_type = other DNA
atcagagaagactgcactcttc

SEQ ID NO: 130144 - DNA, 22 bp, synthetic construct
  misc_feature 1..22: note = chemically synthesized
  source 1..22: mol_type = other DNA
tcagagaagactgcactcttca

SEQ ID NO: 130145 - DNA, 22 bp, synthetic construct
  misc_feature 1..22: note = chemically synthesized
  source 1..22: mol_type = other DNA
cactcttcatgagcccgtgtac

SEQ ID NO: 130146 - DNA, 22 bp, synthetic construct
  misc_feature 1..22: note = chemically synthesized
  source 1..22: mol_type = other DNA
ttcatgagcccgtgtactactc

SEQ ID NO: 130147 - DNA, 22 bp, synthetic construct
  misc_feature 1..22: note = chemically synthesized
  source 1..22: mol_type = other DNA
catgagcccgtgtactactctc

SEQ ID NO: 130148 - DNA, 22 bp, synthetic construct
  misc_feature 1..22: note = chemically synthesized
  source 1..22: mol_type = other DNA
atgagcccgtgtactactctct

SEQ ID NO: 130149 - DNA, 22 bp, synthetic construct
  misc_feature 1..22: note = chemically synthesized
  source 1..22: mol_type = other DNA
ctctctgactatactggcagcc

SEQ ID NO: 130150 - DNA, 22 bp, synthetic construct
  misc_feature 1..22: note = chemically synthesized
  source 1..22: mol_type = other DNA
tctgactatactggcagccata

SEQ ID NO: 130151 - DNA, 22 bp, synthetic construct
  misc_feature 1..22: note = chemically synthesized
  source 1..22: mol_type = other DNA
tgactatactggcagccataga

SEQ ID NO: 130152 - DNA, 22 bp, synthetic construct
  misc_feature 1..22: note = chemically synthesized
  source 1..22: mol_type = other DNA
actatactggcagccatagacc

SEQ ID NO: 130153 - DNA, 22 bp, synthetic construct
  misc_feature 1..22: note = chemically synthesized
  source 1..22: mol_type = other DNA
tactggcagccatagaccttgg

SEQ ID NO: 130154 - DNA, 22 bp, synthetic construct
  misc_feature 1..22: note = chemically synthesized
  source 1..22: mol_type = other DNA
gcagccatagaccttggtgtaa

SEQ ID NO: 130155 - DNA, 22 bp, synthetic construct
  misc_feature 1..22: note = chemically synthesized
  source 1..22: mol_type = other DNA
ggtgtaactttgacaacaatgt

SEQ ID NO: 130156 - DNA, 22 bp, synthetic construct
  misc_feature 1..22: note = chemically synthesized
  source 1..22: mol_type = other DNA
gtgtaactttgacaacaatgtc

SEQ ID NO: 130157 - DNA, 22 bp, synthetic construct
  misc_feature 1..22: note = chemically synthesized
  source 1..22: mol_type = other DNA
tgacaacaatgtccactgtcct

SEQ ID NO: 130158 - DNA, 22 bp, synthetic construct
  misc_feature 1..22: note = chemically synthesized
  source 1..22: mol_type = other DNA
gacaacaatgtccactgtcctt

SEQ ID NO: 130159 - DNA, 22 bp, synthetic construct
  misc_feature 1..22: note = chemically synthesized
  source 1..22: mol_type = other DNA
acaacaatgtccactgtccttg

SEQ ID NO: 130160 - DNA, 22 bp, synthetic construct
  misc_feature 1..22: note = chemically synthesized
  source 1..22: mol_type = other DNA
tccttggtgttctctggctaga

SEQ ID NO: 130161 - DNA, 22 bp, synthetic construct
  misc_feature 1..22: note = chemically synthesized
  source 1..22: mol_type = other DNA
ggtgttctctggctagatcaca

SEQ ID NO: 130162 - DNA, 22 bp, synthetic construct
  misc_feature 1..22: note = chemically synthesized
  source 1..22: mol_type = other DNA
gtgttctctggctagatcacag

SEQ ID NO: 130163 - DNA, 22 bp, synthetic construct
  misc_feature 1..22: note = chemically synthesized
  source 1..22: mol_type = other DNA
tctggctagatcacaggaaaat

SEQ ID NO: 130164 - DNA, 22 bp, synthetic construct
  misc_feature 1..22: note = chemically synthesized
  source 1..22: mol_type = other DNA
tggctagatcacaggaaaatga

SEQ ID NO: 130165 - DNA, 22 bp, synthetic construct
  misc_feature 1..22: note = chemically synthesized
  source 1..22: mol_type = other DNA
gctagatcacaggaaaatgagc

SEQ ID NO: 130166 - DNA, 22 bp, synthetic construct
  misc_feature 1..22: note = chemically synthesized
  source 1..22: mol_type = other DNA
gatcacaggaaaatgagccatg

SEQ ID NO: 130167 - DNA, 22 bp, synthetic construct
  misc_feature 1..22: note = chemically synthesized
  source 1..22: mol_type = other DNA
cttcctccaggcctatctaatc

SEQ ID NO: 130168 - DNA, 22 bp, synthetic construct
  misc_feature 1..22: note = chemically synthesized
  source 1..22: mol_type = other DNA
cctccaggcctatctaatccac

SEQ ID NO: 130169 - DNA, 22 bp, synthetic construct
  misc_feature 1..22: note = chemically synthesized
  source 1..22: mol_type = other DNA
ctccaggcctatctaatccact

SEQ ID NO: 130170 - DNA, 22 bp, synthetic construct
  misc_feature 1..22: note = chemically synthesized
  source 1..22: mol_type = other DNA
caggcctatctaatccactccc

SEQ ID NO: 130171 - DNA, 22 bp, synthetic construct
  misc_feature 1..22: note = chemically synthesized
  source 1..22: mol_type = other DNA
tctaatccactccctctctatc

SEQ ID NO: 130172 - DNA, 22 bp, synthetic construct
  misc_feature 1..22: note = chemically synthesized
  source 1..22: mol_type = other DNA
atccactccctctctatcgtgg

SEQ ID NO: 130173 - DNA, 22 bp, synthetic construct
  misc_feature 1..22: note = chemically synthesized
  source 1..22: mol_type = other DNA
cctctctatcgtggagtccaga

SEQ ID NO: 130174 - DNA, 22 bp, synthetic construct
  misc_feature 1..22: note = chemically synthesized
  source 1..22: mol_type = other DNA
tctatcgtggagtccagagtgt

SEQ ID NO: 130175 - DNA, 22 bp, synthetic construct
  misc_feature 1..22: note = chemically synthesized
  source 1..22: mol_type = other DNA
tatcgtggagtccagagtgttg

SEQ ID NO: 130176 - DNA, 22 bp, synthetic construct
  misc_feature 1..22: note = chemically synthesized
  source 1..22: mol_type = other DNA
tcgtggagtccagagtgttgct

SEQ ID NO: 130177 - DNA, 22 bp, synthetic construct
  misc_feature 1..22: note = chemically synthesized
  source 1..22: mol_type = other DNA
ctcatcatggcccatgactgtt

SEQ ID NO: 130178 - DNA, 22 bp, synthetic construct
  misc_feature 1..22: note = chemically synthesized
  source 1..22: mol_type = other DNA
atcatggcccatgactgtttta

SEQ ID NO: 130179 - DNA, 22 bp, synthetic construct
  misc_feature 1..22: note = chemically synthesized
  source 1..22: mol_type = other DNA
ttttattggcatccataatccc

SEQ ID NO: 130180 - DNA, 22 bp, synthetic construct
  misc_feature 1..22: note = chemically synthesized
  source 1..22: mol_type = other DNA
tattggcatccataatcccctg

SEQ ID NO: 130181 - DNA, 22 bp, synthetic construct
  misc_feature 1..22: note = chemically synthesized
  source 1..22: mol_type = other DNA
attggcatccataatcccctga

SEQ ID NO: 130182 - DNA, 22 bp, synthetic construct
  misc_feature 1..22: note = chemically synthesized
  source 1..22: mol_type = other DNA
ttggcatccataatcccctgag

SEQ ID NO: 130183 - DNA, 22 bp, synthetic construct
  misc_feature 1..22: note = chemically synthesized
  source 1..22: mol_type = other DNA
gcatccataatcccctgagata

SEQ ID NO: 130184 - DNA, 22 bp, synthetic construct
  misc_feature 1..22: note = chemically synthesized
  source 1..22: mol_type = other DNA
agatacacctccattctcacca

SEQ ID NO: 130185 - DNA, 22 bp, synthetic construct
  misc_feature 1..22: note = chemically synthesized
  source 1..22: mol_type = other DNA
cattctcaccaatgctaaggtg

SEQ ID NO: 130186 - DNA, 22 bp, synthetic construct
  misc_feature 1..22: note = chemically synthesized
  source 1..22: mol_type = other DNA
tcaccaatgctaaggtggtgaa

SEQ ID NO: 130187 - DNA, 22 bp, synthetic construct
  misc_feature 1..22: note = chemically synthesized
  source 1..22: mol_type = other DNA
accaatgctaaggtggtgaaga

SEQ ID NO: 130188 - DNA, 22 bp, synthetic construct
  misc_feature 1..22: note = chemically synthesized
  source 1..22: mol_type = other DNA
aggtggtgaagatagatctggg

SEQ ID NO: 130189 - DNA, 22 bp, synthetic construct
  misc_feature 1..22: note = chemically synthesized
  source 1..22: mol_type = other DNA
ggggttcaaatgaggggatttg

SEQ ID NO: 130190 - DNA, 22 bp, synthetic construct
  misc_feature 1..22: note = chemically synthesized
  source 1..22: mol_type = other DNA
aaatgaggggatttgttatgct

SEQ ID NO: 130191 - DNA, 22 bp, synthetic construct
  misc_feature 1..22: note = chemically synthesized
  source 1..22: mol_type = other DNA
gttatgctaattgtgcccataa

SEQ ID NO: 130192 - DNA, 22 bp, synthetic construct
  misc_feature 1..22: note = chemically synthesized
  source 1..22: mol_type = other DNA
ttatgctaattgtgcccataat

SEQ ID NO: 130193 - DNA, 22 bp, synthetic construct
  misc_feature 1..22: note = chemically synthesized
  source 1..22: mol_type = other DNA
tgctaattgtgcccataatcat

SEQ ID NO: 130194 - DNA, 22 bp, synthetic construct
  misc_feature 1..22: note = chemically synthesized
  source 1..22: mol_type = other DNA
attgtgcccataatcatcaccc

SEQ ID NO: 130195 - DNA, 22 bp, synthetic construct
  misc_feature 1..22: note = chemically synthesized
  source 1..22: mol_type = other DNA
tgcccataatcatcaccctctc

SEQ ID NO: 130196 - DNA, 22 bp, synthetic construct
  misc_feature 1..22: note = chemically synthesized
  source 1..22: mol_type = other DNA
tctggattcccctactgtcaat

SEQ ID NO: 130197 - DNA, 22 bp, synthetic construct
  misc_feature 1..22: note = chemically synthesized
  source 1..22: mol_type = other DNA
tggattcccctactgtcaatcc

SEQ ID NO: 130198 - DNA, 22 bp, synthetic construct
  misc_feature 1..22: note = chemically synthesized
  source 1..22: mol_type = other DNA
gattcccctactgtcaatccca

SEQ ID NO: 130199 - DNA, 22 bp, synthetic construct
  misc_feature 1..22: note = chemically synthesized
  source 1..22: mol_type = other DNA
ccctactgtcaatcccatgtcc

SEQ ID NO: 130200 - DNA, 22 bp, synthetic construct
  misc_feature 1..22: note = chemically synthesized
  source 1..22: mol_type = other DNA
ctgtcaatcccatgtcctctcc

SEQ ID NO: 130201 - DNA, 22 bp, synthetic construct
  misc_feature 1..22: note = chemically synthesized
  source 1..22: mol_type = other DNA
tcaatcccatgtcctctcccat

SEQ ID NO: 130202 - DNA, 22 bp, synthetic construct
  misc_feature 1..22: note = chemically synthesized
  source 1..22: mol_type = other DNA
tcccatgctttctgcctgcacc

SEQ ID NO: 130203 - DNA, 22 bp, synthetic construct
  misc_feature 1..22: note = chemically synthesized
  source 1..22: mol_type = other DNA
ccatgctttctgcctgcaccag

SEQ ID NO: 130204 - DNA, 22 bp, synthetic construct
  misc_feature 1..22: note = chemically synthesized
  source 1..22: mol_type = other DNA
tctgcctgcaccagatgtgatc

SEQ ID NO: 130205 - DNA, 22 bp, synthetic construct
  misc_feature 1..22: note = chemically synthesized
  source 1..22: mol_type = other DNA
ctgcctgcaccagatgtgatca

SEQ ID NO: 130206 - DNA, 22 bp, synthetic construct
  misc_feature 1..22: note = chemically synthesized
  source 1..22: mol_type = other DNA
tgcctgcaccagatgtgatcaa

SEQ ID NO: 130207 - DNA, 22 bp, synthetic construct
  misc_feature 1..22: note = chemically synthesized
  source 1..22: mol_type = other DNA
cctgcaccagatgtgatcaaac

SEQ ID NO: 130208 - DNA, 22 bp, synthetic construct
  misc_feature 1..22: note = chemically synthesized
  source 1..22: mol_type = other DNA
caccagatgtgatcaaactggc

SEQ ID NO: 130209 - DNA, 22 bp, synthetic construct
  misc_feature 1..22: note = chemically synthesized
  source 1..22: mol_type = other DNA
gcctgtgcagacatcaccttta

SEQ ID NO: 130210 - DNA, 22 bp, synthetic construct
  misc_feature 1..22: note = chemically synthesized
  source 1..22: mol_type = other DNA
tgcagacatcacctttaataga

SEQ ID NO: 130211 - DNA, 22 bp, synthetic construct
  misc_feature 1..22: note = chemically synthesized
  source 1..22: mol_type = other DNA
taatagactttatcctatagtc

SEQ ID NO: 130212 - DNA, 22 bp, synthetic construct
  misc_feature 1..22: note = chemically synthesized
  source 1..22: mol_type = other DNA
aatagactttatcctatagtcc

SEQ ID NO: 130213 - DNA, 22 bp, synthetic construct
  misc_feature 1..22: note = chemically synthesized
  source 1..22: mol_type = other DNA
atagactttatcctatagtcct

SEQ ID NO: 130214 - DNA, 22 bp, synthetic construct
  misc_feature 1..22: note = chemically synthesized
  source 1..22: mol_type = other DNA
tatcctatagtcctggtctcat

SEQ ID NO: 130215 - DNA, 22 bp, synthetic construct
  misc_feature 1..22: note = chemically synthesized
  source 1..22: mol_type = other DNA
atcctatagtcctggtctcatc

SEQ ID NO: 130216 - DNA, 22 bp, synthetic construct
  misc_feature 1..22: note = chemically synthesized
  source 1..22: mol_type = other DNA
tcctatagtcctggtctcatca

SEQ ID NO: 130217 - DNA, 22 bp, synthetic construct
  misc_feature 1..22: note = chemically synthesized
  source 1..22: mol_type = other DNA
tagtcctggtctcatcaactgg

SEQ ID NO: 130218 - DNA, 22 bp, synthetic construct
  misc_feature 1..22: note = chemically synthesized
  source 1..22: mol_type = other DNA
gtctcatcaactggtttcttgg

SEQ ID NO: 130219 - DNA, 22 bp, synthetic construct
  misc_feature 1..22: note = chemically synthesized
  source 1..22: mol_type = other DNA
atcaactggtttcttggacttt

SEQ ID NO: 130220 - DNA, 22 bp, synthetic construct
  misc_feature 1..22: note = chemically synthesized
  source 1..22: mol_type = other DNA
gtttcttggactttgtgcttat

SEQ ID NO: 130221 - DNA, 22 bp, synthetic construct
  misc_feature 1..22: note = chemically synthesized
  source 1..22: mol_type = other DNA
cttggactttgtgcttatcctt

SEQ ID NO: 130222 - DNA, 22 bp, synthetic construct
  misc_feature 1..22: note = chemically synthesized
  source 1..22: mol_type = other DNA
ttggactttgtgcttatcctta

SEQ ID NO: 130223 - DNA, 22 bp, synthetic construct
  misc_feature 1..22: note = chemically synthesized
  source 1..22: mol_type = other DNA
ggactttgtgcttatccttatc

SEQ ID NO: 130224 - DNA, 22 bp, synthetic construct
  misc_feature 1..22: note = chemically synthesized
  source 1..22: mol_type = other DNA
gactttgtgcttatccttatct

SEQ ID NO: 130225 - DNA, 22 bp, synthetic construct
  misc_feature 1..22: note = chemically synthesized
  source 1..22: mol_type = other DNA
tgtgcttatccttatctcttac

SEQ ID NO: 130226 - DNA, 22 bp, synthetic construct
  misc_feature 1..22: note = chemically synthesized
  source 1..22: mol_type = other DNA
gtgcttatccttatctcttaca

SEQ ID NO: 130227 - DNA, 22 bp, synthetic construct
  misc_feature 1..22: note = chemically synthesized
  source 1..22: mol_type = other DNA
tgcttatccttatctcttacat

SEQ ID NO: 130228 - DNA, 22 bp, synthetic construct
  misc_feature 1..22: note = chemically synthesized
  source 1..22: mol_type = other DNA
atccttatctcttacattctga

SEQ ID NO: 130229 - DNA, 22 bp, synthetic construct
  source 1..22: mol_type = other DNA
tccttatctcttacattctgat

SEQ ID NO: 130230 - DNA, 22 bp, synthetic construct
  misc_feature 1..22: note = chemically synthesized
  source 1..22: mol_type = other DNA
atctcttacattctgatcctta

SEQ ID NO: 130231 - DNA, 22 bp, synthetic construct
  misc_feature 1..22: note = chemically synthesized
  source 1..22: mol_type = other DNA
tctcttacattctgatccttaa

SEQ ID NO: 130232 - DNA, 22 bp, synthetic construct
  misc_feature 1..22: note = chemically synthesized
  source 1..22: mol_type = other DNA
ttacattctgatccttaagaag

SEQ ID NO: 130233 - DNA, 22 bp, synthetic construct
  misc_feature 1..22: note = chemically synthesized
  source 1..22: mol_type = other DNA
acattctgatccttaagaaggt

SEQ ID NO: 130234 - DNA, 22 bp, synthetic construct
  misc_feature 1..22: note = chemically synthesized
  source 1..22: mol_type = other DNA
cattctgatccttaagaaggtc

SEQ ID NO: 130235 - DNA, 22 bp, synthetic construct
  misc_feature 1..22: note = chemically synthesized
  source 1..22: mol_type = other DNA
tgatccttaagaaggtcatggg

SEQ ID NO: 130236 - DNA, 22 bp, synthetic construct
  misc_feature 1..22: note = chemically synthesized
  source 1..22: mol_type = other DNA
atccttaagaaggtcatgggaa

SEQ ID NO: 130237 - DNA, 22 bp, synthetic construct
  misc_feature 1..22: note = chemically synthesized
  source 1..22: mol_type = other DNA
aagaaggtcatgggaattgcct

SEQ ID NO: 130238 - DNA, 22 bp, synthetic construct
  misc_feature 1..22: note = chemically synthesized
  source 1..22: mol_type = other DNA
agaaggtcatgggaattgcctc

SEQ ID NO: 130239 - DNA, 22 bp, synthetic construct
  misc_feature 1..22: note = chemically synthesized
  source 1..22: mol_type = other DNA
cctcagacaaggagcagactaa

SEQ ID NO: 130240 - DNA, 22 bp, synthetic construct
  misc_feature 1..22: note = chemically synthesized
  source 1..22: mol_type = other DNA
agacaaggagcagactaaggcc

SEQ ID NO: 130241 - DNA, 22 bp, synthetic construct
  misc_feature 1..22: note = chemically synthesized
  source 1..22: mol_type = other DNA
aggccctaaatacttgtatttc

SEQ ID NO: 130242 - DNA, 22 bp, synthetic construct
  misc_feature 1..22: note = chemically synthesized
  source 1..22: mol_type = other DNA
aatacttgtatttctcacatta

SEQ ID NO: 130243 - DNA, 22 bp, synthetic construct
  misc_feature 1..22: note = chemically synthesized
  source 1..22: mol_type = other DNA
gtatttctcacattagctgtgt

SEQ ID NO: 130244 - DNA, 22 bp, synthetic construct
  misc_feature 1..22: note = chemically synthesized
  source 1..22: mol_type = other DNA
tatttctcacattagctgtgtt

SEQ ID NO: 130245 - DNA, 22 bp, synthetic construct
  misc_feature 1..22: note = chemically synthesized
  source 1..22: mol_type = other DNA
ctcacattagctgtgttctggt

SEQ ID NO: 130246 - DNA, 22 bp, synthetic construct
  misc_feature 1..22: note = chemically synthesized
  source 1..22: mol_type = other DNA
tcacattagctgtgttctggtt

SEQ ID NO: 130247 - DNA, 22 bp, synthetic construct
  misc_feature 1..22: note = chemically synthesized
  source 1..22: mol_type = other DNA
acattagctgtgttctggtttt

SEQ ID NO: 130248 - DNA, 22 bp, synthetic construct
  misc_feature 1..22: note = chemically synthesized
  source 1..22: mol_type = other DNA
gctgtgttctggtttttaatgt

SEQ ID NO: 130249 - DNA, 22 bp, synthetic construct
  misc_feature 1..22: note = chemically synthesized
  source 1..22: mol_type = other DNA
tgttctggtttttaatgtcact

SEQ ID NO: 130250 - DNA, 22 bp, synthetic construct
  misc_feature 1..22: note = chemically synthesized
  source 1..22: mol_type = other DNA
tggtttttaatgtcacttgatt

SEQ ID NO: 130251 - DNA, 22 bp, synthetic construct
  misc_feature 1..22: note = chemically synthesized
  source 1..22: mol_type = other DNA
gtttttaatgtcacttgattgg

SEQ ID NO: 130252 - DNA, 22 bp, synthetic construct
  misc_feature 1..22: note = chemically synthesized
  source 1..22: mol_type = other DNA
ttaatgtcacttgattgggcta

SEQ ID NO: 130253 - DNA, 22 bp, synthetic construct
  misc_feature 1..22: note = chemically synthesized
  source 1..22: mol_type = other DNA
taatgtcacttgattgggctac

SEQ ID NO: 130254 - DNA, 22 bp, synthetic construct
  misc_feature 1..22: note = chemically synthesized
  source 1..22: mol_type = other DNA
aatgtcacttgattgggctacc

SEQ ID NO: 130255 - DNA, 22 bp, synthetic construct
  misc_feature 1..22: note = chemically synthesized
  source 1..22: mol_type = other DNA
atgtcacttgattgggctacca

SEQ ID NO: 130256 - DNA, 22 bp, synthetic construct
  misc_feature 1..22: note = chemically synthesized
  source 1..22: mol_type = other DNA
gattgggctaccaccctttcag

SEQ ID NO: 130257 - DNA, 22 bp, synthetic construct
  misc_feature 1..22: note = chemically synthesized
  source 1..22: mol_type = other DNA
attgggctaccaccctttcaga

SEQ ID NO: 130258 - DNA, 22 bp, synthetic construct
  misc_feature 1..22: note = chemically synthesized
  source 1..22: mol_type = other DNA
ggctaccaccctttcagacact

SEQ ID NO: 130259 - DNA, 22 bp, synthetic construct
  misc_feature 1..22: note = chemically synthesized
  source 1..22: mol_type = other DNA
ccaccctttcagacactgtgct

SEQ ID NO: 130260 - DNA, 22 bp, synthetic construct
  misc_feature 1..22: note = chemically synthesized
  source 1..22: mol_type = other DNA
tcagacactgtgcttcatcaaa

SEQ ID NO: 130261 - DNA, 22 bp, synthetic construct
  misc_feature 1..22: note = chemically synthesized
  source 1..22: mol_type = other DNA
cagacactgtgcttcatcaaaa

SEQ ID NO: 130262 - DNA, 22 bp, synthetic construct
  misc_feature 1..22: note = chemically synthesized
  source 1..22: mol_type = other DNA
agacactgtgcttcatcaaaaa

SEQ ID NO: 130263 - DNA, 22 bp, synthetic construct
  misc_feature 1..22: note = chemically synthesized
  source 1..22: mol_type = other DNA
tgcttcatcaaaaaaatgttaa

SEQ ID NO: 130264 - DNA, 22 bp, synthetic construct
  misc_feature 1..22: note = chemically synthesized
  source 1..22: mol_type = other DNA
catcaaaaaaatgttaagaata

SEQ ID NO: 130265 - DNA, 22 bp, synthetic construct
  misc_feature 1..22: note = chemically synthesized
  source 1..22: mol_type = other DNA
atcaaaaaaatgttaagaataa

SEQ ID NO: 130266 - DNA, 22 bp, synthetic construct
  misc_feature 1..22: note = chemically synthesized
  source 1..22: mol_type = other DNA
agaataaaaattatttcacaca

SEQ ID NO: 130267 - DNA, 22 bp, synthetic construct
  misc_feature 1..22: note = chemically synthesized
  source 1..22: mol_type = other DNA
tttcacacatactttaaaacta

SEQ ID NO: 130268 - DNA, 22 bp, synthetic construct
  misc_feature 1..22: note = chemically synthesized
  source 1..22: mol_type = other DNA
cacacatactttaaaactaaca

SEQ ID NO: 130269 - DNA, 22 bp, synthetic construct
  misc_feature 1..22: note = chemically synthesized
  source 1..22: mol_type = other DNA
acacatactttaaaactaacac

SEQ ID NO: 130270 - DNA, 22 bp, synthetic construct
  misc_feature 1..22: note = chemically synthesized
  source 1..22: mol_type = other DNA
taaaactaacacgtcacaatgc

SEQ ID NO: 130271 - DNA, 22 bp, synthetic construct
  misc_feature 1..22: note = chemically synthesized
  source 1..22: mol_type = other DNA
aaaactaacacgtcacaatgca

SEQ ID NO: 130272 - DNA, 22 bp, synthetic construct
  misc_feature 1..22: note = chemically synthesized
  source 1..22: mol_type = other DNA
aaactaacacgtcacaatgcaa

SEQ ID NO: 130273 - DNA, 22 bp, synthetic construct
  misc_feature 1..22: note = chemically synthesized
  source 1..22: mol_type = other DNA
acacgtcacaatgcaaatcaaa

SEQ ID NO: 130274 - DNA, 22 bp, synthetic construct
  misc_feature 1..22: note = chemically synthesized
  source 1..22: mol_type = other DNA
acaccagttagaatggcaatca

SEQ ID NO: 130275 - DNA, 22 bp, synthetic construct
  misc_feature 1..22: note = chemically synthesized
  source 1..22: mol_type = other DNA
gaatggcaatcattaaaaagtc

SEQ ID NO: 130276 - DNA, 22 bp, synthetic construct
  misc_feature 1..22: note = chemically synthesized
  source 1..22: mol_type = other DNA
aaaagtcagggaacaacaggtg

SEQ ID NO: 130277 - DNA, 22 bp, synthetic construct
  misc_feature 1..22: note = chemically synthesized
  source 1..22: mol_type = other DNA
gagaggatgtggagaaatagga

SEQ ID NO: 130278 - DNA, 22 bp, synthetic construct
  misc_feature 1..22: note = chemically synthesized
  source 1..22: mol_type = other DNA
ttacactcttggtgggactgta

SEQ ID NO: 130279 - DNA, 22 bp, synthetic construct
  misc_feature 1..22: note = chemically synthesized
  source 1..22: mol_type = other DNA
tacactcttggtgggactgtaa

SEQ ID NO: 130280 - DNA, 22 bp, synthetic construct
  misc_feature 1..22: note = chemically synthesized
  source 1..22: mol_type = other DNA
acactcttggtgggactgtaaa

SEQ ID NO: 130281 - DNA, 22 bp, synthetic construct
  misc_feature 1..22: note = chemically synthesized
  source 1..22: mol_type = other DNA
cactcttggtgggactgtaaac

SEQ ID NO: 130282 - DNA, 22 bp, synthetic construct
  misc_feature 1..22: note = chemically synthesized
  source 1..22: mol_type = other DNA
ttggtgggactgtaaactagtt

SEQ ID NO: 130283 - DNA, 22 bp, synthetic construct
  misc_feature 1..22: note = chemically synthesized
  source 1..22: mol_type = other DNA
ggtgggactgtaaactagttca

SEQ ID NO: 130284 - DNA, 22 bp, synthetic construct
  misc_feature 1..22: note = chemically synthesized
  source 1..22: mol_type = other DNA
gtgggactgtaaactagttcaa

SEQ ID NO: 130285 - DNA, 22 bp, synthetic construct
  misc_feature 1..22: note = chemically synthesized
  source 1..22: mol_type = other DNA
taaactagttcaaccattgtgg

SEQ ID NO: 130286 - DNA, 22 bp, synthetic construct
  misc_feature 1..22: note = chemically synthesized
  source 1..22: mol_type = other DNA
gttcaaccattgtggaagtcag

SEQ ID NO: 130287 - DNA, 22 bp, synthetic construct
  misc_feature 1..22: note = chemically synthesized
  source 1..22: mol_type = other DNA
aaccattgtggaagtcagtgtg

SEQ ID NO: 130288 - DNA, 22 bp, synthetic construct
  misc_feature 1..22: note = chemically synthesized
  source 1..22: mol_type = other DNA
tggaagtcagtgtggcgattcc

SEQ ID NO: 130289 - DNA, 22 bp, synthetic construct
  misc_feature 1..22: note = chemically synthesized
  source 1..22: mol_type = other DNA
ctcagggatctagaactagaaa

SEQ ID NO: 130290 - DNA, 22 bp, synthetic construct
  misc_feature 1..22: note = chemically synthesized
  source 1..22: mol_type = other DNA
agggatctagaactagaaatac

SEQ ID NO: 130291 - DNA, 22 bp, synthetic construct
  misc_feature 1..22: note = chemically synthesized
  source 1..22: mol_type = other DNA
gaactagaaataccatttgacc

SEQ ID NO: 130292 - DNA, 22 bp, synthetic construct
  misc_feature 1..22: note = chemically synthesized
  source 1..22: mol_type = other DNA
gaaataccatttgacccagcca

SEQ ID NO: 130293 - DNA, 22 bp, synthetic construct
  misc_feature 1..22: note = chemically synthesized
  source 1..22: mol_type = other DNA
gacccagccatcccattactgg

SEQ ID NO: 130294 - DNA, 22 bp, synthetic construct
  misc_feature 1..22: note = chemically synthesized
  source 1..22: mol_type = other DNA
acccagccatcccattactggg

SEQ ID NO: 130295 - DNA, 22 bp, synthetic construct
  misc_feature 1..22: note = chemically synthesized
  source 1..22: mol_type = other DNA
ctgggtatatacccaacggatt

SEQ ID NO: 130296 - DNA, 22 bp, synthetic construct
  misc_feature 1..22: note = chemically synthesized
  source 1..22: mol_type = other DNA
ggtatatacccaacggattata

SEQ ID NO: 130297 - DNA, 22 bp, synthetic construct
  misc_feature 1..22: note = chemically synthesized
  source 1..22: mol_type = other DNA
taaatcatgctgctataaagac

SEQ ID NO: 130298 - DNA, 22 bp, synthetic construct
  misc_feature 1..22: note = chemically synthesized
  source 1..22: mol_type = other DNA
ctataaagacacatgcacacgt

SEQ ID NO: 130299 - DNA, 22 bp, synthetic construct
  misc_feature 1..22: note = chemically synthesized
  source 1..22: mol_type = other DNA
taaagacacatgcacacgtatg

SEQ ID NO: 130300 - DNA, 22 bp, synthetic construct
  misc_feature 1..22: note = chemically synthesized
  source 1..22: mol_type = other DNA
actgtggcactattcacaatag

SEQ ID NO: 130301 - DNA, 22 bp, synthetic construct
  misc_feature 1..22: note = chemically synthesized
  source 1..22: mol_type = other DNA
ctgtggcactattcacaatagc

SEQ ID NO: 130302 - DNA, 22 bp, synthetic construct
  misc_feature 1..22: note = chemically synthesized
  source 1..22: mol_type = other DNA
tggcactattcacaatagcaaa

SEQ ID NO: 130303 - DNA, 22 bp, synthetic construct
  misc_feature 1..22: note = chemically synthesized
  source 1..22: mol_type = other DNA
ttcacaatagcaaagacttgga

SEQ ID NO: 130304 - DNA, 22 bp, synthetic construct
  misc_feature 1..22: note = chemically synthesized
  source 1..22: mol_type = other DNA
acaatagcaaagacttggaacc

SEQ ID NO: 130305 - DNA, 22 bp, synthetic construct
  misc_feature 1..22: note = chemically synthesized
  source 1..22: mol_type = other DNA
ggaaccaacccaaatgtccaac

SEQ ID NO: 130306 - DNA, 22 bp, synthetic construct
  misc_feature 1..22: note = chemically synthesized
  source 1..22: mol_type = other DNA
gaaccaacccaaatgtccaaca

SEQ ID NO: 130307 - DNA, 22 bp, synthetic construct
  misc_feature 1..22: note = chemically synthesized
  source 1..22: mol_type = other DNA
aattaagaaaatgtggcacata

SEQ ID NO: 130308 - DNA, 22 bp, synthetic construct
  misc_feature 1..22: note = chemically synthesized
  source 1..22: mol_type = other DNA
agaaaatgtggcacatatacac

SEQ ID NO: 130309 - DNA, 22 bp, synthetic construct
  misc_feature 1..22: note = chemically synthesized
  source 1..22: mol_type = other DNA
tgcagccataaaaaatgaagag

SEQ ID NO: 130310 - DNA, 22 bp, synthetic construct
  misc_feature 1..22: note = chemically synthesized
  source 1..22: mol_type = other DNA
atgtcatttgtagggacatgga

SEQ ID NO: 130311 - DNA, 22 bp, synthetic construct
  misc_feature 1..22: note = chemically synthesized
  source 1..22: mol_type = other DNA
gtagggacatggatgaaactgg

SEQ ID NO: 130312 - DNA, 22 bp, synthetic construct
  misc_feature 1..22: note = chemically synthesized
  source 1..22: mol_type = other DNA
tagggacatggatgaaactgga

SEQ ID NO: 130313 - DNA, 22 bp, synthetic construct
  misc_feature 1..22: note = chemically synthesized
  source 1..22: mol_type = other DNA
gaaaccatcattctcagcaaac

SEQ ID NO: 130314 - DNA, 22 bp, synthetic construct
  misc_feature 1..22: note = chemically synthesized
  source 1..22: mol_type = other DNA
tcagcaaactatcgcaaggaca

SEQ ID NO: 130315 - DNA, 22 bp, synthetic construct
  misc_feature 1..22: note = chemically synthesized
  source 1..22: mol_type = other DNA
agcaaactatcgcaaggacaaa

SEQ ID NO: 130316 - DNA, 22 bp, synthetic construct
  misc_feature 1..22: note = chemically synthesized
  source 1..22: mol_type = other DNA
tcgcaaggacaaaaaaccaagc

SEQ ID NO: 130317 - DNA, 22 bp, synthetic construct
  misc_feature 1..22: note = chemically synthesized
  source 1..22: mol_type = other DNA
catgttctcactcataggtggg

SEQ ID NO: 130318 - DNA, 22 bp, synthetic construct
  misc_feature 1..22: note = chemically synthesized
  source 1..22: mol_type = other DNA
tcactcataggtgggaattgaa

SEQ ID NO: 130319 - DNA, 22 bp, synthetic construct
  misc_feature 1..22: note = chemically synthesized
  source 1..22: mol_type = other DNA
actcataggtgggaattgaaca

SEQ ID NO: 130320 - DNA, 22 bp, synthetic construct
  misc_feature 1..22: note = chemically synthesized
  source 1..22: mol_type = other DNA
ataggtgggaattgaacaatga

SEQ ID NO: 130321 - DNA, 22 bp, synthetic construct
  misc_feature 1..22: note = chemically synthesized
  source 1..22: mol_type = other DNA
aacaatgagaacacatggacac

SEQ ID NO: 130322 - DNA, 22 bp, synthetic construct
  misc_feature 1..22: note = chemically synthesized
  source 1..22: mol_type = other DNA
cggggactgttgtgaggtgggg

SEQ ID NO: 130323 - DNA, 22 bp, synthetic construct
  misc_feature 1..22: note = chemically synthesized
  source 1..22: mol_type = other DNA
ttgtgaggtggggggaaggggg

SEQ ID NO: 130324 - DNA, 22 bp, synthetic construct
  misc_feature 1..22: note = chemically synthesized
  source 1..22: mol_type = other DNA
tgaggtggggggaagggggaga

SEQ ID NO: 130325 - DNA, 22 bp, synthetic construct
  misc_feature 1..22: note = chemically synthesized
  source 1..22: mol_type = other DNA
ggagatatacctaatgctaagt

SEQ ID NO: 130326 - DNA, 22 bp, synthetic construct
  misc_feature 1..22: note = chemically synthesized
  source 1..22: mol_type = other DNA
atgctaagtgacaagttaatgg

SEQ ID NO: 130327 - DNA, 22 bp, synthetic construct
  misc_feature 1..22: note = chemically synthesized
  source 1..22: mol_type = other DNA
agtgacaagttaatgggtgcag

SEQ ID NO: 130328 - DNA, 22 bp, synthetic construct
  misc_feature 1..22: note = chemically synthesized
  source 1..22: mol_type = other DNA
atgggtgcagcacaccaacatg

SEQ ID NO: 130329 - DNA, 22 bp, synthetic construct
  misc_feature 1..22: note = chemically synthesized
  source 1..22: mol_type = other DNA
cacattgtgcacatgtacccta

SEQ ID NO: 130330 - DNA, 22 bp, synthetic construct
  misc_feature 1..22: note = chemically synthesized
  source 1..22: mol_type = other DNA
tgcacatgtaccctaaaactta

SEQ ID NO: 130331 - DNA, 22 bp, synthetic construct
  misc_feature 1..22: note = chemically synthesized
  source 1..22: mol_type = other DNA
aaacttaaagtataataataat

SEQ ID NO: 130332 - DNA, 22 bp, synthetic construct
  misc_feature 1..22: note = chemically synthesized
  source 1..22: mol_type = other DNA
aaagtataataataataataat

SEQ ID NO: 130333 - DNA, 22 bp, synthetic construct
  misc_feature 1..22: note = chemically synthesized
  source 1..22: mol_type = other DNA
aagtataataataataataata

SEQ ID NO: 130334 - DNA, 22 bp, synthetic construct
  misc_feature 1..22: note = chemically synthesized
  source 1..22: mol_type = other DNA
ttttggattaacaaaaaccaac

SEQ ID NO: 130335 - DNA, 22 bp, synthetic construct
  misc_feature 1..22: note = chemically synthesized
  source 1..22: mol_type = other DNA
tggattaacaaaaaccaacagg

SEQ ID NO: 130336 - DNA, 22 bp, synthetic construct
  misc_feature 1..22: note = chemically synthesized
  source 1..22: mol_type = other DNA
ggattaacaaaaaccaacaggc

SEQ ID NO: 130337 - DNA, 22 bp, synthetic construct
  misc_feature 1..22: note = chemically synthesized
  source 1..22: mol_type = other DNA
gattaacaaaaaccaacaggct

SEQ ID NO: 130338 - DNA, 22 bp, synthetic construct
  misc_feature 1..22: note = chemically synthesized
  source 1..22: mol_type = other DNA
acaaaaaccaacaggctaccac

SEQ ID NO: 130339 - DNA, 22 bp, synthetic construct
  misc_feature 1..22: note = chemically synthesized
  source 1..22: mol_type = other DNA
ccacagattctctttgtgttca

SEQ ID NO: 130340 - DNA, 22 bp, synthetic construct
  misc_feature 1..22: note = chemically synthesized
  source 1..22: mol_type = other DNA
tctttgtgttcaattttctcac

SEQ ID NO: 130341 - DNA, 22 bp, synthetic construct
  misc_feature 1..22: note = chemically synthesized
  source 1..22: mol_type = other DNA
tttgtgttcaattttctcacat

SEQ ID NO: 130342 - DNA, 22 bp, synthetic construct
  misc_feature 1..22: note = chemically synthesized
  source 1..22: mol_type = other DNA
tgtgttcaattttctcacatgt

SEQ ID NO: 130343 - DNA, 22 bp, synthetic construct
  misc_feature 1..22: note = chemically synthesized
  source 1..22: mol_type = other DNA
gtgttcaattttctcacatgtt

SEQ ID NO: 130344 - DNA, 22 bp, synthetic construct
  misc_feature 1..22: note = chemically synthesized
  source 1..22: mol_type = other DNA
tgttcaattttctcacatgttt

SEQ ID NO: 130345 - DNA, 22 bp, synthetic construct
  misc_feature 1..22: note = chemically synthesized
  source 1..22: mol_type = other DNA
aattttctcacatgttttgtta

SEQ ID NO: 130346 - DNA, 22 bp, synthetic construct
  misc_feature 1..22: note = chemically synthesized
  source 1..22: mol_type = other DNA
tctcacatgttttgttattctg

SEQ ID NO: 130347 - DNA, 22 bp, synthetic construct
  misc_feature 1..22: note = chemically synthesized
  source 1..22: mol_type = other DNA
ctcacatgttttgttattctgg

SEQ ID NO: 130348 - DNA, 22 bp, synthetic construct
  misc_feature 1..22: note = chemically synthesized
  source 1..22: mol_type = other DNA
tcacatgttttgttattctggc

SEQ ID NO: 130349 - DNA, 22 bp, synthetic construct
  misc_feature 1..22: note = chemically synthesized
  source 1..22: mol_type = other DNA
acatgttttgttattctggctc

SEQ ID NO: 130350 - DNA, 22 bp, synthetic construct
  misc_feature 1..22: note = chemically synthesized
  source 1..22: mol_type = other DNA
tgttattctggctctgctagaa

SEQ ID NO: 130351 - DNA, 22 bp, synthetic construct
  misc_feature 1..22: note = chemically synthesized
  source 1..22: mol_type = other DNA
gttattctggctctgctagaat

SEQ ID NO: 130352 - DNA, 22 bp, synthetic construct
  misc_feature 1..22: note = chemically synthesized
  source 1..22: mol_type = other DNA
ttattctggctctgctagaatt

SEQ ID NO: 130353 - DNA, 22 bp, synthetic construct
  misc_feature 1..22: note = chemically synthesized
  source 1..22: mol_type = other DNA
ttctggctctgctagaattctc

SEQ ID NO: 130354 - DNA, 22 bp, synthetic construct
  misc_feature 1..22: note = chemically synthesized
  source 1..22: mol_type = other DNA
tggctctgctagaattctcttg

SEQ ID NO: 130355 - DNA, 22 bp, synthetic construct
  misc_feature 1..22: note = chemically synthesized
  source 1..22: mol_type = other DNA
gctctgctagaattctcttgat

SEQ ID NO: 130356 - DNA, 22 bp, synthetic construct
  misc_feature 1..22: note = chemically synthesized
  source 1..22: mol_type = other DNA
tgctagaattctcttgatttga

SEQ ID NO: 130357 - DNA, 22 bp, synthetic construct
  misc_feature 1..22: note = chemically synthesized
  source 1..22: mol_type = other DNA
ctagaattctcttgatttgagt

SEQ ID NO: 130358 - DNA, 22 bp, synthetic construct
  misc_feature 1..22: note = chemically synthesized
  source 1..22: mol_type = other DNA
gaattctcttgatttgagtttg

SEQ ID NO: 130359 - DNA, 22 bp, synthetic construct
  misc_feature 1..22: note = chemically synthesized
  source 1..22: mol_type = other DNA
tcttgatttgagtttgtcatat

SEQ ID NO: 130360 - DNA, 22 bp, synthetic construct
  misc_feature 1..22: note = chemically synthesized
  source 1..22: mol_type = other DNA
ttgatttgagtttgtcatattt

SEQ ID NO: 130361 - DNA, 22 bp, synthetic construct
  misc_feature 1..22: note = chemically synthesized
  source 1..22: mol_type = other DNA
gatttgagtttgtcatattttc

SEQ ID NO: 130362 - DNA, 22 bp, synthetic construct
  misc_feature 1..22: note = chemically synthesized
  source 1..22: mol_type = other DNA
atttgagtttgtcatattttct

SEQ ID NO: 130363 - DNA, 22 bp, synthetic construct
  misc_feature 1..22: note = chemically synthesized
  source 1..22: mol_type = other DNA
gagtttgtcatattttctcttt

SEQ ID NO: 130364 - DNA, 22 bp, synthetic construct
  misc_feature 1..22: note = chemically synthesized
  source 1..22: mol_type = other DNA
agtttgtcatattttctctttc

SEQ ID NO: 130365 - DNA, 22 bp, synthetic construct
  misc_feature 1..22: note = chemically synthesized
  source 1..22: mol_type = other DNA
gtcatattttctctttccccat

SEQ ID NO: 130366 - DNA, 22 bp, synthetic construct
  misc_feature 1..22: note = chemically synthesized
  source 1..22: mol_type = other DNA
tcatattttctctttccccata

SEQ ID NO: 130367 - DNA, 22 bp, synthetic construct
  misc_feature 1..22: note = chemically synthesized
  source 1..22: mol_type = other DNA
tctctttccccatagcctgtgt

SEQ ID NO: 130368 - DNA, 22 bp, synthetic construct
  misc_feature 1..22: note = chemically synthesized
  source 1..22: mol_type = other DNA
ctctttccccatagcctgtgta

SEQ ID NO: 130369 - DNA, 22 bp, synthetic construct
  misc_feature 1..22: note = chemically synthesized
  source 1..22: mol_type = other DNA
tctttccccatagcctgtgtat

SEQ ID NO: 130370 - DNA, 22 bp, synthetic construct
  misc_feature 1..22: note = chemically synthesized
  source 1..22: mol_type = other DNA
tttccccatagcctgtgtattt

SEQ ID NO: 130371 - DNA, 22 bp, synthetic construct
  misc_feature 1..22: note = chemically synthesized
  source 1..22: mol_type = other DNA
tccccatagcctgtgtattttt

SEQ ID NO: 130372 - DNA, 22 bp, synthetic construct
  misc_feature 1..22: note = chemically synthesized
  source 1..22: mol_type = other DNA
ccccatagcctgtgtatttttt

SEQ ID NO: 130373 - DNA, 22 bp, synthetic construct
  misc_feature 1..22: note = chemically synthesized
  source 1..22: mol_type = other DNA
cccatagcctgtgtattttttc

SEQ ID NO: 130374 - DNA, 22 bp, synthetic construct
  misc_feature 1..22: note = chemically synthesized
  source 1..22: mol_type = other DNA
tgtattttttcttcctttataa

SEQ ID NO: 130375 - DNA, 22 bp, synthetic construct
  misc_feature 1..22: note = chemically synthesized
  source 1..22: mol_type = other DNA
tttcttcctttataaactgtac

SEQ ID NO: 130376 - DNA, 22 bp, synthetic construct
  misc_feature 1..22: note = chemically synthesized
  source 1..22: mol_type = other DNA
ttcttcctttataaactgtacc

SEQ ID NO: 130377 - DNA, 22 bp, synthetic construct
  misc_feature 1..22: note = chemically synthesized
  source 1..22: mol_type = other DNA
tcttcctttataaactgtaccc

SEQ ID NO: 130378 - DNA, 22 bp, synthetic construct
  misc_feature 1..22: note = chemically synthesized
  source 1..22: mol_type = other DNA
cttcctttataaactgtacccc

SEQ ID NO: 130379 - DNA, 22 bp, synthetic construct
  misc_feature 1..22: note = chemically synthesized
  source 1..22: mol_type = other DNA
ttcctttataaactgtacccca

SEQ ID NO: 130380 - DNA, 22 bp, synthetic construct
  misc_feature 1..22: note = chemically synthesized
  source 1..22: mol_type = other DNA
cctttataaactgtaccccact

SEQ ID NO: 130381 - DNA, 22 bp, synthetic construct
  misc_feature 1..22: note = chemically synthesized
  source 1..22: mol_type = other DNA
ctttataaactgtaccccactt

SEQ ID NO: 130382 - DNA, 22 bp, synthetic construct
  misc_feature 1..22: note = chemically synthesized
  source 1..22: mol_type = other DNA
tataaactgtaccccacttata

SEQ ID NO: 130383 - DNA, 22 bp, synthetic construct
  misc_feature 1..22: note = chemically synthesized
  source 1..22: mol_type = other DNA
ataaactgtaccccacttatac

SEQ ID NO: 130384 - DNA, 22 bp, synthetic construct
  misc_feature 1..22: note = chemically synthesized
  source 1..22: mol_type = other DNA
taaactgtaccccacttataca

SEQ ID NO: 130385 - DNA, 22 bp, synthetic construct
  misc_feature 1..22: note = chemically synthesized
  source 1..22: mol_type = other DNA
taccccacttatacaaacacta

SEQ ID NO: 130386 - DNA, 22 bp, synthetic construct
  misc_feature 1..22: note = chemically synthesized
  source 1..22: mol_type = other DNA
atacaaacactatatttgttac

SEQ ID NO: 130387 - DNA, 22 bp, synthetic construct
  misc_feature 1..22: note = chemically synthesized
  source 1..22: mol_type = other DNA
tacaaacactatatttgttacc

SEQ ID NO: 130388 - DNA, 22 bp, synthetic construct
  misc_feature 1..22: note = chemically synthesized
  source 1..22: mol_type = other DNA
tatttgttaccttccttgtttt

SEQ ID NO: 130389 - DNA, 22 bp, synthetic construct
  misc_feature 1..22: note = chemically synthesized
  source 1..22: mol_type = other DNA
gttaccttccttgtttttcaat

SEQ ID NO: 130390 - DNA, 22 bp, synthetic construct
  misc_feature 1..22: note = chemically synthesized
  source 1..22: mol_type = other DNA
ttaccttccttgtttttcaatt

SEQ ID NO: 130391 - DNA, 22 bp, synthetic construct
  misc_feature 1..22: note = chemically synthesized
  source 1..22: mol_type = other DNA
ccttccttgtttttcaattatt

SEQ ID NO: 130392 - DNA, 22 bp, synthetic construct
  misc_feature 1..22: note = chemically synthesized
  source 1..22: mol_type = other DNA
ccttgtttttcaattattagct

SEQ ID NO: 130393 - DNA, 22 bp, synthetic construct
  misc_feature 1..22: note = chemically synthesized
  source 1..22: mol_type = other DNA
cttgtttttcaattattagctt

SEQ ID NO: 130394 - DNA, 22 bp, synthetic construct
  misc_feature 1..22: note = chemically synthesized
  source 1..22: mol_type = other DNA
gtttttcaattattagcttaaa

SEQ ID NO: 130395 - DNA, 22 bp, synthetic construct
  misc_feature 1..22: note = chemically synthesized
  source 1..22: mol_type = other DNA
tttttcaattattagcttaaat

SEQ ID NO: 130396 - DNA, 22 bp, synthetic construct
  misc_feature 1..22: note = chemically synthesized
  source 1..22: mol_type = other DNA
ttcaattattagcttaaataat

SEQ ID NO: 130397 - DNA, 22 bp, synthetic construct
  misc_feature 1..22: note = chemically synthesized
  source 1..22: mol_type = other DNA
tcaattattagcttaaataata

SEQ ID NO: 130398 - DNA, 22 bp, synthetic construct
  misc_feature 1..22: note = chemically synthesized
  source 1..22: mol_type = other DNA
caattattagcttaaataatat

SEQ ID NO: 130399 - DNA, 22 bp, synthetic construct
  misc_feature 1..22: note = chemically synthesized
  source 1..22: mol_type = other DNA
aattattagcttaaataatatt

SEQ ID NO: 130400 - DNA, 22 bp, synthetic construct
  misc_feature 1..22: note = chemically synthesized
  source 1..22: mol_type = other DNA
ttagcttaaataatatttcttt

SEQ ID NO: 130401 - DNA, 22 bp, synthetic construct
  misc_feature 1..22: note = chemically synthesized
  source 1..22: mol_type = other DNA
gcttaaataatatttcttttga

SEQ ID NO: 130402 - DNA, 22 bp, synthetic construct
  misc_feature 1..22: note = chemically synthesized
  source 1..22: mol_type = other DNA
aaataatatttcttttgagaaa

SEQ ID NO: 130403 - DNA, 22 bp, synthetic construct
  misc_feature 1..22: note = chemically synthesized
  source 1..22: mol_type = other DNA
aataatatttcttttgagaaat

SEQ ID NO: 130404 - DNA, 22 bp, synthetic construct
  misc_feature 1..22: note = chemically synthesized
  source 1..22: mol_type = other DNA
cttttgagaaattttcccctgc

SEQ ID NO: 130405 - DNA, 22 bp, synthetic construct
  misc_feature 1..22: note = chemically synthesized
  source 1..22: mol_type = other DNA
ttttgagaaattttcccctgcc

SEQ ID NO: 130406 - DNA, 22 bp, synthetic construct
  misc_feature 1..22: note = chemically synthesized
  source 1..22: mol_type = other DNA
ttgagaaattttcccctgcccc

SEQ ID NO: 130407 - DNA, 22 bp, synthetic construct
  misc_feature 1..22: note = chemically synthesized
  source 1..22: mol_type = other DNA
tgagaaattttcccctgcccca

SEQ ID NO: 130408 - DNA, 22 bp, synthetic construct
  misc_feature 1..22: note = chemically synthesized
  source 1..22: mol_type = other DNA
gagaaattttcccctgccccaa

SEQ ID NO: 130409 - DNA, 22 bp, synthetic construct
  misc_feature 1..22: note = chemically synthesized
  source 1..22: mol_type = other DNA
agaaattttcccctgccccaaa

SEQ ID NO: 130410 - DNA, 22 bp, synthetic construct
  misc_feature 1..22: note = chemically synthesized
  source 1..22: mol_type = other DNA
tcccctgccccaaagatgcttt

SEQ ID NO: 130411 - DNA, 22 bp, synthetic construct
  misc_feature 1..22: note = chemically synthesized
  source 1..22: mol_type = other DNA
cccctgccccaaagatgctttc

SEQ ID NO: 130412 - DNA, 22 bp, synthetic construct
  misc_feature 1..22: note = chemically synthesized
  source 1..22: mol_type = other DNA
ccctgccccaaagatgctttct

SEQ ID NO: 130413 - DNA, 22 bp, synthetic construct
  misc_feature 1..22: note = chemically synthesized
  source 1..22: mol_type = other DNA
ccccaaagatgctttctgtggg

SEQ ID NO: 130414 - DNA, 22 bp, synthetic construct
  misc_feature 1..22: note = chemically synthesized
  source 1..22: mol_type = other DNA
tctgtgggctccctttagcatg

SEQ ID NO: 130415 - DNA, 22 bp, synthetic construct
  misc_feature 1..22: note = chemically synthesized
  source 1..22: mol_type = other DNA
ctgtgggctccctttagcatgc

SEQ ID NO: 130416 - DNA, 22 bp, synthetic construct
  misc_feature 1..22: note = chemically synthesized
  source 1..22: mol_type = other DNA
tgtgggctccctttagcatgct

SEQ ID NO: 130417 - DNA, 22 bp, synthetic construct
  misc_feature 1..22: note = chemically synthesized
  source 1..22: mol_type = other DNA
tgggctccctttagcatgctac

SEQ ID NO: 130418 - DNA, 22 bp, synthetic construct
  misc_feature 1..22: note = chemically synthesized
  source 1..22: mol_type = other DNA
cctttagcatgctaccatctat

SEQ ID NO: 130419 - DNA, 22 bp, synthetic construct
  misc_feature 1..22: note = chemically synthesized
  source 1..22: mol_type = other DNA
tagcatgctaccatctatgcag

SEQ ID NO: 130420 - DNA, 22 bp, synthetic construct
  misc_feature 1..22: note = chemically synthesized
  source 1..22: mol_type = other DNA
agcatgctaccatctatgcagt

SEQ ID NO: 130421 - DNA, 22 bp, synthetic construct
  misc_feature 1..22: note = chemically synthesized
  source 1..22: mol_type = other DNA
gcatgctaccatctatgcagta

SEQ ID NO: 130422 - DNA, 22 bp, synthetic construct
  misc_feature 1..22: note = chemically synthesized
  source 1..22: mol_type = other DNA
ccatctatgcagtaatgatagt

SEQ ID NO: 130423 - DNA, 22 bp, synthetic construct
  misc_feature 1..22: note = chemically synthesized
  source 1..22: mol_type = other DNA
tgcagtaatgatagtgctatga

SEQ ID NO: 130424 - DNA, 22 bp, synthetic construct
  misc_feature 1..22: note = chemically synthesized
  source 1..22: mol_type = other DNA
tgaaaatttgtggtaactattt

SEQ ID NO: 130425 - DNA, 22 bp, synthetic construct
  misc_feature 1..22: note = chemically synthesized
  source 1..22: mol_type = other DNA
gtggtaactattttctttatat

SEQ ID NO: 130426 - DNA, 22 bp, synthetic construct
  misc_feature 1..22: note = chemically synthesized
  source 1..22: mol_type = other DNA
tggtaactattttctttatatt

SEQ ID NO: 130427 - DNA, 22 bp, synthetic construct
  misc_feature 1..22: note = chemically synthesized
  source 1..22: mol_type = other DNA
ttttctttatattacacactat

SEQ ID NO: 130428 - DNA, 22 bp, synthetic construct
  misc_feature 1..22: note = chemically synthesized
  source 1..22: mol_type = other DNA
tctttatattacacactattta

SEQ ID NO: 130429 - DNA, 22 bp, synthetic construct
  misc_feature 1..22: note = chemically synthesized
  source 1..22: mol_type = other DNA
ctttatattacacactatttac

SEQ ID NO: 130430 - DNA, 22 bp, synthetic construct
  misc_feature 1..22: note = chemically synthesized
  source 1..22: mol_type = other DNA
tttatattacacactatttaca

SEQ ID NO: 130431 - DNA, 22 bp, synthetic construct
  misc_feature 1..22: note = chemically synthesized
  source 1..22: mol_type = other DNA
tatattacacactatttacatt

SEQ ID NO: 130432 - DNA, 22 bp, synthetic construct
  misc_feature 1..22: note = chemically synthesized
  source 1..22: mol_type = other DNA
atattacacactatttacattc

SEQ ID NO: 130433 - DNA, 22 bp, synthetic construct
  misc_feature 1..22: note = chemically synthesized
  source 1..22: mol_type = other DNA
tattacacactatttacattct

SEQ ID NO: 130434 - DNA, 22 bp, synthetic construct
  misc_feature 1..22: note = chemically synthesized
  source 1..22: mol_type = other DNA
cacactatttacattctgtgaa

SEQ ID NO: 130435 - DNA, 22 bp, synthetic construct
  misc_feature 1..22: note = chemically synthesized
  source 1..22: mol_type = other DNA
tttacattctgtgaataaagac

SEQ ID NO: 130436 - DNA, 22 bp, synthetic construct
  misc_feature 1..22: note = chemically synthesized
  source 1..22: mol_type = other DNA
acattctgtgaataaagactat

SEQ ID NO: 130437 - DNA, 22 bp, synthetic construct
  misc_feature 1..22: note = chemically synthesized
  source 1..22: mol_type = other DNA
cattctgtgaataaagactatg

SEQ ID NO: 130438 - DNA, 22 bp, synthetic construct
  misc_feature 1..22: note = chemically synthesized
  source 1..22: mol_type = other DNA
tgtgaataaagactatgctcct

SEQ ID NO: 130439 - DNA, 22 bp, synthetic construct
  misc_feature 1..22: note = chemically synthesized
  source 1..22: mol_type = other DNA
tgaataaagactatgctcctca

SEQ ID NO: 130440 - DNA, 22 bp, synthetic construct
  misc_feature 1..22: note = chemically synthesized
  source 1..22: mol_type = other DNA
tgctcctcattgtgtatctggc

SEQ ID NO: 130441 - DNA, 22 bp, synthetic construct
  misc_feature 1..22: note = chemically synthesized
  source 1..22: mol_type = other DNA
ctcattgtgtatctggcaaaaa

SEQ ID NO: 130442 - DNA, 22 bp, synthetic construct
  misc_feature 1..22: note = chemically synthesized
  source 1..22: mol_type = other DNA
attgtgtatctggcaaaaaaaa

SEQ ID NO: 130443 - DNA, 22 bp, synthetic construct
  misc_feature 1..22: note = chemically synthesized
  source 1..22: mol_type = other DNA
tgtatctggcaaaaaaaaaaaa

SEQ ID NO: 130444 - DNA, 22 bp, synthetic construct
  misc_feature 1..22: note = chemically synthesized
  source 1..22: mol_type = other DNA
gcaaaaaaaaaaaaaaagggca

SEQ ID NO: 130445 - DNA, 22 bp, synthetic construct
  misc_feature 1..22: note = chemically synthesized
  source 1..22: mol_type = other DNA
caagtaatataattttaagata

SEQ ID NO: 130446 - DNA, 22 bp, synthetic construct
  misc_feature 1..22: note = chemically synthesized
  source 1..22: mol_type = other DNA
taagataaaaagctgaatgtca

SEQ ID NO: 130447 - DNA, 22 bp, synthetic construct
  misc_feature 1..22: note = chemically synthesized
  source 1..22: mol_type = other DNA
aagataaaaagctgaatgtcag

SEQ ID NO: 130448 - DNA, 22 bp, synthetic construct
  misc_feature 1..22: note = chemically synthesized
  source 1..22: mol_type = other DNA
agataaaaagctgaatgtcagc

SEQ ID NO: 130449 - DNA, 22 bp, synthetic construct
  misc_feature 1..22: note = chemically synthesized
  source 1..22: mol_type = other DNA
aatgtcagccgggcgcagtgac

SEQ ID NO: 130450 - DNA, 22 bp, synthetic construct
  misc_feature 1..22: note = chemically synthesized
  source 1..22: mol_type = other DNA
acacctgcaatcccagcacttt

SEQ ID NO: 130451 - DNA, 22 bp, synthetic construct
  misc_feature 1..22: note = chemically synthesized
  source 1..22: mol_type = other DNA
caatcccagcactttgggaggc

SEQ ID NO: 130452 - DNA, 22 bp, synthetic construct
  misc_feature 1..22: note = chemically synthesized
  source 1..22: mol_type = other DNA
tgggaggccaaggagggtggat

SEQ ID NO: 130453 - DNA, 22 bp, synthetic construct
  misc_feature 1..22: note = chemically synthesized
  source 1..22: mol_type = other DNA
gggaggccaaggagggtggatc

SEQ ID NO: 130454 - DNA, 22 bp, synthetic construct
  misc_feature 1..22: note = chemically synthesized
  source 1..22: mol_type = other DNA
ggaggccaaggagggtggatca

SEQ ID NO: 130455 - DNA, 22 bp, synthetic construct
  misc_feature 1..22: note = chemically synthesized
  source 1..22: mol_type = other DNA
gccaatatggtgaaaccccgtg

SEQ ID NO: 130456 - DNA, 22 bp, synthetic construct
  misc_feature 1..22: note = chemically synthesized
  source 1..22: mol_type = other DNA
ctaaaaatacaaaaattagctg

SEQ ID NO: 130457 - DNA, 22 bp, synthetic construct
  misc_feature 1..22: note = chemically synthesized
  source 1..22: mol_type = other DNA
aaaatacaaaaattagctgggt

SEQ ID NO: 130458 - DNA, 22 bp, synthetic construct
  misc_feature 1..22: note = chemically synthesized
  source 1..22: mol_type = other DNA
gctgggtgtggtgacgcgctac

SEQ ID NO: 130459 - DNA, 22 bp, synthetic construct
  misc_feature 1..22: note = chemically synthesized
  source 1..22: mol_type = other DNA
ggtgtggtgacgcgctactgta

SEQ ID NO: 130460 - DNA, 22 bp, synthetic construct
  misc_feature 1..22: note = chemically synthesized
  source 1..22: mol_type = other DNA
ctgtagtcccagcttctcagga

SEQ ID NO: 130461 - DNA, 22 bp, synthetic construct
  misc_feature 1..22: note = chemically synthesized
  source 1..22: mol_type = other DNA
tagtcccagcttctcaggaggc

SEQ ID NO: 130462 - DNA, 22 bp, synthetic construct
  misc_feature 1..22: note = chemically synthesized
  source 1..22: mol_type = other DNA
ctcaggaggctgtggcaggaga

SEQ ID NO: 130463 - DNA, 22 bp, synthetic construct
  misc_feature 1..22: note = chemically synthesized
  source 1..22: mol_type = other DNA
tcaggaggctgtggcaggagaa

SEQ ID NO: 130464 - DNA, 22 bp, synthetic construct
  misc_feature 1..22: note = chemically synthesized
  source 1..22: mol_type = other DNA
aggaggctgtggcaggagaatc

SEQ ID NO: 130465 - DNA, 22 bp, synthetic construct
  misc_feature 1..22: note = chemically synthesized
  source 1..22: mol_type = other DNA
tggcaggagaatcacttgaacc

SEQ ID NO: 130466 - DNA, 22 bp, synthetic construct
  misc_feature 1..22: note = chemically synthesized
  source 1..22: mol_type = other DNA
gaacctgggaggtggagtttgc

SEQ ID NO: 130467 - DNA, 22 bp, synthetic construct
  misc_feature 1..22: note = chemically synthesized
  source 1..22: mol_type = other DNA
aacctgggaggtggagtttgca

SEQ ID NO: 130468 - DNA, 22 bp, synthetic construct
  misc_feature 1..22: note = chemically synthesized
  source 1..22: mol_type = other DNA
ggaggtggagtttgcagtgagc

SEQ ID NO: 130469 - DNA, 22 bp, synthetic construct
  misc_feature 1..22: note = chemically synthesized
  source 1..22: mol_type = other DNA
gcagtgagctgagattgtgcta

SEQ ID NO: 130470 - DNA, 22 bp, synthetic construct
  misc_feature 1..22: note = chemically synthesized
  source 1..22: mol_type = other DNA
cagtgagctgagattgtgctac

SEQ ID NO: 130471 - DNA, 22 bp, synthetic construct
  misc_feature 1..22: note = chemically synthesized
  source 1..22: mol_type = other DNA
agattgtgctactgcactccag

SEQ ID NO: 130472 - DNA, 22 bp, synthetic construct
  misc_feature 1..22: note = chemically synthesized
  source 1..22: mol_type = other DNA
tgctactgcactccagcctggc

SEQ ID NO: 130473 - DNA, 22 bp, synthetic construct
  misc_feature 1..22: note = chemically synthesized
  source 1..22: mol_type = other DNA
ctgcactccagcctggcgacag

SEQ ID NO: 130474 - DNA, 22 bp, synthetic construct
  misc_feature 1..22: note = chemically synthesized
  source 1..22: mol_type = other DNA
cactccagcctggcgacagagt

SEQ ID NO: 130475 - DNA, 22 bp, synthetic construct
  misc_feature 1..22: note = chemically synthesized
  source 1..22: mol_type = other DNA
cagcctggcgacagagtgagac

SEQ ID NO: 130476 - DNA, 22 bp, synthetic construct
  misc_feature 1..22: note = chemically synthesized
  source 1..22: mol_type = other DNA
gcgacagagtgagactctatct

SEQ ID NO: 130477 - DNA, 22 bp, synthetic construct
  misc_feature 1..22: note = chemically synthesized
  source 1..22: mol_type = other DNA
tatctaaaaaaaaaaaaaaaaa

SEQ ID NO: 130478 - DNA, 22 bp, synthetic construct
  misc_feature 1..22: note = chemically synthesized
  source 1..22: mol_type = other DNA
tctaaaaaaaaaaaaaaaaaaa

SEQ ID NO: 130479 - DNA, 22 bp, synthetic construct
  misc_feature 1..22: note = chemically synthesized
  source 1..22: mol_type = other DNA
aaaaaaaaaaaaaaaaaaaaaa

SEQ ID NO: 130480 - DNA, 22 bp, synthetic construct
  misc_feature 1..22: note = chemically synthesized
  source 1..22: mol_type = other DNA
aatgtcatgaatctgcatgact

SEQ ID NO: 130481 - DNA, 22 bp, synthetic construct
  misc_feature 1..22: note = chemically synthesized
  source 1..22: mol_type = other DNA
catgactattaacagatccatt

SEQ ID NO: 130482 - DNA, 22 bp, synthetic construct
  misc_feature 1..22: note = chemically synthesized
  source 1..22: mol_type = other DNA
ttaacagatccattgaagttcc

SEQ ID NO: 130483 - DNA, 22 bp, synthetic construct
  misc_feature 1..22: note = chemically synthesized
  source 1..22: mol_type = other DNA
acagatccattgaagttccagt

SEQ ID NO: 130484 - DNA, 22 bp, synthetic construct
  misc_feature 1..22: note = chemically synthesized
  source 1..22: mol_type = other DNA
aagttccagtagataagaacaa

SEQ ID NO: 130485 - DNA, 22 bp, synthetic construct
  misc_feature 1..22: note = chemically synthesized
  source 1..22: mol_type = other DNA
cagtagataagaacaaatttta

SEQ ID NO: 130486 - DNA, 22 bp, synthetic construct
  misc_feature 1..22: note = chemically synthesized
  source 1..22: mol_type = other DNA
taccaaagtaacaggaaagaca

SEQ ID NO: 130487 - DNA, 22 bp, synthetic construct
  misc_feature 1..22: note = chemically synthesized
  source 1..22: mol_type = other DNA
accaaagtaacaggaaagacaa

SEQ ID NO: 130488 - DNA, 22 bp, synthetic construct
  misc_feature 1..22: note = chemically synthesized
  source 1..22: mol_type = other DNA
ccaaagtaacaggaaagacaaa

SEQ ID NO: 130489 - DNA, 22 bp, synthetic construct
  misc_feature 1..22: note = chemically synthesized
  source 1..22: mol_type = other DNA
gaattcataagctctaggaccc

SEQ ID NO: 130490 - DNA, 22 bp, synthetic construct
  misc_feature 1..22: note = chemically synthesized
  source 1..22: mol_type = other DNA
ataagctctaggacccgtagag

SEQ ID NO: 130491 - DNA, 22 bp, synthetic construct
  misc_feature 1..22: note = chemically synthesized
  source 1..22: mol_type = other DNA
taggacccgtagaggtacatat

SEQ ID NO: 130492 - DNA, 22 bp, synthetic construct
  misc_feature 1..22: note = chemically synthesized
  source 1..22: mol_type = other DNA
ggacccgtagaggtacatatga

SEQ ID NO: 130493 - DNA, 22 bp, synthetic construct
  misc_feature 1..22: note = chemically synthesized
  source 1..22: mol_type = other DNA
aagacaaccgatatcccctaac

SEQ ID NO: 130494 - DNA, 22 bp, synthetic construct
  misc_feature 1..22: note = chemically synthesized
  source 1..22: mol_type = other DNA
accctttcaaataaactaagtt

SEQ ID NO: 130495 - DNA, 22 bp, synthetic construct
  misc_feature 1..22: note = chemically synthesized
  source 1..22: mol_type = other DNA
tcaaataaactaagttatgatg

SEQ ID NO: 130496 - DNA, 22 bp, synthetic construct
  misc_feature 1..22: note = chemically synthesized
  source 1..22: mol_type = other DNA
caaataaactaagttatgatgc

SEQ ID NO: 130497 - DNA, 22 bp, synthetic construct
  misc_feature 1..22: note = chemically synthesized
  source 1..22: mol_type = other DNA
aaataaactaagttatgatgct

SEQ ID NO: 130498 - DNA, 22 bp, synthetic construct
  misc_feature 1..22: note = chemically synthesized
  source 1..22: mol_type = other DNA
agttatgatgctgagcctcctt

SEQ ID NO: 130499 - DNA, 22 bp, synthetic construct
  misc_feature 1..22: note = chemically synthesized
  source 1..22: mol_type = other DNA
tgatgctgagcctccttgggtc

SEQ ID NO: 130500 - DNA, 22 bp, synthetic construct
  misc_feature 1..22: note = chemically synthesized
  source 1..22: mol_type = other DNA
agcctccttgggtcacataacc

SEQ ID NO: 130501 - DNA, 22 bp, synthetic construct
  misc_feature 1..22: note = chemically synthesized
  source 1..22: mol_type = other DNA
cttgggtcacataaccaagccc

SEQ ID NO: 130502 - DNA, 22 bp, synthetic construct
  misc_feature 1..22: note = chemically synthesized
  source 1..22: mol_type = other DNA
gggtcacataaccaagccctgg

SEQ ID NO: 130503 - DNA, 22 bp, synthetic construct
  misc_feature 1..22: note = chemically synthesized
  source 1..22: mol_type = other DNA
ggtcacataaccaagccctggt

SEQ ID NO: 130504 - DNA, 22 bp, synthetic construct
  misc_feature 1..22: note = chemically synthesized
  source 1..22: mol_type = other DNA
gtatccctatcttacatcagct

SEQ ID NO: 130505 - DNA, 22 bp, synthetic construct
  misc_feature 1..22: note = chemically synthesized
  source 1..22: mol_type = other DNA
tcttacatcagctggtttttga

SEQ ID NO: 130506 - DNA, 22 bp, synthetic construct
  misc_feature 1..22: note = chemically synthesized
  source 1..22: mol_type = other DNA
acatcagctggtttttgaattt

SEQ ID NO: 130507 - DNA, 22 bp, synthetic construct
  misc_feature 1..22: note = chemically synthesized
  source 1..22: mol_type = other DNA
catcagctggtttttgaatttc

SEQ ID NO: 130508 - DNA, 22 bp, synthetic construct
  misc_feature 1..22: note = chemically synthesized
  source 1..22: mol_type = other DNA
gtttttgaatttcaaattttcc

SEQ ID NO: 130509 - DNA, 22 bp, synthetic construct
  misc_feature 1..22: note = chemically synthesized
  source 1..22: mol_type = other DNA
ttgaatttcaaattttcctcac

SEQ ID NO: 130510 - DNA, 22 bp, synthetic construct
  misc_feature 1..22: note = chemically synthesized
  source 1..22: mol_type = other DNA
tgaatttcaaattttcctcacc

SEQ ID NO: 130511 - DNA, 22 bp, synthetic construct
  misc_feature 1..22: note = chemically synthesized
  source 1..22: mol_type = other DNA
gaatttcaaattttcctcaccc

SEQ ID NO: 130512 - DNA, 22 bp, synthetic construct
  misc_feature 1..22: note = chemically synthesized
  source 1..22: mol_type = other DNA
aatttcaaattttcctcacccc

SEQ ID NO: 130513 - DNA, 22 bp, synthetic construct
  misc_feature 1..22: note = chemically synthesized
  source 1..22: mol_type = other DNA
caaattttcctcaccccattct

SEQ ID NO: 130514 - DNA, 22 bp, synthetic construct
  misc_feature 1..22: note = chemically synthesized
  source 1..22: mol_type = other DNA
aaattttcctcaccccattctt

SEQ ID NO: 130515 - DNA, 22 bp, synthetic construct
  misc_feature 1..22: note = chemically synthesized
  source 1..22: mol_type = other DNA
tcctcaccccattcttcaggaa

SEQ ID NO: 130516 - DNA, 22 bp, synthetic construct
  misc_feature 1..22: note = chemically synthesized
  source 1..22: mol_type = other DNA
cctcaccccattcttcaggaaa

SEQ ID NO: 130517 - DNA, 22 bp, synthetic construct
  misc_feature 1..22: note = chemically synthesized
  source 1..22: mol_type = other DNA
ctcaccccattcttcaggaaac

SEQ ID NO: 130518 - DNA, 22 bp, synthetic construct
  misc_feature 1..22: note = chemically synthesized
  source 1..22: mol_type = other DNA
accccattcttcaggaaacacc

SEQ ID NO: 130519 - DNA, 22 bp, synthetic construct
  misc_feature 1..22: note = chemically synthesized
  source 1..22: mol_type = other DNA
ttcaggaaacacctgaaaatcc

SEQ ID NO: 130520 - DNA, 22 bp, synthetic construct
  misc_feature 1..22: note = chemically synthesized
  source 1..22: mol_type = other DNA
caggaaacacctgaaaatcccg

SEQ ID NO: 130521 - DNA, 22 bp, synthetic construct
  misc_feature 1..22: note = chemically synthesized
  source 1..22: mol_type = other DNA
aggaaacacctgaaaatcccga

SEQ ID NO: 130522 - DNA, 22 bp, synthetic construct
  misc_feature 1..22: note = chemically synthesized
  source 1..22: mol_type = other DNA
aaaatcccgaggacatcagttg

SEQ ID NO: 130523 - DNA, 22 bp, synthetic construct
  misc_feature 1..22: note = chemically synthesized
  source 1..22: mol_type = other DNA
tggggccctgttcctcccgaac

SEQ ID NO: 130524 - DNA, 22 bp, synthetic construct
  misc_feature 1..22: note = chemically synthesized
  source 1..22: mol_type = other DNA
ttcctcccgaacagagaagaga

SEQ ID NO: 130525 - DNA, 22 bp, synthetic construct
  misc_feature 1..22: note = chemically synthesized
  source 1..22: mol_type = other DNA
ctcccgaacagagaagagaggg

SEQ ID NO: 130526 - DNA, 22 bp, synthetic construct
  misc_feature 1..22: note = chemically synthesized
  source 1..22: mol_type = other DNA
ccgaacagagaagagagggaag

SEQ ID NO: 130527 - DNA, 22 bp, synthetic construct
  misc_feature 1..22: note = chemically synthesized
  source 1..22: mol_type = other DNA
ctgagatgctagaaagatgaaa

SEQ ID NO: 130528 - DNA, 22 bp, synthetic construct
  misc_feature 1..22: note = chemically synthesized
  source 1..22: mol_type = other DNA
agatgctagaaagatgaaactc

SEQ ID NO: 130529 - DNA, 22 bp, synthetic construct
  misc_feature 1..22: note = chemically synthesized
  source 1..22: mol_type = other DNA
gaaagatgaaactcaggggagg

SEQ ID NO: 130530 - DNA, 22 bp, synthetic construct
  misc_feature 1..22: note = chemically synthesized
  source 1..22: mol_type = other DNA
aggggaggtgatttccacatgc

SEQ ID NO: 130531 - DNA, 22 bp, synthetic construct
  misc_feature 1..22: note = chemically synthesized
  source 1..22: mol_type = other DNA
ccacatgcataagctttaaaat

SEQ ID NO: 130532 - DNA, 22 bp, synthetic construct
  misc_feature 1..22: note = chemically synthesized
  source 1..22: mol_type = other DNA
cacatgcataagctttaaaatg

SEQ ID NO: 130533 - DNA, 22 bp, synthetic construct
  misc_feature 1..22: note = chemically synthesized
  source 1..22: mol_type = other DNA
taaaatgaggcctcatgagagg

SEQ ID NO: 130534 - DNA, 22 bp, synthetic construct
  misc_feature 1..22: note = chemically synthesized
  source 1..22: mol_type = other DNA
aaaatgaggcctcatgagaggt

SEQ ID NO: 130535 - DNA, 22 bp, synthetic construct
  misc_feature 1..22: note = chemically synthesized
  source 1..22: mol_type = other DNA
aaatgaggcctcatgagaggtc

SEQ ID NO: 130536 - DNA, 22 bp, synthetic construct
  misc_feature 1..22: note = chemically synthesized
  source 1..22: mol_type = other DNA
atgagaggtctgtgagtgaatg

SEQ ID NO: 130537 - DNA, 22 bp, synthetic construct
  misc_feature 1..22: note = chemically synthesized
  source 1..22: mol_type = other DNA
tgagtgaatgatctgaactgag

SEQ ID NO: 130538 - DNA, 22 bp, synthetic construct
  misc_feature 1..22: note = chemically synthesized
  source 1..22: mol_type = other DNA
aactgagtcctcaaagaggaca

SEQ ID NO: 130539 - DNA, 22 bp, synthetic construct
  misc_feature 1..22: note = chemically synthesized
  source 1..22: mol_type = other DNA
agtcctcaaagaggacaggaat

SEQ ID NO: 130540 - DNA, 22 bp, synthetic construct
  misc_feature 1..22: note = chemically synthesized
  source 1..22: mol_type = other DNA
aaagaggacaggaataggttcc

SEQ ID NO: 130541 - DNA, 22 bp, synthetic construct
  misc_feature 1..22: note = chemically synthesized
  source 1..22: mol_type = other DNA
ctattttagccacaatactgtg

SEQ ID NO: 130542 - DNA, 22 bp, synthetic construct
  misc_feature 1..22: note = chemically synthesized
  source 1..22: mol_type = other DNA
ttttagccacaatactgtgagt

SEQ ID NO: 130543 - DNA, 22 bp, synthetic construct
  misc_feature 1..22: note = chemically synthesized
  source 1..22: mol_type = other DNA
tagccacaatactgtgagtggg

SEQ ID NO: 130544 - DNA, 22 bp, synthetic construct
  misc_feature 1..22: note = chemically synthesized
  source 1..22: mol_type = other DNA
agccacaatactgtgagtgggt

SEQ ID NO: 130545 - DNA, 22 bp, synthetic construct
  misc_feature 1..22: note = chemically synthesized
  source 1..22: mol_type = other DNA
gccacaatactgtgagtgggtg

SEQ ID NO: 130546 - DNA, 22 bp, synthetic construct
  misc_feature 1..22: note = chemically synthesized
  source 1..22: mol_type = other DNA
tgagtgggtgagtgccaggaac

SEQ ID NO: 130547 - DNA, 22 bp, synthetic construct
  misc_feature 1..22: note = chemically synthesized
  source 1..22: mol_type = other DNA
gaatatggaatgattcctctct

SEQ ID NO: 130548 - DNA, 22 bp, synthetic construct
  misc_feature 1..22: note = chemically synthesized
  source 1..22: mol_type = other DNA
aatatggaatgattcctctctc

SEQ ID NO: 130549 - DNA, 22 bp, synthetic construct
  misc_feature 1..22: note = chemically synthesized
  source 1..22: mol_type = other DNA
ctctctcttctgatgtgagatg

SEQ ID NO: 130550 - DNA, 22 bp, synthetic construct
  misc_feature 1..22: note = chemically synthesized
  source 1..22: mol_type = other DNA
tctcttctgatgtgagatgcac

SEQ ID NO: 130551 - DNA, 22 bp, synthetic construct
  misc_feature 1..22: note = chemically synthesized
  source 1..22: mol_type = other DNA
tcttctgatgtgagatgcactc

SEQ ID NO: 130552 - DNA, 22 bp, synthetic construct
  misc_feature 1..22: note = chemically synthesized
  source 1..22: mol_type = other DNA
ttctgatgtgagatgcactcaa

SEQ ID NO: 130553 - DNA, 22 bp, synthetic construct
  misc_feature 1..22: note = chemically synthesized
  source 1..22: mol_type = other DNA
ctgatgtgagatgcactcaagg

SEQ ID NO: 130554 - DNA, 22 bp, synthetic construct
  misc_feature 1..22: note = chemically synthesized
  source 1..22: mol_type = other DNA
tgatgtgagatgcactcaagga

SEQ ID NO: 130555 - DNA, 22 bp, synthetic construct
  misc_feature 1..22: note = chemically synthesized
  source 1..22: mol_type = other DNA
atgtgagatgcactcaaggaaa

SEQ ID NO: 130556 - DNA, 22 bp, synthetic construct
  misc_feature 1..22: note = chemically synthesized
  source 1..22: mol_type = other DNA
aaggaaagcatataagaaggtt

SEQ ID NO: 130557 - DNA, 22 bp, synthetic construct
  misc_feature 1..22: note = chemically synthesized
  source 1..22: mol_type = other DNA
tccagaggtctgcctagaggta

SEQ ID NO: 130558 - DNA, 22 bp, synthetic construct
  misc_feature 1..22: note = chemically synthesized
  source 1..22: mol_type = other DNA
ccagaggtctgcctagaggtaa

SEQ ID NO: 130559 - DNA, 22 bp, synthetic construct
  misc_feature 1..22: note = chemically synthesized
  source 1..22: mol_type = other DNA
cagaggtctgcctagaggtaaa

SEQ ID NO: 130560 - DNA, 22 bp, synthetic construct
  misc_feature 1..22: note = chemically synthesized
  source 1..22: mol_type = other DNA
cctagaggtaaagatcacagct

SEQ ID NO: 130561 - DNA, 22 bp, synthetic construct
  misc_feature 1..22: note = chemically synthesized
  source 1..22: mol_type = other DNA
gaggtaaagatcacagctgagg

SEQ ID NO: 130562 - DNA, 22 bp, synthetic construct
  misc_feature 1..22: note = chemically synthesized
  source 1..22: mol_type = other DNA
aggtgggatatcctacagcaca

SEQ ID NO: 130563 - DNA, 22 bp, synthetic construct
  misc_feature 1..22: note = chemically synthesized
  source 1..22: mol_type = other DNA
cagcacagatttttttttttct

SEQ ID NO: 130564 - DNA, 22 bp, synthetic construct
  misc_feature 1..22: note = chemically synthesized
  source 1..22: mol_type = other DNA
ttttttttcttttttgaaagag

SEQ ID NO: 130565 - DNA, 22 bp, synthetic construct
  misc_feature 1..22: note = chemically synthesized
  source 1..22: mol_type = other DNA
tttttttcttttttgaaagagt

SEQ ID NO: 130566 - DNA, 22 bp, synthetic construct
  misc_feature 1..22: note = chemically synthesized
  source 1..22: mol_type = other DNA
ttttttcttttttgaaagagta

SEQ ID NO: 130567 - DNA, 22 bp, synthetic construct
  misc_feature 1..22: note = chemically synthesized
  source 1..22: mol_type = other DNA
tttttcttttttgaaagagtat

SEQ ID NO: 130568 - DNA, 22 bp, synthetic construct
  misc_feature 1..22: note = chemically synthesized
  source 1..22: mol_type = other DNA
ttttcttttttgaaagagtatt

SEQ ID NO: 130569 - DNA, 22 bp, synthetic construct
  misc_feature 1..22: note = chemically synthesized
  source 1..22: mol_type = other DNA
tttcttttttgaaagagtattt

SEQ ID NO: 130570 - DNA, 22 bp, synthetic construct
  misc_feature 1..22: note = chemically synthesized
  source 1..22: mol_type = other DNA
ttcttttttgaaagagtattta

SEQ ID NO: 130571 - DNA, 22 bp, synthetic construct
  misc_feature 1..22: note = chemically synthesized
  source 1..22: mol_type = other DNA
tcttttttgaaagagtatttaa

SEQ ID NO: 130572 - DNA, 22 bp, synthetic construct
  misc_feature 1..22: note = chemically synthesized
  source 1..22: mol_type = other DNA
cttttttgaaagagtatttaag

SEQ ID NO: 130573 - DNA, 22 bp, synthetic construct
  misc_feature 1..22: note = chemically synthesized
  source 1..22: mol_type = other DNA
ttttttgaaagagtatttaagg

SEQ ID NO: 130574 - DNA, 22 bp, synthetic construct
  misc_feature 1..22: note = chemically synthesized
  source 1..22: mol_type = other DNA
ttttgaaagagtatttaaggaa

SEQ ID NO: 130575 - DNA, 22 bp, synthetic construct
  misc_feature 1..22: note = chemically synthesized
  source 1..22: mol_type = other DNA
tttgaaagagtatttaaggaac

SEQ ID NO: 130576 - DNA, 22 bp, synthetic construct
  misc_feature 1..22: note = chemically synthesized
  source 1..22: mol_type = other DNA
ttgaaagagtatttaaggaact

SEQ ID NO: 130577 - DNA, 22 bp, synthetic construct
  misc_feature 1..22: note = chemically synthesized
  source 1..22: mol_type = other DNA
tgaaagagtatttaaggaactg

SEQ ID NO: 130578 - DNA, 22 bp, synthetic construct
  misc_feature 1..22: note = chemically synthesized
  source 1..22: mol_type = other DNA
gaaagagtatttaaggaactgt

SEQ ID NO: 130579 - DNA, 22 bp, synthetic construct
  misc_feature 1..22: note = chemically synthesized
  source 1..22: mol_type = other DNA
aaagagtatttaaggaactgtg

SEQ ID NO: 130580 - DNA, 22 bp, synthetic construct
  misc_feature 1..22: note = chemically synthesized
  source 1..22: mol_type = other DNA
aaggaactgtgatagatttagg

SEQ ID NO: 130581 - DNA, 22 bp, synthetic construct
  misc_feature 1..22: note = chemically synthesized
  source 1..22: mol_type = other DNA
aggaactgtgatagatttaggt

SEQ ID NO: 130582 - DNA, 22 bp, synthetic construct
  misc_feature 1..22: note = chemically synthesized
  source 1..22: mol_type = other DNA
tgatagatttaggttttctaat

SEQ ID NO: 130583 - DNA, 22 bp, synthetic construct
  misc_feature 1..22: note = chemically synthesized
  source 1..22: mol_type = other DNA
aggttttctaatctgggaccct

SEQ ID NO: 130584 - DNA, 22 bp, synthetic construct
  misc_feature 1..22: note = chemically synthesized
  source 1..22: mol_type = other DNA
ggttttctaatctgggaccctt

SEQ ID NO: 130585 - DNA, 22 bp, synthetic construct
  misc_feature 1..22: note = chemically synthesized
  source 1..22: mol_type = other DNA
tctaatctgggacccttggatt

SEQ ID NO: 130586 - DNA, 22 bp, synthetic construct
  misc_feature 1..22: note = chemically synthesized
  source 1..22: mol_type = other DNA
ctaatctgggacccttggattg

SEQ ID NO: 130587 - DNA, 22 bp, synthetic construct
  misc_feature 1..22: note = chemically synthesized
  source 1..22: mol_type = other DNA
taatctgggacccttggattgg

SEQ ID NO: 130588 - DNA, 22 bp, synthetic construct
  misc_feature 1..22: note = chemically synthesized
  source 1..22: mol_type = other DNA
atctgggacccttggattggca

SEQ ID NO: 130589 - DNA, 22 bp, synthetic construct
  misc_feature 1..22: note = chemically synthesized
  source 1..22: mol_type = other DNA
ggacccttggattggcataagt

SEQ ID NO: 130590 - DNA, 22 bp, synthetic construct
  misc_feature 1..22: note = chemically synthesized
  source 1..22: mol_type = other DNA
ggattggcataagtataattgt

SEQ ID NO: 130591 - DNA, 22 bp, synthetic construct
  misc_feature 1..22: note = chemically synthesized
  source 1..22: mol_type = other DNA
gattggcataagtataattgtt

SEQ ID NO: 130592 - DNA, 22 bp, synthetic construct
  misc_feature 1..22: note = chemically synthesized
  source 1..22: mol_type = other DNA
gcataagtataattgttaatgc

SEQ ID NO: 130593 - DNA, 22 bp, synthetic construct
  misc_feature 1..22: note = chemically synthesized
  source 1..22: mol_type = other DNA
ttaatgctcagaactgcatgtg

SEQ ID NO: 130594 - DNA, 22 bp, synthetic construct
  misc_feature 1..22: note = chemically synthesized
  source 1..22: mol_type = other DNA
atgctcagaactgcatgtgtca

SEQ ID NO: 130595 - DNA, 22 bp, synthetic construct
  misc_feature 1..22: note = chemically synthesized
  source 1..22: mol_type = other DNA
agaactgcatgtgtcattgtgc

SEQ ID NO: 130596 - DNA, 22 bp, synthetic construct
  misc_feature 1..22: note = chemically synthesized
  source 1..22: mol_type = other DNA
catgtgtcattgtgcattctta

SEQ ID NO: 130597 - DNA, 22 bp, synthetic construct
  misc_feature 1..22: note = chemically synthesized
  source 1..22: mol_type = other DNA
tgcattcttactcatttttcta

SEQ ID NO: 130598 - DNA, 22 bp, synthetic construct
  misc_feature 1..22: note = chemically synthesized
  source 1..22: mol_type = other DNA
ttactcatttttctatgtagat

SEQ ID NO: 130599 - DNA, 22 bp, synthetic construct
  misc_feature 1..22: note = chemically synthesized
  source 1..22: mol_type = other DNA
actcatttttctatgtagatgt

SEQ ID NO: 130600 - DNA, 22 bp, synthetic construct
  misc_feature 1..22: note = chemically synthesized
  source 1..22: mol_type = other DNA
ctcatttttctatgtagatgtt

SEQ ID NO: 130601 - DNA, 22 bp, synthetic construct
  misc_feature 1..22: note = chemically synthesized
  source 1..22: mol_type = other DNA
atttttctatgtagatgtttat

SEQ ID NO: 130602 - DNA, 22 bp, synthetic construct
  misc_feature 1..22: note = chemically synthesized
  source 1..22: mol_type = other DNA
ttctatgtagatgtttatagct

SEQ ID NO: 130603 - DNA, 22 bp, synthetic construct
  misc_feature 1..22: note = chemically synthesized
  source 1..22: mol_type = other DNA
tctatgtagatgtttatagctt

SEQ ID NO: 130604 - DNA, 22 bp, synthetic construct
  misc_feature 1..22: note = chemically synthesized
  source 1..22: mol_type = other DNA
ctatgtagatgtttatagcttt

SEQ ID NO: 130605 - DNA, 22 bp, synthetic construct
  misc_feature 1..22: note = chemically synthesized
  source 1..22: mol_type = other DNA
tatgtagatgtttatagctttt

SEQ ID NO: 130606 - DNA, 22 bp, synthetic construct
  misc_feature 1..22: note = chemically synthesized
  source 1..22: mol_type = other DNA
tgtagatgtttatagctttttt

SEQ ID NO: 130607 - DNA, 22 bp, synthetic construct
  misc_feature 1..22: note = chemically synthesized
  source 1..22: mol_type = other DNA
atagcttttttttcagagaata

SEQ ID NO: 130608 - DNA, 22 bp, synthetic construct
  misc_feature 1..22: note = chemically synthesized
  source 1..22: mol_type = other DNA
tagcttttttttcagagaatat

SEQ ID NO: 130609 - DNA, 22 bp, synthetic construct
  misc_feature 1..22: note = chemically synthesized
  source 1..22: mol_type = other DNA
ttttttcagagaatatttcttc

SEQ ID NO: 130610 - DNA, 22 bp, synthetic construct
  misc_feature 1..22: note = chemically synthesized
  source 1..22: mol_type = other DNA
tttttcagagaatatttcttca

SEQ ID NO: 130611 - DNA, 22 bp, synthetic construct
  misc_feature 1..22: note = chemically synthesized
  source 1..22: mol_type = other DNA
ttttcagagaatatttcttcat

SEQ ID NO: 130612 - DNA, 22 bp, synthetic construct
  misc_feature 1..22: note = chemically synthesized
  source 1..22: mol_type = other DNA
tttcagagaatatttcttcatt

SEQ ID NO: 130613 - DNA, 22 bp, synthetic construct
  misc_feature 1..22: note = chemically synthesized
  source 1..22: mol_type = other DNA
ttcagagaatatttcttcattc

SEQ ID NO: 130614 - DNA, 22 bp, synthetic construct
  misc_feature 1..22: note = chemically synthesized
  source 1..22: mol_type = other DNA
tcagagaatatttcttcattcc

SEQ ID NO: 130615 - DNA, 22 bp, synthetic construct
  misc_feature 1..22: note = chemically synthesized
  source 1..22: mol_type = other DNA
cagagaatatttcttcattcca

SEQ ID NO: 130616 - DNA, 22 bp, synthetic construct
  misc_feature 1..22: note = chemically synthesized
  source 1..22: mol_type = other DNA
agagaatatttcttcattccaa

SEQ ID NO: 130617 - DNA, 22 bp, synthetic construct
  misc_feature 1..22: note = chemically synthesized
  source 1..22: mol_type = other DNA
cttcattccaaaacagctttgt

SEQ ID NO: 130618 - DNA, 22 bp, synthetic construct
  misc_feature 1..22: note = chemically synthesized
  source 1..22: mol_type = other DNA
ttcattccaaaacagctttgtt

SEQ ID NO: 130619 - DNA, 22 bp, synthetic construct
  misc_feature 1..22: note = chemically synthesized
  source 1..22: mol_type = other DNA
cattccaaaacagctttgttat

SEQ ID NO: 130620 - DNA, 22 bp, synthetic construct
  misc_feature 1..22: note = chemically synthesized
  source 1..22: mol_type = other DNA
attccaaaacagctttgttatc

SEQ ID NO: 130621 - DNA, 22 bp, synthetic construct
  misc_feature 1..22: note = chemically synthesized
  source 1..22: mol_type = other DNA
caaaacagctttgttatcactc

SEQ ID NO: 130622 - DNA, 22 bp, synthetic construct
  misc_feature 1..22: note = chemically synthesized
  source 1..22: mol_type = other DNA
tgttatcactcacctcctttgt

SEQ ID NO: 130623 - DNA, 22 bp, synthetic construct
  misc_feature 1..22: note = chemically synthesized
  source 1..22: mol_type = other DNA
gttatcactcacctcctttgtt

SEQ ID NO: 130624 - DNA, 22 bp, synthetic construct
  misc_feature 1..22: note = chemically synthesized
  source 1..22: mol_type = other DNA
ttatcactcacctcctttgttc

SEQ ID NO: 130625 - DNA, 22 bp, synthetic construct
  misc_feature 1..22: note = chemically synthesized
  source 1..22: mol_type = other DNA
tcactcacctcctttgttcagt

SEQ ID NO: 130626 - DNA, 22 bp, synthetic construct
  misc_feature 1..22: note = chemically synthesized
  source 1..22: mol_type = other DNA
acctcctttgttcagttattgg

SEQ ID NO: 130627 - DNA, 22 bp, synthetic construct
  misc_feature 1..22: note = chemically synthesized
  source 1..22: mol_type = other DNA
ctttgttcagttattggtaaat

SEQ ID NO: 130628 - DNA, 22 bp, synthetic construct
  misc_feature 1..22: note = chemically synthesized
  source 1..22: mol_type = other DNA
tgttcagttattggtaaatata

SEQ ID NO: 130629 - DNA, 22 bp, synthetic construct
  misc_feature 1..22: note = chemically synthesized
  source 1..22: mol_type = other DNA
gttcagttattggtaaatatat

SEQ ID NO: 130630 - DNA, 22 bp, synthetic construct
  misc_feature 1..22: note = chemically synthesized
  source 1..22: mol_type = other DNA
ttcagttattggtaaatatatt

SEQ ID NO: 130631 - DNA, 22 bp, synthetic construct
  misc_feature 1..22: note = chemically synthesized
  source 1..22: mol_type = other DNA
agttattggtaaatatattaca

SEQ ID NO: 130632 - DNA, 22 bp, synthetic construct
  misc_feature 1..22: note = chemically synthesized
  source 1..22: mol_type = other DNA
ttggtaaatatattacatttat

SEQ ID NO: 130633 - DNA, 22 bp, synthetic construct
  misc_feature 1..22: note = chemically synthesized
  source 1..22: mol_type = other DNA
gtaaatatattacatttatatt

SEQ ID NO: 130634 - DNA, 22 bp, synthetic construct
  misc_feature 1..22: note = chemically synthesized
  source 1..22: mol_type = other DNA
catttatatttgtaatagttcc

SEQ ID NO: 130635 - DNA, 22 bp, synthetic construct
  misc_feature 1..22: note = chemically synthesized
  source 1..22: mol_type = other DNA
atatttgtaatagttccagcaa

SEQ ID NO: 130636 - DNA, 22 bp, synthetic construct
  misc_feature 1..22: note = chemically synthesized
  source 1..22: mol_type = other DNA
tatttgtaatagttccagcaat

SEQ ID NO: 130637 - DNA, 22 bp, synthetic construct
  misc_feature 1..22: note = chemically synthesized
  source 1..22: mol_type = other DNA
gtaatagttccagcaatgcaat

SEQ ID NO: 130638 - DNA, 22 bp, synthetic construct
  misc_feature 1..22: note = chemically synthesized
  source 1..22: mol_type = other DNA
taatagttccagcaatgcaatt

SEQ ID NO: 130639 - DNA, 22 bp, synthetic construct
  misc_feature 1..22: note = chemically synthesized
  source 1..22: mol_type = other DNA
cagcaatgcaattctatttttt

SEQ ID NO: 130640 - DNA, 22 bp, synthetic construct
  misc_feature 1..22: note = chemically synthesized
  source 1..22: mol_type = other DNA
tattttttattgtaatacattc

SEQ ID NO: 130641 - DNA, 22 bp, synthetic construct
  misc_feature 1..22: note = chemically synthesized
  source 1..22: mol_type = other DNA
ttttttattgtaatacattcat

SEQ ID NO: 130642 - DNA, 22 bp, synthetic construct
  misc_feature 1..22: note = chemically synthesized
  source 1..22: mol_type = other DNA
tttattgtaatacattcatttt

SEQ ID NO: 130643 - DNA, 22 bp, synthetic construct
  misc_feature 1..22: note = chemically synthesized
  source 1..22: mol_type = other DNA
ttattgtaatacattcattttt

SEQ ID NO: 130644 - DNA, 22 bp, synthetic construct
  misc_feature 1..22: note = chemically synthesized
  source 1..22: mol_type = other DNA
tattgtaatacattcatttttg

SEQ ID NO: 130645 - DNA, 22 bp, synthetic construct
  misc_feature 1..22: note = chemically synthesized
  source 1..22: mol_type = other DNA
attgtaatacattcatttttga

SEQ ID NO: 130646 - DNA, 22 bp, synthetic construct
  misc_feature 1..22: note = chemically synthesized
  source 1..22: mol_type = other DNA
ttgtaatacattcatttttgaa

SEQ ID NO: 130647 - DNA, 22 bp, synthetic construct
  misc_feature 1..22: note = chemically synthesized
  source 1..22: mol_type = other DNA
taatacattcatttttgaaaat

SEQ ID NO: 130648 - DNA, 22 bp, synthetic construct
  misc_feature 1..22: note = chemically synthesized
  source 1..22: mol_type = other DNA
atttttgaaaataagaagcaga

SEQ ID NO: 130649 - DNA, 22 bp, synthetic construct
  misc_feature 1..22: note = chemically synthesized
  source 1..22: mol_type = other DNA
ttgaaaataagaagcagaaagg

SEQ ID NO: 130650 - DNA, 22 bp, synthetic construct
  misc_feature 1..22: note = chemically synthesized
  source 1..22: mol_type = other DNA
tgaaaataagaagcagaaagga

SEQ ID NO: 130651 - DNA, 22 bp, synthetic construct
  misc_feature 1..22: note = chemically synthesized
  source 1..22: mol_type = other DNA
gaaaataagaagcagaaaggaa

SEQ ID NO: 130652 - DNA, 22 bp, synthetic construct
  misc_feature 1..22: note = chemically synthesized
  source 1..22: mol_type = other DNA
aaaataagaagcagaaaggaat

SEQ ID NO: 130653 - DNA, 22 bp, synthetic construct
  misc_feature 1..22: note = chemically synthesized
  source 1..22: mol_type = other DNA
ctataatgacatgactatcttt

SEQ ID NO: 130654 - DNA, 22 bp, synthetic construct
  misc_feature 1..22: note = chemically synthesized
  source 1..22: mol_type = other DNA
tataatgacatgactatcttta

SEQ ID NO: 130655 - DNA, 22 bp, synthetic construct
  misc_feature 1..22: note = chemically synthesized
  source 1..22: mol_type = other DNA
taatgacatgactatctttact

SEQ ID NO: 130656 - DNA, 22 bp, synthetic construct
  misc_feature 1..22: note = chemically synthesized
  source 1..22: mol_type = other DNA
tctttactggtgcttttgtcat

SEQ ID NO: 130657 - DNA, 22 bp, synthetic construct
  misc_feature 1..22: note = chemically synthesized
  source 1..22: mol_type = other DNA
tactggtgcttttgtcatttta

SEQ ID NO: 130658 - DNA, 22 bp, synthetic construct
  misc_feature 1..22: note = chemically synthesized
  source 1..22: mol_type = other DNA
actggtgcttttgtcattttat

SEQ ID NO: 130659 - DNA, 22 bp, synthetic construct
  misc_feature 1..22: note = chemically synthesized
  source 1..22: mol_type = other DNA
ctggtgcttttgtcattttatg

SEQ ID NO: 130660 - DNA, 22 bp, synthetic construct
  misc_feature 1..22: note = chemically synthesized
  source 1..22: mol_type = other DNA
gtgcttttgtcattttatgtag

SEQ ID NO: 130661 - DNA, 22 bp, synthetic construct
  misc_feature 1..22: note = chemically synthesized
  source 1..22: mol_type = other DNA
ttgtcattttatgtagattcaa

SEQ ID NO: 130662 - DNA, 22 bp, synthetic construct
  misc_feature 1..22: note = chemically synthesized
  source 1..22: mol_type = other DNA
tgtcattttatgtagattcaaa

SEQ ID NO: 130663 - DNA, 22 bp, synthetic construct
  misc_feature 1..22: note = chemically synthesized
  source 1..22: mol_type = other DNA
gtcattttatgtagattcaaat

SEQ ID NO: 130664 - DNA, 22 bp, synthetic construct
  misc_feature 1..22: note = chemically synthesized
  source 1..22: mol_type = other DNA
tcattttatgtagattcaaatg

SEQ ID NO: 130665 - DNA, 22 bp, synthetic construct
  misc_feature 1..22: note = chemically synthesized
  source 1..22: mol_type = other DNA
tatgtagattcaaatgatcatc

SEQ ID NO: 130666 - DNA, 22 bp, synthetic construct
  misc_feature 1..22: note = chemically synthesized
  source 1..22: mol_type = other DNA
atgtagattcaaatgatcatct

SEQ ID NO: 130667 - DNA, 22 bp, synthetic construct
  misc_feature 1..22: note = chemically synthesized
  source 1..22: mol_type = other DNA
tgtagattcaaatgatcatctt

SEQ ID NO: 130668 - DNA, 22 bp, synthetic construct
  misc_feature 1..22: note = chemically synthesized
  source 1..22: mol_type = other DNA
aaatgatcatctttggtcattt

SEQ ID NO: 130669 - DNA, 22 bp, synthetic construct
  misc_feature 1..22: note = chemically synthesized
  source 1..22: mol_type = other DNA
tggtcatttggtttcaacttag

SEQ ID NO: 130670 - DNA, 22 bp, synthetic construct
  misc_feature 1..22: note = chemically synthesized
  source 1..22: mol_type = other DNA
ggtcatttggtttcaacttagt

SEQ ID NO: 130671 - DNA, 22 bp, synthetic construct
  misc_feature 1..22: note = chemically synthesized
  source 1..22: mol_type = other DNA
gtcatttggtttcaacttagtt

SEQ ID NO: 130672 - DNA, 22 bp, synthetic construct
  misc_feature 1..22: note = chemically synthesized
  source 1..22: mol_type = other DNA
ggtttcaacttagttgaaatca

SEQ ID NO: 130673 - DNA, 22 bp, synthetic construct
  misc_feature 1..22: note = chemically synthesized
  source 1..22: mol_type = other DNA
gtttcaacttagttgaaatcaa

SEQ ID NO: 130674 - DNA, 22 bp, synthetic construct
  misc_feature 1..22: note = chemically synthesized
  source 1..22: mol_type = other DNA
caacttagttgaaatcaactca

SEQ ID NO: 130675 - DNA, 22 bp, synthetic construct
  misc_feature 1..22: note = chemically synthesized
  source 1..22: mol_type = other DNA
aacttagttgaaatcaactcag

SEQ ID NO: 130676 - DNA, 22 bp, synthetic construct
  misc_feature 1..22: note = chemically synthesized
  source 1..22: mol_type = other DNA
agttgaaatcaactcagttttt

SEQ ID NO: 130677 - DNA, 22 bp, synthetic construct
  misc_feature 1..22: note = chemically synthesized
  source 1..22: mol_type = other DNA
gttgaaatcaactcagtttttg

SEQ ID NO: 130678 - DNA, 22 bp, synthetic construct
  misc_feature 1..22: note = chemically synthesized
  source 1..22: mol_type = other DNA
aaatcaactcagtttttgttta

SEQ ID NO: 130679 - DNA, 22 bp, synthetic construct
  misc_feature 1..22: note = chemically synthesized
  source 1..22: mol_type = other DNA
agtttttgtttatccagaaagg

SEQ ID NO: 130680 - DNA, 22 bp, synthetic construct
  misc_feature 1..22: note = chemically synthesized
  source 1..22: mol_type = other DNA
ttgtttatccagaaagggctta

SEQ ID NO: 130681 - DNA, 22 bp, synthetic construct
  misc_feature 1..22: note = chemically synthesized
  source 1..22: mol_type = other DNA
tgtttatccagaaagggcttat

SEQ ID NO: 130682 - DNA, 22 bp, synthetic construct
  misc_feature 1..22: note = chemically synthesized
  source 1..22: mol_type = other DNA
gtttatccagaaagggcttatt

SEQ ID NO: 130683 - DNA, 22 bp, synthetic construct
  misc_feature 1..22: note = chemically synthesized
  source 1..22: mol_type = other DNA
tttatccagaaagggcttattt

SEQ ID NO: 130684 - DNA, 22 bp, synthetic construct
  misc_feature 1..22: note = chemically synthesized
  source 1..22: mol_type = other DNA
atccagaaagggcttattttac

SEQ ID NO: 130685 - DNA, 22 bp, synthetic construct
  misc_feature 1..22: note = chemically synthesized
  source 1..22: mol_type = other DNA
tccagaaagggcttattttacg

SEQ ID NO: 130686 - DNA, 22 bp, synthetic construct
  misc_feature 1..22: note = chemically synthesized
  source 1..22: mol_type = other DNA
attttacgtttattttttattg

SEQ ID NO: 130687 - DNA, 22 bp, synthetic construct
  misc_feature 1..22: note = chemically synthesized
  source 1..22: mol_type = other DNA
ttttacgtttattttttattga

SEQ ID NO: 130688 - DNA, 22 bp, synthetic construct
  misc_feature 1..22: note = chemically synthesized
  source 1..22: mol_type = other DNA
tacgtttattttttattgataa

SEQ ID NO: 130689 - DNA, 22 bp, synthetic construct
  misc_feature 1..22: note = chemically synthesized
  source 1..22: mol_type = other DNA
acgtttattttttattgataac

SEQ ID NO: 130690 - DNA, 22 bp, synthetic construct
  misc_feature 1..22: note = chemically synthesized
  source 1..22: mol_type = other DNA
cgtttattttttattgataact

SEQ ID NO: 130691 - DNA, 22 bp, synthetic construct
  misc_feature 1..22: note = chemically synthesized
  source 1..22: mol_type = other DNA
attttttattgataactttcct

SEQ ID NO: 130692 - DNA, 22 bp, synthetic construct
  misc_feature 1..22: note = chemically synthesized
  source 1..22: mol_type = other DNA
ttttttattgataactttcctg

SEQ ID NO: 130693 - DNA, 22 bp, synthetic construct
  misc_feature 1..22: note = chemically synthesized
  source 1..22: mol_type = other DNA
tttattgataactttcctgttc

SEQ ID NO: 130694 - DNA, 22 bp, synthetic construct
  misc_feature 1..22: note = chemically synthesized
  source 1..22: mol_type = other DNA
ttattgataactttcctgttca

SEQ ID NO: 130695 - DNA, 22 bp, synthetic construct
  misc_feature 1..22: note = chemically synthesized
  source 1..22: mol_type = other DNA
tattgataactttcctgttcag

SEQ ID NO: 130696 - DNA, 22 bp, synthetic construct
  misc_feature 1..22: note = chemically synthesized
  source 1..22: mol_type = other DNA
attgataactttcctgttcaga

SEQ ID NO: 130697 - DNA, 22 bp, synthetic construct
  misc_feature 1..22: note = chemically synthesized
  source 1..22: mol_type = other DNA
ttgataactttcctgttcagag

SEQ ID NO: 130698 - DNA, 22 bp, synthetic construct
  misc_feature 1..22: note = chemically synthesized
  source 1..22: mol_type = other DNA
ataactttcctgttcagaggat

SEQ ID NO: 130699 - DNA, 22 bp, synthetic construct
  misc_feature 1..22: note = chemically synthesized
  source 1..22: mol_type = other DNA
tcctgttcagaggattttttgt

SEQ ID NO: 130700 - DNA, 22 bp, synthetic construct
  misc_feature 1..22: note = chemically synthesized
  source 1..22: mol_type = other DNA
cctgttcagaggattttttgtt

SEQ ID NO: 130701 - DNA, 22 bp, synthetic construct
  misc_feature 1..22: note = chemically synthesized
  source 1..22: mol_type = other DNA
ctgttcagaggattttttgttg

SEQ ID NO: 130702 - DNA, 22 bp, synthetic construct
  misc_feature 1..22: note = chemically synthesized
  source 1..22: mol_type = other DNA
ttcagaggattttttgttgata

SEQ ID NO: 130703 - DNA, 22 bp, synthetic construct
  misc_feature 1..22: note = chemically synthesized
  source 1..22: mol_type = other DNA
agaggattttttgttgatagtt

SEQ ID NO: 130704 - DNA, 22 bp, synthetic construct
  misc_feature 1..22: note = chemically synthesized
  source 1..22: mol_type = other DNA
tttgttgatagtttttctctga

SEQ ID NO: 130705 - DNA, 22 bp, synthetic construct
  misc_feature 1..22: note = chemically synthesized
  source 1..22: mol_type = other DNA
ttgttgatagtttttctctgaa

SEQ ID NO: 130706 - DNA, 22 bp, synthetic construct
  misc_feature 1..22: note = chemically synthesized
  source 1..22: mol_type = other DNA
tgttgatagtttttctctgaag

SEQ ID NO: 130707 - DNA, 22 bp, synthetic construct
  misc_feature 1..22: note = chemically synthesized
  source 1..22: mol_type = other DNA
gttgatagtttttctctgaaga

SEQ ID NO: 130708 - DNA, 22 bp, synthetic construct
  misc_feature 1..22: note = chemically synthesized
  source 1..22: mol_type = other DNA
ttgatagtttttctctgaagag

SEQ ID NO: 130709 - DNA, 22 bp, synthetic construct
  misc_feature 1..22: note = chemically synthesized
  source 1..22: mol_type = other DNA
atagtttttctctgaagagtag

SEQ ID NO: 130710 - DNA, 22 bp, synthetic construct
  misc_feature 1..22: note = chemically synthesized
  source 1..22: mol_type = other DNA
ttctctgaagagtagacaaaaa

SEQ ID NO: 130711 - DNA, 22 bp, synthetic construct
  misc_feature 1..22: note = chemically synthesized
  source 1..22: mol_type = other DNA
tctctgaagagtagacaaaaaa

SEQ ID NO: 130712 - DNA, 22 bp, synthetic construct
  misc_feature 1..22: note = chemically synthesized
  source 1..22: mol_type = other DNA
ctctgaagagtagacaaaaaat

SEQ ID NO: 130713 - DNA, 22 bp, synthetic construct
  misc_feature 1..22: note = chemically synthesized
  source 1..22: mol_type = other DNA
tctgaagagtagacaaaaaatt

SEQ ID NO: 130714 - DNA, 22 bp, synthetic construct
  misc_feature 1..22: note = chemically synthesized
  source 1..22: mol_type = other DNA
tgaagagtagacaaaaaattct

SEQ ID NO: 130715 - DNA, 22 bp, synthetic construct
  misc_feature 1..22: note = chemically synthesized
  source 1..22: mol_type = other DNA
aagagtagacaaaaaattctga

SEQ ID NO: 130716 - DNA, 22 bp, synthetic construct
  misc_feature 1..22: note = chemically synthesized
  source 1..22: mol_type = other DNA
tgaatcgagttgaaaggcttag

SEQ ID NO: 130717 - DNA, 22 bp, synthetic construct
  misc_feature 1..22: note = chemically synthesized
  source 1..22: mol_type = other DNA
aatcgagttgaaaggcttagaa

SEQ ID NO: 130718 - DNA, 22 bp, synthetic construct
  misc_feature 1..22: note = chemically synthesized
  source 1..22: mol_type = other DNA
aaaggcttagaaaagggcagcc

SEQ ID NO: 130719 - DNA, 22 bp, synthetic construct
  misc_feature 1..22: note = chemically synthesized
  source 1..22: mol_type = other DNA
agaaaagggcagccaaattaag

SEQ ID NO: 130720 - DNA, 22 bp, synthetic construct
  misc_feature 1..22: note = chemically synthesized
  source 1..22: mol_type = other DNA
gaaaagggcagccaaattaaga

SEQ ID NO: 130721 - DNA, 22 bp, synthetic construct
  misc_feature 1..22: note = chemically synthesized
  source 1..22: mol_type = other DNA
agatctaagaaagcaaattgga

SEQ ID NO: 130722 - DNA, 22 bp, synthetic construct
  misc_feature 1..22: note = chemically synthesized
  source 1..22: mol_type = other DNA
agaaagcaaattggattgaaaa

SEQ ID NO: 130723 - DNA, 22 bp, synthetic construct
  misc_feature 1..22: note = chemically synthesized
  source 1..22: mol_type = other DNA
gattgaaaatgaaatcatattg

SEQ ID NO: 130724 - DNA, 22 bp, synthetic construct
  misc_feature 1..22: note = chemically synthesized
  source 1..22: mol_type = other DNA
aaaatgaaatcatattgatggc

SEQ ID NO: 130725 - DNA, 22 bp, synthetic construct
  misc_feature 1..22: note = chemically synthesized
  source 1..22: mol_type = other DNA
atggcagatgataatatattgg

SEQ ID NO: 130726 - DNA, 22 bp, synthetic construct
  misc_feature 1..22: note = chemically synthesized
  source 1..22: mol_type = other DNA
gactgggttggagaaggcagga

SEQ ID NO: 130727 - DNA, 22 bp, synthetic construct
  misc_feature 1..22: note = chemically synthesized
  source 1..22: mol_type = other DNA
ggttggagaaggcaggaggaat

SEQ ID NO: 130728 - DNA, 22 bp, synthetic construct
  misc_feature 1..22: note = chemically synthesized
  source 1..22: mol_type = other DNA
gagaaggcaggaggaatttaac

SEQ ID NO: 130729 - DNA, 22 bp, synthetic construct
  misc_feature 1..22: note = chemically synthesized
  source 1..22: mol_type = other DNA
aacttgtggacaatagaaatct

SEQ ID NO: 130730 - DNA, 22 bp, synthetic construct
  misc_feature 1..22: note = chemically synthesized
  source 1..22: mol_type = other DNA
acttgtggacaatagaaatctg

SEQ ID NO: 130731 - DNA, 22 bp, synthetic construct
  misc_feature 1..22: note = chemically synthesized
  source 1..22: mol_type = other DNA
gtggacaatagaaatctgagag

SEQ ID NO: 130732 - DNA, 22 bp, synthetic construct
  misc_feature 1..22: note = chemically synthesized
  source 1..22: mol_type = other DNA
tggacaatagaaatctgagagt

SEQ ID NO: 130733 - DNA, 22 bp, synthetic construct
  misc_feature 1..22: note = chemically synthesized
  source 1..22: mol_type = other DNA
agagttgggtagtcccaactgt

SEQ ID NO: 130734 - DNA, 22 bp, synthetic construct
  misc_feature 1..22: note = chemically synthesized
  source 1..22: mol_type = other DNA
ggtagtcccaactgtcaggccc

SEQ ID NO: 130735 - DNA, 22 bp, synthetic construct
  misc_feature 1..22: note = chemically synthesized
  source 1..22: mol_type = other DNA
tcaggccctcaggactggggcc

SEQ ID NO: 130736 - DNA, 22 bp, synthetic construct
  misc_feature 1..22: note = chemically synthesized
  source 1..22: mol_type = other DNA
aggactggggccaaatggagga

SEQ ID NO: 130737 - DNA, 22 bp, synthetic construct
  misc_feature 1..22: note = chemically synthesized
  source 1..22: mol_type = other DNA
gggccaaatggaggactcactt

SEQ ID NO: 130738 - DNA, 22 bp, synthetic construct
  misc_feature 1..22: note = chemically synthesized
  source 1..22: mol_type = other DNA
acttttttgaagattaaagaca

SEQ ID NO: 130739 - DNA, 22 bp, synthetic construct
  misc_feature 1..22: note = chemically synthesized
  source 1..22: mol_type = other DNA
ttttgaagattaaagacaatgc

SEQ ID NO: 130740 - DNA, 22 bp, synthetic construct
  misc_feature 1..22: note = chemically synthesized
  source 1..22: mol_type = other DNA
tttgaagattaaagacaatgcg

SEQ ID NO: 130741 - DNA, 22 bp, synthetic construct
  misc_feature 1..22: note = chemically synthesized
  source 1..22: mol_type = other DNA
ttgaagattaaagacaatgcgt

SEQ ID NO: 130742 - DNA, 22 bp, synthetic construct
  misc_feature 1..22: note = chemically synthesized
  source 1..22: mol_type = other DNA
tgaagattaaagacaatgcgtg

SEQ ID NO: 130743 - DNA, 22 bp, synthetic construct
  misc_feature 1..22: note = chemically synthesized
  source 1..22: mol_type = other DNA
gaagattaaagacaatgcgtga

SEQ ID NO: 130744 - DNA, 22 bp, synthetic construct
  misc_feature 1..22: note = chemically synthesized
  source 1..22: mol_type = other DNA
aagattaaagacaatgcgtgag

SEQ ID NO: 130745 - DNA, 22 bp, synthetic construct
  misc_feature 1..22: note = chemically synthesized
  source 1..22: mol_type = other DNA
aagacaatgcgtgagagcacgg

SEQ ID NO: 130746 - DNA, 22 bp, synthetic construct
  misc_feature 1..22: note = chemically synthesized
  source 1..22: mol_type = other DNA
tgaacctaaacaggctgagctt

SEQ ID NO: 130747 - DNA, 22 bp, synthetic construct
  misc_feature 1..22: note = chemically synthesized
  source 1..22: mol_type = other DNA
aacctaaacaggctgagcttct

SEQ ID NO: 130748 - DNA, 22 bp, synthetic construct
  misc_feature 1..22: note = chemically synthesized
  source 1..22: mol_type = other DNA
aacaggctgagcttctgcactc

SEQ ID NO: 130749 - DNA, 22 bp, synthetic construct
  misc_feature 1..22: note = chemically synthesized
  source 1..22: mol_type = other DNA
agcttctgcactctgctaagat

SEQ ID NO: 130750 - DNA, 22 bp, synthetic construct
  misc_feature 1..22: note = chemically synthesized
  source 1..22: mol_type = other DNA
ctgcactctgctaagatcctga

SEQ ID NO: 130751 - DNA, 22 bp, synthetic construct
  misc_feature 1..22: note = chemically synthesized
  source 1..22: mol_type = other DNA
tgcactctgctaagatcctgaa

SEQ ID NO: 130752 - DNA, 22 bp, synthetic construct
  misc_feature 1..22: note = chemically synthesized
  source 1..22: mol_type = other DNA
cactctgctaagatcctgaaat

SEQ ID NO: 130753 - DNA, 22 bp, synthetic construct
  misc_feature 1..22: note = chemically synthesized
  source 1..22: mol_type = other DNA
tgctaagatcctgaaatttata

SEQ ID NO: 130754 - DNA, 22 bp, synthetic construct
  misc_feature 1..22: note = chemically synthesized
  source 1..22: mol_type = other DNA
ctaagatcctgaaatttataga

SEQ ID NO: 130755 - DNA, 22 bp, synthetic construct
  misc_feature 1..22: note = chemically synthesized
  source 1..22: mol_type = other DNA
agatcctgaaatttatagaaag

SEQ ID NO: 130756 - DNA, 22 bp, synthetic construct
  misc_feature 1..22: note = chemically synthesized
  source 1..22: mol_type = other DNA
aaatttatagaaagaaaagtca

SEQ ID NO: 130757 - DNA, 22 bp, synthetic construct
  misc_feature 1..22: note = chemically synthesized
  source 1..22: mol_type = other DNA
atagaaagaaaagtcaccattt

SEQ ID NO: 130758 - DNA, 22 bp, synthetic construct
  misc_feature 1..22: note = chemically synthesized
  source 1..22: mol_type = other DNA
tagaaagaaaagtcaccatttt

SEQ ID NO: 130759 - DNA, 22 bp, synthetic construct
  misc_feature 1..22: note = chemically synthesized
  source 1..22: mol_type = other DNA
taacatataacaatttaattta

SEQ ID NO: 130760 - DNA, 22 bp, synthetic construct
  misc_feature 1..22: note = chemically synthesized
  source 1..22: mol_type = other DNA
aacatataacaatttaatttat

SEQ ID NO: 130761 - DNA, 22 bp, synthetic construct
  misc_feature 1..22: note = chemically synthesized
  source 1..22: mol_type = other DNA
acatataacaatttaatttata

SEQ ID NO: 130762 - DNA, 22 bp, synthetic construct
  misc_feature 1..22: note = chemically synthesized
  source 1..22: mol_type = other DNA
aatttataagatccaaacaaca

SEQ ID NO: 130763 - DNA, 22 bp, synthetic construct
  misc_feature 1..22: note = chemically synthesized
  source 1..22: mol_type = other DNA
atttataagatccaaacaacac

SEQ ID NO: 130764 - DNA, 22 bp, synthetic construct
  misc_feature 1..22: note = chemically synthesized
  source 1..22: mol_type = other DNA
ataagatccaaacaacacccct

SEQ ID NO: 130765 - DNA, 22 bp, synthetic construct
  misc_feature 1..22: note = chemically synthesized
  source 1..22: mol_type = other DNA
taagatccaaacaacacccctt

SEQ ID NO: 130766 - DNA, 22 bp, synthetic construct
  misc_feature 1..22: note = chemically synthesized
  source 1..22: mol_type = other DNA
gaaacacacacatgcatgtgtg

SEQ ID NO: 130767 - DNA, 22 bp, synthetic construct
  misc_feature 1..22: note = chemically synthesized
  source 1..22: mol_type = other DNA
aaacacacacatgcatgtgtgt

SEQ ID NO: 130768 - DNA, 22 bp, synthetic construct
  misc_feature 1..22: note = chemically synthesized
  source 1..22: mol_type = other DNA
tgtgtttgtttgaagaactgct

SEQ ID NO: 130769 - DNA, 22 bp, synthetic construct
  misc_feature 1..22: note = chemically synthesized
  source 1..22: mol_type = other DNA
gtttgaagaactgctctaagag

SEQ ID NO: 130770 - DNA, 22 bp, synthetic construct
  misc_feature 1..22: note = chemically synthesized
  source 1..22: mol_type = other DNA
tttgaagaactgctctaagaga

SEQ ID NO: 130771 - DNA, 22 bp, synthetic construct
  misc_feature 1..22: note = chemically synthesized
  source 1..22: mol_type = other DNA
gaagaactgctctaagagatgg

SEQ ID NO: 130772 - DNA, 22 bp, synthetic construct
  misc_feature 1..22: note = chemically synthesized
  source 1..22: mol_type = other DNA
aagaactgctctaagagatggc

SEQ ID NO: 130773 - DNA, 22 bp, synthetic construct
  misc_feature 1..22: note = chemically synthesized
  source 1..22: mol_type = other DNA
ctctaagagatggcatgagtag

SEQ ID NO: 130774 - DNA, 22 bp, synthetic construct
  misc_feature 1..22: note = chemically synthesized
  source 1..22: mol_type = other DNA
taagagatggcatgagtagtca

SEQ ID NO: 130775 - DNA, 22 bp, synthetic construct
  misc_feature 1..22: note = chemically synthesized
  source 1..22: mol_type = other DNA
agagatggcatgagtagtcagt

SEQ ID NO: 130776 - DNA, 22 bp, synthetic construct
  misc_feature 1..22: note = chemically synthesized
  source 1..22: mol_type = other DNA
actagaaaaattctagagacag

SEQ ID NO: 130777 - DNA, 22 bp, synthetic construct
  misc_feature 1..22: note = chemically synthesized
  source 1..22: mol_type = other DNA
gaaaaattctagagacagggcc

SEQ ID NO: 130778 - DNA, 22 bp, synthetic construct
  misc_feature 1..22: note = chemically synthesized
  source 1..22: mol_type = other DNA
tagagacagggcccatctcctt

SEQ ID NO: 130779 - DNA, 22 bp, synthetic construct
  misc_feature 1..22: note = chemically synthesized
  source 1..22: mol_type = other DNA
gagacagggcccatctccttag

SEQ ID NO: 130780 - DNA, 22 bp, synthetic construct
  misc_feature 1..22: note = chemically synthesized
  source 1..22: mol_type = other DNA
cttaggaaggtgcggggacaca

SEQ ID NO: 130781 - DNA, 22 bp, synthetic construct
  misc_feature 1..22: note = chemically synthesized
  source 1..22: mol_type = other DNA
aggaaggtgcggggacacatct

SEQ ID NO: 130782 - DNA, 22 bp, synthetic construct
  misc_feature 1..22: note = chemically synthesized
  source 1..22: mol_type = other DNA
ggaaggtgcggggacacatctt

SEQ ID NO: 130783 - DNA, 22 bp, synthetic construct
  misc_feature 1..22: note = chemically synthesized
  source 1..22: mol_type = other DNA
ccatccaactcagaaggagggc

SEQ ID NO: 130784 - DNA, 22 bp, synthetic construct
  misc_feature 1..22: note = chemically synthesized
  source 1..22: mol_type = other DNA
catccaactcagaaggagggca

SEQ ID NO: 130785 - DNA, 22 bp, synthetic construct
  misc_feature 1..22: note = chemically synthesized
  source 1..22: mol_type = other DNA
agaaggagggcagagtaggaaa

SEQ ID NO: 130786 - DNA, 22 bp, synthetic construct
  misc_feature 1..22: note = chemically synthesized
  source 1..22: mol_type = other DNA
tttcctctttcacttgtttatg

SEQ ID NO: 130787 - DNA, 22 bp, synthetic construct
  misc_feature 1..22: note = chemically synthesized
  source 1..22: mol_type = other DNA
ttcctctttcacttgtttatgt

SEQ ID NO: 130788 - DNA, 22 bp, synthetic construct
  misc_feature 1..22: note = chemically synthesized
  source 1..22: mol_type = other DNA
tcctctttcacttgtttatgta

SEQ ID NO: 130789 - DNA, 22 bp, synthetic construct
  misc_feature 1..22: note = chemically synthesized
  source 1..22: mol_type = other DNA
cctctttcacttgtttatgtag

SEQ ID NO: 130790 - DNA, 22 bp, synthetic construct
  misc_feature 1..22: note = chemically synthesized
  source 1..22: mol_type = other DNA
ctctttcacttgtttatgtaga

SEQ ID NO: 130791 - DNA, 22 bp, synthetic construct
  misc_feature 1..22: note = chemically synthesized
  source 1..22: mol_type = other DNA
tttcacttgtttatgtagactg

SEQ ID NO: 130792 - DNA, 22 bp, synthetic construct
  misc_feature 1..22: note = chemically synthesized
  source 1..22: mol_type = other DNA
tcacttgtttatgtagactgta

SEQ ID NO: 130793 - DNA, 22 bp, synthetic construct
  misc_feature 1..22: note = chemically synthesized
  source 1..22: mol_type = other DNA
cacttgtttatgtagactgtat

SEQ ID NO: 130794 - DNA, 22 bp, synthetic construct
  misc_feature 1..22: note = chemically synthesized
  source 1..22: mol_type = other DNA
acttgtttatgtagactgtata

SEQ ID NO: 130795 - DNA, 22 bp, synthetic construct
  misc_feature 1..22: note = chemically synthesized
  source 1..22: mol_type = other DNA
gtttatgtagactgtataatag

SEQ ID NO: 130796 - DNA, 22 bp, synthetic construct
  misc_feature 1..22: note = chemically synthesized
  source 1..22: mol_type = other DNA
tttatgtagactgtataataga

SEQ ID NO: 130797 - DNA, 22 bp, synthetic construct
  misc_feature 1..22: note = chemically synthesized
  source 1..22: mol_type = other DNA
atgtagactgtataatagattc

SEQ ID NO: 130798 - DNA, 22 bp, synthetic construct
  misc_feature 1..22: note = chemically synthesized
  source 1..22: mol_type = other DNA
tgtagactgtataatagattca

SEQ ID NO: 130799 - DNA, 22 bp, synthetic construct
  misc_feature 1..22: note = chemically synthesized
  source 1..22: mol_type = other DNA
tataatagattcactatttact

SEQ ID NO: 130800 - DNA, 22 bp, synthetic construct
  misc_feature 1..22: note = chemically synthesized
  source 1..22: mol_type = other DNA
actatttactacattttcttga

SEQ ID NO: 130801 - DNA, 22 bp, synthetic construct
  misc_feature 1..22: note = chemically synthesized
  source 1..22: mol_type = other DNA
tttactacattttcttgaggct

SEQ ID NO: 130802 - DNA, 22 bp, synthetic construct
  misc_feature 1..22: note = chemically synthesized
  source 1..22: mol_type = other DNA
actacattttcttgaggctaac

SEQ ID NO: 130803 - DNA, 22 bp, synthetic construct
  misc_feature 1..22: note = chemically synthesized
  source 1..22: mol_type = other DNA
ctacattttcttgaggctaaca

SEQ ID NO: 130804 - DNA, 22 bp, synthetic construct
  misc_feature 1..22: note = chemically synthesized
  source 1..22: mol_type = other DNA
cattttcttgaggctaacagat

SEQ ID NO: 130805 - DNA, 22 bp, synthetic construct
  misc_feature 1..22: note = chemically synthesized
  source 1..22: mol_type = other DNA
tcttgaggctaacagatctttc

SEQ ID NO: 130806 - DNA, 22 bp, synthetic construct
  misc_feature 1..22: note = chemically synthesized
  source 1..22: mol_type = other DNA
cttgaggctaacagatctttcc

SEQ ID NO: 130807 - DNA, 22 bp, synthetic construct
  misc_feature 1..22: note = chemically synthesized
  source 1..22: mol_type = other DNA
ttgaggctaacagatctttcct

SEQ ID NO: 130808 - DNA, 22 bp, synthetic construct
  misc_feature 1..22: note = chemically synthesized
  source 1..22: mol_type = other DNA
gaggctaacagatctttcctgt

SEQ ID NO: 130809 - DNA, 22 bp, synthetic construct
  misc_feature 1..22: note = chemically synthesized
  source 1..22: mol_type = other DNA
aggctaacagatctttcctgtc

SEQ ID NO: 130810 - DNA, 22 bp, synthetic construct
  misc_feature 1..22: note = chemically synthesized
  source 1..22: mol_type = other DNA
acagatctttcctgtctgttcc

SEQ ID NO: 130811 - DNA, 22 bp, synthetic construct
  misc_feature 1..22: note = chemically synthesized
  source 1..22: mol_type = other DNA
tcctgtctgttccttcttcata

SEQ ID NO: 130812 - DNA, 22 bp, synthetic construct
  misc_feature 1..22: note = chemically synthesized
  source 1..22: mol_type = other DNA
cctgtctgttccttcttcatac

SEQ ID NO: 130813 - DNA, 22 bp, synthetic construct
  misc_feature 1..22: note = chemically synthesized
  source 1..22: mol_type = other DNA
ctgtctgttccttcttcatact

SEQ ID NO: 130814 - DNA, 22 bp, synthetic construct
  misc_feature 1..22: note = chemically synthesized
  source 1..22: mol_type = other DNA
tctgttccttcttcatactaca

SEQ ID NO: 130815 - DNA, 22 bp, synthetic construct
  misc_feature 1..22: note = chemically synthesized
  source 1..22: mol_type = other DNA
ttccttcttcatactacaaagt

SEQ ID NO: 130816 - DNA, 22 bp, synthetic construct
  misc_feature 1..22: note = chemically synthesized
  source 1..22: mol_type = other DNA
cttcttcatactacaaagttcc

SEQ ID NO: 130817 - DNA, 22 bp, synthetic construct
  misc_feature 1..22: note = chemically synthesized
  source 1..22: mol_type = other DNA
cttcatactacaaagttccctc

SEQ ID NO: 130818 - DNA, 22 bp, synthetic construct
  misc_feature 1..22: note = chemically synthesized
  source 1..22: mol_type = other DNA
ttcatactacaaagttccctct

SEQ ID NO: 130819 - DNA, 22 bp, synthetic construct
  misc_feature 1..22: note = chemically synthesized
  source 1..22: mol_type = other DNA
catactacaaagttccctctgt

SEQ ID NO: 130820 - DNA, 22 bp, synthetic construct
  misc_feature 1..22: note = chemically synthesized
  source 1..22: mol_type = other DNA
atactacaaagttccctctgtc

SEQ ID NO: 130821 - DNA, 22 bp, synthetic construct
  misc_feature 1..22: note = chemically synthesized
  source 1..22: mol_type = other DNA
caaagttccctctgtctccttt

SEQ ID NO: 130822 - DNA, 22 bp, synthetic construct
  misc_feature 1..22: note = chemically synthesized
  source 1..22: mol_type = other DNA
cctctgtctcctttactccctt

SEQ ID NO: 130823 - DNA, 22 bp, synthetic construct
  misc_feature 1..22: note = chemically synthesized
  source 1..22: mol_type = other DNA
tgtctcctttactcccttgtat

SEQ ID NO: 130824 - DNA, 22 bp, synthetic construct
  misc_feature 1..22: note = chemically synthesized
  source 1..22: mol_type = other DNA
tctcctttactcccttgtatct

SEQ ID NO: 130825 - DNA, 22 bp, synthetic construct
  misc_feature 1..22: note = chemically synthesized
  source 1..22: mol_type = other DNA
ctttactcccttgtatctggta

SEQ ID NO: 130826 - DNA, 22 bp, synthetic construct
  misc_feature 1..22: note = chemically synthesized
  source 1..22: mol_type = other DNA
tactcccttgtatctggtaaca

SEQ ID NO: 130827 - DNA, 22 bp, synthetic construct
  misc_feature 1..22: note = chemically synthesized
  source 1..22: mol_type = other DNA
actcccttgtatctggtaacat

SEQ ID NO: 130828 - DNA, 22 bp, synthetic construct
  misc_feature 1..22: note = chemically synthesized
  source 1..22: mol_type = other DNA
ctcccttgtatctggtaacatt

SEQ ID NO: 130829 - DNA, 22 bp, synthetic construct
  misc_feature 1..22: note = chemically synthesized
  source 1..22: mol_type = other DNA
ccttgtatctggtaacattcaa

SEQ ID NO: 130830 - DNA, 22 bp, synthetic construct
  misc_feature 1..22: note = chemically synthesized
  source 1..22: mol_type = other DNA
gtatctggtaacattcaaatta

SEQ ID NO: 130831 - DNA, 22 bp, synthetic construct
  misc_feature 1..22: note = chemically synthesized
  source 1..22: mol_type = other DNA
tatctggtaacattcaaattat

SEQ ID NO: 130832 - DNA, 22 bp, synthetic construct
  misc_feature 1..22: note = chemically synthesized
  source 1..22: mol_type = other DNA
gtaacattcaaattatgttctc

SEQ ID NO: 130833 - DNA, 22 bp, synthetic construct
  misc_feature 1..22: note = chemically synthesized
  source 1..22: mol_type = other DNA
aaattatgttctcaaagtgagc

SEQ ID NO: 130834 - DNA, 22 bp, synthetic construct
  misc_feature 1..22: note = chemically synthesized
  source 1..22: mol_type = other DNA
tgttctcaaagtgagcatgaca

SEQ ID NO: 130835 - DNA, 22 bp, synthetic construct
  misc_feature 1..22: note = chemically synthesized
  source 1..22: mol_type = other DNA
tcaaagtgagcatgacaacttt

SEQ ID NO: 130836 - DNA, 22 bp, synthetic construct
  misc_feature 1..22: note = chemically synthesized
  source 1..22: mol_type = other DNA
aaagtgagcatgacaacttttt

SEQ ID NO: 130837 - DNA, 22 bp, synthetic construct
  misc_feature 1..22: note = chemically synthesized
  source 1..22: mol_type = other DNA
ttttccatggacctgtatgtat

SEQ ID NO: 130838 - DNA, 22 bp, synthetic construct
  misc_feature 1..22: note = chemically synthesized
  source 1..22: mol_type = other DNA
tttccatggacctgtatgtatt

SEQ ID NO: 130839 - DNA, 22 bp, synthetic construct
  misc_feature 1..22: note = chemically synthesized
  source 1..22: mol_type = other DNA
ttccatggacctgtatgtattt

SEQ ID NO: 130840 - DNA, 22 bp, synthetic construct
  misc_feature 1..22: note = chemically synthesized
  source 1..22: mol_type = other DNA
tccatggacctgtatgtattta

SEQ ID NO: 130841 - DNA, 22 bp, synthetic construct
  misc_feature 1..22: note = chemically synthesized
  source 1..22: mol_type = other DNA
ccatggacctgtatgtatttat

SEQ ID NO: 130842 - DNA, 22 bp, synthetic construct
  misc_feature 1..22: note = chemically synthesized
  source 1..22: mol_type = other DNA
catggacctgtatgtatttatg

SEQ ID NO: 130843 - DNA, 22 bp, synthetic construct
  misc_feature 1..22: note = chemically synthesized
  source 1..22: mol_type = other DNA
tatgtatttatgcatcttggtg

SEQ ID NO: 130844 - DNA, 22 bp, synthetic construct
  misc_feature 1..22: note = chemically synthesized
  source 1..22: mol_type = other DNA
atgcatcttggtgagagtgttg

SEQ ID NO: 130845 - DNA, 22 bp, synthetic construct
  misc_feature 1..22: note = chemically synthesized
  source 1..22: mol_type = other DNA
tgcatcttggtgagagtgttgc

SEQ ID NO: 130846 - DNA, 22 bp, synthetic construct
  misc_feature 1..22: note = chemically synthesized
  source 1..22: mol_type = other DNA
ggtgagagtgttgctacaagta

SEQ ID NO: 130847 - DNA, 22 bp, synthetic construct
  misc_feature 1..22: note = chemically synthesized
  source 1..22: mol_type = other DNA
gtgagagtgttgctacaagtat

SEQ ID NO: 130848 - DNA, 22 bp, synthetic construct
  misc_feature 1..22: note = chemically synthesized
  source 1..22: mol_type = other DNA
ctacaagtataggaatcttatt

SEQ ID NO: 130849 - DNA, 22 bp, synthetic construct
  misc_feature 1..22: note = chemically synthesized
  source 1..22: mol_type = other DNA
caagtataggaatcttattcat

SEQ ID NO: 130850 - DNA, 22 bp, synthetic construct
  misc_feature 1..22: note = chemically synthesized
  source 1..22: mol_type = other DNA
attcatctagaaatatatcatc

SEQ ID NO: 130851 - DNA, 22 bp, synthetic construct
  misc_feature 1..22: note = chemically synthesized
  source 1..22: mol_type = other DNA
ttcatctagaaatatatcatca

SEQ ID NO: 130852 - DNA, 22 bp, synthetic construct
  misc_feature 1..22: note = chemically synthesized
  source 1..22: mol_type = other DNA
atctagaaatatatcatcatgt

SEQ ID NO: 130853 - DNA, 22 bp, synthetic construct
  misc_feature 1..22: note = chemically synthesized
  source 1..22: mol_type = other DNA
gaaatatatcatcatgtgaaat

SEQ ID NO: 130854 - DNA, 22 bp, synthetic construct
  misc_feature 1..22: note = chemically synthesized
  source 1..22: mol_type = other DNA
aggtcaatagaacatctagaat

SEQ ID NO: 130855 - DNA, 22 bp, synthetic construct
  misc_feature 1..22: note = chemically synthesized
  source 1..22: mol_type = other DNA
gaatgaagctagaatgaagcag

SEQ ID NO: 130856 - DNA, 22 bp, synthetic construct
  misc_feature 1..22: note = chemically synthesized
  source 1..22: mol_type = other DNA
gaatgaagcagggcttagatct

SEQ ID NO: 130857 - DNA, 22 bp, synthetic construct
  misc_feature 1..22: note = chemically synthesized
  source 1..22: mol_type = other DNA
agatctatgatttttctcaagt

SEQ ID NO: 130858 - DNA, 22 bp, synthetic construct
  misc_feature 1..22: note = chemically synthesized
  source 1..22: mol_type = other DNA
gatctatgatttttctcaagtt

SEQ ID NO: 130859 - DNA, 22 bp, synthetic construct
  misc_feature 1..22: note = chemically synthesized
  source 1..22: mol_type = other DNA
tgatttttctcaagttttcagc

SEQ ID NO: 130860 - DNA, 22 bp, synthetic construct
  misc_feature 1..22: note = chemically synthesized
  source 1..22: mol_type = other DNA
ttctcaagttttcagcattatg

SEQ ID NO: 130861 - DNA, 22 bp, synthetic construct
  misc_feature 1..22: note = chemically synthesized
  source 1..22: mol_type = other DNA
tctcaagttttcagcattatgg

SEQ ID NO: 130862 - DNA, 22 bp, synthetic construct
  misc_feature 1..22: note = chemically synthesized
  source 1..22: mol_type = other DNA
ctcaagttttcagcattatgga

SEQ ID NO: 130863 - DNA, 22 bp, synthetic construct
  misc_feature 1..22: note = chemically synthesized
  source 1..22: mol_type = other DNA
tcaagttttcagcattatggat

SEQ ID NO: 130864 - DNA, 22 bp, synthetic construct
  misc_feature 1..22: note = chemically synthesized
  source 1..22: mol_type = other DNA
aagttttcagcattatggatcc

SEQ ID NO: 130865 - DNA, 22 bp, synthetic construct
  misc_feature 1..22: note = chemically synthesized
  source 1..22: mol_type = other DNA
tcagcattatggatcctgttga

SEQ ID NO: 130866 - DNA, 22 bp, synthetic construct
  misc_feature 1..22: note = chemically synthesized
  source 1..22: mol_type = other DNA
cagcattatggatcctgttgag

SEQ ID NO: 130867 - DNA, 22 bp, synthetic construct
  misc_feature 1..22: note = chemically synthesized
  source 1..22: mol_type = other DNA
agcattatggatcctgttgaga

SEQ ID NO: 130868 - DNA, 22 bp, synthetic construct
  misc_feature 1..22: note = chemically synthesized
  source 1..22: mol_type = other DNA
tggatcctgttgagacattcaa

SEQ ID NO: 130869 - DNA, 22 bp, synthetic construct
  misc_feature 1..22: note = chemically synthesized
  source 1..22: mol_type = other DNA
ttgagacattcaagggcaatat

SEQ ID NO: 130870 - DNA, 22 bp, synthetic construct
  misc_feature 1..22: note = chemically synthesized
  source 1..22: mol_type = other DNA
agacattcaagggcaatattct

SEQ ID NO: 130871 - DNA, 22 bp, synthetic construct
  misc_feature 1..22: note = chemically synthesized
  source 1..22: mol_type = other DNA
aagggcaatattctgcataaaa

SEQ ID NO: 130872 - DNA, 22 bp, synthetic construct
  misc_feature 1..22: note = chemically synthesized
  source 1..22: mol_type = other DNA
tgcataaaattgaagggagaat

SEQ ID NO: 130873 - DNA, 22 bp, synthetic construct
  misc_feature 1..22: note = chemically synthesized
  source 1..22: mol_type = other DNA
cataaaattgaagggagaatat

SEQ ID NO: 130874 - DNA, 22 bp, synthetic construct
  misc_feature 1..22: note = chemically synthesized
  source 1..22: mol_type = other DNA
aagggagaatattaagcactat

SEQ ID NO: 130875 - DNA, 22 bp, synthetic construct
  misc_feature 1..22: note = chemically synthesized
  source 1..22: mol_type = other DNA
agcactattataaactcatagg

SEQ ID NO: 130876 - DNA, 22 bp, synthetic construct
  misc_feature 1..22: note = chemically synthesized
  source 1..22: mol_type = other DNA
ttataaactcataggccatatt

SEQ ID NO: 130877 - DNA, 22 bp, synthetic construct
  misc_feature 1..22: note = chemically synthesized
  source 1..22: mol_type = other DNA
taaactcataggccatattgag

SEQ ID NO: 130878 - DNA, 22 bp, synthetic construct
  misc_feature 1..22: note = chemically synthesized
  source 1..22: mol_type = other DNA
ataggccatattgagagcttct

SEQ ID NO: 130879 - DNA, 22 bp, synthetic construct
  misc_feature 1..22: note = chemically synthesized
  source 1..22: mol_type = other DNA
agagcttcttaagagcagactg

SEQ ID NO: 130880 - DNA, 22 bp, synthetic construct
  misc_feature 1..22: note = chemically synthesized
  source 1..22: mol_type = other DNA
cttaagagcagactgtgcttat

SEQ ID NO: 130881 - DNA, 22 bp, synthetic construct
  misc_feature 1..22: note = chemically synthesized
  source 1..22: mol_type = other DNA
ttaagagcagactgtgcttatt

SEQ ID NO: 130882 - DNA, 22 bp, synthetic construct
  misc_feature 1..22: note = chemically synthesized
  source 1..22: mol_type = other DNA
aagagcagactgtgcttattac

SEQ ID NO: 130883 - DNA, 22 bp, synthetic construct
  misc_feature 1..22: note = chemically synthesized
  source 1..22: mol_type = other DNA
agagcagactgtgcttattaca

SEQ ID NO: 130884 - DNA, 22 bp, synthetic construct
  misc_feature 1..22: note = chemically synthesized
  source 1..22: mol_type = other DNA
tgcttattacatggttatttag

SEQ ID NO: 130885 - DNA, 22 bp, synthetic construct
  misc_feature 1..22: note = chemically synthesized
  source 1..22: mol_type = other DNA
attacatggttatttagaacta

SEQ ID NO: 130886 - DNA, 22 bp, synthetic construct
  misc_feature 1..22: note = chemically synthesized
  source 1..22: mol_type = other DNA
ttacatggttatttagaactaa

SEQ ID NO: 130887 - DNA, 22 bp, synthetic construct
  misc_feature 1..22: note = chemically synthesized
  source 1..22: mol_type = other DNA
catggttatttagaactaaaca

SEQ ID NO: 130888 - DNA, 22 bp, synthetic construct
  misc_feature 1..22: note = chemically synthesized
  source 1..22: mol_type = other DNA
tttagaactaaacacagtgcag

SEQ ID NO: 130889 - DNA, 22 bp, synthetic construct
  misc_feature 1..22: note = chemically synthesized
  source 1..22: mol_type = other DNA
agaactaaacacagtgcagttg

SEQ ID NO: 130890 - DNA, 22 bp, synthetic construct
  misc_feature 1..22: note = chemically synthesized
  source 1..22: mol_type = other DNA
gaactaaacacagtgcagttgt

SEQ ID NO: 130891 - DNA, 22 bp, synthetic construct
  misc_feature 1..22: note = chemically synthesized
  source 1..22: mol_type = other DNA
aacacagtgcagttgtgtggca

SEQ ID NO: 130892 - DNA, 22 bp, synthetic construct
  misc_feature 1..22: note = chemically synthesized
  source 1..22: mol_type = other DNA
tgtggcatgtgctcaccaattc

SEQ ID NO: 130893 - DNA, 22 bp, synthetic construct
  misc_feature 1..22: note = chemically synthesized
  source 1..22: mol_type = other DNA
accaattctgtgctgactcaaa

SEQ ID NO: 130894 - DNA, 22 bp, synthetic construct
  misc_feature 1..22: note = chemically synthesized
  source 1..22: mol_type = other DNA
tgtgctgactcaaaatagtcat

SEQ ID NO: 130895 - DNA, 22 bp, synthetic construct
  misc_feature 1..22: note = chemically synthesized
  source 1..22: mol_type = other DNA
tgctgactcaaaatagtcattt

SEQ ID NO: 130896 - DNA, 22 bp, synthetic construct
  misc_feature 1..22: note = chemically synthesized
  source 1..22: mol_type = other DNA
actcaaaatagtcattttccaa

SEQ ID NO: 130897 - DNA, 22 bp, synthetic construct
  misc_feature 1..22: note = chemically synthesized
  source 1..22: mol_type = other DNA
aaaatagtcattttccaacttg

SEQ ID NO: 130898 - DNA, 22 bp, synthetic construct
  misc_feature 1..22: note = chemically synthesized
  source 1..22: mol_type = other DNA
tccaacttgtcccagatggtat

SEQ ID NO: 130899 - DNA, 22 bp, synthetic construct
  misc_feature 1..22: note = chemically synthesized
  source 1..22: mol_type = other DNA
ccaacttgtcccagatggtatt

SEQ ID NO: 130900 - DNA, 22 bp, synthetic construct
  misc_feature 1..22: note = chemically synthesized
  source 1..22: mol_type = other DNA
caacttgtcccagatggtattg

SEQ ID NO: 130901 - DNA, 22 bp, synthetic construct
  misc_feature 1..22: note = chemically synthesized
  source 1..22: mol_type = other DNA
gtcccagatggtattggtgaat

SEQ ID NO: 130902 - DNA, 22 bp, synthetic construct
  misc_feature 1..22: note = chemically synthesized
  source 1..22: mol_type = other DNA
tcccagatggtattggtgaatg

SEQ ID NO: 130903 - DNA, 22 bp, synthetic construct
  misc_feature 1..22: note = chemically synthesized
  source 1..22: mol_type = other DNA
gtgaatggagctcctacaggtt

SEQ ID NO: 130904 - DNA, 22 bp, synthetic construct
  misc_feature 1..22: note = chemically synthesized
  source 1..22: mol_type = other DNA
ctacaggttgcttatatcttca

SEQ ID NO: 130905 - DNA, 22 bp, synthetic construct
  misc_feature 1..22: note = chemically synthesized
  source 1..22: mol_type = other DNA
caggttgcttatatcttcatat

SEQ ID NO: 130906 - DNA, 22 bp, synthetic construct
  misc_feature 1..22: note = chemically synthesized
  source 1..22: mol_type = other DNA
cttatatcttcatatatgatat

SEQ ID NO: 130907 - DNA, 22 bp, synthetic construct
  misc_feature 1..22: note = chemically synthesized
  source 1..22: mol_type = other DNA
atatcttcatatatgatatatc

SEQ ID NO: 130908 - DNA, 22 bp, synthetic construct
  misc_feature 1..22: note = chemically synthesized
  source 1..22: mol_type = other DNA
tatcttcatatatgatatatca

SEQ ID NO: 130909 - DNA, 22 bp, synthetic construct
  misc_feature 1..22: note = chemically synthesized
  source 1..22: mol_type = other DNA
catatatgatatatcagttcaa

SEQ ID NO: 130910 - DNA, 22 bp, synthetic construct
  misc_feature 1..22: note = chemically synthesized
  source 1..22: mol_type = other DNA
atatatgatatatcagttcaag

SEQ ID NO: 130911 - DNA, 22 bp, synthetic construct
  misc_feature 1..22: note = chemically synthesized
  source 1..22: mol_type = other DNA
aaggaaaaatcatcacacatca

SEQ ID NO: 130912 - DNA, 22 bp, synthetic construct
  misc_feature 1..22: note = chemically synthesized
  source 1..22: mol_type = other DNA
aggaaatcactaaacatttatg

SEQ ID NO: 130913 - DNA, 22 bp, synthetic construct
  misc_feature 1..22: note = chemically synthesized
  source 1..22: mol_type = other DNA
ggaaatcactaaacatttatgt

SEQ ID NO: 130914 - DNA, 22 bp, synthetic construct
  misc_feature 1..22: note = chemically synthesized
  source 1..22: mol_type = other DNA
aacatttatgttctgagttgag

SEQ ID NO: 130915 - DNA, 22 bp, synthetic construct
  misc_feature 1..22: note = chemically synthesized
  source 1..22: mol_type = other DNA
atgttctgagttgagagctgcc

SEQ ID NO: 130916 - DNA, 22 bp, synthetic construct
  misc_feature 1..22: note = chemically synthesized
  source 1..22: mol_type = other DNA
tgttctgagttgagagctgcct

SEQ ID NO: 130917 - DNA, 22 bp, synthetic construct
  misc_feature 1..22: note = chemically synthesized
  source 1..22: mol_type = other DNA
tgagttgagagctgcctatcaa

SEQ ID NO: 130918 - DNA, 22 bp, synthetic construct
  misc_feature 1..22: note = chemically synthesized
  source 1..22: mol_type = other DNA
agttgagagctgcctatcaatt

SEQ ID NO: 130919 - DNA, 22 bp, synthetic construct
  misc_feature 1..22: note = chemically synthesized
  source 1..22: mol_type = other DNA
agagctgcctatcaatttcaca

SEQ ID NO: 130920 - DNA, 22 bp, synthetic construct
  misc_feature 1..22: note = chemically synthesized
  source 1..22: mol_type = other DNA
cctatcaatttcacagccatag

SEQ ID NO: 130921 - DNA, 22 bp, synthetic construct
  misc_feature 1..22: note = chemically synthesized
  source 1..22: mol_type = other DNA
tcaatttcacagccatagctgc

SEQ ID NO: 130922 - DNA, 22 bp, synthetic construct
  misc_feature 1..22: note = chemically synthesized
  source 1..22: mol_type = other DNA
cacagccatagctgctccacct

SEQ ID NO: 130923 - DNA, 22 bp, synthetic construct
  misc_feature 1..22: note = chemically synthesized
  source 1..22: mol_type = other DNA
acagccatagctgctccacctt

SEQ ID NO: 130924 - DNA, 22 bp, synthetic construct
  misc_feature 1..22: note = chemically synthesized
  source 1..22: mol_type = other DNA
ctccacctttatccagaaaaac

SEQ ID NO: 130925 - DNA, 22 bp, synthetic construct
  misc_feature 1..22: note = chemically synthesized
  source 1..22: mol_type = other DNA
cacctttatccagaaaaactag

SEQ ID NO: 130926 - DNA, 22 bp, synthetic construct
  misc_feature 1..22: note = chemically synthesized
  source 1..22: mol_type = other DNA
tatccagaaaaactagttcttg

SEQ ID NO: 130927 - DNA, 22 bp, synthetic construct
  misc_feature 1..22: note = chemically synthesized
  source 1..22: mol_type = other DNA
atccagaaaaactagttcttgt

SEQ ID NO: 130928 - DNA, 22 bp, synthetic construct
  misc_feature 1..22: note = chemically synthesized
  source 1..22: mol_type = other DNA
tccagaaaaactagttcttgtg

SEQ ID NO: 130929 - DNA, 22 bp, synthetic construct
  misc_feature 1..22: note = chemically synthesized
  source 1..22: mol_type = other DNA
gttcttgtgcttctagtataat

SEQ ID NO: 130930 - DNA, 22 bp, synthetic construct
  misc_feature 1..22: note = chemically synthesized
  source 1..22: mol_type = other DNA
ttgtgcttctagtataattttc

SEQ ID NO: 130931 - DNA, 22 bp, synthetic construct
  misc_feature 1..22: note = chemically synthesized
  source 1..22: mol_type = other DNA
gtgcttctagtataattttctt

SEQ ID NO: 130932 - DNA, 22 bp, synthetic construct
  misc_feature 1..22: note = chemically synthesized
  source 1..22: mol_type = other DNA
tgcttctagtataattttctta

SEQ ID NO: 130933 - DNA, 22 bp, synthetic construct
  misc_feature 1..22: note = chemically synthesized
  source 1..22: mol_type = other DNA
ctagtataattttcttaacact

SEQ ID NO: 130934 - DNA, 22 bp, synthetic construct
  misc_feature 1..22: note = chemically synthesized
  source 1..22: mol_type = other DNA
tagtataattttcttaacactt

SEQ ID NO: 130935 - DNA, 22 bp, synthetic construct
  misc_feature 1..22: note = chemically synthesized
  source 1..22: mol_type = other DNA
gtataattttcttaacacttgt

SEQ ID NO: 130936 - DNA, 22 bp, synthetic construct
  misc_feature 1..22: note = chemically synthesized
  source 1..22: mol_type = other DNA
tcttaacacttgttaatagcta

SEQ ID NO: 130937 - DNA, 22 bp, synthetic construct
  misc_feature 1..22: note = chemically synthesized
  source 1..22: mol_type = other DNA
cttaacacttgttaatagctaa

SEQ ID NO: 130938 - DNA, 22 bp, synthetic construct
  misc_feature 1..22: note = chemically synthesized
  source 1..22: mol_type = other DNA
ttaacacttgttaatagctaag

SEQ ID NO: 130939 - DNA, 22 bp, synthetic construct
  misc_feature 1..22: note = chemically synthesized
  source 1..22: mol_type = other DNA
aacacttgttaatagctaagcc

SEQ ID NO: 130940 - DNA, 22 bp, synthetic construct
  misc_feature 1..22: note = chemically synthesized
  source 1..22: mol_type = other DNA
acacttgttaatagctaagcca

SEQ ID NO: 130941 - DNA, 22 bp, synthetic construct
  misc_feature 1..22: note = chemically synthesized
  source 1..22: mol_type = other DNA
gttaatagctaagccatctgaa

SEQ ID NO: 130942 - DNA, 22 bp, synthetic construct
  misc_feature 1..22: note = chemically synthesized
  source 1..22: mol_type = other DNA
ttaatagctaagccatctgaat

SEQ ID NO: 130943 - DNA, 22 bp, synthetic construct
  misc_feature 1..22: note = chemically synthesized
  source 1..22: mol_type = other DNA
atagctaagccatctgaatgga

SEQ ID NO: 130944 - DNA, 22 bp, synthetic construct
  misc_feature 1..22: note = chemically synthesized
  source 1..22: mol_type = other DNA
agccatctgaatggaattttgc

SEQ ID NO: 130945 - DNA, 22 bp, synthetic construct
  misc_feature 1..22: note = chemically synthesized
  source 1..22: mol_type = other DNA
aatggaattttgccacatagtg

SEQ ID NO: 130946 - DNA, 22 bp, synthetic construct
  misc_feature 1..22: note = chemically synthesized
  source 1..22: mol_type = other DNA
tgccacatagtgcagccttggg

SEQ ID NO: 130947 - DNA, 22 bp, synthetic construct
  misc_feature 1..22: note = chemically synthesized
  source 1..22: mol_type = other DNA
gccacatagtgcagccttggga

SEQ ID NO: 130948 - DNA, 22 bp, synthetic construct
  misc_feature 1..22: note = chemically synthesized
  source 1..22: mol_type = other DNA
ccacatagtgcagccttgggag

SEQ ID NO: 130949 - DNA, 22 bp, synthetic construct
  misc_feature 1..22: note = chemically synthesized
  source 1..22: mol_type = other DNA
gggagcatgcatacagtatggc

SEQ ID NO: 130950 - DNA, 22 bp, synthetic construct
  misc_feature 1..22: note = chemically synthesized
  source 1..22: mol_type = other DNA
ggagcatgcatacagtatggct

SEQ ID NO: 130951 - DNA, 22 bp, synthetic construct
  misc_feature 1..22: note = chemically synthesized
  source 1..22: mol_type = other DNA
catctctggtgacactgcttat

SEQ ID NO: 130952 - DNA, 22 bp, synthetic construct
  misc_feature 1..22: note = chemically synthesized
  source 1..22: mol_type = other DNA
atctctggtgacactgcttata

SEQ ID NO: 130953 - DNA, 22 bp, synthetic construct
  misc_feature 1..22: note = chemically synthesized
  source 1..22: mol_type = other DNA
tggtgacactgcttatagtggg

SEQ ID NO: 130954 - DNA, 22 bp, synthetic construct
  misc_feature 1..22: note = chemically synthesized
  source 1..22: mol_type = other DNA
gtgacactgcttatagtgggcc

SEQ ID NO: 130955 - DNA, 22 bp, synthetic construct
  misc_feature 1..22: note = chemically synthesized
  source 1..22: mol_type = other DNA
cttatagtgggcctcagtttga

SEQ ID NO: 130956 - DNA, 22 bp, synthetic construct
  misc_feature 1..22: note = chemically synthesized
  source 1..22: mol_type = other DNA
atagtgggcctcagtttgatga

SEQ ID NO: 130957 - DNA, 22 bp, synthetic construct
  misc_feature 1..22: note = chemically synthesized
  source 1..22: mol_type = other DNA
tagtgggcctcagtttgatgac

SEQ ID NO: 130958 - DNA, 22 bp, synthetic construct
  misc_feature 1..22: note = chemically synthesized
  source 1..22: mol_type = other DNA
agtttgatgacagtatctagct

SEQ ID NO: 130959 - DNA, 22 bp, synthetic construct
  misc_feature 1..22: note = chemically synthesized
  source 1..22: mol_type = other DNA
gatgacagtatctagctctcct

SEQ ID NO: 130960 - DNA, 22 bp, synthetic construct
  misc_feature 1..22: note = chemically synthesized
  source 1..22: mol_type = other DNA
atgacagtatctagctctccta

SEQ ID NO: 130961 - DNA, 22 bp, synthetic construct
  misc_feature 1..22: note = chemically synthesized
  source 1..22: mol_type = other DNA
gctctcctagaatccccacacg

SEQ ID NO: 130962 - DNA, 22 bp, synthetic construct
  misc_feature 1..22: note = chemically synthesized
  source 1..22: mol_type = other DNA
tcctagaatccccacacgcctg

SEQ ID NO: 130963 - DNA, 22 bp, synthetic construct
  misc_feature 1..22: note = chemically synthesized
  source 1..22: mol_type = other DNA
ctagaatccccacacgcctgcc

SEQ ID NO: 130964 - DNA, 22 bp, synthetic construct
  misc_feature 1..22: note = chemically synthesized
  source 1..22: mol_type = other DNA
gaatccccacacgcctgcctct

SEQ ID NO: 130965 - DNA, 22 bp, synthetic construct
  misc_feature 1..22: note = chemically synthesized
  source 1..22: mol_type = other DNA
cctctgggtaaatatcaacggc

SEQ ID NO: 130966 - DNA, 22 bp, synthetic construct
  misc_feature 1..22: note = chemically synthesized
  source 1..22: mol_type = other DNA
tgggtaaatatcaacggcttcc

SEQ ID NO: 130967 - DNA, 22 bp, synthetic construct
  misc_feature 1..22: note = chemically synthesized
  source 1..22: mol_type = other DNA
ggtaaatatcaacggcttccca

SEQ ID NO: 130968 - DNA, 22 bp, synthetic construct
  misc_feature 1..22: note = chemically synthesized
  source 1..22: mol_type = other DNA
cccagtgttgggcaggcttctt

SEQ ID NO: 130969 - DNA, 22 bp, synthetic construct
  misc_feature 1..22: note = chemically synthesized
  source 1..22: mol_type = other DNA
ccagtgttgggcaggcttcttt

SEQ ID NO: 130970 - DNA, 22 bp, synthetic construct
  misc_feature 1..22: note = chemically synthesized
  source 1..22: mol_type = other DNA
ggcaggcttcttttgtgtttct

SEQ ID NO: 130971 - DNA, 22 bp, synthetic construct
  misc_feature 1..22: note = chemically synthesized
  source 1..22: mol_type = other DNA
cttttgtgtttctttttattcc

SEQ ID NO: 130972 - DNA, 22 bp, synthetic construct
  misc_feature 1..22: note = chemically synthesized
  source 1..22: mol_type = other DNA
ttttgtgtttctttttattccc

SEQ ID NO: 130973 - DNA, 22 bp, synthetic construct
  misc_feature 1..22: note = chemically synthesized
  source 1..22: mol_type = other DNA
ttgtgtttctttttattcccaa

SEQ ID NO: 130974 - DNA, 22 bp, synthetic construct
  misc_feature 1..22: note = chemically synthesized
  source 1..22: mol_type = other DNA
tgtgtttctttttattcccaaa

SEQ ID NO: 130975 - DNA, 22 bp, synthetic construct
  misc_feature 1..22: note = chemically synthesized
  source 1..22: mol_type = other DNA
gtgtttctttttattcccaaaa

SEQ ID NO: 130976 - DNA, 22 bp, synthetic construct
  misc_feature 1..22: note = chemically synthesized
  source 1..22: mol_type = other DNA
tgtttctttttattcccaaaat

SEQ ID NO: 130977 - DNA, 22 bp, synthetic construct
  misc_feature 1..22: note = chemically synthesized
  source 1..22: mol_type = other DNA
ctttttattcccaaaatctcag

SEQ ID NO: 130978 - DNA, 22 bp, synthetic construct
  misc_feature 1..22: note = chemically synthesized
  source 1..22: mol_type = other DNA
tttttattcccaaaatctcaga

SEQ ID NO: 130979 - DNA, 22 bp, synthetic construct
  misc_feature 1..22: note = chemically synthesized
  source 1..22: mol_type = other DNA
tttattcccaaaatctcagaca

SEQ ID NO: 130980 - DNA, 22 bp, synthetic construct
  misc_feature 1..22: note = chemically synthesized
  source 1..22: mol_type = other DNA
ttattcccaaaatctcagacat

SEQ ID NO: 130981 - DNA, 22 bp, synthetic construct
  misc_feature 1..22: note = chemically synthesized
  source 1..22: mol_type = other DNA
tattcccaaaatctcagacatg

SEQ ID NO: 130982 - DNA, 22 bp, synthetic construct
  misc_feature 1..22: note = chemically synthesized
  source 1..22: mol_type = other DNA
attcccaaaatctcagacatga

SEQ ID NO: 130983 - DNA, 22 bp, synthetic construct
  misc_feature 1..22: note = chemically synthesized
  source 1..22: mol_type = other DNA
ttcccaaaatctcagacatgat

SEQ ID NO: 130984 - DNA, 22 bp, synthetic construct
  misc_feature 1..22: note = chemically synthesized
  source 1..22: mol_type = other DNA
ccaaaatctcagacatgattta

SEQ ID NO: 130985 - DNA, 22 bp, synthetic construct
  misc_feature 1..22: note = chemically synthesized
  source 1..22: mol_type = other DNA
agacatgatttacctttcattt

SEQ ID NO: 130986 - DNA, 22 bp, synthetic construct
  misc_feature 1..22: note = chemically synthesized
  source 1..22: mol_type = other DNA
acctttcattttctttgaggta

SEQ ID NO: 130987 - DNA, 22 bp, synthetic construct
  misc_feature 1..22: note = chemically synthesized
  source 1..22: mol_type = other DNA
cctttcattttctttgaggtac

SEQ ID NO: 130988 - DNA, 22 bp, synthetic construct
  misc_feature 1..22: note = chemically synthesized
  source 1..22: mol_type = other DNA
tcattttctttgaggtaccata

SEQ ID NO: 130989 - DNA, 22 bp, synthetic construct
  misc_feature 1..22: note = chemically synthesized
  source 1..22: mol_type = other DNA
cattttctttgaggtaccataa

SEQ ID NO: 130990 - DNA, 22 bp, synthetic construct
  misc_feature 1..22: note = chemically synthesized
  source 1..22: mol_type = other DNA
attttctttgaggtaccataac

SEQ ID NO: 130991 - DNA, 22 bp, synthetic construct
  misc_feature 1..22: note = chemically synthesized
  source 1..22: mol_type = other DNA
tctttgaggtaccataaccttc

SEQ ID NO: 130992 - DNA, 22 bp, synthetic construct
  misc_feature 1..22: note = chemically synthesized
  source 1..22: mol_type = other DNA
ctttgaggtaccataaccttcc

SEQ ID NO: 130993 - DNA, 22 bp, synthetic construct
  misc_feature 1..22: note = chemically synthesized
  source 1..22: mol_type = other DNA
tttgaggtaccataaccttccc

SEQ ID NO: 130994 - DNA, 22 bp, synthetic construct
  misc_feature 1..22: note = chemically synthesized
  source 1..22: mol_type = other DNA
tgaggtaccataaccttccctg

SEQ ID NO: 130995 - DNA, 22 bp, synthetic construct
  misc_feature 1..22: note = chemically synthesized
  source 1..22: mol_type = other DNA
gaggtaccataaccttccctgt

SEQ ID NO: 130996 - DNA, 22 bp, synthetic construct
  misc_feature 1..22: note = chemically synthesized
  source 1..22: mol_type = other DNA
aggtaccataaccttccctgtc

SEQ ID NO: 130997 - DNA, 22 bp, synthetic construct
  misc_feature 1..22: note = chemically synthesized
  source 1..22: mol_type = other DNA
ccctgtcttacttttaatgacc

SEQ ID NO: 130998 - DNA, 22 bp, synthetic construct
  misc_feature 1..22: note = chemically synthesized
  source 1..22: mol_type = other DNA
cctgtcttacttttaatgaccc

SEQ ID NO: 130999 - DNA, 22 bp, synthetic construct
  misc_feature 1..22: note = chemically synthesized
  source 1..22: mol_type = other DNA
tcttacttttaatgacccaagc

SEQ ID NO: 131000 - DNA, 22 bp, synthetic construct
  misc_feature 1..22: note = chemically synthesized
  source 1..22: mol_type = other DNA
acttttaatgacccaagcttag

SEQ ID NO: 131001 - DNA, 22 bp, synthetic construct
  misc_feature 1..22: note = chemically synthesized
  source 1..22: mol_type = other DNA
cttttaatgacccaagcttaga

SEQ ID NO: 131002 - DNA, 22 bp, synthetic construct
  misc_feature 1..22: note = chemically synthesized
  source 1..22: mol_type = other DNA
ttaatgacccaagcttagagat

SEQ ID NO: 131003 - DNA, 22 bp, synthetic construct
  misc_feature 1..22: note = chemically synthesized
  source 1..22: mol_type = other DNA
taatgacccaagcttagagatg

SEQ ID NO: 131004 - DNA, 22 bp, synthetic construct
  misc_feature 1..22: note = chemically synthesized
  source 1..22: mol_type = other DNA
aatgacccaagcttagagatgg

SEQ ID NO: 131005 - DNA, 22 bp, synthetic construct
  misc_feature 1..22: note = chemically synthesized
  source 1..22: mol_type = other DNA
atgacccaagcttagagatgga

SEQ ID NO: 131006 - DNA, 22 bp, synthetic construct
  misc_feature 1..22: note = chemically synthesized
  source 1..22: mol_type = other DNA
agagatggagggagatatgact

SEQ ID NO: 131007 - DNA, 22 bp, synthetic construct
  misc_feature 1..22: note = chemically synthesized
  source 1..22: mol_type = other DNA
gagatggagggagatatgactg

SEQ ID NO: 131008 - DNA, 22 bp, synthetic construct
  misc_feature 1..22: note = chemically synthesized
  source 1..22: mol_type = other DNA
taaacatttttttctgctcata

SEQ ID NO: 131009 - DNA, 22 bp, synthetic construct
  misc_feature 1..22: note = chemically synthesized
  source 1..22: mol_type = other DNA
ttttctgctcataaatataata

SEQ ID NO: 131010 - DNA, 22 bp, synthetic construct
  misc_feature 1..22: note = chemically synthesized
  source 1..22: mol_type = other DNA
tttctgctcataaatataataa

SEQ ID NO: 131011 - DNA, 22 bp, synthetic construct
  misc_feature 1..22: note = chemically synthesized
  source 1..22: mol_type = other DNA
ttctgctcataaatataataaa

SEQ ID NO: 131012 - DNA, 22 bp, synthetic construct
  misc_feature 1..22: note = chemically synthesized
  source 1..22: mol_type = other DNA
tctgctcataaatataataaaa

SEQ ID NO: 131013 - DNA, 22 bp, synthetic construct
  misc_feature 1..22: note = chemically synthesized
  source 1..22: mol_type = other DNA
ctgctcataaatataataaaaa

SEQ ID NO: 131014 - DNA, 22 bp, synthetic construct
  misc_feature 1..22: note = chemically synthesized
  source 1..22: mol_type = other DNA
tgctcataaatataataaaaaa

SEQ ID NO: 131015 - DNA, 22 bp, synthetic construct
  misc_feature 1..22: note = chemically synthesized
  source 1..22: mol_type = other DNA
ctcataaatataataaaaaact

SEQ ID NO: 131016 - DNA, 22 bp, synthetic construct
  misc_feature 1..22: note = chemically synthesized
  source 1..22: mol_type = other DNA
ataaatataataaaaaactttc

SEQ ID NO: 131017 - DNA, 22 bp, synthetic construct
  misc_feature 1..22: note = chemically synthesized
  source 1..22: mol_type = other DNA
tcttttttggtttcaagtgttt

SEQ ID NO: 131018 - DNA, 22 bp, synthetic construct
  misc_feature 1..22: note = chemically synthesized
  source 1..22: mol_type = other DNA
cttttttggtttcaagtgtttt

SEQ ID NO: 131019 - DNA, 22 bp, synthetic construct
  misc_feature 1..22: note = chemically synthesized
  source 1..22: mol_type = other DNA
ttttttggtttcaagtgtttta

SEQ ID NO: 131020 - DNA, 22 bp, synthetic construct
  misc_feature 1..22: note = chemically synthesized
  source 1..22: mol_type = other DNA
ttttggtttcaagtgttttatg

SEQ ID NO: 131021 - DNA, 22 bp, synthetic construct
  misc_feature 1..22: note = chemically synthesized
  source 1..22: mol_type = other DNA
tttggtttcaagtgttttatgg

SEQ ID NO: 131022 - DNA, 22 bp, synthetic construct
  misc_feature 1..22: note = chemically synthesized
  source 1..22: mol_type = other DNA
ttggtttcaagtgttttatggc

SEQ ID NO: 131023 - DNA, 22 bp, synthetic construct
  misc_feature 1..22: note = chemically synthesized
  source 1..22: mol_type = other DNA
tggtttcaagtgttttatggcc

SEQ ID NO: 131024 - DNA, 22 bp, synthetic construct
  misc_feature 1..22: note = chemically synthesized
  source 1..22: mol_type = other DNA
ggtttcaagtgttttatggcca

SEQ ID NO: 131025 - DNA, 22 bp, synthetic construct
  misc_feature 1..22: note = chemically synthesized
  source 1..22: mol_type = other DNA
gtttcaagtgttttatggccaa

SEQ ID NO: 131026 - DNA, 22 bp, synthetic construct
  misc_feature 1..22: note = chemically synthesized
  source 1..22: mol_type = other DNA
caagtgttttatggccaatttc

SEQ ID NO: 131027 - DNA, 22 bp, synthetic construct
  misc_feature 1..22: note = chemically synthesized
  source 1..22: mol_type = other DNA
aagtgttttatggccaatttct

SEQ ID NO: 131028 - DNA, 22 bp, synthetic construct
  misc_feature 1..22: note = chemically synthesized
  source 1..22: mol_type = other DNA
tatggccaatttctctaaagac

SEQ ID NO: 131029 - DNA, 22 bp, synthetic construct
  misc_feature 1..22: note = chemically synthesized
  source 1..22: mol_type = other DNA
atggccaatttctctaaagacg

SEQ ID NO: 131030 - DNA, 22 bp, synthetic construct
  misc_feature 1..22: note = chemically synthesized
  source 1..22: mol_type = other DNA
tggccaatttctctaaagacgt

SEQ ID NO: 131031 - DNA, 22 bp, synthetic construct
  misc_feature 1..22: note = chemically synthesized
  source 1..22: mol_type = other DNA
ctctaaagacgttattgttttt

SEQ ID NO: 131032 - DNA, 22 bp, synthetic construct
  misc_feature 1..22: note = chemically synthesized
  source 1..22: mol_type = other DNA
tctaaagacgttattgtttttt

SEQ ID NO: 131033 - DNA, 22 bp, synthetic construct
  misc_feature 1..22: note = chemically synthesized
  source 1..22: mol_type = other DNA
taaagacgttattgttttttaa

SEQ ID NO: 131034 - DNA, 22 bp, synthetic construct
  misc_feature 1..22: note = chemically synthesized
  source 1..22: mol_type = other DNA
aagacgttattgttttttaagg

SEQ ID NO: 131035 - DNA, 22 bp, synthetic construct
  misc_feature 1..22: note = chemically synthesized
  source 1..22: mol_type = other DNA
ttgttttttaaggaaaagctca

SEQ ID NO: 131036 - DNA, 22 bp, synthetic construct
  misc_feature 1..22: note = chemically synthesized
  source 1..22: mol_type = other DNA
ttttttaaggaaaagctcacaa

SEQ ID NO: 131037 - DNA, 22 bp, synthetic construct
  misc_feature 1..22: note = chemically synthesized
  source 1..22: mol_type = other DNA
tttaaggaaaagctcacaaaca

SEQ ID NO: 131038 - DNA, 22 bp, synthetic construct
  misc_feature 1..22: note = chemically synthesized
  source 1..22: mol_type = other DNA
ttaaggaaaagctcacaaacat

SEQ ID NO: 131039 - DNA, 22 bp, synthetic construct
  misc_feature 1..22: note = chemically synthesized
  source 1..22: mol_type = other DNA
taaggaaaagctcacaaacatt

SEQ ID NO: 131040 - DNA, 22 bp, synthetic construct
  misc_feature 1..22: note = chemically synthesized
  source 1..22: mol_type = other DNA
aaggaaaagctcacaaacattt

SEQ ID NO: 131041 - DNA, 22 bp, synthetic construct
  misc_feature 1..22: note = chemically synthesized
  source 1..22: mol_type = other DNA
aggaaaagctcacaaacatttt

SEQ ID NO: 131042 - DNA, 22 bp, synthetic construct
  misc_feature 1..22: note = chemically synthesized
  source 1..22: mol_type = other DNA
acaaacattttaaaaagtactt

SEQ ID NO: 131043 - DNA, 22 bp, synthetic construct
  misc_feature 1..22: note = chemically synthesized
  source 1..22: mol_type = other DNA
taaaaagtacttgtgctctgga

SEQ ID NO: 131044 - DNA, 22 bp, synthetic construct
  misc_feature 1..22: note = chemically synthesized
  source 1..22: mol_type = other DNA
aaaaagtacttgtgctctggaa

SEQ ID NO: 131045 - DNA, 22 bp, synthetic construct
  misc_feature 1..22: note = chemically synthesized
  source 1..22: mol_type = other DNA
aaaagtacttgtgctctggaaa

SEQ ID NO: 131046 - DNA, 22 bp, synthetic construct
  misc_feature 1..22: note = chemically synthesized
  source 1..22: mol_type = other DNA
gtgctctggaaatctagtttga

SEQ ID NO: 131047 - DNA, 22 bp, synthetic construct
  misc_feature 1..22: note = chemically synthesized
  source 1..22: mol_type = other DNA
tgctctggaaatctagtttgat

SEQ ID NO: 131048 - DNA, 22 bp, synthetic construct
  misc_feature 1..22: note = chemically synthesized
  source 1..22: mol_type = other DNA
tggaaatctagtttgatcctta

SEQ ID NO: 131049 - DNA, 22 bp, synthetic construct
  misc_feature 1..22: note = chemically synthesized
  source 1..22: mol_type = other DNA
gaaatctagtttgatccttaca

SEQ ID NO: 131050 - DNA, 22 bp, synthetic construct
  misc_feature 1..22: note = chemically synthesized
  source 1..22: mol_type = other DNA
gtttgatccttacacaattttt

SEQ ID NO: 131051 - DNA, 22 bp, synthetic construct
  misc_feature 1..22: note = chemically synthesized
  source 1..22: mol_type = other DNA
gatccttacacaatttttttta

SEQ ID NO: 131052 - DNA, 22 bp, synthetic construct
  misc_feature 1..22: note = chemically synthesized
  source 1..22: mol_type = other DNA
atccttacacaattttttttaa

SEQ ID NO: 131053 - DNA, 22 bp, synthetic construct
  misc_feature 1..22: note = chemically synthesized
  source 1..22: mol_type = other DNA
acacaattttttttaaaggaat

SEQ ID NO: 131054 - DNA, 22 bp, synthetic construct
  misc_feature 1..22: note = chemically synthesized
  source 1..22: mol_type = other DNA
cacaattttttttaaaggaatc

SEQ ID NO: 131055 - DNA, 22 bp, synthetic construct
  misc_feature 1..22: note = chemically synthesized
  source 1..22: mol_type = other DNA
tttttaaaggaatcccagattt

SEQ ID NO: 131056 - DNA, 22 bp, synthetic construct
  misc_feature 1..22: note = chemically synthesized
  source 1..22: mol_type = other DNA
ttttaaaggaatcccagatttt

SEQ ID NO: 131057 - DNA, 22 bp, synthetic construct
  misc_feature 1..22: note = chemically synthesized
  source 1..22: mol_type = other DNA
tttaaaggaatcccagatttta

SEQ ID NO: 131058 - DNA, 22 bp, synthetic construct
  misc_feature 1..22: note = chemically synthesized
  source 1..22: mol_type = other DNA
ttaaaggaatcccagattttat

SEQ ID NO: 131059 - DNA, 22 bp, synthetic construct
  misc_feature 1..22: note = chemically synthesized
  source 1..22: mol_type = other DNA
taaaggaatcccagattttatg

SEQ ID NO: 131060 - DNA, 22 bp, synthetic construct
  misc_feature 1..22: note = chemically synthesized
  source 1..22: mol_type = other DNA
aaaggaatcccagattttatgg

SEQ ID NO: 131061 - DNA, 22 bp, synthetic construct
  misc_feature 1..22: note = chemically synthesized
  source 1..22: mol_type = other DNA
aaggaatcccagattttatggc

SEQ ID NO: 131062 - DNA, 22 bp, synthetic construct
  misc_feature 1..22: note = chemically synthesized
  source 1..22: mol_type = other DNA
tatggctttctttttaaaaatt

SEQ ID NO: 131063 - DNA, 22 bp, synthetic construct
  misc_feature 1..22: note = chemically synthesized
  source 1..22: mol_type = other DNA
atggctttctttttaaaaattt

SEQ ID NO: 131064 - DNA, 22 bp, synthetic construct
  misc_feature 1..22: note = chemically synthesized
  source 1..22: mol_type = other DNA
tggctttctttttaaaaatttt

SEQ ID NO: 131065 - DNA, 22 bp, synthetic construct
  misc_feature 1..22: note = chemically synthesized
  source 1..22: mol_type = other DNA
tctttttaaaaattttttattt

SEQ ID NO: 131066 - DNA, 22 bp, synthetic construct
  misc_feature 1..22: note = chemically synthesized
  source 1..22: mol_type = other DNA
ctttttaaaaattttttatttt

SEQ ID NO: 131067 - DNA, 22 bp, synthetic construct
  misc_feature 1..22: note = chemically synthesized
  source 1..22: mol_type = other DNA
tttttaaaaattttttattttt

SEQ ID NO: 131068 - DNA, 22 bp, synthetic construct
  misc_feature 1..22: note = chemically synthesized
  source 1..22: mol_type = other DNA
tttaaaaattttttatttttaa

SEQ ID NO: 131069 - DNA, 22 bp, synthetic construct
  misc_feature 1..22: note = chemically synthesized
  source 1..22: mol_type = other DNA
ttaaaaattttttatttttaaa

SEQ ID NO: 131070 - DNA, 22 bp, synthetic construct
  misc_feature 1..22: note = chemically synthesized
  source 1..22: mol_type = other DNA
taaaaattttttatttttaaaa

SEQ ID NO: 131071 - DNA, 22 bp, synthetic construct
  misc_feature 1..22: note = chemically synthesized
  source 1..22: mol_type = other DNA
aaaaattttttatttttaaaat

SEQ ID NO: 131072 - DNA, 22 bp, synthetic construct
  misc_feature 1..22: note = chemically synthesized
  source 1..22: mol_type = other DNA
aaaattttttatttttaaaatt

SEQ ID NO: 131073 - DNA, 22 bp, synthetic construct
  misc_feature 1..22: note = chemically synthesized
  source 1..22: mol_type = other DNA
tttatttttaaaattttttaaa

SEQ ID NO: 131074 - DNA, 22 bp, synthetic construct
  misc_feature 1..22: note = chemically synthesized
  source 1..22: mol_type = other DNA
ttatttttaaaattttttaaaa

SEQ ID NO: 131075 - DNA, 22 bp, synthetic construct
  misc_feature 1..22: note = chemically synthesized
  source 1..22: mol_type = other DNA
tatttttaaaattttttaaaac

SEQ ID NO: 131076 - DNA, 22 bp, synthetic construct
  misc_feature 1..22: note = chemically synthesized
  source 1..22: mol_type = other DNA
atttttaaaattttttaaaact

SEQ ID NO: 131077 - DNA, 22 bp, synthetic construct
  misc_feature 1..22: note = chemically synthesized
  source 1..22: mol_type = other DNA
tttttaaaattttttaaaactt

SEQ ID NO: 131078 - DNA, 22 bp, synthetic construct
  misc_feature 1..22: note = chemically synthesized
  source 1..22: mol_type = other DNA
ttaaaattttttaaaactttaa

SEQ ID NO: 131079 - DNA, 22 bp, synthetic construct
  misc_feature 1..22: note = chemically synthesized
  source 1..22: mol_type = other DNA
taaaattttttaaaactttaat

SEQ ID NO: 131080 - DNA, 22 bp, synthetic construct
  misc_feature 1..22: note = chemically synthesized
  source 1..22: mol_type = other DNA
aaaattttttaaaactttaatt

SEQ ID NO: 131081 - DNA, 22 bp, synthetic construct
  misc_feature 1..22: note = chemically synthesized
  source 1..22: mol_type = other DNA
aaattttttaaaactttaatta

SEQ ID NO: 131082 - DNA, 22 bp, synthetic construct
  misc_feature 1..22: note = chemically synthesized
  source 1..22: mol_type = other DNA
tttaaaactttaattaaaaaaa

SEQ ID NO: 131083 - DNA, 22 bp, synthetic construct
  misc_feature 1..22: note = chemically synthesized
  source 1..22: mol_type = other DNA
ttaaaactttaattaaaaaaaa

SEQ ID NO: 131084 - DNA, 22 bp, synthetic construct
  misc_feature 1..22: note = chemically synthesized
  source 1..22: mol_type = other DNA
taaaactttaattaaaaaaaat

SEQ ID NO: 131085 - DNA, 22 bp, synthetic construct
  misc_feature 1..22: note = chemically synthesized
  source 1..22: mol_type = other DNA
aaaactttaattaaaaaaaatt

SEQ ID NO: 131086 - DNA, 22 bp, synthetic construct
  misc_feature 1..22: note = chemically synthesized
  source 1..22: mol_type = other DNA
aaactttaattaaaaaaaattt

SEQ ID NO: 131087 - DNA, 22 bp, synthetic construct
  misc_feature 1..22: note = chemically synthesized
  source 1..22: mol_type = other DNA
taattaaaaaaaattttaatgt

SEQ ID NO: 131088 - DNA, 22 bp, synthetic construct
  misc_feature 1..22: note = chemically synthesized
  source 1..22: mol_type = other DNA
aattaaaaaaaattttaatgtg

SEQ ID NO: 131089 - DNA, 22 bp, synthetic construct
  misc_feature 1..22: note = chemically synthesized
  source 1..22: mol_type = other DNA
attaaaaaaaattttaatgtga

SEQ ID NO: 131090 - DNA, 22 bp, synthetic construct
  misc_feature 1..22: note = chemically synthesized
  source 1..22: mol_type = other DNA
aaaaaaattttaatgtgacttt

SEQ ID NO: 131091 - DNA, 22 bp, synthetic construct
  misc_feature 1..22: note = chemically synthesized
  source 1..22: mol_type = other DNA
taatgtgactttcttctatgtt

SEQ ID NO: 131092 - DNA, 22 bp, synthetic construct
  misc_feature 1..22: note = chemically synthesized
  source 1..22: mol_type = other DNA
aatgtgactttcttctatgttt

SEQ ID NO: 131093 - DNA, 22 bp, synthetic construct
  misc_feature 1..22: note = chemically synthesized
  source 1..22: mol_type = other DNA
atgtgactttcttctatgttta

SEQ ID NO: 131094 - DNA, 22 bp, synthetic construct
  misc_feature 1..22: note = chemically synthesized
  source 1..22: mol_type = other DNA
tcttctatgtttacccttcaga

SEQ ID NO: 131095 - DNA, 22 bp, synthetic construct
  misc_feature 1..22: note = chemically synthesized
  source 1..22: mol_type = other DNA
cttctatgtttacccttcagaa

SEQ ID NO: 131096 - DNA, 22 bp, synthetic construct
  misc_feature 1..22: note = chemically synthesized
  source 1..22: mol_type = other DNA
ttctatgtttacccttcagaat

SEQ ID NO: 131097 - DNA, 22 bp, synthetic construct
  misc_feature 1..22: note = chemically synthesized
  source 1..22: mol_type = other DNA
ctatgtttacccttcagaatat

SEQ ID NO: 131098 - DNA, 22 bp, synthetic construct
  misc_feature 1..22: note = chemically synthesized
  source 1..22: mol_type = other DNA
tatgtttacccttcagaatatg

SEQ ID NO: 131099 - DNA, 22 bp, synthetic construct
  misc_feature 1..22: note = chemically synthesized
  source 1..22: mol_type = other DNA
tgtttacccttcagaatatgtg

SEQ ID NO: 131100 - DNA, 22 bp, synthetic construct
  misc_feature 1..22: note = chemically synthesized
  source 1..22: mol_type = other DNA
acccttcagaatatgtgtcacc

SEQ ID NO: 131101 - DNA, 22 bp, synthetic construct
  misc_feature 1..22: note = chemically synthesized
  source 1..22: mol_type = other DNA
cccttcagaatatgtgtcacca

SEQ ID NO: 131102 - DNA, 22 bp, synthetic construct
  misc_feature 1..22: note = chemically synthesized
  source 1..22: mol_type = other DNA
cagaatatgtgtcaccaatttg

SEQ ID NO: 131103 - DNA, 22 bp, synthetic construct
  misc_feature 1..22: note = chemically synthesized
  source 1..22: mol_type = other DNA
agaatatgtgtcaccaatttgt

SEQ ID NO: 131104 - DNA, 22 bp, synthetic construct
  misc_feature 1..22: note = chemically synthesized
  source 1..22: mol_type = other DNA
gtcctttctctaatctgccatt

SEQ ID NO: 131105 - DNA, 22 bp, synthetic construct
  misc_feature 1..22: note = chemically synthesized
  source 1..22: mol_type = other DNA
tcctttctctaatctgccattc

SEQ ID NO: 131106 - DNA, 22 bp, synthetic construct
  misc_feature 1..22: note = chemically synthesized
  source 1..22: mol_type = other DNA
tctctaatctgccattctcttc

SEQ ID NO: 131107 - DNA, 22 bp, synthetic construct
  misc_feature 1..22: note = chemically synthesized
  source 1..22: mol_type = other DNA
ctctaatctgccattctcttcc

SEQ ID NO: 131108 - DNA, 22 bp, synthetic construct
  misc_feature 1..22: note = chemically synthesized
  source 1..22: mol_type = other DNA
tctaatctgccattctcttcct

SEQ ID NO: 131109 - DNA, 22 bp, synthetic construct
  misc_feature 1..22: note = chemically synthesized
  source 1..22: mol_type = other DNA
taatctgccattctcttcctcc

SEQ ID NO: 131110 - DNA, 22 bp, synthetic construct
  misc_feature 1..22: note = chemically synthesized
  source 1..22: mol_type = other DNA
atctgccattctcttcctccta

SEQ ID NO: 131111 - DNA, 22 bp, synthetic construct
  misc_feature 1..22: note = chemically synthesized
  source 1..22: mol_type = other DNA
ccattctcttcctcctatacct

SEQ ID NO: 131112 - DNA, 22 bp, synthetic construct
  misc_feature 1..22: note = chemically synthesized
  source 1..22: mol_type = other DNA
tcttcctcctatacctcattcc

SEQ ID NO: 131113 - DNA, 22 bp, synthetic construct
  misc_feature 1..22: note = chemically synthesized
  source 1..22: mol_type = other DNA
ttcctcctatacctcattccgt

SEQ ID NO: 131114 - DNA, 22 bp, synthetic construct
  misc_feature 1..22: note = chemically synthesized
  source 1..22: mol_type = other DNA
cctcctatacctcattccgtac

SEQ ID NO: 131115 - DNA, 22 bp, synthetic construct
  misc_feature 1..22: note = chemically synthesized
  source 1..22: mol_type = other DNA
ctcctatacctcattccgtaca

SEQ ID NO: 131116 - DNA, 22 bp, synthetic construct
  misc_feature 1..22: note = chemically synthesized
  source 1..22: mol_type = other DNA
ctatacctcattccgtacatcc

SEQ ID NO: 131117 - DNA, 22 bp, synthetic construct
  misc_feature 1..22: note = chemically synthesized
  source 1..22: mol_type = other DNA
tacctcattccgtacatcctct

SEQ ID NO: 131118 - DNA, 22 bp, synthetic construct
  misc_feature 1..22: note = chemically synthesized
  source 1..22: mol_type = other DNA
attccgtacatcctcttattcc

SEQ ID NO: 131119 - DNA, 22 bp, synthetic construct
  misc_feature 1..22: note = chemically synthesized
  source 1..22: mol_type = other DNA
cgtacatcctcttattcctcaa

SEQ ID NO: 131120 - DNA, 22 bp, synthetic construct
  misc_feature 1..22: note = chemically synthesized
  source 1..22: mol_type = other DNA
ttattcctcaatctgtgttttt

SEQ ID NO: 131121 - DNA, 22 bp, synthetic construct
  misc_feature 1..22: note = chemically synthesized
  source 1..22: mol_type = other DNA
attcctcaatctgtgtttttaa

SEQ ID NO: 131122 - DNA, 22 bp, synthetic construct
  misc_feature 1..22: note = chemically synthesized
  source 1..22: mol_type = other DNA
ttcctcaatctgtgtttttaag

SEQ ID NO: 131123 - DNA, 22 bp, synthetic construct
  misc_feature 1..22: note = chemically synthesized
  source 1..22: mol_type = other DNA
ctcaatctgtgtttttaagcat

SEQ ID NO: 131124 - DNA, 22 bp, synthetic construct
  misc_feature 1..22: note = chemically synthesized
  source 1..22: mol_type = other DNA
aatctgtgtttttaagcatgaa

SEQ ID NO: 131125 - DNA, 22 bp, synthetic construct
  misc_feature 1..22: note = chemically synthesized
  source 1..22: mol_type = other DNA
tgtttttaagcatgaaggatct

SEQ ID NO: 131126 - DNA, 22 bp, synthetic construct
  misc_feature 1..22: note = chemically synthesized
  source 1..22: mol_type = other DNA
ttaagcatgaaggatctttcga

SEQ ID NO: 131127 - DNA, 22 bp, synthetic construct
  misc_feature 1..22: note = chemically synthesized
  source 1..22: mol_type = other DNA
taagcatgaaggatctttcgaa

SEQ ID NO: 131128 - DNA, 22 bp, synthetic construct
  misc_feature 1..22: note = chemically synthesized
  source 1..22: mol_type = other DNA
aagcatgaaggatctttcgaag

SEQ ID NO: 131129 - DNA, 22 bp, synthetic construct
  misc_feature 1..22: note = chemically synthesized
  source 1..22: mol_type = other DNA
agcatgaaggatctttcgaagg

SEQ ID NO: 131130 - DNA, 22 bp, synthetic construct
  misc_feature 1..22: note = chemically synthesized
  source 1..22: mol_type = other DNA
tcgaaggtagaacaacatttgt

SEQ ID NO: 131131 - DNA, 22 bp, synthetic construct
  misc_feature 1..22: note = chemically synthesized
  source 1..22: mol_type = other DNA
cgaaggtagaacaacatttgtg

SEQ ID NO: 131132 - DNA, 22 bp, synthetic construct
  misc_feature 1..22: note = chemically synthesized
  source 1..22: mol_type = other DNA
gaaggtagaacaacatttgtgt

SEQ ID NO: 131133 - DNA, 22 bp, synthetic construct
  misc_feature 1..22: note = chemically synthesized
  source 1..22: mol_type = other DNA
gtgtaataattataattcagtc

SEQ ID NO: 131134 - DNA, 22 bp, synthetic construct
  misc_feature 1..22: note = chemically synthesized
  source 1..22: mol_type = other DNA
tgtaataattataattcagtct

SEQ ID NO: 131135 - DNA, 22 bp, synthetic construct
  misc_feature 1..22: note = chemically synthesized
  source 1..22: mol_type = other DNA
taattcagtcttctatatgaat

SEQ ID NO: 131136 - DNA, 22 bp, synthetic construct
  misc_feature 1..22: note = chemically synthesized
  source 1..22: mol_type = other DNA
agtcttctatatgaattcaatg

SEQ ID NO: 131137 - DNA, 22 bp, synthetic construct
  misc_feature 1..22: note = chemically synthesized
  source 1..22: mol_type = other DNA
ctatatgaattcaatgtgattt

SEQ ID NO: 131138 - DNA, 22 bp, synthetic construct
  misc_feature 1..22: note = chemically synthesized
  source 1..22: mol_type = other DNA
tatatgaattcaatgtgattta

SEQ ID NO: 131139 - DNA, 22 bp, synthetic construct
  misc_feature 1..22: note = chemically synthesized
  source 1..22: mol_type = other DNA
tatgaattcaatgtgatttaat

SEQ ID NO: 131140 - DNA, 22 bp, synthetic construct
  misc_feature 1..22: note = chemically synthesized
  source 1..22: mol_type = other DNA
aatgtgatttaattttagggat

SEQ ID NO: 131141 - DNA, 22 bp, synthetic construct
  misc_feature 1..22: note = chemically synthesized
  source 1..22: mol_type = other DNA
aattttagggattccctagtgt

SEQ ID NO: 131142 - DNA, 22 bp, synthetic construct
  misc_feature 1..22: note = chemically synthesized
  source 1..22: mol_type = other DNA
attttagggattccctagtgtt

SEQ ID NO: 131143 - DNA, 22 bp, synthetic construct
  misc_feature 1..22: note = chemically synthesized
  source 1..22: mol_type = other DNA
tagggattccctagtgttggtg

SEQ ID NO: 131144 - DNA, 22 bp, synthetic construct
  misc_feature 1..22: note = chemically synthesized
  source 1..22: mol_type = other DNA
agggattccctagtgttggtga

SEQ ID NO: 131145 - DNA, 22 bp, synthetic construct
  misc_feature 1..22: note = chemically synthesized
  source 1..22: mol_type = other DNA
gggattccctagtgttggtgat

SEQ ID NO: 131146 - DNA, 22 bp, synthetic construct
  misc_feature 1..22: note = chemically synthesized
  source 1..22: mol_type = other DNA
cctagtgttggtgatttcaatc

SEQ ID NO: 131147 - DNA, 22 bp, synthetic construct
  misc_feature 1..22: note = chemically synthesized
  source 1..22: mol_type = other DNA
gtgttggtgatttcaatctcag

SEQ ID NO: 131148 - DNA, 22 bp, synthetic construct
  misc_feature 1..22: note = chemically synthesized
  source 1..22: mol_type = other DNA
gtgatttcaatctcagtaagtt

SEQ ID NO: 131149 - DNA, 22 bp, synthetic construct
  misc_feature 1..22: note = chemically synthesized
  source 1..22: mol_type = other DNA
caatctcagtaagttagtaatc

SEQ ID NO: 131150 - DNA, 22 bp, synthetic construct
  misc_feature 1..22: note = chemically synthesized
  source 1..22: mol_type = other DNA
aatctcagtaagttagtaatcc

SEQ ID NO: 131151 - DNA, 22 bp, synthetic construct
  misc_feature 1..22: note = chemically synthesized
  source 1..22: mol_type = other DNA
agtaagttagtaatcctgactc

SEQ ID NO: 131152 - DNA, 22 bp, synthetic construct
  misc_feature 1..22: note = chemically synthesized
  source 1..22: mol_type = other DNA
gtaatcctgactcacaggagct

SEQ ID NO: 131153 - DNA, 22 bp, synthetic construct
  misc_feature 1..22: note = chemically synthesized
  source 1..22: mol_type = other DNA
actcacaggagctgatacagag

SEQ ID NO: 131154 - DNA, 22 bp, synthetic construct
  misc_feature 1..22: note = chemically synthesized
  source 1..22: mol_type = other DNA
acaggagctgatacagaggtag

SEQ ID NO: 131155 - DNA, 22 bp, synthetic construct
  misc_feature 1..22: note = chemically synthesized
  source 1..22: mol_type = other DNA
atacagaggtagcatcagaaca

SEQ ID NO: 131156 - DNA, 22 bp, synthetic construct
  misc_feature 1..22: note = chemically synthesized
  source 1..22: mol_type = other DNA
ccttatacaatatgaaatgctt

SEQ ID NO: 131157 - DNA, 22 bp, synthetic construct
  misc_feature 1..22: note = chemically synthesized
  source 1..22: mol_type = other DNA
cttatacaatatgaaatgcttt

SEQ ID NO: 131158 - DNA, 22 bp, synthetic construct
  misc_feature 1..22: note = chemically synthesized
  source 1..22: mol_type = other DNA
atacaatatgaaatgctttgtg

SEQ ID NO: 131159 - DNA, 22 bp, synthetic construct
  misc_feature 1..22: note = chemically synthesized
  source 1..22: mol_type = other DNA
tacaatatgaaatgctttgtga

SEQ ID NO: 131160 - DNA, 22 bp, synthetic construct
  misc_feature 1..22: note = chemically synthesized
  source 1..22: mol_type = other DNA
tgtgatttcttctgattctgat

SEQ ID NO: 131161 - DNA, 22 bp, synthetic construct
  misc_feature 1..22: note = chemically synthesized
  source 1..22: mol_type = other DNA
gtgatttcttctgattctgatt

SEQ ID NO: 131162 - DNA, 22 bp, synthetic construct
  misc_feature 1..22: note = chemically synthesized
  source 1..22: mol_type = other DNA
tgatttcttctgattctgattt

SEQ ID NO: 131163 - DNA, 22 bp, synthetic construct
  misc_feature 1..22: note = chemically synthesized
  source 1..22: mol_type = other DNA
cttctgattctgatttattttt

SEQ ID NO: 131164 - DNA, 22 bp, synthetic construct
  misc_feature 1..22: note = chemically synthesized
  source 1..22: mol_type = other DNA
ttctgattctgatttatttttg

SEQ ID NO: 131165 - DNA, 22 bp, synthetic construct
  misc_feature 1..22: note = chemically synthesized
  source 1..22: mol_type = other DNA
ctgattctgatttatttttgat

SEQ ID NO: 131166 - DNA, 22 bp, synthetic construct
  misc_feature 1..22: note = chemically synthesized
  source 1..22: mol_type = other DNA
tgattctgatttatttttgata

SEQ ID NO: 131167 - DNA, 22 bp, synthetic construct
  misc_feature 1..22: note = chemically synthesized
  source 1..22: mol_type = other DNA
attctgatttatttttgatact

SEQ ID NO: 131168 - DNA, 22 bp, synthetic construct
  misc_feature 1..22: note = chemically synthesized
  source 1..22: mol_type = other DNA
tgatttatttttgatactgagg

SEQ ID NO: 131169 - DNA, 22 bp, synthetic construct
  misc_feature 1..22: note = chemically synthesized
  source 1..22: mol_type = other DNA
atttatttttgatactgaggcc

SEQ ID NO: 131170 - DNA, 22 bp, synthetic construct
  misc_feature 1..22: note = chemically synthesized
  source 1..22: mol_type = other DNA
atttttgatactgaggccattt

SEQ ID NO: 131171 - DNA, 22 bp, synthetic construct
  misc_feature 1..22: note = chemically synthesized
  source 1..22: mol_type = other DNA
tttttgatactgaggccatttt

SEQ ID NO: 131172 - DNA, 22 bp, synthetic construct
  misc_feature 1..22: note = chemically synthesized
  source 1..22: mol_type = other DNA
ttgatactgaggccattttatg

SEQ ID NO: 131173 - DNA, 22 bp, synthetic construct
  misc_feature 1..22: note = chemically synthesized
  source 1..22: mol_type = other DNA
tgatactgaggccattttatga

SEQ ID NO: 131174 - DNA, 22 bp, synthetic construct
  misc_feature 1..22: note = chemically synthesized
  source 1..22: mol_type = other DNA
gatactgaggccattttatgaa

SEQ ID NO: 131175 - DNA, 22 bp, synthetic construct
  misc_feature 1..22: note = chemically synthesized
  source 1..22: mol_type = other DNA
atactgaggccattttatgaag

SEQ ID NO: 131176 - DNA, 22 bp, synthetic construct
  misc_feature 1..22: note = chemically synthesized
  source 1..22: mol_type = other DNA
aggccattttatgaagaaaact

SEQ ID NO: 131177 - DNA, 22 bp, synthetic construct
  misc_feature 1..22: note = chemically synthesized
  source 1..22: mol_type = other DNA
tatgaagaaaactgctaggtgc

SEQ ID NO: 131178 - DNA, 22 bp, synthetic construct
  misc_feature 1..22: note = chemically synthesized
  source 1..22: mol_type = other DNA
atgaagaaaactgctaggtgct

SEQ ID NO: 131179 - DNA, 22 bp, synthetic construct
  misc_feature 1..22: note = chemically synthesized
  source 1..22: mol_type = other DNA
tgaagaaaactgctaggtgcta

SEQ ID NO: 131180 - DNA, 22 bp, synthetic construct
  misc_feature 1..22: note = chemically synthesized
  source 1..22: mol_type = other DNA
ctaggtgctaaagacttgcctc

SEQ ID NO: 131181 - DNA, 22 bp, synthetic construct
  misc_feature 1..22: note = chemically synthesized
  source 1..22: mol_type = other DNA
ggtgctaaagacttgcctccag

SEQ ID NO: 131182 - DNA, 22 bp, synthetic construct
  misc_feature 1..22: note = chemically synthesized
  source 1..22: mol_type = other DNA
aagacttgcctccaggattctg

SEQ ID NO: 131183 - DNA, 22 bp, synthetic construct
  misc_feature 1..22: note = chemically synthesized
  source 1..22: mol_type = other DNA
gcctccaggattctgaatttct

SEQ ID NO: 131184 - DNA, 22 bp, synthetic construct
  misc_feature 1..22: note = chemically synthesized
  source 1..22: mol_type = other DNA
cctccaggattctgaatttctc

SEQ ID NO: 131185 - DNA, 22 bp, synthetic construct
  misc_feature 1..22: note = chemically synthesized
  source 1..22: mol_type = other DNA
caggattctgaatttctcgtta

SEQ ID NO: 131186 - DNA, 22 bp, synthetic construct
  misc_feature 1..22: note = chemically synthesized
  source 1..22: mol_type = other DNA
tgaatttctcgttaaataagac

SEQ ID NO: 131187 - DNA, 22 bp, synthetic construct
  misc_feature 1..22: note = chemically synthesized
  source 1..22: mol_type = other DNA
aatttctcgttaaataagactg

SEQ ID NO: 131188 - DNA, 22 bp, synthetic construct
  misc_feature 1..22: note = chemically synthesized
  source 1..22: mol_type = other DNA
ctcgttaaataagactgcagca

SEQ ID NO: 131189 - DNA, 22 bp, synthetic construct
  misc_feature 1..22: note = chemically synthesized
  source 1..22: mol_type = other DNA
tcgttaaataagactgcagcag

SEQ ID NO: 131190 - DNA, 22 bp, synthetic construct
  misc_feature 1..22: note = chemically synthesized
  source 1..22: mol_type = other DNA
gttaaataagactgcagcagag

SEQ ID NO: 131191 - DNA, 22 bp, synthetic construct
  misc_feature 1..22: note = chemically synthesized
  source 1..22: mol_type = other DNA
aataagactgcagcagagctgg

SEQ ID NO: 131192 - DNA, 22 bp, synthetic construct
  misc_feature 1..22: note = chemically synthesized
  source 1..22: mol_type = other DNA
cagcagagctggtaataagctt

SEQ ID NO: 131193 - DNA, 22 bp, synthetic construct
  misc_feature 1..22: note = chemically synthesized
  source 1..22: mol_type = other DNA
gtaataagcttcttctttctcc

SEQ ID NO: 131194 - DNA, 22 bp, synthetic construct
  misc_feature 1..22: note = chemically synthesized
  source 1..22: mol_type = other DNA
cttctttctcccatacccctct

SEQ ID NO: 131195 - DNA, 22 bp, synthetic construct
  misc_feature 1..22: note = chemically synthesized
  source 1..22: mol_type = other DNA
ttctttctcccatacccctctt

SEQ ID NO: 131196 - DNA, 22 bp, synthetic construct
  misc_feature 1..22: note = chemically synthesized
  source 1..22: mol_type = other DNA
ctttctcccatacccctcttgg

SEQ ID NO: 131197 - DNA, 22 bp, synthetic construct
  misc_feature 1..22: note = chemically synthesized
  source 1..22: mol_type = other DNA
tttctcccatacccctcttgga

SEQ ID NO: 131198 - DNA, 22 bp, synthetic construct
  misc_feature 1..22: note = chemically synthesized
  source 1..22: mol_type = other DNA
tctcccatacccctcttggatc

SEQ ID NO: 131199 - DNA, 22 bp, synthetic construct
  misc_feature 1..22: note = chemically synthesized
  source 1..22: mol_type = other DNA
ctcccatacccctcttggatcg

SEQ ID NO: 131200 - DNA, 22 bp, synthetic construct
  misc_feature 1..22: note = chemically synthesized
  source 1..22: mol_type = other DNA
tcccatacccctcttggatcgt

SEQ ID NO: 131201 - DNA, 22 bp, synthetic construct
  misc_feature 1..22: note = chemically synthesized
  source 1..22: mol_type = other DNA
ccatacccctcttggatcgtgg

SEQ ID NO: 131202 - DNA, 22 bp, synthetic construct
  misc_feature 1..22: note = chemically synthesized
  source 1..22: mol_type = other DNA
ttggatcgtggcaaccaagaaa

SEQ ID NO: 131203 - DNA, 22 bp, synthetic construct
  misc_feature 1..22: note = chemically synthesized
  source 1..22: mol_type = other DNA
ggatcgtggcaaccaagaaaac

SEQ ID NO: 131204 - DNA, 22 bp, synthetic construct
  misc_feature 1..22: note = chemically synthesized
  source 1..22: mol_type = other DNA
gatcgtggcaaccaagaaaaca

SEQ ID NO: 131205 - DNA, 22 bp, synthetic construct
  misc_feature 1..22: note = chemically synthesized
  source 1..22: mol_type = other DNA
gcatccttaggctgtggaaaca

SEQ ID NO: 131206 - DNA, 22 bp, synthetic construct
  misc_feature 1..22: note = chemically synthesized
  source 1..22: mol_type = other DNA
aggctgtggaaacattataatt

SEQ ID NO: 131207 - DNA, 22 bp, synthetic construct
  misc_feature 1..22: note = chemically synthesized
  source 1..22: mol_type = other DNA
ggctgtggaaacattataattt

SEQ ID NO: 131208 - DNA, 22 bp, synthetic construct
  misc_feature 1..22: note = chemically synthesized
  source 1..22: mol_type = other DNA
tggaaacattataattttacct

SEQ ID NO: 131209 - DNA, 22 bp, synthetic construct
  misc_feature 1..22: note = chemically synthesized
  source 1..22: mol_type = other DNA
taattttacctgttacagaact

SEQ ID NO: 131210 - DNA, 22 bp, synthetic construct
  misc_feature 1..22: note = chemically synthesized
  source 1..22: mol_type = other DNA
tacctgttacagaactgcaaca

SEQ ID NO: 131211 - DNA, 22 bp, synthetic construct
  misc_feature 1..22: note = chemically synthesized
  source 1..22: mol_type = other DNA
acctgttacagaactgcaacag

SEQ ID NO: 131212 - DNA, 22 bp, synthetic construct
  misc_feature 1..22: note = chemically synthesized
  source 1..22: mol_type = other DNA
cctgttacagaactgcaacagt

SEQ ID NO: 131213 - DNA, 22 bp, synthetic construct
  misc_feature 1..22: note = chemically synthesized
  source 1..22: mol_type = other DNA
ttacagaactgcaacagttcct

SEQ ID NO: 131214 - DNA, 22 bp, synthetic construct
  misc_feature 1..22: note = chemically synthesized
  source 1..22: mol_type = other DNA
cagaactgcaacagttcctcag

SEQ ID NO: 131215 - DNA, 22 bp, synthetic construct
  misc_feature 1..22: note = chemically synthesized
  source 1..22: mol_type = other DNA
caacagttcctcaggagtttgg

SEQ ID NO: 131216 - DNA, 22 bp, synthetic construct
  misc_feature 1..22: note = chemically synthesized
  source 1..22: mol_type = other DNA
ctcaggagtttggagttgatgg

SEQ ID NO: 131217 - DNA, 22 bp, synthetic construct
  misc_feature 1..22: note = chemically synthesized
  source 1..22: mol_type = other DNA
aggagtttggagttgatggaaa

SEQ ID NO: 131218 - DNA, 22 bp, synthetic construct
  misc_feature 1..22: note = chemically synthesized
  source 1..22: mol_type = other DNA
ggagttgatggaaaagcagaga

SEQ ID NO: 131219 - DNA, 22 bp, synthetic construct
  misc_feature 1..22: note = chemically synthesized
  source 1..22: mol_type = other DNA
gagttgatggaaaagcagagag

SEQ ID NO: 131220 - DNA, 22 bp, synthetic construct
  misc_feature 1..22: note = chemically synthesized
  source 1..22: mol_type = other DNA
atggaaaagcagagagaggtaa

SEQ ID NO: 131221 - DNA, 22 bp, synthetic construct
  misc_feature 1..22: note = chemically synthesized
  source 1..22: mol_type = other DNA
agtatttaattatgggaaataa

SEQ ID NO: 131222 - DNA, 22 bp, synthetic construct
  misc_feature 1..22: note = chemically synthesized
  source 1..22: mol_type = other DNA
aattatgggaaataatgttgga

SEQ ID NO: 131223 - DNA, 22 bp, synthetic construct
  misc_feature 1..22: note = chemically synthesized
  source 1..22: mol_type = other DNA
attatgggaaataatgttggaa

SEQ ID NO: 131224 - DNA, 22 bp, synthetic construct
  misc_feature 1..22: note = chemically synthesized
  source 1..22: mol_type = other DNA
tgggaaataatgttggaaaggg

SEQ ID NO: 131225 - DNA, 22 bp, synthetic construct
  misc_feature 1..22: note = chemically synthesized
  source 1..22: mol_type = other DNA
gaaagggcaagtggcagaaaga

SEQ ID NO: 131226 - DNA, 22 bp, synthetic construct
  misc_feature 1..22: note = chemically synthesized
  source 1..22: mol_type = other DNA
tatgaagatatttggagaaaat

SEQ ID NO: 131227 - DNA, 22 bp, synthetic construct
  misc_feature 1..22: note = chemically synthesized
  source 1..22: mol_type = other DNA
ggagaaaatgagaaaatcaact

SEQ ID NO: 131228 - DNA, 22 bp, synthetic construct
  misc_feature 1..22: note = chemically synthesized
  source 1..22: mol_type = other DNA
gagaaaatgagaaaatcaactg

SEQ ID NO: 131229 - DNA, 22 bp, synthetic construct
  misc_feature 1..22: note = chemically synthesized
  source 1..22: mol_type = other DNA
gatggaagcattaaaaggtttc

SEQ ID NO: 131230 - DNA, 22 bp, synthetic construct
  misc_feature 1..22: note = chemically synthesized
  source 1..22: mol_type = other DNA
aaaggtttctatctcgaaagat

SEQ ID NO: 131231 - DNA, 22 bp, synthetic construct
  misc_feature 1..22: note = chemically synthesized
  source 1..22: mol_type = other DNA
ctatctcgaaagatggattagg

SEQ ID NO: 131232 - DNA, 22 bp, synthetic construct
  misc_feature 1..22: note = chemically synthesized
  source 1..22: mol_type = other DNA
tatctcgaaagatggattaggt

SEQ ID NO: 131233 - DNA, 22 bp, synthetic construct
  misc_feature 1..22: note = chemically synthesized
  source 1..22: mol_type = other DNA
tctcgaaagatggattaggtat

SEQ ID NO: 131234 - DNA, 22 bp, synthetic construct
  misc_feature 1..22: note = chemically synthesized
  source 1..22: mol_type = other DNA
gaaagatggattaggtatgaaa

SEQ ID NO: 131235 - DNA, 22 bp, synthetic construct
  misc_feature 1..22: note = chemically synthesized
  source 1..22: mol_type = other DNA
ggtatgaaatgcttatagcagt

SEQ ID NO: 131236 - DNA, 22 bp, synthetic construct
  misc_feature 1..22: note = chemically synthesized
  source 1..22: mol_type = other DNA
atagcagtgatgcccagacatt

SEQ ID NO: 131237 - DNA, 22 bp, synthetic construct
  misc_feature 1..22: note = chemically synthesized
  source 1..22: mol_type = other DNA
tagcagtgatgcccagacattg

SEQ ID NO: 131238 - DNA, 22 bp, synthetic construct
  misc_feature 1..22: note = chemically synthesized
  source 1..22: mol_type = other DNA
ttttgcactggaatcacctgag

SEQ ID NO: 131239 - DNA, 22 bp, synthetic construct
  misc_feature 1..22: note = chemically synthesized
  source 1..22: mol_type = other DNA
tgcactggaatcacctgaggac

SEQ ID NO: 131240 - DNA, 22 bp, synthetic construct
  misc_feature 1..22: note = chemically synthesized
  source 1..22: mol_type = other DNA
gcactggaatcacctgaggacc

SEQ ID NO: 131241 - DNA, 22 bp, synthetic construct
  misc_feature 1..22: note = chemically synthesized
  source 1..22: mol_type = other DNA
cactggaatcacctgaggacct

SEQ ID NO: 131242 - DNA, 22 bp, synthetic construct
  misc_feature 1..22: note = chemically synthesized
  source 1..22: mol_type = other DNA
gaatcacctgaggacctgaaaa

SEQ ID NO: 131243 - DNA, 22 bp, synthetic construct
  misc_feature 1..22: note = chemically synthesized
  source 1..22: mol_type = other DNA
aggacctgaaaaaagcgaattt

SEQ ID NO: 131244 - DNA, 22 bp, synthetic construct
  misc_feature 1..22: note = chemically synthesized
  source 1..22: mol_type = other DNA
aaaaaagcgaatttgattcaga

SEQ ID NO: 131245 - DNA, 22 bp, synthetic construct
  misc_feature 1..22: note = chemically synthesized
  source 1..22: mol_type = other DNA
gattcagaatgttggaaggggc

SEQ ID NO: 131246 - DNA, 22 bp, synthetic construct
  misc_feature 1..22: note = chemically synthesized
  source 1..22: mol_type = other DNA
attcagaatgttggaaggggca

SEQ ID NO: 131247 - DNA, 22 bp, synthetic construct
  misc_feature 1..22: note = chemically synthesized
  source 1..22: mol_type = other DNA
agaatgttggaaggggcagaat

SEQ ID NO: 131248 - DNA, 22 bp, synthetic construct
  misc_feature 1..22: note = chemically synthesized
  source 1..22: mol_type = other DNA
gaaggggcagaatctgaggctg

SEQ ID NO: 131249 - DNA, 22 bp, synthetic construct
  misc_feature 1..22: note = chemically synthesized
  source 1..22: mol_type = other DNA
aggctgcatgcctaacaagccc

SEQ ID NO: 131250 - DNA, 22 bp, synthetic construct
  misc_feature 1..22: note = chemically synthesized
  source 1..22: mol_type = other DNA
catgcctaacaagcccgctgct

SEQ ID NO: 131251 - DNA, 22 bp, synthetic construct
  misc_feature 1..22: note = chemically synthesized
  source 1..22: mol_type = other DNA
acaagcccgctgcttgttagct

SEQ ID NO: 131252 - DNA, 22 bp, synthetic construct
  misc_feature 1..22: note = chemically synthesized
  source 1..22: mol_type = other DNA
cttgttagctgcgtctagtctg

SEQ ID NO: 131253 - DNA, 22 bp, synthetic construct
  misc_feature 1..22: note = chemically synthesized
  source 1..22: mol_type = other DNA
gttagctgcgtctagtctgtga

SEQ ID NO: 131254 - DNA, 22 bp, synthetic construct
  misc_feature 1..22: note = chemically synthesized
  source 1..22: mol_type = other DNA
ttagctgcgtctagtctgtgat

SEQ ID NO: 131255 - DNA, 22 bp, synthetic construct
  misc_feature 1..22: note = chemically synthesized
  source 1..22: mol_type = other DNA
gctgcgtctagtctgtgatcca

SEQ ID NO: 131256 - DNA, 22 bp, synthetic construct
  misc_feature 1..22: note = chemically synthesized
  source 1..22: mol_type = other DNA
cgtctagtctgtgatccacaac

SEQ ID NO: 131257 - DNA, 22 bp, synthetic construct
  misc_feature 1..22: note = chemically synthesized
  source 1..22: mol_type = other DNA
gtctgtgatccacaactctggt

SEQ ID NO: 131258 - DNA, 22 bp, synthetic construct
  misc_feature 1..22: note = chemically synthesized
  source 1..22: mol_type = other DNA
tgatccacaactctggtggcca

SEQ ID NO: 131259 - DNA, 22 bp, synthetic construct
  misc_feature 1..22: note = chemically synthesized
  source 1..22: mol_type = other DNA
tggtggccaagctcaagtaact

SEQ ID NO: 131260 - DNA, 22 bp, synthetic construct
  misc_feature 1..22: note = chemically synthesized
  source 1..22: mol_type = other DNA
gtggccaagctcaagtaactgt

SEQ ID NO: 131261 - DNA, 22 bp, synthetic construct
  misc_feature 1..22: note = chemically synthesized
  source 1..22: mol_type = other DNA
aagtaactgttagagtgacaaa

SEQ ID NO: 131262 - DNA, 22 bp, synthetic construct
  misc_feature 1..22: note = chemically synthesized
  source 1..22: mol_type = other DNA
ttagagtgacaaagccgttcat

SEQ ID NO: 131263 - DNA, 22 bp, synthetic construct
  misc_feature 1..22: note = chemically synthesized
  source 1..22: mol_type = other DNA
gagtgacaaagccgttcattgg

SEQ ID NO: 131264 - DNA, 22 bp, synthetic construct
  misc_feature 1..22: note = chemically synthesized
  source 1..22: mol_type = other DNA
attggtagtgatggtgatgcac

SEQ ID NO: 131265 - DNA, 22 bp, synthetic construct
  misc_feature 1..22: note = chemically synthesized
  source 1..22: mol_type = other DNA
gtagtgatggtgatgcacgcta

SEQ ID NO: 131266 - DNA, 22 bp, synthetic construct
  misc_feature 1..22: note = chemically synthesized
  source 1..22: mol_type = other DNA
tagtgcataaaacactgacatt

SEQ ID NO: 131267 - DNA, 22 bp, synthetic construct
  misc_feature 1..22: note = chemically synthesized
  source 1..22: mol_type = other DNA
acattcaatttccaaaaaaaat

SEQ ID NO: 131268 - DNA, 22 bp, synthetic construct
  misc_feature 1..22: note = chemically synthesized
  source 1..22: mol_type = other DNA
aatttccaaaaaaaatgagaaa

SEQ ID NO: 131269 - DNA, 22 bp, synthetic construct
  misc_feature 1..22: note = chemically synthesized
  source 1..22: mol_type = other DNA
ccaaaaaaaatgagaaaaactg

SEQ ID NO: 131270 - DNA, 22 bp, synthetic construct
  misc_feature 1..22: note = chemically synthesized
  source 1..22: mol_type = other DNA
caaaaaaaatgagaaaaactgc

SEQ ID NO: 131271 - DNA, 22 bp, synthetic construct
  misc_feature 1..22: note = chemically synthesized
  source 1..22: mol_type = other DNA
cattaactgaaaaaactgtctt

SEQ ID NO: 131272 - DNA, 22 bp, synthetic construct
  misc_feature 1..22: note = chemically synthesized
  source 1..22: mol_type = other DNA
actgaaaaaactgtcttcatca

SEQ ID NO: 131273 - DNA, 22 bp, synthetic construct
  misc_feature 1..22: note = chemically synthesized
  source 1..22: mol_type = other DNA
aaaaaactgtcttcatcataat

SEQ ID NO: 131274 - DNA, 22 bp, synthetic construct
  misc_feature 1..22: note = chemically synthesized
  source 1..22: mol_type = other DNA
tcttcatcataatcgtgaaatg

SEQ ID NO: 131275 - DNA, 22 bp, synthetic construct
  misc_feature 1..22: note = chemically synthesized
  source 1..22: mol_type = other DNA
catcataatcgtgaaatgtaaa

SEQ ID NO: 131276 - DNA, 22 bp, synthetic construct
  misc_feature 1..22: note = chemically synthesized
  source 1..22: mol_type = other DNA
atcataatcgtgaaatgtaaaa

SEQ ID NO: 131277 - DNA, 22 bp, synthetic construct
  misc_feature 1..22: note = chemically synthesized
  source 1..22: mol_type = other DNA
caacaatcatttccaaatggtc

SEQ ID NO: 131278 - DNA, 22 bp, synthetic construct
  misc_feature 1..22: note = chemically synthesized
  source 1..22: mol_type = other DNA
ccaaatggtcagtaatcacagc

SEQ ID NO: 131279 - DNA, 22 bp, synthetic construct
  misc_feature 1..22: note = chemically synthesized
  source 1..22: mol_type = other DNA
caaatggtcagtaatcacagca

SEQ ID NO: 131280 - DNA, 22 bp, synthetic construct
  misc_feature 1..22: note = chemically synthesized
  source 1..22: mol_type = other DNA
agccagattattatccatttat

SEQ ID NO: 131281 - DNA, 22 bp, synthetic construct
  misc_feature 1..22: note = chemically synthesized
  source 1..22: mol_type = other DNA
ttatccatttatgtatatttat

SEQ ID NO: 131282 - DNA, 22 bp, synthetic construct
  misc_feature 1..22: note = chemically synthesized
  source 1..22: mol_type = other DNA
tccatttatgtatatttatgtt

SEQ ID NO: 131283 - DNA, 22 bp, synthetic construct
  misc_feature 1..22: note = chemically synthesized
  source 1..22: mol_type = other DNA
atgtatatttatgttatgtgtt

SEQ ID NO: 131284 - DNA, 22 bp, synthetic construct
  misc_feature 1..22: note = chemically synthesized
  source 1..22: mol_type = other DNA
tgtatatttatgttatgtgttt

SEQ ID NO: 131285 - DNA, 22 bp, synthetic construct
  misc_feature 1..22: note = chemically synthesized
  source 1..22: mol_type = other DNA
atgttatgtgtttttgttatca

SEQ ID NO: 131286 - DNA, 22 bp, synthetic construct
  misc_feature 1..22: note = chemically synthesized
  source 1..22: mol_type = other DNA
tgttatgtgtttttgttatcac

SEQ ID NO: 131287 - DNA, 22 bp, synthetic construct
  misc_feature 1..22: note = chemically synthesized
  source 1..22: mol_type = other DNA
tgtgtttttgttatcactgttg

SEQ ID NO: 131288 - DNA, 22 bp, synthetic construct
  misc_feature 1..22: note = chemically synthesized
  source 1..22: mol_type = other DNA
ttgttatcactgttgttgcaaa

SEQ ID NO: 131289 - DNA, 22 bp, synthetic construct
  misc_feature 1..22: note = chemically synthesized
  source 1..22: mol_type = other DNA
tgttatcactgttgttgcaaat

SEQ ID NO: 131290 - DNA, 22 bp, synthetic construct
  misc_feature 1..22: note = chemically synthesized
  source 1..22: mol_type = other DNA
gttatcactgttgttgcaaata

SEQ ID NO: 131291 - DNA, 22 bp, synthetic construct
  misc_feature 1..22: note = chemically synthesized
  source 1..22: mol_type = other DNA
ttatcactgttgttgcaaatat

SEQ ID NO: 131292 - DNA, 22 bp, synthetic construct
  misc_feature 1..22: note = chemically synthesized
  source 1..22: mol_type = other DNA
tcactgttgttgcaaatattta

SEQ ID NO: 131293 - DNA, 22 bp, synthetic construct
  misc_feature 1..22: note = chemically synthesized
  source 1..22: mol_type = other DNA
ttgttgcaaatatttataagta

SEQ ID NO: 131294 - DNA, 22 bp, synthetic construct
  misc_feature 1..22: note = chemically synthesized
  source 1..22: mol_type = other DNA
ttgcaaatatttataagtaccc

SEQ ID NO: 131295 - DNA, 22 bp, synthetic construct
  misc_feature 1..22: note = chemically synthesized
  source 1..22: mol_type = other DNA
caaatatttataagtaccctca

SEQ ID NO: 131296 - DNA, 22 bp, synthetic construct
  misc_feature 1..22: note = chemically synthesized
  source 1..22: mol_type = other DNA
ataagtaccctcaaaatagttg

SEQ ID NO: 131297 - DNA, 22 bp, synthetic construct
  misc_feature 1..22: note = chemically synthesized
  source 1..22: mol_type = other DNA
taagtaccctcaaaatagttgc

SEQ ID NO: 131298 - DNA, 22 bp, synthetic construct
  misc_feature 1..22: note = chemically synthesized
  source 1..22: mol_type = other DNA
aaaatagttgcggataatatat

SEQ ID NO: 131299 - DNA, 22 bp, synthetic construct
  misc_feature 1..22: note = chemically synthesized
  source 1..22: mol_type = other DNA
cggataatatatttaaaattaa

SEQ ID NO: 131300 - DNA, 22 bp, synthetic construct
  misc_feature 1..22: note = chemically synthesized
  source 1..22: mol_type = other DNA
aaaattaatgaaaaatttttga

SEQ ID NO: 131301 - DNA, 22 bp, synthetic construct
  misc_feature 1..22: note = chemically synthesized
  source 1..22: mol_type = other DNA
aaattaatgaaaaatttttgaa

SEQ ID NO: 131302 - DNA, 22 bp, synthetic construct
  misc_feature 1..22: note = chemically synthesized
  source 1..22: mol_type = other DNA
atgaaaaatttttgaatttgag

SEQ ID NO: 131303 - DNA, 22 bp, synthetic construct
  misc_feature 1..22: note = chemically synthesized
  source 1..22: mol_type = other DNA
ttgaatttgagaaaaatcgaac

SEQ ID NO: 131304 - DNA, 22 bp, synthetic construct
  misc_feature 1..22: note = chemically synthesized
  source 1..22: mol_type = other DNA
tgaatttgagaaaaatcgaacc

SEQ ID NO: 131305 - DNA, 22 bp, synthetic construct
  misc_feature 1..22: note = chemically synthesized
  source 1..22: mol_type = other DNA
gaatttgagaaaaatcgaacca

SEQ ID NO: 131306 - DNA, 22 bp, synthetic construct
  misc_feature 1..22: note = chemically synthesized
  source 1..22: mol_type = other DNA
aatttgagaaaaatcgaaccat

SEQ ID NO: 131307 - DNA, 22 bp, synthetic construct
  misc_feature 1..22: note = chemically synthesized
  source 1..22: mol_type = other DNA
gagaaaaatcgaaccattaact

SEQ ID NO: 131308 - DNA, 22 bp, synthetic construct
  misc_feature 1..22: note = chemically synthesized
  source 1..22: mol_type = other DNA
agaaaaatcgaaccattaactc

SEQ ID NO: 131309 - DNA, 22 bp, synthetic construct
  misc_feature 1..22: note = chemically synthesized
  source 1..22: mol_type = other DNA
actcagtattttttctaattag

SEQ ID NO: 131310 - DNA, 22 bp, synthetic construct
  misc_feature 1..22: note = chemically synthesized
  source 1..22: mol_type = other DNA
agtattttttctaattagggaa

SEQ ID NO: 131311 - DNA, 22 bp, synthetic construct
  misc_feature 1..22: note = chemically synthesized
  source 1..22: mol_type = other DNA
tttctaattagggaaaaaacca

SEQ ID NO: 131312 - DNA, 22 bp, synthetic construct
  misc_feature 1..22: note = chemically synthesized
  source 1..22: mol_type = other DNA
ttctaattagggaaaaaaccat

SEQ ID NO: 131313 - DNA, 22 bp, synthetic construct
  misc_feature 1..22: note = chemically synthesized
  source 1..22: mol_type = other DNA
tctaattagggaaaaaaccata

SEQ ID NO: 131314 - DNA, 22 bp, synthetic construct
  misc_feature 1..22: note = chemically synthesized
  source 1..22: mol_type = other DNA
ctaattagggaaaaaaccatag

SEQ ID NO: 131315 - DNA, 22 bp, synthetic construct
  misc_feature 1..22: note = chemically synthesized
  source 1..22: mol_type = other DNA
taattagggaaaaaaccatagt

SEQ ID NO: 131316 - DNA, 22 bp, synthetic construct
  misc_feature 1..22: note = chemically synthesized
  source 1..22: mol_type = other DNA
attagggaaaaaaccatagtct

SEQ ID NO: 131317 - DNA, 22 bp, synthetic construct
  misc_feature 1..22: note = chemically synthesized
  source 1..22: mol_type = other DNA
gggaaaaaaccatagtctgtac

SEQ ID NO: 131318 - DNA, 22 bp, synthetic construct
  misc_feature 1..22: note = chemically synthesized
  source 1..22: mol_type = other DNA
tacatgctattcttcttcagga

SEQ ID NO: 131319 - DNA, 22 bp, synthetic construct
  misc_feature 1..22: note = chemically synthesized
  source 1..22: mol_type = other DNA
ttcttcttcaggaaaatagttg

SEQ ID NO: 131320 - DNA, 22 bp, synthetic construct
  misc_feature 1..22: note = chemically synthesized
  source 1..22: mol_type = other DNA
ttcttcaggaaaatagttgcag

SEQ ID NO: 131321 - DNA, 22 bp, synthetic construct
  misc_feature 1..22: note = chemically synthesized
  source 1..22: mol_type = other DNA
cttcaggaaaatagttgcagag

SEQ ID NO: 131322 - DNA, 22 bp, synthetic construct
  misc_feature 1..22: note = chemically synthesized
  source 1..22: mol_type = other DNA
ttcaggaaaatagttgcagagt

SEQ ID NO: 131323 - DNA, 22 bp, synthetic construct
  misc_feature 1..22: note = chemically synthesized
  source 1..22: mol_type = other DNA
caggaaaatagttgcagagtca

SEQ ID NO: 131324 - DNA, 22 bp, synthetic construct
  misc_feature 1..22: note = chemically synthesized
  source 1..22: mol_type = other DNA
aggaaaatagttgcagagtcaa

SEQ ID NO: 131325 - DNA, 22 bp, synthetic construct
  misc_feature 1..22: note = chemically synthesized
  source 1..22: mol_type = other DNA
cagagtcaaatttatcacacca

SEQ ID NO: 131326 - DNA, 22 bp, synthetic construct
  misc_feature 1..22: note = chemically synthesized
  source 1..22: mol_type = other DNA
atcacaccagttaatcatctcc

SEQ ID NO: 131327 - DNA, 22 bp, synthetic construct
  misc_feature 1..22: note = chemically synthesized
  source 1..22: mol_type = other DNA
tcacaccagttaatcatctcca

SEQ ID NO: 131328 - DNA, 22 bp, synthetic construct
  misc_feature 1..22: note = chemically synthesized
  source 1..22: mol_type = other DNA
atcatctccaagcaggaagatt

SEQ ID NO: 131329 - DNA, 22 bp, synthetic construct
  misc_feature 1..22: note = chemically synthesized
  source 1..22: mol_type = other DNA
caagcaggaagattggaggctc

SEQ ID NO: 131330 - DNA, 22 bp, synthetic construct
  misc_feature 1..22: note = chemically synthesized
  source 1..22: mol_type = other DNA
gaggctcctggtttcaaggttt

SEQ ID NO: 131331 - DNA, 22 bp, synthetic construct
  misc_feature 1..22: note = chemically synthesized
  source 1..22: mol_type = other DNA
ctggtttcaaggtttcaagaaa

SEQ ID NO: 131332 - DNA, 22 bp, synthetic construct
  misc_feature 1..22: note = chemically synthesized
  source 1..22: mol_type = other DNA
gtttcaaggtttcaagaaatct

SEQ ID NO: 131333 - DNA, 22 bp, synthetic construct
  misc_feature 1..22: note = chemically synthesized
  source 1..22: mol_type = other DNA
caaggtttcaagaaatctgatc

SEQ ID NO: 131334 - DNA, 22 bp, synthetic construct
  misc_feature 1..22: note = chemically synthesized
  source 1..22: mol_type = other DNA
aaggtttcaagaaatctgatct

SEQ ID NO: 131335 - DNA, 22 bp, synthetic construct
  misc_feature 1..22: note = chemically synthesized
  source 1..22: mol_type = other DNA
caagaaatctgatctttaccgg

SEQ ID NO: 131336 - DNA, 22 bp, synthetic construct
  misc_feature 1..22: note = chemically synthesized
  source 1..22: mol_type = other DNA
aagaaatctgatctttaccggt

SEQ ID NO: 131337 - DNA, 22 bp, synthetic construct
  misc_feature 1..22: note = chemically synthesized
  source 1..22: mol_type = other DNA
atctttaccggtggatacacta

SEQ ID NO: 131338 - DNA, 22 bp, synthetic construct
  misc_feature 1..22: note = chemically synthesized
  source 1..22: mol_type = other DNA
taccggtggatacactatgtgg

SEQ ID NO: 131339 - DNA, 22 bp, synthetic construct
  misc_feature 1..22: note = chemically synthesized
  source 1..22: mol_type = other DNA
accggtggatacactatgtggc

SEQ ID NO: 131340 - DNA, 22 bp, synthetic construct
  misc_feature 1..22: note = chemically synthesized
  source 1..22: mol_type = other DNA
ccggtggatacactatgtggcc

SEQ ID NO: 131341 - DNA, 22 bp, synthetic construct
  misc_feature 1..22: note = chemically synthesized
  source 1..22: mol_type = other DNA
tgtggcccaatattactgcagc

SEQ ID NO: 131342 - DNA, 22 bp, synthetic construct
  misc_feature 1..22: note = chemically synthesized
  source 1..22: mol_type = other DNA
ctgcagccccttttttgctgac

SEQ ID NO: 131343 - DNA, 22 bp, synthetic construct
  misc_feature 1..22: note = chemically synthesized
  source 1..22: mol_type = other DNA
cagccccttttttgctgactgg

SEQ ID NO: 131344 - DNA, 22 bp, synthetic construct
  misc_feature 1..22: note = chemically synthesized
  source 1..22: mol_type = other DNA
ttttgctgactggctttccagg

SEQ ID NO: 131345 - DNA, 22 bp, synthetic construct
  misc_feature 1..22: note = chemically synthesized
  source 1..22: mol_type = other DNA
tttgctgactggctttccaggg

SEQ ID NO: 131346 - DNA, 22 bp, synthetic construct
  misc_feature 1..22: note = chemically synthesized
  source 1..22: mol_type = other DNA
ttgctgactggctttccagggc

SEQ ID NO: 131347 - DNA, 22 bp, synthetic construct
  misc_feature 1..22: note = chemically synthesized
  source 1..22: mol_type = other DNA
tgctgactggctttccagggct

SEQ ID NO: 131348 - DNA, 22 bp, synthetic construct
  misc_feature 1..22: note = chemically synthesized
  source 1..22: mol_type = other DNA
gctgactggctttccagggctg

SEQ ID NO: 131349 - DNA, 22 bp, synthetic construct
  misc_feature 1..22: note = chemically synthesized
  source 1..22: mol_type = other DNA
ctgactggctttccagggctgg

SEQ ID NO: 131350 - DNA, 22 bp, synthetic construct
  misc_feature 1..22: note = chemically synthesized
  source 1..22: mol_type = other DNA
actggctttccagggctggagg

SEQ ID NO: 131351 - DNA, 22 bp, synthetic construct
  misc_feature 1..22: note = chemically synthesized
  source 1..22: mol_type = other DNA
gctttccagggctggaggcagc

SEQ ID NO: 131352 - DNA, 22 bp, synthetic construct
  misc_feature 1..22: note = chemically synthesized
  source 1..22: mol_type = other DNA
tccagggctggaggcagctcat

SEQ ID NO: 131353 - DNA, 22 bp, synthetic construct
  misc_feature 1..22: note = chemically synthesized
  source 1..22: mol_type = other DNA
ccagggctggaggcagctcatc

SEQ ID NO: 131354 - DNA, 22 bp, synthetic construct
  misc_feature 1..22: note = chemically synthesized
  source 1..22: mol_type = other DNA
cagggctggaggcagctcatca

SEQ ID NO: 131355 - DNA, 22 bp, synthetic construct
  misc_feature 1..22: note = chemically synthesized
  source 1..22: mol_type = other DNA
gaggcagctcatcactggatct

SEQ ID NO: 131356 - DNA, 22 bp, synthetic construct
  misc_feature 1..22: note = chemically synthesized
  source 1..22: mol_type = other DNA
atcactggatctccatcccctt

SEQ ID NO: 131357 - DNA, 22 bp, synthetic construct
  misc_feature 1..22: note = chemically synthesized
  source 1..22: mol_type = other DNA
gatctccatccccttctttgct

SEQ ID NO: 131358 - DNA, 22 bp, synthetic construct
  misc_feature 1..22: note = chemically synthesized
  source 1..22: mol_type = other DNA
catccccttctttgctgtttat

SEQ ID NO: 131359 - DNA, 22 bp, synthetic construct
  misc_feature 1..22: note = chemically synthesized
  source 1..22: mol_type = other DNA
ctttgctgtttatgtgtgcatc

SEQ ID NO: 131360 - DNA, 22 bp, synthetic construct
  misc_feature 1..22: note = chemically synthesized
  source 1..22: mol_type = other DNA
tttgctgtttatgtgtgcatcc

SEQ ID NO: 131361 - DNA, 22 bp, synthetic construct
  misc_feature 1..22: note = chemically synthesized
  source 1..22: mol_type = other DNA
tgctgtttatgtgtgcatcctt

SEQ ID NO: 131362 - DNA, 22 bp, synthetic construct
  misc_feature 1..22: note = chemically synthesized
  source 1..22: mol_type = other DNA
gctgtttatgtgtgcatccttc

SEQ ID NO: 131363 - DNA, 22 bp, synthetic construct
  misc_feature 1..22: note = chemically synthesized
  source 1..22: mol_type = other DNA
ctgtttatgtgtgcatccttct

SEQ ID NO: 131364 - DNA, 22 bp, synthetic construct
  misc_feature 1..22: note = chemically synthesized
  source 1..22: mol_type = other DNA
tttatgtgtgcatccttctggg

SEQ ID NO: 131365 - DNA, 22 bp, synthetic construct
  misc_feature 1..22: note = chemically synthesized
  source 1..22: mol_type = other DNA
atgtgtgcatccttctgggcaa

SEQ ID NO: 131366 - DNA, 22 bp, synthetic construct
  misc_feature 1..22: note = chemically synthesized
  source 1..22: mol_type = other DNA
tgtgtgcatccttctgggcaat

SEQ ID NO: 131367 - DNA, 22 bp, synthetic construct
  misc_feature 1..22: note = chemically synthesized
  source 1..22: mol_type = other DNA
ctgggcaatggcatgctcctct

SEQ ID NO: 131368 - DNA, 22 bp, synthetic construct
  misc_feature 1..22: note = chemically synthesized
  source 1..22: mol_type = other DNA
tgggcaatggcatgctcctcta

SEQ ID NO: 131369 - DNA, 22 bp, synthetic construct
  misc_feature 1..22: note = chemically synthesized
  source 1..22: mol_type = other DNA
ggcaatggcatgctcctctacc

SEQ ID NO: 131370 - DNA, 22 bp, synthetic construct
  misc_feature 1..22: note = chemically synthesized
  source 1..22: mol_type = other DNA
ctctacctcatcaagcatgacc

SEQ ID NO: 131371 - DNA, 22 bp, synthetic construct
  misc_feature 1..22: note = chemically synthesized
  source 1..22: mol_type = other DNA
tacctcatcaagcatgaccaca

SEQ ID NO: 131372 - DNA, 22 bp, synthetic construct
  misc_feature 1..22: note = chemically synthesized
  source 1..22: mol_type = other DNA
cctcatcaagcatgaccacagt

SEQ ID NO: 131373 - DNA, 22 bp, synthetic construct
  misc_feature 1..22: note = chemically synthesized
  source 1..22: mol_type = other DNA
atcaagcatgaccacagtcttc

SEQ ID NO: 131374 - DNA, 22 bp, synthetic construct
  misc_feature 1..22: note = chemically synthesized
  source 1..22: mol_type = other DNA
catgagcccatgtactacttcc

SEQ ID NO: 131375 - DNA, 22 bp, synthetic construct
  misc_feature 1..22: note = chemically synthesized
  source 1..22: mol_type = other DNA
atgagcccatgtactacttcct

SEQ ID NO: 131376 - DNA, 22 bp, synthetic construct
  misc_feature 1..22: note = chemically synthesized
  source 1..22: mol_type = other DNA
cttcctcaccatgctggcaggc

SEQ ID NO: 131377 - DNA, 22 bp, synthetic construct
  misc_feature 1..22: note = chemically synthesized
  source 1..22: mol_type = other DNA
cctcaccatgctggcaggcaca

SEQ ID NO: 131378 - DNA, 22 bp, synthetic construct
  misc_feature 1..22: note = chemically synthesized
  source 1..22: mol_type = other DNA
ctcaccatgctggcaggcacag

SEQ ID NO: 131379 - DNA, 22 bp, synthetic construct
  misc_feature 1..22: note = chemically synthesized
  source 1..22: mol_type = other DNA
accatgctggcaggcacagacc

SEQ ID NO: 131380 - DNA, 22 bp, synthetic construct
  misc_feature 1..22: note = chemically synthesized
  source 1..22: mol_type = other DNA
gcaggcacagacctcatggtga

SEQ ID NO: 131381 - DNA, 22 bp, synthetic construct
  misc_feature 1..22: note = chemically synthesized
  source 1..22: mol_type = other DNA
atggtgacattgaccacgatgc

SEQ ID NO: 131382 - DNA, 22 bp, synthetic construct
  misc_feature 1..22: note = chemically synthesized
  source 1..22: mol_type = other DNA
accacgatgcctactgtaatgg

SEQ ID NO: 131383 - DNA, 22 bp, synthetic construct
  misc_feature 1..22: note = chemically synthesized
  source 1..22: mol_type = other DNA
ctgtaatgggcatcctatgggt

SEQ ID NO: 131384 - DNA, 22 bp, synthetic construct
  misc_feature 1..22: note = chemically synthesized
  source 1..22: mol_type = other DNA
taatgggcatcctatgggtgaa

SEQ ID NO: 131385 - DNA, 22 bp, synthetic construct
  misc_feature 1..22: note = chemically synthesized
  source 1..22: mol_type = other DNA
tgggtgaatcacagggagatta

SEQ ID NO: 131386 - DNA, 22 bp, synthetic construct
  misc_feature 1..22: note = chemically synthesized
  source 1..22: mol_type = other DNA
gcagtgtgggctgcttcctaca

SEQ ID NO: 131387 - DNA, 22 bp, synthetic construct
  misc_feature 1..22: note = chemically synthesized
  source 1..22: mol_type = other DNA
cttcctacaggcttactttatt

SEQ ID NO: 131388 - DNA, 22 bp, synthetic construct
  misc_feature 1..22: note = chemically synthesized
  source 1..22: mol_type = other DNA
cctacaggcttactttattcac

SEQ ID NO: 131389 - DNA, 22 bp, synthetic construct
  misc_feature 1..22: note = chemically synthesized
  source 1..22: mol_type = other DNA
ctacaggcttactttattcact

SEQ ID NO: 131390 - DNA, 22 bp, synthetic construct
  misc_feature 1..22: note = chemically synthesized
  source 1..22: mol_type = other DNA
caggcttactttattcactccc

SEQ ID NO: 131391 - DNA, 22 bp, synthetic construct
  misc_feature 1..22: note = chemically synthesized
  source 1..22: mol_type = other DNA
actttattcactccctttctgt

SEQ ID NO: 131392 - DNA, 22 bp, synthetic construct
  misc_feature 1..22: note = chemically synthesized
  source 1..22: mol_type = other DNA
ctttattcactccctttctgtt

SEQ ID NO: 131393 - DNA, 22 bp, synthetic construct
  misc_feature 1..22: note = chemically synthesized
  source 1..22: mol_type = other DNA
tattcactccctttctgttgtg

SEQ ID NO: 131394 - DNA, 22 bp, synthetic construct
  misc_feature 1..22: note = chemically synthesized
  source 1..22: mol_type = other DNA
attcactccctttctgttgtgg

SEQ ID NO: 131395 - DNA, 22 bp, synthetic construct
  misc_feature 1..22: note = chemically synthesized
  source 1..22: mol_type = other DNA
ttcactccctttctgttgtgga

SEQ ID NO: 131396 - DNA, 22 bp, synthetic construct
  misc_feature 1..22: note = chemically synthesized
  source 1..22: mol_type = other DNA
actccctttctgttgtggaatc

SEQ ID NO: 131397 - DNA, 22 bp, synthetic construct
  misc_feature 1..22: note = chemically synthesized
  source 1..22: mol_type = other DNA
cctttctgttgtggaatcaggt

SEQ ID NO: 131398 - DNA, 22 bp, synthetic construct
  misc_feature 1..22: note = chemically synthesized
  source 1..22: mol_type = other DNA
tctgttgtggaatcaggttccc

SEQ ID NO: 131399 - DNA, 22 bp, synthetic construct
  misc_feature 1..22: note = chemically synthesized
  source 1..22: mol_type = other DNA
ctgttgtggaatcaggttccct

SEQ ID NO: 131400 - DNA, 22 bp, synthetic construct
  misc_feature 1..22: note = chemically synthesized
  source 1..22: mol_type = other DNA
tgttgtggaatcaggttccctc

SEQ ID NO: 131401 - DNA, 22 bp, synthetic construct
  misc_feature 1..22: note = chemically synthesized
  source 1..22: mol_type = other DNA
ttgtggaatcaggttccctcct

SEQ ID NO: 131402 - DNA, 22 bp, synthetic construct
  misc_feature 1..22: note = chemically synthesized
  source 1..22: mol_type = other DNA
tggaatcaggttccctcctggc

SEQ ID NO: 131403 - DNA, 22 bp, synthetic construct
  misc_feature 1..22: note = chemically synthesized
  source 1..22: mol_type = other DNA
cctcctggcaatggcatatgat

SEQ ID NO: 131404 - DNA, 22 bp, synthetic construct
  misc_feature 1..22: note = chemically synthesized
  source 1..22: mol_type = other DNA
ctggcaatggcatatgattgtt

SEQ ID NO: 131405 - DNA, 22 bp, synthetic construct
  misc_feature 1..22: note = chemically synthesized
  source 1..22: mol_type = other DNA
gcaatggcatatgattgtttca

SEQ ID NO: 131406 - DNA, 22 bp, synthetic construct
  misc_feature 1..22: note = chemically synthesized
  source 1..22: mol_type = other DNA
tttcattgccatccgcaatcct

SEQ ID NO: 131407 - DNA, 22 bp, synthetic construct
  misc_feature 1..22: note = chemically synthesized
  source 1..22: mol_type = other DNA
cattgccatccgcaatcctttg

SEQ ID NO: 131408 - DNA, 22 bp, synthetic construct
  misc_feature 1..22: note = chemically synthesized
  source 1..22: mol_type = other DNA
attgccatccgcaatcctttga

SEQ ID NO: 131409 - DNA, 22 bp, synthetic construct
  misc_feature 1..22: note = chemically synthesized
  source 1..22: mol_type = other DNA
ccatccgcaatcctttgagata

SEQ ID NO: 131410 - DNA, 22 bp, synthetic construct
  misc_feature 1..22: note = chemically synthesized
  source 1..22: mol_type = other DNA
tgagatatgcttccattctcac

SEQ ID NO: 131411 - DNA, 22 bp, synthetic construct
  misc_feature 1..22: note = chemically synthesized
  source 1..22: mol_type = other DNA
gagatatgcttccattctcacc

SEQ ID NO: 131412 - DNA, 22 bp, synthetic construct
  misc_feature 1..22: note = chemically synthesized
  source 1..22: mol_type = other DNA
agatatgcttccattctcacca

SEQ ID NO: 131413 - DNA, 22 bp, synthetic construct
  misc_feature 1..22: note = chemically synthesized
  source 1..22: mol_type = other DNA
ccattctcaccaatactagagt

SEQ ID NO: 131414 - DNA, 22 bp, synthetic construct
  misc_feature 1..22: note = chemically synthesized
  source 1..22: mol_type = other DNA
cattctcaccaatactagagtc

SEQ ID NO: 131415 - DNA, 22 bp, synthetic construct
  misc_feature 1..22: note = chemically synthesized
  source 1..22: mol_type = other DNA
tcaccaatactagagtcatagc

SEQ ID NO: 131416 - DNA, 22 bp, synthetic construct
  misc_feature 1..22: note = chemically synthesized
  source 1..22: mol_type = other DNA
accaatactagagtcatagcgt

SEQ ID NO: 131417 - DNA, 22 bp, synthetic construct
  misc_feature 1..22: note = chemically synthesized
  source 1..22: mol_type = other DNA
gagtcatagcgttaggagtggg

SEQ ID NO: 131418 - DNA, 22 bp, synthetic construct
  misc_feature 1..22: note = chemically synthesized
  source 1..22: mol_type = other DNA
ggagtgggagtgtttctaaggg

SEQ ID NO: 131419 - DNA, 22 bp, synthetic construct
  misc_feature 1..22: note = chemically synthesized
  source 1..22: mol_type = other DNA
ctaaggggttttgtatccatcc

SEQ ID NO: 131420 - DNA, 22 bp, synthetic construct
  misc_feature 1..22: note = chemically synthesized
  source 1..22: mol_type = other DNA
taaggggttttgtatccatcct

SEQ ID NO: 131421 - DNA, 22 bp, synthetic construct
  misc_feature 1..22: note = chemically synthesized
  source 1..22: mol_type = other DNA
aggggttttgtatccatcctgc

SEQ ID NO: 131422 - DNA, 22 bp, synthetic construct
  misc_feature 1..22: note = chemically synthesized
  source 1..22: mol_type = other DNA
tgtatccatcctgcctgtaatt

SEQ ID NO: 131423 - DNA, 22 bp, synthetic construct
  misc_feature 1..22: note = chemically synthesized
  source 1..22: mol_type = other DNA
gtatccatcctgcctgtaattt

SEQ ID NO: 131424 - DNA, 22 bp, synthetic construct
  misc_feature 1..22: note = chemically synthesized
  source 1..22: mol_type = other DNA
tatccatcctgcctgtaatttt

SEQ ID NO: 131425 - DNA, 22 bp, synthetic construct
  misc_feature 1..22: note = chemically synthesized
  source 1..22: mol_type = other DNA
cctgtaattttgcgtctttttt

SEQ ID NO: 131426 - DNA, 22 bp, synthetic construct
  misc_feature 1..22: note = chemically synthesized
  source 1..22: mol_type = other DNA
taattttgcgtcttttttcatt

SEQ ID NO: 131427 - DNA, 22 bp, synthetic construct
  misc_feature 1..22: note = chemically synthesized
  source 1..22: mol_type = other DNA
tgcgtcttttttcattttcata

SEQ ID NO: 131428 - DNA, 22 bp, synthetic construct
  misc_feature 1..22: note = chemically synthesized
  source 1..22: mol_type = other DNA
gcgtcttttttcattttcatat

SEQ ID NO: 131429 - DNA, 22 bp, synthetic construct
  misc_feature 1..22: note = chemically synthesized
  source 1..22: mol_type = other DNA
cgtcttttttcattttcatatt

SEQ ID NO: 131430 - DNA, 22 bp, synthetic construct
  misc_feature 1..22: note = chemically synthesized
  source 1..22: mol_type = other DNA
ttttcattttcatattgcaaat

SEQ ID NO: 131431 - DNA, 22 bp, synthetic construct
  misc_feature 1..22: note = chemically synthesized
  source 1..22: mol_type = other DNA
tttcattttcatattgcaaatc

SEQ ID NO: 131432 - DNA, 22 bp, synthetic construct
  misc_feature 1..22: note = chemically synthesized
  source 1..22: mol_type = other DNA
ttcattttcatattgcaaatct

SEQ ID NO: 131433 - DNA, 22 bp, synthetic construct
  misc_feature 1..22: note = chemically synthesized
  source 1..22: mol_type = other DNA
tcattttcatattgcaaatctc

SEQ ID NO: 131434 - DNA, 22 bp, synthetic construct
  misc_feature 1..22: note = chemically synthesized
  source 1..22: mol_type = other DNA
cattttcatattgcaaatctca

SEQ ID NO: 131435 - DNA, 22 bp, synthetic construct
  misc_feature 1..22: note = chemically synthesized
  source 1..22: mol_type = other DNA
attttcatattgcaaatctcat

SEQ ID NO: 131436 - DNA, 22 bp, synthetic construct
  misc_feature 1..22: note = chemically synthesized
  source 1..22: mol_type = other DNA
tcatattgcaaatctcatgtta

SEQ ID NO: 131437 - DNA, 22 bp, synthetic construct
  misc_feature 1..22: note = chemically synthesized
  source 1..22: mol_type = other DNA
catattgcaaatctcatgttat

SEQ ID NO: 131438 - DNA, 22 bp, synthetic construct
  misc_feature 1..22: note = chemically synthesized
  source 1..22: mol_type = other DNA
atattgcaaatctcatgttatc

SEQ ID NO: 131439 - DNA, 22 bp, synthetic construct
  misc_feature 1..22: note = chemically synthesized
  source 1..22: mol_type = other DNA
caaatctcatgttatcacacgt

SEQ ID NO: 131440 - DNA, 22 bp, synthetic construct
  misc_feature 1..22: note = chemically synthesized
  source 1..22: mol_type = other DNA
atgttatcacacgtgctttctg

SEQ ID NO: 131441 - DNA, 22 bp, synthetic construct
  misc_feature 1..22: note = chemically synthesized
  source 1..22: mol_type = other DNA
tcacacgtgctttctgcctcca

SEQ ID NO: 131442 - DNA, 22 bp, synthetic construct
  misc_feature 1..22: note = chemically synthesized
  source 1..22: mol_type = other DNA
tctgcctccaccaagaaatcat

SEQ ID NO: 131443 - DNA, 22 bp, synthetic construct
  misc_feature 1..22: note = chemically synthesized
  source 1..22: mol_type = other DNA
ctgcctccaccaagaaatcatg

SEQ ID NO: 131444 - DNA, 22 bp, synthetic construct
  misc_feature 1..22: note = chemically synthesized
  source 1..22: mol_type = other DNA
tgcctccaccaagaaatcatga

SEQ ID NO: 131445 - DNA, 22 bp, synthetic construct
  misc_feature 1..22: note = chemically synthesized
  source 1..22: mol_type = other DNA
cctccaccaagaaatcatgaga

SEQ ID NO: 131446 - DNA, 22 bp, synthetic construct
  misc_feature 1..22: note = chemically synthesized
  source 1..22: mol_type = other DNA
caccaagaaatcatgagactgg

SEQ ID NO: 131447 - DNA, 22 bp, synthetic construct
  misc_feature 1..22: note = chemically synthesized
  source 1..22: mol_type = other DNA
gcttgtgctgacataactttca

SEQ ID NO: 131448 - DNA, 22 bp, synthetic construct
  misc_feature 1..22: note = chemically synthesized
  source 1..22: mol_type = other DNA
gtgctgacataactttcaatag

SEQ ID NO: 131449 - DNA, 22 bp, synthetic construct
  misc_feature 1..22: note = chemically synthesized
  source 1..22: mol_type = other DNA
tgctgacataactttcaataga

SEQ ID NO: 131450 - DNA, 22 bp, synthetic construct
  misc_feature 1..22: note = chemically synthesized
  source 1..22: mol_type = other DNA
acataactttcaatagacttta

SEQ ID NO: 131451 - DNA, 22 bp, synthetic construct
  misc_feature 1..22: note = chemically synthesized
  source 1..22: mol_type = other DNA
tcaatagactttaccctgtaat

SEQ ID NO: 131452 - DNA, 22 bp, synthetic construct
  misc_feature 1..22: note = chemically synthesized
  source 1..22: mol_type = other DNA
caatagactttaccctgtaatt

SEQ ID NO: 131453 - DNA, 22 bp, synthetic construct
  misc_feature 1..22: note = chemically synthesized
  source 1..22: mol_type = other DNA
aatagactttaccctgtaattt

SEQ ID NO: 131454 - DNA, 22 bp, synthetic construct
  misc_feature 1..22: note = chemically synthesized
  source 1..22: mol_type = other DNA
taccctgtaattttgatctctt

SEQ ID NO: 131455 - DNA, 22 bp, synthetic construct
  misc_feature 1..22: note = chemically synthesized
  source 1..22: mol_type = other DNA
accctgtaattttgatctcttt

SEQ ID NO: 131456 - DNA, 22 bp, synthetic construct
  misc_feature 1..22: note = chemically synthesized
  source 1..22: mol_type = other DNA
ccctgtaattttgatctcttta

SEQ ID NO: 131457 - DNA, 22 bp, synthetic construct
  misc_feature 1..22: note = chemically synthesized
  source 1..22: mol_type = other DNA
taattttgatctctttaacaat

SEQ ID NO: 131458 - DNA, 22 bp, synthetic construct
  misc_feature 1..22: note = chemically synthesized
  source 1..22: mol_type = other DNA
tgatctctttaacaatcttcct

SEQ ID NO: 131459 - DNA, 22 bp, synthetic construct
  misc_feature 1..22: note = chemically synthesized
  source 1..22: mol_type = other DNA
gatctctttaacaatcttccta

SEQ ID NO: 131460 - DNA, 22 bp, synthetic construct
  misc_feature 1..22: note = chemically synthesized
  source 1..22: mol_type = other DNA
atctctttaacaatcttcctag

SEQ ID NO: 131461 - DNA, 22 bp, synthetic construct
  misc_feature 1..22: note = chemically synthesized
  source 1..22: mol_type = other DNA
tttaacaatcttcctagactgt

SEQ ID NO: 131462 - DNA, 22 bp, synthetic construct
  misc_feature 1..22: note = chemically synthesized
  source 1..22: mol_type = other DNA
taacaatcttcctagactgtct

SEQ ID NO: 131463 - DNA, 22 bp, synthetic construct
  misc_feature 1..22: note = chemically synthesized
  source 1..22: mol_type = other DNA
aacaatcttcctagactgtctg

SEQ ID NO: 131464 - DNA, 22 bp, synthetic construct
  misc_feature 1..22: note = chemically synthesized
  source 1..22: mol_type = other DNA
acaatcttcctagactgtctga

SEQ ID NO: 131465 - DNA, 22 bp, synthetic construct
  misc_feature 1..22: note = chemically synthesized
  source 1..22: mol_type = other DNA
cctagactgtctgatcatcctc

SEQ ID NO: 131466 - DNA, 22 bp, synthetic construct
  misc_feature 1..22: note = chemically synthesized
  source 1..22: mol_type = other DNA
ctagactgtctgatcatcctct

SEQ ID NO: 131467 - DNA, 22 bp, synthetic construct
  misc_feature 1..22: note = chemically synthesized
  source 1..22: mol_type = other DNA
gactgtctgatcatcctcttct

SEQ ID NO: 131468 - DNA, 22 bp, synthetic construct
  misc_feature 1..22: note = chemically synthesized
  source 1..22: mol_type = other DNA
tctgatcatcctcttctcctat

SEQ ID NO: 131469 - DNA, 22 bp, synthetic construct
  misc_feature 1..22: note = chemically synthesized
  source 1..22: mol_type = other DNA
atcatcctcttctcctatattc

SEQ ID NO: 131470 - DNA, 22 bp, synthetic construct
  misc_feature 1..22: note = chemically synthesized
  source 1..22: mol_type = other DNA
ttctcctatattctaattctta

SEQ ID NO: 131471 - DNA, 22 bp, synthetic construct
  misc_feature 1..22: note = chemically synthesized
  source 1..22: mol_type = other DNA
ctcctatattctaattcttaat

SEQ ID NO: 131472 - DNA, 22 bp, synthetic construct
  misc_feature 1..22: note = chemically synthesized
  source 1..22: mol_type = other DNA
tcctatattctaattcttaata

SEQ ID NO: 131473 - DNA, 22 bp, synthetic construct
  misc_feature 1..22: note = chemically synthesized
  source 1..22: mol_type = other DNA
ctatattctaattcttaatact

SEQ ID NO: 131474 - DNA, 22 bp, synthetic construct
  misc_feature 1..22: note = chemically synthesized
  source 1..22: mol_type = other DNA
tattctaattcttaatactgtc

SEQ ID NO: 131475 - DNA, 22 bp, synthetic construct
  misc_feature 1..22: note = chemically synthesized
  source 1..22: mol_type = other DNA
taattcttaatactgtcatagg

SEQ ID NO: 131476 - DNA, 22 bp, synthetic construct
  misc_feature 1..22: note = chemically synthesized
  source 1..22: mol_type = other DNA
attcttaatactgtcataggca

SEQ ID NO: 131477 - DNA, 22 bp, synthetic construct
  misc_feature 1..22: note = chemically synthesized
  source 1..22: mol_type = other DNA
ttaatactgtcataggcattgc

SEQ ID NO: 131478 - DNA, 22 bp, synthetic construct
  misc_feature 1..22: note = chemically synthesized
  source 1..22: mol_type = other DNA
aatactgtcataggcattgctt

SEQ ID NO: 131479 - DNA, 22 bp, synthetic construct
  misc_feature 1..22: note = chemically synthesized
  source 1..22: mol_type = other DNA
atactgtcataggcattgcttc

SEQ ID NO: 131480 - DNA, 22 bp, synthetic construct
  misc_feature 1..22: note = chemically synthesized
  source 1..22: mol_type = other DNA
tcataggcattgcttctggtga

SEQ ID NO: 131481 - DNA, 22 bp, synthetic construct
  misc_feature 1..22: note = chemically synthesized
  source 1..22: mol_type = other DNA
cttctggtgaagagagagccaa

SEQ ID NO: 131482 - DNA, 22 bp, synthetic construct
  misc_feature 1..22: note = chemically synthesized
  source 1..22: mol_type = other DNA
ctggtgaagagagagccaaagc

SEQ ID NO: 131483 - DNA, 22 bp, synthetic construct
  misc_feature 1..22: note = chemically synthesized
  source 1..22: mol_type = other DNA
tggtgaagagagagccaaagcc

SEQ ID NO: 131484 - DNA, 22 bp, synthetic construct
  misc_feature 1..22: note = chemically synthesized
  source 1..22: mol_type = other DNA
gtgaagagagagccaaagccct

SEQ ID NO: 131485 - DNA, 22 bp, synthetic construct
  misc_feature 1..22: note = chemically synthesized
  source 1..22: mol_type = other DNA
aatacctgtatctcccacatta

SEQ ID NO: 131486 - DNA, 22 bp, synthetic construct
  misc_feature 1..22: note = chemically synthesized
  source 1..22: mol_type = other DNA
tatctcccacattagttgtgtt

SEQ ID NO: 131487 - DNA, 22 bp, synthetic construct
  misc_feature 1..22: note = chemically synthesized
  source 1..22: mol_type = other DNA
ccacattagttgtgttcttatc

SEQ ID NO: 131488 - DNA, 22 bp, synthetic construct
  misc_feature 1..22: note = chemically synthesized
  source 1..22: mol_type = other DNA
gttgtgttcttatcttctatgt

SEQ ID NO: 131489 - DNA, 22 bp, synthetic construct
  misc_feature 1..22: note = chemically synthesized
  source 1..22: mol_type = other DNA
tgttcttatcttctatgttaca

SEQ ID NO: 131490 - DNA, 22 bp, synthetic construct
  misc_feature 1..22: note = chemically synthesized
  source 1..22: mol_type = other DNA
ttatcttctatgttacagtgat

SEQ ID NO: 131491 - DNA, 22 bp, synthetic construct
  misc_feature 1..22: note = chemically synthesized
  source 1..22: mol_type = other DNA
atcttctatgttacagtgatgg

SEQ ID NO: 131492 - DNA, 22 bp, synthetic construct
  misc_feature 1..22: note = chemically synthesized
  source 1..22: mol_type = other DNA
tcttctatgttacagtgatggg

SEQ ID NO: 131493 - DNA, 22 bp, synthetic construct
  misc_feature 1..22: note = chemically synthesized
  source 1..22: mol_type = other DNA
ctatgttacagtgatgggtttg

SEQ ID NO: 131494 - DNA, 22 bp, synthetic construct
  misc_feature 1..22: note = chemically synthesized
  source 1..22: mol_type = other DNA
tatgttacagtgatgggtttga

SEQ ID NO: 131495 - DNA, 22 bp, synthetic construct
  misc_feature 1..22: note = chemically synthesized
  source 1..22: mol_type = other DNA
tgttacagtgatgggtttgaca

SEQ ID NO: 131496 - DNA, 22 bp, synthetic construct
  misc_feature 1..22: note = chemically synthesized
  source 1..22: mol_type = other DNA
cagtgatgggtttgacattcat

SEQ ID NO: 131497 - DNA, 22 bp, synthetic construct
  misc_feature 1..22: note = chemically synthesized
  source 1..22: mol_type = other DNA
gacattcatttacagatttggg

SEQ ID NO: 131498 - DNA, 22 bp, synthetic construct
  misc_feature 1..22: note = chemically synthesized
  source 1..22: mol_type = other DNA
acattcatttacagatttggga

SEQ ID NO: 131499 - DNA, 22 bp, synthetic construct
  misc_feature 1..22: note = chemically synthesized
  source 1..22: mol_type = other DNA
atttacagatttgggaagaatg

SEQ ID NO: 131500 - DNA, 22 bp, synthetic construct
  misc_feature 1..22: note = chemically synthesized
  source 1..22: mol_type = other DNA
acagatttgggaagaatgtgcc

SEQ ID NO: 131501 - DNA, 22 bp, synthetic construct
  misc_feature 1..22: note = chemically synthesized
  source 1..22: mol_type = other DNA
cagatttgggaagaatgtgcca

SEQ ID NO: 131502 - DNA, 22 bp, synthetic construct
  misc_feature 1..22: note = chemically synthesized
  source 1..22: mol_type = other DNA
gggaagaatgtgccagaggttg

SEQ ID NO: 131503 - DNA, 22 bp, synthetic construct
  misc_feature 1..22: note = chemically synthesized
  source 1..22: mol_type = other DNA
ggaagaatgtgccagaggttgt

SEQ ID NO: 131504 - DNA, 22 bp, synthetic construct
  misc_feature 1..22: note = chemically synthesized
  source 1..22: mol_type = other DNA
tccacattatcatgagttacat

SEQ ID NO: 131505 - DNA, 22 bp, synthetic construct
  misc_feature 1..22: note = chemically synthesized
  source 1..22: mol_type = other DNA
tcatgagttacatctacttcct

SEQ ID NO: 131506 - DNA, 22 bp, synthetic construct
  misc_feature 1..22: note = chemically synthesized
  source 1..22: mol_type = other DNA
catctacttcctctttcctcct

SEQ ID NO: 131507 - DNA, 22 bp, synthetic construct
  misc_feature 1..22: note = chemically synthesized
  source 1..22: mol_type = other DNA
cttcctctttcctcctttaatg

SEQ ID NO: 131508 - DNA, 22 bp, synthetic construct
  misc_feature 1..22: note = chemically synthesized
  source 1..22: mol_type = other DNA
cctctttcctcctttaatgaac

SEQ ID NO: 131509 - DNA, 22 bp, synthetic construct
  misc_feature 1..22: note = chemically synthesized
  source 1..22: mol_type = other DNA
ctctttcctcctttaatgaacc

SEQ ID NO: 131510 - DNA, 22 bp, synthetic construct
  misc_feature 1..22: note = chemically synthesized
  source 1..22: mol_type = other DNA
tttcctcctttaatgaaccctg

SEQ ID NO: 131511 - DNA, 22 bp, synthetic construct
  misc_feature 1..22: note = chemically synthesized
  source 1..22: mol_type = other DNA
tcctcctttaatgaaccctgtc

SEQ ID NO: 131512 - DNA, 22 bp, synthetic construct
  misc_feature 1..22: note = chemically synthesized
  source 1..22: mol_type = other DNA
cctcctttaatgaaccctgtca

SEQ ID NO: 131513 - DNA, 22 bp, synthetic construct
  misc_feature 1..22: note = chemically synthesized
  source 1..22: mol_type = other DNA
ctcctttaatgaaccctgtcat

SEQ ID NO: 131514 - DNA, 22 bp, synthetic construct
  misc_feature 1..22: note = chemically synthesized
  source 1..22: mol_type = other DNA
ctttaatgaaccctgtcatcta

SEQ ID NO: 131515 - DNA, 22 bp, synthetic construct
  misc_feature 1..22: note = chemically synthesized
  source 1..22: mol_type = other DNA
taatgaaccctgtcatctacag

SEQ ID NO: 131516 - DNA, 22 bp, synthetic construct
  misc_feature 1..22: note = chemically synthesized
  source 1..22: mol_type = other DNA
aatgaaccctgtcatctacagc

SEQ ID NO: 131517 - DNA, 22 bp, synthetic construct
  misc_feature 1..22: note = chemically synthesized
  source 1..22: mol_type = other DNA
atgaaccctgtcatctacagca

SEQ ID NO: 131518 - DNA, 22 bp, synthetic construct
  misc_feature 1..22: note = chemically synthesized
  source 1..22: mol_type = other DNA
tcatctacagcatcaaaaccaa

SEQ ID NO: 131519 - DNA, 22 bp, synthetic construct
  misc_feature 1..22: note = chemically synthesized
  source 1..22: mol_type = other DNA
cagcatcaaaaccaagcaaata

SEQ ID NO: 131520 - DNA, 22 bp, synthetic construct
  misc_feature 1..22: note = chemically synthesized
  source 1..22: mol_type = other DNA
tccgccttttatctaaacatag

SEQ ID NO: 131521 - DNA, 22 bp, synthetic construct
  misc_feature 1..22: note = chemically synthesized
  source 1..22: mol_type = other DNA
ttatctaaacataggtttagta

SEQ ID NO: 131522 - DNA, 22 bp, synthetic construct
  misc_feature 1..22: note = chemically synthesized
  source 1..22: mol_type = other DNA
tatctaaacataggtttagtag

SEQ ID NO: 131523 - DNA, 22 bp, synthetic construct
  misc_feature 1..22: note = chemically synthesized
  source 1..22: mol_type = other DNA
atctaaacataggtttagtagt

SEQ ID NO: 131524 - DNA, 22 bp, synthetic construct
  misc_feature 1..22: note = chemically synthesized
  source 1..22: mol_type = other DNA
tctaaacataggtttagtagtt

SEQ ID NO: 131525 - DNA, 22 bp, synthetic construct
  misc_feature 1..22: note = chemically synthesized
  source 1..22: mol_type = other DNA
aacataggtttagtagttaaac

SEQ ID NO: 131526 - DNA, 22 bp, synthetic construct
  misc_feature 1..22: note = chemically synthesized
  source 1..22: mol_type = other DNA
agtagttaaactcggatctgga

SEQ ID NO: 131527 - DNA, 22 bp, synthetic construct
  misc_feature 1..22: note = chemically synthesized
  source 1..22: mol_type = other DNA
gtagttaaactcggatctggag

SEQ ID NO: 131528 - DNA, 22 bp, synthetic construct
  misc_feature 1..22: note = chemically synthesized
  source 1..22: mol_type = other DNA
aactcggatctggagaatcaga

SEQ ID NO: 131529 - DNA, 22 bp, synthetic construct
  misc_feature 1..22: note = chemically synthesized
  source 1..22: mol_type = other DNA
ggatctggagaatcagacacag

SEQ ID NO: 131530 - DNA, 22 bp, synthetic construct
  misc_feature 1..22: note = chemically synthesized
  source 1..22: mol_type = other DNA
gagaatcagacacagacataaa

SEQ ID NO: 131531 - DNA, 22 bp, synthetic construct
  misc_feature 1..22: note = chemically synthesized
  source 1..22: mol_type = other DNA
gagttctttcttagcaaagagc

SEQ ID NO: 131532 - DNA, 22 bp, synthetic construct
  misc_feature 1..22: note = chemically synthesized
  source 1..22: mol_type = other DNA
tttcttagcaaagagcaagggt

SEQ ID NO: 131533 - DNA, 22 bp, synthetic construct
  misc_feature 1..22: note = chemically synthesized
  source 1..22: mol_type = other DNA
tcttagcaaagagcaagggtat

SEQ ID NO: 131534 - DNA, 22 bp, synthetic construct
  misc_feature 1..22: note = chemically synthesized
  source 1..22: mol_type = other DNA
cttagcaaagagcaagggtata

SEQ ID NO: 131535 - DNA, 22 bp, synthetic construct
  misc_feature 1..22: note = chemically synthesized
  source 1..22: mol_type = other DNA
ttagcaaagagcaagggtatac

SEQ ID NO: 131536 - DNA, 22 bp, synthetic construct
  misc_feature 1..22: note = chemically synthesized
  source 1..22: mol_type = other DNA
agcaaagagcaagggtatactg

SEQ ID NO: 131537 - DNA, 22 bp, synthetic construct
  misc_feature 1..22: note = chemically synthesized
  source 1..22: mol_type = other DNA
gcaaagagcaagggtatactgg

SEQ ID NO: 131538 - DNA, 22 bp, synthetic construct
  misc_feature 1..22: note = chemically synthesized
  source 1..22: mol_type = other DNA
gaagacaatgttgtcactcaca

SEQ ID NO: 131539 - DNA, 22 bp, synthetic construct
  misc_feature 1..22: note = chemically synthesized
  source 1..22: mol_type = other DNA
tcactcacaaggacttaagtac

SEQ ID NO: 131540 - DNA, 22 bp, synthetic construct
  misc_feature 1..22: note = chemically synthesized
  source 1..22: mol_type = other DNA
acaaggacttaagtactttacc

SEQ ID NO: 131541 - DNA, 22 bp, synthetic construct
  misc_feature 1..22: note = chemically synthesized
  source 1..22: mol_type = other DNA
aagtactttaccatagggttgg

SEQ ID NO: 131542 - DNA, 22 bp, synthetic construct
  misc_feature 1..22: note = chemically synthesized
  source 1..22: mol_type = other DNA
agtactttaccatagggttggg

SEQ ID NO: 131543 - DNA, 22 bp, synthetic construct
  misc_feature 1..22: note = chemically synthesized
  source 1..22: mol_type = other DNA
taccatagggttgggggcatat

SEQ ID NO: 131544 - DNA, 22 bp, synthetic construct
  misc_feature 1..22: note = chemically synthesized
  source 1..22: mol_type = other DNA
accatagggttgggggcatatc

SEQ ID NO: 131545 - DNA, 22 bp, synthetic construct
  misc_feature 1..22: note = chemically synthesized
  source 1..22: mol_type = other DNA
ccatagggttgggggcatatct

SEQ ID NO: 131546 - DNA, 22 bp, synthetic construct
  misc_feature 1..22: note = chemically synthesized
  source 1..22: mol_type = other DNA
ggggcatatcttaggagaagtc

SEQ ID NO: 131547 - DNA, 22 bp, synthetic construct
  misc_feature 1..22: note = chemically synthesized
  source 1..22: mol_type = other DNA
aggagaagtctggtgacagaac

SEQ ID NO: 131548 - DNA, 22 bp, synthetic construct
  misc_feature 1..22: note = chemically synthesized
  source 1..22: mol_type = other DNA
ggagaagtctggtgacagaaca

SEQ ID NO: 131549 - DNA, 22 bp, synthetic construct
  misc_feature 1..22: note = chemically synthesized
  source 1..22: mol_type = other DNA
gtgacagaacactgaatagacc

SEQ ID NO: 131550 - DNA, 22 bp, synthetic construct
  misc_feature 1..22: note = chemically synthesized
  source 1..22: mol_type = other DNA
aatagaccatatggaactgaaa

SEQ ID NO: 131551 - DNA, 22 bp, synthetic construct
  misc_feature 1..22: note = chemically synthesized
  source 1..22: mol_type = other DNA
aaaaagtctatatttaaattct

SEQ ID NO: 131552 - DNA, 22 bp, synthetic construct
  misc_feature 1..22: note = chemically synthesized
  source 1..22: mol_type = other DNA
tatttaaattcttctttcaaat

SEQ ID NO: 131553 - DNA, 22 bp, synthetic construct
  misc_feature 1..22: note = chemically synthesized
  source 1..22: mol_type = other DNA
aaattcttctttcaaatgcacc

SEQ ID NO: 131554 - DNA, 22 bp, synthetic construct
  misc_feature 1..22: note = chemically synthesized
  source 1..22: mol_type = other DNA
aattcttctttcaaatgcacct

SEQ ID NO: 131555 - DNA, 22 bp, synthetic construct
  misc_feature 1..22: note = chemically synthesized
  source 1..22: mol_type = other DNA
ttctttcaaatgcacctgaaat

SEQ ID NO: 131556 - DNA, 22 bp, synthetic construct
  misc_feature 1..22: note = chemically synthesized
  source 1..22: mol_type = other DNA
ctttcaaatgcacctgaaatta

SEQ ID NO: 131557 - DNA, 22 bp, synthetic construct
  misc_feature 1..22: note = chemically synthesized
  source 1..22: mol_type = other DNA
tttcaaatgcacctgaaattag

SEQ ID NO: 131558 - DNA, 22 bp, synthetic construct
  misc_feature 1..22: note = chemically synthesized
  source 1..22: mol_type = other DNA
tcaaatgcacctgaaattagcc

SEQ ID NO: 131559 - DNA, 22 bp, synthetic construct
  misc_feature 1..22: note = chemically synthesized
  source 1..22: mol_type = other DNA
caaatgcacctgaaattagcca

SEQ ID NO: 131560 - DNA, 22 bp, synthetic construct
  misc_feature 1..22: note = chemically synthesized
  source 1..22: mol_type = other DNA
aaatgcacctgaaattagccac

SEQ ID NO: 131561 - DNA, 22 bp, synthetic construct
  misc_feature 1..22: note = chemically synthesized
  source 1..22: mol_type = other DNA
aaattagccacctcagtgaaat

SEQ ID NO: 131562 - DNA, 22 bp, synthetic construct
  misc_feature 1..22: note = chemically synthesized
  source 1..22: mol_type = other DNA
gccacctcagtgaaatttgagg

SEQ ID NO: 131563 - DNA, 22 bp, synthetic construct
  misc_feature 1..22: note = chemically synthesized
  source 1..22: mol_type = other DNA
agtgaaatttgaggaaaaggca

SEQ ID NO: 131564 - DNA, 22 bp, synthetic construct
  misc_feature 1..22: note = chemically synthesized
  source 1..22: mol_type = other DNA
gaggaaaaggcagaacatataa

SEQ ID NO: 131565 - DNA, 22 bp, synthetic construct
  misc_feature 1..22: note = chemically synthesized
  source 1..22: mol_type = other DNA
aggaaaaggcagaacatataat

SEQ ID NO: 131566 - DNA, 22 bp, synthetic construct
  misc_feature 1..22: note = chemically synthesized
  source 1..22: mol_type = other DNA
tatgaaaaacttttgcctcagt

SEQ ID NO: 131567 - DNA, 22 bp, synthetic construct
  misc_feature 1..22: note = chemically synthesized
  source 1..22: mol_type = other DNA
tgaaaaacttttgcctcagtgt

SEQ ID NO: 131568 - DNA, 22 bp, synthetic construct
  misc_feature 1..22: note = chemically synthesized
  source 1..22: mol_type = other DNA
ttgcctcagtgtgcacatttgt

SEQ ID NO: 131569 - DNA, 22 bp, synthetic construct
  misc_feature 1..22: note = chemically synthesized
  source 1..22: mol_type = other DNA
tgcctcagtgtgcacatttgtg

SEQ ID NO: 131570 - DNA, 22 bp, synthetic construct
  misc_feature 1..22: note = chemically synthesized
  source 1..22: mol_type = other DNA
gcctcagtgtgcacatttgtgc

SEQ ID NO: 131571 - DNA, 22 bp, synthetic construct
  misc_feature 1..22: note = chemically synthesized
  source 1..22: mol_type = other DNA
cctcagtgtgcacatttgtgca

SEQ ID NO: 131572 - DNA, 22 bp, synthetic construct
  misc_feature 1..22: note = chemically synthesized
  source 1..22: mol_type = other DNA
agtgtgcacatttgtgcataca

SEQ ID NO: 131573 - DNA, 22 bp, synthetic construct
  misc_feature 1..22: note = chemically synthesized
  source 1..22: mol_type = other DNA
gtgcatacatgtttatgtgttt

SEQ ID NO: 131574 - DNA, 22 bp, synthetic construct
  misc_feature 1..22: note = chemically synthesized
  source 1..22: mol_type = other DNA
tgcatacatgtttatgtgtttg

SEQ ID NO: 131575 - DNA, 22 bp, synthetic construct
  misc_feature 1..22: note = chemically synthesized
  source 1..22: mol_type = other DNA
atgtgtttgcataggctaatgc

SEQ ID NO: 131576 - DNA, 22 bp, synthetic construct
  misc_feature 1..22: note = chemically synthesized
  source 1..22: mol_type = other DNA
tgtgtttgcataggctaatgca

SEQ ID NO: 131577 - DNA, 22 bp, synthetic construct
  misc_feature 1..22: note = chemically synthesized
  source 1..22: mol_type = other DNA
gcataggctaatgcacacaagt

SEQ ID NO: 131578 - DNA, 22 bp, synthetic construct
  misc_feature 1..22: note = chemically synthesized
  source 1..22: mol_type = other DNA
cataggctaatgcacacaagtg

SEQ ID NO: 131579 - DNA, 22 bp, synthetic construct
  misc_feature 1..22: note = chemically synthesized
  source 1..22: mol_type = other DNA
atgcacacaagtgtaaaaaaaa

SEQ ID NO: 131580 - DNA, 22 bp, synthetic construct
  misc_feature 1..22: note = chemically synthesized
  source 1..22: mol_type = other DNA
atcatcattctctagaaataaa

SEQ ID NO: 131581 - DNA, 22 bp, synthetic construct
  misc_feature 1..22: note = chemically synthesized
  source 1..22: mol_type = other DNA
tctagaaataaattcttattta

SEQ ID NO: 131582 - DNA, 22 bp, synthetic construct
  misc_feature 1..22: note = chemically synthesized
  source 1..22: mol_type = other DNA
tagaaataaattcttatttaaa

SEQ ID NO: 131583 - DNA, 22 bp, synthetic construct
  misc_feature 1..22: note = chemically synthesized
  source 1..22: mol_type = other DNA
gaaataaattcttatttaaaat

SEQ ID NO: 131584 - DNA, 22 bp, synthetic construct
  misc_feature 1..22: note = chemically synthesized
  source 1..22: mol_type = other DNA
ttatttaaaattttcattattc

SEQ ID NO: 131585 - DNA, 22 bp, synthetic construct
  misc_feature 1..22: note = chemically synthesized
  source 1..22: mol_type = other DNA
atttaaaattttcattattctc

SEQ ID NO: 131586 - DNA, 22 bp, synthetic construct
  misc_feature 1..22: note = chemically synthesized
  source 1..22: mol_type = other DNA
tttaaaattttcattattctca

SEQ ID NO: 131587 - DNA, 22 bp, synthetic construct
  misc_feature 1..22: note = chemically synthesized
  source 1..22: mol_type = other DNA
aaaattttcattattctcatgg

SEQ ID NO: 131588 - DNA, 22 bp, synthetic construct
  misc_feature 1..22: note = chemically synthesized
  source 1..22: mol_type = other DNA
aaattttcattattctcatggc

SEQ ID NO: 131589 - DNA, 22 bp, synthetic construct
  misc_feature 1..22: note = chemically synthesized
  source 1..22: mol_type = other DNA
tcattattctcatggcaaatat

SEQ ID NO: 131590 - DNA, 22 bp, synthetic construct
  misc_feature 1..22: note = chemically synthesized
  source 1..22: mol_type = other DNA
cattattctcatggcaaatata

SEQ ID NO: 131591 - DNA, 22 bp, synthetic construct
  misc_feature 1..22: note = chemically synthesized
  source 1..22: mol_type = other DNA
attattctcatggcaaatatag

SEQ ID NO: 131592 - DNA, 22 bp, synthetic construct
  misc_feature 1..22: note = chemically synthesized
  source 1..22: mol_type = other DNA
ttctcatggcaaatatagtgat

SEQ ID NO: 131593 - DNA, 22 bp, synthetic construct
  misc_feature 1..22: note = chemically synthesized
  source 1..22: mol_type = other DNA
tcatggcaaatatagtgataag

SEQ ID NO: 131594 - DNA, 22 bp, synthetic construct
  misc_feature 1..22: note = chemically synthesized
  source 1..22: mol_type = other DNA
atggcaaatatagtgataagaa

SEQ ID NO: 131595 - DNA, 22 bp, synthetic construct
  misc_feature 1..22: note = chemically synthesized
  source 1..22: mol_type = other DNA
acattttaaatttacttttaaa

SEQ ID NO: 131596 - DNA, 22 bp, synthetic construct
  misc_feature 1..22: note = chemically synthesized
  source 1..22: mol_type = other DNA
taaatttacttttaaataagta

SEQ ID NO: 131597 - DNA, 22 bp, synthetic construct
  misc_feature 1..22: note = chemically synthesized
  source 1..22: mol_type = other DNA
aaatttacttttaaataagtaa

SEQ ID NO: 131598 - DNA, 22 bp, synthetic construct
  misc_feature 1..22: note = chemically synthesized
  source 1..22: mol_type = other DNA
aatttacttttaaataagtaag

SEQ ID NO: 131599 - DNA, 22 bp, synthetic construct
  misc_feature 1..22: note = chemically synthesized
  source 1..22: mol_type = other DNA
acttttaaataagtaagtgttg

SEQ ID NO: 131600 - DNA, 22 bp, synthetic construct
  misc_feature 1..22: note = chemically synthesized
  source 1..22: mol_type = other DNA
cttttaaataagtaagtgttgg

SEQ ID NO: 131601 - DNA, 22 bp, synthetic construct
  misc_feature 1..22: note = chemically synthesized
  source 1..22: mol_type = other DNA
ttaaataagtaagtgttggtta

SEQ ID NO: 131602 - DNA, 22 bp, synthetic construct
  misc_feature 1..22: note = chemically synthesized
  source 1..22: mol_type = other DNA
taaataagtaagtgttggttat

SEQ ID NO: 131603 - DNA, 22 bp, synthetic construct
  misc_feature 1..22: note = chemically synthesized
  source 1..22: mol_type = other DNA
aaataagtaagtgttggttatc

SEQ ID NO: 131604 - DNA, 22 bp, synthetic construct
  misc_feature 1..22: note = chemically synthesized
  source 1..22: mol_type = other DNA
aataagtaagtgttggttatct

SEQ ID NO: 131605 - DNA, 22 bp, synthetic construct
  misc_feature 1..22: note = chemically synthesized
  source 1..22: mol_type = other DNA
gttatcttttaactgtcctcta

SEQ ID NO: 131606 - DNA, 22 bp, synthetic construct
  misc_feature 1..22: note = chemically synthesized
  source 1..22: mol_type = other DNA
tcttttaactgtcctctaccct

SEQ ID NO: 131607 - DNA, 22 bp, synthetic construct
  misc_feature 1..22: note = chemically synthesized
  source 1..22: mol_type = other DNA
ttaactgtcctctaccctgagt

SEQ ID NO: 131608 - DNA, 22 bp, synthetic construct
  misc_feature 1..22: note = chemically synthesized
  source 1..22: mol_type = other DNA
taactgtcctctaccctgagtt

SEQ ID NO: 131609 - DNA, 22 bp, synthetic construct
  misc_feature 1..22: note = chemically synthesized
  source 1..22: mol_type = other DNA
aactgtcctctaccctgagtta

SEQ ID NO: 131610 - DNA, 22 bp, synthetic construct
  misc_feature 1..22: note = chemically synthesized
  source 1..22: mol_type = other DNA
actgtcctctaccctgagttag

SEQ ID NO: 131611 - DNA, 22 bp, synthetic construct
  misc_feature 1..22: note = chemically synthesized
  source 1..22: mol_type = other DNA
tcctctaccctgagttagggta

SEQ ID NO: 131612 - DNA, 22 bp, synthetic construct
  misc_feature 1..22: note = chemically synthesized
  source 1..22: mol_type = other DNA
taccctgagttagggtactctc

SEQ ID NO: 131613 - DNA, 22 bp, synthetic construct
  misc_feature 1..22: note = chemically synthesized
  source 1..22: mol_type = other DNA
ccctgagttagggtactctcta

SEQ ID NO: 131614 - DNA, 22 bp, synthetic construct
  misc_feature 1..22: note = chemically synthesized
  source 1..22: mol_type = other DNA
agttagggtactctctagggcc

SEQ ID NO: 131615 - DNA, 22 bp, synthetic construct
  misc_feature 1..22: note = chemically synthesized
  source 1..22: mol_type = other DNA
gggtactctctagggccatgat

SEQ ID NO: 131616 - DNA, 22 bp, synthetic construct
  misc_feature 1..22: note = chemically synthesized
  source 1..22: mol_type = other DNA
tctagggccatgatttgcattt

SEQ ID NO: 131617 - DNA, 22 bp, synthetic construct
  misc_feature 1..22: note = chemically synthesized
  source 1..22: mol_type = other DNA
tagggccatgatttgcatttaa

SEQ ID NO: 131618 - DNA, 22 bp, synthetic construct
  misc_feature 1..22: note = chemically synthesized
  source 1..22: mol_type = other DNA
gggccatgatttgcatttaata

SEQ ID NO: 131619 - DNA, 22 bp, synthetic construct
  misc_feature 1..22: note = chemically synthesized
  source 1..22: mol_type = other DNA
gcatttaatattttctaaatac

SEQ ID NO: 131620 - DNA, 22 bp, synthetic construct
  misc_feature 1..22: note = chemically synthesized
  source 1..22: mol_type = other DNA
catttaatattttctaaataca

SEQ ID NO: 131621 - DNA, 22 bp, synthetic construct
  misc_feature 1..22: note = chemically synthesized
  source 1..22: mol_type = other DNA
aatattttctaaatacagtcgt

SEQ ID NO: 131622 - DNA, 22 bp, synthetic construct
  misc_feature 1..22: note = chemically synthesized
  source 1..22: mol_type = other DNA
atattttctaaatacagtcgta

SEQ ID NO: 131623 - DNA, 22 bp, synthetic construct
  misc_feature 1..22: note = chemically synthesized
  source 1..22: mol_type = other DNA
tctaaatacagtcgtaagtcac

SEQ ID NO: 131624 - DNA, 22 bp, synthetic construct
  misc_feature 1..22: note = chemically synthesized
  source 1..22: mol_type = other DNA
ctaaatacagtcgtaagtcact

SEQ ID NO: 131625 - DNA, 22 bp, synthetic construct
  misc_feature 1..22: note = chemically synthesized
  source 1..22: mol_type = other DNA
taaatacagtcgtaagtcactt

SEQ ID NO: 131626 - DNA, 22 bp, synthetic construct
  misc_feature 1..22: note = chemically synthesized
  source 1..22: mol_type = other DNA
aatacagtcgtaagtcacttac

SEQ ID NO: 131627 - DNA, 22 bp, synthetic construct
  misc_feature 1..22: note = chemically synthesized
  source 1..22: mol_type = other DNA
acagagtatttcaataagagct

SEQ ID NO: 131628 - DNA, 22 bp, synthetic construct
  misc_feature 1..22: note = chemically synthesized
  source 1..22: mol_type = other DNA
cagagtatttcaataagagctt

SEQ ID NO: 131629 - DNA, 22 bp, synthetic construct
  misc_feature 1..22: note = chemically synthesized
  source 1..22: mol_type = other DNA
caataagagctttttaattttc

SEQ ID NO: 131630 - DNA, 22 bp, synthetic construct
  misc_feature 1..22: note = chemically synthesized
  source 1..22: mol_type = other DNA
aataagagctttttaattttca

SEQ ID NO: 131631 - DNA, 22 bp, synthetic construct
  misc_feature 1..22: note = chemically synthesized
  source 1..22: mol_type = other DNA
tttaattttcaatacattcctt

SEQ ID NO: 131632 - DNA, 22 bp, synthetic construct
  misc_feature 1..22: note = chemically synthesized
  source 1..22: mol_type = other DNA
ttaattttcaatacattccttg

SEQ ID NO: 131633 - DNA, 22 bp, synthetic construct
  misc_feature 1..22: note = chemically synthesized
  source 1..22: mol_type = other DNA
taattttcaatacattccttgc

SEQ ID NO: 131634 - DNA, 22 bp, synthetic construct
  misc_feature 1..22: note = chemically synthesized
  source 1..22: mol_type = other DNA
aattttcaatacattccttgca

SEQ ID NO: 131635 - DNA, 22 bp, synthetic construct
  misc_feature 1..22: note = chemically synthesized
  source 1..22: mol_type = other DNA
attttcaatacattccttgcag

SEQ ID NO: 131636 - DNA, 22 bp, synthetic construct
  misc_feature 1..22: note = chemically synthesized
  source 1..22: mol_type = other DNA
tcaatacattccttgcaggatg

SEQ ID NO: 131637 - DNA, 22 bp, synthetic construct
  misc_feature 1..22: note = chemically synthesized
  source 1..22: mol_type = other DNA
caatacattccttgcaggatgt

SEQ ID NO: 131638 - DNA, 22 bp, synthetic construct
  misc_feature 1..22: note = chemically synthesized
  source 1..22: mol_type = other DNA
aatacattccttgcaggatgtc

SEQ ID NO: 131639 - DNA, 22 bp, synthetic construct
  misc_feature 1..22: note = chemically synthesized
  source 1..22: mol_type = other DNA
cttgcaggatgtctggatttta

SEQ ID NO: 131640 - DNA, 22 bp, synthetic construct
  misc_feature 1..22: note = chemically synthesized
  source 1..22: mol_type = other DNA
gcaggatgtctggattttataa

SEQ ID NO: 131641 - DNA, 22 bp, synthetic construct
  misc_feature 1..22: note = chemically synthesized
  source 1..22: mol_type = other DNA
caggatgtctggattttataaa

SEQ ID NO: 131642 - DNA, 22 bp, synthetic construct
  misc_feature 1..22: note = chemically synthesized
  source 1..22: mol_type = other DNA
gattttataaaagtgtatttct

SEQ ID NO: 131643 - DNA, 22 bp, synthetic construct
  misc_feature 1..22: note = chemically synthesized
  source 1..22: mol_type = other DNA
tataaaagtgtatttctttacc

SEQ ID NO: 131644 - DNA, 22 bp, synthetic construct
  misc_feature 1..22: note = chemically synthesized
  source 1..22: mol_type = other DNA
ataaaagtgtatttctttacct

SEQ ID NO: 131645 - DNA, 22 bp, synthetic construct
  misc_feature 1..22: note = chemically synthesized
  source 1..22: mol_type = other DNA
taaaagtgtatttctttacctc

SEQ ID NO: 131646 - DNA, 22 bp, synthetic construct
  misc_feature 1..22: note = chemically synthesized
  source 1..22: mol_type = other DNA
ctttacctcattcttctataaa

SEQ ID NO: 131647 - DNA, 22 bp, synthetic construct
  misc_feature 1..22: note = chemically synthesized
  source 1..22: mol_type = other DNA
tttacctcattcttctataaat

SEQ ID NO: 131648 - DNA, 22 bp, synthetic construct
  misc_feature 1..22: note = chemically synthesized
  source 1..22: mol_type = other DNA
tacctcattcttctataaatat

SEQ ID NO: 131649 - DNA, 22 bp, synthetic construct
  misc_feature 1..22: note = chemically synthesized
  source 1..22: mol_type = other DNA
acctcattcttctataaatatt

SEQ ID NO: 131650 - DNA, 22 bp, synthetic construct
  misc_feature 1..22: note = chemically synthesized
  source 1..22: mol_type = other DNA
cctcattcttctataaatattc

SEQ ID NO: 131651 - DNA, 22 bp, synthetic construct
  misc_feature 1..22: note = chemically synthesized
  source 1..22: mol_type = other DNA
attcttctataaatattctttt

SEQ ID NO: 131652 - DNA, 22 bp, synthetic construct
  misc_feature 1..22: note = chemically synthesized
  source 1..22: mol_type = other DNA
ttctataaatattcttttgccc

SEQ ID NO: 131653 - DNA, 22 bp, synthetic construct
  misc_feature 1..22: note = chemically synthesized
  source 1..22: mol_type = other DNA
ctataaatattcttttgcccaa

SEQ ID NO: 131654 - DNA, 22 bp, synthetic construct
  misc_feature 1..22: note = chemically synthesized
  source 1..22: mol_type = other DNA
tataaatattcttttgcccaaa

SEQ ID NO: 131655 - DNA, 22 bp, synthetic construct
  misc_feature 1..22: note = chemically synthesized
  source 1..22: mol_type = other DNA
taaatattcttttgcccaaaaa

SEQ ID NO: 131656 - DNA, 22 bp, synthetic construct
  misc_feature 1..22: note = chemically synthesized
  source 1..22: mol_type = other DNA
ttttgcccaaaaaaatcttaga

SEQ ID NO: 131657 - DNA, 22 bp, synthetic construct
  misc_feature 1..22: note = chemically synthesized
  source 1..22: mol_type = other DNA
ttgcccaaaaaaatcttagaag

SEQ ID NO: 131658 - DNA, 22 bp, synthetic construct
  misc_feature 1..22: note = chemically synthesized
  source 1..22: mol_type = other DNA
tgcccaaaaaaatcttagaagg

SEQ ID NO: 131659 - DNA, 22 bp, synthetic construct
  misc_feature 1..22: note = chemically synthesized
  source 1..22: mol_type = other DNA
gcccaaaaaaatcttagaagga

SEQ ID NO: 131660 - DNA, 22 bp, synthetic construct
  misc_feature 1..22: note = chemically synthesized
  source 1..22: mol_type = other DNA
cccaaaaaaatcttagaaggaa

SEQ ID NO: 131661 - DNA, 22 bp, synthetic construct
  misc_feature 1..22: note = chemically synthesized
  source 1..22: mol_type = other DNA
agaaggaaaaacctagacaagc

SEQ ID NO: 131662 - DNA, 22 bp, synthetic construct
  misc_feature 1..22: note = chemically synthesized
  source 1..22: mol_type = other DNA
gaaggaaaaacctagacaagct

SEQ ID NO: 131663 - DNA, 22 bp, synthetic construct
  misc_feature 1..22: note = chemically synthesized
  source 1..22: mol_type = other DNA
gacaagcttcttgtcagctcgt

SEQ ID NO: 131664 - DNA, 22 bp, synthetic construct
  misc_feature 1..22: note = chemically synthesized
  source 1..22: mol_type = other DNA
cttgtcagctcgtaaaaaagta

SEQ ID NO: 131665 - DNA, 22 bp, synthetic construct
  misc_feature 1..22: note = chemically synthesized
  source 1..22: mol_type = other DNA
ttgtcagctcgtaaaaaagtaa

SEQ ID NO: 131666 - DNA, 22 bp, synthetic construct
  misc_feature 1..22: note = chemically synthesized
  source 1..22: mol_type = other DNA
gtcagctcgtaaaaaagtaaaa

SEQ ID NO: 131667 - DNA, 22 bp, synthetic construct
  misc_feature 1..22: note = chemically synthesized
  source 1..22: mol_type = other DNA
tcagctcgtaaaaaagtaaaaa

SEQ ID NO: 131668 - DNA, 22 bp, synthetic construct
  misc_feature 1..22: note = chemically synthesized
  source 1..22: mol_type = other DNA
gtaaaaaagtaaaaagtgagtt

SEQ ID NO: 131669 - DNA, 22 bp, synthetic construct
  misc_feature 1..22: note = chemically synthesized
  source 1..22: mol_type = other DNA
ttaagagtatgtttgctcttca

SEQ ID NO: 131670 - DNA, 22 bp, synthetic construct
  misc_feature 1..22: note = chemically synthesized
  source 1..22: mol_type = other DNA
taagagtatgtttgctcttcag

SEQ ID NO: 131671 - DNA, 22 bp, synthetic construct
  misc_feature 1..22: note = chemically synthesized
  source 1..22: mol_type = other DNA
aagagtatgtttgctcttcaga

SEQ ID NO: 131672 - DNA, 22 bp, synthetic construct
  misc_feature 1..22: note = chemically synthesized
  source 1..22: mol_type = other DNA
agagtatgtttgctcttcagat

SEQ ID NO: 131673 - DNA, 22 bp, synthetic construct
  misc_feature 1..22: note = chemically synthesized
  source 1..22: mol_type = other DNA
gctcttcagatgattttaacat

SEQ ID NO: 131674 - DNA, 22 bp, synthetic construct
  misc_feature 1..22: note = chemically synthesized
  source 1..22: mol_type = other DNA
ctcttcagatgattttaacata

SEQ ID NO: 131675 - DNA, 22 bp, synthetic construct
  misc_feature 1..22: note = chemically synthesized
  source 1..22: mol_type = other DNA
ttcagatgattttaacatactt

SEQ ID NO: 131676 - DNA, 22 bp, synthetic construct
  misc_feature 1..22: note = chemically synthesized
  source 1..22: mol_type = other DNA
cagatgattttaacatactttt

SEQ ID NO: 131677 - DNA, 22 bp, synthetic construct
  misc_feature 1..22: note = chemically synthesized
  source 1..22: mol_type = other DNA
agatgattttaacatacttttc

SEQ ID NO: 131678 - DNA, 22 bp, synthetic construct
  misc_feature 1..22: note = chemically synthesized
  source 1..22: mol_type = other DNA
taacatacttttcccttggcct

SEQ ID NO: 131679 - DNA, 22 bp, synthetic construct
  misc_feature 1..22: note = chemically synthesized
  source 1..22: mol_type = other DNA
aacatacttttcccttggccta

SEQ ID NO: 131680 - DNA, 22 bp, synthetic construct
  misc_feature 1..22: note = chemically synthesized
  source 1..22: mol_type = other DNA
acatacttttcccttggcctaa

SEQ ID NO: 131681 - DNA, 22 bp, synthetic construct
  misc_feature 1..22: note = chemically synthesized
  source 1..22: mol_type = other DNA
ttcccttggcctaataatagga

SEQ ID NO: 131682 - DNA, 22 bp, synthetic construct
  misc_feature 1..22: note = chemically synthesized
  source 1..22: mol_type = other DNA
tcccttggcctaataataggaa

SEQ ID NO: 131683 - DNA, 22 bp, synthetic construct
  misc_feature 1..22: note = chemically synthesized
  source 1..22: mol_type = other DNA
cccttggcctaataataggaag

SEQ ID NO: 131684 - DNA, 22 bp, synthetic construct
  misc_feature 1..22: note = chemically synthesized
  source 1..22: mol_type = other DNA
ccttggcctaataataggaagg

SEQ ID NO: 131685 - DNA, 22 bp, synthetic construct
  misc_feature 1..22: note = chemically synthesized
  source 1..22: mol_type = other DNA
ggcctaataataggaagggtca

SEQ ID NO: 131686 - DNA, 22 bp, synthetic construct
  misc_feature 1..22: note = chemically synthesized
  source 1..22: mol_type = other DNA
gcctaataataggaagggtcaa

SEQ ID NO: 131687 - DNA, 22 bp, synthetic construct
  misc_feature 1..22: note = chemically synthesized
  source 1..22: mol_type = other DNA
ataataggaagggtcaaggctc

SEQ ID NO: 131688 - DNA, 22 bp, synthetic construct
  misc_feature 1..22: note = chemically synthesized
  source 1..22: mol_type = other DNA
tattcaaaaatagaaaatatag

SEQ ID NO: 131689 - DNA, 22 bp, synthetic construct
  misc_feature 1..22: note = chemically synthesized
  source 1..22: mol_type = other DNA
ttcaaaaatagaaaatatagcc

SEQ ID NO: 131690 - DNA, 22 bp, synthetic construct
  misc_feature 1..22: note = chemically synthesized
  source 1..22: mol_type = other DNA
aaaaatagaaaatatagccatt

SEQ ID NO: 131691 - DNA, 22 bp, synthetic construct
  misc_feature 1..22: note = chemically synthesized
  source 1..22: mol_type = other DNA
tagaatgaaaaatatgagacat

SEQ ID NO: 131692 - DNA, 22 bp, synthetic construct
  misc_feature 1..22: note = chemically synthesized
  source 1..22: mol_type = other DNA
gaatgaaaaatatgagacatca

SEQ ID NO: 131693 - DNA, 22 bp, synthetic construct
  misc_feature 1..22: note = chemically synthesized
  source 1..22: mol_type = other DNA
cttcacaagttatatatacttt

SEQ ID NO: 131694 - DNA, 22 bp, synthetic construct
  misc_feature 1..22: note = chemically synthesized
  source 1..22: mol_type = other DNA
cacaagttatatatactttata

SEQ ID NO: 131695 - DNA, 22 bp, synthetic construct
  misc_feature 1..22: note = chemically synthesized
  source 1..22: mol_type = other DNA
acaagttatatatactttatat

SEQ ID NO: 131696 - DNA, 22 bp, synthetic construct
  misc_feature 1..22: note = chemically synthesized
  source 1..22: mol_type = other DNA
tatatactttatatatgttcag

SEQ ID NO: 131697 - DNA, 22 bp, synthetic construct
  misc_feature 1..22: note = chemically synthesized
  source 1..22: mol_type = other DNA
tatatatgttcagagggaaaaa

SEQ ID NO: 131698 - DNA, 22 bp, synthetic construct
  misc_feature 1..22: note = chemically synthesized
  source 1..22: mol_type = other DNA
atatatgttcagagggaaaaat

SEQ ID NO: 131699 - DNA, 22 bp, synthetic construct
  misc_feature 1..22: note = chemically synthesized
  source 1..22: mol_type = other DNA
tatatgttcagagggaaaaatt

SEQ ID NO: 131700 - DNA, 22 bp, synthetic construct
  misc_feature 1..22: note = chemically synthesized
  source 1..22: mol_type = other DNA
agagggaaaaattagaaatggt

SEQ ID NO: 131701 - DNA, 22 bp, synthetic construct
  misc_feature 1..22: note = chemically synthesized
  source 1..22: mol_type = other DNA
gaaatggtgattcttttgccat

SEQ ID NO: 131702 - DNA, 22 bp, synthetic construct
  misc_feature 1..22: note = chemically synthesized
  source 1..22: mol_type = other DNA
ttttgccataaatactttctct

SEQ ID NO: 131703 - DNA, 22 bp, synthetic construct
  misc_feature 1..22: note = chemically synthesized
  source 1..22: mol_type = other DNA
ttgccataaatactttctctga

SEQ ID NO: 131704 - DNA, 22 bp, synthetic construct
  misc_feature 1..22: note = chemically synthesized
  source 1..22: mol_type = other DNA
tgccataaatactttctctgac

SEQ ID NO: 131705 - DNA, 22 bp, synthetic construct
  misc_feature 1..22: note = chemically synthesized
  source 1..22: mol_type = other DNA
gccataaatactttctctgaca

SEQ ID NO: 131706 - DNA, 22 bp, synthetic construct
  misc_feature 1..22: note = chemically synthesized
  source 1..22: mol_type = other DNA
ccataaatactttctctgacat

SEQ ID NO: 131707 - DNA, 22 bp, synthetic construct
  misc_feature 1..22: note = chemically synthesized
  source 1..22: mol_type = other DNA
tctctgacatctactgtaaact

SEQ ID NO: 131708 - DNA, 22 bp, synthetic construct
  misc_feature 1..22: note = chemically synthesized
  source 1..22: mol_type = other DNA
ctctgacatctactgtaaactc

SEQ ID NO: 131709 - DNA, 22 bp, synthetic construct
  misc_feature 1..22: note = chemically synthesized
  source 1..22: mol_type = other DNA
tctgacatctactgtaaactct

SEQ ID NO: 131710 - DNA, 22 bp, synthetic construct
  misc_feature 1..22: note = chemically synthesized
  source 1..22: mol_type = other DNA
tgacatctactgtaaactctct

SEQ ID NO: 131711 - DNA, 22 bp, synthetic construct
  misc_feature 1..22: note = chemically synthesized
  source 1..22: mol_type = other DNA
acatctactgtaaactctctat

SEQ ID NO: 131712 - DNA, 22 bp, synthetic construct
  misc_feature 1..22: note = chemically synthesized
  source 1..22: mol_type = other DNA
ctgtaaactctctatattagga

SEQ ID NO: 131713 - DNA, 22 bp, synthetic construct
  misc_feature 1..22: note = chemically synthesized
  source 1..22: mol_type = other DNA
taaactctctatattaggaaga

SEQ ID NO: 131714 - DNA, 22 bp, synthetic construct
  misc_feature 1..22: note = chemically synthesized
  source 1..22: mol_type = other DNA
tctatattaggaagaccaacaa

SEQ ID NO: 131715 - DNA, 22 bp, synthetic construct
  misc_feature 1..22: note = chemically synthesized
  source 1..22: mol_type = other DNA
tatattaggaagaccaacaatg

SEQ ID NO: 131716 - DNA, 22 bp, synthetic construct
  misc_feature 1..22: note = chemically synthesized
  source 1..22: mol_type = other DNA
tattaggaagaccaacaatgtt

SEQ ID NO: 131717 - DNA, 22 bp, synthetic construct
  misc_feature 1..22: note = chemically synthesized
  source 1..22: mol_type = other DNA
ggaagaccaacaatgttgagag

SEQ ID NO: 131718 - DNA, 22 bp, synthetic construct
  misc_feature 1..22: note = chemically synthesized
  source 1..22: mol_type = other DNA
agagaaatggatttcaattcat

SEQ ID NO: 131719 - DNA, 22 bp, synthetic construct
  misc_feature 1..22: note = chemically synthesized
  source 1..22: mol_type = other DNA
caattcatccaatgactaaaaa

SEQ ID NO: 131720 - DNA, 22 bp, synthetic construct
  misc_feature 1..22: note = chemically synthesized
  source 1..22: mol_type = other DNA
aattcatccaatgactaaaaaa

SEQ ID NO: 131721 - DNA, 22 bp, synthetic construct
  misc_feature 1..22: note = chemically synthesized
  source 1..22: mol_type = other DNA
atccaatgactaaaaaattgtg

SEQ ID NO: 131722 - DNA, 22 bp, synthetic construct
  misc_feature 1..22: note = chemically synthesized
  source 1..22: mol_type = other DNA
aaaaattgtggtgggaggagtt

SEQ ID NO: 131723 - DNA, 22 bp, synthetic construct
  misc_feature 1..22: note = chemically synthesized
  source 1..22: mol_type = other DNA
tggtgggaggagtttttgtgtg

SEQ ID NO: 131724 - DNA, 22 bp, synthetic construct
  misc_feature 1..22: note = chemically synthesized
  source 1..22: mol_type = other DNA
ttgtgtgactgtgtactaaaag

SEQ ID NO: 131725 - DNA, 22 bp, synthetic construct
  misc_feature 1..22: note = chemically synthesized
  source 1..22: mol_type = other DNA
tgtgtgactgtgtactaaaagc

SEQ ID NO: 131726 - DNA, 22 bp, synthetic construct
  misc_feature 1..22: note = chemically synthesized
  source 1..22: mol_type = other DNA
gtgtgactgtgtactaaaagct

SEQ ID NO: 131727 - DNA, 22 bp, synthetic construct
  misc_feature 1..22: note = chemically synthesized
  source 1..22: mol_type = other DNA
tgtgactgtgtactaaaagctt

SEQ ID NO: 131728 - DNA, 22 bp, synthetic construct
  misc_feature 1..22: note = chemically synthesized
  source 1..22: mol_type = other DNA
tgtactaaaagcttcttttaga

SEQ ID NO: 131729 - DNA, 22 bp, synthetic construct
  misc_feature 1..22: note = chemically synthesized
  source 1..22: mol_type = other DNA
aaagcttcttttagactgattt

SEQ ID NO: 131730 - DNA, 22 bp, synthetic construct
  misc_feature 1..22: note = chemically synthesized
  source 1..22: mol_type = other DNA
cttttagactgatttaattgtg

SEQ ID NO: 131731 - DNA, 22 bp, synthetic construct
  misc_feature 1..22: note = chemically synthesized
  source 1..22: mol_type = other DNA
ttttagactgatttaattgtga

SEQ ID NO: 131732 - DNA, 22 bp, synthetic construct
  misc_feature 1..22: note = chemically synthesized
  source 1..22: mol_type = other DNA
ttagactgatttaattgtgaaa

SEQ ID NO: 131733 - DNA, 22 bp, synthetic construct
  misc_feature 1..22: note = chemically synthesized
  source 1..22: mol_type = other DNA
tagactgatttaattgtgaaac

SEQ ID NO: 131734 - DNA, 22 bp, synthetic construct
  misc_feature 1..22: note = chemically synthesized
  source 1..22: mol_type = other DNA
agactgatttaattgtgaaaca

SEQ ID NO: 131735 - DNA, 22 bp, synthetic construct
  misc_feature 1..22: note = chemically synthesized
  source 1..22: mol_type = other DNA
gactgatttaattgtgaaacag

SEQ ID NO: 131736 - DNA, 22 bp, synthetic construct
  misc_feature 1..22: note = chemically synthesized
  source 1..22: mol_type = other DNA
atttaattgtgaaacaggattt

SEQ ID NO: 131737 - DNA, 22 bp, synthetic construct
  misc_feature 1..22: note = chemically synthesized
  source 1..22: mol_type = other DNA
aattgtgaaacaggattttcat

SEQ ID NO: 131738 - DNA, 22 bp, synthetic construct
  misc_feature 1..22: note = chemically synthesized
  source 1..22: mol_type = other DNA
attgtgaaacaggattttcatc

SEQ ID NO: 131739 - DNA, 22 bp, synthetic construct
  misc_feature 1..22: note = chemically synthesized
  source 1..22: mol_type = other DNA
tgaaacaggattttcatccaca

SEQ ID NO: 131740 - DNA, 22 bp, synthetic construct
  misc_feature 1..22: note = chemically synthesized
  source 1..22: mol_type = other DNA
tcatccacaaatttcaaaaggg

SEQ ID NO: 131741 - DNA, 22 bp, synthetic construct
  misc_feature 1..22: note = chemically synthesized
  source 1..22: mol_type = other DNA
catccacaaatttcaaaagggg

SEQ ID NO: 131742 - DNA, 22 bp, synthetic construct
  misc_feature 1..22: note = chemically synthesized
  source 1..22: mol_type = other DNA
atccacaaatttcaaaagggga

SEQ ID NO: 131743 - DNA, 22 bp, synthetic construct
  misc_feature 1..22: note = chemically synthesized
  source 1..22: mol_type = other DNA
caaaaggggaaaacctatctca

SEQ ID NO: 131744 - DNA, 22 bp, synthetic construct
  misc_feature 1..22: note = chemically synthesized
  source 1..22: mol_type = other DNA
aaaaggggaaaacctatctcag

SEQ ID NO: 131745 - DNA, 22 bp, synthetic construct
  misc_feature 1..22: note = chemically synthesized
  source 1..22: mol_type = other DNA
tctcagagtataatgttcaagt

SEQ ID NO: 131746 - DNA, 22 bp, synthetic construct
  misc_feature 1..22: note = chemically synthesized
  source 1..22: mol_type = other DNA
agagtataatgttcaagttatt

SEQ ID NO: 131747 - DNA, 22 bp, synthetic construct
  misc_feature 1..22: note = chemically synthesized
  source 1..22: mol_type = other DNA
aagttattgatgctgaatataa

SEQ ID NO: 131748 - DNA, 22 bp, synthetic construct
  misc_feature 1..22: note = chemically synthesized
  source 1..22: mol_type = other DNA
ttgatgctgaatataaactcaa

SEQ ID NO: 131749 - DNA, 22 bp, synthetic construct
  misc_feature 1..22: note = chemically synthesized
  source 1..22: mol_type = other DNA
atgctgaatataaactcaaatc

SEQ ID NO: 131750 - DNA, 22 bp, synthetic construct
  misc_feature 1..22: note = chemically synthesized
  source 1..22: mol_type = other DNA
aatataaactcaaatcctaaaa

SEQ ID NO: 131751 - DNA, 22 bp, synthetic construct
  misc_feature 1..22: note = chemically synthesized
  source 1..22: mol_type = other DNA
aaatcctaaaagtcagttatct

SEQ ID NO: 131752 - DNA, 22 bp, synthetic construct
  misc_feature 1..22: note = chemically synthesized
  source 1..22: mol_type = other DNA
aaagtcagttatctaccaaaga

SEQ ID NO: 131753 - DNA, 22 bp, synthetic construct
  misc_feature 1..22: note = chemically synthesized
  source 1..22: mol_type = other DNA
tctaccaaagactttctctgtt

SEQ ID NO: 131754 - DNA, 22 bp, synthetic construct
  misc_feature 1..22: note = chemically synthesized
  source 1..22: mol_type = other DNA
ccaaagactttctctgttcctt

SEQ ID NO: 131755 - DNA, 22 bp, synthetic construct
  misc_feature 1..22: note = chemically synthesized
  source 1..22: mol_type = other DNA
tctctgttccttatatgtgacc

SEQ ID NO: 131756 - DNA, 22 bp, synthetic construct
  misc_feature 1..22: note = chemically synthesized
  source 1..22: mol_type = other DNA
ctctgttccttatatgtgacca

SEQ ID NO: 131757 - DNA, 22 bp, synthetic construct
  misc_feature 1..22: note = chemically synthesized
  source 1..22: mol_type = other DNA
tctgttccttatatgtgaccat

SEQ ID NO: 131758 - DNA, 22 bp, synthetic construct
  misc_feature 1..22: note = chemically synthesized
  source 1..22: mol_type = other DNA
tgttccttatatgtgaccatga

SEQ ID NO: 131759 - DNA, 22 bp, synthetic construct
  misc_feature 1..22: note = chemically synthesized
  source 1..22: mol_type = other DNA
ttccttatatgtgaccatgagg

SEQ ID NO: 131760 - DNA, 22 bp, synthetic construct
  misc_feature 1..22: note = chemically synthesized
  source 1..22: mol_type = other DNA
cttatatgtgaccatgaggtct

SEQ ID NO: 131761 - DNA, 22 bp, synthetic construct
  misc_feature 1..22: note = chemically synthesized
  source 1..22: mol_type = other DNA
atatgtgaccatgaggtctata

SEQ ID NO: 131762 - DNA, 22 bp, synthetic construct
  misc_feature 1..22: note = chemically synthesized
  source 1..22: mol_type = other DNA
tatgtgaccatgaggtctataa

SEQ ID NO: 131763 - DNA, 22 bp, synthetic construct
  misc_feature 1..22: note = chemically synthesized
  source 1..22: mol_type = other DNA
taatacatctaggcatcttaat

SEQ ID NO: 131764 - DNA, 22 bp, synthetic construct
  misc_feature 1..22: note = chemically synthesized
  source 1..22: mol_type = other DNA
ggcatcttaatggaaaaatctc

SEQ ID NO: 131765 - DNA, 22 bp, synthetic construct
  misc_feature 1..22: note = chemically synthesized
  source 1..22: mol_type = other DNA
aatggaaaaatctcatttcgga

SEQ ID NO: 131766 - DNA, 22 bp, synthetic construct
  misc_feature 1..22: note = chemically synthesized
  source 1..22: mol_type = other DNA
atggaaaaatctcatttcggat

SEQ ID NO: 131767 - DNA, 22 bp, synthetic construct
  misc_feature 1..22: note = chemically synthesized
  source 1..22: mol_type = other DNA
atttcggataattcccatcttg

SEQ ID NO: 131768 - DNA, 22 bp, synthetic construct
  misc_feature 1..22: note = chemically synthesized
  source 1..22: mol_type = other DNA
cggataattcccatcttgattt

SEQ ID NO: 131769 - DNA, 22 bp, synthetic construct
  misc_feature 1..22: note = chemically synthesized
  source 1..22: mol_type = other DNA
ggataattcccatcttgatttg

SEQ ID NO: 131770 - DNA, 22 bp, synthetic construct
  misc_feature 1..22: note = chemically synthesized
  source 1..22: mol_type = other DNA
ccatcttgatttgctatcttga

SEQ ID NO: 131771 - DNA, 22 bp, synthetic construct
  misc_feature 1..22: note = chemically synthesized
  source 1..22: mol_type = other DNA
gatttgctatcttgatgcagaa

SEQ ID NO: 131772 - DNA, 22 bp, synthetic construct
  misc_feature 1..22: note = chemically synthesized
  source 1..22: mol_type = other DNA
atttgctatcttgatgcagaac

SEQ ID NO: 131773 - DNA, 22 bp, synthetic construct
  misc_feature 1..22: note = chemically synthesized
  source 1..22: mol_type = other DNA
gctatcttgatgcagaacctct

SEQ ID NO: 131774 - DNA, 22 bp, synthetic construct
  misc_feature 1..22: note = chemically synthesized
  source 1..22: mol_type = other DNA
ctatcttgatgcagaacctctt

SEQ ID NO: 131775 - DNA, 22 bp, synthetic construct
  misc_feature 1..22: note = chemically synthesized
  source 1..22: mol_type = other DNA
tcttgatgcagaacctcttgta

SEQ ID NO: 131776 - DNA, 22 bp, synthetic construct
  misc_feature 1..22: note = chemically synthesized
  source 1..22: mol_type = other DNA
gatgcagaacctcttgtagctg

SEQ ID NO: 131777 - DNA, 22 bp, synthetic construct
  misc_feature 1..22: note = chemically synthesized
  source 1..22: mol_type = other DNA
atgcagaacctcttgtagctga

SEQ ID NO: 131778 - DNA, 22 bp, synthetic construct
  misc_feature 1..22: note = chemically synthesized
  source 1..22: mol_type = other DNA
ttgtagctgaggaaagcctgcc

SEQ ID NO: 131779 - DNA, 22 bp, synthetic construct
  misc_feature 1..22: note = chemically synthesized
  source 1..22: mol_type = other DNA
gtagctgaggaaagcctgcctt

SEQ ID NO: 131780 - DNA, 22 bp, synthetic construct
  misc_feature 1..22: note = chemically synthesized
  source 1..22: mol_type = other DNA
tagctgaggaaagcctgccttt

SEQ ID NO: 131781 - DNA, 22 bp, synthetic construct
  misc_feature 1..22: note = chemically synthesized
  source 1..22: mol_type = other DNA
aggaaagcctgcctttgtttcc

SEQ ID NO: 131782 - DNA, 22 bp, synthetic construct
  misc_feature 1..22: note = chemically synthesized
  source 1..22: mol_type = other DNA
cctttgtttcccatctttgtag

SEQ ID NO: 131783 - DNA, 22 bp, synthetic construct
  misc_feature 1..22: note = chemically synthesized
  source 1..22: mol_type = other DNA
tgtttcccatctttgtagaaca

SEQ ID NO: 131784 - DNA, 22 bp, synthetic construct
  misc_feature 1..22: note = chemically synthesized
  source 1..22: mol_type = other DNA
gtttcccatctttgtagaacag

SEQ ID NO: 131785 - DNA, 22 bp, synthetic construct
  misc_feature 1..22: note = chemically synthesized
  source 1..22: mol_type = other DNA
tttcccatctttgtagaacaga

SEQ ID NO: 131786 - DNA, 22 bp, synthetic construct
  misc_feature 1..22: note = chemically synthesized
  source 1..22: mol_type = other DNA
cccatctttgtagaacagaagc

SEQ ID NO: 131787 - DNA, 22 bp, synthetic construct
  misc_feature 1..22: note = chemically synthesized
  source 1..22: mol_type = other DNA
ccatctttgtagaacagaagct

SEQ ID NO: 131788 - DNA, 22 bp, synthetic construct
  misc_feature 1..22: note = chemically synthesized
  source 1..22: mol_type = other DNA
tgtagaacagaagctgtgggac

SEQ ID NO: 131789 - DNA, 22 bp, synthetic construct
  misc_feature 1..22: note = chemically synthesized
  source 1..22: mol_type = other DNA
gtagaacagaagctgtgggaca

SEQ ID NO: 131790 - DNA, 22 bp, synthetic construct
  misc_feature 1..22: note = chemically synthesized
  source 1..22: mol_type = other DNA
tagaacagaagctgtgggacat

SEQ ID NO: 131791 - DNA, 22 bp, synthetic construct
  misc_feature 1..22: note = chemically synthesized
  source 1..22: mol_type = other DNA
tgggacatcacaagttgctgtg

SEQ ID NO: 131792 - DNA, 22 bp, synthetic construct
  misc_feature 1..22: note = chemically synthesized
  source 1..22: mol_type = other DNA
ctgtggtaatcacaagttactg

SEQ ID NO: 131793 - DNA, 22 bp, synthetic construct
  misc_feature 1..22: note = chemically synthesized
  source 1..22: mol_type = other DNA
tggtaatcacaagttactgcga

SEQ ID NO: 131794 - DNA, 22 bp, synthetic construct
  misc_feature 1..22: note = chemically synthesized
  source 1..22: mol_type = other DNA
ctgcgatattatatccccatct

SEQ ID NO: 131795 - DNA, 22 bp, synthetic construct
  misc_feature 1..22: note = chemically synthesized
  source 1..22: mol_type = other DNA
cgatattatatccccatctgat

SEQ ID NO: 131796 - DNA, 22 bp, synthetic construct
  misc_feature 1..22: note = chemically synthesized
  source 1..22: mol_type = other DNA
tatccccatctgatatctaaat

SEQ ID NO: 131797 - DNA, 22 bp, synthetic construct
  misc_feature 1..22: note = chemically synthesized
  source 1..22: mol_type = other DNA
atatctaaattttgaggatagg

SEQ ID NO: 131798 - DNA, 22 bp, synthetic construct
  misc_feature 1..22: note = chemically synthesized
  source 1..22: mol_type = other DNA
aattttgaggataggctatctg

SEQ ID NO: 131799 - DNA, 22 bp, synthetic construct
  misc_feature 1..22: note = chemically synthesized
  source 1..22: mol_type = other DNA
tgaggataggctatctgtttta

SEQ ID NO: 131800 - DNA, 22 bp, synthetic construct
  misc_feature 1..22: note = chemically synthesized
  source 1..22: mol_type = other DNA
gaggataggctatctgttttac

SEQ ID NO: 131801 - DNA, 22 bp, synthetic construct
  misc_feature 1..22: note = chemically synthesized
  source 1..22: mol_type = other DNA
aggataggctatctgttttaca

SEQ ID NO: 131802 - DNA, 22 bp, synthetic construct
  misc_feature 1..22: note = chemically synthesized
  source 1..22: mol_type = other DNA
tctgttttacagtgatacattt

SEQ ID NO: 131803 - DNA, 22 bp, synthetic construct
  misc_feature 1..22: note = chemically synthesized
  source 1..22: mol_type = other DNA
ttttacagtgatacatttgatg

SEQ ID NO: 131804 - DNA, 22 bp, synthetic construct
  misc_feature 1..22: note = chemically synthesized
  source 1..22: mol_type = other DNA
tacagtgatacatttgatggaa

SEQ ID NO: 131805 - DNA, 22 bp, synthetic construct
  misc_feature 1..22: note = chemically synthesized
  source 1..22: mol_type = other DNA
acagtgatacatttgatggaag

SEQ ID NO: 131806 - DNA, 22 bp, synthetic construct
  misc_feature 1..22: note = chemically synthesized
  source 1..22: mol_type = other DNA
cagtgatacatttgatggaagg

SEQ ID NO: 131807 - DNA, 22 bp, synthetic construct
  misc_feature 1..22: note = chemically synthesized
  source 1..22: mol_type = other DNA
gatggaaggactcttagtttaa

SEQ ID NO: 131808 - DNA, 22 bp, synthetic construct
  misc_feature 1..22: note = chemically synthesized
  source 1..22: mol_type = other DNA
atggaaggactcttagtttaac

SEQ ID NO: 131809 - DNA, 22 bp, synthetic construct
  misc_feature 1..22: note = chemically synthesized
  source 1..22: mol_type = other DNA
ttagtttaactggccaaggcca

SEQ ID NO: 131810 - DNA, 22 bp, synthetic construct
  misc_feature 1..22: note = chemically synthesized
  source 1..22: mol_type = other DNA
agtttaactggccaaggccagg

SEQ ID NO: 131811 - DNA, 22 bp, synthetic construct
  misc_feature 1..22: note = chemically synthesized
  source 1..22: mol_type = other DNA
gtttaactggccaaggccagga

SEQ ID NO: 131812 - DNA, 22 bp, synthetic construct
  misc_feature 1..22: note = chemically synthesized
  source 1..22: mol_type = other DNA
aactggccaaggccaggacttc

SEQ ID NO: 131813 - DNA, 22 bp, synthetic construct
  misc_feature 1..22: note = chemically synthesized
  source 1..22: mol_type = other DNA
actggccaaggccaggacttca

SEQ ID NO: 131814 - DNA, 22 bp, synthetic construct
  misc_feature 1..22: note = chemically synthesized
  source 1..22: mol_type = other DNA
gccaaggccaggacttcaagcc

SEQ ID NO: 131815 - DNA, 22 bp, synthetic construct
  misc_feature 1..22: note = chemically synthesized
  source 1..22: mol_type = other DNA
caagccatagtttaattacctg

SEQ ID NO: 131816 - DNA, 22 bp, synthetic construct
  misc_feature 1..22: note = chemically synthesized
  source 1..22: mol_type = other DNA
aagccatagtttaattacctgc

SEQ ID NO: 131817 - DNA, 22 bp, synthetic construct
  misc_feature 1..22: note = chemically synthesized
  source 1..22: mol_type = other DNA
aattacctgccacatgtgtgag

SEQ ID NO: 131818 - DNA, 22 bp, synthetic construct
  misc_feature 1..22: note = chemically synthesized
  source 1..22: mol_type = other DNA
attacctgccacatgtgtgaga

SEQ ID NO: 131819 - DNA, 22 bp, synthetic construct
  misc_feature 1..22: note = chemically synthesized
  source 1..22: mol_type = other DNA
cctgccacatgtgtgagaaata

SEQ ID NO: 131820 - DNA, 22 bp, synthetic construct
  misc_feature 1..22: note = chemically synthesized
  source 1..22: mol_type = other DNA
ccacatgtgtgagaaataagga

SEQ ID NO: 131821 - DNA, 22 bp, synthetic construct
  misc_feature 1..22: note = chemically synthesized
  source 1..22: mol_type = other DNA
caaaccatgatggagcagcatc

SEQ ID NO: 131822 - DNA, 22 bp, synthetic construct
  misc_feature 1..22: note = chemically synthesized
  source 1..22: mol_type = other DNA
aaaccatgatggagcagcatca

SEQ ID NO: 131823 - DNA, 22 bp, synthetic construct
  misc_feature 1..22: note = chemically synthesized
  source 1..22: mol_type = other DNA
gcatgccttttgtgtatatggt

SEQ ID NO: 131824 - DNA, 22 bp, synthetic construct
  misc_feature 1..22: note = chemically synthesized
  source 1..22: mol_type = other DNA
ttgtgtatatggtgggttgagg

SEQ ID NO: 131825 - DNA, 22 bp, synthetic construct
  misc_feature 1..22: note = chemically synthesized
  source 1..22: mol_type = other DNA
tgtgtatatggtgggttgagga

SEQ ID NO: 131826 - DNA, 22 bp, synthetic construct
  misc_feature 1..22: note = chemically synthesized
  source 1..22: mol_type = other DNA
gtgtatatggtgggttgaggat

SEQ ID NO: 131827 - DNA, 22 bp, synthetic construct
  misc_feature 1..22: note = chemically synthesized
  source 1..22: mol_type = other DNA
tgtatatggtgggttgaggata

SEQ ID NO: 131828 - DNA, 22 bp, synthetic construct
  misc_feature 1..22: note = chemically synthesized
  source 1..22: mol_type = other DNA
aggatatggcaatattgcagcc

SEQ ID NO: 131829 - DNA, 22 bp, synthetic construct
  misc_feature 1..22: note = chemically synthesized
  source 1..22: mol_type = other DNA
cagcctcactgaataggtataa

SEQ ID NO: 131830 - DNA, 22 bp, synthetic construct
  misc_feature 1..22: note = chemically synthesized
  source 1..22: mol_type = other DNA
actgaataggtataaggaggtg

SEQ ID NO: 131831 - DNA, 22 bp, synthetic construct
  misc_feature 1..22: note = chemically synthesized
  source 1..22: mol_type = other DNA
aataggtataaggaggtgctta

SEQ ID NO: 131832 - DNA, 22 bp, synthetic construct
  misc_feature 1..22: note = chemically synthesized
  source 1..22: mol_type = other DNA
actttggataagcagtgttgtt

SEQ ID NO: 131833 - DNA, 22 bp, synthetic construct
  misc_feature 1..22: note = chemically synthesized
  source 1..22: mol_type = other DNA
ctttggataagcagtgttgttt

SEQ ID NO: 131834 - DNA, 22 bp, synthetic construct
  misc_feature 1..22: note = chemically synthesized
  source 1..22: mol_type = other DNA
tggataagcagtgttgtttcca

SEQ ID NO: 131835 - DNA, 22 bp, synthetic construct
  misc_feature 1..22: note = chemically synthesized
  source 1..22: mol_type = other DNA
ggataagcagtgttgtttccaa

SEQ ID NO: 131836 - DNA, 22 bp, synthetic construct
  misc_feature 1..22: note = chemically synthesized
  source 1..22: mol_type = other DNA
gataagcagtgttgtttccaag

SEQ ID NO: 131837 - DNA, 22 bp, synthetic construct
  misc_feature 1..22: note = chemically synthesized
  source 1..22: mol_type = other DNA
tttccaagatgaaagaagccca

SEQ ID NO: 131838 - DNA, 22 bp, synthetic construct
  misc_feature 1..22: note = chemically synthesized
  source 1..22: mol_type = other DNA
ccaagatgaaagaagcccaaat

SEQ ID NO: 131839 - DNA, 22 bp, synthetic construct
  misc_feature 1..22: note = chemically synthesized
  source 1..22: mol_type = other DNA
caagatgaaagaagcccaaatt

SEQ ID NO: 131840 - DNA, 22 bp, synthetic construct
  misc_feature 1..22: note = chemically synthesized
  source 1..22: mol_type = other DNA
ttgggaaatatgtttattatta

SEQ ID NO: 131841 - DNA, 22 bp, synthetic construct
  misc_feature 1..22: note = chemically synthesized
  source 1..22: mol_type = other DNA
ggaaatatgtttattattaatg

SEQ ID NO: 131842 - DNA, 22 bp, synthetic construct
  misc_feature 1..22: note = chemically synthesized
  source 1..22: mol_type = other DNA
attattaatgacgttgtcctta

SEQ ID NO: 131843 - DNA, 22 bp, synthetic construct
  misc_feature 1..22: note = chemically synthesized
  source 1..22: mol_type = other DNA
ttattaatgacgttgtccttaa

SEQ ID NO: 131844 - DNA, 22 bp, synthetic construct
  misc_feature 1..22: note = chemically synthesized
  source 1..22: mol_type = other DNA
ttaatgacgttgtccttaaact

SEQ ID NO: 131845 - DNA, 22 bp, synthetic construct
  misc_feature 1..22: note = chemically synthesized
  source 1..22: mol_type = other DNA
atgacgttgtccttaaactggt

SEQ ID NO: 131846 - DNA, 22 bp, synthetic construct
  misc_feature 1..22: note = chemically synthesized
  source 1..22: mol_type = other DNA
tccttaaactggtttagacgtt

SEQ ID NO: 131847 - DNA, 22 bp, synthetic construct
  misc_feature 1..22: note = chemically synthesized
  source 1..22: mol_type = other DNA
aaactggtttagacgttgaatt

SEQ ID NO: 131848 - DNA, 22 bp, synthetic construct
  misc_feature 1..22: note = chemically synthesized
  source 1..22: mol_type = other DNA
aactggtttagacgttgaattc

SEQ ID NO: 131849 - DNA, 22 bp, synthetic construct
  misc_feature 1..22: note = chemically synthesized
  source 1..22: mol_type = other DNA
gtttagacgttgaattctctgt

SEQ ID NO: 131850 - DNA, 22 bp, synthetic construct
  misc_feature 1..22: note = chemically synthesized
  source 1..22: mol_type = other DNA
agacgttgaattctctgttctt

SEQ ID NO: 131851 - DNA, 22 bp, synthetic construct
  misc_feature 1..22: note = chemically synthesized
  source 1..22: mol_type = other DNA
gacgttgaattctctgttcttg

SEQ ID NO: 131852 - DNA, 22 bp, synthetic construct
  misc_feature 1..22: note = chemically synthesized
  source 1..22: mol_type = other DNA
aattctctgttcttggtgcctt

SEQ ID NO: 131853 - DNA, 22 bp, synthetic construct
  misc_feature 1..22: note = chemically synthesized
  source 1..22: mol_type = other DNA
tctgttcttggtgccttcatgg

SEQ ID NO: 131854 - DNA, 22 bp, synthetic construct
  misc_feature 1..22: note = chemically synthesized
  source 1..22: mol_type = other DNA
tgttcttggtgccttcatggtt

SEQ ID NO: 131855 - DNA, 22 bp, synthetic construct
  misc_feature 1..22: note = chemically synthesized
  source 1..22: mol_type = other DNA
ttcttggtgccttcatggttgt

SEQ ID NO: 131856 - DNA, 22 bp, synthetic construct
  misc_feature 1..22: note = chemically synthesized
  source 1..22: mol_type = other DNA
ttggtgccttcatggttgttta

SEQ ID NO: 131857 - DNA, 22 bp, synthetic construct
  misc_feature 1..22: note = chemically synthesized
  source 1..22: mol_type = other DNA
ggtgccttcatggttgtttaaa

SEQ ID NO: 131858 - DNA, 22 bp, synthetic construct
  misc_feature 1..22: note = chemically synthesized
  source 1..22: mol_type = other DNA
gtgccttcatggttgtttaaag

SEQ ID NO: 131859 - DNA, 22 bp, synthetic construct
  misc_feature 1..22: note = chemically synthesized
  source 1..22: mol_type = other DNA
catggttgtttaaagaaaatat

SEQ ID NO: 131860 - DNA, 22 bp, synthetic construct
  misc_feature 1..22: note = chemically synthesized
  source 1..22: mol_type = other DNA
atggttgtttaaagaaaatatt

SEQ ID NO: 131861 - DNA, 22 bp, synthetic construct
  misc_feature 1..22: note = chemically synthesized
  source 1..22: mol_type = other DNA
tttaaagaaaatatttttcaaa

SEQ ID NO: 131862 - DNA, 22 bp, synthetic construct
  misc_feature 1..22: note = chemically synthesized
  source 1..22: mol_type = other DNA
aaagaaaatatttttcaaattg

SEQ ID NO: 131863 - DNA, 22 bp, synthetic construct
  misc_feature 1..22: note = chemically synthesized
  source 1..22: mol_type = other DNA
aagaaaatatttttcaaattga

SEQ ID NO: 131864 - DNA, 22 bp, synthetic construct
  misc_feature 1..22: note = chemically synthesized
  source 1..22: mol_type = other DNA
ttcaaattgattctaagagggt

SEQ ID NO: 131865 - DNA, 22 bp, synthetic construct
  misc_feature 1..22: note = chemically synthesized
  source 1..22: mol_type = other DNA
tcaaattgattctaagagggtg

SEQ ID NO: 131866 - DNA, 22 bp, synthetic construct
  misc_feature 1..22: note = chemically synthesized
  source 1..22: mol_type = other DNA
caaattgattctaagagggtga

SEQ ID NO: 131867 - DNA, 22 bp, synthetic construct
  misc_feature 1..22: note = chemically synthesized
  source 1..22: mol_type = other DNA
aaattgattctaagagggtgat

SEQ ID NO: 131868 - DNA, 22 bp, synthetic construct
  misc_feature 1..22: note = chemically synthesized
  source 1..22: mol_type = other DNA
attctaagagggtgatctgaat

SEQ ID NO: 131869 - DNA, 22 bp, synthetic construct
  misc_feature 1..22: note = chemically synthesized
  source 1..22: mol_type = other DNA
taagagggtgatctgaatccac

SEQ ID NO: 131870 - DNA, 22 bp, synthetic construct
  misc_feature 1..22: note = chemically synthesized
  source 1..22: mol_type = other DNA
agagggtgatctgaatccacta

SEQ ID NO: 131871 - DNA, 22 bp, synthetic construct
  misc_feature 1..22: note = chemically synthesized
  source 1..22: mol_type = other DNA
aatccactagcattttatttca

SEQ ID NO: 131872 - DNA, 22 bp, synthetic construct
  misc_feature 1..22: note = chemically synthesized
  source 1..22: mol_type = other DNA
gcattttatttcattgagactt

SEQ ID NO: 131873 - DNA, 22 bp, synthetic construct
  misc_feature 1..22: note = chemically synthesized
  source 1..22: mol_type = other DNA
tatttcattgagacttttcatc

SEQ ID NO: 131874 - DNA, 22 bp, synthetic construct
  misc_feature 1..22: note = chemically synthesized
  source 1..22: mol_type = other DNA
atttcattgagacttttcatct

SEQ ID NO: 131875 - DNA, 22 bp, synthetic construct
  misc_feature 1..22: note = chemically synthesized
  source 1..22: mol_type = other DNA
tttcattgagacttttcatctt

SEQ ID NO: 131876 - DNA, 22 bp, synthetic construct
  misc_feature 1..22: note = chemically synthesized
  source 1..22: mol_type = other DNA
cattgagacttttcatctttta

SEQ ID NO: 131877 - DNA, 22 bp, synthetic construct
  misc_feature 1..22: note = chemically synthesized
  source 1..22: mol_type = other DNA
attgagacttttcatcttttac

SEQ ID NO: 131878 - DNA, 22 bp, synthetic construct
  misc_feature 1..22: note = chemically synthesized
  source 1..22: mol_type = other DNA
agacttttcatcttttacatag

SEQ ID NO: 131879 - DNA, 22 bp, synthetic construct
  misc_feature 1..22: note = chemically synthesized
  source 1..22: mol_type = other DNA
ttcatcttttacatagaaggaa

SEQ ID NO: 131880 - DNA, 22 bp, synthetic construct
  misc_feature 1..22: note = chemically synthesized
  source 1..22: mol_type = other DNA
tcatcttttacatagaaggaaa

SEQ ID NO: 131881 - DNA, 22 bp, synthetic construct
  misc_feature 1..22: note = chemically synthesized
  source 1..22: mol_type = other DNA
catcttttacatagaaggaaac

SEQ ID NO: 131882 - DNA, 22 bp, synthetic construct
  misc_feature 1..22: note = chemically synthesized
  source 1..22: mol_type = other DNA
atcttttacatagaaggaaact

SEQ ID NO: 131883 - DNA, 22 bp, synthetic construct
  misc_feature 1..22: note = chemically synthesized
  source 1..22: mol_type = other DNA
ttacatagaaggaaactaagtt

SEQ ID NO: 131884 - DNA, 22 bp, synthetic construct
  misc_feature 1..22: note = chemically synthesized
  source 1..22: mol_type = other DNA
tacatagaaggaaactaagtta

SEQ ID NO: 131885 - DNA, 22 bp, synthetic construct
  misc_feature 1..22: note = chemically synthesized
  source 1..22: mol_type = other DNA
acatagaaggaaactaagttat

SEQ ID NO: 131886 - DNA, 22 bp, synthetic construct
  misc_feature 1..22: note = chemically synthesized
  source 1..22: mol_type = other DNA
catagaaggaaactaagttatt

SEQ ID NO: 131887 - DNA, 22 bp, synthetic construct
  misc_feature 1..22: note = chemically synthesized
  source 1..22: mol_type = other DNA
agttattagtgctctgaaatat

SEQ ID NO: 131888 - DNA, 22 bp, synthetic construct
  misc_feature 1..22: note = chemically synthesized
  source 1..22: mol_type = other DNA
ttagtgctctgaaatatcaact

SEQ ID NO: 131889 - DNA, 22 bp, synthetic construct
  misc_feature 1..22: note = chemically synthesized
  source 1..22: mol_type = other DNA
gtgctctgaaatatcaactttc

SEQ ID NO: 131890 - DNA, 22 bp, synthetic construct
  misc_feature 1..22: note = chemically synthesized
  source 1..22: mol_type = other DNA
tgaaatatcaactttcatgata

SEQ ID NO: 131891 - DNA, 22 bp, synthetic construct
  misc_feature 1..22: note = chemically synthesized
  source 1..22: mol_type = other DNA
aaatatcaactttcatgataaa

SEQ ID NO: 131892 - DNA, 22 bp, synthetic construct
  misc_feature 1..22: note = chemically synthesized
  source 1..22: mol_type = other DNA
tcatgataaaagatacacagtc

SEQ ID NO: 131893 - DNA, 22 bp, synthetic construct
  misc_feature 1..22: note = chemically synthesized
  source 1..22: mol_type = other DNA
catgataaaagatacacagtcc

SEQ ID NO: 131894 - DNA, 22 bp, synthetic construct
  misc_feature 1..22: note = chemically synthesized
  source 1..22: mol_type = other DNA
atgataaaagatacacagtccc

SEQ ID NO: 131895 - DNA, 22 bp, synthetic construct
  misc_feature 1..22: note = chemically synthesized
  source 1..22: mol_type = other DNA
ctgagggcacaagccaatactt

SEQ ID NO: 131896 - DNA, 22 bp, synthetic construct
  misc_feature 1..22: note = chemically synthesized
  source 1..22: mol_type = other DNA
tgagggcacaagccaatacttc

SEQ ID NO: 131897 - DNA, 22 bp, synthetic construct
  misc_feature 1..22: note = chemically synthesized
  source 1..22: mol_type = other DNA
agggcacaagccaatacttcat

SEQ ID NO: 131898 - DNA, 22 bp, synthetic construct
  misc_feature 1..22: note = chemically synthesized
  source 1..22: mol_type = other DNA
cattaaaccaaaccagctatca

SEQ ID NO: 131899 - DNA, 22 bp, synthetic construct
  misc_feature 1..22: note = chemically synthesized
  source 1..22: mol_type = other DNA
attaaaccaaaccagctatcac

SEQ ID NO: 131900 - DNA, 22 bp, synthetic construct
  misc_feature 1..22: note = chemically synthesized
  source 1..22: mol_type = other DNA
aaccaaaccagctatcactctt

SEQ ID NO: 131901 - DNA, 22 bp, synthetic construct
  misc_feature 1..22: note = chemically synthesized
  source 1..22: mol_type = other DNA
tcactcttctgtcatattttta

SEQ ID NO: 131902 - DNA, 22 bp, synthetic construct
  misc_feature 1..22: note = chemically synthesized
  source 1..22: mol_type = other DNA
ttctgtcatatttttaataagg

SEQ ID NO: 131903 - DNA, 22 bp, synthetic construct
  misc_feature 1..22: note = chemically synthesized
  source 1..22: mol_type = other DNA
ctgtcatatttttaataaggag

SEQ ID NO: 131904 - DNA, 22 bp, synthetic construct
  misc_feature 1..22: note = chemically synthesized
  source 1..22: mol_type = other DNA
tgtcatatttttaataaggagg

SEQ ID NO: 131905 - DNA, 22 bp, synthetic construct
  misc_feature 1..22: note = chemically synthesized
  source 1..22: mol_type = other DNA
tcatatttttaataaggaggac

SEQ ID NO: 131906 - DNA, 22 bp, synthetic construct
  misc_feature 1..22: note = chemically synthesized
  source 1..22: mol_type = other DNA
ttaataaggaggacagcttcct

SEQ ID NO: 131907 - DNA, 22 bp, synthetic construct
  misc_feature 1..22: note = chemically synthesized
  source 1..22: mol_type = other DNA
taataaggaggacagcttcctt

SEQ ID NO: 131908 - DNA, 22 bp, synthetic construct
  misc_feature 1..22: note = chemically synthesized
  source 1..22: mol_type = other DNA
aataaggaggacagcttccttt

SEQ ID NO: 131909 - DNA, 22 bp, synthetic construct
  misc_feature 1..22: note = chemically synthesized
  source 1..22: mol_type = other DNA
ataaggaggacagcttccttta

SEQ ID NO: 131910 - DNA, 22 bp, synthetic construct
  misc_feature 1..22: note = chemically synthesized
  source 1..22: mol_type = other DNA
cctttaaattctctaaaaacaa

SEQ ID NO: 131911 - DNA, 22 bp, synthetic construct
  misc_feature 1..22: note = chemically synthesized
  source 1..22: mol_type = other DNA
ctttaaattctctaaaaacaaa

SEQ ID NO: 131912 - DNA, 22 bp, synthetic construct
  misc_feature 1..22: note = chemically synthesized
  source 1..22: mol_type = other DNA
taaattctctaaaaacaaaata

SEQ ID NO: 131913 - DNA, 22 bp, synthetic construct
  misc_feature 1..22: note = chemically synthesized
  source 1..22: mol_type = other DNA
aaattctctaaaaacaaaataa

SEQ ID NO: 131914 - DNA, 22 bp, synthetic construct
  misc_feature 1..22: note = chemically synthesized
  source 1..22: mol_type = other DNA
aattctctaaaaacaaaataat

SEQ ID NO: 131915 - DNA, 22 bp, synthetic construct
  misc_feature 1..22: note = chemically synthesized
  source 1..22: mol_type = other DNA
tctaaaaacaaaataatatcct

SEQ ID NO: 131916 - DNA, 22 bp, synthetic construct
  misc_feature 1..22: note = chemically synthesized
  source 1..22: mol_type = other DNA
taaaaacaaaataatatcctta

SEQ ID NO: 131917 - DNA, 22 bp, synthetic construct
  misc_feature 1..22: note = chemically synthesized
  source 1..22: mol_type = other DNA
aaaacaaaataatatccttatt

SEQ ID NO: 131918 - DNA, 22 bp, synthetic construct
  misc_feature 1..22: note = chemically synthesized
  source 1..22: mol_type = other DNA
attcagccttcccactttacca

SEQ ID NO: 131919 - DNA, 22 bp, synthetic construct
  misc_feature 1..22: note = chemically synthesized
  source 1..22: mol_type = other DNA
ttcagccttcccactttaccac

SEQ ID NO: 131920 - DNA, 22 bp, synthetic construct
  misc_feature 1..22: note = chemically synthesized
  source 1..22: mol_type = other DNA
agccttcccactttaccacatg

SEQ ID NO: 131921 - DNA, 22 bp, synthetic construct
  misc_feature 1..22: note = chemically synthesized
  source 1..22: mol_type = other DNA
cccactttaccacatgacctga

SEQ ID NO: 131922 - DNA, 22 bp, synthetic construct
  misc_feature 1..22: note = chemically synthesized
  source 1..22: mol_type = other DNA
ccactttaccacatgacctgat

SEQ ID NO: 131923 - DNA, 22 bp, synthetic construct
  misc_feature 1..22: note = chemically synthesized
  source 1..22: mol_type = other DNA
taccacatgacctgattaacct

SEQ ID NO: 131924 - DNA, 22 bp, synthetic construct
  misc_feature 1..22: note = chemically synthesized
  source 1..22: mol_type = other DNA
accacatgacctgattaaccta

SEQ ID NO: 131925 - DNA, 22 bp, synthetic construct
  misc_feature 1..22: note = chemically synthesized
  source 1..22: mol_type = other DNA
ccacatgacctgattaacctat

SEQ ID NO: 131926 - DNA, 22 bp, synthetic construct
  misc_feature 1..22: note = chemically synthesized
  source 1..22: mol_type = other DNA
attaacctattaatgacactgt

SEQ ID NO: 131927 - DNA, 22 bp, synthetic construct
  misc_feature 1..22: note = chemically synthesized
  source 1..22: mol_type = other DNA
acctattaatgacactgtacta

SEQ ID NO: 131928 - DNA, 22 bp, synthetic construct
  misc_feature 1..22: note = chemically synthesized
  source 1..22: mol_type = other DNA
ttaatgacactgtactatgtca

SEQ ID NO: 131929 - DNA, 22 bp, synthetic construct
  misc_feature 1..22: note = chemically synthesized
  source 1..22: mol_type = other DNA
atgacactgtactatgtcaatt

SEQ ID NO: 131930 - DNA, 22 bp, synthetic construct
  misc_feature 1..22: note = chemically synthesized
  source 1..22: mol_type = other DNA
tactatgtcaattatgatatcc

SEQ ID NO: 131931 - DNA, 22 bp, synthetic construct
  misc_feature 1..22: note = chemically synthesized
  source 1..22: mol_type = other DNA
tgtcaattatgatatcctgtct

SEQ ID NO: 131932 - DNA, 22 bp, synthetic construct
  misc_feature 1..22: note = chemically synthesized
  source 1..22: mol_type = other DNA
tgatatcctgtctttacctata

SEQ ID NO: 131933 - DNA, 22 bp, synthetic construct
  misc_feature 1..22: note = chemically synthesized
  source 1..22: mol_type = other DNA
tctttacctatatgttaatgaa

SEQ ID NO: 131934 - DNA, 22 bp, synthetic construct
  misc_feature 1..22: note = chemically synthesized
  source 1..22: mol_type = other DNA
tacctatatgttaatgaaactg

SEQ ID NO: 131935 - DNA, 22 bp, synthetic construct
  misc_feature 1..22: note = chemically synthesized
  source 1..22: mol_type = other DNA
acctatatgttaatgaaactgt

SEQ ID NO: 131936 - DNA, 22 bp, synthetic construct
  misc_feature 1..22: note = chemically synthesized
  source 1..22: mol_type = other DNA
cctatatgttaatgaaactgtt

SEQ ID NO: 131937 - DNA, 22 bp, synthetic construct
  misc_feature 1..22: note = chemically synthesized
  source 1..22: mol_type = other DNA
tatgttaatgaaactgttagaa

SEQ ID NO: 131938 - DNA, 22 bp, synthetic construct
  misc_feature 1..22: note = chemically synthesized
  source 1..22: mol_type = other DNA
atgaaactgttagaaaagaaaa

SEQ ID NO: 131939 - DNA, 22 bp, synthetic construct
  misc_feature 1..22: note = chemically synthesized
  source 1..22: mol_type = other DNA
ttagaaaagaaaatgatatgag

SEQ ID NO: 131940 - DNA, 22 bp, synthetic construct
  misc_feature 1..22: note = chemically synthesized
  source 1..22: mol_type = other DNA
gaaaagaaaatgatatgagtaa

SEQ ID NO: 131941 - DNA, 22 bp, synthetic construct
  misc_feature 1..22: note = chemically synthesized
  source 1..22: mol_type = other DNA
tctccagggtatcctttgtgca

SEQ ID NO: 131942 - DNA, 22 bp, synthetic construct
  misc_feature 1..22: note = chemically synthesized
  source 1..22: mol_type = other DNA
ctccagggtatcctttgtgcaa

SEQ ID NO: 131943 - DNA, 22 bp, synthetic construct
  misc_feature 1..22: note = chemically synthesized
  source 1..22: mol_type = other DNA
tccagggtatcctttgtgcaaa

SEQ ID NO: 131944 - DNA, 22 bp, synthetic construct
  misc_feature 1..22: note = chemically synthesized
  source 1..22: mol_type = other DNA
cagggtatcctttgtgcaaagc

SEQ ID NO: 131945 - DNA, 22 bp, synthetic construct
  misc_feature 1..22: note = chemically synthesized
  source 1..22: mol_type = other DNA
tgtgcaaagcacttcattgaaa

SEQ ID NO: 131946 - DNA, 22 bp, synthetic construct
  misc_feature 1..22: note = chemically synthesized
  source 1..22: mol_type = other DNA
gtgcaaagcacttcattgaaac

SEQ ID NO: 131947 - DNA, 22 bp, synthetic construct
  misc_feature 1..22: note = chemically synthesized
  source 1..22: mol_type = other DNA
tgcaaagcacttcattgaaact

SEQ ID NO: 131948 - DNA, 22 bp, synthetic construct
  misc_feature 1..22: note = chemically synthesized
  source 1..22: mol_type = other DNA
cattgaaactgattctcttcat

SEQ ID NO: 131949 - DNA, 22 bp, synthetic construct
  misc_feature 1..22: note = chemically synthesized
  source 1..22: mol_type = other DNA
attgaaactgattctcttcatc

SEQ ID NO: 131950 - DNA, 22 bp, synthetic construct
  misc_feature 1..22: note = chemically synthesized
  source 1..22: mol_type = other DNA
aaactgattctcttcatctttt

SEQ ID NO: 131951 - DNA, 22 bp, synthetic construct
  misc_feature 1..22: note = chemically synthesized
  source 1..22: mol_type = other DNA
attctcttcatcttttctacaa

SEQ ID NO: 131952 - DNA, 22 bp, synthetic construct
  misc_feature 1..22: note = chemically synthesized
  source 1..22: mol_type = other DNA
tcttcatcttttctacaaagtc

SEQ ID NO: 131953 - DNA, 22 bp, synthetic construct
  misc_feature 1..22: note = chemically synthesized
  source 1..22: mol_type = other DNA
ttcatcttttctacaaagtcag

SEQ ID NO: 131954 - DNA, 22 bp, synthetic construct
  misc_feature 1..22: note = chemically synthesized
  source 1..22: mol_type = other DNA
catcttttctacaaagtcagca

SEQ ID NO: 131955 - DNA, 22 bp, synthetic construct
  misc_feature 1..22: note = chemically synthesized
  source 1..22: mol_type = other DNA
atcttttctacaaagtcagcat

SEQ ID NO: 131956 - DNA, 22 bp, synthetic construct
  misc_feature 1..22: note = chemically synthesized
  source 1..22: mol_type = other DNA
ttctacaaagtcagcatgtaaa

SEQ ID NO: 131957 - DNA, 22 bp, synthetic construct
  misc_feature 1..22: note = chemically synthesized
  source 1..22: mol_type = other DNA
tctacaaagtcagcatgtaaaa

SEQ ID NO: 131958 - DNA, 22 bp, synthetic construct
  misc_feature 1..22: note = chemically synthesized
  source 1..22: mol_type = other DNA
ctacaaagtcagcatgtaaaac

SEQ ID NO: 131959 - DNA, 22 bp, synthetic construct
  misc_feature 1..22: note = chemically synthesized
  source 1..22: mol_type = other DNA
tacaaagtcagcatgtaaaaca

SEQ ID NO: 131960 - DNA, 22 bp, synthetic construct
  misc_feature 1..22: note = chemically synthesized
  source 1..22: mol_type = other DNA
caaagtcagcatgtaaaacact

SEQ ID NO: 131961 - DNA, 22 bp, synthetic construct
  misc_feature 1..22: note = chemically synthesized
  source 1..22: mol_type = other DNA
attaatgtacaatgaccaatca

SEQ ID NO: 131962 - DNA, 22 bp, synthetic construct
  misc_feature 1..22: note = chemically synthesized
  source 1..22: mol_type = other DNA
atgtacaatgaccaatcaataa

SEQ ID NO: 131963 - DNA, 22 bp, synthetic construct
  misc_feature 1..22: note = chemically synthesized
  source 1..22: mol_type = other DNA
ttgattagtgaataaagtcatt

SEQ ID NO: 131964 - DNA, 22 bp, synthetic construct
  misc_feature 1..22: note = chemically synthesized
  source 1..22: mol_type = other DNA
attagtgaataaagtcattatc

SEQ ID NO: 131965 - DNA, 22 bp, synthetic construct
  misc_feature 1..22: note = chemically synthesized
  source 1..22: mol_type = other DNA
gtgaataaagtcattatcttct

SEQ ID NO: 131966 - DNA, 22 bp, synthetic construct
  misc_feature 1..22: note = chemically synthesized
  source 1..22: mol_type = other DNA
tcttcttgtgataactatggaa

SEQ ID NO: 131967 - DNA, 22 bp, synthetic construct
  misc_feature 1..22: note = chemically synthesized
  source 1..22: mol_type = other DNA
cttgtgataactatggaagtca

SEQ ID NO: 131968 - DNA, 22 bp, synthetic construct
  misc_feature 1..22: note = chemically synthesized
  source 1..22: mol_type = other DNA
ttgtgataactatggaagtcaa

SEQ ID NO: 131969 - DNA, 22 bp, synthetic construct
  misc_feature 1..22: note = chemically synthesized
  source 1..22: mol_type = other DNA
gtgataactatggaagtcaatg

SEQ ID NO: 131970 - DNA, 22 bp, synthetic construct
  misc_feature 1..22: note = chemically synthesized
  source 1..22: mol_type = other DNA
tgataactatggaagtcaatgg

SEQ ID NO: 131971 - DNA, 22 bp, synthetic construct
  misc_feature 1..22: note = chemically synthesized
  source 1..22: mol_type = other DNA
tggaagtcaatggaactactct

SEQ ID NO: 131972 - DNA, 22 bp, synthetic construct
  misc_feature 1..22: note = chemically synthesized
  source 1..22: mol_type = other DNA
ctctccattcagcaaaactcag

SEQ ID NO: 131973 - DNA, 22 bp, synthetic construct
  misc_feature 1..22: note = chemically synthesized
  source 1..22: mol_type = other DNA
tccattcagcaaaactcagaaa

SEQ ID NO: 131974 - DNA, 22 bp, synthetic construct
  misc_feature 1..22: note = chemically synthesized
  source 1..22: mol_type = other DNA
cattcagcaaaactcagaaatt

SEQ ID NO: 131975 - DNA, 22 bp, synthetic construct
  misc_feature 1..22: note = chemically synthesized
  source 1..22: mol_type = other DNA
agcaaaactcagaaattcaggt

SEQ ID NO: 131976 - DNA, 22 bp, synthetic construct
  misc_feature 1..22: note = chemically synthesized
  source 1..22: mol_type = other DNA
agaaattcaggtggcattactt

SEQ ID NO: 131977 - DNA, 22 bp, synthetic construct
  misc_feature 1..22: note = chemically synthesized
  source 1..22: mol_type = other DNA
aggtggcattacttacgcttct

SEQ ID NO: 131978 - DNA, 22 bp, synthetic construct
  misc_feature 1..22: note = chemically synthesized
  source 1..22: mol_type = other DNA
cttacgcttctttctctttaat

SEQ ID NO: 131979 - DNA, 22 bp, synthetic construct
  misc_feature 1..22: note = chemically synthesized
  source 1..22: mol_type = other DNA
acgcttctttctctttaatcta

SEQ ID NO: 131980 - DNA, 22 bp, synthetic construct
  misc_feature 1..22: note = chemically synthesized
  source 1..22: mol_type = other DNA
cgcttctttctctttaatctac

SEQ ID NO: 131981 - DNA, 22 bp, synthetic construct
  misc_feature 1..22: note = chemically synthesized
  source 1..22: mol_type = other DNA
ctttctctttaatctactacct

SEQ ID NO: 131982 - DNA, 22 bp, synthetic construct
  misc_feature 1..22: note = chemically synthesized
  source 1..22: mol_type = other DNA
tttctctttaatctactacctt

SEQ ID NO: 131983 - DNA, 22 bp, synthetic construct
  misc_feature 1..22: note = chemically synthesized
  source 1..22: mol_type = other DNA
tctctttaatctactaccttca

SEQ ID NO: 131984 - DNA, 22 bp, synthetic construct
  misc_feature 1..22: note = chemically synthesized
  source 1..22: mol_type = other DNA
ctctttaatctactaccttcaa

SEQ ID NO: 131985 - DNA, 22 bp, synthetic construct
  misc_feature 1..22: note = chemically synthesized
  source 1..22: mol_type = other DNA
tctttaatctactaccttcaat

SEQ ID NO: 131986 - DNA, 22 bp, synthetic construct
  misc_feature 1..22: note = chemically synthesized
  source 1..22: mol_type = other DNA
tttaatctactaccttcaatca

SEQ ID NO: 131987 - DNA, 22 bp, synthetic construct
  misc_feature 1..22: note = chemically synthesized
  source 1..22: mol_type = other DNA
taatctactaccttcaatcact

SEQ ID NO: 131988 - DNA, 22 bp, synthetic construct
  misc_feature 1..22: note = chemically synthesized
  source 1..22: mol_type = other DNA
aatctactaccttcaatcactc

SEQ ID NO: 131989 - DNA, 22 bp, synthetic construct
  misc_feature 1..22: note = chemically synthesized
  source 1..22: mol_type = other DNA
atctactaccttcaatcactca

SEQ ID NO: 131990 - DNA, 22 bp, synthetic construct
  misc_feature 1..22: note = chemically synthesized
  source 1..22: mol_type = other DNA
ctaccttcaatcactcagttct

SEQ ID NO: 131991 - DNA, 22 bp, synthetic construct
  misc_feature 1..22: note = chemically synthesized
  source 1..22: mol_type = other DNA
ccttcaatcactcagttctatt

SEQ ID NO: 131992 - DNA, 22 bp, synthetic construct
  misc_feature 1..22: note = chemically synthesized
  source 1..22: mol_type = other DNA
caatcactcagttctattctaa

SEQ ID NO: 131993 - DNA, 22 bp, synthetic construct
  misc_feature 1..22: note = chemically synthesized
  source 1..22: mol_type = other DNA
aatcactcagttctattctaag

SEQ ID NO: 131994 - DNA, 22 bp, synthetic construct
  misc_feature 1..22: note = chemically synthesized
  source 1..22: mol_type = other DNA
agttctattctaagtcatagaa

SEQ ID NO: 131995 - DNA, 22 bp, synthetic construct
  misc_feature 1..22: note = chemically synthesized
  source 1..22: mol_type = other DNA
tattctaagtcatagaatctct

SEQ ID NO: 131996 - DNA, 22 bp, synthetic construct
  misc_feature 1..22: note = chemically synthesized
  source 1..22: mol_type = other DNA
ttctaagtcatagaatctctct

SEQ ID NO: 131997 - DNA, 22 bp, synthetic construct
  misc_feature 1..22: note = chemically synthesized
  source 1..22: mol_type = other DNA
taagtcatagaatctctcttct

SEQ ID NO: 131998 - DNA, 22 bp, synthetic construct
  misc_feature 1..22: note = chemically synthesized
  source 1..22: mol_type = other DNA
agtcatagaatctctcttctat

SEQ ID NO: 131999 - DNA, 22 bp, synthetic construct
  misc_feature 1..22: note = chemically synthesized
  source 1..22: mol_type = other DNA
tcttctattcaagcctttctaa

SEQ ID NO: 132000 - DNA, 22 bp, synthetic construct
  misc_feature 1..22: note = chemically synthesized
  source 1..22: mol_type = other DNA
ttctattcaagcctttctaatg

SEQ ID NO: 132001 - DNA, 22 bp, synthetic construct
  misc_feature 1..22: note = chemically synthesized
  source 1..22: mol_type = other DNA
ctattcaagcctttctaatgct

SEQ ID NO: 132002 - DNA, 22 bp, synthetic construct
  misc_feature 1..22: note = chemically synthesized
  source 1..22: mol_type = other DNA
tattcaagcctttctaatgcta

SEQ ID NO: 132003 - DNA, 22 bp, synthetic construct
  misc_feature 1..22: note = chemically synthesized
  source 1..22: mol_type = other DNA
ttcaagcctttctaatgctact

SEQ ID NO: 132004 - DNA, 22 bp, synthetic construct
  misc_feature 1..22: note = chemically synthesized
  source 1..22: mol_type = other DNA
aagcctttctaatgctactgat

SEQ ID NO: 132005 - DNA, 22 bp, synthetic construct
  misc_feature 1..22: note = chemically synthesized
  source 1..22: mol_type = other DNA
tctaatgctactgataacaact

SEQ ID NO: 132006 - DNA, 22 bp, synthetic construct
  misc_feature 1..22: note = chemically synthesized
  source 1..22: mol_type = other DNA
ctaatgctactgataacaacta

SEQ ID NO: 132007 - DNA, 22 bp, synthetic construct
  misc_feature 1..22: note = chemically synthesized
  source 1..22: mol_type = other DNA
taatgctactgataacaactag

SEQ ID NO: 132008 - DNA, 22 bp, synthetic construct
  misc_feature 1..22: note = chemically synthesized
  source 1..22: mol_type = other DNA
atgctactgataacaactagtc

SEQ ID NO: 132009 - DNA, 22 bp, synthetic construct
  misc_feature 1..22: note = chemically synthesized
  source 1..22: mol_type = other DNA
ctgataacaactagtcaaaacc

SEQ ID NO: 132010 - DNA, 22 bp, synthetic construct
  misc_feature 1..22: note = chemically synthesized
  source 1..22: mol_type = other DNA
ataacaactagtcaaaaccaca

SEQ ID NO: 132011 - DNA, 22 bp, synthetic construct
  misc_feature 1..22: note = chemically synthesized
  source 1..22: mol_type = other DNA
gtcaaaaccacaccaacacaat

SEQ ID NO: 132012 - DNA, 22 bp, synthetic construct
  misc_feature 1..22: note = chemically synthesized
  source 1..22: mol_type = other DNA
gacacgtgtattgtcatatcct

SEQ ID NO: 132013 - DNA, 22 bp, synthetic construct
  misc_feature 1..22: note = chemically synthesized
  source 1..22: mol_type = other DNA
acacgtgtattgtcatatcctg

SEQ ID NO: 132014 - DNA, 22 bp, synthetic construct
  misc_feature 1..22: note = chemically synthesized
  source 1..22: mol_type = other DNA
tcatatcctgatacttctttta

SEQ ID NO: 132015 - DNA, 22 bp, synthetic construct
  misc_feature 1..22: note = chemically synthesized
  source 1..22: mol_type = other DNA
atacttcttttacctgttctcc

SEQ ID NO: 132016 - DNA, 22 bp, synthetic construct
  misc_feature 1..22: note = chemically synthesized
  source 1..22: mol_type = other DNA
cttttacctgttctcccccttt

SEQ ID NO: 132017 - DNA, 22 bp, synthetic construct
  misc_feature 1..22: note = chemically synthesized
  source 1..22: mol_type = other DNA
ttttacctgttctccccctttt

SEQ ID NO: 132018 - DNA, 22 bp, synthetic construct
  misc_feature 1..22: note = chemically synthesized
  source 1..22: mol_type = other DNA
ttacctgttctcccccttttcc

SEQ ID NO: 132019 - DNA, 22 bp, synthetic construct
  misc_feature 1..22: note = chemically synthesized
  source 1..22: mol_type = other DNA
tacctgttctcccccttttcca

SEQ ID NO: 132020 - DNA, 22 bp, synthetic construct
  misc_feature 1..22: note = chemically synthesized
  source 1..22: mol_type = other DNA
acctgttctcccccttttccaa

SEQ ID NO: 132021 - DNA, 22 bp, synthetic construct
  misc_feature 1..22: note = chemically synthesized
  source 1..22: mol_type = other DNA
cctgttctcccccttttccaac

SEQ ID NO: 132022 - DNA, 22 bp, synthetic construct
  misc_feature 1..22: note = chemically synthesized
  source 1..22: mol_type = other DNA
ttctcccccttttccaacatgt

SEQ ID NO: 132023 - DNA, 22 bp, synthetic construct
  misc_feature 1..22: note = chemically synthesized
  source 1..22: mol_type = other DNA
tcccccttttccaacatgtttc

SEQ ID NO: 132024 - DNA, 22 bp, synthetic construct
  misc_feature 1..22: note = chemically synthesized
  source 1..22: mol_type = other DNA
ccccttttccaacatgtttctc

SEQ ID NO: 132025 - DNA, 22 bp, synthetic construct
  misc_feature 1..22: note = chemically synthesized
  source 1..22: mol_type = other DNA
ttccaacatgtttctcatactg

SEQ ID NO: 132026 - DNA, 22 bp, synthetic construct
  misc_feature 1..22: note = chemically synthesized
  source 1..22: mol_type = other DNA
tccaacatgtttctcatactgt

SEQ ID NO: 132027 - DNA, 22 bp, synthetic construct
  misc_feature 1..22: note = chemically synthesized
  source 1..22: mol_type = other DNA
ccaacatgtttctcatactgta

SEQ ID NO: 132028 - DNA, 22 bp, synthetic construct
  misc_feature 1..22: note = chemically synthesized
  source 1..22: mol_type = other DNA
caacatgtttctcatactgtag

SEQ ID NO: 132029 - DNA, 22 bp, synthetic construct
  misc_feature 1..22: note = chemically synthesized
  source 1..22: mol_type = other DNA
ctcatactgtagccatagtaac

SEQ ID NO: 132030 - DNA, 22 bp, synthetic construct
  misc_feature 1..22: note = chemically synthesized
  source 1..22: mol_type = other DNA
tcatactgtagccatagtaact

SEQ ID NO: 132031 - DNA, 22 bp, synthetic construct
  misc_feature 1..22: note = chemically synthesized
  source 1..22: mol_type = other DNA
atactgtagccatagtaacttt

SEQ ID NO: 132032 - DNA, 22 bp, synthetic construct
  misc_feature 1..22: note = chemically synthesized
  source 1..22: mol_type = other DNA
tagccatagtaactttaaacaa

SEQ ID NO: 132033 - DNA, 22 bp, synthetic construct
  misc_feature 1..22: note = chemically synthesized
  source 1..22: mol_type = other DNA
taaacaataactacttgattat

SEQ ID NO: 132034 - DNA, 22 bp, synthetic construct
  misc_feature 1..22: note = chemically synthesized
  source 1..22: mol_type = other DNA
aaacaataactacttgattata

SEQ ID NO: 132035 - DNA, 22 bp, synthetic construct
  misc_feature 1..22: note = chemically synthesized
  source 1..22: mol_type = other DNA
aacaataactacttgattataa

SEQ ID NO: 132036 - DNA, 22 bp, synthetic construct
  misc_feature 1..22: note = chemically synthesized
  source 1..22: mol_type = other DNA
cttgattataagtactcatcat

SEQ ID NO: 132037 - DNA, 22 bp, synthetic construct
  misc_feature 1..22: note = chemically synthesized
  source 1..22: mol_type = other DNA
gattataagtactcatcatacc

SEQ ID NO: 132038 - DNA, 22 bp, synthetic construct
  misc_feature 1..22: note = chemically synthesized
  source 1..22: mol_type = other DNA
attataagtactcatcatacct

SEQ ID NO: 132039 - DNA, 22 bp, synthetic construct
  misc_feature 1..22: note = chemically synthesized
  source 1..22: mol_type = other DNA
taagtactcatcatacctcttg

SEQ ID NO: 132040 - DNA, 22 bp, synthetic construct
  misc_feature 1..22: note = chemically synthesized
  source 1..22: mol_type = other DNA
atcatacctcttgttttatatt

SEQ ID NO: 132041 - DNA, 22 bp, synthetic construct
  misc_feature 1..22: note = chemically synthesized
  source 1..22: mol_type = other DNA
ttgttttatattcattccctta

SEQ ID NO: 132042 - DNA, 22 bp, synthetic construct
  misc_feature 1..22: note = chemically synthesized
  source 1..22: mol_type = other DNA
gttttatattcattcccttatg

SEQ ID NO: 132043 - DNA, 22 bp, synthetic construct
  misc_feature 1..22: note = chemically synthesized
  source 1..22: mol_type = other DNA
ttttatattcattcccttatgg

SEQ ID NO: 132044 - DNA, 22 bp, synthetic construct
  misc_feature 1..22: note = chemically synthesized
  source 1..22: mol_type = other DNA
tatattcattcccttatggtaa

SEQ ID NO: 132045 - DNA, 22 bp, synthetic construct
  misc_feature 1..22: note = chemically synthesized
  source 1..22: mol_type = other DNA
atattcattcccttatggtaat

SEQ ID NO: 132046 - DNA, 22 bp, synthetic construct
  misc_feature 1..22: note = chemically synthesized
  source 1..22: mol_type = other DNA
tattcattcccttatggtaatg

SEQ ID NO: 132047 - DNA, 22 bp, synthetic construct
  misc_feature 1..22: note = chemically synthesized
  source 1..22: mol_type = other DNA
attcccttatggtaatgtcaaa

SEQ ID NO: 132048 - DNA, 22 bp, synthetic construct
  misc_feature 1..22: note = chemically synthesized
  source 1..22: mol_type = other DNA
ccttatggtaatgtcaaaatgt

SEQ ID NO: 132049 - DNA, 22 bp, synthetic construct
  misc_feature 1..22: note = chemically synthesized
  source 1..22: mol_type = other DNA
atggtaatgtcaaaatgtttta

SEQ ID NO: 132050 - DNA, 22 bp, synthetic construct
  misc_feature 1..22: note = chemically synthesized
  source 1..22: mol_type = other DNA
tggtaatgtcaaaatgttttac

SEQ ID NO: 132051 - DNA, 22 bp, synthetic construct
  misc_feature 1..22: note = chemically synthesized
  source 1..22: mol_type = other DNA
tacatgatttgcaagatatatt

SEQ ID NO: 132052 - DNA, 22 bp, synthetic construct
  misc_feature 1..22: note = chemically synthesized
  source 1..22: mol_type = other DNA
acatgatttgcaagatatattg

SEQ ID NO: 132053 - DNA, 22 bp, synthetic construct
  misc_feature 1..22: note = chemically synthesized
  source 1..22: mol_type = other DNA
catgatttgcaagatatattgt

SEQ ID NO: 132054 - DNA, 22 bp, synthetic construct
  misc_feature 1..22: note = chemically synthesized
  source 1..22: mol_type = other DNA
gcaagatatattgtgatcagaa

SEQ ID NO: 132055 - DNA, 22 bp, synthetic construct
  misc_feature 1..22: note = chemically synthesized
  source 1..22: mol_type = other DNA
caagatatattgtgatcagaac

SEQ ID NO: 132056 - DNA, 22 bp, synthetic construct
  misc_feature 1..22: note = chemically synthesized
  source 1..22: mol_type = other DNA
tgatcagaacctgctactacta

SEQ ID NO: 132057 - DNA, 22 bp, synthetic construct
  misc_feature 1..22: note = chemically synthesized
  source 1..22: mol_type = other DNA
ctactactacagattcattttc

SEQ ID NO: 132058 - DNA, 22 bp, synthetic construct
  misc_feature 1..22: note = chemically synthesized
  source 1..22: mol_type = other DNA
ctactacagattcattttctct

SEQ ID NO: 132059 - DNA, 22 bp, synthetic construct
  misc_feature 1..22: note = chemically synthesized
  source 1..22: mol_type = other DNA
ctacagattcattttctctcaa

SEQ ID NO: 132060 - DNA, 22 bp, synthetic construct
  misc_feature 1..22: note = chemically synthesized
  source 1..22: mol_type = other DNA
cagattcattttctctcaagct

SEQ ID NO: 132061 - DNA, 22 bp, synthetic construct
  misc_feature 1..22: note = chemically synthesized
  source 1..22: mol_type = other DNA
attttctctcaagctttttttc

SEQ ID NO: 132062 - DNA, 22 bp, synthetic construct
  misc_feature 1..22: note = chemically synthesized
  source 1..22: mol_type = other DNA
tctctcaagctttttttcatgt

SEQ ID NO: 132063 - DNA, 22 bp, synthetic construct
  misc_feature 1..22: note = chemically synthesized
  source 1..22: mol_type = other DNA
ctctcaagctttttttcatgta

SEQ ID NO: 132064 - DNA, 22 bp, synthetic construct
  misc_feature 1..22: note = chemically synthesized
  source 1..22: mol_type = other DNA
tctcaagctttttttcatgtat

SEQ ID NO: 132065 - DNA, 22 bp, synthetic construct
  misc_feature 1..22: note = chemically synthesized
  source 1..22: mol_type = other DNA
tcaagctttttttcatgtattg

SEQ ID NO: 132066 - DNA, 22 bp, synthetic construct
  misc_feature 1..22: note = chemically synthesized
  source 1..22: mol_type = other DNA
aagctttttttcatgtattgtt

SEQ ID NO: 132067 - DNA, 22 bp, synthetic construct
  misc_feature 1..22: note = chemically synthesized
  source 1..22: mol_type = other DNA
tttttcatgtattgttgttcaa

SEQ ID NO: 132068 - DNA, 22 bp, synthetic construct
  misc_feature 1..22: note = chemically synthesized
  source 1..22: mol_type = other DNA
ttttcatgtattgttgttcaag

SEQ ID NO: 132069 - DNA, 22 bp, synthetic construct
  misc_feature 1..22: note = chemically synthesized
  source 1..22: mol_type = other DNA
tttcatgtattgttgttcaaga

SEQ ID NO: 132070 - DNA, 22 bp, synthetic construct
  misc_feature 1..22: note = chemically synthesized
  source 1..22: mol_type = other DNA
ttcatgtattgttgttcaagag

SEQ ID NO: 132071 - DNA, 22 bp, synthetic construct
  misc_feature 1..22: note = chemically synthesized
  source 1..22: mol_type = other DNA
tcatgtattgttgttcaagaga

SEQ ID NO: 132072 - DNA, 22 bp, synthetic construct
  misc_feature 1..22: note = chemically synthesized
  source 1..22: mol_type = other DNA
catgtattgttgttcaagagat

SEQ ID NO: 132073 - DNA, 22 bp, synthetic construct
  misc_feature 1..22: note = chemically synthesized
  source 1..22: mol_type = other DNA
atgtattgttgttcaagagata

SEQ ID NO: 132074 - DNA, 22 bp, synthetic construct
  misc_feature 1..22: note = chemically synthesized
  source 1..22: mol_type = other DNA
ttgttcaagagatattatactt

SEQ ID NO: 132075 - DNA, 22 bp, synthetic construct
  misc_feature 1..22: note = chemically synthesized
  source 1..22: mol_type = other DNA
ttcaagagatattatacttcct

SEQ ID NO: 132076 - DNA, 22 bp, synthetic construct
  misc_feature 1..22: note = chemically synthesized
  source 1..22: mol_type = other DNA
aagagatattatacttccttaa

SEQ ID NO: 132077 - DNA, 22 bp, synthetic construct
  misc_feature 1..22: note = chemically synthesized
  source 1..22: mol_type = other DNA
tacttccttaatgtatattttg

SEQ ID NO: 132078 - DNA, 22 bp, synthetic construct
  misc_feature 1..22: note = chemically synthesized
  source 1..22: mol_type = other DNA
ccttaatgtatattttgaataa

SEQ ID NO: 132079 - DNA, 22 bp, synthetic construct
  misc_feature 1..22: note = chemically synthesized
  source 1..22: mol_type = other DNA
cttaatgtatattttgaataaa

SEQ ID NO: 132080 - DNA, 22 bp, synthetic construct
  misc_feature 1..22: note = chemically synthesized
  source 1..22: mol_type = other DNA
aatgtatattttgaataaaatt

SEQ ID NO: 132081 - DNA, 22 bp, synthetic construct
  misc_feature 1..22: note = chemically synthesized
  source 1..22: mol_type = other DNA
atgtatattttgaataaaatta

SEQ ID NO: 132082 - DNA, 22 bp, synthetic construct
  misc_feature 1..22: note = chemically synthesized
  source 1..22: mol_type = other DNA
tgaataaaattatttttatttg

SEQ ID NO: 132083 - DNA, 22 bp, synthetic construct
  misc_feature 1..22: note = chemically synthesized
  source 1..22: mol_type = other DNA
gaataaaattatttttatttga

SEQ ID NO: 132084 - DNA, 22 bp, synthetic construct
  misc_feature 1..22: note = chemically synthesized
  source 1..22: mol_type = other DNA
aataaaattatttttatttgaa

SEQ ID NO: 132085 - DNA, 22 bp, synthetic construct
  misc_feature 1..22: note = chemically synthesized
  source 1..22: mol_type = other DNA
tttttatttgaatttatagtat

SEQ ID NO: 132086 - DNA, 22 bp, synthetic construct
  misc_feature 1..22: note = chemically synthesized
  source 1..22: mol_type = other DNA
ttatttgaatttatagtattta

SEQ ID NO: 132087 - DNA, 22 bp, synthetic construct
  misc_feature 1..22: note = chemically synthesized
  source 1..22: mol_type = other DNA
tatttgaatttatagtatttaa

SEQ ID NO: 132088 - DNA, 22 bp, synthetic construct
  misc_feature 1..22: note = chemically synthesized
  source 1..22: mol_type = other DNA
atttgaatttatagtatttaat

SEQ ID NO: 132089 - DNA, 22 bp, synthetic construct
  misc_feature 1..22: note = chemically synthesized
  source 1..22: mol_type = other DNA
tttgaatttatagtatttaatc

SEQ ID NO: 132090 - DNA, 22 bp, synthetic construct
  misc_feature 1..22: note = chemically synthesized
  source 1..22: mol_type = other DNA
gaatttatagtatttaatcttg

SEQ ID NO: 132091 - DNA, 22 bp, synthetic construct
  misc_feature 1..22: note = chemically synthesized
  source 1..22: mol_type = other DNA
aatttatagtatttaatcttgc

SEQ ID NO: 132092 - DNA, 22 bp, synthetic construct
  misc_feature 1..22: note = chemically synthesized
  source 1..22: mol_type = other DNA
atagtatttaatcttgccccat

SEQ ID NO: 132093 - DNA, 22 bp, synthetic construct
  misc_feature 1..22: note = chemically synthesized
  source 1..22: mol_type = other DNA
tagtatttaatcttgccccatt

SEQ ID NO: 132094 - DNA, 22 bp, synthetic construct
  misc_feature 1..22: note = chemically synthesized
  source 1..22: mol_type = other DNA
aatcttgccccattaccaatgt

SEQ ID NO: 132095 - DNA, 22 bp, synthetic construct
  misc_feature 1..22: note = chemically synthesized
  source 1..22: mol_type = other DNA
atcttgccccattaccaatgta

SEQ ID NO: 132096 - DNA, 22 bp, synthetic construct
  misc_feature 1..22: note = chemically synthesized
  source 1..22: mol_type = other DNA
gccccattaccaatgtacattt

SEQ ID NO: 132097 - DNA, 22 bp, synthetic construct
  misc_feature 1..22: note = chemically synthesized
  source 1..22: mol_type = other DNA
ccccattaccaatgtacatttt

SEQ ID NO: 132098 - DNA, 22 bp, synthetic construct
  misc_feature 1..22: note = chemically synthesized
  source 1..22: mol_type = other DNA
ccaatgtacattttacaaactt

SEQ ID NO: 132099 - DNA, 22 bp, synthetic construct
  misc_feature 1..22: note = chemically synthesized
  source 1..22: mol_type = other DNA
tacaaactttaatttgtttact

SEQ ID NO: 132100 - DNA, 22 bp, synthetic construct
  misc_feature 1..22: note = chemically synthesized
  source 1..22: mol_type = other DNA
acaaactttaatttgtttactt

SEQ ID NO: 132101 - DNA, 22 bp, synthetic construct
  misc_feature 1..22: note = chemically synthesized
  source 1..22: mol_type = other DNA
caaactttaatttgtttacttg

SEQ ID NO: 132102 - DNA, 22 bp, synthetic construct
  misc_feature 1..22: note = chemically synthesized
  source 1..22: mol_type = other DNA
taatttgtttacttgtttcgtt

SEQ ID NO: 132103 - DNA, 22 bp, synthetic construct
  misc_feature 1..22: note = chemically synthesized
  source 1..22: mol_type = other DNA
aatttgtttacttgtttcgttt

SEQ ID NO: 132104 - DNA, 22 bp, synthetic construct
  misc_feature 1..22: note = chemically synthesized
  source 1..22: mol_type = other DNA
atttgtttacttgtttcgtttt

SEQ ID NO: 132105 - DNA, 22 bp, synthetic construct
  misc_feature 1..22: note = chemically synthesized
  source 1..22: mol_type = other DNA
gtttacttgtttcgttttgtgt

SEQ ID NO: 132106 - DNA, 22 bp, synthetic construct
  misc_feature 1..22: note = chemically synthesized
  source 1..22: mol_type = other DNA
tttacttgtttcgttttgtgtt

SEQ ID NO: 132107 - DNA, 22 bp, synthetic construct
  misc_feature 1..22: note = chemically synthesized
  source 1..22: mol_type = other DNA
acttgtttcgttttgtgtttgt

SEQ ID NO: 132108 - DNA, 22 bp, synthetic construct
  misc_feature 1..22: note = chemically synthesized
  source 1..22: mol_type = other DNA
cttgtttcgttttgtgtttgtt

SEQ ID NO: 132109 - DNA, 22 bp, synthetic construct
  misc_feature 1..22: note = chemically synthesized
  source 1..22: mol_type = other DNA
gtttcgttttgtgtttgttctt

SEQ ID NO: 132110 - DNA, 22 bp, synthetic construct
  misc_feature 1..22: note = chemically synthesized
  source 1..22: mol_type = other DNA
tttcgttttgtgtttgttcttt

SEQ ID NO: 132111 - DNA, 22 bp, synthetic construct
  misc_feature 1..22: note = chemically synthesized
  source 1..22: mol_type = other DNA
cgttttgtgtttgttcttttca

SEQ ID NO: 132112 - DNA, 22 bp, synthetic construct
  misc_feature 1..22: note = chemically synthesized
  source 1..22: mol_type = other DNA
gttttgtgtttgttcttttcac

SEQ ID NO: 132113 - DNA, 22 bp, synthetic construct
  misc_feature 1..22: note = chemically synthesized
  source 1..22: mol_type = other DNA
tgtgtttgttcttttcacctgt

SEQ ID NO: 132114 - DNA, 22 bp, synthetic construct
  misc_feature 1..22: note = chemically synthesized
  source 1..22: mol_type = other DNA
gtgtttgttcttttcacctgta

SEQ ID NO: 132115 - DNA, 22 bp, synthetic construct
  misc_feature 1..22: note = chemically synthesized
  source 1..22: mol_type = other DNA
tgtttgttcttttcacctgtac

SEQ ID NO: 132116 - DNA, 22 bp, synthetic construct
  misc_feature 1..22: note = chemically synthesized
  source 1..22: mol_type = other DNA
gttcttttcacctgtacgcaat

SEQ ID NO: 132117 - DNA, 22 bp, synthetic construct
  misc_feature 1..22: note = chemically synthesized
  source 1..22: mol_type = other DNA
ttcttttcacctgtacgcaatg

SEQ ID NO: 132118 - DNA, 22 bp, synthetic construct
  misc_feature 1..22: note = chemically synthesized
  source 1..22: mol_type = other DNA
ttttcacctgtacgcaatgatt

SEQ ID NO: 132119 - DNA, 22 bp, synthetic construct
  misc_feature 1..22: note = chemically synthesized
  source 1..22: mol_type = other DNA
ttcacctgtacgcaatgattgc

SEQ ID NO: 132120 - DNA, 22 bp, synthetic construct
  misc_feature 1..22: note = chemically synthesized
  source 1..22: mol_type = other DNA
tcacctgtacgcaatgattgca

SEQ ID NO: 132121 - DNA, 22 bp, synthetic construct
  misc_feature 1..22: note = chemically synthesized
  source 1..22: mol_type = other DNA
cacctgtacgcaatgattgcac

SEQ ID NO: 132122 - DNA, 22 bp, synthetic construct
  misc_feature 1..22: note = chemically synthesized
  source 1..22: mol_type = other DNA
acctgtacgcaatgattgcact

SEQ ID NO: 132123 - DNA, 22 bp, synthetic construct
  misc_feature 1..22: note = chemically synthesized
  source 1..22: mol_type = other DNA
tacgcaatgattgcactacccc

SEQ ID NO: 132124 - DNA, 22 bp, synthetic construct
  misc_feature 1..22: note = chemically synthesized
  source 1..22: mol_type = other DNA
cactaccccaccaaatactact

SEQ ID NO: 132125 - DNA, 22 bp, synthetic construct
  misc_feature 1..22: note = chemically synthesized
  source 1..22: mol_type = other DNA
ccccaccaaatactactacact

SEQ ID NO: 132126 - DNA, 22 bp, synthetic construct
  misc_feature 1..22: note = chemically synthesized
  source 1..22: mol_type = other DNA
ctacactactaatatagtagca

SEQ ID NO: 132127 - DNA, 22 bp, synthetic construct
  misc_feature 1..22: note = chemically synthesized
  source 1..22: mol_type = other DNA
cactactaatatagtagcattt

SEQ ID NO: 132128 - DNA, 22 bp, synthetic construct
  misc_feature 1..22: note = chemically synthesized
  source 1..22: mol_type = other DNA
ctaatatagtagcatttaattc

SEQ ID NO: 132129 - DNA, 22 bp, synthetic construct
  misc_feature 1..22: note = chemically synthesized
  source 1..22: mol_type = other DNA
atatagtagcatttaattctca

SEQ ID NO: 132130 - DNA, 22 bp, synthetic construct
  misc_feature 1..22: note = chemically synthesized
  source 1..22: mol_type = other DNA
aattctcagcttaagtagcatt

SEQ ID NO: 132131 - DNA, 22 bp, synthetic construct
  misc_feature 1..22: note = chemically synthesized
  source 1..22: mol_type = other DNA
attctcagcttaagtagcattt

SEQ ID NO: 132132 - DNA, 22 bp, synthetic construct
  misc_feature 1..22: note = chemically synthesized
  source 1..22: mol_type = other DNA
tcagcttaagtagcatttcttc

SEQ ID NO: 132133 - DNA, 22 bp, synthetic construct
  misc_feature 1..22: note = chemically synthesized
  source 1..22: mol_type = other DNA
agcttaagtagcatttcttctg

SEQ ID NO: 132134 - DNA, 22 bp, synthetic construct
  misc_feature 1..22: note = chemically synthesized
  source 1..22: mol_type = other DNA
aagtagcatttcttctggaaaa

SEQ ID NO: 132135 - DNA, 22 bp, synthetic construct
  misc_feature 1..22: note = chemically synthesized
  source 1..22: mol_type = other DNA
agtagcatttcttctggaaaat

SEQ ID NO: 132136 - DNA, 22 bp, synthetic construct
  misc_feature 1..22: note = chemically synthesized
  source 1..22: mol_type = other DNA
cttctggaaaatgttccctgat

SEQ ID NO: 132137 - DNA, 22 bp, synthetic construct
  misc_feature 1..22: note = chemically synthesized
  source 1..22: mol_type = other DNA
ttctggaaaatgttccctgatc

SEQ ID NO: 132138 - DNA, 22 bp, synthetic construct
  misc_feature 1..22: note = chemically synthesized
  source 1..22: mol_type = other DNA
ctggaaaatgttccctgatccc

SEQ ID NO: 132139 - DNA, 22 bp, synthetic construct
  misc_feature 1..22: note = chemically synthesized
  source 1..22: mol_type = other DNA
tggaaaatgttccctgatccca

SEQ ID NO: 132140 - DNA, 22 bp, synthetic construct
  misc_feature 1..22: note = chemically synthesized
  source 1..22: mol_type = other DNA
gaaaatgttccctgatcccaga

SEQ ID NO: 132141 - DNA, 22 bp, synthetic construct
  misc_feature 1..22: note = chemically synthesized
  source 1..22: mol_type = other DNA
cctgatcccagaaatttatttg

SEQ ID NO: 132142 - DNA, 22 bp, synthetic construct
  misc_feature 1..22: note = chemically synthesized
  source 1..22: mol_type = other DNA
atcccagaaatttatttgatgt

SEQ ID NO: 132143 - DNA, 22 bp, synthetic construct
  misc_feature 1..22: note = chemically synthesized
  source 1..22: mol_type = other DNA
atttgatgtgtctctcatagca

SEQ ID NO: 132144 - DNA, 22 bp, synthetic construct
  misc_feature 1..22: note = chemically synthesized
  source 1..22: mol_type = other DNA
tttgatgtgtctctcatagcac

SEQ ID NO: 132145 - DNA, 22 bp, synthetic construct
  misc_feature 1..22: note = chemically synthesized
  source 1..22: mol_type = other DNA
gatgtgtctctcatagcacact

SEQ ID NO: 132146 - DNA, 22 bp, synthetic construct
  misc_feature 1..22: note = chemically synthesized
  source 1..22: mol_type = other DNA
atgtgtctctcatagcacacta

SEQ ID NO: 132147 - DNA, 22 bp, synthetic construct
  misc_feature 1..22: note = chemically synthesized
  source 1..22: mol_type = other DNA
tcatagcacactaatattcacg

SEQ ID NO: 132148 - DNA, 22 bp, synthetic construct
  misc_feature 1..22: note = chemically synthesized
  source 1..22: mol_type = other DNA
atagcacactaatattcacgta

SEQ ID NO: 132149 - DNA, 22 bp, synthetic construct
  misc_feature 1..22: note = chemically synthesized
  source 1..22: mol_type = other DNA
atattcacgtagtaatgatagt

SEQ ID NO: 132150 - DNA, 22 bp, synthetic construct
  misc_feature 1..22: note = chemically synthesized
  source 1..22: mol_type = other DNA
acgtagtaatgatagtgttgta

SEQ ID NO: 132151 - DNA, 22 bp, synthetic construct
  misc_feature 1..22: note = chemically synthesized
  source 1..22: mol_type = other DNA
tatgaattcatggtaaatattt

SEQ ID NO: 132152 - DNA, 22 bp, synthetic construct
  misc_feature 1..22: note = chemically synthesized
  source 1..22: mol_type = other DNA
atggtaaatattttctttctag

SEQ ID NO: 132153 - DNA, 22 bp, synthetic construct
  misc_feature 1..22: note = chemically synthesized
  source 1..22: mol_type = other DNA
tctttctagtgcctgcttgggt

SEQ ID NO: 132154 - DNA, 22 bp, synthetic construct
  misc_feature 1..22: note = chemically synthesized
  source 1..22: mol_type = other DNA
ctttctagtgcctgcttgggtt

SEQ ID NO: 132155 - DNA, 22 bp, synthetic construct
  misc_feature 1..22: note = chemically synthesized
  source 1..22: mol_type = other DNA
tttctagtgcctgcttgggttt

SEQ ID NO: 132156 - DNA, 22 bp, synthetic construct
  misc_feature 1..22: note = chemically synthesized
  source 1..22: mol_type = other DNA
tctagtgcctgcttgggtttta

SEQ ID NO: 132157 - DNA, 22 bp, synthetic construct
  misc_feature 1..22: note = chemically synthesized
  source 1..22: mol_type = other DNA
ctagtgcctgcttgggttttaa

SEQ ID NO: 132158 - DNA, 22 bp, synthetic construct
  misc_feature 1..22: note = chemically synthesized
  source 1..22: mol_type = other DNA
tagtgcctgcttgggttttaaa

SEQ ID NO: 132159 - DNA, 22 bp, synthetic construct
  misc_feature 1..22: note = chemically synthesized
  source 1..22: mol_type = other DNA
gtgcctgcttgggttttaaatt

SEQ ID NO: 132160 - DNA, 22 bp, synthetic construct
  misc_feature 1..22: note = chemically synthesized
  source 1..22: mol_type = other DNA
cttgggttttaaatttcaataa

SEQ ID NO: 132161 - DNA, 22 bp, synthetic construct
  misc_feature 1..22: note = chemically synthesized
  source 1..22: mol_type = other DNA
gggttttaaatttcaataaaaa

SEQ ID NO: 132162 - DNA, 22 bp, synthetic construct
  misc_feature 1..22: note = chemically synthesized
  source 1..22: mol_type = other DNA
ggttttaaatttcaataaaaag

SEQ ID NO: 132163 - DNA, 22 bp, synthetic construct
  misc_feature 1..22: note = chemically synthesized
  source 1..22: mol_type = other DNA
taaatttcaataaaaagaacaa

SEQ ID NO: 132164 - DNA, 22 bp, synthetic construct
  misc_feature 1..22: note = chemically synthesized
  source 1..22: mol_type = other DNA
aaatttcaataaaaagaacaag

SEQ ID NO: 132165 - DNA, 22 bp, synthetic construct
  misc_feature 1..22: note = chemically synthesized
  source 1..22: mol_type = other DNA
aatttcaataaaaagaacaagt

SEQ ID NO: 132166 - DNA, 22 bp, synthetic construct
  misc_feature 1..22: note = chemically synthesized
  source 1..22: mol_type = other DNA
caataaaaagaacaagtcctag

SEQ ID NO: 132167 - DNA, 22 bp, synthetic construct
  misc_feature 1..22: note = chemically synthesized
  source 1..22: mol_type = other DNA
aataaaaagaacaagtcctagg

SEQ ID NO: 132168 - DNA, 22 bp, synthetic construct
  misc_feature 1..22: note = chemically synthesized
  source 1..22: mol_type = other DNA
ggtatttcattttctttgtggc

SEQ ID NO: 132169 - DNA, 22 bp, synthetic construct
  misc_feature 1..22: note = chemically synthesized
  source 1..22: mol_type = other DNA
cattttctttgtggctgttctt

SEQ ID NO: 132170 - DNA, 22 bp, synthetic construct
  misc_feature 1..22: note = chemically synthesized
  source 1..22: mol_type = other DNA
attttctttgtggctgttctta

SEQ ID NO: 132171 - DNA, 22 bp, synthetic construct
  misc_feature 1..22: note = chemically synthesized
  source 1..22: mol_type = other DNA
tctttgtggctgttcttaatgg

SEQ ID NO: 132172 - DNA, 22 bp, synthetic construct
  misc_feature 1..22: note = chemically synthesized
  source 1..22: mol_type = other DNA
ctttgtggctgttcttaatggg

SEQ ID NO: 132173 - DNA, 22 bp, synthetic construct
  misc_feature 1..22: note = chemically synthesized
  source 1..22: mol_type = other DNA
tttgtggctgttcttaatggga

SEQ ID NO: 132174 - DNA, 22 bp, synthetic construct
  misc_feature 1..22: note = chemically synthesized
  source 1..22: mol_type = other DNA
tgtggctgttcttaatgggatt

SEQ ID NO: 132175 - DNA, 22 bp, synthetic construct
  misc_feature 1..22: note = chemically synthesized
  source 1..22: mol_type = other DNA
gtggctgttcttaatgggattg

SEQ ID NO: 132176 - DNA, 22 bp, synthetic construct
  misc_feature 1..22: note = chemically synthesized
  source 1..22: mol_type = other DNA
tggctgttcttaatgggattgt

SEQ ID NO: 132177 - DNA, 22 bp, synthetic construct
  misc_feature 1..22: note = chemically synthesized
  source 1..22: mol_type = other DNA
ttcttaatgggattgtgttctc

SEQ ID NO: 132178 - DNA, 22 bp, synthetic construct
  misc_feature 1..22: note = chemically synthesized
  source 1..22: mol_type = other DNA
ttaatgggattgtgttctcgat

SEQ ID NO: 132179 - DNA, 22 bp, synthetic construct
  misc_feature 1..22: note = chemically synthesized
  source 1..22: mol_type = other DNA
aatgggattgtgttctcgattt

SEQ ID NO: 132180 - DNA, 22 bp, synthetic construct
  misc_feature 1..22: note = chemically synthesized
  source 1..22: mol_type = other DNA
atgggattgtgttctcgatttg

SEQ ID NO: 132181 - DNA, 22 bp, synthetic construct
  misc_feature 1..22: note = chemically synthesized
  source 1..22: mol_type = other DNA
tgttctcgatttgactctcagc

SEQ ID NO: 132182 - DNA, 22 bp, synthetic construct
  misc_feature 1..22: note = chemically synthesized
  source 1..22: mol_type = other DNA
tcgatttgactctcagcctggg

SEQ ID NO: 132183 - DNA, 22 bp, synthetic construct
  misc_feature 1..22: note = chemically synthesized
  source 1..22: mol_type = other DNA
gatttgactctcagcctgggcc

SEQ ID NO: 132184 - DNA, 22 bp, synthetic construct
  misc_feature 1..22: note = chemically synthesized
  source 1..22: mol_type = other DNA
gactctcagcctgggccttatt

SEQ ID NO: 132185 - DNA, 22 bp, synthetic construct
  misc_feature 1..22: note = chemically synthesized
  source 1..22: mol_type = other DNA
actctcagcctgggccttattg

SEQ ID NO: 132186 - DNA, 22 bp, synthetic construct
  misc_feature 1..22: note = chemically synthesized
  source 1..22: mol_type = other DNA
tcagcctgggccttattggtgt

SEQ ID NO: 132187 - DNA, 22 bp, synthetic construct
  misc_feature 1..22: note = chemically synthesized
  source 1..22: mol_type = other DNA
agcctgggccttattggtgtat

SEQ ID NO: 132188 - DNA, 22 bp, synthetic construct
  misc_feature 1..22: note = chemically synthesized
  source 1..22: mol_type = other DNA
ggccttattggtgtatggaaat

SEQ ID NO: 132189 - DNA, 22 bp, synthetic construct
  misc_feature 1..22: note = chemically synthesized
  source 1..22: mol_type = other DNA
attggtgtatggaaatgctact

SEQ ID NO: 132190 - DNA, 22 bp, synthetic construct
  misc_feature 1..22: note = chemically synthesized
  source 1..22: mol_type = other DNA
ttggtgtatggaaatgctactg

SEQ ID NO: 132191 - DNA, 22 bp, synthetic construct
  misc_feature 1..22: note = chemically synthesized
  source 1..22: mol_type = other DNA
gtgtatggaaatgctactgatt

SEQ ID NO: 132192 - DNA, 22 bp, synthetic construct
  misc_feature 1..22: note = chemically synthesized
  source 1..22: mol_type = other DNA
ctgatttttgtatgtgattttg

SEQ ID NO: 132193 - DNA, 22 bp, synthetic construct
  misc_feature 1..22: note = chemically synthesized
  source 1..22: mol_type = other DNA
atttttgtatgtgattttgtat

SEQ ID NO: 132194 - DNA, 22 bp, synthetic construct
  misc_feature 1..22: note = chemically synthesized
  source 1..22: mol_type = other DNA
ttgtatgtgattttgtatcctg

SEQ ID NO: 132195 - DNA, 22 bp, synthetic construct
  misc_feature 1..22: note = chemically synthesized
  source 1..22: mol_type = other DNA
tgtatgtgattttgtatcctga

SEQ ID NO: 132196 - DNA, 22 bp, synthetic construct
  misc_feature 1..22: note = chemically synthesized
  source 1..22: mol_type = other DNA
gtatgtgattttgtatcctgaa

SEQ ID NO: 132197 - DNA, 22 bp, synthetic construct
  misc_feature 1..22: note = chemically synthesized
  source 1..22: mol_type = other DNA
tatgtgattttgtatcctgaaa

SEQ ID NO: 132198 - DNA, 22 bp, synthetic construct
  misc_feature 1..22: note = chemically synthesized
  source 1..22: mol_type = other DNA
tgtatcctgaaaccttgctaaa

SEQ ID NO: 132199 - DNA, 22 bp, synthetic construct
  misc_feature 1..22: note = chemically synthesized
  source 1..22: mol_type = other DNA
gtatcctgaaaccttgctaaaa

SEQ ID NO: 132200 - DNA, 22 bp, synthetic construct
  misc_feature 1..22: note = chemically synthesized
  source 1..22: mol_type = other DNA
tatcctgaaaccttgctaaaat

SEQ ID NO: 132201 - DNA, 22 bp, synthetic construct
  misc_feature 1..22: note = chemically synthesized
  source 1..22: mol_type = other DNA
aaaccttgctaaaattgtttat

SEQ ID NO: 132202 - DNA, 22 bp, synthetic construct
  misc_feature 1..22: note = chemically synthesized
  source 1..22: mol_type = other DNA
gctaaaattgtttatcagttct

SEQ ID NO: 132203 - DNA, 22 bp, synthetic construct
  misc_feature 1..22: note = chemically synthesized
  source 1..22: mol_type = other DNA
ctaaaattgtttatcagttcta

SEQ ID NO: 132204 - DNA, 22 bp, synthetic construct
  misc_feature 1..22: note = chemically synthesized
  source 1..22: mol_type = other DNA
aaattgtttatcagttctagca

SEQ ID NO: 132205 - DNA, 22 bp, synthetic construct
  misc_feature 1..22: note = chemically synthesized
  source 1..22: mol_type = other DNA
tttatcagttctagcagccttt

SEQ ID NO: 132206 - DNA, 22 bp, synthetic construct
  misc_feature 1..22: note = chemically synthesized
  source 1..22: mol_type = other DNA
atcagttctagcagccttttgg

SEQ ID NO: 132207 - DNA, 22 bp, synthetic construct
  misc_feature 1..22: note = chemically synthesized
  source 1..22: mol_type = other DNA
tcagttctagcagccttttgga

SEQ ID NO: 132208 - DNA, 22 bp, synthetic construct
  misc_feature 1..22: note = chemically synthesized
  source 1..22: mol_type = other DNA
tagcagccttttggaagaatct

SEQ ID NO: 132209 - DNA, 22 bp, synthetic construct
  misc_feature 1..22: note = chemically synthesized
  source 1..22: mol_type = other DNA
gcagccttttggaagaatctgt

SEQ ID NO: 132210 - DNA, 22 bp, synthetic construct
  misc_feature 1..22: note = chemically synthesized
  source 1..22: mol_type = other DNA
ttggaagaatctgtaggatttt

SEQ ID NO: 132211 - DNA, 22 bp, synthetic construct
  misc_feature 1..22: note = chemically synthesized
  source 1..22: mol_type = other DNA
tggaagaatctgtaggattttc

SEQ ID NO: 132212 - DNA, 22 bp, synthetic construct
  misc_feature 1..22: note = chemically synthesized
  source 1..22: mol_type = other DNA
ggaagaatctgtaggattttct

SEQ ID NO: 132213 - DNA, 22 bp, synthetic construct
  misc_feature 1..22: note = chemically synthesized
  source 1..22: mol_type = other DNA
gaagaatctgtaggattttcta

SEQ ID NO: 132214 - DNA, 22 bp, synthetic construct
  misc_feature 1..22: note = chemically synthesized
  source 1..22: mol_type = other DNA
taggattttctaagtatagagt

SEQ ID NO: 132215 - DNA, 22 bp, synthetic construct
  misc_feature 1..22: note = chemically synthesized
  source 1..22: mol_type = other DNA
tctaagtatagagtcatatcat

SEQ ID NO: 132216 - DNA, 22 bp, synthetic construct
  misc_feature 1..22: note = chemically synthesized
  source 1..22: mol_type = other DNA
ctaagtatagagtcatatcatc

SEQ ID NO: 132217 - DNA, 22 bp, synthetic construct
  misc_feature 1..22: note = chemically synthesized
  source 1..22: mol_type = other DNA
taagtatagagtcatatcatca

SEQ ID NO: 132218 - DNA, 22 bp, synthetic construct
  misc_feature 1..22: note = chemically synthesized
  source 1..22: mol_type = other DNA
agtatagagtcatatcatcagc

SEQ ID NO: 132219 - DNA, 22 bp, synthetic construct
  misc_feature 1..22: note = chemically synthesized
  source 1..22: mol_type = other DNA
ggcttattgtcctattttgatg

SEQ ID NO: 132220 - DNA, 22 bp, synthetic construct
  misc_feature 1..22: note = chemically synthesized
  source 1..22: mol_type = other DNA
gcttattgtcctattttgatgc

SEQ ID NO: 132221 - DNA, 22 bp, synthetic construct
  misc_feature 1..22: note = chemically synthesized
  source 1..22: mol_type = other DNA
attgtcctattttgatgccatt

SEQ ID NO: 132222 - DNA, 22 bp, synthetic construct
  misc_feature 1..22: note = chemically synthesized
  source 1..22: mol_type = other DNA
ttgtcctattttgatgccattt

SEQ ID NO: 132223 - DNA, 22 bp, synthetic construct
  misc_feature 1..22: note = chemically synthesized
  source 1..22: mol_type = other DNA
tcctattttgatgccatttctt

SEQ ID NO: 132224 - DNA, 22 bp, synthetic construct
  misc_feature 1..22: note = chemically synthesized
  source 1..22: mol_type = other DNA
ttttgatgccatttctttcttt

SEQ ID NO: 132225 - DNA, 22 bp, synthetic construct
  misc_feature 1..22: note = chemically synthesized
  source 1..22: mol_type = other DNA
tgatgccatttctttctttctc

SEQ ID NO: 132226 - DNA, 22 bp, synthetic construct
  misc_feature 1..22: note = chemically synthesized
  source 1..22: mol_type = other DNA
gatgccatttctttctttctct

SEQ ID NO: 132227 - DNA, 22 bp, synthetic construct
  misc_feature 1..22: note = chemically synthesized
  source 1..22: mol_type = other DNA
atgccatttctttctttctctc

SEQ ID NO: 132228 - DNA, 22 bp, synthetic construct
  misc_feature 1..22: note = chemically synthesized
  source 1..22: mol_type = other DNA
ctttctttctctcgcctgattg

SEQ ID NO: 132229 - DNA, 22 bp, synthetic construct
  misc_feature 1..22: note = chemically synthesized
  source 1..22: mol_type = other DNA
tttctttctctcgcctgattgc

SEQ ID NO: 132230 - DNA, 22 bp, synthetic construct
  misc_feature 1..22: note = chemically synthesized
  source 1..22: mol_type = other DNA
tctttctctcgcctgattgccc

SEQ ID NO: 132231 - DNA, 22 bp, synthetic construct
  misc_feature 1..22: note = chemically synthesized
  source 1..22: mol_type = other DNA
ctttctctcgcctgattgccct

SEQ ID NO: 132232 - DNA, 22 bp, synthetic construct
  misc_feature 1..22: note = chemically synthesized
  source 1..22: mol_type = other DNA
tttctctcgcctgattgccctg

SEQ ID NO: 132233 - DNA, 22 bp, synthetic construct
  misc_feature 1..22: note = chemically synthesized
  source 1..22: mol_type = other DNA
tctctcgcctgattgccctggt

SEQ ID NO: 132234 - DNA, 22 bp, synthetic construct
  misc_feature 1..22: note = chemically synthesized
  source 1..22: mol_type = other DNA
ctctcgcctgattgccctggtt

SEQ ID NO: 132235 - DNA, 22 bp, synthetic construct
  misc_feature 1..22: note = chemically synthesized
  source 1..22: mol_type = other DNA
tctcgcctgattgccctggtta

SEQ ID NO: 132236 - DNA, 22 bp, synthetic construct
  misc_feature 1..22: note = chemically synthesized
  source 1..22: mol_type = other DNA
tcgcctgattgccctggttagg

SEQ ID NO: 132237 - DNA, 22 bp, synthetic construct
  misc_feature 1..22: note = chemically synthesized
  source 1..22: mol_type = other DNA
gcctgattgccctggttaggac

SEQ ID NO: 132238 - DNA, 22 bp, synthetic construct
  misc_feature 1..22: note = chemically synthesized
  source 1..22: mol_type = other DNA
attgccctggttaggacttcca

SEQ ID NO: 132239 - DNA, 22 bp, synthetic construct
  misc_feature 1..22: note = chemically synthesized
  source 1..22: mol_type = other DNA
ccctggttaggacttccaattt

SEQ ID NO: 132240 - DNA, 22 bp, synthetic construct
  misc_feature 1..22: note = chemically synthesized
  source 1..22: mol_type = other DNA
gttaggacttccaattttatgt

SEQ ID NO: 132241 - DNA, 22 bp, synthetic construct
  misc_feature 1..22: note = chemically synthesized
  source 1..22: mol_type = other DNA
ggacttccaattttatgttcac

SEQ ID NO: 132242 - DNA, 22 bp, synthetic construct
  misc_feature 1..22: note = chemically synthesized
  source 1..22: mol_type = other DNA
ccaattttatgttcactaggag

SEQ ID NO: 132243 - DNA, 22 bp, synthetic construct
  misc_feature 1..22: note = chemically synthesized
  source 1..22: mol_type = other DNA
caattttatgttcactaggagt

SEQ ID NO: 132244 - DNA, 22 bp, synthetic construct
  misc_feature 1..22: note = chemically synthesized
  source 1..22: mol_type = other DNA
tatgttcactaggagtggtgag

SEQ ID NO: 132245 - DNA, 22 bp, synthetic construct
  misc_feature 1..22: note = chemically synthesized
  source 1..22: mol_type = other DNA
atgttcactaggagtggtgaga

SEQ ID NO: 132246 - DNA, 22 bp, synthetic construct
  misc_feature 1..22: note = chemically synthesized
  source 1..22: mol_type = other DNA
tgttcactaggagtggtgagaa

SEQ ID NO: 132247 - DNA, 22 bp, synthetic construct
  misc_feature 1..22: note = chemically synthesized
  source 1..22: mol_type = other DNA
actaggagtggtgagaatggga

SEQ ID NO: 132248 - DNA, 22 bp, synthetic construct
  misc_feature 1..22: note = chemically synthesized
  source 1..22: mol_type = other DNA
ggagtggtgagaatgggaatcc

SEQ ID NO: 132249 - DNA, 22 bp, synthetic construct
  misc_feature 1..22: note = chemically synthesized
  source 1..22: mol_type = other DNA
gtcttgttgcagttttcgagga

SEQ ID NO: 132250 - DNA, 22 bp, synthetic construct
  misc_feature 1..22: note = chemically synthesized
  source 1..22: mol_type = other DNA
tcttgttgcagttttcgaggag

SEQ ID NO: 132251 - DNA, 22 bp, synthetic construct
  misc_feature 1..22: note = chemically synthesized
  source 1..22: mol_type = other DNA
gttgcagttttcgaggagaata

SEQ ID NO: 132252 - DNA, 22 bp, synthetic construct
  misc_feature 1..22: note = chemically synthesized
  source 1..22: mol_type = other DNA
ttgcagttttcgaggagaatag

SEQ ID NO: 132253 - DNA, 22 bp, synthetic construct
  misc_feature 1..22: note = chemically synthesized
  source 1..22: mol_type = other DNA
cagttttcgaggagaatagttc

SEQ ID NO: 132254 - DNA, 22 bp, synthetic construct
  misc_feature 1..22: note = chemically synthesized
  source 1..22: mol_type = other DNA
tcgaggagaatagttccagctt

SEQ ID NO: 132255 - DNA, 22 bp, synthetic construct
  misc_feature 1..22: note = chemically synthesized
  source 1..22: mol_type = other DNA
cgaggagaatagttccagcttt

SEQ ID NO: 132256 - DNA, 22 bp, synthetic construct
  misc_feature 1..22: note = chemically synthesized
  source 1..22: mol_type = other DNA
gaggagaatagttccagctttt

SEQ ID NO: 132257 - DNA, 22 bp, synthetic construct
  misc_feature 1..22: note = chemically synthesized
  source 1..22: mol_type = other DNA
cagcttttgcccattcagtatg

SEQ ID NO: 132258 - DNA, 22 bp, synthetic construct
  misc_feature 1..22: note = chemically synthesized
  source 1..22: mol_type = other DNA
ttgcccattcagtatggttttg

SEQ ID NO: 132259 - DNA, 22 bp, synthetic construct
  misc_feature 1..22: note = chemically synthesized
  source 1..22: mol_type = other DNA
tgcccattcagtatggttttgg

SEQ ID NO: 132260 - DNA, 22 bp, synthetic construct
  misc_feature 1..22: note = chemically synthesized
  source 1..22: mol_type = other DNA
gcccattcagtatggttttggt

SEQ ID NO: 132261 - DNA, 22 bp, synthetic construct
  misc_feature 1..22: note = chemically synthesized
  source 1..22: mol_type = other DNA
cccattcagtatggttttggtt

SEQ ID NO: 132262 - DNA, 22 bp, synthetic construct
  misc_feature 1..22: note = chemically synthesized
  source 1..22: mol_type = other DNA
agtatggttttggttatgggtt

SEQ ID NO: 132263 - DNA, 22 bp, synthetic construct
  misc_feature 1..22: note = chemically synthesized
  source 1..22: mol_type = other DNA
tggttatgggtttttcatacgt

SEQ ID NO: 132264 - DNA, 22 bp, synthetic construct
  misc_feature 1..22: note = chemically synthesized
  source 1..22: mol_type = other DNA
ggttatgggtttttcatacgtg

SEQ ID NO: 132265 - DNA, 22 bp, synthetic construct
  misc_feature 1..22: note = chemically synthesized
  source 1..22: mol_type = other DNA
gttatgggtttttcatacgtgg

SEQ ID NO: 132266 - DNA, 22 bp, synthetic construct
  misc_feature 1..22: note = chemically synthesized
  source 1..22: mol_type = other DNA
tgggtttttcatacgtggcttt

SEQ ID NO: 132267 - DNA, 22 bp, synthetic construct
  misc_feature 1..22: note = chemically synthesized
  source 1..22: mol_type = other DNA
ttcatacgtggcttttattctt

SEQ ID NO: 132268 - DNA, 22 bp, synthetic construct
  misc_feature 1..22: note = chemically synthesized
  source 1..22: mol_type = other DNA
tcatacgtggcttttattcttt

SEQ ID NO: 132269 - DNA, 22 bp, synthetic construct
  misc_feature 1..22: note = chemically synthesized
  source 1..22: mol_type = other DNA
catacgtggcttttattctttt

SEQ ID NO: 132270 - DNA, 22 bp, synthetic construct
  misc_feature 1..22: note = chemically synthesized
  source 1..22: mol_type = other DNA
atacgtggcttttattcttttg

SEQ ID NO: 132271 - DNA, 22 bp, synthetic construct
  misc_feature 1..22: note = chemically synthesized
  source 1..22: mol_type = other DNA
ttattcttttgaggtatgttcc

SEQ ID NO: 132272 - DNA, 22 bp, synthetic construct
  misc_feature 1..22: note = chemically synthesized
  source 1..22: mol_type = other DNA
tattcttttgaggtatgttcct

SEQ ID NO: 132273 - DNA, 22 bp, synthetic construct
  misc_feature 1..22: note = chemically synthesized
  source 1..22: mol_type = other DNA
attcttttgaggtatgttcctt

SEQ ID NO: 132274 - DNA, 22 bp, synthetic construct
  misc_feature 1..22: note = chemically synthesized
  source 1..22: mol_type = other DNA
ttcttttgaggtatgttccttt

SEQ ID NO: 132275 - DNA, 22 bp, synthetic construct
  misc_feature 1..22: note = chemically synthesized
  source 1..22: mol_type = other DNA
ttttgaggtatgttcctttgat

SEQ ID NO: 132276 - DNA, 22 bp, synthetic construct
  misc_feature 1..22: note = chemically synthesized
  source 1..22: mol_type = other DNA
ttgaggtatgttcctttgatgc

SEQ ID NO: 132277 - DNA, 22 bp, synthetic construct
  misc_feature 1..22: note = chemically synthesized
  source 1..22: mol_type = other DNA
tgaggtatgttcctttgatgcc

SEQ ID NO: 132278 - DNA, 22 bp, synthetic construct
  misc_feature 1..22: note = chemically synthesized
  source 1..22: mol_type = other DNA
gaggtatgttcctttgatgcct

SEQ ID NO: 132279 - DNA, 22 bp, synthetic construct
  misc_feature 1..22: note = chemically synthesized
  source 1..22: mol_type = other DNA
aggtatgttcctttgatgccta

SEQ ID NO: 132280 - DNA, 22 bp, synthetic construct
  misc_feature 1..22: note = chemically synthesized
  source 1..22: mol_type = other DNA
ctttgatgcctagtctgttgga

SEQ ID NO: 132281 - DNA, 22 bp, synthetic construct
  misc_feature 1..22: note = chemically synthesized
  source 1..22: mol_type = other DNA
tgatgcctagtctgttggaggt

SEQ ID NO: 132282 - DNA, 22 bp, synthetic construct
  misc_feature 1..22: note = chemically synthesized
  source 1..22: mol_type = other DNA
gatgcctagtctgttggaggtt

SEQ ID NO: 132283 - DNA, 22 bp, synthetic construct
  misc_feature 1..22: note = chemically synthesized
  source 1..22: mol_type = other DNA
atgcctagtctgttggaggttt

SEQ ID NO: 132284 - DNA, 22 bp, synthetic construct
  misc_feature 1..22: note = chemically synthesized
  source 1..22: mol_type = other DNA
gtctgttggaggtttttatcat

SEQ ID NO: 132285 - DNA, 22 bp, synthetic construct
  misc_feature 1..22: note = chemically synthesized
  source 1..22: mol_type = other DNA
ttggaggtttttatcatgaagg

SEQ ID NO: 132286 - DNA, 22 bp, synthetic construct
  misc_feature 1..22: note = chemically synthesized
  source 1..22: mol_type = other DNA
gaggtttttatcatgaagggat

SEQ ID NO: 132287 - DNA, 22 bp, synthetic construct
  misc_feature 1..22: note = chemically synthesized
  source 1..22: mol_type = other DNA
ttatcatgaagggatgttgaat

SEQ ID NO: 132288 - DNA, 22 bp, synthetic construct
  misc_feature 1..22: note = chemically synthesized
  source 1..22: mol_type = other DNA
tatcatgaagggatgttgaatt

SEQ ID NO: 132289 - DNA, 22 bp, synthetic construct
  misc_feature 1..22: note = chemically synthesized
  source 1..22: mol_type = other DNA
atcatgaagggatgttgaattt

SEQ ID NO: 132290 - DNA, 22 bp, synthetic construct
  misc_feature 1..22: note = chemically synthesized
  source 1..22: mol_type = other DNA
tcatgaagggatgttgaatttt

SEQ ID NO: 132291 - DNA, 22 bp, synthetic construct
  misc_feature 1..22: note = chemically synthesized
  source 1..22: mol_type = other DNA
aattttattgaaaggtttttct

SEQ ID NO: 132292 - DNA, 22 bp, synthetic construct
  misc_feature 1..22: note = chemically synthesized
  source 1..22: mol_type = other DNA
tattgaaaggtttttctcagtc

SEQ ID NO: 132293 - DNA, 22 bp, synthetic construct
  misc_feature 1..22: note = chemically synthesized
  source 1..22: mol_type = other DNA
attgaaaggtttttctcagtct

SEQ ID NO: 132294 - DNA, 22 bp, synthetic construct
  misc_feature 1..22: note = chemically synthesized
  source 1..22: mol_type = other DNA
ttgaaaggtttttctcagtcta

SEQ ID NO: 132295 - DNA, 22 bp, synthetic construct
  misc_feature 1..22: note = chemically synthesized
  source 1..22: mol_type = other DNA
aaaggtttttctcagtctattg

SEQ ID NO: 132296 - DNA, 22 bp, synthetic construct
  misc_feature 1..22: note = chemically synthesized
  source 1..22: mol_type = other DNA
ttctcagtctattgagatgatc

SEQ ID NO: 132297 - DNA, 22 bp, synthetic construct
  misc_feature 1..22: note = chemically synthesized
  source 1..22: mol_type = other DNA
tctcagtctattgagatgatca

SEQ ID NO: 132298 - DNA, 22 bp, synthetic construct
  misc_feature 1..22: note = chemically synthesized
  source 1..22: mol_type = other DNA
ctcagtctattgagatgatcat

SEQ ID NO: 132299 - DNA, 22 bp, synthetic construct
  misc_feature 1..22: note = chemically synthesized
  source 1..22: mol_type = other DNA
tcagtctattgagatgatcata

SEQ ID NO: 132300 - DNA, 22 bp, synthetic construct
  misc_feature 1..22: note = chemically synthesized
  source 1..22: mol_type = other DNA
agtctattgagatgatcatatg

SEQ ID NO: 132301 - DNA, 22 bp, synthetic construct
  misc_feature 1..22: note = chemically synthesized
  source 1..22: mol_type = other DNA
ttgagatgatcatatggtttgt

SEQ ID NO: 132302 - DNA, 22 bp, synthetic construct
  misc_feature 1..22: note = chemically synthesized
  source 1..22: mol_type = other DNA
agatgatcatatggtttgtggg

SEQ ID NO: 132303 - DNA, 22 bp, synthetic construct
  misc_feature 1..22: note = chemically synthesized
  source 1..22: mol_type = other DNA
gtgggaggtgaaagatctctac

SEQ ID NO: 132304 - DNA, 22 bp, synthetic construct
  misc_feature 1..22: note = chemically synthesized
  source 1..22: mol_type = other DNA
tgggaggtgaaagatctctaca

SEQ ID NO: 132305 - DNA, 22 bp, synthetic construct
  misc_feature 1..22: note = chemically synthesized
  source 1..22: mol_type = other DNA
tacaaggagaactacaaaacac

SEQ ID NO: 132306 - DNA, 22 bp, synthetic construct
  misc_feature 1..22: note = chemically synthesized
  source 1..22: mol_type = other DNA
caaggagaactacaaaacactg

SEQ ID NO: 132307 - DNA, 22 bp, synthetic construct
  misc_feature 1..22: note = chemically synthesized
  source 1..22: mol_type = other DNA
caaaacactgctgaaagaaatc

SEQ ID NO: 132308 - DNA, 22 bp, synthetic construct
  misc_feature 1..22: note = chemically synthesized
  source 1..22: mol_type = other DNA
ctgaaagaaatcagaaacaaca

SEQ ID NO: 132309 - DNA, 22 bp, synthetic construct
  misc_feature 1..22: note = chemically synthesized
  source 1..22: mol_type = other DNA
aaagaaatcagaaacaacacaa

SEQ ID NO: 132310 - DNA, 22 bp, synthetic construct
  misc_feature 1..22: note = chemically synthesized
  source 1..22: mol_type = other DNA
tccaggctcatggattggaaga

SEQ ID NO: 132311 - DNA, 22 bp, synthetic construct
  misc_feature 1..22: note = chemically synthesized
  source 1..22: mol_type = other DNA
ccaggctcatggattggaagaa

SEQ ID NO: 132312 - DNA, 22 bp, synthetic construct
  misc_feature 1..22: note = chemically synthesized
  source 1..22: mol_type = other DNA
caggctcatggattggaagaat

SEQ ID NO: 132313 - DNA, 22 bp, synthetic construct
  misc_feature 1..22: note = chemically synthesized
  source 1..22: mol_type = other DNA
atggattggaagaatcaatatg

SEQ ID NO: 132314 - DNA, 22 bp, synthetic construct
  misc_feature 1..22: note = chemically synthesized
  source 1..22: mol_type = other DNA
gaagaatcaatatgaatttaaa

SEQ ID NO: 132315 - DNA, 22 bp, synthetic construct
  misc_feature 1..22: note = chemically synthesized
  source 1..22: mol_type = other DNA
aaatggccatactgctcaaagc

SEQ ID NO: 132316 - DNA, 22 bp, synthetic construct
  misc_feature 1..22: note = chemically synthesized
  source 1..22: mol_type = other DNA
aatggccatactgctcaaagca

SEQ ID NO: 132317 - DNA, 22 bp, synthetic construct
  misc_feature 1..22: note = chemically synthesized
  source 1..22: mol_type = other DNA
ctcaaagcaatttagacattca

SEQ ID NO: 132318 - DNA, 22 bp, synthetic construct
  misc_feature 1..22: note = chemically synthesized
  source 1..22: mol_type = other DNA
aaagcaatttagacattcattg

SEQ ID NO: 132319 - DNA, 22 bp, synthetic construct
  misc_feature 1..22: note = chemically synthesized
  source 1..22: mol_type = other DNA
agacattcattgcaatttctat

SEQ ID NO: 132320 - DNA, 22 bp, synthetic construct
  misc_feature 1..22: note = chemically synthesized
  source 1..22: mol_type = other DNA
gacattcattgcaatttctatc

SEQ ID NO: 132321 - DNA, 22 bp, synthetic construct
  misc_feature 1..22: note = chemically synthesized
  source 1..22: mol_type = other DNA
attgcaatttctatccaattac

SEQ ID NO: 132322 - DNA, 22 bp, synthetic construct
  misc_feature 1..22: note = chemically synthesized
  source 1..22: mol_type = other DNA
caatttctatccaattaccaat

SEQ ID NO: 132323 - DNA, 22 bp, synthetic construct
  misc_feature 1..22: note = chemically synthesized
  source 1..22: mol_type = other DNA
ctatccaattaccaatgtcatt

SEQ ID NO: 132324 - DNA, 22 bp, synthetic construct
  misc_feature 1..22: note = chemically synthesized
  source 1..22: mol_type = other DNA
tatccaattaccaatgtcattc

SEQ ID NO: 132325 - DNA, 22 bp, synthetic construct
  misc_feature 1..22: note = chemically synthesized
  source 1..22: mol_type = other DNA
tccaattaccaatgtcattctt

SEQ ID NO: 132326 - DNA, 22 bp, synthetic construct
  misc_feature 1..22: note = chemically synthesized
  source 1..22: mol_type = other DNA
ccaatgtcattcttcacagtat

SEQ ID NO: 132327 - DNA, 22 bp, synthetic construct
  misc_feature 1..22: note = chemically synthesized
  source 1..22: mol_type = other DNA
ttcacagtattagaaaaactag

SEQ ID NO: 132328 - DNA, 22 bp, synthetic construct
  misc_feature 1..22: note = chemically synthesized
  source 1..22: mol_type = other DNA
cacagtattagaaaaactagtt

SEQ ID NO: 132329 - DNA, 22 bp, synthetic construct
  misc_feature 1..22: note = chemically synthesized
  source 1..22: mol_type = other DNA
acagtattagaaaaactagttt

SEQ ID NO: 132330 - DNA, 22 bp, synthetic construct
  misc_feature 1..22: note = chemically synthesized
  source 1..22: mol_type = other DNA
gaaaaactagtttaaaattcat

SEQ ID NO: 132331 - DNA, 22 bp, synthetic construct
  misc_feature 1..22: note = chemically synthesized
  source 1..22: mol_type = other DNA
gtttaaaattcatatggaacca

SEQ ID NO: 132332 - DNA, 22 bp, synthetic construct
  misc_feature 1..22: note = chemically synthesized
  source 1..22: mol_type = other DNA
aaaattcatatggaaccaaaaa

SEQ ID NO: 132333 - DNA, 22 bp, synthetic construct
  misc_feature 1..22: note = chemically synthesized
  source 1..22: mol_type = other DNA
aaattcatatggaaccaaaaag

SEQ ID NO: 132334 - DNA, 22 bp, synthetic construct
  misc_feature 1..22: note = chemically synthesized
  source 1..22: mol_type = other DNA
atatggaaccaaaaagagcctg

SEQ ID NO: 132335 - DNA, 22 bp, synthetic construct
  misc_feature 1..22: note = chemically synthesized
  source 1..22: mol_type = other DNA
aacaggcaaagcaatcttaagc

SEQ ID NO: 132336 - DNA, 22 bp, synthetic construct
  misc_feature 1..22: note = chemically synthesized
  source 1..22: mol_type = other DNA
aagcagaaagaacaaaattgga

SEQ ID NO: 132337 - DNA, 22 bp, synthetic construct
  misc_feature 1..22: note = chemically synthesized
  source 1..22: mol_type = other DNA
agcagaaagaacaaaattggaa

SEQ ID NO: 132338 - DNA, 22 bp, synthetic construct
  misc_feature 1..22: note = chemically synthesized
  source 1..22: mol_type = other DNA
gaagcaccacaccacctgactt

SEQ ID NO: 132339 - DNA, 22 bp, synthetic construct
  misc_feature 1..22: note = chemically synthesized
  source 1..22: mol_type = other DNA
acttgaaactacaggccaggca

SEQ ID NO: 132340 - DNA, 22 bp, synthetic construct
  misc_feature 1..22: note = chemically synthesized
  source 1..22: mol_type = other DNA
gaaactacaggccaggcacggt

SEQ ID NO: 132341 - DNA, 22 bp, synthetic construct
  misc_feature 1..22: note = chemically synthesized
  source 1..22: mol_type = other DNA
aaactacaggccaggcacggtg

SEQ ID NO: 132342 - DNA, 22 bp, synthetic construct
  misc_feature 1..22: note = chemically synthesized
  source 1..22: mol_type = other DNA
caggccaggcacggtggctcac

SEQ ID NO: 132343 - DNA, 22 bp, synthetic construct
  misc_feature 1..22: note = chemically synthesized
  source 1..22: mol_type = other DNA
acgcctgtaactctagcacttt

SEQ ID NO: 132344 - DNA, 22 bp, synthetic construct
  misc_feature 1..22: note = chemically synthesized
  source 1..22: mol_type = other DNA
taactctagcactttagggggc

SEQ ID NO: 132345 - DNA, 22 bp, synthetic construct
  misc_feature 1..22: note = chemically synthesized
  source 1..22: mol_type = other DNA
tagcactttagggggctgaggt

SEQ ID NO: 132346 - DNA, 22 bp, synthetic construct
  misc_feature 1..22: note = chemically synthesized
  source 1..22: mol_type = other DNA
gcactttagggggctgaggtgg

SEQ ID NO: 132347 - DNA, 22 bp, synthetic construct
  misc_feature 1..22: note = chemically synthesized
  source 1..22: mol_type = other DNA
tagggggctgaggtgggtgtat

SEQ ID NO: 132348 - DNA, 22 bp, synthetic construct
  misc_feature 1..22: note = chemically synthesized
  source 1..22: mol_type = other DNA
agggggctgaggtgggtgtatc

SEQ ID NO: 132349 - DNA, 22 bp, synthetic construct
  misc_feature 1..22: note = chemically synthesized
  source 1..22: mol_type = other DNA
gggggctgaggtgggtgtatca

SEQ ID NO: 132350 - DNA, 22 bp, synthetic construct
  misc_feature 1..22: note = chemically synthesized
  source 1..22: mol_type = other DNA
aggtgggtgtatcacctgaggt

SEQ ID NO: 132351 - DNA, 22 bp, synthetic construct
  misc_feature 1..22: note = chemically synthesized
  source 1..22: mol_type = other DNA
aggtcaggagttcaagaccagc

SEQ ID NO: 132352 - DNA, 22 bp, synthetic construct
  misc_feature 1..22: note = chemically synthesized
  source 1..22: mol_type = other DNA
aagaccagcctggtcaacatgg

SEQ ID NO: 132353 - DNA, 22 bp, synthetic construct
  misc_feature 1..22: note = chemically synthesized
  source 1..22: mol_type = other DNA
gtcaacatggtgaaacactgtc

SEQ ID NO: 132354 - DNA, 22 bp, synthetic construct
  misc_feature 1..22: note = chemically synthesized
  source 1..22: mol_type = other DNA
tctctactaaaaatacaaaatt

SEQ ID NO: 132355 - DNA, 22 bp, synthetic construct
  misc_feature 1..22: note = chemically synthesized
  source 1..22: mol_type = other DNA
tactaaaaatacaaaattagcc

SEQ ID NO: 132356 - DNA, 22 bp, synthetic construct
  misc_feature 1..22: note = chemically synthesized
  source 1..22: mol_type = other DNA
ctaaaaatacaaaattagccgg

SEQ ID NO: 132357 - DNA, 22 bp, synthetic construct
  misc_feature 1..22: note = chemically synthesized
  source 1..22: mol_type = other DNA
aaaatacaaaattagccggctg

SEQ ID NO: 132358 - DNA, 22 bp, synthetic construct
  misc_feature 1..22: note = chemically synthesized
  source 1..22: mol_type = other DNA
gccggctgtggtggtgggggct

SEQ ID NO: 132359 - DNA, 22 bp, synthetic construct
  misc_feature 1..22: note = chemically synthesized
  source 1..22: mol_type = other DNA
tggtggtgggggctgtaatccc

SEQ ID NO: 132360 - DNA, 22 bp, synthetic construct
  misc_feature 1..22: note = chemically synthesized
  source 1..22: mol_type = other DNA
taatcccagctactcggaaggc

SEQ ID NO: 132361 - DNA, 22 bp, synthetic construct
  misc_feature 1..22: note = chemically synthesized
  source 1..22: mol_type = other DNA
ctcggaaggctgaggcaggaga

SEQ ID NO: 132362 - DNA, 22 bp, synthetic construct
  misc_feature 1..22: note = chemically synthesized
  source 1..22: mol_type = other DNA
ggaaggctgaggcaggagaatt

SEQ ID NO: 132363 - DNA, 22 bp, synthetic construct
  misc_feature 1..22: note = chemically synthesized
  source 1..22: mol_type = other DNA
aggcaggagaattgcttgaact

SEQ ID NO: 132364 - DNA, 22 bp, synthetic construct
  misc_feature 1..22: note = chemically synthesized
  source 1..22: mol_type = other DNA
cttgaactctggaggcagacgg

SEQ ID NO: 132365 - DNA, 22 bp, synthetic construct
  misc_feature 1..22: note = chemically synthesized
  source 1..22: mol_type = other DNA
gaactctggaggcagacggtgc

SEQ ID NO: 132366 - DNA, 22 bp, synthetic construct
  misc_feature 1..22: note = chemically synthesized
  source 1..22: mol_type = other DNA
aactctggaggcagacggtgca

SEQ ID NO: 132367 - DNA, 22 bp, synthetic construct
  misc_feature 1..22: note = chemically synthesized
  source 1..22: mol_type = other DNA
tggaggcagacggtgcagtgag

SEQ ID NO: 132368 - DNA, 22 bp, synthetic construct
  misc_feature 1..22: note = chemically synthesized
  source 1..22: mol_type = other DNA
gaggcagacggtgcagtgagcc

SEQ ID NO: 132369 - DNA, 22 bp, synthetic construct
  misc_feature 1..22: note = chemically synthesized
  source 1..22: mol_type = other DNA
cactccagcctgggtgacagag

SEQ ID NO: 132370 - DNA, 22 bp, synthetic construct
  misc_feature 1..22: note = chemically synthesized
  source 1..22: mol_type = other DNA
cagcctgggtgacagagtgaaa

SEQ ID NO: 132371 - DNA, 22 bp, synthetic construct
  misc_feature 1..22: note = chemically synthesized
  source 1..22: mol_type = other DNA
ggtgacagagtgaaactctgaa

SEQ ID NO: 132372 - DNA, 22 bp, synthetic construct
  misc_feature 1..22: note = chemically synthesized
  source 1..22: mol_type = other DNA
tgaaaaaataaaaaaagaaaga

SEQ ID NO: 132373 - DNA, 22 bp, synthetic construct
  misc_feature 1..22: note = chemically synthesized
  source 1..22: mol_type = other DNA
aaaaaataaaaaaagaaagaaa

SEQ ID NO: 132374 - DNA, 22 bp, synthetic construct
  misc_feature 1..22: note = chemically synthesized
  source 1..22: mol_type = other DNA
cattataaggccacagtacccc

SEQ ID NO: 132375 - DNA, 22 bp, synthetic construct
  misc_feature 1..22: note = chemically synthesized
  source 1..22: mol_type = other DNA
taaggccacagtaccccaaaca

SEQ ID NO: 132376 - DNA, 22 bp, synthetic construct
  misc_feature 1..22: note = chemically synthesized
  source 1..22: mol_type = other DNA
ttacaaaaatagacacattgac

SEQ ID NO: 132377 - DNA, 22 bp, synthetic construct
  misc_feature 1..22: note = chemically synthesized
  source 1..22: mol_type = other DNA
caaaaatagacacattgactaa

SEQ ID NO: 132378 - DNA, 22 bp, synthetic construct
  misc_feature 1..22: note = chemically synthesized
  source 1..22: mol_type = other DNA
actaaggaaacacaatagaaaa

SEQ ID NO: 132379 - DNA, 22 bp, synthetic construct
  misc_feature 1..22: note = chemically synthesized
  source 1..22: mol_type = other DNA
aggaaacacaatagaaaactca

SEQ ID NO: 132380 - DNA, 22 bp, synthetic construct
  misc_feature 1..22: note = chemically synthesized
  source 1..22: mol_type = other DNA
aaaaataaagctacatagttac

SEQ ID NO: 132381 - DNA, 22 bp, synthetic construct
  misc_feature 1..22: note = chemically synthesized
  source 1..22: mol_type = other DNA
catagttacaaccatctgatct

SEQ ID NO: 132382 - DNA, 22 bp, synthetic construct
  misc_feature 1..22: note = chemically synthesized
  source 1..22: mol_type = other DNA
caaccatctgatcttcaacaac

SEQ ID NO: 132383 - DNA, 22 bp, synthetic construct
  misc_feature 1..22: note = chemically synthesized
  source 1..22: mol_type = other DNA
atcttcaacaacactgacaaaa

SEQ ID NO: 132384 - DNA, 22 bp, synthetic construct
  misc_feature 1..22: note = chemically synthesized
  source 1..22: mol_type = other DNA
caacaacactgacaaaaacaag

SEQ ID NO: 132385 - DNA, 22 bp, synthetic construct
  misc_feature 1..22: note = chemically synthesized
  source 1..22: mol_type = other DNA
aacaacactgacaaaaacaagc

SEQ ID NO: 132386 - DNA, 22 bp, synthetic construct
  misc_feature 1..22: note = chemically synthesized
  source 1..22: mol_type = other DNA
acaaaaacaagcagcgggaaaa

SEQ ID NO: 132387 - DNA, 22 bp, synthetic construct
  misc_feature 1..22: note = chemically synthesized
  source 1..22: mol_type = other DNA
cctatccaataaactgtgctgg

SEQ ID NO: 132388 - DNA, 22 bp, synthetic construct
  misc_feature 1..22: note = chemically synthesized
  source 1..22: mol_type = other DNA
tccaataaactgtgctggaata

SEQ ID NO: 132389 - DNA, 22 bp, synthetic construct
  misc_feature 1..22: note = chemically synthesized
  source 1..22: mol_type = other DNA
tgctggaatacgtggctagcca

SEQ ID NO: 132390 - DNA, 22 bp, synthetic construct
  misc_feature 1..22: note = chemically synthesized
  source 1..22: mol_type = other DNA
gaatacgtggctagccatatgc

SEQ ID NO: 132391 - DNA, 22 bp, synthetic construct
  misc_feature 1..22: note = chemically synthesized
  source 1..22: mol_type = other DNA
gccatatgcagaagaatgaaac

SEQ ID NO: 132392 - DNA, 22 bp, synthetic construct
  misc_feature 1..22: note = chemically synthesized
  source 1..22: mol_type = other DNA
gacccttaccttacaccattta

SEQ ID NO: 132393 - DNA, 22 bp, synthetic construct
  misc_feature 1..22: note = chemically synthesized
  source 1..22: mol_type = other DNA
accttacaccatttagagaaat

SEQ ID NO: 132394 - DNA, 22 bp, synthetic construct
  misc_feature 1..22: note = chemically synthesized
  source 1..22: mol_type = other DNA
ccttacaccatttagagaaatc

SEQ ID NO: 132395 - DNA, 22 bp, synthetic construct
  misc_feature 1..22: note = chemically synthesized
  source 1..22: mol_type = other DNA
acaccatttagagaaatcaact

SEQ ID NO: 132396 - DNA, 22 bp, synthetic construct
  misc_feature 1..22: note = chemically synthesized
  source 1..22: mol_type = other DNA
caccatttagagaaatcaactg

SEQ ID NO: 132397 - DNA, 22 bp, synthetic construct
  misc_feature 1..22: note = chemically synthesized
  source 1..22: mol_type = other DNA
agagaaatcaactgaaaatgaa

SEQ ID NO: 132398 - DNA, 22 bp, synthetic construct
  misc_feature 1..22: note = chemically synthesized
  source 1..22: mol_type = other DNA
gagaaatcaactgaaaatgaat

SEQ ID NO: 132399 - DNA, 22 bp, synthetic construct
  misc_feature 1..22: note = chemically synthesized
  source 1..22: mol_type = other DNA
aaaatgaattcaaaacttaaat

SEQ ID NO: 132400 - DNA, 22 bp, synthetic construct
  misc_feature 1..22: note = chemically synthesized
  source 1..22: mol_type = other DNA
aaaacttaaatgtaagatctca

SEQ ID NO: 132401 - DNA, 22 bp, synthetic construct
  misc_feature 1..22: note = chemically synthesized
  source 1..22: mol_type = other DNA
aaatgtaagatctcaaatctta

SEQ ID NO: 132402 - DNA, 22 bp, synthetic construct
  misc_feature 1..22: note = chemically synthesized
  source 1..22: mol_type = other DNA
aatgtaagatctcaaatcttac

SEQ ID NO: 132403 - DNA, 22 bp, synthetic construct
  misc_feature 1..22: note = chemically synthesized
  source 1..22: mol_type = other DNA
aaatcttacctgcactggcagt

SEQ ID NO: 132404 - DNA, 22 bp, synthetic construct
  misc_feature 1..22: note = chemically synthesized
  source 1..22: mol_type = other DNA
acctgcactggcagtgcatttt

SEQ ID NO: 132405 - DNA, 22 bp, synthetic construct
  misc_feature 1..22: note = chemically synthesized
  source 1..22: mol_type = other DNA
cctgcactggcagtgcattttt

SEQ ID NO: 132406 - DNA, 22 bp, synthetic construct
  misc_feature 1..22: note = chemically synthesized
  source 1..22: mol_type = other DNA
cactggcagtgcatttttggct

SEQ ID NO: 132407 - DNA, 22 bp, synthetic construct
  misc_feature 1..22: note = chemically synthesized
  source 1..22: mol_type = other DNA
gcagtgcatttttggctaagcc

SEQ ID NO: 132408 - DNA, 22 bp, synthetic construct
  misc_feature 1..22: note = chemically synthesized
  source 1..22: mol_type = other DNA
ttggctaagcccccaaaagcaa

SEQ ID NO: 132409 - DNA, 22 bp, synthetic construct
  misc_feature 1..22: note = chemically synthesized
  source 1..22: mol_type = other DNA
tggctaagcccccaaaagcaat

SEQ ID NO: 132410 - DNA, 22 bp, synthetic construct
  misc_feature 1..22: note = chemically synthesized
  source 1..22: mol_type = other DNA
ggctaagcccccaaaagcaatt

SEQ ID NO: 132411 - DNA, 22 bp, synthetic construct
  misc_feature 1..22: note = chemically synthesized
  source 1..22: mol_type = other DNA
gctaagcccccaaaagcaattg

SEQ ID NO: 132412 - DNA, 22 bp, synthetic construct
  misc_feature 1..22: note = chemically synthesized
  source 1..22: mol_type = other DNA
agcccccaaaagcaattgcaat

SEQ ID NO: 132413 - DNA, 22 bp, synthetic construct
  misc_feature 1..22: note = chemically synthesized
  source 1..22: mol_type = other DNA
caatgcaaagaaaaattcacaa

SEQ ID NO: 132414 - DNA, 22 bp, synthetic construct
  misc_feature 1..22: note = chemically synthesized
  source 1..22: mol_type = other DNA
acaagtggaacctaattaaact

SEQ ID NO: 132415 - DNA, 22 bp, synthetic construct
  misc_feature 1..22: note = chemically synthesized
  source 1..22: mol_type = other DNA
attaaactaaagagcttcacta

SEQ ID NO: 132416 - DNA, 22 bp, synthetic construct
  misc_feature 1..22: note = chemically synthesized
  source 1..22: mol_type = other DNA
aactaaagagcttcactattca

SEQ ID NO: 132417 - DNA, 22 bp, synthetic construct
  misc_feature 1..22: note = chemically synthesized
  source 1..22: mol_type = other DNA
aagagcttcactattcacaata

SEQ ID NO: 132418 - DNA, 22 bp, synthetic construct
  misc_feature 1..22: note = chemically synthesized
  source 1..22: mol_type = other DNA
cactattcacaataacaaagac

SEQ ID NO: 132419 - DNA, 22 bp, synthetic construct
  misc_feature 1..22: note = chemically synthesized
  source 1..22: mol_type = other DNA
actattcacaataacaaagact

SEQ ID NO: 132420 - DNA, 22 bp, synthetic construct
  misc_feature 1..22: note = chemically synthesized
  source 1..22: mol_type = other DNA
ttcacaataacaaagacttgga

SEQ ID NO: 132421 - DNA, 22 bp, synthetic construct
  misc_feature 1..22: note = chemically synthesized
  source 1..22: mol_type = other DNA
acaataacaaagacttggaacc

SEQ ID NO: 132422 - DNA, 22 bp, synthetic construct
  misc_feature 1..22: note = chemically synthesized
  source 1..22: mol_type = other DNA
ggaaccaacccaaatgtccaac

SEQ ID NO: 132423 - DNA, 22 bp, synthetic construct
  misc_feature 1..22: note = chemically synthesized
  source 1..22: mol_type = other DNA
gaaccaacccaaatgtccaaca

SEQ ID NO: 132424 - DNA, 22 bp, synthetic construct
  misc_feature 1..22: note = chemically synthesized
  source 1..22: mol_type = other DNA
agaaaatgtggcacatatacac

SEQ ID NO: 132425 - DNA, 22 bp, synthetic construct
  misc_feature 1..22: note = chemically synthesized
  source 1..22: mol_type = other DNA
tgcagccataaaaaatgatgag

SEQ ID NO: 132426 - DNA, 22 bp, synthetic construct
  misc_feature 1..22: note = chemically synthesized
  source 1..22: mol_type = other DNA
atgtcctttgtagggacatgga

SEQ ID NO: 132427 - DNA, 22 bp, synthetic construct
  misc_feature 1..22: note = chemically synthesized
  source 1..22: mol_type = other DNA
tgtagggacatggatgaagctg

SEQ ID NO: 132428 - DNA, 22 bp, synthetic construct
  misc_feature 1..22: note = chemically synthesized
  source 1..22: mol_type = other DNA
gtagggacatggatgaagctgg

SEQ ID NO: 132429 - DNA, 22 bp, synthetic construct
  misc_feature 1..22: note = chemically synthesized
  source 1..22: mol_type = other DNA
tagggacatggatgaagctgga

SEQ ID NO: 132430 - DNA, 22 bp, synthetic construct
  misc_feature 1..22: note = chemically synthesized
  source 1..22: mol_type = other DNA
gaaaccatcattctcagcaaac

SEQ ID NO: 132431 - DNA, 22 bp, synthetic construct
  misc_feature 1..22: note = chemically synthesized
  source 1..22: mol_type = other DNA
tcagcaaactatcacaaggaca

SEQ ID NO: 132432 - DNA, 22 bp, synthetic construct
  misc_feature 1..22: note = chemically synthesized
  source 1..22: mol_type = other DNA
agcaaactatcacaaggacaaa

SEQ ID NO: 132433 - DNA, 22 bp, synthetic construct
  misc_feature 1..22: note = chemically synthesized
  source 1..22: mol_type = other DNA
tcacaaggacaaaaaaccaaat

SEQ ID NO: 132434 - DNA, 22 bp, synthetic construct
  misc_feature 1..22: note = chemically synthesized
  source 1..22: mol_type = other DNA
tcacttataggtgggaattgaa

SEQ ID NO: 132435 - DNA, 22 bp, synthetic construct
  misc_feature 1..22: note = chemically synthesized
  source 1..22: mol_type = other DNA
acttataggtgggaattgaaca

SEQ ID NO: 132436 - DNA, 22 bp, synthetic construct
  misc_feature 1..22: note = chemically synthesized
  source 1..22: mol_type = other DNA
ataggtgggaattgaacaatga

SEQ ID NO: 132437 - DNA, 22 bp, synthetic construct
  misc_feature 1..22: note = chemically synthesized
  source 1..22: mol_type = other DNA
taggtgggaattgaacaatgag

SEQ ID NO: 132438 - DNA, 22 bp, synthetic construct
  misc_feature 1..22: note = chemically synthesized
  source 1..22: mol_type = other DNA
aacaatgagaacacttggacag

SEQ ID NO: 132439 - DNA, 22 bp, synthetic construct
  misc_feature 1..22: note = chemically synthesized
  source 1..22: mol_type = other DNA
ggacagaggaaggggaacatca

SEQ ID NO: 132440 - DNA, 22 bp, synthetic construct
  misc_feature 1..22: note = chemically synthesized
  source 1..22: mol_type = other DNA
gacagaggaaggggaacatcac

SEQ ID NO: 132441 - DNA, 22 bp, synthetic construct
  misc_feature 1..22: note = chemically synthesized
  source 1..22: mol_type = other DNA
ttgtggggtgggggtggggggt

SEQ ID NO: 132442 - DNA, 22 bp, synthetic construct
  misc_feature 1..22: note = chemically synthesized
  source 1..22: mol_type = other DNA
tggggtgggggtggggggtgga

SEQ ID NO: 132443 - DNA, 22 bp, synthetic construct
  misc_feature 1..22: note = chemically synthesized
  source 1..22: mol_type = other DNA
ggagatatacctaatgtaaatg

SEQ ID NO: 132444 - DNA, 22 bp, synthetic construct
  misc_feature 1..22: note = chemically synthesized
  source 1..22: mol_type = other DNA
atgtaaatgatgagttaatggg

SEQ ID NO: 132445 - DNA, 22 bp, synthetic construct
  misc_feature 1..22: note = chemically synthesized
  source 1..22: mol_type = other DNA
atgggtgcagcacaccaacatg

SEQ ID NO: 132446 - DNA, 22 bp, synthetic construct
  misc_feature 1..22: note = chemically synthesized
  source 1..22: mol_type = other DNA
cacgttgcgcacatgtacccta

SEQ ID NO: 132447 - DNA, 22 bp, synthetic construct
  misc_feature 1..22: note = chemically synthesized
  source 1..22: mol_type = other DNA
cgcacatgtaccctagaactta

SEQ ID NO: 132448 - DNA, 22 bp, synthetic construct
  misc_feature 1..22: note = chemically synthesized
  source 1..22: mol_type = other DNA
gaacttaaagtataataataat

SEQ ID NO: 132449 - DNA, 22 bp, synthetic construct
  misc_feature 1..22: note = chemically synthesized
  source 1..22: mol_type = other DNA
aaagtataataataataataaa

SEQ ID NO: 132450 - DNA, 22 bp, synthetic construct
  misc_feature 1..22: note = chemically synthesized
  source 1..22: mol_type = other DNA
aagtataataataataataaaa

SEQ ID NO: 132451 - DNA, 22 bp, synthetic construct
  misc_feature 1..22: note = chemically synthesized
  source 1..22: mol_type = other DNA
ctgtgcagcagaagaaactatc

SEQ ID NO: 132452 - DNA, 22 bp, synthetic construct
  misc_feature 1..22: note = chemically synthesized
  source 1..22: mol_type = other DNA
tgtgcagcagaagaaactatca

SEQ ID NO: 132453 - DNA, 22 bp, synthetic construct
  misc_feature 1..22: note = chemically synthesized
  source 1..22: mol_type = other DNA
tgcagcagaagaaactatcaac

SEQ ID NO: 132454 - DNA, 22 bp, synthetic construct
  misc_feature 1..22: note = chemically synthesized
  source 1..22: mol_type = other DNA
tcaacagagtaaactgacaatc

SEQ ID NO: 132455 - DNA, 22 bp, synthetic construct
  misc_feature 1..22: note = chemically synthesized
  source 1..22: mol_type = other DNA
acaatctacaggataggagaaa

SEQ ID NO: 132456 - DNA, 22 bp, synthetic construct
  misc_feature 1..22: note = chemically synthesized
  source 1..22: mol_type = other DNA
caggataggagaaactattcac

SEQ ID NO: 132457 - DNA, 22 bp, synthetic construct
  misc_feature 1..22: note = chemically synthesized
  source 1..22: mol_type = other DNA
ttcacaaactgtgcatctggaa

SEQ ID NO: 132458 - DNA, 22 bp, synthetic construct
  misc_feature 1..22: note = chemically synthesized
  source 1..22: mol_type = other DNA
acaaactgtgcatctggaaaag

SEQ ID NO: 132459 - DNA, 22 bp, synthetic construct
  misc_feature 1..22: note = chemically synthesized
  source 1..22: mol_type = other DNA
tgcatctggaaaaggtctaata

SEQ ID NO: 132460 - DNA, 22 bp, synthetic construct
  misc_feature 1..22: note = chemically synthesized
  source 1..22: mol_type = other DNA
gaaaaggtctaatattcagaat

SEQ ID NO: 132461 - DNA, 22 bp, synthetic construct
  misc_feature 1..22: note = chemically synthesized
  source 1..22: mol_type = other DNA
atattcagaatctataaggaat

SEQ ID NO: 132462 - DNA, 22 bp, synthetic construct
  misc_feature 1..22: note = chemically synthesized
  source 1..22: mol_type = other DNA
agaatctataaggaattcgaac

SEQ ID NO: 132463 - DNA, 22 bp, synthetic construct
  misc_feature 1..22: note = chemically synthesized
  source 1..22: mol_type = other DNA
taaggaattcgaacatatcagc

SEQ ID NO: 132464 - DNA, 22 bp, synthetic construct
  misc_feature 1..22: note = chemically synthesized
  source 1..22: mol_type = other DNA
gaacatatcagcaagcaaaaag

SEQ ID NO: 132465 - DNA, 22 bp, synthetic construct
  misc_feature 1..22: note = chemically synthesized
  source 1..22: mol_type = other DNA
catttaaaaatgggcaaaatcc

SEQ ID NO: 132466 - DNA, 22 bp, synthetic construct
  misc_feature 1..22: note = chemically synthesized
  source 1..22: mol_type = other DNA
aaaaatgggcaaaatccacgaa

SEQ ID NO: 132467 - DNA, 22 bp, synthetic construct
  misc_feature 1..22: note = chemically synthesized
  source 1..22: mol_type = other DNA
aaaatgggcaaaatccacgaac

SEQ ID NO: 132468 - DNA, 22 bp, synthetic construct
  misc_feature 1..22: note = chemically synthesized
  source 1..22: mol_type = other DNA
ttctcaagagaagacatacagg

SEQ ID NO: 132469 - DNA, 22 bp, synthetic construct
  misc_feature 1..22: note = chemically synthesized
  source 1..22: mol_type = other DNA
ctcaagagaagacatacaggca

SEQ ID NO: 132470 - DNA, 22 bp, synthetic construct
  misc_feature 1..22: note = chemically synthesized
  source 1..22: mol_type = other DNA
tcaagagaagacatacaggcag

SEQ ID NO: 132471 - DNA, 22 bp, synthetic construct
  misc_feature 1..22: note = chemically synthesized
  source 1..22: mol_type = other DNA
aagagaagacatacaggcagcc

SEQ ID NO: 132472 - DNA, 22 bp, synthetic construct
  misc_feature 1..22: note = chemically synthesized
  source 1..22: mol_type = other DNA
atgagagaaatgcaaatcaaaa

SEQ ID NO: 132473 - DNA, 22 bp, synthetic construct
  misc_feature 1..22: note = chemically synthesized
  source 1..22: mol_type = other DNA
tctcataccagtcagaatagct

SEQ ID NO: 132474 - DNA, 22 bp, synthetic construct
  misc_feature 1..22: note = chemically synthesized
  source 1..22: mol_type = other DNA
ataccagtcagaatagctattt

SEQ ID NO: 132475 - DNA, 22 bp, synthetic construct
  misc_feature 1..22: note = chemically synthesized
  source 1..22: mol_type = other DNA
tttttaaaaagccaaaaaacag

SEQ ID NO: 132476 - DNA, 22 bp, synthetic construct
  misc_feature 1..22: note = chemically synthesized
  source 1..22: mol_type = other DNA
ttaaaaagccaaaaaacagatt

SEQ ID NO: 132477 - DNA, 22 bp, synthetic construct
  misc_feature 1..22: note = chemically synthesized
  source 1..22: mol_type = other DNA
taaaaagccaaaaaacagattc

SEQ ID NO: 132478 - DNA, 22 bp, synthetic construct
  misc_feature 1..22: note = chemically synthesized
  source 1..22: mol_type = other DNA
aaaaagccaaaaaacagattct

SEQ ID NO: 132479 - DNA, 22 bp, synthetic construct
  misc_feature 1..22: note = chemically synthesized
  source 1..22: mol_type = other DNA
aaaagccaaaaaacagattctc

SEQ ID NO: 132480 - DNA, 22 bp, synthetic construct
  misc_feature 1..22: note = chemically synthesized
  source 1..22: mol_type = other DNA
tcatgaggctatggagaaaagg

SEQ ID NO: 132481 - DNA, 22 bp, synthetic construct
  misc_feature 1..22: note = chemically synthesized
  source 1..22: mol_type = other DNA
atgaggctatggagaaaaggga

SEQ ID NO: 132482 - DNA, 22 bp, synthetic construct
  misc_feature 1..22: note = chemically synthesized
  source 1..22: mol_type = other DNA
tggagaaaagggaacacttata

SEQ ID NO: 132483 - DNA, 22 bp, synthetic construct
  misc_feature 1..22: note = chemically synthesized
  source 1..22: mol_type = other DNA
atacaatgatgatggggatgta

SEQ ID NO: 132484 - DNA, 22 bp, synthetic construct
  misc_feature 1..22: note = chemically synthesized
  source 1..22: mol_type = other DNA
tacaatgatgatggggatgtaa

SEQ ID NO: 132485 - DNA, 22 bp, synthetic construct
  misc_feature 1..22: note = chemically synthesized
  source 1..22: mol_type = other DNA
gttcaaccactgcagaaaacag

SEQ ID NO: 132486 - DNA, 22 bp, synthetic construct
  misc_feature 1..22: note = chemically synthesized
  source 1..22: mol_type = other DNA
aaccactgcagaaaacagtttg

SEQ ID NO: 132487 - DNA, 22 bp, synthetic construct
  misc_feature 1..22: note = chemically synthesized
  source 1..22: mol_type = other DNA
cagaaaacagtttggagagtct

SEQ ID NO: 132488 - DNA, 22 bp, synthetic construct
  misc_feature 1..22: note = chemically synthesized
  source 1..22: mol_type = other DNA
ggagagtcttcaaagaacttta

SEQ ID NO: 132489 - DNA, 22 bp, synthetic construct
  misc_feature 1..22: note = chemically synthesized
  source 1..22: mol_type = other DNA
gagagtcttcaaagaactttaa

SEQ ID NO: 132490 - DNA, 22 bp, synthetic construct
  misc_feature 1..22: note = chemically synthesized
  source 1..22: mol_type = other DNA
caaagaactttaagcagagcta

SEQ ID NO: 132491 - DNA, 22 bp, synthetic construct
  misc_feature 1..22: note = chemically synthesized
  source 1..22: mol_type = other DNA
aaagaactttaagcagagctac

SEQ ID NO: 132492 - DNA, 22 bp, synthetic construct
  misc_feature 1..22: note = chemically synthesized
  source 1..22: mol_type = other DNA
taagcagagctacaatttgaca

SEQ ID NO: 132493 - DNA, 22 bp, synthetic construct
  misc_feature 1..22: note = chemically synthesized
  source 1..22: mol_type = other DNA
aagcagagctacaatttgacac

SEQ ID NO: 132494 - DNA, 22 bp, synthetic construct
  misc_feature 1..22: note = chemically synthesized
  source 1..22: mol_type = other DNA
agcagagctacaatttgacaca

SEQ ID NO: 132495 - DNA, 22 bp, synthetic construct
  misc_feature 1..22: note = chemically synthesized
  source 1..22: mol_type = other DNA
caatttgacacagcaatcccgc

SEQ ID NO: 132496 - DNA, 22 bp, synthetic construct
  misc_feature 1..22: note = chemically synthesized
  source 1..22: mol_type = other DNA
gacacagcaatcccgctactgg

SEQ ID NO: 132497 - DNA, 22 bp, synthetic construct
  misc_feature 1..22: note = chemically synthesized
  source 1..22: mol_type = other DNA
acacagcaatcccgctactggg

SEQ ID NO: 132498 - DNA, 22 bp, synthetic construct
  misc_feature 1..22: note = chemically synthesized
  source 1..22: mol_type = other DNA
ctgggtatatatccataggaaa

SEQ ID NO: 132499 - DNA, 22 bp, synthetic construct
  misc_feature 1..22: note = chemically synthesized
  source 1..22: mol_type = other DNA
ggtatatatccataggaaaaca

SEQ ID NO: 132500 - DNA, 22 bp, synthetic construct
  misc_feature 1..22: note = chemically synthesized
  source 1..22: mol_type = other DNA
gaccaactagacacatgcactt

SEQ ID NO: 132501 - DNA, 22 bp, synthetic construct
  misc_feature 1..22: note = chemically synthesized
  source 1..22: mol_type = other DNA
gacacatgcacttgcatgttca

SEQ ID NO: 132502 - DNA, 22 bp, synthetic construct
  misc_feature 1..22: note = chemically synthesized
  source 1..22: mol_type = other DNA
gcatgttcactgtaatgctgtt

SEQ ID NO: 132503 - DNA, 22 bp, synthetic construct
  misc_feature 1..22: note = chemically synthesized
  source 1..22: mol_type = other DNA
catgttcactgtaatgctgttt

SEQ ID NO: 132504 - DNA, 22 bp, synthetic construct
  misc_feature 1..22: note = chemically synthesized
  source 1..22: mol_type = other DNA
actgtaatgctgtttagaatag

SEQ ID NO: 132505 - DNA, 22 bp, synthetic construct
  misc_feature 1..22: note = chemically synthesized
  source 1..22: mol_type = other DNA
taatgctgtttagaatagcaaa

SEQ ID NO: 132506 - DNA, 22 bp, synthetic construct
  misc_feature 1..22: note = chemically synthesized
  source 1..22: mol_type = other DNA
tttagaatagcaaatacaaata

SEQ ID NO: 132507 - DNA, 22 bp, synthetic construct
  misc_feature 1..22: note = chemically synthesized
  source 1..22: mol_type = other DNA
agaatagcaaatacaaataact

SEQ ID NO: 132508 - DNA, 22 bp, synthetic construct
  misc_feature 1..22: note = chemically synthesized
  source 1..22: mol_type = other DNA
gaatagcaaatacaaataactg

SEQ ID NO: 132509 - DNA, 22 bp, synthetic construct
  misc_feature 1..22: note = chemically synthesized
  source 1..22: mol_type = other DNA
gcctaggtgtctatcaaaggcg

SEQ ID NO: 132510 - DNA, 22 bp, synthetic construct
  misc_feature 1..22: note = chemically synthesized
  source 1..22: mol_type = other DNA
ggtgtctatcaaaggcggacgg

SEQ ID NO: 132511 - DNA, 22 bp, synthetic construct
  misc_feature 1..22: note = chemically synthesized
  source 1..22: mol_type = other DNA
tcaaaggcggacgggataaaga

SEQ ID NO: 132512 - DNA, 22 bp, synthetic construct
  misc_feature 1..22: note = chemically synthesized
  source 1..22: mol_type = other DNA
tggtacatatacaccaccacta

SEQ ID NO: 132513 - DNA, 22 bp, synthetic construct
  misc_feature 1..22: note = chemically synthesized
  source 1..22: mol_type = other DNA
tgtggcaataagaacaaatgaa

SEQ ID NO: 132514 - DNA, 22 bp, synthetic construct
  misc_feature 1..22: note = chemically synthesized
  source 1..22: mol_type = other DNA
ttcagcaacatgggtggagctg

SEQ ID NO: 132515 - DNA, 22 bp, synthetic construct
  misc_feature 1..22: note = chemically synthesized
  source 1..22: mol_type = other DNA
tcagcaacatgggtggagctgg

SEQ ID NO: 132516 - DNA, 22 bp, synthetic construct
  misc_feature 1..22: note = chemically synthesized
  source 1..22: mol_type = other DNA
cagcaacatgggtggagctgga

SEQ ID NO: 132517 - DNA, 22 bp, synthetic construct
  misc_feature 1..22: note = chemically synthesized
  source 1..22: mol_type = other DNA
agcaacatgggtggagctggag

SEQ ID NO: 132518 - DNA, 22 bp, synthetic construct
  misc_feature 1..22: note = chemically synthesized
  source 1..22: mol_type = other DNA
gaggctataatcctaagcaaat

SEQ ID NO: 132519 - DNA, 22 bp, synthetic construct
  misc_feature 1..22: note = chemically synthesized
  source 1..22: mol_type = other DNA
taatcctaagcaaattaacgca

SEQ ID NO: 132520 - DNA, 22 bp, synthetic construct
  misc_feature 1..22: note = chemically synthesized
  source 1..22: mol_type = other DNA
agcaaattaacgcaagaacaca

SEQ ID NO: 132521 - DNA, 22 bp, synthetic construct
  misc_feature 1..22: note = chemically synthesized
  source 1..22: mol_type = other DNA
acgcaagaacacaaaagcaaat

SEQ ID NO: 132522 - DNA, 22 bp, synthetic construct
  misc_feature 1..22: note = chemically synthesized
  source 1..22: mol_type = other DNA
tcatttataagtggaagctaaa

SEQ ID NO: 132523 - DNA, 22 bp, synthetic construct
  misc_feature 1..22: note = chemically synthesized
  source 1..22: mol_type = other DNA
atttataagtggaagctaaaca

SEQ ID NO: 132524 - DNA, 22 bp, synthetic construct
  misc_feature 1..22: note = chemically synthesized
  source 1..22: mol_type = other DNA
ataagtggaagctaaacattga

SEQ ID NO: 132525 - DNA, 22 bp, synthetic construct
  misc_feature 1..22: note = chemically synthesized
  source 1..22: mol_type = other DNA
taagtggaagctaaacattgag

SEQ ID NO: 132526 - DNA, 22 bp, synthetic construct
  misc_feature 1..22: note = chemically synthesized
  source 1..22: mol_type = other DNA
aacattgagtacacgtggatat

SEQ ID NO: 132527 - DNA, 22 bp, synthetic construct
  misc_feature 1..22: note = chemically synthesized
  source 1..22: mol_type = other DNA
agtacacgtggatataaacatg

SEQ ID NO: 132528 - DNA, 22 bp, synthetic construct
  misc_feature 1..22: note = chemically synthesized
  source 1..22: mol_type = other DNA
gaaactactacaaggggcaggg

SEQ ID NO: 132529 - DNA, 22 bp, synthetic construct
  misc_feature 1..22: note = chemically synthesized
  source 1..22: mol_type = other DNA
aaactactacaaggggcaggga

SEQ ID NO: 132530 - DNA, 22 bp, synthetic construct
  misc_feature 1..22: note = chemically synthesized
  source 1..22: mol_type = other DNA
ctacaaggggcagggagagatg

SEQ ID NO: 132531 - DNA, 22 bp, synthetic construct
  misc_feature 1..22: note = chemically synthesized
  source 1..22: mol_type = other DNA
caaggggcagggagagatgcgg

SEQ ID NO: 132532 - DNA, 22 bp, synthetic construct
  misc_feature 1..22: note = chemically synthesized
  source 1..22: mol_type = other DNA
aaaaatctattggatagtatgc

SEQ ID NO: 132533 - DNA, 22 bp, synthetic construct
  misc_feature 1..22: note = chemically synthesized
  source 1..22: mol_type = other DNA
ttggatagtatgctcaccactg

SEQ ID NO: 132534 - DNA, 22 bp, synthetic construct
  misc_feature 1..22: note = chemically synthesized
  source 1..22: mol_type = other DNA
gatagtatgctcaccactgcat

SEQ ID NO: 132535 - DNA, 22 bp, synthetic construct
  misc_feature 1..22: note = chemically synthesized
  source 1..22: mol_type = other DNA
accactgcatgcaatatatcca

SEQ ID NO: 132536 - DNA, 22 bp, synthetic construct
  misc_feature 1..22: note = chemically synthesized
  source 1..22: mol_type = other DNA
catgcaatatatccatgtaaaa

SEQ ID NO: 132537 - DNA, 22 bp, synthetic construct
  misc_feature 1..22: note = chemically synthesized
  source 1..22: mol_type = other DNA
cacaagtacccactgtatctaa

SEQ ID NO: 132538 - DNA, 22 bp, synthetic construct
  misc_feature 1..22: note = chemically synthesized
  source 1..22: mol_type = other DNA
tatctaaagtaaatgttgaaaa

SEQ ID NO: 132539 - DNA, 22 bp, synthetic construct
  misc_feature 1..22: note = chemically synthesized
  source 1..22: mol_type = other DNA
aagtaaatgttgaaaatttaaa

SEQ ID NO: 132540 - DNA, 22 bp, synthetic construct
  misc_feature 1..22: note = chemically synthesized
  source 1..22: mol_type = other DNA
aaaatttaaaagaaaaaacaaa

SEQ ID NO: 132541 - DNA, 22 bp, synthetic construct
  misc_feature 1..22: note = chemically synthesized
  source 1..22: mol_type = other DNA
aaaagaaaaaacaaataaataa

SEQ ID NO: 132542 - DNA, 22 bp, synthetic construct
  misc_feature 1..22: note = chemically synthesized
  source 1..22: mol_type = other DNA
aaagaaaaaacaaataaataaa

SEQ ID NO: 132543 - DNA, 22 bp, synthetic construct
  misc_feature 1..22: note = chemically synthesized
  source 1..22: mol_type = other DNA
tcctgaacctggtatgaaatgg

SEQ ID NO: 132544 - DNA, 22 bp, synthetic construct
  misc_feature 1..22: note = chemically synthesized
  source 1..22: mol_type = other DNA
aacctggtatgaaatgggcagt

SEQ ID NO: 132545 - DNA, 22 bp, synthetic construct
  misc_feature 1..22: note = chemically synthesized
  source 1..22: mol_type = other DNA
gtatgaaatgggcagtgatttt

SEQ ID NO: 132546 - DNA, 22 bp, synthetic construct
  misc_feature 1..22: note = chemically synthesized
  source 1..22: mol_type = other DNA
ttatataaacaaagttatttta

SEQ ID NO: 132547 - DNA, 22 bp, synthetic construct
  misc_feature 1..22: note = chemically synthesized
  source 1..22: mol_type = other DNA
tatataaacaaagttattttaa

SEQ ID NO: 132548 - DNA, 22 bp, synthetic construct
  misc_feature 1..22: note = chemically synthesized
  source 1..22: mol_type = other DNA
atataaacaaagttattttaag

SEQ ID NO: 132549 - DNA, 22 bp, synthetic construct
  misc_feature 1..22: note = chemically synthesized
  source 1..22: mol_type = other DNA
tataaacaaagttattttaaga

SEQ ID NO: 132550 - DNA, 22 bp, synthetic construct
  misc_feature 1..22: note = chemically synthesized
  source 1..22: mol_type = other DNA
ttttaagacaaaatataatagg

SEQ ID NO: 132551 - DNA, 22 bp, synthetic construct
  misc_feature 1..22: note = chemically synthesized
  source 1..22: mol_type = other DNA
taagacaaaatataataggccc

SEQ ID NO: 132552 - DNA, 22 bp, synthetic construct
  misc_feature 1..22: note = chemically synthesized
  source 1..22: mol_type = other DNA
aagacaaaatataataggccct

SEQ ID NO: 132553 - DNA, 22 bp, synthetic construct
  misc_feature 1..22: note = chemically synthesized
  source 1..22: mol_type = other DNA
agacaaaatataataggccctt

SEQ ID NO: 132554 - DNA, 22 bp, synthetic construct
  misc_feature 1..22: note = chemically synthesized
  source 1..22: mol_type = other DNA
catttacttggctattaataga

SEQ ID NO: 132555 - DNA, 22 bp, synthetic construct
  misc_feature 1..22: note = chemically synthesized
  source 1..22: mol_type = other DNA
atttacttggctattaatagat

SEQ ID NO: 132556 - DNA, 22 bp, synthetic construct
  misc_feature 1..22: note = chemically synthesized
  source 1..22: mol_type = other DNA
acttggctattaatagatccat

SEQ ID NO: 132557 - DNA, 22 bp, synthetic construct
  misc_feature 1..22: note = chemically synthesized
  source 1..22: mol_type = other DNA
cttggctattaatagatccatt

SEQ ID NO: 132558 - DNA, 22 bp, synthetic construct
  misc_feature 1..22: note = chemically synthesized
  source 1..22: mol_type = other DNA
ggctattaatagatccattgag

SEQ ID NO: 132559 - DNA, 22 bp, synthetic construct
  misc_feature 1..22: note = chemically synthesized
  source 1..22: mol_type = other DNA
gctattaatagatccattgagg

SEQ ID NO: 132560 - DNA, 22 bp, synthetic construct
  misc_feature 1..22: note = chemically synthesized
  source 1..22: mol_type = other DNA
ttaatagatccattgaggttcc

SEQ ID NO: 132561 - DNA, 22 bp, synthetic construct
  misc_feature 1..22: note = chemically synthesized
  source 1..22: mol_type = other DNA
atagatccattgaggttcctgt

SEQ ID NO: 132562 - DNA, 22 bp, synthetic construct
  misc_feature 1..22: note = chemically synthesized
  source 1..22: mol_type = other DNA
aggttcctgtggatcagaactg

SEQ ID NO: 132563 - DNA, 22 bp, synthetic construct
  misc_feature 1..22: note = chemically synthesized
  source 1..22: mol_type = other DNA
ctgtggatcagaactgattttc

SEQ ID NO: 132564 - DNA, 22 bp, synthetic construct
  misc_feature 1..22: note = chemically synthesized
  source 1..22: mol_type = other DNA
tggatcagaactgattttccca

SEQ ID NO: 132565 - DNA, 22 bp, synthetic construct
  misc_feature 1..22: note = chemically synthesized
  source 1..22: mol_type = other DNA
attttcccaaagtatcagaaaa

SEQ ID NO: 132566 - DNA, 22 bp, synthetic construct
  misc_feature 1..22: note = chemically synthesized
  source 1..22: mol_type = other DNA
tcccaaagtatcagaaaagaca

SEQ ID NO: 132567 - DNA, 22 bp, synthetic construct
  misc_feature 1..22: note = chemically synthesized
  source 1..22: mol_type = other DNA
cccaaagtatcagaaaagacaa

SEQ ID NO: 132568 - DNA, 22 bp, synthetic construct
  misc_feature 1..22: note = chemically synthesized
  source 1..22: mol_type = other DNA
ccaaagtatcagaaaagacaac

SEQ ID NO: 132569 - DNA, 22 bp, synthetic construct
  misc_feature 1..22: note = chemically synthesized
  source 1..22: mol_type = other DNA
aaatgcataaactccaggacaa

SEQ ID NO: 132570 - DNA, 22 bp, synthetic construct
  misc_feature 1..22: note = chemically synthesized
  source 1..22: mol_type = other DNA
caggacaaagacacatgtgacc

SEQ ID NO: 132571 - DNA, 22 bp, synthetic construct
  misc_feature 1..22: note = chemically synthesized
  source 1..22: mol_type = other DNA
cattcaactagtatctctcaat

SEQ ID NO: 132572 - DNA, 22 bp, synthetic construct
  misc_feature 1..22: note = chemically synthesized
  source 1..22: mol_type = other DNA
aactagtatctctcaatacttt

SEQ ID NO: 132573 - DNA, 22 bp, synthetic construct
  misc_feature 1..22: note = chemically synthesized
  source 1..22: mol_type = other DNA
gtatctctcaatactttgcatt

SEQ ID NO: 132574 - DNA, 22 bp, synthetic construct
  misc_feature 1..22: note = chemically synthesized
  source 1..22: mol_type = other DNA
tcaatactttgcattgtattga

SEQ ID NO: 132575 - DNA, 22 bp, synthetic construct
  misc_feature 1..22: note = chemically synthesized
  source 1..22: mol_type = other DNA
aatactttgcattgtattgaga

SEQ ID NO: 132576 - DNA, 22 bp, synthetic construct
  misc_feature 1..22: note = chemically synthesized
  source 1..22: mol_type = other DNA
tgcattgtattgagacagacaa

SEQ ID NO: 132577 - DNA, 22 bp, synthetic construct
  misc_feature 1..22: note = chemically synthesized
  source 1..22: mol_type = other DNA
gcattgtattgagacagacaat

SEQ ID NO: 132578 - DNA, 22 bp, synthetic construct
  misc_feature 1..22: note = chemically synthesized
  source 1..22: mol_type = other DNA
cattgtattgagacagacaatg

SEQ ID NO: 132579 - DNA, 22 bp, synthetic construct
  misc_feature 1..22: note = chemically synthesized
  source 1..22: mol_type = other DNA
tattgagacagacaatgcaaag

SEQ ID NO: 132580 - DNA, 22 bp, synthetic construct
  misc_feature 1..22: note = chemically synthesized
  source 1..22: mol_type = other DNA
agacagacaatgcaaagtacac

SEQ ID NO: 132581 - DNA, 22 bp, synthetic construct
  misc_feature 1..22: note = chemically synthesized
  source 1..22: mol_type = other DNA
tgtactgatgcttagggtcctg

SEQ ID NO: 132582 - DNA, 22 bp, synthetic construct
  misc_feature 1..22: note = chemically synthesized
  source 1..22: mol_type = other DNA
atgcttagggtcctgaagggtc

SEQ ID NO: 132583 - DNA, 22 bp, synthetic construct
  misc_feature 1..22: note = chemically synthesized
  source 1..22: mol_type = other DNA
agggtcctgaagggtcacataa

SEQ ID NO: 132584 - DNA, 22 bp, synthetic construct
  misc_feature 1..22: note = chemically synthesized
  source 1..22: mol_type = other DNA
gggtcctgaagggtcacataat

SEQ ID NO: 132585 - DNA, 22 bp, synthetic construct
  misc_feature 1..22: note = chemically synthesized
  source 1..22: mol_type = other DNA
aagggtcacataattaagtcct

SEQ ID NO: 132586 - DNA, 22 bp, synthetic construct
  misc_feature 1..22: note = chemically synthesized
  source 1..22: mol_type = other DNA
agtcctggcatcccaatgtaga

SEQ ID NO: 132587 - DNA, 22 bp, synthetic construct
  misc_feature 1..22: note = chemically synthesized
  source 1..22: mol_type = other DNA
gcatcccaatgtagaggtggca

SEQ ID NO: 132588 - DNA, 22 bp, synthetic construct
  misc_feature 1..22: note = chemically synthesized
  source 1..22: mol_type = other DNA
gagtatgcagcttttctcatcc

SEQ ID NO: 132589 - DNA, 22 bp, synthetic construct
  misc_feature 1..22: note = chemically synthesized
  source 1..22: mol_type = other DNA
ttctcatccatccttggagaaa

SEQ ID NO: 132590 - DNA, 22 bp, synthetic construct
  misc_feature 1..22: note = chemically synthesized
  source 1..22: mol_type = other DNA
tctcatccatccttggagaaat

SEQ ID NO: 132591 - DNA, 22 bp, synthetic construct
  misc_feature 1..22: note = chemically synthesized
  source 1..22: mol_type = other DNA
ctcatccatccttggagaaata

SEQ ID NO: 132592 - DNA, 22 bp, synthetic construct
  misc_feature 1..22: note = chemically synthesized
  source 1..22: mol_type = other DNA
tcatccatccttggagaaatac

SEQ ID NO: 132593 - DNA, 22 bp, synthetic construct
  misc_feature 1..22: note = chemically synthesized
  source 1..22: mol_type = other DNA
atccatccttggagaaatacct

SEQ ID NO: 132594 - DNA, 22 bp, synthetic construct
  misc_feature 1..22: note = chemically synthesized
  source 1..22: mol_type = other DNA
ggagaaatacctgaaagttccg

SEQ ID NO: 132595 - DNA, 22 bp, synthetic construct
  misc_feature 1..22: note = chemically synthesized
  source 1..22: mol_type = other DNA
gagaaatacctgaaagttccga

SEQ ID NO: 132596 - DNA, 22 bp, synthetic construct
  misc_feature 1..22: note = chemically synthesized
  source 1..22: mol_type = other DNA
aaagttccgaggacattggttg

SEQ ID NO: 132597 - DNA, 22 bp, synthetic construct
  misc_feature 1..22: note = chemically synthesized
  source 1..22: mol_type = other DNA
cgaggacattggttgagcgtcc

SEQ ID NO: 132598 - DNA, 22 bp, synthetic construct
  misc_feature 1..22: note = chemically synthesized
  source 1..22: mol_type = other DNA
gttgagcgtccctgcttctccc

SEQ ID NO: 132599 - DNA, 22 bp, synthetic construct
  misc_feature 1..22: note = chemically synthesized
  source 1..22: mol_type = other DNA
agcgtccctgcttctcccagac

SEQ ID NO: 132600 - DNA, 22 bp, synthetic construct
  misc_feature 1..22: note = chemically synthesized
  source 1..22: mol_type = other DNA
cttctcccagacagaggaggga

SEQ ID NO: 132601 - DNA, 22 bp, synthetic construct
  misc_feature 1..22: note = chemically synthesized
  source 1..22: mol_type = other DNA
ctcccagacagaggagggaggg

SEQ ID NO: 132602 - DNA, 22 bp, synthetic construct
  misc_feature 1..22: note = chemically synthesized
  source 1..22: mol_type = other DNA
tcccagacagaggagggagggg

SEQ ID NO: 132603 - DNA, 22 bp, synthetic construct
  misc_feature 1..22: note = chemically synthesized
  source 1..22: mol_type = other DNA
ccagacagaggagggaggggag

SEQ ID NO: 132604 - DNA, 22 bp, synthetic construct
  misc_feature 1..22: note = chemically synthesized
  source 1..22: mol_type = other DNA
ttctgagtatttggaaagagga

SEQ ID NO: 132605 - DNA, 22 bp, synthetic construct
  misc_feature 1..22: note = chemically synthesized
  source 1..22: mol_type = other DNA
ctgagtatttggaaagaggaaa

SEQ ID NO: 132606 - DNA, 22 bp, synthetic construct
  misc_feature 1..22: note = chemically synthesized
  source 1..22: mol_type = other DNA
tgagtatttggaaagaggaaac

SEQ ID NO: 132607 - DNA, 22 bp, synthetic construct
  misc_feature 1..22: note = chemically synthesized
  source 1..22: mol_type = other DNA
agtatttggaaagaggaaactc

SEQ ID NO: 132608 - DNA, 22 bp, synthetic construct
  misc_feature 1..22: note = chemically synthesized
  source 1..22: mol_type = other DNA
ggaaagaggaaactctggggaa

SEQ ID NO: 132609 - DNA, 22 bp, synthetic construct
  misc_feature 1..22: note = chemically synthesized
  source 1..22: mol_type = other DNA
gaaagaggaaactctggggaag

SEQ ID NO: 132610 - DNA, 22 bp, synthetic construct
  misc_feature 1..22: note = chemically synthesized
  source 1..22: mol_type = other DNA
tggggaagtgatttccacatac

SEQ ID NO: 132611 - DNA, 22 bp, synthetic construct
  misc_feature 1..22: note = chemically synthesized
  source 1..22: mol_type = other DNA
gggaagtgatttccacatacat

SEQ ID NO: 132612 - DNA, 22 bp, synthetic construct
  misc_feature 1..22: note = chemically synthesized
  source 1..22: mol_type = other DNA
ccacatacataaactctctaat

SEQ ID NO: 132613 - DNA, 22 bp, synthetic construct
  misc_feature 1..22: note = chemically synthesized
  source 1..22: mol_type = other DNA
cacatacataaactctctaatt

SEQ ID NO: 132614 - DNA, 22 bp, synthetic construct
  misc_feature 1..22: note = chemically synthesized
  source 1..22: mol_type = other DNA
tctaatttggcctcttgaatag

SEQ ID NO: 132615 - DNA, 22 bp, synthetic construct
  misc_feature 1..22: note = chemically synthesized
  source 1..22: mol_type = other DNA
taatttggcctcttgaatagtc

SEQ ID NO: 132616 - DNA, 22 bp, synthetic construct
  misc_feature 1..22: note = chemically synthesized
  source 1..22: mol_type = other DNA
atttggcctcttgaatagtctt

SEQ ID NO: 132617 - DNA, 22 bp, synthetic construct
  misc_feature 1..22: note = chemically synthesized
  source 1..22: mol_type = other DNA
ggcctcttgaatagtctttgag

SEQ ID NO: 132618 - DNA, 22 bp, synthetic construct
  misc_feature 1..22: note = chemically synthesized
  source 1..22: mol_type = other DNA
gcctcttgaatagtctttgaga

SEQ ID NO: 132619 - DNA, 22 bp, synthetic construct
  misc_feature 1..22: note = chemically synthesized
  source 1..22: mol_type = other DNA
ttgaatagtctttgagaagtga

SEQ ID NO: 132620 - DNA, 22 bp, synthetic construct
  misc_feature 1..22: note = chemically synthesized
  source 1..22: mol_type = other DNA
gaatagtctttgagaagtgagt

SEQ ID NO: 132621 - DNA, 22 bp, synthetic construct
  misc_feature 1..22: note = chemically synthesized
  source 1..22: mol_type = other DNA
aatagtctttgagaagtgagtg

SEQ ID NO: 132622 - DNA, 22 bp, synthetic construct
  misc_feature 1..22: note = chemically synthesized
  source 1..22: mol_type = other DNA
tgagaagtgagtgtctgaactg

SEQ ID NO: 132623 - DNA, 22 bp, synthetic construct
  misc_feature 1..22: note = chemically synthesized
  source 1..22: mol_type = other DNA
gagaagtgagtgtctgaactga

SEQ ID NO: 132624 - DNA, 22 bp, synthetic construct
  misc_feature 1..22: note = chemically synthesized
  source 1..22: mol_type = other DNA
agaagtgagtgtctgaactgag

SEQ ID NO: 132625 - DNA, 22 bp, synthetic construct
  misc_feature 1..22: note = chemically synthesized
  source 1..22: mol_type = other DNA
aactgagtcttcaaatagagca

SEQ ID NO: 132626 - DNA, 22 bp, synthetic construct
  misc_feature 1..22: note = chemically synthesized
  source 1..22: mol_type = other DNA
agtcttcaaatagagcaggaat

SEQ ID NO: 132627 - DNA, 22 bp, synthetic construct
  misc_feature 1..22: note = chemically synthesized
  source 1..22: mol_type = other DNA
caaatagagcaggaatgggtcc

SEQ ID NO: 132628 - DNA, 22 bp, synthetic construct
  misc_feature 1..22: note = chemically synthesized
  source 1..22: mol_type = other DNA
aaatagagcaggaatgggtcct

SEQ ID NO: 132629 - DNA, 22 bp, synthetic construct
  misc_feature 1..22: note = chemically synthesized
  source 1..22: mol_type = other DNA
attccagcaagaaaatgacagc

SEQ ID NO: 132630 - DNA, 22 bp, synthetic construct
  misc_feature 1..22: note = chemically synthesized
  source 1..22: mol_type = other DNA
ttccagcaagaaaatgacagca

SEQ ID NO: 132631 - DNA, 22 bp, synthetic construct
  misc_feature 1..22: note = chemically synthesized
  source 1..22: mol_type = other DNA
cagcaagaaaatgacagcatag

SEQ ID NO: 132632 - DNA, 22 bp, synthetic construct
  misc_feature 1..22: note = chemically synthesized
  source 1..22: mol_type = other DNA
ctcttccttcttatgttagatg

SEQ ID NO: 132633 - DNA, 22 bp, synthetic construct
  misc_feature 1..22: note = chemically synthesized
  source 1..22: mol_type = other DNA
ttccttcttatgttagatgcag

SEQ ID NO: 132634 - DNA, 22 bp, synthetic construct
  misc_feature 1..22: note = chemically synthesized
  source 1..22: mol_type = other DNA
ccttcttatgttagatgcagcg

SEQ ID NO: 132635 - DNA, 22 bp, synthetic construct
  misc_feature 1..22: note = chemically synthesized
  source 1..22: mol_type = other DNA
cttcttatgttagatgcagcga

SEQ ID NO: 132636 - DNA, 22 bp, synthetic construct
  misc_feature 1..22: note = chemically synthesized
  source 1..22: mol_type = other DNA
cttatgttagatgcagcgaaga

SEQ ID NO: 132637 - DNA, 22 bp, synthetic construct
  misc_feature 1..22: note = chemically synthesized
  source 1..22: mol_type = other DNA
ttatgttagatgcagcgaagag

SEQ ID NO: 132638 - DNA, 22 bp, synthetic construct
  misc_feature 1..22: note = chemically synthesized
  source 1..22: mol_type = other DNA
atgttagatgcagcgaagagaa

SEQ ID NO: 132639 - DNA, 22 bp, synthetic construct
  misc_feature 1..22: note = chemically synthesized
  source 1..22: mol_type = other DNA
tgttagatgcagcgaagagaag

SEQ ID NO: 132640 - DNA, 22 bp, synthetic construct
  misc_feature 1..22: note = chemically synthesized
  source 1..22: mol_type = other DNA
gatgcagcgaagagaagatagg

SEQ ID NO: 132641 - DNA, 22 bp, synthetic construct
  misc_feature 1..22: note = chemically synthesized
  source 1..22: mol_type = other DNA
tcagaggtctgcataggagaac

SEQ ID NO: 132642 - DNA, 22 bp, synthetic construct
  misc_feature 1..22: note = chemically synthesized
  source 1..22: mol_type = other DNA
cagaggtctgcataggagaaca

SEQ ID NO: 132643 - DNA, 22 bp, synthetic construct
  misc_feature 1..22: note = chemically synthesized
  source 1..22: mol_type = other DNA
agaggtctgcataggagaacat

SEQ ID NO: 132644 - DNA, 22 bp, synthetic construct
  misc_feature 1..22: note = chemically synthesized
  source 1..22: mol_type = other DNA
cataggagaacatactccatct

SEQ ID NO: 132645 - DNA, 22 bp, synthetic construct
  misc_feature 1..22: note = chemically synthesized
  source 1..22: mol_type = other DNA
catctgggatgaccaacaccta

SEQ ID NO: 132646 - DNA, 22 bp, synthetic construct
  misc_feature 1..22: note = chemically synthesized
  source 1..22: mol_type = other DNA
ggatgaccaacacctaaagcac

SEQ ID NO: 132647 - DNA, 22 bp, synthetic construct
  misc_feature 1..22: note = chemically synthesized
  source 1..22: mol_type = other DNA
aagcacagactttttcatctca

SEQ ID NO: 132648 - DNA, 22 bp, synthetic construct
  misc_feature 1..22: note = chemically synthesized
  source 1..22: mol_type = other DNA
tttcatctcaacacatgtttca

SEQ ID NO: 132649 - DNA, 22 bp, synthetic construct
  misc_feature 1..22: note = chemically synthesized
  source 1..22: mol_type = other DNA
ttcatctcaacacatgtttcaa

SEQ ID NO: 132650 - DNA, 22 bp, synthetic construct
  misc_feature 1..22: note = chemically synthesized
  source 1..22: mol_type = other DNA
tcatctcaacacatgtttcaag

SEQ ID NO: 132651 - DNA, 22 bp, synthetic construct
  misc_feature 1..22: note = chemically synthesized
  source 1..22: mol_type = other DNA
catctcaacacatgtttcaagg

SEQ ID NO: 132652 - DNA, 22 bp, synthetic construct
  misc_feature 1..22: note = chemically synthesized
  source 1..22: mol_type = other DNA
atctcaacacatgtttcaaggc

SEQ ID NO: 132653 - DNA, 22 bp, synthetic construct
  misc_feature 1..22: note = chemically synthesized
  source 1..22: mol_type = other DNA
aacacatgtttcaaggcaggct

SEQ ID NO: 132654 - DNA, 22 bp, synthetic construct
  misc_feature 1..22: note = chemically synthesized
  source 1..22: mol_type = other DNA
caaggcaggcttgaagtttcaa

SEQ ID NO: 132655 - DNA, 22 bp, synthetic construct
  misc_feature 1..22: note = chemically synthesized
  source 1..22: mol_type = other DNA
aaggcaggcttgaagtttcaaa

SEQ ID NO: 132656 - DNA, 22 bp, synthetic construct
  misc_feature 1..22: note = chemically synthesized
  source 1..22: mol_type = other DNA
gaagtttcaaatgtggtgctca

SEQ ID NO: 132657 - DNA, 22 bp, synthetic construct
  misc_feature 1..22: note = chemically synthesized
  source 1..22: mol_type = other DNA
aagtttcaaatgtggtgctcat

SEQ ID NO: 132658 - DNA, 22 bp, synthetic construct
  misc_feature 1..22: note = chemically synthesized
  source 1..22: mol_type = other DNA
caaatgtggtgctcatggatta

SEQ ID NO: 132659 - DNA, 22 bp, synthetic construct
  misc_feature 1..22: note = chemically synthesized
  source 1..22: mol_type = other DNA
aaatgtggtgctcatggattag

SEQ ID NO: 132660 - DNA, 22 bp, synthetic construct
  misc_feature 1..22: note = chemically synthesized
  source 1..22: mol_type = other DNA
atggattagcttcaggaaaacg

SEQ ID NO: 132661 - DNA, 22 bp, synthetic construct
  misc_feature 1..22: note = chemically synthesized
  source 1..22: mol_type = other DNA
gcttcaggaaaacgtgtgaata

SEQ ID NO: 132662 - DNA, 22 bp, synthetic construct
  misc_feature 1..22: note = chemically synthesized
  source 1..22: mol_type = other DNA
caggaaaacgtgtgaatatttt

SEQ ID NO: 132663 - DNA, 22 bp, synthetic construct
  misc_feature 1..22: note = chemically synthesized
  source 1..22: mol_type = other DNA
aggaaaacgtgtgaatattttt

SEQ ID NO: 132664 - DNA, 22 bp, synthetic construct
  misc_feature 1..22: note = chemically synthesized
  source 1..22: mol_type = other DNA
ttagactaaatgtgacgtcacc

SEQ ID NO: 132665 - DNA, 22 bp, synthetic construct
  misc_feature 1..22: note = chemically synthesized
  source 1..22: mol_type = other DNA
tagactaaatgtgacgtcacct

SEQ ID NO: 132666 - DNA, 22 bp, synthetic construct
  misc_feature 1..22: note = chemically synthesized
  source 1..22: mol_type = other DNA
agactaaatgtgacgtcacctg

SEQ ID NO: 132667 - DNA, 22 bp, synthetic construct
  misc_feature 1..22: note = chemically synthesized
  source 1..22: mol_type = other DNA
gactaaatgtgacgtcacctgc

SEQ ID NO: 132668 - DNA, 22 bp, synthetic construct
  misc_feature 1..22: note = chemically synthesized
  source 1..22: mol_type = other DNA
aatgtgacgtcacctgcttttg

SEQ ID NO: 132669 - DNA, 22 bp, synthetic construct
  misc_feature 1..22: note = chemically synthesized
  source 1..22: mol_type = other DNA
cttttgtccatttttctccaca

SEQ ID NO: 132670 - DNA, 22 bp, synthetic construct
  misc_feature 1..22: note = chemically synthesized
  source 1..22: mol_type = other DNA
ttgtccatttttctccacagag

SEQ ID NO: 132671 - DNA, 22 bp, synthetic construct
  misc_feature 1..22: note = chemically synthesized
  source 1..22: mol_type = other DNA
tgtccatttttctccacagagg

SEQ ID NO: 132672 - DNA, 22 bp, synthetic construct
  misc_feature 1..22: note = chemically synthesized
  source 1..22: mol_type = other DNA
gtccatttttctccacagaggg

SEQ ID NO: 132673 - DNA, 22 bp, synthetic construct
  misc_feature 1..22: note = chemically synthesized
  source 1..22: mol_type = other DNA
tccatttttctccacagagggc

SEQ ID NO: 132674 - DNA, 22 bp, synthetic construct
  misc_feature 1..22: note = chemically synthesized
  source 1..22: mol_type = other DNA
ttctccacagagggctcatggc

SEQ ID NO: 132675 - DNA, 22 bp, synthetic construct
  misc_feature 1..22: note = chemically synthesized
  source 1..22: mol_type = other DNA
tctccacagagggctcatggct

SEQ ID NO: 132676 - DNA, 22 bp, synthetic construct
  misc_feature 1..22: note = chemically synthesized
  source 1..22: mol_type = other DNA
ctccacagagggctcatggctt

SEQ ID NO: 132677 - DNA, 22 bp, synthetic construct
  misc_feature 1..22: note = chemically synthesized
  source 1..22: mol_type = other DNA
tccacagagggctcatggcttt

SEQ ID NO: 132678 - DNA, 22 bp, synthetic construct
  misc_feature 1..22: note = chemically synthesized
  source 1..22: mol_type = other DNA
cacagagggctcatggcttttg

SEQ ID NO: 132679 - DNA, 22 bp, synthetic construct
  misc_feature 1..22: note = chemically synthesized
  source 1..22: mol_type = other DNA
atggcttttgttagaattccat

SEQ ID NO: 132680 - DNA, 22 bp, synthetic construct
  misc_feature 1..22: note = chemically synthesized
  source 1..22: mol_type = other DNA
ttgttagaattccataaaacat

SEQ ID NO: 132681 - DNA, 22 bp, synthetic construct
  misc_feature 1..22: note = chemically synthesized
  source 1..22: mol_type = other DNA
tgttagaattccataaaacatt

SEQ ID NO: 132682 - DNA, 22 bp, synthetic construct
  misc_feature 1..22: note = chemically synthesized
  source 1..22: mol_type = other DNA
gttagaattccataaaacatta

SEQ ID NO: 132683 - DNA, 22 bp, synthetic construct
  misc_feature 1..22: note = chemically synthesized
  source 1..22: mol_type = other DNA
ttagaattccataaaacattaa

SEQ ID NO: 132684 - DNA, 22 bp, synthetic construct
  misc_feature 1..22: note = chemically synthesized
  source 1..22: mol_type = other DNA
gaattccataaaacattaacat

SEQ ID NO: 132685 - DNA, 22 bp, synthetic construct
  misc_feature 1..22: note = chemically synthesized
  source 1..22: mol_type = other DNA
cataaaacattaacattctatt

SEQ ID NO: 132686 - DNA, 22 bp, synthetic construct
  misc_feature 1..22: note = chemically synthesized
  source 1..22: mol_type = other DNA
acattctatttcaaaactaaac

SEQ ID NO: 132687 - DNA, 22 bp, synthetic construct
  misc_feature 1..22: note = chemically synthesized
  source 1..22: mol_type = other DNA
tatttcaaaactaaacaaagaa

SEQ ID NO: 132688 - DNA, 22 bp, synthetic construct
  misc_feature 1..22: note = chemically synthesized
  source 1..22: mol_type = other DNA
tttcaaaactaaacaaagaaaa

SEQ ID NO: 132689 - DNA, 22 bp, synthetic construct
  misc_feature 1..22: note = chemically synthesized
  source 1..22: mol_type = other DNA
caaaactaaacaaagaaaagtt

SEQ ID NO: 132690 - DNA, 22 bp, synthetic construct
  misc_feature 1..22: note = chemically synthesized
  source 1..22: mol_type = other DNA
aaaactaaacaaagaaaagttt

SEQ ID NO: 132691 - DNA, 22 bp, synthetic construct
  misc_feature 1..22: note = chemically synthesized
  source 1..22: mol_type = other DNA
aacaaagaaaagttttctaaca

SEQ ID NO: 132692 - DNA, 22 bp, synthetic construct
  misc_feature 1..22: note = chemically synthesized
  source 1..22: mol_type = other DNA
tctaacaaaacactatgtctat

SEQ ID NO: 132693 - DNA, 22 bp, synthetic construct
  misc_feature 1..22: note = chemically synthesized
  source 1..22: mol_type = other DNA
ctaacaaaacactatgtctata

SEQ ID NO: 132694 - DNA, 22 bp, synthetic construct
  misc_feature 1..22: note = chemically synthesized
  source 1..22: mol_type = other DNA
taacaaaacactatgtctatat

SEQ ID NO: 132695 - DNA, 22 bp, synthetic construct
  misc_feature 1..22: note = chemically synthesized
  source 1..22: mol_type = other DNA
acaaaacactatgtctatatca

SEQ ID NO: 132696 - DNA, 22 bp, synthetic construct
  misc_feature 1..22: note = chemically synthesized
  source 1..22: mol_type = other DNA
tgtctatatcatgattgtgaaa

SEQ ID NO: 132697 - DNA, 22 bp, synthetic construct
  misc_feature 1..22: note = chemically synthesized
  source 1..22: mol_type = other DNA
tatcatgattgtgaaacataaa

SEQ ID NO: 132698 - DNA, 22 bp, synthetic construct
  misc_feature 1..22: note = chemically synthesized
  source 1..22: mol_type = other DNA
tgaaacataaaataaaaatcaa

SEQ ID NO: 132699 - DNA, 22 bp, synthetic construct
  misc_feature 1..22: note = chemically synthesized
  source 1..22: mol_type = other DNA
aaatgtatccaaatatgcaatt

SEQ ID NO: 132700 - DNA, 22 bp, synthetic construct
  misc_feature 1..22: note = chemically synthesized
  source 1..22: mol_type = other DNA
aatgtatccaaatatgcaatta

SEQ ID NO: 132701 - DNA, 22 bp, synthetic construct
  misc_feature 1..22: note = chemically synthesized
  source 1..22: mol_type = other DNA
agctaagcagcaggttaactat

SEQ ID NO: 132702 - DNA, 22 bp, synthetic construct
  misc_feature 1..22: note = chemically synthesized
  source 1..22: mol_type = other DNA
agcagcaggttaactatgtaca

SEQ ID NO: 132703 - DNA, 22 bp, synthetic construct
  misc_feature 1..22: note = chemically synthesized
  source 1..22: mol_type = other DNA
actatgtacaattattatctaa

SEQ ID NO: 132704 - DNA, 22 bp, synthetic construct
  misc_feature 1..22: note = chemically synthesized
  source 1..22: mol_type = other DNA
tgtacaattattatctaattgc

SEQ ID NO: 132705 - DNA, 22 bp, synthetic construct
  misc_feature 1..22: note = chemically synthesized
  source 1..22: mol_type = other DNA
ttatctaattgcatatatttgc

SEQ ID NO: 132706 - DNA, 22 bp, synthetic construct
  misc_feature 1..22: note = chemically synthesized
  source 1..22: mol_type = other DNA
tctaattgcatatatttgcctt

SEQ ID NO: 132707 - DNA, 22 bp, synthetic construct
  misc_feature 1..22: note = chemically synthesized
  source 1..22: mol_type = other DNA
attgcatatatttgccttcttt

SEQ ID NO: 132708 - DNA, 22 bp, synthetic construct
  misc_feature 1..22: note = chemically synthesized
  source 1..22: mol_type = other DNA
catatatttgccttcttttttg

SEQ ID NO: 132709 - DNA, 22 bp, synthetic construct
  misc_feature 1..22: note = chemically synthesized
  source 1..22: mol_type = other DNA
gccttcttttttgttactattg

SEQ ID NO: 132710 - DNA, 22 bp, synthetic construct
  misc_feature 1..22: note = chemically synthesized
  source 1..22: mol_type = other DNA
ccttcttttttgttactattgg

SEQ ID NO: 132711 - DNA, 22 bp, synthetic construct
  misc_feature 1..22: note = chemically synthesized
  source 1..22: mol_type = other DNA
cttttttgttactattggttca

SEQ ID NO: 132712 - DNA, 22 bp, synthetic construct
  misc_feature 1..22: note = chemically synthesized
  source 1..22: mol_type = other DNA
ttttttgttactattggttcaa

SEQ ID NO: 132713 - DNA, 22 bp, synthetic construct
  misc_feature 1..22: note = chemically synthesized
  source 1..22: mol_type = other DNA
ttttgttactattggttcaaac

SEQ ID NO: 132714 - DNA, 22 bp, synthetic construct
  misc_feature 1..22: note = chemically synthesized
  source 1..22: mol_type = other DNA
tttgttactattggttcaaaca

SEQ ID NO: 132715 - DNA, 22 bp, synthetic construct
  misc_feature 1..22: note = chemically synthesized
  source 1..22: mol_type = other DNA
ttgttactattggttcaaacat

SEQ ID NO: 132716 - DNA, 22 bp, synthetic construct
  misc_feature 1..22: note = chemically synthesized
  source 1..22: mol_type = other DNA
tgttactattggttcaaacatt

SEQ ID NO: 132717 - DNA, 22 bp, synthetic construct
  misc_feature 1..22: note = chemically synthesized
  source 1..22: mol_type = other DNA
gttactattggttcaaacattg

SEQ ID NO: 132718 - DNA, 22 bp, synthetic construct
  misc_feature 1..22: note = chemically synthesized
  source 1..22: mol_type = other DNA
ttactattggttcaaacattgt

SEQ ID NO: 132719 - DNA, 22 bp, synthetic construct
  misc_feature 1..22: note = chemically synthesized
  source 1..22: mol_type = other DNA
ctattggttcaaacattgtgca

SEQ ID NO: 132720 - DNA, 22 bp, synthetic construct
  misc_feature 1..22: note = chemically synthesized
  source 1..22: mol_type = other DNA
ttggttcaaacattgtgcagca

SEQ ID NO: 132721 - DNA, 22 bp, synthetic construct
  misc_feature 1..22: note = chemically synthesized
  source 1..22: mol_type = other DNA
gttcaaacattgtgcagcaagc

SEQ ID NO: 132722 - DNA, 22 bp, synthetic construct
  misc_feature 1..22: note = chemically synthesized
  source 1..22: mol_type = other DNA
aaacattgtgcagcaagcacac

SEQ ID NO: 132723 - DNA, 22 bp, synthetic construct
  misc_feature 1..22: note = chemically synthesized
  source 1..22: mol_type = other DNA
tgcagcaagcacaccacagagg

SEQ ID NO: 132724 - DNA, 22 bp, synthetic construct
  misc_feature 1..22: note = chemically synthesized
  source 1..22: mol_type = other DNA
tttaaaatgtgttttttagatt

SEQ ID NO: 132725 - DNA, 22 bp, synthetic construct
  misc_feature 1..22: note = chemically synthesized
  source 1..22: mol_type = other DNA
ttaaaatgtgttttttagatta

SEQ ID NO: 132726 - DNA, 22 bp, synthetic construct
  misc_feature 1..22: note = chemically synthesized
  source 1..22: mol_type = other DNA
taaaatgtgttttttagattaa

SEQ ID NO: 132727 - DNA, 22 bp, synthetic construct
  misc_feature 1..22: note = chemically synthesized
  source 1..22: mol_type = other DNA
aaaatgtgttttttagattaag

SEQ ID NO: 132728 - DNA, 22 bp, synthetic construct
  misc_feature 1..22: note = chemically synthesized
  source 1..22: mol_type = other DNA
aaatgtgttttttagattaaga

SEQ ID NO: 132729 - DNA, 22 bp, synthetic construct
  misc_feature 1..22: note = chemically synthesized
  source 1..22: mol_type = other DNA
tttagattaagaatgcttaact

SEQ ID NO: 132730 - DNA, 22 bp, synthetic construct
  misc_feature 1..22: note = chemically synthesized
  source 1..22: mol_type = other DNA
ttagattaagaatgcttaacta

SEQ ID NO: 132731 - DNA, 22 bp, synthetic construct
  misc_feature 1..22: note = chemically synthesized
  source 1..22: mol_type = other DNA
tagattaagaatgcttaactac

SEQ ID NO: 132732 - DNA, 22 bp, synthetic construct
  misc_feature 1..22: note = chemically synthesized
  source 1..22: mol_type = other DNA
agattaagaatgcttaactact

SEQ ID NO: 132733 - DNA, 22 bp, synthetic construct
  misc_feature 1..22: note = chemically synthesized
  source 1..22: mol_type = other DNA
gattaagaatgcttaactactt

SEQ ID NO: 132734 - DNA, 22 bp, synthetic construct
  misc_feature 1..22: note = chemically synthesized
  source 1..22: mol_type = other DNA
agaatgcttaactacttaatta

SEQ ID NO: 132735 - DNA, 22 bp, synthetic construct
  misc_feature 1..22: note = chemically synthesized
  source 1..22: mol_type = other DNA
aactacttaattattcataact

SEQ ID NO: 132736 - DNA, 22 bp, synthetic construct
  misc_feature 1..22: note = chemically synthesized
  source 1..22: mol_type = other DNA
actacttaattattcataactg

SEQ ID NO: 132737 - DNA, 22 bp, synthetic construct
  misc_feature 1..22: note = chemically synthesized
  source 1..22: mol_type = other DNA
cttaattattcataactgaaga

SEQ ID NO: 132738 - DNA, 22 bp, synthetic construct
  misc_feature 1..22: note = chemically synthesized
  source 1..22: mol_type = other DNA
aattattcataactgaagaaat

SEQ ID NO: 132739 - DNA, 22 bp, synthetic construct
  misc_feature 1..22: note = chemically synthesized
  source 1..22: mol_type = other DNA
attattcataactgaagaaatg

SEQ ID NO: 132740 - DNA, 22 bp, synthetic construct
  misc_feature 1..22: note = chemically synthesized
  source 1..22: mol_type = other DNA
ttcataactgaagaaatgatca

SEQ ID NO: 132741 - DNA, 22 bp, synthetic construct
  misc_feature 1..22: note = chemically synthesized
  source 1..22: mol_type = other DNA
ataactgaagaaatgatcatca

SEQ ID NO: 132742 - DNA, 22 bp, synthetic construct
  misc_feature 1..22: note = chemically synthesized
  source 1..22: mol_type = other DNA
aagaaatgatcatcattcctta

SEQ ID NO: 132743 - DNA, 22 bp, synthetic construct
  misc_feature 1..22: note = chemically synthesized
  source 1..22: mol_type = other DNA
cttatctctagcacagtctata

SEQ ID NO: 132744 - DNA, 22 bp, synthetic construct
  misc_feature 1..22: note = chemically synthesized
  source 1..22: mol_type = other DNA
atctctagcacagtctataaat

SEQ ID NO: 132745 - DNA, 22 bp, synthetic construct
  misc_feature 1..22: note = chemically synthesized
  source 1..22: mol_type = other DNA
tctctagcacagtctataaatg

SEQ ID NO: 132746 - DNA, 22 bp, synthetic construct
  misc_feature 1..22: note = chemically synthesized
  source 1..22: mol_type = other DNA
tagcacagtctataaatgtatt

SEQ ID NO: 132747 - DNA, 22 bp, synthetic construct
  misc_feature 1..22: note = chemically synthesized
  source 1..22: mol_type = other DNA
gcacagtctataaatgtattgc

SEQ ID NO: 132748 - DNA, 22 bp, synthetic construct
  misc_feature 1..22: note = chemically synthesized
  source 1..22: mol_type = other DNA
taaatgtattgctcttctataa

SEQ ID NO: 132749 - DNA, 22 bp, synthetic construct
  misc_feature 1..22: note = chemically synthesized
  source 1..22: mol_type = other DNA
ctcttctataagaaaattgttg

SEQ ID NO: 132750 - DNA, 22 bp, synthetic construct
  misc_feature 1..22: note = chemically synthesized
  source 1..22: mol_type = other DNA
ttctataagaaaattgttgcac

SEQ ID NO: 132751 - DNA, 22 bp, synthetic construct
  misc_feature 1..22: note = chemically synthesized
  source 1..22: mol_type = other DNA
ctataagaaaattgttgcacat

SEQ ID NO: 132752 - DNA, 22 bp, synthetic construct
  misc_feature 1..22: note = chemically synthesized
  source 1..22: mol_type = other DNA
tataagaaaattgttgcacatt

SEQ ID NO: 132753 - DNA, 22 bp, synthetic construct
  misc_feature 1..22: note = chemically synthesized
  source 1..22: mol_type = other DNA
taagaaaattgttgcacattca

SEQ ID NO: 132754 - DNA, 22 bp, synthetic construct
  misc_feature 1..22: note = chemically synthesized
  source 1..22: mol_type = other DNA
ttgcacattcatgcatatacca

SEQ ID NO: 132755 - DNA, 22 bp, synthetic construct
  misc_feature 1..22: note = chemically synthesized
  source 1..22: mol_type = other DNA
cacattcatgcatataccaata

SEQ ID NO: 132756 - DNA, 22 bp, synthetic construct
  misc_feature 1..22: note = chemically synthesized
  source 1..22: mol_type = other DNA
atgcatataccaataaattatt

SEQ ID NO: 132757 - DNA, 22 bp, synthetic construct
  misc_feature 1..22: note = chemically synthesized
  source 1..22: mol_type = other DNA
ttgctaaatatgaatattagga

SEQ ID NO: 132758 - DNA, 22 bp, synthetic construct
  misc_feature 1..22: note = chemically synthesized
  source 1..22: mol_type = other DNA
ctaaatatgaatattaggattg

SEQ ID NO: 132759 - DNA, 22 bp, synthetic construct
  misc_feature 1..22: note = chemically synthesized
  source 1..22: mol_type = other DNA
aatatgaatattaggattgagg

SEQ ID NO: 132760 - DNA, 22 bp, synthetic construct
  misc_feature 1..22: note = chemically synthesized
  source 1..22: mol_type = other DNA
ggattgaggctgcagaaataca

SEQ ID NO: 132761 - DNA, 22 bp, synthetic construct
  misc_feature 1..22: note = chemically synthesized
  source 1..22: mol_type = other DNA
aggctgcagaaatacagtttca

SEQ ID NO: 132762 - DNA, 22 bp, synthetic construct
  misc_feature 1..22: note = chemically synthesized
  source 1..22: mol_type = other DNA
cagaaatacagtttcacaagaa

SEQ ID NO: 132763 - DNA, 22 bp, synthetic construct
  misc_feature 1..22: note = chemically synthesized
  source 1..22: mol_type = other DNA
cacaagaaggtagtaaaaactg

SEQ ID NO: 132764 - DNA, 22 bp, synthetic construct
  misc_feature 1..22: note = chemically synthesized
  source 1..22: mol_type = other DNA
acaagaaggtagtaaaaactga

SEQ ID NO: 132765 - DNA, 22 bp, synthetic construct
  misc_feature 1..22: note = chemically synthesized
  source 1..22: mol_type = other DNA
ataaggcagggatttcagtgta

SEQ ID NO: 132766 - DNA, 22 bp, synthetic construct
  misc_feature 1..22: note = chemically synthesized
  source 1..22: mol_type = other DNA
cagtgtaatagtttctataaag

SEQ ID NO: 132767 - DNA, 22 bp, synthetic construct
  misc_feature 1..22: note = chemically synthesized
  source 1..22: mol_type = other DNA
agtgtaatagtttctataaagc

SEQ ID NO: 132768 - DNA, 22 bp, synthetic construct
  misc_feature 1..22: note = chemically synthesized
  source 1..22: mol_type = other DNA
ctataaagctacttgccacttg

SEQ ID NO: 132769 - DNA, 22 bp, synthetic construct
  misc_feature 1..22: note = chemically synthesized
  source 1..22: mol_type = other DNA
tataaagctacttgccacttgt

SEQ ID NO: 132770 - DNA, 22 bp, synthetic construct
  misc_feature 1..22: note = chemically synthesized
  source 1..22: mol_type = other DNA
taaagctacttgccacttgtga

SEQ ID NO: 132771 - DNA, 22 bp, synthetic construct
  misc_feature 1..22: note = chemically synthesized
  source 1..22: mol_type = other DNA
cttgccacttgtgaacacacaa

SEQ ID NO: 132772 - DNA, 22 bp, synthetic construct
  misc_feature 1..22: note = chemically synthesized
  source 1..22: mol_type = other DNA
gccacttgtgaacacacaatgc

SEQ ID NO: 132773 - DNA, 22 bp, synthetic construct
  misc_feature 1..22: note = chemically synthesized
  source 1..22: mol_type = other DNA
ccacttgtgaacacacaatgcg

SEQ ID NO: 132774 - DNA, 22 bp, synthetic construct
  misc_feature 1..22: note = chemically synthesized
  source 1..22: mol_type = other DNA
gtgaacacacaatgcggctcct

SEQ ID NO: 132775 - DNA, 22 bp, synthetic construct
  misc_feature 1..22: note = chemically synthesized
  source 1..22: mol_type = other DNA
tgaacacacaatgcggctcctt

SEQ ID NO: 132776 - DNA, 22 bp, synthetic construct
  misc_feature 1..22: note = chemically synthesized
  source 1..22: mol_type = other DNA
cttttttgctgcctggcttttc

SEQ ID NO: 132777 - DNA, 22 bp, synthetic construct
  misc_feature 1..22: note = chemically synthesized
  source 1..22: mol_type = other DNA
ttttgctgcctggcttttcagt

SEQ ID NO: 132778 - DNA, 22 bp, synthetic construct
  misc_feature 1..22: note = chemically synthesized
  source 1..22: mol_type = other DNA
tttgctgcctggcttttcagta

SEQ ID NO: 132779 - DNA, 22 bp, synthetic construct
  misc_feature 1..22: note = chemically synthesized
  source 1..22: mol_type = other DNA
ttgctgcctggcttttcagtac

SEQ ID NO: 132780 - DNA, 22 bp, synthetic construct
  misc_feature 1..22: note = chemically synthesized
  source 1..22: mol_type = other DNA
tgctgcctggcttttcagtact

SEQ ID NO: 132781 - DNA, 22 bp, synthetic construct
  misc_feature 1..22: note = chemically synthesized
  source 1..22: mol_type = other DNA
gctgcctggcttttcagtactg

SEQ ID NO: 132782 - DNA, 22 bp, synthetic construct
  misc_feature 1..22: note = chemically synthesized
  source 1..22: mol_type = other DNA
ctgcctggcttttcagtactgg

SEQ ID NO: 132783 - DNA, 22 bp, synthetic construct
  misc_feature 1..22: note = chemically synthesized
  source 1..22: mol_type = other DNA
cctggcttttcagtactggagg

SEQ ID NO: 132784 - DNA, 22 bp, synthetic construct
  misc_feature 1..22: note = chemically synthesized
  source 1..22: mol_type = other DNA
gcttttcagtactggaggcaac

SEQ ID NO: 132785 - DNA, 22 bp, synthetic construct
  misc_feature 1..22: note = chemically synthesized
  source 1..22: mol_type = other DNA
ttcagtactggaggcaacttat

SEQ ID NO: 132786 - DNA, 22 bp, synthetic construct
  misc_feature 1..22: note = chemically synthesized
  source 1..22: mol_type = other DNA
tcagtactggaggcaacttatc

SEQ ID NO: 132787 - DNA, 22 bp, synthetic construct
  misc_feature 1..22: note = chemically synthesized
  source 1..22: mol_type = other DNA
cagtactggaggcaacttatca

SEQ ID NO: 132788 - DNA, 22 bp, synthetic construct
  misc_feature 1..22: note = chemically synthesized
  source 1..22: mol_type = other DNA
agtactggaggcaacttatcac

SEQ ID NO: 132789 - DNA, 22 bp, synthetic construct
  misc_feature 1..22: note = chemically synthesized
  source 1..22: mol_type = other DNA
gaggcaacttatcactcgatct

SEQ ID NO: 132790 - DNA, 22 bp, synthetic construct
  misc_feature 1..22: note = chemically synthesized
  source 1..22: mol_type = other DNA
atcactcgatctccatcccctt

SEQ ID NO: 132791 - DNA, 22 bp, synthetic construct
  misc_feature 1..22: note = chemically synthesized
  source 1..22: mol_type = other DNA
tcactcgatctccatccccttc

SEQ ID NO: 132792 - DNA, 22 bp, synthetic construct
  misc_feature 1..22: note = chemically synthesized
  source 1..22: mol_type = other DNA
gatctccatccccttctttgct

SEQ ID NO: 132793 - DNA, 22 bp, synthetic construct
  misc_feature 1..22: note = chemically synthesized
  source 1..22: mol_type = other DNA
catccccttctttgctgtttat

SEQ ID NO: 132794 - DNA, 22 bp, synthetic construct
  misc_feature 1..22: note = chemically synthesized
  source 1..22: mol_type = other DNA
ctttgctgtttatgtgtgcgtc

SEQ ID NO: 132795 - DNA, 22 bp, synthetic construct
  misc_feature 1..22: note = chemically synthesized
  source 1..22: mol_type = other DNA
tttgctgtttatgtgtgcgtcc

SEQ ID NO: 132796 - DNA, 22 bp, synthetic construct
  misc_feature 1..22: note = chemically synthesized
  source 1..22: mol_type = other DNA
tgctgtttatgtgtgcgtcctt

SEQ ID NO: 132797 - DNA, 22 bp, synthetic construct
  misc_feature 1..22: note = chemically synthesized
  source 1..22: mol_type = other DNA
gctgtttatgtgtgcgtccttc

SEQ ID NO: 132798 - DNA, 22 bp, synthetic construct
  misc_feature 1..22: note = chemically synthesized
  source 1..22: mol_type = other DNA
ctgtttatgtgtgcgtccttct

SEQ ID NO: 132799 - DNA, 22 bp, synthetic construct
  misc_feature 1..22: note = chemically synthesized
  source 1..22: mol_type = other DNA
tttatgtgtgcgtccttcttgg

SEQ ID NO: 132800 - DNA, 22 bp, synthetic construct
  misc_feature 1..22: note = chemically synthesized
  source 1..22: mol_type = other DNA
atgtgtgcgtccttcttggcaa

SEQ ID NO: 132801 - DNA, 22 bp, synthetic construct
  misc_feature 1..22: note = chemically synthesized
  source 1..22: mol_type = other DNA
tgtgtgcgtccttcttggcaat

SEQ ID NO: 132802 - DNA, 22 bp, synthetic construct
  misc_feature 1..22: note = chemically synthesized
  source 1..22: mol_type = other DNA
cttggcaatggcaagctcctct

SEQ ID NO: 132803 - DNA, 22 bp, synthetic construct
  misc_feature 1..22: note = chemically synthesized
  source 1..22: mol_type = other DNA
ttggcaatggcaagctcctcta

SEQ ID NO: 132804 - DNA, 22 bp, synthetic construct
  misc_feature 1..22: note = chemically synthesized
  source 1..22: mol_type = other DNA
ggcaatggcaagctcctctacc

SEQ ID NO: 132805 - DNA, 22 bp, synthetic construct
  misc_feature 1..22: note = chemically synthesized
  source 1..22: mol_type = other DNA
gcaatggcaagctcctctacct

SEQ ID NO: 132806 - DNA, 22 bp, synthetic construct
  misc_feature 1..22: note = chemically synthesized
  source 1..22: mol_type = other DNA
ctctacctcatcaagcatgacc

SEQ ID NO: 132807 - DNA, 22 bp, synthetic construct
  misc_feature 1..22: note = chemically synthesized
  source 1..22: mol_type = other DNA
tacctcatcaagcatgaccaca

SEQ ID NO: 132808 - DNA, 22 bp, synthetic construct
  misc_feature 1..22: note = chemically synthesized
  source 1..22: mol_type = other DNA
cctcatcaagcatgaccacagt

SEQ ID NO: 132809 - DNA, 22 bp, synthetic construct
  misc_feature 1..22: note = chemically synthesized
  source 1..22: mol_type = other DNA
atcaagcatgaccacagtcttc

SEQ ID NO: 132810 - DNA, 22 bp, synthetic construct
  misc_feature 1..22: note = chemically synthesized
  source 1..22: mol_type = other DNA
cacgaacccatgtactgtttcc

SEQ ID NO: 132811 - DNA, 22 bp, synthetic construct
  misc_feature 1..22: note = chemically synthesized
  source 1..22: mol_type = other DNA
acgaacccatgtactgtttcct

SEQ ID NO: 132812 - DNA, 22 bp, synthetic construct
  misc_feature 1..22: note = chemically synthesized
  source 1..22: mol_type = other DNA
tttccttgccacactgaggcaa

SEQ ID NO: 132813 - DNA, 22 bp, synthetic construct
  misc_feature 1..22: note = chemically synthesized
  source 1..22: mol_type = other DNA
ccttgccacactgaggcaagac

SEQ ID NO: 132814 - DNA, 22 bp, synthetic construct
  misc_feature 1..22: note = chemically synthesized
  source 1..22: mol_type = other DNA
cttgccacactgaggcaagacc

SEQ ID NO: 132815 - DNA, 22 bp, synthetic construct
  misc_feature 1..22: note = chemically synthesized
  source 1..22: mol_type = other DNA
gccacactgaggcaagacctca

SEQ ID NO: 132816 - DNA, 22 bp, synthetic construct
  misc_feature 1..22: note = chemically synthesized
  source 1..22: mol_type = other DNA
ccacactgaggcaagacctcat

SEQ ID NO: 132817 - DNA, 22 bp, synthetic construct
  misc_feature 1..22: note = chemically synthesized
  source 1..22: mol_type = other DNA
aggcaagacctcatggtgaaat

SEQ ID NO: 132818 - DNA, 22 bp, synthetic construct
  misc_feature 1..22: note = chemically synthesized
  source 1..22: mol_type = other DNA
atggtgaaattgaccatgatgc

SEQ ID NO: 132819 - DNA, 22 bp, synthetic construct
  misc_feature 1..22: note = chemically synthesized
  source 1..22: mol_type = other DNA
accatgatgcccactgtaatgg

SEQ ID NO: 132820 - DNA, 22 bp, synthetic construct
  misc_feature 1..22: note = chemically synthesized
  source 1..22: mol_type = other DNA
taatgggcgtcttgtggatgaa

SEQ ID NO: 132821 - DNA, 22 bp, synthetic construct
  misc_feature 1..22: note = chemically synthesized
  source 1..22: mol_type = other DNA
gtggatgaatcacaaagaggtt

SEQ ID NO: 132822 - DNA, 22 bp, synthetic construct
  misc_feature 1..22: note = chemically synthesized
  source 1..22: mol_type = other DNA
tggatgaatcacaaagaggtta

SEQ ID NO: 132823 - DNA, 22 bp, synthetic construct
  misc_feature 1..22: note = chemically synthesized
  source 1..22: mol_type = other DNA
tccatggggcctgcttcttgca

SEQ ID NO: 132824 - DNA, 22 bp, synthetic construct
  misc_feature 1..22: note = chemically synthesized
  source 1..22: mol_type = other DNA
cttcttgcaggtttacattatc

SEQ ID NO: 132825 - DNA, 22 bp, synthetic construct
  misc_feature 1..22: note = chemically synthesized
  source 1..22: mol_type = other DNA
cttgcaggtttacattatccac

SEQ ID NO: 132826 - DNA, 22 bp, synthetic construct
  misc_feature 1..22: note = chemically synthesized
  source 1..22: mol_type = other DNA
ttgcaggtttacattatccact

SEQ ID NO: 132827 - DNA, 22 bp, synthetic construct
  misc_feature 1..22: note = chemically synthesized
  source 1..22: mol_type = other DNA
gcaggtttacattatccactcc

SEQ ID NO: 132828 - DNA, 22 bp, synthetic construct
  misc_feature 1..22: note = chemically synthesized
  source 1..22: mol_type = other DNA
caggtttacattatccactccc

SEQ ID NO: 132829 - DNA, 22 bp, synthetic construct
  misc_feature 1..22: note = chemically synthesized
  source 1..22: mol_type = other DNA
acattatccactcccattatcc

SEQ ID NO: 132830 - DNA, 22 bp, synthetic construct
  misc_feature 1..22: note = chemically synthesized
  source 1..22: mol_type = other DNA
cattatccactcccattatcca

SEQ ID NO: 132831 - DNA, 22 bp, synthetic construct
  misc_feature 1..22: note = chemically synthesized
  source 1..22: mol_type = other DNA
tccactcccattatccacttgc

SEQ ID NO: 132832 - DNA, 22 bp, synthetic construct
  misc_feature 1..22: note = chemically synthesized
  source 1..22: mol_type = other DNA
ccattatccacttgcagaatca

SEQ ID NO: 132833 - DNA, 22 bp, synthetic construct
  misc_feature 1..22: note = chemically synthesized
  source 1..22: mol_type = other DNA
tccacttgcagaatcaggtatt

SEQ ID NO: 132834 - DNA, 22 bp, synthetic construct
  misc_feature 1..22: note = chemically synthesized
  source 1..22: mol_type = other DNA
gcagaatcaggtattctcctgt

SEQ ID NO: 132835 - DNA, 22 bp, synthetic construct
  misc_feature 1..22: note = chemically synthesized
  source 1..22: mol_type = other DNA
cagaatcaggtattctcctgtc

SEQ ID NO: 132836 - DNA, 22 bp, synthetic construct
  misc_feature 1..22: note = chemically synthesized
  source 1..22: mol_type = other DNA
tcctgtcaatggcctatgaccg

SEQ ID NO: 132837 - DNA, 22 bp, synthetic construct
  misc_feature 1..22: note = chemically synthesized
  source 1..22: mol_type = other DNA
ctgtcaatggcctatgaccgtt

SEQ ID NO: 132838 - DNA, 22 bp, synthetic construct
  misc_feature 1..22: note = chemically synthesized
  source 1..22: mol_type = other DNA
tcaatggcctatgaccgtttca

SEQ ID NO: 132839 - DNA, 22 bp, synthetic construct
  misc_feature 1..22: note = chemically synthesized
  source 1..22: mol_type = other DNA
tgaccgtttcattatcatccac

SEQ ID NO: 132840 - DNA, 22 bp, synthetic construct
  misc_feature 1..22: note = chemically synthesized
  source 1..22: mol_type = other DNA
cattatcatccacatgcttctc

SEQ ID NO: 132841 - DNA, 22 bp, synthetic construct
  misc_feature 1..22: note = chemically synthesized
  source 1..22: mol_type = other DNA
attatcatccacatgcttctca

SEQ ID NO: 132842 - DNA, 22 bp, synthetic construct
  misc_feature 1..22: note = chemically synthesized
  source 1..22: mol_type = other DNA
tcatccacatgcttctcaggta

SEQ ID NO: 132843 - DNA, 22 bp, synthetic construct
  misc_feature 1..22: note = chemically synthesized
  source 1..22: mol_type = other DNA
ctcaggtataactatttctact

SEQ ID NO: 132844 - DNA, 22 bp, synthetic construct
  misc_feature 1..22: note = chemically synthesized
  source 1..22: mol_type = other DNA
tcaggtataactatttctacta

SEQ ID NO: 132845 - DNA, 22 bp, synthetic construct
  misc_feature 1..22: note = chemically synthesized
  source 1..22: mol_type = other DNA
aggtataactatttctactaaa

SEQ ID NO: 132846 - DNA, 22 bp, synthetic construct
  misc_feature 1..22: note = chemically synthesized
  source 1..22: mol_type = other DNA
tttctactaaatcttgggtgaa

SEQ ID NO: 132847 - DNA, 22 bp, synthetic construct
  misc_feature 1..22: note = chemically synthesized
  source 1..22: mol_type = other DNA
ctactaaatcttgggtgaagat

SEQ ID NO: 132848 - DNA, 22 bp, synthetic construct
  misc_feature 1..22: note = chemically synthesized
  source 1..22: mol_type = other DNA
tactaaatcttgggtgaagata

SEQ ID NO: 132849 - DNA, 22 bp, synthetic construct
  misc_feature 1..22: note = chemically synthesized
  source 1..22: mol_type = other DNA
ctaaatcttgggtgaagataga

SEQ ID NO: 132850 - DNA, 22 bp, synthetic construct
  misc_feature 1..22: note = chemically synthesized
  source 1..22: mol_type = other DNA
aatcttgggtgaagatagaact

SEQ ID NO: 132851 - DNA, 22 bp, synthetic construct
  misc_feature 1..22: note = chemically synthesized
  source 1..22: mol_type = other DNA
gggtgaagatagaactgtggct

SEQ ID NO: 132852 - DNA, 22 bp, synthetic construct
  misc_feature 1..22: note = chemically synthesized
  source 1..22: mol_type = other DNA
ggtgaagatagaactgtggcta

SEQ ID NO: 132853 - DNA, 22 bp, synthetic construct
  misc_feature 1..22: note = chemically synthesized
  source 1..22: mol_type = other DNA
tggctatttatgagggactttt

SEQ ID NO: 132854 - DNA, 22 bp, synthetic construct
  misc_feature 1..22: note = chemically synthesized
  source 1..22: mol_type = other DNA
tttatgagggactttttatccc

SEQ ID NO: 132855 - DNA, 22 bp, synthetic construct
  misc_feature 1..22: note = chemically synthesized
  source 1..22: mol_type = other DNA
atgagggactttttatccctcg

SEQ ID NO: 132856 - DNA, 22 bp, synthetic construct
  misc_feature 1..22: note = chemically synthesized
  source 1..22: mol_type = other DNA
tgagggactttttatccctcgt

SEQ ID NO: 132857 - DNA, 22 bp, synthetic construct
  misc_feature 1..22: note = chemically synthesized
  source 1..22: mol_type = other DNA
tttatccctcgtgcctccaatt

SEQ ID NO: 132858 - DNA, 22 bp, synthetic construct
  misc_feature 1..22: note = chemically synthesized
  source 1..22: mol_type = other DNA
ttatccctcgtgcctccaattc

SEQ ID NO: 132859 - DNA, 22 bp, synthetic construct
  misc_feature 1..22: note = chemically synthesized
  source 1..22: mol_type = other DNA
tatccctcgtgcctccaattct

SEQ ID NO: 132860 - DNA, 22 bp, synthetic construct
  misc_feature 1..22: note = chemically synthesized
  source 1..22: mol_type = other DNA
atccctcgtgcctccaattctg

SEQ ID NO: 132861 - DNA, 22 bp, synthetic construct
  misc_feature 1..22: note = chemically synthesized
  source 1..22: mol_type = other DNA
tccctcgtgcctccaattctgc

SEQ ID NO: 132862 - DNA, 22 bp, synthetic construct
  misc_feature 1..22: note = chemically synthesized
  source 1..22: mol_type = other DNA
gtgcctccaattctgccactcc

SEQ ID NO: 132863 - DNA, 22 bp, synthetic construct
  misc_feature 1..22: note = chemically synthesized
  source 1..22: mol_type = other DNA
caattctgccactccattgctt

SEQ ID NO: 132864 - DNA, 22 bp, synthetic construct
  misc_feature 1..22: note = chemically synthesized
  source 1..22: mol_type = other DNA
tgccactccattgcttcccata

SEQ ID NO: 132865 - DNA, 22 bp, synthetic construct
  misc_feature 1..22: note = chemically synthesized
  source 1..22: mol_type = other DNA
ccactccattgcttcccatatt

SEQ ID NO: 132866 - DNA, 22 bp, synthetic construct
  misc_feature 1..22: note = chemically synthesized
  source 1..22: mol_type = other DNA
cattgcttcccatattgtcatt

SEQ ID NO: 132867 - DNA, 22 bp, synthetic construct
  misc_feature 1..22: note = chemically synthesized
  source 1..22: mol_type = other DNA
cttcccatattgtcattcccat

SEQ ID NO: 132868 - DNA, 22 bp, synthetic construct
  misc_feature 1..22: note = chemically synthesized
  source 1..22: mol_type = other DNA
cccatattgtcattcccatgtt

SEQ ID NO: 132869 - DNA, 22 bp, synthetic construct
  misc_feature 1..22: note = chemically synthesized
  source 1..22: mol_type = other DNA
ccatattgtcattcccatgttc

SEQ ID NO: 132870 - DNA, 22 bp, synthetic construct
  misc_feature 1..22: note = chemically synthesized
  source 1..22: mol_type = other DNA
tcattcccatgttctcttccac

SEQ ID NO: 132871 - DNA, 22 bp, synthetic construct
  misc_feature 1..22: note = chemically synthesized
  source 1..22: mol_type = other DNA
ccatgttctcttccacaccttt

SEQ ID NO: 132872 - DNA, 22 bp, synthetic construct
  misc_feature 1..22: note = chemically synthesized
  source 1..22: mol_type = other DNA
tcttccacaccttttttctcca

SEQ ID NO: 132873 - DNA, 22 bp, synthetic construct
  misc_feature 1..22: note = chemically synthesized
  source 1..22: mol_type = other DNA
ttccacaccttttttctccatc

SEQ ID NO: 132874 - DNA, 22 bp, synthetic construct
  misc_feature 1..22: note = chemically synthesized
  source 1..22: mol_type = other DNA
ccacaccttttttctccatcaa

SEQ ID NO: 132875 - DNA, 22 bp, synthetic construct
  misc_feature 1..22: note = chemically synthesized
  source 1..22: mol_type = other DNA
cacaccttttttctccatcaag

SEQ ID NO: 132876 - DNA, 22 bp, synthetic construct
  misc_feature 1..22: note = chemically synthesized
  source 1..22: mol_type = other DNA
ttttctccatcaagatgtcctg

SEQ ID NO: 132877 - DNA, 22 bp, synthetic construct
  misc_feature 1..22: note = chemically synthesized
  source 1..22: mol_type = other DNA
tttctccatcaagatgtcctga

SEQ ID NO: 132878 - DNA, 22 bp, synthetic construct
  misc_feature 1..22: note = chemically synthesized
  source 1..22: mol_type = other DNA
ttctccatcaagatgtcctgaa

SEQ ID NO: 132879 - DNA, 22 bp, synthetic construct
  misc_feature 1..22: note = chemically synthesized
  source 1..22: mol_type = other DNA
tctccatcaagatgtcctgaaa

SEQ ID NO: 132880 - DNA, 22 bp, synthetic construct
  misc_feature 1..22: note = chemically synthesized
  source 1..22: mol_type = other DNA
ctccatcaagatgtcctgaaac

SEQ ID NO: 132881 - DNA, 22 bp, synthetic construct
  misc_feature 1..22: note = chemically synthesized
  source 1..22: mol_type = other DNA
tccatcaagatgtcctgaaact

SEQ ID NO: 132882 - DNA, 22 bp, synthetic construct
  misc_feature 1..22: note = chemically synthesized
  source 1..22: mol_type = other DNA
catcaagatgtcctgaaacttg

SEQ ID NO: 132883 - DNA, 22 bp, synthetic construct
  misc_feature 1..22: note = chemically synthesized
  source 1..22: mol_type = other DNA
aaacttgcctgtgctgatatta

SEQ ID NO: 132884 - DNA, 22 bp, synthetic construct
  misc_feature 1..22: note = chemically synthesized
  source 1..22: mol_type = other DNA
gcctgtgctgatattacattca

SEQ ID NO: 132885 - DNA, 22 bp, synthetic construct
  misc_feature 1..22: note = chemically synthesized
  source 1..22: mol_type = other DNA
cctgtgctgatattacattcaa

SEQ ID NO: 132886 - DNA, 22 bp, synthetic construct
  misc_feature 1..22: note = chemically synthesized
  source 1..22: mol_type = other DNA
tgctgatattacattcaatcac

SEQ ID NO: 132887 - DNA, 22 bp, synthetic construct
  misc_feature 1..22: note = chemically synthesized
  source 1..22: mol_type = other DNA
atattacattcaatcacttata

SEQ ID NO: 132888 - DNA, 22 bp, synthetic construct
  misc_feature 1..22: note = chemically synthesized
  source 1..22: mol_type = other DNA
cattcaatcacttatacccagc

SEQ ID NO: 132889 - DNA, 22 bp, synthetic construct
  misc_feature 1..22: note = chemically synthesized
  source 1..22: mol_type = other DNA
aatcacttatacccagctattc

SEQ ID NO: 132890 - DNA, 22 bp, synthetic construct
  misc_feature 1..22: note = chemically synthesized
  source 1..22: mol_type = other DNA
atacccagctattctggttgct

SEQ ID NO: 132891 - DNA, 22 bp, synthetic construct
  misc_feature 1..22: note = chemically synthesized
  source 1..22: mol_type = other DNA
tacccagctattctggttgctt

SEQ ID NO: 132892 - DNA, 22 bp, synthetic construct
  misc_feature 1..22: note = chemically synthesized
  source 1..22: mol_type = other DNA
ttctggttgctttgattttctt

SEQ ID NO: 132893 - DNA, 22 bp, synthetic construct
  misc_feature 1..22: note = chemically synthesized
  source 1..22: mol_type = other DNA
tggttgctttgattttcttcct

SEQ ID NO: 132894 - DNA, 22 bp, synthetic construct
  misc_feature 1..22: note = chemically synthesized
  source 1..22: mol_type = other DNA
gttgctttgattttcttcctag

SEQ ID NO: 132895 - DNA, 22 bp, synthetic construct
  misc_feature 1..22: note = chemically synthesized
  source 1..22: mol_type = other DNA
ctttgattttcttcctagacgc

SEQ ID NO: 132896 - DNA, 22 bp, synthetic construct
  misc_feature 1..22: note = chemically synthesized
  source 1..22: mol_type = other DNA
tgattttcttcctagacgctct

SEQ ID NO: 132897 - DNA, 22 bp, synthetic construct
  misc_feature 1..22: note = chemically synthesized
  source 1..22: mol_type = other DNA
gattttcttcctagacgctctg

SEQ ID NO: 132898 - DNA, 22 bp, synthetic construct
  misc_feature 1..22: note = chemically synthesized
  source 1..22: mol_type = other DNA
attttcttcctagacgctctga

SEQ ID NO: 132899 - DNA, 22 bp, synthetic construct
  misc_feature 1..22: note = chemically synthesized
  source 1..22: mol_type = other DNA
tcttcctagacgctctgatcat

SEQ ID NO: 132900 - DNA, 22 bp, synthetic construct
  misc_feature 1..22: note = chemically synthesized
  source 1..22: mol_type = other DNA
cttcctagacgctctgatcatt

SEQ ID NO: 132901 - DNA, 22 bp, synthetic construct
  misc_feature 1..22: note = chemically synthesized
  source 1..22: mol_type = other DNA
ttcctagacgctctgatcattg

SEQ ID NO: 132902 - DNA, 22 bp, synthetic construct
  misc_feature 1..22: note = chemically synthesized
  source 1..22: mol_type = other DNA
cctagacgctctgatcattgtc

SEQ ID NO: 132903 - DNA, 22 bp, synthetic construct
  misc_feature 1..22: note = chemically synthesized
  source 1..22: mol_type = other DNA
ctagacgctctgatcattgtct

SEQ ID NO: 132904 - DNA, 22 bp, synthetic construct
  misc_feature 1..22: note = chemically synthesized
  source 1..22: mol_type = other DNA
gacgctctgatcattgtctttt

SEQ ID NO: 132905 - DNA, 22 bp, synthetic construct
  misc_feature 1..22: note = chemically synthesized
  source 1..22: mol_type = other DNA
tgatcattgtcttttcttatat

SEQ ID NO: 132906 - DNA, 22 bp, synthetic construct
  misc_feature 1..22: note = chemically synthesized
  source 1..22: mol_type = other DNA
atcattgtcttttcttatatcc

SEQ ID NO: 132907 - DNA, 22 bp, synthetic construct
  misc_feature 1..22: note = chemically synthesized
  source 1..22: mol_type = other DNA
tcttttcttatatcctgatcct

SEQ ID NO: 132908 - DNA, 22 bp, synthetic construct
  misc_feature 1..22: note = chemically synthesized
  source 1..22: mol_type = other DNA
ttcttatatcctgatccttaaa

SEQ ID NO: 132909 - DNA, 22 bp, synthetic construct
  misc_feature 1..22: note = chemically synthesized
  source 1..22: mol_type = other DNA
tcttatatcctgatccttaaaa

SEQ ID NO: 132910 - DNA, 22 bp, synthetic construct
  misc_feature 1..22: note = chemically synthesized
  source 1..22: mol_type = other DNA
cttatatcctgatccttaaaac

SEQ ID NO: 132911 - DNA, 22 bp, synthetic construct
  misc_feature 1..22: note = chemically synthesized
  source 1..22: mol_type = other DNA
ttatatcctgatccttaaaaca

SEQ ID NO: 132912 - DNA, 22 bp, synthetic construct
  misc_feature 1..22: note = chemically synthesized
  source 1..22: mol_type = other DNA
atatcctgatccttaaaacagt

SEQ ID NO: 132913 - DNA, 22 bp, synthetic construct
  misc_feature 1..22: note = chemically synthesized
  source 1..22: mol_type = other DNA
tatcctgatccttaaaacagtt

SEQ ID NO: 132914 - DNA, 22 bp, synthetic construct
  misc_feature 1..22: note = chemically synthesized
  source 1..22: mol_type = other DNA
atccttaaaacagttaaaggta

SEQ ID NO: 132915 - DNA, 22 bp, synthetic construct
  misc_feature 1..22: note = chemically synthesized
  source 1..22: mol_type = other DNA
aaaacagttaaaggtattgcct

SEQ ID NO: 132916 - DNA, 22 bp, synthetic construct
  misc_feature 1..22: note = chemically synthesized
  source 1..22: mol_type = other DNA
aaacagttaaaggtattgcctc

SEQ ID NO: 132917 - DNA, 22 bp, synthetic construct
  misc_feature 1..22: note = chemically synthesized
  source 1..22: mol_type = other DNA
aaggtattgcctccagaaaaga

SEQ ID NO: 132918 - DNA, 22 bp, synthetic construct
  misc_feature 1..22: note = chemically synthesized
  source 1..22: mol_type = other DNA
cctccagaaaagagcaagccaa

SEQ ID NO: 132919 - DNA, 22 bp, synthetic construct
  misc_feature 1..22: note = chemically synthesized
  source 1..22: mol_type = other DNA
cagaaaagagcaagccaaagct

SEQ ID NO: 132920 - DNA, 22 bp, synthetic construct
  misc_feature 1..22: note = chemically synthesized
  source 1..22: mol_type = other DNA
tcaacatgtgtgtctcccatat

SEQ ID NO: 132921 - DNA, 22 bp, synthetic construct
  misc_feature 1..22: note = chemically synthesized
  source 1..22: mol_type = other DNA
aacatgtgtgtctcccatatca

SEQ ID NO: 132922 - DNA, 22 bp, synthetic construct
  misc_feature 1..22: note = chemically synthesized
  source 1..22: mol_type = other DNA
ccatatcagctgtgtcttggta

SEQ ID NO: 132923 - DNA, 22 bp, synthetic construct
  misc_feature 1..22: note = chemically synthesized
  source 1..22: mol_type = other DNA
tgtcttggtatttcacatcacc

SEQ ID NO: 132924 - DNA, 22 bp, synthetic construct
  misc_feature 1..22: note = chemically synthesized
  source 1..22: mol_type = other DNA
ggtatttcacatcaccgtgatc

SEQ ID NO: 132925 - DNA, 22 bp, synthetic construct
  misc_feature 1..22: note = chemically synthesized
  source 1..22: mol_type = other DNA
gtatttcacatcaccgtgatca

SEQ ID NO: 132926 - DNA, 22 bp, synthetic construct
  misc_feature 1..22: note = chemically synthesized
  source 1..22: mol_type = other DNA
cacatcaccgtgatcagtgaga

SEQ ID NO: 132927 - DNA, 22 bp, synthetic construct
  misc_feature 1..22: note = chemically synthesized
  source 1..22: mol_type = other DNA
acatcaccgtgatcagtgagac

SEQ ID NO: 132928 - DNA, 22 bp, synthetic construct
  misc_feature 1..22: note = chemically synthesized
  source 1..22: mol_type = other DNA
tcattcacaggtttgggaaaca

SEQ ID NO: 132929 - DNA, 22 bp, synthetic construct
  misc_feature 1..22: note = chemically synthesized
  source 1..22: mol_type = other DNA
cattcacaggtttgggaaacat

SEQ ID NO: 132930 - DNA, 22 bp, synthetic construct
  misc_feature 1..22: note = chemically synthesized
  source 1..22: mol_type = other DNA
attcacaggtttgggaaacatg

SEQ ID NO: 132931 - DNA, 22 bp, synthetic construct
  misc_feature 1..22: note = chemically synthesized
  source 1..22: mol_type = other DNA
acaggtttgggaaacatgcacc

SEQ ID NO: 132932 - DNA, 22 bp, synthetic construct
  misc_feature 1..22: note = chemically synthesized
  source 1..22: mol_type = other DNA
gggaaacatgcaccacatgtgg

SEQ ID NO: 132933 - DNA, 22 bp, synthetic construct
  misc_feature 1..22: note = chemically synthesized
  source 1..22: mol_type = other DNA
ggaaacatgcaccacatgtggt

SEQ ID NO: 132934 - DNA, 22 bp, synthetic construct
  misc_feature 1..22: note = chemically synthesized
  source 1..22: mol_type = other DNA
ccgtgagctaatgactcatttc

SEQ ID NO: 132935 - DNA, 22 bp, synthetic construct
  misc_feature 1..22: note = chemically synthesized
  source 1..22: mol_type = other DNA
atgactcatttctttttcctcc

SEQ ID NO: 132936 - DNA, 22 bp, synthetic construct
  misc_feature 1..22: note = chemically synthesized
  source 1..22: mol_type = other DNA
atttctttttcctccattcatg

SEQ ID NO: 132937 - DNA, 22 bp, synthetic construct
  misc_feature 1..22: note = chemically synthesized
  source 1..22: mol_type = other DNA
ctttttcctccattcatgaacc

SEQ ID NO: 132938 - DNA, 22 bp, synthetic construct
  misc_feature 1..22: note = chemically synthesized
  source 1..22: mol_type = other DNA
tttttcctccattcatgaaccc

SEQ ID NO: 132939 - DNA, 22 bp, synthetic construct
  misc_feature 1..22: note = chemically synthesized
  source 1..22: mol_type = other DNA
tttcctccattcatgaacccta

SEQ ID NO: 132940 - DNA, 22 bp, synthetic construct
  misc_feature 1..22: note = chemically synthesized
  source 1..22: mol_type = other DNA
ttcctccattcatgaaccctat

SEQ ID NO: 132941 - DNA, 22 bp, synthetic construct
  misc_feature 1..22: note = chemically synthesized
  source 1..22: mol_type = other DNA
tcctccattcatgaaccctatt

SEQ ID NO: 132942 - DNA, 22 bp, synthetic construct
  misc_feature 1..22: note = chemically synthesized
  source 1..22: mol_type = other DNA
cctccattcatgaaccctatta

SEQ ID NO: 132943 - DNA, 22 bp, synthetic construct
  misc_feature 1..22: note = chemically synthesized
  source 1..22: mol_type = other DNA
ctccattcatgaaccctattat

SEQ ID NO: 132944 - DNA, 22 bp, synthetic construct
  misc_feature 1..22: note = chemically synthesized
  source 1..22: mol_type = other DNA
cattcatgaaccctattatata

SEQ ID NO: 132945 - DNA, 22 bp, synthetic construct
  misc_feature 1..22: note = chemically synthesized
  source 1..22: mol_type = other DNA
atgaaccctattatatacagca

SEQ ID NO: 132946 - DNA, 22 bp, synthetic construct
  misc_feature 1..22: note = chemically synthesized
  source 1..22: mol_type = other DNA
ttatatacagcatcaaaccaag

SEQ ID NO: 132947 - DNA, 22 bp, synthetic construct
  misc_feature 1..22: note = chemically synthesized
  source 1..22: mol_type = other DNA
tatacagcatcaaaccaagcag

SEQ ID NO: 132948 - DNA, 22 bp, synthetic construct
  misc_feature 1..22: note = chemically synthesized
  source 1..22: mol_type = other DNA
ttcgcctattttctgggcacag

SEQ ID NO: 132949 - DNA, 22 bp, synthetic construct
  misc_feature 1..22: note = chemically synthesized
  source 1..22: mol_type = other DNA
gcctattttctgggcacagaat

SEQ ID NO: 132950 - DNA, 22 bp, synthetic construct
  misc_feature 1..22: note = chemically synthesized
  source 1..22: mol_type = other DNA
ttttctgggcacagaatggctt

SEQ ID NO: 132951 - DNA, 22 bp, synthetic construct
  misc_feature 1..22: note = chemically synthesized
  source 1..22: mol_type = other DNA
tctgggcacagaatggcttgag

SEQ ID NO: 132952 - DNA, 22 bp, synthetic construct
  misc_feature 1..22: note = chemically synthesized
  source 1..22: mol_type = other DNA
ctgggcacagaatggcttgagc

SEQ ID NO: 132953 - DNA, 22 bp, synthetic construct
  misc_feature 1..22: note = chemically synthesized
  source 1..22: mol_type = other DNA
tgggcacagaatggcttgagcc

SEQ ID NO: 132954 - DNA, 22 bp, synthetic construct
  misc_feature 1..22: note = chemically synthesized
  source 1..22: mol_type = other DNA
ggcacagaatggcttgagccct

SEQ ID NO: 132955 - DNA, 22 bp, synthetic construct
  misc_feature 1..22: note = chemically synthesized
  source 1..22: mol_type = other DNA
gagcccttttttcagaattttg

SEQ ID NO: 132956 - DNA, 22 bp, synthetic construct
  misc_feature 1..22: note = chemically synthesized
  source 1..22: mol_type = other DNA
agcccttttttcagaattttgt

SEQ ID NO: 132957 - DNA, 22 bp, synthetic construct
  misc_feature 1..22: note = chemically synthesized
  source 1..22: mol_type = other DNA
ttttcagaattttgtgatcttc

SEQ ID NO: 132958 - DNA, 22 bp, synthetic construct
  misc_feature 1..22: note = chemically synthesized
  source 1..22: mol_type = other DNA
tttcagaattttgtgatcttca

SEQ ID NO: 132959 - DNA, 22 bp, synthetic construct
  misc_feature 1..22: note = chemically synthesized
  source 1..22: mol_type = other DNA
ttcagaattttgtgatcttcat

SEQ ID NO: 132960 - DNA, 22 bp, synthetic construct
  misc_feature 1..22: note = chemically synthesized
  source 1..22: mol_type = other DNA
tcagaattttgtgatcttcatg

SEQ ID NO: 132961 - DNA, 22 bp, synthetic construct
  misc_feature 1..22: note = chemically synthesized
  source 1..22: mol_type = other DNA
cagaattttgtgatcttcatga

SEQ ID NO: 132962 - DNA, 22 bp, synthetic construct
  misc_feature 1..22: note = chemically synthesized
  source 1..22: mol_type = other DNA
agaattttgtgatcttcatgat

SEQ ID NO: 132963 - DNA, 22 bp, synthetic construct
  misc_feature 1..22: note = chemically synthesized
  source 1..22: mol_type = other DNA
tgtgatcttcatgatttctggg

SEQ ID NO: 132964 - DNA, 22 bp, synthetic construct
  misc_feature 1..22: note = chemically synthesized
  source 1..22: mol_type = other DNA
gtgatcttcatgatttctgggc

SEQ ID NO: 132965 - DNA, 22 bp, synthetic construct
  misc_feature 1..22: note = chemically synthesized
  source 1..22: mol_type = other DNA
tgatcttcatgatttctgggcc

SEQ ID NO: 132966 - DNA, 22 bp, synthetic construct
  misc_feature 1..22: note = chemically synthesized
  source 1..22: mol_type = other DNA
catgatttctgggccttttgag

SEQ ID NO: 132967 - DNA, 22 bp, synthetic construct
  misc_feature 1..22: note = chemically synthesized
  source 1..22: mol_type = other DNA
atgatttctgggccttttgagt

SEQ ID NO: 132968 - DNA, 22 bp, synthetic construct
  misc_feature 1..22: note = chemically synthesized
  source 1..22: mol_type = other DNA
ctgggccttttgagtaattgga

SEQ ID NO: 132969 - DNA, 22 bp, synthetic construct
  misc_feature 1..22: note = chemically synthesized
  source 1..22: mol_type = other DNA
tgggccttttgagtaattggaa

SEQ ID NO: 132970 - DNA, 22 bp, synthetic construct
  misc_feature 1..22: note = chemically synthesized
  source 1..22: mol_type = other DNA
ggccttttgagtaattggaaag

SEQ ID NO: 132971 - DNA, 22 bp, synthetic construct
  misc_feature 1..22: note = chemically synthesized
  source 1..22: mol_type = other DNA
ttgagtaattggaaaggagctt

SEQ ID NO: 132972 - DNA, 22 bp, synthetic construct
  misc_feature 1..22: note = chemically synthesized
  source 1..22: mol_type = other DNA
tgagtaattggaaaggagctta

SEQ ID NO: 132973 - DNA, 22 bp, synthetic construct
  misc_feature 1..22: note = chemically synthesized
  source 1..22: mol_type = other DNA
gagtaattggaaaggagcttat

SEQ ID NO: 132974 - DNA, 22 bp, synthetic construct
  misc_feature 1..22: note = chemically synthesized
  source 1..22: mol_type = other DNA
agtaattggaaaggagcttatt

SEQ ID NO: 132975 - DNA, 22 bp, synthetic construct
  misc_feature 1..22: note = chemically synthesized
  source 1..22: mol_type = other DNA
gaaaggagcttattttataccc

SEQ ID NO: 132976 - DNA, 22 bp, synthetic construct
  misc_feature 1..22: note = chemically synthesized
  source 1..22: mol_type = other DNA
attttatacccaatatctcttg

SEQ ID NO: 132977 - DNA, 22 bp, synthetic construct
  misc_feature 1..22: note = chemically synthesized
  source 1..22: mol_type = other DNA
ttttatacccaatatctcttgt

SEQ ID NO: 132978 - DNA, 22 bp, synthetic construct
  misc_feature 1..22: note = chemically synthesized
  source 1..22: mol_type = other DNA
tatacccaatatctcttgtatc

SEQ ID NO: 132979 - DNA, 22 bp, synthetic construct
  misc_feature 1..22: note = chemically synthesized
  source 1..22: mol_type = other DNA
atacccaatatctcttgtatca

SEQ ID NO: 132980 - DNA, 22 bp, synthetic construct
  misc_feature 1..22: note = chemically synthesized
  source 1..22: mol_type = other DNA
tacccaatatctcttgtatcag

SEQ ID NO: 132981 - DNA, 22 bp, synthetic construct
  misc_feature 1..22: note = chemically synthesized
  source 1..22: mol_type = other DNA
ttgtatcagtgttagataggct

SEQ ID NO: 132982 - DNA, 22 bp, synthetic construct
  misc_feature 1..22: note = chemically synthesized
  source 1..22: mol_type = other DNA
gtatcagtgttagataggcttt

SEQ ID NO: 132983 - DNA, 22 bp, synthetic construct
  misc_feature 1..22: note = chemically synthesized
  source 1..22: mol_type = other DNA
tatcagtgttagataggcttta

SEQ ID NO: 132984 - DNA, 22 bp, synthetic construct
  misc_feature 1..22: note = chemically synthesized
  source 1..22: mol_type = other DNA
gataggctttaactattatcta

SEQ ID NO: 132985 - DNA, 22 bp, synthetic construct
  misc_feature 1..22: note = chemically synthesized
  source 1..22: mol_type = other DNA
taactattatctaaagtgaaaa

SEQ ID NO: 132986 - DNA, 22 bp, synthetic construct
  misc_feature 1..22: note = chemically synthesized
  source 1..22: mol_type = other DNA
aactattatctaaagtgaaaag

SEQ ID NO: 132987 - DNA, 22 bp, synthetic construct
  misc_feature 1..22: note = chemically synthesized
  source 1..22: mol_type = other DNA
actattatctaaagtgaaaagc

SEQ ID NO: 132988 - DNA, 22 bp, synthetic construct
  misc_feature 1..22: note = chemically synthesized
  source 1..22: mol_type = other DNA
ttatctaaagtgaaaagctaca

SEQ ID NO: 132989 - DNA, 22 bp, synthetic construct
  misc_feature 1..22: note = chemically synthesized
  source 1..22: mol_type = other DNA
tctaaagtgaaaagctacatgg

SEQ ID NO: 132990 - DNA, 22 bp, synthetic construct
  misc_feature 1..22: note = chemically synthesized
  source 1..22: mol_type = other DNA
aagtgaaaagctacatggaaca

SEQ ID NO: 132991 - DNA, 22 bp, synthetic construct
  misc_feature 1..22: note = chemically synthesized
  source 1..22: mol_type = other DNA
catggaacaataatacaatgaa

SEQ ID NO: 132992 - DNA, 22 bp, synthetic construct
  misc_feature 1..22: note = chemically synthesized
  source 1..22: mol_type = other DNA
atcaattgataaatacataaat

SEQ ID NO: 132993 - DNA, 22 bp, synthetic construct
  misc_feature 1..22: note = chemically synthesized
  source 1..22: mol_type = other DNA
ataaatacataaatatatgtat

SEQ ID NO: 132994 - DNA, 22 bp, synthetic construct
  misc_feature 1..22: note = chemically synthesized
  source 1..22: mol_type = other DNA
atatgtagatgtaaagctttat

SEQ ID NO: 132995 - DNA, 22 bp, synthetic construct
  misc_feature 1..22: note = chemically synthesized
  source 1..22: mol_type = other DNA
tatcgagggagatatatctata

SEQ ID NO: 132996 - DNA, 22 bp, synthetic construct
  misc_feature 1..22: note = chemically synthesized
  source 1..22: mol_type = other DNA
atcgagggagatatatctataa

SEQ ID NO: 132997 - DNA, 22 bp, synthetic construct
  misc_feature 1..22: note = chemically synthesized
  source 1..22: mol_type = other DNA
tcgagggagatatatctataat

SEQ ID NO: 132998 - DNA, 22 bp, synthetic construct
  misc_feature 1..22: note = chemically synthesized
  source 1..22: mol_type = other DNA
taatttacctatctattgagag

SEQ ID NO: 132999 - DNA, 22 bp, synthetic construct
  misc_feature 1..22: note = chemically synthesized
  source 1..22: mol_type = other DNA
acctatctattgagagatacta

SEQ ID NO: 133000 - DNA, 22 bp, synthetic construct
  misc_feature 1..22: note = chemically synthesized
  source 1..22: mol_type = other DNA
cctatctattgagagatactag

SEQ ID NO: 133001 - DNA, 22 bp, synthetic construct
  misc_feature 1..22: note = chemically synthesized
  source 1..22: mol_type = other DNA
tctattgagagatactaggaaa

SEQ ID NO: 133002 - DNA, 22 bp, synthetic construct
  misc_feature 1..22: note = chemically synthesized
  source 1..22: mol_type = other DNA
ttgagagatactaggaaagtgg

SEQ ID NO: 133003 - DNA, 22 bp, synthetic construct
  misc_feature 1..22: note = chemically synthesized
  source 1..22: mol_type = other DNA
agagatactaggaaagtggaat

SEQ ID NO: 133004 - DNA, 22 bp, synthetic construct
  misc_feature 1..22: note = chemically synthesized
  source 1..22: mol_type = other DNA
ggaaagtggaatactattgaat

SEQ ID NO: 133005 - DNA, 22 bp, synthetic construct
  misc_feature 1..22: note = chemically synthesized
  source 1..22: mol_type = other DNA
ttgaatatggagataaaacatg

SEQ ID NO: 133006 - DNA, 22 bp, synthetic construct
  misc_feature 1..22: note = chemically synthesized
  source 1..22: mol_type = other DNA
aatatggagataaaacatgtag

SEQ ID NO: 133007 - DNA, 22 bp, synthetic construct
  misc_feature 1..22: note = chemically synthesized
  source 1..22: mol_type = other DNA
ataatcagggaaaatatggtta

SEQ ID NO: 133008 - DNA, 22 bp, synthetic construct
  misc_feature 1..22: note = chemically synthesized
  source 1..22: mol_type = other DNA
ttcataacctgtattcataaga

SEQ ID NO: 133009 - DNA, 22 bp, synthetic construct
  misc_feature 1..22: note = chemically synthesized
  source 1..22: mol_type = other DNA
ataacctgtattcataagaact

SEQ ID NO: 133010 - DNA, 22 bp, synthetic construct
  misc_feature 1..22: note = chemically synthesized
  source 1..22: mol_type = other DNA
tattcataagaactgaaagtac

SEQ ID NO: 133011 - DNA, 22 bp, synthetic construct
  misc_feature 1..22: note = chemically synthesized
  source 1..22: mol_type = other DNA
ataagaactgaaagtaccattt

SEQ ID NO: 133012 - DNA, 22 bp, synthetic construct
  misc_feature 1..22: note = chemically synthesized
  source 1..22: mol_type = other DNA
aaagtaccattttaggaagagt

SEQ ID NO: 133013 - DNA, 22 bp, synthetic construct
  misc_feature 1..22: note = chemically synthesized
  source 1..22: mol_type = other DNA
taggaagagtcaagtggccagt

SEQ ID NO: 133014 - DNA, 22 bp, synthetic construct
  misc_feature 1..22: note = chemically synthesized
  source 1..22: mol_type = other DNA
aggaagagtcaagtggccagtc

SEQ ID NO: 133015 - DNA, 22 bp, synthetic construct
  misc_feature 1..22: note = chemically synthesized
  source 1..22: mol_type = other DNA
ggaagagtcaagtggccagtct

SEQ ID NO: 133016 - DNA, 22 bp, synthetic construct
  misc_feature 1..22: note = chemically synthesized
  source 1..22: mol_type = other DNA
gttcaaccaaagcctacagaag

SEQ ID NO: 133017 - DNA, 22 bp, synthetic construct
  misc_feature 1..22: note = chemically synthesized
  source 1..22: mol_type = other DNA
aaccaaagcctacagaaggaaa

SEQ ID NO: 133018 - DNA, 22 bp, synthetic construct
  misc_feature 1..22: note = chemically synthesized
  source 1..22: mol_type = other DNA
cagaaggaaaaatgtgcaattg

SEQ ID NO: 133019 - DNA, 22 bp, synthetic construct
  misc_feature 1..22: note = chemically synthesized
  source 1..22: mol_type = other DNA
cagatctagttttggccatata

SEQ ID NO: 133020 - DNA, 22 bp, synthetic construct
  misc_feature 1..22: note = chemically synthesized
  source 1..22: mol_type = other DNA
gttttggccatataaagatgaa

SEQ ID NO: 133021 - DNA, 22 bp, synthetic construct
  misc_feature 1..22: note = chemically synthesized
  source 1..22: mol_type = other DNA
tggccatataaagatgaattat

SEQ ID NO: 133022 - DNA, 22 bp, synthetic construct
  misc_feature 1..22: note = chemically synthesized
  source 1..22: mol_type = other DNA
ggccatataaagatgaattata

SEQ ID NO: 133023 - DNA, 22 bp, synthetic construct
  misc_feature 1..22: note = chemically synthesized
  source 1..22: mol_type = other DNA
gccatataaagatgaattatag

SEQ ID NO: 133024 - DNA, 22 bp, synthetic construct
  misc_feature 1..22: note = chemically synthesized
  source 1..22: mol_type = other DNA
tagcatgtgaattgaggtcatg

SEQ ID NO: 133025 - DNA, 22 bp, synthetic construct
  misc_feature 1..22: note = chemically synthesized
  source 1..22: mol_type = other DNA
aggtcatggaactctactataa

SEQ ID NO: 133026 - DNA, 22 bp, synthetic construct
  misc_feature 1..22: note = chemically synthesized
  source 1..22: mol_type = other DNA
tactataatctcaaaactactc

SEQ ID NO: 133027 - DNA, 22 bp, synthetic construct
  misc_feature 1..22: note = chemically synthesized
  source 1..22: mol_type = other DNA
ctataatctcaaaactactcta

SEQ ID NO: 133028 - DNA, 22 bp, synthetic construct
  misc_feature 1..22: note = chemically synthesized
  source 1..22: mol_type = other DNA
taatctcaaaactactctattt

SEQ ID NO: 133029 - DNA, 22 bp, synthetic construct
  misc_feature 1..22: note = chemically synthesized
  source 1..22: mol_type = other DNA
aaaactactctatttcagggta

SEQ ID NO: 133030 - DNA, 22 bp, synthetic construct
  misc_feature 1..22: note = chemically synthesized
  source 1..22: mol_type = other DNA
ctctatttcagggtagattttc

SEQ ID NO: 133031 - DNA, 22 bp, synthetic construct
  misc_feature 1..22: note = chemically synthesized
  source 1..22: mol_type = other DNA
tatttcagggtagattttcctt

SEQ ID NO: 133032 - DNA, 22 bp, synthetic construct
  misc_feature 1..22: note = chemically synthesized
  source 1..22: mol_type = other DNA
tttcagggtagattttcctttt

SEQ ID NO: 133033 - DNA, 22 bp, synthetic construct
  misc_feature 1..22: note = chemically synthesized
  source 1..22: mol_type = other DNA
cagggtagattttccttttttt

SEQ ID NO: 133034 - DNA, 22 bp, synthetic construct
  misc_feature 1..22: note = chemically synthesized
  source 1..22: mol_type = other DNA
agggtagattttcctttttttt

SEQ ID NO: 133035 - DNA, 22 bp, synthetic construct
  misc_feature 1..22: note = chemically synthesized
  source 1..22: mol_type = other DNA
tcctttttttttttttttttta

SEQ ID NO: 133036 - DNA, 22 bp, synthetic construct
  misc_feature 1..22: note = chemically synthesized
  source 1..22: mol_type = other DNA
ccttttttttttttttttttaa

SEQ ID NO: 133037 - DNA, 22 bp, synthetic construct
  misc_feature 1..22: note = chemically synthesized
  source 1..22: mol_type = other DNA
cttttttttttttttttttaaa

SEQ ID NO: 133038 - DNA, 22 bp, synthetic construct
  misc_feature 1..22: note = chemically synthesized
  source 1..22: mol_type = other DNA
ttttttttttttttttaaaata

SEQ ID NO: 133039 - DNA, 22 bp, synthetic construct
  misc_feature 1..22: note = chemically synthesized
  source 1..22: mol_type = other DNA
tttttttttttttttaaaatag

SEQ ID NO: 133040 - DNA, 22 bp, synthetic construct
  misc_feature 1..22: note = chemically synthesized
  source 1..22: mol_type = other DNA
ttttttttttttttaaaataga

SEQ ID NO: 133041 - DNA, 22 bp, synthetic construct
  misc_feature 1..22: note = chemically synthesized
  source 1..22: mol_type = other DNA
tttttttttttttaaaatagat

SEQ ID NO: 133042 - DNA, 22 bp, synthetic construct
  misc_feature 1..22: note = chemically synthesized
  source 1..22: mol_type = other DNA
ttttttttttttaaaatagatt

SEQ ID NO: 133043 - DNA, 22 bp, synthetic construct
  misc_feature 1..22: note = chemically synthesized
  source 1..22: mol_type = other DNA
tttttttttttaaaatagattt

SEQ ID NO: 133044 - DNA, 22 bp, synthetic construct
  misc_feature 1..22: note = chemically synthesized
  source 1..22: mol_type = other DNA
ttttttttttaaaatagatttt

SEQ ID NO: 133045 - DNA, 22 bp, synthetic construct
  misc_feature 1..22: note = chemically synthesized
  source 1..22: mol_type = other DNA
tttttttttaaaatagatttta

SEQ ID NO: 133046 - DNA, 22 bp, synthetic construct
  misc_feature 1..22: note = chemically synthesized
  source 1..22: mol_type = other DNA
ttttttttaaaatagattttat

SEQ ID NO: 133047 - DNA, 22 bp, synthetic construct
  misc_feature 1..22: note = chemically synthesized
  source 1..22: mol_type = other DNA
tttttttaaaatagattttatt

SEQ ID NO: 133048 - DNA, 22 bp, synthetic construct
  misc_feature 1..22: note = chemically synthesized
  source 1..22: mol_type = other DNA
ttttttaaaatagattttattt

SEQ ID NO: 133049 - DNA, 22 bp, synthetic construct
  misc_feature 1..22: note = chemically synthesized
  source 1..22: mol_type = other DNA
tttttaaaatagattttatttt

SEQ ID NO: 133050 - DNA, 22 bp, synthetic construct
  misc_feature 1..22: note = chemically synthesized
  source 1..22: mol_type = other DNA
ttttaaaatagattttattttc

SEQ ID NO: 133051 - DNA, 22 bp, synthetic construct
  misc_feature 1..22: note = chemically synthesized
  source 1..22: mol_type = other DNA
tttaaaatagattttattttcc

SEQ ID NO: 133052 - DNA, 22 bp, synthetic construct
  misc_feature 1..22: note = chemically synthesized
  source 1..22: mol_type = other DNA
ttaaaatagattttattttcct

SEQ ID NO: 133053 - DNA, 22 bp, synthetic construct
  misc_feature 1..22: note = chemically synthesized
  source 1..22: mol_type = other DNA
taaaatagattttattttcctt

SEQ ID NO: 133054 - DNA, 22 bp, synthetic construct
  misc_feature 1..22: note = chemically synthesized
  source 1..22: mol_type = other DNA
aaaatagattttattttccttc

SEQ ID NO: 133055 - DNA, 22 bp, synthetic construct
  misc_feature 1..22: note = chemically synthesized
  source 1..22: mol_type = other DNA
aaatagattttattttccttca

SEQ ID NO: 133056 - DNA, 22 bp, synthetic construct
  misc_feature 1..22: note = chemically synthesized
  source 1..22: mol_type = other DNA
tattttccttcaacttattagg

SEQ ID NO: 133057 - DNA, 22 bp, synthetic construct
  misc_feature 1..22: note = chemically synthesized
  source 1..22: mol_type = other DNA
attttccttcaacttattaggt

SEQ ID NO: 133058 - DNA, 22 bp, synthetic construct
  misc_feature 1..22: note = chemically synthesized
  source 1..22: mol_type = other DNA
ttttccttcaacttattaggta

SEQ ID NO: 133059 - DNA, 22 bp, synthetic construct
  misc_feature 1..22: note = chemically synthesized
  source 1..22: mol_type = other DNA
tccttcaacttattaggtaggt

SEQ ID NO: 133060 - DNA, 22 bp, synthetic construct
  misc_feature 1..22: note = chemically synthesized
  source 1..22: mol_type = other DNA
ccttcaacttattaggtaggtg

SEQ ID NO: 133061 - DNA, 22 bp, synthetic construct
  misc_feature 1..22: note = chemically synthesized
  source 1..22: mol_type = other DNA
cttcaacttattaggtaggtgc

SEQ ID NO: 133062 - DNA, 22 bp, synthetic construct
  misc_feature 1..22: note = chemically synthesized
  source 1..22: mol_type = other DNA
caacttattaggtaggtgcaaa

SEQ ID NO: 133063 - DNA, 22 bp, synthetic construct
  misc_feature 1..22: note = chemically synthesized
  source 1..22: mol_type = other DNA
aacttattaggtaggtgcaaag

SEQ ID NO: 133064 - DNA, 22 bp, synthetic construct
  misc_feature 1..22: note = chemically synthesized
  source 1..22: mol_type = other DNA
attaggtaggtgcaaaggtaat

SEQ ID NO: 133065 - DNA, 22 bp, synthetic construct
  misc_feature 1..22: note = chemically synthesized
  source 1..22: mol_type = other DNA
ttaggtaggtgcaaaggtaatt

SEQ ID NO: 133066 - DNA, 22 bp, synthetic construct
  misc_feature 1..22: note = chemically synthesized
  source 1..22: mol_type = other DNA
ggtaggtgcaaaggtaattgca

SEQ ID NO: 133067 - DNA, 22 bp, synthetic construct
  misc_feature 1..22: note = chemically synthesized
  source 1..22: mol_type = other DNA
cagttcacagaaattacttttg

SEQ ID NO: 133068 - DNA, 22 bp, synthetic construct
  misc_feature 1..22: note = chemically synthesized
  source 1..22: mol_type = other DNA
acagaaattacttttgtaccaa

SEQ ID NO: 133069 - DNA, 22 bp, synthetic construct
  misc_feature 1..22: note = chemically synthesized
  source 1..22: mol_type = other DNA
cttttgtaccaacataatatat

SEQ ID NO: 133070 - DNA, 22 bp, synthetic construct
  misc_feature 1..22: note = chemically synthesized
  source 1..22: mol_type = other DNA
ttgtaccaacataatatatttt

SEQ ID NO: 133071 - DNA, 22 bp, synthetic construct
  misc_feature 1..22: note = chemically synthesized
  source 1..22: mol_type = other DNA
tgtaccaacataatatatttta

SEQ ID NO: 133072 - DNA, 22 bp, synthetic construct
  misc_feature 1..22: note = chemically synthesized
  source 1..22: mol_type = other DNA
gtaccaacataatatattttaa

SEQ ID NO: 133073 - DNA, 22 bp, synthetic construct
  misc_feature 1..22: note = chemically synthesized
  source 1..22: mol_type = other DNA
taccaacataatatattttaag

SEQ ID NO: 133074 - DNA, 22 bp, synthetic construct
  misc_feature 1..22: note = chemically synthesized
  source 1..22: mol_type = other DNA
taagttccagggcacatgtgca

SEQ ID NO: 133075 - DNA, 22 bp, synthetic construct
  misc_feature 1..22: note = chemically synthesized
  source 1..22: mol_type = other DNA
aagttccagggcacatgtgcag

SEQ ID NO: 133076 - DNA, 22 bp, synthetic construct
  misc_feature 1..22: note = chemically synthesized
  source 1..22: mol_type = other DNA
agttccagggcacatgtgcagg

SEQ ID NO: 133077 - DNA, 22 bp, synthetic construct
  misc_feature 1..22: note = chemically synthesized
  source 1..22: mol_type = other DNA
cagggcacatgtgcaggatgtg

SEQ ID NO: 133078 - DNA, 22 bp, synthetic construct
  misc_feature 1..22: note = chemically synthesized
  source 1..22: mol_type = other DNA
attacataggtaaatgtgtgcc

SEQ ID NO: 133079 - DNA, 22 bp, synthetic construct
  misc_feature 1..22: note = chemically synthesized
  source 1..22: mol_type = other DNA
ttacataggtaaatgtgtgcca

SEQ ID NO: 133080 - DNA, 22 bp, synthetic construct
  misc_feature 1..22: note = chemically synthesized
  source 1..22: mol_type = other DNA
cataggtaaatgtgtgccatgc

SEQ ID NO: 133081 - DNA, 22 bp, synthetic construct
  misc_feature 1..22: note = chemically synthesized
  source 1..22: mol_type = other DNA
gctgcattcgttagctattctt

SEQ ID NO: 133082 - DNA, 22 bp, synthetic construct
  misc_feature 1..22: note = chemically synthesized
  source 1..22: mol_type = other DNA
ctgcattcgttagctattcttc

SEQ ID NO: 133083 - DNA, 22 bp, synthetic construct
  misc_feature 1..22: note = chemically synthesized
  source 1..22: mol_type = other DNA
cattcgttagctattcttcctg

SEQ ID NO: 133084 - DNA, 22 bp, synthetic construct
  misc_feature 1..22: note = chemically synthesized
  source 1..22: mol_type = other DNA
gttagctattcttcctggtgct

SEQ ID NO: 133085 - DNA, 22 bp, synthetic construct
  misc_feature 1..22: note = chemically synthesized
  source 1..22: mol_type = other DNA
gctattcttcctggtgctctcc

SEQ ID NO: 133086 - DNA, 22 bp, synthetic construct
  misc_feature 1..22: note = chemically synthesized
  source 1..22: mol_type = other DNA
ttcttcctggtgctctccctct

SEQ ID NO: 133087 - DNA, 22 bp, synthetic construct
  misc_feature 1..22: note = chemically synthesized
  source 1..22: mol_type = other DNA
ttcctggtgctctccctctcct

SEQ ID NO: 133088 - DNA, 22 bp, synthetic construct
  misc_feature 1..22: note = chemically synthesized
  source 1..22: mol_type = other DNA
cctggtgctctccctctcctcc

SEQ ID NO: 133089 - DNA, 22 bp, synthetic construct
  misc_feature 1..22: note = chemically synthesized
  source 1..22: mol_type = other DNA
ctggtgctctccctctcctccc

SEQ ID NO: 133090 - DNA, 22 bp, synthetic construct
  misc_feature 1..22: note = chemically synthesized
  source 1..22: mol_type = other DNA
gtgctctccctctcctccccac

SEQ ID NO: 133091 - DNA, 22 bp, synthetic construct
  misc_feature 1..22: note = chemically synthesized
  source 1..22: mol_type = other DNA
tccctctcctccccacccacta

SEQ ID NO: 133092 - DNA, 22 bp, synthetic construct
  misc_feature 1..22: note = chemically synthesized
  source 1..22: mol_type = other DNA
cctctcctccccacccactacc

SEQ ID NO: 133093 - DNA, 22 bp, synthetic construct
  misc_feature 1..22: note = chemically synthesized
  source 1..22: mol_type = other DNA
tcctccccacccactaccggac

SEQ ID NO: 133094 - DNA, 22 bp, synthetic construct
  misc_feature 1..22: note = chemically synthesized
  source 1..22: mol_type = other DNA
ctccccacccactaccggacag

SEQ ID NO: 133095 - DNA, 22 bp, synthetic construct
  misc_feature 1..22: note = chemically synthesized
  source 1..22: mol_type = other DNA
cccacccactaccggacaggcc

SEQ ID NO: 133096 - DNA, 22 bp, synthetic construct
  misc_feature 1..22: note = chemically synthesized
  source 1..22: mol_type = other DNA
ccggacaggcccctgtgtgtgt

SEQ ID NO: 133097 - DNA, 22 bp, synthetic construct
  misc_feature 1..22: note = chemically synthesized
  source 1..22: mol_type = other DNA
tgtgtgttgttccccacaagtg

SEQ ID NO: 133098 - DNA, 22 bp, synthetic construct
  misc_feature 1..22: note = chemically synthesized
  source 1..22: mol_type = other DNA
ttccccacaagtgtccatgtgt

SEQ ID NO: 133099 - DNA, 22 bp, synthetic construct
  misc_feature 1..22: note = chemically synthesized
  source 1..22: mol_type = other DNA
cccacaagtgtccatgtgttct

SEQ ID NO: 133100 - DNA, 22 bp, synthetic construct
  misc_feature 1..22: note = chemically synthesized
  source 1..22: mol_type = other DNA
tcactgttcagctcccatttct

SEQ ID NO: 133101 - DNA, 22 bp, synthetic construct
  misc_feature 1..22: note = chemically synthesized
  source 1..22: mol_type = other DNA
actgttcagctcccatttctgt

SEQ ID NO: 133102 - DNA, 22 bp, synthetic construct
  misc_feature 1..22: note = chemically synthesized
  source 1..22: mol_type = other DNA
ttcagctcccatttctgtgtga

SEQ ID NO: 133103 - DNA, 22 bp, synthetic construct
  misc_feature 1..22: note = chemically synthesized
  source 1..22: mol_type = other DNA
agctcccatttctgtgtgagaa

SEQ ID NO: 133104 - DNA, 22 bp, synthetic construct
  misc_feature 1..22: note = chemically synthesized
  source 1..22: mol_type = other DNA
ccatttctgtgtgagaacatgt

SEQ ID NO: 133105 - DNA, 22 bp, synthetic construct
  misc_feature 1..22: note = chemically synthesized
  source 1..22: mol_type = other DNA
ctgtgtgagaacatgtgtgttt

SEQ ID NO: 133106 - DNA, 22 bp, synthetic construct
  misc_feature 1..22: note = chemically synthesized
  source 1..22: mol_type = other DNA
tgtgtgagaacatgtgtgtttg

SEQ ID NO: 133107 - DNA, 22 bp, synthetic construct
  misc_feature 1..22: note = chemically synthesized
  source 1..22: mol_type = other DNA
tgtgagaacatgtgtgtttggt

SEQ ID NO: 133108 - DNA, 22 bp, synthetic construct
  misc_feature 1..22: note = chemically synthesized
  source 1..22: mol_type = other DNA
ggttttctgttcctgtgttagt

SEQ ID NO: 133109 - DNA, 22 bp, synthetic construct
  misc_feature 1..22: note = chemically synthesized
  source 1..22: mol_type = other DNA
gttttctgttcctgtgttagtt

SEQ ID NO: 133110 - DNA, 22 bp, synthetic construct
  misc_feature 1..22: note = chemically synthesized
  source 1..22: mol_type = other DNA
tctgttcctgtgttagtttgat

SEQ ID NO: 133111 - DNA, 22 bp, synthetic construct
  misc_feature 1..22: note = chemically synthesized
  source 1..22: mol_type = other DNA
ctgttcctgtgttagtttgatg

SEQ ID NO: 133112 - DNA, 22 bp, synthetic construct
  misc_feature 1..22: note = chemically synthesized
  source 1..22: mol_type = other DNA
tgttcctgtgttagtttgatga

SEQ ID NO: 133113 - DNA, 22 bp, synthetic construct
  misc_feature 1..22: note = chemically synthesized
  source 1..22: mol_type = other DNA
ttcctgtgttagtttgatgagg

SEQ ID NO: 133114 - DNA, 22 bp, synthetic construct
  misc_feature 1..22: note = chemically synthesized
  source 1..22: mol_type = other DNA
ctgtgttagtttgatgaggata

SEQ ID NO: 133115 - DNA, 22 bp, synthetic construct
  misc_feature 1..22: note = chemically synthesized
  source 1..22: mol_type = other DNA
tgttagtttgatgaggataatg

SEQ ID NO: 133116 - DNA, 22 bp, synthetic construct
  misc_feature 1..22: note = chemically synthesized
  source 1..22: mol_type = other DNA
gtttgatgaggataatggcttc

SEQ ID NO: 133117 - DNA, 22 bp, synthetic construct
  misc_feature 1..22: note = chemically synthesized
  source 1..22: mol_type = other DNA
gatgaggataatggcttccagc

SEQ ID NO: 133118 - DNA, 22 bp, synthetic construct
  misc_feature 1..22: note = chemically synthesized
  source 1..22: mol_type = other DNA
atgaggataatggcttccagct

SEQ ID NO: 133119 - DNA, 22 bp, synthetic construct
  misc_feature 1..22: note = chemically synthesized
  source 1..22: mol_type = other DNA
ccagctccattcatgtccctgc

SEQ ID NO: 133120 - DNA, 22 bp, synthetic construct
  misc_feature 1..22: note = chemically synthesized
  source 1..22: mol_type = other DNA
cagctccattcatgtccctgca

SEQ ID NO: 133121 - DNA, 22 bp, synthetic construct
  misc_feature 1..22: note = chemically synthesized
  source 1..22: mol_type = other DNA
cattcatgtccctgcaaggaac

SEQ ID NO: 133122 - DNA, 22 bp, synthetic construct
  misc_feature 1..22: note = chemically synthesized
  source 1..22: mol_type = other DNA
atgtccctgcaaggaacacaat

SEQ ID NO: 133123 - DNA, 22 bp, synthetic construct
  misc_feature 1..22: note = chemically synthesized
  source 1..22: mol_type = other DNA
caaggaacacaatccttttcct

SEQ ID NO: 133124 - DNA, 22 bp, synthetic construct
  misc_feature 1..22: note = chemically synthesized
  source 1..22: mol_type = other DNA
ttcctttttatggctgtatagt

SEQ ID NO: 133125 - DNA, 22 bp, synthetic construct
  misc_feature 1..22: note = chemically synthesized
  source 1..22: mol_type = other DNA
tcctttttatggctgtatagta

SEQ ID NO: 133126 - DNA, 22 bp, synthetic construct
  misc_feature 1..22: note = chemically synthesized
  source 1..22: mol_type = other DNA
cctttttatggctgtatagtat

SEQ ID NO: 133127 - DNA, 22 bp, synthetic construct
  misc_feature 1..22: note = chemically synthesized
  source 1..22: mol_type = other DNA
ctttttatggctgtatagtatt

SEQ ID NO: 133128 - DNA, 22 bp, synthetic construct
  misc_feature 1..22: note = chemically synthesized
  source 1..22: mol_type = other DNA
tttatggctgtatagtattcca

SEQ ID NO: 133129 - DNA, 22 bp, synthetic construct
  misc_feature 1..22: note = chemically synthesized
  source 1..22: mol_type = other DNA
ttatggctgtatagtattccat

SEQ ID NO: 133130 - DNA, 22 bp, synthetic construct
  misc_feature 1..22: note = chemically synthesized
  source 1..22: mol_type = other DNA
tatggctgtatagtattccatg

SEQ ID NO: 133131 - DNA, 22 bp, synthetic construct
  misc_feature 1..22: note = chemically synthesized
  source 1..22: mol_type = other DNA
atggctgtatagtattccatgg

SEQ ID NO: 133132 - DNA, 22 bp, synthetic construct
  misc_feature 1..22: note = chemically synthesized
  source 1..22: mol_type = other DNA
tggctgtatagtattccatggt

SEQ ID NO: 133133 - DNA, 22 bp, synthetic construct
  misc_feature 1..22: note = chemically synthesized
  source 1..22: mol_type = other DNA
tatagtattccatggtatatat

SEQ ID NO: 133134 - DNA, 22 bp, synthetic construct
  misc_feature 1..22: note = chemically synthesized
  source 1..22: mol_type = other DNA
catggtatatatgtaccacgtt

SEQ ID NO: 133135 - DNA, 22 bp, synthetic construct
  misc_feature 1..22: note = chemically synthesized
  source 1..22: mol_type = other DNA
tctttatccactctatcattga

SEQ ID NO: 133136 - DNA, 22 bp, synthetic construct
  misc_feature 1..22: note = chemically synthesized
  source 1..22: mol_type = other DNA
ctttatccactctatcattgat

SEQ ID NO: 133137 - DNA, 22 bp, synthetic construct
  misc_feature 1..22: note = chemically synthesized
  source 1..22: mol_type = other DNA
tttatccactctatcattgatg

SEQ ID NO: 133138 - DNA, 22 bp, synthetic construct
  misc_feature 1..22: note = chemically synthesized
  source 1..22: mol_type = other DNA
tatccactctatcattgatgga

SEQ ID NO: 133139 - DNA, 22 bp, synthetic construct
  misc_feature 1..22: note = chemically synthesized
  source 1..22: mol_type = other DNA
atccactctatcattgatggac

SEQ ID NO: 133140 - DNA, 22 bp, synthetic construct
  misc_feature 1..22: note = chemically synthesized
  source 1..22: mol_type = other DNA
tccactctatcattgatggaca

SEQ ID NO: 133141 - DNA, 22 bp, synthetic construct
  misc_feature 1..22: note = chemically synthesized
  source 1..22: mol_type = other DNA
tatcattgatggacatttgggt

SEQ ID NO: 133142 - DNA, 22 bp, synthetic construct
  misc_feature 1..22: note = chemically synthesized
  source 1..22: mol_type = other DNA
tcattgatggacatttgggttg

SEQ ID NO: 133143 - DNA, 22 bp, synthetic construct
  misc_feature 1..22: note = chemically synthesized
  source 1..22: mol_type = other DNA
atggacatttgggttgattcca

SEQ ID NO: 133144 - DNA, 22 bp, synthetic construct
  misc_feature 1..22: note = chemically synthesized
  source 1..22: mol_type = other DNA
gggttgattccacatcttggct

SEQ ID NO: 133145 - DNA, 22 bp, synthetic construct
  misc_feature 1..22: note = chemically synthesized
  source 1..22: mol_type = other DNA
ggttgattccacatcttggcta

SEQ ID NO: 133146 - DNA, 22 bp, synthetic construct
  misc_feature 1..22: note = chemically synthesized
  source 1..22: mol_type = other DNA
attccacatcttggctattatg

SEQ ID NO: 133147 - DNA, 22 bp, synthetic construct
  misc_feature 1..22: note = chemically synthesized
  source 1..22: mol_type = other DNA
cacatcttggctattatgaata

SEQ ID NO: 133148 - DNA, 22 bp, synthetic construct
  misc_feature 1..22: note = chemically synthesized
  source 1..22: mol_type = other DNA
ggctattatgaataatgctgca

SEQ ID NO: 133149 - DNA, 22 bp, synthetic construct
  misc_feature 1..22: note = chemically synthesized
  source 1..22: mol_type = other DNA
gctattatgaataatgctgcaa

SEQ ID NO: 133150 - DNA, 22 bp, synthetic construct
  misc_feature 1..22: note = chemically synthesized
  source 1..22: mol_type = other DNA
ttatgaataatgctgcaatgaa

SEQ ID NO: 133151 - DNA, 22 bp, synthetic construct
  misc_feature 1..22: note = chemically synthesized
  source 1..22: mol_type = other DNA
tgaataatgctgcaatgaacat

SEQ ID NO: 133152 - DNA, 22 bp, synthetic construct
  misc_feature 1..22: note = chemically synthesized
  source 1..22: mol_type = other DNA
caatgaacataagcatgcctgt

SEQ ID NO: 133153 - DNA, 22 bp, synthetic construct
  misc_feature 1..22: note = chemically synthesized
  source 1..22: mol_type = other DNA
tatttttataatagattgattt

SEQ ID NO: 133154 - DNA, 22 bp, synthetic construct
  misc_feature 1..22: note = chemically synthesized
  source 1..22: mol_type = other DNA
ttataatagattgatttatatt

SEQ ID NO: 133155 - DNA, 22 bp, synthetic construct
  misc_feature 1..22: note = chemically synthesized
  source 1..22: mol_type = other DNA
tataatagattgatttatattc

SEQ ID NO: 133156 - DNA, 22 bp, synthetic construct
  misc_feature 1..22: note = chemically synthesized
  source 1..22: mol_type = other DNA
ataatagattgatttatattcc

SEQ ID NO: 133157 - DNA, 22 bp, synthetic construct
  misc_feature 1..22: note = chemically synthesized
  source 1..22: mol_type = other DNA
taatagattgatttatattcct

SEQ ID NO: 133158 - DNA, 22 bp, synthetic construct
  misc_feature 1..22: note = chemically synthesized
  source 1..22: mol_type = other DNA
atttatattcctttgggtatat

SEQ ID NO: 133159 - DNA, 22 bp, synthetic construct
  misc_feature 1..22: note = chemically synthesized
  source 1..22: mol_type = other DNA
atattcctttgggtatataccc

SEQ ID NO: 133160 - DNA, 22 bp, synthetic construct
  misc_feature 1..22: note = chemically synthesized
  source 1..22: mol_type = other DNA
tattcctttgggtatataccca

SEQ ID NO: 133161 - DNA, 22 bp, synthetic construct
  misc_feature 1..22: note = chemically synthesized
  source 1..22: mol_type = other DNA
ctttgggtatatacccagtaat

SEQ ID NO: 133162 - DNA, 22 bp, synthetic construct
  misc_feature 1..22: note = chemically synthesized
  source 1..22: mol_type = other DNA
tgggtatatacccagtaatgag

SEQ ID NO: 133163 - DNA, 22 bp, synthetic construct
  misc_feature 1..22: note = chemically synthesized
  source 1..22: mol_type = other DNA
gggtatatacccagtaatgaga

SEQ ID NO: 133164 - DNA, 22 bp, synthetic construct
  misc_feature 1..22: note = chemically synthesized
  source 1..22: mol_type = other DNA
ggtatatacccagtaatgagat

SEQ ID NO: 133165 - DNA, 22 bp, synthetic construct
  misc_feature 1..22: note = chemically synthesized
  source 1..22: mol_type = other DNA
ctgagtcaagtggtatttctgc

SEQ ID NO: 133166 - DNA, 22 bp, synthetic construct
  misc_feature 1..22: note = chemically synthesized
  source 1..22: mol_type = other DNA
agtcaagtggtatttctgcttc

SEQ ID NO: 133167 - DNA, 22 bp, synthetic construct
  misc_feature 1..22: note = chemically synthesized
  source 1..22: mol_type = other DNA
ctgcttctacatctttgaggaa

SEQ ID NO: 133168 - DNA, 22 bp, synthetic construct
  misc_feature 1..22: note = chemically synthesized
  source 1..22: mol_type = other DNA
tgcttctacatctttgaggaaa

SEQ ID NO: 133169 - DNA, 22 bp, synthetic construct
  misc_feature 1..22: note = chemically synthesized
  source 1..22: mol_type = other DNA
cttctacatctttgaggaaagg

SEQ ID NO: 133170 - DNA, 22 bp, synthetic construct
  misc_feature 1..22: note = chemically synthesized
  source 1..22: mol_type = other DNA
ctacatctttgaggaaaggcta

SEQ ID NO: 133171 - DNA, 22 bp, synthetic construct
  misc_feature 1..22: note = chemically synthesized
  source 1..22: mol_type = other DNA
tacatctttgaggaaaggctac

SEQ ID NO: 133172 - DNA, 22 bp, synthetic construct
  misc_feature 1..22: note = chemically synthesized
  source 1..22: mol_type = other DNA
catctttgaggaaaggctacac

SEQ ID NO: 133173 - DNA, 22 bp, synthetic construct
  misc_feature 1..22: note = chemically synthesized
  source 1..22: mol_type = other DNA
tgaggaaaggctacactctctt

SEQ ID NO: 133174 - DNA, 22 bp, synthetic construct
  misc_feature 1..22: note = chemically synthesized
  source 1..22: mol_type = other DNA
gaggaaaggctacactctcttc

SEQ ID NO: 133175 - DNA, 22 bp, synthetic construct
  misc_feature 1..22: note = chemically synthesized
  source 1..22: mol_type = other DNA
aggaaaggctacactctcttcc

SEQ ID NO: 133176 - DNA, 22 bp, synthetic construct
  misc_feature 1..22: note = chemically synthesized
  source 1..22: mol_type = other DNA
cactctcttccacaatgtttga

SEQ ID NO: 133177 - DNA, 22 bp, synthetic construct
  misc_feature 1..22: note = chemically synthesized
  source 1..22: mol_type = other DNA
tcttccacaatgtttgaactaa

SEQ ID NO: 133178 - DNA, 22 bp, synthetic construct
  misc_feature 1..22: note = chemically synthesized
  source 1..22: mol_type = other DNA
ttccacaatgtttgaactaatt

SEQ ID NO: 133179 - DNA, 22 bp, synthetic construct
  misc_feature 1..22: note = chemically synthesized
  source 1..22: mol_type = other DNA
ccacaatgtttgaactaattta

SEQ ID NO: 133180 - DNA, 22 bp, synthetic construct
  misc_feature 1..22: note = chemically synthesized
  source 1..22: mol_type = other DNA
cacaatgtttgaactaatttac

SEQ ID NO: 133181 - DNA, 22 bp, synthetic construct
  misc_feature 1..22: note = chemically synthesized
  source 1..22: mol_type = other DNA
gaactaatttactctcccgtta

SEQ ID NO: 133182 - DNA, 22 bp, synthetic construct
  misc_feature 1..22: note = chemically synthesized
  source 1..22: mol_type = other DNA
aactaatttactctcccgttaa

SEQ ID NO: 133183 - DNA, 22 bp, synthetic construct
  misc_feature 1..22: note = chemically synthesized
  source 1..22: mol_type = other DNA
atttactctcccgttaacagtg

SEQ ID NO: 133184 - DNA, 22 bp, synthetic construct
  misc_feature 1..22: note = chemically synthesized
  source 1..22: mol_type = other DNA
actctcccgttaacagtgtaaa

SEQ ID NO: 133185 - DNA, 22 bp, synthetic construct
  misc_feature 1..22: note = chemically synthesized
  source 1..22: mol_type = other DNA
ctctcccgttaacagtgtaaaa

SEQ ID NO: 133186 - DNA, 22 bp, synthetic construct
  misc_feature 1..22: note = chemically synthesized
  source 1..22: mol_type = other DNA
tcccgttaacagtgtaaaagca

SEQ ID NO: 133187 - DNA, 22 bp, synthetic construct
  misc_feature 1..22: note = chemically synthesized
  source 1..22: mol_type = other DNA
ccgttaacagtgtaaaagcatt

SEQ ID NO: 133188 - DNA, 22 bp, synthetic construct
  misc_feature 1..22: note = chemically synthesized
  source 1..22: mol_type = other DNA
acagtgtaaaagcattccattc

SEQ ID NO: 133189 - DNA, 22 bp, synthetic construct
  misc_feature 1..22: note = chemically synthesized
  source 1..22: mol_type = other DNA
cattcctttctctctgcaacct

SEQ ID NO: 133190 - DNA, 22 bp, synthetic construct
  misc_feature 1..22: note = chemically synthesized
  source 1..22: mol_type = other DNA
ctttctctctgcaaccttgcca

SEQ ID NO: 133191 - DNA, 22 bp, synthetic construct
  misc_feature 1..22: note = chemically synthesized
  source 1..22: mol_type = other DNA
tctctctgcaaccttgccagca

SEQ ID NO: 133192 - DNA, 22 bp, synthetic construct
  misc_feature 1..22: note = chemically synthesized
  source 1..22: mol_type = other DNA
ctctctgcaaccttgccagcaa

SEQ ID NO: 133193 - DNA, 22 bp, synthetic construct
  misc_feature 1..22: note = chemically synthesized
  source 1..22: mol_type = other DNA
tctctgcaaccttgccagcaac

SEQ ID NO: 133194 - DNA, 22 bp, synthetic construct
  misc_feature 1..22: note = chemically synthesized
  source 1..22: mol_type = other DNA
tctgcaaccttgccagcaactg

SEQ ID NO: 133195 - DNA, 22 bp, synthetic construct
  misc_feature 1..22: note = chemically synthesized
  source 1..22: mol_type = other DNA
tgcaaccttgccagcaactgtt

SEQ ID NO: 133196 - DNA, 22 bp, synthetic construct
  misc_feature 1..22: note = chemically synthesized
  source 1..22: mol_type = other DNA
caaccttgccagcaactgttgt

SEQ ID NO: 133197 - DNA, 22 bp, synthetic construct
  misc_feature 1..22: note = chemically synthesized
  source 1..22: mol_type = other DNA
gccagcaactgttgtttcttga

SEQ ID NO: 133198 - DNA, 22 bp, synthetic construct
  misc_feature 1..22: note = chemically synthesized
  source 1..22: mol_type = other DNA
ccagcaactgttgtttcttgac

SEQ ID NO: 133199 - DNA, 22 bp, synthetic construct
  misc_feature 1..22: note = chemically synthesized
  source 1..22: mol_type = other DNA
ttgtttcttgactttttaataa

SEQ ID NO: 133200 - DNA, 22 bp, synthetic construct
  misc_feature 1..22: note = chemically synthesized
  source 1..22: mol_type = other DNA
tttcttgactttttaataattg

SEQ ID NO: 133201 - DNA, 22 bp, synthetic construct
  misc_feature 1..22: note = chemically synthesized
  source 1..22: mol_type = other DNA
cttgactttttaataattgcca

SEQ ID NO: 133202 - DNA, 22 bp, synthetic construct
  misc_feature 1..22: note = chemically synthesized
  source 1..22: mol_type = other DNA
ttgactttttaataattgccat

SEQ ID NO: 133203 - DNA, 22 bp, synthetic construct
  misc_feature 1..22: note = chemically synthesized
  source 1..22: mol_type = other DNA
gactttttaataattgccattc

SEQ ID NO: 133204 - DNA, 22 bp, synthetic construct
  misc_feature 1..22: note = chemically synthesized
  source 1..22: mol_type = other DNA
actttttaataattgccattct

SEQ ID NO: 133205 - DNA, 22 bp, synthetic construct
  misc_feature 1..22: note = chemically synthesized
  source 1..22: mol_type = other DNA
tttaataattgccattctgact

SEQ ID NO: 133206 - DNA, 22 bp, synthetic construct
  misc_feature 1..22: note = chemically synthesized
  source 1..22: mol_type = other DNA
ttaataattgccattctgactg

SEQ ID NO: 133207 - DNA, 22 bp, synthetic construct
  misc_feature 1..22: note = chemically synthesized
  source 1..22: mol_type = other DNA
taataattgccattctgactgg

SEQ ID NO: 133208 - DNA, 22 bp, synthetic construct
  misc_feature 1..22: note = chemically synthesized
  source 1..22: mol_type = other DNA
aataattgccattctgactggt

SEQ ID NO: 133209 - DNA, 22 bp, synthetic construct
  misc_feature 1..22: note = chemically synthesized
  source 1..22: mol_type = other DNA
ataattgccattctgactggtg

SEQ ID NO: 133210 - DNA, 22 bp, synthetic construct
  misc_feature 1..22: note = chemically synthesized
  source 1..22: mol_type = other DNA
ccattctgactggtgtgagatg

SEQ ID NO: 133211 - DNA, 22 bp, synthetic construct
  misc_feature 1..22: note = chemically synthesized
  source 1..22: mol_type = other DNA
tgactggtgtgagatggtatcc

SEQ ID NO: 133212 - DNA, 22 bp, synthetic construct
  misc_feature 1..22: note = chemically synthesized
  source 1..22: mol_type = other DNA
actggtgtgagatggtatccca

SEQ ID NO: 133213 - DNA, 22 bp, synthetic construct
  misc_feature 1..22: note = chemically synthesized
  source 1..22: mol_type = other DNA
gtgtgagatggtatcccattgt

SEQ ID NO: 133214 - DNA, 22 bp, synthetic construct
  misc_feature 1..22: note = chemically synthesized
  source 1..22: mol_type = other DNA
tggttttgatttgcatttttct

SEQ ID NO: 133215 - DNA, 22 bp, synthetic construct
  misc_feature 1..22: note = chemically synthesized
  source 1..22: mol_type = other DNA
tgatttgcatttttctaatgac

SEQ ID NO: 133216 - DNA, 22 bp, synthetic construct
  misc_feature 1..22: note = chemically synthesized
  source 1..22: mol_type = other DNA
gatttgcatttttctaatgacc

SEQ ID NO: 133217 - DNA, 22 bp, synthetic construct
  misc_feature 1..22: note = chemically synthesized
  source 1..22: mol_type = other DNA
atttgcatttttctaatgacca

SEQ ID NO: 133218 - DNA, 22 bp, synthetic construct
  misc_feature 1..22: note = chemically synthesized
  source 1..22: mol_type = other DNA
gcatttttctaatgaccagtaa

SEQ ID NO: 133219 - DNA, 22 bp, synthetic construct
  misc_feature 1..22: note = chemically synthesized
  source 1..22: mol_type = other DNA
catttttctaatgaccagtaag

SEQ ID NO: 133220 - DNA, 22 bp, synthetic construct
  misc_feature 1..22: note = chemically synthesized
  source 1..22: mol_type = other DNA
ttctaatgaccagtaaggttga

SEQ ID NO: 133221 - DNA, 22 bp, synthetic construct
  misc_feature 1..22: note = chemically synthesized
  source 1..22: mol_type = other DNA
tctaatgaccagtaaggttgag

SEQ ID NO: 133222 - DNA, 22 bp, synthetic construct
  misc_feature 1..22: note = chemically synthesized
  source 1..22: mol_type = other DNA
ctaatgaccagtaaggttgagc

SEQ ID NO: 133223 - DNA, 22 bp, synthetic construct
  misc_feature 1..22: note = chemically synthesized
  source 1..22: mol_type = other DNA
taatgaccagtaaggttgagct

SEQ ID NO: 133224 - DNA, 22 bp, synthetic construct
  misc_feature 1..22: note = chemically synthesized
  source 1..22: mol_type = other DNA
atgaccagtaaggttgagcttt

SEQ ID NO: 133225 - DNA, 22 bp, synthetic construct
  misc_feature 1..22: note = chemically synthesized
  source 1..22: mol_type = other DNA
agctttttttttttcatatgtt

SEQ ID NO: 133226 - DNA, 22 bp, synthetic construct
  misc_feature 1..22: note = chemically synthesized
  source 1..22: mol_type = other DNA
tttttttttcatatgtttatta

SEQ ID NO: 133227 - DNA, 22 bp, synthetic construct
  misc_feature 1..22: note = chemically synthesized
  source 1..22: mol_type = other DNA
ttttttttcatatgtttattag

SEQ ID NO: 133228 - DNA, 22 bp, synthetic construct
  misc_feature 1..22: note = chemically synthesized
  source 1..22: mol_type = other DNA
tttttttcatatgtttattaga

SEQ ID NO: 133229 - DNA, 22 bp, synthetic construct
  misc_feature 1..22: note = chemically synthesized
  source 1..22: mol_type = other DNA
ttttttcatatgtttattagaa

SEQ ID NO: 133230 - DNA, 22 bp, synthetic construct
  misc_feature 1..22: note = chemically synthesized
  source 1..22: mol_type = other DNA
tttttcatatgtttattagaag

SEQ ID NO: 133231 - DNA, 22 bp, synthetic construct
  misc_feature 1..22: note = chemically synthesized
  source 1..22: mol_type = other DNA
ttttcatatgtttattagaagc

SEQ ID NO: 133232 - DNA, 22 bp, synthetic construct
  misc_feature 1..22: note = chemically synthesized
  source 1..22: mol_type = other DNA
tttcatatgtttattagaagca

SEQ ID NO: 133233 - DNA, 22 bp, synthetic construct
  misc_feature 1..22: note = chemically synthesized
  source 1..22: mol_type = other DNA
ttcatatgtttattagaagcat

SEQ ID NO: 133234 - DNA, 22 bp, synthetic construct
  misc_feature 1..22: note = chemically synthesized
  source 1..22: mol_type = other DNA
tcatatgtttattagaagcatg

SEQ ID NO: 133235 - DNA, 22 bp, synthetic construct
  misc_feature 1..22: note = chemically synthesized
  source 1..22: mol_type = other DNA
catatgtttattagaagcatga

SEQ ID NO: 133236 - DNA, 22 bp, synthetic construct
  misc_feature 1..22: note = chemically synthesized
  source 1..22: mol_type = other DNA
atatgtttattagaagcatgaa

SEQ ID NO: 133237 - DNA, 22 bp, synthetic construct
  misc_feature 1..22: note = chemically synthesized
  source 1..22: mol_type = other DNA
attagaagcatgaatgtcttct

SEQ ID NO: 133238 - DNA, 22 bp, synthetic construct
  misc_feature 1..22: note = chemically synthesized
  source 1..22: mol_type = other DNA
ttagaagcatgaatgtcttctt

SEQ ID NO: 133239 - DNA, 22 bp, synthetic construct
  misc_feature 1..22: note = chemically synthesized
  source 1..22: mol_type = other DNA
gaagcatgaatgtcttctttag

SEQ ID NO: 133240 - DNA, 22 bp, synthetic construct
  misc_feature 1..22: note = chemically synthesized
  source 1..22: mol_type = other DNA
ctttagagaagtgtctattcat

SEQ ID NO: 133241 - DNA, 22 bp, synthetic construct
  misc_feature 1..22: note = chemically synthesized
  source 1..22: mol_type = other DNA
tttagagaagtgtctattcatg

SEQ ID NO: 133242 - DNA, 22 bp, synthetic construct
  misc_feature 1..22: note = chemically synthesized
  source 1..22: mol_type = other DNA
tagagaagtgtctattcatgtc

SEQ ID NO: 133243 - DNA, 22 bp, synthetic construct
  misc_feature 1..22: note = chemically synthesized
  source 1..22: mol_type = other DNA
agagaagtgtctattcatgtca

SEQ ID NO: 133244 - DNA, 22 bp, synthetic construct
  misc_feature 1..22: note = chemically synthesized
  source 1..22: mol_type = other DNA
gagaagtgtctattcatgtcat

SEQ ID NO: 133245 - DNA, 22 bp, synthetic construct
  misc_feature 1..22: note = chemically synthesized
  source 1..22: mol_type = other DNA
ttcatgtcattccccacttttt

SEQ ID NO: 133246 - DNA, 22 bp, synthetic construct
  misc_feature 1..22: note = chemically synthesized
  source 1..22: mol_type = other DNA
atgtcattccccactttttaat

SEQ ID NO: 133247 - DNA, 22 bp, synthetic construct
  misc_feature 1..22: note = chemically synthesized
  source 1..22: mol_type = other DNA
cccactttttaatggggttgtt

SEQ ID NO: 133248 - DNA, 22 bp, synthetic construct
  misc_feature 1..22: note = chemically synthesized
  source 1..22: mol_type = other DNA
tttaatggggttgtttttttct

SEQ ID NO: 133249 - DNA, 22 bp, synthetic construct
  misc_feature 1..22: note = chemically synthesized
  source 1..22: mol_type = other DNA
ttaatggggttgtttttttctt

SEQ ID NO: 133250 - DNA, 22 bp, synthetic construct
  misc_feature 1..22: note = chemically synthesized
  source 1..22: mol_type = other DNA
taatggggttgtttttttcttg

SEQ ID NO: 133251 - DNA, 22 bp, synthetic construct
  misc_feature 1..22: note = chemically synthesized
  source 1..22: mol_type = other DNA
aatggggttgtttttttcttgt

SEQ ID NO: 133252 - DNA, 22 bp, synthetic construct
  misc_feature 1..22: note = chemically synthesized
  source 1..22: mol_type = other DNA
atggggttgtttttttcttgta

SEQ ID NO: 133253 - DNA, 22 bp, synthetic construct
  misc_feature 1..22: note = chemically synthesized
  source 1..22: mol_type = other DNA
tttttttcttgtaaatttgttt

SEQ ID NO: 133254 - DNA, 22 bp, synthetic construct
  misc_feature 1..22: note = chemically synthesized
  source 1..22: mol_type = other DNA
ttttcttgtaaatttgttttag

SEQ ID NO: 133255 - DNA, 22 bp, synthetic construct
  misc_feature 1..22: note = chemically synthesized
  source 1..22: mol_type = other DNA
tttcttgtaaatttgttttagt

SEQ ID NO: 133256 - DNA, 22 bp, synthetic construct
  misc_feature 1..22: note = chemically synthesized
  source 1..22: mol_type = other DNA
ttcttgtaaatttgttttagtt

SEQ ID NO: 133257 - DNA, 22 bp, synthetic construct
  misc_feature 1..22: note = chemically synthesized
  source 1..22: mol_type = other DNA
tcttgtaaatttgttttagttc

SEQ ID NO: 133258 - DNA, 22 bp, synthetic construct
  misc_feature 1..22: note = chemically synthesized
  source 1..22: mol_type = other DNA
cttgtaaatttgttttagttcc

SEQ ID NO: 133259 - DNA, 22 bp, synthetic construct
  misc_feature 1..22: note = chemically synthesized
  source 1..22: mol_type = other DNA
ttgtaaatttgttttagttcct

SEQ ID NO: 133260 - DNA, 22 bp, synthetic construct
  misc_feature 1..22: note = chemically synthesized
  source 1..22: mol_type = other DNA
gtaaatttgttttagttcctca

SEQ ID NO: 133261 - DNA, 22 bp, synthetic construct
  misc_feature 1..22: note = chemically synthesized
  source 1..22: mol_type = other DNA
taaatttgttttagttcctcat

SEQ ID NO: 133262 - DNA, 22 bp, synthetic construct
  misc_feature 1..22: note = chemically synthesized
  source 1..22: mol_type = other DNA
gttttagttcctcatagactcc

SEQ ID NO: 133263 - DNA, 22 bp, synthetic construct
  misc_feature 1..22: note = chemically synthesized
  source 1..22: mol_type = other DNA
ttttagttcctcatagactcca

SEQ ID NO: 133264 - DNA, 22 bp, synthetic construct
  misc_feature 1..22: note = chemically synthesized
  source 1..22: mol_type = other DNA
tagttcctcatagactccagat

SEQ ID NO: 133265 - DNA, 22 bp, synthetic construct
  misc_feature 1..22: note = chemically synthesized
  source 1..22: mol_type = other DNA
agttcctcatagactccagata

SEQ ID NO: 133266 - DNA, 22 bp, synthetic construct
  misc_feature 1..22: note = chemically synthesized
  source 1..22: mol_type = other DNA
gttcctcatagactccagatat

SEQ ID NO: 133267 - DNA, 22 bp, synthetic construct
  misc_feature 1..22: note = chemically synthesized
  source 1..22: mol_type = other DNA
ctcatagactccagatattaga

SEQ ID NO: 133268 - DNA, 22 bp, synthetic construct
  misc_feature 1..22: note = chemically synthesized
  source 1..22: mol_type = other DNA
atagactccagatattagactt

SEQ ID NO: 133269 - DNA, 22 bp, synthetic construct
  misc_feature 1..22: note = chemically synthesized
  source 1..22: mol_type = other DNA
cagatattagacttttgtcaga

SEQ ID NO: 133270 - DNA, 22 bp, synthetic construct
  misc_feature 1..22: note = chemically synthesized
  source 1..22: mol_type = other DNA
gacttttgtcagatggagaaat

SEQ ID NO: 133271 - DNA, 22 bp, synthetic construct
  misc_feature 1..22: note = chemically synthesized
  source 1..22: mol_type = other DNA
ttgtcagatggagaaattgcaa

SEQ ID NO: 133272 - DNA, 22 bp, synthetic construct
  misc_feature 1..22: note = chemically synthesized
  source 1..22: mol_type = other DNA
tgtcagatggagaaattgcaaa

SEQ ID NO: 133273 - DNA, 22 bp, synthetic construct
  misc_feature 1..22: note = chemically synthesized
  source 1..22: mol_type = other DNA
gtcagatggagaaattgcaaaa

SEQ ID NO: 133274 - DNA, 22 bp, synthetic construct
  misc_feature 1..22: note = chemically synthesized
  source 1..22: mol_type = other DNA
tcagatggagaaattgcaaaaa

SEQ ID NO: 133275 - DNA, 22 bp, synthetic construct
  misc_feature 1..22: note = chemically synthesized
  source 1..22: mol_type = other DNA
caaaaattttcttctattctgt

SEQ ID NO: 133276 - DNA, 22 bp, synthetic construct
  misc_feature 1..22: note = chemically synthesized
  source 1..22: mol_type = other DNA
tcttctattctgtaggttgtct

SEQ ID NO: 133277 - DNA, 22 bp, synthetic construct
  misc_feature 1..22: note = chemically synthesized
  source 1..22: mol_type = other DNA
cttctattctgtaggttgtctg

SEQ ID NO: 133278 - DNA, 22 bp, synthetic construct
  misc_feature 1..22: note = chemically synthesized
  source 1..22: mol_type = other DNA
ttctattctgtaggttgtctgt

SEQ ID NO: 133279 - DNA, 22 bp, synthetic construct
  misc_feature 1..22: note = chemically synthesized
  source 1..22: mol_type = other DNA
ctattctgtaggttgtctgtta

SEQ ID NO: 133280 - DNA, 22 bp, synthetic construct
  misc_feature 1..22: note = chemically synthesized
  source 1..22: mol_type = other DNA
tattctgtaggttgtctgttat

SEQ ID NO: 133281 - DNA, 22 bp, synthetic construct
  misc_feature 1..22: note = chemically synthesized
  source 1..22: mol_type = other DNA
ttctgtaggttgtctgttatct

SEQ ID NO: 133282 - DNA, 22 bp, synthetic construct
  misc_feature 1..22: note = chemically synthesized
  source 1..22: mol_type = other DNA
tgtaggttgtctgttatctctg

SEQ ID NO: 133283 - DNA, 22 bp, synthetic construct
  misc_feature 1..22: note = chemically synthesized
  source 1..22: mol_type = other DNA
taggttgtctgttatctctgat

SEQ ID NO: 133284 - DNA, 22 bp, synthetic construct
  misc_feature 1..22: note = chemically synthesized
  source 1..22: mol_type = other DNA
tctgttatctctgatgatagtt

SEQ ID NO: 133285 - DNA, 22 bp, synthetic construct
  misc_feature 1..22: note = chemically synthesized
  source 1..22: mol_type = other DNA
ttatctctgatgatagtttctt

SEQ ID NO: 133286 - DNA, 22 bp, synthetic construct
  misc_feature 1..22: note = chemically synthesized
  source 1..22: mol_type = other DNA
tctctgatgatagtttcttttg

SEQ ID NO: 133287 - DNA, 22 bp, synthetic construct
  misc_feature 1..22: note = chemically synthesized
  source 1..22: mol_type = other DNA
tgatgatagtttcttttgctgt

SEQ ID NO: 133288 - DNA, 22 bp, synthetic construct
  misc_feature 1..22: note = chemically synthesized
  source 1..22: mol_type = other DNA
atgatagtttcttttgctgtgc

SEQ ID NO: 133289 - DNA, 22 bp, synthetic construct
  misc_feature 1..22: note = chemically synthesized
  source 1..22: mol_type = other DNA
cttttgctgtgcagaagctctt

SEQ ID NO: 133290 - DNA, 22 bp, synthetic construct
  misc_feature 1..22: note = chemically synthesized
  source 1..22: mol_type = other DNA
ttttgctgtgcagaagctcttt

SEQ ID NO: 133291 - DNA, 22 bp, synthetic construct
  misc_feature 1..22: note = chemically synthesized
  source 1..22: mol_type = other DNA
ttgctgtgcagaagctctttaa

SEQ ID NO: 133292 - DNA, 22 bp, synthetic construct
  misc_feature 1..22: note = chemically synthesized
  source 1..22: mol_type = other DNA
tgctgtgcagaagctctttaat

SEQ ID NO: 133293 - DNA, 22 bp, synthetic construct
  misc_feature 1..22: note = chemically synthesized
  source 1..22: mol_type = other DNA
gctgtgcagaagctctttaatt

SEQ ID NO: 133294 - DNA, 22 bp, synthetic construct
  misc_feature 1..22: note = chemically synthesized
  source 1..22: mol_type = other DNA
ctgtgcagaagctctttaattt

SEQ ID NO: 133295 - DNA, 22 bp, synthetic construct
  misc_feature 1..22: note = chemically synthesized
  source 1..22: mol_type = other DNA
tgcagaagctctttaatttaat

SEQ ID NO: 133296 - DNA, 22 bp, synthetic construct
  misc_feature 1..22: note = chemically synthesized
  source 1..22: mol_type = other DNA
tttaatttaattagatcccatt

SEQ ID NO: 133297 - DNA, 22 bp, synthetic construct
  misc_feature 1..22: note = chemically synthesized
  source 1..22: mol_type = other DNA
taatttaattagatcccatttg

SEQ ID NO: 133298 - DNA, 22 bp, synthetic construct
  misc_feature 1..22: note = chemically synthesized
  source 1..22: mol_type = other DNA
aatttaattagatcccatttgt

SEQ ID NO: 133299 - DNA, 22 bp, synthetic construct
  misc_feature 1..22: note = chemically synthesized
  source 1..22: mol_type = other DNA
atttaattagatcccatttgtc

SEQ ID NO: 133300 - DNA, 22 bp, synthetic construct
  misc_feature 1..22: note = chemically synthesized
  source 1..22: mol_type = other DNA
aattagatcccatttgtcaatt

SEQ ID NO: 133301 - DNA, 22 bp, synthetic construct
  misc_feature 1..22: note = chemically synthesized
  source 1..22: mol_type = other DNA
attagatcccatttgtcaattt

SEQ ID NO: 133302 - DNA, 22 bp, synthetic construct
  misc_feature 1..22: note = chemically synthesized
  source 1..22: mol_type = other DNA
gatcccatttgtcaattttttt

SEQ ID NO: 133303 - DNA, 22 bp, synthetic construct
  misc_feature 1..22: note = chemically synthesized
  source 1..22: mol_type = other DNA
gtcaatttttttttgcagttgc

SEQ ID NO: 133304 - DNA, 22 bp, synthetic construct
  misc_feature 1..22: note = chemically synthesized
  source 1..22: mol_type = other DNA
tcaatttttttttgcagttgct

SEQ ID NO: 133305 - DNA, 22 bp, synthetic construct
  misc_feature 1..22: note = chemically synthesized
  source 1..22: mol_type = other DNA
ttttttgcagttgcttttggtg

SEQ ID NO: 133306 - DNA, 22 bp, synthetic construct
  misc_feature 1..22: note = chemically synthesized
  source 1..22: mol_type = other DNA
tttttgcagttgcttttggtgt

SEQ ID NO: 133307 - DNA, 22 bp, synthetic construct
  misc_feature 1..22: note = chemically synthesized
  source 1..22: mol_type = other DNA
ttttgcagttgcttttggtgtc

SEQ ID NO: 133308 - DNA, 22 bp, synthetic construct
  misc_feature 1..22: note = chemically synthesized
  source 1..22: mol_type = other DNA
tttgcagttgcttttggtgtct

SEQ ID NO: 133309 - DNA, 22 bp, synthetic construct
  misc_feature 1..22: note = chemically synthesized
  source 1..22: mol_type = other DNA
ttgcagttgcttttggtgtctt

SEQ ID NO: 133310 - DNA, 22 bp, synthetic construct
  misc_feature 1..22: note = chemically synthesized
  source 1..22: mol_type = other DNA
tgcagttgcttttggtgtcttg

SEQ ID NO: 133311 - DNA, 22 bp, synthetic construct
  misc_feature 1..22: note = chemically synthesized
  source 1..22: mol_type = other DNA
gcagttgcttttggtgtcttga

SEQ ID NO: 133312 - DNA, 22 bp, synthetic construct
  misc_feature 1..22: note = chemically synthesized
  source 1..22: mol_type = other DNA
cagttgcttttggtgtcttgag

SEQ ID NO: 133313 - DNA, 22 bp, synthetic construct
  misc_feature 1..22: note = chemically synthesized
  source 1..22: mol_type = other DNA
cttttggtgtcttgagttttct

SEQ ID NO: 133314 - DNA, 22 bp, synthetic construct
  misc_feature 1..22: note = chemically synthesized
  source 1..22: mol_type = other DNA
ttggtgtcttgagttttctttc

SEQ ID NO: 133315 - DNA, 22 bp, synthetic construct
  misc_feature 1..22: note = chemically synthesized
  source 1..22: mol_type = other DNA
tggtgtcttgagttttctttca

SEQ ID NO: 133316 - DNA, 22 bp, synthetic construct
  misc_feature 1..22: note = chemically synthesized
  source 1..22: mol_type = other DNA
ggtgtcttgagttttctttcaa

SEQ ID NO: 133317 - DNA, 22 bp, synthetic construct
  misc_feature 1..22: note = chemically synthesized
  source 1..22: mol_type = other DNA
gtgtcttgagttttctttcaaa

SEQ ID NO: 133318 - DNA, 22 bp, synthetic construct
  misc_feature 1..22: note = chemically synthesized
  source 1..22: mol_type = other DNA
gagttttctttcaaaatgatac

SEQ ID NO: 133319 - DNA, 22 bp, synthetic construct
  misc_feature 1..22: note = chemically synthesized
  source 1..22: mol_type = other DNA
agttttctttcaaaatgataca

SEQ ID NO: 133320 - DNA, 22 bp, synthetic construct
  misc_feature 1..22: note = chemically synthesized
  source 1..22: mol_type = other DNA
tctttcaaaatgatacaatgtc

SEQ ID NO: 133321 - DNA, 22 bp, synthetic construct
  misc_feature 1..22: note = chemically synthesized
  source 1..22: mol_type = other DNA
ctttcaaaatgatacaatgtca

SEQ ID NO: 133322 - DNA, 22 bp, synthetic construct
  misc_feature 1..22: note = chemically synthesized
  source 1..22: mol_type = other DNA
tttcaaaatgatacaatgtcat

SEQ ID NO: 133323 - DNA, 22 bp, synthetic construct
  misc_feature 1..22: note = chemically synthesized
  source 1..22: mol_type = other DNA
tcaaaatgatacaatgtcatct

SEQ ID NO: 133324 - DNA, 22 bp, synthetic construct
  misc_feature 1..22: note = chemically synthesized
  source 1..22: mol_type = other DNA
caaaatgatacaatgtcatcta

SEQ ID NO: 133325 - DNA, 22 bp, synthetic construct
  misc_feature 1..22: note = chemically synthesized
  source 1..22: mol_type = other DNA
aaaatgatacaatgtcatctat

SEQ ID NO: 133326 - DNA, 22 bp, synthetic construct
  misc_feature 1..22: note = chemically synthesized
  source 1..22: mol_type = other DNA
taaagttttacagtagagactc

SEQ ID NO: 133327 - DNA, 22 bp, synthetic construct
  misc_feature 1..22: note = chemically synthesized
  source 1..22: mol_type = other DNA
tacagtagagactctctaaatt

SEQ ID NO: 133328 - DNA, 22 bp, synthetic construct
  misc_feature 1..22: note = chemically synthesized
  source 1..22: mol_type = other DNA
acagtagagactctctaaattc

SEQ ID NO: 133329 - DNA, 22 bp, synthetic construct
  misc_feature 1..22: note = chemically synthesized
  source 1..22: mol_type = other DNA
cagtagagactctctaaattca

SEQ ID NO: 133330 - DNA, 22 bp, synthetic construct
  misc_feature 1..22: note = chemically synthesized
  source 1..22: mol_type = other DNA
tctaaattcataaatttcctag

SEQ ID NO: 133331 - DNA, 22 bp, synthetic construct
  misc_feature 1..22: note = chemically synthesized
  source 1..22: mol_type = other DNA
taaattcataaatttcctagtt

SEQ ID NO: 133332 - DNA, 22 bp, synthetic construct
  misc_feature 1..22: note = chemically synthesized
  source 1..22: mol_type = other DNA
aattcataaatttcctagttgc

SEQ ID NO: 133333 - DNA, 22 bp, synthetic construct
  misc_feature 1..22: note = chemically synthesized
  source 1..22: mol_type = other DNA
ataaatttcctagttgctcatt

SEQ ID NO: 133334 - DNA, 22 bp, synthetic construct
  misc_feature 1..22: note = chemically synthesized
  source 1..22: mol_type = other DNA
cctagttgctcatttcatgagt

SEQ ID NO: 133335 - DNA, 22 bp, synthetic construct
  misc_feature 1..22: note = chemically synthesized
  source 1..22: mol_type = other DNA
ctagttgctcatttcatgagtt

SEQ ID NO: 133336 - DNA, 22 bp, synthetic construct
  misc_feature 1..22: note = chemically synthesized
  source 1..22: mol_type = other DNA
gttgctcatttcatgagttaat

SEQ ID NO: 133337 - DNA, 22 bp, synthetic construct
  misc_feature 1..22: note = chemically synthesized
  source 1..22: mol_type = other DNA
ctcatttcatgagttaatgtat

SEQ ID NO: 133338 - DNA, 22 bp, synthetic construct
  misc_feature 1..22: note = chemically synthesized
  source 1..22: mol_type = other DNA
atttcatgagttaatgtatttc

SEQ ID NO: 133339 - DNA, 22 bp, synthetic construct
  misc_feature 1..22: note = chemically synthesized
  source 1..22: mol_type = other DNA
catgagttaatgtatttctttt

SEQ ID NO: 133340 - DNA, 22 bp, synthetic construct
  misc_feature 1..22: note = chemically synthesized
  source 1..22: mol_type = other DNA
atgagttaatgtatttcttttg

SEQ ID NO: 133341 - DNA, 22 bp, synthetic construct
  misc_feature 1..22: note = chemically synthesized
  source 1..22: mol_type = other DNA
atgtatttcttttgatcttgtg

SEQ ID NO: 133342 - DNA, 22 bp, synthetic construct
  misc_feature 1..22: note = chemically synthesized
  source 1..22: mol_type = other DNA
cttttgatcttgtgttctctct

SEQ ID NO: 133343 - DNA, 22 bp, synthetic construct
  misc_feature 1..22: note = chemically synthesized
  source 1..22: mol_type = other DNA
ttttgatcttgtgttctctcta

SEQ ID NO: 133344 - DNA, 22 bp, synthetic construct
  misc_feature 1..22: note = chemically synthesized
  source 1..22: mol_type = other DNA
ttgatcttgtgttctctctaaa

SEQ ID NO: 133345 - DNA, 22 bp, synthetic construct
  misc_feature 1..22: note = chemically synthesized
  source 1..22: mol_type = other DNA
tgatcttgtgttctctctaaat

SEQ ID NO: 133346 - DNA, 22 bp, synthetic construct
  misc_feature 1..22: note = chemically synthesized
  source 1..22: mol_type = other DNA
gatcttgtgttctctctaaatg

SEQ ID NO: 133347 - DNA, 22 bp, synthetic construct
  misc_feature 1..22: note = chemically synthesized
  source 1..22: mol_type = other DNA
atcttgtgttctctctaaatgc

SEQ ID NO: 133348 - DNA, 22 bp, synthetic construct
  misc_feature 1..22: note = chemically synthesized
  source 1..22: mol_type = other DNA
gtgttctctctaaatgctggat

SEQ ID NO: 133349 - DNA, 22 bp, synthetic construct
  misc_feature 1..22: note = chemically synthesized
  source 1..22: mol_type = other DNA
tgttctctctaaatgctggata

SEQ ID NO: 133350 - DNA, 22 bp, synthetic construct
  misc_feature 1..22: note = chemically synthesized
  source 1..22: mol_type = other DNA
tctctaaatgctggatagaaac

SEQ ID NO: 133351 - DNA, 22 bp, synthetic construct
  misc_feature 1..22: note = chemically synthesized
  source 1..22: mol_type = other DNA
tctaaatgctggatagaaacat

SEQ ID NO: 133352 - DNA, 22 bp, synthetic construct
  misc_feature 1..22: note = chemically synthesized
  source 1..22: mol_type = other DNA
taaatgctggatagaaacattt

SEQ ID NO: 133353 - DNA, 22 bp, synthetic construct
  misc_feature 1..22: note = chemically synthesized
  source 1..22: mol_type = other DNA
aatgctggatagaaacatttct

SEQ ID NO: 133354 - DNA, 22 bp, synthetic construct
  misc_feature 1..22: note = chemically synthesized
  source 1..22: mol_type = other DNA
gatagaaacatttctgatatgt

SEQ ID NO: 133355 - DNA, 22 bp, synthetic construct
  misc_feature 1..22: note = chemically synthesized
  source 1..22: mol_type = other DNA
ctgatatgtccaatagatgaaa

SEQ ID NO: 133356 - DNA, 22 bp, synthetic construct
  misc_feature 1..22: note = chemically synthesized
  source 1..22: mol_type = other DNA
tgatatgtccaatagatgaaat

SEQ ID NO: 133357 - DNA, 22 bp, synthetic construct
  misc_feature 1..22: note = chemically synthesized
  source 1..22: mol_type = other DNA
atatgtccaatagatgaaatat

SEQ ID NO: 133358 - DNA, 22 bp, synthetic construct
  misc_feature 1..22: note = chemically synthesized
  source 1..22: mol_type = other DNA
atattttcctttttgtatattc

SEQ ID NO: 133359 - DNA, 22 bp, synthetic construct
  misc_feature 1..22: note = chemically synthesized
  source 1..22: mol_type = other DNA
tcctttttgtatattcaattta

SEQ ID NO: 133360 - DNA, 22 bp, synthetic construct
  misc_feature 1..22: note = chemically synthesized
  source 1..22: mol_type = other DNA
cctttttgtatattcaatttat

SEQ ID NO: 133361 - DNA, 22 bp, synthetic construct
  misc_feature 1..22: note = chemically synthesized
  source 1..22: mol_type = other DNA
ctttttgtatattcaatttatt

SEQ ID NO: 133362 - DNA, 22 bp, synthetic construct
  misc_feature 1..22: note = chemically synthesized
  source 1..22: mol_type = other DNA
tttgtatattcaatttattttt

SEQ ID NO: 133363 - DNA, 22 bp, synthetic construct
  misc_feature 1..22: note = chemically synthesized
  source 1..22: mol_type = other DNA
ttgtatattcaatttatttttt

SEQ ID NO: 133364 - DNA, 22 bp, synthetic construct
  misc_feature 1..22: note = chemically synthesized
  source 1..22: mol_type = other DNA
tgtatattcaatttatttttta

SEQ ID NO: 133365 - DNA, 22 bp, synthetic construct
  misc_feature 1..22: note = chemically synthesized
  source 1..22: mol_type = other DNA
gtatattcaatttattttttat

SEQ ID NO: 133366 - DNA, 22 bp, synthetic construct
  misc_feature 1..22: note = chemically synthesized
  source 1..22: mol_type = other DNA
tatattcaatttattttttatt

SEQ ID NO: 133367 - DNA, 22 bp, synthetic construct
  misc_feature 1..22: note = chemically synthesized
  source 1..22: mol_type = other DNA
aatttattttttattctaataa

SEQ ID NO: 133368 - DNA, 22 bp, synthetic construct
  misc_feature 1..22: note = chemically synthesized
  source 1..22: mol_type = other DNA
attttttattctaataaatcac

SEQ ID NO: 133369 - DNA, 22 bp, synthetic construct
  misc_feature 1..22: note = chemically synthesized
  source 1..22: mol_type = other DNA
ttttttattctaataaatcaca

SEQ ID NO: 133370 - DNA, 22 bp, synthetic construct
  misc_feature 1..22: note = chemically synthesized
  source 1..22: mol_type = other DNA
tttattctaataaatcacaagt

SEQ ID NO: 133371 - DNA, 22 bp, synthetic construct
  misc_feature 1..22: note = chemically synthesized
  source 1..22: mol_type = other DNA
ttattctaataaatcacaagtg

SEQ ID NO: 133372 - DNA, 22 bp, synthetic construct
  misc_feature 1..22: note = chemically synthesized
  source 1..22: mol_type = other DNA
tattctaataaatcacaagtga

SEQ ID NO: 133373 - DNA, 22 bp, synthetic construct
  misc_feature 1..22: note = chemically synthesized
  source 1..22: mol_type = other DNA
attctaataaatcacaagtgat

SEQ ID NO: 133374 - DNA, 22 bp, synthetic construct
  misc_feature 1..22: note = chemically synthesized
  source 1..22: mol_type = other DNA
ttctaataaatcacaagtgatc

SEQ ID NO: 133375 - DNA, 22 bp, synthetic construct
  misc_feature 1..22: note = chemically synthesized
  source 1..22: mol_type = other DNA
taataaatcacaagtgatctca

SEQ ID NO: 133376 - DNA, 22 bp, synthetic construct
  misc_feature 1..22: note = chemically synthesized
  source 1..22: mol_type = other DNA
ataaatcacaagtgatctcaat

SEQ ID NO: 133377 - DNA, 22 bp, synthetic construct
  misc_feature 1..22: note = chemically synthesized
  source 1..22: mol_type = other DNA
aatttgttgcagcaacttggaa

SEQ ID NO: 133378 - DNA, 22 bp, synthetic construct
  misc_feature 1..22: note = chemically synthesized
  source 1..22: mol_type = other DNA
gttgcagcaacttggaaatctc

SEQ ID NO: 133379 - DNA, 22 bp, synthetic construct
  misc_feature 1..22: note = chemically synthesized
  source 1..22: mol_type = other DNA
ttgcagcaacttggaaatctca

SEQ ID NO: 133380 - DNA, 22 bp, synthetic construct
  misc_feature 1..22: note = chemically synthesized
  source 1..22: mol_type = other DNA
cagcaacttggaaatctcacta

SEQ ID NO: 133381 - DNA, 22 bp, synthetic construct
  misc_feature 1..22: note = chemically synthesized
  source 1..22: mol_type = other DNA
ggaaatctcactaggatttatt

SEQ ID NO: 133382 - DNA, 22 bp, synthetic construct
  misc_feature 1..22: note = chemically synthesized
  source 1..22: mol_type = other DNA
gaaatctcactaggatttattt

SEQ ID NO: 133383 - DNA, 22 bp, synthetic construct
  misc_feature 1..22: note = chemically synthesized
  source 1..22: mol_type = other DNA
actaggatttatttgatcatat

SEQ ID NO: 133384 - DNA, 22 bp, synthetic construct
  misc_feature 1..22: note = chemically synthesized
  source 1..22: mol_type = other DNA
ggatttatttgatcatatattt

SEQ ID NO: 133385 - DNA, 22 bp, synthetic construct
  misc_feature 1..22: note = chemically synthesized
  source 1..22: mol_type = other DNA
atttgatcatatattttgctaa

SEQ ID NO: 133386 - DNA, 22 bp, synthetic construct
  misc_feature 1..22: note = chemically synthesized
  source 1..22: mol_type = other DNA
tttgatcatatattttgctaat

SEQ ID NO: 133387 - DNA, 22 bp, synthetic construct
  misc_feature 1..22: note = chemically synthesized
  source 1..22: mol_type = other DNA
gatcatatattttgctaatttt

SEQ ID NO: 133388 - DNA, 22 bp, synthetic construct
  misc_feature 1..22: note = chemically synthesized
  source 1..22: mol_type = other DNA
atcatatattttgctaattttc

SEQ ID NO: 133389 - DNA, 22 bp, synthetic construct
  misc_feature 1..22: note = chemically synthesized
  source 1..22: mol_type = other DNA
tgctaattttcatccttttata

SEQ ID NO: 133390 - DNA, 22 bp, synthetic construct
  misc_feature 1..22: note = chemically synthesized
  source 1..22: mol_type = other DNA
gctaattttcatccttttataa

SEQ ID NO: 133391 - DNA, 22 bp, synthetic construct
  misc_feature 1..22: note = chemically synthesized
  source 1..22: mol_type = other DNA
ctaattttcatccttttataat

SEQ ID NO: 133392 - DNA, 22 bp, synthetic construct
  misc_feature 1..22: note = chemically synthesized
  source 1..22: mol_type = other DNA
attttcatccttttataattga

SEQ ID NO: 133393 - DNA, 22 bp, synthetic construct
  misc_feature 1..22: note = chemically synthesized
  source 1..22: mol_type = other DNA
tcatccttttataattgatttt

SEQ ID NO: 133394 - DNA, 22 bp, synthetic construct
  misc_feature 1..22: note = chemically synthesized
  source 1..22: mol_type = other DNA
catccttttataattgatttta

SEQ ID NO: 133395 - DNA, 22 bp, synthetic construct
  misc_feature 1..22: note = chemically synthesized
  source 1..22: mol_type = other DNA
atccttttataattgattttaa

SEQ ID NO: 133396 - DNA, 22 bp, synthetic construct
  misc_feature 1..22: note = chemically synthesized
  source 1..22: mol_type = other DNA
ttataattgattttaagaagtt

SEQ ID NO: 133397 - DNA, 22 bp, synthetic construct
  misc_feature 1..22: note = chemically synthesized
  source 1..22: mol_type = other DNA
tataattgattttaagaagttt

SEQ ID NO: 133398 - DNA, 22 bp, synthetic construct
  misc_feature 1..22: note = chemically synthesized
  source 1..22: mol_type = other DNA
ataattgattttaagaagttta

SEQ ID NO: 133399 - DNA, 22 bp, synthetic construct
  misc_feature 1..22: note = chemically synthesized
  source 1..22: mol_type = other DNA
taattgattttaagaagtttat

SEQ ID NO: 133400 - DNA, 22 bp, synthetic construct
  misc_feature 1..22: note = chemically synthesized
  source 1..22: mol_type = other DNA
attttaagaagtttattatgta

SEQ ID NO: 133401 - DNA, 22 bp, synthetic construct
  misc_feature 1..22: note = chemically synthesized
  source 1..22: mol_type = other DNA
taagaagtttattatgtattat

SEQ ID NO: 133402 - DNA, 22 bp, synthetic construct
  misc_feature 1..22: note = chemically synthesized
  source 1..22: mol_type = other DNA
aagaagtttattatgtattatc

SEQ ID NO: 133403 - DNA, 22 bp, synthetic construct
  misc_feature 1..22: note = chemically synthesized
  source 1..22: mol_type = other DNA
agaagtttattatgtattatct

SEQ ID NO: 133404 - DNA, 22 bp, synthetic construct
  misc_feature 1..22: note = chemically synthesized
  source 1..22: mol_type = other DNA
attatgtattatctctagtgtt

SEQ ID NO: 133405 - DNA, 22 bp, synthetic construct
  misc_feature 1..22: note = chemically synthesized
  source 1..22: mol_type = other DNA
ttatgtattatctctagtgttt

SEQ ID NO: 133406 - DNA, 22 bp, synthetic construct
  misc_feature 1..22: note = chemically synthesized
  source 1..22: mol_type = other DNA
tgtattatctctagtgttttat

SEQ ID NO: 133407 - DNA, 22 bp, synthetic construct
  misc_feature 1..22: note = chemically synthesized
  source 1..22: mol_type = other DNA
tctctagtgttttatttttagt

SEQ ID NO: 133408 - DNA, 22 bp, synthetic construct
  misc_feature 1..22: note = chemically synthesized
  source 1..22: mol_type = other DNA
tagtgttttatttttagtgtac

SEQ ID NO: 133409 - DNA, 22 bp, synthetic construct
  misc_feature 1..22: note = chemically synthesized
  source 1..22: mol_type = other DNA
gtgttttatttttagtgtacgt

SEQ ID NO: 133410 - DNA, 22 bp, synthetic construct
  misc_feature 1..22: note = chemically synthesized
  source 1..22: mol_type = other DNA
tatttttagtgtacgtattttc

SEQ ID NO: 133411 - DNA, 22 bp, synthetic construct
  misc_feature 1..22: note = chemically synthesized
  source 1..22: mol_type = other DNA
atttttagtgtacgtattttcc

SEQ ID NO: 133412 - DNA, 22 bp, synthetic construct
  misc_feature 1..22: note = chemically synthesized
  source 1..22: mol_type = other DNA
tttttagtgtacgtattttccc

SEQ ID NO: 133413 - DNA, 22 bp, synthetic construct
  misc_feature 1..22: note = chemically synthesized
  source 1..22: mol_type = other DNA
ttagtgtacgtattttcccagt

SEQ ID NO: 133414 - DNA, 22 bp, synthetic construct
  misc_feature 1..22: note = chemically synthesized
  source 1..22: mol_type = other DNA
tagtgtacgtattttcccagtt

SEQ ID NO: 133415 - DNA, 22 bp, synthetic construct
  misc_feature 1..22: note = chemically synthesized
  source 1..22: mol_type = other DNA
agtgtacgtattttcccagttt

SEQ ID NO: 133416 - DNA, 22 bp, synthetic construct
  misc_feature 1..22: note = chemically synthesized
  source 1..22: mol_type = other DNA
gtgtacgtattttcccagtttt

SEQ ID NO: 133417 - DNA, 22 bp, synthetic construct
  misc_feature 1..22: note = chemically synthesized
  source 1..22: mol_type = other DNA
tcccagttttctgtttgtcttg

SEQ ID NO: 133418 - DNA, 22 bp, synthetic construct
  misc_feature 1..22: note = chemically synthesized
  source 1..22: mol_type = other DNA
cccagttttctgtttgtcttgc

SEQ ID NO: 133419 - DNA, 22 bp, synthetic construct
  misc_feature 1..22: note = chemically synthesized
  source 1..22: mol_type = other DNA
ccagttttctgtttgtcttgct

SEQ ID NO: 133420 - DNA, 22 bp, synthetic construct
  misc_feature 1..22: note = chemically synthesized
  source 1..22: mol_type = other DNA
tctgtttgtcttgctatataca

SEQ ID NO: 133421 - DNA, 22 bp, synthetic construct
  misc_feature 1..22: note = chemically synthesized
  source 1..22: mol_type = other DNA
ctgtttgtcttgctatatacac

SEQ ID NO: 133422 - DNA, 22 bp, synthetic construct
  misc_feature 1..22: note = chemically synthesized
  source 1..22: mol_type = other DNA
tgtttgtcttgctatatacaca

SEQ ID NO: 133423 - DNA, 22 bp, synthetic construct
  misc_feature 1..22: note = chemically synthesized
  source 1..22: mol_type = other DNA
tttgtcttgctatatacacaat

SEQ ID NO: 133424 - DNA, 22 bp, synthetic construct
  misc_feature 1..22: note = chemically synthesized
  source 1..22: mol_type = other DNA
gtcttgctatatacacaattta

SEQ ID NO: 133425 - DNA, 22 bp, synthetic construct
  misc_feature 1..22: note = chemically synthesized
  source 1..22: mol_type = other DNA
tcttgctatatacacaatttaa

SEQ ID NO: 133426 - DNA, 22 bp, synthetic construct
  misc_feature 1..22: note = chemically synthesized
  source 1..22: mol_type = other DNA
gctatatacacaatttaaaagc

SEQ ID NO: 133427 - DNA, 22 bp, synthetic construct
  misc_feature 1..22: note = chemically synthesized
  source 1..22: mol_type = other DNA
ctatatacacaatttaaaagct

SEQ ID NO: 133428 - DNA, 22 bp, synthetic construct
  misc_feature 1..22: note = chemically synthesized
  source 1..22: mol_type = other DNA
tatacacaatttaaaagcttac

SEQ ID NO: 133429 - DNA, 22 bp, synthetic construct
  misc_feature 1..22: note = chemically synthesized
  source 1..22: mol_type = other DNA
aaaagcttacatatacattatt

SEQ ID NO: 133430 - DNA, 22 bp, synthetic construct
  misc_feature 1..22: note = chemically synthesized
  source 1..22: mol_type = other DNA
aaagcttacatatacattattt

SEQ ID NO: 133431 - DNA, 22 bp, synthetic construct
  misc_feature 1..22: note = chemically synthesized
  source 1..22: mol_type = other DNA
acatatacattattttattatt

SEQ ID NO: 133432 - DNA, 22 bp, synthetic construct
  misc_feature 1..22: note = chemically synthesized
  source 1..22: mol_type = other DNA
catatacattattttattattt

SEQ ID NO: 133433 - DNA, 22 bp, synthetic construct
  misc_feature 1..22: note = chemically synthesized
  source 1..22: mol_type = other DNA
ttttattatttactttatctac

SEQ ID NO: 133434 - DNA, 22 bp, synthetic construct
  misc_feature 1..22: note = chemically synthesized
  source 1..22: mol_type = other DNA
tattatttactttatctactga

SEQ ID NO: 133435 - DNA, 22 bp, synthetic construct
  misc_feature 1..22: note = chemically synthesized
  source 1..22: mol_type = other DNA
attatttactttatctactgaa

SEQ ID NO: 133436 - DNA, 22 bp, synthetic construct
  misc_feature 1..22: note = chemically synthesized
  source 1..22: mol_type = other DNA
ttatttactttatctactgaag

SEQ ID NO: 133437 - DNA, 22 bp, synthetic construct
  misc_feature 1..22: note = chemically synthesized
  source 1..22: mol_type = other DNA
tttactttatctactgaagtat

SEQ ID NO: 133438 - DNA, 22 bp, synthetic construct
  misc_feature 1..22: note = chemically synthesized
  source 1..22: mol_type = other DNA
actttatctactgaagtattgg

SEQ ID NO: 133439 - DNA, 22 bp, synthetic construct
  misc_feature 1..22: note = chemically synthesized
  source 1..22: mol_type = other DNA
ctttatctactgaagtattgga

SEQ ID NO: 133440 - DNA, 22 bp, synthetic construct
  misc_feature 1..22: note = chemically synthesized
  source 1..22: mol_type = other DNA
tatctactgaagtattggagcc

SEQ ID NO: 133441 - DNA, 22 bp, synthetic construct
  misc_feature 1..22: note = chemically synthesized
  source 1..22: mol_type = other DNA
atctactgaagtattggagcca

SEQ ID NO: 133442 - DNA, 22 bp, synthetic construct
  misc_feature 1..22: note = chemically synthesized
  source 1..22: mol_type = other DNA
tctactgaagtattggagccat

SEQ ID NO: 133443 - DNA, 22 bp, synthetic construct
  misc_feature 1..22: note = chemically synthesized
  source 1..22: mol_type = other DNA
ctgaagtattggagccatacta

SEQ ID NO: 133444 - DNA, 22 bp, synthetic construct
  misc_feature 1..22: note = chemically synthesized
  source 1..22: mol_type = other DNA
aagtattggagccatactatca

SEQ ID NO: 133445 - DNA, 22 bp, synthetic construct
  misc_feature 1..22: note = chemically synthesized
  source 1..22: mol_type = other DNA
gagccatactatcaaagccctt

SEQ ID NO: 133446 - DNA, 22 bp, synthetic construct
  misc_feature 1..22: note = chemically synthesized
  source 1..22: mol_type = other DNA
tcaaagcccttgctgacttcag

SEQ ID NO: 133447 - DNA, 22 bp, synthetic construct
  misc_feature 1..22: note = chemically synthesized
  source 1..22: mol_type = other DNA
gctgacttcaggtttatttata

SEQ ID NO: 133448 - DNA, 22 bp, synthetic construct
  misc_feature 1..22: note = chemically synthesized
  source 1..22: mol_type = other DNA
ctgacttcaggtttatttatat

SEQ ID NO: 133449 - DNA, 22 bp, synthetic construct
  misc_feature 1..22: note = chemically synthesized
  source 1..22: mol_type = other DNA
acttcaggtttatttatatctt

SEQ ID NO: 133450 - DNA, 22 bp, synthetic construct
  misc_feature 1..22: note = chemically synthesized
  source 1..22: mol_type = other DNA
caggtttatttatatctttttc

SEQ ID NO: 133451 - DNA, 22 bp, synthetic construct
  misc_feature 1..22: note = chemically synthesized
  source 1..22: mol_type = other DNA
aggtttatttatatctttttct

SEQ ID NO: 133452 - DNA, 22 bp, synthetic construct
  misc_feature 1..22: note = chemically synthesized
  source 1..22: mol_type = other DNA
atttatatctttttcttatact

SEQ ID NO: 133453 - DNA, 22 bp, synthetic construct
  misc_feature 1..22: note = chemically synthesized
  source 1..22: mol_type = other DNA
tttatatctttttcttatactt

SEQ ID NO: 133454 - DNA, 22 bp, synthetic construct
  misc_feature 1..22: note = chemically synthesized
  source 1..22: mol_type = other DNA
atatctttttcttatacttttg

SEQ ID NO: 133455 - DNA, 22 bp, synthetic construct
  misc_feature 1..22: note = chemically synthesized
  source 1..22: mol_type = other DNA
tatctttttcttatacttttgc

SEQ ID NO: 133456 - DNA, 22 bp, synthetic construct
  misc_feature 1..22: note = chemically synthesized
  source 1..22: mol_type = other DNA
tttcttatacttttgcctaatt

SEQ ID NO: 133457 - DNA, 22 bp, synthetic construct
  misc_feature 1..22: note = chemically synthesized
  source 1..22: mol_type = other DNA
ttcttatacttttgcctaattt

SEQ ID NO: 133458 - DNA, 22 bp, synthetic construct
  misc_feature 1..22: note = chemically synthesized
  source 1..22: mol_type = other DNA
tcttatacttttgcctaattta

SEQ ID NO: 133459 - DNA, 22 bp, synthetic construct
  misc_feature 1..22: note = chemically synthesized
  source 1..22: mol_type = other DNA
cttatacttttgcctaatttat

SEQ ID NO: 133460 - DNA, 22 bp, synthetic construct
  misc_feature 1..22: note = chemically synthesized
  source 1..22: mol_type = other DNA
ttatacttttgcctaatttatt

SEQ ID NO: 133461 - DNA, 22 bp, synthetic construct
  misc_feature 1..22: note = chemically synthesized
  source 1..22: mol_type = other DNA
atacttttgcctaatttatttg

SEQ ID NO: 133462 - DNA, 22 bp, synthetic construct
  misc_feature 1..22: note = chemically synthesized
  source 1..22: mol_type = other DNA
tacttttgcctaatttatttgt

SEQ ID NO: 133463 - DNA, 22 bp, synthetic construct
  misc_feature 1..22: note = chemically synthesized
  source 1..22: mol_type = other DNA
ttgcctaatttatttgtacata

SEQ ID NO: 133464 - DNA, 22 bp, synthetic construct
  misc_feature 1..22: note = chemically synthesized
  source 1..22: mol_type = other DNA
tgcctaatttatttgtacatat

SEQ ID NO: 133465 - DNA, 22 bp, synthetic construct
  misc_feature 1..22: note = chemically synthesized
  source 1..22: mol_type = other DNA
gcctaatttatttgtacatatc

SEQ ID NO: 133466 - DNA, 22 bp, synthetic construct
  misc_feature 1..22: note = chemically synthesized
  source 1..22: mol_type = other DNA
cctaatttatttgtacatatcc

SEQ ID NO: 133467 - DNA, 22 bp, synthetic construct
  misc_feature 1..22: note = chemically synthesized
  source 1..22: mol_type = other DNA
atttatttgtacatatcctatg

SEQ ID NO: 133468 - DNA, 22 bp, synthetic construct
  misc_feature 1..22: note = chemically synthesized
  source 1..22: mol_type = other DNA
atttgtacatatcctatgttta

SEQ ID NO: 133469 - DNA, 22 bp, synthetic construct
  misc_feature 1..22: note = chemically synthesized
  source 1..22: mol_type = other DNA
tttgtacatatcctatgtttaa

SEQ ID NO: 133470 - DNA, 22 bp, synthetic construct
  misc_feature 1..22: note = chemically synthesized
  source 1..22: mol_type = other DNA
gtacatatcctatgtttaaaag

SEQ ID NO: 133471 - DNA, 22 bp, synthetic construct
  misc_feature 1..22: note = chemically synthesized
  source 1..22: mol_type = other DNA
tacatatcctatgtttaaaagg

SEQ ID NO: 133472 - DNA, 22 bp, synthetic construct
  misc_feature 1..22: note = chemically synthesized
  source 1..22: mol_type = other DNA
tgtttaaaagggtttgtgtttg

SEQ ID NO: 133473 - DNA, 22 bp, synthetic construct
  misc_feature 1..22: note = chemically synthesized
  source 1..22: mol_type = other DNA
aaaagggtttgtgtttggagga

SEQ ID NO: 133474 - DNA, 22 bp, synthetic construct
  misc_feature 1..22: note = chemically synthesized
  source 1..22: mol_type = other DNA
aaagggtttgtgtttggaggag

SEQ ID NO: 133475 - DNA, 22 bp, synthetic construct
  misc_feature 1..22: note = chemically synthesized
  source 1..22: mol_type = other DNA
gtgtttggaggagagtaggact

SEQ ID NO: 133476 - DNA, 22 bp, synthetic construct
  misc_feature 1..22: note = chemically synthesized
  source 1..22: mol_type = other DNA
tgtttggaggagagtaggactt

SEQ ID NO: 133477 - DNA, 22 bp, synthetic construct
  misc_feature 1..22: note = chemically synthesized
  source 1..22: mol_type = other DNA
ggaggagagtaggactttaaat

SEQ ID NO: 133478 - DNA, 22 bp, synthetic construct
  misc_feature 1..22: note = chemically synthesized
  source 1..22: mol_type = other DNA
gaggagagtaggactttaaatc

SEQ ID NO: 133479 - DNA, 22 bp, synthetic construct
  misc_feature 1..22: note = chemically synthesized
  source 1..22: mol_type = other DNA
taaatcattcctcatgtgccta

SEQ ID NO: 133480 - DNA, 22 bp, synthetic construct
  misc_feature 1..22: note = chemically synthesized
  source 1..22: mol_type = other DNA
aaatcattcctcatgtgcctat

SEQ ID NO: 133481 - DNA, 22 bp, synthetic construct
  misc_feature 1..22: note = chemically synthesized
  source 1..22: mol_type = other DNA
aatcattcctcatgtgcctatt

SEQ ID NO: 133482 - DNA, 22 bp, synthetic construct
  misc_feature 1..22: note = chemically synthesized
  source 1..22: mol_type = other DNA
ctcatgtgcctattttcgtgga

SEQ ID NO: 133483 - DNA, 22 bp, synthetic construct
  misc_feature 1..22: note = chemically synthesized
  source 1..22: mol_type = other DNA
atgtgcctattttcgtggaaac

SEQ ID NO: 133484 - DNA, 22 bp, synthetic construct
  misc_feature 1..22: note = chemically synthesized
  source 1..22: mol_type = other DNA
ttttcgtggaaacaccactaat

SEQ ID NO: 133485 - DNA, 22 bp, synthetic construct
  misc_feature 1..22: note = chemically synthesized
  source 1..22: mol_type = other DNA
tcgtggaaacaccactaatatt

SEQ ID NO: 133486 - DNA, 22 bp, synthetic construct
  misc_feature 1..22: note = chemically synthesized
  source 1..22: mol_type = other DNA
cgtggaaacaccactaatattt

SEQ ID NO: 133487 - DNA, 22 bp, synthetic construct
  misc_feature 1..22: note = chemically synthesized
  source 1..22: mol_type = other DNA
gtggaaacaccactaatattta

SEQ ID NO: 133488 - DNA, 22 bp, synthetic construct
  misc_feature 1..22: note = chemically synthesized
  source 1..22: mol_type = other DNA
atatttaatcattcctttggtt

SEQ ID NO: 133489 - DNA, 22 bp, synthetic construct
  misc_feature 1..22: note = chemically synthesized
  source 1..22: mol_type = other DNA
aatcattcctttggttaatttt

SEQ ID NO: 133490 - DNA, 22 bp, synthetic construct
  misc_feature 1..22: note = chemically synthesized
  source 1..22: mol_type = other DNA
atcattcctttggttaattttt

SEQ ID NO: 133491 - DNA, 22 bp, synthetic construct
  misc_feature 1..22: note = chemically synthesized
  source 1..22: mol_type = other DNA
ctttggttaattttttaagggc

SEQ ID NO: 133492 - DNA, 22 bp, synthetic construct
  misc_feature 1..22: note = chemically synthesized
  source 1..22: mol_type = other DNA
tggttaattttttaagggcact

SEQ ID NO: 133493 - DNA, 22 bp, synthetic construct
  misc_feature 1..22: note = chemically synthesized
  source 1..22: mol_type = other DNA
ggttaattttttaagggcacta

SEQ ID NO: 133494 - DNA, 22 bp, synthetic construct
  misc_feature 1..22: note = chemically synthesized
  source 1..22: mol_type = other DNA
gttaattttttaagggcactat

SEQ ID NO: 133495 - DNA, 22 bp, synthetic construct
  misc_feature 1..22: note = chemically synthesized
  source 1..22: mol_type = other DNA
attttttaagggcactattatg

SEQ ID NO: 133496 - DNA, 22 bp, synthetic construct
  misc_feature 1..22: note = chemically synthesized
  source 1..22: mol_type = other DNA
tttaagggcactattatgggtc

SEQ ID NO: 133497 - DNA, 22 bp, synthetic construct
  misc_feature 1..22: note = chemically synthesized
  source 1..22: mol_type = other DNA
ttaagggcactattatgggtca

SEQ ID NO: 133498 - DNA, 22 bp, synthetic construct
  misc_feature 1..22: note = chemically synthesized
  source 1..22: mol_type = other DNA
taagggcactattatgggtcac

SEQ ID NO: 133499 - DNA, 22 bp, synthetic construct
  misc_feature 1..22: note = chemically synthesized
  source 1..22: mol_type = other DNA
aagggcactattatgggtcacc

SEQ ID NO: 133500 - DNA, 22 bp, synthetic construct
  misc_feature 1..22: note = chemically synthesized
  source 1..22: mol_type = other DNA
agggcactattatgggtcacct

SEQ ID NO: 133501 - DNA, 22 bp, synthetic construct
  misc_feature 1..22: note = chemically synthesized
  source 1..22: mol_type = other DNA
ttatgggtcaccttgctaagca

SEQ ID NO: 133502 - DNA, 22 bp, synthetic construct
  misc_feature 1..22: note = chemically synthesized
  source 1..22: mol_type = other DNA
tgggtcaccttgctaagcaaaa

SEQ ID NO: 133503 - DNA, 22 bp, synthetic construct
  misc_feature 1..22: note = chemically synthesized
  source 1..22: mol_type = other DNA
gctaagcaaaaatgatataaga

SEQ ID NO: 133504 - DNA, 22 bp, synthetic construct
  misc_feature 1..22: note = chemically synthesized
  source 1..22: mol_type = other DNA
ctaagcaaaaatgatataagag

SEQ ID NO: 133505 - DNA, 22 bp, synthetic construct
  misc_feature 1..22: note = chemically synthesized
  source 1..22: mol_type = other DNA
agcaaaaatgatataagagagc

SEQ ID NO: 133506 - DNA, 22 bp, synthetic construct
  misc_feature 1..22: note = chemically synthesized
  source 1..22: mol_type = other DNA
ttcttcttaaagtcttcaaata

SEQ ID NO: 133507 - DNA, 22 bp, synthetic construct
  misc_feature 1..22: note = chemically synthesized
  source 1..22: mol_type = other DNA
tcttcttaaagtcttcaaataa

SEQ ID NO: 133508 - DNA, 22 bp, synthetic construct
  misc_feature 1..22: note = chemically synthesized
  source 1..22: mol_type = other DNA
cttcttaaagtcttcaaataag

SEQ ID NO: 133509 - DNA, 22 bp, synthetic construct
  misc_feature 1..22: note = chemically synthesized
  source 1..22: mol_type = other DNA
ttcttaaagtcttcaaataagt

SEQ ID NO: 133510 - DNA, 22 bp, synthetic construct
  misc_feature 1..22: note = chemically synthesized
  source 1..22: mol_type = other DNA
cttaaagtcttcaaataagtgg

SEQ ID NO: 133511 - DNA, 22 bp, synthetic construct
  misc_feature 1..22: note = chemically synthesized
  source 1..22: mol_type = other DNA
ttaaagtcttcaaataagtggg

SEQ ID NO: 133512 - DNA, 22 bp, synthetic construct
  misc_feature 1..22: note = chemically synthesized
  source 1..22: mol_type = other DNA
aaagtcttcaaataagtgggga

SEQ ID NO: 133513 - DNA, 22 bp, synthetic construct
  misc_feature 1..22: note = chemically synthesized
  source 1..22: mol_type = other DNA
aagtcttcaaataagtggggac

SEQ ID NO: 133514 - DNA, 22 bp, synthetic construct
  misc_feature 1..22: note = chemically synthesized
  source 1..22: mol_type = other DNA
caaataagtggggactcaaaga

SEQ ID NO: 133515 - DNA, 22 bp, synthetic construct
  misc_feature 1..22: note = chemically synthesized
  source 1..22: mol_type = other DNA
aaataagtggggactcaaagaa

SEQ ID NO: 133516 - DNA, 22 bp, synthetic construct
  misc_feature 1..22: note = chemically synthesized
  source 1..22: mol_type = other DNA
aaagaataaaagaaatccaaat

SEQ ID NO: 133517 - DNA, 22 bp, synthetic construct
  misc_feature 1..22: note = chemically synthesized
  source 1..22: mol_type = other DNA
aaaacaagtgctgtgattaatc

SEQ ID NO: 133518 - DNA, 22 bp, synthetic construct
  misc_feature 1..22: note = chemically synthesized
  source 1..22: mol_type = other DNA
aaacaagtgctgtgattaatca

SEQ ID NO: 133519 - DNA, 22 bp, synthetic construct
  misc_feature 1..22: note = chemically synthesized
  source 1..22: mol_type = other DNA
tgattaatcataaagcagaaag

SEQ ID NO: 133520 - DNA, 22 bp, synthetic construct
  misc_feature 1..22: note = chemically synthesized
  source 1..22: mol_type = other DNA
atcataaagcagaaagaagaca

SEQ ID NO: 133521 - DNA, 22 bp, synthetic construct
  misc_feature 1..22: note = chemically synthesized
  source 1..22: mol_type = other DNA
aatggagagtgtgggtctcaaa

SEQ ID NO: 133522 - DNA, 22 bp, synthetic construct
  misc_feature 1..22: note = chemically synthesized
  source 1..22: mol_type = other DNA
aaaaaaggcttgaggttatggc

SEQ ID NO: 133523 - DNA, 22 bp, synthetic construct
  misc_feature 1..22: note = chemically synthesized
  source 1..22: mol_type = other DNA
gaggttatggcttgaaataagg

SEQ ID NO: 133524 - DNA, 22 bp, synthetic construct
  misc_feature 1..22: note = chemically synthesized
  source 1..22: mol_type = other DNA
aggttatggcttgaaataaggg

SEQ ID NO: 133525 - DNA, 22 bp, synthetic construct
  misc_feature 1..22: note = chemically synthesized
  source 1..22: mol_type = other DNA
tggcttgaaataagggtaagat

SEQ ID NO: 133526 - DNA, 22 bp, synthetic construct
  misc_feature 1..22: note = chemically synthesized
  source 1..22: mol_type = other DNA
gaaataagggtaagattccctg

SEQ ID NO: 133527 - DNA, 22 bp, synthetic construct
  misc_feature 1..22: note = chemically synthesized
  source 1..22: mol_type = other DNA
aaataagggtaagattccctga

SEQ ID NO: 133528 - DNA, 22 bp, synthetic construct
  misc_feature 1..22: note = chemically synthesized
  source 1..22: mol_type = other DNA
cctgagaaagtgtcccttcagc

SEQ ID NO: 133529 - DNA, 22 bp, synthetic construct
  misc_feature 1..22: note = chemically synthesized
  source 1..22: mol_type = other DNA
agaaagtgtcccttcagctgag

SEQ ID NO: 133530 - DNA, 22 bp, synthetic construct
  misc_feature 1..22: note = chemically synthesized
  source 1..22: mol_type = other DNA
cagctgagacctgaaaatggat

SEQ ID NO: 133531 - DNA, 22 bp, synthetic construct
  misc_feature 1..22: note = chemically synthesized
  source 1..22: mol_type = other DNA
agctgagacctgaaaatggatt

SEQ ID NO: 133532 - DNA, 22 bp, synthetic construct
  misc_feature 1..22: note = chemically synthesized
  source 1..22: mol_type = other DNA
agacctgaaaatggattagaaa

SEQ ID NO: 133533 - DNA, 22 bp, synthetic construct
  misc_feature 1..22: note = chemically synthesized
  source 1..22: mol_type = other DNA
aaaatggattagaaactaactg

SEQ ID NO: 133534 - DNA, 22 bp, synthetic construct
  misc_feature 1..22: note = chemically synthesized
  source 1..22: mol_type = other DNA
gaaactaactggtgaaaataca

SEQ ID NO: 133535 - DNA, 22 bp, synthetic construct
  misc_feature 1..22: note = chemically synthesized
  source 1..22: mol_type = other DNA
actggtgaaaatacagacaaga

SEQ ID NO: 133536 - DNA, 22 bp, synthetic construct
  misc_feature 1..22: note = chemically synthesized
  source 1..22: mol_type = other DNA
gtgaaaatacagacaagaatat

SEQ ID NO: 133537 - DNA, 22 bp, synthetic construct
  misc_feature 1..22: note = chemically synthesized
  source 1..22: mol_type = other DNA
taagactgaaggagtgtgtgtg

SEQ ID NO: 133538 - DNA, 22 bp, synthetic construct
  misc_feature 1..22: note = chemically synthesized
  source 1..22: mol_type = other DNA
agactgaaggagtgtgtgtgga

SEQ ID NO: 133539 - DNA, 22 bp, synthetic construct
  misc_feature 1..22: note = chemically synthesized
  source 1..22: mol_type = other DNA
aaggagtgtgtgtggagacctc

SEQ ID NO: 133540 - DNA, 22 bp, synthetic construct
  misc_feature 1..22: note = chemically synthesized
  source 1..22: mol_type = other DNA
agctaggttggtttatattagg

SEQ ID NO: 133541 - DNA, 22 bp, synthetic construct
  misc_feature 1..22: note = chemically synthesized
  source 1..22: mol_type = other DNA
ggttggtttatattagggaagg

SEQ ID NO: 133542 - DNA, 22 bp, synthetic construct
  misc_feature 1..22: note = chemically synthesized
  source 1..22: mol_type = other DNA
gtttatattagggaaggtggct

SEQ ID NO: 133543 - DNA, 22 bp, synthetic construct
  misc_feature 1..22: note = chemically synthesized
  source 1..22: mol_type = other DNA
atattagggaaggtggctactg

SEQ ID NO: 133544 - DNA, 22 bp, synthetic construct
  misc_feature 1..22: note = chemically synthesized
  source 1..22: mol_type = other DNA
tattagggaaggtggctactgg

SEQ ID NO: 133545 - DNA, 22 bp, synthetic construct
  misc_feature 1..22: note = chemically synthesized
  source 1..22: mol_type = other DNA
gggaaggtggctactggaagag

SEQ ID NO: 133546 - DNA, 22 bp, synthetic construct
  misc_feature 1..22: note = chemically synthesized
  source 1..22: mol_type = other DNA
ctggaagagggtgtttgctttg

SEQ ID NO: 133547 - DNA, 22 bp, synthetic construct
  misc_feature 1..22: note = chemically synthesized
  source 1..22: mol_type = other DNA
gaagagggtgtttgctttgaga

SEQ ID NO: 133548 - DNA, 22 bp, synthetic construct
  misc_feature 1..22: note = chemically synthesized
  source 1..22: mol_type = other DNA
gctttgagaagaggctgaagag

SEQ ID NO: 133549 - DNA, 22 bp, synthetic construct
  misc_feature 1..22: note = chemically synthesized
  source 1..22: mol_type = other DNA
ctttgagaagaggctgaagagg

SEQ ID NO: 133550 - DNA, 22 bp, synthetic construct
  misc_feature 1..22: note = chemically synthesized
  source 1..22: mol_type = other DNA
tgagaagaggctgaagagggaa

SEQ ID NO: 133551 - DNA, 22 bp, synthetic construct
  misc_feature 1..22: note = chemically synthesized
  source 1..22: mol_type = other DNA
gagaagaggctgaagagggaag

SEQ ID NO: 133552 - DNA, 22 bp, synthetic construct
  misc_feature 1..22: note = chemically synthesized
  source 1..22: mol_type = other DNA
agaagaggctgaagagggaagg

SEQ ID NO: 133553 - DNA, 22 bp, synthetic construct
  misc_feature 1..22: note = chemically synthesized
  source 1..22: mol_type = other DNA
aagagggaaggaatggccttat

SEQ ID NO: 133554 - DNA, 22 bp, synthetic construct
  misc_feature 1..22: note = chemically synthesized
  source 1..22: mol_type = other DNA
attggtcatcataagagtttga

SEQ ID NO: 133555 - DNA, 22 bp, synthetic construct
  misc_feature 1..22: note = chemically synthesized
  source 1..22: mol_type = other DNA
ttggtcatcataagagtttgag

SEQ ID NO: 133556 - DNA, 22 bp, synthetic construct
  misc_feature 1..22: note = chemically synthesized
  source 1..22: mol_type = other DNA
gtcatcataagagtttgagtct

SEQ ID NO: 133557 - DNA, 22 bp, synthetic construct
  misc_feature 1..22: note = chemically synthesized
  source 1..22: mol_type = other DNA
gagtctctactcggagtcatgg

SEQ ID NO: 133558 - DNA, 22 bp, synthetic construct
  misc_feature 1..22: note = chemically synthesized
  source 1..22: mol_type = other DNA
agtctctactcggagtcatgga

SEQ ID NO: 133559 - DNA, 22 bp, synthetic construct
  misc_feature 1..22: note = chemically synthesized
  source 1..22: mol_type = other DNA
tactcggagtcatggaaagcta

SEQ ID NO: 133560 - DNA, 22 bp, synthetic construct
  misc_feature 1..22: note = chemically synthesized
  source 1..22: mol_type = other DNA
ctcggagtcatggaaagctact

SEQ ID NO: 133561 - DNA, 22 bp, synthetic construct
  misc_feature 1..22: note = chemically synthesized
  source 1..22: mol_type = other DNA
ggagtcatggaaagctactgaa

SEQ ID NO: 133562 - DNA, 22 bp, synthetic construct
  misc_feature 1..22: note = chemically synthesized
  source 1..22: mol_type = other DNA
ctgaaagaagctgcataattca

SEQ ID NO: 133563 - DNA, 22 bp, synthetic construct
  misc_feature 1..22: note = chemically synthesized
  source 1..22: mol_type = other DNA
aaagaagctgcataattcattg

SEQ ID NO: 133564 - DNA, 22 bp, synthetic construct
  misc_feature 1..22: note = chemically synthesized
  source 1..22: mol_type = other DNA
cataattcattgatgttttaaa

SEQ ID NO: 133565 - DNA, 22 bp, synthetic construct
  misc_feature 1..22: note = chemically synthesized
  source 1..22: mol_type = other DNA
attgatgttttaaaattacttc

SEQ ID NO: 133566 - DNA, 22 bp, synthetic construct
  misc_feature 1..22: note = chemically synthesized
  source 1..22: mol_type = other DNA
atgttttaaaattacttcaata

SEQ ID NO: 133567 - DNA, 22 bp, synthetic construct
  misc_feature 1..22: note = chemically synthesized
  source 1..22: mol_type = other DNA
taaaattacttcaatattattt

SEQ ID NO: 133568 - DNA, 22 bp, synthetic construct
  misc_feature 1..22: note = chemically synthesized
  source 1..22: mol_type = other DNA
aaaattacttcaatattattta

SEQ ID NO: 133569 - DNA, 22 bp, synthetic construct
  misc_feature 1..22: note = chemically synthesized
  source 1..22: mol_type = other DNA
aaattacttcaatattatttat

SEQ ID NO: 133570 - DNA, 22 bp, synthetic construct
  misc_feature 1..22: note = chemically synthesized
  source 1..22: mol_type = other DNA
cttcaatattatttataaaatg

SEQ ID NO: 133571 - DNA, 22 bp, synthetic construct
  misc_feature 1..22: note = chemically synthesized
  source 1..22: mol_type = other DNA
caatattatttataaaatggaa

SEQ ID NO: 133572 - DNA, 22 bp, synthetic construct
  misc_feature 1..22: note = chemically synthesized
  source 1..22: mol_type = other DNA
aatattatttataaaatggaat

SEQ ID NO: 133573 - DNA, 22 bp, synthetic construct
  misc_feature 1..22: note = chemically synthesized
  source 1..22: mol_type = other DNA
tttataaaatggaattgaggga

SEQ ID NO: 133574 - DNA, 22 bp, synthetic construct
  misc_feature 1..22: note = chemically synthesized
  source 1..22: mol_type = other DNA
ataaaatggaattgagggaggc

SEQ ID NO: 133575 - DNA, 22 bp, synthetic construct
  misc_feature 1..22: note = chemically synthesized
  source 1..22: mol_type = other DNA
taaaatggaattgagggaggca

SEQ ID NO: 133576 - DNA, 22 bp, synthetic construct
  misc_feature 1..22: note = chemically synthesized
  source 1..22: mol_type = other DNA
agggaggcagggaaagggcaga

SEQ ID NO: 133577 - DNA, 22 bp, synthetic construct
  misc_feature 1..22: note = chemically synthesized
  source 1..22: mol_type = other DNA
gagtaatttgaagaaagataat

SEQ ID NO: 133578 - DNA, 22 bp, synthetic construct
  misc_feature 1..22: note = chemically synthesized
  source 1..22: mol_type = other DNA
gaagaaagataatagtaactca

SEQ ID NO: 133579 - DNA, 22 bp, synthetic construct
  misc_feature 1..22: note = chemically synthesized
  source 1..22: mol_type = other DNA
aagaaagataatagtaactcaa

SEQ ID NO: 133580 - DNA, 22 bp, synthetic construct
  misc_feature 1..22: note = chemically synthesized
  source 1..22: mol_type = other DNA
aatttaggaaagtggaaatggt

SEQ ID NO: 133581 - DNA, 22 bp, synthetic construct
  misc_feature 1..22: note = chemically synthesized
  source 1..22: mol_type = other DNA
aggaaagtggaaatggtaatgg

SEQ ID NO: 133582 - DNA, 22 bp, synthetic construct
  misc_feature 1..22: note = chemically synthesized
  source 1..22: mol_type = other DNA
ggaaagtggaaatggtaatgga

SEQ ID NO: 133583 - DNA, 22 bp, synthetic construct
  misc_feature 1..22: note = chemically synthesized
  source 1..22: mol_type = other DNA
aaggtctaaatataataaggtt

SEQ ID NO: 133584 - DNA, 22 bp, synthetic construct
  misc_feature 1..22: note = chemically synthesized
  source 1..22: mol_type = other DNA
aggtctaaatataataaggttt

SEQ ID NO: 133585 - DNA, 22 bp, synthetic construct
  misc_feature 1..22: note = chemically synthesized
  source 1..22: mol_type = other DNA
aatataataaggtttacaggtt

SEQ ID NO: 133586 - DNA, 22 bp, synthetic construct
  misc_feature 1..22: note = chemically synthesized
  source 1..22: mol_type = other DNA
acaggttatttagaaaagcaga

SEQ ID NO: 133587 - DNA, 22 bp, synthetic construct
  misc_feature 1..22: note = chemically synthesized
  source 1..22: mol_type = other DNA
caggttatttagaaaagcagag

SEQ ID NO: 133588 - DNA, 22 bp, synthetic construct
  misc_feature 1..22: note = chemically synthesized
  source 1..22: mol_type = other DNA
tttagaaaagcagaggaaagaa

SEQ ID NO: 133589 - DNA, 22 bp, synthetic construct
  misc_feature 1..22: note = chemically synthesized
  source 1..22: mol_type = other DNA
agaaaagcagaggaaagaaaga

SEQ ID NO: 133590 - DNA, 22 bp, synthetic construct
  misc_feature 1..22: note = chemically synthesized
  source 1..22: mol_type = other DNA
gaaaagcagaggaaagaaagag

SEQ ID NO: 133591 - DNA, 22 bp, synthetic construct
  misc_feature 1..22: note = chemically synthesized
  source 1..22: mol_type = other DNA
gaaaggagcaaaaatcaccatc

SEQ ID NO: 133592 - DNA, 22 bp, synthetic construct
  misc_feature 1..22: note = chemically synthesized
  source 1..22: mol_type = other DNA
ctgacatgttcttggaagaaag

SEQ ID NO: 133593 - DNA, 22 bp, synthetic construct
  misc_feature 1..22: note = chemically synthesized
  source 1..22: mol_type = other DNA
tgacatgttcttggaagaaagg

SEQ ID NO: 133594 - DNA, 22 bp, synthetic construct
  misc_feature 1..22: note = chemically synthesized
  source 1..22: mol_type = other DNA
acatgttcttggaagaaaggca

SEQ ID NO: 133595 - DNA, 22 bp, synthetic construct
  misc_feature 1..22: note = chemically synthesized
  source 1..22: mol_type = other DNA
ttggaagaaaggcagtgccaaa

SEQ ID NO: 133596 - DNA, 22 bp, synthetic construct
  misc_feature 1..22: note = chemically synthesized
  source 1..22: mol_type = other DNA
ggaagaaaggcagtgccaaaag

SEQ ID NO: 133597 - DNA, 22 bp, synthetic construct
  misc_feature 1..22: note = chemically synthesized
  source 1..22: mol_type = other DNA
gaagaaaggcagtgccaaaaga

SEQ ID NO: 133598 - DNA, 22 bp, synthetic construct
  misc_feature 1..22: note = chemically synthesized
  source 1..22: mol_type = other DNA
attatgtattgtctataaataa

SEQ ID NO: 133599 - DNA, 22 bp, synthetic construct
  misc_feature 1..22: note = chemically synthesized
  source 1..22: mol_type = other DNA
tgtattgtctataaataagaag

SEQ ID NO: 133600 - DNA, 22 bp, synthetic construct
  misc_feature 1..22: note = chemically synthesized
  source 1..22: mol_type = other DNA
tctataaataagaagaatcatt

SEQ ID NO: 133601 - DNA, 22 bp, synthetic construct
  misc_feature 1..22: note = chemically synthesized
  source 1..22: mol_type = other DNA
taaataagaagaatcattataa

SEQ ID NO: 133602 - DNA, 22 bp, synthetic construct
  misc_feature 1..22: note = chemically synthesized
  source 1..22: mol_type = other DNA
taatttttaaagttgtgggaca

SEQ ID NO: 133603 - DNA, 22 bp, synthetic construct
  misc_feature 1..22: note = chemically synthesized
  source 1..22: mol_type = other DNA
ttaaagttgtgggacactgaga

SEQ ID NO: 133604 - DNA, 22 bp, synthetic construct
  misc_feature 1..22: note = chemically synthesized
  source 1..22: mol_type = other DNA
taaagttgtgggacactgagaa

SEQ ID NO: 133605 - DNA, 22 bp, synthetic construct
  misc_feature 1..22: note = chemically synthesized
  source 1..22: mol_type = other DNA
aaagttgtgggacactgagaat

SEQ ID NO: 133606 - DNA, 22 bp, synthetic construct
  misc_feature 1..22: note = chemically synthesized
  source 1..22: mol_type = other DNA
aagttgtgggacactgagaatg

SEQ ID NO: 133607 - DNA, 22 bp, synthetic construct
  misc_feature 1..22: note = chemically synthesized
  source 1..22: mol_type = other DNA
tgggacactgagaatgagtcaa

SEQ ID NO: 133608 - DNA, 22 bp, synthetic construct
  misc_feature 1..22: note = chemically synthesized
  source 1..22: mol_type = other DNA
agaatgagtcaaaataataaac

SEQ ID NO: 133609 - DNA, 22 bp, synthetic construct
  misc_feature 1..22: note = chemically synthesized
  source 1..22: mol_type = other DNA
aagaaagcaattgaaggaagta

SEQ ID NO: 133610 - DNA, 22 bp, synthetic construct
  misc_feature 1..22: note = chemically synthesized
  source 1..22: mol_type = other DNA
agaaagcaattgaaggaagtat

SEQ ID NO: 133611 - DNA, 22 bp, synthetic construct
  misc_feature 1..22: note = chemically synthesized
  source 1..22: mol_type = other DNA
aaggaagtatttcaaactgtag

SEQ ID NO: 133612 - DNA, 22 bp, synthetic construct
  misc_feature 1..22: note = chemically synthesized
  source 1..22: mol_type = other DNA
caaactgtagaactagactttt

SEQ ID NO: 133613 - DNA, 22 bp, synthetic construct
  misc_feature 1..22: note = chemically synthesized
  source 1..22: mol_type = other DNA
aaactgtagaactagactttta

SEQ ID NO: 133614 - DNA, 22 bp, synthetic construct
  misc_feature 1..22: note = chemically synthesized
  source 1..22: mol_type = other DNA
tagaactagacttttaaaaaca

SEQ ID NO: 133615 - DNA, 22 bp, synthetic construct
  misc_feature 1..22: note = chemically synthesized
  source 1..22: mol_type = other DNA
gacttttaaaaacaaaatatta

SEQ ID NO: 133616 - DNA, 22 bp, synthetic construct
  misc_feature 1..22: note = chemically synthesized
  source 1..22: mol_type = other DNA
ttaaaaacaaaatattagctta

SEQ ID NO: 133617 - DNA, 22 bp, synthetic construct
  misc_feature 1..22: note = chemically synthesized
  source 1..22: mol_type = other DNA
taaaaacaaaatattagcttaa

SEQ ID NO: 133618 - DNA, 22 bp, synthetic construct
  misc_feature 1..22: note = chemically synthesized
  source 1..22: mol_type = other DNA
aaaaacaaaatattagcttaat

SEQ ID NO: 133619 - DNA, 22 bp, synthetic construct
  misc_feature 1..22: note = chemically synthesized
  source 1..22: mol_type = other DNA
aaaacaaaatattagcttaata

SEQ ID NO: 133620 - DNA, 22 bp, synthetic construct
  misc_feature 1..22: note = chemically synthesized
  source 1..22: mol_type = other DNA
gcttaataattaaaaaaatcat

SEQ ID NO: 133621 - DNA, 22 bp, synthetic construct
  misc_feature 1..22: note = chemically synthesized
  source 1..22: mol_type = other DNA
aataattaaaaaaatcattcat

SEQ ID NO: 133622 - DNA, 22 bp, synthetic construct
  misc_feature 1..22: note = chemically synthesized
  source 1..22: mol_type = other DNA
ataattaaaaaaatcattcatt

SEQ ID NO: 133623 - DNA, 22 bp, synthetic construct
  misc_feature 1..22: note = chemically synthesized
  source 1..22: mol_type = other DNA
aaaaaatcattcattcaaatca

SEQ ID NO: 133624 - DNA, 22 bp, synthetic construct
  misc_feature 1..22: note = chemically synthesized
  source 1..22: mol_type = other DNA
attcaaatcatttcagtatgta

SEQ ID NO: 133625 - DNA, 22 bp, synthetic construct
  misc_feature 1..22: note = chemically synthesized
  source 1..22: mol_type = other DNA
aaatcatttcagtatgtatttc

SEQ ID NO: 133626 - DNA, 22 bp, synthetic construct
  misc_feature 1..22: note = chemically synthesized
  source 1..22: mol_type = other DNA
cagtatgtatttctttttgcct

SEQ ID NO: 133627 - DNA, 22 bp, synthetic construct
  misc_feature 1..22: note = chemically synthesized
  source 1..22: mol_type = other DNA
agtatgtatttctttttgcctg

SEQ ID NO: 133628 - DNA, 22 bp, synthetic construct
  misc_feature 1..22: note = chemically synthesized
  source 1..22: mol_type = other DNA
ctttttgcctgatcatgaagag

SEQ ID NO: 133629 - DNA, 22 bp, synthetic construct
  misc_feature 1..22: note = chemically synthesized
  source 1..22: mol_type = other DNA
tttttgcctgatcatgaagagt

SEQ ID NO: 133630 - DNA, 22 bp, synthetic construct
  misc_feature 1..22: note = chemically synthesized
  source 1..22: mol_type = other DNA
tttgcctgatcatgaagagtca

SEQ ID NO: 133631 - DNA, 22 bp, synthetic construct
  misc_feature 1..22: note = chemically synthesized
  source 1..22: mol_type = other DNA
ttgcctgatcatgaagagtcat

SEQ ID NO: 133632 - DNA, 22 bp, synthetic construct
  misc_feature 1..22: note = chemically synthesized
  source 1..22: mol_type = other DNA
tgcctgatcatgaagagtcata

SEQ ID NO: 133633 - DNA, 22 bp, synthetic construct
  misc_feature 1..22: note = chemically synthesized
  source 1..22: mol_type = other DNA
gcctgatcatgaagagtcatag

SEQ ID NO: 133634 - DNA, 22 bp, synthetic construct
  misc_feature 1..22: note = chemically synthesized
  source 1..22: mol_type = other DNA
cctgatcatgaagagtcatagt

SEQ ID NO: 133635 - DNA, 22 bp, synthetic construct
  misc_feature 1..22: note = chemically synthesized
  source 1..22: mol_type = other DNA
atcatgaagagtcatagtaaag

SEQ ID NO: 133636 - DNA, 22 bp, synthetic construct
  misc_feature 1..22: note = chemically synthesized
  source 1..22: mol_type = other DNA
acagatgcaagacaacagaaac

SEQ ID NO: 133637 - DNA, 22 bp, synthetic construct
  misc_feature 1..22: note = chemically synthesized
  source 1..22: mol_type = other DNA
cagatgcaagacaacagaaaca

SEQ ID NO: 133638 - DNA, 22 bp, synthetic construct
  misc_feature 1..22: note = chemically synthesized
  source 1..22: mol_type = other DNA
aagcagatgacacccaaagaag

SEQ ID NO: 133639 - DNA, 22 bp, synthetic construct
  misc_feature 1..22: note = chemically synthesized
  source 1..22: mol_type = other DNA
actatcctaggagaaagcagga

SEQ ID NO: 133640 - DNA, 22 bp, synthetic construct
  misc_feature 1..22: note = chemically synthesized
  source 1..22: mol_type = other DNA
tcctaggagaaagcaggataga

SEQ ID NO: 133641 - DNA, 22 bp, synthetic construct
  misc_feature 1..22: note = chemically synthesized
  source 1..22: mol_type = other DNA
ggagaaagcaggatagatccgg

SEQ ID NO: 133642 - DNA, 22 bp, synthetic construct
  misc_feature 1..22: note = chemically synthesized
  source 1..22: mol_type = other DNA
ttcttgggtgtcattcactgaa

SEQ ID NO: 133643 - DNA, 22 bp, synthetic construct
  misc_feature 1..22: note = chemically synthesized
  source 1..22: mol_type = other DNA
tcttgggtgtcattcactgaag

SEQ ID NO: 133644 - DNA, 22 bp, synthetic construct
  misc_feature 1..22: note = chemically synthesized
  source 1..22: mol_type = other DNA
cttgggtgtcattcactgaagt

SEQ ID NO: 133645 - DNA, 22 bp, synthetic construct
  misc_feature 1..22: note = chemically synthesized
  source 1..22: mol_type = other DNA
ttgggtgtcattcactgaagta

SEQ ID NO: 133646 - DNA, 22 bp, synthetic construct
  misc_feature 1..22: note = chemically synthesized
  source 1..22: mol_type = other DNA
gggtgtcattcactgaagtaga

SEQ ID NO: 133647 - DNA, 22 bp, synthetic construct
  misc_feature 1..22: note = chemically synthesized
  source 1..22: mol_type = other DNA
ggtgtcattcactgaagtagac

SEQ ID NO: 133648 - DNA, 22 bp, synthetic construct
  misc_feature 1..22: note = chemically synthesized
  source 1..22: mol_type = other DNA
actgaagtagacccagttttaa

SEQ ID NO: 133649 - DNA, 22 bp, synthetic construct
  misc_feature 1..22: note = chemically synthesized
  source 1..22: mol_type = other DNA
aagtagacccagttttaaaata

SEQ ID NO: 133650 - DNA, 22 bp, synthetic construct
  misc_feature 1..22: note = chemically synthesized
  source 1..22: mol_type = other DNA
taaaatagcagtccaaaaaata

SEQ ID NO: 133651 - DNA, 22 bp, synthetic construct
  misc_feature 1..22: note = chemically synthesized
  source 1..22: mol_type = other DNA
aaaatagcagtccaaaaaatac

SEQ ID NO: 133652 - DNA, 22 bp, synthetic construct
  misc_feature 1..22: note = chemically synthesized
  source 1..22: mol_type = other DNA
aaatagcagtccaaaaaatact

SEQ ID NO: 133653 - DNA, 22 bp, synthetic construct
  misc_feature 1..22: note = chemically synthesized
  source 1..22: mol_type = other DNA
ccaaacgtgagataatatatca

SEQ ID NO: 133654 - DNA, 22 bp, synthetic construct
  misc_feature 1..22: note = chemically synthesized
  source 1..22: mol_type = other DNA
tatgatacaactggttagagcc

SEQ ID NO: 133655 - DNA, 22 bp, synthetic construct
  misc_feature 1..22: note = chemically synthesized
  source 1..22: mol_type = other DNA
gttagagccagataatctgata

SEQ ID NO: 133656 - DNA, 22 bp, synthetic construct
  misc_feature 1..22: note = chemically synthesized
  source 1..22: mol_type = other DNA
gagccagataatctgatacaaa

SEQ ID NO: 133657 - DNA, 22 bp, synthetic construct
  misc_feature 1..22: note = chemically synthesized
  source 1..22: mol_type = other DNA
atacaaacataaataggaagat

SEQ ID NO: 133658 - DNA, 22 bp, synthetic construct
  misc_feature 1..22: note = chemically synthesized
  source 1..22: mol_type = other DNA
actaaattctgaattaccagat

SEQ ID NO: 133659 - DNA, 22 bp, synthetic construct
  misc_feature 1..22: note = chemically synthesized
  source 1..22: mol_type = other DNA
aattctgaattaccagatgagt

SEQ ID NO: 133660 - DNA, 22 bp, synthetic construct
  misc_feature 1..22: note = chemically synthesized
  source 1..22: mol_type = other DNA
tgaattaccagatgagtaaata

SEQ ID NO: 133661 - DNA, 22 bp, synthetic construct
  misc_feature 1..22: note = chemically synthesized
  source 1..22: mol_type = other DNA
aattaccagatgagtaaataac

SEQ ID NO: 133662 - DNA, 22 bp, synthetic construct
  misc_feature 1..22: note = chemically synthesized
  source 1..22: mol_type = other DNA
ccagatgagtaaataacaagaa

SEQ ID NO: 133663 - DNA, 22 bp, synthetic construct
  misc_feature 1..22: note = chemically synthesized
  source 1..22: mol_type = other DNA
attgaaaaatgaagttttttca

SEQ ID NO: 133664 - DNA, 22 bp, synthetic construct
  misc_feature 1..22: note = chemically synthesized
  source 1..22: mol_type = other DNA
ttgaaaaatgaagttttttcat

SEQ ID NO: 133665 - DNA, 22 bp, synthetic construct
  misc_feature 1..22: note = chemically synthesized
  source 1..22: mol_type = other DNA
aaaaatgaagttttttcatgag

SEQ ID NO: 133666 - DNA, 22 bp, synthetic construct
  misc_feature 1..22: note = chemically synthesized
  source 1..22: mol_type = other DNA
tttcatgagtgcttatgttagt

SEQ ID NO: 133667 - DNA, 22 bp, synthetic construct
  misc_feature 1..22: note = chemically synthesized
  source 1..22: mol_type = other DNA
ttcatgagtgcttatgttagtt

SEQ ID NO: 133668 - DNA, 22 bp, synthetic construct
  misc_feature 1..22: note = chemically synthesized
  source 1..22: mol_type = other DNA
tcatgagtgcttatgttagtta

SEQ ID NO: 133669 - DNA, 22 bp, synthetic construct
  misc_feature 1..22: note = chemically synthesized
  source 1..22: mol_type = other DNA
catgagtgcttatgttagttac

SEQ ID NO: 133670 - DNA, 22 bp, synthetic construct
  misc_feature 1..22: note = chemically synthesized
  source 1..22: mol_type = other DNA
atgagtgcttatgttagttacc

SEQ ID NO: 133671 - DNA, 22 bp, synthetic construct
  misc_feature 1..22: note = chemically synthesized
  source 1..22: mol_type = other DNA
atgttagttaccctagatttgc

SEQ ID NO: 133672 - DNA, 22 bp, synthetic construct
  misc_feature 1..22: note = chemically synthesized
  source 1..22: mol_type = other DNA
tgttagttaccctagatttgcg

SEQ ID NO: 133673 - DNA, 22 bp, synthetic construct
  misc_feature 1..22: note = chemically synthesized
  source 1..22: mol_type = other DNA
gttaccctagatttgcggcatg

SEQ ID NO: 133674 - DNA, 22 bp, synthetic construct
  misc_feature 1..22: note = chemically synthesized
  source 1..22: mol_type = other DNA
ccctagatttgcggcatgcctt

SEQ ID NO: 133675 - DNA, 22 bp, synthetic construct
  misc_feature 1..22: note = chemically synthesized
  source 1..22: mol_type = other DNA
gatttgcggcatgccttcacag

SEQ ID NO: 133676 - DNA, 22 bp, synthetic construct
  misc_feature 1..22: note = chemically synthesized
  source 1..22: mol_type = other DNA
gcggcatgccttcacagatgtc

SEQ ID NO: 133677 - DNA, 22 bp, synthetic construct
  misc_feature 1..22: note = chemically synthesized
  source 1..22: mol_type = other DNA
cggcatgccttcacagatgtcc

SEQ ID NO: 133678 - DNA, 22 bp, synthetic construct
  misc_feature 1..22: note = chemically synthesized
  source 1..22: mol_type = other DNA
cacagatgtccaatcatagata

SEQ ID NO: 133679 - DNA, 22 bp, synthetic construct
  misc_feature 1..22: note = chemically synthesized
  source 1..22: mol_type = other DNA
acagatgtccaatcatagatat

SEQ ID NO: 133680 - DNA, 22 bp, synthetic construct
  misc_feature 1..22: note = chemically synthesized
  source 1..22: mol_type = other DNA
gaggaggaccatatggaactga

SEQ ID NO: 133681 - DNA, 22 bp, synthetic construct
  misc_feature 1..22: note = chemically synthesized
  source 1..22: mol_type = other DNA
aggaggaccatatggaactgaa

SEQ ID NO: 133682 - DNA, 22 bp, synthetic construct
  misc_feature 1..22: note = chemically synthesized
  source 1..22: mol_type = other DNA
aaaataatctatgcttgattct

SEQ ID NO: 133683 - DNA, 22 bp, synthetic construct
  misc_feature 1..22: note = chemically synthesized
  source 1..22: mol_type = other DNA
tgcttgattctttctctcaagt

SEQ ID NO: 133684 - DNA, 22 bp, synthetic construct
  misc_feature 1..22: note = chemically synthesized
  source 1..22: mol_type = other DNA
gattctttctctcaagtgaaat

SEQ ID NO: 133685 - DNA, 22 bp, synthetic construct
  misc_feature 1..22: note = chemically synthesized
  source 1..22: mol_type = other DNA
attctttctctcaagtgaaatt

SEQ ID NO: 133686 - DNA, 22 bp, synthetic construct
  misc_feature 1..22: note = chemically synthesized
  source 1..22: mol_type = other DNA
tttctctcaagtgaaattgttg

SEQ ID NO: 133687 - DNA, 22 bp, synthetic construct
  misc_feature 1..22: note = chemically synthesized
  source 1..22: mol_type = other DNA
tctctcaagtgaaattgttgag

SEQ ID NO: 133688 - DNA, 22 bp, synthetic construct
  misc_feature 1..22: note = chemically synthesized
  source 1..22: mol_type = other DNA
ctctcaagtgaaattgttgagt

SEQ ID NO: 133689 - DNA, 22 bp, synthetic construct
  misc_feature 1..22: note = chemically synthesized
  source 1..22: mol_type = other DNA
tctcaagtgaaattgttgagtc

SEQ ID NO: 133690 - DNA, 22 bp, synthetic construct
  misc_feature 1..22: note = chemically synthesized
  source 1..22: mol_type = other DNA
tcaagtgaaattgttgagtcaa

SEQ ID NO: 133691 - DNA, 22 bp, synthetic construct
  misc_feature 1..22: note = chemically synthesized
  source 1..22: mol_type = other DNA
aagtgaaattgttgagtcaacc

SEQ ID NO: 133692 - DNA, 22 bp, synthetic construct
  misc_feature 1..22: note = chemically synthesized
  source 1..22: mol_type = other DNA
ttgagtcaaccatcctattcta

SEQ ID NO: 133693 - DNA, 22 bp, synthetic construct
  misc_feature 1..22: note = chemically synthesized
  source 1..22: mol_type = other DNA
agtcaaccatcctattctattt

SEQ ID NO: 133694 - DNA, 22 bp, synthetic construct
  misc_feature 1..22: note = chemically synthesized
  source 1..22: mol_type = other DNA
ttctatttattaaaatcaaata

SEQ ID NO: 133695 - DNA, 22 bp, synthetic construct
  misc_feature 1..22: note = chemically synthesized
  source 1..22: mol_type = other DNA
tatttattaaaatcaaataaat

SEQ ID NO: 133696 - DNA, 22 bp, synthetic construct
  misc_feature 1..22: note = chemically synthesized
  source 1..22: mol_type = other DNA
tttattaaaatcaaataaatgg

SEQ ID NO: 133697 - DNA, 22 bp, synthetic construct
  misc_feature 1..22: note = chemically synthesized
  source 1..22: mol_type = other DNA
attaaaatcaaataaatggtct

SEQ ID NO: 133698 - DNA, 22 bp, synthetic construct
  misc_feature 1..22: note = chemically synthesized
  source 1..22: mol_type = other DNA
ttaaaatcaaataaatggtctt

SEQ ID NO: 133699 - DNA, 22 bp, synthetic construct
  misc_feature 1..22: note = chemically synthesized
  source 1..22: mol_type = other DNA
aaatcaaataaatggtctttaa

SEQ ID NO: 133700 - DNA, 22 bp, synthetic construct
  misc_feature 1..22: note = chemically synthesized
  source 1..22: mol_type = other DNA
taagatataagagactttatcc

SEQ ID NO: 133701 - DNA, 22 bp, synthetic construct
  misc_feature 1..22: note = chemically synthesized
  source 1..22: mol_type = other DNA
aagatataagagactttatcct

SEQ ID NO: 133702 - DNA, 22 bp, synthetic construct
  misc_feature 1..22: note = chemically synthesized
  source 1..22: mol_type = other DNA
agatataagagactttatccta

SEQ ID NO: 133703 - DNA, 22 bp, synthetic construct
  misc_feature 1..22: note = chemically synthesized
  source 1..22: mol_type = other DNA
tatcctagtatgtatatatata

SEQ ID NO: 133704 - DNA, 22 bp, synthetic construct
  misc_feature 1..22: note = chemically synthesized
  source 1..22: mol_type = other DNA
atcctagtatgtatatatatag

SEQ ID NO: 133705 - DNA, 22 bp, synthetic construct
  misc_feature 1..22: note = chemically synthesized
  source 1..22: mol_type = other DNA
tcctagtatgtatatatatagt

SEQ ID NO: 133706 - DNA, 22 bp, synthetic construct
  misc_feature 1..22: note = chemically synthesized
  source 1..22: mol_type = other DNA
gtatgtatatatatagttgtgt

SEQ ID NO: 133707 - DNA, 22 bp, synthetic construct
  misc_feature 1..22: note = chemically synthesized
  source 1..22: mol_type = other DNA
tgtttgcatgtgtgtgtggaca

SEQ ID NO: 133708 - DNA, 22 bp, synthetic construct
  misc_feature 1..22: note = chemically synthesized
  source 1..22: mol_type = other DNA
gcatgtgtgtgtggacacctgc

SEQ ID NO: 133709 - DNA, 22 bp, synthetic construct
  misc_feature 1..22: note = chemically synthesized
  source 1..22: mol_type = other DNA
catgtgtgtgtggacacctgca

SEQ ID NO: 133710 - DNA, 22 bp, synthetic construct
  misc_feature 1..22: note = chemically synthesized
  source 1..22: mol_type = other DNA
cacatgtggaataaatctttta

SEQ ID NO: 133711 - DNA, 22 bp, synthetic construct
  misc_feature 1..22: note = chemically synthesized
  source 1..22: mol_type = other DNA
ttaatattttatcttagacata

SEQ ID NO: 133712 - DNA, 22 bp, synthetic construct
  misc_feature 1..22: note = chemically synthesized
  source 1..22: mol_type = other DNA
taatattttatcttagacataa

SEQ ID NO: 133713 - DNA, 22 bp, synthetic construct
  misc_feature 1..22: note = chemically synthesized
  source 1..22: mol_type = other DNA
aatattttatcttagacataat

SEQ ID NO: 133714 - DNA, 22 bp, synthetic construct
  misc_feature 1..22: note = chemically synthesized
  source 1..22: mol_type = other DNA
atattttatcttagacataatt

SEQ ID NO: 133715 - DNA, 22 bp, synthetic construct
  misc_feature 1..22: note = chemically synthesized
  source 1..22: mol_type = other DNA
tatcttagacataatttttaac

SEQ ID NO: 133716 - DNA, 22 bp, synthetic construct
  misc_feature 1..22: note = chemically synthesized
  source 1..22: mol_type = other DNA
atcttagacataatttttaacc

SEQ ID NO: 133717 - DNA, 22 bp, synthetic construct
  misc_feature 1..22: note = chemically synthesized
  source 1..22: mol_type = other DNA
tcttagacataatttttaacct

SEQ ID NO: 133718 - DNA, 22 bp, synthetic construct
  misc_feature 1..22: note = chemically synthesized
  source 1..22: mol_type = other DNA
agacataatttttaacctcaaa

SEQ ID NO: 133719 - DNA, 22 bp, synthetic construct
  misc_feature 1..22: note = chemically synthesized
  source 1..22: mol_type = other DNA
gacataatttttaacctcaaac

SEQ ID NO: 133720 - DNA, 22 bp, synthetic construct
  misc_feature 1..22: note = chemically synthesized
  source 1..22: mol_type = other DNA
ttaacctcaaactcttgttttt

SEQ ID NO: 133721 - DNA, 22 bp, synthetic construct
  misc_feature 1..22: note = chemically synthesized
  source 1..22: mol_type = other DNA
taacctcaaactcttgttttta

SEQ ID NO: 133722 - DNA, 22 bp, synthetic construct
  misc_feature 1..22: note = chemically synthesized
  source 1..22: mol_type = other DNA
aacctcaaactcttgtttttaa

SEQ ID NO: 133723 - DNA, 22 bp, synthetic construct
  misc_feature 1..22: note = chemically synthesized
  source 1..22: mol_type = other DNA
acctcaaactcttgtttttaaa

SEQ ID NO: 133724 - DNA, 22 bp, synthetic construct
  misc_feature 1..22: note = chemically synthesized
  source 1..22: mol_type = other DNA
aaactcttgtttttaaaccttt

SEQ ID NO: 133725 - DNA, 22 bp, synthetic construct
  misc_feature 1..22: note = chemically synthesized
  source 1..22: mol_type = other DNA
ttgtttttaaacctttcacaat

SEQ ID NO: 133726 - DNA, 22 bp, synthetic construct
  misc_feature 1..22: note = chemically synthesized
  source 1..22: mol_type = other DNA
gtttttaaacctttcacaataa

SEQ ID NO: 133727 - DNA, 22 bp, synthetic construct
  misc_feature 1..22: note = chemically synthesized
  source 1..22: mol_type = other DNA
tttttaaacctttcacaataaa

SEQ ID NO: 133728 - DNA, 22 bp, synthetic construct
  misc_feature 1..22: note = chemically synthesized
  source 1..22: mol_type = other DNA
ttaaacctttcacaataaattt

SEQ ID NO: 133729 - DNA, 22 bp, synthetic construct
  misc_feature 1..22: note = chemically synthesized
  source 1..22: mol_type = other DNA
taaacctttcacaataaattta

SEQ ID NO: 133730 - DNA, 22 bp, synthetic construct
  misc_feature 1..22: note = chemically synthesized
  source 1..22: mol_type = other DNA
aaacctttcacaataaatttaa

SEQ ID NO: 133731 - DNA, 22 bp, synthetic construct
  misc_feature 1..22: note = chemically synthesized
  source 1..22: mol_type = other DNA
aacctttcacaataaatttaat

SEQ ID NO: 133732 - DNA, 22 bp, synthetic construct
  misc_feature 1..22: note = chemically synthesized
  source 1..22: mol_type = other DNA
tcacaataaatttaatgaattg

SEQ ID NO: 133733 - DNA, 22 bp, synthetic construct
  misc_feature 1..22: note = chemically synthesized
  source 1..22: mol_type = other DNA
cacaataaatttaatgaattga

SEQ ID NO: 133734 - DNA, 22 bp, synthetic construct
  misc_feature 1..22: note = chemically synthesized
  source 1..22: mol_type = other DNA
acaataaatttaatgaattgaa

SEQ ID NO: 133735 - DNA, 22 bp, synthetic construct
  misc_feature 1..22: note = chemically synthesized
  source 1..22: mol_type = other DNA
aatgaattgaaatacatttatt

SEQ ID NO: 133736 - DNA, 22 bp, synthetic construct
  misc_feature 1..22: note = chemically synthesized
  source 1..22: mol_type = other DNA
atgaattgaaatacatttattg

SEQ ID NO: 133737 - DNA, 22 bp, synthetic construct
  misc_feature 1..22: note = chemically synthesized
  source 1..22: mol_type = other DNA
aaatacatttattgttttattt

SEQ ID NO: 133738 - DNA, 22 bp, synthetic construct
  misc_feature 1..22: note = chemically synthesized
  source 1..22: mol_type = other DNA
attgttttatttttatagtggt

SEQ ID NO: 133739 - DNA, 22 bp, synthetic construct
  misc_feature 1..22: note = chemically synthesized
  source 1..22: mol_type = other DNA
ttgttttatttttatagtggta

SEQ ID NO: 133740 - DNA, 22 bp, synthetic construct
  misc_feature 1..22: note = chemically synthesized
  source 1..22: mol_type = other DNA
ttttatttttatagtggtaata

SEQ ID NO: 133741 - DNA, 22 bp, synthetic construct
  misc_feature 1..22: note = chemically synthesized
  source 1..22: mol_type = other DNA
tatttttatagtggtaatatat

SEQ ID NO: 133742 - DNA, 22 bp, synthetic construct
  misc_feature 1..22: note = chemically synthesized
  source 1..22: mol_type = other DNA
atttttatagtggtaatatata

SEQ ID NO: 133743 - DNA, 22 bp, synthetic construct
  misc_feature 1..22: note = chemically synthesized
  source 1..22: mol_type = other DNA
tttttatagtggtaatatatac

SEQ ID NO: 133744 - DNA, 22 bp, synthetic construct
  misc_feature 1..22: note = chemically synthesized
  source 1..22: mol_type = other DNA
ttatagtggtaatatatacaat

SEQ ID NO: 133745 - DNA, 22 bp, synthetic construct
  misc_feature 1..22: note = chemically synthesized
  source 1..22: mol_type = other DNA
tatagtggtaatatatacaatt

SEQ ID NO: 133746 - DNA, 22 bp, synthetic construct
  misc_feature 1..22: note = chemically synthesized
  source 1..22: mol_type = other DNA
atagtggtaatatatacaattt

SEQ ID NO: 133747 - DNA, 22 bp, synthetic construct
  misc_feature 1..22: note = chemically synthesized
  source 1..22: mol_type = other DNA
tagtggtaatatatacaatttg

SEQ ID NO: 133748 - DNA, 22 bp, synthetic construct
  misc_feature 1..22: note = chemically synthesized
  source 1..22: mol_type = other DNA
gccactttagcctttttataat

SEQ ID NO: 133749 - DNA, 22 bp, synthetic construct
  misc_feature 1..22: note = chemically synthesized
  source 1..22: mol_type = other DNA
ccactttagcctttttataatg

SEQ ID NO: 133750 - DNA, 22 bp, synthetic construct
  misc_feature 1..22: note = chemically synthesized
  source 1..22: mol_type = other DNA
tagcctttttataatgtataat

SEQ ID NO: 133751 - DNA, 22 bp, synthetic construct
  misc_feature 1..22: note = chemically synthesized
  source 1..22: mol_type = other DNA
agcctttttataatgtataatg

SEQ ID NO: 133752 - DNA, 22 bp, synthetic construct
  misc_feature 1..22: note = chemically synthesized
  source 1..22: mol_type = other DNA
gcctttttataatgtataatgc

SEQ ID NO: 133753 - DNA, 22 bp, synthetic construct
  misc_feature 1..22: note = chemically synthesized
  source 1..22: mol_type = other DNA
tttataatgtataatgcagtgg

SEQ ID NO: 133754 - DNA, 22 bp, synthetic construct
  misc_feature 1..22: note = chemically synthesized
  source 1..22: mol_type = other DNA
ttataatgtataatgcagtggc

SEQ ID NO: 133755 - DNA, 22 bp, synthetic construct
  misc_feature 1..22: note = chemically synthesized
  source 1..22: mol_type = other DNA
tataatgtataatgcagtggca

SEQ ID NO: 133756 - DNA, 22 bp, synthetic construct
  misc_feature 1..22: note = chemically synthesized
  source 1..22: mol_type = other DNA
ataatgtataatgcagtggcac

SEQ ID NO: 133757 - DNA, 22 bp, synthetic construct
  misc_feature 1..22: note = chemically synthesized
  source 1..22: mol_type = other DNA
taatgtataatgcagtggcact

SEQ ID NO: 133758 - DNA, 22 bp, synthetic construct
  misc_feature 1..22: note = chemically synthesized
  source 1..22: mol_type = other DNA
attacatttgccatgttgtgca

SEQ ID NO: 133759 - DNA, 22 bp, synthetic construct
  misc_feature 1..22: note = chemically synthesized
  source 1..22: mol_type = other DNA
ttacatttgccatgttgtgcaa

SEQ ID NO: 133760 - DNA, 22 bp, synthetic construct
  misc_feature 1..22: note = chemically synthesized
  source 1..22: mol_type = other DNA
catttgccatgttgtgcaatca

SEQ ID NO: 133761 - DNA, 22 bp, synthetic construct
  misc_feature 1..22: note = chemically synthesized
  source 1..22: mol_type = other DNA
gccatgttgtgcaatcaccacc

SEQ ID NO: 133762 - DNA, 22 bp, synthetic construct
  misc_feature 1..22: note = chemically synthesized
  source 1..22: mol_type = other DNA
ccatgttgtgcaatcaccacca

SEQ ID NO: 133763 - DNA, 22 bp, synthetic construct
  misc_feature 1..22: note = chemically synthesized
  source 1..22: mol_type = other DNA
tgcaatcaccaccactatttct

SEQ ID NO: 133764 - DNA, 22 bp, synthetic construct
  misc_feature 1..22: note = chemically synthesized
  source 1..22: mol_type = other DNA
tttctaaaattttgtattacac

SEQ ID NO: 133765 - DNA, 22 bp, synthetic construct
  misc_feature 1..22: note = chemically synthesized
  source 1..22: mol_type = other DNA
ctaaaattttgtattacaccaa

SEQ ID NO: 133766 - DNA, 22 bp, synthetic construct
  misc_feature 1..22: note = chemically synthesized
  source 1..22: mol_type = other DNA
taaaattttgtattacaccaaa

SEQ ID NO: 133767 - DNA, 22 bp, synthetic construct
  misc_feature 1..22: note = chemically synthesized
  source 1..22: mol_type = other DNA
aaattttgtattacaccaaata

SEQ ID NO: 133768 - DNA, 22 bp, synthetic construct
  misc_feature 1..22: note = chemically synthesized
  source 1..22: mol_type = other DNA
tgtattacaccaaataaaaact

SEQ ID NO: 133769 - DNA, 22 bp, synthetic construct
  misc_feature 1..22: note = chemically synthesized
  source 1..22: mol_type = other DNA
gtattacaccaaataaaaactc

SEQ ID NO: 133770 - DNA, 22 bp, synthetic construct
  misc_feature 1..22: note = chemically synthesized
  source 1..22: mol_type = other DNA
tattacaccaaataaaaactct

SEQ ID NO: 133771 - DNA, 22 bp, synthetic construct
  misc_feature 1..22: note = chemically synthesized
  source 1..22: mol_type = other DNA
caccaaataaaaactctatatt

SEQ ID NO: 133772 - DNA, 22 bp, synthetic construct
  misc_feature 1..22: note = chemically synthesized
  source 1..22: mol_type = other DNA
tatattgattaatcagttactc

SEQ ID NO: 133773 - DNA, 22 bp, synthetic construct
  misc_feature 1..22: note = chemically synthesized
  source 1..22: mol_type = other DNA
tattgattaatcagttactccc

SEQ ID NO: 133774 - DNA, 22 bp, synthetic construct
  misc_feature 1..22: note = chemically synthesized
  source 1..22: mol_type = other DNA
attaatcagttactccccaatc

SEQ ID NO: 133775 - DNA, 22 bp, synthetic construct
  misc_feature 1..22: note = chemically synthesized
  source 1..22: mol_type = other DNA
atcagttactccccaatccatg

SEQ ID NO: 133776 - DNA, 22 bp, synthetic construct
  misc_feature 1..22: note = chemically synthesized
  source 1..22: mol_type = other DNA
ctccccaatccatgttcttcct

SEQ ID NO: 133777 - DNA, 22 bp, synthetic construct
  misc_feature 1..22: note = chemically synthesized
  source 1..22: mol_type = other DNA
cccaatccatgttcttcctaca

SEQ ID NO: 133778 - DNA, 22 bp, synthetic construct
  misc_feature 1..22: note = chemically synthesized
  source 1..22: mol_type = other DNA
ttcctacactctggtaacttct

SEQ ID NO: 133779 - DNA, 22 bp, synthetic construct
  misc_feature 1..22: note = chemically synthesized
  source 1..22: mol_type = other DNA
cctacactctggtaacttctaa

SEQ ID NO: 133780 - DNA, 22 bp, synthetic construct
  misc_feature 1..22: note = chemically synthesized
  source 1..22: mol_type = other DNA
ctacactctggtaacttctaat

SEQ ID NO: 133781 - DNA, 22 bp, synthetic construct
  misc_feature 1..22: note = chemically synthesized
  source 1..22: mol_type = other DNA
cactctggtaacttctaatcta

SEQ ID NO: 133782 - DNA, 22 bp, synthetic construct
  misc_feature 1..22: note = chemically synthesized
  source 1..22: mol_type = other DNA
tggtaacttctaatctactttt

SEQ ID NO: 133783 - DNA, 22 bp, synthetic construct
  misc_feature 1..22: note = chemically synthesized
  source 1..22: mol_type = other DNA
gtaacttctaatctactttttg

SEQ ID NO: 133784 - DNA, 22 bp, synthetic construct
  misc_feature 1..22: note = chemically synthesized
  source 1..22: mol_type = other DNA
ctaatctactttttgtctctat

SEQ ID NO: 133785 - DNA, 22 bp, synthetic construct
  misc_feature 1..22: note = chemically synthesized
  source 1..22: mol_type = other DNA
taatctactttttgtctctatg

SEQ ID NO: 133786 - DNA, 22 bp, synthetic construct
  misc_feature 1..22: note = chemically synthesized
  source 1..22: mol_type = other DNA
atctactttttgtctctatgaa

SEQ ID NO: 133787 - DNA, 22 bp, synthetic construct
  misc_feature 1..22: note = chemically synthesized
  source 1..22: mol_type = other DNA
ctttttgtctctatgaatttgc

SEQ ID NO: 133788 - DNA, 22 bp, synthetic construct
  misc_feature 1..22: note = chemically synthesized
  source 1..22: mol_type = other DNA
tttgtctctatgaatttgccta

SEQ ID NO: 133789 - DNA, 22 bp, synthetic construct
  misc_feature 1..22: note = chemically synthesized
  source 1..22: mol_type = other DNA
ttgtctctatgaatttgcctat

SEQ ID NO: 133790 - DNA, 22 bp, synthetic construct
  misc_feature 1..22: note = chemically synthesized
  source 1..22: mol_type = other DNA
tgtctctatgaatttgcctatt

SEQ ID NO: 133791 - DNA, 22 bp, synthetic construct
  misc_feature 1..22: note = chemically synthesized
  source 1..22: mol_type = other DNA
gtctctatgaatttgcctattc

SEQ ID NO: 133792 - DNA, 22 bp, synthetic construct
  misc_feature 1..22: note = chemically synthesized
  source 1..22: mol_type = other DNA
tctctatgaatttgcctattct

SEQ ID NO: 133793 - DNA, 22 bp, synthetic construct
  misc_feature 1..22: note = chemically synthesized
  source 1..22: mol_type = other DNA
tatgaatttgcctattctagat

SEQ ID NO: 133794 - DNA, 22 bp, synthetic construct
  misc_feature 1..22: note = chemically synthesized
  source 1..22: mol_type = other DNA
tgaatttgcctattctagatag

SEQ ID NO: 133795 - DNA, 22 bp, synthetic construct
  misc_feature 1..22: note = chemically synthesized
  source 1..22: mol_type = other DNA
gcctattctagatagctcatgt

SEQ ID NO: 133796 - DNA, 22 bp, synthetic construct
  misc_feature 1..22: note = chemically synthesized
  source 1..22: mol_type = other DNA
cctattctagatagctcatgta

SEQ ID NO: 133797 - DNA, 22 bp, synthetic construct
  misc_feature 1..22: note = chemically synthesized
  source 1..22: mol_type = other DNA
ttctagatagctcatgtaagtg

SEQ ID NO: 133798 - DNA, 22 bp, synthetic construct
  misc_feature 1..22: note = chemically synthesized
  source 1..22: mol_type = other DNA
tagatagctcatgtaagtgaaa

SEQ ID NO: 133799 - DNA, 22 bp, synthetic construct
  misc_feature 1..22: note = chemically synthesized
  source 1..22: mol_type = other DNA
gatagctcatgtaagtgaaatc

SEQ ID NO: 133800 - DNA, 22 bp, synthetic construct
  misc_feature 1..22: note = chemically synthesized
  source 1..22: mol_type = other DNA
atgtaagtgaaatcagacaatg

SEQ ID NO: 133801 - DNA, 22 bp, synthetic construct
  misc_feature 1..22: note = chemically synthesized
  source 1..22: mol_type = other DNA
ttttgcgtatgacttattgcac

SEQ ID NO: 133802 - DNA, 22 bp, synthetic construct
  misc_feature 1..22: note = chemically synthesized
  source 1..22: mol_type = other DNA
ttgcgtatgacttattgcactt

SEQ ID NO: 133803 - DNA, 22 bp, synthetic construct
  misc_feature 1..22: note = chemically synthesized
  source 1..22: mol_type = other DNA
tgcgtatgacttattgcactta

SEQ ID NO: 133804 - DNA, 22 bp, synthetic construct
  misc_feature 1..22: note = chemically synthesized
  source 1..22: mol_type = other DNA
gcgtatgacttattgcacttag

SEQ ID NO: 133805 - DNA, 22 bp, synthetic construct
  misc_feature 1..22: note = chemically synthesized
  source 1..22: mol_type = other DNA
cgtatgacttattgcacttagg

SEQ ID NO: 133806 - DNA, 22 bp, synthetic construct
  misc_feature 1..22: note = chemically synthesized
  source 1..22: mol_type = other DNA
attgcacttaggatagtttttt

SEQ ID NO: 133807 - DNA, 22 bp, synthetic construct
  misc_feature 1..22: note = chemically synthesized
  source 1..22: mol_type = other DNA
ttgcacttaggatagtttttta

SEQ ID NO: 133808 - DNA, 22 bp, synthetic construct
  misc_feature 1..22: note = chemically synthesized
  source 1..22: mol_type = other DNA
cacttaggatagttttttaagg

SEQ ID NO: 133809 - DNA, 22 bp, synthetic construct
  misc_feature 1..22: note = chemically synthesized
  source 1..22: mol_type = other DNA
aggatagttttttaaggtttat

SEQ ID NO: 133810 - DNA, 22 bp, synthetic construct
  misc_feature 1..22: note = chemically synthesized
  source 1..22: mol_type = other DNA
ggatagttttttaaggtttatt

SEQ ID NO: 133811 - DNA, 22 bp, synthetic construct
  misc_feature 1..22: note = chemically synthesized
  source 1..22: mol_type = other DNA
tttaaggtttattcatgttgta

SEQ ID NO: 133812 - DNA, 22 bp, synthetic construct
  misc_feature 1..22: note = chemically synthesized
  source 1..22: mol_type = other DNA
ttaaggtttattcatgttgtag

SEQ ID NO: 133813 - DNA, 22 bp, synthetic construct
  misc_feature 1..22: note = chemically synthesized
  source 1..22: mol_type = other DNA
taaggtttattcatgttgtagc

SEQ ID NO: 133814 - DNA, 22 bp, synthetic construct
  misc_feature 1..22: note = chemically synthesized
  source 1..22: mol_type = other DNA
aaggtttattcatgttgtagca

SEQ ID NO: 133815 - DNA, 22 bp, synthetic construct
  misc_feature 1..22: note = chemically synthesized
  source 1..22: mol_type = other DNA
aggtttattcatgttgtagcat

SEQ ID NO: 133816 - DNA, 22 bp, synthetic construct
  misc_feature 1..22: note = chemically synthesized
  source 1..22: mol_type = other DNA
attcatgttgtagcatgtgtca

SEQ ID NO: 133817 - DNA, 22 bp, synthetic construct
  misc_feature 1..22: note = chemically synthesized
  source 1..22: mol_type = other DNA
ttcatgttgtagcatgtgtcag

SEQ ID NO: 133818 - DNA, 22 bp, synthetic construct
  misc_feature 1..22: note = chemically synthesized
  source 1..22: mol_type = other DNA
atgttgtagcatgtgtcagacc

SEQ ID NO: 133819 - DNA, 22 bp, synthetic construct
  misc_feature 1..22: note = chemically synthesized
  source 1..22: mol_type = other DNA
tagcatgtgtcagacctacttt

SEQ ID NO: 133820 - DNA, 22 bp, synthetic construct
  misc_feature 1..22: note = chemically synthesized
  source 1..22: mol_type = other DNA
ctttttatagataaataatatt

SEQ ID NO: 133821 - DNA, 22 bp, synthetic construct
  misc_feature 1..22: note = chemically synthesized
  source 1..22: mol_type = other DNA
tttatagataaataatattcta

SEQ ID NO: 133822 - DNA, 22 bp, synthetic construct
  misc_feature 1..22: note = chemically synthesized
  source 1..22: mol_type = other DNA
ttatagataaataatattctat

SEQ ID NO: 133823 - DNA, 22 bp, synthetic construct
  misc_feature 1..22: note = chemically synthesized
  source 1..22: mol_type = other DNA
tatagataaataatattctatc

SEQ ID NO: 133824 - DNA, 22 bp, synthetic construct
  misc_feature 1..22: note = chemically synthesized
  source 1..22: mol_type = other DNA
atagataaataatattctatca

SEQ ID NO: 133825 - DNA, 22 bp, synthetic construct
  misc_feature 1..22: note = chemically synthesized
  source 1..22: mol_type = other DNA
tagataaataatattctatcac

SEQ ID NO: 133826 - DNA, 22 bp, synthetic construct
  misc_feature 1..22: note = chemically synthesized
  source 1..22: mol_type = other DNA
tatcacatatataagacatttt

SEQ ID NO: 133827 - DNA, 22 bp, synthetic construct
  misc_feature 1..22: note = chemically synthesized
  source 1..22: mol_type = other DNA
tcacatatataagacattttgt

SEQ ID NO: 133828 - DNA, 22 bp, synthetic construct
  misc_feature 1..22: note = chemically synthesized
  source 1..22: mol_type = other DNA
tgttgatatacgcatctgttga

SEQ ID NO: 133829 - DNA, 22 bp, synthetic construct
  misc_feature 1..22: note = chemically synthesized
  source 1..22: mol_type = other DNA
gttgatatacgcatctgttgat

SEQ ID NO: 133830 - DNA, 22 bp, synthetic construct
  misc_feature 1..22: note = chemically synthesized
  source 1..22: mol_type = other DNA
ttgatatacgcatctgttgata

SEQ ID NO: 133831 - DNA, 22 bp, synthetic construct
  misc_feature 1..22: note = chemically synthesized
  source 1..22: mol_type = other DNA
atatacgcatctgttgatagat

SEQ ID NO: 133832 - DNA, 22 bp, synthetic construct
  misc_feature 1..22: note = chemically synthesized
  source 1..22: mol_type = other DNA
ttgatagatacttgtattgttt

SEQ ID NO: 133833 - DNA, 22 bp, synthetic construct
  misc_feature 1..22: note = chemically synthesized
  source 1..22: mol_type = other DNA
atagatacttgtattgtttcta

SEQ ID NO: 133834 - DNA, 22 bp, synthetic construct
  misc_feature 1..22: note = chemically synthesized
  source 1..22: mol_type = other DNA
gtattgtttctattccttggct

SEQ ID NO: 133835 - DNA, 22 bp, synthetic construct
  misc_feature 1..22: note = chemically synthesized
  source 1..22: mol_type = other DNA
tattgtttctattccttggcta

SEQ ID NO: 133836 - DNA, 22 bp, synthetic construct
  misc_feature 1..22: note = chemically synthesized
  source 1..22: mol_type = other DNA
tttctattccttggctactgtg

SEQ ID NO: 133837 - DNA, 22 bp, synthetic construct
  misc_feature 1..22: note = chemically synthesized
  source 1..22: mol_type = other DNA
ctattccttggctactgtgaat

SEQ ID NO: 133838 - DNA, 22 bp, synthetic construct
  misc_feature 1..22: note = chemically synthesized
  source 1..22: mol_type = other DNA
tattccttggctactgtgaatt

SEQ ID NO: 133839 - DNA, 22 bp, synthetic construct
  misc_feature 1..22: note = chemically synthesized
  source 1..22: mol_type = other DNA
ttccttggctactgtgaattat

SEQ ID NO: 133840 - DNA, 22 bp, synthetic construct
  misc_feature 1..22: note = chemically synthesized
  source 1..22: mol_type = other DNA
cttggctactgtgaattattga

SEQ ID NO: 133841 - DNA, 22 bp, synthetic construct
  misc_feature 1..22: note = chemically synthesized
  source 1..22: mol_type = other DNA
ggctactgtgaattattgatgt

SEQ ID NO: 133842 - DNA, 22 bp, synthetic construct
  misc_feature 1..22: note = chemically synthesized
  source 1..22: mol_type = other DNA
gctactgtgaattattgatgtc

SEQ ID NO: 133843 - DNA, 22 bp, synthetic construct
  misc_feature 1..22: note = chemically synthesized
  source 1..22: mol_type = other DNA
ctgtgaattattgatgtcttcc

SEQ ID NO: 133844 - DNA, 22 bp, synthetic construct
  misc_feature 1..22: note = chemically synthesized
  source 1..22: mol_type = other DNA
tgaattattgatgtcttccctt

SEQ ID NO: 133845 - DNA, 22 bp, synthetic construct
  misc_feature 1..22: note = chemically synthesized
  source 1..22: mol_type = other DNA
ttgatgtcttcccttcaatatg

SEQ ID NO: 133846 - DNA, 22 bp, synthetic construct
  misc_feature 1..22: note = chemically synthesized
  source 1..22: mol_type = other DNA
atgtcttcccttcaatatgccc

SEQ ID NO: 133847 - DNA, 22 bp, synthetic construct
  misc_feature 1..22: note = chemically synthesized
  source 1..22: mol_type = other DNA
cccttcaatatgcccagattct

SEQ ID NO: 133848 - DNA, 22 bp, synthetic construct
  misc_feature 1..22: note = chemically synthesized
  source 1..22: mol_type = other DNA
ccttcaatatgcccagattcta

SEQ ID NO: 133849 - DNA, 22 bp, synthetic construct
  misc_feature 1..22: note = chemically synthesized
  source 1..22: mol_type = other DNA
caatatgcccagattctaccta

SEQ ID NO: 133850 - DNA, 22 bp, synthetic construct
  misc_feature 1..22: note = chemically synthesized
  source 1..22: mol_type = other DNA
aatatgcccagattctacctaa

SEQ ID NO: 133851 - DNA, 22 bp, synthetic construct
  misc_feature 1..22: note = chemically synthesized
  source 1..22: mol_type = other DNA
tacctaaatatatctctctact

SEQ ID NO: 133852 - DNA, 22 bp, synthetic construct
  misc_feature 1..22: note = chemically synthesized
  source 1..22: mol_type = other DNA
cctaaatatatctctctacttc

SEQ ID NO: 133853 - DNA, 22 bp, synthetic construct
  misc_feature 1..22: note = chemically synthesized
  source 1..22: mol_type = other DNA
aatatatctctctacttcctct

SEQ ID NO: 133854 - DNA, 22 bp, synthetic construct
  misc_feature 1..22: note = chemically synthesized
  source 1..22: mol_type = other DNA
tctacttcctctcactctgaat

SEQ ID NO: 133855 - DNA, 22 bp, synthetic construct
  misc_feature 1..22: note = chemically synthesized
  source 1..22: mol_type = other DNA
tacttcctctcactctgaatat

SEQ ID NO: 133856 - DNA, 22 bp, synthetic construct
  misc_feature 1..22: note = chemically synthesized
  source 1..22: mol_type = other DNA
cttcctctcactctgaatattc

SEQ ID NO: 133857 - DNA, 22 bp, synthetic construct
  misc_feature 1..22: note = chemically synthesized
  source 1..22: mol_type = other DNA
cctctcactctgaatattctgc

SEQ ID NO: 133858 - DNA, 22 bp, synthetic construct
  misc_feature 1..22: note = chemically synthesized
  source 1..22: mol_type = other DNA
ctctcactctgaatattctgct

SEQ ID NO: 133859 - DNA, 22 bp, synthetic construct
  misc_feature 1..22: note = chemically synthesized
  source 1..22: mol_type = other DNA
tcactctgaatattctgctttt

SEQ ID NO: 133860 - DNA, 22 bp, synthetic construct
  misc_feature 1..22: note = chemically synthesized
  source 1..22: mol_type = other DNA
actctgaatattctgcttttca

SEQ ID NO: 133861 - DNA, 22 bp, synthetic construct
  misc_feature 1..22: note = chemically synthesized
  source 1..22: mol_type = other DNA
tgaatattctgcttttcaaaga

SEQ ID NO: 133862 - DNA, 22 bp, synthetic construct
  misc_feature 1..22: note = chemically synthesized
  source 1..22: mol_type = other DNA
aatattctgcttttcaaagaat

SEQ ID NO: 133863 - DNA, 22 bp, synthetic construct
  misc_feature 1..22: note = chemically synthesized
  source 1..22: mol_type = other DNA
tgcttttcaaagaatattcctt

SEQ ID NO: 133864 - DNA, 22 bp, synthetic construct
  misc_feature 1..22: note = chemically synthesized
  source 1..22: mol_type = other DNA
cttttcaaagaatattccttgg

SEQ ID NO: 133865 - DNA, 22 bp, synthetic construct
  misc_feature 1..22: note = chemically synthesized
  source 1..22: mol_type = other DNA
ttcaaagaatattccttggaat

SEQ ID NO: 133866 - DNA, 22 bp, synthetic construct
  misc_feature 1..22: note = chemically synthesized
  source 1..22: mol_type = other DNA
tcaaagaatattccttggaata

SEQ ID NO: 133867 - DNA, 22 bp, synthetic construct
  misc_feature 1..22: note = chemically synthesized
  source 1..22: mol_type = other DNA
caaagaatattccttggaatat

SEQ ID NO: 133868 - DNA, 22 bp, synthetic construct
  misc_feature 1..22: note = chemically synthesized
  source 1..22: mol_type = other DNA
aaagaatattccttggaatatt

SEQ ID NO: 133869 - DNA, 22 bp, synthetic construct
  misc_feature 1..22: note = chemically synthesized
  source 1..22: mol_type = other DNA
cttggaatattccatggaagaa

SEQ ID NO: 133870 - DNA, 22 bp, synthetic construct
  misc_feature 1..22: note = chemically synthesized
  source 1..22: mol_type = other DNA
ggaatattccatggaagaagaa

SEQ ID NO: 133871 - DNA, 22 bp, synthetic construct
  misc_feature 1..22: note = chemically synthesized
  source 1..22: mol_type = other DNA
gaatattccatggaagaagaaa

SEQ ID NO: 133872 - DNA, 22 bp, synthetic construct
  misc_feature 1..22: note = chemically synthesized
  source 1..22: mol_type = other DNA
catggaagaagaaaatgagaca

SEQ ID NO: 133873 - DNA, 22 bp, synthetic construct
  misc_feature 1..22: note = chemically synthesized
  source 1..22: mol_type = other DNA
tctggagaaaggaagttttcag

SEQ ID NO: 133874 - DNA, 22 bp, synthetic construct
  misc_feature 1..22: note = chemically synthesized
  source 1..22: mol_type = other DNA
ctggagaaaggaagttttcagt

SEQ ID NO: 133875 - DNA, 22 bp, synthetic construct
  misc_feature 1..22: note = chemically synthesized
  source 1..22: mol_type = other DNA
tggagaaaggaagttttcagtg

SEQ ID NO: 133876 - DNA, 22 bp, synthetic construct
  misc_feature 1..22: note = chemically synthesized
  source 1..22: mol_type = other DNA
gagaaaggaagttttcagtgcc

SEQ ID NO: 133877 - DNA, 22 bp, synthetic construct
  misc_feature 1..22: note = chemically synthesized
  source 1..22: mol_type = other DNA
tcagtgccttgatctcggctga

SEQ ID NO: 133878 - DNA, 22 bp, synthetic construct
  misc_feature 1..22: note = chemically synthesized
  source 1..22: mol_type = other DNA
cagtgccttgatctcggctgac

SEQ ID NO: 133879 - DNA, 22 bp, synthetic construct
  misc_feature 1..22: note = chemically synthesized
  source 1..22: mol_type = other DNA
agtgccttgatctcggctgact

SEQ ID NO: 133880 - DNA, 22 bp, synthetic construct
  misc_feature 1..22: note = chemically synthesized
  source 1..22: mol_type = other DNA
gatctcggctgactgcaacctc

SEQ ID NO: 133881 - DNA, 22 bp, synthetic construct
  misc_feature 1..22: note = chemically synthesized
  source 1..22: mol_type = other DNA
atctcggctgactgcaacctct

SEQ ID NO: 133882 - DNA, 22 bp, synthetic construct
  misc_feature 1..22: note = chemically synthesized
  source 1..22: mol_type = other DNA
ggctgactgcaacctctgcctc

SEQ ID NO: 133883 - DNA, 22 bp, synthetic construct
  misc_feature 1..22: note = chemically synthesized
  source 1..22: mol_type = other DNA
actgcaacctctgcctcctggg

SEQ ID NO: 133884 - DNA, 22 bp, synthetic construct
  misc_feature 1..22: note = chemically synthesized
  source 1..22: mol_type = other DNA
caacctctgcctcctgggttca

SEQ ID NO: 133885 - DNA, 22 bp, synthetic construct
  misc_feature 1..22: note = chemically synthesized
  source 1..22: mol_type = other DNA
tgcctcctgggttcagttttca

SEQ ID NO: 133886 - DNA, 22 bp, synthetic construct
  misc_feature 1..22: note = chemically synthesized
  source 1..22: mol_type = other DNA
cctcctgggttcagttttcagt

SEQ ID NO: 133887 - DNA, 22 bp, synthetic construct
  misc_feature 1..22: note = chemically synthesized
  source 1..22: mol_type = other DNA
ctgggttcagttttcagttaaa

SEQ ID NO: 133888 - DNA, 22 bp, synthetic construct
  misc_feature 1..22: note = chemically synthesized
  source 1..22: mol_type = other DNA
ggttcagttttcagttaaagaa

SEQ ID NO: 133889 - DNA, 22 bp, synthetic construct
  misc_feature 1..22: note = chemically synthesized
  source 1..22: mol_type = other DNA
agttttcagttaaagaaatgat

SEQ ID NO: 133890 - DNA, 22 bp, synthetic construct
  misc_feature 1..22: note = chemically synthesized
  source 1..22: mol_type = other DNA
tcagttaaagaaatgatttaac

SEQ ID NO: 133891 - DNA, 22 bp, synthetic construct
  misc_feature 1..22: note = chemically synthesized
  source 1..22: mol_type = other DNA
cagttaaagaaatgatttaaca

SEQ ID NO: 133892 - DNA, 22 bp, synthetic construct
  misc_feature 1..22: note = chemically synthesized
  source 1..22: mol_type = other DNA
agttaaagaaatgatttaacaa

SEQ ID NO: 133893 - DNA, 22 bp, synthetic construct
  misc_feature 1..22: note = chemically synthesized
  source 1..22: mol_type = other DNA
aagaaatgatttaacaaatttt

SEQ ID NO: 133894 - DNA, 22 bp, synthetic construct
  misc_feature 1..22: note = chemically synthesized
  source 1..22: mol_type = other DNA
aacaaattttttcactcaacta

SEQ ID NO: 133895 - DNA, 22 bp, synthetic construct
  misc_feature 1..22: note = chemically synthesized
  source 1..22: mol_type = other DNA
acaaattttttcactcaactag

SEQ ID NO: 133896 - DNA, 22 bp, synthetic construct
  misc_feature 1..22: note = chemically synthesized
  source 1..22: mol_type = other DNA
tttcactcaactagagatttta

SEQ ID NO: 133897 - DNA, 22 bp, synthetic construct
  misc_feature 1..22: note = chemically synthesized
  source 1..22: mol_type = other DNA
ttcactcaactagagattttat

SEQ ID NO: 133898 - DNA, 22 bp, synthetic construct
  misc_feature 1..22: note = chemically synthesized
  source 1..22: mol_type = other DNA
tcactcaactagagattttatg

SEQ ID NO: 133899 - DNA, 22 bp, synthetic construct
  misc_feature 1..22: note = chemically synthesized
  source 1..22: mol_type = other DNA
cactcaactagagattttatga

SEQ ID NO: 133900 - DNA, 22 bp, synthetic construct
  misc_feature 1..22: note = chemically synthesized
  source 1..22: mol_type = other DNA
actcaactagagattttatgat

SEQ ID NO: 133901 - DNA, 22 bp, synthetic construct
  misc_feature 1..22: note = chemically synthesized
  source 1..22: mol_type = other DNA
aactagagattttatgataatg

SEQ ID NO: 133902 - DNA, 22 bp, synthetic construct
  misc_feature 1..22: note = chemically synthesized
  source 1..22: mol_type = other DNA
gagattttatgataatgcaata

SEQ ID NO: 133903 - DNA, 22 bp, synthetic construct
  misc_feature 1..22: note = chemically synthesized
  source 1..22: mol_type = other DNA
tatgataatgcaatacagataa

SEQ ID NO: 133904 - DNA, 22 bp, synthetic construct
  misc_feature 1..22: note = chemically synthesized
  source 1..22: mol_type = other DNA
atgataatgcaatacagataaa

SEQ ID NO: 133905 - DNA, 22 bp, synthetic construct
  misc_feature 1..22: note = chemically synthesized
  source 1..22: mol_type = other DNA
tgataatgcaatacagataaaa

SEQ ID NO: 133906 - DNA, 22 bp, synthetic construct
  misc_feature 1..22: note = chemically synthesized
  source 1..22: mol_type = other DNA
ccagacctaaaaatatgtggca

SEQ ID NO: 133907 - DNA, 22 bp, synthetic construct
  misc_feature 1..22: note = chemically synthesized
  source 1..22: mol_type = other DNA
cagacctaaaaatatgtggcat

SEQ ID NO: 133908 - DNA, 22 bp, synthetic construct
  misc_feature 1..22: note = chemically synthesized
  source 1..22: mol_type = other DNA
aaaatatgtggcatccacattt

SEQ ID NO: 133909 - DNA, 22 bp, synthetic construct
  misc_feature 1..22: note = chemically synthesized
  source 1..22: mol_type = other DNA
tacaggtacattttcacggaga

SEQ ID NO: 133910 - DNA, 22 bp, synthetic construct
  misc_feature 1..22: note = chemically synthesized
  source 1..22: mol_type = other DNA
acaggtacattttcacggagaa

SEQ ID NO: 133911 - DNA, 22 bp, synthetic construct
  misc_feature 1..22: note = chemically synthesized
  source 1..22: mol_type = other DNA
caggtacattttcacggagaaa

SEQ ID NO: 133912 - DNA, 22 bp, synthetic construct
  misc_feature 1..22: note = chemically synthesized
  source 1..22: mol_type = other DNA
tcacggagaaagataagaactg

SEQ ID NO: 133913 - DNA, 22 bp, synthetic construct
  misc_feature 1..22: note = chemically synthesized
  source 1..22: mol_type = other DNA
cacggagaaagataagaactgg

SEQ ID NO: 133914 - DNA, 22 bp, synthetic construct
  misc_feature 1..22: note = chemically synthesized
  source 1..22: mol_type = other DNA
acggagaaagataagaactggt

SEQ ID NO: 133915 - DNA, 22 bp, synthetic construct
  misc_feature 1..22: note = chemically synthesized
  source 1..22: mol_type = other DNA
gtgatttgtttgcaacaaatct

SEQ ID NO: 133916 - DNA, 22 bp, synthetic construct
  misc_feature 1..22: note = chemically synthesized
  source 1..22: mol_type = other DNA
gtttgcaacaaatctttgctct

SEQ ID NO: 133917 - DNA, 22 bp, synthetic construct
  misc_feature 1..22: note = chemically synthesized
  source 1..22: mol_type = other DNA
tttgcaacaaatctttgctctg

SEQ ID NO: 133918 - DNA, 22 bp, synthetic construct
  misc_feature 1..22: note = chemically synthesized
  source 1..22: mol_type = other DNA
gcaacaaatctttgctctggac

SEQ ID NO: 133919 - DNA, 22 bp, synthetic construct
  misc_feature 1..22: note = chemically synthesized
  source 1..22: mol_type = other DNA
caacaaatctttgctctggact

SEQ ID NO: 133920 - DNA, 22 bp, synthetic construct
  misc_feature 1..22: note = chemically synthesized
  source 1..22: mol_type = other DNA
tgctctggacttcactgagtaa

SEQ ID NO: 133921 - DNA, 22 bp, synthetic construct
  misc_feature 1..22: note = chemically synthesized
  source 1..22: mol_type = other DNA
gctctggacttcactgagtaaa

SEQ ID NO: 133922 - DNA, 22 bp, synthetic construct
  misc_feature 1..22: note = chemically synthesized
  source 1..22: mol_type = other DNA
ctctggacttcactgagtaaag

SEQ ID NO: 133923 - DNA, 22 bp, synthetic construct
  misc_feature 1..22: note = chemically synthesized
  source 1..22: mol_type = other DNA
tggacttcactgagtaaagttt

SEQ ID NO: 133924 - DNA, 22 bp, synthetic construct
  misc_feature 1..22: note = chemically synthesized
  source 1..22: mol_type = other DNA
gacttcactgagtaaagttttt

SEQ ID NO: 133925 - DNA, 22 bp, synthetic construct
  misc_feature 1..22: note = chemically synthesized
  source 1..22: mol_type = other DNA
cactgagtaaagttttttttgc

SEQ ID NO: 133926 - DNA, 22 bp, synthetic construct
  misc_feature 1..22: note = chemically synthesized
  source 1..22: mol_type = other DNA
actgagtaaagttttttttgct

SEQ ID NO: 133927 - DNA, 22 bp, synthetic construct
  misc_feature 1..22: note = chemically synthesized
  source 1..22: mol_type = other DNA
agtaaagttttttttgctttgt

SEQ ID NO: 133928 - DNA, 22 bp, synthetic construct
  misc_feature 1..22: note = chemically synthesized
  source 1..22: mol_type = other DNA
tttttgctttgttttgttttgt

SEQ ID NO: 133929 - DNA, 22 bp, synthetic construct
  misc_feature 1..22: note = chemically synthesized
  source 1..22: mol_type = other DNA
ttttgctttgttttgttttgtt

SEQ ID NO: 133930 - DNA, 22 bp, synthetic construct
  misc_feature 1..22: note = chemically synthesized
  source 1..22: mol_type = other DNA
tttgctttgttttgttttgttt

SEQ ID NO: 133931 - DNA, 22 bp, synthetic construct
  misc_feature 1..22: note = chemically synthesized
  source 1..22: mol_type = other DNA
ttgctttgttttgttttgtttt

SEQ ID NO: 133932 - DNA, 22 bp, synthetic construct
  misc_feature 1..22: note = chemically synthesized
  source 1..22: mol_type = other DNA
tgctttgttttgttttgttttt

SEQ ID NO: 133933 - DNA, 22 bp, synthetic construct
  misc_feature 1..22: note = chemically synthesized
  source 1..22: mol_type = other DNA
gctttgttttgttttgtttttg

SEQ ID NO: 133934 - DNA, 22 bp, synthetic construct
  misc_feature 1..22: note = chemically synthesized
  source 1..22: mol_type = other DNA
ctttgttttgttttgtttttga

SEQ ID NO: 133935 - DNA, 22 bp, synthetic construct
  misc_feature 1..22: note = chemically synthesized
  source 1..22: mol_type = other DNA
tgttttgttttgtttttgagat

SEQ ID NO: 133936 - DNA, 22 bp, synthetic construct
  misc_feature 1..22: note = chemically synthesized
  source 1..22: mol_type = other DNA
gttttgttttgtttttgagatg

SEQ ID NO: 133937 - DNA, 22 bp, synthetic construct
  misc_feature 1..22: note = chemically synthesized
  source 1..22: mol_type = other DNA
ttttgttttgtttttgagatgg

SEQ ID NO: 133938 - DNA, 22 bp, synthetic construct
  misc_feature 1..22: note = chemically synthesized
  source 1..22: mol_type = other DNA
tgttttgtttttgagatggagt

SEQ ID NO: 133939 - DNA, 22 bp, synthetic construct
  misc_feature 1..22: note = chemically synthesized
  source 1..22: mol_type = other DNA
gttttgtttttgagatggagtc

SEQ ID NO: 133940 - DNA, 22 bp, synthetic construct
  misc_feature 1..22: note = chemically synthesized
  source 1..22: mol_type = other DNA
ttttgtttttgagatggagtct

SEQ ID NO: 133941 - DNA, 22 bp, synthetic construct
  misc_feature 1..22: note = chemically synthesized
  source 1..22: mol_type = other DNA
tgtttttgagatggagtctcgc

SEQ ID NO: 133942 - DNA, 22 bp, synthetic construct
  misc_feature 1..22: note = chemically synthesized
  source 1..22: mol_type = other DNA
gtttttgagatggagtctcgct

SEQ ID NO: 133943 - DNA, 22 bp, synthetic construct
  misc_feature 1..22: note = chemically synthesized
  source 1..22: mol_type = other DNA
tttttgagatggagtctcgctc

SEQ ID NO: 133944 - DNA, 22 bp, synthetic construct
  misc_feature 1..22: note = chemically synthesized
  source 1..22: mol_type = other DNA
ttgagatggagtctcgctctgt

SEQ ID NO: 133945 - DNA, 22 bp, synthetic construct
  misc_feature 1..22: note = chemically synthesized
  source 1..22: mol_type = other DNA
tgagatggagtctcgctctgtc

SEQ ID NO: 133946 - DNA, 22 bp, synthetic construct
  misc_feature 1..22: note = chemically synthesized
  source 1..22: mol_type = other DNA
gagatggagtctcgctctgtcg

SEQ ID NO: 133947 - DNA, 22 bp, synthetic construct
  misc_feature 1..22: note = chemically synthesized
  source 1..22: mol_type = other DNA
agatggagtctcgctctgtcgc

SEQ ID NO: 133948 - DNA, 22 bp, synthetic construct
  misc_feature 1..22: note = chemically synthesized
  source 1..22: mol_type = other DNA
gctctgtcgcccaggctggagt

SEQ ID NO: 133949 - DNA, 22 bp, synthetic construct
  misc_feature 1..22: note = chemically synthesized
  source 1..22: mol_type = other DNA
tgtcgcccaggctggagtgcag

SEQ ID NO: 133950 - DNA, 22 bp, synthetic construct
  misc_feature 1..22: note = chemically synthesized
  source 1..22: mol_type = other DNA
tcgcccaggctggagtgcagtg

SEQ ID NO: 133951 - DNA, 22 bp, synthetic construct
  misc_feature 1..22: note = chemically synthesized
  source 1..22: mol_type = other DNA
gagtgcagtggcgtgatctcag

SEQ ID NO: 133952 - DNA, 22 bp, synthetic construct
  misc_feature 1..22: note = chemically synthesized
  source 1..22: mol_type = other DNA
agctcactgcaagctctgcctc

SEQ ID NO: 133953 - DNA, 22 bp, synthetic construct
  misc_feature 1..22: note = chemically synthesized
  source 1..22: mol_type = other DNA
actgcaagctctgcctcccggg

SEQ ID NO: 133954 - DNA, 22 bp, synthetic construct
  misc_feature 1..22: note = chemically synthesized
  source 1..22: mol_type = other DNA
caagctctgcctcccgggttca

SEQ ID NO: 133955 - DNA, 22 bp, synthetic construct
  misc_feature 1..22: note = chemically synthesized
  source 1..22: mol_type = other DNA
tgcctcccgggttcacgccatt

SEQ ID NO: 133956 - DNA, 22 bp, synthetic construct
  misc_feature 1..22: note = chemically synthesized
  source 1..22: mol_type = other DNA
cctcccgggttcacgccattct

SEQ ID NO: 133957 - DNA, 22 bp, synthetic construct
  misc_feature 1..22: note = chemically synthesized
  source 1..22: mol_type = other DNA
ccgggttcacgccattctcctg

SEQ ID NO: 133958 - DNA, 22 bp, synthetic construct
  misc_feature 1..22: note = chemically synthesized
  source 1..22: mol_type = other DNA
acgccattctcctgcctcagcc

SEQ ID NO: 133959 - DNA, 22 bp, synthetic construct
  misc_feature 1..22: note = chemically synthesized
  source 1..22: mol_type = other DNA
tcctgcctcagcctcccgagta

SEQ ID NO: 133960 - DNA, 22 bp, synthetic construct
  misc_feature 1..22: note = chemically synthesized
  source 1..22: mol_type = other DNA
ctgcctcagcctcccgagtagc

SEQ ID NO: 133961 - DNA, 22 bp, synthetic construct
  misc_feature 1..22: note = chemically synthesized
  source 1..22: mol_type = other DNA
cctcagcctcccgagtagctgg

SEQ ID NO: 133962 - DNA, 22 bp, synthetic construct
  misc_feature 1..22: note = chemically synthesized
  source 1..22: mol_type = other DNA
agcctcccgagtagctgggact

SEQ ID NO: 133963 - DNA, 22 bp, synthetic construct
  misc_feature 1..22: note = chemically synthesized
  source 1..22: mol_type = other DNA
ccgagtagctgggactacaggc

SEQ ID NO: 133964 - DNA, 22 bp, synthetic construct
  misc_feature 1..22: note = chemically synthesized
  source 1..22: mol_type = other DNA
ggactacaggcgcccgccacca

SEQ ID NO: 133965 - DNA, 22 bp, synthetic construct
  misc_feature 1..22: note = chemically synthesized
  source 1..22: mol_type = other DNA
caggcgcccgccaccacgccag

SEQ ID NO: 133966 - DNA, 22 bp, synthetic construct
  misc_feature 1..22: note = chemically synthesized
  source 1..22: mol_type = other DNA
ttttgtctttttagtagagacg

SEQ ID NO: 133967 - DNA, 22 bp, synthetic construct
  misc_feature 1..22: note = chemically synthesized
  source 1..22: mol_type = other DNA
tttgtctttttagtagagacgg

SEQ ID NO: 133968 - DNA, 22 bp, synthetic construct
  misc_feature 1..22: note = chemically synthesized
  source 1..22: mol_type = other DNA
ttgtctttttagtagagacggg

SEQ ID NO: 133969 - DNA, 22 bp, synthetic construct
  misc_feature 1..22: note = chemically synthesized
  source 1..22: mol_type = other DNA
tgtctttttagtagagacgggg

SEQ ID NO: 133970 - DNA, 22 bp, synthetic construct
  misc_feature 1..22: note = chemically synthesized
  source 1..22: mol_type = other DNA
gtctttttagtagagacggggt

SEQ ID NO: 133971 - DNA, 22 bp, synthetic construct
  misc_feature 1..22: note = chemically synthesized
  source 1..22: mol_type = other DNA
tctttttagtagagacggggtt

SEQ ID NO: 133972 - DNA, 22 bp, synthetic construct
  misc_feature 1..22: note = chemically synthesized
  source 1..22: mol_type = other DNA
tttagtagagacggggtttcac

SEQ ID NO: 133973 - DNA, 22 bp, synthetic construct
  misc_feature 1..22: note = chemically synthesized
  source 1..22: mol_type = other DNA
ttagtagagacggggtttcact

SEQ ID NO: 133974 - DNA, 22 bp, synthetic construct
  misc_feature 1..22: note = chemically synthesized
  source 1..22: mol_type = other DNA
tagtagagacggggtttcactg

SEQ ID NO: 133975 - DNA, 22 bp, synthetic construct
  misc_feature 1..22: note = chemically synthesized
  source 1..22: mol_type = other DNA
agtagagacggggtttcactgt

SEQ ID NO: 133976 - DNA, 22 bp, synthetic construct
  misc_feature 1..22: note = chemically synthesized
  source 1..22: mol_type = other DNA
gtagagacggggtttcactgtg

SEQ ID NO: 133977 - DNA, 22 bp, synthetic construct
  misc_feature 1..22: note = chemically synthesized
  source 1..22: mol_type = other DNA
cactgtgttagccaggatggtc

SEQ ID NO: 133978 - DNA, 22 bp, synthetic construct
  misc_feature 1..22: note = chemically synthesized
  source 1..22: mol_type = other DNA
actgtgttagccaggatggtct

SEQ ID NO: 133979 - DNA, 22 bp, synthetic construct
  misc_feature 1..22: note = chemically synthesized
  source 1..22: mol_type = other DNA
tgttagccaggatggtctcgat

SEQ ID NO: 133980 - DNA, 22 bp, synthetic construct
  misc_feature 1..22: note = chemically synthesized
  source 1..22: mol_type = other DNA
gccaggatggtctcgatctccc

SEQ ID NO: 133981 - DNA, 22 bp, synthetic construct
  misc_feature 1..22: note = chemically synthesized
  source 1..22: mol_type = other DNA
gatctcccgacctcgtgatcca

SEQ ID NO: 133982 - DNA, 22 bp, synthetic construct
  misc_feature 1..22: note = chemically synthesized
  source 1..22: mol_type = other DNA
ccgacctcgtgatccacccgcc

SEQ ID NO: 133983 - DNA, 22 bp, synthetic construct
  misc_feature 1..22: note = chemically synthesized
  source 1..22: mol_type = other DNA
gtgatccacccgcctcggcctc

SEQ ID NO: 133984 - DNA, 22 bp, synthetic construct
  misc_feature 1..22: note = chemically synthesized
  source 1..22: mol_type = other DNA
ggcctcccaaagtgctgggatt

SEQ ID NO: 133985 - DNA, 22 bp, synthetic construct
  misc_feature 1..22: note = chemically synthesized
  source 1..22: mol_type = other DNA
ccaaagtgctgggattacaggc

SEQ ID NO: 133986 - DNA, 22 bp, synthetic construct
  misc_feature 1..22: note = chemically synthesized
  source 1..22: mol_type = other DNA
ggattacaggcgtgagccaccg

SEQ ID NO: 133987 - DNA, 22 bp, synthetic construct
  misc_feature 1..22: note = chemically synthesized
  source 1..22: mol_type = other DNA
caggcgtgagccaccgcgcccg

SEQ ID NO: 133988 - DNA, 22 bp, synthetic construct
  misc_feature 1..22: note = chemically synthesized
  source 1..22: mol_type = other DNA
agtaaagttttatattgggaag

SEQ ID NO: 133989 - DNA, 22 bp, synthetic construct
  misc_feature 1..22: note = chemically synthesized
  source 1..22: mol_type = other DNA
tatattgggaagacataaaaat

SEQ ID NO: 133990 - DNA, 22 bp, synthetic construct
  misc_feature 1..22: note = chemically synthesized
  source 1..22: mol_type = other DNA
atattgggaagacataaaaatg

SEQ ID NO: 133991 - DNA, 22 bp, synthetic construct
  misc_feature 1..22: note = chemically synthesized
  source 1..22: mol_type = other DNA
tattgggaagacataaaaatgt

SEQ ID NO: 133992 - DNA, 22 bp, synthetic construct
  misc_feature 1..22: note = chemically synthesized
  source 1..22: mol_type = other DNA
ggaagacataaaaatgtggaga

SEQ ID NO: 133993 - DNA, 22 bp, synthetic construct
  misc_feature 1..22: note = chemically synthesized
  source 1..22: mol_type = other DNA
tggaatgcttaaaaaaataggt

SEQ ID NO: 133994 - DNA, 22 bp, synthetic construct
  misc_feature 1..22: note = chemically synthesized
  source 1..22: mol_type = other DNA
aaaaaaataggtgtaggcgcaa

SEQ ID NO: 133995 - DNA, 22 bp, synthetic construct
  misc_feature 1..22: note = chemically synthesized
  source 1..22: mol_type = other DNA
aaaaaataggtgtaggcgcaag

SEQ ID NO: 133996 - DNA, 22 bp, synthetic construct
  misc_feature 1..22: note = chemically synthesized
  source 1..22: mol_type = other DNA
tctgtatgtccttgtattaaaa

SEQ ID NO: 133997 - DNA, 22 bp, synthetic construct
  misc_feature 1..22: note = chemically synthesized
  source 1..22: mol_type = other DNA
ctgtatgtccttgtattaaaac

SEQ ID NO: 133998 - DNA, 22 bp, synthetic construct
  misc_feature 1..22: note = chemically synthesized
  source 1..22: mol_type = other DNA
tgtatgtccttgtattaaaact

SEQ ID NO: 133999 - DNA, 22 bp, synthetic construct
  misc_feature 1..22: note = chemically synthesized
  source 1..22: mol_type = other DNA
tatgtccttgtattaaaacttt

SEQ ID NO: 134000 - DNA, 22 bp, synthetic construct
  misc_feature 1..22: note = chemically synthesized
  source 1..22: mol_type = other DNA
gtattaaaactttttcatactg

SEQ ID NO: 134001 - DNA, 22 bp, synthetic construct
  misc_feature 1..22: note = chemically synthesized
  source 1..22: mol_type = other DNA
tattaaaactttttcatactga

SEQ ID NO: 134002 - DNA, 22 bp, synthetic construct
  misc_feature 1..22: note = chemically synthesized
  source 1..22: mol_type = other DNA
aaactttttcatactgaatcaa

SEQ ID NO: 134003 - DNA, 22 bp, synthetic construct
  misc_feature 1..22: note = chemically synthesized
  source 1..22: mol_type = other DNA
tttcatactgaatcaattgtaa

SEQ ID NO: 134004 - DNA, 22 bp, synthetic construct
  misc_feature 1..22: note = chemically synthesized
  source 1..22: mol_type = other DNA
ttcatactgaatcaattgtaaa

SEQ ID NO: 134005 - DNA, 22 bp, synthetic construct
  misc_feature 1..22: note = chemically synthesized
  source 1..22: mol_type = other DNA
tcatactgaatcaattgtaaaa

SEQ ID NO: 134006 - DNA, 22 bp, synthetic construct
  misc_feature 1..22: note = chemically synthesized
  source 1..22: mol_type = other DNA
catactgaatcaattgtaaaac

SEQ ID NO: 134007 - DNA, 22 bp, synthetic construct
  misc_feature 1..22: note = chemically synthesized
  source 1..22: mol_type = other DNA
atactgaatcaattgtaaaacc

SEQ ID NO: 134008 - DNA, 22 bp, synthetic construct
  misc_feature 1..22: note = chemically synthesized
  source 1..22: mol_type = other DNA
aatcaattgtaaaaccgattat

SEQ ID NO: 134009 - DNA, 22 bp, synthetic construct
  misc_feature 1..22: note = chemically synthesized
  source 1..22: mol_type = other DNA
taaaaccgattatttacccaat

SEQ ID NO: 134010 - DNA, 22 bp, synthetic construct
  misc_feature 1..22: note = chemically synthesized
  source 1..22: mol_type = other DNA
tttacccaatgcatgctgtaag

SEQ ID NO: 134011 - DNA, 22 bp, synthetic construct
  misc_feature 1..22: note = chemically synthesized
  source 1..22: mol_type = other DNA
acccaatgcatgctgtaagcaa

SEQ ID NO: 134012 - DNA, 22 bp, synthetic construct
  misc_feature 1..22: note = chemically synthesized
  source 1..22: mol_type = other DNA
cccaatgcatgctgtaagcaaa

SEQ ID NO: 134013 - DNA, 22 bp, synthetic construct
  misc_feature 1..22: note = chemically synthesized
  source 1..22: mol_type = other DNA
taagcaaaattatatgctattg

SEQ ID NO: 134014 - DNA, 22 bp, synthetic construct
  misc_feature 1..22: note = chemically synthesized
  source 1..22: mol_type = other DNA
tatgctattgagtacaatgttt

SEQ ID NO: 134015 - DNA, 22 bp, synthetic construct
  misc_feature 1..22: note = chemically synthesized
  source 1..22: mol_type = other DNA
ttgagtacaatgtttaagctat

SEQ ID NO: 134016 - DNA, 22 bp, synthetic construct
  misc_feature 1..22: note = chemically synthesized
  source 1..22: mol_type = other DNA
agtacaatgtttaagctattga

SEQ ID NO: 134017 - DNA, 22 bp, synthetic construct
  misc_feature 1..22: note = chemically synthesized
  source 1..22: mol_type = other DNA
aagctattgatactgagtataa

SEQ ID NO: 134018 - DNA, 22 bp, synthetic construct
  misc_feature 1..22: note = chemically synthesized
  source 1..22: mol_type = other DNA
agctattgatactgagtataaa

SEQ ID NO: 134019 - DNA, 22 bp, synthetic construct
  misc_feature 1..22: note = chemically synthesized
  source 1..22: mol_type = other DNA
ttgatactgagtataaacacaa

SEQ ID NO: 134020 - DNA, 22 bp, synthetic construct
  misc_feature 1..22: note = chemically synthesized
  source 1..22: mol_type = other DNA
atactgagtataaacacaaatc

SEQ ID NO: 134021 - DNA, 22 bp, synthetic construct
  misc_feature 1..22: note = chemically synthesized
  source 1..22: mol_type = other DNA
agtataaacacaaatcttaaaa

SEQ ID NO: 134022 - DNA, 22 bp, synthetic construct
  misc_feature 1..22: note = chemically synthesized
  source 1..22: mol_type = other DNA
aaaatctggttatcccccaaag

SEQ ID NO: 134023 - DNA, 22 bp, synthetic construct
  misc_feature 1..22: note = chemically synthesized
  source 1..22: mol_type = other DNA
aaatctggttatcccccaaaga

SEQ ID NO: 134024 - DNA, 22 bp, synthetic construct
  misc_feature 1..22: note = chemically synthesized
  source 1..22: mol_type = other DNA
gttatcccccaaagactcctct

SEQ ID NO: 134025 - DNA, 22 bp, synthetic construct
  misc_feature 1..22: note = chemically synthesized
  source 1..22: mol_type = other DNA
tcccccaaagactcctctgttt

SEQ ID NO: 134026 - DNA, 22 bp, synthetic construct
  misc_feature 1..22: note = chemically synthesized
  source 1..22: mol_type = other DNA
ctctgtttctcataatgtgccc

SEQ ID NO: 134027 - DNA, 22 bp, synthetic construct
  misc_feature 1..22: note = chemically synthesized
  source 1..22: mol_type = other DNA
tgtttctcataatgtgcccagt

SEQ ID NO: 134028 - DNA, 22 bp, synthetic construct
  misc_feature 1..22: note = chemically synthesized
  source 1..22: mol_type = other DNA
tttctcataatgtgcccagtaa

SEQ ID NO: 134029 - DNA, 22 bp, synthetic construct
  misc_feature 1..22: note = chemically synthesized
  source 1..22: mol_type = other DNA
ctcataatgtgcccagtaagtt

SEQ ID NO: 134030 - DNA, 22 bp, synthetic construct
  misc_feature 1..22: note = chemically synthesized
  source 1..22: mol_type = other DNA
tcataatgtgcccagtaagttc

SEQ ID NO: 134031 - DNA, 22 bp, synthetic construct
  misc_feature 1..22: note = chemically synthesized
  source 1..22: mol_type = other DNA
ataatgtgcccagtaagttcct

SEQ ID NO: 134032 - DNA, 22 bp, synthetic construct
  misc_feature 1..22: note = chemically synthesized
  source 1..22: mol_type = other DNA
ctaatgtttattagtgtgttgg

SEQ ID NO: 134033 - DNA, 22 bp, synthetic construct
  misc_feature 1..22: note = chemically synthesized
  source 1..22: mol_type = other DNA
atgtttattagtgtgttggtag

SEQ ID NO: 134034 - DNA, 22 bp, synthetic construct
  misc_feature 1..22: note = chemically synthesized
  source 1..22: mol_type = other DNA
attagtgtgttggtaggaaatt

SEQ ID NO: 134035 - DNA, 22 bp, synthetic construct
  misc_feature 1..22: note = chemically synthesized
  source 1..22: mol_type = other DNA
ttagtgtgttggtaggaaattt

SEQ ID NO: 134036 - DNA, 22 bp, synthetic construct
  misc_feature 1..22: note = chemically synthesized
  source 1..22: mol_type = other DNA
gtgtgttggtaggaaatttcaa

SEQ ID NO: 134037 - DNA, 22 bp, synthetic construct
  misc_feature 1..22: note = chemically synthesized
  source 1..22: mol_type = other DNA
gtaggaaatttcaaccccgatc

SEQ ID NO: 134038 - DNA, 22 bp, synthetic construct
  misc_feature 1..22: note = chemically synthesized
  source 1..22: mol_type = other DNA
caaccccgatcatttccatctt

SEQ ID NO: 134039 - DNA, 22 bp, synthetic construct
  misc_feature 1..22: note = chemically synthesized
  source 1..22: mol_type = other DNA
aaccccgatcatttccatcttg

SEQ ID NO: 134040 - DNA, 22 bp, synthetic construct
  misc_feature 1..22: note = chemically synthesized
  source 1..22: mol_type = other DNA
ccatcttgatttgctgacctgg

SEQ ID NO: 134041 - DNA, 22 bp, synthetic construct
  misc_feature 1..22: note = chemically synthesized
  source 1..22: mol_type = other DNA
catcttgatttgctgacctggg

SEQ ID NO: 134042 - DNA, 22 bp, synthetic construct
  misc_feature 1..22: note = chemically synthesized
  source 1..22: mol_type = other DNA
gatttgctgacctgggtgcagg

SEQ ID NO: 134043 - DNA, 22 bp, synthetic construct
  misc_feature 1..22: note = chemically synthesized
  source 1..22: mol_type = other DNA
atttgctgacctgggtgcaggt

SEQ ID NO: 134044 - DNA, 22 bp, synthetic construct
  misc_feature 1..22: note = chemically synthesized
  source 1..22: mol_type = other DNA
gctgacctgggtgcaggttctt

SEQ ID NO: 134045 - DNA, 22 bp, synthetic construct
  misc_feature 1..22: note = chemically synthesized
  source 1..22: mol_type = other DNA
ctgacctgggtgcaggttctta

SEQ ID NO: 134046 - DNA, 22 bp, synthetic construct
  misc_feature 1..22: note = chemically synthesized
  source 1..22: mol_type = other DNA
acctgggtgcaggttcttatga

SEQ ID NO: 134047 - DNA, 22 bp, synthetic construct
  misc_feature 1..22: note = chemically synthesized
  source 1..22: mol_type = other DNA
ggtgcaggttcttatgacagag

SEQ ID NO: 134048 - DNA, 22 bp, synthetic construct
  misc_feature 1..22: note = chemically synthesized
  source 1..22: mol_type = other DNA
ttatgacagaggaaagactgtc

SEQ ID NO: 134049 - DNA, 22 bp, synthetic construct
  misc_feature 1..22: note = chemically synthesized
  source 1..22: mol_type = other DNA
atgacagaggaaagactgtctt

SEQ ID NO: 134050 - DNA, 22 bp, synthetic construct
  misc_feature 1..22: note = chemically synthesized
  source 1..22: mol_type = other DNA
tgacagaggaaagactgtcttt

SEQ ID NO: 134051 - DNA, 22 bp, synthetic construct
  misc_feature 1..22: note = chemically synthesized
  source 1..22: mol_type = other DNA
tctttgtaagttattttggaag

SEQ ID NO: 134052 - DNA, 22 bp, synthetic construct
  misc_feature 1..22: note = chemically synthesized
  source 1..22: mol_type = other DNA
tgtaagttattttggaagaata

SEQ ID NO: 134053 - DNA, 22 bp, synthetic construct
  misc_feature 1..22: note = chemically synthesized
  source 1..22: mol_type = other DNA
gtaagttattttggaagaatag

SEQ ID NO: 134054 - DNA, 22 bp, synthetic construct
  misc_feature 1..22: note = chemically synthesized
  source 1..22: mol_type = other DNA
taagttattttggaagaataga

SEQ ID NO: 134055 - DNA, 22 bp, synthetic construct
  misc_feature 1..22: note = chemically synthesized
  source 1..22: mol_type = other DNA
ttttggaagaatagaaactgtg

SEQ ID NO: 134056 - DNA, 22 bp, synthetic construct
  misc_feature 1..22: note = chemically synthesized
  source 1..22: mol_type = other DNA
tggaagaatagaaactgtgaaa

SEQ ID NO: 134057 - DNA, 22 bp, synthetic construct
  misc_feature 1..22: note = chemically synthesized
  source 1..22: mol_type = other DNA
ggaagaatagaaactgtgaaaa

SEQ ID NO: 134058 - DNA, 22 bp, synthetic construct
  misc_feature 1..22: note = chemically synthesized
  source 1..22: mol_type = other DNA
gaagaatagaaactgtgaaaaa

SEQ ID NO: 134059 - DNA, 22 bp, synthetic construct
  misc_feature 1..22: note = chemically synthesized
  source 1..22: mol_type = other DNA
tgaaaaatatatggcttctttg

SEQ ID NO: 134060 - DNA, 22 bp, synthetic construct
  misc_feature 1..22: note = chemically synthesized
  source 1..22: mol_type = other DNA
ctttggtgctcatgaggtattt

SEQ ID NO: 134061 - DNA, 22 bp, synthetic construct
  misc_feature 1..22: note = chemically synthesized
  source 1..22: mol_type = other DNA
tttggtgctcatgaggtatttt

SEQ ID NO: 134062 - DNA, 22 bp, synthetic construct
  misc_feature 1..22: note = chemically synthesized
  source 1..22: mol_type = other DNA
tggtgctcatgaggtattttga

SEQ ID NO: 134063 - DNA, 22 bp, synthetic construct
  misc_feature 1..22: note = chemically synthesized
  source 1..22: mol_type = other DNA
ggtgctcatgaggtattttgat

SEQ ID NO: 134064 - DNA, 22 bp, synthetic construct
  misc_feature 1..22: note = chemically synthesized
  source 1..22: mol_type = other DNA
gtgctcatgaggtattttgata

SEQ ID NO: 134065 - DNA, 22 bp, synthetic construct
  misc_feature 1..22: note = chemically synthesized
  source 1..22: mol_type = other DNA
atgaggtattttgatactgcat

SEQ ID NO: 134066 - DNA, 22 bp, synthetic construct
  misc_feature 1..22: note = chemically synthesized
  source 1..22: mol_type = other DNA
tgatactgcatgctgctccaat

SEQ ID NO: 134067 - DNA, 22 bp, synthetic construct
  misc_feature 1..22: note = chemically synthesized
  source 1..22: mol_type = other DNA
gatactgcatgctgctccaata

SEQ ID NO: 134068 - DNA, 22 bp, synthetic construct
  misc_feature 1..22: note = chemically synthesized
  source 1..22: mol_type = other DNA
atactgcatgctgctccaatat

SEQ ID NO: 134069 - DNA, 22 bp, synthetic construct
  misc_feature 1..22: note = chemically synthesized
  source 1..22: mol_type = other DNA
catgctgctccaatatctaaat

SEQ ID NO: 134070 - DNA, 22 bp, synthetic construct
  misc_feature 1..22: note = chemically synthesized
  source 1..22: mol_type = other DNA
ctccaatatctaaattatacat

SEQ ID NO: 134071 - DNA, 22 bp, synthetic construct
  misc_feature 1..22: note = chemically synthesized
  source 1..22: mol_type = other DNA
caatatctaaattatacatctg

SEQ ID NO: 134072 - DNA, 22 bp, synthetic construct
  misc_feature 1..22: note = chemically synthesized
  source 1..22: mol_type = other DNA
aattatacatctgctcctcttt

SEQ ID NO: 134073 - DNA, 22 bp, synthetic construct
  misc_feature 1..22: note = chemically synthesized
  source 1..22: mol_type = other DNA
tacatctgctcctcttttacag

SEQ ID NO: 134074 - DNA, 22 bp, synthetic construct
  misc_feature 1..22: note = chemically synthesized
  source 1..22: mol_type = other DNA
ctcctcttttacagctttatct

SEQ ID NO: 134075 - DNA, 22 bp, synthetic construct
  misc_feature 1..22: note = chemically synthesized
  source 1..22: mol_type = other DNA
ctcttttacagctttatcttag

SEQ ID NO: 134076 - DNA, 22 bp, synthetic construct
  misc_feature 1..22: note = chemically synthesized
  source 1..22: mol_type = other DNA
ttttacagctttatcttaggtg

SEQ ID NO: 134077 - DNA, 22 bp, synthetic construct
  misc_feature 1..22: note = chemically synthesized
  source 1..22: mol_type = other DNA
ttacagctttatcttaggtgga

SEQ ID NO: 134078 - DNA, 22 bp, synthetic construct
  misc_feature 1..22: note = chemically synthesized
  source 1..22: mol_type = other DNA
tacagctttatcttaggtggaa

SEQ ID NO: 134079 - DNA, 22 bp, synthetic construct
  misc_feature 1..22: note = chemically synthesized
  source 1..22: mol_type = other DNA
acagctttatcttaggtggaag

SEQ ID NO: 134080 - DNA, 22 bp, synthetic construct
  misc_feature 1..22: note = chemically synthesized
  source 1..22: mol_type = other DNA
cagctttatcttaggtggaagg

SEQ ID NO: 134081 - DNA, 22 bp, synthetic construct
  misc_feature 1..22: note = chemically synthesized
  source 1..22: mol_type = other DNA
tatcttaggtggaagggacttc

SEQ ID NO: 134082 - DNA, 22 bp, synthetic construct
  misc_feature 1..22: note = chemically synthesized
  source 1..22: mol_type = other DNA
atcttaggtggaagggacttca

SEQ ID NO: 134083 - DNA, 22 bp, synthetic construct
  misc_feature 1..22: note = chemically synthesized
  source 1..22: mol_type = other DNA
tcttaggtggaagggacttcag

SEQ ID NO: 134084 - DNA, 22 bp, synthetic construct
  misc_feature 1..22: note = chemically synthesized
  source 1..22: mol_type = other DNA
aggtggaagggacttcagctaa

SEQ ID NO: 134085 - DNA, 22 bp, synthetic construct
  misc_feature 1..22: note = chemically synthesized
  source 1..22: mol_type = other DNA
ggtggaagggacttcagctaag

SEQ ID NO: 134086 - DNA, 22 bp, synthetic construct
  misc_feature 1..22: note = chemically synthesized
  source 1..22: mol_type = other DNA
cagctaagttggctaaggccct

SEQ ID NO: 134087 - DNA, 22 bp, synthetic construct
  misc_feature 1..22: note = chemically synthesized
  source 1..22: mol_type = other DNA
agctaagttggctaaggccctt

SEQ ID NO: 134088 - DNA, 22 bp, synthetic construct
  misc_feature 1..22: note = chemically synthesized
  source 1..22: mol_type = other DNA
agttggctaaggcccttcaaat

SEQ ID NO: 134089 - DNA, 22 bp, synthetic construct
  misc_feature 1..22: note = chemically synthesized
  source 1..22: mol_type = other DNA
gctaaggcccttcaaattaaaa

SEQ ID NO: 134090 - DNA, 22 bp, synthetic construct
  misc_feature 1..22: note = chemically synthesized
  source 1..22: mol_type = other DNA
aggcccttcaaattaaaactct

SEQ ID NO: 134091 - DNA, 22 bp, synthetic construct
  misc_feature 1..22: note = chemically synthesized
  source 1..22: mol_type = other DNA
caaattaaaactctgttagttt

SEQ ID NO: 134092 - DNA, 22 bp, synthetic construct
  misc_feature 1..22: note = chemically synthesized
  source 1..22: mol_type = other DNA
aaattaaaactctgttagtttt

SEQ ID NO: 134093 - DNA, 22 bp, synthetic construct
  misc_feature 1..22: note = chemically synthesized
  source 1..22: mol_type = other DNA
aaactctgttagtttttctcat

SEQ ID NO: 134094 - DNA, 22 bp, synthetic construct
  misc_feature 1..22: note = chemically synthesized
  source 1..22: mol_type = other DNA
tgttagtttttctcatgcttag

SEQ ID NO: 134095 - DNA, 22 bp, synthetic construct
  misc_feature 1..22: note = chemically synthesized
  source 1..22: mol_type = other DNA
ttagtttttctcatgcttagtg

SEQ ID NO: 134096 - DNA, 22 bp, synthetic construct
  misc_feature 1..22: note = chemically synthesized
  source 1..22: mol_type = other DNA
gtttttctcatgcttagtgaga

SEQ ID NO: 134097 - DNA, 22 bp, synthetic construct
  misc_feature 1..22: note = chemically synthesized
  source 1..22: mol_type = other DNA
ttctcatgcttagtgagaaaga

SEQ ID NO: 134098 - DNA, 22 bp, synthetic construct
  misc_feature 1..22: note = chemically synthesized
  source 1..22: mol_type = other DNA
tctcatgcttagtgagaaagat

SEQ ID NO: 134099 - DNA, 22 bp, synthetic construct
  misc_feature 1..22: note = chemically synthesized
  source 1..22: mol_type = other DNA
ctcatgcttagtgagaaagatg

SEQ ID NO: 134100 - DNA, 22 bp, synthetic construct
  misc_feature 1..22: note = chemically synthesized
  source 1..22: mol_type = other DNA
tcatgcttagtgagaaagatgc

SEQ ID NO: 134101 - DNA, 22 bp, synthetic construct
  misc_feature 1..22: note = chemically synthesized
  source 1..22: mol_type = other DNA
atgcttagtgagaaagatgcca

SEQ ID NO: 134102 - DNA, 22 bp, synthetic construct
  misc_feature 1..22: note = chemically synthesized
  source 1..22: mol_type = other DNA
agtgagaaagatgccaactttc

SEQ ID NO: 134103 - DNA, 22 bp, synthetic construct
  misc_feature 1..22: note = chemically synthesized
  source 1..22: mol_type = other DNA
gtgagaaagatgccaactttct

SEQ ID NO: 134104 - DNA, 22 bp, synthetic construct
  misc_feature 1..22: note = chemically synthesized
  source 1..22: mol_type = other DNA
tctgctatgaaacttcaagtta

SEQ ID NO: 134105 - DNA, 22 bp, synthetic construct
  misc_feature 1..22: note = chemically synthesized
  source 1..22: mol_type = other DNA
ctgctatgaaacttcaagttat

SEQ ID NO: 134106 - DNA, 22 bp, synthetic construct
  misc_feature 1..22: note = chemically synthesized
  source 1..22: mol_type = other DNA
tgctatgaaacttcaagttata

SEQ ID NO: 134107 - DNA, 22 bp, synthetic construct
  misc_feature 1..22: note = chemically synthesized
  source 1..22: mol_type = other DNA
ctatgaaacttcaagttatagt

SEQ ID NO: 134108 - DNA, 22 bp, synthetic construct
  misc_feature 1..22: note = chemically synthesized
  source 1..22: mol_type = other DNA
tgaaacttcaagttatagtttt

SEQ ID NO: 134109 - DNA, 22 bp, synthetic construct
  misc_feature 1..22: note = chemically synthesized
  source 1..22: mol_type = other DNA
caagttatagttttttcaataa

SEQ ID NO: 134110 - DNA, 22 bp, synthetic construct
  misc_feature 1..22: note = chemically synthesized
  source 1..22: mol_type = other DNA
aagttatagttttttcaataac

SEQ ID NO: 134111 - DNA, 22 bp, synthetic construct
  misc_feature 1..22: note = chemically synthesized
  source 1..22: mol_type = other DNA
tagttttttcaataacctgcaa

SEQ ID NO: 134112 - DNA, 22 bp, synthetic construct
  misc_feature 1..22: note = chemically synthesized
  source 1..22: mol_type = other DNA
tttcaataacctgcaatttacg

SEQ ID NO: 134113 - DNA, 22 bp, synthetic construct
  misc_feature 1..22: note = chemically synthesized
  source 1..22: mol_type = other DNA
ttcaataacctgcaatttacgt

SEQ ID NO: 134114 - DNA, 22 bp, synthetic construct
  misc_feature 1..22: note = chemically synthesized
  source 1..22: mol_type = other DNA
tcaataacctgcaatttacgtc

SEQ ID NO: 134115 - DNA, 22 bp, synthetic construct
  misc_feature 1..22: note = chemically synthesized
  source 1..22: mol_type = other DNA
caataacctgcaatttacgtcc

SEQ ID NO: 134116 - DNA, 22 bp, synthetic construct
  misc_feature 1..22: note = chemically synthesized
  source 1..22: mol_type = other DNA
aataacctgcaatttacgtcca

SEQ ID NO: 134117 - DNA, 22 bp, synthetic construct
  misc_feature 1..22: note = chemically synthesized
  source 1..22: mol_type = other DNA
caatttacgtccaagaagaaag

SEQ ID NO: 134118 - DNA, 22 bp, synthetic construct
  misc_feature 1..22: note = chemically synthesized
  source 1..22: mol_type = other DNA
acgtccaagaagaaaggaagat

SEQ ID NO: 134119 - DNA, 22 bp, synthetic construct
  misc_feature 1..22: note = chemically synthesized
  source 1..22: mol_type = other DNA
cgtccaagaagaaaggaagatt

SEQ ID NO: 134120 - DNA, 22 bp, synthetic construct
  misc_feature 1..22: note = chemically synthesized
  source 1..22: mol_type = other DNA
aatctatcttcagtgatgacca

SEQ ID NO: 134121 - DNA, 22 bp, synthetic construct
  misc_feature 1..22: note = chemically synthesized
  source 1..22: mol_type = other DNA
tcttcagtgatgaccagcatca

SEQ ID NO: 134122 - DNA, 22 bp, synthetic construct
  misc_feature 1..22: note = chemically synthesized
  source 1..22: mol_type = other DNA
cagtgatgaccagcatcactga

SEQ ID NO: 134123 - DNA, 22 bp, synthetic construct
  misc_feature 1..22: note = chemically synthesized
  source 1..22: mol_type = other DNA
agtgatgaccagcatcactgaa

SEQ ID NO: 134124 - DNA, 22 bp, synthetic construct
  misc_feature 1..22: note = chemically synthesized
  source 1..22: mol_type = other DNA
aacggttatctgggcctgttgt

SEQ ID NO: 134125 - DNA, 22 bp, synthetic construct
  misc_feature 1..22: note = chemically synthesized
  source 1..22: mol_type = other DNA
tctgggcctgttgtggattgtg

SEQ ID NO: 134126 - DNA, 22 bp, synthetic construct
  misc_feature 1..22: note = chemically synthesized
  source 1..22: mol_type = other DNA
ggcctgttgtggattgtgaata

SEQ ID NO: 134127 - DNA, 22 bp, synthetic construct
  misc_feature 1..22: note = chemically synthesized
  source 1..22: mol_type = other DNA
ttgtggattgtgaatatgacaa

SEQ ID NO: 134128 - DNA, 22 bp, synthetic construct
  misc_feature 1..22: note = chemically synthesized
  source 1..22: mol_type = other DNA
tggattgtgaatatgacaatat

SEQ ID NO: 134129 - DNA, 22 bp, synthetic construct
  misc_feature 1..22: note = chemically synthesized
  source 1..22: mol_type = other DNA
tgaatatgacaatatttgaatc

SEQ ID NO: 134130 - DNA, 22 bp, synthetic construct
  misc_feature 1..22: note = chemically synthesized
  source 1..22: mol_type = other DNA
gaatctctctgacgaggtataa

SEQ ID NO: 134131 - DNA, 22 bp, synthetic construct
  misc_feature 1..22: note = chemically synthesized
  source 1..22: mol_type = other DNA
aatctctctgacgaggtataag

SEQ ID NO: 134132 - DNA, 22 bp, synthetic construct
  misc_feature 1..22: note = chemically synthesized
  source 1..22: mol_type = other DNA
tctgacgaggtataagagaggg

SEQ ID NO: 134133 - DNA, 22 bp, synthetic construct
  misc_feature 1..22: note = chemically synthesized
  source 1..22: mol_type = other DNA
tgacgaggtataagagagggac

SEQ ID NO: 134134 - DNA, 22 bp, synthetic construct
  misc_feature 1..22: note = chemically synthesized
  source 1..22: mol_type = other DNA
acgaggtataagagagggacac

SEQ ID NO: 134135 - DNA, 22 bp, synthetic construct
  misc_feature 1..22: note = chemically synthesized
  source 1..22: mol_type = other DNA
acttttgaatatgcagggctgt

SEQ ID NO: 134136 - DNA, 22 bp, synthetic construct
  misc_feature 1..22: note = chemically synthesized
  source 1..22: mol_type = other DNA
ttgaatatgcagggctgtttcc

SEQ ID NO: 134137 - DNA, 22 bp, synthetic construct
  misc_feature 1..22: note = chemically synthesized
  source 1..22: mol_type = other DNA
tgaatatgcagggctgtttcca

SEQ ID NO: 134138 - DNA, 22 bp, synthetic construct
  misc_feature 1..22: note = chemically synthesized
  source 1..22: mol_type = other DNA
gaatatgcagggctgtttccat

SEQ ID NO: 134139 - DNA, 22 bp, synthetic construct
  misc_feature 1..22: note = chemically synthesized
  source 1..22: mol_type = other DNA
aatatgcagggctgtttccatg

SEQ ID NO: 134140 - DNA, 22 bp, synthetic construct
  misc_feature 1..22: note = chemically synthesized
  source 1..22: mol_type = other DNA
tttccatgatggaggaaagaga

SEQ ID NO: 134141 - DNA, 22 bp, synthetic construct
  misc_feature 1..22: note = chemically synthesized
  source 1..22: mol_type = other DNA
ccatgatggaggaaagagattg

SEQ ID NO: 134142 - DNA, 22 bp, synthetic construct
  misc_feature 1..22: note = chemically synthesized
  source 1..22: mol_type = other DNA
catgatggaggaaagagattgg

SEQ ID NO: 134143 - DNA, 22 bp, synthetic construct
  misc_feature 1..22: note = chemically synthesized
  source 1..22: mol_type = other DNA
gaggaatgtagatttatgggtg

SEQ ID NO: 134144 - DNA, 22 bp, synthetic construct
  misc_feature 1..22: note = chemically synthesized
  source 1..22: mol_type = other DNA
atgggtgaagttgtttggcttg

SEQ ID NO: 134145 - DNA, 22 bp, synthetic construct
  misc_feature 1..22: note = chemically synthesized
  source 1..22: mol_type = other DNA
tgggtgaagttgtttggcttgg

SEQ ID NO: 134146 - DNA, 22 bp, synthetic construct
  misc_feature 1..22: note = chemically synthesized
  source 1..22: mol_type = other DNA
tttggcttggaagttggatggt

SEQ ID NO: 134147 - DNA, 22 bp, synthetic construct
  misc_feature 1..22: note = chemically synthesized
  source 1..22: mol_type = other DNA
ggcttggaagttggatggtcag

SEQ ID NO: 134148 - DNA, 22 bp, synthetic construct
  misc_feature 1..22: note = chemically synthesized
  source 1..22: mol_type = other DNA
gcttggaagttggatggtcagt

SEQ ID NO: 134149 - DNA, 22 bp, synthetic construct
  misc_feature 1..22: note = chemically synthesized
  source 1..22: mol_type = other DNA
ggaagttggatggtcagttcca

SEQ ID NO: 134150 - DNA, 22 bp, synthetic construct
  misc_feature 1..22: note = chemically synthesized
  source 1..22: mol_type = other DNA
gaagttggatggtcagttccag

SEQ ID NO: 134151 - DNA, 22 bp, synthetic construct
  misc_feature 1..22: note = chemically synthesized
  source 1..22: mol_type = other DNA
gatggtcagttccaggtgctac

SEQ ID NO: 134152 - DNA, 22 bp, synthetic construct
  misc_feature 1..22: note = chemically synthesized
  source 1..22: mol_type = other DNA
caggtgctaccattggtgctga

SEQ ID NO: 134153 - DNA, 22 bp, synthetic construct
  misc_feature 1..22: note = chemically synthesized
  source 1..22: mol_type = other DNA
ccattggtgctgaaggagaacg

SEQ ID NO: 134154 - DNA, 22 bp, synthetic construct
  misc_feature 1..22: note = chemically synthesized
  source 1..22: mol_type = other DNA
gtgctgaaggagaacgtttcca

SEQ ID NO: 134155 - DNA, 22 bp, synthetic construct
  misc_feature 1..22: note = chemically synthesized
  source 1..22: mol_type = other DNA
aaggagaacgtttccaaaatgt

SEQ ID NO: 134156 - DNA, 22 bp, synthetic construct
  misc_feature 1..22: note = chemically synthesized
  source 1..22: mol_type = other DNA
ccaaaatgtctttggggaaata

SEQ ID NO: 134157 - DNA, 22 bp, synthetic construct
  misc_feature 1..22: note = chemically synthesized
  source 1..22: mol_type = other DNA
caaaatgtctttggggaaatac

SEQ ID NO: 134158 - DNA, 22 bp, synthetic construct
  misc_feature 1..22: note = chemically synthesized
  source 1..22: mol_type = other DNA
tggggaaatacaatttcctatc

SEQ ID NO: 134159 - DNA, 22 bp, synthetic construct
  misc_feature 1..22: note = chemically synthesized
  source 1..22: mol_type = other DNA
ggggaaatacaatttcctatcg

SEQ ID NO: 134160 - DNA, 22 bp, synthetic construct
  misc_feature 1..22: note = chemically synthesized
  source 1..22: mol_type = other DNA
gggaaatacaatttcctatcgt

SEQ ID NO: 134161 - DNA, 22 bp, synthetic construct
  misc_feature 1..22: note = chemically synthesized
  source 1..22: mol_type = other DNA
cctatcgttttgtttagttgac

SEQ ID NO: 134162 - DNA, 22 bp, synthetic construct
  misc_feature 1..22: note = chemically synthesized
  source 1..22: mol_type = other DNA
ctatcgttttgtttagttgaca

SEQ ID NO: 134163 - DNA, 22 bp, synthetic construct
  misc_feature 1..22: note = chemically synthesized
  source 1..22: mol_type = other DNA
tcgttttgtttagttgacacaa

SEQ ID NO: 134164 - DNA, 22 bp, synthetic construct
  misc_feature 1..22: note = chemically synthesized
  source 1..22: mol_type = other DNA
tgtttagttgacacaaaatctt

SEQ ID NO: 134165 - DNA, 22 bp, synthetic construct
  misc_feature 1..22: note = chemically synthesized
  source 1..22: mol_type = other DNA
gtttagttgacacaaaatctta

SEQ ID NO: 134166 - DNA, 22 bp, synthetic construct
  misc_feature 1..22: note = chemically synthesized
  source 1..22: mol_type = other DNA
tttagttgacacaaaatcttac

SEQ ID NO: 134167 - DNA, 22 bp, synthetic construct
  misc_feature 1..22: note = chemically synthesized
  source 1..22: mol_type = other DNA
agttgacacaaaatcttactca

SEQ ID NO: 134168 - DNA, 22 bp, synthetic construct
  misc_feature 1..22: note = chemically synthesized
  source 1..22: mol_type = other DNA
gttgacacaaaatcttactcag

SEQ ID NO: 134169 - DNA, 22 bp, synthetic construct
  misc_feature 1..22: note = chemically synthesized
  source 1..22: mol_type = other DNA
acacaaaatcttactcagcagg

SEQ ID NO: 134170 - DNA, 22 bp, synthetic construct
  misc_feature 1..22: note = chemically synthesized
  source 1..22: mol_type = other DNA
actcagcaggggcccaaagtgc

SEQ ID NO: 134171 - DNA, 22 bp, synthetic construct
  misc_feature 1..22: note = chemically synthesized
  source 1..22: mol_type = other DNA
ctcagcaggggcccaaagtgca

SEQ ID NO: 134172 - DNA, 22 bp, synthetic construct
  misc_feature 1..22: note = chemically synthesized
  source 1..22: mol_type = other DNA
agcaggggcccaaagtgcaatt

SEQ ID NO: 134173 - DNA, 22 bp, synthetic construct
  misc_feature 1..22: note = chemically synthesized
  source 1..22: mol_type = other DNA
gtctatattatcaactcctcta

SEQ ID NO: 134174 - DNA, 22 bp, synthetic construct
  misc_feature 1..22: note = chemically synthesized
  source 1..22: mol_type = other DNA
tattatcaactcctctatacat

SEQ ID NO: 134175 - DNA, 22 bp, synthetic construct
  misc_feature 1..22: note = chemically synthesized
  source 1..22: mol_type = other DNA
tcaactcctctatacatattta

SEQ ID NO: 134176 - DNA, 22 bp, synthetic construct
  misc_feature 1..22: note = chemically synthesized
  source 1..22: mol_type = other DNA
ctctatacatatttagacactt

SEQ ID NO: 134177 - DNA, 22 bp, synthetic construct
  misc_feature 1..22: note = chemically synthesized
  source 1..22: mol_type = other DNA
tatacatatttagacacttcgc

SEQ ID NO: 134178 - DNA, 22 bp, synthetic construct
  misc_feature 1..22: note = chemically synthesized
  source 1..22: mol_type = other DNA
tacatatttagacacttcgcag

SEQ ID NO: 134179 - DNA, 22 bp, synthetic construct
  misc_feature 1..22: note = chemically synthesized
  source 1..22: mol_type = other DNA
agacacttcgcaggtatcaagt

SEQ ID NO: 134180 - DNA, 22 bp, synthetic construct
  misc_feature 1..22: note = chemically synthesized
  source 1..22: mol_type = other DNA
gacacttcgcaggtatcaagtc

SEQ ID NO: 134181 - DNA, 22 bp, synthetic construct
  misc_feature 1..22: note = chemically synthesized
  source 1..22: mol_type = other DNA
cgcaggtatcaagtcattacca

SEQ ID NO: 134182 - DNA, 22 bp, synthetic construct
  misc_feature 1..22: note = chemically synthesized
  source 1..22: mol_type = other DNA
gcaggtatcaagtcattaccag

SEQ ID NO: 134183 - DNA, 22 bp, synthetic construct
  misc_feature 1..22: note = chemically synthesized
  source 1..22: mol_type = other DNA
ccaggagcaccagcttagttgt

SEQ ID NO: 134184 - DNA, 22 bp, synthetic construct
  misc_feature 1..22: note = chemically synthesized
  source 1..22: mol_type = other DNA
agttgtttcatcttctacaacc

SEQ ID NO: 134185 - DNA, 22 bp, synthetic construct
  misc_feature 1..22: note = chemically synthesized
  source 1..22: mol_type = other DNA
gttgtttcatcttctacaacct

SEQ ID NO: 134186 - DNA, 22 bp, synthetic construct
  misc_feature 1..22: note = chemically synthesized
  source 1..22: mol_type = other DNA
tttcatcttctacaacctcatt

SEQ ID NO: 134187 - DNA, 22 bp, synthetic construct
  misc_feature 1..22: note = chemically synthesized
  source 1..22: mol_type = other DNA
catcttctacaacctcattaga

SEQ ID NO: 134188 - DNA, 22 bp, synthetic construct
  misc_feature 1..22: note = chemically synthesized
  source 1..22: mol_type = other DNA
atcttctacaacctcattagat

SEQ ID NO: 134189 - DNA, 22 bp, synthetic construct
  misc_feature 1..22: note = chemically synthesized
  source 1..22: mol_type = other DNA
ctacaacctcattagattgact

SEQ ID NO: 134190 - DNA, 22 bp, synthetic construct
  misc_feature 1..22: note = chemically synthesized
  source 1..22: mol_type = other DNA
tacaacctcattagattgactg

SEQ ID NO: 134191 - DNA, 22 bp, synthetic construct
  misc_feature 1..22: note = chemically synthesized
  source 1..22: mol_type = other DNA
caacctcattagattgactgac

SEQ ID NO: 134192 - DNA, 22 bp, synthetic construct
  misc_feature 1..22: note = chemically synthesized
  source 1..22: mol_type = other DNA
attagattgactgactgtaact

SEQ ID NO: 134193 - DNA, 22 bp, synthetic construct
  misc_feature 1..22: note = chemically synthesized
  source 1..22: mol_type = other DNA
gattgactgactgtaacttctt

SEQ ID NO: 134194 - DNA, 22 bp, synthetic construct
  misc_feature 1..22: note = chemically synthesized
  source 1..22: mol_type = other DNA
actgactgtaacttctttcaac

SEQ ID NO: 134195 - DNA, 22 bp, synthetic construct
  misc_feature 1..22: note = chemically synthesized
  source 1..22: mol_type = other DNA
actgtaacttctttcaacgtaa

SEQ ID NO: 134196 - DNA, 22 bp, synthetic construct
  misc_feature 1..22: note = chemically synthesized
  source 1..22: mol_type = other DNA
taacttctttcaacgtaatctc

SEQ ID NO: 134197 - DNA, 22 bp, synthetic construct
  misc_feature 1..22: note = chemically synthesized
  source 1..22: mol_type = other DNA
ctttcaacgtaatctccagaaa

SEQ ID NO: 134198 - DNA, 22 bp, synthetic construct
  misc_feature 1..22: note = chemically synthesized
  source 1..22: mol_type = other DNA
tttcaacgtaatctccagaaaa

SEQ ID NO: 134199 - DNA, 22 bp, synthetic construct
  misc_feature 1..22: note = chemically synthesized
  source 1..22: mol_type = other DNA
tcaacgtaatctccagaaaaca

SEQ ID NO: 134200 - DNA, 22 bp, synthetic construct
  misc_feature 1..22: note = chemically synthesized
  source 1..22: mol_type = other DNA
caacgtaatctccagaaaacaa

SEQ ID NO: 134201 - DNA, 22 bp, synthetic construct
  misc_feature 1..22: note = chemically synthesized
  source 1..22: mol_type = other DNA
aacgtaatctccagaaaacaag

SEQ ID NO: 134202 - DNA, 22 bp, synthetic construct
  misc_feature 1..22: note = chemically synthesized
  source 1..22: mol_type = other DNA
cagaaaacaagttttactgcat

SEQ ID NO: 134203 - DNA, 22 bp, synthetic construct
  misc_feature 1..22: note = chemically synthesized
  source 1..22: mol_type = other DNA
tactgcataccttcaaccttaa

SEQ ID NO: 134204 - DNA, 22 bp, synthetic construct
  misc_feature 1..22: note = chemically synthesized
  source 1..22: mol_type = other DNA
actgcataccttcaaccttaaa

SEQ ID NO: 134205 - DNA, 22 bp, synthetic construct
  misc_feature 1..22: note = chemically synthesized
  source 1..22: mol_type = other DNA
ctgcataccttcaaccttaaaa

SEQ ID NO: 134206 - DNA, 22 bp, synthetic construct
  misc_feature 1..22: note = chemically synthesized
  source 1..22: mol_type = other DNA
cataccttcaaccttaaaatgt

SEQ ID NO: 134207 - DNA, 22 bp, synthetic construct
  misc_feature 1..22: note = chemically synthesized
  source 1..22: mol_type = other DNA
caaccttaaaatgtctcctttc

SEQ ID NO: 134208 - DNA, 22 bp, synthetic construct
  misc_feature 1..22: note = chemically synthesized
  source 1..22: mol_type = other DNA
aaccttaaaatgtctcctttca

SEQ ID NO: 134209 - DNA, 22 bp, synthetic construct
  misc_feature 1..22: note = chemically synthesized
  source 1..22: mol_type = other DNA
aaaatgtctcctttcagccttg

SEQ ID NO: 134210 - DNA, 22 bp, synthetic construct
  misc_feature 1..22: note = chemically synthesized
  source 1..22: mol_type = other DNA
aaatgtctcctttcagccttgt

SEQ ID NO: 134211 - DNA, 22 bp, synthetic construct
  misc_feature 1..22: note = chemically synthesized
  source 1..22: mol_type = other DNA
ctttcagccttgtccctgtact

SEQ ID NO: 134212 - DNA, 22 bp, synthetic construct
  misc_feature 1..22: note = chemically synthesized
  source 1..22: mol_type = other DNA
tcagccttgtccctgtactatt

SEQ ID NO: 134213 - DNA, 22 bp, synthetic construct
  misc_feature 1..22: note = chemically synthesized
  source 1..22: mol_type = other DNA
cagccttgtccctgtactatta

SEQ ID NO: 134214 - DNA, 22 bp, synthetic construct
  misc_feature 1..22: note = chemically synthesized
  source 1..22: mol_type = other DNA
agccttgtccctgtactattag

SEQ ID NO: 134215 - DNA, 22 bp, synthetic construct
  misc_feature 1..22: note = chemically synthesized
  source 1..22: mol_type = other DNA
gtccctgtactattagtcctat

SEQ ID NO: 134216 - DNA, 22 bp, synthetic construct
  misc_feature 1..22: note = chemically synthesized
  source 1..22: mol_type = other DNA
tccctgtactattagtcctatt

SEQ ID NO: 134217 - DNA, 22 bp, synthetic construct
  misc_feature 1..22: note = chemically synthesized
  source 1..22: mol_type = other DNA
tactattagtcctatttgcctt

SEQ ID NO: 134218 - DNA, 22 bp, synthetic construct
  misc_feature 1..22: note = chemically synthesized
  source 1..22: mol_type = other DNA
ttagtcctatttgccttgcata

SEQ ID NO: 134219 - DNA, 22 bp, synthetic construct
  misc_feature 1..22: note = chemically synthesized
  source 1..22: mol_type = other DNA
gtcctatttgccttgcatagat

SEQ ID NO: 134220 - DNA, 22 bp, synthetic construct
  misc_feature 1..22: note = chemically synthesized
  source 1..22: mol_type = other DNA
tttgccttgcatagatgtgaga

SEQ ID NO: 134221 - DNA, 22 bp, synthetic construct
  misc_feature 1..22: note = chemically synthesized
  source 1..22: mol_type = other DNA
gccttgcatagatgtgagatgg

SEQ ID NO: 134222 - DNA, 22 bp, synthetic construct
  misc_feature 1..22: note = chemically synthesized
  source 1..22: mol_type = other DNA
ccttgcatagatgtgagatggt

SEQ ID NO: 134223 - DNA, 22 bp, synthetic construct
  misc_feature 1..22: note = chemically synthesized
  source 1..22: mol_type = other DNA
gcatagatgtgagatggtacac

SEQ ID NO: 134224 - DNA, 22 bp, synthetic construct
  misc_feature 1..22: note = chemically synthesized
  source 1..22: mol_type = other DNA
catagatgtgagatggtacaca

SEQ ID NO: 134225 - DNA, 22 bp, synthetic construct
  misc_feature 1..22: note = chemically synthesized
  source 1..22: mol_type = other DNA
cacttataattttctttctctt

SEQ ID NO: 134226 - DNA, 22 bp, synthetic construct
  misc_feature 1..22: note = chemically synthesized
  source 1..22: mol_type = other DNA
acttataattttctttctcttc

SEQ ID NO: 134227 - DNA, 22 bp, synthetic construct
  misc_feature 1..22: note = chemically synthesized
  source 1..22: mol_type = other DNA
ataattttctttctcttcctat

SEQ ID NO: 134228 - DNA, 22 bp, synthetic construct
  misc_feature 1..22: note = chemically synthesized
  source 1..22: mol_type = other DNA
taattttctttctcttcctata

SEQ ID NO: 134229 - DNA, 22 bp, synthetic construct
  misc_feature 1..22: note = chemically synthesized
  source 1..22: mol_type = other DNA
tctttctcttcctatatggtaa

SEQ ID NO: 134230 - DNA, 22 bp, synthetic construct
  misc_feature 1..22: note = chemically synthesized
  source 1..22: mol_type = other DNA
ctttctcttcctatatggtaac

SEQ ID NO: 134231 - DNA, 22 bp, synthetic construct
  misc_feature 1..22: note = chemically synthesized
  source 1..22: mol_type = other DNA
tttctcttcctatatggtaaca

SEQ ID NO: 134232 - DNA, 22 bp, synthetic construct
  misc_feature 1..22: note = chemically synthesized
  source 1..22: mol_type = other DNA
tctcttcctatatggtaacata

SEQ ID NO: 134233 - DNA, 22 bp, synthetic construct
  misc_feature 1..22: note = chemically synthesized
  source 1..22: mol_type = other DNA
ctcttcctatatggtaacataa

SEQ ID NO: 134234 - DNA, 22 bp, synthetic construct
  misc_feature 1..22: note = chemically synthesized
  source 1..22: mol_type = other DNA
tcttcctatatggtaacataac

SEQ ID NO: 134235 - DNA, 22 bp, synthetic construct
  misc_feature 1..22: note = chemically synthesized
  source 1..22: mol_type = other DNA
ttcctatatggtaacataactg

SEQ ID NO: 134236 - DNA, 22 bp, synthetic construct
  misc_feature 1..22: note = chemically synthesized
  source 1..22: mol_type = other DNA
cctatatggtaacataactgat

SEQ ID NO: 134237 - DNA, 22 bp, synthetic construct
  misc_feature 1..22: note = chemically synthesized
  source 1..22: mol_type = other DNA
ctatatggtaacataactgata

SEQ ID NO: 134238 - DNA, 22 bp, synthetic construct
  misc_feature 1..22: note = chemically synthesized
  source 1..22: mol_type = other DNA
tatggtaacataactgataaga

SEQ ID NO: 134239 - DNA, 22 bp, synthetic construct
  misc_feature 1..22: note = chemically synthesized
  source 1..22: mol_type = other DNA
ataagacacaaagaagataaaa

SEQ ID NO: 134240 - DNA, 22 bp, synthetic construct
  misc_feature 1..22: note = chemically synthesized
  source 1..22: mol_type = other DNA
atatattattgttggggtacag

SEQ ID NO: 134241 - DNA, 22 bp, synthetic construct
  misc_feature 1..22: note = chemically synthesized
  source 1..22: mol_type = other DNA
ttgttggggtacagttctttat

SEQ ID NO: 134242 - DNA, 22 bp, synthetic construct
  misc_feature 1..22: note = chemically synthesized
  source 1..22: mol_type = other DNA
ttggggtacagttctttattga

SEQ ID NO: 134243 - DNA, 22 bp, synthetic construct
  misc_feature 1..22: note = chemically synthesized
  source 1..22: mol_type = other DNA
gggtacagttctttattgagaa

SEQ ID NO: 134244 - DNA, 22 bp, synthetic construct
  misc_feature 1..22: note = chemically synthesized
  source 1..22: mol_type = other DNA
tttattgagaataagagtttct

SEQ ID NO: 134245 - DNA, 22 bp, synthetic construct
  misc_feature 1..22: note = chemically synthesized
  source 1..22: mol_type = other DNA
tattgagaataagagtttcttt

SEQ ID NO: 134246 - DNA, 22 bp, synthetic construct
  misc_feature 1..22: note = chemically synthesized
  source 1..22: mol_type = other DNA
attgagaataagagtttctttt

SEQ ID NO: 134247 - DNA, 22 bp, synthetic construct
  misc_feature 1..22: note = chemically synthesized
  source 1..22: mol_type = other DNA
ttgagaataagagtttcttttc

SEQ ID NO: 134248 - DNA, 22 bp, synthetic construct
  misc_feature 1..22: note = chemically synthesized
  source 1..22: mol_type = other DNA
agaataagagtttcttttcatg

SEQ ID NO: 134249 - DNA, 22 bp, synthetic construct
  misc_feature 1..22: note = chemically synthesized
  source 1..22: mol_type = other DNA
cttttcatgtattggtctagct

SEQ ID NO: 134250 - DNA, 22 bp, synthetic construct
  misc_feature 1..22: note = chemically synthesized
  source 1..22: mol_type = other DNA
ttttcatgtattggtctagcta

SEQ ID NO: 134251 - DNA, 22 bp, synthetic construct
  misc_feature 1..22: note = chemically synthesized
  source 1..22: mol_type = other DNA
ttcatgtattggtctagctatt

SEQ ID NO: 134252 - DNA, 22 bp, synthetic construct
  misc_feature 1..22: note = chemically synthesized
  source 1..22: mol_type = other DNA
tcatgtattggtctagctattt

SEQ ID NO: 134253 - DNA, 22 bp, synthetic construct
  misc_feature 1..22: note = chemically synthesized
  source 1..22: mol_type = other DNA
catgtattggtctagctattta

SEQ ID NO: 134254 - DNA, 22 bp, synthetic construct
  misc_feature 1..22: note = chemically synthesized
  source 1..22: mol_type = other DNA
atgtattggtctagctatttag

SEQ ID NO: 134255 - DNA, 22 bp, synthetic construct
  misc_feature 1..22: note = chemically synthesized
  source 1..22: mol_type = other DNA
gtctagctatttagtagtatag

SEQ ID NO: 134256 - DNA, 22 bp, synthetic construct
  misc_feature 1..22: note = chemically synthesized
  source 1..22: mol_type = other DNA
gctatttagtagtatagataga

SEQ ID NO: 134257 - DNA, 22 bp, synthetic construct
  misc_feature 1..22: note = chemically synthesized
  source 1..22: mol_type = other DNA
tttagtagtatagatagatcac

SEQ ID NO: 134258 - DNA, 22 bp, synthetic construct
  misc_feature 1..22: note = chemically synthesized
  source 1..22: mol_type = other DNA
agtagtatagatagatcacagg

SEQ ID NO: 134259 - DNA, 22 bp, synthetic construct
  misc_feature 1..22: note = chemically synthesized
  source 1..22: mol_type = other DNA
gtagtatagatagatcacagga

SEQ ID NO: 134260 - DNA, 22 bp, synthetic construct
  misc_feature 1..22: note = chemically synthesized
  source 1..22: mol_type = other DNA
tagacttggtgtatttagacat

SEQ ID NO: 134261 - DNA, 22 bp, synthetic construct
  misc_feature 1..22: note = chemically synthesized
  source 1..22: mol_type = other DNA
ggtgtatttagacatcaacaaa

SEQ ID NO: 134262 - DNA, 22 bp, synthetic construct
  misc_feature 1..22: note = chemically synthesized
  source 1..22: mol_type = other DNA
gtgtatttagacatcaacaaaa

SEQ ID NO: 134263 - DNA, 22 bp, synthetic construct
  misc_feature 1..22: note = chemically synthesized
  source 1..22: mol_type = other DNA
agacatcaacaaaaacattttc

SEQ ID NO: 134264 - DNA, 22 bp, synthetic construct
  misc_feature 1..22: note = chemically synthesized
  source 1..22: mol_type = other DNA
gacatcaacaaaaacattttca

SEQ ID NO: 134265 - DNA, 22 bp, synthetic construct
  misc_feature 1..22: note = chemically synthesized
  source 1..22: mol_type = other DNA
tcaaagtagtcttttcattgga

SEQ ID NO: 134266 - DNA, 22 bp, synthetic construct
  misc_feature 1..22: note = chemically synthesized
  source 1..22: mol_type = other DNA
caaagtagtcttttcattggaa

SEQ ID NO: 134267 - DNA, 22 bp, synthetic construct
  misc_feature 1..22: note = chemically synthesized
  source 1..22: mol_type = other DNA
aaagtagtcttttcattggaat

SEQ ID NO: 134268 - DNA, 22 bp, synthetic construct
  misc_feature 1..22: note = chemically synthesized
  source 1..22: mol_type = other DNA
ttcattggaatgggagaatata

SEQ ID NO: 134269 - DNA, 22 bp, synthetic construct
  misc_feature 1..22: note = chemically synthesized
  source 1..22: mol_type = other DNA
tcattggaatgggagaatataa

SEQ ID NO: 134270 - DNA, 22 bp, synthetic construct
  misc_feature 1..22: note = chemically synthesized
  source 1..22: mol_type = other DNA
cattggaatgggagaatataag

SEQ ID NO: 134271 - DNA, 22 bp, synthetic construct
  misc_feature 1..22: note = chemically synthesized
  source 1..22: mol_type = other DNA
attggaatgggagaatataagt

SEQ ID NO: 134272 - DNA, 22 bp, synthetic construct
  misc_feature 1..22: note = chemically synthesized
  source 1..22: mol_type = other DNA
gaatgggagaatataagttcca

SEQ ID NO: 134273 - DNA, 22 bp, synthetic construct
  misc_feature 1..22: note = chemically synthesized
  source 1..22: mol_type = other DNA
cataagtggttaaaacatctta

SEQ ID NO: 134274 - DNA, 22 bp, synthetic construct
  misc_feature 1..22: note = chemically synthesized
  source 1..22: mol_type = other DNA
aaacatcttaccttgagactca

SEQ ID NO: 134275 - DNA, 22 bp, synthetic construct
  misc_feature 1..22: note = chemically synthesized
  source 1..22: mol_type = other DNA
accttgagactcacttgcagcc

SEQ ID NO: 134276 - DNA, 22 bp, synthetic construct
  misc_feature 1..22: note = chemically synthesized
  source 1..22: mol_type = other DNA
ccttgagactcacttgcagcca

SEQ ID NO: 134277 - DNA, 22 bp, synthetic construct
  misc_feature 1..22: note = chemically synthesized
  source 1..22: mol_type = other DNA
gagactcacttgcagccaaagt

SEQ ID NO: 134278 - DNA, 22 bp, synthetic construct
  misc_feature 1..22: note = chemically synthesized
  source 1..22: mol_type = other DNA
agactcacttgcagccaaagta

SEQ ID NO: 134279 - DNA, 22 bp, synthetic construct
  misc_feature 1..22: note = chemically synthesized
  source 1..22: mol_type = other DNA
acttgcagccaaagtactaaga

SEQ ID NO: 134280 - DNA, 22 bp, synthetic construct
  misc_feature 1..22: note = chemically synthesized
  source 1..22: mol_type = other DNA
gcagccaaagtactaagaagga

SEQ ID NO: 134281 - DNA, 22 bp, synthetic construct
  misc_feature 1..22: note = chemically synthesized
  source 1..22: mol_type = other DNA
cagccaaagtactaagaaggaa

SEQ ID NO: 134282 - DNA, 22 bp, synthetic construct
  misc_feature 1..22: note = chemically synthesized
  source 1..22: mol_type = other DNA
agaaggaaaaaaacacataaat

SEQ ID NO: 134283 - DNA, 22 bp, synthetic construct
  misc_feature 1..22: note = chemically synthesized
  source 1..22: mol_type = other DNA
ttctcatgtggtcacagctatt

SEQ ID NO: 134284 - DNA, 22 bp, synthetic construct
  misc_feature 1..22: note = chemically synthesized
  source 1..22: mol_type = other DNA
ctcatgtggtcacagctatttg

SEQ ID NO: 134285 - DNA, 22 bp, synthetic construct
  misc_feature 1..22: note = chemically synthesized
  source 1..22: mol_type = other DNA
tcatgtggtcacagctatttgg

SEQ ID NO: 134286 - DNA, 22 bp, synthetic construct
  misc_feature 1..22: note = chemically synthesized
  source 1..22: mol_type = other DNA
atgtggtcacagctatttggga

SEQ ID NO: 134287 - DNA, 22 bp, synthetic construct
  misc_feature 1..22: note = chemically synthesized
  source 1..22: mol_type = other DNA
tttgggaggctgaggtgtaaaa

SEQ ID NO: 134288 - DNA, 22 bp, synthetic construct
  misc_feature 1..22: note = chemically synthesized
  source 1..22: mol_type = other DNA
gggaggctgaggtgtaaaaatc

SEQ ID NO: 134289 - DNA, 22 bp, synthetic construct
  misc_feature 1..22: note = chemically synthesized
  source 1..22: mol_type = other DNA
ggaggctgaggtgtaaaaatca

SEQ ID NO: 134290 - DNA, 22 bp, synthetic construct
  misc_feature 1..22: note = chemically synthesized
  source 1..22: mol_type = other DNA
aggtgtaaaaatcacttaagcc

SEQ ID NO: 134291 - DNA, 22 bp, synthetic construct
  misc_feature 1..22: note = chemically synthesized
  source 1..22: mol_type = other DNA
aagcctaaaagcttgaggctgc

SEQ ID NO: 134292 - DNA, 22 bp, synthetic construct
  misc_feature 1..22: note = chemically synthesized
  source 1..22: mol_type = other DNA
agcctaaaagcttgaggctgca

SEQ ID NO: 134293 - DNA, 22 bp, synthetic construct
  misc_feature 1..22: note = chemically synthesized
  source 1..22: mol_type = other DNA
aaagcttgaggctgcagtaaac

SEQ ID NO: 134294 - DNA, 22 bp, synthetic construct
  misc_feature 1..22: note = chemically synthesized
  source 1..22: mol_type = other DNA
gaggctgcagtaaactatgatc

SEQ ID NO: 134295 - DNA, 22 bp, synthetic construct
  misc_feature 1..22: note = chemically synthesized
  source 1..22: mol_type = other DNA
aggctgcagtaaactatgatct

SEQ ID NO: 134296 - DNA, 22 bp, synthetic construct
  misc_feature 1..22: note = chemically synthesized
  source 1..22: mol_type = other DNA
cagtaaactatgatctcaccac

SEQ ID NO: 134297 - DNA, 22 bp, synthetic construct
  misc_feature 1..22: note = chemically synthesized
  source 1..22: mol_type = other DNA
tgatctcaccactgcactccct

SEQ ID NO: 134298 - DNA, 22 bp, synthetic construct
  misc_feature 1..22: note = chemically synthesized
  source 1..22: mol_type = other DNA
accactgcactccctcctgggt

SEQ ID NO: 134299 - DNA, 22 bp, synthetic construct
  misc_feature 1..22: note = chemically synthesized
  source 1..22: mol_type = other DNA
cactccctcctgggtgacagag

SEQ ID NO: 134300 - DNA, 22 bp, synthetic construct
  misc_feature 1..22: note = chemically synthesized
  source 1..22: mol_type = other DNA
cctcctgggtgacagagcaaga

SEQ ID NO: 134301 - DNA, 22 bp, synthetic construct
  misc_feature 1..22: note = chemically synthesized
  source 1..22: mol_type = other DNA
ctgggtgacagagcaagacact

SEQ ID NO: 134302 - DNA, 22 bp, synthetic construct
  misc_feature 1..22: note = chemically synthesized
  source 1..22: mol_type = other DNA
ggtgacagagcaagacactgtc

SEQ ID NO: 134303 - DNA, 22 bp, synthetic construct
  misc_feature 1..22: note = chemically synthesized
  source 1..22: mol_type = other DNA
tctcaaaagagaggaaagaaaa

SEQ ID NO: 134304 - DNA, 22 bp, synthetic construct
  misc_feature 1..22: note = chemically synthesized
  source 1..22: mol_type = other DNA
aaaagagaggaaagaaaagaaa

SEQ ID NO: 134305 - DNA, 22 bp, synthetic construct
  misc_feature 1..22: note = chemically synthesized
  source 1..22: mol_type = other DNA
caaaaaatctttcttcttgatg

SEQ ID NO: 134306 - DNA, 22 bp, synthetic construct
  misc_feature 1..22: note = chemically synthesized
  source 1..22: mol_type = other DNA
aaaaaatctttcttcttgatgt

SEQ ID NO: 134307 - DNA, 22 bp, synthetic construct
  misc_feature 1..22: note = chemically synthesized
  source 1..22: mol_type = other DNA
tcttcttgatgttgttatggat

SEQ ID NO: 134308 - DNA, 22 bp, synthetic construct
  misc_feature 1..22: note = chemically synthesized
  source 1..22: mol_type = other DNA
cttcttgatgttgttatggatt

SEQ ID NO: 134309 - DNA, 22 bp, synthetic construct
  misc_feature 1..22: note = chemically synthesized
  source 1..22: mol_type = other DNA
ttcttgatgttgttatggattt

SEQ ID NO: 134310 - DNA, 22 bp, synthetic construct
  misc_feature 1..22: note = chemically synthesized
  source 1..22: mol_type = other DNA
cttgatgttgttatggattttt

SEQ ID NO: 134311 - DNA, 22 bp, synthetic construct
  misc_feature 1..22: note = chemically synthesized
  source 1..22: mol_type = other DNA
ttgatgttgttatggatttttc

SEQ ID NO: 134312 - DNA, 22 bp, synthetic construct
  misc_feature 1..22: note = chemically synthesized
  source 1..22: mol_type = other DNA
gatgttgttatggatttttctc

SEQ ID NO: 134313 - DNA, 22 bp, synthetic construct
  misc_feature 1..22: note = chemically synthesized
  source 1..22: mol_type = other DNA
atgttgttatggatttttctct

SEQ ID NO: 134314 - DNA, 22 bp, synthetic construct
  misc_feature 1..22: note = chemically synthesized
  source 1..22: mol_type = other DNA
ttatggatttttctctgaacca

SEQ ID NO: 134315 - DNA, 22 bp, synthetic construct
  misc_feature 1..22: note = chemically synthesized
  source 1..22: mol_type = other DNA
tggatttttctctgaaccatga

SEQ ID NO: 134316 - DNA, 22 bp, synthetic construct
  misc_feature 1..22: note = chemically synthesized
  source 1..22: mol_type = other DNA
ttctctgaaccatgattgatgt

SEQ ID NO: 134317 - DNA, 22 bp, synthetic construct
  misc_feature 1..22: note = chemically synthesized
  source 1..22: mol_type = other DNA
tctctgaaccatgattgatgta

SEQ ID NO: 134318 - DNA, 22 bp, synthetic construct
  misc_feature 1..22: note = chemically synthesized
  source 1..22: mol_type = other DNA
ctctgaaccatgattgatgtaa

SEQ ID NO: 134319 - DNA, 22 bp, synthetic construct
  misc_feature 1..22: note = chemically synthesized
  source 1..22: mol_type = other DNA
tctgaaccatgattgatgtaaa

SEQ ID NO: 134320 - DNA, 22 bp, synthetic construct
  misc_feature 1..22: note = chemically synthesized
  source 1..22: mol_type = other DNA
tgaaccatgattgatgtaaaaa

SEQ ID NO: 134321 - DNA, 22 bp, synthetic construct
  misc_feature 1..22: note = chemically synthesized
  source 1..22: mol_type = other DNA
aaccatgattgatgtaaaaatt

SEQ ID NO: 134322 - DNA, 22 bp, synthetic construct
  misc_feature 1..22: note = chemically synthesized
  source 1..22: mol_type = other DNA
atgtaaaaattagagacatcga

SEQ ID NO: 134323 - DNA, 22 bp, synthetic construct
  misc_feature 1..22: note = chemically synthesized
  source 1..22: mol_type = other DNA
gagacatcgaagtactaaacaa

SEQ ID NO: 134324 - DNA, 22 bp, synthetic construct
  misc_feature 1..22: note = chemically synthesized
  source 1..22: mol_type = other DNA
aacaataaagaaaaggagatag

SEQ ID NO: 134325 - DNA, 22 bp, synthetic construct
  misc_feature 1..22: note = chemically synthesized
  source 1..22: mol_type = other DNA
tttggcatgcttgaactagtaa

SEQ ID NO: 134326 - DNA, 22 bp, synthetic construct
  misc_feature 1..22: note = chemically synthesized
  source 1..22: mol_type = other DNA
ggcatgcttgaactagtaatct

SEQ ID NO: 134327 - DNA, 22 bp, synthetic construct
  misc_feature 1..22: note = chemically synthesized
  source 1..22: mol_type = other DNA
gcatgcttgaactagtaatctt

SEQ ID NO: 134328 - DNA, 22 bp, synthetic construct
  misc_feature 1..22: note = chemically synthesized
  source 1..22: mol_type = other DNA
gaactagtaatcttattacaaa

SEQ ID NO: 134329 - DNA, 22 bp, synthetic construct
  misc_feature 1..22: note = chemically synthesized
  source 1..22: mol_type = other DNA
aactagtaatcttattacaaac

SEQ ID NO: 134330 - DNA, 22 bp, synthetic construct
  misc_feature 1..22: note = chemically synthesized
  source 1..22: mol_type = other DNA
gtaatcttattacaaacagatg

SEQ ID NO: 134331 - DNA, 22 bp, synthetic construct
  misc_feature 1..22: note = chemically synthesized
  source 1..22: mol_type = other DNA
attacaaacagatgtagaggtt

SEQ ID NO: 134332 - DNA, 22 bp, synthetic construct
  misc_feature 1..22: note = chemically synthesized
  source 1..22: mol_type = other DNA
ttacaaacagatgtagaggttg

SEQ ID NO: 134333 - DNA, 22 bp, synthetic construct
  misc_feature 1..22: note = chemically synthesized
  source 1..22: mol_type = other DNA
caaacagatgtagaggttgtaa

SEQ ID NO: 134334 - DNA, 22 bp, synthetic construct
  misc_feature 1..22: note = chemically synthesized
  source 1..22: mol_type = other DNA
taaaggtctacaatttggctac

SEQ ID NO: 134335 - DNA, 22 bp, synthetic construct
  misc_feature 1..22: note = chemically synthesized
  source 1..22: mol_type = other DNA
caatttggctacaaaaccaatg

SEQ ID NO: 134336 - DNA, 22 bp, synthetic construct
  misc_feature 1..22: note = chemically synthesized
  source 1..22: mol_type = other DNA
ggctacaaaaccaatggcttga

SEQ ID NO: 134337 - DNA, 22 bp, synthetic construct
  misc_feature 1..22: note = chemically synthesized
  source 1..22: mol_type = other DNA
gctacaaaaccaatggcttgat

SEQ ID NO: 134338 - DNA, 22 bp, synthetic construct
  misc_feature 1..22: note = chemically synthesized
  source 1..22: mol_type = other DNA
caaaaccaatggcttgatcaca

SEQ ID NO: 134339 - DNA, 22 bp, synthetic construct
  misc_feature 1..22: note = chemically synthesized
  source 1..22: mol_type = other DNA
gatcacaagaatagcattcatt

SEQ ID NO: 134340 - DNA, 22 bp, synthetic construct
  misc_feature 1..22: note = chemically synthesized
  source 1..22: mol_type = other DNA
atcacaagaatagcattcattt

SEQ ID NO: 134341 - DNA, 22 bp, synthetic construct
  misc_feature 1..22: note = chemically synthesized
  source 1..22: mol_type = other DNA
atttgcttaactagtacttact

SEQ ID NO: 134342 - DNA, 22 bp, synthetic construct
  misc_feature 1..22: note = chemically synthesized
  source 1..22: mol_type = other DNA
gcttaactagtacttactgagc

SEQ ID NO: 134343 - DNA, 22 bp, synthetic construct
  misc_feature 1..22: note = chemically synthesized
  source 1..22: mol_type = other DNA
cttaactagtacttactgagca

SEQ ID NO: 134344 - DNA, 22 bp, synthetic construct
  misc_feature 1..22: note = chemically synthesized
  source 1..22: mol_type = other DNA
aactagtacttactgagcaccc

SEQ ID NO: 134345 - DNA, 22 bp, synthetic construct
  misc_feature 1..22: note = chemically synthesized
  source 1..22: mol_type = other DNA
actagtacttactgagcaccca

SEQ ID NO: 134346 - DNA, 22 bp, synthetic construct
  misc_feature 1..22: note = chemically synthesized
  source 1..22: mol_type = other DNA
gtacttactgagcacccactat

SEQ ID NO: 134347 - DNA, 22 bp, synthetic construct
  misc_feature 1..22: note = chemically synthesized
  source 1..22: mol_type = other DNA
actgagcacccactatatgtta

SEQ ID NO: 134348 - DNA, 22 bp, synthetic construct
  misc_feature 1..22: note = chemically synthesized
  source 1..22: mol_type = other DNA
ctgagcacccactatatgttaa

SEQ ID NO: 134349 - DNA, 22 bp, synthetic construct
  misc_feature 1..22: note = chemically synthesized
  source 1..22: mol_type = other DNA
agcacccactatatgttaagct

SEQ ID NO: 134350 - DNA, 22 bp, synthetic construct
  misc_feature 1..22: note = chemically synthesized
  source 1..22: mol_type = other DNA
tatgttaagctccattttaagc

SEQ ID NO: 134351 - DNA, 22 bp, synthetic construct
  misc_feature 1..22: note = chemically synthesized
  source 1..22: mol_type = other DNA
agctccattttaagcactgaaa

SEQ ID NO: 134352 - DNA, 22 bp, synthetic construct
  misc_feature 1..22: note = chemically synthesized
  source 1..22: mol_type = other DNA
cattttaagcactgaaaatgtc

SEQ ID NO: 134353 - DNA, 22 bp, synthetic construct
  misc_feature 1..22: note = chemically synthesized
  source 1..22: mol_type = other DNA
taagcactgaaaatgtcactca

SEQ ID NO: 134354 - DNA, 22 bp, synthetic construct
  misc_feature 1..22: note = chemically synthesized
  source 1..22: mol_type = other DNA
aagcactgaaaatgtcactcac

SEQ ID NO: 134355 - DNA, 22 bp, synthetic construct
  misc_feature 1..22: note = chemically synthesized
  source 1..22: mol_type = other DNA
agcactgaaaatgtcactcact

SEQ ID NO: 134356 - DNA, 22 bp, synthetic construct
  misc_feature 1..22: note = chemically synthesized
  source 1..22: mol_type = other DNA
aaaatgtcactcacttaaaatc

SEQ ID NO: 134357 - DNA, 22 bp, synthetic construct
  misc_feature 1..22: note = chemically synthesized
  source 1..22: mol_type = other DNA
acttaaaatctttcagaagttt

SEQ ID NO: 134358 - DNA, 22 bp, synthetic construct
  misc_feature 1..22: note = chemically synthesized
  source 1..22: mol_type = other DNA
aaaatctttcagaagttttgtt

SEQ ID NO: 134359 - DNA, 22 bp, synthetic construct
  misc_feature 1..22: note = chemically synthesized
  source 1..22: mol_type = other DNA
aaatctttcagaagttttgttt

SEQ ID NO: 134360 - DNA, 22 bp, synthetic construct
  misc_feature 1..22: note = chemically synthesized
  source 1..22: mol_type = other DNA
tcagaagttttgttttactgtg

SEQ ID NO: 134361 - DNA, 22 bp, synthetic construct
  misc_feature 1..22: note = chemically synthesized
  source 1..22: mol_type = other DNA
cagaagttttgttttactgtga

SEQ ID NO: 134362 - DNA, 22 bp, synthetic construct
  misc_feature 1..22: note = chemically synthesized
  source 1..22: mol_type = other DNA
agaagttttgttttactgtgag

SEQ ID NO: 134363 - DNA, 22 bp, synthetic construct
  misc_feature 1..22: note = chemically synthesized
  source 1..22: mol_type = other DNA
tgttttactgtgagtacaaaga

SEQ ID NO: 134364 - DNA, 22 bp, synthetic construct
  misc_feature 1..22: note = chemically synthesized
  source 1..22: mol_type = other DNA
gttttactgtgagtacaaagag

SEQ ID NO: 134365 - DNA, 22 bp, synthetic construct
  misc_feature 1..22: note = chemically synthesized
  source 1..22: mol_type = other DNA
ttttactgtgagtacaaagaga

SEQ ID NO: 134366 - DNA, 22 bp, synthetic construct
  misc_feature 1..22: note = chemically synthesized
  source 1..22: mol_type = other DNA
tactgtgagtacaaagagaact

SEQ ID NO: 134367 - DNA, 22 bp, synthetic construct
  misc_feature 1..22: note = chemically synthesized
  source 1..22: mol_type = other DNA
actgtgagtacaaagagaactg

SEQ ID NO: 134368 - DNA, 22 bp, synthetic construct
  misc_feature 1..22: note = chemically synthesized
  source 1..22: mol_type = other DNA
ctgtgagtacaaagagaactga

SEQ ID NO: 134369 - DNA, 22 bp, synthetic construct
  misc_feature 1..22: note = chemically synthesized
  source 1..22: mol_type = other DNA
tgagtacaaagagaactgactt

SEQ ID NO: 134370 - DNA, 22 bp, synthetic construct
  misc_feature 1..22: note = chemically synthesized
  source 1..22: mol_type = other DNA
actttatgatatggttatttac

SEQ ID NO: 134371 - DNA, 22 bp, synthetic construct
  misc_feature 1..22: note = chemically synthesized
  source 1..22: mol_type = other DNA
tatgatatggttatttaccaag

SEQ ID NO: 134372 - DNA, 22 bp, synthetic construct
  misc_feature 1..22: note = chemically synthesized
  source 1..22: mol_type = other DNA
atgatatggttatttaccaagc

SEQ ID NO: 134373 - DNA, 22 bp, synthetic construct
  misc_feature 1..22: note = chemically synthesized
  source 1..22: mol_type = other DNA
tgatatggttatttaccaagcc

SEQ ID NO: 134374 - DNA, 22 bp, synthetic construct
  misc_feature 1..22: note = chemically synthesized
  source 1..22: mol_type = other DNA
tttaccaagccgtcacttctta

SEQ ID NO: 134375 - DNA, 22 bp, synthetic construct
  misc_feature 1..22: note = chemically synthesized
  source 1..22: mol_type = other DNA
accaagccgtcacttcttagct

SEQ ID NO: 134376 - DNA, 22 bp, synthetic construct
  misc_feature 1..22: note = chemically synthesized
  source 1..22: mol_type = other DNA
ccaagccgtcacttcttagcta

SEQ ID NO: 134377 - DNA, 22 bp, synthetic construct
  misc_feature 1..22: note = chemically synthesized
  source 1..22: mol_type = other DNA
cttagctacaagtctagaatca

SEQ ID NO: 134378 - DNA, 22 bp, synthetic construct
  misc_feature 1..22: note = chemically synthesized
  source 1..22: mol_type = other DNA
ttagctacaagtctagaatcaa

SEQ ID NO: 134379 - DNA, 22 bp, synthetic construct
  misc_feature 1..22: note = chemically synthesized
  source 1..22: mol_type = other DNA
agctacaagtctagaatcaaca

SEQ ID NO: 134380 - DNA, 22 bp, synthetic construct
  misc_feature 1..22: note = chemically synthesized
  source 1..22: mol_type = other DNA
gctacaagtctagaatcaacag

SEQ ID NO: 134381 - DNA, 22 bp, synthetic construct
  misc_feature 1..22: note = chemically synthesized
  source 1..22: mol_type = other DNA
caagtctagaatcaacaggttc

SEQ ID NO: 134382 - DNA, 22 bp, synthetic construct
  misc_feature 1..22: note = chemically synthesized
  source 1..22: mol_type = other DNA
gaatcaacaggttctgcaaaat

SEQ ID NO: 134383 - DNA, 22 bp, synthetic construct
  misc_feature 1..22: note = chemically synthesized
  source 1..22: mol_type = other DNA
tgcaaaatgaattctggaatgc

SEQ ID NO: 134384 - DNA, 22 bp, synthetic construct
  misc_feature 1..22: note = chemically synthesized
  source 1..22: mol_type = other DNA
caaaatgaattctggaatgcat

SEQ ID NO: 134385 - DNA, 22 bp, synthetic construct
  misc_feature 1..22: note = chemically synthesized
  source 1..22: mol_type = other DNA
tggaatgcatttattgctgtat

SEQ ID NO: 134386 - DNA, 22 bp, synthetic construct
  misc_feature 1..22: note = chemically synthesized
  source 1..22: mol_type = other DNA
gaatgcatttattgctgtatga

SEQ ID NO: 134387 - DNA, 22 bp, synthetic construct
  misc_feature 1..22: note = chemically synthesized
  source 1..22: mol_type = other DNA
attgctgtatgacctaaaatca

SEQ ID NO: 134388 - DNA, 22 bp, synthetic construct
  misc_feature 1..22: note = chemically synthesized
  source 1..22: mol_type = other DNA
ttgctgtatgacctaaaatcac

SEQ ID NO: 134389 - DNA, 22 bp, synthetic construct
  misc_feature 1..22: note = chemically synthesized
  source 1..22: mol_type = other DNA
ctgtatgacctaaaatcacgtt

SEQ ID NO: 134390 - DNA, 22 bp, synthetic construct
  misc_feature 1..22: note = chemically synthesized
  source 1..22: mol_type = other DNA
tatgacctaaaatcacgttttg

SEQ ID NO: 134391 - DNA, 22 bp, synthetic construct
  misc_feature 1..22: note = chemically synthesized
  source 1..22: mol_type = other DNA
aaatcacgttttggcaaaatct

SEQ ID NO: 134392 - DNA, 22 bp, synthetic construct
  misc_feature 1..22: note = chemically synthesized
  source 1..22: mol_type = other DNA
tggcaaaatcttacctgaatat

SEQ ID NO: 134393 - DNA, 22 bp, synthetic construct
  misc_feature 1..22: note = chemically synthesized
  source 1..22: mol_type = other DNA
ggcaaaatcttacctgaatata

SEQ ID NO: 134394 - DNA, 22 bp, synthetic construct
  misc_feature 1..22: note = chemically synthesized
  source 1..22: mol_type = other DNA
gcaaaatcttacctgaatatat

SEQ ID NO: 134395 - DNA, 22 bp, synthetic construct
  misc_feature 1..22: note = chemically synthesized
  source 1..22: mol_type = other DNA
acctgaatatatgagaggatat

SEQ ID NO: 134396 - DNA, 22 bp, synthetic construct
  misc_feature 1..22: note = chemically synthesized
  source 1..22: mol_type = other DNA
cctgaatatatgagaggatatt

SEQ ID NO: 134397 - DNA, 22 bp, synthetic construct
  misc_feature 1..22: note = chemically synthesized
  source 1..22: mol_type = other DNA
aatatatgagaggatatttagg

SEQ ID NO: 134398 - DNA, 22 bp, synthetic construct
  misc_feature 1..22: note = chemically synthesized
  source 1..22: mol_type = other DNA
aggtttttttcccctaagtata

SEQ ID NO: 134399 - DNA, 22 bp, synthetic construct
  misc_feature 1..22: note = chemically synthesized
  source 1..22: mol_type = other DNA
ggtttttttcccctaagtataa

SEQ ID NO: 134400 - DNA, 22 bp, synthetic construct
  misc_feature 1..22: note = chemically synthesized
  source 1..22: mol_type = other DNA
ttttcccctaagtataaacagg

SEQ ID NO: 134401 - DNA, 22 bp, synthetic construct
  misc_feature 1..22: note = chemically synthesized
  source 1..22: mol_type = other DNA
tttcccctaagtataaacaggt

SEQ ID NO: 134402 - DNA, 22 bp, synthetic construct
  misc_feature 1..22: note = chemically synthesized
  source 1..22: mol_type = other DNA
ttcccctaagtataaacaggtg

SEQ ID NO: 134403 - DNA, 22 bp, synthetic construct
  misc_feature 1..22: note = chemically synthesized
  source 1..22: mol_type = other DNA
tcccctaagtataaacaggtga

SEQ ID NO: 134404 - DNA, 22 bp, synthetic construct
  misc_feature 1..22: note = chemically synthesized
  source 1..22: mol_type = other DNA
cccctaagtataaacaggtgat

SEQ ID NO: 134405 - DNA, 22 bp, synthetic construct
  misc_feature 1..22: note = chemically synthesized
  source 1..22: mol_type = other DNA
ccctaagtataaacaggtgata

SEQ ID NO: 134406 - DNA, 22 bp, synthetic construct
  misc_feature 1..22: note = chemically synthesized
  source 1..22: mol_type = other DNA
agtataaacaggtgatagtaaa

SEQ ID NO: 134407 - DNA, 22 bp, synthetic construct
  misc_feature 1..22: note = chemically synthesized
  source 1..22: mol_type = other DNA
gctgcgagtgtcacatatatta

SEQ ID NO: 134408 - DNA, 22 bp, synthetic construct
  misc_feature 1..22: note = chemically synthesized
  source 1..22: mol_type = other DNA
ctgcgagtgtcacatatattat

SEQ ID NO: 134409 - DNA, 22 bp, synthetic construct
  misc_feature 1..22: note = chemically synthesized
  source 1..22: mol_type = other DNA
cgagtgtcacatatattatgta

SEQ ID NO: 134410 - DNA, 22 bp, synthetic construct
  misc_feature 1..22: note = chemically synthesized
  source 1..22: mol_type = other DNA
tgtagaatatgcattttatcac

SEQ ID NO: 134411 - DNA, 22 bp, synthetic construct
  misc_feature 1..22: note = chemically synthesized
  source 1..22: mol_type = other DNA
tatcactattttaaatctgaaa

SEQ ID NO: 134412 - DNA, 22 bp, synthetic construct
  misc_feature 1..22: note = chemically synthesized
  source 1..22: mol_type = other DNA
atcactattttaaatctgaaag

SEQ ID NO: 134413 - DNA, 22 bp, synthetic construct
  misc_feature 1..22: note = chemically synthesized
  source 1..22: mol_type = other DNA
tcactattttaaatctgaaaga

SEQ ID NO: 134414 - DNA, 22 bp, synthetic construct
  misc_feature 1..22: note = chemically synthesized
  source 1..22: mol_type = other DNA
ttttaaatctgaaagactgaat

SEQ ID NO: 134415 - DNA, 22 bp, synthetic construct
  misc_feature 1..22: note = chemically synthesized
  source 1..22: mol_type = other DNA
taaatctgaaagactgaatttg

SEQ ID NO: 134416 - DNA, 22 bp, synthetic construct
  misc_feature 1..22: note = chemically synthesized
  source 1..22: mol_type = other DNA
aaatctgaaagactgaatttga

SEQ ID NO: 134417 - DNA, 22 bp, synthetic construct
  misc_feature 1..22: note = chemically synthesized
  source 1..22: mol_type = other DNA
aatctgaaagactgaatttgac

SEQ ID NO: 134418 - DNA, 22 bp, synthetic construct
  misc_feature 1..22: note = chemically synthesized
  source 1..22: mol_type = other DNA
aaagactgaatttgacatgttt

SEQ ID NO: 134419 - DNA, 22 bp, synthetic construct
  misc_feature 1..22: note = chemically synthesized
  source 1..22: mol_type = other DNA
aatttgacatgttttgagataa

SEQ ID NO: 134420 - DNA, 22 bp, synthetic construct
  misc_feature 1..22: note = chemically synthesized
  source 1..22: mol_type = other DNA
gacatgttttgagataagagtt

SEQ ID NO: 134421 - DNA, 22 bp, synthetic construct
  misc_feature 1..22: note = chemically synthesized
  source 1..22: mol_type = other DNA
acatgttttgagataagagttt

SEQ ID NO: 134422 - DNA, 22 bp, synthetic construct
  misc_feature 1..22: note = chemically synthesized
  source 1..22: mol_type = other DNA
tgagataagagtttagggtaga

SEQ ID NO: 134423 - DNA, 22 bp, synthetic construct
  misc_feature 1..22: note = chemically synthesized
  source 1..22: mol_type = other DNA
gagataagagtttagggtagag

SEQ ID NO: 134424 - DNA, 22 bp, synthetic construct
  misc_feature 1..22: note = chemically synthesized
  source 1..22: mol_type = other DNA
agataagagtttagggtagagt

SEQ ID NO: 134425 - DNA, 22 bp, synthetic construct
  misc_feature 1..22: note = chemically synthesized
  source 1..22: mol_type = other DNA
agggtagagttgtgtatctgca

SEQ ID NO: 134426 - DNA, 22 bp, synthetic construct
  misc_feature 1..22: note = chemically synthesized
  source 1..22: mol_type = other DNA
gggtagagttgtgtatctgcac

SEQ ID NO: 134427 - DNA, 22 bp, synthetic construct
  misc_feature 1..22: note = chemically synthesized
  source 1..22: mol_type = other DNA
tgtatctgcacgatcttagact

SEQ ID NO: 134428 - DNA, 22 bp, synthetic construct
  misc_feature 1..22: note = chemically synthesized
  source 1..22: mol_type = other DNA
cacgatcttagactacttaaat

SEQ ID NO: 134429 - DNA, 22 bp, synthetic construct
  misc_feature 1..22: note = chemically synthesized
  source 1..22: mol_type = other DNA
agactacttaaatagaaactca

SEQ ID NO: 134430 - DNA, 22 bp, synthetic construct
  misc_feature 1..22: note = chemically synthesized
  source 1..22: mol_type = other DNA
gactacttaaatagaaactcag

SEQ ID NO: 134431 - DNA, 22 bp, synthetic construct
  misc_feature 1..22: note = chemically synthesized
  source 1..22: mol_type = other DNA
cttaaatagaaactcagcacat

SEQ ID NO: 134432 - DNA, 22 bp, synthetic construct
  misc_feature 1..22: note = chemically synthesized
  source 1..22: mol_type = other DNA
aaatagaaactcagcacataat

SEQ ID NO: 134433 - DNA, 22 bp, synthetic construct
  misc_feature 1..22: note = chemically synthesized
  source 1..22: mol_type = other DNA
aatagaaactcagcacataatc

SEQ ID NO: 134434 - DNA, 22 bp, synthetic construct
  misc_feature 1..22: note = chemically synthesized
  source 1..22: mol_type = other DNA
agcacataatccaatgaaaaaa

SEQ ID NO: 134435 - DNA, 22 bp, synthetic construct
  misc_feature 1..22: note = chemically synthesized
  source 1..22: mol_type = other DNA
cagaatgggactaatatgacaa

SEQ ID NO: 134436 - DNA, 22 bp, synthetic construct
  misc_feature 1..22: note = chemically synthesized
  source 1..22: mol_type = other DNA
agaatgggactaatatgacaac

SEQ ID NO: 134437 - DNA, 22 bp, synthetic construct
  misc_feature 1..22: note = chemically synthesized
  source 1..22: mol_type = other DNA
atatgacaacatctggattatt

SEQ ID NO: 134438 - DNA, 22 bp, synthetic construct
  misc_feature 1..22: note = chemically synthesized
  source 1..22: mol_type = other DNA
gattattatgttcaataaggtg

SEQ ID NO: 134439 - DNA, 22 bp, synthetic construct
  misc_feature 1..22: note = chemically synthesized
  source 1..22: mol_type = other DNA
ttatgttcaataaggtggagca

SEQ ID NO: 134440 - DNA, 22 bp, synthetic construct
  misc_feature 1..22: note = chemically synthesized
  source 1..22: mol_type = other DNA
tgttcaataaggtggagcatca

SEQ ID NO: 134441 - DNA, 22 bp, synthetic construct
  misc_feature 1..22: note = chemically synthesized
  source 1..22: mol_type = other DNA
aataaggtggagcatcatagga

SEQ ID NO: 134442 - DNA, 22 bp, synthetic construct
  misc_feature 1..22: note = chemically synthesized
  source 1..22: mol_type = other DNA
ggaataattacatgataaacat

SEQ ID NO: 134443 - DNA, 22 bp, synthetic construct
  misc_feature 1..22: note = chemically synthesized
  source 1..22: mol_type = other DNA
catgataaacatttaaaggact

SEQ ID NO: 134444 - DNA, 22 bp, synthetic construct
  misc_feature 1..22: note = chemically synthesized
  source 1..22: mol_type = other DNA
aaaggactgttgatattggttc

SEQ ID NO: 134445 - DNA, 22 bp, synthetic construct
  misc_feature 1..22: note = chemically synthesized
  source 1..22: mol_type = other DNA
aaggactgttgatattggttca

SEQ ID NO: 134446 - DNA, 22 bp, synthetic construct
  misc_feature 1..22: note = chemically synthesized
  source 1..22: mol_type = other DNA
ttgatattggttcacccatcag

SEQ ID NO: 134447 - DNA, 22 bp, synthetic construct
  misc_feature 1..22: note = chemically synthesized
  source 1..22: mol_type = other DNA
atattggttcacccatcaggaa

SEQ ID NO: 134448 - DNA, 22 bp, synthetic construct
  misc_feature 1..22: note = chemically synthesized
  source 1..22: mol_type = other DNA
gttcacccatcaggaaagaagt

SEQ ID NO: 134449 - DNA, 22 bp, synthetic construct
  misc_feature 1..22: note = chemically synthesized
  source 1..22: mol_type = other DNA
acccatcaggaaagaagtctta

SEQ ID NO: 134450 - DNA, 22 bp, synthetic construct
  misc_feature 1..22: note = chemically synthesized
  source 1..22: mol_type = other DNA
agggtttttaatgcagatatct

SEQ ID NO: 134451 - DNA, 22 bp, synthetic construct
  misc_feature 1..22: note = chemically synthesized
  source 1..22: mol_type = other DNA
gggtttttaatgcagatatctt

SEQ ID NO: 134452 - DNA, 22 bp, synthetic construct
  misc_feature 1..22: note = chemically synthesized
  source 1..22: mol_type = other DNA
ttaatgcagatatctttataca

SEQ ID NO: 134453 - DNA, 22 bp, synthetic construct
  misc_feature 1..22: note = chemically synthesized
  source 1..22: mol_type = other DNA
taatgcagatatctttatacat

SEQ ID NO: 134454 - DNA, 22 bp, synthetic construct
  misc_feature 1..22: note = chemically synthesized
  source 1..22: mol_type = other DNA
aatgcagatatctttatacatc

SEQ ID NO: 134455 - DNA, 22 bp, synthetic construct
  misc_feature 1..22: note = chemically synthesized
  source 1..22: mol_type = other DNA
atgcagatatctttatacatct

SEQ ID NO: 134456 - DNA, 22 bp, synthetic construct
  misc_feature 1..22: note = chemically synthesized
  source 1..22: mol_type = other DNA
tatacatctagaaaaaaattat

SEQ ID NO: 134457 - DNA, 22 bp, synthetic construct
  misc_feature 1..22: note = chemically synthesized
  source 1..22: mol_type = other DNA
atacatctagaaaaaaattatg

SEQ ID NO: 134458 - DNA, 22 bp, synthetic construct
  misc_feature 1..22: note = chemically synthesized
  source 1..22: mol_type = other DNA
tacatctagaaaaaaattatgt

SEQ ID NO: 134459 - DNA, 22 bp, synthetic construct
  misc_feature 1..22: note = chemically synthesized
  source 1..22: mol_type = other DNA
gaaaaaaattatgtatgaatat

SEQ ID NO: 134460 - DNA, 22 bp, synthetic construct
  misc_feature 1..22: note = chemically synthesized
  source 1..22: mol_type = other DNA
tgtatgaatataatggctaata

SEQ ID NO: 134461 - DNA, 22 bp, synthetic construct
  misc_feature 1..22: note = chemically synthesized
  source 1..22: mol_type = other DNA
atatatggttattttattctgg

SEQ ID NO: 134462 - DNA, 22 bp, synthetic construct
  misc_feature 1..22: note = chemically synthesized
  source 1..22: mol_type = other DNA
ttttattctggagatcagacct

SEQ ID NO: 134463 - DNA, 22 bp, synthetic construct
  misc_feature 1..22: note = chemically synthesized
  source 1..22: mol_type = other DNA
tattctggagatcagacctaaa

SEQ ID NO: 134464 - DNA, 22 bp, synthetic construct
  misc_feature 1..22: note = chemically synthesized
  source 1..22: mol_type = other DNA
attctggagatcagacctaaat

SEQ ID NO: 134465 - DNA, 22 bp, synthetic construct
  misc_feature 1..22: note = chemically synthesized
  source 1..22: mol_type = other DNA
ttctggagatcagacctaaata

SEQ ID NO: 134466 - DNA, 22 bp, synthetic construct
  misc_feature 1..22: note = chemically synthesized
  source 1..22: mol_type = other DNA
tggagatcagacctaaatataa

SEQ ID NO: 134467 - DNA, 22 bp, synthetic construct
  misc_feature 1..22: note = chemically synthesized
  source 1..22: mol_type = other DNA
gagatcagacctaaatataagg

SEQ ID NO: 134468 - DNA, 22 bp, synthetic construct
  misc_feature 1..22: note = chemically synthesized
  source 1..22: mol_type = other DNA
aatataaggagtagatattata

SEQ ID NO: 134469 - DNA, 22 bp, synthetic construct
  misc_feature 1..22: note = chemically synthesized
  source 1..22: mol_type = other DNA
tatgtttcagagaagtatatgt

SEQ ID NO: 134470 - DNA, 22 bp, synthetic construct
  misc_feature 1..22: note = chemically synthesized
  source 1..22: mol_type = other DNA
cagagaagtatatgtctctctc

SEQ ID NO: 134471 - DNA, 22 bp, synthetic construct
  misc_feature 1..22: note = chemically synthesized
  source 1..22: mol_type = other DNA
agagaagtatatgtctctctct

SEQ ID NO: 134472 - DNA, 22 bp, synthetic construct
  misc_feature 1..22: note = chemically synthesized
  source 1..22: mol_type = other DNA
tctctctctctcactgtctctg

SEQ ID NO: 134473 - DNA, 22 bp, synthetic construct
  misc_feature 1..22: note = chemically synthesized
  source 1..22: mol_type = other DNA
tctctctctcactgtctctgtc

SEQ ID NO: 134474 - DNA, 22 bp, synthetic construct
  misc_feature 1..22: note = chemically synthesized
  source 1..22: mol_type = other DNA
tctctctcactgtctctgtctg

SEQ ID NO: 134475 - DNA, 22 bp, synthetic construct
  misc_feature 1..22: note = chemically synthesized
  source 1..22: mol_type = other DNA
tctctcactgtctctgtctgtg

SEQ ID NO: 134476 - DNA, 22 bp, synthetic construct
  misc_feature 1..22: note = chemically synthesized
  source 1..22: mol_type = other DNA
tctcactgtctctgtctgtgaa

SEQ ID NO: 134477 - DNA, 22 bp, synthetic construct
  misc_feature 1..22: note = chemically synthesized
  source 1..22: mol_type = other DNA
tcactgtctctgtctgtgaata

SEQ ID NO: 134478 - DNA, 22 bp, synthetic construct
  misc_feature 1..22: note = chemically synthesized
  source 1..22: mol_type = other DNA
actgtctctgtctgtgaatata

SEQ ID NO: 134479 - DNA, 22 bp, synthetic construct
  misc_feature 1..22: note = chemically synthesized
  source 1..22: mol_type = other DNA
tctctgtctgtgaatatatata

SEQ ID NO: 134480 - DNA, 22 bp, synthetic construct
  misc_feature 1..22: note = chemically synthesized
  source 1..22: mol_type = other DNA
tgtctgtgaatatatatataca

SEQ ID NO: 134481 - DNA, 22 bp, synthetic construct
  misc_feature 1..22: note = chemically synthesized
  source 1..22: mol_type = other DNA
tctgtgaatatatatatacaca

SEQ ID NO: 134482 - DNA, 22 bp, synthetic construct
  misc_feature 1..22: note = chemically synthesized
  source 1..22: mol_type = other DNA
tgaatatatatatacacacaca

SEQ ID NO: 134483 - DNA, 22 bp, synthetic construct
  misc_feature 1..22: note = chemically synthesized
  source 1..22: mol_type = other DNA
tgcatacatatattgatagtaa

SEQ ID NO: 134484 - DNA, 22 bp, synthetic construct
  misc_feature 1..22: note = chemically synthesized
  source 1..22: mol_type = other DNA
atagtaaataccatatatacat

SEQ ID NO: 134485 - DNA, 22 bp, synthetic construct
  misc_feature 1..22: note = chemically synthesized
  source 1..22: mol_type = other DNA
aataattaaatgaaacccacat

SEQ ID NO: 134486 - DNA, 22 bp, synthetic construct
  misc_feature 1..22: note = chemically synthesized
  source 1..22: mol_type = other DNA
aatgaaacccacatatatatga

SEQ ID NO: 134487 - DNA, 22 bp, synthetic construct
  misc_feature 1..22: note = chemically synthesized
  source 1..22: mol_type = other DNA
agggtagggtagtgagttttga

SEQ ID NO: 134488 - DNA, 22 bp, synthetic construct
  misc_feature 1..22: note = chemically synthesized
  source 1..22: mol_type = other DNA
tgaatcaatagaaagaataaat

SEQ ID NO: 134489 - DNA, 22 bp, synthetic construct
  misc_feature 1..22: note = chemically synthesized
  source 1..22: mol_type = other DNA
gaatcaatagaaagaataaata

SEQ ID NO: 134490 - DNA, 22 bp, synthetic construct
  misc_feature 1..22: note = chemically synthesized
  source 1..22: mol_type = other DNA
aatcaatagaaagaataaataa

SEQ ID NO: 134491 - DNA, 22 bp, synthetic construct
  misc_feature 1..22: note = chemically synthesized
  source 1..22: mol_type = other DNA
atgaataatcatcaagacgaaa

SEQ ID NO: 134492 - DNA, 22 bp, synthetic construct
  misc_feature 1..22: note = chemically synthesized
  source 1..22: mol_type = other DNA
ggtggtggctcaaggattttgt

SEQ ID NO: 134493 - DNA, 22 bp, synthetic construct
  misc_feature 1..22: note = chemically synthesized
  source 1..22: mol_type = other DNA
gtggtggctcaaggattttgta

SEQ ID NO: 134494 - DNA, 22 bp, synthetic construct
  misc_feature 1..22: note = chemically synthesized
  source 1..22: mol_type = other DNA
aaggattttgtaaagggttgaa

SEQ ID NO: 134495 - DNA, 22 bp, synthetic construct
  misc_feature 1..22: note = chemically synthesized
  source 1..22: mol_type = other DNA
tgtaaagggttgaattagagaa

SEQ ID NO: 134496 - DNA, 22 bp, synthetic construct
  misc_feature 1..22: note = chemically synthesized
  source 1..22: mol_type = other DNA
gtaaagggttgaattagagaat

SEQ ID NO: 134497 - DNA, 22 bp, synthetic construct
  misc_feature 1..22: note = chemically synthesized
  source 1..22: mol_type = other DNA
taaagggttgaattagagaata

SEQ ID NO: 134498 - DNA, 22 bp, synthetic construct
  misc_feature 1..22: note = chemically synthesized
  source 1..22: mol_type = other DNA
aattagagaatataatacagtt

SEQ ID NO: 134499 - DNA, 22 bp, synthetic construct
  misc_feature 1..22: note = chemically synthesized
  source 1..22: mol_type = other DNA
gagaatataatacagtttgaaa

SEQ ID NO: 134500 - DNA, 22 bp, synthetic construct
  misc_feature 1..22: note = chemically synthesized
  source 1..22: mol_type = other DNA
gaaaaggggcaatgttcttcaa

SEQ ID NO: 134501 - DNA, 22 bp, synthetic construct
  misc_feature 1..22: note = chemically synthesized
  source 1..22: mol_type = other DNA
aaaaggggcaatgttcttcaaa

SEQ ID NO: 134502 - DNA, 22 bp, synthetic construct
  misc_feature 1..22: note = chemically synthesized
  source 1..22: mol_type = other DNA
ttcaaatgttaacatttacaaa

SEQ ID NO: 134503 - DNA, 22 bp, synthetic construct
  misc_feature 1..22: note = chemically synthesized
  source 1..22: mol_type = other DNA
caaatgttaacatttacaaaga

SEQ ID NO: 134504 - DNA, 22 bp, synthetic construct
  misc_feature 1..22: note = chemically synthesized
  source 1..22: mol_type = other DNA
aaatgttaacatttacaaagac

SEQ ID NO: 134505 - DNA, 22 bp, synthetic construct
  misc_feature 1..22: note = chemically synthesized
  source 1..22: mol_type = other DNA
acatttacaaagacaaagtgac

SEQ ID NO: 134506 - DNA, 22 bp, synthetic construct
  misc_feature 1..22: note = chemically synthesized
  source 1..22: mol_type = other DNA
acaaagacaaagtgactggtct

SEQ ID NO: 134507 - DNA, 22 bp, synthetic construct
  misc_feature 1..22: note = chemically synthesized
  source 1..22: mol_type = other DNA
caaagacaaagtgactggtctt

SEQ ID NO: 134508 - DNA, 22 bp, synthetic construct
  misc_feature 1..22: note = chemically synthesized
  source 1..22: mol_type = other DNA
gtcttcccactctaagaccaat

SEQ ID NO: 134509 - DNA, 22 bp, synthetic construct
  misc_feature 1..22: note = chemically synthesized
  source 1..22: mol_type = other DNA
cccactctaagaccaatggaac

SEQ ID NO: 134510 - DNA, 22 bp, synthetic construct
  misc_feature 1..22: note = chemically synthesized
  source 1..22: mol_type = other DNA
ccactctaagaccaatggaaca

SEQ ID NO: 134511 - DNA, 22 bp, synthetic construct
  misc_feature 1..22: note = chemically synthesized
  source 1..22: mol_type = other DNA
taagaccaatggaacacttgag

SEQ ID NO: 134512 - DNA, 22 bp, synthetic construct
  misc_feature 1..22: note = chemically synthesized
  source 1..22: mol_type = other DNA
agaccaatggaacacttgagag

SEQ ID NO: 134513 - DNA, 22 bp, synthetic construct
  misc_feature 1..22: note = chemically synthesized
  source 1..22: mol_type = other DNA
gagagtgactcatttcggtcat

SEQ ID NO: 134514 - DNA, 22 bp, synthetic construct
  misc_feature 1..22: note = chemically synthesized
  source 1..22: mol_type = other DNA
agagtgactcatttcggtcatg

SEQ ID NO: 134515 - DNA, 22 bp, synthetic construct
  misc_feature 1..22: note = chemically synthesized
  source 1..22: mol_type = other DNA
atttcggtcatgcctcatctga

SEQ ID NO: 134516 - DNA, 22 bp, synthetic construct
  misc_feature 1..22: note = chemically synthesized
  source 1..22: mol_type = other DNA
cggtcatgcctcatctgatgtt

SEQ ID NO: 134517 - DNA, 22 bp, synthetic construct
  misc_feature 1..22: note = chemically synthesized
  source 1..22: mol_type = other DNA
ggtcatgcctcatctgatgtta

SEQ ID NO: 134518 - DNA, 22 bp, synthetic construct
  misc_feature 1..22: note = chemically synthesized
  source 1..22: mol_type = other DNA
atctgatgttagagacacaact

SEQ ID NO: 134519 - DNA, 22 bp, synthetic construct
  misc_feature 1..22: note = chemically synthesized
  source 1..22: mol_type = other DNA
atgttagagacacaacttctct

SEQ ID NO: 134520 - DNA, 22 bp, synthetic construct
  misc_feature 1..22: note = chemically synthesized
  source 1..22: mol_type = other DNA
gagacacaacttctcttagaga

SEQ ID NO: 134521 - DNA, 22 bp, synthetic construct
  misc_feature 1..22: note = chemically synthesized
  source 1..22: mol_type = other DNA
ctcttagagactctccttccaa

SEQ ID NO: 134522 - DNA, 22 bp, synthetic construct
  misc_feature 1..22: note = chemically synthesized
  source 1..22: mol_type = other DNA
tcttagagactctccttccaaa

SEQ ID NO: 134523 - DNA, 22 bp, synthetic construct
  misc_feature 1..22: note = chemically synthesized
  source 1..22: mol_type = other DNA
ttagagactctccttccaaaga

SEQ ID NO: 134524 - DNA, 22 bp, synthetic construct
  misc_feature 1..22: note = chemically synthesized
  source 1..22: mol_type = other DNA
agagactctccttccaaagaaa

SEQ ID NO: 134525 - DNA, 22 bp, synthetic construct
  misc_feature 1..22: note = chemically synthesized
  source 1..22: mol_type = other DNA
gagactctccttccaaagaaaa

SEQ ID NO: 134526 - DNA, 22 bp, synthetic construct
  misc_feature 1..22: note = chemically synthesized
  source 1..22: mol_type = other DNA
tccttccaaagaaaaaataaag

SEQ ID NO: 134527 - DNA, 22 bp, synthetic construct
  misc_feature 1..22: note = chemically synthesized
  source 1..22: mol_type = other DNA
cttccaaagaaaaaataaaggc

SEQ ID NO: 134528 - DNA, 22 bp, synthetic construct
  misc_feature 1..22: note = chemically synthesized
  source 1..22: mol_type = other DNA
ccaaagaaaaaataaaggccat

SEQ ID NO: 134529 - DNA, 22 bp, synthetic construct
  misc_feature 1..22: note = chemically synthesized
  source 1..22: mol_type = other DNA
caaagaaaaaataaaggccatg

SEQ ID NO: 134530 - DNA, 22 bp, synthetic construct
  misc_feature 1..22: note = chemically synthesized
  source 1..22: mol_type = other DNA
caatggcccagatctttcccag

SEQ ID NO: 134531 - DNA, 22 bp, synthetic construct
  misc_feature 1..22: note = chemically synthesized
  source 1..22: mol_type = other DNA
aatggcccagatctttcccagg

SEQ ID NO: 134532 - DNA, 22 bp, synthetic construct
  misc_feature 1..22: note = chemically synthesized
  source 1..22: mol_type = other DNA
tcccaggttggggaggaaaaga

SEQ ID NO: 134533 - DNA, 22 bp, synthetic construct
  misc_feature 1..22: note = chemically synthesized
  source 1..22: mol_type = other DNA
cccaggttggggaggaaaagag

SEQ ID NO: 134534 - DNA, 22 bp, synthetic construct
  misc_feature 1..22: note = chemically synthesized
  source 1..22: mol_type = other DNA
ccaggttggggaggaaaagaga

SEQ ID NO: 134535 - DNA, 22 bp, synthetic construct
  misc_feature 1..22: note = chemically synthesized
  source 1..22: mol_type = other DNA
gggaggaaaagagaattatttg

SEQ ID NO: 134536 - DNA, 22 bp, synthetic construct
  misc_feature 1..22: note = chemically synthesized
  source 1..22: mol_type = other DNA
tttggtacactattcccaaata

SEQ ID NO: 134537 - DNA, 22 bp, synthetic construct
  misc_feature 1..22: note = chemically synthesized
  source 1..22: mol_type = other DNA
ggtacactattcccaaatatcc

SEQ ID NO: 134538 - DNA, 22 bp, synthetic construct
  misc_feature 1..22: note = chemically synthesized
  source 1..22: mol_type = other DNA
gtacactattcccaaatatcct

SEQ ID NO: 134539 - DNA, 22 bp, synthetic construct
  misc_feature 1..22: note = chemically synthesized
  source 1..22: mol_type = other DNA
ttcccaaatatcctatgtggaa

SEQ ID NO: 134540 - DNA, 22 bp, synthetic construct
  misc_feature 1..22: note = chemically synthesized
  source 1..22: mol_type = other DNA
ccaaatatcctatgtggaaatg

SEQ ID NO: 134541 - DNA, 22 bp, synthetic construct
  misc_feature 1..22: note = chemically synthesized
  source 1..22: mol_type = other DNA
tgtggaaatgagctagaataac

SEQ ID NO: 134542 - DNA, 22 bp, synthetic construct
  misc_feature 1..22: note = chemically synthesized
  source 1..22: mol_type = other DNA
gaataaccccttgagagttgtt

SEQ ID NO: 134543 - DNA, 22 bp, synthetic construct
  misc_feature 1..22: note = chemically synthesized
  source 1..22: mol_type = other DNA
gagagttgtttgtgtaacaaat

SEQ ID NO: 134544 - DNA, 22 bp, synthetic construct
  misc_feature 1..22: note = chemically synthesized
  source 1..22: mol_type = other DNA
agagttgtttgtgtaacaaata

SEQ ID NO: 134545 - DNA, 22 bp, synthetic construct
  misc_feature 1..22: note = chemically synthesized
  source 1..22: mol_type = other DNA
tttgtgtaacaaatatatctct

SEQ ID NO: 134546 - DNA, 22 bp, synthetic construct
  misc_feature 1..22: note = chemically synthesized
  source 1..22: mol_type = other DNA
gtgtaacaaatatatctctcat

SEQ ID NO: 134547 - DNA, 22 bp, synthetic construct
  misc_feature 1..22: note = chemically synthesized
  source 1..22: mol_type = other DNA
tgtaacaaatatatctctcatc

SEQ ID NO: 134548 - DNA, 22 bp, synthetic construct
  misc_feature 1..22: note = chemically synthesized
  source 1..22: mol_type = other DNA
tcatcagaattaagagtaaata

SEQ ID NO: 134549 - DNA, 22 bp, synthetic construct
  misc_feature 1..22: note = chemically synthesized
  source 1..22: mol_type = other DNA
atcagaattaagagtaaatact

SEQ ID NO: 134550 - DNA, 22 bp, synthetic construct
  misc_feature 1..22: note = chemically synthesized
  source 1..22: mol_type = other DNA
agagtaaatactgaggatatag

SEQ ID NO: 134551 - DNA, 22 bp, synthetic construct
  misc_feature 1..22: note = chemically synthesized
  source 1..22: mol_type = other DNA
aggatatagcaaacaaccaata

SEQ ID NO: 134552 - DNA, 22 bp, synthetic construct
  misc_feature 1..22: note = chemically synthesized
  source 1..22: mol_type = other DNA
aggtcatgctcagaaaccgcaa

SEQ ID NO: 134553 - DNA, 22 bp, synthetic construct
  misc_feature 1..22: note = chemically synthesized
  source 1..22: mol_type = other DNA
agaaaccgcaaagagaaaactg

SEQ ID NO: 134554 - DNA, 22 bp, synthetic construct
  misc_feature 1..22: note = chemically synthesized
  source 1..22: mol_type = other DNA
tggctcaggtaagaaaagccaa

SEQ ID NO: 134555 - DNA, 22 bp, synthetic construct
  misc_feature 1..22: note = chemically synthesized
  source 1..22: mol_type = other DNA
aggtaagaaaagccaaggattc

SEQ ID NO: 134556 - DNA, 22 bp, synthetic construct
  misc_feature 1..22: note = chemically synthesized
  source 1..22: mol_type = other DNA
aaatacgggaagcaagtttaac

SEQ ID NO: 134557 - DNA, 22 bp, synthetic construct
  misc_feature 1..22: note = chemically synthesized
  source 1..22: mol_type = other DNA
aaccatttccatttgatggaca

SEQ ID NO: 134558 - DNA, 22 bp, synthetic construct
  misc_feature 1..22: note = chemically synthesized
  source 1..22: mol_type = other DNA
accatttccatttgatggacat

SEQ ID NO: 134559 - DNA, 22 bp, synthetic construct
  misc_feature 1..22: note = chemically synthesized
  source 1..22: mol_type = other DNA
ccatttgatggacattggttga

SEQ ID NO: 134560 - DNA, 22 bp, synthetic construct
  misc_feature 1..22: note = chemically synthesized
  source 1..22: mol_type = other DNA
catttgatggacattggttgag

SEQ ID NO: 134561 - DNA, 22 bp, synthetic construct
  misc_feature 1..22: note = chemically synthesized
  source 1..22: mol_type = other DNA
gatggacattggttgagaatat

SEQ ID NO: 134562 - DNA, 22 bp, synthetic construct
  misc_feature 1..22: note = chemically synthesized
  source 1..22: mol_type = other DNA
atggacattggttgagaatatg

SEQ ID NO: 134563 - DNA, 22 bp, synthetic construct
  misc_feature 1..22: note = chemically synthesized
  source 1..22: mol_type = other DNA
gttgagaatatgagcttgggtt

SEQ ID NO: 134564 - DNA, 22 bp, synthetic construct
  misc_feature 1..22: note = chemically synthesized
  source 1..22: mol_type = other DNA
agaatatgagcttgggttttgg

SEQ ID NO: 134565 - DNA, 22 bp, synthetic construct
  misc_feature 1..22: note = chemically synthesized
  source 1..22: mol_type = other DNA
gggttttgggttagataaacct

SEQ ID NO: 134566 - DNA, 22 bp, synthetic construct
  misc_feature 1..22: note = chemically synthesized
  source 1..22: mol_type = other DNA
ggttttgggttagataaacctg

SEQ ID NO: 134567 - DNA, 22 bp, synthetic construct
  misc_feature 1..22: note = chemically synthesized
  source 1..22: mol_type = other DNA
tgggttagataaacctgtgttt

SEQ ID NO: 134568 - DNA, 22 bp, synthetic construct
  misc_feature 1..22: note = chemically synthesized
  source 1..22: mol_type = other DNA
gggttagataaacctgtgtttg

SEQ ID NO: 134569 - DNA, 22 bp, synthetic construct
  misc_feature 1..22: note = chemically synthesized
  source 1..22: mol_type = other DNA
ggttagataaacctgtgtttga

SEQ ID NO: 134570 - DNA, 22 bp, synthetic construct
  misc_feature 1..22: note = chemically synthesized
  source 1..22: mol_type = other DNA
gataaacctgtgtttgaattcc

SEQ ID NO: 134571 - DNA, 22 bp, synthetic construct
  misc_feature 1..22: note = chemically synthesized
  source 1..22: mol_type = other DNA
tgtttgaattcctttatgacac

SEQ ID NO: 134572 - DNA, 22 bp, synthetic construct
  misc_feature 1..22: note = chemically synthesized
  source 1..22: mol_type = other DNA
gaattcctttatgacacatatt

SEQ ID NO: 134573 - DNA, 22 bp, synthetic construct
  misc_feature 1..22: note = chemically synthesized
  source 1..22: mol_type = other DNA
aattcctttatgacacatatta

SEQ ID NO: 134574 - DNA, 22 bp, synthetic construct
  misc_feature 1..22: note = chemically synthesized
  source 1..22: mol_type = other DNA
ctttatgacacatattagttgc

SEQ ID NO: 134575 - DNA, 22 bp, synthetic construct
  misc_feature 1..22: note = chemically synthesized
  source 1..22: mol_type = other DNA
tatgacacatattagttgcgtg

SEQ ID NO: 134576 - DNA, 22 bp, synthetic construct
  misc_feature 1..22: note = chemically synthesized
  source 1..22: mol_type = other DNA
atgacacatattagttgcgtga

SEQ ID NO: 134577 - DNA, 22 bp, synthetic construct
  misc_feature 1..22: note = chemically synthesized
  source 1..22: mol_type = other DNA
tgacacatattagttgcgtgat

SEQ ID NO: 134578 - DNA, 22 bp, synthetic construct
  misc_feature 1..22: note = chemically synthesized
  source 1..22: mol_type = other DNA
gttgcgtgatcttaggctaatt

SEQ ID NO: 134579 - DNA, 22 bp, synthetic construct
  misc_feature 1..22: note = chemically synthesized
  source 1..22: mol_type = other DNA
cgtgatcttaggctaattgctt

SEQ ID NO: 134580 - DNA, 22 bp, synthetic construct
  misc_feature 1..22: note = chemically synthesized
  source 1..22: mol_type = other DNA
aggctaattgcttaacttgtct

SEQ ID NO: 134581 - DNA, 22 bp, synthetic construct
  misc_feature 1..22: note = chemically synthesized
  source 1..22: mol_type = other DNA
ggctaattgcttaacttgtcta

SEQ ID NO: 134582 - DNA, 22 bp, synthetic construct
  misc_feature 1..22: note = chemically synthesized
  source 1..22: mol_type = other DNA
attgcttaacttgtctaaggct

SEQ ID NO: 134583 - DNA, 22 bp, synthetic construct
  misc_feature 1..22: note = chemically synthesized
  source 1..22: mol_type = other DNA
cttaacttgtctaaggctcaat

SEQ ID NO: 134584 - DNA, 22 bp, synthetic construct
  misc_feature 1..22: note = chemically synthesized
  source 1..22: mol_type = other DNA
aacttgtctaaggctcaatttc

SEQ ID NO: 134585 - DNA, 22 bp, synthetic construct
  misc_feature 1..22: note = chemically synthesized
  source 1..22: mol_type = other DNA
acttgtctaaggctcaatttcc

SEQ ID NO: 134586 - DNA, 22 bp, synthetic construct
  misc_feature 1..22: note = chemically synthesized
  source 1..22: mol_type = other DNA
gtctaaggctcaatttcctcac

SEQ ID NO: 134587 - DNA, 22 bp, synthetic construct
  misc_feature 1..22: note = chemically synthesized
  source 1..22: mol_type = other DNA
tctaaggctcaatttcctcacc

SEQ ID NO: 134588 - DNA, 22 bp, synthetic construct
  misc_feature 1..22: note = chemically synthesized
  source 1..22: mol_type = other DNA
aggctcaatttcctcaccataa

SEQ ID NO: 134589 - DNA, 22 bp, synthetic construct
  misc_feature 1..22: note = chemically synthesized
  source 1..22: mol_type = other DNA
aatttcctcaccataacaatat

SEQ ID NO: 134590 - DNA, 22 bp, synthetic construct
  misc_feature 1..22: note = chemically synthesized
  source 1..22: mol_type = other DNA
cctcaccataacaatataaata

SEQ ID NO: 134591 - DNA, 22 bp, synthetic construct
  misc_feature 1..22: note = chemically synthesized
  source 1..22: mol_type = other DNA
ctcaccataacaatataaataa

SEQ ID NO: 134592 - DNA, 22 bp, synthetic construct
  misc_feature 1..22: note = chemically synthesized
  source 1..22: mol_type = other DNA
accataacaatataaataaaat

SEQ ID NO: 134593 - DNA, 22 bp, synthetic construct
  misc_feature 1..22: note = chemically synthesized
  source 1..22: mol_type = other DNA
tctttactttcttgttttttac

SEQ ID NO: 134594 - DNA, 22 bp, synthetic construct
  misc_feature 1..22: note = chemically synthesized
  source 1..22: mol_type = other DNA
tactttcttgttttttactcac

SEQ ID NO: 134595 - DNA, 22 bp, synthetic construct
  misc_feature 1..22: note = chemically synthesized
  source 1..22: mol_type = other DNA
actttcttgttttttactcact

SEQ ID NO: 134596 - DNA, 22 bp, synthetic construct
  misc_feature 1..22: note = chemically synthesized
  source 1..22: mol_type = other DNA
ctttcttgttttttactcactt

SEQ ID NO: 134597 - DNA, 22 bp, synthetic construct
  misc_feature 1..22: note = chemically synthesized
  source 1..22: mol_type = other DNA
tcttgttttttactcacttttc

SEQ ID NO: 134598 - DNA, 22 bp, synthetic construct
  misc_feature 1..22: note = chemically synthesized
  source 1..22: mol_type = other DNA
cttgttttttactcacttttct

SEQ ID NO: 134599 - DNA, 22 bp, synthetic construct
  misc_feature 1..22: note = chemically synthesized
  source 1..22: mol_type = other DNA
ttgttttttactcacttttctt

SEQ ID NO: 134600 - DNA, 22 bp, synthetic construct
  misc_feature 1..22: note = chemically synthesized
  source 1..22: mol_type = other DNA
gttttttactcacttttctttt

SEQ ID NO: 134601 - DNA, 22 bp, synthetic construct
  misc_feature 1..22: note = chemically synthesized
  source 1..22: mol_type = other DNA
ttttttactcacttttcttttc

SEQ ID NO: 134602 - DNA, 22 bp, synthetic construct
  misc_feature 1..22: note = chemically synthesized
  source 1..22: mol_type = other DNA
tttactcacttttcttttctct

SEQ ID NO: 134603 - DNA, 22 bp, synthetic construct
  misc_feature 1..22: note = chemically synthesized
  source 1..22: mol_type = other DNA
ttactcacttttcttttctctc

SEQ ID NO: 134604 - DNA, 22 bp, synthetic construct
  misc_feature 1..22: note = chemically synthesized
  source 1..22: mol_type = other DNA
tactcacttttcttttctctct

SEQ ID NO: 134605 - DNA, 22 bp, synthetic construct
  misc_feature 1..22: note = chemically synthesized
  source 1..22: mol_type = other DNA
actcacttttcttttctctctc

SEQ ID NO: 134606 - DNA, 22 bp, synthetic construct
  misc_feature 1..22: note = chemically synthesized
  source 1..22: mol_type = other DNA
ctcacttttcttttctctctct

SEQ ID NO: 134607 - DNA, 22 bp, synthetic construct
  misc_feature 1..22: note = chemically synthesized
  source 1..22: mol_type = other DNA
acttttcttttctctctctctc

SEQ ID NO: 134608 - DNA, 22 bp, synthetic construct
  misc_feature 1..22: note = chemically synthesized
  source 1..22: mol_type = other DNA
ttcttttctctctctctcttta

SEQ ID NO: 134609 - DNA, 22 bp, synthetic construct
  misc_feature 1..22: note = chemically synthesized
  source 1..22: mol_type = other DNA
tcttttctctctctctctttaa

SEQ ID NO: 134610 - DNA, 22 bp, synthetic construct
  misc_feature 1..22: note = chemically synthesized
  source 1..22: mol_type = other DNA
cttttctctctctctctttaac

SEQ ID NO: 134611 - DNA, 22 bp, synthetic construct
  misc_feature 1..22: note = chemically synthesized
  source 1..22: mol_type = other DNA
ttttctctctctctctttaaca

SEQ ID NO: 134612 - DNA, 22 bp, synthetic construct
  misc_feature 1..22: note = chemically synthesized
  source 1..22: mol_type = other DNA
ttctctctctctctttaacaga

SEQ ID NO: 134613 - DNA, 22 bp, synthetic construct
  misc_feature 1..22: note = chemically synthesized
  source 1..22: mol_type = other DNA
tctctctctctctttaacagat

SEQ ID NO: 134614 - DNA, 22 bp, synthetic construct
  misc_feature 1..22: note = chemically synthesized
  source 1..22: mol_type = other DNA
ctctctctctctttaacagatt

SEQ ID NO: 134615 - DNA, 22 bp, synthetic construct
  misc_feature 1..22: note = chemically synthesized
  source 1..22: mol_type = other DNA
tctctctctctttaacagattt

SEQ ID NO: 134616 - DNA, 22 bp, synthetic construct
  misc_feature 1..22: note = chemically synthesized
  source 1..22: mol_type = other DNA
tctctctctttaacagattttt

SEQ ID NO: 134617 - DNA, 22 bp, synthetic construct
  misc_feature 1..22: note = chemically synthesized
  source 1..22: mol_type = other DNA
tctctctttaacagatttttct

SEQ ID NO: 134618 - DNA, 22 bp, synthetic construct
  misc_feature 1..22: note = chemically synthesized
  source 1..22: mol_type = other DNA
tctctttaacagatttttctct

SEQ ID NO: 134619 - DNA, 22 bp, synthetic construct
  misc_feature 1..22: note = chemically synthesized
  source 1..22: mol_type = other DNA
tctttaacagatttttctctgt

SEQ ID NO: 134620 - DNA, 22 bp, synthetic construct
  misc_feature 1..22: note = chemically synthesized
  source 1..22: mol_type = other DNA
tttaacagatttttctctgttg

SEQ ID NO: 134621 - DNA, 22 bp, synthetic construct
  misc_feature 1..22: note = chemically synthesized
  source 1..22: mol_type = other DNA
taacagatttttctctgttgcc

SEQ ID NO: 134622 - DNA, 22 bp, synthetic construct
  misc_feature 1..22: note = chemically synthesized
  source 1..22: mol_type = other DNA
aacagatttttctctgttgccc

SEQ ID NO: 134623 - DNA, 22 bp, synthetic construct
  misc_feature 1..22: note = chemically synthesized
  source 1..22: mol_type = other DNA
acagatttttctctgttgccca

SEQ ID NO: 134624 - DNA, 22 bp, synthetic construct
  misc_feature 1..22: note = chemically synthesized
  source 1..22: mol_type = other DNA
ttctctgttgcccaggctagag

SEQ ID NO: 134625 - DNA, 22 bp, synthetic construct
  misc_feature 1..22: note = chemically synthesized
  source 1..22: mol_type = other DNA
tctctgttgcccaggctagagt

SEQ ID NO: 134626 - DNA, 22 bp, synthetic construct
  misc_feature 1..22: note = chemically synthesized
  source 1..22: mol_type = other DNA
ctctgttgcccaggctagagtg

SEQ ID NO: 134627 - DNA, 22 bp, synthetic construct
  misc_feature 1..22: note = chemically synthesized
  source 1..22: mol_type = other DNA
tctgttgcccaggctagagtgc

SEQ ID NO: 134628 - DNA, 22 bp, synthetic construct
  misc_feature 1..22: note = chemically synthesized
  source 1..22: mol_type = other DNA
tgttgcccaggctagagtgcag

SEQ ID NO: 134629 - DNA, 22 bp, synthetic construct
  misc_feature 1..22: note = chemically synthesized
  source 1..22: mol_type = other DNA
ttgcccaggctagagtgcagtg

SEQ ID NO: 134630 - DNA, 22 bp, synthetic construct
  misc_feature 1..22: note = chemically synthesized
  source 1..22: mol_type = other DNA
cccaggctagagtgcagtggtg

SEQ ID NO: 134631 - DNA, 22 bp, synthetic construct
  misc_feature 1..22: note = chemically synthesized
  source 1..22: mol_type = other DNA
gagtgcagtggtgcgatctcag

SEQ ID NO: 134632 - DNA, 22 bp, synthetic construct
  misc_feature 1..22: note = chemically synthesized
  source 1..22: mol_type = other DNA
agctcactgcgacctcctccac

SEQ ID NO: 134633 - DNA, 22 bp, synthetic construct
  misc_feature 1..22: note = chemically synthesized
  source 1..22: mol_type = other DNA
actgcgacctcctccaccaggg

SEQ ID NO: 134634 - DNA, 22 bp, synthetic construct
  misc_feature 1..22: note = chemically synthesized
  source 1..22: mol_type = other DNA
cgacctcctccaccagggttca

SEQ ID NO: 134635 - DNA, 22 bp, synthetic construct
  misc_feature 1..22: note = chemically synthesized
  source 1..22: mol_type = other DNA
ctccaccagggttcaggggatt

SEQ ID NO: 134636 - DNA, 22 bp, synthetic construct
  misc_feature 1..22: note = chemically synthesized
  source 1..22: mol_type = other DNA
caccagggttcaggggattctc

SEQ ID NO: 134637 - DNA, 22 bp, synthetic construct
  misc_feature 1..22: note = chemically synthesized
  source 1..22: mol_type = other DNA
aggggattctcatgcctcagcc

SEQ ID NO: 134638 - DNA, 22 bp, synthetic construct
  misc_feature 1..22: note = chemically synthesized
  source 1..22: mol_type = other DNA
tcatgcctcagcctccagagta

SEQ ID NO: 134639 - DNA, 22 bp, synthetic construct
  misc_feature 1..22: note = chemically synthesized
  source 1..22: mol_type = other DNA
atgcctcagcctccagagtagc

SEQ ID NO: 134640 - DNA, 22 bp, synthetic construct
  misc_feature 1..22: note = chemically synthesized
  source 1..22: mol_type = other DNA
agcctccagagtagctgggatt

SEQ ID NO: 134641 - DNA, 22 bp, synthetic construct
  misc_feature 1..22: note = chemically synthesized
  source 1..22: mol_type = other DNA
cagagtagctgggattatgatc

SEQ ID NO: 134642 - DNA, 22 bp, synthetic construct
  misc_feature 1..22: note = chemically synthesized
  source 1..22: mol_type = other DNA
ggattatgatcatgtgccacca

SEQ ID NO: 134643 - DNA, 22 bp, synthetic construct
  misc_feature 1..22: note = chemically synthesized
  source 1..22: mol_type = other DNA
tgatcatgtgccaccacacctg

SEQ ID NO: 134644 - DNA, 22 bp, synthetic construct
  misc_feature 1..22: note = chemically synthesized
  source 1..22: mol_type = other DNA
gcttatttttgtaattatagta

SEQ ID NO: 134645 - DNA, 22 bp, synthetic construct
  misc_feature 1..22: note = chemically synthesized
  source 1..22: mol_type = other DNA
atttttgtaattatagtagtga

SEQ ID NO: 134646 - DNA, 22 bp, synthetic construct
  misc_feature 1..22: note = chemically synthesized
  source 1..22: mol_type = other DNA
tttttgtaattatagtagtgat

SEQ ID NO: 134647 - DNA, 22 bp, synthetic construct
  misc_feature 1..22: note = chemically synthesized
  source 1..22: mol_type = other DNA
ttgtaattatagtagtgatggt

SEQ ID NO: 134648 - DNA, 22 bp, synthetic construct
  misc_feature 1..22: note = chemically synthesized
  source 1..22: mol_type = other DNA
tgtaattatagtagtgatggtg

SEQ ID NO: 134649 - DNA, 22 bp, synthetic construct
  misc_feature 1..22: note = chemically synthesized
  source 1..22: mol_type = other DNA
gtaattatagtagtgatggtgt

SEQ ID NO: 134650 - DNA, 22 bp, synthetic construct
  misc_feature 1..22: note = chemically synthesized
  source 1..22: mol_type = other DNA
taattatagtagtgatggtgtt

SEQ ID NO: 134651 - DNA, 22 bp, synthetic construct
  misc_feature 1..22: note = chemically synthesized
  source 1..22: mol_type = other DNA
tagtagtgatggtgttttgcca

SEQ ID NO: 134652 - DNA, 22 bp, synthetic construct
  misc_feature 1..22: note = chemically synthesized
  source 1..22: mol_type = other DNA
tgccatgttggcccagctggtc

SEQ ID NO: 134653 - DNA, 22 bp, synthetic construct
  misc_feature 1..22: note = chemically synthesized
  source 1..22: mol_type = other DNA
gccatgttggcccagctggtct

SEQ ID NO: 134654 - DNA, 22 bp, synthetic construct
  misc_feature 1..22: note = chemically synthesized
  source 1..22: mol_type = other DNA
ccatgttggcccagctggtctc

SEQ ID NO: 134655 - DNA, 22 bp, synthetic construct
  misc_feature 1..22: note = chemically synthesized
  source 1..22: mol_type = other DNA
gcccagctggtctcgaactcct

SEQ ID NO: 134656 - DNA, 22 bp, synthetic construct
  misc_feature 1..22: note = chemically synthesized
  source 1..22: mol_type = other DNA
gtctcgaactcctgaactcaag

SEQ ID NO: 134657 - DNA, 22 bp, synthetic construct
  misc_feature 1..22: note = chemically synthesized
  source 1..22: mol_type = other DNA
gaactcctgaactcaagtgatc

SEQ ID NO: 134658 - DNA, 22 bp, synthetic construct
  misc_feature 1..22: note = chemically synthesized
  source 1..22: mol_type = other DNA
ctgaactcaagtgatccaccct

SEQ ID NO: 134659 - DNA, 22 bp, synthetic construct
  misc_feature 1..22: note = chemically synthesized
  source 1..22: mol_type = other DNA
aactcaagtgatccaccctcct

SEQ ID NO: 134660 - DNA, 22 bp, synthetic construct
  misc_feature 1..22: note = chemically synthesized
  source 1..22: mol_type = other DNA
aagtgatccaccctcctcggcc

SEQ ID NO: 134661 - DNA, 22 bp, synthetic construct
  misc_feature 1..22: note = chemically synthesized
  source 1..22: mol_type = other DNA
ctcggcctcccaaagtgctggg

SEQ ID NO: 134662 - DNA, 22 bp, synthetic construct
  misc_feature 1..22: note = chemically synthesized
  source 1..22: mol_type = other DNA
ggcctcccaaagtgctgggatt

SEQ ID NO: 134663 - DNA, 22 bp, synthetic construct
  misc_feature 1..22: note = chemically synthesized
  source 1..22: mol_type = other DNA
ccaaagtgctgggattataggc

SEQ ID NO: 134664 - DNA, 22 bp, synthetic construct
  misc_feature 1..22: note = chemically synthesized
  source 1..22: mol_type = other DNA
ggattataggcatgagccaccg

SEQ ID NO: 134665 - DNA, 22 bp, synthetic construct
  misc_feature 1..22: note = chemically synthesized
  source 1..22: mol_type = other DNA
taggcatgagccaccgtgccca

SEQ ID NO: 134666 - DNA, 22 bp, synthetic construct
  misc_feature 1..22: note = chemically synthesized
  source 1..22: mol_type = other DNA
ttttttactcactttttgtctc

SEQ ID NO: 134667 - DNA, 22 bp, synthetic construct
  misc_feature 1..22: note = chemically synthesized
  source 1..22: mol_type = other DNA
tttactcactttttgtctcaca

SEQ ID NO: 134668 - DNA, 22 bp, synthetic construct
  misc_feature 1..22: note = chemically synthesized
  source 1..22: mol_type = other DNA
ttactcactttttgtctcacag

SEQ ID NO: 134669 - DNA, 22 bp, synthetic construct
  misc_feature 1..22: note = chemically synthesized
  source 1..22: mol_type = other DNA
tactcactttttgtctcacagt

SEQ ID NO: 134670 - DNA, 22 bp, synthetic construct
  misc_feature 1..22: note = chemically synthesized
  source 1..22: mol_type = other DNA
actcactttttgtctcacagtc

SEQ ID NO: 134671 - DNA, 22 bp, synthetic construct
  misc_feature 1..22: note = chemically synthesized
  source 1..22: mol_type = other DNA
ctcactttttgtctcacagtca

SEQ ID NO: 134672 - DNA, 22 bp, synthetic construct
  misc_feature 1..22: note = chemically synthesized
  source 1..22: mol_type = other DNA
actttttgtctcacagtcatta

SEQ ID NO: 134673 - DNA, 22 bp, synthetic construct
  misc_feature 1..22: note = chemically synthesized
  source 1..22: mol_type = other DNA
tttgtctcacagtcattaggca

SEQ ID NO: 134674 - DNA, 22 bp, synthetic construct
  misc_feature 1..22: note = chemically synthesized
  source 1..22: mol_type = other DNA
ttgtctcacagtcattaggcat

SEQ ID NO: 134675 - DNA, 22 bp, synthetic construct
  misc_feature 1..22: note = chemically synthesized
  source 1..22: mol_type = other DNA
tgtctcacagtcattaggcatt

SEQ ID NO: 134676 - DNA, 22 bp, synthetic construct
  misc_feature 1..22: note = chemically synthesized
  source 1..22: mol_type = other DNA
gtctcacagtcattaggcattc

SEQ ID NO: 134677 - DNA, 22 bp, synthetic construct
  misc_feature 1..22: note = chemically synthesized
  source 1..22: mol_type = other DNA
tctcacagtcattaggcattca

SEQ ID NO: 134678 - DNA, 22 bp, synthetic construct
  misc_feature 1..22: note = chemically synthesized
  source 1..22: mol_type = other DNA
acagtcattaggcattcatttc

SEQ ID NO: 134679 - DNA, 22 bp, synthetic construct
  misc_feature 1..22: note = chemically synthesized
  source 1..22: mol_type = other DNA
ggcattcatttctgccattatg

SEQ ID NO: 134680 - DNA, 22 bp, synthetic construct
  misc_feature 1..22: note = chemically synthesized
  source 1..22: mol_type = other DNA
atttctgccattatgttgaaat

SEQ ID NO: 134681 - DNA, 22 bp, synthetic construct
  misc_feature 1..22: note = chemically synthesized
  source 1..22: mol_type = other DNA
ctgccattatgttgaaattgtc

SEQ ID NO: 134682 - DNA, 22 bp, synthetic construct
  misc_feature 1..22: note = chemically synthesized
  source 1..22: mol_type = other DNA
tgccattatgttgaaattgtca

SEQ ID NO: 134683 - DNA, 22 bp, synthetic construct
  misc_feature 1..22: note = chemically synthesized
  source 1..22: mol_type = other DNA
ccattatgttgaaattgtcaat

SEQ ID NO: 134684 - DNA, 22 bp, synthetic construct
  misc_feature 1..22: note = chemically synthesized
  source 1..22: mol_type = other DNA
tgttgaaattgtcaatattacc

SEQ ID NO: 134685 - DNA, 22 bp, synthetic construct
  misc_feature 1..22: note = chemically synthesized
  source 1..22: mol_type = other DNA
aaattgtcaatattaccaaaga

SEQ ID NO: 134686 - DNA, 22 bp, synthetic construct
  misc_feature 1..22: note = chemically synthesized
  source 1..22: mol_type = other DNA
tcaatattaccaaagacctagt

SEQ ID NO: 134687 - DNA, 22 bp, synthetic construct
  misc_feature 1..22: note = chemically synthesized
  source 1..22: mol_type = other DNA
ccaaagacctagttgccccaaa

SEQ ID NO: 134688 - DNA, 22 bp, synthetic construct
  misc_feature 1..22: note = chemically synthesized
  source 1..22: mol_type = other DNA
gttgccccaaacaatcaacacc

SEQ ID NO: 134689 - DNA, 22 bp, synthetic construct
  misc_feature 1..22: note = chemically synthesized
  source 1..22: mol_type = other DNA
ccccaaacaatcaacacctcta

SEQ ID NO: 134690 - DNA, 22 bp, synthetic construct
  misc_feature 1..22: note = chemically synthesized
  source 1..22: mol_type = other DNA
tatgtttatattaattgataat

SEQ ID NO: 134691 - DNA, 22 bp, synthetic construct
  misc_feature 1..22: note = chemically synthesized
  source 1..22: mol_type = other DNA
tgtttatattaattgataattc

SEQ ID NO: 134692 - DNA, 22 bp, synthetic construct
  misc_feature 1..22: note = chemically synthesized
  source 1..22: mol_type = other DNA
atattaattgataattctatat

SEQ ID NO: 134693 - DNA, 22 bp, synthetic construct
  misc_feature 1..22: note = chemically synthesized
  source 1..22: mol_type = other DNA
tattaattgataattctatatt

SEQ ID NO: 134694 - DNA, 22 bp, synthetic construct
  misc_feature 1..22: note = chemically synthesized
  source 1..22: mol_type = other DNA
attgataattctatatttttca

SEQ ID NO: 134695 - DNA, 22 bp, synthetic construct
  misc_feature 1..22: note = chemically synthesized
  source 1..22: mol_type = other DNA
ataattctatatttttcactat

SEQ ID NO: 134696 - DNA, 22 bp, synthetic construct
  misc_feature 1..22: note = chemically synthesized
  source 1..22: mol_type = other DNA
tatatttttcactattaaccta

SEQ ID NO: 134697 - DNA, 22 bp, synthetic construct
  misc_feature 1..22: note = chemically synthesized
  source 1..22: mol_type = other DNA
tatttttcactattaacctacc

SEQ ID NO: 134698 - DNA, 22 bp, synthetic construct
  misc_feature 1..22: note = chemically synthesized
  source 1..22: mol_type = other DNA
ttcactattaacctaccatagt

SEQ ID NO: 134699 - DNA, 22 bp, synthetic construct
  misc_feature 1..22: note = chemically synthesized
  source 1..22: mol_type = other DNA
tcactattaacctaccatagta

SEQ ID NO: 134700 - DNA, 22 bp, synthetic construct
  misc_feature 1..22: note = chemically synthesized
  source 1..22: mol_type = other DNA
cactattaacctaccatagtat

SEQ ID NO: 134701 - DNA, 22 bp, synthetic construct
  misc_feature 1..22: note = chemically synthesized
  source 1..22: mol_type = other DNA
actattaacctaccatagtatc

SEQ ID NO: 134702 - DNA, 22 bp, synthetic construct
  misc_feature 1..22: note = chemically synthesized
  source 1..22: mol_type = other DNA
ttaacctaccatagtatccact

SEQ ID NO: 134703 - DNA, 22 bp, synthetic construct
  misc_feature 1..22: note = chemically synthesized
  source 1..22: mol_type = other DNA
acctaccatagtatccactcct

SEQ ID NO: 134704 - DNA, 22 bp, synthetic construct
  misc_feature 1..22: note = chemically synthesized
  source 1..22: mol_type = other DNA
ccatagtatccactcctataaa

SEQ ID NO: 134705 - DNA, 22 bp, synthetic construct
  misc_feature 1..22: note = chemically synthesized
  source 1..22: mol_type = other DNA
ctataaacttcccttttcattg

SEQ ID NO: 134706 - DNA, 22 bp, synthetic construct
  misc_feature 1..22: note = chemically synthesized
  source 1..22: mol_type = other DNA
taaacttcccttttcattgttt

SEQ ID NO: 134707 - DNA, 22 bp, synthetic construct
  misc_feature 1..22: note = chemically synthesized
  source 1..22: mol_type = other DNA
cccttttcattgtttttttgta

SEQ ID NO: 134708 - DNA, 22 bp, synthetic construct
  misc_feature 1..22: note = chemically synthesized
  source 1..22: mol_type = other DNA
ccttttcattgtttttttgtaa

SEQ ID NO: 134709 - DNA, 22 bp, synthetic construct
  misc_feature 1..22: note = chemically synthesized
  source 1..22: mol_type = other DNA
ttcattgtttttttgtaaatac

SEQ ID NO: 134710 - DNA, 22 bp, synthetic construct
  misc_feature 1..22: note = chemically synthesized
  source 1..22: mol_type = other DNA
tcattgtttttttgtaaataca

SEQ ID NO: 134711 - DNA, 22 bp, synthetic construct
  misc_feature 1..22: note = chemically synthesized
  source 1..22: mol_type = other DNA
cattgtttttttgtaaatacag

SEQ ID NO: 134712 - DNA, 22 bp, synthetic construct
  misc_feature 1..22: note = chemically synthesized
  source 1..22: mol_type = other DNA
attgtttttttgtaaatacaga

SEQ ID NO: 134713 - DNA, 22 bp, synthetic construct
  misc_feature 1..22: note = chemically synthesized
  source 1..22: mol_type = other DNA
tttttttgtaaatacagatcaa

SEQ ID NO: 134714 - DNA, 22 bp, synthetic construct
  misc_feature 1..22: note = chemically synthesized
  source 1..22: mol_type = other DNA
ttttgtaaatacagatcaactt

SEQ ID NO: 134715 - DNA, 22 bp, synthetic construct
  misc_feature 1..22: note = chemically synthesized
  source 1..22: mol_type = other DNA
tttgtaaatacagatcaacttt

SEQ ID NO: 134716 - DNA, 22 bp, synthetic construct
  misc_feature 1..22: note = chemically synthesized
  source 1..22: mol_type = other DNA
ttgtaaatacagatcaactttg

SEQ ID NO: 134717 - DNA, 22 bp, synthetic construct
  misc_feature 1..22: note = chemically synthesized
  source 1..22: mol_type = other DNA
tgtaaatacagatcaactttgc

SEQ ID NO: 134718 - DNA, 22 bp, synthetic construct
  misc_feature 1..22: note = chemically synthesized
  source 1..22: mol_type = other DNA
gtaaatacagatcaactttgct

SEQ ID NO: 134719 - DNA, 22 bp, synthetic construct
  misc_feature 1..22: note = chemically synthesized
  source 1..22: mol_type = other DNA
taaatacagatcaactttgcta

SEQ ID NO: 134720 - DNA, 22 bp, synthetic construct
  misc_feature 1..22: note = chemically synthesized
  source 1..22: mol_type = other DNA
tgctatcctcttacatctgtgc

SEQ ID NO: 134721 - DNA, 22 bp, synthetic construct
  misc_feature 1..22: note = chemically synthesized
  source 1..22: mol_type = other DNA
gctatcctcttacatctgtgcc

SEQ ID NO: 134722 - DNA, 22 bp, synthetic construct
  misc_feature 1..22: note = chemically synthesized
  source 1..22: mol_type = other DNA
ctatcctcttacatctgtgcct

SEQ ID NO: 134723 - DNA, 22 bp, synthetic construct
  misc_feature 1..22: note = chemically synthesized
  source 1..22: mol_type = other DNA
tcctcttacatctgtgcctgct

SEQ ID NO: 134724 - DNA, 22 bp, synthetic construct
  misc_feature 1..22: note = chemically synthesized
  source 1..22: mol_type = other DNA
ttacatctgtgcctgcttcttt

SEQ ID NO: 134725 - DNA, 22 bp, synthetic construct
  misc_feature 1..22: note = chemically synthesized
  source 1..22: mol_type = other DNA
acatctgtgcctgcttctttgt

SEQ ID NO: 134726 - DNA, 22 bp, synthetic construct
  misc_feature 1..22: note = chemically synthesized
  source 1..22: mol_type = other DNA
catctgtgcctgcttctttgtc

SEQ ID NO: 134727 - DNA, 22 bp, synthetic construct
  misc_feature 1..22: note = chemically synthesized
  source 1..22: mol_type = other DNA
tgcctgcttctttgtctatctc

SEQ ID NO: 134728 - DNA, 22 bp, synthetic construct
  misc_feature 1..22: note = chemically synthesized
  source 1..22: mol_type = other DNA
cttctttgtctatctcctttga

SEQ ID NO: 134729 - DNA, 22 bp, synthetic construct
  misc_feature 1..22: note = chemically synthesized
  source 1..22: mol_type = other DNA
ctttgtctatctcctttgagat

SEQ ID NO: 134730 - DNA, 22 bp, synthetic construct
  misc_feature 1..22: note = chemically synthesized
  source 1..22: mol_type = other DNA
tttgtctatctcctttgagatc

SEQ ID NO: 134731 - DNA, 22 bp, synthetic construct
  misc_feature 1..22: note = chemically synthesized
  source 1..22: mol_type = other DNA
tgtctatctcctttgagatctt

SEQ ID NO: 134732 - DNA, 22 bp, synthetic construct
  misc_feature 1..22: note = chemically synthesized
  source 1..22: mol_type = other DNA
gtctatctcctttgagatcttt

SEQ ID NO: 134733 - DNA, 22 bp, synthetic construct
  misc_feature 1..22: note = chemically synthesized
  source 1..22: mol_type = other DNA
tctatctcctttgagatctttc

SEQ ID NO: 134734 - DNA, 22 bp, synthetic construct
  misc_feature 1..22: note = chemically synthesized
  source 1..22: mol_type = other DNA
tctcctttgagatctttctttt

SEQ ID NO: 134735 - DNA, 22 bp, synthetic construct
  misc_feature 1..22: note = chemically synthesized
  source 1..22: mol_type = other DNA
ctttgagatctttctttttact

SEQ ID NO: 134736 - DNA, 22 bp, synthetic construct
  misc_feature 1..22: note = chemically synthesized
  source 1..22: mol_type = other DNA
tgagatctttctttttactgag

SEQ ID NO: 134737 - DNA, 22 bp, synthetic construct
  misc_feature 1..22: note = chemically synthesized
  source 1..22: mol_type = other DNA
gagatctttctttttactgaga

SEQ ID NO: 134738 - DNA, 22 bp, synthetic construct
  misc_feature 1..22: note = chemically synthesized
  source 1..22: mol_type = other DNA
agatctttctttttactgagag

SEQ ID NO: 134739 - DNA, 22 bp, synthetic construct
  misc_feature 1..22: note = chemically synthesized
  source 1..22: mol_type = other DNA
tctttttactgagagcaaaatt

SEQ ID NO: 134740 - DNA, 22 bp, synthetic construct
  misc_feature 1..22: note = chemically synthesized
  source 1..22: mol_type = other DNA
ctttttactgagagcaaaattt

SEQ ID NO: 134741 - DNA, 22 bp, synthetic construct
  misc_feature 1..22: note = chemically synthesized
  source 1..22: mol_type = other DNA
tttttactgagagcaaaatttg

SEQ ID NO: 134742 - DNA, 22 bp, synthetic construct
  misc_feature 1..22: note = chemically synthesized
  source 1..22: mol_type = other DNA
tttactgagagcaaaatttgtc

SEQ ID NO: 134743 - DNA, 22 bp, synthetic construct
  misc_feature 1..22: note = chemically synthesized
  source 1..22: mol_type = other DNA
ttactgagagcaaaatttgtcc

SEQ ID NO: 134744 - DNA, 22 bp, synthetic construct
  misc_feature 1..22: note = chemically synthesized
  source 1..22: mol_type = other DNA
tactgagagcaaaatttgtcct

SEQ ID NO: 134745 - DNA, 22 bp, synthetic construct
  misc_feature 1..22: note = chemically synthesized
  source 1..22: mol_type = other DNA
actgagagcaaaatttgtccta

SEQ ID NO: 134746 - DNA, 22 bp, synthetic construct
  misc_feature 1..22: note = chemically synthesized
  source 1..22: mol_type = other DNA
ctgagagcaaaatttgtcctag

SEQ ID NO: 134747 - DNA, 22 bp, synthetic construct
  misc_feature 1..22: note = chemically synthesized
  source 1..22: mol_type = other DNA
agagcaaaatttgtcctagttt

SEQ ID NO: 134748 - DNA, 22 bp, synthetic construct
  misc_feature 1..22: note = chemically synthesized
  source 1..22: mol_type = other DNA
gtcctagtttcccaatgtttct

SEQ ID NO: 134749 - DNA, 22 bp, synthetic construct
  misc_feature 1..22: note = chemically synthesized
  source 1..22: mol_type = other DNA
tcctagtttcccaatgtttctc

SEQ ID NO: 134750 - DNA, 22 bp, synthetic construct
  misc_feature 1..22: note = chemically synthesized
  source 1..22: mol_type = other DNA
gtttcccaatgtttctctccaa

SEQ ID NO: 134751 - DNA, 22 bp, synthetic construct
  misc_feature 1..22: note = chemically synthesized
  source 1..22: mol_type = other DNA
cccaatgtttctctccaaacct

SEQ ID NO: 134752 - DNA, 22 bp, synthetic construct
  misc_feature 1..22: note = chemically synthesized
  source 1..22: mol_type = other DNA
ccaatgtttctctccaaacctt

SEQ ID NO: 134753 - DNA, 22 bp, synthetic construct
  misc_feature 1..22: note = chemically synthesized
  source 1..22: mol_type = other DNA
ctctccaaaccttttttttttt

SEQ ID NO: 134754 - DNA, 22 bp, synthetic construct
  misc_feature 1..22: note = chemically synthesized
  source 1..22: mol_type = other DNA
tctccaaacctttttttttttt

SEQ ID NO: 134755 - DNA, 22 bp, synthetic construct
  misc_feature 1..22: note = chemically synthesized
  source 1..22: mol_type = other DNA
tccaaacctttttttttttttt

SEQ ID NO: 134756 - DNA, 22 bp, synthetic construct
  misc_feature 1..22: note = chemically synthesized
  source 1..22: mol_type = other DNA
caaacctttttttttttttttt

SEQ ID NO: 134757 - DNA, 22 bp, synthetic construct
  misc_feature 1..22: note = chemically synthesized
  source 1..22: mol_type = other DNA
ttttttttttttttttgagaca

SEQ ID NO: 134758 - DNA, 22 bp, synthetic construct
  misc_feature 1..22: note = chemically synthesized
  source 1..22: mol_type = other DNA
tttttttttttttttgagacag

SEQ ID NO: 134759 - DNA, 22 bp, synthetic construct
  misc_feature 1..22: note = chemically synthesized
  source 1..22: mol_type = other DNA
ttttttttttttttgagacaga

SEQ ID NO: 134760 - DNA, 22 bp, synthetic construct
  misc_feature 1..22: note = chemically synthesized
  source 1..22: mol_type = other DNA
tttttttttttttgagacagag

SEQ ID NO: 134761 - DNA, 22 bp, synthetic construct
  misc_feature 1..22: note = chemically synthesized
  source 1..22: mol_type = other DNA
ttttttttttttgagacagagc

SEQ ID NO: 134762 - DNA, 22 bp, synthetic construct
  misc_feature 1..22: note = chemically synthesized
  source 1..22: mol_type = other DNA
tttttttttttgagacagagcc

SEQ ID NO: 134763 - DNA, 22 bp, synthetic construct
  misc_feature 1..22: note = chemically synthesized
  source 1..22: mol_type = other DNA
ttttttttttgagacagagcct

SEQ ID NO: 134764 - DNA, 22 bp, synthetic construct
  misc_feature 1..22: note = chemically synthesized
  source 1..22: mol_type = other DNA
tttttttttgagacagagcctt

SEQ ID NO: 134765 - DNA, 22 bp, synthetic construct
  misc_feature 1..22: note = chemically synthesized
  source 1..22: mol_type = other DNA
ttttttttgagacagagccttg

SEQ ID NO: 134766 - DNA, 22 bp, synthetic construct
  misc_feature 1..22: note = chemically synthesized
  source 1..22: mol_type = other DNA
tttttttgagacagagccttgc

SEQ ID NO: 134767 - DNA, 22 bp, synthetic construct
  misc_feature 1..22: note = chemically synthesized
  source 1..22: mol_type = other DNA
ttttttgagacagagccttgct

SEQ ID NO: 134768 - DNA, 22 bp, synthetic construct
  misc_feature 1..22: note = chemically synthesized
  source 1..22: mol_type = other DNA
tttttgagacagagccttgctt

SEQ ID NO: 134769 - DNA, 22 bp, synthetic construct
  misc_feature 1..22: note = chemically synthesized
  source 1..22: mol_type = other DNA
ttttgagacagagccttgcttt

SEQ ID NO: 134770 - DNA, 22 bp, synthetic construct
  misc_feature 1..22: note = chemically synthesized
  source 1..22: mol_type = other DNA
tttgagacagagccttgctttg

SEQ ID NO: 134771 - DNA, 22 bp, synthetic construct
  misc_feature 1..22: note = chemically synthesized
  source 1..22: mol_type = other DNA
ttgagacagagccttgctttgt

SEQ ID NO: 134772 - DNA, 22 bp, synthetic construct
  misc_feature 1..22: note = chemically synthesized
  source 1..22: mol_type = other DNA
tgagacagagccttgctttgtc

SEQ ID NO: 134773 - DNA, 22 bp, synthetic construct
  misc_feature 1..22: note = chemically synthesized
  source 1..22: mol_type = other DNA
gagacagagccttgctttgtcg

SEQ ID NO: 134774 - DNA, 22 bp, synthetic construct
  misc_feature 1..22: note = chemically synthesized
  source 1..22: mol_type = other DNA
agacagagccttgctttgtcgc

SEQ ID NO: 134775 - DNA, 22 bp, synthetic construct
  misc_feature 1..22: note = chemically synthesized
  source 1..22: mol_type = other DNA
gctttgtcgcccaggctgtagt

SEQ ID NO: 134776 - DNA, 22 bp, synthetic construct
  misc_feature 1..22: note = chemically synthesized
  source 1..22: mol_type = other DNA
ctttgtcgcccaggctgtagtg

SEQ ID NO: 134777 - DNA, 22 bp, synthetic construct
  misc_feature 1..22: note = chemically synthesized
  source 1..22: mol_type = other DNA
tgtcgcccaggctgtagtgcag

SEQ ID NO: 134778 - DNA, 22 bp, synthetic construct
  misc_feature 1..22: note = chemically synthesized
  source 1..22: mol_type = other DNA
gtcgcccaggctgtagtgcagt

SEQ ID NO: 134779 - DNA, 22 bp, synthetic construct
  misc_feature 1..22: note = chemically synthesized
  source 1..22: mol_type = other DNA
tcgcccaggctgtagtgcagtg

SEQ ID NO: 134780 - DNA, 22 bp, synthetic construct
  misc_feature 1..22: note = chemically synthesized
  source 1..22: mol_type = other DNA
tagtgcagtggcacaatcttgg

SEQ ID NO: 134781 - DNA, 22 bp, synthetic construct
  misc_feature 1..22: note = chemically synthesized
  source 1..22: mol_type = other DNA
ggctcactgcgacgacctctgc

SEQ ID NO: 134782 - DNA, 22 bp, synthetic construct
  misc_feature 1..22: note = chemically synthesized
  source 1..22: mol_type = other DNA
gctcactgcgacgacctctgct

SEQ ID NO: 134783 - DNA, 22 bp, synthetic construct
  misc_feature 1..22: note = chemically synthesized
  source 1..22: mol_type = other DNA
actgcgacgacctctgctcccc

SEQ ID NO: 134784 - DNA, 22 bp, synthetic construct
  misc_feature 1..22: note = chemically synthesized
  source 1..22: mol_type = other DNA
cgacgacctctgctccccagtt

SEQ ID NO: 134785 - DNA, 22 bp, synthetic construct
  misc_feature 1..22: note = chemically synthesized
  source 1..22: mol_type = other DNA
tgctccccagtttttttaaagc

SEQ ID NO: 134786 - DNA, 22 bp, synthetic construct
  misc_feature 1..22: note = chemically synthesized
  source 1..22: mol_type = other DNA
ctccccagtttttttaaagcaa

SEQ ID NO: 134787 - DNA, 22 bp, synthetic construct
  misc_feature 1..22: note = chemically synthesized
  source 1..22: mol_type = other DNA
cccagtttttttaaagcaattc

SEQ ID NO: 134788 - DNA, 22 bp, synthetic construct
  misc_feature 1..22: note = chemically synthesized
  source 1..22: mol_type = other DNA
ttttaaagcaattctcctgcct

SEQ ID NO: 134789 - DNA, 22 bp, synthetic construct
  misc_feature 1..22: note = chemically synthesized
  source 1..22: mol_type = other DNA
tttaaagcaattctcctgcctc

SEQ ID NO: 134790 - DNA, 22 bp, synthetic construct
  misc_feature 1..22: note = chemically synthesized
  source 1..22: mol_type = other DNA
ttaaagcaattctcctgcctca

SEQ ID NO: 134791 - DNA, 22 bp, synthetic construct
  misc_feature 1..22: note = chemically synthesized
  source 1..22: mol_type = other DNA
taaagcaattctcctgcctcag

SEQ ID NO: 134792 - DNA, 22 bp, synthetic construct
  misc_feature 1..22: note = chemically synthesized
  source 1..22: mol_type = other DNA
aaagcaattctcctgcctcagc

SEQ ID NO: 134793 - DNA, 22 bp, synthetic construct
  misc_feature 1..22: note = chemically synthesized
  source 1..22: mol_type = other DNA
aagcaattctcctgcctcagcc

SEQ ID NO: 134794 - DNA, 22 bp, synthetic construct
  misc_feature 1..22: note = chemically synthesized
  source 1..22: mol_type = other DNA
tcctgcctcagcctcccgagta

SEQ ID NO: 134795 - DNA, 22 bp, synthetic construct
  misc_feature 1..22: note = chemically synthesized
  source 1..22: mol_type = other DNA
ctgcctcagcctcccgagtagc

SEQ ID NO: 134796 - DNA, 22 bp, synthetic construct
  misc_feature 1..22: note = chemically synthesized
  source 1..22: mol_type = other DNA
cctcagcctcccgagtagctgg

SEQ ID NO: 134797 - DNA, 22 bp, synthetic construct
  misc_feature 1..22: note = chemically synthesized
  source 1..22: mol_type = other DNA
agcctcccgagtagctgggatt

SEQ ID NO: 134798 - DNA, 22 bp, synthetic construct
  misc_feature 1..22: note = chemically synthesized
  source 1..22: mol_type = other DNA
ccgagtagctgggattacaggc

SEQ ID NO: 134799 - DNA, 22 bp, synthetic construct
  misc_feature 1..22: note = chemically synthesized
  source 1..22: mol_type = other DNA
ggattacaggcgctcaccacca

SEQ ID NO: 134800 - DNA, 22 bp, synthetic construct
  misc_feature 1..22: note = chemically synthesized
  source 1..22: mol_type = other DNA
caggcgctcaccaccacaccca

SEQ ID NO: 134801 - DNA, 22 bp, synthetic construct
  misc_feature 1..22: note = chemically synthesized
  source 1..22: mol_type = other DNA
accaccacacccagctaatttt

SEQ ID NO: 134802 - DNA, 22 bp, synthetic construct
  misc_feature 1..22: note = chemically synthesized
  source 1..22: mol_type = other DNA
atttttgtatttttagtagaga

SEQ ID NO: 134803 - DNA, 22 bp, synthetic construct
  misc_feature 1..22: note = chemically synthesized
  source 1..22: mol_type = other DNA
ttgtatttttagtagagacagg

SEQ ID NO: 134804 - DNA, 22 bp, synthetic construct
  misc_feature 1..22: note = chemically synthesized
  source 1..22: mol_type = other DNA
tgtatttttagtagagacaggg

SEQ ID NO: 134805 - DNA, 22 bp, synthetic construct
  misc_feature 1..22: note = chemically synthesized
  source 1..22: mol_type = other DNA
gtatttttagtagagacagggt

SEQ ID NO: 134806 - DNA, 22 bp, synthetic construct
  misc_feature 1..22: note = chemically synthesized
  source 1..22: mol_type = other DNA
tatttttagtagagacagggtt

SEQ ID NO: 134807 - DNA, 22 bp, synthetic construct
  misc_feature 1..22: note = chemically synthesized
  source 1..22: mol_type = other DNA
ttagtagagacagggtttcacc

SEQ ID NO: 134808 - DNA, 22 bp, synthetic construct
  misc_feature 1..22: note = chemically synthesized
  source 1..22: mol_type = other DNA
tagtagagacagggtttcacca

SEQ ID NO: 134809 - DNA, 22 bp, synthetic construct
  misc_feature 1..22: note = chemically synthesized
  source 1..22: mol_type = other DNA
agtagagacagggtttcaccat

SEQ ID NO: 134810 - DNA, 22 bp, synthetic construct
  misc_feature 1..22: note = chemically synthesized
  source 1..22: mol_type = other DNA
gtagagacagggtttcaccatg

SEQ ID NO: 134811 - DNA, 22 bp, synthetic construct
  misc_feature 1..22: note = chemically synthesized
  source 1..22: mol_type = other DNA
caccatgttggccaggctagtc

SEQ ID NO: 134812 - DNA, 22 bp, synthetic construct
  misc_feature 1..22: note = chemically synthesized
  source 1..22: mol_type = other DNA
accatgttggccaggctagtct

SEQ ID NO: 134813 - DNA, 22 bp, synthetic construct
  misc_feature 1..22: note = chemically synthesized
  source 1..22: mol_type = other DNA
gccaggctagtctcaaactgct

SEQ ID NO: 134814 - DNA, 22 bp, synthetic construct
  misc_feature 1..22: note = chemically synthesized
  source 1..22: mol_type = other DNA
gtctcaaactgctgacctcgtg

SEQ ID NO: 134815 - DNA, 22 bp, synthetic construct
  misc_feature 1..22: note = chemically synthesized
  source 1..22: mol_type = other DNA
aaactgctgacctcgtgatcca

SEQ ID NO: 134816 - DNA, 22 bp, synthetic construct
  misc_feature 1..22: note = chemically synthesized
  source 1..22: mol_type = other DNA
ctgacctcgtgatccacctcag

SEQ ID NO: 134817 - DNA, 22 bp, synthetic construct
  misc_feature 1..22: note = chemically synthesized
  source 1..22: mol_type = other DNA
acctcgtgatccacctcagcct

SEQ ID NO: 134818 - DNA, 22 bp, synthetic construct
  misc_feature 1..22: note = chemically synthesized
  source 1..22: mol_type = other DNA
gtgatccacctcagccttccaa

SEQ ID NO: 134819 - DNA, 22 bp, synthetic construct
  misc_feature 1..22: note = chemically synthesized
  source 1..22: mol_type = other DNA
agccttccaaagtgctaggatt

SEQ ID NO: 134820 - DNA, 22 bp, synthetic construct
  misc_feature 1..22: note = chemically synthesized
  source 1..22: mol_type = other DNA
ccaaagtgctaggattacaggc

SEQ ID NO: 134821 - DNA, 22 bp, synthetic construct
  misc_feature 1..22: note = chemically synthesized
  source 1..22: mol_type = other DNA
caaagtgctaggattacaggca

SEQ ID NO: 134822 - DNA, 22 bp, synthetic construct
  misc_feature 1..22: note = chemically synthesized
  source 1..22: mol_type = other DNA
ggattacaggcatgagcctctg

SEQ ID NO: 134823 - DNA, 22 bp, synthetic construct
  misc_feature 1..22: note = chemically synthesized
  source 1..22: mol_type = other DNA
caggcatgagcctctgtgcctg

SEQ ID NO: 134824 - DNA, 22 bp, synthetic construct
  misc_feature 1..22: note = chemically synthesized
  source 1..22: mol_type = other DNA
tgtgcctggccacctcttccat

SEQ ID NO: 134825 - DNA, 22 bp, synthetic construct
  misc_feature 1..22: note = chemically synthesized
  source 1..22: mol_type = other DNA
tgcctggccacctcttccattt

SEQ ID NO: 134826 - DNA, 22 bp, synthetic construct
  misc_feature 1..22: note = chemically synthesized
  source 1..22: mol_type = other DNA
gccacctcttccattttaattt

SEQ ID NO: 134827 - DNA, 22 bp, synthetic construct
  misc_feature 1..22: note = chemically synthesized
  source 1..22: mol_type = other DNA
ttccattttaatttgtacttaa

SEQ ID NO: 134828 - DNA, 22 bp, synthetic construct
  misc_feature 1..22: note = chemically synthesized
  source 1..22: mol_type = other DNA
ccattttaatttgtacttaagg

SEQ ID NO: 134829 - DNA, 22 bp, synthetic construct
  misc_feature 1..22: note = chemically synthesized
  source 1..22: mol_type = other DNA
cattttaatttgtacttaaggt

SEQ ID NO: 134830 - DNA, 22 bp, synthetic construct
  misc_feature 1..22: note = chemically synthesized
  source 1..22: mol_type = other DNA
taatttgtacttaaggtaagat

SEQ ID NO: 134831 - DNA, 22 bp, synthetic construct
  misc_feature 1..22: note = chemically synthesized
  source 1..22: mol_type = other DNA
aatttgtacttaaggtaagata

SEQ ID NO: 134832 - DNA, 22 bp, synthetic construct
  misc_feature 1..22: note = chemically synthesized
  source 1..22: mol_type = other DNA
atttgtacttaaggtaagatat

SEQ ID NO: 134833 - DNA, 22 bp, synthetic construct
  misc_feature 1..22: note = chemically synthesized
  source 1..22: mol_type = other DNA
gtacttaaggtaagatataaaa

SEQ ID NO: 134834 - DNA, 22 bp, synthetic construct
  misc_feature 1..22: note = chemically synthesized
  source 1..22: mol_type = other DNA
tacttaaggtaagatataaaaa

SEQ ID NO: 134835 - DNA, 22 bp, synthetic construct
  misc_feature 1..22: note = chemically synthesized
  source 1..22: mol_type = other DNA
aaggtaagatataaaaaagtca

SEQ ID NO: 134836 - DNA, 22 bp, synthetic construct
  misc_feature 1..22: note = chemically synthesized
  source 1..22: mol_type = other DNA
aggtaagatataaaaaagtcac

SEQ ID NO: 134837 - DNA, 22 bp, synthetic construct
  misc_feature 1..22: note = chemically synthesized
  source 1..22: mol_type = other DNA
aaaagctgagatttttcagata

SEQ ID NO: 134838 - DNA, 22 bp, synthetic construct
  misc_feature 1..22: note = chemically synthesized
  source 1..22: mol_type = other DNA
aaagctgagatttttcagatat

SEQ ID NO: 134839 - DNA, 22 bp, synthetic construct
  misc_feature 1..22: note = chemically synthesized
  source 1..22: mol_type = other DNA
agatttttcagatattttgtct

SEQ ID NO: 134840 - DNA, 22 bp, synthetic construct
  misc_feature 1..22: note = chemically synthesized
  source 1..22: mol_type = other DNA
ttcagatattttgtcttcatct

SEQ ID NO: 134841 - DNA, 22 bp, synthetic construct
  misc_feature 1..22: note = chemically synthesized
  source 1..22: mol_type = other DNA
tcagatattttgtcttcatctc

SEQ ID NO: 134842 - DNA, 22 bp, synthetic construct
  misc_feature 1..22: note = chemically synthesized
  source 1..22: mol_type = other DNA
cagatattttgtcttcatctca

SEQ ID NO: 134843 - DNA, 22 bp, synthetic construct
  misc_feature 1..22: note = chemically synthesized
  source 1..22: mol_type = other DNA
agatattttgtcttcatctcat

SEQ ID NO: 134844 - DNA, 22 bp, synthetic construct
  misc_feature 1..22: note = chemically synthesized
  source 1..22: mol_type = other DNA
tgtcttcatctcatggcttccc

SEQ ID NO: 134845 - DNA, 22 bp, synthetic construct
  misc_feature 1..22: note = chemically synthesized
  source 1..22: mol_type = other DNA
gtcttcatctcatggcttccca

SEQ ID NO: 134846 - DNA, 22 bp, synthetic construct
  misc_feature 1..22: note = chemically synthesized
  source 1..22: mol_type = other DNA
tcttcatctcatggcttcccat

SEQ ID NO: 134847 - DNA, 22 bp, synthetic construct
  misc_feature 1..22: note = chemically synthesized
  source 1..22: mol_type = other DNA
catctcatggcttcccattgtc

SEQ ID NO: 134848 - DNA, 22 bp, synthetic construct
  misc_feature 1..22: note = chemically synthesized
  source 1..22: mol_type = other DNA
atctcatggcttcccattgtca

SEQ ID NO: 134849 - DNA, 22 bp, synthetic construct
  misc_feature 1..22: note = chemically synthesized
  source 1..22: mol_type = other DNA
atggcttcccattgtcagttga

SEQ ID NO: 134850 - DNA, 22 bp, synthetic construct
  misc_feature 1..22: note = chemically synthesized
  source 1..22: mol_type = other DNA
cccattgtcagttgactttaaa

SEQ ID NO: 134851 - DNA, 22 bp, synthetic construct
  misc_feature 1..22: note = chemically synthesized
  source 1..22: mol_type = other DNA
ccattgtcagttgactttaaat

SEQ ID NO: 134852 - DNA, 22 bp, synthetic construct
  misc_feature 1..22: note = chemically synthesized
  source 1..22: mol_type = other DNA
tcagttgactttaaatatttat

SEQ ID NO: 134853 - DNA, 22 bp, synthetic construct
  misc_feature 1..22: note = chemically synthesized
  source 1..22: mol_type = other DNA
actttaaatatttattttggta

SEQ ID NO: 134854 - DNA, 22 bp, synthetic construct
  misc_feature 1..22: note = chemically synthesized
  source 1..22: mol_type = other DNA
taaatatttattttggtatatt

SEQ ID NO: 134855 - DNA, 22 bp, synthetic construct
  misc_feature 1..22: note = chemically synthesized
  source 1..22: mol_type = other DNA
aaatatttattttggtatattt

SEQ ID NO: 134856 - DNA, 22 bp, synthetic construct
  misc_feature 1..22: note = chemically synthesized
  source 1..22: mol_type = other DNA
aatatttattttggtatattta

SEQ ID NO: 134857 - DNA, 22 bp, synthetic construct
  misc_feature 1..22: note = chemically synthesized
  source 1..22: mol_type = other DNA
attttggtatatttattaattt

SEQ ID NO: 134858 - DNA, 22 bp, synthetic construct
  misc_feature 1..22: note = chemically synthesized
  source 1..22: mol_type = other DNA
ttttggtatatttattaatttc

SEQ ID NO: 134859 - DNA, 22 bp, synthetic construct
  misc_feature 1..22: note = chemically synthesized
  source 1..22: mol_type = other DNA
tggtatatttattaatttcttc

SEQ ID NO: 134860 - DNA, 22 bp, synthetic construct
  misc_feature 1..22: note = chemically synthesized
  source 1..22: mol_type = other DNA
ggtatatttattaatttcttct

SEQ ID NO: 134861 - DNA, 22 bp, synthetic construct
  misc_feature 1..22: note = chemically synthesized
  source 1..22: mol_type = other DNA
gtatatttattaatttcttcta

SEQ ID NO: 134862 - DNA, 22 bp, synthetic construct
  misc_feature 1..22: note = chemically synthesized
  source 1..22: mol_type = other DNA
attaatttcttctataggaaca

SEQ ID NO: 134863 - DNA, 22 bp, synthetic construct
  misc_feature 1..22: note = chemically synthesized
  source 1..22: mol_type = other DNA
ttaatttcttctataggaacac

SEQ ID NO: 134864 - DNA, 22 bp, synthetic construct
  misc_feature 1..22: note = chemically synthesized
  source 1..22: mol_type = other DNA
atttcttctataggaacacaat

SEQ ID NO: 134865 - DNA, 22 bp, synthetic construct
  misc_feature 1..22: note = chemically synthesized
  source 1..22: mol_type = other DNA
cttctataggaacacaattttg

SEQ ID NO: 134866 - DNA, 22 bp, synthetic construct
  misc_feature 1..22: note = chemically synthesized
  source 1..22: mol_type = other DNA
ttctataggaacacaattttgg

SEQ ID NO: 134867 - DNA, 22 bp, synthetic construct
  misc_feature 1..22: note = chemically synthesized
  source 1..22: mol_type = other DNA
ctataggaacacaattttgggg

SEQ ID NO: 134868 - DNA, 22 bp, synthetic construct
  misc_feature 1..22: note = chemically synthesized
  source 1..22: mol_type = other DNA
tataggaacacaattttggggc

SEQ ID NO: 134869 - DNA, 22 bp, synthetic construct
  misc_feature 1..22: note = chemically synthesized
  source 1..22: mol_type = other DNA
taggaacacaattttggggcaa

SEQ ID NO: 134870 - DNA, 22 bp, synthetic construct
  misc_feature 1..22: note = chemically synthesized
  source 1..22: mol_type = other DNA
tggggcaatatgtggagatgaa

SEQ ID NO: 134871 - DNA, 22 bp, synthetic construct
  misc_feature 1..22: note = chemically synthesized
  source 1..22: mol_type = other DNA
ggggcaatatgtggagatgaaa

SEQ ID NO: 134872 - DNA, 22 bp, synthetic construct
  misc_feature 1..22: note = chemically synthesized
  source 1..22: mol_type = other DNA
gggcaatatgtggagatgaaaa

SEQ ID NO: 134873 - DNA, 22 bp, synthetic construct
  misc_feature 1..22: note = chemically synthesized
  source 1..22: mol_type = other DNA
aggggacactgattgtacaggg

SEQ ID NO: 134874 - DNA, 22 bp, synthetic construct
  misc_feature 1..22: note = chemically synthesized
  source 1..22: mol_type = other DNA
attgtacagggcacttgcagat

SEQ ID NO: 134875 - DNA, 22 bp, synthetic construct
  misc_feature 1..22: note = chemically synthesized
  source 1..22: mol_type = other DNA
tacagggcacttgcagattatc

SEQ ID NO: 134876 - DNA, 22 bp, synthetic construct
  misc_feature 1..22: note = chemically synthesized
  source 1..22: mol_type = other DNA
gcagattatctggaactaaacg

SEQ ID NO: 134877 - DNA, 22 bp, synthetic construct
  misc_feature 1..22: note = chemically synthesized
  source 1..22: mol_type = other DNA
cagattatctggaactaaacgg

SEQ ID NO: 134878 - DNA, 22 bp, synthetic construct
  misc_feature 1..22: note = chemically synthesized
  source 1..22: mol_type = other DNA
tctggaactaaacggaagactg

SEQ ID NO: 134879 - DNA, 22 bp, synthetic construct
  misc_feature 1..22: note = chemically synthesized
  source 1..22: mol_type = other DNA
gaactaaacggaagactgttct

SEQ ID NO: 134880 - DNA, 22 bp, synthetic construct
  misc_feature 1..22: note = chemically synthesized
  source 1..22: mol_type = other DNA
aacggaagactgttctttttta

SEQ ID NO: 134881 - DNA, 22 bp, synthetic construct
  misc_feature 1..22: note = chemically synthesized
  source 1..22: mol_type = other DNA
ttcttttttaacacgatcttaa

SEQ ID NO: 134882 - DNA, 22 bp, synthetic construct
  misc_feature 1..22: note = chemically synthesized
  source 1..22: mol_type = other DNA
ttttttaacacgatcttaatat

SEQ ID NO: 134883 - DNA, 22 bp, synthetic construct
  misc_feature 1..22: note = chemically synthesized
  source 1..22: mol_type = other DNA
ttttaacacgatcttaatattc

SEQ ID NO: 134884 - DNA, 22 bp, synthetic construct
  misc_feature 1..22: note = chemically synthesized
  source 1..22: mol_type = other DNA
tttaacacgatcttaatattct

SEQ ID NO: 134885 - DNA, 22 bp, synthetic construct
  misc_feature 1..22: note = chemically synthesized
  source 1..22: mol_type = other DNA
ttaacacgatcttaatattctc

SEQ ID NO: 134886 - DNA, 22 bp, synthetic construct
  misc_feature 1..22: note = chemically synthesized
  source 1..22: mol_type = other DNA
taacacgatcttaatattctct

SEQ ID NO: 134887 - DNA, 22 bp, synthetic construct
  misc_feature 1..22: note = chemically synthesized
  source 1..22: mol_type = other DNA
aacacgatcttaatattctctt

SEQ ID NO: 134888 - DNA, 22 bp, synthetic construct
  misc_feature 1..22: note = chemically synthesized
  source 1..22: mol_type = other DNA
acacgatcttaatattctcttt

SEQ ID NO: 134889 - DNA, 22 bp, synthetic construct
  misc_feature 1..22: note = chemically synthesized
  source 1..22: mol_type = other DNA
aatattctctttttgtcttctc

SEQ ID NO: 134890 - DNA, 22 bp, synthetic construct
  misc_feature 1..22: note = chemically synthesized
  source 1..22: mol_type = other DNA
atattctctttttgtcttctca

SEQ ID NO: 134891 - DNA, 22 bp, synthetic construct
  misc_feature 1..22: note = chemically synthesized
  source 1..22: mol_type = other DNA
tctttttgtcttctcattttag

SEQ ID NO: 134892 - DNA, 22 bp, synthetic construct
  misc_feature 1..22: note = chemically synthesized
  source 1..22: mol_type = other DNA
tttttgtcttctcattttagtt

SEQ ID NO: 134893 - DNA, 22 bp, synthetic construct
  misc_feature 1..22: note = chemically synthesized
  source 1..22: mol_type = other DNA
tttgtcttctcattttagttta

SEQ ID NO: 134894 - DNA, 22 bp, synthetic construct
  misc_feature 1..22: note = chemically synthesized
  source 1..22: mol_type = other DNA
ttgtcttctcattttagtttat

SEQ ID NO: 134895 - DNA, 22 bp, synthetic construct
  misc_feature 1..22: note = chemically synthesized
  source 1..22: mol_type = other DNA
tgtcttctcattttagtttatg

SEQ ID NO: 134896 - DNA, 22 bp, synthetic construct
  misc_feature 1..22: note = chemically synthesized
  source 1..22: mol_type = other DNA
gtcttctcattttagtttatgt

SEQ ID NO: 134897 - DNA, 22 bp, synthetic construct
  misc_feature 1..22: note = chemically synthesized
  source 1..22: mol_type = other DNA
tcttctcattttagtttatgtc

SEQ ID NO: 134898 - DNA, 22 bp, synthetic construct
  misc_feature 1..22: note = chemically synthesized
  source 1..22: mol_type = other DNA
ctcattttagtttatgtcttta

SEQ ID NO: 134899 - DNA, 22 bp, synthetic construct
  misc_feature 1..22: note = chemically synthesized
  source 1..22: mol_type = other DNA
tcattttagtttatgtctttat

SEQ ID NO: 134900 - DNA, 22 bp, synthetic construct
  misc_feature 1..22: note = chemically synthesized
  source 1..22: mol_type = other DNA
attttagtttatgtctttataa

SEQ ID NO: 134901 - DNA, 22 bp, synthetic construct
  misc_feature 1..22: note = chemically synthesized
  source 1..22: mol_type = other DNA
tagtttatgtctttataaatgg

SEQ ID NO: 134902 - DNA, 22 bp, synthetic construct
  misc_feature 1..22: note = chemically synthesized
  source 1..22: mol_type = other DNA
agtttatgtctttataaatggt

SEQ ID NO: 134903 - DNA, 22 bp, synthetic construct
  misc_feature 1..22: note = chemically synthesized
  source 1..22: mol_type = other DNA
gtttatgtctttataaatggtt

SEQ ID NO: 134904 - DNA, 22 bp, synthetic construct
  misc_feature 1..22: note = chemically synthesized
  source 1..22: mol_type = other DNA
atgtctttataaatggtttcct

SEQ ID NO: 134905 - DNA, 22 bp, synthetic construct
  misc_feature 1..22: note = chemically synthesized
  source 1..22: mol_type = other DNA
tgtctttataaatggtttcctg

SEQ ID NO: 134906 - DNA, 22 bp, synthetic construct
  misc_feature 1..22: note = chemically synthesized
  source 1..22: mol_type = other DNA
tataaatggtttcctgaacagt

SEQ ID NO: 134907 - DNA, 22 bp, synthetic construct
  misc_feature 1..22: note = chemically synthesized
  source 1..22: mol_type = other DNA
ataaatggtttcctgaacagtt

SEQ ID NO: 134908 - DNA, 22 bp, synthetic construct
  misc_feature 1..22: note = chemically synthesized
  source 1..22: mol_type = other DNA
taaatggtttcctgaacagttc

SEQ ID NO: 134909 - DNA, 22 bp, synthetic construct
  misc_feature 1..22: note = chemically synthesized
  source 1..22: mol_type = other DNA
cctgaacagttcctaagctttt

SEQ ID NO: 134910 - DNA, 22 bp, synthetic construct
  misc_feature 1..22: note = chemically synthesized
  source 1..22: mol_type = other DNA
ctgaacagttcctaagcttttt

SEQ ID NO: 134911 - DNA, 22 bp, synthetic construct
  misc_feature 1..22: note = chemically synthesized
  source 1..22: mol_type = other DNA
aacagttcctaagctttttgtc

SEQ ID NO: 134912 - DNA, 22 bp, synthetic construct
  misc_feature 1..22: note = chemically synthesized
  source 1..22: mol_type = other DNA
ctaagctttttgtcagcatggc

SEQ ID NO: 134913 - DNA, 22 bp, synthetic construct
  misc_feature 1..22: note = chemically synthesized
  source 1..22: mol_type = other DNA
agctttttgtcagcatggcaag

SEQ ID NO: 134914 - DNA, 22 bp, synthetic construct
  misc_feature 1..22: note = chemically synthesized
  source 1..22: mol_type = other DNA
tttgtcagcatggcaagttgaa

SEQ ID NO: 134915 - DNA, 22 bp, synthetic construct
  misc_feature 1..22: note = chemically synthesized
  source 1..22: mol_type = other DNA
ttgtcagcatggcaagttgaag

SEQ ID NO: 134916 - DNA, 22 bp, synthetic construct
  misc_feature 1..22: note = chemically synthesized
  source 1..22: mol_type = other DNA
tgtcagcatggcaagttgaaga

SEQ ID NO: 134917 - DNA, 22 bp, synthetic construct
  misc_feature 1..22: note = chemically synthesized
  source 1..22: mol_type = other DNA
gtcagcatggcaagttgaagaa

SEQ ID NO: 134918 - DNA, 22 bp, synthetic construct
  misc_feature 1..22: note = chemically synthesized
  source 1..22: mol_type = other DNA
tcagcatggcaagttgaagaag

SEQ ID NO: 134919 - DNA, 22 bp, synthetic construct
  misc_feature 1..22: note = chemically synthesized
  source 1..22: mol_type = other DNA
aagaagctctggatgatggatc

SEQ ID NO: 134920 - DNA, 22 bp, synthetic construct
  misc_feature 1..22: note = chemically synthesized
  source 1..22: mol_type = other DNA
tggatgatggatctatgttacc

SEQ ID NO: 134921 - DNA, 22 bp, synthetic construct
  misc_feature 1..22: note = chemically synthesized
  source 1..22: mol_type = other DNA
gatgatggatctatgttacctt

SEQ ID NO: 134922 - DNA, 22 bp, synthetic construct
  misc_feature 1..22: note = chemically synthesized
  source 1..22: mol_type = other DNA
tgttaccttcagaaactcttga

SEQ ID NO: 134923 - DNA, 22 bp, synthetic construct
  misc_feature 1..22: note = chemically synthesized
  source 1..22: mol_type = other DNA
ccttcagaaactcttgaggact

SEQ ID NO: 134924 - DNA, 22 bp, synthetic construct
  misc_feature 1..22: note = chemically synthesized
  source 1..22: mol_type = other DNA
cagaaactcttgaggactctgg

SEQ ID NO: 134925 - DNA, 22 bp, synthetic construct
  misc_feature 1..22: note = chemically synthesized
  source 1..22: mol_type = other DNA
agaaactcttgaggactctggg

SEQ ID NO: 134926 - DNA, 22 bp, synthetic construct
  misc_feature 1..22: note = chemically synthesized
  source 1..22: mol_type = other DNA
ttgaggactctgggatagttgc

SEQ ID NO: 134927 - DNA, 22 bp, synthetic construct
  misc_feature 1..22: note = chemically synthesized
  source 1..22: mol_type = other DNA
gaggactctgggatagttgctg

SEQ ID NO: 134928 - DNA, 22 bp, synthetic construct
  misc_feature 1..22: note = chemically synthesized
  source 1..22: mol_type = other DNA
aggactctgggatagttgctgt

SEQ ID NO: 134929 - DNA, 22 bp, synthetic construct
  misc_feature 1..22: note = chemically synthesized
  source 1..22: mol_type = other DNA
tgggatagttgctgtcaaagaa

SEQ ID NO: 134930 - DNA, 22 bp, synthetic construct
  misc_feature 1..22: note = chemically synthesized
  source 1..22: mol_type = other DNA
ggatagttgctgtcaaagaatc

SEQ ID NO: 134931 - DNA, 22 bp, synthetic construct
  misc_feature 1..22: note = chemically synthesized
  source 1..22: mol_type = other DNA
ctgtcaaagaatcagtccaaag

SEQ ID NO: 134932 - DNA, 22 bp, synthetic construct
  misc_feature 1..22: note = chemically synthesized
  source 1..22: mol_type = other DNA
tcaaagaatcagtccaaaggca

SEQ ID NO: 134933 - DNA, 22 bp, synthetic construct
  misc_feature 1..22: note = chemically synthesized
  source 1..22: mol_type = other DNA
agaaaggggcaagagaacagtg

SEQ ID NO: 134934 - DNA, 22 bp, synthetic construct
  misc_feature 1..22: note = chemically synthesized
  source 1..22: mol_type = other DNA
ttgcatccctcagggggcctct

SEQ ID NO: 134935 - DNA, 22 bp, synthetic construct
  misc_feature 1..22: note = chemically synthesized
  source 1..22: mol_type = other DNA
tgcatccctcagggggcctcta

SEQ ID NO: 134936 - DNA, 22 bp, synthetic construct
  misc_feature 1..22: note = chemically synthesized
  source 1..22: mol_type = other DNA
gcatccctcagggggcctctat

SEQ ID NO: 134937 - DNA, 22 bp, synthetic construct
  misc_feature 1..22: note = chemically synthesized
  source 1..22: mol_type = other DNA
catccctcagggggcctctatg

SEQ ID NO: 134938 - DNA, 22 bp, synthetic construct
  misc_feature 1..22: note = chemically synthesized
  source 1..22: mol_type = other DNA
agggggcctctatgcttgcctg

SEQ ID NO: 134939 - DNA, 22 bp, synthetic construct
  misc_feature 1..22: note = chemically synthesized
  source 1..22: mol_type = other DNA
tatgcttgcctgagagtgataa

SEQ ID NO: 134940 - DNA, 22 bp, synthetic construct
  misc_feature 1..22: note = chemically synthesized
  source 1..22: mol_type = other DNA
tgcttgcctgagagtgataaat

SEQ ID NO: 134941 - DNA, 22 bp, synthetic construct
  misc_feature 1..22: note = chemically synthesized
  source 1..22: mol_type = other DNA
gcctgagagtgataaattccac

SEQ ID NO: 134942 - DNA, 22 bp, synthetic construct
  misc_feature 1..22: note = chemically synthesized
  source 1..22: mol_type = other DNA
cctgagagtgataaattccact

SEQ ID NO: 134943 - DNA, 22 bp, synthetic construct
  misc_feature 1..22: note = chemically synthesized
  source 1..22: mol_type = other DNA
agagtgataaattccactaaag

SEQ ID NO: 134944 - DNA, 22 bp, synthetic construct
  misc_feature 1..22: note = chemically synthesized
  source 1..22: mol_type = other DNA
cactaaagttatgactctcact

SEQ ID NO: 134945 - DNA, 22 bp, synthetic construct
  misc_feature 1..22: note = chemically synthesized
  source 1..22: mol_type = other DNA
aagttatgactctcacttttgt

SEQ ID NO: 134946 - DNA, 22 bp, synthetic construct
  misc_feature 1..22: note = chemically synthesized
  source 1..22: mol_type = other DNA
tgactctcacttttgtcatgta

SEQ ID NO: 134947 - DNA, 22 bp, synthetic construct
  misc_feature 1..22: note = chemically synthesized
  source 1..22: mol_type = other DNA
tcacttttgtcatgtatcacat

SEQ ID NO: 134948 - DNA, 22 bp, synthetic construct
  misc_feature 1..22: note = chemically synthesized
  source 1..22: mol_type = other DNA
acttttgtcatgtatcacattc

SEQ ID NO: 134949 - DNA, 22 bp, synthetic construct
  misc_feature 1..22: note = chemically synthesized
  source 1..22: mol_type = other DNA
ttgtcatgtatcacattctagg

SEQ ID NO: 134950 - DNA, 22 bp, synthetic construct
  misc_feature 1..22: note = chemically synthesized
  source 1..22: mol_type = other DNA
tgtcatgtatcacattctagga

SEQ ID NO: 134951 - DNA, 22 bp, synthetic construct
  misc_feature 1..22: note = chemically synthesized
  source 1..22: mol_type = other DNA
gtcatgtatcacattctaggag

SEQ ID NO: 134952 - DNA, 22 bp, synthetic construct
  misc_feature 1..22: note = chemically synthesized
  source 1..22: mol_type = other DNA
tcatgtatcacattctaggaga

SEQ ID NO: 134953 - DNA, 22 bp, synthetic construct
  misc_feature 1..22: note = chemically synthesized
  source 1..22: mol_type = other DNA
taggagactccctaaactatta

SEQ ID NO: 134954 - DNA, 22 bp, synthetic construct
  misc_feature 1..22: note = chemically synthesized
  source 1..22: mol_type = other DNA
ggagactccctaaactattagg

SEQ ID NO: 134955 - DNA, 22 bp, synthetic construct
  misc_feature 1..22: note = chemically synthesized
  source 1..22: mol_type = other DNA
cctaaactattagggcaactat

SEQ ID NO: 134956 - DNA, 22 bp, synthetic construct
  misc_feature 1..22: note = chemically synthesized
  source 1..22: mol_type = other DNA
aactattagggcaactattctc

SEQ ID NO: 134957 - DNA, 22 bp, synthetic construct
  misc_feature 1..22: note = chemically synthesized
  source 1..22: mol_type = other DNA
ttagggcaactattctccctgg

SEQ ID NO: 134958 - DNA, 22 bp, synthetic construct
  misc_feature 1..22: note = chemically synthesized
  source 1..22: mol_type = other DNA
gggcaactattctccctggaat

SEQ ID NO: 134959 - DNA, 22 bp, synthetic construct
  misc_feature 1..22: note = chemically synthesized
  source 1..22: mol_type = other DNA
ttctccctggaatatttgggta

SEQ ID NO: 134960 - DNA, 22 bp, synthetic construct
  misc_feature 1..22: note = chemically synthesized
  source 1..22: mol_type = other DNA
tccctggaatatttgggtatgt

SEQ ID NO: 134961 - DNA, 22 bp, synthetic construct
  misc_feature 1..22: note = chemically synthesized
  source 1..22: mol_type = other DNA
cctggaatatttgggtatgtgg

SEQ ID NO: 134962 - DNA, 22 bp, synthetic construct
  misc_feature 1..22: note = chemically synthesized
  source 1..22: mol_type = other DNA
gaatatttgggtatgtggacag

SEQ ID NO: 134963 - DNA, 22 bp, synthetic construct
  misc_feature 1..22: note = chemically synthesized
  source 1..22: mol_type = other DNA
gggtatgtggacagtttctggt

SEQ ID NO: 134964 - DNA, 22 bp, synthetic construct
  misc_feature 1..22: note = chemically synthesized
  source 1..22: mol_type = other DNA
ggtatgtggacagtttctggta

SEQ ID NO: 134965 - DNA, 22 bp, synthetic construct
  misc_feature 1..22: note = chemically synthesized
  source 1..22: mol_type = other DNA
ctggtactaccaaatttgccac

SEQ ID NO: 134966 - DNA, 22 bp, synthetic construct
  misc_feature 1..22: note = chemically synthesized
  source 1..22: mol_type = other DNA
tggtactaccaaatttgccaca

SEQ ID NO: 134967 - DNA, 22 bp, synthetic construct
  misc_feature 1..22: note = chemically synthesized
  source 1..22: mol_type = other DNA
gtactaccaaatttgccacaat

SEQ ID NO: 134968 - DNA, 22 bp, synthetic construct
  misc_feature 1..22: note = chemically synthesized
  source 1..22: mol_type = other DNA
ccaaatttgccacaattaaatg

SEQ ID NO: 134969 - DNA, 22 bp, synthetic construct
  misc_feature 1..22: note = chemically synthesized
  source 1..22: mol_type = other DNA
gccacaattaaatgccagcgta

SEQ ID NO: 134970 - DNA, 22 bp, synthetic construct
  misc_feature 1..22: note = chemically synthesized
  source 1..22: mol_type = other DNA
ccacaattaaatgccagcgtag

SEQ ID NO: 134971 - DNA, 22 bp, synthetic construct
  misc_feature 1..22: note = chemically synthesized
  source 1..22: mol_type = other DNA
aatgccagcgtagctgttttgc

SEQ ID NO: 134972 - DNA, 22 bp, synthetic construct
  misc_feature 1..22: note = chemically synthesized
  source 1..22: mol_type = other DNA
ttttgctagagactgcagatgt

SEQ ID NO: 134973 - DNA, 22 bp, synthetic construct
  misc_feature 1..22: note = chemically synthesized
  source 1..22: mol_type = other DNA
tgctagagactgcagatgttaa

SEQ ID NO: 134974 - DNA, 22 bp, synthetic construct
  misc_feature 1..22: note = chemically synthesized
  source 1..22: mol_type = other DNA
gctagagactgcagatgttaaa

SEQ ID NO: 134975 - DNA, 22 bp, synthetic construct
  misc_feature 1..22: note = chemically synthesized
  source 1..22: mol_type = other DNA
ctagagactgcagatgttaaat

SEQ ID NO: 134976 - DNA, 22 bp, synthetic construct
  misc_feature 1..22: note = chemically synthesized
  source 1..22: mol_type = other DNA
gagactgcagatgttaaataga

SEQ ID NO: 134977 - DNA, 22 bp, synthetic construct
  misc_feature 1..22: note = chemically synthesized
  source 1..22: mol_type = other DNA
cagatgttaaatagagggctat

SEQ ID NO: 134978 - DNA, 22 bp, synthetic construct
  misc_feature 1..22: note = chemically synthesized
  source 1..22: mol_type = other DNA
aatagagggctatctttaggtc

SEQ ID NO: 134979 - DNA, 22 bp, synthetic construct
  misc_feature 1..22: note = chemically synthesized
  source 1..22: mol_type = other DNA
tctttaggtcaataaaatatac

SEQ ID NO: 134980 - DNA, 22 bp, synthetic construct
  misc_feature 1..22: note = chemically synthesized
  source 1..22: mol_type = other DNA
taggtcaataaaatatacttat

SEQ ID NO: 134981 - DNA, 22 bp, synthetic construct
  misc_feature 1..22: note = chemically synthesized
  source 1..22: mol_type = other DNA
aggtcaataaaatatacttata

SEQ ID NO: 134982 - DNA, 22 bp, synthetic construct
  misc_feature 1..22: note = chemically synthesized
  source 1..22: mol_type = other DNA
ggtcaataaaatatacttataa

SEQ ID NO: 134983 - DNA, 22 bp, synthetic construct
  misc_feature 1..22: note = chemically synthesized
  source 1..22: mol_type = other DNA
ataaattgtattaactatttcc

SEQ ID NO: 134984 - DNA, 22 bp, synthetic construct
  misc_feature 1..22: note = chemically synthesized
  source 1..22: mol_type = other DNA
taaattgtattaactatttccc

SEQ ID NO: 134985 - DNA, 22 bp, synthetic construct
  misc_feature 1..22: note = chemically synthesized
  source 1..22: mol_type = other DNA
tattaactatttccccagtaat

SEQ ID NO: 134986 - DNA, 22 bp, synthetic construct
  misc_feature 1..22: note = chemically synthesized
  source 1..22: mol_type = other DNA
actatttccccagtaattacca

SEQ ID NO: 134987 - DNA, 22 bp, synthetic construct
  misc_feature 1..22: note = chemically synthesized
  source 1..22: mol_type = other DNA
tttccccagtaattaccacaca

SEQ ID NO: 134988 - DNA, 22 bp, synthetic construct
  misc_feature 1..22: note = chemically synthesized
  source 1..22: mol_type = other DNA
ccccagtaattaccacacagtt

SEQ ID NO: 134989 - DNA, 22 bp, synthetic construct
  misc_feature 1..22: note = chemically synthesized
  source 1..22: mol_type = other DNA
cccagtaattaccacacagttt

SEQ ID NO: 134990 - DNA, 22 bp, synthetic construct
  misc_feature 1..22: note = chemically synthesized
  source 1..22: mol_type = other DNA
ccacacagttttaataaaaccc

SEQ ID NO: 134991 - DNA, 22 bp, synthetic construct
  misc_feature 1..22: note = chemically synthesized
  source 1..22: mol_type = other DNA
taataaaaccctgtgcatccgc

SEQ ID NO: 134992 - DNA, 22 bp, synthetic construct
  misc_feature 1..22: note = chemically synthesized
  source 1..22: mol_type = other DNA
aataaaaccctgtgcatccgca

SEQ ID NO: 134993 - DNA, 22 bp, synthetic construct
  misc_feature 1..22: note = chemically synthesized
  source 1..22: mol_type = other DNA
ataaaaccctgtgcatccgcat

SEQ ID NO: 134994 - DNA, 22 bp, synthetic construct
  misc_feature 1..22: note = chemically synthesized
  source 1..22: mol_type = other DNA
tgcatccgcatgtcccaaacgc

SEQ ID NO: 134995 - DNA, 22 bp, synthetic construct
  misc_feature 1..22: note = chemically synthesized
  source 1..22: mol_type = other DNA
aggttttgaaaacacgactata

SEQ ID NO: 134996 - DNA, 22 bp, synthetic construct
  misc_feature 1..22: note = chemically synthesized
  source 1..22: mol_type = other DNA
tgaaaacacgactatagtttaa

SEQ ID NO: 134997 - DNA, 22 bp, synthetic construct
  misc_feature 1..22: note = chemically synthesized
  source 1..22: mol_type = other DNA
gaaaacacgactatagtttaag

SEQ ID NO: 134998 - DNA, 22 bp, synthetic construct
  misc_feature 1..22: note = chemically synthesized
  source 1..22: mol_type = other DNA
aaaacacgactatagtttaaga

SEQ ID NO: 134999 - DNA, 22 bp, synthetic construct
  misc_feature 1..22: note = chemically synthesized
  source 1..22: mol_type = other DNA
tagtttaagaataatcaggcct

SEQ ID NO: 135000 - DNA, 22 bp, synthetic construct
  misc_feature 1..22: note = chemically synthesized
  source 1..22: mol_type = other DNA
aagaataatcaggcctcctccg

SEQ ID NO: 135001 - DNA, 22 bp, synthetic construct
  misc_feature 1..22: note = chemically synthesized
  source 1..22: mol_type = other DNA
agaataatcaggcctcctccgg

SEQ ID NO: 135002 - DNA, 22 bp, synthetic construct
  misc_feature 1..22: note = chemically synthesized
  source 1..22: mol_type = other DNA
ctccggcttcctccatctggtc

SEQ ID NO: 135003 - DNA, 22 bp, synthetic construct
  misc_feature 1..22: note = chemically synthesized
  source 1..22: mol_type = other DNA
cggcttcctccatctggtccat

SEQ ID NO: 135004 - DNA, 22 bp, synthetic construct
  misc_feature 1..22: note = chemically synthesized
  source 1..22: mol_type = other DNA
cctccatctggtccattatctg

SEQ ID NO: 135005 - DNA, 22 bp, synthetic construct
  misc_feature 1..22: note = chemically synthesized
  source 1..22: mol_type = other DNA
ctccatctggtccattatctgg

SEQ ID NO: 135006 - DNA, 22 bp, synthetic construct
  misc_feature 1..22: note = chemically synthesized
  source 1..22: mol_type = other DNA
catctggtccattatctgggtg

SEQ ID NO: 135007 - DNA, 22 bp, synthetic construct
  misc_feature 1..22: note = chemically synthesized
  source 1..22: mol_type = other DNA
gtccattatctgggtgacagta

SEQ ID NO: 135008 - DNA, 22 bp, synthetic construct
  misc_feature 1..22: note = chemically synthesized
  source 1..22: mol_type = other DNA
tctgggtgacagtagatccaaa

SEQ ID NO: 135009 - DNA, 22 bp, synthetic construct
  misc_feature 1..22: note = chemically synthesized
  source 1..22: mol_type = other DNA
ggtgacagtagatccaaataag

SEQ ID NO: 135010 - DNA, 22 bp, synthetic construct
  misc_feature 1..22: note = chemically synthesized
  source 1..22: mol_type = other DNA
gctcttatcctgtacaacaaat

SEQ ID NO: 135011 - DNA, 22 bp, synthetic construct
  misc_feature 1..22: note = chemically synthesized
  source 1..22: mol_type = other DNA
ttatcctgtacaacaaattttg

SEQ ID NO: 135012 - DNA, 22 bp, synthetic construct
  misc_feature 1..22: note = chemically synthesized
  source 1..22: mol_type = other DNA
atcctgtacaacaaattttggc

SEQ ID NO: 135013 - DNA, 22 bp, synthetic construct
  misc_feature 1..22: note = chemically synthesized
  source 1..22: mol_type = other DNA
tcctgtacaacaaattttggca

SEQ ID NO: 135014 - DNA, 22 bp, synthetic construct
  misc_feature 1..22: note = chemically synthesized
  source 1..22: mol_type = other DNA
tacaacaaattttggcattaat

SEQ ID NO: 135015 - DNA, 22 bp, synthetic construct
  misc_feature 1..22: note = chemically synthesized
  source 1..22: mol_type = other DNA
tggcattaatccattctcttat

SEQ ID NO: 135016 - DNA, 22 bp, synthetic construct
  misc_feature 1..22: note = chemically synthesized
  source 1..22: mol_type = other DNA
ggcattaatccattctcttata

SEQ ID NO: 135017 - DNA, 22 bp, synthetic construct
  misc_feature 1..22: note = chemically synthesized
  source 1..22: mol_type = other DNA
gcattaatccattctcttataa

SEQ ID NO: 135018 - DNA, 22 bp, synthetic construct
  misc_feature 1..22: note = chemically synthesized
  source 1..22: mol_type = other DNA
atccattctcttataaggcaac

SEQ ID NO: 135019 - DNA, 22 bp, synthetic construct
  misc_feature 1..22: note = chemically synthesized
  source 1..22: mol_type = other DNA
tcttataaggcaacattggaag

SEQ ID NO: 135020 - DNA, 22 bp, synthetic construct
  misc_feature 1..22: note = chemically synthesized
  source 1..22: mol_type = other DNA
ttataaggcaacattggaaggt

SEQ ID NO: 135021 - DNA, 22 bp, synthetic construct
  misc_feature 1..22: note = chemically synthesized
  source 1..22: mol_type = other DNA
ataaggcaacattggaaggtta

SEQ ID NO: 135022 - DNA, 22 bp, synthetic construct
  misc_feature 1..22: note = chemically synthesized
  source 1..22: mol_type = other DNA
taaggcaacattggaaggttaa

SEQ ID NO: 135023 - DNA, 22 bp, synthetic construct
  misc_feature 1..22: note = chemically synthesized
  source 1..22: mol_type = other DNA
gaaggttaagagaacttataat

SEQ ID NO: 135024 - DNA, 22 bp, synthetic construct
  misc_feature 1..22: note = chemically synthesized
  source 1..22: mol_type = other DNA
agagaacttataatgatataca

SEQ ID NO: 135025 - DNA, 22 bp, synthetic construct
  misc_feature 1..22: note = chemically synthesized
  source 1..22: mol_type = other DNA
ataatgatatacacatcactcc

SEQ ID NO: 135026 - DNA, 22 bp, synthetic construct
  misc_feature 1..22: note = chemically synthesized
  source 1..22: mol_type = other DNA
taatgatatacacatcactcct

SEQ ID NO: 135027 - DNA, 22 bp, synthetic construct
  misc_feature 1..22: note = chemically synthesized
  source 1..22: mol_type = other DNA
ctgtggcggtagataagttctg

SEQ ID NO: 135028 - DNA, 22 bp, synthetic construct
  misc_feature 1..22: note = chemically synthesized
  source 1..22: mol_type = other DNA
tggcggtagataagttctgcca

SEQ ID NO: 135029 - DNA, 22 bp, synthetic construct
  misc_feature 1..22: note = chemically synthesized
  source 1..22: mol_type = other DNA
tgccacattaagcactatgcag

SEQ ID NO: 135030 - DNA, 22 bp, synthetic construct
  misc_feature 1..22: note = chemically synthesized
  source 1..22: mol_type = other DNA
ccacattaagcactatgcaggt

SEQ ID NO: 135031 - DNA, 22 bp, synthetic construct
  misc_feature 1..22: note = chemically synthesized
  source 1..22: mol_type = other DNA
agcactatgcaggtcataattc

SEQ ID NO: 135032 - DNA, 22 bp, synthetic construct
  misc_feature 1..22: note = chemically synthesized
  source 1..22: mol_type = other DNA
tgcaggtcataattcagtggat

SEQ ID NO: 135033 - DNA, 22 bp, synthetic construct
  misc_feature 1..22: note = chemically synthesized
  source 1..22: mol_type = other DNA
agtggatcaagttagttagcag

SEQ ID NO: 135034 - DNA, 22 bp, synthetic construct
  misc_feature 1..22: note = chemically synthesized
  source 1..22: mol_type = other DNA
gttagcagtgtttttagtatcc

SEQ ID NO: 135035 - DNA, 22 bp, synthetic construct
  misc_feature 1..22: note = chemically synthesized
  source 1..22: mol_type = other DNA
gcagtgtttttagtatccatat

SEQ ID NO: 135036 - DNA, 22 bp, synthetic construct
  misc_feature 1..22: note = chemically synthesized
  source 1..22: mol_type = other DNA
ttagtatccatatgaacatagt

SEQ ID NO: 135037 - DNA, 22 bp, synthetic construct
  misc_feature 1..22: note = chemically synthesized
  source 1..22: mol_type = other DNA
tagtatccatatgaacatagtc

SEQ ID NO: 135038 - DNA, 22 bp, synthetic construct
  misc_feature 1..22: note = chemically synthesized
  source 1..22: mol_type = other DNA
agtatccatatgaacatagtct

SEQ ID NO: 135039 - DNA, 22 bp, synthetic construct
  misc_feature 1..22: note = chemically synthesized
  source 1..22: mol_type = other DNA
gtatccatatgaacatagtctc

SEQ ID NO: 135040 - DNA, 22 bp, synthetic construct
  misc_feature 1..22: note = chemically synthesized
  source 1..22: mol_type = other DNA
tgctactgcagtgcctagactg

SEQ ID NO: 135041 - DNA, 22 bp, synthetic construct
  misc_feature 1..22: note = chemically synthesized
  source 1..22: mol_type = other DNA
ctactgcagtgcctagactgac

SEQ ID NO: 135042 - DNA, 22 bp, synthetic construct
  misc_feature 1..22: note = chemically synthesized
  source 1..22: mol_type = other DNA
ctgcagtgcctagactgacatt

SEQ ID NO: 135043 - DNA, 22 bp, synthetic construct
  misc_feature 1..22: note = chemically synthesized
  source 1..22: mol_type = other DNA
cagtgcctagactgacattttt

SEQ ID NO: 135044 - DNA, 22 bp, synthetic construct
  misc_feature 1..22: note = chemically synthesized
  source 1..22: mol_type = other DNA
gactgacatttttgttatcaac

SEQ ID NO: 135045 - DNA, 22 bp, synthetic construct
  misc_feature 1..22: note = chemically synthesized
  source 1..22: mol_type = other DNA
acatttttgttatcaacagtgt

SEQ ID NO: 135046 - DNA, 22 bp, synthetic construct
  misc_feature 1..22: note = chemically synthesized
  source 1..22: mol_type = other DNA
ttgttatcaacagtgtcccctg

SEQ ID NO: 135047 - DNA, 22 bp, synthetic construct
  misc_feature 1..22: note = chemically synthesized
  source 1..22: mol_type = other DNA
tgttatcaacagtgtcccctga

SEQ ID NO: 135048 - DNA, 22 bp, synthetic construct
  misc_feature 1..22: note = chemically synthesized
  source 1..22: mol_type = other DNA
gttatcaacagtgtcccctgaa

SEQ ID NO: 135049 - DNA, 22 bp, synthetic construct
  misc_feature 1..22: note = chemically synthesized
  source 1..22: mol_type = other DNA
ttatcaacagtgtcccctgaag

SEQ ID NO: 135050 - DNA, 22 bp, synthetic construct
  misc_feature 1..22: note = chemically synthesized
  source 1..22: mol_type = other DNA
tcaacagtgtcccctgaagtag

SEQ ID NO: 135051 - DNA, 22 bp, synthetic construct
  misc_feature 1..22: note = chemically synthesized
  source 1..22: mol_type = other DNA
aagtagcagccctttcaaaagt

SEQ ID NO: 135052 - DNA, 22 bp, synthetic construct
  misc_feature 1..22: note = chemically synthesized
  source 1..22: mol_type = other DNA
tcaaaagtcctttcacctttcc

SEQ ID NO: 135053 - DNA, 22 bp, synthetic construct
  misc_feature 1..22: note = chemically synthesized
  source 1..22: mol_type = other DNA
caaaagtcctttcacctttcct

SEQ ID NO: 135054 - DNA, 22 bp, synthetic construct
  misc_feature 1..22: note = chemically synthesized
  source 1..22: mol_type = other DNA
aaaagtcctttcacctttcctc

SEQ ID NO: 135055 - DNA, 22 bp, synthetic construct
  misc_feature 1..22: note = chemically synthesized
  source 1..22: mol_type = other DNA
tcacctttcctctgtccatctc

SEQ ID NO: 135056 - DNA, 22 bp, synthetic construct
  misc_feature 1..22: note = chemically synthesized
  source 1..22: mol_type = other DNA
cacctttcctctgtccatctct

SEQ ID NO: 135057 - DNA, 22 bp, synthetic construct
  misc_feature 1..22: note = chemically synthesized
  source 1..22: mol_type = other DNA
acctttcctctgtccatctctc

SEQ ID NO: 135058 - DNA, 22 bp, synthetic construct
  misc_feature 1..22: note = chemically synthesized
  source 1..22: mol_type = other DNA
tcctctgtccatctctctccac

SEQ ID NO: 135059 - DNA, 22 bp, synthetic construct
  misc_feature 1..22: note = chemically synthesized
  source 1..22: mol_type = other DNA
cctctgtccatctctctccacc

SEQ ID NO: 135060 - DNA, 22 bp, synthetic construct
  misc_feature 1..22: note = chemically synthesized
  source 1..22: mol_type = other DNA
ctctgtccatctctctccacca

SEQ ID NO: 135061 - DNA, 22 bp, synthetic construct
  misc_feature 1..22: note = chemically synthesized
  source 1..22: mol_type = other DNA
tgtccatctctctccaccaata

SEQ ID NO: 135062 - DNA, 22 bp, synthetic construct
  misc_feature 1..22: note = chemically synthesized
  source 1..22: mol_type = other DNA
tccatctctctccaccaataat

SEQ ID NO: 135063 - DNA, 22 bp, synthetic construct
  misc_feature 1..22: note = chemically synthesized
  source 1..22: mol_type = other DNA
tctccaccaataattgcttata

SEQ ID NO: 135064 - DNA, 22 bp, synthetic construct
  misc_feature 1..22: note = chemically synthesized
  source 1..22: mol_type = other DNA
tccaccaataattgcttatatt

SEQ ID NO: 135065 - DNA, 22 bp, synthetic construct
  misc_feature 1..22: note = chemically synthesized
  source 1..22: mol_type = other DNA
caccaataattgcttatattag

SEQ ID NO: 135066 - DNA, 22 bp, synthetic construct
  misc_feature 1..22: note = chemically synthesized
  source 1..22: mol_type = other DNA
cttatattagagatgttactat

SEQ ID NO: 135067 - DNA, 22 bp, synthetic construct
  misc_feature 1..22: note = chemically synthesized
  source 1..22: mol_type = other DNA
atattagagatgttactatgtg

SEQ ID NO: 135068 - DNA, 22 bp, synthetic construct
  misc_feature 1..22: note = chemically synthesized
  source 1..22: mol_type = other DNA
tattagagatgttactatgtgc

SEQ ID NO: 135069 - DNA, 22 bp, synthetic construct
  misc_feature 1..22: note = chemically synthesized
  source 1..22: mol_type = other DNA
gagatgttactatgtgccaaaa

SEQ ID NO: 135070 - DNA, 22 bp, synthetic construct
  misc_feature 1..22: note = chemically synthesized
  source 1..22: mol_type = other DNA
ctatgtgccaaaattctgaaac

SEQ ID NO: 135071 - DNA, 22 bp, synthetic construct
  misc_feature 1..22: note = chemically synthesized
  source 1..22: mol_type = other DNA
tgtgccaaaattctgaaacata

SEQ ID NO: 135072 - DNA, 22 bp, synthetic construct
  misc_feature 1..22: note = chemically synthesized
  source 1..22: mol_type = other DNA
tgaaacatataattattattgt

SEQ ID NO: 135073 - DNA, 22 bp, synthetic construct
  misc_feature 1..22: note = chemically synthesized
  source 1..22: mol_type = other DNA
aaacatataattattattgttt

SEQ ID NO: 135074 - DNA, 22 bp, synthetic construct
  misc_feature 1..22: note = chemically synthesized
  source 1..22: mol_type = other DNA
ttattgtttctataggttttta

SEQ ID NO: 135075 - DNA, 22 bp, synthetic construct
  misc_feature 1..22: note = chemically synthesized
  source 1..22: mol_type = other DNA
ttgtttctataggtttttataa

SEQ ID NO: 135076 - DNA, 22 bp, synthetic construct
  misc_feature 1..22: note = chemically synthesized
  source 1..22: mol_type = other DNA
tttctataggtttttataaaat

SEQ ID NO: 135077 - DNA, 22 bp, synthetic construct
  misc_feature 1..22: note = chemically synthesized
  source 1..22: mol_type = other DNA
ctataggtttttataaaataaa

SEQ ID NO: 135078 - DNA, 22 bp, synthetic construct
  misc_feature 1..22: note = chemically synthesized
  source 1..22: mol_type = other DNA
tataggtttttataaaataaaa

SEQ ID NO: 135079 - DNA, 22 bp, synthetic construct
  misc_feature 1..22: note = chemically synthesized
  source 1..22: mol_type = other DNA
taggtttttataaaataaaaaa

SEQ ID NO: 135080 - DNA, 22 bp, synthetic construct
  misc_feature 1..22: note = chemically synthesized
  source 1..22: mol_type = other DNA
ttataaaataaaaaaggtgcaa

SEQ ID NO: 135081 - DNA, 22 bp, synthetic construct
  misc_feature 1..22: note = chemically synthesized
  source 1..22: mol_type = other DNA
tataaaataaaaaaggtgcaaa

SEQ ID NO: 135082 - DNA, 22 bp, synthetic construct
  misc_feature 1..22: note = chemically synthesized
  source 1..22: mol_type = other DNA
ataaaataaaaaaggtgcaaag

SEQ ID NO: 135083 - DNA, 22 bp, synthetic construct
  misc_feature 1..22: note = chemically synthesized
  source 1..22: mol_type = other DNA
taaaataaaaaaggtgcaaaga

SEQ ID NO: 135084 - DNA, 22 bp, synthetic construct
  misc_feature 1..22: note = chemically synthesized
  source 1..22: mol_type = other DNA
ttatcacttcatttttactgaa

SEQ ID NO: 135085 - DNA, 22 bp, synthetic construct
  misc_feature 1..22: note = chemically synthesized
  source 1..22: mol_type = other DNA
tcacttcatttttactgaatta

SEQ ID NO: 135086 - DNA, 22 bp, synthetic construct
  misc_feature 1..22: note = chemically synthesized
  source 1..22: mol_type = other DNA
catttttactgaattacacttc

SEQ ID NO: 135087 - DNA, 22 bp, synthetic construct
  misc_feature 1..22: note = chemically synthesized
  source 1..22: mol_type = other DNA
atttttactgaattacacttca

SEQ ID NO: 135088 - DNA, 22 bp, synthetic construct
  misc_feature 1..22: note = chemically synthesized
  source 1..22: mol_type = other DNA
ttactgaattacacttcaaagg

SEQ ID NO: 135089 - DNA, 22 bp, synthetic construct
  misc_feature 1..22: note = chemically synthesized
  source 1..22: mol_type = other DNA
tactgaattacacttcaaaggt

SEQ ID NO: 135090 - DNA, 22 bp, synthetic construct
  misc_feature 1..22: note = chemically synthesized
  source 1..22: mol_type = other DNA
actgaattacacttcaaaggtg

SEQ ID NO: 135091 - DNA, 22 bp, synthetic construct
  misc_feature 1..22: note = chemically synthesized
  source 1..22: mol_type = other DNA
ctgaattacacttcaaaggtgt

SEQ ID NO: 135092 - DNA, 22 bp, synthetic construct
  misc_feature 1..22: note = chemically synthesized
  source 1..22: mol_type = other DNA
aattacacttcaaaggtgtcgg

SEQ ID NO: 135093 - DNA, 22 bp, synthetic construct
  misc_feature 1..22: note = chemically synthesized
  source 1..22: mol_type = other DNA
cacttcaaaggtgtcggtagta

SEQ ID NO: 135094 - DNA, 22 bp, synthetic construct
  misc_feature 1..22: note = chemically synthesized
  source 1..22: mol_type = other DNA
caaaggtgtcggtagtaatatt

SEQ ID NO: 135095 - DNA, 22 bp, synthetic construct
  misc_feature 1..22: note = chemically synthesized
  source 1..22: mol_type = other DNA
aaaggtgtcggtagtaatattt

SEQ ID NO: 135096 - DNA, 22 bp, synthetic construct
  misc_feature 1..22: note = chemically synthesized
  source 1..22: mol_type = other DNA
ataatattgaatgatattttaa

SEQ ID NO: 135097 - DNA, 22 bp, synthetic construct
  misc_feature 1..22: note = chemically synthesized
  source 1..22: mol_type = other DNA
taatattgaatgatattttaaa

SEQ ID NO: 135098 - DNA, 22 bp, synthetic construct
  misc_feature 1..22: note = chemically synthesized
  source 1..22: mol_type = other DNA
aatgatattttaaaagactctg

SEQ ID NO: 135099 - DNA, 22 bp, synthetic construct
  misc_feature 1..22: note = chemically synthesized
  source 1..22: mol_type = other DNA
taaaagactctggacacataca

SEQ ID NO: 135100 - DNA, 22 bp, synthetic construct
  misc_feature 1..22: note = chemically synthesized
  source 1..22: mol_type = other DNA
aaaagactctggacacatacag

SEQ ID NO: 135101 - DNA, 22 bp, synthetic construct
  misc_feature 1..22: note = chemically synthesized
  source 1..22: mol_type = other DNA
aaagactctggacacatacaga

SEQ ID NO: 135102 - DNA, 22 bp, synthetic construct
  misc_feature 1..22: note = chemically synthesized
  source 1..22: mol_type = other DNA
tggacacatacagaatcaattg

SEQ ID NO: 135103 - DNA, 22 bp, synthetic construct
  misc_feature 1..22: note = chemically synthesized
  source 1..22: mol_type = other DNA
gacacatacagaatcaattgaa

SEQ ID NO: 135104 - DNA, 22 bp, synthetic construct
  misc_feature 1..22: note = chemically synthesized
  source 1..22: mol_type = other DNA
aatttgggagaaactgagtttc

SEQ ID NO: 135105 - DNA, 22 bp, synthetic construct
  misc_feature 1..22: note = chemically synthesized
  source 1..22: mol_type = other DNA
gggagaaactgagtttcccttg

SEQ ID NO: 135106 - DNA, 22 bp, synthetic construct
  misc_feature 1..22: note = chemically synthesized
  source 1..22: mol_type = other DNA
ggagaaactgagtttcccttgt

SEQ ID NO: 135107 - DNA, 22 bp, synthetic construct
  misc_feature 1..22: note = chemically synthesized
  source 1..22: mol_type = other DNA
agtttcccttgtagttctcttt

SEQ ID NO: 135108 - DNA, 22 bp, synthetic construct
  misc_feature 1..22: note = chemically synthesized
  source 1..22: mol_type = other DNA
cccttgtagttctctttgtttt

SEQ ID NO: 135109 - DNA, 22 bp, synthetic construct
  misc_feature 1..22: note = chemically synthesized
  source 1..22: mol_type = other DNA
ccttgtagttctctttgttttc

SEQ ID NO: 135110 - DNA, 22 bp, synthetic construct
  misc_feature 1..22: note = chemically synthesized
  source 1..22: mol_type = other DNA
gtagttctctttgttttcccaa

SEQ ID NO: 135111 - DNA, 22 bp, synthetic construct
  misc_feature 1..22: note = chemically synthesized
  source 1..22: mol_type = other DNA
tagttctctttgttttcccaat

SEQ ID NO: 135112 - DNA, 22 bp, synthetic construct
  misc_feature 1..22: note = chemically synthesized
  source 1..22: mol_type = other DNA
tctttgttttcccaataaacct

SEQ ID NO: 135113 - DNA, 22 bp, synthetic construct
  misc_feature 1..22: note = chemically synthesized
  source 1..22: mol_type = other DNA
tttgttttcccaataaacctgc

SEQ ID NO: 135114 - DNA, 22 bp, synthetic construct
  misc_feature 1..22: note = chemically synthesized
  source 1..22: mol_type = other DNA
tgttttcccaataaacctgcta

SEQ ID NO: 135115 - DNA, 22 bp, synthetic construct
  misc_feature 1..22: note = chemically synthesized
  source 1..22: mol_type = other DNA
gttttcccaataaacctgctac

SEQ ID NO: 135116 - DNA, 22 bp, synthetic construct
  misc_feature 1..22: note = chemically synthesized
  source 1..22: mol_type = other DNA
ttttcccaataaacctgctaca

SEQ ID NO: 135117 - DNA, 22 bp, synthetic construct
  misc_feature 1..22: note = chemically synthesized
  source 1..22: mol_type = other DNA
tcccaataaacctgctacaaaa

SEQ ID NO: 135118 - DNA, 22 bp, synthetic construct
  misc_feature 1..22: note = chemically synthesized
  source 1..22: mol_type = other DNA
cccaataaacctgctacaaaat

SEQ ID NO: 135119 - DNA, 22 bp, synthetic construct
  misc_feature 1..22: note = chemically synthesized
  source 1..22: mol_type = other DNA
ccaataaacctgctacaaaatt

SEQ ID NO: 135120 - DNA, 22 bp, synthetic construct
  misc_feature 1..22: note = chemically synthesized
  source 1..22: mol_type = other DNA
ctacaaaatttcttggtatcac

SEQ ID NO: 135121 - DNA, 22 bp, synthetic construct
  misc_feature 1..22: note = chemically synthesized
  source 1..22: mol_type = other DNA
caaaatttcttggtatcacaac

SEQ ID NO: 135122 - DNA, 22 bp, synthetic construct
  misc_feature 1..22: note = chemically synthesized
  source 1..22: mol_type = other DNA
cttggtatcacaacaacaaaaa

SEQ ID NO: 135123 - DNA, 22 bp, synthetic construct
  misc_feature 1..22: note = chemically synthesized
  source 1..22: mol_type = other DNA
ttggtatcacaacaacaaaaat

SEQ ID NO: 135124 - DNA, 22 bp, synthetic construct
  misc_feature 1..22: note = chemically synthesized
  source 1..22: mol_type = other DNA
ggtatcacaacaacaaaaatct

SEQ ID NO: 135125 - DNA, 22 bp, synthetic construct
  misc_feature 1..22: note = chemically synthesized
  source 1..22: mol_type = other DNA
gtatcacaacaacaaaaatctt

SEQ ID NO: 135126 - DNA, 22 bp, synthetic construct
  misc_feature 1..22: note = chemically synthesized
  source 1..22: mol_type = other DNA
gactttgtaaaagtgtaattat

SEQ ID NO: 135127 - DNA, 22 bp, synthetic construct
  misc_feature 1..22: note = chemically synthesized
  source 1..22: mol_type = other DNA
actttgtaaaagtgtaattata

SEQ ID NO: 135128 - DNA, 22 bp, synthetic construct
  misc_feature 1..22: note = chemically synthesized
  source 1..22: mol_type = other DNA
tgtaaaagtgtaattataaata

SEQ ID NO: 135129 - DNA, 22 bp, synthetic construct
  misc_feature 1..22: note = chemically synthesized
  source 1..22: mol_type = other DNA
gtaaaagtgtaattataaatat

SEQ ID NO: 135130 - DNA, 22 bp, synthetic construct
  misc_feature 1..22: note = chemically synthesized
  source 1..22: mol_type = other DNA
taaaagtgtaattataaatata

SEQ ID NO: 135131 - DNA, 22 bp, synthetic construct
  misc_feature 1..22: note = chemically synthesized
  source 1..22: mol_type = other DNA
taaatataaataaatattaatt

SEQ ID NO: 135132 - DNA, 22 bp, synthetic construct
  misc_feature 1..22: note = chemically synthesized
  source 1..22: mol_type = other DNA
attataaatagacttcatagtt

SEQ ID NO: 135133 - DNA, 22 bp, synthetic construct
  misc_feature 1..22: note = chemically synthesized
  source 1..22: mol_type = other DNA
taaatagacttcatagttccct

SEQ ID NO: 135134 - DNA, 22 bp, synthetic construct
  misc_feature 1..22: note = chemically synthesized
  source 1..22: mol_type = other DNA
catagttccctatgaggatcct

SEQ ID NO: 135135 - DNA, 22 bp, synthetic construct
  misc_feature 1..22: note = chemically synthesized
  source 1..22: mol_type = other DNA
atagttccctatgaggatcctt

SEQ ID NO: 135136 - DNA, 22 bp, synthetic construct
  misc_feature 1..22: note = chemically synthesized
  source 1..22: mol_type = other DNA
cctatgaggatccttgtgaatt

SEQ ID NO: 135137 - DNA, 22 bp, synthetic construct
  misc_feature 1..22: note = chemically synthesized
  source 1..22: mol_type = other DNA
tgaggatccttgtgaatttttc

SEQ ID NO: 135138 - DNA, 22 bp, synthetic construct
  misc_feature 1..22: note = chemically synthesized
  source 1..22: mol_type = other DNA
gtgaatttttctcaatacgagt

SEQ ID NO: 135139 - DNA, 22 bp, synthetic construct
  misc_feature 1..22: note = chemically synthesized
  source 1..22: mol_type = other DNA
tgaatttttctcaatacgagtc

SEQ ID NO: 135140 - DNA, 22 bp, synthetic construct
  misc_feature 1..22: note = chemically synthesized
  source 1..22: mol_type = other DNA
ttctcaatacgagtcttacaga

SEQ ID NO: 135141 - DNA, 22 bp, synthetic construct
  misc_feature 1..22: note = chemically synthesized
  source 1..22: mol_type = other DNA
tctcaatacgagtcttacagat

SEQ ID NO: 135142 - DNA, 22 bp, synthetic construct
  misc_feature 1..22: note = chemically synthesized
  source 1..22: mol_type = other DNA
ctcaatacgagtcttacagatt

SEQ ID NO: 135143 - DNA, 22 bp, synthetic construct
  misc_feature 1..22: note = chemically synthesized
  source 1..22: mol_type = other DNA
tcaatacgagtcttacagattc

SEQ ID NO: 135144 - DNA, 22 bp, synthetic construct
  misc_feature 1..22: note = chemically synthesized
  source 1..22: mol_type = other DNA
aatacgagtcttacagattcat

SEQ ID NO: 135145 - DNA, 22 bp, synthetic construct
  misc_feature 1..22: note = chemically synthesized
  source 1..22: mol_type = other DNA
acagattcataatgattagagg

SEQ ID NO: 135146 - DNA, 22 bp, synthetic construct
  misc_feature 1..22: note = chemically synthesized
  source 1..22: mol_type = other DNA
cagattcataatgattagaggg

SEQ ID NO: 135147 - DNA, 22 bp, synthetic construct
  misc_feature 1..22: note = chemically synthesized
  source 1..22: mol_type = other DNA
ataatgattagagggtctgtaa

SEQ ID NO: 135148 - DNA, 22 bp, synthetic construct
  misc_feature 1..22: note = chemically synthesized
  source 1..22: mol_type = other DNA
gagggtctgtaagattgtctcc

SEQ ID NO: 135149 - DNA, 22 bp, synthetic construct
  misc_feature 1..22: note = chemically synthesized
  source 1..22: mol_type = other DNA
taagattgtctccatcagcaac

SEQ ID NO: 135150 - DNA, 22 bp, synthetic construct
  misc_feature 1..22: note = chemically synthesized
  source 1..22: mol_type = other DNA
tctccatcagcaacatagttgc

SEQ ID NO: 135151 - DNA, 22 bp, synthetic construct
  misc_feature 1..22: note = chemically synthesized
  source 1..22: mol_type = other DNA
catcagcaacatagttgccgta

SEQ ID NO: 135152 - DNA, 22 bp, synthetic construct
  misc_feature 1..22: note = chemically synthesized
  source 1..22: mol_type = other DNA
ccgtattttctctctgggagtg

SEQ ID NO: 135153 - DNA, 22 bp, synthetic construct
  misc_feature 1..22: note = chemically synthesized
  source 1..22: mol_type = other DNA
tctctctgggagtgcttatctt

SEQ ID NO: 135154 - DNA, 22 bp, synthetic construct
  misc_feature 1..22: note = chemically synthesized
  source 1..22: mol_type = other DNA
ctctctgggagtgcttatcttt

SEQ ID NO: 135155 - DNA, 22 bp, synthetic construct
  misc_feature 1..22: note = chemically synthesized
  source 1..22: mol_type = other DNA
tctctgggagtgcttatctttt

SEQ ID NO: 135156 - DNA, 22 bp, synthetic construct
  misc_feature 1..22: note = chemically synthesized
  source 1..22: mol_type = other DNA
tctgggagtgcttatcttttcc

SEQ ID NO: 135157 - DNA, 22 bp, synthetic construct
  misc_feature 1..22: note = chemically synthesized
  source 1..22: mol_type = other DNA
tgggagtgcttatcttttccct

SEQ ID NO: 135158 - DNA, 22 bp, synthetic construct
  misc_feature 1..22: note = chemically synthesized
  source 1..22: mol_type = other DNA
ggagtgcttatcttttccctag

SEQ ID NO: 135159 - DNA, 22 bp, synthetic construct
  misc_feature 1..22: note = chemically synthesized
  source 1..22: mol_type = other DNA
atcttttccctagaactggttg

SEQ ID NO: 135160 - DNA, 22 bp, synthetic construct
  misc_feature 1..22: note = chemically synthesized
  source 1..22: mol_type = other DNA
tcttttccctagaactggttgt

SEQ ID NO: 135161 - DNA, 22 bp, synthetic construct
  misc_feature 1..22: note = chemically synthesized
  source 1..22: mol_type = other DNA
ttccctagaactggttgtgtga

SEQ ID NO: 135162 - DNA, 22 bp, synthetic construct
  misc_feature 1..22: note = chemically synthesized
  source 1..22: mol_type = other DNA
tccctagaactggttgtgtgaa

SEQ ID NO: 135163 - DNA, 22 bp, synthetic construct
  misc_feature 1..22: note = chemically synthesized
  source 1..22: mol_type = other DNA
ccctagaactggttgtgtgaag

SEQ ID NO: 135164 - DNA, 22 bp, synthetic construct
  misc_feature 1..22: note = chemically synthesized
  source 1..22: mol_type = other DNA
cctagaactggttgtgtgaagt

SEQ ID NO: 135165 - DNA, 22 bp, synthetic construct
  misc_feature 1..22: note = chemically synthesized
  source 1..22: mol_type = other DNA
gaactggttgtgtgaagtttat

SEQ ID NO: 135166 - DNA, 22 bp, synthetic construct
  misc_feature 1..22: note = chemically synthesized
  source 1..22: mol_type = other DNA
gttgtgtgaagtttattaactc

SEQ ID NO: 135167 - DNA, 22 bp, synthetic construct
  misc_feature 1..22: note = chemically synthesized
  source 1..22: mol_type = other DNA
tgtgaagtttattaactcaatt

SEQ ID NO: 135168 - DNA, 22 bp, synthetic construct
  misc_feature 1..22: note = chemically synthesized
  source 1..22: mol_type = other DNA
attaactcaattaccaacttcc

SEQ ID NO: 135169 - DNA, 22 bp, synthetic construct
  misc_feature 1..22: note = chemically synthesized
  source 1..22: mol_type = other DNA
ttaactcaattaccaacttccg

SEQ ID NO: 135170 - DNA, 22 bp, synthetic construct
  misc_feature 1..22: note = chemically synthesized
  source 1..22: mol_type = other DNA
actcaattaccaacttccgata

SEQ ID NO: 135171 - DNA, 22 bp, synthetic construct
  misc_feature 1..22: note = chemically synthesized
  source 1..22: mol_type = other DNA
aattaccaacttccgatattac

SEQ ID NO: 135172 - DNA, 22 bp, synthetic construct
  misc_feature 1..22: note = chemically synthesized
  source 1..22: mol_type = other DNA
ccaacttccgatattactattg

SEQ ID NO: 135173 - DNA, 22 bp, synthetic construct
  misc_feature 1..22: note = chemically synthesized
  source 1..22: mol_type = other DNA
ccgatattactattgcccttca

SEQ ID NO: 135174 - DNA, 22 bp, synthetic construct
  misc_feature 1..22: note = chemically synthesized
  source 1..22: mol_type = other DNA
cgatattactattgcccttcag

SEQ ID NO: 135175 - DNA, 22 bp, synthetic construct
  misc_feature 1..22: note = chemically synthesized
  source 1..22: mol_type = other DNA
ctattgcccttcagatcaacat

SEQ ID NO: 135176 - DNA, 22 bp, synthetic construct
  misc_feature 1..22: note = chemically synthesized
  source 1..22: mol_type = other DNA
ttgcccttcagatcaacatact

SEQ ID NO: 135177 - DNA, 22 bp, synthetic construct
  misc_feature 1..22: note = chemically synthesized
  source 1..22: mol_type = other DNA
cccttcagatcaacatacttac

SEQ ID NO: 135178 - DNA, 22 bp, synthetic construct
  misc_feature 1..22: note = chemically synthesized
  source 1..22: mol_type = other DNA
cagatcaacatacttacgaatc

SEQ ID NO: 135179 - DNA, 22 bp, synthetic construct
  misc_feature 1..22: note = chemically synthesized
  source 1..22: mol_type = other DNA
agatcaacatacttacgaatct

SEQ ID NO: 135180 - DNA, 22 bp, synthetic construct
  misc_feature 1..22: note = chemically synthesized
  source 1..22: mol_type = other DNA
acgaatctatgactctaacaag

SEQ ID NO: 135181 - DNA, 22 bp, synthetic construct
  misc_feature 1..22: note = chemically synthesized
  source 1..22: mol_type = other DNA
cgaatctatgactctaacaagt

SEQ ID NO: 135182 - DNA, 22 bp, synthetic construct
  misc_feature 1..22: note = chemically synthesized
  source 1..22: mol_type = other DNA
tgactctaacaagtattaggct

SEQ ID NO: 135183 - DNA, 22 bp, synthetic construct
  misc_feature 1..22: note = chemically synthesized
  source 1..22: mol_type = other DNA
taacaagtattaggcttttgtg

SEQ ID NO: 135184 - DNA, 22 bp, synthetic construct
  misc_feature 1..22: note = chemically synthesized
  source 1..22: mol_type = other DNA
acaagtattaggcttttgtgga

SEQ ID NO: 135185 - DNA, 22 bp, synthetic construct
  misc_feature 1..22: note = chemically synthesized
  source 1..22: mol_type = other DNA
ggcttttgtggaggccctcatt

SEQ ID NO: 135186 - DNA, 22 bp, synthetic construct
  misc_feature 1..22: note = chemically synthesized
  source 1..22: mol_type = other DNA
ttgtggaggccctcattgtaga

SEQ ID NO: 135187 - DNA, 22 bp, synthetic construct
  misc_feature 1..22: note = chemically synthesized
  source 1..22: mol_type = other DNA
tgtggaggccctcattgtagaa

SEQ ID NO: 135188 - DNA, 22 bp, synthetic construct
  misc_feature 1..22: note = chemically synthesized
  source 1..22: mol_type = other DNA
gtggaggccctcattgtagaag

SEQ ID NO: 135189 - DNA, 22 bp, synthetic construct
  misc_feature 1..22: note = chemically synthesized
  source 1..22: mol_type = other DNA
tggaggccctcattgtagaagt

SEQ ID NO: 135190 - DNA, 22 bp, synthetic construct
  misc_feature 1..22: note = chemically synthesized
  source 1..22: mol_type = other DNA
attgtagaagtatgtccttaaa

SEQ ID NO: 135191 - DNA, 22 bp, synthetic construct
  misc_feature 1..22: note = chemically synthesized
  source 1..22: mol_type = other DNA
tagaagtatgtccttaaaatat

SEQ ID NO: 135192 - DNA, 22 bp, synthetic construct
  misc_feature 1..22: note = chemically synthesized
  source 1..22: mol_type = other DNA
aaaatatttccgttatgagctt

SEQ ID NO: 135193 - DNA, 22 bp, synthetic construct
  misc_feature 1..22: note = chemically synthesized
  source 1..22: mol_type = other DNA
aaatatttccgttatgagcttc

SEQ ID NO: 135194 - DNA, 22 bp, synthetic construct
  misc_feature 1..22: note = chemically synthesized
  source 1..22: mol_type = other DNA
ccgttatgagcttccaacatga

SEQ ID NO: 135195 - DNA, 22 bp, synthetic construct
  misc_feature 1..22: note = chemically synthesized
  source 1..22: mol_type = other DNA
cgttatgagcttccaacatgag

SEQ ID NO: 135196 - DNA, 22 bp, synthetic construct
  misc_feature 1..22: note = chemically synthesized
  source 1..22: mol_type = other DNA
tgagcttccaacatgagtctcc

SEQ ID NO: 135197 - DNA, 22 bp, synthetic construct
  misc_feature 1..22: note = chemically synthesized
  source 1..22: mol_type = other DNA
ccaacatgagtctcctattttc

SEQ ID NO: 135198 - DNA, 22 bp, synthetic construct
  misc_feature 1..22: note = chemically synthesized
  source 1..22: mol_type = other DNA
caacatgagtctcctattttca

SEQ ID NO: 135199 - DNA, 22 bp, synthetic construct
  misc_feature 1..22: note = chemically synthesized
  source 1..22: mol_type = other DNA
ctattttcatgtttgtccctaa

SEQ ID NO: 135200 - DNA, 22 bp, synthetic construct
  misc_feature 1..22: note = chemically synthesized
  source 1..22: mol_type = other DNA
ttttcatgtttgtccctaatgt

SEQ ID NO: 135201 - DNA, 22 bp, synthetic construct
  misc_feature 1..22: note = chemically synthesized
  source 1..22: mol_type = other DNA
tcatgtttgtccctaatgtgcc

SEQ ID NO: 135202 - DNA, 22 bp, synthetic construct
  misc_feature 1..22: note = chemically synthesized
  source 1..22: mol_type = other DNA
catgtttgtccctaatgtgcca

SEQ ID NO: 135203 - DNA, 22 bp, synthetic construct
  misc_feature 1..22: note = chemically synthesized
  source 1..22: mol_type = other DNA
atgtttgtccctaatgtgccaa

SEQ ID NO: 135204 - DNA, 22 bp, synthetic construct
  misc_feature 1..22: note = chemically synthesized
  source 1..22: mol_type = other DNA
gtccctaatgtgccaaaactca

SEQ ID NO: 135205 - DNA, 22 bp, synthetic construct
  misc_feature 1..22: note = chemically synthesized
  source 1..22: mol_type = other DNA
tccctaatgtgccaaaactcag

SEQ ID NO: 135206 - DNA, 22 bp, synthetic construct
  misc_feature 1..22: note = chemically synthesized
  source 1..22: mol_type = other DNA
atgtgccaaaactcagactttt

SEQ ID NO: 135207 - DNA, 22 bp, synthetic construct
  misc_feature 1..22: note = chemically synthesized
  source 1..22: mol_type = other DNA
agactttttgcagcatagggaa

SEQ ID NO: 135208 - DNA, 22 bp, synthetic construct
  misc_feature 1..22: note = chemically synthesized
  source 1..22: mol_type = other DNA
tttgcagcatagggaacttgct

SEQ ID NO: 135209 - DNA, 22 bp, synthetic construct
  misc_feature 1..22: note = chemically synthesized
  source 1..22: mol_type = other DNA
ttgcagcatagggaacttgctg

SEQ ID NO: 135210 - DNA, 22 bp, synthetic construct
  misc_feature 1..22: note = chemically synthesized
  source 1..22: mol_type = other DNA
tgcagcatagggaacttgctga

SEQ ID NO: 135211 - DNA, 22 bp, synthetic construct
  misc_feature 1..22: note = chemically synthesized
  source 1..22: mol_type = other DNA
gcagcatagggaacttgctgag

SEQ ID NO: 135212 - DNA, 22 bp, synthetic construct
  misc_feature 1..22: note = chemically synthesized
  source 1..22: mol_type = other DNA
cagcatagggaacttgctgagt

SEQ ID NO: 135213 - DNA, 22 bp, synthetic construct
  misc_feature 1..22: note = chemically synthesized
  source 1..22: mol_type = other DNA
gctgagtcccaagtccactgag

SEQ ID NO: 135214 - DNA, 22 bp, synthetic construct
  misc_feature 1..22: note = chemically synthesized
  source 1..22: mol_type = other DNA
ctgagtcccaagtccactgagt

SEQ ID NO: 135215 - DNA, 22 bp, synthetic construct
  misc_feature 1..22: note = chemically synthesized
  source 1..22: mol_type = other DNA
agtcccaagtccactgagtaat

SEQ ID NO: 135216 - DNA, 22 bp, synthetic construct
  misc_feature 1..22: note = chemically synthesized
  source 1..22: mol_type = other DNA
agtaattacacctttctaaaat

SEQ ID NO: 135217 - DNA, 22 bp, synthetic construct
  misc_feature 1..22: note = chemically synthesized
  source 1..22: mol_type = other DNA
cacctttctaaaatgagtttac

SEQ ID NO: 135218 - DNA, 22 bp, synthetic construct
  misc_feature 1..22: note = chemically synthesized
  source 1..22: mol_type = other DNA
tctaaaatgagtttactaactt

SEQ ID NO: 135219 - DNA, 22 bp, synthetic construct
  misc_feature 1..22: note = chemically synthesized
  source 1..22: mol_type = other DNA
ctaaaatgagtttactaacttt

SEQ ID NO: 135220 - DNA, 22 bp, synthetic construct
  misc_feature 1..22: note = chemically synthesized
  source 1..22: mol_type = other DNA
taaaatgagtttactaacttta

SEQ ID NO: 135221 - DNA, 22 bp, synthetic construct
  misc_feature 1..22: note = chemically synthesized
  source 1..22: mol_type = other DNA
aaatgagtttactaactttacc

SEQ ID NO: 135222 - DNA, 22 bp, synthetic construct
  misc_feature 1..22: note = chemically synthesized
  source 1..22: mol_type = other DNA
actaactttacccacttgttca

SEQ ID NO: 135223 - DNA, 22 bp, synthetic construct
  misc_feature 1..22: note = chemically synthesized
  source 1..22: mol_type = other DNA
ctaactttacccacttgttcag

SEQ ID NO: 135224 - DNA, 22 bp, synthetic construct
  misc_feature 1..22: note = chemically synthesized
  source 1..22: mol_type = other DNA
actttacccacttgttcaggtg

SEQ ID NO: 135225 - DNA, 22 bp, synthetic construct
  misc_feature 1..22: note = chemically synthesized
  source 1..22: mol_type = other DNA
tacccacttgttcaggtgttca

SEQ ID NO: 135226 - DNA, 22 bp, synthetic construct
  misc_feature 1..22: note = chemically synthesized
  source 1..22: mol_type = other DNA
acccacttgttcaggtgttcag

SEQ ID NO: 135227 - DNA, 22 bp, synthetic construct
  misc_feature 1..22: note = chemically synthesized
  source 1..22: mol_type = other DNA
cccacttgttcaggtgttcaga

SEQ ID NO: 135228 - DNA, 22 bp, synthetic construct
  misc_feature 1..22: note = chemically synthesized
  source 1..22: mol_type = other DNA
gttcaggtgttcagatttctgt

SEQ ID NO: 135229 - DNA, 22 bp, synthetic construct
  misc_feature 1..22: note = chemically synthesized
  source 1..22: mol_type = other DNA
ttcaggtgttcagatttctgtg

SEQ ID NO: 135230 - DNA, 22 bp, synthetic construct
  misc_feature 1..22: note = chemically synthesized
  source 1..22: mol_type = other DNA
aggtgttcagatttctgtggaa

SEQ ID NO: 135231 - DNA, 22 bp, synthetic construct
  misc_feature 1..22: note = chemically synthesized
  source 1..22: mol_type = other DNA
agatttctgtggaaactcacaa

SEQ ID NO: 135232 - DNA, 22 bp, synthetic construct
  misc_feature 1..22: note = chemically synthesized
  source 1..22: mol_type = other DNA
ctgtggaaactcacaatagatg

SEQ ID NO: 135233 - DNA, 22 bp, synthetic construct
  misc_feature 1..22: note = chemically synthesized
  source 1..22: mol_type = other DNA
tgtggaaactcacaatagatga

SEQ ID NO: 135234 - DNA, 22 bp, synthetic construct
  misc_feature 1..22: note = chemically synthesized
  source 1..22: mol_type = other DNA
tggaaactcacaatagatgagt

SEQ ID NO: 135235 - DNA, 22 bp, synthetic construct
  misc_feature 1..22: note = chemically synthesized
  source 1..22: mol_type = other DNA
acaatagatgagttattttctt

SEQ ID NO: 135236 - DNA, 22 bp, synthetic construct
  misc_feature 1..22: note = chemically synthesized
  source 1..22: mol_type = other DNA
ttttctttcgttttattttatt

SEQ ID NO: 135237 - DNA, 22 bp, synthetic construct
  misc_feature 1..22: note = chemically synthesized
  source 1..22: mol_type = other DNA
tctttcgttttattttatttta

SEQ ID NO: 135238 - DNA, 22 bp, synthetic construct
  misc_feature 1..22: note = chemically synthesized
  source 1..22: mol_type = other DNA
ctttcgttttattttattttat

SEQ ID NO: 135239 - DNA, 22 bp, synthetic construct
  misc_feature 1..22: note = chemically synthesized
  source 1..22: mol_type = other DNA
tttcgttttattttattttatt

SEQ ID NO: 135240 - DNA, 22 bp, synthetic construct
  misc_feature 1..22: note = chemically synthesized
  source 1..22: mol_type = other DNA
tcgttttattttattttatttt

SEQ ID NO: 135241 - DNA, 22 bp, synthetic construct
  misc_feature 1..22: note = chemically synthesized
  source 1..22: mol_type = other DNA
cgttttattttattttattttt

SEQ ID NO: 135242 - DNA, 22 bp, synthetic construct
  misc_feature 1..22: note = chemically synthesized
  source 1..22: mol_type = other DNA
gttttattttattttatttttt

SEQ ID NO: 135243 - DNA, 22 bp, synthetic construct
  misc_feature 1..22: note = chemically synthesized
  source 1..22: mol_type = other DNA
tattttattttattttttatag

SEQ ID NO: 135244 - DNA, 22 bp, synthetic construct
  misc_feature 1..22: note = chemically synthesized
  source 1..22: mol_type = other DNA
attttattttattttttataga

SEQ ID NO: 135245 - DNA, 22 bp, synthetic construct
  misc_feature 1..22: note = chemically synthesized
  source 1..22: mol_type = other DNA
ttttattttattttttatagag

SEQ ID NO: 135246 - DNA, 22 bp, synthetic construct
  misc_feature 1..22: note = chemically synthesized
  source 1..22: mol_type = other DNA
tattttattttttatagagaca

SEQ ID NO: 135247 - DNA, 22 bp, synthetic construct
  misc_feature 1..22: note = chemically synthesized
  source 1..22: mol_type = other DNA
attttattttttatagagacag

SEQ ID NO: 135248 - DNA, 22 bp, synthetic construct
  misc_feature 1..22: note = chemically synthesized
  source 1..22: mol_type = other DNA
ttttattttttatagagacaga

SEQ ID NO: 135249 - DNA, 22 bp, synthetic construct
  misc_feature 1..22: note = chemically synthesized
  source 1..22: mol_type = other DNA
tattttttatagagacagagtc

SEQ ID NO: 135250 - DNA, 22 bp, synthetic construct
  misc_feature 1..22: note = chemically synthesized
  source 1..22: mol_type = other DNA
attttttatagagacagagtct

SEQ ID NO: 135251 - DNA, 22 bp, synthetic construct
  misc_feature 1..22: note = chemically synthesized
  source 1..22: mol_type = other DNA
ttttttatagagacagagtctg

SEQ ID NO: 135252 - DNA, 22 bp, synthetic construct
  misc_feature 1..22: note = chemically synthesized
  source 1..22: mol_type = other DNA
tttatagagacagagtctgact

SEQ ID NO: 135253 - DNA, 22 bp, synthetic construct
  misc_feature 1..22: note = chemically synthesized
  source 1..22: mol_type = other DNA
ttatagagacagagtctgactc

SEQ ID NO: 135254 - DNA, 22 bp, synthetic construct
  misc_feature 1..22: note = chemically synthesized
  source 1..22: mol_type = other DNA
tatagagacagagtctgactcc

SEQ ID NO: 135255 - DNA, 22 bp, synthetic construct
  misc_feature 1..22: note = chemically synthesized
  source 1..22: mol_type = other DNA
atagagacagagtctgactccg

SEQ ID NO: 135256 - DNA, 22 bp, synthetic construct
  misc_feature 1..22: note = chemically synthesized
  source 1..22: mol_type = other DNA
tagagacagagtctgactccgt

SEQ ID NO: 135257 - DNA, 22 bp, synthetic construct
  misc_feature 1..22: note = chemically synthesized
  source 1..22: mol_type = other DNA
actccgttgcccaggctggaga

SEQ ID NO: 135258 - DNA, 22 bp, synthetic construct
  misc_feature 1..22: note = chemically synthesized
  source 1..22: mol_type = other DNA
cgttgcccaggctggagagcag

SEQ ID NO: 135259 - DNA, 22 bp, synthetic construct
  misc_feature 1..22: note = chemically synthesized
  source 1..22: mol_type = other DNA
cccaggctggagagcagtgctg

SEQ ID NO: 135260 - DNA, 22 bp, synthetic construct
  misc_feature 1..22: note = chemically synthesized
  source 1..22: mol_type = other DNA
gagagcagtgctgcaatcatag

SEQ ID NO: 135261 - DNA, 22 bp, synthetic construct
  misc_feature 1..22: note = chemically synthesized
  source 1..22: mol_type = other DNA
caatcatagctccctgcagcct

SEQ ID NO: 135262 - DNA, 22 bp, synthetic construct
  misc_feature 1..22: note = chemically synthesized
  source 1..22: mol_type = other DNA
cctgcagcctcacagtcctggg

SEQ ID NO: 135263 - DNA, 22 bp, synthetic construct
  misc_feature 1..22: note = chemically synthesized
  source 1..22: mol_type = other DNA
cagcctcacagtcctgggctca

SEQ ID NO: 135264 - DNA, 22 bp, synthetic construct
  misc_feature 1..22: note = chemically synthesized
  source 1..22: mol_type = other DNA
acagtcctgggctcaggtgatg

SEQ ID NO: 135265 - DNA, 22 bp, synthetic construct
  misc_feature 1..22: note = chemically synthesized
  source 1..22: mol_type = other DNA
ggctcaggtgatgtgtgcccct

SEQ ID NO: 135266 - DNA, 22 bp, synthetic construct
  misc_feature 1..22: note = chemically synthesized
  source 1..22: mol_type = other DNA
aggtgatgtgtgcccctgtgcc

SEQ ID NO: 135267 - DNA, 22 bp, synthetic construct
  misc_feature 1..22: note = chemically synthesized
  source 1..22: mol_type = other DNA
tgcccagctaatttttatcttt

SEQ ID NO: 135268 - DNA, 22 bp, synthetic construct
  misc_feature 1..22: note = chemically synthesized
  source 1..22: mol_type = other DNA
atttttatcttttctttttttt

SEQ ID NO: 135269 - DNA, 22 bp, synthetic construct
  misc_feature 1..22: note = chemically synthesized
  source 1..22: mol_type = other DNA
ttatcttttcttttttttttgg

SEQ ID NO: 135270 - DNA, 22 bp, synthetic construct
  misc_feature 1..22: note = chemically synthesized
  source 1..22: mol_type = other DNA
tatcttttcttttttttttggt

SEQ ID NO: 135271 - DNA, 22 bp, synthetic construct
  misc_feature 1..22: note = chemically synthesized
  source 1..22: mol_type = other DNA
atcttttcttttttttttggtg

SEQ ID NO: 135272 - DNA, 22 bp, synthetic construct
  misc_feature 1..22: note = chemically synthesized
  source 1..22: mol_type = other DNA
tcttttcttttttttttggtgg

SEQ ID NO: 135273 - DNA, 22 bp, synthetic construct
  misc_feature 1..22: note = chemically synthesized
  source 1..22: mol_type = other DNA
ttcttttttttttggtggaggc

SEQ ID NO: 135274 - DNA, 22 bp, synthetic construct
  misc_feature 1..22: note = chemically synthesized
  source 1..22: mol_type = other DNA
tcttttttttttggtggaggca

SEQ ID NO: 135275 - DNA, 22 bp, synthetic construct
  misc_feature 1..22: note = chemically synthesized
  source 1..22: mol_type = other DNA
cttttttttttggtggaggcag

SEQ ID NO: 135276 - DNA, 22 bp, synthetic construct
  misc_feature 1..22: note = chemically synthesized
  source 1..22: mol_type = other DNA
ttttttttttggtggaggcagg

SEQ ID NO: 135277 - DNA, 22 bp, synthetic construct
  misc_feature 1..22: note = chemically synthesized
  source 1..22: mol_type = other DNA
ttttttttggtggaggcagggt

SEQ ID NO: 135278 - DNA, 22 bp, synthetic construct
  misc_feature 1..22: note = chemically synthesized
  source 1..22: mol_type = other DNA
tttttttggtggaggcagggtc

SEQ ID NO: 135279 - DNA, 22 bp, synthetic construct
  misc_feature 1..22: note = chemically synthesized
  source 1..22: mol_type = other DNA
ttttttggtggaggcagggtct

SEQ ID NO: 135280 - DNA, 22 bp, synthetic construct
  misc_feature 1..22: note = chemically synthesized
  source 1..22: mol_type = other DNA
tttttggtggaggcagggtcta

SEQ ID NO: 135281 - DNA, 22 bp, synthetic construct
  misc_feature 1..22: note = chemically synthesized
  source 1..22: mol_type = other DNA
ttttggtggaggcagggtctag

SEQ ID NO: 135282 - DNA, 22 bp, synthetic construct
  misc_feature 1..22: note = chemically synthesized
  source 1..22: mol_type = other DNA
tttggtggaggcagggtctagc

SEQ ID NO: 135283 - DNA, 22 bp, synthetic construct
  misc_feature 1..22: note = chemically synthesized
  source 1..22: mol_type = other DNA
ttggtggaggcagggtctagct

SEQ ID NO: 135284 - DNA, 22 bp, synthetic construct
  misc_feature 1..22: note = chemically synthesized
  source 1..22: mol_type = other DNA
tggtggaggcagggtctagcta

SEQ ID NO: 135285 - DNA, 22 bp, synthetic construct
  misc_feature 1..22: note = chemically synthesized
  source 1..22: mol_type = other DNA
ggtggaggcagggtctagctat

SEQ ID NO: 135286 - DNA, 22 bp, synthetic construct
  misc_feature 1..22: note = chemically synthesized
  source 1..22: mol_type = other DNA
gtggaggcagggtctagctatg

SEQ ID NO: 135287 - DNA, 22 bp, synthetic construct
  misc_feature 1..22: note = chemically synthesized
  source 1..22: mol_type = other DNA
gctatgttgcccaggctgggtt

SEQ ID NO: 135288 - DNA, 22 bp, synthetic construct
  misc_feature 1..22: note = chemically synthesized
  source 1..22: mol_type = other DNA
tgttgcccaggctgggttctct

SEQ ID NO: 135289 - DNA, 22 bp, synthetic construct
  misc_feature 1..22: note = chemically synthesized
  source 1..22: mol_type = other DNA
cccaggctgggttctcttctta

SEQ ID NO: 135290 - DNA, 22 bp, synthetic construct
  misc_feature 1..22: note = chemically synthesized
  source 1..22: mol_type = other DNA
ggttctcttcttattcacagtc

SEQ ID NO: 135291 - DNA, 22 bp, synthetic construct
  misc_feature 1..22: note = chemically synthesized
  source 1..22: mol_type = other DNA
tcttcttattcacagtccactt

SEQ ID NO: 135292 - DNA, 22 bp, synthetic construct
  misc_feature 1..22: note = chemically synthesized
  source 1..22: mol_type = other DNA
ttcttattcacagtccacttga

SEQ ID NO: 135293 - DNA, 22 bp, synthetic construct
  misc_feature 1..22: note = chemically synthesized
  source 1..22: mol_type = other DNA
cttattcacagtccacttgaga

SEQ ID NO: 135294 - DNA, 22 bp, synthetic construct
  misc_feature 1..22: note = chemically synthesized
  source 1..22: mol_type = other DNA
ttattcacagtccacttgagat

SEQ ID NO: 135295 - DNA, 22 bp, synthetic construct
  misc_feature 1..22: note = chemically synthesized
  source 1..22: mol_type = other DNA
attcacagtccacttgagatag

SEQ ID NO: 135296 - DNA, 22 bp, synthetic construct
  misc_feature 1..22: note = chemically synthesized
  source 1..22: mol_type = other DNA
ttcacagtccacttgagatagc

SEQ ID NO: 135297 - DNA, 22 bp, synthetic construct
  misc_feature 1..22: note = chemically synthesized
  source 1..22: mol_type = other DNA
acagtccacttgagatagcaac

SEQ ID NO: 135298 - DNA, 22 bp, synthetic construct
  misc_feature 1..22: note = chemically synthesized
  source 1..22: mol_type = other DNA
gagatagcaacattgatcacaa

SEQ ID NO: 135299 - DNA, 22 bp, synthetic construct
  misc_feature 1..22: note = chemically synthesized
  source 1..22: mol_type = other DNA
agatagcaacattgatcacaat

SEQ ID NO: 135300 - DNA, 22 bp, synthetic construct
  misc_feature 1..22: note = chemically synthesized
  source 1..22: mol_type = other DNA
atcacaatatttctcagtcatt

SEQ ID NO: 135301 - DNA, 22 bp, synthetic construct
  misc_feature 1..22: note = chemically synthesized
  source 1..22: mol_type = other DNA
ctcagtcatttctattgaataa

SEQ ID NO: 135302 - DNA, 22 bp, synthetic construct
  misc_feature 1..22: note = chemically synthesized
  source 1..22: mol_type = other DNA
tcagtcatttctattgaataag

SEQ ID NO: 135303 - DNA, 22 bp, synthetic construct
  misc_feature 1..22: note = chemically synthesized
  source 1..22: mol_type = other DNA
agtcatttctattgaataagca

SEQ ID NO: 135304 - DNA, 22 bp, synthetic construct
  misc_feature 1..22: note = chemically synthesized
  source 1..22: mol_type = other DNA
ctattgaataagcattttcctc

SEQ ID NO: 135305 - DNA, 22 bp, synthetic construct
  misc_feature 1..22: note = chemically synthesized
  source 1..22: mol_type = other DNA
tattgaataagcattttcctca

SEQ ID NO: 135306 - DNA, 22 bp, synthetic construct
  misc_feature 1..22: note = chemically synthesized
  source 1..22: mol_type = other DNA
ttgaataagcattttcctcagt

SEQ ID NO: 135307 - DNA, 22 bp, synthetic construct
  misc_feature 1..22: note = chemically synthesized
  source 1..22: mol_type = other DNA
aataagcattttcctcagtggt

SEQ ID NO: 135308 - DNA, 22 bp, synthetic construct
  misc_feature 1..22: note = chemically synthesized
  source 1..22: mol_type = other DNA
tcctcagtggttaatcctaaat

SEQ ID NO: 135309 - DNA, 22 bp, synthetic construct
  misc_feature 1..22: note = chemically synthesized
  source 1..22: mol_type = other DNA
cctcagtggttaatcctaaata

SEQ ID NO: 135310 - DNA, 22 bp, synthetic construct
  misc_feature 1..22: note = chemically synthesized
  source 1..22: mol_type = other DNA
ctcagtggttaatcctaaatac

SEQ ID NO: 135311 - DNA, 22 bp, synthetic construct
  misc_feature 1..22: note = chemically synthesized
  source 1..22: mol_type = other DNA
agtggttaatcctaaatacagc

SEQ ID NO: 135312 - DNA, 22 bp, synthetic construct
  misc_feature 1..22: note = chemically synthesized
  source 1..22: mol_type = other DNA
atcctaaatacagctgtcccat

SEQ ID NO: 135313 - DNA, 22 bp, synthetic construct
  misc_feature 1..22: note = chemically synthesized
  source 1..22: mol_type = other DNA
aatacagctgtcccattagttt

SEQ ID NO: 135314 - DNA, 22 bp, synthetic construct
  misc_feature 1..22: note = chemically synthesized
  source 1..22: mol_type = other DNA
tcccattagtttcaagagaaaa

SEQ ID NO: 135315 - DNA, 22 bp, synthetic construct
  misc_feature 1..22: note = chemically synthesized
  source 1..22: mol_type = other DNA
gtttcaagagaaaaaatttgaa

SEQ ID NO: 135316 - DNA, 22 bp, synthetic construct
  misc_feature 1..22: note = chemically synthesized
  source 1..22: mol_type = other DNA
caagagaaaaaatttgaactga

SEQ ID NO: 135317 - DNA, 22 bp, synthetic construct
  misc_feature 1..22: note = chemically synthesized
  source 1..22: mol_type = other DNA
aagagaaaaaatttgaactgac

SEQ ID NO: 135318 - DNA, 22 bp, synthetic construct
  misc_feature 1..22: note = chemically synthesized
  source 1..22: mol_type = other DNA
gaactgactcaacttggatagt

SEQ ID NO: 135319 - DNA, 22 bp, synthetic construct
  misc_feature 1..22: note = chemically synthesized
  source 1..22: mol_type = other DNA
aactgactcaacttggatagta

SEQ ID NO: 135320 - DNA, 22 bp, synthetic construct
  misc_feature 1..22: note = chemically synthesized
  source 1..22: mol_type = other DNA
actcaacttggatagtaacaca

SEQ ID NO: 135321 - DNA, 22 bp, synthetic construct
  misc_feature 1..22: note = chemically synthesized
  source 1..22: mol_type = other DNA
aacttggatagtaacacagtaa

SEQ ID NO: 135322 - DNA, 22 bp, synthetic construct
  misc_feature 1..22: note = chemically synthesized
  source 1..22: mol_type = other DNA
ggatagtaacacagtaagggcc

SEQ ID NO: 135323 - DNA, 22 bp, synthetic construct
  misc_feature 1..22: note = chemically synthesized
  source 1..22: mol_type = other DNA
gatagtaacacagtaagggccc

SEQ ID NO: 135324 - DNA, 22 bp, synthetic construct
  misc_feature 1..22: note = chemically synthesized
  source 1..22: mol_type = other DNA
tttgggaccaagagtcaaggct

SEQ ID NO: 135325 - DNA, 22 bp, synthetic construct
  misc_feature 1..22: note = chemically synthesized
  source 1..22: mol_type = other DNA
gggaccaagagtcaaggctatg

SEQ ID NO: 135326 - DNA, 22 bp, synthetic construct
  misc_feature 1..22: note = chemically synthesized
  source 1..22: mol_type = other DNA
ggaccaagagtcaaggctatga

SEQ ID NO: 135327 - DNA, 22 bp, synthetic construct
  misc_feature 1..22: note = chemically synthesized
  source 1..22: mol_type = other DNA
tgagcacagacgtaagatgagt

SEQ ID NO: 135328 - DNA, 22 bp, synthetic construct
  misc_feature 1..22: note = chemically synthesized
  source 1..22: mol_type = other DNA
aaaaaataaaggttgtatgctt

SEQ ID NO: 135329 - DNA, 22 bp, synthetic construct
  misc_feature 1..22: note = chemically synthesized
  source 1..22: mol_type = other DNA
tatgcttcatagtgaattggaa

SEQ ID NO: 135330 - DNA, 22 bp, synthetic construct
  misc_feature 1..22: note = chemically synthesized
  source 1..22: mol_type = other DNA
catagtgaattggaattattat

SEQ ID NO: 135331 - DNA, 22 bp, synthetic construct
  misc_feature 1..22: note = chemically synthesized
  source 1..22: mol_type = other DNA
atagtgaattggaattattatt

SEQ ID NO: 135332 - DNA, 22 bp, synthetic construct
  misc_feature 1..22: note = chemically synthesized
  source 1..22: mol_type = other DNA
gaattattattctgaccatgat

SEQ ID NO: 135333 - DNA, 22 bp, synthetic construct
  misc_feature 1..22: note = chemically synthesized
  source 1..22: mol_type = other DNA
ttattctgaccatgatttttgt

SEQ ID NO: 135334 - DNA, 22 bp, synthetic construct
  misc_feature 1..22: note = chemically synthesized
  source 1..22: mol_type = other DNA
ttctgaccatgatttttgttat

SEQ ID NO: 135335 - DNA, 22 bp, synthetic construct
  misc_feature 1..22: note = chemically synthesized
  source 1..22: mol_type = other DNA
tgaccatgatttttgttatttg

SEQ ID NO: 135336 - DNA, 22 bp, synthetic construct
  misc_feature 1..22: note = chemically synthesized
  source 1..22: mol_type = other DNA
accatgatttttgttatttgtt

SEQ ID NO: 135337 - DNA, 22 bp, synthetic construct
  misc_feature 1..22: note = chemically synthesized
  source 1..22: mol_type = other DNA
ttgttatttgttattctaggga

SEQ ID NO: 135338 - DNA, 22 bp, synthetic construct
  misc_feature 1..22: note = chemically synthesized
  source 1..22: mol_type = other DNA
tgttatttgttattctagggaa

SEQ ID NO: 135339 - DNA, 22 bp, synthetic construct
  misc_feature 1..22: note = chemically synthesized
  source 1..22: mol_type = other DNA
gttatttgttattctagggaaa

SEQ ID NO: 135340 - DNA, 22 bp, synthetic construct
  misc_feature 1..22: note = chemically synthesized
  source 1..22: mol_type = other DNA
ttatttgttattctagggaaag

SEQ ID NO: 135341 - DNA, 22 bp, synthetic construct
  misc_feature 1..22: note = chemically synthesized
  source 1..22: mol_type = other DNA
tttgttattctagggaaaggcc

SEQ ID NO: 135342 - DNA, 22 bp, synthetic construct
  misc_feature 1..22: note = chemically synthesized
  source 1..22: mol_type = other DNA
gttattctagggaaaggccttg

SEQ ID NO: 135343 - DNA, 22 bp, synthetic construct
  misc_feature 1..22: note = chemically synthesized
  source 1..22: mol_type = other DNA
ttattctagggaaaggccttgt

SEQ ID NO: 135344 - DNA, 22 bp, synthetic construct
  misc_feature 1..22: note = chemically synthesized
  source 1..22: mol_type = other DNA
ttctagggaaaggccttgtgag

SEQ ID NO: 135345 - DNA, 22 bp, synthetic construct
  misc_feature 1..22: note = chemically synthesized
  source 1..22: mol_type = other DNA
tagggaaaggccttgtgagtac

SEQ ID NO: 135346 - DNA, 22 bp, synthetic construct
  misc_feature 1..22: note = chemically synthesized
  source 1..22: mol_type = other DNA
gggaaaggccttgtgagtacag

SEQ ID NO: 135347 - DNA, 22 bp, synthetic construct
  misc_feature 1..22: note = chemically synthesized
  source 1..22: mol_type = other DNA
gtgagtacaggcttacaattaa

SEQ ID NO: 135348 - DNA, 22 bp, synthetic construct
  misc_feature 1..22: note = chemically synthesized
  source 1..22: mol_type = other DNA
tgagtacaggcttacaattaat

SEQ ID NO: 135349 - DNA, 22 bp, synthetic construct
  misc_feature 1..22: note = chemically synthesized
  source 1..22: mol_type = other DNA
acaattaattaagtatgagaca

SEQ ID NO: 135350 - DNA, 22 bp, synthetic construct
  misc_feature 1..22: note = chemically synthesized
  source 1..22: mol_type = other DNA
caattaattaagtatgagacaa

SEQ ID NO: 135351 - DNA, 22 bp, synthetic construct
  misc_feature 1..22: note = chemically synthesized
  source 1..22: mol_type = other DNA
attaagtatgagacaatccaga

SEQ ID NO: 135352 - DNA, 22 bp, synthetic construct
  misc_feature 1..22: note = chemically synthesized
  source 1..22: mol_type = other DNA
agtatgagacaatccagaaaaa

SEQ ID NO: 135353 - DNA, 22 bp, synthetic construct
  misc_feature 1..22: note = chemically synthesized
  source 1..22: mol_type = other DNA
aagttttgaggtaaaaaatggc

SEQ ID NO: 135354 - DNA, 22 bp, synthetic construct
  misc_feature 1..22: note = chemically synthesized
  source 1..22: mol_type = other DNA
agttttgaggtaaaaaatggcc

SEQ ID NO: 135355 - DNA, 22 bp, synthetic construct
  misc_feature 1..22: note = chemically synthesized
  source 1..22: mol_type = other DNA
tgaggtaaaaaatggcctgatg

SEQ ID NO: 135356 - DNA, 22 bp, synthetic construct
  misc_feature 1..22: note = chemically synthesized
  source 1..22: mol_type = other DNA
gaggtaaaaaatggcctgatga

SEQ ID NO: 135357 - DNA, 22 bp, synthetic construct
  misc_feature 1..22: note = chemically synthesized
  source 1..22: mol_type = other DNA
aggtaaaaaatggcctgatgat

SEQ ID NO: 135358 - DNA, 22 bp, synthetic construct
  misc_feature 1..22: note = chemically synthesized
  source 1..22: mol_type = other DNA
atgatgtgctacaagaagattg

SEQ ID NO: 135359 - DNA, 22 bp, synthetic construct
  misc_feature 1..22: note = chemically synthesized
  source 1..22: mol_type = other DNA
caagaagattgtgagagaaaaa

SEQ ID NO: 135360 - DNA, 22 bp, synthetic construct
  misc_feature 1..22: note = chemically synthesized
  source 1..22: mol_type = other DNA
tgagagaaaaaagaaaactgca

SEQ ID NO: 135361 - DNA, 22 bp, synthetic construct
  misc_feature 1..22: note = chemically synthesized
  source 1..22: mol_type = other DNA
catctttggaggtcatcacccc

SEQ ID NO: 135362 - DNA, 22 bp, synthetic construct
  misc_feature 1..22: note = chemically synthesized
  source 1..22: mol_type = other DNA
tggaggtcatcacccctaaaaa

SEQ ID NO: 135363 - DNA, 22 bp, synthetic construct
  misc_feature 1..22: note = chemically synthesized
  source 1..22: mol_type = other DNA
ggaggtcatcacccctaaaaaa

SEQ ID NO: 135364 - DNA, 22 bp, synthetic construct
  misc_feature 1..22: note = chemically synthesized
  source 1..22: mol_type = other DNA
gaggtcatcacccctaaaaaat

SEQ ID NO: 135365 - DNA, 22 bp, synthetic construct
  misc_feature 1..22: note = chemically synthesized
  source 1..22: mol_type = other DNA
aaaaatatcttctccacctgca

SEQ ID NO: 135366 - DNA, 22 bp, synthetic construct
  misc_feature 1..22: note = chemically synthesized
  source 1..22: mol_type = other DNA
ctccacctgcaaaacctaccat

SEQ ID NO: 135367 - DNA, 22 bp, synthetic construct
  misc_feature 1..22: note = chemically synthesized
  source 1..22: mol_type = other DNA
tccacctgcaaaacctaccatg

SEQ ID NO: 135368 - DNA, 22 bp, synthetic construct
  misc_feature 1..22: note = chemically synthesized
  source 1..22: mol_type = other DNA
cacctgcaaaacctaccatgtg

SEQ ID NO: 135369 - DNA, 22 bp, synthetic construct
  misc_feature 1..22: note = chemically synthesized
  source 1..22: mol_type = other DNA
caaaacctaccatgtggtataa

SEQ ID NO: 135370 - DNA, 22 bp, synthetic construct
  misc_feature 1..22: note = chemically synthesized
  source 1..22: mol_type = other DNA
ccatgtggtataacaacagtgc

SEQ ID NO: 135371 - DNA, 22 bp, synthetic construct
  misc_feature 1..22: note = chemically synthesized
  source 1..22: mol_type = other DNA
gccccttcttgctgactggctt

SEQ ID NO: 135372 - DNA, 22 bp, synthetic construct
  misc_feature 1..22: note = chemically synthesized
  source 1..22: mol_type = other DNA
cttgctgactggcttcttgggc

SEQ ID NO: 135373 - DNA, 22 bp, synthetic construct
  misc_feature 1..22: note = chemically synthesized
  source 1..22: mol_type = other DNA
ttgctgactggcttcttgggct

SEQ ID NO: 135374 - DNA, 22 bp, synthetic construct
  misc_feature 1..22: note = chemically synthesized
  source 1..22: mol_type = other DNA
gctgactggcttcttgggctca

SEQ ID NO: 135375 - DNA, 22 bp, synthetic construct
  misc_feature 1..22: note = chemically synthesized
  source 1..22: mol_type = other DNA
ctgactggcttcttgggctcag

SEQ ID NO: 135376 - DNA, 22 bp, synthetic construct
  misc_feature 1..22: note = chemically synthesized
  source 1..22: mol_type = other DNA
actggcttcttgggctcagagg

SEQ ID NO: 135377 - DNA, 22 bp, synthetic construct
  misc_feature 1..22: note = chemically synthesized
  source 1..22: mol_type = other DNA
gcttcttgggctcagaggcagt

SEQ ID NO: 135378 - DNA, 22 bp, synthetic construct
  misc_feature 1..22: note = chemically synthesized
  source 1..22: mol_type = other DNA
cttgggctcagaggcagttcac

SEQ ID NO: 135379 - DNA, 22 bp, synthetic construct
  misc_feature 1..22: note = chemically synthesized
  source 1..22: mol_type = other DNA
ttgggctcagaggcagttcact

SEQ ID NO: 135380 - DNA, 22 bp, synthetic construct
  misc_feature 1..22: note = chemically synthesized
  source 1..22: mol_type = other DNA
gggctcagaggcagttcactac

SEQ ID NO: 135381 - DNA, 22 bp, synthetic construct
  misc_feature 1..22: note = chemically synthesized
  source 1..22: mol_type = other DNA
ggctcagaggcagttcactacc

SEQ ID NO: 135382 - DNA, 22 bp, synthetic construct
  misc_feature 1..22: note = chemically synthesized
  source 1..22: mol_type = other DNA
agaggcagttcactaccggatc

SEQ ID NO: 135383 - DNA, 22 bp, synthetic construct
  misc_feature 1..22: note = chemically synthesized
  source 1..22: mol_type = other DNA
actaccggatctctatgtcctt

SEQ ID NO: 135384 - DNA, 22 bp, synthetic construct
  misc_feature 1..22: note = chemically synthesized
  source 1..22: mol_type = other DNA
ccggatctctatgtccttcttt

SEQ ID NO: 135385 - DNA, 22 bp, synthetic construct
  misc_feature 1..22: note = chemically synthesized
  source 1..22: mol_type = other DNA
tatgtccttctttgtcatctac

SEQ ID NO: 135386 - DNA, 22 bp, synthetic construct
  misc_feature 1..22: note = chemically synthesized
  source 1..22: mol_type = other DNA
tgtccttctttgtcatctactt

SEQ ID NO: 135387 - DNA, 22 bp, synthetic construct
  misc_feature 1..22: note = chemically synthesized
  source 1..22: mol_type = other DNA
ctttgtcatctacttctccgtc

SEQ ID NO: 135388 - DNA, 22 bp, synthetic construct
  misc_feature 1..22: note = chemically synthesized
  source 1..22: mol_type = other DNA
tttgtcatctacttctccgtcc

SEQ ID NO: 135389 - DNA, 22 bp, synthetic construct
  misc_feature 1..22: note = chemically synthesized
  source 1..22: mol_type = other DNA
tgtcatctacttctccgtcctt

SEQ ID NO: 135390 - DNA, 22 bp, synthetic construct
  misc_feature 1..22: note = chemically synthesized
  source 1..22: mol_type = other DNA
gtcatctacttctccgtccttt

SEQ ID NO: 135391 - DNA, 22 bp, synthetic construct
  misc_feature 1..22: note = chemically synthesized
  source 1..22: mol_type = other DNA
tcatctacttctccgtcctttt

SEQ ID NO: 135392 - DNA, 22 bp, synthetic construct
  misc_feature 1..22: note = chemically synthesized
  source 1..22: mol_type = other DNA
cttctccgtcctttttggaaat

SEQ ID NO: 135393 - DNA, 22 bp, synthetic construct
  misc_feature 1..22: note = chemically synthesized
  source 1..22: mol_type = other DNA
ctccgtcctttttggaaatggc

SEQ ID NO: 135394 - DNA, 22 bp, synthetic construct
  misc_feature 1..22: note = chemically synthesized
  source 1..22: mol_type = other DNA
tccgtcctttttggaaatggca

SEQ ID NO: 135395 - DNA, 22 bp, synthetic construct
  misc_feature 1..22: note = chemically synthesized
  source 1..22: mol_type = other DNA
cgtcctttttggaaatggcact

SEQ ID NO: 135396 - DNA, 22 bp, synthetic construct
  misc_feature 1..22: note = chemically synthesized
  source 1..22: mol_type = other DNA
tttggaaatggcactcttcttg

SEQ ID NO: 135397 - DNA, 22 bp, synthetic construct
  misc_feature 1..22: note = chemically synthesized
  source 1..22: mol_type = other DNA
ttggaaatggcactcttcttgt

SEQ ID NO: 135398 - DNA, 22 bp, synthetic construct
  misc_feature 1..22: note = chemically synthesized
  source 1..22: mol_type = other DNA
tggaaatggcactcttcttgtc

SEQ ID NO: 135399 - DNA, 22 bp, synthetic construct
  misc_feature 1..22: note = chemically synthesized
  source 1..22: mol_type = other DNA
ggaaatggcactcttcttgtcc

SEQ ID NO: 135400 - DNA, 22 bp, synthetic construct
  misc_feature 1..22: note = chemically synthesized
  source 1..22: mol_type = other DNA
gaaatggcactcttcttgtcct

SEQ ID NO: 135401 - DNA, 22 bp, synthetic construct
  misc_feature 1..22: note = chemically synthesized
  source 1..22: mol_type = other DNA
ttcttgtcctcatttggaatga

SEQ ID NO: 135402 - DNA, 22 bp, synthetic construct
  misc_feature 1..22: note = chemically synthesized
  source 1..22: mol_type = other DNA
cttgtcctcatttggaatgatc

SEQ ID NO: 135403 - DNA, 22 bp, synthetic construct
  misc_feature 1..22: note = chemically synthesized
  source 1..22: mol_type = other DNA
ttgtcctcatttggaatgatca

SEQ ID NO: 135404 - DNA, 22 bp, synthetic construct
  misc_feature 1..22: note = chemically synthesized
  source 1..22: mol_type = other DNA
gtcctcatttggaatgatcaca

SEQ ID NO: 135405 - DNA, 22 bp, synthetic construct
  misc_feature 1..22: note = chemically synthesized
  source 1..22: mol_type = other DNA
tcctcatttggaatgatcacag

SEQ ID NO: 135406 - DNA, 22 bp, synthetic construct
  misc_feature 1..22: note = chemically synthesized
  source 1..22: mol_type = other DNA
atttggaatgatcacagcctcc

SEQ ID NO: 135407 - DNA, 22 bp, synthetic construct
  misc_feature 1..22: note = chemically synthesized
  source 1..22: mol_type = other DNA
ggaatgatcacagcctccatga

SEQ ID NO: 135408 - DNA, 22 bp, synthetic construct
  misc_feature 1..22: note = chemically synthesized
  source 1..22: mol_type = other DNA
gaatgatcacagcctccatgag

SEQ ID NO: 135409 - DNA, 22 bp, synthetic construct
  misc_feature 1..22: note = chemically synthesized
  source 1..22: mol_type = other DNA
catgagcccatgtactacttcc

SEQ ID NO: 135410 - DNA, 22 bp, synthetic construct
  misc_feature 1..22: note = chemically synthesized
  source 1..22: mol_type = other DNA
cttcctggctatgctggcagac

SEQ ID NO: 135411 - DNA, 22 bp, synthetic construct
  misc_feature 1..22: note = chemically synthesized
  source 1..22: mol_type = other DNA
cctggctatgctggcagacacg

SEQ ID NO: 135412 - DNA, 22 bp, synthetic construct
  misc_feature 1..22: note = chemically synthesized
  source 1..22: mol_type = other DNA
ctggctatgctggcagacacgg

SEQ ID NO: 135413 - DNA, 22 bp, synthetic construct
  misc_feature 1..22: note = chemically synthesized
  source 1..22: mol_type = other DNA
gctatgctggcagacacggacc

SEQ ID NO: 135414 - DNA, 22 bp, synthetic construct
  misc_feature 1..22: note = chemically synthesized
  source 1..22: mol_type = other DNA
tgctggcagacacggaccttgg

SEQ ID NO: 135415 - DNA, 22 bp, synthetic construct
  misc_feature 1..22: note = chemically synthesized
  source 1..22: mol_type = other DNA
gcagacacggaccttgggatga

SEQ ID NO: 135416 - DNA, 22 bp, synthetic construct
  misc_feature 1..22: note = chemically synthesized
  source 1..22: mol_type = other DNA
gggatgacattcactacaatgc

SEQ ID NO: 135417 - DNA, 22 bp, synthetic construct
  misc_feature 1..22: note = chemically synthesized
  source 1..22: mol_type = other DNA
ggatgacattcactacaatgcc

SEQ ID NO: 135418 - DNA, 22 bp, synthetic construct
  misc_feature 1..22: note = chemically synthesized
  source 1..22: mol_type = other DNA
actacaatgcccacagtcctgg

SEQ ID NO: 135419 - DNA, 22 bp, synthetic construct
  misc_feature 1..22: note = chemically synthesized
  source 1..22: mol_type = other DNA
caatgcccacagtcctgggtgt

SEQ ID NO: 135420 - DNA, 22 bp, synthetic construct
  misc_feature 1..22: note = chemically synthesized
  source 1..22: mol_type = other DNA
ggtgtcctgctgctagaccaga

SEQ ID NO: 135421 - DNA, 22 bp, synthetic construct
  misc_feature 1..22: note = chemically synthesized
  source 1..22: mol_type = other DNA
ctgctagaccagagggagattg

SEQ ID NO: 135422 - DNA, 22 bp, synthetic construct
  misc_feature 1..22: note = chemically synthesized
  source 1..22: mol_type = other DNA
ctagaccagagggagattgccc

SEQ ID NO: 135423 - DNA, 22 bp, synthetic construct
  misc_feature 1..22: note = chemically synthesized
  source 1..22: mol_type = other DNA
gaccagagggagattgcccatg

SEQ ID NO: 135424 - DNA, 22 bp, synthetic construct
  misc_feature 1..22: note = chemically synthesized
  source 1..22: mol_type = other DNA
cccatgctgcctgtttcaccca

SEQ ID NO: 135425 - DNA, 22 bp, synthetic construct
  misc_feature 1..22: note = chemically synthesized
  source 1..22: mol_type = other DNA
cctgtttcacccaatccttcat

SEQ ID NO: 135426 - DNA, 22 bp, synthetic construct
  misc_feature 1..22: note = chemically synthesized
  source 1..22: mol_type = other DNA
tttcacccaatccttcattcat

SEQ ID NO: 135427 - DNA, 22 bp, synthetic construct
  misc_feature 1..22: note = chemically synthesized
  source 1..22: mol_type = other DNA
cacccaatccttcattcattca

SEQ ID NO: 135428 - DNA, 22 bp, synthetic construct
  misc_feature 1..22: note = chemically synthesized
  source 1..22: mol_type = other DNA
acccaatccttcattcattcac

SEQ ID NO: 135429 - DNA, 22 bp, synthetic construct
  misc_feature 1..22: note = chemically synthesized
  source 1..22: mol_type = other DNA
cattcattcactggccattgta

SEQ ID NO: 135430 - DNA, 22 bp, synthetic construct
  misc_feature 1..22: note = chemically synthesized
  source 1..22: mol_type = other DNA
attcattcactggccattgtag

SEQ ID NO: 135431 - DNA, 22 bp, synthetic construct
  misc_feature 1..22: note = chemically synthesized
  source 1..22: mol_type = other DNA
attcactggccattgtagaatc

SEQ ID NO: 135432 - DNA, 22 bp, synthetic construct
  misc_feature 1..22: note = chemically synthesized
  source 1..22: mol_type = other DNA
actggccattgtagaatcaggt

SEQ ID NO: 135433 - DNA, 22 bp, synthetic construct
  misc_feature 1..22: note = chemically synthesized
  source 1..22: mol_type = other DNA
gccattgtagaatcaggtatct

SEQ ID NO: 135434 - DNA, 22 bp, synthetic construct
  misc_feature 1..22: note = chemically synthesized
  source 1..22: mol_type = other DNA
tagaatcaggtatcttgcttgt

SEQ ID NO: 135435 - DNA, 22 bp, synthetic construct
  misc_feature 1..22: note = chemically synthesized
  source 1..22: mol_type = other DNA
gcttgttttggcctatgactgt

SEQ ID NO: 135436 - DNA, 22 bp, synthetic construct
  misc_feature 1..22: note = chemically synthesized
  source 1..22: mol_type = other DNA
cttgttttggcctatgactgtt

SEQ ID NO: 135437 - DNA, 22 bp, synthetic construct
  misc_feature 1..22: note = chemically synthesized
  source 1..22: mol_type = other DNA
gttttggcctatgactgtttca

SEQ ID NO: 135438 - DNA, 22 bp, synthetic construct
  misc_feature 1..22: note = chemically synthesized
  source 1..22: mol_type = other DNA
ttttggcctatgactgtttcat

SEQ ID NO: 135439 - DNA, 22 bp, synthetic construct
  misc_feature 1..22: note = chemically synthesized
  source 1..22: mol_type = other DNA
tggcctatgactgtttcattgc

SEQ ID NO: 135440 - DNA, 22 bp, synthetic construct
  misc_feature 1..22: note = chemically synthesized
  source 1..22: mol_type = other DNA
ggcctatgactgtttcattgcc

SEQ ID NO: 135441 - DNA, 22 bp, synthetic construct
  misc_feature 1..22: note = chemically synthesized
  source 1..22: mol_type = other DNA
gcctatgactgtttcattgcca

SEQ ID NO: 135442 - DNA, 22 bp, synthetic construct
  misc_feature 1..22: note = chemically synthesized
  source 1..22: mol_type = other DNA
tgactgtttcattgccatccgc

SEQ ID NO: 135443 - DNA, 22 bp, synthetic construct
  misc_feature 1..22: note = chemically synthesized
  source 1..22: mol_type = other DNA
tttcattgccatccgcacacca

SEQ ID NO: 135444 - DNA, 22 bp, synthetic construct
  misc_feature 1..22: note = chemically synthesized
  source 1..22: mol_type = other DNA
cattgccatccgcacaccactg

SEQ ID NO: 135445 - DNA, 22 bp, synthetic construct
  misc_feature 1..22: note = chemically synthesized
  source 1..22: mol_type = other DNA
attgccatccgcacaccactga

SEQ ID NO: 135446 - DNA, 22 bp, synthetic construct
  misc_feature 1..22: note = chemically synthesized
  source 1..22: mol_type = other DNA
ccatccgcacaccactgaggta

SEQ ID NO: 135447 - DNA, 22 bp, synthetic construct
  misc_feature 1..22: note = chemically synthesized
  source 1..22: mol_type = other DNA
aggtacaactgcattcttacca

SEQ ID NO: 135448 - DNA, 22 bp, synthetic construct
  misc_feature 1..22: note = chemically synthesized
  source 1..22: mol_type = other DNA
cattcttaccaattcccgagtg

SEQ ID NO: 135449 - DNA, 22 bp, synthetic construct
  misc_feature 1..22: note = chemically synthesized
  source 1..22: mol_type = other DNA
ttaccaattcccgagtgatgaa

SEQ ID NO: 135450 - DNA, 22 bp, synthetic construct
  misc_feature 1..22: note = chemically synthesized
  source 1..22: mol_type = other DNA
accaattcccgagtgatgaaca

SEQ ID NO: 135451 - DNA, 22 bp, synthetic construct
  misc_feature 1..22: note = chemically synthesized
  source 1..22: mol_type = other DNA
ccaattcccgagtgatgaacat

SEQ ID NO: 135452 - DNA, 22 bp, synthetic construct
  misc_feature 1..22: note = chemically synthesized
  source 1..22: mol_type = other DNA
ccgagtgatgaacataggactg

SEQ ID NO: 135453 - DNA, 22 bp, synthetic construct
  misc_feature 1..22: note = chemically synthesized
  source 1..22: mol_type = other DNA
ggggtactgatgagaggtttta

SEQ ID NO: 135454 - DNA, 22 bp, synthetic construct
  misc_feature 1..22: note = chemically synthesized
  source 1..22: mol_type = other DNA
atgagaggttttatgtccattt

SEQ ID NO: 135455 - DNA, 22 bp, synthetic construct
  misc_feature 1..22: note = chemically synthesized
  source 1..22: mol_type = other DNA
tatgtccattttgcccataatt

SEQ ID NO: 135456 - DNA, 22 bp, synthetic construct
  misc_feature 1..22: note = chemically synthesized
  source 1..22: mol_type = other DNA
atgtccattttgcccataattc

SEQ ID NO: 135457 - DNA, 22 bp, synthetic construct
  misc_feature 1..22: note = chemically synthesized
  source 1..22: mol_type = other DNA
tgtccattttgcccataattct

SEQ ID NO: 135458 - DNA, 22 bp, synthetic construct
  misc_feature 1..22: note = chemically synthesized
  source 1..22: mol_type = other DNA
tgcccataattctttcactcta

SEQ ID NO: 135459 - DNA, 22 bp, synthetic construct
  misc_feature 1..22: note = chemically synthesized
  source 1..22: mol_type = other DNA
gcccataattctttcactctac

SEQ ID NO: 135460 - DNA, 22 bp, synthetic construct
  misc_feature 1..22: note = chemically synthesized
  source 1..22: mol_type = other DNA
cccataattctttcactctact

SEQ ID NO: 135461 - DNA, 22 bp, synthetic construct
  misc_feature 1..22: note = chemically synthesized
  source 1..22: mol_type = other DNA
tttcactctactgctacccata

SEQ ID NO: 135462 - DNA, 22 bp, synthetic construct
  misc_feature 1..22: note = chemically synthesized
  source 1..22: mol_type = other DNA
tcactctactgctacccatatt

SEQ ID NO: 135463 - DNA, 22 bp, synthetic construct
  misc_feature 1..22: note = chemically synthesized
  source 1..22: mol_type = other DNA
cactctactgctacccatattg

SEQ ID NO: 135464 - DNA, 22 bp, synthetic construct
  misc_feature 1..22: note = chemically synthesized
  source 1..22: mol_type = other DNA
actctactgctacccatattgt

SEQ ID NO: 135465 - DNA, 22 bp, synthetic construct
  misc_feature 1..22: note = chemically synthesized
  source 1..22: mol_type = other DNA
tactgctacccatattgtggtt

SEQ ID NO: 135466 - DNA, 22 bp, synthetic construct
  misc_feature 1..22: note = chemically synthesized
  source 1..22: mol_type = other DNA
ctgctacccatattgtggttcc

SEQ ID NO: 135467 - DNA, 22 bp, synthetic construct
  misc_feature 1..22: note = chemically synthesized
  source 1..22: mol_type = other DNA
ctacccatattgtggttcccgt

SEQ ID NO: 135468 - DNA, 22 bp, synthetic construct
  misc_feature 1..22: note = chemically synthesized
  source 1..22: mol_type = other DNA
cccatattgtggttcccgtgcc

SEQ ID NO: 135469 - DNA, 22 bp, synthetic construct
  misc_feature 1..22: note = chemically synthesized
  source 1..22: mol_type = other DNA
tggttcccgtgccctcttgcac

SEQ ID NO: 135470 - DNA, 22 bp, synthetic construct
  misc_feature 1..22: note = chemically synthesized
  source 1..22: mol_type = other DNA
ccgtgccctcttgcacacattt

SEQ ID NO: 135471 - DNA, 22 bp, synthetic construct
  misc_feature 1..22: note = chemically synthesized
  source 1..22: mol_type = other DNA
ttgcacacattttgcctccatc

SEQ ID NO: 135472 - DNA, 22 bp, synthetic construct
  misc_feature 1..22: note = chemically synthesized
  source 1..22: mol_type = other DNA
gcacacattttgcctccatcaa

SEQ ID NO: 135473 - DNA, 22 bp, synthetic construct
  misc_feature 1..22: note = chemically synthesized
  source 1..22: mol_type = other DNA
cacacattttgcctccatcaag

SEQ ID NO: 135474 - DNA, 22 bp, synthetic construct
  misc_feature 1..22: note = chemically synthesized
  source 1..22: mol_type = other DNA
tgcctccatcaagatgtcataa

SEQ ID NO: 135475 - DNA, 22 bp, synthetic construct
  misc_feature 1..22: note = chemically synthesized
  source 1..22: mol_type = other DNA
gcctccatcaagatgtcataaa

SEQ ID NO: 135476 - DNA, 22 bp, synthetic construct
  misc_feature 1..22: note = chemically synthesized
  source 1..22: mol_type = other DNA
cctccatcaagatgtcataaaa

SEQ ID NO: 135477 - DNA, 22 bp, synthetic construct
  misc_feature 1..22: note = chemically synthesized
  source 1..22: mol_type = other DNA
catcaagatgtcataaaactcg

SEQ ID NO: 135478 - DNA, 22 bp, synthetic construct
  misc_feature 1..22: note = chemically synthesized
  source 1..22: mol_type = other DNA
gcctgtgctgatatcacgttta

SEQ ID NO: 135479 - DNA, 22 bp, synthetic construct
  misc_feature 1..22: note = chemically synthesized
  source 1..22: mol_type = other DNA
tgctgatatcacgtttaatcac

SEQ ID NO: 135480 - DNA, 22 bp, synthetic construct
  misc_feature 1..22: note = chemically synthesized
  source 1..22: mol_type = other DNA
atatcacgtttaatcacatata

SEQ ID NO: 135481 - DNA, 22 bp, synthetic construct
  misc_feature 1..22: note = chemically synthesized
  source 1..22: mol_type = other DNA
aatcacatatatccaattattc

SEQ ID NO: 135482 - DNA, 22 bp, synthetic construct
  misc_feature 1..22: note = chemically synthesized
  source 1..22: mol_type = other DNA
atcacatatatccaattattca

SEQ ID NO: 135483 - DNA, 22 bp, synthetic construct
  misc_feature 1..22: note = chemically synthesized
  source 1..22: mol_type = other DNA
ttcagacttctttgactgtctt

SEQ ID NO: 135484 - DNA, 22 bp, synthetic construct
  misc_feature 1..22: note = chemically synthesized
  source 1..22: mol_type = other DNA
agacttctttgactgtcttttt

SEQ ID NO: 135485 - DNA, 22 bp, synthetic construct
  misc_feature 1..22: note = chemically synthesized
  source 1..22: mol_type = other DNA
ctttgactgtctttttagatgc

SEQ ID NO: 135486 - DNA, 22 bp, synthetic construct
  misc_feature 1..22: note = chemically synthesized
  source 1..22: mol_type = other DNA
tttgactgtctttttagatgct

SEQ ID NO: 135487 - DNA, 22 bp, synthetic construct
  misc_feature 1..22: note = chemically synthesized
  source 1..22: mol_type = other DNA
tgactgtctttttagatgctct

SEQ ID NO: 135488 - DNA, 22 bp, synthetic construct
  misc_feature 1..22: note = chemically synthesized
  source 1..22: mol_type = other DNA
gactgtctttttagatgctcta

SEQ ID NO: 135489 - DNA, 22 bp, synthetic construct
  misc_feature 1..22: note = chemically synthesized
  source 1..22: mol_type = other DNA
actgtctttttagatgctctaa

SEQ ID NO: 135490 - DNA, 22 bp, synthetic construct
  misc_feature 1..22: note = chemically synthesized
  source 1..22: mol_type = other DNA
tctttttagatgctctaatcat

SEQ ID NO: 135491 - DNA, 22 bp, synthetic construct
  misc_feature 1..22: note = chemically synthesized
  source 1..22: mol_type = other DNA
tttagatgctctaatcatcatc

SEQ ID NO: 135492 - DNA, 22 bp, synthetic construct
  misc_feature 1..22: note = chemically synthesized
  source 1..22: mol_type = other DNA
ttagatgctctaatcatcatct

SEQ ID NO: 135493 - DNA, 22 bp, synthetic construct
  misc_feature 1..22: note = chemically synthesized
  source 1..22: mol_type = other DNA
tagatgctctaatcatcatctt

SEQ ID NO: 135494 - DNA, 22 bp, synthetic construct
  misc_feature 1..22: note = chemically synthesized
  source 1..22: mol_type = other DNA
agatgctctaatcatcatcttt

SEQ ID NO: 135495 - DNA, 22 bp, synthetic construct
  misc_feature 1..22: note = chemically synthesized
  source 1..22: mol_type = other DNA
gatgctctaatcatcatctttt

SEQ ID NO: 135496 - DNA, 22 bp, synthetic construct
  misc_feature 1..22: note = chemically synthesized
  source 1..22: mol_type = other DNA
taatcatcatcttttcttatat

SEQ ID NO: 135497 - DNA, 22 bp, synthetic construct
  misc_feature 1..22: note = chemically synthesized
  source 1..22: mol_type = other DNA
atcatcatcttttcttatatac

SEQ ID NO: 135498 - DNA, 22 bp, synthetic construct
  misc_feature 1..22: note = chemically synthesized
  source 1..22: mol_type = other DNA
ttcttatatactaatcctcaag

SEQ ID NO: 135499 - DNA, 22 bp, synthetic construct
  misc_feature 1..22: note = chemically synthesized
  source 1..22: mol_type = other DNA
tcttatatactaatcctcaaga

SEQ ID NO: 135500 - DNA, 22 bp, synthetic construct
  misc_feature 1..22: note = chemically synthesized
  source 1..22: mol_type = other DNA
cttatatactaatcctcaagac

SEQ ID NO: 135501 - DNA, 22 bp, synthetic construct
  misc_feature 1..22: note = chemically synthesized
  source 1..22: mol_type = other DNA
ttatatactaatcctcaagaca

SEQ ID NO: 135502 - DNA, 22 bp, synthetic construct
  misc_feature 1..22: note = chemically synthesized
  source 1..22: mol_type = other DNA
atatactaatcctcaagacagt

SEQ ID NO: 135503 - DNA, 22 bp, synthetic construct
  misc_feature 1..22: note = chemically synthesized
  source 1..22: mol_type = other DNA
tatactaatcctcaagacagtg

SEQ ID NO: 135504 - DNA, 22 bp, synthetic construct
  misc_feature 1..22: note = chemically synthesized
  source 1..22: mol_type = other DNA
atcctcaagacagtgatgggca

SEQ ID NO: 135505 - DNA, 22 bp, synthetic construct
  misc_feature 1..22: note = chemically synthesized
  source 1..22: mol_type = other DNA
aagacagtgatgggcattgcgt

SEQ ID NO: 135506 - DNA, 22 bp, synthetic construct
  misc_feature 1..22: note = chemically synthesized
  source 1..22: mol_type = other DNA
cgtctggacaagaggaagctaa

SEQ ID NO: 135507 - DNA, 22 bp, synthetic construct
  misc_feature 1..22: note = chemically synthesized
  source 1..22: mol_type = other DNA
gacaagaggaagctaaatctct

SEQ ID NO: 135508 - DNA, 22 bp, synthetic construct
  misc_feature 1..22: note = chemically synthesized
  source 1..22: mol_type = other DNA
aatctctcaacacttgtgtctc

SEQ ID NO: 135509 - DNA, 22 bp, synthetic construct
  misc_feature 1..22: note = chemically synthesized
  source 1..22: mol_type = other DNA
tcaacacttgtgtctcccatat

SEQ ID NO: 135510 - DNA, 22 bp, synthetic construct
  misc_feature 1..22: note = chemically synthesized
  source 1..22: mol_type = other DNA
aacacttgtgtctcccatatta

SEQ ID NO: 135511 - DNA, 22 bp, synthetic construct
  misc_feature 1..22: note = chemically synthesized
  source 1..22: mol_type = other DNA
gtgtctcccatattagctgtgt

SEQ ID NO: 135512 - DNA, 22 bp, synthetic construct
  misc_feature 1..22: note = chemically synthesized
  source 1..22: mol_type = other DNA
tgtctcccatattagctgtgtc

SEQ ID NO: 135513 - DNA, 22 bp, synthetic construct
  misc_feature 1..22: note = chemically synthesized
  source 1..22: mol_type = other DNA
ccatattagctgtgtcctagta

SEQ ID NO: 135514 - DNA, 22 bp, synthetic construct
  misc_feature 1..22: note = chemically synthesized
  source 1..22: mol_type = other DNA
gctgtgtcctagtatttcacat

SEQ ID NO: 135515 - DNA, 22 bp, synthetic construct
  misc_feature 1..22: note = chemically synthesized
  source 1..22: mol_type = other DNA
tgtcctagtatttcacatcact

SEQ ID NO: 135516 - DNA, 22 bp, synthetic construct
  misc_feature 1..22: note = chemically synthesized
  source 1..22: mol_type = other DNA
gtatttcacatcactgtgatgg

SEQ ID NO: 135517 - DNA, 22 bp, synthetic construct
  misc_feature 1..22: note = chemically synthesized
  source 1..22: mol_type = other DNA
cacatcactgtgatgggactgt

SEQ ID NO: 135518 - DNA, 22 bp, synthetic construct
  misc_feature 1..22: note = chemically synthesized
  source 1..22: mol_type = other DNA
acatcactgtgatgggactgtc

SEQ ID NO: 135519 - DNA, 22 bp, synthetic construct
  misc_feature 1..22: note = chemically synthesized
  source 1..22: mol_type = other DNA
tgatgggactgtcattcattca

SEQ ID NO: 135520 - DNA, 22 bp, synthetic construct
  misc_feature 1..22: note = chemically synthesized
  source 1..22: mol_type = other DNA
tcattcattcacaggtttggga

SEQ ID NO: 135521 - DNA, 22 bp, synthetic construct
  misc_feature 1..22: note = chemically synthesized
  source 1..22: mol_type = other DNA
attcacaggtttgggaaacatg

SEQ ID NO: 135522 - DNA, 22 bp, synthetic construct
  misc_feature 1..22: note = chemically synthesized
  source 1..22: mol_type = other DNA
acaggtttgggaaacatgcacc

SEQ ID NO: 135523 - DNA, 22 bp, synthetic construct
  misc_feature 1..22: note = chemically synthesized
  source 1..22: mol_type = other DNA
gggaaacatgcacctcatgtgg

SEQ ID NO: 135524 - DNA, 22 bp, synthetic construct
  misc_feature 1..22: note = chemically synthesized
  source 1..22: mol_type = other DNA
ggaaacatgcacctcatgtggt

SEQ ID NO: 135525 - DNA, 22 bp, synthetic construct
  misc_feature 1..22: note = chemically synthesized
  source 1..22: mol_type = other DNA
atgtggtccccattaccatgag

SEQ ID NO: 135526 - DNA, 22 bp, synthetic construct
  misc_feature 1..22: note = chemically synthesized
  source 1..22: mol_type = other DNA
ccatgagctatgtccattttct

SEQ ID NO: 135527 - DNA, 22 bp, synthetic construct
  misc_feature 1..22: note = chemically synthesized
  source 1..22: mol_type = other DNA
tgtccattttctctttcctcca

SEQ ID NO: 135528 - DNA, 22 bp, synthetic construct
  misc_feature 1..22: note = chemically synthesized
  source 1..22: mol_type = other DNA
tctctttcctccattcgtgaat

SEQ ID NO: 135529 - DNA, 22 bp, synthetic construct
  misc_feature 1..22: note = chemically synthesized
  source 1..22: mol_type = other DNA
ctctttcctccattcgtgaatc

SEQ ID NO: 135530 - DNA, 22 bp, synthetic construct
  misc_feature 1..22: note = chemically synthesized
  source 1..22: mol_type = other DNA
tctttcctccattcgtgaatcc

SEQ ID NO: 135531 - DNA, 22 bp, synthetic construct
  misc_feature 1..22: note = chemically synthesized
  source 1..22: mol_type = other DNA
tttcctccattcgtgaatccta

SEQ ID NO: 135532 - DNA, 22 bp, synthetic construct
  misc_feature 1..22: note = chemically synthesized
  source 1..22: mol_type = other DNA
tcctccattcgtgaatcctatc

SEQ ID NO: 135533 - DNA, 22 bp, synthetic construct
  misc_feature 1..22: note = chemically synthesized
  source 1..22: mol_type = other DNA
cctccattcgtgaatcctatca

SEQ ID NO: 135534 - DNA, 22 bp, synthetic construct
  misc_feature 1..22: note = chemically synthesized
  source 1..22: mol_type = other DNA
ctccattcgtgaatcctatcat

SEQ ID NO: 135535 - DNA, 22 bp, synthetic construct
  misc_feature 1..22: note = chemically synthesized
  source 1..22: mol_type = other DNA
cattcgtgaatcctatcattta

SEQ ID NO: 135536 - DNA, 22 bp, synthetic construct
  misc_feature 1..22: note = chemically synthesized
  source 1..22: mol_type = other DNA
gtgaatcctatcatttatagca

SEQ ID NO: 135537 - DNA, 22 bp, synthetic construct
  misc_feature 1..22: note = chemically synthesized
  source 1..22: mol_type = other DNA
tcatttatagcatcaagaccaa

SEQ ID NO: 135538 - DNA, 22 bp, synthetic construct
  misc_feature 1..22: note = chemically synthesized
  source 1..22: mol_type = other DNA
atagcatcaagaccaagcagat

SEQ ID NO: 135539 - DNA, 22 bp, synthetic construct
  misc_feature 1..22: note = chemically synthesized
  source 1..22: mol_type = other DNA
tagcatcaagaccaagcagatt

SEQ ID NO: 135540 - DNA, 22 bp, synthetic construct
  misc_feature 1..22: note = chemically synthesized
  source 1..22: mol_type = other DNA
aaagaagcattattcgcctatt

SEQ ID NO: 135541 - DNA, 22 bp, synthetic construct
  misc_feature 1..22: note = chemically synthesized
  source 1..22: mol_type = other DNA
ttcgcctattttctgggcagag

SEQ ID NO: 135542 - DNA, 22 bp, synthetic construct
  misc_feature 1..22: note = chemically synthesized
  source 1..22: mol_type = other DNA
gcctattttctgggcagagtag

SEQ ID NO: 135543 - DNA, 22 bp, synthetic construct
  misc_feature 1..22: note = chemically synthesized
  source 1..22: mol_type = other DNA
ttttctgggcagagtagggctt

SEQ ID NO: 135544 - DNA, 22 bp, synthetic construct
  misc_feature 1..22: note = chemically synthesized
  source 1..22: mol_type = other DNA
tctgggcagagtagggcttgag

SEQ ID NO: 135545 - DNA, 22 bp, synthetic construct
  misc_feature 1..22: note = chemically synthesized
  source 1..22: mol_type = other DNA
ctgggcagagtagggcttgagc

SEQ ID NO: 135546 - DNA, 22 bp, synthetic construct
  misc_feature 1..22: note = chemically synthesized
  source 1..22: mol_type = other DNA
tgggcagagtagggcttgagcc

SEQ ID NO: 135547 - DNA, 22 bp, synthetic construct
  misc_feature 1..22: note = chemically synthesized
  source 1..22: mol_type = other DNA
ggcagagtagggcttgagccct

SEQ ID NO: 135548 - DNA, 22 bp, synthetic construct
  misc_feature 1..22: note = chemically synthesized
  source 1..22: mol_type = other DNA
gagcccttatttcagaatctca

SEQ ID NO: 135549 - DNA, 22 bp, synthetic construct
  misc_feature 1..22: note = chemically synthesized
  source 1..22: mol_type = other DNA
agcccttatttcagaatctcaa

SEQ ID NO: 135550 - DNA, 22 bp, synthetic construct
  misc_feature 1..22: note = chemically synthesized
  source 1..22: mol_type = other DNA
atttcagaatctcaagatctct

SEQ ID NO: 135551 - DNA, 22 bp, synthetic construct
  misc_feature 1..22: note = chemically synthesized
  source 1..22: mol_type = other DNA
tttcagaatctcaagatctcta

SEQ ID NO: 135552 - DNA, 22 bp, synthetic construct
  misc_feature 1..22: note = chemically synthesized
  source 1..22: mol_type = other DNA
cagaatctcaagatctctagga

SEQ ID NO: 135553 - DNA, 22 bp, synthetic construct
  misc_feature 1..22: note = chemically synthesized
  source 1..22: mol_type = other DNA
agaatctcaagatctctaggat

SEQ ID NO: 135554 - DNA, 22 bp, synthetic construct
  misc_feature 1..22: note = chemically synthesized
  source 1..22: mol_type = other DNA
aagatctctaggatttctgggc

SEQ ID NO: 135555 - DNA, 22 bp, synthetic construct
  misc_feature 1..22: note = chemically synthesized
  source 1..22: mol_type = other DNA
taggatttctgggcctctccca

SEQ ID NO: 135556 - DNA, 22 bp, synthetic construct
  misc_feature 1..22: note = chemically synthesized
  source 1..22: mol_type = other DNA
ggatttctgggcctctcccatt

SEQ ID NO: 135557 - DNA, 22 bp, synthetic construct
  misc_feature 1..22: note = chemically synthesized
  source 1..22: mol_type = other DNA
ctgggcctctcccattactgaa

SEQ ID NO: 135558 - DNA, 22 bp, synthetic construct
  misc_feature 1..22: note = chemically synthesized
  source 1..22: mol_type = other DNA
tgggcctctcccattactgaaa

SEQ ID NO: 135559 - DNA, 22 bp, synthetic construct
  misc_feature 1..22: note = chemically synthesized
  source 1..22: mol_type = other DNA
ggcctctcccattactgaaaag

SEQ ID NO: 135560 - DNA, 22 bp, synthetic construct
  misc_feature 1..22: note = chemically synthesized
  source 1..22: mol_type = other DNA
tcccattactgaaaaggaaccc

SEQ ID NO: 135561 - DNA, 22 bp, synthetic construct
  misc_feature 1..22: note = chemically synthesized
  source 1..22: mol_type = other DNA
ccattactgaaaaggaaccctg

SEQ ID NO: 135562 - DNA, 22 bp, synthetic construct
  misc_feature 1..22: note = chemically synthesized
  source 1..22: mol_type = other DNA
ctgaaaaggaaccctggtttta

SEQ ID NO: 135563 - DNA, 22 bp, synthetic construct
  misc_feature 1..22: note = chemically synthesized
  source 1..22: mol_type = other DNA
aaaaggaaccctggttttatat

SEQ ID NO: 135564 - DNA, 22 bp, synthetic construct
  misc_feature 1..22: note = chemically synthesized
  source 1..22: mol_type = other DNA
gttttatatccacacttttttt

SEQ ID NO: 135565 - DNA, 22 bp, synthetic construct
  misc_feature 1..22: note = chemically synthesized
  source 1..22: mol_type = other DNA
tatatccacacttttttttcct

SEQ ID NO: 135566 - DNA, 22 bp, synthetic construct
  misc_feature 1..22: note = chemically synthesized
  source 1..22: mol_type = other DNA
atatccacacttttttttcctc

SEQ ID NO: 135567 - DNA, 22 bp, synthetic construct
  misc_feature 1..22: note = chemically synthesized
  source 1..22: mol_type = other DNA
tatccacacttttttttcctca

SEQ ID NO: 135568 - DNA, 22 bp, synthetic construct
  misc_feature 1..22: note = chemically synthesized
  source 1..22: mol_type = other DNA
ttttttcctcagagttagattc

SEQ ID NO: 135569 - DNA, 22 bp, synthetic construct
  misc_feature 1..22: note = chemically synthesized
  source 1..22: mol_type = other DNA
tttttcctcagagttagattca

SEQ ID NO: 135570 - DNA, 22 bp, synthetic construct
  misc_feature 1..22: note = chemically synthesized
  source 1..22: mol_type = other DNA
ttttcctcagagttagattcaa

SEQ ID NO: 135571 - DNA, 22 bp, synthetic construct
  misc_feature 1..22: note = chemically synthesized
  source 1..22: mol_type = other DNA
tttcctcagagttagattcaat

SEQ ID NO: 135572 - DNA, 22 bp, synthetic construct
  misc_feature 1..22: note = chemically synthesized
  source 1..22: mol_type = other DNA
ttcctcagagttagattcaatt

SEQ ID NO: 135573 - DNA, 22 bp, synthetic construct
  misc_feature 1..22: note = chemically synthesized
  source 1..22: mol_type = other DNA
tcctcagagttagattcaattt

SEQ ID NO: 135574 - DNA, 22 bp, synthetic construct
  misc_feature 1..22: note = chemically synthesized
  source 1..22: mol_type = other DNA
cctcagagttagattcaatttt

SEQ ID NO: 135575 - DNA, 22 bp, synthetic construct
  misc_feature 1..22: note = chemically synthesized
  source 1..22: mol_type = other DNA
ctcagagttagattcaatttta

SEQ ID NO: 135576 - DNA, 22 bp, synthetic construct
  misc_feature 1..22: note = chemically synthesized
  source 1..22: mol_type = other DNA
agagttagattcaattttaatt

SEQ ID NO: 135577 - DNA, 22 bp, synthetic construct
  misc_feature 1..22: note = chemically synthesized
  source 1..22: mol_type = other DNA
gattcaattttaattatcacat

SEQ ID NO: 135578 - DNA, 22 bp, synthetic construct
  misc_feature 1..22: note = chemically synthesized
  source 1..22: mol_type = other DNA
aattttaattatcacatgaaaa

SEQ ID NO: 135579 - DNA, 22 bp, synthetic construct
  misc_feature 1..22: note = chemically synthesized
  source 1..22: mol_type = other DNA
taattatcacatgaaaaagctg

SEQ ID NO: 135580 - DNA, 22 bp, synthetic construct
  misc_feature 1..22: note = chemically synthesized
  source 1..22: mol_type = other DNA
aattatcacatgaaaaagctga

SEQ ID NO: 135581 - DNA, 22 bp, synthetic construct
  misc_feature 1..22: note = chemically synthesized
  source 1..22: mol_type = other DNA
attatcacatgaaaaagctgat

SEQ ID NO: 135582 - DNA, 22 bp, synthetic construct
  misc_feature 1..22: note = chemically synthesized
  source 1..22: mol_type = other DNA
tcacatgaaaaagctgatgtga

SEQ ID NO: 135583 - DNA, 22 bp, synthetic construct
  misc_feature 1..22: note = chemically synthesized
  source 1..22: mol_type = other DNA
atgtgagcgagaaatttttata

SEQ ID NO: 135584 - DNA, 22 bp, synthetic construct
  misc_feature 1..22: note = chemically synthesized
  source 1..22: mol_type = other DNA
ttatacatatgtgtgtgtgtgt

SEQ ID NO: 135585 - DNA, 22 bp, synthetic construct
  misc_feature 1..22: note = chemically synthesized
  source 1..22: mol_type = other DNA
tatacatatgtgtgtgtgtgtg

SEQ ID NO: 135586 - DNA, 22 bp, synthetic construct
  misc_feature 1..22: note = chemically synthesized
  source 1..22: mol_type = other DNA
atacatatgtgtgtgtgtgtgt

SEQ ID NO: 135587 - DNA, 22 bp, synthetic construct
  misc_feature 1..22: note = chemically synthesized
  source 1..22: mol_type = other DNA
tacatatgtgtgtgtgtgtgtg

SEQ ID NO: 135588 - DNA, 22 bp, synthetic construct
  misc_feature 1..22: note = chemically synthesized
  source 1..22: mol_type = other DNA
ataaagagggaatgccagtgat

SEQ ID NO: 135589 - DNA, 22 bp, synthetic construct
  misc_feature 1..22: note = chemically synthesized
  source 1..22: mol_type = other DNA
aagaaaaagaatacaggaagca

SEQ ID NO: 135590 - DNA, 22 bp, synthetic construct
  misc_feature 1..22: note = chemically synthesized
  source 1..22: mol_type = other DNA
tgatttcagaaatagtcaagat

SEQ ID NO: 135591 - DNA, 22 bp, synthetic construct
  misc_feature 1..22: note = chemically synthesized
  source 1..22: mol_type = other DNA
cagaaatagtcaagataagtgg

SEQ ID NO: 135592 - DNA, 22 bp, synthetic construct
  misc_feature 1..22: note = chemically synthesized
  source 1..22: mol_type = other DNA
agaaatagtcaagataagtgga

SEQ ID NO: 135593 - DNA, 22 bp, synthetic construct
  misc_feature 1..22: note = chemically synthesized
  source 1..22: mol_type = other DNA
aagcagcttgggtcaaatacag

SEQ ID NO: 135594 - DNA, 22 bp, synthetic construct
  misc_feature 1..22: note = chemically synthesized
  source 1..22: mol_type = other DNA
gggtcaaatacagttcatctaa

SEQ ID NO: 135595 - DNA, 22 bp, synthetic construct
  misc_feature 1..22: note = chemically synthesized
  source 1..22: mol_type = other DNA
ggtcaaatacagttcatctaaa

SEQ ID NO: 135596 - DNA, 22 bp, synthetic construct
  misc_feature 1..22: note = chemically synthesized
  source 1..22: mol_type = other DNA
atctaaagaaaaatgtgcagtt

SEQ ID NO: 135597 - DNA, 22 bp, synthetic construct
  misc_feature 1..22: note = chemically synthesized
  source 1..22: mol_type = other DNA
aagaaaaatgtgcagttggagg

SEQ ID NO: 135598 - DNA, 22 bp, synthetic construct
  misc_feature 1..22: note = chemically synthesized
  source 1..22: mol_type = other DNA
gaggtacattttatgtgtctta

SEQ ID NO: 135599 - DNA, 22 bp, synthetic construct
  misc_feature 1..22: note = chemically synthesized
  source 1..22: mol_type = other DNA
tatgtgtcttataaaggtgaat

SEQ ID NO: 135600 - DNA, 22 bp, synthetic construct
  misc_feature 1..22: note = chemically synthesized
  source 1..22: mol_type = other DNA
atgtgtcttataaaggtgaatt

SEQ ID NO: 135601 - DNA, 22 bp, synthetic construct
  misc_feature 1..22: note = chemically synthesized
  source 1..22: mol_type = other DNA
tgtgtcttataaaggtgaattt

SEQ ID NO: 135602 - DNA, 22 bp, synthetic construct
  misc_feature 1..22: note = chemically synthesized
  source 1..22: mol_type = other DNA
ataaaggtgaatttgaataata

SEQ ID NO: 135603 - DNA, 22 bp, synthetic construct
  misc_feature 1..22: note = chemically synthesized
  source 1..22: mol_type = other DNA
taaaggtgaatttgaataatac

SEQ ID NO: 135604 - DNA, 22 bp, synthetic construct
  misc_feature 1..22: note = chemically synthesized
  source 1..22: mol_type = other DNA
gaataatacatgatcatatttt

SEQ ID NO: 135605 - DNA, 22 bp, synthetic construct
  misc_feature 1..22: note = chemically synthesized
  source 1..22: mol_type = other DNA
aataatacatgatcatattttc

SEQ ID NO: 135606 - DNA, 22 bp, synthetic construct
  misc_feature 1..22: note = chemically synthesized
  source 1..22: mol_type = other DNA
tcatctccatactttgaaacta

SEQ ID NO: 135607 - DNA, 22 bp, synthetic construct
  misc_feature 1..22: note = chemically synthesized
  source 1..22: mol_type = other DNA
catctccatactttgaaactag

SEQ ID NO: 135608 - DNA, 22 bp, synthetic construct
  misc_feature 1..22: note = chemically synthesized
  source 1..22: mol_type = other DNA
atctccatactttgaaactagt

SEQ ID NO: 135609 - DNA, 22 bp, synthetic construct
  misc_feature 1..22: note = chemically synthesized
  source 1..22: mol_type = other DNA
catactttgaaactagttactc

SEQ ID NO: 135610 - DNA, 22 bp, synthetic construct
  misc_feature 1..22: note = chemically synthesized
  source 1..22: mol_type = other DNA
tgaaactagttactctgaaaag

SEQ ID NO: 135611 - DNA, 22 bp, synthetic construct
  misc_feature 1..22: note = chemically synthesized
  source 1..22: mol_type = other DNA
gaaactagttactctgaaaagg

SEQ ID NO: 135612 - DNA, 22 bp, synthetic construct
  misc_feature 1..22: note = chemically synthesized
  source 1..22: mol_type = other DNA
aaactagttactctgaaaagga

SEQ ID NO: 135613 - DNA, 22 bp, synthetic construct
  misc_feature 1..22: note = chemically synthesized
  source 1..22: mol_type = other DNA
gttactctgaaaaggatcttgc

SEQ ID NO: 135614 - DNA, 22 bp, synthetic construct
  misc_feature 1..22: note = chemically synthesized
  source 1..22: mol_type = other DNA
ctctgaaaaggatcttgcttga

SEQ ID NO: 135615 - DNA, 22 bp, synthetic construct
  misc_feature 1..22: note = chemically synthesized
  source 1..22: mol_type = other DNA
tgaaaaggatcttgcttgatta

SEQ ID NO: 135616 - DNA, 22 bp, synthetic construct
  misc_feature 1..22: note = chemically synthesized
  source 1..22: mol_type = other DNA
aaaaggatcttgcttgattagt

SEQ ID NO: 135617 - DNA, 22 bp, synthetic construct
  misc_feature 1..22: note = chemically synthesized
  source 1..22: mol_type = other DNA
gcttgattagtaagcaaacttg

SEQ ID NO: 135618 - DNA, 22 bp, synthetic construct
  misc_feature 1..22: note = chemically synthesized
  source 1..22: mol_type = other DNA
cttgattagtaagcaaacttgt

SEQ ID NO: 135619 - DNA, 22 bp, synthetic construct
  misc_feature 1..22: note = chemically synthesized
  source 1..22: mol_type = other DNA
gattagtaagcaaacttgtgtg

SEQ ID NO: 135620 - DNA, 22 bp, synthetic construct
  misc_feature 1..22: note = chemically synthesized
  source 1..22: mol_type = other DNA
attagtaagcaaacttgtgtga

SEQ ID NO: 135621 - DNA, 22 bp, synthetic construct
  misc_feature 1..22: note = chemically synthesized
  source 1..22: mol_type = other DNA
gtaagcaaacttgtgtgaggct

SEQ ID NO: 135622 - DNA, 22 bp, synthetic construct
  misc_feature 1..22: note = chemically synthesized
  source 1..22: mol_type = other DNA
gtgtgaggctaaacagcaaata

SEQ ID NO: 135623 - DNA, 22 bp, synthetic construct
  misc_feature 1..22: note = chemically synthesized
  source 1..22: mol_type = other DNA
tgtgaggctaaacagcaaatat

SEQ ID NO: 135624 - DNA, 22 bp, synthetic construct
  misc_feature 1..22: note = chemically synthesized
  source 1..22: mol_type = other DNA
aacagcaaatatctagaacttt

SEQ ID NO: 135625 - DNA, 22 bp, synthetic construct
  misc_feature 1..22: note = chemically synthesized
  source 1..22: mol_type = other DNA
gaactttaggaagcttactcat

SEQ ID NO: 135626 - DNA, 22 bp, synthetic construct
  misc_feature 1..22: note = chemically synthesized
  source 1..22: mol_type = other DNA
taggaagcttactcatgaaatg

SEQ ID NO: 135627 - DNA, 22 bp, synthetic construct
  misc_feature 1..22: note = chemically synthesized
  source 1..22: mol_type = other DNA
aggaagcttactcatgaaatgt

SEQ ID NO: 135628 - DNA, 22 bp, synthetic construct
  misc_feature 1..22: note = chemically synthesized
  source 1..22: mol_type = other DNA
ggaagcttactcatgaaatgta

SEQ ID NO: 135629 - DNA, 22 bp, synthetic construct
  misc_feature 1..22: note = chemically synthesized
  source 1..22: mol_type = other DNA
actcatgaaatgtaatttccct

SEQ ID NO: 135630 - DNA, 22 bp, synthetic construct
  misc_feature 1..22: note = chemically synthesized
  source 1..22: mol_type = other DNA
ctcatgaaatgtaatttccctt

SEQ ID NO: 135631 - DNA, 22 bp, synthetic construct
  misc_feature 1..22: note = chemically synthesized
  source 1..22: mol_type = other DNA
atgaaatgtaatttcccttagt

SEQ ID NO: 135632 - DNA, 22 bp, synthetic construct
  misc_feature 1..22: note = chemically synthesized
  source 1..22: mol_type = other DNA
cccttagtagactggcatattt

SEQ ID NO: 135633 - DNA, 22 bp, synthetic construct
  misc_feature 1..22: note = chemically synthesized
  source 1..22: mol_type = other DNA
ccttagtagactggcatatttt

SEQ ID NO: 135634 - DNA, 22 bp, synthetic construct
  misc_feature 1..22: note = chemically synthesized
  source 1..22: mol_type = other DNA
agtagactggcatattttacta

SEQ ID NO: 135635 - DNA, 22 bp, synthetic construct
  misc_feature 1..22: note = chemically synthesized
  source 1..22: mol_type = other DNA
gtagactggcatattttactac

SEQ ID NO: 135636 - DNA, 22 bp, synthetic construct
  misc_feature 1..22: note = chemically synthesized
  source 1..22: mol_type = other DNA
gcatattttactactaaaaggc

SEQ ID NO: 135637 - DNA, 22 bp, synthetic construct
  misc_feature 1..22: note = chemically synthesized
  source 1..22: mol_type = other DNA
tactactaaaaggcgtgtgata

SEQ ID NO: 135638 - DNA, 22 bp, synthetic construct
  misc_feature 1..22: note = chemically synthesized
  source 1..22: mol_type = other DNA
actactaaaaggcgtgtgatac

SEQ ID NO: 135639 - DNA, 22 bp, synthetic construct
  misc_feature 1..22: note = chemically synthesized
  source 1..22: mol_type = other DNA
ctactaaaaggcgtgtgataca

SEQ ID NO: 135640 - DNA, 22 bp, synthetic construct
  misc_feature 1..22: note = chemically synthesized
  source 1..22: mol_type = other DNA
ctaaaaggcgtgtgatacagac

SEQ ID NO: 135641 - DNA, 22 bp, synthetic construct
  misc_feature 1..22: note = chemically synthesized
  source 1..22: mol_type = other DNA
aaaggcgtgtgatacagactaa

SEQ ID NO: 135642 - DNA, 22 bp, synthetic construct
  misc_feature 1..22: note = chemically synthesized
  source 1..22: mol_type = other DNA
acagctaaatagcagcaaacac

SEQ ID NO: 135643 - DNA, 22 bp, synthetic construct
  misc_feature 1..22: note = chemically synthesized
  source 1..22: mol_type = other DNA
aatagcagcaaacacatttctt

SEQ ID NO: 135644 - DNA, 22 bp, synthetic construct
  misc_feature 1..22: note = chemically synthesized
  source 1..22: mol_type = other DNA
cttatcatctcgtggaagccag

SEQ ID NO: 135645 - DNA, 22 bp, synthetic construct
  misc_feature 1..22: note = chemically synthesized
  source 1..22: mol_type = other DNA
ttatcatctcgtggaagccaga

SEQ ID NO: 135646 - DNA, 22 bp, synthetic construct
  misc_feature 1..22: note = chemically synthesized
  source 1..22: mol_type = other DNA
atcatctcgtggaagccagata

SEQ ID NO: 135647 - DNA, 22 bp, synthetic construct
  misc_feature 1..22: note = chemically synthesized
  source 1..22: mol_type = other DNA
tcatctcgtggaagccagatat

SEQ ID NO: 135648 - DNA, 22 bp, synthetic construct
  misc_feature 1..22: note = chemically synthesized
  source 1..22: mol_type = other DNA
gtggaagccagatatcccagcc

SEQ ID NO: 135649 - DNA, 22 bp, synthetic construct
  misc_feature 1..22: note = chemically synthesized
  source 1..22: mol_type = other DNA
tccttcttcccattgtctgctg

SEQ ID NO: 135650 - DNA, 22 bp, synthetic construct
  misc_feature 1..22: note = chemically synthesized
  source 1..22: mol_type = other DNA
ccttcttcccattgtctgctga

SEQ ID NO: 135651 - DNA, 22 bp, synthetic construct
  misc_feature 1..22: note = chemically synthesized
  source 1..22: mol_type = other DNA
cttcttcccattgtctgctgaa

SEQ ID NO: 135652 - DNA, 22 bp, synthetic construct
  misc_feature 1..22: note = chemically synthesized
  source 1..22: mol_type = other DNA
cttcccattgtctgctgaaact

SEQ ID NO: 135653 - DNA, 22 bp, synthetic construct
  misc_feature 1..22: note = chemically synthesized
  source 1..22: mol_type = other DNA
ttcccattgtctgctgaaacta

SEQ ID NO: 135654 - DNA, 22 bp, synthetic construct
  misc_feature 1..22: note = chemically synthesized
  source 1..22: mol_type = other DNA
cccattgtctgctgaaactaac

SEQ ID NO: 135655 - DNA, 22 bp, synthetic construct
  misc_feature 1..22: note = chemically synthesized
  source 1..22: mol_type = other DNA
ccattgtctgctgaaactaact

SEQ ID NO: 135656 - DNA, 22 bp, synthetic construct
  misc_feature 1..22: note = chemically synthesized
  source 1..22: mol_type = other DNA
tctgctgaaactaacttaatac

SEQ ID NO: 135657 - DNA, 22 bp, synthetic construct
  misc_feature 1..22: note = chemically synthesized
  source 1..22: mol_type = other DNA
ctgaaactaacttaatactttt

SEQ ID NO: 135658 - DNA, 22 bp, synthetic construct
  misc_feature 1..22: note = chemically synthesized
  source 1..22: mol_type = other DNA
aaactaacttaatactttttct

SEQ ID NO: 135659 - DNA, 22 bp, synthetic construct
  misc_feature 1..22: note = chemically synthesized
  source 1..22: mol_type = other DNA
acttaatactttttcttctttc

SEQ ID NO: 135660 - DNA, 22 bp, synthetic construct
  misc_feature 1..22: note = chemically synthesized
  source 1..22: mol_type = other DNA
aatactttttcttctttccagc

SEQ ID NO: 135661 - DNA, 22 bp, synthetic construct
  misc_feature 1..22: note = chemically synthesized
  source 1..22: mol_type = other DNA
atactttttcttctttccagct

SEQ ID NO: 135662 - DNA, 22 bp, synthetic construct
  misc_feature 1..22: note = chemically synthesized
  source 1..22: mol_type = other DNA
tttcttctttccagctttctat

SEQ ID NO: 135663 - DNA, 22 bp, synthetic construct
  misc_feature 1..22: note = chemically synthesized
  source 1..22: mol_type = other DNA
ttcttctttccagctttctatt

SEQ ID NO: 135664 - DNA, 22 bp, synthetic construct
  misc_feature 1..22: note = chemically synthesized
  source 1..22: mol_type = other DNA
tcttctttccagctttctattt

SEQ ID NO: 135665 - DNA, 22 bp, synthetic construct
  misc_feature 1..22: note = chemically synthesized
  source 1..22: mol_type = other DNA
cttctttccagctttctatttt

SEQ ID NO: 135666 - DNA, 22 bp, synthetic construct
  misc_feature 1..22: note = chemically synthesized
  source 1..22: mol_type = other DNA
ttctttccagctttctattttg

SEQ ID NO: 135667 - DNA, 22 bp, synthetic construct
  misc_feature 1..22: note = chemically synthesized
  source 1..22: mol_type = other DNA
ctttccagctttctattttgtc

SEQ ID NO: 135668 - DNA, 22 bp, synthetic construct
  misc_feature 1..22: note = chemically synthesized
  source 1..22: mol_type = other DNA
tttccagctttctattttgtct

SEQ ID NO: 135669 - DNA, 22 bp, synthetic construct
  misc_feature 1..22: note = chemically synthesized
  source 1..22: mol_type = other DNA
tccagctttctattttgtctcc

SEQ ID NO: 135670 - DNA, 22 bp, synthetic construct
  misc_feature 1..22: note = chemically synthesized
  source 1..22: mol_type = other DNA
ccagctttctattttgtctcct

SEQ ID NO: 135671 - DNA, 22 bp, synthetic construct
  misc_feature 1..22: note = chemically synthesized
  source 1..22: mol_type = other DNA
cagctttctattttgtctcctg

SEQ ID NO: 135672 - DNA, 22 bp, synthetic construct
  misc_feature 1..22: note = chemically synthesized
  source 1..22: mol_type = other DNA
tctattttgtctcctgacattt

SEQ ID NO: 135673 - DNA, 22 bp, synthetic construct
  misc_feature 1..22: note = chemically synthesized
  source 1..22: mol_type = other DNA
ctattttgtctcctgacatttt

SEQ ID NO: 135674 - DNA, 22 bp, synthetic construct
  misc_feature 1..22: note = chemically synthesized
  source 1..22: mol_type = other DNA
tattttgtctcctgacattttt

SEQ ID NO: 135675 - DNA, 22 bp, synthetic construct
  misc_feature 1..22: note = chemically synthesized
  source 1..22: mol_type = other DNA
ttttgtctcctgacatttttct

SEQ ID NO: 135676 - DNA, 22 bp, synthetic construct
  misc_feature 1..22: note = chemically synthesized
  source 1..22: mol_type = other DNA
tgtctcctgacatttttcttct

SEQ ID NO: 135677 - DNA, 22 bp, synthetic construct
  misc_feature 1..22: note = chemically synthesized
  source 1..22: mol_type = other DNA
gtctcctgacatttttcttctg

SEQ ID NO: 135678 - DNA, 22 bp, synthetic construct
  misc_feature 1..22: note = chemically synthesized
  source 1..22: mol_type = other DNA
tctcctgacatttttcttctga

SEQ ID NO: 135679 - DNA, 22 bp, synthetic construct
  misc_feature 1..22: note = chemically synthesized
  source 1..22: mol_type = other DNA
ctgacatttttcttctgaaaaa

SEQ ID NO: 135680 - DNA, 22 bp, synthetic construct
  misc_feature 1..22: note = chemically synthesized
  source 1..22: mol_type = other DNA
acatttttcttctgaaaaaaat

SEQ ID NO: 135681 - DNA, 22 bp, synthetic construct
  misc_feature 1..22: note = chemically synthesized
  source 1..22: mol_type = other DNA
ttcttctgaaaaaaataaccaa

SEQ ID NO: 135682 - DNA, 22 bp, synthetic construct
  misc_feature 1..22: note = chemically synthesized
  source 1..22: mol_type = other DNA
tcttctgaaaaaaataaccaac

SEQ ID NO: 135683 - DNA, 22 bp, synthetic construct
  misc_feature 1..22: note = chemically synthesized
  source 1..22: mol_type = other DNA
cttctgaaaaaaataaccaact

SEQ ID NO: 135684 - DNA, 22 bp, synthetic construct
  misc_feature 1..22: note = chemically synthesized
  source 1..22: mol_type = other DNA
ttctgaaaaaaataaccaacta

SEQ ID NO: 135685 - DNA, 22 bp, synthetic construct
  misc_feature 1..22: note = chemically synthesized
  source 1..22: mol_type = other DNA
ctgaaaaaaataaccaactata

SEQ ID NO: 135686 - DNA, 22 bp, synthetic construct
  misc_feature 1..22: note = chemically synthesized
  source 1..22: mol_type = other DNA
tgaaaaaaataaccaactataa

SEQ ID NO: 135687 - DNA, 22 bp, synthetic construct
  misc_feature 1..22: note = chemically synthesized
  source 1..22: mol_type = other DNA
aaaaaaataaccaactataaat

SEQ ID NO: 135688 - DNA, 22 bp, synthetic construct
  misc_feature 1..22: note = chemically synthesized
  source 1..22: mol_type = other DNA
taaatttagatatcaccaccca

SEQ ID NO: 135689 - DNA, 22 bp, synthetic construct
  misc_feature 1..22: note = chemically synthesized
  source 1..22: mol_type = other DNA
agatatcaccacccatttctat

SEQ ID NO: 135690 - DNA, 22 bp, synthetic construct
  misc_feature 1..22: note = chemically synthesized
  source 1..22: mol_type = other DNA
gatatcaccacccatttctatt

SEQ ID NO: 135691 - DNA, 22 bp, synthetic construct
  misc_feature 1..22: note = chemically synthesized
  source 1..22: mol_type = other DNA
ctatttcccctcttgcttctca

SEQ ID NO: 135692 - DNA, 22 bp, synthetic construct
  misc_feature 1..22: note = chemically synthesized
  source 1..22: mol_type = other DNA
tatttcccctcttgcttctcac

SEQ ID NO: 135693 - DNA, 22 bp, synthetic construct
  misc_feature 1..22: note = chemically synthesized
  source 1..22: mol_type = other DNA
tttcccctcttgcttctcacat

SEQ ID NO: 135694 - DNA, 22 bp, synthetic construct
  misc_feature 1..22: note = chemically synthesized
  source 1..22: mol_type = other DNA
cccctcttgcttctcacataaa

SEQ ID NO: 135695 - DNA, 22 bp, synthetic construct
  misc_feature 1..22: note = chemically synthesized
  source 1..22: mol_type = other DNA
ccctcttgcttctcacataaaa

SEQ ID NO: 135696 - DNA, 22 bp, synthetic construct
  misc_feature 1..22: note = chemically synthesized
  source 1..22: mol_type = other DNA
ttgcttctcacataaaaaatct

SEQ ID NO: 135697 - DNA, 22 bp, synthetic construct
  misc_feature 1..22: note = chemically synthesized
  source 1..22: mol_type = other DNA
gcttctcacataaaaaatctcg

SEQ ID NO: 135698 - DNA, 22 bp, synthetic construct
  misc_feature 1..22: note = chemically synthesized
  source 1..22: mol_type = other DNA
cttctcacataaaaaatctcga

SEQ ID NO: 135699 - DNA, 22 bp, synthetic construct
  misc_feature 1..22: note = chemically synthesized
  source 1..22: mol_type = other DNA
ctcacataaaaaatctcgagac

SEQ ID NO: 135700 - DNA, 22 bp, synthetic construct
  misc_feature 1..22: note = chemically synthesized
  source 1..22: mol_type = other DNA
tcacataaaaaatctcgagact

SEQ ID NO: 135701 - DNA, 22 bp, synthetic construct
  misc_feature 1..22: note = chemically synthesized
  source 1..22: mol_type = other DNA
acataaaaaatctcgagacttt

SEQ ID NO: 135702 - DNA, 22 bp, synthetic construct
  misc_feature 1..22: note = chemically synthesized
  source 1..22: mol_type = other DNA
gagactttttcacttcatgaaa

SEQ ID NO: 135703 - DNA, 22 bp, synthetic construct
  misc_feature 1..22: note = chemically synthesized
  source 1..22: mol_type = other DNA
tttcacttcatgaaatagtttt

SEQ ID NO: 135704 - DNA, 22 bp, synthetic construct
  misc_feature 1..22: note = chemically synthesized
  source 1..22: mol_type = other DNA
ttcacttcatgaaatagttttg

SEQ ID NO: 135705 - DNA, 22 bp, synthetic construct
  misc_feature 1..22: note = chemically synthesized
  source 1..22: mol_type = other DNA
tcacttcatgaaatagttttga

SEQ ID NO: 135706 - DNA, 22 bp, synthetic construct
  misc_feature 1..22: note = chemically synthesized
  source 1..22: mol_type = other DNA
cacttcatgaaatagttttgat

SEQ ID NO: 135707 - DNA, 22 bp, synthetic construct
  misc_feature 1..22: note = chemically synthesized
  source 1..22: mol_type = other DNA
acttcatgaaatagttttgata

SEQ ID NO: 135708 - DNA, 22 bp, synthetic construct
  misc_feature 1..22: note = chemically synthesized
  source 1..22: mol_type = other DNA
catgaaatagttttgataatta

SEQ ID NO: 135709 - DNA, 22 bp, synthetic construct
  misc_feature 1..22: note = chemically synthesized
  source 1..22: mol_type = other DNA
atgaaatagttttgataattaa

SEQ ID NO: 135710 - DNA, 22 bp, synthetic construct
  misc_feature 1..22: note = chemically synthesized
  source 1..22: mol_type = other DNA
tgataattaatgcaaaaacttg

SEQ ID NO: 135711 - DNA, 22 bp, synthetic construct
  misc_feature 1..22: note = chemically synthesized
  source 1..22: mol_type = other DNA
gataattaatgcaaaaacttgg

SEQ ID NO: 135712 - DNA, 22 bp, synthetic construct
  misc_feature 1..22: note = chemically synthesized
  source 1..22: mol_type = other DNA
ataattaatgcaaaaacttggc

SEQ ID NO: 135713 - DNA, 22 bp, synthetic construct
  misc_feature 1..22: note = chemically synthesized
  source 1..22: mol_type = other DNA
atgcaaaaacttggcaaaggta

SEQ ID NO: 135714 - DNA, 22 bp, synthetic construct
  misc_feature 1..22: note = chemically synthesized
  source 1..22: mol_type = other DNA
ggcaaaggtaatgttatatttt

SEQ ID NO: 135715 - DNA, 22 bp, synthetic construct
  misc_feature 1..22: note = chemically synthesized
  source 1..22: mol_type = other DNA
gcaaaggtaatgttatatttta

SEQ ID NO: 135716 - DNA, 22 bp, synthetic construct
  misc_feature 1..22: note = chemically synthesized
  source 1..22: mol_type = other DNA
tattttagaaatttttcactga

SEQ ID NO: 135717 - DNA, 22 bp, synthetic construct
  misc_feature 1..22: note = chemically synthesized
  source 1..22: mol_type = other DNA
tagaaatttttcactgatggaa

SEQ ID NO: 135718 - DNA, 22 bp, synthetic construct
  misc_feature 1..22: note = chemically synthesized
  source 1..22: mol_type = other DNA
agaaatttttcactgatggaat

SEQ ID NO: 135719 - DNA, 22 bp, synthetic construct
  misc_feature 1..22: note = chemically synthesized
  source 1..22: mol_type = other DNA
gaaatttttcactgatggaata

SEQ ID NO: 135720 - DNA, 22 bp, synthetic construct
  misc_feature 1..22: note = chemically synthesized
  source 1..22: mol_type = other DNA
ttcactgatggaatagtttctt

SEQ ID NO: 135721 - DNA, 22 bp, synthetic construct
  misc_feature 1..22: note = chemically synthesized
  source 1..22: mol_type = other DNA
tcactgatggaatagtttcttc

SEQ ID NO: 135722 - DNA, 22 bp, synthetic construct
  misc_feature 1..22: note = chemically synthesized
  source 1..22: mol_type = other DNA
cactgatggaatagtttcttcc

SEQ ID NO: 135723 - DNA, 22 bp, synthetic construct
  misc_feature 1..22: note = chemically synthesized
  source 1..22: mol_type = other DNA
actgatggaatagtttcttcct

SEQ ID NO: 135724 - DNA, 22 bp, synthetic construct
  misc_feature 1..22: note = chemically synthesized
  source 1..22: mol_type = other DNA
atggaatagtttcttccttcaa

SEQ ID NO: 135725 - DNA, 22 bp, synthetic construct
  misc_feature 1..22: note = chemically synthesized
  source 1..22: mol_type = other DNA
cttccttcaatcttcttcaaag

SEQ ID NO: 135726 - DNA, 22 bp, synthetic construct
  misc_feature 1..22: note = chemically synthesized
  source 1..22: mol_type = other DNA
ttccttcaatcttcttcaaagt

SEQ ID NO: 135727 - DNA, 22 bp, synthetic construct
  misc_feature 1..22: note = chemically synthesized
  source 1..22: mol_type = other DNA
ccttcaatcttcttcaaagtgt

SEQ ID NO: 135728 - DNA, 22 bp, synthetic construct
  misc_feature 1..22: note = chemically synthesized
  source 1..22: mol_type = other DNA
cttcaatcttcttcaaagtgtt

SEQ ID NO: 135729 - DNA, 22 bp, synthetic construct
  misc_feature 1..22: note = chemically synthesized
  source 1..22: mol_type = other DNA
caatcttcttcaaagtgtttgt

SEQ ID NO: 135730 - DNA, 22 bp, synthetic construct
  misc_feature 1..22: note = chemically synthesized
  source 1..22: mol_type = other DNA
aatcttcttcaaagtgtttgta

SEQ ID NO: 135731 - DNA, 22 bp, synthetic construct
  misc_feature 1..22: note = chemically synthesized
  source 1..22: mol_type = other DNA
cttcaaagtgtttgtaagtctt

SEQ ID NO: 135732 - DNA, 22 bp, synthetic construct
  misc_feature 1..22: note = chemically synthesized
  source 1..22: mol_type = other DNA
ttcaaagtgtttgtaagtcttt

SEQ ID NO: 135733 - DNA, 22 bp, synthetic construct
  misc_feature 1..22: note = chemically synthesized
  source 1..22: mol_type = other DNA
caaagtgtttgtaagtctttat

SEQ ID NO: 135734 - DNA, 22 bp, synthetic construct
  misc_feature 1..22: note = chemically synthesized
  source 1..22: mol_type = other DNA
aaagtgtttgtaagtctttatg

SEQ ID NO: 135735 - DNA, 22 bp, synthetic construct
  misc_feature 1..22: note = chemically synthesized
  source 1..22: mol_type = other DNA
gtaagtctttatgctgttcatt

SEQ ID NO: 135736 - DNA, 22 bp, synthetic construct
  misc_feature 1..22: note = chemically synthesized
  source 1..22: mol_type = other DNA
taagtctttatgctgttcattg

SEQ ID NO: 135737 - DNA, 22 bp, synthetic construct
  misc_feature 1..22: note = chemically synthesized
  source 1..22: mol_type = other DNA
tatgctgttcattgggtctgaa

SEQ ID NO: 135738 - DNA, 22 bp, synthetic construct
  misc_feature 1..22: note = chemically synthesized
  source 1..22: mol_type = other DNA
atgctgttcattgggtctgaac

SEQ ID NO: 135739 - DNA, 22 bp, synthetic construct
  misc_feature 1..22: note = chemically synthesized
  source 1..22: mol_type = other DNA
tgctgttcattgggtctgaacc

SEQ ID NO: 135740 - DNA, 22 bp, synthetic construct
  misc_feature 1..22: note = chemically synthesized
  source 1..22: mol_type = other DNA
ttcattgggtctgaaccgcagt

SEQ ID NO: 135741 - DNA, 22 bp, synthetic construct
  misc_feature 1..22: note = chemically synthesized
  source 1..22: mol_type = other DNA
attgggtctgaaccgcagtcta

SEQ ID NO: 135742 - DNA, 22 bp, synthetic construct
  misc_feature 1..22: note = chemically synthesized
  source 1..22: mol_type = other DNA
ggtctgaaccgcagtctaccac

SEQ ID NO: 135743 - DNA, 22 bp, synthetic construct
  misc_feature 1..22: note = chemically synthesized
  source 1..22: mol_type = other DNA
aaccgcagtctaccacttgcta

SEQ ID NO: 135744 - DNA, 22 bp, synthetic construct
  misc_feature 1..22: note = chemically synthesized
  source 1..22: mol_type = other DNA
ccacttgctattagtgtaacag

SEQ ID NO: 135745 - DNA, 22 bp, synthetic construct
  misc_feature 1..22: note = chemically synthesized
  source 1..22: mol_type = other DNA
gctattagtgtaacaggggatg

SEQ ID NO: 135746 - DNA, 22 bp, synthetic construct
  misc_feature 1..22: note = chemically synthesized
  source 1..22: mol_type = other DNA
ctattagtgtaacaggggatga

SEQ ID NO: 135747 - DNA, 22 bp, synthetic construct
  misc_feature 1..22: note = chemically synthesized
  source 1..22: mol_type = other DNA
ttagtgtaacaggggatgacaa

SEQ ID NO: 135748 - DNA, 22 bp, synthetic construct
  misc_feature 1..22: note = chemically synthesized
  source 1..22: mol_type = other DNA
gtgtaacaggggatgacaattt

SEQ ID NO: 135749 - DNA, 22 bp, synthetic construct
  misc_feature 1..22: note = chemically synthesized
  source 1..22: mol_type = other DNA
cttcatctactgctagttctgc

SEQ ID NO: 135750 - DNA, 22 bp, synthetic construct
  misc_feature 1..22: note = chemically synthesized
  source 1..22: mol_type = other DNA
ttcatctactgctagttctgcg

SEQ ID NO: 135751 - DNA, 22 bp, synthetic construct
  misc_feature 1..22: note = chemically synthesized
  source 1..22: mol_type = other DNA
catctactgctagttctgcgct

SEQ ID NO: 135752 - DNA, 22 bp, synthetic construct
  misc_feature 1..22: note = chemically synthesized
  source 1..22: mol_type = other DNA
atctactgctagttctgcgcta

SEQ ID NO: 135753 - DNA, 22 bp, synthetic construct
  misc_feature 1..22: note = chemically synthesized
  source 1..22: mol_type = other DNA
ctgctagttctgcgctagtatt

SEQ ID NO: 135754 - DNA, 22 bp, synthetic construct
  misc_feature 1..22: note = chemically synthesized
  source 1..22: mol_type = other DNA
ctagttctgcgctagtatttgc

SEQ ID NO: 135755 - DNA, 22 bp, synthetic construct
  misc_feature 1..22: note = chemically synthesized
  source 1..22: mol_type = other DNA
gttctgcgctagtatttgcagc

SEQ ID NO: 135756 - DNA, 22 bp, synthetic construct
  misc_feature 1..22: note = chemically synthesized
  source 1..22: mol_type = other DNA
tgcgctagtatttgcagctgat

SEQ ID NO: 135757 - DNA, 22 bp, synthetic construct
  misc_feature 1..22: note = chemically synthesized
  source 1..22: mol_type = other DNA
cgctagtatttgcagctgatct

SEQ ID NO: 135758 - DNA, 22 bp, synthetic construct
  misc_feature 1..22: note = chemically synthesized
  source 1..22: mol_type = other DNA
gtatttgcagctgatctcctta

SEQ ID NO: 135759 - DNA, 22 bp, synthetic construct
  misc_feature 1..22: note = chemically synthesized
  source 1..22: mol_type = other DNA
gcagctgatctccttataggaa

SEQ ID NO: 135760 - DNA, 22 bp, synthetic construct
  misc_feature 1..22: note = chemically synthesized
  source 1..22: mol_type = other DNA
cagctgatctccttataggaaa

SEQ ID NO: 135761 - DNA, 22 bp, synthetic construct
  misc_feature 1..22: note = chemically synthesized
  source 1..22: mol_type = other DNA
atctccttataggaaactaatc

SEQ ID NO: 135762 - DNA, 22 bp, synthetic construct
  misc_feature 1..22: note = chemically synthesized
  source 1..22: mol_type = other DNA
cttataggaaactaatctcaaa

SEQ ID NO: 135763 - DNA, 22 bp, synthetic construct
  misc_feature 1..22: note = chemically synthesized
  source 1..22: mol_type = other DNA
ataggaaactaatctcaaaagt

SEQ ID NO: 135764 - DNA, 22 bp, synthetic construct
  misc_feature 1..22: note = chemically synthesized
  source 1..22: mol_type = other DNA
taggaaactaatctcaaaagtt

SEQ ID NO: 135765 - DNA, 22 bp, synthetic construct
  misc_feature 1..22: note = chemically synthesized
  source 1..22: mol_type = other DNA
atctcaaaagttgcattcattc

SEQ ID NO: 135766 - DNA, 22 bp, synthetic construct
  misc_feature 1..22: note = chemically synthesized
  source 1..22: mol_type = other DNA
aaaagttgcattcattcctctc

SEQ ID NO: 135767 - DNA, 22 bp, synthetic construct
  misc_feature 1..22: note = chemically synthesized
  source 1..22: mol_type = other DNA
cattcattcctctctgaagact

SEQ ID NO: 135768 - DNA, 22 bp, synthetic construct
  misc_feature 1..22: note = chemically synthesized
  source 1..22: mol_type = other DNA
attcctctctgaagactgctgt

SEQ ID NO: 135769 - DNA, 22 bp, synthetic construct
  misc_feature 1..22: note = chemically synthesized
  source 1..22: mol_type = other DNA
ctctctgaagactgctgtttct

SEQ ID NO: 135770 - DNA, 22 bp, synthetic construct
  misc_feature 1..22: note = chemically synthesized
  source 1..22: mol_type = other DNA
tctgaagactgctgtttcttcc

SEQ ID NO: 135771 - DNA, 22 bp, synthetic construct
  misc_feature 1..22: note = chemically synthesized
  source 1..22: mol_type = other DNA
tgaagactgctgtttcttccaa

SEQ ID NO: 135772 - DNA, 22 bp, synthetic construct
  misc_feature 1..22: note = chemically synthesized
  source 1..22: mol_type = other DNA
aagactgctgtttcttccaatt

SEQ ID NO: 135773 - DNA, 22 bp, synthetic construct
  misc_feature 1..22: note = chemically synthesized
  source 1..22: mol_type = other DNA
ctgtttcttccaatttttaagt

SEQ ID NO: 135774 - DNA, 22 bp, synthetic construct
  misc_feature 1..22: note = chemically synthesized
  source 1..22: mol_type = other DNA
tttcttccaatttttaagttct

SEQ ID NO: 135775 - DNA, 22 bp, synthetic construct
  misc_feature 1..22: note = chemically synthesized
  source 1..22: mol_type = other DNA
cttccaatttttaagttctcgt

SEQ ID NO: 135776 - DNA, 22 bp, synthetic construct
  misc_feature 1..22: note = chemically synthesized
  source 1..22: mol_type = other DNA
ttccaatttttaagttctcgtt

SEQ ID NO: 135777 - DNA, 22 bp, synthetic construct
  misc_feature 1..22: note = chemically synthesized
  source 1..22: mol_type = other DNA
ccaatttttaagttctcgttga

SEQ ID NO: 135778 - DNA, 22 bp, synthetic construct
  misc_feature 1..22: note = chemically synthesized
  source 1..22: mol_type = other DNA
caatttttaagttctcgttgag

SEQ ID NO: 135779 - DNA, 22 bp, synthetic construct
  misc_feature 1..22: note = chemically synthesized
  source 1..22: mol_type = other DNA
ttaagttctcgttgagcttgct

SEQ ID NO: 135780 - DNA, 22 bp, synthetic construct
  misc_feature 1..22: note = chemically synthesized
  source 1..22: mol_type = other DNA
taagttctcgttgagcttgctt

SEQ ID NO: 135781 - DNA, 22 bp, synthetic construct
  misc_feature 1..22: note = chemically synthesized
  source 1..22: mol_type = other DNA
aagttctcgttgagcttgcttc

SEQ ID NO: 135782 - DNA, 22 bp, synthetic construct
  misc_feature 1..22: note = chemically synthesized
  source 1..22: mol_type = other DNA
agttctcgttgagcttgcttct

SEQ ID NO: 135783 - DNA, 22 bp, synthetic construct
  misc_feature 1..22: note = chemically synthesized
  source 1..22: mol_type = other DNA
tcgttgagcttgcttctaatat

SEQ ID NO: 135784 - DNA, 22 bp, synthetic construct
  misc_feature 1..22: note = chemically synthesized
  source 1..22: mol_type = other DNA
gttgagcttgcttctaatattt

SEQ ID NO: 135785 - DNA, 22 bp, synthetic construct
  misc_feature 1..22: note = chemically synthesized
  source 1..22: mol_type = other DNA
agcttgcttctaatattttctt

SEQ ID NO: 135786 - DNA, 22 bp, synthetic construct
  misc_feature 1..22: note = chemically synthesized
  source 1..22: mol_type = other DNA
gcttctaatattttcttttctg

SEQ ID NO: 135787 - DNA, 22 bp, synthetic construct
  misc_feature 1..22: note = chemically synthesized
  source 1..22: mol_type = other DNA
cttctaatattttcttttctga

SEQ ID NO: 135788 - DNA, 22 bp, synthetic construct
  misc_feature 1..22: note = chemically synthesized
  source 1..22: mol_type = other DNA
ctaatattttcttttctgattg

SEQ ID NO: 135789 - DNA, 22 bp, synthetic construct
  misc_feature 1..22: note = chemically synthesized
  source 1..22: mol_type = other DNA
taatattttcttttctgattga

SEQ ID NO: 135790 - DNA, 22 bp, synthetic construct
  misc_feature 1..22: note = chemically synthesized
  source 1..22: mol_type = other DNA
atattttcttttctgattgaaa

SEQ ID NO: 135791 - DNA, 22 bp, synthetic construct
  misc_feature 1..22: note = chemically synthesized
  source 1..22: mol_type = other DNA
tcttttctgattgaaagtccat

SEQ ID NO: 135792 - DNA, 22 bp, synthetic construct
  misc_feature 1..22: note = chemically synthesized
  source 1..22: mol_type = other DNA
cttttctgattgaaagtccatg

SEQ ID NO: 135793 - DNA, 22 bp, synthetic construct
  misc_feature 1..22: note = chemically synthesized
  source 1..22: mol_type = other DNA
ttttctgattgaaagtccatgt

SEQ ID NO: 135794 - DNA, 22 bp, synthetic construct
  misc_feature 1..22: note = chemically synthesized
  source 1..22: mol_type = other DNA
ttctgattgaaagtccatgttc

SEQ ID NO: 135795 - DNA, 22 bp, synthetic construct
  misc_feature 1..22: note = chemically synthesized
  source 1..22: mol_type = other DNA
tctgattgaaagtccatgttca

SEQ ID NO: 135796 - DNA, 22 bp, synthetic construct
  misc_feature 1..22: note = chemically synthesized
  source 1..22: mol_type = other DNA
ctgattgaaagtccatgttcag

SEQ ID NO: 135797 - DNA, 22 bp, synthetic construct
  misc_feature 1..22: note = chemically synthesized
  source 1..22: mol_type = other DNA
tgattgaaagtccatgttcaga

SEQ ID NO: 135798 - DNA, 22 bp, synthetic construct
  misc_feature 1..22: note = chemically synthesized
  source 1..22: mol_type = other DNA
attgaaagtccatgttcagaac

SEQ ID NO: 135799 - DNA, 22 bp, synthetic construct
  misc_feature 1..22: note = chemically synthesized
  source 1..22: mol_type = other DNA
aaagtccatgttcagaacccag

SEQ ID NO: 135800 - DNA, 22 bp, synthetic construct
  misc_feature 1..22: note = chemically synthesized
  source 1..22: mol_type = other DNA
agaacccagtatataattattc

SEQ ID NO: 135801 - DNA, 22 bp, synthetic construct
  misc_feature 1..22: note = chemically synthesized
  source 1..22: mol_type = other DNA
ttccattctaaattctctctgc

SEQ ID NO: 135802 - DNA, 22 bp, synthetic construct
  misc_feature 1..22: note = chemically synthesized
  source 1..22: mol_type = other DNA
cattctaaattctctctgcttc

SEQ ID NO: 135803 - DNA, 22 bp, synthetic construct
  misc_feature 1..22: note = chemically synthesized
  source 1..22: mol_type = other DNA
taaattctctctgcttcactta

SEQ ID NO: 135804 - DNA, 22 bp, synthetic construct
  misc_feature 1..22: note = chemically synthesized
  source 1..22: mol_type = other DNA
aattctctctgcttcacttaag

SEQ ID NO: 135805 - DNA, 22 bp, synthetic construct
  misc_feature 1..22: note = chemically synthesized
  source 1..22: mol_type = other DNA
tctctgcttcacttaagaaatc

SEQ ID NO: 135806 - DNA, 22 bp, synthetic construct
  misc_feature 1..22: note = chemically synthesized
  source 1..22: mol_type = other DNA
tctgcttcacttaagaaatctt

SEQ ID NO: 135807 - DNA, 22 bp, synthetic construct
  misc_feature 1..22: note = chemically synthesized
  source 1..22: mol_type = other DNA
tgcttcacttaagaaatctttc

SEQ ID NO: 135808 - DNA, 22 bp, synthetic construct
  misc_feature 1..22: note = chemically synthesized
  source 1..22: mol_type = other DNA
cttcacttaagaaatctttcat

SEQ ID NO: 135809 - DNA, 22 bp, synthetic construct
  misc_feature 1..22: note = chemically synthesized
  source 1..22: mol_type = other DNA
cacttaagaaatctttcatatt

SEQ ID NO: 135810 - DNA, 22 bp, synthetic construct
  misc_feature 1..22: note = chemically synthesized
  source 1..22: mol_type = other DNA
acttaagaaatctttcatattt

SEQ ID NO: 135811 - DNA, 22 bp, synthetic construct
  misc_feature 1..22: note = chemically synthesized
  source 1..22: mol_type = other DNA
aagaaatctttcatatttattt

SEQ ID NO: 135812 - DNA, 22 bp, synthetic construct
  misc_feature 1..22: note = chemically synthesized
  source 1..22: mol_type = other DNA
agaaatctttcatatttatttt

SEQ ID NO: 135813 - DNA, 22 bp, synthetic construct
  misc_feature 1..22: note = chemically synthesized
  source 1..22: mol_type = other DNA
tcatatttattttacatctgga

SEQ ID NO: 135814 - DNA, 22 bp, synthetic construct
  misc_feature 1..22: note = chemically synthesized
  source 1..22: mol_type = other DNA
catatttattttacatctggac

SEQ ID NO: 135815 - DNA, 22 bp, synthetic construct
  misc_feature 1..22: note = chemically synthesized
  source 1..22: mol_type = other DNA
atatttattttacatctggaca

SEQ ID NO: 135816 - DNA, 22 bp, synthetic construct
  misc_feature 1..22: note = chemically synthesized
  source 1..22: mol_type = other DNA
attttacatctggacagtgagc

SEQ ID NO: 135817 - DNA, 22 bp, synthetic construct
  misc_feature 1..22: note = chemically synthesized
  source 1..22: mol_type = other DNA
ttttacatctggacagtgagca

SEQ ID NO: 135818 - DNA, 22 bp, synthetic construct
  misc_feature 1..22: note = chemically synthesized
  source 1..22: mol_type = other DNA
tacatctggacagtgagcactc

SEQ ID NO: 135819 - DNA, 22 bp, synthetic construct
  misc_feature 1..22: note = chemically synthesized
  source 1..22: mol_type = other DNA
acatctggacagtgagcactct

SEQ ID NO: 135820 - DNA, 22 bp, synthetic construct
  misc_feature 1..22: note = chemically synthesized
  source 1..22: mol_type = other DNA
catctggacagtgagcactctg

SEQ ID NO: 135821 - DNA, 22 bp, synthetic construct
  misc_feature 1..22: note = chemically synthesized
  source 1..22: mol_type = other DNA
gacagtgagcactctgaaaata

SEQ ID NO: 135822 - DNA, 22 bp, synthetic construct
  misc_feature 1..22: note = chemically synthesized
  source 1..22: mol_type = other DNA
tgaaaatattccagagatttga

SEQ ID NO: 135823 - DNA, 22 bp, synthetic construct
  misc_feature 1..22: note = chemically synthesized
  source 1..22: mol_type = other DNA
aaaatattccagagatttgata

SEQ ID NO: 135824 - DNA, 22 bp, synthetic construct
  misc_feature 1..22: note = chemically synthesized
  source 1..22: mol_type = other DNA
cagagatttgataagaaaatac

SEQ ID NO: 135825 - DNA, 22 bp, synthetic construct
  misc_feature 1..22: note = chemically synthesized
  source 1..22: mol_type = other DNA
gataagaaaatacttactgaaa

SEQ ID NO: 135826 - DNA, 22 bp, synthetic construct
  misc_feature 1..22: note = chemically synthesized
  source 1..22: mol_type = other DNA
ataagaaaatacttactgaaaa

SEQ ID NO: 135827 - DNA, 22 bp, synthetic construct
  misc_feature 1..22: note = chemically synthesized
  source 1..22: mol_type = other DNA
actgaaaactaaagctaaataa

SEQ ID NO: 135828 - DNA, 22 bp, synthetic construct
  misc_feature 1..22: note = chemically synthesized
  source 1..22: mol_type = other DNA
ctgaaaactaaagctaaataat

SEQ ID NO: 135829 - DNA, 22 bp, synthetic construct
  misc_feature 1..22: note = chemically synthesized
  source 1..22: mol_type = other DNA
aaaactaaagctaaataatgca

SEQ ID NO: 135830 - DNA, 22 bp, synthetic construct
  misc_feature 1..22: note = chemically synthesized
  source 1..22: mol_type = other DNA
aagctaaataatgcagtatttc

SEQ ID NO: 135831 - DNA, 22 bp, synthetic construct
  misc_feature 1..22: note = chemically synthesized
  source 1..22: mol_type = other DNA
aataatgcagtatttctccaaa

SEQ ID NO: 135832 - DNA, 22 bp, synthetic construct
  misc_feature 1..22: note = chemically synthesized
  source 1..22: mol_type = other DNA
ctccaaattagaaggcccattt

SEQ ID NO: 135833 - DNA, 22 bp, synthetic construct
  misc_feature 1..22: note = chemically synthesized
  source 1..22: mol_type = other DNA
tccaaattagaaggcccatttg

SEQ ID NO: 135834 - DNA, 22 bp, synthetic construct
  misc_feature 1..22: note = chemically synthesized
  source 1..22: mol_type = other DNA
caaattagaaggcccatttgga

SEQ ID NO: 135835 - DNA, 22 bp, synthetic construct
  misc_feature 1..22: note = chemically synthesized
  source 1..22: mol_type = other DNA
gaaggcccatttggatgcagga

SEQ ID NO: 135836 - DNA, 22 bp, synthetic construct
  misc_feature 1..22: note = chemically synthesized
  source 1..22: mol_type = other DNA
ggatgcaggaaaaataaaaact

SEQ ID NO: 135837 - DNA, 22 bp, synthetic construct
  misc_feature 1..22: note = chemically synthesized
  source 1..22: mol_type = other DNA
gatgcaggaaaaataaaaacta

SEQ ID NO: 135838 - DNA, 22 bp, synthetic construct
  misc_feature 1..22: note = chemically synthesized
  source 1..22: mol_type = other DNA
ataaatgactactcctgaagga

SEQ ID NO: 135839 - DNA, 22 bp, synthetic construct
  misc_feature 1..22: note = chemically synthesized
  source 1..22: mol_type = other DNA
ctcctgaaggattcagttattg

SEQ ID NO: 135840 - DNA, 22 bp, synthetic construct
  misc_feature 1..22: note = chemically synthesized
  source 1..22: mol_type = other DNA
ctgaaggattcagttattgtgc

SEQ ID NO: 135841 - DNA, 22 bp, synthetic construct
  misc_feature 1..22: note = chemically synthesized
  source 1..22: mol_type = other DNA
aaggattcagttattgtgcgaa

SEQ ID NO: 135842 - DNA, 22 bp, synthetic construct
  misc_feature 1..22: note = chemically synthesized
  source 1..22: mol_type = other DNA
agttattgtgcgaattgtttgt

SEQ ID NO: 135843 - DNA, 22 bp, synthetic construct
  misc_feature 1..22: note = chemically synthesized
  source 1..22: mol_type = other DNA
ttgtgcgaattgtttgtgagag

SEQ ID NO: 135844 - DNA, 22 bp, synthetic construct
  misc_feature 1..22: note = chemically synthesized
  source 1..22: mol_type = other DNA
tgcgaattgtttgtgagagttc

SEQ ID NO: 135845 - DNA, 22 bp, synthetic construct
  misc_feature 1..22: note = chemically synthesized
  source 1..22: mol_type = other DNA
tttgtgagagttctttgaaagt

SEQ ID NO: 135846 - DNA, 22 bp, synthetic construct
  misc_feature 1..22: note = chemically synthesized
  source 1..22: mol_type = other DNA
gtgagagttctttgaaagtagg

SEQ ID NO: 135847 - DNA, 22 bp, synthetic construct
  misc_feature 1..22: note = chemically synthesized
  source 1..22: mol_type = other DNA
tgagagttctttgaaagtagga

SEQ ID NO: 135848 - DNA, 22 bp, synthetic construct
  misc_feature 1..22: note = chemically synthesized
  source 1..22: mol_type = other DNA
tttgaaagtaggacgtgggggg

SEQ ID NO: 135849 - DNA, 22 bp, synthetic construct
  misc_feature 1..22: note = chemically synthesized
  source 1..22: mol_type = other DNA
tgaaagtaggacgtggggggtt

SEQ ID NO: 135850 - DNA, 22 bp, synthetic construct
  misc_feature 1..22: note = chemically synthesized
  source 1..22: mol_type = other DNA
gaaagtaggacgtggggggttt

SEQ ID NO: 135851 - DNA, 22 bp, synthetic construct
  misc_feature 1..22: note = chemically synthesized
  source 1..22: mol_type = other DNA
aaagtaggacgtggggggttta

SEQ ID NO: 135852 - DNA, 22 bp, synthetic construct
  misc_feature 1..22: note = chemically synthesized
  source 1..22: mol_type = other DNA
attcattgtcattttagttgtt

SEQ ID NO: 135853 - DNA, 22 bp, synthetic construct
  misc_feature 1..22: note = chemically synthesized
  source 1..22: mol_type = other DNA
ttcattgtcattttagttgtta

SEQ ID NO: 135854 - DNA, 22 bp, synthetic construct
  misc_feature 1..22: note = chemically synthesized
  source 1..22: mol_type = other DNA
attgtcattttagttgttattc

SEQ ID NO: 135855 - DNA, 22 bp, synthetic construct
  misc_feature 1..22: note = chemically synthesized
  source 1..22: mol_type = other DNA
tcattttagttgttattctctg

SEQ ID NO: 135856 - DNA, 22 bp, synthetic construct
  misc_feature 1..22: note = chemically synthesized
  source 1..22: mol_type = other DNA
tagttgttattctctgtgtaaa

SEQ ID NO: 135857 - DNA, 22 bp, synthetic construct
  misc_feature 1..22: note = chemically synthesized
  source 1..22: mol_type = other DNA
agttgttattctctgtgtaaaa

SEQ ID NO: 135858 - DNA, 22 bp, synthetic construct
  misc_feature 1..22: note = chemically synthesized
  source 1..22: mol_type = other DNA
gttgttattctctgtgtaaaat

SEQ ID NO: 135859 - DNA, 22 bp, synthetic construct
  misc_feature 1..22: note = chemically synthesized
  source 1..22: mol_type = other DNA
ttattctctgtgtaaaatttat

SEQ ID NO: 135860 - DNA, 22 bp, synthetic construct
  misc_feature 1..22: note = chemically synthesized
  source 1..22: mol_type = other DNA
ttctctgtgtaaaatttattta

SEQ ID NO: 135861 - DNA, 22 bp, synthetic construct
  misc_feature 1..22: note = chemically synthesized
  source 1..22: mol_type = other DNA
tctgtgtaaaatttatttattt

SEQ ID NO: 135862 - DNA, 22 bp, synthetic construct
  misc_feature 1..22: note = chemically synthesized
  source 1..22: mol_type = other DNA
tgtgtaaaatttatttatttgt

SEQ ID NO: 135863 - DNA, 22 bp, synthetic construct
  misc_feature 1..22: note = chemically synthesized
  source 1..22: mol_type = other DNA
tgtaaaatttatttatttgttt

SEQ ID NO: 135864 - DNA, 22 bp, synthetic construct
  misc_feature 1..22: note = chemically synthesized
  source 1..22: mol_type = other DNA
atttatttgtttttccaaagtt

SEQ ID NO: 135865 - DNA, 22 bp, synthetic construct
  misc_feature 1..22: note = chemically synthesized
  source 1..22: mol_type = other DNA
tttatttgtttttccaaagttg

SEQ ID NO: 135866 - DNA, 22 bp, synthetic construct
  misc_feature 1..22: note = chemically synthesized
  source 1..22: mol_type = other DNA
atttgtttttccaaagttggca

SEQ ID NO: 135867 - DNA, 22 bp, synthetic construct
  misc_feature 1..22: note = chemically synthesized
  source 1..22: mol_type = other DNA
tttgtttttccaaagttggcat

SEQ ID NO: 135868 - DNA, 22 bp, synthetic construct
  misc_feature 1..22: note = chemically synthesized
  source 1..22: mol_type = other DNA
gtttttccaaagttggcataca

SEQ ID NO: 135869 - DNA, 22 bp, synthetic construct
  misc_feature 1..22: note = chemically synthesized
  source 1..22: mol_type = other DNA
tttttccaaagttggcatacag

SEQ ID NO: 135870 - DNA, 22 bp, synthetic construct
  misc_feature 1..22: note = chemically synthesized
  source 1..22: mol_type = other DNA
ttccaaagttggcatacagagt

SEQ ID NO: 135871 - DNA, 22 bp, synthetic construct
  misc_feature 1..22: note = chemically synthesized
  source 1..22: mol_type = other DNA
tccaaagttggcatacagagtt

SEQ ID NO: 135872 - DNA, 22 bp, synthetic construct
  misc_feature 1..22: note = chemically synthesized
  source 1..22: mol_type = other DNA
ccaaagttggcatacagagttt

SEQ ID NO: 135873 - DNA, 22 bp, synthetic construct
  misc_feature 1..22: note = chemically synthesized
  source 1..22: mol_type = other DNA
caaagttggcatacagagttta

SEQ ID NO: 135874 - DNA, 22 bp, synthetic construct
  misc_feature 1..22: note = chemically synthesized
  source 1..22: mol_type = other DNA
gcatacagagtttattctattt

SEQ ID NO: 135875 - DNA, 22 bp, synthetic construct
  misc_feature 1..22: note = chemically synthesized
  source 1..22: mol_type = other DNA
attctatttagaaacgtcgttt

SEQ ID NO: 135876 - DNA, 22 bp, synthetic construct
  misc_feature 1..22: note = chemically synthesized
  source 1..22: mol_type = other DNA
ttctatttagaaacgtcgtttt

SEQ ID NO: 135877 - DNA, 22 bp, synthetic construct
  misc_feature 1..22: note = chemically synthesized
  source 1..22: mol_type = other DNA
tatttagaaacgtcgttttctg

SEQ ID NO: 135878 - DNA, 22 bp, synthetic construct
  misc_feature 1..22: note = chemically synthesized
  source 1..22: mol_type = other DNA
tttagaaacgtcgttttctggt

SEQ ID NO: 135879 - DNA, 22 bp, synthetic construct
  misc_feature 1..22: note = chemically synthesized
  source 1..22: mol_type = other DNA
agaaacgtcgttttctggttgc

SEQ ID NO: 135880 - DNA, 22 bp, synthetic construct
  misc_feature 1..22: note = chemically synthesized
  source 1..22: mol_type = other DNA
gaaacgtcgttttctggttgcc

SEQ ID NO: 135881 - DNA, 22 bp, synthetic construct
  misc_feature 1..22: note = chemically synthesized
  source 1..22: mol_type = other DNA
tctggttgcctttgttgtttgg

SEQ ID NO: 135882 - DNA, 22 bp, synthetic construct
  misc_feature 1..22: note = chemically synthesized
  source 1..22: mol_type = other DNA
ctggttgcctttgttgtttggt

SEQ ID NO: 135883 - DNA, 22 bp, synthetic construct
  misc_feature 1..22: note = chemically synthesized
  source 1..22: mol_type = other DNA
tggttgcctttgttgtttggtc

SEQ ID NO: 135884 - DNA, 22 bp, synthetic construct
  misc_feature 1..22: note = chemically synthesized
  source 1..22: mol_type = other DNA
gttgcctttgttgtttggtcta

SEQ ID NO: 135885 - DNA, 22 bp, synthetic construct
  misc_feature 1..22: note = chemically synthesized
  source 1..22: mol_type = other DNA
cctttgttgtttggtctaaaat

SEQ ID NO: 135886 - DNA, 22 bp, synthetic construct
  misc_feature 1..22: note = chemically synthesized
  source 1..22: mol_type = other DNA
tgttgtttggtctaaaatgcac

SEQ ID NO: 135887 - DNA, 22 bp, synthetic construct
  misc_feature 1..22: note = chemically synthesized
  source 1..22: mol_type = other DNA
gttgtttggtctaaaatgcaca

SEQ ID NO: 135888 - DNA, 22 bp, synthetic construct
  misc_feature 1..22: note = chemically synthesized
  source 1..22: mol_type = other DNA
ttgtttggtctaaaatgcacat

SEQ ID NO: 135889 - DNA, 22 bp, synthetic construct
  misc_feature 1..22: note = chemically synthesized
  source 1..22: mol_type = other DNA
tttggtctaaaatgcacattgt

SEQ ID NO: 135890 - DNA, 22 bp, synthetic construct
  misc_feature 1..22: note = chemically synthesized
  source 1..22: mol_type = other DNA
ggtctaaaatgcacattgtgct

SEQ ID NO: 135891 - DNA, 22 bp, synthetic construct
  misc_feature 1..22: note = chemically synthesized
  source 1..22: mol_type = other DNA
gtctaaaatgcacattgtgcta

SEQ ID NO: 135892 - DNA, 22 bp, synthetic construct
  misc_feature 1..22: note = chemically synthesized
  source 1..22: mol_type = other DNA
aaatgcacattgtgctaacata

SEQ ID NO: 135893 - DNA, 22 bp, synthetic construct
  misc_feature 1..22: note = chemically synthesized
  source 1..22: mol_type = other DNA
tgctaacatacaaactacattt

SEQ ID NO: 135894 - DNA, 22 bp, synthetic construct
  misc_feature 1..22: note = chemically synthesized
  source 1..22: mol_type = other DNA
acatacaaactacatttaggaa

SEQ ID NO: 135895 - DNA, 22 bp, synthetic construct
  misc_feature 1..22: note = chemically synthesized
  source 1..22: mol_type = other DNA
catttaggaaagctgcatctct

SEQ ID NO: 135896 - DNA, 22 bp, synthetic construct
  misc_feature 1..22: note = chemically synthesized
  source 1..22: mol_type = other DNA
aggaaagctgcatctctattga

SEQ ID NO: 135897 - DNA, 22 bp, synthetic construct
  misc_feature 1..22: note = chemically synthesized
  source 1..22: mol_type = other DNA
ggaaagctgcatctctattgac

SEQ ID NO: 135898 - DNA, 22 bp, synthetic construct
  misc_feature 1..22: note = chemically synthesized
  source 1..22: mol_type = other DNA
catctctattgaccactgaaag

SEQ ID NO: 135899 - DNA, 22 bp, synthetic construct
  misc_feature 1..22: note = chemically synthesized
  source 1..22: mol_type = other DNA
tattgaccactgaaaggatgtc

SEQ ID NO: 135900 - DNA, 22 bp, synthetic construct
  misc_feature 1..22: note = chemically synthesized
  source 1..22: mol_type = other DNA
ttgaccactgaaaggatgtctg

SEQ ID NO: 135901 - DNA, 22 bp, synthetic construct
  misc_feature 1..22: note = chemically synthesized
  source 1..22: mol_type = other DNA
accactgaaaggatgtctgtaa

SEQ ID NO: 135902 - DNA, 22 bp, synthetic construct
  misc_feature 1..22: note = chemically synthesized
  source 1..22: mol_type = other DNA
aaaggatgtctgtaagagtaaa

SEQ ID NO: 135903 - DNA, 22 bp, synthetic construct
  misc_feature 1..22: note = chemically synthesized
  source 1..22: mol_type = other DNA
taagagtaaaaaacatagcggt

SEQ ID NO: 135904 - DNA, 22 bp, synthetic construct
  misc_feature 1..22: note = chemically synthesized
  source 1..22: mol_type = other DNA
aaattttcaggcgaataagggt

SEQ ID NO: 135905 - DNA, 22 bp, synthetic construct
  misc_feature 1..22: note = chemically synthesized
  source 1..22: mol_type = other DNA
tcaggcgaataagggttttttg

SEQ ID NO: 135906 - DNA, 22 bp, synthetic construct
  misc_feature 1..22: note = chemically synthesized
  source 1..22: mol_type = other DNA
caggcgaataagggttttttgt

SEQ ID NO: 135907 - DNA, 22 bp, synthetic construct
  misc_feature 1..22: note = chemically synthesized
  source 1..22: mol_type = other DNA
aggcgaataagggttttttgta

SEQ ID NO: 135908 - DNA, 22 bp, synthetic construct
  misc_feature 1..22: note = chemically synthesized
  source 1..22: mol_type = other DNA
tttgtaaaaatggcaaatgtat

SEQ ID NO: 135909 - DNA, 22 bp, synthetic construct
  misc_feature 1..22: note = chemically synthesized
  source 1..22: mol_type = other DNA
ttgtaaaaatggcaaatgtatt

SEQ ID NO: 135910 - DNA, 22 bp, synthetic construct
  misc_feature 1..22: note = chemically synthesized
  source 1..22: mol_type = other DNA
tgtaaaaatggcaaatgtattt

SEQ ID NO: 135911 - DNA, 22 bp, synthetic construct
  misc_feature 1..22: note = chemically synthesized
  source 1..22: mol_type = other DNA
gtaaaaatggcaaatgtatttg

SEQ ID NO: 135912 - DNA, 22 bp, synthetic construct
  misc_feature 1..22: note = chemically synthesized
  source 1..22: mol_type = other DNA
taaaaatggcaaatgtatttgt

SEQ ID NO: 135913 - DNA, 22 bp, synthetic construct
  misc_feature 1..22: note = chemically synthesized
  source 1..22: mol_type = other DNA
gtcagtaggggattgcgatgct

SEQ ID NO: 135914 - DNA, 22 bp, synthetic construct
  misc_feature 1..22: note = chemically synthesized
  source 1..22: mol_type = other DNA
tcagtaggggattgcgatgctg

SEQ ID NO: 135915 - DNA, 22 bp, synthetic construct
  misc_feature 1..22: note = chemically synthesized
  source 1..22: mol_type = other DNA
cgatgctgttttcttgattgtt

SEQ ID NO: 135916 - DNA, 22 bp, synthetic construct
  misc_feature 1..22: note = chemically synthesized
  source 1..22: mol_type = other DNA
ttttcttgattgttataagaag

SEQ ID NO: 135917 - DNA, 22 bp, synthetic construct
  misc_feature 1..22: note = chemically synthesized
  source 1..22: mol_type = other DNA
tcttgattgttataagaagaca

SEQ ID NO: 135918 - DNA, 22 bp, synthetic construct
  misc_feature 1..22: note = chemically synthesized
  source 1..22: mol_type = other DNA
cttgattgttataagaagacag

SEQ ID NO: 135919 - DNA, 22 bp, synthetic construct
  misc_feature 1..22: note = chemically synthesized
  source 1..22: mol_type = other DNA
ttgattgttataagaagacagc

SEQ ID NO: 135920 - DNA, 22 bp, synthetic construct
  misc_feature 1..22: note = chemically synthesized
  source 1..22: mol_type = other DNA
gattgttataagaagacagcct

SEQ ID NO: 135921 - DNA, 22 bp, synthetic construct
  misc_feature 1..22: note = chemically synthesized
  source 1..22: mol_type = other DNA
attgttataagaagacagccta

SEQ ID NO: 135922 - DNA, 22 bp, synthetic construct
  misc_feature 1..22: note = chemically synthesized
  source 1..22: mol_type = other DNA
ttataagaagacagcctacaac

SEQ ID NO: 135923 - DNA, 22 bp, synthetic construct
  misc_feature 1..22: note = chemically synthesized
  source 1..22: mol_type = other DNA
taagaagacagcctacaacaat

SEQ ID NO: 135924 - DNA, 22 bp, synthetic construct
  misc_feature 1..22: note = chemically synthesized
  source 1..22: mol_type = other DNA
caacaatgtgtaaatgtgtaat

SEQ ID NO: 135925 - DNA, 22 bp, synthetic construct
  misc_feature 1..22: note = chemically synthesized
  source 1..22: mol_type = other DNA
aggggcgatgtgctgaaaataa

SEQ ID NO: 135926 - DNA, 22 bp, synthetic construct
  misc_feature 1..22: note = chemically synthesized
  source 1..22: mol_type = other DNA
ggggcgatgtgctgaaaataag

SEQ ID NO: 135927 - DNA, 22 bp, synthetic construct
  misc_feature 1..22: note = chemically synthesized
  source 1..22: mol_type = other DNA
aaaataaggtatgatagcgaag

SEQ ID NO: 135928 - DNA, 22 bp, synthetic construct
  misc_feature 1..22: note = chemically synthesized
  source 1..22: mol_type = other DNA
agaaacagaggtatctaattat

SEQ ID NO: 135929 - DNA, 22 bp, synthetic construct
  misc_feature 1..22: note = chemically synthesized
  source 1..22: mol_type = other DNA
attataaataagaagaagtggg

SEQ ID NO: 135930 - DNA, 22 bp, synthetic construct
  misc_feature 1..22: note = chemically synthesized
  source 1..22: mol_type = other DNA
taaataagaagaagtgggaaga

SEQ ID NO: 135931 - DNA, 22 bp, synthetic construct
  misc_feature 1..22: note = chemically synthesized
  source 1..22: mol_type = other DNA
agagctcaagtttactcatatg

SEQ ID NO: 135932 - DNA, 22 bp, synthetic construct
  misc_feature 1..22: note = chemically synthesized
  source 1..22: mol_type = other DNA
aagtttactcatatgttagcaa

SEQ ID NO: 135933 - DNA, 22 bp, synthetic construct
  misc_feature 1..22: note = chemically synthesized
  source 1..22: mol_type = other DNA
actcatatgttagcaagggatg

SEQ ID NO: 135934 - DNA, 22 bp, synthetic construct
  misc_feature 1..22: note = chemically synthesized
  source 1..22: mol_type = other DNA
ctcatatgttagcaagggatga

SEQ ID NO: 135935 - DNA, 22 bp, synthetic construct
  misc_feature 1..22: note = chemically synthesized
  source 1..22: mol_type = other DNA
atatgttagcaagggatgacat

SEQ ID NO: 135936 - DNA, 22 bp, synthetic construct
  misc_feature 1..22: note = chemically synthesized
  source 1..22: mol_type = other DNA
gcaagggatgacataatatgat

SEQ ID NO: 135937 - DNA, 22 bp, synthetic construct
  misc_feature 1..22: note = chemically synthesized
  source 1..22: mol_type = other DNA
tagcctattgatctttaaacag

SEQ ID NO: 135938 - DNA, 22 bp, synthetic construct
  misc_feature 1..22: note = chemically synthesized
  source 1..22: mol_type = other DNA
ttgatctttaaacagcctgtat

SEQ ID NO: 135939 - DNA, 22 bp, synthetic construct
  misc_feature 1..22: note = chemically synthesized
  source 1..22: mol_type = other DNA
atctttaaacagcctgtatcaa

SEQ ID NO: 135940 - DNA, 22 bp, synthetic construct
  misc_feature 1..22: note = chemically synthesized
  source 1..22: mol_type = other DNA
taaacagcctgtatcaatagtc

SEQ ID NO: 135941 - DNA, 22 bp, synthetic construct
  misc_feature 1..22: note = chemically synthesized
  source 1..22: mol_type = other DNA
aaacagcctgtatcaatagtca

SEQ ID NO: 135942 - DNA, 22 bp, synthetic construct
  misc_feature 1..22: note = chemically synthesized
  source 1..22: mol_type = other DNA
aacagcctgtatcaatagtcaa

SEQ ID NO: 135943 - DNA, 22 bp, synthetic construct
  misc_feature 1..22: note = chemically synthesized
  source 1..22: mol_type = other DNA
tatcaatagtcaaaaatcaatt

SEQ ID NO: 135944 - DNA, 22 bp, synthetic construct
  misc_feature 1..22: note = chemically synthesized
  source 1..22: mol_type = other DNA
aaaaggataaattttaaaaatc

SEQ ID NO: 135945 - DNA, 22 bp, synthetic construct
  misc_feature 1..22: note = chemically synthesized
  source 1..22: mol_type = other DNA
taaaaatcactcattttcttaa

SEQ ID NO: 135946 - DNA, 22 bp, synthetic construct
  misc_feature 1..22: note = chemically synthesized
  source 1..22: mol_type = other DNA
aaaaatcactcattttcttaag

SEQ ID NO: 135947 - DNA, 22 bp, synthetic construct
  misc_feature 1..22: note = chemically synthesized
  source 1..22: mol_type = other DNA
aaaatcactcattttcttaagt

SEQ ID NO: 135948 - DNA, 22 bp, synthetic construct
  misc_feature 1..22: note = chemically synthesized
  source 1..22: mol_type = other DNA
attttcttaagtaaatgtatat

SEQ ID NO: 135949 - DNA, 22 bp, synthetic construct
  misc_feature 1..22: note = chemically synthesized
  source 1..22: mol_type = other DNA
tcttaagtaaatgtatatttat

SEQ ID NO: 135950 - DNA, 22 bp, synthetic construct
  misc_feature 1..22: note = chemically synthesized
  source 1..22: mol_type = other DNA
cttaagtaaatgtatatttatg

SEQ ID NO: 135951 - DNA, 22 bp, synthetic construct
  misc_feature 1..22: note = chemically synthesized
  source 1..22: mol_type = other DNA
ttaagtaaatgtatatttatgc

SEQ ID NO: 135952 - DNA, 22 bp, synthetic construct
  misc_feature 1..22: note = chemically synthesized
  source 1..22: mol_type = other DNA
aagtaaatgtatatttatgcgt

SEQ ID NO: 135953 - DNA, 22 bp, synthetic construct
  misc_feature 1..22: note = chemically synthesized
  source 1..22: mol_type = other DNA
agtaaatgtatatttatgcgtt

SEQ ID NO: 135954 - DNA, 22 bp, synthetic construct
  misc_feature 1..22: note = chemically synthesized
  source 1..22: mol_type = other DNA
atgcgttttaattttaattata

SEQ ID NO: 135955 - DNA, 22 bp, synthetic construct
  misc_feature 1..22: note = chemically synthesized
  source 1..22: mol_type = other DNA
tgcgttttaattttaattatat

SEQ ID NO: 135956 - DNA, 22 bp, synthetic construct
  misc_feature 1..22: note = chemically synthesized
  source 1..22: mol_type = other DNA
taattttaattatattcataac

SEQ ID NO: 135957 - DNA, 22 bp, synthetic construct
  misc_feature 1..22: note = chemically synthesized
  source 1..22: mol_type = other DNA
aattttaattatattcataacc

SEQ ID NO: 135958 - DNA, 22 bp, synthetic construct
  misc_feature 1..22: note = chemically synthesized
  source 1..22: mol_type = other DNA
attttaattatattcataacct

SEQ ID NO: 135959 - DNA, 22 bp, synthetic construct
  misc_feature 1..22: note = chemically synthesized
  source 1..22: mol_type = other DNA
taattatattcataacctatat

SEQ ID NO: 135960 - DNA, 22 bp, synthetic construct
  misc_feature 1..22: note = chemically synthesized
  source 1..22: mol_type = other DNA
aattatattcataacctatata

SEQ ID NO: 135961 - DNA, 22 bp, synthetic construct
  misc_feature 1..22: note = chemically synthesized
  source 1..22: mol_type = other DNA
attatattcataacctatatat

SEQ ID NO: 135962 - DNA, 22 bp, synthetic construct
  misc_feature 1..22: note = chemically synthesized
  source 1..22: mol_type = other DNA
tattcataacctatatattata

SEQ ID NO: 135963 - DNA, 22 bp, synthetic construct
  misc_feature 1..22: note = chemically synthesized
  source 1..22: mol_type = other DNA
ataacctatatattatatttta

SEQ ID NO: 135964 - DNA, 22 bp, synthetic construct
  misc_feature 1..22: note = chemically synthesized
  source 1..22: mol_type = other DNA
tatattatattttacaacttct

SEQ ID NO: 135965 - DNA, 22 bp, synthetic construct
  misc_feature 1..22: note = chemically synthesized
  source 1..22: mol_type = other DNA
tattttacaacttcttagtttg

SEQ ID NO: 135966 - DNA, 22 bp, synthetic construct
  misc_feature 1..22: note = chemically synthesized
  source 1..22: mol_type = other DNA
tacaacttcttagtttgaaaat

SEQ ID NO: 135967 - DNA, 22 bp, synthetic construct
  misc_feature 1..22: note = chemically synthesized
  source 1..22: mol_type = other DNA
acaacttcttagtttgaaaatc

SEQ ID NO: 135968 - DNA, 22 bp, synthetic construct
  misc_feature 1..22: note = chemically synthesized
  source 1..22: mol_type = other DNA
caacttcttagtttgaaaatcc

SEQ ID NO: 135969 - DNA, 22 bp, synthetic construct
  misc_feature 1..22: note = chemically synthesized
  source 1..22: mol_type = other DNA
cttagtttgaaaatcctttcaa

SEQ ID NO: 135970 - DNA, 22 bp, synthetic construct
  misc_feature 1..22: note = chemically synthesized
  source 1..22: mol_type = other DNA
ttagtttgaaaatcctttcaat

SEQ ID NO: 135971 - DNA, 22 bp, synthetic construct
  misc_feature 1..22: note = chemically synthesized
  source 1..22: mol_type = other DNA
agtttgaaaatcctttcaatta

SEQ ID NO: 135972 - DNA, 22 bp, synthetic construct
  misc_feature 1..22: note = chemically synthesized
  source 1..22: mol_type = other DNA
gtttgaaaatcctttcaattat

SEQ ID NO: 135973 - DNA, 22 bp, synthetic construct
  misc_feature 1..22: note = chemically synthesized
  source 1..22: mol_type = other DNA
gaaaatcctttcaattattaag

SEQ ID NO: 135974 - DNA, 22 bp, synthetic construct
  misc_feature 1..22: note = chemically synthesized
  source 1..22: mol_type = other DNA
aaaatcctttcaattattaagt

SEQ ID NO: 135975 - DNA, 22 bp, synthetic construct
  misc_feature 1..22: note = chemically synthesized
  source 1..22: mol_type = other DNA
tcaattattaagtcagcatcca

SEQ ID NO: 135976 - DNA, 22 bp, synthetic construct
  misc_feature 1..22: note = chemically synthesized
  source 1..22: mol_type = other DNA
caattattaagtcagcatccac

SEQ ID NO: 135977 - DNA, 22 bp, synthetic construct
  misc_feature 1..22: note = chemically synthesized
  source 1..22: mol_type = other DNA
aattattaagtcagcatccacc

SEQ ID NO: 135978 - DNA, 22 bp, synthetic construct
  misc_feature 1..22: note = chemically synthesized
  source 1..22: mol_type = other DNA
ttaagtcagcatccacctgctg

SEQ ID NO: 135979 - DNA, 22 bp, synthetic construct
  misc_feature 1..22: note = chemically synthesized
  source 1..22: mol_type = other DNA
agtcagcatccacctgctgatc

SEQ ID NO: 135980 - DNA, 22 bp, synthetic construct
  misc_feature 1..22: note = chemically synthesized
  source 1..22: mol_type = other DNA
ctgatccagtgatatataagga

SEQ ID NO: 135981 - DNA, 22 bp, synthetic construct
  misc_feature 1..22: note = chemically synthesized
  source 1..22: mol_type = other DNA
atccagtgatatataaggacat

SEQ ID NO: 135982 - DNA, 22 bp, synthetic construct
  misc_feature 1..22: note = chemically synthesized
  source 1..22: mol_type = other DNA
attgcaccactgaagtaaaatc

SEQ ID NO: 135983 - DNA, 22 bp, synthetic construct
  misc_feature 1..22: note = chemically synthesized
  source 1..22: mol_type = other DNA
ttgcaccactgaagtaaaatca

SEQ ID NO: 135984 - DNA, 22 bp, synthetic construct
  misc_feature 1..22: note = chemically synthesized
  source 1..22: mol_type = other DNA
caccactgaagtaaaatcagtg

SEQ ID NO: 135985 - DNA, 22 bp, synthetic construct
  misc_feature 1..22: note = chemically synthesized
  source 1..22: mol_type = other DNA
aagtaaaatcagtgtcctttca

SEQ ID NO: 135986 - DNA, 22 bp, synthetic construct
  misc_feature 1..22: note = chemically synthesized
  source 1..22: mol_type = other DNA
tcaaacaagtgcagcttccaga

SEQ ID NO: 135987 - DNA, 22 bp, synthetic construct
  misc_feature 1..22: note = chemically synthesized
  source 1..22: mol_type = other DNA
caaacaagtgcagcttccagac

SEQ ID NO: 135988 - DNA, 22 bp, synthetic construct
  misc_feature 1..22: note = chemically synthesized
  source 1..22: mol_type = other DNA
aaacaagtgcagcttccagaca

SEQ ID NO: 135989 - DNA, 22 bp, synthetic construct
  misc_feature 1..22: note = chemically synthesized
  source 1..22: mol_type = other DNA
ccagacaagtctcttagacctc

SEQ ID NO: 135990 - DNA, 22 bp, synthetic construct
  misc_feature 1..22: note = chemically synthesized
  source 1..22: mol_type = other DNA
cagacaagtctcttagacctca

SEQ ID NO: 135991 - DNA, 22 bp, synthetic construct
  misc_feature 1..22: note = chemically synthesized
  source 1..22: mol_type = other DNA
ttagacctcatcctcagtctca

SEQ ID NO: 135992 - DNA, 22 bp, synthetic construct
  misc_feature 1..22: note = chemically synthesized
  source 1..22: mol_type = other DNA
agacctcatcctcagtctcacc

SEQ ID NO: 135993 - DNA, 22 bp, synthetic construct
  misc_feature 1..22: note = chemically synthesized
  source 1..22: mol_type = other DNA
gacctcatcctcagtctcaccc

SEQ ID NO: 135994 - DNA, 22 bp, synthetic construct
  misc_feature 1..22: note = chemically synthesized
  source 1..22: mol_type = other DNA
atcctcagtctcaccctgactg

SEQ ID NO: 135995 - DNA, 22 bp, synthetic construct
  misc_feature 1..22: note = chemically synthesized
  source 1..22: mol_type = other DNA
agtctcaccctgactgacaagt

SEQ ID NO: 135996 - DNA, 22 bp, synthetic construct
  misc_feature 1..22: note = chemically synthesized
  source 1..22: mol_type = other DNA
accctgactgacaagtttgcca

SEQ ID NO: 135997 - DNA, 22 bp, synthetic construct
  misc_feature 1..22: note = chemically synthesized
  source 1..22: mol_type = other DNA
actgacaagtttgccatacttg

SEQ ID NO: 135998 - DNA, 22 bp, synthetic construct
  misc_feature 1..22: note = chemically synthesized
  source 1..22: mol_type = other DNA
acaagtttgccatacttgagaa

SEQ ID NO: 135999 - DNA, 22 bp, synthetic construct
  misc_feature 1..22: note = chemically synthesized
  source 1..22: mol_type = other DNA
gccatacttgagaaccttgtga

SEQ ID NO: 136000 - DNA, 22 bp, synthetic construct
  misc_feature 1..22: note = chemically synthesized
  source 1..22: mol_type = other DNA
ccatacttgagaaccttgtgaa

SEQ ID NO: 136001 - DNA, 22 bp, synthetic construct
  misc_feature 1..22: note = chemically synthesized
  source 1..22: mol_type = other DNA
gagaaccttgtgaagcaggcgt

SEQ ID NO: 136002 - DNA, 22 bp, synthetic construct
  misc_feature 1..22: note = chemically synthesized
  source 1..22: mol_type = other DNA
agaaccttgtgaagcaggcgtt

SEQ ID NO: 136003 - DNA, 22 bp, synthetic construct
  misc_feature 1..22: note = chemically synthesized
  source 1..22: mol_type = other DNA
gtgaagcaggcgttgtgtctat

SEQ ID NO: 136004 - DNA, 22 bp, synthetic construct
  misc_feature 1..22: note = chemically synthesized
  source 1..22: mol_type = other DNA
tgaagcaggcgttgtgtctata

SEQ ID NO: 136005 - DNA, 22 bp, synthetic construct
  misc_feature 1..22: note = chemically synthesized
  source 1..22: mol_type = other DNA
tgtctataagctctcttagaga

SEQ ID NO: 136006 - DNA, 22 bp, synthetic construct
  misc_feature 1..22: note = chemically synthesized
  source 1..22: mol_type = other DNA
taagctctcttagagatctgct

SEQ ID NO: 136007 - DNA, 22 bp, synthetic construct
  misc_feature 1..22: note = chemically synthesized
  source 1..22: mol_type = other DNA
tcttagagatctgctctgagga

SEQ ID NO: 136008 - DNA, 22 bp, synthetic construct
  misc_feature 1..22: note = chemically synthesized
  source 1..22: mol_type = other DNA
ttagagatctgctctgaggaat

SEQ ID NO: 136009 - DNA, 22 bp, synthetic construct
  misc_feature 1..22: note = chemically synthesized
  source 1..22: mol_type = other DNA
agagatctgctctgaggaatta

SEQ ID NO: 136010 - DNA, 22 bp, synthetic construct
  misc_feature 1..22: note = chemically synthesized
  source 1..22: mol_type = other DNA
gagatctgctctgaggaattat

SEQ ID NO: 136011 - DNA, 22 bp, synthetic construct
  misc_feature 1..22: note = chemically synthesized
  source 1..22: mol_type = other DNA
ctctgaggaattatcaagtcag

SEQ ID NO: 136012 - DNA, 22 bp, synthetic construct
  misc_feature 1..22: note = chemically synthesized
  source 1..22: mol_type = other DNA
tgaggaattatcaagtcagcac

SEQ ID NO: 136013 - DNA, 22 bp, synthetic construct
  misc_feature 1..22: note = chemically synthesized
  source 1..22: mol_type = other DNA
aggaattatcaagtcagcacag

SEQ ID NO: 136014 - DNA, 22 bp, synthetic construct
  misc_feature 1..22: note = chemically synthesized
  source 1..22: mol_type = other DNA
tcaagtcagcacagttaattct

SEQ ID NO: 136015 - DNA, 22 bp, synthetic construct
  misc_feature 1..22: note = chemically synthesized
  source 1..22: mol_type = other DNA
attctctgtcatactgtgagtt

SEQ ID NO: 136016 - DNA, 22 bp, synthetic construct
  misc_feature 1..22: note = chemically synthesized
  source 1..22: mol_type = other DNA
tctgtcatactgtgagtttagt

SEQ ID NO: 136017 - DNA, 22 bp, synthetic construct
  misc_feature 1..22: note = chemically synthesized
  source 1..22: mol_type = other DNA
tgtcatactgtgagtttagtca

SEQ ID NO: 136018 - DNA, 22 bp, synthetic construct
  misc_feature 1..22: note = chemically synthesized
  source 1..22: mol_type = other DNA
tcatactgtgagtttagtcagg

SEQ ID NO: 136019 - DNA, 22 bp, synthetic construct
  misc_feature 1..22: note = chemically synthesized
  source 1..22: mol_type = other DNA
tgagtttagtcagggcagtaat

SEQ ID NO: 136020 - DNA, 22 bp, synthetic construct
  misc_feature 1..22: note = chemically synthesized
  source 1..22: mol_type = other DNA
agtcagggcagtaattatattt

SEQ ID NO: 136021 - DNA, 22 bp, synthetic construct
  misc_feature 1..22: note = chemically synthesized
  source 1..22: mol_type = other DNA
gtcagggcagtaattatatttc

SEQ ID NO: 136022 - DNA, 22 bp, synthetic construct
  misc_feature 1..22: note = chemically synthesized
  source 1..22: mol_type = other DNA
tatttccccatcagcatattgt

SEQ ID NO: 136023 - DNA, 22 bp, synthetic construct
  misc_feature 1..22: note = chemically synthesized
  source 1..22: mol_type = other DNA
ccccatcagcatattgtcttcc

SEQ ID NO: 136024 - DNA, 22 bp, synthetic construct
  misc_feature 1..22: note = chemically synthesized
  source 1..22: mol_type = other DNA
cccatcagcatattgtcttccc

SEQ ID NO: 136025 - DNA, 22 bp, synthetic construct
  misc_feature 1..22: note = chemically synthesized
  source 1..22: mol_type = other DNA
tcttcccaaggataactacctg

SEQ ID NO: 136026 - DNA, 22 bp, synthetic construct
  misc_feature 1..22: note = chemically synthesized
  source 1..22: mol_type = other DNA
cccaaggataactacctgccat

SEQ ID NO: 136027 - DNA, 22 bp, synthetic construct
  misc_feature 1..22: note = chemically synthesized
  source 1..22: mol_type = other DNA
ccaaggataactacctgccatt

SEQ ID NO: 136028 - DNA, 22 bp, synthetic construct
  misc_feature 1..22: note = chemically synthesized
  source 1..22: mol_type = other DNA
cctgccattctgtaaaccccca

SEQ ID NO: 136029 - DNA, 22 bp, synthetic construct
  misc_feature 1..22: note = chemically synthesized
  source 1..22: mol_type = other DNA
ccattctgtaaacccccaaatt

SEQ ID NO: 136030 - DNA, 22 bp, synthetic construct
  misc_feature 1..22: note = chemically synthesized
  source 1..22: mol_type = other DNA
tgtaaacccccaaatttattaa

SEQ ID NO: 136031 - DNA, 22 bp, synthetic construct
  misc_feature 1..22: note = chemically synthesized
  source 1..22: mol_type = other DNA
taaacccccaaatttattaatg

SEQ ID NO: 136032 - DNA, 22 bp, synthetic construct
  misc_feature 1..22: note = chemically synthesized
  source 1..22: mol_type = other DNA
attaatgcagtcctttaaaaat

SEQ ID NO: 136033 - DNA, 22 bp, synthetic construct
  misc_feature 1..22: note = chemically synthesized
  source 1..22: mol_type = other DNA
ttaatgcagtcctttaaaaata

SEQ ID NO: 136034 - DNA, 22 bp, synthetic construct
  misc_feature 1..22: note = chemically synthesized
  source 1..22: mol_type = other DNA
atgcagtcctttaaaaatacac

SEQ ID NO: 136035 - DNA, 22 bp, synthetic construct
  misc_feature 1..22: note = chemically synthesized
  source 1..22: mol_type = other DNA
taaaaatacacaatgttacttg

SEQ ID NO: 136036 - DNA, 22 bp, synthetic construct
  misc_feature 1..22: note = chemically synthesized
  source 1..22: mol_type = other DNA
aaaaatacacaatgttacttgt

SEQ ID NO: 136037 - DNA, 22 bp, synthetic construct
  misc_feature 1..22: note = chemically synthesized
  source 1..22: mol_type = other DNA
aaaatacacaatgttacttgtc

SEQ ID NO: 136038 - DNA, 22 bp, synthetic construct
  misc_feature 1..22: note = chemically synthesized
  source 1..22: mol_type = other DNA
cttgtctggtgtggctaaagct

SEQ ID NO: 136039 - DNA, 22 bp, synthetic construct
  misc_feature 1..22: note = chemically synthesized
  source 1..22: mol_type = other DNA
gtctggtgtggctaaagcttat

SEQ ID NO: 136040 - DNA, 22 bp, synthetic construct
  misc_feature 1..22: note = chemically synthesized
  source 1..22: mol_type = other DNA
tctggtgtggctaaagcttatt

SEQ ID NO: 136041 - DNA, 22 bp, synthetic construct
  misc_feature 1..22: note = chemically synthesized
  source 1..22: mol_type = other DNA
gtgtggctaaagcttatttatt

SEQ ID NO: 136042 - DNA, 22 bp, synthetic construct
  misc_feature 1..22: note = chemically synthesized
  source 1..22: mol_type = other DNA
aagcttatttatttatttattt

SEQ ID NO: 136043 - DNA, 22 bp, synthetic construct
  misc_feature 1..22: note = chemically synthesized
  source 1..22: mol_type = other DNA
atttatttatttatttatttat

SEQ ID NO: 136044 - DNA, 22 bp, synthetic construct
  misc_feature 1..22: note = chemically synthesized
  source 1..22: mol_type = other DNA
tttatttatttatttatttatt

SEQ ID NO: 136045 - DNA, 22 bp, synthetic construct
  misc_feature 1..22: note = chemically synthesized
  source 1..22: mol_type = other DNA
atttatttatttatttattttt

SEQ ID NO: 136046 - DNA, 22 bp, synthetic construct
  misc_feature 1..22: note = chemically synthesized
  source 1..22: mol_type = other DNA
tttatttatttatttattttta

SEQ ID NO: 136047 - DNA, 22 bp, synthetic construct
  misc_feature 1..22: note = chemically synthesized
  source 1..22: mol_type = other DNA
atttatttatttatttttatag

SEQ ID NO: 136048 - DNA, 22 bp, synthetic construct
  misc_feature 1..22: note = chemically synthesized
  source 1..22: mol_type = other DNA
tttatttatttatttttataga

SEQ ID NO: 136049 - DNA, 22 bp, synthetic construct
  misc_feature 1..22: note = chemically synthesized
  source 1..22: mol_type = other DNA
atttatttatttttatagacat

SEQ ID NO: 136050 - DNA, 22 bp, synthetic construct
  misc_feature 1..22: note = chemically synthesized
  source 1..22: mol_type = other DNA
tttatttatttttatagacatg

SEQ ID NO: 136051 - DNA, 22 bp, synthetic construct
  misc_feature 1..22: note = chemically synthesized
  source 1..22: mol_type = other DNA
atttatttttatagacatgatc

SEQ ID NO: 136052 - DNA, 22 bp, synthetic construct
  misc_feature 1..22: note = chemically synthesized
  source 1..22: mol_type = other DNA
tttatttttatagacatgatct

SEQ ID NO: 136053 - DNA, 22 bp, synthetic construct
  misc_feature 1..22: note = chemically synthesized
  source 1..22: mol_type = other DNA
atttttatagacatgatcttgc

SEQ ID NO: 136054 - DNA, 22 bp, synthetic construct
  misc_feature 1..22: note = chemically synthesized
  source 1..22: mol_type = other DNA
tttttatagacatgatcttgct

SEQ ID NO: 136055 - DNA, 22 bp, synthetic construct
  misc_feature 1..22: note = chemically synthesized
  source 1..22: mol_type = other DNA
ttatagacatgatcttgctctg

SEQ ID NO: 136056 - DNA, 22 bp, synthetic construct
  misc_feature 1..22: note = chemically synthesized
  source 1..22: mol_type = other DNA
tatagacatgatcttgctctgt

SEQ ID NO: 136057 - DNA, 22 bp, synthetic construct
  misc_feature 1..22: note = chemically synthesized
  source 1..22: mol_type = other DNA
atagacatgatcttgctctgtt

SEQ ID NO: 136058 - DNA, 22 bp, synthetic construct
  misc_feature 1..22: note = chemically synthesized
  source 1..22: mol_type = other DNA
tagacatgatcttgctctgttg

SEQ ID NO: 136059 - DNA, 22 bp, synthetic construct
  misc_feature 1..22: note = chemically synthesized
  source 1..22: mol_type = other DNA
gctctgttgcccaggctggagt

SEQ ID NO: 136060 - DNA, 22 bp, synthetic construct
  misc_feature 1..22: note = chemically synthesized
  source 1..22: mol_type = other DNA
ctctgttgcccaggctggagtg

SEQ ID NO: 136061 - DNA, 22 bp, synthetic construct
  misc_feature 1..22: note = chemically synthesized
  source 1..22: mol_type = other DNA
tgttgcccaggctggagtgcag

SEQ ID NO: 136062 - DNA, 22 bp, synthetic construct
  misc_feature 1..22: note = chemically synthesized
  source 1..22: mol_type = other DNA
ttgcccaggctggagtgcagtg

SEQ ID NO: 136063 - DNA, 22 bp, synthetic construct
  misc_feature 1..22: note = chemically synthesized
  source 1..22: mol_type = other DNA
cccaggctggagtgcagtggtg

SEQ ID NO: 136064 - DNA, 22 bp, synthetic construct
  misc_feature 1..22: note = chemically synthesized
  source 1..22: mol_type = other DNA
gagtgcagtggtgccatcacag

SEQ ID NO: 136065 - DNA, 22 bp, synthetic construct
  misc_feature 1..22: note = chemically synthesized
  source 1..22: mol_type = other DNA
actgcagccttgaaatcctggg

SEQ ID NO: 136066 - DNA, 22 bp, synthetic construct
  misc_feature 1..22: note = chemically synthesized
  source 1..22: mol_type = other DNA
cagccttgaaatcctgggctca

SEQ ID NO: 136067 - DNA, 22 bp, synthetic construct
  misc_feature 1..22: note = chemically synthesized
  source 1..22: mol_type = other DNA
gaaatcctgggctcaagcaatc

SEQ ID NO: 136068 - DNA, 22 bp, synthetic construct
  misc_feature 1..22: note = chemically synthesized
  source 1..22: mol_type = other DNA
aaatcctgggctcaagcaatcc

SEQ ID NO: 136069 - DNA, 22 bp, synthetic construct
  misc_feature 1..22: note = chemically synthesized
  source 1..22: mol_type = other DNA
ggctcaagcaatccttcttcct

SEQ ID NO: 136070 - DNA, 22 bp, synthetic construct
  misc_feature 1..22: note = chemically synthesized
  source 1..22: mol_type = other DNA
aagcaatccttcttcctcagct

SEQ ID NO: 136071 - DNA, 22 bp, synthetic construct
  misc_feature 1..22: note = chemically synthesized
  source 1..22: mol_type = other DNA
cttcctcagctttttgagtacc

SEQ ID NO: 136072 - DNA, 22 bp, synthetic construct
  misc_feature 1..22: note = chemically synthesized
  source 1..22: mol_type = other DNA
ttcctcagctttttgagtacct

SEQ ID NO: 136073 - DNA, 22 bp, synthetic construct
  misc_feature 1..22: note = chemically synthesized
  source 1..22: mol_type = other DNA
cctcagctttttgagtacctag

SEQ ID NO: 136074 - DNA, 22 bp, synthetic construct
  misc_feature 1..22: note = chemically synthesized
  source 1..22: mol_type = other DNA
ctcagctttttgagtacctagg

SEQ ID NO: 136075 - DNA, 22 bp, synthetic construct
  misc_feature 1..22: note = chemically synthesized
  source 1..22: mol_type = other DNA
agctttttgagtacctaggact

SEQ ID NO: 136076 - DNA, 22 bp, synthetic construct
  misc_feature 1..22: note = chemically synthesized
  source 1..22: mol_type = other DNA
tttgagtacctaggactacagg

SEQ ID NO: 136077 - DNA, 22 bp, synthetic construct
  misc_feature 1..22: note = chemically synthesized
  source 1..22: mol_type = other DNA
ttgagtacctaggactacaggt

SEQ ID NO: 136078 - DNA, 22 bp, synthetic construct
  misc_feature 1..22: note = chemically synthesized
  source 1..22: mol_type = other DNA
tgagtacctaggactacaggtt

SEQ ID NO: 136079 - DNA, 22 bp, synthetic construct
  misc_feature 1..22: note = chemically synthesized
  source 1..22: mol_type = other DNA
gagtacctaggactacaggttt

SEQ ID NO: 136080 - DNA, 22 bp, synthetic construct
  misc_feature 1..22: note = chemically synthesized
  source 1..22: mol_type = other DNA
agtacctaggactacaggttta

SEQ ID NO: 136081 - DNA, 22 bp, synthetic construct
  misc_feature 1..22: note = chemically synthesized
  source 1..22: mol_type = other DNA
ggactacaggtttatgccactg

SEQ ID NO: 136082 - DNA, 22 bp, synthetic construct
  misc_feature 1..22: note = chemically synthesized
  source 1..22: mol_type = other DNA
caggtttatgccactgcaccta

SEQ ID NO: 136083 - DNA, 22 bp, synthetic construct
  misc_feature 1..22: note = chemically synthesized
  source 1..22: mol_type = other DNA
atgccactgcacctagctaatg

SEQ ID NO: 136084 - DNA, 22 bp, synthetic construct
  misc_feature 1..22: note = chemically synthesized
  source 1..22: mol_type = other DNA
tgccactgcacctagctaatgt

SEQ ID NO: 136085 - DNA, 22 bp, synthetic construct
  misc_feature 1..22: note = chemically synthesized
  source 1..22: mol_type = other DNA
cacctagctaatgtttttattt

SEQ ID NO: 136086 - DNA, 22 bp, synthetic construct
  misc_feature 1..22: note = chemically synthesized
  source 1..22: mol_type = other DNA
gctaatgtttttattttttgta

SEQ ID NO: 136087 - DNA, 22 bp, synthetic construct
  misc_feature 1..22: note = chemically synthesized
  source 1..22: mol_type = other DNA
atgtttttattttttgtaaata

SEQ ID NO: 136088 - DNA, 22 bp, synthetic construct
  misc_feature 1..22: note = chemically synthesized
  source 1..22: mol_type = other DNA
ttattttttgtaaatatgggat

SEQ ID NO: 136089 - DNA, 22 bp, synthetic construct
  misc_feature 1..22: note = chemically synthesized
  source 1..22: mol_type = other DNA
tattttttgtaaatatgggatc

SEQ ID NO: 136090 - DNA, 22 bp, synthetic construct
  misc_feature 1..22: note = chemically synthesized
  source 1..22: mol_type = other DNA
attttttgtaaatatgggatca

SEQ ID NO: 136091 - DNA, 22 bp, synthetic construct
  misc_feature 1..22: note = chemically synthesized
  source 1..22: mol_type = other DNA
ttttttgtaaatatgggatcat

SEQ ID NO: 136092 - DNA, 22 bp, synthetic construct
  misc_feature 1..22: note = chemically synthesized
  source 1..22: mol_type = other DNA
tttgtaaatatgggatcatgtt

SEQ ID NO: 136093 - DNA, 22 bp, synthetic construct
  misc_feature 1..22: note = chemically synthesized
  source 1..22: mol_type = other DNA
ttgtaaatatgggatcatgtta

SEQ ID NO: 136094 - DNA, 22 bp, synthetic construct
  misc_feature 1..22: note = chemically synthesized
  source 1..22: mol_type = other DNA
tgtaaatatgggatcatgttat

SEQ ID NO: 136095 - DNA, 22 bp, synthetic construct
  misc_feature 1..22: note = chemically synthesized
  source 1..22: mol_type = other DNA
gtaaatatgggatcatgttatg

SEQ ID NO: 136096 - DNA, 22 bp, synthetic construct
  misc_feature 1..22: note = chemically synthesized
  source 1..22: mol_type = other DNA
taaatatgggatcatgttatgt

SEQ ID NO: 136097 - DNA, 22 bp, synthetic construct
  misc_feature 1..22: note = chemically synthesized
  source 1..22: mol_type = other DNA
tgttgccgaggctgctctccaa

SEQ ID NO: 136098 - DNA, 22 bp, synthetic construct
  misc_feature 1..22: note = chemically synthesized
  source 1..22: mol_type = other DNA
ccgaggctgctctccaattcct

SEQ ID NO: 136099 - DNA, 22 bp, synthetic construct
  misc_feature 1..22: note = chemically synthesized
  source 1..22: mol_type = other DNA
ctctccaattcctaacctcaag

SEQ ID NO: 136100 - DNA, 22 bp, synthetic construct
  misc_feature 1..22: note = chemically synthesized
  source 1..22: mol_type = other DNA
tccaattcctaacctcaagcaa

SEQ ID NO: 136101 - DNA, 22 bp, synthetic construct
  misc_feature 1..22: note = chemically synthesized
  source 1..22: mol_type = other DNA
caattcctaacctcaagcaatc

SEQ ID NO: 136102 - DNA, 22 bp, synthetic construct
  misc_feature 1..22: note = chemically synthesized
  source 1..22: mol_type = other DNA
ctaacctcaagcaatcctccca

SEQ ID NO: 136103 - DNA, 22 bp, synthetic construct
  misc_feature 1..22: note = chemically synthesized
  source 1..22: mol_type = other DNA
acctcaagcaatcctcccaccc

SEQ ID NO: 136104 - DNA, 22 bp, synthetic construct
  misc_feature 1..22: note = chemically synthesized
  source 1..22: mol_type = other DNA
aagcaatcctcccaccctggcc

SEQ ID NO: 136105 - DNA, 22 bp, synthetic construct
  misc_feature 1..22: note = chemically synthesized
  source 1..22: mol_type = other DNA
ccaccctggcctcctaatgata

SEQ ID NO: 136106 - DNA, 22 bp, synthetic construct
  misc_feature 1..22: note = chemically synthesized
  source 1..22: mol_type = other DNA
gcctcctaatgatagggacagg

SEQ ID NO: 136107 - DNA, 22 bp, synthetic construct
  misc_feature 1..22: note = chemically synthesized
  source 1..22: mol_type = other DNA
ctaatgatagggacaggaggca

SEQ ID NO: 136108 - DNA, 22 bp, synthetic construct
  misc_feature 1..22: note = chemically synthesized
  source 1..22: mol_type = other DNA
atgatagggacaggaggcagag

SEQ ID NO: 136109 - DNA, 22 bp, synthetic construct
  misc_feature 1..22: note = chemically synthesized
  source 1..22: mol_type = other DNA
taggcagaaaagggcggggtcc

SEQ ID NO: 136110 - DNA, 22 bp, synthetic construct
  misc_feature 1..22: note = chemically synthesized
  source 1..22: mol_type = other DNA
aggcagaaaagggcggggtccc

SEQ ID NO: 136111 - DNA, 22 bp, synthetic construct
  misc_feature 1..22: note = chemically synthesized
  source 1..22: mol_type = other DNA
ggcagaaaagggcggggtccct

SEQ ID NO: 136112 - DNA, 22 bp, synthetic construct
  misc_feature 1..22: note = chemically synthesized
  source 1..22: mol_type = other DNA
gcatgggtcctaccctgaagcc

SEQ ID NO: 136113 - DNA, 22 bp, synthetic construct
  misc_feature 1..22: note = chemically synthesized
  source 1..22: mol_type = other DNA
ccctgaagcctggaacatggcc

SEQ ID NO: 136114 - DNA, 22 bp, synthetic construct
  misc_feature 1..22: note = chemically synthesized
  source 1..22: mol_type = other DNA
aagcctggaacatggccattcc

SEQ ID NO: 136115 - DNA, 22 bp, synthetic construct
  misc_feature 1..22: note = chemically synthesized
  source 1..22: mol_type = other DNA
gaacatggccattcctgagata

SEQ ID NO: 136116 - DNA, 22 bp, synthetic construct
  misc_feature 1..22: note = chemically synthesized
  source 1..22: mol_type = other DNA
ctgagatatttctctcagccag

SEQ ID NO: 136117 - DNA, 22 bp, synthetic construct
  misc_feature 1..22: note = chemically synthesized
  source 1..22: mol_type = other DNA
agatatttctctcagccagaac

SEQ ID NO: 136118 - DNA, 22 bp, synthetic construct
  misc_feature 1..22: note = chemically synthesized
  source 1..22: mol_type = other DNA
ctctcagccagaactgtttcac

SEQ ID NO: 136119 - DNA, 22 bp, synthetic construct
  misc_feature 1..22: note = chemically synthesized
  source 1..22: mol_type = other DNA
tctcagccagaactgtttcaca

SEQ ID NO: 136120 - DNA, 22 bp, synthetic construct
  misc_feature 1..22: note = chemically synthesized
  source 1..22: mol_type = other DNA
tcagccagaactgtttcacatt

SEQ ID NO: 136121 - DNA, 22 bp, synthetic construct
  misc_feature 1..22: note = chemically synthesized
  source 1..22: mol_type = other DNA
agccagaactgtttcacattca

SEQ ID NO: 136122 - DNA, 22 bp, synthetic construct
  misc_feature 1..22: note = chemically synthesized
  source 1..22: mol_type = other DNA
tttcacattcacattttaagtg

SEQ ID NO: 136123 - DNA, 22 bp, synthetic construct
  misc_feature 1..22: note = chemically synthesized
  source 1..22: mol_type = other DNA
cacattcacattttaagtgcca

SEQ ID NO: 136124 - DNA, 22 bp, synthetic construct
  misc_feature 1..22: note = chemically synthesized
  source 1..22: mol_type = other DNA
acattcacattttaagtgccag

SEQ ID NO: 136125 - DNA, 22 bp, synthetic construct
  misc_feature 1..22: note = chemically synthesized
  source 1..22: mol_type = other DNA
acattttaagtgccaggtcttt

SEQ ID NO: 136126 - DNA, 22 bp, synthetic construct
  misc_feature 1..22: note = chemically synthesized
  source 1..22: mol_type = other DNA
taagtgccaggtctttctatct

SEQ ID NO: 136127 - DNA, 22 bp, synthetic construct
  misc_feature 1..22: note = chemically synthesized
  source 1..22: mol_type = other DNA
aagtgccaggtctttctatctt

SEQ ID NO: 136128 - DNA, 22 bp, synthetic construct
  misc_feature 1..22: note = chemically synthesized
  source 1..22: mol_type = other DNA
agtgccaggtctttctatcttt

SEQ ID NO: 136129 - DNA, 22 bp, synthetic construct
  misc_feature 1..22: note = chemically synthesized
  source 1..22: mol_type = other DNA
tctatctttctagctgtcttat

SEQ ID NO: 136130 - DNA, 22 bp, synthetic construct
  misc_feature 1..22: note = chemically synthesized
  source 1..22: mol_type = other DNA
ctatctttctagctgtcttatt

SEQ ID NO: 136131 - DNA, 22 bp, synthetic construct
  misc_feature 1..22: note = chemically synthesized
  source 1..22: mol_type = other DNA
tatctttctagctgtcttattc

SEQ ID NO: 136132 - DNA, 22 bp, synthetic construct
  misc_feature 1..22: note = chemically synthesized
  source 1..22: mol_type = other DNA
tctttctagctgtcttattcat

SEQ ID NO: 136133 - DNA, 22 bp, synthetic construct
  misc_feature 1..22: note = chemically synthesized
  source 1..22: mol_type = other DNA
tctagctgtcttattcatgcac

SEQ ID NO: 136134 - DNA, 22 bp, synthetic construct
  misc_feature 1..22: note = chemically synthesized
  source 1..22: mol_type = other DNA
ctagctgtcttattcatgcact

SEQ ID NO: 136135 - DNA, 22 bp, synthetic construct
  misc_feature 1..22: note = chemically synthesized
  source 1..22: mol_type = other DNA
tagctgtcttattcatgcactt

SEQ ID NO: 136136 - DNA, 22 bp, synthetic construct
  misc_feature 1..22: note = chemically synthesized
  source 1..22: mol_type = other DNA
gctgtcttattcatgcactttc

SEQ ID NO: 136137 - DNA, 22 bp, synthetic construct
  misc_feature 1..22: note = chemically synthesized
  source 1..22: mol_type = other DNA
tcttattcatgcactttctaga

SEQ ID NO: 136138 - DNA, 22 bp, synthetic construct
  misc_feature 1..22: note = chemically synthesized
  source 1..22: mol_type = other DNA
attcatgcactttctagaaatc

SEQ ID NO: 136139 - DNA, 22 bp, synthetic construct
  misc_feature 1..22: note = chemically synthesized
  source 1..22: mol_type = other DNA
ttcatgcactttctagaaatca

SEQ ID NO: 136140 - DNA, 22 bp, synthetic construct
  misc_feature 1..22: note = chemically synthesized
  source 1..22: mol_type = other DNA
atgcactttctagaaatcactt

SEQ ID NO: 136141 - DNA, 22 bp, synthetic construct
  misc_feature 1..22: note = chemically synthesized
  source 1..22: mol_type = other DNA
tctagaaatcacttgtatatta

SEQ ID NO: 136142 - DNA, 22 bp, synthetic construct
  misc_feature 1..22: note = chemically synthesized
  source 1..22: mol_type = other DNA
ctagaaatcacttgtatattaa

SEQ ID NO: 136143 - DNA, 22 bp, synthetic construct
  misc_feature 1..22: note = chemically synthesized
  source 1..22: mol_type = other DNA
tagaaatcacttgtatattaac

SEQ ID NO: 136144 - DNA, 22 bp, synthetic construct
  misc_feature 1..22: note = chemically synthesized
  source 1..22: mol_type = other DNA
gaaatcacttgtatattaacat

SEQ ID NO: 136145 - DNA, 22 bp, synthetic construct
  misc_feature 1..22: note = chemically synthesized
  source 1..22: mol_type = other DNA
gtatattaacatgcctatatta

SEQ ID NO: 136146 - DNA, 22 bp, synthetic construct
  misc_feature 1..22: note = chemically synthesized
  source 1..22: mol_type = other DNA
tatattaacatgcctatattat

SEQ ID NO: 136147 - DNA, 22 bp, synthetic construct
  misc_feature 1..22: note = chemically synthesized
  source 1..22: mol_type = other DNA
acatgcctatattatatttaca

SEQ ID NO: 136148 - DNA, 22 bp, synthetic construct
  misc_feature 1..22: note = chemically synthesized
  source 1..22: mol_type = other DNA
tattatatttacattcccttca

SEQ ID NO: 136149 - DNA, 22 bp, synthetic construct
  misc_feature 1..22: note = chemically synthesized
  source 1..22: mol_type = other DNA
tatttacattcccttcatttct

SEQ ID NO: 136150 - DNA, 22 bp, synthetic construct
  misc_feature 1..22: note = chemically synthesized
  source 1..22: mol_type = other DNA
acattcccttcatttctttatt

SEQ ID NO: 136151 - DNA, 22 bp, synthetic construct
  misc_feature 1..22: note = chemically synthesized
  source 1..22: mol_type = other DNA
cattcccttcatttctttattc

SEQ ID NO: 136152 - DNA, 22 bp, synthetic construct
  misc_feature 1..22: note = chemically synthesized
  source 1..22: mol_type = other DNA
ccttcatttctttattctctgt

SEQ ID NO: 136153 - DNA, 22 bp, synthetic construct
  misc_feature 1..22: note = chemically synthesized
  source 1..22: mol_type = other DNA
catttctttattctctgtttgt

SEQ ID NO: 136154 - DNA, 22 bp, synthetic construct
  misc_feature 1..22: note = chemically synthesized
  source 1..22: mol_type = other DNA
atttctttattctctgtttgtc

SEQ ID NO: 136155 - DNA, 22 bp, synthetic construct
  misc_feature 1..22: note = chemically synthesized
  source 1..22: mol_type = other DNA
ctttattctctgtttgtctcat

SEQ ID NO: 136156 - DNA, 22 bp, synthetic construct
  misc_feature 1..22: note = chemically synthesized
  source 1..22: mol_type = other DNA
tttattctctgtttgtctcatg

SEQ ID NO: 136157 - DNA, 22 bp, synthetic construct
  misc_feature 1..22: note = chemically synthesized
  source 1..22: mol_type = other DNA
tattctctgtttgtctcatgaa

SEQ ID NO: 136158 - DNA, 22 bp, synthetic construct
  misc_feature 1..22: note = chemically synthesized
  source 1..22: mol_type = other DNA
attctctgtttgtctcatgaat

SEQ ID NO: 136159 - DNA, 22 bp, synthetic construct
  misc_feature 1..22: note = chemically synthesized
  source 1..22: mol_type = other DNA
ttctctgtttgtctcatgaata

SEQ ID NO: 136160 - DNA, 22 bp, synthetic construct
  misc_feature 1..22: note = chemically synthesized
  source 1..22: mol_type = other DNA
tctgtttgtctcatgaatattc

SEQ ID NO: 136161 - DNA, 22 bp, synthetic construct
  misc_feature 1..22: note = chemically synthesized
  source 1..22: mol_type = other DNA
tgtttgtctcatgaatattccc

SEQ ID NO: 136162 - DNA, 22 bp, synthetic construct
  misc_feature 1..22: note = chemically synthesized
  source 1..22: mol_type = other DNA
tttgtctcatgaatattccctc

SEQ ID NO: 136163 - DNA, 22 bp, synthetic construct
  misc_feature 1..22: note = chemically synthesized
  source 1..22: mol_type = other DNA
gtctcatgaatattccctcagg

SEQ ID NO: 136164 - DNA, 22 bp, synthetic construct
  misc_feature 1..22: note = chemically synthesized
  source 1..22: mol_type = other DNA
tctcatgaatattccctcagga

SEQ ID NO: 136165 - DNA, 22 bp, synthetic construct
  misc_feature 1..22: note = chemically synthesized
  source 1..22: mol_type = other DNA
atgaatattccctcaggaaaca

SEQ ID NO: 136166 - DNA, 22 bp, synthetic construct
  misc_feature 1..22: note = chemically synthesized
  source 1..22: mol_type = other DNA
cctcaggaaacaccctcccacg

SEQ ID NO: 136167 - DNA, 22 bp, synthetic construct
  misc_feature 1..22: note = chemically synthesized
  source 1..22: mol_type = other DNA
aggaaacaccctcccacgccgt

SEQ ID NO: 136168 - DNA, 22 bp, synthetic construct
  misc_feature 1..22: note = chemically synthesized
  source 1..22: mol_type = other DNA
ccacgccgttccctttatctag

SEQ ID NO: 136169 - DNA, 22 bp, synthetic construct
  misc_feature 1..22: note = chemically synthesized
  source 1..22: mol_type = other DNA
cctttatctagcttcttattca

SEQ ID NO: 136170 - DNA, 22 bp, synthetic construct
  misc_feature 1..22: note = chemically synthesized
  source 1..22: mol_type = other DNA
tatctagcttcttattcattcc

SEQ ID NO: 136171 - DNA, 22 bp, synthetic construct
  misc_feature 1..22: note = chemically synthesized
  source 1..22: mol_type = other DNA
atctagcttcttattcattcct

SEQ ID NO: 136172 - DNA, 22 bp, synthetic construct
  misc_feature 1..22: note = chemically synthesized
  source 1..22: mol_type = other DNA
tctagcttcttattcattcctc

SEQ ID NO: 136173 - DNA, 22 bp, synthetic construct
  misc_feature 1..22: note = chemically synthesized
  source 1..22: mol_type = other DNA
gcttcttattcattcctcttgc

SEQ ID NO: 136174 - DNA, 22 bp, synthetic construct
  misc_feature 1..22: note = chemically synthesized
  source 1..22: mol_type = other DNA
cttattcattcctcttgctgta

SEQ ID NO: 136175 - DNA, 22 bp, synthetic construct
  misc_feature 1..22: note = chemically synthesized
  source 1..22: mol_type = other DNA
ttattcattcctcttgctgtac

SEQ ID NO: 136176 - DNA, 22 bp, synthetic construct
  misc_feature 1..22: note = chemically synthesized
  source 1..22: mol_type = other DNA
attcattcctcttgctgtactg

SEQ ID NO: 136177 - DNA, 22 bp, synthetic construct
  misc_feature 1..22: note = chemically synthesized
  source 1..22: mol_type = other DNA
ttcattcctcttgctgtactga

SEQ ID NO: 136178 - DNA, 22 bp, synthetic construct
  misc_feature 1..22: note = chemically synthesized
  source 1..22: mol_type = other DNA
attcctcttgctgtactgatta

SEQ ID NO: 136179 - DNA, 22 bp, synthetic construct
  misc_feature 1..22: note = chemically synthesized
  source 1..22: mol_type = other DNA
ctcttgctgtactgattagcct

SEQ ID NO: 136180 - DNA, 22 bp, synthetic construct
  misc_feature 1..22: note = chemically synthesized
  source 1..22: mol_type = other DNA
ttgctgtactgattagccttga

SEQ ID NO: 136181 - DNA, 22 bp, synthetic construct
  misc_feature 1..22: note = chemically synthesized
  source 1..22: mol_type = other DNA
gctgtactgattagccttgact

SEQ ID NO: 136182 - DNA, 22 bp, synthetic construct
  misc_feature 1..22: note = chemically synthesized
  source 1..22: mol_type = other DNA
ctgtactgattagccttgactc

SEQ ID NO: 136183 - DNA, 22 bp, synthetic construct
  misc_feature 1..22: note = chemically synthesized
  source 1..22: mol_type = other DNA
tactgattagccttgactcctc

SEQ ID NO: 136184 - DNA, 22 bp, synthetic construct
  misc_feature 1..22: note = chemically synthesized
  source 1..22: mol_type = other DNA
attagccttgactcctcttata

SEQ ID NO: 136185 - DNA, 22 bp, synthetic construct
  misc_feature 1..22: note = chemically synthesized
  source 1..22: mol_type = other DNA
gccttgactcctcttatagctc

SEQ ID NO: 136186 - DNA, 22 bp, synthetic construct
  misc_feature 1..22: note = chemically synthesized
  source 1..22: mol_type = other DNA
gactcctcttatagctcacccc

SEQ ID NO: 136187 - DNA, 22 bp, synthetic construct
  misc_feature 1..22: note = chemically synthesized
  source 1..22: mol_type = other DNA
actcctcttatagctcacccca

SEQ ID NO: 136188 - DNA, 22 bp, synthetic construct
  misc_feature 1..22: note = chemically synthesized
  source 1..22: mol_type = other DNA
ctcttatagctcaccccagcct

SEQ ID NO: 136189 - DNA, 22 bp, synthetic construct
  misc_feature 1..22: note = chemically synthesized
  source 1..22: mol_type = other DNA
ttatagctcaccccagcctctt

SEQ ID NO: 136190 - DNA, 22 bp, synthetic construct
  misc_feature 1..22: note = chemically synthesized
  source 1..22: mol_type = other DNA
atagctcaccccagcctcttgg

SEQ ID NO: 136191 - DNA, 22 bp, synthetic construct
  misc_feature 1..22: note = chemically synthesized
  source 1..22: mol_type = other DNA
tagctcaccccagcctcttggc

SEQ ID NO: 136192 - DNA, 22 bp, synthetic construct
  misc_feature 1..22: note = chemically synthesized
  source 1..22: mol_type = other DNA
accccagcctcttggcattatt

SEQ ID NO: 136193 - DNA, 22 bp, synthetic construct
  misc_feature 1..22: note = chemically synthesized
  source 1..22: mol_type = other DNA
ttggcattattatcaagtgtta

SEQ ID NO: 136194 - DNA, 22 bp, synthetic construct
  misc_feature 1..22: note = chemically synthesized
  source 1..22: mol_type = other DNA
ggcattattatcaagtgttacc

SEQ ID NO: 136195 - DNA, 22 bp, synthetic construct
  misc_feature 1..22: note = chemically synthesized
  source 1..22: mol_type = other DNA
gcattattatcaagtgttacca

SEQ ID NO: 136196 - DNA, 22 bp, synthetic construct
  misc_feature 1..22: note = chemically synthesized
  source 1..22: mol_type = other DNA
ttatcaagtgttaccacagttg

SEQ ID NO: 136197 - DNA, 22 bp, synthetic construct
  misc_feature 1..22: note = chemically synthesized
  source 1..22: mol_type = other DNA
tcaagtgttaccacagttgaac

SEQ ID NO: 136198 - DNA, 22 bp, synthetic construct
  misc_feature 1..22: note = chemically synthesized
  source 1..22: mol_type = other DNA
ccacagttgaacagctggatcc

SEQ ID NO: 136199 - DNA, 22 bp, synthetic construct
  misc_feature 1..22: note = chemically synthesized
  source 1..22: mol_type = other DNA
aacagctggatccaaaagtatt

SEQ ID NO: 136200 - DNA, 22 bp, synthetic construct
  misc_feature 1..22: note = chemically synthesized
  source 1..22: mol_type = other DNA
gatccaaaagtattgaccaata

SEQ ID NO: 136201 - DNA, 22 bp, synthetic construct
  misc_feature 1..22: note = chemically synthesized
  source 1..22: mol_type = other DNA
accaataaggaacagaaaataa

SEQ ID NO: 136202 - DNA, 22 bp, synthetic construct
  misc_feature 1..22: note = chemically synthesized
  source 1..22: mol_type = other DNA
gcaatgtaaattataatatgga

SEQ ID NO: 136203 - DNA, 22 bp, synthetic construct
  misc_feature 1..22: note = chemically synthesized
  source 1..22: mol_type = other DNA
caatgtaaattataatatggat

SEQ ID NO: 136204 - DNA, 22 bp, synthetic construct
  misc_feature 1..22: note = chemically synthesized
  source 1..22: mol_type = other DNA
taatatggataagcattggtac

SEQ ID NO: 136205 - DNA, 22 bp, synthetic construct
  misc_feature 1..22: note = chemically synthesized
  source 1..22: mol_type = other DNA
gtactaaacctgaagttagtat

SEQ ID NO: 136206 - DNA, 22 bp, synthetic construct
  misc_feature 1..22: note = chemically synthesized
  source 1..22: mol_type = other DNA
aacctgaagttagtattttact

SEQ ID NO: 136207 - DNA, 22 bp, synthetic construct
  misc_feature 1..22: note = chemically synthesized
  source 1..22: mol_type = other DNA
aagttagtattttactctatac

SEQ ID NO: 136208 - DNA, 22 bp, synthetic construct
  misc_feature 1..22: note = chemically synthesized
  source 1..22: mol_type = other DNA
gtattttactctatacctacaa

SEQ ID NO: 136209 - DNA, 22 bp, synthetic construct
  misc_feature 1..22: note = chemically synthesized
  source 1..22: mol_type = other DNA
tactctatacctacaaggaaga

SEQ ID NO: 136210 - DNA, 22 bp, synthetic construct
  misc_feature 1..22: note = chemically synthesized
  source 1..22: mol_type = other DNA
actctatacctacaaggaagat

SEQ ID NO: 136211 - DNA, 22 bp, synthetic construct
  misc_feature 1..22: note = chemically synthesized
  source 1..22: mol_type = other DNA
ctctatacctacaaggaagata

SEQ ID NO: 136212 - DNA, 22 bp, synthetic construct
  misc_feature 1..22: note = chemically synthesized
  source 1..22: mol_type = other DNA
tatacctacaaggaagatatac

SEQ ID NO: 136213 - DNA, 22 bp, synthetic construct
  misc_feature 1..22: note = chemically synthesized
  source 1..22: mol_type = other DNA
tacctacaaggaagatatacaa

SEQ ID NO: 136214 - DNA, 22 bp, synthetic construct
  misc_feature 1..22: note = chemically synthesized
  source 1..22: mol_type = other DNA
caaggaagatatacaagtattt

SEQ ID NO: 136215 - DNA, 22 bp, synthetic construct
  misc_feature 1..22: note = chemically synthesized
  source 1..22: mol_type = other DNA
ctctaaggtagtttgaaaagcc

SEQ ID NO: 136216 - DNA, 22 bp, synthetic construct
  misc_feature 1..22: note = chemically synthesized
  source 1..22: mol_type = other DNA
tctaaggtagtttgaaaagcct

SEQ ID NO: 136217 - DNA, 22 bp, synthetic construct
  misc_feature 1..22: note = chemically synthesized
  source 1..22: mol_type = other DNA
taaggtagtttgaaaagcctag

SEQ ID NO: 136218 - DNA, 22 bp, synthetic construct
  misc_feature 1..22: note = chemically synthesized
  source 1..22: mol_type = other DNA
aggtagtttgaaaagcctagat

SEQ ID NO: 136219 - DNA, 22 bp, synthetic construct
  misc_feature 1..22: note = chemically synthesized
  source 1..22: mol_type = other DNA
gaaaagcctagatatagaaact

SEQ ID NO: 136220 - DNA, 22 bp, synthetic construct
  misc_feature 1..22: note = chemically synthesized
  source 1..22: mol_type = other DNA
aaaagcctagatatagaaactg

SEQ ID NO: 136221 - DNA, 22 bp, synthetic construct
  misc_feature 1..22: note = chemically synthesized
  source 1..22: mol_type = other DNA
gatatagaaactggatcctcac

SEQ ID NO: 136222 - DNA, 22 bp, synthetic construct
  misc_feature 1..22: note = chemically synthesized
  source 1..22: mol_type = other DNA
gatcctcacatgagttcagtat

SEQ ID NO: 136223 - DNA, 22 bp, synthetic construct
  misc_feature 1..22: note = chemically synthesized
  source 1..22: mol_type = other DNA
acatgagttcagtatataattg

SEQ ID NO: 136224 - DNA, 22 bp, synthetic construct
  misc_feature 1..22: note = chemically synthesized
  source 1..22: mol_type = other DNA
agtatataattgtaacagaata

SEQ ID NO: 136225 - DNA, 22 bp, synthetic construct
  misc_feature 1..22: note = chemically synthesized
  source 1..22: mol_type = other DNA
taacagaataaaaaatcaatta

SEQ ID NO: 136226 - DNA, 22 bp, synthetic construct
  misc_feature 1..22: note = chemically synthesized
  source 1..22: mol_type = other DNA
tgtattcaagttgctagtgtct

SEQ ID NO: 136227 - DNA, 22 bp, synthetic construct
  misc_feature 1..22: note = chemically synthesized
  source 1..22: mol_type = other DNA
aagttgctagtgtcttaagagg

SEQ ID NO: 136228 - DNA, 22 bp, synthetic construct
  misc_feature 1..22: note = chemically synthesized
  source 1..22: mol_type = other DNA
ctagtgtcttaagaggttcaca

SEQ ID NO: 136229 - DNA, 22 bp, synthetic construct
  misc_feature 1..22: note = chemically synthesized
  source 1..22: mol_type = other DNA
gtgtcttaagaggttcacattt

SEQ ID NO: 136230 - DNA, 22 bp, synthetic construct
  misc_feature 1..22: note = chemically synthesized
  source 1..22: mol_type = other DNA
aagaggttcacatttttatcta

SEQ ID NO: 136231 - DNA, 22 bp, synthetic construct
  misc_feature 1..22: note = chemically synthesized
  source 1..22: mol_type = other DNA
agaggttcacatttttatctaa

SEQ ID NO: 136232 - DNA, 22 bp, synthetic construct
  misc_feature 1..22: note = chemically synthesized
  source 1..22: mol_type = other DNA
acatttttatctaactgattat

SEQ ID NO: 136233 - DNA, 22 bp, synthetic construct
  misc_feature 1..22: note = chemically synthesized
  source 1..22: mol_type = other DNA
ttatctaactgattatcacaaa

SEQ ID NO: 136234 - DNA, 22 bp, synthetic construct
  misc_feature 1..22: note = chemically synthesized
  source 1..22: mol_type = other DNA
tatctaactgattatcacaaaa

SEQ ID NO: 136235 - DNA, 22 bp, synthetic construct
  misc_feature 1..22: note = chemically synthesized
  source 1..22: mol_type = other DNA
atctaactgattatcacaaaaa

SEQ ID NO: 136236 - DNA, 22 bp, synthetic construct
  misc_feature 1..22: note = chemically synthesized
  source 1..22: mol_type = other DNA
tctaactgattatcacaaaaat

SEQ ID NO: 136237 - DNA, 22 bp, synthetic construct
  misc_feature 1..22: note = chemically synthesized
  source 1..22: mol_type = other DNA
actgattatcacaaaaatactt

SEQ ID NO: 136238 - DNA, 22 bp, synthetic construct
  misc_feature 1..22: note = chemically synthesized
  source 1..22: mol_type = other DNA
attatcacaaaaatacttcgag

SEQ ID NO: 136239 - DNA, 22 bp, synthetic construct
  misc_feature 1..22: note = chemically synthesized
  source 1..22: mol_type = other DNA
tcacaaaaatacttcgagttac

SEQ ID NO: 136240 - DNA, 22 bp, synthetic construct
  misc_feature 1..22: note = chemically synthesized
  source 1..22: mol_type = other DNA
cgagttacttttcattataatt

SEQ ID NO: 136241 - DNA, 22 bp, synthetic construct
  misc_feature 1..22: note = chemically synthesized
  source 1..22: mol_type = other DNA
gagttacttttcattataattc

SEQ ID NO: 136242 - DNA, 22 bp, synthetic construct
  misc_feature 1..22: note = chemically synthesized
  source 1..22: mol_type = other DNA
cttttcattataattcctgact

SEQ ID NO: 136243 - DNA, 22 bp, synthetic construct
  misc_feature 1..22: note = chemically synthesized
  source 1..22: mol_type = other DNA
ttcattataattcctgactaca

SEQ ID NO: 136244 - DNA, 22 bp, synthetic construct
  misc_feature 1..22: note = chemically synthesized
  source 1..22: mol_type = other DNA
tcattataattcctgactacac

SEQ ID NO: 136245 - DNA, 22 bp, synthetic construct
  misc_feature 1..22: note = chemically synthesized
  source 1..22: mol_type = other DNA
cattataattcctgactacaca

SEQ ID NO: 136246 - DNA, 22 bp, synthetic construct
  misc_feature 1..22: note = chemically synthesized
  source 1..22: mol_type = other DNA
attataattcctgactacacat

SEQ ID NO: 136247 - DNA, 22 bp, synthetic construct
  misc_feature 1..22: note = chemically synthesized
  source 1..22: mol_type = other DNA
taattcctgactacacatgaag

SEQ ID NO: 136248 - DNA, 22 bp, synthetic construct
  misc_feature 1..22: note = chemically synthesized
  source 1..22: mol_type = other DNA
ctgactacacatgaagagactg

SEQ ID NO: 136249 - DNA, 22 bp, synthetic construct
  misc_feature 1..22: note = chemically synthesized
  source 1..22: mol_type = other DNA
actacacatgaagagactgaca

SEQ ID NO: 136250 - DNA, 22 bp, synthetic construct
  misc_feature 1..22: note = chemically synthesized
  source 1..22: mol_type = other DNA
cacatgaagagactgacacgta

SEQ ID NO: 136251 - DNA, 22 bp, synthetic construct
  misc_feature 1..22: note = chemically synthesized
  source 1..22: mol_type = other DNA
acacgtaggtgccttacttagg

SEQ ID NO: 136252 - DNA, 22 bp, synthetic construct
  misc_feature 1..22: note = chemically synthesized
  source 1..22: mol_type = other DNA
acttaggtaggttaagtaattt

SEQ ID NO: 136253 - DNA, 22 bp, synthetic construct
  misc_feature 1..22: note = chemically synthesized
  source 1..22: mol_type = other DNA
cttaggtaggttaagtaattta

SEQ ID NO: 136254 - DNA, 22 bp, synthetic construct
  misc_feature 1..22: note = chemically synthesized
  source 1..22: mol_type = other DNA
aggtaggttaagtaatttatcc

SEQ ID NO: 136255 - DNA, 22 bp, synthetic construct
  misc_feature 1..22: note = chemically synthesized
  source 1..22: mol_type = other DNA
ggtaggttaagtaatttatcca

SEQ ID NO: 136256 - DNA, 22 bp, synthetic construct
  misc_feature 1..22: note = chemically synthesized
  source 1..22: mol_type = other DNA
agtaatttatccaaaaccacac

SEQ ID NO: 136257 - DNA, 22 bp, synthetic construct
  misc_feature 1..22: note = chemically synthesized
  source 1..22: mol_type = other DNA
atccaaaaccacacaatgtaga

SEQ ID NO: 136258 - DNA, 22 bp, synthetic construct
  misc_feature 1..22: note = chemically synthesized
  source 1..22: mol_type = other DNA
tccaaaaccacacaatgtagaa

SEQ ID NO: 136259 - DNA, 22 bp, synthetic construct
  misc_feature 1..22: note = chemically synthesized
  source 1..22: mol_type = other DNA
agctgattcggccatagaaaca

SEQ ID NO: 136260 - DNA, 22 bp, synthetic construct
  misc_feature 1..22: note = chemically synthesized
  source 1..22: mol_type = other DNA
attcggccatagaaacacaata

SEQ ID NO: 136261 - DNA, 22 bp, synthetic construct
  misc_feature 1..22: note = chemically synthesized
  source 1..22: mol_type = other DNA
ggccatagaaacacaatatgtg

SEQ ID NO: 136262 - DNA, 22 bp, synthetic construct
  misc_feature 1..22: note = chemically synthesized
  source 1..22: mol_type = other DNA
ctctccttcctatgctgtcaga

SEQ ID NO: 136263 - DNA, 22 bp, synthetic construct
  misc_feature 1..22: note = chemically synthesized
  source 1..22: mol_type = other DNA
tctccttcctatgctgtcagat

SEQ ID NO: 136264 - DNA, 22 bp, synthetic construct
  misc_feature 1..22: note = chemically synthesized
  source 1..22: mol_type = other DNA
tccttcctatgctgtcagatga

SEQ ID NO: 136265 - DNA, 22 bp, synthetic construct
  misc_feature 1..22: note = chemically synthesized
  source 1..22: mol_type = other DNA
cttcctatgctgtcagatgaat

SEQ ID NO: 136266 - DNA, 22 bp, synthetic construct
  misc_feature 1..22: note = chemically synthesized
  source 1..22: mol_type = other DNA
cctatgctgtcagatgaatact

SEQ ID NO: 136267 - DNA, 22 bp, synthetic construct
  misc_feature 1..22: note = chemically synthesized
  source 1..22: mol_type = other DNA
ctatgctgtcagatgaatactg

SEQ ID NO: 136268 - DNA, 22 bp, synthetic construct
  misc_feature 1..22: note = chemically synthesized
  source 1..22: mol_type = other DNA
tgctgtcagatgaatactgaga

SEQ ID NO: 136269 - DNA, 22 bp, synthetic construct
  misc_feature 1..22: note = chemically synthesized
  source 1..22: mol_type = other DNA
tcagatgaatactgagatagaa

SEQ ID NO: 136270 - DNA, 22 bp, synthetic construct
  misc_feature 1..22: note = chemically synthesized
  source 1..22: mol_type = other DNA
agatagaatatttagttcatct

SEQ ID NO: 136271 - DNA, 22 bp, synthetic construct
  misc_feature 1..22: note = chemically synthesized
  source 1..22: mol_type = other DNA
agttcatctatcacacattaaa

SEQ ID NO: 136272 - DNA, 22 bp, synthetic construct
  misc_feature 1..22: note = chemically synthesized
  source 1..22: mol_type = other DNA
gttcatctatcacacattaaac

SEQ ID NO: 136273 - DNA, 22 bp, synthetic construct
  misc_feature 1..22: note = chemically synthesized
  source 1..22: mol_type = other DNA
atctatcacacattaaacggga

SEQ ID NO: 136274 - DNA, 22 bp, synthetic construct
  misc_feature 1..22: note = chemically synthesized
  source 1..22: mol_type = other DNA
tcacacattaaacgggacttta

SEQ ID NO: 136275 - DNA, 22 bp, synthetic construct
  misc_feature 1..22: note = chemically synthesized
  source 1..22: mol_type = other DNA
aacgggactttacatttctgtc

SEQ ID NO: 136276 - DNA, 22 bp, synthetic construct
  misc_feature 1..22: note = chemically synthesized
  source 1..22: mol_type = other DNA
tacatttctgtctgttgaagat

SEQ ID NO: 136277 - DNA, 22 bp, synthetic construct
  misc_feature 1..22: note = chemically synthesized
  source 1..22: mol_type = other DNA
acatttctgtctgttgaagatt

SEQ ID NO: 136278 - DNA, 22 bp, synthetic construct
  misc_feature 1..22: note = chemically synthesized
  source 1..22: mol_type = other DNA
catttctgtctgttgaagattt

SEQ ID NO: 136279 - DNA, 22 bp, synthetic construct
  misc_feature 1..22: note = chemically synthesized
  source 1..22: mol_type = other DNA
ctgtctgttgaagatttgggtg

SEQ ID NO: 136280 - DNA, 22 bp, synthetic construct
  misc_feature 1..22: note = chemically synthesized
  source 1..22: mol_type = other DNA
tgtctgttgaagatttgggtgt

SEQ ID NO: 136281 - DNA, 22 bp, synthetic construct
  misc_feature 1..22: note = chemically synthesized
  source 1..22: mol_type = other DNA
tctgttgaagatttgggtgtgg

SEQ ID NO: 136282 - DNA, 22 bp, synthetic construct
  misc_feature 1..22: note = chemically synthesized
  source 1..22: mol_type = other DNA
ttgaagatttgggtgtggggat

SEQ ID NO: 136283 - DNA, 22 bp, synthetic construct
  misc_feature 1..22: note = chemically synthesized
  source 1..22: mol_type = other DNA
aagatttgggtgtggggataac

SEQ ID NO: 136284 - DNA, 22 bp, synthetic construct
  misc_feature 1..22: note = chemically synthesized
  source 1..22: mol_type = other DNA
gggtgtggggataactcaaggt

SEQ ID NO: 136285 - DNA, 22 bp, synthetic construct
  misc_feature 1..22: note = chemically synthesized
  source 1..22: mol_type = other DNA
ggtgtggggataactcaaggta

SEQ ID NO: 136286 - DNA, 22 bp, synthetic construct
  misc_feature 1..22: note = chemically synthesized
  source 1..22: mol_type = other DNA
aaggtatcatatccaagggatg

SEQ ID NO: 136287 - DNA, 22 bp, synthetic construct
  misc_feature 1..22: note = chemically synthesized
  source 1..22: mol_type = other DNA
taacagaaagggaaaggatgtt

SEQ ID NO: 136288 - DNA, 22 bp, synthetic construct
  misc_feature 1..22: note = chemically synthesized
  source 1..22: mol_type = other DNA
acagaaagggaaaggatgttgg

SEQ ID NO: 136289 - DNA, 22 bp, synthetic construct
  misc_feature 1..22: note = chemically synthesized
  source 1..22: mol_type = other DNA
gcaaggctatgttcatgaaagt

SEQ ID NO: 136290 - DNA, 22 bp, synthetic construct
  misc_feature 1..22: note = chemically synthesized
  source 1..22: mol_type = other DNA
tgttcatgaaagtatatgtaaa

SEQ ID NO: 136291 - DNA, 22 bp, synthetic construct
  misc_feature 1..22: note = chemically synthesized
  source 1..22: mol_type = other DNA
atgaaagtatatgtaaaatcca

SEQ ID NO: 136292 - DNA, 22 bp, synthetic construct
  misc_feature 1..22: note = chemically synthesized
  source 1..22: mol_type = other DNA
agcttctttctgcatgcattgg

SEQ ID NO: 136293 - DNA, 22 bp, synthetic construct
  misc_feature 1..22: note = chemically synthesized
  source 1..22: mol_type = other DNA
ctttctgcatgcattggcaatg

SEQ ID NO: 136294 - DNA, 22 bp, synthetic construct
  misc_feature 1..22: note = chemically synthesized
  source 1..22: mol_type = other DNA
tttctgcatgcattggcaatgt

SEQ ID NO: 136295 - DNA, 22 bp, synthetic construct
  misc_feature 1..22: note = chemically synthesized
  source 1..22: mol_type = other DNA
tctgcatgcattggcaatgttt

SEQ ID NO: 136296 - DNA, 22 bp, synthetic construct
  misc_feature 1..22: note = chemically synthesized
  source 1..22: mol_type = other DNA
ctgcatgcattggcaatgttta

SEQ ID NO: 136297 - DNA, 22 bp, synthetic construct
  misc_feature 1..22: note = chemically synthesized
  source 1..22: mol_type = other DNA
tgcatgcattggcaatgtttat

SEQ ID NO: 136298 - DNA, 22 bp, synthetic construct
  misc_feature 1..22: note = chemically synthesized
  source 1..22: mol_type = other DNA
catgcattggcaatgtttatga

SEQ ID NO: 136299 - DNA, 22 bp, synthetic construct
  misc_feature 1..22: note = chemically synthesized
  source 1..22: mol_type = other DNA
gcaatgtttatgaataatgtgt

SEQ ID NO: 136300 - DNA, 22 bp, synthetic construct
  misc_feature 1..22: note = chemically synthesized
  source 1..22: mol_type = other DNA
atgaataatgtgtatgtaaaag

SEQ ID NO: 136301 - DNA, 22 bp, synthetic construct
  misc_feature 1..22: note = chemically synthesized
  source 1..22: mol_type = other DNA
tgaataatgtgtatgtaaaagt

SEQ ID NO: 136302 - DNA, 22 bp, synthetic construct
  misc_feature 1..22: note = chemically synthesized
  source 1..22: mol_type = other DNA
tatattcaaaagtgtttcatgt

SEQ ID NO: 136303 - DNA, 22 bp, synthetic construct
  misc_feature 1..22: note = chemically synthesized
  source 1..22: mol_type = other DNA
aaaagtgtttcatgtgcctagg

SEQ ID NO: 136304 - DNA, 22 bp, synthetic construct
  misc_feature 1..22: note = chemically synthesized
  source 1..22: mol_type = other DNA
catgtgcctaggggtgtcaaat

SEQ ID NO: 136305 - DNA, 22 bp, synthetic construct
  misc_feature 1..22: note = chemically synthesized
  source 1..22: mol_type = other DNA
atgtgcctaggggtgtcaaata

SEQ ID NO: 136306 - DNA, 22 bp, synthetic construct
  misc_feature 1..22: note = chemically synthesized
  source 1..22: mol_type = other DNA
ggggtgtcaaatactttgagtt

SEQ ID NO: 136307 - DNA, 22 bp, synthetic construct
  misc_feature 1..22: note = chemically synthesized
  source 1..22: mol_type = other DNA
tgagtttgtaagtatatacttc

SEQ ID NO: 136308 - DNA, 22 bp, synthetic construct
  misc_feature 1..22: note = chemically synthesized
  source 1..22: mol_type = other DNA
gagtttgtaagtatatacttct

SEQ ID NO: 136309 - DNA, 22 bp, synthetic construct
  misc_feature 1..22: note = chemically synthesized
  source 1..22: mol_type = other DNA
agtttgtaagtatatacttctc

SEQ ID NO: 136310 - DNA, 22 bp, synthetic construct
  misc_feature 1..22: note = chemically synthesized
  source 1..22: mol_type = other DNA
gtaagtatatacttctctgtaa

SEQ ID NO: 136311 - DNA, 22 bp, synthetic construct
  misc_feature 1..22: note = chemically synthesized
  source 1..22: mol_type = other DNA
taagtatatacttctctgtaat

SEQ ID NO: 136312 - DNA, 22 bp, synthetic construct
  misc_feature 1..22: note = chemically synthesized
  source 1..22: mol_type = other DNA
ctctgtaatgtgtctgaatatc

SEQ ID NO: 136313 - DNA, 22 bp, synthetic construct
  misc_feature 1..22: note = chemically synthesized
  source 1..22: mol_type = other DNA
tctgtaatgtgtctgaatatct

SEQ ID NO: 136314 - DNA, 22 bp, synthetic construct
  misc_feature 1..22: note = chemically synthesized
  source 1..22: mol_type = other DNA
tgtaatgtgtctgaatatctct

SEQ ID NO: 136315 - DNA, 22 bp, synthetic construct
  misc_feature 1..22: note = chemically synthesized
  source 1..22: mol_type = other DNA
taatgtgtctgaatatctctat

SEQ ID NO: 136316 - DNA, 22 bp, synthetic construct
  misc_feature 1..22: note = chemically synthesized
  source 1..22: mol_type = other DNA
aatatctctatttacttgattc

SEQ ID NO: 136317 - DNA, 22 bp, synthetic construct
  misc_feature 1..22: note = chemically synthesized
  source 1..22: mol_type = other DNA
tatttacttgattctcaataag

SEQ ID NO: 136318 - DNA, 22 bp, synthetic construct
  misc_feature 1..22: note = chemically synthesized
  source 1..22: mol_type = other DNA
tttacttgattctcaataagta

SEQ ID NO: 136319 - DNA, 22 bp, synthetic construct
  misc_feature 1..22: note = chemically synthesized
  source 1..22: mol_type = other DNA
acttgattctcaataagtaggt

SEQ ID NO: 136320 - DNA, 22 bp, synthetic construct
  misc_feature 1..22: note = chemically synthesized
  source 1..22: mol_type = other DNA
cttgattctcaataagtaggta

SEQ ID NO: 136321 - DNA, 22 bp, synthetic construct
  misc_feature 1..22: note = chemically synthesized
  source 1..22: mol_type = other DNA
gattctcaataagtaggtatca

SEQ ID NO: 136322 - DNA, 22 bp, synthetic construct
  misc_feature 1..22: note = chemically synthesized
  source 1..22: mol_type = other DNA
attctcaataagtaggtatcat

SEQ ID NO: 136323 - DNA, 22 bp, synthetic construct
  misc_feature 1..22: note = chemically synthesized
  source 1..22: mol_type = other DNA
tcaataagtaggtatcatagtg

SEQ ID NO: 136324 - DNA, 22 bp, synthetic construct
  misc_feature 1..22: note = chemically synthesized
  source 1..22: mol_type = other DNA
aataagtaggtatcatagtgaa

SEQ ID NO: 136325 - DNA, 22 bp, synthetic construct
  misc_feature 1..22: note = chemically synthesized
  source 1..22: mol_type = other DNA
acaaatgtttgaggaacaattt

SEQ ID NO: 136326 - DNA, 22 bp, synthetic construct
  misc_feature 1..22: note = chemically synthesized
  source 1..22: mol_type = other DNA
gaggaacaatttagtgtttacc

SEQ ID NO: 136327 - DNA, 22 bp, synthetic construct
  misc_feature 1..22: note = chemically synthesized
  source 1..22: mol_type = other DNA
aggaacaatttagtgtttacct

SEQ ID NO: 136328 - DNA, 22 bp, synthetic construct
  misc_feature 1..22: note = chemically synthesized
  source 1..22: mol_type = other DNA
agtgtttacctattcaccaaaa

SEQ ID NO: 136329 - DNA, 22 bp, synthetic construct
  misc_feature 1..22: note = chemically synthesized
  source 1..22: mol_type = other DNA
gtgtttacctattcaccaaaat

SEQ ID NO: 136330 - DNA, 22 bp, synthetic construct
  misc_feature 1..22: note = chemically synthesized
  source 1..22: mol_type = other DNA
acctattcaccaaaatttatta

SEQ ID NO: 136331 - DNA, 22 bp, synthetic construct
  misc_feature 1..22: note = chemically synthesized
  source 1..22: mol_type = other DNA
cctattcaccaaaatttattaa

SEQ ID NO: 136332 - DNA, 22 bp, synthetic construct
  misc_feature 1..22: note = chemically synthesized
  source 1..22: mol_type = other DNA
ttcaccaaaatttattaaatgc

SEQ ID NO: 136333 - DNA, 22 bp, synthetic construct
  misc_feature 1..22: note = chemically synthesized
  source 1..22: mol_type = other DNA
accaaaatttattaaatgccta

SEQ ID NO: 136334 - DNA, 22 bp, synthetic construct
  misc_feature 1..22: note = chemically synthesized
  source 1..22: mol_type = other DNA
attaaatgcctaatctgtatca

SEQ ID NO: 136335 - DNA, 22 bp, synthetic construct
  misc_feature 1..22: note = chemically synthesized
  source 1..22: mol_type = other DNA
ttaaatgcctaatctgtatcag

SEQ ID NO: 136336 - DNA, 22 bp, synthetic construct
  misc_feature 1..22: note = chemically synthesized
  source 1..22: mol_type = other DNA
aatgcctaatctgtatcagata

SEQ ID NO: 136337 - DNA, 22 bp, synthetic construct
  misc_feature 1..22: note = chemically synthesized
  source 1..22: mol_type = other DNA
atctgtatcagatatacaatta

SEQ ID NO: 136338 - DNA, 22 bp, synthetic construct
  misc_feature 1..22: note = chemically synthesized
  source 1..22: mol_type = other DNA
tatcagatatacaattatctgg

SEQ ID NO: 136339 - DNA, 22 bp, synthetic construct
  misc_feature 1..22: note = chemically synthesized
  source 1..22: mol_type = other DNA
tctggcgaaatctgtaattcct

SEQ ID NO: 136340 - DNA, 22 bp, synthetic construct
  misc_feature 1..22: note = chemically synthesized
  source 1..22: mol_type = other DNA
gcgaaatctgtaattcctaatt

SEQ ID NO: 136341 - DNA, 22 bp, synthetic construct
  misc_feature 1..22: note = chemically synthesized
  source 1..22: mol_type = other DNA
taattcctaatttaaacagctg

SEQ ID NO: 136342 - DNA, 22 bp, synthetic construct
  misc_feature 1..22: note = chemically synthesized
  source 1..22: mol_type = other DNA
ctaatttaaacagctgtgtagc

SEQ ID NO: 136343 - DNA, 22 bp, synthetic construct
  misc_feature 1..22: note = chemically synthesized
  source 1..22: mol_type = other DNA
atttaaacagctgtgtagccta

SEQ ID NO: 136344 - DNA, 22 bp, synthetic construct
  misc_feature 1..22: note = chemically synthesized
  source 1..22: mol_type = other DNA
aaacagctgtgtagcctaatta

SEQ ID NO: 136345 - DNA, 22 bp, synthetic construct
  misc_feature 1..22: note = chemically synthesized
  source 1..22: mol_type = other DNA
aacagctgtgtagcctaattag

SEQ ID NO: 136346 - DNA, 22 bp, synthetic construct
  misc_feature 1..22: note = chemically synthesized
  source 1..22: mol_type = other DNA
tgtagcctaattagggataaag

SEQ ID NO: 136347 - DNA, 22 bp, synthetic construct
  misc_feature 1..22: note = chemically synthesized
  source 1..22: mol_type = other DNA
attagggataaaggcatgcaaa

SEQ ID NO: 136348 - DNA, 22 bp, synthetic construct
  misc_feature 1..22: note = chemically synthesized
  source 1..22: mol_type = other DNA
gggataaaggcatgcaaaccca

SEQ ID NO: 136349 - DNA, 22 bp, synthetic construct
  misc_feature 1..22: note = chemically synthesized
  source 1..22: mol_type = other DNA
gtgtaggttgaaatgagctata

SEQ ID NO: 136350 - DNA, 22 bp, synthetic construct
  misc_feature 1..22: note = chemically synthesized
  source 1..22: mol_type = other DNA
tgtaggttgaaatgagctatag

SEQ ID NO: 136351 - DNA, 22 bp, synthetic construct
  misc_feature 1..22: note = chemically synthesized
  source 1..22: mol_type = other DNA
aaatgagctatagaaaaatgca

SEQ ID NO: 136352 - DNA, 22 bp, synthetic construct
  misc_feature 1..22: note = chemically synthesized
  source 1..22: mol_type = other DNA
tagaaaaatgcagtatatttat

SEQ ID NO: 136353 - DNA, 22 bp, synthetic construct
  misc_feature 1..22: note = chemically synthesized
  source 1..22: mol_type = other DNA
atcagaagtctttagggtcatg

SEQ ID NO: 136354 - DNA, 22 bp, synthetic construct
  misc_feature 1..22: note = chemically synthesized
  source 1..22: mol_type = other DNA
tcagaagtctttagggtcatga

SEQ ID NO: 136355 - DNA, 22 bp, synthetic construct
  misc_feature 1..22: note = chemically synthesized
  source 1..22: mol_type = other DNA
tagggtcatgaaaaggaatggt

SEQ ID NO: 136356 - DNA, 22 bp, synthetic construct
  misc_feature 1..22: note = chemically synthesized
  source 1..22: mol_type = other DNA
agggtcatgaaaaggaatggtc

SEQ ID NO: 136357 - DNA, 22 bp, synthetic construct
  misc_feature 1..22: note = chemically synthesized
  source 1..22: mol_type = other DNA
gggtcatgaaaaggaatggtca

SEQ ID NO: 136358 - DNA, 22 bp, synthetic construct
  misc_feature 1..22: note = chemically synthesized
  source 1..22: mol_type = other DNA
acactgccagggactcatatgt

SEQ ID NO: 136359 - DNA, 22 bp, synthetic construct
  misc_feature 1..22: note = chemically synthesized
  source 1..22: mol_type = other DNA
ccagggactcatatgtaagaga

SEQ ID NO: 136360 - DNA, 22 bp, synthetic construct
  misc_feature 1..22: note = chemically synthesized
  source 1..22: mol_type = other DNA
atatgtaagagataactaatgt

SEQ ID NO: 136361 - DNA, 22 bp, synthetic construct
  misc_feature 1..22: note = chemically synthesized
  source 1..22: mol_type = other DNA
atgtgaagtgactttaaaggag

SEQ ID NO: 136362 - DNA, 22 bp, synthetic construct
  misc_feature 1..22: note = chemically synthesized
  source 1..22: mol_type = other DNA
taaaggagaaattagcagaagt

SEQ ID NO: 136363 - DNA, 22 bp, synthetic construct
  misc_feature 1..22: note = chemically synthesized
  source 1..22: mol_type = other DNA
aaaggagaaattagcagaagtt

SEQ ID NO: 136364 - DNA, 22 bp, synthetic construct
  misc_feature 1..22: note = chemically synthesized
  source 1..22: mol_type = other DNA
aaggagaaattagcagaagttt

SEQ ID NO: 136365 - DNA, 22 bp, synthetic construct
  misc_feature 1..22: note = chemically synthesized
  source 1..22: mol_type = other DNA
gcagaagttttctttccatgtc

SEQ ID NO: 136366 - DNA, 22 bp, synthetic construct
  misc_feature 1..22: note = chemically synthesized
  source 1..22: mol_type = other DNA
tctttccatgtctcctcatcat

SEQ ID NO: 136367 - DNA, 22 bp, synthetic construct
  misc_feature 1..22: note = chemically synthesized
  source 1..22: mol_type = other DNA
ctttccatgtctcctcatcatg

SEQ ID NO: 136368 - DNA, 22 bp, synthetic construct
  misc_feature 1..22: note = chemically synthesized
  source 1..22: mol_type = other DNA
tttccatgtctcctcatcatgt

SEQ ID NO: 136369 - DNA, 22 bp, synthetic construct
  misc_feature 1..22: note = chemically synthesized
  source 1..22: mol_type = other DNA
tccatgtctcctcatcatgtta

SEQ ID NO: 136370 - DNA, 22 bp, synthetic construct
  misc_feature 1..22: note = chemically synthesized
  source 1..22: mol_type = other DNA
ccatgtctcctcatcatgttac

SEQ ID NO: 136371 - DNA, 22 bp, synthetic construct
  misc_feature 1..22: note = chemically synthesized
  source 1..22: mol_type = other DNA
catgtctcctcatcatgttaca

SEQ ID NO: 136372 - DNA, 22 bp, synthetic construct
  misc_feature 1..22: note = chemically synthesized
  source 1..22: mol_type = other DNA
ctcatcatgttacaataacgga

SEQ ID NO: 136373 - DNA, 22 bp, synthetic construct
  misc_feature 1..22: note = chemically synthesized
  source 1..22: mol_type = other DNA
atcatgttacaataacggaaga

SEQ ID NO: 136374 - DNA, 22 bp, synthetic construct
  misc_feature 1..22: note = chemically synthesized
  source 1..22: mol_type = other DNA
caataacggaagagattaaaac

SEQ ID NO: 136375 - DNA, 22 bp, synthetic construct
  misc_feature 1..22: note = chemically synthesized
  source 1..22: mol_type = other DNA
aaacaacaaatacatttagaca

SEQ ID NO: 136376 - DNA, 22 bp, synthetic construct
  misc_feature 1..22: note = chemically synthesized
  source 1..22: mol_type = other DNA
agacagcaatgtttatcctggt

SEQ ID NO: 136377 - DNA, 22 bp, synthetic construct
  misc_feature 1..22: note = chemically synthesized
  source 1..22: mol_type = other DNA
gacagcaatgtttatcctggtt

SEQ ID NO: 136378 - DNA, 22 bp, synthetic construct
  misc_feature 1..22: note = chemically synthesized
  source 1..22: mol_type = other DNA
atcctggttagatgttttaatc

SEQ ID NO: 136379 - DNA, 22 bp, synthetic construct
  misc_feature 1..22: note = chemically synthesized
  source 1..22: mol_type = other DNA
tcctggttagatgttttaatct

SEQ ID NO: 136380 - DNA, 22 bp, synthetic construct
  misc_feature 1..22: note = chemically synthesized
  source 1..22: mol_type = other DNA
gttagatgttttaatctaaatc

SEQ ID NO: 136381 - DNA, 22 bp, synthetic construct
  misc_feature 1..22: note = chemically synthesized
  source 1..22: mol_type = other DNA
gatgttttaatctaaatctatc

SEQ ID NO: 136382 - DNA, 22 bp, synthetic construct
  misc_feature 1..22: note = chemically synthesized
  source 1..22: mol_type = other DNA
taatctaaatctatcttggagt

SEQ ID NO: 136383 - DNA, 22 bp, synthetic construct
  misc_feature 1..22: note = chemically synthesized
  source 1..22: mol_type = other DNA
aatctaaatctatcttggagtg

SEQ ID NO: 136384 - DNA, 22 bp, synthetic construct
  misc_feature 1..22: note = chemically synthesized
  source 1..22: mol_type = other DNA
atctaaatctatcttggagtgt

SEQ ID NO: 136385 - DNA, 22 bp, synthetic construct
  misc_feature 1..22: note = chemically synthesized
  source 1..22: mol_type = other DNA
aatctatcttggagtgttaaaa

SEQ ID NO: 136386 - DNA, 22 bp, synthetic construct
  misc_feature 1..22: note = chemically synthesized
  source 1..22: mol_type = other DNA
tcttggagtgttaaaatgcatt

SEQ ID NO: 136387 - DNA, 22 bp, synthetic construct
  misc_feature 1..22: note = chemically synthesized
  source 1..22: mol_type = other DNA
ggagtgttaaaatgcatttgct

SEQ ID NO: 136388 - DNA, 22 bp, synthetic construct
  misc_feature 1..22: note = chemically synthesized
  source 1..22: mol_type = other DNA
gagtgttaaaatgcatttgctc

SEQ ID NO: 136389 - DNA, 22 bp, synthetic construct
  misc_feature 1..22: note = chemically synthesized
  source 1..22: mol_type = other DNA
aaatgcatttgctcacctactt

SEQ ID NO: 136390 - DNA, 22 bp, synthetic construct
  misc_feature 1..22: note = chemically synthesized
  source 1..22: mol_type = other DNA
gctcacctactttaaaatataa

SEQ ID NO: 136391 - DNA, 22 bp, synthetic construct
  misc_feature 1..22: note = chemically synthesized
  source 1..22: mol_type = other DNA
ctcacctactttaaaatataaa

SEQ ID NO: 136392 - DNA, 22 bp, synthetic construct
  misc_feature 1..22: note = chemically synthesized
  source 1..22: mol_type = other DNA
acctactttaaaatataaatga

SEQ ID NO: 136393 - DNA, 22 bp, synthetic construct
  misc_feature 1..22: note = chemically synthesized
  source 1..22: mol_type = other DNA
ctttaaaatataaatgaaggta

SEQ ID NO: 136394 - DNA, 22 bp, synthetic construct
  misc_feature 1..22: note = chemically synthesized
  source 1..22: mol_type = other DNA
taaaatataaatgaaggtagga

SEQ ID NO: 136395 - DNA, 22 bp, synthetic construct
  misc_feature 1..22: note = chemically synthesized
  source 1..22: mol_type = other DNA
aaaatataaatgaaggtaggaa

SEQ ID NO: 136396 - DNA, 22 bp, synthetic construct
  misc_feature 1..22: note = chemically synthesized
  source 1..22: mol_type = other DNA
aaatataaatgaaggtaggaac

SEQ ID NO: 136397 - DNA, 22 bp, synthetic construct
  misc_feature 1..22: note = chemically synthesized
  source 1..22: mol_type = other DNA
tagatacaaaaagttggagaaa

SEQ ID NO: 136398 - DNA, 22 bp, synthetic construct
  misc_feature 1..22: note = chemically synthesized
  source 1..22: mol_type = other DNA
gagaaaaaaagacaataaagat

SEQ ID NO: 136399 - DNA, 22 bp, synthetic construct
  misc_feature 1..22: note = chemically synthesized
  source 1..22: mol_type = other DNA
ttaatccttgatagaaaatgag

SEQ ID NO: 136400 - DNA, 22 bp, synthetic construct
  misc_feature 1..22: note = chemically synthesized
  source 1..22: mol_type = other DNA
atccttgatagaaaatgagaag

SEQ ID NO: 136401 - DNA, 22 bp, synthetic construct
  misc_feature 1..22: note = chemically synthesized
  source 1..22: mol_type = other DNA
gatagaaaatgagaagagataa

SEQ ID NO: 136402 - DNA, 22 bp, synthetic construct
  misc_feature 1..22: note = chemically synthesized
  source 1..22: mol_type = other DNA
atagaaaatgagaagagataaa

SEQ ID NO: 136403 - DNA, 22 bp, synthetic construct
  misc_feature 1..22: note = chemically synthesized
  source 1..22: mol_type = other DNA
gtttacataaagaaaataagat

SEQ ID NO: 136404 - DNA, 22 bp, synthetic construct
  misc_feature 1..22: note = chemically synthesized
  source 1..22: mol_type = other DNA
acataaagaaaataagatggat

SEQ ID NO: 136405 - DNA, 22 bp, synthetic construct
  misc_feature 1..22: note = chemically synthesized
  source 1..22: mol_type = other DNA
cataaagaaaataagatggata

SEQ ID NO: 136406 - DNA, 22 bp, synthetic construct
  misc_feature 1..22: note = chemically synthesized
  source 1..22: mol_type = other DNA
ataaaagtgataatttgagaaa

SEQ ID NO: 136407 - DNA, 22 bp, synthetic construct
  misc_feature 1..22: note = chemically synthesized
  source 1..22: mol_type = other DNA
taaaagtgataatttgagaaaa

SEQ ID NO: 136408 - DNA, 22 bp, synthetic construct
  misc_feature 1..22: note = chemically synthesized
  source 1..22: mol_type = other DNA
gagaaaaaaaatactccatatt

SEQ ID NO: 136409 - DNA, 22 bp, synthetic construct
  misc_feature 1..22: note = chemically synthesized
  source 1..22: mol_type = other DNA
agaaaaaaaatactccatattc

SEQ ID NO: 136410 - DNA, 22 bp, synthetic construct
  misc_feature 1..22: note = chemically synthesized
  source 1..22: mol_type = other DNA
catattctgagtttcttcacat

SEQ ID NO: 136411 - DNA, 22 bp, synthetic construct
  misc_feature 1..22: note = chemically synthesized
  source 1..22: mol_type = other DNA
tgagtttcttcacataaaataa

SEQ ID NO: 136412 - DNA, 22 bp, synthetic construct
  misc_feature 1..22: note = chemically synthesized
  source 1..22: mol_type = other DNA
agtttcttcacataaaataata

SEQ ID NO: 136413 - DNA, 22 bp, synthetic construct
  misc_feature 1..22: note = chemically synthesized
  source 1..22: mol_type = other DNA
cttcacataaaataatacaaat

SEQ ID NO: 136414 - DNA, 22 bp, synthetic construct
  misc_feature 1..22: note = chemically synthesized
  source 1..22: mol_type = other DNA
ttcacataaaataatacaaatc

SEQ ID NO: 136415 - DNA, 22 bp, synthetic construct
  misc_feature 1..22: note = chemically synthesized
  source 1..22: mol_type = other DNA
cacataaaataatacaaatctg

SEQ ID NO: 136416 - DNA, 22 bp, synthetic construct
  misc_feature 1..22: note = chemically synthesized
  source 1..22: mol_type = other DNA
acataaaataatacaaatctgc

SEQ ID NO: 136417 - DNA, 22 bp, synthetic construct
  misc_feature 1..22: note = chemically synthesized
  source 1..22: mol_type = other DNA
ctgtggtaagttacaaagagat

SEQ ID NO: 136418 - DNA, 22 bp, synthetic construct
  misc_feature 1..22: note = chemically synthesized
  source 1..22: mol_type = other DNA
tggtaagttacaaagagataga

SEQ ID NO: 136419 - DNA, 22 bp, synthetic construct
  misc_feature 1..22: note = chemically synthesized
  source 1..22: mol_type = other DNA
caaagagatagattttttatca

SEQ ID NO: 136420 - DNA, 22 bp, synthetic construct
  misc_feature 1..22: note = chemically synthesized
  source 1..22: mol_type = other DNA
tttatcattatataaaagatat

SEQ ID NO: 136421 - DNA, 22 bp, synthetic construct
  misc_feature 1..22: note = chemically synthesized
  source 1..22: mol_type = other DNA
ttatcattatataaaagatatt

SEQ ID NO: 136422 - DNA, 22 bp, synthetic construct
  misc_feature 1..22: note = chemically synthesized
  source 1..22: mol_type = other DNA
tatcattatataaaagatattt

SEQ ID NO: 136423 - DNA, 22 bp, synthetic construct
  misc_feature 1..22: note = chemically synthesized
  source 1..22: mol_type = other DNA
atcattatataaaagatatttt

SEQ ID NO: 136424 - DNA, 22 bp, synthetic construct
  misc_feature 1..22: note = chemically synthesized
  source 1..22: mol_type = other DNA
tcattatataaaagatatttta

SEQ ID NO: 136425 - DNA, 22 bp, synthetic construct
  misc_feature 1..22: note = chemically synthesized
  source 1..22: mol_type = other DNA
tataaaagatattttaaacaga

SEQ ID NO: 136426 - DNA, 22 bp, synthetic construct
  misc_feature 1..22: note = chemically synthesized
  source 1..22: mol_type = other DNA
taaacagagttatacaacaaag

SEQ ID NO: 136427 - DNA, 22 bp, synthetic construct
  misc_feature 1..22: note = chemically synthesized
  source 1..22: mol_type = other DNA
aaacagagttatacaacaaagg

SEQ ID NO: 136428 - DNA, 22 bp, synthetic construct
  misc_feature 1..22: note = chemically synthesized
  source 1..22: mol_type = other DNA
aacagagttatacaacaaagga

SEQ ID NO: 136429 - DNA, 22 bp, synthetic construct
  misc_feature 1..22: note = chemically synthesized
  source 1..22: mol_type = other DNA
tacaacaaaggaacagactatg

SEQ ID NO: 136430 - DNA, 22 bp, synthetic construct
  misc_feature 1..22: note = chemically synthesized
  source 1..22: mol_type = other DNA
tgtcatatattctcacttatca

SEQ ID NO: 136431 - DNA, 22 bp, synthetic construct
  misc_feature 1..22: note = chemically synthesized
  source 1..22: mol_type = other DNA
tcacttatcactataaacatct

SEQ ID NO: 136432 - DNA, 22 bp, synthetic construct
  misc_feature 1..22: note = chemically synthesized
  source 1..22: mol_type = other DNA
acttatcactataaacatctca

SEQ ID NO: 136433 - DNA, 22 bp, synthetic construct
  misc_feature 1..22: note = chemically synthesized
  source 1..22: mol_type = other DNA
atcactataaacatctcagaaa

SEQ ID NO: 136434 - DNA, 22 bp, synthetic construct
  misc_feature 1..22: note = chemically synthesized
  source 1..22: mol_type = other DNA
tcactataaacatctcagaaaa

SEQ ID NO: 136435 - DNA, 22 bp, synthetic construct
  misc_feature 1..22: note = chemically synthesized
  source 1..22: mol_type = other DNA
taaacatctcagaaaaatctgc

SEQ ID NO: 136436 - DNA, 22 bp, synthetic construct
  misc_feature 1..22: note = chemically synthesized
  source 1..22: mol_type = other DNA
agaaaaatctgcaaaatcattt

SEQ ID NO: 136437 - DNA, 22 bp, synthetic construct
  misc_feature 1..22: note = chemically synthesized
  source 1..22: mol_type = other DNA
caaaatcatttcatagcatttt

SEQ ID NO: 136438 - DNA, 22 bp, synthetic construct
  misc_feature 1..22: note = chemically synthesized
  source 1..22: mol_type = other DNA
catagcattttaaatagttagg

SEQ ID NO: 136439 - DNA, 22 bp, synthetic construct
  misc_feature 1..22: note = chemically synthesized
  source 1..22: mol_type = other DNA
atagcattttaaatagttagga

SEQ ID NO: 136440 - DNA, 22 bp, synthetic construct
  misc_feature 1..22: note = chemically synthesized
  source 1..22: mol_type = other DNA
taaatagttaggaataatgtag

SEQ ID NO: 136441 - DNA, 22 bp, synthetic construct
  misc_feature 1..22: note = chemically synthesized
  source 1..22: mol_type = other DNA
aaatagttaggaataatgtaga

SEQ ID NO: 136442 - DNA, 22 bp, synthetic construct
  misc_feature 1..22: note = chemically synthesized
  source 1..22: mol_type = other DNA
aatagttaggaataatgtagaa

SEQ ID NO: 136443 - DNA, 22 bp, synthetic construct
  misc_feature 1..22: note = chemically synthesized
  source 1..22: mol_type = other DNA
ggaataatgtagaaaactgaaa

SEQ ID NO: 136444 - DNA, 22 bp, synthetic construct
  misc_feature 1..22: note = chemically synthesized
  source 1..22: mol_type = other DNA
aaacagttctaagtttcccaca

SEQ ID NO: 136445 - DNA, 22 bp, synthetic construct
  misc_feature 1..22: note = chemically synthesized
  source 1..22: mol_type = other DNA
taagtttcccacaaacttagag

SEQ ID NO: 136446 - DNA, 22 bp, synthetic construct
  misc_feature 1..22: note = chemically synthesized
  source 1..22: mol_type = other DNA
agtttcccacaaacttagagtc

SEQ ID NO: 136447 - DNA, 22 bp, synthetic construct
  misc_feature 1..22: note = chemically synthesized
  source 1..22: mol_type = other DNA
cccacaaacttagagtctcaaa

SEQ ID NO: 136448 - DNA, 22 bp, synthetic construct
  misc_feature 1..22: note = chemically synthesized
  source 1..22: mol_type = other DNA
ccacaaacttagagtctcaaat

SEQ ID NO: 136449 - DNA, 22 bp, synthetic construct
  misc_feature 1..22: note = chemically synthesized
  source 1..22: mol_type = other DNA
agagtctcaaatgttgcattac

SEQ ID NO: 136450 - DNA, 22 bp, synthetic construct
  misc_feature 1..22: note = chemically synthesized
  source 1..22: mol_type = other DNA
gagtctcaaatgttgcattacc

SEQ ID NO: 136451 - DNA, 22 bp, synthetic construct
  misc_feature 1..22: note = chemically synthesized
  source 1..22: mol_type = other DNA
aaatgttgcattacctaactta

SEQ ID NO: 136452 - DNA, 22 bp, synthetic construct
  misc_feature 1..22: note = chemically synthesized
  source 1..22: mol_type = other DNA
cattacctaacttacctgcaaa

SEQ ID NO: 136453 - DNA, 22 bp, synthetic construct
  misc_feature 1..22: note = chemically synthesized
  source 1..22: mol_type = other DNA
cctaacttacctgcaaatattt

SEQ ID NO: 136454 - DNA, 22 bp, synthetic construct
  misc_feature 1..22: note = chemically synthesized
  source 1..22: mol_type = other DNA
acttacctgcaaatattttata

SEQ ID NO: 136455 - DNA, 22 bp, synthetic construct
  misc_feature 1..22: note = chemically synthesized
  source 1..22: mol_type = other DNA
acctgcaaatattttatacaaa

SEQ ID NO: 136456 - DNA, 22 bp, synthetic construct
  misc_feature 1..22: note = chemically synthesized
  source 1..22: mol_type = other DNA
cctgcaaatattttatacaaat

SEQ ID NO: 136457 - DNA, 22 bp, synthetic construct
  misc_feature 1..22: note = chemically synthesized
  source 1..22: mol_type = other DNA
caaatattttatacaaatttgc

SEQ ID NO: 136458 - DNA, 22 bp, synthetic construct
  misc_feature 1..22: note = chemically synthesized
  source 1..22: mol_type = other DNA
tatacaaatttgcacatgctac

SEQ ID NO: 136459 - DNA, 22 bp, synthetic construct
  misc_feature 1..22: note = chemically synthesized
  source 1..22: mol_type = other DNA
atacaaatttgcacatgctact

SEQ ID NO: 136460 - DNA, 22 bp, synthetic construct
  misc_feature 1..22: note = chemically synthesized
  source 1..22: mol_type = other DNA
tacaaatttgcacatgctactc

SEQ ID NO: 136461 - DNA, 22 bp, synthetic construct
  misc_feature 1..22: note = chemically synthesized
  source 1..22: mol_type = other DNA
gcacatgctactctagtcaaaa

SEQ ID NO: 136462 - DNA, 22 bp, synthetic construct
  misc_feature 1..22: note = chemically synthesized
  source 1..22: mol_type = other DNA
cacatgctactctagtcaaaaa

SEQ ID NO: 136463 - DNA, 22 bp, synthetic construct
  misc_feature 1..22: note = chemically synthesized
  source 1..22: mol_type = other DNA
ctctagtcaaaaatatatgtac

SEQ ID NO: 136464 - DNA, 22 bp, synthetic construct
  misc_feature 1..22: note = chemically synthesized
  source 1..22: mol_type = other DNA
tagtcaaaaatatatgtacatt

SEQ ID NO: 136465 - DNA, 22 bp, synthetic construct
  misc_feature 1..22: note = chemically synthesized
  source 1..22: mol_type = other DNA
gtcaaaaatatatgtacattat

SEQ ID NO: 136466 - DNA, 22 bp, synthetic construct
  misc_feature 1..22: note = chemically synthesized
  source 1..22: mol_type = other DNA
tgggtattttctgtgtgtaact

SEQ ID NO: 136467 - DNA, 22 bp, synthetic construct
  misc_feature 1..22: note = chemically synthesized
  source 1..22: mol_type = other DNA
tctgtgtgtaacttggttctag

SEQ ID NO: 136468 - DNA, 22 bp, synthetic construct
  misc_feature 1..22: note = chemically synthesized
  source 1..22: mol_type = other DNA
ctgtgtgtaacttggttctagt

SEQ ID NO: 136469 - DNA, 22 bp, synthetic construct
  misc_feature 1..22: note = chemically synthesized
  source 1..22: mol_type = other DNA
tgtgtgtaacttggttctagtt

SEQ ID NO: 136470 - DNA, 22 bp, synthetic construct
  misc_feature 1..22: note = chemically synthesized
  source 1..22: mol_type = other DNA
tgtgtaacttggttctagttgc

SEQ ID NO: 136471 - DNA, 22 bp, synthetic construct
  misc_feature 1..22: note = chemically synthesized
  source 1..22: mol_type = other DNA
ggttctagttgcttctttcaga

SEQ ID NO: 136472 - DNA, 22 bp, synthetic construct
  misc_feature 1..22: note = chemically synthesized
  source 1..22: mol_type = other DNA
gttctagttgcttctttcagaa

SEQ ID NO: 136473 - DNA, 22 bp, synthetic construct
  misc_feature 1..22: note = chemically synthesized
  source 1..22: mol_type = other DNA
tagttgcttctttcagaaatag

SEQ ID NO: 136474 - DNA, 22 bp, synthetic construct
  misc_feature 1..22: note = chemically synthesized
  source 1..22: mol_type = other DNA
gttgcttctttcagaaatagcc

SEQ ID NO: 136475 - DNA, 22 bp, synthetic construct
  misc_feature 1..22: note = chemically synthesized
  source 1..22: mol_type = other DNA
cttctttcagaaatagcctcta

SEQ ID NO: 136476 - DNA, 22 bp, synthetic construct
  misc_feature 1..22: note = chemically synthesized
  source 1..22: mol_type = other DNA
ctttcagaaatagcctctattt

SEQ ID NO: 136477 - DNA, 22 bp, synthetic construct
  misc_feature 1..22: note = chemically synthesized
  source 1..22: mol_type = other DNA
tttcagaaatagcctctatttt

SEQ ID NO: 136478 - DNA, 22 bp, synthetic construct
  misc_feature 1..22: note = chemically synthesized
  source 1..22: mol_type = other DNA
tcagaaatagcctctatttttg

SEQ ID NO: 136479 - DNA, 22 bp, synthetic construct
  misc_feature 1..22: note = chemically synthesized
  source 1..22: mol_type = other DNA
cagaaatagcctctatttttga

SEQ ID NO: 136480 - DNA, 22 bp, synthetic construct
  misc_feature 1..22: note = chemically synthesized
  source 1..22: mol_type = other DNA
agaaatagcctctatttttgat

SEQ ID NO: 136481 - DNA, 22 bp, synthetic construct
  misc_feature 1..22: note = chemically synthesized
  source 1..22: mol_type = other DNA
tatttttgatttacctgataaa

SEQ ID NO: 136482 - DNA, 22 bp, synthetic construct
  misc_feature 1..22: note = chemically synthesized
  source 1..22: mol_type = other DNA
tttttgatttacctgataaaat

SEQ ID NO: 136483 - DNA, 22 bp, synthetic construct
  misc_feature 1..22: note = chemically synthesized
  source 1..22: mol_type = other DNA
ttgatttacctgataaaatcac

SEQ ID NO: 136484 - DNA, 22 bp, synthetic construct
  misc_feature 1..22: note = chemically synthesized
  source 1..22: mol_type = other DNA
tgatttacctgataaaatcaca

SEQ ID NO: 136485 - DNA, 22 bp, synthetic construct
  misc_feature 1..22: note = chemically synthesized
  source 1..22: mol_type = other DNA
gatttacctgataaaatcacat

SEQ ID NO: 136486 - DNA, 22 bp, synthetic construct
  misc_feature 1..22: note = chemically synthesized
  source 1..22: mol_type = other DNA
atttacctgataaaatcacatt

SEQ ID NO: 136487 - DNA, 22 bp, synthetic construct
  misc_feature 1..22: note = chemically synthesized
  source 1..22: mol_type = other DNA
acctgataaaatcacattcctc

SEQ ID NO: 136488 - DNA, 22 bp, synthetic construct
  misc_feature 1..22: note = chemically synthesized
  source 1..22: mol_type = other DNA
cctgataaaatcacattcctct

SEQ ID NO: 136489 - DNA, 22 bp, synthetic construct
  misc_feature 1..22: note = chemically synthesized
  source 1..22: mol_type = other DNA
ataaaatcacattcctctccaa

SEQ ID NO: 136490 - DNA, 22 bp, synthetic construct
  misc_feature 1..22: note = chemically synthesized
  source 1..22: mol_type = other DNA
ctctccaaagccttctaaatac

SEQ ID NO: 136491 - DNA, 22 bp, synthetic construct
  misc_feature 1..22: note = chemically synthesized
  source 1..22: mol_type = other DNA
tccaaagccttctaaatacttc

SEQ ID NO: 136492 - DNA, 22 bp, synthetic construct
  misc_feature 1..22: note = chemically synthesized
  source 1..22: mol_type = other DNA
caaagccttctaaatacttcca

SEQ ID NO: 136493 - DNA, 22 bp, synthetic construct
  misc_feature 1..22: note = chemically synthesized
  source 1..22: mol_type = other DNA
ctaaatacttccagactaacta

SEQ ID NO: 136494 - DNA, 22 bp, synthetic construct
  misc_feature 1..22: note = chemically synthesized
  source 1..22: mol_type = other DNA
taaatacttccagactaactac

SEQ ID NO: 136495 - DNA, 22 bp, synthetic construct
  misc_feature 1..22: note = chemically synthesized
  source 1..22: mol_type = other DNA
aatacttccagactaactactt

SEQ ID NO: 136496 - DNA, 22 bp, synthetic construct
  misc_feature 1..22: note = chemically synthesized
  source 1..22: mol_type = other DNA
ccagactaactactttttagta

SEQ ID NO: 136497 - DNA, 22 bp, synthetic construct
  misc_feature 1..22: note = chemically synthesized
  source 1..22: mol_type = other DNA
cagactaactactttttagtac

SEQ ID NO: 136498 - DNA, 22 bp, synthetic construct
  misc_feature 1..22: note = chemically synthesized
  source 1..22: mol_type = other DNA
actactttttagtacatctaag

SEQ ID NO: 136499 - DNA, 22 bp, synthetic construct
  misc_feature 1..22: note = chemically synthesized
  source 1..22: mol_type = other DNA
ctttttagtacatctaagaaga

SEQ ID NO: 136500 - DNA, 22 bp, synthetic construct
  misc_feature 1..22: note = chemically synthesized
  source 1..22: mol_type = other DNA
tttagtacatctaagaagaaaa

SEQ ID NO: 136501 - DNA, 22 bp, synthetic construct
  misc_feature 1..22: note = chemically synthesized
  source 1..22: mol_type = other DNA
ttagtacatctaagaagaaaag

SEQ ID NO: 136502 - DNA, 22 bp, synthetic construct
  misc_feature 1..22: note = chemically synthesized
  source 1..22: mol_type = other DNA
tagtacatctaagaagaaaaga

SEQ ID NO: 136503 - DNA, 22 bp, synthetic construct
  misc_feature 1..22: note = chemically synthesized
  source 1..22: mol_type = other DNA
agtacatctaagaagaaaagag

SEQ ID NO: 136504 - DNA, 22 bp, synthetic construct
  misc_feature 1..22: note = chemically synthesized
  source 1..22: mol_type = other DNA
gtacatctaagaagaaaagagt

SEQ ID NO: 136505 - DNA, 22 bp, synthetic construct
  misc_feature 1..22: note = chemically synthesized
  source 1..22: mol_type = other DNA
agaagaaaagagttttgtctct

SEQ ID NO: 136506 - DNA, 22 bp, synthetic construct
  misc_feature 1..22: note = chemically synthesized
  source 1..22: mol_type = other DNA
tgtctcttatccacctctgagt

SEQ ID NO: 136507 - DNA, 22 bp, synthetic construct
  misc_feature 1..22: note = chemically synthesized
  source 1..22: mol_type = other DNA
gtctcttatccacctctgagtc

SEQ ID NO: 136508 - DNA, 22 bp, synthetic construct
  misc_feature 1..22: note = chemically synthesized
  source 1..22: mol_type = other DNA
tctcttatccacctctgagtca

SEQ ID NO: 136509 - DNA, 22 bp, synthetic construct
  misc_feature 1..22: note = chemically synthesized
  source 1..22: mol_type = other DNA
ttatccacctctgagtcaaaaa

SEQ ID NO: 136510 - DNA, 22 bp, synthetic construct
  misc_feature 1..22: note = chemically synthesized
  source 1..22: mol_type = other DNA
atccacctctgagtcaaaaagc

SEQ ID NO: 136511 - DNA, 22 bp, synthetic construct
  misc_feature 1..22: note = chemically synthesized
  source 1..22: mol_type = other DNA
tccacctctgagtcaaaaagca

SEQ ID NO: 136512 - DNA, 22 bp, synthetic construct
  misc_feature 1..22: note = chemically synthesized
  source 1..22: mol_type = other DNA
tgagtcaaaaagcagcatgtcc

SEQ ID NO: 136513 - DNA, 22 bp, synthetic construct
  misc_feature 1..22: note = chemically synthesized
  source 1..22: mol_type = other DNA
agtcaaaaagcagcatgtccat

SEQ ID NO: 136514 - DNA, 22 bp, synthetic construct
  misc_feature 1..22: note = chemically synthesized
  source 1..22: mol_type = other DNA
gtacatagttcccacagcccca

SEQ ID NO: 136515 - DNA, 22 bp, synthetic construct
  misc_feature 1..22: note = chemically synthesized
  source 1..22: mol_type = other DNA
ccacagccccacttagctctgg

SEQ ID NO: 136516 - DNA, 22 bp, synthetic construct
  misc_feature 1..22: note = chemically synthesized
  source 1..22: mol_type = other DNA
agctctggattggagttctact

SEQ ID NO: 136517 - DNA, 22 bp, synthetic construct
  misc_feature 1..22: note = chemically synthesized
  source 1..22: mol_type = other DNA
gctctggattggagttctactt

SEQ ID NO: 136518 - DNA, 22 bp, synthetic construct
  misc_feature 1..22: note = chemically synthesized
  source 1..22: mol_type = other DNA
tggattggagttctacttggca

SEQ ID NO: 136519 - DNA, 22 bp, synthetic construct
  misc_feature 1..22: note = chemically synthesized
  source 1..22: mol_type = other DNA
gattggagttctacttggcatt

SEQ ID NO: 136520 - DNA, 22 bp, synthetic construct
  misc_feature 1..22: note = chemically synthesized
  source 1..22: mol_type = other DNA
gagttctacttggcattgtttg

SEQ ID NO: 136521 - DNA, 22 bp, synthetic construct
  misc_feature 1..22: note = chemically synthesized
  source 1..22: mol_type = other DNA
tacttggcattgtttgcaacta

SEQ ID NO: 136522 - DNA, 22 bp, synthetic construct
  misc_feature 1..22: note = chemically synthesized
  source 1..22: mol_type = other DNA
cttggcattgtttgcaactaca

SEQ ID NO: 136523 - DNA, 22 bp, synthetic construct
  misc_feature 1..22: note = chemically synthesized
  source 1..22: mol_type = other DNA
ggcattgtttgcaactacatgg

SEQ ID NO: 136524 - DNA, 22 bp, synthetic construct
  misc_feature 1..22: note = chemically synthesized
  source 1..22: mol_type = other DNA
gcattgtttgcaactacatgga

SEQ ID NO: 136525 - DNA, 22 bp, synthetic construct
  misc_feature 1..22: note = chemically synthesized
  source 1..22: mol_type = other DNA
tttgcaactacatggacgtaaa

SEQ ID NO: 136526 - DNA, 22 bp, synthetic construct
  misc_feature 1..22: note = chemically synthesized
  source 1..22: mol_type = other DNA
gcaactacatggacgtaaaatg

SEQ ID NO: 136527 - DNA, 22 bp, synthetic construct
  misc_feature 1..22: note = chemically synthesized
  source 1..22: mol_type = other DNA
caactacatggacgtaaaatgc

SEQ ID NO: 136528 - DNA, 22 bp, synthetic construct
  misc_feature 1..22: note = chemically synthesized
  source 1..22: mol_type = other DNA
catggacgtaaaatgcatggat

SEQ ID NO: 136529 - DNA, 22 bp, synthetic construct
  misc_feature 1..22: note = chemically synthesized
  source 1..22: mol_type = other DNA
tcttgaaaaaatgtttctgcca

SEQ ID NO: 136530 - DNA, 22 bp, synthetic construct
  misc_feature 1..22: note = chemically synthesized
  source 1..22: mol_type = other DNA
ttgaaaaaatgtttctgccatg

SEQ ID NO: 136531 - DNA, 22 bp, synthetic construct
  misc_feature 1..22: note = chemically synthesized
  source 1..22: mol_type = other DNA
gaaaaaatgtttctgccatgat

SEQ ID NO: 136532 - DNA, 22 bp, synthetic construct
  misc_feature 1..22: note = chemically synthesized
  source 1..22: mol_type = other DNA
aaaaaatgtttctgccatgatg

SEQ ID NO: 136533 - DNA, 22 bp, synthetic construct
  misc_feature 1..22: note = chemically synthesized
  source 1..22: mol_type = other DNA
ctgccatgatgttctctgaaag

SEQ ID NO: 136534 - DNA, 22 bp, synthetic construct
  misc_feature 1..22: note = chemically synthesized
  source 1..22: mol_type = other DNA
tgccatgatgttctctgaaaga

SEQ ID NO: 136535 - DNA, 22 bp, synthetic construct
  misc_feature 1..22: note = chemically synthesized
  source 1..22: mol_type = other DNA
ccatgatgttctctgaaagaga

SEQ ID NO: 136536 - DNA, 22 bp, synthetic construct
  misc_feature 1..22: note = chemically synthesized
  source 1..22: mol_type = other DNA
tctgaaagagactaaccttccc

SEQ ID NO: 136537 - DNA, 22 bp, synthetic construct
  misc_feature 1..22: note = chemically synthesized
  source 1..22: mol_type = other DNA
tgaaagagactaaccttccctc

SEQ ID NO: 136538 - DNA, 22 bp, synthetic construct
  misc_feature 1..22: note = chemically synthesized
  source 1..22: mol_type = other DNA
aaagagactaaccttccctcgc

SEQ ID NO: 136539 - DNA, 22 bp, synthetic construct
  misc_feature 1..22: note = chemically synthesized
  source 1..22: mol_type = other DNA
accttccctcgctttgcagaga

SEQ ID NO: 136540 - DNA, 22 bp, synthetic construct
  misc_feature 1..22: note = chemically synthesized
  source 1..22: mol_type = other DNA
ccctcgctttgcagagaaagac

SEQ ID NO: 136541 - DNA, 22 bp, synthetic construct
  misc_feature 1..22: note = chemically synthesized
  source 1..22: mol_type = other DNA
cctcgctttgcagagaaagact

SEQ ID NO: 136542 - DNA, 22 bp, synthetic construct
  misc_feature 1..22: note = chemically synthesized
  source 1..22: mol_type = other DNA
gctttgcagagaaagactcgtg

SEQ ID NO: 136543 - DNA, 22 bp, synthetic construct
  misc_feature 1..22: note = chemically synthesized
  source 1..22: mol_type = other DNA
tgcagagaaagactcgtgtaat

SEQ ID NO: 136544 - DNA, 22 bp, synthetic construct
  misc_feature 1..22: note = chemically synthesized
  source 1..22: mol_type = other DNA
gcagagaaagactcgtgtaatc

SEQ ID NO: 136545 - DNA, 22 bp, synthetic construct
  misc_feature 1..22: note = chemically synthesized
  source 1..22: mol_type = other DNA
cagagaaagactcgtgtaatcc

SEQ ID NO: 136546 - DNA, 22 bp, synthetic construct
  misc_feature 1..22: note = chemically synthesized
  source 1..22: mol_type = other DNA
gtgtaatccttgacaatgtcat

SEQ ID NO: 136547 - DNA, 22 bp, synthetic construct
  misc_feature 1..22: note = chemically synthesized
  source 1..22: mol_type = other DNA
gacaatgtcatctcatctattt

SEQ ID NO: 136548 - DNA, 22 bp, synthetic construct
  misc_feature 1..22: note = chemically synthesized
  source 1..22: mol_type = other DNA
acaatgtcatctcatctattta

SEQ ID NO: 136549 - DNA, 22 bp, synthetic construct
  misc_feature 1..22: note = chemically synthesized
  source 1..22: mol_type = other DNA
atctatttattcccatgtctac

SEQ ID NO: 136550 - DNA, 22 bp, synthetic construct
  misc_feature 1..22: note = chemically synthesized
  source 1..22: mol_type = other DNA
tttattcccatgtctacccata

SEQ ID NO: 136551 - DNA, 22 bp, synthetic construct
  misc_feature 1..22: note = chemically synthesized
  source 1..22: mol_type = other DNA
attcccatgtctacccatatgt

SEQ ID NO: 136552 - DNA, 22 bp, synthetic construct
  misc_feature 1..22: note = chemically synthesized
  source 1..22: mol_type = other DNA
ttcccatgtctacccatatgtg

SEQ ID NO: 136553 - DNA, 22 bp, synthetic construct
  misc_feature 1..22: note = chemically synthesized
  source 1..22: mol_type = other DNA
ccatgtctacccatatgtgacc

SEQ ID NO: 136554 - DNA, 22 bp, synthetic construct
  misc_feature 1..22: note = chemically synthesized
  source 1..22: mol_type = other DNA
cccatatgtgaccttcatgtct

SEQ ID NO: 136555 - DNA, 22 bp, synthetic construct
  misc_feature 1..22: note = chemically synthesized
  source 1..22: mol_type = other DNA
catgtctttgctctaagcccct

SEQ ID NO: 136556 - DNA, 22 bp, synthetic construct
  misc_feature 1..22: note = chemically synthesized
  source 1..22: mol_type = other DNA
atgtctttgctctaagccccta

SEQ ID NO: 136557 - DNA, 22 bp, synthetic construct
  misc_feature 1..22: note = chemically synthesized
  source 1..22: mol_type = other DNA
tgctctaagcccctacatcctc

SEQ ID NO: 136558 - DNA, 22 bp, synthetic construct
  misc_feature 1..22: note = chemically synthesized
  source 1..22: mol_type = other DNA
gctctaagcccctacatcctca

SEQ ID NO: 136559 - DNA, 22 bp, synthetic construct
  misc_feature 1..22: note = chemically synthesized
  source 1..22: mol_type = other DNA
ctctaagcccctacatcctcaa

SEQ ID NO: 136560 - DNA, 22 bp, synthetic construct
  misc_feature 1..22: note = chemically synthesized
  source 1..22: mol_type = other DNA
taagcccctacatcctcaatct

SEQ ID NO: 136561 - DNA, 22 bp, synthetic construct
  misc_feature 1..22: note = chemically synthesized
  source 1..22: mol_type = other DNA
agcccctacatcctcaatctac

SEQ ID NO: 136562 - DNA, 22 bp, synthetic construct
  misc_feature 1..22: note = chemically synthesized
  source 1..22: mol_type = other DNA
catcctcaatctacacactagg

SEQ ID NO: 136563 - DNA, 22 bp, synthetic construct
  misc_feature 1..22: note = chemically synthesized
  source 1..22: mol_type = other DNA
aatctacacactaggatagtat

SEQ ID NO: 136564 - DNA, 22 bp, synthetic construct
  misc_feature 1..22: note = chemically synthesized
  source 1..22: mol_type = other DNA
cacactaggatagtataaaagt

SEQ ID NO: 136565 - DNA, 22 bp, synthetic construct
  misc_feature 1..22: note = chemically synthesized
  source 1..22: mol_type = other DNA
ggatagtataaaagtaatagta

SEQ ID NO: 136566 - DNA, 22 bp, synthetic construct
  misc_feature 1..22: note = chemically synthesized
  source 1..22: mol_type = other DNA
tggcttatactatacacaagac

SEQ ID NO: 136567 - DNA, 22 bp, synthetic construct
  misc_feature 1..22: note = chemically synthesized
  source 1..22: mol_type = other DNA
atactatacacaagacactgtt

SEQ ID NO: 136568 - DNA, 22 bp, synthetic construct
  misc_feature 1..22: note = chemically synthesized
  source 1..22: mol_type = other DNA
tactatacacaagacactgttg

SEQ ID NO: 136569 - DNA, 22 bp, synthetic construct
  misc_feature 1..22: note = chemically synthesized
  source 1..22: mol_type = other DNA
tacacaagacactgttgatata

SEQ ID NO: 136570 - DNA, 22 bp, synthetic construct
  misc_feature 1..22: note = chemically synthesized
  source 1..22: mol_type = other DNA
ttgatatattatttcatttagt

SEQ ID NO: 136571 - DNA, 22 bp, synthetic construct
  misc_feature 1..22: note = chemically synthesized
  source 1..22: mol_type = other DNA
atatattatttcatttagtatt

SEQ ID NO: 136572 - DNA, 22 bp, synthetic construct
  misc_feature 1..22: note = chemically synthesized
  source 1..22: mol_type = other DNA
tttcatttagtattcacagtaa

SEQ ID NO: 136573 - DNA, 22 bp, synthetic construct
  misc_feature 1..22: note = chemically synthesized
  source 1..22: mol_type = other DNA
catttagtattcacagtaactc

SEQ ID NO: 136574 - DNA, 22 bp, synthetic construct
  misc_feature 1..22: note = chemically synthesized
  source 1..22: mol_type = other DNA
atttagtattcacagtaactct

SEQ ID NO: 136575 - DNA, 22 bp, synthetic construct
  misc_feature 1..22: note = chemically synthesized
  source 1..22: mol_type = other DNA
agtattcacagtaactctgtgc

SEQ ID NO: 136576 - DNA, 22 bp, synthetic construct
  misc_feature 1..22: note = chemically synthesized
  source 1..22: mol_type = other DNA
gtattcacagtaactctgtgcc

SEQ ID NO: 136577 - DNA, 22 bp, synthetic construct
  misc_feature 1..22: note = chemically synthesized
  source 1..22: mol_type = other DNA
acagtaactctgtgcctcaagt

SEQ ID NO: 136578 - DNA, 22 bp, synthetic construct
  misc_feature 1..22: note = chemically synthesized
  source 1..22: mol_type = other DNA
tgtgcctcaagtactattgtaa

SEQ ID NO: 136579 - DNA, 22 bp, synthetic construct
  misc_feature 1..22: note = chemically synthesized
  source 1..22: mol_type = other DNA
tgcctcaagtactattgtaata

SEQ ID NO: 136580 - DNA, 22 bp, synthetic construct
  misc_feature 1..22: note = chemically synthesized
  source 1..22: mol_type = other DNA
aagtactattgtaatacccttt

SEQ ID NO: 136581 - DNA, 22 bp, synthetic construct
  misc_feature 1..22: note = chemically synthesized
  source 1..22: mol_type = other DNA
ttgtaataccctttaagaggag

SEQ ID NO: 136582 - DNA, 22 bp, synthetic construct
  misc_feature 1..22: note = chemically synthesized
  source 1..22: mol_type = other DNA
taataccctttaagaggaggaa

SEQ ID NO: 136583 - DNA, 22 bp, synthetic construct
  misc_feature 1..22: note = chemically synthesized
  source 1..22: mol_type = other DNA
taagaggaggaaactgaggcac

SEQ ID NO: 136584 - DNA, 22 bp, synthetic construct
  misc_feature 1..22: note = chemically synthesized
  source 1..22: mol_type = other DNA
aagaggaggaaactgaggcaca

SEQ ID NO: 136585 - DNA, 22 bp, synthetic construct
  misc_feature 1..22: note = chemically synthesized
  source 1..22: mol_type = other DNA
agaggaggaaactgaggcacag

SEQ ID NO: 136586 - DNA, 22 bp, synthetic construct
  misc_feature 1..22: note = chemically synthesized
  source 1..22: mol_type = other DNA
aggcacagggccctaaagtaat

SEQ ID NO: 136587 - DNA, 22 bp, synthetic construct
  misc_feature 1..22: note = chemically synthesized
  source 1..22: mol_type = other DNA
aagtaatattccaagatgaagt

SEQ ID NO: 136588 - DNA, 22 bp, synthetic construct
  misc_feature 1..22: note = chemically synthesized
  source 1..22: mol_type = other DNA
caagatgaagtggctactaact

SEQ ID NO: 136589 - DNA, 22 bp, synthetic construct
  misc_feature 1..22: note = chemically synthesized
  source 1..22: mol_type = other DNA
ctaactgacagagggcataatt

SEQ ID NO: 136590 - DNA, 22 bp, synthetic construct
  misc_feature 1..22: note = chemically synthesized
  source 1..22: mol_type = other DNA
actgacagagggcataattcaa

SEQ ID NO: 136591 - DNA, 22 bp, synthetic construct
  misc_feature 1..22: note = chemically synthesized
  source 1..22: mol_type = other DNA
acagagggcataattcaactca

SEQ ID NO: 136592 - DNA, 22 bp, synthetic construct
  misc_feature 1..22: note = chemically synthesized
  source 1..22: mol_type = other DNA
aactcatgatatttggctctag

SEQ ID NO: 136593 - DNA, 22 bp, synthetic construct
  misc_feature 1..22: note = chemically synthesized
  source 1..22: mol_type = other DNA
atgatatttggctctagaatac

SEQ ID NO: 136594 - DNA, 22 bp, synthetic construct
  misc_feature 1..22: note = chemically synthesized
  source 1..22: mol_type = other DNA
ggctctagaatacatgctctga

SEQ ID NO: 136595 - DNA, 22 bp, synthetic construct
  misc_feature 1..22: note = chemically synthesized
  source 1..22: mol_type = other DNA
gctctagaatacatgctctgaa

SEQ ID NO: 136596 - DNA, 22 bp, synthetic construct
  misc_feature 1..22: note = chemically synthesized
  source 1..22: mol_type = other DNA
tagaatacatgctctgaatcat

SEQ ID NO: 136597 - DNA, 22 bp, synthetic construct
  misc_feature 1..22: note = chemically synthesized
  source 1..22: mol_type = other DNA
gaatacatgctctgaatcatta

SEQ ID NO: 136598 - DNA, 22 bp, synthetic construct
  misc_feature 1..22: note = chemically synthesized
  source 1..22: mol_type = other DNA
tgaatcattatacaataataat

SEQ ID NO: 136599 - DNA, 22 bp, synthetic construct
  misc_feature 1..22: note = chemically synthesized
  source 1..22: mol_type = other DNA
aatcattatacaataataattc

SEQ ID NO: 136600 - DNA, 22 bp, synthetic construct
  misc_feature 1..22: note = chemically synthesized
  source 1..22: mol_type = other DNA
tacaataataattcatgaggaa

SEQ ID NO: 136601 - DNA, 22 bp, synthetic construct
  misc_feature 1..22: note = chemically synthesized
  source 1..22: mol_type = other DNA
atgaggaaacattttttaaagc

SEQ ID NO: 136602 - DNA, 22 bp, synthetic construct
  misc_feature 1..22: note = chemically synthesized
  source 1..22: mol_type = other DNA
tttaaagcctaagttatttgct

SEQ ID NO: 136603 - DNA, 22 bp, synthetic construct
  misc_feature 1..22: note = chemically synthesized
  source 1..22: mol_type = other DNA
ttaaagcctaagttatttgctc

SEQ ID NO: 136604 - DNA, 22 bp, synthetic construct
  misc_feature 1..22: note = chemically synthesized
  source 1..22: mol_type = other DNA
taaagcctaagttatttgctct

SEQ ID NO: 136605 - DNA, 22 bp, synthetic construct
  misc_feature 1..22: note = chemically synthesized
  source 1..22: mol_type = other DNA
aaagcctaagttatttgctctg

SEQ ID NO: 136606 - DNA, 22 bp, synthetic construct
  misc_feature 1..22: note = chemically synthesized
  source 1..22: mol_type = other DNA
aagcctaagttatttgctctga

SEQ ID NO: 136607 - DNA, 22 bp, synthetic construct
  misc_feature 1..22: note = chemically synthesized
  source 1..22: mol_type = other DNA
agttatttgctctgaaataaga

SEQ ID NO: 136608 - DNA, 22 bp, synthetic construct
  misc_feature 1..22: note = chemically synthesized
  source 1..22: mol_type = other DNA
tttgctctgaaataagacataa

SEQ ID NO: 136609 - DNA, 22 bp, synthetic construct
  misc_feature 1..22: note = chemically synthesized
  source 1..22: mol_type = other DNA
gctctgaaataagacataattt

SEQ ID NO: 136610 - DNA, 22 bp, synthetic construct
  misc_feature 1..22: note = chemically synthesized
  source 1..22: mol_type = other DNA
ctctgaaataagacataatttg

SEQ ID NO: 136611 - DNA, 22 bp, synthetic construct
  misc_feature 1..22: note = chemically synthesized
  source 1..22: mol_type = other DNA
tgaaataagacataatttgggg

SEQ ID NO: 136612 - DNA, 22 bp, synthetic construct
  misc_feature 1..22: note = chemically synthesized
  source 1..22: mol_type = other DNA
aaataagacataatttggggtg

SEQ ID NO: 136613 - DNA, 22 bp, synthetic construct
  misc_feature 1..22: note = chemically synthesized
  source 1..22: mol_type = other DNA
ggggtgagaaagcttagattcc

SEQ ID NO: 136614 - DNA, 22 bp, synthetic construct
  misc_feature 1..22: note = chemically synthesized
  source 1..22: mol_type = other DNA
gggtgagaaagcttagattcca

SEQ ID NO: 136615 - DNA, 22 bp, synthetic construct
  misc_feature 1..22: note = chemically synthesized
  source 1..22: mol_type = other DNA
agattccatgaagtattacagc

SEQ ID NO: 136616 - DNA, 22 bp, synthetic construct
  misc_feature 1..22: note = chemically synthesized
  source 1..22: mol_type = other DNA
gattccatgaagtattacagca

SEQ ID NO: 136617 - DNA, 22 bp, synthetic construct
  misc_feature 1..22: note = chemically synthesized
  source 1..22: mol_type = other DNA
catgaagtattacagcatttgg

SEQ ID NO: 136618 - DNA, 22 bp, synthetic construct
  misc_feature 1..22: note = chemically synthesized
  source 1..22: mol_type = other DNA
cagcatttggtagtctttttgc

SEQ ID NO: 136619 - DNA, 22 bp, synthetic construct
  misc_feature 1..22: note = chemically synthesized
  source 1..22: mol_type = other DNA
ggtagtctttttgcactccagg

SEQ ID NO: 136620 - DNA, 22 bp, synthetic construct
  misc_feature 1..22: note = chemically synthesized
  source 1..22: mol_type = other DNA
gtagtctttttgcactccaggt

SEQ ID NO: 136621 - DNA, 22 bp, synthetic construct
  misc_feature 1..22: note = chemically synthesized
  source 1..22: mol_type = other DNA
tttgcactccaggtcttatttt

SEQ ID NO: 136622 - DNA, 22 bp, synthetic construct
  misc_feature 1..22: note = chemically synthesized
  source 1..22: mol_type = other DNA
ttgcactccaggtcttattttt

SEQ ID NO: 136623 - DNA, 22 bp, synthetic construct
  misc_feature 1..22: note = chemically synthesized
  source 1..22: mol_type = other DNA
tgcactccaggtcttattttta

SEQ ID NO: 136624 - DNA, 22 bp, synthetic construct
  misc_feature 1..22: note = chemically synthesized
  source 1..22: mol_type = other DNA
gcactccaggtcttatttttac

SEQ ID NO: 136625 - DNA, 22 bp, synthetic construct
  misc_feature 1..22: note = chemically synthesized
  source 1..22: mol_type = other DNA
cactccaggtcttatttttact

SEQ ID NO: 136626 - DNA, 22 bp, synthetic construct
  misc_feature 1..22: note = chemically synthesized
  source 1..22: mol_type = other DNA
caggtcttatttttactgctta

SEQ ID NO: 136627 - DNA, 22 bp, synthetic construct
  misc_feature 1..22: note = chemically synthesized
  source 1..22: mol_type = other DNA
atttttactgcttaaacataat

SEQ ID NO: 136628 - DNA, 22 bp, synthetic construct
  misc_feature 1..22: note = chemically synthesized
  source 1..22: mol_type = other DNA
tttttactgcttaaacataata

SEQ ID NO: 136629 - DNA, 22 bp, synthetic construct
  misc_feature 1..22: note = chemically synthesized
  source 1..22: mol_type = other DNA
ttactgcttaaacataataaaa

SEQ ID NO: 136630 - DNA, 22 bp, synthetic construct
  misc_feature 1..22: note = chemically synthesized
  source 1..22: mol_type = other DNA
tactgcttaaacataataaaac

SEQ ID NO: 136631 - DNA, 22 bp, synthetic construct
  misc_feature 1..22: note = chemically synthesized
  source 1..22: mol_type = other DNA
actgcttaaacataataaaaca

SEQ ID NO: 136632 - DNA, 22 bp, synthetic construct
  misc_feature 1..22: note = chemically synthesized
  source 1..22: mol_type = other DNA
ctgcttaaacataataaaacat

SEQ ID NO: 136633 - DNA, 22 bp, synthetic construct
  misc_feature 1..22: note = chemically synthesized
  source 1..22: mol_type = other DNA
cttaaacataataaaacatatg

SEQ ID NO: 136634 - DNA, 22 bp, synthetic construct
  misc_feature 1..22: note = chemically synthesized
  source 1..22: mol_type = other DNA
aaacataataaaacatatggtt

SEQ ID NO: 136635 - DNA, 22 bp, synthetic construct
  misc_feature 1..22: note = chemically synthesized
  source 1..22: mol_type = other DNA
aacataataaaacatatggttc

SEQ ID NO: 136636 - DNA, 22 bp, synthetic construct
  misc_feature 1..22: note = chemically synthesized
  source 1..22: mol_type = other DNA
agtatgcctttgattttacaat

SEQ ID NO: 136637 - DNA, 22 bp, synthetic construct
  misc_feature 1..22: note = chemically synthesized
  source 1..22: mol_type = other DNA
tgattttacaataatattcctg

SEQ ID NO: 136638 - DNA, 22 bp, synthetic construct
  misc_feature 1..22: note = chemically synthesized
  source 1..22: mol_type = other DNA
gattttacaataatattcctgt

SEQ ID NO: 136639 - DNA, 22 bp, synthetic construct
  misc_feature 1..22: note = chemically synthesized
  source 1..22: mol_type = other DNA
attttacaataatattcctgtt

SEQ ID NO: 136640 - DNA, 22 bp, synthetic construct
  misc_feature 1..22: note = chemically synthesized
  source 1..22: mol_type = other DNA
tacaataatattcctgttattt

SEQ ID NO: 136641 - DNA, 22 bp, synthetic construct
  misc_feature 1..22: note = chemically synthesized
  source 1..22: mol_type = other DNA
acaataatattcctgttatttt

SEQ ID NO: 136642 - DNA, 22 bp, synthetic construct
  misc_feature 1..22: note = chemically synthesized
  source 1..22: mol_type = other DNA
caataatattcctgttattttt

SEQ ID NO: 136643 - DNA, 22 bp, synthetic construct
  misc_feature 1..22: note = chemically synthesized
  source 1..22: mol_type = other DNA
ctgttatttttggaagcacagg

SEQ ID NO: 136644 - DNA, 22 bp, synthetic construct
  misc_feature 1..22: note = chemically synthesized
  source 1..22: mol_type = other DNA
ttatttttggaagcacagggtg

SEQ ID NO: 136645 - DNA, 22 bp, synthetic construct
  misc_feature 1..22: note = chemically synthesized
  source 1..22: mol_type = other DNA
tttttggaagcacagggtgtgg

SEQ ID NO: 136646 - DNA, 22 bp, synthetic construct
  misc_feature 1..22: note = chemically synthesized
  source 1..22: mol_type = other DNA
ttggaagcacagggtgtgggat

SEQ ID NO: 136647 - DNA, 22 bp, synthetic construct
  misc_feature 1..22: note = chemically synthesized
  source 1..22: mol_type = other DNA
tggaagcacagggtgtgggata

SEQ ID NO: 136648 - DNA, 22 bp, synthetic construct
  misc_feature 1..22: note = chemically synthesized
  source 1..22: mol_type = other DNA
ggaagcacagggtgtgggataa

SEQ ID NO: 136649 - DNA, 22 bp, synthetic construct
  misc_feature 1..22: note = chemically synthesized
  source 1..22: mol_type = other DNA
gaagcacagggtgtgggataat

SEQ ID NO: 136650 - DNA, 22 bp, synthetic construct
  misc_feature 1..22: note = chemically synthesized
  source 1..22: mol_type = other DNA
attactagtgattagtattgag

SEQ ID NO: 136651 - DNA, 22 bp, synthetic construct
  misc_feature 1..22: note = chemically synthesized
  source 1..22: mol_type = other DNA
ctagtgattagtattgagaggt

SEQ ID NO: 136652 - DNA, 22 bp, synthetic construct
  misc_feature 1..22: note = chemically synthesized
  source 1..22: mol_type = other DNA
gtgattagtattgagaggtgac

SEQ ID NO: 136653 - DNA, 22 bp, synthetic construct
  misc_feature 1..22: note = chemically synthesized
  source 1..22: mol_type = other DNA
gtattgagaggtgacagcgtgc

SEQ ID NO: 136654 - DNA, 22 bp, synthetic construct
  misc_feature 1..22: note = chemically synthesized
  source 1..22: mol_type = other DNA
agaggtgacagcgtgctggcag

SEQ ID NO: 136655 - DNA, 22 bp, synthetic construct
  misc_feature 1..22: note = chemically synthesized
  source 1..22: mol_type = other DNA
gcagtcctcacagccctcgctc

SEQ ID NO: 136656 - DNA, 22 bp, synthetic construct
  misc_feature 1..22: note = chemically synthesized
  source 1..22: mol_type = other DNA
acagccctcgctcgctcttggc

SEQ ID NO: 136657 - DNA, 22 bp, synthetic construct
  misc_feature 1..22: note = chemically synthesized
  source 1..22: mol_type = other DNA
gctcgctcttggcgcctcctct

SEQ ID NO: 136658 - DNA, 22 bp, synthetic construct
  misc_feature 1..22: note = chemically synthesized
  source 1..22: mol_type = other DNA
gctcttggcgcctcctctgcct

SEQ ID NO: 136659 - DNA, 22 bp, synthetic construct
  misc_feature 1..22: note = chemically synthesized
  source 1..22: mol_type = other DNA
ttggcgcctcctctgcctgggc

SEQ ID NO: 136660 - DNA, 22 bp, synthetic construct
  misc_feature 1..22: note = chemically synthesized
  source 1..22: mol_type = other DNA
ggcgcctcctctgcctgggctc

SEQ ID NO: 136661 - DNA, 22 bp, synthetic construct
  misc_feature 1..22: note = chemically synthesized
  source 1..22: mol_type = other DNA
gcgcctcctctgcctgggctcc

SEQ ID NO: 136662 - DNA, 22 bp, synthetic construct
  misc_feature 1..22: note = chemically synthesized
  source 1..22: mol_type = other DNA
ctctgcctgggctcccacattg

SEQ ID NO: 136663 - DNA, 22 bp, synthetic construct
  misc_feature 1..22: note = chemically synthesized
  source 1..22: mol_type = other DNA
tgcctgggctcccacattggtg

SEQ ID NO: 136664 - DNA, 22 bp, synthetic construct
  misc_feature 1..22: note = chemically synthesized
  source 1..22: mol_type = other DNA
cctgggctcccacattggtggc

SEQ ID NO: 136665 - DNA, 22 bp, synthetic construct
  misc_feature 1..22: note = chemically synthesized
  source 1..22: mol_type = other DNA
ggctcccacattggtggcactt

SEQ ID NO: 136666 - DNA, 22 bp, synthetic construct
  misc_feature 1..22: note = chemically synthesized
  source 1..22: mol_type = other DNA
ccacattggtggcacttgagga

SEQ ID NO: 136667 - DNA, 22 bp, synthetic construct
  misc_feature 1..22: note = chemically synthesized
  source 1..22: mol_type = other DNA
gtggcacttgaggagcccttca

SEQ ID NO: 136668 - DNA, 22 bp, synthetic construct
  misc_feature 1..22: note = chemically synthesized
  source 1..22: mol_type = other DNA
gaggagcccttcagccggccgc

SEQ ID NO: 136669 - DNA, 22 bp, synthetic construct
  misc_feature 1..22: note = chemically synthesized
  source 1..22: mol_type = other DNA
aggagcccttcagccggccgct

SEQ ID NO: 136670 - DNA, 22 bp, synthetic construct
  misc_feature 1..22: note = chemically synthesized
  source 1..22: mol_type = other DNA
cagccggccgctgcactgtggg

SEQ ID NO: 136671 - DNA, 22 bp, synthetic construct
  misc_feature 1..22: note = chemically synthesized
  source 1..22: mol_type = other DNA
agccggccgctgcactgtggga

SEQ ID NO: 136672 - DNA, 22 bp, synthetic construct
  misc_feature 1..22: note = chemically synthesized
  source 1..22: mol_type = other DNA
cactgtgggagcccttttctgg

SEQ ID NO: 136673 - DNA, 22 bp, synthetic construct
  misc_feature 1..22: note = chemically synthesized
  source 1..22: mol_type = other DNA
tgggagcccttttctgggctgg

SEQ ID NO: 136674 - DNA, 22 bp, synthetic construct
  misc_feature 1..22: note = chemically synthesized
  source 1..22: mol_type = other DNA
ttctgggctggccaaggccaga

SEQ ID NO: 136675 - DNA, 22 bp, synthetic construct
  misc_feature 1..22: note = chemically synthesized
  source 1..22: mol_type = other DNA
tctgggctggccaaggccagag

SEQ ID NO: 136676 - DNA, 22 bp, synthetic construct
  misc_feature 1..22: note = chemically synthesized
  source 1..22: mol_type = other DNA
ctgggctggccaaggccagagc

SEQ ID NO: 136677 - DNA, 22 bp, synthetic construct
  misc_feature 1..22: note = chemically synthesized
  source 1..22: mol_type = other DNA
tgggctggccaaggccagagcc

SEQ ID NO: 136678 - DNA, 22 bp, synthetic construct
  misc_feature 1..22: note = chemically synthesized
  source 1..22: mol_type = other DNA
ggctggccaaggccagagccgg

SEQ ID NO: 136679 - DNA, 22 bp, synthetic construct
  misc_feature 1..22: note = chemically synthesized
  source 1..22: mol_type = other DNA
gccaaggccagagccggctccc

SEQ ID NO: 136680 - DNA, 22 bp, synthetic construct
  misc_feature 1..22: note = chemically synthesized
  source 1..22: mol_type = other DNA
cctcagcttgccaggaggtgtg

SEQ ID NO: 136681 - DNA, 22 bp, synthetic construct
  misc_feature 1..22: note = chemically synthesized
  source 1..22: mol_type = other DNA
agcttgccaggaggtgtggagg

SEQ ID NO: 136682 - DNA, 22 bp, synthetic construct
  misc_feature 1..22: note = chemically synthesized
  source 1..22: mol_type = other DNA
gccaggaggtgtggagggacag

SEQ ID NO: 136683 - DNA, 22 bp, synthetic construct
  misc_feature 1..22: note = chemically synthesized
  source 1..22: mol_type = other DNA
ccaggaggtgtggagggacaga

SEQ ID NO: 136684 - DNA, 22 bp, synthetic construct
  misc_feature 1..22: note = chemically synthesized
  source 1..22: mol_type = other DNA
tgcgccgtgcttgagggagttc

SEQ ID NO: 136685 - DNA, 22 bp, synthetic construct
  misc_feature 1..22: note = chemically synthesized
  source 1..22: mol_type = other DNA
gagggagttccgggtgggcatg

SEQ ID NO: 136686 - DNA, 22 bp, synthetic construct
  misc_feature 1..22: note = chemically synthesized
  source 1..22: mol_type = other DNA
agggagttccgggtgggcatgg

SEQ ID NO: 136687 - DNA, 22 bp, synthetic construct
  misc_feature 1..22: note = chemically synthesized
  source 1..22: mol_type = other DNA
cgggtgggcatgggctccgagg

SEQ ID NO: 136688 - DNA, 22 bp, synthetic construct
  misc_feature 1..22: note = chemically synthesized
  source 1..22: mol_type = other DNA
cgaggaccccgcactcggagcc

SEQ ID NO: 136689 - DNA, 22 bp, synthetic construct
  misc_feature 1..22: note = chemically synthesized
  source 1..22: mol_type = other DNA
ggagccgccagccggccccacc

SEQ ID NO: 136690 - DNA, 22 bp, synthetic construct
  misc_feature 1..22: note = chemically synthesized
  source 1..22: mol_type = other DNA
agcacctgggccagcagctgct

SEQ ID NO: 136691 - DNA, 22 bp, synthetic construct
  misc_feature 1..22: note = chemically synthesized
  source 1..22: mol_type = other DNA
gcacctgggccagcagctgctg

SEQ ID NO: 136692 - DNA, 22 bp, synthetic construct
  misc_feature 1..22: note = chemically synthesized
  source 1..22: mol_type = other DNA
ggccagcagctgctgtgctcaa

SEQ ID NO: 136693 - DNA, 22 bp, synthetic construct
  misc_feature 1..22: note = chemically synthesized
  source 1..22: mol_type = other DNA
ctgtgctcaattcctcgccggg

SEQ ID NO: 136694 - DNA, 22 bp, synthetic construct
  misc_feature 1..22: note = chemically synthesized
  source 1..22: mol_type = other DNA
tgctcaattcctcgccgggcct

SEQ ID NO: 136695 - DNA, 22 bp, synthetic construct
  misc_feature 1..22: note = chemically synthesized
  source 1..22: mol_type = other DNA
aattcctcgccgggccttagct

SEQ ID NO: 136696 - DNA, 22 bp, synthetic construct
  misc_feature 1..22: note = chemically synthesized
  source 1..22: mol_type = other DNA
ctcgccgggccttagctgcctt

SEQ ID NO: 136697 - DNA, 22 bp, synthetic construct
  misc_feature 1..22: note = chemically synthesized
  source 1..22: mol_type = other DNA
gccgggccttagctgccttcct

SEQ ID NO: 136698 - DNA, 22 bp, synthetic construct
  misc_feature 1..22: note = chemically synthesized
  source 1..22: mol_type = other DNA
agctgccttcctgcggggcagg

SEQ ID NO: 136699 - DNA, 22 bp, synthetic construct
  misc_feature 1..22: note = chemically synthesized
  source 1..22: mol_type = other DNA
gctgccttcctgcggggcaggg

SEQ ID NO: 136700 - DNA, 22 bp, synthetic construct
  misc_feature 1..22: note = chemically synthesized
  source 1..22: mol_type = other DNA
ccttcctgcggggcagggctcg

SEQ ID NO: 136701 - DNA, 22 bp, synthetic construct
  misc_feature 1..22: note = chemically synthesized
  source 1..22: mol_type = other DNA
cctgcggggcagggctcgggac

SEQ ID NO: 136702 - DNA, 22 bp, synthetic construct
  misc_feature 1..22: note = chemically synthesized
  source 1..22: mol_type = other DNA
ctgcggggcagggctcgggacc

SEQ ID NO: 136703 - DNA, 22 bp, synthetic construct
  misc_feature 1..22: note = chemically synthesized
  source 1..22: mol_type = other DNA
cggggcagggctcgggacctgc

SEQ ID NO: 136704 - DNA, 22 bp, synthetic construct
  misc_feature 1..22: note = chemically synthesized
  source 1..22: mol_type = other DNA
gggacctgcagcgcgccatgcc

SEQ ID NO: 136705 - DNA, 22 bp, synthetic construct
  misc_feature 1..22: note = chemically synthesized
  source 1..22: mol_type = other DNA
cagcgcgccatgcctgagcctc

SEQ ID NO: 136706 - DNA, 22 bp, synthetic construct
  misc_feature 1..22: note = chemically synthesized
  source 1..22: mol_type = other DNA
agcctccccaccttcatgggct

SEQ ID NO: 136707 - DNA, 22 bp, synthetic construct
  misc_feature 1..22: note = chemically synthesized
  source 1..22: mol_type = other DNA
cccaccttcatgggctcctgtg

SEQ ID NO: 136708 - DNA, 22 bp, synthetic construct
  misc_feature 1..22: note = chemically synthesized
  source 1..22: mol_type = other DNA
catgggctcctgtgcggcccga

SEQ ID NO: 136709 - DNA, 22 bp, synthetic construct
  misc_feature 1..22: note = chemically synthesized
  source 1..22: mol_type = other DNA
atgggctcctgtgcggcccgag

SEQ ID NO: 136710 - DNA, 22 bp, synthetic construct
  misc_feature 1..22: note = chemically synthesized
  source 1..22: mol_type = other DNA
ctgtgcggcccgagcctcgccg

SEQ ID NO: 136711 - DNA, 22 bp, synthetic construct
  misc_feature 1..22: note = chemically synthesized
  source 1..22: mol_type = other DNA
tgcggcccgagcctcgccgacg

SEQ ID NO: 136712 - DNA, 22 bp, synthetic construct
  misc_feature 1..22: note = chemically synthesized
  source 1..22: mol_type = other DNA
gccgacgagcgccgccccctgc

SEQ ID NO: 136713 - DNA, 22 bp, synthetic construct
  misc_feature 1..22: note = chemically synthesized
  source 1..22: mol_type = other DNA
ctccagggcacccagtcccatc

SEQ ID NO: 136714 - DNA, 22 bp, synthetic construct
  misc_feature 1..22: note = chemically synthesized
  source 1..22: mol_type = other DNA
cagggcacccagtcccatcgac

SEQ ID NO: 136715 - DNA, 22 bp, synthetic construct
  misc_feature 1..22: note = chemically synthesized
  source 1..22: mol_type = other DNA
aagagtgcgggcgcacggcagg

SEQ ID NO: 136716 - DNA, 22 bp, synthetic construct
  misc_feature 1..22: note = chemically synthesized
  source 1..22: mol_type = other DNA
gcaggcagctccccctgcagcc

SEQ ID NO: 136717 - DNA, 22 bp, synthetic construct
  misc_feature 1..22: note = chemically synthesized
  source 1..22: mol_type = other DNA
cccctgcagcccaggtgcggga

SEQ ID NO: 136718 - DNA, 22 bp, synthetic construct
  misc_feature 1..22: note = chemically synthesized
  source 1..22: mol_type = other DNA
cagcccaggtgcgggatccact

SEQ ID NO: 136719 - DNA, 22 bp, synthetic construct
  misc_feature 1..22: note = chemically synthesized
  source 1..22: mol_type = other DNA
ggtgaagccggctaggctcctg

SEQ ID NO: 136720 - DNA, 22 bp, synthetic construct
  misc_feature 1..22: note = chemically synthesized
  source 1..22: mol_type = other DNA
ggctcctgagtttgctggggat

SEQ ID NO: 136721 - DNA, 22 bp, synthetic construct
  misc_feature 1..22: note = chemically synthesized
  source 1..22: mol_type = other DNA
ctgagtttgctggggatgcgaa

SEQ ID NO: 136722 - DNA, 22 bp, synthetic construct
  misc_feature 1..22: note = chemically synthesized
  source 1..22: mol_type = other DNA
agtttgctggggatgcgaagaa

SEQ ID NO: 136723 - DNA, 22 bp, synthetic construct
  misc_feature 1..22: note = chemically synthesized
  source 1..22: mol_type = other DNA
gctggggatgcgaagaaccctt

SEQ ID NO: 136724 - DNA, 22 bp, synthetic construct
  misc_feature 1..22: note = chemically synthesized
  source 1..22: mol_type = other DNA
ctggggatgcgaagaaccctta

SEQ ID NO: 136725 - DNA, 22 bp, synthetic construct
  misc_feature 1..22: note = chemically synthesized
  source 1..22: mol_type = other DNA
gggatgcgaagaacccttatgt

SEQ ID NO: 136726 - DNA, 22 bp, synthetic construct
  misc_feature 1..22: note = chemically synthesized
  source 1..22: mol_type = other DNA
atgtctagataagggattgtaa

SEQ ID NO: 136727 - DNA, 22 bp, synthetic construct
  misc_feature 1..22: note = chemically synthesized
  source 1..22: mol_type = other DNA
tgtctagataagggattgtaaa

SEQ ID NO: 136728 - DNA, 22 bp, synthetic construct
  misc_feature 1..22: note = chemically synthesized
  source 1..22: mol_type = other DNA
gataagggattgtaaatacacc

SEQ ID NO: 136729 - DNA, 22 bp, synthetic construct
  misc_feature 1..22: note = chemically synthesized
  source 1..22: mol_type = other DNA
taaatacaccaattggcactct

SEQ ID NO: 136730 - DNA, 22 bp, synthetic construct
  misc_feature 1..22: note = chemically synthesized
  source 1..22: mol_type = other DNA
gcactctgtatctagctcaagg

SEQ ID NO: 136731 - DNA, 22 bp, synthetic construct
  misc_feature 1..22: note = chemically synthesized
  source 1..22: mol_type = other DNA
tgtatctagctcaaggtttgta

SEQ ID NO: 136732 - DNA, 22 bp, synthetic construct
  misc_feature 1..22: note = chemically synthesized
  source 1..22: mol_type = other DNA
tatctagctcaaggtttgtaaa

SEQ ID NO: 136733 - DNA, 22 bp, synthetic construct
  misc_feature 1..22: note = chemically synthesized
  source 1..22: mol_type = other DNA
gctcaaggtttgtaaacacacc

SEQ ID NO: 136734 - DNA, 22 bp, synthetic construct
  misc_feature 1..22: note = chemically synthesized
  source 1..22: mol_type = other DNA
aaggtttgtaaacacaccaatc

SEQ ID NO: 136735 - DNA, 22 bp, synthetic construct
  misc_feature 1..22: note = chemically synthesized
  source 1..22: mol_type = other DNA
gtaaacacaccaatcagcaccc

SEQ ID NO: 136736 - DNA, 22 bp, synthetic construct
  misc_feature 1..22: note = chemically synthesized
  source 1..22: mol_type = other DNA
taaacacaccaatcagcaccct

SEQ ID NO: 136737 - DNA, 22 bp, synthetic construct
  misc_feature 1..22: note = chemically synthesized
  source 1..22: mol_type = other DNA
tgtctagctcagggtttgtgaa

SEQ ID NO: 136738 - DNA, 22 bp, synthetic construct
  misc_feature 1..22: note = chemically synthesized
  source 1..22: mol_type = other DNA
gctcagggtttgtgaatgcacc

SEQ ID NO: 136739 - DNA, 22 bp, synthetic construct
  misc_feature 1..22: note = chemically synthesized
  source 1..22: mol_type = other DNA
agggtttgtgaatgcaccaatc

SEQ ID NO: 136740 - DNA, 22 bp, synthetic construct
  misc_feature 1..22: note = chemically synthesized
  source 1..22: mol_type = other DNA
gtgaatgcaccaatcaacactc

SEQ ID NO: 136741 - DNA, 22 bp, synthetic construct
  misc_feature 1..22: note = chemically synthesized
  source 1..22: mol_type = other DNA
tgaatgcaccaatcaacactct

SEQ ID NO: 136742 - DNA, 22 bp, synthetic construct
  misc_feature 1..22: note = chemically synthesized
  source 1..22: mol_type = other DNA
tatctagctactctggtggggc

SEQ ID NO: 136743 - DNA, 22 bp, synthetic construct
  misc_feature 1..22: note = chemically synthesized
  source 1..22: mol_type = other DNA
tctagctactctggtggggcct

SEQ ID NO: 136744 - DNA, 22 bp, synthetic construct
  misc_feature 1..22: note = chemically synthesized
  source 1..22: mol_type = other DNA
gctactctggtggggccttgga

SEQ ID NO: 136745 - DNA, 22 bp, synthetic construct
  misc_feature 1..22: note = chemically synthesized
  source 1..22: mol_type = other DNA
ctctggtggggccttggagaac

SEQ ID NO: 136746 - DNA, 22 bp, synthetic construct
  misc_feature 1..22: note = chemically synthesized
  source 1..22: mol_type = other DNA
tggtggggccttggagaacctt

SEQ ID NO: 136747 - DNA, 22 bp, synthetic construct
  misc_feature 1..22: note = chemically synthesized
  source 1..22: mol_type = other DNA
gtggggccttggagaaccttta

SEQ ID NO: 136748 - DNA, 22 bp, synthetic construct
  misc_feature 1..22: note = chemically synthesized
  source 1..22: mol_type = other DNA
ggagaacctttatgtctagctc

SEQ ID NO: 136749 - DNA, 22 bp, synthetic construct
  misc_feature 1..22: note = chemically synthesized
  source 1..22: mol_type = other DNA
gagaacctttatgtctagctca

SEQ ID NO: 136750 - DNA, 22 bp, synthetic construct
  misc_feature 1..22: note = chemically synthesized
  source 1..22: mol_type = other DNA
tatgtctagctcagggattgta

SEQ ID NO: 136751 - DNA, 22 bp, synthetic construct
  misc_feature 1..22: note = chemically synthesized
  source 1..22: mol_type = other DNA
atgtctagctcagggattgtaa

SEQ ID NO: 136752 - DNA, 22 bp, synthetic construct
  misc_feature 1..22: note = chemically synthesized
  source 1..22: mol_type = other DNA
tgtctagctcagggattgtaaa

SEQ ID NO: 136753 - DNA, 22 bp, synthetic construct
  misc_feature 1..22: note = chemically synthesized
  source 1..22: mol_type = other DNA
gctcagggattgtaaatacacc

SEQ ID NO: 136754 - DNA, 22 bp, synthetic construct
  misc_feature 1..22: note = chemically synthesized
  source 1..22: mol_type = other DNA
agggattgtaaatacaccaatc

SEQ ID NO: 136755 - DNA, 22 bp, synthetic construct
  misc_feature 1..22: note = chemically synthesized
  source 1..22: mol_type = other DNA
taaatacaccaatcggcagtct

SEQ ID NO: 136756 - DNA, 22 bp, synthetic construct
  misc_feature 1..22: note = chemically synthesized
  source 1..22: mol_type = other DNA
tatctagctcaaggtttgtaaa

SEQ ID NO: 136757 - DNA, 22 bp, synthetic construct
  misc_feature 1..22: note = chemically synthesized
  source 1..22: mol_type = other DNA
gctcaaggtttgtaaacacacc

SEQ ID NO: 136758 - DNA, 22 bp, synthetic construct
  misc_feature 1..22: note = chemically synthesized
  source 1..22: mol_type = other DNA
aaggtttgtaaacacaccaatc

SEQ ID NO: 136759 - DNA, 22 bp, synthetic construct
  misc_feature 1..22: note = chemically synthesized
  source 1..22: mol_type = other DNA
gtaaacacaccaatcagcaccc

SEQ ID NO: 136760 - DNA, 22 bp, synthetic construct
  misc_feature 1..22: note = chemically synthesized
  source 1..22: mol_type = other DNA
taaacacaccaatcagcaccct

SEQ ID NO: 136761 - DNA, 22 bp, synthetic construct
  misc_feature 1..22: note = chemically synthesized
  source 1..22: mol_type = other DNA
tgtctagctcagggtttgtgaa

SEQ ID NO: 136762 - DNA, 22 bp, synthetic construct
  misc_feature 1..22: note = chemically synthesized
  source 1..22: mol_type = other DNA
gctcagggtttgtgaatgcacc

SEQ ID NO: 136763 - DNA, 22 bp, synthetic construct
  misc_feature 1..22: note = chemically synthesized
  source 1..22: mol_type = other DNA
agggtttgtgaatgcaccaatc

SEQ ID NO: 136764 - DNA, 22 bp, synthetic construct
  misc_feature 1..22: note = chemically synthesized
  source 1..22: mol_type = other DNA
gtgaatgcaccaatcaacactc

SEQ ID NO: 136765 - DNA, 22 bp, synthetic construct
  misc_feature 1..22: note = chemically synthesized
  source 1..22: mol_type = other DNA
tgaatgcaccaatcaacactct

SEQ ID NO: 136766 - DNA, 22 bp, synthetic construct
  misc_feature 1..22: note = chemically synthesized
  source 1..22: mol_type = other DNA
tgtatctagctactctggtggg

SEQ ID NO: 136767 - DNA, 22 bp, synthetic construct
  misc_feature 1..22: note = chemically synthesized
  source 1..22: mol_type = other DNA
tatctagctactctggtgggga

SEQ ID NO: 136768 - DNA, 22 bp, synthetic construct
  misc_feature 1..22: note = chemically synthesized
  source 1..22: mol_type = other DNA
gctactctggtggggacgtgga

SEQ ID NO: 136769 - DNA, 22 bp, synthetic construct
  misc_feature 1..22: note = chemically synthesized
  source 1..22: mol_type = other DNA
ctctggtggggacgtggagaac

SEQ ID NO: 136770 - DNA, 22 bp, synthetic construct
  misc_feature 1..22: note = chemically synthesized
  source 1..22: mol_type = other DNA
tggtggggacgtggagaacctt

SEQ ID NO: 136771 - DNA, 22 bp, synthetic construct
  misc_feature 1..22: note = chemically synthesized
  source 1..22: mol_type = other DNA
gtggggacgtggagaaccttta

SEQ ID NO: 136772 - DNA, 22 bp, synthetic construct
  misc_feature 1..22: note = chemically synthesized
  source 1..22: mol_type = other DNA
tatgtctagctcagggattgta

SEQ ID NO: 136773 - DNA, 22 bp, synthetic construct
  misc_feature 1..22: note = chemically synthesized
  source 1..22: mol_type = other DNA
atgtctagctcagggattgtaa

SEQ ID NO: 136774 - DNA, 22 bp, synthetic construct
  misc_feature 1..22: note = chemically synthesized
  source 1..22: mol_type = other DNA
tgtctagctcagggattgtaaa

SEQ ID NO: 136775 - DNA, 22 bp, synthetic construct
  misc_feature 1..22: note = chemically synthesized
  source 1..22: mol_type = other DNA
gctcagggattgtaaatacacc

SEQ ID NO: 136776 - DNA, 22 bp, synthetic construct
  misc_feature 1..22: note = chemically synthesized
  source 1..22: mol_type = other DNA
agggattgtaaatacaccactc

SEQ ID NO: 136777 - DNA, 22 bp, synthetic construct
  misc_feature 1..22: note = chemically synthesized
  source 1..22: mol_type = other DNA
taaatacaccactcggcagtct

SEQ ID NO: 136778 - DNA, 22 bp, synthetic construct
  misc_feature 1..22: note = chemically synthesized
  source 1..22: mol_type = other DNA
ggcagtctgtatctagctcaag

SEQ ID NO: 136779 - DNA, 22 bp, synthetic construct
  misc_feature 1..22: note = chemically synthesized
  source 1..22: mol_type = other DNA
tatctagctcaaggtttgtaaa

SEQ ID NO: 136780 - DNA, 22 bp, synthetic construct
  misc_feature 1..22: note = chemically synthesized
  source 1..22: mol_type = other DNA
gctcaaggtttgtaaacacacc

SEQ ID NO: 136781 - DNA, 22 bp, synthetic construct
  misc_feature 1..22: note = chemically synthesized
  source 1..22: mol_type = other DNA
aaggtttgtaaacacaccaatc

SEQ ID NO: 136782 - DNA, 22 bp, synthetic construct
  misc_feature 1..22: note = chemically synthesized
  source 1..22: mol_type = other DNA
gtaaacacaccaatcagcaccc

SEQ ID NO: 136783 - DNA, 22 bp, synthetic construct
  misc_feature 1..22: note = chemically synthesized
  source 1..22: mol_type = other DNA
taaacacaccaatcagcaccct

SEQ ID NO: 136784 - DNA, 22 bp, synthetic construct
  misc_feature 1..22: note = chemically synthesized
  source 1..22: mol_type = other DNA
tgtctagctcagggtttgtgaa

SEQ ID NO: 136785 - DNA, 22 bp, synthetic construct
  misc_feature 1..22: note = chemically synthesized
  source 1..22: mol_type = other DNA
gctcagggtttgtgaatgcacc

SEQ ID NO: 136786 - DNA, 22 bp, synthetic construct
  misc_feature 1..22: note = chemically synthesized
  source 1..22: mol_type = other DNA
agggtttgtgaatgcaccaatc

SEQ ID NO: 136787 - DNA, 22 bp, synthetic construct
  misc_feature 1..22: note = chemically synthesized
  source 1..22: mol_type = other DNA
gtgaatgcaccaatcaacactc

SEQ ID NO: 136788 - DNA, 22 bp, synthetic construct
  misc_feature 1..22: note = chemically synthesized
  source 1..22: mol_type = other DNA
tgaatgcaccaatcaacactct

SEQ ID NO: 136789 - DNA, 22 bp, synthetic construct
  misc_feature 1..22: note = chemically synthesized
  source 1..22: mol_type = other DNA
tgtatctagctactctggtggg

SEQ ID NO: 136790 - DNA, 22 bp, synthetic construct
  misc_feature 1..22: note = chemically synthesized
  source 1..22: mol_type = other DNA
tatctagctactctggtgggga

SEQ ID NO: 136791 - DNA, 22 bp, synthetic construct
  misc_feature 1..22: note = chemically synthesized
  source 1..22: mol_type = other DNA
gctactctggtggggacttgga

SEQ ID NO: 136792 - DNA, 22 bp, synthetic construct
  misc_feature 1..22: note = chemically synthesized
  source 1..22: mol_type = other DNA
ctctggtggggacttggagaac

SEQ ID NO: 136793 - DNA, 22 bp, synthetic construct
  misc_feature 1..22: note = chemically synthesized
  source 1..22: mol_type = other DNA
tggtggggacttggagaacctt

SEQ ID NO: 136794 - DNA, 22 bp, synthetic construct
  misc_feature 1..22: note = chemically synthesized
  source 1..22: mol_type = other DNA
gtggggacttggagaacctttg

SEQ ID NO: 136795 - DNA, 22 bp, synthetic construct
  misc_feature 1..22: note = chemically synthesized
  source 1..22: mol_type = other DNA
ggagaacctttgtgtggacact

SEQ ID NO: 136796 - DNA, 22 bp, synthetic construct
  misc_feature 1..22: note = chemically synthesized
  source 1..22: mol_type = other DNA
gagaacctttgtgtggacactc

SEQ ID NO: 136797 - DNA, 22 bp, synthetic construct
  misc_feature 1..22: note = chemically synthesized
  source 1..22: mol_type = other DNA
tgtgtggacactctgtatctag

SEQ ID NO: 136798 - DNA, 22 bp, synthetic construct
  misc_feature 1..22: note = chemically synthesized
  source 1..22: mol_type = other DNA
gtgtggacactctgtatctagc

SEQ ID NO: 136799 - DNA, 22 bp, synthetic construct
  misc_feature 1..22: note = chemically synthesized
  source 1..22: mol_type = other DNA
tgtggacactctgtatctagct

SEQ ID NO: 136800 - DNA, 22 bp, synthetic construct
  misc_feature 1..22: note = chemically synthesized
  source 1..22: mol_type = other DNA
tgtatctagctaatctggtggg

SEQ ID NO: 136801 - DNA, 22 bp, synthetic construct
  misc_feature 1..22: note = chemically synthesized
  source 1..22: mol_type = other DNA
tatctagctaatctggtgggga

SEQ ID NO: 136802 - DNA, 22 bp, synthetic construct
  misc_feature 1..22: note = chemically synthesized
  source 1..22: mol_type = other DNA
gctaatctggtggggacgtgga

SEQ ID NO: 136803 - DNA, 22 bp, synthetic construct
  misc_feature 1..22: note = chemically synthesized
  source 1..22: mol_type = other DNA
atctggtggggacgtggagaac

SEQ ID NO: 136804 - DNA, 22 bp, synthetic construct
  misc_feature 1..22: note = chemically synthesized
  source 1..22: mol_type = other DNA
gtggggacgtggagaacctttg

SEQ ID NO: 136805 - DNA, 22 bp, synthetic construct
  misc_feature 1..22: note = chemically synthesized
  source 1..22: mol_type = other DNA
tgtgtctagctcatggattgta

SEQ ID NO: 136806 - DNA, 22 bp, synthetic construct
  misc_feature 1..22: note = chemically synthesized
  source 1..22: mol_type = other DNA
gtgtctagctcatggattgtaa

SEQ ID NO: 136807 - DNA, 22 bp, synthetic construct
  misc_feature 1..22: note = chemically synthesized
  source 1..22: mol_type = other DNA
tgtctagctcatggattgtaaa

SEQ ID NO: 136808 - DNA, 22 bp, synthetic construct
  misc_feature 1..22: note = chemically synthesized
  source 1..22: mol_type = other DNA
gctcatggattgtaaatgcacc

SEQ ID NO: 136809 - DNA, 22 bp, synthetic construct
  misc_feature 1..22: note = chemically synthesized
  source 1..22: mol_type = other DNA
atggattgtaaatgcaccaatc

SEQ ID NO: 136810 - DNA, 22 bp, synthetic construct
  misc_feature 1..22: note = chemically synthesized
  source 1..22: mol_type = other DNA
taaatgcaccaatcagtgccct

SEQ ID NO: 136811 - DNA, 22 bp, synthetic construct
  misc_feature 1..22: note = chemically synthesized
  source 1..22: mol_type = other DNA
tcaaaacagaccactgggctct

SEQ ID NO: 136812 - DNA, 22 bp, synthetic construct
  misc_feature 1..22: note = chemically synthesized
  source 1..22: mol_type = other DNA
ggctctaccaatcagcaggatg

SEQ ID NO: 136813 - DNA, 22 bp, synthetic construct
  misc_feature 1..22: note = chemically synthesized
  source 1..22: mol_type = other DNA
taccaatcagcaggatgtgggt

SEQ ID NO: 136814 - DNA, 22 bp, synthetic construct
  misc_feature 1..22: note = chemically synthesized
  source 1..22: mol_type = other DNA
ccaatcagcaggatgtgggtgg

SEQ ID NO: 136815 - DNA, 22 bp, synthetic construct
  misc_feature 1..22: note = chemically synthesized
  source 1..22: mol_type = other DNA
cccgagccagcagtggcaaccc

SEQ ID NO: 136816 - DNA, 22 bp, synthetic construct
  misc_feature 1..22: note = chemically synthesized
  source 1..22: mol_type = other DNA
gggtccccttccacactgtgga

SEQ ID NO: 136817 - DNA, 22 bp, synthetic construct
  misc_feature 1..22: note = chemically synthesized
  source 1..22: mol_type = other DNA
ccacactgtggaagctttgttc

SEQ ID NO: 136818 - DNA, 22 bp, synthetic construct
  misc_feature 1..22: note = chemically synthesized
  source 1..22: mol_type = other DNA
cacactgtggaagctttgttct

SEQ ID NO: 136819 - DNA, 22 bp, synthetic construct
  misc_feature 1..22: note = chemically synthesized
  source 1..22: mol_type = other DNA
tggaagctttgttctttcgctc

SEQ ID NO: 136820 - DNA, 22 bp, synthetic construct
  misc_feature 1..22: note = chemically synthesized
  source 1..22: mol_type = other DNA
tgttctttcgctctttgcaata

SEQ ID NO: 136821 - DNA, 22 bp, synthetic construct
  misc_feature 1..22: note = chemically synthesized
  source 1..22: mol_type = other DNA
gttctttcgctctttgcaataa

SEQ ID NO: 136822 - DNA, 22 bp, synthetic construct
  misc_feature 1..22: note = chemically synthesized
  source 1..22: mol_type = other DNA
ttctttcgctctttgcaataaa

SEQ ID NO: 136823 - DNA, 22 bp, synthetic construct
  misc_feature 1..22: note = chemically synthesized
  source 1..22: mol_type = other DNA
tttcgctctttgcaataaatct

SEQ ID NO: 136824 - DNA, 22 bp, synthetic construct
  misc_feature 1..22: note = chemically synthesized
  source 1..22: mol_type = other DNA
tcgctctttgcaataaatcttg

SEQ ID NO: 136825 - DNA, 22 bp, synthetic construct
  misc_feature 1..22: note = chemically synthesized
  source 1..22: mol_type = other DNA
cgctctttgcaataaatcttgc

SEQ ID NO: 136826 - DNA, 22 bp, synthetic construct
  misc_feature 1..22: note = chemically synthesized
  source 1..22: mol_type = other DNA
gctctttgcaataaatcttgct

SEQ ID NO: 136827 - DNA, 22 bp, synthetic construct
  misc_feature 1..22: note = chemically synthesized
  source 1..22: mol_type = other DNA
tttgcaataaatcttgctgctg

SEQ ID NO: 136828 - DNA, 22 bp, synthetic construct
  misc_feature 1..22: note = chemically synthesized
  source 1..22: mol_type = other DNA
tgcaataaatcttgctgctgct

SEQ ID NO: 136829 - DNA, 22 bp, synthetic construct
  misc_feature 1..22: note = chemically synthesized
  source 1..22: mol_type = other DNA
gcaataaatcttgctgctgctc

SEQ ID NO: 136830 - DNA, 22 bp, synthetic construct
  misc_feature 1..22: note = chemically synthesized
  source 1..22: mol_type = other DNA
caataaatcttgctgctgctca

SEQ ID NO: 136831 - DNA, 22 bp, synthetic construct
  misc_feature 1..22: note = chemically synthesized
  source 1..22: mol_type = other DNA
gctgctgctcactgtttgggtc

SEQ ID NO: 136832 - DNA, 22 bp, synthetic construct
  misc_feature 1..22: note = chemically synthesized
  source 1..22: mol_type = other DNA
ctgctgctcactgtttgggtct

SEQ ID NO: 136833 - DNA, 22 bp, synthetic construct
  misc_feature 1..22: note = chemically synthesized
  source 1..22: mol_type = other DNA
ctgctcactgtttgggtctaca

SEQ ID NO: 136834 - DNA, 22 bp, synthetic construct
  misc_feature 1..22: note = chemically synthesized
  source 1..22: mol_type = other DNA
ctcactgtttgggtctacactg

SEQ ID NO: 136835 - DNA, 22 bp, synthetic construct
  misc_feature 1..22: note = chemically synthesized
  source 1..22: mol_type = other DNA
actgtttgggtctacactgcct

SEQ ID NO: 136836 - DNA, 22 bp, synthetic construct
  misc_feature 1..22: note = chemically synthesized
  source 1..22: mol_type = other DNA
tttgggtctacactgcctttat

SEQ ID NO: 136837 - DNA, 22 bp, synthetic construct
  misc_feature 1..22: note = chemically synthesized
  source 1..22: mol_type = other DNA
gggtctacactgcctttatgag

SEQ ID NO: 136838 - DNA, 22 bp, synthetic construct
  misc_feature 1..22: note = chemically synthesized
  source 1..22: mol_type = other DNA
ggtctacactgcctttatgagc

SEQ ID NO: 136839 - DNA, 22 bp, synthetic construct
  misc_feature 1..22: note = chemically synthesized
  source 1..22: mol_type = other DNA
cactgcctttatgagctgtaac

SEQ ID NO: 136840 - DNA, 22 bp, synthetic construct
  misc_feature 1..22: note = chemically synthesized
  source 1..22: mol_type = other DNA
cctttatgagctgtaacgctca

SEQ ID NO: 136841 - DNA, 22 bp, synthetic construct
  misc_feature 1..22: note = chemically synthesized
  source 1..22: mol_type = other DNA
tatgagctgtaacgctcaccgc

SEQ ID NO: 136842 - DNA, 22 bp, synthetic construct
  misc_feature 1..22: note = chemically synthesized
  source 1..22: mol_type = other DNA
atgagctgtaacgctcaccgcg

SEQ ID NO: 136843 - DNA, 22 bp, synthetic construct
  misc_feature 1..22: note = chemically synthesized
  source 1..22: mol_type = other DNA
tgagctgtaacgctcaccgcga

SEQ ID NO: 136844 - DNA, 22 bp, synthetic construct
  misc_feature 1..22: note = chemically synthesized
  source 1..22: mol_type = other DNA
taacgctcaccgcgaaggtctg

SEQ ID NO: 136845 - DNA, 22 bp, synthetic construct
  misc_feature 1..22: note = chemically synthesized
  source 1..22: mol_type = other DNA
accgcgaaggtctgcagcttca

SEQ ID NO: 136846 - DNA, 22 bp, synthetic construct
  misc_feature 1..22: note = chemically synthesized
  source 1..22: mol_type = other DNA
cagcttcactcttgaagccagc

SEQ ID NO: 136847 - DNA, 22 bp, synthetic construct
  misc_feature 1..22: note = chemically synthesized
  source 1..22: mol_type = other DNA
cactcttgaagccagcgagacc

SEQ ID NO: 136848 - DNA, 22 bp, synthetic construct
  misc_feature 1..22: note = chemically synthesized
  source 1..22: mol_type = other DNA
actcttgaagccagcgagacca

SEQ ID NO: 136849 - DNA, 22 bp, synthetic construct
  misc_feature 1..22: note = chemically synthesized
  source 1..22: mol_type = other DNA
ttgaagccagcgagaccacgaa

SEQ ID NO: 136850 - DNA, 22 bp, synthetic construct
  misc_feature 1..22: note = chemically synthesized
  source 1..22: mol_type = other DNA
gaagccagcgagaccacgaacc

SEQ ID NO: 136851 - DNA, 22 bp, synthetic construct
  misc_feature 1..22: note = chemically synthesized
  source 1..22: mol_type = other DNA
aagccagcgagaccacgaaccc

SEQ ID NO: 136852 - DNA, 22 bp, synthetic construct
  misc_feature 1..22: note = chemically synthesized
  source 1..22: mol_type = other DNA
cagaggcgccgccttaagagct

SEQ ID NO: 136853 - DNA, 22 bp, synthetic construct
  misc_feature 1..22: note = chemically synthesized
  source 1..22: mol_type = other DNA
aagagctggaacgttcactgtg

SEQ ID NO: 136854 - DNA, 22 bp, synthetic construct
  misc_feature 1..22: note = chemically synthesized
  source 1..22: mol_type = other DNA
agagctggaacgttcactgtga

SEQ ID NO: 136855 - DNA, 22 bp, synthetic construct
  misc_feature 1..22: note = chemically synthesized
  source 1..22: mol_type = other DNA
gaacgttcactgtgaaggtctg

SEQ ID NO: 136856 - DNA, 22 bp, synthetic construct
  misc_feature 1..22: note = chemically synthesized
  source 1..22: mol_type = other DNA
actgtgaaggtctgcagcttca

SEQ ID NO: 136857 - DNA, 22 bp, synthetic construct
  misc_feature 1..22: note = chemically synthesized
  source 1..22: mol_type = other DNA
tgaaggtctgcagcttcactcc

SEQ ID NO: 136858 - DNA, 22 bp, synthetic construct
  misc_feature 1..22: note = chemically synthesized
  source 1..22: mol_type = other DNA
cagcttcactcctgagccagcg

SEQ ID NO: 136859 - DNA, 22 bp, synthetic construct
  misc_feature 1..22: note = chemically synthesized
  source 1..22: mol_type = other DNA
cactcctgagccagcgagacca

SEQ ID NO: 136860 - DNA, 22 bp, synthetic construct
  misc_feature 1..22: note = chemically synthesized
  source 1..22: mol_type = other DNA
actcctgagccagcgagaccac

SEQ ID NO: 136861 - DNA, 22 bp, synthetic construct
  misc_feature 1..22: note = chemically synthesized
  source 1..22: mol_type = other DNA
ctgagccagcgagaccacgaac

SEQ ID NO: 136862 - DNA, 22 bp, synthetic construct
  misc_feature 1..22: note = chemically synthesized
  source 1..22: mol_type = other DNA
agccagcgagaccacgaaccca

SEQ ID NO: 136863 - DNA, 22 bp, synthetic construct
  misc_feature 1..22: note = chemically synthesized
  source 1..22: mol_type = other DNA
cgaacacatccaaacatcagaa

SEQ ID NO: 136864 - DNA, 22 bp, synthetic construct
  misc_feature 1..22: note = chemically synthesized
  source 1..22: mol_type = other DNA
cacacacgcagcctttaagaac

SEQ ID NO: 136865 - DNA, 22 bp, synthetic construct
  misc_feature 1..22: note = chemically synthesized
  source 1..22: mol_type = other DNA
taagaactgtaacactcaccac

SEQ ID NO: 136866 - DNA, 22 bp, synthetic construct
  misc_feature 1..22: note = chemically synthesized
  source 1..22: mol_type = other DNA
aagaactgtaacactcaccacg

SEQ ID NO: 136867 - DNA, 22 bp, synthetic construct
  misc_feature 1..22: note = chemically synthesized
  source 1..22: mol_type = other DNA
agaactgtaacactcaccacga

SEQ ID NO: 136868 - DNA, 22 bp, synthetic construct
  misc_feature 1..22: note = chemically synthesized
  source 1..22: mol_type = other DNA
taacactcaccacgagggtccc

SEQ ID NO: 136869 - DNA, 22 bp, synthetic construct
  misc_feature 1..22: note = chemically synthesized
  source 1..22: mol_type = other DNA
accacgagggtccccggcttca

SEQ ID NO: 136870 - DNA, 22 bp, synthetic construct
  misc_feature 1..22: note = chemically synthesized
  source 1..22: mol_type = other DNA
cattcttgaagtcagtgaaacc

SEQ ID NO: 136871 - DNA, 22 bp, synthetic construct
  misc_feature 1..22: note = chemically synthesized
  source 1..22: mol_type = other DNA
attcttgaagtcagtgaaacca

SEQ ID NO: 136872 - DNA, 22 bp, synthetic construct
  misc_feature 1..22: note = chemically synthesized
  source 1..22: mol_type = other DNA
ttgaagtcagtgaaaccaagaa

SEQ ID NO: 136873 - DNA, 22 bp, synthetic construct
  misc_feature 1..22: note = chemically synthesized
  source 1..22: mol_type = other DNA
gaagtcagtgaaaccaagaacc

SEQ ID NO: 136874 - DNA, 22 bp, synthetic construct
  misc_feature 1..22: note = chemically synthesized
  source 1..22: mol_type = other DNA
aagtcagtgaaaccaagaaccc

SEQ ID NO: 136875 - DNA, 22 bp, synthetic construct
  misc_feature 1..22: note = chemically synthesized
  source 1..22: mol_type = other DNA
cggacacagtatgtcagaaaca

SEQ ID NO: 136876 - DNA, 22 bp, synthetic construct
  misc_feature 1..22: note = chemically synthesized
  source 1..22: mol_type = other DNA
aatcaatatacttctcaacaat

SEQ ID NO: 136877 - DNA, 22 bp, synthetic construct
  misc_feature 1..22: note = chemically synthesized
  source 1..22: mol_type = other DNA
ctcaacaatttccaacagccct

SEQ ID NO: 136878 - DNA, 22 bp, synthetic construct
  misc_feature 1..22: note = chemically synthesized
  source 1..22: mol_type = other DNA
tcaacaatttccaacagccctt

SEQ ID NO: 136879 - DNA, 22 bp, synthetic construct
  misc_feature 1..22: note = chemically synthesized
  source 1..22: mol_type = other DNA
aacaatttccaacagcccttgc

SEQ ID NO: 136880 - DNA, 22 bp, synthetic construct
  misc_feature 1..22: note = chemically synthesized
  source 1..22: mol_type = other DNA
ccaacagcccttgcaattaact

SEQ ID NO: 136881 - DNA, 22 bp, synthetic construct
  misc_feature 1..22: note = chemically synthesized
  source 1..22: mol_type = other DNA
caacagcccttgcaattaactt

SEQ ID NO: 136882 - DNA, 22 bp, synthetic construct
  misc_feature 1..22: note = chemically synthesized
  source 1..22: mol_type = other DNA
gcaattaacttggccatgtgac

SEQ ID NO: 136883 - DNA, 22 bp, synthetic construct
  misc_feature 1..22: note = chemically synthesized
  source 1..22: mol_type = other DNA
caattaacttggccatgtgact

SEQ ID NO: 136884 - DNA, 22 bp, synthetic construct
  misc_feature 1..22: note = chemically synthesized
  source 1..22: mol_type = other DNA
acttggccatgtgactggttgt

SEQ ID NO: 136885 - DNA, 22 bp, synthetic construct
  misc_feature 1..22: note = chemically synthesized
  source 1..22: mol_type = other DNA
ggccatgtgactggttgtgact

SEQ ID NO: 136886 - DNA, 22 bp, synthetic construct
  misc_feature 1..22: note = chemically synthesized
  source 1..22: mol_type = other DNA
gccatgtgactggttgtgacta

SEQ ID NO: 136887 - DNA, 22 bp, synthetic construct
  misc_feature 1..22: note = chemically synthesized
  source 1..22: mol_type = other DNA
gttgtgactaaaataatgtgga

SEQ ID NO: 136888 - DNA, 22 bp, synthetic construct
  misc_feature 1..22: note = chemically synthesized
  source 1..22: mol_type = other DNA
tgactaaaataatgtggagata

SEQ ID NO: 136889 - DNA, 22 bp, synthetic construct
  misc_feature 1..22: note = chemically synthesized
  source 1..22: mol_type = other DNA
aaataatgtggagataataatg

SEQ ID NO: 136890 - DNA, 22 bp, synthetic construct
  misc_feature 1..22: note = chemically synthesized
  source 1..22: mol_type = other DNA
ctccctaaggcagagtgccctt

SEQ ID NO: 136891 - DNA, 22 bp, synthetic construct
  misc_feature 1..22: note = chemically synthesized
  source 1..22: mol_type = other DNA
cctaaggcagagtgcccttcta

SEQ ID NO: 136892 - DNA, 22 bp, synthetic construct
  misc_feature 1..22: note = chemically synthesized
  source 1..22: mol_type = other DNA
aggcagagtgcccttctatcat

SEQ ID NO: 136893 - DNA, 22 bp, synthetic construct
  misc_feature 1..22: note = chemically synthesized
  source 1..22: mol_type = other DNA
ctatcattctctttcccttcct

SEQ ID NO: 136894 - DNA, 22 bp, synthetic construct
  misc_feature 1..22: note = chemically synthesized
  source 1..22: mol_type = other DNA
tatcattctctttcccttcctc

SEQ ID NO: 136895 - DNA, 22 bp, synthetic construct
  misc_feature 1..22: note = chemically synthesized
  source 1..22: mol_type = other DNA
tcattctctttcccttcctcta

SEQ ID NO: 136896 - DNA, 22 bp, synthetic construct
  misc_feature 1..22: note = chemically synthesized
  source 1..22: mol_type = other DNA
tctttcccttcctctatgtggc

SEQ ID NO: 136897 - DNA, 22 bp, synthetic construct
  misc_feature 1..22: note = chemically synthesized
  source 1..22: mol_type = other DNA
tttcccttcctctatgtggcag

SEQ ID NO: 136898 - DNA, 22 bp, synthetic construct
  misc_feature 1..22: note = chemically synthesized
  source 1..22: mol_type = other DNA
tcccttcctctatgtggcagaa

SEQ ID NO: 136899 - DNA, 22 bp, synthetic construct
  misc_feature 1..22: note = chemically synthesized
  source 1..22: mol_type = other DNA
cccttcctctatgtggcagaaa

SEQ ID NO: 136900 - DNA, 22 bp, synthetic construct
  misc_feature 1..22: note = chemically synthesized
  source 1..22: mol_type = other DNA
ccttcctctatgtggcagaaag

SEQ ID NO: 136901 - DNA, 22 bp, synthetic construct
  misc_feature 1..22: note = chemically synthesized
  source 1..22: mol_type = other DNA
cctctatgtggcagaaagtaaa

SEQ ID NO: 136902 - DNA, 22 bp, synthetic construct
  misc_feature 1..22: note = chemically synthesized
  source 1..22: mol_type = other DNA
ctctatgtggcagaaagtaaaa

SEQ ID NO: 136903 - DNA, 22 bp, synthetic construct
  misc_feature 1..22: note = chemically synthesized
  source 1..22: mol_type = other DNA
tatgtggcagaaagtaaaagat

SEQ ID NO: 136904 - DNA, 22 bp, synthetic construct
  misc_feature 1..22: note = chemically synthesized
  source 1..22: mol_type = other DNA
tgtggcagaaagtaaaagattc

SEQ ID NO: 136905 - DNA, 22 bp, synthetic construct
  misc_feature 1..22: note = chemically synthesized
  source 1..22: mol_type = other DNA
tgaaatgataaagtcaatcaca

SEQ ID NO: 136906 - DNA, 22 bp, synthetic construct
  misc_feature 1..22: note = chemically synthesized
  source 1..22: mol_type = other DNA
aaatgataaagtcaatcacagg

SEQ ID NO: 136907 - DNA, 22 bp, synthetic construct
  misc_feature 1..22: note = chemically synthesized
  source 1..22: mol_type = other DNA
gactcctggcccactgcttgga

SEQ ID NO: 136908 - DNA, 22 bp, synthetic construct
  misc_feature 1..22: note = chemically synthesized
  source 1..22: mol_type = other DNA
ctggcccactgcttggaggaga

SEQ ID NO: 136909 - DNA, 22 bp, synthetic construct
  misc_feature 1..22: note = chemically synthesized
  source 1..22: mol_type = other DNA
gcccactgcttggaggagagca

SEQ ID NO: 136910 - DNA, 22 bp, synthetic construct
  misc_feature 1..22: note = chemically synthesized
  source 1..22: mol_type = other DNA
cttggaggagagcactcaggac

SEQ ID NO: 136911 - DNA, 22 bp, synthetic construct
  misc_feature 1..22: note = chemically synthesized
  source 1..22: mol_type = other DNA
ggaggagagcactcaggaccat

SEQ ID NO: 136912 - DNA, 22 bp, synthetic construct
  misc_feature 1..22: note = chemically synthesized
  source 1..22: mol_type = other DNA
gaggagagcactcaggaccatg

SEQ ID NO: 136913 - DNA, 22 bp, synthetic construct
  misc_feature 1..22: note = chemically synthesized
  source 1..22: mol_type = other DNA
aggaccatgaacatctgactgt

SEQ ID NO: 136914 - DNA, 22 bp, synthetic construct
  misc_feature 1..22: note = chemically synthesized
  source 1..22: mol_type = other DNA
actgtgacgtagcaataaagaa

SEQ ID NO: 136915 - DNA, 22 bp, synthetic construct
  misc_feature 1..22: note = chemically synthesized
  source 1..22: mol_type = other DNA
tgacgtagcaataaagaaaccc

SEQ ID NO: 136916 - DNA, 22 bp, synthetic construct
  misc_feature 1..22: note = chemically synthesized
  source 1..22: mol_type = other DNA
catatgaaactgcttaaaatta

SEQ ID NO: 136917 - DNA, 22 bp, synthetic construct
  misc_feature 1..22: note = chemically synthesized
  source 1..22: mol_type = other DNA
atatgaaactgcttaaaattaa

SEQ ID NO: 136918 - DNA, 22 bp, synthetic construct
  misc_feature 1..22: note = chemically synthesized
  source 1..22: mol_type = other DNA
cttaaaattaatggcacaagtc

SEQ ID NO: 136919 - DNA, 22 bp, synthetic construct
  misc_feature 1..22: note = chemically synthesized
  source 1..22: mol_type = other DNA
aaaattaatggcacaagtcatg

SEQ ID NO: 136920 - DNA, 22 bp, synthetic construct
  misc_feature 1..22: note = chemically synthesized
  source 1..22: mol_type = other DNA
aaattaatggcacaagtcatgt

SEQ ID NO: 136921 - DNA, 22 bp, synthetic construct
  misc_feature 1..22: note = chemically synthesized
  source 1..22: mol_type = other DNA
atggcacaagtcatgtttttga

SEQ ID NO: 136922 - DNA, 22 bp, synthetic construct
  misc_feature 1..22: note = chemically synthesized
  source 1..22: mol_type = other DNA
ttgatgttgcacatttgtcttt

SEQ ID NO: 136923 - DNA, 22 bp, synthetic construct
  misc_feature 1..22: note = chemically synthesized
  source 1..22: mol_type = other DNA
tgatgttgcacatttgtcttta

SEQ ID NO: 136924 - DNA, 22 bp, synthetic construct
  misc_feature 1..22: note = chemically synthesized
  source 1..22: mol_type = other DNA
gatgttgcacatttgtctttat

SEQ ID NO: 136925 - DNA, 22 bp, synthetic construct
  misc_feature 1..22: note = chemically synthesized
  source 1..22: mol_type = other DNA
atgttgcacatttgtctttatt

SEQ ID NO: 136926 - DNA, 22 bp, synthetic construct
  misc_feature 1..22: note = chemically synthesized
  source 1..22: mol_type = other DNA
cacatttgtctttatttgtggc

SEQ ID NO: 136927 - DNA, 22 bp, synthetic construct
  misc_feature 1..22: note = chemically synthesized
  source 1..22: mol_type = other DNA
gtctttatttgtggcttgtttt

SEQ ID NO: 136928 - DNA, 22 bp, synthetic construct
  misc_feature 1..22: note = chemically synthesized
  source 1..22: mol_type = other DNA
tctttatttgtggcttgttttg

SEQ ID NO: 136929 - DNA, 22 bp, synthetic construct
  misc_feature 1..22: note = chemically synthesized
  source 1..22: mol_type = other DNA
tatttgtggcttgttttgcttc

SEQ ID NO: 136930 - DNA, 22 bp, synthetic construct
  misc_feature 1..22: note = chemically synthesized
  source 1..22: mol_type = other DNA
atttgtggcttgttttgcttcc

SEQ ID NO: 136931 - DNA, 22 bp, synthetic construct
  misc_feature 1..22: note = chemically synthesized
  source 1..22: mol_type = other DNA
tttgtggcttgttttgcttcca

SEQ ID NO: 136932 - DNA, 22 bp, synthetic construct
  misc_feature 1..22: note = chemically synthesized
  source 1..22: mol_type = other DNA
gtggcttgttttgcttccacat

SEQ ID NO: 136933 - DNA, 22 bp, synthetic construct
  misc_feature 1..22: note = chemically synthesized
  source 1..22: mol_type = other DNA
tggcttgttttgcttccacatc

SEQ ID NO: 136934 - DNA, 22 bp, synthetic construct
  misc_feature 1..22: note = chemically synthesized
  source 1..22: mol_type = other DNA
gttttgcttccacatcaatcca

SEQ ID NO: 136935 - DNA, 22 bp, synthetic construct
  misc_feature 1..22: note = chemically synthesized
  source 1..22: mol_type = other DNA
ttttgcttccacatcaatccac

SEQ ID NO: 136936 - DNA, 22 bp, synthetic construct
  misc_feature 1..22: note = chemically synthesized
  source 1..22: mol_type = other DNA
tgcttccacatcaatccactca

SEQ ID NO: 136937 - DNA, 22 bp, synthetic construct
  misc_feature 1..22: note = chemically synthesized
  source 1..22: mol_type = other DNA
gcttccacatcaatccactcaa

SEQ ID NO: 136938 - DNA, 22 bp, synthetic construct
  misc_feature 1..22: note = chemically synthesized
  source 1..22: mol_type = other DNA
cttccacatcaatccactcaag

SEQ ID NO: 136939 - DNA, 22 bp, synthetic construct
  misc_feature 1..22: note = chemically synthesized
  source 1..22: mol_type = other DNA
ccacatcaatccactcaaggcc

SEQ ID NO: 136940 - DNA, 22 bp, synthetic construct
  misc_feature 1..22: note = chemically synthesized
  source 1..22: mol_type = other DNA
cacatcaatccactcaaggcct

SEQ ID NO: 136941 - DNA, 22 bp, synthetic construct
  misc_feature 1..22: note = chemically synthesized
  source 1..22: mol_type = other DNA
aaggcctacattctgctataat

SEQ ID NO: 136942 - DNA, 22 bp, synthetic construct
  misc_feature 1..22: note = chemically synthesized
  source 1..22: mol_type = other DNA
cattctgctataatgcaatttc

SEQ ID NO: 136943 - DNA, 22 bp, synthetic construct
  misc_feature 1..22: note = chemically synthesized
  source 1..22: mol_type = other DNA
tgctataatgcaatttcaagtt

SEQ ID NO: 136944 - DNA, 22 bp, synthetic construct
  misc_feature 1..22: note = chemically synthesized
  source 1..22: mol_type = other DNA
ctataatgcaatttcaagttct

SEQ ID NO: 136945 - DNA, 22 bp, synthetic construct
  misc_feature 1..22: note = chemically synthesized
  source 1..22: mol_type = other DNA
taatgcaatttcaagttcttta

SEQ ID NO: 136946 - DNA, 22 bp, synthetic construct
  misc_feature 1..22: note = chemically synthesized
  source 1..22: mol_type = other DNA
caagttctttacaggccgagaa

SEQ ID NO: 136947 - DNA, 22 bp, synthetic construct
  misc_feature 1..22: note = chemically synthesized
  source 1..22: mol_type = other DNA
aagttctttacaggccgagaaa

SEQ ID NO: 136948 - DNA, 22 bp, synthetic construct
  misc_feature 1..22: note = chemically synthesized
  source 1..22: mol_type = other DNA
tttacaggccgagaaaaatgaa

SEQ ID NO: 136949 - DNA, 22 bp, synthetic construct
  misc_feature 1..22: note = chemically synthesized
  source 1..22: mol_type = other DNA
tacaggccgagaaaaatgaatc

SEQ ID NO: 136950 - DNA, 22 bp, synthetic construct
  misc_feature 1..22: note = chemically synthesized
  source 1..22: mol_type = other DNA
acaggccgagaaaaatgaatct

SEQ ID NO: 136951 - DNA, 22 bp, synthetic construct
  misc_feature 1..22: note = chemically synthesized
  source 1..22: mol_type = other DNA
caggccgagaaaaatgaatctg

SEQ ID NO: 136952 - DNA, 22 bp, synthetic construct
  misc_feature 1..22: note = chemically synthesized
  source 1..22: mol_type = other DNA
aattcctgacctccaaaagtga

SEQ ID NO: 136953 - DNA, 22 bp, synthetic construct
  misc_feature 1..22: note = chemically synthesized
  source 1..22: mol_type = other DNA
ctgacctccaaaagtgatcaag

SEQ ID NO: 136954 - DNA, 22 bp, synthetic construct
  misc_feature 1..22: note = chemically synthesized
  source 1..22: mol_type = other DNA
acctccaaaagtgatcaagata

SEQ ID NO: 136955 - DNA, 22 bp, synthetic construct
  misc_feature 1..22: note = chemically synthesized
  source 1..22: mol_type = other DNA
caaaagtgatcaagatattttt

SEQ ID NO: 136956 - DNA, 22 bp, synthetic construct
  misc_feature 1..22: note = chemically synthesized
  source 1..22: mol_type = other DNA
ttagttcaggctccaaaatttt

SEQ ID NO: 136957 - DNA, 22 bp, synthetic construct
  misc_feature 1..22: note = chemically synthesized
  source 1..22: mol_type = other DNA
tagttcaggctccaaaattttc

SEQ ID NO: 136958 - DNA, 22 bp, synthetic construct
  misc_feature 1..22: note = chemically synthesized
  source 1..22: mol_type = other DNA
agttcaggctccaaaattttct

SEQ ID NO: 136959 - DNA, 22 bp, synthetic construct
  misc_feature 1..22: note = chemically synthesized
  source 1..22: mol_type = other DNA
gttcaggctccaaaattttctc

SEQ ID NO: 136960 - DNA, 22 bp, synthetic construct
  misc_feature 1..22: note = chemically synthesized
  source 1..22: mol_type = other DNA
aggctccaaaattttctcattt

SEQ ID NO: 136961 - DNA, 22 bp, synthetic construct
  misc_feature 1..22: note = chemically synthesized
  source 1..22: mol_type = other DNA
caaaattttctcattttcatag

SEQ ID NO: 136962 - DNA, 22 bp, synthetic construct
  misc_feature 1..22: note = chemically synthesized
  source 1..22: mol_type = other DNA
tctcattttcataggttttcct

SEQ ID NO: 136963 - DNA, 22 bp, synthetic construct
  misc_feature 1..22: note = chemically synthesized
  source 1..22: mol_type = other DNA
ctcattttcataggttttcctc

SEQ ID NO: 136964 - DNA, 22 bp, synthetic construct
  misc_feature 1..22: note = chemically synthesized
  source 1..22: mol_type = other DNA
tcattttcataggttttcctcg

SEQ ID NO: 136965 - DNA, 22 bp, synthetic construct
  misc_feature 1..22: note = chemically synthesized
  source 1..22: mol_type = other DNA
attttcataggttttcctcgat

SEQ ID NO: 136966 - DNA, 22 bp, synthetic construct
  misc_feature 1..22: note = chemically synthesized
  source 1..22: mol_type = other DNA
tcataggttttcctcgattgat

SEQ ID NO: 136967 - DNA, 22 bp, synthetic construct
  misc_feature 1..22: note = chemically synthesized
  source 1..22: mol_type = other DNA
cataggttttcctcgattgatc

SEQ ID NO: 136968 - DNA, 22 bp, synthetic construct
  misc_feature 1..22: note = chemically synthesized
  source 1..22: mol_type = other DNA
ataggttttcctcgattgatca

SEQ ID NO: 136969 - DNA, 22 bp, synthetic construct
  misc_feature 1..22: note = chemically synthesized
  source 1..22: mol_type = other DNA
tcctcgattgatcattattcat

SEQ ID NO: 136970 - DNA, 22 bp, synthetic construct
  misc_feature 1..22: note = chemically synthesized
  source 1..22: mol_type = other DNA
cctcgattgatcattattcatg

SEQ ID NO: 136971 - DNA, 22 bp, synthetic construct
  misc_feature 1..22: note = chemically synthesized
  source 1..22: mol_type = other DNA
ctcgattgatcattattcatga

SEQ ID NO: 136972 - DNA, 22 bp, synthetic construct
  misc_feature 1..22: note = chemically synthesized
  source 1..22: mol_type = other DNA
gattgatcattattcatgattt

SEQ ID NO: 136973 - DNA, 22 bp, synthetic construct
  misc_feature 1..22: note = chemically synthesized
  source 1..22: mol_type = other DNA
atcattattcatgatttgcaag

SEQ ID NO: 136974 - DNA, 22 bp, synthetic construct
  misc_feature 1..22: note = chemically synthesized
  source 1..22: mol_type = other DNA
ttcatgatttgcaaggaatcat

SEQ ID NO: 136975 - DNA, 22 bp, synthetic construct
  misc_feature 1..22: note = chemically synthesized
  source 1..22: mol_type = other DNA
atgatttgcaaggaatcattca

SEQ ID NO: 136976 - DNA, 22 bp, synthetic construct
  misc_feature 1..22: note = chemically synthesized
  source 1..22: mol_type = other DNA
gcaaggaatcattcaatgtttt

SEQ ID NO: 136977 - DNA, 22 bp, synthetic construct
  misc_feature 1..22: note = chemically synthesized
  source 1..22: mol_type = other DNA
caaggaatcattcaatgttttc

SEQ ID NO: 136978 - DNA, 22 bp, synthetic construct
  misc_feature 1..22: note = chemically synthesized
  source 1..22: mol_type = other DNA
aatgttttctaaatctattact

SEQ ID NO: 136979 - DNA, 22 bp, synthetic construct
  misc_feature 1..22: note = chemically synthesized
  source 1..22: mol_type = other DNA
tctaaatctattactgcatcct

SEQ ID NO: 136980 - DNA, 22 bp, synthetic construct
  misc_feature 1..22: note = chemically synthesized
  source 1..22: mol_type = other DNA
ctaaatctattactgcatcctg

SEQ ID NO: 136981 - DNA, 22 bp, synthetic construct
  misc_feature 1..22: note = chemically synthesized
  source 1..22: mol_type = other DNA
taaatctattactgcatcctga

SEQ ID NO: 136982 - DNA, 22 bp, synthetic construct
  misc_feature 1..22: note = chemically synthesized
  source 1..22: mol_type = other DNA
aatctattactgcatcctgaca

SEQ ID NO: 136983 - DNA, 22 bp, synthetic construct
  misc_feature 1..22: note = chemically synthesized
  source 1..22: mol_type = other DNA
ttactgcatcctgacacatatg

SEQ ID NO: 136984 - DNA, 22 bp, synthetic construct
  misc_feature 1..22: note = chemically synthesized
  source 1..22: mol_type = other DNA
ctgcatcctgacacatatgaca

SEQ ID NO: 136985 - DNA, 22 bp, synthetic construct
  misc_feature 1..22: note = chemically synthesized
  source 1..22: mol_type = other DNA
catcctgacacatatgacattt

SEQ ID NO: 136986 - DNA, 22 bp, synthetic construct
  misc_feature 1..22: note = chemically synthesized
  source 1..22: mol_type = other DNA
acacatatgacattttaactat

SEQ ID NO: 136987 - DNA, 22 bp, synthetic construct
  misc_feature 1..22: note = chemically synthesized
  source 1..22: mol_type = other DNA
taactatgttccagatttttga

SEQ ID NO: 136988 - DNA, 22 bp, synthetic construct
  misc_feature 1..22: note = chemically synthesized
  source 1..22: mol_type = other DNA
aactatgttccagatttttgaa

SEQ ID NO: 136989 - DNA, 22 bp, synthetic construct
  misc_feature 1..22: note = chemically synthesized
  source 1..22: mol_type = other DNA
actatgttccagatttttgaat

SEQ ID NO: 136990 - DNA, 22 bp, synthetic construct
  misc_feature 1..22: note = chemically synthesized
  source 1..22: mol_type = other DNA
tgttccagatttttgaatgaag

SEQ ID NO: 136991 - DNA, 22 bp, synthetic construct
  misc_feature 1..22: note = chemically synthesized
  source 1..22: mol_type = other DNA
cagatttttgaatgaagagtgt

SEQ ID NO: 136992 - DNA, 22 bp, synthetic construct
  misc_feature 1..22: note = chemically synthesized
  source 1..22: mol_type = other DNA
ttgaatgaagagtgtaaatttt

SEQ ID NO: 136993 - DNA, 22 bp, synthetic construct
  misc_feature 1..22: note = chemically synthesized
  source 1..22: mol_type = other DNA
tgaatgaagagtgtaaatttta

SEQ ID NO: 136994 - DNA, 22 bp, synthetic construct
  misc_feature 1..22: note = chemically synthesized
  source 1..22: mol_type = other DNA
gaatgaagagtgtaaattttaa

SEQ ID NO: 136995 - DNA, 22 bp, synthetic construct
  misc_feature 1..22: note = chemically synthesized
  source 1..22: mol_type = other DNA
aatgaagagtgtaaattttaaa

SEQ ID NO: 136996 - DNA, 22 bp, synthetic construct
  misc_feature 1..22: note = chemically synthesized
  source 1..22: mol_type = other DNA
taaatgttttcaccacaaaaaa

SEQ ID NO: 136997 - DNA, 22 bp, synthetic construct
  misc_feature 1..22: note = chemically synthesized
  source 1..22: mol_type = other DNA
aaatgttttcaccacaaaaaat

SEQ ID NO: 136998 - DNA, 22 bp, synthetic construct
  misc_feature 1..22: note = chemically synthesized
  source 1..22: mol_type = other DNA
aatgttttcaccacaaaaaata

SEQ ID NO: 136999 - DNA, 22 bp, synthetic construct
  misc_feature 1..22: note = chemically synthesized
  source 1..22: mol_type = other DNA
tcaccacaaaaaataagtatgt

SEQ ID NO: 137000 - DNA, 22 bp, synthetic construct
  misc_feature 1..22: note = chemically synthesized
  source 1..22: mol_type = other DNA
caccacaaaaaataagtatgtg

SEQ ID NO: 137001 - DNA, 22 bp, synthetic construct
  misc_feature 1..22: note = chemically synthesized
  source 1..22: mol_type = other DNA
accacaaaaaataagtatgtga

SEQ ID NO: 137002 - DNA, 22 bp, synthetic construct
  misc_feature 1..22: note = chemically synthesized
  source 1..22: mol_type = other DNA
gttaattagccttatttaacca

SEQ ID NO: 137003 - DNA, 22 bp, synthetic construct
  misc_feature 1..22: note = chemically synthesized
  source 1..22: mol_type = other DNA
ttaattagccttatttaaccat

SEQ ID NO: 137004 - DNA, 22 bp, synthetic construct
  misc_feature 1..22: note = chemically synthesized
  source 1..22: mol_type = other DNA
attagccttatttaaccattta

SEQ ID NO: 137005 - DNA, 22 bp, synthetic construct
  misc_feature 1..22: note = chemically synthesized
  source 1..22: mol_type = other DNA
gccttatttaaccatttaatat

SEQ ID NO: 137006 - DNA, 22 bp, synthetic construct
  misc_feature 1..22: note = chemically synthesized
  source 1..22: mol_type = other DNA
atttaaccatttaatattgtac

SEQ ID NO: 137007 - DNA, 22 bp, synthetic construct
  misc_feature 1..22: note = chemically synthesized
  source 1..22: mol_type = other DNA
tttaaccatttaatattgtaca

SEQ ID NO: 137008 - DNA, 22 bp, synthetic construct
  misc_feature 1..22: note = chemically synthesized
  source 1..22: mol_type = other DNA
aaccatttaatattgtacacgt

SEQ ID NO: 137009 - DNA, 22 bp, synthetic construct
  misc_feature 1..22: note = chemically synthesized
  source 1..22: mol_type = other DNA
accatttaatattgtacacgta

SEQ ID NO: 137010 - DNA, 22 bp, synthetic construct
  misc_feature 1..22: note = chemically synthesized
  source 1..22: mol_type = other DNA
aatattgtacacgtacaccaaa

SEQ ID NO: 137011 - DNA, 22 bp, synthetic construct
  misc_feature 1..22: note = chemically synthesized
  source 1..22: mol_type = other DNA
atattgtacacgtacaccaaag

SEQ ID NO: 137012 - DNA, 22 bp, synthetic construct
  misc_feature 1..22: note = chemically synthesized
  source 1..22: mol_type = other DNA
tacacgtacaccaaagcatcat

SEQ ID NO: 137013 - DNA, 22 bp, synthetic construct
  misc_feature 1..22: note = chemically synthesized
  source 1..22: mol_type = other DNA
taccccatgaatacacacaatt

SEQ ID NO: 137014 - DNA, 22 bp, synthetic construct
  misc_feature 1..22: note = chemically synthesized
  source 1..22: mol_type = other DNA
ttatttgtcaatttaaaatgaa

SEQ ID NO: 137015 - DNA, 22 bp, synthetic construct
  misc_feature 1..22: note = chemically synthesized
  source 1..22: mol_type = other DNA
tttgtcaatttaaaatgaaata

SEQ ID NO: 137016 - DNA, 22 bp, synthetic construct
  misc_feature 1..22: note = chemically synthesized
  source 1..22: mol_type = other DNA
gtcaatttaaaatgaaataata

SEQ ID NO: 137017 - DNA, 22 bp, synthetic construct
  misc_feature 1..22: note = chemically synthesized
  source 1..22: mol_type = other DNA
tcaatttaaaatgaaataataa

SEQ ID NO: 137018 - DNA, 22 bp, synthetic construct
  misc_feature 1..22: note = chemically synthesized
  source 1..22: mol_type = other DNA
aaaatgaaataataaaaaataa

SEQ ID NO: 137019 - DNA, 22 bp, synthetic construct
  misc_feature 1..22: note = chemically synthesized
  source 1..22: mol_type = other DNA
aaatgaaataataaaaaataac

SEQ ID NO: 137020 - DNA, 22 bp, synthetic construct
  misc_feature 1..22: note = chemically synthesized
  source 1..22: mol_type = other DNA
gcctctgcattgcctttaccgg

SEQ ID NO: 137021 - DNA, 22 bp, synthetic construct
  misc_feature 1..22: note = chemically synthesized
  source 1..22: mol_type = other DNA
tgcattgcctttaccggtcatc

SEQ ID NO: 137022 - DNA, 22 bp, synthetic construct
  misc_feature 1..22: note = chemically synthesized
  source 1..22: mol_type = other DNA
cattgcctttaccggtcatcct

SEQ ID NO: 137023 - DNA, 22 bp, synthetic construct
  misc_feature 1..22: note = chemically synthesized
  source 1..22: mol_type = other DNA
cctttaccggtcatcctcacgg

SEQ ID NO: 137024 - DNA, 22 bp, synthetic construct
  misc_feature 1..22: note = chemically synthesized
  source 1..22: mol_type = other DNA
taccggtcatcctcacggtgac

SEQ ID NO: 137025 - DNA, 22 bp, synthetic construct
  misc_feature 1..22: note = chemically synthesized
  source 1..22: mol_type = other DNA
accggtcatcctcacggtgact

SEQ ID NO: 137026 - DNA, 22 bp, synthetic construct
  misc_feature 1..22: note = chemically synthesized
  source 1..22: mol_type = other DNA
ccggtcatcctcacggtgacta

SEQ ID NO: 137027 - DNA, 22 bp, synthetic construct
  misc_feature 1..22: note = chemically synthesized
  source 1..22: mol_type = other DNA
acggtgactaacgcaaaaaacg

SEQ ID NO: 137028 - DNA, 22 bp, synthetic construct
  misc_feature 1..22: note = chemically synthesized
  source 1..22: mol_type = other DNA
acgcaaaaaacgttctatttca

SEQ ID NO: 137029 - DNA, 22 bp, synthetic construct
  misc_feature 1..22: note = chemically synthesized
  source 1..22: mol_type = other DNA
tatttcatccttacaaacatcc

SEQ ID NO: 137030 - DNA, 22 bp, synthetic construct
  misc_feature 1..22: note = chemically synthesized
  source 1..22: mol_type = other DNA
tttcatccttacaaacatccct

SEQ ID NO: 137031 - DNA, 22 bp, synthetic construct
  misc_feature 1..22: note = chemically synthesized
  source 1..22: mol_type = other DNA
catccttacaaacatccctatc

SEQ ID NO: 137032 - DNA, 22 bp, synthetic construct
  misc_feature 1..22: note = chemically synthesized
  source 1..22: mol_type = other DNA
atccttacaaacatccctatct

SEQ ID NO: 137033 - DNA, 22 bp, synthetic construct
  misc_feature 1..22: note = chemically synthesized
  source 1..22: mol_type = other DNA
acaaacatccctatctttgatg

SEQ ID NO: 137034 - DNA, 22 bp, synthetic construct
  misc_feature 1..22: note = chemically synthesized
  source 1..22: mol_type = other DNA
caaacatccctatctttgatgc

SEQ ID NO: 137035 - DNA, 22 bp, synthetic construct
  misc_feature 1..22: note = chemically synthesized
  source 1..22: mol_type = other DNA
tctttgatgcctctttgtctag

SEQ ID NO: 137036 - DNA, 22 bp, synthetic construct
  misc_feature 1..22: note = chemically synthesized
  source 1..22: mol_type = other DNA
tgatgcctctttgtctagatct

SEQ ID NO: 137037 - DNA, 22 bp, synthetic construct
  misc_feature 1..22: note = chemically synthesized
  source 1..22: mol_type = other DNA
gatgcctctttgtctagatctc

SEQ ID NO: 137038 - DNA, 22 bp, synthetic construct
  misc_feature 1..22: note = chemically synthesized
  source 1..22: mol_type = other DNA
atgcctctttgtctagatctct

SEQ ID NO: 137039 - DNA, 22 bp, synthetic construct
  misc_feature 1..22: note = chemically synthesized
  source 1..22: mol_type = other DNA
tttgtctagatctctatcccct

SEQ ID NO: 137040 - DNA, 22 bp, synthetic construct
  misc_feature 1..22: note = chemically synthesized
  source 1..22: mol_type = other DNA
tgtctagatctctatcccctcc

SEQ ID NO: 137041 - DNA, 22 bp, synthetic construct
  misc_feature 1..22: note = chemically synthesized
  source 1..22: mol_type = other DNA
gtctagatctctatcccctcct

SEQ ID NO: 137042 - DNA, 22 bp, synthetic construct
  misc_feature 1..22: note = chemically synthesized
  source 1..22: mol_type = other DNA
tctagatctctatcccctcctg

SEQ ID NO: 137043 - DNA, 22 bp, synthetic construct
  misc_feature 1..22: note = chemically synthesized
  source 1..22: mol_type = other DNA
gatctctatcccctcctgtttt

SEQ ID NO: 137044 - DNA, 22 bp, synthetic construct
  misc_feature 1..22: note = chemically synthesized
  source 1..22: mol_type = other DNA
tatcccctcctgttttctctac

SEQ ID NO: 137045 - DNA, 22 bp, synthetic construct
  misc_feature 1..22: note = chemically synthesized
  source 1..22: mol_type = other DNA
tcccctcctgttttctctacgt

SEQ ID NO: 137046 - DNA, 22 bp, synthetic construct
  misc_feature 1..22: note = chemically synthesized
  source 1..22: mol_type = other DNA
ctgttttctctacgttatttat

SEQ ID NO: 137047 - DNA, 22 bp, synthetic construct
  misc_feature 1..22: note = chemically synthesized
  source 1..22: mol_type = other DNA
ttttctctacgttatttatatg

SEQ ID NO: 137048 - DNA, 22 bp, synthetic construct
  misc_feature 1..22: note = chemically synthesized
  source 1..22: mol_type = other DNA
tctctacgttatttatatgggt

SEQ ID NO: 137049 - DNA, 22 bp, synthetic construct
  misc_feature 1..22: note = chemically synthesized
  source 1..22: mol_type = other DNA
ctctacgttatttatatgggta

SEQ ID NO: 137050 - DNA, 22 bp, synthetic construct
  misc_feature 1..22: note = chemically synthesized
  source 1..22: mol_type = other DNA
tctacgttatttatatgggtat

SEQ ID NO: 137051 - DNA, 22 bp, synthetic construct
  misc_feature 1..22: note = chemically synthesized
  source 1..22: mol_type = other DNA
tacgttatttatatgggtatca

SEQ ID NO: 137052 - DNA, 22 bp, synthetic construct
  misc_feature 1..22: note = chemically synthesized
  source 1..22: mol_type = other DNA
cgttatttatatgggtatcatc

SEQ ID NO: 137053 - DNA, 22 bp, synthetic construct
  misc_feature 1..22: note = chemically synthesized
  source 1..22: mol_type = other DNA
tttatatgggtatcatcaccat

SEQ ID NO: 137054 - DNA, 22 bp, synthetic construct
  misc_feature 1..22: note = chemically synthesized
  source 1..22: mol_type = other DNA
atatgggtatcatcaccatcct

SEQ ID NO: 137055 - DNA, 22 bp, synthetic construct
  misc_feature 1..22: note = chemically synthesized
  source 1..22: mol_type = other DNA
tatgggtatcatcaccatcctg

SEQ ID NO: 137056 - DNA, 22 bp, synthetic construct
  misc_feature 1..22: note = chemically synthesized
  source 1..22: mol_type = other DNA
gacaacatcaggacagatatcc

SEQ ID NO: 137057 - DNA, 22 bp, synthetic construct
  misc_feature 1..22: note = chemically synthesized
  source 1..22: mol_type = other DNA
accaagccaatgttcctctcta

SEQ ID NO: 137058 - DNA, 22 bp, synthetic construct
  misc_feature 1..22: note = chemically synthesized
  source 1..22: mol_type = other DNA
ctctctatgttggctcaaatgt

SEQ ID NO: 137059 - DNA, 22 bp, synthetic construct
  misc_feature 1..22: note = chemically synthesized
  source 1..22: mol_type = other DNA
tctatgttggctcaaatgtcct

SEQ ID NO: 137060 - DNA, 22 bp, synthetic construct
  misc_feature 1..22: note = chemically synthesized
  source 1..22: mol_type = other DNA
tatgttggctcaaatgtccttg

SEQ ID NO: 137061 - DNA, 22 bp, synthetic construct
  misc_feature 1..22: note = chemically synthesized
  source 1..22: mol_type = other DNA
tgttggctcaaatgtccttgaa

SEQ ID NO: 137062 - DNA, 22 bp, synthetic construct
  misc_feature 1..22: note = chemically synthesized
  source 1..22: mol_type = other DNA
gctcaaatgtccttgaactttc

SEQ ID NO: 137063 - DNA, 22 bp, synthetic construct
  misc_feature 1..22: note = chemically synthesized
  source 1..22: mol_type = other DNA
aaatgtccttgaactttccttt

SEQ ID NO: 137064 - DNA, 22 bp, synthetic construct
  misc_feature 1..22: note = chemically synthesized
  source 1..22: mol_type = other DNA
gaactttcctttcaccaccctt

SEQ ID NO: 137065 - DNA, 22 bp, synthetic construct
  misc_feature 1..22: note = chemically synthesized
  source 1..22: mol_type = other DNA
aactttcctttcaccacccttt

SEQ ID NO: 137066 - DNA, 22 bp, synthetic construct
  misc_feature 1..22: note = chemically synthesized
  source 1..22: mol_type = other DNA
tcctttcaccaccctttccaca

SEQ ID NO: 137067 - DNA, 22 bp, synthetic construct
  misc_feature 1..22: note = chemically synthesized
  source 1..22: mol_type = other DNA
cctttcaccaccctttccacag

SEQ ID NO: 137068 - DNA, 22 bp, synthetic construct
  misc_feature 1..22: note = chemically synthesized
  source 1..22: mol_type = other DNA
ctttcaccaccctttccacagt

SEQ ID NO: 137069 - DNA, 22 bp, synthetic construct
  misc_feature 1..22: note = chemically synthesized
  source 1..22: mol_type = other DNA
tcaccaccctttccacagtcaa

SEQ ID NO: 137070 - DNA, 22 bp, synthetic construct
  misc_feature 1..22: note = chemically synthesized
  source 1..22: mol_type = other DNA
caccaccctttccacagtcaaa

SEQ ID NO: 137071 - DNA, 22 bp, synthetic construct
  misc_feature 1..22: note = chemically synthesized
  source 1..22: mol_type = other DNA
accaccctttccacagtcaaaa

SEQ ID NO: 137072 - DNA, 22 bp, synthetic construct
  misc_feature 1..22: note = chemically synthesized
  source 1..22: mol_type = other DNA
tccacagtcaaaaggatattgt

SEQ ID NO: 137073 - DNA, 22 bp, synthetic construct
  misc_feature 1..22: note = chemically synthesized
  source 1..22: mol_type = other DNA
ccacagtcaaaaggatattgta

SEQ ID NO: 137074 - DNA, 22 bp, synthetic construct
  misc_feature 1..22: note = chemically synthesized
  source 1..22: mol_type = other DNA
cacagtcaaaaggatattgtag

SEQ ID NO: 137075 - DNA, 22 bp, synthetic construct
  misc_feature 1..22: note = chemically synthesized
  source 1..22: mol_type = other DNA
tagtttaatgcctcagagttca

SEQ ID NO: 137076 - DNA, 22 bp, synthetic construct
  misc_feature 1..22: note = chemically synthesized
  source 1..22: mol_type = other DNA
aatgcctcagagttcagctttt

SEQ ID NO: 137077 - DNA, 22 bp, synthetic construct
  misc_feature 1..22: note = chemically synthesized
  source 1..22: mol_type = other DNA
atgcctcagagttcagctttta

SEQ ID NO: 137078 - DNA, 22 bp, synthetic construct
  misc_feature 1..22: note = chemically synthesized
  source 1..22: mol_type = other DNA
agagttcagcttttaagcttct

SEQ ID NO: 137079 - DNA, 22 bp, synthetic construct
  misc_feature 1..22: note = chemically synthesized
  source 1..22: mol_type = other DNA
agcttttaagcttctgacaaat

SEQ ID NO: 137080 - DNA, 22 bp, synthetic construct
  misc_feature 1..22: note = chemically synthesized
  source 1..22: mol_type = other DNA
ttaagcttctgacaaattattc

SEQ ID NO: 137081 - DNA, 22 bp, synthetic construct
  misc_feature 1..22: note = chemically synthesized
  source 1..22: mol_type = other DNA
taagcttctgacaaattattct

SEQ ID NO: 137082 - DNA, 22 bp, synthetic construct
  misc_feature 1..22: note = chemically synthesized
  source 1..22: mol_type = other DNA
aagcttctgacaaattattctt

SEQ ID NO: 137083 - DNA, 22 bp, synthetic construct
  misc_feature 1..22: note = chemically synthesized
  source 1..22: mol_type = other DNA
agcttctgacaaattattcttc

SEQ ID NO: 137084 - DNA, 22 bp, synthetic construct
  misc_feature 1..22: note = chemically synthesized
  source 1..22: mol_type = other DNA
ctgacaaattattcttcctctt

SEQ ID NO: 137085 - DNA, 22 bp, synthetic construct
  misc_feature 1..22: note = chemically synthesized
  source 1..22: mol_type = other DNA
tgacaaattattcttcctcttt

SEQ ID NO: 137086 - DNA, 22 bp, synthetic construct
  misc_feature 1..22: note = chemically synthesized
  source 1..22: mol_type = other DNA
acaaattattcttcctctttag

SEQ ID NO: 137087 - DNA, 22 bp, synthetic construct
  misc_feature 1..22: note = chemically synthesized
  source 1..22: mol_type = other DNA
ttcttcctctttaggttctcct

SEQ ID NO: 137088 - DNA, 22 bp, synthetic construct
  misc_feature 1..22: note = chemically synthesized
  source 1..22: mol_type = other DNA
ttcctctttaggttctccttta

SEQ ID NO: 137089 - DNA, 22 bp, synthetic construct
  misc_feature 1..22: note = chemically synthesized
  source 1..22: mol_type = other DNA
cctctttaggttctcctttatg

SEQ ID NO: 137090 - DNA, 22 bp, synthetic construct
  misc_feature 1..22: note = chemically synthesized
  source 1..22: mol_type = other DNA
ctctttaggttctcctttatgg

SEQ ID NO: 137091 - DNA, 22 bp, synthetic construct
  misc_feature 1..22: note = chemically synthesized
  source 1..22: mol_type = other DNA
tttaggttctcctttatggaat

SEQ ID NO: 137092 - DNA, 22 bp, synthetic construct
  misc_feature 1..22: note = chemically synthesized
  source 1..22: mol_type = other DNA
taggttctcctttatggaatct

SEQ ID NO: 137093 - DNA, 22 bp, synthetic construct
  misc_feature 1..22: note = chemically synthesized
  source 1..22: mol_type = other DNA
aggttctcctttatggaatctt

SEQ ID NO: 137094 - DNA, 22 bp, synthetic construct
  misc_feature 1..22: note = chemically synthesized
  source 1..22: mol_type = other DNA
ggttctcctttatggaatcttc

SEQ ID NO: 137095 - DNA, 22 bp, synthetic construct
  misc_feature 1..22: note = chemically synthesized
  source 1..22: mol_type = other DNA
tcctttatggaatcttctgtac

SEQ ID NO: 137096 - DNA, 22 bp, synthetic construct
  misc_feature 1..22: note = chemically synthesized
  source 1..22: mol_type = other DNA
ctttatggaatcttctgtactg

SEQ ID NO: 137097 - DNA, 22 bp, synthetic construct
  misc_feature 1..22: note = chemically synthesized
  source 1..22: mol_type = other DNA
tatggaatcttctgtactgatg

SEQ ID NO: 137098 - DNA, 22 bp, synthetic construct
  misc_feature 1..22: note = chemically synthesized
  source 1..22: mol_type = other DNA
atggaatcttctgtactgatgg

SEQ ID NO: 137099 - DNA, 22 bp, synthetic construct
  misc_feature 1..22: note = chemically synthesized
  source 1..22: mol_type = other DNA
tggaatcttctgtactgatggc

SEQ ID NO: 137100 - DNA, 22 bp, synthetic construct
  misc_feature 1..22: note = chemically synthesized
  source 1..22: mol_type = other DNA
ctgtactgatggccatgtcctt

SEQ ID NO: 137101 - DNA, 22 bp, synthetic construct
  misc_feature 1..22: note = chemically synthesized
  source 1..22: mol_type = other DNA
tgtactgatggccatgtccttt

SEQ ID NO: 137102 - DNA, 22 bp, synthetic construct
  misc_feature 1..22: note = chemically synthesized
  source 1..22: mol_type = other DNA
tactgatggccatgtcctttaa

SEQ ID NO: 137103 - DNA, 22 bp, synthetic construct
  misc_feature 1..22: note = chemically synthesized
  source 1..22: mol_type = other DNA
atggccatgtcctttaactact

SEQ ID NO: 137104 - DNA, 22 bp, synthetic construct
  misc_feature 1..22: note = chemically synthesized
  source 1..22: mol_type = other DNA
taactactatgtagatatctgc

SEQ ID NO: 137105 - DNA, 22 bp, synthetic construct
  misc_feature 1..22: note = chemically synthesized
  source 1..22: mol_type = other DNA
aactactatgtagatatctgct

SEQ ID NO: 137106 - DNA, 22 bp, synthetic construct
  misc_feature 1..22: note = chemically synthesized
  source 1..22: mol_type = other DNA
actactatgtagatatctgcta

SEQ ID NO: 137107 - DNA, 22 bp, synthetic construct
  misc_feature 1..22: note = chemically synthesized
  source 1..22: mol_type = other DNA
ctatgtagatatctgctactac

SEQ ID NO: 137108 - DNA, 22 bp, synthetic construct
  misc_feature 1..22: note = chemically synthesized
  source 1..22: mol_type = other DNA
tgtagatatctgctactacctg

SEQ ID NO: 137109 - DNA, 22 bp, synthetic construct
  misc_feature 1..22: note = chemically synthesized
  source 1..22: mol_type = other DNA
ctactacctgtattatgcctct

SEQ ID NO: 137110 - DNA, 22 bp, synthetic construct
  misc_feature 1..22: note = chemically synthesized
  source 1..22: mol_type = other DNA
ctacctgtattatgcctctacc

SEQ ID NO: 137111 - DNA, 22 bp, synthetic construct
  misc_feature 1..22: note = chemically synthesized
  source 1..22: mol_type = other DNA
cctgtattatgcctctaccttt

SEQ ID NO: 137112 - DNA, 22 bp, synthetic construct
  misc_feature 1..22: note = chemically synthesized
  source 1..22: mol_type = other DNA
tattatgcctctacctttatta

SEQ ID NO: 137113 - DNA, 22 bp, synthetic construct
  misc_feature 1..22: note = chemically synthesized
  source 1..22: mol_type = other DNA
tgcctctacctttattagcaga

SEQ ID NO: 137114 - DNA, 22 bp, synthetic construct
  misc_feature 1..22: note = chemically synthesized
  source 1..22: mol_type = other DNA
tacctttattagcagagttatc

SEQ ID NO: 137115 - DNA, 22 bp, synthetic construct
  misc_feature 1..22: note = chemically synthesized
  source 1..22: mol_type = other DNA
cctttattagcagagttatctg

SEQ ID NO: 137116 - DNA, 22 bp, synthetic construct
  misc_feature 1..22: note = chemically synthesized
  source 1..22: mol_type = other DNA
tattagcagagttatctgtact

SEQ ID NO: 137117 - DNA, 22 bp, synthetic construct
  misc_feature 1..22: note = chemically synthesized
  source 1..22: mol_type = other DNA
attagcagagttatctgtactg

SEQ ID NO: 137118 - DNA, 22 bp, synthetic construct
  misc_feature 1..22: note = chemically synthesized
  source 1..22: mol_type = other DNA
ttagcagagttatctgtactgt

SEQ ID NO: 137119 - DNA, 22 bp, synthetic construct
  misc_feature 1..22: note = chemically synthesized
  source 1..22: mol_type = other DNA
gcagagttatctgtactgttgg

SEQ ID NO: 137120 - DNA, 22 bp, synthetic construct
  misc_feature 1..22: note = chemically synthesized
  source 1..22: mol_type = other DNA
tctgtactgttggcatgacaat

SEQ ID NO: 137121 - DNA, 22 bp, synthetic construct
  misc_feature 1..22: note = chemically synthesized
  source 1..22: mol_type = other DNA
tactgttggcatgacaatcatt

SEQ ID NO: 137122 - DNA, 22 bp, synthetic construct
  misc_feature 1..22: note = chemically synthesized
  source 1..22: mol_type = other DNA
ttggcatgacaatcatttgtta

SEQ ID NO: 137123 - DNA, 22 bp, synthetic construct
  misc_feature 1..22: note = chemically synthesized
  source 1..22: mol_type = other DNA
gcatgacaatcatttgttaata

SEQ ID NO: 137124 - DNA, 22 bp, synthetic construct
  misc_feature 1..22: note = chemically synthesized
  source 1..22: mol_type = other DNA
gttaatatgacttgcctttcct

SEQ ID NO: 137125 - DNA, 22 bp, synthetic construct
  misc_feature 1..22: note = chemically synthesized
  source 1..22: mol_type = other DNA
ttaatatgacttgcctttcctt

SEQ ID NO: 137126 - DNA, 22 bp, synthetic construct
  misc_feature 1..22: note = chemically synthesized
  source 1..22: mol_type = other DNA
atatgacttgcctttccttttt

SEQ ID NO: 137127 - DNA, 22 bp, synthetic construct
  misc_feature 1..22: note = chemically synthesized
  source 1..22: mol_type = other DNA
gcctttcctttttctgctattc

SEQ ID NO: 137128 - DNA, 22 bp, synthetic construct
  misc_feature 1..22: note = chemically synthesized
  source 1..22: mol_type = other DNA
cctttcctttttctgctattct

SEQ ID NO: 137129 - DNA, 22 bp, synthetic construct
  misc_feature 1..22: note = chemically synthesized
  source 1..22: mol_type = other DNA
tcctttttctgctattcttgat

SEQ ID NO: 137130 - DNA, 22 bp, synthetic construct
  misc_feature 1..22: note = chemically synthesized
  source 1..22: mol_type = other DNA
cctttttctgctattcttgatc

SEQ ID NO: 137131 - DNA, 22 bp, synthetic construct
  misc_feature 1..22: note = chemically synthesized
  source 1..22: mol_type = other DNA
ctttttctgctattcttgatca

SEQ ID NO: 137132 - DNA, 22 bp, synthetic construct
  misc_feature 1..22: note = chemically synthesized
  source 1..22: mol_type = other DNA
tttctgctattcttgatcaaat

SEQ ID NO: 137133 - DNA, 22 bp, synthetic construct
  misc_feature 1..22: note = chemically synthesized
  source 1..22: mol_type = other DNA
ttctgctattcttgatcaaatg

SEQ ID NO: 137134 - DNA, 22 bp, synthetic construct
  misc_feature 1..22: note = chemically synthesized
  source 1..22: mol_type = other DNA
tctgctattcttgatcaaatgg

SEQ ID NO: 137135 - DNA, 22 bp, synthetic construct
  misc_feature 1..22: note = chemically synthesized
  source 1..22: mol_type = other DNA
ctgctattcttgatcaaatggc

SEQ ID NO: 137136 - DNA, 22 bp, synthetic construct
  misc_feature 1..22: note = chemically synthesized
  source 1..22: mol_type = other DNA
tgctattcttgatcaaatggct

SEQ ID NO: 137137 - DNA, 22 bp, synthetic construct
  misc_feature 1..22: note = chemically synthesized
  source 1..22: mol_type = other DNA
ctattcttgatcaaatggctcc

SEQ ID NO: 137138 - DNA, 22 bp, synthetic construct
  misc_feature 1..22: note = chemically synthesized
  source 1..22: mol_type = other DNA
ttcttgatcaaatggctcctct

SEQ ID NO: 137139 - DNA, 22 bp, synthetic construct
  misc_feature 1..22: note = chemically synthesized
  source 1..22: mol_type = other DNA
ttgatcaaatggctcctctttc

SEQ ID NO: 137140 - DNA, 22 bp, synthetic construct
  misc_feature 1..22: note = chemically synthesized
  source 1..22: mol_type = other DNA
gatcaaatggctcctctttctt

SEQ ID NO: 137141 - DNA, 22 bp, synthetic construct
  misc_feature 1..22: note = chemically synthesized
  source 1..22: mol_type = other DNA
atcaaatggctcctctttcttg

SEQ ID NO: 137142 - DNA, 22 bp, synthetic construct
  misc_feature 1..22: note = chemically synthesized
  source 1..22: mol_type = other DNA
ctctttcttgctcctctcattt

SEQ ID NO: 137143 - DNA, 22 bp, synthetic construct
  misc_feature 1..22: note = chemically synthesized
  source 1..22: mol_type = other DNA
tttcttgctcctctcatttctc

SEQ ID NO: 137144 - DNA, 22 bp, synthetic construct
  misc_feature 1..22: note = chemically synthesized
  source 1..22: mol_type = other DNA
tcttgctcctctcatttctcct

SEQ ID NO: 137145 - DNA, 22 bp, synthetic construct
  misc_feature 1..22: note = chemically synthesized
  source 1..22: mol_type = other DNA
cttgctcctctcatttctcctg

SEQ ID NO: 137146 - DNA, 22 bp, synthetic construct
  misc_feature 1..22: note = chemically synthesized
  source 1..22: mol_type = other DNA
ttgctcctctcatttctcctgc

SEQ ID NO: 137147 - DNA, 22 bp, synthetic construct
  misc_feature 1..22: note = chemically synthesized
  source 1..22: mol_type = other DNA
gctcctctcatttctcctgcct

SEQ ID NO: 137148 - DNA, 22 bp, synthetic construct
  misc_feature 1..22: note = chemically synthesized
  source 1..22: mol_type = other DNA
ctcctctcatttctcctgcctt

SEQ ID NO: 137149 - DNA, 22 bp, synthetic construct
  misc_feature 1..22: note = chemically synthesized
  source 1..22: mol_type = other DNA
ctctcatttctcctgccttcac

SEQ ID NO: 137150 - DNA, 22 bp, synthetic construct
  misc_feature 1..22: note = chemically synthesized
  source 1..22: mol_type = other DNA
tcatttctcctgccttcacttg

SEQ ID NO: 137151 - DNA, 22 bp, synthetic construct
  misc_feature 1..22: note = chemically synthesized
  source 1..22: mol_type = other DNA
atttctcctgccttcacttgga

SEQ ID NO: 137152 - DNA, 22 bp, synthetic construct
  misc_feature 1..22: note = chemically synthesized
  source 1..22: mol_type = other DNA
ctcctgccttcacttggacgtg

SEQ ID NO: 137153 - DNA, 22 bp, synthetic construct
  misc_feature 1..22: note = chemically synthesized
  source 1..22: mol_type = other DNA
tcctgccttcacttggacgtgc

SEQ ID NO: 137154 - DNA, 22 bp, synthetic construct
  misc_feature 1..22: note = chemically synthesized
  source 1..22: mol_type = other DNA
ctgccttcacttggacgtgctt

SEQ ID NO: 137155 - DNA, 22 bp, synthetic construct
  misc_feature 1..22: note = chemically synthesized
  source 1..22: mol_type = other DNA
ccttcacttggacgtgcttcac

SEQ ID NO: 137156 - DNA, 22 bp, synthetic construct
  misc_feature 1..22: note = chemically synthesized
  source 1..22: mol_type = other DNA
cacttggacgtgcttcacgtag

SEQ ID NO: 137157 - DNA, 22 bp, synthetic construct
  misc_feature 1..22: note = chemically synthesized
  source 1..22: mol_type = other DNA
acttggacgtgcttcacgtagt

SEQ ID NO: 137158 - DNA, 22 bp, synthetic construct
  misc_feature 1..22: note = chemically synthesized
  source 1..22: mol_type = other DNA
ggacgtgcttcacgtagtctgt

SEQ ID NO: 137159 - DNA, 22 bp, synthetic construct
  misc_feature 1..22: note = chemically synthesized
  source 1..22: mol_type = other DNA
gacgtgcttcacgtagtctgtg

SEQ ID NO: 137160 - DNA, 22 bp, synthetic construct
  misc_feature 1..22: note = chemically synthesized
  source 1..22: mol_type = other DNA
cacgtagtctgtgcttatgact

SEQ ID NO: 137161 - DNA, 22 bp, synthetic construct
  misc_feature 1..22: note = chemically synthesized
  source 1..22: mol_type = other DNA
acgtagtctgtgcttatgactg

SEQ ID NO: 137162 - DNA, 22 bp, synthetic construct
  misc_feature 1..22: note = chemically synthesized
  source 1..22: mol_type = other DNA
tgcttatgactggattaaaaat

SEQ ID NO: 137163 - DNA, 22 bp, synthetic construct
  misc_feature 1..22: note = chemically synthesized
  source 1..22: mol_type = other DNA
atgactggattaaaaattgata

SEQ ID NO: 137164 - DNA, 22 bp, synthetic construct
  misc_feature 1..22: note = chemically synthesized
  source 1..22: mol_type = other DNA
tgactggattaaaaattgatat

SEQ ID NO: 137165 - DNA, 22 bp, synthetic construct
  misc_feature 1..22: note = chemically synthesized
  source 1..22: mol_type = other DNA
gattaaaaattgatatggactt

SEQ ID NO: 137166 - DNA, 22 bp, synthetic construct
  misc_feature 1..22: note = chemically synthesized
  source 1..22: mol_type = other DNA
aaaattgatatggacttatcct

SEQ ID NO: 137167 - DNA, 22 bp, synthetic construct
  misc_feature 1..22: note = chemically synthesized
  source 1..22: mol_type = other DNA
atatggacttatcctaatgttg

SEQ ID NO: 137168 - DNA, 22 bp, synthetic construct
  misc_feature 1..22: note = chemically synthesized
  source 1..22: mol_type = other DNA
atcctaatgttgttcgtcataa

SEQ ID NO: 137169 - DNA, 22 bp, synthetic construct
  misc_feature 1..22: note = chemically synthesized
  source 1..22: mol_type = other DNA
tcctaatgttgttcgtcataat

SEQ ID NO: 137170 - DNA, 22 bp, synthetic construct
  misc_feature 1..22: note = chemically synthesized
  source 1..22: mol_type = other DNA
atgttgttcgtcataatatggg

SEQ ID NO: 137171 - DNA, 22 bp, synthetic construct
  misc_feature 1..22: note = chemically synthesized
  source 1..22: mol_type = other DNA
ttcgtcataatatgggttttat

SEQ ID NO: 137172 - DNA, 22 bp, synthetic construct
  misc_feature 1..22: note = chemically synthesized
  source 1..22: mol_type = other DNA
gtcataatatgggttttatggt

SEQ ID NO: 137173 - DNA, 22 bp, synthetic construct
  misc_feature 1..22: note = chemically synthesized
  source 1..22: mol_type = other DNA
tatggtccattattatttccta

SEQ ID NO: 137174 - DNA, 22 bp, synthetic construct
  misc_feature 1..22: note = chemically synthesized
  source 1..22: mol_type = other DNA
atggtccattattatttcctat

SEQ ID NO: 137175 - DNA, 22 bp, synthetic construct
  misc_feature 1..22: note = chemically synthesized
  source 1..22: mol_type = other DNA
tggtccattattatttcctatg

SEQ ID NO: 137176 - DNA, 22 bp, synthetic construct
  misc_feature 1..22: note = chemically synthesized
  source 1..22: mol_type = other DNA
ttatttcctatgcattgatctg

SEQ ID NO: 137177 - DNA, 22 bp, synthetic construct
  misc_feature 1..22: note = chemically synthesized
  source 1..22: mol_type = other DNA
tttcctatgcattgatctggag

SEQ ID NO: 137178 - DNA, 22 bp, synthetic construct
  misc_feature 1..22: note = chemically synthesized
  source 1..22: mol_type = other DNA
cctatgcattgatctggagaag

SEQ ID NO: 137179 - DNA, 22 bp, synthetic construct
  misc_feature 1..22: note = chemically synthesized
  source 1..22: mol_type = other DNA
ctatgcattgatctggagaagg

SEQ ID NO: 137180 - DNA, 22 bp, synthetic construct
  misc_feature 1..22: note = chemically synthesized
  source 1..22: mol_type = other DNA
tgcattgatctggagaaggctt

SEQ ID NO: 137181 - DNA, 22 bp, synthetic construct
  misc_feature 1..22: note = chemically synthesized
  source 1..22: mol_type = other DNA
atctggagaaggcttcaatcct

SEQ ID NO: 137182 - DNA, 22 bp, synthetic construct
  misc_feature 1..22: note = chemically synthesized
  source 1..22: mol_type = other DNA
gagaaggcttcaatccttttac

SEQ ID NO: 137183 - DNA, 22 bp, synthetic construct
  misc_feature 1..22: note = chemically synthesized
  source 1..22: mol_type = other DNA
caatccttttactctttgtgga

SEQ ID NO: 137184 - DNA, 22 bp, synthetic construct
  misc_feature 1..22: note = chemically synthesized
  source 1..22: mol_type = other DNA
aatccttttactctttgtggaa

SEQ ID NO: 137185 - DNA, 22 bp, synthetic construct
  misc_feature 1..22: note = chemically synthesized
  source 1..22: mol_type = other DNA
ttactctttgtggaaaatatct

SEQ ID NO: 137186 - DNA, 22 bp, synthetic construct
  misc_feature 1..22: note = chemically synthesized
  source 1..22: mol_type = other DNA
tactctttgtggaaaatatctg

SEQ ID NO: 137187 - DNA, 22 bp, synthetic construct
  misc_feature 1..22: note = chemically synthesized
  source 1..22: mol_type = other DNA
actctttgtggaaaatatctgt

SEQ ID NO: 137188 - DNA, 22 bp, synthetic construct
  misc_feature 1..22: note = chemically synthesized
  source 1..22: mol_type = other DNA
ctctttgtggaaaatatctgta

SEQ ID NO: 137189 - DNA, 22 bp, synthetic construct
  misc_feature 1..22: note = chemically synthesized
  source 1..22: mol_type = other DNA
tttgtggaaaatatctgtaaac

SEQ ID NO: 137190 - DNA, 22 bp, synthetic construct
  misc_feature 1..22: note = chemically synthesized
  source 1..22: mol_type = other DNA
tgtggaaaatatctgtaaacct

SEQ ID NO: 137191 - DNA, 22 bp, synthetic construct
  misc_feature 1..22: note = chemically synthesized
  source 1..22: mol_type = other DNA
gtggaaaatatctgtaaacctt

SEQ ID NO: 137192 - DNA, 22 bp, synthetic construct
  misc_feature 1..22: note = chemically synthesized
  source 1..22: mol_type = other DNA
tggaaaatatctgtaaaccttc

SEQ ID NO: 137193 - DNA, 22 bp, synthetic construct
  misc_feature 1..22: note = chemically synthesized
  source 1..22: mol_type = other DNA
taaaccttctggttcactctgc

SEQ ID NO: 137194 - DNA, 22 bp, synthetic construct
  misc_feature 1..22: note = chemically synthesized
  source 1..22: mol_type = other DNA
ctggttcactctgctatagcaa

SEQ ID NO: 137195 - DNA, 22 bp, synthetic construct
  misc_feature 1..22: note = chemically synthesized
  source 1..22: mol_type = other DNA
tggttcactctgctatagcaat

SEQ ID NO: 137196 - DNA, 22 bp, synthetic construct
  misc_feature 1..22: note = chemically synthesized
  source 1..22: mol_type = other DNA
gttcactctgctatagcaattt

SEQ ID NO: 137197 - DNA, 22 bp, synthetic construct
  misc_feature 1..22: note = chemically synthesized
  source 1..22: mol_type = other DNA
actctgctatagcaatttcagt

SEQ ID NO: 137198 - DNA, 22 bp, synthetic construct
  misc_feature 1..22: note = chemically synthesized
  source 1..22: mol_type = other DNA
tgctatagcaatttcagtttag

SEQ ID NO: 137199 - DNA, 22 bp, synthetic construct
  misc_feature 1..22: note = chemically synthesized
  source 1..22: mol_type = other DNA
ctatagcaatttcagtttaggc

SEQ ID NO: 137200 - DNA, 22 bp, synthetic construct
  misc_feature 1..22: note = chemically synthesized
  source 1..22: mol_type = other DNA
tagcaatttcagtttaggctag

SEQ ID NO: 137201 - DNA, 22 bp, synthetic construct
  misc_feature 1..22: note = chemically synthesized
  source 1..22: mol_type = other DNA
cagtttaggctagtaagcatga

SEQ ID NO: 137202 - DNA, 22 bp, synthetic construct
  misc_feature 1..22: note = chemically synthesized
  source 1..22: mol_type = other DNA
agtttaggctagtaagcatgag

SEQ ID NO: 137203 - DNA, 22 bp, synthetic construct
  misc_feature 1..22: note = chemically synthesized
  source 1..22: mol_type = other DNA
aggctagtaagcatgaggatgc

SEQ ID NO: 137204 - DNA, 22 bp, synthetic construct
  misc_feature 1..22: note = chemically synthesized
  source 1..22: mol_type = other DNA
ggctagtaagcatgaggatgcc

SEQ ID NO: 137205 - DNA, 22 bp, synthetic construct
  misc_feature 1..22: note = chemically synthesized
  source 1..22: mol_type = other DNA
gtaagcatgaggatgcctcctt

SEQ ID NO: 137206 - DNA, 22 bp, synthetic construct
  misc_feature 1..22: note = chemically synthesized
  source 1..22: mol_type = other DNA
cttctctgatttttcccacagt

SEQ ID NO: 137207 - DNA, 22 bp, synthetic construct
  misc_feature 1..22: note = chemically synthesized
  source 1..22: mol_type = other DNA
ctctgatttttcccacagtctg

SEQ ID NO: 137208 - DNA, 22 bp, synthetic construct
  misc_feature 1..22: note = chemically synthesized
  source 1..22: mol_type = other DNA
tctgatttttcccacagtctgt

SEQ ID NO: 137209 - DNA, 22 bp, synthetic construct
  misc_feature 1..22: note = chemically synthesized
  source 1..22: mol_type = other DNA
tgatttttcccacagtctgttg

SEQ ID NO: 137210 - DNA, 22 bp, synthetic construct
  misc_feature 1..22: note = chemically synthesized
  source 1..22: mol_type = other DNA
atttttcccacagtctgttggt

SEQ ID NO: 137211 - DNA, 22 bp, synthetic construct
  misc_feature 1..22: note = chemically synthesized
  source 1..22: mol_type = other DNA
ttcccacagtctgttggtcaca

SEQ ID NO: 137212 - DNA, 22 bp, synthetic construct
  misc_feature 1..22: note = chemically synthesized
  source 1..22: mol_type = other DNA
tcccacagtctgttggtcacag

SEQ ID NO: 137213 - DNA, 22 bp, synthetic construct
  misc_feature 1..22: note = chemically synthesized
  source 1..22: mol_type = other DNA
cccacagtctgttggtcacaga

SEQ ID NO: 137214 - DNA, 22 bp, synthetic construct
  misc_feature 1..22: note = chemically synthesized
  source 1..22: mol_type = other DNA
ccacagtctgttggtcacagaa

SEQ ID NO: 137215 - DNA, 22 bp, synthetic construct
  misc_feature 1..22: note = chemically synthesized
  source 1..22: mol_type = other DNA
ttggtcacagaataacctgagt

SEQ ID NO: 137216 - DNA, 22 bp, synthetic construct
  misc_feature 1..22: note = chemically synthesized
  source 1..22: mol_type = other DNA
gtcacagaataacctgagtgat

SEQ ID NO: 137217 - DNA, 22 bp, synthetic construct
  misc_feature 1..22: note = chemically synthesized
  source 1..22: mol_type = other DNA
agtgattactgatgaaagagtg

SEQ ID NO: 137218 - DNA, 22 bp, synthetic construct
  misc_feature 1..22: note = chemically synthesized
  source 1..22: mol_type = other DNA
ctgatgaaagagtgagaatgtt

SEQ ID NO: 137219 - DNA, 22 bp, synthetic construct
  misc_feature 1..22: note = chemically synthesized
  source 1..22: mol_type = other DNA
atgaaagagtgagaatgttatt

SEQ ID NO: 137220 - DNA, 22 bp, synthetic construct
  misc_feature 1..22: note = chemically synthesized
  source 1..22: mol_type = other DNA
ttgatagtcacaatgacaaaaa

SEQ ID NO: 137221 - DNA, 22 bp, synthetic construct
  misc_feature 1..22: note = chemically synthesized
  source 1..22: mol_type = other DNA
atagtcacaatgacaaaaaaca

SEQ ID NO: 137222 - DNA, 22 bp, synthetic construct
  misc_feature 1..22: note = chemically synthesized
  source 1..22: mol_type = other DNA
cagtcaaaatgtttctcttttt

SEQ ID NO: 137223 - DNA, 22 bp, synthetic construct
  misc_feature 1..22: note = chemically synthesized
  source 1..22: mol_type = other DNA
ctctttttattagtggattata

SEQ ID NO: 137224 - DNA, 22 bp, synthetic construct
  misc_feature 1..22: note = chemically synthesized
  source 1..22: mol_type = other DNA
tctttttattagtggattatat

SEQ ID NO: 137225 - DNA, 22 bp, synthetic construct
  misc_feature 1..22: note = chemically synthesized
  source 1..22: mol_type = other DNA
tttttattagtggattatattt

SEQ ID NO: 137226 - DNA, 22 bp, synthetic construct
  misc_feature 1..22: note = chemically synthesized
  source 1..22: mol_type = other DNA
tttattagtggattatatttcc

SEQ ID NO: 137227 - DNA, 22 bp, synthetic construct
  misc_feature 1..22: note = chemically synthesized
  source 1..22: mol_type = other DNA
ttattagtggattatatttcct

SEQ ID NO: 137228 - DNA, 22 bp, synthetic construct
  misc_feature 1..22: note = chemically synthesized
  source 1..22: mol_type = other DNA
tattagtggattatatttcctg

SEQ ID NO: 137229 - DNA, 22 bp, synthetic construct
  misc_feature 1..22: note = chemically synthesized
  source 1..22: mol_type = other DNA
attagtggattatatttcctga

SEQ ID NO: 137230 - DNA, 22 bp, synthetic construct
  misc_feature 1..22: note = chemically synthesized
  source 1..22: mol_type = other DNA
ttagtggattatatttcctgac

SEQ ID NO: 137231 - DNA, 22 bp, synthetic construct
  misc_feature 1..22: note = chemically synthesized
  source 1..22: mol_type = other DNA
gtggattatatttcctgaccta

SEQ ID NO: 137232 - DNA, 22 bp, synthetic construct
  misc_feature 1..22: note = chemically synthesized
  source 1..22: mol_type = other DNA
tatttcctgacctatatctggc

SEQ ID NO: 137233 - DNA, 22 bp, synthetic construct
  misc_feature 1..22: note = chemically synthesized
  source 1..22: mol_type = other DNA
cctgacctatatctggcaggac

SEQ ID NO: 137234 - DNA, 22 bp, synthetic construct
  misc_feature 1..22: note = chemically synthesized
  source 1..22: mol_type = other DNA
ctgacctatatctggcaggact

SEQ ID NO: 137235 - DNA, 22 bp, synthetic construct
  misc_feature 1..22: note = chemically synthesized
  source 1..22: mol_type = other DNA
acctatatctggcaggactctt

SEQ ID NO: 137236 - DNA, 22 bp, synthetic construct
  misc_feature 1..22: note = chemically synthesized
  source 1..22: mol_type = other DNA
tatctggcaggactctttagag

SEQ ID NO: 137237 - DNA, 22 bp, synthetic construct
  misc_feature 1..22: note = chemically synthesized
  source 1..22: mol_type = other DNA
gcaggactctttagagaggtag

SEQ ID NO: 137238 - DNA, 22 bp, synthetic construct
  misc_feature 1..22: note = chemically synthesized
  source 1..22: mol_type = other DNA
tttagagaggtagctgaagctg

SEQ ID NO: 137239 - DNA, 22 bp, synthetic construct
  misc_feature 1..22: note = chemically synthesized
  source 1..22: mol_type = other DNA
tagagaggtagctgaagctgct

SEQ ID NO: 137240 - DNA, 22 bp, synthetic construct
  misc_feature 1..22: note = chemically synthesized
  source 1..22: mol_type = other DNA
agagaggtagctgaagctgctg

SEQ ID NO: 137241 - DNA, 22 bp, synthetic construct
  misc_feature 1..22: note = chemically synthesized
  source 1..22: mol_type = other DNA
gagaggtagctgaagctgctgt

SEQ ID NO: 137242 - DNA, 22 bp, synthetic construct
  misc_feature 1..22: note = chemically synthesized
  source 1..22: mol_type = other DNA
aagctgctgttatgaccactag

SEQ ID NO: 137243 - DNA, 22 bp, synthetic construct
  misc_feature 1..22: note = chemically synthesized
  source 1..22: mol_type = other DNA
ctgttatgaccactagagggaa

SEQ ID NO: 137244 - DNA, 22 bp, synthetic construct
  misc_feature 1..22: note = chemically synthesized
  source 1..22: mol_type = other DNA
ttatgaccactagagggaagaa

SEQ ID NO: 137245 - DNA, 22 bp, synthetic construct
  misc_feature 1..22: note = chemically synthesized
  source 1..22: mol_type = other DNA
tgaccactagagggaagaagat

SEQ ID NO: 137246 - DNA, 22 bp, synthetic construct
  misc_feature 1..22: note = chemically synthesized
  source 1..22: mol_type = other DNA
gagggaagaagatacctgtgga

SEQ ID NO: 137247 - DNA, 22 bp, synthetic construct
  misc_feature 1..22: note = chemically synthesized
  source 1..22: mol_type = other DNA
tggagctaatggtccaagatgg

SEQ ID NO: 137248 - DNA, 22 bp, synthetic construct
  misc_feature 1..22: note = chemically synthesized
  source 1..22: mol_type = other DNA
atggtccaagatggtggagccc

SEQ ID NO: 137249 - DNA, 22 bp, synthetic construct
  misc_feature 1..22: note = chemically synthesized
  source 1..22: mol_type = other DNA
ttaaggagcccttttgattgaa

SEQ ID NO: 137250 - DNA, 22 bp, synthetic construct
  misc_feature 1..22: note = chemically synthesized
  source 1..22: mol_type = other DNA
aggagcccttttgattgaaggt

SEQ ID NO: 137251 - DNA, 22 bp, synthetic construct
  misc_feature 1..22: note = chemically synthesized
  source 1..22: mol_type = other DNA
ttgattgaaggtgggtgccccc

SEQ ID NO: 137252 - DNA, 22 bp, synthetic construct
  misc_feature 1..22: note = chemically synthesized
  source 1..22: mol_type = other DNA
tgattgaaggtgggtgccccca

SEQ ID NO: 137253 - DNA, 22 bp, synthetic construct
  misc_feature 1..22: note = chemically synthesized
  source 1..22: mol_type = other DNA
gattgaaggtgggtgcccccac

SEQ ID NO: 137254 - DNA, 22 bp, synthetic construct
  misc_feature 1..22: note = chemically synthesized
  source 1..22: mol_type = other DNA
attgaaggtgggtgcccccacc

SEQ ID NO: 137255 - DNA, 22 bp, synthetic construct
  misc_feature 1..22: note = chemically synthesized
  source 1..22: mol_type = other DNA
aaggtgggtgcccccaccttac

SEQ ID NO: 137256 - DNA, 22 bp, synthetic construct
  misc_feature 1..22: note = chemically synthesized
  source 1..22: mol_type = other DNA
acagggacaggacatctggata

SEQ ID NO: 137257 - DNA, 22 bp, synthetic construct
  misc_feature 1..22: note = chemically synthesized
  source 1..22: mol_type = other DNA
cagggacaggacatctggatac

SEQ ID NO: 137258 - DNA, 22 bp, synthetic construct
  misc_feature 1..22: note = chemically synthesized
  source 1..22: mol_type = other DNA
gatactcctcccagtttctcca

SEQ ID NO: 137259 - DNA, 22 bp, synthetic construct
  misc_feature 1..22: note = chemically synthesized
  source 1..22: mol_type = other DNA
ctcccagtttctccagtttccc

SEQ ID NO: 137260 - DNA, 22 bp, synthetic construct
  misc_feature 1..22: note = chemically synthesized
  source 1..22: mol_type = other DNA
ccagtttctccagtttcccttt

SEQ ID NO: 137261 - DNA, 22 bp, synthetic construct
  misc_feature 1..22: note = chemically synthesized
  source 1..22: mol_type = other DNA
ctccagtttccctttttcctaa

SEQ ID NO: 137262 - DNA, 22 bp, synthetic construct
  misc_feature 1..22: note = chemically synthesized
  source 1..22: mol_type = other DNA
tccagtttccctttttcctaat

SEQ ID NO: 137263 - DNA, 22 bp, synthetic construct
  misc_feature 1..22: note = chemically synthesized
  source 1..22: mol_type = other DNA
cagtttccctttttcctaatat

SEQ ID NO: 137264 - DNA, 22 bp, synthetic construct
  misc_feature 1..22: note = chemically synthesized
  source 1..22: mol_type = other DNA
ccctttttcctaatatatctcc

SEQ ID NO: 137265 - DNA, 22 bp, synthetic construct
  misc_feature 1..22: note = chemically synthesized
  source 1..22: mol_type = other DNA
cctttttcctaatatatctcct

SEQ ID NO: 137266 - DNA, 22 bp, synthetic construct
  misc_feature 1..22: note = chemically synthesized
  source 1..22: mol_type = other DNA
tttcctaatatatctcctgata

SEQ ID NO: 137267 - DNA, 22 bp, synthetic construct
  misc_feature 1..22: note = chemically synthesized
  source 1..22: mol_type = other DNA
ttcctaatatatctcctgataa

SEQ ID NO: 137268 - DNA, 22 bp, synthetic construct
  misc_feature 1..22: note = chemically synthesized
  source 1..22: mol_type = other DNA
tcctaatatatctcctgataaa

SEQ ID NO: 137269 - DNA, 22 bp, synthetic construct
  misc_feature 1..22: note = chemically synthesized
  source 1..22: mol_type = other DNA
cctaatatatctcctgataaaa

SEQ ID NO: 137270 - DNA, 22 bp, synthetic construct
  misc_feature 1..22: note = chemically synthesized
  source 1..22: mol_type = other DNA
ctaatatatctcctgataaaat

SEQ ID NO: 137271 - DNA, 22 bp, synthetic construct
  misc_feature 1..22: note = chemically synthesized
  source 1..22: mol_type = other DNA
atatatctcctgataaaatgtc

SEQ ID NO: 137272 - DNA, 22 bp, synthetic construct
  misc_feature 1..22: note = chemically synthesized
  source 1..22: mol_type = other DNA
ctgataaaatgtctatactcac

SEQ ID NO: 137273 - DNA, 22 bp, synthetic construct
  misc_feature 1..22: note = chemically synthesized
  source 1..22: mol_type = other DNA
ataaaatgtctatactcacttc

SEQ ID NO: 137274 - DNA, 22 bp, synthetic construct
  misc_feature 1..22: note = chemically synthesized
  source 1..22: mol_type = other DNA
tactcacttccccatttctaat

SEQ ID NO: 137275 - DNA, 22 bp, synthetic construct
  misc_feature 1..22: note = chemically synthesized
  source 1..22: mol_type = other DNA
acttccccatttctaataataa

SEQ ID NO: 137276 - DNA, 22 bp, synthetic construct
  misc_feature 1..22: note = chemically synthesized
  source 1..22: mol_type = other DNA
ccccatttctaataataaagca

SEQ ID NO: 137277 - DNA, 22 bp, synthetic construct
  misc_feature 1..22: note = chemically synthesized
  source 1..22: mol_type = other DNA
cccatttctaataataaagcaa

SEQ ID NO: 137278 - DNA, 22 bp, synthetic construct
  misc_feature 1..22: note = chemically synthesized
  source 1..22: mol_type = other DNA
ctaataataaagcaaaggctag

SEQ ID NO: 137279 - DNA, 22 bp, synthetic construct
  misc_feature 1..22: note = chemically synthesized
  source 1..22: mol_type = other DNA
taataataaagcaaaggctagt

SEQ ID NO: 137280 - DNA, 22 bp, synthetic construct
  misc_feature 1..22: note = chemically synthesized
  source 1..22: mol_type = other DNA
ataataaagcaaaggctagtta

SEQ ID NO: 137281 - DNA, 22 bp, synthetic construct
  misc_feature 1..22: note = chemically synthesized
  source 1..22: mol_type = other DNA
gttagtaagacatcaccttgca

SEQ ID NO: 137282 - DNA, 22 bp, synthetic construct
  misc_feature 1..22: note = chemically synthesized
  source 1..22: mol_type = other DNA
gtaagacatcaccttgcatttt

SEQ ID NO: 137283 - DNA, 22 bp, synthetic construct
  misc_feature 1..22: note = chemically synthesized
  source 1..22: mol_type = other DNA
gcattttgaaaatgccatagac

SEQ ID NO: 137284 - DNA, 22 bp, synthetic construct
  misc_feature 1..22: note = chemically synthesized
  source 1..22: mol_type = other DNA
cattttgaaaatgccatagact

SEQ ID NO: 137285 - DNA, 22 bp, synthetic construct
  misc_feature 1..22: note = chemically synthesized
  source 1..22: mol_type = other DNA
tgaaaatgccatagactttcaa

SEQ ID NO: 137286 - DNA, 22 bp, synthetic construct
  misc_feature 1..22: note = chemically synthesized
  source 1..22: mol_type = other DNA
gaaaatgccatagactttcaaa

SEQ ID NO: 137287 - DNA, 22 bp, synthetic construct
  misc_feature 1..22: note = chemically synthesized
  source 1..22: mol_type = other DNA
aaaatgccatagactttcaaaa

SEQ ID NO: 137288 - DNA, 22 bp, synthetic construct
  misc_feature 1..22: note = chemically synthesized
  source 1..22: mol_type = other DNA
tcaaaattatttcatacatcgg

SEQ ID NO: 137289 - DNA, 22 bp, synthetic construct
  misc_feature 1..22: note = chemically synthesized
  source 1..22: mol_type = other DNA
caaaattatttcatacatcggt

SEQ ID NO: 137290 - DNA, 22 bp, synthetic construct
  misc_feature 1..22: note = chemically synthesized
  source 1..22: mol_type = other DNA
aaaattatttcatacatcggtc

SEQ ID NO: 137291 - DNA, 22 bp, synthetic construct
  misc_feature 1..22: note = chemically synthesized
  source 1..22: mol_type = other DNA
tttcatacatcggtctttcttt

SEQ ID NO: 137292 - DNA, 22 bp, synthetic construct
  misc_feature 1..22: note = chemically synthesized
  source 1..22: mol_type = other DNA
catacatcggtctttctttatt

SEQ ID NO: 137293 - DNA, 22 bp, synthetic construct
  misc_feature 1..22: note = chemically synthesized
  source 1..22: mol_type = other DNA
atacatcggtctttctttattt

SEQ ID NO: 137294 - DNA, 22 bp, synthetic construct
  misc_feature 1..22: note = chemically synthesized
  source 1..22: mol_type = other DNA
tctttatttcaagagtccagaa

SEQ ID NO: 137295 - DNA, 22 bp, synthetic construct
  misc_feature 1..22: note = chemically synthesized
  source 1..22: mol_type = other DNA
ctttatttcaagagtccagaaa

SEQ ID NO: 137296 - DNA, 22 bp, synthetic construct
  misc_feature 1..22: note = chemically synthesized
  source 1..22: mol_type = other DNA
tttatttcaagagtccagaaat

SEQ ID NO: 137297 - DNA, 22 bp, synthetic construct
  misc_feature 1..22: note = chemically synthesized
  source 1..22: mol_type = other DNA
tatttcaagagtccagaaatgg

SEQ ID NO: 137298 - DNA, 22 bp, synthetic construct
  misc_feature 1..22: note = chemically synthesized
  source 1..22: mol_type = other DNA
atttcaagagtccagaaatggc

SEQ ID NO: 137299 - DNA, 22 bp, synthetic construct
  misc_feature 1..22: note = chemically synthesized
  source 1..22: mol_type = other DNA
tttcaagagtccagaaatggca

SEQ ID NO: 137300 - DNA, 22 bp, synthetic construct
  misc_feature 1..22: note = chemically synthesized
  source 1..22: mol_type = other DNA
caagagtccagaaatggcaaca

SEQ ID NO: 137301 - DNA, 22 bp, synthetic construct
  misc_feature 1..22: note = chemically synthesized
  source 1..22: mol_type = other DNA
aagagtccagaaatggcaacat

SEQ ID NO: 137302 - DNA, 22 bp, synthetic construct
  misc_feature 1..22: note = chemically synthesized
  source 1..22: mol_type = other DNA
cctttgattcaatgtaatggaa

SEQ ID NO: 137303 - DNA, 22 bp, synthetic construct
  misc_feature 1..22: note = chemically synthesized
  source 1..22: mol_type = other DNA
tgattcaatgtaatggaaagag

SEQ ID NO: 137304 - DNA, 22 bp, synthetic construct
  misc_feature 1..22: note = chemically synthesized
  source 1..22: mol_type = other DNA
gattcaatgtaatggaaagagc

SEQ ID NO: 137305 - DNA, 22 bp, synthetic construct
  misc_feature 1..22: note = chemically synthesized
  source 1..22: mol_type = other DNA
attcaatgtaatggaaagagct

SEQ ID NO: 137306 - DNA, 22 bp, synthetic construct
  misc_feature 1..22: note = chemically synthesized
  source 1..22: mol_type = other DNA
aatgtaatggaaagagctcttt

SEQ ID NO: 137307 - DNA, 22 bp, synthetic construct
  misc_feature 1..22: note = chemically synthesized
  source 1..22: mol_type = other DNA
tttcaagagacagagaaaagaa

SEQ ID NO: 137308 - DNA, 22 bp, synthetic construct
  misc_feature 1..22: note = chemically synthesized
  source 1..22: mol_type = other DNA
tcaagagacagagaaaagaata

SEQ ID NO: 137309 - DNA, 22 bp, synthetic construct
  misc_feature 1..22: note = chemically synthesized
  source 1..22: mol_type = other DNA
caagagacagagaaaagaataa

SEQ ID NO: 137310 - DNA, 22 bp, synthetic construct
  misc_feature 1..22: note = chemically synthesized
  source 1..22: mol_type = other DNA
aagagacagagaaaagaataat

SEQ ID NO: 137311 - DNA, 22 bp, synthetic construct
  misc_feature 1..22: note = chemically synthesized
  source 1..22: mol_type = other DNA
aatttctttccccacacctcct

SEQ ID NO: 137312 - DNA, 22 bp, synthetic construct
  misc_feature 1..22: note = chemically synthesized
  source 1..22: mol_type = other DNA
atttctttccccacacctcctt

SEQ ID NO: 137313 - DNA, 22 bp, synthetic construct
  misc_feature 1..22: note = chemically synthesized
  source 1..22: mol_type = other DNA
ctttccccacacctccttccct

SEQ ID NO: 137314 - DNA, 22 bp, synthetic construct
  misc_feature 1..22: note = chemically synthesized
  source 1..22: mol_type = other DNA
tttccccacacctccttccctg

SEQ ID NO: 137315 - DNA, 22 bp, synthetic construct
  misc_feature 1..22: note = chemically synthesized
  source 1..22: mol_type = other DNA
tccccacacctccttccctgtc

SEQ ID NO: 137316 - DNA, 22 bp, synthetic construct
  misc_feature 1..22: note = chemically synthesized
  source 1..22: mol_type = other DNA
ccccacacctccttccctgtct

SEQ ID NO: 137317 - DNA, 22 bp, synthetic construct
  misc_feature 1..22: note = chemically synthesized
  source 1..22: mol_type = other DNA
cccacacctccttccctgtctc

SEQ ID NO: 137318 - DNA, 22 bp, synthetic construct
  misc_feature 1..22: note = chemically synthesized
  source 1..22: mol_type = other DNA
cttccctgtctcttaccctatc

SEQ ID NO: 137319 - DNA, 22 bp, synthetic construct
  misc_feature 1..22: note = chemically synthesized
  source 1..22: mol_type = other DNA
ccctgtctcttaccctatcttc

SEQ ID NO: 137320 - DNA, 22 bp, synthetic construct
  misc_feature 1..22: note = chemically synthesized
  source 1..22: mol_type = other DNA
cctgtctcttaccctatcttcc

SEQ ID NO: 137321 - DNA, 22 bp, synthetic construct
  misc_feature 1..22: note = chemically synthesized
  source 1..22: mol_type = other DNA
tctcttaccctatcttccttcc

SEQ ID NO: 137322 - DNA, 22 bp, synthetic construct
  misc_feature 1..22: note = chemically synthesized
  source 1..22: mol_type = other DNA
ttaccctatcttccttccttct

SEQ ID NO: 137323 - DNA, 22 bp, synthetic construct
  misc_feature 1..22: note = chemically synthesized
  source 1..22: mol_type = other DNA
accctatcttccttccttctac

SEQ ID NO: 137324 - DNA, 22 bp, synthetic construct
  misc_feature 1..22: note = chemically synthesized
  source 1..22: mol_type = other DNA
ccctatcttccttccttctacc

SEQ ID NO: 137325 - DNA, 22 bp, synthetic construct
  misc_feature 1..22: note = chemically synthesized
  source 1..22: mol_type = other DNA
tcttccttccttctaccctccc

SEQ ID NO: 137326 - DNA, 22 bp, synthetic construct
  misc_feature 1..22: note = chemically synthesized
  source 1..22: mol_type = other DNA
ccttccttctaccctccccatt

SEQ ID NO: 137327 - DNA, 22 bp, synthetic construct
  misc_feature 1..22: note = chemically synthesized
  source 1..22: mol_type = other DNA
cttccttctaccctccccattt

SEQ ID NO: 137328 - DNA, 22 bp, synthetic construct
  misc_feature 1..22: note = chemically synthesized
  source 1..22: mol_type = other DNA
ccttctaccctccccatttctc

SEQ ID NO: 137329 - DNA, 22 bp, synthetic construct
  misc_feature 1..22: note = chemically synthesized
  source 1..22: mol_type = other DNA
cttctaccctccccatttctct

SEQ ID NO: 137330 - DNA, 22 bp, synthetic construct
  misc_feature 1..22: note = chemically synthesized
  source 1..22: mol_type = other DNA
ctaccctccccatttctctctc

SEQ ID NO: 137331 - DNA, 22 bp, synthetic construct
  misc_feature 1..22: note = chemically synthesized
  source 1..22: mol_type = other DNA
taccctccccatttctctctct

SEQ ID NO: 137332 - DNA, 22 bp, synthetic construct
  misc_feature 1..22: note = chemically synthesized
  source 1..22: mol_type = other DNA
ccctccccatttctctctctca

SEQ ID NO: 137333 - DNA, 22 bp, synthetic construct
  misc_feature 1..22: note = chemically synthesized
  source 1..22: mol_type = other DNA
cccatttctctctctcatttct

SEQ ID NO: 137334 - DNA, 22 bp, synthetic construct
  misc_feature 1..22: note = chemically synthesized
  source 1..22: mol_type = other DNA
ctctctctcatttctcagaagt

SEQ ID NO: 137335 - DNA, 22 bp, synthetic construct
  misc_feature 1..22: note = chemically synthesized
  source 1..22: mol_type = other DNA
tctctctcatttctcagaagta

SEQ ID NO: 137336 - DNA, 22 bp, synthetic construct
  misc_feature 1..22: note = chemically synthesized
  source 1..22: mol_type = other DNA
tctctcatttctcagaagtata

SEQ ID NO: 137337 - DNA, 22 bp, synthetic construct
  misc_feature 1..22: note = chemically synthesized
  source 1..22: mol_type = other DNA
tctcatttctcagaagtatatt

SEQ ID NO: 137338 - DNA, 22 bp, synthetic construct
  misc_feature 1..22: note = chemically synthesized
  source 1..22: mol_type = other DNA
tcatttctcagaagtatatttt

SEQ ID NO: 137339 - DNA, 22 bp, synthetic construct
  misc_feature 1..22: note = chemically synthesized
  source 1..22: mol_type = other DNA
atttctcagaagtatattttga

SEQ ID NO: 137340 - DNA, 22 bp, synthetic construct
  misc_feature 1..22: note = chemically synthesized
  source 1..22: mol_type = other DNA
ctcagaagtatattttgaaagg

SEQ ID NO: 137341 - DNA, 22 bp, synthetic construct
  misc_feature 1..22: note = chemically synthesized
  source 1..22: mol_type = other DNA
tcagaagtatattttgaaagga

SEQ ID NO: 137342 - DNA, 22 bp, synthetic construct
  misc_feature 1..22: note = chemically synthesized
  source 1..22: mol_type = other DNA
agaagtatattttgaaaggatt

SEQ ID NO: 137343 - DNA, 22 bp, synthetic construct
  misc_feature 1..22: note = chemically synthesized
  source 1..22: mol_type = other DNA
tgaaaggattcatagcagacag

SEQ ID NO: 137344 - DNA, 22 bp, synthetic construct
  misc_feature 1..22: note = chemically synthesized
  source 1..22: mol_type = other DNA
gaaaggattcatagcagacagc

SEQ ID NO: 137345 - DNA, 22 bp, synthetic construct
  misc_feature 1..22: note = chemically synthesized
  source 1..22: mol_type = other DNA
aaaggattcatagcagacagct

SEQ ID NO: 137346 - DNA, 22 bp, synthetic construct
  misc_feature 1..22: note = chemically synthesized
  source 1..22: mol_type = other DNA
atagcagacagctaaggctggt

SEQ ID NO: 137347 - DNA, 22 bp, synthetic construct
  misc_feature 1..22: note = chemically synthesized
  source 1..22: mol_type = other DNA
aggctggttttttctaagtgaa

SEQ ID NO: 137348 - DNA, 22 bp, synthetic construct
  misc_feature 1..22: note = chemically synthesized
  source 1..22: mol_type = other DNA
gttttttctaagtgaagaagtg

SEQ ID NO: 137349 - DNA, 22 bp, synthetic construct
  misc_feature 1..22: note = chemically synthesized
  source 1..22: mol_type = other DNA
tttctaagtgaagaagtgatat

SEQ ID NO: 137350 - DNA, 22 bp, synthetic construct
  misc_feature 1..22: note = chemically synthesized
  source 1..22: mol_type = other DNA
ttctaagtgaagaagtgatatt

SEQ ID NO: 137351 - DNA, 22 bp, synthetic construct
  misc_feature 1..22: note = chemically synthesized
  source 1..22: mol_type = other DNA
tctaagtgaagaagtgatattg

SEQ ID NO: 137352 - DNA, 22 bp, synthetic construct
  misc_feature 1..22: note = chemically synthesized
  source 1..22: mol_type = other DNA
ctaagtgaagaagtgatattga

SEQ ID NO: 137353 - DNA, 22 bp, synthetic construct
  misc_feature 1..22: note = chemically synthesized
  source 1..22: mol_type = other DNA
taagtgaagaagtgatattgag

SEQ ID NO: 137354 - DNA, 22 bp, synthetic construct
  misc_feature 1..22: note = chemically synthesized
  source 1..22: mol_type = other DNA
agtgaagaagtgatattgagaa

SEQ ID NO: 137355 - DNA, 22 bp, synthetic construct
  misc_feature 1..22: note = chemically synthesized
  source 1..22: mol_type = other DNA
agaaggtagggttgcatgagcc

SEQ ID NO: 137356 - DNA, 22 bp, synthetic construct
  misc_feature 1..22: note = chemically synthesized
  source 1..22: mol_type = other DNA
catgagccctttcagtttttta

SEQ ID NO: 137357 - DNA, 22 bp, synthetic construct
  misc_feature 1..22: note = chemically synthesized
  source 1..22: mol_type = other DNA
tcagttttttagtttatataca

SEQ ID NO: 137358 - DNA, 22 bp, synthetic construct
  misc_feature 1..22: note = chemically synthesized
  source 1..22: mol_type = other DNA
cagttttttagtttatatacat

SEQ ID NO: 137359 - DNA, 22 bp, synthetic construct
  misc_feature 1..22: note = chemically synthesized
  source 1..22: mol_type = other DNA
agttttttagtttatatacatc

SEQ ID NO: 137360 - DNA, 22 bp, synthetic construct
  misc_feature 1..22: note = chemically synthesized
  source 1..22: mol_type = other DNA
tttagtttatatacatctgtat

SEQ ID NO: 137361 - DNA, 22 bp, synthetic construct
  misc_feature 1..22: note = chemically synthesized
  source 1..22: mol_type = other DNA
ttagtttatatacatctgtatt

SEQ ID NO: 137362 - DNA, 22 bp, synthetic construct
  misc_feature 1..22: note = chemically synthesized
  source 1..22: mol_type = other DNA
tagtttatatacatctgtattg

SEQ ID NO: 137363 - DNA, 22 bp, synthetic construct
  misc_feature 1..22: note = chemically synthesized
  source 1..22: mol_type = other DNA
agtttatatacatctgtattgt

SEQ ID NO: 137364 - DNA, 22 bp, synthetic construct
  misc_feature 1..22: note = chemically synthesized
  source 1..22: mol_type = other DNA
gtttatatacatctgtattgtt

SEQ ID NO: 137365 - DNA, 22 bp, synthetic construct
  misc_feature 1..22: note = chemically synthesized
  source 1..22: mol_type = other DNA
atatacatctgtattgttagaa

SEQ ID NO: 137366 - DNA, 22 bp, synthetic construct
  misc_feature 1..22: note = chemically synthesized
  source 1..22: mol_type = other DNA
tatacatctgtattgttagaat

SEQ ID NO: 137367 - DNA, 22 bp, synthetic construct
  misc_feature 1..22: note = chemically synthesized
  source 1..22: mol_type = other DNA
tattgttagaatgttttataat

SEQ ID NO: 137368 - DNA, 22 bp, synthetic construct
  misc_feature 1..22: note = chemically synthesized
  source 1..22: mol_type = other DNA
ttagaatgttttataatataaa

SEQ ID NO: 137369 - DNA, 22 bp, synthetic construct
  misc_feature 1..22: note = chemically synthesized
  source 1..22: mol_type = other DNA
gaatgttttataatataaataa

SEQ ID NO: 137370 - DNA, 22 bp, synthetic construct
  misc_feature 1..22: note = chemically synthesized
  source 1..22: mol_type = other DNA
tataatataaataaaattattt

SEQ ID NO: 137371 - DNA, 22 bp, synthetic construct
  misc_feature 1..22: note = chemically synthesized
  source 1..22: mol_type = other DNA
ataatataaataaaattatttc

SEQ ID NO: 137372 - DNA, 22 bp, synthetic construct
  misc_feature 1..22: note = chemically synthesized
  source 1..22: mol_type = other DNA
taatataaataaaattatttct

SEQ ID NO: 137373 - DNA, 22 bp, synthetic construct
  misc_feature 1..22: note = chemically synthesized
  source 1..22: mol_type = other DNA
tttctcagttatatactagcta

SEQ ID NO: 137374 - DNA, 22 bp, synthetic construct
  misc_feature 1..22: note = chemically synthesized
  source 1..22: mol_type = other DNA
ctcagttatatactagctatgt

SEQ ID NO: 137375 - DNA, 22 bp, synthetic construct
  misc_feature 1..22: note = chemically synthesized
  source 1..22: mol_type = other DNA
tcagttatatactagctatgta

SEQ ID NO: 137376 - DNA, 22 bp, synthetic construct
  misc_feature 1..22: note = chemically synthesized
  source 1..22: mol_type = other DNA
agttatatactagctatgtaac

SEQ ID NO: 137377 - DNA, 22 bp, synthetic construct
  misc_feature 1..22: note = chemically synthesized
  source 1..22: mol_type = other DNA
tatactagctatgtaacctgtg

SEQ ID NO: 137378 - DNA, 22 bp, synthetic construct
  misc_feature 1..22: note = chemically synthesized
  source 1..22: mol_type = other DNA
gctatgtaacctgtggatattt

SEQ ID NO: 137379 - DNA, 22 bp, synthetic construct
  misc_feature 1..22: note = chemically synthesized
  source 1..22: mol_type = other DNA
tgtaacctgtggatatttcctt

SEQ ID NO: 137380 - DNA, 22 bp, synthetic construct
  misc_feature 1..22: note = chemically synthesized
  source 1..22: mol_type = other DNA
tggatatttccttaagtattac

SEQ ID NO: 137381 - DNA, 22 bp, synthetic construct
  misc_feature 1..22: note = chemically synthesized
  source 1..22: mol_type = other DNA
ccttaagtattacaagctatac

SEQ ID NO: 137382 - DNA, 22 bp, synthetic construct
  misc_feature 1..22: note = chemically synthesized
  source 1..22: mol_type = other DNA
cttaagtattacaagctatact

SEQ ID NO: 137383 - DNA, 22 bp, synthetic construct
  misc_feature 1..22: note = chemically synthesized
  source 1..22: mol_type = other DNA
aagtattacaagctatacttaa

SEQ ID NO: 137384 - DNA, 22 bp, synthetic construct
  misc_feature 1..22: note = chemically synthesized
  source 1..22: mol_type = other DNA
agtattacaagctatacttaac

SEQ ID NO: 137385 - DNA, 22 bp, synthetic construct
  misc_feature 1..22: note = chemically synthesized
  source 1..22: mol_type = other DNA
caagctatacttaactcacttg

SEQ ID NO: 137386 - DNA, 22 bp, synthetic construct
  misc_feature 1..22: note = chemically synthesized
  source 1..22: mol_type = other DNA
tacttaactcacttggaaaact

SEQ ID NO: 137387 - DNA, 22 bp, synthetic construct
  misc_feature 1..22: note = chemically synthesized
  source 1..22: mol_type = other DNA
aactcacttggaaaactcaaat

SEQ ID NO: 137388 - DNA, 22 bp, synthetic construct
  misc_feature 1..22: note = chemically synthesized
  source 1..22: mol_type = other DNA
actcacttggaaaactcaaata

SEQ ID NO: 137389 - DNA, 22 bp, synthetic construct
  misc_feature 1..22: note = chemically synthesized
  source 1..22: mol_type = other DNA
acttggaaaactcaaataaata

SEQ ID NO: 137390 - DNA, 22 bp, synthetic construct
  misc_feature 1..22: note = chemically synthesized
  source 1..22: mol_type = other DNA
ggaaaactcaaataaatacctg

SEQ ID NO: 137391 - DNA, 22 bp, synthetic construct
  misc_feature 1..22: note = chemically synthesized
  source 1..22: mol_type = other DNA
gaaaactcaaataaatacctgc

SEQ ID NO: 137392 - DNA, 22 bp, synthetic construct
  misc_feature 1..22: note = chemically synthesized
  source 1..22: mol_type = other DNA
aaataaatacctgcttcatagt

SEQ ID NO: 137393 - DNA, 22 bp, synthetic construct
  misc_feature 1..22: note = chemically synthesized
  source 1..22: mol_type = other DNA
cttcatagttattaataaggat

SEQ ID NO: 137394 - DNA, 22 bp, synthetic construct
  misc_feature 1..22: note = chemically synthesized
  source 1..22: mol_type = other DNA
catagttattaataaggattaa

SEQ ID NO: 137395 - DNA, 22 bp, synthetic construct
  misc_feature 1..22: note = chemically synthesized
  source 1..22: mol_type = other DNA
atagttattaataaggattaag

SEQ ID NO: 137396 - DNA, 22 bp, synthetic construct
  misc_feature 1..22: note = chemically synthesized
  source 1..22: mol_type = other DNA
ttaataaggattaagtgagata

SEQ ID NO: 137397 - DNA, 22 bp, synthetic construct
  misc_feature 1..22: note = chemically synthesized
  source 1..22: mol_type = other DNA
ataaggattaagtgagataatg

SEQ ID NO: 137398 - DNA, 22 bp, synthetic construct
  misc_feature 1..22: note = chemically synthesized
  source 1..22: mol_type = other DNA
agtgagataatgcccataagat

SEQ ID NO: 137399 - DNA, 22 bp, synthetic construct
  misc_feature 1..22: note = chemically synthesized
  source 1..22: mol_type = other DNA
ctattaataacagataaataca

SEQ ID NO: 137400 - DNA, 22 bp, synthetic construct
  misc_feature 1..22: note = chemically synthesized
  source 1..22: mol_type = other DNA
ttaataacagataaatacatac

SEQ ID NO: 137401 - DNA, 22 bp, synthetic construct
  misc_feature 1..22: note = chemically synthesized
  source 1..22: mol_type = other DNA
ataacagataaatacatacaca

SEQ ID NO: 137402 - DNA, 22 bp, synthetic construct
  misc_feature 1..22: note = chemically synthesized
  source 1..22: mol_type = other DNA
aaaggattcttactttgtgcta

SEQ ID NO: 137403 - DNA, 22 bp, synthetic construct
  misc_feature 1..22: note = chemically synthesized
  source 1..22: mol_type = other DNA
ttactttgtgctaggaactata

SEQ ID NO: 137404 - DNA, 22 bp, synthetic construct
  misc_feature 1..22: note = chemically synthesized
  source 1..22: mol_type = other DNA
actttgtgctaggaactataat

SEQ ID NO: 137405 - DNA, 22 bp, synthetic construct
  misc_feature 1..22: note = chemically synthesized
  source 1..22: mol_type = other DNA
ctttgtgctaggaactataata

SEQ ID NO: 137406 - DNA, 22 bp, synthetic construct
  misc_feature 1..22: note = chemically synthesized
  source 1..22: mol_type = other DNA
tgtgctaggaactataataagt

SEQ ID NO: 137407 - DNA, 22 bp, synthetic construct
  misc_feature 1..22: note = chemically synthesized
  source 1..22: mol_type = other DNA
gtgctaggaactataataagtt

SEQ ID NO: 137408 - DNA, 22 bp, synthetic construct
  misc_feature 1..22: note = chemically synthesized
  source 1..22: mol_type = other DNA
tgctaggaactataataagttc

SEQ ID NO: 137409 - DNA, 22 bp, synthetic construct
  misc_feature 1..22: note = chemically synthesized
  source 1..22: mol_type = other DNA
ggaactataataagttcattga

SEQ ID NO: 137410 - DNA, 22 bp, synthetic construct
  misc_feature 1..22: note = chemically synthesized
  source 1..22: mol_type = other DNA
taataagttcattgatgcatta

SEQ ID NO: 137411 - DNA, 22 bp, synthetic construct
  misc_feature 1..22: note = chemically synthesized
  source 1..22: mol_type = other DNA
attgatgcattatatcattaag

SEQ ID NO: 137412 - DNA, 22 bp, synthetic construct
  misc_feature 1..22: note = chemically synthesized
  source 1..22: mol_type = other DNA
atgcattatatcattaagttct

SEQ ID NO: 137413 - DNA, 22 bp, synthetic construct
  misc_feature 1..22: note = chemically synthesized
  source 1..22: mol_type = other DNA
tatcattaagttctaatttcaa

SEQ ID NO: 137414 - DNA, 22 bp, synthetic construct
  misc_feature 1..22: note = chemically synthesized
  source 1..22: mol_type = other DNA
agttctaatttcaacactagaa

SEQ ID NO: 137415 - DNA, 22 bp, synthetic construct
  misc_feature 1..22: note = chemically synthesized
  source 1..22: mol_type = other DNA
taatttcaacactagaaggcag

SEQ ID NO: 137416 - DNA, 22 bp, synthetic construct
  misc_feature 1..22: note = chemically synthesized
  source 1..22: mol_type = other DNA
atttcaacactagaaggcaggt

SEQ ID NO: 137417 - DNA, 22 bp, synthetic construct
  misc_feature 1..22: note = chemically synthesized
  source 1..22: mol_type = other DNA
caacactagaaggcaggtatta

SEQ ID NO: 137418 - DNA, 22 bp, synthetic construct
  misc_feature 1..22: note = chemically synthesized
  source 1..22: mol_type = other DNA
aacactagaaggcaggtattat

SEQ ID NO: 137419 - DNA, 22 bp, synthetic construct
  misc_feature 1..22: note = chemically synthesized
  source 1..22: mol_type = other DNA
gaaggcaggtattatctaaatt

SEQ ID NO: 137420 - DNA, 22 bp, synthetic construct
  misc_feature 1..22: note = chemically synthesized
  source 1..22: mol_type = other DNA
tctaaatttcatactggatacc

SEQ ID NO: 137421 - DNA, 22 bp, synthetic construct
  misc_feature 1..22: note = chemically synthesized
  source 1..22: mol_type = other DNA
aatttcatactggatacctcca

SEQ ID NO: 137422 - DNA, 22 bp, synthetic construct
  misc_feature 1..22: note = chemically synthesized
  source 1..22: mol_type = other DNA
catactggatacctccaaactc

SEQ ID NO: 137423 - DNA, 22 bp, synthetic construct
  misc_feature 1..22: note = chemically synthesized
  source 1..22: mol_type = other DNA
atactggatacctccaaactca

SEQ ID NO: 137424 - DNA, 22 bp, synthetic construct
  misc_feature 1..22: note = chemically synthesized
  source 1..22: mol_type = other DNA
gatacctccaaactcataaaga

SEQ ID NO: 137425 - DNA, 22 bp, synthetic construct
  misc_feature 1..22: note = chemically synthesized
  source 1..22: mol_type = other DNA
caaactcataaagataattaaa

SEQ ID NO: 137426 - DNA, 22 bp, synthetic construct
  misc_feature 1..22: note = chemically synthesized
  source 1..22: mol_type = other DNA
ataaagataattaaattgcctt

SEQ ID NO: 137427 - DNA, 22 bp, synthetic construct
  misc_feature 1..22: note = chemically synthesized
  source 1..22: mol_type = other DNA
aattgccttttgtcatatattt

SEQ ID NO: 137428 - DNA, 22 bp, synthetic construct
  misc_feature 1..22: note = chemically synthesized
  source 1..22: mol_type = other DNA
ccttttgtcatatatttattca

SEQ ID NO: 137429 - DNA, 22 bp, synthetic construct
  misc_feature 1..22: note = chemically synthesized
  source 1..22: mol_type = other DNA
ttgtcatatatttattcaaaag

SEQ ID NO: 137430 - DNA, 22 bp, synthetic construct
  misc_feature 1..22: note = chemically synthesized
  source 1..22: mol_type = other DNA
tgtcatatatttattcaaaagg

SEQ ID NO: 137431 - DNA, 22 bp, synthetic construct
  misc_feature 1..22: note = chemically synthesized
  source 1..22: mol_type = other DNA
gtcatatatttattcaaaaggg

SEQ ID NO: 137432 - DNA, 22 bp, synthetic construct
  misc_feature 1..22: note = chemically synthesized
  source 1..22: mol_type = other DNA
tcatatatttattcaaaagggt

SEQ ID NO: 137433 - DNA, 22 bp, synthetic construct
  misc_feature 1..22: note = chemically synthesized
  source 1..22: mol_type = other DNA
attcaaaagggtaaactcaaac

SEQ ID NO: 137434 - DNA, 22 bp, synthetic construct
  misc_feature 1..22: note = chemically synthesized
  source 1..22: mol_type = other DNA
ttcaaaagggtaaactcaaact

SEQ ID NO: 137435 - DNA, 22 bp, synthetic construct
  misc_feature 1..22: note = chemically synthesized
  source 1..22: mol_type = other DNA
aaaagggtaaactcaaactatg

SEQ ID NO: 137436 - DNA, 22 bp, synthetic construct
  misc_feature 1..22: note = chemically synthesized
  source 1..22: mol_type = other DNA
aaactatggcttgtctaatttt

SEQ ID NO: 137437 - DNA, 22 bp, synthetic construct
  misc_feature 1..22: note = chemically synthesized
  source 1..22: mol_type = other DNA
tggcttgtctaattttatatat

SEQ ID NO: 137438 - DNA, 22 bp, synthetic construct
  misc_feature 1..22: note = chemically synthesized
  source 1..22: mol_type = other DNA
gtctaattttatatatcaccct

SEQ ID NO: 137439 - DNA, 22 bp, synthetic construct
  misc_feature 1..22: note = chemically synthesized
  source 1..22: mol_type = other DNA
tctaattttatatatcacccta

SEQ ID NO: 137440 - DNA, 22 bp, synthetic construct
  misc_feature 1..22: note = chemically synthesized
  source 1..22: mol_type = other DNA
attttatatatcaccctactga

SEQ ID NO: 137441 - DNA, 22 bp, synthetic construct
  misc_feature 1..22: note = chemically synthesized
  source 1..22: mol_type = other DNA
tatatatcaccctactgaacat

SEQ ID NO: 137442 - DNA, 22 bp, synthetic construct
  misc_feature 1..22: note = chemically synthesized
  source 1..22: mol_type = other DNA
atatatcaccctactgaacatg

SEQ ID NO: 137443 - DNA, 22 bp, synthetic construct
  misc_feature 1..22: note = chemically synthesized
  source 1..22: mol_type = other DNA
tatatcaccctactgaacatga

SEQ ID NO: 137444 - DNA, 22 bp, synthetic construct
  misc_feature 1..22: note = chemically synthesized
  source 1..22: mol_type = other DNA
ctgaacatgaccctattgtgat

SEQ ID NO: 137445 - DNA, 22 bp, synthetic construct
  misc_feature 1..22: note = chemically synthesized
  source 1..22: mol_type = other DNA
aacatgaccctattgtgatatt

SEQ ID NO: 137446 - DNA, 22 bp, synthetic construct
  misc_feature 1..22: note = chemically synthesized
  source 1..22: mol_type = other DNA
ttgtgatattttataaaattat

SEQ ID NO: 137447 - DNA, 22 bp, synthetic construct
  misc_feature 1..22: note = chemically synthesized
  source 1..22: mol_type = other DNA
tgatattttataaaattattct

SEQ ID NO: 137448 - DNA, 22 bp, synthetic construct
  misc_feature 1..22: note = chemically synthesized
  source 1..22: mol_type = other DNA
tataaaattattctcaagttat

SEQ ID NO: 137449 - DNA, 22 bp, synthetic construct
  misc_feature 1..22: note = chemically synthesized
  source 1..22: mol_type = other DNA
ataaaattattctcaagttatt

SEQ ID NO: 137450 - DNA, 22 bp, synthetic construct
  misc_feature 1..22: note = chemically synthesized
  source 1..22: mol_type = other DNA
taaaattattctcaagttatta

SEQ ID NO: 137451 - DNA, 22 bp, synthetic construct
  misc_feature 1..22: note = chemically synthesized
  source 1..22: mol_type = other DNA
ttctcaagttattatgaggatg

SEQ ID NO: 137452 - DNA, 22 bp, synthetic construct
  misc_feature 1..22: note = chemically synthesized
  source 1..22: mol_type = other DNA
tcaagttattatgaggatgttg

SEQ ID NO: 137453 - DNA, 22 bp, synthetic construct
  misc_feature 1..22: note = chemically synthesized
  source 1..22: mol_type = other DNA
aagttattatgaggatgttgaa

SEQ ID NO: 137454 - DNA, 22 bp, synthetic construct
  misc_feature 1..22: note = chemically synthesized
  source 1..22: mol_type = other DNA
ttatgaggatgttgaaagacag

SEQ ID NO: 137455 - DNA, 22 bp, synthetic construct
  misc_feature 1..22: note = chemically synthesized
  source 1..22: mol_type = other DNA
tgaggatgttgaaagacagaga

SEQ ID NO: 137456 - DNA, 22 bp, synthetic construct
  misc_feature 1..22: note = chemically synthesized
  source 1..22: mol_type = other DNA
aaagacagagaggatggggtgc

SEQ ID NO: 137457 - DNA, 22 bp, synthetic construct
  misc_feature 1..22: note = chemically synthesized
  source 1..22: mol_type = other DNA
tgccccaaatcagcctcacaat

SEQ ID NO: 137458 - DNA, 22 bp, synthetic construct
  misc_feature 1..22: note = chemically synthesized
  source 1..22: mol_type = other DNA
acaattaagctaagcagctaag

SEQ ID NO: 137459 - DNA, 22 bp, synthetic construct
  misc_feature 1..22: note = chemically synthesized
  source 1..22: mol_type = other DNA
agctaagcagctaagagtcttg

SEQ ID NO: 137460 - DNA, 22 bp, synthetic construct
  misc_feature 1..22: note = chemically synthesized
  source 1..22: mol_type = other DNA
agcagctaagagtcttgcaggg

SEQ ID NO: 137461 - DNA, 22 bp, synthetic construct
  misc_feature 1..22: note = chemically synthesized
  source 1..22: mol_type = other DNA
agagtcttgcagggtagtgtag

SEQ ID NO: 137462 - DNA, 22 bp, synthetic construct
  misc_feature 1..22: note = chemically synthesized
  source 1..22: mol_type = other DNA
gcagggtagtgtagggaccaca

SEQ ID NO: 137463 - DNA, 22 bp, synthetic construct
  misc_feature 1..22: note = chemically synthesized
  source 1..22: mol_type = other DNA
cagggtagtgtagggaccacag

SEQ ID NO: 137464 - DNA, 22 bp, synthetic construct
  misc_feature 1..22: note = chemically synthesized
  source 1..22: mol_type = other DNA
agggggcagtagaattatactc

SEQ ID NO: 137465 - DNA, 22 bp, synthetic construct
  misc_feature 1..22: note = chemically synthesized
  source 1..22: mol_type = other DNA
tactcccactttagtttcattt

SEQ ID NO: 137466 - DNA, 22 bp, synthetic construct
  misc_feature 1..22: note = chemically synthesized
  source 1..22: mol_type = other DNA
ccactttagtttcatttcaaac

SEQ ID NO: 137467 - DNA, 22 bp, synthetic construct
  misc_feature 1..22: note = chemically synthesized
  source 1..22: mol_type = other DNA
tagtttcatttcaaacaatcca

SEQ ID NO: 137468 - DNA, 22 bp, synthetic construct
  misc_feature 1..22: note = chemically synthesized
  source 1..22: mol_type = other DNA
agtttcatttcaaacaatccat

SEQ ID NO: 137469 - DNA, 22 bp, synthetic construct
  misc_feature 1..22: note = chemically synthesized
  source 1..22: mol_type = other DNA
gtttcatttcaaacaatccata

SEQ ID NO: 137470 - DNA, 22 bp, synthetic construct
  misc_feature 1..22: note = chemically synthesized
  source 1..22: mol_type = other DNA
catttcaaacaatccatacaca

SEQ ID NO: 137471 - DNA, 22 bp, synthetic construct
  misc_feature 1..22: note = chemically synthesized
  source 1..22: mol_type = other DNA
atttcaaacaatccatacacac

SEQ ID NO: 137472 - DNA, 22 bp, synthetic construct
  misc_feature 1..22: note = chemically synthesized
  source 1..22: mol_type = other DNA
caaacaatccatacacacacag

SEQ ID NO: 137473 - DNA, 22 bp, synthetic construct
  misc_feature 1..22: note = chemically synthesized
  source 1..22: mol_type = other DNA
aaacaatccatacacacacagc

SEQ ID NO: 137474 - DNA, 22 bp, synthetic construct
  misc_feature 1..22: note = chemically synthesized
  source 1..22: mol_type = other DNA
agcacttacaaattatactacg

SEQ ID NO: 137475 - DNA, 22 bp, synthetic construct
  misc_feature 1..22: note = chemically synthesized
  source 1..22: mol_type = other DNA
acaaattatactacgctctata

SEQ ID NO: 137476 - DNA, 22 bp, synthetic construct
  misc_feature 1..22: note = chemically synthesized
  source 1..22: mol_type = other DNA
caaattatactacgctctatac

SEQ ID NO: 137477 - DNA, 22 bp, synthetic construct
  misc_feature 1..22: note = chemically synthesized
  source 1..22: mol_type = other DNA
tactacgctctatactttttgt

SEQ ID NO: 137478 - DNA, 22 bp, synthetic construct
  misc_feature 1..22: note = chemically synthesized
  source 1..22: mol_type = other DNA
cgctctatactttttgtttaaa

SEQ ID NO: 137479 - DNA, 22 bp, synthetic construct
  misc_feature 1..22: note = chemically synthesized
  source 1..22: mol_type = other DNA
tatactttttgtttaaatgtat

SEQ ID NO: 137480 - DNA, 22 bp, synthetic construct
  misc_feature 1..22: note = chemically synthesized
  source 1..22: mol_type = other DNA
tactttttgtttaaatgtataa

SEQ ID NO: 137481 - DNA, 22 bp, synthetic construct
  misc_feature 1..22: note = chemically synthesized
  source 1..22: mol_type = other DNA
tttgtttaaatgtataaataag

SEQ ID NO: 137482 - DNA, 22 bp, synthetic construct
  misc_feature 1..22: note = chemically synthesized
  source 1..22: mol_type = other DNA
ttgtttaaatgtataaataagt

SEQ ID NO: 137483 - DNA, 22 bp, synthetic construct
  misc_feature 1..22: note = chemically synthesized
  source 1..22: mol_type = other DNA
tgtttaaatgtataaataagtg

SEQ ID NO: 137484 - DNA, 22 bp, synthetic construct
  misc_feature 1..22: note = chemically synthesized
  source 1..22: mol_type = other DNA
gtttaaatgtataaataagtgg

SEQ ID NO: 137485 - DNA, 22 bp, synthetic construct
  misc_feature 1..22: note = chemically synthesized
  source 1..22: mol_type = other DNA
tttaaatgtataaataagtgga

SEQ ID NO: 137486 - DNA, 22 bp, synthetic construct
  misc_feature 1..22: note = chemically synthesized
  source 1..22: mol_type = other DNA
aaatgtataaataagtggatga

SEQ ID NO: 137487 - DNA, 22 bp, synthetic construct
  misc_feature 1..22: note = chemically synthesized
  source 1..22: mol_type = other DNA
aatgtataaataagtggatgaa

SEQ ID NO: 137488 - DNA, 22 bp, synthetic construct
  misc_feature 1..22: note = chemically synthesized
  source 1..22: mol_type = other DNA
gccttcatagctgtctccctac

SEQ ID NO: 137489 - DNA, 22 bp, synthetic construct
  misc_feature 1..22: note = chemically synthesized
  source 1..22: mol_type = other DNA
ccttcatagctgtctccctacc

SEQ ID NO: 137490 - DNA, 22 bp, synthetic construct
  misc_feature 1..22: note = chemically synthesized
  source 1..22: mol_type = other DNA
catagctgtctccctaccttgt

SEQ ID NO: 137491 - DNA, 22 bp, synthetic construct
  misc_feature 1..22: note = chemically synthesized
  source 1..22: mol_type = other DNA
atagctgtctccctaccttgtt

SEQ ID NO: 137492 - DNA, 22 bp, synthetic construct
  misc_feature 1..22: note = chemically synthesized
  source 1..22: mol_type = other DNA
tctccctaccttgttcaaaatg

SEQ ID NO: 137493 - DNA, 22 bp, synthetic construct
  misc_feature 1..22: note = chemically synthesized
  source 1..22: mol_type = other DNA
cctaccttgttcaaaatgttcc

SEQ ID NO: 137494 - DNA, 22 bp, synthetic construct
  misc_feature 1..22: note = chemically synthesized
  source 1..22: mol_type = other DNA
ccttgttcaaaatgttcctgtc

SEQ ID NO: 137495 - DNA, 22 bp, synthetic construct
  misc_feature 1..22: note = chemically synthesized
  source 1..22: mol_type = other DNA
gttcaaaatgttcctgtccaga

SEQ ID NO: 137496 - DNA, 22 bp, synthetic construct
  misc_feature 1..22: note = chemically synthesized
  source 1..22: mol_type = other DNA
ttcaaaatgttcctgtccagac

SEQ ID NO: 137497 - DNA, 22 bp, synthetic construct
  misc_feature 1..22: note = chemically synthesized
  source 1..22: mol_type = other DNA
aaaatgttcctgtccagaccaa

SEQ ID NO: 137498 - DNA, 22 bp, synthetic construct
  misc_feature 1..22: note = chemically synthesized
  source 1..22: mol_type = other DNA
ctgtccagaccaaagtaccttg

SEQ ID NO: 137499 - DNA, 22 bp, synthetic construct
  misc_feature 1..22: note = chemically synthesized
  source 1..22: mol_type = other DNA
tccagaccaaagtaccttgcct

SEQ ID NO: 137500 - DNA, 22 bp, synthetic construct
  misc_feature 1..22: note = chemically synthesized
  source 1..22: mol_type = other DNA
gccttcacttaagtaatcaatt

SEQ ID NO: 137501 - DNA, 22 bp, synthetic construct
  misc_feature 1..22: note = chemically synthesized
  source 1..22: mol_type = other DNA
ccttcacttaagtaatcaattc

SEQ ID NO: 137502 - DNA, 22 bp, synthetic construct
  misc_feature 1..22: note = chemically synthesized
  source 1..22: mol_type = other DNA
cacttaagtaatcaattcctag

SEQ ID NO: 137503 - DNA, 22 bp, synthetic construct
  misc_feature 1..22: note = chemically synthesized
  source 1..22: mol_type = other DNA
acttaagtaatcaattcctagg

SEQ ID NO: 137504 - DNA, 22 bp, synthetic construct
  misc_feature 1..22: note = chemically synthesized
  source 1..22: mol_type = other DNA
aagtaatcaattcctaggttat

SEQ ID NO: 137505 - DNA, 22 bp, synthetic construct
  misc_feature 1..22: note = chemically synthesized
  source 1..22: mol_type = other DNA
agtaatcaattcctaggttata

SEQ ID NO: 137506 - DNA, 22 bp, synthetic construct
  misc_feature 1..22: note = chemically synthesized
  source 1..22: mol_type = other DNA
ctaggttatattctgatgtcaa

SEQ ID NO: 137507 - DNA, 22 bp, synthetic construct
  misc_feature 1..22: note = chemically synthesized
  source 1..22: mol_type = other DNA
ggttatattctgatgtcaaagg

SEQ ID NO: 137508 - DNA, 22 bp, synthetic construct
  misc_feature 1..22: note = chemically synthesized
  source 1..22: mol_type = other DNA
tattctgatgtcaaaggaagtc

SEQ ID NO: 137509 - DNA, 22 bp, synthetic construct
  misc_feature 1..22: note = chemically synthesized
  source 1..22: mol_type = other DNA
tgatgtcaaaggaagtcaaaag

SEQ ID NO: 137510 - DNA, 22 bp, synthetic construct
  misc_feature 1..22: note = chemically synthesized
  source 1..22: mol_type = other DNA
atgtcaaaggaagtcaaaagat

SEQ ID NO: 137511 - DNA, 22 bp, synthetic construct
  misc_feature 1..22: note = chemically synthesized
  source 1..22: mol_type = other DNA
ctgacccacaactcatgctttg

SEQ ID NO: 137512 - DNA, 22 bp, synthetic construct
  misc_feature 1..22: note = chemically synthesized
  source 1..22: mol_type = other DNA
tgacccacaactcatgctttgt

SEQ ID NO: 137513 - DNA, 22 bp, synthetic construct
  misc_feature 1..22: note = chemically synthesized
  source 1..22: mol_type = other DNA
acccacaactcatgctttgtag

SEQ ID NO: 137514 - DNA, 22 bp, synthetic construct
  misc_feature 1..22: note = chemically synthesized
  source 1..22: mol_type = other DNA
atgctttgtagatgactagatc

SEQ ID NO: 137515 - DNA, 22 bp, synthetic construct
  misc_feature 1..22: note = chemically synthesized
  source 1..22: mol_type = other DNA
tgtagatgactagatcaaaaaa

SEQ ID NO: 137516 - DNA, 22 bp, synthetic construct
  misc_feature 1..22: note = chemically synthesized
  source 1..22: mol_type = other DNA
gtagatgactagatcaaaaaat

SEQ ID NO: 137517 - DNA, 22 bp, synthetic construct
  misc_feature 1..22: note = chemically synthesized
  source 1..22: mol_type = other DNA
tagatgactagatcaaaaaatt

SEQ ID NO: 137518 - DNA, 22 bp, synthetic construct
  misc_feature 1..22: note = chemically synthesized
  source 1..22: mol_type = other DNA
gatcaaaaaatttcagccatat

SEQ ID NO: 137519 - DNA, 22 bp, synthetic construct
  misc_feature 1..22: note = chemically synthesized
  source 1..22: mol_type = other DNA
cagccatatcttaacagtgagt

SEQ ID NO: 137520 - DNA, 22 bp, synthetic construct
  misc_feature 1..22: note = chemically synthesized
  source 1..22: mol_type = other DNA
agccatatcttaacagtgagtg

SEQ ID NO: 137521 - DNA, 22 bp, synthetic construct
  misc_feature 1..22: note = chemically synthesized
  source 1..22: mol_type = other DNA
aacagtgagtgaacaggaaatc

SEQ ID NO: 137522 - DNA, 22 bp, synthetic construct
  misc_feature 1..22: note = chemically synthesized
  source 1..22: mol_type = other DNA
acagtgagtgaacaggaaatct

SEQ ID NO: 137523 - DNA, 22 bp, synthetic construct
  misc_feature 1..22: note = chemically synthesized
  source 1..22: mol_type = other DNA
ctcttttccctacatctgagat

SEQ ID NO: 137524 - DNA, 22 bp, synthetic construct
  misc_feature 1..22: note = chemically synthesized
  source 1..22: mol_type = other DNA
ttttccctacatctgagatccc

SEQ ID NO: 137525 - DNA, 22 bp, synthetic construct
  misc_feature 1..22: note = chemically synthesized
  source 1..22: mol_type = other DNA
ttccctacatctgagatcccag

SEQ ID NO: 137526 - DNA, 22 bp, synthetic construct
  misc_feature 1..22: note = chemically synthesized
  source 1..22: mol_type = other DNA
tccctacatctgagatcccagc

SEQ ID NO: 137527 - DNA, 22 bp, synthetic construct
  misc_feature 1..22: note = chemically synthesized
  source 1..22: mol_type = other DNA
ccctacatctgagatcccagct

SEQ ID NO: 137528 - DNA, 22 bp, synthetic construct
  misc_feature 1..22: note = chemically synthesized
  source 1..22: mol_type = other DNA
cctacatctgagatcccagctt

SEQ ID NO: 137529 - DNA, 22 bp, synthetic construct
  misc_feature 1..22: note = chemically synthesized
  source 1..22: mol_type = other DNA
catctgagatcccagcttctaa

SEQ ID NO: 137530 - DNA, 22 bp, synthetic construct
  misc_feature 1..22: note = chemically synthesized
  source 1..22: mol_type = other DNA
agatcccagcttctaagacctt

SEQ ID NO: 137531 - DNA, 22 bp, synthetic construct
  misc_feature 1..22: note = chemically synthesized
  source 1..22: mol_type = other DNA
ctaagaccttcaattctcactc

SEQ ID NO: 137532 - DNA, 22 bp, synthetic construct
  misc_feature 1..22: note = chemically synthesized
  source 1..22: mol_type = other DNA
taagaccttcaattctcactct

SEQ ID NO: 137533 - DNA, 22 bp, synthetic construct
  misc_feature 1..22: note = chemically synthesized
  source 1..22: mol_type = other DNA
agaccttcaattctcactcttg

SEQ ID NO: 137534 - DNA, 22 bp, synthetic construct
  misc_feature 1..22: note = chemically synthesized
  source 1..22: mol_type = other DNA
caattctcactcttgatgcaac

SEQ ID NO: 137535 - DNA, 22 bp, synthetic construct
  misc_feature 1..22: note = chemically synthesized
  source 1..22: mol_type = other DNA
aattctcactcttgatgcaaca

SEQ ID NO: 137536 - DNA, 22 bp, synthetic construct
  misc_feature 1..22: note = chemically synthesized
  source 1..22: mol_type = other DNA
tcactcttgatgcaacagacct

SEQ ID NO: 137537 - DNA, 22 bp, synthetic construct
  misc_feature 1..22: note = chemically synthesized
  source 1..22: mol_type = other DNA
actcttgatgcaacagaccttg

SEQ ID NO: 137538 - DNA, 22 bp, synthetic construct
  misc_feature 1..22: note = chemically synthesized
  source 1..22: mol_type = other DNA
ttgatgcaacagaccttggaag

SEQ ID NO: 137539 - DNA, 22 bp, synthetic construct
  misc_feature 1..22: note = chemically synthesized
  source 1..22: mol_type = other DNA
gatgcaacagaccttggaagca

SEQ ID NO: 137540 - DNA, 22 bp, synthetic construct
  misc_feature 1..22: note = chemically synthesized
  source 1..22: mol_type = other DNA
atgcaacagaccttggaagcat

SEQ ID NO: 137541 - DNA, 22 bp, synthetic construct
  misc_feature 1..22: note = chemically synthesized
  source 1..22: mol_type = other DNA
ggaagcatacaggagagctgaa

SEQ ID NO: 137542 - DNA, 22 bp, synthetic construct
  misc_feature 1..22: note = chemically synthesized
  source 1..22: mol_type = other DNA
gaagcatacaggagagctgaac

SEQ ID NO: 137543 - DNA, 22 bp, synthetic construct
  misc_feature 1..22: note = chemically synthesized
  source 1..22: mol_type = other DNA
aacttggtcaacaaaggagaaa

SEQ ID NO: 137544 - DNA, 22 bp, synthetic construct
  misc_feature 1..22: note = chemically synthesized
  source 1..22: mol_type = other DNA
ggtcaacaaaggagaaaagttt

SEQ ID NO: 137545 - DNA, 22 bp, synthetic construct
  misc_feature 1..22: note = chemically synthesized
  source 1..22: mol_type = other DNA
gtcaacaaaggagaaaagtttg

SEQ ID NO: 137546 - DNA, 22 bp, synthetic construct
  misc_feature 1..22: note = chemically synthesized
  source 1..22: mol_type = other DNA
gttggcctccaaaggcacagct

SEQ ID NO: 137547 - DNA, 22 bp, synthetic construct
  misc_feature 1..22: note = chemically synthesized
  source 1..22: mol_type = other DNA
ttggcctccaaaggcacagctc

SEQ ID NO: 137548 - DNA, 22 bp, synthetic construct
  misc_feature 1..22: note = chemically synthesized
  source 1..22: mol_type = other DNA
gcctccaaaggcacagctcaaa

SEQ ID NO: 137549 - DNA, 22 bp, synthetic construct
  misc_feature 1..22: note = chemically synthesized
  source 1..22: mol_type = other DNA
caaaggcacagctcaaactttt

SEQ ID NO: 137550 - DNA, 22 bp, synthetic construct
  misc_feature 1..22: note = chemically synthesized
  source 1..22: mol_type = other DNA
aaacttttcaagccttctctaa

SEQ ID NO: 137551 - DNA, 22 bp, synthetic construct
  misc_feature 1..22: note = chemically synthesized
  source 1..22: mol_type = other DNA
ttcaagccttctctaatcttaa

SEQ ID NO: 137552 - DNA, 22 bp, synthetic construct
  misc_feature 1..22: note = chemically synthesized
  source 1..22: mol_type = other DNA
tcaagccttctctaatcttaaa

SEQ ID NO: 137553 - DNA, 22 bp, synthetic construct
  misc_feature 1..22: note = chemically synthesized
  source 1..22: mol_type = other DNA
caagccttctctaatcttaaag

SEQ ID NO: 137554 - DNA, 22 bp, synthetic construct
  misc_feature 1..22: note = chemically synthesized
  source 1..22: mol_type = other DNA
aagccttctctaatcttaaagg

SEQ ID NO: 137555 - DNA, 22 bp, synthetic construct
  misc_feature 1..22: note = chemically synthesized
  source 1..22: mol_type = other DNA
ctctaatcttaaaggtaaacaa

SEQ ID NO: 137556 - DNA, 22 bp, synthetic construct
  misc_feature 1..22: note = chemically synthesized
  source 1..22: mol_type = other DNA
tctaatcttaaaggtaaacaag

SEQ ID NO: 137557 - DNA, 22 bp, synthetic construct
  misc_feature 1..22: note = chemically synthesized
  source 1..22: mol_type = other DNA
taatcttaaaggtaaacaaggg

SEQ ID NO: 137558 - DNA, 22 bp, synthetic construct
  misc_feature 1..22: note = chemically synthesized
  source 1..22: mol_type = other DNA
atcttaaaggtaaacaagggtc

SEQ ID NO: 137559 - DNA, 22 bp, synthetic construct
  misc_feature 1..22: note = chemically synthesized
  source 1..22: mol_type = other DNA
aaaggtaaacaagggtctcatt

SEQ ID NO: 137560 - DNA, 22 bp, synthetic construct
  misc_feature 1..22: note = chemically synthesized
  source 1..22: mol_type = other DNA
aaggtaaacaagggtctcattt

SEQ ID NO: 137561 - DNA, 22 bp, synthetic construct
  misc_feature 1..22: note = chemically synthesized
  source 1..22: mol_type = other DNA
atttctttgagaacttcaggga

SEQ ID NO: 137562 - DNA, 22 bp, synthetic construct
  misc_feature 1..22: note = chemically synthesized
  source 1..22: mol_type = other DNA
ctttgagaacttcagggaaaat

SEQ ID NO: 137563 - DNA, 22 bp, synthetic construct
  misc_feature 1..22: note = chemically synthesized
  source 1..22: mol_type = other DNA
tttgagaacttcagggaaaata

SEQ ID NO: 137564 - DNA, 22 bp, synthetic construct
  misc_feature 1..22: note = chemically synthesized
  source 1..22: mol_type = other DNA
tgagaacttcagggaaaataga

SEQ ID NO: 137565 - DNA, 22 bp, synthetic construct
  misc_feature 1..22: note = chemically synthesized
  source 1..22: mol_type = other DNA
gagaacttcagggaaaatagac

SEQ ID NO: 137566 - DNA, 22 bp, synthetic construct
  misc_feature 1..22: note = chemically synthesized
  source 1..22: mol_type = other DNA
agaacttcagggaaaatagaca

SEQ ID NO: 137567 - DNA, 22 bp, synthetic construct
  misc_feature 1..22: note = chemically synthesized
  source 1..22: mol_type = other DNA
cagggaaaatagacaaggactt

SEQ ID NO: 137568 - DNA, 22 bp, synthetic construct
  misc_feature 1..22: note = chemically synthesized
  source 1..22: mol_type = other DNA
agggaaaatagacaaggacttg

SEQ ID NO: 137569 - DNA, 22 bp, synthetic construct
  misc_feature 1..22: note = chemically synthesized
  source 1..22: mol_type = other DNA
gcctggtgcttttggtagggga

SEQ ID NO: 137570 - DNA, 22 bp, synthetic construct
  misc_feature 1..22: note = chemically synthesized
  source 1..22: mol_type = other DNA
cctggtgcttttggtaggggag

SEQ ID NO: 137571 - DNA, 22 bp, synthetic construct
  misc_feature 1..22: note = chemically synthesized
  source 1..22: mol_type = other DNA
gtgcttttggtaggggagcttg

SEQ ID NO: 137572 - DNA, 22 bp, synthetic construct
  misc_feature 1..22: note = chemically synthesized
  source 1..22: mol_type = other DNA
ttggtaggggagcttgcacttt

SEQ ID NO: 137573 - DNA, 22 bp, synthetic construct
  misc_feature 1..22: note = chemically synthesized
  source 1..22: mol_type = other DNA
tggtaggggagcttgcactttc

SEQ ID NO: 137574 - DNA, 22 bp, synthetic construct
  misc_feature 1..22: note = chemically synthesized
  source 1..22: mol_type = other DNA
ggtaggggagcttgcactttcc

SEQ ID NO: 137575 - DNA, 22 bp, synthetic construct
  misc_feature 1..22: note = chemically synthesized
  source 1..22: mol_type = other DNA
gtaggggagcttgcactttccc

SEQ ID NO: 137576 - DNA, 22 bp, synthetic construct
  misc_feature 1..22: note = chemically synthesized
  source 1..22: mol_type = other DNA
gcactttccccctttctggagg

SEQ ID NO: 137577 - DNA, 22 bp, synthetic construct
  misc_feature 1..22: note = chemically synthesized
  source 1..22: mol_type = other DNA
cactttccccctttctggagga

SEQ ID NO: 137578 - DNA, 22 bp, synthetic construct
  misc_feature 1..22: note = chemically synthesized
  source 1..22: mol_type = other DNA
tccccctttctggaggaaatat

SEQ ID NO: 137579 - DNA, 22 bp, synthetic construct
  misc_feature 1..22: note = chemically synthesized
  source 1..22: mol_type = other DNA
ccccctttctggaggaaatatt

SEQ ID NO: 137580 - DNA, 22 bp, synthetic construct
  misc_feature 1..22: note = chemically synthesized
  source 1..22: mol_type = other DNA
cccctttctggaggaaatattt

SEQ ID NO: 137581 - DNA, 22 bp, synthetic construct
  misc_feature 1..22: note = chemically synthesized
  source 1..22: mol_type = other DNA
tctggaggaaatatttatcccc

SEQ ID NO: 137582 - DNA, 22 bp, synthetic construct
  misc_feature 1..22: note = chemically synthesized
  source 1..22: mol_type = other DNA
ctggaggaaatatttatcccca

SEQ ID NO: 137583 - DNA, 22 bp, synthetic construct
  misc_feature 1..22: note = chemically synthesized
  source 1..22: mol_type = other DNA
tggaggaaatatttatccccag

SEQ ID NO: 137584 - DNA, 22 bp, synthetic construct
  misc_feature 1..22: note = chemically synthesized
  source 1..22: mol_type = other DNA
gaggaaatatttatccccaggt

SEQ ID NO: 137585 - DNA, 22 bp, synthetic construct
  misc_feature 1..22: note = chemically synthesized
  source 1..22: mol_type = other DNA
atccccaggtagttcccttttt

SEQ ID NO: 137586 - DNA, 22 bp, synthetic construct
  misc_feature 1..22: note = chemically synthesized
  source 1..22: mol_type = other DNA
tccccaggtagttccctttttg

SEQ ID NO: 137587 - DNA, 22 bp, synthetic construct
  misc_feature 1..22: note = chemically synthesized
  source 1..22: mol_type = other DNA
cctttttgcaccagtggttctt

SEQ ID NO: 137588 - DNA, 22 bp, synthetic construct
  misc_feature 1..22: note = chemically synthesized
  source 1..22: mol_type = other DNA
tttgcaccagtggttctttgaa

SEQ ID NO: 137589 - DNA, 22 bp, synthetic construct
  misc_feature 1..22: note = chemically synthesized
  source 1..22: mol_type = other DNA
ttgcaccagtggttctttgaag

SEQ ID NO: 137590 - DNA, 22 bp, synthetic construct
  misc_feature 1..22: note = chemically synthesized
  source 1..22: mol_type = other DNA
tgcaccagtggttctttgaaga

SEQ ID NO: 137591 - DNA, 22 bp, synthetic construct
  misc_feature 1..22: note = chemically synthesized
  source 1..22: mol_type = other DNA
gcaccagtggttctttgaagag

SEQ ID NO: 137592 - DNA, 22 bp, synthetic construct
  misc_feature 1..22: note = chemically synthesized
  source 1..22: mol_type = other DNA
caccagtggttctttgaagaga

SEQ ID NO: 137593 - DNA, 22 bp, synthetic construct
  misc_feature 1..22: note = chemically synthesized
  source 1..22: mol_type = other DNA
tttgaagagacttccacctggg

SEQ ID NO: 137594 - DNA, 22 bp, synthetic construct
  misc_feature 1..22: note = chemically synthesized
  source 1..22: mol_type = other DNA
tgaagagacttccacctgggaa

SEQ ID NO: 137595 - DNA, 22 bp, synthetic construct
  misc_feature 1..22: note = chemically synthesized
  source 1..22: mol_type = other DNA
gaagagacttccacctgggaac

SEQ ID NO: 137596 - DNA, 22 bp, synthetic construct
  misc_feature 1..22: note = chemically synthesized
  source 1..22: mol_type = other DNA
aagagacttccacctgggaaca

SEQ ID NO: 137597 - DNA, 22 bp, synthetic construct
  misc_feature 1..22: note = chemically synthesized
  source 1..22: mol_type = other DNA
ccacctgggaacagttaaacag

SEQ ID NO: 137598 - DNA, 22 bp, synthetic construct
  misc_feature 1..22: note = chemically synthesized
  source 1..22: mol_type = other DNA
cacctgggaacagttaaacagc

SEQ ID NO: 137599 - DNA, 22 bp, synthetic construct
  misc_feature 1..22: note = chemically synthesized
  source 1..22: mol_type = other DNA
ggaacagttaaacagcaactac

SEQ ID NO: 137600 - DNA, 22 bp, synthetic construct
  misc_feature 1..22: note = chemically synthesized
  source 1..22: mol_type = other DNA
aacagcaactacagggccttga

SEQ ID NO: 137601 - DNA, 22 bp, synthetic construct
  misc_feature 1..22: note = chemically synthesized
  source 1..22: mol_type = other DNA
cagggccttgaactgcacactt

SEQ ID NO: 137602 - DNA, 22 bp, synthetic construct
  misc_feature 1..22: note = chemically synthesized
  source 1..22: mol_type = other DNA
gaactgcacactttcagtccgg

SEQ ID NO: 137603 - DNA, 22 bp, synthetic construct
  misc_feature 1..22: note = chemically synthesized
  source 1..22: mol_type = other DNA
aactgcacactttcagtccggt

SEQ ID NO: 137604 - DNA, 22 bp, synthetic construct
  misc_feature 1..22: note = chemically synthesized
  source 1..22: mol_type = other DNA
cacactttcagtccggtcctca

SEQ ID NO: 137605 - DNA, 22 bp, synthetic construct
  misc_feature 1..22: note = chemically synthesized
  source 1..22: mol_type = other DNA
tcagtccggtcctcacagttga

SEQ ID NO: 137606 - DNA, 22 bp, synthetic construct
  misc_feature 1..22: note = chemically synthesized
  source 1..22: mol_type = other DNA
cagtccggtcctcacagttgaa

SEQ ID NO: 137607 - DNA, 22 bp, synthetic construct
  misc_feature 1..22: note = chemically synthesized
  source 1..22: mol_type = other DNA
agtccggtcctcacagttgaaa

SEQ ID NO: 137608 - DNA, 22 bp, synthetic construct
  misc_feature 1..22: note = chemically synthesized
  source 1..22: mol_type = other DNA
acagttgaaaagacctaagctt

SEQ ID NO: 137609 - DNA, 22 bp, synthetic construct
  misc_feature 1..22: note = chemically synthesized
  source 1..22: mol_type = other DNA
aaaagacctaagcttgtgcctg

SEQ ID NO: 137610 - DNA, 22 bp, synthetic construct
  misc_feature 1..22: note = chemically synthesized
  source 1..22: mol_type = other DNA
agcttgtgcctgatttaagcct

SEQ ID NO: 137611 - DNA, 22 bp, synthetic construct
  misc_feature 1..22: note = chemically synthesized
  source 1..22: mol_type = other DNA
gtgcctgatttaagcctttttg

SEQ ID NO: 137612 - DNA, 22 bp, synthetic construct
  misc_feature 1..22: note = chemically synthesized
  source 1..22: mol_type = other DNA
tgcctgatttaagcctttttgg

SEQ ID NO: 137613 - DNA, 22 bp, synthetic construct
  misc_feature 1..22: note = chemically synthesized
  source 1..22: mol_type = other DNA
atttaagcctttttggtcataa

SEQ ID NO: 137614 - DNA, 22 bp, synthetic construct
  misc_feature 1..22: note = chemically synthesized
  source 1..22: mol_type = other DNA
aagcctttttggtcataaaaca

SEQ ID NO: 137615 - DNA, 22 bp, synthetic construct
  misc_feature 1..22: note = chemically synthesized
  source 1..22: mol_type = other DNA
agcctttttggtcataaaacat

SEQ ID NO: 137616 - DNA, 22 bp, synthetic construct
  misc_feature 1..22: note = chemically synthesized
  source 1..22: mol_type = other DNA
tttggtcataaaacattgaatt

SEQ ID NO: 137617 - DNA, 22 bp, synthetic construct
  misc_feature 1..22: note = chemically synthesized
  source 1..22: mol_type = other DNA
ttggtcataaaacattgaattc

SEQ ID NO: 137618 - DNA, 22 bp, synthetic construct
  misc_feature 1..22: note = chemically synthesized
  source 1..22: mol_type = other DNA
tggtcataaaacattgaattct

SEQ ID NO: 137619 - DNA, 22 bp, synthetic construct
  misc_feature 1..22: note = chemically synthesized
  source 1..22: mol_type = other DNA
ggtcataaaacattgaattcta

SEQ ID NO: 137620 - DNA, 22 bp, synthetic construct
  misc_feature 1..22: note = chemically synthesized
  source 1..22: mol_type = other DNA
gtcataaaacattgaattctaa

SEQ ID NO: 137621 - DNA, 22 bp, synthetic construct
  misc_feature 1..22: note = chemically synthesized
  source 1..22: mol_type = other DNA
aattctaatctccctctcaacc

SEQ ID NO: 137622 - DNA, 22 bp, synthetic construct
  misc_feature 1..22: note = chemically synthesized
  source 1..22: mol_type = other DNA
taatctccctctcaaccctaca

SEQ ID NO: 137623 - DNA, 22 bp, synthetic construct
  misc_feature 1..22: note = chemically synthesized
  source 1..22: mol_type = other DNA
atctccctctcaaccctacagt

SEQ ID NO: 137624 - DNA, 22 bp, synthetic construct
  misc_feature 1..22: note = chemically synthesized
  source 1..22: mol_type = other DNA
cctctcaaccctacagtcaccc

SEQ ID NO: 137625 - DNA, 22 bp, synthetic construct
  misc_feature 1..22: note = chemically synthesized
  source 1..22: mol_type = other DNA
tcaaccctacagtcacccattt

SEQ ID NO: 137626 - DNA, 22 bp, synthetic construct
  misc_feature 1..22: note = chemically synthesized
  source 1..22: mol_type = other DNA
aaccctacagtcacccatttgg

SEQ ID NO: 137627 - DNA, 22 bp, synthetic construct
  misc_feature 1..22: note = chemically synthesized
  source 1..22: mol_type = other DNA
cagtcacccatttggtatatta

SEQ ID NO: 137628 - DNA, 22 bp, synthetic construct
  misc_feature 1..22: note = chemically synthesized
  source 1..22: mol_type = other DNA
ggtatattaaagatgtgttgtc

SEQ ID NO: 137629 - DNA, 22 bp, synthetic construct
  misc_feature 1..22: note = chemically synthesized
  source 1..22: mol_type = other DNA
gtatattaaagatgtgttgtct

SEQ ID NO: 137630 - DNA, 22 bp, synthetic construct
  misc_feature 1..22: note = chemically synthesized
  source 1..22: mol_type = other DNA
aagatgtgttgtctactgtcta

SEQ ID NO: 137631 - DNA, 22 bp, synthetic construct
  misc_feature 1..22: note = chemically synthesized
  source 1..22: mol_type = other DNA
tctactgtctagtatccctcaa

SEQ ID NO: 137632 - DNA, 22 bp, synthetic construct
  misc_feature 1..22: note = chemically synthesized
  source 1..22: mol_type = other DNA
ctgtctagtatccctcaagtag

SEQ ID NO: 137633 - DNA, 22 bp, synthetic construct
  misc_feature 1..22: note = chemically synthesized
  source 1..22: mol_type = other DNA
tctagtatccctcaagtagtgt

SEQ ID NO: 137634 - DNA, 22 bp, synthetic construct
  misc_feature 1..22: note = chemically synthesized
  source 1..22: mol_type = other DNA
gtatccctcaagtagtgtcagg

SEQ ID NO: 137635 - DNA, 22 bp, synthetic construct
  misc_feature 1..22: note = chemically synthesized
  source 1..22: mol_type = other DNA
aagtagtgtcaggaattagtca

SEQ ID NO: 137636 - DNA, 22 bp, synthetic construct
  misc_feature 1..22: note = chemically synthesized
  source 1..22: mol_type = other DNA
gtcatttaaatagtctgcaagc

SEQ ID NO: 137637 - DNA, 22 bp, synthetic construct
  misc_feature 1..22: note = chemically synthesized
  source 1..22: mol_type = other DNA
aaatagtctgcaagccaggagt

SEQ ID NO: 137638 - DNA, 22 bp, synthetic construct
  misc_feature 1..22: note = chemically synthesized
  source 1..22: mol_type = other DNA
aatagtctgcaagccaggagtg

SEQ ID NO: 137639 - DNA, 22 bp, synthetic construct
  misc_feature 1..22: note = chemically synthesized
  source 1..22: mol_type = other DNA
caagccaggagtggtggctcat

SEQ ID NO: 137640 - DNA, 22 bp, synthetic construct
  misc_feature 1..22: note = chemically synthesized
  source 1..22: mol_type = other DNA
atgtctgtaattccagcacttg

SEQ ID NO: 137641 - DNA, 22 bp, synthetic construct
  misc_feature 1..22: note = chemically synthesized
  source 1..22: mol_type = other DNA
taattccagcacttgagaggta

SEQ ID NO: 137642 - DNA, 22 bp, synthetic construct
  misc_feature 1..22: note = chemically synthesized
  source 1..22: mol_type = other DNA
cagcacttgagaggtagaagtg

SEQ ID NO: 137643 - DNA, 22 bp, synthetic construct
  misc_feature 1..22: note = chemically synthesized
  source 1..22: mol_type = other DNA
gagaggtagaagtgggaggact

SEQ ID NO: 137644 - DNA, 22 bp, synthetic construct
  misc_feature 1..22: note = chemically synthesized
  source 1..22: mol_type = other DNA
agaggtagaagtgggaggactg

SEQ ID NO: 137645 - DNA, 22 bp, synthetic construct
  misc_feature 1..22: note = chemically synthesized
  source 1..22: mol_type = other DNA
cttgagctcaagagtttgatat

SEQ ID NO: 137646 - DNA, 22 bp, synthetic construct
  misc_feature 1..22: note = chemically synthesized
  source 1..22: mol_type = other DNA
gagctcaagagtttgatattat

SEQ ID NO: 137647 - DNA, 22 bp, synthetic construct
  misc_feature 1..22: note = chemically synthesized
  source 1..22: mol_type = other DNA
agctcaagagtttgatattatc

SEQ ID NO: 137648 - DNA, 22 bp, synthetic construct
  misc_feature 1..22: note = chemically synthesized
  source 1..22: mol_type = other DNA
aagagtttgatattatcctgga

SEQ ID NO: 137649 - DNA, 22 bp, synthetic construct
  misc_feature 1..22: note = chemically synthesized
  source 1..22: mol_type = other DNA
gatattatcctggacaacatag

SEQ ID NO: 137650 - DNA, 22 bp, synthetic construct
  misc_feature 1..22: note = chemically synthesized
  source 1..22: mol_type = other DNA
atattatcctggacaacatagc

SEQ ID NO: 137651 - DNA, 22 bp, synthetic construct
  misc_feature 1..22: note = chemically synthesized
  source 1..22: mol_type = other DNA
tcctggacaacatagcaagacc

SEQ ID NO: 137652 - DNA, 22 bp, synthetic construct
  misc_feature 1..22: note = chemically synthesized
  source 1..22: mol_type = other DNA
gacaacatagcaagacctcgtc

SEQ ID NO: 137653 - DNA, 22 bp, synthetic construct
  misc_feature 1..22: note = chemically synthesized
  source 1..22: mol_type = other DNA
gtctctacttaaaaaaaaaaaa

SEQ ID NO: 137654 - DNA, 22 bp, synthetic construct
  misc_feature 1..22: note = chemically synthesized
  source 1..22: mol_type = other DNA
tacttaaaaaaaaaaaaaaaat

SEQ ID NO: 137655 - DNA, 22 bp, synthetic construct
  misc_feature 1..22: note = chemically synthesized
  source 1..22: mol_type = other DNA
cttaaaaaaaaaaaaaaaatta

SEQ ID NO: 137656 - DNA, 22 bp, synthetic construct
  misc_feature 1..22: note = chemically synthesized
  source 1..22: mol_type = other DNA
aaaaaaaaaaaaaaaattagcc

SEQ ID NO: 137657 - DNA, 22 bp, synthetic construct
  misc_feature 1..22: note = chemically synthesized
  source 1..22: mol_type = other DNA
aaaaaaaaaaaaaaattagcca

SEQ ID NO: 137658 - DNA, 22 bp, synthetic construct
  misc_feature 1..22: note = chemically synthesized
  source 1..22: mol_type = other DNA
gccaggcatgtgatgtacacct

SEQ ID NO: 137659 - DNA, 22 bp, synthetic construct
  misc_feature 1..22: note = chemically synthesized
  source 1..22: mol_type = other DNA
tagtcccagctactcaggaggc

SEQ ID NO: 137660 - DNA, 22 bp, synthetic construct
  misc_feature 1..22: note = chemically synthesized
  source 1..22: mol_type = other DNA
ctcaggaggccgaaatgggagg

SEQ ID NO: 137661 - DNA, 22 bp, synthetic construct
  misc_feature 1..22: note = chemically synthesized
  source 1..22: mol_type = other DNA
aggaggccgaaatgggaggatc

SEQ ID NO: 137662 - DNA, 22 bp, synthetic construct
  misc_feature 1..22: note = chemically synthesized
  source 1..22: mol_type = other DNA
gagctcaggaggtcaaggctgc

SEQ ID NO: 137663 - DNA, 22 bp, synthetic construct
  misc_feature 1..22: note = chemically synthesized
  source 1..22: mol_type = other DNA
agctcaggaggtcaaggctgca

SEQ ID NO: 137664 - DNA, 22 bp, synthetic construct
  misc_feature 1..22: note = chemically synthesized
  source 1..22: mol_type = other DNA
aggaggtcaaggctgcagtgag

SEQ ID NO: 137665 - DNA, 22 bp, synthetic construct
  misc_feature 1..22: note = chemically synthesized
  source 1..22: mol_type = other DNA
cagtgagacatgatcttgccac

SEQ ID NO: 137666 - DNA, 22 bp, synthetic construct
  misc_feature 1..22: note = chemically synthesized
  source 1..22: mol_type = other DNA
gccactgcactccagcctggac

SEQ ID NO: 137667 - DNA, 22 bp, synthetic construct
  misc_feature 1..22: note = chemically synthesized
  source 1..22: mol_type = other DNA
ccactgcactccagcctggaca

SEQ ID NO: 137668 - DNA, 22 bp, synthetic construct
  misc_feature 1..22: note = chemically synthesized
  source 1..22: mol_type = other DNA
cactccagcctggacagcagag

SEQ ID NO: 137669 - DNA, 22 bp, synthetic construct
  misc_feature 1..22: note = chemically synthesized
  source 1..22: mol_type = other DNA
cagcctggacagcagagtgaaa

SEQ ID NO: 137670 - DNA, 22 bp, synthetic construct
  misc_feature 1..22: note = chemically synthesized
  source 1..22: mol_type = other DNA
gacagcagagtgaaaccttgcc

SEQ ID NO: 137671 - DNA, 22 bp, synthetic construct
  misc_feature 1..22: note = chemically synthesized
  source 1..22: mol_type = other DNA
gcctcacgaaacagaatacaaa

SEQ ID NO: 137672 - DNA, 22 bp, synthetic construct
  misc_feature 1..22: note = chemically synthesized
  source 1..22: mol_type = other DNA
cctcacgaaacagaatacaaaa

SEQ ID NO: 137673 - DNA, 22 bp, synthetic construct
  misc_feature 1..22: note = chemically synthesized
  source 1..22: mol_type = other DNA
acgaaacagaatacaaaaacaa

SEQ ID NO: 137674 - DNA, 22 bp, synthetic construct
  misc_feature 1..22: note = chemically synthesized
  source 1..22: mol_type = other DNA
ctccgcaatgcgcttccttgat

SEQ ID NO: 137675 - DNA, 22 bp, synthetic construct
  misc_feature 1..22: note = chemically synthesized
  source 1..22: mol_type = other DNA
cgcaatgcgcttccttgatgct

SEQ ID NO: 137676 - DNA, 22 bp, synthetic construct
  misc_feature 1..22: note = chemically synthesized
  source 1..22: mol_type = other DNA
ccttgatgctctaccacatagg

SEQ ID NO: 137677 - DNA, 22 bp, synthetic construct
  misc_feature 1..22: note = chemically synthesized
  source 1..22: mol_type = other DNA
cttgatgctctaccacataggt

SEQ ID NO: 137678 - DNA, 22 bp, synthetic construct
  misc_feature 1..22: note = chemically synthesized
  source 1..22: mol_type = other DNA
gatgctctaccacataggtctg

SEQ ID NO: 137679 - DNA, 22 bp, synthetic construct
  misc_feature 1..22: note = chemically synthesized
  source 1..22: mol_type = other DNA
atgctctaccacataggtctgg

SEQ ID NO: 137680 - DNA, 22 bp, synthetic construct
  misc_feature 1..22: note = chemically synthesized
  source 1..22: mol_type = other DNA
taccacataggtctgggtactt

SEQ ID NO: 137681 - DNA, 22 bp, synthetic construct
  misc_feature 1..22: note = chemically synthesized
  source 1..22: mol_type = other DNA
ccacataggtctgggtactttg

SEQ ID NO: 137682 - DNA, 22 bp, synthetic construct
  misc_feature 1..22: note = chemically synthesized
  source 1..22: mol_type = other DNA
ggtactttgtacacattatctc

SEQ ID NO: 137683 - DNA, 22 bp, synthetic construct
  misc_feature 1..22: note = chemically synthesized
  source 1..22: mol_type = other DNA
tgtacacattatctcattgctg

SEQ ID NO: 137684 - DNA, 22 bp, synthetic construct
  misc_feature 1..22: note = chemically synthesized
  source 1..22: mol_type = other DNA
gtacacattatctcattgctgt

SEQ ID NO: 137685 - DNA, 22 bp, synthetic construct
  misc_feature 1..22: note = chemically synthesized
  source 1..22: mol_type = other DNA
tacacattatctcattgctgtt

SEQ ID NO: 137686 - DNA, 22 bp, synthetic construct
  misc_feature 1..22: note = chemically synthesized
  source 1..22: mol_type = other DNA
tctcattgctgttcataattgt

SEQ ID NO: 137687 - DNA, 22 bp, synthetic construct
  misc_feature 1..22: note = chemically synthesized
  source 1..22: mol_type = other DNA
attgctgttcataattgttaga

SEQ ID NO: 137688 - DNA, 22 bp, synthetic construct
  misc_feature 1..22: note = chemically synthesized
  source 1..22: mol_type = other DNA
ctgttcataattgttagattaa

SEQ ID NO: 137689 - DNA, 22 bp, synthetic construct
  misc_feature 1..22: note = chemically synthesized
  source 1..22: mol_type = other DNA
ttcataattgttagattaattt

SEQ ID NO: 137690 - DNA, 22 bp, synthetic construct
  misc_feature 1..22: note = chemically synthesized
  source 1..22: mol_type = other DNA
ataattgttagattaattttgt

SEQ ID NO: 137691 - DNA, 22 bp, synthetic construct
  misc_feature 1..22: note = chemically synthesized
  source 1..22: mol_type = other DNA
ttagattaattttgtaatattg

SEQ ID NO: 137692 - DNA, 22 bp, synthetic construct
  misc_feature 1..22: note = chemically synthesized
  source 1..22: mol_type = other DNA
gattaattttgtaatattgata

SEQ ID NO: 137693 - DNA, 22 bp, synthetic construct
  misc_feature 1..22: note = chemically synthesized
  source 1..22: mol_type = other DNA
attttgtaatattgatattatt

SEQ ID NO: 137694 - DNA, 22 bp, synthetic construct
  misc_feature 1..22: note = chemically synthesized
  source 1..22: mol_type = other DNA
tgtaatattgatattattccta

SEQ ID NO: 137695 - DNA, 22 bp, synthetic construct
  misc_feature 1..22: note = chemically synthesized
  source 1..22: mol_type = other DNA
gtaatattgatattattcctag

SEQ ID NO: 137696 - DNA, 22 bp, synthetic construct
  misc_feature 1..22: note = chemically synthesized
  source 1..22: mol_type = other DNA
taatattgatattattcctaga

SEQ ID NO: 137697 - DNA, 22 bp, synthetic construct
  misc_feature 1..22: note = chemically synthesized
  source 1..22: mol_type = other DNA
atattattcctagaaagctgag

SEQ ID NO: 137698 - DNA, 22 bp, synthetic construct
  misc_feature 1..22: note = chemically synthesized
  source 1..22: mol_type = other DNA
ttcctagaaagctgaggcctca

SEQ ID NO: 137699 - DNA, 22 bp, synthetic construct
  misc_feature 1..22: note = chemically synthesized
  source 1..22: mol_type = other DNA
ctagaaagctgaggcctcaaga

SEQ ID NO: 137700 - DNA, 22 bp, synthetic construct
  misc_feature 1..22: note = chemically synthesized
  source 1..22: mol_type = other DNA
gaaagctgaggcctcaagatga

SEQ ID NO: 137701 - DNA, 22 bp, synthetic construct
  misc_feature 1..22: note = chemically synthesized
  source 1..22: mol_type = other DNA
aggcctcaagatgataactttt

SEQ ID NO: 137702 - DNA, 22 bp, synthetic construct
  misc_feature 1..22: note = chemically synthesized
  source 1..22: mol_type = other DNA
aagatgataacttttattttct

SEQ ID NO: 137703 - DNA, 22 bp, synthetic construct
  misc_feature 1..22: note = chemically synthesized
  source 1..22: mol_type = other DNA
ttattttctggacttgtaatag

SEQ ID NO: 137704 - DNA, 22 bp, synthetic construct
  misc_feature 1..22: note = chemically synthesized
  source 1..22: mol_type = other DNA
tattttctggacttgtaatagc

SEQ ID NO: 137705 - DNA, 22 bp, synthetic construct
  misc_feature 1..22: note = chemically synthesized
  source 1..22: mol_type = other DNA
attttctggacttgtaatagct

SEQ ID NO: 137706 - DNA, 22 bp, synthetic construct
  misc_feature 1..22: note = chemically synthesized
  source 1..22: mol_type = other DNA
ttttctggacttgtaatagctt

SEQ ID NO: 137707 - DNA, 22 bp, synthetic construct
  misc_feature 1..22: note = chemically synthesized
  source 1..22: mol_type = other DNA
tctggacttgtaatagctttct

SEQ ID NO: 137708 - DNA, 22 bp, synthetic construct
  misc_feature 1..22: note = chemically synthesized
  source 1..22: mol_type = other DNA
ctggacttgtaatagctttctc

SEQ ID NO: 137709 - DNA, 22 bp, synthetic construct
  misc_feature 1..22: note = chemically synthesized
  source 1..22: mol_type = other DNA
tggacttgtaatagctttctct

SEQ ID NO: 137710 - DNA, 22 bp, synthetic construct
  misc_feature 1..22: note = chemically synthesized
  source 1..22: mol_type = other DNA
gacttgtaatagctttctcttg

SEQ ID NO: 137711 - DNA, 22 bp, synthetic construct
  misc_feature 1..22: note = chemically synthesized
  source 1..22: mol_type = other DNA
gtaatagctttctcttgtattc

SEQ ID NO: 137712 - DNA, 22 bp, synthetic construct
  misc_feature 1..22: note = chemically synthesized
  source 1..22: mol_type = other DNA
taatagctttctcttgtattca

SEQ ID NO: 137713 - DNA, 22 bp, synthetic construct
  misc_feature 1..22: note = chemically synthesized
  source 1..22: mol_type = other DNA
tctcttgtattcaccatgttgt

SEQ ID NO: 137714 - DNA, 22 bp, synthetic construct
  misc_feature 1..22: note = chemically synthesized
  source 1..22: mol_type = other DNA
ctcttgtattcaccatgttgta

SEQ ID NO: 137715 - DNA, 22 bp, synthetic construct
  misc_feature 1..22: note = chemically synthesized
  source 1..22: mol_type = other DNA
tcttgtattcaccatgttgtaa

SEQ ID NO: 137716 - DNA, 22 bp, synthetic construct
  misc_feature 1..22: note = chemically synthesized
  source 1..22: mol_type = other DNA
ttgtattcaccatgttgtaact

SEQ ID NO: 137717 - DNA, 22 bp, synthetic construct
  misc_feature 1..22: note = chemically synthesized
  source 1..22: mol_type = other DNA
gtattcaccatgttgtaacttt

SEQ ID NO: 137718 - DNA, 22 bp, synthetic construct
  misc_feature 1..22: note = chemically synthesized
  source 1..22: mol_type = other DNA
tattcaccatgttgtaactttc

SEQ ID NO: 137719 - DNA, 22 bp, synthetic construct
  misc_feature 1..22: note = chemically synthesized
  source 1..22: mol_type = other DNA
accatgttgtaactttcttaga

SEQ ID NO: 137720 - DNA, 22 bp, synthetic construct
  misc_feature 1..22: note = chemically synthesized
  source 1..22: mol_type = other DNA
taactttcttagagtagtaaca

SEQ ID NO: 137721 - DNA, 22 bp, synthetic construct
  misc_feature 1..22: note = chemically synthesized
  source 1..22: mol_type = other DNA
tcttagagtagtaacaatataa

SEQ ID NO: 137722 - DNA, 22 bp, synthetic construct
  misc_feature 1..22: note = chemically synthesized
  source 1..22: mol_type = other DNA
cttagagtagtaacaatataaa

SEQ ID NO: 137723 - DNA, 22 bp, synthetic construct
  misc_feature 1..22: note = chemically synthesized
  source 1..22: mol_type = other DNA
ttagagtagtaacaatataaag

SEQ ID NO: 137724 - DNA, 22 bp, synthetic construct
  misc_feature 1..22: note = chemically synthesized
  source 1..22: mol_type = other DNA
agagtagtaacaatataaagtt

SEQ ID NO: 137725 - DNA, 22 bp, synthetic construct
  misc_feature 1..22: note = chemically synthesized
  source 1..22: mol_type = other DNA
gagtagtaacaatataaagtta

SEQ ID NO: 137726 - DNA, 22 bp, synthetic construct
  misc_feature 1..22: note = chemically synthesized
  source 1..22: mol_type = other DNA
ttgtgagtttttgcaaacacag

SEQ ID NO: 137727 - DNA, 22 bp, synthetic construct
  misc_feature 1..22: note = chemically synthesized
  source 1..22: mol_type = other DNA
tgagtttttgcaaacacagcaa

SEQ ID NO: 137728 - DNA, 22 bp, synthetic construct
  misc_feature 1..22: note = chemically synthesized
  source 1..22: mol_type = other DNA
ttgcaaacacagcaaacacaac

SEQ ID NO: 137729 - DNA, 22 bp, synthetic construct
  misc_feature 1..22: note = chemically synthesized
  source 1..22: mol_type = other DNA
tgcaaacacagcaaacacaacg

SEQ ID NO: 137730 - DNA, 22 bp, synthetic construct
  misc_feature 1..22: note = chemically synthesized
  source 1..22: mol_type = other DNA
gcaaacacagcaaacacaacga

SEQ ID NO: 137731 - DNA, 22 bp, synthetic construct
  misc_feature 1..22: note = chemically synthesized
  source 1..22: mol_type = other DNA
caaacacagcaaacacaacgac

SEQ ID NO: 137732 - DNA, 22 bp, synthetic construct
  misc_feature 1..22: note = chemically synthesized
  source 1..22: mol_type = other DNA
atgtgaaattgtctattgtcaa

SEQ ID NO: 137733 - DNA, 22 bp, synthetic construct
  misc_feature 1..22: note = chemically synthesized
  source 1..22: mol_type = other DNA
tctattgtcaatttatgggaaa

SEQ ID NO: 137734 - DNA, 22 bp, synthetic construct
  misc_feature 1..22: note = chemically synthesized
  source 1..22: mol_type = other DNA
ttgtcaatttatgggaaaacaa

SEQ ID NO: 137735 - DNA, 22 bp, synthetic construct
  misc_feature 1..22: note = chemically synthesized
  source 1..22: mol_type = other DNA
tcaatttatgggaaaacaagta

SEQ ID NO: 137736 - DNA, 22 bp, synthetic construct
  misc_feature 1..22: note = chemically synthesized
  source 1..22: mol_type = other DNA
atgggaaaacaagtatgtactt

SEQ ID NO: 137737 - DNA, 22 bp, synthetic construct
  misc_feature 1..22: note = chemically synthesized
  source 1..22: mol_type = other DNA
tgggaaaacaagtatgtacttt

SEQ ID NO: 137738 - DNA, 22 bp, synthetic construct
  misc_feature 1..22: note = chemically synthesized
  source 1..22: mol_type = other DNA
tttctactaagccattgaaaca

SEQ ID NO: 137739 - DNA, 22 bp, synthetic construct
  misc_feature 1..22: note = chemically synthesized
  source 1..22: mol_type = other DNA
ttctactaagccattgaaacag

SEQ ID NO: 137740 - DNA, 22 bp, synthetic construct
  misc_feature 1..22: note = chemically synthesized
  source 1..22: mol_type = other DNA
tctactaagccattgaaacagg

SEQ ID NO: 137741 - DNA, 22 bp, synthetic construct
  misc_feature 1..22: note = chemically synthesized
  source 1..22: mol_type = other DNA
ctactaagccattgaaacagga

SEQ ID NO: 137742 - DNA, 22 bp, synthetic construct
  misc_feature 1..22: note = chemically synthesized
  source 1..22: mol_type = other DNA
tactaagccattgaaacaggaa

SEQ ID NO: 137743 - DNA, 22 bp, synthetic construct
  misc_feature 1..22: note = chemically synthesized
  source 1..22: mol_type = other DNA
ctaagccattgaaacaggaata

SEQ ID NO: 137744 - DNA, 22 bp, synthetic construct
  misc_feature 1..22: note = chemically synthesized
  source 1..22: mol_type = other DNA
agccattgaaacaggaataaca

SEQ ID NO: 137745 - DNA, 22 bp, synthetic construct
  misc_feature 1..22: note = chemically synthesized
  source 1..22: mol_type = other DNA
aaacaggaataacagaacaaga

SEQ ID NO: 137746 - DNA, 22 bp, synthetic construct
  misc_feature 1..22: note = chemically synthesized
  source 1..22: mol_type = other DNA
aaagaatacattttccgaaatt

SEQ ID NO: 137747 - DNA, 22 bp, synthetic construct
  misc_feature 1..22: note = chemically synthesized
  source 1..22: mol_type = other DNA
tccgaaattacttgagtattat

SEQ ID NO: 137748 - DNA, 22 bp, synthetic construct
  misc_feature 1..22: note = chemically synthesized
  source 1..22: mol_type = other DNA
ccgaaattacttgagtattata

SEQ ID NO: 137749 - DNA, 22 bp, synthetic construct
  misc_feature 1..22: note = chemically synthesized
  source 1..22: mol_type = other DNA
cgaaattacttgagtattatac

SEQ ID NO: 137750 - DNA, 22 bp, synthetic construct
  misc_feature 1..22: note = chemically synthesized
  source 1..22: mol_type = other DNA
cttgagtattatacaaagacaa

SEQ ID NO: 137751 - DNA, 22 bp, synthetic construct
  misc_feature 1..22: note = chemically synthesized
  source 1..22: mol_type = other DNA
gagtattatacaaagacaagca

SEQ ID NO: 137752 - DNA, 22 bp, synthetic construct
  misc_feature 1..22: note = chemically synthesized
  source 1..22: mol_type = other DNA
agtattatacaaagacaagcac

SEQ ID NO: 137753 - DNA, 22 bp, synthetic construct
  misc_feature 1..22: note = chemically synthesized
  source 1..22: mol_type = other DNA
tacaaagacaagcacgtggacc

SEQ ID NO: 137754 - DNA, 22 bp, synthetic construct
  misc_feature 1..22: note = chemically synthesized
  source 1..22: mol_type = other DNA
ggaggagggttattgtccatga

SEQ ID NO: 137755 - DNA, 22 bp, synthetic construct
  misc_feature 1..22: note = chemically synthesized
  source 1..22: mol_type = other DNA
ttgtccatgactggtgtgtgga

SEQ ID NO: 137756 - DNA, 22 bp, synthetic construct
  misc_feature 1..22: note = chemically synthesized
  source 1..22: mol_type = other DNA
tccatgactggtgtgtggagac

SEQ ID NO: 137757 - DNA, 22 bp, synthetic construct
  misc_feature 1..22: note = chemically synthesized
  source 1..22: mol_type = other DNA
gtgtgtggagacaaatgcaggt

SEQ ID NO: 137758 - DNA, 22 bp, synthetic construct
  misc_feature 1..22: note = chemically synthesized
  source 1..22: mol_type = other DNA
ataatagatgggatggcatcta

SEQ ID NO: 137759 - DNA, 22 bp, synthetic construct
  misc_feature 1..22: note = chemically synthesized
  source 1..22: mol_type = other DNA
taatagatgggatggcatctag

SEQ ID NO: 137760 - DNA, 22 bp, synthetic construct
  misc_feature 1..22: note = chemically synthesized
  source 1..22: mol_type = other DNA
gcgcaatgactttgccatcact

SEQ ID NO: 137761 - DNA, 22 bp, synthetic construct
  misc_feature 1..22: note = chemically synthesized
  source 1..22: mol_type = other DNA
tgccatcacttttagagagctc

SEQ ID NO: 137762 - DNA, 22 bp, synthetic construct
  misc_feature 1..22: note = chemically synthesized
  source 1..22: mol_type = other DNA
gccatcacttttagagagctct

SEQ ID NO: 137763 - DNA, 22 bp, synthetic construct
  misc_feature 1..22: note = chemically synthesized
  source 1..22: mol_type = other DNA
ccatcacttttagagagctctt

SEQ ID NO: 137764 - DNA, 22 bp, synthetic construct
  misc_feature 1..22: note = chemically synthesized
  source 1..22: mol_type = other DNA
ttagagagctcttggggacccc

SEQ ID NO: 137765 - DNA, 22 bp, synthetic construct
  misc_feature 1..22: note = chemically synthesized
  source 1..22: mol_type = other DNA
tagagagctcttggggacccca

SEQ ID NO: 137766 - DNA, 22 bp, synthetic construct
  misc_feature 1..22: note = chemically synthesized
  source 1..22: mol_type = other DNA
agagagctcttggggaccccag

SEQ ID NO: 137767 - DNA, 22 bp, synthetic construct
  misc_feature 1..22: note = chemically synthesized
  source 1..22: mol_type = other DNA
gagagctcttggggaccccagt

SEQ ID NO: 137768 - DNA, 22 bp, synthetic construct
  misc_feature 1..22: note = chemically synthesized
  source 1..22: mol_type = other DNA
ttggggaccccagtacacaaga

SEQ ID NO: 137769 - DNA, 22 bp, synthetic construct
  misc_feature 1..22: note = chemically synthesized
  source 1..22: mol_type = other DNA
ggggaccccagtacacaagagg

SEQ ID NO: 137770 - DNA, 22 bp, synthetic construct
  misc_feature 1..22: note = chemically synthesized
  source 1..22: mol_type = other DNA
gggaccccagtacacaagaggg

SEQ ID NO: 137771 - DNA, 22 bp, synthetic construct
  misc_feature 1..22: note = chemically synthesized
  source 1..22: mol_type = other DNA
attctttttcttagtgtgagaa

SEQ ID NO: 137772 - DNA, 22 bp, synthetic construct
  misc_feature 1..22: note = chemically synthesized
  source 1..22: mol_type = other DNA
tttttcttagtgtgagaataag

SEQ ID NO: 137773 - DNA, 22 bp, synthetic construct
  misc_feature 1..22: note = chemically synthesized
  source 1..22: mol_type = other DNA
tttcttagtgtgagaataagaa

SEQ ID NO: 137774 - DNA, 22 bp, synthetic construct
  misc_feature 1..22: note = chemically synthesized
  source 1..22: mol_type = other DNA
ttcttagtgtgagaataagaat

SEQ ID NO: 137775 - DNA, 22 bp, synthetic construct
  misc_feature 1..22: note = chemically synthesized
  source 1..22: mol_type = other DNA
tcttagtgtgagaataagaata

SEQ ID NO: 137776 - DNA, 22 bp, synthetic construct
  misc_feature 1..22: note = chemically synthesized
  source 1..22: mol_type = other DNA
cttagtgtgagaataagaatag

SEQ ID NO: 137777 - DNA, 22 bp, synthetic construct
  misc_feature 1..22: note = chemically synthesized
  source 1..22: mol_type = other DNA
ttagtgtgagaataagaatagc

SEQ ID NO: 137778 - DNA, 22 bp, synthetic construct
  misc_feature 1..22: note = chemically synthesized
  source 1..22: mol_type = other DNA
agtgtgagaataagaatagcca

SEQ ID NO: 137779 - DNA, 22 bp, synthetic construct
  misc_feature 1..22: note = chemically synthesized
  source 1..22: mol_type = other DNA
gtgtgagaataagaatagccat

SEQ ID NO: 137780 - DNA, 22 bp, synthetic construct
  misc_feature 1..22: note = chemically synthesized
  source 1..22: mol_type = other DNA
agtttatagacaatgagccctt

SEQ ID NO: 137781 - DNA, 22 bp, synthetic construct
  misc_feature 1..22: note = chemically synthesized
  source 1..22: mol_type = other DNA
atagacaatgagcccttttctc

SEQ ID NO: 137782 - DNA, 22 bp, synthetic construct
  misc_feature 1..22: note = chemically synthesized
  source 1..22: mol_type = other DNA
tagacaatgagcccttttctct

SEQ ID NO: 137783 - DNA, 22 bp, synthetic construct
  misc_feature 1..22: note = chemically synthesized
  source 1..22: mol_type = other DNA
ttctctctcccactcagcagct

SEQ ID NO: 137784 - DNA, 22 bp, synthetic construct
  misc_feature 1..22: note = chemically synthesized
  source 1..22: mol_type = other DNA
tctctctcccactcagcagcta

SEQ ID NO: 137785 - DNA, 22 bp, synthetic construct
  misc_feature 1..22: note = chemically synthesized
  source 1..22: mol_type = other DNA
ctctctcccactcagcagctat

SEQ ID NO: 137786 - DNA, 22 bp, synthetic construct
  misc_feature 1..22: note = chemically synthesized
  source 1..22: mol_type = other DNA
tctctcccactcagcagctatg

SEQ ID NO: 137787 - DNA, 22 bp, synthetic construct
  misc_feature 1..22: note = chemically synthesized
  source 1..22: mol_type = other DNA
tctcccactcagcagctatgag

SEQ ID NO: 137788 - DNA, 22 bp, synthetic construct
  misc_feature 1..22: note = chemically synthesized
  source 1..22: mol_type = other DNA
tcccactcagcagctatgagat

SEQ ID NO: 137789 - DNA, 22 bp, synthetic construct
  misc_feature 1..22: note = chemically synthesized
  source 1..22: mol_type = other DNA
ccactcagcagctatgagatgg

SEQ ID NO: 137790 - DNA, 22 bp, synthetic construct
  misc_feature 1..22: note = chemically synthesized
  source 1..22: mol_type = other DNA
agcagctatgagatggcttgcc

SEQ ID NO: 137791 - DNA, 22 bp, synthetic construct
  misc_feature 1..22: note = chemically synthesized
  source 1..22: mol_type = other DNA
tgagatggcttgccctgcctct

SEQ ID NO: 137792 - DNA, 22 bp, synthetic construct
  misc_feature 1..22: note = chemically synthesized
  source 1..22: mol_type = other DNA
gccctgcctctctactaggctg

SEQ ID NO: 137793 - DNA, 22 bp, synthetic construct
  misc_feature 1..22: note = chemically synthesized
  source 1..22: mol_type = other DNA
ccctgcctctctactaggctga

SEQ ID NO: 137794 - DNA, 22 bp, synthetic construct
  misc_feature 1..22: note = chemically synthesized
  source 1..22: mol_type = other DNA
cctctctactaggctgactcac

SEQ ID NO: 137795 - DNA, 22 bp, synthetic construct
  misc_feature 1..22: note = chemically synthesized
  source 1..22: mol_type = other DNA
tctactaggctgactcactcca

SEQ ID NO: 137796 - DNA, 22 bp, synthetic construct
  misc_feature 1..22: note = chemically synthesized
  source 1..22: mol_type = other DNA
tactaggctgactcactccaag

SEQ ID NO: 137797 - DNA, 22 bp, synthetic construct
  misc_feature 1..22: note = chemically synthesized
  source 1..22: mol_type = other DNA
ctaggctgactcactccaaggc

SEQ ID NO: 137798 - DNA, 22 bp, synthetic construct
  misc_feature 1..22: note = chemically synthesized
  source 1..22: mol_type = other DNA
ggctgactcactccaaggccca

SEQ ID NO: 137799 - DNA, 22 bp, synthetic construct
  misc_feature 1..22: note = chemically synthesized
  source 1..22: mol_type = other DNA
actcactccaaggcccagcaat

SEQ ID NO: 137800 - DNA, 22 bp, synthetic construct
  misc_feature 1..22: note = chemically synthesized
  source 1..22: mol_type = other DNA
actccaaggcccagcaatgggc

SEQ ID NO: 137801 - DNA, 22 bp, synthetic construct
  misc_feature 1..22: note = chemically synthesized
  source 1..22: mol_type = other DNA
caaggcccagcaatgggcaggg

SEQ ID NO: 137802 - DNA, 22 bp, synthetic construct
  misc_feature 1..22: note = chemically synthesized
  source 1..22: mol_type = other DNA
tgtcagggctttgatagcacta

SEQ ID NO: 137803 - DNA, 22 bp, synthetic construct
  misc_feature 1..22: note = chemically synthesized
  source 1..22: mol_type = other DNA
tcagggctttgatagcactatc

SEQ ID NO: 137804 - DNA, 22 bp, synthetic construct
  misc_feature 1..22: note = chemically synthesized
  source 1..22: mol_type = other DNA
tgatagcactatctgcagagcc

SEQ ID NO: 137805 - DNA, 22 bp, synthetic construct
  misc_feature 1..22: note = chemically synthesized
  source 1..22: mol_type = other DNA
gatagcactatctgcagagcca

SEQ ID NO: 137806 - DNA, 22 bp, synthetic construct
  misc_feature 1..22: note = chemically synthesized
  source 1..22: mol_type = other DNA
atagcactatctgcagagccag

SEQ ID NO: 137807 - DNA, 22 bp, synthetic construct
  misc_feature 1..22: note = chemically synthesized
  source 1..22: mol_type = other DNA
tctgcagagccagggccgagaa

SEQ ID NO: 137808 - DNA, 22 bp, synthetic construct
  misc_feature 1..22: note = chemically synthesized
  source 1..22: mol_type = other DNA
cagagccagggccgagaagggg

SEQ ID NO: 137809 - DNA, 22 bp, synthetic construct
  misc_feature 1..22: note = chemically synthesized
  source 1..22: mol_type = other DNA
cagagactctccctcccattcc

SEQ ID NO: 137810 - DNA, 22 bp, synthetic construct
  misc_feature 1..22: note = chemically synthesized
  source 1..22: mol_type = other DNA
tccctcccattcccgagcaggg

SEQ ID NO: 137811 - DNA, 22 bp, synthetic construct
  misc_feature 1..22: note = chemically synthesized
  source 1..22: mol_type = other DNA
cctcccattcccgagcagggtt

SEQ ID NO: 137812 - DNA, 22 bp, synthetic construct
  misc_feature 1..22: note = chemically synthesized
  source 1..22: mol_type = other DNA
ccattcccgagcagggtttgct

SEQ ID NO: 137813 - DNA, 22 bp, synthetic construct
  misc_feature 1..22: note = chemically synthesized
  source 1..22: mol_type = other DNA
ccgagcagggtttgcttattta

SEQ ID NO: 137814 - DNA, 22 bp, synthetic construct
  misc_feature 1..22: note = chemically synthesized
  source 1..22: mol_type = other DNA
gcttatttatgcatttaaatga

SEQ ID NO: 137815 - DNA, 22 bp, synthetic construct
  misc_feature 1..22: note = chemically synthesized
  source 1..22: mol_type = other DNA
cttatttatgcatttaaatgat

SEQ ID NO: 137816 - DNA, 22 bp, synthetic construct
  misc_feature 1..22: note = chemically synthesized
  source 1..22: mol_type = other DNA
atttatgcatttaaatgatata

SEQ ID NO: 137817 - DNA, 22 bp, synthetic construct
  misc_feature 1..22: note = chemically synthesized
  source 1..22: mol_type = other DNA
tttatgcatttaaatgatatat

SEQ ID NO: 137818 - DNA, 22 bp, synthetic construct
  misc_feature 1..22: note = chemically synthesized
  source 1..22: mol_type = other DNA
atgcatttaaatgatatattta

SEQ ID NO: 137819 - DNA, 22 bp, synthetic construct
  misc_feature 1..22: note = chemically synthesized
  source 1..22: mol_type = other DNA
tgcatttaaatgatatatttat

SEQ ID NO: 137820 - DNA, 22 bp, synthetic construct
  misc_feature 1..22: note = chemically synthesized
  source 1..22: mol_type = other DNA
aaatgatatatttattttaaaa

SEQ ID NO: 137821 - DNA, 22 bp, synthetic construct
  misc_feature 1..22: note = chemically synthesized
  source 1..22: mol_type = other DNA
aatgatatatttattttaaaag

SEQ ID NO: 137822 - DNA, 22 bp, synthetic construct
  misc_feature 1..22: note = chemically synthesized
  source 1..22: mol_type = other DNA
attttaaaagaaataacaggag

SEQ ID NO: 137823 - DNA, 22 bp, synthetic construct
  misc_feature 1..22: note = chemically synthesized
  source 1..22: mol_type = other DNA
ttttaaaagaaataacaggaga

SEQ ID NO: 137824 - DNA, 22 bp, synthetic construct
  misc_feature 1..22: note = chemically synthesized
  source 1..22: mol_type = other DNA
taaaagaaataacaggagactg

SEQ ID NO: 137825 - DNA, 22 bp, synthetic construct
  misc_feature 1..22: note = chemically synthesized
  source 1..22: mol_type = other DNA
aaaagaaataacaggagactgc

SEQ ID NO: 137826 - DNA, 22 bp, synthetic construct
  misc_feature 1..22: note = chemically synthesized
  source 1..22: mol_type = other DNA
aaagaaataacaggagactgcc

SEQ ID NO: 137827 - DNA, 22 bp, synthetic construct
  misc_feature 1..22: note = chemically synthesized
  source 1..22: mol_type = other DNA
cccagccctggctgtgacatgg

SEQ ID NO: 137828 - DNA, 22 bp, synthetic construct
  misc_feature 1..22: note = chemically synthesized
  source 1..22: mol_type = other DNA
gctgtgacatggaaactatgta

SEQ ID NO: 137829 - DNA, 22 bp, synthetic construct
  misc_feature 1..22: note = chemically synthesized
  source 1..22: mol_type = other DNA
tgacatggaaactatgtagaat

SEQ ID NO: 137830 - DNA, 22 bp, synthetic construct
  misc_feature 1..22: note = chemically synthesized
  source 1..22: mol_type = other DNA
tgtagaatattttgggttccat

SEQ ID NO: 137831 - DNA, 22 bp, synthetic construct
  misc_feature 1..22: note = chemically synthesized
  source 1..22: mol_type = other DNA
tgggttccatttttttttcctt

SEQ ID NO: 137832 - DNA, 22 bp, synthetic construct
  misc_feature 1..22: note = chemically synthesized
  source 1..22: mol_type = other DNA
gggttccatttttttttccttc

SEQ ID NO: 137833 - DNA, 22 bp, synthetic construct
  misc_feature 1..22: note = chemically synthesized
  source 1..22: mol_type = other DNA
ggttccatttttttttccttct

SEQ ID NO: 137834 - DNA, 22 bp, synthetic construct
  misc_feature 1..22: note = chemically synthesized
  source 1..22: mol_type = other DNA
catttttttttccttctttcag

SEQ ID NO: 137835 - DNA, 22 bp, synthetic construct
  misc_feature 1..22: note = chemically synthesized
  source 1..22: mol_type = other DNA
ttttttccttctttcagttaga

SEQ ID NO: 137836 - DNA, 22 bp, synthetic construct
  misc_feature 1..22: note = chemically synthesized
  source 1..22: mol_type = other DNA
tttttccttctttcagttagag

SEQ ID NO: 137837 - DNA, 22 bp, synthetic construct
  misc_feature 1..22: note = chemically synthesized
  source 1..22: mol_type = other DNA
ttttccttctttcagttagagg

SEQ ID NO: 137838 - DNA, 22 bp, synthetic construct
  misc_feature 1..22: note = chemically synthesized
  source 1..22: mol_type = other DNA
tttccttctttcagttagagga

SEQ ID NO: 137839 - DNA, 22 bp, synthetic construct
  misc_feature 1..22: note = chemically synthesized
  source 1..22: mol_type = other DNA
ttccttctttcagttagaggaa

SEQ ID NO: 137840 - DNA, 22 bp, synthetic construct
  misc_feature 1..22: note = chemically synthesized
  source 1..22: mol_type = other DNA
tccttctttcagttagaggaaa

SEQ ID NO: 137841 - DNA, 22 bp, synthetic construct
  misc_feature 1..22: note = chemically synthesized
  source 1..22: mol_type = other DNA
ccttctttcagttagaggaaaa

SEQ ID NO: 137842 - DNA, 22 bp, synthetic construct
  misc_feature 1..22: note = chemically synthesized
  source 1..22: mol_type = other DNA
cttctttcagttagaggaaaag

SEQ ID NO: 137843 - DNA, 22 bp, synthetic construct
  misc_feature 1..22: note = chemically synthesized
  source 1..22: mol_type = other DNA
ctttcagttagaggaaaagggg

SEQ ID NO: 137844 - DNA, 22 bp, synthetic construct
  misc_feature 1..22: note = chemically synthesized
  source 1..22: mol_type = other DNA
tttcagttagaggaaaaggggc

SEQ ID NO: 137845 - DNA, 22 bp, synthetic construct
  misc_feature 1..22: note = chemically synthesized
  source 1..22: mol_type = other DNA
tcagttagaggaaaaggggctc

SEQ ID NO: 137846 - DNA, 22 bp, synthetic construct
  misc_feature 1..22: note = chemically synthesized
  source 1..22: mol_type = other DNA
cagttagaggaaaaggggctca

SEQ ID NO: 137847 - DNA, 22 bp, synthetic construct
  misc_feature 1..22: note = chemically synthesized
  source 1..22: mol_type = other DNA
agttagaggaaaaggggctcac

SEQ ID NO: 137848 - DNA, 22 bp, synthetic construct
  misc_feature 1..22: note = chemically synthesized
  source 1..22: mol_type = other DNA
gaggaaaaggggctcactgcac

SEQ ID NO: 137849 - DNA, 22 bp, synthetic construct
  misc_feature 1..22: note = chemically synthesized
  source 1..22: mol_type = other DNA
actgcacatacactagacagaa

SEQ ID NO: 137850 - DNA, 22 bp, synthetic construct
  misc_feature 1..22: note = chemically synthesized
  source 1..22: mol_type = other DNA
cacatacactagacagaaagtc

SEQ ID NO: 137851 - DNA, 22 bp, synthetic construct
  misc_feature 1..22: note = chemically synthesized
  source 1..22: mol_type = other DNA
gacagaaagtcaggagctttga

SEQ ID NO: 137852 - DNA, 22 bp, synthetic construct
  misc_feature 1..22: note = chemically synthesized
  source 1..22: mol_type = other DNA
tgaatccaagcctgatcatttc
